United States Patent Application Publication US 2016/0319361 A1 - sequence listing, part 2

SEQ ID NO: 21743 - DNA, 30 bp, Artificial Sequence
  Synthetic oligonucleotide
gagacaatcgaacctccaacatcgaatggg

SEQ ID NO: 21744 - DNA, 30 bp, Artificial Sequence
  Synthetic oligonucleotide
taccagcgaagtatacgcgactaaactggg

SEQ ID NO: 21745 - DNA, 30 bp, Artificial Sequence
  Synthetic oligonucleotide
acaacgtgcatacgtaaggtatcaagtggg

SEQ ID NO: 21746 - DNA, 30 bp, Artificial Sequence
  Synthetic oligonucleotide
aggcgtatagtacagcacatcaccggtggg

SEQ ID NO: 21747 - DNA, 30 bp, Artificial Sequence
  Synthetic oligonucleotide
tgatgagcctgagatctagcgaagtttggg

SEQ ID NO: 21748 - DNA, 30 bp, Artificial Sequence
  Synthetic oligonucleotide
agggactatggcaggcatattgaacaatgg

SEQ ID NO: 21749 - DNA, 30 bp, Artificial Sequence
  Synthetic oligonucleotide
agatgggggttatgcgtactaggccgatgg

SEQ ID NO: 21750 - DNA, 30 bp, Artificial Sequence
  Synthetic oligonucleotide
acaaacgaatggccgtcgattaacggatgg

SEQ ID NO: 21751 - DNA, 30 bp, Artificial Sequence
  Synthetic oligonucleotide
tatccgtctgatgcccgtttacccggatgg

SEQ ID NO: 21752 - DNA, 30 bp, Artificial Sequence
  Synthetic oligonucleotide
cgttaaacaaaattaccgcacaccatatgg

SEQ ID NO: 21753 - DNA, 30 bp, Artificial Sequence
  Synthetic oligonucleotide
ccgcacgggtgaattaaggcatcgaactgg

SEQ ID NO: 21754 - DNA, 30 bp, Artificial Sequence
  Synthetic oligonucleotide
agaaaaaacgtcgtaaaagtagtcagctgg

SEQ ID NO: 21755 - DNA, 30 bp, Artificial Sequence
  Synthetic oligonucleotide
cgagcatgacaagtcgtgtatagtagctgg

SEQ ID NO: 21756 - DNA, 30 bp, Artificial Sequence
  Synthetic oligonucleotide
aggtcgagaaaggtcatactgaacggctgg

SEQ ID NO: 21757 - DNA, 30 bp, Artificial Sequence
  Synthetic oligonucleotide
aacattagcgaaagtccacgagcgtgctgg

SEQ ID NO: 21758 - DNA, 30 bp, Artificial Sequence
  Synthetic oligonucleotide
cctcagttggtacaaaacagataaatctgg

SEQ ID NO: 21759 - DNA, 30 bp, Artificial Sequence
  Synthetic oligonucleotide
cgtcaacgacgaacgcggaggacactctgg

SEQ ID NO: 21760 - DNA, 30 bp, Artificial Sequence
  Synthetic oligonucleotide
agtttaaaggggatgagaataagccagtgg

SEQ ID NO: 21761 - DNA, 30 bp, Artificial Sequence
  Synthetic oligonucleotide
acttagcggcaacaaacatattgggagtgg

SEQ ID NO: 21762 - DNA, 30 bp, Artificial Sequence
  Synthetic oligonucleotide
atacgaagcgaagcggtgcgtcatatgtgg

SEQ ID NO: 21763 - DNA, 30 bp, Artificial Sequence
  Synthetic oligonucleotide
acaagggacggaaccgcgcttgctgtgtgg

SEQ ID NO: 21764 - DNA, 30 bp, Artificial Sequence
  Synthetic oligonucleotide
gcgcgaaaggttgcgacagattgggattgg

SEQ ID NO: 21765 - DNA, 30 bp, Artificial Sequence
  Synthetic oligonucleotide
gcgtcccagtataaacataacaagtattgg

SEQ ID NO: 21766 - DNA, 30 bp, Artificial Sequence
  Synthetic oligonucleotide
aggttgcgatacctctcatgaaacagttgg

SEQ ID NO: 21767 - DNA, 30 bp, Artificial Sequence
  Synthetic oligonucleotide
tgcgtcaaggcagtgggtagtaccagttgg

SEQ ID NO: 21768 - DNA, 30 bp, Artificial Sequence
  Synthetic oligonucleotide
gcgcgaaagcgagggtgcaattgcagttgg

SEQ ID NO: 21769 - DNA, 30 bp, Artificial Sequence
  Synthetic oligonucleotide
cggagcaaagtagagaattgccgtatttgg

SEQ ID NO: 21770 - DNA, 30 bp, Artificial Sequence
  Synthetic oligonucleotide
cgcgacgaccttgaagcgattaccgtttgg

SEQ ID NO: 21771 - DNA, 30 bp, Artificial Sequence
  Synthetic oligonucleotide
acagacaaggcgtatacacactcagaaatg

SEQ ID NO: 21772 - DNA, 30 bp, Artificial Sequence
  Synthetic oligonucleotide
cctcggataaggaatggtactctcgcaatg

SEQ ID NO: 21773 - DNA, 30 bp, Artificial Sequence
  Synthetic oligonucleotide
agtgaaccaggtgctcagagtacccgaatg

SEQ ID NO: 21774 - DNA, 30 bp, Artificial Sequence
  Synthetic oligonucleotide
ccaaagcgtgtacgagaactgatgcgaatg

SEQ ID NO: 21775 - DNA, 30 bp, Artificial Sequence
  Synthetic oligonucleotide
agagaggtatcggtataagtatattgaatg

SEQ ID NO: 21776 - DNA, 30 bp, Artificial Sequence
  Synthetic oligonucleotide
ccaggggataaactcctagtagcactaatg

SEQ ID NO: 21777 - DNA, 30 bp, Artificial Sequence
  Synthetic oligonucleotide
cgaaacggattcatatcgaccttgcacatg

SEQ ID NO: 21778 - DNA, 37 bp, Artificial Sequence
  Synthetic oligonucleotide
gtaccaggcgcgatatttaaaatcaatgttaaccatg

SEQ ID NO: 21779 - DNA, 30 bp, Artificial Sequence
  Synthetic oligonucleotide
atggtacgcggagggcgcaagtgccagatg

SEQ ID NO: 21780 - DNA, 30 bp, Artificial Sequence
  Synthetic oligonucleotide
cgatgaattgacataggtatttgccagatg

SEQ ID NO: 21781 - DNA, 30 bp, Artificial Sequence
  Synthetic oligonucleotide
cgctcagcagggccagtagatgctcagatg

SEQ ID NO: 21782 - DNA, 30 bp, Artificial Sequence
  Synthetic oligonucleotide
aggatgcccatgcttggtaaaaaatagatg

SEQ ID NO: 21783 - DNA, 30 bp, Artificial Sequence
  Synthetic oligonucleotide
ttggagacgagcgatgaggattgcacgatg

SEQ ID NO: 21784 - DNA, 30 bp, Artificial Sequence
  Synthetic oligonucleotide
ggatcaaggatgttcacgagtagtacgatg

SEQ ID NO: 21785 - DNA, 30 bp, Artificial Sequence
  Synthetic oligonucleotide
acaggcacgatacggtacacgtgaccgatg

SEQ ID NO: 21786 - DNA, 30 bp, Artificial Sequence
  Synthetic oligonucleotide
ccacggaattaagggtgcaggggtgcgatg

SEQ ID NO: 21787 - DNA, 30 bp, Artificial Sequence
  Synthetic oligonucleotide
cgtgacgacgacagggatttactaaggatg

SEQ ID NO: 21788 - DNA, 30 bp, Artificial Sequence
  Synthetic oligonucleotide
ccgaagatgcgcaagttgggcctacggatg

SEQ ID NO: 21789 - DNA, 30 bp, Artificial Sequence
  Synthetic oligonucleotide
aacgagtgcggcacaggaagttatcggatg

SEQ ID NO: 21790 - DNA, 30 bp, Artificial Sequence
  Synthetic oligonucleotide
gacgatacttagcggaagggcgactggatg

SEQ ID NO: 21791 - DNA, 30 bp, Artificial Sequence
  Synthetic oligonucleotide
cgatgagggatccgtagaaagaaatatatg

SEQ ID NO: 21792 - DNA, 29 bp, Artificial Sequence
  Synthetic oligonucleotide
caagagtcgttagagtaagcaacaaactg

SEQ ID NO: 21793 - DNA, 30 bp, Artificial Sequence
  Synthetic oligonucleotide
gacccaaactatgaaaatgatcggaaactg

SEQ ID NO: 21794 - DNA, 30 bp, Artificial Sequence
  Synthetic oligonucleotide
cagagagaccaataggtgtcgggggaactg

SEQ ID NO: 21795 - DNA, 30 bp, Artificial Sequence
  Synthetic oligonucleotide
cgcgtggatggaaagttacgaccatgactg

SEQ ID NO: 21796 - DNA, 30 bp, Artificial Sequence
  Synthetic oligonucleotide
tagatgaccgacgatatatggaaatacctg

SEQ ID NO: 21797 - DNA, 30 bp, Artificial Sequence
  Synthetic oligonucleotide
tgaacgtccaacaaataaagacccagcctg

SEQ ID NO: 21798 - DNA, 30 bp, Artificial Sequence
  Synthetic oligonucleotide
cagggccgtacgaggagcatatccagcctg

SEQ ID NO: 21799 - DNA, 30 bp, Artificial Sequence
  Synthetic oligonucleotide
ctgagcgagtggcagaatagtcaagtcctg

SEQ ID NO: 21800 - DNA, 30 bp, Artificial Sequence
  Synthetic oligonucleotide
aggtgagggagatacaacttgctggtcctg

SEQ ID NO: 21801 - DNA, 30 bp, Artificial Sequence
  Synthetic oligonucleotide
acgtgacgggggcgtaaatggaaagatctg

SEQ ID NO: 21802 - DNA, 30 bp, Artificial Sequence
  Synthetic oligonucleotide
gacgtaccagagttagttgcgcaccctctg

SEQ ID NO: 21803 - DNA, 30 bp, Artificial Sequence
  Synthetic oligonucleotide
ggcatgaaaatctacgaaagcacaaaagtg

SEQ ID NO: 21804 - DNA, 30 bp, Artificial Sequence
  Synthetic oligonucleotide
actgtcagagtcagcagagccccaaaagtg

SEQ ID NO: 21805 - DNA, 30 bp, Artificial Sequence
  Synthetic oligonucleotide
gtgtgactgggcaagggttgaaggaaagtg

SEQ ID NO: 21806 - DNA, 30 bp, Artificial Sequence
  Synthetic oligonucleotide
cgacacaagagagtgatacgttattcagtg

SEQ ID NO: 21807 - DNA, 30 bp, Artificial Sequence
  Synthetic oligonucleotide
tgaacctgggtatttggcgagccgagagtg

SEQ ID NO: 21808 - DNA, 30 bp, Artificial Sequence
  Synthetic oligonucleotide
acattaatgggactactcaaagaacgagtg

SEQ ID NO: 21809 - DNA, 30 bp, Artificial Sequence
  Synthetic oligonucleotide
tgttggactgcgagcggaaaaacgtgagtg

SEQ ID NO: 21810 - DNA, 30 bp, Artificial Sequence
  Synthetic oligonucleotide
taagatgggggcagtcggcgataactagtg

SEQ ID NO: 21811 - DNA, 30 bp, Artificial Sequence
  Synthetic oligonucleotide
acggagaacaaggtgctgtcacggaacgtg

SEQ ID NO: 21812 - DNA, 30 bp, Artificial Sequence
  Synthetic oligonucleotide
accgcaggatagaaagttaaaaagcccgtg

SEQ ID NO: 21813 - DNA, 30 bp, Artificial Sequence
  Synthetic oligonucleotide
ggcagtccagtgacagcttgcaaaggcgtg

SEQ ID NO: 21814 - DNA, 30 bp, Artificial Sequence
  Synthetic oligonucleotide
cggaaaaataattgtaatgacaaggtcgtg

SEQ ID NO: 21815 - DNA, 30 bp, Artificial Sequence
  Synthetic oligonucleotide
tcacgtcgagtcggcaagagcacgtaggtg

SEQ ID NO: 21816 - DNA, 30 bp, Artificial Sequence
  Synthetic oligonucleotide
ccagattaaaatggcatattcgatagggtg

SEQ ID NO: 21817 - DNA, 30 bp, Artificial Sequence
  Synthetic oligonucleotide
ggcgggacatacgagtatatatagcgggtg

SEQ ID NO: 21818 - DNA, 30 bp, Artificial Sequence
  Synthetic oligonucleotide
cacgtgtaggcaagtatgcctcagatggtg

SEQ ID NO: 21819 - DNA, 30 bp, Artificial Sequence
  Synthetic oligonucleotide
gcgtgcgagggaggaggacgctcagtggtg

SEQ ID NO: 21820 - DNA, 30 bp, Artificial Sequence
  Synthetic oligonucleotide
gtaggaggatacgggagacgaggtcatgtg

SEQ ID NO: 21821 - DNA, 30 bp, Artificial Sequence
  Synthetic oligonucleotide
cggggacagcgattcgcaagcgcaactgtg

SEQ ID NO: 21822 - DNA, 30 bp, Artificial Sequence
  Synthetic oligonucleotide
cagagtacagagtaggggtgatgacaattg

SEQ ID NO: 21823 - DNA, 30 bp, Artificial Sequence
  Synthetic oligonucleotide
gaaaggagagcgatagaaaggaatgcattg

SEQ ID NO: 21824 - DNA, 30 bp, Artificial Sequence
  Synthetic oligonucleotide
cgagtggtgggataggagcatataagattg

SEQ ID NO: 21825 - DNA, 30 bp, Artificial Sequence
  Synthetic oligonucleotide
gactgtcacccaagacaagacccgaacttg

SEQ ID NO: 21826 - DNA, 30 bp, Artificial Sequence
  Synthetic oligonucleotide
ggaagaagtgggacgaaagaatcgagcttg

SEQ ID NO: 21827 - DNA, 30 bp, Artificial Sequence
  Synthetic oligonucleotide
gggagtaatcatgcaactacaagaatgttg

SEQ ID NO: 21828 - DNA, 30 bp, Artificial Sequence
  Synthetic oligonucleotide
gcagggaaacgcctagctcagaatatgttg

SEQ ID NO: 21829 - DNA, 30 bp, Artificial Sequence
  Synthetic oligonucleotide
cgatgttctcctgagaaaagtgcgttgttg

SEQ ID NO: 21830 - DNA, 30 bp, Artificial Sequence
  Synthetic oligonucleotide
acgggggtgcgaattctgagactccgtttg

SEQ ID NO: 21831 - DNA, 30 bp, Artificial Sequence
  Synthetic oligonucleotide
agcgggggcagattatcaagggcaattttg

SEQ ID NO: 21832 - DNA, 30 bp, Artificial Sequence
  Synthetic oligonucleotide
cacgctccaggtgcgcactaaccgagaaat

SEQ ID NO: 21833 - DNA, 30 bp, Artificial Sequence
  Synthetic oligonucleotide
cacaagggcaagggccacgaaactagaaat

SEQ ID NO: 21834 - DNA, 30 bp, Artificial Sequence
  Synthetic oligonucleotide
agacaaatgaggtgtcaataggggataaat

SEQ ID NO: 21835 - DNA, 31 bp, Artificial Sequence
  Synthetic oligonucleotide
gcaacggggggggtcgtaggacaaaagcaat

SEQ ID NO: 21836 - DNA, 30 bp, Artificial Sequence
  Synthetic oligonucleotide
caacaatatcataagggagcgcgtgtcaat

SEQ ID NO: 21837 - DNA, 31 bp, Artificial Sequence
  Synthetic oligonucleotide
cctgagcgtcgggggtgtaagactattcaat

SEQ ID NO: 21838 - DNA, 30 bp, Artificial Sequence
  Synthetic oligonucleotide
cgacgtctggaaagatggatagtcacgaat

SEQ ID NO: 21839 - DNA, 30 bp, Artificial Sequence
  Synthetic oligonucleotide
caaccggaacgatgtaaggtgcgtgggaat

SEQ ID NO: 21840 - DNA, 30 bp, Artificial Sequence
  Synthetic oligonucleotide
ctaaacaagagatctagtaaaaggcaacat

SEQ ID NO: 21841 - DNA, 30 bp, Artificial Sequence
  Synthetic oligonucleotide
cctcacaacgaacagagcttaacctaacat

SEQ ID NO: 21842 - DNA, 30 bp, Artificial Sequence
  Synthetic oligonucleotide
agtgaagacacccgtaactagaccatacat

SEQ ID NO: 21843 - DNA, 30 bp, Artificial Sequence
  Synthetic oligonucleotide
tgggcaacagctcagggcattcgagtacat

SEQ ID NO: 21844 - DNA, 30 bp, Artificial Sequence
  Synthetic oligonucleotide
cgaaatggtatcgtgagctcgttcagccat

SEQ ID NO: 21845 - DNA, 30 bp, Artificial Sequence
  Synthetic oligonucleotide
caaggatcgggatcatatcagaggggccat

SEQ ID NO: 21846 - DNA, 31 bp, Artificial Sequence
  Synthetic oligonucleotide
gggacaagtaaaaccaccaggtaatatccat

SEQ ID NO: 21847 - DNA, 30 bp, Artificial Sequence
  Synthetic oligonucleotide
gacttaatcccgagagagcacagaaagcat

SEQ ID NO: 21848 - DNA, 30 bp, Artificial Sequence
  Synthetic oligonucleotide
cgatagcatgaagcgtgcctataccagcat

SEQ ID NO: 21849 - DNA, 30 bp, Artificial Sequence
  Synthetic oligonucleotide
ccataacctactatctcaaacaactcgcat

SEQ ID NO: 21850 - DNA, 30 bp, Artificial Sequence
  Synthetic oligonucleotide
cagtgagtgcgtaagccttgcgagcggcat

SEQ ID NO: 21851 - DNA, 30 bp, Artificial Sequence
  Synthetic oligonucleotide
agtagggtgggtagacaaggtagtatgcat

SEQ ID NO: 21852 - DNA, 30 bp, Artificial Sequence
  Synthetic oligonucleotide
agtcgcgccatgaaaaggagaccagtgcat

SEQ ID NO: 21853 - DNA, 30 bp, Artificial Sequence
  Synthetic oligonucleotide
aagagacaggcgtaagtactctatgaagat

SEQ ID NO: 21854 - DNA, 30 bp, Artificial Sequence
  Synthetic oligonucleotide
gacagatagagtagtagaaagtcgtaagat

SEQ ID NO: 21855 - DNA, 30 bp, Artificial Sequence
  Synthetic oligonucleotide
agagtgggctcgtacaaccgtcactcagat

SEQ ID NO: 21856 - DNA, 30 bp, Artificial Sequence
  Synthetic oligonucleotide
gagacatgaagatcaggagagcagcgagat

SEQ ID NO: 21857 - DNA, 30 bp, Artificial Sequence
  Synthetic oligonucleotide
agcggagggtgtgccagtgaatggggagat

SEQ ID NO: 21858 - DNA, 30 bp, Artificial Sequence
  Synthetic oligonucleotide
acttacctatggcctaaaagagtgaacgat

SEQ ID NO: 21859 - DNA, 30 bp, Artificial Sequence
  Synthetic oligonucleotide
agactagacacacgagaggtagtagccgat

SEQ ID NO: 21860 - DNA, 30 bp, Artificial Sequence
  Synthetic oligonucleotide
agggggggaatgcaacctccaaaacgcgat

SEQ ID NO: 21861 - DNA, 30 bp, Artificial Sequence
  Synthetic oligonucleotide
tgggggaaagatcatcaatgaggtggcgat

SEQ ID NO: 21862 - DNA, 30 bp, Artificial Sequence
  Synthetic oligonucleotide
ggacaagaacaccgaaacgagattctcgat

SEQ ID NO: 21863 - DNA, 30 bp, Artificial Sequence
  Synthetic oligonucleotide
gcggaacacacaccggaagtcactacggat

SEQ ID NO: 21864 - DNA, 30 bp, Artificial Sequence
  Synthetic oligonucleotide
agtaacaccggaaagacgatgacacgtgat

SEQ ID NO: 21865 - DNA, 30 bp, Artificial Sequence
  Synthetic oligonucleotide
aacgagagcactcgcgcaaccgaccaatat

SEQ ID NO: 21866 - DNA, 30 bp, Artificial Sequence
  Synthetic oligonucleotide
agggaggtatagaaacaccaagttatatat

SEQ ID NO: 21867 - DNA, 30 bp, Artificial Sequence
  Synthetic oligonucleotide
ggtgcgaagaatgaacgagatacagtatat

SEQ ID NO: 21868 - DNA, 30 bp, Artificial Sequence
  Synthetic oligonucleotide
agggcgtatcgatcgtaaatggcttaaact

SEQ ID NO: 21869 - DNA, 30 bp, Artificial Sequence
  Synthetic oligonucleotide
ggcttaaacaacgacgaaatccacccaact

SEQ ID NO: 21870 - DNA, 30 bp, Artificial Sequence
  Synthetic oligonucleotide
gccaacgtatgaggaaaacttacagcaact

SEQ ID NO: 21871 - DNA, 30 bp, Artificial Sequence
  Synthetic oligonucleotide
tggtgagcaatacgggtagggagtgcaact

SEQ ID NO: 21872 - DNA, 30 bp, Artificial Sequence
  Synthetic oligonucleotide
cgaggtcgagagaagcagcatcgaacgact

SEQ ID NO: 21873 - DNA, 30 bp, Artificial Sequence
  Synthetic oligonucleotide
ccgcgcacaacgaaatcatcgagtacgact

SEQ ID NO: 21874 - DNA, 30 bp, Artificial Sequence
  Synthetic oligonucleotide
cgggcgccatccataagtactctaccgact

SEQ ID NO: 21875 - DNA, 30 bp, Artificial Sequence
  Synthetic oligonucleotide
tcgcgatctaacaaagtaaggcgagtgact

SEQ ID NO: 21876 - DNA, 30 bp, Artificial Sequence
  Synthetic oligonucleotide
agcgaaagtgactacaaggggttaactact

SEQ ID NO: 21877 - DNA, 30 bp, Artificial Sequence
  Synthetic oligonucleotide
gcgggaaagagcgcgatgaaggtacctact

SEQ ID NO: 21878 - DNA, 30 bp, Artificial Sequence
  Synthetic oligonucleotide
acgtaaaatggtctggaagtgaggattact

SEQ ID NO: 21879 - DNA, 30 bp, Artificial Sequence
  Synthetic oligonucleotide
gacaaggcgaagggaggcgtgtaggttact

SEQ ID NO: 21880 - DNA, 30 bp, Artificial Sequence
  Synthetic oligonucleotide
cgtatacacagaatcactggcaggacacct

SEQ ID NO: 21881 - DNA, 30 bp, Artificial Sequence
  Synthetic oligonucleotide
acgggggaactactaatcaagcgtcgacct

SEQ ID NO: 21882 - DNA, 30 bp, Artificial Sequence
  Synthetic oligonucleotide
agggggcccgtcaaactagaatctggacct

SEQ ID NO: 21883 - DNA, 30 bp, Artificial Sequence
  Synthetic oligonucleotide
gtgcgagagcggaccacctcaccacaccct

SEQ ID NO: 21884 - DNA, 30 bp, Artificial Sequence
  Synthetic oligonucleotide
cggtgaataggtgaatgcagggaggaccct

SEQ ID NO: 21885 - DNA, 30 bp, Artificial Sequence
  Synthetic oligonucleotide
cacgaagaggttaggaaggcgggtaatcct

SEQ ID NO: 21886 - DNA, 30 bp, Artificial Sequence
  Synthetic oligonucleotide
acacgggatagaatcaagttcaccagtcct

SEQ ID NO: 21887 - DNA, 30 bp, Artificial Sequence
  Synthetic oligonucleotide
tggcgaaatgagaacgatgatatgcttcct

SEQ ID NO: 21888 - DNA, 30 bp, Artificial Sequence
  Synthetic oligonucleotide
acgggaataagcaggtaggagcttgtagct

SEQ ID NO: 21889 - DNA, 30 bp, Artificial Sequence
  Synthetic oligonucleotide
acgtgagaatggtagattgcttggagggct

SEQ ID NO: 21890 - DNA, 30 bp, Artificial Sequence
  Synthetic oligonucleotide
gacataacgtcgacagagagcgctgactct

SEQ ID NO: 21891 - DNA, 30 bp, Artificial Sequence
  Synthetic oligonucleotide
aaaggcaggtgatcaattaggcaaacgtct

SEQ ID NO: 21892 - DNA, 30 bp, Artificial Sequence
  Synthetic oligonucleotide
tacgtcatgtaaaccgagatatagccgtct

SEQ ID NO: 21893 - DNA, 30 bp, Artificial Sequence
  Synthetic oligonucleotide
agttgagaggccagggtaacagaggggtct

SEQ ID NO: 21894 - DNA, 30 bp, Artificial Sequence
  Synthetic oligonucleotide
aacagcgaggggcgtcgaaagcaatcaagt

SEQ ID NO: 21895 - DNA, 30 bp, Artificial Sequence
  Synthetic oligonucleotide
gatggggacacaggaagggggtgaagaagt

SEQ ID NO: 21896 - DNA, 30 bp, Artificial Sequence
  Synthetic oligonucleotide
aggctgtcaggcctgtgtaaaagcggaagt

SEQ ID NO: 21897 - DNA, 30 bp, Artificial Sequence
  Synthetic oligonucleotide
aggcgcgctaagaggtaacgtgcatgaagt

SEQ ID NO: 21898 - DNA, 30 bp, Artificial Sequence
  Synthetic oligonucleotide
ggagcggcggaccatagccacaacgtaagt

SEQ ID NO: 21899 - DNA, 30 bp, Artificial Sequence
  Synthetic oligonucleotide
ccgagcacagtagccaaaggaaaattaagt

SEQ ID NO: 21900 - DNA, 30 bp, Artificial Sequence
  Synthetic oligonucleotide
aggtgagattaagcacaagagaggcacagt

SEQ ID NO: 21901 - DNA, 30 bp, Artificial Sequence
  Synthetic oligonucleotide
ccaagggtaaatccgacagatgaatacagt

SEQ ID NO: 21902 - DNA, 30 bp, Artificial Sequence
  Synthetic oligonucleotide
aacgcaagggattaggcacaggccgccagt

SEQ ID NO: 21903 - DNA, 30 bp, Artificial Sequence
  Synthetic oligonucleotide
taagggttgggaagaacgtttatcggcagt

SEQ ID NO: 21904 - DNA, 30 bp, Artificial Sequence
  Synthetic oligonucleotide
agcgaagcaatggactaagaccaattcagt

SEQ ID NO: 21905 - DNA, 30 bp, Artificial Sequence
  Synthetic oligonucleotide
gcgcaaactgattacgggatactgcagagt

SEQ ID NO: 21906 - DNA, 30 bp, Artificial Sequence
  Synthetic oligonucleotide
tgccataccaaatcggaacggtaggggagt

SEQ ID NO: 21907 - DNA, 30 bp, Artificial Sequence
  Synthetic oligonucleotide
agccagaggactgtagtttgcgacatgagt

SEQ ID NO: 21908 - DNA, 30 bp, Artificial Sequence
  Synthetic oligonucleotide
caatcggggcgaacaaggaggcgcatgagt

SEQ ID NO: 21909 - DNA, 30 bp, Artificial Sequence
  Synthetic oligonucleotide
cggtccagactaataggggtctagctgagt

SEQ ID NO: 21910 - DNA, 40 bp, Artificial Sequence
  Synthetic oligonucleotide
attggctgggtgctgtaggcaacacatatatcactctagt

SEQ ID NO: 21911 - DNA, 30 bp, Artificial Sequence
  Synthetic oligonucleotide
atgacagtgggcagagtagcaggaagtagt

SEQ ID NO: 21912 - DNA, 30 bp, Artificial Sequence
  Synthetic oligonucleotide
tcggagaataaggggttgagctatggtagt

SEQ ID NO: 21913 - DNA, 30 bp, Artificial Sequence
  Synthetic oligonucleotide
gggaaaaaatggacgcgttatcgatgtagt

SEQ ID NO: 21914 - DNA, 30 bp, Artificial Sequence
  Synthetic oligonucleotide
ttgtggcaggctagacaagggacatagcgt

SEQ ID NO: 21915 - DNA, 30 bp, Artificial Sequence
  Synthetic oligonucleotide
ggagagacaattcgtcgaagtaatgcgcgt

SEQ ID NO: 21916 - DNA, 30 bp, Artificial Sequence
  Synthetic oligonucleotide
acgcaaaaaaatcataacttcgctgcgcgt

SEQ ID NO: 21917 - DNA, 30 bp, Artificial Sequence
  Synthetic oligonucleotide
tcgaacacaagatagggtgtctaggctcgt

SEQ ID NO: 21918 - DNA, 30 bp, Artificial Sequence
  Synthetic oligonucleotide
ggtgagcgacgttcagtgaagcaatctcgt

SEQ ID NO: 21919 - DNA, 30 bp, Artificial Sequence
  Synthetic oligonucleotide
aggggaggcggtcgtgtagctccatgtcgt

SEQ ID NO: 21920 - DNA, 30 bp, Artificial Sequence
  Synthetic oligonucleotide
cggaaactgtaggcgggcgtcgagaaaggt

SEQ ID NO: 21921 - DNA, 30 bp, Artificial Sequence
  Synthetic oligonucleotide
aacagggcgagtgcaccgacagcacaaggt

SEQ ID NO: 21922 - DNA, 30 bp, Artificial Sequence
  Synthetic oligonucleotide
cctgggactggggcgcaagcgagagaaggt

SEQ ID NO: 21923 - DNA, 30 bp, Artificial Sequence
  Synthetic oligonucleotide
gcataatcaggaatgcccaacgaaagaggt

SEQ ID NO: 21924 - DNA, 30 bp, Artificial Sequence
  Synthetic oligonucleotide
gtaacgggaaaacttaagaggggtgtaggt

SEQ ID NO: 21925 - DNA, 30 bp, Artificial Sequence
  Synthetic oligonucleotide
agcaagagcgaaagcgcaatgaaccccggt

SEQ ID NO: 21926 - DNA, 30 bp, Artificial Sequence
  Synthetic oligonucleotide
atggcggcgaacattgaaggggacttgggt

SEQ ID NO: 21927 - DNA, 30 bp, Artificial Sequence
  Synthetic oligonucleotide
gtagtgtggcaaaaagcgtgatgggatggt

SEQ ID NO: 21928 - DNA, 30 bp, Artificial Sequence
  Synthetic oligonucleotide
ggacgaggacaaggtagagtggagagtggt

SEQ ID NO: 21929 - DNA, 30 bp, Artificial Sequence
  Synthetic oligonucleotide
cctgagcacaaaatgataatagggagtggt

SEQ ID NO: 21930 - DNA, 30 bp, Artificial Sequence
  Synthetic oligonucleotide
ggggggtggatggctgacatcgccgaatgt

SEQ ID NO: 21931 - DNA, 30 bp, Artificial Sequence
  Synthetic oligonucleotide
catgaaggtgagggaaacaatgggagatgt

SEQ ID NO: 21932 - DNA, 30 bp, Artificial Sequence
  Synthetic oligonucleotide
tcggcacccgataggaggaagaccgtatgt

SEQ ID NO: 21933 - DNA, 30 bp, Artificial Sequence
  Synthetic oligonucleotide
actaaggaagaacgaaaccattagcactgt

SEQ ID NO: 21934 - DNA, 30 bp, Artificial Sequence
  Synthetic oligonucleotide
gcggagagtaaaggaggcccgtggtggtgt

SEQ ID NO: 21935 - DNA, 30 bp, Artificial Sequence
  Synthetic oligonucleotide
gaatgattcggcgtgcaaaggagggtgtgt

SEQ ID NO: 21936 - DNA, 30 bp, Artificial Sequence
  Synthetic oligonucleotide
aatagagcgccaagcacggaaaagtaaatt

SEQ ID NO: 21937 - DNA, 30 bp, Artificial Sequence
  Synthetic oligonucleotide
ctaagagcggagcagaagtagcgcacaatt

SEQ ID NO: 21938 - DNA, 30 bp, Artificial Sequence
  Synthetic oligonucleotide
ggaaggtccagatgcacacaggctaacatt

SEQ ID NO: 21939 - DNA, 30 bp, Artificial Sequence
  Synthetic oligonucleotide
cgctgtggctcgaaaagtgaggactacatt

SEQ ID NO: 21940 - DNA, 30 bp, Artificial Sequence
  Synthetic oligonucleotide
ccgacgtatgatcagaaacctgcgaccatt

SEQ ID NO: 21941 - DNA, 30 bp, Artificial Sequence
  Synthetic oligonucleotide
cacgaactggagagccagggagggatcatt

SEQ ID NO: 21942 - DNA, 30 bp, Artificial Sequence
  Synthetic oligonucleotide
acgacgactggctcgggcaatgccgtcatt

SEQ ID NO: 21943 - DNA, 30 bp, Artificial Sequence
  Synthetic oligonucleotide
ccgacagggatcacccaagaaaccacgatt

SEQ ID NO: 21944 - DNA, 30 bp, Artificial Sequence
  Synthetic oligonucleotide
cctgcagaacagaacccaacctaaccgatt

SEQ ID NO: 21945 - DNA, 30 bp, Artificial Sequence
  Synthetic oligonucleotide
agcagaggggcagtgatcaacctaaagctt

SEQ ID NO: 21946 - DNA, 30 bp, Artificial Sequence
  Synthetic oligonucleotide
gagcttgcaagaacgaacgatgccagagtt

SEQ ID NO: 21947 - DNA, 30 bp, Artificial Sequence
  Synthetic oligonucleotide
taccaggactaagcgtaatgaccaggagtt

SEQ ID NO: 21948 - DNA, 30 bp, Artificial Sequence
  Synthetic oligonucleotide
tgggaaaagggaaagcgaaaactaggagtt

SEQ ID NO: 21949 - DNA, 30 bp, Artificial Sequence
  Synthetic oligonucleotide
caacggggctcgagagggttagtctacgtt

SEQ ID NO: 21950 - DNA, 30 bp, Artificial Sequence
  Synthetic oligonucleotide
tgtagggaaaagcaccgagatcgaagggtt

SEQ ID NO: 21951 - DNA, 30 bp, Artificial Sequence
  Synthetic oligonucleotide
ttcggtagcgcggaagagtgaacgtgtgtt

SEQ ID NO: 21952 - DNA, 30 bp, Artificial Sequence
  Synthetic oligonucleotide
taacactcagcagccaaggaaagtacattt

SEQ ID NO: 21953 - DNA, 30 bp, Artificial Sequence
  Synthetic oligonucleotide
acgcgaagaacggtggaaaaacacgccttt

SEQ ID NO: 21954 - DNA, 30 bp, Artificial Sequence
  Synthetic oligonucleotide
tggaagcgagtaaaggaagtgagatgcttt

SEQ ID NO: 21955 - DNA, 30 bp, Artificial Sequence
  Synthetic oligonucleotide
cgtgaaggcgcccgaagctccgagaagttt

SEQ ID NO: 21956 - DNA, 30 bp, Artificial Sequence
  Synthetic oligonucleotide
ccctgagaatcatggtgggacgggaggttt

SEQ ID NO: 21957 - DNA, 30 bp, Artificial Sequence
  Synthetic oligonucleotide
ccgagaagcaatggtgcgctgagggatttt

SEQ ID NO: 21958 - DNA, 30 bp, Artificial Sequence
  Synthetic oligonucleotide
agcggaaaagctgcgaaataggcgaaaaaa

SEQ ID NO: 21959 - DNA, 30 bp, Artificial Sequence
  Synthetic oligonucleotide
aggtgtggatgatctagcaaacaccaaaaa

SEQ ID NO: 21960 - DNA, 30 bp, Artificial Sequence
  Synthetic oligonucleotide
cataatgcttggggagataggcccgaaaaa

SEQ ID NO: 21961 - DNA, 30 bp, Artificial Sequence
  Synthetic oligonucleotide
tctcacgcgtaacgaacatcccatgcaaaa

SEQ ID NO: 21962 - DNA, 30 bp, Artificial Sequence
  Synthetic oligonucleotide
cgtttcgcacgtcaagaagaggacagaaaa

SEQ ID NO: 21963 - DNA, 30 bp, Artificial Sequence
  Synthetic oligonucleotide
ccgaggatcaccgaacgaaaaagaaacaaa

SEQ ID NO: 21964 - DNA, 30 bp, Artificial Sequence
  Synthetic oligonucleotide
cttaggatcaattgggtaaggctgaacaaa

SEQ ID NO: 21965 - DNA, 30 bp, Artificial Sequence
  Synthetic oligonucleotide
tgaggataaaagccggttcaggaagccaaa

SEQ ID NO: 21966 - DNA, 31 bp, Artificial Sequence
  Synthetic oligonucleotide
ccgaaagtgcccaaagcggaatgtagccaaa

SEQ ID NO: 21967 - DNA, 30 bp, Artificial Sequence
  Synthetic oligonucleotide
gcaggggtagtgatggctgacaattccaaa

SEQ ID NO: 21968 - DNA, 30 bp, Artificial Sequence
  Synthetic oligonucleotide
agggacgcaatgaatagttcttgaagcaaa

SEQ ID NO: 21969 - DNA, 30 bp, Artificial Sequence
  Synthetic oligonucleotide
aggtcgcatatgggcgaaatattcagcaaa

SEQ ID NO: 21970 - DNA, 30 bp, Artificial Sequence
  Synthetic oligonucleotide
agggacagcaatgcgacccggataggcaaa

SEQ ID NO: 21971 - DNA, 30 bp, Artificial Sequence
  Synthetic oligonucleotide
gaagggatattcggtgaaatcgtgtgcaaa

SEQ ID NO: 21972 - DNA, 30 bp, Artificial Sequence
  Synthetic oligonucleotide
cgatgcgtgaaaggcgggggctacgtcaaa

SEQ ID NO: 21973 - DNA, 30 bp, Artificial Sequence
  Synthetic oligonucleotide
cggtaacagacttaggctaaccagaagaaa

SEQ ID NO: 21974 - DNA, 30 bp, Artificial Sequence
  Synthetic oligonucleotide
cctaaacaatgagtggcaagtctcgagaaa

SEQ ID NO: 21975 - DNA, 30 bp, Artificial Sequence
  Synthetic oligonucleotide
gaaggcaacatgggtggttagtaaccgaaa

SEQ ID NO: 21976 - DNA, 30 bp, Artificial Sequence
  Synthetic oligonucleotide
ggagcactatatccacccaatgccccgaaa

SEQ ID NO: 21977 - DNA, 30 bp, Artificial Sequence
  Synthetic oligonucleotide
tctggagactacaaggctccaactccgaaa

SEQ ID NO: 21978 - DNA, 30 bp, Artificial Sequence
  Synthetic oligonucleotide
cgtcgatgacaattgcgctaaaattcgaaa

SEQ ID NO: 21979 - DNA, 30 bp, Artificial Sequence
  Synthetic oligonucleotide
tggcgcatactaatagggtgagctaggaaa

SEQ ID NO: 21980 - DNA, 30 bp, Artificial Sequence
  Synthetic oligonucleotide
aaggggggatgtcaatgaagcgaacggaaa

SEQ ID NO: 21981 - DNA, 30 bp, Artificial Sequence
  Synthetic oligonucleotide
ggcatgtgtggcaaatgatttagggtgaaa

SEQ ID NO: 21982 - DNA, 30 bp, Artificial Sequence
  Synthetic oligonucleotide
tccggaagtagtggataatgctcgttgaaa

SEQ ID NO: 21983 - DNA, 30 bp, Artificial Sequence
  Synthetic oligonucleotide
acgatactggtgatcgtgcggaaagctaaa

SEQ ID NO: 21984 - DNA, 30 bp, Artificial Sequence
  Synthetic oligonucleotide
ccacagtaaaacggaaataatggcagtaaa

SEQ ID NO: 21985 - DNA, 30 bp, Artificial Sequence
  Synthetic oligonucleotide
gaggctacaccaggaccagtgaatagtaaa

SEQ ID NO: 21986 - DNA, 30 bp, Artificial Sequence
  Synthetic oligonucleotide
tgacaaggataggcaacgatggcacgtaaa

SEQ ID NO: 21987 - DNA, 30 bp, Artificial Sequence
  Synthetic oligonucleotide
ccttcccaccacaaacgtgaaagcggtaaa

SEQ ID NO: 21988 - DNA, 30 bp, Artificial Sequence
  Synthetic oligonucleotide
gcacataggagacaccaaacgggatgtaaa

SEQ ID NO: 21989 - DNA, 30 bp, Artificial Sequence
  Synthetic oligonucleotide
aagcggccaccaggggagaacgaacttaaa

SEQ ID NO: 21990 - DNA, 30 bp, Artificial Sequence
  Synthetic oligonucleotide
taaggtgtcaggtaagcggaggaagaacaa

SEQ ID NO: 21991 - DNA, 30 bp, Artificial Sequence
  Synthetic oligonucleotide
cgatctccaattcacatatacagcgaacaa

SEQ ID NO: 21992 - DNA, 30 bp, Artificial Sequence
  Synthetic oligonucleotide
ggcgaatagcagctacagcagtcggcacaa

SEQ ID NO: 21993 - DNA, 30 bp, Artificial Sequence
  Synthetic oligonucleotide
ggcgtattatgcaacgaacacgtccgacaa

SEQ ID NO: 21994 - DNA, 31 bp, Artificial Sequence
  Synthetic oligonucleotide
agggcactgtggggacgagatacatcgacaa

SEQ ID NO: 21995 - DNA, 30 bp, Artificial Sequence
  Synthetic oligonucleotide
taacgtgagtaaaaggaatgaagaggacaa

SEQ ID NO: 21996 - DNA, 30 bp, Artificial Sequence
  Synthetic oligonucleotide
aggcatcgggcgagctaggatgggatacaa

SEQ ID NO: 21997 - DNA, 30 bp, Artificial Sequence
  Synthetic oligonucleotide
ggagcaaaaccccagcgtgtccactcccaa

SEQ ID NO: 21998 - DNA, 30 bp, Artificial Sequence
  Synthetic oligonucleotide
gggacgaatatataacaggagctgctccaa

SEQ ID NO: 21999 - DNA, 30 bp, Artificial Sequence
  Synthetic oligonucleotide
acggcatctccggatacaccacgaaagcaa

SEQ ID NO: 22000 - DNA, 30 bp, Artificial Sequence
  Synthetic oligonucleotide
aaggggagggagattcgatccagatagcaa

SEQ ID NO: 22001 - DNA, 30 bp, Artificial Sequence
  Synthetic oligonucleotide
cggaataagatcggggtgaagggggcgcaa

SEQ ID NO: 22002 - DNA, 30 bp, Artificial Sequence
  Synthetic oligonucleotide
agggggagaggtattcagacatgttcgcaa

SEQ ID NO: 22003 - DNA, 30 bp, Artificial Sequence
  Synthetic oligonucleotide
tcgatccgagaatctaggggcggtcggcaa

SEQ ID NO: 22004 - DNA, 30 bp, Artificial Sequence
  Synthetic oligonucleotide
agggtgttccagcggaataatcacatgcaa

SEQ ID NO: 22005 - DNA, 30 bp, Artificial Sequence
  Synthetic oligonucleotide
cggcatgagctggtcgggaaacgtatgcaa

SEQ ID NO: 22006 - DNA, 30 bp, Artificial Sequence
  Synthetic oligonucleotide
cgcgtaattatcgatacctggagcttgcaa

SEQ ID NO: 22007 - DNA, 30 bp, Artificial Sequence
  Synthetic oligonucleotide
gtctgcgcagatacggccgacgataatcaa

SEQ ID NO: 22008 - DNA, 31 bp, Artificial Sequence
  Synthetic oligonucleotide
ccaaaagaacttactcaaacaaatagatcaa

SEQ ID NO: 22009 - DNA, 30 bp, Artificial Sequence
  Synthetic oligonucleotide
agtcggagtgggaaagctgtagaacctcaa

SEQ ID NO: 22010 - DNA, 30 bp, Artificial Sequence
  Synthetic oligonucleotide
agacagcgattcgcgaccggtggaaaagaa

SEQ ID NO: 22011 - DNA, 30 bp, Artificial Sequence
  Synthetic oligonucleotide
gacagtagcggaaatgttggctggcaagaa

SEQ ID NO: 22012 - DNA, 30 bp, Artificial Sequence
  Synthetic oligonucleotide
cggcgagggacatcatgtcaatgtcaagaa

SEQ ID NO: 22013 - DNA, 30 bp, Artificial Sequence
  Synthetic oligonucleotide
agagctgcagggtcaacgacctaataagaa

SEQ ID NO: 22014 - DNA, 30 bp, Artificial Sequence
  Synthetic oligonucleotide
atagaggagttaggcatgcgcgcgtaagaa

SEQ ID NO: 22015 - DNA, 30 bp, Artificial Sequence
  Synthetic oligonucleotide
agggagatagctcatcgggtagaaacagaa

SEQ ID NO: 22016 - DNA, 30 bp, Artificial Sequence
  Synthetic oligonucleotide
cggagacacatcaagcctccttaaccagaa

SEQ ID NO: 22017 - DNA, 30 bp, Artificial Sequence
  Synthetic oligonucleotide
tcgtaaatcgattctgcctccaagccagaa

SEQ ID NO: 22018 - DNA, 30 bp, Artificial Sequence
  Synthetic oligonucleotide
ccgctgagcgatagaaacggcactagagaa

SEQ ID NO: 22019 - DNA, 30 bp, Artificial Sequence
  Synthetic oligonucleotide
cgaagacgacaaagatctggcttgggagaa

SEQ ID NO: 22020 - DNA, 30 bp, Artificial Sequence
  Synthetic oligonucleotide
gtggagattggtgctacagtaaaatgagaa

SEQ ID NO: 22021 - DNA, 30 bp, Artificial Sequence
  Synthetic oligonucleotide
aaagttagtccgaaaaggggatgcgtagaa

SEQ ID NO: 22022 - DNA, 30 bp, Artificial Sequence
  Synthetic oligonucleotide
ttaagacggctcggccataataccttagaa

SEQ ID NO: 22023 - DNA, 30 bp, Artificial Sequence
  Synthetic oligonucleotide
atacttaccaaaagcgacaagaaagacgaa

SEQ ID NO: 22024 - DNA, 30 bp, Artificial Sequence
  Synthetic oligonucleotide
cacccgaggaagcggagttaacgaaccgaa

SEQ ID NO: 22025 - DNA, 30 bp, Artificial Sequence
  Synthetic oligonucleotide
agaccgattagggtgtgggactcgcccgaa

SEQ ID NO: 22026 - DNA, 30 bp, Artificial Sequence
  Synthetic oligonucleotide
accggaagtctactccaccccaatggcgaa

SEQ ID NO: 22027 - DNA, 30 bp, Artificial Sequence
  Synthetic oligonucleotide
aggttagaacaagaaaggctcatggtcgaa

SEQ ID NO: 22028 - DNA, 30 bp, Artificial Sequence
  Synthetic oligonucleotide
aggaggacgaccaatactacgacgttcgaa

SEQ ID NO: 22029 - DNA, 30 bp, Artificial Sequence
  Synthetic oligonucleotide
agctaaccgatctccaaatcagaataggaa

SEQ ID NO: 22030 - DNA, 30 bp, Artificial Sequence
  Synthetic oligonucleotide
agatccaacaagcagggatcgttaccggaa

SEQ ID NO: 22031 - DNA, 30 bp, Artificial Sequence
  Synthetic oligonucleotide
agtggagccatatccggagggatcagggaa

SEQ ID NO: 22032 - DNA, 30 bp, Artificial Sequence
  Synthetic oligonucleotide
agcagagcgacagaggatcgcagcggggaa

SEQ ID NO: 22033 - DNA, 30 bp, Artificial Sequence
  Synthetic oligonucleotide
gtgcgtggcgactataacgaacagctggaa

SEQ ID NO: 22034 - DNA, 30 bp, Artificial Sequence
  Synthetic oligonucleotide
caacgaggtggcgatgaaaggtcaaatgaa

SEQ ID NO: 22035 - DNA, 30 bp, Artificial Sequence
  Synthetic oligonucleotide
acgaggcatacaaattgctcatttaatgaa

SEQ ID NO: 22036 - DNA, 30 bp, Artificial Sequence
  Synthetic oligonucleotide
tcccagtcgaacggaaaggtggagattgaa

SEQ ID NO: 22037 - DNA, 30 bp, Artificial Sequence
  Synthetic oligonucleotide
cgtcgcttaggcgaagagaatagacttgaa

SEQ ID NO: 22038 - DNA, 30 bp, Artificial Sequence
  Synthetic oligonucleotide
agtaataaaagtggtgaaagtgctgttgaa

SEQ ID NO: 22039 - DNA, 30 bp, Artificial Sequence
  Synthetic oligonucleotide
cgagctttgtggggccagagaagcgaataa

SEQ ID NO: 22040 - DNA, 30 bp, Artificial Sequence
  Synthetic oligonucleotide
ggggcgcggggaactgccgaatccgcataa

SEQ ID NO: 22041 - DNA, 30 bp, Artificial Sequence
  Synthetic oligonucleotide
gcttcaacgccatcgaaaacagagagataa

SEQ ID NO: 22042 - DNA, 30 bp, Artificial Sequence
  Synthetic oligonucleotide
atgtagatgcggagagggcagtgaatataa

SEQ ID NO: 22043 - DNA, 30 bp, Artificial Sequence
  Synthetic oligonucleotide
agccataagaagtcaaagcgtcaccactaa

SEQ ID NO: 22044 - DNA, 30 bp, Artificial Sequence
  Synthetic oligonucleotide
aaacatcgaaaaacatggtagcggtactaa

SEQ ID NO: 22045 - DNA, 30 bp, Artificial Sequence
  Synthetic oligonucleotide
aacgtgatgaaggaagggacctcaccctaa

SEQ ID NO: 22046 - DNA, 30 bp, Artificial Sequence
  Synthetic oligonucleotide
ccgagttacgagatatggcatatcagctaa

SEQ ID NO: 22047 - DNA, 30 bp, Artificial Sequence
  Synthetic oligonucleotide
ccgttcggcaacacagagcgactacgctaa

SEQ ID NO: 22048 - DNA, 30 bp, Artificial Sequence
  Synthetic oligonucleotide
aaaaaggagcacgagacgatcaaattctaa

SEQ ID NO: 22049 - DNA, 30 bp, Artificial Sequence
  Synthetic oligonucleotide
agaagacctgagaaagtgcaatggttctaa

SEQ ID NO: 22050 - DNA, 30 bp, Artificial Sequence
  Synthetic oligonucleotide
tcaaactgggttccgtcaacgagcgagtaa

SEQ ID NO: 22051 - DNA, 30 bp, Artificial Sequence
  Synthetic oligonucleotide
cagatggaagtgtagcagaatgcggagtaa

SEQ ID NO: 22052 - DNA, 30 bp, Artificial Sequence
  Synthetic oligonucleotide
ctcggatggaaattaaggagcgtggagtaa

SEQ ID NO: 22053 - DNA, 30 bp, Artificial Sequence
  Synthetic oligonucleotide
cggcgaacatgccaaacaaggacaccgtaa

SEQ ID NO: 22054 - DNA, 30 bp, Artificial Sequence
  Synthetic oligonucleotide
cccaggaacaagtagaagagggtcgcgtaa

SEQ ID NO: 22055 - DNA, 30 bp, Artificial Sequence
  Synthetic oligonucleotide
gaggcaacagagtgaactgtcgcagggtaa

SEQ ID NO: 22056 - DNA, 30 bp, Artificial Sequence
  Synthetic oligonucleotide
aggccatgacgggagtccaaaacatggtaa

SEQ ID NO: 22057 - DNA, 30 bp, Artificial Sequence
  Synthetic oligonucleotide
ccataagtgggcaacgcggaggggatttaa

SEQ ID NO: 22058 - DNA, 30 bp, Artificial Sequence
  Synthetic oligonucleotide
aggtgggcatgtaattaaacaaacaaaaca

SEQ ID NO: 22059 - DNA, 31 bp, Artificial Sequence
  Synthetic oligonucleotide
cgcgacgaagggcgcaagccggctgaaaaca

SEQ ID NO: 22060 - DNA, 30 bp, Artificial Sequence
  Synthetic oligonucleotide
attggatcggccaaacacacagtgcaaaca

SEQ ID NO: 22061 - DNA, 30 bp, Artificial Sequence
  Synthetic oligonucleotide
aggtgccatggatcgctcaaaatctaaaca

SEQ ID NO: 22062 - DNA, 30 bp, Artificial Sequence
  Synthetic oligonucleotide
agcaggcaggttgaatgtaccaagtaaaca

SEQ ID NO: 22063 - DNA, 30 bp, Artificial Sequence
  Synthetic oligonucleotide
cgtgcaagttagaatagcgactcaacaaca

SEQ ID NO: 22064 - DNA, 30 bp, Artificial Sequence
  Synthetic oligonucleotide
acgtaagacaaggtagcgacccacacaaca

SEQ ID NO: 22065 - DNA, 30 bp, Artificial Sequence
  Synthetic oligonucleotide
acgacaaaggagctattcagagggacaaca

SEQ ID NO: 22066 - DNA, 30 bp, Artificial Sequence
  Synthetic oligonucleotide
gaagggaaatcgagaccgccatattcaaca

SEQ ID NO: 22067 - DNA, 30 bp, Artificial Sequence
  Synthetic oligonucleotide
cataacgccaagttcaagtagctgggaaca

SEQ ID NO: 22068 - DNA, 30 bp, Artificial Sequence
  Synthetic oligonucleotide
caggggtagtgcaaaataaaagatataaca

SEQ ID NO: 22069 - DNA, 30 bp, Artificial Sequence
  Synthetic oligonucleotide
tggaaagatgttcggtcaccagaggtaaca

SEQ ID NO: 22070 - DNA, 30 bp, Artificial Sequence
  Synthetic oligonucleotide
gcccaggctcgagaaggatataagcacaca

SEQ ID NO: 22071 - DNA, 30 bp, Artificial Sequence
  Synthetic oligonucleotide
agaccttagaaacacagaacgatttccaca

SEQ ID NO: 22072 - DNA, 30 bp, Artificial Sequence
  Synthetic oligonucleotide
cagctcaaaaacgatagtcgagtaggcaca

SEQ ID NO: 22073 - DNA, 30 bp, Artificial Sequence
  Synthetic oligonucleotide
tggatgtagagagcggccgaaatagtcaca

SEQ ID NO: 22074 - DNA, 30 bp, Artificial Sequence
  Synthetic oligonucleotide
ccaacgcaatctagcgaacatacccagaca

SEQ ID NO: 22075 - DNA, 30 bp, Artificial Sequence
  Synthetic oligonucleotide
atcagatgataatcggccgacagagagaca

SEQ ID NO: 22076 - DNA, 30 bp, Artificial Sequence
  Synthetic oligonucleotide
cgtccgttaccaagagatactcacacgaca

SEQ ID NO: 22077 - DNA, 30 bp, Artificial Sequence
  Synthetic oligonucleotide
ggaaatgccgataaaccccgcgctgcgaca

SEQ ID NO: 22078 - DNA, 30 bp, Artificial Sequence
  Synthetic oligonucleotide
gtggtcgaggcggtacaactacgaatgaca

SEQ ID NO: 22079 - DNA, 30 bp, Artificial Sequence
  Synthetic oligonucleotide
gttgaccacaagggacgtgagttgatgaca

SEQ ID NO: 22080 - DNA, 30 bp, Artificial Sequence
  Synthetic oligonucleotide
tcacggtcccggcagagtcaaaaggtgaca

SEQ ID NO: 22081 - DNA, 30 bp, Artificial Sequence
  Synthetic oligonucleotide
ggtgaagtaggaatggggcgataggtgaca

SEQ ID NO: 22082 - DNA, 30 bp, Artificial Sequence
  Synthetic oligonucleotide
acgttgcccacgaagaaatgcggtgataca

SEQ ID NO: 22083 - DNA, 30 bp, Artificial Sequence
  Synthetic oligonucleotide
gggctaagacctaacggcacgacgtcacca

SEQ ID NO: 22084 - DNA, 30 bp, Artificial Sequence
  Synthetic oligonucleotide
agtgtatgcgaattcgcgcgagtcagacca

SEQ ID NO: 22085 - DNA, 30 bp, Artificial Sequence
  Synthetic oligonucleotide
tagatcagggagctggggtcggcgtgacca

SEQ ID NO: 22086 - DNA, 30 bp, Artificial Sequence
  Synthetic oligonucleotide
cgcgtaaatccttgaaagcggaataaccca

SEQ ID NO: 22087 - DNA, 30 bp, Artificial Sequence
  Synthetic oligonucleotide
cacgtgacaaacggtaagaaatgggaccca

SEQ ID NO: 22088 - DNA, 30 bp, Artificial Sequence
  Synthetic oligonucleotide
agagggcaagttgaaattaaacactcccca

SEQ ID NO: 22089 - DNA, 30 bp, Artificial Sequence
  Synthetic oligonucleotide
gtggcaaggggaaattgaagctgcctccca

SEQ ID NO: 22090 - DNA, 30 bp, Artificial Sequence
  Synthetic oligonucleotide
tacggggtgaagtggttgggatgagtccca

SEQ ID NO: 22091 - DNA, 30 bp, Artificial Sequence
  Synthetic oligonucleotide
ttaccgcataagcgggagagtagggagcca

SEQ ID NO: 22092 - DNA, 30 bp, Artificial Sequence
  Synthetic oligonucleotide
acagataagggggtctaagctgggaggcca

SEQ ID NO: 22093 - DNA, 30 bp, Artificial Sequence
  Synthetic oligonucleotide
tggacgtaggtgaatctacgataaaatcca

SEQ ID NO: 22094 - DNA, 30 bp, Artificial Sequence
  Synthetic oligonucleotide
atcagggaccattattacccagagtatcca

SEQ ID NO: 22095 - DNA, 30 bp, Artificial Sequence
  Synthetic oligonucleotide
agcgttatggcaagaaacaagtcaaaagca

SEQ ID NO: 22096 - DNA, 30 bp, Artificial Sequence
  Synthetic oligonucleotide
tcataaatcgaggtaagtagcataaaagca

SEQ ID NO: 22097 - DNA, 30 bp, Artificial Sequence
  Synthetic oligonucleotide
atgtgaaacaacatcgccgtgaaccaagca

SEQ ID NO: 22098 - DNA, 30 bp, Artificial Sequence
  Synthetic oligonucleotide
gcgtccaaagtgtaatttttccaggaagca

SEQ ID NO: 22099 - DNA, 30 bp, Artificial Sequence
  Synthetic oligonucleotide
agcaagaagcagaaaccgcgccctgaagca

SEQ ID NO: 22100 - DNA, 30 bp, Artificial Sequence
  Synthetic oligonucleotide
tcatacctaccatgatatatcgcctaagca

SEQ ID NO: 22101 - DNA, 30 bp, Artificial Sequence
  Synthetic oligonucleotide
tggacttacaagtgaagaaatagaacagca

SEQ ID NO: 22102 - DNA, 30 bp, Artificial Sequence
  Synthetic oligonucleotide
acgcgtagagccccagcgcgtcagtcagca

SEQ ID NO: 22103 - DNA, 30 bp, Artificial Sequence
  Synthetic oligonucleotide
cgcggtcgaatggatttggctaggagagca

SEQ ID NO: 22104 - DNA, 30 bp, Artificial Sequence
  Synthetic oligonucleotide
aacacaataatgttgagcatagatctagca

SEQ ID NO: 22105 - DNA, 30 bp, Artificial Sequence
  Synthetic oligonucleotide
gcccacagcagaattccgaaggtcagcgca

SEQ ID NO: 22106 - DNA, 30 bp, Artificial Sequence
  Synthetic oligonucleotide
ccgcaatgatgaaagagggggccacaggca

SEQ ID NO: 22107 - DNA, 30 bp, Artificial Sequence
  Synthetic oligonucleotide
ccagacctatcgaaaaatctgggtagggca

SEQ ID NO: 22108 - DNA, 30 bp, Artificial Sequence
  Synthetic oligonucleotide
cgagccaccacatccctagcccgacgggca

SEQ ID NO: 22109 - DNA, 40 bp, Artificial Sequence
  Synthetic oligonucleotide
gggcggtaagcgcaaatatctcatgagcctacttcatgca

SEQ ID NO: 22110 - DNA, 30 bp, Artificial Sequence
  Synthetic oligonucleotide
cgccatttgcggtcggaccacaagagtgca

SEQ ID NO: 22111 - DNA, 30 bp, Artificial Sequence
  Synthetic oligonucleotide
actgagataggtggactagatattcgtgca

SEQ ID NO: 22112 - DNA, 30 bp, Artificial Sequence
  Synthetic oligonucleotide
gggagggcataggtaagatagtcgtgtgca

SEQ ID NO: 22113 - DNA, 30 bp, Artificial Sequence
  Synthetic oligonucleotide
ccgaccgggtacgagaatacgaggattgca

SEQ ID NO: 22114 - DNA, 30 bp, Artificial Sequence
  Synthetic oligonucleotide
cggcagaaggacgggatatttccaaaatca

SEQ ID NO: 22115 - DNA, 30 bp, Artificial Sequence
  Synthetic oligonucleotide
aacgtgctcgaaattaacaaagtccaatca

SEQ ID NO: 22116 - DNA, 30 bp, Artificial Sequence
  Synthetic oligonucleotide
tcgggcgccgaaagatagaccgttatatca

SEQ ID NO: 22117 - DNA, 30 bp, Artificial Sequence
  Synthetic oligonucleotide
cgatctaagtgcaagagaaaaccacgctca

SEQ ID NO: 22118 - DNA, 30 bp, Artificial Sequence
  Synthetic oligonucleotide
aaggaggaatatagaagatgtgcagtctca

SEQ ID NO: 22119 - DNA, 30 bp, Artificial Sequence
  Synthetic oligonucleotide
ggacaataaggtgtttgagcatggaagtca

SEQ ID NO: 22120 - DNA, 30 bp, Artificial Sequence
  Synthetic oligonucleotide
tcctaaaatggtacacgatcaaggtagtca

SEQ ID NO: 22121 - DNA, 30 bp, Artificial Sequence
  Synthetic oligonucleotide
caggagggttggcggggtgattcgccgtca

SEQ ID NO: 22122 - DNA, 30 bp, Artificial Sequence
  Synthetic oligonucleotide
gacgattgaatgtagtataatagcgcgtca

SEQ ID NO: 22123 - DNA, 30 bp, Artificial Sequence
  Synthetic oligonucleotide
ctgcaagtataccgctaagagagatcgtca

SEQ ID NO: 22124 - DNA, 30 bp, Artificial Sequence
  Synthetic oligonucleotide
ggtggcagccgtaaaccgagtaaaatgtca

SEQ ID NO: 22125 - DNA, 30 bp, Artificial Sequence
  Synthetic oligonucleotide
taagagaagtacaccagggtgatacgttca

SEQ ID NO: 22126 - DNA, 30 bp, Artificial Sequence
  Synthetic oligonucleotide
acacggtacagagaaggcgtagcgtgttca

SEQ ID NO: 22127 - DNA, 30 bp, Artificial Sequence
  Synthetic oligonucleotide
aggggcggaaccagttaaagggcgtaaaga

SEQ ID NO: 22128 - DNA, 30 bp, Artificial Sequence
  Synthetic oligonucleotide
gagccgatattcgaaaactagtattaaaga

SEQ ID NO: 22129 - DNA, 30 bp, Artificial Sequence
  Synthetic oligonucleotide
agtaacaatgccatgatagtatgaacaaga

SEQ ID NO: 22130 - DNA, 30 bp, Artificial Sequence
  Synthetic oligonucleotide
gggacgggacgagaccagtaactaacaaga

SEQ ID NO: 22131 - DNA, 30 bp, Artificial Sequence
  Synthetic oligonucleotide
aaagggccaaaaattagaagttcgacaaga

SEQ ID NO: 22132 - DNA, 30 bp, Artificial Sequence
  Synthetic oligonucleotide
aggagtggaaccttcgtaatgtatacaaga

SEQ ID NO: 22133 - DNA, 30 bp, Artificial Sequence
  Synthetic oligonucleotide
aaaggagaacctctagtggtgacggcaaga

SEQ ID NO: 22134 - DNA, 30 bp, Artificial Sequence
  Synthetic oligonucleotide
accaagaatcgaagatgtctcacaagaaga

SEQ ID NO: 22135 - DNA, 30 bp, Artificial Sequence
  Synthetic oligonucleotide
aaggggaaacggcatcctgcccgccgaaga

SEQ ID NO: 22136 - DNA, 30 bp, Artificial Sequence
  Synthetic oligonucleotide
tacagagctgagtgctggagtggcggaaga

SEQ ID NO: 22137 - DNA, 30 bp, Artificial Sequence
  Synthetic oligonucleotide
ggcgccaagcgagctacgaccacgataaga

SEQ ID NO: 22138 - DNA, 30 bp, Artificial Sequence
  Synthetic oligonucleotide
acaaaagccgaattaacggccgcgataaga

SEQ ID NO: 22139 - DNA, 30 bp, Artificial Sequence
  Synthetic oligonucleotide
acgggaacatcccccaatctaaatgacaga

SEQ ID NO: 22140 - DNA, 30 bp, Artificial Sequence
  Synthetic oligonucleotide
cagaggagtgcacagaggctccgggccaga

SEQ ID NO: 22141 - DNA, 30 bp, Artificial Sequence
  Synthetic oligonucleotide
atgcggacgagtgtgctaattccatccaga

SEQ ID NO: 22142 - DNA, 30 bp, Artificial Sequence
  Synthetic oligonucleotide
taacgaaagtctgatacccgaagatccaga

SEQ ID NO: 22143 - DNA, 30 bp, Artificial Sequence
  Synthetic oligonucleotide
cttgaaagtcaccgactaattccaagcaga

SEQ ID NO: 22144 - DNA, 30 bp, Artificial Sequence
  Synthetic oligonucleotide
cggtgcagggaccatgcttacacaatcaga

SEQ ID NO: 22145 - DNA, 30 bp, Artificial Sequence
  Synthetic oligonucleotide
cggaagtgtaacatcttactctccatcaga

SEQ ID NO: 22146 - DNA, 30 bp, Artificial Sequence
  Synthetic oligonucleotide
taataaaggacacacgggtaatagctcaga

SEQ ID NO: 22147 - DNA, 30 bp, Artificial Sequence
  Synthetic oligonucleotide
agaggtggccggcaggctacttgcgtcaga

SEQ ID NO: 22148 - DNA, 30 bp, Artificial Sequence
  Synthetic oligonucleotide
catgtagacttgtcccacaatcccgagaga

SEQ ID NO: 22149 - DNA, 30 bp, Artificial Sequence
  Synthetic oligonucleotide
aaagctgacaatataccgaataatgagaga

SEQ ID NO: 22150 - DNA, 30 bp, Artificial Sequence
  Synthetic oligonucleotide
gcaatacgggggaggcactgtacaaggaga

SEQ ID NO: 22151 - DNA, 30 bp, Artificial Sequence
  Synthetic oligonucleotide
aaggtgggcgaatcgcggagcataaggaga

SEQ ID NO: 22152 - DNA, 30 bp, Artificial Sequence
  Synthetic oligonucleotide
acataacggcactgagtggtgggcaggaga

SEQ ID NO: 22153 - DNA, 30 bp, Artificial Sequence
  Synthetic oligonucleotide
cgcatagactaggatgtcccgatcaggaga

SEQ ID NO: 22154 - DNA, 30 bp, Artificial Sequence
  Synthetic oligonucleotide
ctcgtttgaaggaaagacaaacagaggaga

SEQ ID NO: 22155 - DNA, 30 bp, Artificial Sequence
  Synthetic oligonucleotide
gaagagttaaagcgagtatatctccggaga

SEQ ID NO: 22156 - DNA, 31 bp, Artificial Sequence
  Synthetic oligonucleotide
aggcacctagctcgtaatgtgccgagggaga

SEQ ID NO: 22157 - DNA, 30 bp, Artificial Sequence
  Synthetic oligonucleotide
aagtgagtcggtgcgatgtgatccgggaga

SEQ ID NO: 22158 - DNA, 30 bp, Artificial Sequence
  Synthetic oligonucleotide
aagacaatgttataacacattacgctgaga

SEQ ID NO: 22159 - DNA, 30 bp, Artificial Sequence
  Synthetic oligonucleotide
cacgaaaatgagacttcatgatactctaga

SEQ ID NO: 22160 - DNA, 30 bp, Artificial Sequence
  Synthetic oligonucleotide
acgaatcaactatagcgtccaatcgttaga

SEQ ID NO: 22161 - DNA, 30 bp, Artificial Sequence
  Synthetic oligonucleotide
ccgtggggaagagaggactacgaagcacga

SEQ ID NO: 22162 - DNA, 30 bp, Artificial Sequence
  Synthetic oligonucleotide
tggcgtaatcatgtgggcggaggaagacga

SEQ ID NO: 22163 - DNA, 30 bp, Artificial Sequence
  Synthetic oligonucleotide
gggcaaccagattaagcgagcaggttacga

SEQ ID NO: 22164 - DNA, 30 bp, Artificial Sequence
  Synthetic oligonucleotide
gggaacaaaaagtatccgaacatgaaccga

SEQ ID NO: 22165 - DNA, 30 bp, Artificial Sequence
  Synthetic oligonucleotide
tggtgtataaaaagcagtatccaccaccga

SEQ ID NO: 22166 - DNA, 30 bp, Artificial Sequence
  Synthetic oligonucleotide
acgttatcgagcaacagtacccacacccga

SEQ ID NO: 22167 - DNA, 30 bp, Artificial Sequence
  Synthetic oligonucleotide
aactgccagagcggtaagatcggcgtccga

SEQ ID NO: 22168 - DNA, 30 bp, Artificial Sequence
  Synthetic oligonucleotide
ccaatcccattcataattttgagagcgcga

SEQ ID NO: 22169 - DNA, 30 bp, Artificial Sequence
  Synthetic oligonucleotide
cgaagtggatataacgaagcgcactggcga

SEQ ID NO: 22170 - DNA, 30 bp, Artificial Sequence
  Synthetic oligonucleotide
tctcggccacccaacttaatacacatgcga

SEQ ID NO: 22171 - DNA, 30 bp, Artificial Sequence
  Synthetic oligonucleotide
atggaataatcgcacctgagtcgcatgcga

SEQ ID NO: 22172 - DNA, 30 bp, Artificial Sequence
  Synthetic oligonucleotide
acggatcgtgcctagaacaggaataatcga

SEQ ID NO: 22173 - DNA, 30 bp, Artificial Sequence
  Synthetic oligonucleotide
agggctgtaagtctatagaaacctcatcga

SEQ ID NO: 22174 - DNA, 30 bp, Artificial Sequence
  Synthetic oligonucleotide
ccccggtgaaagagtactgagagcgatcga

SEQ ID NO: 22175 - DNA, 30 bp, Artificial Sequence
  Synthetic oligonucleotide
acgaaaagccgtttgagaacacatcgtcga

SEQ ID NO: 22176 - DNA, 30 bp, Artificial Sequence
  Synthetic oligonucleotide
acatcacagtttgtccgctcgaaagaagga

SEQ ID NO: 22177 - DNA, 30 bp, Artificial Sequence
  Synthetic oligonucleotide
gatgtgccgaaggggtgcgtggggtaagga

SEQ ID NO: 22178 - DNA, 30 bp, Artificial Sequence
  Synthetic oligonucleotide
cgtcaggaaatacatgggtagacaacagga

SEQ ID NO: 22179 - DNA, 30 bp, Artificial Sequence
  Synthetic oligonucleotide
tccaacagaataagcggatagcgtacagga

SEQ ID NO: 22180 - DNA, 30 bp, Artificial Sequence
  Synthetic oligonucleotide
aaggtaggtcgatagttatttaaggcagga

SEQ ID NO: 22181 - DNA, 30 bp, Artificial Sequence
  Synthetic oligonucleotide
ggaagtgcaaggccatcggacgtccgagga

SEQ ID NO: 22182 - DNA, 30 bp, Artificial Sequence
  Synthetic oligonucleotide
ggagtagtagcagctaagaaaacaatagga

SEQ ID NO: 22183 - DNA, 30 bp, Artificial Sequence
  Synthetic oligonucleotide
gtaggttagaagagcgaaagactagacgga

SEQ ID NO: 22184 - DNA, 30 bp, Artificial Sequence
  Synthetic oligonucleotide
aggcctaaatacaactgacaaggatacgga

SEQ ID NO: 22185 - DNA, 30 bp, Artificial Sequence
  Synthetic oligonucleotide
acctggataggcgcgaacaacagtgccgga

SEQ ID NO: 22186 - DNA, 30 bp, Artificial Sequence
  Synthetic oligonucleotide
tcaaacaggtaaaagcttagacaatccgga

SEQ ID NO: 22187 - DNA, 30 bp, Artificial Sequence
  Synthetic oligonucleotide
cgaggtgaaagtacgggaggtgcgtccgga

SEQ ID NO: 22188 - DNA, 30 bp, Artificial Sequence
  Synthetic oligonucleotide
gaatcgaaaaggtgctgagtggttagcgga

SEQ ID NO: 22189 - DNA, 30 bp, Artificial Sequence
  Synthetic oligonucleotide
ataaaggggtgcgcctacacatatgtcgga

SEQ ID NO: 22190 - DNA, 30 bp, Artificial Sequence
  Synthetic oligonucleotide
caatgcaggtgagacaacatgggggaggga

SEQ ID NO: 22191 - DNA, 30 bp, Artificial Sequence
  Synthetic oligonucleotide
acatccagacggggtggaggcgtaagggga

SEQ ID NO: 22192 - DNA, 30 bp, Artificial Sequence
  Synthetic oligonucleotide
cataacgaagacaccaagatgcgaggggga

SEQ ID NO: 22193 - DNA, 30 bp, Artificial Sequence
  Synthetic oligonucleotide
ggtcgacagatatgcgagtaggtcggggga

SEQ ID NO: 22194 - DNA, 40 bp, Artificial Sequence
  Synthetic oligonucleotide
aagatattacattcatggtatggtcggggatcggggggga

SEQ ID NO: 22195 - DNA, 30 bp, Artificial Sequence
  Synthetic oligonucleotide
taagactgcaggggctcaagaaatggggga

SEQ ID NO: 22196 - DNA, 30 bp, Artificial Sequence
  Synthetic oligonucleotide
catgaacggcggacagaatgccggctggga

SEQ ID NO: 22197 - DNA, 30 bp, Artificial Sequence
  Synthetic oligonucleotide
tcgtggaaaataccgtgatgccgtactgga

SEQ ID NO: 22198 - DNA, 30 bp, Artificial Sequence
  Synthetic oligonucleotide
agggggccgaagtggagaatcccgcgtgga

SEQ ID NO: 22199 - DNA, 30 bp, Artificial Sequence
  Synthetic oligonucleotide
caaagaaggcgagtggtataccgaggtgga

SEQ ID NO: 22200 - DNA, 30 bp, Artificial Sequence
  Synthetic oligonucleotide
accgcaacgagtcgaagcgtgcaatgtgga

SEQ ID NO: 22201 - DNA, 30 bp, Artificial Sequence
  Synthetic oligonucleotide
cagaataggtcagcaaatagtgacaaatga

SEQ ID NO: 22202 - DNA, 30 bp, Artificial Sequence
  Synthetic oligonucleotide
aaccggcgtgagatgacagaatgaacatga

SEQ ID NO: 22203 - DNA, 30 bp, Artificial Sequence
  Synthetic oligonucleotide
gtacgaccgacaagcgtatggagttactga

SEQ ID NO: 22204 - DNA, 30 bp, Artificial Sequence
  Synthetic oligonucleotide
cagtccattggccaaggaaaataaagctga

SEQ ID NO: 22205 - DNA, 30 bp, Artificial Sequence
  Synthetic oligonucleotide
tcgtaagcctatagaataagccatagctga

SEQ ID NO: 22206 - DNA, 30 bp, Artificial Sequence
  Synthetic oligonucleotide
cgacaacgctcggaagtggacgctgagtga

SEQ ID NO: 22207 - DNA, 30 bp, Artificial Sequence
  Synthetic oligonucleotide
acggaacaaaagagtgtaatcggggcgtga

SEQ ID NO: 22208 - DNA, 30 bp, Artificial Sequence
  Synthetic oligonucleotide
gaacgttcacccggtaatcaaggagtgtga

SEQ ID NO: 22209 - DNA, 30 bp, Artificial Sequence
  Synthetic oligonucleotide
gcgtgccaaaggacagaggatgatccttga

SEQ ID NO: 22210 - DNA, 30 bp, Artificial Sequence
  Synthetic oligonucleotide
ggagccgaagaggggtgaggcttgtgttga

SEQ ID NO: 22211 - DNA, 30 bp, Artificial Sequence
  Synthetic oligonucleotide
agaagccatctgagtagtaggggtacaata

SEQ ID NO: 22212 - DNA, 30 bp, Artificial Sequence
  Synthetic oligonucleotide
gtgtcgggcacggtcaacagtctaagaata

SEQ ID NO: 22213 - DNA, 30 bp, Artificial Sequence
  Synthetic oligonucleotide
atgaaattagaaagaggtagaagcggaata

SEQ ID NO: 22214 - DNA, 30 bp, Artificial Sequence
  Synthetic oligonucleotide
acggcgggaaatcagtaaaagcgcctaata

SEQ ID NO: 22215 - DNA, 30 bp, Artificial Sequence
  Synthetic oligonucleotide
tggggaaccattcagcagagatggctaata

SEQ ID NO: 22216 - DNA, 30 bp, Artificial Sequence
  Synthetic oligonucleotide
cgaagtccgagctgcgtccaacgtaccata

SEQ ID NO: 22217 - DNA, 30 bp, Artificial Sequence
  Synthetic oligonucleotide
gctaaagggtataagagaaagtggagcata

SEQ ID NO: 22218 - DNA, 30 bp, Artificial Sequence
  Synthetic oligonucleotide
gcaagaacaacagagcgacccgtttgcata

SEQ ID NO: 22219 - DNA, 30 bp, Artificial Sequence
  Synthetic oligonucleotide
aagtaagcaaacaatcaagcaacgttcata

SEQ ID NO: 22220 - DNA, 30 bp, Artificial Sequence
  Synthetic oligonucleotide
acagtgggcattcgagggggccgatcgata

SEQ ID NO: 22221 - DNA, 30 bp, Artificial Sequence
  Synthetic oligonucleotide
acaaagtcaggatgaaaaccaaactcgata

SEQ ID NO: 22222 - DNA, 30 bp, Artificial Sequence
  Synthetic oligonucleotide
cagcaaaatagttagcatagtcagatgata

SEQ ID NO: 22223 - DNA, 30 bp, Artificial Sequence
  Synthetic oligonucleotide
gaacgagttgttatcaggaccagagtgata

SEQ ID NO: 22224 - DNA, 30 bp, Artificial Sequence
  Synthetic oligonucleotide
cacaacgacaaaaggtggggggtaaatata

SEQ ID NO: 22225 - DNA, 30 bp, Artificial Sequence
  Synthetic oligonucleotide
gaagaaggcggttcgtagggagaaagacta

SEQ ID NO: 22226 - DNA, 30 bp, Artificial Sequence
  Synthetic oligonucleotide
acatgatgagaacagggagtctagatacta

SEQ ID NO: 22227 - DNA, 30 bp, Artificial Sequence
  Synthetic oligonucleotide
cataacacagggaccggcaatagattacta

SEQ ID NO: 22228 - DNA, 30 bp, Artificial Sequence
  Synthetic oligonucleotide
agcggtgaacccgaaaacggatgagaccta

SEQ ID NO: 22229 - DNA, 30 bp, Artificial Sequence
  Synthetic oligonucleotide
tccaagtaagagagatcagggatagaccta

SEQ ID NO: 22230 - DNA, 30 bp, Artificial Sequence
  Synthetic oligonucleotide
gcttcgaagggaagaactaagcagatccta

SEQ ID NO: 22231 - DNA, 30 bp, Artificial Sequence
  Synthetic oligonucleotide
cgaaaagagcaatcttaattaacgaagcta

SEQ ID NO: 22232 - DNA, 30 bp, Artificial Sequence
  Synthetic oligonucleotide
tcacgatttaaagaactactgggagagcta

SEQ ID NO: 22233 - DNA, 30 bp, Artificial Sequence
  Synthetic oligonucleotide
ggaccgagggaaatgttcatataggagcta

SEQ ID NO: 22234 - DNA, 30 bp, Artificial Sequence
  Synthetic oligonucleotide
cggaagataaaggaattatgtaatgagcta

SEQ ID NO: 22235 - DNA, 30 bp, Artificial Sequence
  Synthetic oligonucleotide
ccggatgtcgctacggagagaaaaaggcta

SEQ ID NO: 22236 - DNA, 31 bp, Artificial Sequence
  Synthetic oligonucleotide
caggaaaggccgactggggataagagtgcta

SEQ ID NO: 22237 - DNA, 30 bp, Artificial Sequence
  Synthetic oligonucleotide
tcaatcaaagcatgggaggaggacgtgcta

SEQ ID NO: 22238 - DNA, 30 bp, Artificial Sequence
  Synthetic oligonucleotide
acacgatatggatacactggatgcaatcta

SEQ ID NO: 22239 - DNA, 30 bp, Artificial Sequence
  Synthetic oligonucleotide
ccgagcaaggcaaagtcgaaggaccctcta

SEQ ID NO: 22240 - DNA, 30 bp, Artificial Sequence
  Synthetic oligonucleotide
cccatcaagtaacgaaggaggggcgaagta

SEQ ID NO: 22241 - DNA, 30 bp, Artificial Sequence
  Synthetic oligonucleotide
tgacgtgaagagaatggccatagtacagta

SEQ ID NO: 22242 - DNA, 30 bp, Artificial Sequence
  Synthetic oligonucleotide
cccgaaccacgaataatttgtaaagcagta

SEQ ID NO: 22243 - DNA, 30 bp, Artificial Sequence
  Synthetic oligonucleotide
ggtcagtggatcaaacaacacgagtcagta

SEQ ID NO: 22244 - DNA, 30 bp, Artificial Sequence
  Synthetic oligonucleotide
gtaaggtcaacgtagaacgattaaggagta

SEQ ID NO: 22245 - DNA, 30 bp, Artificial Sequence
  Synthetic oligonucleotide
aatgggagtcaaggcgggtaataaatagta

SEQ ID NO: 22246 - DNA, 30 bp, Artificial Sequence
  Synthetic oligonucleotide
gccgcgaggcaaaggatctagaactacgta

SEQ ID NO: 22247 - DNA, 30 bp, Artificial Sequence
  Synthetic oligonucleotide
tacggaacagcgtaagttctatacagcgta

SEQ ID NO: 22248 - DNA, 30 bp, Artificial Sequence
  Synthetic oligonucleotide
atgcggtgccaccggtaaactgatagcgta

SEQ ID NO: 22249 - DNA, 30 bp, Artificial Sequence
  Synthetic oligonucleotide
ccagatgacggaagcaaggatagcatcgta

SEQ ID NO: 22250 - DNA, 30 bp, Artificial Sequence
  Synthetic oligonucleotide
taagagagtcacacagggggaggtgtcgta

SEQ ID NO: 22251 - DNA, 30 bp, Artificial Sequence
  Synthetic oligonucleotide
ggcgaacctcgtgtcggaggcaacttcgta

SEQ ID NO: 22252 - DNA, 30 bp, Artificial Sequence
  Synthetic oligonucleotide
agcgcgatgcacaattaaggagagagggta

SEQ ID NO: 22253 - DNA, 30 bp, Artificial Sequence
  Synthetic oligonucleotide
cggagaggacagctgaggtggtaacgggta

SEQ ID NO: 22254 - DNA, 30 bp, Artificial Sequence
  Synthetic oligonucleotide
ggagagtaaacccgcagtcggaagggggta

SEQ ID NO: 22255 - DNA, 30 bp, Artificial Sequence
  Synthetic oligonucleotide
cttagaaattgcgagaggggacaatgggta

SEQ ID NO: 22256 - DNA, 30 bp, Artificial Sequence
  Synthetic oligonucleotide
tagaggtcgagtcagaagggtaacgtggta

SEQ ID NO: 22257 - DNA, 30 bp, Artificial Sequence
  Synthetic oligonucleotide
tcagatcatggtgaatagtgaaaggtggta

SEQ ID NO: 22258 - DNA, 30 bp, Artificial Sequence
  Synthetic oligonucleotide
aagagctgaaagcatgaaattgacaatgta

SEQ ID NO: 22259 - DNA, 30 bp, Artificial Sequence
  Synthetic oligonucleotide
cggaaggtgcgtaggaacaattaatatgta

SEQ ID NO: 22260 - DNA, 30 bp, Artificial Sequence
  Synthetic oligonucleotide
catcaacgagagctaaagccaggtggtgta

SEQ ID NO: 22261 - DNA, 30 bp, Artificial Sequence
  Synthetic oligonucleotide
aagaggcgcatgggggccagtccacaatta

SEQ ID NO: 22262 - DNA, 30 bp, Artificial Sequence
  Synthetic oligonucleotide
aacgaatagtgaggaaaatgattcgactta

SEQ ID NO: 22263 - DNA, 30 bp, Artificial Sequence
  Synthetic oligonucleotide
ctggagataatatacatcaacaaatcgtta

SEQ ID NO: 22264 - DNA, 30 bp, Artificial Sequence
  Synthetic oligonucleotide
gcaaggatggaaaatgaagtagggaattta

SEQ ID NO: 22265 - DNA, 31 bp, Artificial Sequence
  Synthetic oligonucleotide
aagtgaggagtgacatcccgggggcaaaaac

SEQ ID NO: 22266 - DNA, 30 bp, Artificial Sequence
  Synthetic oligonucleotide
atcgaagatttggggtaagggcgttaaaac

SEQ ID NO: 22267 - DNA, 30 bp, Artificial Sequence
  Synthetic oligonucleotide
ctagccacacgaaggggcgcgtacagaaac

SEQ ID NO: 22268 - DNA, 30 bp, Artificial Sequence
  Synthetic oligonucleotide
atcatacgggcatcgaaaactacgggaaac

SEQ ID NO: 22269 - DNA, 30 bp, Artificial Sequence
  Synthetic oligonucleotide
ggaaataaacggtgagaacgtgcagtaaac

SEQ ID NO: 22270 - DNA, 30 bp, Artificial Sequence
  Synthetic oligonucleotide
gtggggaaatcgaactcaattccagccaac

SEQ ID NO: 22271 - DNA, 30 bp, Artificial Sequence
  Synthetic oligonucleotide
tgcctatagtgcaagaaagatagcgccaac

SEQ ID NO: 22272 - DNA, 30 bp, Artificial Sequence
  Synthetic oligonucleotide
gcgaagctagactttcaacaactaagcaac

SEQ ID NO: 22273 - DNA, 30 bp, Artificial Sequence
  Synthetic oligonucleotide
tcaggtatagcaggggggcacgcgtgcaac

SEQ ID NO: 22274 - DNA, 30 bp, Artificial Sequence
  Synthetic oligonucleotide
aacagaacgataccgactcacaacatcaac

SEQ ID NO: 22275 - DNA, 30 bp, Artificial Sequence
  Synthetic oligonucleotide
ctaggaaccaggaacatttgctcacagaac

SEQ ID NO: 22276 - DNA, 30 bp, Artificial Sequence
  Synthetic oligonucleotide
cggcacacgaaggtattgagcacagagaac

SEQ ID NO: 22277 - DNA, 30 bp, Artificial Sequence
  Synthetic oligonucleotide
cggagtgatgcccaagtggttatgtcgaac

SEQ ID NO: 22278 - DNA, 30 bp, Artificial Sequence
  Synthetic oligonucleotide
aggacgtcggatcagaaacacctcatgaac

SEQ ID NO: 22279 - DNA, 30 bp, Artificial Sequence
  Synthetic oligonucleotide
cgcgaagctgaaccgatatcaatacataac

SEQ ID NO: 22280 - DNA, 30 bp, Artificial Sequence
  Synthetic oligonucleotide
tcgaaaaaaggtagcgctgcgacccataac

SEQ ID NO: 22281 - DNA, 30 bp, Artificial Sequence
  Synthetic oligonucleotide
agaatgggaaaaaggccgtggagaagtaac

SEQ ID NO: 22282 - DNA, 30 bp, Artificial Sequence
  Synthetic oligonucleotide
gtgaggcaagatagcgggaagtgcagtaac

SEQ ID NO: 22283 - DNA, 30 bp, Artificial Sequence
  Synthetic oligonucleotide
tgcataaaatgagttaccagtgtatgtaac

SEQ ID NO: 22284 - DNA, 30 bp, Artificial Sequence
  Synthetic oligonucleotide
aaccgagcgagtacaacgaaacatcgccac

SEQ ID NO: 22285 - DNA, 30 bp, Artificial Sequence
  Synthetic oligonucleotide
ggtggaacgcgtataagaactgttcgccac

SEQ ID NO: 22286 - DNA, 30 bp, Artificial Sequence
  Synthetic oligonucleotide
aggatagaggagtacgtatagcggttccac

SEQ ID NO: 22287 - DNA, 30 bp, Artificial Sequence
  Synthetic oligonucleotide
tgtccagcccaggcgcaacctagagagcac

SEQ ID NO: 22288 - DNA, 30 bp, Artificial Sequence
  Synthetic oligonucleotide
tcacggtaatttacctacaaagaggagcac

SEQ ID NO: 22289 - DNA, 30 bp, Artificial Sequence
  Synthetic oligonucleotide
ccaaatcatcgcaatcaaatatcgcggcac

SEQ ID NO: 22290 - DNA, 30 bp, Artificial Sequence
  Synthetic oligonucleotide
acggcgacgtggatatatgcgctgtggcac

SEQ ID NO: 22291 - DNA, 30 bp, Artificial Sequence
  Synthetic oligonucleotide
agagaggtgtacacatagtcgtgcacagac

SEQ ID NO: 22292 - DNA, 30 bp, Artificial Sequence
  Synthetic oligonucleotide
gagagcaatatgtcaccaagcctaagagac

SEQ ID NO: 22293 - DNA, 30 bp, Artificial Sequence
  Synthetic oligonucleotide
aggtgaggattggacagtattaggagagac

SEQ ID NO: 22294 - DNA, 30 bp, Artificial Sequence
  Synthetic oligonucleotide
aaggagtgaaaggataatgcggtgctagac

SEQ ID NO: 22295 - DNA, 30 bp, Artificial Sequence
  Synthetic oligonucleotide
aaaatgggaagcagggtaacgagcgtagac

SEQ ID NO: 22296 - DNA, 30 bp, Artificial Sequence
  Synthetic oligonucleotide
tagaaacataaaccgaaaacagcagacgac

SEQ ID NO: 22297 - DNA, 30 bp, Artificial Sequence
  Synthetic oligonucleotide
atgagatcaattaggtcttcctgtgccgac

SEQ ID NO: 22298 - DNA, 30 bp, Artificial Sequence
  Synthetic oligonucleotide
acaggggcgggtgcactcctagcgtccgac

SEQ ID NO: 22299 - DNA, 30 bp, Artificial Sequence
  Synthetic oligonucleotide
aacgatgggagtaccacagggcacaaggac

SEQ ID NO: 22300 - DNA, 30 bp, Artificial Sequence
  Synthetic oligonucleotide
cctagaaatgggaaggtcctcgtatgggac

SEQ ID NO: 22301 - DNA, 30 bp, Artificial Sequence
  Synthetic oligonucleotide
gggacatggaatagtagacatggtcgtgac

SEQ ID NO: 22302 - DNA, 30 bp, Artificial Sequence
  Synthetic oligonucleotide
acgtacgtaaccaatgcgaccaagtttgac

SEQ ID NO: 22303 - DNA, 30 bp, Artificial Sequence
  Synthetic oligonucleotide
atgacagaaccaaaaattgcagtgacatac

SEQ ID NO: 22304 - DNA, 30 bp, Artificial Sequence
  Synthetic oligonucleotide
agaaataccgaataactcggatgaccatac

SEQ ID NO: 22305 - DNA, 30 bp, Artificial Sequence
  Synthetic oligonucleotide
tgaggtaggggatgccgtcttgcatgatac

SEQ ID NO: 22306 - DNA, 30 bp, Artificial Sequence
  Synthetic oligonucleotide
gtagaagccaacgtgaacgaacggtgatac

SEQ ID NO: 22307 - DNA, 30 bp, Artificial Sequence
  Synthetic oligonucleotide
atggaactagagtggatgagtattaactac

SEQ ID NO: 22308 - DNA, 30 bp, Artificial Sequence
  Synthetic oligonucleotide
tataggtcaccggagataagcataagctac

SEQ ID NO: 22309 - DNA, 30 bp, Artificial Sequence
  Synthetic oligonucleotide
gatctaaaacaaagcaaaaagtctcgctac

SEQ ID NO: 22310 - DNA, 30 bp, Artificial Sequence
  Synthetic oligonucleotide
cagcgggttgcgggcaagagtaacaagtac

SEQ ID NO: 22311 - DNA, 30 bp, Artificial Sequence
  Synthetic oligonucleotide
agcatccagtgttacacaaagagggagtac

SEQ ID NO: 22312 - DNA, 30 bp, Artificial Sequence
  Synthetic oligonucleotide
aggagaaatatcgcagttatctcgccgtac

SEQ ID NO: 22313 - DNA, 30 bp, Artificial Sequence
  Synthetic oligonucleotide
acggatggcccatatacacttgagaattac

SEQ ID NO: 22314 - DNA, 30 bp, Artificial Sequence
  Synthetic oligonucleotide
taggaatagggaaaaagaggttccagaacc

SEQ ID NO: 22315 - DNA, 30 bp, Artificial Sequence
  Synthetic oligonucleotide
cgtcaaagacacgggaaacaataagacacc

SEQ ID NO: 22316 - DNA, 30 bp, Artificial Sequence
  Synthetic oligonucleotide
ggagacgatgaataacgctcgaaatccacc

SEQ ID NO: 22317 - DNA, 30 bp, Artificial Sequence
  Synthetic oligonucleotide
agggcccgaacgaagtaaaacagcatcacc

SEQ ID NO: 22318 - DNA, 30 bp, Artificial Sequence
  Synthetic oligonucleotide
tgcatgcatcgccaaaatgagtacgtcacc

SEQ ID NO: 22319 - DNA, 30 bp, Artificial Sequence
  Synthetic oligonucleotide
ggcatagcgagtatagggaggatcaggacc

SEQ ID NO: 22320 - DNA, 30 bp, Artificial Sequence
  Synthetic oligonucleotide
ggcaaaaaaggcagtacgtcgaggatgacc

SEQ ID NO: 22321 - DNA, 30 bp, Artificial Sequence
  Synthetic oligonucleotide
cggccagaggaactcaataagcgagtgacc

SEQ ID NO: 22322 - DNA, 30 bp, Artificial Sequence
  Synthetic oligonucleotide
gtgatgaagaaaagtgagccactgagtacc

SEQ ID NO: 22323 - DNA, 30 bp, Artificial Sequence
  Synthetic oligonucleotide
ccgtgagtgcgagagagttacatcgtaccc

SEQ ID NO: 22324 - DNA, 30 bp, Artificial Sequence
  Synthetic oligonucleotide
aaggacgaagagaaactgatgcaggttccc

SEQ ID NO: 22325 - DNA, 30 bp, Artificial Sequence
  Synthetic oligonucleotide
tcagtgaagaaacaagacataggggaagcc

SEQ ID NO: 22326 - DNA, 30 bp, Artificial Sequence
  Synthetic oligonucleotide
aggggtggggagtgcttgacaaagtaagcc

SEQ ID NO: 22327 - DNA, 30 bp, Artificial Sequence
  Synthetic oligonucleotide
atcgtgaaacccgaccgggacaaatgagcc

SEQ ID NO: 22328 - DNA, 30 bp, Artificial Sequence
  Synthetic oligonucleotide
cgatgataaaccgtcgaacaatggtgcgcc

SEQ ID NO: 22329 - DNA, 30 bp, Artificial Sequence
  Synthetic oligonucleotide
tcgcagactgagatagagggggataaggcc

SEQ ID NO: 22330 - DNA, 30 bp, Artificial Sequence
  Synthetic oligonucleotide
atcggtacgctcttaagagggaggcatgcc

SEQ ID NO: 22331 - DNA, 30 bp, Artificial Sequence
  Synthetic oligonucleotide
acagggctcagtgtaaaccggaaagctgcc

SEQ ID NO: 22332 - DNA, 30 bp, Artificial Sequence
  Synthetic oligonucleotide
acggtccgggacggatgaaaaagcacatcc

SEQ ID NO: 22333 - DNA, 30 bp, Artificial Sequence
  Synthetic oligonucleotide
gaagcagaccacaataagacaagcctatcc

SEQ ID NO: 22334 - DNA, 30 bp, Artificial Sequence
  Synthetic oligonucleotide
acgatcgtggaggattcgtgtcacatctcc

SEQ ID NO: 22335 - DNA, 30 bp, Artificial Sequence
  Synthetic oligonucleotide
cagtcacacggaggattggcgattgcgtcc

SEQ ID NO: 22336 - DNA, 30 bp, Artificial Sequence
  Synthetic oligonucleotide
aggcgccagatcatcacaatcagagattcc

SEQ ID NO: 22337 - DNA, 30 bp, Artificial Sequence
  Synthetic oligonucleotide
aagagaaaatctcgccccgcgaccaaaagc

SEQ ID NO: 22338 - DNA, 30 bp, Artificial Sequence
  Synthetic oligonucleotide
cacggagtaagacatgcttcactgtaaagc

SEQ ID NO: 22339 - DNA, 30 bp, Artificial Sequence
  Synthetic oligonucleotide
atgagtgaaagcggagatccgcgtacaagc

SEQ ID NO: 22340 - DNA, 30 bp, Artificial Sequence
  Synthetic oligonucleotide
agagttgaaagcgaaccgacccaaccaagc

SEQ ID NO: 22341 - DNA, 30 bp, Artificial Sequence
  Synthetic oligonucleotide
agacggcatcctcgggagtgtaggggaagc

SEQ ID NO: 22342 - DNA, 30 bp, Artificial Sequence
  Synthetic oligonucleotide
cgcacaggagtgcgttacaaatctggaagc

SEQ ID NO: 22343 - DNA, 30 bp, Artificial Sequence
  Synthetic oligonucleotide
gcagaccaggaagaaatttcccaaataagc

SEQ ID NO: 22344 - DNA, 30 bp, Artificial Sequence
  Synthetic oligonucleotide
acgagaccaatgcgcgacaagaggataagc

SEQ ID NO: 22345 - DNA, 30 bp, Artificial Sequence
  Synthetic oligonucleotide
caaacgcgtcacgccatggggaaattaagc

SEQ ID NO: 22346 - DNA, 30 bp, Artificial Sequence
  Synthetic oligonucleotide
gcaaagtatgcgcgcaatccagagcacagc

SEQ ID NO: 22347 - DNA, 31 bp, Artificial Sequence
  Synthetic oligonucleotide
tcatggatatctagcgtacaagcctaccagc

SEQ ID NO: 22348 - DNA, 30 bp, Artificial Sequence
  Synthetic oligonucleotide
gacgtggcgggagagtgcaaaggtgtcagc

SEQ ID NO: 22349 - DNA, 30 bp, Artificial Sequence
  Synthetic oligonucleotide
ccgtagaacactacaagctggacgaagagc

SEQ ID NO: 22350 - DNA, 30 bp, Artificial Sequence
  Synthetic oligonucleotide
cgcttggacaatactcacaagctacagagc

SEQ ID NO: 22351 - DNA, 30 bp, Artificial Sequence
  Synthetic oligonucleotide
cctggaagtaactaggaaaagtgtacgagc

SEQ ID NO: 22352 - DNA, 30 bp, Artificial Sequence
  Synthetic oligonucleotide
tggcctagtaagagtatgtacaccaggagc

SEQ ID NO: 22353 - DNA, 30 bp, Artificial Sequence
  Synthetic oligonucleotide
ggtgaacggggcacactaagcacagggagc

SEQ ID NO: 22354 - DNA, 30 bp, Artificial Sequence
  Synthetic oligonucleotide
gtgggtcaacaagttataacgaacgggagc

SEQ ID NO: 22355 - DNA, 30 bp, Artificial Sequence
  Synthetic oligonucleotide
cgtagattgacaggtggatcaagcgggagc

SEQ ID NO: 22356 - DNA, 30 bp, Artificial Sequence
  Synthetic oligonucleotide
ccgacacacagagtcataaataatctgagc

SEQ ID NO: 22357 - DNA, 30 bp, Artificial Sequence
  Synthetic oligonucleotide
agggttagacgagagggacggttagtgagc

SEQ ID NO: 22358 - DNA, 30 bp, Artificial Sequence
  Synthetic oligonucleotide
gggagtcccaaaagtaagacatacgtgagc

SEQ ID NO: 22359 - DNA, 30 bp, Artificial Sequence
  Synthetic oligonucleotide
agaattatcggaaagtaaggcgggaatagc

SEQ ID NO: 22360 - DNA, 30 bp, Artificial Sequence
  Synthetic oligonucleotide
tcacaccacgttagccagaggcaaagtagc

SEQ ID NO: 22361 - DNA, 30 bp, Artificial Sequence
  Synthetic oligonucleotide
aggaatccttcagatgaacgaaaaggtagc

SEQ ID NO: 22362 - DNA, 30 bp, Artificial Sequence
  Synthetic oligonucleotide
acaggggacgggaaggtatttagccttagc

SEQ ID NO: 22363 - DNA, 30 bp, Artificial Sequence
  Synthetic oligonucleotide
acgaagtctttaaagccctcagagatacgc

SEQ ID NO: 22364 - DNA, 30 bp, Artificial Sequence
  Synthetic oligonucleotide
tgacgaaggactatggggggtacagtacgc

SEQ ID NO: 22365 - DNA, 30 bp, Artificial Sequence
  Synthetic oligonucleotide
gcaagttcaacaaaagataaaagctcccgc

SEQ ID NO: 22366 - DNA, 30 bp, Artificial Sequence
  Synthetic oligonucleotide
tcgcagggagacgtcatccaaatgtgccgc

SEQ ID NO: 22367 - DNA, 30 bp, Artificial Sequence
  Synthetic oligonucleotide
gggggtcatgaagtcgacattccctcgcgc

SEQ ID NO: 22368 - DNA, 30 bp, Artificial Sequence
  Synthetic oligonucleotide
tgaggagtgtcaatgtgatagcgtattcgc

SEQ ID NO: 22369 - DNA, 30 bp, Artificial Sequence
  Synthetic oligonucleotide
cgcgatacagaatccaatatatagcaaggc

SEQ ID NO: 22370 - DNA, 30 bp, Artificial Sequence
  Synthetic oligonucleotide
aaccggcaaatcaaatcgagtcgtcaaggc

SEQ ID NO: 22371 - DNA, 30 bp, Artificial Sequence
  Synthetic oligonucleotide
actggcgaagcgaaaaaggcgcactaaggc

SEQ ID NO: 22372 - DNA, 30 bp, Artificial Sequence
  Synthetic oligonucleotide
atgatgaggagagagcaaggtcagtaaggc

SEQ ID NO: 22373 - DNA, 30 bp, Artificial Sequence
  Synthetic oligonucleotide
cgaacagcggactaggaccagaggagaggc

SEQ ID NO: 22374 - DNA, 30 bp, Artificial Sequence
  Synthetic oligonucleotide
gacatagacaagggaaggaggatttacggc

SEQ ID NO: 22375 - DNA, 30 bp, Artificial Sequence
  Synthetic oligonucleotide
atgcgacaaaactcaccccacaggcccggc

SEQ ID NO: 22376 - DNA, 30 bp, Artificial Sequence
  Synthetic oligonucleotide
tgtaaaacaagataaaaagtcggagccggc

SEQ ID NO: 22377 - DNA, 30 bp, Artificial Sequence
  Synthetic oligonucleotide
acaaggaaaaacttctgacgaataatcggc

SEQ ID NO: 22378 - DNA, 30 bp, Artificial Sequence
  Synthetic oligonucleotide
acctccaacatctcacaagacaagatcggc

SEQ ID NO: 22379 - DNA, 30 bp, Artificial Sequence
  Synthetic oligonucleotide
agcgagatactggggacgtgtagtgtcggc

SEQ ID NO: 22380 - DNA, 30 bp, Artificial Sequence
  Synthetic oligonucleotide
agtaagggtaaaagaggacacacaaagggc

SEQ ID NO: 22381 - DNA, 30 bp, Artificial Sequence
  Synthetic oligonucleotide
acgagcacatcatatatcaaggcagagggc

SEQ ID NO: 22382 - DNA, 30 bp, Artificial Sequence
  Synthetic oligonucleotide
ggtgcatacatggcaccgactacatagggc

SEQ ID NO: 22383 - DNA, 30 bp, Artificial Sequence
  Synthetic oligonucleotide
ttagtacgctcaatcacagaagggtcgggc

SEQ ID NO: 22384 - DNA, 30 bp, Artificial Sequence
  Synthetic oligonucleotide
caggacgcaaatgggattacgctcgggggc

SEQ ID NO: 22385 - DNA, 30 bp, Artificial Sequence
  Synthetic oligonucleotide
aggtatacattagactagaagggttggggc

SEQ ID NO: 22386 - DNA, 30 bp, Artificial Sequence
  Synthetic oligonucleotide
aaggaaacggtgtaccgaacgagtcgtggc

SEQ ID NO: 22387 - DNA, 30 bp, Artificial Sequence
  Synthetic oligonucleotide
ggcgaacacgggtaacacctcgcaattggc

SEQ ID NO: 22388 - DNA, 30 bp, Artificial Sequence
  Synthetic oligonucleotide
ggatgcacatctggacaaatgctaccatgc

SEQ ID NO: 22389 - DNA, 30 bp, Artificial Sequence
  Synthetic oligonucleotide
gcaagcacagatgacaaatgcaccccatgc

SEQ ID NO: 22390 - DNA, 30 bp, Artificial Sequence
  Synthetic oligonucleotide
gaccccgtgacgtctcgaaggaaagcatgc

SEQ ID NO: 22391 - DNA, 30 bp, Artificial Sequence
  Synthetic oligonucleotide
tagtgcagaaaaagggatggggtcaactgc

SEQ ID NO: 22392 - DNA, 30 bp, Artificial Sequence
  Synthetic oligonucleotide
tgtggagatggcgatggttagtgaccgtgc

SEQ ID NO: 22393 - DNA, 30 bp, Artificial Sequence
  Synthetic oligonucleotide
cgatgtcagaaatttccgaagtcagggtgc

SEQ ID NO: 22394 - DNA, 30 bp, Artificial Sequence
  Synthetic oligonucleotide
aacgtagagcgcgagaaggggtgattgtgc

SEQ ID NO: 22395 - DNA, 30 bp, Artificial Sequence
  Synthetic oligonucleotide
cggagggcgtaagcgcacgaccctaaaatc

SEQ ID NO: 22396 - DNA, 30 bp, Artificial Sequence
  Synthetic oligonucleotide
caggggtagcaatgccaagatatgcgaatc

SEQ ID NO: 22397 - DNA, 30 bp, Artificial Sequence
  Synthetic oligonucleotide
ccaaacggcggaagggaatacctggacatc

SEQ ID NO: 22398 - DNA, 30 bp, Artificial Sequence
  Synthetic oligonucleotide
acgtcaaagatgtaagggagtcgtcgcatc

SEQ ID NO: 22399 - DNA, 30 bp, Artificial Sequence
  Synthetic oligonucleotide
accgcggaaggcaagtcgggatagtagatc

SEQ ID NO: 22400 - DNA, 30 bp, Artificial Sequence
  Synthetic oligonucleotide
agacaagcccgtcttagaatgccgaatatc

SEQ ID NO: 22401 - DNA, 30 bp, Artificial Sequence
  Synthetic oligonucleotide
cgacgaacattataggaaaggtgaattatc

SEQ ID NO: 22402 - DNA, 30 bp, Artificial Sequence
  Synthetic oligonucleotide
agggacgtttgtcagatcgagaagacactc

SEQ ID NO: 22403 - DNA, 30 bp, Artificial Sequence
  Synthetic oligonucleotide
acagaggtacacctgagatctcaagcactc

SEQ ID NO: 22404 - DNA, 30 bp, Artificial Sequence
  Synthetic oligonucleotide
ggtacatgtaggcaaaagcgacgatcactc

SEQ ID NO: 22405 - DNA, 30 bp, Artificial Sequence
  Synthetic oligonucleotide
gggaggagaggccaccgcaatgtaaagctc

SEQ ID NO: 22406 - DNA, 30 bp, Artificial Sequence
  Synthetic oligonucleotide
tgaacgagggcatgaatggacttcaagctc

SEQ ID NO: 22407 - DNA, 30 bp, Artificial Sequence
  Synthetic oligonucleotide
cacatccagcgaaatatgcctcgtatgctc

SEQ ID NO: 22408 - DNA, 30 bp, Artificial Sequence
  Synthetic oligonucleotide
ttgagggcgaacttcgaaaaaagattgctc

SEQ ID NO: 22409 - DNA, 30 bp, Artificial Sequence
  Synthetic oligonucleotide
cgacgaaaagggattgcccgattataagtc

SEQ ID NO: 22410 - DNA, 30 bp, Artificial Sequence
  Synthetic oligonucleotide
aacgtgcgcgaacgaagaggattaacagtc

SEQ ID NO: 22411 - DNA, 30 bp, Artificial Sequence
  Synthetic oligonucleotide
aaggctaggtgagtgaaaaagggttcagtc

SEQ ID NO: 22412 - DNA, 30 bp, Artificial Sequence
  Synthetic oligonucleotide
cggagtaggcacacggccaagttctgagtc

SEQ ID NO: 22413 - DNA, 30 bp, Artificial Sequence
  Synthetic oligonucleotide
caacgtgagggtatagaacggtcgtacgtc

SEQ ID NO: 22414 - DNA, 30 bp, Artificial Sequence
  Synthetic oligonucleotide
ccaggagcggtaatctagtgacgaaccgtc

SEQ ID NO: 22415 - DNA, 30 bp, Artificial Sequence
  Synthetic oligonucleotide
gtaagagtgaaactgagaaccacccgggtc

SEQ ID NO: 22416 - DNA, 30 bp, Artificial Sequence
  Synthetic oligonucleotide
acgcggtgatcaacagcgggcaaagtggtc

SEQ ID NO: 22417 - DNA, 30 bp, Artificial Sequence
  Synthetic oligonucleotide
cgtaacagtgtccaggatataaggcatgtc

SEQ ID NO: 22418 - DNA, 30 bp, Artificial Sequence
  Synthetic oligonucleotide
gccggaattgcgattagagggactcatgtc

SEQ ID NO: 22419 - DNA, 30 bp, Artificial Sequence
  Synthetic oligonucleotide
acgtgaagtcatagatgttgccattcattc

SEQ ID NO: 22420 - DNA, 30 bp, Artificial Sequence
  Synthetic oligonucleotide
tggcgtcagatgggaacacgacaccgattc

SEQ ID NO: 22421 - DNA, 31 bp, Artificial Sequence
  Synthetic oligonucleotide
acaggacgccaattataaagctacatccttc

SEQ ID NO: 22422 - DNA, 30 bp, Artificial Sequence
  Synthetic oligonucleotide
cgattaataaaaggaaagtcaaacgcgttc

SEQ ID NO: 22423 - DNA, 30 bp, Artificial Sequence
  Synthetic oligonucleotide
taagagatgaatcatataacggggaaaaag

SEQ ID NO: 22424 - DNA, 30 bp, Artificial Sequence
  Synthetic oligonucleotide
agggaggcaagacgccagaaagacgaaaag

SEQ ID NO: 22425 - DNA, 30 bp, Artificial Sequence
  Synthetic oligonucleotide
cgcgtatgagcaagctacacagatgaaaag

SEQ ID NO: 22426 - DNA, 30 bp, Artificial Sequence
  Synthetic oligonucleotide
aggacggcgttcatagccgaggcgtaaaag

SEQ ID NO: 22427 - DNA, 30 bp, Artificial Sequence
  Synthetic oligonucleotide
agggtagtgcatagcaccggcagaacaaag

SEQ ID NO: 22428 - DNA, 30 bp, Artificial Sequence
  Synthetic oligonucleotide
tcggccgagtgcttacatgacttcacaaag

SEQ ID NO: 22429 - DNA, 30 bp, Artificial Sequence
  Synthetic oligonucleotide
tatgcaacttctcaccaatgcgaaccaaag

SEQ ID NO: 22430 - DNA, 31 bp, Artificial Sequence
  Synthetic oligonucleotide
acctgtggtaggggaaaaacctgacccaaag

SEQ ID NO: 22431 - DNA, 30 bp, Artificial Sequence
  Synthetic oligonucleotide
aaagcaagtactcccactgcatgaagaaag

SEQ ID NO: 22432 - DNA, 30 bp, Artificial Sequence
  Synthetic oligonucleotide
cacaacaaatcggtacttaccgtacgaaag

SEQ ID NO: 22433 - DNA, 30 bp, Artificial Sequence
  Synthetic oligonucleotide
tgggaggcatgaaaatcacggtagcgaaag

SEQ ID NO: 22434 - DNA, 30 bp, Artificial Sequence
  Synthetic oligonucleotide
ggtacggcctatcaacacagggatcgaaag

SEQ ID NO: 22435 - DNA, 30 bp, Artificial Sequence
  Synthetic oligonucleotide
ctgagactaatccagacacgtggtcgaaag

SEQ ID NO: 22436 - DNA, 30 bp, Artificial Sequence
  Synthetic oligonucleotide
acttgacagaacgggagaggctgtggaaag

SEQ ID NO: 22437 - DNA, 30 bp, Artificial Sequence
  Synthetic oligonucleotide
ggtgccacgacggtaccaagagacataaag

SEQ ID NO: 22438 - DNA, 30 bp, Artificial Sequence
  Synthetic oligonucleotide
acaaaaaatgaggagcgataagccctaaag

SEQ ID NO: 22439 - DNA, 30 bp, Artificial Sequence
  Synthetic oligonucleotide
agggacgagaaaccaactgtcgtcctaaag

SEQ ID NO: 22440 - DNA, 30 bp, Artificial Sequence
  Synthetic oligonucleotide
agcgggcaccaaacaatcgtcatagtaaag

SEQ ID NO: 22441 - DNA, 30 bp, Artificial Sequence
  Synthetic oligonucleotide
tccaaactcggagtggctgcacccgacaag

SEQ ID NO: 22442 - DNA, 30 bp, Artificial Sequence
  Synthetic oligonucleotide
acggcccaggtacctgtacacatatacaag

SEQ ID NO: 22443 - DNA, 30 bp, Artificial Sequence
  Synthetic oligonucleotide
caagccataaaggatgtagaatacaccaag

SEQ ID NO: 22444 - DNA, 30 bp, Artificial Sequence
  Synthetic oligonucleotide
agggtgacagaatccgagggaattaccaag

SEQ ID NO: 22445 - DNA, 30 bp, Artificial Sequence
  Synthetic oligonucleotide
ttgcgaattacaaacgggtgggccagcaag

SEQ ID NO: 22446 - DNA, 30 bp, Artificial Sequence
  Synthetic oligonucleotide
caaaaagagagtctgactggtaaccgcaag

SEQ ID NO: 22447 - DNA, 30 bp, Artificial Sequence
  Synthetic oligonucleotide
acaatggaatcctagatcgacacgggcaag

SEQ ID NO: 22448 - DNA, 30 bp, Artificial Sequence
  Synthetic oligonucleotide
ggtggggtcaggagaaacaacgaagtcaag

SEQ ID NO: 22449 - DNA, 30 bp, Artificial Sequence
  Synthetic oligonucleotide
gctagacagggctataaggatgaggtcaag

SEQ ID NO: 22450 - DNA, 30 bp, Artificial Sequence
  Synthetic oligonucleotide
cgatggtggcgacaagactcgaccgagaag

SEQ ID NO: 22451 - DNA, 30 bp, Artificial Sequence
  Synthetic oligonucleotide
ccgagattgaaagtcattctccttacgaag

SEQ ID NO: 22452 - DNA, 30 bp, Artificial Sequence
  Synthetic oligonucleotide
tatgttggaaatcgtagcaagaggaggaag

SEQ ID NO: 22453 - DNA, 30 bp, Artificial Sequence
  Synthetic oligonucleotide
cgtgtgacttaaccaaacttaggatggaag

SEQ ID NO: 22454 - DNA, 30 bp, Artificial Sequence
  Synthetic oligonucleotide
cgagttcaaaagtgagcttcgggatggaag

SEQ ID NO: 22455 - DNA, 30 bp, Artificial Sequence
  Synthetic oligonucleotide
gcgccggcatgacagtggaacctatggaag

SEQ ID NO: 22456 - DNA, 30 bp, Artificial Sequence
  Synthetic oligonucleotide
ggcgaactgtagtagccaatccgcatgaag

SEQ ID NO: 22457 - DNA, 30 bp, Artificial Sequence
  Synthetic oligonucleotide
agcgggtatgttccggccaacaggatgaag

SEQ ID NO: 22458 - DNA, 30 bp, Artificial Sequence
  Synthetic oligonucleotide
tcgtaaacgtcgcgacacaagggttataag

SEQ ID NO: 22459 - DNA, 30 bp, Artificial Sequence
  Synthetic oligonucleotide
ccgacgtttagaaatagggcacggtctaag

SEQ ID NO: 22460 - DNA, 30 bp, Artificial Sequence
  Synthetic oligonucleotide
agtagaggatatctctgaaccacaagtaag

SEQ ID NO: 22461 - DNA, 30 bp, Artificial Sequence
  Synthetic oligonucleotide
atgtcgagttggcgaggtgcaagcggtaag

SEQ ID NO: 22462 - DNA, 30 bp, Artificial Sequence
  Synthetic oligonucleotide
agaggcggacggggacccaagtcgcttaag

SEQ ID NO: 22463 - DNA, 30 bp, Artificial Sequence
  Synthetic oligonucleotide
cggcaagagcactcatagatagactttaag

SEQ ID NO: 22464 - DNA, 30 bp, Artificial Sequence
  Synthetic oligonucleotide
ccgggtgcgaagaggcatcggccccaacag

SEQ ID NO: 22465 - DNA, 30 bp, Artificial Sequence
  Synthetic oligonucleotide
gcaaacaggggaccaaacgattctcaacag

SEQ ID NO: 22466 - DNA, 30 bp, Artificial Sequence
  Synthetic oligonucleotide
gtcagaggtacctcagacatgccttcacag

SEQ ID NO: 22467 - DNA, 30 bp, Artificial Sequence
  Synthetic oligonucleotide
cgattaagaaggggggtacgtcaaagacag

SEQ ID NO: 22468 - DNA, 30 bp, Artificial Sequence
  Synthetic oligonucleotide
agggtgtatgacaccggagtaaatagacag

SEQ ID NO: 22469 - DNA, 30 bp, Artificial Sequence
  Synthetic oligonucleotide
agcgagaagcccgggttgataggccgacag

SEQ ID NO: 22470 - DNA, 30 bp, Artificial Sequence
  Synthetic oligonucleotide
aagcgtagtcggaacgcttcaagatgacag

SEQ ID NO: 22471 - DNA, 30 bp, Artificial Sequence
  Synthetic oligonucleotide
ggcaatgagccggagggcgcggatgtacag

SEQ ID NO: 22472 - DNA, 30 bp, Artificial Sequence
  Synthetic oligonucleotide
aggtgtctaccactggggacagaattacag

SEQ ID NO: 22473 - DNA, 30 bp, Artificial Sequence
  Synthetic oligonucleotide
cagcaagcgagccgataaccaagattacag

SEQ ID NO: 22474 - DNA, 30 bp, Artificial Sequence
  Synthetic oligonucleotide
ttagggcgaatagattagtggagcccccag

SEQ ID NO: 22475 - DNA, 30 bp, Artificial Sequence
  Synthetic oligonucleotide
ggagggccaagggttaagatgcaaagccag

SEQ ID NO: 22476 - DNA, 30 bp, Artificial Sequence
  Synthetic oligonucleotide
acgcgtaatccaacaatattaggtgcgcag

SEQ ID NO: 22477 - DNA, 30 bp, Artificial Sequence
  Synthetic oligonucleotide
aagagtagtcgttaccgagctaaagggcag

SEQ ID NO: 22478 - DNA, 30 bp, Artificial Sequence
  Synthetic oligonucleotide
aggcgatatctccaccgcgttacatggcag

SEQ ID NO: 22479 - DNA, 30 bp, Artificial Sequence
  Synthetic oligonucleotide
gcgtaacggtgagaatcaacacgtactcag

SEQ ID NO: 22480 - DNA, 30 bp, Artificial Sequence
  Synthetic oligonucleotide
agacgatcccaaggggggaaaaccagtcag

SEQ ID NO: 22481 - DNA, 30 bp, Artificial Sequence
  Synthetic oligonucleotide
cacgggtacgccctaaaacgtgaacgtcag

SEQ ID NO: 22482 - DNA, 30 bp, Artificial Sequence
  Synthetic oligonucleotide
aggagtgtggacgtaagaagaaaccgtcag

SEQ ID NO: 22483 - DNA, 30 bp, Artificial Sequence
  Synthetic oligonucleotide
ctacgggcgaacgtgaagtccccgattcag

SEQ ID NO: 22484 - DNA, 29 bp, Artificial Sequence
  Synthetic oligonucleotide
ggcagagctcaccgaggacatactttcag

SEQ ID NO: 22485 - DNA, 30 bp, Artificial Sequence
  Synthetic oligonucleotide
cgggtcgccgaaatcatcgacccccaagag

SEQ ID NO: 22486 - DNA, 30 bp, Artificial Sequence
  Synthetic oligonucleotide
acgtgacgttaggtcataggcaattaagag

SEQ ID NO: 22487 - DNA, 30 bp, Artificial Sequence
  Synthetic oligonucleotide
aacgcatgaggatgagttaaaaggtcagag

SEQ ID NO: 22488 - DNA, 30 bp, Artificial Sequence
  Synthetic oligonucleotide
ctgaactacagggagcgagtaacaagagag

SEQ ID NO: 22489 - DNA, 30 bp, Artificial Sequence
  Synthetic oligonucleotide
gaaggataacagtggcccgggaatagagag

SEQ ID NO: 22490 - DNA, 30 bp, Artificial Sequence
  Synthetic oligonucleotide
gtcgagtctgtaaggattatgcaaggagag

SEQ ID NO: 22491 - DNA, 30 bp, Artificial Sequence
  Synthetic oligonucleotide
ggaccgatagcccatccgacgactggagag

SEQ ID NO: 22492 - DNA, 30 bp, Artificial Sequence
  Synthetic oligonucleotide
agcgagcacccaaggacgccaaggtgagag

SEQ ID NO: 22493 - DNA, 30 bp, Artificial Sequence
  Synthetic oligonucleotide
agctagcggaatttagctcgcgcgatagag

SEQ ID NO: 22494 - DNA, 31 bp, Artificial Sequence
  Synthetic oligonucleotide
acgaggcgtcagctattgcgactatatagag

SEQ ID NO: 22495 - DNA, 30 bp, Artificial Sequence
  Synthetic oligonucleotide
tgtggttaaacaggaatggggaccaacgag

SEQ ID NO: 22496 - DNA, 30 bp, Artificial Sequence
  Synthetic oligonucleotide
tgacgtcttgcgataatgatcgttaacgag

SEQ ID NO: 22497 - DNA, 30 bp, Artificial Sequence
  Synthetic oligonucleotide
aaggagagtgggctaggcagggataccgag

SEQ ID NO: 22498 - DNA, 30 bp, Artificial Sequence
  Synthetic oligonucleotide
ccgcgaacggtgcaaagattacctagcgag

SEQ ID NO: 22499 - DNA, 30 bp, Artificial Sequence
  Synthetic oligonucleotide
ttcagcgaattgacattaactggccgcgag

SEQ ID NO: 22500 - DNA, 30 bp, Artificial Sequence
  Synthetic oligonucleotide
gtactgagggtactattaccgggaggcgag

SEQ ID NO: 22501 - DNA, 30 bp, Artificial Sequence
  Synthetic oligonucleotide
acgacccagacaaaggttttgacatgcgag

SEQ ID NO: 22502 - DNA, 30 bp, Artificial Sequence
  Synthetic oligonucleotide
gccatatcagtagcggctccacactgcgag

SEQ ID NO: 22503 - DNA, 30 bp, Artificial Sequence
  Synthetic oligonucleotide
cttaggagcttcgtaggaactgggatcgag

SEQ ID NO: 22504 - DNA, 30 bp, Artificial Sequence
  Synthetic oligonucleotide
tgtaactgttaaatgcaaatggaactcgag

SEQ ID NO: 22505 - DNA, 30 bp, Artificial Sequence
  Synthetic oligonucleotide
taggtcgtaaaaatggtcagcagccaggag

SEQ ID NO: 22506 - DNA, 30 bp, Artificial Sequence
  Synthetic oligonucleotide
tgtacagaacgcgggactagccaagaggag

SEQ ID NO: 22507 - DNA, 30 bp, Artificial Sequence
  Synthetic oligonucleotide
aggggtgtggtttgctctctcagatcggag

SEQ ID NO: 22508 - DNA, 30 bp, Artificial Sequence
  Synthetic oligonucleotide
agtttgtagcaacaagatgtgatgagggag

SEQ ID NO: 22509 - DNA, 30 bp, Artificial Sequence
  Synthetic oligonucleotide
tgcaaccttcatggaaccagacctcgggag

SEQ ID NO: 22510 - DNA, 30 bp, Artificial Sequence
  Synthetic oligonucleotide
gtagtttataagagatcggcaatcggggag

SEQ ID NO: 22511 - DNA, 30 bp, Artificial Sequence
  Synthetic oligonucleotide
ggatacactcgagatcgagcctcgtgggag

SEQ ID NO: 22512 - DNA, 30 bp, Artificial Sequence
  Synthetic oligonucleotide
aggggaagggcatccctatgcaggatggag

SEQ ID NO: 22513 - DNA, 30 bp, Artificial Sequence
  Synthetic oligonucleotide
gcgtggcaacatgactgtaactcgctggag

SEQ ID NO: 22514 - DNA, 30 bp, Artificial Sequence
  Synthetic oligonucleotide
gcaaacctcagagaagcagtcggagtggag

SEQ ID NO: 22515 - DNA, 29 bp, Artificial Sequence
  Synthetic oligonucleotide
caaaacaaaggatctcatcgtgtgtggag

SEQ ID NO: 22516 - DNA, 30 bp, Artificial Sequence
  Synthetic oligonucleotide
cgacgagggaagcaaactccacaattggag

SEQ ID NO: 22517 - DNA, 30 bp, Artificial Sequence
  Synthetic oligonucleotide
accgtagagcaacctcagacagcgttggag

SEQ ID NO: 22518 - DNA, 30 bp, Artificial Sequence
  Synthetic oligonucleotide
agtaagtaggtttaccgggatggcaatgag

SEQ ID NO: 22519 - DNA, 30 bp, Artificial Sequence
  Synthetic oligonucleotide
aaaagccgtgttcaggtaagctaccatgag

SEQ ID NO: 22520 - DNA, 30 bp, Artificial Sequence
  Synthetic oligonucleotide
cctgccccgaatacaactatggctcatgag

SEQ ID NO: 22521 - DNA, 30 bp, Artificial Sequence
  Synthetic oligonucleotide
cggataactaagtgagaagttgaaactgag

SEQ ID NO: 22522 - DNA, 30 bp, Artificial Sequence
  Synthetic oligonucleotide
cagcaatgaccctggacctagcgaactgag

SEQ ID NO: 22523 - DNA, 30 bp, Artificial Sequence
  Synthetic oligonucleotide
tgtcgtcaagtgtagcggaggagagctgag

SEQ ID NO: 22524 - DNA, 30 bp, Artificial Sequence
  Synthetic oligonucleotide
aggttgctaaagacttgtccgcgacgtgag

SEQ ID NO: 22525 - DNA, 30 bp, Artificial Sequence
  Synthetic oligonucleotide
cgacaaggaaaaaattcccagcgccgtgag

SEQ ID NO: 22526 - DNA, 30 bp, Artificial Sequence
  Synthetic oligonucleotide
gcacggttagaggagatagcatcaggtgag

SEQ ID NO: 22527 - DNA, 30 bp, Artificial Sequence
  Synthetic oligonucleotide
gctcgtcacgtggataacggaacgggtgag

SEQ ID NO: 22528 - DNA, 30 bp, Artificial Sequence
  Synthetic oligonucleotide
gcataaggtggtagagagtgagcaaaatag

SEQ ID NO: 22529 - DNA, 30 bp, Artificial Sequence
  Synthetic oligonucleotide
gtacaacctaccttgcaagaaaaacaatag

SEQ ID NO: 22530 - DNA, 30 bp, Artificial Sequence
  Synthetic oligonucleotide
aaggcaagtaactgcgctcatagataatag

SEQ ID NO: 22531 - DNA, 30 bp, Artificial Sequence
  Synthetic oligonucleotide
caccgtgaagagggaagtggaacaacatag

SEQ ID NO: 22532 - DNA, 30 bp, Artificial Sequence
  Synthetic oligonucleotide
actgggtacacgagaaatctagtaccatag

SEQ ID NO: 22533 - DNA, 30 bp, Artificial Sequence
  Synthetic oligonucleotide
agcgaatgaatccgcctagattcaagatag

SEQ ID NO: 22534 - DNA, 30 bp, Artificial Sequence
  Synthetic oligonucleotide
tggacagcaagccgcccatgctaagtatag

SEQ ID NO: 22535 - DNA, 30 bp, Artificial Sequence
  Synthetic oligonucleotide
tcgaggtacttggccagacaatgcgtatag

SEQ ID NO: 22536 - DNA, 30 bp, Artificial Sequence
  Synthetic oligonucleotide
taactcgaggcgagagacgtctcggtatag

SEQ ID NO: 22537 - DNA, 30 bp, Artificial Sequence
  Synthetic oligonucleotide
cgaacgcggggtaaggcggcaggcaactag

SEQ ID NO: 22538 - DNA, 30 bp, Artificial Sequence
  Synthetic oligonucleotide
caccgggaggccgcgaacagatcagcctag

SEQ ID NO: 22539 - DNA, 30 bp, Artificial Sequence
  Synthetic oligonucleotide
gatcggaacccccagaccaacttgtgctag

SEQ ID NO: 22540 - DNA, 30 bp, Artificial Sequence
  Synthetic oligonucleotide
tgcaacagatcgaaggctataatgcagtag

SEQ ID NO: 22541 - DNA, 30 bp, Artificial Sequence
  Synthetic oligonucleotide
gcaatccgttcaaaccgaccaaccgagtag

SEQ ID NO: 22542 - DNA, 30 bp, Artificial Sequence
  Synthetic oligonucleotide
gtaggcaattgatgatattgggatgagtag

SEQ ID NO: 22543 - DNA, 30 bp, Artificial Sequence
  Synthetic oligonucleotide
cagtattagcaggatagaagagactagtag

SEQ ID NO: 22544 - DNA, 30 bp, Artificial Sequence
  Synthetic oligonucleotide
tacactagcaaataaaatcaagggtagtag

SEQ ID NO: 22545 - DNA, 30 bp, Artificial Sequence
  Synthetic oligonucleotide
tatacccggagagaacataatgacaggtag

SEQ ID NO: 22546 - DNA, 30 bp, Artificial Sequence
  Synthetic oligonucleotide
gcgaagtacacccctaaaatcatggtgtag

SEQ ID NO: 22547 - DNA, 30 bp, Artificial Sequence
  Synthetic oligonucleotide
ggagcgaaatggtgcagaaaaactaattag

SEQ ID NO: 22548 - DNA, 30 bp, Artificial Sequence
  Synthetic oligonucleotide
acggctacacacatggataagtttcattag

SEQ ID NO: 22549 - DNA, 30 bp, Artificial Sequence
  Synthetic oligonucleotide
acaagtccgaccttgaccaagtgagcttag

SEQ ID NO: 22550 - DNA, 30 bp, Artificial Sequence
  Synthetic oligonucleotide
cggtagataagcgcacggagctggtaaacg

SEQ ID NO: 22551 - DNA, 30 bp, Artificial Sequence
  Synthetic oligonucleotide
caaggtcgatctattaagcatgtgccaacg

SEQ ID NO: 22552 - DNA, 30 bp, Artificial Sequence
  Synthetic oligonucleotide
acccgagggagcagaaatagtaactcaacg

SEQ ID NO: 22553 - DNA, 30 bp, Artificial Sequence
  Synthetic oligonucleotide
acgggacagaacgttaactgtgactgaacg

SEQ ID NO: 22554 - DNA, 30 bp, Artificial Sequence
  Synthetic oligonucleotide
cgccagggacaactaacgagaggtataacg

SEQ ID NO: 22555 - DNA, 30 bp, Artificial Sequence
  Synthetic oligonucleotide
tgacctccatcccgtgcggatcgactaacg

SEQ ID NO: 22556 - DNA, 28 bp, Artificial Sequence
  Synthetic oligonucleotide
atggcaaaagacaggagaaagtaccacg

SEQ ID NO: 22557 - DNA, 30 bp, Artificial Sequence
  Synthetic oligonucleotide
cttacacatccaaagtaggcgatgtccacg

SEQ ID NO: 22558 - DNA, 30 bp, Artificial Sequence
  Synthetic oligonucleotide
taccacaaggagaactgcgaatacggcacg

SEQ ID NO: 22559 - DNA, 30 bp, Artificial Sequence
  Synthetic oligonucleotide
ggacaactgtattcgatgggatggatcacg

SEQ ID NO: 22560 - DNA, 30 bp, Artificial Sequence
  Synthetic oligonucleotide
aggggaaaattcaacacggtgtgacagacg

SEQ ID NO: 22561 - DNA, 30 bp, Artificial Sequence
  Synthetic oligonucleotide
agcccgagtgagagtgggacgaacccgacg

SEQ ID NO: 22562 - DNA, 30 bp, Artificial Sequence
  Synthetic oligonucleotide
tggccatcgggaaacctagacaatgggacg

SEQ ID NO: 22563 - DNA, 30 bp, Artificial Sequence
  Synthetic oligonucleotide
attgggctacgaagtatatgtgcgaatacg

SEQ ID NO: 22564 - DNA, 30 bp, Artificial Sequence
  Synthetic oligonucleotide
cacaagtagaaaatcgggcacgggtatacg

SEQ ID NO: 22565 - DNA, 30 bp, Artificial Sequence
  Synthetic oligonucleotide
cgggtcaggtcgcgagaatcactacctacg

SEQ ID NO: 22566 - DNA, 30 bp, Artificial Sequence
  Synthetic oligonucleotide
cgggatcatactccgctgggcgacaaaccg

SEQ ID NO: 22567 - DNA, 30 bp, Artificial Sequence
  Synthetic oligonucleotide
agagagacctacaacagggaggcaacaccg

SEQ ID NO: 22568 - DNA, 30 bp, Artificial Sequence
  Synthetic oligonucleotide
cagaagaagtggcggggttgctgaccaccg

SEQ ID NO: 22569 - DNA, 30 bp, Artificial Sequence
  Synthetic oligonucleotide
gttgccagcaggctaaaaaggggaggaccg

SEQ ID NO: 22570 - DNA, 30 bp, Artificial Sequence
  Synthetic oligonucleotide
tgaaaacagaactacacggacatcaccccg

SEQ ID NO: 22571 - DNA, 30 bp, Artificial Sequence
  Synthetic oligonucleotide
gtgactactgtattgccgtctgataccccg

SEQ ID NO: 22572 - DNA, 30 bp, Artificial Sequence
  Synthetic oligonucleotide
tcgtcacccgaaactagtaacctgaagccg

SEQ ID NO: 22573 - DNA, 30 bp, Artificial Sequence
  Synthetic oligonucleotide
cgctgacagtgcgttcgaaaaggtgagccg

SEQ ID NO: 22574 - DNA, 30 bp, Artificial Sequence
  Synthetic oligonucleotide
ggcatgagcttaacactacagaccacgccg

SEQ ID NO: 22575 - DNA, 30 bp, Artificial Sequence
  Synthetic oligonucleotide
agtccgtgaacgtatcgccacagagggccg

SEQ ID NO: 22576 - DNA, 30 bp, Artificial Sequence
  Synthetic oligonucleotide
attgacccccacagaggaatacagatgccg

SEQ ID NO: 22577 - DNA, 30 bp, Artificial Sequence
  Synthetic oligonucleotide
acgtcaggtaaagattgacttgatatgccg

SEQ ID NO: 22578 - DNA, 30 bp, Artificial Sequence
  Synthetic oligonucleotide
cgtgaatcccaattaatcccgtagcctccg

SEQ ID NO: 22579 - DNA, 30 bp, Artificial Sequence
  Synthetic oligonucleotide
cgttaccatataacgcaaagaaactctccg

SEQ ID NO: 22580 - DNA, 30 bp, Artificial Sequence
  Synthetic oligonucleotide
taccagggtagtagcgtaggataaggtccg

SEQ ID NO: 22581 - DNA, 30 bp, Artificial Sequence
  Synthetic oligonucleotide
cgaacgtcctgtgagccagttaggattccg

SEQ ID NO: 22582 - DNA, 30 bp, Artificial Sequence
  Synthetic oligonucleotide
aacgggcacaaaatcttgccctcccaagcg

SEQ ID NO: 22583 - DNA, 30 bp, Artificial Sequence
  Synthetic oligonucleotide
acatcacttagctacgagcatagaacagcg

SEQ ID NO: 22584 - DNA, 30 bp, Artificial Sequence
  Synthetic oligonucleotide
cgatgcaactcgtgaggttgatgaagagcg

SEQ ID NO: 22585 - DNA, 30 bp, Artificial Sequence
  Synthetic oligonucleotide
cgataaggaggcaaacgaattaacggagcg

SEQ ID NO: 22586 - DNA, 30 bp, Artificial Sequence
  Synthetic oligonucleotide
cgtaagggcagaaaaattcgtgtaaacgcg

SEQ ID NO: 22587 - DNA, 30 bp, Artificial Sequence
  Synthetic oligonucleotide
aggagggtgagaacacagaacacccgcgcg

SEQ ID NO: 22588 - DNA, 30 bp, Artificial Sequence
  Synthetic oligonucleotide
agagcagccaaagccagtctcgtaaaggcg

SEQ ID NO: 22589 - DNA, 30 bp, Artificial Sequence
  Synthetic oligonucleotide
acgctaggggccatagccgatgacaaggcg

SEQ ID NO: 22590 - DNA, 30 bp, Artificial Sequence
  Synthetic oligonucleotide
tcaggaccctcggggcacaatagagaggcg

SEQ ID NO: 22591 - DNA, 30 bp, Artificial Sequence
  Synthetic oligonucleotide
tacagagggctaaggtttacgctctaggcg

SEQ ID NO: 22592 - DNA, 30 bp, Artificial Sequence
  Synthetic oligonucleotide
cgggcaaagcagctgcaacctaatacggcg

SEQ ID NO: 22593 - DNA, 30 bp, Artificial Sequence
  Synthetic oligonucleotide
aatcaccacctgagcaaatgataagcggcg

SEQ ID NO: 22594 - DNA, 30 bp, Artificial Sequence
  Synthetic oligonucleotide
ccgatcgtgcggaaagaaacacctagggcg

SEQ ID NO: 22595 - DNA, 30 bp, Artificial Sequence
  Synthetic oligonucleotide
tggacctatatgaaactggaacgaggggcg

SEQ ID NO: 22596 - DNA, 30 bp, Artificial Sequence
  Synthetic oligonucleotide
atacggtgacaagggcatacagagcgtgcg

SEQ ID NO: 22597 - DNA, 30 bp, Artificial Sequence
  Synthetic oligonucleotide
aggccaacaaaaaatcccgggagcggtgcg

SEQ ID NO: 22598 - DNA, 30 bp, Artificial Sequence
  Synthetic oligonucleotide
agacacaaagggaagataaactttattgcg

SEQ ID NO: 22599 - DNA, 30 bp, Artificial Sequence
  Synthetic oligonucleotide
agttggggtacccagagagcacagtttgcg

SEQ ID NO: 22600 - DNA, 30 bp, Artificial Sequence
  Synthetic oligonucleotide
atgccagacggacaaccaaacttaacatcg

SEQ ID NO: 22601 - DNA, 30 bp, Artificial Sequence
  Synthetic oligonucleotide
acacggtacaagagtacagggaactcatcg

SEQ ID NO: 22602 - DNA, 30 bp, Artificial Sequence
  Synthetic oligonucleotide
gcaggcgtaaatggggggaggtaaagatcg

SEQ ID NO: 22603 - DNA, 30 bp, Artificial Sequence
  Synthetic oligonucleotide
acagcgcaaaaacatgctatagatggatcg

SEQ ID NO: 22604 - DNA, 30 bp, Artificial Sequence
  Synthetic oligonucleotide
ggaaggagcgtaatcaggatttatggatcg

SEQ ID NO: 22605 - DNA, 30 bp, Artificial Sequence
  Synthetic oligonucleotide
acggagggctggctataaaggtacatatcg

SEQ ID NO: 22606 - DNA, 30 bp, Artificial Sequence
  Synthetic oligonucleotide
aagacattaaaatgccgtcctcccatatcg

SEQ ID NO: 22607 - DNA, 30 bp, Artificial Sequence
  Synthetic oligonucleotide
ctggctgtggagctctaggaaacaaactcg

SEQ ID NO: 22608 - DNA, 30 bp, Artificial Sequence
  Synthetic oligonucleotide
acacgcgatgataaggtggctacgcgctcg

SEQ ID NO: 22609 - DNA, 30 bp, Artificial Sequence
  Synthetic oligonucleotide
cgattataccgattaacccgcgaatgctcg

SEQ ID NO: 22610 - DNA, 30 bp, Artificial Sequence
  Synthetic oligonucleotide
gcgcacgcgaaggtgaagaggggcatctcg

SEQ ID NO: 22611 - DNA, 30 bp, Artificial Sequence
  Synthetic oligonucleotide
tccagagcaaagataagtcgggaagagtcg

SEQ ID NO: 22612 - DNA, 30 bp, Artificial Sequence
  Synthetic oligonucleotide
aacggcgaaagacctgttcacgaggagtcg

SEQ ID NO: 22613 - DNA, 30 bp, Artificial Sequence
  Synthetic oligonucleotide
acgatcgcgtggttgccgggaggttagtcg

SEQ ID NO: 22614 - DNA, 30 bp, Artificial Sequence
  Synthetic oligonucleotide
cgtaaggggttcactcgaagtatggcgtcg

SEQ ID NO: 22615 - DNA, 30 bp, Artificial Sequence
  Synthetic oligonucleotide
cgccaaacataatgagaagtcattgcgtcg

SEQ ID NO: 22616 - DNA, 30 bp, Artificial Sequence
  Synthetic oligonucleotide
cgatcatctcaccatcagtgctcttcgtcg

SEQ ID NO: 22617 - DNA, 30 bp, Artificial Sequence
  Synthetic oligonucleotide
gtgcatggaaagagatgatgaggttggtcg

SEQ ID NO: 22618 - DNA, 30 bp, Artificial Sequence
  Synthetic oligonucleotide
aacggcaacctgttaggggtgagcgtgtcg

SEQ ID NO: 22619 - DNA, 30 bp, Artificial Sequence
  Synthetic oligonucleotide
cagcggcccgatgagcgtaaaggaagttcg

SEQ ID NO: 22620 - DNA, 30 bp, Artificial Sequence
  Synthetic oligonucleotide
tgcatgcatcagttaaacatcctgaaaagg

SEQ ID NO: 22621 - DNA, 30 bp, Artificial Sequence
  Synthetic oligonucleotide
cacgaggtgcacgttgaaggtatacaaagg

SEQ ID NO: 22622 - DNA, 30 bp, Artificial Sequence
  Synthetic oligonucleotide
cacgcagtgaggaggtgaagcaacacaagg

SEQ ID NO: 22623 - DNA, 30 bp, Artificial Sequence
  Synthetic oligonucleotide
ctggggcaactcagggtcccaaaatcaagg

SEQ ID NO: 22624 - DNA, 30 bp, Artificial Sequence
  Synthetic oligonucleotide
ctcggcactagaagcaaagtgtgttcaagg

SEQ ID NO: 22625 - DNA, 30 bp, Artificial Sequence
  Synthetic oligonucleotide
acgaaaggaggtgagtaagagtgatgaagg

SEQ ID NO: 22626 - DNA, 30 bp, Artificial Sequence
  Synthetic oligonucleotide
tgatacccaggtatggttaaggagataagg

SEQ ID NO: 22627 - DNA, 30 bp, Artificial Sequence
  Synthetic oligonucleotide
tgggcaagagtggcgtactaaagtgtaagg

SEQ ID NO: 22628 - DNA, 30 bp, Artificial Sequence
  Synthetic oligonucleotide
agcacgtgctagatagcgctgtcccacagg

SEQ ID NO: 22629 - DNA, 30 bp, Artificial Sequence
  Synthetic oligonucleotide
aggtaagctgcatggaaagactgagacagg

SEQ ID NO: 22630 - DNA, 30 bp, Artificial Sequence
  Synthetic oligonucleotide
cgccaatgcataattcatcgctactacagg

SEQ ID NO: 22631 - DNA, 30 bp, Artificial Sequence
  Synthetic oligonucleotide
cggctagactcccgtacgaacctcaccagg

SEQ ID NO: 22632 - DNA, 30 bp, Artificial Sequence
  Synthetic oligonucleotide
cgatcgaatgggatagagtgctctcccagg

SEQ ID NO: 22633 - DNA, 30 bp, Artificial Sequence
  Synthetic oligonucleotide
ctcaattgccaaagaggctgccgaaagagg

SEQ ID NO: 22634 - DNA, 30 bp, Artificial Sequence
  Synthetic oligonucleotide
gagcacaattatctaacacttaacaagagg

SEQ ID NO: 22635 - DNA, 30 bp, Artificial Sequence
  Synthetic oligonucleotide
gataaggtgcaaaatctagataagaagagg

SEQ ID NO: 22636 - DNA, 30 bp, Artificial Sequence
  Synthetic oligonucleotide
aagggcatgagggcctcgagcgttaagagg

SEQ ID NO: 22637 - DNA, 30 bp, Artificial Sequence
  Synthetic oligonucleotide
cccagccaagcgaataggccgactacgagg

SEQ ID NO: 22638 - DNA, 30 bp, Artificial Sequence
  Synthetic oligonucleotide
ggggagaagatcattgaaggatccccgagg

SEQ ID NO: 22639 - DNA, 30 bp, Artificial Sequence
  Synthetic oligonucleotide
tagacaatagcgagattacgatccgcgagg

SEQ ID NO: 22640 - DNA, 30 bp, Artificial Sequence
  Synthetic oligonucleotide
cgaaacatcctggaaaatacctccgcgagg

SEQ ID NO: 22641 - DNA, 30 bp, Artificial Sequence
  Synthetic oligonucleotide
aacgtctatcgcgaactggagatccggagg

SEQ ID NO: 22642 - DNA, 30 bp, Artificial Sequence
  Synthetic oligonucleotide
cgggcagaattggacgaccgttatgtgagg

SEQ ID NO: 22643 - DNA, 30 bp, Artificial Sequence
  Synthetic oligonucleotide
aggaagacgtgcgcaatggtcacctctagg

SEQ ID NO: 22644 - DNA, 30 bp, Artificial Sequence
  Synthetic oligonucleotide
tcggggtagtcacgatagaattgaggtagg

SEQ ID NO: 22645 - DNA, 30 bp, Artificial Sequence
  Synthetic oligonucleotide
atcgtggagaacagaggaatataagttagg

SEQ ID NO: 22646 - DNA, 30 bp, Artificial Sequence
  Synthetic oligonucleotide
aaaggctgggagtaagcgatacattttagg

SEQ ID NO: 22647 - DNA, 30 bp, Artificial Sequence
  Synthetic oligonucleotide
aggtacgaggagttgtaatctgcgaaacgg

SEQ ID NO: 22648 - DNA, 30 bp, Artificial Sequence
  Synthetic oligonucleotide
tgctgccaagcaaacacgcaaacgctacgg

SEQ ID NO: 22649 - DNA, 30 bp, Artificial Sequence
  Synthetic oligonucleotide
caggaagtaggcaatctgggaaatgtacgg

SEQ ID NO: 22650 - DNA, 30 bp, Artificial Sequence
  Synthetic oligonucleotide
actaacgagagttcaatccttaaaagccgg

SEQ ID NO: 22651 - DNA, 30 bp, Artificial Sequence
  Synthetic oligonucleotide
agcgggctgaatcgtctagaatacttccgg

SEQ ID NO: 22652 - DNA, 30 bp, Artificial Sequence
  Synthetic oligonucleotide
cagatctcaaggtagcacaagtcagagcgg

SEQ ID NO: 22653 - DNA, 30 bp, Artificial Sequence
  Synthetic oligonucleotide
attgtcaccacgaacttcagagtcgagcgg

SEQ ID NO: 22654 - DNA, 30 bp, Artificial Sequence
  Synthetic oligonucleotide
tgcgtacgcgacaaatattgagcggatcgg

SEQ ID NO: 22655 - DNA, 30 bp, Artificial Sequence
  Synthetic oligonucleotide
agatcagcctcaccaaagcgtcacattcgg

SEQ ID NO: 22656 - DNA, 30 bp, Artificial Sequence
  Synthetic oligonucleotide
acaaaggattggagctatgcgtgtaaaggg

SEQ ID NO: 22657 - DNA, 30 bp, Artificial Sequence
  Synthetic oligonucleotide
ggcgacggcgaaggtacagtgcgcacaggg

SEQ ID NO: 22658 - DNA, 30 bp, Artificial Sequence
  Synthetic oligonucleotide
catcaagatgagcgcgccagcagggcaggg

SEQ ID NO: 22659 - DNA, 30 bp, Artificial Sequence
  Synthetic oligonucleotide
caaagctggcacggacctagtacaataggg

SEQ ID NO: 22660 - DNA, 30 bp, Artificial Sequence
  Synthetic oligonucleotide
attgagaaagtgtaacgggagaacgtaggg

SEQ ID NO: 22661 - DNA, 30 bp, Artificial Sequence
  Synthetic oligonucleotide
gacaaatacggttgtaccaccgagttaggg

SEQ ID NO: 22662 - DNA, 30 bp, Artificial Sequence
  Synthetic oligonucleotide
gatgggaaaccaccataaaggacacacggg

SEQ ID NO: 22663 - DNA, 30 bp, Artificial Sequence
  Synthetic oligonucleotide
cctaggtatgccaaagaaaaatgcgccggg

SEQ ID NO: 22664 - DNA, 30 bp, Artificial Sequence
  Synthetic oligonucleotide
cgaacttcttagtactagacgagatccggg

SEQ ID NO: 22665 - DNA, 30 bp, Artificial Sequence
  Synthetic oligonucleotide
tcggcaactgatggccccaacgtacagggg

SEQ ID NO: 22666 - DNA, 30 bp, Artificial Sequence
  Synthetic oligonucleotide
atgagtccaagtccagagcaggatccgggg

SEQ ID NO: 22667 - DNA, 30 bp, Artificial Sequence
  Synthetic oligonucleotide
acacgacttctattactagagggaaggggg

SEQ ID NO: 22668 - DNA, 30 bp, Artificial Sequence
  Synthetic oligonucleotide
tctaagaacggaaaacggcgacacatgggg

SEQ ID NO: 22669 - DNA, 30 bp, Artificial Sequence
  Synthetic oligonucleotide
ggcggcctgctaacctatcgtaaaaatggg

SEQ ID NO: 22670 - DNA, 30 bp, Artificial Sequence
  Synthetic oligonucleotide
aagggtctacgctaataggaaattaatggg

SEQ ID NO: 22671 - DNA, 30 bp, Artificial Sequence
  Synthetic oligonucleotide
tcggtaacggcgggaattatcaagcatggg

SEQ ID NO: 22672 - DNA, 30 bp, Artificial Sequence
  Synthetic oligonucleotide
tgacgggcgtagcgaaggagtgttgatggg

SEQ ID NO: 22673 - DNA, 30 bp, Artificial Sequence
  Synthetic oligonucleotide
gcggtgctagggactccgtctgattatggg

SEQ ID NO: 22674 - DNA, 30 bp, Artificial Sequence
  Synthetic oligonucleotide
attcgacaaggaaactgcgtaggagctggg

SEQ ID NO: 22675 - DNA, 30 bp, Artificial Sequence
  Synthetic oligonucleotide
aggtacggtgatgaatttcagctaagtggg

SEQ ID NO: 22676 - DNA, 30 bp, Artificial Sequence
  Synthetic oligonucleotide
cgataattcgtggaggaaatctcaattggg

SEQ ID NO: 22677 - DNA, 30 bp, Artificial Sequence
  Synthetic oligonucleotide
ggcaaactgagtttgaaagcgcaacttggg

SEQ ID NO: 22678 - DNA, 30 bp, Artificial Sequence
  Synthetic oligonucleotide
acggcaataactcatcctcactactaatgg

SEQ ID NO: 22679 - DNA, 30 bp, Artificial Sequence
  Synthetic oligonucleotide
cagctagagatcaggaaatgttgcccatgg

SEQ ID NO: 22680 - DNA, 30 bp, Artificial Sequence
  Synthetic oligonucleotide
gatgaacagactccgaccgataaggcatgg

SEQ ID NO: 22681 - DNA, 30 bp, Artificial Sequence
  Synthetic oligonucleotide
catatgaagcgtgcaatttgaacaggatgg

SEQ ID NO: 22682 - DNA, 30 bp, Artificial Sequence
  Synthetic oligonucleotide
caacacaacataaatgaggtcggcttatgg

SEQ ID NO: 22683 - DNA, 30 bp, Artificial Sequence
  Synthetic oligonucleotide
gagacaagagcaggcgcattaggaaactgg

SEQ ID NO: 22684 - DNA, 30 bp, Artificial Sequence
  Synthetic oligonucleotide
aaacgggatttgagtgtacgaagtaactgg

SEQ ID NO: 22685 - DNA, 30 bp, Artificial Sequence
  Synthetic oligonucleotide
cgtcctggagggaggagtgtttaccgctgg

SEQ ID NO: 22686 - DNA, 30 bp, Artificial Sequence
  Synthetic oligonucleotide
caacgcctcaacatacctcgaattcagtgg

SEQ ID NO: 22687 - DNA, 30 bp, Artificial Sequence
  Synthetic oligonucleotide
cgcatgagctagtggtaagtaagcgcgtgg

SEQ ID NO: 22688 - DNA, 30 bp, Artificial Sequence
  Synthetic oligonucleotide
acggcaaagatctccgaccactgttcgtgg

SEQ ID NO: 22689 - DNA, 30 bp, Artificial Sequence
  Synthetic oligonucleotide
ggcaggaaaacgcgggttgccggaaggtgg

SEQ ID NO: 22690 - DNA, 30 bp, Artificial Sequence
  Synthetic oligonucleotide
tccaagagagagtaagtcgagctggtgtgg

SEQ ID NO: 22691 - DNA, 30 bp, Artificial Sequence
  Synthetic oligonucleotide
agcgtccgaacggaggacggctccaattgg

SEQ ID NO: 22692 - DNA, 30 bp, Artificial Sequence
  Synthetic oligonucleotide
cgttagggggtgaaagactcgtgggtttgg

SEQ ID NO: 22693 - DNA, 30 bp, Artificial Sequence
  Synthetic oligonucleotide
tcagcggtggagactgattgccaaaaaatg

SEQ ID NO: 22694 - DNA, 30 bp, Artificial Sequence
  Synthetic oligonucleotide
tcccgtaccgtgaggtggagtacgtaaatg

SEQ ID NO: 22695 - DNA, 30 bp, Artificial Sequence
  Synthetic oligonucleotide
aagtgaggaaggatgggtagcgtcacaatg

SEQ ID NO: 22696 - DNA, 30 bp, Artificial Sequence
  Synthetic oligonucleotide
ccgaggaacaccggcaaacaagattcaatg

SEQ ID NO: 22697 - DNA, 30 bp, Artificial Sequence
  Synthetic oligonucleotide
ggacgacaaagggcactactggagagaatg

SEQ ID NO: 22698 - DNA, 30 bp, Artificial Sequence
  Synthetic oligonucleotide
aaggttaagaagaccatagtagcgagaatg

SEQ ID NO: 22699 - DNA, 30 bp, Artificial Sequence
  Synthetic oligonucleotide
tcgactgacaaccttactaataaacgaatg

SEQ ID NO: 22700 - DNA, 30 bp, Artificial Sequence
  Synthetic oligonucleotide
tcaagcaccaccgtattggactactgaatg

SEQ ID NO: 22701 - DNA, 30 bp, Artificial Sequence
  Synthetic oligonucleotide
ccacccaagaacaaaggaactaagataatg

SEQ ID NO: 22702 - DNA, 30 bp, Artificial Sequence
  Synthetic oligonucleotide
aagagcggaatgaagcctacactcctaatg

SEQ ID NO: 22703 - DNA, 30 bp, Artificial Sequence
  Synthetic oligonucleotide
ccaatgaagaatcggggaaaggatctaatg

SEQ ID NO: 22704 - DNA, 30 bp, Artificial Sequence
  Synthetic oligonucleotide
gaagaagttcgggacgtttagggagacatg

SEQ ID NO: 22705 - DNA, 30 bp, Artificial Sequence
  Synthetic oligonucleotide
atcgaataacgggaatcgatcgtacccatg

SEQ ID NO: 22706 - DNA, 30 bp, Artificial Sequence
  Synthetic oligonucleotide
atggagaatatcactaggaatggtatcatg

SEQ ID NO: 22707 - DNA, 30 bp, Artificial Sequence
  Synthetic oligonucleotide
tcgctgagggatatgtagaggatagtcatg

SEQ ID NO: 22708 - DNA, 30 bp, Artificial Sequence
  Synthetic oligonucleotide
ccacagtagaaaacctgcctataaaagatg

SEQ ID NO: 22709 - DNA, 30 bp, Artificial Sequence
  Synthetic oligonucleotide
atgggatgtcatgggagcttgccgaagatg

SEQ ID NO: 22710 - DNA, 30 bp, Artificial Sequence
  Synthetic oligonucleotide
gcgcaaatggtgttaacgtcgctacagatg

SEQ ID NO: 22711 - DNA, 30 bp, Artificial Sequence
  Synthetic oligonucleotide
gcgtactaagcgcagtagcgtgatcagatg

SEQ ID NO: 22712 - DNA, 30 bp, Artificial Sequence
  Synthetic oligonucleotide
tcaaggggcgcacaccaaaggctcgagatg

SEQ ID NO: 22713 - DNA, 30 bp, Artificial Sequence
  Synthetic oligonucleotide
cagaacgttcagggtaaaaatagtacgatg

SEQ ID NO: 22714 - DNA, 30 bp, Artificial Sequence
  Synthetic oligonucleotide
tcggaccgttgacgactacgatatccgatg

SEQ ID NO: 22715 - DNA, 30 bp, Artificial Sequence
  Synthetic oligonucleotide
ccatacaagtgtctagggatgagatcgatg

SEQ ID NO: 22716 - DNA, 30 bp, Artificial Sequence
  Synthetic oligonucleotide
gacagtaattcagtaagaaagaccgggatg

SEQ ID NO: 22717 - DNA, 30 bp, Artificial Sequence
  Synthetic oligonucleotide
taccatgggctaaatcggaactgcatgatg

SEQ ID NO: 22718 - DNA, 30 bp, Artificial Sequence
  Synthetic oligonucleotide
ggcagtgtaacgaagatttcataagtgatg

SEQ ID NO: 22719 - DNA, 30 bp, Artificial Sequence
  Synthetic oligonucleotide
tgaggagagaccgtggcatacaaacatatg

SEQ ID NO: 22720 - DNA, 30 bp, Artificial Sequence
  Synthetic oligonucleotide
tgcggagcagatattgatagccgacctatg

SEQ ID NO: 22721 - DNA, 30 bp, Artificial Sequence
  Synthetic oligonucleotide
cgagaatagcaaaccgaacccacacgtatg

SEQ ID NO: 22722 - DNA, 30 bp, Artificial Sequence
  Synthetic oligonucleotide
ggcgtgccggatcatgcgaggaaaattatg

SEQ ID NO: 22723 - DNA, 30 bp, Artificial Sequence
  Synthetic oligonucleotide
acaaccagaggattcatttggtcggaactg

SEQ ID NO: 22724 - DNA, 30 bp, Artificial Sequence
  Synthetic oligonucleotide
aggtatcaggttgaaacgtaaaatgaactg

SEQ ID NO: 22725 - DNA, 30 bp, Artificial Sequence
  Synthetic oligonucleotide
gccacactcaataaagagcaatgtcgactg

SEQ ID NO: 22726 - DNA, 30 bp, Artificial Sequence
  Synthetic oligonucleotide
acgacaatagttaaagtaaccgaactactg

SEQ ID NO: 22727 - DNA, 30 bp, Artificial Sequence
  Synthetic oligonucleotide
agttaaactgagaaattgaacaataacctg

SEQ ID NO: 22728 - DNA, 30 bp, Artificial Sequence
  Synthetic oligonucleotide
gtgtaaatagactaaagaggatgatacctg

SEQ ID NO: 22729 - DNA, 31 bp, Artificial Sequence
  Synthetic oligonucleotide
agacaaggtagattgtgcgcataggaagctg

SEQ ID NO: 22730 - DNA, 30 bp, Artificial Sequence
  Synthetic oligonucleotide
agtcgtctcagagataattaagaaaatctg

SEQ ID NO: 22731 - DNA, 30 bp, Artificial Sequence
  Synthetic oligonucleotide
gccgaagcaagactccgaacctcacatctg

SEQ ID NO: 22732 - DNA, 30 bp, Artificial Sequence
  Synthetic oligonucleotide
gggtccaagccgatgtgaaggcaccatctg

SEQ ID NO: 22733 - DNA, 30 bp, Artificial Sequence
  Synthetic oligonucleotide
acgtggggaagagcgcattgcattcctctg

SEQ ID NO: 22734 - DNA, 30 bp, Artificial Sequence
  Synthetic oligonucleotide
gcctaaaggcgacgatagaattctggtctg

SEQ ID NO: 22735 - DNA, 30 bp, Artificial Sequence
  Synthetic oligonucleotide
gagaaggctagacggcgtaaagggaaagtg

SEQ ID NO: 22736 - DNA, 31 bp, Artificial Sequence
  Synthetic oligonucleotide
acgtgacaacaatatagacctgtgacaagtg

SEQ ID NO: 22737 - DNA, 30 bp, Artificial Sequence
  Synthetic oligonucleotide
attaccagtgcataataaggtccagaagtg

SEQ ID NO: 22738 - DNA, 30 bp, Artificial Sequence
  Synthetic oligonucleotide
tcgtaacaacagcgaagggtcgaggaagtg

SEQ ID NO: 22739 - DNA, 30 bp, Artificial Sequence
  Synthetic oligonucleotide
ccaactagagaagggtttagcggggaagtg

SEQ ID NO: 22740 - DNA, 30 bp, Artificial Sequence
  Synthetic oligonucleotide
aggagctggataaggcaaaagcgaacagtg

SEQ ID NO: 22741 - DNA, 30 bp, Artificial Sequence
  Synthetic oligonucleotide
agaggtgcaccgggcctagcattagcagtg

SEQ ID NO: 22742 - DNA, 30 bp, Artificial Sequence
  Synthetic oligonucleotide
acggccgaggacagccacaacctggcagtg

SEQ ID NO: 22743 - DNA, 30 bp, Artificial Sequence
  Synthetic oligonucleotide
gatgcccaggacccaggacgagtcagagtg

SEQ ID NO: 22744 - DNA, 30 bp, Artificial Sequence
  Synthetic oligonucleotide
ttgtaccgagcaaccaagtgtcatagagtg

SEQ ID NO: 22745 - DNA, 30 bp, Artificial Sequence
  Synthetic oligonucleotide
aagatgagcggattctaccttcaccgagtg

SEQ ID NO: 22746 - DNA, 30 bp, Artificial Sequence
  Synthetic oligonucleotide
acgagtactgcagaaaatacaagtcgagtg

SEQ ID NO: 22747 - DNA, 30 bp, Artificial Sequence
  Synthetic oligonucleotide
cgaaccgggctgtgtaagagcagcggagtg

SEQ ID NO: 22748 - DNA, 30 bp, Artificial Sequence
  Synthetic oligonucleotide
atgacttgctcgagaagacaaaattgagtg

SEQ ID NO: 22749 - DNA, 30 bp, Artificial Sequence
  Synthetic oligonucleotide
agggtaactgagtcgctaggaagaatagtg

SEQ ID NO: 22750 - DNA, 30 bp, Artificial Sequence
  Synthetic oligonucleotide
gcaatacggagggaattcgcggaagtagtg

SEQ ID NO: 22751 - DNA, 30 bp, Artificial Sequence
  Synthetic oligonucleotide
cgaaggcaacttacgacatcggaacacgtg

SEQ ID NO: 22752 - DNA, 30 bp, Artificial Sequence
  Synthetic oligonucleotide
atggagcgagttagggggatccaagacgtg

SEQ ID NO: 22753 - DNA, 30 bp, Artificial Sequence
  Synthetic oligonucleotide
cgaggaagtacggcggtatacttagacgtg

SEQ ID NO: 22754 - DNA, 30 bp, Artificial Sequence
  Synthetic oligonucleotide
tacgatgagtctgatacatgaatccaggtg

SEQ ID NO: 22755 - DNA, 30 bp, Artificial Sequence
  Synthetic oligonucleotide
gagcggatggtattgtgacataacagggtg

SEQ ID NO: 22756 - DNA, 30 bp, Artificial Sequence
  Synthetic oligonucleotide
tacggacttgcggcccaaaatcagagggtg

SEQ ID NO: 22757 - DNA, 30 bp, Artificial Sequence
  Synthetic oligonucleotide
cttgtgcgcgagattgaaactatagatgtg

SEQ ID NO: 22758 - DNA, 30 bp, Artificial Sequence
  Synthetic oligonucleotide
acgacgcgacgtgttttggttagggatgtg

SEQ ID NO: 22759 - DNA, 30 bp, Artificial Sequence
  Synthetic oligonucleotide
ggctaaggatgggcgattgaagaccttgtg

SEQ ID NO: 22760 - DNA, 30 bp, Artificial Sequence
  Synthetic oligonucleotide
tacacaggtcaaaactgcagttaaacattg

SEQ ID NO: 22761 - DNA, 30 bp, Artificial Sequence
  Synthetic oligonucleotide
caaggtcaaggatgcgggtagagtccattg

SEQ ID NO: 22762 - DNA, 30 bp, Artificial Sequence
  Synthetic oligonucleotide
cctcggtagcatttgaaaattgacagattg

SEQ ID NO: 22763 - DNA, 30 bp, Artificial Sequence
  Synthetic oligonucleotide
acgaggccttgtaaacataagatcagattg

SEQ ID NO: 22764 - DNA, 30 bp, Artificial Sequence
  Synthetic oligonucleotide
gcagggagcggtcagaaagggcagggattg

SEQ ID NO: 22765 - DNA, 30 bp, Artificial Sequence
  Synthetic oligonucleotide
ggagtagctagtggatcgttaggaatattg

SEQ ID NO: 22766 - DNA, 30 bp, Artificial Sequence
  Synthetic oligonucleotide
ccaacactgggatgagaaggaggtgtattg

SEQ ID NO: 22767 - DNA, 30 bp, Artificial Sequence
  Synthetic oligonucleotide
tcgggggtggggtgccatgaaacacccttg

SEQ ID NO: 22768 - DNA, 30 bp, Artificial Sequence
  Synthetic oligonucleotide
caaaggtataagattaaggtaaaaggcttg

SEQ ID NO: 22769 - DNA, 30 bp, Artificial Sequence
  Synthetic oligonucleotide
tcacgggctcgaaccgtcataggcttcttg

SEQ ID NO: 22770 - DNA, 30 bp, Artificial Sequence
  Synthetic oligonucleotide
gatgaggcgaaaatctctgttcaaaagttg

SEQ ID NO: 22771 - DNA, 30 bp, Artificial Sequence
  Synthetic oligonucleotide
aggtgatgttacaacacccgaatatagttg

SEQ ID NO: 22772 - DNA, 30 bp, Artificial Sequence
  Synthetic oligonucleotide
gtcacgatcaaaccaggatgaatatggttg

SEQ ID NO: 22773 - DNA, 30 bp, Artificial Sequence
  Synthetic oligonucleotide
cacacggtcattgatcaggcgagttaaaat

SEQ ID NO: 22774 - DNA, 30 bp, Artificial Sequence
  Synthetic oligonucleotide
actgcgcaggagcggacgtgaacagcaaat

SEQ ID NO: 22775 - DNA, 30 bp, Artificial Sequence
  Synthetic oligonucleotide
taactcgaggtgcgaagaagttgttgcaat

SEQ ID NO: 22776 - DNA, 30 bp, Artificial Sequence
  Synthetic oligonucleotide
agatgacaataggaagatcggtatatcaat

SEQ ID NO: 22777 - DNA, 30 bp, Artificial Sequence
  Synthetic oligonucleotide
gatgtaggacacaaagtaccgtgagtcaat

SEQ ID NO: 22778 - DNA, 30 bp, Artificial Sequence
  Synthetic oligonucleotide
gaaagggcagtggttaagccggcaacgaat

SEQ ID NO: 22779 - DNA, 31 bp, Artificial Sequence
  Synthetic oligonucleotide
cgaaaaaggactagtagattcccgaacgaat

SEQ ID NO: 22780 - DNA, 30 bp, Artificial Sequence
  Synthetic oligonucleotide
ggcagagtacaacgggcaagggtaacgaat

SEQ ID NO: 22781 - DNA, 30 bp, Artificial Sequence
  Synthetic oligonucleotide
gacgggcatggggccatcaacgatatgaat

SEQ ID NO: 22782 - DNA, 30 bp, Artificial Sequence
  Synthetic oligonucleotide
agctgaaacacattcggacagcaattgaat

SEQ ID NO: 22783 - DNA, 30 bp, Artificial Sequence
  Synthetic oligonucleotide
atgaggaaagttagtgacagcgacccacat

SEQ ID NO: 22784 - DNA, 30 bp, Artificial Sequence
  Synthetic oligonucleotide
agcggggtgaagctcatctacgatacccat

SEQ ID NO: 22785 - DNA, 30 bp, Artificial Sequence
  Synthetic oligonucleotide
ttcctagccgaaaggggctggcagggccat

SEQ ID NO: 22786 - DNA, 30 bp, Artificial Sequence
  Synthetic oligonucleotide
gccgagggctcaaggatcagatagaagcat

SEQ ID NO: 22787 - DNA, 30 bp, Artificial Sequence
  Synthetic oligonucleotide
ttcaacaaagtgtcagagaaaggacagcat

SEQ ID NO: 22788 - DNA, 30 bp, Artificial Sequence
  Synthetic oligonucleotide
ttgaccggacatcagagcggaattcagcat

SEQ ID NO: 22789 - DNA, 30 bp, Artificial Sequence
  Synthetic oligonucleotide
acacagtagcgcaataatcggggggagcat

SEQ ID NO: 22790 - DNA, 30 bp, Artificial Sequence
  Synthetic oligonucleotide
cggataaggtttggggaaagtaaatagcat

SEQ ID NO: 22791 - DNA, 30 bp, Artificial Sequence
  Synthetic oligonucleotide
cgggacataggtcgtaccctaaactagcat

SEQ ID NO: 22792 - DNA, 30 bp, Artificial Sequence
  Synthetic oligonucleotide
agaacgagcaggagcaaggatgctaatcat

SEQ ID NO: 22793 - DNA, 30 bp, Artificial Sequence
  Synthetic oligonucleotide
gacagaatacgtaaaaagaaagaaagtcat

SEQ ID NO: 22794 - DNA, 30 bp, Artificial Sequence
  Synthetic oligonucleotide
ggcgacatacgaatcagatatactagtcat

SEQ ID NO: 22795 - DNA, 30 bp, Artificial Sequence
  Synthetic oligonucleotide
cgaaaccaagacatcctggcaagaattcat

SEQ ID NO: 22796 - DNA, 30 bp, Artificial Sequence
  Synthetic oligonucleotide
cgaggagtgaaagtcctaaataccaaagat

SEQ ID NO: 22797 - DNA, 30 bp, Artificial Sequence
  Synthetic oligonucleotide
ataacccgcccgaaggtaaacgcctaagat

SEQ ID NO: 22798 - DNA, 30 bp, Artificial Sequence
  Synthetic oligonucleotide
gcatcgatctgaaaggtaaaaatagcagat

SEQ ID NO: 22799 - DNA, 30 bp, Artificial Sequence
  Synthetic oligonucleotide
actcgaagagaccgggaacctattgcagat

SEQ ID NO: 22800 - DNA, 30 bp, Artificial Sequence
  Synthetic oligonucleotide
gggccaaaacataaaggtgaaagatcagat

SEQ ID NO: 22801 - DNA, 30 bp, Artificial Sequence
  Synthetic oligonucleotide
atgacgagggatcgcaagcagatcagagat

SEQ ID NO: 22802 - DNA, 30 bp, Artificial Sequence
  Synthetic oligonucleotide
gtggcaataaaggaacaagagagtcgagat

SEQ ID NO: 22803 - DNA, 30 bp, Artificial Sequence
  Synthetic oligonucleotide
ggtcgagcgatgtacaaattgggaatagat

SEQ ID NO: 22804 - DNA, 30 bp, Artificial Sequence
  Synthetic oligonucleotide
cgcgcgatacggaaaacagtaagcttagat

SEQ ID NO: 22805 - DNA, 30 bp, Artificial Sequence
  Synthetic oligonucleotide
aagggcactggctgtctaacagcgcacgat

SEQ ID NO: 22806 - DNA, 30 bp, Artificial Sequence
  Synthetic oligonucleotide
acgcataccaatgagaacgtccatgccgat

SEQ ID NO: 22807 - DNA, 30 bp, Artificial Sequence
  Synthetic oligonucleotide
caagttcgaacgtgaggaaatgatagcgat

SEQ ID NO: 22808 - DNA, 30 bp, Artificial Sequence
  Synthetic oligonucleotide
tagagctgcggtacgtgtcagaacaaggat

SEQ ID NO: 22809 - DNA, 30 bp, Artificial Sequence
  Synthetic oligonucleotide
acaggcaaccagatacatgtagcagcggat

SEQ ID NO: 22810 - DNA, 30 bp, Artificial Sequence
  Synthetic oligonucleotide
atgtcaataaatcggtgaacggagagggat

SEQ ID NO: 22811 - DNA, 30 bp, Artificial Sequence
  Synthetic oligonucleotide
cgggccaagaaagccgtcgagcgcgtggat

SEQ ID NO: 22812 - DNA, 30 bp, Artificial Sequence
  Synthetic oligonucleotide
acagatcaaatgccaggcaaaggcggtgat

SEQ ID NO: 22813 - DNA, 30 bp, Artificial Sequence
  Synthetic oligonucleotide
catgacgaatagatcgtagatgcgtgtgat

SEQ ID NO: 22814 - DNA, 30 bp, Artificial Sequence
  Synthetic oligonucleotide
aacgtaccgtatgaagactaggaacaatat

SEQ ID NO: 22815 - DNA, 30 bp, Artificial Sequence
  Synthetic oligonucleotide
tagggccaaacgaacgtcacagggtaatat

SEQ ID NO: 22816 - DNA, 30 bp, Artificial Sequence
  Synthetic oligonucleotide
taggaaagacatcgaagtgccggcctatat

SEQ ID NO: 22817 - DNA, 30 bp, Artificial Sequence
  Synthetic oligonucleotide
ggggaaatgccgaatccgggaattaactat

SEQ ID NO: 22818 - DNA, 30 bp, Artificial Sequence
  Synthetic oligonucleotide
tggggggagataaaggtggactagccctat

SEQ ID NO: 22819 - DNA, 30 bp, Artificial Sequence
  Synthetic oligonucleotide
acgatgtggcgaccacgctagtcaggctat

SEQ ID NO: 22820 - DNA, 30 bp, Artificial Sequence
  Synthetic oligonucleotide
cgaatttaaggggcaatcgagataatgtat

SEQ ID NO: 22821 - DNA, 30 bp, Artificial Sequence
  Synthetic oligonucleotide
gtgagggtaaggaacacgctaaaacgaact

SEQ ID NO: 22822 - DNA, 30 bp, Artificial Sequence
  Synthetic oligonucleotide
cacgcgtaatcgacatcagactagcacact

SEQ ID NO: 22823 - DNA, 30 bp, Artificial Sequence
  Synthetic oligonucleotide
agagaacacctaacattgtaagggaccact

SEQ ID NO: 22824 - DNA, 30 bp, Artificial Sequence
  Synthetic oligonucleotide
tggcgaggagacagagtaactgtgaccact

SEQ ID NO: 22825 - DNA, 30 bp, Artificial Sequence
  Synthetic oligonucleotide
acgaaatcgtgtgggcggcattaatcgact

SEQ ID NO: 22826 - DNA, 30 bp, Artificial Sequence
  Synthetic oligonucleotide
cacgggaggcacagattcgcacattcgact

SEQ ID NO: 22827 - DNA, 30 bp, Artificial Sequence
  Synthetic oligonucleotide
acggacgtcaactgacctccgactcatact

SEQ ID NO: 22828 - DNA, 30 bp, Artificial Sequence
  Synthetic oligonucleotide
tccttacaccatacctatctacaatttact

SEQ ID NO: 22829 - DNA, 30 bp, Artificial Sequence
  Synthetic oligonucleotide
atggccataggagtcgaagcggaggaccct

SEQ ID NO: 22830 - DNA, 30 bp, Artificial Sequence
  Synthetic oligonucleotide
gggcaatgcagtgacgtactcaagctccct

SEQ ID NO: 22831 - DNA, 30 bp, Artificial Sequence
  Synthetic oligonucleotide
acgcgatcatccagtgagaccaagcctcct

SEQ ID NO: 22832 - DNA, 30 bp, Artificial Sequence
  Synthetic oligonucleotide
ccactggaagcgataaaccgtactcaagct

SEQ ID NO: 22833 - DNA, 30 bp, Artificial Sequence
  Synthetic oligonucleotide
ccgatgccggctgtagatgagagtatcgct

SEQ ID NO: 22834 - DNA, 30 bp, Artificial Sequence
  Synthetic oligonucleotide
ggcacttggtagagaagaggggactatgct

SEQ ID NO: 22835 - DNA, 30 bp, Artificial Sequence
  Synthetic oligonucleotide
gggcgcaagtctgacgggagactagctgct

SEQ ID NO: 22836 - DNA, 30 bp, Artificial Sequence
  Synthetic oligonucleotide
aggtagaagtgaggtaacagaggcattgct

SEQ ID NO: 22837 - DNA, 30 bp, Artificial Sequence
  Synthetic oligonucleotide
cacaccggcgatggactaagtaaacaatct

SEQ ID NO: 22838 - DNA, 30 bp, Artificial Sequence
  Synthetic oligonucleotide
ggactcaaagcacagaagccgactccctct

SEQ ID NO: 22839 - DNA, 30 bp, Artificial Sequence
  Synthetic oligonucleotide
caaaacaaatgaacccatagtgagaagtct

SEQ ID NO: 22840 - DNA, 30 bp, Artificial Sequence
  Synthetic oligonucleotide
cggttagggtgataacaagtgctactaagt

SEQ ID NO: 22841 - DNA, 30 bp, Artificial Sequence
  Synthetic oligonucleotide
aggcgtctcaaaagtcaagggggagccagt

SEQ ID NO: 22842 - DNA, 30 bp, Artificial Sequence
  Synthetic oligonucleotide
ggatgcgaagctttcgaagactggcagagt

SEQ ID NO: 22843 - DNA, 30 bp, Artificial Sequence
  Synthetic oligonucleotide
gcggacaaatagatcgctaacgaggagagt

SEQ ID NO: 22844 - DNA, 30 bp, Artificial Sequence
  Synthetic oligonucleotide
tccagcgcgcgcccagagatcagatagagt

SEQ ID NO: 22845 - DNA, 30 bp, Artificial Sequence
  Synthetic oligonucleotide
acggctagtcaccggatttcatagaggagt

SEQ ID NO: 22846 - DNA, 30 bp, Artificial Sequence
  Synthetic oligonucleotide
ttcgaacgttcgacataactgaagcggagt

SEQ ID NO: 22847 - DNA, 30 bp, Artificial Sequence
  Synthetic oligonucleotide
atgggatccctagtcaatgcccgtctgagt

SEQ ID NO: 22848 - DNA, 30 bp, Artificial Sequence
  Synthetic oligonucleotide
gccgtatggagttgggcaagaagggatagt

SEQ ID NO: 22849 - DNA, 30 bp, Artificial Sequence
  Synthetic oligonucleotide
aggctaagggcgggaccgacgacgtatagt

SEQ ID NO: 22850 - DNA, 30 bp, Artificial Sequence
  Synthetic oligonucleotide
tgaggtgcagaaggcaatgtgcaccaacgt

SEQ ID NO: 22851 - DNA, 30 bp, Artificial Sequence
  Synthetic oligonucleotide
acacaacgaccaaagagatggggcggacgt

SEQ ID NO: 22852 - DNA, 30 bp, Artificial Sequence
  Synthetic oligonucleotide
acaacagacgagtgatcggcaatcaaccgt

SEQ ID NO: 22853 - DNA, 30 bp, Artificial Sequence
  Synthetic oligonucleotide
tgggtgccaccaaggactcgaagagcgcgt

SEQ ID NO: 22854 - DNA, 29 bp, Artificial Sequence
  Synthetic oligonucleotide
gcgttaaacattagaacacacgagatcgt

SEQ ID NO: 22855 - DNA, 30 bp, Artificial Sequence
  Synthetic oligonucleotide
cgtcaagtccgctaaataagatcagaaggt

SEQ ID NO: 22856 - DNA, 30 bp, Artificial Sequence
  Synthetic oligonucleotide
cgatgacgactccggtacaatgctgacggt

SEQ ID NO: 22857 - DNA, 30 bp, Artificial Sequence
  Synthetic oligonucleotide
tgcaaagacagcacacaggacaacaccggt

SEQ ID NO: 22858 - DNA, 30 bp, Artificial Sequence
  Synthetic oligonucleotide
agaggtgatgtcaacgcgtaagatctcggt

SEQ ID NO: 22859 - DNA, 30 bp, Artificial Sequence
  Synthetic oligonucleotide
gaaggatagaacgggcaaatggattatggt

SEQ ID NO: 22860 - DNA, 30 bp, Artificial Sequence
  Synthetic oligonucleotide
tcctacacgtgagaactagaaaaccgtggt

SEQ ID NO: 22861 - DNA, 30 bp, Artificial Sequence
  Synthetic oligonucleotide
aggaacattgaccagaagagacacattggt

SEQ ID NO: 22862 - DNA, 30 bp, Artificial Sequence
  Synthetic oligonucleotide
tctccgtgcagaaaaggcctcgaaaaatgt

SEQ ID NO: 22863 - DNA, 30 bp, Artificial Sequence
  Synthetic oligonucleotide
cgtggtaagaggggatcgtgactggtatgt

SEQ ID NO: 22864 - DNA, 30 bp, Artificial Sequence
  Synthetic oligonucleotide
gtgtgcgacggtgagtgtaaggttaagtgt

SEQ ID NO: 22865 - DNA, 30 bp, Artificial Sequence
  Synthetic oligonucleotide
cgtcaaaaaccgccaaggatccaccagtgt

SEQ ID NO: 22866 - DNA, 30 bp, Artificial Sequence
  Synthetic oligonucleotide
tgaaagatgtggaaagggcgcgaatattgt

SEQ ID NO: 22867 - DNA, 30 bp, Artificial Sequence
  Synthetic oligonucleotide
acggtcaaggagaagaatggagtactaatt

SEQ ID NO: 22868 - DNA, 30 bp, Artificial Sequence
  Synthetic oligonucleotide
tgccagatcaacacgatgagaaaatcgatt

SEQ ID NO: 22869 - DNA, 30 bp, Artificial Sequence
  Synthetic oligonucleotide
cggcaatgggagaacagcgcaacaaggatt

SEQ ID NO: 22870 - DNA, 30 bp, Artificial Sequence
  Synthetic oligonucleotide
gggcaggtggtaagtaaagtacgatatatt

SEQ ID NO: 22871 - DNA, 30 bp, Artificial Sequence
  Synthetic oligonucleotide
ccacgacaccaaagttataaagggacactt

SEQ ID NO: 22872 - DNA, 30 bp, Artificial Sequence
  Synthetic oligonucleotide
ccgcagacggaacggggaaaaatgagactt

SEQ ID NO: 22873 - DNA, 30 bp, Artificial Sequence
  Synthetic oligonucleotide
gcgattagcggagacgatatgagcgacctt

SEQ ID NO: 22874 - DNA, 30 bp, Artificial Sequence
  Synthetic oligonucleotide
aggaggtgaagctcggcggactgctacctt

SEQ ID NO: 22875 - DNA, 30 bp, Artificial Sequence
  Synthetic oligonucleotide
gggacagagtcacacaccctgagagacgtt

SEQ ID NO: 22876 - DNA, 30 bp, Artificial Sequence
  Synthetic oligonucleotide
ggagatgggtcgtaagggtcctaaagcgtt

SEQ ID NO: 22877 - DNA, 30 bp, Artificial Sequence
  Synthetic oligonucleotide
tggtaagcaaggtagaacacgaaccaggtt

SEQ ID NO: 22878 - DNA, 30 bp, Artificial Sequence
  Synthetic oligonucleotide
acacaggaacatcgcacactgaagccggtt

SEQ ID NO: 22879 - DNA, 30 bp, Artificial Sequence
  Synthetic oligonucleotide
gacgtagggatcacggacaatgggcgattt

SEQ ID NO: 22880 - DNA, 30 bp, Artificial Sequence
  Synthetic oligonucleotide
ggggcgtacgaggaaagaatgagaaggttt

SEQ ID NO: 22881 - DNA, 30 bp, Artificial Sequence
  Synthetic oligonucleotide
acaatgaacagagatggaccgaaccaaaaa

SEQ ID NO: 22882 - DNA, 30 bp, Artificial Sequence
  Synthetic oligonucleotide
agcaacagcaaaggaggcttcgaagcaaaa

SEQ ID NO: 22883 - DNA, 30 bp, Artificial Sequence
  Synthetic oligonucleotide
ccggtgatatcgcaccaaaaaatagcaaaa

SEQ ID NO: 22884 - DNA, 30 bp, Artificial Sequence
  Synthetic oligonucleotide
tgtgcaagaaaggtgaccaaagcggcaaaa

SEQ ID NO: 22885 - DNA, 30 bp, Artificial Sequence
  Synthetic oligonucleotide
ccaacatcaaacaaaaagtgtcatgcaaaa

SEQ ID NO: 22886 - DNA, 30 bp, Artificial Sequence
  Synthetic oligonucleotide
gggggtaaagccaaatcagcatcatgaaaa

SEQ ID NO: 22887 - DNA, 30 bp, Artificial Sequence
  Synthetic oligonucleotide
cgagtgaacgttccggcactctaggtaaaa

SEQ ID NO: 22888 - DNA, 30 bp, Artificial Sequence
  Synthetic oligonucleotide
tggtcgtagatactgtataccagagacaaa

SEQ ID NO: 22889 - DNA, 30 bp, Artificial Sequence
  Synthetic oligonucleotide
aggggcgcggaatagagcagctaccccaaa

SEQ ID NO: 22890 - DNA, 30 bp, Artificial Sequence
  Synthetic oligonucleotide
aaggaatgcatgtcaataccagcccgcaaa

SEQ ID NO: 22891 - DNA, 30 bp, Artificial Sequence
  Synthetic oligonucleotide
ttgtataggaaaaccagggaagtaggcaaa

SEQ ID NO: 22892 - DNA, 30 bp, Artificial Sequence
  Synthetic oligonucleotide
atgtgtaagacaaagcgaagactgaagaaa

SEQ ID NO: 22893 - DNA, 30 bp, Artificial Sequence
  Synthetic oligonucleotide
aatgatcgtggcgacgaaacctcggagaaa

SEQ ID NO: 22894 - DNA, 30 bp, Artificial Sequence
  Synthetic oligonucleotide
tacggggtgacgacccccagcgcgacgaaa

SEQ ID NO: 22895 - DNA, 30 bp, Artificial Sequence
  Synthetic oligonucleotide
ggatccgtggggagccgaatgagtcggaaa

SEQ ID NO: 22896 - DNA, 30 bp, Artificial Sequence
  Synthetic oligonucleotide
ccggggggcggagacgagacctaagggaaa

SEQ ID NO: 22897 - DNA, 30 bp, Artificial Sequence
  Synthetic oligonucleotide
gctagagcacgagtggggccatcggggaaa

SEQ ID NO: 22898 - DNA, 30 bp, Artificial Sequence
  Synthetic oligonucleotide
tgacgggaaccaagggtagcaagattgaaa

SEQ ID NO: 22899 - DNA, 30 bp, Artificial Sequence
  Synthetic oligonucleotide
tgcagtgagggcgtctagaaatgggataaa

SEQ ID NO: 22900 - DNA, 30 bp, Artificial Sequence
  Synthetic oligonucleotide
agtatgggccaacaggcagggatgtataaa

SEQ ID NO: 22901 - DNA, 30 bp, Artificial Sequence
  Synthetic oligonucleotide
cgatcatgagtaacataaacccagactaaa

SEQ ID NO: 22902 - DNA, 30 bp, Artificial Sequence
  Synthetic oligonucleotide
atgcctagcggatggaaaaggggccctaaa

SEQ ID NO: 22903 - DNA, 30 bp, Artificial Sequence
  Synthetic oligonucleotide
acgaaatacgcaattcactcctggcctaaa

SEQ ID NO: 22904 - DNA, 30 bp, Artificial Sequence
  Synthetic oligonucleotide
ataaccgtacaccatgaagtgcgccgtaaa

SEQ ID NO: 22905 - DNA, 30 bp, Artificial Sequence
  Synthetic oligonucleotide
tatagaaaacagggtagcaacaggcgtaaa

SEQ ID NO: 22906 - DNA, 30 bp, Artificial Sequence
  Synthetic oligonucleotide
cgcgatgcgccgcgatctgacaggcaacaa

SEQ ID NO: 22907 - DNA, 30 bp, Artificial Sequence
  Synthetic oligonucleotide
acaatgatcaacgaagttcataactaacaa

SEQ ID NO: 22908 - DNA, 30 bp, Artificial Sequence
  Synthetic oligonucleotide
gagggcaattgaatagacctagattaacaa

SEQ ID NO: 22909 - DNA, 30 bp, Artificial Sequence
  Synthetic oligonucleotide
aacgtgataagctattgacaaataacacaa

SEQ ID NO: 22910 - DNA, 30 bp, Artificial Sequence
  Synthetic oligonucleotide
cagggtatgagatacaaaggcaaggcacaa

SEQ ID NO: 22911 - DNA, 30 bp, Artificial Sequence
  Synthetic oligonucleotide
gcgggtagggcctcgcgttcgttatcacaa

SEQ ID NO: 22912 - DNA, 30 bp, Artificial Sequence
  Synthetic oligonucleotide
agtcgacaccatgcaagggatagctgacaa

SEQ ID NO: 22913 - DNA, 30 bp, Artificial Sequence
  Synthetic oligonucleotide
tcgaaatgagcagccccaacgtccatacaa

SEQ ID NO: 22914 - DNA, 30 bp, Artificial Sequence
  Synthetic oligonucleotide
aagtcaagccacgtgaataacagcatacaa

SEQ ID NO: 22915 - DNA, 30 bp, Artificial Sequence
  Synthetic oligonucleotide
atgactgcacggccaacgagctgcgtacaa

SEQ ID NO: 22916 - DNA, 30 bp, Artificial Sequence
  Synthetic oligonucleotide
catggatgtcacgaaggaggtgctgtacaa

SEQ ID NO: 22917 - DNA, 30 bp, Artificial Sequence
  Synthetic oligonucleotide
tacatggacgacattaagactacacaccaa

SEQ ID NO: 22918 - DNA, 30 bp, Artificial Sequence
  Synthetic oligonucleotide
aagccataaggagatctagggctgcaccaa

SEQ ID NO: 22919 - DNA, 30 bp, Artificial Sequence
  Synthetic oligonucleotide
cgatggggaataaatgtacttgctcaccaa

SEQ ID NO: 22920 - DNA, 30 bp, Artificial Sequence
  Synthetic oligonucleotide
ggggcggagtagagtggtttaaagtgccaa

SEQ ID NO: 22921 - DNA, 30 bp, Artificial Sequence
  Synthetic oligonucleotide
tcaggggcaagggctccaaagcgcctccaa

SEQ ID NO: 22922 - DNA, 30 bp, Artificial Sequence
  Synthetic oligonucleotide
atatagcaggagatcagaagtgtggtccaa

SEQ ID NO: 22923 - DNA, 30 bp, Artificial Sequence
  Synthetic oligonucleotide
cccccagataggcagggccagtaaaagcaa

SEQ ID NO: 22924 - DNA, 30 bp, Artificial Sequence
  Synthetic oligonucleotide
caggacggatactaagcaacactccagcaa

SEQ ID NO: 22925 - DNA, 30 bp, Artificial Sequence
  Synthetic oligonucleotide
agatagcggctatcctcaaaacaggagcaa

SEQ ID NO: 22926 - DNA, 30 bp, Artificial Sequence
  Synthetic oligonucleotide
tccaactgagtaatccgagggacgtcgcaa

SEQ ID NO: 22927 - DNA, 30 bp, Artificial Sequence
  Synthetic oligonucleotide
aggtggcaagtaatcatccttcgtgggcaa

SEQ ID NO: 22928 - DNA, 30 bp, Artificial Sequence
  Synthetic oligonucleotide
atacggagaggcgtttaccgaagggtgcaa

SEQ ID NO: 22929 - DNA, 30 bp, Artificial Sequence
  Synthetic oligonucleotide
ggatcagaaaggcgccacatcaaattgcaa

SEQ ID NO: 22930 - DNA, 30 bp, Artificial Sequence
  Synthetic oligonucleotide
ttgcagaaaagccataacaaataggatcaa

SEQ ID NO: 22931 - DNA, 30 bp, Artificial Sequence
  Synthetic oligonucleotide
ttcgagaccactgagggtgagaaagctcaa

SEQ ID NO: 22932 - DNA, 30 bp, Artificial Sequence
  Synthetic oligonucleotide
agtcgcaatcaaggaatgattccagctcaa

SEQ ID NO: 22933 - DNA, 30 bp, Artificial Sequence
  Synthetic oligonucleotide
gaggactaatcaacaaaaaatagggctcaa

SEQ ID NO: 22934 - DNA, 30 bp, Artificial Sequence
  Synthetic oligonucleotide
tagggacaagcagaaaagatgtggagtcaa

SEQ ID NO: 22935 - DNA, 30 bp, Artificial Sequence
  Synthetic oligonucleotide
atccagaatgtaatcaagggaagccaagaa

SEQ ID NO: 22936 - DNA, 30 bp, Artificial Sequence
  Synthetic oligonucleotide
gcgaaggcagggtacaggactttgccagaa

SEQ ID NO: 22937 - DNA, 30 bp, Artificial Sequence
  Synthetic oligonucleotide
ggaactaacagatgacccatctaggcagaa

SEQ ID NO: 22938 - DNA, 30 bp, Artificial Sequence
  Synthetic oligonucleotide
acgacgggaaagtggagcaagtgatcagaa

SEQ ID NO: 22939 - DNA, 30 bp, Artificial Sequence
  Synthetic oligonucleotide
atgtgagaatggtgctatgagaggtcagaa

SEQ ID NO: 22940 - DNA, 30 bp, Artificial Sequence
  Synthetic oligonucleotide
cgcggtaaagtggaagacatcctggtagaa

SEQ ID NO: 22941 - DNA, 30 bp, Artificial Sequence
  Synthetic oligonucleotide
ggggctttgtccgagtcaaccactgtagaa

SEQ ID NO: 22942 - DNA, 30 bp, Artificial Sequence
  Synthetic oligonucleotide
caagggggtacaaacctcgatcagttagaa

SEQ ID NO: 22943 - DNA, 30 bp, Artificial Sequence
  Synthetic oligonucleotide
taccattacagagccgcaggccgccgcgaa

SEQ ID NO: 22944 - DNA, 30 bp, Artificial Sequence
  Synthetic oligonucleotide
ccaacgaatgctaatcagggcggttgcgaa

SEQ ID NO: 22945 - DNA, 30 bp, Artificial Sequence
  Synthetic oligonucleotide
aggtaggtatgggtagcacgttcattcgaa

SEQ ID NO: 22946 - DNA, 30 bp, Artificial Sequence
  Synthetic oligonucleotide
tcgtagaaactttaaaatgcatctacggaa

SEQ ID NO: 22947 - DNA, 30 bp, Artificial Sequence
  Synthetic oligonucleotide
cgagactaaagtaactcaaattaaccggaa

SEQ ID NO: 22948 - DNA, 30 bp, Artificial Sequence
  Synthetic oligonucleotide
ccaacaagtcaggttaacctaccgccggaa

SEQ ID NO: 22949 - DNA, 30 bp, Artificial Sequence
  Synthetic oligonucleotide
gggagtgagagctttcaaacttgagcggaa

SEQ ID NO: 22950 - DNA, 30 bp, Artificial Sequence
  Synthetic oligonucleotide
tgatcacggactccaacacagtgctcggaa

SEQ ID NO: 22951 - DNA, 30 bp, Artificial Sequence
  Synthetic oligonucleotide
cggggcacgttgaatagtaaggggtcggaa

SEQ ID NO: 22952 - DNA, 30 bp, Artificial Sequence
  Synthetic oligonucleotide
gggcaaaggatcatcgcttcccactgggaa

SEQ ID NO: 22953 - DNA, 30 bp, Artificial Sequence
  Synthetic oligonucleotide
tcaaaccaaattcaaaaatcgtcctgggaa

SEQ ID NO: 22954 - DNA, 30 bp, Artificial Sequence
  Synthetic oligonucleotide
gcgaacacgagtacatgcatgtctatggaa

SEQ ID NO: 22955 - DNA, 30 bp, Artificial Sequence
  Synthetic oligonucleotide
ctgaattgcatggacaagggacaactggaa

SEQ ID NO: 22956 - DNA, 30 bp, Artificial Sequence
  Synthetic oligonucleotide
cgccttgggtggaacgtacagagagtggaa

SEQ ID NO: 22957 - DNA, 31 bp, Artificial Sequence
  Synthetic oligonucleotide
ctaagtgggaggggggagtataccaaatgaa

SEQ ID NO: 22958 - DNA, 30 bp, Artificial Sequence
  Synthetic oligonucleotide
tttaggccagcacacgagcaacagggtgaa

SEQ ID NO: 22959 - DNA, 30 bp, Artificial Sequence
  Synthetic oligonucleotide
gaaggtcagagctggtgcgcgcactgtgaa

SEQ ID NO: 22960 - DNA, 30 bp, Artificial Sequence
  Synthetic oligonucleotide
gagcgtagaaggtaaagatggtactaataa

SEQ ID NO: 22961 - DNA, 30 bp, Artificial Sequence
  Synthetic oligonucleotide
tagataaacgcaacaaggaaagacccataa

SEQ ID NO: 22962 - DNA, 30 bp, Artificial Sequence
  Synthetic oligonucleotide
aacgtgggcatccaggtgccaagtgcataa

SEQ ID NO: 22963 - DNA, 30 bp, Artificial Sequence
  Synthetic oligonucleotide
aaccagcacaagttggacaaacaaagataa

SEQ ID NO: 22964 - DNA, 30 bp, Artificial Sequence
  Synthetic oligonucleotide
cagaacgtgggaaacttcagaaatagataa

SEQ ID NO: 22965 - DNA, 30 bp, Artificial Sequence
  Synthetic oligonucleotide
gtacgaaggtcgtgcgattgaaacggataa

SEQ ID NO: 22966 - DNA, 30 bp, Artificial Sequence
  Synthetic oligonucleotide
gacgggactggattattaacactgggataa

SEQ ID NO: 22967 - DNA, 30 bp, Artificial Sequence
  Synthetic oligonucleotide
ggcaggggaatcgcactgaaaaaatgataa

SEQ ID NO: 22968 - DNA, 30 bp, Artificial Sequence
  Synthetic oligonucleotide
cacgagggcataaagttaaatatatgataa

SEQ ID NO: 22969 - DNA, 30 bp, Artificial Sequence
  Synthetic oligonucleotide
tcacgccgaccagcgacgaatgatcactaa

SEQ ID NO: 22970 - DNA, 30 bp, Artificial Sequence
  Synthetic oligonucleotide
gtagacaggggtgtggcagagtaggactaa

SEQ ID NO: 22971 - DNA, 30 bp, Artificial Sequence
  Synthetic oligonucleotide
agccactaagaaccacaaatcagcacctaa

SEQ ID NO: 22972 - DNA, 30 bp, Artificial Sequence
  Synthetic oligonucleotide
gggaatattccaaggcagaacaagagctaa

SEQ ID NO: 22973 - DNA, 30 bp, Artificial Sequence
  Synthetic oligonucleotide
aggatgtggggtcattctagtgccggctaa

SEQ ID NO: 22974 - DNA, 30 bp, Artificial Sequence
  Synthetic oligonucleotide
tagggctcgtcgaaagcagaaggcgagtaa

SEQ ID NO: 22975 - DNA, 30 bp, Artificial Sequence
  Synthetic oligonucleotide
ccaagtgcgacagggggcagacctgagtaa

SEQ ID NO: 22976 - DNA, 30 bp, Artificial Sequence
  Synthetic oligonucleotide
acgacgacgatagttcacaaatggcggtaa

SEQ ID NO: 22977 - DNA, 30 bp, Artificial Sequence
  Synthetic oligonucleotide
gaaaggcccatcgaacatgtgctagggtaa

SEQ ID NO: 22978 - DNA, 30 bp, Artificial Sequence
  Synthetic oligonucleotide
atagcgatacggacaggggacgaatggtaa

SEQ ID NO: 22979 - DNA, 31 bp, Artificial Sequence
  Synthetic oligonucleotide
cgagagtggatctgggtcaggccagttgtaa

SEQ ID NO: 22980 - DNA, 30 bp, Artificial Sequence
  Synthetic oligonucleotide
tgcatcggtaggcaaagcaacgaaagttaa

SEQ ID NO: 22981 - DNA, 30 bp, Artificial Sequence
  Synthetic oligonucleotide
acggaacaaaacttacacttgaccagttaa

SEQ ID NO: 22982 - DNA, 30 bp, Artificial Sequence
  Synthetic oligonucleotide
atgtaacatatcgcccaaagtgaacaaaca

SEQ ID NO: 22983 - DNA, 30 bp, Artificial Sequence
  Synthetic oligonucleotide
gcgtctggacaattaagctcaccggaaaca

SEQ ID NO: 22984 - DNA, 30 bp, Artificial Sequence
  Synthetic oligonucleotide
atgtcagaacatcaataccaacaataaaca

SEQ ID NO: 22985 - DNA, 30 bp, Artificial Sequence
  Synthetic oligonucleotide
cagactgaacgtgagtaacccttataaaca

SEQ ID NO: 22986 - DNA, 30 bp, Artificial Sequence
  Synthetic oligonucleotide
cgagagacgtgatcagttcatcaggcaaca

SEQ ID NO: 22987 - DNA, 30 bp, Artificial Sequence
  Synthetic oligonucleotide
acaaagaaagcgacagcgtacgagagaaca

SEQ ID NO: 22988 - DNA, 30 bp, Artificial Sequence
  Synthetic oligonucleotide
cccgaacagagtgatcatggtggcataaca

SEQ ID NO: 22989 - DNA, 30 bp, Artificial Sequence
  Synthetic oligonucleotide
aaggtcgaaataggagccccgcatctaaca

SEQ ID NO: 22990 - DNA, 30 bp, Artificial Sequence
  Synthetic oligonucleotide
agtttaagcaagcacgggaacagctacaca

SEQ ID NO: 22991 - DNA, 30 bp, Artificial Sequence
  Synthetic oligonucleotide
gaaagggagaggaaagtgctttcgaccaca

SEQ ID NO: 22992 - DNA, 30 bp, Artificial Sequence
  Synthetic oligonucleotide
cacgttagttagcctgaaattccgcccaca

SEQ ID NO: 22993 - DNA, 30 bp, Artificial Sequence
  Synthetic oligonucleotide
ggggagagtggtagtaaaggtttgcccaca

SEQ ID NO: 22994 - DNA, 30 bp, Artificial Sequence
  Synthetic oligonucleotide
cggaacggccggagtacatcaaatcccaca

SEQ ID NO: 22995 - DNA, 30 bp, Artificial Sequence
  Synthetic oligonucleotide
ccacgtaaaatacacgcgagtgccgccaca

SEQ ID NO: 22996 - DNA, 30 bp, Artificial Sequence
  Synthetic oligonucleotide
caacgaaggcggcgcgttggacggggcaca

SEQ ID NO: 22997 - DNA, 30 bp, Artificial Sequence
  Synthetic oligonucleotide
aggattgaccaataacttaagatcatcaca

SEQ ID NO: 22998 - DNA, 30 bp, Artificial Sequence
  Synthetic oligonucleotide
gcacgatgggaaaacgatatccctatcaca

SEQ ID NO: 22999 - DNA, 30 bp, Artificial Sequence
  Synthetic oligonucleotide
gcgttaggtatcagttgaaagagagagaca

SEQ ID NO: 23000 - DNA, 30 bp, Artificial Sequence
  Synthetic oligonucleotide
agggaatagtacagagtgagggtagagaca

SEQ ID NO: 23001 - DNA, 30 bp, Artificial Sequence
  Synthetic oligonucleotide
atgtacacatacatatataaaaagccgaca

SEQ ID NO: 23002 - DNA, 30 bp, Artificial Sequence
  Synthetic oligonucleotide
cgcataaacaaaagtgatttaaagtcgaca

SEQ ID NO: 23003 - DNA, 30 bp, Artificial Sequence
  Synthetic oligonucleotide
aaggagcgagtgtaccccacagcttcgaca

SEQ ID NO: 23004 - DNA, 30 bp, Artificial Sequence
  Synthetic oligonucleotide
cgactttcgcaatagagggacaataggaca

SEQ ID NO: 23005 - DNA, 30 bp, Artificial Sequence
  Synthetic oligonucleotide
tacgtggtatcgcgacgtctactggggaca

SEQ ID NO: 23006 - DNA, 30 bp, Artificial Sequence
  Synthetic oligonucleotide
taacaattgaaacgcaaaacgtggcataca

SEQ ID NO: 23007 - DNA, 30 bp, Artificial Sequence
  Synthetic oligonucleotide
cggaccagcagccgagttgaaacagataca

SEQ ID NO: 23008 - DNA, 30 bp, Artificial Sequence
  Synthetic oligonucleotide
tctacgcgagagcccgcaagaaccgataca

SEQ ID NO: 23009 - DNA, 30 bp, Artificial Sequence
  Synthetic oligonucleotide
tagctcgaaggtaagacactggctgataca

SEQ ID NO: 23010 - DNA, 30 bp, Artificial Sequence
  Synthetic oligonucleotide
ttgaatggcaataggtaagagtaggcacca

SEQ ID NO: 23011 - DNA, 30 bp, Artificial Sequence
  Synthetic oligonucleotide
agcaagagggtcctagcaggaaaaagacca

SEQ ID NO: 23012 - DNA, 31 bp, Artificial Sequence
  Synthetic oligonucleotide
gcaagagagaggatgcgcagggatagaccca

SEQ ID NO: 23013 - DNA, 30 bp, Artificial Sequence
  Synthetic oligonucleotide
caaaagaaagcatcacaacgaggacgccca

SEQ ID NO: 23014 - DNA, 31 bp, Artificial Sequence
  Synthetic oligonucleotide
ggggggtacggtgacaccagggcagatccca

SEQ ID NO: 23015 - DNA, 30 bp, Artificial Sequence
  Synthetic oligonucleotide
acgaaggatgaagagaacgatagctagcca

SEQ ID NO: 23016 - DNA, 30 bp, Artificial Sequence
  Synthetic oligonucleotide
cgagagatgaagaaaggacgtgcaacgcca

SEQ ID NO: 23017 - DNA, 30 bp, Artificial Sequence
  Synthetic oligonucleotide
cgaaagaggtagagaaagtgcacactgcca

SEQ ID NO: 23018 - DNA, 30 bp, Artificial Sequence
  Synthetic oligonucleotide
aggaaagtggagaccaccaaacgactgcca

SEQ ID NO: 23019 - DNA, 30 bp, Artificial Sequence
  Synthetic oligonucleotide
aagtcaagagatgatatggagaacgtgcca

SEQ ID NO: 23020 - DNA, 30 bp, Artificial Sequence
  Synthetic oligonucleotide
agggagatgttcggagttgcgctaaatcca

SEQ ID NO: 23021 - DNA, 30 bp, Artificial Sequence
  Synthetic oligonucleotide
atcgaagatcatcacctcagcgtgcatcca

SEQ ID NO: 23022 - DNA, 30 bp, Artificial Sequence
  Synthetic oligonucleotide
acgtatcgaaactcgccggcaaagtgtcca

SEQ ID NO: 23023 - DNA, 30 bp, Artificial Sequence
  Synthetic oligonucleotide
tatgggtagggtctgtacacgagaaaagca

SEQ ID NO: 23024 - DNA, 30 bp, Artificial Sequence
  Synthetic oligonucleotide
gtgccagttacaagaaaggggttaacagca

SEQ ID NO: 23025 - DNA, 30 bp, Artificial Sequence
  Synthetic oligonucleotide
ggcatgacccggagatacgtagtgacagca

SEQ ID NO: 23026 - DNA, 30 bp, Artificial Sequence
  Synthetic oligonucleotide
cggaacaaaaaacggtcaaacagaccagca

SEQ ID NO: 23027 - DNA, 29 bp, Artificial Sequence
  Synthetic oligonucleotide
ggttacaacagtgttgtaaaagagcagca

SEQ ID NO: 23028 - DNA, 30 bp, Artificial Sequence
  Synthetic oligonucleotide
gggacagtcctggaacaaacatgatgagca

SEQ ID NO: 23029 - DNA, 30 bp, Artificial Sequence
  Synthetic oligonucleotide
agctaacacccgctcaccagatcgatagca

SEQ ID NO: 23030 - DNA, 30 bp, Artificial Sequence
  Synthetic oligonucleotide
gccacgacagtgaggattaataggttagca

SEQ ID NO: 23031 - DNA, 30 bp, Artificial Sequence
  Synthetic oligonucleotide
acgatctggaaaacaggatagttccccgca

SEQ ID NO: 23032 - DNA, 30 bp, Artificial Sequence
  Synthetic oligonucleotide
acgaacttggtcgcacacaaactgcccgca

SEQ ID NO: 23033 - DNA, 30 bp, Artificial Sequence
  Synthetic oligonucleotide
cggaaattatgaacgaaactcaagggcgca

SEQ ID NO: 23034 - DNA, 30 bp, Artificial Sequence
  Synthetic oligonucleotide
aaggaggcaaatgagcaactgagacaggca

SEQ ID NO: 23035 - DNA, 30 bp, Artificial Sequence
  Synthetic oligonucleotide
tacggggaagtagcacaagttaaggaggca

SEQ ID NO: 23036 - DNA, 30 bp, Artificial Sequence
  Synthetic oligonucleotide
tcataggcgatacaaatccatcgtacggca

SEQ ID NO: 23037 - DNA, 30 bp, Artificial Sequence
  Synthetic oligonucleotide
aaacgacttgtgaagtaaggaaaatcggca

SEQ ID NO: 23038 - DNA, 30 bp, Artificial Sequence
  Synthetic oligonucleotide
ggcgggtaacaagttgtggatgagtcggca

SEQ ID NO: 23039 - DNA, 30 bp, Artificial Sequence
  Synthetic oligonucleotide
gaaagtgcaaggagtagagggaagagggca

SEQ ID NO: 23040 - DNA, 30 bp, Artificial Sequence
  Synthetic oligonucleotide
acaaggtatacggtagtgagcgatagggca

SEQ ID NO: 23041 - DNA, 30 bp, Artificial Sequence
  Synthetic oligonucleotide
aagagaccaaatgggaaggctgaatgggca

SEQ ID NO: 23042 - DNA, 30 bp, Artificial Sequence
  Synthetic oligonucleotide
gaaggcgtgcagtcgctagagtagctggca

SEQ ID NO: 23043 - DNA, 30 bp, Artificial Sequence
  Synthetic oligonucleotide
aggtgtgagggtaacaatcttaggcgtgca

SEQ ID NO: 23044 - DNA, 30 bp, Artificial Sequence
  Synthetic oligonucleotide
tcgggcctgaaggtggcatcacggcttgca

SEQ ID NO: 23045 - DNA, 30 bp, Artificial Sequence
  Synthetic oligonucleotide
ttacgcggttctgagaaaagaggacaatca

SEQ ID NO: 23046 - DNA, 30 bp, Artificial Sequence
  Synthetic oligonucleotide
ggctacggatcagaactatctcaaacatca

SEQ ID NO: 23047 - DNA, 30 bp, Artificial Sequence
  Synthetic oligonucleotide
ggaagggcacgcaagagaatcggtccatca

SEQ ID NO: 23048 - DNA, 30 bp, Artificial Sequence
  Synthetic oligonucleotide
tgggaccataggcatacccagaccgactca

SEQ ID NO: 23049 - DNA, 30 bp, Artificial Sequence
  Synthetic oligonucleotide
acgagatggtcacaaggggatgggtgctca

SEQ ID NO: 23050 - DNA, 30 bp, Artificial Sequence
  Synthetic oligonucleotide
aggtcaaaccgacacaacgaatctcagtca

SEQ ID NO: 23051 - DNA, 30 bp, Artificial Sequence
  Synthetic oligonucleotide
caaaggtgcaacgtctgcaaaaccgattca

SEQ ID NO: 23052 - DNA, 30 bp, Artificial Sequence
  Synthetic oligonucleotide
gcgagtacgggcgaggaacgtcaagtttca

SEQ ID NO: 23053 - DNA, 30 bp, Artificial Sequence
  Synthetic oligonucleotide
ggacgagactgttatcgatggtggccaaga

SEQ ID NO: 23054 - DNA, 30 bp, Artificial Sequence
  Synthetic oligonucleotide
gggatcataacatagtatggatcggcaaga

SEQ ID NO: 23055 - DNA, 30 bp, Artificial Sequence
  Synthetic oligonucleotide
cgtcgataatccgagtgcctcaagtcaaga

SEQ ID NO: 23056 - DNA, 30 bp, Artificial Sequence
  Synthetic oligonucleotide
ccctcatcgaaaatgggcaggatcagaaga

SEQ ID NO: 23057 - DNA, 29 bp, Artificial Sequence
  Synthetic oligonucleotide
cggccatgtaggggtaccaccgtagaaga

SEQ ID NO: 23058 - DNA, 30 bp, Artificial Sequence
  Synthetic oligonucleotide
cgggagatcgtatgacgggacaaaataaga

SEQ ID NO: 23059 - DNA, 30 bp, Artificial Sequence
  Synthetic oligonucleotide
atgggggcatgcatgtaactcgtattaaga

SEQ ID NO: 23060 - DNA, 30 bp, Artificial Sequence
  Synthetic oligonucleotide
tgaacgaggggacatagcgtgaatttaaga

SEQ ID NO: 23061 - DNA, 30 bp, Artificial Sequence
  Synthetic oligonucleotide
agagacttaatcaaacccgacaacaacaga

SEQ ID NO: 23062 - DNA, 30 bp, Artificial Sequence
  Synthetic oligonucleotide
ggataatgggtgtgaactagcatgaacaga

SEQ ID NO: 23063 - DNA, 30 bp, Artificial Sequence
  Synthetic oligonucleotide
cacagaacctacacgacatttaaggacaga

SEQ ID NO: 23064 - DNA, 30 bp, Artificial Sequence
  Synthetic oligonucleotide
caattaggtgtaacttgaaaaaagcccaga

SEQ ID NO: 23065 - DNA, 30 bp, Artificial Sequence
  Synthetic oligonucleotide
cgggccgcaatgcctaaatctcatcccaga

SEQ ID NO: 23066 - DNA, 30 bp, Artificial Sequence
  Synthetic oligonucleotide
cagggtggacattaagccatgcactccaga

SEQ ID NO: 23067 - DNA, 30 bp, Artificial Sequence
  Synthetic oligonucleotide
aaaggcaaggtaggtaaaggaggtagcaga

SEQ ID NO: 23068 - DNA, 30 bp, Artificial Sequence
  Synthetic oligonucleotide
gaatgtgtggcaagtgaaatgaatggcaga

SEQ ID NO: 23069 - DNA, 30 bp, Artificial Sequence
  Synthetic oligonucleotide
aacgaagggcgtaacaaagacaatatcaga

SEQ ID NO: 23070 - DNA, 30 bp, Artificial Sequence
  Synthetic oligonucleotide
gggagaactcaactacccttaggtatcaga

SEQ ID NO: 23071 - DNA, 30 bp, Artificial Sequence
  Synthetic oligonucleotide
acattaagaacgaattattgtggcaagaga

SEQ ID NO: 23072 - DNA, 30 bp, Artificial Sequence
  Synthetic oligonucleotide
ggacagttctgcagaacccaattagagaga

SEQ ID NO: 23073 - DNA, 30 bp, Artificial Sequence
  Synthetic oligonucleotide
ataagcggtctgcgtaacgaatcggagaga

SEQ ID NO: 23074 - DNA, 30 bp, Artificial Sequence
  Synthetic oligonucleotide
aacgaactgtatctagcagcaggatagaga

SEQ ID NO: 23075 - DNA, 30 bp, Artificial Sequence
  Synthetic oligonucleotide
cgggtgattgccctacaagaaacagcgaga

SEQ ID NO: 23076 - DNA, 30 bp, Artificial Sequence
  Synthetic oligonucleotide
gttgcaatagcagagttgccaccaaggaga

SEQ ID NO: 23077 - DNA, 30 bp, Artificial Sequence
  Synthetic oligonucleotide
ggacatttgagaagcgggtgagataggaga

SEQ ID NO: 23078 - DNA, 30 bp, Artificial Sequence
  Synthetic oligonucleotide
cgagtctagaggcttgggccagcccggaga

SEQ ID NO: 23079 - DNA, 30 bp, Artificial Sequence
  Synthetic oligonucleotide
gcaatgcgcaacgttgacaacaaagggaga

SEQ ID NO: 23080 - DNA, 30 bp, Artificial Sequence
  Synthetic oligonucleotide
aaggcggttatccggaggcgaagaatgaga

SEQ ID NO: 23081 - DNA, 30 bp, Artificial Sequence
  Synthetic oligonucleotide
acacgtacgtatttagaatagacaaataga

SEQ ID NO: 23082 - DNA, 30 bp, Artificial Sequence
  Synthetic oligonucleotide
acgacgcggtgctggtgccagtataataga

SEQ ID NO: 23083 - DNA, 30 bp, Artificial Sequence
  Synthetic oligonucleotide
aggcgctccaaaaaaaaggtgctgcataga

SEQ ID NO: 23084 - DNA, 30 bp, Artificial Sequence
  Synthetic oligonucleotide
cgaggggcacttgcgcaaaagtatcctaga

SEQ ID NO: 23085 - DNA, 30 bp, Artificial Sequence
  Synthetic oligonucleotide
tagtagataaagagtaaagaatgtcctaga

SEQ ID NO: 23086 - DNA, 30 bp, Artificial Sequence
  Synthetic oligonucleotide
tggggcccggaatggaaaacattagctaga

SEQ ID NO: 23087 - DNA, 30 bp, Artificial Sequence
  Synthetic oligonucleotide
ggagggaggcccgacggtcgagtgagtaga

SEQ ID NO: 23088 - DNA, 30 bp, Artificial Sequence
  Synthetic oligonucleotide
aagatgaacccctacatgacggccgaacga

SEQ ID NO: 23089 - DNA, 30 bp, Artificial Sequence
  Synthetic oligonucleotide
acaacacaattaagacgtcgtaaataacga

SEQ ID NO: 23090 - DNA, 30 bp, Artificial Sequence
  Synthetic oligonucleotide
aagtaaggggacacattgacacttggacga

SEQ ID NO: 23091 - DNA, 30 bp, Artificial Sequence
  Synthetic oligonucleotide
agcacataacagcgtgataacgggagccga

SEQ ID NO: 23092 - DNA, 30 bp, Artificial Sequence
  Synthetic oligonucleotide
ggggagcgtatggacaagttcgccggccga

SEQ ID NO: 23093 - DNA, 29 bp, Artificial Sequence
  Synthetic oligonucleotide
tagaaggtgataagaaacctaaaatccga

SEQ ID NO: 23094 - DNA, 30 bp, Artificial Sequence
  Synthetic oligonucleotide
taaataaatagatccgaaaataagatccga

SEQ ID NO: 23095 - DNA, 30 bp, Artificial Sequence
  Synthetic oligonucleotide
aagccacttaaagggcggaaagacgtccga

SEQ ID NO: 23096 - DNA, 30 bp, Artificial Sequence
  Synthetic oligonucleotide
gtcaaggaacataaaggaattgaccagcga

SEQ ID NO: 23097 - DNA, 30 bp, Artificial Sequence
  Synthetic oligonucleotide
gacctaagcaggttataaaagtagcagcga

SEQ ID NO: 23098 - DNA, 30 bp, Artificial Sequence
  Synthetic oligonucleotide
agcttagtcaactgacagggactcgagcga

SEQ ID NO: 23099 - DNA, 30 bp, Artificial Sequence
  Synthetic oligonucleotide
gaagtacatacagatcgattaaagcggcga

SEQ ID NO: 23100 - DNA, 30 bp, Artificial Sequence
  Synthetic oligonucleotide
acgaccgaggattgtcatcagaaatggcga

SEQ ID NO: 23101 - DNA, 30 bp, Artificial Sequence
  Synthetic oligonucleotide
ggcgaacctgttggactaagaaccgtgcga

SEQ ID NO: 23102 - DNA, 30 bp, Artificial Sequence
  Synthetic oligonucleotide
acccggggagccgtagagtgtgtcgtgcga

SEQ ID NO: 23103 - DNA, 30 bp, Artificial Sequence
  Synthetic oligonucleotide
ggatgaaggtgggagttagatgccttgcga

SEQ ID NO: 23104 - DNA, 31 bp, Artificial Sequence
  Synthetic oligonucleotide
ggacacgggtaaaggaatagtcgaaagtcga

SEQ ID NO: 23105 - DNA, 30 bp, Artificial Sequence
  Synthetic oligonucleotide
caggtagggatacgggacagtcacagtcga

SEQ ID NO: 23106 - DNA, 30 bp, Artificial Sequence
  Synthetic oligonucleotide
cgaagaactcacgaaaaggtacaccgtcga

SEQ ID NO: 23107 - DNA, 30 bp, Artificial Sequence
  Synthetic oligonucleotide
tcgtctgataactagacatcactgcttcga

SEQ ID NO: 23108 - DNA, 30 bp, Artificial Sequence
  Synthetic oligonucleotide
tgaccagggaatcgcgtggatacacaagga

SEQ ID NO: 23109 - DNA, 30 bp, Artificial Sequence
  Synthetic oligonucleotide
ctaggtatatcaaaggagatagtgtaagga

SEQ ID NO: 23110 - DNA, 30 bp, Artificial Sequence
  Synthetic oligonucleotide
cgggaggaaagcggttggcctggttaagga

SEQ ID NO: 23111 - DNA, 30 bp, Artificial Sequence
  Synthetic oligonucleotide
gggggataatcacctcgacccgatccagga

SEQ ID NO: 23112 - DNA, 30 bp, Artificial Sequence
  Synthetic oligonucleotide
agctggcgaatttagtagtgaagagcagga

SEQ ID NO: 23113 - DNA, 30 bp, Artificial Sequence
  Synthetic oligonucleotide
cgcaaatagacgcttagagtcgactcagga

SEQ ID NO: 23114 - DNA, 30 bp, Artificial Sequence
  Synthetic oligonucleotide
aggagggccggttcagtacattattcagga

SEQ ID NO: 23115 - DNA, 30 bp, Artificial Sequence
  Synthetic oligonucleotide
agcaaagactagcaagcagctctactagga

SEQ ID NO: 23116 - DNA, 31 bp, Artificial Sequence
  Synthetic oligonucleotide
tagactggtaggtataaaagtaaggctagga

SEQ ID NO: 23117 - DNA, 30 bp, Artificial Sequence
  Synthetic oligonucleotide
tggaaagtgagtattgaccagagtaacgga

SEQ ID NO: 23118 - DNA, 30 bp, Artificial Sequence
  Synthetic oligonucleotide
gatgagcgtatacggaagatttcggacgga

SEQ ID NO: 23119 - DNA, 30 bp, Artificial Sequence
  Synthetic oligonucleotide
tccgtggaagagacaaaaattgaatccgga

SEQ ID NO: 23120 - DNA, 30 bp, Artificial Sequence
  Synthetic oligonucleotide
accaaagcccaggattagggatctagcgga

SEQ ID NO: 23121 - DNA, 30 bp, Artificial Sequence
  Synthetic oligonucleotide
agtcaaaagtgaaggggtatttacggcgga

SEQ ID NO: 23122 - DNA, 30 bp, Artificial Sequence
  Synthetic oligonucleotide
gactagggaatgcgcaaagagtgattcgga

SEQ ID NO: 23123 - DNA, 30 bp, Artificial Sequence
  Synthetic oligonucleotide
gtgcgaagtggataaagagaaggcaaggga

SEQ ID NO: 23124 - DNA, 30 bp, Artificial Sequence
  Synthetic oligonucleotide
actggtgagttgaaggacatataagaggga

SEQ ID NO: 23125 - DNA, 30 bp, Artificial Sequence
  Synthetic oligonucleotide
agtgggggtggacatgctagattggaggga

SEQ ID NO: 23126 - DNA, 30 bp, Artificial Sequence
  Synthetic oligonucleotide
tgaacaggacctaatgtactacgtgaggga

SEQ ID NO: 23127 - DNA, 30 bp, Artificial Sequence
  Synthetic oligonucleotide
aggccgcaagcgagagacatgctttaggga

SEQ ID NO: 23128 - DNA, 30 bp, Artificial Sequence
  Synthetic oligonucleotide
gtacatagcccacagaggaagtggacggga

SEQ ID NO: 23129 - DNA, 30 bp, Artificial Sequence
  Synthetic oligonucleotide
acgtggtatcgagaaaggtctgaacgggga

SEQ ID NO: 23130 - DNA, 30 bp, Artificial Sequence
  Synthetic oligonucleotide
ctagacataacgtgcgcgcaaggaggggga

SEQ ID NO: 23131 - DNA, 30 bp, Artificial Sequence
  Synthetic oligonucleotide
caacacaccttatgagaagagaagctggga

SEQ ID NO: 23132 - DNA, 30 bp, Artificial Sequence
  Synthetic oligonucleotide
taaggcggaaaggcgacattctatttggga

SEQ ID NO: 23133 - DNA, 30 bp, Artificial Sequence
  Synthetic oligonucleotide
tcggtaccgggtactaggattgattatgga

SEQ ID NO: 23134 - DNA, 30 bp, Artificial Sequence
  Synthetic oligonucleotide
acgagtagagctggtacacaccgtcttgga

SEQ ID NO: 23135 - DNA, 30 bp, Artificial Sequence
  Synthetic oligonucleotide
gatggtggtgggtagcacgataaagttgga

SEQ ID NO: 23136 - DNA, 30 bp, Artificial Sequence
  Synthetic oligonucleotide
atgccggggacaccagagcacgcgtttgga

SEQ ID NO: 23137 - DNA, 30 bp, Artificial Sequence
  Synthetic oligonucleotide
acggctgttacgtaggaagggtgcaaatga

SEQ ID NO: 23138 - DNA, 30 bp, Artificial Sequence
  Synthetic oligonucleotide
acagacagaaacataaatacgcaggaatga

SEQ ID NO: 23139 - DNA, 30 bp, Artificial Sequence
  Synthetic oligonucleotide
aggataaacgcgcatagcgtggctgaatga

SEQ ID NO: 23140 - DNA, 30 bp, Artificial Sequence
  Synthetic oligonucleotide
gagctccagagaaactcgaaacagagatga

SEQ ID NO: 23141 - DNA, 30 bp, Artificial Sequence
  Synthetic oligonucleotide
ccgaacacgggacagcaggagccgcgatga

SEQ ID NO: 23142 - DNA, 30 bp, Artificial Sequence
  Synthetic oligonucleotide
agatcagaaggataccaaagggaatactga

SEQ ID NO: 23143 - DNA, 30 bp, Artificial Sequence
  Synthetic oligonucleotide
agagagtaaggacagacagaatgtagctga

SEQ ID NO: 23144 - DNA, 30 bp, Artificial Sequence
  Synthetic oligonucleotide
gggcggacaaatagactggttgctaagtga

SEQ ID NO: 23145 - DNA, 30 bp, Artificial Sequence
  Synthetic oligonucleotide
ttgttaacagttattgtatatcccgagtga

SEQ ID NO: 23146 - DNA, 30 bp, Artificial Sequence
  Synthetic oligonucleotide
aaggccgtgtacagaacgatggggtagtga

SEQ ID NO: 23147 - DNA, 30 bp, Artificial Sequence
  Synthetic oligonucleotide
cggacgtaattaccaaaaaaattcacgtga

SEQ ID NO: 23148 - DNA, 30 bp, Artificial Sequence
  Synthetic oligonucleotide
cacgtagtggacgatacttggagtgcgtga

SEQ ID NO: 23149 - DNA, 30 bp, Artificial Sequence
  Synthetic oligonucleotide
acatggtgaggagtctacgcacagtcgtga

SEQ ID NO: 23150 - DNA, 30 bp, Artificial Sequence
  Synthetic oligonucleotide
ccgtgccagagacagggcgggtaagggtga

SEQ ID NO: 23151 - DNA, 30 bp, Artificial Sequence
  Synthetic oligonucleotide
cgccgttacaaccaagtagcgaaaatgtga

SEQ ID NO: 23152 - DNA, 30 bp, Artificial Sequence
  Synthetic oligonucleotide
taatagtatgcgacgattaatccagattga

SEQ ID NO: 23153 - DNA, 30 bp, Artificial Sequence
  Synthetic oligonucleotide
gtgagggacacatgacaactctagagttga

SEQ ID NO: 23154 - DNA, 30 bp, Artificial Sequence
  Synthetic oligonucleotide
agaacgaaaagctggaatcgaacgtgttga

SEQ ID NO: 23155 - DNA, 30 bp, Artificial Sequence
  Synthetic oligonucleotide
actagaggttaaggggaaagatacagaata

SEQ ID NO: 23156 - DNA, 30 bp, Artificial Sequence
  Synthetic oligonucleotide
agcaacagtcggtgagctgatgcgggaata

SEQ ID NO: 23157 - DNA, 30 bp, Artificial Sequence
  Synthetic oligonucleotide
agtgaagcgagcagcaccagacggcacata

SEQ ID NO: 23158 - DNA, 30 bp, Artificial Sequence
  Synthetic oligonucleotide
accgggagtcaaaggttcaatagcgacata

SEQ ID NO: 23159 - DNA, 30 bp, Artificial Sequence
  Synthetic oligonucleotide
aggggcctaggacgttcggatagcctcata

SEQ ID NO: 23160 - DNA, 30 bp, Artificial Sequence
  Synthetic oligonucleotide
gggacgagaagctgaggtaccacatcgata

SEQ ID NO: 23161 - DNA, 30 bp, Artificial Sequence
  Synthetic oligonucleotide
aacgagagagagctcggcagttcctcgata

SEQ ID NO: 23162 - DNA, 30 bp, Artificial Sequence
  Synthetic oligonucleotide
accagaagggcaagatagacctaactgata

SEQ ID NO: 23163 - DNA, 30 bp, Artificial Sequence
  Synthetic oligonucleotide
gggtactgacaacgaaactggccgttgata

SEQ ID NO: 23164 - DNA, 30 bp, Artificial Sequence
  Synthetic oligonucleotide
gaaggctcaaagtgacggccaagaattata

SEQ ID NO: 23165 - DNA, 30 bp, Artificial Sequence
  Synthetic oligonucleotide
aggtagtacaaaggatgaacacgatgacta

SEQ ID NO: 23166 - DNA, 30 bp, Artificial Sequence
  Synthetic oligonucleotide
ccggctacatagggaccagaacagtgacta

SEQ ID NO: 23167 - DNA, 30 bp, Artificial Sequence
  Synthetic oligonucleotide
gcaaattggacgggagaaatgcgagtacta

SEQ ID NO: 23168 - DNA, 30 bp, Artificial Sequence
  Synthetic oligonucleotide
gaccatgaaattcaaagcagtaagagccta

SEQ ID NO: 23169 - DNA, 30 bp, Artificial Sequence
  Synthetic oligonucleotide
cacatctaacggatcgcgatactatgccta

SEQ ID NO: 23170 - DNA, 30 bp, Artificial Sequence
  Synthetic oligonucleotide
cctgtgcaaggaaaagaaatctcgtgccta

SEQ ID NO: 23171 - DNA, 30 bp, Artificial Sequence
  Synthetic oligonucleotide
cgactacagaggctataagcgagcgtccta

SEQ ID NO: 23172 - DNA, 30 bp, Artificial Sequence
  Synthetic oligonucleotide
caggcgcaaccgggaaagaggggcgtccta

SEQ ID NO: 23173 - DNA, 30 bp, Artificial Sequence
  Synthetic oligonucleotide
caaggcgggcgtggcgtccgtaccctgcta

SEQ ID NO: 23174 - DNA, 30 bp, Artificial Sequence
  Synthetic oligonucleotide
gccaaaagagagaaagagagacattctcta

SEQ ID NO: 23175 - DNA, 30 bp, Artificial Sequence
  Synthetic oligonucleotide
aacgccgagccaacatgaggggattgtcta

SEQ ID NO: 23176 - DNA, 30 bp, Artificial Sequence
  Synthetic oligonucleotide
aacaccagtatgggaggaccctcaaaagta

SEQ ID NO: 23177 - DNA, 30 bp, Artificial Sequence
  Synthetic oligonucleotide
tcggaggtgtatcggtgtaaactagaagta

SEQ ID NO: 23178 - DNA, 30 bp, Artificial Sequence
  Synthetic oligonucleotide
ggaaatggagaataggcaaatgcgacagta

SEQ ID NO: 23179 - DNA, 30 bp, Artificial Sequence
  Synthetic oligonucleotide
aacagacaagcgcacagcaatgcatcagta

SEQ ID NO: 23180 - DNA, 30 bp, Artificial Sequence
  Synthetic oligonucleotide
aagcgctacttacaaagaggatctagagta

SEQ ID NO: 23181 - DNA, 30 bp, Artificial Sequence
  Synthetic oligonucleotide
gctgcagtgcggttcacggggtcaggagta

SEQ ID NO: 23182 - DNA, 31 bp, Artificial Sequence
  Synthetic oligonucleotide
tcggtatgagccaagttatctatggggagta

SEQ ID NO: 23183 - DNA, 30 bp, Artificial Sequence
  Synthetic oligonucleotide
gtcggagggcgctaaaattccaatggagta

SEQ ID NO: 23184 - DNA, 31 bp, Artificial Sequence
  Synthetic oligonucleotide
atgcgactgcagggcacgcgcggacgtagta

SEQ ID NO: 23185 - DNA, 30 bp, Artificial Sequence
  Synthetic oligonucleotide
tatagggggatggtaattagagtcgacgta

SEQ ID NO: 23186 - DNA, 30 bp, Artificial Sequence
  Synthetic oligonucleotide
gggcataagagcagcagcgtgaaccccgta

SEQ ID NO: 23187 - DNA, 30 bp, Artificial Sequence
  Synthetic oligonucleotide
cgtgtgggaacgaaacggggtgaatccgta

SEQ ID NO: 23188 - DNA, 30 bp, Artificial Sequence
  Synthetic oligonucleotide
ggagacgaggctacaatggatacaaaggta

SEQ ID NO: 23189 - DNA, 30 bp, Artificial Sequence
  Synthetic oligonucleotide
cctgctgctaaagaaatcatgaaacaggta

SEQ ID NO: 23190 - DNA, 30 bp, Artificial Sequence
  Synthetic oligonucleotide
cggtgagcgtctaatatcgttgaaccggta

SEQ ID NO: 23191 - DNA, 30 bp, Artificial Sequence
  Synthetic oligonucleotide
acgtagatcgaattatggcaatcaccggta

SEQ ID NO: 23192 - DNA, 30 bp, Artificial Sequence
  Synthetic oligonucleotide
aggcaacggatgagttaaagattcccggta

SEQ ID NO: 23193 - DNA, 30 bp, Artificial Sequence
  Synthetic oligonucleotide
caagatcggcgcatgagacagggcgtggta

SEQ ID NO: 23194 - DNA, 30 bp, Artificial Sequence
  Synthetic oligonucleotide
gcggtaccagatggtaaagccggcgatgta

SEQ ID NO: 23195 - DNA, 30 bp, Artificial Sequence
  Synthetic oligonucleotide
gcaaaggctgaagataatgaacggcgtgta

SEQ ID NO: 23196 - DNA, 30 bp, Artificial Sequence
  Synthetic oligonucleotide
cggagaagagactgttggcagatgggtgta

SEQ ID NO: 23197 - DNA, 29 bp, Artificial Sequence
  Synthetic oligonucleotide
tcgagtaagtagatagcacagaatgtgta

SEQ ID NO: 23198 - DNA, 30 bp, Artificial Sequence
  Synthetic oligonucleotide
cgtgattaaattcaacgagccacacaatta

SEQ ID NO: 23199 - DNA, 30 bp, Artificial Sequence
  Synthetic oligonucleotide
aggtgtgagcaggggaccaggtaacgatta

SEQ ID NO: 23200 - DNA, 30 bp, Artificial Sequence
  Synthetic oligonucleotide
agggagagtgaggagtaaagaacgcgatta

SEQ ID NO: 23201 - DNA, 30 bp, Artificial Sequence
  Synthetic oligonucleotide
ccgcggtgatcgccacaacatagaggatta

SEQ ID NO: 23202 - DNA, 30 bp, Artificial Sequence
  Synthetic oligonucleotide
cgaataggagataggaggacttgcgtatta

SEQ ID NO: 23203 - DNA, 30 bp, Artificial Sequence
  Synthetic oligonucleotide
cgagccgttaaaacgggagcttaggagtta

SEQ ID NO: 23204 - DNA, 30 bp, Artificial Sequence
  Synthetic oligonucleotide
ctcgaaaacacaaagctcgctaaatcgtta

SEQ ID NO: 23205 - DNA, 30 bp, Artificial Sequence
  Synthetic oligonucleotide
cgctccagcagggatgggcatacaggttta

SEQ ID NO: 23206 - DNA, 30 bp, Artificial Sequence
  Synthetic oligonucleotide
gtaagacggcccgtgagagactatgcaaac

SEQ ID NO: 23207 - DNA, 30 bp, Artificial Sequence
  Synthetic oligonucleotide
cgatcgaccaataagggggacagctcaaac

SEQ ID NO: 23208 - DNA, 30 bp, Artificial Sequence
  Synthetic oligonucleotide
acacgattcacactaccgaagttgataaac

SEQ ID NO: 23209 - DNA, 30 bp, Artificial Sequence
  Synthetic oligonucleotide
aaagatgctaatagctactacagagtaaac

SEQ ID NO: 23210 - DNA, 30 bp, Artificial Sequence
  Synthetic oligonucleotide
cgcgttgagagaggaaagcccgtgaccaac

SEQ ID NO: 23211 - DNA, 30 bp, Artificial Sequence
  Synthetic oligonucleotide
cggagtccataggcggaacttaccagcaac

SEQ ID NO: 23212 - DNA, 30 bp, Artificial Sequence
  Synthetic oligonucleotide
ggaacacaagaagaaagattcccggtcaac

SEQ ID NO: 23213 - DNA, 30 bp, Artificial Sequence
  Synthetic oligonucleotide
tagaagggaacggtgatcaaaatacagaac

SEQ ID NO: 23214 - DNA, 30 bp, Artificial Sequence
  Synthetic oligonucleotide
caacaggcgaaatcgatttcaacggagaac

SEQ ID NO: 23215 - DNA, 30 bp, Artificial Sequence
  Synthetic oligonucleotide
gaagggcgaacattgctcgaccattcgaac

SEQ ID NO: 23216 - DNA, 30 bp, Artificial Sequence
  Synthetic oligonucleotide
tgtagaatgaaagaatcaatggcgcggaac

SEQ ID NO: 23217 - DNA, 30 bp, Artificial Sequence
  Synthetic oligonucleotide
cgggatgccaataggagcaacgacctgaac

SEQ ID NO: 23218 - DNA, 30 bp, Artificial Sequence
  Synthetic oligonucleotide
cttgccaaagaagtgtagaggtgacataac

SEQ ID NO: 23219 - DNA, 30 bp, Artificial Sequence
  Synthetic oligonucleotide
gcgaaagccacttcatggaccaagcaacac

SEQ ID NO: 23220 - DNA, 30 bp, Artificial Sequence
  Synthetic oligonucleotide
agcccacaagctcaggacacctccgaacac

SEQ ID NO: 23221 - DNA, 30 bp, Artificial Sequence
  Synthetic oligonucleotide
caacgtccagcgcaatctaagcctgaacac

SEQ ID NO: 23222 - DNA, 30 bp, Artificial Sequence
  Synthetic oligonucleotide
acggcgaaatcatgaggagctcagccacac

SEQ ID NO: 23223 - DNA, 30 bp, Artificial Sequence
  Synthetic oligonucleotide
caaatagagagtcgaagggtggggggacac

SEQ ID NO: 23224 - DNA, 30 bp, Artificial Sequence
  Synthetic oligonucleotide
gaaggaggaggacgaggggtatagatacac

SEQ ID NO: 23225 - DNA, 30 bp, Artificial Sequence
  Synthetic oligonucleotide
aagctaaatggaaaggggaataagctacac

SEQ ID NO: 23226 - DNA, 30 bp, Artificial Sequence
  Synthetic oligonucleotide
gtgtttcaaggaatagggagagatgaccac

SEQ ID NO: 23227 - DNA, 30 bp, Artificial Sequence
  Synthetic oligonucleotide
cagaggcgaagatgctaatggacaagccac

SEQ ID NO: 23228 - DNA, 30 bp, Artificial Sequence
  Synthetic oligonucleotide
gcgacaagatgagaagacagggtagtccac

SEQ ID NO: 23229 - DNA, 30 bp, Artificial Sequence
  Synthetic oligonucleotide
ctaaaatacaacctagaccacgcggagcac

SEQ ID NO: 23230 - DNA, 30 bp, Artificial Sequence
  Synthetic oligonucleotide
acgcaagccataggtcagaggaatgagcac

SEQ ID NO: 23231 - DNA, 30 bp, Artificial Sequence
  Synthetic oligonucleotide
cgggtaccagagacagcgcccgcatagcac

SEQ ID NO: 23232 - DNA, 30 bp, Artificial Sequence
  Synthetic oligonucleotide
tcgagatgcgagtatagcaaaggtccgcac

SEQ ID NO: 23233 - DNA, 30 bp, Artificial Sequence
  Synthetic oligonucleotide
agcgagatatgaggttagagaagggcgcac

SEQ ID NO: 23234 - DNA, 30 bp, Artificial Sequence
  Synthetic oligonucleotide
agagccaatcattagccgctgtccctgcac

SEQ ID NO: 23235 - DNA, 31 bp, Artificial Sequence
  Synthetic oligonucleotide
tggcgtgctaactaagaacaatatcctgcac

SEQ ID NO: 23236 - DNA, 30 bp, Artificial Sequence
  Synthetic oligonucleotide
cgaatgcccaaatcaggtcactagcgtcac

SEQ ID NO: 23237 - DNA, 30 bp, Artificial Sequence
  Synthetic oligonucleotide
ggtggagtggagaaataaagccggtttcac

SEQ ID NO: 23238 - DNA, 30 bp, Artificial Sequence
  Synthetic oligonucleotide
aagtcacgacacagggctaagcgtaaagac

SEQ ID NO: 23239 - DNA, 30 bp, Artificial Sequence
  Synthetic oligonucleotide
gatagtgctggaaaaagagtggcagaagac

SEQ ID NO: 23240 - DNA, 30 bp, Artificial Sequence
  Synthetic oligonucleotide
tggggaaaaggagacaacattttcgaagac

SEQ ID NO: 23241 - DNA, 30 bp, Artificial Sequence
  Synthetic oligonucleotide
cgggattagaaagatttaccataggaagac

SEQ ID NO: 23242 - DNA, 30 bp, Artificial Sequence
  Synthetic oligonucleotide
cgacagagacgcaaggtggtgtgggaagac

SEQ ID NO: 23243 - DNA, 30 bp, Artificial Sequence
  Synthetic oligonucleotide
acggtacaaattgccttctaagatacagac

SEQ ID NO: 23244 - DNA, 31 bp, Artificial Sequence
  Synthetic oligonucleotide
ctgcaacggaacacacatacacgtaccagac

SEQ ID NO: 23245 - DNA, 30 bp, Artificial Sequence
  Synthetic oligonucleotide
ttgaagagggttggccaggtgaagtcagac

SEQ ID NO: 23246 - DNA, 30 bp, Artificial Sequence
  Synthetic oligonucleotide
ctggggcgtacgagatgaaaatacggagac

SEQ ID NO: 23247 - DNA, 30 bp, Artificial Sequence
  Synthetic oligonucleotide
ccagaccgtcaccaaaaacgtagctgagac

SEQ ID NO: 23248 - DNA, 30 bp, Artificial Sequence
  Synthetic oligonucleotide
cgagggatgttgtgatgaaggttgtgagac

SEQ ID NO: 23249 - DNA, 30 bp, Artificial Sequence
  Synthetic oligonucleotide
cggtcagactggtagaattggtaattcgac

SEQ ID NO: 23250 - DNA, 30 bp, Artificial Sequence
  Synthetic oligonucleotide
cacgaggggccgcgatatgacataaaggac

SEQ ID NO: 23251 - DNA, 30 bp, Artificial Sequence
  Synthetic oligonucleotide
ggcgttagtgcgttaagtgagtggaaggac

SEQ ID NO: 23252 - DNA, 30 bp, Artificial Sequence
  Synthetic oligonucleotide
gatggggagtagtcgatatggcacgaggac

SEQ ID NO: 23253 - DNA, 30 bp, Artificial Sequence
  Synthetic oligonucleotide
agagatggcctaggttcatcaacggaggac

SEQ ID NO: 23254 - DNA, 30 bp, Artificial Sequence
  Synthetic oligonucleotide
agcgatgagccgtgggaattaggaggggac

SEQ ID NO: 23255 - DNA, 30 bp, Artificial Sequence
  Synthetic oligonucleotide
gacaagagaaggcgaacagatcgaaatgac

SEQ ID NO: 23256 - DNA, 30 bp, Artificial Sequence
  Synthetic oligonucleotide
tcgctatcgaataccaacctgccggctgac

SEQ ID NO: 23257 - DNA, 30 bp, Artificial Sequence
  Synthetic oligonucleotide
aggagtggcattgaagcatggcacgtatac

SEQ ID NO: 23258 - DNA, 30 bp, Artificial Sequence
  Synthetic oligonucleotide
gtcacaggatcagtcacaacgaaaccctac

SEQ ID NO: 23259 - DNA, 30 bp, Artificial Sequence
  Synthetic oligonucleotide
cggaacggactgataacaagtgcgatctac

SEQ ID NO: 23260 - DNA, 30 bp, Artificial Sequence
  Synthetic oligonucleotide
cgggaactgggtctacctaactccgtctac

SEQ ID NO: 23261 - DNA, 30 bp, Artificial Sequence
  Synthetic oligonucleotide
ctacaacgtagtgggaagccaaaaacgtac

SEQ ID NO: 23262 - DNA, 30 bp, Artificial Sequence
  Synthetic oligonucleotide
tcgaagtggcacgggcataacccaaggtac

SEQ ID NO: 23263 - DNA, 30 bp, Artificial Sequence
  Synthetic oligonucleotide
ctgcagggtggccgaatcaccagccggtac

SEQ ID NO: 23264 - DNA, 30 bp, Artificial Sequence
  Synthetic oligonucleotide
ggctgaaaagaccaatagtagtctgggtac

SEQ ID NO: 23265 - DNA, 30 bp, Artificial Sequence
  Synthetic oligonucleotide
actaggctgagtcgaaggcactatgattac

SEQ ID NO: 23266 - DNA, 30 bp, Artificial Sequence
  Synthetic oligonucleotide
gcgtcaattcacagcgatgagagtcaaacc

SEQ ID NO: 23267 - DNA, 30 bp, Artificial Sequence
  Synthetic oligonucleotide
atgcggcatacatgcgaaaatcccgaaacc

SEQ ID NO: 23268 - DNA, 30 bp, Artificial Sequence
  Synthetic oligonucleotide
gggaagagcggtaaatctgcatcgggaacc

SEQ ID NO: 23269 - DNA, 30 bp, Artificial Sequence
  Synthetic oligonucleotide
aggttaggccaaaatacacatcactgaacc

SEQ ID NO: 23270 - DNA, 30 bp, Artificial Sequence
  Synthetic oligonucleotide
tcgaggaaccggccaacaaccgatataacc

SEQ ID NO: 23271 - DNA, 30 bp, Artificial Sequence
  Synthetic oligonucleotide
ggagatcataaatacgtgggagtgtccacc

SEQ ID NO: 23272 - DNA, 30 bp, Artificial Sequence
  Synthetic oligonucleotide
gcggaaagatcaacgcgaatggccagcacc

SEQ ID NO: 23273 - DNA, 30 bp, Artificial Sequence
  Synthetic oligonucleotide
ataggcacatgcgacgaaaggtccagcacc

SEQ ID NO: 23274 - DNA, 30 bp, Artificial Sequence
  Synthetic oligonucleotide
cgatggaacgcgcgacatactacgagcacc

SEQ ID NO: 23275 - DNA, 30 bp, Artificial Sequence
  Synthetic oligonucleotide
cgggacaacaacgctacagctccgatcacc

SEQ ID NO: 23276 - DNA, 30 bp, Artificial Sequence
  Synthetic oligonucleotide
aaagcggacaacgacatatcatgcaagacc

SEQ ID NO: 23277 - DNA, 30 bp, Artificial Sequence
  Synthetic oligonucleotide
tatcagagagaacgcgggtacgggacgacc

SEQ ID NO: 23278 - DNA, 30 bp, Artificial Sequence
  Synthetic oligonucleotide
gcgcgatgtaataaagatggatttgggacc

SEQ ID NO: 23279 - DNA, 30 bp, Artificial Sequence
  Synthetic oligonucleotide
gaagcacggaagaacgcaaaaagctaaccc

SEQ ID NO: 23280 - DNA, 30 bp, Artificial Sequence
  Synthetic oligonucleotide
gcggagctaaacatgagtataggaagaccc

SEQ ID NO: 23281 - DNA, 30 bp, Artificial Sequence
  Synthetic oligonucleotide
tcgtagctaatcaaaccaaggatcaacccc

SEQ ID NO: 23282 - DNA, 30 bp, Artificial Sequence
  Synthetic oligonucleotide
cacgactagcaaggtgggcgtggtattccc

SEQ ID NO: 23283 - DNA, 30 bp, Artificial Sequence
  Synthetic oligonucleotide
cgaaacagccataggacgaattcgtcagcc

SEQ ID NO: 23284 - DNA, 30 bp, Artificial Sequence
  Synthetic oligonucleotide
aacgtgtaacacgggaaagggattagagcc

SEQ ID NO: 23285 - DNA, 30 bp, Artificial Sequence
  Synthetic oligonucleotide
agcgagccaatcagataatggcaacgagcc

SEQ ID NO: 23286 - DNA, 30 bp, Artificial Sequence
  Synthetic oligonucleotide
agcgtcgagagacgatacacgtggaccgcc

SEQ ID NO: 23287 - DNA, 30 bp, Artificial Sequence
  Synthetic oligonucleotide
tcgaatttgcaattaggaggatcgctcgcc

SEQ ID NO: 23288 - DNA, 30 bp, Artificial Sequence
  Synthetic oligonucleotide
ggagtgtccaagagtaagtgaatacgggcc

SEQ ID NO: 23289 - DNA, 30 bp, Artificial Sequence
  Synthetic oligonucleotide
tcctgttgcgaaggtactcccctgtgggcc

SEQ ID NO: 23290 - DNA, 30 bp, Artificial Sequence
  Synthetic oligonucleotide
agatcccaccaatacaagatcacaactgcc

SEQ ID NO: 23291 - DNA, 30 bp, Artificial Sequence
  Synthetic oligonucleotide
ggagagcccaattatgcatcgtgagctgcc

SEQ ID NO: 23292 - DNA, 30 bp, Artificial Sequence
  Synthetic oligonucleotide
tccgagaagggagttgcgttgtgagctgcc

SEQ ID NO: 23293 - DNA, 30 bp, Artificial Sequence
  Synthetic oligonucleotide
ccgcgatatccagtcaagaagacatcatcc

SEQ ID NO: 23294 - DNA, 30 bp, Artificial Sequence
  Synthetic oligonucleotide
gggtaggaggcgaaacactcgtactgatcc

SEQ ID NO: 23295 - DNA, 30 bp, Artificial Sequence
  Synthetic oligonucleotide
tacatgaggaggaacgcggtaaagcactcc

SEQ ID NO: 23296 - DNA, 30 bp, Artificial Sequence
  Synthetic oligonucleotide
cgtatcgaaccagtccgaccaataggctcc

SEQ ID NO: 23297 - DNA, 30 bp, Artificial Sequence
  Synthetic oligonucleotide
agcaagggaagggataatgcgccaatctcc

SEQ ID NO: 23298 - DNA, 30 bp, Artificial Sequence
  Synthetic oligonucleotide
gaagtagcgcgaatgggcacctcagagtcc

SEQ ID NO: 23299 - DNA, 30 bp, Artificial Sequence
  Synthetic oligonucleotide
gtaacaaaagggcaacgaagagtttagtcc

SEQ ID NO: 23300 - DNA, 30 bp, Artificial Sequence
  Synthetic oligonucleotide
atgagaggattggaaagactagtaaattcc

SEQ ID NO: 23301 - DNA, 30 bp, Artificial Sequence
  Synthetic oligonucleotide
ggcctcctgcaaaattgagccgaggaaagc

SEQ ID NO: 23302 - DNA, 30 bp, Artificial Sequence
  Synthetic oligonucleotide
taagtgacgaacacaaactagacctaaagc

SEQ ID NO: 23303 - DNA, 30 bp, Artificial Sequence
  Synthetic oligonucleotide
acacgggaatgagaggccgcttacgtaagc

SEQ ID NO: 23304 - DNA, 30 bp, Artificial Sequence
  Synthetic oligonucleotide
taaaagcatcaaccgccgggagtgcacagc

SEQ ID NO: 23305 - DNA, 30 bp, Artificial Sequence
  Synthetic oligonucleotide
tgaggccgggaaattgaaactgcgcccagc

SEQ ID NO: 23306 - DNA, 30 bp, Artificial Sequence
  Synthetic oligonucleotide
gggcatgtcaagaaatgagtcagaagcagc

SEQ ID NO: 23307 - DNA, 30 bp, Artificial Sequence
  Synthetic oligonucleotide
gctctcgcaaactgaaattgagtgctcagc

SEQ ID NO: 23308 - DNA, 30 bp, Artificial Sequence
  Synthetic oligonucleotide
caaggagtgttcgcccatcgaaatgtcagc

SEQ ID NO: 23309 - DNA, 30 bp, Artificial Sequence
  Synthetic oligonucleotide
aggtatgccaacgcacatgggcgaaagagc

SEQ ID NO: 23310 - DNA, 30 bp, Artificial Sequence
  Synthetic oligonucleotide
gacggaattctgagtaaaacaagggagagc

SEQ ID NO: 23311 - DNA, 30 bp, Artificial Sequence
  Synthetic oligonucleotide
aaggggtcaagccactctatggagtagagc

SEQ ID NO: 23312 - DNA, 30 bp, Artificial Sequence
  Synthetic oligonucleotide
ggcactacacgcggaacatggagtacgagc

SEQ ID NO: 23313 - DNA, 30 bp, Artificial Sequence
  Synthetic oligonucleotide
aaagagcagattaaccaggaaggcgcgagc

SEQ ID NO: 23314 - DNA, 30 bp, Artificial Sequence
  Synthetic oligonucleotide
gggcatagcaacgaagtataagctgcgagc

SEQ ID NO: 23315 - DNA, 30 bp, Artificial Sequence
  Synthetic oligonucleotide
gatggtcgagggggatgaacactttggagc

SEQ ID NO: 23316 - DNA, 30 bp, Artificial Sequence
  Synthetic oligonucleotide
gcaacgcgggcggcatgaattagactgagc

SEQ ID NO: 23317 - DNA, 30 bp, Artificial Sequence
  Synthetic oligonucleotide
ccagcacccacaaaacagcaacgtaatagc

SEQ ID NO: 23318 - DNA, 30 bp, Artificial Sequence
  Synthetic oligonucleotide
gtgttcgataaatagtcacggccgagtagc

SEQ ID NO: 23319 - DNA, 30 bp, Artificial Sequence
  Synthetic oligonucleotide
gtagcgctaggaaatagggaaggtattagc

SEQ ID NO: 23320 - DNA, 30 bp, Artificial Sequence
  Synthetic oligonucleotide
acggagccgaaacatccactctacccacgc

SEQ ID NO: 23321 - DNA, 31 bp, Artificial Sequence
  Synthetic oligonucleotide
agtaacaatagttcagaatcaggggacccgc

SEQ ID NO: 23322 - DNA, 30 bp, Artificial Sequence
  Synthetic oligonucleotide
ctggtgcgcccgaattcaaggaacaatcgc

SEQ ID NO: 23323 - DNA, 30 bp, Artificial Sequence
  Synthetic oligonucleotide
cgagtacaccaaatatggggggattgtcgc

SEQ ID NO: 23324 - DNA, 30 bp, Artificial Sequence
  Synthetic oligonucleotide
acgacccatggtgacaaagagatgcaaggc

SEQ ID NO: 23325 - DNA, 30 bp, Artificial Sequence
  Synthetic oligonucleotide
ccatgtcaagatcacttcaggcaaacaggc

SEQ ID NO: 23326 - DNA, 30 bp, Artificial Sequence
  Synthetic oligonucleotide
gcgcacgggaactagcaacggtgaataggc

SEQ ID NO: 23327 - DNA, 30 bp, Artificial Sequence
  Synthetic oligonucleotide
tgcaaaggaaataaacgaaaaatgctaggc

SEQ ID NO: 23328 - DNA, 30 bp, Artificial Sequence
  Synthetic oligonucleotide
taagattcgaagaagtgggccgcaaccggc

SEQ ID NO: 23329 - DNA, 30 bp, Artificial Sequence
  Synthetic oligonucleotide
cgagagttaaccgcaacgatttgatccggc

SEQ ID NO: 23330 - DNA, 30 bp, Artificial Sequence
  Synthetic oligonucleotide
ggaagagcggtcaaaataggtaggtgcggc

SEQ ID NO: 23331 - DNA, 30 bp, Artificial Sequence
  Synthetic oligonucleotide
gcagaggagtgaccacggtaggaaatcggc

SEQ ID NO: 23332 - DNA, 30 bp, Artificial Sequence
  Synthetic oligonucleotide
gagctgaaggattcgaagagaatagagggc

SEQ ID NO: 23333 - DNA, 30 bp, Artificial Sequence
  Synthetic oligonucleotide
cgatggggccgaggacctgtaaaatgtggc

SEQ ID NO: 23334 - DNA, 30 bp, Artificial Sequence
  Synthetic oligonucleotide
acaacaaatatcgtggaaacaagcattggc

SEQ ID NO: 23335 - DNA, 30 bp, Artificial Sequence
  Synthetic oligonucleotide
acggatacacgggggcaagtgatcgactgc

SEQ ID NO: 23336 - DNA, 30 bp, Artificial Sequence
  Synthetic oligonucleotide
acaaaggtgcacaagggataaaggtcctgc

SEQ ID NO: 23337 - DNA, 30 bp, Artificial Sequence
  Synthetic oligonucleotide
acggggtcacatagagctgcaggaagctgc

SEQ ID NO: 23338 - DNA, 30 bp, Artificial Sequence
  Synthetic oligonucleotide
aagggcgaagttgtgaccatccgcaagtgc

SEQ ID NO: 23339 - DNA, 30 bp, Artificial Sequence
  Synthetic oligonucleotide
tcatccacgagattagtatgagtgtcgtgc

SEQ ID NO: 23340 - DNA, 30 bp, Artificial Sequence
  Synthetic oligonucleotide
cacgacagtgagccaaatcacctaacttgc

SEQ ID NO: 23341 - DNA, 30 bp, Artificial Sequence
  Synthetic oligonucleotide
aagaatcaccgatcgaggaacacgtcaatc

SEQ ID NO: 23342 - DNA, 30 bp, Artificial Sequence
  Synthetic oligonucleotide
cataaaaatatacaagtaatcgtacgaatc

SEQ ID NO: 23343 - DNA, 30 bp, Artificial Sequence
  Synthetic oligonucleotide
tcgaacgtcatcaaccacagaaggctaatc

SEQ ID NO: 23344 - DNA, 30 bp, Artificial Sequence
  Synthetic oligonucleotide
caaggccaactagccccgggatgattaatc

SEQ ID NO: 23345 - DNA, 30 bp, Artificial Sequence
  Synthetic oligonucleotide
gacgatactgggcaatagaacgcacacatc

SEQ ID NO: 23346 - DNA, 30 bp, Artificial Sequence
  Synthetic oligonucleotide
aagcgggaatggcttaaattgctaggcatc

SEQ ID NO: 23347 - DNA, 30 bp, Artificial Sequence
  Synthetic oligonucleotide
cgtacatgggaggataacattgaccaactc

SEQ ID NO: 23348 - DNA, 30 bp, Artificial Sequence
  Synthetic oligonucleotide
tagcggagaaaattgcgccacataccactc

SEQ ID NO: 23349 - DNA, 30 bp, Artificial Sequence
  Synthetic oligonucleotide
aaacacaaactaaaggtagaatctcgactc

SEQ ID NO: 23350 - DNA, 30 bp, Artificial Sequence
  Synthetic oligonucleotide
cctggagaatcttcccacgaaagaggactc

SEQ ID NO: 23351 - DNA, 30 bp, Artificial Sequence
  Synthetic oligonucleotide
agaccaatagcgtcagaaagctgatccctc

SEQ ID NO: 23352 - DNA, 30 bp, Artificial Sequence
  Synthetic oligonucleotide
ctaagtcgcgaatcacataaaagcggcctc

SEQ ID NO: 23353 - DNA, 30 bp, Artificial Sequence
  Synthetic oligonucleotide
tggctagcggaatacgagtgctatcagctc

SEQ ID NO: 23354 - DNA, 30 bp, Artificial Sequence
  Synthetic oligonucleotide
aggtactcacaaaaaccaggagcgactctc

SEQ ID NO: 23355 - DNA, 31 bp, Artificial Sequence
  Synthetic oligonucleotide
aagatatagataacaatctagccccagagtc

SEQ ID NO: 23356 - DNA, 30 bp, Artificial Sequence
  Synthetic oligonucleotide
cgccatataagacgaaaggtgggggacgtc

SEQ ID NO: 23357 - DNA, 30 bp, Artificial Sequence
  Synthetic oligonucleotide
cagtggtggtaaactgtgacgggatacgtc

SEQ ID NO: 23358 - DNA, 30 bp, Artificial Sequence
  Synthetic oligonucleotide
ggaaggggtaggttccaactacacaccgtc

SEQ ID NO: 23359 - DNA, 30 bp, Artificial Sequence
  Synthetic oligonucleotide
tcttcctcgagtaaaaggggcttggccgtc

SEQ ID NO: 23360 - DNA, 30 bp, Artificial Sequence
  Synthetic oligonucleotide
cgaggagcgagagcttctatgcagcgcgtc

SEQ ID NO: 23361 - DNA, 30 bp, Artificial Sequence
  Synthetic oligonucleotide
aaggagtccctggcacagggagaagtcgtc

SEQ ID NO: 23362 - DNA, 30 bp, Artificial Sequence
  Synthetic oligonucleotide
cgggcaagcgaggatcacaggttacaggtc

SEQ ID NO: 23363 - DNA, 30 bp, Artificial Sequence
  Synthetic oligonucleotide
acgccacgaaggcaatacaggctaagggtc

SEQ ID NO: 23364 - DNA, 30 bp, Artificial Sequence
  Synthetic oligonucleotide
agggagaagtgcaccgcaaaaaaaggggtc

SEQ ID NO: 23365 - DNA, 30 bp, Artificial Sequence
  Synthetic oligonucleotide
ggtacgaggtgagaataacaatatcctgtc

SEQ ID NO: 23366 - DNA, 30 bp, Artificial Sequence
  Synthetic oligonucleotide
gacagagggacgattcgtaaggcgatcttc

SEQ ID NO: 23367 - DNA, 30 bp, Artificial Sequence
  Synthetic oligonucleotide
tcatgaaggtaaatgatccaaaccgagttc

SEQ ID NO: 23368 - DNA, 30 bp, Artificial Sequence
  Synthetic oligonucleotide
aaccagaaatgagagacaacacccaaaaag

SEQ ID NO: 23369 - DNA, 30 bp, Artificial Sequence
  Synthetic oligonucleotide
gattgccataaacgtgcgacatctcaaaag

SEQ ID NO: 23370 - DNA, 30 bp, Artificial Sequence
  Synthetic oligonucleotide
cgacgtcaaagattgaacccgctagaaaag

SEQ ID NO: 23371 - DNA, 31 bp, Artificial Sequence
  Synthetic oligonucleotide
tagaaggtaccagaggccggcaccgacaaag

SEQ ID NO: 23372 - DNA, 30 bp, Artificial Sequence
  Synthetic oligonucleotide
tggccgcgagacaggcaaactattacaaag

SEQ ID NO: 23373 - DNA, 31 bp, Artificial Sequence
  Synthetic oligonucleotide
tccggcgtatctgtacaaactacttacaaag

SEQ ID NO: 23374 - DNA, 30 bp, Artificial Sequence
  Synthetic oligonucleotide
gcgatagggagagacttgaggctatcaaag

SEQ ID NO: 23375 - DNA, 30 bp, Artificial Sequence
  Synthetic oligonucleotide
acggagggtgaggaagtatggagaggaaag

SEQ ID NO: 23376 - DNA, 30 bp, Artificial Sequence
  Synthetic oligonucleotide
tgctgtcggaacgagaaagctttatgaaag

SEQ ID NO: 23377 - DNA, 30 bp, Artificial Sequence
  Synthetic oligonucleotide
ttcagtgcaaaatacaataaatcgtgaaag

SEQ ID NO: 23378 - DNA, 30 bp, Artificial Sequence
  Synthetic oligonucleotide
gaacgatcacgtctggagagatagctaaag

SEQ ID NO: 23379 - DNA, 30 bp, Artificial Sequence
  Synthetic oligonucleotide
tgtggacaaggttttaggagggccaacaag

SEQ ID NO: 23380 - DNA, 30 bp, Artificial Sequence
  Synthetic oligonucleotide
tggcgaaagtgatgtagcgggagccacaag

SEQ ID NO: 23381 - DNA, 30 bp, Artificial Sequence
  Synthetic oligonucleotide
tggtcagcctgagggaaagtgggcgacaag

SEQ ID NO: 23382 - DNA, 30 bp, Artificial Sequence
  Synthetic oligonucleotide
tggaaccaggtcacatgagcttgggacaag

SEQ ID NO: 23383 - DNA, 30 bp, Artificial Sequence
  Synthetic oligonucleotide
ggaaacgaaccttagggcaccgggaccaag

SEQ ID NO: 23384 - DNA, 30 bp, Artificial Sequence
  Synthetic oligonucleotide
gcgagggtgagtcgaaaaagacctcccaag

SEQ ID NO: 23385 - DNA, 30 bp, Artificial Sequence
  Synthetic oligonucleotide
cccgtgaaaaaacaggttcagcgcgccaag

SEQ ID NO: 23386 - DNA, 30 bp, Artificial Sequence
  Synthetic oligonucleotide
ccaggccggagataaaccattctgagcaag

SEQ ID NO: 23387 - DNA, 30 bp, Artificial Sequence
  Synthetic oligonucleotide
cagatgcttagaagtgggcaatgctgcaag

SEQ ID NO: 23388 - DNA, 30 bp, Artificial Sequence
  Synthetic oligonucleotide
aaaagtccaagacaaatgagaccgtgcaag

SEQ ID NO: 23389 - DNA, 30 bp, Artificial Sequence
  Synthetic oligonucleotide
agcgacatgtaaagtggctaacggtgcaag

SEQ ID NO: 23390 - DNA, 30 bp, Artificial Sequence
  Synthetic oligonucleotide
aggaactacctggatataacgttactcaag

SEQ ID NO: 23391 - DNA, 30 bp, Artificial Sequence
  Synthetic oligonucleotide
tgatgacctgcgtgagagagtgcggtcaag

SEQ ID NO: 23392 - DNA, 30 bp, Artificial Sequence
  Synthetic oligonucleotide
aggataatgttggttcctgggcgaaagaag

SEQ ID NO: 23393 - DNA, 30 bp, Artificial Sequence
  Synthetic oligonucleotide
gcgagcttgagtataaacactatcaagaag

SEQ ID NO: 23394 - DNA, 30 bp, Artificial Sequence
  Synthetic oligonucleotide
atgataattagataggaggtctagaagaag

SEQ ID NO: 23395 - DNA, 30 bp, Artificial Sequence
  Synthetic oligonucleotide
agagtgctccaaatagtaaaacgatcgaag

SEQ ID NO: 23396 - DNA, 31 bp, Artificial Sequence
  Synthetic oligonucleotide
ctcagagtccaggatgcaacggccgcggaag

SEQ ID NO: 23397 - DNA, 30 bp, Artificial Sequence
  Synthetic oligonucleotide
cgcggtaaatacgtaagcgatggattgaag

SEQ ID NO: 23398 - DNA, 30 bp, Artificial Sequence
  Synthetic oligonucleotide
tgcatccggatgcgtaagccaaccaataag

SEQ ID NO: 23399 - DNA, 30 bp, Artificial Sequence
  Synthetic oligonucleotide
acgatggaatggggctcaaacttccataag

SEQ ID NO: 23400 - DNA, 30 bp, Artificial Sequence
  Synthetic oligonucleotide
ggtgacagtactataagtatgcccgataag

SEQ ID NO: 23401 - DNA, 30 bp, Artificial Sequence
  Synthetic oligonucleotide
taaaagccaaacaatagtgggcaatctaag

SEQ ID NO: 23402 - DNA, 30 bp, Artificial Sequence
  Synthetic oligonucleotide
gggtcgagtaaacaagcagctagctctaag

SEQ ID NO: 23403 - DNA, 30 bp, Artificial Sequence
  Synthetic oligonucleotide
tctaagagggggctttacagagaaggtaag

SEQ ID NO: 23404 - DNA, 30 bp, Artificial Sequence
  Synthetic oligonucleotide
ttgaatggccgaacccagaacaaacttaag

SEQ ID NO: 23405 - DNA, 30 bp, Artificial Sequence
  Synthetic oligonucleotide
ggtaactgacactagaccacgtagcaacag

SEQ ID NO: 23406 - DNA, 30 bp, Artificial Sequence
  Synthetic oligonucleotide
ggcgtcagccaacgtcatatagttacacag

SEQ ID NO: 23407 - DNA, 30 bp, Artificial Sequence
  Synthetic oligonucleotide
cgtaggcattatggcacccatagaccacag

SEQ ID NO: 23408 - DNA, 30 bp, Artificial Sequence
  Synthetic oligonucleotide
aggcatggcctcattgtactaacacgacag

SEQ ID NO: 23409 - DNA, 30 bp, Artificial Sequence
  Synthetic oligonucleotide
cagaggtccgatactagccgaatacgacag

SEQ ID NO: 23410 - DNA, 30 bp, Artificial Sequence
  Synthetic oligonucleotide
cagacaacacacgcaaaccatatttgacag

SEQ ID NO: 23411 - DNA, 30 bp, Artificial Sequence
  Synthetic oligonucleotide
aggtagagatcgtgaccatatttaaaccag

SEQ ID NO: 23412 - DNA, 30 bp, Artificial Sequence
  Synthetic oligonucleotide
ccctgaatatagattgagctaagcgaccag

SEQ ID NO: 23413 - DNA, 30 bp, Artificial Sequence
  Synthetic oligonucleotide
tagaggagaaatttgatcccgagttcccag

SEQ ID NO: 23414 - DNA, 30 bp, Artificial Sequence
  Synthetic oligonucleotide
gaaagaagcaaggacatcattgcaagccag

SEQ ID NO: 23415 - DNA, 30 bp, Artificial Sequence
  Synthetic oligonucleotide
acgttaggaggaagtttggatagcctccag

SEQ ID NO: 23416 - DNA, 30 bp, Artificial Sequence
  Synthetic oligonucleotide
agcaaacaagagttcacgggcggattccag

SEQ ID NO: 23417 - DNA, 30 bp, Artificial Sequence
  Synthetic oligonucleotide
acattgaccgtaccctaaaccgcctagcag

SEQ ID NO: 23418 - DNA, 30 bp, Artificial Sequence
  Synthetic oligonucleotide
gcttcgaaagacgtaaagaggacttagcag

SEQ ID NO: 23419 - DNA, 30 bp, Artificial Sequence
  Synthetic oligonucleotide
cgtgcaagccggcctagtcactgtgcgcag

SEQ ID NO: 23420 - DNA, 30 bp, Artificial Sequence
  Synthetic oligonucleotide
cccaagcctgcaagacagcgagataggcag

SEQ ID NO: 23421 - DNA, 30 bp, Artificial Sequence
  Synthetic oligonucleotide
cggcacaggaatcttccgttatggtggcag

SEQ ID NO: 23422 - DNA, 30 bp, Artificial Sequence
  Synthetic oligonucleotide
tggtcaggtgataacaaatccaggatgcag

SEQ ID NO: 23423 - DNA, 30 bp, Artificial Sequence
  Synthetic oligonucleotide
tcaggaagggctaattacttcttggatcag

SEQ ID NO: 23424 - DNA, 30 bp, Artificial Sequence
  Synthetic oligonucleotide
gaggaaggtcagtacatctcgtgttatcag

SEQ ID NO: 23425 - DNA, 30 bp, Artificial Sequence
  Synthetic oligonucleotide
acactaacctaaagtagcgaagtagctcag

SEQ ID NO: 23426 - DNA, 30 bp, Artificial Sequence
  Synthetic oligonucleotide
cctacgaaacagatacctcataaggctcag

SEQ ID NO: 23427 - DNA, 30 bp, Artificial Sequence
  Synthetic oligonucleotide
aaggaacgagtatgcagggtttggtctcag

SEQ ID NO: 23428 - DNA, 30 bp, Artificial Sequence
  Synthetic oligonucleotide
acgaatcaaaagtcaactagtgttagtcag

SEQ ID NO: 23429 - DNA, 30 bp, Artificial Sequence
  Synthetic oligonucleotide
tagcacagtaaaaaatcgtgttagcaagag

SEQ ID NO: 23430 - DNA, 30 bp, Artificial Sequence
  Synthetic oligonucleotide
ggttcaagaggaggggactgcctgcaagag

SEQ ID NO: 23431 - DNA, 30 bp, Artificial Sequence
  Synthetic oligonucleotide
agaccacaactcgaccctttcacagaagag

SEQ ID NO: 23432 - DNA, 30 bp, Artificial Sequence
  Synthetic oligonucleotide
gcgagttaagatcgtctagccttggaagag

SEQ ID NO: 23433 - DNA, 30 bp, Artificial Sequence
  Synthetic oligonucleotide
tctcggcagaaggctgagtactgataagag

SEQ ID NO: 23434 - DNA, 30 bp, Artificial Sequence
  Synthetic oligonucleotide
actaagataataagaagtgtcccaagagag

SEQ ID NO: 23435 - DNA, 30 bp, Artificial Sequence
  Synthetic oligonucleotide
agcgtactcagacaggttaagtaaatagag

SEQ ID NO: 23436 - DNA, 30 bp, Artificial Sequence
  Synthetic oligonucleotide
aacgtactaaactccacgtcgacaatagag

SEQ ID NO: 23437 - DNA, 30 bp, Artificial Sequence
  Synthetic oligonucleotide
cggggatctcaacactgagatcggatagag

SEQ ID NO: 23438 - DNA, 30 bp, Artificial Sequence
  Synthetic oligonucleotide
gggtgctaagcggaagactgtgttatagag

SEQ ID NO: 23439 - DNA, 30 bp, Artificial Sequence
  Synthetic oligonucleotide
ggtgaaacactatgatactttggactagag

SEQ ID NO: 23440 - DNA, 30 bp, Artificial Sequence
  Synthetic oligonucleotide
actcaaacttacagaccagattggttagag

SEQ ID NO: 23441 - DNA, 30 bp, Artificial Sequence
  Synthetic oligonucleotide
gggcacgagaactgcattatgcatttagag

SEQ ID NO: 23442 - DNA, 30 bp, Artificial Sequence
  Synthetic oligonucleotide
gcctcacatagaggctcacaggcgaacgag

SEQ ID NO: 23443 - DNA, 30 bp, Artificial Sequence
  Synthetic oligonucleotide
ataggggactccgaggatgaggaaaccgag

SEQ ID NO: 23444 - DNA, 30 bp, Artificial Sequence
  Synthetic oligonucleotide
agagtgttgtatgaaaccgatggtcccgag

SEQ ID NO: 23445 - DNA, 30 bp, Artificial Sequence
  Synthetic oligonucleotide
gatacaataagggtaatgctcggggccgag

SEQ ID NO: 23446 - DNA, 30 bp, Artificial Sequence
  Synthetic oligonucleotide
taaagtggagtacgaatccatgtatccgag

SEQ ID NO: 23447 - DNA, 30 bp, Artificial Sequence
  Synthetic oligonucleotide
gattaaaaggggtacaggtgaaagagcgag

SEQ ID NO: 23448 - DNA, 30 bp, Artificial Sequence
  Synthetic oligonucleotide
actcaccaacataaaccgtgcaagcgcgag

SEQ ID NO: 23449 - DNA, 30 bp, Artificial Sequence
  Synthetic oligonucleotide
acatgataggtgagacgaccatgtcgcgag

SEQ ID NO: 23450 - DNA, 31 bp, Artificial Sequence
  Synthetic oligonucleotide
cgtccaggccgcgtcacatggacagggcgag

SEQ ID NO: 23451 - DNA, 30 bp, Artificial Sequence
  Synthetic oligonucleotide
gcacaatgccccgccggatcacacttcgag

SEQ ID NO: 23452 - DNA, 30 bp, Artificial Sequence
  Synthetic oligonucleotide
gctaagtgtgtaaacaggccgaagaaggag

SEQ ID NO: 23453 - DNA, 30 bp, Artificial Sequence
  Synthetic oligonucleotide
gggagtgaactgactaggaatgtgcaggag

SEQ ID NO: 23454 - DNA, 30 bp, Artificial Sequence
  Synthetic oligonucleotide
cgtctgttacagacgtcaagcatagaggag

SEQ ID NO: 23455 - DNA, 30 bp, Artificial Sequence
  Synthetic oligonucleotide
agcacaaactagggcagttaggcgtcggag

SEQ ID NO: 23456 - DNA, 30 bp, Artificial Sequence
  Synthetic oligonucleotide
gatccagacttggagggataatagagggag

SEQ ID NO: 23457 - DNA, 30 bp, Artificial Sequence
  Synthetic oligonucleotide
ccttatagtgtcgaacgaagtctccgggag

SEQ ID NO: 23458 - DNA, 30 bp, Artificial Sequence
  Synthetic oligonucleotide
tcgcgagttcggcaagagtattctggggag

SEQ ID NO: 23459 - DNA, 30 bp, Artificial Sequence
  Synthetic oligonucleotide
ttacagtacagaaacgtcgtcatctgggag

SEQ ID NO: 23460 - DNA, 30 bp, Artificial Sequence
  Synthetic oligonucleotide
aggactaattgacataagatacattgggag

SEQ ID NO: 23461 - DNA, 30 bp, Artificial Sequence
  Synthetic oligonucleotide
aacgctagaaggtacatggctgggaatgag

SEQ ID NO: 23462 - DNA, 30 bp, Artificial Sequence
  Synthetic oligonucleotide
agtgaatatcggagtaccggtccgcatgag

SEQ ID NO: 23463 - DNA, 30 bp, Artificial Sequence
  Synthetic oligonucleotide
cggaatgcgtgcccaaggggagtacctgag

SEQ ID NO: 23464 - DNA, 30 bp, Artificial Sequence
  Synthetic oligonucleotide
gtctgagcaaacaccaaccgtcctcctgag

SEQ ID NO: 23465 - DNA, 30 bp, Artificial Sequence
  Synthetic oligonucleotide
gcaatcaagaaaagacactccatcagtgag

SEQ ID NO: 23466 - DNA, 30 bp, Artificial Sequence
  Synthetic oligonucleotide
atgatgaaaaagccttagacgaagagtgag

SEQ ID NO: 23467 - DNA, 30 bp, Artificial Sequence
  Synthetic oligonucleotide
aacatccggaatcacaacctaaatagtgag

SEQ ID NO: 23468 - DNA, 30 bp, Artificial Sequence
  Synthetic oligonucleotide
aaacaggtcgatgattacattagacgtgag

SEQ ID NO: 23469 - DNA, 30 bp, Artificial Sequence
  Synthetic oligonucleotide
tgggaactgtcgcgcaacggatttcgtgag

SEQ ID NO: 23470 - DNA, 30 bp, Artificial Sequence
  Synthetic oligonucleotide
acgcctgcttcgaagatcgtggagtgtgag

SEQ ID NO: 23471 - DNA, 30 bp, Artificial Sequence
  Synthetic oligonucleotide
cgtcccacaggttacaataggtagtgtgag

SEQ ID NO: 23472 - DNA, 30 bp, Artificial Sequence
  Synthetic oligonucleotide
tggggaaatgtgagcggccgaggagttgag

SEQ ID NO: 23473 - DNA, 30 bp, Artificial Sequence
  Synthetic oligonucleotide
tggaaagtcaggcttcaagggcgggttgag

SEQ ID NO: 23474 - DNA, 30 bp, Artificial Sequence
  Synthetic oligonucleotide
tagcaagggcgaccagccttagctaaatag

SEQ ID NO: 23475 - DNA, 30 bp, Artificial Sequence
  Synthetic oligonucleotide
cgagaaggtttaggagatcggatctaatag

SEQ ID NO: 23476 - DNA, 30 bp, Artificial Sequence
  Synthetic oligonucleotide
tcggcaactcaggatgggcaaagtccatag

SEQ ID NO: 23477 - DNA, 30 bp, Artificial Sequence
  Synthetic oligonucleotide
cgtacgggcggagaataagaccaagcatag

SEQ ID NO: 23478 - DNA, 30 bp, Artificial Sequence
  Synthetic oligonucleotide
caaatcgcagtcgggagttggggagcatag

SEQ ID NO: 23479 - DNA, 30 bp, Artificial Sequence
  Synthetic oligonucleotide
cagggcaaacctcggcgtgcacgatcatag

SEQ ID NO: 23480 - DNA, 30 bp, Artificial Sequence
  Synthetic oligonucleotide
tagcacaggacacaaaatctgagctcatag

SEQ ID NO: 23481 - DNA, 30 bp, Artificial Sequence
  Synthetic oligonucleotide
cgtggcggctacagcgggttggtctcatag

SEQ ID NO: 23482 - DNA, 30 bp, Artificial Sequence
  Synthetic oligonucleotide
acgtgaggttgacgggtaacagtaagatag

SEQ ID NO: 23483 - DNA, 30 bp, Artificial Sequence
  Synthetic oligonucleotide
tcaggataatccttccgtcgagagcgatag

SEQ ID NO: 23484 - DNA, 30 bp, Artificial Sequence
  Synthetic oligonucleotide
cggcctcgagacctgggggaacatggatag

SEQ ID NO: 23485 - DNA, 30 bp, Artificial Sequence
  Synthetic oligonucleotide
agagaaaattaagttagtcgagggatatag

SEQ ID NO: 23486 - DNA, 30 bp, Artificial Sequence
  Synthetic oligonucleotide
gcggagaggtgtagagcctgttgggcctag

SEQ ID NO: 23487 - DNA, 30 bp, Artificial Sequence
  Synthetic oligonucleotide
tcatatcccgtaaatgactaaacgtcctag

SEQ ID NO: 23488 - DNA, 30 bp, Artificial Sequence
  Synthetic oligonucleotide
actgaaaccctgtcaaaaaatcgaatctag

SEQ ID NO: 23489 - DNA, 30 bp, Artificial Sequence
  Synthetic oligonucleotide
acggcgctagcaataacatttaacatctag

SEQ ID NO: 23490 - DNA, 30 bp, Artificial Sequence
  Synthetic oligonucleotide
gtcaagggcatgttggacagataacagtag

SEQ ID NO: 23491 - DNA, 30 bp, Artificial Sequence
  Synthetic oligonucleotide
attaagctcgagtgggaaacggttcagtag

SEQ ID NO: 23492 - DNA, 30 bp, Artificial Sequence
  Synthetic oligonucleotide
ccaagaacacgtcacaaggaataagagtag

SEQ ID NO: 23493 - DNA, 30 bp, Artificial Sequence
  Synthetic oligonucleotide
tgggaccggactgacgttgatgaaccgtag

SEQ ID NO: 23494 - DNA, 30 bp, Artificial Sequence
  Synthetic oligonucleotide
agacattgccaagggggcactggagcgtag

SEQ ID NO: 23495 - DNA, 30 bp, Artificial Sequence
  Synthetic oligonucleotide
cggcgtgtggaacgtagataagagtcgtag

SEQ ID NO: 23496 - DNA, 30 bp, Artificial Sequence
  Synthetic oligonucleotide
cgcatggatagatccttgataggaaggtag

SEQ ID NO: 23497 - DNA, 30 bp, Artificial Sequence
  Synthetic oligonucleotide
tcgcggattagggatggaagttattggtag

SEQ ID NO: 23498 - DNA, 30 bp, Artificial Sequence
  Synthetic oligonucleotide
gccataggtatgtttgaaagaaagatgtag

SEQ ID NO: 23499 - DNA, 30 bp, Artificial Sequence
  Synthetic oligonucleotide
gctgcaagtactacataagggaagaattag

SEQ ID NO: 23500 - DNA, 30 bp, Artificial Sequence
  Synthetic oligonucleotide
tcagggagggaattacccggagaagattag

SEQ ID NO: 23501 - DNA, 30 bp, Artificial Sequence
  Synthetic oligonucleotide
cgagaaaaaactgagctagagatttattag

SEQ ID NO: 23502 - DNA, 30 bp, Artificial Sequence
  Synthetic oligonucleotide
caaatcgcgtcaacatgcatgagggcttag

SEQ ID NO: 23503 - DNA, 30 bp, Artificial Sequence
  Synthetic oligonucleotide
ggtcaaggacaacctgatcatgtgagttag

SEQ ID NO: 23504 - DNA, 30 bp, Artificial Sequence
  Synthetic oligonucleotide
gcggtacgaacgtcgtatggccaggtttag

SEQ ID NO: 23505 - DNA, 30 bp, Artificial Sequence
  Synthetic oligonucleotide
aaggatgataagtgacaactcggagaaacg

SEQ ID NO: 23506 - DNA, 30 bp, Artificial Sequence
  Synthetic oligonucleotide
gagcccaaaagagcagactcaccggaaacg

SEQ ID NO: 23507 - DNA, 30 bp, Artificial Sequence
  Synthetic oligonucleotide
cacgatgtgcgtatcggcgattgggaaacg

SEQ ID NO: 23508 - DNA, 30 bp, Artificial Sequence
  Synthetic oligonucleotide
ggagcatctaggtcataaaatcgttaaacg

SEQ ID NO: 23509 - DNA, 30 bp, Artificial Sequence
  Synthetic oligonucleotide
cgaaagtgaatcagttctgagagtccaacg

SEQ ID NO: 23510 - DNA, 30 bp, Artificial Sequence
  Synthetic oligonucleotide
gcctgcataacgtccagagcataggcaacg

SEQ ID NO: 23511 - DNA, 30 bp, Artificial Sequence
  Synthetic oligonucleotide
agtggatagcaacaccaggatggctcaacg

SEQ ID NO: 23512 - DNA, 30 bp, Artificial Sequence
  Synthetic oligonucleotide
agaggagtgaatcgaaggctcggaagaacg

SEQ ID NO: 23513 - DNA, 30 bp, Artificial Sequence
  Synthetic oligonucleotide
tagggaaaaggaattgcgagggatgtaacg

SEQ ID NO: 23514 - DNA, 30 bp, Artificial Sequence
  Synthetic oligonucleotide
taggtcatgatcgaagtgaccatattaacg

SEQ ID NO: 23515 - DNA, 30 bp, Artificial Sequence
  Synthetic oligonucleotide
caaaactcggccataatctgaaccaacacg

SEQ ID NO: 23516 - DNA, 30 bp, Artificial Sequence
  Synthetic oligonucleotide
agggacagtcaaaaactaaggtgctacacg

SEQ ID NO: 23517 - DNA, 30 bp, Artificial Sequence
  Synthetic oligonucleotide
cgggagtacaacgggatccggacttacacg

SEQ ID NO: 23518 - DNA, 30 bp, Artificial Sequence
  Synthetic oligonucleotide
gcgagccacacctgctgaaccgaaagcacg

SEQ ID NO: 23519 - DNA, 30 bp, Artificial Sequence
  Synthetic oligonucleotide
cgaaaagcaagcggagaaaagggccgcacg

SEQ ID NO: 23520 - DNA, 30 bp, Artificial Sequence
  Synthetic oligonucleotide
ttaaggaacacaatcattgcggcactcacg

SEQ ID NO: 23521 - DNA, 30 bp, Artificial Sequence
  Synthetic oligonucleotide
ccaggatactaagcggtacatatactcacg

SEQ ID NO: 23522 - DNA, 30 bp, Artificial Sequence
  Synthetic oligonucleotide
cgtagtgggccgcgagcaagcggggcgacg

SEQ ID NO: 23523 - DNA, 30 bp, Artificial Sequence
  Synthetic oligonucleotide
aagaggaaactccctgagaccatatggacg

SEQ ID NO: 23524 - DNA, 30 bp, Artificial Sequence
  Synthetic oligonucleotide
aggggagtcggcaaacgaagaaatatgacg

SEQ ID NO: 23525 - DNA, 30 bp, Artificial Sequence
  Synthetic oligonucleotide
aaggcgatacacacgctgatgtgaagtacg

SEQ ID NO: 23526 - DNA, 30 bp, Artificial Sequence
  Synthetic oligonucleotide
gcccagggaacagatatggagaccagtacg

SEQ ID NO: 23527 - DNA, 30 bp, Artificial Sequence
  Synthetic oligonucleotide
gcatggacagaggtggtacgggaagttacg

SEQ ID NO: 23528 - DNA, 30 bp, Artificial Sequence
  Synthetic oligonucleotide
cgaagaggccaagcacaagctgtgaaaccg

SEQ ID NO: 23529 - DNA, 30 bp, Artificial Sequence
  Synthetic oligonucleotide
aatgagggcgggtatcacacatggcaaccg

SEQ ID NO: 23530 - DNA, 30 bp, Artificial Sequence
  Synthetic oligonucleotide
cctcggaggaaatgctgtgctcgcacaccg

SEQ ID NO: 23531 - DNA, 30 bp, Artificial Sequence
  Synthetic oligonucleotide
cgacacacttattgagagaggtgtgcaccg

SEQ ID NO: 23532 - DNA, 30 bp, Artificial Sequence
  Synthetic oligonucleotide
gcagaaagaatgggaaagagatctcgaccg

SEQ ID NO: 23533 - DNA, 30 bp, Artificial Sequence
  Synthetic oligonucleotide
acggacggtcgacggggaactgcaataccg

SEQ ID NO: 23534 - DNA, 30 bp, Artificial Sequence
  Synthetic oligonucleotide
ggctgtcgactcaatagttgggagttaccg

SEQ ID NO: 23535 - DNA, 30 bp, Artificial Sequence
  Synthetic oligonucleotide
taacagcgcatggacatataaatagacccg

SEQ ID NO: 23536 - DNA, 30 bp, Artificial Sequence
  Synthetic oligonucleotide
cagttccacgcgaaactacaaaaggacccg

SEQ ID NO: 23537 - DNA, 30 bp, Artificial Sequence
  Synthetic oligonucleotide
caatcagtgaaagcagtctgaaggaagccg

SEQ ID NO: 23538 - DNA, 30 bp, Artificial Sequence
  Synthetic oligonucleotide
ccgggcaaaggaatatccatgtcatagccg

SEQ ID NO: 23539 - DNA, 30 bp, Artificial Sequence
  Synthetic oligonucleotide
tgatgaccgaggatgctaaagggttagccg

SEQ ID NO: 23540 - DNA, 30 bp, Artificial Sequence
  Synthetic oligonucleotide
acctccatgagctaagaccaaccagtgccg

SEQ ID NO: 23541 - DNA, 30 bp, Artificial Sequence
  Synthetic oligonucleotide
agccaagagttgccgtgtagacagcttccg

SEQ ID NO: 23542 - DNA, 30 bp, Artificial Sequence
  Synthetic oligonucleotide
cattgcatgatcagtcggcgatccgaagcg

SEQ ID NO: 23543 - DNA, 30 bp, Artificial Sequence
  Synthetic oligonucleotide
tatgggccaatattcagaggactcgaagcg

SEQ ID NO: 23544 - DNA, 30 bp, Artificial Sequence
  Synthetic oligonucleotide
tgggaaccaattttcgaacaagatacagcg

SEQ ID NO: 23545 - DNA, 30 bp, Artificial Sequence
  Synthetic oligonucleotide
agcgtatacagttggagggatacacgagcg

SEQ ID NO: 23546 - DNA, 31 bp, Artificial Sequence
  Synthetic oligonucleotide
ttacggggaaaaggctaagagcaggctagcg

SEQ ID NO: 23547 - DNA, 30 bp, Artificial Sequence
  Synthetic oligonucleotide
acgatccctgcgaaccgatccgggctagcg

SEQ ID NO: 23548 - DNA, 30 bp, Artificial Sequence
  Synthetic oligonucleotide
ccgggtacagataaatatcaaaatgtagcg

SEQ ID NO: 23549 - DNA, 30 bp, Artificial Sequence
  Synthetic oligonucleotide
ccaggaacacttttatcacgagcgaccgcg

SEQ ID NO: 23550 - DNA, 30 bp, Artificial Sequence
  Synthetic oligonucleotide
acacgggtgtaagaattgatatcaagcgcg

SEQ ID NO: 23551 - DNA, 30 bp, Artificial Sequence
  Synthetic oligonucleotide
agcgagtaaatctagtacgaaagaagcgcg

SEQ ID NO: 23552 - DNA, 30 bp, Artificial Sequence
  Synthetic oligonucleotide
aaagataatgaacagggccagcgtcgcgcg

SEQ ID NO: 23553 - DNA, 30 bp, Artificial Sequence
  Synthetic oligonucleotide
taggtggcaatgaatgtaaacttatgcgcg

SEQ ID NO: 23554 - DNA, 30 bp, Artificial Sequence
  Synthetic oligonucleotide
agcctcagagtgattgaggagaggtgcgcg

SEQ ID NO: 23555 - DNA, 30 bp, Artificial Sequence
  Synthetic oligonucleotide
cacagacttaagtcccgaacccatatcgcg

SEQ ID NO: 23556 - DNA, 30 bp, Artificial Sequence
  Synthetic oligonucleotide
tagctcataacctaaccagattaactcgcg

SEQ ID NO: 23557 - DNA, 30 bp, Artificial Sequence
  Synthetic oligonucleotide
gtgcataacagaggtagagttcagcaggcg

SEQ ID NO: 23558 - DNA, 30 bp, Artificial Sequence
  Synthetic oligonucleotide
gtacaaaagaggtcctacaatcgagaggcg

SEQ ID NO: 23559 - DNA, 30 bp, Artificial Sequence
  Synthetic oligonucleotide
tggtgtgtagaagtacaagaactctaggcg

SEQ ID NO: 23560 - DNA, 30 bp, Artificial Sequence
  Synthetic oligonucleotide
gcggacgaattacaggtatgcgaaggggcg

SEQ ID NO: 23561 - DNA, 30 bp, Artificial Sequence
  Synthetic oligonucleotide
agggatggacacaagcgtactttatgggcg

SEQ ID NO: 23562 - DNA, 30 bp, Artificial Sequence
  Synthetic oligonucleotide
ggggagggtagttgtttcagagacctggcg

SEQ ID NO: 23563 - DNA, 30 bp, Artificial Sequence
  Synthetic oligonucleotide
agatacacccagcttatcagcctaaatgcg

SEQ ID NO: 23564 - DNA, 30 bp, Artificial Sequence
  Synthetic oligonucleotide
catcggggaagaggaaactacaagtgtgcg

SEQ ID NO: 23565 - DNA, 30 bp, Artificial Sequence
  Synthetic oligonucleotide
aagaggtaagactcaattacggattgtgcg

SEQ ID NO: 23566 - DNA, 30 bp, Artificial Sequence
  Synthetic oligonucleotide
gtagcgaagaaatacacctcgatgcaatcg

SEQ ID NO: 23567 - DNA, 30 bp, Artificial Sequence
  Synthetic oligonucleotide
caaggtgcctgaggtatcagatagtaatcg

SEQ ID NO: 23568 - DNA, 30 bp, Artificial Sequence
  Synthetic oligonucleotide
atgagcttaactgagccggagggccgatcg

SEQ ID NO: 23569 - DNA, 30 bp, Artificial Sequence
  Synthetic oligonucleotide
acatttgtcaacgtcataacatctgcctcg

SEQ ID NO: 23570 - DNA, 30 bp, Artificial Sequence
  Synthetic oligonucleotide
cgtccagtcccatttctaagctcatcctcg

SEQ ID NO: 23571 - DNA, 30 bp, Artificial Sequence
  Synthetic oligonucleotide
ggccccagaaagagcaggagccgaatctcg

SEQ ID NO: 23572 - DNA, 30 bp, Artificial Sequence
  Synthetic oligonucleotide
gcgtggtgaacaccataaaacgtgctctcg

SEQ ID NO: 23573 - DNA, 30 bp, Artificial Sequence
  Synthetic oligonucleotide
tgcgagaccacctccatacggggaaagtcg

SEQ ID NO: 23574 - DNA, 30 bp, Artificial Sequence
  Synthetic oligonucleotide
ggcatgaataggaaaagtttgcagtagtcg

SEQ ID NO: 23575 - DNA, 30 bp, Artificial Sequence
  Synthetic oligonucleotide
cagatcaaaagccccgaaccatctgcgtcg

SEQ ID NO: 23576 - DNA, 30 bp, Artificial Sequence
  Synthetic oligonucleotide
aacgccgcgctggcaacattgggagggtcg

SEQ ID NO: 23577 - DNA, 30 bp, Artificial Sequence
  Synthetic oligonucleotide
agatagcacacatggttgagggatgtgtcg

SEQ ID NO: 23578 - DNA, 30 bp, Artificial Sequence
  Synthetic oligonucleotide
aatggacaaggaaagtgcagtctaaaaagg

SEQ ID NO: 23579 - DNA, 30 bp, Artificial Sequence
  Synthetic oligonucleotide
cgcgatgatccaaacggcaagtgacaaagg

SEQ ID NO: 23580 - DNA, 30 bp, Artificial Sequence
  Synthetic oligonucleotide
gcagagaggtgaagacaaccgtgggaaagg

SEQ ID NO: 23581 - DNA, 31 bp, Artificial Sequence
  Synthetic oligonucleotide
gaaagggcgtacatccacagcaatcacaagg

SEQ ID NO: 23582 - DNA, 30 bp, Artificial Sequence
  Synthetic oligonucleotide
aggtggtcggattgctcaacacggtcaagg

SEQ ID NO: 23583 - DNA, 30 bp, Artificial Sequence
  Synthetic oligonucleotide
cgagtatgtgccgtgcgacaaacgcgaagg

SEQ ID NO: 23584 - DNA, 30 bp, Artificial Sequence
  Synthetic oligonucleotide
tctagcccataacatataacggaaggaagg

SEQ ID NO: 23585 - DNA, 30 bp, Artificial Sequence
  Synthetic oligonucleotide
attacacatgaaccactgaaaaaggtaagg

SEQ ID NO: 23586 - DNA, 31 bp, Artificial Sequence
  Synthetic oligonucleotide
ccgatggctagatccgagaagaccattaagg

SEQ ID NO: 23587 - DNA, 30 bp, Artificial Sequence
  Synthetic oligonucleotide
aggcaattcagtgcaggatgggtgtacagg

SEQ ID NO: 23588 - DNA, 30 bp, Artificial Sequence
  Synthetic oligonucleotide
gggcgaattggggtgtcaaagaatatcagg

SEQ ID NO: 23589 - DNA, 30 bp, Artificial Sequence
  Synthetic oligonucleotide
ggaagggcaccaaaggcagcaataaagagg

SEQ ID NO: 23590 - DNA, 31 bp, Artificial Sequence
  Synthetic oligonucleotide
caagcggacttcggaaaaagggcacaagagg

SEQ ID NO: 23591 - DNA, 30 bp, Artificial Sequence
  Synthetic oligonucleotide
agaactgctaaggccgctaccgctaagagg

SEQ ID NO: 23592 - DNA, 30 bp, Artificial Sequence
  Synthetic oligonucleotide
tcacgagatgcataaaaatgggaggagagg

SEQ ID NO: 23593 - DNA, 30 bp, Artificial Sequence
  Synthetic oligonucleotide
agatcgagaaagtcacgatatctggagagg

SEQ ID NO: 23594 - DNA, 30 bp, Artificial Sequence
  Synthetic oligonucleotide
atcgtgacctaaacgacaaaattggagagg

SEQ ID NO: 23595 - DNA, 30 bp, Artificial Sequence
  Synthetic oligonucleotide
tgtgccgaaactaaagagtgaatcgtgagg

SEQ ID NO: 23596 - DNA, 30 bp, Artificial Sequence
  Synthetic oligonucleotide
agtcaaagtgtaagcagagcatgattgagg

SEQ ID NO: 23597 - DNA, 30 bp, Artificial Sequence
  Synthetic oligonucleotide
ccaggatatcgccgaacaaggctatatagg

SEQ ID NO: 23598 - DNA, 30 bp, Artificial Sequence
  Synthetic oligonucleotide
ggacggcggtatagagagtcgcacggtagg

SEQ ID NO: 23599 - DNA, 30 bp, Artificial Sequence
  Synthetic oligonucleotide
agacaggtagcgcaaattcataccggtagg

SEQ ID NO: 23600 - DNA, 30 bp, Artificial Sequence
  Synthetic oligonucleotide
ccatacaggcaacgtggaacagacgaccgg

SEQ ID NO: 23601 - DNA, 30 bp, Artificial Sequence
  Synthetic oligonucleotide
aggcgaagggcacataaagagatcccccgg

SEQ ID NO: 23602 - DNA, 30 bp, Artificial Sequence
  Synthetic oligonucleotide
gccagataacggaatatgaaggcgagccgg

SEQ ID NO: 23603 - DNA, 30 bp, Artificial Sequence
  Synthetic oligonucleotide
tcatggaacaatagagaccctggtcagcgg

SEQ ID NO: 23604 - DNA, 30 bp, Artificial Sequence
  Synthetic oligonucleotide
cgaagttaaggcgaagaggccaccgagcgg

SEQ ID NO: 23605 - DNA, 30 bp, Artificial Sequence
  Synthetic oligonucleotide
cacaagcctgaacatgggcagggatcgcgg

SEQ ID NO: 23606 - DNA, 30 bp, Artificial Sequence
  Synthetic oligonucleotide
gcttaaagagtggcattaagttcgaggcgg

SEQ ID NO: 23607 - DNA, 30 bp, Artificial Sequence
  Synthetic oligonucleotide
aaacgcgggctgacagaaatagtgcggcgg

SEQ ID NO: 23608 - DNA, 30 bp, Artificial Sequence
  Synthetic oligonucleotide
cgctctgaaagataggtggagacagggcgg

SEQ ID NO: 23609 - DNA, 30 bp, Artificial Sequence
  Synthetic oligonucleotide
acacagcttaaatcaatgaggagaatgcgg

SEQ ID NO: 23610 - DNA, 30 bp, Artificial Sequence
  Synthetic oligonucleotide
tcagggcgacgaggtgtaattgaattgcgg

SEQ ID NO: 23611 - DNA, 30 bp, Artificial Sequence
  Synthetic oligonucleotide
ctaggcgcggatacgaatagtaaaaatcgg

SEQ ID NO: 23612 - DNA, 30 bp, Artificial Sequence
  Synthetic oligonucleotide
agggaggtggttaaaccacatgaaaatcgg

SEQ ID NO: 23613 - DNA, 30 bp, Artificial Sequence
  Synthetic oligonucleotide
taacgaaggattagcagagggtctactcgg

SEQ ID NO: 23614 - DNA, 30 bp, Artificial Sequence
  Synthetic oligonucleotide
tctggggaaaccaaacggcgaagaagtcgg

SEQ ID NO: 23615 - DNA, 30 bp, Artificial Sequence
  Synthetic oligonucleotide
aaaggctgccggtgcgctgctgcaaaaggg

SEQ ID NO: 23616 - DNA, 30 bp, Artificial Sequence
  Synthetic oligonucleotide
ggggcagagagtcgtattgtcctgaaaggg

SEQ ID NO: 23617 - DNA, 30 bp, Artificial Sequence
  Synthetic oligonucleotide
tgataaatacgaattgtagtcgagcaaggg

SEQ ID NO: 23618 - DNA, 30 bp, Artificial Sequence
  Synthetic oligonucleotide
ggctaagtccagttctcaagaaggcaaggg

SEQ ID NO: 23619 - DNA, 30 bp, Artificial Sequence
  Synthetic oligonucleotide
tgcaactcaaaattcagcgcgagataaggg

SEQ ID NO: 23620 - DNA, 30 bp, Artificial Sequence
  Synthetic oligonucleotide
gatgaacgccccaggaaatgcgcgtaaggg

SEQ ID NO: 23621 - DNA, 30 bp, Artificial Sequence
  Synthetic oligonucleotide
agggtcgagtcaagcgggagctaaacaggg

SEQ ID NO: 23622 - DNA, 30 bp, Artificial Sequence
  Synthetic oligonucleotide
cggtatgaaatatggaattactctacaggg

SEQ ID NO: 23623 - DNA, 30 bp, Artificial Sequence
  Synthetic oligonucleotide
cgctacgatcgggtccagattttctcaggg

SEQ ID NO: 23624 - DNA, 30 bp, Artificial Sequence
  Synthetic oligonucleotide
gaccaaacaagtcagaacagcggaagaggg

SEQ ID NO: 23625 - DNA, 30 bp, Artificial Sequence
  Synthetic oligonucleotide
taactcgaggtatattagcagagtagaggg

SEQ ID NO: 23626 - DNA, 30 bp, Artificial Sequence
  Synthetic oligonucleotide
aaaggcggcgaaatcaagactgggcgaggg

SEQ ID NO: 23627 - DNA, 30 bp, Artificial Sequence
  Synthetic oligonucleotide
aacggtcccgtggacgtcgaggaaggaggg

SEQ ID NO: 23628 - DNA, 30 bp, Artificial Sequence
  Synthetic oligonucleotide
ccaggtcagtctcaagaggtctagtgaggg

SEQ ID NO: 23629 - DNA, 30 bp, Artificial Sequence
  Synthetic oligonucleotide
aacgtgccgggaggcaaaacgatcgacggg

SEQ ID NO: 23630 - DNA, 30 bp, Artificial Sequence
  Synthetic oligonucleotide
cgaagcgttaagatttcatgaactaccggg

SEQ ID NO: 23631 - DNA, 30 bp, Artificial Sequence
  Synthetic oligonucleotide
gcgactaggacattgatcatacgagccggg

SEQ ID NO: 23632 - DNA, 30 bp, Artificial Sequence
  Synthetic oligonucleotide
ctaagaaatatgacccaatcaaagcgcggg

SEQ ID NO: 23633 - DNA, 30 bp, Artificial Sequence
  Synthetic oligonucleotide
aacacagggggcgcgccaatacacctcggg

SEQ ID NO: 23634 - DNA, 30 bp, Artificial Sequence
  Synthetic oligonucleotide
taatcgagcgccgtccaaatctccgagggg

SEQ ID NO: 23635 - DNA, 30 bp, Artificial Sequence
  Synthetic oligonucleotide
ctcgcatgtgcagaaggcaaggcggagggg

SEQ ID NO: 23636 - DNA, 30 bp, Artificial Sequence
  Synthetic oligonucleotide
cgacaaccctcaagatcgtcaacgtagggg

SEQ ID NO: 23637 - DNA, 30 bp, Artificial Sequence
  Synthetic oligonucleotide
cagataggaaatccgataacaggtccgggg

SEQ ID NO: 23638 - DNA, 30 bp, Artificial Sequence
  Synthetic oligonucleotide
acaacacattgtcgtctgttactgtcgggg

SEQ ID NO: 23639 - DNA, 30 bp, Artificial Sequence
  Synthetic oligonucleotide
cgtgcttgtatacaggagtggagtctgggg

SEQ ID NO: 23640 - DNA, 30 bp, Artificial Sequence
  Synthetic oligonucleotide
gcgcaggaaatgatcacaatagaagtgggg

SEQ ID NO: 23641 - DNA, 30 bp, Artificial Sequence
  Synthetic oligonucleotide
tggagtatgcgaaaagttcccaaaaatggg

SEQ ID NO: 23642 - DNA, 30 bp, Artificial Sequence
  Synthetic oligonucleotide
acgcctagatttagactacgagcaaatggg

SEQ ID NO: 23643 - DNA, 30 bp, Artificial Sequence
  Synthetic oligonucleotide
cgacaatactaccgtcagtcaggcgatggg

SEQ ID NO: 23644 - DNA, 30 bp, Artificial Sequence
  Synthetic oligonucleotide
ccgaaagaggagcaggctgcgcctagtggg

SEQ ID NO: 23645 - DNA, 30 bp, Artificial Sequence
  Synthetic oligonucleotide
ggcgaacaaacaaggacagaaacgggtggg

SEQ ID NO: 23646 - DNA, 30 bp, Artificial Sequence
  Synthetic oligonucleotide
gcggtctaggcaaacgttagtcagtgtggg

SEQ ID NO: 23647 - DNA, 30 bp, Artificial Sequence
  Synthetic oligonucleotide
tcatagtgcagaaattgcgagatcaaatgg

SEQ ID NO: 23648 - DNA, 30 bp, Artificial Sequence
  Synthetic oligonucleotide
agtaggccgtggacaagctggttgaaatgg

SEQ ID NO: 23649 - DNA, 30 bp, Artificial Sequence
  Synthetic oligonucleotide
cagggtcagaaataacttccatacggatgg

SEQ ID NO: 23650 - DNA, 30 bp, Artificial Sequence
  Synthetic oligonucleotide
acgtgatcttgaaaatgacaacacatatgg

SEQ ID NO: 23651 - DNA, 30 bp, Artificial Sequence
  Synthetic oligonucleotide
cgtcgtccgaggacagtacacgtactatgg

SEQ ID NO: 23652 - DNA, 30 bp, Artificial Sequence
  Synthetic oligonucleotide
ggaaggttgcactaggtaaaagaaaactgg

SEQ ID NO: 23653 - DNA, 30 bp, Artificial Sequence
  Synthetic oligonucleotide
agtggctaatacgagtgatattaggactgg

SEQ ID NO: 23654 - DNA, 30 bp, Artificial Sequence
  Synthetic oligonucleotide
actgagaaaaaaacactcgccgtgtactgg

SEQ ID NO: 23655 - DNA, 30 bp, Artificial Sequence
  Synthetic oligonucleotide
caacaatcttccgaaagggtgtacggctgg

SEQ ID NO: 23656 - DNA, 30 bp, Artificial Sequence
  Synthetic oligonucleotide
gtcacactccaaaacaataggtaatgctgg

SEQ ID NO: 23657 - DNA, 30 bp, Artificial Sequence
  Synthetic oligonucleotide
aggggaagctcattcggggatgacctctgg

SEQ ID NO: 23658 - DNA, 30 bp, Artificial Sequence
  Synthetic oligonucleotide
ggaaacaacagattcgactatcccgtctgg

SEQ ID NO: 23659 - DNA, 30 bp, Artificial Sequence
  Synthetic oligonucleotide
acatcgaaaacaagtagtaaaatgacgtgg

SEQ ID NO: 23660 - DNA, 30 bp, Artificial Sequence
  Synthetic oligonucleotide
tagtgcggtcaggaaagccgaattacgtgg

SEQ ID NO: 23661 - DNA, 30 bp, Artificial Sequence
  Synthetic oligonucleotide
agcgttacgtaagagagacgggtcaattgg

SEQ ID NO: 23662 - DNA, 30 bp, Artificial Sequence
  Synthetic oligonucleotide
acaggtatacataatacagtacccgattgg

SEQ ID NO: 23663 - DNA, 30 bp, Artificial Sequence
  Synthetic oligonucleotide
ctcaactacatagaataccagacggcttgg

SEQ ID NO: 23664 - DNA, 30 bp, Artificial Sequence
  Synthetic oligonucleotide
gcatggggcgcgagtaacgaagcgagttgg

SEQ ID NO: 23665 - DNA, 30 bp, Artificial Sequence
  Synthetic oligonucleotide
cgatcatccagggatatggcaagaggttgg

SEQ ID NO: 23666 - DNA, 31 bp, Artificial Sequence
  Synthetic oligonucleotide
ggtagagggttatccatccaaatgcaaaatg

SEQ ID NO: 23667 - DNA, 30 bp, Artificial Sequence
  Synthetic oligonucleotide
cgtagtagagtatgatccaaccgtcaaatg

SEQ ID NO: 23668 - DNA, 30 bp, Artificial Sequence
  Synthetic oligonucleotide
ttagccaagctataaggcccaggggaaatg

SEQ ID NO: 23669 - DNA, 30 bp, Artificial Sequence
  Synthetic oligonucleotide
cgttaaaactgcaagccataaattgaaatg

SEQ ID NO: 23670 - DNA, 30 bp, Artificial Sequence
  Synthetic oligonucleotide
cctggagaggaagcctgaggtagcccaatg

SEQ ID NO: 23671 - DNA, 30 bp, Artificial Sequence
  Synthetic oligonucleotide
cgtggagctgccccctaattccggcgaatg

SEQ ID NO: 23672 - DNA, 30 bp, Artificial Sequence
  Synthetic oligonucleotide
acgtgagcccgcgtgcacccgacgataatg

SEQ ID NO: 23673 - DNA, 30 bp, Artificial Sequence
  Synthetic oligonucleotide
ctcggacaaacggtaaatcagatcctaatg

SEQ ID NO: 23674 - DNA, 30 bp, Artificial Sequence
  Synthetic oligonucleotide
acgacagggggataaagtcttaggttaatg

SEQ ID NO: 23675 - DNA, 30 bp, Artificial Sequence
  Synthetic oligonucleotide
cataatagcgaactatctatccccgacatg

SEQ ID NO: 23676 - DNA, 30 bp, Artificial Sequence
  Synthetic oligonucleotide
gcgggggacaacgataccttgagttacatg

SEQ ID NO: 23677 - DNA, 30 bp, Artificial Sequence
  Synthetic oligonucleotide
ctgcagcaaagctgaaaaagatacaccatg

SEQ ID NO: 23678 - DNA, 30 bp, Artificial Sequence
  Synthetic oligonucleotide
aggggaagctggagccgccaaaataccatg

SEQ ID NO: 23679 - DNA, 30 bp, Artificial Sequence
  Synthetic oligonucleotide
tgtaggtggaccggcccatcgaaaggcatg

SEQ ID NO: 23680 - DNA, 30 bp, Artificial Sequence
  Synthetic oligonucleotide
caagacaggagtggtttacgtcagggcatg

SEQ ID NO: 23681 - DNA, 30 bp, Artificial Sequence
  Synthetic oligonucleotide
aggtaaggcccgaagtcaggtttgttcatg

SEQ ID NO: 23682 - DNA, 30 bp, Artificial Sequence
  Synthetic oligonucleotide
ttagaaagagatcataaatccggcaagatg

SEQ ID NO: 23683 - DNA, 30 bp, Artificial Sequence
  Synthetic oligonucleotide
ggtcgcagatgtccaggatgccagaagatg

SEQ ID NO: 23684 - DNA, 30 bp, Artificial Sequence
  Synthetic oligonucleotide
ttgagaaagcatgccaaggggtgcgagatg

SEQ ID NO: 23685 - DNA, 30 bp, Artificial Sequence
  Synthetic oligonucleotide
acagatcggggtgaaatccaaaatcggatg

SEQ ID NO: 23686 - DNA, 30 bp, Artificial Sequence
  Synthetic oligonucleotide
tggaaaagagaatcttcacgaatgttgatg

SEQ ID NO: 23687 - DNA, 30 bp, Artificial Sequence
  Synthetic oligonucleotide
gggcaaaagcataaggacatagggcctatg

SEQ ID NO: 23688 - DNA, 30 bp, Artificial Sequence
  Synthetic oligonucleotide
gcggcataacaccgcgcacgagaaagtatg

SEQ ID NO: 23689 - DNA, 30 bp, Artificial Sequence
  Synthetic oligonucleotide
ccaaatgcatcaagtgactgcgaatgtatg

SEQ ID NO: 23690 - DNA, 30 bp, Artificial Sequence
  Synthetic oligonucleotide
gaatgggaggaagggagtgtcgttcttatg

SEQ ID NO: 23691 - DNA, 30 bp, Artificial Sequence
  Synthetic oligonucleotide
cgagcccagccaagtaccctacacgaactg

SEQ ID NO: 23692 - DNA, 30 bp, Artificial Sequence
  Synthetic oligonucleotide
aggcaacaattcttaaaacgtacaagactg

SEQ ID NO: 23693 - DNA, 30 bp, Artificial Sequence
  Synthetic oligonucleotide
ggttggtcaaaggcgtacgaaaccatactg

SEQ ID NO: 23694 - DNA, 30 bp, Artificial Sequence
  Synthetic oligonucleotide
ggcgtagaccttgtgacaaaagatgtactg

SEQ ID NO: 23695 - DNA, 30 bp, Artificial Sequence
  Synthetic oligonucleotide
ggggtgtggagaacgagcggatgttacctg

SEQ ID NO: 23696 - DNA, 30 bp, Artificial Sequence
  Synthetic oligonucleotide
agggcctgcagagtacgggagtacatcctg

SEQ ID NO: 23697 - DNA, 30 bp, Artificial Sequence
  Synthetic oligonucleotide
cggtgaaagcgtacgagctaagtagagctg

SEQ ID NO: 23698 - DNA, 30 bp, Artificial Sequence
  Synthetic oligonucleotide
taggcagaaatacgagggatgcgttagctg

SEQ ID NO: 23699 - DNA, 30 bp, Artificial Sequence
  Synthetic oligonucleotide
ctatgtgataggcgagaaaaatcagcgctg

SEQ ID NO: 23700 - DNA, 30 bp, Artificial Sequence
  Synthetic oligonucleotide
ggaccaatggagcgtgagttgggtgcgctg

SEQ ID NO: 23701 - DNA, 30 bp, Artificial Sequence
  Synthetic oligonucleotide
tgaggctgaattggccgacccggaatgctg

SEQ ID NO: 23702 - DNA, 30 bp, Artificial Sequence
  Synthetic oligonucleotide
tgtcaaactaaacaaataagacgaaatctg

SEQ ID NO: 23703 - DNA, 30 bp, Artificial Sequence
  Synthetic oligonucleotide
aacgaagacactagaggaaaaagccatctg

SEQ ID NO: 23704 - DNA, 30 bp, Artificial Sequence
  Synthetic oligonucleotide
cgagtaaaaaggagttcggcaggcgatctg

SEQ ID NO: 23705 - DNA, 30 bp, Artificial Sequence
  Synthetic oligonucleotide
agcaccggatgaataggcgggaatcgtctg

SEQ ID NO: 23706 - DNA, 30 bp, Artificial Sequence
  Synthetic oligonucleotide
gagcgagtcatatctcaaggttgcaaagtg

SEQ ID NO: 23707 - DNA, 30 bp, Artificial Sequence
  Synthetic oligonucleotide
cgcgtggatagtcaaaagaagggtcaagtg

SEQ ID NO: 23708 - DNA, 30 bp, Artificial Sequence
  Synthetic oligonucleotide
cactaatgcttggcaacaataatctaagtg

SEQ ID NO: 23709 - DNA, 30 bp, Artificial Sequence
  Synthetic oligonucleotide
acaacaagaagaggtccgtgtcccccagtg

SEQ ID NO: 23710 - DNA, 30 bp, Artificial Sequence
  Synthetic oligonucleotide
gtacccaagccaatcgagaggtgctcagtg

SEQ ID NO: 23711 - DNA, 30 bp, Artificial Sequence
  Synthetic oligonucleotide
cggcgggtaaagatagatcactaaagagtg

SEQ ID NO: 23712 - DNA, 30 bp, Artificial Sequence
  Synthetic oligonucleotide
tacggaatggtcaaggtcccagtccgagtg

SEQ ID NO: 23713 - DNA, 30 bp, Artificial Sequence
  Synthetic oligonucleotide
gttacgctgggcagatctagagcgcgagtg

SEQ ID NO: 23714 - DNA, 30 bp, Artificial Sequence
  Synthetic oligonucleotide
tgatatagtaaggggaggaagtggcgagtg

SEQ ID NO: 23715 - DNA, 30 bp, Artificial Sequence
  Synthetic oligonucleotide
gagtaagttaggaaagatgcggaaggagtg

SEQ ID NO: 23716 - DNA, 30 bp, Artificial Sequence
  Synthetic oligonucleotide
agccaaccaaggagcttagcccgaggagtg

SEQ ID NO: 23717 - DNA, 30 bp, Artificial Sequence
  Synthetic oligonucleotide
tacgtaagaaagcgagcgagcgacggagtg

SEQ ID NO: 23718 - DNA, 30 bp, Artificial Sequence
  Synthetic oligonucleotide
cagataattacacgggaacaatacggagtg

SEQ ID NO: 23719 - DNA, 30 bp, Artificial Sequence
  Synthetic oligonucleotide
ggcgcgcggaaaattgtaatcgactgagtg

SEQ ID NO: 23720 - DNA, 31 bp, Artificial Sequence
  Synthetic oligonucleotide
gggacaccaacatgcaatggtctagttagtg

SEQ ID NO: 23721 - DNA, 30 bp, Artificial Sequence
  Synthetic oligonucleotide
agccaatggagaatgagggaaccgttagtg

SEQ ID NO: 23722 - DNA, 30 bp, Artificial Sequence
  Synthetic oligonucleotide
acaggaaagtgagtcatcggtaatcacgtg

SEQ ID NO: 23723 - DNA, 30 bp, Artificial Sequence
  Synthetic oligonucleotide
ctaagatagtcagcagaggatgcggacgtg

SEQ ID NO: 23724 - DNA, 30 bp, Artificial Sequence
  Synthetic oligonucleotide
agagggatgcgtagggggtcaaagcgcgtg

SEQ ID NO: 23725 - DNA, 30 bp, Artificial Sequence
  Synthetic oligonucleotide
cactaggagagacaccgggaaggcttcgtg

SEQ ID NO: 23726 - DNA, 30 bp, Artificial Sequence
  Synthetic oligonucleotide
atgcgcatttccgacagcgttaaaaaggtg

SEQ ID NO: 23727 - DNA, 30 bp, Artificial Sequence
  Synthetic oligonucleotide
gaacgagagtttgaaggacggtagaaggtg

SEQ ID NO: 23728 - DNA, 30 bp, Artificial Sequence
  Synthetic oligonucleotide
agacaggcgtagacgcgtgtgttgaaggtg

SEQ ID NO: 23729 - DNA, 30 bp, Artificial Sequence
  Synthetic oligonucleotide
acggaaggtaaagagaattccggagaggtg

SEQ ID NO: 23730 - DNA, 30 bp, Artificial Sequence
  Synthetic oligonucleotide
ttacgtggttagataaggaaagaagcggtg

SEQ ID NO: 23731 - DNA, 30 bp, Artificial Sequence
  Synthetic oligonucleotide
tcttccaacctaaaggaaacaacaggggtg

SEQ ID NO: 23732 - DNA, 30 bp, Artificial Sequence
  Synthetic oligonucleotide
tcagcccggaacattgtcaaggtaaatgtg

SEQ ID NO: 23733 - DNA, 30 bp, Artificial Sequence
  Synthetic oligonucleotide
tagggacgagcagaagaaattgagaatgtg

SEQ ID NO: 23734 - DNA, 30 bp, Artificial Sequence
  Synthetic oligonucleotide
ctggaaaagacattgtgagtctaggatgtg

SEQ ID NO: 23735 - DNA, 30 bp, Artificial Sequence
  Synthetic oligonucleotide
tgcagtacgaaagagagaacacaagctgtg

SEQ ID NO: 23736 - DNA, 30 bp, Artificial Sequence
  Synthetic oligonucleotide
tagggctcggcaacgttccctgactgtgtg

SEQ ID NO: 23737 - DNA, 30 bp, Artificial Sequence
  Synthetic oligonucleotide
gcaggggttctgatggtgcgataaacattg

SEQ ID NO: 23738 - DNA, 30 bp, Artificial Sequence
  Synthetic oligonucleotide
ggtgtagagaccaaccgttccgcaccattg

SEQ ID NO: 23739 - DNA, 30 bp, Artificial Sequence
  Synthetic oligonucleotide
cagcaaggaaacgccctgcctcctgcattg

SEQ ID NO: 23740 - DNA, 30 bp, Artificial Sequence
  Synthetic oligonucleotide
agccatccgcatatccaaacccacagattg

SEQ ID NO: 23741 - DNA, 30 bp, Artificial Sequence
  Synthetic oligonucleotide
gtgagctgtgggtaattgaggattggattg

SEQ ID NO: 23742 - DNA, 30 bp, Artificial Sequence
  Synthetic oligonucleotide
agtgacctaatgcggcgaataaagtgattg

SEQ ID NO: 23743 - DNA, 30 bp, Artificial Sequence
  Synthetic oligonucleotide
cgacaggtgaccaaacgagcatctatattg

SEQ ID NO: 23744 - DNA, 30 bp, Artificial Sequence
  Synthetic oligonucleotide
gggagggagcaaggaggcttgtcagtattg

SEQ ID NO: 23745 - DNA, 30 bp, Artificial Sequence
  Synthetic oligonucleotide
cgattgtagaatgcgaatcacctgcacttg

SEQ ID NO: 23746 - DNA, 30 bp, Artificial Sequence
  Synthetic oligonucleotide
actgctgcgaaaagacccgttatcaccttg

SEQ ID NO: 23747 - DNA, 30 bp, Artificial Sequence
  Synthetic oligonucleotide
ggtggggagcaatgataacgagaattcttg

SEQ ID NO: 23748 - DNA, 30 bp, Artificial Sequence
  Synthetic oligonucleotide
ggggagcagtgcgaaaagaatcgggagttg

SEQ ID NO: 23749 - DNA, 30 bp, Artificial Sequence
  Synthetic oligonucleotide
acacgctcgtccgtatcaaaaagtgggttg

SEQ ID NO: 23750 - DNA, 30 bp, Artificial Sequence
  Synthetic oligonucleotide
cgagatctacaagcccagcaagagcctttg

SEQ ID NO: 23751 - DNA, 30 bp, Artificial Sequence
  Synthetic oligonucleotide
caggagtgagccagatgactccacgttttg

SEQ ID NO: 23752 - DNA, 30 bp, Artificial Sequence
  Synthetic oligonucleotide
ctgagggacaacctgcctgagtacgaaaat

SEQ ID NO: 23753 - DNA, 30 bp, Artificial Sequence
  Synthetic oligonucleotide
aagcatcaggtgcgtcgactctaagtaaat

SEQ ID NO: 23754 - DNA, 30 bp, Artificial Sequence
  Synthetic oligonucleotide
cgactgcttgagcaaacagggcaggtaaat

SEQ ID NO: 23755 - DNA, 30 bp, Artificial Sequence
  Synthetic oligonucleotide
cagtgggacgaaaacgaagaacggaacaat

SEQ ID NO: 23756 - DNA, 30 bp, Artificial Sequence
  Synthetic oligonucleotide
ttaaggtacagcgggtgtagggaaagcaat

SEQ ID NO: 23757 - DNA, 30 bp, Artificial Sequence
  Synthetic oligonucleotide
acaaaaggaatcacaccaggtcgcggcaat

SEQ ID NO: 23758 - DNA, 30 bp, Artificial Sequence
  Synthetic oligonucleotide
gccaaaagggcaaacaagcatcccgtcaat

SEQ ID NO: 23759 - DNA, 30 bp, Artificial Sequence
  Synthetic oligonucleotide
ccacacaccgtcgagactgaaatagagaat

SEQ ID NO: 23760 - DNA, 30 bp, Artificial Sequence
  Synthetic oligonucleotide
caagcacgtggatttggtacgacttagaat

SEQ ID NO: 23761 - DNA, 30 bp, Artificial Sequence
  Synthetic oligonucleotide
gctacggtaggatacgtgagatcaacgaat

SEQ ID NO: 23762 - DNA, 31 bp, Artificial Sequence
  Synthetic oligonucleotide
aggtcggaaaatttaggtggcaggaacgaat

SEQ ID NO: 23763 - DNA, 30 bp, Artificial Sequence
  Synthetic oligonucleotide
cgaccaatgcacgtaaagatactcccgaat

SEQ ID NO: 23764 - DNA, 30 bp, Artificial Sequence
  Synthetic oligonucleotide
tcgtatcatgaagtaagatcgagcaggaat

SEQ ID NO: 23765 - DNA, 30 bp, Artificial Sequence
  Synthetic oligonucleotide
ctgggacaggccgatctccagtagaggaat

SEQ ID NO: 23766 - DNA, 30 bp, Artificial Sequence
  Synthetic oligonucleotide
ccagtgacctatacgggctgagctcggaat

SEQ ID NO: 23767 - DNA, 30 bp, Artificial Sequence
  Synthetic oligonucleotide
cggggcaaacaaaacttgcgaccccataat

SEQ ID NO: 23768 - DNA, 30 bp, Artificial Sequence
  Synthetic oligonucleotide
cgactaagggccgacttgcgtaagactaat

SEQ ID NO: 23769 - DNA, 30 bp, Artificial Sequence
  Synthetic oligonucleotide
gtcccaagcacgggcgagtgagcggaacat

SEQ ID NO: 23770 - DNA, 30 bp, Artificial Sequence
  Synthetic oligonucleotide
gcgggcctaagtggcaaatgacgtgaacat

SEQ ID NO: 23771 - DNA, 30 bp, Artificial Sequence
  Synthetic oligonucleotide
ggagctggcatcagcacagcaatcacacat

SEQ ID NO: 23772 - DNA, 30 bp, Artificial Sequence
  Synthetic oligonucleotide
cacagctgtagccagagaaacaagagacat

SEQ ID NO: 23773 - DNA, 30 bp, Artificial Sequence
  Synthetic oligonucleotide
cgacaatcaaggggaatcacacagccgcat

SEQ ID NO: 23774 - DNA, 30 bp, Artificial Sequence
  Synthetic oligonucleotide
cgaggctggtggagcacagggtcttcgcat

SEQ ID NO: 23775 - DNA, 30 bp, Artificial Sequence
  Synthetic oligonucleotide
cgaggcccagagaaatattctggcgtgcat

SEQ ID NO: 23776 - DNA, 30 bp, Artificial Sequence
  Synthetic oligonucleotide
aacgaaatgttgagggcagtgaagcatcat

SEQ ID NO: 23777 - DNA, 30 bp, Artificial Sequence
  Synthetic oligonucleotide
gtggctcactacgaacaacccagagatcat

SEQ ID NO: 23778 - DNA, 30 bp, Artificial Sequence
  Synthetic oligonucleotide
tggaagagacatgcgggtgcacaagctcat

SEQ ID NO: 23779 - DNA, 30 bp, Artificial Sequence
  Synthetic oligonucleotide
aacgaaaaagaacgtatcgggcagtctcat

SEQ ID NO: 23780 - DNA, 30 bp, Artificial Sequence
  Synthetic oligonucleotide
tcgaggagactgtaggacccccgcaaagat

SEQ ID NO: 23781 - DNA, 30 bp, Artificial Sequence
  Synthetic oligonucleotide
tagctacaccaaagactgtggagccaagat

SEQ ID NO: 23782 - DNA, 30 bp, Artificial Sequence
  Synthetic oligonucleotide
gggagcctcgactccatagaagctgaagat

SEQ ID NO: 23783 - DNA, 30 bp, Artificial Sequence
  Synthetic oligonucleotide
tcaagccacagaggctgaaccaaataagat

SEQ ID NO: 23784 - DNA, 30 bp, Artificial Sequence
  Synthetic oligonucleotide
taaacatgcgaaacatatgtaagctcagat

SEQ ID NO: 23785 - DNA, 30 bp, Artificial Sequence
  Synthetic oligonucleotide
gagcgcggacgtatgtgtgaagggagagat

SEQ ID NO: 23786 - DNA, 30 bp, Artificial Sequence
  Synthetic oligonucleotide
ggggtgagataagatcattcgattggagat

SEQ ID NO: 23787 - DNA, 38 bp, Artificial Sequence
  Synthetic oligonucleotide
cgccacgttagcattacagtataggttagctgctagat

SEQ ID NO: 23788 - DNA, 30 bp, Artificial Sequence
  Synthetic oligonucleotide
ctaagtaaggaaagggagaccgtggtagat

SEQ ID NO: 23789 - DNA, 30 bp, Artificial Sequence
  Synthetic oligonucleotide
agagcacgaagcgaggaacgcacttacgat

SEQ ID NO: 23790 - DNA, 30 bp, Artificial Sequence
  Synthetic oligonucleotide
tgaagaaatggatatggcaaaacggccgat

SEQ ID NO: 23791 - DNA, 30 bp, Artificial Sequence
  Synthetic oligonucleotide
tcggaagaaaaattcgtacacgagggcgat

SEQ ID NO: 23792 - DNA, 30 bp, Artificial Sequence
  Synthetic oligonucleotide
accgagtgtcgacccattgcacagaaggat

SEQ ID NO: 23793 - DNA, 30 bp, Artificial Sequence
  Synthetic oligonucleotide
tcgaccactttcgggcgaaaaaaccaggat

SEQ ID NO: 23794 - DNA, 30 bp, Artificial Sequence
  Synthetic oligonucleotide
taaggaacgagggtctagtggatccatgat

SEQ ID NO: 23795 - DNA, 30 bp, Artificial Sequence
  Synthetic oligonucleotide
tgaagtcgccgtaaggaagtggctcaatat

SEQ ID NO: 23796 - DNA, 30 bp, Artificial Sequence
  Synthetic oligonucleotide
agcgggacagcgcgatatagggtcgactat

SEQ ID NO: 23797 - DNA, 30 bp, Artificial Sequence
  Synthetic oligonucleotide
cacgacagcctgggtgaaggaaaaaggtat

SEQ ID NO: 23798 - DNA, 31 bp, Artificial Sequence
  Synthetic oligonucleotide
acgaaagtgctggccaaacagaggaaggtat

SEQ ID NO: 23799 - DNA, 30 bp, Artificial Sequence
  Synthetic oligonucleotide
cacggacgcaacgttcgacagagaatgtat

SEQ ID NO: 23800 - DNA, 30 bp, Artificial Sequence
  Synthetic oligonucleotide
aggtagactggcacaaatttggtgatgtat

SEQ ID NO: 23801 - DNA, 30 bp, Artificial Sequence
  Synthetic oligonucleotide
cggcagaaatgagtaagcccgtcgttgtat

SEQ ID NO: 23802 - DNA, 30 bp, Artificial Sequence
  Synthetic oligonucleotide
ccggctagctgtgggggagaatgccgttat

SEQ ID NO: 23803 - DNA, 30 bp, Artificial Sequence
  Synthetic oligonucleotide
cggaagctgaggacatgttgtcacaaaact

SEQ ID NO: 23804 - DNA, 30 bp, Artificial Sequence
  Synthetic oligonucleotide
aaagcagagctggtacggcatatacgaact

SEQ ID NO: 23805 - DNA, 30 bp, Artificial Sequence
  Synthetic oligonucleotide
taagagcaccggtacaacactcctctaact

SEQ ID NO: 23806 - DNA, 30 bp, Artificial Sequence
  Synthetic oligonucleotide
tcgaagtgcaggccaacgatggtgttaact

SEQ ID NO: 23807 - DNA, 30 bp, Artificial Sequence
  Synthetic oligonucleotide
cagcacgaatggtgatagcgagatgccact

SEQ ID NO: 23808 - DNA, 30 bp, Artificial Sequence
  Synthetic oligonucleotide
caaaacaagcagaattcaggggtatccact

SEQ ID NO: 23809 - DNA, 30 bp, Artificial Sequence
  Synthetic oligonucleotide
gcgagagcatccatccgcccatattccact

SEQ ID NO: 23810 - DNA, 30 bp, Artificial Sequence
  Synthetic oligonucleotide
ccctcgatgatactgaaaaaaaactgcact

SEQ ID NO: 23811 - DNA, 31 bp, Artificial Sequence
  Synthetic oligonucleotide
acatcgcaggaccgctcgaatccaagtcact

SEQ ID NO: 23812 - DNA, 30 bp, Artificial Sequence
  Synthetic oligonucleotide
gggagtggtttgcgaataacgattcagact

SEQ ID NO: 23813 - DNA, 30 bp, Artificial Sequence
  Synthetic oligonucleotide
caaagactggtgagagccacataaaggact

SEQ ID NO: 23814 - DNA, 30 bp, Artificial Sequence
  Synthetic oligonucleotide
caagaaagagggcgcccgaaacagtggact

SEQ ID NO: 23815 - DNA, 30 bp, Artificial Sequence
  Synthetic oligonucleotide
aaggtagccaggcgtgtcctcagtgtgact

SEQ ID NO: 23816 - DNA, 30 bp, Artificial Sequence
  Synthetic oligonucleotide
gcgaagccgaggaacagcaatccgcatact

SEQ ID NO: 23817 - DNA, 30 bp, Artificial Sequence
  Synthetic oligonucleotide
agaagcgaaatggcactcgcgcccagtact

SEQ ID NO: 23818 - DNA, 30 bp, Artificial Sequence
  Synthetic oligonucleotide
ggagtggcaacgtcgtcatcggcaacacct

SEQ ID NO: 23819 - DNA, 30 bp, Artificial Sequence
  Synthetic oligonucleotide
cgtgctgtggaagacacgaactcgtgacct

SEQ ID NO: 23820 - DNA, 30 bp, Artificial Sequence
  Synthetic oligonucleotide
aggactggacattgtgaaccaaaggagcct

SEQ ID NO: 23821 - DNA, 30 bp, Artificial Sequence
  Synthetic oligonucleotide
aagagggagcacagccccatggagtagcct

SEQ ID NO: 23822 - DNA, 30 bp, Artificial Sequence
  Synthetic oligonucleotide
actgacagtgcgattacacggggcgggcct

SEQ ID NO: 23823 - DNA, 30 bp, Artificial Sequence
  Synthetic oligonucleotide
aagacaaggcgcaagtagtgagagaatcct

SEQ ID NO: 23824 - DNA, 30 bp, Artificial Sequence
  Synthetic oligonucleotide
ggtcgaaaaagcgagggtgatgttagtcct

SEQ ID NO: 23825 - DNA, 30 bp, Artificial Sequence
  Synthetic oligonucleotide
ctacggggagtccgtggagaaaaagaagct

SEQ ID NO: 23826 - DNA, 30 bp, Artificial Sequence
  Synthetic oligonucleotide
cgtgatctcacgtctagagtgccagaagct

SEQ ID NO: 23827 - DNA, 30 bp, Artificial Sequence
  Synthetic oligonucleotide
gtaccacttcaggaagcgccgaatgaagct

SEQ ID NO: 23828 - DNA, 30 bp, Artificial Sequence
  Synthetic oligonucleotide
caggtcagggtagtgaagccaactccagct

SEQ ID NO: 23829 - DNA, 30 bp, Artificial Sequence
  Synthetic oligonucleotide
aaggaggtggtagactattaatcgcgagct

SEQ ID NO: 23830 - DNA, 30 bp, Artificial Sequence
  Synthetic oligonucleotide
aaggggcagtgccaagacagtggtgtagct

SEQ ID NO: 23831 - DNA, 30 bp, Artificial Sequence
  Synthetic oligonucleotide
agcgtgcgaccctcccaaactgcattagct

SEQ ID NO: 23832 - DNA, 30 bp, Artificial Sequence
  Synthetic oligonucleotide
gtgaaaggataaacgaatcatataaccgct

SEQ ID NO: 23833 - DNA, 30 bp, Artificial Sequence
  Synthetic oligonucleotide
atgcacataccacgagtaacgtcaatcgct

SEQ ID NO: 23834 - DNA, 30 bp, Artificial Sequence
  Synthetic oligonucleotide
aaaggacgatgaaggaaatgagtaagggct

SEQ ID NO: 23835 - DNA, 30 bp, Artificial Sequence
  Synthetic oligonucleotide
tgctaagtggcaaggaagagtttaagggct

SEQ ID NO: 23836 - DNA, 30 bp, Artificial Sequence
  Synthetic oligonucleotide
agcgcaaacaaccagtgtgaggtcagggct

SEQ ID NO: 23837 - DNA, 31 bp, Artificial Sequence
  Synthetic oligonucleotide
aggccagttgctggcgtgctagaaaggggct

SEQ ID NO: 23838 - DNA, 30 bp, Artificial Sequence
  Synthetic oligonucleotide
acgagaagtaaatctatacgcctccgtgct

SEQ ID NO: 23839 - DNA, 30 bp, Artificial Sequence
  Synthetic oligonucleotide
gaacgtcagaacaacgtaaatcaaccctct

SEQ ID NO: 23840 - DNA, 30 bp, Artificial Sequence
  Synthetic oligonucleotide
tgggggctatggacagacataagagcctct

SEQ ID NO: 23841 - DNA, 30 bp, Artificial Sequence
  Synthetic oligonucleotide
tcgaacggtctagcggtgagaaaggattct

SEQ ID NO: 23842 - DNA, 30 bp, Artificial Sequence
  Synthetic oligonucleotide
acacaagacacgaatggcgttaaccaaagt

SEQ ID NO: 23843 - DNA, 30 bp, Artificial Sequence
  Synthetic oligonucleotide
ctggaaaagtcaacacctagacaacgaagt

SEQ ID NO: 23844 - DNA, 30 bp, Artificial Sequence
  Synthetic oligonucleotide
aaacacgaggagaagatgtcttaagccagt

SEQ ID NO: 23845 - DNA, 30 bp, Artificial Sequence
  Synthetic oligonucleotide
agcgaatacctggtggtaagggatgccagt

SEQ ID NO: 23846 - DNA, 30 bp, Artificial Sequence
  Synthetic oligonucleotide
acgagggacatagggaatcgacagcgcagt

SEQ ID NO: 23847 - DNA, 30 bp, Artificial Sequence
  Synthetic oligonucleotide
ggtgaagaaagagcttatcgtgtaaagagt

SEQ ID NO: 23848 - DNA, 30 bp, Artificial Sequence
  Synthetic oligonucleotide
tggaccctaccccgtgagaaaactcagagt

SEQ ID NO: 23849 - DNA, 30 bp, Artificial Sequence
  Synthetic oligonucleotide
cggtgcgactggcaggaatacaattagagt

SEQ ID NO: 23850 - DNA, 30 bp, Artificial Sequence
  Synthetic oligonucleotide
cagctaagggaaggagtctcggggcggagt

SEQ ID NO: 23851 - DNA, 30 bp, Artificial Sequence
  Synthetic oligonucleotide
gataagtcggccaaagtggactgagtgagt

SEQ ID NO: 23852 - DNA, 30 bp, Artificial Sequence
  Synthetic oligonucleotide
aggcgatagttgcagaaaaacgcgcctagt

SEQ ID NO: 23853 - DNA, 30 bp, Artificial Sequence
  Synthetic oligonucleotide
agggagtagggagtgatctagattattagt

SEQ ID NO: 23854 - DNA, 30 bp, Artificial Sequence
  Synthetic oligonucleotide
ggaacggggatgtgaacagcggccacacgt

SEQ ID NO: 23855 - DNA, 30 bp, Artificial Sequence
  Synthetic oligonucleotide
ctacgcaaaataaacaacggtgggggacgt

SEQ ID NO: 23856 - DNA, 30 bp, Artificial Sequence
  Synthetic oligonucleotide
cggaaaggatctatgctccagggaacccgt

SEQ ID NO: 23857 - DNA, 30 bp, Artificial Sequence
  Synthetic oligonucleotide
aggaggaagttgtccagagtacacgagcgt

SEQ ID NO: 23858 - DNA, 30 bp, Artificial Sequence
  Synthetic oligonucleotide
tcgtacgtcgcgtaccaagaaatatagcgt

SEQ ID NO: 23859 - DNA, 30 bp, Artificial Sequence
  Synthetic oligonucleotide
acgatccaagaaacgagtcacggcctgcgt

SEQ ID NO: 23860 - DNA, 30 bp, Artificial Sequence
  Synthetic oligonucleotide
gcgataccccaagcataagggaaggatcgt

SEQ ID NO: 23861 - DNA, 30 bp, Artificial Sequence
  Synthetic oligonucleotide
ggcataacggccattgatgcagagtgtcgt

SEQ ID NO: 23862 - DNA, 30 bp, Artificial Sequence
  Synthetic oligonucleotide
gagaaggacaagaaggctggaacaacaggt

SEQ ID NO: 23863 - DNA, 30 bp, Artificial Sequence
  Synthetic oligonucleotide
gcgtaggtggatataaatataggaataggt

SEQ ID NO: 23864 - DNA, 30 bp, Artificial Sequence
  Synthetic oligonucleotide
tcggaaaggacgccagagttgccgataggt

SEQ ID NO: 23865 - DNA, 30 bp, Artificial Sequence
  Synthetic oligonucleotide
ataaaggagcgcaagatacgtgaattaggt

SEQ ID NO: 23866 - DNA, 30 bp, Artificial Sequence
  Synthetic oligonucleotide
cgtggatggaagcgtagaacggtaaacggt

SEQ ID NO: 23867 - DNA, 30 bp, Artificial Sequence
  Synthetic oligonucleotide
gtacatgaaaaaatcctcaaccgaggcggt

SEQ ID NO: 23868 - DNA, 30 bp, Artificial Sequence
  Synthetic oligonucleotide
ctgacggcgaagtgaagggatccgctcggt

SEQ ID NO: 23869 - DNA, 30 bp, Artificial Sequence
  Synthetic oligonucleotide
cgcaagtcattcacgtaggggggcaagggt

SEQ ID NO: 23870 - DNA, 30 bp, Artificial Sequence
  Synthetic oligonucleotide
acgaagtaatacatagggcaacataagggt

SEQ ID NO: 23871 - DNA, 30 bp, Artificial Sequence
  Synthetic oligonucleotide
caacgtagaatacgccaacgtgtcgcgggt

SEQ ID NO: 23872 - DNA, 30 bp, Artificial Sequence
  Synthetic oligonucleotide
gagaacagagaatactcgcaccggaggggt

SEQ ID NO: 23873 - DNA, 30 bp, Artificial Sequence
  Synthetic oligonucleotide
tgaggatgctgagatggaaaaagcctgggt

SEQ ID NO: 23874 - DNA, 30 bp, Artificial Sequence
  Synthetic oligonucleotide
aaggacgaaggggaaacccgcagaaatggt

SEQ ID NO: 23875 - DNA, 30 bp, Artificial Sequence
  Synthetic oligonucleotide
cacagagacaatagattacaatggcatggt

SEQ ID NO: 23876 - DNA, 30 bp, Artificial Sequence
  Synthetic oligonucleotide
ggacactggtaagagcagaacgaacgtggt

SEQ ID NO: 23877 - DNA, 30 bp, Artificial Sequence
  Synthetic oligonucleotide
taaggatcggttagtagagataggcaatgt

SEQ ID NO: 23878 - DNA, 30 bp, Artificial Sequence
  Synthetic oligonucleotide
cagtccaagagggacgatagccctgaatgt

SEQ ID NO: 23879 - DNA, 30 bp, Artificial Sequence
  Synthetic oligonucleotide
tcaaaaggccagtgtgactgagctaagtgt

SEQ ID NO: 23880 - DNA, 30 bp, Artificial Sequence
  Synthetic oligonucleotide
gacgggccgaaaacgagctagggcatgtgt

SEQ ID NO: 23881 - DNA, 30 bp, Artificial Sequence
  Synthetic oligonucleotide
cgccggagcgagctggtcaggtgcgattgt

SEQ ID NO: 23882 - DNA, 30 bp, Artificial Sequence
  Synthetic oligonucleotide
cgaggttatcagtaaatacagaccaaaatt

SEQ ID NO: 23883 - DNA, 30 bp, Artificial Sequence
  Synthetic oligonucleotide
gtgagcaacctcacacgactaggaccaatt

SEQ ID NO: 23884 - DNA, 30 bp, Artificial Sequence
  Synthetic oligonucleotide
aagaggagacgaatttaaagactatcaatt

SEQ ID NO: 23885 - DNA, 30 bp, Artificial Sequence
  Synthetic oligonucleotide
cgaagagaaaacgatgtggactctaacatt

SEQ ID NO: 23886 - DNA, 30 bp, Artificial Sequence
  Synthetic oligonucleotide
atggtgcgggaagtgatgcgatctaccatt

SEQ ID NO: 23887 - DNA, 30 bp, Artificial Sequence
  Synthetic oligonucleotide
ccagaggaggcggcagtactgattgggatt

SEQ ID NO: 23888 - DNA, 30 bp, Artificial Sequence
  Synthetic oligonucleotide
cgtgaaaggtcataggcgaaatcgtggatt

SEQ ID NO: 23889 - DNA, 30 bp, Artificial Sequence
  Synthetic oligonucleotide
caaggaagtacgaagaaactgctaattatt

SEQ ID NO: 23890 - DNA, 30 bp, Artificial Sequence
  Synthetic oligonucleotide
aggacgacgacataacagactgtgtagctt

SEQ ID NO: 23891 - DNA, 30 bp, Artificial Sequence
  Synthetic oligonucleotide
taaaatcgaggagccaaacaagatcggctt

SEQ ID NO: 23892 - DNA, 30 bp, Artificial Sequence
  Synthetic oligonucleotide
tcacgactacaatgaataggaagcgctctt

SEQ ID NO: 23893 - DNA, 30 bp, Artificial Sequence
  Synthetic oligonucleotide
acggacgaaagttgaagacaggatcgtctt

SEQ ID NO: 23894 - DNA, 30 bp, Artificial Sequence
  Synthetic oligonucleotide
gggcgtaccatcgtaagtaggaccagagtt

SEQ ID NO: 23895 - DNA, 30 bp, Artificial Sequence
  Synthetic oligonucleotide
caatcgcgatttaacaggtgtaccagagtt

SEQ ID NO: 23896 - DNA, 30 bp, Artificial Sequence
  Synthetic oligonucleotide
caaggtgtacataggaagagggggggagtt

SEQ ID NO: 23897 - DNA, 30 bp, Artificial Sequence
  Synthetic oligonucleotide
tgcgggcagatagcgccatgagaaatagtt

SEQ ID NO: 23898 - DNA, 30 bp, Artificial Sequence
  Synthetic oligonucleotide
cagagtgcatgagcacagcgagggaccgtt

SEQ ID NO: 23899 - DNA, 30 bp, Artificial Sequence
  Synthetic oligonucleotide
agggatgaatgagcgcaacgtatagaggtt

SEQ ID NO: 23900 - DNA, 30 bp, Artificial Sequence
  Synthetic oligonucleotide
cctcgcgccagctcaagcgcaaaggaggtt

SEQ ID NO: 23901 - DNA, 30 bp, Artificial Sequence
  Synthetic oligonucleotide
gcgcttgagacggcgaagagtgtaccggtt

SEQ ID NO: 23902 - DNA, 30 bp, Artificial Sequence
  Synthetic oligonucleotide
tcgaataacgtcggaaataggaccgtggtt

SEQ ID NO: 23903 - DNA, 30 bp, Artificial Sequence
  Synthetic oligonucleotide
accacaaaggagcaacggcgttcacaaaaa

SEQ ID NO: 23904 - DNA, 30 bp, Artificial Sequence
  Synthetic oligonucleotide
acatagcaaaaattgctatggcacgaaaaa

SEQ ID NO: 23905 - DNA, 30 bp, Artificial Sequence
  Synthetic oligonucleotide
cgggaggtaatatcgcgacataccacaaaa

SEQ ID NO: 23906 - DNA, 30 bp, Artificial Sequence
  Synthetic oligonucleotide
gaccaaagaaaaaaactcaacactacaaaa

SEQ ID NO: 23907 - DNA, 30 bp, Artificial Sequence
  Synthetic oligonucleotide
acgcgaaaagtagatgcgaaattaccaaaa

SEQ ID NO: 23908 - DNA, 30 bp, Artificial Sequence
  Synthetic oligonucleotide
ttatccgaccggatgaaaaaacgcccaaaa

SEQ ID NO: 23909 - DNA, 30 bp, Artificial Sequence
  Synthetic oligonucleotide
aggtgctacacacatacctggacagcaaaa

SEQ ID NO: 23910 - DNA, 30 bp, Artificial Sequence
  Synthetic oligonucleotide
catacaaacgtcgacccaaactggtcaaaa

SEQ ID NO: 23911 - DNA, 30 bp, Artificial Sequence
  Synthetic oligonucleotide
ctctaaagggtgaagggatccacgagaaaa

SEQ ID NO: 23912 - DNA, 30 bp, Artificial Sequence
  Synthetic oligonucleotide
agcaccctaaaccgcgaagaaaaacgaaaa

SEQ ID NO: 23913 - DNA, 30 bp, Artificial Sequence
  Synthetic oligonucleotide
gaagtccacacaggcaggtcagaccgaaaa

SEQ ID NO: 23914 - DNA, 30 bp, Artificial Sequence
  Synthetic oligonucleotide
ccatcacggagggcatggtgtagtggaaaa

SEQ ID NO: 23915 - DNA, 30 bp, Artificial Sequence
  Synthetic oligonucleotide
gggggtgaaatagcgttagtaagatgaaaa

SEQ ID NO: 23916 - DNA, 30 bp, Artificial Sequence
  Synthetic oligonucleotide
atgtcaggcgggcagacgagggggctaaaa

SEQ ID NO: 23917 - DNA, 30 bp, Artificial Sequence
  Synthetic oligonucleotide
gtgaggacagggtagagtgtcccccacaaa

SEQ ID NO: 23918 - DNA, 30 bp, Artificial Sequence
  Synthetic oligonucleotide
tcgaagcaacctcaaaaatctccgaccaaa

SEQ ID NO: 23919 - DNA, 30 bp, Artificial Sequence
  Synthetic oligonucleotide
gggcgcaagagtgccacaggtcgtcccaaa

SEQ ID NO: 23920 - DNA, 30 bp, Artificial Sequence
  Synthetic oligonucleotide
cacaacgtatacggtacggagtacgccaaa

SEQ ID NO: 23921 - DNA, 30 bp, Artificial Sequence
  Synthetic oligonucleotide
ccgcaactcatgggaagcaagtccagcaaa

SEQ ID NO: 23922 - DNA, 30 bp, Artificial Sequence
  Synthetic oligonucleotide
acgaagaaccgcctaaacaaaaatcgcaaa

SEQ ID NO: 23923 - DNA, 30 bp, Artificial Sequence
  Synthetic oligonucleotide
caagcacacctgaaactcgcgccttgcaaa

SEQ ID NO: 23924 - DNA, 30 bp, Artificial Sequence
  Synthetic oligonucleotide
gggccatgcccgatcacactacaaaagaaa

SEQ ID NO: 23925 - DNA, 30 bp, Artificial Sequence
  Synthetic oligonucleotide
caggcaagggtagtgtacctttacaagaaa

SEQ ID NO: 23926 - DNA, 30 bp, Artificial Sequence
  Synthetic oligonucleotide
caagaactgttaaacaaacctcagtagaaa

SEQ ID NO: 23927 - DNA, 30 bp, Artificial Sequence
  Synthetic oligonucleotide
cgctaatgagggttcaacacatcgacgaaa

SEQ ID NO: 23928 - DNA, 30 bp, Artificial Sequence
  Synthetic oligonucleotide
agctagtatattttcaccagtgtgacgaaa

SEQ ID NO: 23929 - DNA, 30 bp, Artificial Sequence
  Synthetic oligonucleotide
gtggtgtcatgctaacagtggcgggggaaa

SEQ ID NO: 23930 - DNA, 30 bp, Artificial Sequence
  Synthetic oligonucleotide
tctccgaagtcgggtcacatacatgggaaa

SEQ ID NO: 23931 - DNA, 30 bp, Artificial Sequence
  Synthetic oligonucleotide
tgttgcacaccaaacaaccagatgtggaaa

SEQ ID NO: 23932 - DNA, 30 bp, Artificial Sequence
  Synthetic oligonucleotide
gagctagttaccgaaaatcttacactgaaa

SEQ ID NO: 23933 - DNA, 30 bp, Artificial Sequence
  Synthetic oligonucleotide
taacgcaccgggctacggaataaggataaa

SEQ ID NO: 23934 - DNA, 30 bp, Artificial Sequence
  Synthetic oligonucleotide
gtcagaggcaatcaggagctggtgactaaa

SEQ ID NO: 23935 - DNA, 30 bp, Artificial Sequence
  Synthetic oligonucleotide
aggccaccataaaagtttaggatgagtaaa

SEQ ID NO: 23936 - DNA, 30 bp, Artificial Sequence
  Synthetic oligonucleotide
tcgtagtcgtatgccgtctccacatgtaaa

SEQ ID NO: 23937 - DNA, 30 bp, Artificial Sequence
  Synthetic oligonucleotide
atgcgacaagaatgatgaagtcgatgtaaa

SEQ ID NO: 23938 - DNA, 30 bp, Artificial Sequence
  Synthetic oligonucleotide
agaaagccgagaatgtctagtgagattaaa

SEQ ID NO: 23939 - DNA, 30 bp, Artificial Sequence
  Synthetic oligonucleotide
ctgccaagacctcaaggcaaaaggaaacaa

SEQ ID NO: 23940 - DNA, 30 bp, Artificial Sequence
  Synthetic oligonucleotide
agacctacgccactcccatcaccacaacaa

SEQ ID NO: 23941 - DNA, 30 bp, Artificial Sequence
  Synthetic oligonucleotide
aagcgcaatggatgaggcgagtggcaacaa

SEQ ID NO: 23942 - DNA, 30 bp, Artificial Sequence
  Synthetic oligonucleotide
gtatgggcagaaccacgaagctccagacaa

SEQ ID NO: 23943 - DNA, 30 bp, Artificial Sequence
  Synthetic oligonucleotide
taatcacctggaagcatggtcaaaggacaa

SEQ ID NO: 23944 - DNA, 30 bp, Artificial Sequence
  Synthetic oligonucleotide
taacgaaagtcaggaaaacaaataggacaa

SEQ ID NO: 23945 - DNA, 30 bp, Artificial Sequence
  Synthetic oligonucleotide
ccagatggcggcggggttccggaatgacaa

SEQ ID NO: 23946 - DNA, 30 bp, Artificial Sequence
  Synthetic oligonucleotide
gtgactgaagtgttggtaagaaggatacaa

SEQ ID NO: 23947 - DNA, 30 bp, Artificial Sequence
  Synthetic oligonucleotide
cataacagtatcagtccaaggccgagccaa

SEQ ID NO: 23948 - DNA, 30 bp, Artificial Sequence
  Synthetic oligonucleotide
acacgatattaacgtagaatgaggcgccaa

SEQ ID NO: 23949 - DNA, 30 bp, Artificial Sequence
  Synthetic oligonucleotide
cagtcgcgtaagccaaattcgtacggccaa

SEQ ID NO: 23950 - DNA, 30 bp, Artificial Sequence
  Synthetic oligonucleotide
gttgctgtacaaacacggatatgaaagcaa

SEQ ID NO: 23951 - DNA, 30 bp, Artificial Sequence
  Synthetic oligonucleotide
tctgttcaccgaaaaactcaacctaagcaa

SEQ ID NO: 23952 - DNA, 30 bp, Artificial Sequence
  Synthetic oligonucleotide
ccagtcagacaactagcttaccaccagcaa

SEQ ID NO: 23953 - DNA, 30 bp, Artificial Sequence
  Synthetic oligonucleotide
gacaagccggaagatactgtgtgccagcaa

SEQ ID NO: 23954 - DNA, 30 bp, Artificial Sequence
  Synthetic oligonucleotide
tacacgggagggaaggtttcgcgagagcaa

SEQ ID NO: 23955 - DNA, 30 bp, Artificial Sequence
  Synthetic oligonucleotide
agaagcgaagcgccagacccaaactagcaa

SEQ ID NO: 23956 - DNA, 30 bp, Artificial Sequence
  Synthetic oligonucleotide
atggcacttggattcgaaaactctacgcaa

SEQ ID NO: 23957 - DNA, 30 bp, Artificial Sequence
  Synthetic oligonucleotide
ggacgtgtccaggcacgataaattgcgcaa

SEQ ID NO: 23958 - DNA, 30 bp, Artificial Sequence
  Synthetic oligonucleotide
aggtggtacaaatgggcaagaacaaggcaa

SEQ ID NO: 23959 - DNA, 30 bp, Artificial Sequence
  Synthetic oligonucleotide
acgtgatacatgttggaaatggtcaatcaa

SEQ ID NO: 23960 - DNA, 30 bp, Artificial Sequence
  Synthetic oligonucleotide
cagaattggcacgtgtacatgagaactcaa

SEQ ID NO: 23961 - DNA, 30 bp, Artificial Sequence
  Synthetic oligonucleotide
aggaatatgatgaatggccgatcgactcaa

SEQ ID NO: 23962 - DNA, 30 bp, Artificial Sequence
  Synthetic oligonucleotide
ggtgcaatcgttgcgtaaaagatgactcaa

SEQ ID NO: 23963 - DNA, 30 bp, Artificial Sequence
  Synthetic oligonucleotide
aggtgacaatctgtaggagccagtgctcaa

SEQ ID NO: 23964 - DNA, 30 bp, Artificial Sequence
  Synthetic oligonucleotide
cgcaactcagcagcggtgaagttgagtcaa

SEQ ID NO: 23965 - DNA, 30 bp, Artificial Sequence
  Synthetic oligonucleotide
ctcaccgggcgaagtcgcaacccagttcaa

SEQ ID NO: 23966 - DNA, 30 bp, Artificial Sequence
  Synthetic oligonucleotide
tagtcgacataagtaagtgcgcacgaagaa

SEQ ID NO: 23967 - DNA, 30 bp, Artificial Sequence
  Synthetic oligonucleotide
caataggtacacacccaagttattgaagaa

SEQ ID NO: 23968 - DNA, 30 bp, Artificial Sequence
  Synthetic oligonucleotide
gaggctaacacaggctagttatcgacagaa

SEQ ID NO: 23969 - DNA, 30 bp, Artificial Sequence
  Synthetic oligonucleotide
gcaggaacctgcctacagtagataccagaa

SEQ ID NO: 23970 - DNA, 30 bp, Artificial Sequence
  Synthetic oligonucleotide
gcgtccctggaaatagcgataagcagagaa

SEQ ID NO: 23971 - DNA, 30 bp, Artificial Sequence
  Synthetic oligonucleotide
cctaaaatgatgaatatcagtacgagagaa

SEQ ID NO: 23972 - DNA, 30 bp, Artificial Sequence
  Synthetic oligonucleotide
aattgccgccgaggtacatagaaaatagaa

SEQ ID NO: 23973 - DNA, 30 bp, Artificial Sequence
  Synthetic oligonucleotide
ccatgggacactttccatagcgaagtagaa

SEQ ID NO: 23974 - DNA, 30 bp, Artificial Sequence
  Synthetic oligonucleotide
aaacgaccgatgggaaaggaggaagtagaa

SEQ ID NO: 23975 - DNA, 30 bp, Artificial Sequence
  Synthetic oligonucleotide
ggaaaagtgtaggggtaaggtccaaacgaa

SEQ ID NO: 23976 - DNA, 30 bp, Artificial Sequence
  Synthetic oligonucleotide
atgggggagatagcgcggacttacaacgaa

SEQ ID NO: 23977 - DNA, 30 bp, Artificial Sequence
  Synthetic oligonucleotide
aatgccgatagtgtatccaaacagcacgaa

SEQ ID NO: 23978 - DNA, 30 bp, Artificial Sequence
  Synthetic oligonucleotide
tgcggggtaagtagtagaaataagtccgaa

SEQ ID NO: 23979 - DNA, 30 bp, Artificial Sequence
  Synthetic oligonucleotide
ctcaacaggagaaaacatatacggtccgaa

SEQ ID NO: 23980 - DNA, 30 bp, Artificial Sequence
  Synthetic oligonucleotide
taaggagaatggaacgagaatgacagcgaa

SEQ ID NO: 23981 - DNA, 30 bp, Artificial Sequence
  Synthetic oligonucleotide
tgaacgcggagaagtatgcgccagagcgaa

SEQ ID NO: 23982 - DNA, 30 bp, Artificial Sequence
  Synthetic oligonucleotide
cgatagatgttaacgaaggctccgaaggaa

SEQ ID NO: 23983 - DNA, 30 bp, Artificial Sequence
  Synthetic oligonucleotide
ctagctgagacttgggggatggattaggaa

SEQ ID NO: 23984 - DNA, 30 bp, Artificial Sequence
  Synthetic oligonucleotide
cgtgtgagggtagcgattaccttgccggaa

SEQ ID NO: 23985 - DNA, 30 bp, Artificial Sequence
  Synthetic oligonucleotide
aagggcgttagaaagaagttgtagtcggaa

SEQ ID NO: 23986 - DNA, 30 bp, Artificial Sequence
  Synthetic oligonucleotide
aacaacaatgcgtatgggaccgtgagggaa

SEQ ID NO: 23987 - DNA, 30 bp, Artificial Sequence
  Synthetic oligonucleotide
cacgaggttatacagacagagtctagggaa

SEQ ID NO: 23988 - DNA, 30 bp, Artificial Sequence
  Synthetic oligonucleotide
aaggaaacttctgtagtgagtgaacgggaa

SEQ ID NO: 23989 - DNA, 30 bp, Artificial Sequence
  Synthetic oligonucleotide
cgatagagagcggatcgaaccggccgggaa

SEQ ID NO: 23990 - DNA, 30 bp, Artificial Sequence
  Synthetic oligonucleotide
accactagaaaatgccaagtgtctcgggaa

SEQ ID NO: 23991 - DNA, 30 bp, Artificial Sequence
  Synthetic oligonucleotide
tacgacatgacgtaatgatggtgggtggaa

SEQ ID NO: 23992 - DNA, 30 bp, Artificial Sequence
  Synthetic oligonucleotide
cgtctcggcagatagctccgaaatgatgaa

SEQ ID NO: 23993 - DNA, 30 bp, Artificial Sequence
  Synthetic oligonucleotide
cacgagagagtgggggcgcaacatgatgaa

SEQ ID NO: 23994 - DNA, 30 bp, Artificial Sequence
  Synthetic oligonucleotide
tcgtgcagttgcaataaacagataccataa

SEQ ID NO: 23995 - DNA, 30 bp, Artificial Sequence
  Synthetic oligonucleotide
ggtgaacctaagataaccacgttgggataa

SEQ ID NO: 23996 - DNA, 30 bp, Artificial Sequence
  Synthetic oligonucleotide
cgcgaatgacctgcctagtccagcatataa

SEQ ID NO: 23997 - DNA, 30 bp, Artificial Sequence
  Synthetic oligonucleotide
caaaggatccgtcgcaatagcgagctataa

SEQ ID NO: 23998 - DNA, 30 bp, Artificial Sequence
  Synthetic oligonucleotide
agcgcgcaaccagtggggaagtcggtataa

SEQ ID NO: 23999 - DNA, 30 bp, Artificial Sequence
  Synthetic oligonucleotide
tcgctcaatgaagcgagagacatctagtaa

SEQ ID NO: 24000 - DNA, 30 bp, Artificial Sequence
  Synthetic oligonucleotide
acaaacgtgaagaacaaaaggtccgcttaa

SEQ ID NO: 24001 - DNA, 29 bp, Artificial Sequence
  Synthetic oligonucleotide
cgacggtgatgtgacccgctaagatttaa

SEQ ID NO: 24002 - DNA, 30 bp, Artificial Sequence
  Synthetic oligonucleotide
ggtcgtgcggcagacgaaagcctcaaaaca

SEQ ID NO: 24003 - DNA, 30 bp, Artificial Sequence
  Synthetic oligonucleotide
ctgaggcaaccattagatcatccgaaaaca

SEQ ID NO: 24004 - DNA, 30 bp, Artificial Sequence
  Synthetic oligonucleotide
cattacgagcggcaatcgatggtgcaaaca

SEQ ID NO: 24005 - DNA, 30 bp, Artificial Sequence
  Synthetic oligonucleotide
cggcttgaagtaattagcgaatcggaaaca

SEQ ID NO: 24006 - DNA, 30 bp, Artificial Sequence
  Synthetic oligonucleotide
cagttcaacgaatggatcagcgggtaaaca

SEQ ID NO: 24007 - DNA, 30 bp, Artificial Sequence
  Synthetic oligonucleotide
agcgtatatccgagaaggagagcgacaaca

SEQ ID NO: 24008 - DNA, 30 bp, Artificial Sequence
  Synthetic oligonucleotide
gcgaaaatgccgtggtcgtggaccggaaca

SEQ ID NO: 24009 - DNA, 30 bp, Artificial Sequence
  Synthetic oligonucleotide
atggaccatcagatgaaaaaacagggaaca

SEQ ID NO: 24010 - DNA, 30 bp, Artificial Sequence
  Synthetic oligonucleotide
ggaccgtgcggaactcgatggccttgaaca

SEQ ID NO: 24011 - DNA, 30 bp, Artificial Sequence
  Synthetic oligonucleotide
cagagagatacagtacaagggataataaca

SEQ ID NO: 24012 - DNA, 30 bp, Artificial Sequence
  Synthetic oligonucleotide
gaggacggtatcgaacaatatttcaacaca

SEQ ID NO: 24013 - DNA, 30 bp, Artificial Sequence
  Synthetic oligonucleotide
gtcattgaagggacaggggagttagacaca

SEQ ID NO: 24014 - DNA, 30 bp, Artificial Sequence
  Synthetic oligonucleotide
ctgcgagaaagtagaaaccgagaggacaca

SEQ ID NO: 24015 - DNA, 30 bp, Artificial Sequence
  Synthetic oligonucleotide
gggtcaagatccgagtgtacaggtgacaca

SEQ ID NO: 24016 - DNA, 30 bp, Artificial Sequence
  Synthetic oligonucleotide
ccgagtcgaatcagagggaattcctacaca

SEQ ID NO: 24017 - DNA, 30 bp, Artificial Sequence
  Synthetic oligonucleotide
atggagtgataaaaggcgccaatatccaca

SEQ ID NO: 24018 - DNA, 30 bp, Artificial Sequence
  Synthetic oligonucleotide
cgtgcacggatggtagtctggacagagaca

SEQ ID NO: 24019 - DNA, 30 bp, Artificial Sequence
  Synthetic oligonucleotide
ccaaacaaggatagccctgcatgaccgaca

SEQ ID NO: 24020 - DNA, 30 bp, Artificial Sequence
  Synthetic oligonucleotide
aggcggtactctacaattctgagtccgaca

SEQ ID NO: 24021 - DNA, 30 bp, Artificial Sequence
  Synthetic oligonucleotide
tctctagcagtgaagataggataggcgaca

SEQ ID NO: 24022 - DNA, 30 bp, Artificial Sequence
  Synthetic oligonucleotide
cgtggacaccatctatccgcatagtcgaca

SEQ ID NO: 24023 - DNA, 30 bp, Artificial Sequence
  Synthetic oligonucleotide
agtgtgggtggaagctagaacaggtataca

SEQ ID NO: 24024 - DNA, 30 bp, Artificial Sequence
  Synthetic oligonucleotide
atcgacatcctagagtaaaacaccagtaca

SEQ ID NO: 24025 - DNA, 30 bp, Artificial Sequence
  Synthetic oligonucleotide
gcagagaagagacagagcacatggagtaca

SEQ ID NO: 24026 - DNA, 30 bp, Artificial Sequence
  Synthetic oligonucleotide
cggcggagattcgttaggagagagggtaca

SEQ ID NO: 24027 - DNA, 30 bp, Artificial Sequence
  Synthetic oligonucleotide
cgtaccctacctacctgctaaaccaaacca

SEQ ID NO: 24028 - DNA, 30 bp, Artificial Sequence
  Synthetic oligonucleotide
ctgtgaaggtccaaaagggtgatggaacca

SEQ ID NO: 24029 - DNA, 31 bp, Artificial Sequence
  Synthetic oligonucleotide
ctaaggctaggaacatcaaactgtcacacca

SEQ ID NO: 24030 - DNA, 30 bp, Artificial Sequence
  Synthetic oligonucleotide
gagagatcagaaattgccaaccgatgacca

SEQ ID NO: 24031 - DNA, 30 bp, Artificial Sequence
  Synthetic oligonucleotide
atctgcggtgaggtaactgagagcgaccca

SEQ ID NO: 24032 - DNA, 30 bp, Artificial Sequence
  Synthetic oligonucleotide
tgctaccgccaaaaagtgtagcagtaccca

SEQ ID NO: 24033 - DNA, 30 bp, Artificial Sequence
  Synthetic oligonucleotide
tcgttcaacaacaccgaatcccaggcccca

SEQ ID NO: 24034 - DNA, 30 bp, Artificial Sequence
  Synthetic oligonucleotide
tcgttggataattaaccagagaccagccca

SEQ ID NO: 24035 - DNA, 30 bp, Artificial Sequence
  Synthetic oligonucleotide
tcgaacggtacaatgagaatgccccgccca

SEQ ID NO: 24036 - DNA, 30 bp, Artificial Sequence
  Synthetic oligonucleotide
taagggatgtaccgaggaggggcgtgccca

SEQ ID NO: 24037 - DNA, 30 bp, Artificial Sequence
  Synthetic oligonucleotide
cggggtaaccgagatacaaggggtctccca

SEQ ID NO: 24038 - DNA, 30 bp, Artificial Sequence
  Synthetic oligonucleotide
acatcaagcgaagagcgagtcgatgtccca

SEQ ID NO: 24039 - DNA, 30 bp, Artificial Sequence
  Synthetic oligonucleotide
ttaggcctgcgccccgaggagtacgagcca

SEQ ID NO: 24040 - DNA, 30 bp, Artificial Sequence
  Synthetic oligonucleotide
tctcaacgaattatacaacataagcggcca

SEQ ID NO: 24041 - DNA, 30 bp, Artificial Sequence
  Synthetic oligonucleotide
tgataacactctaaatgagtaacgatgcca

SEQ ID NO: 24042 - DNA, 30 bp, Artificial Sequence
  Synthetic oligonucleotide
acgattgcgccccaagcgtaagcacatcca

SEQ ID NO: 24043 - DNA, 30 bp, Artificial Sequence
  Synthetic oligonucleotide
tggcacaaggtcgagccgactaagcatcca

SEQ ID NO: 24044 - DNA, 30 bp, Artificial Sequence
  Synthetic oligonucleotide
tgggaggaataagtgcacgctgacactcca

SEQ ID NO: 24045 - DNA, 30 bp, Artificial Sequence
  Synthetic oligonucleotide
ggtgagggataacggggatgcgaacgtcca

SEQ ID NO: 24046 - DNA, 30 bp, Artificial Sequence
  Synthetic oligonucleotide
ggtaaggaactctcgtccgatagccaagca

SEQ ID NO: 24047 - DNA, 30 bp, Artificial Sequence
  Synthetic oligonucleotide
agcaaggccgggagccagatctccgaagca

SEQ ID NO: 24048 - DNA, 30 bp, Artificial Sequence
  Synthetic oligonucleotide
agacgatggcggtgcgataccctcacagca

SEQ ID NO: 24049 - DNA, 30 bp, Artificial Sequence
  Synthetic oligonucleotide
tagggaacggaagaattcctggctacagca

SEQ ID NO: 24050 - DNA, 30 bp, Artificial Sequence
  Synthetic oligonucleotide
acgggcgtcgtatctcagtcctccccagca

SEQ ID NO: 24051 - DNA, 30 bp, Artificial Sequence
  Synthetic oligonucleotide
cagggtagacgaaatagggacccagcagca

SEQ ID NO: 24052 - DNA, 30 bp, Artificial Sequence
  Synthetic oligonucleotide
gggggtagaatgacaagtggggagagagca

SEQ ID NO: 24053 - DNA, 30 bp, Artificial Sequence
  Synthetic oligonucleotide
gaaagaaacaacgagttaagagcaatagca

SEQ ID NO: 24054 - DNA, 30 bp, Artificial Sequence
  Synthetic oligonucleotide
ggcgaaccgatgttgctgtaaaaagtagca

SEQ ID NO: 24055 - DNA, 30 bp, Artificial Sequence
  Synthetic oligonucleotide
acgagagttatcaaaaaattcggggtagca

SEQ ID NO: 24056 - DNA, 30 bp, Artificial Sequence
  Synthetic oligonucleotide
cggcatctaataagcggggcaatcaacgca

SEQ ID NO: 24057 - DNA, 30 bp, Artificial Sequence
  Synthetic oligonucleotide
agcgaatcaaaggaactaatcgcatacgca

SEQ ID NO: 24058 - DNA, 30 bp, Artificial Sequence
  Synthetic oligonucleotide
tcacagccgagacaagaacgtaactgcgca

SEQ ID NO: 24059 - DNA, 30 bp, Artificial Sequence
  Synthetic oligonucleotide
cccaaaccgaatcaagatgaccacctcgca

SEQ ID NO: 24060 - DNA, 30 bp, Artificial Sequence
  Synthetic oligonucleotide
tcataatcaggatacgggccaagtgtcgca

SEQ ID NO: 24061 - DNA, 30 bp, Artificial Sequence
  Synthetic oligonucleotide
gactccaagactgaggacaagacagaggca

SEQ ID NO: 24062 - DNA, 30 bp, Artificial Sequence
  Synthetic oligonucleotide
gcgaatacactcataacaagagttccggca

SEQ ID NO: 24063 - DNA, 30 bp, Artificial Sequence
  Synthetic oligonucleotide
catggtaattaagaaacaggcctccgggca

SEQ ID NO: 24064 - DNA, 30 bp, Artificial Sequence
  Synthetic oligonucleotide
gtcgcgaaccagtggggaaggaagtgggca

SEQ ID NO: 24065 - DNA, 30 bp, Artificial Sequence
  Synthetic oligonucleotide
cgaaacaaggaggctaggaaatggtgggca

SEQ ID NO: 24066 - DNA, 30 bp, Artificial Sequence
  Synthetic oligonucleotide
agggaacaaaggacatattacgtcatggca

SEQ ID NO: 24067 - DNA, 30 bp, Artificial Sequence
  Synthetic oligonucleotide
cgacttggacggcgcaattcaaaagtggca

SEQ ID NO: 24068 - DNA, 30 bp, Artificial Sequence
  Synthetic oligonucleotide
catgaaaaccagtcaacatcccaagctgca

SEQ ID NO: 24069 - DNA, 30 bp, Artificial Sequence
  Synthetic oligonucleotide
tcaattgggtgggagaaagaaggcagtgca

SEQ ID NO: 24070 - DNA, 30 bp, Artificial Sequence
  Synthetic oligonucleotide
tcaaggggaattcgctcaagcgcgagtgca

SEQ ID NO: 24071 - DNA, 30 bp, Artificial Sequence
  Synthetic oligonucleotide
taggcagggtctacaaggaagcaccgtgca

SEQ ID NO: 24072 - DNA, 30 bp, Artificial Sequence
  Synthetic oligonucleotide
tgggaggtatagaaaatctgaggtcgtgca

SEQ ID NO: 24073 - DNA, 30 bp, Artificial Sequence
  Synthetic oligonucleotide
ggctaggtggtagtgtagcaactcggtgca

SEQ ID NO: 24074 - DNA, 30 bp, Artificial Sequence
  Synthetic oligonucleotide
acgacgtggttgtgtgactgtgcatgtgca

SEQ ID NO: 24075 - DNA, 30 bp, Artificial Sequence
  Synthetic oligonucleotide
gagaagggtgaaaatgagtaaaattgtgca

SEQ ID NO: 24076 - DNA, 30 bp, Artificial Sequence
  Synthetic oligonucleotide
cgagtatcgtgtagcggggtggttgttgca

SEQ ID NO: 24077 - DNA, 30 bp, Artificial Sequence
  Synthetic oligonucleotide
aaacagggggacgttatgttgtgcaaatca

SEQ ID NO: 24078 - DNA, 30 bp, Artificial Sequence
  Synthetic oligonucleotide
cagattgcgaattaaatagcagccagatca

SEQ ID NO: 24079 - DNA, 30 bp, Artificial Sequence
  Synthetic oligonucleotide
agggaatcagcaccggacgggaggcgatca

SEQ ID NO: 24080 - DNA, 30 bp, Artificial Sequence
  Synthetic oligonucleotide
gagcaaaaccaaacacggaataggcactca

SEQ ID NO: 24081 - DNA, 30 bp, Artificial Sequence
  Synthetic oligonucleotide
atgcttccggaagaagatgtgacgtactca

SEQ ID NO: 24082 - DNA, 30 bp, Artificial Sequence
  Synthetic oligonucleotide
cggtagaaagttgaatcgctcggtaagtca

SEQ ID NO: 24083 - DNA, 30 bp, Artificial Sequence
  Synthetic oligonucleotide
gcgcataagaaagtgaagtttgatcagtca

SEQ ID NO: 24084 - DNA, 30 bp, Artificial Sequence
  Synthetic oligonucleotide
gaagcaaaaatcggtgatacagtatggtca

SEQ ID NO: 24085 - DNA, 30 bp, Artificial Sequence
  Synthetic oligonucleotide
catgggggacgataacggaagtgaatgtca

SEQ ID NO: 24086 - DNA, 30 bp, Artificial Sequence
  Synthetic oligonucleotide
cacggattaagtaacaggagtatgagttca

SEQ ID NO: 24087 - DNA, 30 bp, Artificial Sequence
  Synthetic oligonucleotide
taaggcggtcacggcactatatcgatttca

SEQ ID NO: 24088 - DNA, 30 bp, Artificial Sequence
  Synthetic oligonucleotide
agttcccgaagatatcaagagcctgaaaga

SEQ ID NO: 24089 - DNA, 30 bp, Artificial Sequence
  Synthetic oligonucleotide
acgtgcgcaggacacacgcggacctaaaga

SEQ ID NO: 24090 - DNA, 30 bp, Artificial Sequence
  Synthetic oligonucleotide
accgggagatacgttactcggtaagcaaga

SEQ ID NO: 24091 - DNA, 30 bp, Artificial Sequence
  Synthetic oligonucleotide
aaggtcgagaataacaggacaaggtcaaga

SEQ ID NO: 24092 - DNA, 30 bp, Artificial Sequence
  Synthetic oligonucleotide
cccttagattggagaccctagggaagaaga

SEQ ID NO: 24093 - DNA, 30 bp, Artificial Sequence
  Synthetic oligonucleotide
gggaaccactatgacccacacaggcgaaga

SEQ ID NO: 24094 - DNA, 30 bp, Artificial Sequence
  Synthetic oligonucleotide
aatacaagcaacataaaacatgatggaaga

SEQ ID NO: 24095 - DNA, 30 bp, Artificial Sequence
  Synthetic oligonucleotide
ggacaactgaatcggtgggacacgataaga

SEQ ID NO: 24096 - DNA, 30 bp, Artificial Sequence
  Synthetic oligonucleotide
cgccaccacaaatatagaacgttgataaga

SEQ ID NO: 24097 - DNA, 30 bp, Artificial Sequence
  Synthetic oligonucleotide
ggtggcaacagggatagttacgcgaacaga

SEQ ID NO: 24098 - DNA, 30 bp, Artificial Sequence
  Synthetic oligonucleotide
atctgcgggagaagggttgggcgatacaga

SEQ ID NO: 24099 - DNA, 30 bp, Artificial Sequence
  Synthetic oligonucleotide
cgttcgtatgggcgaatgtccgactacaga

SEQ ID NO: 24100 - DNA, 30 bp, Artificial Sequence
  Synthetic oligonucleotide
cgaatgtgaacgccgtgattggcctacaga

SEQ ID NO: 24101 - DNA, 30 bp, Artificial Sequence
  Synthetic oligonucleotide
gacggggattcgcgggtgcgatgaaccaga

SEQ ID NO: 24102 - DNA, 30 bp, Artificial Sequence
  Synthetic oligonucleotide
gctgacatagaagattaggggttaaccaga

SEQ ID NO: 24103 - DNA, 30 bp, Artificial Sequence
  Synthetic oligonucleotide
aaaagaccgcgtagtggggtggatgccaga

SEQ ID NO: 24104 - DNA, 31 bp, Artificial Sequence
  Synthetic oligonucleotide
gcggcggggggggttatccgtacgtgccaga

SEQ ID NO: 24105 - DNA, 30 bp, Artificial Sequence
  Synthetic oligonucleotide
agtgggtggagcgtggaagatgtctccaga

SEQ ID NO: 24106 - DNA, 30 bp, Artificial Sequence
  Synthetic oligonucleotide
cgataatggttaagtggagaatcgctcaga

SEQ ID NO: 24107 - DNA, 30 bp, Artificial Sequence
  Synthetic oligonucleotide
catggggggaaagctaagacattcttcaga

SEQ ID NO: 24108 - DNA, 31 bp, Artificial Sequence
  Synthetic oligonucleotide
agggggctgggcaagccgaaatgaaccgaga

SEQ ID NO: 24109 - DNA, 30 bp, Artificial Sequence
  Synthetic oligonucleotide
cgaggcaacgttgggagcggtttaccgaga

SEQ ID NO: 24110 - DNA, 30 bp, Artificial Sequence
  Synthetic oligonucleotide
tagtggcgacaataacctaaaaaaaggaga

SEQ ID NO: 24111 - DNA, 30 bp, Artificial Sequence
  Synthetic oligonucleotide
caccaggatagaagggatcttgccaggaga

SEQ ID NO: 24112 - DNA, 30 bp, Artificial Sequence
  Synthetic oligonucleotide
tgtgaaagtaatctgcacaggtccaggaga

SEQ ID NO: 24113 - DNA, 30 bp, Artificial Sequence
  Synthetic oligonucleotide
ccgttaggaagtatgtgttacagggggaga

SEQ ID NO: 24114 - DNA, 30 bp, Artificial Sequence
  Synthetic oligonucleotide
gtacacacgggtacgactaaatcgtggaga

SEQ ID NO: 24115 - DNA, 30 bp, Artificial Sequence
  Synthetic oligonucleotide
tggacgacaagtcacatgacgtgatataga

SEQ ID NO: 24116 - DNA, 30 bp, Artificial Sequence
  Synthetic oligonucleotide
ccgtaacctattcgagaagagggcggtaga

SEQ ID NO: 24117 - DNA, 30 bp, Artificial Sequence
  Synthetic oligonucleotide
ttcgaagtgccggcggttgaagagggtaga

SEQ ID NO: 24118 - DNA, 30 bp, Artificial Sequence
  Synthetic oligonucleotide
gcgatcagaacaagtacgcccattcttaga

SEQ ID NO: 24119 - DNA, 30 bp, Artificial Sequence
  Synthetic oligonucleotide
acaaaagccggtcaacacataagagcacga

SEQ ID NO: 24120 - DNA, 30 bp, Artificial Sequence
  Synthetic oligonucleotide
gggcacgtatgtcgagatcccttataccga

SEQ ID NO: 24121 - DNA, 30 bp, Artificial Sequence
  Synthetic oligonucleotide
ctagggaaagaatcaggagagtcgacccga

SEQ ID NO: 24122 - DNA, 30 bp, Artificial Sequence
  Synthetic oligonucleotide
ggtgagtagataactacagtaggacagcga

SEQ ID NO: 24123 - DNA, 30 bp, Artificial Sequence
  Synthetic oligonucleotide
aacgcccgaactgggatttaagatcagcga

SEQ ID NO: 24124 - DNA, 30 bp, Artificial Sequence
  Synthetic oligonucleotide
ctaagtatgacttggagcgaagaagtgcga

SEQ ID NO: 24125 - DNA, 30 bp, Artificial Sequence
  Synthetic oligonucleotide
caggcgaaacccatatactatgaccatcga

SEQ ID NO: 24126 - DNA, 30 bp, Artificial Sequence
  Synthetic oligonucleotide
cggacagcggaaaccaccatctatgatcga

SEQ ID NO: 24127 - DNA, 30 bp, Artificial Sequence
  Synthetic oligonucleotide
aacgaaatcctcaagcctataaacactcga

SEQ ID NO: 24128 - DNA, 30 bp, Artificial Sequence
  Synthetic oligonucleotide
ctaccaacggatgtaaggaattctgttcga

SEQ ID NO: 24129 - DNA, 30 bp, Artificial Sequence
  Synthetic oligonucleotide
gagccggatgtcgcctagggaagaaaagga

SEQ ID NO: 24130 - DNA, 30 bp, Artificial Sequence
  Synthetic oligonucleotide
agggcaacattgaaagggaatgtacaagga

SEQ ID NO: 24131 - DNA, 30 bp, Artificial Sequence
  Synthetic oligonucleotide
ggaaaggagtgtttagggcatagtcaagga

SEQ ID NO: 24132 - DNA, 30 bp, Artificial Sequence
  Synthetic oligonucleotide
aacggactctatcgccatacggaagaagga

SEQ ID NO: 24133 - DNA, 30 bp, Artificial Sequence
  Synthetic oligonucleotide
cagagtatagggaagagtagaatggaagga

SEQ ID NO: 24134 - DNA, 30 bp, Artificial Sequence
  Synthetic oligonucleotide
ggaatagcaaggagaggaccggcctaagga

SEQ ID NO: 24135 - DNA, 30 bp, Artificial Sequence
  Synthetic oligonucleotide
tgcaaggcattgcgaggatcactctaagga

SEQ ID NO: 24136 - DNA, 30 bp, Artificial Sequence
  Synthetic oligonucleotide
aggctaaggcgtacataacggaggtaagga

SEQ ID NO: 24137 - DNA, 30 bp, Artificial Sequence
  Synthetic oligonucleotide
gacgcatgggtgagcagtatttaaacagga

SEQ ID NO: 24138 - DNA, 30 bp, Artificial Sequence
  Synthetic oligonucleotide
atacagtgtaagtaaagccagccgcgagga

SEQ ID NO: 24139 - DNA, 30 bp, Artificial Sequence
  Synthetic oligonucleotide
agcaagggaccgttataagtcgaaggagga

SEQ ID NO: 24140 - DNA, 31 bp, Artificial Sequence
  Synthetic oligonucleotide
gataagggccagcgaattgcgaccagtagga

SEQ ID NO: 24141 - DNA, 30 bp, Artificial Sequence
  Synthetic oligonucleotide
aaggacgaactgataacaagtaatcacgga

SEQ ID NO: 24142 - DNA, 30 bp, Artificial Sequence
  Synthetic oligonucleotide
aaccaagataacataacatgtcaaaccgga

SEQ ID NO: 24143 - DNA, 30 bp, Artificial Sequence
  Synthetic oligonucleotide
gtaatatgaaagcggaatgagtaaggcgga

SEQ ID NO: 24144 - DNA, 30 bp, Artificial Sequence
  Synthetic oligonucleotide
cgtagactggtctccacggggtaaggcgga

SEQ ID NO: 24145 - DNA, 30 bp, Artificial Sequence
  Synthetic oligonucleotide
cacgggatgaaaatgcctcgtctatgcgga

SEQ ID NO: 24146 - DNA, 30 bp, Artificial Sequence
  Synthetic oligonucleotide
acgtactggacgagtgtgtccgcaatcgga

SEQ ID NO: 24147 - DNA, 30 bp, Artificial Sequence
  Synthetic oligonucleotide
atcagggccgaaccacttcaacgacaggga

SEQ ID NO: 24148 - DNA, 30 bp, Artificial Sequence
  Synthetic oligonucleotide
gtaagcagggggcataatagcaatcaggga

SEQ ID NO: 24149 - DNA, 30 bp, Artificial Sequence
  Synthetic oligonucleotide
gctagtgtgtgcaagtcgaatgacgaggga

SEQ ID NO: 24150 - DNA, 30 bp, Artificial Sequence
  Synthetic oligonucleotide
cacactcgacaggaacgtcaattagcggga

SEQ ID NO: 24151 - DNA, 30 bp, Artificial Sequence
  Synthetic oligonucleotide
aggaggaataacggccgcgagtctagggga

SEQ ID NO: 24152 - DNA, 30 bp, Artificial Sequence
  Synthetic oligonucleotide
tcttaaaaaaaggtagcaacagaccgggga

SEQ ID NO: 24153 - DNA, 40 bp, Artificial Sequence
  Synthetic oligonucleotide
aagataatacattcatggtatgggcggggatcggggggga

SEQ ID NO: 24154 - DNA, 30 bp, Artificial Sequence
  Synthetic oligonucleotide
atggtacgaggcttgaacagacagtgggga

SEQ ID NO: 24155 - DNA, 30 bp, Artificial Sequence
  Synthetic oligonucleotide
cgtgtcaagcctgaatgaagctgactggga

SEQ ID NO: 24156 - DNA, 30 bp, Artificial Sequence
  Synthetic oligonucleotide
cattgacaacaatctaattgcgaagtggga

SEQ ID NO: 24157 - DNA, 30 bp, Artificial Sequence
  Synthetic oligonucleotide
ggtacgtgggacaagcctaaagctgctgga

SEQ ID NO: 24158 - DNA, 30 bp, Artificial Sequence
  Synthetic oligonucleotide
gaaccgatcgactggtaggaaaggagtgga

SEQ ID NO: 24159 - DNA, 30 bp, Artificial Sequence
  Synthetic oligonucleotide
ttcgtgtgaccaagcagaagagcacgtgga

SEQ ID NO: 24160 - DNA, 30 bp, Artificial Sequence
  Synthetic oligonucleotide
ggctgatggccgatgctacgatcacgtgga

SEQ ID NO: 24161 - DNA, 30 bp, Artificial Sequence
  Synthetic oligonucleotide
cagacggctacggggaatatcgacggtgga

SEQ ID NO: 24162 - DNA, 30 bp, Artificial Sequence
  Synthetic oligonucleotide
gatcaggtcggtacaaacgcgacaaaatga

SEQ ID NO: 24163 - DNA, 31 bp, Artificial Sequence
  Synthetic oligonucleotide
acgcaatagcacaggaagggggttaaaatga

SEQ ID NO: 24164 - DNA, 30 bp, Artificial Sequence
  Synthetic oligonucleotide
ggccacaagaaggggaaacatgcagaatga

SEQ ID NO: 24165 - DNA, 30 bp, Artificial Sequence
  Synthetic oligonucleotide
cggatacgtggcgcaaacgactaaagatga

SEQ ID NO: 24166 - DNA, 30 bp, Artificial Sequence
  Synthetic oligonucleotide
gaacgactgcgaagaccagtgtaaatatga

SEQ ID NO: 24167 - DNA, 30 bp, Artificial Sequence
  Synthetic oligonucleotide
gccaggatggcaataaaccaaaagctatga

SEQ ID NO: 24168 - DNA, 30 bp, Artificial Sequence
  Synthetic oligonucleotide
gcggcgtaaccctaagtagtcaggaactga

SEQ ID NO: 24169 - DNA, 30 bp, Artificial Sequence
  Synthetic oligonucleotide
tcgcggtggggaactaaacctgagagctga

SEQ ID NO: 24170 - DNA, 30 bp, Artificial Sequence
  Synthetic oligonucleotide
tcaagggcgtgactaagccgtatcgtctga

SEQ ID NO: 24171 - DNA, 30 bp, Artificial Sequence
  Synthetic oligonucleotide
tgagctcggagagtcgggctagagaagtga

SEQ ID NO: 24172 - DNA, 30 bp, Artificial Sequence
  Synthetic oligonucleotide
aggtacggaatgaaacatctgtgaccgtga

SEQ ID NO: 24173 - DNA, 30 bp, Artificial Sequence
  Synthetic oligonucleotide
gatgaagatatgcgatgtgccgaagggtga

SEQ ID NO: 24174 - DNA, 30 bp, Artificial Sequence
  Synthetic oligonucleotide
tcgaacagaaaggagagttgggatgggtga

SEQ ID NO: 24175 - DNA, 30 bp, Artificial Sequence
  Synthetic oligonucleotide
agaatcataaaacaaagcgggtgcaattga

SEQ ID NO: 24176 - DNA, 30 bp, Artificial Sequence
  Synthetic oligonucleotide
gccagcacgaacgacaaaatgaatgcttga

SEQ ID NO: 24177 - DNA, 30 bp, Artificial Sequence
  Synthetic oligonucleotide
tatgctggactgccggacgaatccgaaata

SEQ ID NO: 24178 - DNA, 30 bp, Artificial Sequence
  Synthetic oligonucleotide
aggggcgtcataactaagtgcaaaccaata

SEQ ID NO: 24179 - DNA, 30 bp, Artificial Sequence
  Synthetic oligonucleotide
gcggggaataagatttcgagttaagcaata

SEQ ID NO: 24180 - DNA, 30 bp, Artificial Sequence
  Synthetic oligonucleotide
gagcaacggaacgacaggtggtagtgaata

SEQ ID NO: 24181 - DNA, 30 bp, Artificial Sequence
  Synthetic oligonucleotide
caccttaaaaaaacgcgatgccaacacata

SEQ ID NO: 24182 - DNA, 30 bp, Artificial Sequence
  Synthetic oligonucleotide
cggcttaccgagcacaaagtctggcacata

SEQ ID NO: 24183 - DNA, 30 bp, Artificial Sequence
  Synthetic oligonucleotide
ggcacttaatgcgaaagtagccaagacata

SEQ ID NO: 24184 - DNA, 30 bp, Artificial Sequence
  Synthetic oligonucleotide
gcaagaataagggaactcggcacatacata

SEQ ID NO: 24185 - DNA, 30 bp, Artificial Sequence
  Synthetic oligonucleotide
gcgaaggacacgatcggacaacacggcata

SEQ ID NO: 24186 - DNA, 30 bp, Artificial Sequence
  Synthetic oligonucleotide
acatgcggagccgggaaagcagggggcata

SEQ ID NO: 24187 - DNA, 30 bp, Artificial Sequence
  Synthetic oligonucleotide
ttggcccaaatcagaaaatcctcatgcata

SEQ ID NO: 24188 - DNA, 30 bp, Artificial Sequence
  Synthetic oligonucleotide
ggcggaggcgaagtatgaaatcgcacgata

SEQ ID NO: 24189 - DNA, 30 bp, Artificial Sequence
  Synthetic oligonucleotide
agtcatggcaaatgagtcgctgagaggata

SEQ ID NO: 24190 - DNA, 30 bp, Artificial Sequence
  Synthetic oligonucleotide
aggcaagggtacgggggcatacctaggata

SEQ ID NO: 24191 - DNA, 30 bp, Artificial Sequence
  Synthetic oligonucleotide
tggcagtcggctcacgagtcgccagggata

SEQ ID NO: 24192 - DNA, 30 bp, Artificial Sequence
  Synthetic oligonucleotide
ccgatggaactacgcgaggggtgcgggata

SEQ ID NO: 24193 - DNA, 30 bp, Artificial Sequence
  Synthetic oligonucleotide
agacggacatgctgacaggagaaatggata

SEQ ID NO: 24194 - DNA, 30 bp, Artificial Sequence
  Synthetic oligonucleotide
tcctgaggaacacacttggaagtgatgata

SEQ ID NO: 24195 - DNA, 30 bp, Artificial Sequence
  Synthetic oligonucleotide
ccacccacgtgaccgacgatccttatgata

SEQ ID NO: 24196 - DNA, 30 bp, Artificial Sequence
  Synthetic oligonucleotide
gacgggcgaactcgaactctgagcaatata

SEQ ID NO: 24197 - DNA, 30 bp, Artificial Sequence
  Synthetic oligonucleotide
acaaacacaaaaggagtcgtatccactata

SEQ ID NO: 24198 - DNA, 30 bp, Artificial Sequence
  Synthetic oligonucleotide
tatgctagtggcacgaagcgaaaagaacta

SEQ ID NO: 24199 - DNA, 30 bp, Artificial Sequence
  Synthetic oligonucleotide
cgccaaatggattaagggatcacatcacta

SEQ ID NO: 24200 - DNA, 30 bp, Artificial Sequence
  Synthetic oligonucleotide
cacggccacgcgaagctgagagaaatacta

SEQ ID NO: 24201 - DNA, 30 bp, Artificial Sequence
  Synthetic oligonucleotide
ccgcggaacgcgtataaatgactgctacta

SEQ ID NO: 24202 - DNA, 30 bp, Artificial Sequence
  Synthetic oligonucleotide
agggcagactaactcgccatagattaccta

SEQ ID NO: 24203 - DNA, 30 bp, Artificial Sequence
  Synthetic oligonucleotide
tgaaaccacatccatagcgaatcatcccta

SEQ ID NO: 24204 - DNA, 30 bp, Artificial Sequence
  Synthetic oligonucleotide
tcgagtaaggacgtgcgacaagttggccta

SEQ ID NO: 24205 - DNA, 30 bp, Artificial Sequence
  Synthetic oligonucleotide
tggaacagagtagacagtgggaacctccta

SEQ ID NO: 24206 - DNA, 30 bp, Artificial Sequence
  Synthetic oligonucleotide
cactaaggcaggaaactagtacaaaagcta

SEQ ID NO: 24207 - DNA, 30 bp, Artificial Sequence
  Synthetic oligonucleotide
gctcaagtgcactatccgagaagaaagcta

SEQ ID NO: 24208 - DNA, 30 bp, Artificial Sequence
  Synthetic oligonucleotide
cgctaaacgatgataagctaggagtcgcta

SEQ ID NO: 24209 - DNA, 30 bp, Artificial Sequence
  Synthetic oligonucleotide
cgtaacacaggacacatacatcttaggcta

SEQ ID NO: 24210 - DNA, 30 bp, Artificial Sequence
  Synthetic oligonucleotide
caaaaagagagtgagtgtcgtatcgggcta

SEQ ID NO: 24211 - DNA, 30 bp, Artificial Sequence
  Synthetic oligonucleotide
cgtatatgagtggaatgggggattgggcta

SEQ ID NO: 24212 - DNA, 30 bp, Artificial Sequence
  Synthetic oligonucleotide
cgaacgtcatgatgcccaacagtaatgcta

SEQ ID NO: 24213 - DNA, 30 bp, Artificial Sequence
  Synthetic oligonucleotide
agacggcgaaggagtatttgggtcatgcta

SEQ ID NO: 24214 - DNA, 30 bp, Artificial Sequence
  Synthetic oligonucleotide
cgtcaaactggcagcaaaccagcgatgcta

SEQ ID NO: 24215 - DNA, 30 bp, Artificial Sequence
  Synthetic oligonucleotide
gtcaagaacagtcgcaccgtgtgacaagta

SEQ ID NO: 24216 - DNA, 30 bp, Artificial Sequence
  Synthetic oligonucleotide
caagagcgagttggtgtaagcctcacagta

SEQ ID NO: 24217 - DNA, 30 bp, Artificial Sequence
  Synthetic oligonucleotide
cgtccaaaatgtccgacatgggagacagta

SEQ ID NO: 24218 - DNA, 30 bp, Artificial Sequence
  Synthetic oligonucleotide
caggctgaaatgctaatgccttcaagagta

SEQ ID NO: 24219 - DNA, 30 bp, Artificial Sequence
  Synthetic oligonucleotide
tcgttgaggttaaggtagtacaaatgagta

SEQ ID NO: 24220 - DNA, 30 bp, Artificial Sequence
  Synthetic oligonucleotide
tcctaagagcaaaagaaccaacaaatagta

SEQ ID NO: 24221 - DNA, 30 bp, Artificial Sequence
  Synthetic oligonucleotide
ctcgaaagcaccacacaagggcataccgta

SEQ ID NO: 24222 - DNA, 30 bp, Artificial Sequence
  Synthetic oligonucleotide
tgacgaagaccagctagcacgaaccgcgta

SEQ ID NO: 24223 - DNA, 30 bp, Artificial Sequence
  Synthetic oligonucleotide
agacatgaacaaagttgtactgccggcgta

SEQ ID NO: 24224 - DNA, 30 bp, Artificial Sequence
  Synthetic oligonucleotide
taacaggtatgggaactggatatactcgta

SEQ ID NO: 24225 - DNA, 30 bp, Artificial Sequence
  Synthetic oligonucleotide
gtgaaagctcaaggcatacgattaaaggta

SEQ ID NO: 24226 - DNA, 30 bp, Artificial Sequence
  Synthetic oligonucleotide
gctagaagagaagacaaacagtactaggta

SEQ ID NO: 24227 - DNA, 30 bp, Artificial Sequence
  Synthetic oligonucleotide
actagtgctcgggccaagggagtgtaggta

SEQ ID NO: 24228 - DNA, 30 bp, Artificial Sequence
  Synthetic oligonucleotide
ggacaagagcagattggcaactcagcggta

SEQ ID NO: 24229 - DNA, 30 bp, Artificial Sequence
  Synthetic oligonucleotide
cggttgcactatgctaaaaaacattcggta

SEQ ID NO: 24230 - DNA, 30 bp, Artificial Sequence
  Synthetic oligonucleotide
ggacgaaagaaagttagacttaaaatggta

SEQ ID NO: 24231 - DNA, 30 bp, Artificial Sequence
  Synthetic oligonucleotide
tcgcaggtaaagtacagaggaaatatggta

SEQ ID NO: 24232 - DNA, 30 bp, Artificial Sequence
  Synthetic oligonucleotide
gcatcgggttggcacggaatcacaaatgta

SEQ ID NO: 24233 - DNA, 30 bp, Artificial Sequence
  Synthetic oligonucleotide
cgagcaaccggaatgattcacgctaatgta

SEQ ID NO: 24234 - DNA, 30 bp, Artificial Sequence
  Synthetic oligonucleotide
ccgccgacgagaaacaaacactggcatgta

SEQ ID NO: 24235 - DNA, 30 bp, Artificial Sequence
  Synthetic oligonucleotide
actggtgcacctgaatatgatcggtatgta

SEQ ID NO: 24236 - DNA, 30 bp, Artificial Sequence
  Synthetic oligonucleotide
agggagccaacgacacattaagggagtgta

SEQ ID NO: 24237 - DNA, 30 bp, Artificial Sequence
  Synthetic oligonucleotide
ggctcaaggagacgagatcagggcatatta

SEQ ID NO: 24238 - DNA, 30 bp, Artificial Sequence
  Synthetic oligonucleotide
ggttccaaggacacgacaaacaacgtctta

SEQ ID NO: 24239 - DNA, 30 bp, Artificial Sequence
  Synthetic oligonucleotide
gcgagactgaagatgtaaagagtcaagtta

SEQ ID NO: 24240 - DNA, 30 bp, Artificial Sequence
  Synthetic oligonucleotide
ggacagcggggaagggcagcttgtcagtta

SEQ ID NO: 24241 - DNA, 30 bp, Artificial Sequence
  Synthetic oligonucleotide
atatggtacgacagaagaaggaagacgtta

SEQ ID NO: 24242 - DNA, 30 bp, Artificial Sequence
  Synthetic oligonucleotide
cgagaggtagcagtgctaaacatggcgtta

SEQ ID NO: 24243 - DNA, 30 bp, Artificial Sequence
  Synthetic oligonucleotide
gggacaaggaatattatatagacaatgtta

SEQ ID NO: 24244 - DNA, 30 bp, Artificial Sequence
  Synthetic oligonucleotide
tcgaaagtgtaggtggggcgtctcgaaaac

SEQ ID NO: 24245 - DNA, 30 bp, Artificial Sequence
  Synthetic oligonucleotide
ctctaggagatgtcaacagaagagggaaac

SEQ ID NO: 24246 - DNA, 30 bp, Artificial Sequence
  Synthetic oligonucleotide
gcattagcgagggtatgagaggccaacaac

SEQ ID NO: 24247 - DNA, 30 bp, Artificial Sequence
  Synthetic oligonucleotide
taacccagccggcagagaatacagcacaac

SEQ ID NO: 24248 - DNA, 30 bp, Artificial Sequence
  Synthetic oligonucleotide
ctagcccatcgaaaggatacgaaaagcaac

SEQ ID NO: 24249 - DNA, 30 bp, Artificial Sequence
  Synthetic oligonucleotide
cctaacgtgagtcggtactagccatgcaac

SEQ ID NO: 24250 - DNA, 30 bp, Artificial Sequence
  Synthetic oligonucleotide
actagctccgggtgcggaggtaagcagaac

SEQ ID NO: 24251 - DNA, 30 bp, Artificial Sequence
  Synthetic oligonucleotide
atgacatggggggtcatgaacaacgagaac

SEQ ID NO: 24252 - DNA, 30 bp, Artificial Sequence
  Synthetic oligonucleotide
tactggtgccacaatgcacgacccacgaac

SEQ ID NO: 24253 - DNA, 30 bp, Artificial Sequence
  Synthetic oligonucleotide
caggatactaatcaacccacactcacgaac

SEQ ID NO: 24254 - DNA, 30 bp, Artificial Sequence
  Synthetic oligonucleotide
tctcgccacacattgaatagcagtgcgaac

SEQ ID NO: 24255 - DNA, 30 bp, Artificial Sequence
  Synthetic oligonucleotide
ctgaatgaagaaaccaccgaggcctcgaac

SEQ ID NO: 24256 - DNA, 30 bp, Artificial Sequence
  Synthetic oligonucleotide
acatagtgatgaagtggttgtggccggaac

SEQ ID NO: 24257 - DNA, 30 bp, Artificial Sequence
  Synthetic oligonucleotide
tctgaaagcggggagtgatattaaatgaac

SEQ ID NO: 24258 - DNA, 30 bp, Artificial Sequence
  Synthetic oligonucleotide
ccagaggggtgtggatacgagaacgtgaac

SEQ ID NO: 24259 - DNA, 30 bp, Artificial Sequence
  Synthetic oligonucleotide
acccatcgggaatcaccaagtacgaataac

SEQ ID NO: 24260 - DNA, 30 bp, Artificial Sequence
  Synthetic oligonucleotide
gcacacgaagcgtccatacgtagacctaac

SEQ ID NO: 24261 - DNA, 30 bp, Artificial Sequence
  Synthetic oligonucleotide
aggataccaggtggatgccgatatagtaac

SEQ ID NO: 24262 - DNA, 30 bp, Artificial Sequence
  Synthetic oligonucleotide
cgtagaagcattgaatggcaccgatgtaac

SEQ ID NO: 24263 - DNA, 30 bp, Artificial Sequence
  Synthetic oligonucleotide
gctagtattggaaagggacagaattgtaac

SEQ ID NO: 24264 - DNA, 30 bp, Artificial Sequence
  Synthetic oligonucleotide
aggaggataaagagacggtccaagcaacac

SEQ ID NO: 24265 - DNA, 30 bp, Artificial Sequence
  Synthetic oligonucleotide
catagtccgagaagaacatcgtctgaacac

SEQ ID NO: 24266 - DNA, 30 bp, Artificial Sequence
  Synthetic oligonucleotide
gaggacaaaacgggaaaggaaccgacacac

SEQ ID NO: 24267 - DNA, 30 bp, Artificial Sequence
  Synthetic oligonucleotide
tcataccaacccgagttaccatcttcacac

SEQ ID NO: 24268 - DNA, 30 bp, Artificial Sequence
  Synthetic oligonucleotide
cgcgctaagggcgtgcactaagagagacac

SEQ ID NO: 24269 - DNA, 30 bp, Artificial Sequence
  Synthetic oligonucleotide
cggagaatacgcgtgtgggggccccgacac

SEQ ID NO: 24270 - DNA, 30 bp, Artificial Sequence
  Synthetic oligonucleotide
atcacggggtggcctgaagaagagatacac

SEQ ID NO: 24271 - DNA, 30 bp, Artificial Sequence
  Synthetic oligonucleotide
gggacgagcgagctgacaccgaaagcgcac

SEQ ID NO: 24272 - DNA, 30 bp, Artificial Sequence
  Synthetic oligonucleotide
actggagtgagatctttgagggtcgcgcac

SEQ ID NO: 24273 - DNA, 30 bp, Artificial Sequence
  Synthetic oligonucleotide
acaaaagggatacagaaaacattccgtcac

SEQ ID NO: 24274 - DNA, 30 bp, Artificial Sequence
  Synthetic oligonucleotide
gagagcgacgtcgagataggaaggggtcac

SEQ ID NO: 24275 - DNA, 30 bp, Artificial Sequence
  Synthetic oligonucleotide
cattagacgagtagagctgagcaagttcac

SEQ ID NO: 24276 - DNA, 30 bp, Artificial Sequence
  Synthetic oligonucleotide
tcgcaattggatacagataagccataagac

SEQ ID NO: 24277 - DNA, 30 bp, Artificial Sequence
  Synthetic oligonucleotide
ccattcactgtataaggtatgcatccagac

SEQ ID NO: 24278 - DNA, 30 bp, Artificial Sequence
  Synthetic oligonucleotide
gaccagcaaaaaaccaacctcccctcagac

SEQ ID NO: 24279 - DNA, 30 bp, Artificial Sequence
  Synthetic oligonucleotide
atgtaatgagcatgatgggggaatcgagac

SEQ ID NO: 24280 - DNA, 30 bp, Artificial Sequence
  Synthetic oligonucleotide
ggcgaaggtcgctacaacgcaatagtagac

SEQ ID NO: 24281 - DNA, 30 bp, Artificial Sequence
  Synthetic oligonucleotide
tggggaaaacgaggattcatcatcaccgac

SEQ ID NO: 24282 - DNA, 30 bp, Artificial Sequence
  Synthetic oligonucleotide
taggagaccagttcccccctgagcgccgac

SEQ ID NO: 24283 - DNA, 30 bp, Artificial Sequence
  Synthetic oligonucleotide
gtgaagttccaggggcgaaaagggtgcgac

SEQ ID NO: 24284 - DNA, 30 bp, Artificial Sequence
  Synthetic oligonucleotide
tgagatatctaggggcatgtggaacaggac

SEQ ID NO: 24285 - DNA, 30 bp, Artificial Sequence
  Synthetic oligonucleotide
acaaagaaacgacatagaaggattcaggac

SEQ ID NO: 24286 - DNA, 30 bp, Artificial Sequence
  Synthetic oligonucleotide
cacaataggtcactgggagtggaagaggac

SEQ ID NO: 24287 - DNA, 30 bp, Artificial Sequence
  Synthetic oligonucleotide
cgcacaaagaatcgtaaacaggttccggac

SEQ ID NO: 24288 - DNA, 30 bp, Artificial Sequence
  Synthetic oligonucleotide
cggtacaacgaatggtaccgagtcagggac

SEQ ID NO: 24289 - DNA, 30 bp, Artificial Sequence
  Synthetic oligonucleotide
acatcgcttagatacaatgagcccggggac

SEQ ID NO: 24290 - DNA, 30 bp, Artificial Sequence
  Synthetic oligonucleotide
acaagtgaactcgtccttccaagcggtgac

SEQ ID NO: 24291 - DNA, 30 bp, Artificial Sequence
  Synthetic oligonucleotide
agggagcgagactggtgggacttccttgac

SEQ ID NO: 24292 - DNA, 30 bp, Artificial Sequence
  Synthetic oligonucleotide
gagcaatcagggacagcgatagaatcatac

SEQ ID NO: 24293 - DNA, 30 bp, Artificial Sequence
  Synthetic oligonucleotide
gacctacgagacactcaagacacgagatac

SEQ ID NO: 24294 - DNA, 30 bp, Artificial Sequence
  Synthetic oligonucleotide
acgagttatgtaaggtgagtgaagcgatac

SEQ ID NO: 24295 - DNA, 30 bp, Artificial Sequence
  Synthetic oligonucleotide
aacgtaacagagatcaagtaggagcgatac

SEQ ID NO: 24296 - DNA, 30 bp, Artificial Sequence
  Synthetic oligonucleotide
ccggcacacccgtagagacaaccacactac

SEQ ID NO: 24297 - DNA, 30 bp, Artificial Sequence
  Synthetic oligonucleotide
gggcaagggcaccttaaactgtgtagctac

SEQ ID NO: 24298 - DNA, 30 bp, Artificial Sequence
  Synthetic oligonucleotide
aggaaacggctgaggctatagcgtgagtac

SEQ ID NO: 24299 - DNA, 30 bp, Artificial Sequence
  Synthetic oligonucleotide
acaatctgaaagatggccgactgaccgtac

SEQ ID NO: 24300 - DNA, 30 bp, Artificial Sequence
  Synthetic oligonucleotide
caaggctttcccacaaaattaaatgcgtac

SEQ ID NO: 24301 - DNA, 30 bp, Artificial Sequence
  Synthetic oligonucleotide
acggcaccggatgctagacattccaggtac

SEQ ID NO: 24302 - DNA, 30 bp, Artificial Sequence
  Synthetic oligonucleotide
tcgaccaacagagtcacgatcggcgattac

SEQ ID NO: 24303 - DNA, 31 bp, Artificial Sequence
  Synthetic oligonucleotide
gtactaaatcggaaggaaatacatcccttac

SEQ ID NO: 24304 - DNA, 30 bp, Artificial Sequence
  Synthetic oligonucleotide
tcacggggagggtcggcattgagtccttac

SEQ ID NO: 24305 - DNA, 30 bp, Artificial Sequence
  Synthetic oligonucleotide
cacaaacaactaattagatccgactaaacc

SEQ ID NO: 24306 - DNA, 30 bp, Artificial Sequence
  Synthetic oligonucleotide
cgagcatcgccgcgaggaagatcaccaacc

SEQ ID NO: 24307 - DNA, 30 bp, Artificial Sequence
  Synthetic oligonucleotide
ttgggagtcgggaaattgtgtaggcgaacc

SEQ ID NO: 24308 - DNA, 30 bp, Artificial Sequence
  Synthetic oligonucleotide
acgtacaagacataaggcttgccatccacc

SEQ ID NO: 24309 - DNA, 30 bp, Artificial Sequence
  Synthetic oligonucleotide
agaggaaacaatgaatagcaaacctccacc

SEQ ID NO: 24310 - DNA, 30 bp, Artificial Sequence
  Synthetic oligonucleotide
ccacttaactagtaccgaacgaggagcacc

SEQ ID NO: 24311 - DNA, 30 bp, Artificial Sequence
  Synthetic oligonucleotide
gcaactagcatcctgagtcaaaggaggacc

SEQ ID NO: 24312 - DNA, 30 bp, Artificial Sequence
  Synthetic oligonucleotide
cagtaaagggtgataaagcccattctgacc

SEQ ID NO: 24313 - DNA, 30 bp, Artificial Sequence
  Synthetic oligonucleotide
cctgactaagcagacatggggatagtgacc

SEQ ID NO: 24314 - DNA, 30 bp, Artificial Sequence
  Synthetic oligonucleotide
cgaacgtcgaagacaatgttaaacaatacc

SEQ ID NO: 24315 - DNA, 30 bp, Artificial Sequence
  Synthetic oligonucleotide
tgtaaagggcaatataaaccgacagatacc

SEQ ID NO: 24316 - DNA, 30 bp, Artificial Sequence
  Synthetic oligonucleotide
tagaccggatcaatgaccccagtaactacc

SEQ ID NO: 24317 - DNA, 30 bp, Artificial Sequence
  Synthetic oligonucleotide
cgaaaaaacggtctagtatcggcgtaaccc

SEQ ID NO: 24318 - DNA, 30 bp, Artificial Sequence
  Synthetic oligonucleotide
cgcgacgatggaacgaatgttagaacaccc

SEQ ID NO: 24319 - DNA, 30 bp, Artificial Sequence
  Synthetic oligonucleotide
cggggtggaaggaaattgcgatcgtcaccc

SEQ ID NO: 24320 - DNA, 30 bp, Artificial Sequence
  Synthetic oligonucleotide
cacataagcacactttatccagctcgaccc

SEQ ID NO: 24321 - DNA, 30 bp, Artificial Sequence
  Synthetic oligonucleotide
acgaccgggtaagagatcaatacggtaccc

SEQ ID NO: 24322 - DNA, 30 bp, Artificial Sequence
  Synthetic oligonucleotide
gtacaaagcgagtatgcacatctcaccccc

SEQ ID NO: 24323 - DNA, 30 bp, Artificial Sequence
  Synthetic oligonucleotide
gtgcgcgagtggtctcaaggaagtcggccc

SEQ ID NO: 24324 - DNA, 30 bp, Artificial Sequence
  Synthetic oligonucleotide
gggtagtagtaaacacggcggaggatgccc

SEQ ID NO: 24325 - DNA, 30 bp, Artificial Sequence
  Synthetic oligonucleotide
cgtggagaagaaagccctaaccgggtgccc

SEQ ID NO: 24326 - DNA, 30 bp, Artificial Sequence
  Synthetic oligonucleotide
ggcaacaaaccgattgtaataaggcaagcc

SEQ ID NO: 24327 - DNA, 30 bp, Artificial Sequence
  Synthetic oligonucleotide
agagatcacaaccatcaatctgagtcagcc

SEQ ID NO: 24328 - DNA, 30 bp, Artificial Sequence
  Synthetic oligonucleotide
tgggcaatgcgtgatgagggcgactgagcc

SEQ ID NO: 24329 - DNA, 30 bp, Artificial Sequence
  Synthetic oligonucleotide
ctgggaccgacgggtgccgaactgcgcgcc

SEQ ID NO: 24330 - DNA, 30 bp, Artificial Sequence
  Synthetic oligonucleotide
tcgagctgaatacaagtcaatgtgggcgcc

SEQ ID NO: 24331 - DNA, 30 bp, Artificial Sequence
  Synthetic oligonucleotide
tttggacgaaaacgtgaatgaaggtgcgcc

SEQ ID NO: 24332 - DNA, 30 bp, Artificial Sequence
  Synthetic oligonucleotide
cacaccggaatcatgccatatgggatcgcc

SEQ ID NO: 24333 - DNA, 30 bp, Artificial Sequence
  Synthetic oligonucleotide
cgagacccggaatcctaaagtgacctcgcc

SEQ ID NO: 24334 - DNA, 30 bp, Artificial Sequence
  Synthetic oligonucleotide
aacagtcatgtaaagtaggaacacaaggcc

SEQ ID NO: 24335 - DNA, 30 bp, Artificial Sequence
  Synthetic oligonucleotide
tcgataaatggtagtcgaataatcaaggcc

SEQ ID NO: 24336 - DNA, 30 bp, Artificial Sequence
  Synthetic oligonucleotide
gtaccagggtaaagtcaaactggggaggcc

SEQ ID NO: 24337 - DNA, 30 bp, Artificial Sequence
  Synthetic oligonucleotide
gtgaccgatgcaaaaagaagaattggggcc

SEQ ID NO: 24338 - DNA, 30 bp, Artificial Sequence
  Synthetic oligonucleotide
aagacaaagtcgagtgcaagtcatatggcc

SEQ ID NO: 24339 - DNA, 30 bp, Artificial Sequence
  Synthetic oligonucleotide
gcgagatccgagataaacagggcggtttcc

SEQ ID NO: 24340 - DNA, 30 bp, Artificial Sequence
  Synthetic oligonucleotide
gctgaggcagtaacaggagtgcagttaagc

SEQ ID NO: 24341 - DNA, 30 bp, Artificial Sequence
  Synthetic oligonucleotide
acgagaatgccgaatacatcataccacagc

SEQ ID NO: 24342 - DNA, 30 bp, Artificial Sequence
  Synthetic oligonucleotide
ggacaagcgtaatgaggaaggctctacagc

SEQ ID NO: 24343 - DNA, 30 bp, Artificial Sequence
  Synthetic oligonucleotide
cggtatcctatagttgattgtacatccagc

SEQ ID NO: 24344 - DNA, 30 bp, Artificial Sequence
  Synthetic oligonucleotide
ggaagcgatcgcgccaacaacggaagcagc

SEQ ID NO: 24345 - DNA, 30 bp, Artificial Sequence
  Synthetic oligonucleotide
gacgtaggaagaatcggaacaaagtgcagc

SEQ ID NO: 24346 - DNA, 30 bp, Artificial Sequence
  Synthetic oligonucleotide
agggtgtaggcttaaggttagtccgtcagc

SEQ ID NO: 24347 - DNA, 30 bp, Artificial Sequence
  Synthetic oligonucleotide
agccaccggatctaggccttgcaacagagc

SEQ ID NO: 24348 - DNA, 30 bp, Artificial Sequence
  Synthetic oligonucleotide
gcgatggcgtaggaggagctttgcgagagc

SEQ ID NO: 24349 - DNA, 30 bp, Artificial Sequence
  Synthetic oligonucleotide
tgaaagtaaaagccggcaaaagtgaggagc

SEQ ID NO: 24350 - DNA, 30 bp, Artificial Sequence
  Synthetic oligonucleotide
agcttggttggaaagaataagaaaatgagc

SEQ ID NO: 24351 - DNA, 30 bp, Artificial Sequence
  Synthetic oligonucleotide
accgggtgagtataagggcaaagggtgagc

SEQ ID NO: 24352 - DNA, 30 bp, Artificial Sequence
  Synthetic oligonucleotide
ggatggaagagtatcctacgaatggtgagc

SEQ ID NO: 24353 - DNA, 30 bp, Artificial Sequence
  Synthetic oligonucleotide
gcgagggcgccaatagaaagatataatagc

SEQ ID NO: 24354 - DNA, 30 bp, Artificial Sequence
  Synthetic oligonucleotide
atgggctgtcgtaacgagggaatagatagc

SEQ ID NO: 24355 - DNA, 30 bp, Artificial Sequence
  Synthetic oligonucleotide
cgacattcaggaggtgacatcaacgatagc

SEQ ID NO: 24356 - DNA, 30 bp, Artificial Sequence
  Synthetic oligonucleotide
ccagccgagcaccaagagaaaggcgatagc

SEQ ID NO: 24357 - DNA, 30 bp, Artificial Sequence
  Synthetic oligonucleotide
aggggccaggtggaccaaacttgctatagc

SEQ ID NO: 24358 - DNA, 30 bp, Artificial Sequence
  Synthetic oligonucleotide
gtcgaaggtccatatggtctcggagttagc

SEQ ID NO: 24359 - DNA, 30 bp, Artificial Sequence
  Synthetic oligonucleotide
cgaaactccgtggcacgacaaccagaacgc

SEQ ID NO: 24360 - DNA, 30 bp, Artificial Sequence
  Synthetic oligonucleotide
gcacgggataagcaaagcccaagtgtacgc

SEQ ID NO: 24361 - DNA, 30 bp, Artificial Sequence
  Synthetic oligonucleotide
tgcgttagcaagtcgacctcgacaatccgc

SEQ ID NO: 24362 - DNA, 30 bp, Artificial Sequence
  Synthetic oligonucleotide
agcgtaacgactgaggcgggacgaaagcgc

SEQ ID NO: 24363 - DNA, 30 bp, Artificial Sequence
  Synthetic oligonucleotide
ttgcagccagtaagaatgggaaaagggcgc

SEQ ID NO: 24364 - DNA, 30 bp, Artificial Sequence
  Synthetic oligonucleotide
atcgcacgagtggcaagaataagcttgcgc

SEQ ID NO: 24365 - DNA, 30 bp, Artificial Sequence
  Synthetic oligonucleotide
ctgactcagaggggagtgagcggtgatcgc

SEQ ID NO: 24366 - DNA, 30 bp, Artificial Sequence
  Synthetic oligonucleotide
gtacggtgaagggtcagacccgaatctcgc

SEQ ID NO: 24367 - DNA, 30 bp, Artificial Sequence
  Synthetic oligonucleotide
agccccaaatgcgaatgtgtaaaaagtcgc

SEQ ID NO: 24368 - DNA, 30 bp, Artificial Sequence
  Synthetic oligonucleotide
tcagagaagagaaaaacaaggatgtaaggc

SEQ ID NO: 24369 - DNA, 30 bp, Artificial Sequence
  Synthetic oligonucleotide
attgaagaagaaagccaacagggcgcaggc

SEQ ID NO: 24370 - DNA, 30 bp, Artificial Sequence
  Synthetic oligonucleotide
cgtataatagatgaccggggaaatgccggc

SEQ ID NO: 24371 - DNA, 30 bp, Artificial Sequence
  Synthetic oligonucleotide
gcgggtagacaatgcgcaacttacggcggc

SEQ ID NO: 24372 - DNA, 30 bp, Artificial Sequence
  Synthetic oligonucleotide
cgtccaagggaacgcggtgaataacatggc

SEQ ID NO: 24373 - DNA, 30 bp, Artificial Sequence
  Synthetic oligonucleotide
atagctggataaaggtcaagtagtgatggc

SEQ ID NO: 24374 - DNA, 30 bp, Artificial Sequence
  Synthetic oligonucleotide
tgatcggccgtacgataacgtctagctggc

SEQ ID NO: 24375 - DNA, 30 bp, Artificial Sequence
  Synthetic oligonucleotide
tctagagcgaaggagatccgattgtgtggc

SEQ ID NO: 24376 - DNA, 30 bp, Artificial Sequence
  Synthetic oligonucleotide
ggaacgcaaaccaggacgcccaactaatgc

SEQ ID NO: 24377 - DNA, 30 bp, Artificial Sequence
  Synthetic oligonucleotide
aagcgaagcaaacacaagataaacatatgc

SEQ ID NO: 24378 - DNA, 30 bp, Artificial Sequence
  Synthetic oligonucleotide
tgttgctggaggtacccagggcgagtatgc

SEQ ID NO: 24379 - DNA, 30 bp, Artificial Sequence
  Synthetic oligonucleotide
ccacggagacatgtgggagcaagagcctgc

SEQ ID NO: 24380 - DNA, 30 bp, Artificial Sequence
  Synthetic oligonucleotide
agacggattggagatgggggccgaacgtgc

SEQ ID NO: 24381 - DNA, 30 bp, Artificial Sequence
  Synthetic oligonucleotide
gcgtaatagtggcggaattgatgttcgtgc

SEQ ID NO: 24382 - DNA, 30 bp, Artificial Sequence
  Synthetic oligonucleotide
tgcgactaaaaccatatccggaagatgtgc

SEQ ID NO: 24383 - DNA, 30 bp, Artificial Sequence
  Synthetic oligonucleotide
gcatggtacgcctcaaagagtatggtgtgc

SEQ ID NO: 24384 - DNA, 30 bp, Artificial Sequence
  Synthetic oligonucleotide
atggtacgaatctctaagaaatagtattgc

SEQ ID NO: 24385 - DNA, 30 bp, Artificial Sequence
  Synthetic oligonucleotide
caagtaaatgccggcgatgggaaaaaaatc

SEQ ID NO: 24386 - DNA, 30 bp, Artificial Sequence
  Synthetic oligonucleotide
catgtcccgaggccaaaagagcaggtaatc

SEQ ID NO: 24387 - DNA, 30 bp, Artificial Sequence
  Synthetic oligonucleotide
ctcgagtgctgtaagtcggagggtaacatc

SEQ ID NO: 24388 - DNA, 30 bp, Artificial Sequence
  Synthetic oligonucleotide
catgtctcggaaacaagcaactgatccatc

SEQ ID NO: 24389 - DNA, 30 bp, Artificial Sequence
  Synthetic oligonucleotide
tgagcgaagcgctacacacatttccgcatc

SEQ ID NO: 24390 - DNA, 30 bp, Artificial Sequence
  Synthetic oligonucleotide
ctcattctaatgaaccaaaattccggcatc

SEQ ID NO: 24391 - DNA, 30 bp, Artificial Sequence
  Synthetic oligonucleotide
gggaggagatatatggtgaaaaatggcatc

SEQ ID NO: 24392 - DNA, 30 bp, Artificial Sequence
  Synthetic oligonucleotide
cgtaagtaaatcggatatgcatttgagatc

SEQ ID NO: 24393 - DNA, 30 bp, Artificial Sequence
  Synthetic oligonucleotide
aggagagtgtagcaagccaccatatagatc

SEQ ID NO: 24394 - DNA, 30 bp, Artificial Sequence
  Synthetic oligonucleotide
aggagctgaacatctggaacggtctcgatc

SEQ ID NO: 24395 - DNA, 30 bp, Artificial Sequence
  Synthetic oligonucleotide
tctaccacaggtacaaaaatataacgactc

SEQ ID NO: 24396 - DNA, 30 bp, Artificial Sequence
  Synthetic oligonucleotide
cagaagtgctataaggacaataggtgactc

SEQ ID NO: 24397 - DNA, 30 bp, Artificial Sequence
  Synthetic oligonucleotide
ccaccgaaaaggattggaagccacattctc

SEQ ID NO: 24398 - DNA, 30 bp, Artificial Sequence
  Synthetic oligonucleotide
caggccgatgtacgaagaaaaatcgttctc

SEQ ID NO: 24399 - DNA, 30 bp, Artificial Sequence
  Synthetic oligonucleotide
gctcgaatgaatgaaggtagtactgaagtc

SEQ ID NO: 24400 - DNA, 30 bp, Artificial Sequence
  Synthetic oligonucleotide
cggccaggatcgcgctcgataactacagtc

SEQ ID NO: 24401 - DNA, 30 bp, Artificial Sequence
  Synthetic oligonucleotide
gatggaatgaacagaaagtgaagacgagtc

SEQ ID NO: 24402 - DNA, 30 bp, Artificial Sequence
  Synthetic oligonucleotide
ccataaagatgtgtgggggtaataggagtc

SEQ ID NO: 24403 - DNA, 30 bp, Artificial Sequence
  Synthetic oligonucleotide
tcaaaagggggtacagaatgggatggagtc

SEQ ID NO: 24404 - DNA, 30 bp, Artificial Sequence
  Synthetic oligonucleotide
cgacaacagtttgcctagctgagttgagtc

SEQ ID NO: 24405 - DNA, 30 bp, Artificial Sequence
  Synthetic oligonucleotide
aacgcataagggtgaaacctggggaacgtc

SEQ ID NO: 24406 - DNA, 30 bp, Artificial Sequence
  Synthetic oligonucleotide
attgggcacacgattcgccgtccattcgtc

SEQ ID NO: 24407 - DNA, 30 bp, Artificial Sequence
  Synthetic oligonucleotide
agaagatgcattcgatatacagaaacggtc

SEQ ID NO: 24408 - DNA, 30 bp, Artificial Sequence
  Synthetic oligonucleotide
agggtgaagaacaatcggggaatcgcggtc

SEQ ID NO: 24409 - DNA, 30 bp, Artificial Sequence
  Synthetic oligonucleotide
actatgcatcgacacgacaaaaaaagggtc

SEQ ID NO: 24410 - DNA, 30 bp, Artificial Sequence
  Synthetic oligonucleotide
tgcccaaagacaagaaggtaaagttatgtc

SEQ ID NO: 24411 - DNA, 30 bp, Artificial Sequence
  Synthetic oligonucleotide
agcctgctcatttaagaaaacaatgctgtc

SEQ ID NO: 24412 - DNA, 30 bp, Artificial Sequence
  Synthetic oligonucleotide
agctaaacgatctcaaataaacttgccttc

SEQ ID NO: 24413 - DNA, 30 bp, Artificial Sequence
  Synthetic oligonucleotide
gaactaacgacaaatcgcgctgccagcttc

SEQ ID NO: 24414 - DNA, 30 bp, Artificial Sequence
  Synthetic oligonucleotide
ccaaggacgagtgtggtatcaataggcttc

SEQ ID NO: 24415 - DNA, 30 bp, Artificial Sequence
  Synthetic oligonucleotide
acgagtcgtatcttaccatgtgcggtcttc

SEQ ID NO: 24416 - DNA, 30 bp, Artificial Sequence
  Synthetic oligonucleotide
atcacgagggtaatccgcaacatgccgttc

SEQ ID NO: 24417 - DNA, 30 bp, Artificial Sequence
  Synthetic oligonucleotide
agaaggcggtacggcggggatccatcgttc

SEQ ID NO: 24418 - DNA, 30 bp, Artificial Sequence
  Synthetic oligonucleotide
ggagcgagggggactatagtgttggtgttc

SEQ ID NO: 24419 - DNA, 30 bp, Artificial Sequence
  Synthetic oligonucleotide
cgaaagggtgacatgagcccacataaaaag

SEQ ID NO: 24420 - DNA, 30 bp, Artificial Sequence
  Synthetic oligonucleotide
taatgaggagcatcgaaggatcctcaaaag

SEQ ID NO: 24421 - DNA, 30 bp, Artificial Sequence
  Synthetic oligonucleotide
gtacaggatcaagtggtcatctgcgaaaag

SEQ ID NO: 24422 - DNA, 30 bp, Artificial Sequence
  Synthetic oligonucleotide
tagcgtagagggcgcgcctagtaggaaaag

SEQ ID NO: 24423 - DNA, 30 bp, Artificial Sequence
  Synthetic oligonucleotide
agtatagcacagcaactgacacaatcaaag

SEQ ID NO: 24424 - DNA, 30 bp, Artificial Sequence
  Synthetic oligonucleotide
cacactgtaagtccgggcgggcaaagaaag

SEQ ID NO: 24425 - DNA, 30 bp, Artificial Sequence
  Synthetic oligonucleotide
gggactggccctaatgtggattaaagaaag

SEQ ID NO: 24426 - DNA, 30 bp, Artificial Sequence
  Synthetic oligonucleotide
tgaccacgcttaaggcgatcgagtagaaag

SEQ ID NO: 24427 - DNA, 30 bp, Artificial Sequence
  Synthetic oligonucleotide
gaccgctcacaaccaggaataggtagaaag

SEQ ID NO: 24428 - DNA, 30 bp, Artificial Sequence
  Synthetic oligonucleotide
agggccgcgcgagacgcgagttgtagaaag

SEQ ID NO: 24429 - DNA, 30 bp, Artificial Sequence
  Synthetic oligonucleotide
taccgaaaaggatacatctaaacgggaaag

SEQ ID NO: 24430 - DNA, 30 bp, Artificial Sequence
  Synthetic oligonucleotide
ccaaatcgacaaaggtcagattgatgaaag

SEQ ID NO: 24431 - DNA, 30 bp, Artificial Sequence
  Synthetic oligonucleotide
cgaatggtcggagggtactaggtgctaaag

SEQ ID NO: 24432 - DNA, 30 bp, Artificial Sequence
  Synthetic oligonucleotide
aaggagccagtctcagctgtcaacttaaag

SEQ ID NO: 24433 - DNA, 30 bp, Artificial Sequence
  Synthetic oligonucleotide
tagcgcgagcgtcaatggtccaaagacaag

SEQ ID NO: 24434 - DNA, 30 bp, Artificial Sequence
  Synthetic oligonucleotide
ccctaagcactagagaccagtagagacaag

SEQ ID NO: 24435 - DNA, 30 bp, Artificial Sequence
  Synthetic oligonucleotide
catcgttacagggaccccccggcatacaag

SEQ ID NO: 24436 - DNA, 30 bp, Artificial Sequence
  Synthetic oligonucleotide
ggatgagataagggaattgtaagctacaag

SEQ ID NO: 24437 - DNA, 30 bp, Artificial Sequence
  Synthetic oligonucleotide
tgtggaacatactccgaggatgaccccaag

SEQ ID NO: 24438 - DNA, 30 bp, Artificial Sequence
  Synthetic oligonucleotide
aaagagaatggaatgaataccgtccccaag

SEQ ID NO: 24439 - DNA, 30 bp, Artificial Sequence
  Synthetic oligonucleotide
ataagcagtgtgggctagaaaggagccaag

SEQ ID NO: 24440 - DNA, 30 bp, Artificial Sequence
  Synthetic oligonucleotide
tcccagagcaagggtcatacgtgggccaag

SEQ ID NO: 24441 - DNA, 30 bp, Artificial Sequence
  Synthetic oligonucleotide
ccgggcgcgataaaagtaccgttgcgcaag

SEQ ID NO: 24442 - DNA, 30 bp, Artificial Sequence
  Synthetic oligonucleotide
acacgcgattcctcatctcctcaaggcaag

SEQ ID NO: 24443 - DNA, 30 bp, Artificial Sequence
  Synthetic oligonucleotide
acaagcatgaacactgtcatcgtatgcaag

SEQ ID NO: 24444 - DNA, 30 bp, Artificial Sequence
  Synthetic oligonucleotide
tcagccataacgtcgtggtgagacatcaag

SEQ ID NO: 24445 - DNA, 30 bp, Artificial Sequence
  Synthetic oligonucleotide
tacggttcggagcaaaataacgctctcaag

SEQ ID NO: 24446 - DNA, 30 bp, Artificial Sequence
  Synthetic oligonucleotide
ggagctatggaaataagcacggcaaagaag

SEQ ID NO: 24447 - DNA, 30 bp, Artificial Sequence
  Synthetic oligonucleotide
cggtcagctaaatcacaactatacaagaag

SEQ ID NO: 24448 - DNA, 30 bp, Artificial Sequence
  Synthetic oligonucleotide
aaacgtattgggattattccacgacagaag

SEQ ID NO: 24449 - DNA, 30 bp, Artificial Sequence
  Synthetic oligonucleotide
cggatagatcatctctgccgttctgagaag

SEQ ID NO: 24450 - DNA, 30 bp, Artificial Sequence
  Synthetic oligonucleotide
ccacgaacattaaggtaagcaataacgaag

SEQ ID NO: 24451 - DNA, 30 bp, Artificial Sequence
  Synthetic oligonucleotide
agaccgcgtggtagctaagatggtacgaag

SEQ ID NO: 24452 - DNA, 30 bp, Artificial Sequence
  Synthetic oligonucleotide
tgctacgatactagactgcaaaaggcgaag

SEQ ID NO: 24453 - DNA, 30 bp, Artificial Sequence
  Synthetic oligonucleotide
gtgtagagttcacgacacagataggcgaag

SEQ ID NO: 24454 - DNA, 30 bp, Artificial Sequence
  Synthetic oligonucleotide
agtggcaaaatgtgaggctaaccatcgaag

SEQ ID NO: 24455 - DNA, 30 bp, Artificial Sequence
  Synthetic oligonucleotide
gcgtctcgagcagaagacgtcccaaggaag

SEQ ID NO: 24456 - DNA, 30 bp, Artificial Sequence
  Synthetic oligonucleotide
ggcctgagtcacttgacctacccgaggaag

SEQ ID NO: 24457 - DNA, 30 bp, Artificial Sequence
  Synthetic oligonucleotide
tacgtgctatcacctaacctaaaccggaag

SEQ ID NO: 24458 - DNA, 30 bp, Artificial Sequence
  Synthetic oligonucleotide
tcctcacgcgcgttcagggaaacagggaag

SEQ ID NO: 24459 - DNA, 30 bp, Artificial Sequence
  Synthetic oligonucleotide
gttgaaggaaaaacgtggatcggtgggaag

SEQ ID NO: 24460 - DNA, 30 bp, Artificial Sequence
  Synthetic oligonucleotide
gttgcagaagtcacgcccaaggtaatgaag

SEQ ID NO: 24461 - DNA, 30 bp, Artificial Sequence
  Synthetic oligonucleotide
tcacatcgggagatcgaaaagttggtgaag

SEQ ID NO: 24462 - DNA, 30 bp, Artificial Sequence
  Synthetic oligonucleotide
cgtgattaagtatcccgtggaaaaaataag

SEQ ID NO: 24463 - DNA, 30 bp, Artificial Sequence
  Synthetic oligonucleotide
acgtgcatattcaacaaccggtaaaataag

SEQ ID NO: 24464 - DNA, 30 bp, Artificial Sequence
  Synthetic oligonucleotide
atacagggaaacagaaactcggataataag

SEQ ID NO: 24465 - DNA, 30 bp, Artificial Sequence
  Synthetic oligonucleotide
ggagcccgtaaccgccgtgacacccataag

SEQ ID NO: 24466 - DNA, 30 bp, Artificial Sequence
  Synthetic oligonucleotide
tcaggagcacgtcaagaaggcttccataag

SEQ ID NO: 24467 - DNA, 30 bp, Artificial Sequence
  Synthetic oligonucleotide
tgtcacgacgaccaatagaggtgagataag

SEQ ID NO: 24468 - DNA, 30 bp, Artificial Sequence
  Synthetic oligonucleotide
gaaacagactcacgggaaatacgcgataag

SEQ ID NO: 24469 - DNA, 30 bp, Artificial Sequence
  Synthetic oligonucleotide
tggcggactaatcgaagaggggcttctaag

SEQ ID NO: 24470 - DNA, 30 bp, Artificial Sequence
  Synthetic oligonucleotide
tcgaagaagccaaacactgtagtttctaag

SEQ ID NO: 24471 - DNA, 30 bp, Artificial Sequence
  Synthetic oligonucleotide
tcggggatagcctcaaggagaaatggtaag

SEQ ID NO: 24472 - DNA, 30 bp, Artificial Sequence
  Synthetic oligonucleotide
gaagttaaggacacaaatgtgagatgtaag

SEQ ID NO: 24473 - DNA, 30 bp, Artificial Sequence
  Synthetic oligonucleotide
ggagggcatcattagttaatggggattaag

SEQ ID NO: 24474 - DNA, 30 bp, Artificial Sequence
  Synthetic oligonucleotide
gaggatattgtgcaaatagaacatcttaag

SEQ ID NO: 24475 - DNA, 30 bp, Artificial Sequence
  Synthetic oligonucleotide
atcagcatggcgctagaagtcaagtttaag

SEQ ID NO: 24476 - DNA, 30 bp, Artificial Sequence
  Synthetic oligonucleotide
ctagccagtaagaacatcaacagaaaacag

SEQ ID NO: 24477 - DNA, 30 bp, Artificial Sequence
  Synthetic oligonucleotide
gcaggaaactcttaaagcgacgaacaacag

SEQ ID NO: 24478 - DNA, 30 bp, Artificial Sequence
  Synthetic oligonucleotide
taatcggacgtaaggggagtctggcaacag

SEQ ID NO: 24479 - DNA, 30 bp, Artificial Sequence
  Synthetic oligonucleotide
ggaaatgaaacattctggggaagggaacag

SEQ ID NO: 24480 - DNA, 30 bp, Artificial Sequence
  Synthetic oligonucleotide
cacgctataacagcgaaacctgatgaacag

SEQ ID NO: 24481 - DNA, 30 bp, Artificial Sequence
  Synthetic oligonucleotide
cgcgacatcatgtaagactatccataacag

SEQ ID NO: 24482 - DNA, 30 bp, Artificial Sequence
  Synthetic oligonucleotide
ctgactccacaatcagcggaccgataacag

SEQ ID NO: 24483 - DNA, 30 bp, Artificial Sequence
  Synthetic oligonucleotide
tggggggcaaggcaaggtaacaccccacag

SEQ ID NO: 24484 - DNA, 30 bp, Artificial Sequence
  Synthetic oligonucleotide
taagtaaaagcagcgaacagaaatccacag

SEQ ID NO: 24485 - DNA, 30 bp, Artificial Sequence
  Synthetic oligonucleotide
ctaagagctcaggcaacattctaacgacag

SEQ ID NO: 24486 - DNA, 30 bp, Artificial Sequence
  Synthetic oligonucleotide
actgagaactgagagaaatgggctaaccag

SEQ ID NO: 24487 - DNA, 31 bp, Artificial Sequence
  Synthetic oligonucleotide
gtcggtgtctgtaagcataaggaacagccag

SEQ ID NO: 24488 - DNA, 30 bp, Artificial Sequence
  Synthetic oligonucleotide
agccaaaaccgggtaagctgggtgagccag

SEQ ID NO: 24489 - DNA, 30 bp, Artificial Sequence
  Synthetic oligonucleotide
aggggaaaacgttagatatctactagccag

SEQ ID NO: 24490 - DNA, 30 bp, Artificial Sequence
  Synthetic oligonucleotide
aagatgctccgactaacggagataggccag

SEQ ID NO: 24491 - DNA, 30 bp, Artificial Sequence
  Synthetic oligonucleotide
aggccccaaaccagcatttgcgtggtccag

SEQ ID NO: 24492 - DNA, 29 bp, Artificial Sequence
  Synthetic oligonucleotide
atagggggacgagaattggtcgaaagcag

SEQ ID NO: 24493 - DNA, 30 bp, Artificial Sequence
  Synthetic oligonucleotide
gagcacatggggtggaatgagcttaagcag

SEQ ID NO: 24494 - DNA, 30 bp, Artificial Sequence
  Synthetic oligonucleotide
acgtatagcaaggagccgtgtaaggagcag

SEQ ID NO: 24495 - DNA, 30 bp, Artificial Sequence
  Synthetic oligonucleotide
ctggcaagactcagaggcgtcagggagcag

SEQ ID NO: 24496 - DNA, 30 bp, Artificial Sequence
  Synthetic oligonucleotide
tcatctgaccgtaggacgaacatttagcag

SEQ ID NO: 24497 - DNA, 30 bp, Artificial Sequence
  Synthetic oligonucleotide
tcccggaaagaacccaaaggatacaggcag

SEQ ID NO: 24498 - DNA, 30 bp, Artificial Sequence
  Synthetic oligonucleotide
agtcgaacgaggctatactgagactggcag

SEQ ID NO: 24499 - DNA, 30 bp, Artificial Sequence
  Synthetic oligonucleotide
caacgtaactggggtacctaagatatgcag

SEQ ID NO: 24500 - DNA, 31 bp, Artificial Sequence
  Synthetic oligonucleotide
gccagtgctggctaaggaaggggaggatcag

SEQ ID NO: 24501 - DNA, 30 bp, Artificial Sequence
  Synthetic oligonucleotide
gcgtcatgtgcagtaagaccttaatatcag

SEQ ID NO: 24502 - DNA, 30 bp, Artificial Sequence
  Synthetic oligonucleotide
ttgcggaaaaagagggtcagaagaactcag

SEQ ID NO: 24503 - DNA, 30 bp, Artificial Sequence
  Synthetic oligonucleotide
gtcgagacactcctgcgtgggtaacctcag

SEQ ID NO: 24504 - DNA, 30 bp, Artificial Sequence
  Synthetic oligonucleotide
tacataacaactaaggcgatcacatctcag

SEQ ID NO: 24505 - DNA, 30 bp, Artificial Sequence
  Synthetic oligonucleotide
gatgtacgttaagagtcgaggctcagtcag

SEQ ID NO: 24506 - DNA, 30 bp, Artificial Sequence
  Synthetic oligonucleotide
caagaaatagtgtccagatcccctagtcag

SEQ ID NO: 24507 - DNA, 30 bp, Artificial Sequence
  Synthetic oligonucleotide
ctacgaaaacgtcttgagacctgtagtcag

SEQ ID NO: 24508 - DNA, 30 bp, Artificial Sequence
  Synthetic oligonucleotide
aggaggtaggctatcaccctactccgtcag

SEQ ID NO: 24509 - DNA, 30 bp, Artificial Sequence
  Synthetic oligonucleotide
gatgccggaaaagtaaggtcagggcgtcag

SEQ ID NO: 24510 - DNA, 30 bp, Artificial Sequence
  Synthetic oligonucleotide
tcatggatgtccaaggcggattatggtcag

SEQ ID NO: 24511 - DNA, 30 bp, Artificial Sequence
  Synthetic oligonucleotide
cagtggagctccgaaaagctcaagattcag

SEQ ID NO: 24512 - DNA, 30 bp, Artificial Sequence
  Synthetic oligonucleotide
cagaggcgcataaggggctaaggagttcag

SEQ ID NO: 24513 - DNA, 30 bp, Artificial Sequence
  Synthetic oligonucleotide
gcaccaatagggcggaacagggaaaaagag

SEQ ID NO: 24514 - DNA, 30 bp, Artificial Sequence
  Synthetic oligonucleotide
tacgagaacacgaggtctcaaggaaaagag

SEQ ID NO: 24515 - DNA, 30 bp, Artificial Sequence
  Synthetic oligonucleotide
agacggggtgaatgcatagggacgaaagag

SEQ ID NO: 24516 - DNA, 30 bp, Artificial Sequence
  Synthetic oligonucleotide
gccggcttcaatctagcattcaaacaagag

SEQ ID NO: 24517 - DNA, 30 bp, Artificial Sequence
  Synthetic oligonucleotide
gatggtaaccgcagacatcccggccaagag

SEQ ID NO: 24518 - DNA, 30 bp, Artificial Sequence
  Synthetic oligonucleotide
tgagacgacatctggaagccgaggcaagag

SEQ ID NO: 24519 - DNA, 30 bp, Artificial Sequence
  Synthetic oligonucleotide
tagaacatgcctgtgtgaaccatgcaagag

SEQ ID NO: 24520 - DNA, 31 bp, Artificial Sequence
  Synthetic oligonucleotide
tcggggaatcacgttcggcccttaggaagag

SEQ ID NO: 24521 - DNA, 30 bp, Artificial Sequence
  Synthetic oligonucleotide
tcagagtgaaagtttgtggtggtaagagag

SEQ ID NO: 24522 - DNA, 30 bp, Artificial Sequence
  Synthetic oligonucleotide
gcatgaagctcacgaaaccatcacagagag

SEQ ID NO: 24523 - DNA, 30 bp, Artificial Sequence
  Synthetic oligonucleotide
caaacgggcaatgtcagctcaaccagagag

SEQ ID NO: 24524 - DNA, 30 bp, Artificial Sequence
  Synthetic oligonucleotide
gcggaggtcgtcatacgcaggtccagagag

SEQ ID NO: 24525 - DNA, 30 bp, Artificial Sequence
  Synthetic oligonucleotide
gtatatgcggagttgggggaacatagagag

SEQ ID NO: 24526 - DNA, 30 bp, Artificial Sequence
  Synthetic oligonucleotide
ggcacaacacagcttggaagctccggagag

SEQ ID NO: 24527 - DNA, 30 bp, Artificial Sequence
  Synthetic oligonucleotide
aggcgggtctgcaaagatcgcctcggagag

SEQ ID NO: 24528 - DNA, 30 bp, Artificial Sequence
  Synthetic oligonucleotide
acgtaccccatcacccatcaaagtctagag

SEQ ID NO: 24529 - DNA, 30 bp, Artificial Sequence
  Synthetic oligonucleotide
tgaaggtacggaccgtaaggctacgtagag

SEQ ID NO: 24530 - DNA, 30 bp, Artificial Sequence
  Synthetic oligonucleotide
catcatgctggaaagggctggaatgtagag

SEQ ID NO: 24531 - DNA, 30 bp, Artificial Sequence
  Synthetic oligonucleotide
cgaggatcaaccggttgaaacaggttagag

SEQ ID NO: 24532 - DNA, 30 bp, Artificial Sequence
  Synthetic oligonucleotide
cggtatgtacaaccgaaatcgtatttagag

SEQ ID NO: 24533 - DNA, 30 bp, Artificial Sequence
  Synthetic oligonucleotide
atagattgagccatggtagccgggaacgag

SEQ ID NO: 24534 - DNA, 30 bp, Artificial Sequence
  Synthetic oligonucleotide
gcggtaaaaggtgtatggctgtataacgag

SEQ ID NO: 24535 - DNA, 30 bp, Artificial Sequence
  Synthetic oligonucleotide
tttacacgagactacgatgagtgagacgag

SEQ ID NO: 24536 - DNA, 30 bp, Artificial Sequence
  Synthetic oligonucleotide
tggtggagaactatgattgaacgatacgag

SEQ ID NO: 24537 - DNA, 30 bp, Artificial Sequence
  Synthetic oligonucleotide
tgaagctggcacataaccggagaaaccgag

SEQ ID NO: 24538 - DNA, 30 bp, Artificial Sequence
  Synthetic oligonucleotide
aaagccaactttgcggtaccgatgaccgag

SEQ ID NO: 24539 - DNA, 30 bp, Artificial Sequence
  Synthetic oligonucleotide
tcagcagactgttatttgggggcacccgag

SEQ ID NO: 24540 - DNA, 30 bp, Artificial Sequence
  Synthetic oligonucleotide
aacacggacaagctcgtgttcgtcgccgag

SEQ ID NO: 24541 - DNA, 30 bp, Artificial Sequence
  Synthetic oligonucleotide
ggaggcagaccaggggcgcaggatgccgag

SEQ ID NO: 24542 - DNA, 30 bp, Artificial Sequence
  Synthetic oligonucleotide
caaagagcggcataagtacatcatagcgag

SEQ ID NO: 24543 - DNA, 30 bp, Artificial Sequence
  Synthetic oligonucleotide
tacgtagcccggtaaagacagcgtagcgag

SEQ ID NO: 24544 - DNA, 30 bp, Artificial Sequence
  Synthetic oligonucleotide
gaggaccgcatcatcatcgaataccgcgag

SEQ ID NO: 24545 - DNA, 30 bp, Artificial Sequence
  Synthetic oligonucleotide
actaacggatccaatagtcatggtcgcgag

SEQ ID NO: 24546 - DNA, 30 bp, Artificial Sequence
  Synthetic oligonucleotide
agtacgactaacgcatggaactggggcgag

SEQ ID NO: 24547 - DNA, 30 bp, Artificial Sequence
  Synthetic oligonucleotide
atccgtagtggatcacacgagggatgcgag

SEQ ID NO: 24548 - DNA, 30 bp, Artificial Sequence
  Synthetic oligonucleotide
aggggtccaccccgataaccggtatgcgag

SEQ ID NO: 24549 - DNA, 30 bp, Artificial Sequence
  Synthetic oligonucleotide
gcgtaggcggtaactggcagttaagtcgag

SEQ ID NO: 24550 - DNA, 30 bp, Artificial Sequence
  Synthetic oligonucleotide
aaggctacgggtcgaacttgaaacttcgag

SEQ ID NO: 24551 - DNA, 30 bp, Artificial Sequence
  Synthetic oligonucleotide
ggagtatcacactcgtgctgcaagaaggag

SEQ ID NO: 24552 - DNA, 30 bp, Artificial Sequence
  Synthetic oligonucleotide
aaaagggaatcgatcagttcaaaacaggag

SEQ ID NO: 24553 - DNA, 30 bp, Artificial Sequence
  Synthetic oligonucleotide
tcgtcggaaccgcgtcctctcaagcaggag

SEQ ID NO: 24554 - DNA, 30 bp, Artificial Sequence
  Synthetic oligonucleotide
tgcgtaagtatacggtaaaagggtcaggag

SEQ ID NO: 24555 - DNA, 30 bp, Artificial Sequence
  Synthetic oligonucleotide
attacgcaacaggggcaggtttgggaggag

SEQ ID NO: 24556 - DNA, 30 bp, Artificial Sequence
  Synthetic oligonucleotide
acgcacagagaatctagaagacttgaggag

SEQ ID NO: 24557 - DNA, 30 bp, Artificial Sequence
  Synthetic oligonucleotide
ccaacatacgaaattaaccgcgatacggag

SEQ ID NO: 24558 - DNA, 30 bp, Artificial Sequence
  Synthetic oligonucleotide
caagcgtgcaccccgcacaagaggccggag

SEQ ID NO: 24559 - DNA, 30 bp, Artificial Sequence
  Synthetic oligonucleotide
cgttcggatgtgaatgcgcgcattccggag

SEQ ID NO: 24560 - DNA, 30 bp, Artificial Sequence
  Synthetic oligonucleotide
accatacttagagaccgtcgactcgcggag

SEQ ID NO: 24561 - DNA, 30 bp, Artificial Sequence
  Synthetic oligonucleotide
aactacaatgacctcgatagctgctcggag

SEQ ID NO: 24562 - DNA, 30 bp, Artificial Sequence
  Synthetic oligonucleotide
tgctaaagttaaagtggaggaattagggag

SEQ ID NO: 24563 - DNA, 30 bp, Artificial Sequence
  Synthetic oligonucleotide
tcgagctcactcgaacgctcatacggggag

SEQ ID NO: 24564 - DNA, 30 bp, Artificial Sequence
  Synthetic oligonucleotide
gtataaagaatgcactcaggatagggggag

SEQ ID NO: 24565 - DNA, 30 bp, Artificial Sequence
  Synthetic oligonucleotide
ttagaagcgacgtagagcaagggcctggag

SEQ ID NO: 24566 - DNA, 31 bp, Artificial Sequence
  Synthetic oligonucleotide
agaaggagtgtatccgccggatctggtggag

SEQ ID NO: 24567 - DNA, 30 bp, Artificial Sequence
  Synthetic oligonucleotide
tgcggtcaaggtaaaacgaatgcgcatgag

SEQ ID NO: 24568 - DNA, 30 bp, Artificial Sequence
  Synthetic oligonucleotide
ccgaagctataaactggctaaagagatgag

SEQ ID NO: 24569 - DNA, 30 bp, Artificial Sequence
  Synthetic oligonucleotide
taaggtgacctgtcgatggtgggatatgag

SEQ ID NO: 24570 - DNA, 30 bp, Artificial Sequence
  Synthetic oligonucleotide
gtaagtaggtgatacgtccatctaactgag

SEQ ID NO: 24571 - DNA, 30 bp, Artificial Sequence
  Synthetic oligonucleotide
ggggaaaattaggccactgcgcgttctgag

SEQ ID NO: 24572 - DNA, 30 bp, Artificial Sequence
  Synthetic oligonucleotide
agttgggagaggggcttaacaaagcgtgag

SEQ ID NO: 24573 - DNA, 30 bp, Artificial Sequence
  Synthetic oligonucleotide
tcctaacttcaggaagctaacaaaattgag

SEQ ID NO: 24574 - DNA, 30 bp, Artificial Sequence
  Synthetic oligonucleotide
caggctaatgaagaattgcgaatcattgag

SEQ ID NO: 24575 - DNA, 30 bp, Artificial Sequence
  Synthetic oligonucleotide
gtgtgagtagacctagcggggtcaaaatag

SEQ ID NO: 24576 - DNA, 30 bp, Artificial Sequence
  Synthetic oligonucleotide
caaaaggggcagtgcaagggagtgaaatag

SEQ ID NO: 24577 - DNA, 30 bp, Artificial Sequence
  Synthetic oligonucleotide
caacacgtcgggggagtgcacaaataatag

SEQ ID NO: 24578 - DNA, 30 bp, Artificial Sequence
  Synthetic oligonucleotide
cgcgaggattgagtcaatacgtgtagatag

SEQ ID NO: 24579 - DNA, 30 bp, Artificial Sequence
  Synthetic oligonucleotide
tgagagaggtgccattacctcattagatag

SEQ ID NO: 24580 - DNA, 30 bp, Artificial Sequence
  Synthetic oligonucleotide
ggagggtccccgcttagatcgggaggatag

SEQ ID NO: 24581 - DNA, 30 bp, Artificial Sequence
  Synthetic oligonucleotide
ggatagccaaagtgtatcgacccactatag

SEQ ID NO: 24582 - DNA, 30 bp, Artificial Sequence
  Synthetic oligonucleotide
catgggttcaggaacctgaatgtcaactag

SEQ ID NO: 24583 - DNA, 30 bp, Artificial Sequence
  Synthetic oligonucleotide
agatggcatagggggcaaatcgaaacctag

SEQ ID NO: 24584 - DNA, 30 bp, Artificial Sequence
  Synthetic oligonucleotide
tacgtatattaaagacaagaaatagcctag

SEQ ID NO: 24585 - DNA, 30 bp, Artificial Sequence
  Synthetic oligonucleotide
gtacacgtcgtcaagtgcgagtaggcctag

SEQ ID NO: 24586 - DNA, 30 bp, Artificial Sequence
  Synthetic oligonucleotide
caataggtgctgggcacgcaaaggagctag

SEQ ID NO: 24587 - DNA, 30 bp, Artificial Sequence
  Synthetic oligonucleotide
acatgcccgtacatactaccagatagctag

SEQ ID NO: 24588 - DNA, 30 bp, Artificial Sequence
  Synthetic oligonucleotide
accatctgcgagaacggctaaactatctag

SEQ ID NO: 24589 - DNA, 30 bp, Artificial Sequence
  Synthetic oligonucleotide
aggccaaacggaagttggcactaactctag

SEQ ID NO: 24590 - DNA, 30 bp, Artificial Sequence
  Synthetic oligonucleotide
agcgtgcccgggcggtgcgatacattctag

SEQ ID NO: 24591 - DNA, 30 bp, Artificial Sequence
  Synthetic oligonucleotide
taccgatgcatcataaggtccgtcgagtag

SEQ ID NO: 24592 - DNA, 30 bp, Artificial Sequence
  Synthetic oligonucleotide
cacgcacaagcaacctaagtggaatagtag

SEQ ID NO: 24593 - DNA, 30 bp, Artificial Sequence
  Synthetic oligonucleotide
aacgagatctcattccaagacggttagtag

SEQ ID NO: 24594 - DNA, 30 bp, Artificial Sequence
  Synthetic oligonucleotide
tgaagcatgagagtacacggcgaatcgtag

SEQ ID NO: 24595 - DNA, 30 bp, Artificial Sequence
  Synthetic oligonucleotide
tccgaccactttcgacaagggggatcgtag

SEQ ID NO: 24596 - DNA, 30 bp, Artificial Sequence
  Synthetic oligonucleotide
tccgcatcaataaacacgatggattcgtag

SEQ ID NO: 24597 - DNA, 30 bp, Artificial Sequence
  Synthetic oligonucleotide
tgtgagtagtaccgagcggacatcaattag

SEQ ID NO: 24598 - DNA, 30 bp, Artificial Sequence
  Synthetic oligonucleotide
actatcgatccaggatgaagttcacattag

SEQ ID NO: 24599 - DNA, 30 bp, Artificial Sequence
  Synthetic oligonucleotide
ccaaggacgctcgcggaccagaagagttag

SEQ ID NO: 24600 - DNA, 30 bp, Artificial Sequence
  Synthetic oligonucleotide
tcgttcacgaatgaggaaacgggaaaaacg

SEQ ID NO: 24601 - DNA, 30 bp, Artificial Sequence
  Synthetic oligonucleotide
cgtccatcgtcgtccgtaccaagcaaaacg

SEQ ID NO: 24602 - DNA, 30 bp, Artificial Sequence
  Synthetic oligonucleotide
gtcatcgaccattatcaaataggcacaacg

SEQ ID NO: 24603 - DNA, 30 bp, Artificial Sequence
  Synthetic oligonucleotide
acgcggagcatacgcgaagtgacaagaacg

SEQ ID NO: 24604 - DNA, 30 bp, Artificial Sequence
  Synthetic oligonucleotide
catagtatcggcctatacagatgaagaacg

SEQ ID NO: 24605 - DNA, 30 bp, Artificial Sequence
  Synthetic oligonucleotide
aatgggggatagggtactacgtaatgaacg

SEQ ID NO: 24606 - DNA, 30 bp, Artificial Sequence
  Synthetic oligonucleotide
ggaacaagccatgtaattctggcaataacg

SEQ ID NO: 24607 - DNA, 30 bp, Artificial Sequence
  Synthetic oligonucleotide
gtggcacagttcaagaatcgatgccacacg

SEQ ID NO: 24608 - DNA, 30 bp, Artificial Sequence
  Synthetic oligonucleotide
ggataataccaagaggatagtgcgaccacg

SEQ ID NO: 24609 - DNA, 30 bp, Artificial Sequence
  Synthetic oligonucleotide
gtatcaggatgataaagggaaggtgccacg

SEQ ID NO: 24610 - DNA, 30 bp, Artificial Sequence
  Synthetic oligonucleotide
agtcataaaaaccactggccgaaaagcacg

SEQ ID NO: 24611 - DNA, 30 bp, Artificial Sequence
  Synthetic oligonucleotide
ggaccaggaactaaaagaagggaaatcacg

SEQ ID NO: 24612 - DNA, 30 bp, Artificial Sequence
  Synthetic oligonucleotide
aaagggacctcgatttccaaaccgaagacg

SEQ ID NO: 24613 - DNA, 30 bp, Artificial Sequence
  Synthetic oligonucleotide
tcggacccatgtaatcaaacgaccgagacg

SEQ ID NO: 24614 - DNA, 30 bp, Artificial Sequence
  Synthetic oligonucleotide
aagaagacataaaggcacacaaacatgacg

SEQ ID NO: 24615 - DNA, 30 bp, Artificial Sequence
  Synthetic oligonucleotide
agcagtccgatggattgaagacaggtgacg

SEQ ID NO: 24616 - DNA, 30 bp, Artificial Sequence
  Synthetic oligonucleotide
tcgtgactatggttcgtggggtggaatacg

SEQ ID NO: 24617 - DNA, 30 bp, Artificial Sequence
  Synthetic oligonucleotide
agccggataaatctctcgaacagccatacg

SEQ ID NO: 24618 - DNA, 30 bp, Artificial Sequence
  Synthetic oligonucleotide
acggtaaggaaaaatactcagctaagtacg

SEQ ID NO: 24619 - DNA, 30 bp, Artificial Sequence
  Synthetic oligonucleotide
atggcagaggataatgaattaaatagtacg

SEQ ID NO: 24620 - DNA, 30 bp, Artificial Sequence
  Synthetic oligonucleotide
aggtaggaattagatcgctcgggaaaaccg

SEQ ID NO: 24621 - DNA, 30 bp, Artificial Sequence
  Synthetic oligonucleotide
agagagtttgagtgtgtagtacaggaaccg

SEQ ID NO: 24622 - DNA, 30 bp, Artificial Sequence
  Synthetic oligonucleotide
acaaacgcagaccaatcaaaatccccaccg

SEQ ID NO: 24623 - DNA, 30 bp, Artificial Sequence
  Synthetic oligonucleotide
gctgtggaacagtttcggaagtacagaccg

SEQ ID NO: 24624 - DNA, 30 bp, Artificial Sequence
  Synthetic oligonucleotide
ctgggtaaccatctgcctagtacccgaccg

SEQ ID NO: 24625 - DNA, 30 bp, Artificial Sequence
  Synthetic oligonucleotide
aacgagaactggtgatcggaaccatgaccg

SEQ ID NO: 24626 - DNA, 30 bp, Artificial Sequence
  Synthetic oligonucleotide
gtgtgagggacgtaagaataaatgctaccg

SEQ ID NO: 24627 - DNA, 30 bp, Artificial Sequence
  Synthetic oligonucleotide
tgtgggcgaagcataaaggcaaatctaccg

SEQ ID NO: 24628 - DNA, 30 bp, Artificial Sequence
  Synthetic oligonucleotide
gagaaaaggggtagcatcaggcgaaacccg

SEQ ID NO: 24629 - DNA, 30 bp, Artificial Sequence
  Synthetic oligonucleotide
atcggaagaacagcaatggccgctaacccg

SEQ ID NO: 24630 - DNA, 30 bp, Artificial Sequence
  Synthetic oligonucleotide
caggccgaacgaactggatggcaggacccg

SEQ ID NO: 24631 - DNA, 30 bp, Artificial Sequence
  Synthetic oligonucleotide
tcgtaacatccgtaatgattagtaaccccg

SEQ ID NO: 24632 - DNA, 30 bp, Artificial Sequence
  Synthetic oligonucleotide
aaccaaacctcgtgaaacagtcgccccccg

SEQ ID NO: 24633 - DNA, 30 bp, Artificial Sequence
  Synthetic oligonucleotide
agcaagtccctagatcggacgagaggcccg

SEQ ID NO: 24634 - DNA, 30 bp, Artificial Sequence
  Synthetic oligonucleotide
aggacattttcatcagaacatggcggcccg

SEQ ID NO: 24635 - DNA, 30 bp, Artificial Sequence
  Synthetic oligonucleotide
aagcgcagcgagaataccgaggcgtgcccg

SEQ ID NO: 24636 - DNA, 30 bp, Artificial Sequence
  Synthetic oligonucleotide
ccttacaggtgaaccaaaccataggtcccg

SEQ ID NO: 24637 - DNA, 30 bp, Artificial Sequence
  Synthetic oligonucleotide
agagaggcgatgtacagaaatagattcccg

SEQ ID NO: 24638 - DNA, 30 bp, Artificial Sequence
  Synthetic oligonucleotide
agggagttaaaacgtagcctaagcaagccg

SEQ ID NO: 24639 - DNA, 30 bp, Artificial Sequence
  Synthetic oligonucleotide
gctgaagctaaacgttacatcgggaagccg

SEQ ID NO: 24640 - DNA, 30 bp, Artificial Sequence
  Synthetic oligonucleotide
gaggtgcagaggaagaaagataaagagccg

SEQ ID NO: 24641 - DNA, 30 bp, Artificial Sequence
  Synthetic oligonucleotide
ccgtcataagaggcgtaaatagggtcgccg

SEQ ID NO: 24642 - DNA, 30 bp, Artificial Sequence
  Synthetic oligonucleotide
cgaataaggatggcatgtactacgatgccg

SEQ ID NO: 24643 - DNA, 30 bp, Artificial Sequence
  Synthetic oligonucleotide
ataggtcccaacccacaaggcaagttgccg

SEQ ID NO: 24644 - DNA, 30 bp, Artificial Sequence
  Synthetic oligonucleotide
ccttcagcgtcgaatctcaatactcctccg

SEQ ID NO: 24645 - DNA, 30 bp, Artificial Sequence
  Synthetic oligonucleotide
acgtgaccgatctcgtctatgctaagtccg

SEQ ID NO: 24646 - DNA, 30 bp, Artificial Sequence
  Synthetic oligonucleotide
aggaggcaagcaggcggatagcatggtccg

SEQ ID NO: 24647 - DNA, 30 bp, Artificial Sequence
  Synthetic oligonucleotide
gcgcctgatcctcaaacgaacgtccaagcg

SEQ ID NO: 24648 - DNA, 30 bp, Artificial Sequence
  Synthetic oligonucleotide
aacactactcagtaggtacgaaactaagcg

SEQ ID NO: 24649 - DNA, 30 bp, Artificial Sequence
  Synthetic oligonucleotide
aggaacagcccgagctagtgcgattaagcg

SEQ ID NO: 24650 - DNA, 30 bp, Artificial Sequence
  Synthetic oligonucleotide
agacatcacaagaaccactcaatcgcagcg

SEQ ID NO: 24651 - DNA, 30 bp, Artificial Sequence
  Synthetic oligonucleotide
gggtcgaccgtacatggaagaagggcagcg

SEQ ID NO: 24652 - DNA, 30 bp, Artificial Sequence
  Synthetic oligonucleotide
atcgtggaagtgcaaggatagtattcagcg

SEQ ID NO: 24653 - DNA, 30 bp, Artificial Sequence
  Synthetic oligonucleotide
tgagtgccaaccgtacggaggaggggagcg

SEQ ID NO: 24654 - DNA, 30 bp, Artificial Sequence
  Synthetic oligonucleotide
tagagcgaaggtggtcggaaggcgtgagcg

SEQ ID NO: 24655 - DNA, 30 bp, Artificial Sequence
  Synthetic oligonucleotide
aaccggcggtagggtcaagaaattagcgcg

SEQ ID NO: 24656 - DNA, 30 bp, Artificial Sequence
  Synthetic oligonucleotide
catgctttactgagacaaatgggaatcgcg

SEQ ID NO: 24657 - DNA, 30 bp, Artificial Sequence
  Synthetic oligonucleotide
tcgtgtgtgtgctataacaaggccaaggcg

SEQ ID NO: 24658 - DNA, 30 bp, Artificial Sequence
  Synthetic oligonucleotide
aagcaaatgcagcaggctaagagcaaggcg

SEQ ID NO: 24659 - DNA, 30 bp, Artificial Sequence
  Synthetic oligonucleotide
tgtgctggtgaatgagtacatctgcaggcg

SEQ ID NO: 24660 - DNA, 30 bp, Artificial Sequence
  Synthetic oligonucleotide
ggcacagttttaggggagtcgaagtaggcg

SEQ ID NO: 24661 - DNA, 30 bp, Artificial Sequence
  Synthetic oligonucleotide
gctacaacgggagttgcaaatggatcggcg

SEQ ID NO: 24662 - DNA, 30 bp, Artificial Sequence
  Synthetic oligonucleotide
aacatgggcgtgtcacggtaaacttcggcg

SEQ ID NO: 24663 - DNA, 30 bp, Artificial Sequence
  Synthetic oligonucleotide
gagcaaatccaggggaacacatccagggcg

SEQ ID NO: 24664 - DNA, 30 bp, Artificial Sequence
  Synthetic oligonucleotide
acgtgggagaacgtcgaatcgaacggggcg

SEQ ID NO: 24665 - DNA, 30 bp, Artificial Sequence
  Synthetic oligonucleotide
tagcatcggggaatattcggtgcgatggcg

SEQ ID NO: 24666 - DNA, 30 bp, Artificial Sequence
  Synthetic oligonucleotide
gatcagaggaaaaatggcacaagtgtggcg

SEQ ID NO: 24667 - DNA, 30 bp, Artificial Sequence
  Synthetic oligonucleotide
acactaagggccatctaacaagctaatgcg

SEQ ID NO: 24668 - DNA, 30 bp, Artificial Sequence
  Synthetic oligonucleotide
cgggacatgtaggggccagaccacgatgcg

SEQ ID NO: 24669 - DNA, 30 bp, Artificial Sequence
  Synthetic oligonucleotide
gtgtacatacctcgcaacaattagggtgcg

SEQ ID NO: 24670 - DNA, 30 bp, Artificial Sequence
  Synthetic oligonucleotide
acgatacataacacagctgactccgaatcg

SEQ ID NO: 24671 - DNA, 30 bp, Artificial Sequence
  Synthetic oligonucleotide
tgtcatgcaagcaactagtgaagcacatcg

SEQ ID NO: 24672 - DNA, 30 bp, Artificial Sequence
  Synthetic oligonucleotide
cgagatggtcaagttggagtagggccatcg

SEQ ID NO: 24673 - DNA, 30 bp, Artificial Sequence
  Synthetic oligonucleotide
acgtggagacatccactggttgttccatcg

SEQ ID NO: 24674 - DNA, 30 bp, Artificial Sequence
  Synthetic oligonucleotide
cctacgagggcataatagcgtctggcatcg

SEQ ID NO: 24675 - DNA, 30 bp, Artificial Sequence
  Synthetic oligonucleotide
agggtgattacaactcgttgggtcagatcg

SEQ ID NO: 24676 - DNA, 30 bp, Artificial Sequence
  Synthetic oligonucleotide
cgccggaaggggatattaagatctggatcg

SEQ ID NO: 24677 - DNA, 30 bp, Artificial Sequence
  Synthetic oligonucleotide
cgaagggctgagcctatggagtatgtatcg

SEQ ID NO: 24678 - DNA, 30 bp, Artificial Sequence
  Synthetic oligonucleotide
acatgggctccctacactgtcggatactcg

SEQ ID NO: 24679 - DNA, 30 bp, Artificial Sequence
  Synthetic oligonucleotide
tgctcaagccagcgatacaggcaagcctcg

SEQ ID NO: 24680 - DNA, 30 bp, Artificial Sequence
  Synthetic oligonucleotide
cgtgaaaagtagttttcgtaagcaagctcg

SEQ ID NO: 24681 - DNA, 30 bp, Artificial Sequence
  Synthetic oligonucleotide
cacgggggtggggaaagacgaaggagctcg

SEQ ID NO: 24682 - DNA, 30 bp, Artificial Sequence
  Synthetic oligonucleotide
gtaacaatcagttatgaccacgacgtctcg

SEQ ID NO: 24683 - DNA, 30 bp, Artificial Sequence
  Synthetic oligonucleotide
aggatgtacttctggcctcgggctgtctcg

SEQ ID NO: 24684 - DNA, 30 bp, Artificial Sequence
  Synthetic oligonucleotide
agacaattgtatacctcaaagagagcgtcg

SEQ ID NO: 24685 - DNA, 30 bp, Artificial Sequence
  Synthetic oligonucleotide
agtccaagtgtcgtagctaatgagaggtcg

SEQ ID NO: 24686 - DNA, 30 bp, Artificial Sequence
  Synthetic oligonucleotide
aggcctgaagtccgtgacggatcgaggtcg

SEQ ID NO: 24687 - DNA, 30 bp, Artificial Sequence
  Synthetic oligonucleotide
gccgtcggtaggccaaaactcctggattcg

SEQ ID NO: 24688 - DNA, 30 bp, Artificial Sequence
  Synthetic oligonucleotide
cacgtccatgtaccgatcttaaagagttcg

SEQ ID NO: 24689 - DNA, 30 bp, Artificial Sequence
  Synthetic oligonucleotide
gtcaaacacaaagatgacataaaaaaaagg

SEQ ID NO: 24690 - DNA, 30 bp, Artificial Sequence
  Synthetic oligonucleotide
ttgtcgagtggagcgaagaacaagaaaagg

SEQ ID NO: 24691 - DNA, 30 bp, Artificial Sequence
  Synthetic oligonucleotide
gggacgaaataacaagagcaaggccaaagg

SEQ ID NO: 24692 - DNA, 30 bp, Artificial Sequence
  Synthetic oligonucleotide
cgccgtaagcgccaaggcacaccgcaaagg

SEQ ID NO: 24693 - DNA, 30 bp, Artificial Sequence
  Synthetic oligonucleotide
ggagcatgcgacagacaggagctctaaagg

SEQ ID NO: 24694 - DNA, 30 bp, Artificial Sequence
  Synthetic oligonucleotide
cgaatcgagcgcaatgacaaggtttaaagg

SEQ ID NO: 24695 - DNA, 30 bp, Artificial Sequence
  Synthetic oligonucleotide
agtggatcgggtaaagtattatgctcaagg

SEQ ID NO: 24696 - DNA, 30 bp, Artificial Sequence
  Synthetic oligonucleotide
ggcttacgataatacagagtgtgtataagg

SEQ ID NO: 24697 - DNA, 30 bp, Artificial Sequence
  Synthetic oligonucleotide
taaggaaaaagatgcgacaagcagttaagg

SEQ ID NO: 24698 - DNA, 30 bp, Artificial Sequence
  Synthetic oligonucleotide
ggagccaagagccttaacagccaaaacagg

SEQ ID NO: 24699 - DNA, 30 bp, Artificial Sequence
  Synthetic oligonucleotide
gacagtacaggattatggggaaaatacagg

SEQ ID NO: 24700 - DNA, 30 bp, Artificial Sequence
  Synthetic oligonucleotide
cactagctcggtacgatcatacgatacagg

SEQ ID NO: 24701 - DNA, 30 bp, Artificial Sequence
  Synthetic oligonucleotide
atgaaggtaacttccgcccgtgaagccagg

SEQ ID NO: 24702 - DNA, 30 bp, Artificial Sequence
  Synthetic oligonucleotide
gatactcgacggcgtgaacagagagccagg

SEQ ID NO: 24703 - DNA, 30 bp, Artificial Sequence
  Synthetic oligonucleotide
caggccagaaacacagtgaggagtgccagg

SEQ ID NO: 24704 - DNA, 30 bp, Artificial Sequence
  Synthetic oligonucleotide
ggggggcgcgtttgaaatgtactatccagg

SEQ ID NO: 24705 - DNA, 30 bp, Artificial Sequence
  Synthetic oligonucleotide
acacgtccgtgtgggacaaaccagagcagg

SEQ ID NO: 24706 - DNA, 30 bp, Artificial Sequence
  Synthetic oligonucleotide
cacgtagctttcgatgaggagtagaagagg

SEQ ID NO: 24707 - DNA, 30 bp, Artificial Sequence
  Synthetic oligonucleotide
gaacattggatgaaacgtatcgggcagagg

SEQ ID NO: 24708 - DNA, 30 bp, Artificial Sequence
  Synthetic oligonucleotide
ggagtataactattagggagtaaaccgagg

SEQ ID NO: 24709 - DNA, 30 bp, Artificial Sequence
  Synthetic oligonucleotide
tcaaagactagtctctcaagataggcgagg

SEQ ID NO: 24710 - DNA, 30 bp, Artificial Sequence
  Synthetic oligonucleotide
aacggtaccaaaggaggacgcgactcgagg

SEQ ID NO: 24711 - DNA, 30 bp, Artificial Sequence
  Synthetic oligonucleotide
tgttaaagtgggatatagtggagccggagg

SEQ ID NO: 24712 - DNA, 30 bp, Artificial Sequence
  Synthetic oligonucleotide
ccgaggaatcagaggtatgtaagtcggagg

SEQ ID NO: 24713 - DNA, 30 bp, Artificial Sequence
  Synthetic oligonucleotide
tcgaaacgccgaatagtctatagagggagg

SEQ ID NO: 24714 - DNA, 30 bp, Artificial Sequence
  Synthetic oligonucleotide
gataatacacaagttgcccgaccaatgagg

SEQ ID NO: 24715 - DNA, 30 bp, Artificial Sequence
  Synthetic oligonucleotide
cgaagacgaataagcgggaaacacttgagg

SEQ ID NO: 24716 - DNA, 30 bp, Artificial Sequence
  Synthetic oligonucleotide
gaagtacagcaggattggttacgaaatagg

SEQ ID NO: 24717 - DNA, 30 bp, Artificial Sequence
  Synthetic oligonucleotide
aaggggaacgctcaaccagcaggatatagg

SEQ ID NO: 24718 - DNA, 30 bp, Artificial Sequence
  Synthetic oligonucleotide
cagttggccaaagtaatattcaggactagg

SEQ ID NO: 24719 - DNA, 30 bp, Artificial Sequence
  Synthetic oligonucleotide
acgcaagacagtagtgaggcgactgctagg

SEQ ID NO: 24720 - DNA, 30 bp, Artificial Sequence
  Synthetic oligonucleotide
tagagaagctaaaagctcaaaccacgtagg

SEQ ID NO: 24721 - DNA, 30 bp, Artificial Sequence
  Synthetic oligonucleotide
acgtggtgtttgaaccggacataaggtagg

SEQ ID NO: 24722 - DNA, 30 bp, Artificial Sequence
  Synthetic oligonucleotide
ccggcagtgcaaccagtcaaaaagggtagg

SEQ ID NO: 24723 - DNA, 30 bp, Artificial Sequence
  Synthetic oligonucleotide
ccaccacgaggaattcaaagcacatttagg

SEQ ID NO: 24724 - DNA, 30 bp, Artificial Sequence
  Synthetic oligonucleotide
gaagggacaaacgagtagggttatgcacgg

SEQ ID NO: 24725 - DNA, 30 bp, Artificial Sequence
  Synthetic oligonucleotide
acggtctacgatcggagagcgaatcgacgg

SEQ ID NO: 24726 - DNA, 30 bp, Artificial Sequence
  Synthetic oligonucleotide
cgtgtaaggggaacagtcctgccagtacgg

SEQ ID NO: 24727 - DNA, 30 bp, Artificial Sequence
  Synthetic oligonucleotide
acgaaaacgaccctctctcgcccggtacgg

SEQ ID NO: 24728 - DNA, 30 bp, Artificial Sequence
  Synthetic oligonucleotide
acaaggactgcgcccaacagatacgaccgg

SEQ ID NO: 24729 - DNA, 30 bp, Artificial Sequence
  Synthetic oligonucleotide
cgagatgaaactcgtaaaacgagcagccgg

SEQ ID NO: 24730 - DNA, 30 bp, Artificial Sequence
  Synthetic oligonucleotide
tacgaactctacatctaggtggaaggccgg

SEQ ID NO: 24731 - DNA, 30 bp, Artificial Sequence
  Synthetic oligonucleotide
ccgaagggtgggaaagaaataatgtgccgg

SEQ ID NO: 24732 - DNA, 30 bp, Artificial Sequence
  Synthetic oligonucleotide
gtgcgaatctgtgtcaagaaaggtcagcgg

SEQ ID NO: 24733 - DNA, 30 bp, Artificial Sequence
  Synthetic oligonucleotide
gtaggtcttaaaccagaaagcgaaaatcgg

SEQ ID NO: 24734 - DNA, 30 bp, Artificial Sequence
  Synthetic oligonucleotide
tgcgcctagcgaggaaaggcgttaaaaggg

SEQ ID NO: 24735 - DNA, 30 bp, Artificial Sequence
  Synthetic oligonucleotide
tactggcgaatataatgacgtgagaaaggg

SEQ ID NO: 24736 - DNA, 30 bp, Artificial Sequence
  Synthetic oligonucleotide
aacgatatacttccgagtagagggcaaggg

SEQ ID NO: 24737 - DNA, 30 bp, Artificial Sequence
  Synthetic oligonucleotide
cgatcaatgttagcctctgtataagaaggg

SEQ ID NO: 24738 - DNA, 30 bp, Artificial Sequence
  Synthetic oligonucleotide
cggcacgtcgacaactatccttgtgaaggg

SEQ ID NO: 24739 - DNA, 30 bp, Artificial Sequence
  Synthetic oligonucleotide
ggacacaccacctgaccattagcttaaggg

SEQ ID NO: 24740 - DNA, 30 bp, Artificial Sequence
  Synthetic oligonucleotide
acaaaagagcattatgtttagtaaacaggg

SEQ ID NO: 24741 - DNA, 30 bp, Artificial Sequence
  Synthetic oligonucleotide
ttcgcaagacattggacggcttgaacaggg

SEQ ID NO: 24742 - DNA, 30 bp, Artificial Sequence
  Synthetic oligonucleotide
aggcgtggtcaagtgcccatggatacaggg

SEQ ID NO: 24743 - DNA, 30 bp, Artificial Sequence
  Synthetic oligonucleotide
agaaatgtgttaaaaggcgagacatcaggg

SEQ ID NO: 24744 - DNA, 30 bp, Artificial Sequence
  Synthetic oligonucleotide
agtatgataatgcgattaggctagtcaggg

SEQ ID NO: 24745 - DNA, 30 bp, Artificial Sequence
  Synthetic oligonucleotide
tgtaatggagtcaccagctagtacggaggg

SEQ ID NO: 24746 - DNA, 30 bp, Artificial Sequence
  Synthetic oligonucleotide
atgggagccatctcaatctcacacctaggg

SEQ ID NO: 24747 - DNA, 30 bp, Artificial Sequence
  Synthetic oligonucleotide
cgatattttcagacccgggaggcattaggg

SEQ ID NO: 24748 - DNA, 30 bp, Artificial Sequence
  Synthetic oligonucleotide
acggaaacacagaatatcccgtgctgcggg

SEQ ID NO: 24749 - DNA, 30 bp, Artificial Sequence
  Synthetic oligonucleotide
tgtactaaaactatgtgccaaaagctcggg

SEQ ID NO: 24750 - DNA, 30 bp, Artificial Sequence
  Synthetic oligonucleotide
gaaggtaggaaaacagcgctagctctcggg

SEQ ID NO: 24751 - DNA, 30 bp, Artificial Sequence
  Synthetic oligonucleotide
ggacaacatagcagcattcaaaaccagggg

SEQ ID NO: 24752 - DNA, 30 bp, Artificial Sequence
  Synthetic oligonucleotide
gtcggttgccggcaaggagatcgcgagggg

SEQ ID NO: 24753 - DNA, 30 bp, Artificial Sequence
  Synthetic oligonucleotide
acgggattcgtcaacaagtcatgctagggg

SEQ ID NO: 24754 - DNA, 30 bp, Artificial Sequence
  Synthetic oligonucleotide
gagagctaggaatgatagacaacttagggg

SEQ ID NO: 24755 - DNA, 30 bp, Artificial Sequence
  Synthetic oligonucleotide
cgttaacatgggataggggttatagcgggg

SEQ ID NO: 24756 - DNA, 30 bp, Artificial Sequence
  Synthetic oligonucleotide
cggccgaagagattgccaatcgcccggggg

SEQ ID NO: 24757 - DNA, 30 bp, Artificial Sequence
  Synthetic oligonucleotide
ggtagaggttcgaaacgacaataatggggg

SEQ ID NO: 24758 - DNA, 30 bp, Artificial Sequence
  Synthetic oligonucleotide
ccttacaagggcccaaaaggttaaaatggg

SEQ ID NO: 24759 - DNA, 30 bp, Artificial Sequence
  Synthetic oligonucleotide
agctgtcgtgcatacatcaatacacatggg

SEQ ID NO: 24760 - DNA, 30 bp, Artificial Sequence
  Synthetic oligonucleotide
gaccgaactcggaggataacggatcatggg

SEQ ID NO: 24761 - DNA, 30 bp, Artificial Sequence
  Synthetic oligonucleotide
aaactagagagtactggcggcaaggatggg

SEQ ID NO: 24762 - DNA, 30 bp, Artificial Sequence
  Synthetic oligonucleotide
cgctaaataaaaatgtcccgaaggcctggg

SEQ ID NO: 24763 - DNA, 30 bp, Artificial Sequence
  Synthetic oligonucleotide
agagagactcaaaaactcgaattacgtggg

SEQ ID NO: 24764 - DNA, 30 bp, Artificial Sequence
  Synthetic oligonucleotide
acttaagaagatgggtattaaaggaaatgg

SEQ ID NO: 24765 - DNA, 30 bp, Artificial Sequence
  Synthetic oligonucleotide
cagggagtgatcaatttcccacgacaatgg

SEQ ID NO: 24766 - DNA, 30 bp, Artificial Sequence
  Synthetic oligonucleotide
gagcggaaagaaccgagagtccgagaatgg

SEQ ID NO: 24767 - DNA, 30 bp, Artificial Sequence
  Synthetic oligonucleotide
gtgatagaagatctcaattgaagggaatgg

SEQ ID NO: 24768 - DNA, 30 bp, Artificial Sequence
  Synthetic oligonucleotide
cacggcgatcttaaaccacaagtgccatgg

SEQ ID NO: 24769 - DNA, 30 bp, Artificial Sequence
  Synthetic oligonucleotide
aatagcttggaaagatcgagaaatggatgg

SEQ ID NO: 24770 - DNA, 30 bp, Artificial Sequence
  Synthetic oligonucleotide
tacgcaaaacgtgaaagagttccagtatgg

SEQ ID NO: 24771 - DNA, 30 bp, Artificial Sequence
  Synthetic oligonucleotide
agcatgccagagtaagcggtaactaactgg

SEQ ID NO: 24772 - DNA, 30 bp, Artificial Sequence
  Synthetic oligonucleotide
aaaggatgatgtgctggattaaggccctgg

SEQ ID NO: 24773 - DNA, 30 bp, Artificial Sequence
  Synthetic oligonucleotide
tagcggagactccgccgaagaggaagctgg

SEQ ID NO: 24774 - DNA, 30 bp, Artificial Sequence
  Synthetic oligonucleotide
tgcaggtaagcgctaaagggcacgttctgg

SEQ ID NO: 24775 - DNA, 30 bp, Artificial Sequence
  Synthetic oligonucleotide
ggggtgcccacaacgcaaaagtgaaagtgg

SEQ ID NO: 24776 - DNA, 30 bp, Artificial Sequence
  Synthetic oligonucleotide
gggaagtagagtcggctgaaggctaagtgg

SEQ ID NO: 24777 - DNA, 30 bp, Artificial Sequence
  Synthetic oligonucleotide
aggcactcgcaaatagcatagtcctagtgg

SEQ ID NO: 24778 - DNA, 30 bp, Artificial Sequence
  Synthetic oligonucleotide
agctggaaaacgatggggcaacgtgcgtgg

SEQ ID NO: 24779 - DNA, 30 bp, Artificial Sequence
  Synthetic oligonucleotide
aggtgtggtagaactcaatgtccgtcgtgg

SEQ ID NO: 24780 - DNA, 30 bp, Artificial Sequence
  Synthetic oligonucleotide
gaggaaattcagatggtgataggtaggtgg

SEQ ID NO: 24781 - DNA, 34 bp, Artificial Sequence
  Synthetic oligonucleotide
aactacccaagtaactgcagtaggcgggtggtgg

SEQ ID NO: 24782 - DNA, 30 bp, Artificial Sequence
  Synthetic oligonucleotide
ggagcggcatagattagagccgtaagttgg

SEQ ID NO: 24783 - DNA, 30 bp, Artificial Sequence
  Synthetic oligonucleotide
tgaggcaagagcgataaagggcctcgttgg

SEQ ID NO: 24784 - DNA, 30 bp, Artificial Sequence
  Synthetic oligonucleotide
cgtagtaatagggtaaaggcccatcaaatg

SEQ ID NO: 24785 - DNA, 30 bp, Artificial Sequence
  Synthetic oligonucleotide
ggtcggttatgcgtcgaacccagagcaatg

SEQ ID NO: 24786 - DNA, 30 bp, Artificial Sequence
  Synthetic oligonucleotide
acaggaactcggcatggcgtacggtcaatg

SEQ ID NO: 24787 - DNA, 30 bp, Artificial Sequence
  Synthetic oligonucleotide
ggcacagctgagatcaattgacagaacatg

SEQ ID NO: 24788 - DNA, 30 bp, Artificial Sequence
  Synthetic oligonucleotide
ggacagtaggtatcggtagcctcagacatg

SEQ ID NO: 24789 - DNA, 30 bp, Artificial Sequence
  Synthetic oligonucleotide
gcgaacccacaacttgctaagctacccatg

SEQ ID NO: 24790 - DNA, 30 bp, Artificial Sequence
  Synthetic oligonucleotide
tcttaacccaacaggtccataatcagcatg

SEQ ID NO: 24791 - DNA, 30 bp, Artificial Sequence
  Synthetic oligonucleotide
ttgaggatcggggcgacgacaaggtgcatg

SEQ ID NO: 24792 - DNA, 30 bp, Artificial Sequence
  Synthetic oligonucleotide
ctacagactatgagttagaccgtgtgcatg

SEQ ID NO: 24793 - DNA, 30 bp, Artificial Sequence
  Synthetic oligonucleotide
gctaaggcgagtgaaagttaaatgatcatg

SEQ ID NO: 24794 - DNA, 30 bp, Artificial Sequence
  Synthetic oligonucleotide
tatggaactaaatagcacaggacactcatg

SEQ ID NO: 24795 - DNA, 30 bp, Artificial Sequence
  Synthetic oligonucleotide
cgcgtggaaattgagtttgtccataagatg

SEQ ID NO: 24796 - DNA, 30 bp, Artificial Sequence
  Synthetic oligonucleotide
caacattgtaaaaccggagggagagagatg

SEQ ID NO: 24797 - DNA, 30 bp, Artificial Sequence
  Synthetic oligonucleotide
agaagaggtatagccccgcaagaaacgatg

SEQ ID NO: 24798 - DNA, 30 bp, Artificial Sequence
  Synthetic oligonucleotide
aggtgcaacctattcgacaccaagacgatg

SEQ ID NO: 24799 - DNA, 30 bp, Artificial Sequence
  Synthetic oligonucleotide
gggcgagactgcggatgttgatggtcgatg

SEQ ID NO: 24800 - DNA, 30 bp, Artificial Sequence
  Synthetic oligonucleotide
gaaggcaactcagctggaatagataggatg

SEQ ID NO: 24801 - DNA, 30 bp, Artificial Sequence
  Synthetic oligonucleotide
cggggcagatggtctcacgccataaatatg

SEQ ID NO: 24802 - DNA, 30 bp, Artificial Sequence
  Synthetic oligonucleotide
gtgagaggagagagtaactacacttatatg

SEQ ID NO: 24803 - DNA, 30 bp, Artificial Sequence
  Synthetic oligonucleotide
cacggcctcagacggaatcaactccttatg

SEQ ID NO: 24804 - DNA, 30 bp, Artificial Sequence
  Synthetic oligonucleotide
gtcgcgagttctgcgaagggaggaaaactg

SEQ ID NO: 24805 - DNA, 30 bp, Artificial Sequence
  Synthetic oligonucleotide
catggggcgtgtaaacatatggacaaactg

SEQ ID NO: 24806 - DNA, 30 bp, Artificial Sequence
  Synthetic oligonucleotide
gaaagggagaggacattaaacatacaactg

SEQ ID NO: 24807 - DNA, 30 bp, Artificial Sequence
  Synthetic oligonucleotide
gcgacagcgcgataatcaaacgatcaactg

SEQ ID NO: 24808 - DNA, 30 bp, Artificial Sequence
  Synthetic oligonucleotide
agtgtacggcgtgaaggaataactgaactg

SEQ ID NO: 24809 - DNA, 30 bp, Artificial Sequence
  Synthetic oligonucleotide
acctgcacaacagcaacaccaggcacactg

SEQ ID NO: 24810 - DNA, 30 bp, Artificial Sequence
  Synthetic oligonucleotide
cgccgttacgggaaaaacataccgggactg

SEQ ID NO: 24811 - DNA, 30 bp, Artificial Sequence
  Synthetic oligonucleotide
cgatagtgagagtacggtactaggggactg

SEQ ID NO: 24812 - DNA, 30 bp, Artificial Sequence
  Synthetic oligonucleotide
gaggaactagtggatagaccccgtgtactg

SEQ ID NO: 24813 - DNA, 30 bp, Artificial Sequence
  Synthetic oligonucleotide
ggaggtaaaaagtcaagtcctgcccccctg

SEQ ID NO: 24814 - DNA, 30 bp, Artificial Sequence
  Synthetic oligonucleotide
accgcaagttgaccatctaagagcgccctg

SEQ ID NO: 24815 - DNA, 31 bp, Artificial Sequence
  Synthetic oligonucleotide
agatagctcagtaaacaagacaaagatcctg

SEQ ID NO: 24816 - DNA, 30 bp, Artificial Sequence
  Synthetic oligonucleotide
catgcttcagagaaatcgtaagtactcctg

SEQ ID NO: 24817 - DNA, 30 bp, Artificial Sequence
  Synthetic oligonucleotide
gatggcggaaaatgccaaaacggcctcctg

SEQ ID NO: 24818 - DNA, 30 bp, Artificial Sequence
  Synthetic oligonucleotide
tgtagaggtaaaatcgaacgttacaagctg

SEQ ID NO: 24819 - DNA, 30 bp, Artificial Sequence
  Synthetic oligonucleotide
aaagcggagaaggatcagatgaggtggctg

SEQ ID NO: 24820 - DNA, 30 bp, Artificial Sequence
  Synthetic oligonucleotide
ctgaagggaaccatacgtctagtcgtgctg

SEQ ID NO: 24821 - DNA, 30 bp, Artificial Sequence
  Synthetic oligonucleotide
atagcggcatggcttaaaggcggtcatctg

SEQ ID NO: 24822 - DNA, 30 bp, Artificial Sequence
  Synthetic oligonucleotide
agctcccacaaccacgatgggccagatctg

SEQ ID NO: 24823 - DNA, 30 bp, Artificial Sequence
  Synthetic oligonucleotide
gacgtggaggaagtaaacgtcacggctctg

SEQ ID NO: 24824 - DNA, 31 bp, Artificial Sequence
  Synthetic oligonucleotide
ccatggaagcacaacttactgagcaggtctg

SEQ ID NO: 24825 - DNA, 30 bp, Artificial Sequence
  Synthetic oligonucleotide
tctcgcacaaaatacgatcaagcatgtctg

SEQ ID NO: 24826 - DNA, 30 bp, Artificial Sequence
  Synthetic oligonucleotide
ctacccaagagtgcgacatcaacgattctg

SEQ ID NO: 24827 - DNA, 30 bp, Artificial Sequence
  Synthetic oligonucleotide
agggggcgaagttaaagattcagagttctg

SEQ ID NO: 24828 - DNA, 30 bp, Artificial Sequence
  Synthetic oligonucleotide
atgcgcaagactttaccgtcaaccaaagtg

SEQ ID NO: 24829 - DNA, 30 bp, Artificial Sequence
  Synthetic oligonucleotide
cgaaatagttggtagaaacctttgaaagtg

SEQ ID NO: 24830 - DNA, 30 bp, Artificial Sequence
  Synthetic oligonucleotide
aaggattccggtgtaagggtacaagaagtg

SEQ ID NO: 24831 - DNA, 31 bp, Artificial Sequence
  Synthetic oligonucleotide
acgaacagagacagtcatgtcatgagaagtg

SEQ ID NO: 24832 - DNA, 30 bp, Artificial Sequence
  Synthetic oligonucleotide
agtgttgtcaagtccagtataactgaagtg

SEQ ID NO: 24833 - DNA, 30 bp, Artificial Sequence
  Synthetic oligonucleotide
atacaaatcacaaatgtaatcgcgacagtg

SEQ ID NO: 24834 - DNA, 30 bp, Artificial Sequence
  Synthetic oligonucleotide
cacaaggatgtgcccatcacttatacagtg

SEQ ID NO: 24835 - DNA, 30 bp, Artificial Sequence
  Synthetic oligonucleotide
cataagcataaaccagcaacagcaccagtg

SEQ ID NO: 24836 - DNA, 30 bp, Artificial Sequence
  Synthetic oligonucleotide
tccatcagactgactccatggtgaagagtg

SEQ ID NO: 24837 - DNA, 30 bp, Artificial Sequence
  Synthetic oligonucleotide
cgcgtgcgtatcctatgaatcaggcgagtg

SEQ ID NO: 24838 - DNA, 30 bp, Artificial Sequence
  Synthetic oligonucleotide
tgagcgatgtgtagggcctcgtaggtagtg

SEQ ID NO: 24839 - DNA, 30 bp, Artificial Sequence
  Synthetic oligonucleotide
acgcccgaataaggtggtcgattctacgtg

SEQ ID NO: 24840 - DNA, 30 bp, Artificial Sequence
  Synthetic oligonucleotide
agcagaaccagtacagcaggacaagccgtg

SEQ ID NO: 24841 - DNA, 30 bp, Artificial Sequence
  Synthetic oligonucleotide
caggaccgaattaaacgagggatccgcgtg

SEQ ID NO: 24842 - DNA, 30 bp, Artificial Sequence
  Synthetic oligonucleotide
atagagaagggggcctgacatggctgcgtg

SEQ ID NO: 24843 - DNA, 30 bp, Artificial Sequence
  Synthetic oligonucleotide
gaacgaagtaacaccaagcccacaatcgtg

SEQ ID NO: 24844 - DNA, 30 bp, Artificial Sequence
  Synthetic oligonucleotide
taaggtaaacggcgacaccccctgttcgtg

SEQ ID NO: 24845 - DNA, 30 bp, Artificial Sequence
  Synthetic oligonucleotide
agagggtaacacggcaatgaatgacaggtg

SEQ ID NO: 24846 - DNA, 30 bp, Artificial Sequence
  Synthetic oligonucleotide
ctaaaatcggaatgcacaaatggagaggtg

SEQ ID NO: 24847 - DNA, 30 bp, Artificial Sequence
  Synthetic oligonucleotide
acagaggataaatggctttcaaagctggtg

SEQ ID NO: 24848 - DNA, 30 bp, Artificial Sequence
  Synthetic oligonucleotide
taatagcgggaagctaagtgcgtcaatgtg

SEQ ID NO: 24849 - DNA, 30 bp, Artificial Sequence
  Synthetic oligonucleotide
cacccgtgaacgacaaaaaccaaacgtgtg

SEQ ID NO: 24850 - DNA, 30 bp, Artificial Sequence
  Synthetic oligonucleotide
tgaggaaaaaacacttcaactgcgattgtg

SEQ ID NO: 24851 - DNA, 30 bp, Artificial Sequence
  Synthetic oligonucleotide
agtgggaggggcggcctgcgtgacaaattg

SEQ ID NO: 24852 - DNA, 30 bp, Artificial Sequence
  Synthetic oligonucleotide
acgaatgggtattaagaagctgggaaattg

SEQ ID NO: 24853 - DNA, 30 bp, Artificial Sequence
  Synthetic oligonucleotide
ggaatacgagctatgaaatcttccgaattg

SEQ ID NO: 24854 - DNA, 30 bp, Artificial Sequence
  Synthetic oligonucleotide
aagggtgaccaatatcttcacacgacattg

SEQ ID NO: 24855 - DNA, 30 bp, Artificial Sequence
  Synthetic oligonucleotide
cgatgagaggtcaacagcacaacatcattg

SEQ ID NO: 24856 - DNA, 30 bp, Artificial Sequence
  Synthetic oligonucleotide
ggcagggagagccaaatgattacaagattg

SEQ ID NO: 24857 - DNA, 30 bp, Artificial Sequence
  Synthetic oligonucleotide
ctgccacagagctggagggcaaatagattg

SEQ ID NO: 24858 - DNA, 30 bp, Artificial Sequence
  Synthetic oligonucleotide
cctaatggaacggaaagtttaccacgattg

SEQ ID NO: 24859 - DNA, 30 bp, Artificial Sequence
  Synthetic oligonucleotide
cgctcaaagaaactctggcccattggattg

SEQ ID NO: 24860 - DNA, 30 bp, Artificial Sequence
  Synthetic oligonucleotide
actcgctggaaaggcgggatcgattacttg

SEQ ID NO: 24861 - DNA, 30 bp, Artificial Sequence
  Synthetic oligonucleotide
ggtgcaaaacatataatggaattgagcttg

SEQ ID NO: 24862 - DNA, 30 bp, Artificial Sequence
  Synthetic oligonucleotide
cacgtaggtctagatagtcgggtgctgttg

SEQ ID NO: 24863 - DNA, 30 bp, Artificial Sequence
  Synthetic oligonucleotide
ccgcgggagcattagggtaaacgagtgttg

SEQ ID NO: 24864 - DNA, 30 bp, Artificial Sequence
  Synthetic oligonucleotide
tcgtcgtcgcgacaaaaagatgaagatttg

SEQ ID NO: 24865 - DNA, 30 bp, Artificial Sequence
  Synthetic oligonucleotide
cctcggatacacgactatcaaagggatttg

SEQ ID NO: 24866 - DNA, 30 bp, Artificial Sequence
  Synthetic oligonucleotide
ggggctgggacacacgttacagagaaaaat

SEQ ID NO: 24867 - DNA, 30 bp, Artificial Sequence
  Synthetic oligonucleotide
acctacgaacgattgcagggggcgccaaat

SEQ ID NO: 24868 - DNA, 30 bp, Artificial Sequence
  Synthetic oligonucleotide
cacgaagctacagagggaacgtacgcaaat

SEQ ID NO: 24869 - DNA, 30 bp, Artificial Sequence
  Synthetic oligonucleotide
gggtcaagcaagccaagaacaccctcaaat

SEQ ID NO: 24870 - DNA, 30 bp, Artificial Sequence
  Synthetic oligonucleotide
tgggaaggagcgcgagctcagtggcgaaat

SEQ ID NO: 24871 - DNA, 30 bp, Artificial Sequence
  Synthetic oligonucleotide
cgttaagaatatacgttagccgatggaaat

SEQ ID NO: 24872 - DNA, 30 bp, Artificial Sequence
  Synthetic oligonucleotide
taggacacacaacgctttaactgcctaaat

SEQ ID NO: 24873 - DNA, 30 bp, Artificial Sequence
  Synthetic oligonucleotide
gggcacgagggagtctaagcctgcgtaaat

SEQ ID NO: 24874 - DNA, 30 bp, Artificial Sequence
  Synthetic oligonucleotide
ggatactaggagagccgagtgaagcacaat

SEQ ID NO: 24875 - DNA, 30 bp, Artificial Sequence
  Synthetic oligonucleotide
cgcagtgagagcctaataaaaaagcagaat

SEQ ID NO: 24876 - DNA, 30 bp, Artificial Sequence
  Synthetic oligonucleotide
acgtgtctcgaacgagcatcaggatagaat

SEQ ID NO: 24877 - DNA, 30 bp, Artificial Sequence
  Synthetic oligonucleotide
aagtcaactcaccggagaataagcgcgaat

SEQ ID NO: 24878 - DNA, 30 bp, Artificial Sequence
  Synthetic oligonucleotide
acagtgcgtacaaacctaaaagcaaggaat

SEQ ID NO: 24879 - DNA, 30 bp, Artificial Sequence
  Synthetic oligonucleotide
gggctggcatgaagaagataggcaaggaat

SEQ ID NO: 24880 - DNA, 30 bp, Artificial Sequence
  Synthetic oligonucleotide
cgcgacgtcacaggtacaggaaataggaat

SEQ ID NO: 24881 - DNA, 30 bp, Artificial Sequence
  Synthetic oligonucleotide
cgagatgagctaaaagaataggaagggaat

SEQ ID NO: 24882 - DNA, 30 bp, Artificial Sequence
  Synthetic oligonucleotide
gcggatatgtactagtaagcgaggaataat

SEQ ID NO: 24883 - DNA, 30 bp, Artificial Sequence
  Synthetic oligonucleotide
cgatgaacggttaatctcatgaggaataat

SEQ ID NO: 24884 - DNA, 30 bp, Artificial Sequence
  Synthetic oligonucleotide
agggagagcgctcagcttgtcagaggtaat

SEQ ID NO: 24885 - DNA, 30 bp, Artificial Sequence
  Synthetic oligonucleotide
catagtacctaatcgcgaaagccacaacat

SEQ ID NO: 24886 - DNA, 30 bp, Artificial Sequence
  Synthetic oligonucleotide
cgtgcgcgagtagtcggtggttgttaacat

SEQ ID NO: 24887 - DNA, 30 bp, Artificial Sequence
  Synthetic oligonucleotide
gcgtcctcaaaacgataagttacctcacat

SEQ ID NO: 24888 - DNA, 30 bp, Artificial Sequence
  Synthetic oligonucleotide
tgaccgaatagatcgaagttaagcagacat

SEQ ID NO: 24889 - DNA, 30 bp, Artificial Sequence
  Synthetic oligonucleotide
atgggggtgtaatacgagaccaggcgacat

SEQ ID NO: 24890 - DNA, 30 bp, Artificial Sequence
  Synthetic oligonucleotide
acaggcgtgaatgtggatgtacgaggacat

SEQ ID NO: 24891 - DNA, 30 bp, Artificial Sequence
  Synthetic oligonucleotide
gcgcgaagatcatagatgagggatgaccat

SEQ ID NO: 24892 - DNA, 30 bp, Artificial Sequence
  Synthetic oligonucleotide
catcgatcaggtgagtgcggtggttaccat

SEQ ID NO: 24893 - DNA, 30 bp, Artificial Sequence
  Synthetic oligonucleotide
tcgaagagacggcggtacagcgggggccat

SEQ ID NO: 24894 - DNA, 30 bp, Artificial Sequence
  Synthetic oligonucleotide
tagggaggcccaggtgagattagagtccat

SEQ ID NO: 24895 - DNA, 30 bp, Artificial Sequence
  Synthetic oligonucleotide
agacattaggcactcactattgaaaagcat

SEQ ID NO: 24896 - DNA, 30 bp, Artificial Sequence
  Synthetic oligonucleotide
gcgaacgtgccccaagaggtgagtcagcat

SEQ ID NO: 24897 - DNA, 30 bp, Artificial Sequence
  Synthetic oligonucleotide
cgcatctcaatagaggccagggagctgcat

SEQ ID NO: 24898 - DNA, 30 bp, Artificial Sequence
  Synthetic oligonucleotide
cggaatgggagagtagggtgatataatcat

SEQ ID NO: 24899 - DNA, 30 bp, Artificial Sequence
  Synthetic oligonucleotide
ggagggcaggacgtccacgctctaggtcat

SEQ ID NO: 24900 - DNA, 30 bp, Artificial Sequence
  Synthetic oligonucleotide
tagtgatatgctgttcaaagacaagaagat

SEQ ID NO: 24901 - DNA, 30 bp, Artificial Sequence
  Synthetic oligonucleotide
agcttaggcggaggaagagttagataagat

SEQ ID NO: 24902 - DNA, 30 bp, Artificial Sequence
  Synthetic oligonucleotide
tacgaactaatttcgagcttaggaacagat

SEQ ID NO: 24903 - DNA, 30 bp, Artificial Sequence
  Synthetic oligonucleotide
agtcgtaggcaagtcctgagttcagcagat

SEQ ID NO: 24904 - DNA, 30 bp, Artificial Sequence
  Synthetic oligonucleotide
gcggtcaccacaagggcgatattggcagat

SEQ ID NO: 24905 - DNA, 30 bp, Artificial Sequence
  Synthetic oligonucleotide
gcacgactagaccaccacaaccattcagat

SEQ ID NO: 24906 - DNA, 30 bp, Artificial Sequence
  Synthetic oligonucleotide
cctcatggacacaagagtccgtagcacgat

SEQ ID NO: 24907 - DNA, 30 bp, Artificial Sequence
  Synthetic oligonucleotide
gcggaaacacgcttaagttacaccgacgat

SEQ ID NO: 24908 - DNA, 30 bp, Artificial Sequence
  Synthetic oligonucleotide
cagtgagttgaagtgttaaaatatgccgat

SEQ ID NO: 24909 - DNA, 30 bp, Artificial Sequence
  Synthetic oligonucleotide
aacacgagattgaacggcgatttgagcgat

SEQ ID NO: 24910 - DNA, 30 bp, Artificial Sequence
  Synthetic oligonucleotide
ccagtcatggtaagcgaaaagaggttcgat

SEQ ID NO: 24911 - DNA, 30 bp, Artificial Sequence
  Synthetic oligonucleotide
caggggcgaatatcggcatgtaagaaggat

SEQ ID NO: 24912 - DNA, 30 bp, Artificial Sequence
  Synthetic oligonucleotide
tggcgggaaagtagttaagcgcgagaggat

SEQ ID NO: 24913 - DNA, 30 bp, Artificial Sequence
  Synthetic oligonucleotide
ataccgaaattgaccaacgttgccgaggat

SEQ ID NO: 24914 - DNA, 30 bp, Artificial Sequence
  Synthetic oligonucleotide
gggcggagagcactcggaagttattaggat

SEQ ID NO: 24915 - DNA, 30 bp, Artificial Sequence
  Synthetic oligonucleotide
aagcgagagcacacattcgaactaacggat

SEQ ID NO: 24916 - DNA, 30 bp, Artificial Sequence
  Synthetic oligonucleotide
acactcgtgtgcgaagatcgtatggcggat

SEQ ID NO: 24917 - DNA, 30 bp, Artificial Sequence
  Synthetic oligonucleotide
gagcacacgagactaacggacgccgtggat

SEQ ID NO: 24918 - DNA, 30 bp, Artificial Sequence
  Synthetic oligonucleotide
agggagctccacaagcgcaggagggtggat

SEQ ID NO: 24919 - DNA, 30 bp, Artificial Sequence
  Synthetic oligonucleotide
acacgggccgaagataacatacagttggat

SEQ ID NO: 24920 - DNA, 30 bp, Artificial Sequence
  Synthetic oligonucleotide
cagagaacaaagacgtgactaaacaatgat

SEQ ID NO: 24921 - DNA, 30 bp, Artificial Sequence
  Synthetic oligonucleotide
cgtgagagaattgatgagtgagtgtatgat

SEQ ID NO: 24922 - DNA, 30 bp, Artificial Sequence
  Synthetic oligonucleotide
agctcgtgctaaagggaggtaatctctgat

SEQ ID NO: 24923 - DNA, 30 bp, Artificial Sequence
  Synthetic oligonucleotide
atctgagggacgagacgaagggaacgtgat

SEQ ID NO: 24924 - DNA, 30 bp, Artificial Sequence
  Synthetic oligonucleotide
atgtgatatccaggttgggggaagggtgat

SEQ ID NO: 24925 - DNA, 30 bp, Artificial Sequence
  Synthetic oligonucleotide
acggaatagagtgcggttcgaaagcttgat

SEQ ID NO: 24926 - DNA, 30 bp, Artificial Sequence
  Synthetic oligonucleotide
acggaagtatctatcgagtgccggtaatat

SEQ ID NO: 24927 - DNA, 30 bp, Artificial Sequence
  Synthetic oligonucleotide
tacgtacggccagctgaagggtgggcatat

SEQ ID NO: 24928 - DNA, 30 bp, Artificial Sequence
  Synthetic oligonucleotide
aacgttagtaatcacaccccagcaggatat

SEQ ID NO: 24929 - DNA, 30 bp, Artificial Sequence
  Synthetic oligonucleotide
ccggacgcgagtagcctagactcagagtat

SEQ ID NO: 24930 - DNA, 30 bp, Artificial Sequence
  Synthetic oligonucleotide
agaatcggcgggcgaaagtttagtgagtat

SEQ ID NO: 24931 - DNA, 30 bp, Artificial Sequence
  Synthetic oligonucleotide
aagccaaggaggtagaatgaggctcggtat

SEQ ID NO: 24932 - DNA, 30 bp, Artificial Sequence
  Synthetic oligonucleotide
cgggtaacgtaaggcatcatagagtggtat

SEQ ID NO: 24933 - DNA, 30 bp, Artificial Sequence
  Synthetic oligonucleotide
cgggagaacaaagctagtcctacaagttat

SEQ ID NO: 24934 - DNA, 30 bp, Artificial Sequence
  Synthetic oligonucleotide
aggcaacccgaatgaaaagcctgctaaact

SEQ ID NO: 24935 - DNA, 30 bp, Artificial Sequence
  Synthetic oligonucleotide
ccgaaaccgaaccgcgccgacctttaaact

SEQ ID NO: 24936 - DNA, 30 bp, Artificial Sequence
  Synthetic oligonucleotide
acagtgcgtgggaggcgtgaggtaacaact

SEQ ID NO: 24937 - DNA, 30 bp, Artificial Sequence
  Synthetic oligonucleotide
gcctactgtagacaacgggacccgacaact

SEQ ID NO: 24938 - DNA, 30 bp, Artificial Sequence
  Synthetic oligonucleotide
caaagcgctctcaacaaacgtaaatgaact

SEQ ID NO: 24939 - DNA, 30 bp, Artificial Sequence
  Synthetic oligonucleotide
tcatcgagccattacgagtgtctgctaact

SEQ ID NO: 24940 - DNA, 30 bp, Artificial Sequence
  Synthetic oligonucleotide
ccattaagtggaagcaatagaatccacact

SEQ ID NO: 24941 - DNA, 30 bp, Artificial Sequence
  Synthetic oligonucleotide
tcaagaaaaacgatcaggtataagggcact

SEQ ID NO: 24942 - DNA, 30 bp, Artificial Sequence
  Synthetic oligonucleotide
aggaggggctgtcgtgtatgatatcagact

SEQ ID NO: 24943 - DNA, 30 bp, Artificial Sequence
  Synthetic oligonucleotide
ctggtagccggaatagaagaagaagagact

SEQ ID NO: 24944 - DNA, 30 bp, Artificial Sequence
  Synthetic oligonucleotide
atggggtgagtatgacagcgtgaagggact

SEQ ID NO: 24945 - DNA, 30 bp, Artificial Sequence
  Synthetic oligonucleotide
acgacagtggacatcctgatagccggtact

SEQ ID NO: 24946 - DNA, 30 bp, Artificial Sequence
  Synthetic oligonucleotide
aggaaaggcaatattaggtatgtcggtact

SEQ ID NO: 24947 - DNA, 30 bp, Artificial Sequence
  Synthetic oligonucleotide
aagaatgcaaagcgaaacactcggaggcct

SEQ ID NO: 24948 - DNA, 30 bp, Artificial Sequence
  Synthetic oligonucleotide
cgacaggtctacgtagtactagaattgcct

SEQ ID NO: 24949 - DNA, 30 bp, Artificial Sequence
  Synthetic oligonucleotide
tacaatatatggaagggccaaatgcaagct

SEQ ID NO: 24950 - DNA, 30 bp, Artificial Sequence
  Synthetic oligonucleotide
agaatagagagcgatcgccagaatcaagct

SEQ ID NO: 24951 - DNA, 30 bp, Artificial Sequence
  Synthetic oligonucleotide
gcggtcagtaaatgtgagaggctcgaagct

SEQ ID NO: 24952 - DNA, 30 bp, Artificial Sequence
  Synthetic oligonucleotide
cgggacggtgcaagtacatacgaaacagct

SEQ ID NO: 24953 - DNA, 30 bp, Artificial Sequence
  Synthetic oligonucleotide
gctcaagaagtacatattcgagctcgagct

SEQ ID NO: 24954 - DNA, 30 bp, Artificial Sequence
  Synthetic oligonucleotide
acgcagaataggagacggttgaggatagct

SEQ ID NO: 24955 - DNA, 30 bp, Artificial Sequence
  Synthetic oligonucleotide
gaagggccaggaattggaatactactagct

SEQ ID NO: 24956 - DNA, 30 bp, Artificial Sequence
  Synthetic oligonucleotide
ggtggacaaaacgtattagtgatactcgct

SEQ ID NO: 24957 - DNA, 30 bp, Artificial Sequence
  Synthetic oligonucleotide
aacaaaaggtgcaaaaccatctcctaggct

SEQ ID NO: 24958 - DNA, 30 bp, Artificial Sequence
  Synthetic oligonucleotide
gctaagaatgagggcaaaaactaccgggct

SEQ ID NO: 24959 - DNA, 30 bp, Artificial Sequence
  Synthetic oligonucleotide
aaggacattaggaaagacataacaatggct

SEQ ID NO: 24960 - DNA, 30 bp, Artificial Sequence
  Synthetic oligonucleotide
atggagaggcggtcgcaaactaaagatgct

SEQ ID NO: 24961 - DNA, 30 bp, Artificial Sequence
  Synthetic oligonucleotide
cgacatgtgtaagcgcgggtcaccatctct

SEQ ID NO: 24962 - DNA, 30 bp, Artificial Sequence
  Synthetic oligonucleotide
gtgcagaaatggaaagagtagcagaagtct

SEQ ID NO: 24963 - DNA, 30 bp, Artificial Sequence
  Synthetic oligonucleotide
cagacttgaagatagagggagcggccttct

SEQ ID NO: 24964 - DNA, 30 bp, Artificial Sequence
  Synthetic oligonucleotide
caacgaagtgggggctaactacgatgttct

SEQ ID NO: 24965 - DNA, 30 bp, Artificial Sequence
  Synthetic oligonucleotide
agtgcaggtaagatgcccgaatacaaaagt

SEQ ID NO: 24966 - DNA, 30 bp, Artificial Sequence
  Synthetic oligonucleotide
ccgaagaggtgagcggggttgatcgcaagt

SEQ ID NO: 24967 - DNA, 30 bp, Artificial Sequence
  Synthetic oligonucleotide
cgcaaacgcgggggtaggaaagagagaagt

SEQ ID NO: 24968 - DNA, 30 bp, Artificial Sequence
  Synthetic oligonucleotide
ctgcgaagatgaaagacaagggtggtaagt

SEQ ID NO: 24969 - DNA, 30 bp, Artificial Sequence
  Synthetic oligonucleotide
gcaggaccacggagcgagactcagtgcagt

SEQ ID NO: 24970 - DNA, 30 bp, Artificial Sequence
  Synthetic oligonucleotide
cgtcgggatattcacgaaataaattgcagt

SEQ ID NO: 24971 - DNA, 30 bp, Artificial Sequence
  Synthetic oligonucleotide
gggaacagggtgaaaaccaaccgtaagagt

SEQ ID NO: 24972 - DNA, 30 bp, Artificial Sequence
  Synthetic oligonucleotide
catcgaacaatcaaggtggaatgaccgagt

SEQ ID NO: 24973 - DNA, 30 bp, Artificial Sequence
  Synthetic oligonucleotide
gtcgtggaggtacttaacctaaatcggagt

SEQ ID NO: 24974 - DNA, 30 bp, Artificial Sequence
  Synthetic oligonucleotide
cagaacttgagaagatgtataaattggagt

SEQ ID NO: 24975 - DNA, 30 bp, Artificial Sequence
  Synthetic oligonucleotide
tcgataggagattaaaagattgaactgagt

SEQ ID NO: 24976 - DNA, 30 bp, Artificial Sequence
  Synthetic oligonucleotide
taggagcacctaatgggatgtcgactgagt

SEQ ID NO: 24977 - DNA, 30 bp, Artificial Sequence
  Synthetic oligonucleotide
tcgatgaaatgcatacggaaggcagtgagt

SEQ ID NO: 24978 - DNA, 30 bp, Artificial Sequence
  Synthetic oligonucleotide
cgacatagataaaaagattcatacactagt

SEQ ID NO: 24979 - DNA, 30 bp, Artificial Sequence
  Synthetic oligonucleotide
aggcatgtggcatactaattgacaagacgt

SEQ ID NO: 24980 - DNA, 30 bp, Artificial Sequence
  Synthetic oligonucleotide
cgtgtagcgagacgggatgagggcggacgt

SEQ ID NO: 24981 - DNA, 29 bp, Artificial Sequence
  Synthetic oligonucleotide
agacagacgagcgagggaccacctaccgt

SEQ ID NO: 24982 - DNA, 30 bp, Artificial Sequence
  Synthetic oligonucleotide
acgcaatatggttcacatcagagttaccgt

SEQ ID NO: 24983 - DNA, 30 bp, Artificial Sequence
  Synthetic oligonucleotide
atgggacctatgtagaatgagtaacgccgt

SEQ ID NO: 24984 - DNA, 30 bp, Artificial Sequence
  Synthetic oligonucleotide
acggaaataagtagtcagtcagcgcgccgt

SEQ ID NO: 24985 - DNA, 30 bp, Artificial Sequence
  Synthetic oligonucleotide
tcagtagaaggcgcgaaattcaggatccgt

SEQ ID NO: 24986 - DNA, 30 bp, Artificial Sequence
  Synthetic oligonucleotide
tggcggaggagccagagcctacgtaagcgt

SEQ ID NO: 24987 - DNA, 30 bp, Artificial Sequence
  Synthetic oligonucleotide
acacacacccgcacggtaggcagatcgcgt

SEQ ID NO: 24988 - DNA, 30 bp, Artificial Sequence
  Synthetic oligonucleotide
cacggaggatacaataaggcaaaaatgcgt

SEQ ID NO: 24989 - DNA, 30 bp, Artificial Sequence
  Synthetic oligonucleotide
aacgtcttcgccatcataacctaacctcgt

SEQ ID NO: 24990 - DNA, 30 bp, Artificial Sequence
  Synthetic oligonucleotide
tcgagcccaggggaagtaatgtgtattcgt

SEQ ID NO: 24991 - DNA, 30 bp, Artificial Sequence
  Synthetic oligonucleotide
tgaggtactcgaccggtacgaacgaaaggt

SEQ ID NO: 24992 - DNA, 30 bp, Artificial Sequence
  Synthetic oligonucleotide
agggaactcctcgaagtctgatcagaaggt

SEQ ID NO: 24993 - DNA, 30 bp, Artificial Sequence
  Synthetic oligonucleotide
gtgagcagagatagcgtcgcgaatacaggt

SEQ ID NO: 24994 - DNA, 30 bp, Artificial Sequence
  Synthetic oligonucleotide
cgtctgataaaaaagtacgaccaaggaggt

SEQ ID NO: 24995 - DNA, 30 bp, Artificial Sequence
  Synthetic oligonucleotide
cgtggtgcctgaacgacatacagcgccggt

SEQ ID NO: 24996 - DNA, 30 bp, Artificial Sequence
  Synthetic oligonucleotide
agcccaggacatcagggggaccaatccggt

SEQ ID NO: 24997 - DNA, 30 bp, Artificial Sequence
  Synthetic oligonucleotide
aggtgtagaatttaggactgcaacggcggt

SEQ ID NO: 24998 - DNA, 30 bp, Artificial Sequence
  Synthetic oligonucleotide
ctgagactaaaccgtaaactccagcagggt

SEQ ID NO: 24999 - DNA, 30 bp, Artificial Sequence
  Synthetic oligonucleotide
gactggagaagtggcactaacaagtagggt

SEQ ID NO: 25000 - DNA, 30 bp, Artificial Sequence
  Synthetic oligonucleotide
tgagcagaaggtagagacaatccgtagggt

SEQ ID NO: 25001 - DNA, 30 bp, Artificial Sequence
  Synthetic oligonucleotide
aggcgacaaccatgttgaacgaataggggt

SEQ ID NO: 25002 - DNA, 30 bp, Artificial Sequence
  Synthetic oligonucleotide
cacgagatggcaaaccggtattaacgtggt

SEQ ID NO: 25003 - DNA, 30 bp, Artificial Sequence
  Synthetic oligonucleotide
acgataaggaacgagggatatccataatgt

SEQ ID NO: 25004 - DNA, 30 bp, Artificial Sequence
  Synthetic oligonucleotide
tgattatgtagaaaaaagaagtgtacatgt

SEQ ID NO: 25005 - DNA, 30 bp, Artificial Sequence
  Synthetic oligonucleotide
aagataggtcacgaggacgtgcgcagatgt

SEQ ID NO: 25006 - DNA, 29 bp, Artificial Sequence
  Synthetic oligonucleotide
ggcgacaggaaggagtaaatttgagatgt

SEQ ID NO: 25007 - DNA, 30 bp, Artificial Sequence
  Synthetic oligonucleotide
aagggcgccgactcgtggtggcagggatgt

SEQ ID NO: 25008 - DNA, 30 bp, Artificial Sequence
  Synthetic oligonucleotide
cacgaaatagtagggaatgtgatgttatgt

SEQ ID NO: 25009 - DNA, 30 bp, Artificial Sequence
  Synthetic oligonucleotide
atgcatataggtagagagagcgccaagtgt

SEQ ID NO: 25010 - DNA, 30 bp, Artificial Sequence
  Synthetic oligonucleotide
tgagatttcaggaatagagtagaacagtgt

SEQ ID NO: 25011 - DNA, 30 bp, Artificial Sequence
  Synthetic oligonucleotide
tcaagcattaaagtgaaataaacagagtgt

SEQ ID NO: 25012 - DNA, 30 bp, Artificial Sequence
  Synthetic oligonucleotide
acggaggtcaacaaacatagccgtgagtgt

SEQ ID NO: 25013 - DNA, 30 bp, Artificial Sequence
  Synthetic oligonucleotide
agcgaaagcttgtcgatcgatccaccgtgt

SEQ ID NO: 25014 - DNA, 30 bp, Artificial Sequence
  Synthetic oligonucleotide
cgccgctagggagcgatgaatggtaaaatt

SEQ ID NO: 25015 - DNA, 31 bp, Artificial Sequence
  Synthetic oligonucleotide
cggagaaggggcaagaaaatgctgaacaatt

SEQ ID NO: 25016 - DNA, 30 bp, Artificial Sequence
  Synthetic oligonucleotide
atacgggaaatcgaaacgaatgctacaatt

SEQ ID NO: 25017 - DNA, 30 bp, Artificial Sequence
  Synthetic oligonucleotide
ccggggacgtcacagagcaagacgccaatt

SEQ ID NO: 25018 - DNA, 30 bp, Artificial Sequence
  Synthetic oligonucleotide
tggacccaaacacacatcatcacagcaatt

SEQ ID NO: 25019 - DNA, 30 bp, Artificial Sequence
  Synthetic oligonucleotide
cgagcgggagagcgacgcgatcgtaacatt

SEQ ID NO: 25020 - DNA, 30 bp, Artificial Sequence
  Synthetic oligonucleotide
taagccaagcaagagaagctgtggcagatt

SEQ ID NO: 25021 - DNA, 30 bp, Artificial Sequence
  Synthetic oligonucleotide
cgacataccaacatagcgcaagttccgatt

SEQ ID NO: 25022 - DNA, 30 bp, Artificial Sequence
  Synthetic oligonucleotide
cgtgtataaggaagagtaccagttcgtatt

SEQ ID NO: 25023 - DNA, 30 bp, Artificial Sequence
  Synthetic oligonucleotide
tcacaataagagcgacgagttcggcaactt

SEQ ID NO: 25024 - DNA, 30 bp, Artificial Sequence
  Synthetic oligonucleotide
aggaggatggagttgaaggaatctgcactt

SEQ ID NO: 25025 - DNA, 30 bp, Artificial Sequence
  Synthetic oligonucleotide
aggaggaacagtatccgcattcatctgctt

SEQ ID NO: 25026 - DNA, 30 bp, Artificial Sequence
  Synthetic oligonucleotide
cggatatatccctgcaagttatccagagtt

SEQ ID NO: 25027 - DNA, 30 bp, Artificial Sequence
  Synthetic oligonucleotide
aggatgcatcggagggtgcttgcgatagtt

SEQ ID NO: 25028 - DNA, 30 bp, Artificial Sequence
  Synthetic oligonucleotide
cgccacaacagagaacaccggctagccgtt

SEQ ID NO: 25029 - DNA, 30 bp, Artificial Sequence
  Synthetic oligonucleotide
cagagtgtctaaagtgcgggggaggccgtt

SEQ ID NO: 25030 - DNA, 30 bp, Artificial Sequence
  Synthetic oligonucleotide
aggcacacagaatcccaagcaaagagcgtt

SEQ ID NO: 25031 - DNA, 30 bp, Artificial Sequence
  Synthetic oligonucleotide
ggacgggcgtgtataaaataggtgatcgtt

SEQ ID NO: 25032 - DNA, 30 bp, Artificial Sequence
  Synthetic oligonucleotide
ggcacagcgcaaggtactagaacacaggtt

SEQ ID NO: 25033 - DNA, 30 bp, Artificial Sequence
  Synthetic oligonucleotide
gtgacaactgaaaacaggataggttaggtt

SEQ ID NO: 25034 - DNA, 30 bp, Artificial Sequence
  Synthetic oligonucleotide
cggacgtccggtccgaacaatgagtgggtt

SEQ ID NO: 25035 - DNA, 30 bp, Artificial Sequence
  Synthetic oligonucleotide
tggggggaatgatcaacgtgaaacaatgtt

SEQ ID NO: 25036 - DNA, 30 bp, Artificial Sequence
  Synthetic oligonucleotide
aggatgcgtcttggccgaagcgaggatgtt

SEQ ID NO: 25037 - DNA, 30 bp, Artificial Sequence
  Synthetic oligonucleotide
ccgtaccgcatggggacgggagaggctgtt

SEQ ID NO: 25038 - DNA, 30 bp, Artificial Sequence
  Synthetic oligonucleotide
agggtgaatgcaccaaaaatgcaccttgtt

SEQ ID NO: 25039 - DNA, 31 bp, Artificial Sequence
  Synthetic oligonucleotide
agacatcagcctaccaagggcaatagcattt

SEQ ID NO: 25040 - DNA, 30 bp, Artificial Sequence
  Synthetic oligonucleotide
cagaactggcggggtaaggctacaatattt

SEQ ID NO: 25041 - DNA, 30 bp, Artificial Sequence
  Synthetic oligonucleotide
gcgacgaataagggcaagctggggctattt

SEQ ID NO: 25042 - DNA, 30 bp, Artificial Sequence
  Synthetic oligonucleotide
gggaggtatgaaatgtagtaaaaaatgttt

SEQ ID NO: 25043 - DNA, 30 bp, Artificial Sequence
  Synthetic oligonucleotide
ggggcaagtctacattcgtgtgcgaaaaaa

SEQ ID NO: 25044 - DNA, 30 bp, Artificial Sequence
  Synthetic oligonucleotide
aacggcgaatgcggacgagacctctaaaaa

SEQ ID NO: 25045 - DNA, 30 bp, Artificial Sequence
  Synthetic oligonucleotide
gttcgagggaagataaacaacggcttaaaa

SEQ ID NO: 25046 - DNA, 30 bp, Artificial Sequence
  Synthetic oligonucleotide
cggggtgaggaccgcgcgtccgctaacaaa

SEQ ID NO: 25047 - DNA, 30 bp, Artificial Sequence
  Synthetic oligonucleotide
ccagggtccaagaagacgtcggctcacaaa

SEQ ID NO: 25048 - DNA, 30 bp, Artificial Sequence
  Synthetic oligonucleotide
ctagtcggtaatagagtgagcctgtacaaa

SEQ ID NO: 25049 - DNA, 30 bp, Artificial Sequence
  Synthetic oligonucleotide
tgtgcgacacatgcgacgaattcaagcaaa

SEQ ID NO: 25050 - DNA, 30 bp, Artificial Sequence
  Synthetic oligonucleotide
gttcgaacatatgggaacgggctgagcaaa

SEQ ID NO: 25051 - DNA, 30 bp, Artificial Sequence
  Synthetic oligonucleotide
cggctgtgacaacagaggtagggtcgcaaa

SEQ ID NO: 25052 - DNA, 30 bp, Artificial Sequence
  Synthetic oligonucleotide
gaacatcgtgcggcaatctcgagcggcaaa

SEQ ID NO: 25053 - DNA, 30 bp, Artificial Sequence
  Synthetic oligonucleotide
gcatcgcgagtgtgtcgtcgatcgggcaaa

SEQ ID NO: 25054 - DNA, 30 bp, Artificial Sequence
  Synthetic oligonucleotide
ggaagacggagttgctgatgagagctcaaa

SEQ ID NO: 25055 - DNA, 30 bp, Artificial Sequence
  Synthetic oligonucleotide
tcgaagatcaaacaagctgtgccgaagaaa

SEQ ID NO: 25056 - DNA, 30 bp, Artificial Sequence
  Synthetic oligonucleotide
ccgggccaaaacaaaggcataaagtagaaa

SEQ ID NO: 25057 - DNA, 30 bp, Artificial Sequence
  Synthetic oligonucleotide
gaagataagaggcgtagacagctaacgaaa

SEQ ID NO: 25058 - DNA, 30 bp, Artificial Sequence
  Synthetic oligonucleotide
taagtacaactaaccacatgtacagcgaaa

SEQ ID NO: 25059 - DNA, 30 bp, Artificial Sequence
  Synthetic oligonucleotide
catggcgcggagtctagtgaaccggggaaa

SEQ ID NO: 25060 - DNA, 30 bp, Artificial Sequence
  Synthetic oligonucleotide
caaaccgatactagaattgaaatctggaaa

SEQ ID NO: 25061 - DNA, 30 bp, Artificial Sequence
  Synthetic oligonucleotide
agtggaagagcacgtgggggaatttggaaa

SEQ ID NO: 25062 - DNA, 30 bp, Artificial Sequence
  Synthetic oligonucleotide
tcgcaaagagtttatacgaacagtctgaaa

SEQ ID NO: 25063 - DNA, 30 bp, Artificial Sequence
  Synthetic oligonucleotide
gacagagcgagatgccgtgaatcagtgaaa

SEQ ID NO: 25064 - DNA, 30 bp, Artificial Sequence
  Synthetic oligonucleotide
ccggggtgacacgagatagaacaccataaa

SEQ ID NO: 25065 - DNA, 30 bp, Artificial Sequence
  Synthetic oligonucleotide
tgtaattggagtgcaggcaaggaccataaa

SEQ ID NO: 25066 - DNA, 30 bp, Artificial Sequence
  Synthetic oligonucleotide
taggcactcacagctgaacagggcgataaa

SEQ ID NO: 25067 - DNA, 30 bp, Artificial Sequence
  Synthetic oligonucleotide
gcgagcctacgcactgacccatgatataaa

SEQ ID NO: 25068 - DNA, 26 bp, Artificial Sequence
  Synthetic oligonucleotide
tttgtgtaggtttactcccgtataaa

SEQ ID NO: 25069 - DNA, 30 bp, Artificial Sequence
  Synthetic oligonucleotide
gtatgccgtcaacaatcgaacagtactaaa

SEQ ID NO: 25070 - DNA, 30 bp, Artificial Sequence
  Synthetic oligonucleotide
cacgatggtgcatgtacaacataccgtaaa

SEQ ID NO: 25071 - DNA, 30 bp, Artificial Sequence
  Synthetic oligonucleotide
ggactagtgcgcagtaaagggcagcgtaaa

SEQ ID NO: 25072 - DNA, 30 bp, Artificial Sequence
  Synthetic oligonucleotide
gctcgggacatcgtacgaagggagcgtaaa

SEQ ID NO: 25073 - DNA, 30 bp, Artificial Sequence
  Synthetic oligonucleotide
cagactagtgtacgtcacctagcgggtaaa

SEQ ID NO: 25074 - DNA, 30 bp, Artificial Sequence
  Synthetic oligonucleotide
ccatgagatgcgagattgacaacacttaaa

SEQ ID NO: 25075 - DNA, 30 bp, Artificial Sequence
  Synthetic oligonucleotide
acgagaagtagatggactaaacgcaaacaa

SEQ ID NO: 25076 - DNA, 30 bp, Artificial Sequence
  Synthetic oligonucleotide
ggacgatcggacccctggggattcaaacaa

SEQ ID NO: 25077 - DNA, 30 bp, Artificial Sequence
  Synthetic oligonucleotide
aaggcataccagacccccattgtccaacaa

SEQ ID NO: 25078 - DNA, 30 bp, Artificial Sequence
  Synthetic oligonucleotide
acctaaacaacccggcccccaaggagacaa

SEQ ID NO: 25079 - DNA, 30 bp, Artificial Sequence
  Synthetic oligonucleotide
ccacagaacgcggacagcaagacagtacaa

SEQ ID NO: 25080 - DNA, 30 bp, Artificial Sequence
  Synthetic oligonucleotide
caatcaagcgggtaaccgatcacaaaccaa

SEQ ID NO: 25081 - DNA, 30 bp, Artificial Sequence
  Synthetic oligonucleotide
taccaggtgagaagaagttgcccgaaccaa

SEQ ID NO: 25082 - DNA, 30 bp, Artificial Sequence
  Synthetic oligonucleotide
tggtggatactgaaaaccgtacgacaccaa

SEQ ID NO: 25083 - DNA, 30 bp, Artificial Sequence
  Synthetic oligonucleotide
cgaggctggcaagtataaaataagcaccaa

SEQ ID NO: 25084 - DNA, 30 bp, Artificial Sequence
  Synthetic oligonucleotide
gtcgaatcagcacgacaccgtcactaccaa

SEQ ID NO: 25085 - DNA, 30 bp, Artificial Sequence
  Synthetic oligonucleotide
gtcggcatccagaacaaagcaccgccccaa

SEQ ID NO: 25086 - DNA, 30 bp, Artificial Sequence
  Synthetic oligonucleotide
accagacataagactagatcaggtgcccaa

SEQ ID NO: 25087 - DNA, 30 bp, Artificial Sequence
  Synthetic oligonucleotide
cacgacaaggatcgactgtatgcgtcccaa

SEQ ID NO: 25088 - DNA, 30 bp, Artificial Sequence
  Synthetic oligonucleotide
ttcgcaacgaagtactaatccgtgcgccaa

SEQ ID NO: 25089 - DNA, 30 bp, Artificial Sequence
  Synthetic oligonucleotide
gcgctacgcctacgaaaagtgctcggccaa

SEQ ID NO: 25090 - DNA, 30 bp, Artificial Sequence
  Synthetic oligonucleotide
gagggaatccgtcgtacgattaggggccaa

SEQ ID NO: 25091 - DNA, 30 bp, Artificial Sequence
  Synthetic oligonucleotide
gacgttaagggagtaaaagggtccgtccaa

SEQ ID NO: 25092 - DNA, 30 bp, Artificial Sequence
  Synthetic oligonucleotide
aggggaggatgaaaccgcgccaagttccaa

SEQ ID NO: 25093 - DNA, 30 bp, Artificial Sequence
  Synthetic oligonucleotide
cgcggcaagtctaagaaaatcctacagcaa

SEQ ID NO: 25094 - DNA, 30 bp, Artificial Sequence
  Synthetic oligonucleotide
aacgcgcaggaacgagtgttttgggagcaa

SEQ ID NO: 25095 - DNA, 30 bp, Artificial Sequence
  Synthetic oligonucleotide
cataagtgttgcagaggtcacgaacggcaa

SEQ ID NO: 25096 - DNA, 30 bp, Artificial Sequence
  Synthetic oligonucleotide
aagagcaaggcgatgtgaggatgatggcaa

SEQ ID NO: 25097 - DNA, 30 bp, Artificial Sequence
  Synthetic oligonucleotide
cgagaaggagaggtcatataatccatgcaa

SEQ ID NO: 25098 - DNA, 30 bp, Artificial Sequence
  Synthetic oligonucleotide
ctaagatgctacgataaagaaacggctcaa

SEQ ID NO: 25099 - DNA, 30 bp, Artificial Sequence
  Synthetic oligonucleotide
cgctcagagtcagtacaggaagtccgtcaa

SEQ ID NO: 25100 - DNA, 30 bp, Artificial Sequence
  Synthetic oligonucleotide
tgtagcgaggcaaacgtaccagcgcgtcaa

SEQ ID NO: 25101 - DNA, 30 bp, Artificial Sequence
  Synthetic oligonucleotide
gcgaaggagagagtcgccacgtttattcaa

SEQ ID NO: 25102 - DNA, 30 bp, Artificial Sequence
  Synthetic oligonucleotide
cgtgagcattatatcgaggagctacaagaa

SEQ ID NO: 25103 - DNA, 30 bp, Artificial Sequence
  Synthetic oligonucleotide
cacgcgaaaaatctgctaaaagtacaagaa

SEQ ID NO: 25104 - DNA, 30 bp, Artificial Sequence
  Synthetic oligonucleotide
gaaaagacgagtctaaaggctcacgaagaa

SEQ ID NO: 25105 - DNA, 30 bp, Artificial Sequence
  Synthetic oligonucleotide
gggagccatcttaaaaattaacgtacagaa

SEQ ID NO: 25106 - DNA, 30 bp, Artificial Sequence
  Synthetic oligonucleotide
ctaccaagatagtgtaggttcaatccagaa

SEQ ID NO: 25107 - DNA, 30 bp, Artificial Sequence
  Synthetic oligonucleotide
agtacgccatcgtaagtgagtcgtgcagaa

SEQ ID NO: 25108 - DNA, 30 bp, Artificial Sequence
  Synthetic oligonucleotide
agggtagtcgccgaaataagttaatcagaa

SEQ ID NO: 25109 - DNA, 30 bp, Artificial Sequence
  Synthetic oligonucleotide
acgtttacgttgttgactaaggagtcagaa

SEQ ID NO: 25110 - DNA, 30 bp, Artificial Sequence
  Synthetic oligonucleotide
tgaaacgacaaaggatcttatgcgtcagaa

SEQ ID NO: 25111 - DNA, 31 bp, Artificial Sequence
  Synthetic oligonucleotide
agggtcaaagagactgacgtgtaggagagaa

SEQ ID NO: 25112 - DNA, 30 bp, Artificial Sequence
  Synthetic oligonucleotide
acgctgtcccccaaatacggtaccggagaa

SEQ ID NO: 25113 - DNA, 30 bp, Artificial Sequence
  Synthetic oligonucleotide
gcgtgatccatggacattggtgggtgagaa

SEQ ID NO: 25114 - DNA, 30 bp, Artificial Sequence
  Synthetic oligonucleotide
ctggaagcaggacgaacgagtaattgagaa

SEQ ID NO: 25115 - DNA, 30 bp, Artificial Sequence
  Synthetic oligonucleotide
aagggcacatcaacatgtcactgtttagaa

SEQ ID NO: 25116 - DNA, 30 bp, Artificial Sequence
  Synthetic oligonucleotide
gcataaagagtcgggagaacctcgtacgaa

SEQ ID NO: 25117 - DNA, 30 bp, Artificial Sequence
  Synthetic oligonucleotide
cgataaaatgtgtcgccagtttcgtacgaa

SEQ ID NO: 25118 - DNA, 30 bp, Artificial Sequence
  Synthetic oligonucleotide
cggttatgagatccaaacgaaccaaccgaa

SEQ ID NO: 25119 - DNA, 30 bp, Artificial Sequence
  Synthetic oligonucleotide
agtgggaaggactcagtagcaagtgccgaa

SEQ ID NO: 25120 - DNA, 30 bp, Artificial Sequence
  Synthetic oligonucleotide
gtgcacatagaaattgcacttggtgccgaa

SEQ ID NO: 25121 - DNA, 30 bp, Artificial Sequence
  Synthetic oligonucleotide
gatcgctaaaaggtagaagtccagggcgaa

SEQ ID NO: 25122 - DNA, 30 bp, Artificial Sequence
  Synthetic oligonucleotide
atcgccatctatgtgtaaagcaaatgcgaa

SEQ ID NO: 25123 - DNA, 30 bp, Artificial Sequence
  Synthetic oligonucleotide
caaggacgcatcaaaaaagtccgtatcgaa

SEQ ID NO: 25124 - DNA, 30 bp, Artificial Sequence
  Synthetic oligonucleotide
ttattcaaacgaacacccacgaaactcgaa

SEQ ID NO: 25125 - DNA, 30 bp, Artificial Sequence
  Synthetic oligonucleotide
acaggacaaccgctcctcacgagaaaggaa

SEQ ID NO: 25126 - DNA, 30 bp, Artificial Sequence
  Synthetic oligonucleotide
cgtcgggagataattcgctcccctgaggaa

SEQ ID NO: 25127 - DNA, 30 bp, Artificial Sequence
  Synthetic oligonucleotide
acatcacccgggccagagccagctgaggaa

SEQ ID NO: 25128 - DNA, 30 bp, Artificial Sequence
  Synthetic oligonucleotide
tctcaaaggcccgaatcgaagttttaggaa

SEQ ID NO: 25129 - DNA, 30 bp, Artificial Sequence
  Synthetic oligonucleotide
gacaccgaaagcggcgagatcgtaccggaa

SEQ ID NO: 25130 - DNA, 30 bp, Artificial Sequence
  Synthetic oligonucleotide
aagtggagatgttcgagaaaaagggcggaa

SEQ ID NO: 25131 - DNA, 30 bp, Artificial Sequence
  Synthetic oligonucleotide
tgaaacaacccgtacccagaagtggcggaa

SEQ ID NO: 25132 - DNA, 30 bp, Artificial Sequence
  Synthetic oligonucleotide
tggctaacacactgtaagggaaaaagggaa

SEQ ID NO: 25133 - DNA, 30 bp, Artificial Sequence
  Synthetic oligonucleotide
gcgcgagaagcaatagggggtagacgggaa

SEQ ID NO: 25134 - DNA, 30 bp, Artificial Sequence
  Synthetic oligonucleotide
acatgcaataatagtcgaatcaccatggaa

SEQ ID NO: 25135 - DNA, 30 bp, Artificial Sequence
  Synthetic oligonucleotide
tcgaacacaaaggcatacaacctgttggaa

SEQ ID NO: 25136 - DNA, 30 bp, Artificial Sequence
  Synthetic oligonucleotide
acagcgcgggtcagaggaaggggacatgaa

SEQ ID NO: 25137 - DNA, 30 bp, Artificial Sequence
  Synthetic oligonucleotide
tcaagaccgaaagcaatctaggaggatgaa

SEQ ID NO: 25138 - DNA, 30 bp, Artificial Sequence
  Synthetic oligonucleotide
ccaagaggatgagtgcgaactaaccctgaa

SEQ ID NO: 25139 - DNA, 30 bp, Artificial Sequence
  Synthetic oligonucleotide
tcgttaggcgaattttcgagaaagtctgaa

SEQ ID NO: 25140 - DNA, 30 bp, Artificial Sequence
  Synthetic oligonucleotide
cggcatgatccaccgataaaaatgtctgaa

SEQ ID NO: 25141 - DNA, 30 bp, Artificial Sequence
  Synthetic oligonucleotide
gactagggatgagaaacagctacacgtgaa

SEQ ID NO: 25142 - DNA, 30 bp, Artificial Sequence
  Synthetic oligonucleotide
accctaggagagttcgcgcgtgccggtgaa

SEQ ID NO: 25143 - DNA, 30 bp, Artificial Sequence
  Synthetic oligonucleotide
acgaaagagtgtgcatagctataatgtgaa

SEQ ID NO: 25144 - DNA, 30 bp, Artificial Sequence
  Synthetic oligonucleotide
gtgtgaagggtatcgtggtaggacattgaa

SEQ ID NO: 25145 - DNA, 30 bp, Artificial Sequence
  Synthetic oligonucleotide
gaaaagcacaggagtaaacccgctcaataa

SEQ ID NO: 25146 - DNA, 30 bp, Artificial Sequence
  Synthetic oligonucleotide
gatgcgttctacgggagagaaatacgataa

SEQ ID NO: 25147 - DNA, 30 bp, Artificial Sequence
  Synthetic oligonucleotide
tcgaccgaaggtgatttaatgtattgataa

SEQ ID NO: 25148 - DNA, 30 bp, Artificial Sequence
  Synthetic oligonucleotide
ccagaggacatctctttcgaaagaaactaa

SEQ ID NO: 25149 - DNA, 30 bp, Artificial Sequence
  Synthetic oligonucleotide
cgggtcggaacgacaaatatcgtgaactaa

SEQ ID NO: 25150 - DNA, 30 bp, Artificial Sequence
  Synthetic oligonucleotide
ctgggcactggatacaaacacatgcactaa

SEQ ID NO: 25151 - DNA, 30 bp, Artificial Sequence
  Synthetic oligonucleotide
tagcaaaggggagcaaacggtgcgtactaa

SEQ ID NO: 25152 - DNA, 30 bp, Artificial Sequence
  Synthetic oligonucleotide
ggacctaagggtctcaatacgtccagctaa

SEQ ID NO: 25153 - DNA, 30 bp, Artificial Sequence
  Synthetic oligonucleotide
ggggagcgagagatgattgatatgtgctaa

SEQ ID NO: 25154 - DNA, 30 bp, Artificial Sequence
  Synthetic oligonucleotide
aaggacgtggcacaacaagccgaggtctaa

SEQ ID NO: 25155 - DNA, 30 bp, Artificial Sequence
  Synthetic oligonucleotide
gaggggcttacacagtgataaaggaagtaa

SEQ ID NO: 25156 - DNA, 30 bp, Artificial Sequence
  Synthetic oligonucleotide
tcgaaaaggagccttggagacatgaagtaa

SEQ ID NO: 25157 - DNA, 30 bp, Artificial Sequence
  Synthetic oligonucleotide
tatagaagcgacaagattggtgacccgtaa

SEQ ID NO: 25158 - DNA, 30 bp, Artificial Sequence
  Synthetic oligonucleotide
actaaagacgacatatggagtgaatcgtaa

SEQ ID NO: 25159 - DNA, 30 bp, Artificial Sequence
  Synthetic oligonucleotide
acgattgggcccgagatgccagtaaggtaa

SEQ ID NO: 25160 - DNA, 30 bp, Artificial Sequence
  Synthetic oligonucleotide
gtctgcaatcaagcgccaaggtgagggtaa

SEQ ID NO: 25161 - DNA, 30 bp, Artificial Sequence
  Synthetic oligonucleotide
tcaacacttggatagggcaaaaactggtaa

SEQ ID NO: 25162 - DNA, 30 bp, Artificial Sequence
  Synthetic oligonucleotide
tcggtgccaccacaacagagctcagtgtaa

SEQ ID NO: 25163 - DNA, 30 bp, Artificial Sequence
  Synthetic oligonucleotide
taccgacgaaggtggtagcaaaacgtgtaa

SEQ ID NO: 25164 - DNA, 30 bp, Artificial Sequence
  Synthetic oligonucleotide
cggcacaggttagatgaggggtagttgtaa

SEQ ID NO: 25165 - DNA, 30 bp, Artificial Sequence
  Synthetic oligonucleotide
tagttgctggacagagggccgtcgacttaa

SEQ ID NO: 25166 - DNA, 30 bp, Artificial Sequence
  Synthetic oligonucleotide
gcgtccggagaattctgcaagccagcttaa

SEQ ID NO: 25167 - DNA, 30 bp, Artificial Sequence
  Synthetic oligonucleotide
ggatagaagtcagaatatagaaacagttaa

SEQ ID NO: 25168 - DNA, 30 bp, Artificial Sequence
  Synthetic oligonucleotide
acaagggcatcgagacggtgacggagttaa

SEQ ID NO: 25169 - DNA, 30 bp, Artificial Sequence
  Synthetic oligonucleotide
ccagggaccgatcatgcggatacactttaa

SEQ ID NO: 25170 - DNA, 30 bp, Artificial Sequence
  Synthetic oligonucleotide
cgtcagatctcaaccgttgatataaaaaca

SEQ ID NO: 25171 - DNA, 30 bp, Artificial Sequence
  Synthetic oligonucleotide
gggatcgaaatgacagggcgacacaaaaca

SEQ ID NO: 25172 - DNA, 30 bp, Artificial Sequence
  Synthetic oligonucleotide
gacccgaccagacaacacaacaggtaaaca

SEQ ID NO: 25173 - DNA, 30 bp, Artificial Sequence
  Synthetic oligonucleotide
cgtgaccgggctacagacgagacttaaaca

SEQ ID NO: 25174 - DNA, 30 bp, Artificial Sequence
  Synthetic oligonucleotide
caaaggcttcacaccaactcaataacaaca

SEQ ID NO: 25175 - DNA, 30 bp, Artificial Sequence
  Synthetic oligonucleotide
taggcgaggaaggataaattccacacaaca

SEQ ID NO: 25176 - DNA, 30 bp, Artificial Sequence
  Synthetic oligonucleotide
caaaacgacagatattcccctgccacaaca

SEQ ID NO: 25177 - DNA, 30 bp, Artificial Sequence
  Synthetic oligonucleotide
atgcgagggtgggcatttaaatctggaaca

SEQ ID NO: 25178 - DNA, 30 bp, Artificial Sequence
  Synthetic oligonucleotide
acacagagacagtgccgtattagactaaca

SEQ ID NO: 25179 - DNA, 30 bp, Artificial Sequence
  Synthetic oligonucleotide
gaaacttgcggaaaaaaatcgtacctaaca

SEQ ID NO: 25180 - DNA, 30 bp, Artificial Sequence
  Synthetic oligonucleotide
aggtggcccaggtaaaaatcgggagtaaca

SEQ ID NO: 25181 - DNA, 30 bp, Artificial Sequence
  Synthetic oligonucleotide
atgcggaaggttcagatggaaaagttaaca

SEQ ID NO: 25182 - DNA, 30 bp, Artificial Sequence
  Synthetic oligonucleotide
ggcaggacctacgtacgaagaaagcccaca

SEQ ID NO: 25183 - DNA, 30 bp, Artificial Sequence
  Synthetic oligonucleotide
cggacaacgagcatgccgaatgcagccaca

SEQ ID NO: 25184 - DNA, 40 bp, Artificial Sequence
  Synthetic oligonucleotide
ttgttgtgtaggtttactcccgtataaatgctgcgtcaca

SEQ ID NO: 25185 - DNA, 30 bp, Artificial Sequence
  Synthetic oligonucleotide
cacaggctgttggagaagcaaatggtcaca

SEQ ID NO: 25186 - DNA, 30 bp, Artificial Sequence
  Synthetic oligonucleotide
actggactaggctgaaacagtgagtcgaca

SEQ ID NO: 25187 - DNA, 30 bp, Artificial Sequence
  Synthetic oligonucleotide
tggcgaggcaccaagcgtatgagccggaca

SEQ ID NO: 25188 - DNA, 30 bp, Artificial Sequence
  Synthetic oligonucleotide
ggcaaaaatgaaataggcacaaaaatgaca

SEQ ID NO: 25189 - DNA, 30 bp, Artificial Sequence
  Synthetic oligonucleotide
caggaaccgtaagaataccagcggctgaca

SEQ ID NO: 25190 - DNA, 30 bp, Artificial Sequence
  Synthetic oligonucleotide
cgcggatgagatgatcgtaactaagtgaca

SEQ ID NO: 25191 - DNA, 30 bp, Artificial Sequence
  Synthetic oligonucleotide
cgagaggtgttcagtgcaaggaggttgaca

SEQ ID NO: 25192 - DNA, 30 bp, Artificial Sequence
  Synthetic oligonucleotide
gcgacgattacgggataacgaattcataca

SEQ ID NO: 25193 - DNA, 30 bp, Artificial Sequence
  Synthetic oligonucleotide
cgctcaacgtcaataggatacaatactaca

SEQ ID NO: 25194 - DNA, 30 bp, Artificial Sequence
  Synthetic oligonucleotide
ttcagcaagaacgaacatcaaactactaca

SEQ ID NO: 25195 - DNA, 30 bp, Artificial Sequence
  Synthetic oligonucleotide
cgccgatgaacaaataaggatcaaattaca

SEQ ID NO: 25196 - DNA, 30 bp, Artificial Sequence
  Synthetic oligonucleotide
ggggcatacgaaccctacagccagtaacca

SEQ ID NO: 25197 - DNA, 30 bp, Artificial Sequence
  Synthetic oligonucleotide
cgaacacaatcagcggtctacgaccgacca

SEQ ID NO: 25198 - DNA, 30 bp, Artificial Sequence
  Synthetic oligonucleotide
tgcggtctaaatatgctagagaagcgacca

SEQ ID NO: 25199 - DNA, 30 bp, Artificial Sequence
  Synthetic oligonucleotide
ctggcaaagggacaggcaccctctatacca

SEQ ID NO: 25200 - DNA, 30 bp, Artificial Sequence
  Synthetic oligonucleotide
acacgtaaggaagcccgcgcggtacaccca

SEQ ID NO: 25201 - DNA, 30 bp, Artificial Sequence
  Synthetic oligonucleotide
gcgaggtacattaggaacgatgaccgccca

SEQ ID NO: 25202 - DNA, 30 bp, Artificial Sequence
  Synthetic oligonucleotide
cgtcagttggatggtgagcgagcctgccca

SEQ ID NO: 25203 - DNA, 30 bp, Artificial Sequence
  Synthetic oligonucleotide
gggaagttccacgaacaagtctacaagcca

SEQ ID NO: 25204 - DNA, 30 bp, Artificial Sequence
  Synthetic oligonucleotide
ggatgaaaggggatcactacaccgcagcca

SEQ ID NO: 25205 - DNA, 30 bp, Artificial Sequence
  Synthetic oligonucleotide
gcggcccataagtaacacgaattgcagcca

SEQ ID NO: 25206 - DNA, 30 bp, Artificial Sequence
  Synthetic oligonucleotide
aggtagagggatactcacacgctcgagcca

SEQ ID NO: 25207 - DNA, 30 bp, Artificial Sequence
  Synthetic oligonucleotide
gcgacgggagggatccgcagacatgcgcca

SEQ ID NO: 25208 - DNA, 30 bp, Artificial Sequence
  Synthetic oligonucleotide
gatggatagccgagtagtcataacctgcca

SEQ ID NO: 25209 - DNA, 30 bp, Artificial Sequence
  Synthetic oligonucleotide
cgacggttgggcgggcctagtaagttgcca

SEQ ID NO: 25210 - DNA, 30 bp, Artificial Sequence
  Synthetic oligonucleotide
tcggaaatcggaagatctcgttgtaaagca

SEQ ID NO: 25211 - DNA, 30 bp, Artificial Sequence
  Synthetic oligonucleotide
cttccatcgatataggcgtcaatggcagca

SEQ ID NO: 25212 - DNA, 30 bp, Artificial Sequence
  Synthetic oligonucleotide
aggttgtacgaatttgataagaaaagagca

SEQ ID NO: 25213 - DNA, 30 bp, Artificial Sequence
  Synthetic oligonucleotide
attgaagagaccaaccaggccatgcgagca

SEQ ID NO: 25214 - DNA, 30 bp, Artificial Sequence
  Synthetic oligonucleotide
cagagtacgggacagtcttagatctgagca

SEQ ID NO: 25215 - DNA, 30 bp, Artificial Sequence
  Synthetic oligonucleotide
aggcaccgggcaatcaacactgctcacgca

SEQ ID NO: 25216 - DNA, 30 bp, Artificial Sequence
  Synthetic oligonucleotide
cctccgaagcgaaagcaaggtatggccgca

SEQ ID NO: 25217 - DNA, 30 bp, Artificial Sequence
  Synthetic oligonucleotide
gggcagtaacagggaccgataagatccgca

SEQ ID NO: 25218 - DNA, 30 bp, Artificial Sequence
  Synthetic oligonucleotide
ggcgtactggaagttaggatataaaaggca

SEQ ID NO: 25219 - DNA, 30 bp, Artificial Sequence
  Synthetic oligonucleotide
acgagtggagctagtgaattagtgaaggca

SEQ ID NO: 25220 - DNA, 30 bp, Artificial Sequence
  Synthetic oligonucleotide
tggggatgtcaactgttgaaagagcaggca

SEQ ID NO: 25221 - DNA, 30 bp, Artificial Sequence
  Synthetic oligonucleotide
agatacttccatgttagagctgagtaggca

SEQ ID NO: 25222 - DNA, 30 bp, Artificial Sequence
  Synthetic oligonucleotide
tgacacccgtatgattagaccgaaccggca

SEQ ID NO: 25223 - DNA, 30 bp, Artificial Sequence
  Synthetic oligonucleotide
cggaagaagtcagattagagcccaagggca

SEQ ID NO: 25224 - DNA, 30 bp, Artificial Sequence
  Synthetic oligonucleotide
acgtgagacgtccaacaaataaagtgtgca

SEQ ID NO: 25225 - DNA, 30 bp, Artificial Sequence
  Synthetic oligonucleotide
aaggaacagatcggaattgatttaattgca

SEQ ID NO: 25226 - DNA, 30 bp, Artificial Sequence
  Synthetic oligonucleotide
tcaaaatcgtcaggtgaaagaatcgttgca

SEQ ID NO: 25227 - DNA, 30 bp, Artificial Sequence
  Synthetic oligonucleotide
gaaccgacgaagagatctagcggggttgca

SEQ ID NO: 25228 - DNA, 30 bp, Artificial Sequence
  Synthetic oligonucleotide
gaagccgaaccagatccaaattgaccatca

SEQ ID NO: 25229 - DNA, 30 bp, Artificial Sequence
  Synthetic oligonucleotide
ccagtggagagagggtaatgcagcccatca

SEQ ID NO: 25230 - DNA, 30 bp, Artificial Sequence
  Synthetic oligonucleotide
agaactaaaaaaggctctcccgaaggatca

SEQ ID NO: 25231 - DNA, 30 bp, Artificial Sequence
  Synthetic oligonucleotide
cataggcagaaacttcctaagtgcggatca

SEQ ID NO: 25232 - DNA, 30 bp, Artificial Sequence
  Synthetic oligonucleotide
atgaacaaccatggaagaatcagaatatca

SEQ ID NO: 25233 - DNA, 30 bp, Artificial Sequence
  Synthetic oligonucleotide
tgaacaggtaaataagaatacgcaaactca

SEQ ID NO: 25234 - DNA, 30 bp, Artificial Sequence
  Synthetic oligonucleotide
gaggcaatctcgagtgtcaagaaaatctca

SEQ ID NO: 25235 - DNA, 30 bp, Artificial Sequence
  Synthetic oligonucleotide
agcagggtacgcgatcgcgtcaggaagtca

SEQ ID NO: 25236 - DNA, 30 bp, Artificial Sequence
  Synthetic oligonucleotide
aatcagaggaaacaccaatcaggagagtca

SEQ ID NO: 25237 - DNA, 30 bp, Artificial Sequence
  Synthetic oligonucleotide
ggacaccaggggtgctacgctgacgagtca

SEQ ID NO: 25238 - DNA, 30 bp, Artificial Sequence
  Synthetic oligonucleotide
aaggcgacactccccgtgcagttaacgtca

SEQ ID NO: 25239 - DNA, 30 bp, Artificial Sequence
  Synthetic oligonucleotide
atggaatcacaggttaagttatgcccgtca

SEQ ID NO: 25240 - DNA, 30 bp, Artificial Sequence
  Synthetic oligonucleotide
atgccaggggtgatagacaagcatccgtca

SEQ ID NO: 25241 - DNA, 30 bp, Artificial Sequence
  Synthetic oligonucleotide
aacatcggggcacagatcacaccgttgtca

SEQ ID NO: 25242 - DNA, 30 bp, Artificial Sequence
  Synthetic oligonucleotide
acggccacatgctattccgtaacacattca

SEQ ID NO: 25243 - DNA, 30 bp, Artificial Sequence
  Synthetic oligonucleotide
aatgaagagtggaagccagatgaagattca

SEQ ID NO: 25244 - DNA, 30 bp, Artificial Sequence
  Synthetic oligonucleotide
gcacaaggaggtgggattccggaaaaaaga

SEQ ID NO: 25245 - DNA, 30 bp, Artificial Sequence
  Synthetic oligonucleotide
gctacactcgtcaaaccaaagcacaaaaga

SEQ ID NO: 25246 - DNA, 30 bp, Artificial Sequence
  Synthetic oligonucleotide
tagagagatatacgatatggggcccaaaga

SEQ ID NO: 25247 - DNA, 30 bp, Artificial Sequence
  Synthetic oligonucleotide
gtatgcaaacgtgccagaatccctcaaaga

SEQ ID NO: 25248 - DNA, 30 bp, Artificial Sequence
  Synthetic oligonucleotide
gggtagctagagttggagctctcgacaaga

SEQ ID NO: 25249 - DNA, 30 bp, Artificial Sequence
  Synthetic oligonucleotide
ctgcattggaaccacctcagagtcgcaaga

SEQ ID NO: 25250 - DNA, 30 bp, Artificial Sequence
  Synthetic oligonucleotide
agggatcagaccttagatcccaaggcaaga

SEQ ID NO: 25251 - DNA, 30 bp, Artificial Sequence
  Synthetic oligonucleotide
aagttgtgagaagcacaagaaaagtcaaga

SEQ ID NO: 25252 - DNA, 30 bp, Artificial Sequence
  Synthetic oligonucleotide
ccggataaggtagcgccccagatgagaaga

SEQ ID NO: 25253 - DNA, 30 bp, Artificial Sequence
  Synthetic oligonucleotide
tacggcaccgacccggccaaactgcgaaga

SEQ ID NO: 25254 - DNA, 30 bp, Artificial Sequence
  Synthetic oligonucleotide
cggacaaggtgtgttaagtaatacggaaga

SEQ ID NO: 25255 - DNA, 30 bp, Artificial Sequence
  Synthetic oligonucleotide
ccggcacaactcggtggatgacgatgaaga

SEQ ID NO: 25256 - DNA, 30 bp, Artificial Sequence
  Synthetic oligonucleotide
tcgtgagagatggatagagcagttataaga

SEQ ID NO: 25257 - DNA, 30 bp, Artificial Sequence
  Synthetic oligonucleotide
tcaggagagcaaccatagcatgaactaaga

SEQ ID NO: 25258 - DNA, 30 bp, Artificial Sequence
  Synthetic oligonucleotide
cacgttgtgagcggaataacgaacctaaga

SEQ ID NO: 25259 - DNA, 30 bp, Artificial Sequence
  Synthetic oligonucleotide
atgcatgcaggcaaattctaagacaacaga

SEQ ID NO: 25260 - DNA, 30 bp, Artificial Sequence
  Synthetic oligonucleotide
taaggacgaataacacgcttataagacaga

SEQ ID NO: 25261 - DNA, 30 bp, Artificial Sequence
  Synthetic oligonucleotide
agtggagcgacggtttccagcgccgacaga

SEQ ID NO: 25262 - DNA, 30 bp, Artificial Sequence
  Synthetic oligonucleotide
agttgagaccagagcttgtgcgggaccaga

SEQ ID NO: 25263 - DNA, 30 bp, Artificial Sequence
  Synthetic oligonucleotide
cttgaaaaaacaggcgcagttatagccaga

SEQ ID NO: 25264 - DNA, 30 bp, Artificial Sequence
  Synthetic oligonucleotide
cggtcagatggtcgggtcgcaattgccaga

SEQ ID NO: 25265 - DNA, 30 bp, Artificial Sequence
  Synthetic oligonucleotide
aagtcactaatctgccagatgcgtagcaga

SEQ ID NO: 25266 - DNA, 30 bp, Artificial Sequence
  Synthetic oligonucleotide
ccacgatggtcaaaggggcgacttagcaga

SEQ ID NO: 25267 - DNA, 30 bp, Artificial Sequence
  Synthetic oligonucleotide
cgaacctaacaaacagttaatcccatcaga

SEQ ID NO: 25268 - DNA, 30 bp, Artificial Sequence
  Synthetic oligonucleotide
gaggaaggtcgtgacgggcttaacaagaga

SEQ ID NO: 25269 - DNA, 30 bp, Artificial Sequence
  Synthetic oligonucleotide
aggcagagatattgattagcataagagaga

SEQ ID NO: 25270 - DNA, 30 bp, Artificial Sequence
  Synthetic oligonucleotide
agttgaaccctagaaggccgggagtagaga

SEQ ID NO: 25271 - DNA, 30 bp, Artificial Sequence
  Synthetic oligonucleotide
gcaggtgtaacgaatttcaaacggtagaga

SEQ ID NO: 25272 - DNA, 30 bp, Artificial Sequence
  Synthetic oligonucleotide
tgccggggacacgttcgatgataaacgaga

SEQ ID NO: 25273 - DNA, 30 bp, Artificial Sequence
  Synthetic oligonucleotide
taaaagcaatgcaagggtgcccaaccgaga

SEQ ID NO: 25274 - DNA, 30 bp, Artificial Sequence
  Synthetic oligonucleotide
actatgcggggctacgaacggctaccgaga

SEQ ID NO: 25275 - DNA, 30 bp, Artificial Sequence
  Synthetic oligonucleotide
aaagttcaggggctgtaccagagagcgaga

SEQ ID NO: 25276 - DNA, 30 bp, Artificial Sequence
  Synthetic oligonucleotide
tacgaacagtgcgcgaagatcctcaggaga

SEQ ID NO: 25277 - DNA, 30 bp, Artificial Sequence
  Synthetic oligonucleotide
tggtcacgcattatggaaacggctcggaga

SEQ ID NO: 25278 - DNA, 30 bp, Artificial Sequence
  Synthetic oligonucleotide
atgcgaagagtgatattactgtgtgggaga

SEQ ID NO: 25279 - DNA, 30 bp, Artificial Sequence
  Synthetic oligonucleotide
atcaatgcaaaagttcaatccgaggtgaga

SEQ ID NO: 25280 - DNA, 30 bp, Artificial Sequence
  Synthetic oligonucleotide
tgcaacaaaggcatgcatgtggttgataga

SEQ ID NO: 25281 - DNA, 30 bp, Artificial Sequence
  Synthetic oligonucleotide
cgatcagtggcacgacaacagaacactaga

SEQ ID NO: 25282 - DNA, 30 bp, Artificial Sequence
  Synthetic oligonucleotide
taaggcaaggacattagtcagaggagtaga

SEQ ID NO: 25283 - DNA, 30 bp, Artificial Sequence
  Synthetic oligonucleotide
gcgcaggccgaggacgcatgtacgaaacga

SEQ ID NO: 25284 - DNA, 30 bp, Artificial Sequence
  Synthetic oligonucleotide
atggtacaacccagatctacacggagacga

SEQ ID NO: 25285 - DNA, 30 bp, Artificial Sequence
  Synthetic oligonucleotide
gctagtagtaaccacctaagtcgccgacga

SEQ ID NO: 25286 - DNA, 30 bp, Artificial Sequence
  Synthetic oligonucleotide
atggcacgaaaagtcttaacaacacaccga

SEQ ID NO: 25287 - DNA, 30 bp, Artificial Sequence
  Synthetic oligonucleotide
ggacatgacaggaacgatcgaaaataccga

SEQ ID NO: 25288 - DNA, 30 bp, Artificial Sequence
  Synthetic oligonucleotide
tagcatgcgatggtaaagggaggaacccga

SEQ ID NO: 25289 - DNA, 30 bp, Artificial Sequence
  Synthetic oligonucleotide
tccaaacgttccgggatagcgtgaagccga

SEQ ID NO: 25290 - DNA, 30 bp, Artificial Sequence
  Synthetic oligonucleotide
gacagcgtggagtaaagatatctaggccga

SEQ ID NO: 25291 - DNA, 30 bp, Artificial Sequence
  Synthetic oligonucleotide
ggtagtgataaagcaaaatggcgtggccga

SEQ ID NO: 25292 - DNA, 30 bp, Artificial Sequence
  Synthetic oligonucleotide
ccagagagatcgaactagctgccctgccga

SEQ ID NO: 25293 - DNA, 30 bp, Artificial Sequence
  Synthetic oligonucleotide
aggcaaagagaattgtggtgttacttccga

SEQ ID NO: 25294 - DNA, 30 bp, Artificial Sequence
  Synthetic oligonucleotide
gcctcaagaagctgaataggagcagagcga

SEQ ID NO: 25295 - DNA, 30 bp, Artificial Sequence
  Synthetic oligonucleotide
ccagcacaggcaaacacgccaacatagcga

SEQ ID NO: 25296 - DNA, 30 bp, Artificial Sequence
  Synthetic oligonucleotide
tctacgattgtgcaaacaatgagggcgcga

SEQ ID NO: 25297 - DNA, 30 bp, Artificial Sequence
  Synthetic oligonucleotide
acgacttagtaaactgaagggatatcgcga

SEQ ID NO: 25298 - DNA, 30 bp, Artificial Sequence
  Synthetic oligonucleotide
cgtctacggggggatcttatttaggggcga

SEQ ID NO: 25299 - DNA, 30 bp, Artificial Sequence
  Synthetic oligonucleotide
catacagattgagatcaaattaagtggcga

SEQ ID NO: 25300 - DNA, 30 bp, Artificial Sequence
  Synthetic oligonucleotide
aggggcacagtcattcacgttggtatgcga

SEQ ID NO: 25301 - DNA, 30 bp, Artificial Sequence
  Synthetic oligonucleotide
tggcgagaacacctcgtaagtctggtgcga

SEQ ID NO: 25302 - DNA, 30 bp, Artificial Sequence
  Synthetic oligonucleotide
tgaatagaaggaaaaagctcgaccaatcga

SEQ ID NO: 25303 - DNA, 31 bp, Artificial Sequence
  Synthetic oligonucleotide
cggtcctcatctcatacgtccggcgaatcga

SEQ ID NO: 25304 - DNA, 30 bp, Artificial Sequence
  Synthetic oligonucleotide
gctggccccactacccgaacaagagatcga

SEQ ID NO: 25305 - DNA, 30 bp, Artificial Sequence
  Synthetic oligonucleotide
cgaaatcatttcatcaaggcataaggtcga

SEQ ID NO: 25306 - DNA, 30 bp, Artificial Sequence
  Synthetic oligonucleotide
acggaactgaatgatcatatatagattcga

SEQ ID NO: 25307 - DNA, 30 bp, Artificial Sequence
  Synthetic oligonucleotide
agaaggcgagggaatccgaagaacgaagga

SEQ ID NO: 25308 - DNA, 30 bp, Artificial Sequence
  Synthetic oligonucleotide
ccgcggtaatcatcgaatcacgccacagga

SEQ ID NO: 25309 - DNA, 30 bp, Artificial Sequence
  Synthetic oligonucleotide
agacaatgtttgggtggaaccgtaccagga

SEQ ID NO: 25310 - DNA, 30 bp, Artificial Sequence
  Synthetic oligonucleotide
tctctggtaaatcacaaaggaaatagagga

SEQ ID NO: 25311 - DNA, 30 bp, Artificial Sequence
  Synthetic oligonucleotide
gcagccttgataagaggaaagaaacgagga

SEQ ID NO: 25312 - DNA, 30 bp, Artificial Sequence
  Synthetic oligonucleotide
ggtaacataacattagggaagtatatagga

SEQ ID NO: 25313 - DNA, 31 bp, Artificial Sequence
  Synthetic oligonucleotide
acacgaaacgacatataggttacagttagga

SEQ ID NO: 25314 - DNA, 30 bp, Artificial Sequence
  Synthetic oligonucleotide
agaatagtaaccgagctaacagtgttagga

SEQ ID NO: 25315 - DNA, 30 bp, Artificial Sequence
  Synthetic oligonucleotide
ataggcggaaactgtggaagtggcaccgga

SEQ ID NO: 25316 - DNA, 30 bp, Artificial Sequence
  Synthetic oligonucleotide
taacgaaaaacgggtccacattttgccgga

SEQ ID NO: 25317 - DNA, 30 bp, Artificial Sequence
  Synthetic oligonucleotide
gtacatggtgttaagaaatgtaacggcgga

SEQ ID NO: 25318 - DNA, 30 bp, Artificial Sequence
  Synthetic oligonucleotide
gctgattacctgaaaaaaatctcgggcgga

SEQ ID NO: 25319 - DNA, 30 bp, Artificial Sequence
  Synthetic oligonucleotide
cgacatgatgatacggacctcgtgggcgga

SEQ ID NO: 25320 - DNA, 30 bp, Artificial Sequence
  Synthetic oligonucleotide
tcaggacagttcataacagttacaatcgga

SEQ ID NO: 25321 - DNA, 30 bp, Artificial Sequence
  Synthetic oligonucleotide
cgaaaaaaccgttggacatggagtaaggga

SEQ ID NO: 25322 - DNA, 30 bp, Artificial Sequence
  Synthetic oligonucleotide
aagcactaatcgagaccggcgtaggaggga

SEQ ID NO: 25323 - DNA, 30 bp, Artificial Sequence
  Synthetic oligonucleotide
tagatgagcaaaaaaacaggtcaataggga

SEQ ID NO: 25324 - DNA, 29 bp, Artificial Sequence
  Synthetic oligonucleotide
catcggcacataagcgagcggcataggga

SEQ ID NO: 25325 - DNA, 30 bp, Artificial Sequence
  Synthetic oligonucleotide
aaagcgaatatgactacgatggcaccggga

SEQ ID NO: 25326 - DNA, 30 bp, Artificial Sequence
  Synthetic oligonucleotide
caagtgcgggggtaataatcgtgacgggga

SEQ ID NO: 25327 - DNA, 36 bp, Artificial Sequence
  Synthetic oligonucleotide
aagataatacattcatggtatggtcggaggggggga

SEQ ID NO: 25328 - DNA, 39 bp, Artificial Sequence
  Synthetic oligonucleotide
aagataatacattcatggtatggtcgggatcggggggga

SEQ ID NO: 25329 - DNA, 30 bp, Artificial Sequence
  Synthetic oligonucleotide
aggtcgtacagcacactgtgataaaatgga

SEQ ID NO: 25330 - DNA, 30 bp, Artificial Sequence
  Synthetic oligonucleotide
acaggataggaatggttcgagccaaatgga

SEQ ID NO: 25331 - DNA, 30 bp, Artificial Sequence
  Synthetic oligonucleotide
ccatacaaatagagtcgcgaaggacatgga

SEQ ID NO: 25332 - DNA, 30 bp, Artificial Sequence
  Synthetic oligonucleotide
tcgggagaatggggacgattctattgtgga

SEQ ID NO: 25333 - DNA, 30 bp, Artificial Sequence
  Synthetic oligonucleotide
aacgaatgacaagcgtaaacgtagtttgga

SEQ ID NO: 25334 - DNA, 30 bp, Artificial Sequence
  Synthetic oligonucleotide
ataagggtagctgcgttaaaaagacaatga

SEQ ID NO: 25335 - DNA, 30 bp, Artificial Sequence
  Synthetic oligonucleotide
gcctgagcggtaggatagtgtatagaatga

SEQ ID NO: 25336 - DNA, 30 bp, Artificial Sequence
  Synthetic oligonucleotide
aaggccccgatacgatcttcgaggacatga

SEQ ID NO: 25337 - DNA, 30 bp, Artificial Sequence
  Synthetic oligonucleotide
tcgaggaggctgtatacaatgaacgcatga

SEQ ID NO: 25338 - DNA, 30 bp, Artificial Sequence
  Synthetic oligonucleotide
atgcaacagaatgtgagcgagatgagatga

SEQ ID NO: 25339 - DNA, 30 bp, Artificial Sequence
  Synthetic oligonucleotide
cggagaaggaatcagagtgaactttgatga

SEQ ID NO: 25340 - DNA, 30 bp, Artificial Sequence
  Synthetic oligonucleotide
tcgcagttggagaatggcgacctggtatga

SEQ ID NO: 25341 - DNA, 30 bp, Artificial Sequence
  Synthetic oligonucleotide
cgcgcgcgagcgtaaacatcatctcactga

SEQ ID NO: 25342 - DNA, 30 bp, Artificial Sequence
  Synthetic oligonucleotide
gcgggacacgcgggacattaaaagtactga

SEQ ID NO: 25343 - DNA, 30 bp, Artificial Sequence
  Synthetic oligonucleotide
tcggatacaggggagccgggctacagctga

SEQ ID NO: 25344 - DNA, 30 bp, Artificial Sequence
  Synthetic oligonucleotide
aggctaaatgaccatagggaaataggctga

SEQ ID NO: 25345 - DNA, 30 bp, Artificial Sequence
  Synthetic oligonucleotide
tgaagtaggggaataggcaatgaatgctga

SEQ ID NO: 25346 - DNA, 30 bp, Artificial Sequence
  Synthetic oligonucleotide
gggaaaggttgatccatctcgtctgagtga

SEQ ID NO: 25347 - DNA, 30 bp, Artificial Sequence
  Synthetic oligonucleotide
agccatctgaaagagatatgacgaaggtga

SEQ ID NO: 25348 - DNA, 30 bp, Artificial Sequence
  Synthetic oligonucleotide
gacggtcactgtgatctgcttcaacattga

SEQ ID NO: 25349 - DNA, 30 bp, Artificial Sequence
  Synthetic oligonucleotide
ccagacaagacaagtggtgaggatcgttga

SEQ ID NO: 25350 - DNA, 30 bp, Artificial Sequence
  Synthetic oligonucleotide
gaaggcaacggtcagagggaggatcgaata

SEQ ID NO: 25351 - DNA, 30 bp, Artificial Sequence
  Synthetic oligonucleotide
taggaagttgccaaggagagggaactaata

SEQ ID NO: 25352 - DNA, 30 bp, Artificial Sequence
  Synthetic oligonucleotide
aactagaacaggtaaaacgacggcgtaata

SEQ ID NO: 25353 - DNA, 30 bp, Artificial Sequence
  Synthetic oligonucleotide
tacacaatggacaacattacgagcagcata

SEQ ID NO: 25354 - DNA, 30 bp, Artificial Sequence
  Synthetic oligonucleotide
gggagttaacgcatgaggttaaggagcata

SEQ ID NO: 25355 - DNA, 30 bp, Artificial Sequence
  Synthetic oligonucleotide
tcgaccacgacggtctgaaagggtcgcata

SEQ ID NO: 25356 - DNA, 30 bp, Artificial Sequence
  Synthetic oligonucleotide
aagggaaaagtatcttttacgaaaggcata

SEQ ID NO: 25357 - DNA, 30 bp, Artificial Sequence
  Synthetic oligonucleotide
agtgtcaaaaaaggatcaactccaggcata

SEQ ID NO: 25358 - DNA, 30 bp, Artificial Sequence
  Synthetic oligonucleotide
actggaacaactcgaaaacacaactagata

SEQ ID NO: 25359 - DNA, 30 bp, Artificial Sequence
  Synthetic oligonucleotide
ggggagtcggttaacagatgcaagtagata

SEQ ID NO: 25360 - DNA, 30 bp, Artificial Sequence
  Synthetic oligonucleotide
atggcactcttataaaacgacacaacgata

SEQ ID NO: 25361 - DNA, 30 bp, Artificial Sequence
  Synthetic oligonucleotide
gagaaaagagtgttggagtctcagccgata

SEQ ID NO: 25362 - DNA, 30 bp, Artificial Sequence
  Synthetic oligonucleotide
gcgtaaaatgacaggaagcctgaacggata

SEQ ID NO: 25363 - DNA, 30 bp, Artificial Sequence
  Synthetic oligonucleotide
gagggggcatacgagccggcagagatgata

SEQ ID NO: 25364 - DNA, 30 bp, Artificial Sequence
  Synthetic oligonucleotide
aggaaaatacacgttggataagctactata

SEQ ID NO: 25365 - DNA, 30 bp, Artificial Sequence
  Synthetic oligonucleotide
taggacaggtcccagtcatacctcgctata

SEQ ID NO: 25366 - DNA, 30 bp, Artificial Sequence
  Synthetic oligonucleotide
cctcatggtgaagtgtgacgaccacgtata

SEQ ID NO: 25367 - DNA, 30 bp, Artificial Sequence
  Synthetic oligonucleotide
cggggatggattaaagcagcgagacgtata

SEQ ID NO: 25368 - DNA, 30 bp, Artificial Sequence
  Synthetic oligonucleotide
ctaagaagagaagcaaatcccgactcacta

SEQ ID NO: 25369 - DNA, 30 bp, Artificial Sequence
  Synthetic oligonucleotide
tacgcgcaacagaaggagtagtggatacta

SEQ ID NO: 25370 - DNA, 30 bp, Artificial Sequence
  Synthetic oligonucleotide
acagtaagaatacaacctagaaatacccta

SEQ ID NO: 25371 - DNA, 30 bp, Artificial Sequence
  Synthetic oligonucleotide
tcggaacgccaacttaatcacagaacgcta

SEQ ID NO: 25372 - DNA, 30 bp, Artificial Sequence
  Synthetic oligonucleotide
atggtgcgaaataggttaagtagtaggcta

SEQ ID NO: 25373 - DNA, 30 bp, Artificial Sequence
  Synthetic oligonucleotide
aagcgagattcacttaagatggtacggcta

SEQ ID NO: 25374 - DNA, 30 bp, Artificial Sequence
  Synthetic oligonucleotide
tcaagagcttagcgaagtacgtatcggcta

SEQ ID NO: 25375 - DNA, 30 bp, Artificial Sequence
  Synthetic oligonucleotide
cggcgatcgaaatgacactagggaagtcta

SEQ ID NO: 25376 - DNA, 30 bp, Artificial Sequence
  Synthetic oligonucleotide
acgtgcattgcaaatcatgtggtaaaagta

SEQ ID NO: 25377 - DNA, 30 bp, Artificial Sequence
  Synthetic oligonucleotide
cgagctagtaagcaacgttcgattaaagta

SEQ ID NO: 25378 - DNA, 30 bp, Artificial Sequence
  Synthetic oligonucleotide
ccaaaaaatggcgaaagggaaggttaagta

SEQ ID NO: 25379 - DNA, 30 bp, Artificial Sequence
  Synthetic oligonucleotide
tgaggacggttaaagatgccggcgacagta

SEQ ID NO: 25380 - DNA, 30 bp, Artificial Sequence
  Synthetic oligonucleotide
ggtaggtgatgtctgctcaagcgtacagta

SEQ ID NO: 25381 - DNA, 30 bp, Artificial Sequence
  Synthetic oligonucleotide
agacagggagactttacgaattagagagta

SEQ ID NO: 25382 - DNA, 31 bp, Artificial Sequence
  Synthetic oligonucleotide
catacggacatcaatgtatgcctttcgagta

SEQ ID NO: 25383 - DNA, 30 bp, Artificial Sequence
  Synthetic oligonucleotide
acgcgggattggataatataacagggagta

SEQ ID NO: 25384 - DNA, 30 bp, Artificial Sequence
  Synthetic oligonucleotide
gctggaggagtagatataatcgtgttagta

SEQ ID NO: 25385 - DNA, 30 bp, Artificial Sequence
  Synthetic oligonucleotide
gggggttaagggtggatgaaaaaaaacgta

SEQ ID NO: 25386 - DNA, 30 bp, Artificial Sequence
  Synthetic oligonucleotide
catgagcgcaatggcggtgcggaaaacgta

SEQ ID NO: 25387 - DNA, 30 bp, Artificial Sequence
  Synthetic oligonucleotide
aatggcagggataaagagtgatccaacgta

SEQ ID NO: 25388 - DNA, 30 bp, Artificial Sequence
  Synthetic oligonucleotide
tcggagactgcatgacaacctaatcccgta

SEQ ID NO: 25389 - DNA, 30 bp, Artificial Sequence
  Synthetic oligonucleotide
ccatcaagaagagactatagtgatgccgta

SEQ ID NO: 25390 - DNA, 30 bp, Artificial Sequence
  Synthetic oligonucleotide
gagcaaatgccgatggccccaggaagcgta

SEQ ID NO: 25391 - DNA, 30 bp, Artificial Sequence
  Synthetic oligonucleotide
gggaaaagcaagcggatcccaaccagcgta

SEQ ID NO: 25392 - DNA, 30 bp, Artificial Sequence
  Synthetic oligonucleotide
caagcgagacagctggataaagggacggta

SEQ ID NO: 25393 - DNA, 30 bp, Artificial Sequence
  Synthetic oligonucleotide
actcgagtgataggcggatacacacgggta

SEQ ID NO: 25394 - DNA, 30 bp, Artificial Sequence
  Synthetic oligonucleotide
ggaggtcgtgtcaataaaggtagcggggta

SEQ ID NO: 25395 - DNA, 30 bp, Artificial Sequence
  Synthetic oligonucleotide
tagaatacgcgacggaaaagctggtgggta

SEQ ID NO: 25396 - DNA, 30 bp, Artificial Sequence
  Synthetic oligonucleotide
aacacggtcgaaagaagatcagggaaatta

SEQ ID NO: 25397 - DNA, 30 bp, Artificial Sequence
  Synthetic oligonucleotide
ggagagcgaggaacgccttggccaccatta

SEQ ID NO: 25398 - DNA, 30 bp, Artificial Sequence
  Synthetic oligonucleotide
gaagacgagggaccgcaccccgaagcatta

SEQ ID NO: 25399 - DNA, 30 bp, Artificial Sequence
  Synthetic oligonucleotide
cgacgatagtcaccggtaatatcaggatta

SEQ ID NO: 25400 - DNA, 30 bp, Artificial Sequence
  Synthetic oligonucleotide
ggaggctaacaggctcgcacggacggatta

SEQ ID NO: 25401 - DNA, 30 bp, Artificial Sequence
  Synthetic oligonucleotide
aaggcaaaaacacaacgctacatcggatta

SEQ ID NO: 25402 - DNA, 30 bp, Artificial Sequence
  Synthetic oligonucleotide
agggcacgagaaagttggtatcgactatta

SEQ ID NO: 25403 - DNA, 30 bp, Artificial Sequence
  Synthetic oligonucleotide
agcctagtcaaagacaaccagggggagtta

SEQ ID NO: 25404 - DNA, 30 bp, Artificial Sequence
  Synthetic oligonucleotide
gcgcggtaaacaaagggacggtgcacgtta

SEQ ID NO: 25405 - DNA, 30 bp, Artificial Sequence
  Synthetic oligonucleotide
aggtggcagactcaaaaaaggagtccgtta

SEQ ID NO: 25406 - DNA, 30 bp, Artificial Sequence
  Synthetic oligonucleotide
aggttaatcgggacatatacagtgaggtta

SEQ ID NO: 25407 - DNA, 30 bp, Artificial Sequence
  Synthetic oligonucleotide
tgacaaggtcactacaagacatgggggtta

SEQ ID NO: 25408 - DNA, 30 bp, Artificial Sequence
  Synthetic oligonucleotide
cacggacgaacaacgcaaacacgctgttta

SEQ ID NO: 25409 - DNA, 30 bp, Artificial Sequence
  Synthetic oligonucleotide
acggaaacaaccgaggacagcgtgttttta

SEQ ID NO: 25410 - DNA, 30 bp, Artificial Sequence
  Synthetic oligonucleotide
gcgtggattttgaagtaaaacgaggaaaac

SEQ ID NO: 25411 - DNA, 30 bp, Artificial Sequence
  Synthetic oligonucleotide
cacgttaaggtgtaccaagaggtcgcaaac

SEQ ID NO: 25412 - DNA, 30 bp, Artificial Sequence
  Synthetic oligonucleotide
agagcggtcgccaccaaaatgtcacgaaac

SEQ ID NO: 25413 - DNA, 30 bp, Artificial Sequence
  Synthetic oligonucleotide
acacgccatcaacagccgataagcataaac

SEQ ID NO: 25414 - DNA, 30 bp, Artificial Sequence
  Synthetic oligonucleotide
ggggacgtaacgagggtgcaaggcaagaac

SEQ ID NO: 25415 - DNA, 30 bp, Artificial Sequence
  Synthetic oligonucleotide
aggcatggtaggtgggtagcaaggtagaac

SEQ ID NO: 25416 - DNA, 30 bp, Artificial Sequence
  Synthetic oligonucleotide
aggatcacaaaaacgacaatgaaaccgaac

SEQ ID NO: 25417 - DNA, 30 bp, Artificial Sequence
  Synthetic oligonucleotide
cagctaatagagaagcgcacaatgtcgaac

SEQ ID NO: 25418 - DNA, 30 bp, Artificial Sequence
  Synthetic oligonucleotide
tattgggcgcgctaaacctagtgagggaac

SEQ ID NO: 25419 - DNA, 30 bp, Artificial Sequence
  Synthetic oligonucleotide
aaagtgcatgcgcgcgaaaaacgtgggaac

SEQ ID NO: 25420 - DNA, 30 bp, Artificial Sequence
  Synthetic oligonucleotide
cgccaagggaacaaggaggtaacgctgaac

SEQ ID NO: 25421 - DNA, 30 bp, Artificial Sequence
  Synthetic oligonucleotide
ccagggggcgttgtaccacggaacaataac

SEQ ID NO: 25422 - DNA, 30 bp, Artificial Sequence
  Synthetic oligonucleotide
tctagcgaggatggtgtcacagccaataac

SEQ ID NO: 25423 - DNA, 30 bp, Artificial Sequence
  Synthetic oligonucleotide
acggaagtaaaaagacatgcggcagataac

SEQ ID NO: 25424 - DNA, 30 bp, Artificial Sequence
  Synthetic oligonucleotide
tatcgacaagcccagacaaatatgactaac

SEQ ID NO: 25425 - DNA, 30 bp, Artificial Sequence
  Synthetic oligonucleotide
caggggagatcaaagagcgagcgaagtaac

SEQ ID NO: 25426 - DNA, 30 bp, Artificial Sequence
  Synthetic oligonucleotide
tctcggagaaggcaagctggaaagcgtaac

SEQ ID NO: 25427 - DNA, 30 bp, Artificial Sequence
  Synthetic oligonucleotide
ggtggggtaaaagagacaatccactgtaac

SEQ ID NO: 25428 - DNA, 30 bp, Artificial Sequence
  Synthetic oligonucleotide
cgaagacgggggaaattccaccttgttaac

SEQ ID NO: 25429 - DNA, 30 bp, Artificial Sequence
  Synthetic oligonucleotide
caagagttcgaaagaagggacgggtttaac

SEQ ID NO: 25430 - DNA, 30 bp, Artificial Sequence
  Synthetic oligonucleotide
acggccaagttaggtacggagtgagaacac

SEQ ID NO: 25431 - DNA, 30 bp, Artificial Sequence
  Synthetic oligonucleotide
tgccgtcgctgtgaaaacgtgcgctcacac

SEQ ID NO: 25432 - DNA, 30 bp, Artificial Sequence
  Synthetic oligonucleotide
accggatcatggctaacaggcgagcgacac

SEQ ID NO: 25433 - DNA, 30 bp, Artificial Sequence
  Synthetic oligonucleotide
acgataccaaattcgataagaatgggacac

SEQ ID NO: 25434 - DNA, 30 bp, Artificial Sequence
  Synthetic oligonucleotide
tgggggtaggcatgcatgaggagtgaccac

SEQ ID NO: 25435 - DNA, 30 bp, Artificial Sequence
  Synthetic oligonucleotide
tagacgcgagcccgaccgaaatcgagccac

SEQ ID NO: 25436 - DNA, 30 bp, Artificial Sequence
  Synthetic oligonucleotide
cctaatggagtaacctaagacaaccgccac

SEQ ID NO: 25437 - DNA, 30 bp, Artificial Sequence
  Synthetic oligonucleotide
tgggaggaaacaaggtacatggctccgcac

SEQ ID NO: 25438 - DNA, 30 bp, Artificial Sequence
  Synthetic oligonucleotide
tccatcaaaagataatgccaaagaaggcac

SEQ ID NO: 25439 - DNA, 30 bp, Artificial Sequence
  Synthetic oligonucleotide
gaggtgtccaacaaaagtgagttagtgcac

SEQ ID NO: 25440 - DNA, 30 bp, Artificial Sequence
  Synthetic oligonucleotide
gggcatctagagcgaaatggcgacaatcac

SEQ ID NO: 25441 - DNA, 30 bp, Artificial Sequence
  Synthetic oligonucleotide
ctagaagggaacacagaaatcacgcgtcac

SEQ ID NO: 25442 - DNA, 30 bp, Artificial Sequence
  Synthetic oligonucleotide
agagatgccgggaatgcttagcaccaagac

SEQ ID NO: 25443 - DNA, 30 bp, Artificial Sequence
  Synthetic oligonucleotide
gaacgaattcctgcaaaagctagccaagac

SEQ ID NO: 25444 - DNA, 30 bp, Artificial Sequence
  Synthetic oligonucleotide
acgcaatgccacccacagaaggcagaagac

SEQ ID NO: 25445 - DNA, 30 bp, Artificial Sequence
  Synthetic oligonucleotide
gatggtaagcgtgacactgcgaacgaagac

SEQ ID NO: 25446 - DNA, 30 bp, Artificial Sequence
  Synthetic oligonucleotide
aacctgagcaggcacggcccaattgcagac

SEQ ID NO: 25447 - DNA, 30 bp, Artificial Sequence
  Synthetic oligonucleotide
cgccgccggagggcgaaagagtgaagagac

SEQ ID NO: 25448 - DNA, 30 bp, Artificial Sequence
  Synthetic oligonucleotide
tctcgaattcagaaccgtacccagtgagac

SEQ ID NO: 25449 - DNA, 30 bp, Artificial Sequence
  Synthetic oligonucleotide
cgtggcgttgctcaaatctgaaataccgac

SEQ ID NO: 25450 - DNA, 30 bp, Artificial Sequence
  Synthetic oligonucleotide
gagggcaaatagcgaatgcgcaacagcgac

SEQ ID NO: 25451 - DNA, 30 bp, Artificial Sequence
  Synthetic oligonucleotide
tagcaggagacacacgaagcaaatagcgac

SEQ ID NO: 25452 - DNA, 30 bp, Artificial Sequence
  Synthetic oligonucleotide
agaggcgatatacgtttgcaaataggcgac

SEQ ID NO: 25453 - DNA, 30 bp, Artificial Sequence
  Synthetic oligonucleotide
tatgcggatggctaccgccaaaagtgcgac

SEQ ID NO: 25454 - DNA, 30 bp, Artificial Sequence
  Synthetic oligonucleotide
gagcaaaggaagaattagcctacggaggac

SEQ ID NO: 25455 - DNA, 30 bp, Artificial Sequence
  Synthetic oligonucleotide
tggagtgctcaataaaaagtatgagcggac

SEQ ID NO: 25456 - DNA, 30 bp, Artificial Sequence
  Synthetic oligonucleotide
aaggtagacaccgagcacacctccgcggac

SEQ ID NO: 25457 - DNA, 30 bp, Artificial Sequence
  Synthetic oligonucleotide
aggcgcgtaaagccttcaggacgagtggac

SEQ ID NO: 25458 - DNA, 30 bp, Artificial Sequence
  Synthetic oligonucleotide
gggcgtagtccgacgaaggccgacggtgac

SEQ ID NO: 25459 - DNA, 30 bp, Artificial Sequence
  Synthetic oligonucleotide
cgatcagagtgccaaacggtagctgttgac

SEQ ID NO: 25460 - DNA, 30 bp, Artificial Sequence
  Synthetic oligonucleotide
aacggtgtgacgtaaaggatgcgttttgac

SEQ ID NO: 25461 - DNA, 30 bp, Artificial Sequence
  Synthetic oligonucleotide
tgaaggggtcgaccagaagaagggatatac

SEQ ID NO: 25462 - DNA, 30 bp, Artificial Sequence
  Synthetic oligonucleotide
tgcgagaacggcaatacggggtgtcgctac

SEQ ID NO: 25463 - DNA, 30 bp, Artificial Sequence
  Synthetic oligonucleotide
acggggggagcaacctttgtcgtattctac

SEQ ID NO: 25464 - DNA, 30 bp, Artificial Sequence
  Synthetic oligonucleotide
gataagatgtgaccactggaacttgagtac

SEQ ID NO: 25465 - DNA, 30 bp, Artificial Sequence
  Synthetic oligonucleotide
aacgacaaggtcaggtgaacatcgggttac

SEQ ID NO: 25466 - DNA, 30 bp, Artificial Sequence
  Synthetic oligonucleotide
gtgagaggaagaaaaaggtaccacgtttac

SEQ ID NO: 25467 - DNA, 30 bp, Artificial Sequence
  Synthetic oligonucleotide
aaagaaaaaaactacacggccgacaaaacc

SEQ ID NO: 25468 - DNA, 30 bp, Artificial Sequence
  Synthetic oligonucleotide
acacggcgagagttcggtgcactggaaacc

SEQ ID NO: 25469 - DNA, 30 bp, Artificial Sequence
  Synthetic oligonucleotide
ggaacacggtaggaaacagtgagtggaacc

SEQ ID NO: 25470 - DNA, 30 bp, Artificial Sequence
  Synthetic oligonucleotide
acggaagtggatcctggacatctatgaacc

SEQ ID NO: 25471 - DNA, 30 bp, Artificial Sequence
  Synthetic oligonucleotide
tcgtgtgtcgggacagtcggcgttgtaacc

SEQ ID NO: 25472 - DNA, 30 bp, Artificial Sequence
  Synthetic oligonucleotide
gtaaatagaggaacaaatgtaacagacacc

SEQ ID NO: 25473 - DNA, 30 bp, Artificial Sequence
  Synthetic oligonucleotide
catcagaccagggtgccatgtcaggtcacc

SEQ ID NO: 25474 - DNA, 30 bp, Artificial Sequence
  Synthetic oligonucleotide
ccgaaacgaatggccacgagttagaagacc

SEQ ID NO: 25475 - DNA, 30 bp, Artificial Sequence
  Synthetic oligonucleotide
gaagtggggaataagagaaaatatgtgacc

SEQ ID NO: 25476 - DNA, 30 bp, Artificial Sequence
  Synthetic oligonucleotide
agcgcgaaacaaactgccagcggtgtgacc

SEQ ID NO: 25477 - DNA, 30 bp, Artificial Sequence
  Synthetic oligonucleotide
agtaaggtcggggggaccacgataaatacc

SEQ ID NO: 25478 - DNA, 30 bp, Artificial Sequence
  Synthetic oligonucleotide
gggggcttagggaacgatgccaacgatacc

SEQ ID NO: 25479 - DNA, 30 bp, Artificial Sequence
  Synthetic oligonucleotide
agcgaagctggacggaagtgtaatgatacc

SEQ ID NO: 25480 - DNA, 30 bp, Artificial Sequence
  Synthetic oligonucleotide
cgggggaagtttacgaaatggctgtgtacc

SEQ ID NO: 25481 - DNA, 30 bp, Artificial Sequence
  Synthetic oligonucleotide
gggagtgtaaaatggaatcaaacgaaaccc

SEQ ID NO: 25482 - DNA, 30 bp, Artificial Sequence
  Synthetic oligonucleotide
agcaagctaggaggacatagacacataccc

SEQ ID NO: 25483 - DNA, 30 bp, Artificial Sequence
  Synthetic oligonucleotide
catcgacatacaagcataggaaccataccc

SEQ ID NO: 25484 - DNA, 38 bp, Artificial Sequence
  Synthetic oligonucleotide
aaaagagaaccaacagaccgacaaagaaactcagcccc

SEQ ID NO: 25485 - DNA, 30 bp, Artificial Sequence
  Synthetic oligonucleotide
agtgtaacaaaaatggtgagggcacggccc

SEQ ID NO: 25486 - DNA, 30 bp, Artificial Sequence
  Synthetic oligonucleotide
cgggaagaggaagtgtaaatcgtctggccc

SEQ ID NO: 25487 - DNA, 30 bp, Artificial Sequence
  Synthetic oligonucleotide
gagagcaaaaacgcgataaaactcactccc

SEQ ID NO: 25488 - DNA, 30 bp, Artificial Sequence
  Synthetic oligonucleotide
agattcgtacaccaagagttcacactagcc

SEQ ID NO: 25489 - DNA, 30 bp, Artificial Sequence
  Synthetic oligonucleotide
cagggtaggaaagcaatctaggcgatcgcc

SEQ ID NO: 25490 - DNA, 30 bp, Artificial Sequence
  Synthetic oligonucleotide
ccgggttgctatactggaaagaatctcgcc

SEQ ID NO: 25491 - DNA, 30 bp, Artificial Sequence
  Synthetic oligonucleotide
tcaaagagtgatccggtcaggtagaaatcc

SEQ ID NO: 25492 - DNA, 30 bp, Artificial Sequence
  Synthetic oligonucleotide
tagacagcgcaatcaacactatcagaatcc

SEQ ID NO: 25493 - DNA, 30 bp, Artificial Sequence
  Synthetic oligonucleotide
cggtcccaagtatgggcatgatgataatcc

SEQ ID NO: 25494 - DNA, 30 bp, Artificial Sequence
  Synthetic oligonucleotide
tcttcattcgccctttttcagtcaccatcc

SEQ ID NO: 25495 - DNA, 30 bp, Artificial Sequence
  Synthetic oligonucleotide
gcgacaccaggcgaatgattccgtttatcc

SEQ ID NO: 25496 - DNA, 30 bp, Artificial Sequence
  Synthetic oligonucleotide
cgatcaaacactgcagataatcgtgagtcc

SEQ ID NO: 25497 - DNA, 30 bp, Artificial Sequence
  Synthetic oligonucleotide
cgcaaaaacatggagtcgaaatgtgtgtcc

SEQ ID NO: 25498 - DNA, 30 bp, Artificial Sequence
  Synthetic oligonucleotide
ggagccgtgcgtgagaaagcatcagaaagc

SEQ ID NO: 25499 - DNA, 30 bp, Artificial Sequence
  Synthetic oligonucleotide
tgacatacaggacggactaggcaagcaagc

SEQ ID NO: 25500 - DNA, 30 bp, Artificial Sequence
  Synthetic oligonucleotide
tgtgaatcgtctgaacatcaacgtgcaagc

SEQ ID NO: 25501 - DNA, 30 bp, Artificial Sequence
  Synthetic oligonucleotide
ccggaaggtagcggtgaacaatgacgaagc

SEQ ID NO: 25502 - DNA, 30 bp, Artificial Sequence
  Synthetic oligonucleotide
cgtggtcaaccaatagcataaaacgtaagc

SEQ ID NO: 25503 - DNA, 30 bp, Artificial Sequence
  Synthetic oligonucleotide
gggcgaaatagagatagcgaaggaaccagc

SEQ ID NO: 25504 - DNA, 30 bp, Artificial Sequence
  Synthetic oligonucleotide
gcggactgggacacgcaaacgaagaccagc

SEQ ID NO: 25505 - DNA, 30 bp, Artificial Sequence
  Synthetic oligonucleotide
acatgaagtttaacactgaaacagcccagc

SEQ ID NO: 25506 - DNA, 30 bp, Artificial Sequence
  Synthetic oligonucleotide
agattcagaatcatcgagggcacgagcagc

SEQ ID NO: 25507 - DNA, 30 bp, Artificial Sequence
  Synthetic oligonucleotide
acggacatggagatttacatttcaatcagc

SEQ ID NO: 25508 - DNA, 30 bp, Artificial Sequence
  Synthetic oligonucleotide
cacggcaaaataccatgaggttacgtcagc

SEQ ID NO: 25509 - DNA, 30 bp, Artificial Sequence
  Synthetic oligonucleotide
tggcgaagagtgcgacaattttatccgagc

SEQ ID NO: 25510 - DNA, 30 bp, Artificial Sequence
  Synthetic oligonucleotide
ggagatgcgggggtgtgaggaagtaggagc

SEQ ID NO: 25511 - DNA, 30 bp, Artificial Sequence
  Synthetic oligonucleotide
gggcgagctcccggcatactcctgaatagc

SEQ ID NO: 25512 - DNA, 30 bp, Artificial Sequence
  Synthetic oligonucleotide
agcgaaatggatgatccggacaatgatagc

SEQ ID NO: 25513 - DNA, 30 bp, Artificial Sequence
  Synthetic oligonucleotide
cgtcaaaacaccgcaacattggacactagc

SEQ ID NO: 25514 - DNA, 30 bp, Artificial Sequence
  Synthetic oligonucleotide
aggctgatacagagccgtgacacatctagc

SEQ ID NO: 25515 - DNA, 30 bp, Artificial Sequence
  Synthetic oligonucleotide
tcggggggctacgaataaaccagcggtagc

SEQ ID NO: 25516 - DNA, 30 bp, Artificial Sequence
  Synthetic oligonucleotide
acagaggcaagtagtaccgtcggctttagc

SEQ ID NO: 25517 - DNA, 30 bp, Artificial Sequence
  Synthetic oligonucleotide
ctgaatccataaggaagggtggaacaacgc

SEQ ID NO: 25518 - DNA, 30 bp, Artificial Sequence
  Synthetic oligonucleotide
ttcgagccagacacgcaaccagagccacgc

SEQ ID NO: 25519 - DNA, 30 bp, Artificial Sequence
  Synthetic oligonucleotide
caaaagtgcaaagtaaccagcggcaaccgc

SEQ ID NO: 25520 - DNA, 30 bp, Artificial Sequence
  Synthetic oligonucleotide
gaggtaaggcggagacaatcgcgcacccgc

SEQ ID NO: 25521 - DNA, 30 bp, Artificial Sequence
  Synthetic oligonucleotide
atgcaaaggctcagggatacgtggtcccgc

SEQ ID NO: 25522 - DNA, 30 bp, Artificial Sequence
  Synthetic oligonucleotide
gtaggataaacagcccaagataagctgcgc

SEQ ID NO: 25523 - DNA, 30 bp, Artificial Sequence
  Synthetic oligonucleotide
accagagagcattctctacggtaagtgcgc

SEQ ID NO: 25524 - DNA, 30 bp, Artificial Sequence
  Synthetic oligonucleotide
agacaccgagttgagcatcgacagaatcgc

SEQ ID NO: 25525 - DNA, 30 bp, Artificial Sequence
  Synthetic oligonucleotide
aacagtgtcggtccgaaaatagagactcgc

SEQ ID NO: 25526 - DNA, 30 bp, Artificial Sequence
  Synthetic oligonucleotide
catcgctacaataaggcggacaaagctcgc

SEQ ID NO: 25527 - DNA, 30 bp, Artificial Sequence
  Synthetic oligonucleotide
cctgcatacaagataatgaaatcagctcgc

SEQ ID NO: 25528 - DNA, 30 bp, Artificial Sequence
  Synthetic oligonucleotide
cggatagaggattcccgtgtcaaaggtcgc

SEQ ID NO: 25529 - DNA, 30 bp, Artificial Sequence
  Synthetic oligonucleotide
cgaagacacgtgccccccgaacagcgcggc

SEQ ID NO: 25530 - DNA, 30 bp, Artificial Sequence
  Synthetic oligonucleotide
aaggaacagtcagacatagtgccggtcggc

SEQ ID NO: 25531 - DNA, 30 bp, Artificial Sequence
  Synthetic oligonucleotide
gaacgaagataatgagctaagaaattcggc

SEQ ID NO: 25532 - DNA, 30 bp, Artificial Sequence
  Synthetic oligonucleotide
catcgcgagcggatcggcaagaacgagggc

SEQ ID NO: 25533 - DNA, 30 bp, Artificial Sequence
  Synthetic oligonucleotide
atggcgggaaacaccggaaagaatctgggc

SEQ ID NO: 25534 - DNA, 30 bp, Artificial Sequence
  Synthetic oligonucleotide
ggtaccagaagggacagaaaccaacgtggc

SEQ ID NO: 25535 - DNA, 30 bp, Artificial Sequence
  Synthetic oligonucleotide
ggcgaagcctaatatcaacttattcgtggc

SEQ ID NO: 25536 - DNA, 30 bp, Artificial Sequence
  Synthetic oligonucleotide
cgaagaacttggtgggccgatgaagttggc

SEQ ID NO: 25537 - DNA, 30 bp, Artificial Sequence
  Synthetic oligonucleotide
gtgaattaacatataagacagtaagttggc

SEQ ID NO: 25538 - DNA, 30 bp, Artificial Sequence
  Synthetic oligonucleotide
cgtgaagatagtactgacttagaacgatgc

SEQ ID NO: 25539 - DNA, 30 bp, Artificial Sequence
  Synthetic oligonucleotide
acaagtacagatctgatcgaaaacatatgc

SEQ ID NO: 25540 - DNA, 30 bp, Artificial Sequence
  Synthetic oligonucleotide
gccaggcagatataaaaattagaggactgc

SEQ ID NO: 25541 - DNA, 30 bp, Artificial Sequence
  Synthetic oligonucleotide
agagcgcgcgtttcacggtggagggactgc

SEQ ID NO: 25542 - DNA, 30 bp, Artificial Sequence
  Synthetic oligonucleotide
aagcacagagatggcaaagagttctactgc

SEQ ID NO: 25543 - DNA, 30 bp, Artificial Sequence
  Synthetic oligonucleotide
ggaggccgagagcgtcctgggtgcctctgc

SEQ ID NO: 25544 - DNA, 30 bp, Artificial Sequence
  Synthetic oligonucleotide
cgaatgtaaaaggcacgcgaccccgtctgc

SEQ ID NO: 25545 - DNA, 30 bp, Artificial Sequence
  Synthetic oligonucleotide
aggatgtgtactcttaagaagacaaagtgc

SEQ ID NO: 25546 - DNA, 30 bp, Artificial Sequence
  Synthetic oligonucleotide
tcgtatcagggacctaaattaaaccagtgc

SEQ ID NO: 25547 - DNA, 30 bp, Artificial Sequence
  Synthetic oligonucleotide
catggtgtggcgtttgagggcaatgagtgc

SEQ ID NO: 25548 - DNA, 30 bp, Artificial Sequence
  Synthetic oligonucleotide
cacggagaaagatcaagtgacaggtcgtgc

SEQ ID NO: 25549 - DNA, 30 bp, Artificial Sequence
  Synthetic oligonucleotide
gttggataaggaaacaaaagcaccaggtgc

SEQ ID NO: 25550 - DNA, 30 bp, Artificial Sequence
  Synthetic oligonucleotide
gctgcagagggaaaaacgaaaagcggttgc

SEQ ID NO: 25551 - DNA, 30 bp, Artificial Sequence
  Synthetic oligonucleotide
gagacgccaaacacctgagcaccgaaaatc

SEQ ID NO: 25552 - DNA, 30 bp, Artificial Sequence
  Synthetic oligonucleotide
cagcgggggtaaagaggagtttagtaaatc

SEQ ID NO: 25553 - DNA, 30 bp, Artificial Sequence
  Synthetic oligonucleotide
aaggtgaacaaagaaaaggttaagacaatc

SEQ ID NO: 25554 - DNA, 30 bp, Artificial Sequence
  Synthetic oligonucleotide
aactgaaaggaagggtcgtacaagtgaatc

SEQ ID NO: 25555 - DNA, 31 bp, Artificial Sequence
  Synthetic oligonucleotide
cgggcaaaaaaggggattacatctgataatc

SEQ ID NO: 25556 - DNA, 30 bp, Artificial Sequence
  Synthetic oligonucleotide
cgaatcgtagtcgacgagtatccgtacatc

SEQ ID NO: 25557 - DNA, 30 bp, Artificial Sequence
  Synthetic oligonucleotide
cgagtcaactggaaacggattggcgccatc

SEQ ID NO: 25558 - DNA, 30 bp, Artificial Sequence
  Synthetic oligonucleotide
tggggggtgccgcaacgtgtactaagcatc

SEQ ID NO: 25559 - DNA, 30 bp, Artificial Sequence
  Synthetic oligonucleotide
gacacactagggcacgatcgggtcagcatc

SEQ ID NO: 25560 - DNA, 30 bp, Artificial Sequence
  Synthetic oligonucleotide
cgacatggacttcatccgatctcaatcatc

SEQ ID NO: 25561 - DNA, 30 bp, Artificial Sequence
  Synthetic oligonucleotide
taacagaagcaaacgagttatagcctcatc

SEQ ID NO: 25562 - DNA, 30 bp, Artificial Sequence
  Synthetic oligonucleotide
tgaaagggcaaccggcatgcaacccagatc

SEQ ID NO: 25563 - DNA, 30 bp, Artificial Sequence
  Synthetic oligonucleotide
cggagtaagtcagttccgatcagccagatc

SEQ ID NO: 25564 - DNA, 30 bp, Artificial Sequence
  Synthetic oligonucleotide
cgaaggacatggatatatgaatggtggatc

SEQ ID NO: 25565 - DNA, 30 bp, Artificial Sequence
  Synthetic oligonucleotide
tgagcgagactcgctaacctggcgactatc

SEQ ID NO: 25566 - DNA, 30 bp, Artificial Sequence
  Synthetic oligonucleotide
ccttacaaagacagtgacccagccgtactc

SEQ ID NO: 25567 - DNA, 30 bp, Artificial Sequence
  Synthetic oligonucleotide
ctcgcaaggccacaggaaaagtatgtactc

SEQ ID NO: 25568 - DNA, 30 bp, Artificial Sequence
  Synthetic oligonucleotide
tcatcagagagtagctgaccgttaaggctc

SEQ ID NO: 25569 - DNA, 28 bp, Artificial Sequence
  Synthetic oligonucleotide
tcatacggtgaaagaaatgctacatctc

SEQ ID NO: 25570 - DNA, 30 bp, Artificial Sequence
  Synthetic oligonucleotide
gccttaagtggtaggaactagatcgatctc

SEQ ID NO: 25571 - DNA, 30 bp, Artificial Sequence
  Synthetic oligonucleotide
cgagactcaaaccgctagcaaatcaaagtc

SEQ ID NO: 25572 - DNA, 30 bp, Artificial Sequence
  Synthetic oligonucleotide
atatcggtgaggagcaatcgtgagcaagtc

SEQ ID NO: 25573 - DNA, 30 bp, Artificial Sequence
  Synthetic oligonucleotide
aagtcaaaccgacatgtgctgctccgagtc

SEQ ID NO: 25574 - DNA, 30 bp, Artificial Sequence
  Synthetic oligonucleotide
agggatcaggctatcctggtgttaaacgtc

SEQ ID NO: 25575 - DNA, 30 bp, Artificial Sequence
  Synthetic oligonucleotide
tatccggggaggtagttaatgtgtgccgtc

SEQ ID NO: 25576 - DNA, 30 bp, Artificial Sequence
  Synthetic oligonucleotide
atgggcaaaaagatgtctaccataggggtc

SEQ ID NO: 25577 - DNA, 30 bp, Artificial Sequence
  Synthetic oligonucleotide
acgatcagccagatgcgttggtaggatgtc

SEQ ID NO: 25578 - DNA, 30 bp, Artificial Sequence
  Synthetic oligonucleotide
taacgggtaggcgaggggccatcctctgtc

SEQ ID NO: 25579 - DNA, 30 bp, Artificial Sequence
  Synthetic oligonucleotide
tagagctgcaagggacagtgaagtggtgtc

SEQ ID NO: 25580 - DNA, 30 bp, Artificial Sequence
  Synthetic oligonucleotide
cgtatctaggcgaacctaggagaccacttc

SEQ ID NO: 25581 - DNA, 30 bp, Artificial Sequence
  Synthetic oligonucleotide
ggaatcaacacaaggaggttaagtcccttc

SEQ ID NO: 25582 - DNA, 30 bp, Artificial Sequence
  Synthetic oligonucleotide
cggcaaaatgtggggcaagtcgtagagttc

SEQ ID NO: 25583 - DNA, 30 bp, Artificial Sequence
  Synthetic oligonucleotide
agggaggcgcggacccccaaatgcccgttc

SEQ ID NO: 25584 - DNA, 30 bp, Artificial Sequence
  Synthetic oligonucleotide
agagcctaagtgcgaaggtcactaatgttc

SEQ ID NO: 25585 - DNA, 30 bp, Artificial Sequence
  Synthetic oligonucleotide
tgggataagtccggtagggaggctaaaaag

SEQ ID NO: 25586 - DNA, 30 bp, Artificial Sequence
  Synthetic oligonucleotide
taatgaaaccacagtcttctagggcaaaag

SEQ ID NO: 25587 - DNA, 30 bp, Artificial Sequence
  Synthetic oligonucleotide
tatgggatacggcgaaaatcaacaacaaag

SEQ ID NO: 25588 - DNA, 30 bp, Artificial Sequence
  Synthetic oligonucleotide
gtgcgtacgtcagtagaacattctacaaag

SEQ ID NO: 25589 - DNA, 30 bp, Artificial Sequence
  Synthetic oligonucleotide
cgaatgattttataaacaacacaggcaaag

SEQ ID NO: 25590 - DNA, 30 bp, Artificial Sequence
  Synthetic oligonucleotide
ggtacgaacaatggattacgtccatcaaag

SEQ ID NO: 25591 - DNA, 30 bp, Artificial Sequence
  Synthetic oligonucleotide
gacccaaagagtcctaagcgaatgataaag

SEQ ID NO: 25592 - DNA, 30 bp, Artificial Sequence
  Synthetic oligonucleotide
ggtgaggttatcctagttaaggagctaaag

SEQ ID NO: 25593 - DNA, 30 bp, Artificial Sequence
  Synthetic oligonucleotide
aggattgccctacccagagacgtccacaag

SEQ ID NO: 25594 - DNA, 30 bp, Artificial Sequence
  Synthetic oligonucleotide
tgggattcaaaagagatagaccgtcacaag

SEQ ID NO: 25595 - DNA, 30 bp, Artificial Sequence
  Synthetic oligonucleotide
cacaacattgcggctcaaagtcaggacaag

SEQ ID NO: 25596 - DNA, 30 bp, Artificial Sequence
  Synthetic oligonucleotide
ctcatggtgagcaaagaacacacctacaag

SEQ ID NO: 25597 - DNA, 30 bp, Artificial Sequence
  Synthetic oligonucleotide
tggaagggagtgacactagatgggtacaag

SEQ ID NO: 25598 - DNA, 30 bp, Artificial Sequence
  Synthetic oligonucleotide
ccccacggaaagctataaggactaaccaag

SEQ ID NO: 25599 - DNA, 30 bp, Artificial Sequence
  Synthetic oligonucleotide
agcgatgcgagaagatggtcgagttccaag

SEQ ID NO: 25600 - DNA, 30 bp, Artificial Sequence
  Synthetic oligonucleotide
acgctaacgtgtgacaaccggcagagcaag

SEQ ID NO: 25601 - DNA, 30 bp, Artificial Sequence
  Synthetic oligonucleotide
gctgagaattgattcacgaatctgagcaag

SEQ ID NO: 25602 - DNA, 30 bp, Artificial Sequence
  Synthetic oligonucleotide
tacacctcttaactcagggcggaaggcaag

SEQ ID NO: 25603 - DNA, 30 bp, Artificial Sequence
  Synthetic oligonucleotide
ataggtagggctggtacgtagtcgatcaag

SEQ ID NO: 25604 - DNA, 30 bp, Artificial Sequence
  Synthetic oligonucleotide
tgggtggggaaaattacttaaaacctcaag

SEQ ID NO: 25605 - DNA, 30 bp, Artificial Sequence
  Synthetic oligonucleotide
tcgaatggtcatgccgaatttaggttcaag

SEQ ID NO: 25606 - DNA, 30 bp, Artificial Sequence
  Synthetic oligonucleotide
acggctggatagaccacgaccaggaagaag

SEQ ID NO: 25607 - DNA, 30 bp, Artificial Sequence
  Synthetic oligonucleotide
gggtcatacgaattttatgatggacagaag

SEQ ID NO: 25608 - DNA, 30 bp, Artificial Sequence
  Synthetic oligonucleotide
atgcccatgcacacagtcgctatccagaag

SEQ ID NO: 25609 - DNA, 30 bp, Artificial Sequence
  Synthetic oligonucleotide
tcattgagtgagtacgaaaataggaggaag

SEQ ID NO: 25610 - DNA, 30 bp, Artificial Sequence
  Synthetic oligonucleotide
aacgcaaactacgtgtccccttgtaggaag

SEQ ID NO: 25611 - DNA, 30 bp, Artificial Sequence
  Synthetic oligonucleotide
taactcacgaagtaaactactcatcggaag

SEQ ID NO: 25612 - DNA, 30 bp, Artificial Sequence
  Synthetic oligonucleotide
acatacgtgagtctggtacaagatcggaag

SEQ ID NO: 25613 - DNA, 30 bp, Artificial Sequence
  Synthetic oligonucleotide
atgcgcgtagtaagtgtcccgcccgggaag

SEQ ID NO: 25614 - DNA, 30 bp, Artificial Sequence
  Synthetic oligonucleotide
tcaaatacccaattacatgacagttggaag

SEQ ID NO: 25615 - DNA, 30 bp, Artificial Sequence
  Synthetic oligonucleotide
cgttcaactaagagtcaaacaaccaataag

SEQ ID NO: 25616 - DNA, 30 bp, Artificial Sequence
  Synthetic oligonucleotide
taaggcaatgtctcaacggcaaccgataag

SEQ ID NO: 25617 - DNA, 30 bp, Artificial Sequence
  Synthetic oligonucleotide
aggcaagaagggcttctccttgttgataag

SEQ ID NO: 25618 - DNA, 30 bp, Artificial Sequence
  Synthetic oligonucleotide
atgtgagaacaaactggcatcccacctaag

SEQ ID NO: 25619 - DNA, 30 bp, Artificial Sequence
  Synthetic oligonucleotide
tccgtagagggattgcggcaaaaggctaag

SEQ ID NO: 25620 - DNA, 30 bp, Artificial Sequence
  Synthetic oligonucleotide
agaacgactgctggccacaatgagtctaag

SEQ ID NO: 25621 - DNA, 30 bp, Artificial Sequence
  Synthetic oligonucleotide
caattccaaaagacggcggaaggttctaag

SEQ ID NO: 25622 - DNA, 30 bp, Artificial Sequence
  Synthetic oligonucleotide
caagagcgtcgtagtaaatatatttctaag

SEQ ID NO: 25623 - DNA, 30 bp, Artificial Sequence
  Synthetic oligonucleotide
caagacagctagtagatatgaagaagtaag

SEQ ID NO: 25624 - DNA, 30 bp, Artificial Sequence
  Synthetic oligonucleotide
gccggagtatgcctaaagatatcgagtaag

SEQ ID NO: 25625 - DNA, 30 bp, Artificial Sequence
  Synthetic oligonucleotide
acgtaggggtccattgcacagtctcgtaag

SEQ ID NO: 25626 - DNA, 30 bp, Artificial Sequence
  Synthetic oligonucleotide
gatctccaaaggagcggtctgcgaattaag

SEQ ID NO: 25627 - DNA, 30 bp, Artificial Sequence
  Synthetic oligonucleotide
cggaggccgataagggagatgagaaaacag

SEQ ID NO: 25628 - DNA, 30 bp, Artificial Sequence
  Synthetic oligonucleotide
gaccaacgacatacccatcgccgcaaacag

SEQ ID NO: 25629 - DNA, 30 bp, Artificial Sequence
  Synthetic oligonucleotide
taccgaaccatacgacggtcgcggaaacag

SEQ ID NO: 25630 - DNA, 30 bp, Artificial Sequence
  Synthetic oligonucleotide
tcgcaaccacacaagccaacgccacaacag

SEQ ID NO: 25631 - DNA, 30 bp, Artificial Sequence
  Synthetic oligonucleotide
aacgagatggtttaaactaaaaagtaacag

SEQ ID NO: 25632 - DNA, 30 bp, Artificial Sequence
  Synthetic oligonucleotide
tagagacgtgtggtactcttctatccacag

SEQ ID NO: 25633 - DNA, 30 bp, Artificial Sequence
  Synthetic oligonucleotide
cggggcaaaacaaggggtggagtcggacag

SEQ ID NO: 25634 - DNA, 30 bp, Artificial Sequence
  Synthetic oligonucleotide
agcgagatcagaacccaaaggtattgacag

SEQ ID NO: 25635 - DNA, 30 bp, Artificial Sequence
  Synthetic oligonucleotide
agaatgacgggggcggcgtgatgactacag

SEQ ID NO: 25636 - DNA, 30 bp, Artificial Sequence
  Synthetic oligonucleotide
tagattcgatagggcacgtgtgaaaaccag

SEQ ID NO: 25637 - DNA, 30 bp, Artificial Sequence
  Synthetic oligonucleotide
agcgacagctatacattacgtacgaaccag

SEQ ID NO: 25638 - DNA, 30 bp, Artificial Sequence
  Synthetic oligonucleotide
acggttgcgagcactgacagacttcaccag

SEQ ID NO: 25639 - DNA, 30 bp, Artificial Sequence
  Synthetic oligonucleotide
tccagagagcacagtgaagaagctgaccag

SEQ ID NO: 25640 - DNA, 30 bp, Artificial Sequence
  Synthetic oligonucleotide
ttgagatattacaagggaacgagaccccag

SEQ ID NO: 25641 - DNA, 30 bp, Artificial Sequence
  Synthetic oligonucleotide
gagcagccatgctcaaaggtccaggcccag

SEQ ID NO: 25642 - DNA, 30 bp, Artificial Sequence
  Synthetic oligonucleotide
tgcgatcgtctgcggattagggagggccag

SEQ ID NO: 25643 - DNA, 30 bp, Artificial Sequence
  Synthetic oligonucleotide
tcaggagtgctgcgagtaaacaccatccag

SEQ ID NO: 25644 - DNA, 31 bp, Artificial Sequence
  Synthetic oligonucleotide
acgtcgaaaccgaggcgtgcgatcagtccag

SEQ ID NO: 25645 - DNA, 30 bp, Artificial Sequence
  Synthetic oligonucleotide
gcggtaaccatgatataagcaaccgtccag

SEQ ID NO: 25646 - DNA, 30 bp, Artificial Sequence
  Synthetic oligonucleotide
cgcgagaacgaatggaccgtacccttccag

SEQ ID NO: 25647 - DNA, 30 bp, Artificial Sequence
  Synthetic oligonucleotide
gtgatgaaaactaacagtgagaagttccag

SEQ ID NO: 25648 - DNA, 30 bp, Artificial Sequence
  Synthetic oligonucleotide
ggccagatgaagtgctggagggtgcagcag

SEQ ID NO: 25649 - DNA, 30 bp, Artificial Sequence
  Synthetic oligonucleotide
gataaggtgtactccgaggagaatcagcag

SEQ ID NO: 25650 - DNA, 30 bp, Artificial Sequence
  Synthetic oligonucleotide
acgaagtttgcttacgaaggctccgagcag

SEQ ID NO: 25651 - DNA, 30 bp, Artificial Sequence
  Synthetic oligonucleotide
cgcaatataagaaaaaggggcgagtagcag

SEQ ID NO: 25652 - DNA, 30 bp, Artificial Sequence
  Synthetic oligonucleotide
cgtgagtggcacattgtatgagtgtagcag

SEQ ID NO: 25653 - DNA, 30 bp, Artificial Sequence
  Synthetic oligonucleotide
gcgcacgagaacagtaggcccataacgcag

SEQ ID NO: 25654 - DNA, 30 bp, Artificial Sequence
  Synthetic oligonucleotide
tggaaatgagtgcgccagattccttcgcag

SEQ ID NO: 25655 - DNA, 30 bp, Artificial Sequence
  Synthetic oligonucleotide
tcaaaattgaagaaggggaacatccggcag

SEQ ID NO: 25656 - DNA, 30 bp, Artificial Sequence
  Synthetic oligonucleotide
tggaggcaagtgactaaagggagagctcag

SEQ ID NO: 25657 - DNA, 30 bp, Artificial Sequence
  Synthetic oligonucleotide
aacaccaaacataagcctaaaacgtctcag

SEQ ID NO: 25658 - DNA, 30 bp, Artificial Sequence
  Synthetic oligonucleotide
agcgcaacggtagtttaagttccacgtcag

SEQ ID NO: 25659 - DNA, 30 bp, Artificial Sequence
  Synthetic oligonucleotide
acacagatgaagtataataaagtacgtcag

SEQ ID NO: 25660 - DNA, 30 bp, Artificial Sequence
  Synthetic oligonucleotide
acgtgatatccgcgtggaatctgaaaagag

SEQ ID NO: 25661 - DNA, 30 bp, Artificial Sequence
  Synthetic oligonucleotide
aagcaacattagagggcagtctgtaaagag

SEQ ID NO: 25662 - DNA, 30 bp, Artificial Sequence
  Synthetic oligonucleotide
cagtaccgcaaatggccttcatcacaagag

SEQ ID NO: 25663 - DNA, 30 bp, Artificial Sequence
  Synthetic oligonucleotide
tcgactacatgtcaattcgtacgccaagag

SEQ ID NO: 25664 - DNA, 30 bp, Artificial Sequence
  Synthetic oligonucleotide
catacacccggatattttggggtccaagag

SEQ ID NO: 25665 - DNA, 30 bp, Artificial Sequence
  Synthetic oligonucleotide
cacgggaatgaccttctgaacgcagaagag

SEQ ID NO: 25666 - DNA, 30 bp, Artificial Sequence
  Synthetic oligonucleotide
caacgggactgaaggtaccacgaggaagag

SEQ ID NO: 25667 - DNA, 30 bp, Artificial Sequence
  Synthetic oligonucleotide
cctactcaggagaagaccactcactaagag

SEQ ID NO: 25668 - DNA, 30 bp, Artificial Sequence
  Synthetic oligonucleotide
gcgtaatgacgatctttagggatgtaagag

SEQ ID NO: 25669 - DNA, 30 bp, Artificial Sequence
  Synthetic oligonucleotide
caagtagaccacactgacacaccagcagag

SEQ ID NO: 25670 - DNA, 30 bp, Artificial Sequence
  Synthetic oligonucleotide
tgaggtaaactcgccgctatagttcgagag

SEQ ID NO: 25671 - DNA, 30 bp, Artificial Sequence
  Synthetic oligonucleotide
agttgccctaaagaacgggaatacggagag

SEQ ID NO: 25672 - DNA, 30 bp, Artificial Sequence
  Synthetic oligonucleotide
tcagatgtcggacaggggttgtatggagag

SEQ ID NO: 25673 - DNA, 30 bp, Artificial Sequence
  Synthetic oligonucleotide
gtcgggctcgaggagcataccggaatagag

SEQ ID NO: 25674 - DNA, 30 bp, Artificial Sequence
  Synthetic oligonucleotide
tcctcgacagcgtggtcagagaccgtagag

SEQ ID NO: 25675 - DNA, 31 bp, Artificial Sequence
  Synthetic oligonucleotide
cttcgtgcgcgacatcgttaatgccttagag

SEQ ID NO: 25676 - DNA, 30 bp, Artificial Sequence
  Synthetic oligonucleotide
tagatgcggttgggcacaagacccaacgag

SEQ ID NO: 25677 - DNA, 30 bp, Artificial Sequence
  Synthetic oligonucleotide
acgcttgctgggtcgtagacacataacgag

SEQ ID NO: 25678 - DNA, 30 bp, Artificial Sequence
  Synthetic oligonucleotide
cgttagaaaattctacgcctgactaacgag

SEQ ID NO: 25679 - DNA, 30 bp, Artificial Sequence
  Synthetic oligonucleotide
gtacaaagccaaaagagataccgacacgag

SEQ ID NO: 25680 - DNA, 30 bp, Artificial Sequence
  Synthetic oligonucleotide
gcgaatacctctcaccagtgcgctcacgag

SEQ ID NO: 25681 - DNA, 30 bp, Artificial Sequence
  Synthetic oligonucleotide
catcaaattaaacccggaccaggttacgag

SEQ ID NO: 25682 - DNA, 30 bp, Artificial Sequence
  Synthetic oligonucleotide
cgggtgtataagaagccattatgaaccgag

SEQ ID NO: 25683 - DNA, 30 bp, Artificial Sequence
  Synthetic oligonucleotide
ctaatctcaggcaaggaactgactaccgag

SEQ ID NO: 25684 - DNA, 30 bp, Artificial Sequence
  Synthetic oligonucleotide
cgacctgagttcggtaaaatcttccccgag

SEQ ID NO: 25685 - DNA, 30 bp, Artificial Sequence
  Synthetic oligonucleotide
cacaaggcgccatccgccgccagatccgag

SEQ ID NO: 25686 - DNA, 30 bp, Artificial Sequence
  Synthetic oligonucleotide
ctccaaatatcgacactaacgatatccgag

SEQ ID NO: 25687 - DNA, 30 bp, Artificial Sequence
  Synthetic oligonucleotide
agcgtggatggaaaaacttttgtttccgag

SEQ ID NO: 25688 - DNA, 30 bp, Artificial Sequence
  Synthetic oligonucleotide
tgcgtatctcccaagggagttatgagcgag

SEQ ID NO: 25689 - DNA, 30 bp, Artificial Sequence
  Synthetic oligonucleotide
gcagcggacttaggacgtgacaagcgcgag

SEQ ID NO: 25690 - DNA, 30 bp, Artificial Sequence
  Synthetic oligonucleotide
gaagtgatcggcgaaggattaaaaggcgag

SEQ ID NO: 25691 - DNA, 30 bp, Artificial Sequence
  Synthetic oligonucleotide
cctaggaagatgagtgtacgtcgatgcgag

SEQ ID NO: 25692 - DNA, 30 bp, Artificial Sequence
  Synthetic oligonucleotide
gacggcagtatggtttcgcgcaacatcgag

SEQ ID NO: 25693 - DNA, 30 bp, Artificial Sequence
  Synthetic oligonucleotide
cctgaacctggcaacataagtctactcgag

SEQ ID NO: 25694 - DNA, 30 bp, Artificial Sequence
  Synthetic oligonucleotide
cgagacagaaggggtcctaggatgctcgag

SEQ ID NO: 25695 - DNA, 30 bp, Artificial Sequence
  Synthetic oligonucleotide
cgtgatcttcaagaactacatctaaaggag

SEQ ID NO: 25696 - DNA, 30 bp, Artificial Sequence
  Synthetic oligonucleotide
atcatgaatgaaactgcctcggccaaggag

SEQ ID NO: 25697 - DNA, 30 bp, Artificial Sequence
  Synthetic oligonucleotide
agacatgctcacgttgtgcaaaggaaggag

SEQ ID NO: 25698 - DNA, 30 bp, Artificial Sequence
  Synthetic oligonucleotide
aggcggaggacagagaaaagttggaaggag

SEQ ID NO: 25699 - DNA, 30 bp, Artificial Sequence
  Synthetic oligonucleotide
acgcgatgttttaattcaacataacaggag

SEQ ID NO: 25700 - DNA, 30 bp, Artificial Sequence
  Synthetic oligonucleotide
caatacatcccgcgtgctttgcgaacggag

SEQ ID NO: 25701 - DNA, 30 bp, Artificial Sequence
  Synthetic oligonucleotide
ggcaacggttgatataagtggaggacggag

SEQ ID NO: 25702 - DNA, 30 bp, Artificial Sequence
  Synthetic oligonucleotide
attacgttgtaaccacagggaaaagcggag

SEQ ID NO: 25703 - DNA, 30 bp, Artificial Sequence
  Synthetic oligonucleotide
cgcatttggttagctgaatcagaaagggag

SEQ ID NO: 25704 - DNA, 30 bp, Artificial Sequence
  Synthetic oligonucleotide
acatatgtcaggagcaagcgagtaagggag

SEQ ID NO: 25705 - DNA, 30 bp, Artificial Sequence
  Synthetic oligonucleotide
gcaagaatacttgtgaatgctacgagggag

SEQ ID NO: 25706 - DNA, 30 bp, Artificial Sequence
  Synthetic oligonucleotide
ctagccagcatttccgagtagaaaggggag

SEQ ID NO: 25707 - DNA, 30 bp, Artificial Sequence
  Synthetic oligonucleotide
atatagaagccggcctctgagcagggggag

SEQ ID NO: 25708 - DNA, 30 bp, Artificial Sequence
  Synthetic oligonucleotide
cttgcggcgaatcgtgataccaggatggag

SEQ ID NO: 25709 - DNA, 30 bp, Artificial Sequence
  Synthetic oligonucleotide
gccggtgtcaaacaccgaaattgagtggag

SEQ ID NO: 25710 - DNA, 30 bp, Artificial Sequence
  Synthetic oligonucleotide
ttgcgacttgatcggtatcgaggcgtggag

SEQ ID NO: 25711 - DNA, 30 bp, Artificial Sequence
  Synthetic oligonucleotide
ggcataatgcattagattcgccttgtggag

SEQ ID NO: 25712 - DNA, 30 bp, Artificial Sequence
  Synthetic oligonucleotide
tcgaatagctcgacaaggcagtgattggag

SEQ ID NO: 25713 - DNA, 30 bp, Artificial Sequence
  Synthetic oligonucleotide
aagcggtgaaaaacgtataaccatttggag

SEQ ID NO: 25714 - DNA, 30 bp, Artificial Sequence
  Synthetic oligonucleotide
tcagccgtagccctaaaaaagaaaaatgag

SEQ ID NO: 25715 - DNA, 30 bp, Artificial Sequence
  Synthetic oligonucleotide
ccaaaccagggagggtattggtcgcatgag

SEQ ID NO: 25716 - DNA, 30 bp, Artificial Sequence
  Synthetic oligonucleotide
ccgttagggaccagggccattagagatgag

SEQ ID NO: 25717 - DNA, 30 bp, Artificial Sequence
  Synthetic oligonucleotide
tacccggcaagagacattgggaaggatgag

SEQ ID NO: 25718 - DNA, 30 bp, Artificial Sequence
  Synthetic oligonucleotide
gggaccccgtttgaacggctgatatatgag

SEQ ID NO: 25719 - DNA, 30 bp, Artificial Sequence
  Synthetic oligonucleotide
cgacacggatcaagaattcgatcagctgag

SEQ ID NO: 25720 - DNA, 30 bp, Artificial Sequence
  Synthetic oligonucleotide
agataataggctcagaagttaatccgtgag

SEQ ID NO: 25721 - DNA, 30 bp, Artificial Sequence
  Synthetic oligonucleotide
ttcaacaggaagtcccacagactatgtgag

SEQ ID NO: 25722 - DNA, 30 bp, Artificial Sequence
  Synthetic oligonucleotide
tcatagtgtaaatgagcggatgtgattgag

SEQ ID NO: 25723 - DNA, 30 bp, Artificial Sequence
  Synthetic oligonucleotide
ttcggtcgccctcggaaaggaagtattgag

SEQ ID NO: 25724 - DNA, 30 bp, Artificial Sequence
  Synthetic oligonucleotide
cggtagtcataatgtgcgaataaagttgag

SEQ ID NO: 25725 - DNA, 30 bp, Artificial Sequence
  Synthetic oligonucleotide
tggcgataagcggttagacccacgtttgag

SEQ ID NO: 25726 - DNA, 30 bp, Artificial Sequence
  Synthetic oligonucleotide
tcagtcggcatcaccgaacgtaagaaatag

SEQ ID NO: 25727 - DNA, 30 bp, Artificial Sequence
  Synthetic oligonucleotide
tcggaccgggaataacaacgctcgcaatag

SEQ ID NO: 25728 - DNA, 30 bp, Artificial Sequence
  Synthetic oligonucleotide
cacgacgggcgggaatcatatcctgaatag

SEQ ID NO: 25729 - DNA, 30 bp, Artificial Sequence
  Synthetic oligonucleotide
actacgagagcggtccccggtccataatag

SEQ ID NO: 25730 - DNA, 30 bp, Artificial Sequence
  Synthetic oligonucleotide
cgatgccacctcgaaaggtcctgctcatag

SEQ ID NO: 25731 - DNA, 30 bp, Artificial Sequence
  Synthetic oligonucleotide
gcggaataatcgcagagagacatgcgatag

SEQ ID NO: 25732 - DNA, 30 bp, Artificial Sequence
  Synthetic oligonucleotide
caaggatagcaccagggtgtattgcgatag

SEQ ID NO: 25733 - DNA, 30 bp, Artificial Sequence
  Synthetic oligonucleotide
tgcagaaacgagctatgaatgactcactag

SEQ ID NO: 25734 - DNA, 30 bp, Artificial Sequence
  Synthetic oligonucleotide
tcaaaaccttcccaagctacaaacagctag

SEQ ID NO: 25735 - DNA, 30 bp, Artificial Sequence
  Synthetic oligonucleotide
ggcatcacgggtccgccgtgaattagctag

SEQ ID NO: 25736 - DNA, 30 bp, Artificial Sequence
  Synthetic oligonucleotide
acgggattaagaggcgtgagtacacgctag

SEQ ID NO: 25737 - DNA, 30 bp, Artificial Sequence
  Synthetic oligonucleotide
gcacggatcgcacgtgcagaaaatatctag

SEQ ID NO: 25738 - DNA, 30 bp, Artificial Sequence
  Synthetic oligonucleotide
actaaatacgttagagaaaggtgcttctag

SEQ ID NO: 25739 - DNA, 30 bp, Artificial Sequence
  Synthetic oligonucleotide
caagatcaatgcatcattatgacgttctag

SEQ ID NO: 25740 - DNA, 30 bp, Artificial Sequence
  Synthetic oligonucleotide
atgcaggtagcgttatgggctgatgagtag

SEQ ID NO: 25741 - DNA, 30 bp, Artificial Sequence
  Synthetic oligonucleotide
ccgagggggagtaggggggatcgcacgtag

SEQ ID NO: 25742 - DNA, 30 bp, Artificial Sequence
  Synthetic oligonucleotide
gtacgtcgggttaactggagaatgtcgtag

SEQ ID NO: 25743 - DNA, 30 bp, Artificial Sequence
  Synthetic oligonucleotide
gcaacgataagattatctgccatgtcgtag

SEQ ID NO: 25744 - DNA, 30 bp, Artificial Sequence
  Synthetic oligonucleotide
gcagtcaaggcccagcggggataaaggtag

SEQ ID NO: 25745 - DNA, 30 bp, Artificial Sequence
  Synthetic oligonucleotide
cgacaaatacatcacacccaaaacaggtag

SEQ ID NO: 25746 - DNA, 30 bp, Artificial Sequence
  Synthetic oligonucleotide
ggcgcaaaggacactagatagaaaatgtag

SEQ ID NO: 25747 - DNA, 30 bp, Artificial Sequence
  Synthetic oligonucleotide
agggagggaacgaacaggctggacctgtag

SEQ ID NO: 25748 - DNA, 30 bp, Artificial Sequence
  Synthetic oligonucleotide
gaccgactgatgacagggcggggtaattag

SEQ ID NO: 25749 - DNA, 30 bp, Artificial Sequence
  Synthetic oligonucleotide
cctgagcgggttaacagaaaagaacattag

SEQ ID NO: 25750 - DNA, 30 bp, Artificial Sequence
  Synthetic oligonucleotide
agtggatacgggctcaagaaccaccattag

SEQ ID NO: 25751 - DNA, 30 bp, Artificial Sequence
  Synthetic oligonucleotide
cgggcaaaggtgtagaaataggttgattag

SEQ ID NO: 25752 - DNA, 30 bp, Artificial Sequence
  Synthetic oligonucleotide
acgtgtaccggagctgccgaggaaccttag

SEQ ID NO: 25753 - DNA, 30 bp, Artificial Sequence
  Synthetic oligonucleotide
gcttagagaacatgtaacagaacagcttag

SEQ ID NO: 25754 - DNA, 30 bp, Artificial Sequence
  Synthetic oligonucleotide
aagagatgaggtgcgtgaacgcccgcttag

SEQ ID NO: 25755 - DNA, 30 bp, Artificial Sequence
  Synthetic oligonucleotide
aaagcgtatcaaaaggggactctgcaaacg

SEQ ID NO: 25756 - DNA, 30 bp, Artificial Sequence
  Synthetic oligonucleotide
gcgaggtggagtcattgctccagggaaacg

SEQ ID NO: 25757 - DNA, 30 bp, Artificial Sequence
  Synthetic oligonucleotide
ggtccttcgcaaggactacaagatgaaacg

SEQ ID NO: 25758 - DNA, 30 bp, Artificial Sequence
  Synthetic oligonucleotide
gcgcccgacaactaggctaaccgttaaacg

SEQ ID NO: 25759 - DNA, 30 bp, Artificial Sequence
  Synthetic oligonucleotide
gcaacattacaccagttacattgaagaacg

SEQ ID NO: 25760 - DNA, 30 bp, Artificial Sequence
  Synthetic oligonucleotide
gtaaagcatacgctagattaactaggaacg

SEQ ID NO: 25761 - DNA, 30 bp, Artificial Sequence
  Synthetic oligonucleotide
aaaaacagcagtaggggaacctagctaacg

SEQ ID NO: 25762 - DNA, 30 bp, Artificial Sequence
  Synthetic oligonucleotide
gggtatgcacaaacgaacgggtatctaacg

SEQ ID NO: 25763 - DNA, 30 bp, Artificial Sequence
  Synthetic oligonucleotide
ccgaatgaatatgagtcagcggcattaacg

SEQ ID NO: 25764 - DNA, 30 bp, Artificial Sequence
  Synthetic oligonucleotide
gttgccgacgaggacaggaatgctcacacg

SEQ ID NO: 25765 - DNA, 30 bp, Artificial Sequence
  Synthetic oligonucleotide
acgtaaagatgacctacagggtctgacacg

SEQ ID NO: 25766 - DNA, 30 bp, Artificial Sequence
  Synthetic oligonucleotide
acgaatgaagggcattcttacggacccacg

SEQ ID NO: 25767 - DNA, 30 bp, Artificial Sequence
  Synthetic oligonucleotide
ccagagacccaacggtcacaggaaagcacg

SEQ ID NO: 25768 - DNA, 30 bp, Artificial Sequence
  Synthetic oligonucleotide
gtcgggatagagagggtaagattagtcacg

SEQ ID NO: 25769 - DNA, 30 bp, Artificial Sequence
  Synthetic oligonucleotide
gtatgggtcgaaggtgcgtacaacaagacg

SEQ ID NO: 25770 - DNA, 30 bp, Artificial Sequence
  Synthetic oligonucleotide
accagacggaacgcctagggagagaggacg

SEQ ID NO: 25771 - DNA, 30 bp, Artificial Sequence
  Synthetic oligonucleotide
gacgggaacaaccaggtgaccgatcggacg

SEQ ID NO: 25772 - DNA, 30 bp, Artificial Sequence
  Synthetic oligonucleotide
gtgcgtacactggcatgtaggaaggggacg

SEQ ID NO: 25773 - DNA, 30 bp, Artificial Sequence
  Synthetic oligonucleotide
gtcattgatattgcacagacaagggggacg

SEQ ID NO: 25774 - DNA, 30 bp, Artificial Sequence
  Synthetic oligonucleotide
agggcgaaccgtcggatacacgacgtgacg

SEQ ID NO: 25775 - DNA, 30 bp, Artificial Sequence
  Synthetic oligonucleotide
tgtataacgaacacctaaccggacaatacg

SEQ ID NO: 25776 - DNA, 30 bp, Artificial Sequence
  Synthetic oligonucleotide
gaaagaacgatctaaagaacgcacgatacg

SEQ ID NO: 25777 - DNA, 30 bp, Artificial Sequence
  Synthetic oligonucleotide
cgtgcgcttgtaaaaataaacaattatacg

SEQ ID NO: 25778 - DNA, 30 bp, Artificial Sequence
  Synthetic oligonucleotide
cgtgggccagcgtatcctattgcgaaaccg

SEQ ID NO: 25779 - DNA, 30 bp, Artificial Sequence
  Synthetic oligonucleotide
aagtgcatcgtgggcacctcctgagaaccg

SEQ ID NO: 25780 - DNA, 30 bp, Artificial Sequence
  Synthetic oligonucleotide
cgagggtatccgcgaaaagtatcaccaccg

SEQ ID NO: 25781 - DNA, 30 bp, Artificial Sequence
  Synthetic oligonucleotide
catgccaatcaagataaatacaaccgaccg

SEQ ID NO: 25782 - DNA, 30 bp, Artificial Sequence
  Synthetic oligonucleotide
cggaaacaagcgcagacaagtcttaccccg

SEQ ID NO: 25783 - DNA, 30 bp, Artificial Sequence
  Synthetic oligonucleotide
agacgttagagagatataacatatgagccg

SEQ ID NO: 25784 - DNA, 30 bp, Artificial Sequence
  Synthetic oligonucleotide
tgtcagggctaacagagatcgcgggcgccg

SEQ ID NO: 25785 - DNA, 30 bp, Artificial Sequence
  Synthetic oligonucleotide
acgactattggctaagccccagcttcgccg

SEQ ID NO: 25786 - DNA, 30 bp, Artificial Sequence
  Synthetic oligonucleotide
aagaacattcagtatcgtagaaagaggccg

SEQ ID NO: 25787 - DNA, 30 bp, Artificial Sequence
  Synthetic oligonucleotide
agggcaatgagtcgcgttaagcagtggccg

SEQ ID NO: 25788 - DNA, 30 bp, Artificial Sequence
  Synthetic oligonucleotide
cgtggggtcccaccgtaattgcccgctccg

SEQ ID NO: 25789 - DNA, 30 bp, Artificial Sequence
  Synthetic oligonucleotide
atatggacaggacgagaagggaatgctccg

SEQ ID NO: 25790 - DNA, 30 bp, Artificial Sequence
  Synthetic oligonucleotide
cctgtaggcaggggcagatcaatcaaagcg

SEQ ID NO: 25791 - DNA, 30 bp, Artificial Sequence
  Synthetic oligonucleotide
gtgactggtttgacgaagagagggaaagcg

SEQ ID NO: 25792 - DNA, 30 bp, Artificial Sequence
  Synthetic oligonucleotide
tgcgggaagccagaaagacattctaaagcg

SEQ ID NO: 25793 - DNA, 30 bp, Artificial Sequence
  Synthetic oligonucleotide
ggaggcgcagtgaatattttgtttaaagcg

SEQ ID NO: 25794 - DNA, 30 bp, Artificial Sequence
  Synthetic oligonucleotide
tgtcggaaagaccgagtgccggagtaagcg

SEQ ID NO: 25795 - DNA, 30 bp, Artificial Sequence
  Synthetic oligonucleotide
catacggaagacagggcttggagttaagcg

SEQ ID NO: 25796 - DNA, 30 bp, Artificial Sequence
  Synthetic oligonucleotide
ggatcaaaggagaagcccctgcgtacagcg

SEQ ID NO: 25797 - DNA, 30 bp, Artificial Sequence
  Synthetic oligonucleotide
cgctgacagcattgaacccgaaggccagcg

SEQ ID NO: 25798 - DNA, 30 bp, Artificial Sequence
  Synthetic oligonucleotide
gccagccgaacggtttgcccaagagcagcg

SEQ ID NO: 25799 - DNA, 31 bp, Artificial Sequence
  Synthetic oligonucleotide
ggatagcgaacaacagaagtccttgagagcg

SEQ ID NO: 25800 - DNA, 30 bp, Artificial Sequence
  Synthetic oligonucleotide
aaagtgaaatggggtatgtggcggcgagcg

SEQ ID NO: 25801 - DNA, 30 bp, Artificial Sequence
  Synthetic oligonucleotide
cgaccttgagagggtcgcactgtcaacgcg

SEQ ID NO: 25802 - DNA, 30 bp, Artificial Sequence
  Synthetic oligonucleotide
agctgatggtcaatggcggacggatacgcg

SEQ ID NO: 25803 - DNA, 30 bp, Artificial Sequence
  Synthetic oligonucleotide
gagagggggcaggcaagatacagttccgcg

SEQ ID NO: 25804 - DNA, 30 bp, Artificial Sequence
  Synthetic oligonucleotide
ccatcggaaatgtaaggggtagacaaggcg

SEQ ID NO: 25805 - DNA, 30 bp, Artificial Sequence
  Synthetic oligonucleotide
agttaatgatccaaaggccaccgcaaggcg

SEQ ID NO: 25806 - DNA, 30 bp, Artificial Sequence
  Synthetic oligonucleotide
gaagttatgtacgggaaggatagagaggcg

SEQ ID NO: 25807 - DNA, 30 bp, Artificial Sequence
  Synthetic oligonucleotide
tacaaagaagacataaagggcgtagcggcg

SEQ ID NO: 25808 - DNA, 30 bp, Artificial Sequence
  Synthetic oligonucleotide
cacgtaatagaagcaagttcgaagtcggcg

SEQ ID NO: 25809 - DNA, 30 bp, Artificial Sequence
  Synthetic oligonucleotide
tgaagagaccgtacctattggctgagggcg

SEQ ID NO: 25810 - DNA, 30 bp, Artificial Sequence
  Synthetic oligonucleotide
aggtacagcgggcgcgatagactaggggcg

SEQ ID NO: 25811 - DNA, 30 bp, Artificial Sequence
  Synthetic oligonucleotide
aatgagacaatgacagggtaatagaatgcg

SEQ ID NO: 25812 - DNA, 30 bp, Artificial Sequence
  Synthetic oligonucleotide
tgaacacattgactaagactcaggtctgcg

SEQ ID NO: 25813 - DNA, 30 bp, Artificial Sequence
  Synthetic oligonucleotide
agcaaacgtggcacagttacataaagtgcg

SEQ ID NO: 25814 - DNA, 30 bp, Artificial Sequence
  Synthetic oligonucleotide
cacagtatgtgagactggctagcaagtgcg

SEQ ID NO: 25815 - DNA, 30 bp, Artificial Sequence
  Synthetic oligonucleotide
gaagcatggtcaagacggatctagagtgcg

SEQ ID NO: 25816 - DNA, 30 bp, Artificial Sequence
  Synthetic oligonucleotide
gaagaaacggtaaagaatccgtgagttgcg

SEQ ID NO: 25817 - DNA, 30 bp, Artificial Sequence
  Synthetic oligonucleotide
gcttcaatacgacaatcggccaacgaatcg

SEQ ID NO: 25818 - DNA, 30 bp, Artificial Sequence
  Synthetic oligonucleotide
aaggcgtcagaacatcgtctcgattaatcg

SEQ ID NO: 25819 - DNA, 30 bp, Artificial Sequence
  Synthetic oligonucleotide
ctaacggccttataccaagaaggaacatcg

SEQ ID NO: 25820 - DNA, 30 bp, Artificial Sequence
  Synthetic oligonucleotide
ccacatgcgacattatgagtgcatgcatcg

SEQ ID NO: 25821 - DNA, 30 bp, Artificial Sequence
  Synthetic oligonucleotide
tctaccccagggtaacgggcaaaaagatcg

SEQ ID NO: 25822 - DNA, 30 bp, Artificial Sequence
  Synthetic oligonucleotide
gggcgttccgtaatttggggaccgaactcg

SEQ ID NO: 25823 - DNA, 30 bp, Artificial Sequence
  Synthetic oligonucleotide
cagatgccgatctgattaaaatgtgcctcg

SEQ ID NO: 25824 - DNA, 30 bp, Artificial Sequence
  Synthetic oligonucleotide
accaagaaaatttccagaatccagagctcg

SEQ ID NO: 25825 - DNA, 30 bp, Artificial Sequence
  Synthetic oligonucleotide
accatcagaaataggtgcgttggcatctcg

SEQ ID NO: 25826 - DNA, 30 bp, Artificial Sequence
  Synthetic oligonucleotide
gcgcgaatgaatggtcgtctcgtcaagtcg

SEQ ID NO: 25827 - DNA, 30 bp, Artificial Sequence
  Synthetic oligonucleotide
gcagaacatctggccggaataagtgagtcg

SEQ ID NO: 25828 - DNA, 30 bp, Artificial Sequence
  Synthetic oligonucleotide
agacaaggccaatggatagctcacatgtcg

SEQ ID NO: 25829 - DNA, 30 bp, Artificial Sequence
  Synthetic oligonucleotide
aggaacattgacaagcacctgttcgtgtcg

SEQ ID NO: 25830 - DNA, 30 bp, Artificial Sequence
  Synthetic oligonucleotide
ctaactccgagctaggttcatgaattgtcg

SEQ ID NO: 25831 - DNA, 30 bp, Artificial Sequence
  Synthetic oligonucleotide
tgaggagaggaccaaagttggatagcttcg

SEQ ID NO: 25832 - DNA, 30 bp, Artificial Sequence
  Synthetic oligonucleotide
acgatgccggaggactctagcaggatttcg

SEQ ID NO: 25833 - DNA, 30 bp, Artificial Sequence
  Synthetic oligonucleotide
acaagaggttaaagcgaaaaccggatttcg

SEQ ID NO: 25834 - DNA, 30 bp, Artificial Sequence
  Synthetic oligonucleotide
tgctagtgagaagttgaagaagatgtttcg

SEQ ID NO: 25835 - DNA, 30 bp, Artificial Sequence
  Synthetic oligonucleotide
ctcgtgaaatttggtgcgaatcgaaaaagg

SEQ ID NO: 25836 - DNA, 30 bp, Artificial Sequence
  Synthetic oligonucleotide
ccagcaagtcgagaacacttgtagaaaagg

SEQ ID NO: 25837 - DNA, 30 bp, Artificial Sequence
  Synthetic oligonucleotide
gggcactggacagctagcgaaacacaaagg

SEQ ID NO: 25838 - DNA, 30 bp, Artificial Sequence
  Synthetic oligonucleotide
tcgagtgagtcgagggtctccggcgaaagg

SEQ ID NO: 25839 - DNA, 30 bp, Artificial Sequence
  Synthetic oligonucleotide
acgcaaagggaccaaaacgcacatgaaagg

SEQ ID NO: 25840 - DNA, 30 bp, Artificial Sequence
  Synthetic oligonucleotide
ctggacaaataatttacaccgtatgaaagg

SEQ ID NO: 25841 - DNA, 30 bp, Artificial Sequence
  Synthetic oligonucleotide
aaacgagctatcgtaacttcctcaagaagg

SEQ ID NO: 25842 - DNA, 30 bp, Artificial Sequence
  Synthetic oligonucleotide
aaaggggtatgatctagatgagagggaagg

SEQ ID NO: 25843 - DNA, 30 bp, Artificial Sequence
  Synthetic oligonucleotide
cagtaaaagggtagtgctacggggtgaagg

SEQ ID NO: 25844 - DNA, 30 bp, Artificial Sequence
  Synthetic oligonucleotide
ccttagcggagcaaagatacccacttaagg

SEQ ID NO: 25845 - DNA, 30 bp, Artificial Sequence
  Synthetic oligonucleotide
agtacgctagaatcatatcgggggaacagg

SEQ ID NO: 25846 - DNA, 30 bp, Artificial Sequence
  Synthetic oligonucleotide
ttggcgcgtaacaaaaaaccaaggcacagg

SEQ ID NO: 25847 - DNA, 30 bp, Artificial Sequence
  Synthetic oligonucleotide
ggcacggaagagtaattattgaatcacagg

SEQ ID NO: 25848 - DNA, 30 bp, Artificial Sequence
  Synthetic oligonucleotide
taacgcgggatgatagtacaacgggacagg

SEQ ID NO: 25849 - DNA, 30 bp, Artificial Sequence
  Synthetic oligonucleotide
cgaacgttcctcaccggaaactactacagg

SEQ ID NO: 25850 - DNA, 30 bp, Artificial Sequence
  Synthetic oligonucleotide
cctgacagacagagcataggaatgtccagg

SEQ ID NO: 25851 - DNA, 30 bp, Artificial Sequence
  Synthetic oligonucleotide
accgtccatgatgactaaagtgcacagagg

SEQ ID NO: 25852 - DNA, 30 bp, Artificial Sequence
  Synthetic oligonucleotide
cgactaagctatgcgagtctggcggagagg

SEQ ID NO: 25853 - DNA, 30 bp, Artificial Sequence
  Synthetic oligonucleotide
acacacagctgcttttgaacaagaacgagg

SEQ ID NO: 25854 - DNA, 30 bp, Artificial Sequence
  Synthetic oligonucleotide
aggtagtcgcgatcttgggcaataaggagg

SEQ ID NO: 25855 - DNA, 30 bp, Artificial Sequence
  Synthetic oligonucleotide
aaatgcacaaagtgaccatagacgaggagg

SEQ ID NO: 25856 - DNA, 30 bp, Artificial Sequence
  Synthetic oligonucleotide
ctcagagagtatcagccacagaaggggagg

SEQ ID NO: 25857 - DNA, 30 bp, Artificial Sequence
  Synthetic oligonucleotide
agacaagaccgaacgaagggacaatggagg

SEQ ID NO: 25858 - DNA, 30 bp, Artificial Sequence
  Synthetic oligonucleotide
cagaggacgatagctgttgtcgtatggagg

SEQ ID NO: 25859 - DNA, 30 bp, Artificial Sequence
  Synthetic oligonucleotide
gtagttgccaagcgagaaagggattggagg

SEQ ID NO: 25860 - DNA, 30 bp, Artificial Sequence
  Synthetic oligonucleotide
aaatggcgaaacaagcctagtcagctgagg

SEQ ID NO: 25861 - DNA, 30 bp, Artificial Sequence
  Synthetic oligonucleotide
cgaaccaaatgctgaggactcatggtgagg

SEQ ID NO: 25862 - DNA, 30 bp, Artificial Sequence
  Synthetic oligonucleotide
cgaagaggttgtaggtcagagattgtgagg

SEQ ID NO: 25863 - DNA, 30 bp, Artificial Sequence
  Synthetic oligonucleotide
ggagaagaagaggtcgcttcgccgcatagg

SEQ ID NO: 25864 - DNA, 30 bp, Artificial Sequence
  Synthetic oligonucleotide
ggcgggcgcgatagtctgacaatagatagg

SEQ ID NO: 25865 - DNA, 30 bp, Artificial Sequence
  Synthetic oligonucleotide
gtcgtcgaaacacatcttggagagggtagg

SEQ ID NO: 25866 - DNA, 30 bp, Artificial Sequence
  Synthetic oligonucleotide
tacggtaccatgttacagcgaaccattagg

SEQ ID NO: 25867 - DNA, 30 bp, Artificial Sequence
  Synthetic oligonucleotide
gggaaaccagtcagctctagtataacacgg

SEQ ID NO: 25868 - DNA, 30 bp, Artificial Sequence
  Synthetic oligonucleotide
cctggaacaataacatcatgaacctcacgg

SEQ ID NO: 25869 - DNA, 30 bp, Artificial Sequence
  Synthetic oligonucleotide
atgggatgagctaacgggattgcgctacgg

SEQ ID NO: 25870 - DNA, 30 bp, Artificial Sequence
  Synthetic oligonucleotide
ttagggacagggaaccagatcagtctacgg

SEQ ID NO: 25871 - DNA, 30 bp, Artificial Sequence
  Synthetic oligonucleotide
caaacgaagcacagtcgccgcattaaccgg

SEQ ID NO: 25872 - DNA, 30 bp, Artificial Sequence
  Synthetic oligonucleotide
taaaaaataacgattcagccgtaatgccgg

SEQ ID NO: 25873 - DNA, 30 bp, Artificial Sequence
  Synthetic oligonucleotide
aaatgcaacacatacccgagaaacttccgg

SEQ ID NO: 25874 - DNA, 30 bp, Artificial Sequence
  Synthetic oligonucleotide
gccgacaagtagtgtggtaggtaagagcgg

SEQ ID NO: 25875 - DNA, 30 bp, Artificial Sequence
  Synthetic oligonucleotide
agagcaaacgagcattcaaagtaatcgcgg

SEQ ID NO: 25876 - DNA, 30 bp, Artificial Sequence
  Synthetic oligonucleotide
agatgggcagttctagtcacaagttcgcgg

SEQ ID NO: 25877 - DNA, 30 bp, Artificial Sequence
  Synthetic oligonucleotide
gctgtctcaacgagaagagagatactgcgg

SEQ ID NO: 25878 - DNA, 30 bp, Artificial Sequence
  Synthetic oligonucleotide
aggtagattatgaagtgaaacaaggtgcgg

SEQ ID NO: 25879 - DNA, 31 bp, Artificial Sequence
  Synthetic oligonucleotide
cgtccgtcccaaacatcatcttcggaatcgg

SEQ ID NO: 25880 - DNA, 30 bp, Artificial Sequence
  Synthetic oligonucleotide
aaacaaagagattccggaggtcaagatcgg

SEQ ID NO: 25881 - DNA, 30 bp, Artificial Sequence
  Synthetic oligonucleotide
cacacagtagggagaagatcccgaagtcgg

SEQ ID NO: 25882 - DNA, 30 bp, Artificial Sequence
  Synthetic oligonucleotide
caggttgaattctatctcggaaccaaaggg

SEQ ID NO: 25883 - DNA, 30 bp, Artificial Sequence
  Synthetic oligonucleotide
cgagacatcacgcgcgactatcttaaaggg

SEQ ID NO: 25884 - DNA, 30 bp, Artificial Sequence
  Synthetic oligonucleotide
cagcaataatataccgtaggaaaccaaggg

SEQ ID NO: 25885 - DNA, 30 bp, Artificial Sequence
  Synthetic oligonucleotide
acatgtaatgtgtcacgccggaatcaaggg

SEQ ID NO: 25886 - DNA, 30 bp, Artificial Sequence
  Synthetic oligonucleotide
acctgcaaggaaaacggaggggctcaaggg

SEQ ID NO: 25887 - DNA, 30 bp, Artificial Sequence
  Synthetic oligonucleotide
ccagctaggggcgatgactatcgggaaggg

SEQ ID NO: 25888 - DNA, 30 bp, Artificial Sequence
  Synthetic oligonucleotide
tgagtgcaagacggtcgcagatgggcaggg

SEQ ID NO: 25889 - DNA, 30 bp, Artificial Sequence
  Synthetic oligonucleotide
gtgaacgcgttacattctagcggatcaggg

SEQ ID NO: 25890 - DNA, 30 bp, Artificial Sequence
  Synthetic oligonucleotide
aagaataaggaggtgccctccatatcaggg

SEQ ID NO: 25891 - DNA, 30 bp, Artificial Sequence
  Synthetic oligonucleotide
agggtctcgtgatggcaagcaagctcaggg

SEQ ID NO: 25892 - DNA, 30 bp, Artificial Sequence
  Synthetic oligonucleotide
cagaatgtaagaaactagacgaggtcaggg

SEQ ID NO: 25893 - DNA, 30 bp, Artificial Sequence
  Synthetic oligonucleotide
agcaaattggcatatcgagaccggtcaggg

SEQ ID NO: 25894 - DNA, 30 bp, Artificial Sequence
  Synthetic oligonucleotide
ttccggcgatcgaggtaatcaatgtcaggg

SEQ ID NO: 25895 - DNA, 30 bp, Artificial Sequence
  Synthetic oligonucleotide
ctgagcggtacacatgaggacataagaggg

SEQ ID NO: 25896 - DNA, 30 bp, Artificial Sequence
  Synthetic oligonucleotide
ctaggagtcaagcgggcactgtacagaggg

SEQ ID NO: 25897 - DNA, 30 bp, Artificial Sequence
  Synthetic oligonucleotide
catcgcgcagactaggccactaagagaggg

SEQ ID NO: 25898 - DNA, 30 bp, Artificial Sequence
  Synthetic oligonucleotide
acagcgtgggaggctatcgacgtgagaggg

SEQ ID NO: 25899 - DNA, 30 bp, Artificial Sequence
  Synthetic oligonucleotide
gcgtgactcaaaagggaccgagctagaggg

SEQ ID NO: 25900 - DNA, 30 bp, Artificial Sequence
  Synthetic oligonucleotide
cgagggtgaagaatcaatgtgaatggaggg

SEQ ID NO: 25901 - DNA, 30 bp, Artificial Sequence
  Synthetic oligonucleotide
aggcatcataaagagctaggggatggaggg

SEQ ID NO: 25902 - DNA, 30 bp, Artificial Sequence
  Synthetic oligonucleotide
cgggaacattggaattttgtaacgtgaggg

SEQ ID NO: 25903 - DNA, 30 bp, Artificial Sequence
  Synthetic oligonucleotide
cgatgttgccgcgtggttacgaatataggg

SEQ ID NO: 25904 - DNA, 30 bp, Artificial Sequence
  Synthetic oligonucleotide
ggcgatgaaactcaacacgtagagttcggg

SEQ ID NO: 25905 - DNA, 30 bp, Artificial Sequence
  Synthetic oligonucleotide
cgggacaagattgttaaaataatgttcggg

SEQ ID NO: 25906 - DNA, 30 bp, Artificial Sequence
  Synthetic oligonucleotide
gaccggagtcagactcaaaccgatcagggg

SEQ ID NO: 25907 - DNA, 30 bp, Artificial Sequence
  Synthetic oligonucleotide
acgtttaagaatgaaacgacaccggagggg

SEQ ID NO: 25908 - DNA, 30 bp, Artificial Sequence
  Synthetic oligonucleotide
ccggaatgatagcaatgtacagatgagggg

SEQ ID NO: 25909 - DNA, 30 bp, Artificial Sequence
  Synthetic oligonucleotide
gaatgcgaaattgaagttaaacgatagggg

SEQ ID NO: 25910 - DNA, 30 bp, Artificial Sequence
  Synthetic oligonucleotide
cgtcctaagttccaatcccaagggtagggg

SEQ ID NO: 25911 - DNA, 30 bp, Artificial Sequence
  Synthetic oligonucleotide
cgttaatacgctagtaggaggccatcgggg

SEQ ID NO: 25912 - DNA, 30 bp, Artificial Sequence
  Synthetic oligonucleotide
ccacgccaggcagagctatgcataaggggg

SEQ ID NO: 25913 - DNA, 30 bp, Artificial Sequence
  Synthetic oligonucleotide
cgccaggcgtaagtgcgttagagatggggg

SEQ ID NO: 25914 - DNA, 30 bp, Artificial Sequence
  Synthetic oligonucleotide
ggtaccagggttagtatagagtgaatgggg

SEQ ID NO: 25915 - DNA, 30 bp, Artificial Sequence
  Synthetic oligonucleotide
gagcagattctcctcaagaaaagcatgggg

SEQ ID NO: 25916 - DNA, 30 bp, Artificial Sequence
  Synthetic oligonucleotide
cggagcaacgataaacaactaaatctgggg

SEQ ID NO: 25917 - DNA, 30 bp, Artificial Sequence
  Synthetic oligonucleotide
agtatcggagggcacgtactgtatgtgggg

SEQ ID NO: 25918 - DNA, 40 bp, Artificial Sequence
  Synthetic oligonucleotide
aaaagcgaggacgcaagggtgtgaaatatagagccatggg

SEQ ID NO: 25919 - DNA, 30 bp, Artificial Sequence
  Synthetic oligonucleotide
agaaagtcacaattgcaaataacagctggg

SEQ ID NO: 25920 - DNA, 30 bp, Artificial Sequence
  Synthetic oligonucleotide
aagggaagtccaaatccgcgcgtggctggg

SEQ ID NO: 25921 - DNA, 30 bp, Artificial Sequence
  Synthetic oligonucleotide
cgtgagtcgtaatgcatcattatcattggg

SEQ ID NO: 25922 - DNA, 30 bp, Artificial Sequence
  Synthetic oligonucleotide
acgtggtgacctggacgaagctagtttggg

SEQ ID NO: 25923 - DNA, 30 bp, Artificial Sequence
  Synthetic oligonucleotide
ccagtcgggaactgtgtcggacaaaaatgg

SEQ ID NO: 25924 - DNA, 30 bp, Artificial Sequence
  Synthetic oligonucleotide
caccaatacgaccgacgatctggaaaatgg

SEQ ID NO: 25925 - DNA, 30 bp, Artificial Sequence
  Synthetic oligonucleotide
cgcaacagctctaacagaagtaggaaatgg

SEQ ID NO: 25926 - DNA, 30 bp, Artificial Sequence
  Synthetic oligonucleotide
tggaaccaggaagttatattgctacaatgg

SEQ ID NO: 25927 - DNA, 30 bp, Artificial Sequence
  Synthetic oligonucleotide
cgttatgcatccagtgctcggaaagaatgg

SEQ ID NO: 25928 - DNA, 30 bp, Artificial Sequence
  Synthetic oligonucleotide
atggcgaactgatactccgaccggccatgg

SEQ ID NO: 25929 - DNA, 30 bp, Artificial Sequence
  Synthetic oligonucleotide
tgcgacgtatcgaagctggcagtgccatgg

SEQ ID NO: 25930 - DNA, 30 bp, Artificial Sequence
  Synthetic oligonucleotide
ggatggcgaaaggctttgaaaaaaggatgg

SEQ ID NO: 25931 - DNA, 30 bp, Artificial Sequence
  Synthetic oligonucleotide
atgaccagtcgatagataattcgaggatgg

SEQ ID NO: 25932 - DNA, 30 bp, Artificial Sequence
  Synthetic oligonucleotide
aggccatgaaccgaattacgcttatgatgg

SEQ ID NO: 25933 - DNA, 30 bp, Artificial Sequence
  Synthetic oligonucleotide
aggcaattccgtctacactctgcaaactgg

SEQ ID NO: 25934 - DNA, 31 bp, Artificial Sequence
  Synthetic oligonucleotide
tacatcgaagctgtgaaatgataatcgctgg

SEQ ID NO: 25935 - DNA, 30 bp, Artificial Sequence
  Synthetic oligonucleotide
ccgtgggacaatagtcatccatgaggctgg

SEQ ID NO: 25936 - DNA, 30 bp, Artificial Sequence
  Synthetic oligonucleotide
agtagacggggaagattgttggggatctgg

SEQ ID NO: 25937 - DNA, 30 bp, Artificial Sequence
  Synthetic oligonucleotide
ggaacactgaggacattccaacacacgtgg

SEQ ID NO: 25938 - DNA, 30 bp, Artificial Sequence
  Synthetic oligonucleotide
gtcagtaaggcagtgaaaaggatcgcgtgg

SEQ ID NO: 25939 - DNA, 30 bp, Artificial Sequence
  Synthetic oligonucleotide
acggtaccgtaagtctgaataacctggtgg

SEQ ID NO: 25940 - DNA, 30 bp, Artificial Sequence
  Synthetic oligonucleotide
atgcggtaagtcctcgcacgaaggatgtgg

SEQ ID NO: 25941 - DNA, 30 bp, Artificial Sequence
  Synthetic oligonucleotide
tggtctagatccgcaaggtagaatgtgtgg

SEQ ID NO: 25942 - DNA, 30 bp, Artificial Sequence
  Synthetic oligonucleotide
cgatcactcatgttaacaatcgcaaattgg

SEQ ID NO: 25943 - DNA, 30 bp, Artificial Sequence
  Synthetic oligonucleotide
caatcggaggatggctcgctaatgaattgg

SEQ ID NO: 25944 - DNA, 30 bp, Artificial Sequence
  Synthetic oligonucleotide
aaatgaagccggtgagaaagaaggtattgg

SEQ ID NO: 25945 - DNA, 30 bp, Artificial Sequence
  Synthetic oligonucleotide
cacgatgaatctgatgagcgatggcgttgg

SEQ ID NO: 25946 - DNA, 30 bp, Artificial Sequence
  Synthetic oligonucleotide
gtgcagagacaaagagccaaaaatggttgg

SEQ ID NO: 25947 - DNA, 30 bp, Artificial Sequence
  Synthetic oligonucleotide
agcgccgaatattggggaaaccgggtttgg

SEQ ID NO: 25948 - DNA, 30 bp, Artificial Sequence
  Synthetic oligonucleotide
caccgaatatcgggattgcccgtcgaaatg

SEQ ID NO: 25949 - DNA, 30 bp, Artificial Sequence
  Synthetic oligonucleotide
tcgaggtgcaactgacatagcagataaatg

SEQ ID NO: 25950 - DNA, 30 bp, Artificial Sequence
  Synthetic oligonucleotide
cttggtctacaagctgaatggtaaacaatg

SEQ ID NO: 25951 - DNA, 30 bp, Artificial Sequence
  Synthetic oligonucleotide
tgacgggcaaaagcatatgaatgcacaatg

SEQ ID NO: 25952 - DNA, 30 bp, Artificial Sequence
  Synthetic oligonucleotide
ccctaaaccggattcaatacggatacaatg

SEQ ID NO: 25953 - DNA, 30 bp, Artificial Sequence
  Synthetic oligonucleotide
taggagttggcgatccgtcatggtagaatg

SEQ ID NO: 25954 - DNA, 30 bp, Artificial Sequence
  Synthetic oligonucleotide
cgttgcggataaggtcaagctaacggaatg

SEQ ID NO: 25955 - DNA, 30 bp, Artificial Sequence
  Synthetic oligonucleotide
aatacagcggcggatgatgagaggataatg

SEQ ID NO: 25956 - DNA, 30 bp, Artificial Sequence
  Synthetic oligonucleotide
actgcagccgtggacagaagtagaaacatg

SEQ ID NO: 25957 - DNA, 30 bp, Artificial Sequence
  Synthetic oligonucleotide
cctccagagggccaacccgatgggaacatg

SEQ ID NO: 25958 - DNA, 30 bp, Artificial Sequence
  Synthetic oligonucleotide
ggcgacacattgccactgaatcagtacatg

SEQ ID NO: 25959 - DNA, 30 bp, Artificial Sequence
  Synthetic oligonucleotide
gacatgagaagagagataaaagttaccatg

SEQ ID NO: 25960 - DNA, 30 bp, Artificial Sequence
  Synthetic oligonucleotide
tacagacgtggaaagtggaatacgagcatg

SEQ ID NO: 25961 - DNA, 30 bp, Artificial Sequence
  Synthetic oligonucleotide
tacggggcaacaaacgttttcacaaagatg

SEQ ID NO: 25962 - DNA, 30 bp, Artificial Sequence
  Synthetic oligonucleotide
gtccgaagtacatgggtacgatataagatg

SEQ ID NO: 25963 - DNA, 30 bp, Artificial Sequence
  Synthetic oligonucleotide
acgccgtagggggccttaatgtaagagatg

SEQ ID NO: 25964 - DNA, 30 bp, Artificial Sequence
  Synthetic oligonucleotide
gccgcaagccaacgggattcgggggagatg

SEQ ID NO: 25965 - DNA, 30 bp, Artificial Sequence
  Synthetic oligonucleotide
tacagactcacacgtcccagagattagatg

SEQ ID NO: 25966 - DNA, 30 bp, Artificial Sequence
  Synthetic oligonucleotide
ctgcggactagttgtggagaaagtgcgatg

SEQ ID NO: 25967 - DNA, 30 bp, Artificial Sequence
  Synthetic oligonucleotide
gtgcataagccgttcagtacgaaggggatg

SEQ ID NO: 25968 - DNA, 30 bp, Artificial Sequence
  Synthetic oligonucleotide
attggagtcaggagatgatgagagtggatg

SEQ ID NO: 25969 - DNA, 30 bp, Artificial Sequence
  Synthetic oligonucleotide
ataggcagggccgaaaaggtaaaggtgatg

SEQ ID NO: 25970 - DNA, 30 bp, Artificial Sequence
  Synthetic oligonucleotide
tgcatcagcccaaagggtagtacgtatatg

SEQ ID NO: 25971 - DNA, 30 bp, Artificial Sequence
  Synthetic oligonucleotide
cagggcaactgagcctagtcgagttatatg

SEQ ID NO: 25972 - DNA, 30 bp, Artificial Sequence
  Synthetic oligonucleotide
cgttcaaaggtctagaaagttaaatctatg

SEQ ID NO: 25973 - DNA, 30 bp, Artificial Sequence
  Synthetic oligonucleotide
ggtaaactgtctcgaaaaaagaacagtatg

SEQ ID NO: 25974 - DNA, 30 bp, Artificial Sequence
  Synthetic oligonucleotide
gggaaagaagcacagtacgtcgacagtatg

SEQ ID NO: 25975 - DNA, 30 bp, Artificial Sequence
  Synthetic oligonucleotide
agattagcggacgagtcgtgcaggattatg

SEQ ID NO: 25976 - DNA, 30 bp, Artificial Sequence
  Synthetic oligonucleotide
ccacaagtaagacgggttaaagagcttatg

SEQ ID NO: 25977 - DNA, 29 bp, Artificial Sequence
  Synthetic oligonucleotide
ataagtaagtgagcaaggaagccaaactg

SEQ ID NO: 25978 - DNA, 30 bp, Artificial Sequence
  Synthetic oligonucleotide
cgatacgagctgggtccttctaagaaactg

SEQ ID NO: 25979 - DNA, 30 bp, Artificial Sequence
  Synthetic oligonucleotide
cagaaatggtggcatgcctagctctaactg

SEQ ID NO: 25980 - DNA, 30 bp, Artificial Sequence
  Synthetic oligonucleotide
actgggagaaccacgttgagggtgccactg

SEQ ID NO: 25981 - DNA, 30 bp, Artificial Sequence
  Synthetic oligonucleotide
tccagaaggacagatccccggttatcactg

SEQ ID NO: 25982 - DNA, 30 bp, Artificial Sequence
  Synthetic oligonucleotide
acgcgtagaacacacatttggtatcgactg

SEQ ID NO: 25983 - DNA, 30 bp, Artificial Sequence
  Synthetic oligonucleotide
aggggcgtcagcgaccttcatggtggactg

SEQ ID NO: 25984 - DNA, 30 bp, Artificial Sequence
  Synthetic oligonucleotide
cgtaacggcatatgccgaaatgttctactg

SEQ ID NO: 25985 - DNA, 30 bp, Artificial Sequence
  Synthetic oligonucleotide
cgaacggagtgtgtcaggtttgaggtactg

SEQ ID NO: 25986 - DNA, 30 bp, Artificial Sequence
  Synthetic oligonucleotide
agaatgaaaatgaatgaaacacatttactg

SEQ ID NO: 25987 - DNA, 30 bp, Artificial Sequence
  Synthetic oligonucleotide
gggaatccacgaatcgggtgaactttactg

SEQ ID NO: 25988 - DNA, 30 bp, Artificial Sequence
  Synthetic oligonucleotide
gtcgcaagaccatgaccaatctgaaacctg

SEQ ID NO: 25989 - DNA, 30 bp, Artificial Sequence
  Synthetic oligonucleotide
ggggaaggctttcgatgcgttataaacctg

SEQ ID NO: 25990 - DNA, 30 bp, Artificial Sequence
  Synthetic oligonucleotide
cggggtagggcttaagtgaagcttaacctg

SEQ ID NO: 25991 - DNA, 30 bp, Artificial Sequence
  Synthetic oligonucleotide
caaaagccaaatacggtagtagaactcctg

SEQ ID NO: 25992 - DNA, 30 bp, Artificial Sequence
  Synthetic oligonucleotide
taagacgataacctcaactacgctttcctg

SEQ ID NO: 25993 - DNA, 30 bp, Artificial Sequence
  Synthetic oligonucleotide
acgcgcagggtaaatgctccaggccagctg

SEQ ID NO: 25994 - DNA, 30 bp, Artificial Sequence
  Synthetic oligonucleotide
tggaactgagaatgattaggtgaatagctg

SEQ ID NO: 25995 - DNA, 30 bp, Artificial Sequence
  Synthetic oligonucleotide
taggcggtgtgctaggagtggagatagctg

SEQ ID NO: 25996 - DNA, 30 bp, Artificial Sequence
  Synthetic oligonucleotide
ttacgatcgggaatagtgcgcaattagctg

SEQ ID NO: 25997 - DNA, 30 bp, Artificial Sequence
  Synthetic oligonucleotide
acgagaccaataggctaagggtaaacgctg

SEQ ID NO: 25998 - DNA, 30 bp, Artificial Sequence
  Synthetic oligonucleotide
ctggaaagcctatcaggccaagtagcgctg

SEQ ID NO: 25999 - DNA, 30 bp, Artificial Sequence
  Synthetic oligonucleotide
gaccttaaaagaaggcactgaccagggctg

SEQ ID NO: 26000 - DNA, 30 bp, Artificial Sequence
  Synthetic oligonucleotide
cgcaaggggatttcgaatgtgtgagggctg

SEQ ID NO: 26001 - DNA, 30 bp, Artificial Sequence
  Synthetic oligonucleotide
tgaaacaaagataaccaaaggagtcctctg

SEQ ID NO: 26002 - DNA, 30 bp, Artificial Sequence
  Synthetic oligonucleotide
cgcacgaatggcacgggcctaagtaaagtg

SEQ ID NO: 26003 - DNA, 30 bp, Artificial Sequence
  Synthetic oligonucleotide
tgccaaacatcatcagctggtatccaagtg

SEQ ID NO: 26004 - DNA, 30 bp, Artificial Sequence
  Synthetic oligonucleotide
tccgtaaatggggtgctaaacatagaagtg

SEQ ID NO: 26005 - DNA, 30 bp, Artificial Sequence
  Synthetic oligonucleotide
gctcatcgagacgatagggaccgcgaagtg

SEQ ID NO: 26006 - DNA, 30 bp, Artificial Sequence
  Synthetic oligonucleotide
acagataagtcggcccggctattatcagtg

SEQ ID NO: 26007 - DNA, 30 bp, Artificial Sequence
  Synthetic oligonucleotide
agagtgccataatgtagctcctaaagagtg

SEQ ID NO: 26008 - DNA, 30 bp, Artificial Sequence
  Synthetic oligonucleotide
gaccacaggttcacgtaacaatgccgagtg

SEQ ID NO: 26009 - DNA, 30 bp, Artificial Sequence
  Synthetic oligonucleotide
tgcaagccattacacattgtgggtcgagtg

SEQ ID NO: 26010 - DNA, 30 bp, Artificial Sequence
  Synthetic oligonucleotide
gcggatgaagtaactgatgttcaaggagtg

SEQ ID NO: 26011 - DNA, 30 bp, Artificial Sequence
  Synthetic oligonucleotide
gtagagagccctcaaaaacaaccaggagtg

SEQ ID NO: 26012 - DNA, 30 bp, Artificial Sequence
  Synthetic oligonucleotide
tcgcgaatacgaatagagcactgatgagtg

SEQ ID NO: 26013 - DNA, 30 bp, Artificial Sequence
  Synthetic oligonucleotide
ggcagtagggaaaactgtccatgtatagtg

SEQ ID NO: 26014 - DNA, 30 bp, Artificial Sequence
  Synthetic oligonucleotide
gaagcaaaacgacacgagtcgccggtagtg

SEQ ID NO: 26015 - DNA, 30 bp, Artificial Sequence
  Synthetic oligonucleotide
tcactgaaaaccgattaggtggcggacgtg

SEQ ID NO: 26016 - DNA, 30 bp, Artificial Sequence
  Synthetic oligonucleotide
ggcagacgaactatggccataattcccgtg

SEQ ID NO: 26017 - DNA, 30 bp, Artificial Sequence
  Synthetic oligonucleotide
ccgacgtaataatgaacggagtgtggcgtg

SEQ ID NO: 26018 - DNA, 30 bp, Artificial Sequence
  Synthetic oligonucleotide
gccgtgctaaaagaggattgtgagaaggtg

SEQ ID NO: 26019 - DNA, 30 bp, Artificial Sequence
  Synthetic oligonucleotide
agaatcccgagtcggagtcgagtgcaggtg

SEQ ID NO: 26020 - DNA, 30 bp, Artificial Sequence
  Synthetic oligonucleotide
gcgacggtagatgagcaaatggatcaggtg

SEQ ID NO: 26021 - DNA, 30 bp, Artificial Sequence
  Synthetic oligonucleotide
agcaaagtgatgggacgtgattaaccggtg

SEQ ID NO: 26022 - DNA, 30 bp, Artificial Sequence
  Synthetic oligonucleotide
gggataagtattctcgactcgaaagcggtg

SEQ ID NO: 26023 - DNA, 30 bp, Artificial Sequence
  Synthetic oligonucleotide
atgcaaagtggacgcgatctgtaagcggtg

SEQ ID NO: 26024 - DNA, 30 bp, Artificial Sequence
  Synthetic oligonucleotide
tacgtgtaagcatcaagctcacatagggtg

SEQ ID NO: 26025 - DNA, 30 bp, Artificial Sequence
  Synthetic oligonucleotide
acaattagagcaaacgaataatgtggggtg

SEQ ID NO: 26026 - DNA, 30 bp, Artificial Sequence
  Synthetic oligonucleotide
ggtcgacgggtgtatccacaacacaatgtg

SEQ ID NO: 26027 - DNA, 30 bp, Artificial Sequence
  Synthetic oligonucleotide
ttacaaggtcggagagcaggggtacatgtg

SEQ ID NO: 26028 - DNA, 30 bp, Artificial Sequence
  Synthetic oligonucleotide
cctaaacagagaagtgtgggctatactgtg

SEQ ID NO: 26029 - DNA, 30 bp, Artificial Sequence
  Synthetic oligonucleotide
tcagggggatgccggtcggatgaccctgtg

SEQ ID NO: 26030 - DNA, 30 bp, Artificial Sequence
  Synthetic oligonucleotide
tgtggtgcgatgtatcttagacaaagtgtg

SEQ ID NO: 26031 - DNA, 30 bp, Artificial Sequence
  Synthetic oligonucleotide
ctaacgaaacaagtactcatggatagtgtg

SEQ ID NO: 26032 - DNA, 30 bp, Artificial Sequence
  Synthetic oligonucleotide
aggtgggtacggatgttgatagtgattgtg

SEQ ID NO: 26033 - DNA, 30 bp, Artificial Sequence
  Synthetic oligonucleotide
ttcgagtaagcctcggggcagggacaattg

SEQ ID NO: 26034 - DNA, 30 bp, Artificial Sequence
  Synthetic oligonucleotide
caacagccgtgaagcggatcggcagaattg

SEQ ID NO: 26035 - DNA, 30 bp, Artificial Sequence
  Synthetic oligonucleotide
cgtgacattccgtccgagtcaacatcattg

SEQ ID NO: 26036 - DNA, 30 bp, Artificial Sequence
  Synthetic oligonucleotide
aagggaaaacttccctcaacgatacgattg

SEQ ID NO: 26037 - DNA, 30 bp, Artificial Sequence
  Synthetic oligonucleotide
cagcgagctgacgggactatgtggcgattg

SEQ ID NO: 26038 - DNA, 30 bp, Artificial Sequence
  Synthetic oligonucleotide
cgataaaggggaagatttcatgatggattg

SEQ ID NO: 26039 - DNA, 30 bp, Artificial Sequence
  Synthetic oligonucleotide
cgattcgagatagagtgtgggccactattg

SEQ ID NO: 26040 - DNA, 30 bp, Artificial Sequence
  Synthetic oligonucleotide
tagataacatcacgtaaaggaagagtattg

SEQ ID NO: 26041 - DNA, 30 bp, Artificial Sequence
  Synthetic oligonucleotide
tggtggcaggaggagatacggtagaacttg

SEQ ID NO: 26042 - DNA, 30 bp, Artificial Sequence
  Synthetic oligonucleotide
acgtaataaacggcaagatttcgaaccttg

SEQ ID NO: 26043 - DNA, 30 bp, Artificial Sequence
  Synthetic oligonucleotide
gcgtgcgcttaataccgaaaacatcgcttg

SEQ ID NO: 26044 - DNA, 30 bp, Artificial Sequence
  Synthetic oligonucleotide
gatcgacatactaaacggggttagctcttg

SEQ ID NO: 26045 - DNA, 30 bp, Artificial Sequence
  Synthetic oligonucleotide
tactatgaaagtgtcgaaagattgcggttg

SEQ ID NO: 26046 - DNA, 30 bp, Artificial Sequence
  Synthetic oligonucleotide
accgagatgcgcttaagggaggtgatgttg

SEQ ID NO: 26047 - DNA, 30 bp, Artificial Sequence
  Synthetic oligonucleotide
accgccgattgtaaagaaacatgtgtgttg

SEQ ID NO: 26048 - DNA, 30 bp, Artificial Sequence
  Synthetic oligonucleotide
ctgcagccgggagtcgaagtgggagatttg

SEQ ID NO: 26049 - DNA, 30 bp, Artificial Sequence
  Synthetic oligonucleotide
aaaggcaggagaatacagtttaaggctttg

SEQ ID NO: 26050 - DNA, 30 bp, Artificial Sequence
  Synthetic oligonucleotide
tgggcaacaggctatctaaatgtacgtttg

SEQ ID NO: 26051 - DNA, 30 bp, Artificial Sequence
  Synthetic oligonucleotide
agcgcacagggatcaatgtgtatcgttttg

SEQ ID NO: 26052 - DNA, 30 bp, Artificial Sequence
  Synthetic oligonucleotide
cgacatgactctgacacatctcgcgcaaat

SEQ ID NO: 26053 - DNA, 30 bp, Artificial Sequence
  Synthetic oligonucleotide
ggcggcaggatgcaaaaaaaggagttaaat

SEQ ID NO: 26054 - DNA, 30 bp, Artificial Sequence
  Synthetic oligonucleotide
gcgaccgaatgtctaatgtgcgccaacaat

SEQ ID NO: 26055 - DNA, 30 bp, Artificial Sequence
  Synthetic oligonucleotide
tgagttcacccgaatacagaagatgccaat

SEQ ID NO: 26056 - DNA, 30 bp, Artificial Sequence
  Synthetic oligonucleotide
tcccggcaccacaagaacgataaaagcaat

SEQ ID NO: 26057 - DNA, 30 bp, Artificial Sequence
  Synthetic oligonucleotide
aggatagagagttctaaggcataatgcaat

SEQ ID NO: 26058 - DNA, 30 bp, Artificial Sequence
  Synthetic oligonucleotide
gcacgacgttgataagtgagaaagttcaat

SEQ ID NO: 26059 - DNA, 30 bp, Artificial Sequence
  Synthetic oligonucleotide
cgcgagagacccggagtcaaaagagagaat

SEQ ID NO: 26060 - DNA, 30 bp, Artificial Sequence
  Synthetic oligonucleotide
agaacaatcaggcctgcatgcgaaacgaat

SEQ ID NO: 26061 - DNA, 30 bp, Artificial Sequence
  Synthetic oligonucleotide
cacttaagagagacttcccgtatgccgaat

SEQ ID NO: 26062 - DNA, 30 bp, Artificial Sequence
  Synthetic oligonucleotide
ccgtaagagaacatagctgtcactccgaat

SEQ ID NO: 26063 - DNA, 30 bp, Artificial Sequence
  Synthetic oligonucleotide
gacgggcaccgaaaaaagaaactagggaat

SEQ ID NO: 26064 - DNA, 30 bp, Artificial Sequence
  Synthetic oligonucleotide
gcacgaaatctaagaattgaacggtggaat

SEQ ID NO: 26065 - DNA, 30 bp, Artificial Sequence
  Synthetic oligonucleotide
ccaaactcgaaagaatcaaccctcgtgaat

SEQ ID NO: 26066 - DNA, 30 bp, Artificial Sequence
  Synthetic oligonucleotide
acgcggaggtggggcgtacagctctctaat

SEQ ID NO: 26067 - DNA, 30 bp, Artificial Sequence
  Synthetic oligonucleotide
acgaagaggagtatacattacacacgtaat

SEQ ID NO: 26068 - DNA, 30 bp, Artificial Sequence
  Synthetic oligonucleotide
gagctgcggaaaagggcacatagcggtaat

SEQ ID NO: 26069 - DNA, 30 bp, Artificial Sequence
  Synthetic oligonucleotide
tagtcaggagggcaacggcaccgatgtaat

SEQ ID NO: 26070 - DNA, 30 bp, Artificial Sequence
  Synthetic oligonucleotide
cgccagggagcacgtacaatgttgattaat

SEQ ID NO: 26071 - DNA, 30 bp, Artificial Sequence
  Synthetic oligonucleotide
taaccaggacagactgagggcgaagttaat

SEQ ID NO: 26072 - DNA, 30 bp, Artificial Sequence
  Synthetic oligonucleotide
ccgaggatgagattgttgtaatgagaacat

SEQ ID NO: 26073 - DNA, 30 bp, Artificial Sequence
  Synthetic oligonucleotide
gcatcgggagcgtccagtagggaacgacat

SEQ ID NO: 26074 - DNA, 30 bp, Artificial Sequence
  Synthetic oligonucleotide
cgccagatcaatcacgaatgctggtgacat

SEQ ID NO: 26075 - DNA, 30 bp, Artificial Sequence
  Synthetic oligonucleotide
gcggaagtaggtctctgcgggctagcccat

SEQ ID NO: 26076 - DNA, 30 bp, Artificial Sequence
  Synthetic oligonucleotide
gtgtaaaggtacgaaaagagcttggtccat

SEQ ID NO: 26077 - DNA, 30 bp, Artificial Sequence
  Synthetic oligonucleotide
cgaacccaagtcgtaatacattaacagcat

SEQ ID NO: 26078 - DNA, 30 bp, Artificial Sequence
  Synthetic oligonucleotide
gggggcgccagtgaagattcatcagagcat

SEQ ID NO: 26079 - DNA, 30 bp, Artificial Sequence
  Synthetic oligonucleotide
ggggagtaagtgttgtctggaaccgagcat

SEQ ID NO: 26080 - DNA, 30 bp, Artificial Sequence
  Synthetic oligonucleotide
catgtgatggtcagaacagacagcgagcat

SEQ ID NO: 26081 - DNA, 30 bp, Artificial Sequence
  Synthetic oligonucleotide
gtcaaggaaatgaggaacatgtcatagcat

SEQ ID NO: 26082 - DNA, 30 bp, Artificial Sequence
  Synthetic oligonucleotide
agactgagtcgggggtgaaggatatagcat

SEQ ID NO: 26083 - DNA, 30 bp, Artificial Sequence
  Synthetic oligonucleotide
cacaaggctaactgaataatcgacaggcat

SEQ ID NO: 26084 - DNA, 30 bp, Artificial Sequence
  Synthetic oligonucleotide
atgacactgtgcgttatggggtaaaaagat

SEQ ID NO: 26085 - DNA, 30 bp, Artificial Sequence
  Synthetic oligonucleotide
atcgagagtagatcaataagggttcaagat

SEQ ID NO: 26086 - DNA, 30 bp, Artificial Sequence
  Synthetic oligonucleotide
agacgaattcggtaccgctaatgcgaagat

SEQ ID NO: 26087 - DNA, 30 bp, Artificial Sequence
  Synthetic oligonucleotide
agggaggctatgaagagtcgcgtcgcagat

SEQ ID NO: 26088 - DNA, 30 bp, Artificial Sequence
  Synthetic oligonucleotide
tctcgcttaaacagatcttacaatgcagat

SEQ ID NO: 26089 - DNA, 31 bp, Artificial Sequence
  Synthetic oligonucleotide
tggcgagttaattgaggttacacccagagat

SEQ ID NO: 26090 - DNA, 30 bp, Artificial Sequence
  Synthetic oligonucleotide
tgctaccaatagcagatagactggggagat

SEQ ID NO: 26091 - DNA, 30 bp, Artificial Sequence
  Synthetic oligonucleotide
gggacaacatagcacatctaaacttgagat

SEQ ID NO: 26092 - DNA, 30 bp, Artificial Sequence
  Synthetic oligonucleotide
aagcagaaagatgtccgaatgctcgtagat

SEQ ID NO: 26093 - DNA, 30 bp, Artificial Sequence
  Synthetic oligonucleotide
ccggaaataacgagactgttagccgacgat

SEQ ID NO: 26094 - DNA, 30 bp, Artificial Sequence
  Synthetic oligonucleotide
cggtacaccagtagatggaagaagaccgat

SEQ ID NO: 26095 - DNA, 30 bp, Artificial Sequence
  Synthetic oligonucleotide
agcgcgggaaggacccaaggacgtaccgat

SEQ ID NO: 26096 - DNA, 30 bp, Artificial Sequence
  Synthetic oligonucleotide
catgtgagacagcgaagattctaagccgat

SEQ ID NO: 26097 - DNA, 30 bp, Artificial Sequence
  Synthetic oligonucleotide
ctgtaagtaaggaactgttgcgaggaggat

SEQ ID NO: 26098 - DNA, 30 bp, Artificial Sequence
  Synthetic oligonucleotide
gtcgcgtagcgaagggtacgatttgaggat

SEQ ID NO: 26099 - DNA, 30 bp, Artificial Sequence
  Synthetic oligonucleotide
tggacaccctgaacatcaggagtgtaggat

SEQ ID NO: 26100 - DNA, 30 bp, Artificial Sequence
  Synthetic oligonucleotide
acgaagaatctccggcctcgaatctcggat

SEQ ID NO: 26101 - DNA, 30 bp, Artificial Sequence
  Synthetic oligonucleotide
ctggagaggcggggaacgaaaaggcgggat

SEQ ID NO: 26102 - DNA, 30 bp, Artificial Sequence
  Synthetic oligonucleotide
tcgcatcgaaatgtgtagggacggcgggat

SEQ ID NO: 26103 - DNA, 30 bp, Artificial Sequence
  Synthetic oligonucleotide
agggatcgtgagcgaaaagagtcgatggat

SEQ ID NO: 26104 - DNA, 30 bp, Artificial Sequence
  Synthetic oligonucleotide
ttgaggtggcgccacagacgtggtcatgat

SEQ ID NO: 26105 - DNA, 30 bp, Artificial Sequence
  Synthetic oligonucleotide
gcgcaggtggccgactaaacccgctaatat

SEQ ID NO: 26106 - DNA, 30 bp, Artificial Sequence
  Synthetic oligonucleotide
aggttgctacaggaaggtaaatcgagatat

SEQ ID NO: 26107 - DNA, 29 bp, Artificial Sequence
  Synthetic oligonucleotide
gcaacgggaagagagaggagggtcgatat

SEQ ID NO: 26108 - DNA, 30 bp, Artificial Sequence
  Synthetic oligonucleotide
cacgcgaaattaaatcaacggcacatatat

SEQ ID NO: 26109 - DNA, 30 bp, Artificial Sequence
  Synthetic oligonucleotide
gtggccggaacagcactccaccccaagtat

SEQ ID NO: 26110 - DNA, 30 bp, Artificial Sequence
  Synthetic oligonucleotide
tggaggcaggggaaacactacgccaagtat

SEQ ID NO: 26111 - DNA, 30 bp, Artificial Sequence
  Synthetic oligonucleotide
aggcatgtagtggcgactcaccactcgtat

SEQ ID NO: 26112 - DNA, 30 bp, Artificial Sequence
  Synthetic oligonucleotide
ggagttgaagtcacaagcgtagagcggtat

SEQ ID NO: 26113 - DNA, 30 bp, Artificial Sequence
  Synthetic oligonucleotide
ctgaacgaggtaggacatcgcttgtggtat

SEQ ID NO: 26114 - DNA, 30 bp, Artificial Sequence
  Synthetic oligonucleotide
cgacaatcgagggggacgaatggggcttat

SEQ ID NO: 26115 - DNA, 30 bp, Artificial Sequence
  Synthetic oligonucleotide
gaaggcgaaccgatggtagtgaaccgaact

SEQ ID NO: 26116 - DNA, 31 bp, Artificial Sequence
  Synthetic oligonucleotide
cgagggatattgaataaggttagatggaact

SEQ ID NO: 26117 - DNA, 30 bp, Artificial Sequence
  Synthetic oligonucleotide
acagctcatcaggtaacaagaatgcccact

SEQ ID NO: 26118 - DNA, 30 bp, Artificial Sequence
  Synthetic oligonucleotide
cgatcaatgtccgaaaggagaaagctcact

SEQ ID NO: 26119 - DNA, 30 bp, Artificial Sequence
  Synthetic oligonucleotide
cactaacagggtaacaaaatcaccaagact

SEQ ID NO: 26120 - DNA, 30 bp, Artificial Sequence
  Synthetic oligonucleotide
tgaataagaagacgacccaacatcgagact

SEQ ID NO: 26121 - DNA, 30 bp, Artificial Sequence
  Synthetic oligonucleotide
cgccagggggggcggtatctaacggcgact

SEQ ID NO: 26122 - DNA, 30 bp, Artificial Sequence
  Synthetic oligonucleotide
agactaactagagaaaaactagcatcacct

SEQ ID NO: 26123 - DNA, 30 bp, Artificial Sequence
  Synthetic oligonucleotide
cacggcaacgagtaaccactgttatcacct

SEQ ID NO: 26124 - DNA, 30 bp, Artificial Sequence
  Synthetic oligonucleotide
aggtatggatagaaagttgcgcgatagcct

SEQ ID NO: 26125 - DNA, 30 bp, Artificial Sequence
  Synthetic oligonucleotide
ttgcgtaggtgtgtcgtaggcggttcgcct

SEQ ID NO: 26126 - DNA, 30 bp, Artificial Sequence
  Synthetic oligonucleotide
tggataaaaaacagcaagcaggttgggcct

SEQ ID NO: 26127 - DNA, 30 bp, Artificial Sequence
  Synthetic oligonucleotide
tgataaacagataaagggcacaggactcct

SEQ ID NO: 26128 - DNA, 30 bp, Artificial Sequence
  Synthetic oligonucleotide
gtcgtgagtgggaacctaagcggtagagct

SEQ ID NO: 26129 - DNA, 30 bp, Artificial Sequence
  Synthetic oligonucleotide
atgaagtatggtccatccgtcaagcgagct

SEQ ID NO: 26130 - DNA, 30 bp, Artificial Sequence
  Synthetic oligonucleotide
aggacaactaaacgcacgagtcaatgcgct

SEQ ID NO: 26131 - DNA, 30 bp, Artificial Sequence
  Synthetic oligonucleotide
cgtgcgctacgaatgcgtaaagagacggct

SEQ ID NO: 26132 - DNA, 30 bp, Artificial Sequence
  Synthetic oligonucleotide
tcgggagcaaaacgggagagatttgcggct

SEQ ID NO: 26133 - DNA, 30 bp, Artificial Sequence
  Synthetic oligonucleotide
cgagcgtcaacatcgattgaaaggtctgct

SEQ ID NO: 26134 - DNA, 30 bp, Artificial Sequence
  Synthetic oligonucleotide
cgagggcggcatggaagcgagtaaaaatct

SEQ ID NO: 26135 - DNA, 30 bp, Artificial Sequence
  Synthetic oligonucleotide
aaggaataaggcaccgaccacgtaaaatct

SEQ ID NO: 26136 - DNA, 30 bp, Artificial Sequence
  Synthetic oligonucleotide
tggagtactaaaaatacgggaggaacatct

SEQ ID NO: 26137 - DNA, 30 bp, Artificial Sequence
  Synthetic oligonucleotide
ctggatcaggagtgcgaacacaataagtct

SEQ ID NO: 26138 - DNA, 30 bp, Artificial Sequence
  Synthetic oligonucleotide
gcccgagcgcgatataggttggaacaaagt

SEQ ID NO: 26139 - DNA, 30 bp, Artificial Sequence
  Synthetic oligonucleotide
caactaagacattaaaataaatacacaagt

SEQ ID NO: 26140 - DNA, 30 bp, Artificial Sequence
  Synthetic oligonucleotide
ccgacgtcgataacgaaggtatggccaagt

SEQ ID NO: 26141 - DNA, 30 bp, Artificial Sequence
  Synthetic oligonucleotide
ggaaaactaggacgtgatcccatatgaagt

SEQ ID NO: 26142 - DNA, 30 bp, Artificial Sequence
  Synthetic oligonucleotide
agagccgagcgatgggatgtcgtgataagt

SEQ ID NO: 26143 - DNA, 30 bp, Artificial Sequence
  Synthetic oligonucleotide
caaggtttggcaggaaataacaaatgcagt

SEQ ID NO: 26144 - DNA, 30 bp, Artificial Sequence
  Synthetic oligonucleotide
tacgtaactggttcgaaaaaggcgtgcagt

SEQ ID NO: 26145 - DNA, 30 bp, Artificial Sequence
  Synthetic oligonucleotide
tgaataagcgctaattagaatgaggagagt

SEQ ID NO: 26146 - DNA, 30 bp, Artificial Sequence
  Synthetic oligonucleotide
agtaggtgcggaaatgagagtagatagagt

SEQ ID NO: 26147 - DNA, 30 bp, Artificial Sequence
  Synthetic oligonucleotide
gcagggggtatccggcctgggaagtagagt

SEQ ID NO: 26148 - DNA, 30 bp, Artificial Sequence
  Synthetic oligonucleotide
aaaagcctaggaccagtagtgaagacgagt

SEQ ID NO: 26149 - DNA, 30 bp, Artificial Sequence
  Synthetic oligonucleotide
tgctaaagacagaccagctaaggttcgagt

SEQ ID NO: 26150 - DNA, 30 bp, Artificial Sequence
  Synthetic oligonucleotide
agcaaaaatccggcggagatgggtgggagt

SEQ ID NO: 26151 - DNA, 30 bp, Artificial Sequence
  Synthetic oligonucleotide
cttgggccctcaaccagtacgacaatgagt

SEQ ID NO: 26152 - DNA, 30 bp, Artificial Sequence
  Synthetic oligonucleotide
acacgtgggtaaactgtagaaggtatgagt

SEQ ID NO: 26153 - DNA, 30 bp, Artificial Sequence
  Synthetic oligonucleotide
cgggaaggggaacgataagccgccctgagt

SEQ ID NO: 26154 - DNA, 30 bp, Artificial Sequence
  Synthetic oligonucleotide
ccaccgggctggagtaaaagtaaaattagt

SEQ ID NO: 26155 - DNA, 30 bp, Artificial Sequence
  Synthetic oligonucleotide
cgtgcgagattgcgagcggagtaagaccgt

SEQ ID NO: 26156 - DNA, 30 bp, Artificial Sequence
  Synthetic oligonucleotide
tggcacgaaacgtgcgtgtagcaaatccgt

SEQ ID NO: 26157 - DNA, 30 bp, Artificial Sequence
  Synthetic oligonucleotide
gctaagcagggagtagtaaacagttcgcgt

SEQ ID NO: 26158 - DNA, 30 bp, Artificial Sequence
  Synthetic oligonucleotide
tggaaagcaaaagaagcagtgggttggcgt

SEQ ID NO: 26159 - DNA, 30 bp, Artificial Sequence
  Synthetic oligonucleotide
gagacacgaaactgctgccgacgtgatcgt

SEQ ID NO: 26160 - DNA, 30 bp, Artificial Sequence
  Synthetic oligonucleotide
atgtgcccggacaatatcataacatctcgt

SEQ ID NO: 26161 - DNA, 30 bp, Artificial Sequence
  Synthetic oligonucleotide
cagggttggcaggaaggtgtaacaggaggt

SEQ ID NO: 26162 - DNA, 30 bp, Artificial Sequence
  Synthetic oligonucleotide
acgtaagttaaaaggatcattgcgaacggt

SEQ ID NO: 26163 - DNA, 30 bp, Artificial Sequence
  Synthetic oligonucleotide
gacatgcgggcgagaaaatgcggcttcggt

SEQ ID NO: 26164 - DNA, 30 bp, Artificial Sequence
  Synthetic oligonucleotide
acgacgcaagagaagtctgtagcgaagggt

SEQ ID NO: 26165 - DNA, 30 bp, Artificial Sequence
  Synthetic oligonucleotide
cgcccgtgaggaaagtgcgttagccagggt

SEQ ID NO: 26166 - DNA, 30 bp, Artificial Sequence
  Synthetic oligonucleotide
gctgaagatgtgtatagatcggccgagggt

SEQ ID NO: 26167 - DNA, 30 bp, Artificial Sequence
  Synthetic oligonucleotide
accgaaaaagaatcgttctgtgcgaggggt

SEQ ID NO: 26168 - DNA, 30 bp, Artificial Sequence
  Synthetic oligonucleotide
ccagcacggggtaagttaacaagcgggggt

SEQ ID NO: 26169 - DNA, 30 bp, Artificial Sequence
  Synthetic oligonucleotide
cgaggagatgtataagatctcgcactgggt

SEQ ID NO: 26170 - DNA, 30 bp, Artificial Sequence
  Synthetic oligonucleotide
tgaaggggtctaagatagctagggcatggt

SEQ ID NO: 26171 - DNA, 30 bp, Artificial Sequence
  Synthetic oligonucleotide
aatggggggcagggagtacgacacgatggt

SEQ ID NO: 26172 - DNA, 30 bp, Artificial Sequence
  Synthetic oligonucleotide
agcgagatgcgactggactcataccctggt

SEQ ID NO: 26173 - DNA, 30 bp, Artificial Sequence
  Synthetic oligonucleotide
caagcaggaagggggcattgcaatgttggt

SEQ ID NO: 26174 - DNA, 30 bp, Artificial Sequence
  Synthetic oligonucleotide
agccagaagcgtcgctcagtaacggaatgt

SEQ ID NO: 26175 - DNA, 30 bp, Artificial Sequence
  Synthetic oligonucleotide
tcacacgaggtataagccgaatctgaatgt

SEQ ID NO: 26176 - DNA, 30 bp, Artificial Sequence
  Synthetic oligonucleotide
tgccgatgcgtggaaggaataacaagctgt

SEQ ID NO: 26177 - DNA, 30 bp, Artificial Sequence
  Synthetic oligonucleotide
ggagggaactgttcaggcggaagaacgtgt

SEQ ID NO: 26178 - DNA, 30 bp, Artificial Sequence
  Synthetic oligonucleotide
cgtgtcgagaaggggtgaggattgaggtgt

SEQ ID NO: 26179 - DNA, 30 bp, Artificial Sequence
  Synthetic oligonucleotide
ggagaaccagatgccagactggacgggtgt

SEQ ID NO: 26180 - DNA, 30 bp, Artificial Sequence
  Synthetic oligonucleotide
acgaaactagtaaagtagccattatcttgt

SEQ ID NO: 26181 - DNA, 30 bp, Artificial Sequence
  Synthetic oligonucleotide
aaggactaagcgcgaggtcagatgctttgt

SEQ ID NO: 26182 - DNA, 30 bp, Artificial Sequence
  Synthetic oligonucleotide
ggtcagactaaaaaacgagatagtcaaatt

SEQ ID NO: 26183 - DNA, 30 bp, Artificial Sequence
  Synthetic oligonucleotide
cggagtgtacgggcccagcgtgatacaatt

SEQ ID NO: 26184 - DNA, 30 bp, Artificial Sequence
  Synthetic oligonucleotide
tggcgaaaagcgtaaattgacacatcaatt

SEQ ID NO: 26185 - DNA, 30 bp, Artificial Sequence
  Synthetic oligonucleotide
ggggcaaaagatgaaggtagagggtcaatt

SEQ ID NO: 26186 - DNA, 30 bp, Artificial Sequence
  Synthetic oligonucleotide
aggaccgcgacgaccgcggaggagggaatt

SEQ ID NO: 26187 - DNA, 30 bp, Artificial Sequence
  Synthetic oligonucleotide
acgtgtgagggttgagggatcacggtaatt

SEQ ID NO: 26188 - DNA, 30 bp, Artificial Sequence
  Synthetic oligonucleotide
taggagggagagtaaggctggtccagcatt

SEQ ID NO: 26189 - DNA, 30 bp, Artificial Sequence
  Synthetic oligonucleotide
gtatgccggtcgacagtgggataatgcatt

SEQ ID NO: 26190 - DNA, 30 bp, Artificial Sequence
  Synthetic oligonucleotide
agggtggctgggcggaaacatctgaagatt

SEQ ID NO: 26191 - DNA, 30 bp, Artificial Sequence
  Synthetic oligonucleotide
tgacgaaagttacacaaggcggaatagatt

SEQ ID NO: 26192 - DNA, 30 bp, Artificial Sequence
  Synthetic oligonucleotide
acgcgcctctcacaatcagagtgcaggatt

SEQ ID NO: 26193 - DNA, 30 bp, Artificial Sequence
  Synthetic oligonucleotide
gcgtgaacccagatttctgaagacactatt

SEQ ID NO: 26194 - DNA, 30 bp, Artificial Sequence
  Synthetic oligonucleotide
tcgaacgaaaatagaaaagatcagaacctt

SEQ ID NO: 26195 - DNA, 30 bp, Artificial Sequence
  Synthetic oligonucleotide
ggtgcagatccgagagcgagagtacccctt

SEQ ID NO: 26196 - DNA, 30 bp, Artificial Sequence
  Synthetic oligonucleotide
tctgggaaaggtgacgtcggtactaagctt

SEQ ID NO: 26197 - DNA, 30 bp, Artificial Sequence
  Synthetic oligonucleotide
cgagcacacgatggataggactgtcaagtt

SEQ ID NO: 26198 - DNA, 30 bp, Artificial Sequence
  Synthetic oligonucleotide
catgggtgtgtgacctgcgtcctcgaagtt

SEQ ID NO: 26199 - DNA, 30 bp, Artificial Sequence
  Synthetic oligonucleotide
cggacaattggagattggtgaacatgagtt

SEQ ID NO: 26200 - DNA, 30 bp, Artificial Sequence
  Synthetic oligonucleotide
cacggagggtaaccaaccacataactagtt

SEQ ID NO: 26201 - DNA, 30 bp, Artificial Sequence
  Synthetic oligonucleotide
caaaccaggtacggggatgaggagttagtt

SEQ ID NO: 26202 - DNA, 30 bp, Artificial Sequence
  Synthetic oligonucleotide
cgagaggatattgttagtgcatttttcgtt

SEQ ID NO: 26203 - DNA, 30 bp, Artificial Sequence
  Synthetic oligonucleotide
ctatcgagagggcgcacgggcacgacggtt

SEQ ID NO: 26204 - DNA, 30 bp, Artificial Sequence
  Synthetic oligonucleotide
ctagagcacagtgataaccaaacgattgtt

SEQ ID NO: 26205 - DNA, 30 bp, Artificial Sequence
  Synthetic oligonucleotide
cgagcagagtggttggggaaaggcacattt

SEQ ID NO: 26206 - DNA, 30 bp, Artificial Sequence
  Synthetic oligonucleotide
cactcaatgggtaacagggaaagcagattt

SEQ ID NO: 26207 - DNA, 30 bp, Artificial Sequence
  Synthetic oligonucleotide
aggtgacaaccacagtagtggccgcgattt

SEQ ID NO: 26208 - DNA, 30 bp, Artificial Sequence
  Synthetic oligonucleotide
agaagacactggttgccaaaagggatattt

SEQ ID NO: 26209 - DNA, 30 bp, Artificial Sequence
  Synthetic oligonucleotide
tcgtaagtctaagagggtccggcattcttt

SEQ ID NO: 26210 - DNA, 30 bp, Artificial Sequence
  Synthetic oligonucleotide
tgaacgtggggcaagctgcagaccaagttt

SEQ ID NO: 26211 - DNA, 30 bp, Artificial Sequence
  Synthetic oligonucleotide
cgccaccggcgagaacaccataatcagttt

SEQ ID NO: 26212 - DNA, 30 bp, Artificial Sequence
  Synthetic oligonucleotide
aaaggacaaccggacggatacgaacggttt

SEQ ID NO: 26213 - DNA, 31 bp, Artificial Sequence
  Synthetic oligonucleotide
atgcgaaaggagcggagacctcgaaggtttt

SEQ ID NO: 26214 - DNA, 30 bp, Artificial Sequence
  Synthetic oligonucleotide
tcgaccacgtggtggtatgctcgtaaaaaa

SEQ ID NO: 26215 - DNA, 30 bp, Artificial Sequence
  Synthetic oligonucleotide
cacgggttgcgaggaccgccaagataaaaa

SEQ ID NO: 26216 - DNA, 30 bp, Artificial Sequence
  Synthetic oligonucleotide
cagggacacgttaggtatgagagcagaaaa

SEQ ID NO: 26217 - DNA, 30 bp, Artificial Sequence
  Synthetic oligonucleotide
ggtaagcgccggaatacttgtcaccgaaaa

SEQ ID NO: 26218 - DNA, 30 bp, Artificial Sequence
  Synthetic oligonucleotide
cgattgggggcgtgggtaaacgcatgaaaa

SEQ ID NO: 26219 - DNA, 30 bp, Artificial Sequence
  Synthetic oligonucleotide
gcacggaagaaacttggcccgaaagtaaaa

SEQ ID NO: 26220 - DNA, 31 bp, Artificial Sequence
  Synthetic oligonucleotide
acggtaaatcccaagcgataaaatgcacaaa

SEQ ID NO: 26221 - DNA, 30 bp, Artificial Sequence
  Synthetic oligonucleotide
gcaagacctgaacgggctaagtctgacaaa

SEQ ID NO: 26222 - DNA, 30 bp, Artificial Sequence
  Synthetic oligonucleotide
ccaggatcggcgagaccaagagcgtccaaa

SEQ ID NO: 26223 - DNA, 30 bp, Artificial Sequence
  Synthetic oligonucleotide
tctagaaggtcgaatctagtaaggggcaaa

SEQ ID NO: 26224 - DNA, 30 bp, Artificial Sequence
  Synthetic oligonucleotide
cgcgaaccgatctttgataacttgtgcaaa

SEQ ID NO: 26225 - DNA, 30 bp, Artificial Sequence
  Synthetic oligonucleotide
agaactgaggctataaactgctctaagaaa

SEQ ID NO: 26226 - DNA, 30 bp, Artificial Sequence
  Synthetic oligonucleotide
gcgccggtgagcagtaggtccccacagaaa

SEQ ID NO: 26227 - DNA, 30 bp, Artificial Sequence
  Synthetic oligonucleotide
aagtcgcgaaataaagtccaacttgagaaa

SEQ ID NO: 26228 - DNA, 30 bp, Artificial Sequence
  Synthetic oligonucleotide
tctcactagaaataggccagtgtcacgaaa

SEQ ID NO: 26229 - DNA, 30 bp, Artificial Sequence
  Synthetic oligonucleotide
caaggccagaattcagatcggattacgaaa

SEQ ID NO: 26230 - DNA, 30 bp, Artificial Sequence
  Synthetic oligonucleotide
ggaagtgatccgagaaagcgcaaaccgaaa

SEQ ID NO: 26231 - DNA, 30 bp, Artificial Sequence
  Synthetic oligonucleotide
tcgttaacgggtgtgcttagcgatgggaaa

SEQ ID NO: 26232 - DNA, 30 bp, Artificial Sequence
  Synthetic oligonucleotide
aggcattagttcaggaagtgagcatggaaa

SEQ ID NO: 26233 - DNA, 30 bp, Artificial Sequence
  Synthetic oligonucleotide
cctcgacacgaaagaaaaacatggtggaaa

SEQ ID NO: 26234 - DNA, 30 bp, Artificial Sequence
  Synthetic oligonucleotide
taacagctccgggaacaacttatagtgaaa

SEQ ID NO: 26235 - DNA, 30 bp, Artificial Sequence
  Synthetic oligonucleotide
tgaagggagttgggaccgagtaaagataaa

SEQ ID NO: 26236 - DNA, 30 bp, Artificial Sequence
  Synthetic oligonucleotide
aaggcgggtagcgtaaatgcagatgataaa

SEQ ID NO: 26237 - DNA, 29 bp, Artificial Sequence
  Synthetic oligonucleotide
tatgttgtgtaggtttactcccgtataaa

SEQ ID NO: 26238 - DNA, 30 bp, Artificial Sequence
  Synthetic oligonucleotide
ggcgatcgattcgactacaccagagctaaa

SEQ ID NO: 26239 - DNA, 30 bp, Artificial Sequence
  Synthetic oligonucleotide
tggatgtcaggaaccaccagactgagtaaa

SEQ ID NO: 26240 - DNA, 30 bp, Artificial Sequence
  Synthetic oligonucleotide
acgcgggcagggtcagccggcgatagtaaa

SEQ ID NO: 26241 - DNA, 30 bp, Artificial Sequence
  Synthetic oligonucleotide
gtggggggtcggatgagatagagtagtaaa

SEQ ID NO: 26242 - DNA, 30 bp, Artificial Sequence
  Synthetic oligonucleotide
taagttacatcaggaacagaagagggtaaa

SEQ ID NO: 26243 - DNA, 30 bp, Artificial Sequence
  Synthetic oligonucleotide
caacgtgcggatcgtaatgactgggttaaa

SEQ ID NO: 26244 - DNA, 30 bp, Artificial Sequence
  Synthetic oligonucleotide
cccaaagtctaggagtaaccgttgaaacaa

SEQ ID NO: 26245 - DNA, 30 bp, Artificial Sequence
  Synthetic oligonucleotide
tcgaatattgggatataagatcgataacaa

SEQ ID NO: 26246 - DNA, 30 bp, Artificial Sequence
  Synthetic oligonucleotide
tggatgaggacaggagagtctaaggcacaa

SEQ ID NO: 26247 - DNA, 30 bp, Artificial Sequence
  Synthetic oligonucleotide
aacaccagtaacaacaaaccagttgcacaa

SEQ ID NO: 26248 - DNA, 30 bp, Artificial Sequence
  Synthetic oligonucleotide
cgtgataagggaaggaacgagaagtcacaa

SEQ ID NO: 26249 - DNA, 30 bp, Artificial Sequence
  Synthetic oligonucleotide
agcgaggggaccagatggtggagaagacaa

SEQ ID NO: 26250 - DNA, 30 bp, Artificial Sequence
  Synthetic oligonucleotide
tcggacacacattgaagttacacatgacaa

SEQ ID NO: 26251 - DNA, 30 bp, Artificial Sequence
  Synthetic oligonucleotide
aaagaaatccctagagttgaccccgtacaa

SEQ ID NO: 26252 - DNA, 30 bp, Artificial Sequence
  Synthetic oligonucleotide
agaagaagaaagtggaacgtagcacaccaa

SEQ ID NO: 26253 - DNA, 30 bp, Artificial Sequence
  Synthetic oligonucleotide
cgggacaaagtagttgcgagactggaccaa

SEQ ID NO: 26254 - DNA, 30 bp, Artificial Sequence
  Synthetic oligonucleotide
aatacatccaatctcagcgaacgtgaccaa

SEQ ID NO: 26255 - DNA, 30 bp, Artificial Sequence
  Synthetic oligonucleotide
caagagcatgtagaataaaatgtgtaccaa

SEQ ID NO: 26256 - DNA, 30 bp, Artificial Sequence
  Synthetic oligonucleotide
ctgaggtaaccggccggtaaatgagcccaa

SEQ ID NO: 26257 - DNA, 30 bp, Artificial Sequence
  Synthetic oligonucleotide
aggagggtgacgatttgaaggtgaggccaa

SEQ ID NO: 26258 - DNA, 30 bp, Artificial Sequence
  Synthetic oligonucleotide
ccttagatgaaatagaacgaaatatgccaa

SEQ ID NO: 26259 - DNA, 30 bp, Artificial Sequence
  Synthetic oligonucleotide
tggactaaagtggtaagttcgcgttgccaa

SEQ ID NO: 26260 - DNA, 30 bp, Artificial Sequence
  Synthetic oligonucleotide
agaaacgactgtaatccgggacgaatccaa

SEQ ID NO: 26261 - DNA, 30 bp, Artificial Sequence
  Synthetic oligonucleotide
cgttataaggcgatataacaggtcgtccaa

SEQ ID NO: 26262 - DNA, 30 bp, Artificial Sequence
  Synthetic oligonucleotide
accaaatacctagaaggtgggcaaaagcaa

SEQ ID NO: 26263 - DNA, 30 bp, Artificial Sequence
  Synthetic oligonucleotide
tagagggtttagggcataataagagggcaa

SEQ ID NO: 26264 - DNA, 30 bp, Artificial Sequence
  Synthetic oligonucleotide
cgtggaagcccgcaagtaagccgggggcaa

SEQ ID NO: 26265 - DNA, 30 bp, Artificial Sequence
  Synthetic oligonucleotide
gaataaacaagcggagaaaagactgggcaa

SEQ ID NO: 26266 - DNA, 30 bp, Artificial Sequence
  Synthetic oligonucleotide
cacaggggtatagtaggcaacagtgtgcaa

SEQ ID NO: 26267 - DNA, 30 bp, Artificial Sequence
  Synthetic oligonucleotide
ccgaactcgcaaaggactggaggtgtgcaa

SEQ ID NO: 26268 - DNA, 30 bp, Artificial Sequence
  Synthetic oligonucleotide
tgcaaggaacgcctagataacatcaatcaa

SEQ ID NO: 26269 - DNA, 30 bp, Artificial Sequence
  Synthetic oligonucleotide
aaagaggggtcgacaccaccccaggatcaa

SEQ ID NO: 26270 - DNA, 30 bp, Artificial Sequence
  Synthetic oligonucleotide
ctcgaaacagacgactccctccgcactcaa

SEQ ID NO: 26271 - DNA, 30 bp, Artificial Sequence
  Synthetic oligonucleotide
ataattcgcgaggggaagcgataacctcaa

SEQ ID NO: 26272 - DNA, 30 bp, Artificial Sequence
  Synthetic oligonucleotide
atgtccaaacaggattacttgccgtctcaa

SEQ ID NO: 26273 - DNA, 30 bp, Artificial Sequence
  Synthetic oligonucleotide
gggggaatcggtaatagtatgaaatgtcaa

SEQ ID NO: 26274 - DNA, 30 bp, Artificial Sequence
  Synthetic oligonucleotide
ggtcacgccaggcgtacagctcaacaagaa

SEQ ID NO: 26275 - DNA, 30 bp, Artificial Sequence
  Synthetic oligonucleotide
catgactgcgaataacagttagggcaagaa

SEQ ID NO: 26276 - DNA, 30 bp, Artificial Sequence
  Synthetic oligonucleotide
gagaacaggcgagatgcatcttgaccagaa

SEQ ID NO: 26277 - DNA, 30 bp, Artificial Sequence
  Synthetic oligonucleotide
agagaaaaattgtctgtctcgtatccagaa

SEQ ID NO: 26278 - DNA, 31 bp, Artificial Sequence
  Synthetic oligonucleotide
ctgtgataacagacggcatagtgttgcagaa

SEQ ID NO: 26279 - DNA, 30 bp, Artificial Sequence
  Synthetic oligonucleotide
gatacatggaaacgaggcccccccagagaa

SEQ ID NO: 26280 - DNA, 30 bp, Artificial Sequence
  Synthetic oligonucleotide
tgttaggcacatggaaactaagccagagaa

SEQ ID NO: 26281 - DNA, 30 bp, Artificial Sequence
  Synthetic oligonucleotide
cacctgacaaactaaaaggcaacgagagaa

SEQ ID NO: 26282 - DNA, 30 bp, Artificial Sequence
  Synthetic oligonucleotide
aaatgagatcgactaacggttcaacgagaa

SEQ ID NO: 26283 - DNA, 30 bp, Artificial Sequence
  Synthetic oligonucleotide
gacaagtaaacagtacgcccaagccgagaa

SEQ ID NO: 26284 - DNA, 30 bp, Artificial Sequence
  Synthetic oligonucleotide
cgatacgctgctcacctaagagggcgagaa

SEQ ID NO: 26285 - DNA, 30 bp, Artificial Sequence
  Synthetic oligonucleotide
actgaatgcgtagcagccctagcgggagaa

SEQ ID NO: 26286 - DNA, 30 bp, Artificial Sequence
  Synthetic oligonucleotide
gcagacggaagttccaaccaaactggagaa

SEQ ID NO: 26287 - DNA, 30 bp, Artificial Sequence
  Synthetic oligonucleotide
aagggtgaagaccacgtacatcgcctagaa

SEQ ID NO: 26288 - DNA, 30 bp, Artificial Sequence
  Synthetic oligonucleotide
tagaaatgtcggcctcgaaacaaggtagaa

SEQ ID NO: 26289 - DNA, 30 bp, Artificial Sequence
  Synthetic oligonucleotide
ggcatcataggcatgacttacgaggtagaa

SEQ ID NO: 26290 - DNA, 30 bp, Artificial Sequence
  Synthetic oligonucleotide
ggggcagtaagaggtatttgctatgtagaa

SEQ ID NO: 26291 - DNA, 30 bp, Artificial Sequence
  Synthetic oligonucleotide
caggaccgggttgactagcgaagattagaa

SEQ ID NO: 26292 - DNA, 30 bp, Artificial Sequence
  Synthetic oligonucleotide
cataatcacacattggagaagatcaccgaa

SEQ ID NO: 26293 - DNA, 30 bp, Artificial Sequence
  Synthetic oligonucleotide
acgccatgtcgcatggaggtgccgcccgaa

SEQ ID NO: 26294 - DNA, 30 bp, Artificial Sequence
  Synthetic oligonucleotide
caaggtgctgaacatcaaaggatttccgaa

SEQ ID NO: 26295 - DNA, 30 bp, Artificial Sequence
  Synthetic oligonucleotide
gtcgtaaacaataggtgcatataaagcgaa

SEQ ID NO: 26296 - DNA, 30 bp, Artificial Sequence
  Synthetic oligonucleotide
cggaggtcaaagtcgatcggaggccgcgaa

SEQ ID NO: 26297 - DNA, 30 bp, Artificial Sequence
  Synthetic oligonucleotide
tataaattcaggcaacgaacaaagggcgaa

SEQ ID NO: 26298 - DNA, 30 bp, Artificial Sequence
  Synthetic oligonucleotide
agggaattgtggttttacagcccatgcgaa

SEQ ID NO: 26299 - DNA, 28 bp, Artificial Sequence
  Synthetic oligonucleotide
gaagaactagcagatagccaagaaggaa

SEQ ID NO: 26300 - DNA, 30 bp, Artificial Sequence
  Synthetic oligonucleotide
ccatgcgtgcatcggatggctaaccaggaa

SEQ ID NO: 26301 - DNA, 30 bp, Artificial Sequence
  Synthetic oligonucleotide
ctcggtaaaatcaagcaggactgataggaa

SEQ ID NO: 26302 - DNA, 30 bp, Artificial Sequence
  Synthetic oligonucleotide
gggaaagcaagatagatcatctcgtaggaa

SEQ ID NO: 26303 - DNA, 30 bp, Artificial Sequence
  Synthetic oligonucleotide
gtgaattaatggaccaaactgcaatcggaa

SEQ ID NO: 26304 - DNA, 30 bp, Artificial Sequence
  Synthetic oligonucleotide
agccacactactatcaagctgcaatcggaa

SEQ ID NO: 26305 - DNA, 30 bp, Artificial Sequence
  Synthetic oligonucleotide
cgtggtgcaaccgaaagctggatctcggaa

SEQ ID NO: 26306 - DNA, 31 bp, Artificial Sequence
  Synthetic oligonucleotide
gtagtaacggaaaacaacgagggaaagggaa

SEQ ID NO: 26307 - DNA, 30 bp, Artificial Sequence
  Synthetic oligonucleotide
gcatgagcaagcactactccaaggcgggaa

SEQ ID NO: 26308 - DNA, 30 bp, Artificial Sequence
  Synthetic oligonucleotide
aacgaaagctggcgcgattgtctctgggaa

SEQ ID NO: 26309 - DNA, 30 bp, Artificial Sequence
  Synthetic oligonucleotide
catcacggccgccaggtgcaagcgatggaa

SEQ ID NO: 26310 - DNA, 30 bp, Artificial Sequence
  Synthetic oligonucleotide
ttgtaagaaatggcgtataaagggatggaa

SEQ ID NO: 26311 - DNA, 30 bp, Artificial Sequence
  Synthetic oligonucleotide
actaagcgtagggtaaaccggggcaatgaa

SEQ ID NO: 26312 - DNA, 30 bp, Artificial Sequence
  Synthetic oligonucleotide
cgttgacgtgcgataactacatgggctgaa

SEQ ID NO: 26313 - DNA, 30 bp, Artificial Sequence
  Synthetic oligonucleotide
ggcactgaatagggattgactggagttgaa

SEQ ID NO: 26314 - DNA, 30 bp, Artificial Sequence
  Synthetic oligonucleotide
tgaagcgaatcggccacaaaatactttgaa

SEQ ID NO: 26315 - DNA, 30 bp, Artificial Sequence
  Synthetic oligonucleotide
cggactaagttctacacagataccgaataa

SEQ ID NO: 26316 - DNA, 30 bp, Artificial Sequence
  Synthetic oligonucleotide
tgcgatacgatagctgatagaggcgaataa

SEQ ID NO: 26317 - DNA, 30 bp, Artificial Sequence
  Synthetic oligonucleotide
cctagtacccaacgaaggatccgctcataa

SEQ ID NO: 26318 - DNA, 30 bp, Artificial Sequence
  Synthetic oligonucleotide
gcggagattactgagacagagaggagataa

SEQ ID NO: 26319 - DNA, 30 bp, Artificial Sequence
  Synthetic oligonucleotide
tatcgagcgacaaacattcaacttagataa

SEQ ID NO: 26320 - DNA, 30 bp, Artificial Sequence
  Synthetic oligonucleotide
aacctagaacagagtgtcacacgcctataa

SEQ ID NO: 26321 - DNA, 30 bp, Artificial Sequence
  Synthetic oligonucleotide
acgggtggtaggaacctggttcaatactaa

SEQ ID NO: 26322 - DNA, 30 bp, Artificial Sequence
  Synthetic oligonucleotide
agggggcaggagccaccgggtccatactaa

SEQ ID NO: 26323 - DNA, 30 bp, Artificial Sequence
  Synthetic oligonucleotide
catggctagaagtaatcaacgcaaacctaa

SEQ ID NO: 26324 - DNA, 31 bp, Artificial Sequence
  Synthetic oligonucleotide
gagaccaaacatttaggcgagattagagtaa

SEQ ID NO: 26325 - DNA, 30 bp, Artificial Sequence
  Synthetic oligonucleotide
gcgactaaagaactacgagcaacatagtaa

SEQ ID NO: 26326 - DNA, 30 bp, Artificial Sequence
  Synthetic oligonucleotide
tagggatacgggccatacaaacagtagtaa

SEQ ID NO: 26327 - DNA, 30 bp, Artificial Sequence
  Synthetic oligonucleotide
cactccgccgaactgtacaagaggacgtaa

SEQ ID NO: 26328 - DNA, 30 bp, Artificial Sequence
  Synthetic oligonucleotide
agtatggcagaggagtgtatcggtacgtaa

SEQ ID NO: 26329 - DNA, 30 bp, Artificial Sequence
  Synthetic oligonucleotide
cgatcatgtcgaaatttcctaacgccgtaa

SEQ ID NO: 26330 - DNA, 30 bp, Artificial Sequence
  Synthetic oligonucleotide
atggatggggatgggaaacaaaatccgtaa

SEQ ID NO: 26331 - DNA, 30 bp, Artificial Sequence
  Synthetic oligonucleotide
gacgcaggccaacgaagaaacatacggtaa

SEQ ID NO: 26332 - DNA, 30 bp, Artificial Sequence
  Synthetic oligonucleotide
acagtaatattctaaaaatactaggggtaa

SEQ ID NO: 26333 - DNA, 30 bp, Artificial Sequence
  Synthetic oligonucleotide
gctactgtgagaagtgaaaagaatatgtaa

SEQ ID NO: 26334 - DNA, 30 bp, Artificial Sequence
  Synthetic oligonucleotide
acgggaagtcggaacagagcgcctctgtaa

SEQ ID NO: 26335 - DNA, 30 bp, Artificial Sequence
  Synthetic oligonucleotide
gtcgataaggagtgcgccaccgccgattaa

SEQ ID NO: 26336 - DNA, 30 bp, Artificial Sequence
  Synthetic oligonucleotide
actgtagtcaagataaagaagcatccttaa

SEQ ID NO: 26337 - DNA, 30 bp, Artificial Sequence
  Synthetic oligonucleotide
caagggaggcatggccagtagaggcgttaa

SEQ ID NO: 26338 - DNA, 30 bp, Artificial Sequence
  Synthetic oligonucleotide
agggccggactgaatcgactaagaatttaa

SEQ ID NO: 26339 - DNA, 30 bp, Artificial Sequence
  Synthetic oligonucleotide
ctaccacatcatccggagcgaatccaaaca

SEQ ID NO: 26340 - DNA, 30 bp, Artificial Sequence
  Synthetic oligonucleotide
tgtacaacagaaaaatgtcgagcagaaaca

SEQ ID NO: 26341 - DNA, 30 bp, Artificial Sequence
  Synthetic oligonucleotide
ggtacaacgcgtcggatttacgagacaaca

SEQ ID NO: 26342 - DNA, 30 bp, Artificial Sequence
  Synthetic oligonucleotide
catcggcagaggacgttacatggcccaaca

SEQ ID NO: 26343 - DNA, 30 bp, Artificial Sequence
  Synthetic oligonucleotide
tcataacagcctattaccccggtacgaaca

SEQ ID NO: 26344 - DNA, 30 bp, Artificial Sequence
  Synthetic oligonucleotide
agagggggagggaggggccgcacgctaaca

SEQ ID NO: 26345 - DNA, 30 bp, Artificial Sequence
  Synthetic oligonucleotide
ctaggcggtgggcagtccccttatctaaca

SEQ ID NO: 26346 - DNA, 30 bp, Artificial Sequence
  Synthetic oligonucleotide
ctggtggatcaaaaggcgttaagggtaaca

SEQ ID NO: 26347 - DNA, 30 bp, Artificial Sequence
  Synthetic oligonucleotide
cacggtcgaagggcaccatgaatggtaaca

SEQ ID NO: 26348 - DNA, 30 bp, Artificial Sequence
  Synthetic oligonucleotide
aaggcacagcccgaacggaaaactcacaca

SEQ ID NO: 26349 - DNA, 30 bp, Artificial Sequence
  Synthetic oligonucleotide
tgtaactatgtcaagagtctagagcgcaca

SEQ ID NO: 26350 - DNA, 30 bp, Artificial Sequence
  Synthetic oligonucleotide
taaggtacgaaataaaaaaagcaaggcaca

SEQ ID NO: 26351 - DNA, 30 bp, Artificial Sequence
  Synthetic oligonucleotide
gagaatgcatactaaggaagaaaatgcaca

SEQ ID NO: 26352 - DNA, 30 bp, Artificial Sequence
  Synthetic oligonucleotide
agtggtcacgtatgagaggcgagcatcaca

SEQ ID NO: 26353 - DNA, 30 bp, Artificial Sequence
  Synthetic oligonucleotide
gttggggagtgttgaagtagagagctcaca

SEQ ID NO: 26354 - DNA, 30 bp, Artificial Sequence
  Synthetic oligonucleotide
aacgggtagatgattaggctctagttcaca

SEQ ID NO: 26355 - DNA, 30 bp, Artificial Sequence
  Synthetic oligonucleotide
tgccggaggcgcctcctcaacacgaagaca

SEQ ID NO: 26356 - DNA, 30 bp, Artificial Sequence
  Synthetic oligonucleotide
cgattgggttaaaggggactaaaacagaca

SEQ ID NO: 26357 - DNA, 30 bp, Artificial Sequence
  Synthetic oligonucleotide
taaacgtagggaggtgtggtgttctagaca

SEQ ID NO: 26358 - DNA, 30 bp, Artificial Sequence
  Synthetic oligonucleotide
tgggcgtgtaagtggaaatatcaagcgaca

SEQ ID NO: 26359 - DNA, 30 bp, Artificial Sequence
  Synthetic oligonucleotide
cgatgggattgggacgtaatgtccgcgaca

SEQ ID NO: 26360 - DNA, 30 bp, Artificial Sequence
  Synthetic oligonucleotide
gtcggggagcaaaatgaaaggatcgcgaca

SEQ ID NO: 26361 - DNA, 30 bp, Artificial Sequence
  Synthetic oligonucleotide
cgtacccgactaagacaactgttcaggaca

SEQ ID NO: 26362 - DNA, 30 bp, Artificial Sequence
  Synthetic oligonucleotide
ccgacactatgggttacaggaggagggaca

SEQ ID NO: 26363 - DNA, 30 bp, Artificial Sequence
  Synthetic oligonucleotide
cgtaccagagggcaacgtggggtagggaca

SEQ ID NO: 26364 - DNA, 30 bp, Artificial Sequence
  Synthetic oligonucleotide
agtaactagcaaagctacgtgcagatgaca

SEQ ID NO: 26365 - DNA, 30 bp, Artificial Sequence
  Synthetic oligonucleotide
agggacagacatagccgcattctgttgaca

SEQ ID NO: 26366 - DNA, 30 bp, Artificial Sequence
  Synthetic oligonucleotide
tcgcgaataggtgactgcagttggaataca

SEQ ID NO: 26367 - DNA, 30 bp, Artificial Sequence
  Synthetic oligonucleotide
ctaggcgaatggatagtttagaatgataca

SEQ ID NO: 26368 - DNA, 30 bp, Artificial Sequence
  Synthetic oligonucleotide
gtgcgtagttagtgaacgaagacgtgtaca

SEQ ID NO: 26369 - DNA, 30 bp, Artificial Sequence
  Synthetic oligonucleotide
cagtggaattgcagaaagataaaagcacca

SEQ ID NO: 26370 - DNA, 30 bp, Artificial Sequence
  Synthetic oligonucleotide
atcgacaatcaagcggaccaatcgtcacca

SEQ ID NO: 26371 - DNA, 30 bp, Artificial Sequence
  Synthetic oligonucleotide
caagggataatgggtctacccacgtgacca

SEQ ID NO: 26372 - DNA, 30 bp, Artificial Sequence
  Synthetic oligonucleotide
aaggggacatattcggtaggcatcttacca

SEQ ID NO: 26373 - DNA, 30 bp, Artificial Sequence
  Synthetic oligonucleotide
gggtggaaagtaacatttggttagctccca

SEQ ID NO: 26374 - DNA, 30 bp, Artificial Sequence
  Synthetic oligonucleotide
cgaggaaacagtgccgcacgcgccgcgcca

SEQ ID NO: 26375 - DNA, 30 bp, Artificial Sequence
  Synthetic oligonucleotide
gaaggcacaagttcatgatagtgcgtgcca

SEQ ID NO: 26376 - DNA, 30 bp, Artificial Sequence
  Synthetic oligonucleotide
acgcattccacagcccgaacctaccatcca

SEQ ID NO: 26377 - DNA, 30 bp, Artificial Sequence
  Synthetic oligonucleotide
cgaacgatgacatggaacacatagcaagca

SEQ ID NO: 26378 - DNA, 30 bp, Artificial Sequence
  Synthetic oligonucleotide
aagagtgctcgtgtgatctgaatgtaagca

SEQ ID NO: 26379 - DNA, 30 bp, Artificial Sequence
  Synthetic oligonucleotide
gggctgtaaagagggacgactaagacagca

SEQ ID NO: 26380 - DNA, 30 bp, Artificial Sequence
  Synthetic oligonucleotide
acggtgatcgcccgacgttaacgaccagca

SEQ ID NO: 26381 - DNA, 30 bp, Artificial Sequence
  Synthetic oligonucleotide
tacaggagagaatggtggtatacagcagca

SEQ ID NO: 26382 - DNA, 30 bp, Artificial Sequence
  Synthetic oligonucleotide
ctgaggctccacgatataacggtgtcagca

SEQ ID NO: 26383 - DNA, 30 bp, Artificial Sequence
  Synthetic oligonucleotide
atacggtcaagaggtgatccagaaagagca

SEQ ID NO: 26384 - DNA, 30 bp, Artificial Sequence
  Synthetic oligonucleotide
gtgtggtaaacggccgggccgaacagagca

SEQ ID NO: 26385 - DNA, 30 bp, Artificial Sequence
  Synthetic oligonucleotide
gactgtcctagggcacgatccgatagagca

SEQ ID NO: 26386 - DNA, 30 bp, Artificial Sequence
  Synthetic oligonucleotide
agaggggggtacggcgtccaacctagagca

SEQ ID NO: 26387 - DNA, 30 bp, Artificial Sequence
  Synthetic oligonucleotide
tggtagcgaaattgccaagccgggcgagca

SEQ ID NO: 26388 - DNA, 30 bp, Artificial Sequence
  Synthetic oligonucleotide
aaggtacttgggaaaaaaaagtgaggagca

SEQ ID NO: 26389 - DNA, 30 bp, Artificial Sequence
  Synthetic oligonucleotide
aggtcgggaatccaattacgcgagtgagca

SEQ ID NO: 26390 - DNA, 30 bp, Artificial Sequence
  Synthetic oligonucleotide
tcgtgtggagggagctggaatcgaatagca

SEQ ID NO: 26391 - DNA, 30 bp, Artificial Sequence
  Synthetic oligonucleotide
tgtccagagacgtgaagaaagaatgtagca

SEQ ID NO: 26392 - DNA, 30 bp, Artificial Sequence
  Synthetic oligonucleotide
acagcaaggggaaataggccacacttagca

SEQ ID NO: 26393 - DNA, 30 bp, Artificial Sequence
  Synthetic oligonucleotide
cgataaggcgagagaagcagggcgttagca

SEQ ID NO: 26394 - DNA, 35 bp, Artificial Sequence
  Synthetic oligonucleotide
gcgacagggcgacagaaagcacccgcgcacacgca

SEQ ID NO: 26395 - DNA, 30 bp, Artificial Sequence
  Synthetic oligonucleotide
agagcgtaagggtgcatagtcagttacgca

SEQ ID NO: 26396 - DNA, 30 bp, Artificial Sequence
  Synthetic oligonucleotide
aatcgagaagatcacataacatagaccgca

SEQ ID NO: 26397 - DNA, 30 bp, Artificial Sequence
  Synthetic oligonucleotide
tggctacgtgcaccagcggcaagaagcgca

SEQ ID NO: 26398 - DNA, 30 bp, Artificial Sequence
  Synthetic oligonucleotide
cgttaagctagtggctcaatcaagcgcgca

SEQ ID NO: 26399 - DNA, 30 bp, Artificial Sequence
  Synthetic oligonucleotide
cgggcagccaacctgcaaatgagcggcgca

SEQ ID NO: 26400 - DNA, 30 bp, Artificial Sequence
  Synthetic oligonucleotide
cctaacctcagaagattaggaactatcgca

SEQ ID NO: 26401 - DNA, 30 bp, Artificial Sequence
  Synthetic oligonucleotide
tcgtctaaagccataggagctgagaaggca

SEQ ID NO: 26402 - DNA, 30 bp, Artificial Sequence
  Synthetic oligonucleotide
ggaggcgtcgatgttttagcagatcaggca

SEQ ID NO: 26403 - DNA, 30 bp, Artificial Sequence
  Synthetic oligonucleotide
cgttgcatagggtgggaatgcaaagaggca

SEQ ID NO: 26404 - DNA, 30 bp, Artificial Sequence
  Synthetic oligonucleotide
ctagtgaaggtgatatcgtccaagtcggca

SEQ ID NO: 26405 - DNA, 30 bp, Artificial Sequence
  Synthetic oligonucleotide
agccataaaaggatccaattaccaggggca

SEQ ID NO: 26406 - DNA, 30 bp, Artificial Sequence
  Synthetic oligonucleotide
caggagattaagtccggtatatgaggggca

SEQ ID NO: 26407 - DNA, 30 bp, Artificial Sequence
  Synthetic oligonucleotide
ggaggccgggacattagcctaaatatggca

SEQ ID NO: 26408 - DNA, 30 bp, Artificial Sequence
  Synthetic oligonucleotide
gagagcaggatgttatgcaaccaggtggca

SEQ ID NO: 26409 - DNA, 30 bp, Artificial Sequence
  Synthetic oligonucleotide
agggcggatgggagatgagcaagatctgca

SEQ ID NO: 26410 - DNA, 30 bp, Artificial Sequence
  Synthetic oligonucleotide
cacaggctaatagcgcactacgaaagtgca

SEQ ID NO: 26411 - DNA, 30 bp, Artificial Sequence
  Synthetic oligonucleotide
tacgtgaaagagacaatgttcgcgtgtgca

SEQ ID NO: 26412 - DNA, 30 bp, Artificial Sequence
  Synthetic oligonucleotide
caagaaatattgagcagacaggaacttgca

SEQ ID NO: 26413 - DNA, 30 bp, Artificial Sequence
  Synthetic oligonucleotide
ggaacaatacgagtaaagtgaagcgaatca

SEQ ID NO: 26414 - DNA, 30 bp, Artificial Sequence
  Synthetic oligonucleotide
agcttgtgacagctaacatacgtggaatca

SEQ ID NO: 26415 - DNA, 30 bp, Artificial Sequence
  Synthetic oligonucleotide
tcttagtgcaggccaagtgaggctcgatca

SEQ ID NO: 26416 - DNA, 30 bp, Artificial Sequence
  Synthetic oligonucleotide
agaaacgctccgtaccagaagaccgtatca

SEQ ID NO: 26417 - DNA, 31 bp, Artificial Sequence
  Synthetic oligonucleotide
tcctccgtgggcagcacagagtcagcagtca

SEQ ID NO: 26418 - DNA, 30 bp, Artificial Sequence
  Synthetic oligonucleotide
cgtagagttagaaagatgggtcagccgtca

SEQ ID NO: 26419 - DNA, 30 bp, Artificial Sequence
  Synthetic oligonucleotide
cgtattaattaacactcatcatctccgtca

SEQ ID NO: 26420 - DNA, 40 bp, Artificial Sequence
  Synthetic oligonucleotide
tggtaaggagggtcaccgacgtcgcgccgtttctgcgtca

SEQ ID NO: 26421 - DNA, 30 bp, Artificial Sequence
  Synthetic oligonucleotide
tgggccaccataataggttagcgagggtca

SEQ ID NO: 26422 - DNA, 30 bp, Artificial Sequence
  Synthetic oligonucleotide
gcagtgcgcaggtgatggaacgtcatgtca

SEQ ID NO: 26423 - DNA, 30 bp, Artificial Sequence
  Synthetic oligonucleotide
cgcgtggaacacacggccaaaaacgtgtca

SEQ ID NO: 26424 - DNA, 30 bp, Artificial Sequence
  Synthetic oligonucleotide
tcaggattggtaatcgaataggaggattca

SEQ ID NO: 26425 - DNA, 30 bp, Artificial Sequence
  Synthetic oligonucleotide
acaggacctggccagaagagagaaccttca

SEQ ID NO: 26426 - DNA, 30 bp, Artificial Sequence
  Synthetic oligonucleotide
acacgagactcgtacaacaagcactcttca

SEQ ID NO: 26427 - DNA, 30 bp, Artificial Sequence
  Synthetic oligonucleotide
gaacgaggctgtcactgagtcgtgagttca

SEQ ID NO: 26428 - DNA, 30 bp, Artificial Sequence
  Synthetic oligonucleotide
gctaacgagcgcggtaaggtagccaaaaga

SEQ ID NO: 26429 - DNA, 30 bp, Artificial Sequence
  Synthetic oligonucleotide
caagtcgctaaaagtgaaactagggaaaga

SEQ ID NO: 26430 - DNA, 30 bp, Artificial Sequence
  Synthetic oligonucleotide
tgtagtcatcggaataaagggggggaaaga

SEQ ID NO: 26431 - DNA, 30 bp, Artificial Sequence
  Synthetic oligonucleotide
agatctaagggtggggaatcgttgtaaaga

SEQ ID NO: 26432 - DNA, 30 bp, Artificial Sequence
  Synthetic oligonucleotide
cgtctgcgcagagaaggtagtactccaaga

SEQ ID NO: 26433 - DNA, 30 bp, Artificial Sequence
  Synthetic oligonucleotide
catggacacaggaatgacctagagggaaga

SEQ ID NO: 26434 - DNA, 30 bp, Artificial Sequence
  Synthetic oligonucleotide
cgaacatgtacgagcgagatcggcctaaga

SEQ ID NO: 26435 - DNA, 30 bp, Artificial Sequence
  Synthetic oligonucleotide
ctacaaagaggagacaactggccagtaaga

SEQ ID NO: 26436 - DNA, 30 bp, Artificial Sequence
  Synthetic oligonucleotide
ggccgaaaaaggagctctgggcccgtaaga

SEQ ID NO: 26437 - DNA, 30 bp, Artificial Sequence
  Synthetic oligonucleotide
cgaactgtggaatgtgcaagactcttaaga

SEQ ID NO: 26438 - DNA, 30 bp, Artificial Sequence
  Synthetic oligonucleotide
ctgtctgtaggacgatgtgcgcaaaacaga

SEQ ID NO: 26439 - DNA, 30 bp, Artificial Sequence
  Synthetic oligonucleotide
tatcggccaatacccgttgcggaaaacaga

SEQ ID NO: 26440 - DNA, 30 bp, Artificial Sequence
  Synthetic oligonucleotide
ctcggacttgataacaacggcttaaacaga

SEQ ID NO: 26441 - DNA, 29 bp, Artificial Sequence
  Synthetic oligonucleotide
atatacgtacatgactctaagagaacaga

SEQ ID NO: 26442 - DNA, 30 bp, Artificial Sequence
  Synthetic oligonucleotide
acatgaccaggctcaaccgggcataacaga

SEQ ID NO: 26443 - DNA, 30 bp, Artificial Sequence
  Synthetic oligonucleotide
catgtaagccttatcgtactagaccacaga

SEQ ID NO: 26444 - DNA, 30 bp, Artificial Sequence
  Synthetic oligonucleotide
ggggaacggttgcgagggcaaagccacaga

SEQ ID NO: 26445 - DNA, 30 bp, Artificial Sequence
  Synthetic oligonucleotide
gttaaagaactgaaaatacggcatcacaga

SEQ ID NO: 26446 - DNA, 30 bp, Artificial Sequence
  Synthetic oligonucleotide
agttccaatgatagtattaacggcgacaga

SEQ ID NO: 26447 - DNA, 30 bp, Artificial Sequence
  Synthetic oligonucleotide
ctgaaggactagtggggtcttaactacaga

SEQ ID NO: 26448 - DNA, 30 bp, Artificial Sequence
  Synthetic oligonucleotide
acaggtgaaacaatggtatagtgctacaga

SEQ ID NO: 26449 - DNA, 30 bp, Artificial Sequence
  Synthetic oligonucleotide
acgacgacaggagcaacctacatttacaga

SEQ ID NO: 26450 - DNA, 30 bp, Artificial Sequence
  Synthetic oligonucleotide
aaccaccaccccacggtgatacaaaccaga

SEQ ID NO: 26451 - DNA, 30 bp, Artificial Sequence
  Synthetic oligonucleotide
atcgaggcttgacaagttaacgcacccaga

SEQ ID NO: 26452 - DNA, 30 bp, Artificial Sequence
  Synthetic oligonucleotide
tcctaaggtgggtactaaatagtccgcaga

SEQ ID NO: 26453 - DNA, 30 bp, Artificial Sequence
  Synthetic oligonucleotide
atacagaaggatgtacattatactggcaga

SEQ ID NO: 26454 - DNA, 30 bp, Artificial Sequence
  Synthetic oligonucleotide
gcggaatggaacaattaacggacctgcaga

SEQ ID NO: 26455 - DNA, 30 bp, Artificial Sequence
  Synthetic oligonucleotide
tgcaagagaaaaccgcgagcgaccatcaga

SEQ ID NO: 26456 - DNA, 30 bp, Artificial Sequence
  Synthetic oligonucleotide
taagaggaaaagctcagttgtcgaaagaga

SEQ ID NO: 26457 - DNA, 30 bp, Artificial Sequence
  Synthetic oligonucleotide
aagtagctaaggggcaaagttccgaagaga

SEQ ID NO: 26458 - DNA, 30 bp, Artificial Sequence
  Synthetic oligonucleotide
ccacggatactcattttaatgaaccagaga

SEQ ID NO: 26459 - DNA, 30 bp, Artificial Sequence
  Synthetic oligonucleotide
cagggggcgaggtcttacataggccagaga

SEQ ID NO: 26460 - DNA, 30 bp, Artificial Sequence
  Synthetic oligonucleotide
gcttgaaagtctgtcggtagacctgagaga

SEQ ID NO: 26461 - DNA, 30 bp, Artificial Sequence
  Synthetic oligonucleotide
ggtcacaggttgtagaaatcatgttagaga

SEQ ID NO: 26462 - DNA, 30 bp, Artificial Sequence
  Synthetic oligonucleotide
acataaaggaccccctcacgattagcgaga

SEQ ID NO: 26463 - DNA, 30 bp, Artificial Sequence
  Synthetic oligonucleotide
gcgtaagctatagatgttttgcgaaggaga

SEQ ID NO: 26464 - DNA, 30 bp, Artificial Sequence
  Synthetic oligonucleotide
tgacgcaaaaaccgcgaaataacgaggaga

SEQ ID NO: 26465 - DNA, 30 bp, Artificial Sequence
  Synthetic oligonucleotide
gaaccaacggaaaaattattatataggaga

SEQ ID NO: 26466 - DNA, 30 bp, Artificial Sequence
  Synthetic oligonucleotide
gcgctgatcgtaaatatgctctgagtgaga

SEQ ID NO: 26467 - DNA, 30 bp, Artificial Sequence
  Synthetic oligonucleotide
aacgtatacagggtgtaaataagcgtgaga

SEQ ID NO: 26468 - DNA, 30 bp, Artificial Sequence
  Synthetic oligonucleotide
aaggtgaatgattttgccggaatggtgaga

SEQ ID NO: 26469 - DNA, 30 bp, Artificial Sequence
  Synthetic oligonucleotide
cgcgaacggccatgggaggaaatcaataga

SEQ ID NO: 26470 - DNA, 30 bp, Artificial Sequence
  Synthetic oligonucleotide
ccgctatttccagtgtgagacaataataga

SEQ ID NO: 26471 - DNA, 30 bp, Artificial Sequence
  Synthetic oligonucleotide
caagcaagggtcagcccaatagaacataga

SEQ ID NO: 26472 - DNA, 30 bp, Artificial Sequence
  Synthetic oligonucleotide
tggctaaacgagtgagggatgaggtataga

SEQ ID NO: 26473 - DNA, 30 bp, Artificial Sequence
  Synthetic oligonucleotide
atgaggaccaaatgctataggccaagtaga

SEQ ID NO: 26474 - DNA, 30 bp, Artificial Sequence
  Synthetic oligonucleotide
tcagcgcaggatcagagcggactaagtaga

SEQ ID NO: 26475 - DNA, 30 bp, Artificial Sequence
  Synthetic oligonucleotide
ctagaacaatggatagcgcatagccgtaga

SEQ ID NO: 26476 - DNA, 30 bp, Artificial Sequence
  Synthetic oligonucleotide
gcgatcgagagagaccctagggatattaga

SEQ ID NO: 26477 - DNA, 30 bp, Artificial Sequence
  Synthetic oligonucleotide
gtgggaagtgacaattactagagtaaacga

SEQ ID NO: 26478 - DNA, 30 bp, Artificial Sequence
  Synthetic oligonucleotide
cccaagacagatggataaagctctcaacga

SEQ ID NO: 26479 - DNA, 30 bp, Artificial Sequence
  Synthetic oligonucleotide
gcacgatgatcagccaaaagctactaacga

SEQ ID NO: 26480 - DNA, 30 bp, Artificial Sequence
  Synthetic oligonucleotide
aggctttgagtacagcgaagggaaccacga

SEQ ID NO: 26481 - DNA, 30 bp, Artificial Sequence
  Synthetic oligonucleotide
gtgcactcgaggggaggccagttcggacga

SEQ ID NO: 26482 - DNA, 30 bp, Artificial Sequence
  Synthetic oligonucleotide
cgcacggactagagtaagtatcacgtacga

SEQ ID NO: 26483 - DNA, 30 bp, Artificial Sequence
  Synthetic oligonucleotide
cggtagaacgcattataggagagattacga

SEQ ID NO: 26484 - DNA, 30 bp, Artificial Sequence
  Synthetic oligonucleotide
cgtgcagatcaaaggaggccaaacacccga

SEQ ID NO: 26485 - DNA, 30 bp, Artificial Sequence
  Synthetic oligonucleotide
acgctcgaggcaaaaatcgaagtgggccga

SEQ ID NO: 26486 - DNA, 30 bp, Artificial Sequence
  Synthetic oligonucleotide
cgaatggtaggagcgtcccccagcatccga

SEQ ID NO: 26487 - DNA, 30 bp, Artificial Sequence
  Synthetic oligonucleotide
actaggtaagaagggtgagctcggctccga

SEQ ID NO: 26488 - DNA, 30 bp, Artificial Sequence
  Synthetic oligonucleotide
gaggagaagaccggccgaaccccaaagcga

SEQ ID NO: 26489 - DNA, 30 bp, Artificial Sequence
  Synthetic oligonucleotide
atgcctatggaatcaggcaacagagagcga

SEQ ID NO: 26490 - DNA, 30 bp, Artificial Sequence
  Synthetic oligonucleotide
ggagcacgaaaagaagtactcgcaacgcga

SEQ ID NO: 26491 - DNA, 30 bp, Artificial Sequence
  Synthetic oligonucleotide
aagggggataagaacacgaaccagccgcga

SEQ ID NO: 26492 - DNA, 29 bp, Artificial Sequence
  Synthetic oligonucleotide
aggaagaggagttgagcaatggcgcgcga

SEQ ID NO: 26493 - DNA, 30 bp, Artificial Sequence
  Synthetic oligonucleotide
ggaggtgagataacgaaagggcctgggcga

SEQ ID NO: 26494 - DNA, 30 bp, Artificial Sequence
  Synthetic oligonucleotide
gatggcccaagtcaagggagctaactgcga

SEQ ID NO: 26495 - DNA, 30 bp, Artificial Sequence
  Synthetic oligonucleotide
gtgaggtctgctgggtgtggactgagtcga

SEQ ID NO: 26496 - DNA, 30 bp, Artificial Sequence
  Synthetic oligonucleotide
aggcagatcacgcgtggcgacgatagtcga

SEQ ID NO: 26497 - DNA, 30 bp, Artificial Sequence
  Synthetic oligonucleotide
agtcgataaggccaaacatggcgtggtcga

SEQ ID NO: 26498 - DNA, 30 bp, Artificial Sequence
  Synthetic oligonucleotide
gtaggtccagactaatgccgaaagattcga

SEQ ID NO: 26499 - DNA, 30 bp, Artificial Sequence
  Synthetic oligonucleotide
tggtcaggaacgtgcccagaagtgcttcga

SEQ ID NO: 26500 - DNA, 30 bp, Artificial Sequence
  Synthetic oligonucleotide
acatgcgtcaacgacccactgatgaaagga

SEQ ID NO: 26501 - DNA, 30 bp, Artificial Sequence
  Synthetic oligonucleotide
ggagagagggttaatatggatcgtaaagga

SEQ ID NO: 26502 - DNA, 30 bp, Artificial Sequence
  Synthetic oligonucleotide
taagggtctgagagcgtgagtacgcaagga

SEQ ID NO: 26503 - DNA, 30 bp, Artificial Sequence
  Synthetic oligonucleotide
tgagggtggtgaggtcgtagcccggaagga

SEQ ID NO: 26504 - DNA, 30 bp, Artificial Sequence
  Synthetic oligonucleotide
cacgattgtgcgacgactaagaatacagga

SEQ ID NO: 26505 - DNA, 30 bp, Artificial Sequence
  Synthetic oligonucleotide
gcggataagcttgccatccttgttacagga

SEQ ID NO: 26506 - DNA, 30 bp, Artificial Sequence
  Synthetic oligonucleotide
atacgagcacaatatgctcaagggtcagga

SEQ ID NO: 26507 - DNA, 30 bp, Artificial Sequence
  Synthetic oligonucleotide
ggtttcaagaatcgagagttaacaagagga

SEQ ID NO: 26508 - DNA, 30 bp, Artificial Sequence
  Synthetic oligonucleotide
atcgtcatcgggaagtgcacgggtcgagga

SEQ ID NO: 26509 - DNA, 30 bp, Artificial Sequence
  Synthetic oligonucleotide
agcatcaggtattgacaaagagaaggagga

SEQ ID NO: 26510 - DNA, 30 bp, Artificial Sequence
  Synthetic oligonucleotide
tggaacagataggtgtgaacatattgagga

SEQ ID NO: 26511 - DNA, 30 bp, Artificial Sequence
  Synthetic oligonucleotide
gaaacgccgaatctgagtgctagttgagga

SEQ ID NO: 26512 - DNA, 30 bp, Artificial Sequence
  Synthetic oligonucleotide
tcggaaaggtctatttacacgattatagga

SEQ ID NO: 26513 - DNA, 30 bp, Artificial Sequence
  Synthetic oligonucleotide
aatgccaaaatagcccaagatgacaacgga

SEQ ID NO: 26514 - DNA, 30 bp, Artificial Sequence
  Synthetic oligonucleotide
cagcgagtgcaacactcaaaatgcgacgga

SEQ ID NO: 26515 - DNA, 30 bp, Artificial Sequence
  Synthetic oligonucleotide
gaacatgaaaacatgggagtaaccgccgga

SEQ ID NO: 26516 - DNA, 30 bp, Artificial Sequence
  Synthetic oligonucleotide
gtggatacaagacaactcactgcatccgga

SEQ ID NO: 26517 - DNA, 30 bp, Artificial Sequence
  Synthetic oligonucleotide
gctgctggatacaccgtacacatctgcgga

SEQ ID NO: 26518 - DNA, 30 bp, Artificial Sequence
  Synthetic oligonucleotide
acggggttagccagtcgtcgtcaaatcgga

SEQ ID NO: 26519 - DNA, 30 bp, Artificial Sequence
  Synthetic oligonucleotide
catttaagcagatagcaactacacatcgga

SEQ ID NO: 26520 - DNA, 30 bp, Artificial Sequence
  Synthetic oligonucleotide
cgtggtaagcttggaacagccattatcgga

SEQ ID NO: 26521 - DNA, 30 bp, Artificial Sequence
  Synthetic oligonucleotide
tgaaagttggatacgaagtgtgtggtcgga

SEQ ID NO: 26522 - DNA, 30 bp, Artificial Sequence
  Synthetic oligonucleotide
tcgaacagccgtgatgaactacaaccggga

SEQ ID NO: 26523 - DNA, 30 bp, Artificial Sequence
  Synthetic oligonucleotide
gtagccagattaacaggtcacaaatcggga

SEQ ID NO: 26524 - DNA, 30 bp, Artificial Sequence
  Synthetic oligonucleotide
attcgcacggataaacgggatagaagggga

SEQ ID NO: 26525 - DNA, 30 bp, Artificial Sequence
  Synthetic oligonucleotide
atacgaggtggtcgaataggatacggggga

SEQ ID NO: 26526 - DNA, 40 bp, Artificial Sequence
  Synthetic oligonucleotide
aagataattcattcatggtatggtcggggatcggggggga

SEQ ID NO: 26527 - DNA, 30 bp, Artificial Sequence
  Synthetic oligonucleotide
ccatagggctacaggcgtacatagtgggga

SEQ ID NO: 26528 - DNA, 30 bp, Artificial Sequence
  Synthetic oligonucleotide
ggaaaaaagatctcaagatagttgctggga

SEQ ID NO: 26529 - DNA, 30 bp, Artificial Sequence
  Synthetic oligonucleotide
tctcgagtagagaagtcagcatagcatgga

SEQ ID NO: 26530 - DNA, 30 bp, Artificial Sequence
  Synthetic oligonucleotide
catgaggcgatgggggtaaccttaactgga

SEQ ID NO: 26531 - DNA, 30 bp, Artificial Sequence
  Synthetic oligonucleotide
ccgtggactcactatgcctcaaaacctgga

SEQ ID NO: 26532 - DNA, 30 bp, Artificial Sequence
  Synthetic oligonucleotide
aacgtcgaccccggagtagagctcagtgga

SEQ ID NO: 26533 - DNA, 30 bp, Artificial Sequence
  Synthetic oligonucleotide
atggctggtccgaaaaatgctagccttgga

SEQ ID NO: 26534 - DNA, 30 bp, Artificial Sequence
  Synthetic oligonucleotide
taccagcagatacaaagacagtccaaatga

SEQ ID NO: 26535 - DNA, 30 bp, Artificial Sequence
  Synthetic oligonucleotide
caagagccaaaggtggaattctcgaaatga

SEQ ID NO: 26536 - DNA, 30 bp, Artificial Sequence
  Synthetic oligonucleotide
ttgtgatgggaatgaatacacaaagaatga

SEQ ID NO: 26537 - DNA, 30 bp, Artificial Sequence
  Synthetic oligonucleotide
cgggtgaatgccatgcgcgtctacgaatga

SEQ ID NO: 26538 - DNA, 30 bp, Artificial Sequence
  Synthetic oligonucleotide
agcagcgaatggcgacgtcgtcaggaatga

SEQ ID NO: 26539 - DNA, 30 bp, Artificial Sequence
  Synthetic oligonucleotide
taggtggtaggcgtgtaatgaggatcatga

SEQ ID NO: 26540 - DNA, 30 bp, Artificial Sequence
  Synthetic oligonucleotide
tcacaatcgaggtgttcagcattaagatga

SEQ ID NO: 26541 - DNA, 30 bp, Artificial Sequence
  Synthetic oligonucleotide
gggtgtatagaagagtgcgttatcggatga

SEQ ID NO: 26542 - DNA, 30 bp, Artificial Sequence
  Synthetic oligonucleotide
gaccaccaaaatgccaacaatgtgctatga

SEQ ID NO: 26543 - DNA, 30 bp, Artificial Sequence
  Synthetic oligonucleotide
tcgtcgaaggagaataagatgaaattatga

SEQ ID NO: 26544 - DNA, 30 bp, Artificial Sequence
  Synthetic oligonucleotide
gatgggcaagatatggacacgagcgcctga

SEQ ID NO: 26545 - DNA, 30 bp, Artificial Sequence
  Synthetic oligonucleotide
atgaattaagatgcgagagccaaggcctga

SEQ ID NO: 26546 - DNA, 30 bp, Artificial Sequence
  Synthetic oligonucleotide
gcacaacccgatgttggtaggtgaggctga

SEQ ID NO: 26547 - DNA, 30 bp, Artificial Sequence
  Synthetic oligonucleotide
tatcgccgttcaaggagcaagaccgtctga

SEQ ID NO: 26548 - DNA, 30 bp, Artificial Sequence
  Synthetic oligonucleotide
gctgatggaaaacactcaagcagaaagtga

SEQ ID NO: 26549 - DNA, 30 bp, Artificial Sequence
  Synthetic oligonucleotide
cgttcaccggaccataagcagatgaagtga

SEQ ID NO: 26550 - DNA, 30 bp, Artificial Sequence
  Synthetic oligonucleotide
tcgattccacaggtgtacggtaaggggtga

SEQ ID NO: 26551 - DNA, 30 bp, Artificial Sequence
  Synthetic oligonucleotide
tgtgattaacagagcgtagagtagctgtga

SEQ ID NO: 26552 - DNA, 30 bp, Artificial Sequence
  Synthetic oligonucleotide
cgataccgaggatcgccagaagtgttgtga

SEQ ID NO: 26553 - DNA, 30 bp, Artificial Sequence
  Synthetic oligonucleotide
acggcaattcaggagccgagctgcgattga

SEQ ID NO: 26554 - DNA, 30 bp, Artificial Sequence
  Synthetic oligonucleotide
gactaaaaaagagatctaaatagggattga

SEQ ID NO: 26555 - DNA, 30 bp, Artificial Sequence
  Synthetic oligonucleotide
cctaggggtgagatcatagaaatgcaaata

SEQ ID NO: 26556 - DNA, 30 bp, Artificial Sequence
  Synthetic oligonucleotide
aggggtacgccgtcggctagttatcaaata

SEQ ID NO: 26557 - DNA, 31 bp, Artificial Sequence
  Synthetic oligonucleotide
agctaggagggcactgatggaaccggaaata

SEQ ID NO: 26558 - DNA, 30 bp, Artificial Sequence
  Synthetic oligonucleotide
agcacacaagttgggatggataatggaata

SEQ ID NO: 26559 - DNA, 30 bp, Artificial Sequence
  Synthetic oligonucleotide
tctgtagaaacgaaagtcgaaatggccata

SEQ ID NO: 26560 - DNA, 30 bp, Artificial Sequence
  Synthetic oligonucleotide
gccaataagagaattgggaaaccaagcata

SEQ ID NO: 26561 - DNA, 30 bp, Artificial Sequence
  Synthetic oligonucleotide
taagtcggaaaccgatgggggcgaagcata

SEQ ID NO: 26562 - DNA, 30 bp, Artificial Sequence
  Synthetic oligonucleotide
gacggcggcaaaacaatttagcagagcata

SEQ ID NO: 26563 - DNA, 30 bp, Artificial Sequence
  Synthetic oligonucleotide
agatctgctccgagaatatctaaaggcata

SEQ ID NO: 26564 - DNA, 30 bp, Artificial Sequence
  Synthetic oligonucleotide
ggctgaaatgaatgtatgttgagtggcata

SEQ ID NO: 26565 - DNA, 30 bp, Artificial Sequence
  Synthetic oligonucleotide
catgggacccgaagttccagaacaaagata

SEQ ID NO: 26566 - DNA, 30 bp, Artificial Sequence
  Synthetic oligonucleotide
ggagacaaccgcaaatacacaaaccagata

SEQ ID NO: 26567 - DNA, 30 bp, Artificial Sequence
  Synthetic oligonucleotide
aaggcaacaactggcacacgttactagata

SEQ ID NO: 26568 - DNA, 30 bp, Artificial Sequence
  Synthetic oligonucleotide
atacccgagtagtgaaacggaaaaacgata

SEQ ID NO: 26569 - DNA, 30 bp, Artificial Sequence
  Synthetic oligonucleotide
cgggattgtagccaatcgaaggaacggata

SEQ ID NO: 26570 - DNA, 30 bp, Artificial Sequence
  Synthetic oligonucleotide
acacatactcgatgccgattgtcgatgata

SEQ ID NO: 26571 - DNA, 30 bp, Artificial Sequence
  Synthetic oligonucleotide
cacggcaatggaagctgtcaccattctata

SEQ ID NO: 26572 - DNA, 30 bp, Artificial Sequence
  Synthetic oligonucleotide
acggacaggaatgtagggagtcccgttata

SEQ ID NO: 26573 - DNA, 30 bp, Artificial Sequence
  Synthetic oligonucleotide
gggcctgaatcaaagtagcaatgtgaacta

SEQ ID NO: 26574 - DNA, 30 bp, Artificial Sequence
  Synthetic oligonucleotide
caacgctggattataaccgtatacacacta

SEQ ID NO: 26575 - DNA, 30 bp, Artificial Sequence
  Synthetic oligonucleotide
tgagaagtgagacatccactacatacacta

SEQ ID NO: 26576 - DNA, 30 bp, Artificial Sequence
  Synthetic oligonucleotide
ccaacggatgaacgatttagaactgcacta

SEQ ID NO: 26577 - DNA, 30 bp, Artificial Sequence
  Synthetic oligonucleotide
ctgacccacgtacgaaaagcggctggacta

SEQ ID NO: 26578 - DNA, 30 bp, Artificial Sequence
  Synthetic oligonucleotide
atgacaacggaagtggaataaggcgaccta

SEQ ID NO: 26579 - DNA, 30 bp, Artificial Sequence
  Synthetic oligonucleotide
cgtgataagggaagcggcttacatgcccta

SEQ ID NO: 26580 - DNA, 30 bp, Artificial Sequence
  Synthetic oligonucleotide
aggccaaatgcgtaagagtgtacacagcta

SEQ ID NO: 26581 - DNA, 30 bp, Artificial Sequence
  Synthetic oligonucleotide
ggcaaacgccggacgacgatgtaagcgcta

SEQ ID NO: 26582 - DNA, 30 bp, Artificial Sequence
  Synthetic oligonucleotide
acgtagacccggaaacaacatgcagtgcta

SEQ ID NO: 26583 - DNA, 30 bp, Artificial Sequence
  Synthetic oligonucleotide
ggcgacatactgcttcaactgtacactcta

SEQ ID NO: 26584 - DNA, 30 bp, Artificial Sequence
  Synthetic oligonucleotide
gtgcgataggggctacgggaccagcgtcta

SEQ ID NO: 26585 - DNA, 30 bp, Artificial Sequence
  Synthetic oligonucleotide
gaaccagtggcggcaaccaggtgcaaagta

SEQ ID NO: 26586 - DNA, 30 bp, Artificial Sequence
  Synthetic oligonucleotide
caatgaagtggaaggcgtagaccttaagta

SEQ ID NO: 26587 - DNA, 30 bp, Artificial Sequence
  Synthetic oligonucleotide
aggaatactaaccactgaagacctacagta

SEQ ID NO: 26588 - DNA, 29 bp, Artificial Sequence
  Synthetic oligonucleotide
gcactgaagacgtgaattgtagagcagta

SEQ ID NO: 26589 - DNA, 30 bp, Artificial Sequence
  Synthetic oligonucleotide
ataagaaccgggaaaggagatgggagagta

SEQ ID NO: 26590 - DNA, 30 bp, Artificial Sequence
  Synthetic oligonucleotide
gtccaagagcggcgccccccaaggcgagta

SEQ ID NO: 26591 - DNA, 30 bp, Artificial Sequence
  Synthetic oligonucleotide
agtcaagactgggaacaacctaacggagta

SEQ ID NO: 26592 - DNA, 30 bp, Artificial Sequence
  Synthetic oligonucleotide
acggtgattgccggagttgcgactggagta

SEQ ID NO: 26593 - DNA, 30 bp, Artificial Sequence
  Synthetic oligonucleotide
cgttcattataagagagatcggaatgagta

SEQ ID NO: 26594 - DNA, 30 bp, Artificial Sequence
  Synthetic oligonucleotide
agcgatagctagtgcggataaaacatagta

SEQ ID NO: 26595 - DNA, 30 bp, Artificial Sequence
  Synthetic oligonucleotide
cggatcgatggcgaccaacctgtactagta

SEQ ID NO: 26596 - DNA, 30 bp, Artificial Sequence
  Synthetic oligonucleotide
ggagggcagaatgggacggtcggcgtagta

SEQ ID NO: 26597 - DNA, 30 bp, Artificial Sequence
  Synthetic oligonucleotide
atctcgggaccgaaaatgatgaggaacgta

SEQ ID NO: 26598 - DNA, 30 bp, Artificial Sequence
  Synthetic oligonucleotide
aaggacaatctctgaacggggtagcacgta

SEQ ID NO: 26599 - DNA, 30 bp, Artificial Sequence
  Synthetic oligonucleotide
tcagatagcaaaataggtgggaattacgta

SEQ ID NO: 26600 - DNA, 30 bp, Artificial Sequence
  Synthetic oligonucleotide
aaacatcagacacggaatattccaaccgta

SEQ ID NO: 26601 - DNA, 30 bp, Artificial Sequence
  Synthetic oligonucleotide
aaagaccaacaacgatagcaagtacgcgta

SEQ ID NO: 26602 - DNA, 30 bp, Artificial Sequence
  Synthetic oligonucleotide
cacttaattgcggtgctcgggggaggcgta

SEQ ID NO: 26603 - DNA, 30 bp, Artificial Sequence
  Synthetic oligonucleotide
ccggagagggacggataacgatatcaggta

SEQ ID NO: 26604 - DNA, 30 bp, Artificial Sequence
  Synthetic oligonucleotide
cgagcaggtctctagtgcggggaagaggta

SEQ ID NO: 26605 - DNA, 30 bp, Artificial Sequence
  Synthetic oligonucleotide
atgataagtaaaacatcatgcgacgaggta

SEQ ID NO: 26606 - DNA, 30 bp, Artificial Sequence
  Synthetic oligonucleotide
ggtgagcaaaagggcagttgtaacccggta

SEQ ID NO: 26607 - DNA, 30 bp, Artificial Sequence
  Synthetic oligonucleotide
acgcaatcgaatggcaaatctggatcggta

SEQ ID NO: 26608 - DNA, 30 bp, Artificial Sequence
  Synthetic oligonucleotide
acggggaccggagcatggagcaaaagggta

SEQ ID NO: 26609 - DNA, 30 bp, Artificial Sequence
  Synthetic oligonucleotide
cgatcggaatggcatgccgagttaagggta

SEQ ID NO: 26610 - DNA, 30 bp, Artificial Sequence
  Synthetic oligonucleotide
ggctgcgaaggaacacatattacaggggta

SEQ ID NO: 26611 - DNA, 30 bp, Artificial Sequence
  Synthetic oligonucleotide
cgatgtatcgtacagcgaaaatcaggggta

SEQ ID NO: 26612 - DNA, 29 bp, Artificial Sequence
  Synthetic oligonucleotide
agaacaggtaatacgaggtaggcaatgta

SEQ ID NO: 26613 - DNA, 30 bp, Artificial Sequence
  Synthetic oligonucleotide
gcagtgtagcccgaataggataacgatgta

SEQ ID NO: 26614 - DNA, 30 bp, Artificial Sequence
  Synthetic oligonucleotide
tgtcgtcagggcgaaggtgagtgatatgta

SEQ ID NO: 26615 - DNA, 30 bp, Artificial Sequence
  Synthetic oligonucleotide
cagggtaagaaagaactataaacaattgta

SEQ ID NO: 26616 - DNA, 30 bp, Artificial Sequence
  Synthetic oligonucleotide
taagcggtaggtgaaggcatgtgacttgta

SEQ ID NO: 26617 - DNA, 30 bp, Artificial Sequence
  Synthetic oligonucleotide
tcagtccgaggccgattagagctcgttgta

SEQ ID NO: 26618 - DNA, 30 bp, Artificial Sequence
  Synthetic oligonucleotide
aggttagctcattgaggatcacgttaatta

SEQ ID NO: 26619 - DNA, 30 bp, Artificial Sequence
  Synthetic oligonucleotide
cccagaggaactcacggccggaaccgatta

SEQ ID NO: 26620 - DNA, 30 bp, Artificial Sequence
  Synthetic oligonucleotide
catacagagtccacgcgcataacgagctta

SEQ ID NO: 26621 - DNA, 30 bp, Artificial Sequence
  Synthetic oligonucleotide
acacatgaagtaacattggctgtacagtta

SEQ ID NO: 26622 - DNA, 30 bp, Artificial Sequence
  Synthetic oligonucleotide
cgggaaaagaggctcattccttcggagtta

SEQ ID NO: 26623 - DNA, 30 bp, Artificial Sequence
  Synthetic oligonucleotide
cgagtaagagaagttgatggcggatagtta

SEQ ID NO: 26624 - DNA, 30 bp, Artificial Sequence
  Synthetic oligonucleotide
caaggcacacgtcggaagaagggtcggtta

SEQ ID NO: 26625 - DNA, 30 bp, Artificial Sequence
  Synthetic oligonucleotide
gggcaggtttgacgacaagtgcgctggtta

SEQ ID NO: 26626 - DNA, 30 bp, Artificial Sequence
  Synthetic oligonucleotide
acgcataagggagattaactgggcatgtta

SEQ ID NO: 26627 - DNA, 30 bp, Artificial Sequence
  Synthetic oligonucleotide
ggtagaccagagccgaagtgggatcaaaac

SEQ ID NO: 26628 - DNA, 30 bp, Artificial Sequence
  Synthetic oligonucleotide
cagaccaagtacgagagtacggttcaaaac

SEQ ID NO: 26629 - DNA, 30 bp, Artificial Sequence
  Synthetic oligonucleotide
caggcacataaggccagtcataaaccaaac

SEQ ID NO: 26630 - DNA, 30 bp, Artificial Sequence
  Synthetic oligonucleotide
aggggtgtagcgtgagcaactatgccaaac

SEQ ID NO: 26631 - DNA, 30 bp, Artificial Sequence
  Synthetic oligonucleotide
cgattcggaaaatgctaatccatgtcaaac

SEQ ID NO: 26632 - DNA, 30 bp, Artificial Sequence
  Synthetic oligonucleotide
cgcaccaacgaaacctagataaaaggaaac

SEQ ID NO: 26633 - DNA, 30 bp, Artificial Sequence
  Synthetic oligonucleotide
cgagacgactcttaacatactttcgtaaac

SEQ ID NO: 26634 - DNA, 30 bp, Artificial Sequence
  Synthetic oligonucleotide
tatgacgagaatcaaaacgtgcagcacaac

SEQ ID NO: 26635 - DNA, 30 bp, Artificial Sequence
  Synthetic oligonucleotide
acaccctaaacagctgcatgagggtacaac

SEQ ID NO: 26636 - DNA, 30 bp, Artificial Sequence
  Synthetic oligonucleotide
acagcaaaggaaaggcttctaagccgcaac

SEQ ID NO: 26637 - DNA, 30 bp, Artificial Sequence
  Synthetic oligonucleotide
tcagcgaaccaatggatctagccgatcaac

SEQ ID NO: 26638 - DNA, 30 bp, Artificial Sequence
  Synthetic oligonucleotide
ggacgtcgaacaacgggtagctcgctcaac

SEQ ID NO: 26639 - DNA, 30 bp, Artificial Sequence
  Synthetic oligonucleotide
gtacagaccagtcggaaaggcacaacgaac

SEQ ID NO: 26640 - DNA, 30 bp, Artificial Sequence
  Synthetic oligonucleotide
actataagacgggacaccatagaggcgaac

SEQ ID NO: 26641 - DNA, 30 bp, Artificial Sequence
  Synthetic oligonucleotide
tcgaccgagcctccagaggtacactcgaac

SEQ ID NO: 26642 - DNA, 30 bp, Artificial Sequence
  Synthetic oligonucleotide
cacggccggatcgtcaaatgggacaggaac

SEQ ID NO: 26643 - DNA, 30 bp, Artificial Sequence
  Synthetic oligonucleotide
agcaatatggaggaaatgtggaaggggaac

SEQ ID NO: 26644 - DNA, 30 bp, Artificial Sequence
  Synthetic oligonucleotide
ggcagccgaagaaaatgtatatcggggaac

SEQ ID NO: 26645 - DNA, 30 bp, Artificial Sequence
  Synthetic oligonucleotide
acgatgcggcgaggctaaacaaatgataac

SEQ ID NO: 26646 - DNA, 30 bp, Artificial Sequence
  Synthetic oligonucleotide
acgtcccgccgaggcacgggggaacgtaac

SEQ ID NO: 26647 - DNA, 30 bp, Artificial Sequence
  Synthetic oligonucleotide
gcgaagagacatctaaacgttagccgtaac

SEQ ID NO: 26648 - DNA, 30 bp, Artificial Sequence
  Synthetic oligonucleotide
tcggacattctgtgcacaggagcgacacac

SEQ ID NO: 26649 - DNA, 30 bp, Artificial Sequence
  Synthetic oligonucleotide
cgtagaagaaatccaccagactttacacac

SEQ ID NO: 26650 - DNA, 30 bp, Artificial Sequence
  Synthetic oligonucleotide
ggacatatcgcaaaattaggctgggcacac

SEQ ID NO: 26651 - DNA, 30 bp, Artificial Sequence
  Synthetic oligonucleotide
tgagaatacagaaatacgagtaagtcacac

SEQ ID NO: 26652 - DNA, 30 bp, Artificial Sequence
  Synthetic oligonucleotide
agggtcgagaggtgggcctatactgtacac

SEQ ID NO: 26653 - DNA, 30 bp, Artificial Sequence
  Synthetic oligonucleotide
gcgagggaaaattatagggaatgaccccac

SEQ ID NO: 26654 - DNA, 30 bp, Artificial Sequence
  Synthetic oligonucleotide
acagggactgatgagcgagatcacccccac

SEQ ID NO: 26655 - DNA, 30 bp, Artificial Sequence
  Synthetic oligonucleotide
acgatcaagcaggcactgttggcgccccac

SEQ ID NO: 26656 - DNA, 30 bp, Artificial Sequence
  Synthetic oligonucleotide
acgcaagagtattcagtatgtagcgcccac

SEQ ID NO: 26657 - DNA, 30 bp, Artificial Sequence
  Synthetic oligonucleotide
acgtggctgacaagtcattctgaagtccac

SEQ ID NO: 26658 - DNA, 30 bp, Artificial Sequence
  Synthetic oligonucleotide
tcgtcagatagaattcacacatggaagcac

SEQ ID NO: 26659 - DNA, 30 bp, Artificial Sequence
  Synthetic oligonucleotide
ccaagaacgtatggggccatctgtaagcac

SEQ ID NO: 26660 - DNA, 30 bp, Artificial Sequence
  Synthetic oligonucleotide
ccggaggggaggtaagcattcaatgcgcac

SEQ ID NO: 26661 - DNA, 30 bp, Artificial Sequence
  Synthetic oligonucleotide
caggggagtctgcagcatactaatcggcac

SEQ ID NO: 26662 - DNA, 30 bp, Artificial Sequence
  Synthetic oligonucleotide
agttgaataagtgataaagcatacctgcac

SEQ ID NO: 26663 - DNA, 30 bp, Artificial Sequence
  Synthetic oligonucleotide
tcataaaagcgtaaacgggtccgcgtgcac

SEQ ID NO: 26664 - DNA, 30 bp, Artificial Sequence
  Synthetic oligonucleotide
cgacctggacagtgggcatgaaggactcac

SEQ ID NO: 26665 - DNA, 30 bp, Artificial Sequence
  Synthetic oligonucleotide
aacatacgtgtcggcggccaagggagtcac

SEQ ID NO: 26666 - DNA, 30 bp, Artificial Sequence
  Synthetic oligonucleotide
agagagtccatgactaacaatggcggtcac

SEQ ID NO: 26667 - DNA, 30 bp, Artificial Sequence
  Synthetic oligonucleotide
tccgctgtaagtgcaaagacaagcaaagac

SEQ ID NO: 26668 - DNA, 30 bp, Artificial Sequence
  Synthetic oligonucleotide
gggcgtatgagatcagaggtgaatgaagac

SEQ ID NO: 26669 - DNA, 30 bp, Artificial Sequence
  Synthetic oligonucleotide
ggtacgaatgtaaccagcactgcataagac

SEQ ID NO: 26670 - DNA, 30 bp, Artificial Sequence
  Synthetic oligonucleotide
tctagaacaagctgtggtcgcgtaacagac

SEQ ID NO: 26671 - DNA, 30 bp, Artificial Sequence
  Synthetic oligonucleotide
taagaatagacttcaacgaatccgtcagac

SEQ ID NO: 26672 - DNA, 30 bp, Artificial Sequence
  Synthetic oligonucleotide
ccaggggccgcacgataacagtaacgagac

SEQ ID NO: 26673 - DNA, 30 bp, Artificial Sequence
  Synthetic oligonucleotide
tctagaggagttggatacggaaagcgagac

SEQ ID NO: 26674 - DNA, 30 bp, Artificial Sequence
  Synthetic oligonucleotide
tgcaaaaagacgaaggatggcgcactagac

SEQ ID NO: 26675 - DNA, 30 bp, Artificial Sequence
  Synthetic oligonucleotide
agtttgaagggaaaacaaagctgggacgac

SEQ ID NO: 26676 - DNA, 30 bp, Artificial Sequence
  Synthetic oligonucleotide
ccacacgtcggttggacaagagactacgac

SEQ ID NO: 26677 - DNA, 30 bp, Artificial Sequence
  Synthetic oligonucleotide
aaggcgagcgataactggttctaatgcgac

SEQ ID NO: 26678 - DNA, 30 bp, Artificial Sequence
  Synthetic oligonucleotide
gcgtgcaccggtgaagcgccagtataggac

SEQ ID NO: 26679 - DNA, 30 bp, Artificial Sequence
  Synthetic oligonucleotide
ggataataccggtcttctgctcggagggac

SEQ ID NO: 26680 - DNA, 30 bp, Artificial Sequence
  Synthetic oligonucleotide
ggcgccacgtgaccagttaaaagtagggac

SEQ ID NO: 26681 - DNA, 30 bp, Artificial Sequence
  Synthetic oligonucleotide
cgattaggtcagatctcaagtgaccgggac

SEQ ID NO: 26682 - DNA, 30 bp, Artificial Sequence
  Synthetic oligonucleotide
tcacgagtgccggcaggatagtaactggac

SEQ ID NO: 26683 - DNA, 30 bp, Artificial Sequence
  Synthetic oligonucleotide
cagggagaatccaacaggagcgaatctgac

SEQ ID NO: 26684 - DNA, 30 bp, Artificial Sequence
  Synthetic oligonucleotide
aggaactaagacgacccagatacgagtgac

SEQ ID NO: 26685 - DNA, 30 bp, Artificial Sequence
  Synthetic oligonucleotide
gtgagcggaccataatgtaggaacggtgac

SEQ ID NO: 26686 - DNA, 30 bp, Artificial Sequence
  Synthetic oligonucleotide
attgaggctcccgaacaatacatatgtgac

SEQ ID NO: 26687 - DNA, 30 bp, Artificial Sequence
  Synthetic oligonucleotide
aggcaagggcagaattgtaacggttcatac

SEQ ID NO: 26688 - DNA, 30 bp, Artificial Sequence
  Synthetic oligonucleotide
agggcaagtctgcgaagcgccggatgatac

SEQ ID NO: 26689 - DNA, 30 bp, Artificial Sequence
  Synthetic oligonucleotide
cgccgtgagagaaggtaaagggcaggctac

SEQ ID NO: 26690 - DNA, 30 bp, Artificial Sequence
  Synthetic oligonucleotide
gcagaagacagggatggggctgagaagtac

SEQ ID NO: 26691 - DNA, 30 bp, Artificial Sequence
  Synthetic oligonucleotide
cacacatcttagagaccacctttcaggtac

SEQ ID NO: 26692 - DNA, 30 bp, Artificial Sequence
  Synthetic oligonucleotide
cgaggtgtgagcttctaggtcggattgtac

SEQ ID NO: 26693 - DNA, 30 bp, Artificial Sequence
  Synthetic oligonucleotide
tagggcaaaggcatacaaactagggcttac

SEQ ID NO: 26694 - DNA, 30 bp, Artificial Sequence
  Synthetic oligonucleotide
cacatgaaggtcaagtatagatctcgttac

SEQ ID NO: 26695 - DNA, 30 bp, Artificial Sequence
  Synthetic oligonucleotide
gtggcctcagggagcaacctaaagtaaacc

SEQ ID NO: 26696 - DNA, 30 bp, Artificial Sequence
  Synthetic oligonucleotide
taaccacgaaggtgtaataggaccagaacc

SEQ ID NO: 26697 - DNA, 30 bp, Artificial Sequence
  Synthetic oligonucleotide
tagtgcaatgtcgataagcaacatctaacc

SEQ ID NO: 26698 - DNA, 30 bp, Artificial Sequence
  Synthetic oligonucleotide
ggaagacatccactccgtgcgcaaccgacc

SEQ ID NO: 26699 - DNA, 30 bp, Artificial Sequence
  Synthetic oligonucleotide
gcgagggcacaggaaaatctctcggcgacc

SEQ ID NO: 26700 - DNA, 30 bp, Artificial Sequence
  Synthetic oligonucleotide
ccactgaacaccacacccgagctgatgacc

SEQ ID NO: 26701 - DNA, 30 bp, Artificial Sequence
  Synthetic oligonucleotide
tcggaacagccagaatatactatagtgacc

SEQ ID NO: 26702 - DNA, 30 bp, Artificial Sequence
  Synthetic oligonucleotide
tcacggggaatacgaagataatgattgacc

SEQ ID NO: 26703 - DNA, 30 bp, Artificial Sequence
  Synthetic oligonucleotide
cttacacgaacaccatctaagagagctacc

SEQ ID NO: 26704 - DNA, 30 bp, Artificial Sequence
  Synthetic oligonucleotide
cgatacgtgaagtgagtacaacacaaaccc

SEQ ID NO: 26705 - DNA, 30 bp, Artificial Sequence
  Synthetic oligonucleotide
caaataagagaaaaaattctaccgcacccc

SEQ ID NO: 26706 - DNA, 30 bp, Artificial Sequence
  Synthetic oligonucleotide
gcaaaaaagcaaccaggtgaacgatccccc

SEQ ID NO: 26707 - DNA, 30 bp, Artificial Sequence
  Synthetic oligonucleotide
actacgtcactcgtatgcccaacaaagccc

SEQ ID NO: 26708 - DNA, 30 bp, Artificial Sequence
  Synthetic oligonucleotide
tctcggtaggccgagaggaacatatcgccc

SEQ ID NO: 26709 - DNA, 30 bp, Artificial Sequence
  Synthetic oligonucleotide
ttggtgcggtgcgagacgacatgagctccc

SEQ ID NO: 26710 - DNA, 30 bp, Artificial Sequence
  Synthetic oligonucleotide
acggacgaaagaggaggttacaacagtccc

SEQ ID NO: 26711 - DNA, 30 bp, Artificial Sequence
  Synthetic oligonucleotide
cacgcaacgagggtccagtgggcgtgtccc

SEQ ID NO: 26712 - DNA, 30 bp, Artificial Sequence
  Synthetic oligonucleotide
cctccaccgctacagaagactagagaagcc

SEQ ID NO: 26713 - DNA, 30 bp, Artificial Sequence
  Synthetic oligonucleotide
cgttcgagaagaattacccacatcgaagcc

SEQ ID NO: 26714 - DNA, 30 bp, Artificial Sequence
  Synthetic oligonucleotide
acatgtgcgtagggagtggaaaggacagcc

SEQ ID NO: 26715 - DNA, 30 bp, Artificial Sequence
  Synthetic oligonucleotide
taggcaacgatgctgaagacttgaccagcc

SEQ ID NO: 26716 - DNA, 30 bp, Artificial Sequence
  Synthetic oligonucleotide
ttggggagagcgacacctagagtaccagcc

SEQ ID NO: 26717 - DNA, 30 bp, Artificial Sequence
  Synthetic oligonucleotide
aggccatagccagtattagcaacaagagcc

SEQ ID NO: 26718 - DNA, 30 bp, Artificial Sequence
  Synthetic oligonucleotide
accgagggtcgtatcgtactatcaggagcc

SEQ ID NO: 26719 - DNA, 30 bp, Artificial Sequence
  Synthetic oligonucleotide
atgctgaatctgacaaaagggcaccacgcc

SEQ ID NO: 26720 - DNA, 30 bp, Artificial Sequence
  Synthetic oligonucleotide
tggtaccaggcaacatcacgaccatgcgcc

SEQ ID NO: 26721 - DNA, 30 bp, Artificial Sequence
  Synthetic oligonucleotide
ttacggggcgcaaaaacagatccaacggcc

SEQ ID NO: 26722 - DNA, 30 bp, Artificial Sequence
  Synthetic oligonucleotide
atgtaacaccagatgaggcccgagtcggcc

SEQ ID NO: 26723 - DNA, 30 bp, Artificial Sequence
  Synthetic oligonucleotide
aaggcaatctgtgctttacggagaggggcc

SEQ ID NO: 26724 - DNA, 30 bp, Artificial Sequence
  Synthetic oligonucleotide
caatgagactagaagttaaaatcctatgcc

SEQ ID NO: 26725 - DNA, 30 bp, Artificial Sequence
  Synthetic oligonucleotide
cgacaacgatctcggtgtccgtgctatgcc

SEQ ID NO: 26726 - DNA, 30 bp, Artificial Sequence
  Synthetic oligonucleotide
acaggaggccgattgctaggggactgtgcc

SEQ ID NO: 26727 - DNA, 30 bp, Artificial Sequence
  Synthetic oligonucleotide
agaggttaaagccaaagtctaaacgcatcc

SEQ ID NO: 26728 - DNA, 30 bp, Artificial Sequence
  Synthetic oligonucleotide
acagctctgagggacagggagcatatatcc

SEQ ID NO: 26729 - DNA, 30 bp, Artificial Sequence
  Synthetic oligonucleotide
tcgaaaagggaaaaacagagtgatttatcc

SEQ ID NO: 26730 - DNA, 30 bp, Artificial Sequence
  Synthetic oligonucleotide
gggcggatggccctagaacgaaatatctcc

SEQ ID NO: 26731 - DNA, 30 bp, Artificial Sequence
  Synthetic oligonucleotide
gggcgagttacgagaaccatggcagtctcc

SEQ ID NO: 26732 - DNA, 30 bp, Artificial Sequence
  Synthetic oligonucleotide
ggaggaatagtgcagcgaaaattggcgtcc

SEQ ID NO: 26733 - DNA, 30 bp, Artificial Sequence
  Synthetic oligonucleotide
ttgtgggtcgggaacggaacatcgaaaagc

SEQ ID NO: 26734 - DNA, 30 bp, Artificial Sequence
  Synthetic oligonucleotide
aggatccaaacggaattgtgtcgccaaagc

SEQ ID NO: 26735 - DNA, 30 bp, Artificial Sequence
  Synthetic oligonucleotide
gacgcaaacacgtctcccattcatacaagc

SEQ ID NO: 26736 - DNA, 30 bp, Artificial Sequence
  Synthetic oligonucleotide
cgaagcgtgtgtccgtctgccaaaccaagc

SEQ ID NO: 26737 - DNA, 31 bp, Artificial Sequence
  Synthetic oligonucleotide
acgtcttcattgagaatagaaccagctaagc

SEQ ID NO: 26738 - DNA, 30 bp, Artificial Sequence
  Synthetic oligonucleotide
aacggtagcgggcagtttcagccagtaagc

SEQ ID NO: 26739 - DNA, 30 bp, Artificial Sequence
  Synthetic oligonucleotide
ctacggatatagggcgccgtgtagtagagc

SEQ ID NO: 26740 - DNA, 30 bp, Artificial Sequence
  Synthetic oligonucleotide
aatcgcaacaaacttgtgaaacgtacgagc

SEQ ID NO: 26741 - DNA, 30 bp, Artificial Sequence
  Synthetic oligonucleotide
ccaacgggatgcgtctgaggggcaccgagc

SEQ ID NO: 26742 - DNA, 30 bp, Artificial Sequence
  Synthetic oligonucleotide
ggtgacccatatatgacaagccaaaggagc

SEQ ID NO: 26743 - DNA, 30 bp, Artificial Sequence
  Synthetic oligonucleotide
ccaataaggcagattgcggtcactgggagc

SEQ ID NO: 26744 - DNA, 30 bp, Artificial Sequence
  Synthetic oligonucleotide
acggggcacgggaaacagcaaggggatagc

SEQ ID NO: 26745 - DNA, 30 bp, Artificial Sequence
  Synthetic oligonucleotide
ggggcgatcaacgatacactgacgagtagc

SEQ ID NO: 26746 - DNA, 30 bp, Artificial Sequence
  Synthetic oligonucleotide
tcgatggtgagcactctaatcagccttagc

SEQ ID NO: 26747 - DNA, 30 bp, Artificial Sequence
  Synthetic oligonucleotide
gtggcaagaaagccgatagagaagcttagc

SEQ ID NO: 26748 - DNA, 30 bp, Artificial Sequence
  Synthetic oligonucleotide
tgagacctacagtaccgctgcccaaaacgc

SEQ ID NO: 26749 - DNA, 30 bp, Artificial Sequence
  Synthetic oligonucleotide
catgcttacaagaaagtaaggcgacaacgc

SEQ ID NO: 26750 - DNA, 30 bp, Artificial Sequence
  Synthetic oligonucleotide
agcaaaccgagtacgcatattacgatccgc

SEQ ID NO: 26751 - DNA, 30 bp, Artificial Sequence
  Synthetic oligonucleotide
cgatcaataccggcaaaacggcgcgtccgc

SEQ ID NO: 26752 - DNA, 30 bp, Artificial Sequence
  Synthetic oligonucleotide
ggaaatacggcgaggactactgaaaagcgc

SEQ ID NO: 26753 - DNA, 30 bp, Artificial Sequence
  Synthetic oligonucleotide
tggcaggttagtgaagcgaacaacaagcgc

SEQ ID NO: 26754 - DNA, 30 bp, Artificial Sequence
  Synthetic oligonucleotide
agtagccgaattagaagtaccaaacagcgc

SEQ ID NO: 26755 - DNA, 30 bp, Artificial Sequence
  Synthetic oligonucleotide
tcattgatgaggagaacggtaccctagcgc

SEQ ID NO: 26756 - DNA, 30 bp, Artificial Sequence
  Synthetic oligonucleotide
gatggagatagtggaggagaatcggcgcgc

SEQ ID NO: 26757 - DNA, 30 bp, Artificial Sequence
  Synthetic oligonucleotide
ataacggtcaccaataggcgactaatgcgc

SEQ ID NO: 26758 - DNA, 30 bp, Artificial Sequence
  Synthetic oligonucleotide
cgtgttcaatagcagtaaatcggggtgcgc

SEQ ID NO: 26759 - DNA, 30 bp, Artificial Sequence
  Synthetic oligonucleotide
agggaacttggtgaactgaacgccgatcgc

SEQ ID NO: 26760 - DNA, 30 bp, Artificial Sequence
  Synthetic oligonucleotide
actaaagcaataaagtagttaagtaaaggc

SEQ ID NO: 26761 - DNA, 30 bp, Artificial Sequence
  Synthetic oligonucleotide
gatgccggggagagcaaaatcaaagcaggc

SEQ ID NO: 26762 - DNA, 30 bp, Artificial Sequence
  Synthetic oligonucleotide
ggccaagctgacagcagaaggaagtcaggc

SEQ ID NO: 26763 - DNA, 30 bp, Artificial Sequence
  Synthetic oligonucleotide
ttaccacaccaatacttaggggagtccggc

SEQ ID NO: 26764 - DNA, 30 bp, Artificial Sequence
  Synthetic oligonucleotide
gcgaatcgaatggttgaacactattccggc

SEQ ID NO: 26765 - DNA, 30 bp, Artificial Sequence
  Synthetic oligonucleotide
gaccaagtcggaaaaatgccctagagcggc

SEQ ID NO: 26766 - DNA, 30 bp, Artificial Sequence
  Synthetic oligonucleotide
tggtgggtgagagttcagagtccgtgcggc

SEQ ID NO: 26767 - DNA, 29 bp, Artificial Sequence
  Synthetic oligonucleotide
cgtaccaaagtgggaatacggcgttcggc

SEQ ID NO: 26768 - DNA, 30 bp, Artificial Sequence
  Synthetic oligonucleotide
gcgatggataagttaaggaaccatttcggc

SEQ ID NO: 26769 - DNA, 30 bp, Artificial Sequence
  Synthetic oligonucleotide
cggaggtgagcggcataccacgctttcggc

SEQ ID NO: 26770 - DNA, 30 bp, Artificial Sequence
  Synthetic oligonucleotide
gggtaaaaacacacgcgtgtagtaccgggc

SEQ ID NO: 26771 - DNA, 30 bp, Artificial Sequence
  Synthetic oligonucleotide
gcaaggcatgaaaagagtggggtcgcgggc

SEQ ID NO: 26772 - DNA, 30 bp, Artificial Sequence
  Synthetic oligonucleotide
cagatcattgagggacgtagaaatgcgggc

SEQ ID NO: 26773 - DNA, 30 bp, Artificial Sequence
  Synthetic oligonucleotide
taaatggggacaaagttccaaaaaaggggc

SEQ ID NO: 26774 - DNA, 30 bp, Artificial Sequence
  Synthetic oligonucleotide
aagtaatcgccgtaaccgaccaggagtggc

SEQ ID NO: 26775 - DNA, 30 bp, Artificial Sequence
  Synthetic oligonucleotide
tcagaaaaaaaacatttagcgatagttggc

SEQ ID NO: 26776 - DNA, 30 bp, Artificial Sequence
  Synthetic oligonucleotide
gccaaaaaggggtgatccgcgggaaaatgc

SEQ ID NO: 26777 - DNA, 30 bp, Artificial Sequence
  Synthetic oligonucleotide
agcggtgctatgcgccaaatagataaatgc

SEQ ID NO: 26778 - DNA, 30 bp, Artificial Sequence
  Synthetic oligonucleotide
cgcgaaaaatgccataaaggtaagggatgc

SEQ ID NO: 26779 - DNA, 30 bp, Artificial Sequence
  Synthetic oligonucleotide
gggtataggacagggcagagatcatgatgc

SEQ ID NO: 26780 - DNA, 30 bp, Artificial Sequence
  Synthetic oligonucleotide
agaggatgagggacttcagataggatatgc

SEQ ID NO: 26781 - DNA, 30 bp, Artificial Sequence
  Synthetic oligonucleotide
tggcatcaacacaaggtgcaacggatatgc

SEQ ID NO: 26782 - DNA, 30 bp, Artificial Sequence
  Synthetic oligonucleotide
aagcacgcacgatgagagaaaacaggctgc

SEQ ID NO: 26783 - DNA, 30 bp, Artificial Sequence
  Synthetic oligonucleotide
ccgagatcaaggttggtaagggctttgtgc

SEQ ID NO: 26784 - DNA, 30 bp, Artificial Sequence
  Synthetic oligonucleotide
cgtaaatcgagggcacgcttgtcaacaatc

SEQ ID NO: 26785 - DNA, 30 bp, Artificial Sequence
  Synthetic oligonucleotide
aggtctgcaaagctaactcgcgtagcaatc

SEQ ID NO: 26786 - DNA, 30 bp, Artificial Sequence
  Synthetic oligonucleotide
ggggcttaggaacccagaagcgagcgaatc

SEQ ID NO: 26787 - DNA, 30 bp, Artificial Sequence
  Synthetic oligonucleotide
gcagttaggaagggaaaaatgaggcgaatc

SEQ ID NO: 26788 - DNA, 30 bp, Artificial Sequence
  Synthetic oligonucleotide
gggggtcggagtactggatcaagcgccatc

SEQ ID NO: 26789 - DNA, 30 bp, Artificial Sequence
  Synthetic oligonucleotide
agttcaacacaacgagcgagcgagggcatc

SEQ ID NO: 26790 - DNA, 30 bp, Artificial Sequence
  Synthetic oligonucleotide
gcttacactcggaaagtcggaaacaagatc

SEQ ID NO: 26791 - DNA, 30 bp, Artificial Sequence
  Synthetic oligonucleotide
aagcgtacacccgaatcatgggagaagatc

SEQ ID NO: 26792 - DNA, 30 bp, Artificial Sequence
  Synthetic oligonucleotide
ggggctggatggcaagaacaacaagagatc

SEQ ID NO: 26793 - DNA, 30 bp, Artificial Sequence
  Synthetic oligonucleotide
ccgaaattatcaacacataacgacacgatc

SEQ ID NO: 26794 - DNA, 30 bp, Artificial Sequence
  Synthetic oligonucleotide
ggcagactacaagtaaataacgagtggatc

SEQ ID NO: 26795 - DNA, 30 bp, Artificial Sequence
  Synthetic oligonucleotide
gcggaacggcgaatacctcttacaatgatc

SEQ ID NO: 26796 - DNA, 30 bp, Artificial Sequence
  Synthetic oligonucleotide
tgggggccctgaaggaaggagtcacatatc

SEQ ID NO: 26797 - DNA, 31 bp, Artificial Sequence
  Synthetic oligonucleotide
caagagatcttagaatgagtggagggctatc

SEQ ID NO: 26798 - DNA, 30 bp, Artificial Sequence
  Synthetic oligonucleotide
cggttcaaagcttgtaacaaaaagggtatc

SEQ ID NO: 26799 - DNA, 30 bp, Artificial Sequence
  Synthetic oligonucleotide
agaaaggaaggctaggtcgtcgaatgtatc

SEQ ID NO: 26800 - DNA, 30 bp, Artificial Sequence
  Synthetic oligonucleotide
aggatgtcatcaggcgaaatagatcaactc

SEQ ID NO: 26801 - DNA, 30 bp, Artificial Sequence
  Synthetic oligonucleotide
ccaagcgaaatgaaaacttgtgcgagactc

SEQ ID NO: 26802 - DNA, 30 bp, Artificial Sequence
  Synthetic oligonucleotide
agggtcatccgtaaagaaacataacgactc

SEQ ID NO: 26803 - DNA, 30 bp, Artificial Sequence
  Synthetic oligonucleotide
aacgaacactttaggaatggggaatgtctc

SEQ ID NO: 26804 - DNA, 30 bp, Artificial Sequence
  Synthetic oligonucleotide
agagtggctagacaagtcgtccgcaaagtc

SEQ ID NO: 26805 - DNA, 30 bp, Artificial Sequence
  Synthetic oligonucleotide
ggcgtgctggacgaaaggcgtacaccagtc

SEQ ID NO: 26806 - DNA, 30 bp, Artificial Sequence
  Synthetic oligonucleotide
gtcatccagaggagtagaggaatgggagtc

SEQ ID NO: 26807 - DNA, 30 bp, Artificial Sequence
  Synthetic oligonucleotide
ccctgcaggtacacgattggaatgggagtc

SEQ ID NO: 26808 - DNA, 30 bp, Artificial Sequence
  Synthetic oligonucleotide
tgcccgaaaaaaggagaatccacaaacgtc

SEQ ID NO: 26809 - DNA, 30 bp, Artificial Sequence
  Synthetic oligonucleotide
gtggccggggtacacatatcagtgaacgtc

SEQ ID NO: 26810 - DNA, 30 bp, Artificial Sequence
  Synthetic oligonucleotide
ggaaccgcaaagatgagcgccacgcacgtc

SEQ ID NO: 26811 - DNA, 30 bp, Artificial Sequence
  Synthetic oligonucleotide
ttacaggctctgaaaaacagtccatccgtc

SEQ ID NO: 26812 - DNA, 30 bp, Artificial Sequence
  Synthetic oligonucleotide
ccgcatatgaaaatagtgacctggtccgtc

SEQ ID NO: 26813 - DNA, 30 bp, Artificial Sequence
  Synthetic oligonucleotide
aaggaaacgacacaaagcgaattaatcgtc

SEQ ID NO: 26814 - DNA, 30 bp, Artificial Sequence
  Synthetic oligonucleotide
ggttaaagagcactaaatcctacgttcgtc

SEQ ID NO: 26815 - DNA, 30 bp, Artificial Sequence
  Synthetic oligonucleotide
caaaggtgtctctatgctggaccgggggtc

SEQ ID NO: 26816 - DNA, 30 bp, Artificial Sequence
  Synthetic oligonucleotide
tggactgcaataaaacactggaggggggtc

SEQ ID NO: 26817 - DNA, 30 bp, Artificial Sequence
  Synthetic oligonucleotide
gaggactaggggtaccaagatgatctggtc

SEQ ID NO: 26818 - DNA, 30 bp, Artificial Sequence
  Synthetic oligonucleotide
gcaacaaacgtcgatgaaaagcggttggtc

SEQ ID NO: 26819 - DNA, 30 bp, Artificial Sequence
  Synthetic oligonucleotide
gtaacggtgcgggtagccgtataatctgtc

SEQ ID NO: 26820 - DNA, 30 bp, Artificial Sequence
  Synthetic oligonucleotide
acctcgaccagagttgcgtaaatcggtgtc

SEQ ID NO: 26821 - DNA, 30 bp, Artificial Sequence
  Synthetic oligonucleotide
cagagtgaagtcaagacagtatagggtgtc

SEQ ID NO: 26822 - DNA, 30 bp, Artificial Sequence
  Synthetic oligonucleotide
caacgcgttcggaaaatgaagtactaattc

SEQ ID NO: 26823 - DNA, 30 bp, Artificial Sequence
  Synthetic oligonucleotide
aaaggacagccgaccatggggagaggattc

SEQ ID NO: 26824 - DNA, 30 bp, Artificial Sequence
  Synthetic oligonucleotide
tcgagcatgcggggatagaaacgttacttc

SEQ ID NO: 26825 - DNA, 30 bp, Artificial Sequence
  Synthetic oligonucleotide
cgggaataggtcaagtcggagattgccttc

SEQ ID NO: 26826 - DNA, 30 bp, Artificial Sequence
  Synthetic oligonucleotide
cgagacaagccaaagggatccaatcgcttc

SEQ ID NO: 26827 - DNA, 30 bp, Artificial Sequence
  Synthetic oligonucleotide
tgtgccaagggccaggtgcctctgcagttc

SEQ ID NO: 26828 - DNA, 30 bp, Artificial Sequence
  Synthetic oligonucleotide
cgagacgcgagaacgtagtccataggtttc

SEQ ID NO: 26829 - DNA, 30 bp, Artificial Sequence
  Synthetic oligonucleotide
cgatcatccgccttcaacatcaagaaaaag

SEQ ID NO: 26830 - DNA, 30 bp, Artificial Sequence
  Synthetic oligonucleotide
tcccctaaaagtgaatagcccaaccaaaag

SEQ ID NO: 26831 - DNA, 30 bp, Artificial Sequence
  Synthetic oligonucleotide
aatgattcggcacaagttcatgatcaaaag

SEQ ID NO: 26832 - DNA, 30 bp, Artificial Sequence
  Synthetic oligonucleotide
aaaactgggaggccgagaaatgatgaaaag

SEQ ID NO: 26833 - DNA, 30 bp, Artificial Sequence
  Synthetic oligonucleotide
gcaccatgcatggaacctacggctgaaaag

SEQ ID NO: 26834 - DNA, 30 bp, Artificial Sequence
  Synthetic oligonucleotide
aggacatccaaaatccgacacggtgaaaag

SEQ ID NO: 26835 - DNA, 30 bp, Artificial Sequence
  Synthetic oligonucleotide
ttgcggagtcaaagggccaggtgctaaaag

SEQ ID NO: 26836 - DNA, 30 bp, Artificial Sequence
  Synthetic oligonucleotide
gtagcaaccagtaccgtcaacagaacaaag

SEQ ID NO: 26837 - DNA, 30 bp, Artificial Sequence
  Synthetic oligonucleotide
ggcacgcaggcaaagggccattatacaaag

SEQ ID NO: 26838 - DNA, 30 bp, Artificial Sequence
  Synthetic oligonucleotide
acagctgacgatgagagaacggccccaaag

SEQ ID NO: 26839 - DNA, 30 bp, Artificial Sequence
  Synthetic oligonucleotide
agcaccccaggtgaggaacgaacttcaaag

SEQ ID NO: 26840 - DNA, 30 bp, Artificial Sequence
  Synthetic oligonucleotide
ctaattgtggagaactgattgcgaagaaag

SEQ ID NO: 26841 - DNA, 30 bp, Artificial Sequence
  Synthetic oligonucleotide
gtagaagcaagaaagttcaaaccgagaaag

SEQ ID NO: 26842 - DNA, 30 bp, Artificial Sequence
  Synthetic oligonucleotide
cggtttcgtacggacaaggccatgagaaag

SEQ ID NO: 26843 - DNA, 30 bp, Artificial Sequence
  Synthetic oligonucleotide
gcatcagccagagccctatctccacgaaag

SEQ ID NO: 26844 - DNA, 30 bp, Artificial Sequence
  Synthetic oligonucleotide
ttagcaaggcgaatgcatcgaggtcgaaag

SEQ ID NO: 26845 - DNA, 30 bp, Artificial Sequence
  Synthetic oligonucleotide
gtgagcatccggtaataagtcaaaggaaag

SEQ ID NO: 26846 - DNA, 30 bp, Artificial Sequence
  Synthetic oligonucleotide
catgcaggccagtaaccgcacagatgaaag

SEQ ID NO: 26847 - DNA, 30 bp, Artificial Sequence
  Synthetic oligonucleotide
cgttacttggaaagataaaaaggaataaag

SEQ ID NO: 26848 - DNA, 30 bp, Artificial Sequence
  Synthetic oligonucleotide
catcaccttgatgagaaaagctacctaaag

SEQ ID NO: 26849 - DNA, 30 bp, Artificial Sequence
  Synthetic oligonucleotide
acgaagcctgaaccagcggcttatctaaag

SEQ ID NO: 26850 - DNA, 30 bp, Artificial Sequence
  Synthetic oligonucleotide
ctagcaggggcagtccgggggagtctaaag

SEQ ID NO: 26851 - DNA, 30 bp, Artificial Sequence
  Synthetic oligonucleotide
tgataccagggggcgcgtgttaaacacaag

SEQ ID NO: 26852 - DNA, 30 bp, Artificial Sequence
  Synthetic oligonucleotide
ggatcgaggagagagggagacaggcacaag

SEQ ID NO: 26853 - DNA, 30 bp, Artificial Sequence
  Synthetic oligonucleotide
actcaaagaggacgtgagagaacgtacaag

SEQ ID NO: 26854 - DNA, 30 bp, Artificial Sequence
  Synthetic oligonucleotide
tgcgaagcgtatgcaagaagagattacaag

SEQ ID NO: 26855 - DNA, 30 bp, Artificial Sequence
  Synthetic oligonucleotide
agtctaagaaacaggttagataatagcaag

SEQ ID NO: 26856 - DNA, 30 bp, Artificial Sequence
  Synthetic oligonucleotide
atagagtacgggtgcttcaaagatggcaag

SEQ ID NO: 26857 - DNA, 30 bp, Artificial Sequence
  Synthetic oligonucleotide
cgcgcgaatgtaaccatggcaacatgcaag

SEQ ID NO: 26858 - DNA, 30 bp, Artificial Sequence
  Synthetic oligonucleotide
caagacgacggtctgcgaatctgatgcaag

SEQ ID NO: 26859 - DNA, 30 bp, Artificial Sequence
  Synthetic oligonucleotide
ataagacaagaactgaacacaggtatcaag

SEQ ID NO: 26860 - DNA, 30 bp, Artificial Sequence
  Synthetic oligonucleotide
ctggcgtaggaaggataaggtagcctcaag

SEQ ID NO: 26861 - DNA, 30 bp, Artificial Sequence
  Synthetic oligonucleotide
gtcagaaacgtaggagatccatccgtcaag

SEQ ID NO: 26862 - DNA, 30 bp, Artificial Sequence
  Synthetic oligonucleotide
aagagacagaaagaagtatcttgcgtcaag

SEQ ID NO: 26863 - DNA, 30 bp, Artificial Sequence
  Synthetic oligonucleotide
ggtgccaggagtggatcatatcgattcaag

SEQ ID NO: 26864 - DNA, 30 bp, Artificial Sequence
  Synthetic oligonucleotide
ccctccagggacagagtgcaaagtttcaag

SEQ ID NO: 26865 - DNA, 30 bp, Artificial Sequence
  Synthetic oligonucleotide
cgagtcactcttagattatccggaaagaag

SEQ ID NO: 26866 - DNA, 30 bp, Artificial Sequence
  Synthetic oligonucleotide
atgggggccggacgccgtacggacaagaag

SEQ ID NO: 26867 - DNA, 30 bp, Artificial Sequence
  Synthetic oligonucleotide
acgtacttgtaggctccccgagggaagaag

SEQ ID NO: 26868 - DNA, 30 bp, Artificial Sequence
  Synthetic oligonucleotide
gtcatcccgtcaccagaggccggccagaag

SEQ ID NO: 26869 - DNA, 30 bp, Artificial Sequence
  Synthetic oligonucleotide
tatcaatcacaatgatccatgggagagaag

SEQ ID NO: 26870 - DNA, 30 bp, Artificial Sequence
  Synthetic oligonucleotide
tctcaaggaattacgttcagcggggagaag

SEQ ID NO: 26871 - DNA, 30 bp, Artificial Sequence
  Synthetic oligonucleotide
tcgtgcgattagcaatttaaacactagaag

SEQ ID NO: 26872 - DNA, 30 bp, Artificial Sequence
  Synthetic oligonucleotide
cgtccaccgataaattcggatgtgtagaag

SEQ ID NO: 26873 - DNA, 30 bp, Artificial Sequence
  Synthetic oligonucleotide
ggcatcataaggcgggacattcccacgaag

SEQ ID NO: 26874 - DNA, 30 bp, Artificial Sequence
  Synthetic oligonucleotide
cgcaatccagatttatggtagagtccgaag

SEQ ID NO: 26875 - DNA, 30 bp, Artificial Sequence
  Synthetic oligonucleotide
gagatggccgaacgcaaattgcaggcgaag

SEQ ID NO: 26876 - DNA, 30 bp, Artificial Sequence
  Synthetic oligonucleotide
gaaaaaaggattaacatagtgcaatcgaag

SEQ ID NO: 26877 - DNA, 30 bp, Artificial Sequence
  Synthetic oligonucleotide
tgggaatgggagacaccgctactatcgaag

SEQ ID NO: 26878 - DNA, 30 bp, Artificial Sequence
  Synthetic oligonucleotide
acaagcgtgaatcttattcatccaaggaag

SEQ ID NO: 26879 - DNA, 30 bp, Artificial Sequence
  Synthetic oligonucleotide
gggtagcataaaggtcaggcgagtaggaag

SEQ ID NO: 26880 - DNA, 30 bp, Artificial Sequence
  Synthetic oligonucleotide
aatacacagaagagaacaaaattagggaag

SEQ ID NO: 26881 - DNA, 30 bp, Artificial Sequence
  Synthetic oligonucleotide
ttagcaactaggagcgtcgcgtaggggaag

SEQ ID NO: 26882 - DNA, 30 bp, Artificial Sequence
  Synthetic oligonucleotide
tccggtaagaaacgatcattccgtgggaag

SEQ ID NO: 26883 - DNA, 30 bp, Artificial Sequence
  Synthetic oligonucleotide
ggttacagtcaacgaaaagcagggtggaag

SEQ ID NO: 26884 - DNA, 30 bp, Artificial Sequence
  Synthetic oligonucleotide
cgcttaaggtatctgacaccacgaatgaag

SEQ ID NO: 26885 - DNA, 30 bp, Artificial Sequence
  Synthetic oligonucleotide
cgaaacgttgcgagaaataaccggatgaag

SEQ ID NO: 26886 - DNA, 30 bp, Artificial Sequence
  Synthetic oligonucleotide
atgcgtcgaatgtgcatggaggttctgaag

SEQ ID NO: 26887 - DNA, 30 bp, Artificial Sequence
  Synthetic oligonucleotide
cgaaactatattagtggtcatgatgtgaag

SEQ ID NO: 26888 - DNA, 30 bp, Artificial Sequence
  Synthetic oligonucleotide
atggtctgagacatactaggcgttgtgaag

SEQ ID NO: 26889 - DNA, 30 bp, Artificial Sequence
  Synthetic oligonucleotide
agttaggattgaacaactaacgcattgaag

SEQ ID NO: 26890 - DNA, 30 bp, Artificial Sequence
  Synthetic oligonucleotide
gacggttaaggtcaggagtctctaaataag

SEQ ID NO: 26891 - DNA, 30 bp, Artificial Sequence
  Synthetic oligonucleotide
cgccgacactgaaagggaagccggtataag

SEQ ID NO: 26892 - DNA, 30 bp, Artificial Sequence
  Synthetic oligonucleotide
agggccagtacggaaccatacgtcactaag

SEQ ID NO: 26893 - DNA, 30 bp, Artificial Sequence
  Synthetic oligonucleotide
aggcactcggtgattacgttatcgactaag

SEQ ID NO: 26894 - DNA, 29 bp, Artificial Sequence
  Synthetic oligonucleotide
ggcacccaaccaacgtccgtcaccctaag

SEQ ID NO: 26895 - DNA, 30 bp, Artificial Sequence
  Synthetic oligonucleotide
tgacgtacagaatgagaacacttagctaag

SEQ ID NO: 26896 - DNA, 30 bp, Artificial Sequence
  Synthetic oligonucleotide
caggttcgcgataggggaatatccgctaag

SEQ ID NO: 26897 - DNA, 30 bp, Artificial Sequence
  Synthetic oligonucleotide
caccgcgacccgaggcacggcaaaagtaag

SEQ ID NO: 26898 - DNA, 30 bp, Artificial Sequence
  Synthetic oligonucleotide
ggactcattacgataagtagaaggagtaag

SEQ ID NO: 26899 - DNA, 30 bp, Artificial Sequence
  Synthetic oligonucleotide
atcagaccagctcgcaatagggaccgtaag

SEQ ID NO: 26900 - DNA, 30 bp, Artificial Sequence
  Synthetic oligonucleotide
gtgcggagtcattgccgaacgggtaaacag

SEQ ID NO: 26901 - DNA, 30 bp, Artificial Sequence
  Synthetic oligonucleotide
cgatagcgaaatacaagccgctctgaacag

SEQ ID NO: 26902 - DNA, 30 bp, Artificial Sequence
  Synthetic oligonucleotide
tgaacataaggccgtaagattccttaacag

SEQ ID NO: 26903 - DNA, 30 bp, Artificial Sequence
  Synthetic oligonucleotide
cgaaccaatctgcactcttcttcaacacag

SEQ ID NO: 26904 - DNA, 30 bp, Artificial Sequence
  Synthetic oligonucleotide
cgggcatcattcgaaaccattcgtatacag

SEQ ID NO: 26905 - DNA, 30 bp, Artificial Sequence
  Synthetic oligonucleotide
actcagcgaccatggatcaacgtagtacag

SEQ ID NO: 26906 - DNA, 30 bp, Artificial Sequence
  Synthetic oligonucleotide
tcaggggctaaaatgggctggagtgtacag

SEQ ID NO: 26907 - DNA, 30 bp, Artificial Sequence
  Synthetic oligonucleotide
acgcgcggtcgtgtcttgctcggaaaccag

SEQ ID NO: 26908 - DNA, 30 bp, Artificial Sequence
  Synthetic oligonucleotide
ctggtacagtggatcgacatgaataaccag

SEQ ID NO: 26909 - DNA, 30 bp, Artificial Sequence
  Synthetic oligonucleotide
tcgatcatgatcatactcaaagataaccag

SEQ ID NO: 26910 - DNA, 30 bp, Artificial Sequence
  Synthetic oligonucleotide
tgggtcgagacactagatttagtcgaccag

SEQ ID NO: 26911 - DNA, 30 bp, Artificial Sequence
  Synthetic oligonucleotide
aaagaagacgagtttaggttcgagcgccag

SEQ ID NO: 26912 - DNA, 30 bp, Artificial Sequence
  Synthetic oligonucleotide
agggataataatcagggcaaaatctgccag

SEQ ID NO: 26913 - DNA, 30 bp, Artificial Sequence
  Synthetic oligonucleotide
tcgccaagcggatgggagtagtgcctccag

SEQ ID NO: 26914 - DNA, 30 bp, Artificial Sequence
  Synthetic oligonucleotide
aggaatccgtgacagtgaacctatcagcag

SEQ ID NO: 26915 - DNA, 30 bp, Artificial Sequence
  Synthetic oligonucleotide
ctgccaacagaaagataacggaactagcag

SEQ ID NO: 26916 - DNA, 30 bp, Artificial Sequence
  Synthetic oligonucleotide
cggccagaccaaacgggacaatgctagcag

SEQ ID NO: 26917 - DNA, 30 bp, Artificial Sequence
  Synthetic oligonucleotide
gaggaagcggaagcccatggaggagcgcag

SEQ ID NO: 26918 - DNA, 30 bp, Artificial Sequence
  Synthetic oligonucleotide
ggaatggagtcagtgaatgtaggctggcag

SEQ ID NO: 26919 - DNA, 30 bp, Artificial Sequence
  Synthetic oligonucleotide
tgtgcagggacgtaatggaaactagtgcag

SEQ ID NO: 26920 - DNA, 30 bp, Artificial Sequence
  Synthetic oligonucleotide
caatgccccgaaattgagagtgatgtgcag

SEQ ID NO: 26921 - DNA, 30 bp, Artificial Sequence
  Synthetic oligonucleotide
gacgtaagaactaagtagattcgagatcag

SEQ ID NO: 26922 - DNA, 30 bp, Artificial Sequence
  Synthetic oligonucleotide
ggcagaaataacttaggctggtgaactcag

SEQ ID NO: 26923 - DNA, 29 bp, Artificial Sequence
  Synthetic oligonucleotide
acgtcgaaaggcacgtctcctgtgttcag

SEQ ID NO: 26924 - DNA, 30 bp, Artificial Sequence
  Synthetic oligonucleotide
acgttactgagtgagcagattattgttcag

SEQ ID NO: 26925 - DNA, 29 bp, Artificial Sequence
  Synthetic oligonucleotide
agccgtaaaagtcatcaatttaccaagag

SEQ ID NO: 26926 - DNA, 30 bp, Artificial Sequence
  Synthetic oligonucleotide
cggcaacatggcttcaatgcgcggcaagag

SEQ ID NO: 26927 - DNA, 30 bp, Artificial Sequence
  Synthetic oligonucleotide
gcacgcaaagttcaatcgcaccctcaagag

SEQ ID NO: 26928 - DNA, 30 bp, Artificial Sequence
  Synthetic oligonucleotide
gtagatacttacgccagggatcacgaagag

SEQ ID NO: 26929 - DNA, 30 bp, Artificial Sequence
  Synthetic oligonucleotide
ctaggaagcccaaaagcgggggacgaagag

SEQ ID NO: 26930 - DNA, 30 bp, Artificial Sequence
  Synthetic oligonucleotide
tatcgcaggacaggaggtatccgtgaagag

SEQ ID NO: 26931 - DNA, 30 bp, Artificial Sequence
  Synthetic oligonucleotide
accgctaacagcaggccgcagtcataagag

SEQ ID NO: 26932 - DNA, 30 bp, Artificial Sequence
  Synthetic oligonucleotide
aatccgtagtcaaggcataagagttaagag

SEQ ID NO: 26933 - DNA, 30 bp, Artificial Sequence
  Synthetic oligonucleotide
gcaaggatgctaggcgggtaatcaatagag

SEQ ID NO: 26934 - DNA, 30 bp, Artificial Sequence
  Synthetic oligonucleotide
tgatcaagagtgccatcatgttggatagag

SEQ ID NO: 26935 - DNA, 30 bp, Artificial Sequence
  Synthetic oligonucleotide
tggaagctgaaattgaggttaatggtagag

SEQ ID NO: 26936 - DNA, 30 bp, Artificial Sequence
  Synthetic oligonucleotide
agaaacaaatgaactaaggccgtggtagag

SEQ ID NO: 26937 - DNA, 30 bp, Artificial Sequence
  Synthetic oligonucleotide
taagggcatattagcgacatgttggtagag

SEQ ID NO: 26938 - DNA, 30 bp, Artificial Sequence
  Synthetic oligonucleotide
tgggtagcaagtcatgtttgtggcaacgag

SEQ ID NO: 26939 - DNA, 30 bp, Artificial Sequence
  Synthetic oligonucleotide
cgcgatctggcctaggatatatcgaacgag

SEQ ID NO: 26940 - DNA, 30 bp, Artificial Sequence
  Synthetic oligonucleotide
cggaatggagtcacgacgggtagacacgag

SEQ ID NO: 26941 - DNA, 30 bp, Artificial Sequence
  Synthetic oligonucleotide
atcgagcaaggcccacggggaaagcacgag

SEQ ID NO: 26942 - DNA, 30 bp, Artificial Sequence
  Synthetic oligonucleotide
acgggtgcgtgcgtaactcacgagcacgag

SEQ ID NO: 26943 - DNA, 30 bp, Artificial Sequence
  Synthetic oligonucleotide
tgtcagaactgggaattgtatggcgacgag

SEQ ID NO: 26944 - DNA, 30 bp, Artificial Sequence
  Synthetic oligonucleotide
tatgagtcacattagaatgcggtcgacgag

SEQ ID NO: 26945 - DNA, 30 bp, Artificial Sequence
  Synthetic oligonucleotide
gggctaatggaaaaccggccacctgacgag

SEQ ID NO: 26946 - DNA, 30 bp, Artificial Sequence
  Synthetic oligonucleotide
gggggtaaacttctttcggatagtcccgag

SEQ ID NO: 26947 - DNA, 30 bp, Artificial Sequence
  Synthetic oligonucleotide
agtatcataaactcagtcccacacgccgag

SEQ ID NO: 26948 - DNA, 30 bp, Artificial Sequence
  Synthetic oligonucleotide
caccggaacccggccgccacgtaacgcgag

SEQ ID NO: 26949 - DNA, 30 bp, Artificial Sequence
  Synthetic oligonucleotide
cctggtatgctagcgcaaaacgcgcgcgag

SEQ ID NO: 26950 - DNA, 30 bp, Artificial Sequence
  Synthetic oligonucleotide
taggtgcgactagaaaggattcttggcgag

SEQ ID NO: 26951 - DNA, 30 bp, Artificial Sequence
  Synthetic oligonucleotide
acgggtattcccactaagataaactaggag

SEQ ID NO: 26952 - DNA, 30 bp, Artificial Sequence
  Synthetic oligonucleotide
ccggcccttgaaaagagaaaggaaacggag

SEQ ID NO: 26953 - DNA, 30 bp, Artificial Sequence
  Synthetic oligonucleotide
gggcatgaattgcgctaatacggaccggag

SEQ ID NO: 26954 - DNA, 30 bp, Artificial Sequence
  Synthetic oligonucleotide
cgaacgtacggcgatgcatggtgaccggag

SEQ ID NO: 26955 - DNA, 30 bp, Artificial Sequence
  Synthetic oligonucleotide
agatagttgacacatataacggagtcggag

SEQ ID NO: 26956 - DNA, 30 bp, Artificial Sequence
  Synthetic oligonucleotide
gaacgatagcaacagtacgatataagggag

SEQ ID NO: 26957 - DNA, 30 bp, Artificial Sequence
  Synthetic oligonucleotide
acggcatatcggaaaacgtaactcagggag

SEQ ID NO: 26958 - DNA, 30 bp, Artificial Sequence
  Synthetic oligonucleotide
aggaattagttataactaaacgaacgggag

SEQ ID NO: 26959 - DNA, 30 bp, Artificial Sequence
  Synthetic oligonucleotide
aagtatcggttcacattgggcagaggggag

SEQ ID NO: 26960 - DNA, 30 bp, Artificial Sequence
  Synthetic oligonucleotide
atagcagagagggcgtttatctcgggggag

SEQ ID NO: 26961 - DNA, 30 bp, Artificial Sequence
  Synthetic oligonucleotide
atagaagctgaacgggaattggcatgggag

SEQ ID NO: 26962 - DNA, 30 bp, Artificial Sequence
  Synthetic oligonucleotide
aagcgtcatcaaagctgactcgtcatggag

SEQ ID NO: 26963 - DNA, 30 bp, Artificial Sequence
  Synthetic oligonucleotide
ggtacgactctcagggtcgcgagtgtggag

SEQ ID NO: 26964 - DNA, 30 bp, Artificial Sequence
  Synthetic oligonucleotide
gaagatacccagacaactatatgattggag

SEQ ID NO: 26965 - DNA, 30 bp, Artificial Sequence
  Synthetic oligonucleotide
ccatgaagtcaggtctcgcggccaaatgag

SEQ ID NO: 26966 - DNA, 30 bp, Artificial Sequence
  Synthetic oligonucleotide
acaagtcgcaatccgtccgtaaggaatgag

SEQ ID NO: 26967 - DNA, 30 bp, Artificial Sequence
  Synthetic oligonucleotide
ggtaacataagtttgccgcctgaacatgag

SEQ ID NO: 26968 - DNA, 30 bp, Artificial Sequence
  Synthetic oligonucleotide
taggggaagcccgacagaacgattgatgag

SEQ ID NO: 26969 - DNA, 30 bp, Artificial Sequence
  Synthetic oligonucleotide
gaaaggtgagaataaggcgatgcgtatgag

SEQ ID NO: 26970 - DNA, 30 bp, Artificial Sequence
  Synthetic oligonucleotide
cttgctaagtctgggaacgtacagcctgag

SEQ ID NO: 26971 - DNA, 30 bp, Artificial Sequence
  Synthetic oligonucleotide
ccacacccgtccgagataatctaatctgag

SEQ ID NO: 26972 - DNA, 30 bp, Artificial Sequence
  Synthetic oligonucleotide
tacaggccgaccaagtaactcgacagtgag

SEQ ID NO: 26973 - DNA, 30 bp, Artificial Sequence
  Synthetic oligonucleotide
cagtcactaactcgggatacttacagtgag

SEQ ID NO: 26974 - DNA, 30 bp, Artificial Sequence
  Synthetic oligonucleotide
cggaagttcatactttaaccacccagtgag

SEQ ID NO: 26975 - DNA, 30 bp, Artificial Sequence
  Synthetic oligonucleotide
ggcaaacgatagcttagtaaggagcgtgag

SEQ ID NO: 26976 - DNA, 30 bp, Artificial Sequence
  Synthetic oligonucleotide
cgccgtatgacagggagatgagactgtgag

SEQ ID NO: 26977 - DNA, 30 bp, Artificial Sequence
  Synthetic oligonucleotide
cgacgaagcatacacggtttcaaaattgag

SEQ ID NO: 26978 - DNA, 30 bp, Artificial Sequence
  Synthetic oligonucleotide
gggcgcctgcatctacgtggatggattgag

SEQ ID NO: 26979 - DNA, 30 bp, Artificial Sequence
  Synthetic oligonucleotide
cgccggggagggcattaaagtaaatttgag

SEQ ID NO: 26980 - DNA, 30 bp, Artificial Sequence
  Synthetic oligonucleotide
ccacaagaggctcacgattcctcatttgag

SEQ ID NO: 26981 - DNA, 30 bp, Artificial Sequence
  Synthetic oligonucleotide
cgtaggccaaggaagcaacttggaaaatag

SEQ ID NO: 26982 - DNA, 30 bp, Artificial Sequence
  Synthetic oligonucleotide
aggggcttacaaacggggacgtataaatag

SEQ ID NO: 26983 - DNA, 30 bp, Artificial Sequence
  Synthetic oligonucleotide
tccacggttcaagcgggatgcaatgaatag

SEQ ID NO: 26984 - DNA, 30 bp, Artificial Sequence
  Synthetic oligonucleotide
catcacccaccaaattaaagcacctaatag

SEQ ID NO: 26985 - DNA, 30 bp, Artificial Sequence
  Synthetic oligonucleotide
ttaggttgcccgcaaggatgacaaacatag

SEQ ID NO: 26986 - DNA, 30 bp, Artificial Sequence
  Synthetic oligonucleotide
tatacaaacgaatagattcgaatgacatag

SEQ ID NO: 26987 - DNA, 30 bp, Artificial Sequence
  Synthetic oligonucleotide
gaacaattcaaaccatctgcgagaccatag

SEQ ID NO: 26988 - DNA, 30 bp, Artificial Sequence
  Synthetic oligonucleotide
cgctaaaacagggatccccggataccatag

SEQ ID NO: 26989 - DNA, 30 bp, Artificial Sequence
  Synthetic oligonucleotide
ggctaacgtccattctaccgaggtccatag

SEQ ID NO: 26990 - DNA, 30 bp, Artificial Sequence
  Synthetic oligonucleotide
caatctgccaagccctgaggaacgtcatag

SEQ ID NO: 26991 - DNA, 30 bp, Artificial Sequence
  Synthetic oligonucleotide
agagggtggtcgttacccaatcatagatag

SEQ ID NO: 26992 - DNA, 30 bp, Artificial Sequence
  Synthetic oligonucleotide
ctaaggtccgaaagcgcaaaatcaggatag

SEQ ID NO: 26993 - DNA, 30 bp, Artificial Sequence
  Synthetic oligonucleotide
ctacgccgaatggagagaaggcggggatag

SEQ ID NO: 26994 - DNA, 30 bp, Artificial Sequence
  Synthetic oligonucleotide
aacaaagagaaaccaacgcccaggatatag

SEQ ID NO: 26995 - DNA, 30 bp, Artificial Sequence
  Synthetic oligonucleotide
accagcggaaggccagcagatgatatatag

SEQ ID NO: 26996 - DNA, 30 bp, Artificial Sequence
  Synthetic oligonucleotide
ctggtgattggggcaaacaggagggtatag

SEQ ID NO: 26997 - DNA, 30 bp, Artificial Sequence
  Synthetic oligonucleotide
aagactcgagcaagcaccacgaaagactag

SEQ ID NO: 26998 - DNA, 30 bp, Artificial Sequence
  Synthetic oligonucleotide
ccgctgatagggaactgctacccagactag

SEQ ID NO: 26999 - DNA, 30 bp, Artificial Sequence
  Synthetic oligonucleotide
cgctggtataaaccacctcttctagactag

SEQ ID NO: 27000 - DNA, 30 bp, Artificial Sequence
  Synthetic oligonucleotide
cggataaagtacctctaaaataaaccctag

SEQ ID NO: 27001 - DNA, 30 bp, Artificial Sequence
  Synthetic oligonucleotide
gcatgaatactatcggacgagggggcctag

SEQ ID NO: 27002 - DNA, 30 bp, Artificial Sequence
  Synthetic oligonucleotide
cgcaatagcgaccgaattaccgcaaagtag

SEQ ID NO: 27003 - DNA, 30 bp, Artificial Sequence
  Synthetic oligonucleotide
agcatgcggtccgcattatggtacaagtag

SEQ ID NO: 27004 - DNA, 30 bp, Artificial Sequence
  Synthetic oligonucleotide
acagcgttgaatgtaagatctacatagtag

SEQ ID NO: 27005 - DNA, 30 bp, Artificial Sequence
  Synthetic oligonucleotide
cgtcaggtcaagacctttatttacccgtag

SEQ ID NO: 27006 - DNA, 30 bp, Artificial Sequence
  Synthetic oligonucleotide
agtgctcacatgccaaaacatcctccgtag

SEQ ID NO: 27007 - DNA, 30 bp, Artificial Sequence
  Synthetic oligonucleotide
ccataaccaaaactgataaggatagcgtag

SEQ ID NO: 27008 - DNA, 30 bp, Artificial Sequence
  Synthetic oligonucleotide
ccatcagacgagatccgtggggtcgcgtag

SEQ ID NO: 27009 - DNA, 30 bp, Artificial Sequence
  Synthetic oligonucleotide
aacgtggctaacgttgtcgggagatcgtag

SEQ ID NO: 27010 - DNA, 30 bp, Artificial Sequence
  Synthetic oligonucleotide
gaaacgggaaggtgctgcgtatattcgtag

SEQ ID NO: 27011 - DNA, 30 bp, Artificial Sequence
  Synthetic oligonucleotide
caagaccgtatgaatggttagagaaggtag

SEQ ID NO: 27012 - DNA, 30 bp, Artificial Sequence
  Synthetic oligonucleotide
tggccgagtgtgtgaccagacttatggtag

SEQ ID NO: 27013 - DNA, 30 bp, Artificial Sequence
  Synthetic oligonucleotide
acgctatgcaggagcataaatgtagtgtag

SEQ ID NO: 27014 - DNA, 30 bp, Artificial Sequence
  Synthetic oligonucleotide
atgaaaatacgggggcgtctaaacgtgtag

SEQ ID NO: 27015 - DNA, 30 bp, Artificial Sequence
  Synthetic oligonucleotide
cctagtttaaacaaaatcaagttcgtgtag

SEQ ID NO: 27016 - DNA, 30 bp, Artificial Sequence
  Synthetic oligonucleotide
cgggacatgtacgtgccggcaggaaattag

SEQ ID NO: 27017 - DNA, 29 bp, Artificial Sequence
  Synthetic oligonucleotide
tcgaagtcgcatgcagaatgccagattag

SEQ ID NO: 27018 - DNA, 30 bp, Artificial Sequence
  Synthetic oligonucleotide
cggacaaataaatccgagaacaaggattag

SEQ ID NO: 27019 - DNA, 30 bp, Artificial Sequence
  Synthetic oligonucleotide
tggtatgtaaacaagaatatcataggttag

SEQ ID NO: 27020 - DNA, 30 bp, Artificial Sequence
  Synthetic oligonucleotide
agcaagctgtcgaaacctcggcaaatttag

SEQ ID NO: 27021 - DNA, 30 bp, Artificial Sequence
  Synthetic oligonucleotide
tcgcgaaagatggcaaacgtaaccgtttag

SEQ ID NO: 27022 - DNA, 30 bp, Artificial Sequence
  Synthetic oligonucleotide
gaacggggagtcaaaaagactcagttttag

SEQ ID NO: 27023 - DNA, 30 bp, Artificial Sequence
  Synthetic oligonucleotide
gaggggtaggcaaattttaggccacaaacg

SEQ ID NO: 27024 - DNA, 30 bp, Artificial Sequence
  Synthetic oligonucleotide
caatgctggacgatcgtgtggtaagaaacg

SEQ ID NO: 27025 - DNA, 30 bp, Artificial Sequence
  Synthetic oligonucleotide
agactagggtgaagtcatgaagacgaaacg

SEQ ID NO: 27026 - DNA, 30 bp, Artificial Sequence
  Synthetic oligonucleotide
ccaaaatgagggattctagataaggaaacg

SEQ ID NO: 27027 - DNA, 30 bp, Artificial Sequence
  Synthetic oligonucleotide
aatacaaccgaaggacttacgcaaacaacg

SEQ ID NO: 27028 - DNA, 30 bp, Artificial Sequence
  Synthetic oligonucleotide
agaataattaacgggaaaataatctcaacg

SEQ ID NO: 27029 - DNA, 30 bp, Artificial Sequence
  Synthetic oligonucleotide
caggggccatgtgcccgagggaagagaacg

SEQ ID NO: 27030 - DNA, 30 bp, Artificial Sequence
  Synthetic oligonucleotide
gatggtggttggctagataatcgaataacg

SEQ ID NO: 27031 - DNA, 30 bp, Artificial Sequence
  Synthetic oligonucleotide
gtaatggtcggcggtctgaaaacgctaacg

SEQ ID NO: 27032 - DNA, 30 bp, Artificial Sequence
  Synthetic oligonucleotide
cgatcgcgaattgtcaaatggtcattaacg

SEQ ID NO: 27033 - DNA, 30 bp, Artificial Sequence
  Synthetic oligonucleotide
acgaggctggcatccgtaacccgaaacacg

SEQ ID NO: 27034 - DNA, 30 bp, Artificial Sequence
  Synthetic oligonucleotide
atcgcggcaagacaatagcggactaccacg

SEQ ID NO: 27035 - DNA, 30 bp, Artificial Sequence
  Synthetic oligonucleotide
acctaagacacaggggtgtgtcaagccacg

SEQ ID NO: 27036 - DNA, 30 bp, Artificial Sequence
  Synthetic oligonucleotide
tactagggggtattggttggaacgatcacg

SEQ ID NO: 27037 - DNA, 30 bp, Artificial Sequence
  Synthetic oligonucleotide
aagtacacacaccgtcaaatcggaaagacg

SEQ ID NO: 27038 - DNA, 30 bp, Artificial Sequence
  Synthetic oligonucleotide
aggctcaaggagtcctcgtgaaattagacg

SEQ ID NO: 27039 - DNA, 30 bp, Artificial Sequence
  Synthetic oligonucleotide
gtcagtagactggcagaatctaagccgacg

SEQ ID NO: 27040 - DNA, 30 bp, Artificial Sequence
  Synthetic oligonucleotide
acacacaccaagggtcatgcgcgagcgacg

SEQ ID NO: 27041 - DNA, 30 bp, Artificial Sequence
  Synthetic oligonucleotide
tcggagaatatgaataaacgggcaaggacg

SEQ ID NO: 27042 - DNA, 30 bp, Artificial Sequence
  Synthetic oligonucleotide
agaagccaagaggcagatgttgcggggacg

SEQ ID NO: 27043 - DNA, 30 bp, Artificial Sequence
  Synthetic oligonucleotide
agacacaagatgcgccaaaggacatggacg

SEQ ID NO: 27044 - DNA, 30 bp, Artificial Sequence
  Synthetic oligonucleotide
aaggggccgaagaagagttgcgctctgacg

SEQ ID NO: 27045 - DNA, 30 bp, Artificial Sequence
  Synthetic oligonucleotide
gggtcagggacaagcacataatcagatacg

SEQ ID NO: 27046 - DNA, 30 bp, Artificial Sequence
  Synthetic oligonucleotide
actgtgagatgctgaccatgccgatctacg

SEQ ID NO: 27047 - DNA, 30 bp, Artificial Sequence
  Synthetic oligonucleotide
cgtaattggggcgtgacagatcaacgtacg

SEQ ID NO: 27048 - DNA, 30 bp, Artificial Sequence
  Synthetic oligonucleotide
ctaacagacaaatggagagagaaccgtacg

SEQ ID NO: 27049 - DNA, 30 bp, Artificial Sequence
  Synthetic oligonucleotide
cggagattgcagttaggcgaggagtgtacg

SEQ ID NO: 27050 - DNA, 30 bp, Artificial Sequence
  Synthetic oligonucleotide
gtcagacctaagacgactagtccggaaccg

SEQ ID NO: 27051 - DNA, 30 bp, Artificial Sequence
  Synthetic oligonucleotide
aaggcatctggcacggacaaacatccaccg

SEQ ID NO: 27052 - DNA, 30 bp, Artificial Sequence
  Synthetic oligonucleotide
aagtggcgtggcctagctcgagatcgaccg

SEQ ID NO: 27053 - DNA, 30 bp, Artificial Sequence
  Synthetic oligonucleotide
gggagaaatatatactggctcgatcgaccg

SEQ ID NO: 27054 - DNA, 30 bp, Artificial Sequence
  Synthetic oligonucleotide
agtggaggttacctagtagatggtcgaccg

SEQ ID NO: 27055 - DNA, 30 bp, Artificial Sequence
  Synthetic oligonucleotide
catcgttttgataagataagcggaggaccg

SEQ ID NO: 27056 - DNA, 30 bp, Artificial Sequence
  Synthetic oligonucleotide
tggccctatgaaaagaggcccacgtgaccg

SEQ ID NO: 27057 - DNA, 30 bp, Artificial Sequence
  Synthetic oligonucleotide
ttagcatgatgccgtggataagagaacccg

SEQ ID NO: 27058 - DNA, 31 bp, Artificial Sequence
  Synthetic oligonucleotide
gcggtaaataaatccgtcggctgaggccccg

SEQ ID NO: 27059 - DNA, 30 bp, Artificial Sequence
  Synthetic oligonucleotide
ctgaaaaaggcgaactggattagatccccg

SEQ ID NO: 27060 - DNA, 30 bp, Artificial Sequence
  Synthetic oligonucleotide
aggtcatcgaataaacccggcgggagcccg

SEQ ID NO: 27061 - DNA, 30 bp, Artificial Sequence
  Synthetic oligonucleotide
atctggctgccgactcgacagaccatcccg

SEQ ID NO: 27062 - DNA, 30 bp, Artificial Sequence
  Synthetic oligonucleotide
tcgtcgaagatctgatataaagaacggccg

SEQ ID NO: 27063 - DNA, 30 bp, Artificial Sequence
  Synthetic oligonucleotide
aaggtagctgagtaaagagtcatatggccg

SEQ ID NO: 27064 - DNA, 30 bp, Artificial Sequence
  Synthetic oligonucleotide
acttgcggcaagtatgaacgagtgtggccg

SEQ ID NO: 27065 - DNA, 30 bp, Artificial Sequence
  Synthetic oligonucleotide
tcgataacaccctagtgtttagttatgccg

SEQ ID NO: 27066 - DNA, 30 bp, Artificial Sequence
  Synthetic oligonucleotide
ggtaaggcgaggtaatagttccgactgccg

SEQ ID NO: 27067 - DNA, 30 bp, Artificial Sequence
  Synthetic oligonucleotide
gcatatatccaaagataggccaaagtgccg

SEQ ID NO: 27068 - DNA, 30 bp, Artificial Sequence
  Synthetic oligonucleotide
tcatgccggtgtaacttagtagagaatccg

SEQ ID NO: 27069 - DNA, 30 bp, Artificial Sequence
  Synthetic oligonucleotide
tcagagcatagatgataagtcgcgtatccg

SEQ ID NO: 27070 - DNA, 30 bp, Artificial Sequence
  Synthetic oligonucleotide
aaacactggcaattaaagaatcacgctccg

SEQ ID NO: 27071 - DNA, 30 bp, Artificial Sequence
  Synthetic oligonucleotide
gacgtacgggactcacgacaataggctccg

SEQ ID NO: 27072 - DNA, 30 bp, Artificial Sequence
  Synthetic oligonucleotide
tcagtagtacgtagggctaatggccaagcg

SEQ ID NO: 27073 - DNA, 30 bp, Artificial Sequence
  Synthetic oligonucleotide
agaccggagggtgggttgaattgagaagcg

SEQ ID NO: 27074 - DNA, 30 bp, Artificial Sequence
  Synthetic oligonucleotide
atgaaacgttcgcacggaaggcctgaagcg

SEQ ID NO: 27075 - DNA, 30 bp, Artificial Sequence
  Synthetic oligonucleotide
aatgataaccgaatggatgttaagtaagcg

SEQ ID NO: 27076 - DNA, 30 bp, Artificial Sequence
  Synthetic oligonucleotide
gaggaaaccagcttcgataacatcacagcg

SEQ ID NO: 27077 - DNA, 30 bp, Artificial Sequence
  Synthetic oligonucleotide
aaaaacccagaactagtggtagtcccagcg

SEQ ID NO: 27078 - DNA, 30 bp, Artificial Sequence
  Synthetic oligonucleotide
gccggcgtcctgaacaagtgccctccagcg

SEQ ID NO: 27079 - DNA, 30 bp, Artificial Sequence
  Synthetic oligonucleotide
agctgaagccatgttccggagagtgcagcg

SEQ ID NO: 27080 - DNA, 30 bp, Artificial Sequence
  Synthetic oligonucleotide
gaggtacatccgacaacagtaacctcagcg

SEQ ID NO: 27081 - DNA, 30 bp, Artificial Sequence
  Synthetic oligonucleotide
aaggattaaatggcatacggatagtcagcg

SEQ ID NO: 27082 - DNA, 30 bp, Artificial Sequence
  Synthetic oligonucleotide
gaaggaatgcatggcatggcagtcagagcg

SEQ ID NO: 27083 - DNA, 30 bp, Artificial Sequence
  Synthetic oligonucleotide
tgtagtcagcaagtttggagagctcgagcg

SEQ ID NO: 27084 - DNA, 30 bp, Artificial Sequence
  Synthetic oligonucleotide
aaggctacggcatatacacattgatgagcg

SEQ ID NO: 27085 - DNA, 30 bp, Artificial Sequence
  Synthetic oligonucleotide
ataacataggaattcggcaataatctagcg

SEQ ID NO: 27086 - DNA, 30 bp, Artificial Sequence
  Synthetic oligonucleotide
aaaggcactggaatttggacagaccccgcg

SEQ ID NO: 27087 - DNA, 30 bp, Artificial Sequence
  Synthetic oligonucleotide
acgtgaagtacaatggcaagcgaccgcgcg

SEQ ID NO: 27088 - DNA, 30 bp, Artificial Sequence
  Synthetic oligonucleotide
agggcggccaaacggaatgggatttgcgcg

SEQ ID NO: 27089 - DNA, 30 bp, Artificial Sequence
  Synthetic oligonucleotide
ataactaataagggccaagggcacaaggcg

SEQ ID NO: 27090 - DNA, 30 bp, Artificial Sequence
  Synthetic oligonucleotide
gaagggacaaacgcattcctacttcaggcg

SEQ ID NO: 27091 - DNA, 30 bp, Artificial Sequence
  Synthetic oligonucleotide
gcatggcgacaatataactagtatgaggcg

SEQ ID NO: 27092 - DNA, 30 bp, Artificial Sequence
  Synthetic oligonucleotide
tcgataggtaaaatccgagcgataccggcg

SEQ ID NO: 27093 - DNA, 30 bp, Artificial Sequence
  Synthetic oligonucleotide
gtaaagaagaccacccaacaaacgccggcg

SEQ ID NO: 27094 - DNA, 30 bp, Artificial Sequence
  Synthetic oligonucleotide
cgtagacagatccggtacggccaaagggcg

SEQ ID NO: 27095 - DNA, 30 bp, Artificial Sequence
  Synthetic oligonucleotide
agaagaggaacggggaaccgagtgatggcg

SEQ ID NO: 27096 - DNA, 30 bp, Artificial Sequence
  Synthetic oligonucleotide
aactaagcggggatgaagtcaggattggcg

SEQ ID NO: 27097 - DNA, 30 bp, Artificial Sequence
  Synthetic oligonucleotide
cgtcagcaagagaacttcactatgcctgcg

SEQ ID NO: 27098 - DNA, 30 bp, Artificial Sequence
  Synthetic oligonucleotide
agtgaggctcatcatagacaaattcctgcg

SEQ ID NO: 27099 - DNA, 30 bp, Artificial Sequence
  Synthetic oligonucleotide
acggataccacaagtgctcagaggtctgcg

SEQ ID NO: 27100 - DNA, 30 bp, Artificial Sequence
  Synthetic oligonucleotide
ggatagttcggctagaacgatagcggtgcg

SEQ ID NO: 27101 - DNA, 30 bp, Artificial Sequence
  Synthetic oligonucleotide
taaacggatcaacgaattcggtgtggtgcg

SEQ ID NO: 27102 - DNA, 30 bp, Artificial Sequence
  Synthetic oligonucleotide
gggtaacagactcacagtggcgatattgcg

SEQ ID NO: 27103 - DNA, 30 bp, Artificial Sequence
  Synthetic oligonucleotide
tacataggttaagtgccgtcccaaaaatcg

SEQ ID NO: 27104 - DNA, 30 bp, Artificial Sequence
  Synthetic oligonucleotide
tgggaatcttacctggccaatcggaaatcg

SEQ ID NO: 27105 - DNA, 30 bp, Artificial Sequence
  Synthetic oligonucleotide
acctgcgcaaatgaacgaggggacacatcg

SEQ ID NO: 27106 - DNA, 30 bp, Artificial Sequence
  Synthetic oligonucleotide
caagcaaagagctatgtccatcgcacatcg

SEQ ID NO: 27107 - DNA, 30 bp, Artificial Sequence
  Synthetic oligonucleotide
acggtcacgtaaatagctgacaatacatcg

SEQ ID NO: 27108 - DNA, 30 bp, Artificial Sequence
  Synthetic oligonucleotide
gcgactggtgtaggttcgtgtaaaagatcg

SEQ ID NO: 27109 - DNA, 30 bp, Artificial Sequence
  Synthetic oligonucleotide
ggcatactgacaccttcggatgcaagatcg

SEQ ID NO: 27110 - DNA, 30 bp, Artificial Sequence
  Synthetic oligonucleotide
cgggtaggtacaaagaacgagacttgatcg

SEQ ID NO: 27111 - DNA, 30 bp, Artificial Sequence
  Synthetic oligonucleotide
caggcaatcagcgaggcggacaaactatcg

SEQ ID NO: 27112 - DNA, 30 bp, Artificial Sequence
  Synthetic oligonucleotide
gcaggcaatcgtacaatcgaactcgtatcg

SEQ ID NO: 27113 - DNA, 30 bp, Artificial Sequence
  Synthetic oligonucleotide
aggaaaaggtcgtcaactactcgcagctcg

SEQ ID NO: 27114 - DNA, 30 bp, Artificial Sequence
  Synthetic oligonucleotide
tggatgcctgtggggagtaattcggtctcg

SEQ ID NO: 27115 - DNA, 30 bp, Artificial Sequence
  Synthetic oligonucleotide
cggtcatctggtacttatgagtgagagtcg

SEQ ID NO: 27116 - DNA, 30 bp, Artificial Sequence
  Synthetic oligonucleotide
agttaccataaacgttagaaggattcgtcg

SEQ ID NO: 27117 - DNA, 30 bp, Artificial Sequence
  Synthetic oligonucleotide
cgaccagagtatagcgcgatcatgtggtcg

SEQ ID NO: 27118 - DNA, 30 bp, Artificial Sequence
  Synthetic oligonucleotide
tgatcagagattaatgcggaattcatgtcg

SEQ ID NO: 27119 - DNA, 30 bp, Artificial Sequence
  Synthetic oligonucleotide
caggttattgtggcgtggaggcaactgtcg

SEQ ID NO: 27120 - DNA, 30 bp, Artificial Sequence
  Synthetic oligonucleotide
tgacgacttacagaggtatcatgactgtcg

SEQ ID NO: 27121 - DNA, 30 bp, Artificial Sequence
  Synthetic oligonucleotide
aggacggtcaggtataatgagtgactgtcg

SEQ ID NO: 27122 - DNA, 30 bp, Artificial Sequence
  Synthetic oligonucleotide
tcagcattagatcacactgacaattcttcg

SEQ ID NO: 27123 - DNA, 30 bp, Artificial Sequence
  Synthetic oligonucleotide
tggtaggtgggactatagtccccgcgttcg

SEQ ID NO: 27124 - DNA, 30 bp, Artificial Sequence
  Synthetic oligonucleotide
cgacaatcttaagggtgcggggagtgttcg

SEQ ID NO: 27125 - DNA, 30 bp, Artificial Sequence
  Synthetic oligonucleotide
cgaaaaacaatcacaccggagcgcatttcg

SEQ ID NO: 27126 - DNA, 30 bp, Artificial Sequence
  Synthetic oligonucleotide
tgatttggaaattagtcgagaaagaaaagg

SEQ ID NO: 27127 - DNA, 30 bp, Artificial Sequence
  Synthetic oligonucleotide
agcgggactggcacgagaagttagcaaagg

SEQ ID NO: 27128 - DNA, 30 bp, Artificial Sequence
  Synthetic oligonucleotide
cgaggcgtattagcgacggtagatgaaagg

SEQ ID NO: 27129 - DNA, 30 bp, Artificial Sequence
  Synthetic oligonucleotide
cgatcagtgcagagtatactgtatccaagg

SEQ ID NO: 27130 - DNA, 30 bp, Artificial Sequence
  Synthetic oligonucleotide
acgaacccccgggcattcggcacaagaagg

SEQ ID NO: 27131 - DNA, 30 bp, Artificial Sequence
  Synthetic oligonucleotide
tctacaacatcaggctcacataccagaagg

SEQ ID NO: 27132 - DNA, 30 bp, Artificial Sequence
  Synthetic oligonucleotide
cgggcagaagatttgaaaggatgcggaagg

SEQ ID NO: 27133 - DNA, 30 bp, Artificial Sequence
  Synthetic oligonucleotide
gaccgttcggaaagaacaactgggggaagg

SEQ ID NO: 27134 - DNA, 30 bp, Artificial Sequence
  Synthetic oligonucleotide
ggaaagatcgtaggtaccggaacatgaagg

SEQ ID NO: 27135 - DNA, 30 bp, Artificial Sequence
  Synthetic oligonucleotide
aggcgggacggcaaagaacgaaggataagg

SEQ ID NO: 27136 - DNA, 30 bp, Artificial Sequence
  Synthetic oligonucleotide
gtcaattgccaaaagcaacgcgatataagg

SEQ ID NO: 27137 - DNA, 30 bp, Artificial Sequence
  Synthetic oligonucleotide
aagaagaatcatccaaaatacgctataagg

SEQ ID NO: 27138 - DNA, 30 bp, Artificial Sequence
  Synthetic oligonucleotide
caggactagaacggtagcaaatccgtaagg

SEQ ID NO: 27139 - DNA, 30 bp, Artificial Sequence
  Synthetic oligonucleotide
acttaagccgaacgggcactagcggtaagg

SEQ ID NO: 27140 - DNA, 30 bp, Artificial Sequence
  Synthetic oligonucleotide
cgtgcacgggcatggtggaacaagtacagg

SEQ ID NO: 27141 - DNA, 30 bp, Artificial Sequence
  Synthetic oligonucleotide
cggtaagactcgccaaatcttacgcccagg

SEQ ID NO: 27142 - DNA, 30 bp, Artificial Sequence
  Synthetic oligonucleotide
catgtgggaaaagcttgagagggtgccagg

SEQ ID NO: 27143 - DNA, 30 bp, Artificial Sequence
  Synthetic oligonucleotide
tgagcggaggccaacagttttcactccagg

SEQ ID NO: 27144 - DNA, 30 bp, Artificial Sequence
  Synthetic oligonucleotide
tcacaaagtgtactagttcactagtccagg

SEQ ID NO: 27145 - DNA, 30 bp, Artificial Sequence
  Synthetic oligonucleotide
ccgataataagcaattgctaaagcagcagg

SEQ ID NO: 27146 - DNA, 30 bp, Artificial Sequence
  Synthetic oligonucleotide
ttgacagcctaactgaacaccccgagcagg

SEQ ID NO: 27147 - DNA, 30 bp, Artificial Sequence
  Synthetic oligonucleotide
acatacatagtaacaaagtaaagctgcagg

SEQ ID NO: 27148 - DNA, 30 bp, Artificial Sequence
  Synthetic oligonucleotide
tcagggcaagaaaacatgtgccctatcagg

SEQ ID NO: 27149 - DNA, 30 bp, Artificial Sequence
  Synthetic oligonucleotide
aaaaggatagcgcattgtcaagtagtcagg

SEQ ID NO: 27150 - DNA, 30 bp, Artificial Sequence
  Synthetic oligonucleotide
agtaaccacaagctcgataacgtccagagg

SEQ ID NO: 27151 - DNA, 30 bp, Artificial Sequence
  Synthetic oligonucleotide
cagaggggggaaggcttaaacatgcagagg

SEQ ID NO: 27152 - DNA, 30 bp, Artificial Sequence
  Synthetic oligonucleotide
acggacattataaatcgcgtgactcagagg

SEQ ID NO: 27153 - DNA, 30 bp, Artificial Sequence
  Synthetic oligonucleotide
gagaattacaatctctcccaagctcagagg

SEQ ID NO: 27154 - DNA, 30 bp, Artificial Sequence
  Synthetic oligonucleotide
tagggaaagtagcctagtcagcaatagagg

SEQ ID NO: 27155 - DNA, 30 bp, Artificial Sequence
  Synthetic oligonucleotide
ggacacaacagaaaagtgaaaccaacgagg

SEQ ID NO: 27156 - DNA, 30 bp, Artificial Sequence
  Synthetic oligonucleotide
caggggagcagtctgcgtgcacgtccgagg

SEQ ID NO: 27157 - DNA, 30 bp, Artificial Sequence
  Synthetic oligonucleotide
cgctcacgaacgatttatcactcagggagg

SEQ ID NO: 27158 - DNA, 30 bp, Artificial Sequence
  Synthetic oligonucleotide
cgcctgattcgatgcgggaaaaggatgagg

SEQ ID NO: 27159 - DNA, 30 bp, Artificial Sequence
  Synthetic oligonucleotide
aggaaaccaagcagaagacagtctttgagg

SEQ ID NO: 27160 - DNA, 30 bp, Artificial Sequence
  Synthetic oligonucleotide
cctaatgcgaggttggaaacacaacatagg

SEQ ID NO: 27161 - DNA, 30 bp, Artificial Sequence
  Synthetic oligonucleotide
aacggcagatctgggccagtgcaacatagg

SEQ ID NO: 27162 - DNA, 30 bp, Artificial Sequence
  Synthetic oligonucleotide
gggcaaaggtaagtttcgattcctgatagg

SEQ ID NO: 27163 - DNA, 30 bp, Artificial Sequence
  Synthetic oligonucleotide
cgaaacatatgtgaagggtctcgtgctagg

SEQ ID NO: 27164 - DNA, 30 bp, Artificial Sequence
  Synthetic oligonucleotide
aggggagttgtccctcgatcatacagtagg

SEQ ID NO: 27165 - DNA, 30 bp, Artificial Sequence
  Synthetic oligonucleotide
tcgaggtgacacaaggtgagatcgagtagg

SEQ ID NO: 27166 - DNA, 29 bp, Artificial Sequence
  Synthetic oligonucleotide
catgcacagctgtaggcgaggagggtagg

SEQ ID NO: 27167 - DNA, 30 bp, Artificial Sequence
  Synthetic oligonucleotide
ccagcagaaaactgtcaaaatgaatgtagg

SEQ ID NO: 27168 - DNA, 30 bp, Artificial Sequence
  Synthetic oligonucleotide
gcatgcagaaagcaatcaaaaagctgtagg

SEQ ID NO: 27169 - DNA, 30 bp, Artificial Sequence
  Synthetic oligonucleotide
acataccaagtgatccaggagggtattagg

SEQ ID NO: 27170 - DNA, 30 bp, Artificial Sequence
  Synthetic oligonucleotide
aggtattatacgagagcaggccacagacgg

SEQ ID NO: 27171 - DNA, 30 bp, Artificial Sequence
  Synthetic oligonucleotide
acgcggaggtattgtcggtgagtactacgg

SEQ ID NO: 27172 - DNA, 30 bp, Artificial Sequence
  Synthetic oligonucleotide
gggtacgaatcgactacacatgaagtacgg

SEQ ID NO: 27173 - DNA, 30 bp, Artificial Sequence
  Synthetic oligonucleotide
agtgtctaagggagtaagcgaaagaaccgg

SEQ ID NO: 27174 - DNA, 30 bp, Artificial Sequence
  Synthetic oligonucleotide
gaagaggcaatgcagcgctacagggaccgg

SEQ ID NO: 27175 - DNA, 30 bp, Artificial Sequence
  Synthetic oligonucleotide
ggtaagcaagagacagctacatggcgccgg

SEQ ID NO: 27176 - DNA, 30 bp, Artificial Sequence
  Synthetic oligonucleotide
ctataggcggagcaaacaaaaactgcgcgg

SEQ ID NO: 27177 - DNA, 30 bp, Artificial Sequence
  Synthetic oligonucleotide
tcgcaccaagatttggaaggaattcggcgg

SEQ ID NO: 27178 - DNA, 30 bp, Artificial Sequence
  Synthetic oligonucleotide
cattagagagacaaagcgattatagtgcgg

SEQ ID NO: 27179 - DNA, 30 bp, Artificial Sequence
  Synthetic oligonucleotide
gatcgtaacgaagattacgaacgggtgcgg

SEQ ID NO: 27180 - DNA, 30 bp, Artificial Sequence
  Synthetic oligonucleotide
tcaagtcccatcggcgagcctaaacatcgg

SEQ ID NO: 27181 - DNA, 30 bp, Artificial Sequence
  Synthetic oligonucleotide
aaggagtctgggcataccctgaatactcgg

SEQ ID NO: 27182 - DNA, 30 bp, Artificial Sequence
  Synthetic oligonucleotide
cgaactacgggactgtaaaggtacagtcgg

SEQ ID NO: 27183 - DNA, 30 bp, Artificial Sequence
  Synthetic oligonucleotide
atttgctgctgagacactcgaaataaaggg

SEQ ID NO: 27184 - DNA, 30 bp, Artificial Sequence
  Synthetic oligonucleotide
tacgggactaatgtcgttcagagacaaggg

SEQ ID NO: 27185 - DNA, 30 bp, Artificial Sequence
  Synthetic oligonucleotide
agcgtggcgtgatcagcgagacagcaaggg

SEQ ID NO: 27186 - DNA, 30 bp, Artificial Sequence
  Synthetic oligonucleotide
gagataccgggacaactggggcaataaggg

SEQ ID NO: 27187 - DNA, 30 bp, Artificial Sequence
  Synthetic oligonucleotide
cgtgaacccattgttatattatgaacaggg

SEQ ID NO: 27188 - DNA, 30 bp, Artificial Sequence
  Synthetic oligonucleotide
tatgctaagcggtgtaaaacgaagccaggg

SEQ ID NO: 27189 - DNA, 30 bp, Artificial Sequence
  Synthetic oligonucleotide
gtcacaaatagtgatatgggccaatcaggg

SEQ ID NO: 27190 - DNA, 30 bp, Artificial Sequence
  Synthetic oligonucleotide
cgagtaaggtcccaaagtccgaaaagaggg

SEQ ID NO: 27191 - DNA, 30 bp, Artificial Sequence
  Synthetic oligonucleotide
ccaacagtggacaataatcaggatagaggg

SEQ ID NO: 27192 - DNA, 30 bp, Artificial Sequence
  Synthetic oligonucleotide
ggtgctacggatgtagtcattgcgcgaggg

SEQ ID NO: 27193 - DNA, 30 bp, Artificial Sequence
  Synthetic oligonucleotide
ggagcaagcggagcatgcatcttgataggg

SEQ ID NO: 27194 - DNA, 30 bp, Artificial Sequence
  Synthetic oligonucleotide
gggaatgacgtccttgtcaaaactaacggg

SEQ ID NO: 27195 - DNA, 30 bp, Artificial Sequence
  Synthetic oligonucleotide
gacagaatgggtcgaatcagcgagaccggg

SEQ ID NO: 27196 - DNA, 30 bp, Artificial Sequence
  Synthetic oligonucleotide
ccgtcagtgaacatcgtgcatacgtccggg

SEQ ID NO: 27197 - DNA, 30 bp, Artificial Sequence
  Synthetic oligonucleotide
acacggaaatgctaatgaggcattagcggg

SEQ ID NO: 27198 - DNA, 30 bp, Artificial Sequence
  Synthetic oligonucleotide
ggtgcgaacttaacgatggtaagaaagggg

SEQ ID NO: 27199 - DNA, 30 bp, Artificial Sequence
  Synthetic oligonucleotide
cagaaatattacgtagggcatcggaagggg

SEQ ID NO: 27200 - DNA, 30 bp, Artificial Sequence
  Synthetic oligonucleotide
gcacgaaataacgtataattactgaagggg

SEQ ID NO: 27201 - DNA, 30 bp, Artificial Sequence
  Synthetic oligonucleotide
cgcgaaagaagatttcagaaggcgcagggg

SEQ ID NO: 27202 - DNA, 30 bp, Artificial Sequence
  Synthetic oligonucleotide
ctagaagaggtatcactcgcccgagagggg

SEQ ID NO: 27203 - DNA, 30 bp, Artificial Sequence
  Synthetic oligonucleotide
gatggcagacattcataaattagggagggg

SEQ ID NO: 27204 - DNA, 30 bp, Artificial Sequence
  Synthetic oligonucleotide
gatgggaggagaatgatcgcactcgcgggg

SEQ ID NO: 27205 - DNA, 30 bp, Artificial Sequence
  Synthetic oligonucleotide
catgggagactgacaagtattcaggcgggg

SEQ ID NO: 27206 - DNA, 30 bp, Artificial Sequence
  Synthetic oligonucleotide
acgatctgtgatcgatgtgtatacaggggg

SEQ ID NO: 27207 - DNA, 30 bp, Artificial Sequence
  Synthetic oligonucleotide
cgcaacagcgggaggtattttgaaaatggg

SEQ ID NO: 27208 - DNA, 30 bp, Artificial Sequence
  Synthetic oligonucleotide
gactcggaccgatacatgcaacgtcctggg

SEQ ID NO: 27209 - DNA, 30 bp, Artificial Sequence
  Synthetic oligonucleotide
ccttacgattagtcgggggacatagctggg

SEQ ID NO: 27210 - DNA, 30 bp, Artificial Sequence
  Synthetic oligonucleotide
atgacgattacctggagcggagtcagtggg

SEQ ID NO: 27211 - DNA, 30 bp, Artificial Sequence
  Synthetic oligonucleotide
aagtaaggaacagtaagtatgctcggtggg

SEQ ID NO: 27212 - DNA, 30 bp, Artificial Sequence
  Synthetic oligonucleotide
caggggctgttacgaataacagtaaaatgg

SEQ ID NO: 27213 - DNA, 30 bp, Artificial Sequence
  Synthetic oligonucleotide
ttgggaagacaccgagacttgtcgaaatgg

SEQ ID NO: 27214 - DNA, 30 bp, Artificial Sequence
  Synthetic oligonucleotide
gaggagcttaattgcttaactaaccaatgg

SEQ ID NO: 27215 - DNA, 30 bp, Artificial Sequence
  Synthetic oligonucleotide
cgtattgagatggtctcgggtcaagaatgg

SEQ ID NO: 27216 - DNA, 30 bp, Artificial Sequence
  Synthetic oligonucleotide
acactaccgcaagcaatgaatgtggaatgg

SEQ ID NO: 27217 - DNA, 30 bp, Artificial Sequence
  Synthetic oligonucleotide
cctggtcagtccaccggggcaaagacatgg

SEQ ID NO: 27218 - DNA, 30 bp, Artificial Sequence
  Synthetic oligonucleotide
cggaaaaatcaggtgcgacacatcgcatgg

SEQ ID NO: 27219 - DNA, 30 bp, Artificial Sequence
  Synthetic oligonucleotide
atagacggatacgatgtgtttggggcatgg

SEQ ID NO: 27220 - DNA, 30 bp, Artificial Sequence
  Synthetic oligonucleotide
ccaggtgacataaaagttgctcgacgatgg

SEQ ID NO: 27221 - DNA, 30 bp, Artificial Sequence
  Synthetic oligonucleotide
ccgtagcaaagcatacagtggtcgggctgg

SEQ ID NO: 27222 - DNA, 30 bp, Artificial Sequence
  Synthetic oligonucleotide
gttgagcggacgaaggtgtccgattgctgg

SEQ ID NO: 27223 - DNA, 30 bp, Artificial Sequence
  Synthetic oligonucleotide
caaggaagtagatattggacctcgatctgg

SEQ ID NO: 27224 - DNA, 30 bp, Artificial Sequence
  Synthetic oligonucleotide
agggtgaaacacacaaggatgcgcacgtgg

SEQ ID NO: 27225 - DNA, 30 bp, Artificial Sequence
  Synthetic oligonucleotide
gaacgggcgatcaatgcaaactgcaggtgg

SEQ ID NO: 27226 - DNA, 30 bp, Artificial Sequence
  Synthetic oligonucleotide
aagggtatgaatatcaacgtgtagaggtgg

SEQ ID NO: 27227 - DNA, 30 bp, Artificial Sequence
  Synthetic oligonucleotide
gaggactgagatcagggacgtcggaattgg

SEQ ID NO: 27228 - DNA, 30 bp, Artificial Sequence
  Synthetic oligonucleotide
cagaccataagaaggaataaatcacattgg

SEQ ID NO: 27229 - DNA, 30 bp, Artificial Sequence
  Synthetic oligonucleotide
tctgagcacaaccacccacgaattcattgg

SEQ ID NO: 27230 - DNA, 30 bp, Artificial Sequence
  Synthetic oligonucleotide
ggggggactagccagaacttcgtcacttgg

SEQ ID NO: 27231 - DNA, 30 bp, Artificial Sequence
  Synthetic oligonucleotide
aaggaggattagttgatgtaaaagatttgg

SEQ ID NO: 27232 - DNA, 30 bp, Artificial Sequence
  Synthetic oligonucleotide
gttgcacatagacacaaaatagcactttgg

SEQ ID NO: 27233 - DNA, 30 bp, Artificial Sequence
  Synthetic oligonucleotide
gtgcaactggatcagagacacactctttgg

SEQ ID NO: 27234 - DNA, 30 bp, Artificial Sequence
  Synthetic oligonucleotide
ggaatccccttagagaaactattaaaaatg

SEQ ID NO: 27235 - DNA, 30 bp, Artificial Sequence
  Synthetic oligonucleotide
tcgtaattacgttggagcgaaaaaccaatg

SEQ ID NO: 27236 - DNA, 30 bp, Artificial Sequence
  Synthetic oligonucleotide
cgctagccgtccctcaatatgcgatcaatg

SEQ ID NO: 27237 - DNA, 31 bp, Artificial Sequence
  Synthetic oligonucleotide
ggtgcatcaatcagtgcaacgatggtcaatg

SEQ ID NO: 27238 - DNA, 30 bp, Artificial Sequence
  Synthetic oligonucleotide
ccacgtgatagggctaagttcacttcaatg

SEQ ID NO: 27239 - DNA, 30 bp, Artificial Sequence
  Synthetic oligonucleotide
gatgagcggacgtcaagcgcaccgagaatg

SEQ ID NO: 27240 - DNA, 30 bp, Artificial Sequence
  Synthetic oligonucleotide
aactgaatgccacagaagagtacccgaatg

SEQ ID NO: 27241 - DNA, 30 bp, Artificial Sequence
  Synthetic oligonucleotide
aacgataggcaaccaagtaaaagccgaatg

SEQ ID NO: 27242 - DNA, 30 bp, Artificial Sequence
  Synthetic oligonucleotide
tctcgccggcagttggacagctaaggaatg

SEQ ID NO: 27243 - DNA, 30 bp, Artificial Sequence
  Synthetic oligonucleotide
ggggatagaagcacgatgtgatgctgaatg

SEQ ID NO: 27244 - DNA, 30 bp, Artificial Sequence
  Synthetic oligonucleotide
caacgttgagcatgtaaagcactaataatg

SEQ ID NO: 27245 - DNA, 30 bp, Artificial Sequence
  Synthetic oligonucleotide
acgttagggtatgaacaagttaagctaatg

SEQ ID NO: 27246 - DNA, 30 bp, Artificial Sequence
  Synthetic oligonucleotide
ttacaagtaaatcaggaaagatggaacatg

SEQ ID NO: 27247 - DNA, 30 bp, Artificial Sequence
  Synthetic oligonucleotide
gtcgaagacgtgtaaggtctgaagcacatg

SEQ ID NO: 27248 - DNA, 30 bp, Artificial Sequence
  Synthetic oligonucleotide
cgaggtagacataatgagctacccgacatg

SEQ ID NO: 27249 - DNA, 30 bp, Artificial Sequence
  Synthetic oligonucleotide
tgacggtaccggtcaatgtcgaggcccatg

SEQ ID NO: 27250 - DNA, 30 bp, Artificial Sequence
  Synthetic oligonucleotide
tactccgaacctcgaacaaggacagccatg

SEQ ID NO: 27251 - DNA, 30 bp, Artificial Sequence
  Synthetic oligonucleotide
ggagatgcaattgagcgaagtcaggccatg

SEQ ID NO: 27252 - DNA, 30 bp, Artificial Sequence
  Synthetic oligonucleotide
ggcggtctagttcgaaagcatcgaatcatg

SEQ ID NO: 27253 - DNA, 30 bp, Artificial Sequence
  Synthetic oligonucleotide
aggcgtgagcttgaaaacggaggggtcatg

SEQ ID NO: 27254 - DNA, 30 bp, Artificial Sequence
  Synthetic oligonucleotide
accccaagcttcgaaatcctcagacagatg

SEQ ID NO: 27255 - DNA, 30 bp, Artificial Sequence
  Synthetic oligonucleotide
tgactaaggtcggcccaaggaaggcagatg

SEQ ID NO: 27256 - DNA, 30 bp, Artificial Sequence
  Synthetic oligonucleotide
gagcacagcagatgcaaaactaaagagatg

SEQ ID NO: 27257 - DNA, 30 bp, Artificial Sequence
  Synthetic oligonucleotide
ggcggcgccgaaacgagagtcgtgtagatg

SEQ ID NO: 27258 - DNA, 30 bp, Artificial Sequence
  Synthetic oligonucleotide
ggttagagaatggctagaacaagaaggatg

SEQ ID NO: 27259 - DNA, 30 bp, Artificial Sequence
  Synthetic oligonucleotide
atgagatagatcatgacaaggggtatgatg

SEQ ID NO: 27260 - DNA, 30 bp, Artificial Sequence
  Synthetic oligonucleotide
gttactatgaaggtaacaagccagctgatg

SEQ ID NO: 27261 - DNA, 30 bp, Artificial Sequence
  Synthetic oligonucleotide
cacggtagtataataattcatcaggtgatg

SEQ ID NO: 27262 - DNA, 30 bp, Artificial Sequence
  Synthetic oligonucleotide
tcaagctgaatcaaaaactcaacttctatg

SEQ ID NO: 27263 - DNA, 30 bp, Artificial Sequence
  Synthetic oligonucleotide
acatgttgcgacaagtccagacgaagtatg

SEQ ID NO: 27264 - DNA, 30 bp, Artificial Sequence
  Synthetic oligonucleotide
acgcacgacacaccatctgcaccgagtatg

SEQ ID NO: 27265 - DNA, 30 bp, Artificial Sequence
  Synthetic oligonucleotide
gaacgatgagagcgaagtcacgaatgtatg

SEQ ID NO: 27266 - DNA, 30 bp, Artificial Sequence
  Synthetic oligonucleotide
cggaactaatcgataggcacagagattatg

SEQ ID NO: 27267 - DNA, 30 bp, Artificial Sequence
  Synthetic oligonucleotide
tcaggggaagatatattagtactagttatg

SEQ ID NO: 27268 - DNA, 30 bp, Artificial Sequence
  Synthetic oligonucleotide
tgacactgagcctgggcttacgaaaaactg

SEQ ID NO: 27269 - DNA, 30 bp, Artificial Sequence
  Synthetic oligonucleotide
acaccacaatacgacccttaatctcaactg

SEQ ID NO: 27270 - DNA, 35 bp, Artificial Sequence
  Synthetic oligonucleotide
acggctactatcaacaggacgaagatagttaactg

SEQ ID NO: 27271 - DNA, 30 bp, Artificial Sequence
  Synthetic oligonucleotide
agcagggcgtcagttagggggatcagactg

SEQ ID NO: 27272 - DNA, 30 bp, Artificial Sequence
  Synthetic oligonucleotide
acaacgagccatattgacagaaggtgactg

SEQ ID NO: 27273 - DNA, 30 bp, Artificial Sequence
  Synthetic oligonucleotide
tcctgatggacgtattgaagtacggtactg

SEQ ID NO: 27274 - DNA, 30 bp, Artificial Sequence
  Synthetic oligonucleotide
ccgatacgcgagtgagagggcttggtactg

SEQ ID NO: 27275 - DNA, 30 bp, Artificial Sequence
  Synthetic oligonucleotide
ctatgggctgaaggtacgagagcgagcctg

SEQ ID NO: 27276 - DNA, 30 bp, Artificial Sequence
  Synthetic oligonucleotide
tgcatagtcagggacagaaactcacgcctg

SEQ ID NO: 27277 - DNA, 30 bp, Artificial Sequence
  Synthetic oligonucleotide
cataaacaagcagacacctagggaatcctg

SEQ ID NO: 27278 - DNA, 30 bp, Artificial Sequence
  Synthetic oligonucleotide
atggggtggatctgaagacagaggatcctg

SEQ ID NO: 27279 - DNA, 30 bp, Artificial Sequence
  Synthetic oligonucleotide
accacatcgagtcaatatattctaaggctg

SEQ ID NO: 27280 - DNA, 30 bp, Artificial Sequence
  Synthetic oligonucleotide
gcgaggatcaatatgcgcccgtagcggctg

SEQ ID NO: 27281 - DNA, 30 bp, Artificial Sequence
  Synthetic oligonucleotide
gcgtgggatcaaagggataccaacgatctg

SEQ ID NO: 27282 - DNA, 30 bp, Artificial Sequence
  Synthetic oligonucleotide
gtacggccggcctatgcgtgcggaaaagtg

SEQ ID NO: 27283 - DNA, 30 bp, Artificial Sequence
  Synthetic oligonucleotide
cgttaccggacggtgcgaacaaaaacagtg

SEQ ID NO: 27284 - DNA, 30 bp, Artificial Sequence
  Synthetic oligonucleotide
acgtaagtctgtactggtcgaacaacagtg

SEQ ID NO: 27285 - DNA, 30 bp, Artificial Sequence
  Synthetic oligonucleotide
tccaaggaggtcatcaatctagtaacagtg

SEQ ID NO: 27286 - DNA, 30 bp, Artificial Sequence
  Synthetic oligonucleotide
gagcatgctgttcgaaggttaaaaccagtg

SEQ ID NO: 27287 - DNA, 30 bp, Artificial Sequence
  Synthetic oligonucleotide
acgacccctaggtaaaactggtcaccagtg

SEQ ID NO: 27288 - DNA, 30 bp, Artificial Sequence
  Synthetic oligonucleotide
cggacaaccagtgccacggtatccccagtg

SEQ ID NO: 27289 - DNA, 30 bp, Artificial Sequence
  Synthetic oligonucleotide
aggtacttacgtacgctccgttatccagtg

SEQ ID NO: 27290 - DNA, 30 bp, Artificial Sequence
  Synthetic oligonucleotide
agggcgaccacgagtacaggcttatcagtg

SEQ ID NO: 27291 - DNA, 30 bp, Artificial Sequence
  Synthetic oligonucleotide
cgggacccgtattaagactcggagtcagtg

SEQ ID NO: 27292 - DNA, 30 bp, Artificial Sequence
  Synthetic oligonucleotide
tggcgacaatgcggtgagccgtaaagagtg

SEQ ID NO: 27293 - DNA, 30 bp, Artificial Sequence
  Synthetic oligonucleotide
gacgtatagccgggataggtaagacgagtg

SEQ ID NO: 27294 - DNA, 30 bp, Artificial Sequence
  Synthetic oligonucleotide
cccgtgacgaggctgaaattaccaggagtg

SEQ ID NO: 27295 - DNA, 30 bp, Artificial Sequence
  Synthetic oligonucleotide
gtggtgataggcgatagggaaaacaacgtg

SEQ ID NO: 27296 - DNA, 30 bp, Artificial Sequence
  Synthetic oligonucleotide
tcgattggactcaatactgatactaacgtg

SEQ ID NO: 27297 - DNA, 30 bp, Artificial Sequence
  Synthetic oligonucleotide
gctaataccagggaaagtaattgtaacgtg

SEQ ID NO: 27298 - DNA, 30 bp, Artificial Sequence
  Synthetic oligonucleotide
tgcttaaacaaaaaggcaaatggctccgtg

SEQ ID NO: 27299 - DNA, 30 bp, Artificial Sequence
  Synthetic oligonucleotide
gggaaccaagtgttaatgcgcatgtgcgtg

SEQ ID NO: 27300 - DNA, 30 bp, Artificial Sequence
  Synthetic oligonucleotide
agctgtgcttgaattgtctctaccatcgtg

SEQ ID NO: 27301 - DNA, 30 bp, Artificial Sequence
  Synthetic oligonucleotide
cgaccctatattgatgtctatccactcgtg

SEQ ID NO: 27302 - DNA, 30 bp, Artificial Sequence
  Synthetic oligonucleotide
tgagagattaaggattcgtgagtgttcgtg

SEQ ID NO: 27303 - DNA, 30 bp, Artificial Sequence
  Synthetic oligonucleotide
gtcggcccttaagcgggggaaagaaaggtg

SEQ ID NO: 27304 - DNA, 30 bp, Artificial Sequence
  Synthetic oligonucleotide
tatcagtgcttgaggaagtgaaatgaggtg

SEQ ID NO: 27305 - DNA, 30 bp, Artificial Sequence
  Synthetic oligonucleotide
cctaatatgcctcatgcgatcgaatcggtg

SEQ ID NO: 27306 - DNA, 30 bp, Artificial Sequence
  Synthetic oligonucleotide
accgagttagaactctaaactgccagggtg

SEQ ID NO: 27307 - DNA, 30 bp, Artificial Sequence
  Synthetic oligonucleotide
cctcaaaaagaagtggaataataatgggtg

SEQ ID NO: 27308 - DNA, 30 bp, Artificial Sequence
  Synthetic oligonucleotide
acatctcaggctgcctcccggaatatggtg

SEQ ID NO: 27309 - DNA, 30 bp, Artificial Sequence
  Synthetic oligonucleotide
gaacgatctaagtccgtcttgccgaatgtg

SEQ ID NO: 27310 - DNA, 30 bp, Artificial Sequence
  Synthetic oligonucleotide
cgataaacaagtccgctatggacccatgtg

SEQ ID NO: 27311 - DNA, 30 bp, Artificial Sequence
  Synthetic oligonucleotide
agaaggcgatacagcggtgccaccactgtg

SEQ ID NO: 27312 - DNA, 30 bp, Artificial Sequence
  Synthetic oligonucleotide
acaatgtattacggcaaccaaggcagtgtg

SEQ ID NO: 27313 - DNA, 30 bp, Artificial Sequence
  Synthetic oligonucleotide
gaaacgaggtatactcaataaacaggtgtg

SEQ ID NO: 27314 - DNA, 30 bp, Artificial Sequence
  Synthetic oligonucleotide
cgaaagtctccagggaataaccacaaattg

SEQ ID NO: 27315 - DNA, 30 bp, Artificial Sequence
  Synthetic oligonucleotide
tgaaggtgcgcacccccaacatcacaattg

SEQ ID NO: 27316 - DNA, 30 bp, Artificial Sequence
  Synthetic oligonucleotide
ctgaggtgaagatcatcgagtaaggcattg

SEQ ID NO: 27317 - DNA, 30 bp, Artificial Sequence
  Synthetic oligonucleotide
tgggtaagacgatctggaccgagatcattg

SEQ ID NO: 27318 - DNA, 30 bp, Artificial Sequence
  Synthetic oligonucleotide
acggagcgtgagtaccaaagttcttcattg

SEQ ID NO: 27319 - DNA, 30 bp, Artificial Sequence
  Synthetic oligonucleotide
gacgttgggcgagaggccggactcagattg

SEQ ID NO: 27320 - DNA, 30 bp, Artificial Sequence
  Synthetic oligonucleotide
cgaccgaacgtttccacaaggaaaggattg

SEQ ID NO: 27321 - DNA, 30 bp, Artificial Sequence
  Synthetic oligonucleotide
gccgaaagatgaaatccaatgttgctattg

SEQ ID NO: 27322 - DNA, 30 bp, Artificial Sequence
  Synthetic oligonucleotide
caaggcgtgggtggtacactgcgtaacttg

SEQ ID NO: 27323 - DNA, 30 bp, Artificial Sequence
  Synthetic oligonucleotide
acgatccactgcccaaaactatatgccttg

SEQ ID NO: 27324 - DNA, 31 bp, Artificial Sequence
  Synthetic oligonucleotide
ttggcaagcatgatcgaaagggataaagttg

SEQ ID NO: 27325 - DNA, 30 bp, Artificial Sequence
  Synthetic oligonucleotide
cggtacaattcgaaactgaatatcaagttg

SEQ ID NO: 27326 - DNA, 30 bp, Artificial Sequence
  Synthetic oligonucleotide
aaagcggaggctggggatcttgtacagttg

SEQ ID NO: 27327 - DNA, 30 bp, Artificial Sequence
  Synthetic oligonucleotide
cgcgtcgtaggtagatttgatggggagttg

SEQ ID NO: 27328 - DNA, 30 bp, Artificial Sequence
  Synthetic oligonucleotide
ttagccggagggggagcaagtccatagttg

SEQ ID NO: 27329 - DNA, 30 bp, Artificial Sequence
  Synthetic oligonucleotide
gccagtaagcatagaataagaattgcgttg

SEQ ID NO: 27330 - DNA, 30 bp, Artificial Sequence
  Synthetic oligonucleotide
gaggcgaaatagggcgactcaacgaggttg

SEQ ID NO: 27331 - DNA, 30 bp, Artificial Sequence
  Synthetic oligonucleotide
acggcttcacgcaacgggatcgcggggttg

SEQ ID NO: 27332 - DNA, 30 bp, Artificial Sequence
  Synthetic oligonucleotide
ggtagacgagtcaaaagttggatatggttg

SEQ ID NO: 27333 - DNA, 30 bp, Artificial Sequence
  Synthetic oligonucleotide
gtaacctccaatgcaatgtgaaagtggttg

SEQ ID NO: 27334 - DNA, 30 bp, Artificial Sequence
  Synthetic oligonucleotide
gctaacatgcgggaaatgtaggcgagtttg

SEQ ID NO: 27335 - DNA, 30 bp, Artificial Sequence
  Synthetic oligonucleotide
gggagagggagatgttatacaggttgtttg

SEQ ID NO: 27336 - DNA, 30 bp, Artificial Sequence
  Synthetic oligonucleotide
taaccagggtgcatcacgctaaaggaaaat

SEQ ID NO: 27337 - DNA, 30 bp, Artificial Sequence
  Synthetic oligonucleotide
gatcgtgccggtacaggcgagggaggaaat

SEQ ID NO: 27338 - DNA, 30 bp, Artificial Sequence
  Synthetic oligonucleotide
cggtaagtaggtcattctaaggaacacaat

SEQ ID NO: 27339 - DNA, 30 bp, Artificial Sequence
  Synthetic oligonucleotide
acacaatgcagggttgggataaggtgcaat

SEQ ID NO: 27340 - DNA, 30 bp, Artificial Sequence
  Synthetic oligonucleotide
cagccagtctaagagcaatgtcacgtcaat

SEQ ID NO: 27341 - DNA, 30 bp, Artificial Sequence
  Synthetic oligonucleotide
cggatgacgagtaaaaaattaggcttcaat

SEQ ID NO: 27342 - DNA, 30 bp, Artificial Sequence
  Synthetic oligonucleotide
acaagcgtcacgtcaaactgcgggaagaat

SEQ ID NO: 27343 - DNA, 30 bp, Artificial Sequence
  Synthetic oligonucleotide
atcaaacaaactatgcgagcgagccagaat

SEQ ID NO: 27344 - DNA, 30 bp, Artificial Sequence
  Synthetic oligonucleotide
catcccgcgtcatagcgaaaaagggagaat

SEQ ID NO: 27345 - DNA, 30 bp, Artificial Sequence
  Synthetic oligonucleotide
acgctaaacgaacagcgggcaagggagaat

SEQ ID NO: 27346 - DNA, 30 bp, Artificial Sequence
  Synthetic oligonucleotide
gggcagaggacacatactgcaagggagaat

SEQ ID NO: 27347 - DNA, 30 bp, Artificial Sequence
  Synthetic oligonucleotide
ccgcgaaagccatccgtgatctgtgagaat

SEQ ID NO: 27348 - DNA, 30 bp, Artificial Sequence
  Synthetic oligonucleotide
gcgaaagacctcggcgtatctcaaacgaat

SEQ ID NO: 27349 - DNA, 30 bp, Artificial Sequence
  Synthetic oligonucleotide
tcgtgttagcgtgtatgaggacaggcgaat

SEQ ID NO: 27350 - DNA, 30 bp, Artificial Sequence
  Synthetic oligonucleotide
ccctgagcaaaaaatagcgtcggctcgaat

SEQ ID NO: 27351 - DNA, 30 bp, Artificial Sequence
  Synthetic oligonucleotide
aaagagagctcgtaagcagcgtgttggaat

SEQ ID NO: 27352 - DNA, 30 bp, Artificial Sequence
  Synthetic oligonucleotide
agaaacatgactaaagggtggccactgaat

SEQ ID NO: 27353 - DNA, 30 bp, Artificial Sequence
  Synthetic oligonucleotide
agggcgtgaatccaggtgtcagcgctgaat

SEQ ID NO: 27354 - DNA, 30 bp, Artificial Sequence
  Synthetic oligonucleotide
gcgggtacctagtactggaacggaaataat

SEQ ID NO: 27355 - DNA, 30 bp, Artificial Sequence
  Synthetic oligonucleotide
agcaccacgattggcgaggatagtcataat

SEQ ID NO: 27356 - DNA, 30 bp, Artificial Sequence
  Synthetic oligonucleotide
cacgagtaggcacagcccaacgaaagtaat

SEQ ID NO: 27357 - DNA, 30 bp, Artificial Sequence
  Synthetic oligonucleotide
gcagaacaagaagtgtaagatagtcgtaat

SEQ ID NO: 27358 - DNA, 30 bp, Artificial Sequence
  Synthetic oligonucleotide
gcgtgagatgacggaggtccgaacaaacat

SEQ ID NO: 27359 - DNA, 30 bp, Artificial Sequence
  Synthetic oligonucleotide
accaccaacatccgtgaagaaccgaaacat

SEQ ID NO: 27360 - DNA, 30 bp, Artificial Sequence
  Synthetic oligonucleotide
cgaggggctaaatgcgctccgggacaacat

SEQ ID NO: 27361 - DNA, 30 bp, Artificial Sequence
  Synthetic oligonucleotide
tacgaccatagagtgtctcaggcgcaacat

SEQ ID NO: 27362 - DNA, 30 bp, Artificial Sequence
  Synthetic oligonucleotide
tagggctaatgaactggaaataagagacat

SEQ ID NO: 27363 - DNA, 30 bp, Artificial Sequence
  Synthetic oligonucleotide
gcagaatatgcaacgttacagagctgacat

SEQ ID NO: 27364 - DNA, 30 bp, Artificial Sequence
  Synthetic oligonucleotide
acgagtattcgggcagtctagcagtgacat

SEQ ID NO: 27365 - DNA, 30 bp, Artificial Sequence
  Synthetic oligonucleotide
aaggagtggtcgcaagaggttacgtgacat

SEQ ID NO: 27366 - DNA, 30 bp, Artificial Sequence
  Synthetic oligonucleotide
acctcatcaggcatagagtgtcgtttacat

SEQ ID NO: 27367 - DNA, 30 bp, Artificial Sequence
  Synthetic oligonucleotide
aggaataaaataagctaagtgtatcagcat

SEQ ID NO: 27368 - DNA, 30 bp, Artificial Sequence
  Synthetic oligonucleotide
tagaagaataaggatattgaatgaaggcat

SEQ ID NO: 27369 - DNA, 30 bp, Artificial Sequence
  Synthetic oligonucleotide
acgcaaatcaacaccagcgcacgtaggcat

SEQ ID NO: 27370 - DNA, 30 bp, Artificial Sequence
  Synthetic oligonucleotide
ggataaggtgatcggtagatacgatggcat

SEQ ID NO: 27371 - DNA, 30 bp, Artificial Sequence
  Synthetic oligonucleotide
tacaagggcaagaatagggggccaatgcat

SEQ ID NO: 27372 - DNA, 30 bp, Artificial Sequence
  Synthetic oligonucleotide
ctggtagggaaggaccaggagggggtgcat

SEQ ID NO: 27373 - DNA, 30 bp, Artificial Sequence
  Synthetic oligonucleotide
aaggcaaaaaagcgagatgaaaggttgcat

SEQ ID NO: 27374 - DNA, 30 bp, Artificial Sequence
  Synthetic oligonucleotide
acgaccgaggcagttggttaaggaaatcat

SEQ ID NO: 27375 - DNA, 30 bp, Artificial Sequence
  Synthetic oligonucleotide
atacccaccgacaaagtgtaaaggcatcat

SEQ ID NO: 27376 - DNA, 30 bp, Artificial Sequence
  Synthetic oligonucleotide
cactagaggagaaccacgtgccgggatcat

SEQ ID NO: 27377 - DNA, 30 bp, Artificial Sequence
  Synthetic oligonucleotide
ggcgcatggggaactgaaatccggagtcat

SEQ ID NO: 27378 - DNA, 30 bp, Artificial Sequence
  Synthetic oligonucleotide
aggagagtgcagagaatctgaggtgaagat

SEQ ID NO: 27379 - DNA, 30 bp, Artificial Sequence
  Synthetic oligonucleotide
tgaagcgatgctaaaaaagagtagtaagat

SEQ ID NO: 27380 - DNA, 30 bp, Artificial Sequence
  Synthetic oligonucleotide
tcgtacgttatagtacaaccgtcaacagat

SEQ ID NO: 27381 - DNA, 30 bp, Artificial Sequence
  Synthetic oligonucleotide
gtctcatagagagggccgtcagcgacagat

SEQ ID NO: 27382 - DNA, 30 bp, Artificial Sequence
  Synthetic oligonucleotide
gatgtagttgagcaaggaccgatgacagat

SEQ ID NO: 27383 - DNA, 30 bp, Artificial Sequence
  Synthetic oligonucleotide
cgcattaagagtggtatacgaacaccagat

SEQ ID NO: 27384 - DNA, 30 bp, Artificial Sequence
  Synthetic oligonucleotide
acaaagagtgcaaacctcgggaatatagat

SEQ ID NO: 27385 - DNA, 30 bp, Artificial Sequence
  Synthetic oligonucleotide
acggcagacggggtcgcaaaatgactagat

SEQ ID NO: 27386 - DNA, 30 bp, Artificial Sequence
  Synthetic oligonucleotide
tcggcgagagaattacaaaacggtgacgat

SEQ ID NO: 27387 - DNA, 30 bp, Artificial Sequence
  Synthetic oligonucleotide
gaggtacacgagttcatcagcggatccgat

SEQ ID NO: 27388 - DNA, 30 bp, Artificial Sequence
  Synthetic oligonucleotide
tcggttaggctaagaaagaaatactccgat

SEQ ID NO: 27389 - DNA, 30 bp, Artificial Sequence
  Synthetic oligonucleotide
caaggaggggttagacgctaccgttgcgat

SEQ ID NO: 27390 - DNA, 30 bp, Artificial Sequence
  Synthetic oligonucleotide
acgtgagagaaacgtaggatcgcgaaggat

SEQ ID NO: 27391 - DNA, 30 bp, Artificial Sequence
  Synthetic oligonucleotide
gatgacgggggaccgaacgggatacaggat

SEQ ID NO: 27392 - DNA, 30 bp, Artificial Sequence
  Synthetic oligonucleotide
agggattggacgtcaatcaaacagacggat

SEQ ID NO: 27393 - DNA, 30 bp, Artificial Sequence
  Synthetic oligonucleotide
ggacgcggagggaatgacggtccaagggat

SEQ ID NO: 27394 - DNA, 30 bp, Artificial Sequence
  Synthetic oligonucleotide
tcgtgcaaacgaaaacaagagaacgtggat

SEQ ID NO: 27395 - DNA, 30 bp, Artificial Sequence
  Synthetic oligonucleotide
acgtccagagactgggagcaagagaatgat

SEQ ID NO: 27396 - DNA, 30 bp, Artificial Sequence
  Synthetic oligonucleotide
ggtagagaatacggtgagggcgtgcctgat

SEQ ID NO: 27397 - DNA, 30 bp, Artificial Sequence
  Synthetic oligonucleotide
gggaaaaaacgagcgatatacaaatgatat

SEQ ID NO: 27398 - DNA, 30 bp, Artificial Sequence
  Synthetic oligonucleotide
ttaatgaggagtgaacgatatagctgatat

SEQ ID NO: 27399 - DNA, 30 bp, Artificial Sequence
  Synthetic oligonucleotide
gctaaaggattaaagagagctaacatctat

SEQ ID NO: 27400 - DNA, 30 bp, Artificial Sequence
  Synthetic oligonucleotide
aaaagatactatgtaagatgaaaggagtat

SEQ ID NO: 27401 - DNA, 30 bp, Artificial Sequence
  Synthetic oligonucleotide
ggataaagcaagcagtccgagtataggtat

SEQ ID NO: 27402 - DNA, 30 bp, Artificial Sequence
  Synthetic oligonucleotide
tggataaacgtcgaacaataaaggcggtat

SEQ ID NO: 27403 - DNA, 30 bp, Artificial Sequence
  Synthetic oligonucleotide
aagagcaaatgcatgtagaacacagggtat

SEQ ID NO: 27404 - DNA, 30 bp, Artificial Sequence
  Synthetic oligonucleotide
acggtccatcgcaccacgaggatgtggtat

SEQ ID NO: 27405 - DNA, 30 bp, Artificial Sequence
  Synthetic oligonucleotide
gaacgaggggtggctctaatggcagtgtat

SEQ ID NO: 27406 - DNA, 30 bp, Artificial Sequence
  Synthetic oligonucleotide
ggaattcacgagggacgagacagaaattat

SEQ ID NO: 27407 - DNA, 30 bp, Artificial Sequence
  Synthetic oligonucleotide
ttacggggatagcgtagtgagagaaattat

SEQ ID NO: 27408 - DNA, 30 bp, Artificial Sequence
  Synthetic oligonucleotide
cagggtacatggaagggacgacataattat

SEQ ID NO: 27409 - DNA, 30 bp, Artificial Sequence
  Synthetic oligonucleotide
tagggtccgttctaattggtgttttcttat

SEQ ID NO: 27410 - DNA, 30 bp, Artificial Sequence
  Synthetic oligonucleotide
gatcaaggtaaaaacaggccacctaaaact

SEQ ID NO: 27411 - DNA, 30 bp, Artificial Sequence
  Synthetic oligonucleotide
agcggtcggccgtacgcgagtaaacaaact

SEQ ID NO: 27412 - DNA, 30 bp, Artificial Sequence
  Synthetic oligonucleotide
tggagttatcccaatagggggggaccaact

SEQ ID NO: 27413 - DNA, 30 bp, Artificial Sequence
  Synthetic oligonucleotide
agaggcgtattgagataaaagtgtcgaact

SEQ ID NO: 27414 - DNA, 30 bp, Artificial Sequence
  Synthetic oligonucleotide
ataaggcaagggcggccaatcatgtgaact

SEQ ID NO: 27415 - DNA, 30 bp, Artificial Sequence
  Synthetic oligonucleotide
gaaacgtgtaaggagcaatgaggcaacact

SEQ ID NO: 27416 - DNA, 30 bp, Artificial Sequence
  Synthetic oligonucleotide
ccgtatgtgagacccgaacggaaagacact

SEQ ID NO: 27417 - DNA, 30 bp, Artificial Sequence
  Synthetic oligonucleotide
ggaaactgagacgagttgtgacgaaccact

SEQ ID NO: 27418 - DNA, 30 bp, Artificial Sequence
  Synthetic oligonucleotide
acgtgggcccagagtcaggttagagtcact

SEQ ID NO: 27419 - DNA, 30 bp, Artificial Sequence
  Synthetic oligonucleotide
ccaccaaggaagagcgtgaatggtcagact

SEQ ID NO: 27420 - DNA, 30 bp, Artificial Sequence
  Synthetic oligonucleotide
ccagaaggcccaaatgctgataccacgact

SEQ ID NO: 27421 - DNA, 30 bp, Artificial Sequence
  Synthetic oligonucleotide
cttgcccgaagttaagccaaggcaccgact

SEQ ID NO: 27422 - DNA, 30 bp, Artificial Sequence
  Synthetic oligonucleotide
tctgagactgggctgggttcaaagccgact

SEQ ID NO: 27423 - DNA, 30 bp, Artificial Sequence
  Synthetic oligonucleotide
gttaataaacaataacaaagcacgcatact

SEQ ID NO: 27424 - DNA, 30 bp, Artificial Sequence
  Synthetic oligonucleotide
caggaagacggataactattgcgagctact

SEQ ID NO: 27425 - DNA, 30 bp, Artificial Sequence
  Synthetic oligonucleotide
cgaccaggttaagctcacagaaggggtact

SEQ ID NO: 27426 - DNA, 30 bp, Artificial Sequence
  Synthetic oligonucleotide
gaaggaactgagcgaattggacattagcct

SEQ ID NO: 27427 - DNA, 30 bp, Artificial Sequence
  Synthetic oligonucleotide
cgacacgtgaagactagactcggcaggcct

SEQ ID NO: 27428 - DNA, 30 bp, Artificial Sequence
  Synthetic oligonucleotide
cagcataaggggaaaaacccacgataagct

SEQ ID NO: 27429 - DNA, 30 bp, Artificial Sequence
  Synthetic oligonucleotide
tcctaaaaggagtaagagggcttagcagct

SEQ ID NO: 27430 - DNA, 30 bp, Artificial Sequence
  Synthetic oligonucleotide
aagaccacgaatggaggacctctctcagct

SEQ ID NO: 27431 - DNA, 30 bp, Artificial Sequence
  Synthetic oligonucleotide
aacagccgattagcggagtgccttgtagct

SEQ ID NO: 27432 - DNA, 30 bp, Artificial Sequence
  Synthetic oligonucleotide
gggcaaagatggtaacgacatactaacgct

SEQ ID NO: 27433 - DNA, 30 bp, Artificial Sequence
  Synthetic oligonucleotide
ccagttccaatggctgggagaaaaaccgct

SEQ ID NO: 27434 - DNA, 30 bp, Artificial Sequence
  Synthetic oligonucleotide
cggaagggaacaacccgattaacacccgct

SEQ ID NO: 27435 - DNA, 30 bp, Artificial Sequence
  Synthetic oligonucleotide
gtacgtgagaagagagcagcttcaacggct

SEQ ID NO: 27436 - DNA, 30 bp, Artificial Sequence
  Synthetic oligonucleotide
gggggaatctggcaacattgagagacggct

SEQ ID NO: 27437 - DNA, 30 bp, Artificial Sequence
  Synthetic oligonucleotide
gcgggtgaatgaactctaggtgagtcggct

SEQ ID NO: 27438 - DNA, 30 bp, Artificial Sequence
  Synthetic oligonucleotide
gctcgaggtgcgtccgaaaagggatgtgct

SEQ ID NO: 27439 - DNA, 30 bp, Artificial Sequence
  Synthetic oligonucleotide
tcacgtggtgggcgcgacttctgaccatct

SEQ ID NO: 27440 - DNA, 30 bp, Artificial Sequence
  Synthetic oligonucleotide
tcgaaaggtgggctgtatacgactggatct

SEQ ID NO: 27441 - DNA, 30 bp, Artificial Sequence
  Synthetic oligonucleotide
acagaagaaagcagaattattattaactct

SEQ ID NO: 27442 - DNA, 30 bp, Artificial Sequence
  Synthetic oligonucleotide
cgaggggtaaggagggataagttgacgtct

SEQ ID NO: 27443 - DNA, 30 bp, Artificial Sequence
  Synthetic oligonucleotide
gaagggaataacaagtgtggatggtcgtct

SEQ ID NO: 27444 - DNA, 30 bp, Artificial Sequence
  Synthetic oligonucleotide
agcataagaccgaatcgagtgttgtcgtct

SEQ ID NO: 27445 - DNA, 30 bp, Artificial Sequence
  Synthetic oligonucleotide
cgaagaccaggctccaggatacgcacttct

SEQ ID NO: 27446 - DNA, 30 bp, Artificial Sequence
  Synthetic oligonucleotide
tgaaacagggaagcgacatgcatacgttct

SEQ ID NO: 27447 - DNA, 30 bp, Artificial Sequence
  Synthetic oligonucleotide
tatcgatgggaagtactaccagtgcaaagt

SEQ ID NO: 27448 - DNA, 30 bp, Artificial Sequence
  Synthetic oligonucleotide
tgagagatatggatcgcgaaatccacaagt

SEQ ID NO: 27449 - DNA, 30 bp, Artificial Sequence
  Synthetic oligonucleotide
acgaacggtcacctctactaccaaccaagt

SEQ ID NO: 27450 - DNA, 30 bp, Artificial Sequence
  Synthetic oligonucleotide
ggctggtaagggataatcgataacccaagt

SEQ ID NO: 27451 - DNA, 30 bp, Artificial Sequence
  Synthetic oligonucleotide
aacgagtaacgcattcggtaggcatcaagt

SEQ ID NO: 27452 - DNA, 30 bp, Artificial Sequence
  Synthetic oligonucleotide
gggagcgccagcgtattttggcaaggaagt

SEQ ID NO: 27453 - DNA, 30 bp, Artificial Sequence
  Synthetic oligonucleotide
cgaaagtgcaagtaaccacccagtggaagt

SEQ ID NO: 27454 - DNA, 30 bp, Artificial Sequence
  Synthetic oligonucleotide
cgagcgagccatcccgcggataggaacagt

SEQ ID NO: 27455 - DNA, 30 bp, Artificial Sequence
  Synthetic oligonucleotide
aagaggaaatgaaggtgtagcccgtgcagt

SEQ ID NO: 27456 - DNA, 30 bp, Artificial Sequence
  Synthetic oligonucleotide
gcgcagaccgcggatggcacgccccagagt

SEQ ID NO: 27457 - DNA, 30 bp, Artificial Sequence
  Synthetic oligonucleotide
gatagaacagttaagggagcatccaggagt

SEQ ID NO: 27458 - DNA, 30 bp, Artificial Sequence
  Synthetic oligonucleotide
cactgtctaatcatcccatacaataggagt

SEQ ID NO: 27459 - DNA, 30 bp, Artificial Sequence
  Synthetic oligonucleotide
cgttacaccgctaagaaatcgcaccggagt

SEQ ID NO: 27460 - DNA, 30 bp, Artificial Sequence
  Synthetic oligonucleotide
cgaatagcccaagattgtcatctgatgagt

SEQ ID NO: 27461 - DNA, 30 bp, Artificial Sequence
  Synthetic oligonucleotide
acgattggcgtggacttagaatacactagt

SEQ ID NO: 27462 - DNA, 30 bp, Artificial Sequence
  Synthetic oligonucleotide
ggtgaacaccggaacacaaatattgctagt

SEQ ID NO: 27463 - DNA, 30 bp, Artificial Sequence
  Synthetic oligonucleotide
gggtccgaccaatcaagccaggaacaacgt

SEQ ID NO: 27464 - DNA, 30 bp, Artificial Sequence
  Synthetic oligonucleotide
tatgacatagggaggtgggtcacagcacgt

SEQ ID NO: 27465 - DNA, 30 bp, Artificial Sequence
  Synthetic oligonucleotide
gtaggggaccgggcaagtgaacctgcacgt

SEQ ID NO: 27466 - DNA, 30 bp, Artificial Sequence
  Synthetic oligonucleotide
cgataaatctgagaatagcctccctaccgt

SEQ ID NO: 27467 - DNA, 30 bp, Artificial Sequence
  Synthetic oligonucleotide
tcgatcactgatgagctgtgactacagcgt

SEQ ID NO: 27468 - DNA, 30 bp, Artificial Sequence
  Synthetic oligonucleotide
ggaaccaaaaatgtagccaatagaaggcgt

SEQ ID NO: 27469 - DNA, 30 bp, Artificial Sequence
  Synthetic oligonucleotide
acgatctcggtaatggtgacataagggcgt

SEQ ID NO: 27470 - DNA, 30 bp, Artificial Sequence
  Synthetic oligonucleotide
cgggagacttaaagtagccgcgtctggcgt

SEQ ID NO: 27471 - DNA, 30 bp, Artificial Sequence
  Synthetic oligonucleotide
gtgcacgtccaaggatacatcgcaaatcgt

SEQ ID NO: 27472 - DNA, 30 bp, Artificial Sequence
  Synthetic oligonucleotide
tgatggacgagaggtacccatcgaactcgt

SEQ ID NO: 27473 - DNA, 30 bp, Artificial Sequence
  Synthetic oligonucleotide
atcacgagcgtgggctagggtacataaggt

SEQ ID NO: 27474 - DNA, 30 bp, Artificial Sequence
  Synthetic oligonucleotide
ttacgacacccaagggaaccacgtgcaggt

SEQ ID NO: 27475 - DNA, 30 bp, Artificial Sequence
  Synthetic oligonucleotide
tcgacgcgcggtggtctgaacgaaataggt

SEQ ID NO: 27476 - DNA, 30 bp, Artificial Sequence
  Synthetic oligonucleotide
tgtacggtcgaacacaaggaaatggtaggt

SEQ ID NO: 27477 - DNA, 30 bp, Artificial Sequence
  Synthetic oligonucleotide
caacaaatacatggagacgaagacgagggt

SEQ ID NO: 27478 - DNA, 30 bp, Artificial Sequence
  Synthetic oligonucleotide
catgagggaggagcgtaaaaaggggagggt

SEQ ID NO: 27479 - DNA, 30 bp, Artificial Sequence
  Synthetic oligonucleotide
gcgagagcacgaaccacacggaagtagggt

SEQ ID NO: 27480 - DNA, 30 bp, Artificial Sequence
  Synthetic oligonucleotide
cgagaacgtaccagcgtctacatccggggt

SEQ ID NO: 27481 - DNA, 30 bp, Artificial Sequence
  Synthetic oligonucleotide
gtacgatcgaaaggataaggcattatgggt

SEQ ID NO: 27482 - DNA, 30 bp, Artificial Sequence
  Synthetic oligonucleotide
aacaaagatctcgagggaggctgattgggt

SEQ ID NO: 27483 - DNA, 30 bp, Artificial Sequence
  Synthetic oligonucleotide
agagaatcatcgtacgtgacaaaggatggt

SEQ ID NO: 27484 - DNA, 30 bp, Artificial Sequence
  Synthetic oligonucleotide
gtcgcgaacattggtgacaagactgctggt

SEQ ID NO: 27485 - DNA, 30 bp, Artificial Sequence
  Synthetic oligonucleotide
tcaaaccaggagcaaaacctgaaaagtggt

SEQ ID NO: 27486 - DNA, 40 bp, Artificial Sequence
  Synthetic oligonucleotide
cgatgaaagttcgcctcagagcagggtgattactagtggt

SEQ ID NO: 27487 - DNA, 30 bp, Artificial Sequence
  Synthetic oligonucleotide
gcttggcgagggacttatgcaacaacatgt

SEQ ID NO: 27488 - DNA, 30 bp, Artificial Sequence
  Synthetic oligonucleotide
cgccgaaggctcgacatcataggaccatgt

SEQ ID NO: 27489 - DNA, 30 bp, Artificial Sequence
  Synthetic oligonucleotide
tgcctgtgtatggagagtgcgcgaggatgt

SEQ ID NO: 27490 - DNA, 30 bp, Artificial Sequence
  Synthetic oligonucleotide
ccaagagattgtagggaagaatggtgatgt

SEQ ID NO: 27491 - DNA, 30 bp, Artificial Sequence
  Synthetic oligonucleotide
aggtaacgacaactcattgccgagaactgt

SEQ ID NO: 27492 - DNA, 30 bp, Artificial Sequence
  Synthetic oligonucleotide
taagggtacacgacacgactgaattactgt

SEQ ID NO: 27493 - DNA, 30 bp, Artificial Sequence
  Synthetic oligonucleotide
acgcggagtagatgcccgaagtcgagctgt

SEQ ID NO: 27494 - DNA, 30 bp, Artificial Sequence
  Synthetic oligonucleotide
agtactctcgtacgaatagagggatgctgt

SEQ ID NO: 27495 - DNA, 30 bp, Artificial Sequence
  Synthetic oligonucleotide
agctgagatagttcgtaaagtcgaaggtgt

SEQ ID NO: 27496 - DNA, 30 bp, Artificial Sequence
  Synthetic oligonucleotide
aaggagatgaactagagcactatgatttgt

SEQ ID NO: 27497 - DNA, 30 bp, Artificial Sequence
  Synthetic oligonucleotide
ggagtacccaaggaaatgcacatgagaatt

SEQ ID NO: 27498 - DNA, 30 bp, Artificial Sequence
  Synthetic oligonucleotide
gcctgctgggtaaagaatcgcacacgaatt

SEQ ID NO: 27499 - DNA, 30 bp, Artificial Sequence
  Synthetic oligonucleotide
cgaatcgcggaacgatttcaacaacgcatt

SEQ ID NO: 27500 - DNA, 30 bp, Artificial Sequence
  Synthetic oligonucleotide
taaccaggaggcgggaggtaaaattggatt

SEQ ID NO: 27501 - DNA, 30 bp, Artificial Sequence
  Synthetic oligonucleotide
gtatggggggagacagtgtcaagcaatatt

SEQ ID NO: 27502 - DNA, 30 bp, Artificial Sequence
  Synthetic oligonucleotide
atgttcgaggcaacaggggtgtcgcttatt

SEQ ID NO: 27503 - DNA, 30 bp, Artificial Sequence
  Synthetic oligonucleotide
cggtaattaacattaagaaagcaccgactt

SEQ ID NO: 27504 - DNA, 30 bp, Artificial Sequence
  Synthetic oligonucleotide
ggtacgtacaatgctgacatagagtgactt

SEQ ID NO: 27505 - DNA, 31 bp, Artificial Sequence
  Synthetic oligonucleotide
aacgaagccggtggagaactcatattgcctt

SEQ ID NO: 27506 - DNA, 30 bp, Artificial Sequence
  Synthetic oligonucleotide
aagagggccatattcagatcgagcacgctt

SEQ ID NO: 27507 - DNA, 30 bp, Artificial Sequence
  Synthetic oligonucleotide
ccgaaagattccgaaacgacaaaatggctt

SEQ ID NO: 27508 - DNA, 30 bp, Artificial Sequence
  Synthetic oligonucleotide
gggatgggactaatgataataagctgtctt

SEQ ID NO: 27509 - DNA, 30 bp, Artificial Sequence
  Synthetic oligonucleotide
accagggagcaagaatcgaatcaccaagtt

SEQ ID NO: 27510 - DNA, 30 bp, Artificial Sequence
  Synthetic oligonucleotide
gcgacgacgatggtgtcgaatttagaagtt

SEQ ID NO: 27511 - DNA, 30 bp, Artificial Sequence
  Synthetic oligonucleotide
ccgcgaatggaagaaccacggcaggaagtt

SEQ ID NO: 27512 - DNA, 30 bp, Artificial Sequence
  Synthetic oligonucleotide
acgaagagcgatcgagtcgggcatttagtt

SEQ ID NO: 27513 - DNA, 30 bp, Artificial Sequence
  Synthetic oligonucleotide
ggaagaagcggcatatacacacggaacgtt

SEQ ID NO: 27514 - DNA, 29 bp, Artificial Sequence
  Synthetic oligonucleotide
actgactcaaaagtaggaaaaacgacgtt

SEQ ID NO: 27515 - DNA, 30 bp, Artificial Sequence
  Synthetic oligonucleotide
atggcaccacttgggagggaccatatcgtt

SEQ ID NO: 27516 - DNA, 30 bp, Artificial Sequence
  Synthetic oligonucleotide
acgagctagaggatacagcggattcaggtt

SEQ ID NO: 27517 - DNA, 30 bp, Artificial Sequence
  Synthetic oligonucleotide
cagacacagagaatgggaatcgaaggggtt

SEQ ID NO: 27518 - DNA, 30 bp, Artificial Sequence
  Synthetic oligonucleotide
acggtgtgccagagtaagtaagaggtggtt

SEQ ID NO: 27519 - DNA, 30 bp, Artificial Sequence
  Synthetic oligonucleotide
cggaaaccgacaggcgtatcctcagatgtt

SEQ ID NO: 27520 - DNA, 30 bp, Artificial Sequence
  Synthetic oligonucleotide
agagtccgtaaagccaaagatactgctgtt

SEQ ID NO: 27521 - DNA, 30 bp, Artificial Sequence
  Synthetic oligonucleotide
acgaggctgggacattaaagaatggtcttt

SEQ ID NO: 27522 - DNA, 30 bp, Artificial Sequence
  Synthetic oligonucleotide
catggcgagagtggggaagggcgtcaaaaa

SEQ ID NO: 27523 - DNA, 30 bp, Artificial Sequence
  Synthetic oligonucleotide
cggggtccatggtgacaacaacaggaaaaa

SEQ ID NO: 27524 - DNA, 30 bp, Artificial Sequence
  Synthetic oligonucleotide
acagggggtgctattggtaacctcacaaaa

SEQ ID NO: 27525 - DNA, 30 bp, Artificial Sequence
  Synthetic oligonucleotide
aattgcagacagagcaaggcatgggcaaaa

SEQ ID NO: 27526 - DNA, 30 bp, Artificial Sequence
  Synthetic oligonucleotide
cgaaagtacggaggtctgcgactgagaaaa

SEQ ID NO: 27527 - DNA, 30 bp, Artificial Sequence
  Synthetic oligonucleotide
atgggacggaatctgatcaactgcggaaaa

SEQ ID NO: 27528 - DNA, 30 bp, Artificial Sequence
  Synthetic oligonucleotide
acagagtgccacccacgcgtcaagcacaaa

SEQ ID NO: 27529 - DNA, 30 bp, Artificial Sequence
  Synthetic oligonucleotide
agatagcgtgcccaatctgagcatcacaaa

SEQ ID NO: 27530 - DNA, 30 bp, Artificial Sequence
  Synthetic oligonucleotide
ggatcatgcaacagatctgtactggacaaa

SEQ ID NO: 27531 - DNA, 30 bp, Artificial Sequence
  Synthetic oligonucleotide
tctcagaagcttcataaagaacagtacaaa

SEQ ID NO: 27532 - DNA, 30 bp, Artificial Sequence
  Synthetic oligonucleotide
agacggaataaaaccctatacatttccaaa

SEQ ID NO: 27533 - DNA, 30 bp, Artificial Sequence
  Synthetic oligonucleotide
cgtgacaaaggcagggctcagcgatgcaaa

SEQ ID NO: 27534 - DNA, 30 bp, Artificial Sequence
  Synthetic oligonucleotide
ggtgcaaccacgcgagcgagggtaatcaaa

SEQ ID NO: 27535 - DNA, 30 bp, Artificial Sequence
  Synthetic oligonucleotide
gagcgaataaaaggcaagtagttcatcaaa

SEQ ID NO: 27536 - DNA, 30 bp, Artificial Sequence
  Synthetic oligonucleotide
cgtaagaatgtcgccccctaggagatcaaa

SEQ ID NO: 27537 - DNA, 30 bp, Artificial Sequence
  Synthetic oligonucleotide
cgacgtaggctctcaagaacggtattcaaa

SEQ ID NO: 27538 - DNA, 30 bp, Artificial Sequence
  Synthetic oligonucleotide
aggccgcgaagttaatcttctacgttcaaa

SEQ ID NO: 27539 - DNA, 30 bp, Artificial Sequence
  Synthetic oligonucleotide
gctaagtgtagaaaccacgacttgaagaaa

SEQ ID NO: 27540 - DNA, 29 bp, Artificial Sequence
  Synthetic oligonucleotide
gtaacagggcatgtcgagcggtgacgaaa

SEQ ID NO: 27541 - DNA, 30 bp, Artificial Sequence
  Synthetic oligonucleotide
gaagataaccgtggtcataaacgggcgaaa

SEQ ID NO: 27542 - DNA, 30 bp, Artificial Sequence
  Synthetic oligonucleotide
tcaggacccccaataataattgaaaggaaa

SEQ ID NO: 27543 - DNA, 30 bp, Artificial Sequence
  Synthetic oligonucleotide
caaggcattcgaatatcgagctcatggaaa

SEQ ID NO: 27544 - DNA, 30 bp, Artificial Sequence
  Synthetic oligonucleotide
cctcaggagaatgtaaccagggacatgaaa

SEQ ID NO: 27545 - DNA, 30 bp, Artificial Sequence
  Synthetic oligonucleotide
cagaggatcgtccgaactccgcgcgtgaaa

SEQ ID NO: 27546 - DNA, 30 bp, Artificial Sequence
  Synthetic oligonucleotide
tcacgtactagggaatccgtcatcgataaa

SEQ ID NO: 27547 - DNA, 30 bp, Artificial Sequence
  Synthetic oligonucleotide
tccagcgtaactgcagagaaggaggataaa

SEQ ID NO: 27548 - DNA, 30 bp, Artificial Sequence
  Synthetic oligonucleotide
agaaagggccagacgattatgctagctaaa

SEQ ID NO: 27549 - DNA, 31 bp, Artificial Sequence
  Synthetic oligonucleotide
gaagtggtagtgcgaccaatacaagcgtaaa

SEQ ID NO: 27550 - DNA, 30 bp, Artificial Sequence
  Synthetic oligonucleotide
tcttagaagaagcgtcacaaggagcgtaaa

SEQ ID NO: 27551 - DNA, 30 bp, Artificial Sequence
  Synthetic oligonucleotide
tcgggaacactgcatattctgggcggtaaa

SEQ ID NO: 27552 - DNA, 30 bp, Artificial Sequence
  Synthetic oligonucleotide
catgggcacgacacccgttatcagtgtaaa

SEQ ID NO: 27553 - DNA, 30 bp, Artificial Sequence
  Synthetic oligonucleotide
gggtagaggacgctaaattgggagattaaa

SEQ ID NO: 27554 - DNA, 30 bp, Artificial Sequence
  Synthetic oligonucleotide
aagatgaaggagggtgtagttgaagttaaa

SEQ ID NO: 27555 - DNA, 30 bp, Artificial Sequence
  Synthetic oligonucleotide
ggagccaaaaggttttaagcaactgttaaa

SEQ ID NO: 27556 - DNA, 30 bp, Artificial Sequence
  Synthetic oligonucleotide
gcggcgccgaaacagtcaatcgggaaacaa

SEQ ID NO: 27557 - DNA, 30 bp, Artificial Sequence
  Synthetic oligonucleotide
aaaggtagcggtgaacgaacgattaaacaa

SEQ ID NO: 27558 - DNA, 30 bp, Artificial Sequence
  Synthetic oligonucleotide
atgcgagtggttaatccgaggaaggaacaa

SEQ ID NO: 27559 - DNA, 30 bp, Artificial Sequence
  Synthetic oligonucleotide
ccacggccccaagaatagctgggctaacaa

SEQ ID NO: 27560 - DNA, 30 bp, Artificial Sequence
  Synthetic oligonucleotide
ggtaatcaagggtagaccaaatggtaacaa

SEQ ID NO: 27561 - DNA, 30 bp, Artificial Sequence
  Synthetic oligonucleotide
gcggagcattagaaaattgtccgaagacaa

SEQ ID NO: 27562 - DNA, 30 bp, Artificial Sequence
  Synthetic oligonucleotide
cacagctgatatttaaagaagaccagacaa

SEQ ID NO: 27563 - DNA, 30 bp, Artificial Sequence
  Synthetic oligonucleotide
tgctaccgcaagatcagaataggtggacaa

SEQ ID NO: 27564 - DNA, 30 bp, Artificial Sequence
  Synthetic oligonucleotide
tcaccgggcacgtagggagaactgatacaa

SEQ ID NO: 27565 - DNA, 30 bp, Artificial Sequence
  Synthetic oligonucleotide
tgatggaagcaaaaagttaaccacaaccaa

SEQ ID NO: 27566 - DNA, 30 bp, Artificial Sequence
  Synthetic oligonucleotide
gaacggcgtaaagacgtatagggcaaccaa

SEQ ID NO: 27567 - DNA, 30 bp, Artificial Sequence
  Synthetic oligonucleotide
tgggggacggtaaaaagcgtcaagcaccaa

SEQ ID NO: 27568 - DNA, 30 bp, Artificial Sequence
  Synthetic oligonucleotide
agctggtacgagacgggcgaccatacccaa

SEQ ID NO: 27569 - DNA, 30 bp, Artificial Sequence
  Synthetic oligonucleotide
actccgacttggagaatcaaaagtgcccaa

SEQ ID NO: 27570 - DNA, 30 bp, Artificial Sequence
  Synthetic oligonucleotide
tagtggtggacagaataagacgacatccaa

SEQ ID NO: 27571 - DNA, 30 bp, Artificial Sequence
  Synthetic oligonucleotide
gtgcttaaacttagcaaaaaaagcaagcaa

SEQ ID NO: 27572 - DNA, 31 bp, Artificial Sequence
  Synthetic oligonucleotide
gtacgtgccaaatgagtgcggctctaagcaa

SEQ ID NO: 27573 - DNA, 30 bp, Artificial Sequence
  Synthetic oligonucleotide
tgataaagataacggaggccgaactagcaa

SEQ ID NO: 27574 - DNA, 30 bp, Artificial Sequence
  Synthetic oligonucleotide
cgattcggattcagtaatgaggggtcgcaa

SEQ ID NO: 27575 - DNA, 30 bp, Artificial Sequence
  Synthetic oligonucleotide
ccggtcaaggggtaaagcacctaaaggcaa

SEQ ID NO: 27576 - DNA, 30 bp, Artificial Sequence
  Synthetic oligonucleotide
ccagctggtgagaaaacaatagataggcaa

SEQ ID NO: 27577 - DNA, 30 bp, Artificial Sequence
  Synthetic oligonucleotide
atcgggtaataggtgaaaacagctaggcaa

SEQ ID NO: 27578 - DNA, 30 bp, Artificial Sequence
  Synthetic oligonucleotide
ggaaggtatctacaccgcgaaaggcggcaa

SEQ ID NO: 27579 - DNA, 30 bp, Artificial Sequence
  Synthetic oligonucleotide
acgaatctatgcagatcctacagtcggcaa

SEQ ID NO: 27580 - DNA, 30 bp, Artificial Sequence
  Synthetic oligonucleotide
ccacgatacgaacctagggttaccatgcaa

SEQ ID NO: 27581 - DNA, 30 bp, Artificial Sequence
  Synthetic oligonucleotide
gccgcaacgtcgaactagaacaccttgcaa

SEQ ID NO: 27582 - DNA, 30 bp, Artificial Sequence
  Synthetic oligonucleotide
ggagcaggatcacattaaaaggggcatcaa

SEQ ID NO: 27583 - DNA, 30 bp, Artificial Sequence
  Synthetic oligonucleotide
cgtgactttaaccgatctaccacacgtcaa

SEQ ID NO: 27584 - DNA, 30 bp, Artificial Sequence
  Synthetic oligonucleotide
caatcgtcggatatggacaggggaaaagaa

SEQ ID NO: 27585 - DNA, 30 bp, Artificial Sequence
  Synthetic oligonucleotide
acctacgaagaccaagtaataaacaaagaa

SEQ ID NO: 27586 - DNA, 30 bp, Artificial Sequence
  Synthetic oligonucleotide
ggtgaattaacctttaggcacgacaaagaa

SEQ ID NO: 27587 - DNA, 30 bp, Artificial Sequence
  Synthetic oligonucleotide
gtagaagggattcgagtgtggatcaaagaa

SEQ ID NO: 27588 - DNA, 31 bp, Artificial Sequence
  Synthetic oligonucleotide
gatggaattagtggactacgtctacacagaa

SEQ ID NO: 27589 - DNA, 30 bp, Artificial Sequence
  Synthetic oligonucleotide
gcgcatcaccgattactgtatgatccagaa

SEQ ID NO: 27590 - DNA, 30 bp, Artificial Sequence
  Synthetic oligonucleotide
tcgcactcggagataatcaaccctccagaa

SEQ ID NO: 27591 - DNA, 30 bp, Artificial Sequence
  Synthetic oligonucleotide
tcgtatgggagtcacccagatggatcagaa

SEQ ID NO: 27592 - DNA, 30 bp, Artificial Sequence
  Synthetic oligonucleotide
ataacaaatgcatagcgtagaccaagagaa

SEQ ID NO: 27593 - DNA, 30 bp, Artificial Sequence
  Synthetic oligonucleotide
gcgagctgggcgaaacgatgcttgagagaa

SEQ ID NO: 27594 - DNA, 30 bp, Artificial Sequence
  Synthetic oligonucleotide
gtgtaattgtgagcaaaataagtacgagaa

SEQ ID NO: 27595 - DNA, 30 bp, Artificial Sequence
  Synthetic oligonucleotide
tcctaattgggaacaatcatcgcgtgagaa

SEQ ID NO: 27596 - DNA, 30 bp, Artificial Sequence
  Synthetic oligonucleotide
agcgagtatccaatgaagctggtgtgagaa

SEQ ID NO: 27597 - DNA, 30 bp, Artificial Sequence
  Synthetic oligonucleotide
atgccaagagacggcaaatgttagctagaa

SEQ ID NO: 27598 - DNA, 30 bp, Artificial Sequence
  Synthetic oligonucleotide
cctcagacgtcaggcccaaaggagaacgaa

SEQ ID NO: 27599 - DNA, 30 bp, Artificial Sequence
  Synthetic oligonucleotide
cggtaggatcaatgtgaaagctttaacgaa

SEQ ID NO: 27600 - DNA, 30 bp, Artificial Sequence
  Synthetic oligonucleotide
aaacgcctagctagctgaataacacacgaa

SEQ ID NO: 27601 - DNA, 30 bp, Artificial Sequence
  Synthetic oligonucleotide
gggttagtacacgcccaatcaaacgacgaa

SEQ ID NO: 27602 - DNA, 30 bp, Artificial Sequence
  Synthetic oligonucleotide
tcaccccacccgtaaaataaggtgtacgaa

SEQ ID NO: 27603 - DNA, 30 bp, Artificial Sequence
  Synthetic oligonucleotide
cacaggtaaaaacgtgcggcggattacgaa

SEQ ID NO: 27604 - DNA, 30 bp, Artificial Sequence
  Synthetic oligonucleotide
cgtctaacgtaatcaaactatcactgcgaa

SEQ ID NO: 27605 - DNA, 30 bp, Artificial Sequence
  Synthetic oligonucleotide
gggagaagtgactccgtatattgaatcgaa

SEQ ID NO: 27606 - DNA, 30 bp, Artificial Sequence
  Synthetic oligonucleotide
tgagggacatctgtatgagatttcatcgaa

SEQ ID NO: 27607 - DNA, 30 bp, Artificial Sequence
  Synthetic oligonucleotide
gccaagaaaaagtgcatcaccgcgatcgaa

SEQ ID NO: 27608 - DNA, 30 bp, Artificial Sequence
  Synthetic oligonucleotide
tacaccgccaggtcgcgaccaagattcgaa

SEQ ID NO: 27609 - DNA, 30 bp, Artificial Sequence
  Synthetic oligonucleotide
atgaaaagtatacgggagttgaacaaggaa

SEQ ID NO: 27610 - DNA, 30 bp, Artificial Sequence
  Synthetic oligonucleotide
tgaggacaacatatcgattttctccaggaa

SEQ ID NO: 27611 - DNA, 30 bp, Artificial Sequence
  Synthetic oligonucleotide
acgtaaactggttagtgtgcgattgaggaa

SEQ ID NO: 27612 - DNA, 29 bp, Artificial Sequence
  Synthetic oligonucleotide
agagggcaagggtcctccgaaagtaggaa

SEQ ID NO: 27613 - DNA, 30 bp, Artificial Sequence
  Synthetic oligonucleotide
acgacaaagccccacggtatgctgtaggaa

SEQ ID NO: 27614 - DNA, 30 bp, Artificial Sequence
  Synthetic oligonucleotide
cgctacctaattagcgccaagagagcggaa

SEQ ID NO: 27615 - DNA, 30 bp, Artificial Sequence
  Synthetic oligonucleotide
cataccatatggtgggaagctagcgcggaa

SEQ ID NO: 27616 - DNA, 30 bp, Artificial Sequence
  Synthetic oligonucleotide
cgctcttagaaaagcaggagcaaaggggaa

SEQ ID NO: 27617 - DNA, 30 bp, Artificial Sequence
  Synthetic oligonucleotide
gcggatgccgagagtttctccacaggggaa

SEQ ID NO: 27618 - DNA, 30 bp, Artificial Sequence
  Synthetic oligonucleotide
ccaccgaacttcaagtcagtagccggggaa

SEQ ID NO: 27619 - DNA, 30 bp, Artificial Sequence
  Synthetic oligonucleotide
aggtactgtacccaattagcataacatgaa

SEQ ID NO: 27620 - DNA, 30 bp, Artificial Sequence
  Synthetic oligonucleotide
acacgggcaaaattaccccagtcggatgaa

SEQ ID NO: 27621 - DNA, 30 bp, Artificial Sequence
  Synthetic oligonucleotide
aggaggcgtatagtcccaccagatgatgaa

SEQ ID NO: 27622 - DNA, 30 bp, Artificial Sequence
  Synthetic oligonucleotide
cccaatcagaggggataagcgaacgctgaa

SEQ ID NO: 27623 - DNA, 30 bp, Artificial Sequence
  Synthetic oligonucleotide
gggttgagaggggattcgtcaaagagtgaa

SEQ ID NO: 27624 - DNA, 30 bp, Artificial Sequence
  Synthetic oligonucleotide
tgcagttaaggagagatcgtgcggagtgaa

SEQ ID NO: 27625 - DNA, 30 bp, Artificial Sequence
  Synthetic oligonucleotide
cacgtccgagctcgagtcaaaggccttgaa

SEQ ID NO: 27626 - DNA, 30 bp, Artificial Sequence
  Synthetic oligonucleotide
cgccaaaacggactcgtaggtcaacaataa

SEQ ID NO: 27627 - DNA, 30 bp, Artificial Sequence
  Synthetic oligonucleotide
gcgggactgggcgtaaacagctagtaataa

SEQ ID NO: 27628 - DNA, 30 bp, Artificial Sequence
  Synthetic oligonucleotide
tcggtaggcgaggtgtaacgcacggcataa

SEQ ID NO: 27629 - DNA, 30 bp, Artificial Sequence
  Synthetic oligonucleotide
ccgtgatgaaaaggtgttcccccgtcataa

SEQ ID NO: 27630 - DNA, 30 bp, Artificial Sequence
  Synthetic oligonucleotide
cggaatgaagcattccagattgagagataa

SEQ ID NO: 27631 - DNA, 30 bp, Artificial Sequence
  Synthetic oligonucleotide
acgaaaggaagtgttagtctgttacgataa

SEQ ID NO: 27632 - DNA, 30 bp, Artificial Sequence
  Synthetic oligonucleotide
catcagttaaggaatcgactcaaaggataa

SEQ ID NO: 27633 - DNA, 30 bp, Artificial Sequence
  Synthetic oligonucleotide
cgttaaagcaaacgtcctgcgatctgataa

SEQ ID NO: 27634 - DNA, 30 bp, Artificial Sequence
  Synthetic oligonucleotide
aggaagtatgggtatcgaactagtctataa

SEQ ID NO: 27635 - DNA, 30 bp, Artificial Sequence
  Synthetic oligonucleotide
cggaatgcatgtatggcttgaaagaactaa

SEQ ID NO: 27636 - DNA, 30 bp, Artificial Sequence
  Synthetic oligonucleotide
gagattaagcaaggggcgcatctgcactaa

SEQ ID NO: 27637 - DNA, 31 bp, Artificial Sequence
  Synthetic oligonucleotide
aggatactactttaacgcgaggccggactaa

SEQ ID NO: 27638 - DNA, 30 bp, Artificial Sequence
  Synthetic oligonucleotide
cagtggaccgagggatcaaacttcagctaa

SEQ ID NO: 27639 - DNA, 30 bp, Artificial Sequence
  Synthetic oligonucleotide
caagatgagtaaaggatgacatacctctaa

SEQ ID NO: 27640 - DNA, 30 bp, Artificial Sequence
  Synthetic oligonucleotide
cgaacgcatggcgatgcaccaatcttctaa

SEQ ID NO: 27641 - DNA, 30 bp, Artificial Sequence
  Synthetic oligonucleotide
tctcaaacaccgtgcatcaagactaagtaa

SEQ ID NO: 27642 - DNA, 30 bp, Artificial Sequence
  Synthetic oligonucleotide
tacgcaactgtcacagaaaggcaagagtaa

SEQ ID NO: 27643 - DNA, 30 bp, Artificial Sequence
  Synthetic oligonucleotide
tggtgatgaaacagggatgccatttagtaa

SEQ ID NO: 27644 - DNA, 30 bp, Artificial Sequence
  Synthetic oligonucleotide
gcaataagggcgaagaaaacgtgcacgtaa

SEQ ID NO: 27645 - DNA, 30 bp, Artificial Sequence
  Synthetic oligonucleotide
acttgcgtaagatagcccggagggacgtaa

SEQ ID NO: 27646 - DNA, 30 bp, Artificial Sequence
  Synthetic oligonucleotide
ccaggcttggggtaatatcggattccgtaa

SEQ ID NO: 27647 - DNA, 30 bp, Artificial Sequence
  Synthetic oligonucleotide
cagcttgcaaaaacagatttgcgcatgtaa

SEQ ID NO: 27648 - DNA, 30 bp, Artificial Sequence
  Synthetic oligonucleotide
ccaaattaagcggctggctgaacagtgtaa

SEQ ID NO: 27649 - DNA, 30 bp, Artificial Sequence
  Synthetic oligonucleotide
ggcaagcacgtatcacatctgcacgattaa

SEQ ID NO: 27650 - DNA, 30 bp, Artificial Sequence
  Synthetic oligonucleotide
gaaagcagagctgcagggtttcaggaaaca

SEQ ID NO: 27651 - DNA, 30 bp, Artificial Sequence
  Synthetic oligonucleotide
caggggggcgcgagaaagttcaccacaaca

SEQ ID NO: 27652 - DNA, 30 bp, Artificial Sequence
  Synthetic oligonucleotide
caacctacaaccgaactgtcaatcacaaca

SEQ ID NO: 27653 - DNA, 30 bp, Artificial Sequence
  Synthetic oligonucleotide
agggaccgaagtgagatacggctgagaaca

SEQ ID NO: 27654 - DNA, 30 bp, Artificial Sequence
  Synthetic oligonucleotide
agcgcaaagtcagctcacgtacccggaaca

SEQ ID NO: 27655 - DNA, 30 bp, Artificial Sequence
  Synthetic oligonucleotide
acgttatctaaaactgaagtgcgactaaca

SEQ ID NO: 27656 - DNA, 30 bp, Artificial Sequence
  Synthetic oligonucleotide
acatccgttgccaatgaactcgctaacaca

SEQ ID NO: 27657 - DNA, 30 bp, Artificial Sequence
  Synthetic oligonucleotide
cgtgctcggttaagtaataagccagacaca

SEQ ID NO: 27658 - DNA, 30 bp, Artificial Sequence
  Synthetic oligonucleotide
ctaggaaagcccgtgagaaagataaccaca

SEQ ID NO: 27659 - DNA, 30 bp, Artificial Sequence
  Synthetic oligonucleotide
tgtgaagacggtggttgagagggcaccaca

SEQ ID NO: 27660 - DNA, 30 bp, Artificial Sequence
  Synthetic oligonucleotide
tcgaaaccgctaagggctattacccccaca

SEQ ID NO: 27661 - DNA, 30 bp, Artificial Sequence
  Synthetic oligonucleotide
taaggaattaacggacaattcggatccaca

SEQ ID NO: 27662 - DNA, 30 bp, Artificial Sequence
  Synthetic oligonucleotide
accatgggacaacgacaaaagtcctccaca

SEQ ID NO: 27663 - DNA, 30 bp, Artificial Sequence
  Synthetic oligonucleotide
tatcggggtcaaccagagaagtgaagcaca

SEQ ID NO: 27664 - DNA, 30 bp, Artificial Sequence
  Synthetic oligonucleotide
tgcgttggggaagggttcaacagtagcaca

SEQ ID NO: 27665 - DNA, 30 bp, Artificial Sequence
  Synthetic oligonucleotide
tgccgagggtaaacgtgctggcgccgcaca

SEQ ID NO: 27666 - DNA, 30 bp, Artificial Sequence
  Synthetic oligonucleotide
tgatacaggggcgataaagggaacggcaca

SEQ ID NO: 27667 - DNA, 31 bp, Artificial Sequence
  Synthetic oligonucleotide
atggggctgccctctgaagaacctctgcaca

SEQ ID NO: 27668 - DNA, 30 bp, Artificial Sequence
  Synthetic oligonucleotide
cacgaatagcacaaaccgtatacagtcaca

SEQ ID NO: 27669 - DNA, 30 bp, Artificial Sequence
  Synthetic oligonucleotide
ttaacgtgagaaataggagatctaaagaca

SEQ ID NO: 27670 - DNA, 30 bp, Artificial Sequence
  Synthetic oligonucleotide
aacaagtactgcataaataactaccagaca

SEQ ID NO: 27671 - DNA, 30 bp, Artificial Sequence
  Synthetic oligonucleotide
aaccgaggagatatcacagagaggtagaca

SEQ ID NO: 27672 - DNA, 30 bp, Artificial Sequence
  Synthetic oligonucleotide
gtagcgagcgtgccccacataaattagaca

SEQ ID NO: 27673 - DNA, 30 bp, Artificial Sequence
  Synthetic oligonucleotide
gcgcgtagcgaagatcataagagcacgaca

SEQ ID NO: 27674 - DNA, 30 bp, Artificial Sequence
  Synthetic oligonucleotide
actaactaaggtcggcgcaaactgacgaca

SEQ ID NO: 27675 - DNA, 30 bp, Artificial Sequence
  Synthetic oligonucleotide
ggaacaaatcctaaggggcaggcggcgaca

SEQ ID NO: 27676 - DNA, 30 bp, Artificial Sequence
  Synthetic oligonucleotide
accgaataacggtggatggcggaagggaca

SEQ ID NO: 27677 - DNA, 30 bp, Artificial Sequence
  Synthetic oligonucleotide
caagaaaggtcaggtgtgaggcaaatgaca

SEQ ID NO: 27678 - DNA, 30 bp, Artificial Sequence
  Synthetic oligonucleotide
cggcaaattaagcattccattctggtgaca

SEQ ID NO: 27679 - DNA, 30 bp, Artificial Sequence
  Synthetic oligonucleotide
aacatctggtggagcacaagagtggtgaca

SEQ ID NO: 27680 - DNA, 30 bp, Artificial Sequence
  Synthetic oligonucleotide
cactcaatcgcataacactaatgtgtgaca

SEQ ID NO: 27681 - DNA, 30 bp, Artificial Sequence
  Synthetic oligonucleotide
gtcgacaaatcgatgggacgagtcaataca

SEQ ID NO: 27682 - DNA, 30 bp, Artificial Sequence
  Synthetic oligonucleotide
cgcatactataggtgacaaaggcagataca

SEQ ID NO: 27683 - DNA, 30 bp, Artificial Sequence
  Synthetic oligonucleotide
tctaaatcgaaagacaagtctagtactaca

SEQ ID NO: 27684 - DNA, 30 bp, Artificial Sequence
  Synthetic oligonucleotide
gggtaatgtgagtaaaatcgcaatcctaca

SEQ ID NO: 27685 - DNA, 30 bp, Artificial Sequence
  Synthetic oligonucleotide
taaaaatgggcacaagaggggcaggctaca

SEQ ID NO: 27686 - DNA, 30 bp, Artificial Sequence
  Synthetic oligonucleotide
cagcacccagaacgggaaaaggcggctaca

SEQ ID NO: 27687 - DNA, 30 bp, Artificial Sequence
  Synthetic oligonucleotide
acagagagcagtaaagcgcggacctctaca

SEQ ID NO: 27688 - DNA, 30 bp, Artificial Sequence
  Synthetic oligonucleotide
agtggatgatcccacgggggtacaagtaca

SEQ ID NO: 27689 - DNA, 30 bp, Artificial Sequence
  Synthetic oligonucleotide
gtccaaaggtggggagggaagaaatgtaca

SEQ ID NO: 27690 - DNA, 30 bp, Artificial Sequence
  Synthetic oligonucleotide
ccatgaattaagggaaaagggtgctgtaca

SEQ ID NO: 27691 - DNA, 30 bp, Artificial Sequence
  Synthetic oligonucleotide
tgacggcagaaaaaacgattgcgagttaca

SEQ ID NO: 27692 - DNA, 30 bp, Artificial Sequence
  Synthetic oligonucleotide
gcgagtcgaacttgagcgtcagtcaaacca

SEQ ID NO: 27693 - DNA, 30 bp, Artificial Sequence
  Synthetic oligonucleotide
acacggagtcacacgaagaaggagacacca

SEQ ID NO: 27694 - DNA, 30 bp, Artificial Sequence
  Synthetic oligonucleotide
cgttagtaagaagagcaaaggtggtgacca

SEQ ID NO: 27695 - DNA, 30 bp, Artificial Sequence
  Synthetic oligonucleotide
acaccatgcaacaccctaatgaagcaccca

SEQ ID NO: 27696 - DNA, 30 bp, Artificial Sequence
  Synthetic oligonucleotide
actggaataaaggtcgtcagaagggcccca

SEQ ID NO: 27697 - DNA, 30 bp, Artificial Sequence
  Synthetic oligonucleotide
gggagcgattgctaccaaaatcacatccca

SEQ ID NO: 27698 - DNA, 30 bp, Artificial Sequence
  Synthetic oligonucleotide
accaacaaatcatttccgagcatggtccca

SEQ ID NO: 27699 - DNA, 30 bp, Artificial Sequence
  Synthetic oligonucleotide
acgtacataaccttgccataccaccagcca

SEQ ID NO: 27700 - DNA, 30 bp, Artificial Sequence
  Synthetic oligonucleotide
tatggctgcacggtcagatctacttagcca

SEQ ID NO: 27701 - DNA, 30 bp, Artificial Sequence
  Synthetic oligonucleotide
cggaccgagagtagcaaatttaccatgcca

SEQ ID NO: 27702 - DNA, 30 bp, Artificial Sequence
  Synthetic oligonucleotide
cgttagtagtaaacgaggtagcggcatcca

SEQ ID NO: 27703 - DNA, 30 bp, Artificial Sequence
  Synthetic oligonucleotide
ataatcagtccggtcgaaacgggagatcca

SEQ ID NO: 27704 - DNA, 30 bp, Artificial Sequence
  Synthetic oligonucleotide
cgagacacgaggaaccttgacgagcctcca

SEQ ID NO: 27705 - DNA, 30 bp, Artificial Sequence
  Synthetic oligonucleotide
cggatacgaacgaaataggatgacgctcca

SEQ ID NO: 27706 - DNA, 30 bp, Artificial Sequence
  Synthetic oligonucleotide
gagcgcaaatacgtctagttcgtcaaagca

SEQ ID NO: 27707 - DNA, 30 bp, Artificial Sequence
  Synthetic oligonucleotide
cgtgtctgggtagaaagaattcctaaagca

SEQ ID NO: 27708 - DNA, 30 bp, Artificial Sequence
  Synthetic oligonucleotide
acggtgatgcatctacagtgccaagaagca

SEQ ID NO: 27709 - DNA, 30 bp, Artificial Sequence
  Synthetic oligonucleotide
gtgccagattagcgaccatcacggtaagca

SEQ ID NO: 27710 - DNA, 30 bp, Artificial Sequence
  Synthetic oligonucleotide
cggtgctaggagtctcaacgattaacagca

SEQ ID NO: 27711 - DNA, 30 bp, Artificial Sequence
  Synthetic oligonucleotide
cgtagtttatactgggcctaacgagcagca

SEQ ID NO: 27712 - DNA, 30 bp, Artificial Sequence
  Synthetic oligonucleotide
tagcaacaacacgtagggtcacactcagca

SEQ ID NO: 27713 - DNA, 30 bp, Artificial Sequence
  Synthetic oligonucleotide
agcatgggggcggagcgagaaatacgagca

SEQ ID NO: 27714 - DNA, 30 bp, Artificial Sequence
  Synthetic oligonucleotide
tgcaaaaaggagcgccatgggttgcgagca

SEQ ID NO: 27715 - DNA, 30 bp, Artificial Sequence
  Synthetic oligonucleotide
cgtaggggcataaggggcctcgaatgagca

SEQ ID NO: 27716 - DNA, 30 bp, Artificial Sequence
  Synthetic oligonucleotide
cgagtcagagctgaaactcgggaactagca

SEQ ID NO: 27717 - DNA, 30 bp, Artificial Sequence
  Synthetic oligonucleotide
tcgacgaaggaacgatcagaacgcgtagca

SEQ ID NO: 27718 - DNA, 30 bp, Artificial Sequence
  Synthetic oligonucleotide
gtgaggagatacagccacgagggggtagca

SEQ ID NO: 27719 - DNA, 30 bp, Artificial Sequence
  Synthetic oligonucleotide
ccatgttcgtttaaccaaaccagtgtagca

SEQ ID NO: 27720 - DNA, 30 bp, Artificial Sequence
  Synthetic oligonucleotide
cacacgagtaggcatataatataaaacgca

SEQ ID NO: 27721 - DNA, 30 bp, Artificial Sequence
  Synthetic oligonucleotide
cgccagcacaccgccaggatacacaacgca

SEQ ID NO: 27722 - DNA, 30 bp, Artificial Sequence
  Synthetic oligonucleotide
cgtggagcattgaacatggagatatccgca

SEQ ID NO: 27723 - DNA, 30 bp, Artificial Sequence
  Synthetic oligonucleotide
ccgtacctacaatacagagatgaacgcgca

SEQ ID NO: 27724 - DNA, 30 bp, Artificial Sequence
  Synthetic oligonucleotide
agtggagaaatatgccctatacaccgcgca

SEQ ID NO: 27725 - DNA, 30 bp, Artificial Sequence
  Synthetic oligonucleotide
tcggtcagggctgttgtgaacgaaatcgca

SEQ ID NO: 27726 - DNA, 30 bp, Artificial Sequence
  Synthetic oligonucleotide
agtgagatccaacgtgcttaggacatcgca

SEQ ID NO: 27727 - DNA, 30 bp, Artificial Sequence
  Synthetic oligonucleotide
tgctctaagcgagtctaaaaagcacaggca

SEQ ID NO: 27728 - DNA, 30 bp, Artificial Sequence
  Synthetic oligonucleotide
gaagggtgcgaacccctgtccaagcaggca

SEQ ID NO: 27729 - DNA, 30 bp, Artificial Sequence
  Synthetic oligonucleotide
actcacgtgctattcagaccaagggcggca

SEQ ID NO: 27730 - DNA, 30 bp, Artificial Sequence
  Synthetic oligonucleotide
agactgacactactggtatagcagagggca

SEQ ID NO: 27731 - DNA, 30 bp, Artificial Sequence
  Synthetic oligonucleotide
caataaagcctaacgtaatcgaatcgggca

SEQ ID NO: 27732 - DNA, 30 bp, Artificial Sequence
  Synthetic oligonucleotide
gcgggcagagcgattggcaaaaaaggggca

SEQ ID NO: 27733 - DNA, 30 bp, Artificial Sequence
  Synthetic oligonucleotide
gcgggggcaccatgcaggtcaagaatggca

SEQ ID NO: 27734 - DNA, 30 bp, Artificial Sequence
  Synthetic oligonucleotide
ggacaacagggttgagcttactaggtggca

SEQ ID NO: 27735 - DNA, 30 bp, Artificial Sequence
  Synthetic oligonucleotide
cgcaagtagccgagtagtgacggatatgca

SEQ ID NO: 27736 - DNA, 30 bp, Artificial Sequence
  Synthetic oligonucleotide
tctgccaaaagttgtaataaataagctgca

SEQ ID NO: 27737 - DNA, 30 bp, Artificial Sequence
  Synthetic oligonucleotide
gggaaacataatagtaaaccgtgccttgca

SEQ ID NO: 27738 - DNA, 30 bp, Artificial Sequence
  Synthetic oligonucleotide
gactcagggagtcaaaacgaagagtaatca

SEQ ID NO: 27739 - DNA, 30 bp, Artificial Sequence
  Synthetic oligonucleotide
acactaagcgcggcgtacaagggtggatca

SEQ ID NO: 27740 - DNA, 30 bp, Artificial Sequence
  Synthetic oligonucleotide
acacgcgttaggcaaataggccgagtatca

SEQ ID NO: 27741 - DNA, 30 bp, Artificial Sequence
  Synthetic oligonucleotide
aggccaagggctatatccgaatgacactca

SEQ ID NO: 27742 - DNA, 30 bp, Artificial Sequence
  Synthetic oligonucleotide
agtttgtaataaggaaaaacaaaagactca

SEQ ID NO: 27743 - DNA, 30 bp, Artificial Sequence
  Synthetic oligonucleotide
acgccacataatactccgcacagcacctca

SEQ ID NO: 27744 - DNA, 30 bp, Artificial Sequence
  Synthetic oligonucleotide
cgaagttaaaataggttgcacagtccctca

SEQ ID NO: 27745 - DNA, 30 bp, Artificial Sequence
  Synthetic oligonucleotide
ggactaagccaatccgtgctagacatctca

SEQ ID NO: 27746 - DNA, 30 bp, Artificial Sequence
  Synthetic oligonucleotide
taaaaacaaacacttcaaagcatgttctca

SEQ ID NO: 27747 - DNA, 30 bp, Artificial Sequence
  Synthetic oligonucleotide
acccgtagaagcataaagacgtgacagtca

SEQ ID NO: 27748 - DNA, 30 bp, Artificial Sequence
  Synthetic oligonucleotide
agaaacgtatcagaatgcttccaccagtca

SEQ ID NO: 27749 - DNA, 30 bp, Artificial Sequence
  Synthetic oligonucleotide
atgaggggcgcaatattcgtcagttagtca

SEQ ID NO: 27750 - DNA, 30 bp, Artificial Sequence
  Synthetic oligonucleotide
gcgagaaactaattttcaaatgatccgtca

SEQ ID NO: 27751 - DNA, 30 bp, Artificial Sequence
  Synthetic oligonucleotide
tagggcgaataaacggggaaaggaaggtca

SEQ ID NO: 27752 - DNA, 30 bp, Artificial Sequence
  Synthetic oligonucleotide
acagacgaaaaagagaattctagacggtca

SEQ ID NO: 27753 - DNA, 30 bp, Artificial Sequence
  Synthetic oligonucleotide
tcggccaccaaaaactgaagcaggtggtca

SEQ ID NO: 27754 - DNA, 30 bp, Artificial Sequence
  Synthetic oligonucleotide
ggtggggaagtagtctaaaggcctgattca

SEQ ID NO: 27755 - DNA, 30 bp, Artificial Sequence
  Synthetic oligonucleotide
tcgatacgccaattgccaacctatcaaaga

SEQ ID NO: 27756 - DNA, 30 bp, Artificial Sequence
  Synthetic oligonucleotide
agtgcaaccgtacttcggtaaagcgaaaga

SEQ ID NO: 27757 - DNA, 30 bp, Artificial Sequence
  Synthetic oligonucleotide
aatacaagacaggcgggggtacgcgaaaga

SEQ ID NO: 27758 - DNA, 30 bp, Artificial Sequence
  Synthetic oligonucleotide
ttacagaggtggcattgctcaactgaaaga

SEQ ID NO: 27759 - DNA, 30 bp, Artificial Sequence
  Synthetic oligonucleotide
aacgtccgaagcaaagttgtatctgaaaga

SEQ ID NO: 27760 - DNA, 30 bp, Artificial Sequence
  Synthetic oligonucleotide
tacggtcaagttgcccactaggtcccaaga

SEQ ID NO: 27761 - DNA, 30 bp, Artificial Sequence
  Synthetic oligonucleotide
cacgggcgtagagatctaaggactccaaga

SEQ ID NO: 27762 - DNA, 30 bp, Artificial Sequence
  Synthetic oligonucleotide
cgagatctgaggtgaccgtagccggcaaga

SEQ ID NO: 27763 - DNA, 30 bp, Artificial Sequence
  Synthetic oligonucleotide
actgcagactcacaagggacagtaagaaga

SEQ ID NO: 27764 - DNA, 30 bp, Artificial Sequence
  Synthetic oligonucleotide
accaaggtggtggagacataaggtggaaga

SEQ ID NO: 27765 - DNA, 30 bp, Artificial Sequence
  Synthetic oligonucleotide
catcaccatagcagtatctcagtgctaaga

SEQ ID NO: 27766 - DNA, 30 bp, Artificial Sequence
  Synthetic oligonucleotide
acagtgagaggatctgttccagcacacaga

SEQ ID NO: 27767 - DNA, 30 bp, Artificial Sequence
  Synthetic oligonucleotide
gaaaagctaagagggatgaaagtagacaga

SEQ ID NO: 27768 - DNA, 30 bp, Artificial Sequence
  Synthetic oligonucleotide
ggagcgggtaacatatgtgagcacaccaga

SEQ ID NO: 27769 - DNA, 30 bp, Artificial Sequence
  Synthetic oligonucleotide
agagagagactagccatcctagacaccaga

SEQ ID NO: 27770 - DNA, 30 bp, Artificial Sequence
  Synthetic oligonucleotide
agggagggagggctagcccgcatccccaga

SEQ ID NO: 27771 - DNA, 30 bp, Artificial Sequence
  Synthetic oligonucleotide
gcgaccaacgacgtcatacggagtgccaga

SEQ ID NO: 27772 - DNA, 30 bp, Artificial Sequence
  Synthetic oligonucleotide
ggccacgtgtgcgaacatggagagagcaga

SEQ ID NO: 27773 - DNA, 30 bp, Artificial Sequence
  Synthetic oligonucleotide
actcggacgtaaacaccagaaacgagcaga

SEQ ID NO: 27774 - DNA, 30 bp, Artificial Sequence
  Synthetic oligonucleotide
cgaggacgctcgtaataccccgtgtgcaga

SEQ ID NO: 27775 - DNA, 30 bp, Artificial Sequence
  Synthetic oligonucleotide
gggaagggcttatgcttcccacagttcaga

SEQ ID NO: 27776 - DNA, 30 bp, Artificial Sequence
  Synthetic oligonucleotide
gcaaaaagtagacgcttaaaagggcagaga

SEQ ID NO: 27777 - DNA, 30 bp, Artificial Sequence
  Synthetic oligonucleotide
aaggcgcaaaatggtacgtagacctagaga

SEQ ID NO: 27778 - DNA, 30 bp, Artificial Sequence
  Synthetic oligonucleotide
tcagaccgaacaatcgaagccaatacgaga

SEQ ID NO: 27779 - DNA, 30 bp, Artificial Sequence
  Synthetic oligonucleotide
acggaatttatgctgaacaataggccgaga

SEQ ID NO: 27780 - DNA, 30 bp, Artificial Sequence
  Synthetic oligonucleotide
catcacccatcagcaaagaaccctcggaga

SEQ ID NO: 27781 - DNA, 30 bp, Artificial Sequence
  Synthetic oligonucleotide
gtggacaataactgtgcgccatcatggaga

SEQ ID NO: 27782 - DNA, 30 bp, Artificial Sequence
  Synthetic oligonucleotide
aatcaaaatcagagaacaacagtcatgaga

SEQ ID NO: 27783 - DNA, 30 bp, Artificial Sequence
  Synthetic oligonucleotide
ggcagcccgtgatcaaagggagtactgaga

SEQ ID NO: 27784 - DNA, 30 bp, Artificial Sequence
  Synthetic oligonucleotide
ctgccttaaggccccccaaacagggtgaga

SEQ ID NO: 27785 - DNA, 30 bp, Artificial Sequence
  Synthetic oligonucleotide
agacaagcctgatgaagaactgtagataga

SEQ ID NO: 27786 - DNA, 30 bp, Artificial Sequence
  Synthetic oligonucleotide
tctaagtgcatagtacacgagactgataga

SEQ ID NO: 27787 - DNA, 30 bp, Artificial Sequence
  Synthetic oligonucleotide
cgtcacgcgtaggagagcctaataactaga

SEQ ID NO: 27788 - DNA, 30 bp, Artificial Sequence
  Synthetic oligonucleotide
aagaaactgtacgacaacaagttccctaga

SEQ ID NO: 27789 - DNA, 30 bp, Artificial Sequence
  Synthetic oligonucleotide
acctcgagggagattgggtgtatcagtaga

SEQ ID NO: 27790 - DNA, 30 bp, Artificial Sequence
  Synthetic oligonucleotide
agaacgacctaaaggcaattgctcagtaga

SEQ ID NO: 27791 - DNA, 30 bp, Artificial Sequence
  Synthetic oligonucleotide
cgtgcatgctgaacagccggactaggtaga

SEQ ID NO: 27792 - DNA, 30 bp, Artificial Sequence
  Synthetic oligonucleotide
gtacaagcgattgagtgggcgaccattaga

SEQ ID NO: 27793 - DNA, 30 bp, Artificial Sequence
  Synthetic oligonucleotide
gcaaagggaaccacgtactagagtacacga

SEQ ID NO: 27794 - DNA, 30 bp, Artificial Sequence
  Synthetic oligonucleotide
cgggtaatgtttattaactccacagcacga

SEQ ID NO: 27795 - DNA, 30 bp, Artificial Sequence
  Synthetic oligonucleotide
gtatagagctagtcgacaaaatgcgcacga

SEQ ID NO: 27796 - DNA, 30 bp, Artificial Sequence
  Synthetic oligonucleotide
atcgaacaaaaaatgaggcccgaggcacga

SEQ ID NO: 27797 - DNA, 30 bp, Artificial Sequence
  Synthetic oligonucleotide
acgcgccccggctgatcaaaaacgtcacga

SEQ ID NO: 27798 - DNA, 30 bp, Artificial Sequence
  Synthetic oligonucleotide
ggttcaagcggggggatgagcgtgtcacga

SEQ ID NO: 27799 - DNA, 30 bp, Artificial Sequence
  Synthetic oligonucleotide
tgagaataactgcacaccagtgcttcacga

SEQ ID NO: 27800 - DNA, 30 bp, Artificial Sequence
  Synthetic oligonucleotide
agagctacacgaaatccaactggcagacga

SEQ ID NO: 27801 - DNA, 30 bp, Artificial Sequence
  Synthetic oligonucleotide
ccataaccccacacatcaaccacacgacga

SEQ ID NO: 27802 - DNA, 30 bp, Artificial Sequence
  Synthetic oligonucleotide
aaaacgaccgaagtctaaaaaacgcgacga

SEQ ID NO: 27803 - DNA, 30 bp, Artificial Sequence
  Synthetic oligonucleotide
cgaaggctccacgaagaatacccgggacga

SEQ ID NO: 27804 - DNA, 30 bp, Artificial Sequence
  Synthetic oligonucleotide
gcttacgcaaagagggggaaaaaaatacga

SEQ ID NO: 27805 - DNA, 30 bp, Artificial Sequence
  Synthetic oligonucleotide
ggtggagaactgtgagcttgatcccaccga

SEQ ID NO: 27806 - DNA, 30 bp, Artificial Sequence
  Synthetic oligonucleotide
tctaaagcgggcaacctcaagcatcaccga

SEQ ID NO: 27807 - DNA, 30 bp, Artificial Sequence
  Synthetic oligonucleotide
taccaggcaatcgttcagagcgatcaccga

SEQ ID NO: 27808 - DNA, 30 bp, Artificial Sequence
  Synthetic oligonucleotide
agtgcgtagaaaaattgcggtatgccccga

SEQ ID NO: 27809 - DNA, 30 bp, Artificial Sequence
  Synthetic oligonucleotide
ggaagacaagatcagaatcgcttatgccga

SEQ ID NO: 27810 - DNA, 30 bp, Artificial Sequence
  Synthetic oligonucleotide
caatacgccgaccgatccaaacttaagcga

SEQ ID NO: 27811 - DNA, 30 bp, Artificial Sequence
  Synthetic oligonucleotide
tcatactcccaccgtgacgtaatgtagcga

SEQ ID NO: 27812 - DNA, 30 bp, Artificial Sequence
  Synthetic oligonucleotide
cacgctaaacttgtaaccatctaaacgcga

SEQ ID NO: 27813 - DNA, 30 bp, Artificial Sequence
  Synthetic oligonucleotide
cgtcaagcgaagcaagtggccggcacgcga

SEQ ID NO: 27814 - DNA, 30 bp, Artificial Sequence
  Synthetic oligonucleotide
acacaaacggaagtacgattaaatgcgcga

SEQ ID NO: 27815 - DNA, 30 bp, Artificial Sequence
  Synthetic oligonucleotide
gccgacaaaagccctgtccagagctcgcga

SEQ ID NO: 27816 - DNA, 30 bp, Artificial Sequence
  Synthetic oligonucleotide
ggcacagtatgagaggtatctaaccggcga

SEQ ID NO: 27817 - DNA, 30 bp, Artificial Sequence
  Synthetic oligonucleotide
agtcaagcggtagaagctctacacgggcga

SEQ ID NO: 27818 - DNA, 30 bp, Artificial Sequence
  Synthetic oligonucleotide
taagggagagaggcaaattatcaatggcga

SEQ ID NO: 27819 - DNA, 30 bp, Artificial Sequence
  Synthetic oligonucleotide
ccaacgagaaaggcgacatgttagtggcga

SEQ ID NO: 27820 - DNA, 30 bp, Artificial Sequence
  Synthetic oligonucleotide
acacgtcacgaaactggagtgggtatgcga

SEQ ID NO: 27821 - DNA, 30 bp, Artificial Sequence
  Synthetic oligonucleotide
ggagaagacctcaggagagtgcacgtgcga

SEQ ID NO: 27822 - DNA, 30 bp, Artificial Sequence
  Synthetic oligonucleotide
cattagagtgctcgcagggagatgcatcga

SEQ ID NO: 27823 - DNA, 30 bp, Artificial Sequence
  Synthetic oligonucleotide
cgcaaacgtactaagagtcccaacgatcga

SEQ ID NO: 27824 - DNA, 30 bp, Artificial Sequence
  Synthetic oligonucleotide
agaacctagtgaggagtgtaattaactcga

SEQ ID NO: 27825 - DNA, 30 bp, Artificial Sequence
  Synthetic oligonucleotide
gatctgtaagaaagatgtgtcagctgtcga

SEQ ID NO: 27826 - DNA, 30 bp, Artificial Sequence
  Synthetic oligonucleotide
caagagtggatagtgaacggcaatcttcga

SEQ ID NO: 27827 - DNA, 30 bp, Artificial Sequence
  Synthetic oligonucleotide
gagaaaaggatagctcgacgggcaaaagga

SEQ ID NO: 27828 - DNA, 30 bp, Artificial Sequence
  Synthetic oligonucleotide
gcattccgaaaatacgggcagaagaaagga

SEQ ID NO: 27829 - DNA, 30 bp, Artificial Sequence
  Synthetic oligonucleotide
aacaaagacaacgacatctggggtcaagga

SEQ ID NO: 27830 - DNA, 30 bp, Artificial Sequence
  Synthetic oligonucleotide
gcttggtcaaaacagatatcgtgagaagga

SEQ ID NO: 27831 - DNA, 30 bp, Artificial Sequence
  Synthetic oligonucleotide
tgatccgcaagaggttgacacgttgaagga

SEQ ID NO: 27832 - DNA, 30 bp, Artificial Sequence
  Synthetic oligonucleotide
tgccatcagaggtacaaagcattctcagga

SEQ ID NO: 27833 - DNA, 30 bp, Artificial Sequence
  Synthetic oligonucleotide
gaatactaacagaggcagggggagggagga

SEQ ID NO: 27834 - DNA, 30 bp, Artificial Sequence
  Synthetic oligonucleotide
tgtaaacgaggtaaggaggtcaagctagga

SEQ ID NO: 27835 - DNA, 30 bp, Artificial Sequence
  Synthetic oligonucleotide
agccgatggtcaacgagatttcatctagga

SEQ ID NO: 27836 - DNA, 30 bp, Artificial Sequence
  Synthetic oligonucleotide
ccttagtaccgacaatatcaaggagtagga

SEQ ID NO: 27837 - DNA, 30 bp, Artificial Sequence
  Synthetic oligonucleotide
cggtgagtgcgttacatggtatcccacgga

SEQ ID NO: 27838 - DNA, 30 bp, Artificial Sequence
  Synthetic oligonucleotide
ctaagcacggacctaaccaaggtagccgga

SEQ ID NO: 27839 - DNA, 30 bp, Artificial Sequence
  Synthetic oligonucleotide
aatgggtgctagatagcgcacgaatccgga

SEQ ID NO: 27840 - DNA, 30 bp, Artificial Sequence
  Synthetic oligonucleotide
tgggtaaatttggcaaaaagtgcgatcgga

SEQ ID NO: 27841 - DNA, 30 bp, Artificial Sequence
  Synthetic oligonucleotide
ctgagacgtgtatgtcttgggggagtcgga

SEQ ID NO: 27842 - DNA, 30 bp, Artificial Sequence
  Synthetic oligonucleotide
ggtagagaaagttctatggagggcaaggga

SEQ ID NO: 27843 - DNA, 30 bp, Artificial Sequence
  Synthetic oligonucleotide
gggagtatcgaccaaaggctggatcaggga

SEQ ID NO: 27844 - DNA, 30 bp, Artificial Sequence
  Synthetic oligonucleotide
cagctcagtgcgtcttatgcaggggaggga

SEQ ID NO: 27845 - DNA, 30 bp, Artificial Sequence
  Synthetic oligonucleotide
ccacggaactcgcatgaaattgtaccggga

SEQ ID NO: 27846 - DNA, 30 bp, Artificial Sequence
  Synthetic oligonucleotide
ccatggagtcctcgctctagtgcaagggga

SEQ ID NO: 27847 - DNA, 30 bp, Artificial Sequence
  Synthetic oligonucleotide
gagcagaagtcaatatgccagagaagggga

SEQ ID NO: 27848 - DNA, 30 bp, Artificial Sequence
  Synthetic oligonucleotide
ccaagcatcaagacgaggatagtgggggga

SEQ ID NO: 27849 - DNA, 30 bp, Artificial Sequence
  Synthetic oligonucleotide
aggcactgacagccctcggacgattgggga

SEQ ID NO: 27850 - DNA, 30 bp, Artificial Sequence
  Synthetic oligonucleotide
aaggggacgagaaaaatgagttccatggga

SEQ ID NO: 27851 - DNA, 30 bp, Artificial Sequence
  Synthetic oligonucleotide
acttacgggagccaataacttgaggtggga

SEQ ID NO: 27852 - DNA, 30 bp, Artificial Sequence
  Synthetic oligonucleotide
gggaggggtttaaatgtcgacaataatgga

SEQ ID NO: 27853 - DNA, 30 bp, Artificial Sequence
  Synthetic oligonucleotide
acgccagtgactacctacagagtacctgga

SEQ ID NO: 27854 - DNA, 30 bp, Artificial Sequence
  Synthetic oligonucleotide
caatacacgatatccgaaatgggagctgga

SEQ ID NO: 27855 - DNA, 30 bp, Artificial Sequence
  Synthetic oligonucleotide
tgcggatcgggcgatgtgcaagttgctgga

SEQ ID NO: 27856 - DNA, 30 bp, Artificial Sequence
  Synthetic oligonucleotide
gtgaggcggtgcaggaagattattagtgga

SEQ ID NO: 27857 - DNA, 30 bp, Artificial Sequence
  Synthetic oligonucleotide
cacggggttacgcatatagggtaaaaatga

SEQ ID NO: 27858 - DNA, 30 bp, Artificial Sequence
  Synthetic oligonucleotide
cgaccatgacaaagacacacattaaaatga

SEQ ID NO: 27859 - DNA, 30 bp, Artificial Sequence
  Synthetic oligonucleotide
taaatgtcagccgagaacgtgggccaatga

SEQ ID NO: 27860 - DNA, 30 bp, Artificial Sequence
  Synthetic oligonucleotide
tcccgtccataagagtagcgaaacgcatga

SEQ ID NO: 27861 - DNA, 30 bp, Artificial Sequence
  Synthetic oligonucleotide
cgtaaggggccacactgataatcgctatga

SEQ ID NO: 27862 - DNA, 30 bp, Artificial Sequence
  Synthetic oligonucleotide
atcggggaaacgcatggaaacccgttatga

SEQ ID NO: 27863 - DNA, 30 bp, Artificial Sequence
  Synthetic oligonucleotide
aaggagtcgtaattgtgaggaacggcctga

SEQ ID NO: 27864 - DNA, 30 bp, Artificial Sequence
  Synthetic oligonucleotide
acggtctgtatcgtgcccaacagtagctga

SEQ ID NO: 27865 - DNA, 30 bp, Artificial Sequence
  Synthetic oligonucleotide
aggggtgataagacagagagacaatgctga

SEQ ID NO: 27866 - DNA, 30 bp, Artificial Sequence
  Synthetic oligonucleotide
agaagtagtcaattacctgcctaaaagtga

SEQ ID NO: 27867 - DNA, 30 bp, Artificial Sequence
  Synthetic oligonucleotide
acggtgtaagtgttgctaatgattaagtga

SEQ ID NO: 27868 - DNA, 30 bp, Artificial Sequence
  Synthetic oligonucleotide
cgaaggcactcgatcctcctcgtccagtga

SEQ ID NO: 27869 - DNA, 30 bp, Artificial Sequence
  Synthetic oligonucleotide
cgatggaatggttacgaaccagcgcagtga

SEQ ID NO: 27870 - DNA, 30 bp, Artificial Sequence
  Synthetic oligonucleotide
gtggacgaacgtgctaatctgccatagtga

SEQ ID NO: 27871 - DNA, 30 bp, Artificial Sequence
  Synthetic oligonucleotide
accacgagtccaaaacccgatcataggtga

SEQ ID NO: 27872 - DNA, 30 bp, Artificial Sequence
  Synthetic oligonucleotide
agtaagccaacgtacttgaggttcgggtga

SEQ ID NO: 27873 - DNA, 30 bp, Artificial Sequence
  Synthetic oligonucleotide
cgaatctcgtcggcatggtaagagtggtga

SEQ ID NO: 27874 - DNA, 30 bp, Artificial Sequence
  Synthetic oligonucleotide
tcgtgaacatataatgcaacagaagtgtga

SEQ ID NO: 27875 - DNA, 30 bp, Artificial Sequence
  Synthetic oligonucleotide
tagaagcagagctagtatagtagcgattga

SEQ ID NO: 27876 - DNA, 30 bp, Artificial Sequence
  Synthetic oligonucleotide
tcgtagaggcgtacgggcaaggatagttga

SEQ ID NO: 27877 - DNA, 30 bp, Artificial Sequence
  Synthetic oligonucleotide
cagagtaaggcactgggaatgcctagttga

SEQ ID NO: 27878 - DNA, 30 bp, Artificial Sequence
  Synthetic oligonucleotide
ggacgaacccgttcgcactggcagaaaata

SEQ ID NO: 27879 - DNA, 30 bp, Artificial Sequence
  Synthetic oligonucleotide
ctgactacaactgataccaaggcccaaata

SEQ ID NO: 27880 - DNA, 30 bp, Artificial Sequence
  Synthetic oligonucleotide
ggtgccaaaaaggcaacatgaaagtcaata

SEQ ID NO: 27881 - DNA, 30 bp, Artificial Sequence
  Synthetic oligonucleotide
acgaggtaactcaaatctaagaggcgaata

SEQ ID NO: 27882 - DNA, 30 bp, Artificial Sequence
  Synthetic oligonucleotide
gtagggcaggcagtggtgcgtaaagtaata

SEQ ID NO: 27883 - DNA, 30 bp, Artificial Sequence
  Synthetic oligonucleotide
cgagccagaacgtacgctaccgcggtaata

SEQ ID NO: 27884 - DNA, 30 bp, Artificial Sequence
  Synthetic oligonucleotide
tctgaagaacaccgagaagtggtattaata

SEQ ID NO: 27885 - DNA, 30 bp, Artificial Sequence
  Synthetic oligonucleotide
cggtctaggccggagaggaccagagacata

SEQ ID NO: 27886 - DNA, 30 bp, Artificial Sequence
  Synthetic oligonucleotide
cggcgggttaactgatagaggggcgacata

SEQ ID NO: 27887 - DNA, 30 bp, Artificial Sequence
  Synthetic oligonucleotide
cactaaagcagcgtataagcctgaaccata

SEQ ID NO: 27888 - DNA, 30 bp, Artificial Sequence
  Synthetic oligonucleotide
aaacgttgtgcgagggggagggagcccata

SEQ ID NO: 27889 - DNA, 30 bp, Artificial Sequence
  Synthetic oligonucleotide
gggtttaaccaaagagtgcggtaggccata

SEQ ID NO: 27890 - DNA, 30 bp, Artificial Sequence
  Synthetic oligonucleotide
aacgggtgtcggaaacgggcgtagtccata

SEQ ID NO: 27891 - DNA, 30 bp, Artificial Sequence
  Synthetic oligonucleotide
cgcaagttccctacgtgggtgtgaagcata

SEQ ID NO: 27892 - DNA, 30 bp, Artificial Sequence
  Synthetic oligonucleotide
caatacggaacacagttttcccctagcata

SEQ ID NO: 27893 - DNA, 30 bp, Artificial Sequence
  Synthetic oligonucleotide
agggcgtattaacagcccgcaaatcgcata

SEQ ID NO: 27894 - DNA, 30 bp, Artificial Sequence
  Synthetic oligonucleotide
ggcgaggcgtgtacagattcgccaggcata

SEQ ID NO: 27895 - DNA, 30 bp, Artificial Sequence
  Synthetic oligonucleotide
tgaccaggccaaacacgacatgcatgcata

SEQ ID NO: 27896 - DNA, 30 bp, Artificial Sequence
  Synthetic oligonucleotide
ggagagtaagggctcagtcaaatcgtcata

SEQ ID NO: 27897 - DNA, 30 bp, Artificial Sequence
  Synthetic oligonucleotide
tacgtgggagtagtggtaaacccggtcata

SEQ ID NO: 27898 - DNA, 30 bp, Artificial Sequence
  Synthetic oligonucleotide
cctgagaatataaagggctaggggcagata

SEQ ID NO: 27899 - DNA, 30 bp, Artificial Sequence
  Synthetic oligonucleotide
ggacaattaagtcgatatcaacctcagata

SEQ ID NO: 27900 - DNA, 30 bp, Artificial Sequence
  Synthetic oligonucleotide
cgggtcgagaagcgttacagcccagagata

SEQ ID NO: 27901 - DNA, 30 bp, Artificial Sequence
  Synthetic oligonucleotide
acaagggaatagtgttagctgacgacgata

SEQ ID NO: 27902 - DNA, 30 bp, Artificial Sequence
  Synthetic oligonucleotide
cataacaggcagagtaaaaccctaaggata

SEQ ID NO: 27903 - DNA, 30 bp, Artificial Sequence
  Synthetic oligonucleotide
cgagaccaatatacggtaactgcagggata

SEQ ID NO: 27904 - DNA, 30 bp, Artificial Sequence
  Synthetic oligonucleotide
caggcaacctagtggcaaaagtatgggata

SEQ ID NO: 27905 - DNA, 30 bp, Artificial Sequence
  Synthetic oligonucleotide
ccagagggagtgagcgacaaccccgatata

SEQ ID NO: 27906 - DNA, 30 bp, Artificial Sequence
  Synthetic oligonucleotide
agaaaaggcggtagcacgaatcacgctata

SEQ ID NO: 27907 - DNA, 30 bp, Artificial Sequence
  Synthetic oligonucleotide
caaggcggaacagttagggcgtaccgtata

SEQ ID NO: 27908 - DNA, 30 bp, Artificial Sequence
  Synthetic oligonucleotide
gaacgaaagacaggagctccaacgcaacta

SEQ ID NO: 27909 - DNA, 30 bp, Artificial Sequence
  Synthetic oligonucleotide
tcaaccaggtatagtgcgcgacgggaacta

SEQ ID NO: 27910 - DNA, 30 bp, Artificial Sequence
  Synthetic oligonucleotide
gatcgagtaatacaatgcaaagccatacta

SEQ ID NO: 27911 - DNA, 30 bp, Artificial Sequence
  Synthetic oligonucleotide
aaagggggccacagacaccagtgactacta

SEQ ID NO: 27912 - DNA, 30 bp, Artificial Sequence
  Synthetic oligonucleotide
gggaggtgaccgcaatggacgacgctacta

SEQ ID NO: 27913 - DNA, 30 bp, Artificial Sequence
  Synthetic oligonucleotide
cgacagagagaagttcatggccatacccta

SEQ ID NO: 27914 - DNA, 30 bp, Artificial Sequence
  Synthetic oligonucleotide
ttgattcaaaagaaggagcacgccggccta

SEQ ID NO: 27915 - DNA, 30 bp, Artificial Sequence
  Synthetic oligonucleotide
agggaggataatgagtcaggcctaccgcta

SEQ ID NO: 27916 - DNA, 30 bp, Artificial Sequence
  Synthetic oligonucleotide
agtcggctatgcgactctatcagtgcgcta

SEQ ID NO: 27917 - DNA, 30 bp, Artificial Sequence
  Synthetic oligonucleotide
acaccaacggcggggacgatgcgcgatcta

SEQ ID NO: 27918 - DNA, 30 bp, Artificial Sequence
  Synthetic oligonucleotide
tgcaggtagacagcggacccaaggcaagta

SEQ ID NO: 27919 - DNA, 30 bp, Artificial Sequence
  Synthetic oligonucleotide
gacggtagatgggggtattgaatctaagta

SEQ ID NO: 27920 - DNA, 30 bp, Artificial Sequence
  Synthetic oligonucleotide
gcacagggacgaaggcggctgctctaagta

SEQ ID NO: 27921 - DNA, 30 bp, Artificial Sequence
  Synthetic oligonucleotide
tacagtgacaacacagccaccacaccagta

SEQ ID NO: 27922 - DNA, 30 bp, Artificial Sequence
  Synthetic oligonucleotide
tcaacgaaaaggtgggaattatctgcagta

SEQ ID NO: 27923 - DNA, 30 bp, Artificial Sequence
  Synthetic oligonucleotide
gcgtcgcgttttcgtaaataccaaagagta

SEQ ID NO: 27924 - DNA, 30 bp, Artificial Sequence
  Synthetic oligonucleotide
gcagtttgagatccaagaaaatggcgagta

SEQ ID NO: 27925 - DNA, 30 bp, Artificial Sequence
  Synthetic oligonucleotide
gtgggcgggtggcctatatcatgtgtagta

SEQ ID NO: 27926 - DNA, 30 bp, Artificial Sequence
  Synthetic oligonucleotide
cagcgacgacgtagagggccgcaattagta

SEQ ID NO: 27927 - DNA, 30 bp, Artificial Sequence
  Synthetic oligonucleotide
gcagagggccaaatagggacatcattagta

SEQ ID NO: 27928 - DNA, 30 bp, Artificial Sequence
  Synthetic oligonucleotide
cacgttctgttaacacatgcgccccacgta

SEQ ID NO: 27929 - DNA, 30 bp, Artificial Sequence
  Synthetic oligonucleotide
acatcttgagggtacggggggtccgacgta

SEQ ID NO: 27930 - DNA, 30 bp, Artificial Sequence
  Synthetic oligonucleotide
taggccagagtaacgaacaactaccccgta

SEQ ID NO: 27931 - DNA, 30 bp, Artificial Sequence
  Synthetic oligonucleotide
cagcgggaacggaaataatgcagagccgta

SEQ ID NO: 27932 - DNA, 30 bp, Artificial Sequence
  Synthetic oligonucleotide
tggaaacaggaaaataaattgcaatccgta

SEQ ID NO: 27933 - DNA, 30 bp, Artificial Sequence
  Synthetic oligonucleotide
aacggggagttgagtatagttatctccgta

SEQ ID NO: 27934 - DNA, 30 bp, Artificial Sequence
  Synthetic oligonucleotide
ggacggcacatcccaagttaagaaagcgta

SEQ ID NO: 27935 - DNA, 30 bp, Artificial Sequence
  Synthetic oligonucleotide
ggtcaagagccgatatctcaagagttcgta

SEQ ID NO: 27936 - DNA, 30 bp, Artificial Sequence
  Synthetic oligonucleotide
cgataagcctctacagaaaggtaaaaggta

SEQ ID NO: 27937 - DNA, 30 bp, Artificial Sequence
  Synthetic oligonucleotide
cgagcagtccagagacctgatccgaaggta

SEQ ID NO: 27938 - DNA, 30 bp, Artificial Sequence
  Synthetic oligonucleotide
ccacaccgtaaggagagcatgcgtcaggta

SEQ ID NO: 27939 - DNA, 30 bp, Artificial Sequence
  Synthetic oligonucleotide
tggtagaagaatcaaagtcatactacggta

SEQ ID NO: 27940 - DNA, 30 bp, Artificial Sequence
  Synthetic oligonucleotide
taccgctagtaagggactcaagtgcatgta

SEQ ID NO: 27941 - DNA, 30 bp, Artificial Sequence
  Synthetic oligonucleotide
ggataccaagaggaggaagaatatgatgta

SEQ ID NO: 27942 - DNA, 30 bp, Artificial Sequence
  Synthetic oligonucleotide
gggagtcgatgtaccgaataattaactgta

SEQ ID NO: 27943 - DNA, 30 bp, Artificial Sequence
  Synthetic oligonucleotide
caacgaagtactagttccagaagtcctgta

SEQ ID NO: 27944 - DNA, 30 bp, Artificial Sequence
  Synthetic oligonucleotide
tcactgagcgagattcaaggtggaggtgta

SEQ ID NO: 27945 - DNA, 30 bp, Artificial Sequence
  Synthetic oligonucleotide
atcacagtgtggcgcattgcgaccggtgta

SEQ ID NO: 27946 - DNA, 30 bp, Artificial Sequence
  Synthetic oligonucleotide
agcaagtaaactctgatgaaggatggtgta

SEQ ID NO: 27947 - DNA, 30 bp, Artificial Sequence
  Synthetic oligonucleotide
atgccaagaggggacgcgtcccactgtgta

SEQ ID NO: 27948 - DNA, 30 bp, Artificial Sequence
  Synthetic oligonucleotide
cgaatcaacaaagagggagacattcttgta

SEQ ID NO: 27949 - DNA, 30 bp, Artificial Sequence
  Synthetic oligonucleotide
gagagaaagcccatcactcaagcgaaatta

SEQ ID NO: 27950 - DNA, 30 bp, Artificial Sequence
  Synthetic oligonucleotide
aacgtagtagagtgatggaataccaactta

SEQ ID NO: 27951 - DNA, 30 bp, Artificial Sequence
  Synthetic oligonucleotide
gatatgcaagcagaggacaggctgagctta

SEQ ID NO: 27952 - DNA, 30 bp, Artificial Sequence
  Synthetic oligonucleotide
tcgccgtcccaactaggagagtacgtctta

SEQ ID NO: 27953 - DNA, 30 bp, Artificial Sequence
  Synthetic oligonucleotide
agatgtgcggccaataagttaaccgagtta

SEQ ID NO: 27954 - DNA, 30 bp, Artificial Sequence
  Synthetic oligonucleotide
cggagagctaaccgaatggctggcgggtta

SEQ ID NO: 27955 - DNA, 30 bp, Artificial Sequence
  Synthetic oligonucleotide
agggacgagaaagggcgagtaaaaggttta

SEQ ID NO: 27956 - DNA, 30 bp, Artificial Sequence
  Synthetic oligonucleotide
catagctcatcggagtaagctgcgcaaaac

SEQ ID NO: 27957 - DNA, 30 bp, Artificial Sequence
  Synthetic oligonucleotide
caccacgcccaagaggttccgccgacaaac

SEQ ID NO: 27958 - DNA, 30 bp, Artificial Sequence
  Synthetic oligonucleotide
ggacctgaacctaaccaggccaacccaaac

SEQ ID NO: 27959 - DNA, 30 bp, Artificial Sequence
  Synthetic oligonucleotide
agggaattgaagccatgtgatggacgaaac

SEQ ID NO: 27960 - DNA, 30 bp, Artificial Sequence
  Synthetic oligonucleotide
gcgaagtgagagttagaaacttgacgaaac

SEQ ID NO: 27961 - DNA, 30 bp, Artificial Sequence
  Synthetic oligonucleotide
cctgactgtgcgataagatcaacccgaaac

SEQ ID NO: 27962 - DNA, 30 bp, Artificial Sequence
  Synthetic oligonucleotide
ctcgtagcatcgcaaaaggcacacggaaac

SEQ ID NO: 27963 - DNA, 30 bp, Artificial Sequence
  Synthetic oligonucleotide
agcgccctgcaagagggagcgaggcacaac

SEQ ID NO: 27964 - DNA, 30 bp, Artificial Sequence
  Synthetic oligonucleotide
ggacgacgaaacaattggacggttcacaac

SEQ ID NO: 27965 - DNA, 30 bp, Artificial Sequence
  Synthetic oligonucleotide
ccggaggcacgtagagcgggaatagccaac

SEQ ID NO: 27966 - DNA, 30 bp, Artificial Sequence
  Synthetic oligonucleotide
tggagcgtcatcacaagaccatcggccaac

SEQ ID NO: 27967 - DNA, 30 bp, Artificial Sequence
  Synthetic oligonucleotide
gtgcaacggaggtaaagcaaagaaagcaac

SEQ ID NO: 27968 - DNA, 30 bp, Artificial Sequence
  Synthetic oligonucleotide
acacaaccgaagatgaattcgagtagcaac

SEQ ID NO: 27969 - DNA, 30 bp, Artificial Sequence
  Synthetic oligonucleotide
tgaagcgcgggcggcgaggttagtatcaac

SEQ ID NO: 27970 - DNA, 30 bp, Artificial Sequence
  Synthetic oligonucleotide
acacgaccgaatcgtcatgaattactcaac

SEQ ID NO: 27971 - DNA, 30 bp, Artificial Sequence
  Synthetic oligonucleotide
acggggtgcgaggcccaaacgcagtagaac

SEQ ID NO: 27972 - DNA, 30 bp, Artificial Sequence
  Synthetic oligonucleotide
cctagaggccatcgacagggtgaaccgaac

SEQ ID NO: 27973 - DNA, 30 bp, Artificial Sequence
  Synthetic oligonucleotide
gtgcgagacgggatctgttaaaatgcgaac

SEQ ID NO: 27974 - DNA, 30 bp, Artificial Sequence
  Synthetic oligonucleotide
agagcggtacggccagagcagtaaaggaac

SEQ ID NO: 27975 - DNA, 30 bp, Artificial Sequence
  Synthetic oligonucleotide
gacgataatggtgaaaaagggaaactgaac

SEQ ID NO: 27976 - DNA, 30 bp, Artificial Sequence
  Synthetic oligonucleotide
ccagagcgtggagtctgagcgtcgactaac

SEQ ID NO: 27977 - DNA, 30 bp, Artificial Sequence
  Synthetic oligonucleotide
aacgggaacagggatgccagccaatctaac

SEQ ID NO: 27978 - DNA, 30 bp, Artificial Sequence
  Synthetic oligonucleotide
aagatcgagatagggagcaaggttgttaac

SEQ ID NO: 27979 - DNA, 30 bp, Artificial Sequence
  Synthetic oligonucleotide
gcgaactagagatatggcccgaataaacac

SEQ ID NO: 27980 - DNA, 30 bp, Artificial Sequence
  Synthetic oligonucleotide
aagaggaggcaaagccacccggcggaacac

SEQ ID NO: 27981 - DNA, 30 bp, Artificial Sequence
  Synthetic oligonucleotide
agccgggatacatataatgaaccgccacac

SEQ ID NO: 27982 - DNA, 30 bp, Artificial Sequence
  Synthetic oligonucleotide
gagacacaaaatcgggagagcctgccacac

SEQ ID NO: 27983 - DNA, 30 bp, Artificial Sequence
  Synthetic oligonucleotide
agaaccaatatagaggaaaggttgagacac

SEQ ID NO: 27984 - DNA, 30 bp, Artificial Sequence
  Synthetic oligonucleotide
cgttgataccgagtggaccgagagtgacac

SEQ ID NO: 27985 - DNA, 30 bp, Artificial Sequence
  Synthetic oligonucleotide
agggggtcaagtggatgaactatgatacac

SEQ ID NO: 27986 - DNA, 30 bp, Artificial Sequence
  Synthetic oligonucleotide
taagatgggacacatcaactgcatacccac

SEQ ID NO: 27987 - DNA, 30 bp, Artificial Sequence
  Synthetic oligonucleotide
cgtagtggagaaaggtgtgctctcatccac

SEQ ID NO: 27988 - DNA, 30 bp, Artificial Sequence
  Synthetic oligonucleotide
cacactaaatagagtgttacttgagagcac

SEQ ID NO: 27989 - DNA, 30 bp, Artificial Sequence
  Synthetic oligonucleotide
gaagcttgaaacaacgggtccaacgagcac

SEQ ID NO: 27990 - DNA, 30 bp, Artificial Sequence
  Synthetic oligonucleotide
atcggaatgccgtaaaagccaagcgagcac

SEQ ID NO: 27991 - DNA, 30 bp, Artificial Sequence
  Synthetic oligonucleotide
agcgagggtgagattcgaaagagggcgcac

SEQ ID NO: 27992 - DNA, 30 bp, Artificial Sequence
  Synthetic oligonucleotide
tcagaactgagagccagtgagctattgcac

SEQ ID NO: 27993 - DNA, 30 bp, Artificial Sequence
  Synthetic oligonucleotide
aaggaatcgtagtgctcgccgagatatcac

SEQ ID NO: 27994 - DNA, 30 bp, Artificial Sequence
  Synthetic oligonucleotide
ttcggcagataaaaaaaatagaagtctcac

SEQ ID NO: 27995 - DNA, 30 bp, Artificial Sequence
  Synthetic oligonucleotide
acggacccacgggaaagtgaccccagtcac

SEQ ID NO: 27996 - DNA, 30 bp, Artificial Sequence
  Synthetic oligonucleotide
tccgaccagagggcggggatagcaaaagac

SEQ ID NO: 27997 - DNA, 30 bp, Artificial Sequence
  Synthetic oligonucleotide
cggagaggcgtactgtgctatcgcaaagac

SEQ ID NO: 27998 - DNA, 30 bp, Artificial Sequence
  Synthetic oligonucleotide
cgcggagtgaagagagcgcaatcgaaagac

SEQ ID NO: 27999 - DNA, 30 bp, Artificial Sequence
  Synthetic oligonucleotide
gacgaaacatgggttcggcccagacaagac

SEQ ID NO: 28000 - DNA, 30 bp, Artificial Sequence
  Synthetic oligonucleotide
taccacacacatatctagatagcgtaagac

SEQ ID NO: 28001 - DNA, 30 bp, Artificial Sequence
  Synthetic oligonucleotide
cgggaagggtcttattgagtggggacagac

SEQ ID NO: 28002 - DNA, 30 bp, Artificial Sequence
  Synthetic oligonucleotide
aagatcggtgggataggctggaatccagac

SEQ ID NO: 28003 - DNA, 30 bp, Artificial Sequence
  Synthetic oligonucleotide
cattgagccgccccccctaaccaagcagac

SEQ ID NO: 28004 - DNA, 30 bp, Artificial Sequence
  Synthetic oligonucleotide
agggaaacgtgattggcactacatcgagac

SEQ ID NO: 28005 - DNA, 30 bp, Artificial Sequence
  Synthetic oligonucleotide
acaacccaacagcgggcttatgtcaacgac

SEQ ID NO: 28006 - DNA, 30 bp, Artificial Sequence
  Synthetic oligonucleotide
caagacaacatggtagaccaggaggacgac

SEQ ID NO: 28007 - DNA, 30 bp, Artificial Sequence
  Synthetic oligonucleotide
cgggcatgctgtagacttacttgggacgac

SEQ ID NO: 28008 - DNA, 30 bp, Artificial Sequence
  Synthetic oligonucleotide
cagacacaggaataggtggaccatgacgac

SEQ ID NO: 28009 - DNA, 30 bp, Artificial Sequence
  Synthetic oligonucleotide
aaacgggactaggtgccgcgaactagcgac

SEQ ID NO: 28010 - DNA, 30 bp, Artificial Sequence
  Synthetic oligonucleotide
tgcaaacaaaataatcttacaccacgcgac

SEQ ID NO: 28011 - DNA, 30 bp, Artificial Sequence
  Synthetic oligonucleotide
aggtctaagacgggataagattggtgcgac

SEQ ID NO: 28012 - DNA, 30 bp, Artificial Sequence
  Synthetic oligonucleotide
caagcgtagtgcagaacttttagagtcgac

SEQ ID NO: 28013 - DNA, 30 bp, Artificial Sequence
  Synthetic oligonucleotide
acgcaatgttgtctaaacacgcctgaggac

SEQ ID NO: 28014 - DNA, 30 bp, Artificial Sequence
  Synthetic oligonucleotide
cgagggcgcgcttcggcaccaagataggac

SEQ ID NO: 28015 - DNA, 30 bp, Artificial Sequence
  Synthetic oligonucleotide
cggtacgtgccggggacaaaagtctaggac

SEQ ID NO: 28016 - DNA, 30 bp, Artificial Sequence
  Synthetic oligonucleotide
gagaaggaaaaaggcgtgccttagagggac

SEQ ID NO: 28017 - DNA, 30 bp, Artificial Sequence
  Synthetic oligonucleotide
cgggttcgttgaggtcagagctgacgggac

SEQ ID NO: 28018 - DNA, 30 bp, Artificial Sequence
  Synthetic oligonucleotide
tcgacccgaaagcttcataaccggtgggac

SEQ ID NO: 28019 - DNA, 30 bp, Artificial Sequence
  Synthetic oligonucleotide
caaataaacgccaacaaggtcaagctggac

SEQ ID NO: 28020 - DNA, 30 bp, Artificial Sequence
  Synthetic oligonucleotide
ctaaagctgggtggggtacacgtacatgac

SEQ ID NO: 28021 - DNA, 30 bp, Artificial Sequence
  Synthetic oligonucleotide
gaaaggagtggaacgccatcagggtatgac

SEQ ID NO: 28022 - DNA, 30 bp, Artificial Sequence
  Synthetic oligonucleotide
gcagtggtgagatgggcaaaatggagtgac

SEQ ID NO: 28023 - DNA, 30 bp, Artificial Sequence
  Synthetic oligonucleotide
gtacaaagatcactgaatactgatagtgac

SEQ ID NO: 28024 - DNA, 30 bp, Artificial Sequence
  Synthetic oligonucleotide
aaacatggcagtaaaaacgaacgacgtgac

SEQ ID NO: 28025 - DNA, 30 bp, Artificial Sequence
  Synthetic oligonucleotide
ggcaaggtaatggtccatcagaagcgtgac

SEQ ID NO: 28026 - DNA, 30 bp, Artificial Sequence
  Synthetic oligonucleotide
cgggcatattaggaactaagagcgcgtgac

SEQ ID NO: 28027 - DNA, 30 bp, Artificial Sequence
  Synthetic oligonucleotide
acatgcaagggaaacaccccactaggtgac

SEQ ID NO: 28028 - DNA, 30 bp, Artificial Sequence
  Synthetic oligonucleotide
caatgcaaacaactgacagggtgcaaatac

SEQ ID NO: 28029 - DNA, 30 bp, Artificial Sequence
  Synthetic oligonucleotide
gcggacgaccgcaaataaccccgtaaatac

SEQ ID NO: 28030 - DNA, 30 bp, Artificial Sequence
  Synthetic oligonucleotide
aggaacgtccgttggaagctgaactaatac

SEQ ID NO: 28031 - DNA, 30 bp, Artificial Sequence
  Synthetic oligonucleotide
acggcgaaagcccccgctcactagcgatac

SEQ ID NO: 28032 - DNA, 30 bp, Artificial Sequence
  Synthetic oligonucleotide
tacgtacggaccaacaaaacgtccccctac

SEQ ID NO: 28033 - DNA, 30 bp, Artificial Sequence
  Synthetic oligonucleotide
tgttaaagggagtaaatacgggtcggctac

SEQ ID NO: 28034 - DNA, 30 bp, Artificial Sequence
  Synthetic oligonucleotide
acacccggaaacatgtaaatgacagtctac

SEQ ID NO: 28035 - DNA, 30 bp, Artificial Sequence
  Synthetic oligonucleotide
atgtgggatggctaaatgactactacgtac

SEQ ID NO: 28036 - DNA, 30 bp, Artificial Sequence
  Synthetic oligonucleotide
tctaacgagtaaggagaagaggttccgtac

SEQ ID NO: 28037 - DNA, 30 bp, Artificial Sequence
  Synthetic oligonucleotide
tagggtgatacgagggaccaacgtatgtac

SEQ ID NO: 28038 - DNA, 30 bp, Artificial Sequence
  Synthetic oligonucleotide
aggtcgcgtggtgtgaagtctaaacaaacc

SEQ ID NO: 28039 - DNA, 30 bp, Artificial Sequence
  Synthetic oligonucleotide
ttgcgattacaggtaggaagaggagcaacc

SEQ ID NO: 28040 - DNA, 30 bp, Artificial Sequence
  Synthetic oligonucleotide
gtgagatacgttaccaacggcgagtcaacc

SEQ ID NO: 28041 - DNA, 30 bp, Artificial Sequence
  Synthetic oligonucleotide
cggagacaagaaggcgcctacatgttaacc

SEQ ID NO: 28042 - DNA, 30 bp, Artificial Sequence
  Synthetic oligonucleotide
tcggcaaagagtaaccggtgtaaggtcacc

SEQ ID NO: 28043 - DNA, 30 bp, Artificial Sequence
  Synthetic oligonucleotide
tcacttgggcatgggaaggatcttgtcacc

SEQ ID NO: 28044 - DNA, 30 bp, Artificial Sequence
  Synthetic oligonucleotide
cggaacttacatcgagaacgccttaagacc

SEQ ID NO: 28045 - DNA, 30 bp, Artificial Sequence
  Synthetic oligonucleotide
cacggtagggattggtggagaaaacagacc

SEQ ID NO: 28046 - DNA, 30 bp, Artificial Sequence
  Synthetic oligonucleotide
gcgaagacaagtagctaagaccgcccgacc

SEQ ID NO: 28047 - DNA, 30 bp, Artificial Sequence
  Synthetic oligonucleotide
tcggtgtgtcgaagggggattgggccgacc

SEQ ID NO: 28048 - DNA, 30 bp, Artificial Sequence
  Synthetic oligonucleotide
ccggacgaaggcgtcactagatttcggacc

SEQ ID NO: 28049 - DNA, 30 bp, Artificial Sequence
  Synthetic oligonucleotide
aagggactcagaacgaagacgtgagatacc

SEQ ID NO: 28050 - DNA, 30 bp, Artificial Sequence
  Synthetic oligonucleotide
tcgtaagaggggcaggcgtaacgctctacc

SEQ ID NO: 28051 - DNA, 30 bp, Artificial Sequence
  Synthetic oligonucleotide
tgagactcgaaacctagctagggcagtacc

SEQ ID NO: 28052 - DNA, 30 bp, Artificial Sequence
  Synthetic oligonucleotide
tagagtctctaaagactaaccaggtgaccc

SEQ ID NO: 28053 - DNA, 30 bp, Artificial Sequence
  Synthetic oligonucleotide
aggaaacagaaaaaaggcgggtataccccc

SEQ ID NO: 28054 - DNA, 30 bp, Artificial Sequence
  Synthetic oligonucleotide
acacacgtgacgtcacagtaagaaggcccc

SEQ ID NO: 28055 - DNA, 30 bp, Artificial Sequence
  Synthetic oligonucleotide
tagacagttaattacagagcggaggggccc

SEQ ID NO: 28056 - DNA, 30 bp, Artificial Sequence
  Synthetic oligonucleotide
aaggtaggcttaatcactcgaacgaatccc

SEQ ID NO: 28057 - DNA, 30 bp, Artificial Sequence
  Synthetic oligonucleotide
acgcaattcggaaactaggtaattaaagcc

SEQ ID NO: 28058 - DNA, 30 bp, Artificial Sequence
  Synthetic oligonucleotide
acaacaaactaagtggaaattttagaagcc

SEQ ID NO: 28059 - DNA, 30 bp, Artificial Sequence
  Synthetic oligonucleotide
ggaaagcgatcaagtgtccccaactgagcc

SEQ ID NO: 28060 - DNA, 30 bp, Artificial Sequence
  Synthetic oligonucleotide
caccgcacgactgtgacatgtaaagccgcc

SEQ ID NO: 28061 - DNA, 30 bp, Artificial Sequence
  Synthetic oligonucleotide
ccggaaaagaacatagcgaatgcattcgcc

SEQ ID NO: 28062 - DNA, 30 bp, Artificial Sequence
  Synthetic oligonucleotide
taataatacctatatcagaggaacaaggcc

SEQ ID NO: 28063 - DNA, 30 bp, Artificial Sequence
  Synthetic oligonucleotide
ctagggtactaactcgaacctctgtcggcc

SEQ ID NO: 28064 - DNA, 30 bp, Artificial Sequence
  Synthetic oligonucleotide
ataagtgcgatcagacaaagtgtcgtggcc

SEQ ID NO: 28065 - DNA, 30 bp, Artificial Sequence
  Synthetic oligonucleotide
cgtcgagaactatgggagtaagatacatcc

SEQ ID NO: 28066 - DNA, 30 bp, Artificial Sequence
  Synthetic oligonucleotide
cacaggcccacgaaaagtcaagtcagatcc

SEQ ID NO: 28067 - DNA, 30 bp, Artificial Sequence
  Synthetic oligonucleotide
gctaagtccagtgttaagcgagatcgatcc

SEQ ID NO: 28068 - DNA, 30 bp, Artificial Sequence
  Synthetic oligonucleotide
ctaaaagagcggatcaaaagcccccactcc

SEQ ID NO: 28069 - DNA, 30 bp, Artificial Sequence
  Synthetic oligonucleotide
ggacatgcgcacaagtacatcgagacctcc

SEQ ID NO: 28070 - DNA, 30 bp, Artificial Sequence
  Synthetic oligonucleotide
ccagacaacatgtgactatctccacgctcc

SEQ ID NO: 28071 - DNA, 30 bp, Artificial Sequence
  Synthetic oligonucleotide
aggtaaaagtatactctctagagtgcgtcc

SEQ ID NO: 28072 - DNA, 30 bp, Artificial Sequence
  Synthetic oligonucleotide
tgatgagggttggtggtaacgagggaaagc

SEQ ID NO: 28073 - DNA, 30 bp, Artificial Sequence
  Synthetic oligonucleotide
gctcgaggtaagtatccggtcggcacaagc

SEQ ID NO: 28074 - DNA, 30 bp, Artificial Sequence
  Synthetic oligonucleotide
catggaaggtgatgagctccacatagaagc

SEQ ID NO: 28075 - DNA, 30 bp, Artificial Sequence
  Synthetic oligonucleotide
cgtaaggggaagatggcctgacttgtaagc

SEQ ID NO: 28076 - DNA, 30 bp, Artificial Sequence
  Synthetic oligonucleotide
gctagtccagggatcaccagatacaacagc

SEQ ID NO: 28077 - DNA, 30 bp, Artificial Sequence
  Synthetic oligonucleotide
ccataaggtagcgaaaacaaatgctccagc

SEQ ID NO: 28078 - DNA, 30 bp, Artificial Sequence
  Synthetic oligonucleotide
aggggaccgtacgccttgtccctgaagagc

SEQ ID NO: 28079 - DNA, 30 bp, Artificial Sequence
  Synthetic oligonucleotide
ccaggagggggcagttaaatggcatagagc

SEQ ID NO: 28080 - DNA, 30 bp, Artificial Sequence
  Synthetic oligonucleotide
tgctcgacatggaatgtctacgcaccgagc

SEQ ID NO: 28081 - DNA, 30 bp, Artificial Sequence
  Synthetic oligonucleotide
atgttcacaaaacctccagtaccgccgagc

SEQ ID NO: 28082 - DNA, 30 bp, Artificial Sequence
  Synthetic oligonucleotide
agaaggctgtaaaacaggtcggttaggagc

SEQ ID NO: 28083 - DNA, 30 bp, Artificial Sequence
  Synthetic oligonucleotide
atgaaatgagcagatctgtgcatcgggagc

SEQ ID NO: 28084 - DNA, 30 bp, Artificial Sequence
  Synthetic oligonucleotide
ggattacaagaaaagctagaagtatggagc

SEQ ID NO: 28085 - DNA, 30 bp, Artificial Sequence
  Synthetic oligonucleotide
atatactgcgactgaaaactaaacatgagc

SEQ ID NO: 28086 - DNA, 30 bp, Artificial Sequence
  Synthetic oligonucleotide
agcgcggttgataatttgccgacactgagc

SEQ ID NO: 28087 - DNA, 30 bp, Artificial Sequence
  Synthetic oligonucleotide
cgaacaagaaagttcgaataccgcttgagc

SEQ ID NO: 28088 - DNA, 30 bp, Artificial Sequence
  Synthetic oligonucleotide
ataaatgcggagatttcagggggacatagc

SEQ ID NO: 28089 - DNA, 30 bp, Artificial Sequence
  Synthetic oligonucleotide
acaagggcgttaaccaaacttttgcatagc

SEQ ID NO: 28090 - DNA, 30 bp, Artificial Sequence
  Synthetic oligonucleotide
ccataacatgacctaaggtcctgaagtagc

SEQ ID NO: 28091 - DNA, 30 bp, Artificial Sequence
  Synthetic oligonucleotide
aggcctaaaataagaacagcaggcattagc

SEQ ID NO: 28092 - DNA, 30 bp, Artificial Sequence
  Synthetic oligonucleotide
gagacgaacagacactataaagcgattagc

SEQ ID NO: 28093 - DNA, 30 bp, Artificial Sequence
  Synthetic oligonucleotide
ccaagtaagaataatatctcgcaccttagc

SEQ ID NO: 28094 - DNA, 30 bp, Artificial Sequence
  Synthetic oligonucleotide
tcacttcctacacatcgctcagagacacgc

SEQ ID NO: 28095 - DNA, 30 bp, Artificial Sequence
  Synthetic oligonucleotide
ccacgtgccgtaccaaataaaaatccacgc

SEQ ID NO: 28096 - DNA, 30 bp, Artificial Sequence
  Synthetic oligonucleotide
acaaggagcggccatcgctaggagtcacgc

SEQ ID NO: 28097 - DNA, 30 bp, Artificial Sequence
  Synthetic oligonucleotide
tagccgaccgaaactgagatgagaaaccgc

SEQ ID NO: 28098 - DNA, 30 bp, Artificial Sequence
  Synthetic oligonucleotide
aggaaacattgtgactacataagcaaccgc

SEQ ID NO: 28099 - DNA, 30 bp, Artificial Sequence
  Synthetic oligonucleotide
tcggggtaggtcagagcgccatcataccgc

SEQ ID NO: 28100 - DNA, 30 bp, Artificial Sequence
  Synthetic oligonucleotide
acaatggctaggacaggatgctcattccgc

SEQ ID NO: 28101 - DNA, 30 bp, Artificial Sequence
  Synthetic oligonucleotide
aagtacaaacactacgtagaccataagcgc

SEQ ID NO: 28102 - DNA, 30 bp, Artificial Sequence
  Synthetic oligonucleotide
tccaggtaagaaaaggcgctagcgtagcgc

SEQ ID NO: 28103 - DNA, 30 bp, Artificial Sequence
  Synthetic oligonucleotide
aactgcgataggggaagatcgcgcgcgcgc

SEQ ID NO: 28104 - DNA, 30 bp, Artificial Sequence
  Synthetic oligonucleotide
tagaggaagcatccatcaaggagtgcgcgc

SEQ ID NO: 28105 - DNA, 30 bp, Artificial Sequence
  Synthetic oligonucleotide
acgcacatcagtgaaaattaagaggatcgc

SEQ ID NO: 28106 - DNA, 30 bp, Artificial Sequence
  Synthetic oligonucleotide
cgagaaaaggaaagctcaccgccgcctcgc

SEQ ID NO: 28107 - DNA, 30 bp, Artificial Sequence
  Synthetic oligonucleotide
cccataaagagtaagagaaagcttagtcgc

SEQ ID NO: 28108 - DNA, 30 bp, Artificial Sequence
  Synthetic oligonucleotide
tacaacctggggtaaggtaggcgatgtcgc

SEQ ID NO: 28109 - DNA, 30 bp, Artificial Sequence
  Synthetic oligonucleotide
cgaaacccatatctaggatgatgacttcgc

SEQ ID NO: 28110 - DNA, 30 bp, Artificial Sequence
  Synthetic oligonucleotide
caagataataacaatcgagagtaggttcgc

SEQ ID NO: 28111 - DNA, 30 bp, Artificial Sequence
  Synthetic oligonucleotide
atacagggtgcactacacaccagtgaaggc

SEQ ID NO: 28112 - DNA, 30 bp, Artificial Sequence
  Synthetic oligonucleotide
tacgaatagtgcggcccgtcggaataaggc

SEQ ID NO: 28113 - DNA, 30 bp, Artificial Sequence
  Synthetic oligonucleotide
tggaaaaatacctgcatgactaaaataggc

SEQ ID NO: 28114 - DNA, 30 bp, Artificial Sequence
  Synthetic oligonucleotide
tacacgtagacatgagattaagatataggc

SEQ ID NO: 28115 - DNA, 30 bp, Artificial Sequence
  Synthetic oligonucleotide
ctgatgaactatcgtaaagcgtcggtaggc

SEQ ID NO: 28116 - DNA, 30 bp, Artificial Sequence
  Synthetic oligonucleotide
agagtaccaagacaattagaggtccccggc

SEQ ID NO: 28117 - DNA, 30 bp, Artificial Sequence
  Synthetic oligonucleotide
tcacatatctcatctccgaggtacgccggc

SEQ ID NO: 28118 - DNA, 30 bp, Artificial Sequence
  Synthetic oligonucleotide
aacgtgaatagcagagcaagtaaccgcggc

SEQ ID NO: 28119 - DNA, 30 bp, Artificial Sequence
  Synthetic oligonucleotide
ctcgggacagaccatctacaatgcgagggc

SEQ ID NO: 28120 - DNA, 30 bp, Artificial Sequence
  Synthetic oligonucleotide
gccacaagtggacttaaaggagtatagggc

SEQ ID NO: 28121 - DNA, 30 bp, Artificial Sequence
  Synthetic oligonucleotide
cgtgtaaaatcagacccatacggtacgggc

SEQ ID NO: 28122 - DNA, 30 bp, Artificial Sequence
  Synthetic oligonucleotide
tggacagaacatgcgtatatggcagcgggc

SEQ ID NO: 28123 - DNA, 30 bp, Artificial Sequence
  Synthetic oligonucleotide
acgaaaagcggtacatgacaacgagtgggc

SEQ ID NO: 28124 - DNA, 30 bp, Artificial Sequence
  Synthetic oligonucleotide
gaagaaaaaaaagctccgtccgacgatggc

SEQ ID NO: 28125 - DNA, 30 bp, Artificial Sequence
  Synthetic oligonucleotide
ccttagtgcttgaggagggatgtggctggc

SEQ ID NO: 28126 - DNA, 30 bp, Artificial Sequence
  Synthetic oligonucleotide
tagggcacgagataattatcagtgtctggc

SEQ ID NO: 28127 - DNA, 30 bp, Artificial Sequence
  Synthetic oligonucleotide
tcgccattacagagggtgtttgcaatatgc

SEQ ID NO: 28128 - DNA, 30 bp, Artificial Sequence
  Synthetic oligonucleotide
cggagggcccacaattcgcaatacctatgc

SEQ ID NO: 28129 - DNA, 30 bp, Artificial Sequence
  Synthetic oligonucleotide
atatcgacggggcggttaaccagagtatgc

SEQ ID NO: 28130 - DNA, 30 bp, Artificial Sequence
  Synthetic oligonucleotide
tagtgaggagatgaggcatgataccactgc

SEQ ID NO: 28131 - DNA, 30 bp, Artificial Sequence
  Synthetic oligonucleotide
taagacacgaatggtgaggcaatggcctgc

SEQ ID NO: 28132 - DNA, 30 bp, Artificial Sequence
  Synthetic oligonucleotide
tgagaggaccgggataattcgccaagctgc

SEQ ID NO: 28133 - DNA, 30 bp, Artificial Sequence
  Synthetic oligonucleotide
gcgccaagaaatcccaaagcatcacgctgc

SEQ ID NO: 28134 - DNA, 30 bp, Artificial Sequence
  Synthetic oligonucleotide
tagacgttatagtattctccatcgtgctgc

SEQ ID NO: 28135 - DNA, 30 bp, Artificial Sequence
  Synthetic oligonucleotide
cgacatctcgtgttgcttacatgtgagtgc

SEQ ID NO: 28136 - DNA, 30 bp, Artificial Sequence
  Synthetic oligonucleotide
ccgacattgtgtgcaggcgaaggtacgtgc

SEQ ID NO: 28137 - DNA, 30 bp, Artificial Sequence
  Synthetic oligonucleotide
gacggcatggtttacccgagagacaggtgc

SEQ ID NO: 28138 - DNA, 30 bp, Artificial Sequence
  Synthetic oligonucleotide
actcacaaagtagaagaggcctcggggtgc

SEQ ID NO: 28139 - DNA, 30 bp, Artificial Sequence
  Synthetic oligonucleotide
cctaggaaactacgctgtaacaggtggtgc

SEQ ID NO: 28140 - DNA, 30 bp, Artificial Sequence
  Synthetic oligonucleotide
cgtgatggcactagttcggcaaccatgtgc

SEQ ID NO: 28141 - DNA, 30 bp, Artificial Sequence
  Synthetic oligonucleotide
gttaatagaaagacacaacctccatcttgc

SEQ ID NO: 28142 - DNA, 30 bp, Artificial Sequence
  Synthetic oligonucleotide
acgggaggtgtgataatggagcaggcaatc

SEQ ID NO: 28143 - DNA, 30 bp, Artificial Sequence
  Synthetic oligonucleotide
gcgttatgaggagatcaaattcgatgaatc

SEQ ID NO: 28144 - DNA, 30 bp, Artificial Sequence
  Synthetic oligonucleotide
gcacagccaggacaaaatgcctactgaatc

SEQ ID NO: 28145 - DNA, 30 bp, Artificial Sequence
  Synthetic oligonucleotide
acgtatccagcttaccccaagaatgtcatc

SEQ ID NO: 28146 - DNA, 30 bp, Artificial Sequence
  Synthetic oligonucleotide
catggatatacatgattgagggacaagatc

SEQ ID NO: 28147 - DNA, 30 bp, Artificial Sequence
  Synthetic oligonucleotide
gcggtaaggcgagtatagcgtgtcaagatc

SEQ ID NO: 28148 - DNA, 30 bp, Artificial Sequence
  Synthetic oligonucleotide
tacgtgcacaaatgttgaagggaggagatc

SEQ ID NO: 28149 - DNA, 30 bp, Artificial Sequence
  Synthetic oligonucleotide
gtgcggaaaccataccatcatcgtccgatc

SEQ ID NO: 28150 - DNA, 30 bp, Artificial Sequence
  Synthetic oligonucleotide
gtgggtaaaaagctcaataaggggaggatc

SEQ ID NO: 28151 - DNA, 30 bp, Artificial Sequence
  Synthetic oligonucleotide
cgcggagatggtaaagcagcaataatgatc

SEQ ID NO: 28152 - DNA, 30 bp, Artificial Sequence
  Synthetic oligonucleotide
cgtatcccacagaggagcaccggtatgatc

SEQ ID NO: 28153 - DNA, 30 bp, Artificial Sequence
  Synthetic oligonucleotide
cggacaccagcacagaacgggtgaattatc

SEQ ID NO: 28154 - DNA, 30 bp, Artificial Sequence
  Synthetic oligonucleotide
tggcacaaagcagtggcatggtacgcactc

SEQ ID NO: 28155 - DNA, 30 bp, Artificial Sequence
  Synthetic oligonucleotide
cctgatcaaaatgtgtagctaacaagactc

SEQ ID NO: 28156 - DNA, 30 bp, Artificial Sequence
  Synthetic oligonucleotide
gtcgacacgagccaaaactccatcagcctc

SEQ ID NO: 28157 - DNA, 30 bp, Artificial Sequence
  Synthetic oligonucleotide
tcacggaaataagagacacgattacagctc

SEQ ID NO: 28158 - DNA, 30 bp, Artificial Sequence
  Synthetic oligonucleotide
ctacgagaaacgcgtctagtgactgggctc

SEQ ID NO: 28159 - DNA, 30 bp, Artificial Sequence
  Synthetic oligonucleotide
gaagaagagtgaaagacttgttgaatgctc

SEQ ID NO: 28160 - DNA, 30 bp, Artificial Sequence
  Synthetic oligonucleotide
acgcgagtaagggacacataggcctgtctc

SEQ ID NO: 28161 - DNA, 30 bp, Artificial Sequence
  Synthetic oligonucleotide
caccaacggtaaagaaaaagcatctttctc

SEQ ID NO: 28162 - DNA, 30 bp, Artificial Sequence
  Synthetic oligonucleotide
ttggtagataagtgggcggcctcgaaagtc

SEQ ID NO: 28163 - DNA, 30 bp, Artificial Sequence
  Synthetic oligonucleotide
cttagagaaggcgattaacgtggacaagtc

SEQ ID NO: 28164 - DNA, 30 bp, Artificial Sequence
  Synthetic oligonucleotide
acagtaaataagtgcgcagaaatcgaagtc

SEQ ID NO: 28165 - DNA, 30 bp, Artificial Sequence
  Synthetic oligonucleotide
cgtaataatacatgcataagttaataagtc

SEQ ID NO: 28166 - DNA, 30 bp, Artificial Sequence
  Synthetic oligonucleotide
acgagtcgccgccggaagagccacccagtc

SEQ ID NO: 28167 - DNA, 30 bp, Artificial Sequence
  Synthetic oligonucleotide
cggcctaaggcgtattaagctcggcgagtc

SEQ ID NO: 28168 - DNA, 30 bp, Artificial Sequence
  Synthetic oligonucleotide
aatgacaagatcaaaaatacggaggtagtc

SEQ ID NO: 28169 - DNA, 30 bp, Artificial Sequence
  Synthetic oligonucleotide
cgtaaactactagggtcaataacaaacgtc

SEQ ID NO: 28170 - DNA, 30 bp, Artificial Sequence
  Synthetic oligonucleotide
atctcaaaccactatgagggaatgctcgtc

SEQ ID NO: 28171 - DNA, 30 bp, Artificial Sequence
  Synthetic oligonucleotide
cgtacgtactccaaaataatccaattcgtc

SEQ ID NO: 28172 - DNA, 30 bp, Artificial Sequence
  Synthetic oligonucleotide
agagggaagtgtcgatcgtaactggaggtc

SEQ ID NO: 28173 - DNA, 31 bp, Artificial Sequence
  Synthetic oligonucleotide
ctaagatcacagtgagcttcctataatggtc

SEQ ID NO: 28174 - DNA, 30 bp, Artificial Sequence
  Synthetic oligonucleotide
cattggcggcgaggagagtagcaggtggtc

SEQ ID NO: 28175 - DNA, 30 bp, Artificial Sequence
  Synthetic oligonucleotide
gtgacgggtaagagtgaagccattgtggtc

SEQ ID NO: 28176 - DNA, 30 bp, Artificial Sequence
  Synthetic oligonucleotide
ggtctggggccaagtaagtagcaacatgtc

SEQ ID NO: 28177 - DNA, 30 bp, Artificial Sequence
  Synthetic oligonucleotide
acgcgtccgaaatagtagcttcctgcattc

SEQ ID NO: 28178 - DNA, 30 bp, Artificial Sequence
  Synthetic oligonucleotide
cctggcgactaggctagtatgagaatattc

SEQ ID NO: 28179 - DNA, 30 bp, Artificial Sequence
  Synthetic oligonucleotide
atgtcagctgacaatgggtaacaggacttc

SEQ ID NO: 28180 - DNA, 30 bp, Artificial Sequence
  Synthetic oligonucleotide
tcacaggggataggccgattcgactacttc

SEQ ID NO: 28181 - DNA, 30 bp, Artificial Sequence
  Synthetic oligonucleotide
gggacaaaagtatgatcaattcacggcttc

SEQ ID NO: 28182 - DNA, 30 bp, Artificial Sequence
  Synthetic oligonucleotide
caggcaaaaagaggagcgtctgacgtcttc

SEQ ID NO: 28183 - DNA, 30 bp, Artificial Sequence
  Synthetic oligonucleotide
ataagccggcccaaggagtccagagagttc

SEQ ID NO: 28184 - DNA, 30 bp, Artificial Sequence
  Synthetic oligonucleotide
gcgaattgacaaacattacacagcgagttc

SEQ ID NO: 28185 - DNA, 30 bp, Artificial Sequence
  Synthetic oligonucleotide
acatgaaaaagcggcgagaaagaaccgttc

SEQ ID NO: 28186 - DNA, 30 bp, Artificial Sequence
  Synthetic oligonucleotide
atggtacatgaagggtggcatcacgcgttc

SEQ ID NO: 28187 - DNA, 30 bp, Artificial Sequence
  Synthetic oligonucleotide
tgaagatcataaataagaatacagctgttc

SEQ ID NO: 28188 - DNA, 30 bp, Artificial Sequence
  Synthetic oligonucleotide
catcggtaaggttaacggaaaccgaaaaag

SEQ ID NO: 28189 - DNA, 30 bp, Artificial Sequence
  Synthetic oligonucleotide
cattaagacaatcgatatcaagtagaaaag

SEQ ID NO: 28190 - DNA, 30 bp, Artificial Sequence
  Synthetic oligonucleotide
cctccgaaccccaagcacgttgaggaaaag

SEQ ID NO: 28191 - DNA, 30 bp, Artificial Sequence
  Synthetic oligonucleotide
caaacccgttaagccgaatagcatgaaaag

SEQ ID NO: 28192 - DNA, 30 bp, Artificial Sequence
  Synthetic oligonucleotide
tacaatacgtgagggcatcacgagtaaaag

SEQ ID NO: 28193 - DNA, 30 bp, Artificial Sequence
  Synthetic oligonucleotide
cgcgttagagcctgggatcccacaacaaag

SEQ ID NO: 28194 - DNA, 30 bp, Artificial Sequence
  Synthetic oligonucleotide
ataagcgcacgggaataataaatggcaaag

SEQ ID NO: 28195 - DNA, 30 bp, Artificial Sequence
  Synthetic oligonucleotide
tcgttaaccaaaacgcacgtactacgaaag

SEQ ID NO: 28196 - DNA, 30 bp, Artificial Sequence
  Synthetic oligonucleotide
ggctagaacacaagtttccgaagccgaaag

SEQ ID NO: 28197 - DNA, 30 bp, Artificial Sequence
  Synthetic oligonucleotide
cgggaaaggggcaaaaatactgacggaaag

SEQ ID NO: 28198 - DNA, 30 bp, Artificial Sequence
  Synthetic oligonucleotide
cgacaatcaatgggtttctactccggaaag

SEQ ID NO: 28199 - DNA, 30 bp, Artificial Sequence
  Synthetic oligonucleotide
taggacttgatctgtagaaaacctggaaag

SEQ ID NO: 28200 - DNA, 30 bp, Artificial Sequence
  Synthetic oligonucleotide
tgttaagagccacaaagggcgtcgtgaaag

SEQ ID NO: 28201 - DNA, 30 bp, Artificial Sequence
  Synthetic oligonucleotide
aggggcgataggaggaaccacaatgtaaag

SEQ ID NO: 28202 - DNA, 30 bp, Artificial Sequence
  Synthetic oligonucleotide
ggcttccatttgaattccaatccagacaag

SEQ ID NO: 28203 - DNA, 30 bp, Artificial Sequence
  Synthetic oligonucleotide
aaggccgactgcacgggttaacgagacaag

SEQ ID NO: 28204 - DNA, 30 bp, Artificial Sequence
  Synthetic oligonucleotide
aagttaataattctaggggagagggacaag

SEQ ID NO: 28205 - DNA, 31 bp, Artificial Sequence
  Synthetic oligonucleotide
aaaggataagtggcgtatgaagacagccaag

SEQ ID NO: 28206 - DNA, 30 bp, Artificial Sequence
  Synthetic oligonucleotide
actcgccaagagacaagtaacagggccaag

SEQ ID NO: 28207 - DNA, 30 bp, Artificial Sequence
  Synthetic oligonucleotide
cgtttctaaacctaatgaaatgcgagcaag

SEQ ID NO: 28208 - DNA, 30 bp, Artificial Sequence
  Synthetic oligonucleotide
caactatcacgatcacgtcacgactgcaag

SEQ ID NO: 28209 - DNA, 30 bp, Artificial Sequence
  Synthetic oligonucleotide
aaagcaggacgacaagaaaactactgcaag

SEQ ID NO: 28210 - DNA, 30 bp, Artificial Sequence
  Synthetic oligonucleotide
cacgaatgtggggtagatagcgcctgcaag

SEQ ID NO: 28211 - DNA, 30 bp, Artificial Sequence
  Synthetic oligonucleotide
ggcagcagtaggccgtcagcgagaatcaag

SEQ ID NO: 28212 - DNA, 30 bp, Artificial Sequence
  Synthetic oligonucleotide
ggggaactacaattcccgtggagcctcaag

SEQ ID NO: 28213 - DNA, 30 bp, Artificial Sequence
  Synthetic oligonucleotide
tagtgaggacgtcgtaatggaaacgtcaag

SEQ ID NO: 28214 - DNA, 30 bp, Artificial Sequence
  Synthetic oligonucleotide
caatgtaaatgtgcaacagacgatttcaag

SEQ ID NO: 28215 - DNA, 30 bp, Artificial Sequence
  Synthetic oligonucleotide
gcatgagtagacattaggtctaaaaagaag

SEQ ID NO: 28216 - DNA, 30 bp, Artificial Sequence
  Synthetic oligonucleotide
ggtagggttccacatctggcagccgagaag

SEQ ID NO: 28217 - DNA, 30 bp, Artificial Sequence
  Synthetic oligonucleotide
aaatcggttgcagggaagcttacctcgaag

SEQ ID NO: 28218 - DNA, 30 bp, Artificial Sequence
  Synthetic oligonucleotide
gacaaagaaaacagcatcgaatgctcgaag

SEQ ID NO: 28219 - DNA, 30 bp, Artificial Sequence
  Synthetic oligonucleotide
gttggcgacctatttgaacaactaaggaag

SEQ ID NO: 28220 - DNA, 30 bp, Artificial Sequence
  Synthetic oligonucleotide
gaaagggcgatggcatcatgtagtaggaag

SEQ ID NO: 28221 - DNA, 30 bp, Artificial Sequence
  Synthetic oligonucleotide
tgatcgtagaaatctctcatagaacggaag

SEQ ID NO: 28222 - DNA, 30 bp, Artificial Sequence
  Synthetic oligonucleotide
agaggtaagtagcgaagcccgccgcggaag

SEQ ID NO: 28223 - DNA, 30 bp, Artificial Sequence
  Synthetic oligonucleotide
caggactagctggattacacctgggggaag

SEQ ID NO: 28224 - DNA, 30 bp, Artificial Sequence
  Synthetic oligonucleotide
cagtaggaataatgaaaatgaatttggaag

SEQ ID NO: 28225 - DNA, 30 bp, Artificial Sequence
  Synthetic oligonucleotide
ccaccggtacctcggatcagaatcgtgaag

SEQ ID NO: 28226 - DNA, 30 bp, Artificial Sequence
  Synthetic oligonucleotide
tgaaactagcaatcgcatggtaaggtgaag

SEQ ID NO: 28227 - DNA, 30 bp, Artificial Sequence
  Synthetic oligonucleotide
cagtaaacacggcattcggatctgttgaag

SEQ ID NO: 28228 - DNA, 30 bp, Artificial Sequence
  Synthetic oligonucleotide
agatgcgaagtgatgtatgggtgctataag

SEQ ID NO: 28229 - DNA, 30 bp, Artificial Sequence
  Synthetic oligonucleotide
aagctagacctcggaccaatggagtataag

SEQ ID NO: 28230 - DNA, 30 bp, Artificial Sequence
  Synthetic oligonucleotide
agctcgctgacctgagaaaagacggctaag

SEQ ID NO: 28231 - DNA, 30 bp, Artificial Sequence
  Synthetic oligonucleotide
gaggtagtgggactaactcaccactctaag

SEQ ID NO: 28232 - DNA, 30 bp, Artificial Sequence
  Synthetic oligonucleotide
cgccacaaataatggggtaatcttagtaag

SEQ ID NO: 28233 - DNA, 30 bp, Artificial Sequence
  Synthetic oligonucleotide
tgagaggaatgcgtgcacgaatgccgtaag

SEQ ID NO: 28234 - DNA, 30 bp, Artificial Sequence
  Synthetic oligonucleotide
agttgccaagtacaagtaccgggtcgtaag

SEQ ID NO: 28235 - DNA, 30 bp, Artificial Sequence
  Synthetic oligonucleotide
agatcaggtatgctcggtcaaggaggtaag

SEQ ID NO: 28236 - DNA, 30 bp, Artificial Sequence
  Synthetic oligonucleotide
gggatcgctagatgtatgtatgccggtaag

SEQ ID NO: 28237 - DNA, 30 bp, Artificial Sequence
  Synthetic oligonucleotide
aaggtgtgacaagcgaagaccacatgtaag

SEQ ID NO: 28238 - DNA, 30 bp, Artificial Sequence
  Synthetic oligonucleotide
cgactcggtctgtgtcatatcgcaaaacag

SEQ ID NO: 28239 - DNA, 30 bp, Artificial Sequence
  Synthetic oligonucleotide
gcataggccctaggatggtcccgaaaacag

SEQ ID NO: 28240 - DNA, 30 bp, Artificial Sequence
  Synthetic oligonucleotide
acggatcgatgtattcccaatataaaacag

SEQ ID NO: 28241 - DNA, 30 bp, Artificial Sequence
  Synthetic oligonucleotide
ctcgacctgtggccgacgagacgagaacag

SEQ ID NO: 28242 - DNA, 30 bp, Artificial Sequence
  Synthetic oligonucleotide
cgggcctcacaacgcttagtcagggaacag

SEQ ID NO: 28243 - DNA, 30 bp, Artificial Sequence
  Synthetic oligonucleotide
caatgtgaactacaatctggatcgtaacag

SEQ ID NO: 28244 - DNA, 30 bp, Artificial Sequence
  Synthetic oligonucleotide
agatgtttcatcacagggaagagcacacag

SEQ ID NO: 28245 - DNA, 30 bp, Artificial Sequence
  Synthetic oligonucleotide
cgctagccgtgggcaattcgttcctgacag

SEQ ID NO: 28246 - DNA, 30 bp, Artificial Sequence
  Synthetic oligonucleotide
agaacccgtaccgacaacagattgtgacag

SEQ ID NO: 28247 - DNA, 30 bp, Artificial Sequence
  Synthetic oligonucleotide
acgaagtaatatcgttgggaacgcatacag

SEQ ID NO: 28248 - DNA, 30 bp, Artificial Sequence
  Synthetic oligonucleotide
gcggagaggtaagaaaaagaattcaaccag

SEQ ID NO: 28249 - DNA, 30 bp, Artificial Sequence
  Synthetic oligonucleotide
cgagtatgaagatagacgaacctgaaccag

SEQ ID NO: 28250 - DNA, 30 bp, Artificial Sequence
  Synthetic oligonucleotide
ggctcgcaggccgaaagcgtacgtaaccag

SEQ ID NO: 28251 - DNA, 31 bp, Artificial Sequence
  Synthetic oligonucleotide
atggctcgtggaagattctccagcccaccag

SEQ ID NO: 28252 - DNA, 30 bp, Artificial Sequence
  Synthetic oligonucleotide
gtagcaagccaggcccacactacaccccag

SEQ ID NO: 28253 - DNA, 30 bp, Artificial Sequence
  Synthetic oligonucleotide
tcgcgtggggcaatacgaaaaaacgcccag

SEQ ID NO: 28254 - DNA, 30 bp, Artificial Sequence
  Synthetic oligonucleotide
tcagacgagattacgaagatcgggtgccag

SEQ ID NO: 28255 - DNA, 30 bp, Artificial Sequence
  Synthetic oligonucleotide
gcggtaccgacgagcgtgtaaccgatccag

SEQ ID NO: 28256 - DNA, 30 bp, Artificial Sequence
  Synthetic oligonucleotide
tcggtggataagtgtcacgatcggaggcag

SEQ ID NO: 28257 - DNA, 30 bp, Artificial Sequence
  Synthetic oligonucleotide
gaggaaatagggatacttccaagagggcag

SEQ ID NO: 28258 - DNA, 30 bp, Artificial Sequence
  Synthetic oligonucleotide
tggtgaaaactagtccataaggtggggcag

SEQ ID NO: 28259 - DNA, 30 bp, Artificial Sequence
  Synthetic oligonucleotide
aacacggtacgtaaaggtcaaagactgcag

SEQ ID NO: 28260 - DNA, 30 bp, Artificial Sequence
  Synthetic oligonucleotide
cgaaccggctatgccaacatattcttgcag

SEQ ID NO: 28261 - DNA, 30 bp, Artificial Sequence
  Synthetic oligonucleotide
aggtaggggctgggcaaattgaagaatcag

SEQ ID NO: 28262 - DNA, 30 bp, Artificial Sequence
  Synthetic oligonucleotide
cggaagctcggggtgtcattggtacatcag

SEQ ID NO: 28263 - DNA, 30 bp, Artificial Sequence
  Synthetic oligonucleotide
tcatgatcacctagggccagggaagatcag

SEQ ID NO: 28264 - DNA, 30 bp, Artificial Sequence
  Synthetic oligonucleotide
cactgcataagcgagaaacattacgatcag

SEQ ID NO: 28265 - DNA, 30 bp, Artificial Sequence
  Synthetic oligonucleotide
tgagttgaacgaactaagtgaagatctcag

SEQ ID NO: 28266 - DNA, 30 bp, Artificial Sequence
  Synthetic oligonucleotide
cgtacatcatacgaagaggccgtaagtcag

SEQ ID NO: 28267 - DNA, 30 bp, Artificial Sequence
  Synthetic oligonucleotide
gggggatgtaccaattcagtaactattcag

SEQ ID NO: 28268 - DNA, 30 bp, Artificial Sequence
  Synthetic oligonucleotide
cgaagtcaagactctattcccccagttcag

SEQ ID NO: 28269 - DNA, 30 bp, Artificial Sequence
  Synthetic oligonucleotide
tgagaccagcatctgacgcactggaaagag

SEQ ID NO: 28270 - DNA, 30 bp, Artificial Sequence
  Synthetic oligonucleotide
acagacgaaaccagggtcgtctgccaagag

SEQ ID NO: 28271 - DNA, 30 bp, Artificial Sequence
  Synthetic oligonucleotide
cgtcgagctaagaggtccacgaaagaagag

SEQ ID NO: 28272 - DNA, 30 bp, Artificial Sequence
  Synthetic oligonucleotide
agtcgacacagtaagggttgcagagaagag

SEQ ID NO: 28273 - DNA, 30 bp, Artificial Sequence
  Synthetic oligonucleotide
gtccgaaatgggatgttgggtacggaagag

SEQ ID NO: 28274 - DNA, 30 bp, Artificial Sequence
  Synthetic oligonucleotide
gccataaaattcgatgacattagggaagag

SEQ ID NO: 28275 - DNA, 30 bp, Artificial Sequence
  Synthetic oligonucleotide
cacagggaaacaatcttgtttaggtaagag

SEQ ID NO: 28276 - DNA, 30 bp, Artificial Sequence
  Synthetic oligonucleotide
aggagtgggtatcaaaggggacattaagag

SEQ ID NO: 28277 - DNA, 30 bp, Artificial Sequence
  Synthetic oligonucleotide
ccagtgttaaggaaactggttgattaagag

SEQ ID NO: 28278 - DNA, 30 bp, Artificial Sequence
  Synthetic oligonucleotide
atagcaagttgcacaggataactatcagag

SEQ ID NO: 28279 - DNA, 30 bp, Artificial Sequence
  Synthetic oligonucleotide
gaccgccaactcctagcggggaacagagag

SEQ ID NO: 28280 - DNA, 30 bp, Artificial Sequence
  Synthetic oligonucleotide
atgagcgcgtgaacttgagggcaacgagag

SEQ ID NO: 28281 - DNA, 30 bp, Artificial Sequence
  Synthetic oligonucleotide
tcgccattgcccggaaagggccgacgagag

SEQ ID NO: 28282 - DNA, 30 bp, Artificial Sequence
  Synthetic oligonucleotide
gaatggtcatgtgcctggtaacaccgagag

SEQ ID NO: 28283 - DNA, 30 bp, Artificial Sequence
  Synthetic oligonucleotide
agatacagcagctaactgagggtgcgagag

SEQ ID NO: 28284 - DNA, 30 bp, Artificial Sequence
  Synthetic oligonucleotide
tatggtaagaagacaacgtgtggtcgagag

SEQ ID NO: 28285 - DNA, 30 bp, Artificial Sequence
  Synthetic oligonucleotide
aagggatctctagttaatgtagcaggagag

SEQ ID NO: 28286 - DNA, 30 bp, Artificial Sequence
  Synthetic oligonucleotide
tgtaccgggtcacgaaacaggacgggagag

SEQ ID NO: 28287 - DNA, 30 bp, Artificial Sequence
  Synthetic oligonucleotide
acctcggagacacatacataacctggagag

SEQ ID NO: 28288 - DNA, 30 bp, Artificial Sequence
  Synthetic oligonucleotide
acacaaccgcgtagaaacggggtctgagag

SEQ ID NO: 28289 - DNA, 30 bp, Artificial Sequence
  Synthetic oligonucleotide
tagacacagggtaagggaagggtgctagag

SEQ ID NO: 28290 - DNA, 30 bp, Artificial Sequence
  Synthetic oligonucleotide
aggaatccggtgctacatcattacgtagag

SEQ ID NO: 28291 - DNA, 30 bp, Artificial Sequence
  Synthetic oligonucleotide
gatgcatcgcatcgcgaggacccattagag

SEQ ID NO: 28292 - DNA, 30 bp, Artificial Sequence
  Synthetic oligonucleotide
gcaacgtcgagcacacttcacgcattagag

SEQ ID NO: 28293 - DNA, 30 bp, Artificial Sequence
  Synthetic oligonucleotide
tgtcccagagctcaacggccaatatacgag

SEQ ID NO: 28294 - DNA, 30 bp, Artificial Sequence
  Synthetic oligonucleotide
gaacgactgaatggtaatgcaacgtacgag

SEQ ID NO: 28295 - DNA, 30 bp, Artificial Sequence
  Synthetic oligonucleotide
ttagaacaggaggatttacggtaaaccgag

SEQ ID NO: 28296 - DNA, 30 bp, Artificial Sequence
  Synthetic oligonucleotide
atggttggttggggcaagatccgcaccgag

SEQ ID NO: 28297 - DNA, 30 bp, Artificial Sequence
  Synthetic oligonucleotide
gataaagttcgtggggaaactgcgagcgag

SEQ ID NO: 28298 - DNA, 30 bp, Artificial Sequence
  Synthetic oligonucleotide
gaaggggatctgcatggcgtataatgcgag

SEQ ID NO: 28299 - DNA, 30 bp, Artificial Sequence
  Synthetic oligonucleotide
accgttaagtggttctggcatagctgcgag

SEQ ID NO: 28300 - DNA, 30 bp, Artificial Sequence
  Synthetic oligonucleotide
gcgagctcgccgtgcgacatcatagtcgag

SEQ ID NO: 28301 - DNA, 30 bp, Artificial Sequence
  Synthetic oligonucleotide
gtagggagctcagccggttgggtgttcgag

SEQ ID NO: 28302 - DNA, 30 bp, Artificial Sequence
  Synthetic oligonucleotide
catcttcgagcgatcagcggcagtttcgag

SEQ ID NO: 28303 - DNA, 30 bp, Artificial Sequence
  Synthetic oligonucleotide
aggcctcattgcttatccaccagaaaggag

SEQ ID NO: 28304 - DNA, 30 bp, Artificial Sequence
  Synthetic oligonucleotide
gaacgtaatttactaataatgctaaaggag

SEQ ID NO: 28305 - DNA, 30 bp, Artificial Sequence
  Synthetic oligonucleotide
accttacaagaggaggtaactgtaaaggag

SEQ ID NO: 28306 - DNA, 30 bp, Artificial Sequence
  Synthetic oligonucleotide
ggcatcgatctgcatttcacgttaaaggag

SEQ ID NO: 28307 - DNA, 30 bp, Artificial Sequence
  Synthetic oligonucleotide
acaatggcgggacgatgtgttaatcaggag

SEQ ID NO: 28308 - DNA, 30 bp, Artificial Sequence
  Synthetic oligonucleotide
tcctaaaaaatgatgattggctgtgaggag

SEQ ID NO: 28309 - DNA, 30 bp, Artificial Sequence
  Synthetic oligonucleotide
ctacgtgtgagatccgcggattaataggag

SEQ ID NO: 28310 - DNA, 30 bp, Artificial Sequence
  Synthetic oligonucleotide
gagccaagcagatgaacgaatacaacggag

SEQ ID NO: 28311 - DNA, 30 bp, Artificial Sequence
  Synthetic oligonucleotide
aagagagcgggtaagtaccggttcacggag

SEQ ID NO: 28312 - DNA, 30 bp, Artificial Sequence
  Synthetic oligonucleotide
tgggacatggatatgatccaccggacggag

SEQ ID NO: 28313 - DNA, 30 bp, Artificial Sequence
  Synthetic oligonucleotide
tggcgaacagtgcaggtgttactaccggag

SEQ ID NO: 28314 - DNA, 30 bp, Artificial Sequence
  Synthetic oligonucleotide
gaaagcgagacagaattgcatccgtcggag

SEQ ID NO: 28315 - DNA, 30 bp, Artificial Sequence
  Synthetic oligonucleotide
aaggagtgcaacgttcactggatacgggag

SEQ ID NO: 28316 - DNA, 30 bp, Artificial Sequence
  Synthetic oligonucleotide
ccggccagtaagcgacgcgtcgatcgggag

SEQ ID NO: 28317 - DNA, 30 bp, Artificial Sequence
  Synthetic oligonucleotide
cgaacatgggttaactatcccgtcggggag

SEQ ID NO: 28318 - DNA, 30 bp, Artificial Sequence
  Synthetic oligonucleotide
tcatgtcatggaagcgcgattgcgggggag

SEQ ID NO: 28319 - DNA, 30 bp, Artificial Sequence
  Synthetic oligonucleotide
cagttcacgctgtgtgtgacagatggggag

SEQ ID NO: 28320 - DNA, 30 bp, Artificial Sequence
  Synthetic oligonucleotide
cattggactgaacatcaacgcgccgtggag

SEQ ID NO: 28321 - DNA, 30 bp, Artificial Sequence
  Synthetic oligonucleotide
tgccaagagtatgtgttatgggagttggag

SEQ ID NO: 28322 - DNA, 30 bp, Artificial Sequence
  Synthetic oligonucleotide
cgaatcattagacaggccagagctttggag

SEQ ID NO: 28323 - DNA, 30 bp, Artificial Sequence
  Synthetic oligonucleotide
tcgtgactatcgtgatcagggaacaatgag

SEQ ID NO: 28324 - DNA, 30 bp, Artificial Sequence
  Synthetic oligonucleotide
tggaatgtagcgtccgccttgtgacatgag

SEQ ID NO: 28325 - DNA, 30 bp, Artificial Sequence
  Synthetic oligonucleotide
agcataagaagccacaatgagatagatgag

SEQ ID NO: 28326 - DNA, 30 bp, Artificial Sequence
  Synthetic oligonucleotide
cgcctttcctgcaagcctagaacgtatgag

SEQ ID NO: 28327 - DNA, 30 bp, Artificial Sequence
  Synthetic oligonucleotide
cgttgcggaaggctcaaaacactgtatgag

SEQ ID NO: 28328 - DNA, 30 bp, Artificial Sequence
  Synthetic oligonucleotide
tggaagacgaatgtagaaagacaaactgag

SEQ ID NO: 28329 - DNA, 30 bp, Artificial Sequence
  Synthetic oligonucleotide
tgcttagaagctcataatcagaccgctgag

SEQ ID NO: 28330 - DNA, 30 bp, Artificial Sequence
  Synthetic oligonucleotide
aggcgtaatacggagagggcacagtctgag

SEQ ID NO: 28331 - DNA, 30 bp, Artificial Sequence
  Synthetic oligonucleotide
acacggggcgaatgaaaactcagaagtgag

SEQ ID NO: 28332 - DNA, 30 bp, Artificial Sequence
  Synthetic oligonucleotide
cgtactggctcgagttaagccacccgtgag

SEQ ID NO: 28333 - DNA, 30 bp, Artificial Sequence
  Synthetic oligonucleotide
aaacacacccctcacgaagaagggcgtgag

SEQ ID NO: 28334 - DNA, 30 bp, Artificial Sequence
  Synthetic oligonucleotide
cgatagggttatacgctccgaacaattgag

SEQ ID NO: 28335 - DNA, 30 bp, Artificial Sequence
  Synthetic oligonucleotide
actaacattgtgagacaactctggattgag

SEQ ID NO: 28336 - DNA, 30 bp, Artificial Sequence
  Synthetic oligonucleotide
cttcgggttggaaaaatcaaaaatattgag

SEQ ID NO: 28337 - DNA, 30 bp, Artificial Sequence
  Synthetic oligonucleotide
agtcgctaaggccgagcgtcagaacttgag

SEQ ID NO: 28338 - DNA, 30 bp, Artificial Sequence
  Synthetic oligonucleotide
gttagactcagcaaaatggagaaggttgag

SEQ ID NO: 28339 - DNA, 30 bp, Artificial Sequence
  Synthetic oligonucleotide
gagatcctgtaatcgagaacgatggttgag

SEQ ID NO: 28340 - DNA, 30 bp, Artificial Sequence
  Synthetic oligonucleotide
taagagacgcacgttgggagtatggttgag

SEQ ID NO: 28341 - DNA, 30 bp, Artificial Sequence
  Synthetic oligonucleotide
tagggcatcgttaaaacgttgaaagaatag

SEQ ID NO: 28342 - DNA, 30 bp, Artificial Sequence
  Synthetic oligonucleotide
ccgggtcaaagagattgggacagctaatag

SEQ ID NO: 28343 - DNA, 30 bp, Artificial Sequence
  Synthetic oligonucleotide
aacgaggggtcacccgtgtcgtcgtaatag

SEQ ID NO: 28344 - DNA, 30 bp, Artificial Sequence
  Synthetic oligonucleotide
cgtggacatgggcaaaggggcaacccatag

SEQ ID NO: 28345 - DNA, 30 bp, Artificial Sequence
  Synthetic oligonucleotide
atcgaggataccactggttgcagcccatag

SEQ ID NO: 28346 - DNA, 30 bp, Artificial Sequence
  Synthetic oligonucleotide
ggcactaattgaagttaccctatcccatag

SEQ ID NO: 28347 - DNA, 30 bp, Artificial Sequence
  Synthetic oligonucleotide
ccttgctctactgaacccgactggcgatag

SEQ ID NO: 28348 - DNA, 30 bp, Artificial Sequence
  Synthetic oligonucleotide
ggtgaaccaaaactactctgcgtaggatag

SEQ ID NO: 28349 - DNA, 30 bp, Artificial Sequence
  Synthetic oligonucleotide
ggagtgagcgtaaagtgtatcacgggatag

SEQ ID NO: 28350 - DNA, 30 bp, Artificial Sequence
  Synthetic oligonucleotide
cgagtgtaaacagggacatagtggggatag

SEQ ID NO: 28351 - DNA, 30 bp, Artificial Sequence
  Synthetic oligonucleotide
ggaccgtaaaggcggaacagccatttatag

SEQ ID NO: 28352 - DNA, 30 bp, Artificial Sequence
  Synthetic oligonucleotide
aaggtcaatacgtctctcatgatgacctag

SEQ ID NO: 28353 - DNA, 30 bp, Artificial Sequence
  Synthetic oligonucleotide
gggcctcagaagattgcaactgactcctag

SEQ ID NO: 28354 - DNA, 30 bp, Artificial Sequence
  Synthetic oligonucleotide
agcttgatcagactccctcaacccagctag

SEQ ID NO: 28355 - DNA, 30 bp, Artificial Sequence
  Synthetic oligonucleotide
ccgtatcttggaaggattgcgaaaatctag

SEQ ID NO: 28356 - DNA, 30 bp, Artificial Sequence
  Synthetic oligonucleotide
cgggctagagatatattgatgggtaagtag

SEQ ID NO: 28357 - DNA, 30 bp, Artificial Sequence
  Synthetic oligonucleotide
gcaggggaagaacagctttgtcttaagtag

SEQ ID NO: 28358 - DNA, 30 bp, Artificial Sequence
  Synthetic oligonucleotide
caagtctgctcctaaatagaccaatcgtag

SEQ ID NO: 28359 - DNA, 30 bp, Artificial Sequence
  Synthetic oligonucleotide
tgatacgggagtgacacgtatatagattag

SEQ ID NO: 28360 - DNA, 31 bp, Artificial Sequence
  Synthetic oligonucleotide
aagaatgttgaggccaagggaagccacttag

SEQ ID NO: 28361 - DNA, 30 bp, Artificial Sequence
  Synthetic oligonucleotide
taccgggaggccgagcagatctgtacttag

SEQ ID NO: 28362 - DNA, 30 bp, Artificial Sequence
  Synthetic oligonucleotide
caaggaacctggaccggtatgattacttag

SEQ ID NO: 28363 - DNA, 30 bp, Artificial Sequence
  Synthetic oligonucleotide
acacgagaaacttacccaatacggtcttag

SEQ ID NO: 28364 - DNA, 30 bp, Artificial Sequence
  Synthetic oligonucleotide
acgcaaagctgaccaaggagggacagttag

SEQ ID NO: 28365 - DNA, 30 bp, Artificial Sequence
  Synthetic oligonucleotide
ggtgagcatatcaacataagtaggcgttag

SEQ ID NO: 28366 - DNA, 30 bp, Artificial Sequence
  Synthetic oligonucleotide
agactccctcgaaggaaacaggatgtttag

SEQ ID NO: 28367 - DNA, 30 bp, Artificial Sequence
  Synthetic oligonucleotide
taggttgtcgtaaagacctaagtgaaaacg

SEQ ID NO: 28368 - DNA, 30 bp, Artificial Sequence
  Synthetic oligonucleotide
catgcaacaggctccagtcgagggcaaacg

SEQ ID NO: 28369 - DNA, 30 bp, Artificial Sequence
  Synthetic oligonucleotide
ggttcacggctaaacgcgaaagaagaaacg

SEQ ID NO: 28370 - DNA, 30 bp, Artificial Sequence
  Synthetic oligonucleotide
gtcgtgggccgaccatgccagaaataaacg

SEQ ID NO: 28371 - DNA, 30 bp, Artificial Sequence
  Synthetic oligonucleotide
caagtcaagaagcaggcgggtcacacaacg

SEQ ID NO: 28372 - DNA, 30 bp, Artificial Sequence
  Synthetic oligonucleotide
cagggcgaatagaacagtaccagtacaacg

SEQ ID NO: 28373 - DNA, 30 bp, Artificial Sequence
  Synthetic oligonucleotide
gcaagcttgaaggctcaacgactcagaacg

SEQ ID NO: 28374 - DNA, 30 bp, Artificial Sequence
  Synthetic oligonucleotide
tcgtatgtgccaacagatggttcccgaacg

SEQ ID NO: 28375 - DNA, 30 bp, Artificial Sequence
  Synthetic oligonucleotide
catacggcaaaaacaaatggtgggggaacg

SEQ ID NO: 28376 - DNA, 30 bp, Artificial Sequence
  Synthetic oligonucleotide
tccaaacggtgcaaagcagtgcgagtaacg

SEQ ID NO: 28377 - DNA, 30 bp, Artificial Sequence
  Synthetic oligonucleotide
gacttacaggcggataaatagcacaacacg

SEQ ID NO: 28378 - DNA, 30 bp, Artificial Sequence
  Synthetic oligonucleotide
cggctattgagaaccagaattcgcaacacg

SEQ ID NO: 28379 - DNA, 30 bp, Artificial Sequence
  Synthetic oligonucleotide
acacacaatgagctcgagactcggaccacg

SEQ ID NO: 28380 - DNA, 30 bp, Artificial Sequence
  Synthetic oligonucleotide
aaacggcaagagtttggaactcaacccacg

SEQ ID NO: 28381 - DNA, 30 bp, Artificial Sequence
  Synthetic oligonucleotide
ttgatagatacgtcataaggaggagccacg

SEQ ID NO: 28382 - DNA, 30 bp, Artificial Sequence
  Synthetic oligonucleotide
cattaggacaaaggaaaggaaatgagcacg

SEQ ID NO: 28383 - DNA, 30 bp, Artificial Sequence
  Synthetic oligonucleotide
tgttaacgggcgagttatcacgaaatcacg

SEQ ID NO: 28384 - DNA, 30 bp, Artificial Sequence
  Synthetic oligonucleotide
caatcaagacattgaacacctcggatcacg

SEQ ID NO: 28385 - DNA, 30 bp, Artificial Sequence
  Synthetic oligonucleotide
atcagggaactatcacaatagggagcgacg

SEQ ID NO: 28386 - DNA, 30 bp, Artificial Sequence
  Synthetic oligonucleotide
cggaagtcatgttacagagtggcatatacg

SEQ ID NO: 28387 - DNA, 30 bp, Artificial Sequence
  Synthetic oligonucleotide
tggagttacgtcttcaaggaccgccgtacg

SEQ ID NO: 28388 - DNA, 30 bp, Artificial Sequence
  Synthetic oligonucleotide
agggagatgacctactccgagcgtggtacg

SEQ ID NO: 28389 - DNA, 30 bp, Artificial Sequence
  Synthetic oligonucleotide
acgggagggattaatctcaatacgcaaccg

SEQ ID NO: 28390 - DNA, 30 bp, Artificial Sequence
  Synthetic oligonucleotide
taagtgcaagtctcgtaatatctagaaccg

SEQ ID NO: 28391 - DNA, 30 bp, Artificial Sequence
  Synthetic oligonucleotide
gcggagggaggtaaacgcgtggaataaccg

SEQ ID NO: 28392 - DNA, 30 bp, Artificial Sequence
  Synthetic oligonucleotide
ccgaggctcggatttcgacagagaacaccg

SEQ ID NO: 28393 - DNA, 30 bp, Artificial Sequence
  Synthetic oligonucleotide
catgatcgaacggcattcagatcggcaccg

SEQ ID NO: 28394 - DNA, 30 bp, Artificial Sequence
  Synthetic oligonucleotide
ctgcaagcagtgggggagtcgtaccgaccg

SEQ ID NO: 28395 - DNA, 30 bp, Artificial Sequence
  Synthetic oligonucleotide
cataaataagcaagacaacccgaatgaccg

SEQ ID NO: 28396 - DNA, 30 bp, Artificial Sequence
  Synthetic oligonucleotide
ccctgaggtgaatatgcgtattagtgaccg

SEQ ID NO: 28397 - DNA, 30 bp, Artificial Sequence
  Synthetic oligonucleotide
gtgcagaaagaaaccgtacgttacataccg

SEQ ID NO: 28398 - DNA, 30 bp, Artificial Sequence
  Synthetic oligonucleotide
aaagggctcggaagtaaaggttgtaacccg

SEQ ID NO: 28399 - DNA, 30 bp, Artificial Sequence
  Synthetic oligonucleotide
cgataagacatgttcgagaggggtcacccg

SEQ ID NO: 28400 - DNA, 30 bp, Artificial Sequence
  Synthetic oligonucleotide
taatacaagtccgcagagaagcactacccg

SEQ ID NO: 28401 - DNA, 30 bp, Artificial Sequence
  Synthetic oligonucleotide
aagcgaatggatcgtgtctcgacctacccg

SEQ ID NO: 28402 - DNA, 30 bp, Artificial Sequence
  Synthetic oligonucleotide
tggtcgcatagcaaagagtgtcatcccccg

SEQ ID NO: 28403 - DNA, 30 bp, Artificial Sequence
  Synthetic oligonucleotide
aagggcatgacagtagttgtatcaagcccg

SEQ ID NO: 28404 - DNA, 30 bp, Artificial Sequence
  Synthetic oligonucleotide
cgactcatgcaaaaatatacagtgtgcccg

SEQ ID NO: 28405 - DNA, 30 bp, Artificial Sequence
  Synthetic oligonucleotide
ctgggctacaatgaagggtacaggttcccg

SEQ ID NO: 28406 - DNA, 30 bp, Artificial Sequence
  Synthetic oligonucleotide
cgaaaactcttacgtaatgccgaaaagccg

SEQ ID NO: 28407 - DNA, 30 bp, Artificial Sequence
  Synthetic oligonucleotide
agcgaccaaacattcaagagaacccagccg

SEQ ID NO: 28408 - DNA, 30 bp, Artificial Sequence
  Synthetic oligonucleotide
ggctataggcaacgtagaaaaagtacgccg

SEQ ID NO: 28409 - DNA, 30 bp, Artificial Sequence
  Synthetic oligonucleotide
gcaatacactaatcaacgggcgtggtgccg

SEQ ID NO: 28410 - DNA, 30 bp, Artificial Sequence
  Synthetic oligonucleotide
cgtgtacagtgtttgtgaaactgagatccg

SEQ ID NO: 28411 - DNA, 30 bp, Artificial Sequence
  Synthetic oligonucleotide
acacatctaaaaacaatttaaactgatccg

SEQ ID NO: 28412 - DNA, 30 bp, Artificial Sequence
  Synthetic oligonucleotide
cctaaccaggactagttaaaattagctccg

SEQ ID NO: 28413 - DNA, 30 bp, Artificial Sequence
  Synthetic oligonucleotide
tcaggatcgagggaaaatcacacttctccg

SEQ ID NO: 28414 - DNA, 30 bp, Artificial Sequence
  Synthetic oligonucleotide
gggagtcagtatgatacgaaaatgcaagcg

SEQ ID NO: 28415 - DNA, 30 bp, Artificial Sequence
  Synthetic oligonucleotide
tggcttaggtagcggagaataaggtaagcg

SEQ ID NO: 28416 - DNA, 30 bp, Artificial Sequence
  Synthetic oligonucleotide
taacaactgcactagattggctggtaagcg

SEQ ID NO: 28417 - DNA, 30 bp, Artificial Sequence
  Synthetic oligonucleotide
taggtcactcgcaggcaaggagcaacagcg

SEQ ID NO: 28418 - DNA, 30 bp, Artificial Sequence
  Synthetic oligonucleotide
tacgcagaaggaaggatcggacacccagcg

SEQ ID NO: 28419 - DNA, 30 bp, Artificial Sequence
  Synthetic oligonucleotide
actccctcaagaccaattacagcgagagcg

SEQ ID NO: 28420 - DNA, 30 bp, Artificial Sequence
  Synthetic oligonucleotide
gcggggtgggaggaagcaatagggagagcg

SEQ ID NO: 28421 - DNA, 30 bp, Artificial Sequence
  Synthetic oligonucleotide
cataaggagtcgcaagatgtggggtgagcg

SEQ ID NO: 28422 - DNA, 30 bp, Artificial Sequence
  Synthetic oligonucleotide
acggtccccgtttaaacaacccccatagcg

SEQ ID NO: 28423 - DNA, 30 bp, Artificial Sequence
  Synthetic oligonucleotide
aggcttacaagccgtcctagcgtgttagcg

SEQ ID NO: 28424 - DNA, 30 bp, Artificial Sequence
  Synthetic oligonucleotide
tgcccaggaaacaaatatatgagggccgcg

SEQ ID NO: 28425 - DNA, 30 bp, Artificial Sequence
  Synthetic oligonucleotide
cgtgcgcctaactgctagaactggtgcgcg

SEQ ID NO: 28426 - DNA, 30 bp, Artificial Sequence
  Synthetic oligonucleotide
ggtgcgaagtgtgaaagtgatacgttcgcg

SEQ ID NO: 28427 - DNA, 30 bp, Artificial Sequence
  Synthetic oligonucleotide
catcgtgcgcacaagatggatcataaggcg

SEQ ID NO: 28428 - DNA, 30 bp, Artificial Sequence
  Synthetic oligonucleotide
aagtggcgagaagaattcataaaagaggcg

SEQ ID NO: 28429 - DNA, 30 bp, Artificial Sequence
  Synthetic oligonucleotide
actgagatgtcctgtgaaaagccggaggcg

SEQ ID NO: 28430 - DNA, 30 bp, Artificial Sequence
  Synthetic oligonucleotide
caaggtaaaaatgagtatcgtacgtaggcg

SEQ ID NO: 28431 - DNA, 30 bp, Artificial Sequence
  Synthetic oligonucleotide
agggacgaaagtgtaaccgaaacgacggcg

SEQ ID NO: 28432 - DNA, 30 bp, Artificial Sequence
  Synthetic oligonucleotide
aagattgggacataaagcaaaataagggcg

SEQ ID NO: 28433 - DNA, 30 bp, Artificial Sequence
  Synthetic oligonucleotide
aaatactagaaagctgaccaagatcgggcg

SEQ ID NO: 28434 - DNA, 30 bp, Artificial Sequence
  Synthetic oligonucleotide
cacaattgattaagacaaggtcgcgtggcg

SEQ ID NO: 28435 - DNA, 30 bp, Artificial Sequence
  Synthetic oligonucleotide
agggaatcgtttacattgaactgccatgcg

SEQ ID NO: 28436 - DNA, 30 bp, Artificial Sequence
  Synthetic oligonucleotide
cgtcggaaagaggctgtggggctaactgcg

SEQ ID NO: 28437 - DNA, 30 bp, Artificial Sequence
  Synthetic oligonucleotide
agcaagcagacttcgctgaatcccggtgcg

SEQ ID NO: 28438 - DNA, 30 bp, Artificial Sequence
  Synthetic oligonucleotide
gtgtatgggggctatgcttagcagggtgcg

SEQ ID NO: 28439 - DNA, 30 bp, Artificial Sequence
  Synthetic oligonucleotide
gtatggtgcaatggatggcgagtgattgcg

SEQ ID NO: 28440 - DNA, 30 bp, Artificial Sequence
  Synthetic oligonucleotide
tcaagggcactctgaatcggccaacttgcg

SEQ ID NO: 28441 - DNA, 30 bp, Artificial Sequence
  Synthetic oligonucleotide
atagctcaggcatctagaccttgaccatcg

SEQ ID NO: 28442 - DNA, 30 bp, Artificial Sequence
  Synthetic oligonucleotide
tgcgagcgcttaatcggatcgaacccatcg

SEQ ID NO: 28443 - DNA, 30 bp, Artificial Sequence
  Synthetic oligonucleotide
caaacgcataaaaaaaacggaagtccatcg

SEQ ID NO: 28444 - DNA, 30 bp, Artificial Sequence
  Synthetic oligonucleotide
aggtatgcagtcatactggttcttccatcg

SEQ ID NO: 28445 - DNA, 30 bp, Artificial Sequence
  Synthetic oligonucleotide
gcgtgtatttcataagcaggctcgagatcg

SEQ ID NO: 28446 - DNA, 30 bp, Artificial Sequence
  Synthetic oligonucleotide
ttagcggaaaaattgaaggcatagcgatcg

SEQ ID NO: 28447 - DNA, 30 bp, Artificial Sequence
  Synthetic oligonucleotide
cataaaggaagtcgtttcgtcgatggatcg

SEQ ID NO: 28448 - DNA, 30 bp, Artificial Sequence
  Synthetic oligonucleotide
agcggtcatcataccctatcacctggatcg

SEQ ID NO: 28449 - DNA, 30 bp, Artificial Sequence
  Synthetic oligonucleotide
caataaacgttagcccaattgaccatatcg

SEQ ID NO: 28450 - DNA, 30 bp, Artificial Sequence
  Synthetic oligonucleotide
acgtgttcgaggtcagttatgcggatatcg

SEQ ID NO: 28451 - DNA, 31 bp, Artificial Sequence
  Synthetic oligonucleotide
cgtacacggcacaatgtcttaggccaactcg

SEQ ID NO: 28452 - DNA, 30 bp, Artificial Sequence
  Synthetic oligonucleotide
atgggatacttcactcgtaaacataactcg

SEQ ID NO: 28453 - DNA, 30 bp, Artificial Sequence
  Synthetic oligonucleotide
tacgtgcaaggagtatccgatgaccactcg

SEQ ID NO: 28454 - DNA, 30 bp, Artificial Sequence
  Synthetic oligonucleotide
ccaggccaatcacctaaagaaatatcctcg

SEQ ID NO: 28455 - DNA, 30 bp, Artificial Sequence
  Synthetic oligonucleotide
taaccggaacatacactctaggcaatctcg

SEQ ID NO: 28456 - DNA, 30 bp, Artificial Sequence
  Synthetic oligonucleotide
tgggagaatagtatgatcgttggtctctcg

SEQ ID NO: 28457 - DNA, 30 bp, Artificial Sequence
  Synthetic oligonucleotide
cggtagcggaccggaacaatacatgtctcg

SEQ ID NO: 28458 - DNA, 30 bp, Artificial Sequence
  Synthetic oligonucleotide
tgcaactggagccctgttaaaggcaagtcg

SEQ ID NO: 28459 - DNA, 30 bp, Artificial Sequence
  Synthetic oligonucleotide
cgggagcttgccctcgctctaagtcagtcg

SEQ ID NO: 28460 - DNA, 30 bp, Artificial Sequence
  Synthetic oligonucleotide
tctcaccgaggatcagggaagcatccgtcg

SEQ ID NO: 28461 - DNA, 30 bp, Artificial Sequence
  Synthetic oligonucleotide
gacaagagagcgaaagtaaaaaacgcgtcg

SEQ ID NO: 28462 - DNA, 30 bp, Artificial Sequence
  Synthetic oligonucleotide
aggccattccggaacgaagtcgggtcgtcg

SEQ ID NO: 28463 - DNA, 30 bp, Artificial Sequence
  Synthetic oligonucleotide
taagggaaaagcgaatgtcttacgaattcg

SEQ ID NO: 28464 - DNA, 30 bp, Artificial Sequence
  Synthetic oligonucleotide
cgtgcgctgagattggtaattgtgagttcg

SEQ ID NO: 28465 - DNA, 30 bp, Artificial Sequence
  Synthetic oligonucleotide
cgggagccggtaggaaagtgatcatgttcg

SEQ ID NO: 28466 - DNA, 30 bp, Artificial Sequence
  Synthetic oligonucleotide
agctactcaaacaacacaatagaggtttcg

SEQ ID NO: 28467 - DNA, 30 bp, Artificial Sequence
  Synthetic oligonucleotide
ccaggagcagttagttcaatgtgctaaagg

SEQ ID NO: 28468 - DNA, 30 bp, Artificial Sequence
  Synthetic oligonucleotide
tacagggagttgaggtccatagagacaagg

SEQ ID NO: 28469 - DNA, 30 bp, Artificial Sequence
  Synthetic oligonucleotide
cggacggaagtattcgagaacggcgcaagg

SEQ ID NO: 28470 - DNA, 30 bp, Artificial Sequence
  Synthetic oligonucleotide
tggcaagtattaattatgtaatgaggaagg

SEQ ID NO: 28471 - DNA, 30 bp, Artificial Sequence
  Synthetic oligonucleotide
atgtcacaacgcgatctgcttccaataagg

SEQ ID NO: 28472 - DNA, 30 bp, Artificial Sequence
  Synthetic oligonucleotide
caacggggtctcaagcttaagtgtctaagg

SEQ ID NO: 28473 - DNA, 30 bp, Artificial Sequence
  Synthetic oligonucleotide
tactaaggcccaggcgacattcgcgtaagg

SEQ ID NO: 28474 - DNA, 30 bp, Artificial Sequence
  Synthetic oligonucleotide
tcaatacgtcgccggacagtcgaggtaagg

SEQ ID NO: 28475 - DNA, 30 bp, Artificial Sequence
  Synthetic oligonucleotide
tcaaggcgatgattggggtaggctaacagg

SEQ ID NO: 28476 - DNA, 30 bp, Artificial Sequence
  Synthetic oligonucleotide
tggcaagagttcggccataaggatcacagg

SEQ ID NO: 28477 - DNA, 30 bp, Artificial Sequence
  Synthetic oligonucleotide
ggtaaacagtcgcgacccgacatcgacagg

SEQ ID NO: 28478 - DNA, 30 bp, Artificial Sequence
  Synthetic oligonucleotide
gcggacaggtaaatgaaaatagactacagg

SEQ ID NO: 28479 - DNA, 30 bp, Artificial Sequence
  Synthetic oligonucleotide
agtagtcagtttacagaccaagggtacagg

SEQ ID NO: 28480 - DNA, 30 bp, Artificial Sequence
  Synthetic oligonucleotide
gcggaggaggttaaggaattgcaggccagg

SEQ ID NO: 28481 - DNA, 30 bp, Artificial Sequence
  Synthetic oligonucleotide
ggagacaagggaccagcaagtatgtccagg

SEQ ID NO: 28482 - DNA, 30 bp, Artificial Sequence
  Synthetic oligonucleotide
cgatacatgccagggattgaaatgcgcagg

SEQ ID NO: 28483 - DNA, 30 bp, Artificial Sequence
  Synthetic oligonucleotide
acttatcggcgaacggttcacgtaatcagg

SEQ ID NO: 28484 - DNA, 30 bp, Artificial Sequence
  Synthetic oligonucleotide
agtctcgcaagagtagggtaaacgatcagg

SEQ ID NO: 28485 - DNA, 30 bp, Artificial Sequence
  Synthetic oligonucleotide
actgggcatcagggcgtgagttcattcagg

SEQ ID NO: 28486 - DNA, 30 bp, Artificial Sequence
  Synthetic oligonucleotide
gttgccgaggcggggaaagcattgttcagg

SEQ ID NO: 28487 - DNA, 30 bp, Artificial Sequence
  Synthetic oligonucleotide
atcccaggtcagggaatttcatgccagagg

SEQ ID NO: 28488 - DNA, 30 bp, Artificial Sequence
  Synthetic oligonucleotide
ccataagatagtcgtggaggtccatagagg

SEQ ID NO: 28489 - DNA, 30 bp, Artificial Sequence
  Synthetic oligonucleotide
atgtacatctcaaccaaatatcgtacgagg

SEQ ID NO: 28490 - DNA, 30 bp, Artificial Sequence
  Synthetic oligonucleotide
tcgagctcaatcggaagaagcggggcgagg

SEQ ID NO: 28491 - DNA, 30 bp, Artificial Sequence
  Synthetic oligonucleotide
gtagccggggagaacctaaaaccatcgagg

SEQ ID NO: 28492 - DNA, 30 bp, Artificial Sequence
  Synthetic oligonucleotide
caagattgaacatcagcaatcacctcgagg

SEQ ID NO: 28493 - DNA, 30 bp, Artificial Sequence
  Synthetic oligonucleotide
cgcccgctacggcacagaacaatggggagg

SEQ ID NO: 28494 - DNA, 30 bp, Artificial Sequence
  Synthetic oligonucleotide
tcggacctaacgtaggtgttaccgtggagg

SEQ ID NO: 28495 - DNA, 30 bp, Artificial Sequence
  Synthetic oligonucleotide
ggcactagtaggtcgaccgtaagtctgagg

SEQ ID NO: 28496 - DNA, 30 bp, Artificial Sequence
  Synthetic oligonucleotide
ccaaggtctaacattcgggacggattgagg

SEQ ID NO: 28497 - DNA, 30 bp, Artificial Sequence
  Synthetic oligonucleotide
gtcaaaagtgtactaaatagtgcaaatagg

SEQ ID NO: 28498 - DNA, 30 bp, Artificial Sequence
  Synthetic oligonucleotide
aatcggcaagtatggtaaccatcgcatagg

SEQ ID NO: 28499 - DNA, 30 bp, Artificial Sequence
  Synthetic oligonucleotide
tcaacgagagtgttgagtagcaacactagg

SEQ ID NO: 28500 - DNA, 30 bp, Artificial Sequence
  Synthetic oligonucleotide
agggcagaacggacgtgtaatatgcaacgg

SEQ ID NO: 28501 - DNA, 30 bp, Artificial Sequence
  Synthetic oligonucleotide
agggtaacgagtggatctgacgaaacacgg

SEQ ID NO: 28502 - DNA, 30 bp, Artificial Sequence
  Synthetic oligonucleotide
gatgtaacaagagtataaaggtcagcacgg

SEQ ID NO: 28503 - DNA, 30 bp, Artificial Sequence
  Synthetic oligonucleotide
aggaaagagctagctctgatgttgaaccgg

SEQ ID NO: 28504 - DNA, 30 bp, Artificial Sequence
  Synthetic oligonucleotide
acgtcttcgagtgcgacatcaaaactccgg

SEQ ID NO: 28505 - DNA, 30 bp, Artificial Sequence
  Synthetic oligonucleotide
aagaatcagcaagagcgtcaataagtccgg

SEQ ID NO: 28506 - DNA, 30 bp, Artificial Sequence
  Synthetic oligonucleotide
accaccagatcgtataggactaataagcgg

SEQ ID NO: 28507 - DNA, 30 bp, Artificial Sequence
  Synthetic oligonucleotide
ggcaggagatgacgtctgcattcagagcgg

SEQ ID NO: 28508 - DNA, 30 bp, Artificial Sequence
  Synthetic oligonucleotide
cattactaataagccgagcaggatgagcgg

SEQ ID NO: 28509 - DNA, 30 bp, Artificial Sequence
  Synthetic oligonucleotide
aagggtagtcggagaagatccgtaacgcgg

SEQ ID NO: 28510 - DNA, 30 bp, Artificial Sequence
  Synthetic oligonucleotide
ggtgcgagggtctgctgaaaatactggcgg

SEQ ID NO: 28511 - DNA, 30 bp, Artificial Sequence
  Synthetic oligonucleotide
agcgaaacggcgcgacaattagtgtggcgg

SEQ ID NO: 28512 - DNA, 30 bp, Artificial Sequence
  Synthetic oligonucleotide
cctgtaccaactgcgatatagcgggtgcgg

SEQ ID NO: 28513 - DNA, 30 bp, Artificial Sequence
  Synthetic oligonucleotide
caagcggattacaaatgctaatgatctcgg

SEQ ID NO: 28514 - DNA, 30 bp, Artificial Sequence
  Synthetic oligonucleotide
cgccgcaaggatcaacgtcacaatggtcgg

SEQ ID NO: 28515 - DNA, 31 bp, Artificial Sequence
  Synthetic oligonucleotide
ctaaactactagcctacggaagggaaaaggg

SEQ ID NO: 28516 - DNA, 30 bp, Artificial Sequence
  Synthetic oligonucleotide
aggatgatcataaggagagatactaaaggg

SEQ ID NO: 28517 - DNA, 30 bp, Artificial Sequence
  Synthetic oligonucleotide
caatcagcagaggtatgcaaacaacaaggg

SEQ ID NO: 28518 - DNA, 30 bp, Artificial Sequence
  Synthetic oligonucleotide
agcgaacatagatacaggtgctaacaaggg

SEQ ID NO: 28519 - DNA, 30 bp, Artificial Sequence
  Synthetic oligonucleotide
gcgggtattgcccaagctcggaggtaaggg

SEQ ID NO: 28520 - DNA, 30 bp, Artificial Sequence
  Synthetic oligonucleotide
tatcccgaagacggaatatgcgcaacaggg

SEQ ID NO: 28521 - DNA, 30 bp, Artificial Sequence
  Synthetic oligonucleotide
cgaatatggaaaattttggtgctcacaggg

SEQ ID NO: 28522 - DNA, 30 bp, Artificial Sequence
  Synthetic oligonucleotide
atgcttaatgagggtcctaaccctacaggg

SEQ ID NO: 28523 - DNA, 30 bp, Artificial Sequence
  Synthetic oligonucleotide
ctgttcacgccggactcataagaaccaggg

SEQ ID NO: 28524 - DNA, 30 bp, Artificial Sequence
  Synthetic oligonucleotide
tgcgacgagacttatgagatcacaccaggg

SEQ ID NO: 28525 - DNA, 30 bp, Artificial Sequence
  Synthetic oligonucleotide
ccgaggcggcgggaaacaaggagatcaggg

SEQ ID NO: 28526 - DNA, 30 bp, Artificial Sequence
  Synthetic oligonucleotide
agtgtagcgctgcataaggcattgtgaggg

SEQ ID NO: 28527 - DNA, 30 bp, Artificial Sequence
  Synthetic oligonucleotide
aggagcgtgcatactaccgtcttcataggg

SEQ ID NO: 28528 - DNA, 30 bp, Artificial Sequence
  Synthetic oligonucleotide
gtaatacaagattattgagcatgcctaggg

SEQ ID NO: 28529 - DNA, 31 bp, Artificial Sequence
  Synthetic oligonucleotide
atgcgtagaaccccggaaaactgaagtaggg

SEQ ID NO: 28530 - DNA, 30 bp, Artificial Sequence
  Synthetic oligonucleotide
cctgaccaatgatgaggtaaaggcgtaggg

SEQ ID NO: 28531 - DNA, 30 bp, Artificial Sequence
  Synthetic oligonucleotide
agagttcaattacagtgaccagaggacggg

SEQ ID NO: 28532 - DNA, 30 bp, Artificial Sequence
  Synthetic oligonucleotide
acccgaccaagagcatgcagtcaatacggg

SEQ ID NO: 28533 - DNA, 30 bp, Artificial Sequence
  Synthetic oligonucleotide
cgacggaggttaaggtccagaacctacggg

SEQ ID NO: 28534 - DNA, 30 bp, Artificial Sequence
  Synthetic oligonucleotide
gtgaatctaaaagggttcaacgaaatcggg

SEQ ID NO: 28535 - DNA, 30 bp, Artificial Sequence
  Synthetic oligonucleotide
agttcaagggggagcatatcatcaatcggg

SEQ ID NO: 28536 - DNA, 30 bp, Artificial Sequence
  Synthetic oligonucleotide
cgatgacacggaatctcttcataagtcggg

SEQ ID NO: 28537 - DNA, 30 bp, Artificial Sequence
  Synthetic oligonucleotide
tgaggggaaggggatatctgctggttcggg

SEQ ID NO: 28538 - DNA, 30 bp, Artificial Sequence
  Synthetic oligonucleotide
cggtcgggaaacatatagcgttcccagggg

SEQ ID NO: 28539 - DNA, 30 bp, Artificial Sequence
  Synthetic oligonucleotide
tcgtcaggaaattcatatatgtgccagggg

SEQ ID NO: 28540 - DNA, 30 bp, Artificial Sequence
  Synthetic oligonucleotide
agggagccaaggaaacaatcgtagtagggg

SEQ ID NO: 28541 - DNA, 30 bp, Artificial Sequence
  Synthetic oligonucleotide
cggaccatgcattcagcgagtgcgaggggg

SEQ ID NO: 28542 - DNA, 30 bp, Artificial Sequence
  Synthetic oligonucleotide
acgaggttcaaagtaatactgtttcggggg

SEQ ID NO: 28543 - DNA, 30 bp, Artificial Sequence
  Synthetic oligonucleotide
gggcgaggattcgacaacgaaaagatgggg

SEQ ID NO: 28544 - DNA, 30 bp, Artificial Sequence
  Synthetic oligonucleotide
aggataggatgctgaaaatatcagcatggg

SEQ ID NO: 28545 - DNA, 30 bp, Artificial Sequence
  Synthetic oligonucleotide
tcacgaaggatataggagggcattgatggg

SEQ ID NO: 28546 - DNA, 30 bp, Artificial Sequence
  Synthetic oligonucleotide
cagtcatccctagacaccgacataactggg

SEQ ID NO: 28547 - DNA, 30 bp, Artificial Sequence
  Synthetic oligonucleotide
ctgcaatcataaagagaaaatcgccctggg

SEQ ID NO: 28548 - DNA, 30 bp, Artificial Sequence
  Synthetic oligonucleotide
cagaaccgcaggtttttagagggaagtggg

SEQ ID NO: 28549 - DNA, 30 bp, Artificial Sequence
  Synthetic oligonucleotide
caggaaggtaacccgtcttagattagtggg

SEQ ID NO: 28550 - DNA, 30 bp, Artificial Sequence
  Synthetic oligonucleotide
agtcggatagcgggtgagttgagatgtggg

SEQ ID NO: 28551 - DNA, 30 bp, Artificial Sequence
  Synthetic oligonucleotide
catagagggactctcgcgataagataatgg

SEQ ID NO: 28552 - DNA, 30 bp, Artificial Sequence
  Synthetic oligonucleotide
gacgggaaacgcgaaaggagaaactaatgg

SEQ ID NO: 28553 - DNA, 30 bp, Artificial Sequence
  Synthetic oligonucleotide
cgtaaaatgaacacactgcggcatccatgg

SEQ ID NO: 28554 - DNA, 30 bp, Artificial Sequence
  Synthetic oligonucleotide
tagggaggatggtcactgagtccggcatgg

SEQ ID NO: 28555 - DNA, 30 bp, Artificial Sequence
  Synthetic oligonucleotide
cgcgaatagtatatacgtctggcagtatgg

SEQ ID NO: 28556 - DNA, 30 bp, Artificial Sequence
  Synthetic oligonucleotide
cgtaagtgtcctgagcaacagtcgaactgg

SEQ ID NO: 28557 - DNA, 30 bp, Artificial Sequence
  Synthetic oligonucleotide
gcggagcaatacattagcggaagatactgg

SEQ ID NO: 28558 - DNA, 31 bp, Artificial Sequence
  Synthetic oligonucleotide
aaagaaaatatcctgaaggaaatcaccctgg

SEQ ID NO: 28559 - DNA, 30 bp, Artificial Sequence
  Synthetic oligonucleotide
acatagcagatatgcctacactaatcctgg

SEQ ID NO: 28560 - DNA, 30 bp, Artificial Sequence
  Synthetic oligonucleotide
tgaaaggttaggcgacaggcaacaagctgg

SEQ ID NO: 28561 - DNA, 30 bp, Artificial Sequence
  Synthetic oligonucleotide
agtaacgggcacggtagggagtcattctgg

SEQ ID NO: 28562 - DNA, 30 bp, Artificial Sequence
  Synthetic oligonucleotide
caaggactgtataacattcggtgattctgg

SEQ ID NO: 28563 - DNA, 30 bp, Artificial Sequence
  Synthetic oligonucleotide
gctgtacgagaagccattgaaaactagtgg

SEQ ID NO: 28564 - DNA, 30 bp, Artificial Sequence
  Synthetic oligonucleotide
acgttgaggccgaactggggccaaaggtgg

SEQ ID NO: 28565 - DNA, 30 bp, Artificial Sequence
  Synthetic oligonucleotide
agtaaacaatgcgaagaatgccagaggtgg

SEQ ID NO: 28566 - DNA, 30 bp, Artificial Sequence
  Synthetic oligonucleotide
cgagatcactactacatcgtaggctggtgg

SEQ ID NO: 28567 - DNA, 30 bp, Artificial Sequence
  Synthetic oligonucleotide
aggcagaaaagagaggttatgggacattgg

SEQ ID NO: 28568 - DNA, 30 bp, Artificial Sequence
  Synthetic oligonucleotide
accgagaacacacgcttaagtctcgcttgg

SEQ ID NO: 28569 - DNA, 30 bp, Artificial Sequence
  Synthetic oligonucleotide
caaggccgagtccgtggacagtctgcttgg

SEQ ID NO: 28570 - DNA, 30 bp, Artificial Sequence
  Synthetic oligonucleotide
cgagagtcctatggataaagcgaaagttgg

SEQ ID NO: 28571 - DNA, 30 bp, Artificial Sequence
  Synthetic oligonucleotide
cgagacctctaatgcgtaaactgaggttgg

SEQ ID NO: 28572 - DNA, 30 bp, Artificial Sequence
  Synthetic oligonucleotide
ctgtcgtcataggaatccttaaccaaaatg

SEQ ID NO: 28573 - DNA, 30 bp, Artificial Sequence
  Synthetic oligonucleotide
ttcaggggccaccgatagtagacgaaaatg

SEQ ID NO: 28574 - DNA, 30 bp, Artificial Sequence
  Synthetic oligonucleotide
tgagttgagagcacgatggccaatgaaatg

SEQ ID NO: 28575 - DNA, 30 bp, Artificial Sequence
  Synthetic oligonucleotide
tcaatgggacggccaagcgcttcataaatg

SEQ ID NO: 28576 - DNA, 30 bp, Artificial Sequence
  Synthetic oligonucleotide
cgtcacgttggtgtgggtatgaattaaatg

SEQ ID NO: 28577 - DNA, 30 bp, Artificial Sequence
  Synthetic oligonucleotide
aaggacgttggataattagcagtcacaatg

SEQ ID NO: 28578 - DNA, 30 bp, Artificial Sequence
  Synthetic oligonucleotide
acaactccagtaaaaggtacatcgacaatg

SEQ ID NO: 28579 - DNA, 30 bp, Artificial Sequence
  Synthetic oligonucleotide
actggtgtcggagattgataagcgccaatg

SEQ ID NO: 28580 - DNA, 30 bp, Artificial Sequence
  Synthetic oligonucleotide
gcaagcaatgctaaccagtagcaagcaatg

SEQ ID NO: 28581 - DNA, 30 bp, Artificial Sequence
  Synthetic oligonucleotide
gggcagtatccatggtggaaaactgcaatg

SEQ ID NO: 28582 - DNA, 30 bp, Artificial Sequence
  Synthetic oligonucleotide
ctgatctaatctagaagctgaagaagaatg

SEQ ID NO: 28583 - DNA, 30 bp, Artificial Sequence
  Synthetic oligonucleotide
cccaggcgggtcagctataaataacgaatg

SEQ ID NO: 28584 - DNA, 30 bp, Artificial Sequence
  Synthetic oligonucleotide
gaacgccccggcggtaaagcgtcacgaatg

SEQ ID NO: 28585 - DNA, 30 bp, Artificial Sequence
  Synthetic oligonucleotide
agtgtaacgaaacaacattgttaaggaatg

SEQ ID NO: 28586 - DNA, 30 bp, Artificial Sequence
  Synthetic oligonucleotide
gtgcgagcggagggggagtggttcataatg

SEQ ID NO: 28587 - DNA, 30 bp, Artificial Sequence
  Synthetic oligonucleotide
aggcgtactgacttacaattcggtataatg

SEQ ID NO: 28588 - DNA, 30 bp, Artificial Sequence
  Synthetic oligonucleotide
cgttagtggtagtcattgggggaactaatg

SEQ ID NO: 28589 - DNA, 30 bp, Artificial Sequence
  Synthetic oligonucleotide
gggttagtaaagcgtagagggatactaatg

SEQ ID NO: 28590 - DNA, 30 bp, Artificial Sequence
  Synthetic oligonucleotide
cagaggtgcgtaggctcgacggccttaatg

SEQ ID NO: 28591 - DNA, 30 bp, Artificial Sequence
  Synthetic oligonucleotide
tgagtaggatttatgagacttagaaacatg

SEQ ID NO: 28592 - DNA, 30 bp, Artificial Sequence
  Synthetic oligonucleotide
cagatgcgaacctgatgaatcaaacacatg

SEQ ID NO: 28593 - DNA, 39 bp, Artificial Sequence
  Synthetic oligonucleotide
atacccaacatgaccgccgaacgatacgttctgcccatg

SEQ ID NO: 28594 - DNA, 30 bp, Artificial Sequence
  Synthetic oligonucleotide
ccagacttagtcagtgggatcgtaggcatg

SEQ ID NO: 28595 - DNA, 30 bp, Artificial Sequence
  Synthetic oligonucleotide
acaatccaggtgaacaggaaggggtgcatg

SEQ ID NO: 28596 - DNA, 30 bp, Artificial Sequence
  Synthetic oligonucleotide
acgtgagcgctcattagttagaagaagatg

SEQ ID NO: 28597 - DNA, 30 bp, Artificial Sequence
  Synthetic oligonucleotide
ggctacgctcgggggaagtgaccacagatg

SEQ ID NO: 28598 - DNA, 30 bp, Artificial Sequence
  Synthetic oligonucleotide
tatcgtgctccaagaaagaattagtcgatg

SEQ ID NO: 28599 - DNA, 30 bp, Artificial Sequence
  Synthetic oligonucleotide
gtcactggcattacatcgacaaaaaggatg

SEQ ID NO: 28600 - DNA, 30 bp, Artificial Sequence
  Synthetic oligonucleotide
taagagaactcccactcatccgtagggatg

SEQ ID NO: 28601 - DNA, 30 bp, Artificial Sequence
  Synthetic oligonucleotide
agtccggaacgaagtttgcaccactggatg

SEQ ID NO: 28602 - DNA, 30 bp, Artificial Sequence
  Synthetic oligonucleotide
ctaggataagaagtcactaatcacatgatg

SEQ ID NO: 28603 - DNA, 30 bp, Artificial Sequence
  Synthetic oligonucleotide
agtaagctaggctagggttgtaggctgatg

SEQ ID NO: 28604 - DNA, 30 bp, Artificial Sequence
  Synthetic oligonucleotide
agggggaacatggcgaagtgaacaaatatg

SEQ ID NO: 28605 - DNA, 30 bp, Artificial Sequence
  Synthetic oligonucleotide
aacacaacgggcgtagctaagagaaatatg

SEQ ID NO: 28606 - DNA, 30 bp, Artificial Sequence
  Synthetic oligonucleotide
ggtaatggacaagtcggcgagacacatatg

SEQ ID NO: 28607 - DNA, 30 bp, Artificial Sequence
  Synthetic oligonucleotide
aggcgcaagaaggtcgaagatgtccatatg

SEQ ID NO: 28608 - DNA, 30 bp, Artificial Sequence
  Synthetic oligonucleotide
cacccctaaacacatgtaagcaaggatatg

SEQ ID NO: 28609 - DNA, 30 bp, Artificial Sequence
  Synthetic oligonucleotide
tgggcgaaatcaagagctgggaagtatatg

SEQ ID NO: 28610 - DNA, 30 bp, Artificial Sequence
  Synthetic oligonucleotide
aagggctggccatgcatcatctctgctatg

SEQ ID NO: 28611 - DNA, 30 bp, Artificial Sequence
  Synthetic oligonucleotide
gcagagatagtgaaggccttgaaaggtatg

SEQ ID NO: 28612 - DNA, 30 bp, Artificial Sequence
  Synthetic oligonucleotide
aggtcaagagcacatcggggtaggtgtatg

SEQ ID NO: 28613 - DNA, 30 bp, Artificial Sequence
  Synthetic oligonucleotide
aggaactacagaaaagacccaaacattatg

SEQ ID NO: 28614 - DNA, 30 bp, Artificial Sequence
  Synthetic oligonucleotide
agactggcagtggagcagggggtcgttatg

SEQ ID NO: 28615 - DNA, 30 bp, Artificial Sequence
  Synthetic oligonucleotide
aaggcagcaatcggtgaaggcgagtaactg

SEQ ID NO: 28616 - DNA, 30 bp, Artificial Sequence
  Synthetic oligonucleotide
catggaactcaggggtacccagaatcactg

SEQ ID NO: 28617 - DNA, 30 bp, Artificial Sequence
  Synthetic oligonucleotide
gtgagagagcttgggcttcacaatagactg

SEQ ID NO: 28618 - DNA, 30 bp, Artificial Sequence
  Synthetic oligonucleotide
ccaggagcatagatgtcgagtaactgactg

SEQ ID NO: 28619 - DNA, 30 bp, Artificial Sequence
  Synthetic oligonucleotide
ggcatagcgaagaggaatctcccaatactg

SEQ ID NO: 28620 - DNA, 30 bp, Artificial Sequence
  Synthetic oligonucleotide
agcagggataataaatttaagcagatactg

SEQ ID NO: 28621 - DNA, 30 bp, Artificial Sequence
  Synthetic oligonucleotide
gtcggtgggaagcgggggagcaatgccctg

SEQ ID NO: 28622 - DNA, 30 bp, Artificial Sequence
  Synthetic oligonucleotide
cgataaataaggagctaatgagatctcctg

SEQ ID NO: 28623 - DNA, 30 bp, Artificial Sequence
  Synthetic oligonucleotide
cgaaaaaactcaatccaaatctgcgtcctg

SEQ ID NO: 28624 - DNA, 30 bp, Artificial Sequence
  Synthetic oligonucleotide
gcgaaggagcgaattagaacgggttcgctg

SEQ ID NO: 28625 - DNA, 30 bp, Artificial Sequence
  Synthetic oligonucleotide
gcgggtaatagtacatggcacagtaggctg

SEQ ID NO: 28626 - DNA, 30 bp, Artificial Sequence
  Synthetic oligonucleotide
cgacgtaggaaggggtcgggcctaaatctg

SEQ ID NO: 28627 - DNA, 30 bp, Artificial Sequence
  Synthetic oligonucleotide
tagttaaggtggagtccgagaattgctctg

SEQ ID NO: 28628 - DNA, 30 bp, Artificial Sequence
  Synthetic oligonucleotide
agggggagcgatacgacgttgatcagtctg

SEQ ID NO: 28629 - DNA, 30 bp, Artificial Sequence
  Synthetic oligonucleotide
acgcctaggctcataattgggtaaggtctg

SEQ ID NO: 28630 - DNA, 30 bp, Artificial Sequence
  Synthetic oligonucleotide
cgaacggtaactgacaagcgatatggtctg

SEQ ID NO: 28631 - DNA, 30 bp, Artificial Sequence
  Synthetic oligonucleotide
ctactacgagcgtagaaaaaagcccttctg

SEQ ID NO: 28632 - DNA, 30 bp, Artificial Sequence
  Synthetic oligonucleotide
aggtccatcccggtttgccgtggtaaagtg

SEQ ID NO: 28633 - DNA, 30 bp, Artificial Sequence
  Synthetic oligonucleotide
aaggctaatcatgagtggtcatcccaagtg

SEQ ID NO: 28634 - DNA, 30 bp, Artificial Sequence
  Synthetic oligonucleotide
aaggaccgaagacatctaagttcgcaagtg

SEQ ID NO: 28635 - DNA, 30 bp, Artificial Sequence
  Synthetic oligonucleotide
cagaagtaagcgtaatgtcaaggggaagtg

SEQ ID NO: 28636 - DNA, 30 bp, Artificial Sequence
  Synthetic oligonucleotide
taacccagaagttaacgaagtatctaagtg

SEQ ID NO: 28637 - DNA, 30 bp, Artificial Sequence
  Synthetic oligonucleotide
gtcggcagagcgataacgcggggttaagtg

SEQ ID NO: 28638 - DNA, 30 bp, Artificial Sequence
  Synthetic oligonucleotide
aaagagccaccttacgcgatcatcagagtg

SEQ ID NO: 28639 - DNA, 30 bp, Artificial Sequence
  Synthetic oligonucleotide
cgtgtagctccacaaatgacagtgggagtg

SEQ ID NO: 28640 - DNA, 30 bp, Artificial Sequence
  Synthetic oligonucleotide
tcttcagcccatagcttgaatccatgagtg

SEQ ID NO: 28641 - DNA, 30 bp, Artificial Sequence
  Synthetic oligonucleotide
cgcaatccaacagaacccgtgtccatagtg

SEQ ID NO: 28642 - DNA, 30 bp, Artificial Sequence
  Synthetic oligonucleotide
gagagcaagaggatctccattggtgtagtg

SEQ ID NO: 28643 - DNA, 30 bp, Artificial Sequence
  Synthetic oligonucleotide
ggatggcacgctcaaacccggcaattagtg

SEQ ID NO: 28644 - DNA, 30 bp, Artificial Sequence
  Synthetic oligonucleotide
agagcgctttggtacaggaagggcaacgtg

SEQ ID NO: 28645 - DNA, 30 bp, Artificial Sequence
  Synthetic oligonucleotide
cggagtaaggtgacaccggcgacgaacgtg

SEQ ID NO: 28646 - DNA, 30 bp, Artificial Sequence
  Synthetic oligonucleotide
atacacatccaagaaaagtcgttgaacgtg

SEQ ID NO: 28647 - DNA, 30 bp, Artificial Sequence
  Synthetic oligonucleotide
acggcgccaagtcgatcggcatgacacgtg

SEQ ID NO: 28648 - DNA, 30 bp, Artificial Sequence
  Synthetic oligonucleotide
gccagaagcaggcccaagcgcccaaccgtg

SEQ ID NO: 28649 - DNA, 30 bp, Artificial Sequence
  Synthetic oligonucleotide
gtaagtgcgtaaaaatatcggtagaccgtg

SEQ ID NO: 28650 - DNA, 30 bp, Artificial Sequence
  Synthetic oligonucleotide
ggggttagggaatcgtgcgcaatctccgtg

SEQ ID NO: 28651 - DNA, 30 bp, Artificial Sequence
  Synthetic oligonucleotide
aacgcaatgaaactccgaggagcccgcgtg

SEQ ID NO: 28652 - DNA, 30 bp, Artificial Sequence
  Synthetic oligonucleotide
gaaggcctcaaaggagaaatctcgggcgtg

SEQ ID NO: 28653 - DNA, 30 bp, Artificial Sequence
  Synthetic oligonucleotide
taaccaagatacagtgcggctcggatcgtg

SEQ ID NO: 28654 - DNA, 30 bp, Artificial Sequence
  Synthetic oligonucleotide
acgggtcgaatctaatcgatttcactcgtg

SEQ ID NO: 28655 - DNA, 30 bp, Artificial Sequence
  Synthetic oligonucleotide
cattacacactgagacggtgatagctcgtg

SEQ ID NO: 28656 - DNA, 30 bp, Artificial Sequence
  Synthetic oligonucleotide
accaagcgtcgaagagtatgtgagttcgtg

SEQ ID NO: 28657 - DNA, 30 bp, Artificial Sequence
  Synthetic oligonucleotide
cggatattcagactatacaagaatttcgtg

SEQ ID NO: 28658 - DNA, 30 bp, Artificial Sequence
  Synthetic oligonucleotide
atgatcattaggaacaatgagagacaggtg

SEQ ID NO: 28659 - DNA, 30 bp, Artificial Sequence
  Synthetic oligonucleotide
tgagtccggaagaatcgagtgccggaggtg

SEQ ID NO: 28660 - DNA, 30 bp, Artificial Sequence
  Synthetic oligonucleotide
cgtgactgaatgcacacaggaaggagggtg

SEQ ID NO: 28661 - DNA, 30 bp, Artificial Sequence
  Synthetic oligonucleotide
gaggggacatagtgtccgataattagggtg

SEQ ID NO: 28662 - DNA, 30 bp, Artificial Sequence
  Synthetic oligonucleotide
tacggcacgaacacaagttcgaaacgggtg

SEQ ID NO: 28663 - DNA, 30 bp, Artificial Sequence
  Synthetic oligonucleotide
atgcaaaacttgtcaggaacggtaggggtg

SEQ ID NO: 28664 - DNA, 30 bp, Artificial Sequence
  Synthetic oligonucleotide
ggcgagcaatctgctatgaacaagatggtg

SEQ ID NO: 28665 - DNA, 30 bp, Artificial Sequence
  Synthetic oligonucleotide
atgggtgcaaagtactggccagagatggtg

SEQ ID NO: 28666 - DNA, 30 bp, Artificial Sequence
  Synthetic oligonucleotide
tcacggagggttagccagcaacttatggtg

SEQ ID NO: 28667 - DNA, 30 bp, Artificial Sequence
  Synthetic oligonucleotide
cgagtcgatactcagaccgggaatctggtg

SEQ ID NO: 28668 - DNA, 30 bp, Artificial Sequence
  Synthetic oligonucleotide
aagctcataaagaacaaggattcattggtg

SEQ ID NO: 28669 - DNA, 30 bp, Artificial Sequence
  Synthetic oligonucleotide
cgagatacagcgaggttgtgctgaaatgtg

SEQ ID NO: 28670 - DNA, 30 bp, Artificial Sequence
  Synthetic oligonucleotide
gctacgcgggtgagatacaaccagcatgtg

SEQ ID NO: 28671 - DNA, 30 bp, Artificial Sequence
  Synthetic oligonucleotide
agcggaacgtggttaacatgcggatatgtg

SEQ ID NO: 28672 - DNA, 30 bp, Artificial Sequence
  Synthetic oligonucleotide
agaggcagatgcctgttgaatggttatgtg

SEQ ID NO: 28673 - DNA, 30 bp, Artificial Sequence
  Synthetic oligonucleotide
ccacgttcagatacaatcaccgagtctgtg

SEQ ID NO: 28674 - DNA, 30 bp, Artificial Sequence
  Synthetic oligonucleotide
tatcaataggtgcgagtagacagaagtgtg

SEQ ID NO: 28675 - DNA, 30 bp, Artificial Sequence
  Synthetic oligonucleotide
actaggtcacgggtagaaacggactgtgtg

SEQ ID NO: 28676 - DNA, 30 bp, Artificial Sequence
  Synthetic oligonucleotide
cgacgagctgggacaggtataacaaaattg

SEQ ID NO: 28677 - DNA, 30 bp, Artificial Sequence
  Synthetic oligonucleotide
aggcatgtaatggctacacatgtacaattg

SEQ ID NO: 28678 - DNA, 30 bp, Artificial Sequence
  Synthetic oligonucleotide
tatcgcccagatcaagacatggtctaattg

SEQ ID NO: 28679 - DNA, 30 bp, Artificial Sequence
  Synthetic oligonucleotide
cgcaaggccagatcggaatgaaatacattg

SEQ ID NO: 28680 - DNA, 30 bp, Artificial Sequence
  Synthetic oligonucleotide
caataggaaaggtgtcggcgataatcattg

SEQ ID NO: 28681 - DNA, 30 bp, Artificial Sequence
  Synthetic oligonucleotide
cggatcaggtctagaggcacgtgttacttg

SEQ ID NO: 28682 - DNA, 30 bp, Artificial Sequence
  Synthetic oligonucleotide
agcgtagcgatcaggtatgtcccggccttg

SEQ ID NO: 28683 - DNA, 30 bp, Artificial Sequence
  Synthetic oligonucleotide
atagggaacatctctcagcgagtaagcttg

SEQ ID NO: 28684 - DNA, 30 bp, Artificial Sequence
  Synthetic oligonucleotide
tacgaaacgagtatagcaagaaaagtcttg

SEQ ID NO: 28685 - DNA, 30 bp, Artificial Sequence
  Synthetic oligonucleotide
gtacgataccaattgaaacagggagtcttg

SEQ ID NO: 28686 - DNA, 30 bp, Artificial Sequence
  Synthetic oligonucleotide
aagaccgacatattagttcgcgggaagttg

SEQ ID NO: 28687 - DNA, 30 bp, Artificial Sequence
  Synthetic oligonucleotide
tcggtacagcttgtcaaccaccggcagttg

SEQ ID NO: 28688 - DNA, 30 bp, Artificial Sequence
  Synthetic oligonucleotide
aagcctacatacgacgacataagcgagttg

SEQ ID NO: 28689 - DNA, 30 bp, Artificial Sequence
  Synthetic oligonucleotide
gttcagggggctgactataagtaaccgttg

SEQ ID NO: 28690 - DNA, 30 bp, Artificial Sequence
  Synthetic oligonucleotide
tgatgagtggaccttagtacagcaaggttg

SEQ ID NO: 28691 - DNA, 30 bp, Artificial Sequence
  Synthetic oligonucleotide
aaggaatagcaagttgggaagtgccggttg

SEQ ID NO: 28692 - DNA, 30 bp, Artificial Sequence
  Synthetic oligonucleotide
tgactagggagtgttgcaaggaaagggttg

SEQ ID NO: 28693 - DNA, 30 bp, Artificial Sequence
  Synthetic oligonucleotide
gcaaaggttagcggcgaaatacactggttg

SEQ ID NO: 28694 - DNA, 30 bp, Artificial Sequence
  Synthetic oligonucleotide
cgctacggaaggtacgttcagaaaggtttg

SEQ ID NO: 28695 - DNA, 30 bp, Artificial Sequence
  Synthetic oligonucleotide
tgcgctagaagacatcgcgaaaagggtttg

SEQ ID NO: 28696 - DNA, 30 bp, Artificial Sequence
  Synthetic oligonucleotide
acactgctaagcagatagaggtggggtttg

SEQ ID NO: 28697 - DNA, 30 bp, Artificial Sequence
  Synthetic oligonucleotide
cttcacagcgcgaagccagagtacgaaaat

SEQ ID NO: 28698 - DNA, 30 bp, Artificial Sequence
  Synthetic oligonucleotide
acgttcacagagccaaagtgggccacaaat

SEQ ID NO: 28699 - DNA, 30 bp, Artificial Sequence
  Synthetic oligonucleotide
caaggatcctcaataaaagtgagagcaaat

SEQ ID NO: 28700 - DNA, 30 bp, Artificial Sequence
  Synthetic oligonucleotide
aggcaatggtggtggcgggaacagtcaaat

SEQ ID NO: 28701 - DNA, 30 bp, Artificial Sequence
  Synthetic oligonucleotide
gagcaaggatgggtgacatgcttcggaaat

SEQ ID NO: 28702 - DNA, 30 bp, Artificial Sequence
  Synthetic oligonucleotide
ggcaactcgccgggagtaatgcgatgaaat

SEQ ID NO: 28703 - DNA, 30 bp, Artificial Sequence
  Synthetic oligonucleotide
cgacggtgaggtaatcgtgtccggataaat

SEQ ID NO: 28704 - DNA, 30 bp, Artificial Sequence
  Synthetic oligonucleotide
taggtggaggggggcgtgatttgtataaat

SEQ ID NO: 28705 - DNA, 30 bp, Artificial Sequence
  Synthetic oligonucleotide
agtagccaaaggagagggttgccacacaat

SEQ ID NO: 28706 - DNA, 30 bp, Artificial Sequence
  Synthetic oligonucleotide
cacgatcatacggttcaaaatggggacaat

SEQ ID NO: 28707 - DNA, 30 bp, Artificial Sequence
  Synthetic oligonucleotide
agagaagcaagaggttcgatctaagccaat

SEQ ID NO: 28708 - DNA, 30 bp, Artificial Sequence
  Synthetic oligonucleotide
cgtggcgagatgtatgcgtgggggtccaat

SEQ ID NO: 28709 - DNA, 30 bp, Artificial Sequence
  Synthetic oligonucleotide
cactaagacaatagacctgcgaaacgcaat

SEQ ID NO: 28710 - DNA, 30 bp, Artificial Sequence
  Synthetic oligonucleotide
actaagccgtaggaagtattacagcgcaat

SEQ ID NO: 28711 - DNA, 30 bp, Artificial Sequence
  Synthetic oligonucleotide
ctcaattccagagaagcagaccttaagaat

SEQ ID NO: 28712 - DNA, 30 bp, Artificial Sequence
  Synthetic oligonucleotide
ctctacaaaaattccagagaaagacagaat

SEQ ID NO: 28713 - DNA, 30 bp, Artificial Sequence
  Synthetic oligonucleotide
acggttggtaaatcctgacaaggctagaat

SEQ ID NO: 28714 - DNA, 30 bp, Artificial Sequence
  Synthetic oligonucleotide
ggcggcgtaacccaatgacgaaatgcgaat

SEQ ID NO: 28715 - DNA, 31 bp, Artificial Sequence
  Synthetic oligonucleotide
cgggagggagctaaccatgctcaagcggaat

SEQ ID NO: 28716 - DNA, 30 bp, Artificial Sequence
  Synthetic oligonucleotide
aagactaaggccgatgggtatcaactgaat

SEQ ID NO: 28717 - DNA, 30 bp, Artificial Sequence
  Synthetic oligonucleotide
atgcaggtagacaagaatgtgcccagtaat

SEQ ID NO: 28718 - DNA, 30 bp, Artificial Sequence
  Synthetic oligonucleotide
tggagtgaatgcgctgaatcgaataaacat

SEQ ID NO: 28719 - DNA, 30 bp, Artificial Sequence
  Synthetic oligonucleotide
ccgtgtatagcgtaaatgaccaagtaacat

SEQ ID NO: 28720 - DNA, 30 bp, Artificial Sequence
  Synthetic oligonucleotide
ggagagtaagattagcggggcaaaagacat

SEQ ID NO: 28721 - DNA, 30 bp, Artificial Sequence
  Synthetic oligonucleotide
gtcgatgttagacaagagacaacgagacat

SEQ ID NO: 28722 - DNA, 30 bp, Artificial Sequence
  Synthetic oligonucleotide
tcagtgcagtaagtataggaggacggacat

SEQ ID NO: 28723 - DNA, 30 bp, Artificial Sequence
  Synthetic oligonucleotide
cgagaaaaagtactattcggcaagggacat

SEQ ID NO: 28724 - DNA, 30 bp, Artificial Sequence
  Synthetic oligonucleotide
taacaggcgaggattacaaatgaatgacat

SEQ ID NO: 28725 - DNA, 30 bp, Artificial Sequence
  Synthetic oligonucleotide
ccacggtctgtacggcaagatgactaccat

SEQ ID NO: 28726 - DNA, 30 bp, Artificial Sequence
  Synthetic oligonucleotide
caaagcgtggcacctaaactataaccccat

SEQ ID NO: 28727 - DNA, 30 bp, Artificial Sequence
  Synthetic oligonucleotide
cttgcgcgcggagagtagcagagcagccat

SEQ ID NO: 28728 - DNA, 30 bp, Artificial Sequence
  Synthetic oligonucleotide
ggtagagagtgttcaagagcgtgcatccat

SEQ ID NO: 28729 - DNA, 30 bp, Artificial Sequence
  Synthetic oligonucleotide
gcaaggagggtaaaacaatagagcaagcat

SEQ ID NO: 28730 - DNA, 30 bp, Artificial Sequence
  Synthetic oligonucleotide
tcgtctaaacgataaaggttacgaacgcat

SEQ ID NO: 28731 - DNA, 30 bp, Artificial Sequence
  Synthetic oligonucleotide
cgatatcggcggtcatgtaaaaggttgcat

SEQ ID NO: 28732 - DNA, 30 bp, Artificial Sequence
  Synthetic oligonucleotide
aggatccgcagtatctagatagtgactcat

SEQ ID NO: 28733 - DNA, 31 bp, Artificial Sequence
  Synthetic oligonucleotide
cgagcataggactcaagttaacctcgctcat

SEQ ID NO: 28734 - DNA, 30 bp, Artificial Sequence
  Synthetic oligonucleotide
cttggacaaagggtaaaatcctaaagtcat

SEQ ID NO: 28735 - DNA, 30 bp, Artificial Sequence
  Synthetic oligonucleotide
cgaacctggagcgcatgtcggtaatttcat

SEQ ID NO: 28736 - DNA, 30 bp, Artificial Sequence
  Synthetic oligonucleotide
aatgctaggcacaatacaggaggcaaagat

SEQ ID NO: 28737 - DNA, 30 bp, Artificial Sequence
  Synthetic oligonucleotide
tagacggtgttagcgaaggggcgggaagat

SEQ ID NO: 28738 - DNA, 30 bp, Artificial Sequence
  Synthetic oligonucleotide
gtgcactatccgagaatgagaaaataagat

SEQ ID NO: 28739 - DNA, 30 bp, Artificial Sequence
  Synthetic oligonucleotide
aaaagatacctcgcgatgaacaagtaagat

SEQ ID NO: 28740 - DNA, 30 bp, Artificial Sequence
  Synthetic oligonucleotide
cgtcaatacaacggtgtgcgttcaccagat

SEQ ID NO: 28741 - DNA, 30 bp, Artificial Sequence
  Synthetic oligonucleotide
ggctgaccgaaaaggccgatgtgcgcagat

SEQ ID NO: 28742 - DNA, 30 bp, Artificial Sequence
  Synthetic oligonucleotide
cgaattacgcatgatggggataggtcagat

SEQ ID NO: 28743 - DNA, 30 bp, Artificial Sequence
  Synthetic oligonucleotide
cgcggggtcgtatgaaactggccattagat

SEQ ID NO: 28744 - DNA, 30 bp, Artificial Sequence
  Synthetic oligonucleotide
agcatagaaagcatagttggtaaggccgat

SEQ ID NO: 28745 - DNA, 30 bp, Artificial Sequence
  Synthetic oligonucleotide
aaggcaggtagcctaacaatccatgccgat

SEQ ID NO: 28746 - DNA, 30 bp, Artificial Sequence
  Synthetic oligonucleotide
actagcgagaaagcggaatagcagggcgat

SEQ ID NO: 28747 - DNA, 30 bp, Artificial Sequence
  Synthetic oligonucleotide
aataagaacaagtagccaaaatgattcgat

SEQ ID NO: 28748 - DNA, 30 bp, Artificial Sequence
  Synthetic oligonucleotide
taagcgaacgtcaatggtgcgcaacaggat

SEQ ID NO: 28749 - DNA, 30 bp, Artificial Sequence
  Synthetic oligonucleotide
gtaagcgacatgcgcatgatataacaggat

SEQ ID NO: 28750 - DNA, 30 bp, Artificial Sequence
  Synthetic oligonucleotide
aggttgcgacgtgatcactagtgagaggat

SEQ ID NO: 28751 - DNA, 30 bp, Artificial Sequence
  Synthetic oligonucleotide
agaacatgtaaaaaatggacctatccggat

SEQ ID NO: 28752 - DNA, 30 bp, Artificial Sequence
  Synthetic oligonucleotide
gcatgggtacacatcgtgttgagagcggat

SEQ ID NO: 28753 - DNA, 30 bp, Artificial Sequence
  Synthetic oligonucleotide
gatagggacggttaagccgagagaatggat

SEQ ID NO: 28754 - DNA, 30 bp, Artificial Sequence
  Synthetic oligonucleotide
gcgagctcaggcagggaacatttactggat

SEQ ID NO: 28755 - DNA, 30 bp, Artificial Sequence
  Synthetic oligonucleotide
agccaaagctgggcttaagattgaagtgat

SEQ ID NO: 28756 - DNA, 30 bp, Artificial Sequence
  Synthetic oligonucleotide
tggaaactgagttgaaagaccccgattgat

SEQ ID NO: 28757 - DNA, 30 bp, Artificial Sequence
  Synthetic oligonucleotide
taggaaagtggggaaaagattcggcttgat

SEQ ID NO: 28758 - DNA, 30 bp, Artificial Sequence
  Synthetic oligonucleotide
cgacaaaggtatatccaccggccgaaatat

SEQ ID NO: 28759 - DNA, 30 bp, Artificial Sequence
  Synthetic oligonucleotide
tcaggtccggtgtatcgagaacgaagatat

SEQ ID NO: 28760 - DNA, 30 bp, Artificial Sequence
  Synthetic oligonucleotide
cgcaaagaaattgagacaagggaggtatat

SEQ ID NO: 28761 - DNA, 30 bp, Artificial Sequence
  Synthetic oligonucleotide
ggcgatgggcgagttccgtatagcttatat

SEQ ID NO: 28762 - DNA, 30 bp, Artificial Sequence
  Synthetic oligonucleotide
cggaaccagggaagttgggggtgaaactat

SEQ ID NO: 28763 - DNA, 30 bp, Artificial Sequence
  Synthetic oligonucleotide
aaagagttagtagcaacagaagaacgctat

SEQ ID NO: 28764 - DNA, 30 bp, Artificial Sequence
  Synthetic oligonucleotide
ctaggagaagcaaaccaacttcagcgctat

SEQ ID NO: 28765 - DNA, 30 bp, Artificial Sequence
  Synthetic oligonucleotide
gcggggtctggaactaagagcagtcgctat

SEQ ID NO: 28766 - DNA, 30 bp, Artificial Sequence
  Synthetic oligonucleotide
acgacacacggctaaccaccgagtatctat

SEQ ID NO: 28767 - DNA, 30 bp, Artificial Sequence
  Synthetic oligonucleotide
cgtgagcggtacaggggtgacgaaaagtat

SEQ ID NO: 28768 - DNA, 30 bp, Artificial Sequence
  Synthetic oligonucleotide
atcgaaaggcaagaggcgaaatgttagtat

SEQ ID NO: 28769 - DNA, 30 bp, Artificial Sequence
  Synthetic oligonucleotide
aatgcgtggccacaaatgccagacaggtat

SEQ ID NO: 28770 - DNA, 30 bp, Artificial Sequence
  Synthetic oligonucleotide
acagcggaagggggacttcaccagcattat

SEQ ID NO: 28771 - DNA, 30 bp, Artificial Sequence
  Synthetic oligonucleotide
gggtcctgaataggggaagcgaggagttat

SEQ ID NO: 28772 - DNA, 30 bp, Artificial Sequence
  Synthetic oligonucleotide
cacgaaacgtgtatgaggacctaagaaact

SEQ ID NO: 28773 - DNA, 30 bp, Artificial Sequence
  Synthetic oligonucleotide
acgaagttaacacgagatccagggtaaact

SEQ ID NO: 28774 - DNA, 30 bp, Artificial Sequence
  Synthetic oligonucleotide
cgataatcgcctgggataaaaacaagaact

SEQ ID NO: 28775 - DNA, 30 bp, Artificial Sequence
  Synthetic oligonucleotide
agcgacgggtagctcaatacacgattaact

SEQ ID NO: 28776 - DNA, 30 bp, Artificial Sequence
  Synthetic oligonucleotide
ccgagcaagaaacgaaatttgtgtgccact

SEQ ID NO: 28777 - DNA, 30 bp, Artificial Sequence
  Synthetic oligonucleotide
ctaggtgcaattgaaccgaaattcagcact

SEQ ID NO: 28778 - DNA, 30 bp, Artificial Sequence
  Synthetic oligonucleotide
cgacgtccgaagattggtgacatttgcact

SEQ ID NO: 28779 - DNA, 30 bp, Artificial Sequence
  Synthetic oligonucleotide
actgaagagcaacggctcaagtagaagact

SEQ ID NO: 28780 - DNA, 30 bp, Artificial Sequence
  Synthetic oligonucleotide
gcgggtgtgaatatttcgagtgtcacgact

SEQ ID NO: 28781 - DNA, 30 bp, Artificial Sequence
  Synthetic oligonucleotide
ctgcgcgatcgatacagagtaccactgact

SEQ ID NO: 28782 - DNA, 30 bp, Artificial Sequence
  Synthetic oligonucleotide
agcaacatggaataggcttcctgtgtgact

SEQ ID NO: 28783 - DNA, 30 bp, Artificial Sequence
  Synthetic oligonucleotide
aagaaacgccacacacagagaacactacct

SEQ ID NO: 28784 - DNA, 30 bp, Artificial Sequence
  Synthetic oligonucleotide
acgtgtcgtgcccgaagcctgcacctacct

SEQ ID NO: 28785 - DNA, 30 bp, Artificial Sequence
  Synthetic oligonucleotide
cggggagtataagaagatgttcaccggcct

SEQ ID NO: 28786 - DNA, 30 bp, Artificial Sequence
  Synthetic oligonucleotide
agcaaggcagggaggcaacgaaccaaagct

SEQ ID NO: 28787 - DNA, 30 bp, Artificial Sequence
  Synthetic oligonucleotide
ggcggttcgtactcgtcaaaaaaaccagct

SEQ ID NO: 28788 - DNA, 30 bp, Artificial Sequence
  Synthetic oligonucleotide
tccgaaatgcatgccgaacaaaaacgagct

SEQ ID NO: 28789 - DNA, 30 bp, Artificial Sequence
  Synthetic oligonucleotide
tcacgacacacgaggcctgtaatcatagct

SEQ ID NO: 28790 - DNA, 30 bp, Artificial Sequence
  Synthetic oligonucleotide
caagaaatagcgtatatacgaacaagcgct

SEQ ID NO: 28791 - DNA, 30 bp, Artificial Sequence
  Synthetic oligonucleotide
agcaaccaaggaactcacaccatgtgcgct

SEQ ID NO: 28792 - DNA, 30 bp, Artificial Sequence
  Synthetic oligonucleotide
cgacaaccatgggtttagatcgaactcgct

SEQ ID NO: 28793 - DNA, 30 bp, Artificial Sequence
  Synthetic oligonucleotide
taggaggagcatcactcgtgaggccaggct

SEQ ID NO: 28794 - DNA, 30 bp, Artificial Sequence
  Synthetic oligonucleotide
tcgataggatggggaacgtacagctaggct

SEQ ID NO: 28795 - DNA, 30 bp, Artificial Sequence
  Synthetic oligonucleotide
tcctcaggatgctcgctgagtgcaagggct

SEQ ID NO: 28796 - DNA, 30 bp, Artificial Sequence
  Synthetic oligonucleotide
cgtaggcagtgaggcgggacacgaaatgct

SEQ ID NO: 28797 - DNA, 30 bp, Artificial Sequence
  Synthetic oligonucleotide
gcgggacgggaacaggtagccaaacatgct

SEQ ID NO: 28798 - DNA, 30 bp, Artificial Sequence
  Synthetic oligonucleotide
caggaaccggattgagaagtggactatgct

SEQ ID NO: 28799 - DNA, 30 bp, Artificial Sequence
  Synthetic oligonucleotide
tcagtgcgatagcaaacggcgcgccaatct

SEQ ID NO: 28800 - DNA, 30 bp, Artificial Sequence
  Synthetic oligonucleotide
gacaggagacactaaccggctaggtaatct

SEQ ID NO: 28801 - DNA, 30 bp, Artificial Sequence
  Synthetic oligonucleotide
gtgtgcactaagcctcgtgacaaggcatct

SEQ ID NO: 28802 - DNA, 30 bp, Artificial Sequence
  Synthetic oligonucleotide
gaaacggaatgcccgataacgaaacgatct

SEQ ID NO: 28803 - DNA, 30 bp, Artificial Sequence
  Synthetic oligonucleotide
cgtactagaattcgaaacatatcccactct

SEQ ID NO: 28804 - DNA, 30 bp, Artificial Sequence
  Synthetic oligonucleotide
agtcactgattatcgtatatgctaacgtct

SEQ ID NO: 28805 - DNA, 30 bp, Artificial Sequence
  Synthetic oligonucleotide
aaggagaaggtgaacgagctaatgccgtct

SEQ ID NO: 28806 - DNA, 30 bp, Artificial Sequence
  Synthetic oligonucleotide
aggcaaggtagtggagaacaatgtgattct

SEQ ID NO: 28807 - DNA, 30 bp, Artificial Sequence
  Synthetic oligonucleotide
cggcgttgaggttgtgaaggtgtgaaaagt

SEQ ID NO: 28808 - DNA, 30 bp, Artificial Sequence
  Synthetic oligonucleotide
tgagggaaggtgcaattcaagcatgaaagt

SEQ ID NO: 28809 - DNA, 30 bp, Artificial Sequence
  Synthetic oligonucleotide
cggtgcgtaggagcacatcaatcgtcaagt

SEQ ID NO: 28810 - DNA, 30 bp, Artificial Sequence
  Synthetic oligonucleotide
taatgataatattgtagaggggagggaagt

SEQ ID NO: 28811 - DNA, 30 bp, Artificial Sequence
  Synthetic oligonucleotide
ctcgttgtaattttgagggatgtgggaagt

SEQ ID NO: 28812 - DNA, 30 bp, Artificial Sequence
  Synthetic oligonucleotide
gggggatccgacgataagctgactggaagt

SEQ ID NO: 28813 - DNA, 30 bp, Artificial Sequence
  Synthetic oligonucleotide
gaccgaattgattaaaggagcaagtgaagt

SEQ ID NO: 28814 - DNA, 30 bp, Artificial Sequence
  Synthetic oligonucleotide
gtgaaggaagtgaaccatcggtggtgaagt

SEQ ID NO: 28815 - DNA, 30 bp, Artificial Sequence
  Synthetic oligonucleotide
agatacagatgccacacacccgcaataagt

SEQ ID NO: 28816 - DNA, 30 bp, Artificial Sequence
  Synthetic oligonucleotide
cgtaaaaacgaagacctgcaactaataagt

SEQ ID NO: 28817 - DNA, 30 bp, Artificial Sequence
  Synthetic oligonucleotide
ggttaaaggtgacgatggaaacgcgtaagt

SEQ ID NO: 28818 - DNA, 30 bp, Artificial Sequence
  Synthetic oligonucleotide
cgggtcataccgcaacgcgggggaaagagt

SEQ ID NO: 28819 - DNA, 30 bp, Artificial Sequence
  Synthetic oligonucleotide
taaccatcacaatatgcgaacgaacagagt

SEQ ID NO: 28820 - DNA, 30 bp, Artificial Sequence
  Synthetic oligonucleotide
acgactaggcattcagcacgcatcgcgagt

SEQ ID NO: 28821 - DNA, 30 bp, Artificial Sequence
  Synthetic oligonucleotide
gttggacactaatcgtaggatcacaggagt

SEQ ID NO: 28822 - DNA, 30 bp, Artificial Sequence
  Synthetic oligonucleotide
tcggctgcaaatgagcgagagacaatgagt

SEQ ID NO: 28823 - DNA, 30 bp, Artificial Sequence
  Synthetic oligonucleotide
actagagcataaatgcgatacgtcatgagt

SEQ ID NO: 28824 - DNA, 30 bp, Artificial Sequence
  Synthetic oligonucleotide
gcgggggacatagacaataactcgctgagt

SEQ ID NO: 28825 - DNA, 30 bp, Artificial Sequence
  Synthetic oligonucleotide
cgacgtgcaaacgtgcgcgcgggttatagt

SEQ ID NO: 28826 - DNA, 30 bp, Artificial Sequence
  Synthetic oligonucleotide
aggtgcaagatccataactggtgatctagt

SEQ ID NO: 28827 - DNA, 30 bp, Artificial Sequence
  Synthetic oligonucleotide
cgcgttgaaaatggtgatgggctaagtagt

SEQ ID NO: 28828 - DNA, 30 bp, Artificial Sequence
  Synthetic oligonucleotide
ggacgtatcatcggggcgagtgaacgtagt

SEQ ID NO: 28829 - DNA, 30 bp, Artificial Sequence
  Synthetic oligonucleotide
tgtacacgagggcaacaaaattgccgtagt

SEQ ID NO: 28830 - DNA, 30 bp, Artificial Sequence
  Synthetic oligonucleotide
cggggcgatgttaggtacgataacattagt

SEQ ID NO: 28831 - DNA, 30 bp, Artificial Sequence
  Synthetic oligonucleotide
cgggtaatcgcaaagatggtctaatcacgt

SEQ ID NO: 28832 - DNA, 30 bp, Artificial Sequence
  Synthetic oligonucleotide
cgtgaaaatacataacaacagggaagacgt

SEQ ID NO: 28833 - DNA, 30 bp, Artificial Sequence
  Synthetic oligonucleotide
acgccgtgcactagcaagcaccaaatacgt

SEQ ID NO: 28834 - DNA, 30 bp, Artificial Sequence
  Synthetic oligonucleotide
ggccatgtatgaggcaaagaaggacagcgt

SEQ ID NO: 28835 - DNA, 30 bp, Artificial Sequence
  Synthetic oligonucleotide
aacagaagtcatgagggtgcgcatgggcgt

SEQ ID NO: 28836 - DNA, 30 bp, Artificial Sequence
  Synthetic oligonucleotide
cgggagacagttccatggagagctaaaggt

SEQ ID NO: 28837 - DNA, 30 bp, Artificial Sequence
  Synthetic oligonucleotide
accgaacgaaaaaaggcagccaaagaaggt

SEQ ID NO: 28838 - DNA, 30 bp, Artificial Sequence
  Synthetic oligonucleotide
acacaaagagcaaagctggcgaaaccaggt

SEQ ID NO: 28839 - DNA, 30 bp, Artificial Sequence
  Synthetic oligonucleotide
gcaggcaggtagggaacatacttaccaggt

SEQ ID NO: 28840 - DNA, 30 bp, Artificial Sequence
  Synthetic oligonucleotide
tgtagacaaggggggatggggaacccaggt

SEQ ID NO: 28841 - DNA, 30 bp, Artificial Sequence
  Synthetic oligonucleotide
ggaggaggagctgccaaacttcaaggaggt

SEQ ID NO: 28842 - DNA, 30 bp, Artificial Sequence
  Synthetic oligonucleotide
taagggaagccagcactagagggtgtaggt

SEQ ID NO: 28843 - DNA, 30 bp, Artificial Sequence
  Synthetic oligonucleotide
agcacaggaaaggtagacaagttcaacggt

SEQ ID NO: 28844 - DNA, 30 bp, Artificial Sequence
  Synthetic oligonucleotide
aggcagacataaaaatatctcgtatgcggt

SEQ ID NO: 28845 - DNA, 30 bp, Artificial Sequence
  Synthetic oligonucleotide
acgagggaggacagtaatgctcacatcggt

SEQ ID NO: 28846 - DNA, 30 bp, Artificial Sequence
  Synthetic oligonucleotide
cataagccgtccggccagaggtataagggt

SEQ ID NO: 28847 - DNA, 30 bp, Artificial Sequence
  Synthetic oligonucleotide
agctgaaggcgtataaaacactgggagggt

SEQ ID NO: 28848 - DNA, 30 bp, Artificial Sequence
  Synthetic oligonucleotide
aaggagcgtagtagcagcagacttgcgggt

SEQ ID NO: 28849 - DNA, 30 bp, Artificial Sequence
  Synthetic oligonucleotide
gaacactagaagaatgaacagatgtcgggt

SEQ ID NO: 28850 - DNA, 30 bp, Artificial Sequence
  Synthetic oligonucleotide
acggctagtatagacctaaatccttcgggt

SEQ ID NO: 28851 - DNA, 30 bp, Artificial Sequence
  Synthetic oligonucleotide
gtggtcgcgatcagtcatagccgaatgggt

SEQ ID NO: 28852 - DNA, 30 bp, Artificial Sequence
  Synthetic oligonucleotide
acggagaccgaatcagttcacaacgaatgt

SEQ ID NO: 28853 - DNA, 30 bp, Artificial Sequence
  Synthetic oligonucleotide
aggggacgactagccacgaaagccacatgt

SEQ ID NO: 28854 - DNA, 30 bp, Artificial Sequence
  Synthetic oligonucleotide
cctaaaataataagatcgtgagatggatgt

SEQ ID NO: 28855 - DNA, 30 bp, Artificial Sequence
  Synthetic oligonucleotide
agggagaggactagtagctggattcactgt

SEQ ID NO: 28856 - DNA, 30 bp, Artificial Sequence
  Synthetic oligonucleotide
aggttagtgacgaactagtgactcctctgt

SEQ ID NO: 28857 - DNA, 30 bp, Artificial Sequence
  Synthetic oligonucleotide
cgttcaggagtggccgctaaaaatcagtgt

SEQ ID NO: 28858 - DNA, 30 bp, Artificial Sequence
  Synthetic oligonucleotide
aggggcaggcactgaagacaataagagtgt

SEQ ID NO: 28859 - DNA, 30 bp, Artificial Sequence
  Synthetic oligonucleotide
ctagaccataatgtaggtagagctgagtgt

SEQ ID NO: 28860 - DNA, 30 bp, Artificial Sequence
  Synthetic oligonucleotide
ggaggtaatgctagtcaggaatgagggtgt

SEQ ID NO: 28861 - DNA, 30 bp, Artificial Sequence
  Synthetic oligonucleotide
acggcgggagagacgcgttatcaattgtgt

SEQ ID NO: 28862 - DNA, 30 bp, Artificial Sequence
  Synthetic oligonucleotide
cggtaagtgtatgcgaatatatagtcttgt

SEQ ID NO: 28863 - DNA, 30 bp, Artificial Sequence
  Synthetic oligonucleotide
ttacagagaaataggtagcgagtgaaaatt

SEQ ID NO: 28864 - DNA, 30 bp, Artificial Sequence
  Synthetic oligonucleotide
gcgacggggagatagtgagagttataaatt

SEQ ID NO: 28865 - DNA, 30 bp, Artificial Sequence
  Synthetic oligonucleotide
cacatggtcacaggctacctacaaagaatt

SEQ ID NO: 28866 - DNA, 30 bp, Artificial Sequence
  Synthetic oligonucleotide
tacgggaacgtcagaagtgggacacacatt

SEQ ID NO: 28867 - DNA, 30 bp, Artificial Sequence
  Synthetic oligonucleotide
cgacagggcgagtagacgacaaatgacatt

SEQ ID NO: 28868 - DNA, 30 bp, Artificial Sequence
  Synthetic oligonucleotide
acgtgcaatcactagaataactgctacatt

SEQ ID NO: 28869 - DNA, 30 bp, Artificial Sequence
  Synthetic oligonucleotide
acagagtgataaggctgtgattatgccatt

SEQ ID NO: 28870 - DNA, 30 bp, Artificial Sequence
  Synthetic oligonucleotide
agtgaggacgggttgcaaccgaggggcatt

SEQ ID NO: 28871 - DNA, 30 bp, Artificial Sequence
  Synthetic oligonucleotide
cgtacagccggtagaaaggatctgggcatt

SEQ ID NO: 28872 - DNA, 30 bp, Artificial Sequence
  Synthetic oligonucleotide
ggcaagaaagaatagataagaccggcgatt

SEQ ID NO: 28873 - DNA, 30 bp, Artificial Sequence
  Synthetic oligonucleotide
tccttagtggggagtgcccggagtgcgatt

SEQ ID NO: 28874 - DNA, 30 bp, Artificial Sequence
  Synthetic oligonucleotide
gacggaagtaagggcacccacagaaatatt

SEQ ID NO: 28875 - DNA, 30 bp, Artificial Sequence
  Synthetic oligonucleotide
ccgaatcgatgaagaggactcctagatatt

SEQ ID NO: 28876 - DNA, 30 bp, Artificial Sequence
  Synthetic oligonucleotide
taaggaaggacaacagccaaaaagggactt

SEQ ID NO: 28877 - DNA, 30 bp, Artificial Sequence
  Synthetic oligonucleotide
gtccgaaggacagtaacaagaacagggctt

SEQ ID NO: 28878 - DNA, 30 bp, Artificial Sequence
  Synthetic oligonucleotide
acgttgcgcacgttgtaaaacaaaatgctt

SEQ ID NO: 28879 - DNA, 30 bp, Artificial Sequence
  Synthetic oligonucleotide
taacacacgggacgggtgcgtagtcaagtt

SEQ ID NO: 28880 - DNA, 30 bp, Artificial Sequence
  Synthetic oligonucleotide
caacgggctcacgcagggaagcaagcagtt

SEQ ID NO: 28881 - DNA, 30 bp, Artificial Sequence
  Synthetic oligonucleotide
gcagcagagggcgtgcacatctggatagtt

SEQ ID NO: 28882 - DNA, 30 bp, Artificial Sequence
  Synthetic oligonucleotide
ggggaccgacagaagagacaatcggtagtt

SEQ ID NO: 28883 - DNA, 30 bp, Artificial Sequence
  Synthetic oligonucleotide
acgaaattagagccgagacaaggaatcgtt

SEQ ID NO: 28884 - DNA, 30 bp, Artificial Sequence
  Synthetic oligonucleotide
ctcaagggtctcaagaggagtgtcgaggtt

SEQ ID NO: 28885 - DNA, 30 bp, Artificial Sequence
  Synthetic oligonucleotide
gggagaagcgacagtccagcaagaacggtt

SEQ ID NO: 28886 - DNA, 30 bp, Artificial Sequence
  Synthetic oligonucleotide
agggtaggaaaaaacatactaattagggtt

SEQ ID NO: 28887 - DNA, 30 bp, Artificial Sequence
  Synthetic oligonucleotide
cggatcccacagtgtacataaaacatggtt

SEQ ID NO: 28888 - DNA, 30 bp, Artificial Sequence
  Synthetic oligonucleotide
tccgaatgagagagtaaggagtgatatgtt

SEQ ID NO: 28889 - DNA, 30 bp, Artificial Sequence
  Synthetic oligonucleotide
tcgtatgcctacggtcgagaagagagtgtt

SEQ ID NO: 28890 - DNA, 30 bp, Artificial Sequence
  Synthetic oligonucleotide
aggggtgggcaatatagtagtagacgtgtt

SEQ ID NO: 28891 - DNA, 30 bp, Artificial Sequence
  Synthetic oligonucleotide
acagaccgatagaggctacaagggcgtgtt

SEQ ID NO: 28892 - DNA, 30 bp, Artificial Sequence
  Synthetic oligonucleotide
ggagcatagaaatcgaactacagtggtgtt

SEQ ID NO: 28893 - DNA, 30 bp, Artificial Sequence
  Synthetic oligonucleotide
agggaagtcgaaccgatggaggacaaattt

SEQ ID NO: 28894 - DNA, 30 bp, Artificial Sequence
  Synthetic oligonucleotide
gaaggctcacggagagagatttaagcattt

SEQ ID NO: 28895 - DNA, 30 bp, Artificial Sequence
  Synthetic oligonucleotide
agggaggaagtctcgccaacccaaagcttt

SEQ ID NO: 28896 - DNA, 30 bp, Artificial Sequence
  Synthetic oligonucleotide
atggacggcaccggagagtgttagacgttt

SEQ ID NO: 28897 - DNA, 30 bp, Artificial Sequence
  Synthetic oligonucleotide
ggtcgaaacaaagcagagttacccgggttt

SEQ ID NO: 28898 - DNA, 30 bp, Artificial Sequence
  Synthetic oligonucleotide
tacatgcaaaatgtgagaagtctagaaaaa

SEQ ID NO: 28899 - DNA, 30 bp, Artificial Sequence
  Synthetic oligonucleotide
accttcggaactgtgaacgcgaacgaaaaa

SEQ ID NO: 28900 - DNA, 30 bp, Artificial Sequence
  Synthetic oligonucleotide
tgtcacatgggaaagaattagacgacaaaa

SEQ ID NO: 28901 - DNA, 30 bp, Artificial Sequence
  Synthetic oligonucleotide
tcggaaggggaggcgacctattctacaaaa

SEQ ID NO: 28902 - DNA, 30 bp, Artificial Sequence
  Synthetic oligonucleotide
tcaaatcaaaatgaacgctaactcgcaaaa

SEQ ID NO: 28903 - DNA, 30 bp, Artificial Sequence
  Synthetic oligonucleotide
cggtaataggcagtgcaaagtctggcaaaa

SEQ ID NO: 28904 - DNA, 30 bp, Artificial Sequence
  Synthetic oligonucleotide
tcaaggcacgacagacataatcgaggaaaa

SEQ ID NO: 28905 - DNA, 30 bp, Artificial Sequence
  Synthetic oligonucleotide
aatgggagggttacaatcgtatccggaaaa

SEQ ID NO: 28906 - DNA, 29 bp, Artificial Sequence
  Synthetic oligonucleotide
cgcaagtgacacgtgtaattagctgaaaa

SEQ ID NO: 28907 - DNA, 30 bp, Artificial Sequence
  Synthetic oligonucleotide
cgttaaggaagatacaaggaaatcataaaa

SEQ ID NO: 28908 - DNA, 30 bp, Artificial Sequence
  Synthetic oligonucleotide
atacatcgccgggagatggggacgataaaa

SEQ ID NO: 28909 - DNA, 30 bp, Artificial Sequence
  Synthetic oligonucleotide
aggctacctggggttatcggacctaacaaa

SEQ ID NO: 28910 - DNA, 30 bp, Artificial Sequence
  Synthetic oligonucleotide
acgtttaccaacatattacaaacacacaaa

SEQ ID NO: 28911 - DNA, 30 bp, Artificial Sequence
  Synthetic oligonucleotide
taaacgattcgaactggagcaccacacaaa

SEQ ID NO: 28912 - DNA, 30 bp, Artificial Sequence
  Synthetic oligonucleotide
agccaagaacataaagcgtctaaagacaaa

SEQ ID NO: 28913 - DNA, 30 bp, Artificial Sequence
  Synthetic oligonucleotide
ccgagaagatcagccaggaggatagacaaa

SEQ ID NO: 28914 - DNA, 30 bp, Artificial Sequence
  Synthetic oligonucleotide
tcggctatgcaggacacatatggtgacaaa

SEQ ID NO: 28915 - DNA, 30 bp, Artificial Sequence
  Synthetic oligonucleotide
ctacaaacccaaaaaagggtcaattacaaa

SEQ ID NO: 28916 - DNA, 30 bp, Artificial Sequence
  Synthetic oligonucleotide
agaacgtaacgggtggacgaatttaccaaa

SEQ ID NO: 28917 - DNA, 30 bp, Artificial Sequence
  Synthetic oligonucleotide
aagcggacagataagaaccactagagcaaa

SEQ ID NO: 28918 - DNA, 30 bp, Artificial Sequence
  Synthetic oligonucleotide
gaacaagagtggctcatatacgggggcaaa

SEQ ID NO: 28919 - DNA, 30 bp, Artificial Sequence
  Synthetic oligonucleotide
ccggataacagaggtgattgccgttgcaaa

SEQ ID NO: 28920 - DNA, 30 bp, Artificial Sequence
  Synthetic oligonucleotide
agaccaagcaagtctcgagacagtaagaaa

SEQ ID NO: 28921 - DNA, 30 bp, Artificial Sequence
  Synthetic oligonucleotide
gacgaaaacaagttaagcaaatggcagaaa

SEQ ID NO: 28922 - DNA, 30 bp, Artificial Sequence
  Synthetic oligonucleotide
cgtgctggggactaaaaatccacatagaaa

SEQ ID NO: 28923 - DNA, 30 bp, Artificial Sequence
  Synthetic oligonucleotide
ggtggagcaatgacaaacgatgggtagaaa

SEQ ID NO: 28924 - DNA, 30 bp, Artificial Sequence
  Synthetic oligonucleotide
agaaggactaagttgtggagatgcccgaaa

SEQ ID NO: 28925 - DNA, 30 bp, Artificial Sequence
  Synthetic oligonucleotide
cacaacgtagaatctgactgacagccgaaa

SEQ ID NO: 28926 - DNA, 30 bp, Artificial Sequence
  Synthetic oligonucleotide
gcgatgtggcattagtgggagggcgcgaaa

SEQ ID NO: 28927 - DNA, 30 bp, Artificial Sequence
  Synthetic oligonucleotide
ggaggagtctggaatcaagcaatcgcgaaa

SEQ ID NO: 28928 - DNA, 30 bp, Artificial Sequence
  Synthetic oligonucleotide
ggaggacacgcagaaagaggatatatgaaa

SEQ ID NO: 28929 - DNA, 30 bp, Artificial Sequence
  Synthetic oligonucleotide
tcgagaacgtaggcaagagaaccaaataaa

SEQ ID NO: 28930 - DNA, 30 bp, Artificial Sequence
  Synthetic oligonucleotide
caaaggtgggcggaatcgagtatcgataaa

SEQ ID NO: 28931 - DNA, 30 bp, Artificial Sequence
  Synthetic oligonucleotide
tcaacagccaaggtgggatatggtgataaa

SEQ ID NO: 28932 - DNA, 30 bp, Artificial Sequence
  Synthetic oligonucleotide
ggtacggatagcgccacgagttgtactaaa

SEQ ID NO: 28933 - DNA, 30 bp, Artificial Sequence
  Synthetic oligonucleotide
acacctaaacaggaaggcggtgaggctaaa

SEQ ID NO: 28934 - DNA, 30 bp, Artificial Sequence
  Synthetic oligonucleotide
taacatagtcaccaggaataagggggtaaa

SEQ ID NO: 28935 - DNA, 30 bp, Artificial Sequence
  Synthetic oligonucleotide
tcaaccacataggatcaggcaaggcttaaa

SEQ ID NO: 28936 - DNA, 30 bp, Artificial Sequence
  Synthetic oligonucleotide
acgtcgcgttggaggatgacgtactttaaa

SEQ ID NO: 28937 - DNA, 30 bp, Artificial Sequence
  Synthetic oligonucleotide
cgatatactaatgagcgggtcgctaaacaa

SEQ ID NO: 28938 - DNA, 30 bp, Artificial Sequence
  Synthetic oligonucleotide
gacaatcggtaaatccaggtacggcaacaa

SEQ ID NO: 28939 - DNA, 30 bp, Artificial Sequence
  Synthetic oligonucleotide
gcaaaagagctgtgaccgtatcggcaacaa

SEQ ID NO: 28940 - DNA, 30 bp, Artificial Sequence
  Synthetic oligonucleotide
gtgaagaatacgggagcaaccatctaacaa

SEQ ID NO: 28941 - DNA, 31 bp, Artificial Sequence
  Synthetic oligonucleotide
acagaaatcacgttggtttcgaacaacacaa

SEQ ID NO: 28942 - DNA, 30 bp, Artificial Sequence
  Synthetic oligonucleotide
tgtaaaagatgagaccaaatatgtccacaa

SEQ ID NO: 28943 - DNA, 30 bp, Artificial Sequence
  Synthetic oligonucleotide
aaagacgctacgagggaagcggtctcacaa

SEQ ID NO: 28944 - DNA, 30 bp, Artificial Sequence
  Synthetic oligonucleotide
ctaggagagctggaacaggaagcaagacaa

SEQ ID NO: 28945 - DNA, 30 bp, Artificial Sequence
  Synthetic oligonucleotide
cacggttgactaataacggcatagagacaa

SEQ ID NO: 28946 - DNA, 30 bp, Artificial Sequence
  Synthetic oligonucleotide
ccaactggacatgcgctcaactcgagacaa

SEQ ID NO: 28947 - DNA, 30 bp, Artificial Sequence
  Synthetic oligonucleotide
acgattcctctgtgggagacaagtggacaa

SEQ ID NO: 28948 - DNA, 30 bp, Artificial Sequence
  Synthetic oligonucleotide
cggtactaagtacgagagcgccgcctacaa

SEQ ID NO: 28949 - DNA, 30 bp, Artificial Sequence
  Synthetic oligonucleotide
gaggactggtgttagcgtagacgagtacaa

SEQ ID NO: 28950 - DNA, 30 bp, Artificial Sequence
  Synthetic oligonucleotide
gcagagaaactaattctcgaattgcaccaa

SEQ ID NO: 28951 - DNA, 30 bp, Artificial Sequence
  Synthetic oligonucleotide
gatgagcacacaacggaatcgattcaccaa

SEQ ID NO: 28952 - DNA, 30 bp, Artificial Sequence
  Synthetic oligonucleotide
tcaccgtgaaaataacccccgaccgaccaa

SEQ ID NO: 28953 - DNA, 30 bp, Artificial Sequence
  Synthetic oligonucleotide
acggacttggccaagaatgggtgtgcccaa

SEQ ID NO: 28954 - DNA, 30 bp, Artificial Sequence
  Synthetic oligonucleotide
cgggaggaaatcacgtactaaatatcccaa

SEQ ID NO: 28955 - DNA, 30 bp, Artificial Sequence
  Synthetic oligonucleotide
acgtgcggtcgaggagtaacggccatccaa

SEQ ID NO: 28956 - DNA, 30 bp, Artificial Sequence
  Synthetic oligonucleotide
tgggatagtaacacaaaaccgttagtccaa

SEQ ID NO: 28957 - DNA, 30 bp, Artificial Sequence
  Synthetic oligonucleotide
ccagtggatcccacataaaccaaccagcaa

SEQ ID NO: 28958 - DNA, 30 bp, Artificial Sequence
  Synthetic oligonucleotide
aagtacagtctgtcgataagagcagagcaa

SEQ ID NO: 28959 - DNA, 30 bp, Artificial Sequence
  Synthetic oligonucleotide
acggttgtcggaagtccagcgatatagcaa

SEQ ID NO: 28960 - DNA, 30 bp, Artificial Sequence
  Synthetic oligonucleotide
aggacttacgcatagcgagataagtagcaa

SEQ ID NO: 28961 - DNA, 30 bp, Artificial Sequence
  Synthetic oligonucleotide
caggtaggagtgtaggagtgttggtcgcaa

SEQ ID NO: 28962 - DNA, 30 bp, Artificial Sequence
  Synthetic oligonucleotide
tcacatccaccgactagtgaaagttggcaa

SEQ ID NO: 28963 - DNA, 30 bp, Artificial Sequence
  Synthetic oligonucleotide
ttgcacgggggaaataagcatactgtgcaa

SEQ ID NO: 28964 - DNA, 30 bp, Artificial Sequence
  Synthetic oligonucleotide
tcagacgggcagggggtaaacgctttgcaa

SEQ ID NO: 28965 - DNA, 30 bp, Artificial Sequence
  Synthetic oligonucleotide
agtgcacataacttgaagaatgatcatcaa

SEQ ID NO: 28966 - DNA, 30 bp, Artificial Sequence
  Synthetic oligonucleotide
ccgcaaagcggttaaggctccagagatcaa

SEQ ID NO: 28967 - DNA, 30 bp, Artificial Sequence
  Synthetic oligonucleotide
cggaagtgccatagtcgttgggacgatcaa

SEQ ID NO: 28968 - DNA, 30 bp, Artificial Sequence
  Synthetic oligonucleotide
acggagtaaaggaacattttgcgttatcaa

SEQ ID NO: 28969 - DNA, 30 bp, Artificial Sequence
  Synthetic oligonucleotide
tctctaggcgagagatctatgcgcactcaa

SEQ ID NO: 28970 - DNA, 30 bp, Artificial Sequence
  Synthetic oligonucleotide
aaatgcgcgactccggatgaaaaaagtcaa

SEQ ID NO: 28971 - DNA, 30 bp, Artificial Sequence
  Synthetic oligonucleotide
ctaggcagaaggaggaacctgccaagtcaa

SEQ ID NO: 28972 - DNA, 30 bp, Artificial Sequence
  Synthetic oligonucleotide
agcagagttgtaagttgtatcgcgcgtcaa

SEQ ID NO: 28973 - DNA, 30 bp, Artificial Sequence
  Synthetic oligonucleotide
cgggatctacggcctaaaacggaaggtcaa

SEQ ID NO: 28974 - DNA, 30 bp, Artificial Sequence
  Synthetic oligonucleotide
cattcacggactacttcacggggacaagaa

SEQ ID NO: 28975 - DNA, 30 bp, Artificial Sequence
  Synthetic oligonucleotide
acggcgcgggacaaacgctcctcataagaa

SEQ ID NO: 28976 - DNA, 30 bp, Artificial Sequence
  Synthetic oligonucleotide
tgtatgggaaaggggagaagtctataagaa

SEQ ID NO: 28977 - DNA, 30 bp, Artificial Sequence
  Synthetic oligonucleotide
gacgcggaacggatgcaaggcgcttaagaa

SEQ ID NO: 28978 - DNA, 30 bp, Artificial Sequence
  Synthetic oligonucleotide
agtagaagtagactaaaatggctcgcagaa

SEQ ID NO: 28979 - DNA, 30 bp, Artificial Sequence
  Synthetic oligonucleotide
caggtgagggggtaagtcaaccggtcagaa

SEQ ID NO: 28980 - DNA, 30 bp, Artificial Sequence
  Synthetic oligonucleotide
tgctagtggcaggaccgtacttacagagaa

SEQ ID NO: 28981 - DNA, 30 bp, Artificial Sequence
  Synthetic oligonucleotide
tagttataagccggaatgagtcggggagaa

SEQ ID NO: 28982 - DNA, 30 bp, Artificial Sequence
  Synthetic oligonucleotide
gggagcgtcggatcgaaccagatgatagaa

SEQ ID NO: 28983 - DNA, 30 bp, Artificial Sequence
  Synthetic oligonucleotide
agatcggacgaagttagctgcgcggtagaa

SEQ ID NO: 28984 - DNA, 30 bp, Artificial Sequence
  Synthetic oligonucleotide
tcgtaaggggtagttagtgagccaaacgaa

SEQ ID NO: 28985 - DNA, 30 bp, Artificial Sequence
  Synthetic oligonucleotide
tcgacgacggtgtatgcgcataccgccgaa

SEQ ID NO: 28986 - DNA, 30 bp, Artificial Sequence
  Synthetic oligonucleotide
cgggattggttgtcactgcagataagcgaa

SEQ ID NO: 28987 - DNA, 30 bp, Artificial Sequence
  Synthetic oligonucleotide
agagtggttagattcgtgaaacaacgcgaa

SEQ ID NO: 28988 - DNA, 30 bp, Artificial Sequence
  Synthetic oligonucleotide
acatgttactatcacaaacatcgttgcgaa

SEQ ID NO: 28989 - DNA, 30 bp, Artificial Sequence
  Synthetic oligonucleotide
tcagcggggtgcctggagatatcaatcgaa

SEQ ID NO: 28990 - DNA, 30 bp, Artificial Sequence
  Synthetic oligonucleotide
aggctcgagggggttccagccatagtcgaa

SEQ ID NO: 28991 - DNA, 30 bp, Artificial Sequence
  Synthetic oligonucleotide
tgacagggaaacaggaaaccgtaattcgaa

SEQ ID NO: 28992 - DNA, 30 bp, Artificial Sequence
  Synthetic oligonucleotide
gctcggacgacgaataagcacgtgttcgaa

SEQ ID NO: 28993 - DNA, 30 bp, Artificial Sequence
  Synthetic oligonucleotide
catgtgctcacgtgaacatgcgataaggaa

SEQ ID NO: 28994 - DNA, 30 bp, Artificial Sequence
  Synthetic oligonucleotide
cgtaccagagaacgtgtcctcatggaggaa

SEQ ID NO: 28995 - DNA, 30 bp, Artificial Sequence
  Synthetic oligonucleotide
cttgacataattagaataggactgagggaa

SEQ ID NO: 28996 - DNA, 30 bp, Artificial Sequence
  Synthetic oligonucleotide
tatggtcaaccatagtgcctagcacgggaa

SEQ ID NO: 28997 - DNA, 30 bp, Artificial Sequence
  Synthetic oligonucleotide
tatgtcgaggctagcgggtaagaaatggaa

SEQ ID NO: 28998 - DNA, 30 bp, Artificial Sequence
  Synthetic oligonucleotide
acgtccgaccaacagggaatggcgctggaa

SEQ ID NO: 28999 - DNA, 30 bp, Artificial Sequence
  Synthetic oligonucleotide
acgcggccacaaacattgggcatcggtgaa

SEQ ID NO: 29000 - DNA, 30 bp, Artificial Sequence
  Synthetic oligonucleotide
cggacaatgaagagtacgcgaaaagttgaa

SEQ ID NO: 29001 - DNA, 30 bp, Artificial Sequence
  Synthetic oligonucleotide
aaagcgggggccgaatacagggctgttgaa

SEQ ID NO: 29002 - DNA, 30 bp, Artificial Sequence
  Synthetic oligonucleotide
gttagcgacatgtgatcagaaatgcaataa

SEQ ID NO: 29003 - DNA, 30 bp, Artificial Sequence
  Synthetic oligonucleotide
gttggcctgaaagggtaacgcattgaataa

SEQ ID NO: 29004 - DNA, 30 bp, Artificial Sequence
  Synthetic oligonucleotide
caaaggcgatgcgggtaccaccgcacataa

SEQ ID NO: 29005 - DNA, 30 bp, Artificial Sequence
  Synthetic oligonucleotide
ggtgaacgttctcaagatctaagtagataa

SEQ ID NO: 29006 - DNA, 30 bp, Artificial Sequence
  Synthetic oligonucleotide
agtcctggcgtgctcaagaaggtcggataa

SEQ ID NO: 29007 - DNA, 30 bp, Artificial Sequence
  Synthetic oligonucleotide
agggcacgaatgaagtcggcgattatataa

SEQ ID NO: 29008 - DNA, 30 bp, Artificial Sequence
  Synthetic oligonucleotide
tggtgcaggtaactaaacctaaacgtataa

SEQ ID NO: 29009 - DNA, 30 bp, Artificial Sequence
  Synthetic oligonucleotide
agacggaaacatggcgctttccacaactaa

SEQ ID NO: 29010 - DNA, 30 bp, Artificial Sequence
  Synthetic oligonucleotide
agcgaatcgtcattatatcacaactactaa

SEQ ID NO: 29011 - DNA, 30 bp, Artificial Sequence
  Synthetic oligonucleotide
ggcgaggtaggaaggagtaggggagcctaa

SEQ ID NO: 29012 - DNA, 30 bp, Artificial Sequence
  Synthetic oligonucleotide
tcgcctgggtagcgtcgagcaggctcctaa

SEQ ID NO: 29013 - DNA, 30 bp, Artificial Sequence
  Synthetic oligonucleotide
cgttatacagggcagagacaagcacgctaa

SEQ ID NO: 29014 - DNA, 30 bp, Artificial Sequence
  Synthetic oligonucleotide
acgtcagtggatcgtaagctggcccgctaa

SEQ ID NO: 29015 - DNA, 30 bp, Artificial Sequence
  Synthetic oligonucleotide
ccgaagagagtatcgaattggacatgctaa

SEQ ID NO: 29016 - DNA, 30 bp, Artificial Sequence
  Synthetic oligonucleotide
acgccttacacatgcaccgtaaacgtctaa

SEQ ID NO: 29017 - DNA, 30 bp, Artificial Sequence
  Synthetic oligonucleotide
agggtaaaggtatcggtcacaagattctaa

SEQ ID NO: 29018 - DNA, 30 bp, Artificial Sequence
  Synthetic oligonucleotide
cggtaacgtatacacccaccaagcgagtaa

SEQ ID NO: 29019 - DNA, 30 bp, Artificial Sequence
  Synthetic oligonucleotide
gcggatgaggtgcatagctgtaagccgtaa

SEQ ID NO: 29020 - DNA, 30 bp, Artificial Sequence
  Synthetic oligonucleotide
ccggcccactaatcgagcatcgtaaggtaa

SEQ ID NO: 29021 - DNA, 30 bp, Artificial Sequence
  Synthetic oligonucleotide
tagacgacaaacgctacgagcggaaattaa

SEQ ID NO: 29022 - DNA, 30 bp, Artificial Sequence
  Synthetic oligonucleotide
tagtaaaaggtgcgcaatactagtaattaa

SEQ ID NO: 29023 - DNA, 30 bp, Artificial Sequence
  Synthetic oligonucleotide
gggatagactgagattcgggtaaccattaa

SEQ ID NO: 29024 - DNA, 30 bp, Artificial Sequence
  Synthetic oligonucleotide
acgataaagccacgcttccggatccattaa

SEQ ID NO: 29025 - DNA, 30 bp, Artificial Sequence
  Synthetic oligonucleotide
aagaccaccgtcaagagaggattcgcttaa

SEQ ID NO: 29026 - DNA, 30 bp, Artificial Sequence
  Synthetic oligonucleotide
gtgcgtcgcgggcttataaaaggcaaaaca

SEQ ID NO: 29027 - DNA, 30 bp, Artificial Sequence
  Synthetic oligonucleotide
agttgcgaaatctcagggcaggatgaaaca

SEQ ID NO: 29028 - DNA, 30 bp, Artificial Sequence
  Synthetic oligonucleotide
catccaacgtccgacaaaggaacgccaaca

SEQ ID NO: 29029 - DNA, 30 bp, Artificial Sequence
  Synthetic oligonucleotide
acgtgtagccatatgcgagatacgtcaaca

SEQ ID NO: 29030 - DNA, 30 bp, Artificial Sequence
  Synthetic oligonucleotide
acgttaggcgggaattcctattcaagaaca

SEQ ID NO: 29031 - DNA, 30 bp, Artificial Sequence
  Synthetic oligonucleotide
tcacgcgagtgcgtcatagtatcgagaaca

SEQ ID NO: 29032 - DNA, 30 bp, Artificial Sequence
  Synthetic oligonucleotide
aaaaggaaaaaagaaatcttacgatgaaca

SEQ ID NO: 29033 - DNA, 30 bp, Artificial Sequence
  Synthetic oligonucleotide
aggccagtcggcttatcagcgtagtgaaca

SEQ ID NO: 29034 - DNA, 30 bp, Artificial Sequence
  Synthetic oligonucleotide
tcatagtcccacagaggaacaatcataaca

SEQ ID NO: 29035 - DNA, 30 bp, Artificial Sequence
  Synthetic oligonucleotide
gcaagacgtaagtagagaatatagataaca

SEQ ID NO: 29036 - DNA, 30 bp, Artificial Sequence
  Synthetic oligonucleotide
cgtgatacccaaagcactctccccttaaca

SEQ ID NO: 29037 - DNA, 30 bp, Artificial Sequence
  Synthetic oligonucleotide
tggctaaaagccaagtgcgacctcaacaca

SEQ ID NO: 29038 - DNA, 30 bp, Artificial Sequence
  Synthetic oligonucleotide
gtggcaaaaccgtttcagaaccacaccaca

SEQ ID NO: 29039 - DNA, 30 bp, Artificial Sequence
  Synthetic oligonucleotide
ggacacgaaatagagacacttcggaccaca

SEQ ID NO: 29040 - DNA, 30 bp, Artificial Sequence
  Synthetic oligonucleotide
tagaaaacatgccatatgagccgtaccaca

SEQ ID NO: 29041 - DNA, 30 bp, Artificial Sequence
  Synthetic oligonucleotide
caggcgcgcgaaggagcagagggtaccaca

SEQ ID NO: 29042 - DNA, 30 bp, Artificial Sequence
  Synthetic oligonucleotide
gggcgccacatccgtaatttgccaagcaca

SEQ ID NO: 29043 - DNA, 30 bp, Artificial Sequence
  Synthetic oligonucleotide
cgggaaaaagagaccagatgtaatcgcaca

SEQ ID NO: 29044 - DNA, 30 bp, Artificial Sequence
  Synthetic oligonucleotide
gtgtcaacaggtggactactaacgggcaca

SEQ ID NO: 29045 - DNA, 30 bp, Artificial Sequence
  Synthetic oligonucleotide
tatgaaagcagggggtagtacagtatcaca

SEQ ID NO: 29046 - DNA, 30 bp, Artificial Sequence
  Synthetic oligonucleotide
cgtgtcgaggttcgagtggctgtcgtcaca

SEQ ID NO: 29047 - DNA, 30 bp, Artificial Sequence
  Synthetic oligonucleotide
cctgataacaatgtaagtcaaattcagaca

SEQ ID NO: 29048 - DNA, 30 bp, Artificial Sequence
  Synthetic oligonucleotide
ggcagtaccagaggactgacgcatacgaca

SEQ ID NO: 29049 - DNA, 30 bp, Artificial Sequence
  Synthetic oligonucleotide
atcgagcgacaatatagttcgaccccgaca

SEQ ID NO: 29050 - DNA, 30 bp, Artificial Sequence
  Synthetic oligonucleotide
agaggagacaccaaacggtcgggcccgaca

SEQ ID NO: 29051 - DNA, 30 bp, Artificial Sequence
  Synthetic oligonucleotide
gccacacctctaactcgaaactgctcgaca

SEQ ID NO: 29052 - DNA, 30 bp, Artificial Sequence
  Synthetic oligonucleotide
caagatctacgaaactcataatcaaggaca

SEQ ID NO: 29053 - DNA, 30 bp, Artificial Sequence
  Synthetic oligonucleotide
acataaggcggatagaactcacatgggaca

SEQ ID NO: 29054 - DNA, 30 bp, Artificial Sequence
  Synthetic oligonucleotide
cgatagtatggacagcctgctgcaatgaca

SEQ ID NO: 29055 - DNA, 30 bp, Artificial Sequence
  Synthetic oligonucleotide
cagtggaagtagatcgcgacggccatgaca

SEQ ID NO: 29056 - DNA, 30 bp, Artificial Sequence
  Synthetic oligonucleotide
cgaagagccagctcaatactatgcgtgaca

SEQ ID NO: 29057 - DNA, 30 bp, Artificial Sequence
  Synthetic oligonucleotide
ttgacaggcagttcagggtgatcgcataca

SEQ ID NO: 29058 - DNA, 30 bp, Artificial Sequence
  Synthetic oligonucleotide
cttgcaaatgcggtattagggcgaagtaca

SEQ ID NO: 29059 - DNA, 30 bp, Artificial Sequence
  Synthetic oligonucleotide
tcgaaggggctgaaagacaacactagtaca

SEQ ID NO: 29060 - DNA, 30 bp, Artificial Sequence
  Synthetic oligonucleotide
gctggtaagggatagcaagaaaagcgtaca

SEQ ID NO: 29061 - DNA, 30 bp, Artificial Sequence
  Synthetic oligonucleotide
catcagcaaagtgtaacgggaagagcacca

SEQ ID NO: 29062 - DNA, 30 bp, Artificial Sequence
  Synthetic oligonucleotide
ggacgagacaagccagtcgggagccgacca

SEQ ID NO: 29063 - DNA, 30 bp, Artificial Sequence
  Synthetic oligonucleotide
gccgatggcggagagtcgatcggaggacca

SEQ ID NO: 29064 - DNA, 30 bp, Artificial Sequence
  Synthetic oligonucleotide
tctaggtaagccaacccgactaagtgacca

SEQ ID NO: 29065 - DNA, 30 bp, Artificial Sequence
  Synthetic oligonucleotide
ctcgagctgcactctaccgacacgtgacca

SEQ ID NO: 29066 - DNA, 30 bp, Artificial Sequence
  Synthetic oligonucleotide
cgatatcaggtcttgagggccgaactacca

SEQ ID NO: 29067 - DNA, 30 bp, Artificial Sequence
  Synthetic oligonucleotide
tcacatcgaacccaataccggatacaccca

SEQ ID NO: 29068 - DNA, 30 bp, Artificial Sequence
  Synthetic oligonucleotide
ctgcggccaagaccactacaaacgacccca

SEQ ID NO: 29069 - DNA, 30 bp, Artificial Sequence
  Synthetic oligonucleotide
gcgtaccgtatggcgatcctccagccccca

SEQ ID NO: 29070 - DNA, 30 bp, Artificial Sequence
  Synthetic oligonucleotide
gcgcgcgtacgtatgcaccagaatgcccca

SEQ ID NO: 29071 - DNA, 30 bp, Artificial Sequence
  Synthetic oligonucleotide
agataagagctggcgaatcgacgccgccca

SEQ ID NO: 29072 - DNA, 30 bp, Artificial Sequence
  Synthetic oligonucleotide
cgtgaaagagttactagcctgaagggccca

SEQ ID NO: 29073 - DNA, 30 bp, Artificial Sequence
  Synthetic oligonucleotide
gcgaaagcaatctgtgcgtgggagctccca

SEQ ID NO: 29074 - DNA, 30 bp, Artificial Sequence
  Synthetic oligonucleotide
gcatacaggagtccgcggaagctaaagcca

SEQ ID NO: 29075 - DNA, 30 bp, Artificial Sequence
  Synthetic oligonucleotide
aaagtcggaatactaagacgtgtcgagcca

SEQ ID NO: 29076 - DNA, 30 bp, Artificial Sequence
  Synthetic oligonucleotide
cgttcaaatcatattagcacggctacgcca

SEQ ID NO: 29077 - DNA, 30 bp, Artificial Sequence
  Synthetic oligonucleotide
tgaggatagagttgaggtaggagaccgcca

SEQ ID NO: 29078 - DNA, 30 bp, Artificial Sequence
  Synthetic oligonucleotide
ggcggatatgcccaaaccgtgtcgtcgcca

SEQ ID NO: 29079 - DNA, 30 bp, Artificial Sequence
  Synthetic oligonucleotide
ggtacactaccgactaagcaacaattgcca

SEQ ID NO: 29080 - DNA, 30 bp, Artificial Sequence
  Synthetic oligonucleotide
acggccaaacacgaagactctggtaatcca

SEQ ID NO: 29081 - DNA, 30 bp, Artificial Sequence
  Synthetic oligonucleotide
aagggtaggggcgggacgaggatagatcca

SEQ ID NO: 29082 - DNA, 30 bp, Artificial Sequence
  Synthetic oligonucleotide
ctgtgcatagtgagtgaagaaagccgtcca

SEQ ID NO: 29083 - DNA, 30 bp, Artificial Sequence
  Synthetic oligonucleotide
gacgaaaccctaaagcataaagaatgtcca

SEQ ID NO: 29084 - DNA, 30 bp, Artificial Sequence
  Synthetic oligonucleotide
gaagagcaccaaacaaatgtaaggtgtcca

SEQ ID NO: 29085 - DNA, 30 bp, Artificial Sequence
  Synthetic oligonucleotide
cgctgaaccgttagccatacattccttcca

SEQ ID NO: 29086 - DNA, 30 bp, Artificial Sequence
  Synthetic oligonucleotide
tttacacacaatacaaaatagctagaagca

SEQ ID NO: 29087 - DNA, 30 bp, Artificial Sequence
  Synthetic oligonucleotide
agtgaacaggacttagcaaatcggacagca

SEQ ID NO: 29088 - DNA, 30 bp, Artificial Sequence
  Synthetic oligonucleotide
tggacgaactattcggaaaagaggtcagca

SEQ ID NO: 29089 - DNA, 30 bp, Artificial Sequence
  Synthetic oligonucleotide
gtacggtaggtagtgtatcagaaaagagca

SEQ ID NO: 29090 - DNA, 30 bp, Artificial Sequence
  Synthetic oligonucleotide
aggactccgtaagggcgtatctgcagagca

SEQ ID NO: 29091 - DNA, 30 bp, Artificial Sequence
  Synthetic oligonucleotide
ggggcggctacaaataacttgcaaggagca

SEQ ID NO: 29092 - DNA, 30 bp, Artificial Sequence
  Synthetic oligonucleotide
aagaagtataagacataatcagattgagca

SEQ ID NO: 29093 - DNA, 30 bp, Artificial Sequence
  Synthetic oligonucleotide
gaccgaatactaccaataagtgcaatagca

SEQ ID NO: 29094 - DNA, 30 bp, Artificial Sequence
  Synthetic oligonucleotide
agtacctaatgtgaaaagtaactaatagca

SEQ ID NO: 29095 - DNA, 30 bp, Artificial Sequence
  Synthetic oligonucleotide
ggctcaaacgccgtcaagcacatcatagca

SEQ ID NO: 29096 - DNA, 30 bp, Artificial Sequence
  Synthetic oligonucleotide
gggatagtgatagggcgcgcgagactagca

SEQ ID NO: 29097 - DNA, 30 bp, Artificial Sequence
  Synthetic oligonucleotide
aacggctgcgaggacgtctgacagttagca

SEQ ID NO: 29098 - DNA, 30 bp, Artificial Sequence
  Synthetic oligonucleotide
tggggtcgcgggacacagagaagacacgca

SEQ ID NO: 29099 - DNA, 30 bp, Artificial Sequence
  Synthetic oligonucleotide
tcaacagggatccgaagttcaacgcccgca

SEQ ID NO: 29100 - DNA, 30 bp, Artificial Sequence
  Synthetic oligonucleotide
gcgattatatacgtggagtctaagtgcgca

SEQ ID NO: 29101 - DNA, 30 bp, Artificial Sequence
  Synthetic oligonucleotide
ctgttagattgagcaagtgtgagggaggca

SEQ ID NO: 29102 - DNA, 30 bp, Artificial Sequence
  Synthetic oligonucleotide
aggacgcgggaacacttcagctctgaggca

SEQ ID NO: 29103 - DNA, 30 bp, Artificial Sequence
  Synthetic oligonucleotide
agaactaagaacacaacataaggtacggca

SEQ ID NO: 29104 - DNA, 30 bp, Artificial Sequence
  Synthetic oligonucleotide
gcggaagtttaagtaagaaccattacggca

SEQ ID NO: 29105 - DNA, 30 bp, Artificial Sequence
  Synthetic oligonucleotide
gtaagaaacactccgatagagtaccgggca

SEQ ID NO: 29106 - DNA, 30 bp, Artificial Sequence
  Synthetic oligonucleotide
gcgaacagttaacggcaggggaatggggca

SEQ ID NO: 29107 - DNA, 30 bp, Artificial Sequence
  Synthetic oligonucleotide
gtggtgggggaaatggatcatcaacatgca

SEQ ID NO: 29108 - DNA, 30 bp, Artificial Sequence
  Synthetic oligonucleotide
ggaggcgtgtctactaaagaaagtcatgca

SEQ ID NO: 29109 - DNA, 30 bp, Artificial Sequence
  Synthetic oligonucleotide
agcgtatggagggccctagtgatgattgca

SEQ ID NO: 29110 - DNA, 31 bp, Artificial Sequence
  Synthetic oligonucleotide
ggtgggagattgcaatgtggggaattcatca

SEQ ID NO: 29111 - DNA, 30 bp, Artificial Sequence
  Synthetic oligonucleotide
tgacaaaggttctctccataagacagatca

SEQ ID NO: 29112 - DNA, 30 bp, Artificial Sequence
  Synthetic oligonucleotide
acgagcgagctcaggacgctgtaaaactca

SEQ ID NO: 29113 - DNA, 30 bp, Artificial Sequence
  Synthetic oligonucleotide
tcacacccgaactacaatccgagatactca

SEQ ID NO: 29114 - DNA, 30 bp, Artificial Sequence
  Synthetic oligonucleotide
ccaacagtaagtaaagggtagcccggctca

SEQ ID NO: 29115 - DNA, 30 bp, Artificial Sequence
  Synthetic oligonucleotide
cgtaaggggcgatttattcgtgagggctca

SEQ ID NO: 29116 - DNA, 30 bp, Artificial Sequence
  Synthetic oligonucleotide
ccggaaacctcatcgtaagaaacgctctca

SEQ ID NO: 29117 - DNA, 30 bp, Artificial Sequence
  Synthetic oligonucleotide
caacgaatagaaggtataccaatagtctca

SEQ ID NO: 29118 - DNA, 30 bp, Artificial Sequence
  Synthetic oligonucleotide
taggaaaggtataagtgtaactaggtctca

SEQ ID NO: 29119 - DNA, 30 bp, Artificial Sequence
  Synthetic oligonucleotide
tcggtgtcatcgaagcgaataggggagtca

SEQ ID NO: 29120 - DNA, 30 bp, Artificial Sequence
  Synthetic oligonucleotide
cgtacggggcacccggtagaacattagtca

SEQ ID NO: 29121 - DNA, 30 bp, Artificial Sequence
  Synthetic oligonucleotide
atgggacaatcagtgaaccttcgttcgtca

SEQ ID NO: 29122 - DNA, 30 bp, Artificial Sequence
  Synthetic oligonucleotide
aaaaggcaaacgggtatattctgaaggtca

SEQ ID NO: 29123 - DNA, 30 bp, Artificial Sequence
  Synthetic oligonucleotide
tggcgggaacaaggttttgagagtaggtca

SEQ ID NO: 29124 - DNA, 30 bp, Artificial Sequence
  Synthetic oligonucleotide
aggtggcgacgatattatgggtaccggtca

SEQ ID NO: 29125 - DNA, 30 bp, Artificial Sequence
  Synthetic oligonucleotide
ccaaagtcagagccaccagtgacagggtca

SEQ ID NO: 29126 - DNA, 30 bp, Artificial Sequence
  Synthetic oligonucleotide
cgtgccgaatcctaagcgccgagcctgtca

SEQ ID NO: 29127 - DNA, 30 bp, Artificial Sequence
  Synthetic oligonucleotide
gcgagtacgaagtccaagtatgttttgtca

SEQ ID NO: 29128 - DNA, 30 bp, Artificial Sequence
  Synthetic oligonucleotide
ggaaacacgatctgcttgcaaagggattca

SEQ ID NO: 29129 - DNA, 30 bp, Artificial Sequence
  Synthetic oligonucleotide
agaggaggcaacgcgactgtattgagttca

SEQ ID NO: 29130 - DNA, 30 bp, Artificial Sequence
  Synthetic oligonucleotide
catcagcagcaacagccgaatcaagtttca

SEQ ID NO: 29131 - DNA, 30 bp, Artificial Sequence
  Synthetic oligonucleotide
tcgaaatggccaacacggctataccaaaga

SEQ ID NO: 29132 - DNA, 30 bp, Artificial Sequence
  Synthetic oligonucleotide
cgtgctgtgatcttcaaaatgaccgaaaga

SEQ ID NO: 29133 - DNA, 30 bp, Artificial Sequence
  Synthetic oligonucleotide
agatgtactcacgaccaccggccggaaaga

SEQ ID NO: 29134 - DNA, 30 bp, Artificial Sequence
  Synthetic oligonucleotide
ccggcagactagacctataatatggaaaga

SEQ ID NO: 29135 - DNA, 30 bp, Artificial Sequence
  Synthetic oligonucleotide
agcgagtaaaatagtgcaacaccttcaaga

SEQ ID NO: 29136 - DNA, 30 bp, Artificial Sequence
  Synthetic oligonucleotide
aaatggaagcacaggctaaatttgagaaga

SEQ ID NO: 29137 - DNA, 30 bp, Artificial Sequence
  Synthetic oligonucleotide
acgggctgtaggcgcgacccaatgcgaaga

SEQ ID NO: 29138 - DNA, 30 bp, Artificial Sequence
  Synthetic oligonucleotide
agggtcgggggaatcaaagttagcggaaga

SEQ ID NO: 29139 - DNA, 30 bp, Artificial Sequence
  Synthetic oligonucleotide
gtccagatcgggggaaagataccgtgaaga

SEQ ID NO: 29140 - DNA, 30 bp, Artificial Sequence
  Synthetic oligonucleotide
agaatcaataatggagcggaaagtgtaaga

SEQ ID NO: 29141 - DNA, 30 bp, Artificial Sequence
  Synthetic oligonucleotide
acacctaggaaagttagcatacgagacaga

SEQ ID NO: 29142 - DNA, 30 bp, Artificial Sequence
  Synthetic oligonucleotide
ttacgctagggttagtctattcgagacaga

SEQ ID NO: 29143 - DNA, 30 bp, Artificial Sequence
  Synthetic oligonucleotide
taaagtaccggtctgcaaccctgagacaga

SEQ ID NO: 29144 - DNA, 30 bp, Artificial Sequence
  Synthetic oligonucleotide
cgctcgtgtaacacgaaaaattgatacaga

SEQ ID NO: 29145 - DNA, 30 bp, Artificial Sequence
  Synthetic oligonucleotide
gaaacacagtccaaagcctttccgtacaga

SEQ ID NO: 29146 - DNA, 30 bp, Artificial Sequence
  Synthetic oligonucleotide
catataggtaggaacacaacctcgtacaga

SEQ ID NO: 29147 - DNA, 30 bp, Artificial Sequence
  Synthetic oligonucleotide
gagcggtagcggccgaataagtcaaccaga

SEQ ID NO: 29148 - DNA, 30 bp, Artificial Sequence
  Synthetic oligonucleotide
acatgtcgcatatgtatatagagcaccaga

SEQ ID NO: 29149 - DNA, 30 bp, Artificial Sequence
  Synthetic oligonucleotide
ctgaagaatcgcgggcgcaaccttaccaga

SEQ ID NO: 29150 - DNA, 30 bp, Artificial Sequence
  Synthetic oligonucleotide
agggcaaactgtagcaaactctctcccaga

SEQ ID NO: 29151 - DNA, 30 bp, Artificial Sequence
  Synthetic oligonucleotide
ggtgcaatagaactaccggtaggcgccaga

SEQ ID NO: 29152 - DNA, 30 bp, Artificial Sequence
  Synthetic oligonucleotide
ctaacagctgagacagcctgttgctccaga

SEQ ID NO: 29153 - DNA, 30 bp, Artificial Sequence
  Synthetic oligonucleotide
cgcggaaccgagtttcacgttacttccaga

SEQ ID NO: 29154 - DNA, 30 bp, Artificial Sequence
  Synthetic oligonucleotide
attcaggatggtaattgcaggaaaagcaga

SEQ ID NO: 29155 - DNA, 30 bp, Artificial Sequence
  Synthetic oligonucleotide
ggcgggtttgaatccgcaccattcagcaga

SEQ ID NO: 29156 - DNA, 30 bp, Artificial Sequence
  Synthetic oligonucleotide
cgagtgcaacgggtgccgttctcgggcaga

SEQ ID NO: 29157 - DNA, 30 bp, Artificial Sequence
  Synthetic oligonucleotide
cgacgccaggactactcatataggctcaga

SEQ ID NO: 29158 - DNA, 30 bp, Artificial Sequence
  Synthetic oligonucleotide
aggatacagaaggaagtaaagagattcaga

SEQ ID NO: 29159 - DNA, 30 bp, Artificial Sequence
  Synthetic oligonucleotide
gaatgtggagaacgtaatccgaatttcaga

SEQ ID NO: 29160 - DNA, 30 bp, Artificial Sequence
  Synthetic oligonucleotide
cgaaggggccatgccagccgaagaaagaga

SEQ ID NO: 29161 - DNA, 30 bp, Artificial Sequence
  Synthetic oligonucleotide
tgtgcgtaaccggcaacgaaggagaagaga

SEQ ID NO: 29162 - DNA, 30 bp, Artificial Sequence
  Synthetic oligonucleotide
gtgggtcaatcattacgttacccagagaga

SEQ ID NO: 29163 - DNA, 30 bp, Artificial Sequence
  Synthetic oligonucleotide
acgatcagcttttgccaaatcccagagaga

SEQ ID NO: 29164 - DNA, 30 bp, Artificial Sequence
  Synthetic oligonucleotide
ctggcgatgtgtttcaacgggaccgagaga

SEQ ID NO: 29165 - DNA, 30 bp, Artificial Sequence
  Synthetic oligonucleotide
gctgagattggaggctccaaaccaacgaga

SEQ ID NO: 29166 - DNA, 30 bp, Artificial Sequence
  Synthetic oligonucleotide
cagaaaaacagagccactgacaacccgaga

SEQ ID NO: 29167 - DNA, 30 bp, Artificial Sequence
  Synthetic oligonucleotide
catggtaacccgtagtgccacgtgccgaga

SEQ ID NO: 29168 - DNA, 30 bp, Artificial Sequence
  Synthetic oligonucleotide
aaggttggagaatcaggatggtttgcgaga

SEQ ID NO: 29169 - DNA, 30 bp, Artificial Sequence
  Synthetic oligonucleotide
ccgtccgcgaatactaaaatagaacggaga

SEQ ID NO: 29170 - DNA, 30 bp, Artificial Sequence
  Synthetic oligonucleotide
cacactgatggtttaatgtgaatgcggaga

SEQ ID NO: 29171 - DNA, 30 bp, Artificial Sequence
  Synthetic oligonucleotide
gaccgtgtcacgggtgataatcctatgaga

SEQ ID NO: 29172 - DNA, 30 bp, Artificial Sequence
  Synthetic oligonucleotide
tccaagtaaggtcgtagaaggagtaataga

SEQ ID NO: 29173 - DNA, 30 bp, Artificial Sequence
  Synthetic oligonucleotide
ccacctaaaaggaaatgtgtggagtataga

SEQ ID NO: 29174 - DNA, 30 bp, Artificial Sequence
  Synthetic oligonucleotide
agtgtaaggtcagagggggtaacaactaga

SEQ ID NO: 29175 - DNA, 30 bp, Artificial Sequence
  Synthetic oligonucleotide
aacgcgttaggccctacggtgagtggtaga

SEQ ID NO: 29176 - DNA, 30 bp, Artificial Sequence
  Synthetic oligonucleotide
agggtgaaggctgacagcgtgactcaacga

SEQ ID NO: 29177 - DNA, 30 bp, Artificial Sequence
  Synthetic oligonucleotide
cagttactcagtaaaaagtcaagctaacga

SEQ ID NO: 29178 - DNA, 30 bp, Artificial Sequence
  Synthetic oligonucleotide
acgcccagatacggggcaccaaaatgacga

SEQ ID NO: 29179 - DNA, 30 bp, Artificial Sequence
  Synthetic oligonucleotide
tagggcatacgggcacatgcgcggatacga

SEQ ID NO: 29180 - DNA, 30 bp, Artificial Sequence
  Synthetic oligonucleotide
cacctcgaacgccgtatacaccaactacga

SEQ ID NO: 29181 - DNA, 30 bp, Artificial Sequence
  Synthetic oligonucleotide
agagacaggagaatggtgacagccgtacga

SEQ ID NO: 29182 - DNA, 30 bp, Artificial Sequence
  Synthetic oligonucleotide
cgactacattagtgtctatcaatcaaccga

SEQ ID NO: 29183 - DNA, 30 bp, Artificial Sequence
  Synthetic oligonucleotide
caagcaagtccgcgtggggtcagggaccga

SEQ ID NO: 29184 - DNA, 30 bp, Artificial Sequence
  Synthetic oligonucleotide
ctgcgatgaagtagaaaaacgtgctaccga

SEQ ID NO: 29185 - DNA, 30 bp, Artificial Sequence
  Synthetic oligonucleotide
acgcaatggataacgtttgtctcaggccga

SEQ ID NO: 29186 - DNA, 30 bp, Artificial Sequence
  Synthetic oligonucleotide
ctggagtaccttgtgtgaggatcgggccga

SEQ ID NO: 29187 - DNA, 30 bp, Artificial Sequence
  Synthetic oligonucleotide
gaagtgcaaaataggatgggaattctccga

SEQ ID NO: 29188 - DNA, 30 bp, Artificial Sequence
  Synthetic oligonucleotide
gtgaaaatagggacagcttacaactagcga

SEQ ID NO: 29189 - DNA, 30 bp, Artificial Sequence
  Synthetic oligonucleotide
gcggagctaagaaagtgctacctcaggcga

SEQ ID NO: 29190 - DNA, 30 bp, Artificial Sequence
  Synthetic oligonucleotide
agggccggggggaggaaagaccggaggcga

SEQ ID NO: 29191 - DNA, 30 bp, Artificial Sequence
  Synthetic oligonucleotide
ggatggccgcgtcaagaatcaatggggcga

SEQ ID NO: 29192 - DNA, 30 bp, Artificial Sequence
  Synthetic oligonucleotide
cttgagccatctgaggaatcgaccatgcga

SEQ ID NO: 29193 - DNA, 30 bp, Artificial Sequence
  Synthetic oligonucleotide
acattacaaaggtcacgtgtcgtgaatcga

SEQ ID NO: 29194 - DNA, 30 bp, Artificial Sequence
  Synthetic oligonucleotide
ccataattcacgatggaagggcgtcatcga

SEQ ID NO: 29195 - DNA, 30 bp, Artificial Sequence
  Synthetic oligonucleotide
caaagtccctgttgcaaaaagacagctcga

SEQ ID NO: 29196 - DNA, 30 bp, Artificial Sequence
  Synthetic oligonucleotide
tcaagacacgtggacatactgccggctcga

SEQ ID NO: 29197 - DNA, 30 bp, Artificial Sequence
  Synthetic oligonucleotide
cacttcaacacagcaataagccaatgtcga

SEQ ID NO: 29198 - DNA, 30 bp, Artificial Sequence
  Synthetic oligonucleotide
gggataccttacaaagaagcaccttgtcga

SEQ ID NO: 29199 - DNA, 30 bp, Artificial Sequence
  Synthetic oligonucleotide
tgatcggtgcgactatgagcgggcaaagga

SEQ ID NO: 29200 - DNA, 30 bp, Artificial Sequence
  Synthetic oligonucleotide
aagcgttagtcagagcaagcatgccaagga

SEQ ID NO: 29201 - DNA, 30 bp, Artificial Sequence
  Synthetic oligonucleotide
acgactatacgtaagatattaagcgaagga

SEQ ID NO: 29202 - DNA, 30 bp, Artificial Sequence
  Synthetic oligonucleotide
gatagagagcacaaactaccagcttcagga

SEQ ID NO: 29203 - DNA, 30 bp, Artificial Sequence
  Synthetic oligonucleotide
acggttacgtaaaaggcttccggttcagga

SEQ ID NO: 29204 - DNA, 30 bp, Artificial Sequence
  Synthetic oligonucleotide
gcatacgacaggaaccattactcccgagga

SEQ ID NO: 29205 - DNA, 30 bp, Artificial Sequence
  Synthetic oligonucleotide
aagatacgctaagcagcgcatgtccgagga

SEQ ID NO: 29206 - DNA, 30 bp, Artificial Sequence
  Synthetic oligonucleotide
cgattacgggttggggacaggtaatgagga

SEQ ID NO: 29207 - DNA, 30 bp, Artificial Sequence
  Synthetic oligonucleotide
cacaagagtgtaaatcaattattttgagga

SEQ ID NO: 29208 - DNA, 30 bp, Artificial Sequence
  Synthetic oligonucleotide
gactcccagaaaggaccaaaaatctacgga

SEQ ID NO: 29209 - DNA, 30 bp, Artificial Sequence
  Synthetic oligonucleotide
gcaaacgcgtggggcgatacgcatgccgga

SEQ ID NO: 29210 - DNA, 30 bp, Artificial Sequence
  Synthetic oligonucleotide
cgatctgcgtgacggcgagcacaaagcgga

SEQ ID NO: 29211 - DNA, 30 bp, Artificial Sequence
  Synthetic oligonucleotide
gtaaagcaggctaggttagaagtaagcgga

SEQ ID NO: 29212 - DNA, 30 bp, Artificial Sequence
  Synthetic oligonucleotide
aaacagagcacgtacatgaacaccagcgga

SEQ ID NO: 29213 - DNA, 30 bp, Artificial Sequence
  Synthetic oligonucleotide
cgttcaattagagagaggataaattgcgga

SEQ ID NO: 29214 - DNA, 30 bp, Artificial Sequence
  Synthetic oligonucleotide
aagggaaggacccagacccaacgtgtcgga

SEQ ID NO: 29215 - DNA, 30 bp, Artificial Sequence
  Synthetic oligonucleotide
cgaactcggtcgccggtaacgggaaaggga

SEQ ID NO: 29216 - DNA, 30 bp, Artificial Sequence
  Synthetic oligonucleotide
gagcacggcagattgcatagaaataaggga

SEQ ID NO: 29217 - DNA, 30 bp, Artificial Sequence
  Synthetic oligonucleotide
tatggaaagcacttttggcggtccgaggga

SEQ ID NO: 29218 - DNA, 30 bp, Artificial Sequence
  Synthetic oligonucleotide
aagggtgccagccaatttcacgaataggga

SEQ ID NO: 29219 - DNA, 30 bp, Artificial Sequence
  Synthetic oligonucleotide
ttaacagacaagataaagaaccatagggga

SEQ ID NO: 29220 - DNA, 30 bp, Artificial Sequence
  Synthetic oligonucleotide
caaagcgggacggttaacgttatgcgggga

SEQ ID NO: 29221 - DNA, 30 bp, Artificial Sequence
  Synthetic oligonucleotide
tggtaaagaataaatttgattagtaatgga

SEQ ID NO: 29222 - DNA, 30 bp, Artificial Sequence
  Synthetic oligonucleotide
ttaggtcgagtcacaagagcgccgtatgga

SEQ ID NO: 29223 - DNA, 30 bp, Artificial Sequence
  Synthetic oligonucleotide
agtacggatgtacaataatcccgcactgga

SEQ ID NO: 29224 - DNA, 30 bp, Artificial Sequence
  Synthetic oligonucleotide
atagacggcgaatgagccaaaaaacctgga

SEQ ID NO: 29225 - DNA, 30 bp, Artificial Sequence
  Synthetic oligonucleotide
taaagtaggcagctggcgatgcgaggtgga

SEQ ID NO: 29226 - DNA, 30 bp, Artificial Sequence
  Synthetic oligonucleotide
agggcctcaacgtttaagaagtccgttgga

SEQ ID NO: 29227 - DNA, 30 bp, Artificial Sequence
  Synthetic oligonucleotide
taactgagagaatcaggatcgtatgttgga

SEQ ID NO: 29228 - DNA, 30 bp, Artificial Sequence
  Synthetic oligonucleotide
tcgaagacattgcgagtagcgacatttgga

SEQ ID NO: 29229 - DNA, 30 bp, Artificial Sequence
  Synthetic oligonucleotide
caaatggaatgcgataggcataggaaatga

SEQ ID NO: 29230 - DNA, 30 bp, Artificial Sequence
  Synthetic oligonucleotide
gggatagggaaaagccctggtcaacaatga

SEQ ID NO: 29231 - DNA, 30 bp, Artificial Sequence
  Synthetic oligonucleotide
aaggacaaggcgcacatgttcggtccatga

SEQ ID NO: 29232 - DNA, 30 bp, Artificial Sequence
  Synthetic oligonucleotide
tcggggattctaagacgaacggtaggatga

SEQ ID NO: 29233 - DNA, 30 bp, Artificial Sequence
  Synthetic oligonucleotide
cggcaggataggaagcgtagcaatatatga

SEQ ID NO: 29234 - DNA, 30 bp, Artificial Sequence
  Synthetic oligonucleotide
aacactgaaaaaagagggtcaccggtatga

SEQ ID NO: 29235 - DNA, 30 bp, Artificial Sequence
  Synthetic oligonucleotide
gtcgcggggcgcaatgattggtagaactga

SEQ ID NO: 29236 - DNA, 30 bp, Artificial Sequence
  Synthetic oligonucleotide
cacgaatgcgatggggccggtatagactga

SEQ ID NO: 29237 - DNA, 30 bp, Artificial Sequence
  Synthetic oligonucleotide
ggagcgcgggaggaataggattgttgctga

SEQ ID NO: 29238 - DNA, 30 bp, Artificial Sequence
  Synthetic oligonucleotide
tgcaaatgatggattaacaatgcacagtga

SEQ ID NO: 29239 - DNA, 30 bp, Artificial Sequence
  Synthetic oligonucleotide
taggactacgaggagctcggcggagagtga

SEQ ID NO: 29240 - DNA, 30 bp, Artificial Sequence
  Synthetic oligonucleotide
aggtgatcgagaacattcttaaaatagtga

SEQ ID NO: 29241 - DNA, 30 bp, Artificial Sequence
  Synthetic oligonucleotide
aaacgagtaacgaacctgtggagggcgtga

SEQ ID NO: 29242 - DNA, 30 bp, Artificial Sequence
  Synthetic oligonucleotide
ccgtcttgtgcgcagaagttcgggaggtga

SEQ ID NO: 29243 - DNA, 30 bp, Artificial Sequence
  Synthetic oligonucleotide
cggctatcgagccatatagcgaatctgtga

SEQ ID NO: 29244 - DNA, 30 bp, Artificial Sequence
  Synthetic oligonucleotide
ggcacaataacgagataaatgtcccattga

SEQ ID NO: 29245 - DNA, 30 bp, Artificial Sequence
  Synthetic oligonucleotide
cgttgcagaaaaggaacccaagatgattga

SEQ ID NO: 29246 - DNA, 30 bp, Artificial Sequence
  Synthetic oligonucleotide
agcgctccaaacacgacctaagaatattga

SEQ ID NO: 29247 - DNA, 30 bp, Artificial Sequence
  Synthetic oligonucleotide
taagggaagatgaaaccagacggaccttga

SEQ ID NO: 29248 - DNA, 30 bp, Artificial Sequence
  Synthetic oligonucleotide
cgtagtgcgtagaaatggtacaccagttga

SEQ ID NO: 29249 - DNA, 30 bp, Artificial Sequence
  Synthetic oligonucleotide
cgcaaaagtgacgataatgccatgtgttga

SEQ ID NO: 29250 - DNA, 30 bp, Artificial Sequence
  Synthetic oligonucleotide
gccaggacgcgatgtcggcttaccgaaata

SEQ ID NO: 29251 - DNA, 30 bp, Artificial Sequence
  Synthetic oligonucleotide
gtcattgtcggcgagtacacaagggaaata

SEQ ID NO: 29252 - DNA, 30 bp, Artificial Sequence
  Synthetic oligonucleotide
acggatcatttcgattaaggtctaacaata

SEQ ID NO: 29253 - DNA, 30 bp, Artificial Sequence
  Synthetic oligonucleotide
cattgattaactatggagggtgggtcaata

SEQ ID NO: 29254 - DNA, 30 bp, Artificial Sequence
  Synthetic oligonucleotide
cataggaactgcgcgtgaacgggcggaata

SEQ ID NO: 29255 - DNA, 30 bp, Artificial Sequence
  Synthetic oligonucleotide
aggggcgtgccgggtttatggaactgaata

SEQ ID NO: 29256 - DNA, 30 bp, Artificial Sequence
  Synthetic oligonucleotide
ggctacagatagcgatcaagattgtgaata

SEQ ID NO: 29257 - DNA, 30 bp, Artificial Sequence
  Synthetic oligonucleotide
gcatgaggcgaactactagggtagaacata

SEQ ID NO: 29258 - DNA, 30 bp, Artificial Sequence
  Synthetic oligonucleotide
gtcgaacacatgaaagaagagcatcacata

SEQ ID NO: 29259 - DNA, 30 bp, Artificial Sequence
  Synthetic oligonucleotide
cgtagggcatgtcatcacacaaaaaccata

SEQ ID NO: 29260 - DNA, 30 bp, Artificial Sequence
  Synthetic oligonucleotide
tcaggcaaacggtgttaatgagaagccata

SEQ ID NO: 29261 - DNA, 30 bp, Artificial Sequence
  Synthetic oligonucleotide
ccacatgcagaaatagggggcactggcata

SEQ ID NO: 29262 - DNA, 30 bp, Artificial Sequence
  Synthetic oligonucleotide
agtggaggtaagcggaggcagagctgcata

SEQ ID NO: 29263 - DNA, 30 bp, Artificial Sequence
  Synthetic oligonucleotide
agggcgaccagctaactactgtgcatcata

SEQ ID NO: 29264 - DNA, 30 bp, Artificial Sequence
  Synthetic oligonucleotide
acgaatgacctaggcgtgttatcgctcata

SEQ ID NO: 29265 - DNA, 30 bp, Artificial Sequence
  Synthetic oligonucleotide
acggtcacaatagacaactacagggtcata

SEQ ID NO: 29266 - DNA, 30 bp, Artificial Sequence
  Synthetic oligonucleotide
gatagggacgaaccggaacatcagttcata

SEQ ID NO: 29267 - DNA, 30 bp, Artificial Sequence
  Synthetic oligonucleotide
gcacgacaaagagtcaaagtgtggtcgata

SEQ ID NO: 29268 - DNA, 30 bp, Artificial Sequence
  Synthetic oligonucleotide
agagggacgatagacgattacgtctggata

SEQ ID NO: 29269 - DNA, 30 bp, Artificial Sequence
  Synthetic oligonucleotide
tacgtggtgatctaaaagcgaagattgata

SEQ ID NO: 29270 - DNA, 30 bp, Artificial Sequence
  Synthetic oligonucleotide
cgcaaacccaaaaagcctccatcggatata

SEQ ID NO: 29271 - DNA, 30 bp, Artificial Sequence
  Synthetic oligonucleotide
cggcaagtacggcaaaggtaccaccctata

SEQ ID NO: 29272 - DNA, 30 bp, Artificial Sequence
  Synthetic oligonucleotide
ccgatcgggcgattactcaagcgaagacta

SEQ ID NO: 29273 - DNA, 30 bp, Artificial Sequence
  Synthetic oligonucleotide
ggctaatgttcgctaaaaggagtaagacta

SEQ ID NO: 29274 - DNA, 30 bp, Artificial Sequence
  Synthetic oligonucleotide
ttgagcaaaatgggtagacaaaatagacta

SEQ ID NO: 29275 - DNA, 30 bp, Artificial Sequence
  Synthetic oligonucleotide
ggataatcgtccaagaaatgagctcaccta

SEQ ID NO: 29276 - DNA, 30 bp, Artificial Sequence
  Synthetic oligonucleotide
gatcgaattaagctgcaggcggcgacccta

SEQ ID NO: 29277 - DNA, 30 bp, Artificial Sequence
  Synthetic oligonucleotide
agcgcagagcgactagacgcccgaagccta

SEQ ID NO: 29278 - DNA, 30 bp, Artificial Sequence
  Synthetic oligonucleotide
agtttagggcgggcccaactacggaagcta

SEQ ID NO: 29279 - DNA, 30 bp, Artificial Sequence
  Synthetic oligonucleotide
ggaacaaggacaaacacaccaccccagcta

SEQ ID NO: 29280 - DNA, 30 bp, Artificial Sequence
  Synthetic oligonucleotide
agccagagaacgtacttgagagtaccgcta

SEQ ID NO: 29281 - DNA, 30 bp, Artificial Sequence
  Synthetic oligonucleotide
ggacgcaacgagatcgcaagagtacggcta

SEQ ID NO: 29282 - DNA, 30 bp, Artificial Sequence
  Synthetic oligonucleotide
caaaaactagcttgaaagggtcctatgcta

SEQ ID NO: 29283 - DNA, 30 bp, Artificial Sequence
  Synthetic oligonucleotide
cgggcggtaaatgcgaattgtcaggatcta

SEQ ID NO: 29284 - DNA, 30 bp, Artificial Sequence
  Synthetic oligonucleotide
cagtgcagtcaacacaacaaaggcgctcta

SEQ ID NO: 29285 - DNA, 30 bp, Artificial Sequence
  Synthetic oligonucleotide
cgcttacggaagccggagtaccgaaaagta

SEQ ID NO: 29286 - DNA, 29 bp, Artificial Sequence
  Synthetic oligonucleotide
aggcttcagccaaatcaatacgcaaagta

SEQ ID NO: 29287 - DNA, 30 bp, Artificial Sequence
  Synthetic oligonucleotide
ctaaggacaggacgatgtagggtatcagta

SEQ ID NO: 29288 - DNA, 30 bp, Artificial Sequence
  Synthetic oligonucleotide
gatgcgtaccaaacacgtcgacacagagta

SEQ ID NO: 29289 - DNA, 30 bp, Artificial Sequence
  Synthetic oligonucleotide
cggggaatgtatgttcgacatgcgagagta

SEQ ID NO: 29290 - DNA, 30 bp, Artificial Sequence
  Synthetic oligonucleotide
ggcgggcggagagtccctacgattagagta

SEQ ID NO: 29291 - DNA, 30 bp, Artificial Sequence
  Synthetic oligonucleotide
cgcgaagtgcgcggctgggccacaggagta

SEQ ID NO: 29292 - DNA, 30 bp, Artificial Sequence
  Synthetic oligonucleotide
cacgagtccacgattacaaggagtggagta

SEQ ID NO: 29293 - DNA, 30 bp, Artificial Sequence
  Synthetic oligonucleotide
cgtaaatccccagcgcgacggacactagta

SEQ ID NO: 29294 - DNA, 30 bp, Artificial Sequence
  Synthetic oligonucleotide
ctcgaaagtataggcccggaacagcacgta

SEQ ID NO: 29295 - DNA, 30 bp, Artificial Sequence
  Synthetic oligonucleotide
caattgagggaggaacccttagagcacgta

SEQ ID NO: 29296 - DNA, 30 bp, Artificial Sequence
  Synthetic oligonucleotide
gcggtgcggaagaagagtatcaacagcgta

SEQ ID NO: 29297 - DNA, 29 bp, Artificial Sequence
  Synthetic oligonucleotide
tgacaaaacctcggagcggcaggcgcgta

SEQ ID NO: 29298 - DNA, 30 bp, Artificial Sequence
  Synthetic oligonucleotide
cattagtgggactgaaagcagtaaggcgta

SEQ ID NO: 29299 - DNA, 30 bp, Artificial Sequence
  Synthetic oligonucleotide
tagaacaaagaggggcatcgcttgctcgta

SEQ ID NO: 29300 - DNA, 30 bp, Artificial Sequence
  Synthetic oligonucleotide
gcgtcagtgcaaggcgaaaccacggaggta

SEQ ID NO: 29301 - DNA, 30 bp, Artificial Sequence
  Synthetic oligonucleotide
acactcaacgggatgatcattatggaggta

SEQ ID NO: 29302 - DNA, 30 bp, Artificial Sequence
  Synthetic oligonucleotide
ctgaggatgtatgagcgactaaagagggta

SEQ ID NO: 29303 - DNA, 30 bp, Artificial Sequence
  Synthetic oligonucleotide
cgatcaaagcagaaacacgcgtgaggggta

SEQ ID NO: 29304 - DNA, 30 bp, Artificial Sequence
  Synthetic oligonucleotide
cgcagactcaggggtgggctaatttgggta

SEQ ID NO: 29305 - DNA, 30 bp, Artificial Sequence
  Synthetic oligonucleotide
acaagagatagcgtacaagagaaaatggta

SEQ ID NO: 29306 - DNA, 30 bp, Artificial Sequence
  Synthetic oligonucleotide
gggcagacacatagagtattgatattggta

SEQ ID NO: 29307 - DNA, 30 bp, Artificial Sequence
  Synthetic oligonucleotide
acgaccttatgggatgagtggagcgatgta

SEQ ID NO: 29308 - DNA, 30 bp, Artificial Sequence
  Synthetic oligonucleotide
agagaggaaaatgcacaggatagcgatgta

SEQ ID NO: 29309 - DNA, 30 bp, Artificial Sequence
  Synthetic oligonucleotide
ggatcataaatcagaagcacatcggatgta

SEQ ID NO: 29310 - DNA, 30 bp, Artificial Sequence
  Synthetic oligonucleotide
atgtaccagtagggagactcgagtgctgta

SEQ ID NO: 29311 - DNA, 30 bp, Artificial Sequence
  Synthetic oligonucleotide
gctcaacaagggaagcggatgcgaggtgta

SEQ ID NO: 29312 - DNA, 30 bp, Artificial Sequence
  Synthetic oligonucleotide
tcgaatagcatatccggaatgaagggtgta

SEQ ID NO: 29313 - DNA, 30 bp, Artificial Sequence
  Synthetic oligonucleotide
gcgcgagcgtggaggtgccgtccataatta

SEQ ID NO: 29314 - DNA, 30 bp, Artificial Sequence
  Synthetic oligonucleotide
cacggatacaagcagatggaaaattaatta

SEQ ID NO: 29315 - DNA, 30 bp, Artificial Sequence
  Synthetic oligonucleotide
ggcatcacgacagagacaagaggttcatta

SEQ ID NO: 29316 - DNA, 30 bp, Artificial Sequence
  Synthetic oligonucleotide
tcagctgaggtgttagaagttacgagatta

SEQ ID NO: 29317 - DNA, 30 bp, Artificial Sequence
  Synthetic oligonucleotide
cggctggtcaaagagagcgttcgagtatta

SEQ ID NO: 29318 - DNA, 30 bp, Artificial Sequence
  Synthetic oligonucleotide
aaggttaacaggtgaatcaggcatgtatta

SEQ ID NO: 29319 - DNA, 30 bp, Artificial Sequence
  Synthetic oligonucleotide
gctcgaaggaggatggaatacaggagctta

SEQ ID NO: 29320 - DNA, 30 bp, Artificial Sequence
  Synthetic oligonucleotide
cgagggagatcacacggatcggttaagtta

SEQ ID NO: 29321 - DNA, 30 bp, Artificial Sequence
  Synthetic oligonucleotide
ggaacgggtaaatgagcgggtacaatgtta

SEQ ID NO: 29322 - DNA, 30 bp, Artificial Sequence
  Synthetic oligonucleotide
gggtccgagcacggcgagtgagtgatgtta

SEQ ID NO: 29323 - DNA, 30 bp, Artificial Sequence
  Synthetic oligonucleotide
cgccgtcaggatgtggtacaaaccgtgtta

SEQ ID NO: 29324 - DNA, 30 bp, Artificial Sequence
  Synthetic oligonucleotide
ggacgggggattcgatgccagagagattta

SEQ ID NO: 29325 - DNA, 30 bp, Artificial Sequence
  Synthetic oligonucleotide
gcggacaacacggaaagttcgtatcgttta

SEQ ID NO: 29326 - DNA, 30 bp, Artificial Sequence
  Synthetic oligonucleotide
tatcatctagcgacaaagaggacagtttta

SEQ ID NO: 29327 - DNA, 30 bp, Artificial Sequence
  Synthetic oligonucleotide
tctggcaaacgcccaaaattactgcaaaac

SEQ ID NO: 29328 - DNA, 30 bp, Artificial Sequence
  Synthetic oligonucleotide
ggggaacgagactgaatctgatgcgcaaac

SEQ ID NO: 29329 - DNA, 30 bp, Artificial Sequence
  Synthetic oligonucleotide
agaggcttaagagtgttcaacggaagaaac

SEQ ID NO: 29330 - DNA, 30 bp, Artificial Sequence
  Synthetic oligonucleotide
acgacagcatgcatgaactagccgcgaaac

SEQ ID NO: 29331 - DNA, 30 bp, Artificial Sequence
  Synthetic oligonucleotide
tcagagtcgagaacccttcacacgataaac

SEQ ID NO: 29332 - DNA, 30 bp, Artificial Sequence
  Synthetic oligonucleotide
agtggaaataccacataacatacggtaaac

SEQ ID NO: 29333 - DNA, 30 bp, Artificial Sequence
  Synthetic oligonucleotide
agcgacaaaccgtaacttctgctggtaaac

SEQ ID NO: 29334 - DNA, 30 bp, Artificial Sequence
  Synthetic oligonucleotide
tgaaacccgtatcactagaccgagttaaac

SEQ ID NO: 29335 - DNA, 30 bp, Artificial Sequence
  Synthetic oligonucleotide
cagagagcgcgaaaattcctatggttaaac

SEQ ID NO: 29336 - DNA, 30 bp, Artificial Sequence
  Synthetic oligonucleotide
tgcggagaccctagcttaggttgatacaac

SEQ ID NO: 29337 - DNA, 30 bp, Artificial Sequence
  Synthetic oligonucleotide
agctggacattgccattaaaccgcaccaac

SEQ ID NO: 29338 - DNA, 30 bp, Artificial Sequence
  Synthetic oligonucleotide
tgccagtgacagggacgtggatcgcccaac

SEQ ID NO: 29339 - DNA, 30 bp, Artificial Sequence
  Synthetic oligonucleotide
agttatcgtcacggcaaacacgatagcaac

SEQ ID NO: 29340 - DNA, 30 bp, Artificial Sequence
  Synthetic oligonucleotide
gtcaggctaaccaatgggaacgtgcgcaac

SEQ ID NO: 29341 - DNA, 30 bp, Artificial Sequence
  Synthetic oligonucleotide
acttaaaatgcatccgatcgtctaggcaac

SEQ ID NO: 29342 - DNA, 30 bp, Artificial Sequence
  Synthetic oligonucleotide
ttacggaggatctgggcgaaatggatcaac

SEQ ID NO: 29343 - DNA, 31 bp, Artificial Sequence
  Synthetic oligonucleotide
cgtcattcaactgtactaaccccggctcaac

SEQ ID NO: 29344 - DNA, 30 bp, Artificial Sequence
  Synthetic oligonucleotide
agatgcacacaacgaaatggtatggtcaac

SEQ ID NO: 29345 - DNA, 30 bp, Artificial Sequence
  Synthetic oligonucleotide
atgatggtgcatgggagaaaattacagaac

SEQ ID NO: 29346 - DNA, 30 bp, Artificial Sequence
  Synthetic oligonucleotide
aagacaatacagaacgcattgcgccagaac

SEQ ID NO: 29347 - DNA, 30 bp, Artificial Sequence
  Synthetic oligonucleotide
taagacgaacggtctaagcgagtagagaac

SEQ ID NO: 29348 - DNA, 30 bp, Artificial Sequence
  Synthetic oligonucleotide
ggaaagataatagtgaagcagtgttagaac

SEQ ID NO: 29349 - DNA, 30 bp, Artificial Sequence
  Synthetic oligonucleotide
cagaagatcaaggaggagatggcctcgaac

SEQ ID NO: 29350 - DNA, 31 bp, Artificial Sequence
  Synthetic oligonucleotide
tcaagggtggaaatttccgcgacaagtgaac

SEQ ID NO: 29351 - DNA, 30 bp, Artificial Sequence
  Synthetic oligonucleotide
tggcgcatgatgaccgagttataagtgaac

SEQ ID NO: 29352 - DNA, 30 bp, Artificial Sequence
  Synthetic oligonucleotide
ggatacggggagtaaagattcgggcataac

SEQ ID NO: 29353 - DNA, 30 bp, Artificial Sequence
  Synthetic oligonucleotide
acgagaaatatcgaatggcttggaactaac

SEQ ID NO: 29354 - DNA, 30 bp, Artificial Sequence
  Synthetic oligonucleotide
gcatcagcacggaataaaggggatgctaac

SEQ ID NO: 29355 - DNA, 30 bp, Artificial Sequence
  Synthetic oligonucleotide
cggctaatgggatagcgacacccaattaac

SEQ ID NO: 29356 - DNA, 30 bp, Artificial Sequence
  Synthetic oligonucleotide
tggtgctaacgatcaaacagtgagattaac

SEQ ID NO: 29357 - DNA, 30 bp, Artificial Sequence
  Synthetic oligonucleotide
aggactcatttgggaagataaggtattaac

SEQ ID NO: 29358 - DNA, 30 bp, Artificial Sequence
  Synthetic oligonucleotide
tgaaattgatggaccaacaaccaacaacac

SEQ ID NO: 29359 - DNA, 30 bp, Artificial Sequence
  Synthetic oligonucleotide
ccgagaccaacgaaggatatgtgttaacac

SEQ ID NO: 29360 - DNA, 30 bp, Artificial Sequence
  Synthetic oligonucleotide
tggccattctgaggggagaaagagacacac

SEQ ID NO: 29361 - DNA, 30 bp, Artificial Sequence
  Synthetic oligonucleotide
caaggggcaggcttagtatgagcagcacac

SEQ ID NO: 29362 - DNA, 30 bp, Artificial Sequence
  Synthetic oligonucleotide
acgcgaggaaagaattccaagttcgcacac

SEQ ID NO: 29363 - DNA, 30 bp, Artificial Sequence
  Synthetic oligonucleotide
atatgtgagtggataagtaaaggtgcacac

SEQ ID NO: 29364 - DNA, 30 bp, Artificial Sequence
  Synthetic oligonucleotide
aggtcctagaagaggagctgaatgtcacac

SEQ ID NO: 29365 - DNA, 30 bp, Artificial Sequence
  Synthetic oligonucleotide
atgtacaagtgctacaatcaaaacagacac

SEQ ID NO: 29366 - DNA, 30 bp, Artificial Sequence
  Synthetic oligonucleotide
cgagggtcaggccctttcaaccgcgtacac

SEQ ID NO: 29367 - DNA, 26 bp, Artificial Sequence
  Synthetic oligonucleotide
tcaggcctcaaacaagtgtcgtacac

SEQ ID NO: 29368 - DNA, 30 bp, Artificial Sequence
  Synthetic oligonucleotide
tacgaagaaatgggatgtgaacttggccac

SEQ ID NO: 29369 - DNA, 31 bp, Artificial Sequence
  Synthetic oligonucleotide
cagagtactggaaaaacgttgaacctgccac

SEQ ID NO: 29370 - DNA, 30 bp, Artificial Sequence
  Synthetic oligonucleotide
cgacagaatgtcccgataaataaccagcac

SEQ ID NO: 29371 - DNA, 30 bp, Artificial Sequence
  Synthetic oligonucleotide
acgtcgaccaactctaaagctcgttagcac

SEQ ID NO: 29372 - DNA, 30 bp, Artificial Sequence
  Synthetic oligonucleotide
cgtgtaagcagcataacatatgctccgcac

SEQ ID NO: 29373 - DNA, 30 bp, Artificial Sequence
  Synthetic oligonucleotide
ggactcagcacggagtccgactcaaggcac

SEQ ID NO: 29374 - DNA, 30 bp, Artificial Sequence
  Synthetic oligonucleotide
ccaaacttgaggaacaagaacctatctcac

SEQ ID NO: 29375 - DNA, 30 bp, Artificial Sequence
  Synthetic oligonucleotide
aacgcaaaagaggcccagcaaacaggtcac

SEQ ID NO: 29376 - DNA, 30 bp, Artificial Sequence
  Synthetic oligonucleotide
gcctagagtagaccaaggaaggatggtcac

SEQ ID NO: 29377 - DNA, 30 bp, Artificial Sequence
  Synthetic oligonucleotide
cgaaaaacaacgattgttacatcgcttcac

SEQ ID NO: 29378 - DNA, 34 bp, Artificial Sequence
  Synthetic oligonucleotide
gatactagaacaccacgtgtccatcagaaaagac

SEQ ID NO: 29379 - DNA, 34 bp, Artificial Sequence
  Synthetic oligonucleotide
gatactagaccaccaagtttccatcagaaaagac

SEQ ID NO: 29380 - DNA, 34 bp, Artificial Sequence
  Synthetic oligonucleotide
gatactagaccaacacgtgtccatgagaaaagac

SEQ ID NO: 29381 - DNA, 30 bp, Artificial Sequence
  Synthetic oligonucleotide
cgccatatctgatcacaaggaatcgaagac

SEQ ID NO: 29382 - DNA, 30 bp, Artificial Sequence
  Synthetic oligonucleotide
tcaagagaataatgggttagtgcttaagac

SEQ ID NO: 29383 - DNA, 30 bp, Artificial Sequence
  Synthetic oligonucleotide
gtatccggcttggggaagggactaacagac

SEQ ID NO: 29384 - DNA, 30 bp, Artificial Sequence
  Synthetic oligonucleotide
ccgctgactaagtgatcagcaaaacgagac

SEQ ID NO: 29385 - DNA, 30 bp, Artificial Sequence
  Synthetic oligonucleotide
gatcacgtgagcactggatgccagggagac

SEQ ID NO: 29386 - DNA, 30 bp, Artificial Sequence
  Synthetic oligonucleotide
acaacaaatggctagaggaagcgcaacgac

SEQ ID NO: 29387 - DNA, 30 bp, Artificial Sequence
  Synthetic oligonucleotide
tgaccagggaagcggtatactccgaacgac

SEQ ID NO: 29388 - DNA, 30 bp, Artificial Sequence
  Synthetic oligonucleotide
tgaataggaagagagagatacaataacgac

SEQ ID NO: 29389 - DNA, 30 bp, Artificial Sequence
  Synthetic oligonucleotide
cttggaggacaatgtgaatttcagagcgac

SEQ ID NO: 29390 - DNA, 30 bp, Artificial Sequence
  Synthetic oligonucleotide
tggaatggaagacacttccgctcgatcgac

SEQ ID NO: 29391 - DNA, 30 bp, Artificial Sequence
  Synthetic oligonucleotide
gggtacgttggtcaataggagatactcgac

SEQ ID NO: 29392 - DNA, 30 bp, Artificial Sequence
  Synthetic oligonucleotide
cgggcccagttagtgcaagtagcgttcgac

SEQ ID NO: 29393 - DNA, 30 bp, Artificial Sequence
  Synthetic oligonucleotide
gcataatactaggccaggcatgcacaggac

SEQ ID NO: 29394 - DNA, 30 bp, Artificial Sequence
  Synthetic oligonucleotide
tgaaacgcggaaacagggcaagagcaggac

SEQ ID NO: 29395 - DNA, 30 bp, Artificial Sequence
  Synthetic oligonucleotide
tccttgcaagcgagggttgacatagaggac

SEQ ID NO: 29396 - DNA, 30 bp, Artificial Sequence
  Synthetic oligonucleotide
gtggggacttaggcgcgagagaagacggac

SEQ ID NO: 29397 - DNA, 30 bp, Artificial Sequence
  Synthetic oligonucleotide
tataaagagcaacgacatgctcaaagggac

SEQ ID NO: 29398 - DNA, 30 bp, Artificial Sequence
  Synthetic oligonucleotide
caactgtgacaggagaacgtcaccagggac

SEQ ID NO: 29399 - DNA, 30 bp, Artificial Sequence
  Synthetic oligonucleotide
atagtgcacgccaggttagcacagggggac

SEQ ID NO: 29400 - DNA, 30 bp, Artificial Sequence
  Synthetic oligonucleotide
cgtgtgacagagccctgaatgattcgtgac

SEQ ID NO: 29401 - DNA, 30 bp, Artificial Sequence
  Synthetic oligonucleotide
gtaactgacacgccaaaggcaagaggtgac

SEQ ID NO: 29402 - DNA, 30 bp, Artificial Sequence
  Synthetic oligonucleotide
tagcgaaacatcgaatttatagggaaatac

SEQ ID NO: 29403 - DNA, 30 bp, Artificial Sequence
  Synthetic oligonucleotide
agactaatcatccatcgaggccacgaatac

SEQ ID NO: 29404 - DNA, 30 bp, Artificial Sequence
  Synthetic oligonucleotide
ggaaactactattacggcaaaaacggatac

SEQ ID NO: 29405 - DNA, 30 bp, Artificial Sequence
  Synthetic oligonucleotide
cgcatgatacctaataagactcacgactac

SEQ ID NO: 29406 - DNA, 30 bp, Artificial Sequence
  Synthetic oligonucleotide
ataaaggaaggagtcaagagcgagagctac

SEQ ID NO: 29407 - DNA, 30 bp, Artificial Sequence
  Synthetic oligonucleotide
ggtgagcaaaggtggatacttagactctac

SEQ ID NO: 29408 - DNA, 30 bp, Artificial Sequence
  Synthetic oligonucleotide
gttgcacggctaggttagagttgcgagtac

SEQ ID NO: 29409 - DNA, 30 bp, Artificial Sequence
  Synthetic oligonucleotide
atgttagcgacatcggcacgacaggcgtac

SEQ ID NO: 29410 - DNA, 30 bp, Artificial Sequence
  Synthetic oligonucleotide
tgtcaaagcaaaaggcaaggtccatggtac

SEQ ID NO: 29411 - DNA, 30 bp, Artificial Sequence
  Synthetic oligonucleotide
cggatgtgaccaacgttaaaaccgaaaacc

SEQ ID NO: 29412 - DNA, 30 bp, Artificial Sequence
  Synthetic oligonucleotide
caccgacacaatgctaacgtcgaagaaacc

SEQ ID NO: 29413 - DNA, 30 bp, Artificial Sequence
  Synthetic oligonucleotide
aggatcgtgcaatactatagacattaaacc

SEQ ID NO: 29414 - DNA, 30 bp, Artificial Sequence
  Synthetic oligonucleotide
agggtccaagggaaacagtaggatgcaacc

SEQ ID NO: 29415 - DNA, 30 bp, Artificial Sequence
  Synthetic oligonucleotide
tcgaggtaagacccgtcgccatgtggaacc

SEQ ID NO: 29416 - DNA, 30 bp, Artificial Sequence
  Synthetic oligonucleotide
acgaatcaacacttacctctgagcataacc

SEQ ID NO: 29417 - DNA, 30 bp, Artificial Sequence
  Synthetic oligonucleotide
gaagaaagcggcaaacatatatcagtaacc

SEQ ID NO: 29418 - DNA, 30 bp, Artificial Sequence
  Synthetic oligonucleotide
agatcgctctgggcataggggatcttaacc

SEQ ID NO: 29419 - DNA, 30 bp, Artificial Sequence
  Synthetic oligonucleotide
ccgtaagataagttaggattagagcacacc

SEQ ID NO: 29420 - DNA, 31 bp, Artificial Sequence
  Synthetic oligonucleotide
cgaatgtcatgaccggaagagaggaagcacc

SEQ ID NO: 29421 - DNA, 30 bp, Artificial Sequence
  Synthetic oligonucleotide
ataagccgggccgggaagatgttgcgcacc

SEQ ID NO: 29422 - DNA, 30 bp, Artificial Sequence
  Synthetic oligonucleotide
ccacaaggagtgttatcgctgataaagacc

SEQ ID NO: 29423 - DNA, 30 bp, Artificial Sequence
  Synthetic oligonucleotide
accgacaatgagaggccacctgacgagacc

SEQ ID NO: 29424 - DNA, 30 bp, Artificial Sequence
  Synthetic oligonucleotide
cgtaccaacaacgccagcccagcagcgacc

SEQ ID NO: 29425 - DNA, 30 bp, Artificial Sequence
  Synthetic oligonucleotide
ctaggcaagggggtgcatgaacttcggacc

SEQ ID NO: 29426 - DNA, 30 bp, Artificial Sequence
  Synthetic oligonucleotide
tcgaccagatacgcgcaataacaatatacc

SEQ ID NO: 29427 - DNA, 30 bp, Artificial Sequence
  Synthetic oligonucleotide
ggatcaaacatgcgacactaaactaaaccc

SEQ ID NO: 29428 - DNA, 30 bp, Artificial Sequence
  Synthetic oligonucleotide
ggagagtacgtccgtatggcggtataaccc

SEQ ID NO: 29429 - DNA, 30 bp, Artificial Sequence
  Synthetic oligonucleotide
ttaacggacacacaggacagccagccaccc

SEQ ID NO: 29430 - DNA, 30 bp, Artificial Sequence
  Synthetic oligonucleotide
gcatagaatttaaaaaaagagggggcaccc

SEQ ID NO: 29431 - DNA, 30 bp, Artificial Sequence
  Synthetic oligonucleotide
acgggggatctgccaagacctgtgggaccc

SEQ ID NO: 29432 - DNA, 30 bp, Artificial Sequence
  Synthetic oligonucleotide
cttacacaggaaagacagagccctggaccc

SEQ ID NO: 29433 - DNA, 30 bp, Artificial Sequence
  Synthetic oligonucleotide
agaacaccttgaaaatgcatctccataccc

SEQ ID NO: 29434 - DNA, 30 bp, Artificial Sequence
  Synthetic oligonucleotide
cgaggggtccgagtcatctatatgttaccc

SEQ ID NO: 29435 - DNA, 30 bp, Artificial Sequence
  Synthetic oligonucleotide
taaggtagcgtatacaaaaggcccaagccc

SEQ ID NO: 29436 - DNA, 30 bp, Artificial Sequence
  Synthetic oligonucleotide
acgggaggtgtcaattcatcgagtgctccc

SEQ ID NO: 29437 - DNA, 30 bp, Artificial Sequence
  Synthetic oligonucleotide
ctgagagcggaacaaatgtctgcgcgtccc

SEQ ID NO: 29438 - DNA, 30 bp, Artificial Sequence
  Synthetic oligonucleotide
gtaggaggccttggcacgatgaacggtccc

SEQ ID NO: 29439 - DNA, 30 bp, Artificial Sequence
  Synthetic oligonucleotide
aaagggtataaaagcgaggccatacaagcc

SEQ ID NO: 29440 - DNA, 30 bp, Artificial Sequence
  Synthetic oligonucleotide
cgccgtgaatttagaacacagtgataagcc

SEQ ID NO: 29441 - DNA, 30 bp, Artificial Sequence
  Synthetic oligonucleotide
gcgactacgaggcccatctaaaactgagcc

SEQ ID NO: 29442 - DNA, 30 bp, Artificial Sequence
  Synthetic oligonucleotide
tcgcgaataggatcagacactcggttagcc

SEQ ID NO: 29443 - DNA, 30 bp, Artificial Sequence
  Synthetic oligonucleotide
tcgtacttggaagagtaagccgtctacgcc

SEQ ID NO: 29444 - DNA, 30 bp, Artificial Sequence
  Synthetic oligonucleotide
acacatcacgagaaaacatggataatcgcc

SEQ ID NO: 29445 - DNA, 30 bp, Artificial Sequence
  Synthetic oligonucleotide
cctaaatccggcccaatcaatgagctcgcc

SEQ ID NO: 29446 - DNA, 30 bp, Artificial Sequence
  Synthetic oligonucleotide
aactggatgcgaaatcgtctgccattcgcc

SEQ ID NO: 29447 - DNA, 30 bp, Artificial Sequence
  Synthetic oligonucleotide
agggactaagactacatgattgaacaggcc

SEQ ID NO: 29448 - DNA, 30 bp, Artificial Sequence
  Synthetic oligonucleotide
acgaggaaaggatggtgaaaagcaacggcc

SEQ ID NO: 29449 - DNA, 30 bp, Artificial Sequence
  Synthetic oligonucleotide
tgtagacaaagtgtgtacagggatgtggcc

SEQ ID NO: 29450 - DNA, 30 bp, Artificial Sequence
  Synthetic oligonucleotide
gcgggaccaccagtggggatctgaacatcc

SEQ ID NO: 29451 - DNA, 30 bp, Artificial Sequence
  Synthetic oligonucleotide
atgtgtatgggacaatgctatatctgatcc

SEQ ID NO: 29452 - DNA, 30 bp, Artificial Sequence
  Synthetic oligonucleotide
acggtgggagagacgttagataccatctcc

SEQ ID NO: 29453 - DNA, 30 bp, Artificial Sequence
  Synthetic oligonucleotide
tcattacccaattgaacaagacaaaagtcc

SEQ ID NO: 29454 - DNA, 30 bp, Artificial Sequence
  Synthetic oligonucleotide
tcaaacatgagtagtagtggtaccgagtcc

SEQ ID NO: 29455 - DNA, 30 bp, Artificial Sequence
  Synthetic oligonucleotide
aggatgtcacgagcgtaatagttctagtcc

SEQ ID NO: 29456 - DNA, 30 bp, Artificial Sequence
  Synthetic oligonucleotide
acgtggggctcgcgcatgcggtagaggtcc

SEQ ID NO: 29457 - DNA, 30 bp, Artificial Sequence
  Synthetic oligonucleotide
cataacctagcacggaaactacggtaaagc

SEQ ID NO: 29458 - DNA, 30 bp, Artificial Sequence
  Synthetic oligonucleotide
acgggtgcctacggtagaggtctcacaagc

SEQ ID NO: 29459 - DNA, 30 bp, Artificial Sequence
  Synthetic oligonucleotide
cggagattcatgagacatgcaaggacaagc

SEQ ID NO: 29460 - DNA, 30 bp, Artificial Sequence
  Synthetic oligonucleotide
gaccaaatacgtccgaaggattacgcaagc

SEQ ID NO: 29461 - DNA, 30 bp, Artificial Sequence
  Synthetic oligonucleotide
tcaggggttggcacacagtgaagagacagc

SEQ ID NO: 29462 - DNA, 30 bp, Artificial Sequence
  Synthetic oligonucleotide
cacgcggatgcatcaataagggaatacagc

SEQ ID NO: 29463 - DNA, 30 bp, Artificial Sequence
  Synthetic oligonucleotide
gtagaaggaacgagggtctagcgaaagagc

SEQ ID NO: 29464 - DNA, 30 bp, Artificial Sequence
  Synthetic oligonucleotide
gtaaaatgtaaaaaactagctataaagagc

SEQ ID NO: 29465 - DNA, 30 bp, Artificial Sequence
  Synthetic oligonucleotide
acgttcagttctaacaagatcgcccagagc

SEQ ID NO: 29466 - DNA, 30 bp, Artificial Sequence
  Synthetic oligonucleotide
cctgactaagccctgccaagaacggagagc

SEQ ID NO: 29467 - DNA, 30 bp, Artificial Sequence
  Synthetic oligonucleotide
tgactccaggaccccggaacacgatcgagc

SEQ ID NO: 29468 - DNA, 30 bp, Artificial Sequence
  Synthetic oligonucleotide
agtgcatggggtaaataacttcgttcgagc

SEQ ID NO: 29469 - DNA, 30 bp, Artificial Sequence
  Synthetic oligonucleotide
ccaggtaggtagactattgtgatggtgagc

SEQ ID NO: 29470 - DNA, 30 bp, Artificial Sequence
  Synthetic oligonucleotide
aggcgcgggcaaaattgtgaatggaatagc

SEQ ID NO: 29471 - DNA, 30 bp, Artificial Sequence
  Synthetic oligonucleotide
ggaggggaagaaacggcgcacctaaaacgc

SEQ ID NO: 29472 - DNA, 30 bp, Artificial Sequence
  Synthetic oligonucleotide
cggagggttgaatacgatgagtagtaacgc

SEQ ID NO: 29473 - DNA, 30 bp, Artificial Sequence
  Synthetic oligonucleotide
gcgttcagcaccatgaatccagcgcaccgc

SEQ ID NO: 29474 - DNA, 30 bp, Artificial Sequence
  Synthetic oligonucleotide
agacggccaaggggcactatgtaataccgc

SEQ ID NO: 29475 - DNA, 30 bp, Artificial Sequence
  Synthetic oligonucleotide
gaagcaagaactaagtccgaattcacccgc

SEQ ID NO: 29476 - DNA, 30 bp, Artificial Sequence
  Synthetic oligonucleotide
agcaggatgctcaacgtgggcgatacccgc

SEQ ID NO: 29477 - DNA, 30 bp, Artificial Sequence
  Synthetic oligonucleotide
tgtgctgttgaagcataatgatcgtgccgc

SEQ ID NO: 29478 - DNA, 30 bp, Artificial Sequence
  Synthetic oligonucleotide
agctgaattcctcaggatatggagaagcgc

SEQ ID NO: 29479 - DNA, 30 bp, Artificial Sequence
  Synthetic oligonucleotide
atgaggatctctgacggtcggaatcagcgc

SEQ ID NO: 29480 - DNA, 30 bp, Artificial Sequence
  Synthetic oligonucleotide
tgtgaaaatcaacgaatagcgcagcggcgc

SEQ ID NO: 29481 - DNA, 30 bp, Artificial Sequence
  Synthetic oligonucleotide
cattgaggagatgagtaatcaaagatgcgc

SEQ ID NO: 29482 - DNA, 30 bp, Artificial Sequence
  Synthetic oligonucleotide
tgactgaagggaaacgtcgtgccaactcgc

SEQ ID NO: 29483 - DNA, 30 bp, Artificial Sequence
  Synthetic oligonucleotide
acgaaccgctctaagcaaccaattgctcgc

SEQ ID NO: 29484 - DNA, 30 bp, Artificial Sequence
  Synthetic oligonucleotide
attggcacaaaggataggagagaatctcgc

SEQ ID NO: 29485 - DNA, 30 bp, Artificial Sequence
  Synthetic oligonucleotide
acaggattgcccagaaaaggcagacgtcgc

SEQ ID NO: 29486 - DNA, 30 bp, Artificial Sequence
  Synthetic oligonucleotide
agtttagacaaagtacgagcacacgaaggc

SEQ ID NO: 29487 - DNA, 30 bp, Artificial Sequence
  Synthetic oligonucleotide
gtacaagcgtagcgagcgagtgttgaaggc

SEQ ID NO: 29488 - DNA, 30 bp, Artificial Sequence
  Synthetic oligonucleotide
gccggacaaaaccagccgaaaaactaaggc

SEQ ID NO: 29489 - DNA, 30 bp, Artificial Sequence
  Synthetic oligonucleotide
aagacatgtggtaagatactggcgtaaggc

SEQ ID NO: 29490 - DNA, 30 bp, Artificial Sequence
  Synthetic oligonucleotide
acaattaagaggttgaaagagaaaacaggc

SEQ ID NO: 29491 - DNA, 30 bp, Artificial Sequence
  Synthetic oligonucleotide
tgccaaaatgaatggttggagggtacaggc

SEQ ID NO: 29492 - DNA, 30 bp, Artificial Sequence
  Synthetic oligonucleotide
ggtaagctgtgcaacgaatgtgaagcaggc

SEQ ID NO: 29493 - DNA, 30 bp, Artificial Sequence
  Synthetic oligonucleotide
atcgagctgggacatgctagaagttcaggc

SEQ ID NO: 29494 - DNA, 30 bp, Artificial Sequence
  Synthetic oligonucleotide
acgatagagatgttgatcaggataagaggc

SEQ ID NO: 29495 - DNA, 30 bp, Artificial Sequence
  Synthetic oligonucleotide
ggttaagccgcgaagatagagtagagaggc

SEQ ID NO: 29496 - DNA, 30 bp, Artificial Sequence
  Synthetic oligonucleotide
accttaaggtacctaaccagggcgataggc

SEQ ID NO: 29497 - DNA, 30 bp, Artificial Sequence
  Synthetic oligonucleotide
acgtaagtcgacacgtcaaacataatcggc

SEQ ID NO: 29498 - DNA, 30 bp, Artificial Sequence
  Synthetic oligonucleotide
tcgacaggggcgaccgtgctccttcagggc

SEQ ID NO: 29499 - DNA, 30 bp, Artificial Sequence
  Synthetic oligonucleotide
ggagcgacactagcgcgatggaggtggggc

SEQ ID NO: 29500 - DNA, 30 bp, Artificial Sequence
  Synthetic oligonucleotide
agaggcgtatgccacgaaatgcattggggc

SEQ ID NO: 29501 - DNA, 30 bp, Artificial Sequence
  Synthetic oligonucleotide
acagaacaggctgactgcaaaatgcatggc

SEQ ID NO: 29502 - DNA, 30 bp, Artificial Sequence
  Synthetic oligonucleotide
agtagtagagccgaagacacgaaatatggc

SEQ ID NO: 29503 - DNA, 30 bp, Artificial Sequence
  Synthetic oligonucleotide
taccacagaagtgacataatcgccactggc

SEQ ID NO: 29504 - DNA, 30 bp, Artificial Sequence
  Synthetic oligonucleotide
gtcgcacaaatgagggcatgaagatctggc

SEQ ID NO: 29505 - DNA, 30 bp, Artificial Sequence
  Synthetic oligonucleotide
taggtgattacaggatgagtaaaagaatgc

SEQ ID NO: 29506 - DNA, 30 bp, Artificial Sequence
  Synthetic oligonucleotide
ggcaacgagtaaggtgggttaatttcatgc

SEQ ID NO: 29507 - DNA, 30 bp, Artificial Sequence
  Synthetic oligonucleotide
gcgtagaagactggaacacctgcgcactgc

SEQ ID NO: 29508 - DNA, 30 bp, Artificial Sequence
  Synthetic oligonucleotide
taagcaaactcgtaataggcacctaagtgc

SEQ ID NO: 29509 - DNA, 30 bp, Artificial Sequence
  Synthetic oligonucleotide
gaggaaggtgaagtgggcacacagacgtgc

SEQ ID NO: 29510 - DNA, 30 bp, Artificial Sequence
  Synthetic oligonucleotide
agagtgaggtggggatctaaaaattcgtgc

SEQ ID NO: 29511 - DNA, 30 bp, Artificial Sequence
  Synthetic oligonucleotide
tacgtgcaaaataaatggcctagttcgtgc

SEQ ID NO: 29512 - DNA, 30 bp, Artificial Sequence
  Synthetic oligonucleotide
tacgacgcgaataacgggatgtaaaggtgc

SEQ ID NO: 29513 - DNA, 30 bp, Artificial Sequence
  Synthetic oligonucleotide
acgctcagagagaccgaggcctgcatgtgc

SEQ ID NO: 29514 - DNA, 30 bp, Artificial Sequence
  Synthetic oligonucleotide
atgcgaaatccggccgacattcaatattgc

SEQ ID NO: 29515 - DNA, 30 bp, Artificial Sequence
  Synthetic oligonucleotide
ggcactgtaacgagggcgcgcgaaacttgc

SEQ ID NO: 29516 - DNA, 30 bp, Artificial Sequence
  Synthetic oligonucleotide
acagacaacttattaacagagtagctttgc

SEQ ID NO: 29517 - DNA, 30 bp, Artificial Sequence
  Synthetic oligonucleotide
tacacgggtagcgtgagaggtacagaaatc

SEQ ID NO: 29518 - DNA, 30 bp, Artificial Sequence
  Synthetic oligonucleotide
atcatgttgtaatttccatcgtgccgaatc

SEQ ID NO: 29519 - DNA, 30 bp, Artificial Sequence
  Synthetic oligonucleotide
agagcgtcagtcacaaggcttacaataatc

SEQ ID NO: 29520 - DNA, 31 bp, Artificial Sequence
  Synthetic oligonucleotide
tagacaacctattcgtatgccccgttacatc

SEQ ID NO: 29521 - DNA, 30 bp, Artificial Sequence
  Synthetic oligonucleotide
acgctgggagaggaatatccgtgacccatc

SEQ ID NO: 29522 - DNA, 30 bp, Artificial Sequence
  Synthetic oligonucleotide
aggtcattaaggcaaaggcacgatcgcatc

SEQ ID NO: 29523 - DNA, 30 bp, Artificial Sequence
  Synthetic oligonucleotide
acattgataggtctgaattcgtaatgcatc

SEQ ID NO: 29524 - DNA, 30 bp, Artificial Sequence
  Synthetic oligonucleotide
cactaacagatccataatgccagtatcatc

SEQ ID NO: 29525 - DNA, 30 bp, Artificial Sequence
  Synthetic oligonucleotide
agaagttgaggaaagtacgcgagaaagatc

SEQ ID NO: 29526 - DNA, 30 bp, Artificial Sequence
  Synthetic oligonucleotide
atgaagttggtaagtgaagctaatgggatc

SEQ ID NO: 29527 - DNA, 30 bp, Artificial Sequence
  Synthetic oligonucleotide
gaagaaggacaaattagcccgcggtggatc

SEQ ID NO: 29528 - DNA, 30 bp, Artificial Sequence
  Synthetic oligonucleotide
ggttccaaaaggggaaagtcaggactgatc

SEQ ID NO: 29529 - DNA, 30 bp, Artificial Sequence
  Synthetic oligonucleotide
atgggaggactgagcgcttcctgagtgatc

SEQ ID NO: 29530 - DNA, 30 bp, Artificial Sequence
  Synthetic oligonucleotide
aacgtgtaggggagactgagctgcgatatc

SEQ ID NO: 29531 - DNA, 30 bp, Artificial Sequence
  Synthetic oligonucleotide
tcaatatgagtcgaaatacaaggggctatc

SEQ ID NO: 29532 - DNA, 30 bp, Artificial Sequence
  Synthetic oligonucleotide
agagcgagtgcacatagaccgtaatctatc

SEQ ID NO: 29533 - DNA, 30 bp, Artificial Sequence
  Synthetic oligonucleotide
caccgaaggtacgatcttgggccgagtatc

SEQ ID NO: 29534 - DNA, 30 bp, Artificial Sequence
  Synthetic oligonucleotide
aaagagcatagagcggaagcgcagtttatc

SEQ ID NO: 29535 - DNA, 30 bp, Artificial Sequence
  Synthetic oligonucleotide
tcggtttgcgagaaacatagcagtacactc

SEQ ID NO: 29536 - DNA, 30 bp, Artificial Sequence
  Synthetic oligonucleotide
aatggcaaggagggatgcgcaacggtactc

SEQ ID NO: 29537 - DNA, 30 bp, Artificial Sequence
  Synthetic oligonucleotide
atcgtaagtgaaggacaagggtcgtacctc

SEQ ID NO: 29538 - DNA, 30 bp, Artificial Sequence
  Synthetic oligonucleotide
ggaaaaaactgaccctcgagaggcgtcctc

SEQ ID NO: 29539 - DNA, 30 bp, Artificial Sequence
  Synthetic oligonucleotide
cgcctgaaagcgctggaaatgttcgtcctc

SEQ ID NO: 29540 - DNA, 30 bp, Artificial Sequence
  Synthetic oligonucleotide
tcgtgggaaattgccaattccagcacgctc

SEQ ID NO: 29541 - DNA, 30 bp, Artificial Sequence
  Synthetic oligonucleotide
taaggggatcctaaggtactctaacggctc

SEQ ID NO: 29542 - DNA, 30 bp, Artificial Sequence
  Synthetic oligonucleotide
cagaagcgcggcgtgcgacaaaataatctc

SEQ ID NO: 29543 - DNA, 30 bp, Artificial Sequence
  Synthetic oligonucleotide
aggcctacgggacagcacactaagtatctc

SEQ ID NO: 29544 - DNA, 31 bp, Artificial Sequence
  Synthetic oligonucleotide
agacacgactacaactacgcaaactaaagtc

SEQ ID NO: 29545 - DNA, 30 bp, Artificial Sequence
  Synthetic oligonucleotide
taactagccccccatgaggaaaatgaagtc

SEQ ID NO: 29546 - DNA, 30 bp, Artificial Sequence
  Synthetic oligonucleotide
atggatcgtggggggaaaggaataccagtc

SEQ ID NO: 29547 - DNA, 30 bp, Artificial Sequence
  Synthetic oligonucleotide
gtggtgtaataagatgtccctcgagcagtc

SEQ ID NO: 29548 - DNA, 30 bp, Artificial Sequence
  Synthetic oligonucleotide
ggcaagaaccagtggggggacgtatcagtc

SEQ ID NO: 29549 - DNA, 30 bp, Artificial Sequence
  Synthetic oligonucleotide
atcagtgcagggatgagaatagcacgagtc

SEQ ID NO: 29550 - DNA, 30 bp, Artificial Sequence
  Synthetic oligonucleotide
actgatggttagtggtgtgttcagcgagtc

SEQ ID NO: 29551 - DNA, 30 bp, Artificial Sequence
  Synthetic oligonucleotide
aacgcgcatgccgatcaaagaatgggagtc

SEQ ID NO: 29552 - DNA, 30 bp, Artificial Sequence
  Synthetic oligonucleotide
actgcgaagatcgtatcacctatgctagtc

SEQ ID NO: 29553 - DNA, 30 bp, Artificial Sequence
  Synthetic oligonucleotide
agctcgatcgagcagaagaggcgagtagtc

SEQ ID NO: 29554 - DNA, 30 bp, Artificial Sequence
  Synthetic oligonucleotide
agctggtccaaggttggagccgagttagtc

SEQ ID NO: 29555 - DNA, 30 bp, Artificial Sequence
  Synthetic oligonucleotide
aggtcggtacaatagtagggtgaaaacgtc

SEQ ID NO: 29556 - DNA, 30 bp, Artificial Sequence
  Synthetic oligonucleotide
cgtgctgcgggtttatgcgaggagtacgtc

SEQ ID NO: 29557 - DNA, 30 bp, Artificial Sequence
  Synthetic oligonucleotide
cattcaatcgtcgatgctcgtactggcgtc

SEQ ID NO: 29558 - DNA, 30 bp, Artificial Sequence
  Synthetic oligonucleotide
gggagcatcaacacgctacgagatctcgtc

SEQ ID NO: 29559 - DNA, 30 bp, Artificial Sequence
  Synthetic oligonucleotide
tagctaggaagttatggaaagagtctcgtc

SEQ ID NO: 29560 - DNA, 30 bp, Artificial Sequence
  Synthetic oligonucleotide
cagtgtctataaaccgaatatgccgtcgtc

SEQ ID NO: 29561 - DNA, 30 bp, Artificial Sequence
  Synthetic oligonucleotide
agaatctaccgtgtccagcacggcgtcgtc

SEQ ID NO: 29562 - DNA, 31 bp, Artificial Sequence
  Synthetic oligonucleotide
gaggtccctagaagcgtgtatcgagcaggtc

SEQ ID NO: 29563 - DNA, 30 bp, Artificial Sequence
  Synthetic oligonucleotide
cgttatccgaaatgttgttgtgaggaggtc

SEQ ID NO: 29564 - DNA, 30 bp, Artificial Sequence
  Synthetic oligonucleotide
tagctaaacgtcaagagttaacaggcggtc

SEQ ID NO: 29565 - DNA, 30 bp, Artificial Sequence
  Synthetic oligonucleotide
cggccagttcttgcggaacaccagagggtc

SEQ ID NO: 29566 - DNA, 30 bp, Artificial Sequence
  Synthetic oligonucleotide
aggcacaactatgcgttccaaaaagatgtc

SEQ ID NO: 29567 - DNA, 30 bp, Artificial Sequence
  Synthetic oligonucleotide
cgatgaaataacgttcttaaacgcgctgtc

SEQ ID NO: 29568 - DNA, 30 bp, Artificial Sequence
  Synthetic oligonucleotide
atagcggctcaataaagagtaacgtctgtc

SEQ ID NO: 29569 - DNA, 30 bp, Artificial Sequence
  Synthetic oligonucleotide
aggtatctccgtaaggatgaccgaagtgtc

SEQ ID NO: 29570 - DNA, 30 bp, Artificial Sequence
  Synthetic oligonucleotide
acgtggaaattctctcgagaggaaggtgtc

SEQ ID NO: 29571 - DNA, 30 bp, Artificial Sequence
  Synthetic oligonucleotide
gcaggcggaccgagtgatacgtgtagattc

SEQ ID NO: 29572 - DNA, 30 bp, Artificial Sequence
  Synthetic oligonucleotide
ggatcaccataacggggtgtcgccggcttc

SEQ ID NO: 29573 - DNA, 30 bp, Artificial Sequence
  Synthetic oligonucleotide
ttagggaaacggggtggccgaaacaagttc

SEQ ID NO: 29574 - DNA, 30 bp, Artificial Sequence
  Synthetic oligonucleotide
cgaagtaccaaaagagaatcgcattagttc

SEQ ID NO: 29575 - DNA, 30 bp, Artificial Sequence
  Synthetic oligonucleotide
agagggggttggaagcccaggggagcgttc

SEQ ID NO: 29576 - DNA, 30 bp, Artificial Sequence
  Synthetic oligonucleotide
agctatgggcgtgggatagagagccggttc

SEQ ID NO: 29577 - DNA, 30 bp, Artificial Sequence
  Synthetic oligonucleotide
ttcctgacttcttgcttatttggtcatttc

SEQ ID NO: 29578 - DNA, 30 bp, Artificial Sequence
  Synthetic oligonucleotide
cgaacagtcatagggtggaaagtcattttc

SEQ ID NO: 29579 - DNA, 30 bp, Artificial Sequence
  Synthetic oligonucleotide
gtgggggacgcggagaaatcccaccaaaag

SEQ ID NO: 29580 - DNA, 30 bp, Artificial Sequence
  Synthetic oligonucleotide
cacgttcgactttagtacaatgcccaaaag

SEQ ID NO: 29581 - DNA, 30 bp, Artificial Sequence
  Synthetic oligonucleotide
tggcgggagagtgggccaattgcgcaaaag

SEQ ID NO: 29582 - DNA, 30 bp, Artificial Sequence
  Synthetic oligonucleotide
tgtaagacatacccggaataaattgaaaag

SEQ ID NO: 29583 - DNA, 30 bp, Artificial Sequence
  Synthetic oligonucleotide
ggacgagttgtcaagtgcttcatataaaag

SEQ ID NO: 29584 - DNA, 30 bp, Artificial Sequence
  Synthetic oligonucleotide
ccggactaagtgaccgaatgaacgtaaaag

SEQ ID NO: 29585 - DNA, 30 bp, Artificial Sequence
  Synthetic oligonucleotide
ggaggcctacgggaagaataacagacaaag

SEQ ID NO: 29586 - DNA, 30 bp, Artificial Sequence
  Synthetic oligonucleotide
gtgcaaaacggcaataataagaatagaaag

SEQ ID NO: 29587 - DNA, 30 bp, Artificial Sequence
  Synthetic oligonucleotide
gtgcgtgcggtgcgtttgagcagaggaaag

SEQ ID NO: 29588 - DNA, 30 bp, Artificial Sequence
  Synthetic oligonucleotide
gcgtgagatgtagtggcgcccgtcggaaag

SEQ ID NO: 29589 - DNA, 30 bp, Artificial Sequence
  Synthetic oligonucleotide
ggccggatatgttcgaatgataactgaaag

SEQ ID NO: 29590 - DNA, 30 bp, Artificial Sequence
  Synthetic oligonucleotide
actaagagctgttaggcgttaaacataaag

SEQ ID NO: 29591 - DNA, 30 bp, Artificial Sequence
  Synthetic oligonucleotide
cccttattgcacaggcatcaaacagtaaag

SEQ ID NO: 29592 - DNA, 30 bp, Artificial Sequence
  Synthetic oligonucleotide
tacgtaaatggtaagcgttagattgtaaag

SEQ ID NO: 29593 - DNA, 30 bp, Artificial Sequence
  Synthetic oligonucleotide
cgcaacttcacacacctagaataattaaag

SEQ ID NO: 29594 - DNA, 30 bp, Artificial Sequence
  Synthetic oligonucleotide
gtgctacggcgagtgtactaagcgttaaag

SEQ ID NO: 29595 - DNA, 30 bp, Artificial Sequence
  Synthetic oligonucleotide
tctggagatctgtgttacgccccgaacaag

SEQ ID NO: 29596 - DNA, 30 bp, Artificial Sequence
  Synthetic oligonucleotide
actgatatgcactttcaacatcagcacaag

SEQ ID NO: 29597 - DNA, 30 bp, Artificial Sequence
  Synthetic oligonucleotide
attcgactgaaaattaaacagcgtgccaag

SEQ ID NO: 29598 - DNA, 31 bp, Artificial Sequence
  Synthetic oligonucleotide
gtaactgcgaacaacaagtcactaatccaag

SEQ ID NO: 29599 - DNA, 30 bp, Artificial Sequence
  Synthetic oligonucleotide
tggaacaagattcgtgaccggtaatccaag

SEQ ID NO: 29600 - DNA, 30 bp, Artificial Sequence
  Synthetic oligonucleotide
acgcccacaatagagaaaaagctgtgcaag

SEQ ID NO: 29601 - DNA, 30 bp, Artificial Sequence
  Synthetic oligonucleotide
gcaacgagcccccagaattaacatctcaag

SEQ ID NO: 29602 - DNA, 30 bp, Artificial Sequence
  Synthetic oligonucleotide
gtagaactttaaaaaagcgtgagtgtcaag

SEQ ID NO: 29603 - DNA, 30 bp, Artificial Sequence
  Synthetic oligonucleotide
atcggtctgctcgaggtcgatatgaagaag

SEQ ID NO: 29604 - DNA, 30 bp, Artificial Sequence
  Synthetic oligonucleotide
agcttggaatcaacgctcaaggttaagaag

SEQ ID NO: 29605 - DNA, 30 bp, Artificial Sequence
  Synthetic oligonucleotide
agcacattggcagataggttaaaccagaag

SEQ ID NO: 29606 - DNA, 30 bp, Artificial Sequence
  Synthetic oligonucleotide
acgggagtcctcaacggaagatttcagaag

SEQ ID NO: 29607 - DNA, 30 bp, Artificial Sequence
  Synthetic oligonucleotide
catggaacctatgacaagaataggtagaag

SEQ ID NO: 29608 - DNA, 30 bp, Artificial Sequence
  Synthetic oligonucleotide
ttagtgaagaggcatcaggctggaacgaag

SEQ ID NO: 29609 - DNA, 30 bp, Artificial Sequence
  Synthetic oligonucleotide
gcaaagcacgaattaggatgaaaggcgaag

SEQ ID NO: 29610 - DNA, 30 bp, Artificial Sequence
  Synthetic oligonucleotide
atcggcacgtataccgttaggcctgcgaag

SEQ ID NO: 29611 - DNA, 30 bp, Artificial Sequence
  Synthetic oligonucleotide
gtaagcaatgtgcgagaggtgtgatcgaag

SEQ ID NO: 29612 - DNA, 30 bp, Artificial Sequence
  Synthetic oligonucleotide
acaaaacctaaaggtaaccatgcctcgaag

SEQ ID NO: 29613 - DNA, 30 bp, Artificial Sequence
  Synthetic oligonucleotide
tctgcggaaggtgacgaccttgcagggaag

SEQ ID NO: 29614 - DNA, 30 bp, Artificial Sequence
  Synthetic oligonucleotide
aacaggcaacgattacgagagatgtggaag

SEQ ID NO: 29615 - DNA, 30 bp, Artificial Sequence
  Synthetic oligonucleotide
gtggagaataatctgataggctcgctgaag

SEQ ID NO: 29616 - DNA, 30 bp, Artificial Sequence
  Synthetic oligonucleotide
ccgggttgggacattattgacagtcataag

SEQ ID NO: 29617 - DNA, 31 bp, Artificial Sequence
  Synthetic oligonucleotide
gtaaccgtatggctcatccgactaaactaag

SEQ ID NO: 29618 - DNA, 30 bp, Artificial Sequence
  Synthetic oligonucleotide
gctaaaaggggcaggcctgactaacctaag

SEQ ID NO: 29619 - DNA, 30 bp, Artificial Sequence
  Synthetic oligonucleotide
aggccaaggtcgcaattaatagatcctaag

SEQ ID NO: 29620 - DNA, 30 bp, Artificial Sequence
  Synthetic oligonucleotide
tgattgagcaagctaaaacagtgtcctaag

SEQ ID NO: 29621 - DNA, 30 bp, Artificial Sequence
  Synthetic oligonucleotide
gtcgggaatcccatatacccaatcgctaag

SEQ ID NO: 29622 - DNA, 30 bp, Artificial Sequence
  Synthetic oligonucleotide
cctgcttaatgccgaaaaccgcgtgctaag

SEQ ID NO: 29623 - DNA, 30 bp, Artificial Sequence
  Synthetic oligonucleotide
agcagcgtgaggggtgatggatgctctaag

SEQ ID NO: 29624 - DNA, 30 bp, Artificial Sequence
  Synthetic oligonucleotide
actagtacactcattctaaatcgaagtaag

SEQ ID NO: 29625 - DNA, 30 bp, Artificial Sequence
  Synthetic oligonucleotide
tccgggaggggttgagaagctgggagtaag

SEQ ID NO: 29626 - DNA, 29 bp, Artificial Sequence
  Synthetic oligonucleotide
agatgtcgactaattatagaggtagtaag

SEQ ID NO: 29627 - DNA, 30 bp, Artificial Sequence
  Synthetic oligonucleotide
cacacgactctacgagtatcagaccgtaag

SEQ ID NO: 29628 - DNA, 30 bp, Artificial Sequence
  Synthetic oligonucleotide
caagtcagaagagagcacaaccagggtaag

SEQ ID NO: 29629 - DNA, 30 bp, Artificial Sequence
  Synthetic oligonucleotide
agtagacagaaggtgcatttatctggtaag

SEQ ID NO: 29630 - DNA, 30 bp, Artificial Sequence
  Synthetic oligonucleotide
tcacgatccagtagaatggatcattgtaag

SEQ ID NO: 29631 - DNA, 30 bp, Artificial Sequence
  Synthetic oligonucleotide
ctagggagaagggaatgatccccaattaag

SEQ ID NO: 29632 - DNA, 30 bp, Artificial Sequence
  Synthetic oligonucleotide
atggcatcactggcacatggcatagttaag

SEQ ID NO: 29633 - DNA, 30 bp, Artificial Sequence
  Synthetic oligonucleotide
gagagtagctaaagagttaccgtgaaacag

SEQ ID NO: 29634 - DNA, 30 bp, Artificial Sequence
  Synthetic oligonucleotide
aaacgtggcctaggctactggcgtaaacag

SEQ ID NO: 29635 - DNA, 30 bp, Artificial Sequence
  Synthetic oligonucleotide
cgacaagccctgctgttgtaattagaacag

SEQ ID NO: 29636 - DNA, 30 bp, Artificial Sequence
  Synthetic oligonucleotide
acatcggacgggcaaggagtgggctaacag

SEQ ID NO: 29637 - DNA, 30 bp, Artificial Sequence
  Synthetic oligonucleotide
ggcaccacaaaggggaattggccttaacag

SEQ ID NO: 29638 - DNA, 30 bp, Artificial Sequence
  Synthetic oligonucleotide
gggatccaagcaggtgtggacagaacacag

SEQ ID NO: 29639 - DNA, 30 bp, Artificial Sequence
  Synthetic oligonucleotide
caaagagtgcagcctagtctcagaccacag

SEQ ID NO: 29640 - DNA, 30 bp, Artificial Sequence
  Synthetic oligonucleotide
tccgcccgaaatagacgaaaattgccacag

SEQ ID NO: 29641 - DNA, 30 bp, Artificial Sequence
  Synthetic oligonucleotide
acctgaccatcagcgcaaaccatcagacag

SEQ ID NO: 29642 - DNA, 30 bp, Artificial Sequence
  Synthetic oligonucleotide
acgtactgccagtgattaacggagagacag

SEQ ID NO: 29643 - DNA, 30 bp, Artificial Sequence
  Synthetic oligonucleotide
gcgagcagacggtaatcccgaattagacag

SEQ ID NO: 29644 - DNA, 30 bp, Artificial Sequence
  Synthetic oligonucleotide
ggggcacttagcctctgcgagctaggacag

SEQ ID NO: 29645 - DNA, 30 bp, Artificial Sequence
  Synthetic oligonucleotide
atggtatcacaaagggcatccagttgacag

SEQ ID NO: 29646 - DNA, 30 bp, Artificial Sequence
  Synthetic oligonucleotide
ctacgctgcaaggcagtgagacgagtacag

SEQ ID NO: 29647 - DNA, 30 bp, Artificial Sequence
  Synthetic oligonucleotide
ggccgcggcaaatagaacgacaagaaccag

SEQ ID NO: 29648 - DNA, 30 bp, Artificial Sequence
  Synthetic oligonucleotide
cgagagtccatgcgttaggcgatgaaccag

SEQ ID NO: 29649 - DNA, 30 bp, Artificial Sequence
  Synthetic oligonucleotide
aggtgaccataaagggtttgaacagaccag

SEQ ID NO: 29650 - DNA, 30 bp, Artificial Sequence
  Synthetic oligonucleotide
acggaaggatattcctttagaggtgaccag

SEQ ID NO: 29651 - DNA, 30 bp, Artificial Sequence
  Synthetic oligonucleotide
cacgaacgcacaaatacccgagactaccag

SEQ ID NO: 29652 - DNA, 30 bp, Artificial Sequence
  Synthetic oligonucleotide
ttcagagaaggcacccagaaaagctcccag

SEQ ID NO: 29653 - DNA, 30 bp, Artificial Sequence
  Synthetic oligonucleotide
ggtcaaggattgggaagtcgccgaggccag

SEQ ID NO: 29654 - DNA, 30 bp, Artificial Sequence
  Synthetic oligonucleotide
cggctaagtaaatcgacctttcccatccag

SEQ ID NO: 29655 - DNA, 30 bp, Artificial Sequence
  Synthetic oligonucleotide
tgagcgggagaagtgttcgggtagatccag

SEQ ID NO: 29656 - DNA, 30 bp, Artificial Sequence
  Synthetic oligonucleotide
tcgatccctctcaaaaggtgtgggctccag

SEQ ID NO: 29657 - DNA, 30 bp, Artificial Sequence
  Synthetic oligonucleotide
tctaggtcgtggcgaaggggagaaaagcag

SEQ ID NO: 29658 - DNA, 30 bp, Artificial Sequence
  Synthetic oligonucleotide
gggtagcaagccctaagaaaaaaccagcag

SEQ ID NO: 29659 - DNA, 30 bp, Artificial Sequence
  Synthetic oligonucleotide
cttaagagccataagactacatgagagcag

SEQ ID NO: 29660 - DNA, 30 bp, Artificial Sequence
  Synthetic oligonucleotide
atgggggtgatgtccaaagaacctgagcag

SEQ ID NO: 29661 - DNA, 30 bp, Artificial Sequence
  Synthetic oligonucleotide
ggagggaggagtccgtggaaccgaccgcag

SEQ ID NO: 29662 - DNA, 30 bp, Artificial Sequence
  Synthetic oligonucleotide
gcgatgctaaggagaacagtttaagcgcag

SEQ ID NO: 29663 - DNA, 30 bp, Artificial Sequence
  Synthetic oligonucleotide
ggcaaagagctttgagccacaaacaggcag

SEQ ID NO: 29664 - DNA, 30 bp, Artificial Sequence
  Synthetic oligonucleotide
agtcatttcaagcaaacgtaccatgtgcag

SEQ ID NO: 29665 - DNA, 40 bp, Artificial Sequence
  Synthetic oligonucleotide
aggtagatgtccagtgctcaaaccatacaaatgcttgcag

SEQ ID NO: 29666 - DNA, 30 bp, Artificial Sequence
  Synthetic oligonucleotide
atcgactgcgtgcgtataaacgtaaatcag

SEQ ID NO: 29667 - DNA, 30 bp, Artificial Sequence
  Synthetic oligonucleotide
caatcagaatcgtgaaggagtaggtatcag

SEQ ID NO: 29668 - DNA, 30 bp, Artificial Sequence
  Synthetic oligonucleotide
ggaaaccggaacggtcaccacccctctcag

SEQ ID NO: 29669 - DNA, 30 bp, Artificial Sequence
  Synthetic oligonucleotide
gggaactaggtaaatgacctctgtcgtcag

SEQ ID NO: 29670 - DNA, 30 bp, Artificial Sequence
  Synthetic oligonucleotide
aggtcggctgcttcgagtgcccgcgttcag

SEQ ID NO: 29671 - DNA, 30 bp, Artificial Sequence
  Synthetic oligonucleotide
gcgatatggtttaggagcgtcaaaaaagag

SEQ ID NO: 29672 - DNA, 30 bp, Artificial Sequence
  Synthetic oligonucleotide
ggcaataaccatgtctactaaatacaagag

SEQ ID NO: 29673 - DNA, 30 bp, Artificial Sequence
  Synthetic oligonucleotide
cgactaatggggtcggtgcggaggcaagag

SEQ ID NO: 29674 - DNA, 30 bp, Artificial Sequence
  Synthetic oligonucleotide
ggtactcggcaaggtcacgagggagaagag

SEQ ID NO: 29675 - DNA, 30 bp, Artificial Sequence
  Synthetic oligonucleotide
tcgccaagcggtctataaggcagcgaagag

SEQ ID NO: 29676 - DNA, 30 bp, Artificial Sequence
  Synthetic oligonucleotide
aagcagggaaactaaactgcgcgtacagag

SEQ ID NO: 29677 - DNA, 30 bp, Artificial Sequence
  Synthetic oligonucleotide
aatgacactcaacgaaaataagttgcagag

SEQ ID NO: 29678 - DNA, 30 bp, Artificial Sequence
  Synthetic oligonucleotide
agctagtatcgtgataagtgcgaacgagag

SEQ ID NO: 29679 - DNA, 30 bp, Artificial Sequence
  Synthetic oligonucleotide
gttcagcgagaagcgagctattaccgagag

SEQ ID NO: 29680 - DNA, 30 bp, Artificial Sequence
  Synthetic oligonucleotide
aagaatcgcgatgcggtccaacttggagag

SEQ ID NO: 29681 - DNA, 30 bp, Artificial Sequence
  Synthetic oligonucleotide
cacggagactcgcgttccctacgactagag

SEQ ID NO: 29682 - DNA, 30 bp, Artificial Sequence
  Synthetic oligonucleotide
caagaggacagaaaagcagagtagctagag

SEQ ID NO: 29683 - DNA, 30 bp, Artificial Sequence
  Synthetic oligonucleotide
cggccggattggcagtagaaaagcgtagag

SEQ ID NO: 29684 - DNA, 30 bp, Artificial Sequence
  Synthetic oligonucleotide
aagcgtcatgtggacgcaaggatggtagag

SEQ ID NO: 29685 - DNA, 30 bp, Artificial Sequence
  Synthetic oligonucleotide
gatcggtaagggaagataaggtcattagag

SEQ ID NO: 29686 - DNA, 30 bp, Artificial Sequence
  Synthetic oligonucleotide
ggttagcaatcgatgcaatgtaagttagag

SEQ ID NO: 29687 - DNA, 30 bp, Artificial Sequence
  Synthetic oligonucleotide
gccgtctctatgaataataccgagaacgag

SEQ ID NO: 29688 - DNA, 30 bp, Artificial Sequence
  Synthetic oligonucleotide
acatgggataaaggtcatgtgcaacacgag

SEQ ID NO: 29689 - DNA, 30 bp, Artificial Sequence
  Synthetic oligonucleotide
catagtaggaaaacgaataaagagcacgag

SEQ ID NO: 29690 - DNA, 30 bp, Artificial Sequence
  Synthetic oligonucleotide
cacattgtccgggatgtctgaccaaccgag

SEQ ID NO: 29691 - DNA, 30 bp, Artificial Sequence
  Synthetic oligonucleotide
cgcgtatggcaattttaatacgggaccgag

SEQ ID NO: 29692 - DNA, 30 bp, Artificial Sequence
  Synthetic oligonucleotide
tcgagtccacccgagcaacgtattcccgag

SEQ ID NO: 29693 - DNA, 30 bp, Artificial Sequence
  Synthetic oligonucleotide
cagatgctgatatattcgaaaatcgccgag

SEQ ID NO: 29694 - DNA, 30 bp, Artificial Sequence
  Synthetic oligonucleotide
ccagggaagggtaaaagaccgtgtgccgag

SEQ ID NO: 29695 - DNA, 30 bp, Artificial Sequence
  Synthetic oligonucleotide
caaatagaactgcgacaagtgcaaagcgag

SEQ ID NO: 29696 - DNA, 30 bp, Artificial Sequence
  Synthetic oligonucleotide
atgatatgtaagaggaacattaaacgcgag

SEQ ID NO: 29697 - DNA, 30 bp, Artificial Sequence
  Synthetic oligonucleotide
ataggatagaaggactcggtataacgcgag

SEQ ID NO: 29698 - DNA, 30 bp, Artificial Sequence
  Synthetic oligonucleotide
acagagatctcattccgacaatgtcgcgag

SEQ ID NO: 29699 - DNA, 30 bp, Artificial Sequence
  Synthetic oligonucleotide
agattaggatccccgctgatagaatgcgag

SEQ ID NO: 29700 - DNA, 30 bp, Artificial Sequence
  Synthetic oligonucleotide
ggaaagacgagttctgagcagtaatgcgag

SEQ ID NO: 29701 - DNA, 30 bp, Artificial Sequence
  Synthetic oligonucleotide
cgcgtgtcatgcagggtgcccgaaatcgag

SEQ ID NO: 29702 - DNA, 30 bp, Artificial Sequence
  Synthetic oligonucleotide
gtagatggaagtaaggagttttaaatcgag

SEQ ID NO: 29703 - DNA, 30 bp, Artificial Sequence
  Synthetic oligonucleotide
acattgaacagaatgacttttgcggtcgag

SEQ ID NO: 29704 - DNA, 30 bp, Artificial Sequence
  Synthetic oligonucleotide
tagaccaagtgtgtgcaaatatgattcgag

SEQ ID NO: 29705 - DNA, 30 bp, Artificial Sequence
  Synthetic oligonucleotide
gaacacacctcagggggtcgccgtttcgag

SEQ ID NO: 29706 - DNA, 30 bp, Artificial Sequence
  Synthetic oligonucleotide
cacaggagattgagcttggccaaacaggag

SEQ ID NO: 29707 - DNA, 30 bp, Artificial Sequence
  Synthetic oligonucleotide
cgacatacatagaatggtgcctgccaggag

SEQ ID NO: 29708 - DNA, 30 bp, Artificial Sequence
  Synthetic oligonucleotide
aaccgaaggtcgcgaatccaggctcaggag

SEQ ID NO: 29709 - DNA, 30 bp, Artificial Sequence
  Synthetic oligonucleotide
ccatcgcttatcgtgactaaacaagaggag

SEQ ID NO: 29710 - DNA, 30 bp, Artificial Sequence
  Synthetic oligonucleotide
caagagaataatatgggcgagagctaggag

SEQ ID NO: 29711 - DNA, 30 bp, Artificial Sequence
  Synthetic oligonucleotide
ggagtgctgtgacaggtaggatagtaggag

SEQ ID NO: 29712 - DNA, 30 bp, Artificial Sequence
  Synthetic oligonucleotide
tcccgcagagggaaccgttcgatgtaggag

SEQ ID NO: 29713 - DNA, 30 bp, Artificial Sequence
  Synthetic oligonucleotide
atcgattaatccctcacttaacacacggag

SEQ ID NO: 29714 - DNA, 30 bp, Artificial Sequence
  Synthetic oligonucleotide
ctaccgcaacgaccttgaagcgtagcggag

SEQ ID NO: 29715 - DNA, 30 bp, Artificial Sequence
  Synthetic oligonucleotide
taggtaacactcatggctcatggctcggag

SEQ ID NO: 29716 - DNA, 30 bp, Artificial Sequence
  Synthetic oligonucleotide
gcgccgtagcaatgcattaattagagggag

SEQ ID NO: 29717 - DNA, 30 bp, Artificial Sequence
  Synthetic oligonucleotide
tggatccgtcgaacaggatcgcttagggag

SEQ ID NO: 29718 - DNA, 30 bp, Artificial Sequence
  Synthetic oligonucleotide
actagggagactacgagagtattgcgggag

SEQ ID NO: 29719 - DNA, 30 bp, Artificial Sequence
  Synthetic oligonucleotide
cagatcagtgggccaagtcgacaatgggag

SEQ ID NO: 29720 - DNA, 30 bp, Artificial Sequence
  Synthetic oligonucleotide
atatgctgaagatcagcaggacatatggag

SEQ ID NO: 29721 - DNA, 30 bp, Artificial Sequence
  Synthetic oligonucleotide
acatgcagcatcggtcagtgatgcgtggag

SEQ ID NO: 29722 - DNA, 30 bp, Artificial Sequence
  Synthetic oligonucleotide
acccagagataaacccgagcggataatgag

SEQ ID NO: 29723 - DNA, 30 bp, Artificial Sequence
  Synthetic oligonucleotide
cggtaaccagtgtatgacatttttgatgag

SEQ ID NO: 29724 - DNA, 30 bp, Artificial Sequence
  Synthetic oligonucleotide
atacactggaataaggggtacatgactgag

SEQ ID NO: 29725 - DNA, 30 bp, Artificial Sequence
  Synthetic oligonucleotide
tggagacgggaaggaatacacatctctgag

SEQ ID NO: 29726 - DNA, 30 bp, Artificial Sequence
  Synthetic oligonucleotide
ctatcgggcgatcctggtaccggaagtgag

SEQ ID NO: 29727 - DNA, 30 bp, Artificial Sequence
  Synthetic oligonucleotide
aatcgacaccccgagacgtcctacattgag

SEQ ID NO: 29728 - DNA, 30 bp, Artificial Sequence
  Synthetic oligonucleotide
taaaggggtacacctgattccgagattgag

SEQ ID NO: 29729 - DNA, 30 bp, Artificial Sequence
  Synthetic oligonucleotide
gacggctaaaggctgatccgtcaggttgag

SEQ ID NO: 29730 - DNA, 30 bp, Artificial Sequence
  Synthetic oligonucleotide
agcaaattgtcagtaagaaccgagcaatag

SEQ ID NO: 29731 - DNA, 30 bp, Artificial Sequence
  Synthetic oligonucleotide
tcacgtgacagcggaaggggcaactaatag

SEQ ID NO: 29732 - DNA, 30 bp, Artificial Sequence
  Synthetic oligonucleotide
tcgggaggcggaggaaatacacgaacatag

SEQ ID NO: 29733 - DNA, 30 bp, Artificial Sequence
  Synthetic oligonucleotide
gaggattacatattcaggctaaagccatag

SEQ ID NO: 29734 - DNA, 30 bp, Artificial Sequence
  Synthetic oligonucleotide
ccgaaatcaaatgttggcgatgtgccatag

SEQ ID NO: 29735 - DNA, 30 bp, Artificial Sequence
  Synthetic oligonucleotide
atatcggaacttgattccacgaaggcatag

SEQ ID NO: 29736 - DNA, 30 bp, Artificial Sequence
  Synthetic oligonucleotide
cgaccaggataaactcggatacctagatag

SEQ ID NO: 29737 - DNA, 30 bp, Artificial Sequence
  Synthetic oligonucleotide
gtgtactcaaagtcgtacacgaggcgatag

SEQ ID NO: 29738 - DNA, 30 bp, Artificial Sequence
  Synthetic oligonucleotide
ggtagatacaaggcgggaagctaaggatag

SEQ ID NO: 29739 - DNA, 30 bp, Artificial Sequence
  Synthetic oligonucleotide
cgacggggaaggtaggccggaacgggatag

SEQ ID NO: 29740 - DNA, 30 bp, Artificial Sequence
  Synthetic oligonucleotide
tcggtaaaatcggaagatatacaactatag

SEQ ID NO: 29741 - DNA, 30 bp, Artificial Sequence
  Synthetic oligonucleotide
aacggcaagtagaatggccatggcctatag

SEQ ID NO: 29742 - DNA, 30 bp, Artificial Sequence
  Synthetic oligonucleotide
gaacggacactataaattaatgtgaactag

SEQ ID NO: 29743 - DNA, 30 bp, Artificial Sequence
  Synthetic oligonucleotide
ggctcaaaagcggtgctgggcccacactag

SEQ ID NO: 29744 - DNA, 30 bp, Artificial Sequence
  Synthetic oligonucleotide
tgatgaaggatagtagaaggtctcgactag

SEQ ID NO: 29745 - DNA, 30 bp, Artificial Sequence
  Synthetic oligonucleotide
gtcatggagggcagttaagcagaggactag

SEQ ID NO: 29746 - DNA, 30 bp, Artificial Sequence
  Synthetic oligonucleotide
cggtaaagtgattcataacaggaaccctag

SEQ ID NO: 29747 - DNA, 30 bp, Artificial Sequence
  Synthetic oligonucleotide
ccatggaggaaccgaaagaacgtaccctag

SEQ ID NO: 29748 - DNA, 30 bp, Artificial Sequence
  Synthetic oligonucleotide
ctacgttgtaataatacttgaacatcctag

SEQ ID NO: 29749 - DNA, 30 bp, Artificial Sequence
  Synthetic oligonucleotide
taaaagaatggcacgatagctataggctag

SEQ ID NO: 29750 - DNA, 30 bp, Artificial Sequence
  Synthetic oligonucleotide
ggtgacccgcaagatcgatctattggctag

SEQ ID NO: 29751 - DNA, 30 bp, Artificial Sequence
  Synthetic oligonucleotide
cgtactcccagcgtgaagcgcattatctag

SEQ ID NO: 29752 - DNA, 30 bp, Artificial Sequence
  Synthetic oligonucleotide
cacggatgagtgcacggtctacgagagtag

SEQ ID NO: 29753 - DNA, 30 bp, Artificial Sequence
  Synthetic oligonucleotide
caagagccgagtggagacggtgtagagtag

SEQ ID NO: 29754 - DNA, 30 bp, Artificial Sequence
  Synthetic oligonucleotide
cgggacttaacttacaatatcgtcgagtag

SEQ ID NO: 29755 - DNA, 30 bp, Artificial Sequence
  Synthetic oligonucleotide
tgggaattggtttggaggtcatcaacgtag

SEQ ID NO: 29756 - DNA, 30 bp, Artificial Sequence
  Synthetic oligonucleotide
acaccaatacatcactatggtcttacgtag

SEQ ID NO: 29757 - DNA, 31 bp, Artificial Sequence
  Synthetic oligonucleotide
gttggcagggaacggattagcataagcgtag

SEQ ID NO: 29758 - DNA, 30 bp, Artificial Sequence
  Synthetic oligonucleotide
cccatctgcaacatcacatgtagatcgtag

SEQ ID NO: 29759 - DNA, 30 bp, Artificial Sequence
  Synthetic oligonucleotide
cacaaatgaagacagaggctcggatcgtag

SEQ ID NO: 29760 - DNA, 30 bp, Artificial Sequence
  Synthetic oligonucleotide
tcagcgtatagacctaagaagtcctcgtag

SEQ ID NO: 29761 - DNA, 30 bp, Artificial Sequence
  Synthetic oligonucleotide
caagggggaggtgtaagatgtgatctgtag

SEQ ID NO: 29762 - DNA, 30 bp, Artificial Sequence
  Synthetic oligonucleotide
taggcatggattgccaacgatcctgtgtag

SEQ ID NO: 29763 - DNA, 30 bp, Artificial Sequence
  Synthetic oligonucleotide
tcagatgacgggggggcatatacgttgtag

SEQ ID NO: 29764 - DNA, 30 bp, Artificial Sequence
  Synthetic oligonucleotide
caaatacgaaaggcgaacgcattggattag

SEQ ID NO: 29765 - DNA, 30 bp, Artificial Sequence
  Synthetic oligonucleotide
agagggacatggattggtcgattatattag

SEQ ID NO: 29766 - DNA, 30 bp, Artificial Sequence
  Synthetic oligonucleotide
acggggacagttgtcgagggcagaacttag

SEQ ID NO: 29767 - DNA, 30 bp, Artificial Sequence
  Synthetic oligonucleotide
cgtacactggcaaactatacgcctccttag

SEQ ID NO: 29768 - DNA, 30 bp, Artificial Sequence
  Synthetic oligonucleotide
cgtcgaggagtacattcgggacatagttag

SEQ ID NO: 29769 - DNA, 30 bp, Artificial Sequence
  Synthetic oligonucleotide
taggacatgcccctagacatgaaccgttag

SEQ ID NO: 29770 - DNA, 29 bp, Artificial Sequence
  Synthetic oligonucleotide
tgagcagggggttgcaagatctcggttag

SEQ ID NO: 29771 - DNA, 30 bp, Artificial Sequence
  Synthetic oligonucleotide
tgcgacgtgtagaagggcatgactgtttag

SEQ ID NO: 29772 - DNA, 30 bp, Artificial Sequence
  Synthetic oligonucleotide
tcgagctagcggcatggatgtgcacaaacg

SEQ ID NO: 29773 - DNA, 30 bp, Artificial Sequence
  Synthetic oligonucleotide
caggaaccagggtctccatgctcggaaacg

SEQ ID NO: 29774 - DNA, 30 bp, Artificial Sequence
  Synthetic oligonucleotide
caggaaaaggggcgatggatcagtccaacg

SEQ ID NO: 29775 - DNA, 30 bp, Artificial Sequence
  Synthetic oligonucleotide
cgagactagccctactacggccgatcaacg

SEQ ID NO: 29776 - DNA, 30 bp, Artificial Sequence
  Synthetic oligonucleotide
aacaactcagaattcactagaacaagaacg

SEQ ID NO: 29777 - DNA, 30 bp, Artificial Sequence
  Synthetic oligonucleotide
tggacaaccccagtaaacagtctcagaacg

SEQ ID NO: 29778 - DNA, 30 bp, Artificial Sequence
  Synthetic oligonucleotide
tcaagggcacgttgttgagccgaccgaacg

SEQ ID NO: 29779 - DNA, 30 bp, Artificial Sequence
  Synthetic oligonucleotide
caatgcggcgagagagttcatgcccgaacg

SEQ ID NO: 29780 - DNA, 30 bp, Artificial Sequence
  Synthetic oligonucleotide
agaagatgccctgggatagagagccgaacg

SEQ ID NO: 29781 - DNA, 30 bp, Artificial Sequence
  Synthetic oligonucleotide
tactagaccctaagccgatggaagcgaacg

SEQ ID NO: 29782 - DNA, 30 bp, Artificial Sequence
  Synthetic oligonucleotide
cgaactggcatcggagtaagaacgggaacg

SEQ ID NO: 29783 - DNA, 30 bp, Artificial Sequence
  Synthetic oligonucleotide
ttaacgcgccagacgacttgagattgaacg

SEQ ID NO: 29784 - DNA, 30 bp, Artificial Sequence
  Synthetic oligonucleotide
cggtatagtataagcgaaagccatataacg

SEQ ID NO: 29785 - DNA, 30 bp, Artificial Sequence
  Synthetic oligonucleotide
gagacggggtgaagtaactgggtcgtaacg

SEQ ID NO: 29786 - DNA, 30 bp, Artificial Sequence
  Synthetic oligonucleotide
tgcgatctccgagctagggaataggtaacg

SEQ ID NO: 29787 - DNA, 30 bp, Artificial Sequence
  Synthetic oligonucleotide
ggatgacaggcatcaagattcagtgtaacg

SEQ ID NO: 29788 - DNA, 30 bp, Artificial Sequence
  Synthetic oligonucleotide
catcgatatctagacgaatccatcaacacg

SEQ ID NO: 29789 - DNA, 30 bp, Artificial Sequence
  Synthetic oligonucleotide
ccgagcacatagaactatcagcaacacacg

SEQ ID NO: 29790 - DNA, 30 bp, Artificial Sequence
  Synthetic oligonucleotide
cagtcaactcgactaaaacggcgccacacg

SEQ ID NO: 29791 - DNA, 30 bp, Artificial Sequence
  Synthetic oligonucleotide
cggtcatgagcaaaccgtgtacgttacacg

SEQ ID NO: 29792 - DNA, 30 bp, Artificial Sequence
  Synthetic oligonucleotide
gggcagaagcagagagccatagaccccacg

SEQ ID NO: 29793 - DNA, 30 bp, Artificial Sequence
  Synthetic oligonucleotide
ggcaatgcgtactggaattcacagcccacg

SEQ ID NO: 29794 - DNA, 30 bp, Artificial Sequence
  Synthetic oligonucleotide
aaataggccaatgaaaaggtggaagccacg

SEQ ID NO: 29795 - DNA, 30 bp, Artificial Sequence
  Synthetic oligonucleotide
gcgtcgagggaacgcgagtggcaggccacg

SEQ ID NO: 29796 - DNA, 30 bp, Artificial Sequence
  Synthetic oligonucleotide
gaacgaacacggaagaaccggcggatcacg

SEQ ID NO: 29797 - DNA, 30 bp, Artificial Sequence
  Synthetic oligonucleotide
ttgcggcagtgggggaaggaccaattcacg

SEQ ID NO: 29798 - DNA, 30 bp, Artificial Sequence
  Synthetic oligonucleotide
tcgcaaccgaaaatacgtgtcaaaaagacg

SEQ ID NO: 29799 - DNA, 30 bp, Artificial Sequence
  Synthetic oligonucleotide
acaggagatgagtgtgctgctcaaaagacg

SEQ ID NO: 29800 - DNA, 30 bp, Artificial Sequence
  Synthetic oligonucleotide
tcagtgaggggtaggcacagaggtcagacg

SEQ ID NO: 29801 - DNA, 30 bp, Artificial Sequence
  Synthetic oligonucleotide
tgccgactaatgcggatcgcgcgagagacg

SEQ ID NO: 29802 - DNA, 30 bp, Artificial Sequence
  Synthetic oligonucleotide
gggaagcctcagacaaatacatgcacgacg

SEQ ID NO: 29803 - DNA, 30 bp, Artificial Sequence
  Synthetic oligonucleotide
actgctgatgagagtgagtgatgagcgacg

SEQ ID NO: 29804 - DNA, 30 bp, Artificial Sequence
  Synthetic oligonucleotide
tctagaggtcgtgcgaagtgtaaggcgacg

SEQ ID NO: 29805 - DNA, 30 bp, Artificial Sequence
  Synthetic oligonucleotide
tacggacaggagaaatcctctgaatcgacg

SEQ ID NO: 29806 - DNA, 30 bp, Artificial Sequence
  Synthetic oligonucleotide
cagtacatacaaaaagagacgaaaatgacg

SEQ ID NO: 29807 - DNA, 30 bp, Artificial Sequence
  Synthetic oligonucleotide
aagggagtattatggtttgccgacaatacg

SEQ ID NO: 29808 - DNA, 30 bp, Artificial Sequence
  Synthetic oligonucleotide
tggagggacggtgggagggctatatatacg

SEQ ID NO: 29809 - DNA, 30 bp, Artificial Sequence
  Synthetic oligonucleotide
ggaagaccgttctgggtgggcaacgctacg

SEQ ID NO: 29810 - DNA, 30 bp, Artificial Sequence
  Synthetic oligonucleotide
tgagcaatagagtaaagtggccgacgtacg

SEQ ID NO: 29811 - DNA, 30 bp, Artificial Sequence
  Synthetic oligonucleotide
atgatacaagcaccagtgagtatgtgtacg

SEQ ID NO: 29812 - DNA, 30 bp, Artificial Sequence
  Synthetic oligonucleotide
acaactgctgatcagtactggagagttacg

SEQ ID NO: 29813 - DNA, 30 bp, Artificial Sequence
  Synthetic oligonucleotide
tgaacacgttaccatggagatgcccaaccg

SEQ ID NO: 29814 - DNA, 30 bp, Artificial Sequence
  Synthetic oligonucleotide
ccaagacaaaataaagggggcaacccaccg

SEQ ID NO: 29815 - DNA, 30 bp, Artificial Sequence
  Synthetic oligonucleotide
tgaattatacgatggtcgggggtgcgaccg

SEQ ID NO: 29816 - DNA, 30 bp, Artificial Sequence
  Synthetic oligonucleotide
cggctaaccgagaagtgcgggttcctaccg

SEQ ID NO: 29817 - DNA, 30 bp, Artificial Sequence
  Synthetic oligonucleotide
aacaatagagaggtaaaatacggattaccg

SEQ ID NO: 29818 - DNA, 30 bp, Artificial Sequence
  Synthetic oligonucleotide
ttaaccgaaagcaagcaaaggagtaacccg

SEQ ID NO: 29819 - DNA, 30 bp, Artificial Sequence
  Synthetic oligonucleotide
cggtatcgtcgtggaaattcagtcgacccg

SEQ ID NO: 29820 - DNA, 30 bp, Artificial Sequence
  Synthetic oligonucleotide
tgctaggcatagctacagcattatgacccg

SEQ ID NO: 29821 - DNA, 30 bp, Artificial Sequence
  Synthetic oligonucleotide
gaaagctggctataacgctcaaatcccccg

SEQ ID NO: 29822 - DNA, 30 bp, Artificial Sequence
  Synthetic oligonucleotide
ggggaaaggcaaagaacgcagtgagccccg

SEQ ID NO: 29823 - DNA, 30 bp, Artificial Sequence
  Synthetic oligonucleotide
caccgatatgtagtggacattgaaagcccg

SEQ ID NO: 29824 - DNA, 30 bp, Artificial Sequence
  Synthetic oligonucleotide
agtacgacaagtttgataggggatagcccg

SEQ ID NO: 29825 - DNA, 30 bp, Artificial Sequence
  Synthetic oligonucleotide
gaaaagggaagatacatgagggtccgcccg

SEQ ID NO: 29826 - DNA, 30 bp, Artificial Sequence
  Synthetic oligonucleotide
ggcgcgaacacagacacatctgacctcccg

SEQ ID NO: 29827 - DNA, 30 bp, Artificial Sequence
  Synthetic oligonucleotide
ccaagggcaatgcagtcgatgaccgtcccg

SEQ ID NO: 29828 - DNA, 30 bp, Artificial Sequence
  Synthetic oligonucleotide
gaccacgggctgaggggaaagaacgagccg

SEQ ID NO: 29829 - DNA, 30 bp, Artificial Sequence
  Synthetic oligonucleotide
tatcgtaacaagacggtgtgtgagtagccg

SEQ ID NO: 29830 - DNA, 30 bp, Artificial Sequence
  Synthetic oligonucleotide
gatagcctagaatcaaatgtacaatcgccg

SEQ ID NO: 29831 - DNA, 30 bp, Artificial Sequence
  Synthetic oligonucleotide
ctaaactcaggaaccgttaaaaaaaggccg

SEQ ID NO: 29832 - DNA, 30 bp, Artificial Sequence
  Synthetic oligonucleotide
ggtgaaggttgtaaagcgatcaaaaggccg

SEQ ID NO: 29833 - DNA, 30 bp, Artificial Sequence
  Synthetic oligonucleotide
acggagagtgaaagtatcgttggttggccg

SEQ ID NO: 29834 - DNA, 30 bp, Artificial Sequence
  Synthetic oligonucleotide
tagccccaatgcgtgagagcgtaacatccg

SEQ ID NO: 29835 - DNA, 30 bp, Artificial Sequence
  Synthetic oligonucleotide
cgttcccggggtggagcaatacaatgtccg

SEQ ID NO: 29836 - DNA, 30 bp, Artificial Sequence
  Synthetic oligonucleotide
acggtatcagcgcaactcgtcgagtgtccg

SEQ ID NO: 29837 - DNA, 30 bp, Artificial Sequence
  Synthetic oligonucleotide
acatagatcagataaggtggccaagttccg

SEQ ID NO: 29838 - DNA, 30 bp, Artificial Sequence
  Synthetic oligonucleotide
ctaaacgagggctgatggcttatcgaagcg

SEQ ID NO: 29839 - DNA, 30 bp, Artificial Sequence
  Synthetic oligonucleotide
aaagcattaagagttacgttaagtacagcg

SEQ ID NO: 29840 - DNA, 31 bp, Artificial Sequence
  Synthetic oligonucleotide
gaggcctgagatcgactaattgtggccagcg

SEQ ID NO: 29841 - DNA, 30 bp, Artificial Sequence
  Synthetic oligonucleotide
aggactgaggctataggagaagcttcagcg

SEQ ID NO: 29842 - DNA, 30 bp, Artificial Sequence
  Synthetic oligonucleotide
ggcgagagagaggcaaattcgtgttcagcg

SEQ ID NO: 29843 - DNA, 30 bp, Artificial Sequence
  Synthetic oligonucleotide
tcggcggatgcgccgggttgtaagagagcg

SEQ ID NO: 29844 - DNA, 30 bp, Artificial Sequence
  Synthetic oligonucleotide
ggcgatagggcgtcccaggccaaacgagcg

SEQ ID NO: 29845 - DNA, 30 bp, Artificial Sequence
  Synthetic oligonucleotide
gccgtcaaaacaaatataatagactgagcg

SEQ ID NO: 29846 - DNA, 30 bp, Artificial Sequence
  Synthetic oligonucleotide
agaaacagtaaatatgaacttggactagcg

SEQ ID NO: 29847 - DNA, 30 bp, Artificial Sequence
  Synthetic oligonucleotide
gttcgaaaaaattaagtaacccccgtagcg

SEQ ID NO: 29848 - DNA, 30 bp, Artificial Sequence
  Synthetic oligonucleotide
tggtggttcaacaaagcgccgatattagcg

SEQ ID NO: 29849 - DNA, 30 bp, Artificial Sequence
  Synthetic oligonucleotide
agcaccgaactcgggtggcagaatttagcg

SEQ ID NO: 29850 - DNA, 30 bp, Artificial Sequence
  Synthetic oligonucleotide
gtagatgaggagcagccaactaacgccgcg

SEQ ID NO: 29851 - DNA, 30 bp, Artificial Sequence
  Synthetic oligonucleotide
gggagtccataactgtccgccccaagcgcg

SEQ ID NO: 29852 - DNA, 30 bp, Artificial Sequence
  Synthetic oligonucleotide
tgttagataaggtcctacgaatcgtgcgcg

SEQ ID NO: 29853 - DNA, 30 bp, Artificial Sequence
  Synthetic oligonucleotide
tcggaacggagagatccatgggtgtgcgcg

SEQ ID NO: 29854 - DNA, 30 bp, Artificial Sequence
  Synthetic oligonucleotide
agtaccacagataaagagaaatggctcgcg

SEQ ID NO: 29855 - DNA, 30 bp, Artificial Sequence
  Synthetic oligonucleotide
gtgcatacaccaacagttcccagccaggcg

SEQ ID NO: 29856 - DNA, 30 bp, Artificial Sequence
  Synthetic oligonucleotide
ggtagcaaccaacggagggtgttccaggcg

SEQ ID NO: 29857 - DNA, 30 bp, Artificial Sequence
  Synthetic oligonucleotide
gtttagcgacacaaatagggttaatcggcg

SEQ ID NO: 29858 - DNA, 30 bp, Artificial Sequence
  Synthetic oligonucleotide
acactaacaatcgatctgaaaggcggggcg

SEQ ID NO: 29859 - DNA, 30 bp, Artificial Sequence
  Synthetic oligonucleotide
tggggactgacaaaatggcgaaatctggcg

SEQ ID NO: 29860 - DNA, 30 bp, Artificial Sequence
  Synthetic oligonucleotide
agggaccccgcaacgactgcgagcttggcg

SEQ ID NO: 29861 - DNA, 30 bp, Artificial Sequence
  Synthetic oligonucleotide
gtgacaagtgcctagaactttacgaatgcg

SEQ ID NO: 29862 - DNA, 30 bp, Artificial Sequence
  Synthetic oligonucleotide
ccattgggaaccgtaatacgaaaatatgcg

SEQ ID NO: 29863 - DNA, 30 bp, Artificial Sequence
  Synthetic oligonucleotide
cgtagatatctaggctccatgggacctgcg

SEQ ID NO: 29864 - DNA, 30 bp, Artificial Sequence
  Synthetic oligonucleotide
gaaggaattagaagttcagtgcggtctgcg

SEQ ID NO: 29865 - DNA, 30 bp, Artificial Sequence
  Synthetic oligonucleotide
tatctggaacgataacatgagcccagtgcg

SEQ ID NO: 29866 - DNA, 30 bp, Artificial Sequence
  Synthetic oligonucleotide
ctcacagcctgttgaaatcacccgagtgcg

SEQ ID NO: 29867 - DNA, 30 bp, Artificial Sequence
  Synthetic oligonucleotide
atatcggagggggaaggattagcccgtgcg

SEQ ID NO: 29868 - DNA, 30 bp, Artificial Sequence
  Synthetic oligonucleotide
cctggataggaggcattacatgacattgcg

SEQ ID NO: 29869 - DNA, 30 bp, Artificial Sequence
  Synthetic oligonucleotide
ttatgtgtaggttcactcctctaccttgcg

SEQ ID NO: 29870 - DNA, 30 bp, Artificial Sequence
  Synthetic oligonucleotide
cctggaggggcgggatagatccttgttgcg

SEQ ID NO: 29871 - DNA, 30 bp, Artificial Sequence
  Synthetic oligonucleotide
ccacgaataatttcgaacggatactaatcg

SEQ ID NO: 29872 - DNA, 30 bp, Artificial Sequence
  Synthetic oligonucleotide
ggattgcagtcggagaaaaaataaacatcg

SEQ ID NO: 29873 - DNA, 30 bp, Artificial Sequence
  Synthetic oligonucleotide
agacaacatatgcgcagtagcgtaccatcg

SEQ ID NO: 29874 - DNA, 30 bp, Artificial Sequence
  Synthetic oligonucleotide
acgaccggcggactgggaatatatccatcg

SEQ ID NO: 29875 - DNA, 30 bp, Artificial Sequence
  Synthetic oligonucleotide
agagtatgcgtggagtactacatccgatcg

SEQ ID NO: 29876 - DNA, 30 bp, Artificial Sequence
  Synthetic oligonucleotide
atgttcagaacctaatagtgtcacgactcg

SEQ ID NO: 29877 - DNA, 30 bp, Artificial Sequence
  Synthetic oligonucleotide
agtactcgaacgtgaccgtaggacgcctcg

SEQ ID NO: 29878 - DNA, 30 bp, Artificial Sequence
  Synthetic oligonucleotide
gcgtaaggactgagggaaccgtccgcctcg

SEQ ID NO: 29879 - DNA, 30 bp, Artificial Sequence
  Synthetic oligonucleotide
ccccaaagttgcgagtgtaagcagagctcg

SEQ ID NO: 29880 - DNA, 30 bp, Artificial Sequence
  Synthetic oligonucleotide
cgaattgcggaagctcacgacccgatctcg

SEQ ID NO: 29881 - DNA, 30 bp, Artificial Sequence
  Synthetic oligonucleotide
gagaacaatctttgtcaagaggaaaagtcg

SEQ ID NO: 29882 - DNA, 30 bp, Artificial Sequence
  Synthetic oligonucleotide
tgcgcatagggaaagtttcgtccgaagtcg

SEQ ID NO: 29883 - DNA, 30 bp, Artificial Sequence
  Synthetic oligonucleotide
cagggtctgacaagtaaggggtctgcgtcg

SEQ ID NO: 29884 - DNA, 30 bp, Artificial Sequence
  Synthetic oligonucleotide
aggattggcctcgccgcgataagatggtcg

SEQ ID NO: 29885 - DNA, 30 bp, Artificial Sequence
  Synthetic oligonucleotide
gtggacatggcgtcgttatgaatgttgtcg

SEQ ID NO: 29886 - DNA, 30 bp, Artificial Sequence
  Synthetic oligonucleotide
cagagtagggtgttagacaagagcagttcg

SEQ ID NO: 29887 - DNA, 30 bp, Artificial Sequence
  Synthetic oligonucleotide
aggcgtacaaggcaagtctcatgcagttcg

SEQ ID NO: 29888 - DNA, 30 bp, Artificial Sequence
  Synthetic oligonucleotide
aggccgagtgccatcaagcagtatcgttcg

SEQ ID NO: 29889 - DNA, 30 bp, Artificial Sequence
  Synthetic oligonucleotide
aagccatatgtgagggcggatcctcgttcg

SEQ ID NO: 29890 - DNA, 30 bp, Artificial Sequence
  Synthetic oligonucleotide
cacttcgtagaccaaggaaatggcaaaagg

SEQ ID NO: 29891 - DNA, 30 bp, Artificial Sequence
  Synthetic oligonucleotide
aagttagagtcagtggaaagttcgaaaagg

SEQ ID NO: 29892 - DNA, 30 bp, Artificial Sequence
  Synthetic oligonucleotide
tcaccgaacaacacctcggcaatacaaagg

SEQ ID NO: 29893 - DNA, 30 bp, Artificial Sequence
  Synthetic oligonucleotide
tcagtgcgagctagctagaggcaataaagg

SEQ ID NO: 29894 - DNA, 30 bp, Artificial Sequence
  Synthetic oligonucleotide
ctagatgggatagtcgatatcgagtaaagg

SEQ ID NO: 29895 - DNA, 30 bp, Artificial Sequence
  Synthetic oligonucleotide
cagctcagcgtaagtgtgtgcgcaagaagg

SEQ ID NO: 29896 - DNA, 30 bp, Artificial Sequence
  Synthetic oligonucleotide
taggaccatgagtatctggccgacagaagg

SEQ ID NO: 29897 - DNA, 30 bp, Artificial Sequence
  Synthetic oligonucleotide
taaggagccaaccgcatagccgatcgaagg

SEQ ID NO: 29898 - DNA, 30 bp, Artificial Sequence
  Synthetic oligonucleotide
aggccatgcaacggaattagacttcgaagg

SEQ ID NO: 29899 - DNA, 30 bp, Artificial Sequence
  Synthetic oligonucleotide
aggctgaaccggatggcaacaatgggaagg

SEQ ID NO: 29900 - DNA, 30 bp, Artificial Sequence
  Synthetic oligonucleotide
gtacggaagttatggacacatagaataagg

SEQ ID NO: 29901 - DNA, 30 bp, Artificial Sequence
  Synthetic oligonucleotide
accagatgatgtcgctaagtcaatgtaagg

SEQ ID NO: 29902 - DNA, 30 bp, Artificial Sequence
  Synthetic oligonucleotide
agagcagtgacaatcggcaagggattaagg

SEQ ID NO: 29903 - DNA, 30 bp, Artificial Sequence
  Synthetic oligonucleotide
gccagcaatggagagcatgttacaaacagg

SEQ ID NO: 29904 - DNA, 30 bp, Artificial Sequence
  Synthetic oligonucleotide
acaaaaccctccgtgaaacagtagaacagg

SEQ ID NO: 29905 - DNA, 30 bp, Artificial Sequence
  Synthetic oligonucleotide
cacaataagtgtcaaatagagtgtaacagg

SEQ ID NO: 29906 - DNA, 30 bp, Artificial Sequence
  Synthetic oligonucleotide
gcgagtgcaatctggtattggatagacagg

SEQ ID NO: 29907 - DNA, 30 bp, Artificial Sequence
  Synthetic oligonucleotide
cgagtacggcaaaagcacgataaggacagg

SEQ ID NO: 29908 - DNA, 30 bp, Artificial Sequence
  Synthetic oligonucleotide
aggaagcacaagaagttgcgcgacaccagg

SEQ ID NO: 29909 - DNA, 30 bp, Artificial Sequence
  Synthetic oligonucleotide
tatggaaattgttgaactaagtggcccagg

SEQ ID NO: 29910 - DNA, 30 bp, Artificial Sequence
  Synthetic oligonucleotide
agaaaacgatttgaggagtagacctccagg

SEQ ID NO: 29911 - DNA, 30 bp, Artificial Sequence
  Synthetic oligonucleotide
atatcgacaaccgtggaataaatgctcagg

SEQ ID NO: 29912 - DNA, 30 bp, Artificial Sequence
  Synthetic oligonucleotide
aagaaagtaagctaactgagtcatgtcagg

SEQ ID NO: 29913 - DNA, 30 bp, Artificial Sequence
  Synthetic oligonucleotide
cccattagcgtcgagactacgaagttcagg

SEQ ID NO: 29914 - DNA, 30 bp, Artificial Sequence
  Synthetic oligonucleotide
ataataaggatagactatcgctcgaagagg

SEQ ID NO: 29915 - DNA, 30 bp, Artificial Sequence
  Synthetic oligonucleotide
cttcacacgggagcgagttctaaacagagg

SEQ ID NO: 29916 - DNA, 30 bp, Artificial Sequence
  Synthetic oligonucleotide
cagcgcacagagatttgacggccacagagg

SEQ ID NO: 29917 - DNA, 30 bp, Artificial Sequence
  Synthetic oligonucleotide
atacgatgaagagacacgttgaaagagagg

SEQ ID NO: 29918 - DNA, 30 bp, Artificial Sequence
  Synthetic oligonucleotide
ccttgcaaagaacaaactgtaatctagagg

SEQ ID NO: 29919 - DNA, 30 bp, Artificial Sequence
  Synthetic oligonucleotide
gtctatatgcaatgacagtcaactgcgagg

SEQ ID NO: 29920 - DNA, 30 bp, Artificial Sequence
  Synthetic oligonucleotide
cgttcaacccccctcaaacaatggtcgagg

SEQ ID NO: 29921 - DNA, 30 bp, Artificial Sequence
  Synthetic oligonucleotide
cgagcgcatacccgtcagggtgaatggagg

SEQ ID NO: 29922 - DNA, 30 bp, Artificial Sequence
  Synthetic oligonucleotide
tgatgacctgcgggtgaactatgagtgagg

SEQ ID NO: 29923 - DNA, 30 bp, Artificial Sequence
  Synthetic oligonucleotide
aaggaacgatgtccaagtgaggttgtgagg

SEQ ID NO: 29924 - DNA, 30 bp, Artificial Sequence
  Synthetic oligonucleotide
gtccaaggaaagaatcgggcaaaaaatagg

SEQ ID NO: 29925 - DNA, 30 bp, Artificial Sequence
  Synthetic oligonucleotide
tagcgctaataggaatacacaccgactagg

SEQ ID NO: 29926 - DNA, 30 bp, Artificial Sequence
  Synthetic oligonucleotide
cacaaggagaagacacacgatcagcctagg

SEQ ID NO: 29927 - DNA, 30 bp, Artificial Sequence
  Synthetic oligonucleotide
gccacaaccataaaatgtgaagcgagtagg

SEQ ID NO: 29928 - DNA, 30 bp, Artificial Sequence
  Synthetic oligonucleotide
tagaacaagattgcggtgaagtagcaacgg

SEQ ID NO: 29929 - DNA, 30 bp, Artificial Sequence
  Synthetic oligonucleotide
caaggaaacggtacaggctacgctgaacgg

SEQ ID NO: 29930 - DNA, 30 bp, Artificial Sequence
  Synthetic oligonucleotide
atcggaagggcgccgaataacggaatacgg

SEQ ID NO: 29931 - DNA, 30 bp, Artificial Sequence
  Synthetic oligonucleotide
tgtaaggatcgaggtgccatcagactacgg

SEQ ID NO: 29932 - DNA, 30 bp, Artificial Sequence
  Synthetic oligonucleotide
acaagtgaaggtgcaaaactcggattacgg

SEQ ID NO: 29933 - DNA, 30 bp, Artificial Sequence
  Synthetic oligonucleotide
cgggcgagttagactgagcaagacgaccgg

SEQ ID NO: 29934 - DNA, 30 bp, Artificial Sequence
  Synthetic oligonucleotide
ccttcagcgaccacaacagcagtctaccgg

SEQ ID NO: 29935 - DNA, 30 bp, Artificial Sequence
  Synthetic oligonucleotide
aggcagcctatgagagcggtgagtgcccgg

SEQ ID NO: 29936 - DNA, 30 bp, Artificial Sequence
  Synthetic oligonucleotide
taggaaacccaactccaatcctgaagccgg

SEQ ID NO: 29937 - DNA, 30 bp, Artificial Sequence
  Synthetic oligonucleotide
ctcaaagcggtacatcaggtaacgagccgg

SEQ ID NO: 29938 - DNA, 30 bp, Artificial Sequence
  Synthetic oligonucleotide
gtaggaatggcctcgaacgtaagtaagcgg

SEQ ID NO: 29939 - DNA, 30 bp, Artificial Sequence
  Synthetic oligonucleotide
aagagtgccggaccccatgaggtagagcgg

SEQ ID NO: 29940 - DNA, 30 bp, Artificial Sequence
  Synthetic oligonucleotide
aagggaacagtatccctcctagataggcgg

SEQ ID NO: 29941 - DNA, 30 bp, Artificial Sequence
  Synthetic oligonucleotide
ggtcgaacggagaattgagtacgcgtgcgg

SEQ ID NO: 29942 - DNA, 30 bp, Artificial Sequence
  Synthetic oligonucleotide
atgcttagtgcggtaagaacagggaatcgg

SEQ ID NO: 29943 - DNA, 30 bp, Artificial Sequence
  Synthetic oligonucleotide
acatctacttaaggtctccgagcggctcgg

SEQ ID NO: 29944 - DNA, 30 bp, Artificial Sequence
  Synthetic oligonucleotide
cagacacgcgtattgactaaacgggctcgg

SEQ ID NO: 29945 - DNA, 30 bp, Artificial Sequence
  Synthetic oligonucleotide
tgagggtgaaattaatcgccaccttctcgg

SEQ ID NO: 29946 - DNA, 30 bp, Artificial Sequence
  Synthetic oligonucleotide
aggatacgtcactaaatttccgccagtcgg

SEQ ID NO: 29947 - DNA, 30 bp, Artificial Sequence
  Synthetic oligonucleotide
tgtctacgagatggaatagtcaggagtcgg

SEQ ID NO: 29948 - DNA, 30 bp, Artificial Sequence
  Synthetic oligonucleotide
acatcgtgtagattaaacaaggaagttcgg

SEQ ID NO: 29949 - DNA, 30 bp, Artificial Sequence
  Synthetic oligonucleotide
gagatgatgtttgaggtggttcgacaaggg

SEQ ID NO: 29950 - DNA, 30 bp, Artificial Sequence
  Synthetic oligonucleotide
cgagaggtcaaaagctcacaggtacaaggg

SEQ ID NO: 29951 - DNA, 30 bp, Artificial Sequence
  Synthetic oligonucleotide
cggttacagatacggtcaaaatattaaggg

SEQ ID NO: 29952 - DNA, 30 bp, Artificial Sequence
  Synthetic oligonucleotide
agacgtacacactttcgcttaaaaacaggg

SEQ ID NO: 29953 - DNA, 30 bp, Artificial Sequence
  Synthetic oligonucleotide
ccgagcgtctaggagtttattcacacaggg

SEQ ID NO: 29954 - DNA, 30 bp, Artificial Sequence
  Synthetic oligonucleotide
cggcccggaacaaagtatgtcaagacaggg

SEQ ID NO: 29955 - DNA, 30 bp, Artificial Sequence
  Synthetic oligonucleotide
tccagacacagattgatcacatacccaggg

SEQ ID NO: 29956 - DNA, 30 bp, Artificial Sequence
  Synthetic oligonucleotide
cctgcaccgaataaattgagtgcagcaggg

SEQ ID NO: 29957 - DNA, 30 bp, Artificial Sequence
  Synthetic oligonucleotide
aaaggagatccgtgtggaacaaaatcaggg

SEQ ID NO: 29958 - DNA, 30 bp, Artificial Sequence
  Synthetic oligonucleotide
ccatcgcccgtgaaaccatgactctcaggg

SEQ ID NO: 29959 - DNA, 30 bp, Artificial Sequence
  Synthetic oligonucleotide
aggcaagaggtaaccgagggggtacgaggg

SEQ ID NO: 29960 - DNA, 30 bp, Artificial Sequence
  Synthetic oligonucleotide
aatcaccgagattggacgaaaggaggaggg

SEQ ID NO: 29961 - DNA, 30 bp, Artificial Sequence
  Synthetic oligonucleotide
gtcaaccactaaagcgtatccagagtaggg

SEQ ID NO: 29962 - DNA, 30 bp, Artificial Sequence
  Synthetic oligonucleotide
cgtagtcgggcacctcggtctggagtaggg

SEQ ID NO: 29963 - DNA, 30 bp, Artificial Sequence
  Synthetic oligonucleotide
ccagagggctcattgctagatacatacggg

SEQ ID NO: 29964 - DNA, 30 bp, Artificial Sequence
  Synthetic oligonucleotide
acgctaacagggtgactagaacagtacggg

SEQ ID NO: 29965 - DNA, 31 bp, Artificial Sequence
  Synthetic oligonucleotide
aggtctacacgaatggccatgtggtcccggg

SEQ ID NO: 29966 - DNA, 30 bp, Artificial Sequence
  Synthetic oligonucleotide
acgcagaggtgttggatacgcctcgccggg

SEQ ID NO: 29967 - DNA, 30 bp, Artificial Sequence
  Synthetic oligonucleotide
actgagacgataggacaagtacctgtcggg

SEQ ID NO: 29968 - DNA, 30 bp, Artificial Sequence
  Synthetic oligonucleotide
ggctaaacaggagaaaggagtcaattcggg

SEQ ID NO: 29969 - DNA, 30 bp, Artificial Sequence
  Synthetic oligonucleotide
acctgcttacttcgtaacaagactgcgggg

SEQ ID NO: 29970 - DNA, 30 bp, Artificial Sequence
  Synthetic oligonucleotide
aaacgagggtctacattgtcgactgcgggg

SEQ ID NO: 29971 - DNA, 30 bp, Artificial Sequence
  Synthetic oligonucleotide
agaggcatccaaaaaacgcgaatatcgggg

SEQ ID NO: 29972 - DNA, 30 bp, Artificial Sequence
  Synthetic oligonucleotide
cgagctcccaggcgtctcgttagtaggggg

SEQ ID NO: 29973 - DNA, 30 bp, Artificial Sequence
  Synthetic oligonucleotide
cgtgataaagggtggtgttgccagatgggg

SEQ ID NO: 29974 - DNA, 30 bp, Artificial Sequence
  Synthetic oligonucleotide
ccgggtcgagccataacgatacaattgggg

SEQ ID NO: 29975 - DNA, 30 bp, Artificial Sequence
  Synthetic oligonucleotide
agaaccagaaaatcttacagggagttgggg

SEQ ID NO: 29976 - DNA, 30 bp, Artificial Sequence
  Synthetic oligonucleotide
taaggcaacatggactggtaatggttgggg

SEQ ID NO: 29977 - DNA, 30 bp, Artificial Sequence
  Synthetic oligonucleotide
catgaaggtcgcttgcggaaaaatgatggg

SEQ ID NO: 29978 - DNA, 30 bp, Artificial Sequence
  Synthetic oligonucleotide
cagacgtgtaatgactagagatctgatggg

SEQ ID NO: 29979 - DNA, 30 bp, Artificial Sequence
  Synthetic oligonucleotide
cggaagttgggcaggtacaaagcatatggg

SEQ ID NO: 29980 - DNA, 30 bp, Artificial Sequence
  Synthetic oligonucleotide
tcgtcagaatccttgggacattgaggtggg

SEQ ID NO: 29981 - DNA, 30 bp, Artificial Sequence
  Synthetic oligonucleotide
agcagaagaagcttgccgtaatcaattggg

SEQ ID NO: 29982 - DNA, 30 bp, Artificial Sequence
  Synthetic oligonucleotide
tacggcccctgcaaagaaggatggattggg

SEQ ID NO: 29983 - DNA, 30 bp, Artificial Sequence
  Synthetic oligonucleotide
tagtcaggagggacattaaaaagcgttggg

SEQ ID NO: 29984 - DNA, 30 bp, Artificial Sequence
  Synthetic oligonucleotide
taatgaccacctgacctgaaaaccaaatgg

SEQ ID NO: 29985 - DNA, 30 bp, Artificial Sequence
  Synthetic oligonucleotide
gggagaatggtcaatgggtagctcaaatgg

SEQ ID NO: 29986 - DNA, 30 bp, Artificial Sequence
  Synthetic oligonucleotide
ggtagcaactgatggtggttagtagaatgg

SEQ ID NO: 29987 - DNA, 30 bp, Artificial Sequence
  Synthetic oligonucleotide
ttacatgcgaaaactggacactaggaatgg

SEQ ID NO: 29988 - DNA, 30 bp, Artificial Sequence
  Synthetic oligonucleotide
aaataagaagaatcacaaggcgagacatgg

SEQ ID NO: 29989 - DNA, 40 bp, Artificial Sequence
  Synthetic oligonucleotide
cgagatcggcgcgttgaaccccgaaagttcgtcgccatgg

SEQ ID NO: 29990 - DNA, 30 bp, Artificial Sequence
  Synthetic oligonucleotide
tgctactgagagccctaaccgactagatgg

SEQ ID NO: 29991 - DNA, 30 bp, Artificial Sequence
  Synthetic oligonucleotide
aacatcggaggggaagggaacattggatgg

SEQ ID NO: 29992 - DNA, 30 bp, Artificial Sequence
  Synthetic oligonucleotide
cgcgctcgccggcatgcctgacaaatatgg

SEQ ID NO: 29993 - DNA, 30 bp, Artificial Sequence
  Synthetic oligonucleotide
cattaataggccgggcaaggtgaagtatgg

SEQ ID NO: 29994 - DNA, 30 bp, Artificial Sequence
  Synthetic oligonucleotide
tcgatgcgaaggcagtgaatagagtactgg

SEQ ID NO: 29995 - DNA, 30 bp, Artificial Sequence
  Synthetic oligonucleotide
tacgagcgtgggccgggcaaaatgtcctgg

SEQ ID NO: 29996 - DNA, 30 bp, Artificial Sequence
  Synthetic oligonucleotide
cgagagagcttccgagtacagcagtgctgg

SEQ ID NO: 29997 - DNA, 30 bp, Artificial Sequence
  Synthetic oligonucleotide
aatgtacggcaagagaaattaagcacgtgg

SEQ ID NO: 29998 - DNA, 30 bp, Artificial Sequence
  Synthetic oligonucleotide
aagaaggagaattgcggctgccaagcgtgg

SEQ ID NO: 29999 - DNA, 30 bp, Artificial Sequence
  Synthetic oligonucleotide
gtggacgagcgaataagacgatagatgtgg

SEQ ID NO: 30000 - DNA, 30 bp, Artificial Sequence
  Synthetic oligonucleotide
agcccagaaaaggttagatagtcacattgg

SEQ ID NO: 30001 - DNA, 30 bp, Artificial Sequence
  Synthetic oligonucleotide
acgcgcgaagtgtcgaagaccacctattgg

SEQ ID NO: 30002 - DNA, 30 bp, Artificial Sequence
  Synthetic oligonucleotide
ggagagagatcagttagtttggtaagttgg

SEQ ID NO: 30003 - DNA, 30 bp, Artificial Sequence
  Synthetic oligonucleotide
aggtaggtcatatgtagagaaagtagttgg

SEQ ID NO: 30004 - DNA, 30 bp, Artificial Sequence
  Synthetic oligonucleotide
taggggtactttcacgaagagacatgttgg

SEQ ID NO: 30005 - DNA, 30 bp, Artificial Sequence
  Synthetic oligonucleotide
agcgtatagtgagacaaaggaaagacaatg

SEQ ID NO: 30006 - DNA, 30 bp, Artificial Sequence
  Synthetic oligonucleotide
aagggactccgccgataataagggcgaatg

SEQ ID NO: 30007 - DNA, 30 bp, Artificial Sequence
  Synthetic oligonucleotide
gccgaatgaaatgccagagccaaaggaatg

SEQ ID NO: 30008 - DNA, 30 bp, Artificial Sequence
  Synthetic oligonucleotide
gggtgtagcgaaaggacctaaaagataatg

SEQ ID NO: 30009 - DNA, 30 bp, Artificial Sequence
  Synthetic oligonucleotide
tagcaagcgataccagtagagacagtaatg

SEQ ID NO: 30010 - DNA, 30 bp, Artificial Sequence
  Synthetic oligonucleotide
atcctcagcaaggatccgaaaaatgtaatg

SEQ ID NO: 30011 - DNA, 30 bp, Artificial Sequence
  Synthetic oligonucleotide
agggtatgttcaggacaagaatgtgtaatg

SEQ ID NO: 30012 - DNA, 30 bp, Artificial Sequence
  Synthetic oligonucleotide
ctaagtagacagaaagcattgccccacatg

SEQ ID NO: 30013 - DNA, 30 bp, Artificial Sequence
  Synthetic oligonucleotide
cggtctgcatgataaaggatccgcgacatg

SEQ ID NO: 30014 - DNA, 30 bp, Artificial Sequence
  Synthetic oligonucleotide
gtgtcgcaaggatgtccaaagttatacatg

SEQ ID NO: 30015 - DNA, 30 bp, Artificial Sequence
  Synthetic oligonucleotide
gggatcggtaaattgagatgtccacccatg

SEQ ID NO: 30016 - DNA, 30 bp, Artificial Sequence
  Synthetic oligonucleotide
ggagagctggttttgccggaaaatgccatg

SEQ ID NO: 30017 - DNA, 30 bp, Artificial Sequence
  Synthetic oligonucleotide
ggaaaatctgaatggaaagtgcctagcatg

SEQ ID NO: 30018 - DNA, 30 bp, Artificial Sequence
  Synthetic oligonucleotide
taaggcaggtcaaagtaagataagggcatg

SEQ ID NO: 30019 - DNA, 30 bp, Artificial Sequence
  Synthetic oligonucleotide
cacgtggtcagaaaagaatcgccgggcatg

SEQ ID NO: 30020 - DNA, 30 bp, Artificial Sequence
  Synthetic oligonucleotide
ggtccgaactattagacatccttgtgcatg

SEQ ID NO: 30021 - DNA, 30 bp, Artificial Sequence
  Synthetic oligonucleotide
agcggtagtcgcgtcacggacaacaagatg

SEQ ID NO: 30022 - DNA, 30 bp, Artificial Sequence
  Synthetic oligonucleotide
caatctgaacagagacacgaggtcaagatg

SEQ ID NO: 30023 - DNA, 30 bp, Artificial Sequence
  Synthetic oligonucleotide
cacggcatgctttaacctatgcagaagatg

SEQ ID NO: 30024 - DNA, 30 bp, Artificial Sequence
  Synthetic oligonucleotide
gcatgaccaggaaccgcaatcgttaagatg

SEQ ID NO: 30025 - DNA, 30 bp, Artificial Sequence
  Synthetic oligonucleotide
cgcataccagttcggtattctaaacagatg

SEQ ID NO: 30026 - DNA, 30 bp, Artificial Sequence
  Synthetic oligonucleotide
cggcgtacataaaaaactataagccagatg

SEQ ID NO: 30027 - DNA, 30 bp, Artificial Sequence
  Synthetic oligonucleotide
ggatgagttatgggagatggaatccagatg

SEQ ID NO: 30028 - DNA, 30 bp, Artificial Sequence
  Synthetic oligonucleotide
gggccgtcatagtcggtgtgtaaagagatg

SEQ ID NO: 30029 - DNA, 30 bp, Artificial Sequence
  Synthetic oligonucleotide
ggagaaccgcccgcttgagatcgcgagatg

SEQ ID NO: 30030 - DNA, 30 bp, Artificial Sequence
  Synthetic oligonucleotide
cgattacccggggatagttgagactagatg

SEQ ID NO: 30031 - DNA, 30 bp, Artificial Sequence
  Synthetic oligonucleotide
ccagggtaggttacccaaggacgaacgatg

SEQ ID NO: 30032 - DNA, 30 bp, Artificial Sequence
  Synthetic oligonucleotide
tcggacgaggcctgagctatgaaggcgatg

SEQ ID NO: 30033 - DNA, 30 bp, Artificial Sequence
  Synthetic oligonucleotide
aagcgtctcacaatactaccacgtcggatg

SEQ ID NO: 30034 - DNA, 30 bp, Artificial Sequence
  Synthetic oligonucleotide
agccaggacgatagtgatccaaaagggatg

SEQ ID NO: 30035 - DNA, 30 bp, Artificial Sequence
  Synthetic oligonucleotide
gatgaggaaagagacccgaggggttggatg

SEQ ID NO: 30036 - DNA, 30 bp, Artificial Sequence
  Synthetic oligonucleotide
agggtatatggtcattgggaacccatgatg

SEQ ID NO: 30037 - DNA, 30 bp, Artificial Sequence
  Synthetic oligonucleotide
ggagtaagcgtggtacagttacatttgatg

SEQ ID NO: 30038 - DNA, 30 bp, Artificial Sequence
  Synthetic oligonucleotide
aaacacaagggggcctggcggtaccatatg

SEQ ID NO: 30039 - DNA, 30 bp, Artificial Sequence
  Synthetic oligonucleotide
tcgataacatgagaaggatagatatatatg

SEQ ID NO: 30040 - DNA, 30 bp, Artificial Sequence
  Synthetic oligonucleotide
ggatagatcaactgcaagaacacttatatg

SEQ ID NO: 30041 - DNA, 30 bp, Artificial Sequence
  Synthetic oligonucleotide
acgctgtggtaagaccgggttcaggctatg

SEQ ID NO: 30042 - DNA, 30 bp, Artificial Sequence
  Synthetic oligonucleotide
ttcggacggatgaacaagagtagaagtatg

SEQ ID NO: 30043 - DNA, 30 bp, Artificial Sequence
  Synthetic oligonucleotide
aacgcccaaagcaggtaataaggctgtatg

SEQ ID NO: 30044 - DNA, 30 bp, Artificial Sequence
  Synthetic oligonucleotide
acagagaagggataaaccaatcggtgtatg

SEQ ID NO: 30045 - DNA, 30 bp, Artificial Sequence
  Synthetic oligonucleotide
tcagtgccgtcgtgattcggattgtttatg

SEQ ID NO: 30046 - DNA, 30 bp, Artificial Sequence
  Synthetic oligonucleotide
gcaaggcgaaacccgtcttttggtcaactg

SEQ ID NO: 30047 - DNA, 30 bp, Artificial Sequence
  Synthetic oligonucleotide
tgaggcaactacatgtatgccgtagaactg

SEQ ID NO: 30048 - DNA, 30 bp, Artificial Sequence
  Synthetic oligonucleotide
cgacgcccaatcggtcaacaaatcgaactg

SEQ ID NO: 30049 - DNA, 30 bp, Artificial Sequence
  Synthetic oligonucleotide
agatgaaatgacttaatctgacaatcactg

SEQ ID NO: 30050 - DNA, 30 bp, Artificial Sequence
  Synthetic oligonucleotide
caggaaccgcgataacacgtctagtcactg

SEQ ID NO: 30051 - DNA, 30 bp, Artificial Sequence
  Synthetic oligonucleotide
ggtaaccgaaaacgaagctcgtgacgactg

SEQ ID NO: 30052 - DNA, 30 bp, Artificial Sequence
  Synthetic oligonucleotide
aggcaaacccacctcagggtaatgcgactg

SEQ ID NO: 30053 - DNA, 30 bp, Artificial Sequence
  Synthetic oligonucleotide
tgcatgtgaaacgtgataagcgggggactg

SEQ ID NO: 30054 - DNA, 30 bp, Artificial Sequence
  Synthetic oligonucleotide
ctaattacgagggcggattaacaatgactg

SEQ ID NO: 30055 - DNA, 30 bp, Artificial Sequence
  Synthetic oligonucleotide
gcataccagccgttaggaggagaaatactg

SEQ ID NO: 30056 - DNA, 30 bp, Artificial Sequence
  Synthetic oligonucleotide
gtgcgtgcatagatgggggatgatctactg

SEQ ID NO: 30057 - DNA, 30 bp, Artificial Sequence
  Synthetic oligonucleotide
aggacaaaaagatcctcggctactcacctg

SEQ ID NO: 30058 - DNA, 30 bp, Artificial Sequence
  Synthetic oligonucleotide
aaggaccagagtgtaccacgaaatgacctg

SEQ ID NO: 30059 - DNA, 30 bp, Artificial Sequence
  Synthetic oligonucleotide
cctaagtcggagggtcacacgggatgcctg

SEQ ID NO: 30060 - DNA, 30 bp, Artificial Sequence
  Synthetic oligonucleotide
gaacgtcgttaacttaaccatcaagagctg

SEQ ID NO: 30061 - DNA, 30 bp, Artificial Sequence
  Synthetic oligonucleotide
gagacatgggtcaaggccagcgaatagctg

SEQ ID NO: 30062 - DNA, 30 bp, Artificial Sequence
  Synthetic oligonucleotide
aggagaggatgaggtactttgaatccgctg

SEQ ID NO: 30063 - DNA, 30 bp, Artificial Sequence
  Synthetic oligonucleotide
gccaggaacattaaacaagcaaatctgctg

SEQ ID NO: 30064 - DNA, 30 bp, Artificial Sequence
  Synthetic oligonucleotide
taaaggccatggccagcgaaaaaggtgctg

SEQ ID NO: 30065 - DNA, 30 bp, Artificial Sequence
  Synthetic oligonucleotide
cgaaaataggcacgagaaggccccgatctg

SEQ ID NO: 30066 - DNA, 30 bp, Artificial Sequence
  Synthetic oligonucleotide
gctgaagcgtggtcacgataatagcctctg

SEQ ID NO: 30067 - DNA, 30 bp, Artificial Sequence
  Synthetic oligonucleotide
caggtgtcgaggctacgaacgttgcgtctg

SEQ ID NO: 30068 - DNA, 30 bp, Artificial Sequence
  Synthetic oligonucleotide
agaagcaacgagatcgtcgaaggaggtctg

SEQ ID NO: 30069 - DNA, 29 bp, Artificial Sequence
  Synthetic oligonucleotide
tggggtaaccggacaaggaaaaccttctg

SEQ ID NO: 30070 - DNA, 30 bp, Artificial Sequence
  Synthetic oligonucleotide
ctagtagtctaccgcggactgagaaaagtg

SEQ ID NO: 30071 - DNA, 30 bp, Artificial Sequence
  Synthetic oligonucleotide
gaatcgacatgtgggagcgattgtaaagtg

SEQ ID NO: 30072 - DNA, 30 bp, Artificial Sequence
  Synthetic oligonucleotide
ggttgggactgatactcagatacggaagtg

SEQ ID NO: 30073 - DNA, 30 bp, Artificial Sequence
  Synthetic oligonucleotide
gcgcagtccgcctgcgcaacgaaaccagtg

SEQ ID NO: 30074 - DNA, 30 bp, Artificial Sequence
  Synthetic oligonucleotide
tctaacagcaatcaaccgaataccagagtg

SEQ ID NO: 30075 - DNA, 30 bp, Artificial Sequence
  Synthetic oligonucleotide
tggggatttgtgagcaaataagcgagagtg

SEQ ID NO: 30076 - DNA, 30 bp, Artificial Sequence
  Synthetic oligonucleotide
gcttggaaggatagtgcaaagggacgagtg

SEQ ID NO: 30077 - DNA, 30 bp, Artificial Sequence
  Synthetic oligonucleotide
gcgtggcgtgtcattgcactggagtgagtg

SEQ ID NO: 30078 - DNA, 30 bp, Artificial Sequence
  Synthetic oligonucleotide
agagatggggaatcctggcttcggtgagtg

SEQ ID NO: 30079 - DNA, 30 bp, Artificial Sequence
  Synthetic oligonucleotide
gcaggaagatacaaggaccgctccatagtg

SEQ ID NO: 30080 - DNA, 30 bp, Artificial Sequence
  Synthetic oligonucleotide
gacaagcaggcgcagagatccgacctagtg

SEQ ID NO: 30081 - DNA, 30 bp, Artificial Sequence
  Synthetic oligonucleotide
cggtcaaccagtgatagttaaatcctagtg

SEQ ID NO: 30082 - DNA, 30 bp, Artificial Sequence
  Synthetic oligonucleotide
catcaatacagaagttgtggtagggtagtg

SEQ ID NO: 30083 - DNA, 30 bp, Artificial Sequence
  Synthetic oligonucleotide
gggaaactaatggaatactacgacaacgtg

SEQ ID NO: 30084 - DNA, 30 bp, Artificial Sequence
  Synthetic oligonucleotide
cagcgcggaagtcctcattcgaatcccgtg

SEQ ID NO: 30085 - DNA, 30 bp, Artificial Sequence
  Synthetic oligonucleotide
catgtcggggctgcggtacataagaaggtg

SEQ ID NO: 30086 - DNA, 30 bp, Artificial Sequence
  Synthetic oligonucleotide
gggagccgaaggtagcaaatgccgaaggtg

SEQ ID NO: 30087 - DNA, 30 bp, Artificial Sequence
  Synthetic oligonucleotide
cagcttaatactacaggcgagggtaaggtg

SEQ ID NO: 30088 - DNA, 30 bp, Artificial Sequence
  Synthetic oligonucleotide
ggacgcgtctaaggtggctgatatgaggtg

SEQ ID NO: 30089 - DNA, 30 bp, Artificial Sequence
  Synthetic oligonucleotide
tgtagtacaactgcggtgcggaactaggtg

SEQ ID NO: 30090 - DNA, 30 bp, Artificial Sequence
  Synthetic oligonucleotide
ccatttagaggaagattgtaccatccggtg

SEQ ID NO: 30091 - DNA, 30 bp, Artificial Sequence
  Synthetic oligonucleotide
actcacacccgtcccaacgagaataatgtg

SEQ ID NO: 30092 - DNA, 30 bp, Artificial Sequence
  Synthetic oligonucleotide
cgtgcgaatgtcagacacatcgggactgtg

SEQ ID NO: 30093 - DNA, 30 bp, Artificial Sequence
  Synthetic oligonucleotide
taaggcaaaacgggcggtagtgtggctgtg

SEQ ID NO: 30094 - DNA, 30 bp, Artificial Sequence
  Synthetic oligonucleotide
tcgggcgactaaaaaaccgaaattggtgtg

SEQ ID NO: 30095 - DNA, 30 bp, Artificial Sequence
  Synthetic oligonucleotide
ccactataggagggctagacaaatattgtg

SEQ ID NO: 30096 - DNA, 30 bp, Artificial Sequence
  Synthetic oligonucleotide
cgaatcagatgtatgacaggtggatttgtg

SEQ ID NO: 30097 - DNA, 30 bp, Artificial Sequence
  Synthetic oligonucleotide
caccctagcgtaacaactgtcaacaaattg

SEQ ID NO: 30098 - DNA, 30 bp, Artificial Sequence
  Synthetic oligonucleotide
agcacaccacgccggaacataccctaattg

SEQ ID NO: 30099 - DNA, 30 bp, Artificial Sequence
  Synthetic oligonucleotide
tcggcgagaacggagttcgcctgctaattg

SEQ ID NO: 30100 - DNA, 30 bp, Artificial Sequence
  Synthetic oligonucleotide
cgcaagctaggagaccagaccgtgtaattg

SEQ ID NO: 30101 - DNA, 30 bp, Artificial Sequence
  Synthetic oligonucleotide
cacgtaaaatggtctttccacacaggattg

SEQ ID NO: 30102 - DNA, 30 bp, Artificial Sequence
  Synthetic oligonucleotide
taggaggatgaggctaacttaataggattg

SEQ ID NO: 30103 - DNA, 30 bp, Artificial Sequence
  Synthetic oligonucleotide
aggcgaaatgaggtaacacgcgttggattg

SEQ ID NO: 30104 - DNA, 30 bp, Artificial Sequence
  Synthetic oligonucleotide
accagagtccgcccgtccaaagactgattg

SEQ ID NO: 30105 - DNA, 30 bp, Artificial Sequence
  Synthetic oligonucleotide
agcgggaaaccaggagccctcgagaacttg

SEQ ID NO: 30106 - DNA, 30 bp, Artificial Sequence
  Synthetic oligonucleotide
tcacagggcatataaaggatcgacaccttg

SEQ ID NO: 30107 - DNA, 30 bp, Artificial Sequence
  Synthetic oligonucleotide
gtgccaaaaccaactcgctgatagaccttg

SEQ ID NO: 30108 - DNA, 30 bp, Artificial Sequence
  Synthetic oligonucleotide
gcaaataggactggtacaggaagaaagttg

SEQ ID NO: 30109 - DNA, 30 bp, Artificial Sequence
  Synthetic oligonucleotide
acgggagatccagtaggaatgttcgggttg

SEQ ID NO: 30110 - DNA, 30 bp, Artificial Sequence
  Synthetic oligonucleotide
cgtgatttaagatcctcgctagatgggttg

SEQ ID NO: 30111 - DNA, 30 bp, Artificial Sequence
  Synthetic oligonucleotide
aggaatcaaacacgaaggtttagtgggttg

SEQ ID NO: 30112 - DNA, 30 bp, Artificial Sequence
  Synthetic oligonucleotide
taggggcggaggcgctaaacgtccctgttg

SEQ ID NO: 30113 - DNA, 30 bp, Artificial Sequence
  Synthetic oligonucleotide
cacgatcgctcgataggaacctgcctgttg

SEQ ID NO: 30114 - DNA, 30 bp, Artificial Sequence
  Synthetic oligonucleotide
gcataagacatattgaaactgcaagatttg

SEQ ID NO: 30115 - DNA, 30 bp, Artificial Sequence
  Synthetic oligonucleotide
atagactagcctataatcaaagcgactttg

SEQ ID NO: 30116 - DNA, 30 bp, Artificial Sequence
  Synthetic oligonucleotide
agggaacgagggaatacttgtgatattttg

SEQ ID NO: 30117 - DNA, 30 bp, Artificial Sequence
  Synthetic oligonucleotide
taggactggaaactagccacaggcgaaaat

SEQ ID NO: 30118 - DNA, 30 bp, Artificial Sequence
  Synthetic oligonucleotide
tactggtctaaggccaagagaggcgaaaat

SEQ ID NO: 30119 - DNA, 30 bp, Artificial Sequence
  Synthetic oligonucleotide
atcctatacagacaccaggtgacgtaaaat

SEQ ID NO: 30120 - DNA, 30 bp, Artificial Sequence
  Synthetic oligonucleotide
cgagtctgtatcgaggtgggaggtccaaat

SEQ ID NO: 30121 - DNA, 30 bp, Artificial Sequence
  Synthetic oligonucleotide
cgggaagaacagctcatataagtagcaaat

SEQ ID NO: 30122 - DNA, 30 bp, Artificial Sequence
  Synthetic oligonucleotide
ggaaaagaggcatgtaacgaggaacgaaat

SEQ ID NO: 30123 - DNA, 30 bp, Artificial Sequence
  Synthetic oligonucleotide
gacggcgcagggtcgagatggatgcgaaat

SEQ ID NO: 30124 - DNA, 30 bp, Artificial Sequence
  Synthetic oligonucleotide
acgtcaacggataggtcttccgccttaaat

SEQ ID NO: 30125 - DNA, 30 bp, Artificial Sequence
  Synthetic oligonucleotide
agaaaagcggtgcgagaggcgaagaacaat

SEQ ID NO: 30126 - DNA, 30 bp, Artificial Sequence
  Synthetic oligonucleotide
tagcccgtgcgcgaaagtaagcttaacaat

SEQ ID NO: 30127 - DNA, 30 bp, Artificial Sequence
  Synthetic oligonucleotide
ggtacatgtatcgagcctacgaaatacaat

SEQ ID NO: 30128 - DNA, 30 bp, Artificial Sequence
  Synthetic oligonucleotide
caacgcgatcgaaactgtcggggatacaat

SEQ ID NO: 30129 - DNA, 30 bp, Artificial Sequence
  Synthetic oligonucleotide
cagcgaatcgaacatggacttaacaccaat

SEQ ID NO: 30130 - DNA, 30 bp, Artificial Sequence
  Synthetic oligonucleotide
gggccggtagaaacgtaagtcaacggcaat

SEQ ID NO: 30131 - DNA, 30 bp, Artificial Sequence
  Synthetic oligonucleotide
tccatagcgtaatcgcgacgggagggcaat

SEQ ID NO: 30132 - DNA, 30 bp, Artificial Sequence
  Synthetic oligonucleotide
gctaacacatggaaacaagttgacctcaat

SEQ ID NO: 30133 - DNA, 30 bp, Artificial Sequence
  Synthetic oligonucleotide
gctaggtagggatcccaagtcaacttcaat

SEQ ID NO: 30134 - DNA, 30 bp, Artificial Sequence
  Synthetic oligonucleotide
gaaaaaatagcattcggccaggcaacgaat

SEQ ID NO: 30135 - DNA, 30 bp, Artificial Sequence
  Synthetic oligonucleotide
actcgattcgagcagaccagcacaccgaat

SEQ ID NO: 30136 - DNA, 30 bp, Artificial Sequence
  Synthetic oligonucleotide
tcaaaccggtgaaacaagaggacagcgaat

SEQ ID NO: 30137 - DNA, 30 bp, Artificial Sequence
  Synthetic oligonucleotide
atggaatagggagactaagctttaatgaat

SEQ ID NO: 30138 - DNA, 30 bp, Artificial Sequence
  Synthetic oligonucleotide
cccaaatcggcgtgacgggcgtacgtgaat

SEQ ID NO: 30139 - DNA, 30 bp, Artificial Sequence
  Synthetic oligonucleotide
ggatggcactcagagacaatgcttgctaat

SEQ ID NO: 30140 - DNA, 30 bp, Artificial Sequence
  Synthetic oligonucleotide
ataggacgggggtaaaacagggatagtaat

SEQ ID NO: 30141 - DNA, 30 bp, Artificial Sequence
  Synthetic oligonucleotide
cgagctaatcagccgtaagtctagcgtaat

SEQ ID NO: 30142 - DNA, 30 bp, Artificial Sequence
  Synthetic oligonucleotide
taggattccaaacaagagtcagcagttaat

SEQ ID NO: 30143 - DNA, 30 bp, Artificial Sequence
  Synthetic oligonucleotide
aggcgcgctaggaaggcatatgataaacat

SEQ ID NO: 30144 - DNA, 30 bp, Artificial Sequence
  Synthetic oligonucleotide
acgaggagcacacagctctcacagtaacat

SEQ ID NO: 30145 - DNA, 30 bp, Artificial Sequence
  Synthetic oligonucleotide
cagagtgttacgccaatctcgtagggacat

SEQ ID NO: 30146 - DNA, 30 bp, Artificial Sequence
  Synthetic oligonucleotide
tgctcgtgcgtgtgagtaccagtgggacat

SEQ ID NO: 30147 - DNA, 30 bp, Artificial Sequence
  Synthetic oligonucleotide
gatggaaaggagtgtcgatgtgagtgacat

SEQ ID NO: 30148 - DNA, 30 bp, Artificial Sequence
  Synthetic oligonucleotide
cttagagaatcacggaggttcagagtacat

SEQ ID NO: 30149 - DNA, 30 bp, Artificial Sequence
  Synthetic oligonucleotide
caaatagaggaaggccggggaaccttacat

SEQ ID NO: 30150 - DNA, 30 bp, Artificial Sequence
  Synthetic oligonucleotide
gcaacccaagggaatcgtgggaacaaccat

SEQ ID NO: 30151 - DNA, 30 bp, Artificial Sequence
  Synthetic oligonucleotide
tagaactagagaggaccgtcaggcacccat

SEQ ID NO: 30152 - DNA, 30 bp, Artificial Sequence
  Synthetic oligonucleotide
ggtggataaaccggataatgaagtagccat

SEQ ID NO: 30153 - DNA, 30 bp, Artificial Sequence
  Synthetic oligonucleotide
ctagtagagcccactgagagatgcatccat

SEQ ID NO: 30154 - DNA, 30 bp, Artificial Sequence
  Synthetic oligonucleotide
gtcgagtggcaaacgaaggcgaaaaagcat

SEQ ID NO: 30155 - DNA, 30 bp, Artificial Sequence
  Synthetic oligonucleotide
aaggtagaactcgggttgatagataggcat

SEQ ID NO: 30156 - DNA, 30 bp, Artificial Sequence
  Synthetic oligonucleotide
ggggcctcgatacgtaggagatctgggcat

SEQ ID NO: 30157 - DNA, 30 bp, Artificial Sequence
  Synthetic oligonucleotide
caagaaggtgaccaatcatctgcttggcat

SEQ ID NO: 30158 - DNA, 30 bp, Artificial Sequence
  Synthetic oligonucleotide
atggcgggagattcacgatagggagtgcat

SEQ ID NO: 30159 - DNA, 30 bp, Artificial Sequence
  Synthetic oligonucleotide
cgggcgagcggggaagcacctgtcgatcat

SEQ ID NO: 30160 - DNA, 30 bp, Artificial Sequence
  Synthetic oligonucleotide
gcgatcacggcaaaaatttaataaggtcat

SEQ ID NO: 30161 - DNA, 30 bp, Artificial Sequence
  Synthetic oligonucleotide
tcaaccacaagagcacttggtaggcaagat

SEQ ID NO: 30162 - DNA, 30 bp, Artificial Sequence
  Synthetic oligonucleotide
ggaagaggaatcgggaaaggatgagaagat

SEQ ID NO: 30163 - DNA, 30 bp, Artificial Sequence
  Synthetic oligonucleotide
caacatgtctcgaagtcaggcacggaagat

SEQ ID NO: 30164 - DNA, 30 bp, Artificial Sequence
  Synthetic oligonucleotide
atgtggcgtccgatctctcgattcacagat

SEQ ID NO: 30165 - DNA, 30 bp, Artificial Sequence
  Synthetic oligonucleotide
agaaaccatgtacttcacgaaacgtcagat

SEQ ID NO: 30166 - DNA, 30 bp, Artificial Sequence
  Synthetic oligonucleotide
aacgttcgtcgaaagcgagatgggctagat

SEQ ID NO: 30167 - DNA, 30 bp, Artificial Sequence
  Synthetic oligonucleotide
cgacacactaaacatgtactagtgctagat

SEQ ID NO: 30168 - DNA, 30 bp, Artificial Sequence
  Synthetic oligonucleotide
cgagtcaacaaacctcggggaaatctagat

SEQ ID NO: 30169 - DNA, 30 bp, Artificial Sequence
  Synthetic oligonucleotide
aacaaagatatatgagcgccaagtgacgat

SEQ ID NO: 30170 - DNA, 30 bp, Artificial Sequence
  Synthetic oligonucleotide
aaaggcaaaccaacgcaccgcgggtacgat

SEQ ID NO: 30171 - DNA, 30 bp, Artificial Sequence
  Synthetic oligonucleotide
cggtaatgtctgaactcaccgatgcccgat

SEQ ID NO: 30172 - DNA, 30 bp, Artificial Sequence
  Synthetic oligonucleotide
gtgtagagcgatccgggccagagcaaggat

SEQ ID NO: 30173 - DNA, 30 bp, Artificial Sequence
  Synthetic oligonucleotide
ctgcagaattgcgcgaaaacaaagacggat

SEQ ID NO: 30174 - DNA, 30 bp, Artificial Sequence
  Synthetic oligonucleotide
cgtgtcggtaggccatctatggagtgggat

SEQ ID NO: 30175 - DNA, 30 bp, Artificial Sequence
  Synthetic oligonucleotide
tgagggaattacgttgtgtggcggaatgat

SEQ ID NO: 30176 - DNA, 30 bp, Artificial Sequence
  Synthetic oligonucleotide
tcgttgcgcgtatagagctgacgggatgat

SEQ ID NO: 30177 - DNA, 30 bp, Artificial Sequence
  Synthetic oligonucleotide
acggtaacagacacaatagtaggttatgat

SEQ ID NO: 30178 - DNA, 30 bp, Artificial Sequence
  Synthetic oligonucleotide
ataaggaccaacaaattatagtcaattgat

SEQ ID NO: 30179 - DNA, 30 bp, Artificial Sequence
  Synthetic oligonucleotide
ttggctcagaggtacatcgagcgcaaatat

SEQ ID NO: 30180 - DNA, 30 bp, Artificial Sequence
  Synthetic oligonucleotide
ggccgtgcaaagtaagctaaacagcaatat

SEQ ID NO: 30181 - DNA, 30 bp, Artificial Sequence
  Synthetic oligonucleotide
cggttaaagggggtcacacgtaggcgatat

SEQ ID NO: 30182 - DNA, 30 bp, Artificial Sequence
  Synthetic oligonucleotide
gtacgatcgcaaggtaaacagagtggatat

SEQ ID NO: 30183 - DNA, 30 bp, Artificial Sequence
  Synthetic oligonucleotide
gcgtgaagaagaaaaggagccaataactat

SEQ ID NO: 30184 - DNA, 30 bp, Artificial Sequence
  Synthetic oligonucleotide
ccgatatataacgaatcacatgccgagtat

SEQ ID NO: 30185 - DNA, 30 bp, Artificial Sequence
  Synthetic oligonucleotide
agaccgaggtcagggacttaatcatagtat

SEQ ID NO: 30186 - DNA, 30 bp, Artificial Sequence
  Synthetic oligonucleotide
agttgaacaacaccgcgacaagggccgtat

SEQ ID NO: 30187 - DNA, 30 bp, Artificial Sequence
  Synthetic oligonucleotide
ctagagatagcgcacgcgatcacggcgtat

SEQ ID NO: 30188 - DNA, 30 bp, Artificial Sequence
  Synthetic oligonucleotide
tcggcagaatggtaggccccacagtcgtat

SEQ ID NO: 30189 - DNA, 30 bp, Artificial Sequence
  Synthetic oligonucleotide
agcagagccgcaaaggccgtcaggtcgtat

SEQ ID NO: 30190 - DNA, 30 bp, Artificial Sequence
  Synthetic oligonucleotide
caagacatgctcaaaccagaggaggggtat

SEQ ID NO: 30191 - DNA, 30 bp, Artificial Sequence
  Synthetic oligonucleotide
ggcaggagcgggcatgaagaagcaagttat

SEQ ID NO: 30192 - DNA, 30 bp, Artificial Sequence
  Synthetic oligonucleotide
cccggcgaaaaggaagggcagcaaaaaact

SEQ ID NO: 30193 - DNA, 30 bp, Artificial Sequence
  Synthetic oligonucleotide
tacgcggggaggagttcactgcacaaaact

SEQ ID NO: 30194 - DNA, 30 bp, Artificial Sequence
  Synthetic oligonucleotide
gcgacccaaactgtatcaccatacaaaact

SEQ ID NO: 30195 - DNA, 30 bp, Artificial Sequence
  Synthetic oligonucleotide
tagaaaatagaatgaagtggaactaaaact

SEQ ID NO: 30196 - DNA, 30 bp, Artificial Sequence
  Synthetic oligonucleotide
gagcaaacaaatccggtgaccgacctcact

SEQ ID NO: 30197 - DNA, 30 bp, Artificial Sequence
  Synthetic oligonucleotide
acagaaggtgatatgtccatgaacaagact

SEQ ID NO: 30198 - DNA, 30 bp, Artificial Sequence
  Synthetic oligonucleotide
cattacacaatgcgcccccaaaacgagact

SEQ ID NO: 30199 - DNA, 30 bp, Artificial Sequence
  Synthetic oligonucleotide
ccaacagaacttccgtcaaaacatccgact

SEQ ID NO: 30200 - DNA, 30 bp, Artificial Sequence
  Synthetic oligonucleotide
agcggcggtgcgtgacgagcggaaaggact

SEQ ID NO: 30201 - DNA, 30 bp, Artificial Sequence
  Synthetic oligonucleotide
ggaataagcaccggtcaggaagaggggact

SEQ ID NO: 30202 - DNA, 30 bp, Artificial Sequence
  Synthetic oligonucleotide
cgatatggcgagatgttgtaccggctgact

SEQ ID NO: 30203 - DNA, 30 bp, Artificial Sequence
  Synthetic oligonucleotide
cgatctcggttatgaagattggaagtgact

SEQ ID NO: 30204 - DNA, 31 bp, Artificial Sequence
  Synthetic oligonucleotide
agcattttagggtgcggggtgaccgaatact

SEQ ID NO: 30205 - DNA, 30 bp, Artificial Sequence
  Synthetic oligonucleotide
ggcggaactcgtgacccagaagaggatact

SEQ ID NO: 30206 - DNA, 30 bp, Artificial Sequence
  Synthetic oligonucleotide
tgctaaagctatagaacgtggtgcggtact

SEQ ID NO: 30207 - DNA, 30 bp, Artificial Sequence
  Synthetic oligonucleotide
caggactagaagagaaggggcccacaacct

SEQ ID NO: 30208 - DNA, 30 bp, Artificial Sequence
  Synthetic oligonucleotide
ttgggaacacgtagaagagcacactaacct

SEQ ID NO: 30209 - DNA, 30 bp, Artificial Sequence
  Synthetic oligonucleotide
atgggagacaaagtgacgtagtactcacct

SEQ ID NO: 30210 - DNA, 30 bp, Artificial Sequence
  Synthetic oligonucleotide
ggcaaagcgtcgaacgggacatattcacct

SEQ ID NO: 30211 - DNA, 30 bp, Artificial Sequence
  Synthetic oligonucleotide
ggcaccatgcgaaaataactaatctaccct

SEQ ID NO: 30212 - DNA, 30 bp, Artificial Sequence
  Synthetic oligonucleotide
tcaggtggactgtaaattagagcatcccct

SEQ ID NO: 30213 - DNA, 30 bp, Artificial Sequence
  Synthetic oligonucleotide
ggaaggaggaaaaaagaatacataaagcct

SEQ ID NO: 30214 - DNA, 30 bp, Artificial Sequence
  Synthetic oligonucleotide
ttgtaaaggggggacggatggggagagcct

SEQ ID NO: 30215 - DNA, 30 bp, Artificial Sequence
  Synthetic oligonucleotide
tcgagaccaaagcgggaggataacgagcct

SEQ ID NO: 30216 - DNA, 30 bp, Artificial Sequence
  Synthetic oligonucleotide
taggacagcacatgtgacttaacctagcct

SEQ ID NO: 30217 - DNA, 30 bp, Artificial Sequence
  Synthetic oligonucleotide
gagccagaagagctgggtacttagcaagct

SEQ ID NO: 30218 - DNA, 30 bp, Artificial Sequence
  Synthetic oligonucleotide
ggtgaactcgaactaattggcagtcaagct

SEQ ID NO: 30219 - DNA, 30 bp, Artificial Sequence
  Synthetic oligonucleotide
aacggagacttatatgaagagtactcagct

SEQ ID NO: 30220 - DNA, 30 bp, Artificial Sequence
  Synthetic oligonucleotide
cgcgacaaagagattgcccaagcttcagct

SEQ ID NO: 30221 - DNA, 30 bp, Artificial Sequence
  Synthetic oligonucleotide
ccatatagtgtcgtcgagcgaagggtagct

SEQ ID NO: 30222 - DNA, 30 bp, Artificial Sequence
  Synthetic oligonucleotide
gacagcagagagaccgacactacaaacgct

SEQ ID NO: 30223 - DNA, 30 bp, Artificial Sequence
  Synthetic oligonucleotide
tcaaagacagaggcggaccaccaatacgct

SEQ ID NO: 30224 - DNA, 30 bp, Artificial Sequence
  Synthetic oligonucleotide
agggcagagtatgctctggagacgaccgct

SEQ ID NO: 30225 - DNA, 30 bp, Artificial Sequence
  Synthetic oligonucleotide
gtcggcagagggctaaaataagcaaaggct

SEQ ID NO: 30226 - DNA, 30 bp, Artificial Sequence
  Synthetic oligonucleotide
catacaaagaaggtcatgaaccaggtggct

SEQ ID NO: 30227 - DNA, 30 bp, Artificial Sequence
  Synthetic oligonucleotide
cgagtgatggagtccgacgcgtaggtggct

SEQ ID NO: 30228 - DNA, 30 bp, Artificial Sequence
  Synthetic oligonucleotide
caggagaacagaacggtgacaaacgatgct

SEQ ID NO: 30229 - DNA, 30 bp, Artificial Sequence
  Synthetic oligonucleotide
ggtggtgcaaagtggagataacgggatgct

SEQ ID NO: 30230 - DNA, 30 bp, Artificial Sequence
  Synthetic oligonucleotide
agcacggacatgggtaattcagctactgct

SEQ ID NO: 30231 - DNA, 31 bp, Artificial Sequence
  Synthetic oligonucleotide
aggtccgaactttcttacacacgaatctgct

SEQ ID NO: 30232 - DNA, 30 bp, Artificial Sequence
  Synthetic oligonucleotide
aggccgtctggagactcgctaaggagtgct

SEQ ID NO: 30233 - DNA, 30 bp, Artificial Sequence
  Synthetic oligonucleotide
acataccgacctagatcgcgaggcggtgct

SEQ ID NO: 30234 - DNA, 30 bp, Artificial Sequence
  Synthetic oligonucleotide
acgacatagtgattagagtgaaagtttgct

SEQ ID NO: 30235 - DNA, 30 bp, Artificial Sequence
  Synthetic oligonucleotide
ggggaccatgatacgaggagattatcatct

SEQ ID NO: 30236 - DNA, 30 bp, Artificial Sequence
  Synthetic oligonucleotide
acctcaagtataaggggaacgagctactct

SEQ ID NO: 30237 - DNA, 30 bp, Artificial Sequence
  Synthetic oligonucleotide
acagggaggtaggatccgacacgaccctct

SEQ ID NO: 30238 - DNA, 30 bp, Artificial Sequence
  Synthetic oligonucleotide
aaggcatggtaggtagagcgagtgagctct

SEQ ID NO: 30239 - DNA, 30 bp, Artificial Sequence
  Synthetic oligonucleotide
aggtgcgtgcattgacaatgtccagagtct

SEQ ID NO: 30240 - DNA, 30 bp, Artificial Sequence
  Synthetic oligonucleotide
taggcaacgcttggcgacaaatggtagtct

SEQ ID NO: 30241 - DNA, 30 bp, Artificial Sequence
  Synthetic oligonucleotide
cacgggttccaaggcggacacaaccggtct

SEQ ID NO: 30242 - DNA, 30 bp, Artificial Sequence
  Synthetic oligonucleotide
agaggttgaagcgacaggcaacagcggtct

SEQ ID NO: 30243 - DNA, 30 bp, Artificial Sequence
  Synthetic oligonucleotide
cgtgattattacgactatggagtcctgtct

SEQ ID NO: 30244 - DNA, 30 bp, Artificial Sequence
  Synthetic oligonucleotide
cgtacaacgaataataaggaaatccattct

SEQ ID NO: 30245 - DNA, 30 bp, Artificial Sequence
  Synthetic oligonucleotide
cgaggcaggcttggatgccaacagatttct

SEQ ID NO: 30246 - DNA, 30 bp, Artificial Sequence
  Synthetic oligonucleotide
tgagaaatctaggggttacgtccagaaagt

SEQ ID NO: 30247 - DNA, 30 bp, Artificial Sequence
  Synthetic oligonucleotide
agtgatagctaagtactgtcggatgaaagt

SEQ ID NO: 30248 - DNA, 30 bp, Artificial Sequence
  Synthetic oligonucleotide
ataggaggcggatgcaagacgtctacaagt

SEQ ID NO: 30249 - DNA, 30 bp, Artificial Sequence
  Synthetic oligonucleotide
cgcggctgtagttgttagaagagaccaagt

SEQ ID NO: 30250 - DNA, 30 bp, Artificial Sequence
  Synthetic oligonucleotide
cacgaaaggctagcgtacgccatcggaagt

SEQ ID NO: 30251 - DNA, 30 bp, Artificial Sequence
  Synthetic oligonucleotide
acgagatgagaatggcggaaagacctaagt

SEQ ID NO: 30252 - DNA, 30 bp, Artificial Sequence
  Synthetic oligonucleotide
acgggggcaggaggctcggaagggctaagt

SEQ ID NO: 30253 - DNA, 30 bp, Artificial Sequence
  Synthetic oligonucleotide
tggtcagagtcagggttacaaaccaacagt

SEQ ID NO: 30254 - DNA, 30 bp, Artificial Sequence
  Synthetic oligonucleotide
ataacgccgaaaaaggggcggagatacagt

SEQ ID NO: 30255 - DNA, 30 bp, Artificial Sequence
  Synthetic oligonucleotide
ccaccgtaagactggaagagtagaaagagt

SEQ ID NO: 30256 - DNA, 30 bp, Artificial Sequence
  Synthetic oligonucleotide
aggcgcgtaggtataatggttggaaagagt

SEQ ID NO: 30257 - DNA, 30 bp, Artificial Sequence
  Synthetic oligonucleotide
atcggggctcaatacggttatgcgaagagt

SEQ ID NO: 30258 - DNA, 30 bp, Artificial Sequence
  Synthetic oligonucleotide
cacaccagttcagcctacgaagtgaagagt

SEQ ID NO: 30259 - DNA, 30 bp, Artificial Sequence
  Synthetic oligonucleotide
cattggcctttccggcagaaattccagagt

SEQ ID NO: 30260 - DNA, 30 bp, Artificial Sequence
  Synthetic oligonucleotide
ctaggcagaaatatcgttctattccagagt

SEQ ID NO: 30261 - DNA, 30 bp, Artificial Sequence
  Synthetic oligonucleotide
ggactagacatatccacctatgcagagagt

SEQ ID NO: 30262 - DNA, 30 bp, Artificial Sequence
  Synthetic oligonucleotide
tgaatgcggaaaggagcgacggaggagagt

SEQ ID NO: 30263 - DNA, 30 bp, Artificial Sequence
  Synthetic oligonucleotide
taagcgcgaaagggtaaagttggatagagt

SEQ ID NO: 30264 - DNA, 30 bp, Artificial Sequence
  Synthetic oligonucleotide
cggatacgtcatcaagtaactacgtagagt

SEQ ID NO: 30265 - DNA, 30 bp, Artificial Sequence
  Synthetic oligonucleotide
acctcaaagaaacataaaaatatgacgagt

SEQ ID NO: 30266 - DNA, 30 bp, Artificial Sequence
  Synthetic oligonucleotide
gctattgcgacccacaaagattgcccgagt

SEQ ID NO: 30267 - DNA, 30 bp, Artificial Sequence
  Synthetic oligonucleotide
tcttatgaccaaacctaggacagagcgagt

SEQ ID NO: 30268 - DNA, 30 bp, Artificial Sequence
  Synthetic oligonucleotide
acgtgaataactccggaggaaatctcgagt

SEQ ID NO: 30269 - DNA, 30 bp, Artificial Sequence
  Synthetic oligonucleotide
cgaacccccagaacacccttaaggtcgagt

SEQ ID NO: 30270 - DNA, 30 bp, Artificial Sequence
  Synthetic oligonucleotide
gtgcatagcgcgtgtgtcggtcgccggagt

SEQ ID NO: 30271 - DNA, 30 bp, Artificial Sequence
  Synthetic oligonucleotide
cgccaaaatgggatcatcataaccgggagt

SEQ ID NO: 30272 - DNA, 30 bp, Artificial Sequence
  Synthetic oligonucleotide
cagagagatcgagctgaaccatactggagt

SEQ ID NO: 30273 - DNA, 30 bp, Artificial Sequence
  Synthetic oligonucleotide
ctgcaggagtgcgatagtcgatggatgagt

SEQ ID NO: 30274 - DNA, 30 bp, Artificial Sequence
  Synthetic oligonucleotide
cgaaaaacttatgacagagagatcaatagt

SEQ ID NO: 30275 - DNA, 30 bp, Artificial Sequence
  Synthetic oligonucleotide
aattgtggaaggggagagggtacgtatagt

SEQ ID NO: 30276 - DNA, 30 bp, Artificial Sequence
  Synthetic oligonucleotide
ccgtacctggaccgtaaatcaggagttagt

SEQ ID NO: 30277 - DNA, 30 bp, Artificial Sequence
  Synthetic oligonucleotide
atgttacaaagaaatcaagatcttgttagt

SEQ ID NO: 30278 - DNA, 30 bp, Artificial Sequence
  Synthetic oligonucleotide
ttagatcgaagtggagagtaaccatttagt

SEQ ID NO: 30279 - DNA, 30 bp, Artificial Sequence
  Synthetic oligonucleotide
ggagatccgaagataggaatgagctttagt

SEQ ID NO: 30280 - DNA, 30 bp, Artificial Sequence
  Synthetic oligonucleotide
acgtgacgtagaatcggaagaaagtttagt

SEQ ID NO: 30281 - DNA, 30 bp, Artificial Sequence
  Synthetic oligonucleotide
taaggggagtcaaagccaatgagtgtacgt

SEQ ID NO: 30282 - DNA, 30 bp, Artificial Sequence
  Synthetic oligonucleotide
cggacactggtgaatcacttggaaagccgt

SEQ ID NO: 30283 - DNA, 30 bp, Artificial Sequence
  Synthetic oligonucleotide
aacttggtcaaggacaaaccctagtagcgt

SEQ ID NO: 30284 - DNA, 30 bp, Artificial Sequence
  Synthetic oligonucleotide
tggatggaagcgtacgataggcgccggcgt

SEQ ID NO: 30285 - DNA, 30 bp, Artificial Sequence
  Synthetic oligonucleotide
tcaaggtgggtttgaaaacggcgacctcgt

SEQ ID NO: 30286 - DNA, 30 bp, Artificial Sequence
  Synthetic oligonucleotide
gaaaagcaagaattaaattaagagggtcgt

SEQ ID NO: 30287 - DNA, 30 bp, Artificial Sequence
  Synthetic oligonucleotide
cagaagcaggatgtttagtggtaggaaggt

SEQ ID NO: 30288 - DNA, 30 bp, Artificial Sequence
  Synthetic oligonucleotide
ttagctgaatagggtaaaagtcgtgaaggt

SEQ ID NO: 30289 - DNA, 30 bp, Artificial Sequence
  Synthetic oligonucleotide
agtacagaatcatagctccgcaagtaaggt

SEQ ID NO: 30290 - DNA, 30 bp, Artificial Sequence
  Synthetic oligonucleotide
acagaaaacgacccagagtggacaggaggt

SEQ ID NO: 30291 - DNA, 30 bp, Artificial Sequence
  Synthetic oligonucleotide
acacacatactgggagtataagggttaggt

SEQ ID NO: 30292 - DNA, 30 bp, Artificial Sequence
  Synthetic oligonucleotide
tatgtgtagaggatggaccgagtcgacggt

SEQ ID NO: 30293 - DNA, 30 bp, Artificial Sequence
  Synthetic oligonucleotide
caccgagcaacttcaaatcatgagtacggt

SEQ ID NO: 30294 - DNA, 30 bp, Artificial Sequence
  Synthetic oligonucleotide
cacgggaagattgcaccgcacatagtcggt

SEQ ID NO: 30295 - DNA, 30 bp, Artificial Sequence
  Synthetic oligonucleotide
tagagtgctgaataacaagcgcaattcggt

SEQ ID NO: 30296 - DNA, 30 bp, Artificial Sequence
  Synthetic oligonucleotide
aagaaatgaggcgaatgatggcaaaagggt

SEQ ID NO: 30297 - DNA, 30 bp, Artificial Sequence
  Synthetic oligonucleotide
gccgaggttagctataatgggggaaagggt

SEQ ID NO: 30298 - DNA, 30 bp, Artificial Sequence
  Synthetic oligonucleotide
ctaacacgaaacgtgaacaggacctcgggt

SEQ ID NO: 30299 - DNA, 30 bp, Artificial Sequence
  Synthetic oligonucleotide
cgcactcaagcaagaagagctgggtcgggt

SEQ ID NO: 30300 - DNA, 30 bp, Artificial Sequence
  Synthetic oligonucleotide
agggcggtagatgatcgatctcgcaatggt

SEQ ID NO: 30301 - DNA, 30 bp, Artificial Sequence
  Synthetic oligonucleotide
cagggcgggaattccaaatagcataatggt

SEQ ID NO: 30302 - DNA, 30 bp, Artificial Sequence
  Synthetic oligonucleotide
gtaggaaacgagctgtccagagacgatggt

SEQ ID NO: 30303 - DNA, 31 bp, Artificial Sequence
  Synthetic oligonucleotide
cgatgaaaggggtggtgtaattactagtggt

SEQ ID NO: 30304 - DNA, 30 bp, Artificial Sequence
  Synthetic oligonucleotide
ccgtgacaaacaagaacatcgtacaaatgt

SEQ ID NO: 30305 - DNA, 30 bp, Artificial Sequence
  Synthetic oligonucleotide
agagcggtaatcagtatgatttcagaatgt

SEQ ID NO: 30306 - DNA, 30 bp, Artificial Sequence
  Synthetic oligonucleotide
agaggcacgtaggggtcaactaacggatgt

SEQ ID NO: 30307 - DNA, 30 bp, Artificial Sequence
  Synthetic oligonucleotide
agggttgtcatacgaaaagtcgggtgatgt

SEQ ID NO: 30308 - DNA, 30 bp, Artificial Sequence
  Synthetic oligonucleotide
aagacatcgaaactagcaagcggctactgt

SEQ ID NO: 30309 - DNA, 30 bp, Artificial Sequence
  Synthetic oligonucleotide
gcgaaagaaagcctacagtgttcatcctgt

SEQ ID NO: 30310 - DNA, 30 bp, Artificial Sequence
  Synthetic oligonucleotide
ctacattaggaagtgtgcagaacgaagtgt

SEQ ID NO: 30311 - DNA, 30 bp, Artificial Sequence
  Synthetic oligonucleotide
aaagggagcgtcggcacataaggagagtgt

SEQ ID NO: 30312 - DNA, 30 bp, Artificial Sequence
  Synthetic oligonucleotide
cggagggacacttaaggcaaagatgggtgt

SEQ ID NO: 30313 - DNA, 30 bp, Artificial Sequence
  Synthetic oligonucleotide
cacggagacgagtgaaagaaaagtgggtgt

SEQ ID NO: 30314 - DNA, 30 bp, Artificial Sequence
  Synthetic oligonucleotide
tcctgaccgaacgaaccagagtatccttgt

SEQ ID NO: 30315 - DNA, 30 bp, Artificial Sequence
  Synthetic oligonucleotide
cgacccgagccgggaaagcaaaactaaatt

SEQ ID NO: 30316 - DNA, 30 bp, Artificial Sequence
  Synthetic oligonucleotide
tgaggccaaaagctagctcaccgcccaatt

SEQ ID NO: 30317 - DNA, 30 bp, Artificial Sequence
  Synthetic oligonucleotide
tcgagaaattccgaaaggagtggtggaatt

SEQ ID NO: 30318 - DNA, 30 bp, Artificial Sequence
  Synthetic oligonucleotide
ggtaaccaaaagcagagcatcaaatgaatt

SEQ ID NO: 30319 - DNA, 30 bp, Artificial Sequence
  Synthetic oligonucleotide
tctcgaatataagggtacagggcaaccatt

SEQ ID NO: 30320 - DNA, 30 bp, Artificial Sequence
  Synthetic oligonucleotide
tactagagcgtgctcacgggaacggccatt

SEQ ID NO: 30321 - DNA, 30 bp, Artificial Sequence
  Synthetic oligonucleotide
tcgaatcatgctagtcatagaaagtccatt

SEQ ID NO: 30322 - DNA, 30 bp, Artificial Sequence
  Synthetic oligonucleotide
agcggtgaagaccacaaagtgggaaagatt

SEQ ID NO: 30323 - DNA, 30 bp, Artificial Sequence
  Synthetic oligonucleotide
aggtactgaaaagtagagtgtaaacagatt

SEQ ID NO: 30324 - DNA, 30 bp, Artificial Sequence
  Synthetic oligonucleotide
aggacaaattcgatcaaggtagaggagatt

SEQ ID NO: 30325 - DNA, 30 bp, Artificial Sequence
  Synthetic oligonucleotide
gtgattgagcacaacataacagggacgatt

SEQ ID NO: 30326 - DNA, 30 bp, Artificial Sequence
  Synthetic oligonucleotide
tacgatgtggctgtacaatgaaaagcgatt

SEQ ID NO: 30327 - DNA, 30 bp, Artificial Sequence
  Synthetic oligonucleotide
aggcgcgtcatacacactccgatcaatatt

SEQ ID NO: 30328 - DNA, 30 bp, Artificial Sequence
  Synthetic oligonucleotide
cgctgagggagaagggtatggtttagactt

SEQ ID NO: 30329 - DNA, 30 bp, Artificial Sequence
  Synthetic oligonucleotide
agcggaaatggagggatccacgatgtactt

SEQ ID NO: 30330 - DNA, 30 bp, Artificial Sequence
  Synthetic oligonucleotide
acgaatggatggtccaagtgtcgtaagctt

SEQ ID NO: 30331 - DNA, 30 bp, Artificial Sequence
  Synthetic oligonucleotide
acagccagagttacactacgaggctagctt

SEQ ID NO: 30332 - DNA, 30 bp, Artificial Sequence
  Synthetic oligonucleotide
gggagtgcttagaagacaacgaatgggctt

SEQ ID NO: 30333 - DNA, 30 bp, Artificial Sequence
  Synthetic oligonucleotide
gaagcggcagggcagagagtaaacgatctt

SEQ ID NO: 30334 - DNA, 30 bp, Artificial Sequence
  Synthetic oligonucleotide
cccaccggaacaaaagagatcccagaagtt

SEQ ID NO: 30335 - DNA, 30 bp, Artificial Sequence
  Synthetic oligonucleotide
cgaaccagtaatgtgtctgggaaaagagtt

SEQ ID NO: 30336 - DNA, 30 bp, Artificial Sequence
  Synthetic oligonucleotide
aggaaacaagcgtccatgcgcgcgcgagtt

SEQ ID NO: 30337 - DNA, 30 bp, Artificial Sequence
  Synthetic oligonucleotide
cggtaagacagatagacagaaaggaacgtt

SEQ ID NO: 30338 - DNA, 30 bp, Artificial Sequence
  Synthetic oligonucleotide
aggtcaaacaagtgcgtgctggacaccgtt

SEQ ID NO: 30339 - DNA, 30 bp, Artificial Sequence
  Synthetic oligonucleotide
acgaacggatgataatcagtaaaccccgtt

SEQ ID NO: 30340 - DNA, 30 bp, Artificial Sequence
  Synthetic oligonucleotide
cgggtcataagcgtcagaaaatacctcgtt

SEQ ID NO: 30341 - DNA, 30 bp, Artificial Sequence
  Synthetic oligonucleotide
tcgagtggatgtcagaaggaatcaccggtt

SEQ ID NO: 30342 - DNA, 30 bp, Artificial Sequence
  Synthetic oligonucleotide
tccgagtaggtagagaatcaatatctggtt

SEQ ID NO: 30343 - DNA, 30 bp, Artificial Sequence
  Synthetic oligonucleotide
gtgactaggcagggtgaggtagtacatgtt

SEQ ID NO: 30344 - DNA, 30 bp, Artificial Sequence
  Synthetic oligonucleotide
cagagaacgaggaaactcttggtacatgtt

SEQ ID NO: 30345 - DNA, 30 bp, Artificial Sequence
  Synthetic oligonucleotide
aggaccaactgtggtgacactagtgatgtt

SEQ ID NO: 30346 - DNA, 30 bp, Artificial Sequence
  Synthetic oligonucleotide
gcacgatcacaagccatactcagatatgtt

SEQ ID NO: 30347 - DNA, 30 bp, Artificial Sequence
  Synthetic oligonucleotide
acgggctggacggtataacgcataactgtt

SEQ ID NO: 30348 - DNA, 30 bp, Artificial Sequence
  Synthetic oligonucleotide
taaggccaggcaccatctgaaaaggcattt

SEQ ID NO: 30349 - DNA, 30 bp, Artificial Sequence
  Synthetic oligonucleotide
cacgggaactacggatagggtgcgtgattt

SEQ ID NO: 30350 - DNA, 30 bp, Artificial Sequence
  Synthetic oligonucleotide
gaacacagggcgcgtagaaggacaatattt

SEQ ID NO: 30351 - DNA, 30 bp, Artificial Sequence
  Synthetic oligonucleotide
attgaaccgaaaactggaggaacgaacttt

SEQ ID NO: 30352 - DNA, 30 bp, Artificial Sequence
  Synthetic oligonucleotide
cgagactagcttgacatgggacagaggttt

SEQ ID NO: 30353 - DNA, 30 bp, Artificial Sequence
  Synthetic oligonucleotide
acgacattccggcggataaggaatatgttt

SEQ ID NO: 30354 - DNA, 30 bp, Artificial Sequence
  Synthetic oligonucleotide
aatctaagaggggcaagtcggctaacaaaa

SEQ ID NO: 30355 - DNA, 30 bp, Artificial Sequence
  Synthetic oligonucleotide
ctgcaacaaaagacaatcgcccgcacaaaa

SEQ ID NO: 30356 - DNA, 30 bp, Artificial Sequence
  Synthetic oligonucleotide
ataggacatgacgtgtaaagctcgccaaaa

SEQ ID NO: 30357 - DNA, 30 bp, Artificial Sequence
  Synthetic oligonucleotide
acgtatgctaggacggcttaagattcaaaa

SEQ ID NO: 30358 - DNA, 30 bp, Artificial Sequence
  Synthetic oligonucleotide
actcgacatggtggggtataggcactaaaa

SEQ ID NO: 30359 - DNA, 30 bp, Artificial Sequence
  Synthetic oligonucleotide
gggatggaagactagtgataataggtaaaa

SEQ ID NO: 30360 - DNA, 30 bp, Artificial Sequence
  Synthetic oligonucleotide
cttaacaagtgaaccgcaacctgaaccaaa

SEQ ID NO: 30361 - DNA, 30 bp, Artificial Sequence
  Synthetic oligonucleotide
cctaattaagccacaaggagcagtcccaaa

SEQ ID NO: 30362 - DNA, 30 bp, Artificial Sequence
  Synthetic oligonucleotide
gggttagtcgagatggccaatcagggcaaa

SEQ ID NO: 30363 - DNA, 30 bp, Artificial Sequence
  Synthetic oligonucleotide
agataaggcacgaacgtagaaacgtgcaaa

SEQ ID NO: 30364 - DNA, 30 bp, Artificial Sequence
  Synthetic oligonucleotide
gtcggattagaatacaacagaatgtgcaaa

SEQ ID NO: 30365 - DNA, 30 bp, Artificial Sequence
  Synthetic oligonucleotide
gggagggaaacaaatcagcgtttactcaaa

SEQ ID NO: 30366 - DNA, 30 bp, Artificial Sequence
  Synthetic oligonucleotide
gcgtgatagtcggagccgatcagcctcaaa

SEQ ID NO: 30367 - DNA, 30 bp, Artificial Sequence
  Synthetic oligonucleotide
actacacgatcctattaacagaagttcaaa

SEQ ID NO: 30368 - DNA, 30 bp, Artificial Sequence
  Synthetic oligonucleotide
caaggatggtacgtcgccacacgccagaaa

SEQ ID NO: 30369 - DNA, 30 bp, Artificial Sequence
  Synthetic oligonucleotide
gggaggccaaatatctttctgaaagagaaa

SEQ ID NO: 30370 - DNA, 30 bp, Artificial Sequence
  Synthetic oligonucleotide
tgaaactcaagaaattgtagaccagagaaa

SEQ ID NO: 30371 - DNA, 30 bp, Artificial Sequence
  Synthetic oligonucleotide
ttgaggtgggagtgcgttgtacaatagaaa

SEQ ID NO: 30372 - DNA, 30 bp, Artificial Sequence
  Synthetic oligonucleotide
gggtgtagtgaagaagaggggcttacgaaa

SEQ ID NO: 30373 - DNA, 30 bp, Artificial Sequence
  Synthetic oligonucleotide
atgggttccgacgtgcggggaagtgcgaaa

SEQ ID NO: 30374 - DNA, 30 bp, Artificial Sequence
  Synthetic oligonucleotide
cgggatgtgcggcagccactatcgtcgaaa

SEQ ID NO: 30375 - DNA, 30 bp, Artificial Sequence
  Synthetic oligonucleotide
agatgtaagggcatgaatcaagtgtcgaaa

SEQ ID NO: 30376 - DNA, 30 bp, Artificial Sequence
  Synthetic oligonucleotide
cgaacaacgtaatcaactcacattgggaaa

SEQ ID NO: 30377 - DNA, 30 bp, Artificial Sequence
  Synthetic oligonucleotide
gaaagagtcgcgaggcaggacgggtggaaa

SEQ ID NO: 30378 - DNA, 30 bp, Artificial Sequence
  Synthetic oligonucleotide
caaagactgggacaccatacggcagtgaaa

SEQ ID NO: 30379 - DNA, 30 bp, Artificial Sequence
  Synthetic oligonucleotide
gaagccaacggtacacactagctagtgaaa

SEQ ID NO: 30380 - DNA, 30 bp, Artificial Sequence
  Synthetic oligonucleotide
agataatatcaagtagtgaagtcgaataaa

SEQ ID NO: 30381 - DNA, 30 bp, Artificial Sequence
  Synthetic oligonucleotide
gagcaagtctacaaggctagtgttaataaa

SEQ ID NO: 30382 - DNA, 30 bp, Artificial Sequence
  Synthetic oligonucleotide
acagacagctgggattaaatattcgataaa

SEQ ID NO: 30383 - DNA, 30 bp, Artificial Sequence
  Synthetic oligonucleotide
agcactcaggctggggggacacgctataaa

SEQ ID NO: 30384 - DNA, 30 bp, Artificial Sequence
  Synthetic oligonucleotide
aaggggagcacattaacgccatggtataaa

SEQ ID NO: 30385 - DNA, 30 bp, Artificial Sequence
  Synthetic oligonucleotide
tcaaataaagggtaccgcaatctcgctaaa

SEQ ID NO: 30386 - DNA, 30 bp, Artificial Sequence
  Synthetic oligonucleotide
tcgtcaacgtcaacgaataaggtaagtaaa

SEQ ID NO: 30387 - DNA, 30 bp, Artificial Sequence
  Synthetic oligonucleotide
gtcttgagtaagagaacgcgcggatgtaaa

SEQ ID NO: 30388 - DNA, 30 bp, Artificial Sequence
  Synthetic oligonucleotide
tcggcacaactgaatccatcctgagttaaa

SEQ ID NO: 30389 - DNA, 30 bp, Artificial Sequence
  Synthetic oligonucleotide
cactgatggccatgtctgtcgtaaaaacaa

SEQ ID NO: 30390 - DNA, 30 bp, Artificial Sequence
  Synthetic oligonucleotide
atgcgtatgcgaacatatcgctgcaaacaa

SEQ ID NO: 30391 - DNA, 30 bp, Artificial Sequence
  Synthetic oligonucleotide
caccgcacggcagtgaatccttagcaacaa

SEQ ID NO: 30392 - DNA, 30 bp, Artificial Sequence
  Synthetic oligonucleotide
ggcgaataaatcataatcgaaggctaacaa

SEQ ID NO: 30393 - DNA, 30 bp, Artificial Sequence
  Synthetic oligonucleotide
tcgtggcacgggacctaggatggaacacaa

SEQ ID NO: 30394 - DNA, 30 bp, Artificial Sequence
  Synthetic oligonucleotide
gtaccaagtcatagatcgccagagtcacaa

SEQ ID NO: 30395 - DNA, 30 bp, Artificial Sequence
  Synthetic oligonucleotide
ggcgagagcgcccggagtgcagattcacaa

SEQ ID NO: 30396 - DNA, 30 bp, Artificial Sequence
  Synthetic oligonucleotide
accagcgctgggaagcaggcggatagacaa

SEQ ID NO: 30397 - DNA, 30 bp, Artificial Sequence
  Synthetic oligonucleotide
aggtggtttctaaggcatggcccacgacaa

SEQ ID NO: 30398 - DNA, 31 bp, Artificial Sequence
  Synthetic oligonucleotide
ctcacagcagtatttcggtaaagcgcgacaa

SEQ ID NO: 30399 - DNA, 30 bp, Artificial Sequence
  Synthetic oligonucleotide
taacatagcaccataagcatgcattgacaa

SEQ ID NO: 30400 - DNA, 30 bp, Artificial Sequence
  Synthetic oligonucleotide
cccgtaagtacaaggcacaggactatacaa

SEQ ID NO: 30401 - DNA, 30 bp, Artificial Sequence
  Synthetic oligonucleotide
aggacatgctaggacggaagcgttctacaa

SEQ ID NO: 30402 - DNA, 30 bp, Artificial Sequence
  Synthetic oligonucleotide
tgtggacagcacaagggagtacgtaaccaa

SEQ ID NO: 30403 - DNA, 30 bp, Artificial Sequence
  Synthetic oligonucleotide
cttgaccagcaaacgcgacaacggcaccaa

SEQ ID NO: 30404 - DNA, 30 bp, Artificial Sequence
  Synthetic oligonucleotide
agcagtacaggatggcgggcgtatcaccaa

SEQ ID NO: 30405 - DNA, 30 bp, Artificial Sequence
  Synthetic oligonucleotide
tcacgagtaccatcgcgggacagagaccaa

SEQ ID NO: 30406 - DNA, 30 bp, Artificial Sequence
  Synthetic oligonucleotide
agtgaaggttcaccatcaagaacaccccaa

SEQ ID NO: 30407 - DNA, 30 bp, Artificial Sequence
  Synthetic oligonucleotide
tcatgggtgagcaccatcgtgaggccccaa

SEQ ID NO: 30408 - DNA, 30 bp, Artificial Sequence
  Synthetic oligonucleotide
acggttggcgggaccattcgagatagccaa

SEQ ID NO: 30409 - DNA, 30 bp, Artificial Sequence
  Synthetic oligonucleotide
taagggatgccgggaaactgaccacgccaa

SEQ ID NO: 30410 - DNA, 30 bp, Artificial Sequence
  Synthetic oligonucleotide
agcgattcgttacagatttgagtgcgccaa

SEQ ID NO: 30411 - DNA, 30 bp, Artificial Sequence
  Synthetic oligonucleotide
cggcgtgaggcccgaaactgtccaggccaa

SEQ ID NO: 30412 - DNA, 30 bp, Artificial Sequence
  Synthetic oligonucleotide
cacgaagggatcggagcttgtccactccaa

SEQ ID NO: 30413 - DNA, 30 bp, Artificial Sequence
  Synthetic oligonucleotide
gatacgaacgggaaatgggattggaagcaa

SEQ ID NO: 30414 - DNA, 30 bp, Artificial Sequence
  Synthetic oligonucleotide
aatgtaatcaagagttgcaccagtaagcaa

SEQ ID NO: 30415 - DNA, 30 bp, Artificial Sequence
  Synthetic oligonucleotide
acgttcccaagggagcataggtaagcgcaa

SEQ ID NO: 30416 - DNA, 30 bp, Artificial Sequence
  Synthetic oligonucleotide
taaaggtaaccagggttgagcagtgcgcaa

SEQ ID NO: 30417 - DNA, 30 bp, Artificial Sequence
  Synthetic oligonucleotide
actcgcacagcgagaggtgatattgcgcaa

SEQ ID NO: 30418 - DNA, 30 bp, Artificial Sequence
  Synthetic oligonucleotide
gaccatggatccgggcccacgaactcgcaa

SEQ ID NO: 30419 - DNA, 30 bp, Artificial Sequence
  Synthetic oligonucleotide
tcgcgcgtgtagaatagatgtcttaggcaa

SEQ ID NO: 30420 - DNA, 30 bp, Artificial Sequence
  Synthetic oligonucleotide
aggggataaatgtacggtggaagggggcaa

SEQ ID NO: 30421 - DNA, 30 bp, Artificial Sequence
  Synthetic oligonucleotide
cctcacgatagaagtgtaggccgcatgcaa

SEQ ID NO: 30422 - DNA, 30 bp, Artificial Sequence
  Synthetic oligonucleotide
caaaatgggtaacggagaagtagattgcaa

SEQ ID NO: 30423 - DNA, 30 bp, Artificial Sequence
  Synthetic oligonucleotide
gtggggctaatggacgtcccgaacaatcaa

SEQ ID NO: 30424 - DNA, 30 bp, Artificial Sequence
  Synthetic oligonucleotide
caaaaccacaagtgataatatcggcctcaa

SEQ ID NO: 30425 - DNA, 30 bp, Artificial Sequence
  Synthetic oligonucleotide
cattaacaactccggcaagggaaagctcaa

SEQ ID NO: 30426 - DNA, 30 bp, Artificial Sequence
  Synthetic oligonucleotide
aaaggataagttaataagttacagtctcaa

SEQ ID NO: 30427 - DNA, 30 bp, Artificial Sequence
  Synthetic oligonucleotide
cctcaagggcaatgggggaagaaaagtcaa

SEQ ID NO: 30428 - DNA, 30 bp, Artificial Sequence
  Synthetic oligonucleotide
aaacaccagtaagattacgtcaaacgtcaa

SEQ ID NO: 30429 - DNA, 30 bp, Artificial Sequence
  Synthetic oligonucleotide
cgatcgatggggattcatagaaaatgtcaa

SEQ ID NO: 30430 - DNA, 30 bp, Artificial Sequence
  Synthetic oligonucleotide
caccggggagaaggcggttaagggtgtcaa

SEQ ID NO: 30431 - DNA, 30 bp, Artificial Sequence
  Synthetic oligonucleotide
agggggacaagagtgtcacgtatttgtcaa

SEQ ID NO: 30432 - DNA, 30 bp, Artificial Sequence
  Synthetic oligonucleotide
acgaacgagcggtacgagttcgccaaagaa

SEQ ID NO: 30433 - DNA, 30 bp, Artificial Sequence
  Synthetic oligonucleotide
gatgggaatcgagtcgaaactccgaaagaa

SEQ ID NO: 30434 - DNA, 30 bp, Artificial Sequence
  Synthetic oligonucleotide
gctggtggttaacactggagtgctcaagaa

SEQ ID NO: 30435 - DNA, 30 bp, Artificial Sequence
  Synthetic oligonucleotide
tatggagaggtgttaagaatgctaacagaa

SEQ ID NO: 30436 - DNA, 30 bp, Artificial Sequence
  Synthetic oligonucleotide
agctcggttgccgcacagaagcccccagaa

SEQ ID NO: 30437 - DNA, 30 bp, Artificial Sequence
  Synthetic oligonucleotide
accacagcggacgtcacaaggagttcagaa

SEQ ID NO: 30438 - DNA, 30 bp, Artificial Sequence
  Synthetic oligonucleotide
gggacatggcagatatcacaaaggagagaa

SEQ ID NO: 30439 - DNA, 30 bp, Artificial Sequence
  Synthetic oligonucleotide
cactgtggaagtgtgagataggcttgagaa

SEQ ID NO: 30440 - DNA, 30 bp, Artificial Sequence
  Synthetic oligonucleotide
tcttaagacgtaaaaagcagagtggtagaa

SEQ ID NO: 30441 - DNA, 30 bp, Artificial Sequence
  Synthetic oligonucleotide
gggagcactacgaataggcacaaattagaa

SEQ ID NO: 30442 - DNA, 30 bp, Artificial Sequence
  Synthetic oligonucleotide
gtccagcaaagagggcaggtgctaaacgaa

SEQ ID NO: 30443 - DNA, 30 bp, Artificial Sequence
  Synthetic oligonucleotide
tgaccgaccgaggggtctcagtgcaacgaa

SEQ ID NO: 30444 - DNA, 30 bp, Artificial Sequence
  Synthetic oligonucleotide
ggagagttgaacgcccgtatgagccacgaa

SEQ ID NO: 30445 - DNA, 30 bp, Artificial Sequence
  Synthetic oligonucleotide
gacggccctgagggaagcgcgacggacgaa

SEQ ID NO: 30446 - DNA, 30 bp, Artificial Sequence
  Synthetic oligonucleotide
gtcaactaagctgaggggcaaagggccgaa

SEQ ID NO: 30447 - DNA, 30 bp, Artificial Sequence
  Synthetic oligonucleotide
tagcgccgacagagcagcagactaggcgaa

SEQ ID NO: 30448 - DNA, 30 bp, Artificial Sequence
  Synthetic oligonucleotide
cgaagggcgggcgaagccattccgatcgaa

SEQ ID NO: 30449 - DNA, 30 bp, Artificial Sequence
  Synthetic oligonucleotide
aacgacagtacagttccgggagtgttcgaa

SEQ ID NO: 30450 - DNA, 30 bp, Artificial Sequence
  Synthetic oligonucleotide
gcggcatcaggagtagggctgtagaaggaa

SEQ ID NO: 30451 - DNA, 30 bp, Artificial Sequence
  Synthetic oligonucleotide
agcatgccctgacaatagttaaggaaggaa

SEQ ID NO: 30452 - DNA, 30 bp, Artificial Sequence
  Synthetic oligonucleotide
ggtaagagagccggctagctttgacaggaa

SEQ ID NO: 30453 - DNA, 30 bp, Artificial Sequence
  Synthetic oligonucleotide
gctgaagggcgagactgacacaagcaggaa

SEQ ID NO: 30454 - DNA, 30 bp, Artificial Sequence
  Synthetic oligonucleotide
ttcaggcaagcgaaagtctcagcggaggaa

SEQ ID NO: 30455 - DNA, 30 bp, Artificial Sequence
  Synthetic oligonucleotide
tggagcggggcgtaaaacgggacgacggaa

SEQ ID NO: 30456 - DNA, 30 bp, Artificial Sequence
  Synthetic oligonucleotide
gacgcggaaaagggtgctgaaatgccggaa

SEQ ID NO: 30457 - DNA, 30 bp, Artificial Sequence
  Synthetic oligonucleotide
cgagacacttctccagattcccatccggaa

SEQ ID NO: 30458 - DNA, 30 bp, Artificial Sequence
  Synthetic oligonucleotide
tcgaatcgctatggacacctcgtatcggaa

SEQ ID NO: 30459 - DNA, 30 bp, Artificial Sequence
  Synthetic oligonucleotide
tcaaggcgctagtctgcaggggattgggaa

SEQ ID NO: 30460 - DNA, 30 bp, Artificial Sequence
  Synthetic oligonucleotide
aaagtgaggcgccagaacccggaaatggaa

SEQ ID NO: 30461 - DNA, 30 bp, Artificial Sequence
  Synthetic oligonucleotide
ttgtcgaaatcagcaggcataactatggaa

SEQ ID NO: 30462 - DNA, 30 bp, Artificial Sequence
  Synthetic oligonucleotide
gccagcgcgaagacagatacagacctggaa

SEQ ID NO: 30463 - DNA, 30 bp, Artificial Sequence
  Synthetic oligonucleotide
agaccagcaggtgctgcataggaggtggaa

SEQ ID NO: 30464 - DNA, 30 bp, Artificial Sequence
  Synthetic oligonucleotide
cggcacaactgaatcagacaacagttggaa

SEQ ID NO: 30465 - DNA, 30 bp, Artificial Sequence
  Synthetic oligonucleotide
gaacgactactgagccgataactatatgaa

SEQ ID NO: 30466 - DNA, 30 bp, Artificial Sequence
  Synthetic oligonucleotide
gcgcgcgggtagttgaggaggccgtatgaa

SEQ ID NO: 30467 - DNA, 30 bp, Artificial Sequence
  Synthetic oligonucleotide
gtcacacggtatatagggcagggaactgaa

SEQ ID NO: 30468 - DNA, 30 bp, Artificial Sequence
  Synthetic oligonucleotide
agaggctcgaaatcgagactctcacctgaa

SEQ ID NO: 30469 - DNA, 30 bp, Artificial Sequence
  Synthetic oligonucleotide
acatcccacaaccctccacacttacctgaa

SEQ ID NO: 30470 - DNA, 30 bp, Artificial Sequence
  Synthetic oligonucleotide
ccgtcagtaggaggagaacgagcatctgaa

SEQ ID NO: 30471 - DNA, 30 bp, Artificial Sequence
  Synthetic oligonucleotide
gaaagaagcacgatatgaagaaagtctgaa

SEQ ID NO: 30472 - DNA, 29 bp, Artificial Sequence
  Synthetic oligonucleotide
cgtcgctaagggtcactccagagtctgaa

SEQ ID NO: 30473 - DNA, 30 bp, Artificial Sequence
  Synthetic oligonucleotide
caaaggtagctataggtaacaacttctgaa

SEQ ID NO: 30474 - DNA, 30 bp, Artificial Sequence
  Synthetic oligonucleotide
acggcaatttgatcggaggcgtgcggtgaa

SEQ ID NO: 30475 - DNA, 30 bp, Artificial Sequence
  Synthetic oligonucleotide
gctagatctgaaattacgtgactatgtgaa

SEQ ID NO: 30476 - DNA, 30 bp, Artificial Sequence
  Synthetic oligonucleotide
cgaacagaagcaaacgtgtatagcattgaa

SEQ ID NO: 30477 - DNA, 30 bp, Artificial Sequence
  Synthetic oligonucleotide
ggacacacactaagaggagcggctgaataa

SEQ ID NO: 30478 - DNA, 30 bp, Artificial Sequence
  Synthetic oligonucleotide
gggatcaatcccgaccagcagggcacataa

SEQ ID NO: 30479 - DNA, 30 bp, Artificial Sequence
  Synthetic oligonucleotide
agctggcgtacaggatgaagcaaggcataa

SEQ ID NO: 30480 - DNA, 30 bp, Artificial Sequence
  Synthetic oligonucleotide
gctaactgaacgtaattcccgaggtcataa

SEQ ID NO: 30481 - DNA, 30 bp, Artificial Sequence
  Synthetic oligonucleotide
agcagtacgagaccgtaagcagaatgataa

SEQ ID NO: 30482 - DNA, 30 bp, Artificial Sequence
  Synthetic oligonucleotide
gcaaggcacagcacgacagcggggtgataa

SEQ ID NO: 30483 - DNA, 30 bp, Artificial Sequence
  Synthetic oligonucleotide
tcgcgaagcgcgtaacctgtccgacactaa

SEQ ID NO: 30484 - DNA, 30 bp, Artificial Sequence
  Synthetic oligonucleotide
taagtatatgaagacagagaggatgactaa

SEQ ID NO: 30485 - DNA, 30 bp, Artificial Sequence
  Synthetic oligonucleotide
tagttggatgaaggaagctcgacctgctaa

SEQ ID NO: 30486 - DNA, 30 bp, Artificial Sequence
  Synthetic oligonucleotide
aaagtaaagagaaaaaacgactcggtctaa

SEQ ID NO: 30487 - DNA, 30 bp, Artificial Sequence
  Synthetic oligonucleotide
gcgcggctggagggggttgcgagatggtaa

SEQ ID NO: 30488 - DNA, 30 bp, Artificial Sequence
  Synthetic oligonucleotide
atgacgtaaagaagaattcgaagttggtaa

SEQ ID NO: 30489 - DNA, 30 bp, Artificial Sequence
  Synthetic oligonucleotide
ttgacaggaccgcgatcagtaaccatgtaa

SEQ ID NO: 30490 - DNA, 30 bp, Artificial Sequence
  Synthetic oligonucleotide
cggtaaaataactttcttagagcgttgtaa

SEQ ID NO: 30491 - DNA, 30 bp, Artificial Sequence
  Synthetic oligonucleotide
aaaagcgaggattagaaggatacagattaa

SEQ ID NO: 30492 - DNA, 30 bp, Artificial Sequence
  Synthetic oligonucleotide
gcgcgggaggctacgaggcagtagacttaa

SEQ ID NO: 30493 - DNA, 30 bp, Artificial Sequence
  Synthetic oligonucleotide
gccgacccttgaaaaagaaagatgagttaa

SEQ ID NO: 30494 - DNA, 30 bp, Artificial Sequence
  Synthetic oligonucleotide
aggagagcactcacacctgccgtccgttaa

SEQ ID NO: 30495 - DNA, 30 bp, Artificial Sequence
  Synthetic oligonucleotide
acaggtaggcgagtgtgacaaatgcgttaa

SEQ ID NO: 30496 - DNA, 30 bp, Artificial Sequence
  Synthetic oligonucleotide
gtgtgaactcccataagataacggggttaa

SEQ ID NO: 30497 - DNA, 30 bp, Artificial Sequence
  Synthetic oligonucleotide
agaaggggtaggagcttgtaaccgatttaa

SEQ ID NO: 30498 - DNA, 30 bp, Artificial Sequence
  Synthetic oligonucleotide
ctcatggtaaagcggcaggaaaacaaaaca

SEQ ID NO: 30499 - DNA, 30 bp, Artificial Sequence
  Synthetic oligonucleotide
tgagaaaagaacataaggttgtcgtaaaca

SEQ ID NO: 30500 - DNA, 30 bp, Artificial Sequence
  Synthetic oligonucleotide
cgggtataggtattggagattagttaaaca

SEQ ID NO: 30501 - DNA, 31 bp, Artificial Sequence
  Synthetic oligonucleotide
cagacatcgtcgttggaagaacgttacaaca

SEQ ID NO: 30502 - DNA, 28 bp, Artificial Sequence
  Synthetic oligonucleotide
ttggagtcgtgacaactgcggaccaaca

SEQ ID NO: 30503 - DNA, 30 bp, Artificial Sequence
  Synthetic oligonucleotide
tcaggactacacgactgacgatctccaaca

SEQ ID NO: 30504 - DNA, 30 bp, Artificial Sequence
  Synthetic oligonucleotide
acgcatggtgacggctggctaaaatcaaca

SEQ ID NO: 30505 - DNA, 30 bp, Artificial Sequence
  Synthetic oligonucleotide
tcagagacatcccgtactaacacgagaaca

SEQ ID NO: 30506 - DNA, 30 bp, Artificial Sequence
  Synthetic oligonucleotide
tatcgaattcctcgggataccaaacgaaca

SEQ ID NO: 30507 - DNA, 30 bp, Artificial Sequence
  Synthetic oligonucleotide
gctccacgtaggcgaagattagggggaaca

SEQ ID NO: 30508 - DNA, 30 bp, Artificial Sequence
  Synthetic oligonucleotide
cgaggcgcccacagggtgttaggtctaaca

SEQ ID NO: 30509 - DNA, 30 bp, Artificial Sequence
  Synthetic oligonucleotide
tgaaatcgagaggttcaccgatcacacaca

SEQ ID NO: 30510 - DNA, 30 bp, Artificial Sequence
  Synthetic oligonucleotide
aataacctgcgagatccgagagtccacaca

SEQ ID NO: 30511 - DNA, 30 bp, Artificial Sequence
  Synthetic oligonucleotide
acaatgcaagaatgatcccggtccagcaca

SEQ ID NO: 30512 - DNA, 30 bp, Artificial Sequence
  Synthetic oligonucleotide
tgggccaatcgtggtatgctaatcagcaca

SEQ ID NO: 30513 - DNA, 30 bp, Artificial Sequence
  Synthetic oligonucleotide
gtgaccgggggtaagcactgctacatcaca

SEQ ID NO: 30514 - DNA, 30 bp, Artificial Sequence
  Synthetic oligonucleotide
ttgataaaaggtaaacaaacagtcatcaca

SEQ ID NO: 30515 - DNA, 30 bp, Artificial Sequence
  Synthetic oligonucleotide
cgtgggtacccagaaaaccctaagatcaca

SEQ ID NO: 30516 - DNA, 30 bp, Artificial Sequence
  Synthetic oligonucleotide
tcgtagcgtaactgttggggcgagatcaca

SEQ ID NO: 30517 - DNA, 30 bp, Artificial Sequence
  Synthetic oligonucleotide
cgttgaagtgggaaataaaaaagtgtcaca

SEQ ID NO: 30518 - DNA, 30 bp, Artificial Sequence
  Synthetic oligonucleotide
tgatgtgagaacaacaggtcaagatagaca

SEQ ID NO: 30519 - DNA, 30 bp, Artificial Sequence
  Synthetic oligonucleotide
aacatacaggggaccagatacgggacgaca

SEQ ID NO: 30520 - DNA, 30 bp, Artificial Sequence
  Synthetic oligonucleotide
gcaagggcgatccgagcacacgtgaggaca

SEQ ID NO: 30521 - DNA, 30 bp, Artificial Sequence
  Synthetic oligonucleotide
ccacagaaaatttgcaatgaagcccggaca

SEQ ID NO: 30522 - DNA, 30 bp, Artificial Sequence
  Synthetic oligonucleotide
tgattaaattcgtgtacaaaaggggggaca

SEQ ID NO: 30523 - DNA, 30 bp, Artificial Sequence
  Synthetic oligonucleotide
gctcagagtggtaaatggacagcgcataca

SEQ ID NO: 30524 - DNA, 30 bp, Artificial Sequence
  Synthetic oligonucleotide
aggaaatagcacaagttagggccgtataca

SEQ ID NO: 30525 - DNA, 30 bp, Artificial Sequence
  Synthetic oligonucleotide
tctgaacgcgtgttgcgtggaaggagtaca

SEQ ID NO: 30526 - DNA, 30 bp, Artificial Sequence
  Synthetic oligonucleotide
ctggcactaggagctgctgaccctagtaca

SEQ ID NO: 30527 - DNA, 30 bp, Artificial Sequence
  Synthetic oligonucleotide
tacggaccagatacgagaacaaagcgtaca

SEQ ID NO: 30528 - DNA, 30 bp, Artificial Sequence
  Synthetic oligonucleotide
tggtggatttgtagcaactccagcattaca

SEQ ID NO: 30529 - DNA, 30 bp, Artificial Sequence
  Synthetic oligonucleotide
taggtcaagctgcgacgggtaccgaaacca

SEQ ID NO: 30530 - DNA, 30 bp, Artificial Sequence
  Synthetic oligonucleotide
gcggcaaaacactggataacgtttaaacca

SEQ ID NO: 30531 - DNA, 30 bp, Artificial Sequence
  Synthetic oligonucleotide
tacgaggggtgaacaggtcatccccaacca

SEQ ID NO: 30532 - DNA, 30 bp, Artificial Sequence
  Synthetic oligonucleotide
tgggcaattcgcgtccaactcacaacacca

SEQ ID NO: 30533 - DNA, 30 bp, Artificial Sequence
  Synthetic oligonucleotide
gatggcattcatgaaactaacgagacacca

SEQ ID NO: 30534 - DNA, 30 bp, Artificial Sequence
  Synthetic oligonucleotide
atagaccaaaattaagtatgggaaccacca

SEQ ID NO: 30535 - DNA, 30 bp, Artificial Sequence
  Synthetic oligonucleotide
gtacacccgaggcaccggaaagcagcacca

SEQ ID NO: 30536 - DNA, 30 bp, Artificial Sequence
  Synthetic oligonucleotide
cgaaacggcccttaataaagaagagcacca

SEQ ID NO: 30537 - DNA, 30 bp, Artificial Sequence
  Synthetic oligonucleotide
cctcaagagtgctctaacgcagccgcacca

SEQ ID NO: 30538 - DNA, 30 bp, Artificial Sequence
  Synthetic oligonucleotide
cgcggacgttttgtggggacaccgagacca

SEQ ID NO: 30539 - DNA, 30 bp, Artificial Sequence
  Synthetic oligonucleotide
gaaggttagaatcggggtcagactagacca

SEQ ID NO: 30540 - DNA, 30 bp, Artificial Sequence
  Synthetic oligonucleotide
ggtggaaccattcccgacatttctagacca

SEQ ID NO: 30541 - DNA, 30 bp, Artificial Sequence
  Synthetic oligonucleotide
acaactggggtgtagccactagtacgacca

SEQ ID NO: 30542 - DNA, 30 bp, Artificial Sequence
  Synthetic oligonucleotide
taaaggagcgggttaatcgtatggcgacca

SEQ ID NO: 30543 - DNA, 30 bp, Artificial Sequence
  Synthetic oligonucleotide
ggataggaagctagaggcggacgaggacca

SEQ ID NO: 30544 - DNA, 30 bp, Artificial Sequence
  Synthetic oligonucleotide
cggataatgttggtaataagaaagggacca

SEQ ID NO: 30545 - DNA, 30 bp, Artificial Sequence
  Synthetic oligonucleotide
agggaggtacgacgattgcttgaaatacca

SEQ ID NO: 30546 - DNA, 30 bp, Artificial Sequence
  Synthetic oligonucleotide
atcgaaggacatcgcgacgaaagagtacca

SEQ ID NO: 30547 - DNA, 30 bp, Artificial Sequence
  Synthetic oligonucleotide
cgaggagaaactgagaatcggggccaccca

SEQ ID NO: 30548 - DNA, 30 bp, Artificial Sequence
  Synthetic oligonucleotide
ccttggtgaaagcggtataaagaacgccca

SEQ ID NO: 30549 - DNA, 30 bp, Artificial Sequence
  Synthetic oligonucleotide
cagagcacagagacacaatgggagtgccca

SEQ ID NO: 30550 - DNA, 30 bp, Artificial Sequence
  Synthetic oligonucleotide
cggagcccgttggcctagaaagcaatccca

SEQ ID NO: 30551 - DNA, 30 bp, Artificial Sequence
  Synthetic oligonucleotide
acatcatacgaaattgtgcaatcactccca

SEQ ID NO: 30552 - DNA, 30 bp, Artificial Sequence
  Synthetic oligonucleotide
caggattgcgatcatcgggcaaagaagcca

SEQ ID NO: 30553 - DNA, 30 bp, Artificial Sequence
  Synthetic oligonucleotide
gacacaaaagatctatcgcttaaagcgcca

SEQ ID NO: 30554 - DNA, 30 bp, Artificial Sequence
  Synthetic oligonucleotide
aaaggcgggtgctaagtcgagtccaggcca

SEQ ID NO: 30555 - DNA, 30 bp, Artificial Sequence
  Synthetic oligonucleotide
ggaacggtagtgttatgccatagtgtgcca

SEQ ID NO: 30556 - DNA, 30 bp, Artificial Sequence
  Synthetic oligonucleotide
acgggccatgaaagaggtgccgggttgcca

SEQ ID NO: 30557 - DNA, 30 bp, Artificial Sequence
  Synthetic oligonucleotide
ccgattcaccaaatgaagtgcgaccatcca

SEQ ID NO: 30558 - DNA, 30 bp, Artificial Sequence
  Synthetic oligonucleotide
acagaggtccagacgattagcgtagctcca

SEQ ID NO: 30559 - DNA, 30 bp, Artificial Sequence
  Synthetic oligonucleotide
ctacggcaagtgtctggaaagcatagtcca

SEQ ID NO: 30560 - DNA, 30 bp, Artificial Sequence
  Synthetic oligonucleotide
accataggggcggcacgagcggcgtgtcca

SEQ ID NO: 30561 - DNA, 30 bp, Artificial Sequence
  Synthetic oligonucleotide
ccatagtaagagggccgggccaccgttcca

SEQ ID NO: 30562 - DNA, 30 bp, Artificial Sequence
  Synthetic oligonucleotide
gattgatacgtcgggcaaacatctaaagca

SEQ ID NO: 30563 - DNA, 30 bp, Artificial Sequence
  Synthetic oligonucleotide
taggaaaaattgctagctggcaccgaagca

SEQ ID NO: 30564 - DNA, 30 bp, Artificial Sequence
  Synthetic oligonucleotide
tgtctaaccagacaccttgaaagcacagca

SEQ ID NO: 30565 - DNA, 31 bp, Artificial Sequence
  Synthetic oligonucleotide
ggttgtgtcaggagatcgggagatgacagca

SEQ ID NO: 30566 - DNA, 30 bp, Artificial Sequence
  Synthetic oligonucleotide
gcgacgactgttaggtagggccaaagagca

SEQ ID NO: 30567 - DNA, 30 bp, Artificial Sequence
  Synthetic oligonucleotide
cggtttagcggtgaggggtgtgtcagagca

SEQ ID NO: 30568 - DNA, 30 bp, Artificial Sequence
  Synthetic oligonucleotide
ggacaagataacggatagagtcttagagca

SEQ ID NO: 30569 - DNA, 30 bp, Artificial Sequence
  Synthetic oligonucleotide
gcaccacatgcgcacggcccggagcgagca

SEQ ID NO: 30570 - DNA, 30 bp, Artificial Sequence
  Synthetic oligonucleotide
tggtaaccgtagtaggggcctgtgggagca

SEQ ID NO: 30571 - DNA, 30 bp, Artificial Sequence
  Synthetic oligonucleotide
gaacggggacagtaaaagtcgacttgagca

SEQ ID NO: 30572 - DNA, 30 bp, Artificial Sequence
  Synthetic oligonucleotide
cagagacggttcttagtcaggaggaccgca

SEQ ID NO: 30573 - DNA, 30 bp, Artificial Sequence
  Synthetic oligonucleotide
ggccattcagcagaaagggtgcctacggca

SEQ ID NO: 30574 - DNA, 30 bp, Artificial Sequence
  Synthetic oligonucleotide
gacagagtacgggcatagtctctatcggca

SEQ ID NO: 30575 - DNA, 30 bp, Artificial Sequence
  Synthetic oligonucleotide
cgagaaagacggtccacaactcttagggca

SEQ ID NO: 30576 - DNA, 30 bp, Artificial Sequence
  Synthetic oligonucleotide
ccctaaggagacttaccgataagccgggca

SEQ ID NO: 30577 - DNA, 30 bp, Artificial Sequence
  Synthetic oligonucleotide
actggtgagaacacagtaaatgtagtggca

SEQ ID NO: 30578 - DNA, 30 bp, Artificial Sequence
  Synthetic oligonucleotide
gtggcagacaatgaagctcaacactatgca

SEQ ID NO: 30579 - DNA, 30 bp, Artificial Sequence
  Synthetic oligonucleotide
ccccgtgtaaagaaacgagccaagactgca

SEQ ID NO: 30580 - DNA, 30 bp, Artificial Sequence
  Synthetic oligonucleotide
ccaggagaaacaaaccctcttaagcgtgca

SEQ ID NO: 30581 - DNA, 30 bp, Artificial Sequence
  Synthetic oligonucleotide
cgaaaacagcgattaactttatgcattgca

SEQ ID NO: 30582 - DNA, 30 bp, Artificial Sequence
  Synthetic oligonucleotide
cgtaactatacccgacaacaactcggatca

SEQ ID NO: 30583 - DNA, 30 bp, Artificial Sequence
  Synthetic oligonucleotide
tcgtgctggcgctagtgggcaacaatatca

SEQ ID NO: 30584 - DNA, 30 bp, Artificial Sequence
  Synthetic oligonucleotide
gacacgagcttactgaggtgaggacactca

SEQ ID NO: 30585 - DNA, 30 bp, Artificial Sequence
  Synthetic oligonucleotide
ccaatcgccgaaatcgacacactccactca

SEQ ID NO: 30586 - DNA, 30 bp, Artificial Sequence
  Synthetic oligonucleotide
cgtggacagtgagacaaaactgggtactca

SEQ ID NO: 30587 - DNA, 30 bp, Artificial Sequence
  Synthetic oligonucleotide
aaggtggtatctaagacaatcaatacctca

SEQ ID NO: 30588 - DNA, 30 bp, Artificial Sequence
  Synthetic oligonucleotide
aaggaattctacatcaagccggcgagctca

SEQ ID NO: 30589 - DNA, 30 bp, Artificial Sequence
  Synthetic oligonucleotide
agggcaccacgtccaagaaccgaggtctca

SEQ ID NO: 30590 - DNA, 30 bp, Artificial Sequence
  Synthetic oligonucleotide
tgatctggagccaggctaagcaaaaagtca

SEQ ID NO: 30591 - DNA, 30 bp, Artificial Sequence
  Synthetic oligonucleotide
acagcgactgaaatatattttcgcgagtca

SEQ ID NO: 30592 - DNA, 30 bp, Artificial Sequence
  Synthetic oligonucleotide
atagatctacgagactcgagagtagcgtca

SEQ ID NO: 30593 - DNA, 30 bp, Artificial Sequence
  Synthetic oligonucleotide
tcgattgaagcgaggtggagaagcgcgtca

SEQ ID NO: 30594 - DNA, 30 bp, Artificial Sequence
  Synthetic oligonucleotide
gcatgggtcaagcacaataagtaggcgtca

SEQ ID NO: 30595 - DNA, 30 bp, Artificial Sequence
  Synthetic oligonucleotide
acatactccatagaagggaaccacaggtca

SEQ ID NO: 30596 - DNA, 30 bp, Artificial Sequence
  Synthetic oligonucleotide
aacatcgaacgagcacaggtgtggaggtca

SEQ ID NO: 30597 - DNA, 30 bp, Artificial Sequence
  Synthetic oligonucleotide
gcaaggatcacaaattaatatagagggtca

SEQ ID NO: 30598 - DNA, 31 bp, Artificial Sequence
  Synthetic oligonucleotide
cacggtcttgtactctagaaaagggtggtca

SEQ ID NO: 30599 - DNA, 30 bp, Artificial Sequence
  Synthetic oligonucleotide
gtaaagactgaaggaagccactacatgtca

SEQ ID NO: 30600 - DNA, 30 bp, Artificial Sequence
  Synthetic oligonucleotide
tcgatgtgcgagagtataacagtcttgtca

SEQ ID NO: 30601 - DNA, 30 bp, Artificial Sequence
  Synthetic oligonucleotide
gtgcgagccgacgtccattccccgcattca

SEQ ID NO: 30602 - DNA, 30 bp, Artificial Sequence
  Synthetic oligonucleotide
cgcgacggcgtcagggataggctcgcttca

SEQ ID NO: 30603 - DNA, 30 bp, Artificial Sequence
  Synthetic oligonucleotide
cgctcgaaagggaacaaatgagacagttca

SEQ ID NO: 30604 - DNA, 30 bp, Artificial Sequence
  Synthetic oligonucleotide
aagggagcaaaccaggccgcgtagtgttca

SEQ ID NO: 30605 - DNA, 30 bp, Artificial Sequence
  Synthetic oligonucleotide
gcttcggtaagagaccgaaagctaaaaaga

SEQ ID NO: 30606 - DNA, 30 bp, Artificial Sequence
  Synthetic oligonucleotide
accagccggagtggaagatagtactaaaga

SEQ ID NO: 30607 - DNA, 30 bp, Artificial Sequence
  Synthetic oligonucleotide
aagggcaatctcacgacccggcggtaaaga

SEQ ID NO: 30608 - DNA, 30 bp, Artificial Sequence
  Synthetic oligonucleotide
acgccacaatgatgacatcaaacaacaaga

SEQ ID NO: 30609 - DNA, 30 bp, Artificial Sequence
  Synthetic oligonucleotide
gatggatgtgacaaacttaatagcacaaga

SEQ ID NO: 30610 - DNA, 30 bp, Artificial Sequence
  Synthetic oligonucleotide
acatctgcagtaagaaatatgaatacaaga

SEQ ID NO: 30611 - DNA, 30 bp, Artificial Sequence
  Synthetic oligonucleotide
ggcgcgggccagagtcacaatcatacaaga

SEQ ID NO: 30612 - DNA, 30 bp, Artificial Sequence
  Synthetic oligonucleotide
tagtgtaaattccagacagactcgccaaga

SEQ ID NO: 30613 - DNA, 30 bp, Artificial Sequence
  Synthetic oligonucleotide
tagtggagggaatagtttcggtgagcaaga

SEQ ID NO: 30614 - DNA, 30 bp, Artificial Sequence
  Synthetic oligonucleotide
aacaacgggatataacaagcgatagcaaga

SEQ ID NO: 30615 - DNA, 30 bp, Artificial Sequence
  Synthetic oligonucleotide
cgagtagtcgtctgttcagaactgcgaaga

SEQ ID NO: 30616 - DNA, 30 bp, Artificial Sequence
  Synthetic oligonucleotide
tcgaggggctcgcacctcagatatcgaaga

SEQ ID NO: 30617 - DNA, 31 bp, Artificial Sequence
  Synthetic oligonucleotide
tgaccgtcgtgtcgttaggaggttcggaaga

SEQ ID NO: 30618 - DNA, 30 bp, Artificial Sequence
  Synthetic oligonucleotide
atgtgggcacagccgataaaaatattaaga

SEQ ID NO: 30619 - DNA, 30 bp, Artificial Sequence
  Synthetic oligonucleotide
gcacattcaacgcgagtatatcctaacaga

SEQ ID NO: 30620 - DNA, 30 bp, Artificial Sequence
  Synthetic oligonucleotide
aagcaatggggtcacatatcctaacacaga

SEQ ID NO: 30621 - DNA, 30 bp, Artificial Sequence
  Synthetic oligonucleotide
ccgcgcagaaacaccgcgcctcgtcacaga

SEQ ID NO: 30622 - DNA, 30 bp, Artificial Sequence
  Synthetic oligonucleotide
agaccgatagatgacagacggggtcacaga

SEQ ID NO: 30623 - DNA, 30 bp, Artificial Sequence
  Synthetic oligonucleotide
gcctcaattgaatgaacggatcaggacaga

SEQ ID NO: 30624 - DNA, 30 bp, Artificial Sequence
  Synthetic oligonucleotide
agaacaagggacatgcttttgatctacaga

SEQ ID NO: 30625 - DNA, 30 bp, Artificial Sequence
  Synthetic oligonucleotide
agcatgaggattataagggtgttacccaga

SEQ ID NO: 30626 - DNA, 30 bp, Artificial Sequence
  Synthetic oligonucleotide
gcgggttaagatggacagactgagtccaga

SEQ ID NO: 30627 - DNA, 30 bp, Artificial Sequence
  Synthetic oligonucleotide
ctgactaaacgaggtgggcagtggtccaga

SEQ ID NO: 30628 - DNA, 30 bp, Artificial Sequence
  Synthetic oligonucleotide
ctgaaagcgcacgtatcggagtagggcaga

SEQ ID NO: 30629 - DNA, 30 bp, Artificial Sequence
  Synthetic oligonucleotide
gaaacatcacaacgttgcaagcagtgcaga

SEQ ID NO: 30630 - DNA, 30 bp, Artificial Sequence
  Synthetic oligonucleotide
ttgctaggacgacattatccaagtatcaga

SEQ ID NO: 30631 - DNA, 30 bp, Artificial Sequence
  Synthetic oligonucleotide
taggttcgaattagaagtgagtacgtcaga

SEQ ID NO: 30632 - DNA, 30 bp, Artificial Sequence
  Synthetic oligonucleotide
tcgtaactagaactcccttagcgggtcaga

SEQ ID NO: 30633 - DNA, 30 bp, Artificial Sequence
  Synthetic oligonucleotide
aggcgcgcgcctgggtttgttcaagagaga

SEQ ID NO: 30634 - DNA, 30 bp, Artificial Sequence
  Synthetic oligonucleotide
tctcagatcgaagtatagcggcccgagaga

SEQ ID NO: 30635 - DNA, 30 bp, Artificial Sequence
  Synthetic oligonucleotide
atccagggggattcccgattgcactagaga

SEQ ID NO: 30636 - DNA, 30 bp, Artificial Sequence
  Synthetic oligonucleotide
ttaggaaaacaatgtgatgcactttagaga

SEQ ID NO: 30637 - DNA, 30 bp, Artificial Sequence
  Synthetic oligonucleotide
atccaaacatacgacagcgcatgcacgaga

SEQ ID NO: 30638 - DNA, 30 bp, Artificial Sequence
  Synthetic oligonucleotide
agacatgcgattaggaacgattatccgaga

SEQ ID NO: 30639 - DNA, 30 bp, Artificial Sequence
  Synthetic oligonucleotide
actagattaaggccgcctataagagcgaga

SEQ ID NO: 30640 - DNA, 30 bp, Artificial Sequence
  Synthetic oligonucleotide
atgagacccaacctggtgatatacaggaga

SEQ ID NO: 30641 - DNA, 30 bp, Artificial Sequence
  Synthetic oligonucleotide
gaagagaatcgttggcctgatcagaggaga

SEQ ID NO: 30642 - DNA, 30 bp, Artificial Sequence
  Synthetic oligonucleotide
gggcgactgactagggtatcattgatgaga

SEQ ID NO: 30643 - DNA, 30 bp, Artificial Sequence
  Synthetic oligonucleotide
ctatgcgagtacacgtgaaggactatgaga

SEQ ID NO: 30644 - DNA, 30 bp, Artificial Sequence
  Synthetic oligonucleotide
atcaaagaaaggtacgccattagtctgaga

SEQ ID NO: 30645 - DNA, 30 bp, Artificial Sequence
  Synthetic oligonucleotide
gacaggaaccggaactatacaggcgtgaga

SEQ ID NO: 30646 - DNA, 30 bp, Artificial Sequence
  Synthetic oligonucleotide
agtgtaagcggctcgaaggccgagttgaga

SEQ ID NO: 30647 - DNA, 30 bp, Artificial Sequence
  Synthetic oligonucleotide
tttggacgagcaaaaggtcaccgaaataga

SEQ ID NO: 30648 - DNA, 30 bp, Artificial Sequence
  Synthetic oligonucleotide
gccaactccagcaaggagaaggcgcataga

SEQ ID NO: 30649 - DNA, 30 bp, Artificial Sequence
  Synthetic oligonucleotide
catatggaaaaagattggctttgggataga

SEQ ID NO: 30650 - DNA, 30 bp, Artificial Sequence
  Synthetic oligonucleotide
ggccgtgaaggctacaagaaggcccctaga

SEQ ID NO: 30651 - DNA, 30 bp, Artificial Sequence
  Synthetic oligonucleotide
agagacaaataattggatacgggtgctaga

SEQ ID NO: 30652 - DNA, 30 bp, Artificial Sequence
  Synthetic oligonucleotide
ggcttgtagtaccgcaaatgagacagtaga

SEQ ID NO: 30653 - DNA, 30 bp, Artificial Sequence
  Synthetic oligonucleotide
cgacatgttcgggtataggtgctcagtaga

SEQ ID NO: 30654 - DNA, 30 bp, Artificial Sequence
  Synthetic oligonucleotide
tcgcgaactgcatgtgacgaacagggtaga

SEQ ID NO: 30655 - DNA, 30 bp, Artificial Sequence
  Synthetic oligonucleotide
atctagcaaagggaatgactaaggggtaga

SEQ ID NO: 30656 - DNA, 30 bp, Artificial Sequence
  Synthetic oligonucleotide
gacaaaactggcgtgcatgcaagcaaacga

SEQ ID NO: 30657 - DNA, 30 bp, Artificial Sequence
  Synthetic oligonucleotide
tcatacaggtcacatacttggagagaacga

SEQ ID NO: 30658 - DNA, 30 bp, Artificial Sequence
  Synthetic oligonucleotide
cgtatacgttagatttcgagggacgaacga

SEQ ID NO: 30659 - DNA, 30 bp, Artificial Sequence
  Synthetic oligonucleotide
gcgaggaggtaaaggcaaagtcggcgacga

SEQ ID NO: 30660 - DNA, 30 bp, Artificial Sequence
  Synthetic oligonucleotide
gtacagcgagtataaaggaaactgggacga

SEQ ID NO: 30661 - DNA, 30 bp, Artificial Sequence
  Synthetic oligonucleotide
caatacgatctggtcagcccactggtacga

SEQ ID NO: 30662 - DNA, 30 bp, Artificial Sequence
  Synthetic oligonucleotide
gtggatgtacggaaaaccgagtaaaaccga

SEQ ID NO: 30663 - DNA, 30 bp, Artificial Sequence
  Synthetic oligonucleotide
cacatcaatggcgaacaagctggcgcccga

SEQ ID NO: 30664 - DNA, 30 bp, Artificial Sequence
  Synthetic oligonucleotide
ctacatagtaataaggatgaacagagccga

SEQ ID NO: 30665 - DNA, 30 bp, Artificial Sequence
  Synthetic oligonucleotide
gggcgagtcaatgaccatgtacctggccga

SEQ ID NO: 30666 - DNA, 30 bp, Artificial Sequence
  Synthetic oligonucleotide
agagacgattcagggtcaccatttatccga

SEQ ID NO: 30667 - DNA, 30 bp, Artificial Sequence
  Synthetic oligonucleotide
tgctcacagggctaccgtattggattccga

SEQ ID NO: 30668 - DNA, 30 bp, Artificial Sequence
  Synthetic oligonucleotide
taggttatcagcgggagacaataaacgcga

SEQ ID NO: 30669 - DNA, 30 bp, Artificial Sequence
  Synthetic oligonucleotide
ctgcaaaacctcaatcggcacaacccgcga

SEQ ID NO: 30670 - DNA, 30 bp, Artificial Sequence
  Synthetic oligonucleotide
gcgtacaagcaagtgggatttagcgcgcga

SEQ ID NO: 30671 - DNA, 30 bp, Artificial Sequence
  Synthetic oligonucleotide
ataacaaaccgagctagtcaacggcggcga

SEQ ID NO: 30672 - DNA, 30 bp, Artificial Sequence
  Synthetic oligonucleotide
cgaaacagaattctagtggaacattggcga

SEQ ID NO: 30673 - DNA, 30 bp, Artificial Sequence
  Synthetic oligonucleotide
gattggggagacaacgatcccatggtgcga

SEQ ID NO: 30674 - DNA, 30 bp, Artificial Sequence
  Synthetic oligonucleotide
cggagtccacagactcgaactggtgtgcga

SEQ ID NO: 30675 - DNA, 30 bp, Artificial Sequence
  Synthetic oligonucleotide
ggtaatatgcgaagaaagagcatctctcga

SEQ ID NO: 30676 - DNA, 30 bp, Artificial Sequence
  Synthetic oligonucleotide
cggggctcaggacataactccatacgtcga

SEQ ID NO: 30677 - DNA, 30 bp, Artificial Sequence
  Synthetic oligonucleotide
aagctgaaccacaatattgcagtcggtcga

SEQ ID NO: 30678 - DNA, 30 bp, Artificial Sequence
  Synthetic oligonucleotide
gagagaagtcctggactatatgcctgtcga

SEQ ID NO: 30679 - DNA, 30 bp, Artificial Sequence
  Synthetic oligonucleotide
tataccaccgtcaaacgagaacctaaagga

SEQ ID NO: 30680 - DNA, 30 bp, Artificial Sequence
  Synthetic oligonucleotide
actggagttagctcattcttatcgcaagga

SEQ ID NO: 30681 - DNA, 30 bp, Artificial Sequence
  Synthetic oligonucleotide
ttgtcggggaatgacaagggacctcaagga

SEQ ID NO: 30682 - DNA, 30 bp, Artificial Sequence
  Synthetic oligonucleotide
aacgaccatcacgggtacgtgggagaagga

SEQ ID NO: 30683 - DNA, 30 bp, Artificial Sequence
  Synthetic oligonucleotide
agtaatgtcgaggggtgacagtcaacagga

SEQ ID NO: 30684 - DNA, 30 bp, Artificial Sequence
  Synthetic oligonucleotide
cataagggtccgcaggggtatcgaacagga

SEQ ID NO: 30685 - DNA, 30 bp, Artificial Sequence
  Synthetic oligonucleotide
gggacggaaagactgtactagactccagga

SEQ ID NO: 30686 - DNA, 30 bp, Artificial Sequence
  Synthetic oligonucleotide
cgttggcgtaagcatacatgaagaagagga

SEQ ID NO: 30687 - DNA, 30 bp, Artificial Sequence
  Synthetic oligonucleotide
gctgcacgaatcacaggcgacttaagagga

SEQ ID NO: 30688 - DNA, 30 bp, Artificial Sequence
  Synthetic oligonucleotide
cggcgcagcgaatggatcggaaagagagga

SEQ ID NO: 30689 - DNA, 30 bp, Artificial Sequence
  Synthetic oligonucleotide
gagccgcgaagagagattccgacccgagga

SEQ ID NO: 30690 - DNA, 30 bp, Artificial Sequence
  Synthetic oligonucleotide
acgggtaggatgttctctggtcatcgagga

SEQ ID NO: 30691 - DNA, 30 bp, Artificial Sequence
  Synthetic oligonucleotide
acaaatcagttcggatggtacgaaggagga

SEQ ID NO: 30692 - DNA, 30 bp, Artificial Sequence
  Synthetic oligonucleotide
aacgttaaagggggacaacgcagtggagga

SEQ ID NO: 30693 - DNA, 30 bp, Artificial Sequence
  Synthetic oligonucleotide
ccaggaaatatcaagcctaaatactgagga

SEQ ID NO: 30694 - DNA, 30 bp, Artificial Sequence
  Synthetic oligonucleotide
tagtccgactcgcgagactagggattagga

SEQ ID NO: 30695 - DNA, 30 bp, Artificial Sequence
  Synthetic oligonucleotide
ggaaatgtgaaactttgactgaacttagga

SEQ ID NO: 30696 - DNA, 30 bp, Artificial Sequence
  Synthetic oligonucleotide
atgcccagaaaggctcatcaagagcacgga

SEQ ID NO: 30697 - DNA, 30 bp, Artificial Sequence
  Synthetic oligonucleotide
tcgaatcagggaccaaggacgctagacgga

SEQ ID NO: 30698 - DNA, 30 bp, Artificial Sequence
  Synthetic oligonucleotide
gcactcagaacggtaagatgtaggcccgga

SEQ ID NO: 30699 - DNA, 30 bp, Artificial Sequence
  Synthetic oligonucleotide
taaagatacgatgcggtgggaccagccgga

SEQ ID NO: 30700 - DNA, 30 bp, Artificial Sequence
  Synthetic oligonucleotide
tggcatagccgctgaaatgagagtagcgga

SEQ ID NO: 30701 - DNA, 30 bp, Artificial Sequence
  Synthetic oligonucleotide
tacagtaaggataaagaaaattgagtcgga

SEQ ID NO: 30702 - DNA, 30 bp, Artificial Sequence
  Synthetic oligonucleotide
gctacaaaggactaagcgcggtcccaggga

SEQ ID NO: 30703 - DNA, 30 bp, Artificial Sequence
  Synthetic oligonucleotide
ccggacgactggactctctcacctcaggga

SEQ ID NO: 30704 - DNA, 30 bp, Artificial Sequence
  Synthetic oligonucleotide
gtcaaccggtaagggaagaggatagaggga

SEQ ID NO: 30705 - DNA, 30 bp, Artificial Sequence
  Synthetic oligonucleotide
gaggcactaataggaatgagttggcgggga

SEQ ID NO: 30706 - DNA, 40 bp, Artificial Sequence
  Synthetic oligonucleotide
aagataatacattcatggtagggtcggggatcggggggga

SEQ ID NO: 30707 - DNA, 30 bp, Artificial Sequence
  Synthetic oligonucleotide
caagtaaacacagtctcggtcctggtggga

SEQ ID NO: 30708 - DNA, 30 bp, Artificial Sequence
  Synthetic oligonucleotide
acggtcgtcgaggaacatgggacgaatgga

SEQ ID NO: 30709 - DNA, 30 bp, Artificial Sequence
  Synthetic oligonucleotide
acaataaccgacactcaaggtacatatgga

SEQ ID NO: 30710 - DNA, 30 bp, Artificial Sequence
  Synthetic oligonucleotide
gcacgcccaaacgcacggaaattgtatgga

SEQ ID NO: 30711 - DNA, 30 bp, Artificial Sequence
  Synthetic oligonucleotide
caagaaacggatcattggaaaccaactgga

SEQ ID NO: 30712 - DNA, 30 bp, Artificial Sequence
  Synthetic oligonucleotide
tacggaaacctgaatacgcaagggactgga

SEQ ID NO: 30713 - DNA, 30 bp, Artificial Sequence
  Synthetic oligonucleotide
gcaccaaaaaacagaagcggagatgctgga

SEQ ID NO: 30714 - DNA, 30 bp, Artificial Sequence
  Synthetic oligonucleotide
tgacgactttccctaagaaggagtgctgga

SEQ ID NO: 30715 - DNA, 30 bp, Artificial Sequence
  Synthetic oligonucleotide
acagtccgggccaggttcttcagcagtgga

SEQ ID NO: 30716 - DNA, 30 bp, Artificial Sequence
  Synthetic oligonucleotide
tcgtaggtaggctggaggcgatatattgga

SEQ ID NO: 30717 - DNA, 30 bp, Artificial Sequence
  Synthetic oligonucleotide
aggcagggcacgaagtgctagcaggttgga

SEQ ID NO: 30718 - DNA, 30 bp, Artificial Sequence
  Synthetic oligonucleotide
aggcgtaaagtgtgcacgtaggggcaatga

SEQ ID NO: 30719 - DNA, 30 bp, Artificial Sequence
  Synthetic oligonucleotide
gggcgattaccttgagtcaaggctgaatga

SEQ ID NO: 30720 - DNA, 30 bp, Artificial Sequence
  Synthetic oligonucleotide
cgttatgcgggatgggaaatagatacatga

SEQ ID NO: 30721 - DNA, 30 bp, Artificial Sequence
  Synthetic oligonucleotide
gatgacaggtaatgacagtgccacgcatga

SEQ ID NO: 30722 - DNA, 30 bp, Artificial Sequence
  Synthetic oligonucleotide
tggcaaagggcaaagtgtagaggttcatga

SEQ ID NO: 30723 - DNA, 30 bp, Artificial Sequence
  Synthetic oligonucleotide
cggacgttttacgggagagtcgcactatga

SEQ ID NO: 30724 - DNA, 30 bp, Artificial Sequence
  Synthetic oligonucleotide
tcacgggaatcgatacaccgccggtactga

SEQ ID NO: 30725 - DNA, 30 bp, Artificial Sequence
  Synthetic oligonucleotide
cacgttaggagaatagtgccgagggcctga

SEQ ID NO: 30726 - DNA, 30 bp, Artificial Sequence
  Synthetic oligonucleotide
gccagaggcgtctgacaacgtaagatctga

SEQ ID NO: 30727 - DNA, 30 bp, Artificial Sequence
  Synthetic oligonucleotide
cgaacggggagttgagaatagtctatctga

SEQ ID NO: 30728 - DNA, 30 bp, Artificial Sequence
  Synthetic oligonucleotide
ttgaacgggtagaaaggtgagagtatctga

SEQ ID NO: 30729 - DNA, 30 bp, Artificial Sequence
  Synthetic oligonucleotide
cctgggagaacggcctaggttgcactctga

SEQ ID NO: 30730 - DNA, 30 bp, Artificial Sequence
  Synthetic oligonucleotide
acatgagtgtacggtatcgaacgcgtctga

SEQ ID NO: 30731 - DNA, 30 bp, Artificial Sequence
  Synthetic oligonucleotide
aggagcgtgatctaatccgcgcacaagtga

SEQ ID NO: 30732 - DNA, 30 bp, Artificial Sequence
  Synthetic oligonucleotide
acgcaatgcacctagtgaagaagccagtga

SEQ ID NO: 30733 - DNA, 30 bp, Artificial Sequence
  Synthetic oligonucleotide
acctgaagcaaacgtaaagcgacagagtga

SEQ ID NO: 30734 - DNA, 30 bp, Artificial Sequence
  Synthetic oligonucleotide
tatgaatagggctaccgatggtacgagtga

SEQ ID NO: 30735 - DNA, 30 bp, Artificial Sequence
  Synthetic oligonucleotide
cgaagatcgtgtgccgcctcagaagcgtga

SEQ ID NO: 30736 - DNA, 30 bp, Artificial Sequence
  Synthetic oligonucleotide
tacgggggacgttcaatggcgggatcgtga

SEQ ID NO: 30737 - DNA, 30 bp, Artificial Sequence
  Synthetic oligonucleotide
cggcggaaacgacccacatacgatatgtga

SEQ ID NO: 30738 - DNA, 30 bp, Artificial Sequence
  Synthetic oligonucleotide
cgacggagagataaaccaacgactatgtga

SEQ ID NO: 30739 - DNA, 30 bp, Artificial Sequence
  Synthetic oligonucleotide
gacttggggacgacgtgggtcaagttgtga

SEQ ID NO: 30740 - DNA, 30 bp, Artificial Sequence
  Synthetic oligonucleotide
agtggaggatcgcgtcgaccaggatattga

SEQ ID NO: 30741 - DNA, 30 bp, Artificial Sequence
  Synthetic oligonucleotide
tgcacgggacatggcagtgcgatcacttga

SEQ ID NO: 30742 - DNA, 28 bp, Artificial Sequence
  Synthetic oligonucleotide
gcagggaagcaaggaacaagcagtttga

SEQ ID NO: 30743 - DNA, 30 bp, Artificial Sequence
  Synthetic oligonucleotide
cgagaagtagcgtaggttggatttaaaata

SEQ ID NO: 30744 - DNA, 30 bp, Artificial Sequence
  Synthetic oligonucleotide
cagggtctaagggtcaggatcaagcaaata

SEQ ID NO: 30745 - DNA, 30 bp, Artificial Sequence
  Synthetic oligonucleotide
gtaggaagagtacaggatcgtgggcaaata

SEQ ID NO: 30746 - DNA, 30 bp, Artificial Sequence
  Synthetic oligonucleotide
aaaatccgagggcaaagtaagtgcgaaata

SEQ ID NO: 30747 - DNA, 30 bp, Artificial Sequence
  Synthetic oligonucleotide
gcaaaaaattactagggaatccctccaata

SEQ ID NO: 30748 - DNA, 30 bp, Artificial Sequence
  Synthetic oligonucleotide
ccaagatcttggagtaaggattgagcaata

SEQ ID NO: 30749 - DNA, 30 bp, Artificial Sequence
  Synthetic oligonucleotide
ccatgagacatggagcgcatgtggtcaata

SEQ ID NO: 30750 - DNA, 30 bp, Artificial Sequence
  Synthetic oligonucleotide
catcacgtgtgaggatagctgggattaata

SEQ ID NO: 30751 - DNA, 30 bp, Artificial Sequence
  Synthetic oligonucleotide
taacgaagcgatcttctaagtgagcacata

SEQ ID NO: 30752 - DNA, 30 bp, Artificial Sequence
  Synthetic oligonucleotide
tgagaacaaatatctgtagtacgatacata

SEQ ID NO: 30753 - DNA, 30 bp, Artificial Sequence
  Synthetic oligonucleotide
acgatcaattgtagaagcaataccaccata

SEQ ID NO: 30754 - DNA, 30 bp, Artificial Sequence
  Synthetic oligonucleotide
aggacttcagagcagtcctcaccgaccata

SEQ ID NO: 30755 - DNA, 30 bp, Artificial Sequence
  Synthetic oligonucleotide
gaagaggacatatgcaaacaagaggtcata

SEQ ID NO: 30756 - DNA, 30 bp, Artificial Sequence
  Synthetic oligonucleotide
aacgtaatcgaacgcatacggggcaagata

SEQ ID NO: 30757 - DNA, 30 bp, Artificial Sequence
  Synthetic oligonucleotide
aacgggcgcgtcgggacccatatcaagata

SEQ ID NO: 30758 - DNA, 30 bp, Artificial Sequence
  Synthetic oligonucleotide
gggagggagggcgaaaaggaagcgcagata

SEQ ID NO: 30759 - DNA, 30 bp, Artificial Sequence
  Synthetic oligonucleotide
atgtgccaactaaacgcgtggcggacgata

SEQ ID NO: 30760 - DNA, 30 bp, Artificial Sequence
  Synthetic oligonucleotide
atcacaaacagtatgacgctgatgacgata

SEQ ID NO: 30761 - DNA, 30 bp, Artificial Sequence
  Synthetic oligonucleotide
caggcgagaacacaggatcttcatacgata

SEQ ID NO: 30762 - DNA, 30 bp, Artificial Sequence
  Synthetic oligonucleotide
cgactgacaaaggaatgtcgcaataggata

SEQ ID NO: 30763 - DNA, 30 bp, Artificial Sequence
  Synthetic oligonucleotide
ggtgcgtcaacccaaggtacgatatggata

SEQ ID NO: 30764 - DNA, 30 bp, Artificial Sequence
  Synthetic oligonucleotide
agtgaagggcgcagagccgagacgtggata

SEQ ID NO: 30765 - DNA, 30 bp, Artificial Sequence
  Synthetic oligonucleotide
atatgcacaaggaagggtacgaatatgata

SEQ ID NO: 30766 - DNA, 30 bp, Artificial Sequence
  Synthetic oligonucleotide
ctgcaagacggggattggccgacgttgata

SEQ ID NO: 30767 - DNA, 30 bp, Artificial Sequence
  Synthetic oligonucleotide
cgattcgcgtccaaagaaaccatggatata

SEQ ID NO: 30768 - DNA, 30 bp, Artificial Sequence
  Synthetic oligonucleotide
acgcgacggatcgaatcgtacatgtgtata

SEQ ID NO: 30769 - DNA, 30 bp, Artificial Sequence
  Synthetic oligonucleotide
cagtcataggtaaaggggaagatagttata

SEQ ID NO: 30770 - DNA, 30 bp, Artificial Sequence
  Synthetic oligonucleotide
gcgagcaaagtacctataacgagtaaacta

SEQ ID NO: 30771 - DNA, 30 bp, Artificial Sequence
  Synthetic oligonucleotide
acacaaatacatactatctatccacaacta

SEQ ID NO: 30772 - DNA, 30 bp, Artificial Sequence
  Synthetic oligonucleotide
atggaggacagagcagcacccatgtaacta

SEQ ID NO: 30773 - DNA, 30 bp, Artificial Sequence
  Synthetic oligonucleotide
aaaacgtgacgtgtaacatgtccgacacta

SEQ ID NO: 30774 - DNA, 30 bp, Artificial Sequence
  Synthetic oligonucleotide
cgatcaaggccaaatcaagagttgacacta

SEQ ID NO: 30775 - DNA, 31 bp, Artificial Sequence
  Synthetic oligonucleotide
cgagtgcaattcagaagatgaagaacgacta

SEQ ID NO: 30776 - DNA, 30 bp, Artificial Sequence
  Synthetic oligonucleotide
acgttgcagaaccagcttaaataacgacta

SEQ ID NO: 30777 - DNA, 30 bp, Artificial Sequence
  Synthetic oligonucleotide
gtggggcagggaaaactttgtaatcgacta

SEQ ID NO: 30778 - DNA, 30 bp, Artificial Sequence
  Synthetic oligonucleotide
ataaacgaaaatggatgtgtcgcgggacta

SEQ ID NO: 30779 - DNA, 30 bp, Artificial Sequence
  Synthetic oligonucleotide
aaaggtggcatgtaagtggtgaggtgacta

SEQ ID NO: 30780 - DNA, 30 bp, Artificial Sequence
  Synthetic oligonucleotide
cggagtcaggctacattggacaccttacta

SEQ ID NO: 30781 - DNA, 30 bp, Artificial Sequence
  Synthetic oligonucleotide
cggagcaaactgccaggagcggcataccta

SEQ ID NO: 30782 - DNA, 30 bp, Artificial Sequence
  Synthetic oligonucleotide
ccgggaaggtgcccaacgaccgtaacccta

SEQ ID NO: 30783 - DNA, 30 bp, Artificial Sequence
  Synthetic oligonucleotide
ttgtgggtcgtaagggagtagataagccta

SEQ ID NO: 30784 - DNA, 30 bp, Artificial Sequence
  Synthetic oligonucleotide
tgctcatgaacaagcgaatgcctatgccta

SEQ ID NO: 30785 - DNA, 30 bp, Artificial Sequence
  Synthetic oligonucleotide
tgaagcgataatggcacgaaagcacagcta

SEQ ID NO: 30786 - DNA, 30 bp, Artificial Sequence
  Synthetic oligonucleotide
agggcgtcaagtggtagcatcatagagcta

SEQ ID NO: 30787 - DNA, 30 bp, Artificial Sequence
  Synthetic oligonucleotide
cgtgcgcgactaggaccgtgaaaacatcta

SEQ ID NO: 30788 - DNA, 30 bp, Artificial Sequence
  Synthetic oligonucleotide
agcggagcggtccggcatagctcgtatcta

SEQ ID NO: 30789 - DNA, 30 bp, Artificial Sequence
  Synthetic oligonucleotide
cgggagtaagaatcatggggaagcactcta

SEQ ID NO: 30790 - DNA, 30 bp, Artificial Sequence
  Synthetic oligonucleotide
caacaggcaaaaagctgagtaggaggtcta

SEQ ID NO: 30791 - DNA, 30 bp, Artificial Sequence
  Synthetic oligonucleotide
acggatgacaaggaaaaacctataggtcta

SEQ ID NO: 30792 - DNA, 30 bp, Artificial Sequence
  Synthetic oligonucleotide
gcggaggtcgaaggggttacagctgttcta

SEQ ID NO: 30793 - DNA, 30 bp, Artificial Sequence
  Synthetic oligonucleotide
agcaaggcggagcaagttggaaaaaaagta

SEQ ID NO: 30794 - DNA, 30 bp, Artificial Sequence
  Synthetic oligonucleotide
ctgcgaactagggagtgcaaaacaaaagta

SEQ ID NO: 30795 - DNA, 30 bp, Artificial Sequence
  Synthetic oligonucleotide
acaccattcaaggtctagcgaaggcaagta

SEQ ID NO: 30796 - DNA, 30 bp, Artificial Sequence
  Synthetic oligonucleotide
cgaacaagcggggatctctaagtagaagta

SEQ ID NO: 30797 - DNA, 30 bp, Artificial Sequence
  Synthetic oligonucleotide
ccaacggaccagggcggccgagttgaagta

SEQ ID NO: 30798 - DNA, 30 bp, Artificial Sequence
  Synthetic oligonucleotide
gatccaaacgagtgcagtcgatggccagta

SEQ ID NO: 30799 - DNA, 30 bp, Artificial Sequence
  Synthetic oligonucleotide
cgaggagcaccccgtcgcaacactccagta

SEQ ID NO: 30800 - DNA, 30 bp, Artificial Sequence
  Synthetic oligonucleotide
cggatgaaaactacttattcaacaagagta

SEQ ID NO: 30801 - DNA, 30 bp, Artificial Sequence
  Synthetic oligonucleotide
cagttgaactcggatcggagttaaggagta

SEQ ID NO: 30802 - DNA, 30 bp, Artificial Sequence
  Synthetic oligonucleotide
cgagatcggtttcgagggcggggaggagta

SEQ ID NO: 30803 - DNA, 30 bp, Artificial Sequence
  Synthetic oligonucleotide
tagtggcatgggtataaaccagggggagta

SEQ ID NO: 30804 - DNA, 30 bp, Artificial Sequence
  Synthetic oligonucleotide
gttcaaatacagtggggaggggcgctagta

SEQ ID NO: 30805 - DNA, 30 bp, Artificial Sequence
  Synthetic oligonucleotide
tcggaccaggatgatcgcgcgctagtagta

SEQ ID NO: 30806 - DNA, 30 bp, Artificial Sequence
  Synthetic oligonucleotide
actgtacgatctaggatcgagtgggacgta

SEQ ID NO: 30807 - DNA, 30 bp, Artificial Sequence
  Synthetic oligonucleotide
tagggaacaccaatgacggtatgaaccgta

SEQ ID NO: 30808 - DNA, 30 bp, Artificial Sequence
  Synthetic oligonucleotide
acggcctaggccccgtgaggaataaccgta

SEQ ID NO: 30809 - DNA, 30 bp, Artificial Sequence
  Synthetic oligonucleotide
tttacggacgggatagtggcgacctccgta

SEQ ID NO: 30810 - DNA, 30 bp, Artificial Sequence
  Synthetic oligonucleotide
ggaaaactgcgacagggtttggtcagcgta

SEQ ID NO: 30811 - DNA, 30 bp, Artificial Sequence
  Synthetic oligonucleotide
taagtaggaccgatttaaacatagtgcgta

SEQ ID NO: 30812 - DNA, 30 bp, Artificial Sequence
  Synthetic oligonucleotide
aactggactccccggtaacatcctctcgta

SEQ ID NO: 30813 - DNA, 30 bp, Artificial Sequence
  Synthetic oligonucleotide
tcagatcgaagggcgttatgccagccggta

SEQ ID NO: 30814 - DNA, 30 bp, Artificial Sequence
  Synthetic oligonucleotide
cgagtaaagacctcaaggtactctccggta

SEQ ID NO: 30815 - DNA, 30 bp, Artificial Sequence
  Synthetic oligonucleotide
tcaagccatgttgggctagaacgaagggta

SEQ ID NO: 30816 - DNA, 30 bp, Artificial Sequence
  Synthetic oligonucleotide
tggggcatgaccagtagaccggtaagggta

SEQ ID NO: 30817 - DNA, 30 bp, Artificial Sequence
  Synthetic oligonucleotide
aacggaaagcgcgagcccgataagcgggta

SEQ ID NO: 30818 - DNA, 30 bp, Artificial Sequence
  Synthetic oligonucleotide
cgatgggccatagaaaggagtgctcgggta

SEQ ID NO: 30819 - DNA, 30 bp, Artificial Sequence
  Synthetic oligonucleotide
gggaaaatcgcctcaggaggtcatggggta

SEQ ID NO: 30820 - DNA, 30 bp, Artificial Sequence
  Synthetic oligonucleotide
agagaacacagaacacgtttcgtattggta

SEQ ID NO: 30821 - DNA, 30 bp, Artificial Sequence
  Synthetic oligonucleotide
gtcaacccagtaagcggagaggcgtatgta

SEQ ID NO: 30822 - DNA, 30 bp, Artificial Sequence
  Synthetic oligonucleotide
ggacgatcgggcttaagtaccctaactgta

SEQ ID NO: 30823 - DNA, 30 bp, Artificial Sequence
  Synthetic oligonucleotide
ggggcctagaagatcaatcctggtgctgta

SEQ ID NO: 30824 - DNA, 30 bp, Artificial Sequence
  Synthetic oligonucleotide
gacggaagcatggaatcatccctacgtgta

SEQ ID NO: 30825 - DNA, 30 bp, Artificial Sequence
  Synthetic oligonucleotide
aggactgggaatacacgagtgccgtaatta

SEQ ID NO: 30826 - DNA, 30 bp, Artificial Sequence
  Synthetic oligonucleotide
cggcatccagtgacaaggaacctgtaatta

SEQ ID NO: 30827 - DNA, 30 bp, Artificial Sequence
  Synthetic oligonucleotide
cttagaaggttggagagggtttgagcatta

SEQ ID NO: 30828 - DNA, 30 bp, Artificial Sequence
  Synthetic oligonucleotide
cacagtgaagttaagatcgtgttagcatta

SEQ ID NO: 30829 - DNA, 30 bp, Artificial Sequence
  Synthetic oligonucleotide
aacgaatgggtcaggggggtgatgtcatta

SEQ ID NO: 30830 - DNA, 30 bp, Artificial Sequence
  Synthetic oligonucleotide
acgtaggcgtattccacgatgaacggatta

SEQ ID NO: 30831 - DNA, 30 bp, Artificial Sequence
  Synthetic oligonucleotide
acctcagaagaaaccaaaatcaagaactta

SEQ ID NO: 30832 - DNA, 30 bp, Artificial Sequence
  Synthetic oligonucleotide
acgacgattgtctaaaatagcagttcctta

SEQ ID NO: 30833 - DNA, 30 bp, Artificial Sequence
  Synthetic oligonucleotide
ggctgaagtatggcgtaacgggagagctta

SEQ ID NO: 30834 - DNA, 30 bp, Artificial Sequence
  Synthetic oligonucleotide
ccacccgctacaaacattagagcctgctta

SEQ ID NO: 30835 - DNA, 30 bp, Artificial Sequence
  Synthetic oligonucleotide
cgaagaatgcccgacatccccggagagtta

SEQ ID NO: 30836 - DNA, 30 bp, Artificial Sequence
  Synthetic oligonucleotide
tcactgaagcaacgagtcagttaggagtta

SEQ ID NO: 30837 - DNA, 30 bp, Artificial Sequence
  Synthetic oligonucleotide
cctgcaaatgcgaaactccccacaatgtta

SEQ ID NO: 30838 - DNA, 30 bp, Artificial Sequence
  Synthetic oligonucleotide
ggtatatcacacgtgcgcgaaaagatgtta

SEQ ID NO: 30839 - DNA, 30 bp, Artificial Sequence
  Synthetic oligonucleotide
ccgacaagacttcatcagctccggcattta

SEQ ID NO: 30840 - DNA, 30 bp, Artificial Sequence
  Synthetic oligonucleotide
cattacacccaaaggaaaaaaacgtgttta

SEQ ID NO: 30841 - DNA, 30 bp, Artificial Sequence
  Synthetic oligonucleotide
gcgatcagtggagagttcgttcataaaaac

SEQ ID NO: 30842 - DNA, 30 bp, Artificial Sequence
  Synthetic oligonucleotide
ggataaggagtgttcaattcggcacaaaac

SEQ ID NO: 30843 - DNA, 30 bp, Artificial Sequence
  Synthetic oligonucleotide
cctaagctaactgcaaccttgcaccaaaac

SEQ ID NO: 30844 - DNA, 30 bp, Artificial Sequence
  Synthetic oligonucleotide
aacctaagagaaacgtcgatcccctaaaac

SEQ ID NO: 30845 - DNA, 30 bp, Artificial Sequence
  Synthetic oligonucleotide
cggcctggagtgatctgcaaacaaacaaac

SEQ ID NO: 30846 - DNA, 30 bp, Artificial Sequence
  Synthetic oligonucleotide
acagacgacctgtgactcgaagtagtaaac

SEQ ID NO: 30847 - DNA, 30 bp, Artificial Sequence
  Synthetic oligonucleotide
cactcgtcatgcggtataaagtgcgtaaac

SEQ ID NO: 30848 - DNA, 30 bp, Artificial Sequence
  Synthetic oligonucleotide
cacaccacgcactaaaagcactgcgacaac

SEQ ID NO: 30849 - DNA, 30 bp, Artificial Sequence
  Synthetic oligonucleotide
agttgaagcgactaggcacgtcaggacaac

SEQ ID NO: 30850 - DNA, 30 bp, Artificial Sequence
  Synthetic oligonucleotide
cgaggaccatacaggcatcagagccccaac

SEQ ID NO: 30851 - DNA, 30 bp, Artificial Sequence
  Synthetic oligonucleotide
accatacgtctagaggtgcgcatcagcaac

SEQ ID NO: 30852 - DNA, 30 bp, Artificial Sequence
  Synthetic oligonucleotide
tggaaagaatcagcgtccacagcgcgcaac

SEQ ID NO: 30853 - DNA, 30 bp, Artificial Sequence
  Synthetic oligonucleotide
ggaaaccacgaatactgttaggtgggcaac

SEQ ID NO: 30854 - DNA, 30 bp, Artificial Sequence
  Synthetic oligonucleotide
agtaaacattacacaataagggcaatcaac

SEQ ID NO: 30855 - DNA, 31 bp, Artificial Sequence
  Synthetic oligonucleotide
agaactggcgatgaaaggggactgagagaac

SEQ ID NO: 30856 - DNA, 30 bp, Artificial Sequence
  Synthetic oligonucleotide
tcgcgaatggtataacgagtgagcgagaac

SEQ ID NO: 30857 - DNA, 30 bp, Artificial Sequence
  Synthetic oligonucleotide
gggaatagaaaaaaaaatagacaggagaac

SEQ ID NO: 30858 - DNA, 30 bp, Artificial Sequence
  Synthetic oligonucleotide
acaaggttagctacgagagcaagtacgaac

SEQ ID NO: 30859 - DNA, 30 bp, Artificial Sequence
  Synthetic oligonucleotide
aaacgatggaacggattttagcaaccgaac

SEQ ID NO: 30860 - DNA, 30 bp, Artificial Sequence
  Synthetic oligonucleotide
cgcaaaaaaactggtatttgaactcggaac

SEQ ID NO: 30861 - DNA, 30 bp, Artificial Sequence
  Synthetic oligonucleotide
tggggcggtcccccccgaaccgaaaataac

SEQ ID NO: 30862 - DNA, 30 bp, Artificial Sequence
  Synthetic oligonucleotide
cgtgatgaccagacagcaaggaggaataac

SEQ ID NO: 30863 - DNA, 30 bp, Artificial Sequence
  Synthetic oligonucleotide
agcgccggacagggtgaagccttgaataac

SEQ ID NO: 30864 - DNA, 30 bp, Artificial Sequence
  Synthetic oligonucleotide
acaacgtcggtataaacagtggcggataac

SEQ ID NO: 30865 - DNA, 30 bp, Artificial Sequence
  Synthetic oligonucleotide
catagcgcactaagcgatcctagaactaac

SEQ ID NO: 30866 - DNA, 30 bp, Artificial Sequence
  Synthetic oligonucleotide
aacgaaggtgagacatgactttcgcctaac

SEQ ID NO: 30867 - DNA, 30 bp, Artificial Sequence
  Synthetic oligonucleotide
gcaaggggcaccccatacaagcgggaacac

SEQ ID NO: 30868 - DNA, 30 bp, Artificial Sequence
  Synthetic oligonucleotide
ggggcgagggggtgaataagacaataacac

SEQ ID NO: 30869 - DNA, 30 bp, Artificial Sequence
  Synthetic oligonucleotide
cagcaataggtacacatctgtcaagcacac

SEQ ID NO: 30870 - DNA, 30 bp, Artificial Sequence
  Synthetic oligonucleotide
ggctggcgaggctagtaacaaagctcacac

SEQ ID NO: 30871 - DNA, 30 bp, Artificial Sequence
  Synthetic oligonucleotide
agacgagtatagatgcgggaagcacgacac

SEQ ID NO: 30872 - DNA, 30 bp, Artificial Sequence
  Synthetic oligonucleotide
tgtcatagaaaagtgacattatcgtgacac

SEQ ID NO: 30873 - DNA, 30 bp, Artificial Sequence
  Synthetic oligonucleotide
tcgggctggtagccaaccggggacatacac

SEQ ID NO: 30874 - DNA, 31 bp, Artificial Sequence
  Synthetic oligonucleotide
aacacgctcagcataacactagcggtcccac

SEQ ID NO: 30875 - DNA, 30 bp, Artificial Sequence
  Synthetic oligonucleotide
acggtatgggagtgaccaagaagcggccac

SEQ ID NO: 30876 - DNA, 30 bp, Artificial Sequence
  Synthetic oligonucleotide
aggcctaaaggcgcgtgggctgttctccac

SEQ ID NO: 30877 - DNA, 30 bp, Artificial Sequence
  Synthetic oligonucleotide
acacatactagaaacaaaagctacacgcac

SEQ ID NO: 30878 - DNA, 30 bp, Artificial Sequence
  Synthetic oligonucleotide
ggctggactgaacaaagaagaaggccgcac

SEQ ID NO: 30879 - DNA, 30 bp, Artificial Sequence
  Synthetic oligonucleotide
atgtaagagaagtacaattagtgtgcgcac

SEQ ID NO: 30880 - DNA, 30 bp, Artificial Sequence
  Synthetic oligonucleotide
acacggacgggtattcgactgaggtgtcac

SEQ ID NO: 30881 - DNA, 30 bp, Artificial Sequence
  Synthetic oligonucleotide
aggaagacactcaaggaatatggcgttcac

SEQ ID NO: 30882 - DNA, 34 bp, Artificial Sequence
  Synthetic oligonucleotide
gatacgagaccaccacgtgtccatgagaaaagac

SEQ ID NO: 30883 - DNA, 30 bp, Artificial Sequence
  Synthetic oligonucleotide
ttgggagcaccatcaattaaagagtcagac

SEQ ID NO: 30884 - DNA, 30 bp, Artificial Sequence
  Synthetic oligonucleotide
gagaacgcggaaaagaagtatcgtagagac

SEQ ID NO: 30885 - DNA, 30 bp, Artificial Sequence
  Synthetic oligonucleotide
attaaagaggaaagagaatccgtgtgagac

SEQ ID NO: 30886 - DNA, 30 bp, Artificial Sequence
  Synthetic oligonucleotide
ctcaggactggaaatcgacttgcaatagac

SEQ ID NO: 30887 - DNA, 30 bp, Artificial Sequence
  Synthetic oligonucleotide
cggaagagtgtcaggccttaatctctagac

SEQ ID NO: 30888 - DNA, 30 bp, Artificial Sequence
  Synthetic oligonucleotide
aggtatcacgtgtgcatggtgtgcgtagac

SEQ ID NO: 30889 - DNA, 30 bp, Artificial Sequence
  Synthetic oligonucleotide
taagccataaaccgtaaagggtgagacgac

SEQ ID NO: 30890 - DNA, 30 bp, Artificial Sequence
  Synthetic oligonucleotide
aacagtctggaggtcaaggggtggtacgac

SEQ ID NO: 30891 - DNA, 30 bp, Artificial Sequence
  Synthetic oligonucleotide
acggcaggttagacgacgagtgctcccgac

SEQ ID NO: 30892 - DNA, 30 bp, Artificial Sequence
  Synthetic oligonucleotide
gaacgatacgttataaggaggtgcaaggac

SEQ ID NO: 30893 - DNA, 30 bp, Artificial Sequence
  Synthetic oligonucleotide
caggcaacaactagtacaaccgttaaggac

SEQ ID NO: 30894 - DNA, 30 bp, Artificial Sequence
  Synthetic oligonucleotide
caaaaaacgtaggcgtacaagatcgaggac

SEQ ID NO: 30895 - DNA, 30 bp, Artificial Sequence
  Synthetic oligonucleotide
tgggccagaagcgtagcaggattgccggac

SEQ ID NO: 30896 - DNA, 30 bp, Artificial Sequence
  Synthetic oligonucleotide
gtctaaacataacgggtggtcgcgagggac

SEQ ID NO: 30897 - DNA, 30 bp, Artificial Sequence
  Synthetic oligonucleotide
ataagccttaaacagagggatgggagggac

SEQ ID NO: 30898 - DNA, 30 bp, Artificial Sequence
  Synthetic oligonucleotide
ggctaaggaagacttaggcatgcgtgggac

SEQ ID NO: 30899 - DNA, 30 bp, Artificial Sequence
  Synthetic oligonucleotide
tggaatctgaagaaggctgagaaggtggac

SEQ ID NO: 30900 - DNA, 30 bp, Artificial Sequence
  Synthetic oligonucleotide
ctggagacgagtaggtgttcagaacatgac

SEQ ID NO: 30901 - DNA, 30 bp, Artificial Sequence
  Synthetic oligonucleotide
tcgtacctagaccccacttaaggagatgac

SEQ ID NO: 30902 - DNA, 30 bp, Artificial Sequence
  Synthetic oligonucleotide
caggcagtcctataaaaggctcccagtgac

SEQ ID NO: 30903 - DNA, 30 bp, Artificial Sequence
  Synthetic oligonucleotide
gggatcgaatgaagtggattagtacgtgac

SEQ ID NO: 30904 - DNA, 30 bp, Artificial Sequence
  Synthetic oligonucleotide
tgggcacgtgagtcctgtaacaggggtgac

SEQ ID NO: 30905 - DNA, 30 bp, Artificial Sequence
  Synthetic oligonucleotide
aggttcggcgcataaatcgatcggaaatac

SEQ ID NO: 30906 - DNA, 30 bp, Artificial Sequence
  Synthetic oligonucleotide
tagggaacaaaagccttctcgaatcaatac

SEQ ID NO: 30907 - DNA, 30 bp, Artificial Sequence
  Synthetic oligonucleotide
caagaacaacagtggcctgctccgtaatac

SEQ ID NO: 30908 - DNA, 30 bp, Artificial Sequence
  Synthetic oligonucleotide
aatacagccaaattagggtggcggacatac

SEQ ID NO: 30909 - DNA, 30 bp, Artificial Sequence
  Synthetic oligonucleotide
gtgcacgattggaactagactgattcatac

SEQ ID NO: 30910 - DNA, 30 bp, Artificial Sequence
  Synthetic oligonucleotide
tgggaagaagtgcggagggtctgcagatac

SEQ ID NO: 30911 - DNA, 30 bp, Artificial Sequence
  Synthetic oligonucleotide
tgacggtcgatacacgtaaagagaggatac

SEQ ID NO: 30912 - DNA, 30 bp, Artificial Sequence
  Synthetic oligonucleotide
gaccagagcgaatcctgcacgacgatatac

SEQ ID NO: 30913 - DNA, 30 bp, Artificial Sequence
  Synthetic oligonucleotide
aggctggataaacgtacgaatgggatatac

SEQ ID NO: 30914 - DNA, 30 bp, Artificial Sequence
  Synthetic oligonucleotide
tagaataactaggcaaatctgtcgaactac

SEQ ID NO: 30915 - DNA, 30 bp, Artificial Sequence
  Synthetic oligonucleotide
acggggcgaaacagccgtactacctactac

SEQ ID NO: 30916 - DNA, 30 bp, Artificial Sequence
  Synthetic oligonucleotide
tgaaaactgaggaggtcgctgcgtcgctac

SEQ ID NO: 30917 - DNA, 30 bp, Artificial Sequence
  Synthetic oligonucleotide
agaaggacgtgagtgggtcgcaggatctac

SEQ ID NO: 30918 - DNA, 30 bp, Artificial Sequence
  Synthetic oligonucleotide
acgatggaattggttaatggaagatcgtac

SEQ ID NO: 30919 - DNA, 30 bp, Artificial Sequence
  Synthetic oligonucleotide
caagacactgacccccgtaccaccgggtac

SEQ ID NO: 30920 - DNA, 30 bp, Artificial Sequence
  Synthetic oligonucleotide
cgggaatagatacgtcagtacatggggtac

SEQ ID NO: 30921 - DNA, 30 bp, Artificial Sequence
  Synthetic oligonucleotide
cgtacgtgcgtgaaagaagtctggctgtac

SEQ ID NO: 30922 - DNA, 30 bp, Artificial Sequence
  Synthetic oligonucleotide
agacggcgtaaactagcgttcggaaattac

SEQ ID NO: 30923 - DNA, 30 bp, Artificial Sequence
  Synthetic oligonucleotide
caacgtagtacatggcacgttctcgattac

SEQ ID NO: 30924 - DNA, 30 bp, Artificial Sequence
  Synthetic oligonucleotide
cagggtgaccctacgcggagcaaggattac

SEQ ID NO: 30925 - DNA, 30 bp, Artificial Sequence
  Synthetic oligonucleotide
gcggaggggtgatgataataggtcagttac

SEQ ID NO: 30926 - DNA, 30 bp, Artificial Sequence
  Synthetic oligonucleotide
aaacaagtggcaagtgtgctcagagaaacc

SEQ ID NO: 30927 - DNA, 30 bp, Artificial Sequence
  Synthetic oligonucleotide
cacacaacgcgatctaagggtgtgtaaacc

SEQ ID NO: 30928 - DNA, 30 bp, Artificial Sequence
  Synthetic oligonucleotide
acggatcagcgaaaacatacccgttaaacc

SEQ ID NO: 30929 - DNA, 30 bp, Artificial Sequence
  Synthetic oligonucleotide
cgttagagttcaagtagcatcggaagaacc

SEQ ID NO: 30930 - DNA, 30 bp, Artificial Sequence
  Synthetic oligonucleotide
cacaagcatcagggccaacacacgagaacc

SEQ ID NO: 30931 - DNA, 30 bp, Artificial Sequence
  Synthetic oligonucleotide
tggatgagtgaagctagtggccgtcgaacc

SEQ ID NO: 30932 - DNA, 30 bp, Artificial Sequence
  Synthetic oligonucleotide
tggtggtcagcacagcaccagaagggaacc

SEQ ID NO: 30933 - DNA, 30 bp, Artificial Sequence
  Synthetic oligonucleotide
acagatgactgtgacaatcgactgagcacc

SEQ ID NO: 30934 - DNA, 30 bp, Artificial Sequence
  Synthetic oligonucleotide
cctgagatgtggggtgaaataaggggcacc

SEQ ID NO: 30935 - DNA, 30 bp, Artificial Sequence
  Synthetic oligonucleotide
cgaacagtccgctagataccggctcagacc

SEQ ID NO: 30936 - DNA, 30 bp, Artificial Sequence
  Synthetic oligonucleotide
aggatgagcgagactagattacagccgacc

SEQ ID NO: 30937 - DNA, 30 bp, Artificial Sequence
  Synthetic oligonucleotide
gtcggggtaaataaatagttgggggcgacc

SEQ ID NO: 30938 - DNA, 30 bp, Artificial Sequence
  Synthetic oligonucleotide
taagggaacagtctggccaactcatcgacc

SEQ ID NO: 30939 - DNA, 30 bp, Artificial Sequence
  Synthetic oligonucleotide
caagcggaattacctcaaaaagtatcgacc

SEQ ID NO: 30940 - DNA, 30 bp, Artificial Sequence
  Synthetic oligonucleotide
tgggaggacgtgactcgtacctggaggacc

SEQ ID NO: 30941 - DNA, 30 bp, Artificial Sequence
  Synthetic oligonucleotide
gcacgacccaagagtagtggtcagcatacc

SEQ ID NO: 30942 - DNA, 30 bp, Artificial Sequence
  Synthetic oligonucleotide
cacggctacaagtggaaattgcgctatacc

SEQ ID NO: 30943 - DNA, 30 bp, Artificial Sequence
  Synthetic oligonucleotide
tgtggcgtagggtacattcacacaggtacc

SEQ ID NO: 30944 - DNA, 30 bp, Artificial Sequence
  Synthetic oligonucleotide
aaacgtaaaggtgcgacggtaatcaacccc

SEQ ID NO: 30945 - DNA, 30 bp, Artificial Sequence
  Synthetic oligonucleotide
ccgtaagaccacagcgcaagtcggtacccc

SEQ ID NO: 30946 - DNA, 30 bp, Artificial Sequence
  Synthetic oligonucleotide
cgctcacatagcggaaacacaatcgagccc

SEQ ID NO: 30947 - DNA, 30 bp, Artificial Sequence
  Synthetic oligonucleotide
cgaaacactactggacccgagctaatgccc

SEQ ID NO: 30948 - DNA, 30 bp, Artificial Sequence
  Synthetic oligonucleotide
cgttggattttgatcacagagttactgccc

SEQ ID NO: 30949 - DNA, 30 bp, Artificial Sequence
  Synthetic oligonucleotide
cggaggtcaaggaaaacttaagatgatccc

SEQ ID NO: 30950 - DNA, 30 bp, Artificial Sequence
  Synthetic oligonucleotide
cgggccagccaaaggtgggataagactccc

SEQ ID NO: 30951 - DNA, 30 bp, Artificial Sequence
  Synthetic oligonucleotide
gcgagccgaggtaaggctcagttccaagcc

SEQ ID NO: 30952 - DNA, 30 bp, Artificial Sequence
  Synthetic oligonucleotide
aggtaaggatcgagctataaggacagagcc

SEQ ID NO: 30953 - DNA, 30 bp, Artificial Sequence
  Synthetic oligonucleotide
ggtgactggaaaacggatctcacaaccgcc

SEQ ID NO: 30954 - DNA, 30 bp, Artificial Sequence
  Synthetic oligonucleotide
acagccctcttagttccattcgtggccgcc

SEQ ID NO: 30955 - DNA, 30 bp, Artificial Sequence
  Synthetic oligonucleotide
tcacgtgtccacctctcggaaaactccgcc

SEQ ID NO: 30956 - DNA, 30 bp, Artificial Sequence
  Synthetic oligonucleotide
gagcaggggattagaagtaagtgccgcgcc

SEQ ID NO: 30957 - DNA, 30 bp, Artificial Sequence
  Synthetic oligonucleotide
cgaaaacagctcacgcccgggtgcgtcgcc

SEQ ID NO: 30958 - DNA, 30 bp, Artificial Sequence
  Synthetic oligonucleotide
acggtagagtttagttgaaggcccaaggcc

SEQ ID NO: 30959 - DNA, 30 bp, Artificial Sequence
  Synthetic oligonucleotide
acatgtaaggaatcagatggaatgaaggcc

SEQ ID NO: 30960 - DNA, 30 bp, Artificial Sequence
  Synthetic oligonucleotide
ccgagacacatcggccaataaagggaggcc

SEQ ID NO: 30961 - DNA, 30 bp, Artificial Sequence
  Synthetic oligonucleotide
cgcaatctatcacaaatcgcaaaaacggcc

SEQ ID NO: 30962 - DNA, 30 bp, Artificial Sequence
  Synthetic oligonucleotide
acgacaacggtatagtacagcggacgggcc

SEQ ID NO: 30963 - DNA, 30 bp, Artificial Sequence
  Synthetic oligonucleotide
tgaaccgggagacctgaagggatcgatgcc

SEQ ID NO: 30964 - DNA, 30 bp, Artificial Sequence
  Synthetic oligonucleotide
tagacaacgagtgctagtgtatgtgctgcc

SEQ ID NO: 30965 - DNA, 30 bp, Artificial Sequence
  Synthetic oligonucleotide
gtagaactccccgagaaggatcgatctgcc

SEQ ID NO: 30966 - DNA, 30 bp, Artificial Sequence
  Synthetic oligonucleotide
cggccacaactcgaaagaacagtttctgcc

SEQ ID NO: 30967 - DNA, 30 bp, Artificial Sequence
  Synthetic oligonucleotide
cacgactggcagggtgcgacaagcggtgcc

SEQ ID NO: 30968 - DNA, 30 bp, Artificial Sequence
  Synthetic oligonucleotide
tcgaaagtctaggtcatgcgaagatgtgcc

SEQ ID NO: 30969 - DNA, 30 bp, Artificial Sequence
  Synthetic oligonucleotide
cgaacttacggagacgaagggcgccaatcc

SEQ ID NO: 30970 - DNA, 30 bp, Artificial Sequence
  Synthetic oligonucleotide
aacagagccgatacatccagaggccaatcc

SEQ ID NO: 30971 - DNA, 30 bp, Artificial Sequence
  Synthetic oligonucleotide
acaccacgcgaggctagttgtaagtaatcc

SEQ ID NO: 30972 - DNA, 30 bp, Artificial Sequence
  Synthetic oligonucleotide
acataaagtgtcgagcccgctcaatcatcc

SEQ ID NO: 30973 - DNA, 30 bp, Artificial Sequence
  Synthetic oligonucleotide
tgtacacgaaataagaaagcagctggatcc

SEQ ID NO: 30974 - DNA, 30 bp, Artificial Sequence
  Synthetic oligonucleotide
cagggacgaaatatgctttgagaaatatcc

SEQ ID NO: 30975 - DNA, 30 bp, Artificial Sequence
  Synthetic oligonucleotide
aaaaaagacggaccagaggcgcgcatatcc

SEQ ID NO: 30976 - DNA, 30 bp, Artificial Sequence
  Synthetic oligonucleotide
gctagactgggctcaaaaaatcaaatctcc

SEQ ID NO: 30977 - DNA, 30 bp, Artificial Sequence
  Synthetic oligonucleotide
agcatgccggcacgtatgcacccagagtcc

SEQ ID NO: 30978 - DNA, 30 bp, Artificial Sequence
  Synthetic oligonucleotide
ggtccgttaatccgagaacaccacgagtcc

SEQ ID NO: 30979 - DNA, 30 bp, Artificial Sequence
  Synthetic oligonucleotide
tgaccatggttaggtaggttggaatcgtcc

SEQ ID NO: 30980 - DNA, 30 bp, Artificial Sequence
  Synthetic oligonucleotide
tgtcccaacaagaggtacggcgggtcgtcc

SEQ ID NO: 30981 - DNA, 30 bp, Artificial Sequence
  Synthetic oligonucleotide
tggcaaagagtggtaatcgggcagcaaagc

SEQ ID NO: 30982 - DNA, 30 bp, Artificial Sequence
  Synthetic oligonucleotide
aagagccaccggtcggactatcgagaaagc

SEQ ID NO: 30983 - DNA, 30 bp, Artificial Sequence
  Synthetic oligonucleotide
gatgaatacggatgccacgtacccacaagc

SEQ ID NO: 30984 - DNA, 30 bp, Artificial Sequence
  Synthetic oligonucleotide
agttacacaacagaagcagtctggccaagc

SEQ ID NO: 30985 - DNA, 29 bp, Artificial Sequence
  Synthetic oligonucleotide
tgtcggccgataaacaaatacgcgcaagc

SEQ ID NO: 30986 - DNA, 30 bp, Artificial Sequence
  Synthetic oligonucleotide
acactaggaagctgaacatttagggcaagc

SEQ ID NO: 30987 - DNA, 30 bp, Artificial Sequence
  Synthetic oligonucleotide
tgaaaaaagagaaagaggattgcccgaagc

SEQ ID NO: 30988 - DNA, 30 bp, Artificial Sequence
  Synthetic oligonucleotide
tcaagggcagttaggtctacaaaatacagc

SEQ ID NO: 30989 - DNA, 30 bp, Artificial Sequence
  Synthetic oligonucleotide
ttgggagacatttgcgtgatcctaagcagc

SEQ ID NO: 30990 - DNA, 30 bp, Artificial Sequence
  Synthetic oligonucleotide
gagcaaatcaaacttgcgtgacctggcagc

SEQ ID NO: 30991 - DNA, 30 bp, Artificial Sequence
  Synthetic oligonucleotide
atagggtggttcaaagaaagcttaatcagc

SEQ ID NO: 30992 - DNA, 30 bp, Artificial Sequence
  Synthetic oligonucleotide
acagaccacacatttcaccgtgacgtcagc

SEQ ID NO: 30993 - DNA, 30 bp, Artificial Sequence
  Synthetic oligonucleotide
ctaatcgcaataaacaggcactgcttcagc

SEQ ID NO: 30994 - DNA, 30 bp, Artificial Sequence
  Synthetic oligonucleotide
agagggagattgtaggaccggacacagagc

SEQ ID NO: 30995 - DNA, 30 bp, Artificial Sequence
  Synthetic oligonucleotide
cgaaagcccactcgcggtggccgacagagc

SEQ ID NO: 30996 - DNA, 30 bp, Artificial Sequence
  Synthetic oligonucleotide
gaaccacccgaggccgttaaggtacagagc

SEQ ID NO: 30997 - DNA, 30 bp, Artificial Sequence
  Synthetic oligonucleotide
caggcacaagcgtaaaaaataatgcagagc

SEQ ID NO: 30998 - DNA, 30 bp, Artificial Sequence
  Synthetic oligonucleotide
acaaataactggcacgagtaggcggagagc

SEQ ID NO: 30999 - DNA, 30 bp, Artificial Sequence
  Synthetic oligonucleotide
cgataggcaagaatcttataccaaacgagc

SEQ ID NO: 31000 - DNA, 30 bp, Artificial Sequence
  Synthetic oligonucleotide
tgtaatcgcctccaaagcaagggaccgagc

SEQ ID NO: 31001 - DNA, 30 bp, Artificial Sequence
  Synthetic oligonucleotide
gaggcacgggtctgatccgtatgctcgagc

SEQ ID NO: 31002 - DNA, 30 bp, Artificial Sequence
  Synthetic oligonucleotide
gatcggaaactcggtcgaatggcatggagc

SEQ ID NO: 31003 - DNA, 30 bp, Artificial Sequence
  Synthetic oligonucleotide
tgaggagggcgactgatcatgcaaatgagc

SEQ ID NO: 31004 - DNA, 30 bp, Artificial Sequence
  Synthetic oligonucleotide
cgggcaacataggagatgtcgcacatgagc

SEQ ID NO: 31005 - DNA, 30 bp, Artificial Sequence
  Synthetic oligonucleotide
aggatgagatgaaaactcgcccaggtgagc

SEQ ID NO: 31006 - DNA, 30 bp, Artificial Sequence
  Synthetic oligonucleotide
cgatcggaacgcgggaatgtcatattgagc

SEQ ID NO: 31007 - DNA, 30 bp, Artificial Sequence
  Synthetic oligonucleotide
tgaggtaacgacattcctggcgagttgagc

SEQ ID NO: 31008 - DNA, 30 bp, Artificial Sequence
  Synthetic oligonucleotide
tcatccagatcatcccgggcgggaaatagc

SEQ ID NO: 31009 - DNA, 30 bp, Artificial Sequence
  Synthetic oligonucleotide
acgaaagtgccccacatactccgtaatagc

SEQ ID NO: 31010 - DNA, 30 bp, Artificial Sequence
  Synthetic oligonucleotide
agtaatagtgaaggtctcaggaagcatagc

SEQ ID NO: 31011 - DNA, 30 bp, Artificial Sequence
  Synthetic oligonucleotide
taagcggggcaaacaacatgcaatcatagc

SEQ ID NO: 31012 - DNA, 30 bp, Artificial Sequence
  Synthetic oligonucleotide
tgagtagccaaagggagggggctggatagc

SEQ ID NO: 31013 - DNA, 30 bp, Artificial Sequence
  Synthetic oligonucleotide
aaggtgtgaggaggaagatcgaggtatagc

SEQ ID NO: 31014 - DNA, 30 bp, Artificial Sequence
  Synthetic oligonucleotide
cagtacgctaataaatacagcgtgactagc

SEQ ID NO: 31015 - DNA, 30 bp, Artificial Sequence
  Synthetic oligonucleotide
cggccagacggtagccggaaagtaagtagc

SEQ ID NO: 31016 - DNA, 30 bp, Artificial Sequence
  Synthetic oligonucleotide
agggggagtgcttttccccgagggagtagc

SEQ ID NO: 31017 - DNA, 30 bp, Artificial Sequence
  Synthetic oligonucleotide
tagacagaagggagtattggagcgggtagc

SEQ ID NO: 31018 - DNA, 30 bp, Artificial Sequence
  Synthetic oligonucleotide
acagggacaacgtggatgtagacccaacgc

SEQ ID NO: 31019 - DNA, 30 bp, Artificial Sequence
  Synthetic oligonucleotide
aggataagggcttatccggggcgaacacgc

SEQ ID NO: 31020 - DNA, 30 bp, Artificial Sequence
  Synthetic oligonucleotide
tagaagagtacgggatgtatgggcccacgc

SEQ ID NO: 31021 - DNA, 30 bp, Artificial Sequence
  Synthetic oligonucleotide
aaggatatggtcgagtgcaaattgtaccgc

SEQ ID NO: 31022 - DNA, 30 bp, Artificial Sequence
  Synthetic oligonucleotide
cggacataaaggtgaggggtatgtacccgc

SEQ ID NO: 31023 - DNA, 30 bp, Artificial Sequence
  Synthetic oligonucleotide
aggagaccatagaaagctggtccactccgc

SEQ ID NO: 31024 - DNA, 30 bp, Artificial Sequence
  Synthetic oligonucleotide
acgtgtggggggcgaataacctgcgtccgc

SEQ ID NO: 31025 - DNA, 30 bp, Artificial Sequence
  Synthetic oligonucleotide
agactgtaacggatgtgtcgagggttccgc

SEQ ID NO: 31026 - DNA, 30 bp, Artificial Sequence
  Synthetic oligonucleotide
tagatattacacgaaagaacaggaaagcgc

SEQ ID NO: 31027 - DNA, 30 bp, Artificial Sequence
  Synthetic oligonucleotide
gcaagggggggcgatcgaacacctaagcgc

SEQ ID NO: 31028 - DNA, 30 bp, Artificial Sequence
  Synthetic oligonucleotide
gagcggtaatgaaagaacaatcgccggcgc

SEQ ID NO: 31029 - DNA, 30 bp, Artificial Sequence
  Synthetic oligonucleotide
cgcgactattactctacgaggagagtgcgc

SEQ ID NO: 31030 - DNA, 30 bp, Artificial Sequence
  Synthetic oligonucleotide
gcgtgggcaaattggttcgaaacggtgcgc

SEQ ID NO: 31031 - DNA, 30 bp, Artificial Sequence
  Synthetic oligonucleotide
catgacgtgaaggctgtggggcgtgtgcgc

SEQ ID NO: 31032 - DNA, 30 bp, Artificial Sequence
  Synthetic oligonucleotide
tggcgagttacgtccggagtgcagtgtcgc

SEQ ID NO: 31033 - DNA, 30 bp, Artificial Sequence
  Synthetic oligonucleotide
atcaggtagccgagtcactagagaattcgc

SEQ ID NO: 31034 - DNA, 30 bp, Artificial Sequence
  Synthetic oligonucleotide
acagcaggacaattagggtgccgtattcgc

SEQ ID NO: 31035 - DNA, 30 bp, Artificial Sequence
  Synthetic oligonucleotide
gaaaatcgtaaggaacaatatgtgacaggc

SEQ ID NO: 31036 - DNA, 30 bp, Artificial Sequence
  Synthetic oligonucleotide
tctaagggattcaatgaggatgcgtcaggc

SEQ ID NO: 31037 - DNA, 30 bp, Artificial Sequence
  Synthetic oligonucleotide
tagcgtaccaacgcgagggccaatagaggc

SEQ ID NO: 31038 - DNA, 30 bp, Artificial Sequence
  Synthetic oligonucleotide
tcatggagcatggagatgtagggaggaggc

SEQ ID NO: 31039 - DNA, 30 bp, Artificial Sequence
  Synthetic oligonucleotide
cacacgaacaccaggttgaaaagcctaggc

SEQ ID NO: 31040 - DNA, 30 bp, Artificial Sequence
  Synthetic oligonucleotide
acacaatcgtaccatcttcatgccgtaggc

SEQ ID NO: 31041 - DNA, 30 bp, Artificial Sequence
  Synthetic oligonucleotide
agggctgacatagtggaagagactggcggc

SEQ ID NO: 31042 - DNA, 30 bp, Artificial Sequence
  Synthetic oligonucleotide
cggggacacgaggaacgatcagccctcggc

SEQ ID NO: 31043 - DNA, 30 bp, Artificial Sequence
  Synthetic oligonucleotide
aggagtaagcagagtctaagaggagagggc

SEQ ID NO: 31044 - DNA, 30 bp, Artificial Sequence
  Synthetic oligonucleotide
acaacagagtcggccccgttaggtgagggc

SEQ ID NO: 31045 - DNA, 30 bp, Artificial Sequence
  Synthetic oligonucleotide
aataaggctaaatgacggaatgagtagggc

SEQ ID NO: 31046 - DNA, 30 bp, Artificial Sequence
  Synthetic oligonucleotide
ccgtcttgacagtttaaggaatagtagggc

SEQ ID NO: 31047 - DNA, 30 bp, Artificial Sequence
  Synthetic oligonucleotide
agggcggtctactggacaagcttagcgggc

SEQ ID NO: 31048 - DNA, 30 bp, Artificial Sequence
  Synthetic oligonucleotide
agtgatgacacgagttatagacaaaggggc

SEQ ID NO: 31049 - DNA, 30 bp, Artificial Sequence
  Synthetic oligonucleotide
aagggaagcgacaacatcgggggcgtgggc

SEQ ID NO: 31050 - DNA, 30 bp, Artificial Sequence
  Synthetic oligonucleotide
aggaatctgagcacagtccgaactttgggc

SEQ ID NO: 31051 - DNA, 30 bp, Artificial Sequence
  Synthetic oligonucleotide
actgcagcttcgaggaagtaggaagatggc

SEQ ID NO: 31052 - DNA, 30 bp, Artificial Sequence
  Synthetic oligonucleotide
accttggcagaggactaggtaccgactggc

SEQ ID NO: 31053 - DNA, 30 bp, Artificial Sequence
  Synthetic oligonucleotide
catcgtaaaaaatcgttaagacctgctggc

SEQ ID NO: 31054 - DNA, 30 bp, Artificial Sequence
  Synthetic oligonucleotide
ttgcaaagtacaggctgcccagggcgtggc

SEQ ID NO: 31055 - DNA, 30 bp, Artificial Sequence
  Synthetic oligonucleotide
caagagaatgaaaaacggctaagacttggc

SEQ ID NO: 31056 - DNA, 30 bp, Artificial Sequence
  Synthetic oligonucleotide
tagacatcatataaagaatcaaaggttggc

SEQ ID NO: 31057 - DNA, 30 bp, Artificial Sequence
  Synthetic oligonucleotide
gtgagggcgtcgacaatgacaggacaatgc

SEQ ID NO: 31058 - DNA, 30 bp, Artificial Sequence
  Synthetic oligonucleotide
agggcgttgagaataacatatagagaatgc

SEQ ID NO: 31059 - DNA, 30 bp, Artificial Sequence
  Synthetic oligonucleotide
gcaaggagcccaatcggaagcgtagcatgc

SEQ ID NO: 31060 - DNA, 30 bp, Artificial Sequence
  Synthetic oligonucleotide
tcaggaccaggaagtagtggaagacgatgc

SEQ ID NO: 31061 - DNA, 30 bp, Artificial Sequence
  Synthetic oligonucleotide
acagaaaggctaaagggggcgagaacctgc

SEQ ID NO: 31062 - DNA, 30 bp, Artificial Sequence
  Synthetic oligonucleotide
tgacaaagaccgatcacacctctccgctgc

SEQ ID NO: 31063 - DNA, 30 bp, Artificial Sequence
  Synthetic oligonucleotide
gcacgatcggaaaggaagtgggtgctctgc

SEQ ID NO: 31064 - DNA, 30 bp, Artificial Sequence
  Synthetic oligonucleotide
tccccacataaacactgaataggagagtgc

SEQ ID NO: 31065 - DNA, 30 bp, Artificial Sequence
  Synthetic oligonucleotide
caggggtcatcgagtgtcatagtggcgtgc

SEQ ID NO: 31066 - DNA, 30 bp, Artificial Sequence
  Synthetic oligonucleotide
acagcgcaacggtgacactggatcatgtgc

SEQ ID NO: 31067 - DNA, 30 bp, Artificial Sequence
  Synthetic oligonucleotide
gcatgatcggcataaggagcagtgctgtgc

SEQ ID NO: 31068 - DNA, 30 bp, Artificial Sequence
  Synthetic oligonucleotide
atgcaataaatgagatcacaacagtgttgc

SEQ ID NO: 31069 - DNA, 30 bp, Artificial Sequence
  Synthetic oligonucleotide
ggaaggagtgagaaagcatactggaaaatc

SEQ ID NO: 31070 - DNA, 30 bp, Artificial Sequence
  Synthetic oligonucleotide
tcgattaactctgaaccgtgccacgaaatc

SEQ ID NO: 31071 - DNA, 30 bp, Artificial Sequence
  Synthetic oligonucleotide
agcgggtaagagaaaggtcagatgtaaatc

SEQ ID NO: 31072 - DNA, 30 bp, Artificial Sequence
  Synthetic oligonucleotide
cgatgtagttccccacacatgatcacaatc

SEQ ID NO: 31073 - DNA, 30 bp, Artificial Sequence
  Synthetic oligonucleotide
tgctgcaactagtaagcaggcgagcgaatc

SEQ ID NO: 31074 - DNA, 30 bp, Artificial Sequence
  Synthetic oligonucleotide
ctgcgtcagcaagaacccccagcgcgaatc

SEQ ID NO: 31075 - DNA, 30 bp, Artificial Sequence
  Synthetic oligonucleotide
gacaggataggcaatataagcaggtgaatc

SEQ ID NO: 31076 - DNA, 30 bp, Artificial Sequence
  Synthetic oligonucleotide
cgaggatcgatcattattcatcgagtaatc

SEQ ID NO: 31077 - DNA, 30 bp, Artificial Sequence
  Synthetic oligonucleotide
aaaaggattcggtagtcgaaacacaacatc

SEQ ID NO: 31078 - DNA, 30 bp, Artificial Sequence
  Synthetic oligonucleotide
agggatgaacagcgtggtgagttcaacatc

SEQ ID NO: 31079 - DNA, 30 bp, Artificial Sequence
  Synthetic oligonucleotide
attgcgtgagctaagtaagccagtaacatc

SEQ ID NO: 31080 - DNA, 30 bp, Artificial Sequence
  Synthetic oligonucleotide
cgagcatacttgtaaaagggggctgacatc

SEQ ID NO: 31081 - DNA, 30 bp, Artificial Sequence
  Synthetic oligonucleotide
gttggagtccaagagtgaaagtcctacatc

SEQ ID NO: 31082 - DNA, 30 bp, Artificial Sequence
  Synthetic oligonucleotide
gggcaggacagccacaccaccacgtacatc

SEQ ID NO: 31083 - DNA, 30 bp, Artificial Sequence
  Synthetic oligonucleotide
tcatgatagcatctttgagggaacgccatc

SEQ ID NO: 31084 - DNA, 30 bp, Artificial Sequence
  Synthetic oligonucleotide
gcatccaaggattagcaacgaagggccatc

SEQ ID NO: 31085 - DNA, 30 bp, Artificial Sequence
  Synthetic oligonucleotide
taaattgcccggcacgggagggaaagcatc

SEQ ID NO: 31086 - DNA, 30 bp, Artificial Sequence
  Synthetic oligonucleotide
ggaggacaatacgtcggtgcgatgttcatc

SEQ ID NO: 31087 - DNA, 30 bp, Artificial Sequence
  Synthetic oligonucleotide
caaggaaattcactggcgagaggacagatc

SEQ ID NO: 31088 - DNA, 30 bp, Artificial Sequence
  Synthetic oligonucleotide
acggattggtcagaaagataccgtcagatc

SEQ ID NO: 31089 - DNA, 29 bp, Artificial Sequence
  Synthetic oligonucleotide
acgaaatggcagtaccgcctaggccgatc

SEQ ID NO: 31090 - DNA, 30 bp, Artificial Sequence
  Synthetic oligonucleotide
cggaacacccgaacagtcccgatacggatc

SEQ ID NO: 31091 - DNA, 30 bp, Artificial Sequence
  Synthetic oligonucleotide
catggaattagacaagaaaattatactatc

SEQ ID NO: 31092 - DNA, 30 bp, Artificial Sequence
  Synthetic oligonucleotide
aagagaggaggggatcaactgagatacctc

SEQ ID NO: 31093 - DNA, 30 bp, Artificial Sequence
  Synthetic oligonucleotide
taacaatactacgtcccgagaaaccgcctc

SEQ ID NO: 31094 - DNA, 30 bp, Artificial Sequence
  Synthetic oligonucleotide
gaacgcgggggtgacggcgagacgtgcctc

SEQ ID NO: 31095 - DNA, 30 bp, Artificial Sequence
  Synthetic oligonucleotide
aaacagggaaactcactacgaagtcagctc

SEQ ID NO: 31096 - DNA, 30 bp, Artificial Sequence
  Synthetic oligonucleotide
gggcggagtcatcaccgtcagaaaaggctc

SEQ ID NO: 31097 - DNA, 30 bp, Artificial Sequence
  Synthetic oligonucleotide
aggggacggcttaagagtgatctagtgctc

SEQ ID NO: 31098 - DNA, 30 bp, Artificial Sequence
  Synthetic oligonucleotide
aacgatctagcacaccgagcatgggatctc

SEQ ID NO: 31099 - DNA, 30 bp, Artificial Sequence
  Synthetic oligonucleotide
aaggttggacagagcaatccacgcaaagtc

SEQ ID NO: 31100 - DNA, 30 bp, Artificial Sequence
  Synthetic oligonucleotide
gcgtgtccatccgtgaaagctgaacaagtc

SEQ ID NO: 31101 - DNA, 30 bp, Artificial Sequence
  Synthetic oligonucleotide
agaggtatagacacgagttcggccgaagtc

SEQ ID NO: 31102 - DNA, 30 bp, Artificial Sequence
  Synthetic oligonucleotide
gggaagtcatgttcgttataggaggaagtc

SEQ ID NO: 31103 - DNA, 30 bp, Artificial Sequence
  Synthetic oligonucleotide
gtgagtaaagggaagccagagaaataagtc

SEQ ID NO: 31104 - DNA, 30 bp, Artificial Sequence
  Synthetic oligonucleotide
aacgacatgaatcggcgggtagggacagtc

SEQ ID NO: 31105 - DNA, 30 bp, Artificial Sequence
  Synthetic oligonucleotide
ttgcaaaagacgtatgagtgttgcgcagtc

SEQ ID NO: 31106 - DNA, 30 bp, Artificial Sequence
  Synthetic oligonucleotide
agcactttgcccgttcagagttgacgagtc

SEQ ID NO: 31107 - DNA, 30 bp, Artificial Sequence
  Synthetic oligonucleotide
gctggacgaaggtatatgtagcggggagtc

SEQ ID NO: 31108 - DNA, 30 bp, Artificial Sequence
  Synthetic oligonucleotide
cattgcccggaactcgagtggagatgagtc

SEQ ID NO: 31109 - DNA, 30 bp, Artificial Sequence
  Synthetic oligonucleotide
cacgaaaaccggaggatgccactgttagtc

SEQ ID NO: 31110 - DNA, 30 bp, Artificial Sequence
  Synthetic oligonucleotide
tcgaaaagggtgacatagataacctacgtc

SEQ ID NO: 31111 - DNA, 30 bp, Artificial Sequence
  Synthetic oligonucleotide
cacgaatggaatcagtcggtagcgtacgtc

SEQ ID NO: 31112 - DNA, 30 bp, Artificial Sequence
  Synthetic oligonucleotide
actagttggggtaaggctgggatttacgtc

SEQ ID NO: 31113 - DNA, 30 bp, Artificial Sequence
  Synthetic oligonucleotide
aagcactgcgaaaactcgcgggaacccgtc

SEQ ID NO: 31114 - DNA, 30 bp, Artificial Sequence
  Synthetic oligonucleotide
aagcggtaaaggcaacacaaccggcccgtc

SEQ ID NO: 31115 - DNA, 30 bp, Artificial Sequence
  Synthetic oligonucleotide
tcagtgaatttgcgaaattaatctgccgtc

SEQ ID NO: 31116 - DNA, 30 bp, Artificial Sequence
  Synthetic oligonucleotide
gcctgtctaggatcgaatgagttgcgcgtc

SEQ ID NO: 31117 - DNA, 30 bp, Artificial Sequence
  Synthetic oligonucleotide
caacggcgacatcgtcatctctatcgcgtc

SEQ ID NO: 31118 - DNA, 30 bp, Artificial Sequence
  Synthetic oligonucleotide
atgtacatagactcgcgtgggaatggcgtc

SEQ ID NO: 31119 - DNA, 30 bp, Artificial Sequence
  Synthetic oligonucleotide
gacaacgtgggaaaacagtgaaaataggtc

SEQ ID NO: 31120 - DNA, 30 bp, Artificial Sequence
  Synthetic oligonucleotide
tactcgccatgaaaaacacagatgtaggtc

SEQ ID NO: 31121 - DNA, 30 bp, Artificial Sequence
  Synthetic oligonucleotide
cggggcgtgcagtatagagatcgaacggtc

SEQ ID NO: 31122 - DNA, 30 bp, Artificial Sequence
  Synthetic oligonucleotide
aagcgaagtggcgcctccgaatttggggtc

SEQ ID NO: 31123 - DNA, 30 bp, Artificial Sequence
  Synthetic oligonucleotide
aactcaaccgctggaagaaacgaatgggtc

SEQ ID NO: 31124 - DNA, 30 bp, Artificial Sequence
  Synthetic oligonucleotide
gctaggtagcatgaaagggcgtctctggtc

SEQ ID NO: 31125 - DNA, 30 bp, Artificial Sequence
  Synthetic oligonucleotide
aaggcgtcgaaatctttatcacgtgtggtc

SEQ ID NO: 31126 - DNA, 30 bp, Artificial Sequence
  Synthetic oligonucleotide
tcgtatactaacaacgagcagaaacctgtc

SEQ ID NO: 31127 - DNA, 30 bp, Artificial Sequence
  Synthetic oligonucleotide
aggcgggagcacggggatatccgagctgtc

SEQ ID NO: 31128 - DNA, 30 bp, Artificial Sequence
  Synthetic oligonucleotide
tgggcacatggttgcggttccgcgtctgtc

SEQ ID NO: 31129 - DNA, 30 bp, Artificial Sequence
  Synthetic oligonucleotide
cggtacagcgatagcaacacgcaaggtgtc

SEQ ID NO: 31130 - DNA, 30 bp, Artificial Sequence
  Synthetic oligonucleotide
gcaccaaggagggtacacattaagggattc

SEQ ID NO: 31131 - DNA, 30 bp, Artificial Sequence
  Synthetic oligonucleotide
cgtaaagtgacgtaacctcgtgatcacttc

SEQ ID NO: 31132 - DNA, 30 bp, Artificial Sequence
  Synthetic oligonucleotide
cgagacaatgaggataggtgtgctgagttc

SEQ ID NO: 31133 - DNA, 30 bp, Artificial Sequence
  Synthetic oligonucleotide
cgaatgtgggaaggtaagatcgttgagttc

SEQ ID NO: 31134 - DNA, 30 bp, Artificial Sequence
  Synthetic oligonucleotide
atgggaaacgggctggagcgccaatatttc

SEQ ID NO: 31135 - DNA, 30 bp, Artificial Sequence
  Synthetic oligonucleotide
gacggactggatcggtcgaagttcactttc

SEQ ID NO: 31136 - DNA, 30 bp, Artificial Sequence
  Synthetic oligonucleotide
aggcgggccacgcgtaagcacatcagtttc

SEQ ID NO: 31137 - DNA, 30 bp, Artificial Sequence
  Synthetic oligonucleotide
ggaggaaacagaattcaaaacgggagtttc

SEQ ID NO: 31138 - DNA, 30 bp, Artificial Sequence
  Synthetic oligonucleotide
ctacccatagcagagaatcttgggaaaaag

SEQ ID NO: 31139 - DNA, 30 bp, Artificial Sequence
  Synthetic oligonucleotide
cgcacggatattcgttagggcatcgaaaag

SEQ ID NO: 31140 - DNA, 30 bp, Artificial Sequence
  Synthetic oligonucleotide
ctcagcggatatgtatctgaacaggaaaag

SEQ ID NO: 31141 - DNA, 30 bp, Artificial Sequence
  Synthetic oligonucleotide
attgagtgtgtcaagataaaggcataaaag

SEQ ID NO: 31142 - DNA, 31 bp, Artificial Sequence
  Synthetic oligonucleotide
tgaggaccgcgcggataggccatgataaaag

SEQ ID NO: 31143 - DNA, 31 bp, Artificial Sequence
  Synthetic oligonucleotide
gggaacatggtttgtttcgggtaagtaaaag

SEQ ID NO: 31144 - DNA, 30 bp, Artificial Sequence
  Synthetic oligonucleotide
gtggatcggtccccaattccggtgtaaaag

SEQ ID NO: 31145 - DNA, 30 bp, Artificial Sequence
  Synthetic oligonucleotide
ccttcgaaggcccggtagcaaataccaaag

SEQ ID NO: 31146 - DNA, 30 bp, Artificial Sequence
  Synthetic oligonucleotide
ccccaggacttagaagtcacggtaccaaag

SEQ ID NO: 31147 - DNA, 30 bp, Artificial Sequence
  Synthetic oligonucleotide
ctgtactacaatgtggtagtagacccaaag

SEQ ID NO: 31148 - DNA, 30 bp, Artificial Sequence
  Synthetic oligonucleotide
actgagatataaatactcgtatagccaaag

SEQ ID NO: 31149 - DNA, 30 bp, Artificial Sequence
  Synthetic oligonucleotide
catatcctggtcatgaccgggcgagcaaag

SEQ ID NO: 31150 - DNA, 30 bp, Artificial Sequence
  Synthetic oligonucleotide
tatcgagcgacacgtttcggtagttcaaag

SEQ ID NO: 31151 - DNA, 30 bp, Artificial Sequence
  Synthetic oligonucleotide
tggtcaccgttcgcaggaagggggagaaag

SEQ ID NO: 31152 - DNA, 30 bp, Artificial Sequence
  Synthetic oligonucleotide
agttggcgaggattatacaagtggagaaag

SEQ ID NO: 31153 - DNA, 30 bp, Artificial Sequence
  Synthetic oligonucleotide
gacgggagacacggatccgactctagaaag

SEQ ID NO: 31154 - DNA, 30 bp, Artificial Sequence
  Synthetic oligonucleotide
gtaaggcgacctagagaacatgttcgaaag

SEQ ID NO: 31155 - DNA, 30 bp, Artificial Sequence
  Synthetic oligonucleotide
aggggccacgaagcaatcgttcaaggaaag

SEQ ID NO: 31156 - DNA, 30 bp, Artificial Sequence
  Synthetic oligonucleotide
cgatcagctcgaaaggtcttcagagtaaag

SEQ ID NO: 31157 - DNA, 30 bp, Artificial Sequence
  Synthetic oligonucleotide
aggctcggcgagttccgaggagcgttaaag

SEQ ID NO: 31158 - DNA, 30 bp, Artificial Sequence
  Synthetic oligonucleotide
tcatccatccgtggccgcgacgaaaacaag

SEQ ID NO: 31159 - DNA, 30 bp, Artificial Sequence
  Synthetic oligonucleotide
aaagccgctctcgaatatgtacgaaacaag

SEQ ID NO: 31160 - DNA, 30 bp, Artificial Sequence
  Synthetic oligonucleotide
cggggattagtacataggtatgccaacaag

SEQ ID NO: 31161 - DNA, 30 bp, Artificial Sequence
  Synthetic oligonucleotide
ggggattcgacaagatcaacttataacaag

SEQ ID NO: 31162 - DNA, 30 bp, Artificial Sequence
  Synthetic oligonucleotide
gaagggggggacgcacaaacgggcgacaag

SEQ ID NO: 31163 - DNA, 30 bp, Artificial Sequence
  Synthetic oligonucleotide
tactcgtggtggcctgagagcaaggacaag

SEQ ID NO: 31164 - DNA, 30 bp, Artificial Sequence
  Synthetic oligonucleotide
gggaaagtatggctctgaggcctgtacaag

SEQ ID NO: 31165 - DNA, 30 bp, Artificial Sequence
  Synthetic oligonucleotide
ggctggtgtccctcgagtaccgataccaag

SEQ ID NO: 31166 - DNA, 30 bp, Artificial Sequence
  Synthetic oligonucleotide
taatcagcagtatgctgctccattaccaag

SEQ ID NO: 31167 - DNA, 31 bp, Artificial Sequence
  Synthetic oligonucleotide
accactacggcgatcgagccttctagccaag

SEQ ID NO: 31168 - DNA, 30 bp, Artificial Sequence
  Synthetic oligonucleotide
cagatcaacttgagttcagcaagggccaag

SEQ ID NO: 31169 - DNA, 30 bp, Artificial Sequence
  Synthetic oligonucleotide
tagaggtagcgaagtgtatctagggccaag

SEQ ID NO: 31170 - DNA, 30 bp, Artificial Sequence
  Synthetic oligonucleotide
atcgaacattcaattccgcaaacgtccaag

SEQ ID NO: 31171 - DNA, 30 bp, Artificial Sequence
  Synthetic oligonucleotide
tactagttagctgagggaagcgagcgcaag

SEQ ID NO: 31172 - DNA, 30 bp, Artificial Sequence
  Synthetic oligonucleotide
ggtgcgatagcagagggaaattaaatcaag

SEQ ID NO: 31173 - DNA, 30 bp, Artificial Sequence
  Synthetic oligonucleotide
acgtgccagtagagctttaatgctatcaag

SEQ ID NO: 31174 - DNA, 30 bp, Artificial Sequence
  Synthetic oligonucleotide
ggtagtaaacatatataggcgaagctcaag

SEQ ID NO: 31175 - DNA, 30 bp, Artificial Sequence
  Synthetic oligonucleotide
cgctttggagaagatacaacgatggtcaag

SEQ ID NO: 31176 - DNA, 30 bp, Artificial Sequence
  Synthetic oligonucleotide
tgtcagtgtcaaacgtattgcgagttcaag

SEQ ID NO: 31177 - DNA, 30 bp, Artificial Sequence
  Synthetic oligonucleotide
cgtcctatcagaggtataccccacaagaag

SEQ ID NO: 31178 - DNA, 30 bp, Artificial Sequence
  Synthetic oligonucleotide
ggcgctctgtagccagctaacccccagaag

SEQ ID NO: 31179 - DNA, 30 bp, Artificial Sequence
  Synthetic oligonucleotide
atgaattcctgccgtagcttgaaagagaag

SEQ ID NO: 31180 - DNA, 30 bp, Artificial Sequence
  Synthetic oligonucleotide
ggttgggcggaagataaaaaagtagagaag

SEQ ID NO: 31181 - DNA, 30 bp, Artificial Sequence
  Synthetic oligonucleotide
ggtgatcgaatgaaaccacgtctcgagaag

SEQ ID NO: 31182 - DNA, 30 bp, Artificial Sequence
  Synthetic oligonucleotide
gatataaagaacaggaatgcgccgtagaag

SEQ ID NO: 31183 - DNA, 30 bp, Artificial Sequence
  Synthetic oligonucleotide
ccacgaacgccttaaaacgggtgtgcgaag

SEQ ID NO: 31184 - DNA, 30 bp, Artificial Sequence
  Synthetic oligonucleotide
ttacatactccgaataatcggtgctcgaag

SEQ ID NO: 31185 - DNA, 30 bp, Artificial Sequence
  Synthetic oligonucleotide
cggactcaggcaaaactgaaaccaaggaag

SEQ ID NO: 31186 - DNA, 30 bp, Artificial Sequence
  Synthetic oligonucleotide
agatctccagcgaaagttttggggaggaag

SEQ ID NO: 31187 - DNA, 30 bp, Artificial Sequence
  Synthetic oligonucleotide
ctgctttttaagacaaccagaaagcggaag

SEQ ID NO: 31188 - DNA, 30 bp, Artificial Sequence
  Synthetic oligonucleotide
tcgaagtgctcagtgtcgcccactcggaag

SEQ ID NO: 31189 - DNA, 30 bp, Artificial Sequence
  Synthetic oligonucleotide
tgcgagctggaaagcatgagttgatggaag

SEQ ID NO: 31190 - DNA, 30 bp, Artificial Sequence
  Synthetic oligonucleotide
agtgaacggaacgtccatctctatctgaag

SEQ ID NO: 31191 - DNA, 30 bp, Artificial Sequence
  Synthetic oligonucleotide
cacgacgtatttgtaagttgcccaaataag

SEQ ID NO: 31192 - DNA, 30 bp, Artificial Sequence
  Synthetic oligonucleotide
caggaaaccaacgtggcgaagtataataag

SEQ ID NO: 31193 - DNA, 30 bp, Artificial Sequence
  Synthetic oligonucleotide
gctgaaatggcattggatggcatacataag

SEQ ID NO: 31194 - DNA, 31 bp, Artificial Sequence
  Synthetic oligonucleotide
agggaaccaattagcgtgttcggtgcataag

SEQ ID NO: 31195 - DNA, 30 bp, Artificial Sequence
  Synthetic oligonucleotide
gtaaaaaccgatttccgaaccgtatataag

SEQ ID NO: 31196 - DNA, 30 bp, Artificial Sequence
  Synthetic oligonucleotide
gcagaacaatcctcactctcaaccactaag

SEQ ID NO: 31197 - DNA, 30 bp, Artificial Sequence
  Synthetic oligonucleotide
agtaagaagcagagtaagatgagcactaag

SEQ ID NO: 31198 - DNA, 30 bp, Artificial Sequence
  Synthetic oligonucleotide
cacacacattgatggcagagtaaaagtaag

SEQ ID NO: 31199 - DNA, 30 bp, Artificial Sequence
  Synthetic oligonucleotide
cgcgtataggaagaacacagaccagttaag

SEQ ID NO: 31200 - DNA, 30 bp, Artificial Sequence
  Synthetic oligonucleotide
cgacgggtatgtcacacgtaactggttaag

SEQ ID NO: 31201 - DNA, 30 bp, Artificial Sequence
  Synthetic oligonucleotide
gcaatagatcatggccagtggataaaacag

SEQ ID NO: 31202 - DNA, 30 bp, Artificial Sequence
  Synthetic oligonucleotide
agcggacagcgctatgaagtcttaaaacag

SEQ ID NO: 31203 - DNA, 30 bp, Artificial Sequence
  Synthetic oligonucleotide
tgtggaagaaagcgatagtcaatgaaacag

SEQ ID NO: 31204 - DNA, 30 bp, Artificial Sequence
  Synthetic oligonucleotide
ttaggcgtccatacctttaacgataaacag

SEQ ID NO: 31205 - DNA, 30 bp, Artificial Sequence
  Synthetic oligonucleotide
tggggggcacgtagaacagagtaggaacag

SEQ ID NO: 31206 - DNA, 30 bp, Artificial Sequence
  Synthetic oligonucleotide
gggtcgacaacgggtctaacaacgtaacag

SEQ ID NO: 31207 - DNA, 30 bp, Artificial Sequence
  Synthetic oligonucleotide
ccgcaatttgagacccataacactacacag

SEQ ID NO: 31208 - DNA, 30 bp, Artificial Sequence
  Synthetic oligonucleotide
aactaaaaaacatgacggacttccccacag

SEQ ID NO: 31209 - DNA, 30 bp, Artificial Sequence
  Synthetic oligonucleotide
aacgatgttcactacccactccatgcacag

SEQ ID NO: 31210 - DNA, 30 bp, Artificial Sequence
  Synthetic oligonucleotide
ccgggagtcggatgcatattccgtgcacag

SEQ ID NO: 31211 - DNA, 30 bp, Artificial Sequence
  Synthetic oligonucleotide
accagagttttggaacctgaagacagacag

SEQ ID NO: 31212 - DNA, 31 bp, Artificial Sequence
  Synthetic oligonucleotide
aatgacggctacggcgaaaagtcgcagacag

SEQ ID NO: 31213 - DNA, 30 bp, Artificial Sequence
  Synthetic oligonucleotide
catggatcaaagtggcctcatgcactacag

SEQ ID NO: 31214 - DNA, 30 bp, Artificial Sequence
  Synthetic oligonucleotide
aacaggagtgtataaatagggacattacag

SEQ ID NO: 31215 - DNA, 31 bp, Artificial Sequence
  Synthetic oligonucleotide
tacagaggacgcccacgctttcagcaaccag

SEQ ID NO: 31216 - DNA, 30 bp, Artificial Sequence
  Synthetic oligonucleotide
ctacgggtcaggtgaatagtttataaccag

SEQ ID NO: 31217 - DNA, 30 bp, Artificial Sequence
  Synthetic oligonucleotide
aaacggagatggagtaatgctagtcaccag

SEQ ID NO: 31218 - DNA, 30 bp, Artificial Sequence
  Synthetic oligonucleotide
gcgggccagtacacgggtgagcatgaccag

SEQ ID NO: 31219 - DNA, 30 bp, Artificial Sequence
  Synthetic oligonucleotide
caaaggggctaattaaagacggcgtaccag

SEQ ID NO: 31220 - DNA, 30 bp, Artificial Sequence
  Synthetic oligonucleotide
gatcagggcgtgtaacgagaatgcagccag

SEQ ID NO: 31221 - DNA, 30 bp, Artificial Sequence
  Synthetic oligonucleotide
gtagcgatccaagatagcgaataaggccag

SEQ ID NO: 31222 - DNA, 30 bp, Artificial Sequence
  Synthetic oligonucleotide
ctgggatagtgtatgtcgattgagggccag

SEQ ID NO: 31223 - DNA, 30 bp, Artificial Sequence
  Synthetic oligonucleotide
caacggggtgaaatgccctatctaatccag

SEQ ID NO: 31224 - DNA, 30 bp, Artificial Sequence
  Synthetic oligonucleotide
ggtggggaggacaacggtcatatcctccag

SEQ ID NO: 31225 - DNA, 30 bp, Artificial Sequence
  Synthetic oligonucleotide
cactgtgctcagaacgccaccaaagtccag

SEQ ID NO: 31226 - DNA, 30 bp, Artificial Sequence
  Synthetic oligonucleotide
ctggtggaccgagaacctatgaaagtccag

SEQ ID NO: 31227 - DNA, 30 bp, Artificial Sequence
  Synthetic oligonucleotide
aagtagtccgttcgggcagagttattccag

SEQ ID NO: 31228 - DNA, 30 bp, Artificial Sequence
  Synthetic oligonucleotide
tgggtgcatgcgaccagataacccttccag

SEQ ID NO: 31229 - DNA, 30 bp, Artificial Sequence
  Synthetic oligonucleotide
atctaggccgacagaagggttgtgtagcag

SEQ ID NO: 31230 - DNA, 30 bp, Artificial Sequence
  Synthetic oligonucleotide
cggtcaatcggctggagaatagacacgcag

SEQ ID NO: 31231 - DNA, 30 bp, Artificial Sequence
  Synthetic oligonucleotide
acggtagcagaagctacgagtggtgcgcag

SEQ ID NO: 31232 - DNA, 30 bp, Artificial Sequence
  Synthetic oligonucleotide
tcggtcgctacctcaaaccattgaaggcag

SEQ ID NO: 31233 - DNA, 30 bp, Artificial Sequence
  Synthetic oligonucleotide
cccaaaaaattgaaaatgaacaacaggcag

SEQ ID NO: 31234 - DNA, 30 bp, Artificial Sequence
  Synthetic oligonucleotide
aaggacatctgtggacaactcgtcaggcag

SEQ ID NO: 31235 - DNA, 30 bp, Artificial Sequence
  Synthetic oligonucleotide
taaagtcattccgtcggaggggaaatgcag

SEQ ID NO: 31236 - DNA, 30 bp, Artificial Sequence
  Synthetic oligonucleotide
aggccaagccgggtcagacagaggatgcag

SEQ ID NO: 31237 - DNA, 30 bp, Artificial Sequence
  Synthetic oligonucleotide
acggtacgaatgcccagaacctgtgatcag

SEQ ID NO: 31238 - DNA, 30 bp, Artificial Sequence
  Synthetic oligonucleotide
gtcaaaggcttgaaatagagcaattatcag

SEQ ID NO: 31239 - DNA, 30 bp, Artificial Sequence
  Synthetic oligonucleotide
acgaaacatatatcctggtctcgccctcag

SEQ ID NO: 31240 - DNA, 30 bp, Artificial Sequence
  Synthetic oligonucleotide
ccgtaaaacgatgtgaaccatacggctcag

SEQ ID NO: 31241 - DNA, 30 bp, Artificial Sequence
  Synthetic oligonucleotide
cgaaacccgtaagaattggaggggcgtcag

SEQ ID NO: 31242 - DNA, 30 bp, Artificial Sequence
  Synthetic oligonucleotide
gggtaaatgtggctattgaaatttggtcag

SEQ ID NO: 31243 - DNA, 30 bp, Artificial Sequence
  Synthetic oligonucleotide
gctcaataaagcctcacctgaacgtgtcag

SEQ ID NO: 31244 - DNA, 30 bp, Artificial Sequence
  Synthetic oligonucleotide
tatgaccaggaaaaatatcgatgcattcag

SEQ ID NO: 31245 - DNA, 30 bp, Artificial Sequence
  Synthetic oligonucleotide
ccgaaccaaatgtcccctaaacctattcag

SEQ ID NO: 31246 - DNA, 30 bp, Artificial Sequence
  Synthetic oligonucleotide
tggggtcgagggaacacgccattctttcag

SEQ ID NO: 31247 - DNA, 30 bp, Artificial Sequence
  Synthetic oligonucleotide
tgccagtgatgtgccgagaatgtcaaagag

SEQ ID NO: 31248 - DNA, 30 bp, Artificial Sequence
  Synthetic oligonucleotide
aacagaggtaatcaggacggagaataagag

SEQ ID NO: 31249 - DNA, 30 bp, Artificial Sequence
  Synthetic oligonucleotide
aagcgaggtacagcccaaaaaggttaagag

SEQ ID NO: 31250 - DNA, 30 bp, Artificial Sequence
  Synthetic oligonucleotide
atatcatgaacgggagagcaaagggcagag

SEQ ID NO: 31251 - DNA, 30 bp, Artificial Sequence
  Synthetic oligonucleotide
gcccaagctagtggggtcaacacaagagag

SEQ ID NO: 31252 - DNA, 30 bp, Artificial Sequence
  Synthetic oligonucleotide
gtgatcatagctgagacttacgacagagag

SEQ ID NO: 31253 - DNA, 30 bp, Artificial Sequence
  Synthetic oligonucleotide
ataaaaagcggggcacggcattaaggagag

SEQ ID NO: 31254 - DNA, 30 bp, Artificial Sequence
  Synthetic oligonucleotide
ttcagtcgtcactacgcgaagccgggagag

SEQ ID NO: 31255 - DNA, 30 bp, Artificial Sequence
  Synthetic oligonucleotide
cggttcacactcgggtctacagatggagag

SEQ ID NO: 31256 - DNA, 30 bp, Artificial Sequence
  Synthetic oligonucleotide
taagcacgtacgcgcttcgatcgtggagag

SEQ ID NO: 31257 - DNA, 30 bp, Artificial Sequence
  Synthetic oligonucleotide
ggtagcgtttgccggcaaaccaaatgagag

SEQ ID NO: 31258 - DNA, 30 bp, Artificial Sequence
  Synthetic oligonucleotide
gagcccatgaatcacacgtacatctgagag

SEQ ID NO: 31259 - DNA, 30 bp, Artificial Sequence
  Synthetic oligonucleotide
aggtagtaataggattgaccattgatagag

SEQ ID NO: 31260 - DNA, 30 bp, Artificial Sequence
  Synthetic oligonucleotide
taaacgtatataggagcaactccactagag

SEQ ID NO: 31261 - DNA, 30 bp, Artificial Sequence
  Synthetic oligonucleotide
gtaagggccgtagtacgaacaagcgtagag

SEQ ID NO: 31262 - DNA, 30 bp, Artificial Sequence
  Synthetic oligonucleotide
ggaatgggaattaaatctgtgacattagag

SEQ ID NO: 31263 - DNA, 30 bp, Artificial Sequence
  Synthetic oligonucleotide
aggtcggcagttttaaacacagggttagag

SEQ ID NO: 31264 - DNA, 30 bp, Artificial Sequence
  Synthetic oligonucleotide
gggggatttagacccagagtaagacacgag

SEQ ID NO: 31265 - DNA, 30 bp, Artificial Sequence
  Synthetic oligonucleotide
gctgcgaccgtcatttagggaaagcacgag

SEQ ID NO: 31266 - DNA, 30 bp, Artificial Sequence
  Synthetic oligonucleotide
aggcgctgttagtcagggcaattggacgag

SEQ ID NO: 31267 - DNA, 30 bp, Artificial Sequence
  Synthetic oligonucleotide
ggatgttgtccgagctcgactaatgacgag

SEQ ID NO: 31268 - DNA, 30 bp, Artificial Sequence
  Synthetic oligonucleotide
tcggggtcgtcaagacacactgactacgag

SEQ ID NO: 31269 - DNA, 30 bp, Artificial Sequence
  Synthetic oligonucleotide
gcttgtgaggaaggtgttaaggataccgag

SEQ ID NO: 31270 - DNA, 30 bp, Artificial Sequence
  Synthetic oligonucleotide
atgttagtgttgcatgaaaatacacccgag

SEQ ID NO: 31271 - DNA, 30 bp, Artificial Sequence
  Synthetic oligonucleotide
tctcagcctatcaatctgacagcttccgag

SEQ ID NO: 31272 - DNA, 30 bp, Artificial Sequence
  Synthetic oligonucleotide
ctggcagtttatatggctgaatcgagcgag

SEQ ID NO: 31273 - DNA, 30 bp, Artificial Sequence
  Synthetic oligonucleotide
atcgaagcattaattcgcggaatgagcgag

SEQ ID NO: 31274 - DNA, 30 bp, Artificial Sequence
  Synthetic oligonucleotide
cggatctagcgccacttggcggtgagcgag

SEQ ID NO: 31275 - DNA, 30 bp, Artificial Sequence
  Synthetic oligonucleotide
aggttataatgggaggtacagatgggcgag

SEQ ID NO: 31276 - DNA, 30 bp, Artificial Sequence
  Synthetic oligonucleotide
cagtgcgaataagagcacactcatggcgag

SEQ ID NO: 31277 - DNA, 30 bp, Artificial Sequence
  Synthetic oligonucleotide
aatggaacgcccctactccaagagtgcgag

SEQ ID NO: 31278 - DNA, 30 bp, Artificial Sequence
  Synthetic oligonucleotide
aaggggagcaaaagttcaaccctgtgcgag

SEQ ID NO: 31279 - DNA, 31 bp, Artificial Sequence
  Synthetic oligonucleotide
agtatagggtttcatgtcgaaagcaatcgag

SEQ ID NO: 31280 - DNA, 30 bp, Artificial Sequence
  Synthetic oligonucleotide
catgcccgaatgaatttcaattacatcgag

SEQ ID NO: 31281 - DNA, 30 bp, Artificial Sequence
  Synthetic oligonucleotide
acgtgagcccataccctgccactcatcgag

SEQ ID NO: 31282 - DNA, 30 bp, Artificial Sequence
  Synthetic oligonucleotide
caatgcaccgagatggggatttgggtcgag

SEQ ID NO: 31283 - DNA, 30 bp, Artificial Sequence
  Synthetic oligonucleotide
taattaggttgtaaaatcgagtatgtcgag

SEQ ID NO: 31284 - DNA, 30 bp, Artificial Sequence
  Synthetic oligonucleotide
accgtcgagcgtacgtcaacccacaaggag

SEQ ID NO: 31285 - DNA, 30 bp, Artificial Sequence
  Synthetic oligonucleotide
ccagtcagcaatattaagtgtcagaaggag

SEQ ID NO: 31286 - DNA, 30 bp, Artificial Sequence
  Synthetic oligonucleotide
gaggtgccaggcccaaccatagataaggag

SEQ ID NO: 31287 - DNA, 30 bp, Artificial Sequence
  Synthetic oligonucleotide
tgtacgccgatgacaccatcgtataaggag

SEQ ID NO: 31288 - DNA, 30 bp, Artificial Sequence
  Synthetic oligonucleotide
caactcatggtaaggaaccctctccaggag

SEQ ID NO: 31289 - DNA, 30 bp, Artificial Sequence
  Synthetic oligonucleotide
ccaatgtggtagatttgcgatgtggaggag

SEQ ID NO: 31290 - DNA, 30 bp, Artificial Sequence
  Synthetic oligonucleotide
cgtctagtgaccatcacgctgtaataggag

SEQ ID NO: 31291 - DNA, 30 bp, Artificial Sequence
  Synthetic oligonucleotide
caagacatgcagagggacctgagataggag

SEQ ID NO: 31292 - DNA, 30 bp, Artificial Sequence
  Synthetic oligonucleotide
ttgttacgcacgaaaacgctaaactaggag

SEQ ID NO: 31293 - DNA, 30 bp, Artificial Sequence
  Synthetic oligonucleotide
acgccaaagagtttcttgtcggcaacggag

SEQ ID NO: 31294 - DNA, 30 bp, Artificial Sequence
  Synthetic oligonucleotide
agagcattagtttaatcaaattcaacggag

SEQ ID NO: 31295 - DNA, 30 bp, Artificial Sequence
  Synthetic oligonucleotide
tagtaattggacatagtgcgaatcccggag

SEQ ID NO: 31296 - DNA, 30 bp, Artificial Sequence
  Synthetic oligonucleotide
cactgttgtcatacggcgaattgagcggag

SEQ ID NO: 31297 - DNA, 30 bp, Artificial Sequence
  Synthetic oligonucleotide
cattggaattactaagcagcaaacgcggag

SEQ ID NO: 31298 - DNA, 30 bp, Artificial Sequence
  Synthetic oligonucleotide
tctcacatatcctcgtctaagtaggcggag

SEQ ID NO: 31299 - DNA, 30 bp, Artificial Sequence
  Synthetic oligonucleotide
aggcttgagggagagggtatagaatcggag

SEQ ID NO: 31300 - DNA, 30 bp, Artificial Sequence
  Synthetic oligonucleotide
acacactctgcctggacaccatgatcggag

SEQ ID NO: 31301 - DNA, 30 bp, Artificial Sequence
  Synthetic oligonucleotide
aaacaaaggcaattctggccgcactcggag

SEQ ID NO: 31302 - DNA, 30 bp, Artificial Sequence
  Synthetic oligonucleotide
aagactgacatcgcaaacattacctcggag

SEQ ID NO: 31303 - DNA, 30 bp, Artificial Sequence
  Synthetic oligonucleotide
tagcagctagccacattgaatcagagggag

SEQ ID NO: 31304 - DNA, 30 bp, Artificial Sequence
  Synthetic oligonucleotide
aggccataggcagccaaagcttacggggag

SEQ ID NO: 31305 - DNA, 30 bp, Artificial Sequence
  Synthetic oligonucleotide
ggatcatgcgtttgatagcaattgggggag

SEQ ID NO: 31306 - DNA, 30 bp, Artificial Sequence
  Synthetic oligonucleotide
cggtacgggagcaaatggcatggcatggag

SEQ ID NO: 31307 - DNA, 30 bp, Artificial Sequence
  Synthetic oligonucleotide
ggcaacttgctctgcccaatcctactggag

SEQ ID NO: 31308 - DNA, 30 bp, Artificial Sequence
  Synthetic oligonucleotide
cggttgagaaatcacttggagacagtggag

SEQ ID NO: 31309 - DNA, 30 bp, Artificial Sequence
  Synthetic oligonucleotide
attgacgatagaaagatatcaccagtggag

SEQ ID NO: 31310 - DNA, 30 bp, Artificial Sequence
  Synthetic oligonucleotide
cctaggaaatacgataccaccagtactgag

SEQ ID NO: 31311 - DNA, 30 bp, Artificial Sequence
  Synthetic oligonucleotide
tgtaagaaaatgagtctaaacttgagtgag

SEQ ID NO: 31312 - DNA, 30 bp, Artificial Sequence
  Synthetic oligonucleotide
ggtaacacgtcttgtccaccgaaacgtgag

SEQ ID NO: 31313 - DNA, 30 bp, Artificial Sequence
  Synthetic oligonucleotide
tctccgaccacgtataacgacccccgtgag

SEQ ID NO: 31314 - DNA, 30 bp, Artificial Sequence
  Synthetic oligonucleotide
gagcaagactagcaaaagaaggcgggtgag

SEQ ID NO: 31315 - DNA, 30 bp, Artificial Sequence
  Synthetic oligonucleotide
ccggggtgcatcagagtataaccgattgag

SEQ ID NO: 31316 - DNA, 30 bp, Artificial Sequence
  Synthetic oligonucleotide
aactggtctataggcgaatggcgtattgag

SEQ ID NO: 31317 - DNA, 30 bp, Artificial Sequence
  Synthetic oligonucleotide
taagacactatcggatacacgattcttgag

SEQ ID NO: 31318 - DNA, 30 bp, Artificial Sequence
  Synthetic oligonucleotide
atcaccatacgttacaagactaaagttgag

SEQ ID NO: 31319 - DNA, 30 bp, Artificial Sequence
  Synthetic oligonucleotide
tctgccaaacacgcaaaatatgcatttgag

SEQ ID NO: 31320 - DNA, 30 bp, Artificial Sequence
  Synthetic oligonucleotide
tcgagaattcatagaaagaaatgtaaatag

SEQ ID NO: 31321 - DNA, 30 bp, Artificial Sequence
  Synthetic oligonucleotide
cctggtctcacaagagaagcgacacaatag

SEQ ID NO: 31322 - DNA, 30 bp, Artificial Sequence
  Synthetic oligonucleotide
attggatgagtaccaagtaccggacaatag

SEQ ID NO: 31323 - DNA, 30 bp, Artificial Sequence
  Synthetic oligonucleotide
tcggggggaaaaaggtacgtacggcaatag

SEQ ID NO: 31324 - DNA, 30 bp, Artificial Sequence
  Synthetic oligonucleotide
actagagagaccggaggacgagtgcaatag

SEQ ID NO: 31325 - DNA, 30 bp, Artificial Sequence
  Synthetic oligonucleotide
taggtacccgcccagggtatacacacatag

SEQ ID NO: 31326 - DNA, 30 bp, Artificial Sequence
  Synthetic oligonucleotide
acagttagcgggtaggttgattatacatag

SEQ ID NO: 31327 - DNA, 30 bp, Artificial Sequence
  Synthetic oligonucleotide
agggaggaaaagtcaactaagaagccatag

SEQ ID NO: 31328 - DNA, 30 bp, Artificial Sequence
  Synthetic oligonucleotide
gcctacgcaatcgacaggatgtaggcatag

SEQ ID NO: 31329 - DNA, 30 bp, Artificial Sequence
  Synthetic oligonucleotide
aggtcgcgtgactaaccaaccaggtcatag

SEQ ID NO: 31330 - DNA, 30 bp, Artificial Sequence
  Synthetic oligonucleotide
ttacagcgccagagactgggcgggtcatag

SEQ ID NO: 31331 - DNA, 30 bp, Artificial Sequence
  Synthetic oligonucleotide
ccactgacagagtcaacgaactccggatag

SEQ ID NO: 31332 - DNA, 30 bp, Artificial Sequence
  Synthetic oligonucleotide
tattccacagagaacgcaacgtcgtgatag

SEQ ID NO: 31333 - DNA, 30 bp, Artificial Sequence
  Synthetic oligonucleotide
cagcggcgaaagatcgacatgtcgtgatag

SEQ ID NO: 31334 - DNA, 30 bp, Artificial Sequence
  Synthetic oligonucleotide
atggtggacaaacggcacggaatgatatag

SEQ ID NO: 31335 - DNA, 30 bp, Artificial Sequence
  Synthetic oligonucleotide
actggcgggtggggtgagttgctgctatag

SEQ ID NO: 31336 - DNA, 30 bp, Artificial Sequence
  Synthetic oligonucleotide
aggcgaacgtgttccctagctcgtctatag

SEQ ID NO: 31337 - DNA, 31 bp, Artificial Sequence
  Synthetic oligonucleotide
atcaacatcacgaggaggtcggatcgtatag

SEQ ID NO: 31338 - DNA, 30 bp, Artificial Sequence
  Synthetic oligonucleotide
ggggcgtatggatcgcatgcccacgactag

SEQ ID NO: 31339 - DNA, 30 bp, Artificial Sequence
  Synthetic oligonucleotide
acatagtacataggtggaacttaatactag

SEQ ID NO: 31340 - DNA, 30 bp, Artificial Sequence
  Synthetic oligonucleotide
cgccgagacaaacttctaatagtgtactag

SEQ ID NO: 31341 - DNA, 30 bp, Artificial Sequence
  Synthetic oligonucleotide
tcgaacacccaccccataatggcttactag

SEQ ID NO: 31342 - DNA, 30 bp, Artificial Sequence
  Synthetic oligonucleotide
ggtgtaggctgagaaagaatcgcttcctag

SEQ ID NO: 31343 - DNA, 30 bp, Artificial Sequence
  Synthetic oligonucleotide
acgacgttaagagtatgatagtaccgctag

SEQ ID NO: 31344 - DNA, 30 bp, Artificial Sequence
  Synthetic oligonucleotide
caataaacagtcgccgcggaagaatgctag

SEQ ID NO: 31345 - DNA, 30 bp, Artificial Sequence
  Synthetic oligonucleotide
cgtgagcccaatggaggcattgctatctag

SEQ ID NO: 31346 - DNA, 30 bp, Artificial Sequence
  Synthetic oligonucleotide
tcgggttgatccagccagtgaagtaagtag

SEQ ID NO: 31347 - DNA, 30 bp, Artificial Sequence
  Synthetic oligonucleotide
tatcagaaggggaaatataggggcacgtag

SEQ ID NO: 31348 - DNA, 30 bp, Artificial Sequence
  Synthetic oligonucleotide
acctcgggtccgcgaaggcaactgccgtag

SEQ ID NO: 31349 - DNA, 30 bp, Artificial Sequence
  Synthetic oligonucleotide
aagggatacaccgttaatggtctaaggtag

SEQ ID NO: 31350 - DNA, 30 bp, Artificial Sequence
  Synthetic oligonucleotide
aaggacgttgcgacctcgtgagagcggtag

SEQ ID NO: 31351 - DNA, 30 bp, Artificial Sequence
  Synthetic oligonucleotide
ggctcaagagtaccagcttaggtagggtag

SEQ ID NO: 31352 - DNA, 30 bp, Artificial Sequence
  Synthetic oligonucleotide
gtgatgaatcggataagcagctgaatgtag

SEQ ID NO: 31353 - DNA, 30 bp, Artificial Sequence
  Synthetic oligonucleotide
cggccacaaggtggtcgcctcaagctgtag

SEQ ID NO: 31354 - DNA, 30 bp, Artificial Sequence
  Synthetic oligonucleotide
gacacgacacgacaagactagcagctgtag

SEQ ID NO: 31355 - DNA, 30 bp, Artificial Sequence
  Synthetic oligonucleotide
caatcgcgcccaggcgagctgcagttgtag

SEQ ID NO: 31356 - DNA, 30 bp, Artificial Sequence
  Synthetic oligonucleotide
taggccgtcatcgtagtgtggaacaattag

SEQ ID NO: 31357 - DNA, 30 bp, Artificial Sequence
  Synthetic oligonucleotide
aacatgtcagatacggtcggaccacattag

SEQ ID NO: 31358 - DNA, 30 bp, Artificial Sequence
  Synthetic oligonucleotide
tcgcagagcggtacccgggtatcacattag

SEQ ID NO: 31359 - DNA, 30 bp, Artificial Sequence
  Synthetic oligonucleotide
cagaagtgtgtcggactgaaccgagattag

SEQ ID NO: 31360 - DNA, 30 bp, Artificial Sequence
  Synthetic oligonucleotide
tgcggcggtttagcagagtccgaatgttag

SEQ ID NO: 31361 - DNA, 30 bp, Artificial Sequence
  Synthetic oligonucleotide
ctaaaaggaggggacataccgcattgttag

SEQ ID NO: 31362 - DNA, 30 bp, Artificial Sequence
  Synthetic oligonucleotide
cactgttggagggaagaccgattaaaaacg

SEQ ID NO: 31363 - DNA, 30 bp, Artificial Sequence
  Synthetic oligonucleotide
accgacagaggccccggacgaatgaaaacg

SEQ ID NO: 31364 - DNA, 30 bp, Artificial Sequence
  Synthetic oligonucleotide
taacatggggttgcagaaccagaacaaacg

SEQ ID NO: 31365 - DNA, 30 bp, Artificial Sequence
  Synthetic oligonucleotide
gcctcgaccggagtaagatcgtgacaaacg

SEQ ID NO: 31366 - DNA, 30 bp, Artificial Sequence
  Synthetic oligonucleotide
ttgggaagagcttcctgagagcaccaaacg

SEQ ID NO: 31367 - DNA, 30 bp, Artificial Sequence
  Synthetic oligonucleotide
cctctacgacaagagaagttatacgaaacg

SEQ ID NO: 31368 - DNA, 30 bp, Artificial Sequence
  Synthetic oligonucleotide
gtgttgcgtcggggaatcacaggaacaacg

SEQ ID NO: 31369 - DNA, 30 bp, Artificial Sequence
  Synthetic oligonucleotide
atggaatacatggcgacaatagagacaacg

SEQ ID NO: 31370 - DNA, 30 bp, Artificial Sequence
  Synthetic oligonucleotide
ttgagtataagcatacggacaccgacaacg

SEQ ID NO: 31371 - DNA, 31 bp, Artificial Sequence
  Synthetic oligonucleotide
caacgagtttcatgcagaataaacctcaacg

SEQ ID NO: 31372 - DNA, 30 bp, Artificial Sequence
  Synthetic oligonucleotide
tcgataaggaggcatagcggcgcttcaacg

SEQ ID NO: 31373 - DNA, 30 bp, Artificial Sequence
  Synthetic oligonucleotide
aatgaactacggagaattatacgaagaacg

SEQ ID NO: 31374 - DNA, 30 bp, Artificial Sequence
  Synthetic oligonucleotide
caaaatacggatacagcggtgggcggaacg

SEQ ID NO: 31375 - DNA, 30 bp, Artificial Sequence
  Synthetic oligonucleotide
gagacgaattcgtgccaaacctcattaacg

SEQ ID NO: 31376 - DNA, 30 bp, Artificial Sequence
  Synthetic oligonucleotide
gtaggttgactgggaaaaagaaccaacacg

SEQ ID NO: 31377 - DNA, 30 bp, Artificial Sequence
  Synthetic oligonucleotide
acagtatagagagagttggtcccacccacg

SEQ ID NO: 31378 - DNA, 30 bp, Artificial Sequence
  Synthetic oligonucleotide
acgtgcaaacgctgaggtgagtagagcacg

SEQ ID NO: 31379 - DNA, 30 bp, Artificial Sequence
  Synthetic oligonucleotide
gcgactactacagcgacaggtacgagcacg

SEQ ID NO: 31380 - DNA, 30 bp, Artificial Sequence
  Synthetic oligonucleotide
acgtgcgaagtctcatgccgcgaaggcacg

SEQ ID NO: 31381 - DNA, 30 bp, Artificial Sequence
  Synthetic oligonucleotide
aagtgagacatcgtcatagcgaaaatcacg

SEQ ID NO: 31382 - DNA, 30 bp, Artificial Sequence
  Synthetic oligonucleotide
ctgggatggagacggtgtagaataatcacg

SEQ ID NO: 31383 - DNA, 30 bp, Artificial Sequence
  Synthetic oligonucleotide
cgcgtagatttgcgagtccccacgatcacg

SEQ ID NO: 31384 - DNA, 30 bp, Artificial Sequence
  Synthetic oligonucleotide
tgcgaataataaagtacatcgggccagacg

SEQ ID NO: 31385 - DNA, 30 bp, Artificial Sequence
  Synthetic oligonucleotide
gggaggcggaagaaaagattgggaacgacg

SEQ ID NO: 31386 - DNA, 30 bp, Artificial Sequence
  Synthetic oligonucleotide
acgtgagaacagcaataaagccatctgacg

SEQ ID NO: 31387 - DNA, 30 bp, Artificial Sequence
  Synthetic oligonucleotide
ccgacattagatctagaccggttgaatacg

SEQ ID NO: 31388 - DNA, 30 bp, Artificial Sequence
  Synthetic oligonucleotide
cagcgacaaaaatggtagcatcttgatacg

SEQ ID NO: 31389 - DNA, 30 bp, Artificial Sequence
  Synthetic oligonucleotide
agagggtcgagggcatagcagtgaggtacg

SEQ ID NO: 31390 - DNA, 30 bp, Artificial Sequence
  Synthetic oligonucleotide
tcgaagatgggacatgagtcagtttgtacg

SEQ ID NO: 31391 - DNA, 30 bp, Artificial Sequence
  Synthetic oligonucleotide
caccatgaaaagggggacccaagcgttacg

SEQ ID NO: 31392 - DNA, 30 bp, Artificial Sequence
  Synthetic oligonucleotide
gcaatcagggaacacccgctgaataaaccg

SEQ ID NO: 31393 - DNA, 30 bp, Artificial Sequence
  Synthetic oligonucleotide
tggtaagcttcaacccgagacggtcaaccg

SEQ ID NO: 31394 - DNA, 30 bp, Artificial Sequence
  Synthetic oligonucleotide
cagaggggacagagagtgtccatagcaccg

SEQ ID NO: 31395 - DNA, 30 bp, Artificial Sequence
  Synthetic oligonucleotide
gttgcgttgcaatggaaacaagggagaccg

SEQ ID NO: 31396 - DNA, 30 bp, Artificial Sequence
  Synthetic oligonucleotide
tcaggaggatatagcaggggagtcataccg

SEQ ID NO: 31397 - DNA, 30 bp, Artificial Sequence
  Synthetic oligonucleotide
ccgtagttaagtcgactgctaaggataccg

SEQ ID NO: 31398 - DNA, 30 bp, Artificial Sequence
  Synthetic oligonucleotide
agatcactgagccggtggaaacgcgccccg

SEQ ID NO: 31399 - DNA, 30 bp, Artificial Sequence
  Synthetic oligonucleotide
agagctgcattacgaacgtcgaagggcccg

SEQ ID NO: 31400 - DNA, 30 bp, Artificial Sequence
  Synthetic oligonucleotide
tacgatatacaggacaagcagattacgccg

SEQ ID NO: 31401 - DNA, 30 bp, Artificial Sequence
  Synthetic oligonucleotide
tcctgtttgacacaactccaataatcgccg

SEQ ID NO: 31402 - DNA, 30 bp, Artificial Sequence
  Synthetic oligonucleotide
cgatagagacataagattttaaggatgccg

SEQ ID NO: 31403 - DNA, 30 bp, Artificial Sequence
  Synthetic oligonucleotide
acgtacgcgtgtatggaaaggagtatgccg

SEQ ID NO: 31404 - DNA, 30 bp, Artificial Sequence
  Synthetic oligonucleotide
tgactaggaattgtacatgcgcgggtgccg

SEQ ID NO: 31405 - DNA, 30 bp, Artificial Sequence
  Synthetic oligonucleotide
cataaggtacggaaggttttcaagttgccg

SEQ ID NO: 31406 - DNA, 30 bp, Artificial Sequence
  Synthetic oligonucleotide
tgccaaaaggcatattaaccccaggatccg

SEQ ID NO: 31407 - DNA, 30 bp, Artificial Sequence
  Synthetic oligonucleotide
ctaataacgtgcgaaaggcgatcgactccg

SEQ ID NO: 31408 - DNA, 30 bp, Artificial Sequence
  Synthetic oligonucleotide
tggggagacccgtatccgacaaccgctccg

SEQ ID NO: 31409 - DNA, 30 bp, Artificial Sequence
  Synthetic oligonucleotide
tcaaatcgggccaaaggtgacacgagtccg

SEQ ID NO: 31410 - DNA, 30 bp, Artificial Sequence
  Synthetic oligonucleotide
agaaaccagcgctcgggaacggaacgtccg

SEQ ID NO: 31411 - DNA, 30 bp, Artificial Sequence
  Synthetic oligonucleotide
atagcatagatagtagcaagagggcgtccg

SEQ ID NO: 31412 - DNA, 30 bp, Artificial Sequence
  Synthetic oligonucleotide
gataggcgccggtttgaccggaaaaaagcg

SEQ ID NO: 31413 - DNA, 30 bp, Artificial Sequence
  Synthetic oligonucleotide
caacagaaggatgtgtgcaatggcgaagcg

SEQ ID NO: 31414 - DNA, 30 bp, Artificial Sequence
  Synthetic oligonucleotide
ccggcttagaaggcacctaaagtggaagcg

SEQ ID NO: 31415 - DNA, 30 bp, Artificial Sequence
  Synthetic oligonucleotide
tgagaaagtcttccgacattaatgtaagcg

SEQ ID NO: 31416 - DNA, 30 bp, Artificial Sequence
  Synthetic oligonucleotide
agaaataccaaatggtggaacgggacagcg

SEQ ID NO: 31417 - DNA, 30 bp, Artificial Sequence
  Synthetic oligonucleotide
acacgggtccagcactcagataccgcagcg

SEQ ID NO: 31418 - DNA, 30 bp, Artificial Sequence
  Synthetic oligonucleotide
atgatactacataaaaatagatccgcagcg

SEQ ID NO: 31419 - DNA, 30 bp, Artificial Sequence
  Synthetic oligonucleotide
gcgtaatgctccgaggcttgcttatcagcg

SEQ ID NO: 31420 - DNA, 30 bp, Artificial Sequence
  Synthetic oligonucleotide
ttacgccgaagacaaagttatgtcagagcg

SEQ ID NO: 31421 - DNA, 30 bp, Artificial Sequence
  Synthetic oligonucleotide
gcgataaagatacctagtgaattcagagcg

SEQ ID NO: 31422 - DNA, 30 bp, Artificial Sequence
  Synthetic oligonucleotide
ttctacacataaatcaggggacagagagcg

SEQ ID NO: 31423 - DNA, 30 bp, Artificial Sequence
  Synthetic oligonucleotide
cacgggcaccatagtgtagatgttatagcg

SEQ ID NO: 31424 - DNA, 30 bp, Artificial Sequence
  Synthetic oligonucleotide
acgagagaactaattctatagctgctagcg

SEQ ID NO: 31425 - DNA, 30 bp, Artificial Sequence
  Synthetic oligonucleotide
cagcggatattacaaggtgaaggtgtagcg

SEQ ID NO: 31426 - DNA, 30 bp, Artificial Sequence
  Synthetic oligonucleotide
catcatttcacggcacaaaataggttagcg

SEQ ID NO: 31427 - DNA, 30 bp, Artificial Sequence
  Synthetic oligonucleotide
acaagtagacactcaactcacgccaccgcg

SEQ ID NO: 31428 - DNA, 30 bp, Artificial Sequence
  Synthetic oligonucleotide
cggggttagagaaactcggaattcaccgcg

SEQ ID NO: 31429 - DNA, 30 bp, Artificial Sequence
  Synthetic oligonucleotide
cgaccttaaaagggattagtttagctcgcg

SEQ ID NO: 31430 - DNA, 30 bp, Artificial Sequence
  Synthetic oligonucleotide
aggactggttttcaggaccgcaaattggcg

SEQ ID NO: 31431 - DNA, 30 bp, Artificial Sequence
  Synthetic oligonucleotide
ggggggtaggagtccgttgaaatattggcg

SEQ ID NO: 31432 - DNA, 30 bp, Artificial Sequence
  Synthetic oligonucleotide
gaagggtaatacgccttgggacagttggcg

SEQ ID NO: 31433 - DNA, 30 bp, Artificial Sequence
  Synthetic oligonucleotide
tggtcaactaaggccagcgcaaccaatgcg

SEQ ID NO: 31434 - DNA, 30 bp, Artificial Sequence
  Synthetic oligonucleotide
cattgaaaaggggatgctacgagcaatgcg

SEQ ID NO: 31435 - DNA, 30 bp, Artificial Sequence
  Synthetic oligonucleotide
cggaaccttcgtatcaacccctgcactgcg

SEQ ID NO: 31436 - DNA, 30 bp, Artificial Sequence
  Synthetic oligonucleotide
cggggatggattgttcagtcgatacctgcg

SEQ ID NO: 31437 - DNA, 30 bp, Artificial Sequence
  Synthetic oligonucleotide
cgggccgatcaacgcaaaggtgaggctgcg

SEQ ID NO: 31438 - DNA, 30 bp, Artificial Sequence
  Synthetic oligonucleotide
tcacgtcggtttataaaaatatgctctgcg

SEQ ID NO: 31439 - DNA, 30 bp, Artificial Sequence
  Synthetic oligonucleotide
tccagggatagagatcgtggtgcacgtgcg

SEQ ID NO: 31440 - DNA, 30 bp, Artificial Sequence
  Synthetic oligonucleotide
atgtgcattagtaagagcaaacgacgtgcg

SEQ ID NO: 31441 - DNA, 30 bp, Artificial Sequence
  Synthetic oligonucleotide
gggcgaggcgtctatggcattcatcttgcg

SEQ ID NO: 31442 - DNA, 30 bp, Artificial Sequence
  Synthetic oligonucleotide
tcatgagcgaggcaagactatcatgttgcg

SEQ ID NO: 31443 - DNA, 31 bp, Artificial Sequence
  Synthetic oligonucleotide
tggaaagaggcgctcgtggtaaggcaaatcg

SEQ ID NO: 31444 - DNA, 30 bp, Artificial Sequence
  Synthetic oligonucleotide
gtgcaaacggggcagtgtggtcagaaatcg

SEQ ID NO: 31445 - DNA, 30 bp, Artificial Sequence
  Synthetic oligonucleotide
aactgcaccgtgcggatacagaccgaatcg

SEQ ID NO: 31446 - DNA, 30 bp, Artificial Sequence
  Synthetic oligonucleotide
ggcggcgactaacctcagatcctttaatcg

SEQ ID NO: 31447 - DNA, 30 bp, Artificial Sequence
  Synthetic oligonucleotide
tgttacagcgtatacagggaaagggcatcg

SEQ ID NO: 31448 - DNA, 30 bp, Artificial Sequence
  Synthetic oligonucleotide
cctcgtaaggctagaggaactgatgcatcg

SEQ ID NO: 31449 - DNA, 30 bp, Artificial Sequence
  Synthetic oligonucleotide
cgtccgtgaaaaaaggattgcgctagatcg

SEQ ID NO: 31450 - DNA, 30 bp, Artificial Sequence
  Synthetic oligonucleotide
agcacaaaggcaatcactagagtccgatcg

SEQ ID NO: 31451 - DNA, 30 bp, Artificial Sequence
  Synthetic oligonucleotide
tcaaggtggtcgatagcaatcgaactatcg

SEQ ID NO: 31452 - DNA, 30 bp, Artificial Sequence
  Synthetic oligonucleotide
cagagcggcgtccatcaccataccaactcg

SEQ ID NO: 31453 - DNA, 30 bp, Artificial Sequence
  Synthetic oligonucleotide
ctcaaccactacaacttaggaatatactcg

SEQ ID NO: 31454 - DNA, 30 bp, Artificial Sequence
  Synthetic oligonucleotide
atcaataagacacgacaaggtgtgtactcg

SEQ ID NO: 31455 - DNA, 30 bp, Artificial Sequence
  Synthetic oligonucleotide
tggaaaagggcaatttactccgaatcctcg

SEQ ID NO: 31456 - DNA, 30 bp, Artificial Sequence
  Synthetic oligonucleotide
ttgtcggacaaagatgcgataaggtcctcg

SEQ ID NO: 31457 - DNA, 30 bp, Artificial Sequence
  Synthetic oligonucleotide
gctcggaccggaaggctacacaaccgctcg

SEQ ID NO: 31458 - DNA, 30 bp, Artificial Sequence
  Synthetic oligonucleotide
cactgatccgataatatggaaccgcgctcg

SEQ ID NO: 31459 - DNA, 30 bp, Artificial Sequence
  Synthetic oligonucleotide
tcgactgcgagtgtgacctgtgctcgctcg

SEQ ID NO: 31460 - DNA, 30 bp, Artificial Sequence
  Synthetic oligonucleotide
ttgccaacgactcgggaatcacccatctcg

SEQ ID NO: 31461 - DNA, 30 bp, Artificial Sequence
  Synthetic oligonucleotide
tcaacattcagacaacacactcggatctcg

SEQ ID NO: 31462 - DNA, 30 bp, Artificial Sequence
  Synthetic oligonucleotide
cgatcagttcagatgtgcgctctgatctcg

SEQ ID NO: 31463 - DNA, 29 bp, Artificial Sequence
  Synthetic oligonucleotide
ggcttacgtgacatgtaaagaagttctcg

SEQ ID NO: 31464 - DNA, 30 bp, Artificial Sequence
  Synthetic oligonucleotide
cgaaggtctcatgggatgtactaacagtcg

SEQ ID NO: 31465 - DNA, 30 bp, Artificial Sequence
  Synthetic oligonucleotide
gggacgaacctatcaggggtataagagtcg

SEQ ID NO: 31466 - DNA, 30 bp, Artificial Sequence
  Synthetic oligonucleotide
cgttcgattaaggagaggtcgtacgagtcg

SEQ ID NO: 31467 - DNA, 30 bp, Artificial Sequence
  Synthetic oligonucleotide
ggaaacggggaaccctgcgccaatacgtcg

SEQ ID NO: 31468 - DNA, 30 bp, Artificial Sequence
  Synthetic oligonucleotide
tgtgagaaccaagcgtaaccgggcaggtcg

SEQ ID NO: 31469 - DNA, 30 bp, Artificial Sequence
  Synthetic oligonucleotide
agtggggatttggtcaacacaacgcggtcg

SEQ ID NO: 31470 - DNA, 30 bp, Artificial Sequence
  Synthetic oligonucleotide
tggccaccgtaacacatcgaaaatcggtcg

SEQ ID NO: 31471 - DNA, 30 bp, Artificial Sequence
  Synthetic oligonucleotide
ggggagcaattattggagctaagaatgtcg

SEQ ID NO: 31472 - DNA, 30 bp, Artificial Sequence
  Synthetic oligonucleotide
ggacgggggagcacattgtgatcgatgtcg

SEQ ID NO: 31473 - DNA, 30 bp, Artificial Sequence
  Synthetic oligonucleotide
atatcaacgtctgagaaaaaggacttgtcg

SEQ ID NO: 31474 - DNA, 30 bp, Artificial Sequence
  Synthetic oligonucleotide
catgtatcatacaatgtaaaatccaattcg

SEQ ID NO: 31475 - DNA, 30 bp, Artificial Sequence
  Synthetic oligonucleotide
gtcaaggcgaattgtggactcgggagttcg

SEQ ID NO: 31476 - DNA, 30 bp, Artificial Sequence
  Synthetic oligonucleotide
acggcgtcacatctaaacacttaacgttcg

SEQ ID NO: 31477 - DNA, 30 bp, Artificial Sequence
  Synthetic oligonucleotide
tcggcgtggtctcgtagggtatgatgttcg

SEQ ID NO: 31478 - DNA, 30 bp, Artificial Sequence
  Synthetic oligonucleotide
tcgagagcggctagtccagtaatcgtttcg

SEQ ID NO: 31479 - DNA, 30 bp, Artificial Sequence
  Synthetic oligonucleotide
tcttaaacacaaaatagaggtacattttcg

SEQ ID NO: 31480 - DNA, 30 bp, Artificial Sequence
  Synthetic oligonucleotide
gaaggcgacacttgttggagctacaaaagg

SEQ ID NO: 31481 - DNA, 30 bp, Artificial Sequence
  Synthetic oligonucleotide
taatactgaatcgaaagaggaaagaaaagg

SEQ ID NO: 31482 - DNA, 30 bp, Artificial Sequence
  Synthetic oligonucleotide
aagagcctcgctaaaccactcaggaaaagg

SEQ ID NO: 31483 - DNA, 30 bp, Artificial Sequence
  Synthetic oligonucleotide
ggacgagatgttaacaaggaacggaaaagg

SEQ ID NO: 31484 - DNA, 30 bp, Artificial Sequence
  Synthetic oligonucleotide
tatgcggcgagtgagccaccgagacaaagg

SEQ ID NO: 31485 - DNA, 30 bp, Artificial Sequence
  Synthetic oligonucleotide
tgtcaaaccgtctaatgaaatcagcaaagg

SEQ ID NO: 31486 - DNA, 30 bp, Artificial Sequence
  Synthetic oligonucleotide
ccataagatgttgccatagaacaataaagg

SEQ ID NO: 31487 - DNA, 30 bp, Artificial Sequence
  Synthetic oligonucleotide
acggaccacagagcatatagaaactaaagg

SEQ ID NO: 31488 - DNA, 30 bp, Artificial Sequence
  Synthetic oligonucleotide
agaactattgaaaacggtgactgctaaagg

SEQ ID NO: 31489 - DNA, 30 bp, Artificial Sequence
  Synthetic oligonucleotide
acgaataatctgaggatgtgtcggtaaagg

SEQ ID NO: 31490 - DNA, 30 bp, Artificial Sequence
  Synthetic oligonucleotide
aaagggggatagggcggttgacacacaagg

SEQ ID NO: 31491 - DNA, 30 bp, Artificial Sequence
  Synthetic oligonucleotide
acaagggaccccacgacttgaccaccaagg

SEQ ID NO: 31492 - DNA, 30 bp, Artificial Sequence
  Synthetic oligonucleotide
cacaaccatacacttccaacgggtccaagg

SEQ ID NO: 31493 - DNA, 30 bp, Artificial Sequence
  Synthetic oligonucleotide
tgtatcaacagctactagaaggatagaagg

SEQ ID NO: 31494 - DNA, 30 bp, Artificial Sequence
  Synthetic oligonucleotide
gtcgtgccacagggggttcattgccgaagg

SEQ ID NO: 31495 - DNA, 30 bp, Artificial Sequence
  Synthetic oligonucleotide
gaccggacaaggttctgcgaaatgcgaagg

SEQ ID NO: 31496 - DNA, 31 bp, Artificial Sequence
  Synthetic oligonucleotide
ggagactcaggtttcgatccaggcttgaagg

SEQ ID NO: 31497 - DNA, 30 bp, Artificial Sequence
  Synthetic oligonucleotide
cgcgatagctactggaaggccgtactaagg

SEQ ID NO: 31498 - DNA, 30 bp, Artificial Sequence
  Synthetic oligonucleotide
gagagcgtacgtatcataggtatggtaagg

SEQ ID NO: 31499 - DNA, 30 bp, Artificial Sequence
  Synthetic oligonucleotide
atcgatcacgggcgtggacaccctaacagg

SEQ ID NO: 31500 - DNA, 30 bp, Artificial Sequence
  Synthetic oligonucleotide
gggcacggtcattctctgcaacatcacagg

SEQ ID NO: 31501 - DNA, 30 bp, Artificial Sequence
  Synthetic oligonucleotide
gccgggatggaaccactattagcaaccagg

SEQ ID NO: 31502 - DNA, 30 bp, Artificial Sequence
  Synthetic oligonucleotide
gcgcagttaggaggaaaggggtggagcagg

SEQ ID NO: 31503 - DNA, 30 bp, Artificial Sequence
  Synthetic oligonucleotide
cagggccgcgattatgcttcgccaggcagg

SEQ ID NO: 31504 - DNA, 30 bp, Artificial Sequence
  Synthetic oligonucleotide
gcagagctagggagccaaaatcttatcagg

SEQ ID NO: 31505 - DNA, 30 bp, Artificial Sequence
  Synthetic oligonucleotide
tacggtaaaagactagttattgtgctcagg

SEQ ID NO: 31506 - DNA, 30 bp, Artificial Sequence
  Synthetic oligonucleotide
gcgtacactaagtgggtaatgcttctcagg

SEQ ID NO: 31507 - DNA, 31 bp, Artificial Sequence
  Synthetic oligonucleotide
catgtacacccaataatctagatgagtcagg

SEQ ID NO: 31508 - DNA, 30 bp, Artificial Sequence
  Synthetic oligonucleotide
tcacaagactaggggtcagagaatttcagg

SEQ ID NO: 31509 - DNA, 30 bp, Artificial Sequence
  Synthetic oligonucleotide
aaagaaaaaagataatgatctaatttcagg

SEQ ID NO: 31510 - DNA, 30 bp, Artificial Sequence
  Synthetic oligonucleotide
acgtccggggttaagtagctgggaaagagg

SEQ ID NO: 31511 - DNA, 30 bp, Artificial Sequence
  Synthetic oligonucleotide
aggtcaggaattttatggagggaacagagg

SEQ ID NO: 31512 - DNA, 30 bp, Artificial Sequence
  Synthetic oligonucleotide
acctgcccccgtaatgggactagtcagagg

SEQ ID NO: 31513 - DNA, 30 bp, Artificial Sequence
  Synthetic oligonucleotide
ctagtgtcacggggggaaagcgaatagagg

SEQ ID NO: 31514 - DNA, 30 bp, Artificial Sequence
  Synthetic oligonucleotide
tgaggacggaacagtgatcagaatacgagg

SEQ ID NO: 31515 - DNA, 30 bp, Artificial Sequence
  Synthetic oligonucleotide
aagaggggataatgctcattagactcgagg

SEQ ID NO: 31516 - DNA, 30 bp, Artificial Sequence
  Synthetic oligonucleotide
ggtacgaactgggaccgtttcaagcggagg

SEQ ID NO: 31517 - DNA, 30 bp, Artificial Sequence
  Synthetic oligonucleotide
ttgacaagaggctatgtaagatactggagg

SEQ ID NO: 31518 - DNA, 30 bp, Artificial Sequence
  Synthetic oligonucleotide
tgaggggtgttatgggatcaggaaatgagg

SEQ ID NO: 31519 - DNA, 30 bp, Artificial Sequence
  Synthetic oligonucleotide
cgagtcaatataatggagaactgcatgagg

SEQ ID NO: 31520 - DNA, 30 bp, Artificial Sequence
  Synthetic oligonucleotide
tctacaggaacatggggtaagaaggtgagg

SEQ ID NO: 31521 - DNA, 30 bp, Artificial Sequence
  Synthetic oligonucleotide
tttcgagggaccgaaagctaaggtgtgagg

SEQ ID NO: 31522 - DNA, 30 bp, Artificial Sequence
  Synthetic oligonucleotide
tggacagctgacggttgccaagccttgagg

SEQ ID NO: 31523 - DNA, 30 bp, Artificial Sequence
  Synthetic oligonucleotide
cgctacaggagctacattgacccgaatagg

SEQ ID NO: 31524 - DNA, 30 bp, Artificial Sequence
  Synthetic oligonucleotide
cgatcccaagatagtaccatgatcgatagg

SEQ ID NO: 31525 - DNA, 30 bp, Artificial Sequence
  Synthetic oligonucleotide
cggccgtgagaaacactcactccatatagg

SEQ ID NO: 31526 - DNA, 30 bp, Artificial Sequence
  Synthetic oligonucleotide
cgggacagacaaagaagtgggagtactagg

SEQ ID NO: 31527 - DNA, 30 bp, Artificial Sequence
  Synthetic oligonucleotide
tgcaagggcagacttaacctgatcgctagg

SEQ ID NO: 31528 - DNA, 30 bp, Artificial Sequence
  Synthetic oligonucleotide
agcagggcgccagcggtatcgacgagtagg

SEQ ID NO: 31529 - DNA, 30 bp, Artificial Sequence
  Synthetic oligonucleotide
cgaggcaacgaggaatctgctctgagtagg

SEQ ID NO: 31530 - DNA, 30 bp, Artificial Sequence
  Synthetic oligonucleotide
cgatgcgcagaagtggcacagggtcgtagg

SEQ ID NO: 31531 - DNA, 30 bp, Artificial Sequence
  Synthetic oligonucleotide
atctgggaaggcagatagtttatgattagg

SEQ ID NO: 31532 - DNA, 30 bp, Artificial Sequence
  Synthetic oligonucleotide
aacgcgtaaagaggtaacgtaggtgaacgg

SEQ ID NO: 31533 - DNA, 31 bp, Artificial Sequence
  Synthetic oligonucleotide
aaggcgccgaaaagagtaaataggttaacgg

SEQ ID NO: 31534 - DNA, 30 bp, Artificial Sequence
  Synthetic oligonucleotide
aaggaaacacaaggattaacatcacgacgg

SEQ ID NO: 31535 - DNA, 30 bp, Artificial Sequence
  Synthetic oligonucleotide
actcacgtaaatactagcgccgagttacgg

SEQ ID NO: 31536 - DNA, 30 bp, Artificial Sequence
  Synthetic oligonucleotide
aacgtcaggtgagtcctggggcaacaccgg

SEQ ID NO: 31537 - DNA, 30 bp, Artificial Sequence
  Synthetic oligonucleotide
aagtaagtacgggaagattatgatccgcgg

SEQ ID NO: 31538 - DNA, 30 bp, Artificial Sequence
  Synthetic oligonucleotide
gaagggcgtgaaagtgtcacatgaaggcgg

SEQ ID NO: 31539 - DNA, 30 bp, Artificial Sequence
  Synthetic oligonucleotide
cgaagcgtaatgaggagatttgaggggcgg

SEQ ID NO: 31540 - DNA, 30 bp, Artificial Sequence
  Synthetic oligonucleotide
cgtataatatcaggaagctcgtgttggcgg

SEQ ID NO: 31541 - DNA, 30 bp, Artificial Sequence
  Synthetic oligonucleotide
gtggatgattgttcagatcgacatgtgcgg

SEQ ID NO: 31542 - DNA, 30 bp, Artificial Sequence
  Synthetic oligonucleotide
acaatatgggacaaaaagtcaacttatcgg

SEQ ID NO: 31543 - DNA, 30 bp, Artificial Sequence
  Synthetic oligonucleotide
gctaacgatgaaactcagaataccagtcgg

SEQ ID NO: 31544 - DNA, 30 bp, Artificial Sequence
  Synthetic oligonucleotide
ggaaaaagctgggatcctcactagcgtcgg

SEQ ID NO: 31545 - DNA, 30 bp, Artificial Sequence
  Synthetic oligonucleotide
cggacaaccccacaagggcatccacttcgg

SEQ ID NO: 31546 - DNA, 30 bp, Artificial Sequence
  Synthetic oligonucleotide
cgaggttccttaagatatgaaacggttcgg

SEQ ID NO: 31547 - DNA, 30 bp, Artificial Sequence
  Synthetic oligonucleotide
gtgggcacaagcccaggatgacatgttcgg

SEQ ID NO: 31548 - DNA, 31 bp, Artificial Sequence
  Synthetic oligonucleotide
cgtacaccagtaagtggagaaaaacaaaggg

SEQ ID NO: 31549 - DNA, 30 bp, Artificial Sequence
  Synthetic oligonucleotide
tgtgttcactgcgacggccgtgcgaaaggg

SEQ ID NO: 31550 - DNA, 30 bp, Artificial Sequence
  Synthetic oligonucleotide
ctcgtgcagaggcaactagggctagaaggg

SEQ ID NO: 31551 - DNA, 30 bp, Artificial Sequence
  Synthetic oligonucleotide
tgcgaaacgtcacacgaccatcccgaaggg

SEQ ID NO: 31552 - DNA, 30 bp, Artificial Sequence
  Synthetic oligonucleotide
taaccagagggcaagcacggtcccgaaggg

SEQ ID NO: 31553 - DNA, 30 bp, Artificial Sequence
  Synthetic oligonucleotide
acagctatagaaaagcagtagttgtaaggg

SEQ ID NO: 31554 - DNA, 30 bp, Artificial Sequence
  Synthetic oligonucleotide
cggatgtcactgtgagtaccccacccaggg

SEQ ID NO: 31555 - DNA, 30 bp, Artificial Sequence
  Synthetic oligonucleotide
ataaatccggtgatacccgaaggttcaggg

SEQ ID NO: 31556 - DNA, 30 bp, Artificial Sequence
  Synthetic oligonucleotide
acgccaaggttgaaggacggtaccagaggg

SEQ ID NO: 31557 - DNA, 30 bp, Artificial Sequence
  Synthetic oligonucleotide
aggggcggaaagcctcaaacccaagccggg

SEQ ID NO: 31558 - DNA, 30 bp, Artificial Sequence
  Synthetic oligonucleotide
actcagattagtgaacacaagaacgccggg

SEQ ID NO: 31559 - DNA, 30 bp, Artificial Sequence
  Synthetic oligonucleotide
gtaaaaacgggaaagagcaaactaggcggg

SEQ ID NO: 31560 - DNA, 30 bp, Artificial Sequence
  Synthetic oligonucleotide
tccgagaggaggaaaaaatgcgctctcggg

SEQ ID NO: 31561 - DNA, 30 bp, Artificial Sequence
  Synthetic oligonucleotide
tcactggactatgccgacaatcaattcggg

SEQ ID NO: 31562 - DNA, 30 bp, Artificial Sequence
  Synthetic oligonucleotide
acacggttaaggccataattaagtaagggg

SEQ ID NO: 31563 - DNA, 30 bp, Artificial Sequence
  Synthetic oligonucleotide
agcgagtaaaatttcgaattcattaagggg

SEQ ID NO: 31564 - DNA, 30 bp, Artificial Sequence
  Synthetic oligonucleotide
gttaggatgtaagcggtcaaacagcagggg

SEQ ID NO: 31565 - DNA, 30 bp, Artificial Sequence
  Synthetic oligonucleotide
taacagcattcaggaggacatgcggagggg

SEQ ID NO: 31566 - DNA, 30 bp, Artificial Sequence
  Synthetic oligonucleotide
ctacaaaatgcagggatctacggatagggg

SEQ ID NO: 31567 - DNA, 30 bp, Artificial Sequence
  Synthetic oligonucleotide
ggggacatatcagtcataactgagccgggg

SEQ ID NO: 31568 - DNA, 30 bp, Artificial Sequence
  Synthetic oligonucleotide
tcacgctggaaagaagagtagacatcgggg

SEQ ID NO: 31569 - DNA, 30 bp, Artificial Sequence
  Synthetic oligonucleotide
ttaatgcagaataggacactaagcaggggg

SEQ ID NO: 31570 - DNA, 30 bp, Artificial Sequence
  Synthetic oligonucleotide
aggaaactacttatcatcagatcggggggg

SEQ ID NO: 31571 - DNA, 30 bp, Artificial Sequence
  Synthetic oligonucleotide
tgccatacgagttacgaacgaagtgggggg

SEQ ID NO: 31572 - DNA, 30 bp, Artificial Sequence
  Synthetic oligonucleotide
ctgggagtaaagcagatcgtaatgatgggg

SEQ ID NO: 31573 - DNA, 30 bp, Artificial Sequence
  Synthetic oligonucleotide
gcaagggaactgtgtggaacaaagctgggg

SEQ ID NO: 31574 - DNA, 30 bp, Artificial Sequence
  Synthetic oligonucleotide
ataacatgaagctatggaacgggcttgggg

SEQ ID NO: 31575 - DNA, 30 bp, Artificial Sequence
  Synthetic oligonucleotide
cgataagtctgattagtccatgagaatggg

SEQ ID NO: 31576 - DNA, 30 bp, Artificial Sequence
  Synthetic oligonucleotide
tcgatccctaaggtagcagcggatcatggg

SEQ ID NO: 31577 - DNA, 30 bp, Artificial Sequence
  Synthetic oligonucleotide
ctcgaattcccaaaaaaacccattcaatgg

SEQ ID NO: 31578 - DNA, 30 bp, Artificial Sequence
  Synthetic oligonucleotide
aacgtcgatgatagcgtatgaggcgaatgg

SEQ ID NO: 31579 - DNA, 30 bp, Artificial Sequence
  Synthetic oligonucleotide
gcgtcctaaccgtaacatgagattacatgg

SEQ ID NO: 31580 - DNA, 30 bp, Artificial Sequence
  Synthetic oligonucleotide
gggagtgccccggaaaggaagaggcgatgg

SEQ ID NO: 31581 - DNA, 30 bp, Artificial Sequence
  Synthetic oligonucleotide
acgatggaaagaggcggtcagaggatatgg

SEQ ID NO: 31582 - DNA, 30 bp, Artificial Sequence
  Synthetic oligonucleotide
gacaatgactaagtcataatcgggatatgg

SEQ ID NO: 31583 - DNA, 30 bp, Artificial Sequence
  Synthetic oligonucleotide
agcgaagagtacaatttgttcggcaactgg

SEQ ID NO: 31584 - DNA, 30 bp, Artificial Sequence
  Synthetic oligonucleotide
atagaaactcgcctcggtagtaaagactgg

SEQ ID NO: 31585 - DNA, 30 bp, Artificial Sequence
  Synthetic oligonucleotide
ggcgagggctgcccgaccccatgagactgg

SEQ ID NO: 31586 - DNA, 30 bp, Artificial Sequence
  Synthetic oligonucleotide
gtgctaatggatggggggatcgagtactgg

SEQ ID NO: 31587 - DNA, 30 bp, Artificial Sequence
  Synthetic oligonucleotide
cgctactcacagtcaaaaggcaaaccctgg

SEQ ID NO: 31588 - DNA, 30 bp, Artificial Sequence
  Synthetic oligonucleotide
ctacgcgatatcaacaagtatagggcctgg

SEQ ID NO: 31589 - DNA, 30 bp, Artificial Sequence
  Synthetic oligonucleotide
atgattcctgaaatggatgggggattctgg

SEQ ID NO: 31590 - DNA, 30 bp, Artificial Sequence
  Synthetic oligonucleotide
gtcgggaggatcgagattatgcttttctgg

SEQ ID NO: 31591 - DNA, 30 bp, Artificial Sequence
  Synthetic oligonucleotide
gggcatgaaaaaactgctgccggatagtgg

SEQ ID NO: 31592 - DNA, 30 bp, Artificial Sequence
  Synthetic oligonucleotide
ccagaactggcatcctgtagggaaacgtgg

SEQ ID NO: 31593 - DNA, 30 bp, Artificial Sequence
  Synthetic oligonucleotide
tcccgagtactgccaattgtaagatcgtgg

SEQ ID NO: 31594 - DNA, 30 bp, Artificial Sequence
  Synthetic oligonucleotide
gcacgacaagacgtttaagtgatggggtgg

SEQ ID NO: 31595 - DNA, 30 bp, Artificial Sequence
  Synthetic oligonucleotide
agggaattgcggcggcatgatctagtgtgg

SEQ ID NO: 31596 - DNA, 30 bp, Artificial Sequence
  Synthetic oligonucleotide
tggacccgccaaacacgtacaaaattgtgg

SEQ ID NO: 31597 - DNA, 30 bp, Artificial Sequence
  Synthetic oligonucleotide
tcggcaggaagtggttgaacagatttgtgg

SEQ ID NO: 31598 - DNA, 30 bp, Artificial Sequence
  Synthetic oligonucleotide
gggactcgtgccatccgatgagttaattgg

SEQ ID NO: 31599 - DNA, 30 bp, Artificial Sequence
  Synthetic oligonucleotide
ggtcacaaaccagcggtaggcacttattgg

SEQ ID NO: 31600 - DNA, 30 bp, Artificial Sequence
  Synthetic oligonucleotide
aatggacaaggcaagatggatcgcacttgg

SEQ ID NO: 31601 - DNA, 30 bp, Artificial Sequence
  Synthetic oligonucleotide
tcatatgggttagggggaatgagttcttgg

SEQ ID NO: 31602 - DNA, 30 bp, Artificial Sequence
  Synthetic oligonucleotide
gccaggaggaacctgtaaccgcaaagttgg

SEQ ID NO: 31603 - DNA, 30 bp, Artificial Sequence
  Synthetic oligonucleotide
cgtctattgcgctagggaaataacagttgg

SEQ ID NO: 31604 - DNA, 30 bp, Artificial Sequence
  Synthetic oligonucleotide
ccgtgacatggccttgacgatgggaaaatg

SEQ ID NO: 31605 - DNA, 30 bp, Artificial Sequence
  Synthetic oligonucleotide
tgcccaggaagcaatggttcagtgaaaatg

SEQ ID NO: 31606 - DNA, 30 bp, Artificial Sequence
  Synthetic oligonucleotide
agtggcaagttatgagtccgaatgcaaatg

SEQ ID NO: 31607 - DNA, 30 bp, Artificial Sequence
  Synthetic oligonucleotide
ctgaatgaacaggcacgtataccggaaatg

SEQ ID NO: 31608 - DNA, 30 bp, Artificial Sequence
  Synthetic oligonucleotide
ccgtgtggcgcacaatcaagaaactaaatg

SEQ ID NO: 31609 - DNA, 30 bp, Artificial Sequence
  Synthetic oligonucleotide
tcgaggggaatggggtcaattacaacaatg

SEQ ID NO: 31610 - DNA, 30 bp, Artificial Sequence
  Synthetic oligonucleotide
tgcttagcgaatgcggggaaagagccaatg

SEQ ID NO: 31611 - DNA, 30 bp, Artificial Sequence
  Synthetic oligonucleotide
gtgtacacgagacgagtaccagaagcaatg

SEQ ID NO: 31612 - DNA, 30 bp, Artificial Sequence
  Synthetic oligonucleotide
ctacggtacaggcctcgccatcagagaatg

SEQ ID NO: 31613 - DNA, 30 bp, Artificial Sequence
  Synthetic oligonucleotide
tatggacaatcatatcgcgaggcgcgaatg

SEQ ID NO: 31614 - DNA, 30 bp, Artificial Sequence
  Synthetic oligonucleotide
ttgtccgaaagtcggatggctcggggaatg

SEQ ID NO: 31615 - DNA, 30 bp, Artificial Sequence
  Synthetic oligonucleotide
gcaagagtaggggcgagactgtatataatg

SEQ ID NO: 31616 - DNA, 30 bp, Artificial Sequence
  Synthetic oligonucleotide
ctagggaccaaaagggattaaattataatg

SEQ ID NO: 31617 - DNA, 30 bp, Artificial Sequence
  Synthetic oligonucleotide
cgtgatccatgttcagctagtgagctaatg

SEQ ID NO: 31618 - DNA, 30 bp, Artificial Sequence
  Synthetic oligonucleotide
atagaccgaaagaagacgttgtcagtaatg

SEQ ID NO: 31619 - DNA, 30 bp, Artificial Sequence
  Synthetic oligonucleotide
cgagaccggtcaggttgagggtctgtaatg

SEQ ID NO: 31620 - DNA, 30 bp, Artificial Sequence
  Synthetic oligonucleotide
cgcgtcgaaagaagggcttgatccttaatg

SEQ ID NO: 31621 - DNA, 30 bp, Artificial Sequence
  Synthetic oligonucleotide
gtgaaaccgcaatgcaagtctcagttaatg

SEQ ID NO: 31622 - DNA, 30 bp, Artificial Sequence
  Synthetic oligonucleotide
agggccagaccgatcacatggaccaacatg

SEQ ID NO: 31623 - DNA, 30 bp, Artificial Sequence
  Synthetic oligonucleotide
tgcaacagtggaaaggaccgcgccaacatg

SEQ ID NO: 31624 - DNA, 30 bp, Artificial Sequence
  Synthetic oligonucleotide
acgagaccaaacctgccacaattgaccatg

SEQ ID NO: 31625 - DNA, 30 bp, Artificial Sequence
  Synthetic oligonucleotide
cttggtcagggttagagaatccattccatg

SEQ ID NO: 31626 - DNA, 30 bp, Artificial Sequence
  Synthetic oligonucleotide
gagccaacacttaaacttaatgccagcatg

SEQ ID NO: 31627 - DNA, 30 bp, Artificial Sequence
  Synthetic oligonucleotide
acatggctcggatgtatgcccccaggcatg

SEQ ID NO: 31628 - DNA, 30 bp, Artificial Sequence
  Synthetic oligonucleotide
cgagggtaaaacgcgaagcctgagggcatg

SEQ ID NO: 31629 - DNA, 30 bp, Artificial Sequence
  Synthetic oligonucleotide
ccaagaaacatataataggatacaatcatg

SEQ ID NO: 31630 - DNA, 30 bp, Artificial Sequence
  Synthetic oligonucleotide
ttgaacagtggcatcccacataagatcatg

SEQ ID NO: 31631 - DNA, 30 bp, Artificial Sequence
  Synthetic oligonucleotide
acgacccaagtaggtagatgaggactcatg

SEQ ID NO: 31632 - DNA, 30 bp, Artificial Sequence
  Synthetic oligonucleotide
ggaggtagaccggtaggactacgattcatg

SEQ ID NO: 31633 - DNA, 30 bp, Artificial Sequence
  Synthetic oligonucleotide
taaccgcgacaagtccctcaagcccagatg

SEQ ID NO: 31634 - DNA, 30 bp, Artificial Sequence
  Synthetic oligonucleotide
tgcgcaagagtagtaggtttaggggagatg

SEQ ID NO: 31635 - DNA, 30 bp, Artificial Sequence
  Synthetic oligonucleotide
gaatcaagcgcaaggctgagggggtagatg

SEQ ID NO: 31636 - DNA, 30 bp, Artificial Sequence
  Synthetic oligonucleotide
ggtacaagaatgctaagtgcctggtagatg

SEQ ID NO: 31637 - DNA, 30 bp, Artificial Sequence
  Synthetic oligonucleotide
cctgcatgcgctgggaaaatgtgggcgatg

SEQ ID NO: 31638 - DNA, 30 bp, Artificial Sequence
  Synthetic oligonucleotide
tgtaagtaatacacggtacggggtaggatg

SEQ ID NO: 31639 - DNA, 30 bp, Artificial Sequence
  Synthetic oligonucleotide
cctcaggataatatgaggtcaaacgggatg

SEQ ID NO: 31640 - DNA, 30 bp, Artificial Sequence
  Synthetic oligonucleotide
agacaagtgctgaagctgacgtggatgatg

SEQ ID NO: 31641 - DNA, 30 bp, Artificial Sequence
  Synthetic oligonucleotide
ggttaaaggaaaggcgttacgtccctgatg

SEQ ID NO: 31642 - DNA, 30 bp, Artificial Sequence
  Synthetic oligonucleotide
gctacagaaacgccggaaagctgggtgatg

SEQ ID NO: 31643 - DNA, 30 bp, Artificial Sequence
  Synthetic oligonucleotide
attcaagcagggaagtggtagcataatatg

SEQ ID NO: 31644 - DNA, 30 bp, Artificial Sequence
  Synthetic oligonucleotide
atcgcgaaacgcgggtgtaatccacatatg

SEQ ID NO: 31645 - DNA, 30 bp, Artificial Sequence
  Synthetic oligonucleotide
caataggagaggcaaagtctcagagatatg

SEQ ID NO: 31646 - DNA, 30 bp, Artificial Sequence
  Synthetic oligonucleotide
accgtcatcacacctacgggaaaatatatg

SEQ ID NO: 31647 - DNA, 30 bp, Artificial Sequence
  Synthetic oligonucleotide
aggatctgagagtagcggtcattagctatg

SEQ ID NO: 31648 - DNA, 30 bp, Artificial Sequence
  Synthetic oligonucleotide
ctacggggtaggtgaaacatataaagtatg

SEQ ID NO: 31649 - DNA, 30 bp, Artificial Sequence
  Synthetic oligonucleotide
acgatgctgatatcggacgagacgggtatg

SEQ ID NO: 31650 - DNA, 30 bp, Artificial Sequence
  Synthetic oligonucleotide
cgtattagacataaatcaggccatggtatg

SEQ ID NO: 31651 - DNA, 30 bp, Artificial Sequence
  Synthetic oligonucleotide
cgagggtgcccacacaagcaagtcaaactg

SEQ ID NO: 31652 - DNA, 30 bp, Artificial Sequence
  Synthetic oligonucleotide
acgtcaccgtcggagtagcagtaccaactg

SEQ ID NO: 31653 - DNA, 30 bp, Artificial Sequence
  Synthetic oligonucleotide
agcaacgatcagagcagcctaggctaactg

SEQ ID NO: 31654 - DNA, 30 bp, Artificial Sequence
  Synthetic oligonucleotide
ctgatgaacataatccaacgggatccactg

SEQ ID NO: 31655 - DNA, 30 bp, Artificial Sequence
  Synthetic oligonucleotide
ggggagtagccatgaaaaagccttccactg

SEQ ID NO: 31656 - DNA, 30 bp, Artificial Sequence
  Synthetic oligonucleotide
cggaaaagtatcctcttcgcgacgtgactg

SEQ ID NO: 31657 - DNA, 30 bp, Artificial Sequence
  Synthetic oligonucleotide
ccgaaacgactactatcgactgtcctactg

SEQ ID NO: 31658 - DNA, 30 bp, Artificial Sequence
  Synthetic oligonucleotide
agaccgataccggtagatcgctaagtactg

SEQ ID NO: 31659 - DNA, 30 bp, Artificial Sequence
  Synthetic oligonucleotide
agcatgatgtccaagcgatggcaattactg

SEQ ID NO: 31660 - DNA, 30 bp, Artificial Sequence
  Synthetic oligonucleotide
cacacagtttacgagtcggagtgccgcctg

SEQ ID NO: 31661 - DNA, 30 bp, Artificial Sequence
  Synthetic oligonucleotide
cgttacagtaggtcagagttaaggtgcctg

SEQ ID NO: 31662 - DNA, 30 bp, Artificial Sequence
  Synthetic oligonucleotide
accggaagataaagatatggccatgtcctg

SEQ ID NO: 31663 - DNA, 30 bp, Artificial Sequence
  Synthetic oligonucleotide
acacgtgccacgatggacttaatcttcctg

SEQ ID NO: 31664 - DNA, 30 bp, Artificial Sequence
  Synthetic oligonucleotide
ggctaacacctacacatggcaaatgagctg

SEQ ID NO: 31665 - DNA, 30 bp, Artificial Sequence
  Synthetic oligonucleotide
tagatacgagaacaccagtaaaagtagctg

SEQ ID NO: 31666 - DNA, 30 bp, Artificial Sequence
  Synthetic oligonucleotide
ggacgactaagagcgaatgcgcaatcgctg

SEQ ID NO: 31667 - DNA, 30 bp, Artificial Sequence
  Synthetic oligonucleotide
tcacggaccgatgaatatagtaactcgctg

SEQ ID NO: 31668 - DNA, 30 bp, Artificial Sequence
  Synthetic oligonucleotide
aaggagagacaggtactctaaagctcgctg

SEQ ID NO: 31669 - DNA, 30 bp, Artificial Sequence
  Synthetic oligonucleotide
gagggcactcaattggaatgcaacctgctg

SEQ ID NO: 31670 - DNA, 30 bp, Artificial Sequence
  Synthetic oligonucleotide
tgcgaagcaggaattggtacgcacgtgctg

SEQ ID NO: 31671 - DNA, 30 bp, Artificial Sequence
  Synthetic oligonucleotide
ctactgcccgaaatagcagtggcgaatctg

SEQ ID NO: 31672 - DNA, 30 bp, Artificial Sequence
  Synthetic oligonucleotide
ttggaaaggacgttcacattaacacatctg

SEQ ID NO: 31673 - DNA, 30 bp, Artificial Sequence
  Synthetic oligonucleotide
ctacaacaactgtgagatggggaggatctg

SEQ ID NO: 31674 - DNA, 30 bp, Artificial Sequence
  Synthetic oligonucleotide
aagtcaaggtcggcggacgaacaatctctg

SEQ ID NO: 31675 - DNA, 30 bp, Artificial Sequence
  Synthetic oligonucleotide
taactcatgctgcgttgataaagaaaagtg

SEQ ID NO: 31676 - DNA, 30 bp, Artificial Sequence
  Synthetic oligonucleotide
tgcgtcaaatgtgggccggtaaagcaagtg

SEQ ID NO: 31677 - DNA, 30 bp, Artificial Sequence
  Synthetic oligonucleotide
ggtagaaccactaacgggagcggaccagtg

SEQ ID NO: 31678 - DNA, 30 bp, Artificial Sequence
  Synthetic oligonucleotide
tttcagctgaaaacgatttttgttccagtg

SEQ ID NO: 31679 - DNA, 30 bp, Artificial Sequence
  Synthetic oligonucleotide
cttcgataatggttgcggggttacagagtg

SEQ ID NO: 31680 - DNA, 30 bp, Artificial Sequence
  Synthetic oligonucleotide
aaccacgtaatagtacgacacagatgagtg

SEQ ID NO: 31681 - DNA, 30 bp, Artificial Sequence
  Synthetic oligonucleotide
taacggcaccaacaccggaccgagtgagtg

SEQ ID NO: 31682 - DNA, 30 bp, Artificial Sequence
  Synthetic oligonucleotide
agataaaaatgtagattacatacaaacgtg

SEQ ID NO: 31683 - DNA, 30 bp, Artificial Sequence
  Synthetic oligonucleotide
atgttatcggatagagtgtcacactacgtg

SEQ ID NO: 31684 - DNA, 30 bp, Artificial Sequence
  Synthetic oligonucleotide
acaggcgctgatgtgaaaggatgctacgtg

SEQ ID NO: 31685 - DNA, 30 bp, Artificial Sequence
  Synthetic oligonucleotide
aggttggctacatcataaacataaaccgtg

SEQ ID NO: 31686 - DNA, 30 bp, Artificial Sequence
  Synthetic oligonucleotide
tgtcgcccaatatgcaagaggactcccgtg

SEQ ID NO: 31687 - DNA, 30 bp, Artificial Sequence
  Synthetic oligonucleotide
gttaaatcggaaagcgtcgggactagcgtg

SEQ ID NO: 31688 - DNA, 30 bp, Artificial Sequence
  Synthetic oligonucleotide
taagtatggctcactaatccaaaaatcgtg

SEQ ID NO: 31689 - DNA, 30 bp, Artificial Sequence
  Synthetic oligonucleotide
ggcacggaaacttgagacaagggtatcgtg

SEQ ID NO: 31690 - DNA, 30 bp, Artificial Sequence
  Synthetic oligonucleotide
agtaggcagacgcgactgcggttaaaggtg

SEQ ID NO: 31691 - DNA, 30 bp, Artificial Sequence
  Synthetic oligonucleotide
ggaccaagcgcatggaggcccccctaggtg

SEQ ID NO: 31692 - DNA, 30 bp, Artificial Sequence
  Synthetic oligonucleotide
tgatgcgacgaagagacaaacaggacggtg

SEQ ID NO: 31693 - DNA, 30 bp, Artificial Sequence
  Synthetic oligonucleotide
agtaaacgtgtactaggtaggcctggggtg

SEQ ID NO: 31694 - DNA, 30 bp, Artificial Sequence
  Synthetic oligonucleotide
tacacaaatgcaggagcctggcggatggtg

SEQ ID NO: 31695 - DNA, 30 bp, Artificial Sequence
  Synthetic oligonucleotide
ggtgcgaaattggggaagatccctgtggtg

SEQ ID NO: 31696 - DNA, 30 bp, Artificial Sequence
  Synthetic oligonucleotide
agcatagagcaaaaagtgatgtttgtggtg

SEQ ID NO: 31697 - DNA, 30 bp, Artificial Sequence
  Synthetic oligonucleotide
gcacggcagttttaacctacaagcaatgtg

SEQ ID NO: 31698 - DNA, 30 bp, Artificial Sequence
  Synthetic oligonucleotide
catcaaatcagataagtacagccccatgtg

SEQ ID NO: 31699 - DNA, 30 bp, Artificial Sequence
  Synthetic oligonucleotide
acgagagcttcgggctgttacgtctctgtg

SEQ ID NO: 31700 - DNA, 30 bp, Artificial Sequence
  Synthetic oligonucleotide
tcatgaacggttgcgatgtgaggaagtgtg

SEQ ID NO: 31701 - DNA, 30 bp, Artificial Sequence
  Synthetic oligonucleotide
acaaggcattgttctttcatagggagtgtg

SEQ ID NO: 31702 - DNA, 30 bp, Artificial Sequence
  Synthetic oligonucleotide
gcaaggctcaggaaaaaggtgcacggtgtg

SEQ ID NO: 31703 - DNA, 30 bp, Artificial Sequence
  Synthetic oligonucleotide
gagggcaggtaatgggaggggagtggtgtg

SEQ ID NO: 31704 - DNA, 30 bp, Artificial Sequence
  Synthetic oligonucleotide
tggtgcgtcgagacgtgatccagagttgtg

SEQ ID NO: 31705 - DNA, 30 bp, Artificial Sequence
  Synthetic oligonucleotide
ttaggaaagtatctaggttagtcgaaattg

SEQ ID NO: 31706 - DNA, 30 bp, Artificial Sequence
  Synthetic oligonucleotide
gacgtgggatgggcgagccttaccgaattg

SEQ ID NO: 31707 - DNA, 30 bp, Artificial Sequence
  Synthetic oligonucleotide
tgccttaaacgaatcaccaagcgcgaattg

SEQ ID NO: 31708 - DNA, 30 bp, Artificial Sequence
  Synthetic oligonucleotide
agggggagggagaatcacacggaataattg

SEQ ID NO: 31709 - DNA, 30 bp, Artificial Sequence
  Synthetic oligonucleotide
agatgaaggccaacgtgtcaagagtaattg

SEQ ID NO: 31710 - DNA, 30 bp, Artificial Sequence
  Synthetic oligonucleotide
cacagtagctaagaaccccaactcgcattg

SEQ ID NO: 31711 - DNA, 30 bp, Artificial Sequence
  Synthetic oligonucleotide
gaggcgtaaattaatggggtaaggagattg

SEQ ID NO: 31712 - DNA, 30 bp, Artificial Sequence
  Synthetic oligonucleotide
acgatatgtgaattgcgcatcatcaacttg

SEQ ID NO: 31713 - DNA, 30 bp, Artificial Sequence
  Synthetic oligonucleotide
cgaagtggcctacaactgaaggtcaacttg

SEQ ID NO: 31714 - DNA, 30 bp, Artificial Sequence
  Synthetic oligonucleotide
tacccacagataaagggaatcgccgacttg

SEQ ID NO: 31715 - DNA, 30 bp, Artificial Sequence
  Synthetic oligonucleotide
gaaagagagtacagtccagcagtgcccttg

SEQ ID NO: 31716 - DNA, 30 bp, Artificial Sequence
  Synthetic oligonucleotide
ctgacaatctcaaaacaaagaactcccttg

SEQ ID NO: 31717 - DNA, 30 bp, Artificial Sequence
  Synthetic oligonucleotide
ctaccacggggtaacgggaatacggccttg

SEQ ID NO: 31718 - DNA, 30 bp, Artificial Sequence
  Synthetic oligonucleotide
tgcggggttaagtgtcgtgagggaagcttg

SEQ ID NO: 31719 - DNA, 30 bp, Artificial Sequence
  Synthetic oligonucleotide
gggcccgtaccaaaccagtacgaaatcttg

SEQ ID NO: 31720 - DNA, 30 bp, Artificial Sequence
  Synthetic oligonucleotide
tcacgagcggtctggtaaaacgtccagttg

SEQ ID NO: 31721 - DNA, 30 bp, Artificial Sequence
  Synthetic oligonucleotide
ggatgagcgtgaaatagtgcactggagttg

SEQ ID NO: 31722 - DNA, 30 bp, Artificial Sequence
  Synthetic oligonucleotide
gggcactaaaacgatggcggtagatagttg

SEQ ID NO: 31723 - DNA, 30 bp, Artificial Sequence
  Synthetic oligonucleotide
caccggtaggcaacgagctactacacgttg

SEQ ID NO: 31724 - DNA, 30 bp, Artificial Sequence
  Synthetic oligonucleotide
cgcgaaagtgagtccaatcgtgggtcgttg

SEQ ID NO: 31725 - DNA, 30 bp, Artificial Sequence
  Synthetic oligonucleotide
agactgtgaacggcgaacacctaggtgttg

SEQ ID NO: 31726 - DNA, 30 bp, Artificial Sequence
  Synthetic oligonucleotide
gcgggaaccctgtataacgaactgttgttg

SEQ ID NO: 31727 - DNA, 30 bp, Artificial Sequence
  Synthetic oligonucleotide
tgaattaccacacgtcacggcgcgagtttg

SEQ ID NO: 31728 - DNA, 30 bp, Artificial Sequence
  Synthetic oligonucleotide
gtgacttccataaccaatcgccaacaaaat

SEQ ID NO: 31729 - DNA, 30 bp, Artificial Sequence
  Synthetic oligonucleotide
aggggcttaataagcaactggtggcaaaat

SEQ ID NO: 31730 - DNA, 30 bp, Artificial Sequence
  Synthetic oligonucleotide
acgaactagtggcctgttagctaaacaaat

SEQ ID NO: 31731 - DNA, 30 bp, Artificial Sequence
  Synthetic oligonucleotide
aaggagctaataacgcatgagaaggcaaat

SEQ ID NO: 31732 - DNA, 30 bp, Artificial Sequence
  Synthetic oligonucleotide
agaggactaagactatgtgattctgcaaat

SEQ ID NO: 31733 - DNA, 30 bp, Artificial Sequence
  Synthetic oligonucleotide
acgagacgtgtgaatccaaggggacgaaat

SEQ ID NO: 31734 - DNA, 30 bp, Artificial Sequence
  Synthetic oligonucleotide
ctgcgtgcggagttaaggagtaaccgaaat

SEQ ID NO: 31735 - DNA, 30 bp, Artificial Sequence
  Synthetic oligonucleotide
caccggggcataaaatcttgacagggaaat

SEQ ID NO: 31736 - DNA, 30 bp, Artificial Sequence
  Synthetic oligonucleotide
cagacactcgaatgcaggcgagagtgaaat

SEQ ID NO: 31737 - DNA, 30 bp, Artificial Sequence
  Synthetic oligonucleotide
acgttgattgaagaactcgggttgctaaat

SEQ ID NO: 31738 - DNA, 30 bp, Artificial Sequence
  Synthetic oligonucleotide
tcgactcaaatgtaatatggaaatcacaat

SEQ ID NO: 31739 - DNA, 30 bp, Artificial Sequence
  Synthetic oligonucleotide
aggcagaacatccccacgcaagcagacaat

SEQ ID NO: 31740 - DNA, 30 bp, Artificial Sequence
  Synthetic oligonucleotide
cgccaagtcgaattacacccacgagccaat

SEQ ID NO: 31741 - DNA, 30 bp, Artificial Sequence
  Synthetic oligonucleotide
tgaaagccagataatactcaggtcggcaat

SEQ ID NO: 31742 - DNA, 30 bp, Artificial Sequence
  Synthetic oligonucleotide
gcaggtaggtctgagcgcgaatcaatcaat

SEQ ID NO: 31743 - DNA, 30 bp, Artificial Sequence
  Synthetic oligonucleotide
acatgggatcgaaatcgcgaaagtctcaat

SEQ ID NO: 31744 - DNA, 30 bp, Artificial Sequence
  Synthetic oligonucleotide
gacggtgcgggggcataaatcaagaagaat

SEQ ID NO: 31745 - DNA, 30 bp, Artificial Sequence
  Synthetic oligonucleotide
gggagaaggatgcaacctggtacacagaat

SEQ ID NO: 31746 - DNA, 30 bp, Artificial Sequence
  Synthetic oligonucleotide
agatggagcccagatgctacgggggagaat

SEQ ID NO: 31747 - DNA, 30 bp, Artificial Sequence
  Synthetic oligonucleotide
gcactttagcaataggtagcaggaacgaat

SEQ ID NO: 31748 - DNA, 30 bp, Artificial Sequence
  Synthetic oligonucleotide
catggtgtagcgagccactcgactccgaat

SEQ ID NO: 31749 - DNA, 30 bp, Artificial Sequence
  Synthetic oligonucleotide
cgccaaaagaacgtcaagaaatcatggaat

SEQ ID NO: 31750 - DNA, 30 bp, Artificial Sequence
  Synthetic oligonucleotide
acaggtcgagcatacaagaaataactgaat

SEQ ID NO: 31751 - DNA, 30 bp, Artificial Sequence
  Synthetic oligonucleotide
gaggtaggggggcagtagaccgtgcataat

SEQ ID NO: 31752 - DNA, 30 bp, Artificial Sequence
  Synthetic oligonucleotide
ctggaactcccgtcgaacatgcccgataat

SEQ ID NO: 31753 - DNA, 30 bp, Artificial Sequence
  Synthetic oligonucleotide
agcccggggattagacgagaatgggataat

SEQ ID NO: 31754 - DNA, 30 bp, Artificial Sequence
  Synthetic oligonucleotide
cggggaatacagggagatgcatcaactaat

SEQ ID NO: 31755 - DNA, 30 bp, Artificial Sequence
  Synthetic oligonucleotide
gggagagtcggacgagtagagtcacctaat

SEQ ID NO: 31756 - DNA, 30 bp, Artificial Sequence
  Synthetic oligonucleotide
acgtgagaatggcggccaatactcgctaat

SEQ ID NO: 31757 - DNA, 30 bp, Artificial Sequence
  Synthetic oligonucleotide
tgaggacagggttacacgggtgggaaacat

SEQ ID NO: 31758 - DNA, 30 bp, Artificial Sequence
  Synthetic oligonucleotide
taccttgagatacaacgggcgggggaacat

SEQ ID NO: 31759 - DNA, 30 bp, Artificial Sequence
  Synthetic oligonucleotide
agcgagtcagtgctgacgattgtggaacat

SEQ ID NO: 31760 - DNA, 30 bp, Artificial Sequence
  Synthetic oligonucleotide
actacatacattaactcagatcggtaacat

SEQ ID NO: 31761 - DNA, 30 bp, Artificial Sequence
  Synthetic oligonucleotide
agtgcagctaattcagagtgagaacgacat

SEQ ID NO: 31762 - DNA, 31 bp, Artificial Sequence
  Synthetic oligonucleotide
taccgactacccaagaaaaaagagaggacat

SEQ ID NO: 31763 - DNA, 30 bp, Artificial Sequence
  Synthetic oligonucleotide
ctccccagaaaagtaaatcaaaggggacat

SEQ ID NO: 31764 - DNA, 30 bp, Artificial Sequence
  Synthetic oligonucleotide
tcatcggtaaaatgtgtaaagcatggacat

SEQ ID NO: 31765 - DNA, 30 bp, Artificial Sequence
  Synthetic oligonucleotide
cgcgtaagcgtactcgtaccgagttgacat

SEQ ID NO: 31766 - DNA, 30 bp, Artificial Sequence
  Synthetic oligonucleotide
ccatcgagggtaaaacagctattcgtacat

SEQ ID NO: 31767 - DNA, 30 bp, Artificial Sequence
  Synthetic oligonucleotide
ctagcggttagcgccgaaaacaggttacat

SEQ ID NO: 31768 - DNA, 30 bp, Artificial Sequence
  Synthetic oligonucleotide
acaagtccaacaaggactccaggtaaccat

SEQ ID NO: 31769 - DNA, 30 bp, Artificial Sequence
  Synthetic oligonucleotide
cagagaaacagtatgtcgccgtccgaccat

SEQ ID NO: 31770 - DNA, 30 bp, Artificial Sequence
  Synthetic oligonucleotide
cgtgcacgaacgaaaggagtgacttagcat

SEQ ID NO: 31771 - DNA, 30 bp, Artificial Sequence
  Synthetic oligonucleotide
ggtccttcaagtacagagtatgctgcgcat

SEQ ID NO: 31772 - DNA, 30 bp, Artificial Sequence
  Synthetic oligonucleotide
acagagggcttaaaaagtactaggaggcat

SEQ ID NO: 31773 - DNA, 30 bp, Artificial Sequence
  Synthetic oligonucleotide
aaggcggccttgatacgagacgggaggcat

SEQ ID NO: 31774 - DNA, 30 bp, Artificial Sequence
  Synthetic oligonucleotide
aaacggtagaacgcattaaccagaatgcat

SEQ ID NO: 31775 - DNA, 30 bp, Artificial Sequence
  Synthetic oligonucleotide
cgagaatgctcaaagaatcaataagtgcat

SEQ ID NO: 31776 - DNA, 30 bp, Artificial Sequence
  Synthetic oligonucleotide
acgtgacgaaggtgaccaattgtaaatcat

SEQ ID NO: 31777 - DNA, 30 bp, Artificial Sequence
  Synthetic oligonucleotide
ttgtagcgaaatggagaaaacttaaatcat

SEQ ID NO: 31778 - DNA, 30 bp, Artificial Sequence
  Synthetic oligonucleotide
tctcagatcacatcgtccacacaacatcat

SEQ ID NO: 31779 - DNA, 30 bp, Artificial Sequence
  Synthetic oligonucleotide
aacagagaaggatgaaccccaagcgatcat

SEQ ID NO: 31780 - DNA, 30 bp, Artificial Sequence
  Synthetic oligonucleotide
aggagggcgtgaacggtgctcactactcat

SEQ ID NO: 31781 - DNA, 30 bp, Artificial Sequence
  Synthetic oligonucleotide
tcgtggatggcgatcatagagaggcttcat

SEQ ID NO: 31782 - DNA, 30 bp, Artificial Sequence
  Synthetic oligonucleotide
tcaggaggcgtgagcggaccattaaaagat

SEQ ID NO: 31783 - DNA, 30 bp, Artificial Sequence
  Synthetic oligonucleotide
acgtgagcgcactagggaatacttcaagat

SEQ ID NO: 31784 - DNA, 30 bp, Artificial Sequence
  Synthetic oligonucleotide
aggcgatgaagtttctgcgcgggttaagat

SEQ ID NO: 31785 - DNA, 30 bp, Artificial Sequence
  Synthetic oligonucleotide
gttggtcacagggaaagcgaagggccagat

SEQ ID NO: 31786 - DNA, 30 bp, Artificial Sequence
  Synthetic oligonucleotide
cgcgagtaacctaatgacatgcgaagagat

SEQ ID NO: 31787 - DNA, 30 bp, Artificial Sequence
  Synthetic oligonucleotide
cgtcgcccagtaccaactaatctcggagat

SEQ ID NO: 31788 - DNA, 30 bp, Artificial Sequence
  Synthetic oligonucleotide
ggcgccgaccaagcaaagctaccgtgagat

SEQ ID NO: 31789 - DNA, 30 bp, Artificial Sequence
  Synthetic oligonucleotide
cgaatagcctgagcgtacaaacacgtagat

SEQ ID NO: 31790 - DNA, 30 bp, Artificial Sequence
  Synthetic oligonucleotide
gcttaacagatggagcgtgcaatacacgat

SEQ ID NO: 31791 - DNA, 30 bp, Artificial Sequence
  Synthetic oligonucleotide
tgaagagatcaatgtgaaagcgatcccgat

SEQ ID NO: 31792 - DNA, 30 bp, Artificial Sequence
  Synthetic oligonucleotide
aacggtattggagaatatctcgacagcgat

SEQ ID NO: 31793 - DNA, 30 bp, Artificial Sequence
  Synthetic oligonucleotide
actcgaacggagtttgtgggactgcgcgat

SEQ ID NO: 31794 - DNA, 30 bp, Artificial Sequence
  Synthetic oligonucleotide
cttgaaaactatacatctaaggtgggcgat

SEQ ID NO: 31795 - DNA, 30 bp, Artificial Sequence
  Synthetic oligonucleotide
agccaggacatgccaggtgttgtgggcgat

SEQ ID NO: 31796 - DNA, 30 bp, Artificial Sequence
  Synthetic oligonucleotide
ttagggcaaactaaagggcgctactgcgat

SEQ ID NO: 31797 - DNA, 30 bp, Artificial Sequence
  Synthetic oligonucleotide
cacagatgataatgctaacatcggatcgat

SEQ ID NO: 31798 - DNA, 30 bp, Artificial Sequence
  Synthetic oligonucleotide
gagagcaatcaagaaattaggatgaaggat

SEQ ID NO: 31799 - DNA, 30 bp, Artificial Sequence
  Synthetic oligonucleotide
gtgcaaaccaggcttaataccgtgacggat

SEQ ID NO: 31800 - DNA, 30 bp, Artificial Sequence
  Synthetic oligonucleotide
ggcacgtcagtcggcttgcgtatacgggat

SEQ ID NO: 31801 - DNA, 30 bp, Artificial Sequence
  Synthetic oligonucleotide
actgtggcaggagcaacgtgtaagcgggat

SEQ ID NO: 31802 - DNA, 30 bp, Artificial Sequence
  Synthetic oligonucleotide
aggtaggtatatcactacgtcgggcgggat

SEQ ID NO: 31803 - DNA, 30 bp, Artificial Sequence
  Synthetic oligonucleotide
acgtagctcagaaacgactggcgagtggat

SEQ ID NO: 31804 - DNA, 30 bp, Artificial Sequence
  Synthetic oligonucleotide
cggcaaagactatgtaagaccgggcatgat

SEQ ID NO: 31805 - DNA, 30 bp, Artificial Sequence
  Synthetic oligonucleotide
cacgggtgccagacaggggcggtgcatgat

SEQ ID NO: 31806 - DNA, 30 bp, Artificial Sequence
  Synthetic oligonucleotide
ggttgggtccaagaataaaccgagactgat

SEQ ID NO: 31807 - DNA, 30 bp, Artificial Sequence
  Synthetic oligonucleotide
gcgcgggtagatctaaaattccgtcgtgat

SEQ ID NO: 31808 - DNA, 30 bp, Artificial Sequence
  Synthetic oligonucleotide
gtgaggtggtagaggggttcactataatat

SEQ ID NO: 31809 - DNA, 30 bp, Artificial Sequence
  Synthetic oligonucleotide
gaggaaagatggcagtcgtgtaaagcatat

SEQ ID NO: 31810 - DNA, 30 bp, Artificial Sequence
  Synthetic oligonucleotide
tacgaagatcagaagcaaagcacggcatat

SEQ ID NO: 31811 - DNA, 30 bp, Artificial Sequence
  Synthetic oligonucleotide
catggtcggcgcgaatagactgccgtatat

SEQ ID NO: 31812 - DNA, 30 bp, Artificial Sequence
  Synthetic oligonucleotide
ccaacaatggcaagagcgagtatggactat

SEQ ID NO: 31813 - DNA, 29 bp, Artificial Sequence
  Synthetic oligonucleotide
atgtgacaaaggcacaacctgctgactat

SEQ ID NO: 31814 - DNA, 30 bp, Artificial Sequence
  Synthetic oligonucleotide
cggcgacagaaggacggctctgactgctat

SEQ ID NO: 31815 - DNA, 30 bp, Artificial Sequence
  Synthetic oligonucleotide
aggtaacggggaccaccgtatgcaatctat

SEQ ID NO: 31816 - DNA, 30 bp, Artificial Sequence
  Synthetic oligonucleotide
cggggtaagaacgtgacgtgacccatctat

SEQ ID NO: 31817 - DNA, 30 bp, Artificial Sequence
  Synthetic oligonucleotide
agattacatgtaaggggatcgtgaaagtat

SEQ ID NO: 31818 - DNA, 30 bp, Artificial Sequence
  Synthetic oligonucleotide
cctccgcccgagccacaaaccaagcagtat

SEQ ID NO: 31819 - DNA, 30 bp, Artificial Sequence
  Synthetic oligonucleotide
tcaaaggagtggtacagatagaaggagtat

SEQ ID NO: 31820 - DNA, 30 bp, Artificial Sequence
  Synthetic oligonucleotide
gcgtagcgtccgatcgagtgagtttagtat

SEQ ID NO: 31821 - DNA, 30 bp, Artificial Sequence
  Synthetic oligonucleotide
gggcgtcgaagattcaaggatgtaccgtat

SEQ ID NO: 31822 - DNA, 30 bp, Artificial Sequence
  Synthetic oligonucleotide
aacgtataacatggctgatagaggtcgtat

SEQ ID NO: 31823 - DNA, 30 bp, Artificial Sequence
  Synthetic oligonucleotide
acgggcaaggcacctacatgtcaatggtat

SEQ ID NO: 31824 - DNA, 30 bp, Artificial Sequence
  Synthetic oligonucleotide
cgcggatgggacgaaatctttaatatgtat

SEQ ID NO: 31825 - DNA, 30 bp, Artificial Sequence
  Synthetic oligonucleotide
cggtatcggagaccaaatggaccactgtat

SEQ ID NO: 31826 - DNA, 30 bp, Artificial Sequence
  Synthetic oligonucleotide
aggcgccatcatgatactggagagctgtat

SEQ ID NO: 31827 - DNA, 30 bp, Artificial Sequence
  Synthetic oligonucleotide
aggctatcgtgggacgaaaaaagcgtgtat

SEQ ID NO: 31828 - DNA, 30 bp, Artificial Sequence
  Synthetic oligonucleotide
aggacctcgattgcgagccacacaagttat

SEQ ID NO: 31829 - DNA, 30 bp, Artificial Sequence
  Synthetic oligonucleotide
gcggtgactagaagagcgaactgatgttat

SEQ ID NO: 31830 - DNA, 30 bp, Artificial Sequence
  Synthetic oligonucleotide
tgggaggacacaatgagggagttatgttat

SEQ ID NO: 31831 - DNA, 30 bp, Artificial Sequence
  Synthetic oligonucleotide
ccttttgttgaaaatgaatccgctctttat

SEQ ID NO: 31832 - DNA, 30 bp, Artificial Sequence
  Synthetic oligonucleotide
gaggggagaatgatgagatgccgataaact

SEQ ID NO: 31833 - DNA, 30 bp, Artificial Sequence
  Synthetic oligonucleotide
gggtactggactgagcaaaatgtgtaaact

SEQ ID NO: 31834 - DNA, 30 bp, Artificial Sequence
  Synthetic oligonucleotide
tgagctgattggagaggaaattaggcaact

SEQ ID NO: 31835 - DNA, 30 bp, Artificial Sequence
  Synthetic oligonucleotide
acactgacaataagaggacacacaggaact

SEQ ID NO: 31836 - DNA, 30 bp, Artificial Sequence
  Synthetic oligonucleotide
gatggaggcgtgtggccgaatggactaact

SEQ ID NO: 31837 - DNA, 30 bp, Artificial Sequence
  Synthetic oligonucleotide
acactagtgagaatggtggataggctaact

SEQ ID NO: 31838 - DNA, 30 bp, Artificial Sequence
  Synthetic oligonucleotide
accaggacgggccgacaactgtggcacact

SEQ ID NO: 31839 - DNA, 30 bp, Artificial Sequence
  Synthetic oligonucleotide
tgatacgcgacgaaccgcatacacacgact

SEQ ID NO: 31840 - DNA, 30 bp, Artificial Sequence
  Synthetic oligonucleotide
ggatgaggagtggcgacgccgtacacgact

SEQ ID NO: 31841 - DNA, 30 bp, Artificial Sequence
  Synthetic oligonucleotide
gcgccagcctaaataacatgaatagcgact

SEQ ID NO: 31842 - DNA, 30 bp, Artificial Sequence
  Synthetic oligonucleotide
gcctacccagcgagagagctaagggcgact

SEQ ID NO: 31843 - DNA, 30 bp, Artificial Sequence
  Synthetic oligonucleotide
cgacaagccggctcggtcgagaatgcgact

SEQ ID NO: 31844 - DNA, 30 bp, Artificial Sequence
  Synthetic oligonucleotide
gcgagaccgggtgatggggtgaagcggact

SEQ ID NO: 31845 - DNA, 30 bp, Artificial Sequence
  Synthetic oligonucleotide
ggtcaagcacatgaaaagcgggggcggact

SEQ ID NO: 31846 - DNA, 30 bp, Artificial Sequence
  Synthetic oligonucleotide
cgttcgagaatgtggcgatttgtatggact

SEQ ID NO: 31847 - DNA, 30 bp, Artificial Sequence
  Synthetic oligonucleotide
gacatcctagaaagtatatgccaggtgact

SEQ ID NO: 31848 - DNA, 30 bp, Artificial Sequence
  Synthetic oligonucleotide
ttcacggcaaaaacacgaaacctgaatact

SEQ ID NO: 31849 - DNA, 30 bp, Artificial Sequence
  Synthetic oligonucleotide
taggacaaggataatcgtttcacatgtact

SEQ ID NO: 31850 - DNA, 30 bp, Artificial Sequence
  Synthetic oligonucleotide
acatcacaatggacgaaatgctctaaacct

SEQ ID NO: 31851 - DNA, 30 bp, Artificial Sequence
  Synthetic oligonucleotide
tagggcgtcgtcgaaccggagtgtcaacct

SEQ ID NO: 31852 - DNA, 30 bp, Artificial Sequence
  Synthetic oligonucleotide
aggatacttgaacagggtgaagattaacct

SEQ ID NO: 31853 - DNA, 30 bp, Artificial Sequence
  Synthetic oligonucleotide
caaagtaggtctggtaagagtcagcgccct

SEQ ID NO: 31854 - DNA, 30 bp, Artificial Sequence
  Synthetic oligonucleotide
gaccaacaaactaacacctcgagccagcct

SEQ ID NO: 31855 - DNA, 30 bp, Artificial Sequence
  Synthetic oligonucleotide
tctaggagtcgacatgagtgaaggctgcct

SEQ ID NO: 31856 - DNA, 30 bp, Artificial Sequence
  Synthetic oligonucleotide
agaagtgagagaattagtggcgacaaagct

SEQ ID NO: 31857 - DNA, 30 bp, Artificial Sequence
  Synthetic oligonucleotide
ccttagagcgggcaagtgacaacgtaagct

SEQ ID NO: 31858 - DNA, 30 bp, Artificial Sequence
  Synthetic oligonucleotide
aaaggtcgactgatagggtcaatggcagct

SEQ ID NO: 31859 - DNA, 30 bp, Artificial Sequence
  Synthetic oligonucleotide
cttagaggaggcaaccgtgattcgtcagct

SEQ ID NO: 31860 - DNA, 30 bp, Artificial Sequence
  Synthetic oligonucleotide
ggcgaataacgcttttgctcacagagagct

SEQ ID NO: 31861 - DNA, 30 bp, Artificial Sequence
  Synthetic oligonucleotide
gtgaccgaagaacgcaatcaccgtcgagct

SEQ ID NO: 31862 - DNA, 30 bp, Artificial Sequence
  Synthetic oligonucleotide
cgccggaaatataattagggacgtcacgct

SEQ ID NO: 31863 - DNA, 30 bp, Artificial Sequence
  Synthetic oligonucleotide
catcgtgtagacccctacgagtggtacgct

SEQ ID NO: 31864 - DNA, 30 bp, Artificial Sequence
  Synthetic oligonucleotide
tacaagaaatacaatgacaccgaacccgct

SEQ ID NO: 31865 - DNA, 30 bp, Artificial Sequence
  Synthetic oligonucleotide
agaactccaactaacacacctactagcgct

SEQ ID NO: 31866 - DNA, 30 bp, Artificial Sequence
  Synthetic oligonucleotide
gggaacagtatccacagaggcgacgtcgct

SEQ ID NO: 31867 - DNA, 30 bp, Artificial Sequence
  Synthetic oligonucleotide
catcgacaagtcactatcgcacgaaaggct

SEQ ID NO: 31868 - DNA, 30 bp, Artificial Sequence
  Synthetic oligonucleotide
atggctacacgtatcaaccagtagcaggct

SEQ ID NO: 31869 - DNA, 30 bp, Artificial Sequence
  Synthetic oligonucleotide
gtggtgcgaaggacaatgaatttggcggct

SEQ ID NO: 31870 - DNA, 30 bp, Artificial Sequence
  Synthetic oligonucleotide
ttcgaacgatacggggagtacgcaagggct

SEQ ID NO: 31871 - DNA, 30 bp, Artificial Sequence
  Synthetic oligonucleotide
acggacaagacatcagaagcgtcaggggct

SEQ ID NO: 31872 - DNA, 30 bp, Artificial Sequence
  Synthetic oligonucleotide
ggagcgatagtacgtctgaaagccaatgct

SEQ ID NO: 31873 - DNA, 30 bp, Artificial Sequence
  Synthetic oligonucleotide
catgcccgaactagcgtggccaaatatgct

SEQ ID NO: 31874 - DNA, 30 bp, Artificial Sequence
  Synthetic oligonucleotide
ttggcgggcaccgaaggtcatagctatgct

SEQ ID NO: 31875 - DNA, 31 bp, Artificial Sequence
  Synthetic oligonucleotide
aaaacggaaaaaggagagggctcacactgct

SEQ ID NO: 31876 - DNA, 30 bp, Artificial Sequence
  Synthetic oligonucleotide
gcccgccacgagagatgaccagtagctgct

SEQ ID NO: 31877 - DNA, 30 bp, Artificial Sequence
  Synthetic oligonucleotide
cgataaatcatcaacccaccgtatggtgct

SEQ ID NO: 31878 - DNA, 30 bp, Artificial Sequence
  Synthetic oligonucleotide
tgcgaggttcgcctcaaatagcgcaaatct

SEQ ID NO: 31879 - DNA, 30 bp, Artificial Sequence
  Synthetic oligonucleotide
ggtggggacatcattcttagctagccatct

SEQ ID NO: 31880 - DNA, 30 bp, Artificial Sequence
  Synthetic oligonucleotide
tacggagcgaactcggttcgtgttgcctct

SEQ ID NO: 31881 - DNA, 30 bp, Artificial Sequence
  Synthetic oligonucleotide
gttgcgcccagaacacatagaatcgtctct

SEQ ID NO: 31882 - DNA, 30 bp, Artificial Sequence
  Synthetic oligonucleotide
cgccgttacatgaggcggagtgtagagtct

SEQ ID NO: 31883 - DNA, 30 bp, Artificial Sequence
  Synthetic oligonucleotide
tcgactcgtcgaactataagaatgtattct

SEQ ID NO: 31884 - DNA, 29 bp, Artificial Sequence
  Synthetic oligonucleotide
ggtcgttgaacaagaccaagtggacaagt

SEQ ID NO: 31885 - DNA, 30 bp, Artificial Sequence
  Synthetic oligonucleotide
atgggaggtgtacacggattaaccagaagt

SEQ ID NO: 31886 - DNA, 30 bp, Artificial Sequence
  Synthetic oligonucleotide
aggggctgagaagcgacgaagcttgtaagt

SEQ ID NO: 31887 - DNA, 30 bp, Artificial Sequence
  Synthetic oligonucleotide
gcggcagaaatcataaaaggtagttacagt

SEQ ID NO: 31888 - DNA, 30 bp, Artificial Sequence
  Synthetic oligonucleotide
ttggcgattaaggggatcgctcaaagcagt

SEQ ID NO: 31889 - DNA, 30 bp, Artificial Sequence
  Synthetic oligonucleotide
gcgaaggtcggactggtgaccctgagcagt

SEQ ID NO: 31890 - DNA, 30 bp, Artificial Sequence
  Synthetic oligonucleotide
aggtaagtttcccgagagagaaatcgcagt

SEQ ID NO: 31891 - DNA, 30 bp, Artificial Sequence
  Synthetic oligonucleotide
acccaaccattaaaagaggaatgcggcagt

SEQ ID NO: 31892 - DNA, 30 bp, Artificial Sequence
  Synthetic oligonucleotide
acgacgtagtatgcgagtaacgtcgagagt

SEQ ID NO: 31893 - DNA, 30 bp, Artificial Sequence
  Synthetic oligonucleotide
cggagcgtgaatcaaaaatcaacctagagt

SEQ ID NO: 31894 - DNA, 30 bp, Artificial Sequence
  Synthetic oligonucleotide
caagtagtgagctaggagtcagtctagagt

SEQ ID NO: 31895 - DNA, 30 bp, Artificial Sequence
  Synthetic oligonucleotide
aacgcctagcagcggacatcagagtagagt

SEQ ID NO: 31896 - DNA, 30 bp, Artificial Sequence
  Synthetic oligonucleotide
gaaacaagtaaatcattggtaaaaacgagt

SEQ ID NO: 31897 - DNA, 30 bp, Artificial Sequence
  Synthetic oligonucleotide
agcactggttcgaatacagaatgctcgagt

SEQ ID NO: 31898 - DNA, 30 bp, Artificial Sequence
  Synthetic oligonucleotide
ggatgagcgatatagcttgcgtggtcgagt

SEQ ID NO: 31899 - DNA, 30 bp, Artificial Sequence
  Synthetic oligonucleotide
agcctgggcacaaacgacaactgttcgagt

SEQ ID NO: 31900 - DNA, 28 bp, Artificial Sequence
  Synthetic oligonucleotide
cagaccctcccaaagagcgagttggagt

SEQ ID NO: 31901 - DNA, 30 bp, Artificial Sequence
  Synthetic oligonucleotide
cgtgaacagatactcataatgtacctgagt

SEQ ID NO: 31902 - DNA, 30 bp, Artificial Sequence
  Synthetic oligonucleotide
acgtcgatgttcaaaaggtagtgcctgagt

SEQ ID NO: 31903 - DNA, 30 bp, Artificial Sequence
  Synthetic oligonucleotide
tgccaatgaagaagagctacgaaagtgagt

SEQ ID NO: 31904 - DNA, 30 bp, Artificial Sequence
  Synthetic oligonucleotide
gcatgggtgcgtggtacttgtaaattgagt

SEQ ID NO: 31905 - DNA, 30 bp, Artificial Sequence
  Synthetic oligonucleotide
taagctgcatactaataaaaagaattgagt

SEQ ID NO: 31906 - DNA, 30 bp, Artificial Sequence
  Synthetic oligonucleotide
gggcagtagagatgaagatagctgttgagt

SEQ ID NO: 31907 - DNA, 30 bp, Artificial Sequence
  Synthetic oligonucleotide
aggacgtacgaaactggggactaaaatagt

SEQ ID NO: 31908 - DNA, 30 bp, Artificial Sequence
  Synthetic oligonucleotide
tctggcagaccagagagtgaaaagaatagt

SEQ ID NO: 31909 - DNA, 30 bp, Artificial Sequence
  Synthetic oligonucleotide
ccgtaatagatgcctcgatttgaacatagt

SEQ ID NO: 31910 - DNA, 30 bp, Artificial Sequence
  Synthetic oligonucleotide
cacggccagtcaggtagagccataactagt

SEQ ID NO: 31911 - DNA, 30 bp, Artificial Sequence
  Synthetic oligonucleotide
agcgagaatttgctaaggacatgtactagt

SEQ ID NO: 31912 - DNA, 30 bp, Artificial Sequence
  Synthetic oligonucleotide
agacgggagagggcggagactattcctagt

SEQ ID NO: 31913 - DNA, 30 bp, Artificial Sequence
  Synthetic oligonucleotide
tcgaaacggactgatgggttgggtgctagt

SEQ ID NO: 31914 - DNA, 30 bp, Artificial Sequence
  Synthetic oligonucleotide
agagcagcgcgtcataacacaattgctagt

SEQ ID NO: 31915 - DNA, 30 bp, Artificial Sequence
  Synthetic oligonucleotide
acacaagaagaagtgtgatagcgtcgtagt

SEQ ID NO: 31916 - DNA, 30 bp, Artificial Sequence
  Synthetic oligonucleotide
cgaggatgtccaacgaaacgtccaattagt

SEQ ID NO: 31917 - DNA, 30 bp, Artificial Sequence
  Synthetic oligonucleotide
gcagagggagagcacgattaaatgatacgt

SEQ ID NO: 31918 - DNA, 30 bp, Artificial Sequence
  Synthetic oligonucleotide
cggatgaatctagcttgtcatcgaaaccgt

SEQ ID NO: 31919 - DNA, 30 bp, Artificial Sequence
  Synthetic oligonucleotide
ggtacgatacgtcaaaggatctgagaccgt

SEQ ID NO: 31920 - DNA, 30 bp, Artificial Sequence
  Synthetic oligonucleotide
agagcaaaggggaagggactgggcgaccgt

SEQ ID NO: 31921 - DNA, 30 bp, Artificial Sequence
  Synthetic oligonucleotide
ttgtgaggatactacagaggaaactaccgt

SEQ ID NO: 31922 - DNA, 30 bp, Artificial Sequence
  Synthetic oligonucleotide
aagcgagcggacaaggaagccaacgagcgt

SEQ ID NO: 31923 - DNA, 30 bp, Artificial Sequence
  Synthetic oligonucleotide
tcggactatgaacaggggtgccagtagcgt

SEQ ID NO: 31924 - DNA, 30 bp, Artificial Sequence
  Synthetic oligonucleotide
catagagccgagtgataggtgggaccgcgt

SEQ ID NO: 31925 - DNA, 30 bp, Artificial Sequence
  Synthetic oligonucleotide
gtaggcgagtaggtagagtgtgtctcgcgt

SEQ ID NO: 31926 - DNA, 30 bp, Artificial Sequence
  Synthetic oligonucleotide
gtcgtgcatcagtggccagtctcagtgcgt

SEQ ID NO: 31927 - DNA, 30 bp, Artificial Sequence
  Synthetic oligonucleotide
ataccgtgtgagcaggaattgaagcatcgt

SEQ ID NO: 31928 - DNA, 30 bp, Artificial Sequence
  Synthetic oligonucleotide
tataaaccaggtcgggaaggtggagctcgt

SEQ ID NO: 31929 - DNA, 30 bp, Artificial Sequence
  Synthetic oligonucleotide
gtgtagaataaatcataatataacagtcgt

SEQ ID NO: 31930 - DNA, 30 bp, Artificial Sequence
  Synthetic oligonucleotide
ggaacaagaagtcgcttaaagttaaaaggt

SEQ ID NO: 31931 - DNA, 30 bp, Artificial Sequence
  Synthetic oligonucleotide
acgacaactaatagtgctagcagtcaaggt

SEQ ID NO: 31932 - DNA, 30 bp, Artificial Sequence
  Synthetic oligonucleotide
tgacaatagtgtcacatgaaacaagaaggt

SEQ ID NO: 31933 - DNA, 30 bp, Artificial Sequence
  Synthetic oligonucleotide
aactacgtggtttgccagagaagagaaggt

SEQ ID NO: 31934 - DNA, 30 bp, Artificial Sequence
  Synthetic oligonucleotide
aggggtgcccatctatgatagtcaggaggt

SEQ ID NO: 31935 - DNA, 30 bp, Artificial Sequence
  Synthetic oligonucleotide
aactaccaaaagctgacgtaagagggaggt

SEQ ID NO: 31936 - DNA, 30 bp, Artificial Sequence
  Synthetic oligonucleotide
tagtgcagacttggcactgaggactgaggt

SEQ ID NO: 31937 - DNA, 30 bp, Artificial Sequence
  Synthetic oligonucleotide
acacggcgaagccgaaggcattggtgaggt

SEQ ID NO: 31938 - DNA, 30 bp, Artificial Sequence
  Synthetic oligonucleotide
aaaggatacgtcacatggtagggaataggt

SEQ ID NO: 31939 - DNA, 30 bp, Artificial Sequence
  Synthetic oligonucleotide
gagcgaaaaggggaagctcatatgttaggt

SEQ ID NO: 31940 - DNA, 30 bp, Artificial Sequence
  Synthetic oligonucleotide
ggaggcgaacatcgcgtgcaccgagccggt

SEQ ID NO: 31941 - DNA, 30 bp, Artificial Sequence
  Synthetic oligonucleotide
ggagagtaacaaccaacatactcaagcggt

SEQ ID NO: 31942 - DNA, 30 bp, Artificial Sequence
  Synthetic oligonucleotide
cagacagcaaagtatacctccgacctcggt

SEQ ID NO: 31943 - DNA, 30 bp, Artificial Sequence
  Synthetic oligonucleotide
caagactaaagtagaaacggataggggggt

SEQ ID NO: 31944 - DNA, 30 bp, Artificial Sequence
  Synthetic oligonucleotide
gagaacgagagcctaaatgggcggttgggt

SEQ ID NO: 31945 - DNA, 30 bp, Artificial Sequence
  Synthetic oligonucleotide
tggtcacgagtgagtcagattacacatggt

SEQ ID NO: 31946 - DNA, 30 bp, Artificial Sequence
  Synthetic oligonucleotide
ccagacccagatgtaagcggctcagctggt

SEQ ID NO: 31947 - DNA, 30 bp, Artificial Sequence
  Synthetic oligonucleotide
cgggtcgaggtaaaaatactgaagagtggt

SEQ ID NO: 31948 - DNA, 30 bp, Artificial Sequence
  Synthetic oligonucleotide
atggctggaaaaggacgaagtagtcgtggt

SEQ ID NO: 31949 - DNA, 30 bp, Artificial Sequence
  Synthetic oligonucleotide
gcgccagacacatcgagaagagagggtggt

SEQ ID NO: 31950 - DNA, 30 bp, Artificial Sequence
  Synthetic oligonucleotide
tgtgatgtcagacaatccgagctacaatgt

SEQ ID NO: 31951 - DNA, 30 bp, Artificial Sequence
  Synthetic oligonucleotide
ggagggccacagacaggggaattacaatgt

SEQ ID NO: 31952 - DNA, 30 bp, Artificial Sequence
  Synthetic oligonucleotide
caataggaggagattagcacgaaataatgt

SEQ ID NO: 31953 - DNA, 30 bp, Artificial Sequence
  Synthetic oligonucleotide
ggagcatggcgactactaagggtgacatgt

SEQ ID NO: 31954 - DNA, 30 bp, Artificial Sequence
  Synthetic oligonucleotide
cacgatcgcctctgacagggaatacgatgt

SEQ ID NO: 31955 - DNA, 30 bp, Artificial Sequence
  Synthetic oligonucleotide
cacatggagggaagattcacttagcgatgt

SEQ ID NO: 31956 - DNA, 30 bp, Artificial Sequence
  Synthetic oligonucleotide
caaggcgaattagggttacataggcgatgt

SEQ ID NO: 31957 - DNA, 30 bp, Artificial Sequence
  Synthetic oligonucleotide
ccatacagaaccatagttcgcaactgatgt

SEQ ID NO: 31958 - DNA, 30 bp, Artificial Sequence
  Synthetic oligonucleotide
tgtggcacctcaccaaacatcaagtgatgt

SEQ ID NO: 31959 - DNA, 30 bp, Artificial Sequence
  Synthetic oligonucleotide
acggtcacttctacggtagtgctgtgatgt

SEQ ID NO: 31960 - DNA, 30 bp, Artificial Sequence
  Synthetic oligonucleotide
gccgtgactataacgataagcgagctatgt

SEQ ID NO: 31961 - DNA, 30 bp, Artificial Sequence
  Synthetic oligonucleotide
aacgaccgtaataccaaactggagtactgt

SEQ ID NO: 31962 - DNA, 30 bp, Artificial Sequence
  Synthetic oligonucleotide
cgcaatctaactatcggcggcaaatcctgt

SEQ ID NO: 31963 - DNA, 30 bp, Artificial Sequence
  Synthetic oligonucleotide
gggaggtgaccacctaatctaactcagtgt

SEQ ID NO: 31964 - DNA, 30 bp, Artificial Sequence
  Synthetic oligonucleotide
ggcaaattagatcagtactcccttcagtgt

SEQ ID NO: 31965 - DNA, 30 bp, Artificial Sequence
  Synthetic oligonucleotide
cgcagcaggagacgagggtggacaaggtgt

SEQ ID NO: 31966 - DNA, 30 bp, Artificial Sequence
  Synthetic oligonucleotide
tgagaacgaatgaataaattaggactgtgt

SEQ ID NO: 31967 - DNA, 30 bp, Artificial Sequence
  Synthetic oligonucleotide
agggcgaatcagtgcgattgtgctcattgt

SEQ ID NO: 31968 - DNA, 30 bp, Artificial Sequence
  Synthetic oligonucleotide
gcggcacgttagtgaccgataagtacaatt

SEQ ID NO: 31969 - DNA, 30 bp, Artificial Sequence
  Synthetic oligonucleotide
aggcgatgttggatgtgactagccgcaatt

SEQ ID NO: 31970 - DNA, 30 bp, Artificial Sequence
  Synthetic oligonucleotide
gacggctagaaatcgatcgggagcgcaatt

SEQ ID NO: 31971 - DNA, 30 bp, Artificial Sequence
  Synthetic oligonucleotide
gtgaagcccctgcgaacacctgacataatt

SEQ ID NO: 31972 - DNA, 30 bp, Artificial Sequence
  Synthetic oligonucleotide
gcaggatagggtaatgataaagaccacatt

SEQ ID NO: 31973 - DNA, 30 bp, Artificial Sequence
  Synthetic oligonucleotide
agtcagaggtgacgagagatggacgccatt

SEQ ID NO: 31974 - DNA, 30 bp, Artificial Sequence
  Synthetic oligonucleotide
tgccgggcagttataaagctgcaatccatt

SEQ ID NO: 31975 - DNA, 30 bp, Artificial Sequence
  Synthetic oligonucleotide
tcaaacagtagagtgctgagcgggagcatt

SEQ ID NO: 31976 - DNA, 30 bp, Artificial Sequence
  Synthetic oligonucleotide
agcgttacggatcagcgtggcgacatcatt

SEQ ID NO: 31977 - DNA, 30 bp, Artificial Sequence
  Synthetic oligonucleotide
cgatactcgggggcgggacaggtactcatt

SEQ ID NO: 31978 - DNA, 30 bp, Artificial Sequence
  Synthetic oligonucleotide
gcggcagcgctatcacaacgcaaagtcatt

SEQ ID NO: 31979 - DNA, 30 bp, Artificial Sequence
  Synthetic oligonucleotide
aacagcaacagcgactggcatcccaggatt

SEQ ID NO: 31980 - DNA, 30 bp, Artificial Sequence
  Synthetic oligonucleotide
aacgacagttacacatcgtgacaagggatt

SEQ ID NO: 31981 - DNA, 30 bp, Artificial Sequence
  Synthetic oligonucleotide
gggagacgtaatgggtgaagactttggatt

SEQ ID NO: 31982 - DNA, 30 bp, Artificial Sequence
  Synthetic oligonucleotide
ggatgactcgtgtgggaagaaagcatgatt

SEQ ID NO: 31983 - DNA, 30 bp, Artificial Sequence
  Synthetic oligonucleotide
ggcggacacaactcaacaaatgggatgatt

SEQ ID NO: 31984 - DNA, 30 bp, Artificial Sequence
  Synthetic oligonucleotide
ggtaacaaccaggagatgcggctattgatt

SEQ ID NO: 31985 - DNA, 30 bp, Artificial Sequence
  Synthetic oligonucleotide
acgagaagccgcattggacctaaggatatt

SEQ ID NO: 31986 - DNA, 30 bp, Artificial Sequence
  Synthetic oligonucleotide
atagacaaggcagggggatgagggcttatt

SEQ ID NO: 31987 - DNA, 30 bp, Artificial Sequence
  Synthetic oligonucleotide
acgggtacaagagaaacagatatttgactt

SEQ ID NO: 31988 - DNA, 30 bp, Artificial Sequence
  Synthetic oligonucleotide
gagcgggttcacgagtgtcgtcaagtactt

SEQ ID NO: 31989 - DNA, 30 bp, Artificial Sequence
  Synthetic oligonucleotide
gtcttagtaaacggacagagtgatcacctt

SEQ ID NO: 31990 - DNA, 30 bp, Artificial Sequence
  Synthetic oligonucleotide
tgcaccgaagattacacgacaattgagctt

SEQ ID NO: 31991 - DNA, 30 bp, Artificial Sequence
  Synthetic oligonucleotide
tcacggggtgaatagcacaggcaagggctt

SEQ ID NO: 31992 - DNA, 30 bp, Artificial Sequence
  Synthetic oligonucleotide
gtggcggcacaacctcaacggaacatgctt

SEQ ID NO: 31993 - DNA, 30 bp, Artificial Sequence
  Synthetic oligonucleotide
agattagacacgaaattacaatagctgctt

SEQ ID NO: 31994 - DNA, 30 bp, Artificial Sequence
  Synthetic oligonucleotide
agggacaggtcacgaagtccctgtttgctt

SEQ ID NO: 31995 - DNA, 30 bp, Artificial Sequence
  Synthetic oligonucleotide
cgggaagcgtatgaacggcacacgccagtt

SEQ ID NO: 31996 - DNA, 30 bp, Artificial Sequence
  Synthetic oligonucleotide
gtgcgaactcactgtagtgcggagcgagtt

SEQ ID NO: 31997 - DNA, 30 bp, Artificial Sequence
  Synthetic oligonucleotide
aacatgaggctaatccaagtgcggaacgtt

SEQ ID NO: 31998 - DNA, 30 bp, Artificial Sequence
  Synthetic oligonucleotide
acgggggaggatagaatagaatgcagcgtt

SEQ ID NO: 31999 - DNA, 30 bp, Artificial Sequence
  Synthetic oligonucleotide
ggcaatatcgaatcctatggcaagagcgtt

SEQ ID NO: 32000 - DNA, 30 bp, Artificial Sequence
  Synthetic oligonucleotide
gcgagctaaaaaatggaatgacaccgtgtt

SEQ ID NO: 32001 - DNA, 30 bp, Artificial Sequence
  Synthetic oligonucleotide
cgaacaaggggattcgtcctgcagggtgtt

SEQ ID NO: 32002 - DNA, 30 bp, Artificial Sequence
  Synthetic oligonucleotide
atggaaaggtcacaaatacgagatggtgtt

SEQ ID NO: 32003 - DNA, 30 bp, Artificial Sequence
  Synthetic oligonucleotide
aaacccaaggagctagggaaagatcttgtt

SEQ ID NO: 32004 - DNA, 30 bp, Artificial Sequence
  Synthetic oligonucleotide
acgaaacgatcctcggccgactataaattt

SEQ ID NO: 32005 - DNA, 30 bp, Artificial Sequence
  Synthetic oligonucleotide
tcatggaagaatgtaacttcgtgcgagttt

SEQ ID NO: 32006 - DNA, 30 bp, Artificial Sequence
  Synthetic oligonucleotide
gaggagaagcggaatgatgtgacgtggttt

SEQ ID NO: 32007 - DNA, 30 bp, Artificial Sequence
  Synthetic oligonucleotide
tacatggaccgaccacactagtagctgttt

SEQ ID NO: 32008 - DNA, 30 bp, Artificial Sequence
  Synthetic oligonucleotide
cataccctgagagagaaaagagatgtgttt

SEQ ID NO: 32009 - DNA, 30 bp, Artificial Sequence
  Synthetic oligonucleotide
cgagcctcaggagtaagggtgaaattgttt

SEQ ID NO: 32010 - DNA, 30 bp, Artificial Sequence
  Synthetic oligonucleotide
gttaagctcacagagcgtaacgcgcaaaaa

SEQ ID NO: 32011 - DNA, 30 bp, Artificial Sequence
  Synthetic oligonucleotide
gctcgcaaggtgggatgccgattgcaaaaa

SEQ ID NO: 32012 - DNA, 30 bp, Artificial Sequence
  Synthetic oligonucleotide
acgcagaaatatgaccagaggagcgaaaaa

SEQ ID NO: 32013 - DNA, 30 bp, Artificial Sequence
  Synthetic oligonucleotide
ttatgcggtagcgcgaggactgactaaaaa

SEQ ID NO: 32014 - DNA, 30 bp, Artificial Sequence
  Synthetic oligonucleotide
agagggcgtgctataacgtactcctaaaaa

SEQ ID NO: 32015 - DNA, 30 bp, Artificial Sequence
  Synthetic oligonucleotide
agagcttcacgcgaaaacgagtcttaaaaa

SEQ ID NO: 32016 - DNA, 30 bp, Artificial Sequence
  Synthetic oligonucleotide
gtcaggtggagttaagacgactagacaaaa

SEQ ID NO: 32017 - DNA, 30 bp, Artificial Sequence
  Synthetic oligonucleotide
ccgagatgaatggctaaacgcctagcaaaa

SEQ ID NO: 32018 - DNA, 30 bp, Artificial Sequence
  Synthetic oligonucleotide
caccagcggttggagaaaagtaagtcaaaa

SEQ ID NO: 32019 - DNA, 30 bp, Artificial Sequence
  Synthetic oligonucleotide
gccccagtaacaacaaatacatacagaaaa

SEQ ID NO: 32020 - DNA, 30 bp, Artificial Sequence
  Synthetic oligonucleotide
agcggtgagatccggtatcggaggagaaaa

SEQ ID NO: 32021 - DNA, 30 bp, Artificial Sequence
  Synthetic oligonucleotide
ggatagaagtcaattgaatggaggggaaaa

SEQ ID NO: 32022 - DNA, 30 bp, Artificial Sequence
  Synthetic oligonucleotide
agatggaccaatattagatcctggtgaaaa

SEQ ID NO: 32023 - DNA, 30 bp, Artificial Sequence
  Synthetic oligonucleotide
cctaaggagagggatgaaaaggcttgaaaa

SEQ ID NO: 32024 - DNA, 30 bp, Artificial Sequence
  Synthetic oligonucleotide
acggcggtaattatgtgacagggttgaaaa

SEQ ID NO: 32025 - DNA, 30 bp, Artificial Sequence
  Synthetic oligonucleotide
tcctggtgcgcgagaacctgattaaacaaa

SEQ ID NO: 32026 - DNA, 30 bp, Artificial Sequence
  Synthetic oligonucleotide
taggaaagcacataaagagaacgcgacaaa

SEQ ID NO: 32027 - DNA, 30 bp, Artificial Sequence
  Synthetic oligonucleotide
atcgaatggatggaactaaacctctacaaa

SEQ ID NO: 32028 - DNA, 30 bp, Artificial Sequence
  Synthetic oligonucleotide
ctggcaagaaatccacgctagtcacccaaa

SEQ ID NO: 32029 - DNA, 30 bp, Artificial Sequence
  Synthetic oligonucleotide
tggatcaaactttcacggcaaagcgccaaa

SEQ ID NO: 32030 - DNA, 30 bp, Artificial Sequence
  Synthetic oligonucleotide
aatccacaggaaagcgtggtcaagtccaaa

SEQ ID NO: 32031 - DNA, 30 bp, Artificial Sequence
  Synthetic oligonucleotide
tcgagattccgcctagtacgggtaagcaaa

SEQ ID NO: 32032 - DNA, 30 bp, Artificial Sequence
  Synthetic oligonucleotide
aagaggctacacatcacaatatccctcaaa

SEQ ID NO: 32033 - DNA, 30 bp, Artificial Sequence
  Synthetic oligonucleotide
gcgcgacttcgagatagatacccaaagaaa

SEQ ID NO: 32034 - DNA, 30 bp, Artificial Sequence
  Synthetic oligonucleotide
cggataactggcgtacgaggatcaaagaaa

SEQ ID NO: 32035 - DNA, 30 bp, Artificial Sequence
  Synthetic oligonucleotide
caaccgtgccaacaatcatccgtaaagaaa

SEQ ID NO: 32036 - DNA, 30 bp, Artificial Sequence
  Synthetic oligonucleotide
cgagcgttacctgggggataggggacgaaa

SEQ ID NO: 32037 - DNA, 30 bp, Artificial Sequence
  Synthetic oligonucleotide
tgaagtgaaggaacaactgaagattcgaaa

SEQ ID NO: 32038 - DNA, 30 bp, Artificial Sequence
  Synthetic oligonucleotide
gcgtagtctacggcgtattgggatcggaaa

SEQ ID NO: 32039 - DNA, 30 bp, Artificial Sequence
  Synthetic oligonucleotide
cactccaaaccaacgactagctatcggaaa

SEQ ID NO: 32040 - DNA, 30 bp, Artificial Sequence
  Synthetic oligonucleotide
acgacgttacgtgcgagcacaccaatgaaa

SEQ ID NO: 32041 - DNA, 30 bp, Artificial Sequence
  Synthetic oligonucleotide
agagagtgagtgggtggcctcttcaataaa

SEQ ID NO: 32042 - DNA, 30 bp, Artificial Sequence
  Synthetic oligonucleotide
gcggccaacagtcaacaacggctccataaa

SEQ ID NO: 32043 - DNA, 30 bp, Artificial Sequence
  Synthetic oligonucleotide
acgagagcgccttctaacactgtgactaaa

SEQ ID NO: 32044 - DNA, 30 bp, Artificial Sequence
  Synthetic oligonucleotide
accatagggacatgcatcggagaagctaaa

SEQ ID NO: 32045 - DNA, 30 bp, Artificial Sequence
  Synthetic oligonucleotide
ccgtctgcgaccggacaaaaatgcagtaaa

SEQ ID NO: 32046 - DNA, 30 bp, Artificial Sequence
  Synthetic oligonucleotide
agtgagtaagcatgtgtacccgtcagtaaa

SEQ ID NO: 32047 - DNA, 30 bp, Artificial Sequence
  Synthetic oligonucleotide
aaagggattagctgatcaagcgagcgtaaa

SEQ ID NO: 32048 - DNA, 30 bp, Artificial Sequence
  Synthetic oligonucleotide
tgcgaccccgaccttagggatgagtgtaaa

SEQ ID NO: 32049 - DNA, 30 bp, Artificial Sequence
  Synthetic oligonucleotide
caacgtgacgagggatgttatgagattaaa

SEQ ID NO: 32050 - DNA, 30 bp, Artificial Sequence
  Synthetic oligonucleotide
cctgacccatagacaacaggcgccaaacaa

SEQ ID NO: 32051 - DNA, 30 bp, Artificial Sequence
  Synthetic oligonucleotide
acaacgttcttataaaaacgacagcaacaa

SEQ ID NO: 32052 - DNA, 30 bp, Artificial Sequence
  Synthetic oligonucleotide
atgataacacggatacgctagtcgcaacaa

SEQ ID NO: 32053 - DNA, 30 bp, Artificial Sequence
  Synthetic oligonucleotide
agcgtgactcatagcatacaagtgacacaa

SEQ ID NO: 32054 - DNA, 30 bp, Artificial Sequence
  Synthetic oligonucleotide
atcttgcacgtccacaacgaatcagcacaa

SEQ ID NO: 32055 - DNA, 30 bp, Artificial Sequence
  Synthetic oligonucleotide
cctcaatccaggttcatgactgtgagacaa

SEQ ID NO: 32056 - DNA, 30 bp, Artificial Sequence
  Synthetic oligonucleotide
tgcatgcgtcaaataaactgtagcggacaa

SEQ ID NO: 32057 - DNA, 30 bp, Artificial Sequence
  Synthetic oligonucleotide
tcgatccgactaggaacgagatcagtacaa

SEQ ID NO: 32058 - DNA, 30 bp, Artificial Sequence
  Synthetic oligonucleotide
cacggaggccacctgaataactcaccccaa

SEQ ID NO: 32059 - DNA, 30 bp, Artificial Sequence
  Synthetic oligonucleotide
tctggaacaagaaaagggtgcggtggccaa

SEQ ID NO: 32060 - DNA, 30 bp, Artificial Sequence
  Synthetic oligonucleotide
cggcagtaaaggggcccgacaacatgccaa

SEQ ID NO: 32061 - DNA, 30 bp, Artificial Sequence
  Synthetic oligonucleotide
ccgggaagaatggcgcctacgccctgccaa

SEQ ID NO: 32062 - DNA, 30 bp, Artificial Sequence
  Synthetic oligonucleotide
acaaaaatttagatataagatacgatccaa

SEQ ID NO: 32063 - DNA, 30 bp, Artificial Sequence
  Synthetic oligonucleotide
tgcagaagatggaccaggtatgaactccaa

SEQ ID NO: 32064 - DNA, 30 bp, Artificial Sequence
  Synthetic oligonucleotide
tgcataaagaacgaattgaagactctccaa

SEQ ID NO: 32065 - DNA, 30 bp, Artificial Sequence
  Synthetic oligonucleotide
aagggtgcgactactgcggaagatttccaa

SEQ ID NO: 32066 - DNA, 30 bp, Artificial Sequence
  Synthetic oligonucleotide
cagagtagcctaatggcacgcaaaaagcaa

SEQ ID NO: 32067 - DNA, 30 bp, Artificial Sequence
  Synthetic oligonucleotide
gcatgatctggaaacaaccgaagaaagcaa

SEQ ID NO: 32068 - DNA, 30 bp, Artificial Sequence
  Synthetic oligonucleotide
cagttagataaaggcgcggggatgaggcaa

SEQ ID NO: 32069 - DNA, 30 bp, Artificial Sequence
  Synthetic oligonucleotide
cgaggggcgaagaatccgcagtgacatcaa

SEQ ID NO: 32070 - DNA, 30 bp, Artificial Sequence
  Synthetic oligonucleotide
gggccaggaagctatttagggcactatcaa

SEQ ID NO: 32071 - DNA, 30 bp, Artificial Sequence
  Synthetic oligonucleotide
ggccaagtgagggcgattattctagctcaa

SEQ ID NO: 32072 - DNA, 30 bp, Artificial Sequence
  Synthetic oligonucleotide
agacatggaaatgtgtgaagattacgtcaa

SEQ ID NO: 32073 - DNA, 30 bp, Artificial Sequence
  Synthetic oligonucleotide
aggaaattaagggtggcatcaattggtcaa

SEQ ID NO: 32074 - DNA, 30 bp, Artificial Sequence
  Synthetic oligonucleotide
ggactggtaaagtgctaagaggtatgtcaa

SEQ ID NO: 32075 - DNA, 30 bp, Artificial Sequence
  Synthetic oligonucleotide
caaggataacatcgattcacctagtgtcaa

SEQ ID NO: 32076 - DNA, 30 bp, Artificial Sequence
  Synthetic oligonucleotide
ttaggcgcggaggcaaagtccttaaaagaa

SEQ ID NO: 32077 - DNA, 30 bp, Artificial Sequence
  Synthetic oligonucleotide
ctcactaaaggggcatttcaacgcaaagaa

SEQ ID NO: 32078 - DNA, 30 bp, Artificial Sequence
  Synthetic oligonucleotide
cctcaataagttgagggtatgtaggaagaa

SEQ ID NO: 32079 - DNA, 30 bp, Artificial Sequence
  Synthetic oligonucleotide
cgcgccatcaagcctatatgccatgaagaa

SEQ ID NO: 32080 - DNA, 30 bp, Artificial Sequence
  Synthetic oligonucleotide
ataaacggggaagacttaacagtctaagaa

SEQ ID NO: 32081 - DNA, 30 bp, Artificial Sequence
  Synthetic oligonucleotide
ggggaaacaaaaattatgtaagattaagaa

SEQ ID NO: 32082 - DNA, 30 bp, Artificial Sequence
  Synthetic oligonucleotide
gcatgttccatatcgtgaaactaaacagaa

SEQ ID NO: 32083 - DNA, 30 bp, Artificial Sequence
  Synthetic oligonucleotide
gaccgatggcacccgggatacagtacagaa

SEQ ID NO: 32084 - DNA, 30 bp, Artificial Sequence
  Synthetic oligonucleotide
tcgtggtttgcatagcgttccacaccagaa

SEQ ID NO: 32085 - DNA, 30 bp, Artificial Sequence
  Synthetic oligonucleotide
agccgagcttctaacccgagtatgtcagaa

SEQ ID NO: 32086 - DNA, 30 bp, Artificial Sequence
  Synthetic oligonucleotide
cctcacatgtcacaatcacaaacacgagaa

SEQ ID NO: 32087 - DNA, 30 bp, Artificial Sequence
  Synthetic oligonucleotide
aggttggaagttagatacggttttcgagaa

SEQ ID NO: 32088 - DNA, 30 bp, Artificial Sequence
  Synthetic oligonucleotide
cctagctacgcggggataacgtcgggagaa

SEQ ID NO: 32089 - DNA, 30 bp, Artificial Sequence
  Synthetic oligonucleotide
tacaatccagacgtttcgccgaaatgagaa

SEQ ID NO: 32090 - DNA, 30 bp, Artificial Sequence
  Synthetic oligonucleotide
cggtaacacatgctacgctccgtaatagaa

SEQ ID NO: 32091 - DNA, 30 bp, Artificial Sequence
  Synthetic oligonucleotide
gtggcagtcatccgggcgaatgggctagaa

SEQ ID NO: 32092 - DNA, 30 bp, Artificial Sequence
  Synthetic oligonucleotide
gggaaataaagtgaacgacattaattagaa

SEQ ID NO: 32093 - DNA, 30 bp, Artificial Sequence
  Synthetic oligonucleotide
gcgcactcgagaccaaagtcaggggacgaa

SEQ ID NO: 32094 - DNA, 30 bp, Artificial Sequence
  Synthetic oligonucleotide
acaagaaccgtaggtaataacgaatacgaa

SEQ ID NO: 32095 - DNA, 30 bp, Artificial Sequence
  Synthetic oligonucleotide
gaagagcgtactccatgtaaatctaccgaa

SEQ ID NO: 32096 - DNA, 30 bp, Artificial Sequence
  Synthetic oligonucleotide
gatgtagacctcgtgtgtgactgcgccgaa

SEQ ID NO: 32097 - DNA, 30 bp, Artificial Sequence
  Synthetic oligonucleotide
gttcaacatcaaagcggaggcgtcgccgaa

SEQ ID NO: 32098 - DNA, 30 bp, Artificial Sequence
  Synthetic oligonucleotide
tgctaggagcgtaataacctaatccgcgaa

SEQ ID NO: 32099 - DNA, 30 bp, Artificial Sequence
  Synthetic oligonucleotide
cgagagcgccttggataatggaagggcgaa

SEQ ID NO: 32100 - DNA, 30 bp, Artificial Sequence
  Synthetic oligonucleotide
gacaacgagcagtccatatgcgcatgcgaa

SEQ ID NO: 32101 - DNA, 30 bp, Artificial Sequence
  Synthetic oligonucleotide
tctcgagaagtgcgttaggtaaattgcgaa

SEQ ID NO: 32102 - DNA, 30 bp, Artificial Sequence
  Synthetic oligonucleotide
ggtggtaacaacacgatattagggatcgaa

SEQ ID NO: 32103 - DNA, 30 bp, Artificial Sequence
  Synthetic oligonucleotide
agttagacctcagagctggattctctcgaa

SEQ ID NO: 32104 - DNA, 30 bp, Artificial Sequence
  Synthetic oligonucleotide
tcgaacatgcgccaacgatccacggtcgaa

SEQ ID NO: 32105 - DNA, 30 bp, Artificial Sequence
  Synthetic oligonucleotide
cgaccgagtagcactggtaagtgtgtcgaa

SEQ ID NO: 32106 - DNA, 30 bp, Artificial Sequence
  Synthetic oligonucleotide
gcggttcgggagaacatagtgtacaaggaa

SEQ ID NO: 32107 - DNA, 30 bp, Artificial Sequence
  Synthetic oligonucleotide
gaaaccccacccacgggaggaacagaggaa

SEQ ID NO: 32108 - DNA, 30 bp, Artificial Sequence
  Synthetic oligonucleotide
ggaggactgccaaaacgggaaatttaggaa

SEQ ID NO: 32109 - DNA, 30 bp, Artificial Sequence
  Synthetic oligonucleotide
ataaaacagcaaattaaagagggaccggaa

SEQ ID NO: 32110 - DNA, 30 bp, Artificial Sequence
  Synthetic oligonucleotide
tcaaagagatgtccagtgtcggctgcggaa

SEQ ID NO: 32111 - DNA, 30 bp, Artificial Sequence
  Synthetic oligonucleotide
atggtcaggggtaacatagtaggaagggaa

SEQ ID NO: 32112 - DNA, 30 bp, Artificial Sequence
  Synthetic oligonucleotide
tcgaggtgtcgctgcgggtgagacagggaa

SEQ ID NO: 32113 - DNA, 30 bp, Artificial Sequence
  Synthetic oligonucleotide
tcgtgatacgagggtttatgcaaaggggaa

SEQ ID NO: 32114 - DNA, 30 bp, Artificial Sequence
  Synthetic oligonucleotide
acaatggtgcgactataccctgcaggggaa

SEQ ID NO: 32115 - DNA, 30 bp, Artificial Sequence
  Synthetic oligonucleotide
gcctaaatgggtcactgggcgtcaggggaa

SEQ ID NO: 32116 - DNA, 30 bp, Artificial Sequence
  Synthetic oligonucleotide
ataggagcagcgcacggaatgctatgggaa

SEQ ID NO: 32117 - DNA, 30 bp, Artificial Sequence
  Synthetic oligonucleotide
cggatgaagcagggtggtccattgtgggaa

SEQ ID NO: 32118 - DNA, 30 bp, Artificial Sequence
  Synthetic oligonucleotide
acggtagtttaaatgagtaaatagatggaa

SEQ ID NO: 32119 - DNA, 30 bp, Artificial Sequence
  Synthetic oligonucleotide
cggatccgagaaccaacctactgtgtggaa

SEQ ID NO: 32120 - DNA, 30 bp, Artificial Sequence
  Synthetic oligonucleotide
agcgatggcaggatcggaaatggaaatgaa

SEQ ID NO: 32121 - DNA, 30 bp, Artificial Sequence
  Synthetic oligonucleotide
cgtaaacatgaagtgtgaatgagtcatgaa

SEQ ID NO: 32122 - DNA, 30 bp, Artificial Sequence
  Synthetic oligonucleotide
gcgccacggcaatcatcgacatcaactgaa

SEQ ID NO: 32123 - DNA, 30 bp, Artificial Sequence
  Synthetic oligonucleotide
cgaggagcctaaatcgggtccctcactgaa

SEQ ID NO: 32124 - DNA, 30 bp, Artificial Sequence
  Synthetic oligonucleotide
cgcaaggtgggcgaatccggttcgtctgaa

SEQ ID NO: 32125 - DNA, 30 bp, Artificial Sequence
  Synthetic oligonucleotide
ttatgcgaacaaggtcccaggtagcgtgaa

SEQ ID NO: 32126 - DNA, 30 bp, Artificial Sequence
  Synthetic oligonucleotide
tacatcgagtatagcgaaagcaagtgtgaa

SEQ ID NO: 32127 - DNA, 30 bp, Artificial Sequence
  Synthetic oligonucleotide
accagataagagtacctaaacgcaattgaa

SEQ ID NO: 32128 - DNA, 30 bp, Artificial Sequence
  Synthetic oligonucleotide
tggtgccgtacaacgcaagaagtccttgaa

SEQ ID NO: 32129 - DNA, 30 bp, Artificial Sequence
  Synthetic oligonucleotide
acgatgactgacaaaaaagaatctgaataa

SEQ ID NO: 32130 - DNA, 30 bp, Artificial Sequence
  Synthetic oligonucleotide
tcgagtttccgagaccatgcccctacataa

SEQ ID NO: 32131 - DNA, 30 bp, Artificial Sequence
  Synthetic oligonucleotide
aggggggacaattagcacttctatccataa

SEQ ID NO: 32132 - DNA, 30 bp, Artificial Sequence
  Synthetic oligonucleotide
gcgacagccgggccgggaggaagtccataa

SEQ ID NO: 32133 - DNA, 30 bp, Artificial Sequence
  Synthetic oligonucleotide
aaagcaaagcataacgtgtgaaacggataa

SEQ ID NO: 32134 - DNA, 30 bp, Artificial Sequence
  Synthetic oligonucleotide
gctcggcaaggattagagcacgagggataa

SEQ ID NO: 32135 - DNA, 30 bp, Artificial Sequence
  Synthetic oligonucleotide
tgacaactcggaataagaagtcacatataa

SEQ ID NO: 32136 - DNA, 30 bp, Artificial Sequence
  Synthetic oligonucleotide
tgaaagagaagttgcaccgtagaggtataa

SEQ ID NO: 32137 - DNA, 30 bp, Artificial Sequence
  Synthetic oligonucleotide
cgggaccaggggacttgatcaagcttataa

SEQ ID NO: 32138 - DNA, 30 bp, Artificial Sequence
  Synthetic oligonucleotide
tttaaccacagtaaggcgaattaacactaa

SEQ ID NO: 32139 - DNA, 30 bp, Artificial Sequence
  Synthetic oligonucleotide
cagagggtgtgcaactatagcaaaggctaa

SEQ ID NO: 32140 - DNA, 30 bp, Artificial Sequence
  Synthetic oligonucleotide
aaaaacagtaacgaagatccaacgtgctaa

SEQ ID NO: 32141 - DNA, 30 bp, Artificial Sequence
  Synthetic oligonucleotide
aggcaccggcggaggaagggaagttgctaa

SEQ ID NO: 32142 - DNA, 30 bp, Artificial Sequence
  Synthetic oligonucleotide
cagaaggctgggtccacaacgatgatctaa

SEQ ID NO: 32143 - DNA, 30 bp, Artificial Sequence
  Synthetic oligonucleotide
ggtcagaaagggggtgacaggctgttctaa

SEQ ID NO: 32144 - DNA, 30 bp, Artificial Sequence
  Synthetic oligonucleotide
tgagagaagtaggcaggaaggcttaagtaa

SEQ ID NO: 32145 - DNA, 30 bp, Artificial Sequence
  Synthetic oligonucleotide
gcatcacggggcgcgaggtccagcgagtaa

SEQ ID NO: 32146 - DNA, 30 bp, Artificial Sequence
  Synthetic oligonucleotide
cagtttgtgggcagagatgtgtgcgagtaa

SEQ ID NO: 32147 - DNA, 30 bp, Artificial Sequence
  Synthetic oligonucleotide
aaggggtaataaactagtagatatacgtaa

SEQ ID NO: 32148 - DNA, 30 bp, Artificial Sequence
  Synthetic oligonucleotide
aaggtcggcagaaatcttgccaacgcgtaa

SEQ ID NO: 32149 - DNA, 30 bp, Artificial Sequence
  Synthetic oligonucleotide
gctttagcgtaggcaggggaggtgtcgtaa

SEQ ID NO: 32150 - DNA, 30 bp, Artificial Sequence
  Synthetic oligonucleotide
acgcaagttcgacgaatcacactggggtaa

SEQ ID NO: 32151 - DNA, 30 bp, Artificial Sequence
  Synthetic oligonucleotide
cggagacagatgcaaaacttctgcctgtaa

SEQ ID NO: 32152 - DNA, 30 bp, Artificial Sequence
  Synthetic oligonucleotide
aggacacagacgtataaaccagcacattaa

SEQ ID NO: 32153 - DNA, 30 bp, Artificial Sequence
  Synthetic oligonucleotide
aaagaccaataaggatcctataccgattaa

SEQ ID NO: 32154 - DNA, 30 bp, Artificial Sequence
  Synthetic oligonucleotide
aaggtaaaacctaattccgagccagcttaa

SEQ ID NO: 32155 - DNA, 30 bp, Artificial Sequence
  Synthetic oligonucleotide
acatgtcgacaccaagcatggataagttaa

SEQ ID NO: 32156 - DNA, 30 bp, Artificial Sequence
  Synthetic oligonucleotide
cgtcatatgaaccggtgaaaagccagttaa

SEQ ID NO: 32157 - DNA, 30 bp, Artificial Sequence
  Synthetic oligonucleotide
cgacgaggcgttataaggggacagcgttaa

SEQ ID NO: 32158 - DNA, 30 bp, Artificial Sequence
  Synthetic oligonucleotide
cgagggaacactatacctctgtacggttaa

SEQ ID NO: 32159 - DNA, 30 bp, Artificial Sequence
  Synthetic oligonucleotide
tgaatgcatagggcgtgcggagagggttaa

SEQ ID NO: 32160 - DNA, 30 bp, Artificial Sequence
  Synthetic oligonucleotide
cacaccttgacaagagaacaatagctttaa

SEQ ID NO: 32161 - DNA, 30 bp, Artificial Sequence
  Synthetic oligonucleotide
gtggactgcacagcgggtaacggcaaaaca

SEQ ID NO: 32162 - DNA, 30 bp, Artificial Sequence
  Synthetic oligonucleotide
gggacacccaacagctgaaataggcaaaca

SEQ ID NO: 32163 - DNA, 30 bp, Artificial Sequence
  Synthetic oligonucleotide
atgtaagacaggacattgactgaagaaaca

SEQ ID NO: 32164 - DNA, 30 bp, Artificial Sequence
  Synthetic oligonucleotide
agggcgagaaggacaagctatccagaaaca

SEQ ID NO: 32165 - DNA, 30 bp, Artificial Sequence
  Synthetic oligonucleotide
agcggctataaaagctcggtggcggaaaca

SEQ ID NO: 32166 - DNA, 30 bp, Artificial Sequence
  Synthetic oligonucleotide
gggctcctcgtggagcagaaacaataaaca

SEQ ID NO: 32167 - DNA, 30 bp, Artificial Sequence
  Synthetic oligonucleotide
tttagataacgagtagagggggttccaaca

SEQ ID NO: 32168 - DNA, 30 bp, Artificial Sequence
  Synthetic oligonucleotide
ggtaatgaggtccaagggctacattcaaca

SEQ ID NO: 32169 - DNA, 30 bp, Artificial Sequence
  Synthetic oligonucleotide
cgtcgcaacgcccaatcttaaatcagaaca

SEQ ID NO: 32170 - DNA, 30 bp, Artificial Sequence
  Synthetic oligonucleotide
catggcggaagtagttgttagagccgaaca

SEQ ID NO: 32171 - DNA, 30 bp, Artificial Sequence
  Synthetic oligonucleotide
gcgcaaaggtgtagccataaaaactgaaca

SEQ ID NO: 32172 - DNA, 30 bp, Artificial Sequence
  Synthetic oligonucleotide
cataagggcacgcgcgatatgtccataaca

SEQ ID NO: 32173 - DNA, 30 bp, Artificial Sequence
  Synthetic oligonucleotide
ttacaaagagaggtttcaaagcacttaaca

SEQ ID NO: 32174 - DNA, 30 bp, Artificial Sequence
  Synthetic oligonucleotide
gagcactgtttgtagggaaagggacacaca

SEQ ID NO: 32175 - DNA, 30 bp, Artificial Sequence
  Synthetic oligonucleotide
gacgagagcaatggctgcctgaactacaca

SEQ ID NO: 32176 - DNA, 30 bp, Artificial Sequence
  Synthetic oligonucleotide
gcgggccaacgagcaacgcataggtacaca

SEQ ID NO: 32177 - DNA, 30 bp, Artificial Sequence
  Synthetic oligonucleotide
tggtggagtcctcattgtgatagagccaca

SEQ ID NO: 32178 - DNA, 30 bp, Artificial Sequence
  Synthetic oligonucleotide
tggggactacactagagataacgagccaca

SEQ ID NO: 32179 - DNA, 30 bp, Artificial Sequence
  Synthetic oligonucleotide
tggaggacggtgatggcccgacatcgcaca

SEQ ID NO: 32180 - DNA, 30 bp, Artificial Sequence
  Synthetic oligonucleotide
taatgtcaacagaatgcggacccactcaca

SEQ ID NO: 32181 - DNA, 30 bp, Artificial Sequence
  Synthetic oligonucleotide
caagtgaaaagtgctaccttgatcaagaca

SEQ ID NO: 32182 - DNA, 30 bp, Artificial Sequence
  Synthetic oligonucleotide
cacatctggtacaacttagagatcgagaca

SEQ ID NO: 32183 - DNA, 30 bp, Artificial Sequence
  Synthetic oligonucleotide
acgaccacgaattacttagtaccgtagaca

SEQ ID NO: 32184 - DNA, 30 bp, Artificial Sequence
  Synthetic oligonucleotide
agtctgtgaaagaggccactcccagcgaca

SEQ ID NO: 32185 - DNA, 30 bp, Artificial Sequence
  Synthetic oligonucleotide
acagcgagaactcgcggattccgagcgaca

SEQ ID NO: 32186 - DNA, 30 bp, Artificial Sequence
  Synthetic oligonucleotide
gattgggtagggccaagaaactgctcgaca

SEQ ID NO: 32187 - DNA, 30 bp, Artificial Sequence
  Synthetic oligonucleotide
gcgagtgcaacgattgaactcaagtcgaca

SEQ ID NO: 32188 - DNA, 30 bp, Artificial Sequence
  Synthetic oligonucleotide
tcgaaaggcggagtagtaaacgctcggaca

SEQ ID NO: 32189 - DNA, 30 bp, Artificial Sequence
  Synthetic oligonucleotide
gtggcaatcatgactacaaacgccgggaca

SEQ ID NO: 32190 - DNA, 30 bp, Artificial Sequence
  Synthetic oligonucleotide
gcttacgaatcaagtgaatggaaagtgaca

SEQ ID NO: 32191 - DNA, 30 bp, Artificial Sequence
  Synthetic oligonucleotide
gaatcacaacactagagtggtcgattgaca

SEQ ID NO: 32192 - DNA, 30 bp, Artificial Sequence
  Synthetic oligonucleotide
ccctgggacgggtccaggtcaccgaataca

SEQ ID NO: 32193 - DNA, 30 bp, Artificial Sequence
  Synthetic oligonucleotide
catggccggtagcgaattctgaagcataca

SEQ ID NO: 32194 - DNA, 30 bp, Artificial Sequence
  Synthetic oligonucleotide
ccacggacgcaccccagcagcacgactaca

SEQ ID NO: 32195 - DNA, 30 bp, Artificial Sequence
  Synthetic oligonucleotide
tccatacactaaaacgggtgggtacctaca

SEQ ID NO: 32196 - DNA, 30 bp, Artificial Sequence
  Synthetic oligonucleotide
agacaccggtataattatgagcggcctaca

SEQ ID NO: 32197 - DNA, 31 bp, Artificial Sequence
  Synthetic oligonucleotide
tgcaccgaccaattgaagtgaggccagtaca

SEQ ID NO: 32198 - DNA, 30 bp, Artificial Sequence
  Synthetic oligonucleotide
taacgatggaaaatcacacccaggggtaca

SEQ ID NO: 32199 - DNA, 30 bp, Artificial Sequence
  Synthetic oligonucleotide
tgcataggtgagctgcaaattatctgtaca

SEQ ID NO: 32200 - DNA, 30 bp, Artificial Sequence
  Synthetic oligonucleotide
gggggcactaaaaaaattcaaacttgtaca

SEQ ID NO: 32201 - DNA, 30 bp, Artificial Sequence
  Synthetic oligonucleotide
cggatcgtagcctaacaaggaaccattaca

SEQ ID NO: 32202 - DNA, 30 bp, Artificial Sequence
  Synthetic oligonucleotide
acgccgttgaatccccgagtgagtaaacca

SEQ ID NO: 32203 - DNA, 30 bp, Artificial Sequence
  Synthetic oligonucleotide
cgcattaatatggagagtacgcaccaacca

SEQ ID NO: 32204 - DNA, 30 bp, Artificial Sequence
  Synthetic oligonucleotide
catcacagtgactaagctacctgtgcacca

SEQ ID NO: 32205 - DNA, 30 bp, Artificial Sequence
  Synthetic oligonucleotide
agagagataaacggtacttgtaatagacca

SEQ ID NO: 32206 - DNA, 30 bp, Artificial Sequence
  Synthetic oligonucleotide
gcctaggtgtgcgggtaaaatgaacgacca

SEQ ID NO: 32207 - DNA, 30 bp, Artificial Sequence
  Synthetic oligonucleotide
acgagggcctcggatacgaattacatacca

SEQ ID NO: 32208 - DNA, 30 bp, Artificial Sequence
  Synthetic oligonucleotide
acgcttaaacggaagacaacataggtacca

SEQ ID NO: 32209 - DNA, 30 bp, Artificial Sequence
  Synthetic oligonucleotide
ccgatgcgaaaaacacgcgccaccttacca

SEQ ID NO: 32210 - DNA, 30 bp, Artificial Sequence
  Synthetic oligonucleotide
ttaagtccagacgagaccgccaccaaccca

SEQ ID NO: 32211 - DNA, 30 bp, Artificial Sequence
  Synthetic oligonucleotide
ggatgtccaatacccaagaatctgaaccca

SEQ ID NO: 32212 - DNA, 30 bp, Artificial Sequence
  Synthetic oligonucleotide
cgccaaacaaagtgccgttcaccgcgccca

SEQ ID NO: 32213 - DNA, 30 bp, Artificial Sequence
  Synthetic oligonucleotide
cttcgaaggcagtgaaccagcgatttccca

SEQ ID NO: 32214 - DNA, 30 bp, Artificial Sequence
  Synthetic oligonucleotide
atcgtagaagatccggtctagagccagcca

SEQ ID NO: 32215 - DNA, 30 bp, Artificial Sequence
  Synthetic oligonucleotide
ggaactcaagtgcgctgagaagaggcgcca

SEQ ID NO: 32216 - DNA, 30 bp, Artificial Sequence
  Synthetic oligonucleotide
acaatcgatgtctaccagagggagtcgcca

SEQ ID NO: 32217 - DNA, 30 bp, Artificial Sequence
  Synthetic oligonucleotide
gggggaaaaacaggacatcgaaccgtgcca

SEQ ID NO: 32218 - DNA, 30 bp, Artificial Sequence
  Synthetic oligonucleotide
cagaccgagatagggcgggctggtgtgcca

SEQ ID NO: 32219 - DNA, 30 bp, Artificial Sequence
  Synthetic oligonucleotide
taggaatgatgagttaggaatctgttgcca

SEQ ID NO: 32220 - DNA, 28 bp, Artificial Sequence
  Synthetic oligonucleotide
cgaagaaacaagcactacagcacatcca

SEQ ID NO: 32221 - DNA, 30 bp, Artificial Sequence
  Synthetic oligonucleotide
atgctaactgggggccgatcacaggatcca

SEQ ID NO: 32222 - DNA, 30 bp, Artificial Sequence
  Synthetic oligonucleotide
gcgacctaaacccaccgactgcccactcca

SEQ ID NO: 32223 - DNA, 30 bp, Artificial Sequence
  Synthetic oligonucleotide
cggcgaccctaaatcaaggtcggcactcca

SEQ ID NO: 32224 - DNA, 30 bp, Artificial Sequence
  Synthetic oligonucleotide
cctaaggtacaacccgatgttctcactcca

SEQ ID NO: 32225 - DNA, 30 bp, Artificial Sequence
  Synthetic oligonucleotide
gcgggaaattgctgcctgaaacacagtcca

SEQ ID NO: 32226 - DNA, 30 bp, Artificial Sequence
  Synthetic oligonucleotide
taagacggcaattgaaggcacaatggtcca

SEQ ID NO: 32227 - DNA, 30 bp, Artificial Sequence
  Synthetic oligonucleotide
ccgcaacatctactacgatcaacctgtcca

SEQ ID NO: 32228 - DNA, 30 bp, Artificial Sequence
  Synthetic oligonucleotide
acaccgtacagggggcacggaaggtgtcca

SEQ ID NO: 32229 - DNA, 30 bp, Artificial Sequence
  Synthetic oligonucleotide
gcgaggcaattcttgaaagaaccggttcca

SEQ ID NO: 32230 - DNA, 30 bp, Artificial Sequence
  Synthetic oligonucleotide
cgtaatgagatgggcgggagaagatttcca

SEQ ID NO: 32231 - DNA, 30 bp, Artificial Sequence
  Synthetic oligonucleotide
atggatcagacattgtaacctgaccaagca

SEQ ID NO: 32232 - DNA, 30 bp, Artificial Sequence
  Synthetic oligonucleotide
gcttgagtaggagtcgaagcagggcaagca

SEQ ID NO: 32233 - DNA, 30 bp, Artificial Sequence
  Synthetic oligonucleotide
ccgcgaacatggtaagcccgacatcaagca

SEQ ID NO: 32234 - DNA, 30 bp, Artificial Sequence
  Synthetic oligonucleotide
agatagtagagtgagtcctatccagaagca

SEQ ID NO: 32235 - DNA, 30 bp, Artificial Sequence
  Synthetic oligonucleotide
taagctgataaagaggggtaaggagaagca

SEQ ID NO: 32236 - DNA, 30 bp, Artificial Sequence
  Synthetic oligonucleotide
tgcagaatcggatgcggaaacagctaagca

SEQ ID NO: 32237 - DNA, 30 bp, Artificial Sequence
  Synthetic oligonucleotide
gaacccgaggggacgtgaagtgacagagca

SEQ ID NO: 32238 - DNA, 30 bp, Artificial Sequence
  Synthetic oligonucleotide
aggggaccccgagcgcggtgtcctagagca

SEQ ID NO: 32239 - DNA, 30 bp, Artificial Sequence
  Synthetic oligonucleotide
acaatgaggagtggcaaagcgcttagagca

SEQ ID NO: 32240 - DNA, 30 bp, Artificial Sequence
  Synthetic oligonucleotide
acgaaatagtatttactgattgtccgagca

SEQ ID NO: 32241 - DNA, 30 bp, Artificial Sequence
  Synthetic oligonucleotide
cactgccaagcgtggttaggccggcgagca

SEQ ID NO: 32242 - DNA, 30 bp, Artificial Sequence
  Synthetic oligonucleotide
gctcgtcaccattgtagagtcaatcgagca

SEQ ID NO: 32243 - DNA, 30 bp, Artificial Sequence
  Synthetic oligonucleotide
cggagatttttaaggctagaggaatgagca

SEQ ID NO: 32244 - DNA, 30 bp, Artificial Sequence
  Synthetic oligonucleotide
cgatgtcgatgtaacctaaaatgctgagca

SEQ ID NO: 32245 - DNA, 30 bp, Artificial Sequence
  Synthetic oligonucleotide
tgggagcgaccgcataaatcaagttgagca

SEQ ID NO: 32246 - DNA, 30 bp, Artificial Sequence
  Synthetic oligonucleotide
agacaaggatcgtgagctcgaaacgtagca

SEQ ID NO: 32247 - DNA, 30 bp, Artificial Sequence
  Synthetic oligonucleotide
ggcatccagagcagaatcacactacccgca

SEQ ID NO: 32248 - DNA, 30 bp, Artificial Sequence
  Synthetic oligonucleotide
atgcgttaaaacgagaattggaattccgca

SEQ ID NO: 32249 - DNA, 30 bp, Artificial Sequence
  Synthetic oligonucleotide
ggctgacgggccttgtagactgtgtgcgca

SEQ ID NO: 32250 - DNA, 30 bp, Artificial Sequence
  Synthetic oligonucleotide
ctacttgaaccatccgaagaacggatcgca

SEQ ID NO: 32251 - DNA, 30 bp, Artificial Sequence
  Synthetic oligonucleotide
agatggacatggctcgtagtggtcttcgca

SEQ ID NO: 32252 - DNA, 30 bp, Artificial Sequence
  Synthetic oligonucleotide
cgaaacaaaaccgttcgccgtcgagaggca

SEQ ID NO: 32253 - DNA, 30 bp, Artificial Sequence
  Synthetic oligonucleotide
cgacggatgaacttgcaacaggtctcggca

SEQ ID NO: 32254 - DNA, 30 bp, Artificial Sequence
  Synthetic oligonucleotide
cgacggtggtgagtatattgtcaccgggca

SEQ ID NO: 32255 - DNA, 30 bp, Artificial Sequence
  Synthetic oligonucleotide
caggatattagcctgaaaacttggactgca

SEQ ID NO: 32256 - DNA, 30 bp, Artificial Sequence
  Synthetic oligonucleotide
cgtgcggtacaccctaaataccgacctgca

SEQ ID NO: 32257 - DNA, 30 bp, Artificial Sequence
  Synthetic oligonucleotide
gagatcgggtgcaacttcagaagagctgca

SEQ ID NO: 32258 - DNA, 30 bp, Artificial Sequence
  Synthetic oligonucleotide
aggccgattaaagggggcacacggggtgca

SEQ ID NO: 32259 - DNA, 30 bp, Artificial Sequence
  Synthetic oligonucleotide
ggcagattggaggaatggcgtgaagaatca

SEQ ID NO: 32260 - DNA, 29 bp, Artificial Sequence
  Synthetic oligonucleotide
aatcggtaccaaaaggcacaagaacatca

SEQ ID NO: 32261 - DNA, 30 bp, Artificial Sequence
  Synthetic oligonucleotide
cgtcatagccggtacctcaagtaatcatca

SEQ ID NO: 32262 - DNA, 30 bp, Artificial Sequence
  Synthetic oligonucleotide
aggaggactcccacatgtacacgttcatca

SEQ ID NO: 32263 - DNA, 30 bp, Artificial Sequence
  Synthetic oligonucleotide
cataacaaatcaggccactcaatccgatca

SEQ ID NO: 32264 - DNA, 30 bp, Artificial Sequence
  Synthetic oligonucleotide
tcatcccggaaaaggaaacatggactatca

SEQ ID NO: 32265 - DNA, 30 bp, Artificial Sequence
  Synthetic oligonucleotide
ccacaatccccaggggggacaagcgtatca

SEQ ID NO: 32266 - DNA, 31 bp, Artificial Sequence
  Synthetic oligonucleotide
atatcatctggagcaacaaaaaggcgtatca

SEQ ID NO: 32267 - DNA, 30 bp, Artificial Sequence
  Synthetic oligonucleotide
cgtaggtggccgattcaaagcaataactca

SEQ ID NO: 32268 - DNA, 30 bp, Artificial Sequence
  Synthetic oligonucleotide
gataggcaacgaaatgagagaggagactca

SEQ ID NO: 32269 - DNA, 30 bp, Artificial Sequence
  Synthetic oligonucleotide
gcggggccagtgcgggtacgatattcctca

SEQ ID NO: 32270 - DNA, 30 bp, Artificial Sequence
  Synthetic oligonucleotide
taagaaggtcacccgaacaacgagagctca

SEQ ID NO: 32271 - DNA, 29 bp, Artificial Sequence
  Synthetic oligonucleotide
aagggggctgcgtaatgatggttcgctca

SEQ ID NO: 32272 - DNA, 30 bp, Artificial Sequence
  Synthetic oligonucleotide
agcgaaggcatgtacagttgcgcgtgctca

SEQ ID NO: 32273 - DNA, 30 bp, Artificial Sequence
  Synthetic oligonucleotide
cacggaagatataagagggtccgcatctca

SEQ ID NO: 32274 - DNA, 30 bp, Artificial Sequence
  Synthetic oligonucleotide
ccaccgtgaatacatcaggaaagactctca

SEQ ID NO: 32275 - DNA, 30 bp, Artificial Sequence
  Synthetic oligonucleotide
agaacaggacgggcaatgcttagacagtca

SEQ ID NO: 32276 - DNA, 30 bp, Artificial Sequence
  Synthetic oligonucleotide
gatcgtaaagtcgagtatagtgaccagtca

SEQ ID NO: 32277 - DNA, 30 bp, Artificial Sequence
  Synthetic oligonucleotide
ccgctggccacaaaaacaacaccggagtca

SEQ ID NO: 32278 - DNA, 30 bp, Artificial Sequence
  Synthetic oligonucleotide
cggagggtgcgaacactgaggtatacgtca

SEQ ID NO: 32279 - DNA, 30 bp, Artificial Sequence
  Synthetic oligonucleotide
gggagtgggcgacatagaaaggttacgtca

SEQ ID NO: 32280 - DNA, 30 bp, Artificial Sequence
  Synthetic oligonucleotide
agcgtcaggggaactccttatgtagcgtca

SEQ ID NO: 32281 - DNA, 30 bp, Artificial Sequence
  Synthetic oligonucleotide
atgcaaaataaacggaaagccaactcgtca

SEQ ID NO: 32282 - DNA, 30 bp, Artificial Sequence
  Synthetic oligonucleotide
tatggatactagggcccatcgaagcggtca

SEQ ID NO: 32283 - DNA, 30 bp, Artificial Sequence
  Synthetic oligonucleotide
cgaaaagttaaggtctgcatcaactggtca

SEQ ID NO: 32284 - DNA, 30 bp, Artificial Sequence
  Synthetic oligonucleotide
ccaacctatcaacaagagaatatcatgtca

SEQ ID NO: 32285 - DNA, 30 bp, Artificial Sequence
  Synthetic oligonucleotide
ggcgagagtgttgtaatagtttagcattca

SEQ ID NO: 32286 - DNA, 30 bp, Artificial Sequence
  Synthetic oligonucleotide
cgggtcactgaatcctaggcaatgtcttca

SEQ ID NO: 32287 - DNA, 30 bp, Artificial Sequence
  Synthetic oligonucleotide
tactgggggaaacggcagagagaggtttca

SEQ ID NO: 32288 - DNA, 30 bp, Artificial Sequence
  Synthetic oligonucleotide
ctatcgaaagtcggtccggggttcaaaaga

SEQ ID NO: 32289 - DNA, 30 bp, Artificial Sequence
  Synthetic oligonucleotide
gcaccggaagactacggacgtatagaaaga

SEQ ID NO: 32290 - DNA, 30 bp, Artificial Sequence
  Synthetic oligonucleotide
acggatggggatatgacacatcttgaaaga

SEQ ID NO: 32291 - DNA, 29 bp, Artificial Sequence
  Synthetic oligonucleotide
ggatcgggacaagcattgcgtcgtaaaga

SEQ ID NO: 32292 - DNA, 30 bp, Artificial Sequence
  Synthetic oligonucleotide
acgtagagtcaacgtatggttcgcacaaga

SEQ ID NO: 32293 - DNA, 31 bp, Artificial Sequence
  Synthetic oligonucleotide
aacggtagaaagtgcatctccaaatccaaga

SEQ ID NO: 32294 - DNA, 30 bp, Artificial Sequence
  Synthetic oligonucleotide
taccatacaaacggaattaccaactcaaga

SEQ ID NO: 32295 - DNA, 30 bp, Artificial Sequence
  Synthetic oligonucleotide
tcgggataggtgtcaatcgcataccgaaga

SEQ ID NO: 32296 - DNA, 30 bp, Artificial Sequence
  Synthetic oligonucleotide
aggttgaaccaagcattatgggccggaaga

SEQ ID NO: 32297 - DNA, 30 bp, Artificial Sequence
  Synthetic oligonucleotide
aacgaaacagctgtgaatctaatcggaaga

SEQ ID NO: 32298 - DNA, 30 bp, Artificial Sequence
  Synthetic oligonucleotide
gtgattaaatgggtcgtgggggatggaaga

SEQ ID NO: 32299 - DNA, 30 bp, Artificial Sequence
  Synthetic oligonucleotide
cggtcatacagtagcatcgaaagtggaaga

SEQ ID NO: 32300 - DNA, 30 bp, Artificial Sequence
  Synthetic oligonucleotide
tgagggaacgaaaatctagatattggaaga

SEQ ID NO: 32301 - DNA, 30 bp, Artificial Sequence
  Synthetic oligonucleotide
agcagttgaatcaatcaattgccaataaga

SEQ ID NO: 32302 - DNA, 30 bp, Artificial Sequence
  Synthetic oligonucleotide
cggagatttaggcagggtctgacactaaga

SEQ ID NO: 32303 - DNA, 30 bp, Artificial Sequence
  Synthetic oligonucleotide
ctaaacacggtacatacggccgtcttaaga

SEQ ID NO: 32304 - DNA, 30 bp, Artificial Sequence
  Synthetic oligonucleotide
cagatgacatgtgaaagtatcgagttaaga

SEQ ID NO: 32305 - DNA, 30 bp, Artificial Sequence
  Synthetic oligonucleotide
tcggcaaattgtggatggacacaaaacaga

SEQ ID NO: 32306 - DNA, 30 bp, Artificial Sequence
  Synthetic oligonucleotide
cgcttacgaggtgcagagtttgaaaacaga

SEQ ID NO: 32307 - DNA, 30 bp, Artificial Sequence
  Synthetic oligonucleotide
tccgacgtcacgtttaaaccgccccacaga

SEQ ID NO: 32308 - DNA, 30 bp, Artificial Sequence
  Synthetic oligonucleotide
cgtttcaaaaatttggtgcgcggtcacaga

SEQ ID NO: 32309 - DNA, 30 bp, Artificial Sequence
  Synthetic oligonucleotide
aagtgctccattgtagacacacaggacaga

SEQ ID NO: 32310 - DNA, 30 bp, Artificial Sequence
  Synthetic oligonucleotide
tggtaccggattgcaacctacggggacaga

SEQ ID NO: 32311 - DNA, 30 bp, Artificial Sequence
  Synthetic oligonucleotide
tcgagaggtggcaaattttaaaggtacaga

SEQ ID NO: 32312 - DNA, 30 bp, Artificial Sequence
  Synthetic oligonucleotide
tcctggcgcgactacgtacacgcaaccaga

SEQ ID NO: 32313 - DNA, 30 bp, Artificial Sequence
  Synthetic oligonucleotide
aatgggtttacatgcactagaaataccaga

SEQ ID NO: 32314 - DNA, 30 bp, Artificial Sequence
  Synthetic oligonucleotide
caagatagaaccaagacaaatgttcccaga

SEQ ID NO: 32315 - DNA, 30 bp, Artificial Sequence
  Synthetic oligonucleotide
gagcagagccctgatccaagaaaacgcaga

SEQ ID NO: 32316 - DNA, 30 bp, Artificial Sequence
  Synthetic oligonucleotide
tgcacaatgagacaaggggtgtcgtgcaga

SEQ ID NO: 32317 - DNA, 30 bp, Artificial Sequence
  Synthetic oligonucleotide
acgagagcgcttccgaccagcaaaatcaga

SEQ ID NO: 32318 - DNA, 30 bp, Artificial Sequence
  Synthetic oligonucleotide
gataacgcctaaatatggatgagggtcaga

SEQ ID NO: 32319 - DNA, 30 bp, Artificial Sequence
  Synthetic oligonucleotide
gtcgtcatgcaaaactcaaaacgggtcaga

SEQ ID NO: 32320 - DNA, 30 bp, Artificial Sequence
  Synthetic oligonucleotide
ctgtcaacgtgtattaaggggtatgtcaga

SEQ ID NO: 32321 - DNA, 30 bp, Artificial Sequence
  Synthetic oligonucleotide
tatgcgggacagcgggacgagcctgtcaga

SEQ ID NO: 32322 - DNA, 30 bp, Artificial Sequence
  Synthetic oligonucleotide
gtacagacaaaaactcgcataaagttcaga

SEQ ID NO: 32323 - DNA, 30 bp, Artificial Sequence
  Synthetic oligonucleotide
gcgaccctgagtaggagttgtaagttcaga

SEQ ID NO: 32324 - DNA, 30 bp, Artificial Sequence
  Synthetic oligonucleotide
acatcccgtgtcatggctggtgcaaagaga

SEQ ID NO: 32325 - DNA, 30 bp, Artificial Sequence
  Synthetic oligonucleotide
cctgaagctaggaaaataggcttaaagaga

SEQ ID NO: 32326 - DNA, 30 bp, Artificial Sequence
  Synthetic oligonucleotide
ccatcagccaaaaacgtctgaggcaagaga

SEQ ID NO: 32327 - DNA, 30 bp, Artificial Sequence
  Synthetic oligonucleotide
gcgataaagcaaatctccattgctaagaga

SEQ ID NO: 32328 - DNA, 30 bp, Artificial Sequence
  Synthetic oligonucleotide
cgtggttacgataatcatgttcatgagaga

SEQ ID NO: 32329 - DNA, 30 bp, Artificial Sequence
  Synthetic oligonucleotide
acggtaatgagcccgggattacaatagaga

SEQ ID NO: 32330 - DNA, 30 bp, Artificial Sequence
  Synthetic oligonucleotide
gggctcgtcctaatcaactaccgctagaga

SEQ ID NO: 32331 - DNA, 30 bp, Artificial Sequence
  Synthetic oligonucleotide
gcaaagacaaatatggggtatccttagaga

SEQ ID NO: 32332 - DNA, 30 bp, Artificial Sequence
  Synthetic oligonucleotide
acgttgttcaatcgccgacgggccacgaga

SEQ ID NO: 32333 - DNA, 30 bp, Artificial Sequence
  Synthetic oligonucleotide
aagtgaagtggacaaaaatagacgccgaga

SEQ ID NO: 32334 - DNA, 30 bp, Artificial Sequence
  Synthetic oligonucleotide
tgtcgaacggcaactatacagggctcgaga

SEQ ID NO: 32335 - DNA, 30 bp, Artificial Sequence
  Synthetic oligonucleotide
acacagttaggctactagtggtatgggaga

SEQ ID NO: 32336 - DNA, 30 bp, Artificial Sequence
  Synthetic oligonucleotide
gtagagttagcgttggagactaaaaataga

SEQ ID NO: 32337 - DNA, 30 bp, Artificial Sequence
  Synthetic oligonucleotide
ctgagaccatttaagatatctaaacataga

SEQ ID NO: 32338 - DNA, 30 bp, Artificial Sequence
  Synthetic oligonucleotide
ccaaggttaaatgcgtactaaactcgtaga

SEQ ID NO: 32339 - DNA, 30 bp, Artificial Sequence
  Synthetic oligonucleotide
agagcaaaccaaactgactattggcttaga

SEQ ID NO: 32340 - DNA, 30 bp, Artificial Sequence
  Synthetic oligonucleotide
tcgcctccaggcatattggaaggggttaga

SEQ ID NO: 32341 - DNA, 30 bp, Artificial Sequence
  Synthetic oligonucleotide
caatataaatgtgaacgagggctggttaga

SEQ ID NO: 32342 - DNA, 30 bp, Artificial Sequence
  Synthetic oligonucleotide
gaagagtgtctaaaaaggagcgatgttaga

SEQ ID NO: 32343 - DNA, 30 bp, Artificial Sequence
  Synthetic oligonucleotide
ctgggcgccaaactgaggaagattgttaga

SEQ ID NO: 32344 - DNA, 30 bp, Artificial Sequence
  Synthetic oligonucleotide
cgacgacagtgggagcctggattccaacga

SEQ ID NO: 32345 - DNA, 30 bp, Artificial Sequence
  Synthetic oligonucleotide
aggctaatggtggcagacaagaggcaacga

SEQ ID NO: 32346 - DNA, 30 bp, Artificial Sequence
  Synthetic oligonucleotide
cgttagggaacccgggtgaccgaagaacga

SEQ ID NO: 32347 - DNA, 30 bp, Artificial Sequence
  Synthetic oligonucleotide
gcggggaaagagtgttagccgtgcgaacga

SEQ ID NO: 32348 - DNA, 30 bp, Artificial Sequence
  Synthetic oligonucleotide
cataactcataacgctataccctcccacga

SEQ ID NO: 32349 - DNA, 30 bp, Artificial Sequence
  Synthetic oligonucleotide
tgaacggggcattaatacaccgaatcacga

SEQ ID NO: 32350 - DNA, 30 bp, Artificial Sequence
  Synthetic oligonucleotide
caacacataccatatagaatacggcgacga

SEQ ID NO: 32351 - DNA, 30 bp, Artificial Sequence
  Synthetic oligonucleotide
tgcgtctaacaatagtgccaacatcgacga

SEQ ID NO: 32352 - DNA, 30 bp, Artificial Sequence
  Synthetic oligonucleotide
cgggctgagccaatcgtcagaagaggacga

SEQ ID NO: 32353 - DNA, 30 bp, Artificial Sequence
  Synthetic oligonucleotide
tcagtaaaaaggcccaatgtcaacatacga

SEQ ID NO: 32354 - DNA, 30 bp, Artificial Sequence
  Synthetic oligonucleotide
gtatggtgagtaaaagcgaccaagatacga

SEQ ID NO: 32355 - DNA, 30 bp, Artificial Sequence
  Synthetic oligonucleotide
gaaacggcctaatctaatcagcgactacga

SEQ ID NO: 32356 - DNA, 30 bp, Artificial Sequence
  Synthetic oligonucleotide
agagaaagggcaagtccaaaataattacga

SEQ ID NO: 32357 - DNA, 30 bp, Artificial Sequence
  Synthetic oligonucleotide
acatatcaaagagataaaacgcggttacga

SEQ ID NO: 32358 - DNA, 30 bp, Artificial Sequence
  Synthetic oligonucleotide
gcggagaaaccgacggataaatatttacga

SEQ ID NO: 32359 - DNA, 30 bp, Artificial Sequence
  Synthetic oligonucleotide
agcaaatcttagtatgcggtcggcgcccga

SEQ ID NO: 32360 - DNA, 30 bp, Artificial Sequence
  Synthetic oligonucleotide
cgtgtaaagatcagacttagggattcccga

SEQ ID NO: 32361 - DNA, 30 bp, Artificial Sequence
  Synthetic oligonucleotide
aaggcaattctgagagagggccctcgccga

SEQ ID NO: 32362 - DNA, 30 bp, Artificial Sequence
  Synthetic oligonucleotide
caccactatagaccgacacacggccagcga

SEQ ID NO: 32363 - DNA, 30 bp, Artificial Sequence
  Synthetic oligonucleotide
gtgaagtagcgcaagaaccgagcagagcga

SEQ ID NO: 32364 - DNA, 30 bp, Artificial Sequence
  Synthetic oligonucleotide
tgatacgtgggtccagcgatgagtgcgcga

SEQ ID NO: 32365 - DNA, 30 bp, Artificial Sequence
  Synthetic oligonucleotide
gggagattgcaccatataattcagcggcga

SEQ ID NO: 32366 - DNA, 30 bp, Artificial Sequence
  Synthetic oligonucleotide
agggggtaagaggcagtgtagcgcctgcga

SEQ ID NO: 32367 - DNA, 30 bp, Artificial Sequence
  Synthetic oligonucleotide
ggccgactaatactgatcaatggggtgcga

SEQ ID NO: 32368 - DNA, 30 bp, Artificial Sequence
  Synthetic oligonucleotide
agagtaaacggacggcgggcacagcatcga

SEQ ID NO: 32369 - DNA, 30 bp, Artificial Sequence
  Synthetic oligonucleotide
cgattatgagtgtatcagtcagttcatcga

SEQ ID NO: 32370 - DNA, 30 bp, Artificial Sequence
  Synthetic oligonucleotide
tgcactactcctgagtcaaaaaacactcga

SEQ ID NO: 32371 - DNA, 30 bp, Artificial Sequence
  Synthetic oligonucleotide
cagatcaaccagtaaggcctgaatactcga

SEQ ID NO: 32372 - DNA, 30 bp, Artificial Sequence
  Synthetic oligonucleotide
cacacaagaagggggcggtcacgtactcga

SEQ ID NO: 32373 - DNA, 30 bp, Artificial Sequence
  Synthetic oligonucleotide
aagacgggaacgttcgatcaagcacctcga

SEQ ID NO: 32374 - DNA, 30 bp, Artificial Sequence
  Synthetic oligonucleotide
tgaccgcgccgtaaattatgagtgcgtcga

SEQ ID NO: 32375 - DNA, 30 bp, Artificial Sequence
  Synthetic oligonucleotide
cgctgctggttaaagtagggaagcggtcga

SEQ ID NO: 32376 - DNA, 30 bp, Artificial Sequence
  Synthetic oligonucleotide
aggaggtcactaaccagctagcgtgttcga

SEQ ID NO: 32377 - DNA, 30 bp, Artificial Sequence
  Synthetic oligonucleotide
atggagcgattatggatggatattgaagga

SEQ ID NO: 32378 - DNA, 30 bp, Artificial Sequence
  Synthetic oligonucleotide
ctgttgaagaaaaaggcccaggtgtaagga

SEQ ID NO: 32379 - DNA, 30 bp, Artificial Sequence
  Synthetic oligonucleotide
gcaatacaaaagggaaagtgtattgcagga

SEQ ID NO: 32380 - DNA, 31 bp, Artificial Sequence
  Synthetic oligonucleotide
ggagcagaaaacgcgtagggtgtgatcagga

SEQ ID NO: 32381 - DNA, 30 bp, Artificial Sequence
  Synthetic oligonucleotide
gaatcgacgataaacatgatgccaagagga

SEQ ID NO: 32382 - DNA, 31 bp, Artificial Sequence
  Synthetic oligonucleotide
aatgaggacaaaaaggcctgcatacatagga

SEQ ID NO: 32383 - DNA, 30 bp, Artificial Sequence
  Synthetic oligonucleotide
tacgatgagtgtatgcatgagcctcacgga

SEQ ID NO: 32384 - DNA, 30 bp, Artificial Sequence
  Synthetic oligonucleotide
tagcctaggcgccttagaccagaagacgga

SEQ ID NO: 32385 - DNA, 30 bp, Artificial Sequence
  Synthetic oligonucleotide
gcggaataaatacaaatgattcgggacgga

SEQ ID NO: 32386 - DNA, 30 bp, Artificial Sequence
  Synthetic oligonucleotide
cgaagcacattccatagtaggacatacgga

SEQ ID NO: 32387 - DNA, 30 bp, Artificial Sequence
  Synthetic oligonucleotide
cgaagaaagtcactaggccaatgtaccgga

SEQ ID NO: 32388 - DNA, 30 bp, Artificial Sequence
  Synthetic oligonucleotide
gagaccaggtggagtaaaatctcgtccgga

SEQ ID NO: 32389 - DNA, 30 bp, Artificial Sequence
  Synthetic oligonucleotide
atcgtaacccagaagggtattcgtcgcgga

SEQ ID NO: 32390 - DNA, 30 bp, Artificial Sequence
  Synthetic oligonucleotide
tcgtcgtcgaaaatggagactagaggcgga

SEQ ID NO: 32391 - DNA, 30 bp, Artificial Sequence
  Synthetic oligonucleotide
gcgatgagcaggttcaaacagctaggcgga

SEQ ID NO: 32392 - DNA, 30 bp, Artificial Sequence
  Synthetic oligonucleotide
ggaactgctaagaggggcgatcattgcgga

SEQ ID NO: 32393 - DNA, 30 bp, Artificial Sequence
  Synthetic oligonucleotide
gaatggaatagatgaactcgatcttgcgga

SEQ ID NO: 32394 - DNA, 30 bp, Artificial Sequence
  Synthetic oligonucleotide
taggacgtcgtagaggagaacggactcgga

SEQ ID NO: 32395 - DNA, 30 bp, Artificial Sequence
  Synthetic oligonucleotide
caagcagacttctatacagtatgcctcgga

SEQ ID NO: 32396 - DNA, 30 bp, Artificial Sequence
  Synthetic oligonucleotide
cgatgtgtaacattatgaatgcggttcgga

SEQ ID NO: 32397 - DNA, 30 bp, Artificial Sequence
  Synthetic oligonucleotide
agcgcgggaagacggagtgaatatttcgga

SEQ ID NO: 32398 - DNA, 30 bp, Artificial Sequence
  Synthetic oligonucleotide
tgaggcgttgcaaaattcgagcccaaggga

SEQ ID NO: 32399 - DNA, 30 bp, Artificial Sequence
  Synthetic oligonucleotide
gacaagaactggagcaggcacggacaggga

SEQ ID NO: 32400 - DNA, 30 bp, Artificial Sequence
  Synthetic oligonucleotide
ctcgatagaatgtagtagctcttagaggga

SEQ ID NO: 32401 - DNA, 30 bp, Artificial Sequence
  Synthetic oligonucleotide
cctgattcgaacgatatgtcagagccggga

SEQ ID NO: 32402 - DNA, 30 bp, Artificial Sequence
  Synthetic oligonucleotide
ggtccaagacataccaaagaacgtccggga

SEQ ID NO: 32403 - DNA, 30 bp, Artificial Sequence
  Synthetic oligonucleotide
ggcctaaaaatccatccagcacgaagggga

SEQ ID NO: 32404 - DNA, 30 bp, Artificial Sequence
  Synthetic oligonucleotide
gcttggagcacatcgtgcagaacgagggga

SEQ ID NO: 32405 - DNA, 30 bp, Artificial Sequence
  Synthetic oligonucleotide
aaagcacgttcaaccagtccctacggggga

SEQ ID NO: 32406 - DNA, 30 bp, Artificial Sequence
  Synthetic oligonucleotide
gtgaaattaaacaagtagtcagccggggga

SEQ ID NO: 32407 - DNA, 30 bp, Artificial Sequence
  Synthetic oligonucleotide
tggcatgcggcctgtagcaacaagggggga

SEQ ID NO: 32408 - DNA, 30 bp, Artificial Sequence
  Synthetic oligonucleotide
tatcactatagtacggggaccgagtgggga

SEQ ID NO: 32409 - DNA, 30 bp, Artificial Sequence
  Synthetic oligonucleotide
ctccgagcaaaaatcaaatcatatatggga

SEQ ID NO: 32410 - DNA, 30 bp, Artificial Sequence
  Synthetic oligonucleotide
gggatgagttcatcgtttagaagagatgga

SEQ ID NO: 32411 - DNA, 30 bp, Artificial Sequence
  Synthetic oligonucleotide
cttaaagcgcaataagctgaggcctatgga

SEQ ID NO: 32412 - DNA, 30 bp, Artificial Sequence
  Synthetic oligonucleotide
tggaagataagcggacaaataatgtatgga

SEQ ID NO: 32413 - DNA, 30 bp, Artificial Sequence
  Synthetic oligonucleotide
gtgacattaagagtaagtaagaaaactgga

SEQ ID NO: 32414 - DNA, 30 bp, Artificial Sequence
  Synthetic oligonucleotide
gggaacaaaatcgcggcaaagacacctgga

SEQ ID NO: 32415 - DNA, 31 bp, Artificial Sequence
  Synthetic oligonucleotide
caaacggtcacaagataacgcaccacctgga

SEQ ID NO: 32416 - DNA, 30 bp, Artificial Sequence
  Synthetic oligonucleotide
tcgtagggttgttacggaatctgagctgga

SEQ ID NO: 32417 - DNA, 30 bp, Artificial Sequence
  Synthetic oligonucleotide
aacgggtacgttgggagagctaagagtgga

SEQ ID NO: 32418 - DNA, 30 bp, Artificial Sequence
  Synthetic oligonucleotide
acgacttaaataaggcagcacgaatgtgga

SEQ ID NO: 32419 - DNA, 30 bp, Artificial Sequence
  Synthetic oligonucleotide
aagcacgattgagagctcacagagtgtgga

SEQ ID NO: 32420 - DNA, 30 bp, Artificial Sequence
  Synthetic oligonucleotide
atgcactgaagatagaaacgtcggaaatga

SEQ ID NO: 32421 - DNA, 30 bp, Artificial Sequence
  Synthetic oligonucleotide
cagaggtcagaatttacaatcagaagatga

SEQ ID NO: 32422 - DNA, 30 bp, Artificial Sequence
  Synthetic oligonucleotide
gtagaatcctctgtaacatgagcgagatga

SEQ ID NO: 32423 - DNA, 30 bp, Artificial Sequence
  Synthetic oligonucleotide
ataagtcgaattgctcataatagcggatga

SEQ ID NO: 32424 - DNA, 30 bp, Artificial Sequence
  Synthetic oligonucleotide
gttgtggagggacttgtagggtcatgatga

SEQ ID NO: 32425 - DNA, 30 bp, Artificial Sequence
  Synthetic oligonucleotide
gaacagaaggcaaataggacgttgccctga

SEQ ID NO: 32426 - DNA, 30 bp, Artificial Sequence
  Synthetic oligonucleotide
acactaacaaatagatacaacgtggcctga

SEQ ID NO: 32427 - DNA, 30 bp, Artificial Sequence
  Synthetic oligonucleotide
cgggcttgttcgggcaaggcagagagctga

SEQ ID NO: 32428 - DNA, 30 bp, Artificial Sequence
  Synthetic oligonucleotide
catccggtaatcgtgacggcaggagtctga

SEQ ID NO: 32429 - DNA, 30 bp, Artificial Sequence
  Synthetic oligonucleotide
tacgttgagagagtcaatggtatcgtctga

SEQ ID NO: 32430 - DNA, 30 bp, Artificial Sequence
  Synthetic oligonucleotide
atagtagcagctggagggccccaaaagtga

SEQ ID NO: 32431 - DNA, 30 bp, Artificial Sequence
  Synthetic oligonucleotide
acgtcgggctcacgagatacggagaagtga

SEQ ID NO: 32432 - DNA, 30 bp, Artificial Sequence
  Synthetic oligonucleotide
cactcggtctcgccacacgatagagagtga

SEQ ID NO: 32433 - DNA, 30 bp, Artificial Sequence
  Synthetic oligonucleotide
atcgcggacttaccggagtaaagcacgtga

SEQ ID NO: 32434 - DNA, 30 bp, Artificial Sequence
  Synthetic oligonucleotide
gggagggtcaatagattgctaagatcgtga

SEQ ID NO: 32435 - DNA, 30 bp, Artificial Sequence
  Synthetic oligonucleotide
gaccagagttggcagacaaactggtcgtga

SEQ ID NO: 32436 - DNA, 30 bp, Artificial Sequence
  Synthetic oligonucleotide
agcaaacggatcgctgatgatacggggtga

SEQ ID NO: 32437 - DNA, 30 bp, Artificial Sequence
  Synthetic oligonucleotide
cggaagccggcccagcgatagttatggtga

SEQ ID NO: 32438 - DNA, 30 bp, Artificial Sequence
  Synthetic oligonucleotide
acaattaccaatcggaacatgaggtggtga

SEQ ID NO: 32439 - DNA, 30 bp, Artificial Sequence
  Synthetic oligonucleotide
agaagcaccgtgtcattcgtacagctgtga

SEQ ID NO: 32440 - DNA, 30 bp, Artificial Sequence
  Synthetic oligonucleotide
ggggatcacaaaaaccaggaatctgtgtga

SEQ ID NO: 32441 - DNA, 30 bp, Artificial Sequence
  Synthetic oligonucleotide
cagaaaagaggaactgaagcagaattgtga

SEQ ID NO: 32442 - DNA, 31 bp, Artificial Sequence
  Synthetic oligonucleotide
ctaggtagcagtgatgtggagagccaattga

SEQ ID NO: 32443 - DNA, 30 bp, Artificial Sequence
  Synthetic oligonucleotide
ccgagtaagaaggtgtatcgccgttattga

SEQ ID NO: 32444 - DNA, 30 bp, Artificial Sequence
  Synthetic oligonucleotide
aaggagcccaaaatatagaggccgtcttga

SEQ ID NO: 32445 - DNA, 30 bp, Artificial Sequence
  Synthetic oligonucleotide
cgacacgcccgaccatcgtctaggagttga

SEQ ID NO: 32446 - DNA, 30 bp, Artificial Sequence
  Synthetic oligonucleotide
ctgtcccgaccacgaatctgccagcgttga

SEQ ID NO: 32447 - DNA, 30 bp, Artificial Sequence
  Synthetic oligonucleotide
ctcagagagtatgcttagcgaagtggttga

SEQ ID NO: 32448 - DNA, 30 bp, Artificial Sequence
  Synthetic oligonucleotide
cgagagcacagggtccacgtaattctttga

SEQ ID NO: 32449 - DNA, 30 bp, Artificial Sequence
  Synthetic oligonucleotide
agctcgccactgaggatacccaatcaaata

SEQ ID NO: 32450 - DNA, 28 bp, Artificial Sequence
  Synthetic oligonucleotide
cgaatagtaaacttgacaagtggaaata

SEQ ID NO: 32451 - DNA, 30 bp, Artificial Sequence
  Synthetic oligonucleotide
cgtatccgtaagtgaagtgagtatccaata

SEQ ID NO: 32452 - DNA, 30 bp, Artificial Sequence
  Synthetic oligonucleotide
tgaaggagggcttgtaccatagggcgaata

SEQ ID NO: 32453 - DNA, 30 bp, Artificial Sequence
  Synthetic oligonucleotide
acaggcaaacatgaggaacacacttgaata

SEQ ID NO: 32454 - DNA, 30 bp, Artificial Sequence
  Synthetic oligonucleotide
aagcggcagacttagaggagcggtataata

SEQ ID NO: 32455 - DNA, 30 bp, Artificial Sequence
  Synthetic oligonucleotide
gcacaatgcagcaggaccgccccacacata

SEQ ID NO: 32456 - DNA, 30 bp, Artificial Sequence
  Synthetic oligonucleotide
ggccatgtaacgtggtcaacgaaagacata

SEQ ID NO: 32457 - DNA, 30 bp, Artificial Sequence
  Synthetic oligonucleotide
acaagcgggattggtgaagcttgagacata

SEQ ID NO: 32458 - DNA, 30 bp, Artificial Sequence
  Synthetic oligonucleotide
cactgtctgagctacaccaatgggaccata

SEQ ID NO: 32459 - DNA, 30 bp, Artificial Sequence
  Synthetic oligonucleotide
cgtgaaaggcgccgtaggagcggtaccata

SEQ ID NO: 32460 - DNA, 30 bp, Artificial Sequence
  Synthetic oligonucleotide
acgaaaagctctcagtcatagcaggccata

SEQ ID NO: 32461 - DNA, 30 bp, Artificial Sequence
  Synthetic oligonucleotide
agggacgatacgcctgaagtgccgcgcata

SEQ ID NO: 32462 - DNA, 30 bp, Artificial Sequence
  Synthetic oligonucleotide
ggcacgtaactgcccgaagctccgcgcata

SEQ ID NO: 32463 - DNA, 30 bp, Artificial Sequence
  Synthetic oligonucleotide
acgtaacgtggagacgccggtaaaggcata

SEQ ID NO: 32464 - DNA, 30 bp, Artificial Sequence
  Synthetic oligonucleotide
agaccgcaacggtgaatgctcgacggcata

SEQ ID NO: 32465 - DNA, 30 bp, Artificial Sequence
  Synthetic oligonucleotide
tcggtgagaggatggggggacataatcata

SEQ ID NO: 32466 - DNA, 30 bp, Artificial Sequence
  Synthetic oligonucleotide
acaagggtaagtagggacgaatagctcata

SEQ ID NO: 32467 - DNA, 30 bp, Artificial Sequence
  Synthetic oligonucleotide
gctgaaggcgaaatgggatgaaataagata

SEQ ID NO: 32468 - DNA, 30 bp, Artificial Sequence
  Synthetic oligonucleotide
aggatcgaaaaggatatggcaagtcagata

SEQ ID NO: 32469 - DNA, 30 bp, Artificial Sequence
  Synthetic oligonucleotide
atgaaggctacctacaaccatcaagagata

SEQ ID NO: 32470 - DNA, 30 bp, Artificial Sequence
  Synthetic oligonucleotide
attaaactagggataggaacgagttagata

SEQ ID NO: 32471 - DNA, 30 bp, Artificial Sequence
  Synthetic oligonucleotide
cgttgatgagagacaaatatcgtttagata

SEQ ID NO: 32472 - DNA, 30 bp, Artificial Sequence
  Synthetic oligonucleotide
tagagcgtcagcctcaacaagcaaaggata

SEQ ID NO: 32473 - DNA, 30 bp, Artificial Sequence
  Synthetic oligonucleotide
acaaatcgctcacaatttcgaacacggata

SEQ ID NO: 32474 - DNA, 30 bp, Artificial Sequence
  Synthetic oligonucleotide
cgaaatagggaacatttgaacctgcatata

SEQ ID NO: 32475 - DNA, 30 bp, Artificial Sequence
  Synthetic oligonucleotide
aggcaagtactaagttaaaggtgcactata

SEQ ID NO: 32476 - DNA, 30 bp, Artificial Sequence
  Synthetic oligonucleotide
aggcaaggagaaacatgcctctcccctata

SEQ ID NO: 32477 - DNA, 30 bp, Artificial Sequence
  Synthetic oligonucleotide
aggacgaatatcgtaccgaatcaatctata

SEQ ID NO: 32478 - DNA, 30 bp, Artificial Sequence
  Synthetic oligonucleotide
gcgaggaccccgtttaacgtttctcaacta

SEQ ID NO: 32479 - DNA, 30 bp, Artificial Sequence
  Synthetic oligonucleotide
ggagagcaaggatgctcaagcagcgaacta

SEQ ID NO: 32480 - DNA, 30 bp, Artificial Sequence
  Synthetic oligonucleotide
gcggggcaccgtctgataaatacaacacta

SEQ ID NO: 32481 - DNA, 30 bp, Artificial Sequence
  Synthetic oligonucleotide
gcagcgcgtctacagccgacaattacacta

SEQ ID NO: 32482 - DNA, 30 bp, Artificial Sequence
  Synthetic oligonucleotide
cgcacgggcgaagtgtatggacaggtacta

SEQ ID NO: 32483 - DNA, 30 bp, Artificial Sequence
  Synthetic oligonucleotide
aggtaatcggtacaggaggtgcgctaccta

SEQ ID NO: 32484 - DNA, 30 bp, Artificial Sequence
  Synthetic oligonucleotide
acctaaaaagaataaaggctccctagccta

SEQ ID NO: 32485 - DNA, 30 bp, Artificial Sequence
  Synthetic oligonucleotide
gcgaagatgccctgtataaagcaagtccta

SEQ ID NO: 32486 - DNA, 30 bp, Artificial Sequence
  Synthetic oligonucleotide
ggggaatacaaaatattacactagaagcta

SEQ ID NO: 32487 - DNA, 30 bp, Artificial Sequence
  Synthetic oligonucleotide
acgagagctggtagaacctgtagttagcta

SEQ ID NO: 32488 - DNA, 30 bp, Artificial Sequence
  Synthetic oligonucleotide
taagccgacagggcaggagtccaagggcta

SEQ ID NO: 32489 - DNA, 30 bp, Artificial Sequence
  Synthetic oligonucleotide
cttagggcggctaagtcaaaaaggatgcta

SEQ ID NO: 32490 - DNA, 30 bp, Artificial Sequence
  Synthetic oligonucleotide
gacggggggcgcgacgaaaaacaggtgcta

SEQ ID NO: 32491 - DNA, 30 bp, Artificial Sequence
  Synthetic oligonucleotide
accatgtaaaaccactaaaaccgtaatcta

SEQ ID NO: 32492 - DNA, 30 bp, Artificial Sequence
  Synthetic oligonucleotide
gaacgatatgcggggtgaaagcatcctcta

SEQ ID NO: 32493 - DNA, 30 bp, Artificial Sequence
  Synthetic oligonucleotide
actgcatggtggtgtggcgatcgaaaagta

SEQ ID NO: 32494 - DNA, 30 bp, Artificial Sequence
  Synthetic oligonucleotide
gcggagcatagataacgagaacttaaagta

SEQ ID NO: 32495 - DNA, 30 bp, Artificial Sequence
  Synthetic oligonucleotide
agaaccaaaagatccatgggaatacaagta

SEQ ID NO: 32496 - DNA, 30 bp, Artificial Sequence
  Synthetic oligonucleotide
gtagggagacggaggttgcgggaataagta

SEQ ID NO: 32497 - DNA, 30 bp, Artificial Sequence
  Synthetic oligonucleotide
ggacacacgcatcacattggaaggtaagta

SEQ ID NO: 32498 - DNA, 30 bp, Artificial Sequence
  Synthetic oligonucleotide
gtggtgtcaaacgtcagacaatggacagta

SEQ ID NO: 32499 - DNA, 30 bp, Artificial Sequence
  Synthetic oligonucleotide
cgtgattcgaaagacggacaggcaccagta

SEQ ID NO: 32500 - DNA, 30 bp, Artificial Sequence
  Synthetic oligonucleotide
taaaatgtagatcaaggctggtcgcgagta

SEQ ID NO: 32501 - DNA, 30 bp, Artificial Sequence
  Synthetic oligonucleotide
taacggcgcttcaatcaaaactggcgagta

SEQ ID NO: 32502 - DNA, 30 bp, Artificial Sequence
  Synthetic oligonucleotide
tctggactagaacaggctgattgactagta

SEQ ID NO: 32503 - DNA, 30 bp, Artificial Sequence
  Synthetic oligonucleotide
tcgcactgagtaaggaagtcaccgctagta

SEQ ID NO: 32504 - DNA, 30 bp, Artificial Sequence
  Synthetic oligonucleotide
cataaacagtacgaacagtggttaaacgta

SEQ ID NO: 32505 - DNA, 30 bp, Artificial Sequence
  Synthetic oligonucleotide
gtaaagggcaaaagcacagcgcagcacgta

SEQ ID NO: 32506 - DNA, 30 bp, Artificial Sequence
  Synthetic oligonucleotide
cgtcacgggaccgagttatttgtaggcgta

SEQ ID NO: 32507 - DNA, 30 bp, Artificial Sequence
  Synthetic oligonucleotide
ccgcgcccagatgtgataccttaatgcgta

SEQ ID NO: 32508 - DNA, 30 bp, Artificial Sequence
  Synthetic oligonucleotide
acgatatacgtacgcctacatcgaatcgta

SEQ ID NO: 32509 - DNA, 30 bp, Artificial Sequence
  Synthetic oligonucleotide
gtgggcaccaagggggaataagccaaggta

SEQ ID NO: 32510 - DNA, 30 bp, Artificial Sequence
  Synthetic oligonucleotide
ttcacgacacaagcgaaaggttaccaggta

SEQ ID NO: 32511 - DNA, 30 bp, Artificial Sequence
  Synthetic oligonucleotide
acgcgaagcgtagccgatactggaacggta

SEQ ID NO: 32512 - DNA, 30 bp, Artificial Sequence
  Synthetic oligonucleotide
ctaaaatcagtatcaaagtatgtgccggta

SEQ ID NO: 32513 - DNA, 30 bp, Artificial Sequence
  Synthetic oligonucleotide
ggtcagtgagctggaaaggtgccggcggta

SEQ ID NO: 32514 - DNA, 30 bp, Artificial Sequence
  Synthetic oligonucleotide
gagatgggtgtctaatgcaaaataagggta

SEQ ID NO: 32515 - DNA, 30 bp, Artificial Sequence
  Synthetic oligonucleotide
agaggtatggggacctgtgactttcgggta

SEQ ID NO: 32516 - DNA, 30 bp, Artificial Sequence
  Synthetic oligonucleotide
acgtgggagatccacaacgatgggatggta

SEQ ID NO: 32517 - DNA, 30 bp, Artificial Sequence
  Synthetic oligonucleotide
tcggagtaaggatggctgccccgcctggta

SEQ ID NO: 32518 - DNA, 30 bp, Artificial Sequence
  Synthetic oligonucleotide
ggggcatgggtctgagaagagcaagtggta

SEQ ID NO: 32519 - DNA, 30 bp, Artificial Sequence
  Synthetic oligonucleotide
gacctatgaaatcacccagaagaagtggta

SEQ ID NO: 32520 - DNA, 30 bp, Artificial Sequence
  Synthetic oligonucleotide
gcaaggtaatagagaccaattcaacatgta

SEQ ID NO: 32521 - DNA, 30 bp, Artificial Sequence
  Synthetic oligonucleotide
tagttcgattcagaaaggacatgccatgta

SEQ ID NO: 32522 - DNA, 30 bp, Artificial Sequence
  Synthetic oligonucleotide
ggcagaaccaaattgaatgtacagtatgta

SEQ ID NO: 32523 - DNA, 30 bp, Artificial Sequence
  Synthetic oligonucleotide
gctgctggccaagtcaacgaaaaacgtgta

SEQ ID NO: 32524 - DNA, 30 bp, Artificial Sequence
  Synthetic oligonucleotide
ggggtgagcgacgggaaggagcttgttgta

SEQ ID NO: 32525 - DNA, 30 bp, Artificial Sequence
  Synthetic oligonucleotide
aagggccgtctcacgataataccgaaatta

SEQ ID NO: 32526 - DNA, 30 bp, Artificial Sequence
  Synthetic oligonucleotide
agcagcaacttggactggaaacccgaatta

SEQ ID NO: 32527 - DNA, 30 bp, Artificial Sequence
  Synthetic oligonucleotide
gacacctagccagggtaaggttgcgaatta

SEQ ID NO: 32528 - DNA, 30 bp, Artificial Sequence
  Synthetic oligonucleotide
ccgatgcaatcactgaagagtgtaacatta

SEQ ID NO: 32529 - DNA, 30 bp, Artificial Sequence
  Synthetic oligonucleotide
ggcaggggatcggagtcaagagtgccatta

SEQ ID NO: 32530 - DNA, 30 bp, Artificial Sequence
  Synthetic oligonucleotide
ggacaacaagtattggacaaaggtgcatta

SEQ ID NO: 32531 - DNA, 30 bp, Artificial Sequence
  Synthetic oligonucleotide
gcgacatgctagccggcttccatcagatta

SEQ ID NO: 32532 - DNA, 30 bp, Artificial Sequence
  Synthetic oligonucleotide
ccaaggcgtggggtgaaagcacgcatatta

SEQ ID NO: 32533 - DNA, 30 bp, Artificial Sequence
  Synthetic oligonucleotide
cgaggccgcctcattgcacataactcctta

SEQ ID NO: 32534 - DNA, 30 bp, Artificial Sequence
  Synthetic oligonucleotide
cagcagaacgtcaagaggattcagtgctta

SEQ ID NO: 32535 - DNA, 30 bp, Artificial Sequence
  Synthetic oligonucleotide
gcgcgatagagatactggtcatccgagtta

SEQ ID NO: 32536 - DNA, 30 bp, Artificial Sequence
  Synthetic oligonucleotide
gcacaggataaggcaaatgagggctagtta

SEQ ID NO: 32537 - DNA, 30 bp, Artificial Sequence
  Synthetic oligonucleotide
cgagccatggagaagatccgttgggcgtta

SEQ ID NO: 32538 - DNA, 30 bp, Artificial Sequence
  Synthetic oligonucleotide
ctggggaaaactccagagtagggagggtta

SEQ ID NO: 32539 - DNA, 30 bp, Artificial Sequence
  Synthetic oligonucleotide
agtagaggtcactcggccggaacaatgtta

SEQ ID NO: 32540 - DNA, 30 bp, Artificial Sequence
  Synthetic oligonucleotide
accgaagtgggcgggggaatatcggtgtta

SEQ ID NO: 32541 - DNA, 34 bp, Artificial Sequence
  Synthetic oligonucleotide
gatactagaccaccacgtgtccatcagaaaaaac

SEQ ID NO: 32542 - DNA, 30 bp, Artificial Sequence
  Synthetic oligonucleotide
acgctaagtcggcacattagctacaaaaac

SEQ ID NO: 32543 - DNA, 30 bp, Artificial Sequence
  Synthetic oligonucleotide
gcggtgggagtgtaaaacggggctacaaac

SEQ ID NO: 32544 - DNA, 30 bp, Artificial Sequence
  Synthetic oligonucleotide
gccgatcagggaaagggacgaagaccaaac

SEQ ID NO: 32545 - DNA, 30 bp, Artificial Sequence
  Synthetic oligonucleotide
tcctcaggaagcggtaaaatggtcgcaaac

SEQ ID NO: 32546 - DNA, 30 bp, Artificial Sequence
  Synthetic oligonucleotide
cgggcggtacgtgcgcaatgtttcgcaaac

SEQ ID NO: 32547 - DNA, 30 bp, Artificial Sequence
  Synthetic oligonucleotide
aggtatgccacatcgctaaacccctcaaac

SEQ ID NO: 32548 - DNA, 30 bp, Artificial Sequence
  Synthetic oligonucleotide
gcgatgttggagagatgggagcgtagaaac

SEQ ID NO: 32549 - DNA, 30 bp, Artificial Sequence
  Synthetic oligonucleotide
cacacatcagctcaagtactgtgtagaaac

SEQ ID NO: 32550 - DNA, 30 bp, Artificial Sequence
  Synthetic oligonucleotide
tgaaagtggactcaggctacgtcaggaaac

SEQ ID NO: 32551 - DNA, 30 bp, Artificial Sequence
  Synthetic oligonucleotide
cggacctaggaatacagaacggcctgaaac

SEQ ID NO: 32552 - DNA, 30 bp, Artificial Sequence
  Synthetic oligonucleotide
tcaaacgatgatcggtaatcgggcaacaac

SEQ ID NO: 32553 - DNA, 30 bp, Artificial Sequence
  Synthetic oligonucleotide
cgcaatccccgattactagtccgccacaac

SEQ ID NO: 32554 - DNA, 30 bp, Artificial Sequence
  Synthetic oligonucleotide
tggacgaaagagaccgctatgacatacaac

SEQ ID NO: 32555 - DNA, 30 bp, Artificial Sequence
  Synthetic oligonucleotide
caacgtggtagagctcaccgtctcgccaac

SEQ ID NO: 32556 - DNA, 30 bp, Artificial Sequence
  Synthetic oligonucleotide
cgaacaagaccccgttagaatagaatcaac

SEQ ID NO: 32557 - DNA, 30 bp, Artificial Sequence
  Synthetic oligonucleotide
ccgtaatgagctggaagactggttatcaac

SEQ ID NO: 32558 - DNA, 30 bp, Artificial Sequence
  Synthetic oligonucleotide
aagggtcgaaccgtcaagtaattcctcaac

SEQ ID NO: 32559 - DNA, 30 bp, Artificial Sequence
  Synthetic oligonucleotide
ggaacgctcacctgagggaggcatctcaac

SEQ ID NO: 32560 - DNA, 30 bp, Artificial Sequence
  Synthetic oligonucleotide
tcggtgtatcaaacctcgaacagtaagaac

SEQ ID NO: 32561 - DNA, 30 bp, Artificial Sequence
  Synthetic oligonucleotide
acgtctggaatgcgagtcagatagaggaac

SEQ ID NO: 32562 - DNA, 30 bp, Artificial Sequence
  Synthetic oligonucleotide
cggccaaatactggtgtcgttgttaggaac

SEQ ID NO: 32563 - DNA, 30 bp, Artificial Sequence
  Synthetic oligonucleotide
agggtacagagctaaatctcaaccgggaac

SEQ ID NO: 32564 - DNA, 30 bp, Artificial Sequence
  Synthetic oligonucleotide
atcagattgtcgcatagaaaagggtggaac

SEQ ID NO: 32565 - DNA, 30 bp, Artificial Sequence
  Synthetic oligonucleotide
agcaaggatagtggaggatgacaaatgaac

SEQ ID NO: 32566 - DNA, 30 bp, Artificial Sequence
  Synthetic oligonucleotide
acgtgtagtagccagttagcatgactgaac

SEQ ID NO: 32567 - DNA, 30 bp, Artificial Sequence
  Synthetic oligonucleotide
ctagggaatagctgaatgaagtagaataac

SEQ ID NO: 32568 - DNA, 30 bp, Artificial Sequence
  Synthetic oligonucleotide
aatgcatcgtgacaccatcaattgcgtaac

SEQ ID NO: 32569 - DNA, 30 bp, Artificial Sequence
  Synthetic oligonucleotide
gaaagagccagtggagggtgagggcaacac

SEQ ID NO: 32570 - DNA, 30 bp, Artificial Sequence
  Synthetic oligonucleotide
aagtatgttgcgtcacgaagagagacacac

SEQ ID NO: 32571 - DNA, 30 bp, Artificial Sequence
  Synthetic oligonucleotide
aagcatggcagagtaataataggaccacac

SEQ ID NO: 32572 - DNA, 30 bp, Artificial Sequence
  Synthetic oligonucleotide
ggcagaaactgcagcgataataggccacac

SEQ ID NO: 32573 - DNA, 30 bp, Artificial Sequence
  Synthetic oligonucleotide
gccacactgatctgcatccgacacatacac

SEQ ID NO: 32574 - DNA, 30 bp, Artificial Sequence
  Synthetic oligonucleotide
agaacgtctccgtaaatgagcggtgtacac

SEQ ID NO: 32575 - DNA, 30 bp, Artificial Sequence
  Synthetic oligonucleotide
caacggcgaataacccaaattccgtaccac

SEQ ID NO: 32576 - DNA, 30 bp, Artificial Sequence
  Synthetic oligonucleotide
ctacagcacaatattgacagagtccgccac

SEQ ID NO: 32577 - DNA, 30 bp, Artificial Sequence
  Synthetic oligonucleotide
aaacgaacgataaatagaggtgagtgccac

SEQ ID NO: 32578 - DNA, 30 bp, Artificial Sequence
  Synthetic oligonucleotide
acggcgagtttggaggggatcatagtccac

SEQ ID NO: 32579 - DNA, 31 bp, Artificial Sequence
  Synthetic oligonucleotide
gaacgaatgccgagcaatcggatttaagcac

SEQ ID NO: 32580 - DNA, 30 bp, Artificial Sequence
  Synthetic oligonucleotide
acacgagaaactataaactaacgtccgcac

SEQ ID NO: 32581 - DNA, 30 bp, Artificial Sequence
  Synthetic oligonucleotide
tcggatggaggggggatttcgctacggcac

SEQ ID NO: 32582 - DNA, 31 bp, Artificial Sequence
  Synthetic oligonucleotide
aaccgagcggatacaggaagaggtggggcac

SEQ ID NO: 32583 - DNA, 30 bp, Artificial Sequence
  Synthetic oligonucleotide
cgcaaccggttaccctcgactccctggcac

SEQ ID NO: 32584 - DNA, 30 bp, Artificial Sequence
  Synthetic oligonucleotide
tcgagcataaccgagggattggccaatcac

SEQ ID NO: 32585 - DNA, 30 bp, Artificial Sequence
  Synthetic oligonucleotide
gctgaatgcgaagaagaacggttcaatcac

SEQ ID NO: 32586 - DNA, 30 bp, Artificial Sequence
  Synthetic oligonucleotide
gcgaaaagtccgagaaaacgatgctctcac

SEQ ID NO: 32587 - DNA, 30 bp, Artificial Sequence
  Synthetic oligonucleotide
tcgccagaaatggggttaggggctcgtcac

SEQ ID NO: 32588 - DNA, 30 bp, Artificial Sequence
  Synthetic oligonucleotide
ttcgagaagctgcgaaagatagagcaagac

SEQ ID NO: 32589 - DNA, 30 bp, Artificial Sequence
  Synthetic oligonucleotide
tgcgaactgcccgtaaaaatagtcgcagac

SEQ ID NO: 32590 - DNA, 30 bp, Artificial Sequence
  Synthetic oligonucleotide
aggacaaataacgtagtatactacagagac

SEQ ID NO: 32591 - DNA, 30 bp, Artificial Sequence
  Synthetic oligonucleotide
taggagaggcatacatttcatacccgagac

SEQ ID NO: 32592 - DNA, 30 bp, Artificial Sequence
  Synthetic oligonucleotide
agaaataagaagcggtatcctatggtagac

SEQ ID NO: 32593 - DNA, 30 bp, Artificial Sequence
  Synthetic oligonucleotide
cacacgtggatactgacccgaagagacgac

SEQ ID NO: 32594 - DNA, 30 bp, Artificial Sequence
  Synthetic oligonucleotide
ccggtaaacacccaagtagaaatttacgac

SEQ ID NO: 32595 - DNA, 30 bp, Artificial Sequence
  Synthetic oligonucleotide
gttgcgatgcgaggaaagggtgcaaaggac

SEQ ID NO: 32596 - DNA, 30 bp, Artificial Sequence
  Synthetic oligonucleotide
tgtaaaacagggagtgttagcagacaggac

SEQ ID NO: 32597 - DNA, 30 bp, Artificial Sequence
  Synthetic oligonucleotide
ggagaataattttgaacctatagagaggac

SEQ ID NO: 32598 - DNA, 30 bp, Artificial Sequence
  Synthetic oligonucleotide
tgggatcgtaataagagcaacctcgaggac

SEQ ID NO: 32599 - DNA, 30 bp, Artificial Sequence
  Synthetic oligonucleotide
taggacctgcgagcacaaaggcctgaggac

SEQ ID NO: 32600 - DNA, 30 bp, Artificial Sequence
  Synthetic oligonucleotide
gtggtacgagtcatttgagaggtgtcggac

SEQ ID NO: 32601 - DNA, 30 bp, Artificial Sequence
  Synthetic oligonucleotide
cagggacggtctacgacgaagtgacgggac

SEQ ID NO: 32602 - DNA, 30 bp, Artificial Sequence
  Synthetic oligonucleotide
tcatgtgcaatcaggaaacgagtgggggac

SEQ ID NO: 32603 - DNA, 30 bp, Artificial Sequence
  Synthetic oligonucleotide
tgcggacgagggcggagcggagagcatgac

SEQ ID NO: 32604 - DNA, 30 bp, Artificial Sequence
  Synthetic oligonucleotide
gcaagatgaatcgctcttcaattaagtgac

SEQ ID NO: 32605 - DNA, 30 bp, Artificial Sequence
  Synthetic oligonucleotide
acgaatagttggcaggtgatacgcagtgac

SEQ ID NO: 32606 - DNA, 30 bp, Artificial Sequence
  Synthetic oligonucleotide
gcggggaatcagcatttcaccacatgtgac

SEQ ID NO: 32607 - DNA, 30 bp, Artificial Sequence
  Synthetic oligonucleotide
cgagtcaacgcggatatcggaggtgaatac

SEQ ID NO: 32608 - DNA, 30 bp, Artificial Sequence
  Synthetic oligonucleotide
ataaaccaatcacaaccaggataaacatac

SEQ ID NO: 32609 - DNA, 30 bp, Artificial Sequence
  Synthetic oligonucleotide
gaaagaaggcaaaccattgacaagggatac

SEQ ID NO: 32610 - DNA, 30 bp, Artificial Sequence
  Synthetic oligonucleotide
cgatcattccggggaaattgctcaatatac

SEQ ID NO: 32611 - DNA, 30 bp, Artificial Sequence
  Synthetic oligonucleotide
gaggaaaagcaaagaatctctgtcatatac

SEQ ID NO: 32612 - DNA, 30 bp, Artificial Sequence
  Synthetic oligonucleotide
tgacgaagacaagaccgattcgtcagctac

SEQ ID NO: 32613 - DNA, 30 bp, Artificial Sequence
  Synthetic oligonucleotide
aagacgaggaattaatacgcgtgaggctac

SEQ ID NO: 32614 - DNA, 30 bp, Artificial Sequence
  Synthetic oligonucleotide
ggttacgaacggaaaacgagggcaatctac

SEQ ID NO: 32615 - DNA, 30 bp, Artificial Sequence
  Synthetic oligonucleotide
cggacgtgcttaacgagtgcttaacagtac

SEQ ID NO: 32616 - DNA, 30 bp, Artificial Sequence
  Synthetic oligonucleotide
cctcgacacataaaataagcatggcagtac

SEQ ID NO: 32617 - DNA, 30 bp, Artificial Sequence
  Synthetic oligonucleotide
taggcgcgccggggatggaaaacaacgtac

SEQ ID NO: 32618 - DNA, 30 bp, Artificial Sequence
  Synthetic oligonucleotide
agggaccaagtgggtgcggtatcaaggtac

SEQ ID NO: 32619 - DNA, 30 bp, Artificial Sequence
  Synthetic oligonucleotide
gaaaagactgctgagggcagagggaggtac

SEQ ID NO: 32620 - DNA, 30 bp, Artificial Sequence
  Synthetic oligonucleotide
agttggtgagtaaaacgtgggatagggtac

SEQ ID NO: 32621 - DNA, 30 bp, Artificial Sequence
  Synthetic oligonucleotide
cgcgtgagttcagtgatatgcctagggtac

SEQ ID NO: 32622 - DNA, 30 bp, Artificial Sequence
  Synthetic oligonucleotide
cgtgcttgatcagaagaaggttcgaattac

SEQ ID NO: 32623 - DNA, 30 bp, Artificial Sequence
  Synthetic oligonucleotide
agagttaggggggactagtcagagcgaacc

SEQ ID NO: 32624 - DNA, 30 bp, Artificial Sequence
  Synthetic oligonucleotide
gctcaaaacccatctgagatagtacacacc

SEQ ID NO: 32625 - DNA, 30 bp, Artificial Sequence
  Synthetic oligonucleotide
gacgaagacgagccaataaaaaagtacacc

SEQ ID NO: 32626 - DNA, 30 bp, Artificial Sequence
  Synthetic oligonucleotide
caggaccccataagaaacagaccacccacc

SEQ ID NO: 32627 - DNA, 30 bp, Artificial Sequence
  Synthetic oligonucleotide
cgtggatgtaatgtattgagagtcgccacc

SEQ ID NO: 32628 - DNA, 30 bp, Artificial Sequence
  Synthetic oligonucleotide
cacgtaacagcaaagtggataatgagcacc

SEQ ID NO: 32629 - DNA, 30 bp, Artificial Sequence
  Synthetic oligonucleotide
taataaacagaacaagtctattgtagcacc

SEQ ID NO: 32630 - DNA, 30 bp, Artificial Sequence
  Synthetic oligonucleotide
caagatcaggcccaccctacgaaatgcacc

SEQ ID NO: 32631 - DNA, 30 bp, Artificial Sequence
  Synthetic oligonucleotide
ggctggattcagaactgtccctaatgcacc

SEQ ID NO: 32632 - DNA, 30 bp, Artificial Sequence
  Synthetic oligonucleotide
aagccgagagggggcaccggggtcaggacc

SEQ ID NO: 32633 - DNA, 30 bp, Artificial Sequence
  Synthetic oligonucleotide
atggagaagaacacccgtcgagcggggacc

SEQ ID NO: 32634 - DNA, 30 bp, Artificial Sequence
  Synthetic oligonucleotide
gggttcgacaatgatggcccgagaccaccc

SEQ ID NO: 32635 - DNA, 30 bp, Artificial Sequence
  Synthetic oligonucleotide
tagaggtgatattcaatagagtaagcaccc

SEQ ID NO: 32636 - DNA, 30 bp, Artificial Sequence
  Synthetic oligonucleotide
cgaccagacggaacgttgggtgagtgaccc

SEQ ID NO: 32637 - DNA, 30 bp, Artificial Sequence
  Synthetic oligonucleotide
caaagggcgccgggcggaactagtataccc

SEQ ID NO: 32638 - DNA, 30 bp, Artificial Sequence
  Synthetic oligonucleotide
atgcggcaacgagcgagcgcgcaaaagccc

SEQ ID NO: 32639 - DNA, 30 bp, Artificial Sequence
  Synthetic oligonucleotide
gcgagaggaaatcaccgtcgtgtcaagccc

SEQ ID NO: 32640 - DNA, 30 bp, Artificial Sequence
  Synthetic oligonucleotide
tgaggaaacaatctcattacgtaccagccc

SEQ ID NO: 32641 - DNA, 30 bp, Artificial Sequence
  Synthetic oligonucleotide
acaagggaaaagtagtggtgtaactcgccc

SEQ ID NO: 32642 - DNA, 30 bp, Artificial Sequence
  Synthetic oligonucleotide
cttgcaagcctaaagtcaaccgaactgccc

SEQ ID NO: 32643 - DNA, 30 bp, Artificial Sequence
  Synthetic oligonucleotide
cacatagatagagccaacgtgatcgctccc

SEQ ID NO: 32644 - DNA, 30 bp, Artificial Sequence
  Synthetic oligonucleotide
atacaagaagaatcaagatatgctaaagcc

SEQ ID NO: 32645 - DNA, 30 bp, Artificial Sequence
  Synthetic oligonucleotide
acagggatacaacacagcagcaaacaagcc

SEQ ID NO: 32646 - DNA, 30 bp, Artificial Sequence
  Synthetic oligonucleotide
taaaaaagacaatctcgcatgagccaagcc

SEQ ID NO: 32647 - DNA, 30 bp, Artificial Sequence
  Synthetic oligonucleotide
agtcgttgcgtgaagtacatctagcaagcc

SEQ ID NO: 32648 - DNA, 30 bp, Artificial Sequence
  Synthetic oligonucleotide
acgtgttgacaggtacaacggtcataagcc

SEQ ID NO: 32649 - DNA, 30 bp, Artificial Sequence
  Synthetic oligonucleotide
caggatgttcaaccggaaagggcaacagcc

SEQ ID NO: 32650 - DNA, 30 bp, Artificial Sequence
  Synthetic oligonucleotide
cgaagacctggataaaaagaacaaccagcc

SEQ ID NO: 32651 - DNA, 30 bp, Artificial Sequence
  Synthetic oligonucleotide
cgaaaaatggtcacgcgatgagtcgcagcc

SEQ ID NO: 32652 - DNA, 30 bp, Artificial Sequence
  Synthetic oligonucleotide
ggtatagcgagtaactagttagaaagagcc

SEQ ID NO: 32653 - DNA, 30 bp, Artificial Sequence
  Synthetic oligonucleotide
cgtatccaactcgcaagcggaattcgagcc

SEQ ID NO: 32654 - DNA, 30 bp, Artificial Sequence
  Synthetic oligonucleotide
acgagacgtgcttcatgggtgagccacgcc

SEQ ID NO: 32655 - DNA, 30 bp, Artificial Sequence
  Synthetic oligonucleotide
tgcgcaaactatgggaaccgacaccccgcc

SEQ ID NO: 32656 - DNA, 30 bp, Artificial Sequence
  Synthetic oligonucleotide
catttaccaggaaaacagaagcaaggcgcc

SEQ ID NO: 32657 - DNA, 30 bp, Artificial Sequence
  Synthetic oligonucleotide
aggaagagggctgggcaagcatggtgcgcc

SEQ ID NO: 32658 - DNA, 30 bp, Artificial Sequence
  Synthetic oligonucleotide
tgaaagtgttacaagagaagccttatcgcc

SEQ ID NO: 32659 - DNA, 30 bp, Artificial Sequence
  Synthetic oligonucleotide
ctgactccagaattaggcatacgggtggcc

SEQ ID NO: 32660 - DNA, 30 bp, Artificial Sequence
  Synthetic oligonucleotide
ggtccgcgtaagactaacgtatggcctgcc

SEQ ID NO: 32661 - DNA, 30 bp, Artificial Sequence
  Synthetic oligonucleotide
accagagaacgacggcaatggtccgctgcc

SEQ ID NO: 32662 - DNA, 30 bp, Artificial Sequence
  Synthetic oligonucleotide
cctaaggtgaagggatgggtatgcgctgcc

SEQ ID NO: 32663 - DNA, 30 bp, Artificial Sequence
  Synthetic oligonucleotide
caccaccgtgaagaatgtgggcatcgatcc

SEQ ID NO: 32664 - DNA, 30 bp, Artificial Sequence
  Synthetic oligonucleotide
ctaaccaaggtaaagaggtgattgtgatcc

SEQ ID NO: 32665 - DNA, 30 bp, Artificial Sequence
  Synthetic oligonucleotide
cggtgaggaacgagtcgttgccagcactcc

SEQ ID NO: 32666 - DNA, 30 bp, Artificial Sequence
  Synthetic oligonucleotide
gcctcaacaaacacgtggagcatcaagtcc

SEQ ID NO: 32667 - DNA, 30 bp, Artificial Sequence
  Synthetic oligonucleotide
agcaatggttgcgtaatcttggtacagtcc

SEQ ID NO: 32668 - DNA, 30 bp, Artificial Sequence
  Synthetic oligonucleotide
gaaaaagagaatagtgcaagtccagagtcc

SEQ ID NO: 32669 - DNA, 30 bp, Artificial Sequence
  Synthetic oligonucleotide
acgcgggggtaatctatgagtcaaacgtcc

SEQ ID NO: 32670 - DNA, 30 bp, Artificial Sequence
  Synthetic oligonucleotide
tcgtccgatcagatttcgtaagccgtgtcc

SEQ ID NO: 32671 - DNA, 40 bp, Artificial Sequence
  Synthetic oligonucleotide
cgtctctgcccagattcccgattatagaatacaccgttcc

SEQ ID NO: 32672 - DNA, 30 bp, Artificial Sequence
  Synthetic oligonucleotide
gggatcgtccaccggcggatgagtgaaagc

SEQ ID NO: 32673 - DNA, 30 bp, Artificial Sequence
  Synthetic oligonucleotide
aagccagtgttagctagccgatcctaaagc

SEQ ID NO: 32674 - DNA, 30 bp, Artificial Sequence
  Synthetic oligonucleotide
ccgctacggaaagctagtggaatgtaaagc

SEQ ID NO: 32675 - DNA, 30 bp, Artificial Sequence
  Synthetic oligonucleotide
aacggacccgagggcattaagaacacaagc

SEQ ID NO: 32676 - DNA, 30 bp, Artificial Sequence
  Synthetic oligonucleotide
acaagaacgcgaacatacgatagcacaagc

SEQ ID NO: 32677 - DNA, 30 bp, Artificial Sequence
  Synthetic oligonucleotide
cgatgtgcgagtcaacgtccggagacaagc

SEQ ID NO: 32678 - DNA, 30 bp, Artificial Sequence
  Synthetic oligonucleotide
agggaaccatatccattactatccagaagc

SEQ ID NO: 32679 - DNA, 30 bp, Artificial Sequence
  Synthetic oligonucleotide
cgacagaagggggcaagcaggcagctaagc

SEQ ID NO: 32680 - DNA, 30 bp, Artificial Sequence
  Synthetic oligonucleotide
agcgactttccctcatcgaaagaagtaagc

SEQ ID NO: 32681 - DNA, 30 bp, Artificial Sequence
  Synthetic oligonucleotide
acatgcccaggaggtatggccgttaacagc

SEQ ID NO: 32682 - DNA, 30 bp, Artificial Sequence
  Synthetic oligonucleotide
tgagatcgacgatctaaacttccgcacagc

SEQ ID NO: 32683 - DNA, 30 bp, Artificial Sequence
  Synthetic oligonucleotide
cgaggagcgaacgtcgaaccacccaccagc

SEQ ID NO: 32684 - DNA, 30 bp, Artificial Sequence
  Synthetic oligonucleotide
ggcatggaagaccaagagaagggcgccagc

SEQ ID NO: 32685 - DNA, 30 bp, Artificial Sequence
  Synthetic oligonucleotide
cgtaaattcaatcggttcaaggactccagc

SEQ ID NO: 32686 - DNA, 30 bp, Artificial Sequence
  Synthetic oligonucleotide
tcggaaagaacaccatcgcgcaaatgcagc

SEQ ID NO: 32687 - DNA, 30 bp, Artificial Sequence
  Synthetic oligonucleotide
aggggtgcgacaagttcgcccgatatcagc

SEQ ID NO: 32688 - DNA, 30 bp, Artificial Sequence
  Synthetic oligonucleotide
ccgggcctgtagaaaggcagaggtgtcagc

SEQ ID NO: 32689 - DNA, 30 bp, Artificial Sequence
  Synthetic oligonucleotide
caaatatggaccaacggcaacggattcagc

SEQ ID NO: 32690 - DNA, 30 bp, Artificial Sequence
  Synthetic oligonucleotide
atgaaacttacgggtgggtgtgagttcagc

SEQ ID NO: 32691 - DNA, 30 bp, Artificial Sequence
  Synthetic oligonucleotide
tcacgtattagaagaaaatggaccaagagc

SEQ ID NO: 32692 - DNA, 30 bp, Artificial Sequence
  Synthetic oligonucleotide
agtaagccgtagaccaactcgaaccagagc

SEQ ID NO: 32693 - DNA, 30 bp, Artificial Sequence
  Synthetic oligonucleotide
acacagtggacagaaactacacattagagc

SEQ ID NO: 32694 - DNA, 30 bp, Artificial Sequence
  Synthetic oligonucleotide
cactggcatgtcaatcatgatctaactagc

SEQ ID NO: 32695 - DNA, 30 bp, Artificial Sequence
  Synthetic oligonucleotide
ggacactattgagccacactacacagtagc

SEQ ID NO: 32696 - DNA, 30 bp, Artificial Sequence
  Synthetic oligonucleotide
gagatacgtaaagaacgccaggccggtagc

SEQ ID NO: 32697 - DNA, 30 bp, Artificial Sequence
  Synthetic oligonucleotide
aagggattaaaaggggccgaccaatgtagc

SEQ ID NO: 32698 - DNA, 30 bp, Artificial Sequence
  Synthetic oligonucleotide
attaagataccggagtgtacggcaattagc

SEQ ID NO: 32699 - DNA, 30 bp, Artificial Sequence
  Synthetic oligonucleotide
gggacatagaccgaaaatgccattacacgc

SEQ ID NO: 32700 - DNA, 30 bp, Artificial Sequence
  Synthetic oligonucleotide
cgcgagaaagacttacggcggtgctcccgc

SEQ ID NO: 32701 - DNA, 30 bp, Artificial Sequence
  Synthetic oligonucleotide
aaggaaagactaacaaaaaccactctccgc

SEQ ID NO: 32702 - DNA, 30 bp, Artificial Sequence
  Synthetic oligonucleotide
ggactagtcgataggcggcaaagtcagcgc

SEQ ID NO: 32703 - DNA, 30 bp, Artificial Sequence
  Synthetic oligonucleotide
agaggcactcggaaaatgtccagaacgcgc

SEQ ID NO: 32704 - DNA, 30 bp, Artificial Sequence
  Synthetic oligonucleotide
cgtgaccaagctccgaggtacactccgcgc

SEQ ID NO: 32705 - DNA, 30 bp, Artificial Sequence
  Synthetic oligonucleotide
tcgaaggggagaggagtcaacagactgcgc

SEQ ID NO: 32706 - DNA, 30 bp, Artificial Sequence
  Synthetic oligonucleotide
tcggacggagctagatgaacccctctgcgc

SEQ ID NO: 32707 - DNA, 30 bp, Artificial Sequence
  Synthetic oligonucleotide
agggttaggcgctaccaagaattctctcgc

SEQ ID NO: 32708 - DNA, 30 bp, Artificial Sequence
  Synthetic oligonucleotide
aaccgtcggagagtagggaaaccatgtcgc

SEQ ID NO: 32709 - DNA, 30 bp, Artificial Sequence
  Synthetic oligonucleotide
aggtgagatccgaaagcattcgggtgtcgc

SEQ ID NO: 32710 - DNA, 30 bp, Artificial Sequence
  Synthetic oligonucleotide
agtgggcctactacaaggatatgatttcgc

SEQ ID NO: 32711 - DNA, 30 bp, Artificial Sequence
  Synthetic oligonucleotide
agtgcaggaaaacggcgcgtgtcacaaggc

SEQ ID NO: 32712 - DNA, 30 bp, Artificial Sequence
  Synthetic oligonucleotide
acaaaaggaagggaaatttcacggcaaggc

SEQ ID NO: 32713 - DNA, 30 bp, Artificial Sequence
  Synthetic oligonucleotide
gagttgtgaaaagccagagtcaagacaggc

SEQ ID NO: 32714 - DNA, 30 bp, Artificial Sequence
  Synthetic oligonucleotide
aaggggactacagatgtcaccgctgcaggc

SEQ ID NO: 32715 - DNA, 30 bp, Artificial Sequence
  Synthetic oligonucleotide
acggtggggtagatgttgttaaagataggc

SEQ ID NO: 32716 - DNA, 30 bp, Artificial Sequence
  Synthetic oligonucleotide
gacgactcgcaaatgatgagtggattaggc

SEQ ID NO: 32717 - DNA, 30 bp, Artificial Sequence
  Synthetic oligonucleotide
acgcagtaattaccccgagtagagtacggc

SEQ ID NO: 32718 - DNA, 30 bp, Artificial Sequence
  Synthetic oligonucleotide
tggaaaacgaggaatggtgcgccgcccggc

SEQ ID NO: 32719 - DNA, 30 bp, Artificial Sequence
  Synthetic oligonucleotide
cacgctggaaatatgttacggagtgccggc

SEQ ID NO: 32720 - DNA, 30 bp, Artificial Sequence
  Synthetic oligonucleotide
ggacgtggggtcactatcacagtaagcggc

SEQ ID NO: 32721 - DNA, 30 bp, Artificial Sequence
  Synthetic oligonucleotide
tagatagacctccgactcaaatatcgcggc

SEQ ID NO: 32722 - DNA, 30 bp, Artificial Sequence
  Synthetic oligonucleotide
aagcgacacaacatcatcgttattggcggc

SEQ ID NO: 32723 - DNA, 30 bp, Artificial Sequence
  Synthetic oligonucleotide
acacgagggtacgggctacttctaatcggc

SEQ ID NO: 32724 - DNA, 30 bp, Artificial Sequence
  Synthetic oligonucleotide
ggacgaccattccgaagattgcaagtcggc

SEQ ID NO: 32725 - DNA, 30 bp, Artificial Sequence
  Synthetic oligonucleotide
cgatctctcgagaaacgtataaccgtcggc

SEQ ID NO: 32726 - DNA, 30 bp, Artificial Sequence
  Synthetic oligonucleotide
gcagagtaaaagagaaatcgagtggtcggc

SEQ ID NO: 32727 - DNA, 30 bp, Artificial Sequence
  Synthetic oligonucleotide
aggaaagttagaaggttaaggcttaagggc

SEQ ID NO: 32728 - DNA, 30 bp, Artificial Sequence
  Synthetic oligonucleotide
atgagcctaaggttgattagaaagcagggc

SEQ ID NO: 32729 - DNA, 30 bp, Artificial Sequence
  Synthetic oligonucleotide
aggttaagtttgtcgattcgaagagagggc

SEQ ID NO: 32730 - DNA, 30 bp, Artificial Sequence
  Synthetic oligonucleotide
atgagtaaagggaagcgccatccagcgggc

SEQ ID NO: 32731 - DNA, 30 bp, Artificial Sequence
  Synthetic oligonucleotide
tacgaggaggcgcctctaccaagcctgggc

SEQ ID NO: 32732 - DNA, 30 bp, Artificial Sequence
  Synthetic oligonucleotide
caagagtgtattaggcgtattccgctgggc

SEQ ID NO: 32733 - DNA, 30 bp, Artificial Sequence
  Synthetic oligonucleotide
cgatcgtcgcgtatataatctcggtgtggc

SEQ ID NO: 32734 - DNA, 30 bp, Artificial Sequence
  Synthetic oligonucleotide
ggccgaagatagcaaagtgtgagaccatgc

SEQ ID NO: 32735 - DNA, 30 bp, Artificial Sequence
  Synthetic oligonucleotide
accgagtgtatgggaggagtaccagcatgc

SEQ ID NO: 32736 - DNA, 30 bp, Artificial Sequence
  Synthetic oligonucleotide
ggtcgcaaagggcgataccctacatcatgc

SEQ ID NO: 32737 - DNA, 30 bp, Artificial Sequence
  Synthetic oligonucleotide
agagcgcaaccgggactgctaaataactgc

SEQ ID NO: 32738 - DNA, 30 bp, Artificial Sequence
  Synthetic oligonucleotide
aatgtatcggaaggcataaatggagactgc

SEQ ID NO: 32739 - DNA, 30 bp, Artificial Sequence
  Synthetic oligonucleotide
agggtaagcgtttaaaagtggctggtgtgc

SEQ ID NO: 32740 - DNA, 30 bp, Artificial Sequence
  Synthetic oligonucleotide
aaaggaaactaggagtatcttatcaattgc

SEQ ID NO: 32741 - DNA, 30 bp, Artificial Sequence
  Synthetic oligonucleotide
cgaaagagaggaattcaaacgcgagtttgc

SEQ ID NO: 32742 - DNA, 30 bp, Artificial Sequence
  Synthetic oligonucleotide
atcctaagcgggcaaggagcttggtaaatc

SEQ ID NO: 32743 - DNA, 30 bp, Artificial Sequence
  Synthetic oligonucleotide
agcacgaacagggggggatgcaactcaatc

SEQ ID NO: 32744 - DNA, 30 bp, Artificial Sequence
  Synthetic oligonucleotide
cggggatcccgatagagtatgctacgaatc

SEQ ID NO: 32745 - DNA, 30 bp, Artificial Sequence
  Synthetic oligonucleotide
cgagggaccacaaatctagtccgcaacatc

SEQ ID NO: 32746 - DNA, 30 bp, Artificial Sequence
  Synthetic oligonucleotide
acgaaaaggcgcccaaaacaatactacatc

SEQ ID NO: 32747 - DNA, 30 bp, Artificial Sequence
  Synthetic oligonucleotide
gagcgcggtttaaaaagatttagaagcatc

SEQ ID NO: 32748 - DNA, 30 bp, Artificial Sequence
  Synthetic oligonucleotide
tgcgtgtaggcaagcacagggatgcgcatc

SEQ ID NO: 32749 - DNA, 30 bp, Artificial Sequence
  Synthetic oligonucleotide
tcgcccactccgagacttgaaatcggcatc

SEQ ID NO: 32750 - DNA, 30 bp, Artificial Sequence
  Synthetic oligonucleotide
gcatcgaacggacacggggaaatgctcatc

SEQ ID NO: 32751 - DNA, 30 bp, Artificial Sequence
  Synthetic oligonucleotide
tacgggatgtcacacaacgagtttgagatc

SEQ ID NO: 32752 - DNA, 30 bp, Artificial Sequence
  Synthetic oligonucleotide
cgtaatgctacaccagaacaacattagatc

SEQ ID NO: 32753 - DNA, 30 bp, Artificial Sequence
  Synthetic oligonucleotide
taggacccaaagaccttgaaagctacgatc

SEQ ID NO: 32754 - DNA, 30 bp, Artificial Sequence
  Synthetic oligonucleotide
caagatgggtcataaggcaacactctgatc

SEQ ID NO: 32755 - DNA, 30 bp, Artificial Sequence
  Synthetic oligonucleotide
agcggaaggtgagcagcataggggaatatc

SEQ ID NO: 32756 - DNA, 30 bp, Artificial Sequence
  Synthetic oligonucleotide
agagtcaggatgacaaaggacgataatatc

SEQ ID NO: 32757 - DNA, 30 bp, Artificial Sequence
  Synthetic oligonucleotide
gtgcattggaagtggaacgccaagactatc

SEQ ID NO: 32758 - DNA, 30 bp, Artificial Sequence
  Synthetic oligonucleotide
acagtgaaacaggggatgcgcatggttatc

SEQ ID NO: 32759 - DNA, 30 bp, Artificial Sequence
  Synthetic oligonucleotide
aacgaaagcgcataataaagggataaactc

SEQ ID NO: 32760 - DNA, 30 bp, Artificial Sequence
  Synthetic oligonucleotide
tagggcaaaacgttttttccagagcaactc

SEQ ID NO: 32761 - DNA, 30 bp, Artificial Sequence
  Synthetic oligonucleotide
ctgaccgagcgattcaagcaggagcaactc

SEQ ID NO: 32762 - DNA, 30 bp, Artificial Sequence
  Synthetic oligonucleotide
cgtaggcggagcacggatgatcaagcactc

SEQ ID NO: 32763 - DNA, 30 bp, Artificial Sequence
  Synthetic oligonucleotide
aagaaaatggaatcgatgttaccgggactc

SEQ ID NO: 32764 - DNA, 30 bp, Artificial Sequence
  Synthetic oligonucleotide
cgcgactcgccaataggcaagactgtactc

SEQ ID NO: 32765 - DNA, 30 bp, Artificial Sequence
  Synthetic oligonucleotide
acatggaccggcaacttgattggatacctc

SEQ ID NO: 32766 - DNA, 30 bp, Artificial Sequence
  Synthetic oligonucleotide
ggggtagacacgtgcttgaacgaaggcctc

SEQ ID NO: 32767 - DNA, 30 bp, Artificial Sequence
  Synthetic oligonucleotide
acgggcatagggtcgacataatggtgcctc

SEQ ID NO: 32768 - DNA, 30 bp, Artificial Sequence
  Synthetic oligonucleotide
cggggcaacacgacatcaatcgggctcctc

SEQ ID NO: 32769 - DNA, 30 bp, Artificial Sequence
  Synthetic oligonucleotide
gcgagatactgatagcacaactgtgagctc

SEQ ID NO: 32770 - DNA, 30 bp, Artificial Sequence
  Synthetic oligonucleotide
atggcacacatattaaaggaaatgcttctc

SEQ ID NO: 32771 - DNA, 30 bp, Artificial Sequence
  Synthetic oligonucleotide
cttggacaaagcaccataacagtcaaagtc

SEQ ID NO: 32772 - DNA, 30 bp, Artificial Sequence
  Synthetic oligonucleotide
ggttgaatggctccactgctaacgaaagtc

SEQ ID NO: 32773 - DNA, 30 bp, Artificial Sequence
  Synthetic oligonucleotide
tagttctaaggttcatctcgcgctcaagtc

SEQ ID NO: 32774 - DNA, 30 bp, Artificial Sequence
  Synthetic oligonucleotide
catggaaatcatagcagcaaattaacagtc

SEQ ID NO: 32775 - DNA, 30 bp, Artificial Sequence
  Synthetic oligonucleotide
cgctattgaattgggactcgagagacagtc

SEQ ID NO: 32776 - DNA, 30 bp, Artificial Sequence
  Synthetic oligonucleotide
cgagcataggggttcaaaggaaggagagtc

SEQ ID NO: 32777 - DNA, 30 bp, Artificial Sequence
  Synthetic oligonucleotide
catggtggagtacggactcgtggatgagtc

SEQ ID NO: 32778 - DNA, 30 bp, Artificial Sequence
  Synthetic oligonucleotide
agaccattgagtgtaggcataagcttagtc

SEQ ID NO: 32779 - DNA, 30 bp, Artificial Sequence
  Synthetic oligonucleotide
atactcaagcgcgataataaggcccacgtc

SEQ ID NO: 32780 - DNA, 30 bp, Artificial Sequence
  Synthetic oligonucleotide
ctcaggattgaggacaaggcataagacgtc

SEQ ID NO: 32781 - DNA, 30 bp, Artificial Sequence
  Synthetic oligonucleotide
agggataacgattataaaaacagttacgtc

SEQ ID NO: 32782 - DNA, 30 bp, Artificial Sequence
  Synthetic oligonucleotide
tcgtcatactctcatgcttaaaccaccgtc

SEQ ID NO: 32783 - DNA, 30 bp, Artificial Sequence
  Synthetic oligonucleotide
atcagcactaagatcagtgtcgtatccgtc

SEQ ID NO: 32784 - DNA, 30 bp, Artificial Sequence
  Synthetic oligonucleotide
cgaacgggcaatgggttagtcgagtccgtc

SEQ ID NO: 32785 - DNA, 30 bp, Artificial Sequence
  Synthetic oligonucleotide
cgtgcaaagaagccacttaccattagcgtc

SEQ ID NO: 32786 - DNA, 30 bp, Artificial Sequence
  Synthetic oligonucleotide
agaaacattctgtaaaagggaacaatcgtc

SEQ ID NO: 32787 - DNA, 30 bp, Artificial Sequence
  Synthetic oligonucleotide
tcgcgtggcggaacgttgacatctaaggtc

SEQ ID NO: 32788 - DNA, 30 bp, Artificial Sequence
  Synthetic oligonucleotide
cgctagggacgggtcttgataatagaggtc

SEQ ID NO: 32789 - DNA, 30 bp, Artificial Sequence
  Synthetic oligonucleotide
ctgcaacatagataagtggtaaatgcggtc

SEQ ID NO: 32790 - DNA, 30 bp, Artificial Sequence
  Synthetic oligonucleotide
gggcatggagctcatgaaagccactcggtc

SEQ ID NO: 32791 - DNA, 30 bp, Artificial Sequence
  Synthetic oligonucleotide
tcggaacacgtggattacaatgaatatgtc

SEQ ID NO: 32792 - DNA, 30 bp, Artificial Sequence
  Synthetic oligonucleotide
ctcacagggtcgtgaactagggactatgtc

SEQ ID NO: 32793 - DNA, 30 bp, Artificial Sequence
  Synthetic oligonucleotide
tgagacaggcgaatgaacgttgagactgtc

SEQ ID NO: 32794 - DNA, 30 bp, Artificial Sequence
  Synthetic oligonucleotide
atgtgtagtctaagcggagatatgcctgtc

SEQ ID NO: 32795 - DNA, 30 bp, Artificial Sequence
  Synthetic oligonucleotide
ctagagtgcggagagccgtgacgtcaattc

SEQ ID NO: 32796 - DNA, 30 bp, Artificial Sequence
  Synthetic oligonucleotide
aggagaccatgtgcgctagagattgcattc

SEQ ID NO: 32797 - DNA, 30 bp, Artificial Sequence
  Synthetic oligonucleotide
ggtggggatccgaaatattccagtaagttc

SEQ ID NO: 32798 - DNA, 30 bp, Artificial Sequence
  Synthetic oligonucleotide
ccatggaaataagggatgttatgagtgttc

SEQ ID NO: 32799 - DNA, 30 bp, Artificial Sequence
  Synthetic oligonucleotide
acgataaaaggttgagggcttagctgtttc

SEQ ID NO: 32800 - DNA, 30 bp, Artificial Sequence
  Synthetic oligonucleotide
cggaccgaagagaaccaaatgcattgtttc

SEQ ID NO: 32801 - DNA, 30 bp, Artificial Sequence
  Synthetic oligonucleotide
cgctcatgtaatgttcaggtaccaaaaaag

SEQ ID NO: 32802 - DNA, 30 bp, Artificial Sequence
  Synthetic oligonucleotide
agggtcactcgaaggggcaattaacaaaag

SEQ ID NO: 32803 - DNA, 30 bp, Artificial Sequence
  Synthetic oligonucleotide
ttcgagccagcgtgtacttcggcacaaaag

SEQ ID NO: 32804 - DNA, 30 bp, Artificial Sequence
  Synthetic oligonucleotide
gcaggcttcgttggcctcgagcgggaaaag

SEQ ID NO: 32805 - DNA, 30 bp, Artificial Sequence
  Synthetic oligonucleotide
caagatgtatctacgagtgttggggaaaag

SEQ ID NO: 32806 - DNA, 30 bp, Artificial Sequence
  Synthetic oligonucleotide
ggattggacaaatttgagataatggaaaag

SEQ ID NO: 32807 - DNA, 30 bp, Artificial Sequence
  Synthetic oligonucleotide
cgtcgagacaagctgaacggggggacaaag

SEQ ID NO: 32808 - DNA, 30 bp, Artificial Sequence
  Synthetic oligonucleotide
tcatcgtggagacaaagtcgctgaccaaag

SEQ ID NO: 32809 - DNA, 30 bp, Artificial Sequence
  Synthetic oligonucleotide
tgacgacccgggcaggcgataggtccaaag

SEQ ID NO: 32810 - DNA, 30 bp, Artificial Sequence
  Synthetic oligonucleotide
acggatagaatgaaataaaggtgagcaaag

SEQ ID NO: 32811 - DNA, 30 bp, Artificial Sequence
  Synthetic oligonucleotide
cgagccgaggataagtgaaacgtagcaaag

SEQ ID NO: 32812 - DNA, 30 bp, Artificial Sequence
  Synthetic oligonucleotide
cccaacatcccatgcgtcattaaggcaaag

SEQ ID NO: 32813 - DNA, 30 bp, Artificial Sequence
  Synthetic oligonucleotide
gccaagaaacgctgagtgggcgaatcaaag

SEQ ID NO: 32814 - DNA, 30 bp, Artificial Sequence
  Synthetic oligonucleotide
tctacacgggcgtgagcacctaggggaaag

SEQ ID NO: 32815 - DNA, 30 bp, Artificial Sequence
  Synthetic oligonucleotide
atgcaaacaggccgcttcaattggggaaag

SEQ ID NO: 32816 - DNA, 30 bp, Artificial Sequence
  Synthetic oligonucleotide
acacagtgtagattgaagtacgtgtgaaag

SEQ ID NO: 32817 - DNA, 30 bp, Artificial Sequence
  Synthetic oligonucleotide
tgcatcagggcaaacaacacccattgaaag

SEQ ID NO: 32818 - DNA, 30 bp, Artificial Sequence
  Synthetic oligonucleotide
gctgcggattggctacagcaagggataaag

SEQ ID NO: 32819 - DNA, 30 bp, Artificial Sequence
  Synthetic oligonucleotide
gcaatacgatcccggagaaatgctctaaag

SEQ ID NO: 32820 - DNA, 30 bp, Artificial Sequence
  Synthetic oligonucleotide
cgccgctcaagggacgttgggatattaaag

SEQ ID NO: 32821 - DNA, 30 bp, Artificial Sequence
  Synthetic oligonucleotide
gcggagtgtgttctgccgactgaaaacaag

SEQ ID NO: 32822 - DNA, 30 bp, Artificial Sequence
  Synthetic oligonucleotide
agttcaactttggcgcgaacaacgaacaag

SEQ ID NO: 32823 - DNA, 30 bp, Artificial Sequence
  Synthetic oligonucleotide
tgcgaaacgggagtcttactattgaacaag

SEQ ID NO: 32824 - DNA, 30 bp, Artificial Sequence
  Synthetic oligonucleotide
cgtggggcccctacacctagtcgtaacaag

SEQ ID NO: 32825 - DNA, 30 bp, Artificial Sequence
  Synthetic oligonucleotide
ccgaatattgagaaaggcatcgcacacaag

SEQ ID NO: 32826 - DNA, 30 bp, Artificial Sequence
  Synthetic oligonucleotide
gcgagcgtacgtgggttggtcgcgtacaag

SEQ ID NO: 32827 - DNA, 30 bp, Artificial Sequence
  Synthetic oligonucleotide
caatacggcacaataacaggcccgcccaag

SEQ ID NO: 32828 - DNA, 30 bp, Artificial Sequence
  Synthetic oligonucleotide
acccgtggactggcaaaccggcgtcccaag

SEQ ID NO: 32829 - DNA, 30 bp, Artificial Sequence
  Synthetic oligonucleotide
gcgtggccagctaagtacaccaggtccaag

SEQ ID NO: 32830 - DNA, 30 bp, Artificial Sequence
  Synthetic oligonucleotide
cccgagaaatataaagaacagaacagcaag

SEQ ID NO: 32831 - DNA, 30 bp, Artificial Sequence
  Synthetic oligonucleotide
agaattcagcggaagaacgtgtcaggcaag

SEQ ID NO: 32832 - DNA, 30 bp, Artificial Sequence
  Synthetic oligonucleotide
gggtcaccgctacataaaaagcggggcaag

SEQ ID NO: 32833 - DNA, 30 bp, Artificial Sequence
  Synthetic oligonucleotide
tgaagctacgggctaatccggaaatgcaag

SEQ ID NO: 32834 - DNA, 30 bp, Artificial Sequence
  Synthetic oligonucleotide
gcatgcgcacgacgtgcaaaccagtgcaag

SEQ ID NO: 32835 - DNA, 30 bp, Artificial Sequence
  Synthetic oligonucleotide
acttagttatacaaaacagggaggtgcaag

SEQ ID NO: 32836 - DNA, 30 bp, Artificial Sequence
  Synthetic oligonucleotide
aagcaacggaagtacataaacatttgcaag

SEQ ID NO: 32837 - DNA, 30 bp, Artificial Sequence
  Synthetic oligonucleotide
tcgtgggttgggatattggagcccatcaag

SEQ ID NO: 32838 - DNA, 30 bp, Artificial Sequence
  Synthetic oligonucleotide
tgcgcaaaacgagatgggaagcccctcaag

SEQ ID NO: 32839 - DNA, 30 bp, Artificial Sequence
  Synthetic oligonucleotide
tctatgaagcaaggggacaaccatgtcaag

SEQ ID NO: 32840 - DNA, 30 bp, Artificial Sequence
  Synthetic oligonucleotide
gcgaagtgtgcactacaattcctgttcaag

SEQ ID NO: 32841 - DNA, 30 bp, Artificial Sequence
  Synthetic oligonucleotide
ctgaatattcaacaaagtatgtcgaagaag

SEQ ID NO: 32842 - DNA, 30 bp, Artificial Sequence
  Synthetic oligonucleotide
cgtatccgactcagtgcaaatgcagagaag

SEQ ID NO: 32843 - DNA, 30 bp, Artificial Sequence
  Synthetic oligonucleotide
tgagaggccctcgagtatgtcaacgagaag

SEQ ID NO: 32844 - DNA, 30 bp, Artificial Sequence
  Synthetic oligonucleotide
gctgtcaggaagccgagatcctcaacgaag

SEQ ID NO: 32845 - DNA, 30 bp, Artificial Sequence
  Synthetic oligonucleotide
gctagcacgggactgtaggctaccacgaag

SEQ ID NO: 32846 - DNA, 30 bp, Artificial Sequence
  Synthetic oligonucleotide
acgaaggaaagagagggtgggttgccgaag

SEQ ID NO: 32847 - DNA, 30 bp, Artificial Sequence
  Synthetic oligonucleotide
ggaggtgggacgagatccacccccgcgaag

SEQ ID NO: 32848 - DNA, 30 bp, Artificial Sequence
  Synthetic oligonucleotide
gggccgttagcgtgtacaatcatttcgaag

SEQ ID NO: 32849 - DNA, 30 bp, Artificial Sequence
  Synthetic oligonucleotide
acattgaggttctctgagacgagtaggaag

SEQ ID NO: 32850 - DNA, 30 bp, Artificial Sequence
  Synthetic oligonucleotide
aagacccattgaatacgtcgagggcggaag

SEQ ID NO: 32851 - DNA, 30 bp, Artificial Sequence
  Synthetic oligonucleotide
gctagtagcgggaaagcaacgttttggaag

SEQ ID NO: 32852 - DNA, 30 bp, Artificial Sequence
  Synthetic oligonucleotide
gtataagttgctccgaaaagaaaaatgaag

SEQ ID NO: 32853 - DNA, 30 bp, Artificial Sequence
  Synthetic oligonucleotide
agtcgagatcaacacgttctaggagtgaag

SEQ ID NO: 32854 - DNA, 30 bp, Artificial Sequence
  Synthetic oligonucleotide
cgcttggtctgctatgaacatacggtgaag

SEQ ID NO: 32855 - DNA, 30 bp, Artificial Sequence
  Synthetic oligonucleotide
aacgagtagtactgaacctagtgggtgaag

SEQ ID NO: 32856 - DNA, 30 bp, Artificial Sequence
  Synthetic oligonucleotide
gaaaggcttgataaccgcccagacttgaag

SEQ ID NO: 32857 - DNA, 30 bp, Artificial Sequence
  Synthetic oligonucleotide
tagcgcaggaaattgtatctggcgttgaag

SEQ ID NO: 32858 - DNA, 30 bp, Artificial Sequence
  Synthetic oligonucleotide
agggatcgtgtggttatatggcgaaataag

SEQ ID NO: 32859 - DNA, 30 bp, Artificial Sequence
  Synthetic oligonucleotide
atgtcaacaaacaccttaaagttcaataag

SEQ ID NO: 32860 - DNA, 30 bp, Artificial Sequence
  Synthetic oligonucleotide
gtggcgcctgaacagagttatatgaataag

SEQ ID NO: 32861 - DNA, 30 bp, Artificial Sequence
  Synthetic oligonucleotide
gtcagccaccgccatctacaacgacataag

SEQ ID NO: 32862 - DNA, 30 bp, Artificial Sequence
  Synthetic oligonucleotide
tatagatacgatacactaacaacgactaag

SEQ ID NO: 32863 - DNA, 30 bp, Artificial Sequence
  Synthetic oligonucleotide
tcgggaactatcgcgcaggatcgacgtaag

SEQ ID NO: 32864 - DNA, 30 bp, Artificial Sequence
  Synthetic oligonucleotide
atatgggtaacatgggtagaacagcgtaag

SEQ ID NO: 32865 - DNA, 30 bp, Artificial Sequence
  Synthetic oligonucleotide
acgaccctataattgcactcggtctgtaag

SEQ ID NO: 32866 - DNA, 30 bp, Artificial Sequence
  Synthetic oligonucleotide
ccgcgggcaccttaaactcatggaaaacag

SEQ ID NO: 32867 - DNA, 30 bp, Artificial Sequence
  Synthetic oligonucleotide
atggcgtaaacatctatgtaggccaaacag

SEQ ID NO: 32868 - DNA, 30 bp, Artificial Sequence
  Synthetic oligonucleotide
atgagtgcatatgcgacagccgactaacag

SEQ ID NO: 32869 - DNA, 30 bp, Artificial Sequence
  Synthetic oligonucleotide
acttgtacgtgatatgacacgacttaacag

SEQ ID NO: 32870 - DNA, 30 bp, Artificial Sequence
  Synthetic oligonucleotide
gatccgtggcaagggggagcagaaacacag

SEQ ID NO: 32871 - DNA, 30 bp, Artificial Sequence
  Synthetic oligonucleotide
atcataggtaatgcccaaaggtacacacag

SEQ ID NO: 32872 - DNA, 30 bp, Artificial Sequence
  Synthetic oligonucleotide
gttgtaagaacgaaagggctcagtacacag

SEQ ID NO: 32873 - DNA, 31 bp, Artificial Sequence
  Synthetic oligonucleotide
tcaaatagctaccgcacagttgaggagacag

SEQ ID NO: 32874 - DNA, 30 bp, Artificial Sequence
  Synthetic oligonucleotide
aacaaacgcggacagtaatgttgtagacag

SEQ ID NO: 32875 - DNA, 30 bp, Artificial Sequence
  Synthetic oligonucleotide
gcgcgacaaagggctcgcccaagagtacag

SEQ ID NO: 32876 - DNA, 30 bp, Artificial Sequence
  Synthetic oligonucleotide
gtccgaatcgcgaaaagcgaccaattacag

SEQ ID NO: 32877 - DNA, 30 bp, Artificial Sequence
  Synthetic oligonucleotide
ccgagccaagaaccgcacgcgaaaaaccag

SEQ ID NO: 32878 - DNA, 30 bp, Artificial Sequence
  Synthetic oligonucleotide
aagtacgacgtcaaacataggatggaccag

SEQ ID NO: 32879 - DNA, 30 bp, Artificial Sequence
  Synthetic oligonucleotide
gtaagaagtaaggcctgtatcgccgcccag

SEQ ID NO: 32880 - DNA, 30 bp, Artificial Sequence
  Synthetic oligonucleotide
ggataatgatactaagggcgtaagtgccag

SEQ ID NO: 32881 - DNA, 30 bp, Artificial Sequence
  Synthetic oligonucleotide
gtcacgagactatcgggtgagttgatccag

SEQ ID NO: 32882 - DNA, 30 bp, Artificial Sequence
  Synthetic oligonucleotide
gcgaggtcacacggtaaatcgaggctccag

SEQ ID NO: 32883 - DNA, 30 bp, Artificial Sequence
  Synthetic oligonucleotide
ggtagtcacagatatcagataatcgtccag

SEQ ID NO: 32884 - DNA, 30 bp, Artificial Sequence
  Synthetic oligonucleotide
aggcgcgcatacgacgggcttgggttccag

SEQ ID NO: 32885 - DNA, 30 bp, Artificial Sequence
  Synthetic oligonucleotide
gggcgatagaagttcaatctggcccagcag

SEQ ID NO: 32886 - DNA, 30 bp, Artificial Sequence
  Synthetic oligonucleotide
ccactcagcaagaatatggccaggcagcag

SEQ ID NO: 32887 - DNA, 30 bp, Artificial Sequence
  Synthetic oligonucleotide
cggagggccggcagggaggataaagagcag

SEQ ID NO: 32888 - DNA, 30 bp, Artificial Sequence
  Synthetic oligonucleotide
acgcgtccagctgggctgcacacagagcag

SEQ ID NO: 32889 - DNA, 30 bp, Artificial Sequence
  Synthetic oligonucleotide
tcgaaggtatccacaccgtgatggtagcag

SEQ ID NO: 32890 - DNA, 30 bp, Artificial Sequence
  Synthetic oligonucleotide
cgagattgtgaaggtgacttatggtagcag

SEQ ID NO: 32891 - DNA, 30 bp, Artificial Sequence
  Synthetic oligonucleotide
tatgccgccaacaacttcaagagaacgcag

SEQ ID NO: 32892 - DNA, 30 bp, Artificial Sequence
  Synthetic oligonucleotide
catgtgcaaggagagcgcggtggggcgcag

SEQ ID NO: 32893 - DNA, 30 bp, Artificial Sequence
  Synthetic oligonucleotide
ttcgtggagacggacaaccgaaccaggcag

SEQ ID NO: 32894 - DNA, 29 bp, Artificial Sequence
  Synthetic oligonucleotide
gcggtatctctagtgcgggtaataggcag

SEQ ID NO: 32895 - DNA, 30 bp, Artificial Sequence
  Synthetic oligonucleotide
ctaaatgcggctgagcaatgtagtaggcag

SEQ ID NO: 32896 - DNA, 30 bp, Artificial Sequence
  Synthetic oligonucleotide
catagaggttagctcggaaacgcacggcag

SEQ ID NO: 32897 - DNA, 30 bp, Artificial Sequence
  Synthetic oligonucleotide
tcaaagccacactctgatcgccgttggcag

SEQ ID NO: 32898 - DNA, 30 bp, Artificial Sequence
  Synthetic oligonucleotide
aacaatgcggatccgggattgctcctgcag

SEQ ID NO: 32899 - DNA, 30 bp, Artificial Sequence
  Synthetic oligonucleotide
tcacggttcgcgcaaaagcaaggcgtgcag

SEQ ID NO: 32900 - DNA, 30 bp, Artificial Sequence
  Synthetic oligonucleotide
gtgggagtcataagggttccgactcatcag

SEQ ID NO: 32901 - DNA, 30 bp, Artificial Sequence
  Synthetic oligonucleotide
acaacaaacgggtagtcgatatagcctcag

SEQ ID NO: 32902 - DNA, 30 bp, Artificial Sequence
  Synthetic oligonucleotide
acggaggcgattgttggtcgaagggctcag

SEQ ID NO: 32903 - DNA, 30 bp, Artificial Sequence
  Synthetic oligonucleotide
atcaaggggccacgagagtaaactgctcag

SEQ ID NO: 32904 - DNA, 30 bp, Artificial Sequence
  Synthetic oligonucleotide
atgggggccgatacgtatactaatagtcag

SEQ ID NO: 32905 - DNA, 30 bp, Artificial Sequence
  Synthetic oligonucleotide
ccagagacaatgagagatggatatagtcag

SEQ ID NO: 32906 - DNA, 30 bp, Artificial Sequence
  Synthetic oligonucleotide
gtgggtgtcaacagtcctagtaatcgtcag

SEQ ID NO: 32907 - DNA, 30 bp, Artificial Sequence
  Synthetic oligonucleotide
caacggggttcaaaaggttcgtccggtcag

SEQ ID NO: 32908 - DNA, 30 bp, Artificial Sequence
  Synthetic oligonucleotide
atgaagtcgactatttagcaaacgattcag

SEQ ID NO: 32909 - DNA, 30 bp, Artificial Sequence
  Synthetic oligonucleotide
ggggtgaacaggagcaagtctaaacttcag

SEQ ID NO: 32910 - DNA, 30 bp, Artificial Sequence
  Synthetic oligonucleotide
tgaggatagaggccaaattctgtacttcag

SEQ ID NO: 32911 - DNA, 30 bp, Artificial Sequence
  Synthetic oligonucleotide
cgaagaaacggccggcgaggatacaaagag

SEQ ID NO: 32912 - DNA, 30 bp, Artificial Sequence
  Synthetic oligonucleotide
ttgaccacaacactcctgcggaggaaagag

SEQ ID NO: 32913 - DNA, 30 bp, Artificial Sequence
  Synthetic oligonucleotide
gcctaagcaaacaaatagccccataaagag

SEQ ID NO: 32914 - DNA, 30 bp, Artificial Sequence
  Synthetic oligonucleotide
aggtgagactctatagtatcaacccaagag

SEQ ID NO: 32915 - DNA, 30 bp, Artificial Sequence
  Synthetic oligonucleotide
ttaagggtgggaaacggctattgccaagag

SEQ ID NO: 32916 - DNA, 30 bp, Artificial Sequence
  Synthetic oligonucleotide
aatatcccaaaaaggatgggaaggcaagag

SEQ ID NO: 32917 - DNA, 30 bp, Artificial Sequence
  Synthetic oligonucleotide
cgcaaactagatcgcgggaattggcaagag

SEQ ID NO: 32918 - DNA, 30 bp, Artificial Sequence
  Synthetic oligonucleotide
tacggtgaatactgtaccacggatcaagag

SEQ ID NO: 32919 - DNA, 31 bp, Artificial Sequence
  Synthetic oligonucleotide
tacgaaaatagctgcaaaaaccctctaagag

SEQ ID NO: 32920 - DNA, 30 bp, Artificial Sequence
  Synthetic oligonucleotide
cgtatcgctgcgaaacaaatcaaggcagag

SEQ ID NO: 32921 - DNA, 30 bp, Artificial Sequence
  Synthetic oligonucleotide
tcaatgacaatagtggattcacgttcagag

SEQ ID NO: 32922 - DNA, 30 bp, Artificial Sequence
  Synthetic oligonucleotide
tgaattgaccgagtgtggtaaaggcgagag

SEQ ID NO: 32923 - DNA, 30 bp, Artificial Sequence
  Synthetic oligonucleotide
taagaaaatttcggacataatagtcgagag

SEQ ID NO: 32924 - DNA, 30 bp, Artificial Sequence
  Synthetic oligonucleotide
cacgccgaattatactcccaatttcgagag

SEQ ID NO: 32925 - DNA, 30 bp, Artificial Sequence
  Synthetic oligonucleotide
ctcgtcatgtcaaagggcaaccaatgagag

SEQ ID NO: 32926 - DNA, 30 bp, Artificial Sequence
  Synthetic oligonucleotide
cactatcgagccacattgtgacattgagag

SEQ ID NO: 32927 - DNA, 30 bp, Artificial Sequence
  Synthetic oligonucleotide
tcatgtgtgagagatgataccctgctagag

SEQ ID NO: 32928 - DNA, 30 bp, Artificial Sequence
  Synthetic oligonucleotide
agcccagtaagggttacaagttgggtagag

SEQ ID NO: 32929 - DNA, 30 bp, Artificial Sequence
  Synthetic oligonucleotide
cgcggtaagtagagtaccattagcttagag

SEQ ID NO: 32930 - DNA, 30 bp, Artificial Sequence
  Synthetic oligonucleotide
atgcgggttgcgctaaggtcatagaacgag

SEQ ID NO: 32931 - DNA, 30 bp, Artificial Sequence
  Synthetic oligonucleotide
agaagaggccaaagcgagtgtctgaacgag

SEQ ID NO: 32932 - DNA, 30 bp, Artificial Sequence
  Synthetic oligonucleotide
agtaatacttggcaggcatgatctcacgag

SEQ ID NO: 32933 - DNA, 30 bp, Artificial Sequence
  Synthetic oligonucleotide
gcagttacaaggcgtgttcgaagtcacgag

SEQ ID NO: 32934 - DNA, 30 bp, Artificial Sequence
  Synthetic oligonucleotide
gcgaggacaaaacttggggaagtcgacgag

SEQ ID NO: 32935 - DNA, 30 bp, Artificial Sequence
  Synthetic oligonucleotide
gaaaacgagaaatctccccagccggacgag

SEQ ID NO: 32936 - DNA, 30 bp, Artificial Sequence
  Synthetic oligonucleotide
gggtaagtagtcttcgtggagagggacgag

SEQ ID NO: 32937 - DNA, 30 bp, Artificial Sequence
  Synthetic oligonucleotide
ttcgcattatgggggatggattgaaccgag

SEQ ID NO: 32938 - DNA, 30 bp, Artificial Sequence
  Synthetic oligonucleotide
ccattaagatacataacttcgctccccgag

SEQ ID NO: 32939 - DNA, 30 bp, Artificial Sequence
  Synthetic oligonucleotide
tgcctggaggcatccggatcatatcccgag

SEQ ID NO: 32940 - DNA, 30 bp, Artificial Sequence
  Synthetic oligonucleotide
cgaccgcggacaaagaacgtgacggccgag

SEQ ID NO: 32941 - DNA, 30 bp, Artificial Sequence
  Synthetic oligonucleotide
ttcgagcatgatataggatacacatccgag

SEQ ID NO: 32942 - DNA, 30 bp, Artificial Sequence
  Synthetic oligonucleotide
taagtcggtaacacgtattagagatccgag

SEQ ID NO: 32943 - DNA, 30 bp, Artificial Sequence
  Synthetic oligonucleotide
atatgaccagtgataggtatggtacgcgag

SEQ ID NO: 32944 - DNA, 30 bp, Artificial Sequence
  Synthetic oligonucleotide
tgtagtttaagtaaatgcaggctgcgcgag

SEQ ID NO: 32945 - DNA, 30 bp, Artificial Sequence
  Synthetic oligonucleotide
agcgtcaaaaagaaccaaagaatctgcgag

SEQ ID NO: 32946 - DNA, 30 bp, Artificial Sequence
  Synthetic oligonucleotide
tccgtataagaactcatgtcgaggtgcgag

SEQ ID NO: 32947 - DNA, 30 bp, Artificial Sequence
  Synthetic oligonucleotide
gacaagagctcccaagtgtgggaaatcgag

SEQ ID NO: 32948 - DNA, 30 bp, Artificial Sequence
  Synthetic oligonucleotide
gatgagatggatgcccgggcgtaaatcgag

SEQ ID NO: 32949 - DNA, 30 bp, Artificial Sequence
  Synthetic oligonucleotide
cataaatatcgagatgaatattggatcgag

SEQ ID NO: 32950 - DNA, 30 bp, Artificial Sequence
  Synthetic oligonucleotide
taaacgtcgggtcttctgctaaagctcgag

SEQ ID NO: 32951 - DNA, 31 bp, Artificial Sequence
  Synthetic oligonucleotide
aggaaagcactagcggggtccgcggctcgag

SEQ ID NO: 32952 - DNA, 30 bp, Artificial Sequence
  Synthetic oligonucleotide
gcactagcgatgagaataaagaaggtcgag

SEQ ID NO: 32953 - DNA, 30 bp, Artificial Sequence
  Synthetic oligonucleotide
cgttcccttagcggtagtcaaagggtcgag

SEQ ID NO: 32954 - DNA, 30 bp, Artificial Sequence
  Synthetic oligonucleotide
aggtggaattcgagtggtatgaccaaggag

SEQ ID NO: 32955 - DNA, 30 bp, Artificial Sequence
  Synthetic oligonucleotide
taatcggaaatacggttccctagtcaggag

SEQ ID NO: 32956 - DNA, 30 bp, Artificial Sequence
  Synthetic oligonucleotide
aaaggctggtatcgagcaagagcataggag

SEQ ID NO: 32957 - DNA, 30 bp, Artificial Sequence
  Synthetic oligonucleotide
cgtcaacgatcggcaagatgtttataggag

SEQ ID NO: 32958 - DNA, 30 bp, Artificial Sequence
  Synthetic oligonucleotide
ggcgaaccatactacaccgtaaacacggag

SEQ ID NO: 32959 - DNA, 30 bp, Artificial Sequence
  Synthetic oligonucleotide
acgaatgagtccggtgaagagagcacggag

SEQ ID NO: 32960 - DNA, 30 bp, Artificial Sequence
  Synthetic oligonucleotide
gtgagcaccactgacatgatggctacggag

SEQ ID NO: 32961 - DNA, 30 bp, Artificial Sequence
  Synthetic oligonucleotide
agtttgagagtgcgtccgcgcaaaccggag

SEQ ID NO: 32962 - DNA, 30 bp, Artificial Sequence
  Synthetic oligonucleotide
ccctcattgaataaagttgcccgaccggag

SEQ ID NO: 32963 - DNA, 30 bp, Artificial Sequence
  Synthetic oligonucleotide
tcggacaattaatgagtcttcaagccggag

SEQ ID NO: 32964 - DNA, 30 bp, Artificial Sequence
  Synthetic oligonucleotide
cctcagggatctcgatagcgttgtcgggag

SEQ ID NO: 32965 - DNA, 30 bp, Artificial Sequence
  Synthetic oligonucleotide
ggctaatatctgtacaccgccaaaggggag

SEQ ID NO: 32966 - DNA, 30 bp, Artificial Sequence
  Synthetic oligonucleotide
cgtcgatctgcccagaaaaacggaggggag

SEQ ID NO: 32967 - DNA, 30 bp, Artificial Sequence
  Synthetic oligonucleotide
aagaagggggatagcgggagccagatggag

SEQ ID NO: 32968 - DNA, 30 bp, Artificial Sequence
  Synthetic oligonucleotide
gtaacatcaaatggtctagtggtactggag

SEQ ID NO: 32969 - DNA, 30 bp, Artificial Sequence
  Synthetic oligonucleotide
aggtagatcgggctataatatcgcgtggag

SEQ ID NO: 32970 - DNA, 30 bp, Artificial Sequence
  Synthetic oligonucleotide
aagatcgatcaggcgcaaaatacggtggag

SEQ ID NO: 32971 - DNA, 30 bp, Artificial Sequence
  Synthetic oligonucleotide
acttgccatttgtaagagaaggcattggag

SEQ ID NO: 32972 - DNA, 30 bp, Artificial Sequence
  Synthetic oligonucleotide
ggaagaaaaggggctcttactcagttggag

SEQ ID NO: 32973 - DNA, 30 bp, Artificial Sequence
  Synthetic oligonucleotide
tggtccgaaatggtggattaatggaatgag

SEQ ID NO: 32974 - DNA, 30 bp, Artificial Sequence
  Synthetic oligonucleotide
cttaagtacgccggataacctgctaatgag

SEQ ID NO: 32975 - DNA, 30 bp, Artificial Sequence
  Synthetic oligonucleotide
ggctagagagcgtaactttggtaccatgag

SEQ ID NO: 32976 - DNA, 30 bp, Artificial Sequence
  Synthetic oligonucleotide
tccaagagccacgcgatatcacgttatgag

SEQ ID NO: 32977 - DNA, 30 bp, Artificial Sequence
  Synthetic oligonucleotide
cagtgccttacaacgaacgaggggtctgag

SEQ ID NO: 32978 - DNA, 30 bp, Artificial Sequence
  Synthetic oligonucleotide
atggaggtaaaaacctgccctccgcgtgag

SEQ ID NO: 32979 - DNA, 30 bp, Artificial Sequence
  Synthetic oligonucleotide
ccggccggaatgaataacagggatcgtgag

SEQ ID NO: 32980 - DNA, 30 bp, Artificial Sequence
  Synthetic oligonucleotide
tgccgccggccaggatgctgctaaggtgag

SEQ ID NO: 32981 - DNA, 30 bp, Artificial Sequence
  Synthetic oligonucleotide
cacatccatcggtagtaactgttaggtgag

SEQ ID NO: 32982 - DNA, 31 bp, Artificial Sequence
  Synthetic oligonucleotide
aagcggtcaagttcataccaaacgtattgag

SEQ ID NO: 32983 - DNA, 30 bp, Artificial Sequence
  Synthetic oligonucleotide
acgaggcaccccgcctagaccacagttgag

SEQ ID NO: 32984 - DNA, 30 bp, Artificial Sequence
  Synthetic oligonucleotide
ggtagagtaccgacggaatgcggacaatag

SEQ ID NO: 32985 - DNA, 30 bp, Artificial Sequence
  Synthetic oligonucleotide
aagtaactcgcatcgtggcaaacagaatag

SEQ ID NO: 32986 - DNA, 30 bp, Artificial Sequence
  Synthetic oligonucleotide
agatattacgtatactagggcgaataatag

SEQ ID NO: 32987 - DNA, 30 bp, Artificial Sequence
  Synthetic oligonucleotide
gggacgtccactacgaagaagtcataatag

SEQ ID NO: 32988 - DNA, 30 bp, Artificial Sequence
  Synthetic oligonucleotide
taaacgacgataaagggttcagcgtaatag

SEQ ID NO: 32989 - DNA, 30 bp, Artificial Sequence
  Synthetic oligonucleotide
agcgtgcaatgaacatactgatccacatag

SEQ ID NO: 32990 - DNA, 30 bp, Artificial Sequence
  Synthetic oligonucleotide
cagagcagttgcacaaaaaaggagacatag

SEQ ID NO: 32991 - DNA, 30 bp, Artificial Sequence
  Synthetic oligonucleotide
agtaacgcgacgatcacaaaatttacatag

SEQ ID NO: 32992 - DNA, 30 bp, Artificial Sequence
  Synthetic oligonucleotide
gcaggaaagggagatatggtcctcgcatag

SEQ ID NO: 32993 - DNA, 30 bp, Artificial Sequence
  Synthetic oligonucleotide
ctgctagaaaggtaacgagtcgtgtcatag

SEQ ID NO: 32994 - DNA, 30 bp, Artificial Sequence
  Synthetic oligonucleotide
cagtgactaggagcagtagggacaagatag

SEQ ID NO: 32995 - DNA, 30 bp, Artificial Sequence
  Synthetic oligonucleotide
ttggggtgaaaaggtaagggatactgatag

SEQ ID NO: 32996 - DNA, 30 bp, Artificial Sequence
  Synthetic oligonucleotide
agtacggttagatcaggtgccaggtgatag

SEQ ID NO: 32997 - DNA, 30 bp, Artificial Sequence
  Synthetic oligonucleotide
ttgatgaactgcgaaggcatcatttgatag

SEQ ID NO: 32998 - DNA, 30 bp, Artificial Sequence
  Synthetic oligonucleotide
ctggagtcgtaagccacagaggcactatag

SEQ ID NO: 32999 - DNA, 30 bp, Artificial Sequence
  Synthetic oligonucleotide
acgtaagctgtctaatgtctaaacgtatag

SEQ ID NO: 33000 - DNA, 30 bp, Artificial Sequence
  Synthetic oligonucleotide
ggctgagactgtgcgcaaaccacctactag

SEQ ID NO: 33001 - DNA, 30 bp, Artificial Sequence
  Synthetic oligonucleotide
taacggaacaaagcatacttgctctcctag

SEQ ID NO: 33002 - DNA, 29 bp, Artificial Sequence
  Synthetic oligonucleotide
aaagggcattccaaggacacgagagctag

SEQ ID NO: 33003 - DNA, 30 bp, Artificial Sequence
  Synthetic oligonucleotide
ggtgggagatgcggtaaaagtcggatctag

SEQ ID NO: 33004 - DNA, 30 bp, Artificial Sequence
  Synthetic oligonucleotide
acacctaatgcaagtagtttaataaagtag

SEQ ID NO: 33005 - DNA, 30 bp, Artificial Sequence
  Synthetic oligonucleotide
cctacatccagtggagtaacgggggagtag

SEQ ID NO: 33006 - DNA, 30 bp, Artificial Sequence
  Synthetic oligonucleotide
gcgagaggtgcctcataacggtaatagtag

SEQ ID NO: 33007 - DNA, 30 bp, Artificial Sequence
  Synthetic oligonucleotide
tgtagggactcctcgtatctaataacgtag

SEQ ID NO: 33008 - DNA, 30 bp, Artificial Sequence
  Synthetic oligonucleotide
gaaccccgggctcaagagggcgaggcgtag

SEQ ID NO: 33009 - DNA, 30 bp, Artificial Sequence
  Synthetic oligonucleotide
catacagcggaactcgagtggatatcgtag

SEQ ID NO: 33010 - DNA, 30 bp, Artificial Sequence
  Synthetic oligonucleotide
tggaaggattagatttaacagacctcgtag

SEQ ID NO: 33011 - DNA, 31 bp, Artificial Sequence
  Synthetic oligonucleotide
aggaccgattcctagagggggcatcaggtag

SEQ ID NO: 33012 - DNA, 30 bp, Artificial Sequence
  Synthetic oligonucleotide
tcgaatataggcggctagtggaagaggtag

SEQ ID NO: 33013 - DNA, 30 bp, Artificial Sequence
  Synthetic oligonucleotide
cgttcatcggtgtcggtaagattgaggtag

SEQ ID NO: 33014 - DNA, 30 bp, Artificial Sequence
  Synthetic oligonucleotide
gaagattaaaaatcgattgcgcggaattag

SEQ ID NO: 33015 - DNA, 30 bp, Artificial Sequence
  Synthetic oligonucleotide
ggcagggtccatcagcacgacatgcattag

SEQ ID NO: 33016 - DNA, 30 bp, Artificial Sequence
  Synthetic oligonucleotide
tcaggcaggcgcgacaaacaggctcattag

SEQ ID NO: 33017 - DNA, 30 bp, Artificial Sequence
  Synthetic oligonucleotide
ataagcaaacaaacggatcgttacgattag

SEQ ID NO: 33018 - DNA, 30 bp, Artificial Sequence
  Synthetic oligonucleotide
accgaagtgcaacaataaaatgggccttag

SEQ ID NO: 33019 - DNA, 30 bp, Artificial Sequence
  Synthetic oligonucleotide
ataggctgaattatcctaggagtgccttag

SEQ ID NO: 33020 - DNA, 30 bp, Artificial Sequence
  Synthetic oligonucleotide
aggtgattcgaaagaccacgtgacgcttag

SEQ ID NO: 33021 - DNA, 30 bp, Artificial Sequence
  Synthetic oligonucleotide
cagaaaatacccacaacaatactgggttag

SEQ ID NO: 33022 - DNA, 30 bp, Artificial Sequence
  Synthetic oligonucleotide
atcaacaatgagagaaaatagcggtgttag

SEQ ID NO: 33023 - DNA, 30 bp, Artificial Sequence
  Synthetic oligonucleotide
cgagaaatattgatcaaggatgggtgttag

SEQ ID NO: 33024 - DNA, 30 bp, Artificial Sequence
  Synthetic oligonucleotide
ttagcgcccaagtaagttgaagattgttag

SEQ ID NO: 33025 - DNA, 30 bp, Artificial Sequence
  Synthetic oligonucleotide
tggcccagtagataaccaggtgaagtttag

SEQ ID NO: 33026 - DNA, 30 bp, Artificial Sequence
  Synthetic oligonucleotide
tgcacgtagagagagtaggatcctttttag

SEQ ID NO: 33027 - DNA, 30 bp, Artificial Sequence
  Synthetic oligonucleotide
tatgagcgtctcaggataatgcgacaaacg

SEQ ID NO: 33028 - DNA, 30 bp, Artificial Sequence
  Synthetic oligonucleotide
gatcagggaacacagcagtagtgacaaacg

SEQ ID NO: 33029 - DNA, 30 bp, Artificial Sequence
  Synthetic oligonucleotide
caatatcaagtctgaccacggaaagaaacg

SEQ ID NO: 33030 - DNA, 30 bp, Artificial Sequence
  Synthetic oligonucleotide
tcttatcgcgagggaaggaggccttaaacg

SEQ ID NO: 33031 - DNA, 30 bp, Artificial Sequence
  Synthetic oligonucleotide
atgaaactaccaaataagtacaagccaacg

SEQ ID NO: 33032 - DNA, 30 bp, Artificial Sequence
  Synthetic oligonucleotide
ggaggagttcctgggctgaataggccaacg

SEQ ID NO: 33033 - DNA, 30 bp, Artificial Sequence
  Synthetic oligonucleotide
cgtaactgcgcctccagcggaacggcaacg

SEQ ID NO: 33034 - DNA, 30 bp, Artificial Sequence
  Synthetic oligonucleotide
gaggtaaatagaatccgttacgcctcaacg

SEQ ID NO: 33035 - DNA, 30 bp, Artificial Sequence
  Synthetic oligonucleotide
agtggcctaccgtcagaaggagttagaacg

SEQ ID NO: 33036 - DNA, 30 bp, Artificial Sequence
  Synthetic oligonucleotide
cacagcacagcgaaaggggtgtaacgaacg

SEQ ID NO: 33037 - DNA, 30 bp, Artificial Sequence
  Synthetic oligonucleotide
ccggcaacaatactctagctgctgggaacg

SEQ ID NO: 33038 - DNA, 30 bp, Artificial Sequence
  Synthetic oligonucleotide
ggggcgccaacaaagggaccatttggaacg

SEQ ID NO: 33039 - DNA, 30 bp, Artificial Sequence
  Synthetic oligonucleotide
ggtggtaaacctctagtaagtaggataacg

SEQ ID NO: 33040 - DNA, 30 bp, Artificial Sequence
  Synthetic oligonucleotide
ctagaccgcacggcttcgaacaacctaacg

SEQ ID NO: 33041 - DNA, 30 bp, Artificial Sequence
  Synthetic oligonucleotide
tcgggggcgaatatggaaaatgtcgtaacg

SEQ ID NO: 33042 - DNA, 30 bp, Artificial Sequence
  Synthetic oligonucleotide
ggcagccgactgtatggcctaggtttaacg

SEQ ID NO: 33043 - DNA, 30 bp, Artificial Sequence
  Synthetic oligonucleotide
cgtctgggatctagaaaacaatccgccacg

SEQ ID NO: 33044 - DNA, 30 bp, Artificial Sequence
  Synthetic oligonucleotide
gggaactcttctgcacatcgaatcagcacg

SEQ ID NO: 33045 - DNA, 30 bp, Artificial Sequence
  Synthetic oligonucleotide
tgcgggcggaggccataaatcgagagcacg

SEQ ID NO: 33046 - DNA, 30 bp, Artificial Sequence
  Synthetic oligonucleotide
gtacctactaaagaccagggagagcgcacg

SEQ ID NO: 33047 - DNA, 30 bp, Artificial Sequence
  Synthetic oligonucleotide
tgtccatcaagccaaacgaaacttcgcacg

SEQ ID NO: 33048 - DNA, 30 bp, Artificial Sequence
  Synthetic oligonucleotide
acgagaaggtataaggagtaacgtggcacg

SEQ ID NO: 33049 - DNA, 30 bp, Artificial Sequence
  Synthetic oligonucleotide
gtgctggaggagtcgcctgacctcatcacg

SEQ ID NO: 33050 - DNA, 30 bp, Artificial Sequence
  Synthetic oligonucleotide
gaggactggataagcaatgcgtaggtcacg

SEQ ID NO: 33051 - DNA, 30 bp, Artificial Sequence
  Synthetic oligonucleotide
tcataccccgatcagttagaggggaagacg

SEQ ID NO: 33052 - DNA, 30 bp, Artificial Sequence
  Synthetic oligonucleotide
acgggtaactggtttcatgtaacccagacg

SEQ ID NO: 33053 - DNA, 30 bp, Artificial Sequence
  Synthetic oligonucleotide
gtctgcgaaggactaggaccgcaagagacg

SEQ ID NO: 33054 - DNA, 30 bp, Artificial Sequence
  Synthetic oligonucleotide
atgctaaacagacacctgctacgcgagacg

SEQ ID NO: 33055 - DNA, 30 bp, Artificial Sequence
  Synthetic oligonucleotide
agccaaagtcaaaaagtctaggctgagacg

SEQ ID NO: 33056 - DNA, 30 bp, Artificial Sequence
  Synthetic oligonucleotide
ataagggaggtaaaagttggacattagacg

SEQ ID NO: 33057 - DNA, 30 bp, Artificial Sequence
  Synthetic oligonucleotide
gtgaggaggtgggatcgctccgtaacgacg

SEQ ID NO: 33058 - DNA, 30 bp, Artificial Sequence
  Synthetic oligonucleotide
catacactggacagggttaaacacacgacg

SEQ ID NO: 33059 - DNA, 30 bp, Artificial Sequence
  Synthetic oligonucleotide
cgacgaccgacttccctacccacagggacg

SEQ ID NO: 33060 - DNA, 30 bp, Artificial Sequence
  Synthetic oligonucleotide
tctcgaaaaaaaactagacatcgaatgacg

SEQ ID NO: 33061 - DNA, 30 bp, Artificial Sequence
  Synthetic oligonucleotide
cgtaagcgaggcaacaagaaaggggatacg

SEQ ID NO: 33062 - DNA, 30 bp, Artificial Sequence
  Synthetic oligonucleotide
caagcaatgatcaggaatgaatcgtatacg

SEQ ID NO: 33063 - DNA, 30 bp, Artificial Sequence
  Synthetic oligonucleotide
tcgaagccggcactccggaaaaatactacg

SEQ ID NO: 33064 - DNA, 30 bp, Artificial Sequence
  Synthetic oligonucleotide
gttaacataaaccaatggacttaacctacg

SEQ ID NO: 33065 - DNA, 30 bp, Artificial Sequence
  Synthetic oligonucleotide
ggggaaagttacactcagtctaccgctacg

SEQ ID NO: 33066 - DNA, 30 bp, Artificial Sequence
  Synthetic oligonucleotide
cccggcagtgggcagtgcgcgaagagtacg

SEQ ID NO: 33067 - DNA, 30 bp, Artificial Sequence
  Synthetic oligonucleotide
tcgtacgagccgaaccgagctgaatgtacg

SEQ ID NO: 33068 - DNA, 30 bp, Artificial Sequence
  Synthetic oligonucleotide
gtcgagacagtgacatggtacatgattacg

SEQ ID NO: 33069 - DNA, 30 bp, Artificial Sequence
  Synthetic oligonucleotide
ccaccgagataatgtcatactgcgaaaccg

SEQ ID NO: 33070 - DNA, 30 bp, Artificial Sequence
  Synthetic oligonucleotide
atgcagcggccgaggggcgcattacaaccg

SEQ ID NO: 33071 - DNA, 30 bp, Artificial Sequence
  Synthetic oligonucleotide
atctcgtgtaccaagaggataaaccaaccg

SEQ ID NO: 33072 - DNA, 30 bp, Artificial Sequence
  Synthetic oligonucleotide
tgcatcgttagtcaccatcctgcggaaccg

SEQ ID NO: 33073 - DNA, 30 bp, Artificial Sequence
  Synthetic oligonucleotide
aagcgagaaggactcaacatttctgaaccg

SEQ ID NO: 33074 - DNA, 30 bp, Artificial Sequence
  Synthetic oligonucleotide
gctgctggagcacatacccctccaacaccg

SEQ ID NO: 33075 - DNA, 30 bp, Artificial Sequence
  Synthetic oligonucleotide
tgaaatggacgggctaagtgtatcagaccg

SEQ ID NO: 33076 - DNA, 30 bp, Artificial Sequence
  Synthetic oligonucleotide
ggggtacagacatgctcgaaacacggaccg

SEQ ID NO: 33077 - DNA, 30 bp, Artificial Sequence
  Synthetic oligonucleotide
agaataagcgaagttcgagattgctgaccg

SEQ ID NO: 33078 - DNA, 30 bp, Artificial Sequence
  Synthetic oligonucleotide
gggacttagaatgggctcgctgaaataccg

SEQ ID NO: 33079 - DNA, 30 bp, Artificial Sequence
  Synthetic oligonucleotide
acagaggaggtaaaatccgtaagtgtaccg

SEQ ID NO: 33080 - DNA, 30 bp, Artificial Sequence
  Synthetic oligonucleotide
cggggaggctatttcactccatacttaccg

SEQ ID NO: 33081 - DNA, 30 bp, Artificial Sequence
  Synthetic oligonucleotide
gtcacgtgatgatttcgaaagccgaacccg

SEQ ID NO: 33082 - DNA, 30 bp, Artificial Sequence
  Synthetic oligonucleotide
cgtaaccgtcactctaagggggccagcccg

SEQ ID NO: 33083 - DNA, 30 bp, Artificial Sequence
  Synthetic oligonucleotide
aggagaaggaacgtcgtaggacagagcccg

SEQ ID NO: 33084 - DNA, 30 bp, Artificial Sequence
  Synthetic oligonucleotide
tcggattacgaacagtaatcgtttcgcccg

SEQ ID NO: 33085 - DNA, 30 bp, Artificial Sequence
  Synthetic oligonucleotide
tgcaatagttaagttcaagcgaatctcccg

SEQ ID NO: 33086 - DNA, 30 bp, Artificial Sequence
  Synthetic oligonucleotide
tgtcaagaaaacgtacggagaccagtcccg

SEQ ID NO: 33087 - DNA, 30 bp, Artificial Sequence
  Synthetic oligonucleotide
atgactaaaccagtgacaacctagtagccg

SEQ ID NO: 33088 - DNA, 30 bp, Artificial Sequence
  Synthetic oligonucleotide
catgcaggtaagctgcgaagtgcaccgccg

SEQ ID NO: 33089 - DNA, 30 bp, Artificial Sequence
  Synthetic oligonucleotide
taagacatcgaaagatcacaggtcccgccg

SEQ ID NO: 33090 - DNA, 30 bp, Artificial Sequence
  Synthetic oligonucleotide
aggcgctcattatagtagaatcaacggccg

SEQ ID NO: 33091 - DNA, 30 bp, Artificial Sequence
  Synthetic oligonucleotide
caacggtgctatgaggacttacgagggccg

SEQ ID NO: 33092 - DNA, 30 bp, Artificial Sequence
  Synthetic oligonucleotide
cgactacggacagaacagtgcactgggccg

SEQ ID NO: 33093 - DNA, 30 bp, Artificial Sequence
  Synthetic oligonucleotide
tgacgctggtgtacctgaatcctgatgccg

SEQ ID NO: 33094 - DNA, 30 bp, Artificial Sequence
  Synthetic oligonucleotide
aacgacatgggaactcgggtaattatgccg

SEQ ID NO: 33095 - DNA, 30 bp, Artificial Sequence
  Synthetic oligonucleotide
tcggaccgtataaggaacgtttcattgccg

SEQ ID NO: 33096 - DNA, 30 bp, Artificial Sequence
  Synthetic oligonucleotide
actatcaaccctccatcatccgagaatccg

SEQ ID NO: 33097 - DNA, 30 bp, Artificial Sequence
  Synthetic oligonucleotide
aagtgtcgaaaagtcacgcaccagactccg

SEQ ID NO: 33098 - DNA, 30 bp, Artificial Sequence
  Synthetic oligonucleotide
ggactacgtataacagtcgatgaacctccg

SEQ ID NO: 33099 - DNA, 30 bp, Artificial Sequence
  Synthetic oligonucleotide
tagcacaggtgtatgtgggatatggctccg

SEQ ID NO: 33100 - DNA, 31 bp, Artificial Sequence
  Synthetic oligonucleotide
ggggaacaaggattcttgctttagccgtccg

SEQ ID NO: 33101 - DNA, 30 bp, Artificial Sequence
  Synthetic oligonucleotide
cggatgtgtgtaagaagatcactcgttccg

SEQ ID NO: 33102 - DNA, 30 bp, Artificial Sequence
  Synthetic oligonucleotide
ggctacctttgacctgaaaactgtgttccg

SEQ ID NO: 33103 - DNA, 30 bp, Artificial Sequence
  Synthetic oligonucleotide
ctatgtaaggtaacggaaatcaagaaagcg

SEQ ID NO: 33104 - DNA, 30 bp, Artificial Sequence
  Synthetic oligonucleotide
ggaagttcagcgtagagtcctcggaaagcg

SEQ ID NO: 33105 - DNA, 30 bp, Artificial Sequence
  Synthetic oligonucleotide
tccaatcgaacagccacagggtggaaagcg

SEQ ID NO: 33106 - DNA, 30 bp, Artificial Sequence
  Synthetic oligonucleotide
aggctggcaattaagagacatggacaagcg

SEQ ID NO: 33107 - DNA, 30 bp, Artificial Sequence
  Synthetic oligonucleotide
cccagcatttacagtgcaagtagtgaagcg

SEQ ID NO: 33108 - DNA, 30 bp, Artificial Sequence
  Synthetic oligonucleotide
cggcaatgcgtggcggccattgttgaagcg

SEQ ID NO: 33109 - DNA, 30 bp, Artificial Sequence
  Synthetic oligonucleotide
cagaaaggtagtggaaaagttccctaagcg

SEQ ID NO: 33110 - DNA, 30 bp, Artificial Sequence
  Synthetic oligonucleotide
ggatgattgaagggatgcgacccgacagcg

SEQ ID NO: 33111 - DNA, 30 bp, Artificial Sequence
  Synthetic oligonucleotide
ctcaaaattgaggaggccatctccccagcg

SEQ ID NO: 33112 - DNA, 30 bp, Artificial Sequence
  Synthetic oligonucleotide
ctctaaggacaaagagtgataaactcagcg

SEQ ID NO: 33113 - DNA, 30 bp, Artificial Sequence
  Synthetic oligonucleotide
tgcgcggggcgaagaaggtcgagacgagcg

SEQ ID NO: 33114 - DNA, 30 bp, Artificial Sequence
  Synthetic oligonucleotide
tgctacgggcgagttgagaggaatttagcg

SEQ ID NO: 33115 - DNA, 30 bp, Artificial Sequence
  Synthetic oligonucleotide
ggagcgctagccggacacaagaactacgcg

SEQ ID NO: 33116 - DNA, 30 bp, Artificial Sequence
  Synthetic oligonucleotide
ggtcaccggaaacactgaacattagccgcg

SEQ ID NO: 33117 - DNA, 30 bp, Artificial Sequence
  Synthetic oligonucleotide
aagagcgacatacggagccaccactgcgcg

SEQ ID NO: 33118 - DNA, 30 bp, Artificial Sequence
  Synthetic oligonucleotide
ctaacagattcctcgggagggcgtaaggcg

SEQ ID NO: 33119 - DNA, 30 bp, Artificial Sequence
  Synthetic oligonucleotide
ggatataaaatggagtgacctgtcgaggcg

SEQ ID NO: 33120 - DNA, 30 bp, Artificial Sequence
  Synthetic oligonucleotide
aacggagtgaccggacaagtgctctaggcg

SEQ ID NO: 33121 - DNA, 30 bp, Artificial Sequence
  Synthetic oligonucleotide
aaagcaactattaaaacggaaggcccggcg

SEQ ID NO: 33122 - DNA, 30 bp, Artificial Sequence
  Synthetic oligonucleotide
gtcaggttaattgaaaggcgaggatcggcg

SEQ ID NO: 33123 - DNA, 30 bp, Artificial Sequence
  Synthetic oligonucleotide
catctagaatgggggaacgtgtattcggcg

SEQ ID NO: 33124 - DNA, 30 bp, Artificial Sequence
  Synthetic oligonucleotide
gaggaataaaaccgtgtacatcgaagggcg

SEQ ID NO: 33125 - DNA, 30 bp, Artificial Sequence
  Synthetic oligonucleotide
aagggcaaaagctgtaccattcaaggggcg

SEQ ID NO: 33126 - DNA, 30 bp, Artificial Sequence
  Synthetic oligonucleotide
caatgagtgaaaaggctcccagcttgggcg

SEQ ID NO: 33127 - DNA, 30 bp, Artificial Sequence
  Synthetic oligonucleotide
aggagcaggtcatccgtgccgctcgtggcg

SEQ ID NO: 33128 - DNA, 30 bp, Artificial Sequence
  Synthetic oligonucleotide
ggtcacatggctagatgggtacacattgcg

SEQ ID NO: 33129 - DNA, 30 bp, Artificial Sequence
  Synthetic oligonucleotide
gcgtcaccgggggaatttcgatacattgcg

SEQ ID NO: 33130 - DNA, 30 bp, Artificial Sequence
  Synthetic oligonucleotide
agcctagaaaaccgaatcgagtccattgcg

SEQ ID NO: 33131 - DNA, 30 bp, Artificial Sequence
  Synthetic oligonucleotide
cgtgcttacaaagaacggatgagccttgcg

SEQ ID NO: 33132 - DNA, 30 bp, Artificial Sequence
  Synthetic oligonucleotide
ctcaaaggtgaggaaaattgcgcgaaatcg

SEQ ID NO: 33133 - DNA, 30 bp, Artificial Sequence
  Synthetic oligonucleotide
tgaagtgaagggaagtagtcgcaataatcg

SEQ ID NO: 33134 - DNA, 30 bp, Artificial Sequence
  Synthetic oligonucleotide
ccagagagtagggaatgatggcaccgatcg

SEQ ID NO: 33135 - DNA, 30 bp, Artificial Sequence
  Synthetic oligonucleotide
cagaacgtaatggacccaacaaatatatcg

SEQ ID NO: 33136 - DNA, 30 bp, Artificial Sequence
  Synthetic oligonucleotide
gacacatagcaggtgaaacaacgactatcg

SEQ ID NO: 33137 - DNA, 30 bp, Artificial Sequence
  Synthetic oligonucleotide
cgaacgggtgaatggagtacaattctatcg

SEQ ID NO: 33138 - DNA, 30 bp, Artificial Sequence
  Synthetic oligonucleotide
cgatgggcggaaagctgaattaactactcg

SEQ ID NO: 33139 - DNA, 30 bp, Artificial Sequence
  Synthetic oligonucleotide
cgcgactaaacatggatggacgagtactcg

SEQ ID NO: 33140 - DNA, 30 bp, Artificial Sequence
  Synthetic oligonucleotide
caccgccgagcaaacctgattgcgacctcg

SEQ ID NO: 33141 - DNA, 30 bp, Artificial Sequence
  Synthetic oligonucleotide
gaacggtactaataaaactctaacccctcg

SEQ ID NO: 33142 - DNA, 30 bp, Artificial Sequence
  Synthetic oligonucleotide
tgttaataggtaaagtataggaccgcctcg

SEQ ID NO: 33143 - DNA, 30 bp, Artificial Sequence
  Synthetic oligonucleotide
cacagtatctactgaccacggaactcctcg

SEQ ID NO: 33144 - DNA, 30 bp, Artificial Sequence
  Synthetic oligonucleotide
cggtagacggaccaatagcacacaagctcg

SEQ ID NO: 33145 - DNA, 30 bp, Artificial Sequence
  Synthetic oligonucleotide
agtcgaacaaagtcagagagtcatcgctcg

SEQ ID NO: 33146 - DNA, 30 bp, Artificial Sequence
  Synthetic oligonucleotide
acaaaacgaaaatgggcacccgagggctcg

SEQ ID NO: 33147 - DNA, 30 bp, Artificial Sequence
  Synthetic oligonucleotide
tagggcggaaattagtcttaggtgatctcg

SEQ ID NO: 33148 - DNA, 30 bp, Artificial Sequence
  Synthetic oligonucleotide
agtaccagaatcgttggatcgtcaaagtcg

SEQ ID NO: 33149 - DNA, 30 bp, Artificial Sequence
  Synthetic oligonucleotide
actcacggcaaatgtgagcgcaagaagtcg

SEQ ID NO: 33150 - DNA, 30 bp, Artificial Sequence
  Synthetic oligonucleotide
gctcgcaccagtgatgggcggtggaagtcg

SEQ ID NO: 33151 - DNA, 30 bp, Artificial Sequence
  Synthetic oligonucleotide
acagagtgtggtgcagtttaacgtaagtcg

SEQ ID NO: 33152 - DNA, 30 bp, Artificial Sequence
  Synthetic oligonucleotide
cagagttaccaaatacaggcagatgagtcg

SEQ ID NO: 33153 - DNA, 30 bp, Artificial Sequence
  Synthetic oligonucleotide
atagtgccggattggcgaagaacttagtcg

SEQ ID NO: 33154 - DNA, 30 bp, Artificial Sequence
  Synthetic oligonucleotide
cgtgaacgcaaaataaaactcgcttagtcg

SEQ ID NO: 33155 - DNA, 30 bp, Artificial Sequence
  Synthetic oligonucleotide
gaatggaacaacaaaaggttatacacgtcg

SEQ ID NO: 33156 - DNA, 30 bp, Artificial Sequence
  Synthetic oligonucleotide
gaaaacacatgtctgcccagaagagcgtcg

SEQ ID NO: 33157 - DNA, 30 bp, Artificial Sequence
  Synthetic oligonucleotide
accagacaacatgattagtccgaggcgtcg

SEQ ID NO: 33158 - DNA, 30 bp, Artificial Sequence
  Synthetic oligonucleotide
cggtgagggatcatgtagcaaatatcgtcg

SEQ ID NO: 33159 - DNA, 30 bp, Artificial Sequence
  Synthetic oligonucleotide
gccggtgcgagaccctacaccaagtcgtcg

SEQ ID NO: 33160 - DNA, 30 bp, Artificial Sequence
  Synthetic oligonucleotide
tgtcataccaggtcatggagatactggtcg

SEQ ID NO: 33161 - DNA, 30 bp, Artificial Sequence
  Synthetic oligonucleotide
tgaggagaactcgcatggatgcctttgtcg

SEQ ID NO: 33162 - DNA, 30 bp, Artificial Sequence
  Synthetic oligonucleotide
tgacattaagtgccactgcgaccaaattcg

SEQ ID NO: 33163 - DNA, 30 bp, Artificial Sequence
  Synthetic oligonucleotide
agtcgcagagagtagcgaccagaagattcg

SEQ ID NO: 33164 - DNA, 30 bp, Artificial Sequence
  Synthetic oligonucleotide
tatggggcatcacctagcaatacggattcg

SEQ ID NO: 33165 - DNA, 30 bp, Artificial Sequence
  Synthetic oligonucleotide
gtgtgtagttatcggaataacgggagttcg

SEQ ID NO: 33166 - DNA, 30 bp, Artificial Sequence
  Synthetic oligonucleotide
agtttgcgagtgtagacgggaccgaaaagg

SEQ ID NO: 33167 - DNA, 30 bp, Artificial Sequence
  Synthetic oligonucleotide
agcttgcgcgctacgggcagaagccaaagg

SEQ ID NO: 33168 - DNA, 30 bp, Artificial Sequence
  Synthetic oligonucleotide
ctcgcccaaagatagcgtattgagcaaagg

SEQ ID NO: 33169 - DNA, 30 bp, Artificial Sequence
  Synthetic oligonucleotide
ccaggacgagggctagcaaggcctcaaagg

SEQ ID NO: 33170 - DNA, 30 bp, Artificial Sequence
  Synthetic oligonucleotide
gccgcggagttgtgaatgtagatagaaagg

SEQ ID NO: 33171 - DNA, 30 bp, Artificial Sequence
  Synthetic oligonucleotide
tcccggattcacagaaatagagacgaaagg

SEQ ID NO: 33172 - DNA, 30 bp, Artificial Sequence
  Synthetic oligonucleotide
cgatcagcgcgatacatgccgggctaaagg

SEQ ID NO: 33173 - DNA, 30 bp, Artificial Sequence
  Synthetic oligonucleotide
cattcacgaattacgtggggcaaagcaagg

SEQ ID NO: 33174 - DNA, 30 bp, Artificial Sequence
  Synthetic oligonucleotide
ctgaatggactaccatcacaggcagcaagg

SEQ ID NO: 33175 - DNA, 30 bp, Artificial Sequence
  Synthetic oligonucleotide
accgaccgaatttcacaaatgagggcaagg

SEQ ID NO: 33176 - DNA, 30 bp, Artificial Sequence
  Synthetic oligonucleotide
tcatgaaggccggtgctaactagtgcaagg

SEQ ID NO: 33177 - DNA, 30 bp, Artificial Sequence
  Synthetic oligonucleotide
caaccaagttggcaatgacctacgtcaagg

SEQ ID NO: 33178 - DNA, 30 bp, Artificial Sequence
  Synthetic oligonucleotide
gcataaaaatgcaagcctgttagaagaagg

SEQ ID NO: 33179 - DNA, 30 bp, Artificial Sequence
  Synthetic oligonucleotide
gcggagggtggacgactgactaatggaagg

SEQ ID NO: 33180 - DNA, 30 bp, Artificial Sequence
  Synthetic oligonucleotide
taacataactcggattagagccagtgaagg

SEQ ID NO: 33181 - DNA, 30 bp, Artificial Sequence
  Synthetic oligonucleotide
cgcgaagagtatatagccgaatattgaagg

SEQ ID NO: 33182 - DNA, 30 bp, Artificial Sequence
  Synthetic oligonucleotide
tggaggtgctctaatctaacgacaataagg

SEQ ID NO: 33183 - DNA, 30 bp, Artificial Sequence
  Synthetic oligonucleotide
gaaggatacataatccgaatcttgttaagg

SEQ ID NO: 33184 - DNA, 30 bp, Artificial Sequence
  Synthetic oligonucleotide
ggctgaaagtctcgtttaacgttacacagg

SEQ ID NO: 33185 - DNA, 30 bp, Artificial Sequence
  Synthetic oligonucleotide
agaaaaagttggaacttgcagagatacagg

SEQ ID NO: 33186 - DNA, 30 bp, Artificial Sequence
  Synthetic oligonucleotide
cgttagtgaaactccgttaaatcctacagg

SEQ ID NO: 33187 - DNA, 30 bp, Artificial Sequence
  Synthetic oligonucleotide
gcgctcaactgggagtctgaatgttacagg

SEQ ID NO: 33188 - DNA, 30 bp, Artificial Sequence
  Synthetic oligonucleotide
acgcagagacgttaagaacgagtgaccagg

SEQ ID NO: 33189 - DNA, 30 bp, Artificial Sequence
  Synthetic oligonucleotide
gctccagagaacaaggcaaattctaccagg

SEQ ID NO: 33190 - DNA, 30 bp, Artificial Sequence
  Synthetic oligonucleotide
ctgaactcaagatgtacatataaacccagg

SEQ ID NO: 33191 - DNA, 30 bp, Artificial Sequence
  Synthetic oligonucleotide
tcgttagcgttatctcgagccgttcccagg

SEQ ID NO: 33192 - DNA, 30 bp, Artificial Sequence
  Synthetic oligonucleotide
gcaccgtgtagtaaacataagatgggcagg

SEQ ID NO: 33193 - DNA, 30 bp, Artificial Sequence
  Synthetic oligonucleotide
ggtcattgaagatcgggtgagggaatcagg

SEQ ID NO: 33194 - DNA, 30 bp, Artificial Sequence
  Synthetic oligonucleotide
agcttatatcgttcaatgagcgggatcagg

SEQ ID NO: 33195 - DNA, 30 bp, Artificial Sequence
  Synthetic oligonucleotide
atgcagtaaacgaggttgctgagtatcagg

SEQ ID NO: 33196 - DNA, 30 bp, Artificial Sequence
  Synthetic oligonucleotide
gcaaacgatcgatagtcgacggatgtcagg

SEQ ID NO: 33197 - DNA, 30 bp, Artificial Sequence
  Synthetic oligonucleotide
catacagaaccaacggaccggtgtgtcagg

SEQ ID NO: 33198 - DNA, 30 bp, Artificial Sequence
  Synthetic oligonucleotide
aagacagcggaggacaaattcaacttcagg

SEQ ID NO: 33199 - DNA, 30 bp, Artificial Sequence
  Synthetic oligonucleotide
ttacgacaggcggagtatgtgcgcaagagg

SEQ ID NO: 33200 - DNA, 30 bp, Artificial Sequence
  Synthetic oligonucleotide
caataacgcaaatccaagtgctcccagagg

SEQ ID NO: 33201 - DNA, 30 bp, Artificial Sequence
  Synthetic oligonucleotide
atacaatggacgaaaagacgattccagagg

SEQ ID NO: 33202 - DNA, 30 bp, Artificial Sequence
  Synthetic oligonucleotide
gggccgtcacaacggtcatgctatcagagg

SEQ ID NO: 33203 - DNA, 30 bp, Artificial Sequence
  Synthetic oligonucleotide
agcgaatcgcgaacaaaattcgatgagagg

SEQ ID NO: 33204 - DNA, 30 bp, Artificial Sequence
  Synthetic oligonucleotide
agagcaagaggcgttgaacaacagtagagg

SEQ ID NO: 33205 - DNA, 30 bp, Artificial Sequence
  Synthetic oligonucleotide
atcattggagctagagacatatacacgagg

SEQ ID NO: 33206 - DNA, 30 bp, Artificial Sequence
  Synthetic oligonucleotide
tcggtaaatgaaaggggaaccatgacgagg

SEQ ID NO: 33207 - DNA, 30 bp, Artificial Sequence
  Synthetic oligonucleotide
cccaagtaaagatcaacttgaggggcgagg

SEQ ID NO: 33208 - DNA, 30 bp, Artificial Sequence
  Synthetic oligonucleotide
acgacctgtgcaagtgcatcacgtaggagg

SEQ ID NO: 33209 - DNA, 30 bp, Artificial Sequence
  Synthetic oligonucleotide
cgaacaaaataaaaggtcgtttagttgagg

SEQ ID NO: 33210 - DNA, 30 bp, Artificial Sequence
  Synthetic oligonucleotide
tcggagtgaaattatgaacacaatttgagg

SEQ ID NO: 33211 - DNA, 30 bp, Artificial Sequence
  Synthetic oligonucleotide
agggatccataagttgaaaaataccatagg

SEQ ID NO: 33212 - DNA, 30 bp, Artificial Sequence
  Synthetic oligonucleotide
ggtacgggtcacgccaagtaaagacctagg

SEQ ID NO: 33213 - DNA, 30 bp, Artificial Sequence
  Synthetic oligonucleotide
aagaacgatatcaccgaccagacatctagg

SEQ ID NO: 33214 - DNA, 30 bp, Artificial Sequence
  Synthetic oligonucleotide
aacatacaactggcagcaataagtagtagg

SEQ ID NO: 33215 - DNA, 30 bp, Artificial Sequence
  Synthetic oligonucleotide
agcgaaagtcgtaacggaataggtcgtagg

SEQ ID NO: 33216 - DNA, 30 bp, Artificial Sequence
  Synthetic oligonucleotide
atacaatcaaacgatgggcttagaggtagg

SEQ ID NO: 33217 - DNA, 30 bp, Artificial Sequence
  Synthetic oligonucleotide
aggaggcaactccgcaaaaattcgtgtagg

SEQ ID NO: 33218 - DNA, 30 bp, Artificial Sequence
  Synthetic oligonucleotide
aaggccgtaaatggactagactgcattagg

SEQ ID NO: 33219 - DNA, 30 bp, Artificial Sequence
  Synthetic oligonucleotide
cagacggctgaatacaacgcaaaacaacgg

SEQ ID NO: 33220 - DNA, 30 bp, Artificial Sequence
  Synthetic oligonucleotide
ggcgagccacgcggcgaaacatagcaacgg

SEQ ID NO: 33221 - DNA, 30 bp, Artificial Sequence
  Synthetic oligonucleotide
taccacgagggggaggtactgaattaacgg

SEQ ID NO: 33222 - DNA, 30 bp, Artificial Sequence
  Synthetic oligonucleotide
ggtcagaataggagtcacatttcacaccgg

SEQ ID NO: 33223 - DNA, 30 bp, Artificial Sequence
  Synthetic oligonucleotide
acaaaggttagatctacgattgaagcccgg

SEQ ID NO: 33224 - DNA, 30 bp, Artificial Sequence
  Synthetic oligonucleotide
atgcaaacaggacaattgcactacgcccgg

SEQ ID NO: 33225 - DNA, 30 bp, Artificial Sequence
  Synthetic oligonucleotide
cgatgtaaggcgcatgaaggaagctcccgg

SEQ ID NO: 33226 - DNA, 30 bp, Artificial Sequence
  Synthetic oligonucleotide
atatgggcacaaagttggtacacaatccgg

SEQ ID NO: 33227 - DNA, 30 bp, Artificial Sequence
  Synthetic oligonucleotide
cctacaactgaagtatataaggacatccgg

SEQ ID NO: 33228 - DNA, 30 bp, Artificial Sequence
  Synthetic oligonucleotide
taaggtgaccgaatgtcagtaagagcgcgg

SEQ ID NO: 33229 - DNA, 30 bp, Artificial Sequence
  Synthetic oligonucleotide
tacgaacgccctcaccagacggtcgcgcgg

SEQ ID NO: 33230 - DNA, 30 bp, Artificial Sequence
  Synthetic oligonucleotide
cgcatgattgcgcacagagtaaagtcgcgg

SEQ ID NO: 33231 - DNA, 30 bp, Artificial Sequence
  Synthetic oligonucleotide
cattggatacaccaatatgagcgaatgcgg

SEQ ID NO: 33232 - DNA, 30 bp, Artificial Sequence
  Synthetic oligonucleotide
agtcaagggcaaaggggaaccggtatgcgg

SEQ ID NO: 33233 - DNA, 30 bp, Artificial Sequence
  Synthetic oligonucleotide
caacgagaaaagcctgctatgtaggtgcgg

SEQ ID NO: 33234 - DNA, 30 bp, Artificial Sequence
  Synthetic oligonucleotide
cggtataaaattaactgttcattcaatcgg

SEQ ID NO: 33235 - DNA, 30 bp, Artificial Sequence
  Synthetic oligonucleotide
tgaaggtaagcgcgactaaaagtagatcgg

SEQ ID NO: 33236 - DNA, 30 bp, Artificial Sequence
  Synthetic oligonucleotide
gcaagactaggttgcaaccacaaaactcgg

SEQ ID NO: 33237 - DNA, 30 bp, Artificial Sequence
  Synthetic oligonucleotide
atactacgtcatcaatcagcgaaaactcgg

SEQ ID NO: 33238 - DNA, 30 bp, Artificial Sequence
  Synthetic oligonucleotide
aacgagtagaatggaggggaagaccctcgg

SEQ ID NO: 33239 - DNA, 30 bp, Artificial Sequence
  Synthetic oligonucleotide
aggcgtgggaattggatccccagagctcgg

SEQ ID NO: 33240 - DNA, 30 bp, Artificial Sequence
  Synthetic oligonucleotide
caagacgcgaataggatcgagtacgctcgg

SEQ ID NO: 33241 - DNA, 30 bp, Artificial Sequence
  Synthetic oligonucleotide
gtggcggacaaggcataattgtcgagtcgg

SEQ ID NO: 33242 - DNA, 30 bp, Artificial Sequence
  Synthetic oligonucleotide
cgcatacgattgataagtccatggagtcgg

SEQ ID NO: 33243 - DNA, 30 bp, Artificial Sequence
  Synthetic oligonucleotide
ccgaaacggacagttggtataaagcgtcgg

SEQ ID NO: 33244 - DNA, 30 bp, Artificial Sequence
  Synthetic oligonucleotide
cggagaatataagcgaaaatgaaaaaaggg

SEQ ID NO: 33245 - DNA, 30 bp, Artificial Sequence
  Synthetic oligonucleotide
ccccgggcatgttcgtcagacgaaaaaggg

SEQ ID NO: 33246 - DNA, 30 bp, Artificial Sequence
  Synthetic oligonucleotide
tcattcttggagaggctgaaaaatgaaggg

SEQ ID NO: 33247 - DNA, 30 bp, Artificial Sequence
  Synthetic oligonucleotide
tctatggcacagacatacgcaaatgaaggg

SEQ ID NO: 33248 - DNA, 30 bp, Artificial Sequence
  Synthetic oligonucleotide
gccatataccatgacacaatgacgacaggg

SEQ ID NO: 33249 - DNA, 30 bp, Artificial Sequence
  Synthetic oligonucleotide
tataaagtcatgagtgtagcgagtacaggg

SEQ ID NO: 33250 - DNA, 30 bp, Artificial Sequence
  Synthetic oligonucleotide
cggaaaaattatagtatactgctcgcaggg

SEQ ID NO: 33251 - DNA, 30 bp, Artificial Sequence
  Synthetic oligonucleotide
gtaccagatagggagcgtgccagggcaggg

SEQ ID NO: 33252 - DNA, 30 bp, Artificial Sequence
  Synthetic oligonucleotide
cagtaggcaatgagtcccagggtggcaggg

SEQ ID NO: 33253 - DNA, 30 bp, Artificial Sequence
  Synthetic oligonucleotide
gccttgaaagcgagaaaaacattggcaggg

SEQ ID NO: 33254 - DNA, 30 bp, Artificial Sequence
  Synthetic oligonucleotide
cggcacgacctgggcagatgtcgacgaggg

SEQ ID NO: 33255 - DNA, 30 bp, Artificial Sequence
  Synthetic oligonucleotide
caaacaagcacgcatggtaaagggggaggg

SEQ ID NO: 33256 - DNA, 30 bp, Artificial Sequence
  Synthetic oligonucleotide
gctgaagcgtcgtaagggtctacgtgaggg

SEQ ID NO: 33257 - DNA, 30 bp, Artificial Sequence
  Synthetic oligonucleotide
gtacggcaaatcttagtctgggggataggg

SEQ ID NO: 33258 - DNA, 30 bp, Artificial Sequence
  Synthetic oligonucleotide
gggaactaggagagtaggtctaacgtaggg

SEQ ID NO: 33259 - DNA, 30 bp, Artificial Sequence
  Synthetic oligonucleotide
ccacatagaacctcgccaaagtaaaacggg

SEQ ID NO: 33260 - DNA, 30 bp, Artificial Sequence
  Synthetic oligonucleotide
atgatacagttacggataaatatcaacggg

SEQ ID NO: 33261 - DNA, 30 bp, Artificial Sequence
  Synthetic oligonucleotide
gtgtgtgtaaacaagcaatagtgccacggg

SEQ ID NO: 33262 - DNA, 30 bp, Artificial Sequence
  Synthetic oligonucleotide
agtcagcaagcaagtccgggggatcacggg

SEQ ID NO: 33263 - DNA, 30 bp, Artificial Sequence
  Synthetic oligonucleotide
tcggaaaaatcatcctacccccgtcacggg

SEQ ID NO: 33264 - DNA, 30 bp, Artificial Sequence
  Synthetic oligonucleotide
aagcgtgtagtattctgtcttcaagccggg

SEQ ID NO: 33265 - DNA, 30 bp, Artificial Sequence
  Synthetic oligonucleotide
atgatcaaatgagaggatatttagggcggg

SEQ ID NO: 33266 - DNA, 30 bp, Artificial Sequence
  Synthetic oligonucleotide
tcgtgtcggagagatgaattcgaaatcggg

SEQ ID NO: 33267 - DNA, 30 bp, Artificial Sequence
  Synthetic oligonucleotide
cgacatcataatgataacgactttctcggg

SEQ ID NO: 33268 - DNA, 30 bp, Artificial Sequence
  Synthetic oligonucleotide
acgtactacgcttggcaaactgtcttcggg

SEQ ID NO: 33269 - DNA, 30 bp, Artificial Sequence
  Synthetic oligonucleotide
aaaaaccgacaggccaagcaataccagggg

SEQ ID NO: 33270 - DNA, 30 bp, Artificial Sequence
  Synthetic oligonucleotide
accagggagcgccagaaatctaagacgggg

SEQ ID NO: 33271 - DNA, 30 bp, Artificial Sequence
  Synthetic oligonucleotide
tagtggtcacgtcgaatatgaggaccgggg

SEQ ID NO: 33272 - DNA, 30 bp, Artificial Sequence
  Synthetic oligonucleotide
gtaaacattgtcgtaatgaactgaccgggg

SEQ ID NO: 33273 - DNA, 30 bp, Artificial Sequence
  Synthetic oligonucleotide
taggtacaatcccgtcaaaatagggcgggg

SEQ ID NO: 33274 - DNA, 30 bp, Artificial Sequence
  Synthetic oligonucleotide
gatgcatagtgacatcgcctaggatcgggg

SEQ ID NO: 33275 - DNA, 30 bp, Artificial Sequence
  Synthetic oligonucleotide
gggcagcatgcgataggcatcaacgtgggg

SEQ ID NO: 33276 - DNA, 30 bp, Artificial Sequence
  Synthetic oligonucleotide
gtcgtagaaacggggccgattcgtgtgggg

SEQ ID NO: 33277 - DNA, 30 bp, Artificial Sequence
  Synthetic oligonucleotide
cgctcaactctcctcatatcgcgaaatggg

SEQ ID NO: 33278 - DNA, 30 bp, Artificial Sequence
  Synthetic oligonucleotide
cacgaggagtgcattccgagtgccaatggg

SEQ ID NO: 33279 - DNA, 30 bp, Artificial Sequence
  Synthetic oligonucleotide
aggctgggttgattatacttgtacactggg

SEQ ID NO: 33280 - DNA, 30 bp, Artificial Sequence
  Synthetic oligonucleotide
atagtagcccgtatcaagcggtaggctggg

SEQ ID NO: 33281 - DNA, 30 bp, Artificial Sequence
  Synthetic oligonucleotide
gaacgaatcgcgatggtggaagtctctggg

SEQ ID NO: 33282 - DNA, 30 bp, Artificial Sequence
  Synthetic oligonucleotide
cgtctaacaatcaaggctgaactaagtggg

SEQ ID NO: 33283 - DNA, 30 bp, Artificial Sequence
  Synthetic oligonucleotide
agaatgaggggaggttatcgagcaattggg

SEQ ID NO: 33284 - DNA, 30 bp, Artificial Sequence
  Synthetic oligonucleotide
ggtgttgtaagggcaagaatgtctattggg

SEQ ID NO: 33285 - DNA, 30 bp, Artificial Sequence
  Synthetic oligonucleotide
cgaaggctagtgcaaccgtcagccgttggg

SEQ ID NO: 33286 - DNA, 30 bp, Artificial Sequence
  Synthetic oligonucleotide
atgaggtggtgggacgatgtcacgcaatgg

SEQ ID NO: 33287 - DNA, 30 bp, Artificial Sequence
  Synthetic oligonucleotide
gaagatctcacttaagtccgtacataatgg

SEQ ID NO: 33288 - DNA, 30 bp, Artificial Sequence
  Synthetic oligonucleotide
agtactagaaaagcgtggatgagaacatgg

SEQ ID NO: 33289 - DNA, 30 bp, Artificial Sequence
  Synthetic oligonucleotide
tcaaaagttagagtgagaaggataacatgg

SEQ ID NO: 33290 - DNA, 30 bp, Artificial Sequence
  Synthetic oligonucleotide
ggaagagcgcagtgaatcctcaggacatgg

SEQ ID NO: 33291 - DNA, 30 bp, Artificial Sequence
  Synthetic oligonucleotide
aagtgaaattggcatgtcccgtaaccatgg

SEQ ID NO: 33292 - DNA, 30 bp, Artificial Sequence
  Synthetic oligonucleotide
ggtgggaataacctatcgagcttaccatgg

SEQ ID NO: 33293 - DNA, 30 bp, Artificial Sequence
  Synthetic oligonucleotide
cgagtagcatccctgtggggagggtgatgg

SEQ ID NO: 33294 - DNA, 30 bp, Artificial Sequence
  Synthetic oligonucleotide
atgcgctgcgacagctaaaaaacactatgg

SEQ ID NO: 33295 - DNA, 30 bp, Artificial Sequence
  Synthetic oligonucleotide
tcgtcggcatagagagatcatcccgtatgg

SEQ ID NO: 33296 - DNA, 30 bp, Artificial Sequence
  Synthetic oligonucleotide
gcgcatcgaaaacaatgattcggacactgg

SEQ ID NO: 33297 - DNA, 30 bp, Artificial Sequence
  Synthetic oligonucleotide
aaagtaggaaaaagaatgtgccaggactgg

SEQ ID NO: 33298 - DNA, 30 bp, Artificial Sequence
  Synthetic oligonucleotide
gaggagagctgcaatagagatctggactgg

SEQ ID NO: 33299 - DNA, 30 bp, Artificial Sequence
  Synthetic oligonucleotide
acgttaataagaggggccacgcaagcctgg

SEQ ID NO: 33300 - DNA, 30 bp, Artificial Sequence
  Synthetic oligonucleotide
aaagtgagcaaggcatcacgaaagtcctgg

SEQ ID NO: 33301 - DNA, 30 bp, Artificial Sequence
  Synthetic oligonucleotide
accgagactgcaattagtattccgagctgg

SEQ ID NO: 33302 - DNA, 30 bp, Artificial Sequence
  Synthetic oligonucleotide
caaagataccagtatgatgtcaaacgctgg

SEQ ID NO: 33303 - DNA, 30 bp, Artificial Sequence
  Synthetic oligonucleotide
tgtaaagtagggtcgactgctaattgctgg

SEQ ID NO: 33304 - DNA, 30 bp, Artificial Sequence
  Synthetic oligonucleotide
tagaagaaggcttgttccagtagccagtgg

SEQ ID NO: 33305 - DNA, 30 bp, Artificial Sequence
  Synthetic oligonucleotide
agggaactcacttgtaagctaggtgagtgg

SEQ ID NO: 33306 - DNA, 30 bp, Artificial Sequence
  Synthetic oligonucleotide
ataggaaggtagcgtgtgatcggatagtgg

SEQ ID NO: 33307 - DNA, 30 bp, Artificial Sequence
  Synthetic oligonucleotide
gtagacaccagtgtacccgaattgccgtgg

SEQ ID NO: 33308 - DNA, 30 bp, Artificial Sequence
  Synthetic oligonucleotide
atgcggcaaaaaatagaggtaagagcgtgg

SEQ ID NO: 33309 - DNA, 30 bp, Artificial Sequence
  Synthetic oligonucleotide
agaactccaagaagcgctatcattaggtgg

SEQ ID NO: 33310 - DNA, 30 bp, Artificial Sequence
  Synthetic oligonucleotide
acagatcatgatactatacagaagtggtgg

SEQ ID NO: 33311 - DNA, 30 bp, Artificial Sequence
  Synthetic oligonucleotide
atcgaaaccaacggcaccgaacatctgtgg

SEQ ID NO: 33312 - DNA, 30 bp, Artificial Sequence
  Synthetic oligonucleotide
tggtaaacagaagtactagacggcaattgg

SEQ ID NO: 33313 - DNA, 30 bp, Artificial Sequence
  Synthetic oligonucleotide
tgggtaggtgaatatcatcgcaccacttgg

SEQ ID NO: 33314 - DNA, 30 bp, Artificial Sequence
  Synthetic oligonucleotide
cctgaaaagtgtaattagcaatagacttgg

SEQ ID NO: 33315 - DNA, 30 bp, Artificial Sequence
  Synthetic oligonucleotide
tagtgcattgaggggatggaggatacttgg

SEQ ID NO: 33316 - DNA, 30 bp, Artificial Sequence
  Synthetic oligonucleotide
agggaagtcagggatctcatgatcgcttgg

SEQ ID NO: 33317 - DNA, 30 bp, Artificial Sequence
  Synthetic oligonucleotide
atcgatggaaaatttggggctaacagttgg

SEQ ID NO: 33318 - DNA, 30 bp, Artificial Sequence
  Synthetic oligonucleotide
ccgaacgtggaagtgacgatctgacgttgg

SEQ ID NO: 33319 - DNA, 30 bp, Artificial Sequence
  Synthetic oligonucleotide
agagagcagttgtaatacgatcgtggttgg

SEQ ID NO: 33320 - DNA, 30 bp, Artificial Sequence
  Synthetic oligonucleotide
acgcggggctgtactgtcacgagaaaaatg

SEQ ID NO: 33321 - DNA, 30 bp, Artificial Sequence
  Synthetic oligonucleotide
aacacgtaacagtgggtaccattcaaaatg

SEQ ID NO: 33322 - DNA, 30 bp, Artificial Sequence
  Synthetic oligonucleotide
ccgctacaccagtgtgcctgcactaaaatg

SEQ ID NO: 33323 - DNA, 30 bp, Artificial Sequence
  Synthetic oligonucleotide
gctcaggcgtgccggaatgcgccccaaatg

SEQ ID NO: 33324 - DNA, 30 bp, Artificial Sequence
  Synthetic oligonucleotide
tcggggcaaattgacaatgttgacgaaatg

SEQ ID NO: 33325 - DNA, 30 bp, Artificial Sequence
  Synthetic oligonucleotide
aggggatccaaatcacccatttgaccaatg

SEQ ID NO: 33326 - DNA, 30 bp, Artificial Sequence
  Synthetic oligonucleotide
cggtattgtccctagcatgagcgtccaatg

SEQ ID NO: 33327 - DNA, 30 bp, Artificial Sequence
  Synthetic oligonucleotide
accaaaccttggaacaaggaaggtccaatg

SEQ ID NO: 33328 - DNA, 30 bp, Artificial Sequence
  Synthetic oligonucleotide
acggctagacacgtagtattttgggcaatg

SEQ ID NO: 33329 - DNA, 30 bp, Artificial Sequence
  Synthetic oligonucleotide
aggagtgtcagtcattccgccttatcaatg

SEQ ID NO: 33330 - DNA, 30 bp, Artificial Sequence
  Synthetic oligonucleotide
tgagaaggttgaaagtagtacgagagaatg

SEQ ID NO: 33331 - DNA, 30 bp, Artificial Sequence
  Synthetic oligonucleotide
ccgagcttggggatggtccagagtagaatg

SEQ ID NO: 33332 - DNA, 30 bp, Artificial Sequence
  Synthetic oligonucleotide
tgaggtcagctgaacgaaaacatccgaatg

SEQ ID NO: 33333 - DNA, 30 bp, Artificial Sequence
  Synthetic oligonucleotide
tcgatgcgaaacaaagactctgaggtaatg

SEQ ID NO: 33334 - DNA, 30 bp, Artificial Sequence
  Synthetic oligonucleotide
tgatagttgtaaaggactgggtccaacatg

SEQ ID NO: 33335 - DNA, 30 bp, Artificial Sequence
  Synthetic oligonucleotide
aggtccttacacgagctttgatccgacatg

SEQ ID NO: 33336 - DNA, 30 bp, Artificial Sequence
  Synthetic oligonucleotide
gatcgagacggcgttgcagaatctgacatg

SEQ ID NO: 33337 - DNA, 30 bp, Artificial Sequence
  Synthetic oligonucleotide
cgtgaagtgtacagcatgagttcacccatg

SEQ ID NO: 33338 - DNA, 30 bp, Artificial Sequence
  Synthetic oligonucleotide
tcttagtccgatatcgaaaacaggtgcatg

SEQ ID NO: 33339 - DNA, 30 bp, Artificial Sequence
  Synthetic oligonucleotide
cggcacgaatgacgtgagtgcagttgcatg

SEQ ID NO: 33340 - DNA, 30 bp, Artificial Sequence
  Synthetic oligonucleotide
caagacaagacttgataggcgtgcttcatg

SEQ ID NO: 33341 - DNA, 30 bp, Artificial Sequence
  Synthetic oligonucleotide
aaacgcacagtgtgctctgtccgcaagatg

SEQ ID NO: 33342 - DNA, 30 bp, Artificial Sequence
  Synthetic oligonucleotide
agccaaccagccatggatataatgaagatg

SEQ ID NO: 33343 - DNA, 30 bp, Artificial Sequence
  Synthetic oligonucleotide
tggaccgagaaagtccgagttctgaagatg

SEQ ID NO: 33344 - DNA, 30 bp, Artificial Sequence
  Synthetic oligonucleotide
gaggcgagctagcacgaggatgataagatg

SEQ ID NO: 33345 - DNA, 30 bp, Artificial Sequence
  Synthetic oligonucleotide
cagatactatgtaaccagccaaggcagatg

SEQ ID NO: 33346 - DNA, 30 bp, Artificial Sequence
  Synthetic oligonucleotide
agctgtgggcctgagtaaatctggcagatg

SEQ ID NO: 33347 - DNA, 30 bp, Artificial Sequence
  Synthetic oligonucleotide
acccaccgactggtcacagggcctcagatg

SEQ ID NO: 33348 - DNA, 30 bp, Artificial Sequence
  Synthetic oligonucleotide
ctgaacacgggtaaggcaacagaatagatg

SEQ ID NO: 33349 - DNA, 30 bp, Artificial Sequence
  Synthetic oligonucleotide
caaagggacgccgggatatagaagtagatg

SEQ ID NO: 33350 - DNA, 30 bp, Artificial Sequence
  Synthetic oligonucleotide
acgagcagagtatttccgagtcagtagatg

SEQ ID NO: 33351 - DNA, 30 bp, Artificial Sequence
  Synthetic oligonucleotide
ttgaaaggcttagcgatagaccgctcgatg

SEQ ID NO: 33352 - DNA, 30 bp, Artificial Sequence
  Synthetic oligonucleotide
gggattcccaagactctcggtaacaggatg

SEQ ID NO: 33353 - DNA, 30 bp, Artificial Sequence
  Synthetic oligonucleotide
cgcaggtggttaagctatcatcatgggatg

SEQ ID NO: 33354 - DNA, 30 bp, Artificial Sequence
  Synthetic oligonucleotide
cggatggaaaaagttcacagcgttatgatg

SEQ ID NO: 33355 - DNA, 30 bp, Artificial Sequence
  Synthetic oligonucleotide
tcacgtcctgatgagaacgaaatggtgatg

SEQ ID NO: 33356 - DNA, 30 bp, Artificial Sequence
  Synthetic oligonucleotide
gcaaggctggaacagacgtgacggcatatg

SEQ ID NO: 33357 - DNA, 30 bp, Artificial Sequence
  Synthetic oligonucleotide
acacggatgaattaggcatacatgcatatg

SEQ ID NO: 33358 - DNA, 30 bp, Artificial Sequence
  Synthetic oligonucleotide
tccagaacgatggaaactcgggcagatatg

SEQ ID NO: 33359 - DNA, 29 bp, Artificial Sequence
  Synthetic oligonucleotide
ccgaggagcagaggatagatgttgatatg

SEQ ID NO: 33360 - DNA, 30 bp, Artificial Sequence
  Synthetic oligonucleotide
gccaaataggagataccgggaaacactatg

SEQ ID NO: 33361 - DNA, 30 bp, Artificial Sequence
  Synthetic oligonucleotide
ggggactcttgaatcaaagtttgcgctatg

SEQ ID NO: 33362 - DNA, 30 bp, Artificial Sequence
  Synthetic oligonucleotide
cgaaaaagcagaggaatctgttaggctatg

SEQ ID NO: 33363 - DNA, 30 bp, Artificial Sequence
  Synthetic oligonucleotide
ggaagggagttggtcatgaacgagtctatg

SEQ ID NO: 33364 - DNA, 30 bp, Artificial Sequence
  Synthetic oligonucleotide
aaaggacatggatgcctcattctcagtatg

SEQ ID NO: 33365 - DNA, 30 bp, Artificial Sequence
  Synthetic oligonucleotide
cgcaaaagccaatcgaagaatctacgtatg

SEQ ID NO: 33366 - DNA, 30 bp, Artificial Sequence
  Synthetic oligonucleotide
gtcagggtgaagaacgtcatgccatgtatg

SEQ ID NO: 33367 - DNA, 30 bp, Artificial Sequence
  Synthetic oligonucleotide
tcagtaaagaaagccggataggaccttatg

SEQ ID NO: 33368 - DNA, 30 bp, Artificial Sequence
  Synthetic oligonucleotide
agtgttagatgaggacaattgaaagttatg

SEQ ID NO: 33369 - DNA, 30 bp, Artificial Sequence
  Synthetic oligonucleotide
ccctcccagagtcgatgacaacagaaactg

SEQ ID NO: 33370 - DNA, 30 bp, Artificial Sequence
  Synthetic oligonucleotide
acatactaacgtggctgagactctaaactg

SEQ ID NO: 33371 - DNA, 30 bp, Artificial Sequence
  Synthetic oligonucleotide
ccggatacgacaaagacgttcgaccaactg

SEQ ID NO: 33372 - DNA, 30 bp, Artificial Sequence
  Synthetic oligonucleotide
gtacaaggcaataagaaaaattgccaactg

SEQ ID NO: 33373 - DNA, 30 bp, Artificial Sequence
  Synthetic oligonucleotide
aggtgaaccggtatgcggtctttgcaactg

SEQ ID NO: 33374 - DNA, 30 bp, Artificial Sequence
  Synthetic oligonucleotide
gcgtctgcgatggatagcaagggagcactg

SEQ ID NO: 33375 - DNA, 30 bp, Artificial Sequence
  Synthetic oligonucleotide
taaagaaaaaggatgatcccgtgatcactg

SEQ ID NO: 33376 - DNA, 30 bp, Artificial Sequence
  Synthetic oligonucleotide
acctgcattagcgggataacatacagactg

SEQ ID NO: 33377 - DNA, 30 bp, Artificial Sequence
  Synthetic oligonucleotide
cttgaccaaaaagcgatgagggctcgactg

SEQ ID NO: 33378 - DNA, 30 bp, Artificial Sequence
  Synthetic oligonucleotide
atggctatcgaactttcgcaaaaagtactg

SEQ ID NO: 33379 - DNA, 30 bp, Artificial Sequence
  Synthetic oligonucleotide
cagatcatgacagaaggtagactcgtactg

SEQ ID NO: 33380 - DNA, 30 bp, Artificial Sequence
  Synthetic oligonucleotide
ggcagataccgaggccataggatattactg

SEQ ID NO: 33381 - DNA, 30 bp, Artificial Sequence
  Synthetic oligonucleotide
acatgacggcgatagcgccctccacacctg

SEQ ID NO: 33382 - DNA, 30 bp, Artificial Sequence
  Synthetic oligonucleotide
aacggcaggtaacacaattgataccacctg

SEQ ID NO: 33383 - DNA, 30 bp, Artificial Sequence
  Synthetic oligonucleotide
tgaagaccaatcctaagagggtcatacctg

SEQ ID NO: 33384 - DNA, 30 bp, Artificial Sequence
  Synthetic oligonucleotide
gggcagcgatactccggaacgatgaccctg

SEQ ID NO: 33385 - DNA, 30 bp, Artificial Sequence
  Synthetic oligonucleotide
catgccatccctgctaaagcccaaagcctg

SEQ ID NO: 33386 - DNA, 30 bp, Artificial Sequence
  Synthetic oligonucleotide
ctacaacgaaattcccttcgaaaaggcctg

SEQ ID NO: 33387 - DNA, 30 bp, Artificial Sequence
  Synthetic oligonucleotide
gcgtggcgtctagaaacaaggggaggcctg

SEQ ID NO: 33388 - DNA, 30 bp, Artificial Sequence
  Synthetic oligonucleotide
tgctaagcgtgataagcggaagggggcctg

SEQ ID NO: 33389 - DNA, 30 bp, Artificial Sequence
  Synthetic oligonucleotide
cgatacccgaggcctaggctgagctgcctg

SEQ ID NO: 33390 - DNA, 30 bp, Artificial Sequence
  Synthetic oligonucleotide
gcatcatacaagcgggtgagacaaatcctg

SEQ ID NO: 33391 - DNA, 30 bp, Artificial Sequence
  Synthetic oligonucleotide
gcatgagatagataggcaagcgcaacgctg

SEQ ID NO: 33392 - DNA, 30 bp, Artificial Sequence
  Synthetic oligonucleotide
tgtgaagctgtcataaagcgaacatggctg

SEQ ID NO: 33393 - DNA, 30 bp, Artificial Sequence
  Synthetic oligonucleotide
cagttgagggccgaatgcgcatcctggctg

SEQ ID NO: 33394 - DNA, 31 bp, Artificial Sequence
  Synthetic oligonucleotide
gtgcgggagcgcgagcaacacggggtatctg

SEQ ID NO: 33395 - DNA, 30 bp, Artificial Sequence
  Synthetic oligonucleotide
gatacgaagtgggcagtggataatgctctg

SEQ ID NO: 33396 - DNA, 30 bp, Artificial Sequence
  Synthetic oligonucleotide
cacgtctgcctaaacagagccacacttctg

SEQ ID NO: 33397 - DNA, 30 bp, Artificial Sequence
  Synthetic oligonucleotide
acggcaacggattacgttggtctccttctg

SEQ ID NO: 33398 - DNA, 30 bp, Artificial Sequence
  Synthetic oligonucleotide
ggtgcaggatacgaaggggcagccaaagtg

SEQ ID NO: 33399 - DNA, 30 bp, Artificial Sequence
  Synthetic oligonucleotide
aatgcgcaaccgcccgaatatcataaagtg

SEQ ID NO: 33400 - DNA, 30 bp, Artificial Sequence
  Synthetic oligonucleotide
aactcaatgtcgagaatttgcgaacaagtg

SEQ ID NO: 33401 - DNA, 30 bp, Artificial Sequence
  Synthetic oligonucleotide
ctcaaatagtgaatgaactggatgtaagtg

SEQ ID NO: 33402 - DNA, 30 bp, Artificial Sequence
  Synthetic oligonucleotide
aggtaactttgctgacggttgcggacagtg

SEQ ID NO: 33403 - DNA, 30 bp, Artificial Sequence
  Synthetic oligonucleotide
gggacaacctggattgcggaccgaccagtg

SEQ ID NO: 33404 - DNA, 30 bp, Artificial Sequence
  Synthetic oligonucleotide
caagcgctctttatcagtaaagtaccagtg

SEQ ID NO: 33405 - DNA, 30 bp, Artificial Sequence
  Synthetic oligonucleotide
atgcggcaccaaatccggggacgatcagtg

SEQ ID NO: 33406 - DNA, 30 bp, Artificial Sequence
  Synthetic oligonucleotide
tgtagatgatatctgctcagacactcagtg

SEQ ID NO: 33407 - DNA, 30 bp, Artificial Sequence
  Synthetic oligonucleotide
ctacacgaaaacgtccaatgtgattcagtg

SEQ ID NO: 33408 - DNA, 30 bp, Artificial Sequence
  Synthetic oligonucleotide
atgctaatgggttactggtcaataagagtg

SEQ ID NO: 33409 - DNA, 30 bp, Artificial Sequence
  Synthetic oligonucleotide
cgcatggaataggcatcttgggtgagagtg

SEQ ID NO: 33410 - DNA, 30 bp, Artificial Sequence
  Synthetic oligonucleotide
agcgagtttagcagagttgttacgggagtg

SEQ ID NO: 33411 - DNA, 30 bp, Artificial Sequence
  Synthetic oligonucleotide
gggcgaagttaggcgtaatgcacttgagtg

SEQ ID NO: 33412 - DNA, 30 bp, Artificial Sequence
  Synthetic oligonucleotide
gggtgagtgaacgctaatgctgtaatagtg

SEQ ID NO: 33413 - DNA, 30 bp, Artificial Sequence
  Synthetic oligonucleotide
tggacggccttatataaagcagtgatagtg

SEQ ID NO: 33414 - DNA, 30 bp, Artificial Sequence
  Synthetic oligonucleotide
aggccacactttacatgtgtgaaaaacgtg

SEQ ID NO: 33415 - DNA, 30 bp, Artificial Sequence
  Synthetic oligonucleotide
tcggaattggagacagttccgggaaacgtg

SEQ ID NO: 33416 - DNA, 30 bp, Artificial Sequence
  Synthetic oligonucleotide
atgatataggaaagtctgaaccagaacgtg

SEQ ID NO: 33417 - DNA, 30 bp, Artificial Sequence
  Synthetic oligonucleotide
tgctaaggcggtcgcggagatctccacgtg

SEQ ID NO: 33418 - DNA, 30 bp, Artificial Sequence
  Synthetic oligonucleotide
agatcaggcataattcgagcgacctacgtg

SEQ ID NO: 33419 - DNA, 30 bp, Artificial Sequence
  Synthetic oligonucleotide
cggagtaaaagatgtaaagaaaagaccgtg

SEQ ID NO: 33420 - DNA, 30 bp, Artificial Sequence
  Synthetic oligonucleotide
ggggggaaacagatacaagtccgccccgtg

SEQ ID NO: 33421 - DNA, 30 bp, Artificial Sequence
  Synthetic oligonucleotide
acagagaacgctaagtcggtatagtccgtg

SEQ ID NO: 33422 - DNA, 30 bp, Artificial Sequence
  Synthetic oligonucleotide
gggtcacttaggtgtaaacgagcgtccgtg

SEQ ID NO: 33423 - DNA, 30 bp, Artificial Sequence
  Synthetic oligonucleotide
aggtagccaccgcacagattagcgtccgtg

SEQ ID NO: 33424 - DNA, 30 bp, Artificial Sequence
  Synthetic oligonucleotide
cacttacagaacatagtgtaaggcaaggtg

SEQ ID NO: 33425 - DNA, 30 bp, Artificial Sequence
  Synthetic oligonucleotide
taacaatggagaggcgcaatgactgaggtg

SEQ ID NO: 33426 - DNA, 30 bp, Artificial Sequence
  Synthetic oligonucleotide
agacgggggaggagtagtcgacctacggtg

SEQ ID NO: 33427 - DNA, 30 bp, Artificial Sequence
  Synthetic oligonucleotide
aaaggtcacataaaagataccacaccggtg

SEQ ID NO: 33428 - DNA, 30 bp, Artificial Sequence
  Synthetic oligonucleotide
catagcggtgcagttatagaggtggcggtg

SEQ ID NO: 33429 - DNA, 30 bp, Artificial Sequence
  Synthetic oligonucleotide
caggaagggatacccattcttaaaagggtg

SEQ ID NO: 33430 - DNA, 30 bp, Artificial Sequence
  Synthetic oligonucleotide
gcttactgcgaaggtcttgtcatgagggtg

SEQ ID NO: 33431 - DNA, 30 bp, Artificial Sequence
  Synthetic oligonucleotide
agttcgcgagcaggtaataggcaagtggtg

SEQ ID NO: 33432 - DNA, 30 bp, Artificial Sequence
  Synthetic oligonucleotide
ccagagaatggggctcttcacgaattggtg

SEQ ID NO: 33433 - DNA, 30 bp, Artificial Sequence
  Synthetic oligonucleotide
caaacggtagtgcttctgaaataaaatgtg

SEQ ID NO: 33434 - DNA, 30 bp, Artificial Sequence
  Synthetic oligonucleotide
gcagaatagtgacctttctcgaatcgtgtg

SEQ ID NO: 33435 - DNA, 30 bp, Artificial Sequence
  Synthetic oligonucleotide
ggcggcggtcagctcgatacacggggtgtg

SEQ ID NO: 33436 - DNA, 30 bp, Artificial Sequence
  Synthetic oligonucleotide
acgcggatgtgaagggactcgctgaaattg

SEQ ID NO: 33437 - DNA, 30 bp, Artificial Sequence
  Synthetic oligonucleotide
atgtgttcaacataagcagggggggaattg

SEQ ID NO: 33438 - DNA, 30 bp, Artificial Sequence
  Synthetic oligonucleotide
agatagggggaggtattgataggctaattg

SEQ ID NO: 33439 - DNA, 30 bp, Artificial Sequence
  Synthetic oligonucleotide
aggtacttccactggtaaccgaatacattg

SEQ ID NO: 33440 - DNA, 30 bp, Artificial Sequence
  Synthetic oligonucleotide
gtaacgggggccacacgatggaggccattg

SEQ ID NO: 33441 - DNA, 30 bp, Artificial Sequence
  Synthetic oligonucleotide
ccaatattaccaacgggaagggcctcattg

SEQ ID NO: 33442 - DNA, 30 bp, Artificial Sequence
  Synthetic oligonucleotide
taactacgaagtaaaaatgattcctgattg

SEQ ID NO: 33443 - DNA, 30 bp, Artificial Sequence
  Synthetic oligonucleotide
gagaggtcgggatggtagtaaccattattg

SEQ ID NO: 33444 - DNA, 30 bp, Artificial Sequence
  Synthetic oligonucleotide
taggtaacaactcgcgtgcctacccgcttg

SEQ ID NO: 33445 - DNA, 30 bp, Artificial Sequence
  Synthetic oligonucleotide
ttggtgtggctagaggaacacttcaagttg

SEQ ID NO: 33446 - DNA, 30 bp, Artificial Sequence
  Synthetic oligonucleotide
aggtagtggacaaacaggaagtgggagttg

SEQ ID NO: 33447 - DNA, 30 bp, Artificial Sequence
  Synthetic oligonucleotide
tgggaatagctggtaactcgaggagcgttg

SEQ ID NO: 33448 - DNA, 30 bp, Artificial Sequence
  Synthetic oligonucleotide
cgaaaggtggggtaccaaataaagtcgttg

SEQ ID NO: 33449 - DNA, 30 bp, Artificial Sequence
  Synthetic oligonucleotide
ctctgagcggataactggagagcgtcgttg

SEQ ID NO: 33450 - DNA, 30 bp, Artificial Sequence
  Synthetic oligonucleotide
ctgaagtgcggtgagagccgggacaatttg

SEQ ID NO: 33451 - DNA, 30 bp, Artificial Sequence
  Synthetic oligonucleotide
tcatcttgcgcaatgggagagccgtatttg

SEQ ID NO: 33452 - DNA, 30 bp, Artificial Sequence
  Synthetic oligonucleotide
aacaggacctaaggacgactaagaactttg

SEQ ID NO: 33453 - DNA, 30 bp, Artificial Sequence
  Synthetic oligonucleotide
ccagctgaattggccgttctgctcgttttg

SEQ ID NO: 33454 - DNA, 30 bp, Artificial Sequence
  Synthetic oligonucleotide
ttagatcaagggcgaagcgtgggtccaaat

SEQ ID NO: 33455 - DNA, 30 bp, Artificial Sequence
  Synthetic oligonucleotide
aaagggcggtgcgtaacacgttaaggaaat

SEQ ID NO: 33456 - DNA, 30 bp, Artificial Sequence
  Synthetic oligonucleotide
cgtggaggaattaataatgggctcgtaaat

SEQ ID NO: 33457 - DNA, 30 bp, Artificial Sequence
  Synthetic oligonucleotide
cgggagagattccaagcgtgatctgtaaat

SEQ ID NO: 33458 - DNA, 30 bp, Artificial Sequence
  Synthetic oligonucleotide
gctgagatgatattccgagcggtgaacaat

SEQ ID NO: 33459 - DNA, 30 bp, Artificial Sequence
  Synthetic oligonucleotide
acagaataatgggtatgcaataaagacaat

SEQ ID NO: 33460 - DNA, 31 bp, Artificial Sequence
  Synthetic oligonucleotide
atggacaataacgtacagcatttcagacaat

SEQ ID NO: 33461 - DNA, 30 bp, Artificial Sequence
  Synthetic oligonucleotide
gcaacgagcagagccacctatcaatacaat

SEQ ID NO: 33462 - DNA, 30 bp, Artificial Sequence
  Synthetic oligonucleotide
atcaagagcacaaacagctatgtactcaat

SEQ ID NO: 33463 - DNA, 30 bp, Artificial Sequence
  Synthetic oligonucleotide
gcgaaagcttagcatgggtgagggctcaat

SEQ ID NO: 33464 - DNA, 30 bp, Artificial Sequence
  Synthetic oligonucleotide
caatggaaagtaccaaagaattgcaagaat

SEQ ID NO: 33465 - DNA, 30 bp, Artificial Sequence
  Synthetic oligonucleotide
caatagtaggcaagagtggtagcgaagaat

SEQ ID NO: 33466 - DNA, 30 bp, Artificial Sequence
  Synthetic oligonucleotide
cggtatctaacgagtagtgtaaatgagaat

SEQ ID NO: 33467 - DNA, 30 bp, Artificial Sequence
  Synthetic oligonucleotide
acggaaatactttatgcaaatacatagaat

SEQ ID NO: 33468 - DNA, 30 bp, Artificial Sequence
  Synthetic oligonucleotide
gacgggtcaggacccgaacgaccaacgaat

SEQ ID NO: 33469 - DNA, 30 bp, Artificial Sequence
  Synthetic oligonucleotide
gatggtcacgaaaaactaaggcgtccgaat

SEQ ID NO: 33470 - DNA, 30 bp, Artificial Sequence
  Synthetic oligonucleotide
gcgttacaagcggtctaactaacagcgaat

SEQ ID NO: 33471 - DNA, 30 bp, Artificial Sequence
  Synthetic oligonucleotide
ggaactggcacactattattcaagtggaat

SEQ ID NO: 33472 - DNA, 30 bp, Artificial Sequence
  Synthetic oligonucleotide
caccaccagacaggcagctgcaagatgaat

SEQ ID NO: 33473 - DNA, 30 bp, Artificial Sequence
  Synthetic oligonucleotide
cacgtgcaaattgggttgagctccgtgaat

SEQ ID NO: 33474 - DNA, 30 bp, Artificial Sequence
  Synthetic oligonucleotide
ggtcagacatggatgaggtatagggtgaat

SEQ ID NO: 33475 - DNA, 30 bp, Artificial Sequence
  Synthetic oligonucleotide
agatattatacaggactggtgcgaagtaat

SEQ ID NO: 33476 - DNA, 30 bp, Artificial Sequence
  Synthetic oligonucleotide
ggagaacgtacctaagcggttaggagtaat

SEQ ID NO: 33477 - DNA, 30 bp, Artificial Sequence
  Synthetic oligonucleotide
caaaaaaggtcacacaaccctgcgattaat

SEQ ID NO: 33478 - DNA, 30 bp, Artificial Sequence
  Synthetic oligonucleotide
aggcagaaacgcagtatcatcgcaaaacat

SEQ ID NO: 33479 - DNA, 30 bp, Artificial Sequence
  Synthetic oligonucleotide
cacggaagccgtgctataactggccaacat

SEQ ID NO: 33480 - DNA, 30 bp, Artificial Sequence
  Synthetic oligonucleotide
acgtacagaaaatagaaatgatccgaacat

SEQ ID NO: 33481 - DNA, 30 bp, Artificial Sequence
  Synthetic oligonucleotide
acgggggaccatacgtcggagatcacacat

SEQ ID NO: 33482 - DNA, 30 bp, Artificial Sequence
  Synthetic oligonucleotide
gtaaagccagataatcccaaatgagcacat

SEQ ID NO: 33483 - DNA, 30 bp, Artificial Sequence
  Synthetic oligonucleotide
aatggaagatagaagatggactactcacat

SEQ ID NO: 33484 - DNA, 30 bp, Artificial Sequence
  Synthetic oligonucleotide
tgtgaacgagttcagctggaggtgtcacat

SEQ ID NO: 33485 - DNA, 30 bp, Artificial Sequence
  Synthetic oligonucleotide
atggcatgatggtggggctgaacaagacat

SEQ ID NO: 33486 - DNA, 30 bp, Artificial Sequence
  Synthetic oligonucleotide
cgggaagggacgcttcgactcttctgacat

SEQ ID NO: 33487 - DNA, 30 bp, Artificial Sequence
  Synthetic oligonucleotide
ccggcgaactaccaaacccaagtgcaccat

SEQ ID NO: 33488 - DNA, 30 bp, Artificial Sequence
  Synthetic oligonucleotide
cgggtgatatggaatagagctgcggaccat

SEQ ID NO: 33489 - DNA, 30 bp, Artificial Sequence
  Synthetic oligonucleotide
cgttgaggtacggcctgagtgaaagcccat

SEQ ID NO: 33490 - DNA, 30 bp, Artificial Sequence
  Synthetic oligonucleotide
ccgcaggtacagttccagagacgacgccat

SEQ ID NO: 33491 - DNA, 30 bp, Artificial Sequence
  Synthetic oligonucleotide
ctgagagtagaccggtgtaaaaaggtccat

SEQ ID NO: 33492 - DNA, 30 bp, Artificial Sequence
  Synthetic oligonucleotide
ggagatcgtacgatatctactcggcagcat

SEQ ID NO: 33493 - DNA, 30 bp, Artificial Sequence
  Synthetic oligonucleotide
ctgttcgagtctggtcaaggggctgagcat

SEQ ID NO: 33494 - DNA, 30 bp, Artificial Sequence
  Synthetic oligonucleotide
aggagtgatgaattgcagaacacatagcat

SEQ ID NO: 33495 - DNA, 30 bp, Artificial Sequence
  Synthetic oligonucleotide
gaccgcgaacgatggcaggggatctcgcat

SEQ ID NO: 33496 - DNA, 30 bp, Artificial Sequence
  Synthetic oligonucleotide
aagcacgtgagggtctgttcgcgaaggcat

SEQ ID NO: 33497 - DNA, 30 bp, Artificial Sequence
  Synthetic oligonucleotide
gtgaaagggcagtccgggggaaacaggcat

SEQ ID NO: 33498 - DNA, 30 bp, Artificial Sequence
  Synthetic oligonucleotide
taaagtgcaatgagatggtggagggggcat

SEQ ID NO: 33499 - DNA, 30 bp, Artificial Sequence
  Synthetic oligonucleotide
ataacacgggctaaatgggaacgtgggcat

SEQ ID NO: 33500 - DNA, 30 bp, Artificial Sequence
  Synthetic oligonucleotide
tgggaagcggggtaactatgtctaatgcat

SEQ ID NO: 33501 - DNA, 30 bp, Artificial Sequence
  Synthetic oligonucleotide
gacaaaggagtggagaaagtggaattgcat

SEQ ID NO: 33502 - DNA, 30 bp, Artificial Sequence
  Synthetic oligonucleotide
gcagagtacgagactaaataagatgatcat

SEQ ID NO: 33503 - DNA, 30 bp, Artificial Sequence
  Synthetic oligonucleotide
aagtcaggtgaaaggcaacacgtatatcat

SEQ ID NO: 33504 - DNA, 30 bp, Artificial Sequence
  Synthetic oligonucleotide
ggtaaagagctaggatacacatgttatcat

SEQ ID NO: 33505 - DNA, 30 bp, Artificial Sequence
  Synthetic oligonucleotide
acgatacaagcgattcacgaatggactcat

SEQ ID NO: 33506 - DNA, 30 bp, Artificial Sequence
  Synthetic oligonucleotide
ggccaaaagctcatgataaatccgcgtcat

SEQ ID NO: 33507 - DNA, 30 bp, Artificial Sequence
  Synthetic oligonucleotide
tgagttctagggagtggtggcaatggtcat

SEQ ID NO: 33508 - DNA, 30 bp, Artificial Sequence
  Synthetic oligonucleotide
aggatcaaattacttgaaaatggttgtcat

SEQ ID NO: 33509 - DNA, 30 bp, Artificial Sequence
  Synthetic oligonucleotide
tgcagaactaaaaacttgggaacgacagat

SEQ ID NO: 33510 - DNA, 30 bp, Artificial Sequence
  Synthetic oligonucleotide
acggacaggaatatgctaactgtagcagat

SEQ ID NO: 33511 - DNA, 30 bp, Artificial Sequence
  Synthetic oligonucleotide
tgtgaaacagtaaaaagtgcaaatagagat

SEQ ID NO: 33512 - DNA, 30 bp, Artificial Sequence
  Synthetic oligonucleotide
tggcgtaggcgaggggctgagctgatagat

SEQ ID NO: 33513 - DNA, 30 bp, Artificial Sequence
  Synthetic oligonucleotide
cacaccactaccgtcaaacaggacatcgat

SEQ ID NO: 33514 - DNA, 30 bp, Artificial Sequence
  Synthetic oligonucleotide
aggtggggccaaagctataaatcggtcgat

SEQ ID NO: 33515 - DNA, 30 bp, Artificial Sequence
  Synthetic oligonucleotide
cgacggacctagtacggttccaacaaggat

SEQ ID NO: 33516 - DNA, 30 bp, Artificial Sequence
  Synthetic oligonucleotide
gcggagagaagggtaacggtcgaacaggat

SEQ ID NO: 33517 - DNA, 30 bp, Artificial Sequence
  Synthetic oligonucleotide
tcacgaatctcgacagcactaggcgaggat

SEQ ID NO: 33518 - DNA, 30 bp, Artificial Sequence
  Synthetic oligonucleotide
cggacaatggcctgacgataggagtaggat

SEQ ID NO: 33519 - DNA, 30 bp, Artificial Sequence
  Synthetic oligonucleotide
aggtagagacaatggcgggcggcgtaggat

SEQ ID NO: 33520 - DNA, 30 bp, Artificial Sequence
  Synthetic oligonucleotide
tcaatagaagatcaatatgaacggagggat

SEQ ID NO: 33521 - DNA, 30 bp, Artificial Sequence
  Synthetic oligonucleotide
tcagatacacaagtaatgcggtcatgggat

SEQ ID NO: 33522 - DNA, 31 bp, Artificial Sequence
  Synthetic oligonucleotide
gatgaacaacgggggctaacagagatgggat

SEQ ID NO: 33523 - DNA, 30 bp, Artificial Sequence
  Synthetic oligonucleotide
ggctgacctccgaaggctagacaaatggat

SEQ ID NO: 33524 - DNA, 30 bp, Artificial Sequence
  Synthetic oligonucleotide
gatgaggaaaagtaatcgcgtcctgtggat

SEQ ID NO: 33525 - DNA, 30 bp, Artificial Sequence
  Synthetic oligonucleotide
tctaagatacgggagactccagataatgat

SEQ ID NO: 33526 - DNA, 30 bp, Artificial Sequence
  Synthetic oligonucleotide
atgcagagctccgaggatcaagctactgat

SEQ ID NO: 33527 - DNA, 30 bp, Artificial Sequence
  Synthetic oligonucleotide
tggagtagcaaaatagaggtaagtactgat

SEQ ID NO: 33528 - DNA, 30 bp, Artificial Sequence
  Synthetic oligonucleotide
ttccacgagagggtagggaggaatgttgat

SEQ ID NO: 33529 - DNA, 30 bp, Artificial Sequence
  Synthetic oligonucleotide
taggcatagggatcagcaggactgaaatat

SEQ ID NO: 33530 - DNA, 30 bp, Artificial Sequence
  Synthetic oligonucleotide
atctgacaggattacgggaggactacatat

SEQ ID NO: 33531 - DNA, 30 bp, Artificial Sequence
  Synthetic oligonucleotide
tgataggaattcgaggttagagtggcatat

SEQ ID NO: 33532 - DNA, 30 bp, Artificial Sequence
  Synthetic oligonucleotide
gggtcagggtgtgcttaggaaacaagatat

SEQ ID NO: 33533 - DNA, 30 bp, Artificial Sequence
  Synthetic oligonucleotide
tgagagagacaccgaggcaaattgggatat

SEQ ID NO: 33534 - DNA, 30 bp, Artificial Sequence
  Synthetic oligonucleotide
cgtagcgtgaaatttcgagaaggcctatat

SEQ ID NO: 33535 - DNA, 30 bp, Artificial Sequence
  Synthetic oligonucleotide
cacataagataacgaggcgtatgcgactat

SEQ ID NO: 33536 - DNA, 30 bp, Artificial Sequence
  Synthetic oligonucleotide
acgtgtactcgtgtagagcacaatacctat

SEQ ID NO: 33537 - DNA, 30 bp, Artificial Sequence
  Synthetic oligonucleotide
ttgttgtgttctctttttgtgtttgcctat

SEQ ID NO: 33538 - DNA, 30 bp, Artificial Sequence
  Synthetic oligonucleotide
tcgaagatggtgtcacccagacggttctat

SEQ ID NO: 33539 - DNA, 30 bp, Artificial Sequence
  Synthetic oligonucleotide
cggtaaaactacataccaaagagcgagtat

SEQ ID NO: 33540 - DNA, 30 bp, Artificial Sequence
  Synthetic oligonucleotide
cggtatatactgcaactacaagtcgagtat

SEQ ID NO: 33541 - DNA, 30 bp, Artificial Sequence
  Synthetic oligonucleotide
cgacggtaatattaggaaaaacggtagtat

SEQ ID NO: 33542 - DNA, 30 bp, Artificial Sequence
  Synthetic oligonucleotide
cgggccggatcagcggagacagaaacgtat

SEQ ID NO: 33543 - DNA, 30 bp, Artificial Sequence
  Synthetic oligonucleotide
acagagggtagaacgcaaagacgtgtgtat

SEQ ID NO: 33544 - DNA, 30 bp, Artificial Sequence
  Synthetic oligonucleotide
agtggagtgacagtcgcgatcgacaaaact

SEQ ID NO: 33545 - DNA, 30 bp, Artificial Sequence
  Synthetic oligonucleotide
agcgtgggaacgggttagccactcgaaact

SEQ ID NO: 33546 - DNA, 30 bp, Artificial Sequence
  Synthetic oligonucleotide
tcatcgttgagaataaacggaaaaacaact

SEQ ID NO: 33547 - DNA, 30 bp, Artificial Sequence
  Synthetic oligonucleotide
cgtgccaaggcacgaggttatcccgcaact

SEQ ID NO: 33548 - DNA, 30 bp, Artificial Sequence
  Synthetic oligonucleotide
ggcggaagcgcgattccggcagaccgaact

SEQ ID NO: 33549 - DNA, 30 bp, Artificial Sequence
  Synthetic oligonucleotide
atgagtggggagggaaaaacggaatgaact

SEQ ID NO: 33550 - DNA, 30 bp, Artificial Sequence
  Synthetic oligonucleotide
ccgagattaggggttaagtatgcttgaact

SEQ ID NO: 33551 - DNA, 30 bp, Artificial Sequence
  Synthetic oligonucleotide
ctgctcccaaaaacaaacgataactccact

SEQ ID NO: 33552 - DNA, 30 bp, Artificial Sequence
  Synthetic oligonucleotide
cgggaagccccaagcacctgagaacgcact

SEQ ID NO: 33553 - DNA, 30 bp, Artificial Sequence
  Synthetic oligonucleotide
aagaactacccacacgaattgcgatcgact

SEQ ID NO: 33554 - DNA, 30 bp, Artificial Sequence
  Synthetic oligonucleotide
tgcaagagcaccaatcatgcaagagtgact

SEQ ID NO: 33555 - DNA, 30 bp, Artificial Sequence
  Synthetic oligonucleotide
gtgaagatgtgaggaaagaagcgctatact

SEQ ID NO: 33556 - DNA, 30 bp, Artificial Sequence
  Synthetic oligonucleotide
accgtatgaacgtgctgatgaaaaggtact

SEQ ID NO: 33557 - DNA, 30 bp, Artificial Sequence
  Synthetic oligonucleotide
aagatagatcagttcgtggacacgattact

SEQ ID NO: 33558 - DNA, 30 bp, Artificial Sequence
  Synthetic oligonucleotide
ggacgagttaaacgaaaaacagggtaacct

SEQ ID NO: 33559 - DNA, 30 bp, Artificial Sequence
  Synthetic oligonucleotide
caactgcacatgagaacgagtaaagcacct

SEQ ID NO: 33560 - DNA, 30 bp, Artificial Sequence
  Synthetic oligonucleotide
tgggcgaataaggtcaagcaaatggcacct

SEQ ID NO: 33561 - DNA, 30 bp, Artificial Sequence
  Synthetic oligonucleotide
tggggcgacgattcttacccagagagacct

SEQ ID NO: 33562 - DNA, 30 bp, Artificial Sequence
  Synthetic oligonucleotide
ggcacgagtccgtcatatcccagaatacct

SEQ ID NO: 33563 - DNA, 30 bp, Artificial Sequence
  Synthetic oligonucleotide
agtatagagagacagggtaagtaagtacct

SEQ ID NO: 33564 - DNA, 30 bp, Artificial Sequence
  Synthetic oligonucleotide
ccgagaggcaagtaagtttaggcaatccct

SEQ ID NO: 33565 - DNA, 30 bp, Artificial Sequence
  Synthetic oligonucleotide
tgacggcctactataacaaaaaatatccct

SEQ ID NO: 33566 - DNA, 30 bp, Artificial Sequence
  Synthetic oligonucleotide
aggaacaggcagccagagtaaggatcgcct

SEQ ID NO: 33567 - DNA, 30 bp, Artificial Sequence
  Synthetic oligonucleotide
ccggtcgggagtgtgtggttcagctaagct

SEQ ID NO: 33568 - DNA, 30 bp, Artificial Sequence
  Synthetic oligonucleotide
acgaatggccgtatttcgggaacaacagct

SEQ ID NO: 33569 - DNA, 30 bp, Artificial Sequence
  Synthetic oligonucleotide
acgcatttaggtgggaggaaggtagcagct

SEQ ID NO: 33570 - DNA, 30 bp, Artificial Sequence
  Synthetic oligonucleotide
gctcgactcaccaaaccataactcagagct

SEQ ID NO: 33571 - DNA, 30 bp, Artificial Sequence
  Synthetic oligonucleotide
tgacgggcgatcaaaacccaagagaacgct

SEQ ID NO: 33572 - DNA, 30 bp, Artificial Sequence
  Synthetic oligonucleotide
tacataaatgaaggactaatgcgaaccgct

SEQ ID NO: 33573 - DNA, 30 bp, Artificial Sequence
  Synthetic oligonucleotide
tgtacgacacaaaatgatactgcacccgct

SEQ ID NO: 33574 - DNA, 30 bp, Artificial Sequence
  Synthetic oligonucleotide
gggcgacctatacacagggcccgaaaggct

SEQ ID NO: 33575 - DNA, 30 bp, Artificial Sequence
  Synthetic oligonucleotide
tcgcaacccgtcgagggaatcagggtggct

SEQ ID NO: 33576 - DNA, 30 bp, Artificial Sequence
  Synthetic oligonucleotide
tggatagagacacccgagctagatgctgct

SEQ ID NO: 33577 - DNA, 30 bp, Artificial Sequence
  Synthetic oligonucleotide
caagccaggcgtcaagagtgagcaagtgct

SEQ ID NO: 33578 - DNA, 30 bp, Artificial Sequence
  Synthetic oligonucleotide
aggggaaatcagcctggagtcaggcgtgct

SEQ ID NO: 33579 - DNA, 30 bp, Artificial Sequence
  Synthetic oligonucleotide
gcgtggatttcgatcatcaaatagcttgct

SEQ ID NO: 33580 - DNA, 30 bp, Artificial Sequence
  Synthetic oligonucleotide
gacgagtactgtcatcaaacaaacgaatct

SEQ ID NO: 33581 - DNA, 30 bp, Artificial Sequence
  Synthetic oligonucleotide
tagcgcacgctacgccgacaccctgaatct

SEQ ID NO: 33582 - DNA, 30 bp, Artificial Sequence
  Synthetic oligonucleotide
aaatggacagtaataataccgtacacatct

SEQ ID NO: 33583 - DNA, 30 bp, Artificial Sequence
  Synthetic oligonucleotide
ccgtcaggttagctcgaactgtcagcatct

SEQ ID NO: 33584 - DNA, 30 bp, Artificial Sequence
  Synthetic oligonucleotide
gggggcatgcatgagggagggtacgcatct

SEQ ID NO: 33585 - DNA, 30 bp, Artificial Sequence
  Synthetic oligonucleotide
ggacacaaacgaatacgcgagctacactct

SEQ ID NO: 33586 - DNA, 30 bp, Artificial Sequence
  Synthetic oligonucleotide
cctgaatgccaacggcgtataaacagctct

SEQ ID NO: 33587 - DNA, 30 bp, Artificial Sequence
  Synthetic oligonucleotide
cgatacatcctgacgaaaagttatcgctct

SEQ ID NO: 33588 - DNA, 30 bp, Artificial Sequence
  Synthetic oligonucleotide
tgcgtgtagcatgagaggatccagaagtct

SEQ ID NO: 33589 - DNA, 30 bp, Artificial Sequence
  Synthetic oligonucleotide
gcgagcgaagggcgggggaacagcgagtct

SEQ ID NO: 33590 - DNA, 30 bp, Artificial Sequence
  Synthetic oligonucleotide
catcatatcatcaaaatcacgaatgcgtct

SEQ ID NO: 33591 - DNA, 30 bp, Artificial Sequence
  Synthetic oligonucleotide
tgaagggaggatctgtggtggacatggtct

SEQ ID NO: 33592 - DNA, 30 bp, Artificial Sequence
  Synthetic oligonucleotide
agggactgctaagacggatgaaatatgtct

SEQ ID NO: 33593 - DNA, 30 bp, Artificial Sequence
  Synthetic oligonucleotide
gtcgggacctgaacgtagggacgaaattct

SEQ ID NO: 33594 - DNA, 30 bp, Artificial Sequence
  Synthetic oligonucleotide
ggcaattcggctaacagatcagagcattct

SEQ ID NO: 33595 - DNA, 30 bp, Artificial Sequence
  Synthetic oligonucleotide
gtaagagaaggacctaacaatcatgaaagt

SEQ ID NO: 33596 - DNA, 30 bp, Artificial Sequence
  Synthetic oligonucleotide
ccggccaaaggaagatctagcggttaaagt

SEQ ID NO: 33597 - DNA, 30 bp, Artificial Sequence
  Synthetic oligonucleotide
ttacacccaagcagcgtgggagccacaagt

SEQ ID NO: 33598 - DNA, 30 bp, Artificial Sequence
  Synthetic oligonucleotide
acaccagggtggtcagcaatcgatccaagt

SEQ ID NO: 33599 - DNA, 30 bp, Artificial Sequence
  Synthetic oligonucleotide
ctaaaaaccggaggtactcctttagcaagt

SEQ ID NO: 33600 - DNA, 30 bp, Artificial Sequence
  Synthetic oligonucleotide
caccgataaaacgcactcgtaagctcaagt

SEQ ID NO: 33601 - DNA, 30 bp, Artificial Sequence
  Synthetic oligonucleotide
aggcggcatagcggaaccccggtgagaagt

SEQ ID NO: 33602 - DNA, 30 bp, Artificial Sequence
  Synthetic oligonucleotide
gcgtggacacaatgatcagtgggtcgaagt

SEQ ID NO: 33603 - DNA, 30 bp, Artificial Sequence
  Synthetic oligonucleotide
tcaaagcccagaagcgtagcggtactaagt

SEQ ID NO: 33604 - DNA, 30 bp, Artificial Sequence
  Synthetic oligonucleotide
gtacgaatcgcgtaaaatatcaccttaagt

SEQ ID NO: 33605 - DNA, 30 bp, Artificial Sequence
  Synthetic oligonucleotide
aatgagacgcgtcggcgtaatccaaacagt

SEQ ID NO: 33606 - DNA, 30 bp, Artificial Sequence
  Synthetic oligonucleotide
acagagggaatggttcggataccgaacagt

SEQ ID NO: 33607 - DNA, 30 bp, Artificial Sequence
  Synthetic oligonucleotide
cggtaggccttggaccatacgaataacagt

SEQ ID NO: 33608 - DNA, 30 bp, Artificial Sequence
  Synthetic oligonucleotide
acaaaaccaatgtaaattagcggtcacagt

SEQ ID NO: 33609 - DNA, 30 bp, Artificial Sequence
  Synthetic oligonucleotide
atagagcggcggaaatacgcaagtaccagt

SEQ ID NO: 33610 - DNA, 30 bp, Artificial Sequence
  Synthetic oligonucleotide
agatggaggtttgaggaggttacaagcagt

SEQ ID NO: 33611 - DNA, 30 bp, Artificial Sequence
  Synthetic oligonucleotide
cgtcacatgaagttaagtaaacctcgcagt

SEQ ID NO: 33612 - DNA, 30 bp, Artificial Sequence
  Synthetic oligonucleotide
gccggtaggtacgatatacagatgggcagt

SEQ ID NO: 33613 - DNA, 30 bp, Artificial Sequence
  Synthetic oligonucleotide
actcgacaaggatactcggcgctgatcagt

SEQ ID NO: 33614 - DNA, 30 bp, Artificial Sequence
  Synthetic oligonucleotide
tgccgttagattaaagcccaaggaaagagt

SEQ ID NO: 33615 - DNA, 30 bp, Artificial Sequence
  Synthetic oligonucleotide
ggggagggctaagataattctaaccagagt

SEQ ID NO: 33616 - DNA, 30 bp, Artificial Sequence
  Synthetic oligonucleotide
gaacaaatttaatgaattcatgaccagagt

SEQ ID NO: 33617 - DNA, 30 bp, Artificial Sequence
  Synthetic oligonucleotide
gcacgcgagccatgaaaagttgaccagagt

SEQ ID NO: 33618 - DNA, 30 bp, Artificial Sequence
  Synthetic oligonucleotide
taataagcctgagaataccagtacgagagt

SEQ ID NO: 33619 - DNA, 30 bp, Artificial Sequence
  Synthetic oligonucleotide
ggcaagtagattactacggttcaggagagt

SEQ ID NO: 33620 - DNA, 30 bp, Artificial Sequence
  Synthetic oligonucleotide
gcagacattgaaagatgtgcggcaacgagt

SEQ ID NO: 33621 - DNA, 30 bp, Artificial Sequence
  Synthetic oligonucleotide
agattgggtgaggaaatgacatggtcgagt

SEQ ID NO: 33622 - DNA, 30 bp, Artificial Sequence
  Synthetic oligonucleotide
gccgtaaaaactatcaagggaacttcgagt

SEQ ID NO: 33623 - DNA, 30 bp, Artificial Sequence
  Synthetic oligonucleotide
acagcgaaccatagcatataaaaccggagt

SEQ ID NO: 33624 - DNA, 30 bp, Artificial Sequence
  Synthetic oligonucleotide
aagcagggacagccgattaggaggtggagt

SEQ ID NO: 33625 - DNA, 30 bp, Artificial Sequence
  Synthetic oligonucleotide
aaaggggattaagaaccgtaatgttggagt

SEQ ID NO: 33626 - DNA, 30 bp, Artificial Sequence
  Synthetic oligonucleotide
cgaatgtcaggtagcggtgaggcgcatagt

SEQ ID NO: 33627 - DNA, 30 bp, Artificial Sequence
  Synthetic oligonucleotide
cgatgaaaaaaagcatacataggttatagt

SEQ ID NO: 33628 - DNA, 30 bp, Artificial Sequence
  Synthetic oligonucleotide
tgaagagacacgaatgtttaaaacactagt

SEQ ID NO: 33629 - DNA, 30 bp, Artificial Sequence
  Synthetic oligonucleotide
actgcctgagagctaaaataaagcagtagt

SEQ ID NO: 33630 - DNA, 30 bp, Artificial Sequence
  Synthetic oligonucleotide
ccgccagatggtaaatataagaggattagt

SEQ ID NO: 33631 - DNA, 30 bp, Artificial Sequence
  Synthetic oligonucleotide
gggaggatatagaacaagactgagtttagt

SEQ ID NO: 33632 - DNA, 30 bp, Artificial Sequence
  Synthetic oligonucleotide
gaaaggatctagagttggtaagcagaacgt

SEQ ID NO: 33633 - DNA, 30 bp, Artificial Sequence
  Synthetic oligonucleotide
tgaaccggatctgttgggagaagaggacgt

SEQ ID NO: 33634 - DNA, 30 bp, Artificial Sequence
  Synthetic oligonucleotide
aggcctgacagagtcctacatacactacgt

SEQ ID NO: 33635 - DNA, 30 bp, Artificial Sequence
  Synthetic oligonucleotide
gaagctgaggtcgataagaatagagtacgt

SEQ ID NO: 33636 - DNA, 30 bp, Artificial Sequence
  Synthetic oligonucleotide
gggaggggtgtacaaaggaaacatgtacgt

SEQ ID NO: 33637 - DNA, 30 bp, Artificial Sequence
  Synthetic oligonucleotide
agttacgtgataaacacaaaaggtgaccgt

SEQ ID NO: 33638 - DNA, 30 bp, Artificial Sequence
  Synthetic oligonucleotide
taaggcacggataggacgttcgatctccgt

SEQ ID NO: 33639 - DNA, 30 bp, Artificial Sequence
  Synthetic oligonucleotide
tacgttacgggaaaccaaacggtaaagcgt

SEQ ID NO: 33640 - DNA, 30 bp, Artificial Sequence
  Synthetic oligonucleotide
ctgggcgctagtgtaaactcaggggagcgt

SEQ ID NO: 33641 - DNA, 30 bp, Artificial Sequence
  Synthetic oligonucleotide
aaggactaatgaagtcgcctgaaaatgcgt

SEQ ID NO: 33642 - DNA, 30 bp, Artificial Sequence
  Synthetic oligonucleotide
cttgtagagaaactaacagcctgaaatcgt

SEQ ID NO: 33643 - DNA, 30 bp, Artificial Sequence
  Synthetic oligonucleotide
agtcacacgggaatggcgagcgctgatcgt

SEQ ID NO: 33644 - DNA, 30 bp, Artificial Sequence
  Synthetic oligonucleotide
gcgtcacagtggaatgtaagcaacgctcgt

SEQ ID NO: 33645 - DNA, 30 bp, Artificial Sequence
  Synthetic oligonucleotide
ggcggtatcgccgcgatcgggtgaggtcgt

SEQ ID NO: 33646 - DNA, 30 bp, Artificial Sequence
  Synthetic oligonucleotide
cacgcgaaaatcagcttaagggaagaaggt

SEQ ID NO: 33647 - DNA, 30 bp, Artificial Sequence
  Synthetic oligonucleotide
ccgagggagaatcgggttcgttcgtaaggt

SEQ ID NO: 33648 - DNA, 31 bp, Artificial Sequence
  Synthetic oligonucleotide
ggggaagcgatagatggtaattctgtaaggt

SEQ ID NO: 33649 - DNA, 30 bp, Artificial Sequence
  Synthetic oligonucleotide
gtgcgatcgacggaatggaataagacaggt

SEQ ID NO: 33650 - DNA, 30 bp, Artificial Sequence
  Synthetic oligonucleotide
ggtggtttcagggagaaactaagagcaggt

SEQ ID NO: 33651 - DNA, 30 bp, Artificial Sequence
  Synthetic oligonucleotide
atacagaaaacaagaggtgacacgttaggt

SEQ ID NO: 33652 - DNA, 30 bp, Artificial Sequence
  Synthetic oligonucleotide
gctaggagtgtgataatggacgtgaccggt

SEQ ID NO: 33653 - DNA, 30 bp, Artificial Sequence
  Synthetic oligonucleotide
cgaaccatatgcccccccaaaagagtcggt

SEQ ID NO: 33654 - DNA, 30 bp, Artificial Sequence
  Synthetic oligonucleotide
cgtccgcaaacaaaatgatggacgaatggt

SEQ ID NO: 33655 - DNA, 30 bp, Artificial Sequence
  Synthetic oligonucleotide
cggaccgtgcagttggccagacgtgatggt

SEQ ID NO: 33656 - DNA, 30 bp, Artificial Sequence
  Synthetic oligonucleotide
gctaagcgcagggcacagcagtcgtatggt

SEQ ID NO: 33657 - DNA, 31 bp, Artificial Sequence
  Synthetic oligonucleotide
cgatgaaagttcgggtgtaattactagtggt

SEQ ID NO: 33658 - DNA, 30 bp, Artificial Sequence
  Synthetic oligonucleotide
gatacataacatcacacgtcccaaggtggt

SEQ ID NO: 33659 - DNA, 30 bp, Artificial Sequence
  Synthetic oligonucleotide
tgataacgtgacaaagatgaatggggtggt

SEQ ID NO: 33660 - DNA, 30 bp, Artificial Sequence
  Synthetic oligonucleotide
gtgtgagtaggaatgaactcgttgggtggt

SEQ ID NO: 33661 - DNA, 30 bp, Artificial Sequence
  Synthetic oligonucleotide
agcctacaaacgaaacgatgtaggattggt

SEQ ID NO: 33662 - DNA, 30 bp, Artificial Sequence
  Synthetic oligonucleotide
tagacaggccgaggcggagactatattggt

SEQ ID NO: 33663 - DNA, 30 bp, Artificial Sequence
  Synthetic oligonucleotide
gtgcgcaaagagtcgtttggcatgaaatgt

SEQ ID NO: 33664 - DNA, 30 bp, Artificial Sequence
  Synthetic oligonucleotide
atgcgaagctacgctcaaggtggggcatgt

SEQ ID NO: 33665 - DNA, 30 bp, Artificial Sequence
  Synthetic oligonucleotide
atcgagtatagcaagattggaacttcatgt

SEQ ID NO: 33666 - DNA, 30 bp, Artificial Sequence
  Synthetic oligonucleotide
acgccctagagcgcgatgtgggtaagatgt

SEQ ID NO: 33667 - DNA, 30 bp, Artificial Sequence
  Synthetic oligonucleotide
taacaatatgaagacaactatgccagatgt

SEQ ID NO: 33668 - DNA, 30 bp, Artificial Sequence
  Synthetic oligonucleotide
aggccaagaacattggcgataccttgatgt

SEQ ID NO: 33669 - DNA, 30 bp, Artificial Sequence
  Synthetic oligonucleotide
agagataaaaatgtatcaagtagcctatgt

SEQ ID NO: 33670 - DNA, 30 bp, Artificial Sequence
  Synthetic oligonucleotide
gcggatgcaaccgaatgagaaaatgcctgt

SEQ ID NO: 33671 - DNA, 30 bp, Artificial Sequence
  Synthetic oligonucleotide
cgcaccagagtaacctcaagctagacgtgt

SEQ ID NO: 33672 - DNA, 30 bp, Artificial Sequence
  Synthetic oligonucleotide
gggcgaaaaagtcgtttaggggtaccgtgt

SEQ ID NO: 33673 - DNA, 30 bp, Artificial Sequence
  Synthetic oligonucleotide
tactgaaagcgattcatcttgagggcgtgt

SEQ ID NO: 33674 - DNA, 30 bp, Artificial Sequence
  Synthetic oligonucleotide
gggggagcgcataccaccagcgcaatgtgt

SEQ ID NO: 33675 - DNA, 30 bp, Artificial Sequence
  Synthetic oligonucleotide
acgcgtgtgagagagtgtgatgggcattgt

SEQ ID NO: 33676 - DNA, 30 bp, Artificial Sequence
  Synthetic oligonucleotide
gtggggcggagacgaatgttctggagttgt

SEQ ID NO: 33677 - DNA, 30 bp, Artificial Sequence
  Synthetic oligonucleotide
gcgagtttggaaaagcacgatagtaaaatt

SEQ ID NO: 33678 - DNA, 30 bp, Artificial Sequence
  Synthetic oligonucleotide
gggaacgtcaacacttatcaaacaccaatt

SEQ ID NO: 33679 - DNA, 30 bp, Artificial Sequence
  Synthetic oligonucleotide
cggcacgttcgcgactgttatccaccaatt

SEQ ID NO: 33680 - DNA, 30 bp, Artificial Sequence
  Synthetic oligonucleotide
aatggaacaatagcaagatagtagataatt

SEQ ID NO: 33681 - DNA, 30 bp, Artificial Sequence
  Synthetic oligonucleotide
acaccaaaacaccaagcccgatgtctaatt

SEQ ID NO: 33682 - DNA, 30 bp, Artificial Sequence
  Synthetic oligonucleotide
tcagtacaggtagaagcgtacgatcccatt

SEQ ID NO: 33683 - DNA, 30 bp, Artificial Sequence
  Synthetic oligonucleotide
cacaccaaaaaagggagtacaagggccatt

SEQ ID NO: 33684 - DNA, 30 bp, Artificial Sequence
  Synthetic oligonucleotide
aggtgggctctaagacgggatacacagatt

SEQ ID NO: 33685 - DNA, 30 bp, Artificial Sequence
  Synthetic oligonucleotide
atcggacgacggaaaagatcgtgggcgatt

SEQ ID NO: 33686 - DNA, 30 bp, Artificial Sequence
  Synthetic oligonucleotide
tgcgagagtgcggaaccgttggaagggatt

SEQ ID NO: 33687 - DNA, 30 bp, Artificial Sequence
  Synthetic oligonucleotide
tcaaaataaaaaaggcaagcaagtttgatt

SEQ ID NO: 33688 - DNA, 30 bp, Artificial Sequence
  Synthetic oligonucleotide
agggagtcaaatccaatgagaaacgatatt

SEQ ID NO: 33689 - DNA, 30 bp, Artificial Sequence
  Synthetic oligonucleotide
gagaacgaacgtaaggtaatagccagtatt

SEQ ID NO: 33690 - DNA, 30 bp, Artificial Sequence
  Synthetic oligonucleotide
tcgaagtggcacgttaacatcattgttatt

SEQ ID NO: 33691 - DNA, 30 bp, Artificial Sequence
  Synthetic oligonucleotide
aggtaaggacacgaggactacgatacactt

SEQ ID NO: 33692 - DNA, 30 bp, Artificial Sequence
  Synthetic oligonucleotide
cagaatacccgagtagtgtaaagggcactt

SEQ ID NO: 33693 - DNA, 30 bp, Artificial Sequence
  Synthetic oligonucleotide
atgtaaacaatatggttataacactgactt

SEQ ID NO: 33694 - DNA, 30 bp, Artificial Sequence
  Synthetic oligonucleotide
agttaggcgtgaacatgagacgatatactt

SEQ ID NO: 33695 - DNA, 30 bp, Artificial Sequence
  Synthetic oligonucleotide
gggggcgtgcgctacgactgtataaacctt

SEQ ID NO: 33696 - DNA, 30 bp, Artificial Sequence
  Synthetic oligonucleotide
agtagaagtcagtgatgagcagaaggcctt

SEQ ID NO: 33697 - DNA, 30 bp, Artificial Sequence
  Synthetic oligonucleotide
gcgaagcgaacttaatataagtctggcctt

SEQ ID NO: 33698 - DNA, 30 bp, Artificial Sequence
  Synthetic oligonucleotide
cggcccaaacatactaagtaagcatgcctt

SEQ ID NO: 33699 - DNA, 30 bp, Artificial Sequence
  Synthetic oligonucleotide
atcagagtacaacaggatgcgccctggctt

SEQ ID NO: 33700 - DNA, 30 bp, Artificial Sequence
  Synthetic oligonucleotide
cgcctacgagaaactgccgaatctgatctt

SEQ ID NO: 33701 - DNA, 30 bp, Artificial Sequence
  Synthetic oligonucleotide
gctaggaccagagaagtatatgagaaagtt

SEQ ID NO: 33702 - DNA, 30 bp, Artificial Sequence
  Synthetic oligonucleotide
taagccgtaaggagagcatgacccacagtt

SEQ ID NO: 33703 - DNA, 30 bp, Artificial Sequence
  Synthetic oligonucleotide
ctagatcaatgatacacaatactagcagtt

SEQ ID NO: 33704 - DNA, 30 bp, Artificial Sequence
  Synthetic oligonucleotide
cggggtagagatcagttcgaagaatcagtt

SEQ ID NO: 33705 - DNA, 30 bp, Artificial Sequence
  Synthetic oligonucleotide
gaaggtggaaatctaacaaagatgagagtt

SEQ ID NO: 33706 - DNA, 31 bp, Artificial Sequence
  Synthetic oligonucleotide
cagtagcctgcaaagaatgtcagctagagtt

SEQ ID NO: 33707 - DNA, 30 bp, Artificial Sequence
  Synthetic oligonucleotide
catgagcggaacttcaacctgccacgagtt

SEQ ID NO: 33708 - DNA, 30 bp, Artificial Sequence
  Synthetic oligonucleotide
taagatggattatatagaggtgtgcgagtt

SEQ ID NO: 33709 - DNA, 30 bp, Artificial Sequence
  Synthetic oligonucleotide
caggagatgggagcttgtgatagttacgtt

SEQ ID NO: 33710 - DNA, 30 bp, Artificial Sequence
  Synthetic oligonucleotide
agagattcgtacttgacaggggcgcccgtt

SEQ ID NO: 33711 - DNA, 30 bp, Artificial Sequence
  Synthetic oligonucleotide
cgtcatcaactatctcatgtttgctccgtt

SEQ ID NO: 33712 - DNA, 30 bp, Artificial Sequence
  Synthetic oligonucleotide
ttcgttgaaagagtgttctcaaagagcgtt

SEQ ID NO: 33713 - DNA, 30 bp, Artificial Sequence
  Synthetic oligonucleotide
aacgaagcactagcatatagcaaagtcgtt

SEQ ID NO: 33714 - DNA, 30 bp, Artificial Sequence
  Synthetic oligonucleotide
cacggtcctcaaagaggtgtcgatcaggtt

SEQ ID NO: 33715 - DNA, 30 bp, Artificial Sequence
  Synthetic oligonucleotide
cgtaggtcccaagggaaagaattgagggtt

SEQ ID NO: 33716 - DNA, 30 bp, Artificial Sequence
  Synthetic oligonucleotide
aagggacgagaataaatcaaaggatcattt

SEQ ID NO: 33717 - DNA, 30 bp, Artificial Sequence
  Synthetic oligonucleotide
ttgttgtgttctctttttgtgttttccttt

SEQ ID NO: 33718 - DNA, 30 bp, Artificial Sequence
  Synthetic oligonucleotide
cgatgaaatctaaaatgtccacctgagttt

SEQ ID NO: 33719 - DNA, 30 bp, Artificial Sequence
  Synthetic oligonucleotide
caggagtatgcggtacggctcgaatagttt

SEQ ID NO: 33720 - DNA, 30 bp, Artificial Sequence
  Synthetic oligonucleotide
actgtatcggcaaggtagaaaagtgcgttt

SEQ ID NO: 33721 - DNA, 30 bp, Artificial Sequence
  Synthetic oligonucleotide
cgctaagacaataagttgtgacacaggttt

SEQ ID NO: 33722 - DNA, 30 bp, Artificial Sequence
  Synthetic oligonucleotide
cccgtaacgaaaaccagccaacactctttt

SEQ ID NO: 33723 - DNA, 30 bp, Artificial Sequence
  Synthetic oligonucleotide
agggcgcaagatgaattaagaacgcgtttt

SEQ ID NO: 33724 - DNA, 30 bp, Artificial Sequence
  Synthetic oligonucleotide
tcaagcttaggagacatgggtttagaaaaa

SEQ ID NO: 33725 - DNA, 30 bp, Artificial Sequence
  Synthetic oligonucleotide
atcatgaggaacagacatcccacggaaaaa

SEQ ID NO: 33726 - DNA, 30 bp, Artificial Sequence
  Synthetic oligonucleotide
tctgagaagatgggactctaggtctaaaaa

SEQ ID NO: 33727 - DNA, 30 bp, Artificial Sequence
  Synthetic oligonucleotide
acctcacacagttgcggaaagtacacaaaa

SEQ ID NO: 33728 - DNA, 30 bp, Artificial Sequence
  Synthetic oligonucleotide
tacgaaggaccgttgggtgcggattcaaaa

SEQ ID NO: 33729 - DNA, 30 bp, Artificial Sequence
  Synthetic oligonucleotide
agaagccgcgaatgacaggatatcagaaaa

SEQ ID NO: 33730 - DNA, 30 bp, Artificial Sequence
  Synthetic oligonucleotide
accagtgatggtacagattggcaacgaaaa

SEQ ID NO: 33731 - DNA, 30 bp, Artificial Sequence
  Synthetic oligonucleotide
gcgagtgtagatgcggacagctttcgaaaa

SEQ ID NO: 33732 - DNA, 30 bp, Artificial Sequence
  Synthetic oligonucleotide
gccggaggatcgggatttgctaagggaaaa

SEQ ID NO: 33733 - DNA, 30 bp, Artificial Sequence
  Synthetic oligonucleotide
caacgcgtgatacggtattagctgtgaaaa

SEQ ID NO: 33734 - DNA, 30 bp, Artificial Sequence
  Synthetic oligonucleotide
atgagcctgggattgagggtccgcataaaa

SEQ ID NO: 33735 - DNA, 30 bp, Artificial Sequence
  Synthetic oligonucleotide
cggtgatcgtgtaacggatgggacgtaaaa

SEQ ID NO: 33736 - DNA, 30 bp, Artificial Sequence
  Synthetic oligonucleotide
gatcgtcaggaagagacactaacaaacaaa

SEQ ID NO: 33737 - DNA, 29 bp, Artificial Sequence
  Synthetic oligonucleotide
tgtacagagggcgtagacccacaaacaaa

SEQ ID NO: 33738 - DNA, 30 bp, Artificial Sequence
  Synthetic oligonucleotide
cggaaggcagggaatactcaatgaaacaaa

SEQ ID NO: 33739 - DNA, 30 bp, Artificial Sequence
  Synthetic oligonucleotide
atccgggcacgtcagccagactgtaacaaa

SEQ ID NO: 33740 - DNA, 30 bp, Artificial Sequence
  Synthetic oligonucleotide
ttcgaaaaaacaaccgagagagacgacaaa

SEQ ID NO: 33741 - DNA, 30 bp, Artificial Sequence
  Synthetic oligonucleotide
ccggacaggatacttcaacaccatgacaaa

SEQ ID NO: 33742 - DNA, 30 bp, Artificial Sequence
  Synthetic oligonucleotide
ggtgaaactagagcatactaagttgacaaa

SEQ ID NO: 33743 - DNA, 30 bp, Artificial Sequence
  Synthetic oligonucleotide
tgtagccagcaacggcgtcaaaaatacaaa

SEQ ID NO: 33744 - DNA, 30 bp, Artificial Sequence
  Synthetic oligonucleotide
gggaaacgtaggtagcgaatgaagaccaaa

SEQ ID NO: 33745 - DNA, 30 bp, Artificial Sequence
  Synthetic oligonucleotide
taggagagaatacggatttggcgccccaaa

SEQ ID NO: 33746 - DNA, 30 bp, Artificial Sequence
  Synthetic oligonucleotide
tacggtagttagcaggagagatcagccaaa

SEQ ID NO: 33747 - DNA, 30 bp, Artificial Sequence
  Synthetic oligonucleotide
acacctcacgtaaggtgtatagtagccaaa

SEQ ID NO: 33748 - DNA, 30 bp, Artificial Sequence
  Synthetic oligonucleotide
ataaaagtatgagcagagttaaaggccaaa

SEQ ID NO: 33749 - DNA, 30 bp, Artificial Sequence
  Synthetic oligonucleotide
gagacaccggcaacagggtgggactccaaa

SEQ ID NO: 33750 - DNA, 30 bp, Artificial Sequence
  Synthetic oligonucleotide
ttcggcggcaaaacagagtagtagtccaaa

SEQ ID NO: 33751 - DNA, 30 bp, Artificial Sequence
  Synthetic oligonucleotide
taaatccaagccaatgtatgtgtgcgcaaa

SEQ ID NO: 33752 - DNA, 30 bp, Artificial Sequence
  Synthetic oligonucleotide
cgagcctagaacgcctgggtggtcctcaaa

SEQ ID NO: 33753 - DNA, 30 bp, Artificial Sequence
  Synthetic oligonucleotide
ggtaagctggggctttaatacggatagaaa

SEQ ID NO: 33754 - DNA, 30 bp, Artificial Sequence
  Synthetic oligonucleotide
gcgtgaatgacgcaatcgtcggagtagaaa

SEQ ID NO: 33755 - DNA, 30 bp, Artificial Sequence
  Synthetic oligonucleotide
cacggggccacagtattaaggttcacgaaa

SEQ ID NO: 33756 - DNA, 30 bp, Artificial Sequence
  Synthetic oligonucleotide
gaggccggacaaaatacaagagagccgaaa

SEQ ID NO: 33757 - DNA, 30 bp, Artificial Sequence
  Synthetic oligonucleotide
tcaacagaaggaacctaacggtggccgaaa

SEQ ID NO: 33758 - DNA, 30 bp, Artificial Sequence
  Synthetic oligonucleotide
cgagtcctcagacactagaaggaagcgaaa

SEQ ID NO: 33759 - DNA, 30 bp, Artificial Sequence
  Synthetic oligonucleotide
tcttaatcaaagagcactaactaagcgaaa

SEQ ID NO: 33760 - DNA, 30 bp, Artificial Sequence
  Synthetic oligonucleotide
atagttaacagaggtggcgaaggggcgaaa

SEQ ID NO: 33761 - DNA, 30 bp, Artificial Sequence
  Synthetic oligonucleotide
ggggggtgttcaagacggtgcgattcgaaa

SEQ ID NO: 33762 - DNA, 30 bp, Artificial Sequence
  Synthetic oligonucleotide
agaacgcacaaggttctaacggacaggaaa

SEQ ID NO: 33763 - DNA, 30 bp, Artificial Sequence
  Synthetic oligonucleotide
tcgtctgaaagacgttcgcacatcaggaaa

SEQ ID NO: 33764 - DNA, 30 bp, Artificial Sequence
  Synthetic oligonucleotide
actcgacacgcgagcaagaattgtcggaaa

SEQ ID NO: 33765 - DNA, 30 bp, Artificial Sequence
  Synthetic oligonucleotide
cccaaggtagtaaggctatcccgactgaaa

SEQ ID NO: 33766 - DNA, 30 bp, Artificial Sequence
  Synthetic oligonucleotide
cgatgaaacgtattataatcggtggtgaaa

SEQ ID NO: 33767 - DNA, 30 bp, Artificial Sequence
  Synthetic oligonucleotide
gcctggctggaagggagactatttttgaaa

SEQ ID NO: 33768 - DNA, 30 bp, Artificial Sequence
  Synthetic oligonucleotide
caagaagtcgcgcgttcgtggcgaaataaa

SEQ ID NO: 33769 - DNA, 30 bp, Artificial Sequence
  Synthetic oligonucleotide
tcgttaatcgcgacagtccatcttaataaa

SEQ ID NO: 33770 - DNA, 30 bp, Artificial Sequence
  Synthetic oligonucleotide
acgcgaaacgcaaacgggtgtatacataaa

SEQ ID NO: 33771 - DNA, 30 bp, Artificial Sequence
  Synthetic oligonucleotide
gcgtcaatagaggagccaaagcctgataaa

SEQ ID NO: 33772 - DNA, 30 bp, Artificial Sequence
  Synthetic oligonucleotide
gggatcgaccacgtccgaaatcagtctaaa

SEQ ID NO: 33773 - DNA, 30 bp, Artificial Sequence
  Synthetic oligonucleotide
gctagtaaagctgccggaagaaaaagtaaa

SEQ ID NO: 33774 - DNA, 30 bp, Artificial Sequence
  Synthetic oligonucleotide
gacccacagttgcaaaaagaagagcgtaaa

SEQ ID NO: 33775 - DNA, 30 bp, Artificial Sequence
  Synthetic oligonucleotide
ggaccctaacagtaaagagatccgcttaaa

SEQ ID NO: 33776 - DNA, 30 bp, Artificial Sequence
  Synthetic oligonucleotide
atcgaccggcaggttcagatgccgcaacaa

SEQ ID NO: 33777 - DNA, 30 bp, Artificial Sequence
  Synthetic oligonucleotide
gtcataggctggacaagatattgagaacaa

SEQ ID NO: 33778 - DNA, 30 bp, Artificial Sequence
  Synthetic oligonucleotide
caccaaggccgtggatgagccaaaacacaa

SEQ ID NO: 33779 - DNA, 30 bp, Artificial Sequence
  Synthetic oligonucleotide
cggaccgtagcaaataagttgtgcacacaa

SEQ ID NO: 33780 - DNA, 30 bp, Artificial Sequence
  Synthetic oligonucleotide
atcagggagaaacattaggttcaagcacaa

SEQ ID NO: 33781 - DNA, 30 bp, Artificial Sequence
  Synthetic oligonucleotide
cgaagcagatacatgtggcacatactacaa

SEQ ID NO: 33782 - DNA, 30 bp, Artificial Sequence
  Synthetic oligonucleotide
catgggcggataactaacaaggatctacaa

SEQ ID NO: 33783 - DNA, 30 bp, Artificial Sequence
  Synthetic oligonucleotide
cgagcacaatcgtgggtgaaacgagtacaa

SEQ ID NO: 33784 - DNA, 30 bp, Artificial Sequence
  Synthetic oligonucleotide
ggaggggtccgtacaagcgtgacgacccaa

SEQ ID NO: 33785 - DNA, 30 bp, Artificial Sequence
  Synthetic oligonucleotide
ggagagtcgtacaattcgatctaagcccaa

SEQ ID NO: 33786 - DNA, 30 bp, Artificial Sequence
  Synthetic oligonucleotide
aactgcgggataagacacttcactagccaa

SEQ ID NO: 33787 - DNA, 30 bp, Artificial Sequence
  Synthetic oligonucleotide
gggttaactattcagtcagaggtacgccaa

SEQ ID NO: 33788 - DNA, 30 bp, Artificial Sequence
  Synthetic oligonucleotide
gcaatgtacgaggggggtcggaagcgccaa

SEQ ID NO: 33789 - DNA, 30 bp, Artificial Sequence
  Synthetic oligonucleotide
tatgggagatgatggggcgtgagagtccaa

SEQ ID NO: 33790 - DNA, 30 bp, Artificial Sequence
  Synthetic oligonucleotide
acaccggcgacgatgagggaaagattccaa

SEQ ID NO: 33791 - DNA, 30 bp, Artificial Sequence
  Synthetic oligonucleotide
ataggggtagaaagacaaagaaccttccaa

SEQ ID NO: 33792 - DNA, 30 bp, Artificial Sequence
  Synthetic oligonucleotide
gcgatgcctctgcaggcgaagatcaagcaa

SEQ ID NO: 33793 - DNA, 30 bp, Artificial Sequence
  Synthetic oligonucleotide
taacggatagaagtaaatctaccgcagcaa

SEQ ID NO: 33794 - DNA, 30 bp, Artificial Sequence
  Synthetic oligonucleotide
tgaagtcgactacatctacatctgcagcaa

SEQ ID NO: 33795 - DNA, 30 bp, Artificial Sequence
  Synthetic oligonucleotide
tggaggactctccgcacccaatagtagcaa

SEQ ID NO: 33796 - DNA, 30 bp, Artificial Sequence
  Synthetic oligonucleotide
cattacgatttcagacggcagggtgcgcaa

SEQ ID NO: 33797 - DNA, 30 bp, Artificial Sequence
  Synthetic oligonucleotide
aaccggttgatctcgaaggactgtgcgcaa

SEQ ID NO: 33798 - DNA, 30 bp, Artificial Sequence
  Synthetic oligonucleotide
cctgtcgagaacagaaataggtggcggcaa

SEQ ID NO: 33799 - DNA, 30 bp, Artificial Sequence
  Synthetic oligonucleotide
taacgagaagacagacctgaggtgaatcaa

SEQ ID NO: 33800 - DNA, 30 bp, Artificial Sequence
  Synthetic oligonucleotide
aaaggggcgcaattcgtgttttaagatcaa

SEQ ID NO: 33801 - DNA, 30 bp, Artificial Sequence
  Synthetic oligonucleotide
atgggattaagtcgtataaagggtactcaa

SEQ ID NO: 33802 - DNA, 30 bp, Artificial Sequence
  Synthetic oligonucleotide
cagagtactaaactaaaagcacgctctcaa

SEQ ID NO: 33803 - DNA, 30 bp, Artificial Sequence
  Synthetic oligonucleotide
tgctaaacggacgggcgaggaaattctcaa

SEQ ID NO: 33804 - DNA, 30 bp, Artificial Sequence
  Synthetic oligonucleotide
taatgggtgggtgctcagaactaaggtcaa

SEQ ID NO: 33805 - DNA, 30 bp, Artificial Sequence
  Synthetic oligonucleotide
gacggaatcatggaggcacacgggggtcaa

SEQ ID NO: 33806 - DNA, 30 bp, Artificial Sequence
  Synthetic oligonucleotide
cttgtgaacggggaggacgatcatcttcaa

SEQ ID NO: 33807 - DNA, 30 bp, Artificial Sequence
  Synthetic oligonucleotide
ggatgtacgtgagccagagcgcgcaaagaa

SEQ ID NO: 33808 - DNA, 30 bp, Artificial Sequence
  Synthetic oligonucleotide
tcccggaatcgcaagatagaacggcaagaa

SEQ ID NO: 33809 - DNA, 30 bp, Artificial Sequence
  Synthetic oligonucleotide
cggcaatggctcagagattgacaggaagaa

SEQ ID NO: 33810 - DNA, 30 bp, Artificial Sequence
  Synthetic oligonucleotide
ggcactcccgaaaagtcagaaacgacagaa

SEQ ID NO: 33811 - DNA, 30 bp, Artificial Sequence
  Synthetic oligonucleotide
cgttaagtgcgaaactttcgaaatacagaa

SEQ ID NO: 33812 - DNA, 30 bp, Artificial Sequence
  Synthetic oligonucleotide
cctcactacatactttcggagtacccagaa

SEQ ID NO: 33813 - DNA, 30 bp, Artificial Sequence
  Synthetic oligonucleotide
caatgcagccgagagtatatgtgcgcagaa

SEQ ID NO: 33814 - DNA, 30 bp, Artificial Sequence
  Synthetic oligonucleotide
taggcccaaaaggtcagagctagggcagaa

SEQ ID NO: 33815 - DNA, 30 bp, Artificial Sequence
  Synthetic oligonucleotide
ttggcagggatcaagcggtgtggatcagaa

SEQ ID NO: 33816 - DNA, 30 bp, Artificial Sequence
  Synthetic oligonucleotide
aacgggacacgtagttggaagggacgagaa

SEQ ID NO: 33817 - DNA, 30 bp, Artificial Sequence
  Synthetic oligonucleotide
tttgaaagaataaagaatggacagcgagaa

SEQ ID NO: 33818 - DNA, 30 bp, Artificial Sequence
  Synthetic oligonucleotide
taccggaacgtagtcactaagtggcgagaa

SEQ ID NO: 33819 - DNA, 30 bp, Artificial Sequence
  Synthetic oligonucleotide
taacgcggacaaaagaggtccagtcgagaa

SEQ ID NO: 33820 - DNA, 30 bp, Artificial Sequence
  Synthetic oligonucleotide
gggacaacaggttgtaaagtttgtggagaa

SEQ ID NO: 33821 - DNA, 30 bp, Artificial Sequence
  Synthetic oligonucleotide
gcggacgagacccaataaatatgcatagaa

SEQ ID NO: 33822 - DNA, 30 bp, Artificial Sequence
  Synthetic oligonucleotide
gtaaagagccagcggacagttgagatagaa

SEQ ID NO: 33823 - DNA, 30 bp, Artificial Sequence
  Synthetic oligonucleotide
aggcattgatgcaaagagcaatgactagaa

SEQ ID NO: 33824 - DNA, 30 bp, Artificial Sequence
  Synthetic oligonucleotide
caggcccactgagttgctgaagtgctagaa

SEQ ID NO: 33825 - DNA, 30 bp, Artificial Sequence
  Synthetic oligonucleotide
acgacaaactagcacatacatgttgtagaa

SEQ ID NO: 33826 - DNA, 30 bp, Artificial Sequence
  Synthetic oligonucleotide
ggggacacaagggtgatcaatcgattagaa

SEQ ID NO: 33827 - DNA, 30 bp, Artificial Sequence
  Synthetic oligonucleotide
tctatcgctacagagtaggccgtacacgaa

SEQ ID NO: 33828 - DNA, 30 bp, Artificial Sequence
  Synthetic oligonucleotide
aggcgcccgcgtttcagacaaaatcacgaa

SEQ ID NO: 33829 - DNA, 30 bp, Artificial Sequence
  Synthetic oligonucleotide
acagagttgcgatggtacggataggacgaa

SEQ ID NO: 33830 - DNA, 30 bp, Artificial Sequence
  Synthetic oligonucleotide
acttaggggagcagcgagacatactacgaa

SEQ ID NO: 33831 - DNA, 30 bp, Artificial Sequence
  Synthetic oligonucleotide
aagggtggcgacttcattcatccctacgaa

SEQ ID NO: 33832 - DNA, 30 bp, Artificial Sequence
  Synthetic oligonucleotide
acggtaaggcctgaatagttcttctacgaa

SEQ ID NO: 33833 - DNA, 30 bp, Artificial Sequence
  Synthetic oligonucleotide
gtaaggcaccatcgcaaaggatcagccgaa

SEQ ID NO: 33834 - DNA, 30 bp, Artificial Sequence
  Synthetic oligonucleotide
agtaaaagccatcgtcacagggccgccgaa

SEQ ID NO: 33835 - DNA, 30 bp, Artificial Sequence
  Synthetic oligonucleotide
cgctctaaatattgttaatacaaggccgaa

SEQ ID NO: 33836 - DNA, 30 bp, Artificial Sequence
  Synthetic oligonucleotide
gaccaacagtaagcacggtatgttagcgaa

SEQ ID NO: 33837 - DNA, 30 bp, Artificial Sequence
  Synthetic oligonucleotide
gtcagagccgaaagtcaggtccctcgcgaa

SEQ ID NO: 33838 - DNA, 30 bp, Artificial Sequence
  Synthetic oligonucleotide
tcacagtcagagttcggaccagctggcgaa

SEQ ID NO: 33839 - DNA, 30 bp, Artificial Sequence
  Synthetic oligonucleotide
gcgagtgactagctggtatgtaattgcgaa

SEQ ID NO: 33840 - DNA, 30 bp, Artificial Sequence
  Synthetic oligonucleotide
ttgggaggatcgtccaagaagggaatcgaa

SEQ ID NO: 33841 - DNA, 30 bp, Artificial Sequence
  Synthetic oligonucleotide
tgcgtgaggtgaaaatacgaacttatcgaa

SEQ ID NO: 33842 - DNA, 30 bp, Artificial Sequence
  Synthetic oligonucleotide
ttgcgccgtataaggggacgtatagtcgaa

SEQ ID NO: 33843 - DNA, 30 bp, Artificial Sequence
  Synthetic oligonucleotide
tcgaacacaccaaggggtcaaggcttcgaa

SEQ ID NO: 33844 - DNA, 30 bp, Artificial Sequence
  Synthetic oligonucleotide
ggcgtaatccgtcaaaccttagctaaggaa

SEQ ID NO: 33845 - DNA, 30 bp, Artificial Sequence
  Synthetic oligonucleotide
actggtcgattgggacatcttagggaggaa

SEQ ID NO: 33846 - DNA, 30 bp, Artificial Sequence
  Synthetic oligonucleotide
cgaagaacggcaatattttgagcaacggaa

SEQ ID NO: 33847 - DNA, 30 bp, Artificial Sequence
  Synthetic oligonucleotide
tagcgtcgtggcaaagggagtagtccggaa

SEQ ID NO: 33848 - DNA, 30 bp, Artificial Sequence
  Synthetic oligonucleotide
gtgaccagaaaatcgtccatgtagtcggaa

SEQ ID NO: 33849 - DNA, 30 bp, Artificial Sequence
  Synthetic oligonucleotide
gggaatggctaatgtgaatatacaagggaa

SEQ ID NO: 33850 - DNA, 30 bp, Artificial Sequence
  Synthetic oligonucleotide
acaactgccggattcgaggcccagtgggaa

SEQ ID NO: 33851 - DNA, 30 bp, Artificial Sequence
  Synthetic oligonucleotide
gcgcaaagtcaagcagcttggattatggaa

SEQ ID NO: 33852 - DNA, 29 bp, Artificial Sequence
  Synthetic oligonucleotide
cgcacgtaaagtaccacactatactggaa

SEQ ID NO: 33853 - DNA, 30 bp, Artificial Sequence
  Synthetic oligonucleotide
cggtcaatggcatgagttagtgtgctggaa

SEQ ID NO: 33854 - DNA, 30 bp, Artificial Sequence
  Synthetic oligonucleotide
tcgaaatggctgctatccaaatgtcatgaa

SEQ ID NO: 33855 - DNA, 30 bp, Artificial Sequence
  Synthetic oligonucleotide
ggtgtataacgaattaggcgatagtatgaa

SEQ ID NO: 33856 - DNA, 30 bp, Artificial Sequence
  Synthetic oligonucleotide
cactacggggtcgcgcgaacgtaaactgaa

SEQ ID NO: 33857 - DNA, 30 bp, Artificial Sequence
  Synthetic oligonucleotide
agtcaaagattgcgtattactgcgactgaa

SEQ ID NO: 33858 - DNA, 30 bp, Artificial Sequence
  Synthetic oligonucleotide
cgaactcggagatattacggatccgctgaa

SEQ ID NO: 33859 - DNA, 30 bp, Artificial Sequence
  Synthetic oligonucleotide
caggataaaacgggtgtgcgagtggctgaa

SEQ ID NO: 33860 - DNA, 30 bp, Artificial Sequence
  Synthetic oligonucleotide
tgggtctaaacgtcaaacataatcagtgaa

SEQ ID NO: 33861 - DNA, 30 bp, Artificial Sequence
  Synthetic oligonucleotide
ggaaagcggagctcagaacgagaacgtgaa

SEQ ID NO: 33862 - DNA, 30 bp, Artificial Sequence
  Synthetic oligonucleotide
ggcggatgccatctcatcaagttccgtgaa

SEQ ID NO: 33863 - DNA, 30 bp, Artificial Sequence
  Synthetic oligonucleotide
tcgtcagaggtaaaagaggtgttaattgaa

SEQ ID NO: 33864 - DNA, 30 bp, Artificial Sequence
  Synthetic oligonucleotide
catggccgtcaaggctacggatgtattgaa

SEQ ID NO: 33865 - DNA, 30 bp, Artificial Sequence
  Synthetic oligonucleotide
aagaaccagttcaaggcttaaacagttgaa

SEQ ID NO: 33866 - DNA, 30 bp, Artificial Sequence
  Synthetic oligonucleotide
ccaggaactataactaacctgatggttgaa

SEQ ID NO: 33867 - DNA, 30 bp, Artificial Sequence
  Synthetic oligonucleotide
acaagacgcattgagaaagacttggttgaa

SEQ ID NO: 33868 - DNA, 30 bp, Artificial Sequence
  Synthetic oligonucleotide
cgccgtaggtcaaagtggtgggtgcaataa

SEQ ID NO: 33869 - DNA, 30 bp, Artificial Sequence
  Synthetic oligonucleotide
ggagacctccaacagcccagtgctgaataa

SEQ ID NO: 33870 - DNA, 30 bp, Artificial Sequence
  Synthetic oligonucleotide
ctgtcagaggatacaacacacactccataa

SEQ ID NO: 33871 - DNA, 30 bp, Artificial Sequence
  Synthetic oligonucleotide
atgtacgaggggatttgaggatagcgataa

SEQ ID NO: 33872 - DNA, 30 bp, Artificial Sequence
  Synthetic oligonucleotide
gcgggaaaggacaacaatgagcctaactaa

SEQ ID NO: 33873 - DNA, 30 bp, Artificial Sequence
  Synthetic oligonucleotide
accggggcacgcagaaatcgacgtcactaa

SEQ ID NO: 33874 - DNA, 30 bp, Artificial Sequence
  Synthetic oligonucleotide
gcgacacgttccagacggaacacaagctaa

SEQ ID NO: 33875 - DNA, 30 bp, Artificial Sequence
  Synthetic oligonucleotide
ccgggtaaggaaccgcgaaatagtagctaa

SEQ ID NO: 33876 - DNA, 30 bp, Artificial Sequence
  Synthetic oligonucleotide
ttccgtaacacaggtaacaaagttcgctaa

SEQ ID NO: 33877 - DNA, 30 bp, Artificial Sequence
  Synthetic oligonucleotide
atcacgcgtacggcgaagaagggggtctaa

SEQ ID NO: 33878 - DNA, 30 bp, Artificial Sequence
  Synthetic oligonucleotide
gcttacgtgtggaccgaaaaggagtagtaa

SEQ ID NO: 33879 - DNA, 30 bp, Artificial Sequence
  Synthetic oligonucleotide
agtgatgtagtgacaaatcgggaaccgtaa

SEQ ID NO: 33880 - DNA, 30 bp, Artificial Sequence
  Synthetic oligonucleotide
atagcgtcgaagccccaactagcgccgtaa

SEQ ID NO: 33881 - DNA, 30 bp, Artificial Sequence
  Synthetic oligonucleotide
atcgtaacctacggaaagatgggtccgtaa

SEQ ID NO: 33882 - DNA, 30 bp, Artificial Sequence
  Synthetic oligonucleotide
cagagaaactggactagatctaaagggtaa

SEQ ID NO: 33883 - DNA, 30 bp, Artificial Sequence
  Synthetic oligonucleotide
ggactactaaggtcatgccagaagctgtaa

SEQ ID NO: 33884 - DNA, 30 bp, Artificial Sequence
  Synthetic oligonucleotide
agcggcgaggtacccaacttggtcgattaa

SEQ ID NO: 33885 - DNA, 30 bp, Artificial Sequence
  Synthetic oligonucleotide
cagtctgggagcggaactcgttgatattaa

SEQ ID NO: 33886 - DNA, 30 bp, Artificial Sequence
  Synthetic oligonucleotide
ccaacaggtctgagggtagcaaaagcttaa

SEQ ID NO: 33887 - DNA, 30 bp, Artificial Sequence
  Synthetic oligonucleotide
agaacgtcaatgcaaaaacgatacgcttaa

SEQ ID NO: 33888 - DNA, 30 bp, Artificial Sequence
  Synthetic oligonucleotide
cagagcaaactacgtgtggggcatagttaa

SEQ ID NO: 33889 - DNA, 29 bp, Artificial Sequence
  Synthetic oligonucleotide
acggagagtaattaaactatagcggttaa

SEQ ID NO: 33890 - DNA, 30 bp, Artificial Sequence
  Synthetic oligonucleotide
cgaaggggtaaacattagacccaatgttaa

SEQ ID NO: 33891 - DNA, 30 bp, Artificial Sequence
  Synthetic oligonucleotide
agaggtgggtaccaaccacagccacaaaca

SEQ ID NO: 33892 - DNA, 30 bp, Artificial Sequence
  Synthetic oligonucleotide
tatatgcggggatggaaccagaggcaaaca

SEQ ID NO: 33893 - DNA, 30 bp, Artificial Sequence
  Synthetic oligonucleotide
atcgaccacataaaggcctatagggaaaca

SEQ ID NO: 33894 - DNA, 30 bp, Artificial Sequence
  Synthetic oligonucleotide
cccgtaaggagatccataagagaaacaaca

SEQ ID NO: 33895 - DNA, 30 bp, Artificial Sequence
  Synthetic oligonucleotide
aaacacagtagagaacaacaagacacaaca

SEQ ID NO: 33896 - DNA, 30 bp, Artificial Sequence
  Synthetic oligonucleotide
aggctagctaactggtagttacaggcaaca

SEQ ID NO: 33897 - DNA, 30 bp, Artificial Sequence
  Synthetic oligonucleotide
agtggacgagttcatgcaatcgactcaaca

SEQ ID NO: 33898 - DNA, 30 bp, Artificial Sequence
  Synthetic oligonucleotide
ggacgggtgcatatacatttcgcaagaaca

SEQ ID NO: 33899 - DNA, 30 bp, Artificial Sequence
  Synthetic oligonucleotide
catgtgaggagtctcataccagaacgaaca

SEQ ID NO: 33900 - DNA, 30 bp, Artificial Sequence
  Synthetic oligonucleotide
ccgggtacaatacagtgtcagagttgaaca

SEQ ID NO: 33901 - DNA, 30 bp, Artificial Sequence
  Synthetic oligonucleotide
aacacccaaaggtgacgtcgtaatgtaaca

SEQ ID NO: 33902 - DNA, 30 bp, Artificial Sequence
  Synthetic oligonucleotide
aagttaacgccatcgctcaccgacaacaca

SEQ ID NO: 33903 - DNA, 30 bp, Artificial Sequence
  Synthetic oligonucleotide
tcggcacctataagggaccaatataacaca

SEQ ID NO: 33904 - DNA, 30 bp, Artificial Sequence
  Synthetic oligonucleotide
aataagcaggatcaaggattgtcagacaca

SEQ ID NO: 33905 - DNA, 30 bp, Artificial Sequence
  Synthetic oligonucleotide
agacttccctcgagaactggacaatacaca

SEQ ID NO: 33906 - DNA, 30 bp, Artificial Sequence
  Synthetic oligonucleotide
gcgcggagggagaacaaccgcggatacaca

SEQ ID NO: 33907 - DNA, 30 bp, Artificial Sequence
  Synthetic oligonucleotide
acaggggggcccatatctcaactgtacaca

SEQ ID NO: 33908 - DNA, 30 bp, Artificial Sequence
  Synthetic oligonucleotide
gaccaattaacacgcataatacagcccaca

SEQ ID NO: 33909 - DNA, 30 bp, Artificial Sequence
  Synthetic oligonucleotide
aagatccgaatttaaggactactggccaca

SEQ ID NO: 33910 - DNA, 30 bp, Artificial Sequence
  Synthetic oligonucleotide
gaagctggaaccccaccgggaagtagcaca

SEQ ID NO: 33911 - DNA, 30 bp, Artificial Sequence
  Synthetic oligonucleotide
cacgagccaatggtattatcgagcctcaca

SEQ ID NO: 33912 - DNA, 30 bp, Artificial Sequence
  Synthetic oligonucleotide
taggtcagtatcgtataattccgcctcaca

SEQ ID NO: 33913 - DNA, 30 bp, Artificial Sequence
  Synthetic oligonucleotide
caacagttataatcttgctaagccgtcaca

SEQ ID NO: 33914 - DNA, 30 bp, Artificial Sequence
  Synthetic oligonucleotide
gcgggggtgtgaagattttgaagccagaca

SEQ ID NO: 33915 - DNA, 30 bp, Artificial Sequence
  Synthetic oligonucleotide
gaagactcccaccaactgatgactaggaca

SEQ ID NO: 33916 - DNA, 30 bp, Artificial Sequence
  Synthetic oligonucleotide
catagggcagggcgaaatacggtacggaca

SEQ ID NO: 33917 - DNA, 30 bp, Artificial Sequence
  Synthetic oligonucleotide
aactgcgaccagtattgcggataagtgaca

SEQ ID NO: 33918 - DNA, 30 bp, Artificial Sequence
  Synthetic oligonucleotide
cgctgatcgtggttgtacagcgaggtgaca

SEQ ID NO: 33919 - DNA, 30 bp, Artificial Sequence
  Synthetic oligonucleotide
tagaacggactttagatggccgaacataca

SEQ ID NO: 33920 - DNA, 30 bp, Artificial Sequence
  Synthetic oligonucleotide
catgtcaacgatgtaaacttaaggcataca

SEQ ID NO: 33921 - DNA, 30 bp, Artificial Sequence
  Synthetic oligonucleotide
cgacggtggatggttgggatagatactaca

SEQ ID NO: 33922 - DNA, 30 bp, Artificial Sequence
  Synthetic oligonucleotide
ccatacaacttatattcgaatcagcctaca

SEQ ID NO: 33923 - DNA, 30 bp, Artificial Sequence
  Synthetic oligonucleotide
actgagggaggtactaattgccactgtaca

SEQ ID NO: 33924 - DNA, 30 bp, Artificial Sequence
  Synthetic oligonucleotide
gaaacaaacagtaatgttgtgagcaaacca

SEQ ID NO: 33925 - DNA, 30 bp, Artificial Sequence
  Synthetic oligonucleotide
cgaataggctgtcgcaaaacaaatcaacca

SEQ ID NO: 33926 - DNA, 30 bp, Artificial Sequence
  Synthetic oligonucleotide
ggtctgcccgcgaaatcgaaattcgaacca

SEQ ID NO: 33927 - DNA, 30 bp, Artificial Sequence
  Synthetic oligonucleotide
tgcgcaagcctagcgagtcgaattgaacca

SEQ ID NO: 33928 - DNA, 30 bp, Artificial Sequence
  Synthetic oligonucleotide
taccgtcgccccgatattgaaaagtaacca

SEQ ID NO: 33929 - DNA, 30 bp, Artificial Sequence
  Synthetic oligonucleotide
ggtccctggacagagtgtagtacgtaacca

SEQ ID NO: 33930 - DNA, 30 bp, Artificial Sequence
  Synthetic oligonucleotide
cagaaatgcaagtgtgcatgcactacacca

SEQ ID NO: 33931 - DNA, 30 bp, Artificial Sequence
  Synthetic oligonucleotide
agatcgtgggccggtgacagtagggcacca

SEQ ID NO: 33932 - DNA, 30 bp, Artificial Sequence
  Synthetic oligonucleotide
aggatcggtacaaacataggaaaaagacca

SEQ ID NO: 33933 - DNA, 30 bp, Artificial Sequence
  Synthetic oligonucleotide
tctgagtcaacaggagaagcagtaagacca

SEQ ID NO: 33934 - DNA, 30 bp, Artificial Sequence
  Synthetic oligonucleotide
cgagggttatctgagaggacaatacgacca

SEQ ID NO: 33935 - DNA, 30 bp, Artificial Sequence
  Synthetic oligonucleotide
tccgaagttatagtcggaagagcaggacca

SEQ ID NO: 33936 - DNA, 30 bp, Artificial Sequence
  Synthetic oligonucleotide
aagtatcggggagcaaacgccgtaggacca

SEQ ID NO: 33937 - DNA, 30 bp, Artificial Sequence
  Synthetic oligonucleotide
tagggacagcttcgatacagttggggacca

SEQ ID NO: 33938 - DNA, 30 bp, Artificial Sequence
  Synthetic oligonucleotide
cgtatttcggctaagggagaacattgacca

SEQ ID NO: 33939 - DNA, 30 bp, Artificial Sequence
  Synthetic oligonucleotide
tgtggagcaatcctaatgctggggatacca

SEQ ID NO: 33940 - DNA, 30 bp, Artificial Sequence
  Synthetic oligonucleotide
tggatgtggaggcgacgaatgcatctacca

SEQ ID NO: 33941 - DNA, 30 bp, Artificial Sequence
  Synthetic oligonucleotide
ctaaccaacaggcacaaaacgcggaaccca

SEQ ID NO: 33942 - DNA, 30 bp, Artificial Sequence
  Synthetic oligonucleotide
ggggacgtcctaggacggtacaaagaccca

SEQ ID NO: 33943 - DNA, 30 bp, Artificial Sequence
  Synthetic oligonucleotide
tacgtaaactaaacacgggagtgtagccca

SEQ ID NO: 33944 - DNA, 31 bp, Artificial Sequence
  Synthetic oligonucleotide
tcgctcatttagatcccgatgcccagagcca

SEQ ID NO: 33945 - DNA, 30 bp, Artificial Sequence
  Synthetic oligonucleotide
actgggcaacggatatgggcagcagagcca

SEQ ID NO: 33946 - DNA, 30 bp, Artificial Sequence
  Synthetic oligonucleotide
acgttgggctgaaggttgagagcctagcca

SEQ ID NO: 33947 - DNA, 30 bp, Artificial Sequence
  Synthetic oligonucleotide
gacatcaacaggataatgcagacgacgcca

SEQ ID NO: 33948 - DNA, 30 bp, Artificial Sequence
  Synthetic oligonucleotide
cggagcaaaagagtcgcaagggctacgcca

SEQ ID NO: 33949 - DNA, 30 bp, Artificial Sequence
  Synthetic oligonucleotide
gcacattaaacgtccccagatgacccgcca

SEQ ID NO: 33950 - DNA, 30 bp, Artificial Sequence
  Synthetic oligonucleotide
gagcatacaccacgatcgataagcgcgcca

SEQ ID NO: 33951 - DNA, 30 bp, Artificial Sequence
  Synthetic oligonucleotide
agcaaacatcaaggcgaggatgtggcgcca

SEQ ID NO: 33952 - DNA, 30 bp, Artificial Sequence
  Synthetic oligonucleotide
ggcgtaaacatgtggcgtacaaggaggcca

SEQ ID NO: 33953 - DNA, 30 bp, Artificial Sequence
  Synthetic oligonucleotide
gtgtagtaccaacgtcaacttaagctgcca

SEQ ID NO: 33954 - DNA, 30 bp, Artificial Sequence
  Synthetic oligonucleotide
aagaacagtatgcgcgaagaattgctgcca

SEQ ID NO: 33955 - DNA, 30 bp, Artificial Sequence
  Synthetic oligonucleotide
gaacgagatattcgtgtcgggaaagtgcca

SEQ ID NO: 33956 - DNA, 30 bp, Artificial Sequence
  Synthetic oligonucleotide
cattaaacatgaaatacggtcagaaatcca

SEQ ID NO: 33957 - DNA, 30 bp, Artificial Sequence
  Synthetic oligonucleotide
ccatcgcagaaagcgcaacccggcaatcca

SEQ ID NO: 33958 - DNA, 30 bp, Artificial Sequence
  Synthetic oligonucleotide
acgtgaatcaaaaggcggcgaaaagctcca

SEQ ID NO: 33959 - DNA, 30 bp, Artificial Sequence
  Synthetic oligonucleotide
gcgcaacctaagcggctaggagcagctcca

SEQ ID NO: 33960 - DNA, 30 bp, Artificial Sequence
  Synthetic oligonucleotide
tcgtgccaggcaactgaaaccgaaagtcca

SEQ ID NO: 33961 - DNA, 30 bp, Artificial Sequence
  Synthetic oligonucleotide
accgaatacggtacggacaaaggatgtcca

SEQ ID NO: 33962 - DNA, 30 bp, Artificial Sequence
  Synthetic oligonucleotide
aaggagcatcgagacaagcctgacaaagca

SEQ ID NO: 33963 - DNA, 30 bp, Artificial Sequence
  Synthetic oligonucleotide
gtgctaatgcacaactcttaaatcgaagca

SEQ ID NO: 33964 - DNA, 30 bp, Artificial Sequence
  Synthetic oligonucleotide
ggtgattaggcagttaataaccgtgaagca

SEQ ID NO: 33965 - DNA, 30 bp, Artificial Sequence
  Synthetic oligonucleotide
cggacatcaaagtaaggttggcttgaagca

SEQ ID NO: 33966 - DNA, 30 bp, Artificial Sequence
  Synthetic oligonucleotide
ggataacatcagtgacgttcagggtaagca

SEQ ID NO: 33967 - DNA, 30 bp, Artificial Sequence
  Synthetic oligonucleotide
ctcctctgactcaaaagaaccaaatcagca

SEQ ID NO: 33968 - DNA, 30 bp, Artificial Sequence
  Synthetic oligonucleotide
acggctagaaaaaatgctcttacgagagca

SEQ ID NO: 33969 - DNA, 30 bp, Artificial Sequence
  Synthetic oligonucleotide
aagaaattaaacaagctgtattaccgagca

SEQ ID NO: 33970 - DNA, 30 bp, Artificial Sequence
  Synthetic oligonucleotide
aggcaaggcagtggggaactcaatcgagca

SEQ ID NO: 33971 - DNA, 30 bp, Artificial Sequence
  Synthetic oligonucleotide
tgagggcactaaccctttatggcctgagca

SEQ ID NO: 33972 - DNA, 30 bp, Artificial Sequence
  Synthetic oligonucleotide
cgcatccagtagcgaaatagccacctagca

SEQ ID NO: 33973 - DNA, 30 bp, Artificial Sequence
  Synthetic oligonucleotide
tagtgcggatatatgggcctaaccctagca

SEQ ID NO: 33974 - DNA, 30 bp, Artificial Sequence
  Synthetic oligonucleotide
caggagtgcattagggtagtgtatgtagca

SEQ ID NO: 33975 - DNA, 30 bp, Artificial Sequence
  Synthetic oligonucleotide
tacgaaaggactttcgtgctcagtttagca

SEQ ID NO: 33976 - DNA, 30 bp, Artificial Sequence
  Synthetic oligonucleotide
tcgagccattagcctaccgggcacaacgca

SEQ ID NO: 33977 - DNA, 30 bp, Artificial Sequence
  Synthetic oligonucleotide
gtgtcataacacatatgtaagagcaacgca

SEQ ID NO: 33978 - DNA, 30 bp, Artificial Sequence
  Synthetic oligonucleotide
caggtcagcattagcaaaaataagaacgca

SEQ ID NO: 33979 - DNA, 30 bp, Artificial Sequence
  Synthetic oligonucleotide
cgagcggtggacatcaggtcgtcgaacgca

SEQ ID NO: 33980 - DNA, 30 bp, Artificial Sequence
  Synthetic oligonucleotide
gtccaggacaaaaagagttcagaccccgca

SEQ ID NO: 33981 - DNA, 30 bp, Artificial Sequence
  Synthetic oligonucleotide
gatcgtatacaaggcgatcggctagccgca

SEQ ID NO: 33982 - DNA, 30 bp, Artificial Sequence
  Synthetic oligonucleotide
aggcgagaaagtgtacctgtgcagctcgca

SEQ ID NO: 33983 - DNA, 30 bp, Artificial Sequence
  Synthetic oligonucleotide
ctggggcgagacgtgagtcctaaagtcgca

SEQ ID NO: 33984 - DNA, 30 bp, Artificial Sequence
  Synthetic oligonucleotide
tcagatattggcttaagatcgggaaaggca

SEQ ID NO: 33985 - DNA, 30 bp, Artificial Sequence
  Synthetic oligonucleotide
aacaacgaaatacgtgaaattcacaaggca

SEQ ID NO: 33986 - DNA, 30 bp, Artificial Sequence
  Synthetic oligonucleotide
atggagaagctaggatggtgctctaaggca

SEQ ID NO: 33987 - DNA, 30 bp, Artificial Sequence
  Synthetic oligonucleotide
gctagtgtatcatcaatccaaaggcaggca

SEQ ID NO: 33988 - DNA, 30 bp, Artificial Sequence
  Synthetic oligonucleotide
cgctcagaagatggcagaggaacagaggca

SEQ ID NO: 33989 - DNA, 30 bp, Artificial Sequence
  Synthetic oligonucleotide
ccggctgcgggaaaagtactgagagaggca

SEQ ID NO: 33990 - DNA, 30 bp, Artificial Sequence
  Synthetic oligonucleotide
atacgagagatacttacccgcctggaggca

SEQ ID NO: 33991 - DNA, 30 bp, Artificial Sequence
  Synthetic oligonucleotide
acgtactcaattcacgtattccggccggca

SEQ ID NO: 33992 - DNA, 30 bp, Artificial Sequence
  Synthetic oligonucleotide
cggaactagcattcggacaatcgggcggca

SEQ ID NO: 33993 - DNA, 30 bp, Artificial Sequence
  Synthetic oligonucleotide
ataacgtgtactattagtccgatgagggca

SEQ ID NO: 33994 - DNA, 30 bp, Artificial Sequence
  Synthetic oligonucleotide
gttcgagaacagcggaggaacgctagggca

SEQ ID NO: 33995 - DNA, 30 bp, Artificial Sequence
  Synthetic oligonucleotide
cgagacgtttacggacacttcggtagggca

SEQ ID NO: 33996 - DNA, 30 bp, Artificial Sequence
  Synthetic oligonucleotide
agggtaacatttgaatagctggttagggca

SEQ ID NO: 33997 - DNA, 30 bp, Artificial Sequence
  Synthetic oligonucleotide
atggacaaatatccaggtgcctgacgggca

SEQ ID NO: 33998 - DNA, 30 bp, Artificial Sequence
  Synthetic oligonucleotide
aggttcgcccgtgacagagcgcaatgggca

SEQ ID NO: 33999 - DNA, 30 bp, Artificial Sequence
  Synthetic oligonucleotide
accgacgtgtaagggataaagtaatgggca

SEQ ID NO: 34000 - DNA, 30 bp, Artificial Sequence
  Synthetic oligonucleotide
ctgcgcaaacacataatttgggcatgggca

SEQ ID NO: 34001 - DNA, 30 bp, Artificial Sequence
  Synthetic oligonucleotide
tgagggtcggtccatacaaacgtggtggca

SEQ ID NO: 34002 - DNA, 30 bp, Artificial Sequence
  Synthetic oligonucleotide
tgtacaaaagtagaaacatgaggattggca

SEQ ID NO: 34003 - DNA, 30 bp, Artificial Sequence
  Synthetic oligonucleotide
gtcattcgggccagagccagctagcatgca

SEQ ID NO: 34004 - DNA, 30 bp, Artificial Sequence
  Synthetic oligonucleotide
agaaaccaataggcacagggttgtcatgca

SEQ ID NO: 34005 - DNA, 30 bp, Artificial Sequence
  Synthetic oligonucleotide
gttacaagccctgatgaacatacgagtgca

SEQ ID NO: 34006 - DNA, 30 bp, Artificial Sequence
  Synthetic oligonucleotide
cagggatcaatgtacctataactgagtgca

SEQ ID NO: 34007 - DNA, 30 bp, Artificial Sequence
  Synthetic oligonucleotide
cgacgttccgaaggtgaagcagtaggtgca

SEQ ID NO: 34008 - DNA, 30 bp, Artificial Sequence
  Synthetic oligonucleotide
taacatcgtggcgaactaaatcaggaatca

SEQ ID NO: 34009 - DNA, 31 bp, Artificial Sequence
  Synthetic oligonucleotide
tcgcatagaaacaaaattccctagtgcatca

SEQ ID NO: 34010 - DNA, 30 bp, Artificial Sequence
  Synthetic oligonucleotide
agggattgggatcgactgcgtcgaagatca

SEQ ID NO: 34011 - DNA, 30 bp, Artificial Sequence
  Synthetic oligonucleotide
gggggcggagtaatacattatttgagatca

SEQ ID NO: 34012 - DNA, 30 bp, Artificial Sequence
  Synthetic oligonucleotide
tgaagtcaaacttcatcagaaagacgatca

SEQ ID NO: 34013 - DNA, 30 bp, Artificial Sequence
  Synthetic oligonucleotide
catcgggatcgtaggacagatggtggatca

SEQ ID NO: 34014 - DNA, 30 bp, Artificial Sequence
  Synthetic oligonucleotide
atggctaagttcgaaagatcgggctgatca

SEQ ID NO: 34015 - DNA, 30 bp, Artificial Sequence
  Synthetic oligonucleotide
agggccaggacacgtctcggtggttgatca

SEQ ID NO: 34016 - DNA, 30 bp, Artificial Sequence
  Synthetic oligonucleotide
gatgtaacaccattagaccaacgtgtatca

SEQ ID NO: 34017 - DNA, 30 bp, Artificial Sequence
  Synthetic oligonucleotide
acgggtaatgtaaggcaataagcggactca

SEQ ID NO: 34018 - DNA, 30 bp, Artificial Sequence
  Synthetic oligonucleotide
aggggcacactcagaagccaggtggactca

SEQ ID NO: 34019 - DNA, 30 bp, Artificial Sequence
  Synthetic oligonucleotide
aaggatgatacatcgtaactaaattactca

SEQ ID NO: 34020 - DNA, 30 bp, Artificial Sequence
  Synthetic oligonucleotide
gggtacagtctataacaggatactagctca

SEQ ID NO: 34021 - DNA, 30 bp, Artificial Sequence
  Synthetic oligonucleotide
atgtacagacaacactcgtcaaatcgctca

SEQ ID NO: 34022 - DNA, 30 bp, Artificial Sequence
  Synthetic oligonucleotide
acataagaaagggaaatgccgtcgtgctca

SEQ ID NO: 34023 - DNA, 30 bp, Artificial Sequence
  Synthetic oligonucleotide
catgatagcctaaaactacatccactctca

SEQ ID NO: 34024 - DNA, 30 bp, Artificial Sequence
  Synthetic oligonucleotide
gtagtagcagaacaaagattaaccgtctca

SEQ ID NO: 34025 - DNA, 30 bp, Artificial Sequence
  Synthetic oligonucleotide
ctgcataagcgaaaaaatcctgcggtctca

SEQ ID NO: 34026 - DNA, 30 bp, Artificial Sequence
  Synthetic oligonucleotide
taccaggaaggggggcttaactagaagtca

SEQ ID NO: 34027 - DNA, 30 bp, Artificial Sequence
  Synthetic oligonucleotide
cgaggggtggctgaacctatcgctaagtca

SEQ ID NO: 34028 - DNA, 31 bp, Artificial Sequence
  Synthetic oligonucleotide
cacatgattagtgctatggaataaggagtca

SEQ ID NO: 34029 - DNA, 30 bp, Artificial Sequence
  Synthetic oligonucleotide
gtccacgagagtatcactctgcccccgtca

SEQ ID NO: 34030 - DNA, 30 bp, Artificial Sequence
  Synthetic oligonucleotide
ggagcgaccctagaacggccccatgcgtca

SEQ ID NO: 34031 - DNA, 30 bp, Artificial Sequence
  Synthetic oligonucleotide
cggccacaaatcagagtctacatctcgtca

SEQ ID NO: 34032 - DNA, 30 bp, Artificial Sequence
  Synthetic oligonucleotide
agggtgctcccggtacttaagcagtcgtca

SEQ ID NO: 34033 - DNA, 30 bp, Artificial Sequence
  Synthetic oligonucleotide
agtcagagtcatgggcctggtcggaggtca

SEQ ID NO: 34034 - DNA, 30 bp, Artificial Sequence
  Synthetic oligonucleotide
aacataggcgcgtaagggtaatataggtca

SEQ ID NO: 34035 - DNA, 30 bp, Artificial Sequence
  Synthetic oligonucleotide
cggaagtcagtgagcacattacgagggtca

SEQ ID NO: 34036 - DNA, 30 bp, Artificial Sequence
  Synthetic oligonucleotide
aaaggatcagaagcgaacgagaaggggtca

SEQ ID NO: 34037 - DNA, 30 bp, Artificial Sequence
  Synthetic oligonucleotide
gcgtgaaacgattacgcgtatgaagtgtca

SEQ ID NO: 34038 - DNA, 30 bp, Artificial Sequence
  Synthetic oligonucleotide
aacaaacgagtgtacgccacgattgattca

SEQ ID NO: 34039 - DNA, 30 bp, Artificial Sequence
  Synthetic oligonucleotide
aacgggtcaatccttcgagagcggtattca

SEQ ID NO: 34040 - DNA, 30 bp, Artificial Sequence
  Synthetic oligonucleotide
caggcaccgctcaagtagagtaagatttca

SEQ ID NO: 34041 - DNA, 30 bp, Artificial Sequence
  Synthetic oligonucleotide
gatcgctcacaactaagtatcgaacaaaga

SEQ ID NO: 34042 - DNA, 30 bp, Artificial Sequence
  Synthetic oligonucleotide
tgggggagagaagaggaacgtgaggaaaga

SEQ ID NO: 34043 - DNA, 30 bp, Artificial Sequence
  Synthetic oligonucleotide
cggatagaagtttataaaacgggctaaaga

SEQ ID NO: 34044 - DNA, 30 bp, Artificial Sequence
  Synthetic oligonucleotide
cacgaggcaagactacttcgtaggacaaga

SEQ ID NO: 34045 - DNA, 30 bp, Artificial Sequence
  Synthetic oligonucleotide
cgggcccacgttgtacgatctgtgacaaga

SEQ ID NO: 34046 - DNA, 30 bp, Artificial Sequence
  Synthetic oligonucleotide
tcttcccgacagaaataacgtgctccaaga

SEQ ID NO: 34047 - DNA, 30 bp, Artificial Sequence
  Synthetic oligonucleotide
gtagtgtatggaaggtatgaccaggcaaga

SEQ ID NO: 34048 - DNA, 30 bp, Artificial Sequence
  Synthetic oligonucleotide
gtgggcgaaggtacgctcaggagttcaaga

SEQ ID NO: 34049 - DNA, 30 bp, Artificial Sequence
  Synthetic oligonucleotide
tcatgagcaatttggtaaaacgagagaaga

SEQ ID NO: 34050 - DNA, 30 bp, Artificial Sequence
  Synthetic oligonucleotide
aaggtactggttgacatcgacttacgaaga

SEQ ID NO: 34051 - DNA, 30 bp, Artificial Sequence
  Synthetic oligonucleotide
ggacaccgcgaggaattcatagaccgaaga

SEQ ID NO: 34052 - DNA, 30 bp, Artificial Sequence
  Synthetic oligonucleotide
agtcggccgactggttcgtacccccgaaga

SEQ ID NO: 34053 - DNA, 30 bp, Artificial Sequence
  Synthetic oligonucleotide
atacgagtttccaacccgtcgcgaggaaga

SEQ ID NO: 34054 - DNA, 31 bp, Artificial Sequence
  Synthetic oligonucleotide
cttaaagatggccatatgaaaaataggaaga

SEQ ID NO: 34055 - DNA, 30 bp, Artificial Sequence
  Synthetic oligonucleotide
gctcaacataaccgttaaaatgccctaaga

SEQ ID NO: 34056 - DNA, 30 bp, Artificial Sequence
  Synthetic oligonucleotide
tacacaacacggggctggagtaggctaaga

SEQ ID NO: 34057 - DNA, 30 bp, Artificial Sequence
  Synthetic oligonucleotide
agggtagattatgagtcccggcttaacaga

SEQ ID NO: 34058 - DNA, 30 bp, Artificial Sequence
  Synthetic oligonucleotide
gagcaaaccaacggcaaagttacacacaga

SEQ ID NO: 34059 - DNA, 30 bp, Artificial Sequence
  Synthetic oligonucleotide
ttgctggctaagactatgagtgaatacaga

SEQ ID NO: 34060 - DNA, 30 bp, Artificial Sequence
  Synthetic oligonucleotide
cacgtgtaccaggttaaagatggtaccaga

SEQ ID NO: 34061 - DNA, 30 bp, Artificial Sequence
  Synthetic oligonucleotide
gggctagactaagagacgagattacccaga

SEQ ID NO: 34062 - DNA, 30 bp, Artificial Sequence
  Synthetic oligonucleotide
ccagcgcctcagatagttgtaagggccaga

SEQ ID NO: 34063 - DNA, 30 bp, Artificial Sequence
  Synthetic oligonucleotide
gtgggagtcacactagggtagtggtccaga

SEQ ID NO: 34064 - DNA, 30 bp, Artificial Sequence
  Synthetic oligonucleotide
caatacacgcctcatatttagcattccaga

SEQ ID NO: 34065 - DNA, 30 bp, Artificial Sequence
  Synthetic oligonucleotide
acttacggacaaaacagttgcgccagcaga

SEQ ID NO: 34066 - DNA, 30 bp, Artificial Sequence
  Synthetic oligonucleotide
acaacgtctctcccacttaaaccaggcaga

SEQ ID NO: 34067 - DNA, 30 bp, Artificial Sequence
  Synthetic oligonucleotide
cgtcccatcaatgacaatcaagagggcaga

SEQ ID NO: 34068 - DNA, 30 bp, Artificial Sequence
  Synthetic oligonucleotide
gataggtaccgtattaagccggagggcaga

SEQ ID NO: 34069 - DNA, 30 bp, Artificial Sequence
  Synthetic oligonucleotide
catgggacaccaagcaatggctactgcaga

SEQ ID NO: 34070 - DNA, 30 bp, Artificial Sequence
  Synthetic oligonucleotide
gatgaaacgcagtaaggggaagtgttcaga

SEQ ID NO: 34071 - DNA, 30 bp, Artificial Sequence
  Synthetic oligonucleotide
agagataccccccgatctacgcgaaagaga

SEQ ID NO: 34072 - DNA, 30 bp, Artificial Sequence
  Synthetic oligonucleotide
aaagaatcgggggacacctctggaaagaga

SEQ ID NO: 34073 - DNA, 30 bp, Artificial Sequence
  Synthetic oligonucleotide
tcatatggttgctgcaaaagggcgaagaga

SEQ ID NO: 34074 - DNA, 30 bp, Artificial Sequence
  Synthetic oligonucleotide
aatcaacgagcctacaatagctggcagaga

SEQ ID NO: 34075 - DNA, 30 bp, Artificial Sequence
  Synthetic oligonucleotide
ggacacttagaacgaactcgactgcagaga

SEQ ID NO: 34076 - DNA, 30 bp, Artificial Sequence
  Synthetic oligonucleotide
cagcgtccaaggctacggtgatgtcagaga

SEQ ID NO: 34077 - DNA, 30 bp, Artificial Sequence
  Synthetic oligonucleotide
cacgcgctagctcaggcggacgaggagaga

SEQ ID NO: 34078 - DNA, 30 bp, Artificial Sequence
  Synthetic oligonucleotide
ccatatggttgattcgaggcaagttagaga

SEQ ID NO: 34079 - DNA, 29 bp, Artificial Sequence
  Synthetic oligonucleotide
gctgtgaacaggcctattaatcagcgaga

SEQ ID NO: 34080 - DNA, 30 bp, Artificial Sequence
  Synthetic oligonucleotide
cctaacggtcgagggccaaatctatcgaga

SEQ ID NO: 34081 - DNA, 30 bp, Artificial Sequence
  Synthetic oligonucleotide
actgtaacggcagtgaagaagagttcgaga

SEQ ID NO: 34082 - DNA, 30 bp, Artificial Sequence
  Synthetic oligonucleotide
tcccgagggccgagcaatccaggaaggaga

SEQ ID NO: 34083 - DNA, 30 bp, Artificial Sequence
  Synthetic oligonucleotide
ttcgaaccgatctcacaatgagagaggaga

SEQ ID NO: 34084 - DNA, 30 bp, Artificial Sequence
  Synthetic oligonucleotide
cgataaaattcacggggaatttcccggaga

SEQ ID NO: 34085 - DNA, 30 bp, Artificial Sequence
  Synthetic oligonucleotide
accgtagagggggaatagcggtttcggaga

SEQ ID NO: 34086 - DNA, 40 bp, Artificial Sequence
  Synthetic oligonucleotide
aagataatacattcatggtatggtcggggatcgggggaga

SEQ ID NO: 34087 - DNA, 30 bp, Artificial Sequence
  Synthetic oligonucleotide
caaagcttgagcagagctaagtaaatgaga

SEQ ID NO: 34088 - DNA, 30 bp, Artificial Sequence
  Synthetic oligonucleotide
tacaacgtaggtaaaacttcggccatgaga

SEQ ID NO: 34089 - DNA, 30 bp, Artificial Sequence
  Synthetic oligonucleotide
tcacaactcccgagcacaacgcatatgaga

SEQ ID NO: 34090 - DNA, 30 bp, Artificial Sequence
  Synthetic oligonucleotide
cgcctgggtagcgcaaagaccacagtgaga

SEQ ID NO: 34091 - DNA, 30 bp, Artificial Sequence
  Synthetic oligonucleotide
gtgcaacgcattaacaagggctaggtgaga

SEQ ID NO: 34092 - DNA, 31 bp, Artificial Sequence
  Synthetic oligonucleotide
acaaacagttagggactccggaacaaataga

SEQ ID NO: 34093 - DNA, 30 bp, Artificial Sequence
  Synthetic oligonucleotide
aggagttgggggagacaatgtcggaataga

SEQ ID NO: 34094 - DNA, 30 bp, Artificial Sequence
  Synthetic oligonucleotide
cgagaaagtcgggatcaaggaaagcctaga

SEQ ID NO: 34095 - DNA, 30 bp, Artificial Sequence
  Synthetic oligonucleotide
ccggatccgtttactccaggtgactctaga

SEQ ID NO: 34096 - DNA, 30 bp, Artificial Sequence
  Synthetic oligonucleotide
attgaacggcaccacgaacaaggctctaga

SEQ ID NO: 34097 - DNA, 30 bp, Artificial Sequence
  Synthetic oligonucleotide
ggctttaagagcatacaagaagtacgtaga

SEQ ID NO: 34098 - DNA, 30 bp, Artificial Sequence
  Synthetic oligonucleotide
ctggagggaaatctggatgatacatgtaga

SEQ ID NO: 34099 - DNA, 30 bp, Artificial Sequence
  Synthetic oligonucleotide
aacatcagaggagcccagacttcaattaga

SEQ ID NO: 34100 - DNA, 30 bp, Artificial Sequence
  Synthetic oligonucleotide
tgcgatagagactggtcttgcaaagttaga

SEQ ID NO: 34101 - DNA, 30 bp, Artificial Sequence
  Synthetic oligonucleotide
ccaggtagagatcagcgcgcggaggttaga

SEQ ID NO: 34102 - DNA, 30 bp, Artificial Sequence
  Synthetic oligonucleotide
tgagtcaaaagaatcggatgcccgagacga

SEQ ID NO: 34103 - DNA, 30 bp, Artificial Sequence
  Synthetic oligonucleotide
ttaacgcccggggaggcgtaaggaggacga

SEQ ID NO: 34104 - DNA, 30 bp, Artificial Sequence
  Synthetic oligonucleotide
ggataggcaacataatgggcgatgaaccga

SEQ ID NO: 34105 - DNA, 30 bp, Artificial Sequence
  Synthetic oligonucleotide
ccaacacagggttacgccaatgtcgaccga

SEQ ID NO: 34106 - DNA, 30 bp, Artificial Sequence
  Synthetic oligonucleotide
caaataccggagagaataaattccgcccga

SEQ ID NO: 34107 - DNA, 30 bp, Artificial Sequence
  Synthetic oligonucleotide
agacaagaacgactgcctcagagggcccga

SEQ ID NO: 34108 - DNA, 28 bp, Artificial Sequence
  Synthetic oligonucleotide
acatttggataagagggtaacaagccga

SEQ ID NO: 34109 - DNA, 30 bp, Artificial Sequence
  Synthetic oligonucleotide
acgacacactaaaccagattgcaaatccga

SEQ ID NO: 34110 - DNA, 30 bp, Artificial Sequence
  Synthetic oligonucleotide
ctgagcgcaaactaatgtgtacgtaagcga

SEQ ID NO: 34111 - DNA, 30 bp, Artificial Sequence
  Synthetic oligonucleotide
tggctaacagaattgtgcgctaaagagcga

SEQ ID NO: 34112 - DNA, 30 bp, Artificial Sequence
  Synthetic oligonucleotide
tagatacaggaagaaaccgatttatagcga

SEQ ID NO: 34113 - DNA, 30 bp, Artificial Sequence
  Synthetic oligonucleotide
gcgggtcgattagatgtgtgacactcgcga

SEQ ID NO: 34114 - DNA, 30 bp, Artificial Sequence
  Synthetic oligonucleotide
ccgaagggtcaacaggactaagacaggcga

SEQ ID NO: 34115 - DNA, 30 bp, Artificial Sequence
  Synthetic oligonucleotide
acgaatcaaaagggcctctaactgcggcga

SEQ ID NO: 34116 - DNA, 30 bp, Artificial Sequence
  Synthetic oligonucleotide
aacgagtatcccacttaagggaacatgcga

SEQ ID NO: 34117 - DNA, 30 bp, Artificial Sequence
  Synthetic oligonucleotide
ggggacatctaggtgctgtcttacatgcga

SEQ ID NO: 34118 - DNA, 30 bp, Artificial Sequence
  Synthetic oligonucleotide
acctgatataaggtagcagccaaagtgcga

SEQ ID NO: 34119 - DNA, 30 bp, Artificial Sequence
  Synthetic oligonucleotide
agccgtacatgtgcccagcgtggagtgcga

SEQ ID NO: 34120 - DNA, 30 bp, Artificial Sequence
  Synthetic oligonucleotide
ggtctctcaaccgaagagactagcgtgcga

SEQ ID NO: 34121 - DNA, 30 bp, Artificial Sequence
  Synthetic oligonucleotide
ggtccgtcagtcgtcaagaatacaaatcga

SEQ ID NO: 34122 - DNA, 30 bp, Artificial Sequence
  Synthetic oligonucleotide
aagggagaatcaaaattgcacccgaatcga

SEQ ID NO: 34123 - DNA, 30 bp, Artificial Sequence
  Synthetic oligonucleotide
aagggcgcgtcgaacttattggcatatcga

SEQ ID NO: 34124 - DNA, 30 bp, Artificial Sequence
  Synthetic oligonucleotide
tcaagtaactacaatggggggcgtagtcga

SEQ ID NO: 34125 - DNA, 30 bp, Artificial Sequence
  Synthetic oligonucleotide
cgtaacatgggagaagggaagaggattcga

SEQ ID NO: 34126 - DNA, 30 bp, Artificial Sequence
  Synthetic oligonucleotide
tcatcgacggaacaaactgggaggcttcga

SEQ ID NO: 34127 - DNA, 30 bp, Artificial Sequence
  Synthetic oligonucleotide
cgttagggatgagtggacacctacgttcga

SEQ ID NO: 34128 - DNA, 30 bp, Artificial Sequence
  Synthetic oligonucleotide
ttgatataggtaagctaagcgagtgttcga

SEQ ID NO: 34129 - DNA, 30 bp, Artificial Sequence
  Synthetic oligonucleotide
acataggcgaggatggacgtacataaagga

SEQ ID NO: 34130 - DNA, 30 bp, Artificial Sequence
  Synthetic oligonucleotide
tgaaaggcattagcaagaccaaaacaagga

SEQ ID NO: 34131 - DNA, 30 bp, Artificial Sequence
  Synthetic oligonucleotide
cacggcagtcaagccgtttaaaaccaagga

SEQ ID NO: 34132 - DNA, 30 bp, Artificial Sequence
  Synthetic oligonucleotide
aaggccgtcttgtagatcgtgaggcaagga

SEQ ID NO: 34133 - DNA, 30 bp, Artificial Sequence
  Synthetic oligonucleotide
cgggaacagcgcgagaagcgtcatcaagga

SEQ ID NO: 34134 - DNA, 30 bp, Artificial Sequence
  Synthetic oligonucleotide
agccgatgtggtccgcactcaaaggaagga

SEQ ID NO: 34135 - DNA, 30 bp, Artificial Sequence
  Synthetic oligonucleotide
tcaagataaggagcatgtgctaaaacagga

SEQ ID NO: 34136 - DNA, 30 bp, Artificial Sequence
  Synthetic oligonucleotide
ctcgttaagtggaaagttgtgaagccagga

SEQ ID NO: 34137 - DNA, 30 bp, Artificial Sequence
  Synthetic oligonucleotide
gacgtgtgctagtggacacaaactagagga

SEQ ID NO: 34138 - DNA, 30 bp, Artificial Sequence
  Synthetic oligonucleotide
cagtgatgagcgaagttagcagtgggagga

SEQ ID NO: 34139 - DNA, 30 bp, Artificial Sequence
  Synthetic oligonucleotide
gagccttacaggagagagcaactttgagga

SEQ ID NO: 34140 - DNA, 30 bp, Artificial Sequence
  Synthetic oligonucleotide
gcgattaaggaaaggcttgtgtgaatagga

SEQ ID NO: 34141 - DNA, 30 bp, Artificial Sequence
  Synthetic oligonucleotide
caggactcggaattcaaacaaaagatagga

SEQ ID NO: 34142 - DNA, 30 bp, Artificial Sequence
  Synthetic oligonucleotide
ggcaggcagtagagtatagcgtgcgtagga

SEQ ID NO: 34143 - DNA, 30 bp, Artificial Sequence
  Synthetic oligonucleotide
acgacgcgactatgtcgagagggcttagga

SEQ ID NO: 34144 - DNA, 30 bp, Artificial Sequence
  Synthetic oligonucleotide
agatacgcaatcgttcggtacatgttagga

SEQ ID NO: 34145 - DNA, 30 bp, Artificial Sequence
  Synthetic oligonucleotide
gaagggacgggtcccgtaacgactttagga

SEQ ID NO: 34146 - DNA, 30 bp, Artificial Sequence
  Synthetic oligonucleotide
aagtgctatgggacgaggagataagccgga

SEQ ID NO: 34147 - DNA, 30 bp, Artificial Sequence
  Synthetic oligonucleotide
aaacaatgatatctatgaacatacgccgga

SEQ ID NO: 34148 - DNA, 30 bp, Artificial Sequence
  Synthetic oligonucleotide
tgccacctcgaacagcaaggtcaggccgga

SEQ ID NO: 34149 - DNA, 30 bp, Artificial Sequence
  Synthetic oligonucleotide
cgtaagaaaacaacatttcaactctccgga

SEQ ID NO: 34150 - DNA, 30 bp, Artificial Sequence
  Synthetic oligonucleotide
caatagaagatgaatgggctacagtgcgga

SEQ ID NO: 34151 - DNA, 30 bp, Artificial Sequence
  Synthetic oligonucleotide
cgaagcgaggaggacacgggaacactcgga

SEQ ID NO: 34152 - DNA, 30 bp, Artificial Sequence
  Synthetic oligonucleotide
aataaggaagggaacagacaccagctcgga

SEQ ID NO: 34153 - DNA, 30 bp, Artificial Sequence
  Synthetic oligonucleotide
cacatgagataccaacgccgaagtgtcgga

SEQ ID NO: 34154 - DNA, 30 bp, Artificial Sequence
  Synthetic oligonucleotide
acggaatctgctaaaggttaaaatgaggga

SEQ ID NO: 34155 - DNA, 30 bp, Artificial Sequence
  Synthetic oligonucleotide
cccgacaagagaagctgaactagataggga

SEQ ID NO: 34156 - DNA, 30 bp, Artificial Sequence
  Synthetic oligonucleotide
gcaacgcaaggatatagtagctggtaggga

SEQ ID NO: 34157 - DNA, 30 bp, Artificial Sequence
  Synthetic oligonucleotide
gcgaagggagagctttgtaattcaacggga

SEQ ID NO: 34158 - DNA, 30 bp, Artificial Sequence
  Synthetic oligonucleotide
aacctccaccaaaacacgagatctgcggga

SEQ ID NO: 34159 - DNA, 30 bp, Artificial Sequence
  Synthetic oligonucleotide
cgtcagggtaggaaggaggacaatggggga

SEQ ID NO: 34160 - DNA, 30 bp, Artificial Sequence
  Synthetic oligonucleotide
ggcgagcacgttgtcgtaaagtgatgggga

SEQ ID NO: 34161 - DNA, 30 bp, Artificial Sequence
  Synthetic oligonucleotide
cggcctacgaccaaaagtattggcatggga

SEQ ID NO: 34162 - DNA, 30 bp, Artificial Sequence
  Synthetic oligonucleotide
taaaaaaggcatcacacgagatatctggga

SEQ ID NO: 34163 - DNA, 30 bp, Artificial Sequence
  Synthetic oligonucleotide
gcaccatcggaaccaaaatggaagttggga

SEQ ID NO: 34164 - DNA, 30 bp, Artificial Sequence
  Synthetic oligonucleotide
ggtagagaatgatgcaacgggccgaatgga

SEQ ID NO: 34165 - DNA, 30 bp, Artificial Sequence
  Synthetic oligonucleotide
atcgtagtcgcgaaacgtacgaatactgga

SEQ ID NO: 34166 - DNA, 30 bp, Artificial Sequence
  Synthetic oligonucleotide
agacggttacctaaacgcattcgatctgga

SEQ ID NO: 34167 - DNA, 30 bp, Artificial Sequence
  Synthetic oligonucleotide
acgtcccgtgtaaagtcaacattatctgga

SEQ ID NO: 34168 - DNA, 30 bp, Artificial Sequence
  Synthetic oligonucleotide
agcagaacagaagctggggccgagagtgga

SEQ ID NO: 34169 - DNA, 30 bp, Artificial Sequence
  Synthetic oligonucleotide
tcctgaattgtacggaatcgactgagtgga

SEQ ID NO: 34170 - DNA, 30 bp, Artificial Sequence
  Synthetic oligonucleotide
gaggcaatgagtaagcaacaacaacgtgga

SEQ ID NO: 34171 - DNA, 30 bp, Artificial Sequence
  Synthetic oligonucleotide
gtgacgtcagagagaacaaggaggcgtgga

SEQ ID NO: 34172 - DNA, 30 bp, Artificial Sequence
  Synthetic oligonucleotide
catgattagagcagagatataagtcgtgga

SEQ ID NO: 34173 - DNA, 30 bp, Artificial Sequence
  Synthetic oligonucleotide
tgctgagggtagtaccagagaatcggtgga

SEQ ID NO: 34174 - DNA, 30 bp, Artificial Sequence
  Synthetic oligonucleotide
cctgtcagtaagctgggcgagtcatgtgga

SEQ ID NO: 34175 - DNA, 30 bp, Artificial Sequence
  Synthetic oligonucleotide
cggaataacaacctagggaggtagtgtgga

SEQ ID NO: 34176 - DNA, 30 bp, Artificial Sequence
  Synthetic oligonucleotide
acaccgtttagcagaggaccgaggtttgga

SEQ ID NO: 34177 - DNA, 30 bp, Artificial Sequence
  Synthetic oligonucleotide
aggaaaccagggacactctaaattaaatga

SEQ ID NO: 34178 - DNA, 30 bp, Artificial Sequence
  Synthetic oligonucleotide
aaaagatagtgctgcgaatatccagaatga

SEQ ID NO: 34179 - DNA, 30 bp, Artificial Sequence
  Synthetic oligonucleotide
cgtccaagctaccatcacgaacaataatga

SEQ ID NO: 34180 - DNA, 30 bp, Artificial Sequence
  Synthetic oligonucleotide
attgacacaataaaaaaggaaggcccatga

SEQ ID NO: 34181 - DNA, 30 bp, Artificial Sequence
  Synthetic oligonucleotide
tcaacgcgagtgctacgcggataagcatga

SEQ ID NO: 34182 - DNA, 30 bp, Artificial Sequence
  Synthetic oligonucleotide
ggaactaaatccaggaacacgttcgcatga

SEQ ID NO: 34183 - DNA, 30 bp, Artificial Sequence
  Synthetic oligonucleotide
aagagacaggcgaaggaattgcgatgatga

SEQ ID NO: 34184 - DNA, 30 bp, Artificial Sequence
  Synthetic oligonucleotide
agggtacgaacaggccgtgtgcggatatga

SEQ ID NO: 34185 - DNA, 30 bp, Artificial Sequence
  Synthetic oligonucleotide
gatcgatccaactcggggacacacctatga

SEQ ID NO: 34186 - DNA, 30 bp, Artificial Sequence
  Synthetic oligonucleotide
ccagaaactcaagatttgggaaaggtatga

SEQ ID NO: 34187 - DNA, 30 bp, Artificial Sequence
  Synthetic oligonucleotide
actcacagttagtgaacaatggtggtatga

SEQ ID NO: 34188 - DNA, 30 bp, Artificial Sequence
  Synthetic oligonucleotide
accatgataaatggggtacagggtgtatga

SEQ ID NO: 34189 - DNA, 30 bp, Artificial Sequence
  Synthetic oligonucleotide
aagtagaggagcaattctccgtgggactga

SEQ ID NO: 34190 - DNA, 30 bp, Artificial Sequence
  Synthetic oligonucleotide
acctcatgggatagggcgtgacagtactga

SEQ ID NO: 34191 - DNA, 30 bp, Artificial Sequence
  Synthetic oligonucleotide
gtgccaaccgtagacaaaaagctgtactga

SEQ ID NO: 34192 - DNA, 30 bp, Artificial Sequence
  Synthetic oligonucleotide
aacgctggcggacggaaacaatctacctga

SEQ ID NO: 34193 - DNA, 30 bp, Artificial Sequence
  Synthetic oligonucleotide
tggaccataagcacgatcaacattacctga

SEQ ID NO: 34194 - DNA, 30 bp, Artificial Sequence
  Synthetic oligonucleotide
cggcaaagctaatgtgagtaaaggtcctga

SEQ ID NO: 34195 - DNA, 30 bp, Artificial Sequence
  Synthetic oligonucleotide
ccgagggtgaacgagactacaagaggctga

SEQ ID NO: 34196 - DNA, 30 bp, Artificial Sequence
  Synthetic oligonucleotide
gacgtcggtgagtcggaataaaagtgctga

SEQ ID NO: 34197 - DNA, 30 bp, Artificial Sequence
  Synthetic oligonucleotide
cacggtctgagtgagggatcaagactctga

SEQ ID NO: 34198 - DNA, 30 bp, Artificial Sequence
  Synthetic oligonucleotide
aggatacgacctccgtgatcagcgctctga

SEQ ID NO: 34199 - DNA, 31 bp, Artificial Sequence
  Synthetic oligonucleotide
aaatcgatactgtgctcgtaaaaacaagtga

SEQ ID NO: 34200 - DNA, 30 bp, Artificial Sequence
  Synthetic oligonucleotide
ccaccggggtgagagcaaccgcaacagtga

SEQ ID NO: 34201 - DNA, 30 bp, Artificial Sequence
  Synthetic oligonucleotide
ggaggcagggtgcaacgattgtccgagtga

SEQ ID NO: 34202 - DNA, 30 bp, Artificial Sequence
  Synthetic oligonucleotide
gcagggcacactattggacttcatgagtga

SEQ ID NO: 34203 - DNA, 30 bp, Artificial Sequence
  Synthetic oligonucleotide
atgagaactaacgcaagttcaaaggggtga

SEQ ID NO: 34204 - DNA, 30 bp, Artificial Sequence
  Synthetic oligonucleotide
ggagcatggagtaaaagcctcacccattga

SEQ ID NO: 34205 - DNA, 30 bp, Artificial Sequence
  Synthetic oligonucleotide
tcaaacgagaaccaatgaatgcctacttga

SEQ ID NO: 34206 - DNA, 30 bp, Artificial Sequence
  Synthetic oligonucleotide
cgagcggccactttgtcaaagtagagttga

SEQ ID NO: 34207 - DNA, 30 bp, Artificial Sequence
  Synthetic oligonucleotide
cagcaaaaaaaagtggtgacagcgaaaata

SEQ ID NO: 34208 - DNA, 30 bp, Artificial Sequence
  Synthetic oligonucleotide
atgcctcgacgacgtgacatcagacaaata

SEQ ID NO: 34209 - DNA, 30 bp, Artificial Sequence
  Synthetic oligonucleotide
agcactaaggaagtcgtgtaggtcgaaata

SEQ ID NO: 34210 - DNA, 30 bp, Artificial Sequence
  Synthetic oligonucleotide
acagtatgccttacttcgtccaccacaata

SEQ ID NO: 34211 - DNA, 30 bp, Artificial Sequence
  Synthetic oligonucleotide
agggcacataatgtagatgctccgacaata

SEQ ID NO: 34212 - DNA, 30 bp, Artificial Sequence
  Synthetic oligonucleotide
cgtaagacgggtggtcccatgcctgcaata

SEQ ID NO: 34213 - DNA, 30 bp, Artificial Sequence
  Synthetic oligonucleotide
taagaccggtgctatcagggaagtgcaata

SEQ ID NO: 34214 - DNA, 30 bp, Artificial Sequence
  Synthetic oligonucleotide
aaggccacacggagcgcggtatcatcaata

SEQ ID NO: 34215 - DNA, 30 bp, Artificial Sequence
  Synthetic oligonucleotide
caggggcatcgtaggaaaagtgactcaata

SEQ ID NO: 34216 - DNA, 30 bp, Artificial Sequence
  Synthetic oligonucleotide
gtttgttgggcgaacacgagagatagaata

SEQ ID NO: 34217 - DNA, 30 bp, Artificial Sequence
  Synthetic oligonucleotide
ggctgctgaggcgatcttcacgtgcgaata

SEQ ID NO: 34218 - DNA, 30 bp, Artificial Sequence
  Synthetic oligonucleotide
agttcagcgagaaggagccgactatgaata

SEQ ID NO: 34219 - DNA, 30 bp, Artificial Sequence
  Synthetic oligonucleotide
gacgaagcgggggttcatcctgcctgaata

SEQ ID NO: 34220 - DNA, 30 bp, Artificial Sequence
  Synthetic oligonucleotide
agcgtactcaaatgcgagagtaccataata

SEQ ID NO: 34221 - DNA, 30 bp, Artificial Sequence
  Synthetic oligonucleotide
gtggagagacggtacaaggggtaagtaata

SEQ ID NO: 34222 - DNA, 30 bp, Artificial Sequence
  Synthetic oligonucleotide
tgtcacaaagggaagcgagaaatgttaata

SEQ ID NO: 34223 - DNA, 30 bp, Artificial Sequence
  Synthetic oligonucleotide
atgtcggctgaagggggattgagaaacata

SEQ ID NO: 34224 - DNA, 30 bp, Artificial Sequence
  Synthetic oligonucleotide
gacaagaagccgtcacgggagtccaacata

SEQ ID NO: 34225 - DNA, 30 bp, Artificial Sequence
  Synthetic oligonucleotide
agaagggagtacacagtcctgcaacccata

SEQ ID NO: 34226 - DNA, 30 bp, Artificial Sequence
  Synthetic oligonucleotide
aagacctcagcgcgtaatacaggaagcata

SEQ ID NO: 34227 - DNA, 30 bp, Artificial Sequence
  Synthetic oligonucleotide
tgttatgcgatggaagggtaaaccagcata

SEQ ID NO: 34228 - DNA, 30 bp, Artificial Sequence
  Synthetic oligonucleotide
accaccgagggtgacccagattaaggcata

SEQ ID NO: 34229 - DNA, 30 bp, Artificial Sequence
  Synthetic oligonucleotide
gcgcaataaatgtggtggtagtcatgcata

SEQ ID NO: 34230 - DNA, 30 bp, Artificial Sequence
  Synthetic oligonucleotide
agtacatcctcgtgtggcggaagctgcata

SEQ ID NO: 34231 - DNA, 30 bp, Artificial Sequence
  Synthetic oligonucleotide
attaagcgaaaggggtggcaactgatcata

SEQ ID NO: 34232 - DNA, 30 bp, Artificial Sequence
  Synthetic oligonucleotide
cggagacaatcgaagacaccgagtatcata

SEQ ID NO: 34233 - DNA, 30 bp, Artificial Sequence
  Synthetic oligonucleotide
cggggggcgatgaagtgatacgaggagata

SEQ ID NO: 34234 - DNA, 30 bp, Artificial Sequence
  Synthetic oligonucleotide
catgggctgttacaaattgcgcgggagata

SEQ ID NO: 34235 - DNA, 30 bp, Artificial Sequence
  Synthetic oligonucleotide
actaagggctgcactcaacagcattagata

SEQ ID NO: 34236 - DNA, 30 bp, Artificial Sequence
  Synthetic oligonucleotide
tgagggcgtaacattcgccaggagtggata

SEQ ID NO: 34237 - DNA, 30 bp, Artificial Sequence
  Synthetic oligonucleotide
ggcttagaatgactagccgacatgtggata

SEQ ID NO: 34238 - DNA, 30 bp, Artificial Sequence
  Synthetic oligonucleotide
gagaaagggatgtagccgtgggggatgata

SEQ ID NO: 34239 - DNA, 30 bp, Artificial Sequence
  Synthetic oligonucleotide
gaaggagtggagttcatcgtcaagctgata

SEQ ID NO: 34240 - DNA, 30 bp, Artificial Sequence
  Synthetic oligonucleotide
acacacgcaaaggaaaggcaatcattgata

SEQ ID NO: 34241 - DNA, 30 bp, Artificial Sequence
  Synthetic oligonucleotide
aatgacggctaagagaaaccaatgcatata

SEQ ID NO: 34242 - DNA, 30 bp, Artificial Sequence
  Synthetic oligonucleotide
taaggaccgagttgagaatgcgcgtatata

SEQ ID NO: 34243 - DNA, 30 bp, Artificial Sequence
  Synthetic oligonucleotide
tgcaaacgtgaaacgtgggccaaagctata

SEQ ID NO: 34244 - DNA, 30 bp, Artificial Sequence
  Synthetic oligonucleotide
cgtcaggtcgaacacgtatagaacgctata

SEQ ID NO: 34245 - DNA, 30 bp, Artificial Sequence
  Synthetic oligonucleotide
gggaataaatagcactgcattcggggtata

SEQ ID NO: 34246 - DNA, 30 bp, Artificial Sequence
  Synthetic oligonucleotide
tgtgaggaccacaagtaaggatcggttata

SEQ ID NO: 34247 - DNA, 30 bp, Artificial Sequence
  Synthetic oligonucleotide
tgcgtgagaccataatataggaagacacta

SEQ ID NO: 34248 - DNA, 30 bp, Artificial Sequence
  Synthetic oligonucleotide
ggggatggcctaagttatggagcctcacta

SEQ ID NO: 34249 - DNA, 30 bp, Artificial Sequence
  Synthetic oligonucleotide
cgatgacgtaagcaccttacagagggacta

SEQ ID NO: 34250 - DNA, 30 bp, Artificial Sequence
  Synthetic oligonucleotide
cgaggaatcacctaggttatcgatggacta

SEQ ID NO: 34251 - DNA, 30 bp, Artificial Sequence
  Synthetic oligonucleotide
cagcgcgatacgggagcgaatagagaccta

SEQ ID NO: 34252 - DNA, 30 bp, Artificial Sequence
  Synthetic oligonucleotide
agggcggcacagatcacattttccatccta

SEQ ID NO: 34253 - DNA, 30 bp, Artificial Sequence
  Synthetic oligonucleotide
caggactaccagaagatgatcatgatccta

SEQ ID NO: 34254 - DNA, 30 bp, Artificial Sequence
  Synthetic oligonucleotide
tcatgaactagacttatactctcactccta

SEQ ID NO: 34255 - DNA, 30 bp, Artificial Sequence
  Synthetic oligonucleotide
gcgatgagcactgcgcccccaataaagcta

SEQ ID NO: 34256 - DNA, 30 bp, Artificial Sequence
  Synthetic oligonucleotide
accgtgagtagtcccgcgccccacaagcta

SEQ ID NO: 34257 - DNA, 30 bp, Artificial Sequence
  Synthetic oligonucleotide
ctagggcctcgtcaaggtaggtggaagcta

SEQ ID NO: 34258 - DNA, 30 bp, Artificial Sequence
  Synthetic oligonucleotide
ttacggcagacagagtttggacacgagcta

SEQ ID NO: 34259 - DNA, 30 bp, Artificial Sequence
  Synthetic oligonucleotide
acactacgatagagagcgctatacgagcta

SEQ ID NO: 34260 - DNA, 30 bp, Artificial Sequence
  Synthetic oligonucleotide
cggtgaagaaaattagatcacttctagcta

SEQ ID NO: 34261 - DNA, 30 bp, Artificial Sequence
  Synthetic oligonucleotide
gggagactagatgttggttggaactcgcta

SEQ ID NO: 34262 - DNA, 30 bp, Artificial Sequence
  Synthetic oligonucleotide
atgttagagtggagggtataagaggggcta

SEQ ID NO: 34263 - DNA, 30 bp, Artificial Sequence
  Synthetic oligonucleotide
agaagcaggttgtgacagcgaattgtgcta

SEQ ID NO: 34264 - DNA, 30 bp, Artificial Sequence
  Synthetic oligonucleotide
ggaacgtaactgtaaactcctaaggctcta

SEQ ID NO: 34265 - DNA, 30 bp, Artificial Sequence
  Synthetic oligonucleotide
catctgtggcgtaaaaaatgaaggtctcta

SEQ ID NO: 34266 - DNA, 30 bp, Artificial Sequence
  Synthetic oligonucleotide
atgaacaaatgaagaaaaccatgcagtcta

SEQ ID NO: 34267 - DNA, 30 bp, Artificial Sequence
  Synthetic oligonucleotide
ggggaatgaggtctttaggtccaccaagta

SEQ ID NO: 34268 - DNA, 30 bp, Artificial Sequence
  Synthetic oligonucleotide
caagccaaccgattcagttgtcatcaagta

SEQ ID NO: 34269 - DNA, 30 bp, Artificial Sequence
  Synthetic oligonucleotide
cggtaccatggacgcgtgagatgcgaagta

SEQ ID NO: 34270 - DNA, 30 bp, Artificial Sequence
  Synthetic oligonucleotide
gaggatggtaccgaaactaatgggtaagta

SEQ ID NO: 34271 - DNA, 30 bp, Artificial Sequence
  Synthetic oligonucleotide
acgagactgtgcgatgtcaacgcttaagta

SEQ ID NO: 34272 - DNA, 30 bp, Artificial Sequence
  Synthetic oligonucleotide
cacaatcattggaggacttacaaagcagta

SEQ ID NO: 34273 - DNA, 30 bp, Artificial Sequence
  Synthetic oligonucleotide
tgcgtatgggttagtatttaaacaagagta

SEQ ID NO: 34274 - DNA, 30 bp, Artificial Sequence
  Synthetic oligonucleotide
aatggataaaaagtggagaagcttagagta

SEQ ID NO: 34275 - DNA, 30 bp, Artificial Sequence
  Synthetic oligonucleotide
cccataggttggcagataaagtcaggagta

SEQ ID NO: 34276 - DNA, 30 bp, Artificial Sequence
  Synthetic oligonucleotide
gttaaggacgtggcgggggatcactgagta

SEQ ID NO: 34277 - DNA, 30 bp, Artificial Sequence
  Synthetic oligonucleotide
gaggcatgttaagctactcgagagtgagta

SEQ ID NO: 34278 - DNA, 30 bp, Artificial Sequence
  Synthetic oligonucleotide
tacaaaacaggtgaaagcaacatgctagta

SEQ ID NO: 34279 - DNA, 30 bp, Artificial Sequence
  Synthetic oligonucleotide
tgggcgataggcggatacctcgcagtagta

SEQ ID NO: 34280 - DNA, 30 bp, Artificial Sequence
  Synthetic oligonucleotide
gtgtagagcgtaaggaatcgtagcgtagta

SEQ ID NO: 34281 - DNA, 30 bp, Artificial Sequence
  Synthetic oligonucleotide
cgtagagctaagatccgttaaacacacgta

SEQ ID NO: 34282 - DNA, 30 bp, Artificial Sequence
  Synthetic oligonucleotide
ccttccgtacgaaggaaacctagctacgta

SEQ ID NO: 34283 - DNA, 30 bp, Artificial Sequence
  Synthetic oligonucleotide
caagatactcgcgaggctacatccgccgta

SEQ ID NO: 34284 - DNA, 30 bp, Artificial Sequence
  Synthetic oligonucleotide
ttcgggtggatcacagatcaaggtagcgta

SEQ ID NO: 34285 - DNA, 30 bp, Artificial Sequence
  Synthetic oligonucleotide
gcggccgggagcggaccagagtttagcgta

SEQ ID NO: 34286 - DNA, 30 bp, Artificial Sequence
  Synthetic oligonucleotide
cgagggggctaagcatcgctactgggcgta

SEQ ID NO: 34287 - DNA, 30 bp, Artificial Sequence
  Synthetic oligonucleotide
tacttgggcacatacaattccgacaaggta

SEQ ID NO: 34288 - DNA, 30 bp, Artificial Sequence
  Synthetic oligonucleotide
cgcacaggaagtcaacgaagagtgaaggta

SEQ ID NO: 34289 - DNA, 30 bp, Artificial Sequence
  Synthetic oligonucleotide
gggcgaactcctagaatagacgttgaggta

SEQ ID NO: 34290 - DNA, 30 bp, Artificial Sequence
  Synthetic oligonucleotide
agagggaccgaagaacccgaatgtccggta

SEQ ID NO: 34291 - DNA, 30 bp, Artificial Sequence
  Synthetic oligonucleotide
cagtgctagagagtaattctacgtgcggta

SEQ ID NO: 34292 - DNA, 30 bp, Artificial Sequence
  Synthetic oligonucleotide
catgacagaggacctggaccacgacgggta

SEQ ID NO: 34293 - DNA, 30 bp, Artificial Sequence
  Synthetic oligonucleotide
cgagagatcgaggatcttgtcatcggggta

SEQ ID NO: 34294 - DNA, 30 bp, Artificial Sequence
  Synthetic oligonucleotide
atgcaagaccacagaaagaagcgaatggta

SEQ ID NO: 34295 - DNA, 30 bp, Artificial Sequence
  Synthetic oligonucleotide
agctgctaaatcggaaacgggctgctggta

SEQ ID NO: 34296 - DNA, 30 bp, Artificial Sequence
  Synthetic oligonucleotide
atggatactatggctgcccccgaaaatgta

SEQ ID NO: 34297 - DNA, 30 bp, Artificial Sequence
  Synthetic oligonucleotide
tcggaacggccgaaaacccacggacctgta

SEQ ID NO: 34298 - DNA, 30 bp, Artificial Sequence
  Synthetic oligonucleotide
gtcagaactaaaggtgagcggcagcctgta

SEQ ID NO: 34299 - DNA, 30 bp, Artificial Sequence
  Synthetic oligonucleotide
gagggaaggtgacgtcgtgccctccttgta

SEQ ID NO: 34300 - DNA, 30 bp, Artificial Sequence
  Synthetic oligonucleotide
ggcggtaagagtcagaaaatgttagttgta

SEQ ID NO: 34301 - DNA, 30 bp, Artificial Sequence
  Synthetic oligonucleotide
acgccgtaagggaaaatcaagagagaatta

SEQ ID NO: 34302 - DNA, 30 bp, Artificial Sequence
  Synthetic oligonucleotide
ggggacgcggttagttaccagatagcatta

SEQ ID NO: 34303 - DNA, 30 bp, Artificial Sequence
  Synthetic oligonucleotide
cgggcagtcaaattgtgaagcgtggcatta

SEQ ID NO: 34304 - DNA, 30 bp, Artificial Sequence
  Synthetic oligonucleotide
ccgttaaacaggtaactggatcgacgatta

SEQ ID NO: 34305 - DNA, 30 bp, Artificial Sequence
  Synthetic oligonucleotide
gagcgtactagccaaactagcttgcactta

SEQ ID NO: 34306 - DNA, 30 bp, Artificial Sequence
  Synthetic oligonucleotide
tagggacagccgagagacacccgaccctta

SEQ ID NO: 34307 - DNA, 30 bp, Artificial Sequence
  Synthetic oligonucleotide
gggtcatcgtacgagtgcgactacgcctta

SEQ ID NO: 34308 - DNA, 30 bp, Artificial Sequence
  Synthetic oligonucleotide
ggtggggggataatgtcgaagtgatgctta

SEQ ID NO: 34309 - DNA, 30 bp, Artificial Sequence
  Synthetic oligonucleotide
cgtgaaaaagcagatcgagtcaagcagtta

SEQ ID NO: 34310 - DNA, 30 bp, Artificial Sequence
  Synthetic oligonucleotide
gtacagatacacacaacaacactaaggtta

SEQ ID NO: 34311 - DNA, 30 bp, Artificial Sequence
  Synthetic oligonucleotide
atgcagaacgaattacgggccgtgaggtta

SEQ ID NO: 34312 - DNA, 30 bp, Artificial Sequence
  Synthetic oligonucleotide
aatagcaccgatctcgcgagaccaatgtta

SEQ ID NO: 34313 - DNA, 30 bp, Artificial Sequence
  Synthetic oligonucleotide
agcggagggacgggtgttcacgctgtgtta

SEQ ID NO: 34314 - DNA, 30 bp, Artificial Sequence
  Synthetic oligonucleotide
ctagcatacccggctgaggaccgcgaaaac

SEQ ID NO: 34315 - DNA, 30 bp, Artificial Sequence
  Synthetic oligonucleotide
gtcaaaaataacctttcagcaccggaaaac

SEQ ID NO: 34316 - DNA, 30 bp, Artificial Sequence
  Synthetic oligonucleotide
cgtatggtcaacgagtgctgaatgtaaaac

SEQ ID NO: 34317 - DNA, 30 bp, Artificial Sequence
  Synthetic oligonucleotide
ggatcacacagacttagctcaggctcaaac

SEQ ID NO: 34318 - DNA, 30 bp, Artificial Sequence
  Synthetic oligonucleotide
cctccaagacacctcgaagctggcagaaac

SEQ ID NO: 34319 - DNA, 30 bp, Artificial Sequence
  Synthetic oligonucleotide
gtatggaaaaatgaaaaaaggcgcggaaac

SEQ ID NO: 34320 - DNA, 30 bp, Artificial Sequence
  Synthetic oligonucleotide
cgatcatggaccaggaaagcgcttggaaac

SEQ ID NO: 34321 - DNA, 30 bp, Artificial Sequence
  Synthetic oligonucleotide
aatacgtaagaacacctgtgcgccataaac

SEQ ID NO: 34322 - DNA, 30 bp, Artificial Sequence
  Synthetic oligonucleotide
aggcctcatctcaaaactaacaggataaac

SEQ ID NO: 34323 - DNA, 30 bp, Artificial Sequence
  Synthetic oligonucleotide
gaagtagcatacgaggagaagggagtaaac

SEQ ID NO: 34324 - DNA, 30 bp, Artificial Sequence
  Synthetic oligonucleotide
caaaagccggggtaagcatcgcataacaac

SEQ ID NO: 34325 - DNA, 30 bp, Artificial Sequence
  Synthetic oligonucleotide
tctggcgagagaagagcctaatcacacaac

SEQ ID NO: 34326 - DNA, 30 bp, Artificial Sequence
  Synthetic oligonucleotide
gcgcgtagcatcgaagagggcgaggacaac

SEQ ID NO: 34327 - DNA, 30 bp, Artificial Sequence
  Synthetic oligonucleotide
ccgaaattcgcatagtatagtagtgacaac

SEQ ID NO: 34328 - DNA, 30 bp, Artificial Sequence
  Synthetic oligonucleotide
gtgaagctgaaatgccgtcgacctgccaac

SEQ ID NO: 34329 - DNA, 30 bp, Artificial Sequence
  Synthetic oligonucleotide
aaggtcacagttagtggaagtgtctccaac

SEQ ID NO: 34330 - DNA, 30 bp, Artificial Sequence
  Synthetic oligonucleotide
gcacgatattgtgtcaaggagcttagcaac

SEQ ID NO: 34331 - DNA, 30 bp, Artificial Sequence
  Synthetic oligonucleotide
gacgtcactacaatccacgagtcccgcaac

SEQ ID NO: 34332 - DNA, 30 bp, Artificial Sequence
  Synthetic oligonucleotide
tgcaaacattgacagaatatcgcatgcaac

SEQ ID NO: 34333 - DNA, 30 bp, Artificial Sequence
  Synthetic oligonucleotide
aggtgcggggagaccagacgggcgctcaac

SEQ ID NO: 34334 - DNA, 30 bp, Artificial Sequence
  Synthetic oligonucleotide
cagggggcagcgtgggcacaaggtttcaac

SEQ ID NO: 34335 - DNA, 30 bp, Artificial Sequence
  Synthetic oligonucleotide
caaagcacaggagccaatgacgggaagaac

SEQ ID NO: 34336 - DNA, 30 bp, Artificial Sequence
  Synthetic oligonucleotide
tgtaaccgataaaacaccggaactgagaac

SEQ ID NO: 34337 - DNA, 30 bp, Artificial Sequence
  Synthetic oligonucleotide
tagggaggttagttgtgaatagccaggaac

SEQ ID NO: 34338 - DNA, 30 bp, Artificial Sequence
  Synthetic oligonucleotide
tctcacaacaatgaaactgatcagaggaac

SEQ ID NO: 34339 - DNA, 30 bp, Artificial Sequence
  Synthetic oligonucleotide
tcacagctctgcccaggagccaggcggaac

SEQ ID NO: 34340 - DNA, 30 bp, Artificial Sequence
  Synthetic oligonucleotide
cggctcagcgttagaacatccaacatgaac

SEQ ID NO: 34341 - DNA, 30 bp, Artificial Sequence
  Synthetic oligonucleotide
ccaagggataactcaaataatcgattgaac

SEQ ID NO: 34342 - DNA, 30 bp, Artificial Sequence
  Synthetic oligonucleotide
tgactcaacctggaaacagatcgagataac

SEQ ID NO: 34343 - DNA, 30 bp, Artificial Sequence
  Synthetic oligonucleotide
taggggcgatatattggacagcacactaac

SEQ ID NO: 34344 - DNA, 30 bp, Artificial Sequence
  Synthetic oligonucleotide
gaaggacgaccgtacgaatcgacatctaac

SEQ ID NO: 34345 - DNA, 30 bp, Artificial Sequence
  Synthetic oligonucleotide
caaacctgagaaatggttccctaccgtaac

SEQ ID NO: 34346 - DNA, 30 bp, Artificial Sequence
  Synthetic oligonucleotide
gacaaaagtatcgactcaaacctgcttaac

SEQ ID NO: 34347 - DNA, 30 bp, Artificial Sequence
  Synthetic oligonucleotide
aacggccgagaggatgcgcggcataaacac

SEQ ID NO: 34348 - DNA, 30 bp, Artificial Sequence
  Synthetic oligonucleotide
aaggagcgcatggccatagcagcggaacac

SEQ ID NO: 34349 - DNA, 30 bp, Artificial Sequence
  Synthetic oligonucleotide
agtaattaggtcggaagagggcgtgaacac

SEQ ID NO: 34350 - DNA, 30 bp, Artificial Sequence
  Synthetic oligonucleotide
cgggagaggcaaggccaatgagtaggacac

SEQ ID NO: 34351 - DNA, 30 bp, Artificial Sequence
  Synthetic oligonucleotide
cgctcataaggcgcaatatcgagctgacac

SEQ ID NO: 34352 - DNA, 30 bp, Artificial Sequence
  Synthetic oligonucleotide
ttcagagggaacaagccatccagtacccac

SEQ ID NO: 34353 - DNA, 30 bp, Artificial Sequence
  Synthetic oligonucleotide
cgatggagtataacacggtaaaatggccac

SEQ ID NO: 34354 - DNA, 30 bp, Artificial Sequence
  Synthetic oligonucleotide
acgtgtctaagggggtgggaggtgatccac

SEQ ID NO: 34355 - DNA, 30 bp, Artificial Sequence
  Synthetic oligonucleotide
aaagaaacgtggactaatagaccccagcac

SEQ ID NO: 34356 - DNA, 30 bp, Artificial Sequence
  Synthetic oligonucleotide
tacccaggggagggatcacttggtcagcac

SEQ ID NO: 34357 - DNA, 30 bp, Artificial Sequence
  Synthetic oligonucleotide
tagcactgatcgtgcgggtcaggggagcac

SEQ ID NO: 34358 - DNA, 30 bp, Artificial Sequence
  Synthetic oligonucleotide
gcaagacggtagaggtgaaaaaactagcac

SEQ ID NO: 34359 - DNA, 30 bp, Artificial Sequence
  Synthetic oligonucleotide
tcatgacaaattaaaacattgccaacgcac

SEQ ID NO: 34360 - DNA, 30 bp, Artificial Sequence
  Synthetic oligonucleotide
gccaccgccaaagaggtgatgccatcgcac

SEQ ID NO: 34361 - DNA, 30 bp, Artificial Sequence
  Synthetic oligonucleotide
gcctaggtccaatagcccagagtttcgcac

SEQ ID NO: 34362 - DNA, 30 bp, Artificial Sequence
  Synthetic oligonucleotide
gcactcaacgaggtctcacaagaacggcac

SEQ ID NO: 34363 - DNA, 30 bp, Artificial Sequence
  Synthetic oligonucleotide
ttctcggcatacagagaccaaggggggcac

SEQ ID NO: 34364 - DNA, 30 bp, Artificial Sequence
  Synthetic oligonucleotide
tggagggaacagggtaagaactgagtgcac

SEQ ID NO: 34365 - DNA, 30 bp, Artificial Sequence
  Synthetic oligonucleotide
gcggacgatagctaaatcacgtccagtcac

SEQ ID NO: 34366 - DNA, 30 bp, Artificial Sequence
  Synthetic oligonucleotide
gaggatgagtatcgatacggcgtacaagac

SEQ ID NO: 34367 - DNA, 30 bp, Artificial Sequence
  Synthetic oligonucleotide
aagcgcctaggatgcgggacttagacagac

SEQ ID NO: 34368 - DNA, 30 bp, Artificial Sequence
  Synthetic oligonucleotide
gccttgcccacccggagtggaacgccagac

SEQ ID NO: 34369 - DNA, 30 bp, Artificial Sequence
  Synthetic oligonucleotide
tggtgataataacttacgatttaagcagac

SEQ ID NO: 34370 - DNA, 30 bp, Artificial Sequence
  Synthetic oligonucleotide
gaggcaaccgcgggtaacatagtcgcagac

SEQ ID NO: 34371 - DNA, 30 bp, Artificial Sequence
  Synthetic oligonucleotide
cgagaggcctatacgacgagatctagagac

SEQ ID NO: 34372 - DNA, 30 bp, Artificial Sequence
  Synthetic oligonucleotide
cgggccgttaacgccgaacggggtagagac

SEQ ID NO: 34373 - DNA, 30 bp, Artificial Sequence
  Synthetic oligonucleotide
caggtagtaggattgaggcttggacgagac

SEQ ID NO: 34374 - DNA, 31 bp, Artificial Sequence
  Synthetic oligonucleotide
aagtacaatatccacatgtccccagctagac

SEQ ID NO: 34375 - DNA, 30 bp, Artificial Sequence
  Synthetic oligonucleotide
aagaagacagtcgaaataccatccgtagac

SEQ ID NO: 34376 - DNA, 30 bp, Artificial Sequence
  Synthetic oligonucleotide
gagttgtgggttagtagaaagaaggtagac

SEQ ID NO: 34377 - DNA, 30 bp, Artificial Sequence
  Synthetic oligonucleotide
ggccaagatcctagaacggacataaacgac

SEQ ID NO: 34378 - DNA, 30 bp, Artificial Sequence
  Synthetic oligonucleotide
aaacaatgcaacaagggtcctagcaacgac

SEQ ID NO: 34379 - DNA, 30 bp, Artificial Sequence
  Synthetic oligonucleotide
atggtgagtagctaagaaaccgcggacgac

SEQ ID NO: 34380 - DNA, 30 bp, Artificial Sequence
  Synthetic oligonucleotide
gggtgtggcctgatcaacactaaatacgac

SEQ ID NO: 34381 - DNA, 30 bp, Artificial Sequence
  Synthetic oligonucleotide
tagagggcaagtaccgtagatcgaaccgac

SEQ ID NO: 34382 - DNA, 30 bp, Artificial Sequence
  Synthetic oligonucleotide
atgtcaagcgaaagcaacgaacgccccgac

SEQ ID NO: 34383 - DNA, 30 bp, Artificial Sequence
  Synthetic oligonucleotide
ccgattagaaagtgattatgcgacagcgac

SEQ ID NO: 34384 - DNA, 30 bp, Artificial Sequence
  Synthetic oligonucleotide
ttcggtatgaacagggagaggaaccgcgac

SEQ ID NO: 34385 - DNA, 30 bp, Artificial Sequence
  Synthetic oligonucleotide
aggggaaaataggtaatcgtagcccgcgac

SEQ ID NO: 34386 - DNA, 30 bp, Artificial Sequence
  Synthetic oligonucleotide
tagcgtataacttgacgaaaccggctcgac

SEQ ID NO: 34387 - DNA, 30 bp, Artificial Sequence
  Synthetic oligonucleotide
gtgtggaaactaatctaggtacgattcgac

SEQ ID NO: 34388 - DNA, 30 bp, Artificial Sequence
  Synthetic oligonucleotide
ggaatggaagtagattataatgcaaaggac

SEQ ID NO: 34389 - DNA, 30 bp, Artificial Sequence
  Synthetic oligonucleotide
taataaagacaacgaggttatcccaaggac

SEQ ID NO: 34390 - DNA, 30 bp, Artificial Sequence
  Synthetic oligonucleotide
gtgggtagtagatagtaagcagctcaggac

SEQ ID NO: 34391 - DNA, 30 bp, Artificial Sequence
  Synthetic oligonucleotide
cgggaagaacaagccagagacaagacggac

SEQ ID NO: 34392 - DNA, 30 bp, Artificial Sequence
  Synthetic oligonucleotide
gggtacactagtaaacggacagtgacggac

SEQ ID NO: 34393 - DNA, 30 bp, Artificial Sequence
  Synthetic oligonucleotide
tcttgcgacaaacagtatagggcacgggac

SEQ ID NO: 34394 - DNA, 30 bp, Artificial Sequence
  Synthetic oligonucleotide
caccaaagctagattgagagatggtgggac

SEQ ID NO: 34395 - DNA, 30 bp, Artificial Sequence
  Synthetic oligonucleotide
acgtacaggaagtagcttcggacgaatgac

SEQ ID NO: 34396 - DNA, 31 bp, Artificial Sequence
  Synthetic oligonucleotide
acgggtcggcggcctaaaatcccgcactgac

SEQ ID NO: 34397 - DNA, 30 bp, Artificial Sequence
  Synthetic oligonucleotide
cacttactgctgatcaacagggcaggtgac

SEQ ID NO: 34398 - DNA, 30 bp, Artificial Sequence
  Synthetic oligonucleotide
gcggtaccgatgaggccgacgatgggtgac

SEQ ID NO: 34399 - DNA, 30 bp, Artificial Sequence
  Synthetic oligonucleotide
gaagaccagcgggacgacacgtggtgtgac

SEQ ID NO: 34400 - DNA, 30 bp, Artificial Sequence
  Synthetic oligonucleotide
cggtaggatacctggcagacagaccaatac

SEQ ID NO: 34401 - DNA, 30 bp, Artificial Sequence
  Synthetic oligonucleotide
gggcaagtcaagttagtgggctaaacatac

SEQ ID NO: 34402 - DNA, 30 bp, Artificial Sequence
  Synthetic oligonucleotide
atatgtggaagagttactgcagtagcatac

SEQ ID NO: 34403 - DNA, 30 bp, Artificial Sequence
  Synthetic oligonucleotide
acaccacatgataattcagagcgtgcatac

SEQ ID NO: 34404 - DNA, 30 bp, Artificial Sequence
  Synthetic oligonucleotide
gagcaagacaacgggtcgcacggcagatac

SEQ ID NO: 34405 - DNA, 30 bp, Artificial Sequence
  Synthetic oligonucleotide
gtagcgaagggatccagaatcgagagatac

SEQ ID NO: 34406 - DNA, 30 bp, Artificial Sequence
  Synthetic oligonucleotide
ggctaaaggatacagttccgtctaaactac

SEQ ID NO: 34407 - DNA, 30 bp, Artificial Sequence
  Synthetic oligonucleotide
aaccgcaagataccagtaagggaacgctac

SEQ ID NO: 34408 - DNA, 30 bp, Artificial Sequence
  Synthetic oligonucleotide
agaaccgctctaaataacatagctcgctac

SEQ ID NO: 34409 - DNA, 30 bp, Artificial Sequence
  Synthetic oligonucleotide
agtaccacttggggaggtaaaaaatgctac

SEQ ID NO: 34410 - DNA, 30 bp, Artificial Sequence
  Synthetic oligonucleotide
gtaacacgcgtaggacgatataagaagtac

SEQ ID NO: 34411 - DNA, 30 bp, Artificial Sequence
  Synthetic oligonucleotide
ggggcgactagaagtgcgcgaacgaagtac

SEQ ID NO: 34412 - DNA, 30 bp, Artificial Sequence
  Synthetic oligonucleotide
ataaggacaaggcctcgcaattaatcgtac

SEQ ID NO: 34413 - DNA, 30 bp, Artificial Sequence
  Synthetic oligonucleotide
aggagactagagtgactcatcaccaggtac

SEQ ID NO: 34414 - DNA, 30 bp, Artificial Sequence
  Synthetic oligonucleotide
ctgggactgtgccggatgatacgagtgtac

SEQ ID NO: 34415 - DNA, 30 bp, Artificial Sequence
  Synthetic oligonucleotide
gcgcacgcgtaaacagtgcgggaatattac

SEQ ID NO: 34416 - DNA, 30 bp, Artificial Sequence
  Synthetic oligonucleotide
cgactgaggttgaacaatcgcatagcttac

SEQ ID NO: 34417 - DNA, 30 bp, Artificial Sequence
  Synthetic oligonucleotide
ggcaaacattgtgccgtcgactgccgttac

SEQ ID NO: 34418 - DNA, 30 bp, Artificial Sequence
  Synthetic oligonucleotide
tcaccaagctcgacacatcgaaggggttac

SEQ ID NO: 34419 - DNA, 30 bp, Artificial Sequence
  Synthetic oligonucleotide
aggtcgagaatggccgctaataatggttac

SEQ ID NO: 34420 - DNA, 30 bp, Artificial Sequence
  Synthetic oligonucleotide
agcaaacatggacatgcctctacgccaacc

SEQ ID NO: 34421 - DNA, 30 bp, Artificial Sequence
  Synthetic oligonucleotide
ggacatcaggggatgaaatgggcgccaacc

SEQ ID NO: 34422 - DNA, 30 bp, Artificial Sequence
  Synthetic oligonucleotide
gaacgacgggcgcaaaccatcattccaacc

SEQ ID NO: 34423 - DNA, 30 bp, Artificial Sequence
  Synthetic oligonucleotide
cgccatatatatacaacataaacagcaacc

SEQ ID NO: 34424 - DNA, 30 bp, Artificial Sequence
  Synthetic oligonucleotide
tctaagaacaggagtagaagcgtggcaacc

SEQ ID NO: 34425 - DNA, 30 bp, Artificial Sequence
  Synthetic oligonucleotide
cgaagctcagcaagggacctattgggaacc

SEQ ID NO: 34426 - DNA, 30 bp, Artificial Sequence
  Synthetic oligonucleotide
gggtacagcgagctagcccactacaacacc

SEQ ID NO: 34427 - DNA, 30 bp, Artificial Sequence
  Synthetic oligonucleotide
cgtaaacacaatccacgggcgaggcacacc

SEQ ID NO: 34428 - DNA, 30 bp, Artificial Sequence
  Synthetic oligonucleotide
tgcgacactcagaaacacatgaacgacacc

SEQ ID NO: 34429 - DNA, 30 bp, Artificial Sequence
  Synthetic oligonucleotide
agaagttaagagatcagcctgcagtacacc

SEQ ID NO: 34430 - DNA, 30 bp, Artificial Sequence
  Synthetic oligonucleotide
aatcgcaaggaatctggcgtacggaccacc

SEQ ID NO: 34431 - DNA, 30 bp, Artificial Sequence
  Synthetic oligonucleotide
tggtgcgggaagtcagcttgaccactcacc

SEQ ID NO: 34432 - DNA, 30 bp, Artificial Sequence
  Synthetic oligonucleotide
ggagaaagctcgtgatcctacggaaagacc

SEQ ID NO: 34433 - DNA, 30 bp, Artificial Sequence
  Synthetic oligonucleotide
cagccaatgaagtgggatctagtgcagacc

SEQ ID NO: 34434 - DNA, 30 bp, Artificial Sequence
  Synthetic oligonucleotide
tgggaggtcagactagaactacgtgggacc

SEQ ID NO: 34435 - DNA, 30 bp, Artificial Sequence
  Synthetic oligonucleotide
atgtctggggtataagtgacagagatgacc

SEQ ID NO: 34436 - DNA, 30 bp, Artificial Sequence
  Synthetic oligonucleotide
taggagaggaatggtttgcgcggggtgacc

SEQ ID NO: 34437 - DNA, 30 bp, Artificial Sequence
  Synthetic oligonucleotide
acccaaggaattaggcacccgcgatctacc

SEQ ID NO: 34438 - DNA, 30 bp, Artificial Sequence
  Synthetic oligonucleotide
aagagtgtaaaactcgctctggtaagtacc

SEQ ID NO: 34439 - DNA, 30 bp, Artificial Sequence
  Synthetic oligonucleotide
attgcgacacagagcgctgaggggagtacc

SEQ ID NO: 34440 - DNA, 30 bp, Artificial Sequence
  Synthetic oligonucleotide
aacgaggctactgtcagagtcagaggtacc

SEQ ID NO: 34441 - DNA, 30 bp, Artificial Sequence
  Synthetic oligonucleotide
cactgaacgaatttgaacaagtcaacaccc

SEQ ID NO: 34442 - DNA, 30 bp, Artificial Sequence
  Synthetic oligonucleotide
tgaatccaagtagaagataggcgtacaccc

SEQ ID NO: 34443 - DNA, 30 bp, Artificial Sequence
  Synthetic oligonucleotide
tacgagagggtgacgtgccgaccaggaccc

SEQ ID NO: 34444 - DNA, 30 bp, Artificial Sequence
  Synthetic oligonucleotide
tcggagaggaggattcataggaagtgaccc

SEQ ID NO: 34445 - DNA, 30 bp, Artificial Sequence
  Synthetic oligonucleotide
cacacacagagggagaatgtattgtgaccc

SEQ ID NO: 34446 - DNA, 30 bp, Artificial Sequence
  Synthetic oligonucleotide
acaggagtacgccaacgatccctcttaccc

SEQ ID NO: 34447 - DNA, 30 bp, Artificial Sequence
  Synthetic oligonucleotide
atggaaatgcggattaccacagataacccc

SEQ ID NO: 34448 - DNA, 30 bp, Artificial Sequence
  Synthetic oligonucleotide
cgttacaagtgtggacgatgggaagccccc

SEQ ID NO: 34449 - DNA, 30 bp, Artificial Sequence
  Synthetic oligonucleotide
gtgggatacggaagtaggagtaacatcccc

SEQ ID NO: 34450 - DNA, 31 bp, Artificial Sequence
  Synthetic oligonucleotide
cgcacccatcacaggataacttctgcagccc

SEQ ID NO: 34451 - DNA, 30 bp, Artificial Sequence
  Synthetic oligonucleotide
agcgtctcaaactgtcacatcacctcgccc

SEQ ID NO: 34452 - DNA, 30 bp, Artificial Sequence
  Synthetic oligonucleotide
ccgttatgtcgggaacaaaatgagttgccc

SEQ ID NO: 34453 - DNA, 30 bp, Artificial Sequence
  Synthetic oligonucleotide
caaagcatacataaggctgtggcgtatccc

SEQ ID NO: 34454 - DNA, 30 bp, Artificial Sequence
  Synthetic oligonucleotide
aggctaagtagtgggcgaggtcgatctccc

SEQ ID NO: 34455 - DNA, 30 bp, Artificial Sequence
  Synthetic oligonucleotide
caggtcgtcggaagagtggcacgagttccc

SEQ ID NO: 34456 - DNA, 30 bp, Artificial Sequence
  Synthetic oligonucleotide
agacagacacaggaagttcgcaactaagcc

SEQ ID NO: 34457 - DNA, 30 bp, Artificial Sequence
  Synthetic oligonucleotide
tggttaacaagagccggaacgtccacagcc

SEQ ID NO: 34458 - DNA, 30 bp, Artificial Sequence
  Synthetic oligonucleotide
tgccaaagatatgcgccaataccggcagcc

SEQ ID NO: 34459 - DNA, 30 bp, Artificial Sequence
  Synthetic oligonucleotide
ggggaattagagagcgagttccggctagcc

SEQ ID NO: 34460 - DNA, 30 bp, Artificial Sequence
  Synthetic oligonucleotide
tgatgtgatgaattttagaaatagttagcc

SEQ ID NO: 34461 - DNA, 30 bp, Artificial Sequence
  Synthetic oligonucleotide
gcaaggattcagagaaaggtctaagccgcc

SEQ ID NO: 34462 - DNA, 30 bp, Artificial Sequence
  Synthetic oligonucleotide
cgccgttcagaggagttggtgggcgccgcc

SEQ ID NO: 34463 - DNA, 30 bp, Artificial Sequence
  Synthetic oligonucleotide
agaggtgaaggtcagctcgattgattcgcc

SEQ ID NO: 34464 - DNA, 30 bp, Artificial Sequence
  Synthetic oligonucleotide
agtcgaggccaataaagaacaatgcaggcc

SEQ ID NO: 34465 - DNA, 30 bp, Artificial Sequence
  Synthetic oligonucleotide
aacccattcagaaatggaacaggtgaggcc

SEQ ID NO: 34466 - DNA, 30 bp, Artificial Sequence
  Synthetic oligonucleotide
catcgaaaagcaacgcaaaccgaaacggcc

SEQ ID NO: 34467 - DNA, 30 bp, Artificial Sequence
  Synthetic oligonucleotide
gagcaaagggataaggagatattgacggcc

SEQ ID NO: 34468 - DNA, 30 bp, Artificial Sequence
  Synthetic oligonucleotide
tacatcccactcgcaccctaaaagccggcc

SEQ ID NO: 34469 - DNA, 30 bp, Artificial Sequence
  Synthetic oligonucleotide
ggcataaaattcagtccagagttgtcggcc

SEQ ID NO: 34470 - DNA, 30 bp, Artificial Sequence
  Synthetic oligonucleotide
gtagcggacaagcatcactcggaaagggcc

SEQ ID NO: 34471 - DNA, 30 bp, Artificial Sequence
  Synthetic oligonucleotide
tcggcgtgagggcgatacaactgttgggcc

SEQ ID NO: 34472 - DNA, 30 bp, Artificial Sequence
  Synthetic oligonucleotide
taacatcagtgtaaaccagaatcagtggcc

SEQ ID NO: 34473 - DNA, 31 bp, Artificial Sequence
  Synthetic oligonucleotide
ggccacaacgacaaaatgctgcgtaaatgcc

SEQ ID NO: 34474 - DNA, 30 bp, Artificial Sequence
  Synthetic oligonucleotide
atcgaccctaaagtgagatttaggagtgcc

SEQ ID NO: 34475 - DNA, 30 bp, Artificial Sequence
  Synthetic oligonucleotide
cgcaaacggaacgcgaaacggggcgaatcc

SEQ ID NO: 34476 - DNA, 30 bp, Artificial Sequence
  Synthetic oligonucleotide
agggtaccccttgaccgagtaaactaatcc

SEQ ID NO: 34477 - DNA, 30 bp, Artificial Sequence
  Synthetic oligonucleotide
actcagggtgtagaaggccaccagcgatcc

SEQ ID NO: 34478 - DNA, 30 bp, Artificial Sequence
  Synthetic oligonucleotide
gatcgacaactgcgaaacctcgagggctcc

SEQ ID NO: 34479 - DNA, 30 bp, Artificial Sequence
  Synthetic oligonucleotide
aaggacttaggtgcgaacatggatctctcc

SEQ ID NO: 34480 - DNA, 30 bp, Artificial Sequence
  Synthetic oligonucleotide
ggtataggagggaaaagcaatgggtagtcc

SEQ ID NO: 34481 - DNA, 30 bp, Artificial Sequence
  Synthetic oligonucleotide
cgatcgttaaagaacaacccagcaacgtcc

SEQ ID NO: 34482 - DNA, 30 bp, Artificial Sequence
  Synthetic oligonucleotide
ggacaacaagcacgttcagtaaaatcgtcc

SEQ ID NO: 34483 - DNA, 30 bp, Artificial Sequence
  Synthetic oligonucleotide
acagcaagtggcgtgtaggggaaatcgtcc

SEQ ID NO: 34484 - DNA, 30 bp, Artificial Sequence
  Synthetic oligonucleotide
cagcgtggggaacaatggcgggtactgtcc

SEQ ID NO: 34485 - DNA, 30 bp, Artificial Sequence
  Synthetic oligonucleotide
agtcatccgggacgaaaggggcacaaaagc

SEQ ID NO: 34486 - DNA, 30 bp, Artificial Sequence
  Synthetic oligonucleotide
cgaccactaacacgagggcacattaaaagc

SEQ ID NO: 34487 - DNA, 30 bp, Artificial Sequence
  Synthetic oligonucleotide
tgaggaaccgcaaaatagtccgtggaaagc

SEQ ID NO: 34488 - DNA, 30 bp, Artificial Sequence
  Synthetic oligonucleotide
tcaggtcgacaggccaataacagttaaagc

SEQ ID NO: 34489 - DNA, 30 bp, Artificial Sequence
  Synthetic oligonucleotide
agagcggtaggcttagaatttcctccaagc

SEQ ID NO: 34490 - DNA, 30 bp, Artificial Sequence
  Synthetic oligonucleotide
gttcaacgagagagtctggaaagggcaagc

SEQ ID NO: 34491 - DNA, 30 bp, Artificial Sequence
  Synthetic oligonucleotide
tcaggcgactggcagtgaactaagagaagc

SEQ ID NO: 34492 - DNA, 30 bp, Artificial Sequence
  Synthetic oligonucleotide
gtaaggatatgccgtattggaatgtgaagc

SEQ ID NO: 34493 - DNA, 30 bp, Artificial Sequence
  Synthetic oligonucleotide
agagataagaacttggatcggtaactaagc

SEQ ID NO: 34494 - DNA, 30 bp, Artificial Sequence
  Synthetic oligonucleotide
gggatcggcattagagtctacaaagtaagc

SEQ ID NO: 34495 - DNA, 30 bp, Artificial Sequence
  Synthetic oligonucleotide
ccaagaaattgcaacgccctattagtaagc

SEQ ID NO: 34496 - DNA, 30 bp, Artificial Sequence
  Synthetic oligonucleotide
cggagaccagttacgccgatataggtaagc

SEQ ID NO: 34497 - DNA, 30 bp, Artificial Sequence
  Synthetic oligonucleotide
taacggtatgggggtaaatcccaattaagc

SEQ ID NO: 34498 - DNA, 30 bp, Artificial Sequence
  Synthetic oligonucleotide
aggtcacgaagtttttgaagaggtttaagc

SEQ ID NO: 34499 - DNA, 30 bp, Artificial Sequence
  Synthetic oligonucleotide
gtaggtgcggaagcgatcttgggcgccagc

SEQ ID NO: 34500 - DNA, 30 bp, Artificial Sequence
  Synthetic oligonucleotide
acagagggaatggaagagcctccggccagc

SEQ ID NO: 34501 - DNA, 30 bp, Artificial Sequence
  Synthetic oligonucleotide
tcggtatcaattgatagccgagaatccagc

SEQ ID NO: 34502 - DNA, 30 bp, Artificial Sequence
  Synthetic oligonucleotide
agcctcccgcaatgagatacattaagcagc

SEQ ID NO: 34503 - DNA, 30 bp, Artificial Sequence
  Synthetic oligonucleotide
acgtgtcactggtatgcttgaccactcagc

SEQ ID NO: 34504 - DNA, 30 bp, Artificial Sequence
  Synthetic oligonucleotide
agagagtgttaggggcccaaaaatgtcagc

SEQ ID NO: 34505 - DNA, 30 bp, Artificial Sequence
  Synthetic oligonucleotide
agcttgaaatgagaggtgtccgtagagagc

SEQ ID NO: 34506 - DNA, 30 bp, Artificial Sequence
  Synthetic oligonucleotide
gggaggcatgaatgtgggtccaaatcgagc

SEQ ID NO: 34507 - DNA, 30 bp, Artificial Sequence
  Synthetic oligonucleotide
tgaggacggaggacaacagatcttcggagc

SEQ ID NO: 34508 - DNA, 30 bp, Artificial Sequence
  Synthetic oligonucleotide
taggcatctgcaactgttgattgagggagc

SEQ ID NO: 34509 - DNA, 30 bp, Artificial Sequence
  Synthetic oligonucleotide
gtgacggagatttagaagagaggatggagc

SEQ ID NO: 34510 - DNA, 30 bp, Artificial Sequence
  Synthetic oligonucleotide
ttccaaccacaaatgtaccaaaacgtgagc

SEQ ID NO: 34511 - DNA, 30 bp, Artificial Sequence
  Synthetic oligonucleotide
ctacacaatttgagagcggaacgattgagc

SEQ ID NO: 34512 - DNA, 30 bp, Artificial Sequence
  Synthetic oligonucleotide
agtaccaatgagggggccactcgacatagc

SEQ ID NO: 34513 - DNA, 30 bp, Artificial Sequence
  Synthetic oligonucleotide
tgagggccgcgagatcagattgagggtagc

SEQ ID NO: 34514 - DNA, 30 bp, Artificial Sequence
  Synthetic oligonucleotide
ctacgagcgaccgaaggacgaaagtgtagc

SEQ ID NO: 34515 - DNA, 30 bp, Artificial Sequence
  Synthetic oligonucleotide
cgagaagcagccagaacagtcaaggttagc

SEQ ID NO: 34516 - DNA, 30 bp, Artificial Sequence
  Synthetic oligonucleotide
caaacagagtagtacgccattcaaacacgc

SEQ ID NO: 34517 - DNA, 30 bp, Artificial Sequence
  Synthetic oligonucleotide
agacaaatagggacattgggttggctacgc

SEQ ID NO: 34518 - DNA, 30 bp, Artificial Sequence
  Synthetic oligonucleotide
cacacgtgcacagggaatgcaaccccccgc

SEQ ID NO: 34519 - DNA, 30 bp, Artificial Sequence
  Synthetic oligonucleotide
acgaaaccgaatcgggggtctgcaggccgc

SEQ ID NO: 34520 - DNA, 30 bp, Artificial Sequence
  Synthetic oligonucleotide
ccatgagacctctacacgtgacaaatccgc

SEQ ID NO: 34521 - DNA, 30 bp, Artificial Sequence
  Synthetic oligonucleotide
ctggtaaggatagggactacactcgtccgc

SEQ ID NO: 34522 - DNA, 30 bp, Artificial Sequence
  Synthetic oligonucleotide
tgcaaccggaatatggaataacaacagcgc

SEQ ID NO: 34523 - DNA, 30 bp, Artificial Sequence
  Synthetic oligonucleotide
agatataagcccactgagggacgggagcgc

SEQ ID NO: 34524 - DNA, 30 bp, Artificial Sequence
  Synthetic oligonucleotide
aacataagtcagagccaatgcgggccgcgc

SEQ ID NO: 34525 - DNA, 30 bp, Artificial Sequence
  Synthetic oligonucleotide
taggtcactcgaaaggtcagttaatcgcgc

SEQ ID NO: 34526 - DNA, 30 bp, Artificial Sequence
  Synthetic oligonucleotide
gggcaaaggtagtgacctgatacagggcgc

SEQ ID NO: 34527 - DNA, 30 bp, Artificial Sequence
  Synthetic oligonucleotide
gtggagctgaagttgccttgggaagtgcgc

SEQ ID NO: 34528 - DNA, 31 bp, Artificial Sequence
  Synthetic oligonucleotide
ggagccatgaccatcgttacacggggtgcgc

SEQ ID NO: 34529 - DNA, 30 bp, Artificial Sequence
  Synthetic oligonucleotide
cctcgccaaacgatcctggacagacatcgc

SEQ ID NO: 34530 - DNA, 30 bp, Artificial Sequence
  Synthetic oligonucleotide
agcgaatgcccgaccgaacctgagcatcgc

SEQ ID NO: 34531 - DNA, 30 bp, Artificial Sequence
  Synthetic oligonucleotide
ggcatcagggccaagatgccttaccgtcgc

SEQ ID NO: 34532 - DNA, 30 bp, Artificial Sequence
  Synthetic oligonucleotide
taacgtgagcgatatgagcccggagttcgc

SEQ ID NO: 34533 - DNA, 30 bp, Artificial Sequence
  Synthetic oligonucleotide
gcgtggtcctgagcgagtataatgaaaggc

SEQ ID NO: 34534 - DNA, 30 bp, Artificial Sequence
  Synthetic oligonucleotide
acagcagaaacgggttcaaggttaacaggc

SEQ ID NO: 34535 - DNA, 30 bp, Artificial Sequence
  Synthetic oligonucleotide
caacaattcccgtacctcacattagcaggc

SEQ ID NO: 34536 - DNA, 30 bp, Artificial Sequence
  Synthetic oligonucleotide
gcgagagaagcgatagacggttgatcaggc

SEQ ID NO: 34537 - DNA, 30 bp, Artificial Sequence
  Synthetic oligonucleotide
cgcggggatgagattatgaccaggagaggc

SEQ ID NO: 34538 - DNA, 30 bp, Artificial Sequence
  Synthetic oligonucleotide
tcagttcgaagtatagcgcaagagcgaggc

SEQ ID NO: 34539 - DNA, 30 bp, Artificial Sequence
  Synthetic oligonucleotide
gcatacaaacggcgcctatcggtcggaggc

SEQ ID NO: 34540 - DNA, 30 bp, Artificial Sequence
  Synthetic oligonucleotide
gtacaactacaagtctctgcgaagtgaggc

SEQ ID NO: 34541 - DNA, 30 bp, Artificial Sequence
  Synthetic oligonucleotide
ctcgaacgaagtcggacgaaattacccggc

SEQ ID NO: 34542 - DNA, 30 bp, Artificial Sequence
  Synthetic oligonucleotide
cgacacaggggctggtgatcgagtcccggc

SEQ ID NO: 34543 - DNA, 30 bp, Artificial Sequence
  Synthetic oligonucleotide
tggtcgataggagaactgtaaacatgcggc

SEQ ID NO: 34544 - DNA, 30 bp, Artificial Sequence
  Synthetic oligonucleotide
gggtgaagaagtaacgattgtacgctcggc

SEQ ID NO: 34545 - DNA, 30 bp, Artificial Sequence
  Synthetic oligonucleotide
aacgtgcagatatacgataagctcacgggc

SEQ ID NO: 34546 - DNA, 30 bp, Artificial Sequence
  Synthetic oligonucleotide
acggacgcaaccgagtaaaccaagccgggc

SEQ ID NO: 34547 - DNA, 30 bp, Artificial Sequence
  Synthetic oligonucleotide
gtgcatctgcaatgctgtgacgggatgggc

SEQ ID NO: 34548 - DNA, 30 bp, Artificial Sequence
  Synthetic oligonucleotide
ccgcggggtcgatagaaatggtcattgggc

SEQ ID NO: 34549 - DNA, 30 bp, Artificial Sequence
  Synthetic oligonucleotide
cgataagtgcctgttgcgagcgtggatggc

SEQ ID NO: 34550 - DNA, 30 bp, Artificial Sequence
  Synthetic oligonucleotide
gaaaaggtgaatacacatcaaaaccgtggc

SEQ ID NO: 34551 - DNA, 30 bp, Artificial Sequence
  Synthetic oligonucleotide
acggcgttatgaaagatcgcctcgcttggc

SEQ ID NO: 34552 - DNA, 30 bp, Artificial Sequence
  Synthetic oligonucleotide
tcgaggctgggcccctatgcaccgaaatgc

SEQ ID NO: 34553 - DNA, 30 bp, Artificial Sequence
  Synthetic oligonucleotide
atacggtgagtaaaggaggtaatccaatgc

SEQ ID NO: 34554 - DNA, 30 bp, Artificial Sequence
  Synthetic oligonucleotide
tacggttgtaaaaaaatgcgggtgcaatgc

SEQ ID NO: 34555 - DNA, 30 bp, Artificial Sequence
  Synthetic oligonucleotide
gagcgggccctgaacggcgaagtataatgc

SEQ ID NO: 34556 - DNA, 30 bp, Artificial Sequence
  Synthetic oligonucleotide
tcctaactgcggtaattagccaggtgatgc

SEQ ID NO: 34557 - DNA, 30 bp, Artificial Sequence
  Synthetic oligonucleotide
gcggtggaggatctaccaagcttagtatgc

SEQ ID NO: 34558 - DNA, 30 bp, Artificial Sequence
  Synthetic oligonucleotide
cgagacttgaacactcaacgtacaccctgc

SEQ ID NO: 34559 - DNA, 30 bp, Artificial Sequence
  Synthetic oligonucleotide
tggagccttgcggaaacatagagaagctgc

SEQ ID NO: 34560 - DNA, 30 bp, Artificial Sequence
  Synthetic oligonucleotide
atggagagcggactagtaatcatgggctgc

SEQ ID NO: 34561 - DNA, 30 bp, Artificial Sequence
  Synthetic oligonucleotide
gtcgcagggggtcaacgaatctaaaagtgc

SEQ ID NO: 34562 - DNA, 30 bp, Artificial Sequence
  Synthetic oligonucleotide
cggatcaccgggtcaaaacgcacaaagtgc

SEQ ID NO: 34563 - DNA, 30 bp, Artificial Sequence
  Synthetic oligonucleotide
gccgataatccgatcgaccaaagtgagtgc

SEQ ID NO: 34564 - DNA, 30 bp, Artificial Sequence
  Synthetic oligonucleotide
agacgacgacgaacaaagccaaattagtgc

SEQ ID NO: 34565 - DNA, 30 bp, Artificial Sequence
  Synthetic oligonucleotide
ggcgtggtttgtttagtgtcaatggcgtgc

SEQ ID NO: 34566 - DNA, 30 bp, Artificial Sequence
  Synthetic oligonucleotide
cgggcgcaacgtgatcagtctcggatgtgc

SEQ ID NO: 34567 - DNA, 30 bp, Artificial Sequence
  Synthetic oligonucleotide
ggagattaacataataatatatcggtgtgc

SEQ ID NO: 34568 - DNA, 30 bp, Artificial Sequence
  Synthetic oligonucleotide
gatcggggaggccacaaagatgggacttgc

SEQ ID NO: 34569 - DNA, 30 bp, Artificial Sequence
  Synthetic oligonucleotide
aatggacatcgcgatatcaataacagttgc

SEQ ID NO: 34570 - DNA, 30 bp, Artificial Sequence
  Synthetic oligonucleotide
tcgaaaaaatcgacgctcataagggcaatc

SEQ ID NO: 34571 - DNA, 30 bp, Artificial Sequence
  Synthetic oligonucleotide
tggtcgtagactagctggggtgatcgaatc

SEQ ID NO: 34572 - DNA, 30 bp, Artificial Sequence
  Synthetic oligonucleotide
aggatacactagtccttacaccaaaacatc

SEQ ID NO: 34573 - DNA, 30 bp, Artificial Sequence
  Synthetic oligonucleotide
tgaaaacagcggactgtttacgaaaacatc

SEQ ID NO: 34574 - DNA, 30 bp, Artificial Sequence
  Synthetic oligonucleotide
agaccggtgcggactcacgatccccacatc

SEQ ID NO: 34575 - DNA, 30 bp, Artificial Sequence
  Synthetic oligonucleotide
acgaattctagaaaccgtctatgtgccatc

SEQ ID NO: 34576 - DNA, 30 bp, Artificial Sequence
  Synthetic oligonucleotide
ctagctgtacctcgaaagctcgttgccatc

SEQ ID NO: 34577 - DNA, 30 bp, Artificial Sequence
  Synthetic oligonucleotide
gatgtagggcacgctaaaccgttatgcatc

SEQ ID NO: 34578 - DNA, 30 bp, Artificial Sequence
  Synthetic oligonucleotide
tagaaaccaatccgataataggcgtgcatc

SEQ ID NO: 34579 - DNA, 30 bp, Artificial Sequence
  Synthetic oligonucleotide
tcggtccgaccacgacctagtatagagatc

SEQ ID NO: 34580 - DNA, 30 bp, Artificial Sequence
  Synthetic oligonucleotide
ggataaatcaatgccgaggccacatagatc

SEQ ID NO: 34581 - DNA, 30 bp, Artificial Sequence
  Synthetic oligonucleotide
tctgcgagcgaacgggggaagcttacgatc

SEQ ID NO: 34582 - DNA, 30 bp, Artificial Sequence
  Synthetic oligonucleotide
gtgcaccgagttgtcgcgcatcatccgatc

SEQ ID NO: 34583 - DNA, 30 bp, Artificial Sequence
  Synthetic oligonucleotide
acaatggtgttagaacaatgccgatggatc

SEQ ID NO: 34584 - DNA, 30 bp, Artificial Sequence
  Synthetic oligonucleotide
taggagcacgaaacggtaaacgacactatc

SEQ ID NO: 34585 - DNA, 30 bp, Artificial Sequence
  Synthetic oligonucleotide
tggacatagacgaagcccgacgagactatc

SEQ ID NO: 34586 - DNA, 30 bp, Artificial Sequence
  Synthetic oligonucleotide
aaaggaactaagtgcgaaaggccggctatc

SEQ ID NO: 34587 - DNA, 30 bp, Artificial Sequence
  Synthetic oligonucleotide
cgaaatgcctacccaatgggacaaagtatc

SEQ ID NO: 34588 - DNA, 30 bp, Artificial Sequence
  Synthetic oligonucleotide
agaagggacgagggttctagcagcgttatc

SEQ ID NO: 34589 - DNA, 30 bp, Artificial Sequence
  Synthetic oligonucleotide
cacgaatcctaaacaaacaaccgcgttatc

SEQ ID NO: 34590 - DNA, 30 bp, Artificial Sequence
  Synthetic oligonucleotide
caagggcatagctgggaatgtggcaaactc

SEQ ID NO: 34591 - DNA, 30 bp, Artificial Sequence
  Synthetic oligonucleotide
tgagggaagtgtgtagcattatgccgactc

SEQ ID NO: 34592 - DNA, 30 bp, Artificial Sequence
  Synthetic oligonucleotide
gaagggaaagtttcagacaaagggggactc

SEQ ID NO: 34593 - DNA, 30 bp, Artificial Sequence
  Synthetic oligonucleotide
acagttttcaagataccaccagattgactc

SEQ ID NO: 34594 - DNA, 30 bp, Artificial Sequence
  Synthetic oligonucleotide
gcgaaatagtcatctgaacccatcgtcctc

SEQ ID NO: 34595 - DNA, 30 bp, Artificial Sequence
  Synthetic oligonucleotide
ggatatcgaggccacaaggtaccccagctc

SEQ ID NO: 34596 - DNA, 30 bp, Artificial Sequence
  Synthetic oligonucleotide
atggaacctcgtagataatccaatccgctc

SEQ ID NO: 34597 - DNA, 30 bp, Artificial Sequence
  Synthetic oligonucleotide
aagacaggaacagtacattgaagtgcgctc

SEQ ID NO: 34598 - DNA, 30 bp, Artificial Sequence
  Synthetic oligonucleotide
ggagcctagtgaaacggacgaaaagatctc

SEQ ID NO: 34599 - DNA, 30 bp, Artificial Sequence
  Synthetic oligonucleotide
acgtgactaggtgaatgtgaggtcgatctc

SEQ ID NO: 34600 - DNA, 30 bp, Artificial Sequence
  Synthetic oligonucleotide
gccgaggacagaatcgtactttcagctctc

SEQ ID NO: 34601 - DNA, 30 bp, Artificial Sequence
  Synthetic oligonucleotide
atgcgagccaacgggactgggctgagtctc

SEQ ID NO: 34602 - DNA, 30 bp, Artificial Sequence
  Synthetic oligonucleotide
agtacccggtaaaaaacctgagagaaagtc

SEQ ID NO: 34603 - DNA, 30 bp, Artificial Sequence
  Synthetic oligonucleotide
cggatcagaagttatgcagctcggaaagtc

SEQ ID NO: 34604 - DNA, 30 bp, Artificial Sequence
  Synthetic oligonucleotide
cggcaacgggcatagagccggacaacagtc

SEQ ID NO: 34605 - DNA, 30 bp, Artificial Sequence
  Synthetic oligonucleotide
cgtgggtgcaacaagcacatctcaccagtc

SEQ ID NO: 34606 - DNA, 30 bp, Artificial Sequence
  Synthetic oligonucleotide
ggtagggcaaacccgcaagaacactcagtc

SEQ ID NO: 34607 - DNA, 30 bp, Artificial Sequence
  Synthetic oligonucleotide
catggggattagagcgacatcagcctagtc

SEQ ID NO: 34608 - DNA, 30 bp, Artificial Sequence
  Synthetic oligonucleotide
atagcgcacacattaccgagttgaaacgtc

SEQ ID NO: 34609 - DNA, 30 bp, Artificial Sequence
  Synthetic oligonucleotide
ggtactactcatactgaaaaaagtcacgtc

SEQ ID NO: 34610 - DNA, 30 bp, Artificial Sequence
  Synthetic oligonucleotide
caacatccgagtgcgagacctggggacgtc

SEQ ID NO: 34611 - DNA, 30 bp, Artificial Sequence
  Synthetic oligonucleotide
agggatggcatgggtcatccaagatacgtc

SEQ ID NO: 34612 - DNA, 30 bp, Artificial Sequence
  Synthetic oligonucleotide
tggctgtaccgaagtcaacctgtgtacgtc

SEQ ID NO: 34613 - DNA, 30 bp, Artificial Sequence
  Synthetic oligonucleotide
gaagtaccaccccgggtgtgagtgtccgtc

SEQ ID NO: 34614 - DNA, 30 bp, Artificial Sequence
  Synthetic oligonucleotide
acaggtgtagaacatctctgaactagcgtc

SEQ ID NO: 34615 - DNA, 30 bp, Artificial Sequence
  Synthetic oligonucleotide
agaacctgttccgtcaaatctgctctcgtc

SEQ ID NO: 34616 - DNA, 30 bp, Artificial Sequence
  Synthetic oligonucleotide
aaaggaatccggcactggggaagtgtcgtc

SEQ ID NO: 34617 - DNA, 30 bp, Artificial Sequence
  Synthetic oligonucleotide
aggcgagcgatagactaaaggcaaaaggtc

SEQ ID NO: 34618 - DNA, 30 bp, Artificial Sequence
  Synthetic oligonucleotide
agagacatctgaacctcgagagcaaaggtc

SEQ ID NO: 34619 - DNA, 30 bp, Artificial Sequence
  Synthetic oligonucleotide
agcgaaaagtttgttatgaaatggaaggtc

SEQ ID NO: 34620 - DNA, 31 bp, Artificial Sequence
  Synthetic oligonucleotide
agaggtaatattgcgaaagaagggagaggtc

SEQ ID NO: 34621 - DNA, 30 bp, Artificial Sequence
  Synthetic oligonucleotide
gcaggtgatgccagcaaaaactagtcggtc

SEQ ID NO: 34622 - DNA, 30 bp, Artificial Sequence
  Synthetic oligonucleotide
gcaaggcaaaacgaaggtttcaggtcggtc

SEQ ID NO: 34623 - DNA, 30 bp, Artificial Sequence
  Synthetic oligonucleotide
ggttgtaagaacgaaattagacgacgggtc

SEQ ID NO: 34624 - DNA, 30 bp, Artificial Sequence
  Synthetic oligonucleotide
cttaagactaagccatgagaaagttgggtc

SEQ ID NO: 34625 - DNA, 30 bp, Artificial Sequence
  Synthetic oligonucleotide
taccgaatcttgctcattcaaagagtggtc

SEQ ID NO: 34626 - DNA, 30 bp, Artificial Sequence
  Synthetic oligonucleotide
aaacaacgtaccgtagtaagtatgaatgtc

SEQ ID NO: 34627 - DNA, 30 bp, Artificial Sequence
  Synthetic oligonucleotide
tctccgagggtggtcgaagggttacctgtc

SEQ ID NO: 34628 - DNA, 30 bp, Artificial Sequence
  Synthetic oligonucleotide
cggctaaaagaggggttcctagcgcgtgtc

SEQ ID NO: 34629 - DNA, 30 bp, Artificial Sequence
  Synthetic oligonucleotide
agccgcgaacatgcaggagggaacgaattc

SEQ ID NO: 34630 - DNA, 30 bp, Artificial Sequence
  Synthetic oligonucleotide
gggctcaatagagcacgtatgaggacattc

SEQ ID NO: 34631 - DNA, 30 bp, Artificial Sequence
  Synthetic oligonucleotide
catatagtaggggggtgaggcgtaagattc

SEQ ID NO: 34632 - DNA, 30 bp, Artificial Sequence
  Synthetic oligonucleotide
ggagcgggcaagatatataaggacaacttc

SEQ ID NO: 34633 - DNA, 30 bp, Artificial Sequence
  Synthetic oligonucleotide
tgccactgggcgagaggaccgtctaacttc

SEQ ID NO: 34634 - DNA, 30 bp, Artificial Sequence
  Synthetic oligonucleotide
caagaggaataaggcctaagatcgctcttc

SEQ ID NO: 34635 - DNA, 30 bp, Artificial Sequence
  Synthetic oligonucleotide
ccaacggccaaaacatgtaattccgcgttc

SEQ ID NO: 34636 - DNA, 30 bp, Artificial Sequence
  Synthetic oligonucleotide
gacaaccctcaagtgtaaagtccctcgttc

SEQ ID NO: 34637 - DNA, 30 bp, Artificial Sequence
  Synthetic oligonucleotide
cgaccacaggggtacaagcaatcatctttc

SEQ ID NO: 34638 - DNA, 30 bp, Artificial Sequence
  Synthetic oligonucleotide
cggatctagctgggagagtctcggaaaaag

SEQ ID NO: 34639 - DNA, 30 bp, Artificial Sequence
  Synthetic oligonucleotide
gagggtaatgaggtatttgggatcgaaaag

SEQ ID NO: 34640 - DNA, 30 bp, Artificial Sequence
  Synthetic oligonucleotide
acgataaatactatttttttgttggaaaag

SEQ ID NO: 34641 - DNA, 30 bp, Artificial Sequence
  Synthetic oligonucleotide
cccatgcttgaggaaattgcttatgaaaag

SEQ ID NO: 34642 - DNA, 30 bp, Artificial Sequence
  Synthetic oligonucleotide
atacgtcccgccagttctgccgtctaaaag

SEQ ID NO: 34643 - DNA, 30 bp, Artificial Sequence
  Synthetic oligonucleotide
aggttgctgcctatcagggaataaccaaag

SEQ ID NO: 34644 - DNA, 30 bp, Artificial Sequence
  Synthetic oligonucleotide
tggacatggagctaaactattgaggcaaag

SEQ ID NO: 34645 - DNA, 30 bp, Artificial Sequence
  Synthetic oligonucleotide
caacgacaggggccttgagcgcgttcaaag

SEQ ID NO: 34646 - DNA, 30 bp, Artificial Sequence
  Synthetic oligonucleotide
tacaaaagagcgagctaccaagccagaaag

SEQ ID NO: 34647 - DNA, 30 bp, Artificial Sequence
  Synthetic oligonucleotide
ccattgtaaacaagcacgaggagtagaaag

SEQ ID NO: 34648 - DNA, 30 bp, Artificial Sequence
  Synthetic oligonucleotide
tggaaccagcatggcacaattagtagaaag

SEQ ID NO: 34649 - DNA, 30 bp, Artificial Sequence
  Synthetic oligonucleotide
cctggtgcattgaaacacgtcattagaaag

SEQ ID NO: 34650 - DNA, 30 bp, Artificial Sequence
  Synthetic oligonucleotide
tatacgtatagcctacctagactgcgaaag

SEQ ID NO: 34651 - DNA, 30 bp, Artificial Sequence
  Synthetic oligonucleotide
atcaggcacgtgaaagggggacaatgaaag

SEQ ID NO: 34652 - DNA, 31 bp, Artificial Sequence
  Synthetic oligonucleotide
tcccggacgaagcgtccgagtacgatgaaag

SEQ ID NO: 34653 - DNA, 30 bp, Artificial Sequence
  Synthetic oligonucleotide
tgggtgaacggaagcctgtttcagtgaaag

SEQ ID NO: 34654 - DNA, 30 bp, Artificial Sequence
  Synthetic oligonucleotide
accaaatgatgttgcctaacctgaataaag

SEQ ID NO: 34655 - DNA, 30 bp, Artificial Sequence
  Synthetic oligonucleotide
aacgtatcatcgcacaaatgttcactaaag

SEQ ID NO: 34656 - DNA, 30 bp, Artificial Sequence
  Synthetic oligonucleotide
tcttatacgacagagctacagtcgctaaag

SEQ ID NO: 34657 - DNA, 30 bp, Artificial Sequence
  Synthetic oligonucleotide
cctggccccgagccgcgtaaagcattaaag

SEQ ID NO: 34658 - DNA, 30 bp, Artificial Sequence
  Synthetic oligonucleotide
gggcacgaactgctgtggggtactttaaag

SEQ ID NO: 34659 - DNA, 30 bp, Artificial Sequence
  Synthetic oligonucleotide
aagcagtgccgacaacacctagcaaacaag

SEQ ID NO: 34660 - DNA, 30 bp, Artificial Sequence
  Synthetic oligonucleotide
tccggcactacgggggatcgctgtcacaag

SEQ ID NO: 34661 - DNA, 30 bp, Artificial Sequence
  Synthetic oligonucleotide
aagaggcgaatgccgaggtaatgagacaag

SEQ ID NO: 34662 - DNA, 30 bp, Artificial Sequence
  Synthetic oligonucleotide
ccaataagtgcgtctctccgataatccaag

SEQ ID NO: 34663 - DNA, 30 bp, Artificial Sequence
  Synthetic oligonucleotide
cgccgtaatgcgcatcgcaacagccgcaag

SEQ ID NO: 34664 - DNA, 30 bp, Artificial Sequence
  Synthetic oligonucleotide
aaggtgattcatgaaatcggaaatcgcaag

SEQ ID NO: 34665 - DNA, 30 bp, Artificial Sequence
  Synthetic oligonucleotide
acccaattatagtccgaggaacacggcaag

SEQ ID NO: 34666 - DNA, 30 bp, Artificial Sequence
  Synthetic oligonucleotide
cgacaaggtcgtcacatcccctattgcaag

SEQ ID NO: 34667 - DNA, 30 bp, Artificial Sequence
  Synthetic oligonucleotide
agcaagaaaagtgcactagatacttgcaag

SEQ ID NO: 34668 - DNA, 30 bp, Artificial Sequence
  Synthetic oligonucleotide
gcgggcgccaaacgagtgcctcacatcaag

SEQ ID NO: 34669 - DNA, 30 bp, Artificial Sequence
  Synthetic oligonucleotide
acgcaccaaattaaagattacggtatcaag

SEQ ID NO: 34670 - DNA, 30 bp, Artificial Sequence
  Synthetic oligonucleotide
aggtcataagcgatggagacgtgactcaag

SEQ ID NO: 34671 - DNA, 30 bp, Artificial Sequence
  Synthetic oligonucleotide
gggtgaattcaagtatgggagggtctcaag

SEQ ID NO: 34672 - DNA, 30 bp, Artificial Sequence
  Synthetic oligonucleotide
cggatcacatcttcattaattcgagtcaag

SEQ ID NO: 34673 - DNA, 30 bp, Artificial Sequence
  Synthetic oligonucleotide
caggaggtcacaaatagtgcacgcttcaag

SEQ ID NO: 34674 - DNA, 30 bp, Artificial Sequence
  Synthetic oligonucleotide
ttcgggagtcgtattggcaccagccagaag

SEQ ID NO: 34675 - DNA, 30 bp, Artificial Sequence
  Synthetic oligonucleotide
tgagaggaccaggagtcgctgtagcagaag

SEQ ID NO: 34676 - DNA, 30 bp, Artificial Sequence
  Synthetic oligonucleotide
cacaatttaggagtgccgaagtggcagaag

SEQ ID NO: 34677 - DNA, 30 bp, Artificial Sequence
  Synthetic oligonucleotide
ccagttttcagggaaggccgtaaggagaag

SEQ ID NO: 34678 - DNA, 30 bp, Artificial Sequence
  Synthetic oligonucleotide
gccacatctgcaaaatcaacacggacgaag

SEQ ID NO: 34679 - DNA, 30 bp, Artificial Sequence
  Synthetic oligonucleotide
agtgtatggggggcagccaaacaaccgaag

SEQ ID NO: 34680 - DNA, 30 bp, Artificial Sequence
  Synthetic oligonucleotide
accgtcaacaaggtctatatggtagcgaag

SEQ ID NO: 34681 - DNA, 30 bp, Artificial Sequence
  Synthetic oligonucleotide
cggaaaacgacgggtgaggaagcaaggaag

SEQ ID NO: 34682 - DNA, 30 bp, Artificial Sequence
  Synthetic oligonucleotide
atagtcgcgatgacgccattaccgaggaag

SEQ ID NO: 34683 - DNA, 30 bp, Artificial Sequence
  Synthetic oligonucleotide
gtgcaaccccgtaagagatcactgaggaag

SEQ ID NO: 34684 - DNA, 30 bp, Artificial Sequence
  Synthetic oligonucleotide
caacccagtttgctctggggaagcgggaag

SEQ ID NO: 34685 - DNA, 30 bp, Artificial Sequence
  Synthetic oligonucleotide
aactccgtacaatcagcgtgggcggggaag

SEQ ID NO: 34686 - DNA, 30 bp, Artificial Sequence
  Synthetic oligonucleotide
acgcatctgtctcaacgacatgtggggaag

SEQ ID NO: 34687 - DNA, 30 bp, Artificial Sequence
  Synthetic oligonucleotide
tttacagaacgaaggaaaacgaactggaag

SEQ ID NO: 34688 - DNA, 30 bp, Artificial Sequence
  Synthetic oligonucleotide
agtaaggaggcacctcagtataagtggaag

SEQ ID NO: 34689 - DNA, 30 bp, Artificial Sequence
  Synthetic oligonucleotide
gatagcagctaaacaggaaccaggtggaag

SEQ ID NO: 34690 - DNA, 30 bp, Artificial Sequence
  Synthetic oligonucleotide
ccaagataccgaaattagcgtagaatgaag

SEQ ID NO: 34691 - DNA, 30 bp, Artificial Sequence
  Synthetic oligonucleotide
cgtgggtgcctgccgaagtgaactatgaag

SEQ ID NO: 34692 - DNA, 30 bp, Artificial Sequence
  Synthetic oligonucleotide
gtgtcacgagatacgtcttaacaggtgaag

SEQ ID NO: 34693 - DNA, 30 bp, Artificial Sequence
  Synthetic oligonucleotide
cgtcatccttagcgcaaagggtgggtgaag

SEQ ID NO: 34694 - DNA, 30 bp, Artificial Sequence
  Synthetic oligonucleotide
catgcgggacagcgagaaatccctaataag

SEQ ID NO: 34695 - DNA, 30 bp, Artificial Sequence
  Synthetic oligonucleotide
gttaggcacggctcggtaaataaagataag

SEQ ID NO: 34696 - DNA, 30 bp, Artificial Sequence
  Synthetic oligonucleotide
cagcattacaatcaacagaacccagataag

SEQ ID NO: 34697 - DNA, 30 bp, Artificial Sequence
  Synthetic oligonucleotide
gggagtaacctgtaatactatcaatataag

SEQ ID NO: 34698 - DNA, 30 bp, Artificial Sequence
  Synthetic oligonucleotide
gatacacactcaggacaaagaatctataag

SEQ ID NO: 34699 - DNA, 30 bp, Artificial Sequence
  Synthetic oligonucleotide
agatagcgcacgttctcgggatgacctaag

SEQ ID NO: 34700 - DNA, 30 bp, Artificial Sequence
  Synthetic oligonucleotide
tgcgcaacccatgacctgaaatgccctaag

SEQ ID NO: 34701 - DNA, 30 bp, Artificial Sequence
  Synthetic oligonucleotide
ggaagatgaccagggcacgaatgcgctaag

SEQ ID NO: 34702 - DNA, 30 bp, Artificial Sequence
  Synthetic oligonucleotide
tgatggaggcatgtttgcagatgaagtaag

SEQ ID NO: 34703 - DNA, 30 bp, Artificial Sequence
  Synthetic oligonucleotide
caccgggcccgactgaggataaacattaag

SEQ ID NO: 34704 - DNA, 30 bp, Artificial Sequence
  Synthetic oligonucleotide
tggcacgtgacagcgttgagcctagttaag

SEQ ID NO: 34705 - DNA, 30 bp, Artificial Sequence
  Synthetic oligonucleotide
caggagatagtctccctcaatacaaaacag

SEQ ID NO: 34706 - DNA, 30 bp, Artificial Sequence
  Synthetic oligonucleotide
gtacaatgccacatccgcccaattcaacag

SEQ ID NO: 34707 - DNA, 31 bp, Artificial Sequence
  Synthetic oligonucleotide
agtgcgatgggtgtgggacgtctgcgaacag

SEQ ID NO: 34708 - DNA, 30 bp, Artificial Sequence
  Synthetic oligonucleotide
agggtgcataactatgtactgtaggaacag

SEQ ID NO: 34709 - DNA, 30 bp, Artificial Sequence
  Synthetic oligonucleotide
taaggaaatctgcagacccccacggaacag

SEQ ID NO: 34710 - DNA, 30 bp, Artificial Sequence
  Synthetic oligonucleotide
gaggcaactcgaatcccgagattataacag

SEQ ID NO: 34711 - DNA, 30 bp, Artificial Sequence
  Synthetic oligonucleotide
tggaacctgagtatagaatgctgctaacag

SEQ ID NO: 34712 - DNA, 30 bp, Artificial Sequence
  Synthetic oligonucleotide
ggacaaaaactaaggggagctcattaacag

SEQ ID NO: 34713 - DNA, 30 bp, Artificial Sequence
  Synthetic oligonucleotide
cattaccaccatctatactgaccttaacag

SEQ ID NO: 34714 - DNA, 30 bp, Artificial Sequence
  Synthetic oligonucleotide
gacgaaccgacaatcgaggacggaacacag

SEQ ID NO: 34715 - DNA, 30 bp, Artificial Sequence
  Synthetic oligonucleotide
ccatagaaacgtgaacggagtagtgcacag

SEQ ID NO: 34716 - DNA, 30 bp, Artificial Sequence
  Synthetic oligonucleotide
acgagtcaagttttacgtttgagatcacag

SEQ ID NO: 34717 - DNA, 30 bp, Artificial Sequence
  Synthetic oligonucleotide
aacaatatcaagtatgtgtagggctcacag

SEQ ID NO: 34718 - DNA, 30 bp, Artificial Sequence
  Synthetic oligonucleotide
ataacagctaaccctacacgctccggacag

SEQ ID NO: 34719 - DNA, 30 bp, Artificial Sequence
  Synthetic oligonucleotide
aagcgcaagcgaggtggggcatggtgacag

SEQ ID NO: 34720 - DNA, 30 bp, Artificial Sequence
  Synthetic oligonucleotide
gggtagatcctgatatagtaaacgatacag

SEQ ID NO: 34721 - DNA, 30 bp, Artificial Sequence
  Synthetic oligonucleotide
tgaggtaggcatgtgtgccacaacttacag

SEQ ID NO: 34722 - DNA, 30 bp, Artificial Sequence
  Synthetic oligonucleotide
gacctacaacatggggcgccagcaaaccag

SEQ ID NO: 34723 - DNA, 30 bp, Artificial Sequence
  Synthetic oligonucleotide
catgacaaattagagtattgcgcacaccag

SEQ ID NO: 34724 - DNA, 30 bp, Artificial Sequence
  Synthetic oligonucleotide
ccggaacccgagtgatgaaagcgtcaccag

SEQ ID NO: 34725 - DNA, 30 bp, Artificial Sequence
  Synthetic oligonucleotide
tcagtgaataatctatgggggtgataccag

SEQ ID NO: 34726 - DNA, 30 bp, Artificial Sequence
  Synthetic oligonucleotide
gggggcaaaaacaggggtccaacgtaccag

SEQ ID NO: 34727 - DNA, 30 bp, Artificial Sequence
  Synthetic oligonucleotide
ctagaggggagcccggcctttactacccag

SEQ ID NO: 34728 - DNA, 30 bp, Artificial Sequence
  Synthetic oligonucleotide
ctgtcgatataacaattaggccgtacccag

SEQ ID NO: 34729 - DNA, 30 bp, Artificial Sequence
  Synthetic oligonucleotide
atggaaactgaattcatgatcggaagccag

SEQ ID NO: 34730 - DNA, 30 bp, Artificial Sequence
  Synthetic oligonucleotide
cgttgatcattgttccatgggcagagccag

SEQ ID NO: 34731 - DNA, 30 bp, Artificial Sequence
  Synthetic oligonucleotide
cgatgcactccaataagcgatgtgtgccag

SEQ ID NO: 34732 - DNA, 30 bp, Artificial Sequence
  Synthetic oligonucleotide
atggtcgaagggatgggaacaacgctccag

SEQ ID NO: 34733 - DNA, 30 bp, Artificial Sequence
  Synthetic oligonucleotide
tacgtgggccgagagacattctgtgtccag

SEQ ID NO: 34734 - DNA, 30 bp, Artificial Sequence
  Synthetic oligonucleotide
gataccgccaggataaagcagtacttccag

SEQ ID NO: 34735 - DNA, 30 bp, Artificial Sequence
  Synthetic oligonucleotide
aggaccaggggccgaaacactaagttccag

SEQ ID NO: 34736 - DNA, 30 bp, Artificial Sequence
  Synthetic oligonucleotide
tcgcagggaatctaggtgagcaaaacgcag

SEQ ID NO: 34737 - DNA, 30 bp, Artificial Sequence
  Synthetic oligonucleotide
ggcaccttgtgagtagcgctaatagggcag

SEQ ID NO: 34738 - DNA, 30 bp, Artificial Sequence
  Synthetic oligonucleotide
aaggcgtgtgacggatcaacccatctgcag

SEQ ID NO: 34739 - DNA, 30 bp, Artificial Sequence
  Synthetic oligonucleotide
gcgcgaaatcgcatcagttaatatttgcag

SEQ ID NO: 34740 - DNA, 30 bp, Artificial Sequence
  Synthetic oligonucleotide
tagggaattagttaacgagcggtcaatcag

SEQ ID NO: 34741 - DNA, 30 bp, Artificial Sequence
  Synthetic oligonucleotide
aaagatgacgatgataccaagctagatcag

SEQ ID NO: 34742 - DNA, 30 bp, Artificial Sequence
  Synthetic oligonucleotide
atgaccaatgtatcccccgataaggatcag

SEQ ID NO: 34743 - DNA, 30 bp, Artificial Sequence
  Synthetic oligonucleotide
tgcagtcgtaaagcatgcaggaggtatcag

SEQ ID NO: 34744 - DNA, 30 bp, Artificial Sequence
  Synthetic oligonucleotide
aacgttgatcgcgccgaacacgacactcag

SEQ ID NO: 34745 - DNA, 30 bp, Artificial Sequence
  Synthetic oligonucleotide
tggacgttacctcggccccgaaaggctcag

SEQ ID NO: 34746 - DNA, 30 bp, Artificial Sequence
  Synthetic oligonucleotide
aatgaacattcaggtgggcggtatggtcag

SEQ ID NO: 34747 - DNA, 30 bp, Artificial Sequence
  Synthetic oligonucleotide
cggagcgccgcctctagcgagcaatgtcag

SEQ ID NO: 34748 - DNA, 30 bp, Artificial Sequence
  Synthetic oligonucleotide
acctataagcgggaaattcgtaggtgtcag

SEQ ID NO: 34749 - DNA, 30 bp, Artificial Sequence
  Synthetic oligonucleotide
ccagatacgaagctaaaacgggggtgtcag

SEQ ID NO: 34750 - DNA, 30 bp, Artificial Sequence
  Synthetic oligonucleotide
acgccagtaacggggatataggcttttcag

SEQ ID NO: 34751 - DNA, 30 bp, Artificial Sequence
  Synthetic oligonucleotide
aggaccagtgattttacgaattggcaagag

SEQ ID NO: 34752 - DNA, 30 bp, Artificial Sequence
  Synthetic oligonucleotide
ggagggatcagtacgattcgtagagaagag

SEQ ID NO: 34753 - DNA, 30 bp, Artificial Sequence
  Synthetic oligonucleotide
caagaaacagatatgcgacaccgcgaagag

SEQ ID NO: 34754 - DNA, 30 bp, Artificial Sequence
  Synthetic oligonucleotide
acactaaggtaatcgtgacaatctgaagag

SEQ ID NO: 34755 - DNA, 30 bp, Artificial Sequence
  Synthetic oligonucleotide
gacgagtaatgagcctccggagtagcagag

SEQ ID NO: 34756 - DNA, 30 bp, Artificial Sequence
  Synthetic oligonucleotide
cgaattatgcacaatcaaactacttcagag

SEQ ID NO: 34757 - DNA, 30 bp, Artificial Sequence
  Synthetic oligonucleotide
ggagctagcgaacctgccagcaaaagagag

SEQ ID NO: 34758 - DNA, 30 bp, Artificial Sequence
  Synthetic oligonucleotide
cgaacccatttagacagagagggaagagag

SEQ ID NO: 34759 - DNA, 30 bp, Artificial Sequence
  Synthetic oligonucleotide
gttcccgaaggtcgagccgcccacagagag

SEQ ID NO: 34760 - DNA, 30 bp, Artificial Sequence
  Synthetic oligonucleotide
catagtgattcgtaatgaaacactagagag

SEQ ID NO: 34761 - DNA, 30 bp, Artificial Sequence
  Synthetic oligonucleotide
caccgtaaagaatttcgtaaatgtagagag

SEQ ID NO: 34762 - DNA, 30 bp, Artificial Sequence
  Synthetic oligonucleotide
atagcaagacgccgggcatgtgagggagag

SEQ ID NO: 34763 - DNA, 30 bp, Artificial Sequence
  Synthetic oligonucleotide
ttaggatggaggagatagtagacgatagag

SEQ ID NO: 34764 - DNA, 30 bp, Artificial Sequence
  Synthetic oligonucleotide
ggtacggctgagcaagaaaacatgctagag

SEQ ID NO: 34765 - DNA, 30 bp, Artificial Sequence
  Synthetic oligonucleotide
ccgccgcaggaataggatatgctgctagag

SEQ ID NO: 34766 - DNA, 30 bp, Artificial Sequence
  Synthetic oligonucleotide
ggggttccgggagctacaatctgagtagag

SEQ ID NO: 34767 - DNA, 30 bp, Artificial Sequence
  Synthetic oligonucleotide
gcgacgtcctgtgtgaggcgattcgtagag

SEQ ID NO: 34768 - DNA, 30 bp, Artificial Sequence
  Synthetic oligonucleotide
gctaccaaggcggtgtaaagatctttagag

SEQ ID NO: 34769 - DNA, 30 bp, Artificial Sequence
  Synthetic oligonucleotide
aacggaaatgtatcataaccgcacaacgag

SEQ ID NO: 34770 - DNA, 30 bp, Artificial Sequence
  Synthetic oligonucleotide
ggactaaattaaaacttgcctgggaacgag

SEQ ID NO: 34771 - DNA, 30 bp, Artificial Sequence
  Synthetic oligonucleotide
cgctaaagctttcaattgcatacgtacgag

SEQ ID NO: 34772 - DNA, 30 bp, Artificial Sequence
  Synthetic oligonucleotide
acgccattagtagggtcgtgactaaccgag

SEQ ID NO: 34773 - DNA, 30 bp, Artificial Sequence
  Synthetic oligonucleotide
acagattagaggaaaacgtagctccccgag

SEQ ID NO: 34774 - DNA, 30 bp, Artificial Sequence
  Synthetic oligonucleotide
agcagcaaaaaaattcccaacaatcccgag

SEQ ID NO: 34775 - DNA, 30 bp, Artificial Sequence
  Synthetic oligonucleotide
ggtcgctcttatgatgaccgtaattccgag

SEQ ID NO: 34776 - DNA, 30 bp, Artificial Sequence
  Synthetic oligonucleotide
cggacagtccactgcaccggataaagcgag

SEQ ID NO: 34777 - DNA, 30 bp, Artificial Sequence
  Synthetic oligonucleotide
aaaggtgatgttgtctctgaaagaagcgag

SEQ ID NO: 34778 - DNA, 30 bp, Artificial Sequence
  Synthetic oligonucleotide
gcaagaacctcccacacggccgggagcgag

SEQ ID NO: 34779 - DNA, 30 bp, Artificial Sequence
  Synthetic oligonucleotide
ccgggttaataagtggatcgggggagcgag

SEQ ID NO: 34780 - DNA, 30 bp, Artificial Sequence
  Synthetic oligonucleotide
tacaatatttggagaatggaaagcggcgag

SEQ ID NO: 34781 - DNA, 30 bp, Artificial Sequence
  Synthetic oligonucleotide
gcgagcatccaaacaacccttttctgcgag

SEQ ID NO: 34782 - DNA, 30 bp, Artificial Sequence
  Synthetic oligonucleotide
atcgcgccaactatgcccaccgagtgcgag

SEQ ID NO: 34783 - DNA, 30 bp, Artificial Sequence
  Synthetic oligonucleotide
gacggagggtgagagtttgaggggctcgag

SEQ ID NO: 34784 - DNA, 30 bp, Artificial Sequence
  Synthetic oligonucleotide
gattgaggatcgaacgtgattcctgtcgag

SEQ ID NO: 34785 - DNA, 30 bp, Artificial Sequence
  Synthetic oligonucleotide
caaactgttatatcattgtgcagaaaggag

SEQ ID NO: 34786 - DNA, 30 bp, Artificial Sequence
  Synthetic oligonucleotide
ctatcgtctaacaaccatgttggaaaggag

SEQ ID NO: 34787 - DNA, 30 bp, Artificial Sequence
  Synthetic oligonucleotide
gaagtcgtacacatagtatcactcaaggag

SEQ ID NO: 34788 - DNA, 30 bp, Artificial Sequence
  Synthetic oligonucleotide
tgggtgtatacggcaccggtaaaacaggag

SEQ ID NO: 34789 - DNA, 30 bp, Artificial Sequence
  Synthetic oligonucleotide
agccatgcgaacatgaatctcgaagaggag

SEQ ID NO: 34790 - DNA, 30 bp, Artificial Sequence
  Synthetic oligonucleotide
gaaccgggtagtcatcctggaatagaggag

SEQ ID NO: 34791 - DNA, 30 bp, Artificial Sequence
  Synthetic oligonucleotide
aggcaatatagagactgtgttgtcgaggag

SEQ ID NO: 34792 - DNA, 30 bp, Artificial Sequence
  Synthetic oligonucleotide
tgttgctcaagacaaatacgcgatgaggag

SEQ ID NO: 34793 - DNA, 30 bp, Artificial Sequence
  Synthetic oligonucleotide
tttacggatggtataagacacgaataggag

SEQ ID NO: 34794 - DNA, 30 bp, Artificial Sequence
  Synthetic oligonucleotide
acatctcgagaaggcttaacatcttaggag

SEQ ID NO: 34795 - DNA, 30 bp, Artificial Sequence
  Synthetic oligonucleotide
taccgcacatagaagttttacgcgacggag

SEQ ID NO: 34796 - DNA, 30 bp, Artificial Sequence
  Synthetic oligonucleotide
ctgaatgtcgacttggacgaagacccggag

SEQ ID NO: 34797 - DNA, 30 bp, Artificial Sequence
  Synthetic oligonucleotide
caaacagaacgcgcgaggctttggccggag

SEQ ID NO: 34798 - DNA, 30 bp, Artificial Sequence
  Synthetic oligonucleotide
gctaatcaaggcaaggtagcgttatcggag

SEQ ID NO: 34799 - DNA, 30 bp, Artificial Sequence
  Synthetic oligonucleotide
ctcccaagtgtaggaccaagggcgtcggag

SEQ ID NO: 34800 - DNA, 30 bp, Artificial Sequence
  Synthetic oligonucleotide
agaggaaggcgcacgtgacatttgtcggag

SEQ ID NO: 34801 - DNA, 30 bp, Artificial Sequence
  Synthetic oligonucleotide
ggccacatggcgaggcgaagaggtcgggag

SEQ ID NO: 34802 - DNA, 30 bp, Artificial Sequence
  Synthetic oligonucleotide
cgtctacgagtagatacagtgaggtgggag

SEQ ID NO: 34803 - DNA, 30 bp, Artificial Sequence
  Synthetic oligonucleotide
accgtatgcaggggtcgcgctttaatggag

SEQ ID NO: 34804 - DNA, 30 bp, Artificial Sequence
  Synthetic oligonucleotide
atgcacgaacacgagaacgggagcatggag

SEQ ID NO: 34805 - DNA, 30 bp, Artificial Sequence
  Synthetic oligonucleotide
gcaatcaggcggagttttggaagtatggag

SEQ ID NO: 34806 - DNA, 30 bp, Artificial Sequence
  Synthetic oligonucleotide
tcttgtagccggagtgtctgtagactggag

SEQ ID NO: 34807 - DNA, 30 bp, Artificial Sequence
  Synthetic oligonucleotide
agaccaaaacctatttaacgcgagctggag

SEQ ID NO: 34808 - DNA, 30 bp, Artificial Sequence
  Synthetic oligonucleotide
tggcgaagataacagttagatctcttggag

SEQ ID NO: 34809 - DNA, 30 bp, Artificial Sequence
  Synthetic oligonucleotide
taatatcaagcacaagatctgaagaatgag

SEQ ID NO: 34810 - DNA, 30 bp, Artificial Sequence
  Synthetic oligonucleotide
ccacaacagtacaaatgcgggagtaatgag

SEQ ID NO: 34811 - DNA, 30 bp, Artificial Sequence
  Synthetic oligonucleotide
gcttgcgacttgaaatcggtttaacatgag

SEQ ID NO: 34812 - DNA, 31 bp, Artificial Sequence
  Synthetic oligonucleotide
tcgccgcagaggcgtgtcggatggccatgag

SEQ ID NO: 34813 - DNA, 30 bp, Artificial Sequence
  Synthetic oligonucleotide
cgaaaggtgtgtaattgacggtcttatgag

SEQ ID NO: 34814 - DNA, 30 bp, Artificial Sequence
  Synthetic oligonucleotide
cggaggtggtaattcgttcgataaactgag

SEQ ID NO: 34815 - DNA, 30 bp, Artificial Sequence
  Synthetic oligonucleotide
tcgattagcgtccaagctctccgaactgag

SEQ ID NO: 34816 - DNA, 30 bp, Artificial Sequence
  Synthetic oligonucleotide
gtaaggtgggatagagtgcaaaaagctgag

SEQ ID NO: 34817 - DNA, 30 bp, Artificial Sequence
  Synthetic oligonucleotide
atagtcactggtcgggtagtaagagctgag

SEQ ID NO: 34818 - DNA, 30 bp, Artificial Sequence
  Synthetic oligonucleotide
tcaaccgtaatggagtagaccaagtctgag

SEQ ID NO: 34819 - DNA, 30 bp, Artificial Sequence
  Synthetic oligonucleotide
aagagcatcatggaggactacaaaagtgag

SEQ ID NO: 34820 - DNA, 30 bp, Artificial Sequence
  Synthetic oligonucleotide
tacccagggtgtaccaacaagcaaagtgag

SEQ ID NO: 34821 - DNA, 30 bp, Artificial Sequence
  Synthetic oligonucleotide
aggggaactgaataaatggtgcgtggtgag

SEQ ID NO: 34822 - DNA, 30 bp, Artificial Sequence
  Synthetic oligonucleotide
gtaggcctgcccctggtatggaactgtgag

SEQ ID NO: 34823 - DNA, 30 bp, Artificial Sequence
  Synthetic oligonucleotide
tcggcatccgtctggattctctgctgtgag

SEQ ID NO: 34824 - DNA, 30 bp, Artificial Sequence
  Synthetic oligonucleotide
ggcacagttaacatccggtaacagtgtgag

SEQ ID NO: 34825 - DNA, 30 bp, Artificial Sequence
  Synthetic oligonucleotide
ccgagggattaggagatccggcttcttgag

SEQ ID NO: 34826 - DNA, 30 bp, Artificial Sequence
  Synthetic oligonucleotide
ggcatgaaggcaatccaaggcatggttgag

SEQ ID NO: 34827 - DNA, 30 bp, Artificial Sequence
  Synthetic oligonucleotide
cggactaggtttagatttgattagtttgag

SEQ ID NO: 34828 - DNA, 30 bp, Artificial Sequence
  Synthetic oligonucleotide
catacatcgggtctaaagtgatagcaatag

SEQ ID NO: 34829 - DNA, 30 bp, Artificial Sequence
  Synthetic oligonucleotide
ccttagcaagcaagatggaacatataatag

SEQ ID NO: 34830 - DNA, 30 bp, Artificial Sequence
  Synthetic oligonucleotide
aggtggggggatacttctaggggagcatag

SEQ ID NO: 34831 - DNA, 30 bp, Artificial Sequence
  Synthetic oligonucleotide
ctgacgtcataacaccccgtctgagcatag

SEQ ID NO: 34832 - DNA, 30 bp, Artificial Sequence
  Synthetic oligonucleotide
gcaggtgcgcctatgtacgataaggcatag

SEQ ID NO: 34833 - DNA, 30 bp, Artificial Sequence
  Synthetic oligonucleotide
tagggtaggattgaggttatcaaatcatag

SEQ ID NO: 34834 - DNA, 30 bp, Artificial Sequence
  Synthetic oligonucleotide
cgaagcgaacctagatgcattgacagatag

SEQ ID NO: 34835 - DNA, 30 bp, Artificial Sequence
  Synthetic oligonucleotide
accgaaggaagggctacgcgtgagcgatag

SEQ ID NO: 34836 - DNA, 30 bp, Artificial Sequence
  Synthetic oligonucleotide
cgtaacgccgggcgtcccagtatcggatag

SEQ ID NO: 34837 - DNA, 30 bp, Artificial Sequence
  Synthetic oligonucleotide
taacgcacccacagcgatacctcaatatag

SEQ ID NO: 34838 - DNA, 30 bp, Artificial Sequence
  Synthetic oligonucleotide
cagggcttcgggacataagtgtgcttatag

SEQ ID NO: 34839 - DNA, 30 bp, Artificial Sequence
  Synthetic oligonucleotide
tcaacgtaacaaaccaggtcgatcttatag

SEQ ID NO: 34840 - DNA, 30 bp, Artificial Sequence
  Synthetic oligonucleotide
actagagaaaattgcaaagtacaaaactag

SEQ ID NO: 34841 - DNA, 30 bp, Artificial Sequence
  Synthetic oligonucleotide
ccacgaagatggcgtgagaagagaaactag

SEQ ID NO: 34842 - DNA, 30 bp, Artificial Sequence
  Synthetic oligonucleotide
gtggttgctggtcaacacgtcgagaactag

SEQ ID NO: 34843 - DNA, 30 bp, Artificial Sequence
  Synthetic oligonucleotide
gcacgtatccccattatacaccaacactag

SEQ ID NO: 34844 - DNA, 30 bp, Artificial Sequence
  Synthetic oligonucleotide
aatggcagggctgagatccccgaagactag

SEQ ID NO: 34845 - DNA, 30 bp, Artificial Sequence
  Synthetic oligonucleotide
cgaccgtactttctcacccaagtagactag

SEQ ID NO: 34846 - DNA, 30 bp, Artificial Sequence
  Synthetic oligonucleotide
cagtagatgtacgggacggggtggacctag

SEQ ID NO: 34847 - DNA, 30 bp, Artificial Sequence
  Synthetic oligonucleotide
gtcactaaaaataccagatggacgccctag

SEQ ID NO: 34848 - DNA, 30 bp, Artificial Sequence
  Synthetic oligonucleotide
cgttaaaactaaggctacatgggtagctag

SEQ ID NO: 34849 - DNA, 30 bp, Artificial Sequence
  Synthetic oligonucleotide
aaacgtgtaagttgaaccctgaaccgctag

SEQ ID NO: 34850 - DNA, 30 bp, Artificial Sequence
  Synthetic oligonucleotide
acgtttaactaacgacgatgtgattgctag

SEQ ID NO: 34851 - DNA, 30 bp, Artificial Sequence
  Synthetic oligonucleotide
gctgtccgttttgagaatgccgtcatctag

SEQ ID NO: 34852 - DNA, 30 bp, Artificial Sequence
  Synthetic oligonucleotide
agataaaggctgcctgaacaggatctctag

SEQ ID NO: 34853 - DNA, 30 bp, Artificial Sequence
  Synthetic oligonucleotide
cgaaaaatgtacatgtctgtatctgtctag

SEQ ID NO: 34854 - DNA, 30 bp, Artificial Sequence
  Synthetic oligonucleotide
atgatacagaatattgcatgtcgtgtctag

SEQ ID NO: 34855 - DNA, 30 bp, Artificial Sequence
  Synthetic oligonucleotide
tgtcagacgtcggcgagagatggcaagtag

SEQ ID NO: 34856 - DNA, 30 bp, Artificial Sequence
  Synthetic oligonucleotide
gtgtaccgcgagaaactaacacgtgagtag

SEQ ID NO: 34857 - DNA, 30 bp, Artificial Sequence
  Synthetic oligonucleotide
gaccggggatgcgtaggcgcgaactagtag

SEQ ID NO: 34858 - DNA, 30 bp, Artificial Sequence
  Synthetic oligonucleotide
cacgttcaaacaaggaggcacaacccgtag

SEQ ID NO: 34859 - DNA, 30 bp, Artificial Sequence
  Synthetic oligonucleotide
ttgggataagcttggtacgtgttgcggtag

SEQ ID NO: 34860 - DNA, 30 bp, Artificial Sequence
  Synthetic oligonucleotide
tccataatagaacagaagatggatgggtag

SEQ ID NO: 34861 - DNA, 30 bp, Artificial Sequence
  Synthetic oligonucleotide
tgccgacgaagggtaagggaacaatggtag

SEQ ID NO: 34862 - DNA, 30 bp, Artificial Sequence
  Synthetic oligonucleotide
tattgaataacaggagaaagagtgtggtag

SEQ ID NO: 34863 - DNA, 30 bp, Artificial Sequence
  Synthetic oligonucleotide
cgcgcgatgagggtacgcagataaatgtag

SEQ ID NO: 34864 - DNA, 30 bp, Artificial Sequence
  Synthetic oligonucleotide
gagatcaccttagaaggtaaatacatgtag

SEQ ID NO: 34865 - DNA, 30 bp, Artificial Sequence
  Synthetic oligonucleotide
tgcagggaatcggaaatggatgccatgtag

SEQ ID NO: 34866 - DNA, 30 bp, Artificial Sequence
  Synthetic oligonucleotide
ttcgagcggacgatacgaacaggcatgtag

SEQ ID NO: 34867 - DNA, 30 bp, Artificial Sequence
  Synthetic oligonucleotide
cgtggatgacccggattgatagttctgtag

SEQ ID NO: 34868 - DNA, 30 bp, Artificial Sequence
  Synthetic oligonucleotide
aggtacgatcacacagcagcctcggtgtag

SEQ ID NO: 34869 - DNA, 30 bp, Artificial Sequence
  Synthetic oligonucleotide
cgcgccaagtaaattgggattccgttgtag

SEQ ID NO: 34870 - DNA, 30 bp, Artificial Sequence
  Synthetic oligonucleotide
cgtgcctgtcgagcaacatttggggattag

SEQ ID NO: 34871 - DNA, 30 bp, Artificial Sequence
  Synthetic oligonucleotide
gtcgcaaacaggacgatactgcaatattag

SEQ ID NO: 34872 - DNA, 30 bp, Artificial Sequence
  Synthetic oligonucleotide
gcatgaaatgggccaatacgcttatattag

SEQ ID NO: 34873 - DNA, 30 bp, Artificial Sequence
  Synthetic oligonucleotide
acgctaagagatttacggaaggattattag

SEQ ID NO: 34874 - DNA, 30 bp, Artificial Sequence
  Synthetic oligonucleotide
gatccgtctacgtgatatgacaaaacttag

SEQ ID NO: 34875 - DNA, 30 bp, Artificial Sequence
  Synthetic oligonucleotide
ttacaacgttctagggtgcgcgatccttag

SEQ ID NO: 34876 - DNA, 30 bp, Artificial Sequence
  Synthetic oligonucleotide
acgtcgtcgtgacggaaaacattacgttag

SEQ ID NO: 34877 - DNA, 31 bp, Artificial Sequence
  Synthetic oligonucleotide
tggtacgcggatagaatagttaagcatttag

SEQ ID NO: 34878 - DNA, 30 bp, Artificial Sequence
  Synthetic oligonucleotide
taacacagggcaaatgaaggctcgatttag

SEQ ID NO: 34879 - DNA, 30 bp, Artificial Sequence
  Synthetic oligonucleotide
ctaaggcgaacgataggattcatgttttag

SEQ ID NO: 34880 - DNA, 30 bp, Artificial Sequence
  Synthetic oligonucleotide
ataaaggaaaggcgaaaacgaccgaaaacg

SEQ ID NO: 34881 - DNA, 30 bp, Artificial Sequence
  Synthetic oligonucleotide
ctacctctgagcggaaaaaaatcgaaaacg

SEQ ID NO: 34882 - DNA, 30 bp, Artificial Sequence
  Synthetic oligonucleotide
tcaaaagtggagggcccatatcggaaaacg

SEQ ID NO: 34883 - DNA, 30 bp, Artificial Sequence
  Synthetic oligonucleotide
tagccttaggggcccaagggacagcaaacg

SEQ ID NO: 34884 - DNA, 30 bp, Artificial Sequence
  Synthetic oligonucleotide
cggtagacaactcaataacggagcgaaacg

SEQ ID NO: 34885 - DNA, 30 bp, Artificial Sequence
  Synthetic oligonucleotide
ctgtagacctaacactctacagaataaacg

SEQ ID NO: 34886 - DNA, 30 bp, Artificial Sequence
  Synthetic oligonucleotide
cggtaaagtgggggagatgggagataaacg

SEQ ID NO: 34887 - DNA, 30 bp, Artificial Sequence
  Synthetic oligonucleotide
actaaggtacagagtaggcgttgataaacg

SEQ ID NO: 34888 - DNA, 30 bp, Artificial Sequence
  Synthetic oligonucleotide
cgtcgtgcgagtaagacgggataaacaacg

SEQ ID NO: 34889 - DNA, 30 bp, Artificial Sequence
  Synthetic oligonucleotide
agttagaccaatgaacttgcgctaacaacg

SEQ ID NO: 34890 - DNA, 30 bp, Artificial Sequence
  Synthetic oligonucleotide
tgcgagctacataggtctaagcactcaacg

SEQ ID NO: 34891 - DNA, 30 bp, Artificial Sequence
  Synthetic oligonucleotide
atggactagaactgagccttgctgtcaacg

SEQ ID NO: 34892 - DNA, 30 bp, Artificial Sequence
  Synthetic oligonucleotide
cgtcgaaggattatagatactatacgaacg

SEQ ID NO: 34893 - DNA, 30 bp, Artificial Sequence
  Synthetic oligonucleotide
tggaaccgtaagctgcctgcgaatggaacg

SEQ ID NO: 34894 - DNA, 30 bp, Artificial Sequence
  Synthetic oligonucleotide
gcgtcaccagttgataggggcatctgaacg

SEQ ID NO: 34895 - DNA, 30 bp, Artificial Sequence
  Synthetic oligonucleotide
tgcactcaggccagcttaaagataataacg

SEQ ID NO: 34896 - DNA, 30 bp, Artificial Sequence
  Synthetic oligonucleotide
atgcgcaagcatgattgtacatctaacacg

SEQ ID NO: 34897 - DNA, 30 bp, Artificial Sequence
  Synthetic oligonucleotide
aaggtctgcaaaggtcctagaggacacacg

SEQ ID NO: 34898 - DNA, 30 bp, Artificial Sequence
  Synthetic oligonucleotide
gaagtacgcaattaagcaagaggctacacg

SEQ ID NO: 34899 - DNA, 30 bp, Artificial Sequence
  Synthetic oligonucleotide
agagaaatcaacatgataaacgcgtacacg

SEQ ID NO: 34900 - DNA, 30 bp, Artificial Sequence
  Synthetic oligonucleotide
ttgctcctatcaaagaatgttagcaccacg

SEQ ID NO: 34901 - DNA, 30 bp, Artificial Sequence
  Synthetic oligonucleotide
gtagatatagtagcggcaactgaggccacg

SEQ ID NO: 34902 - DNA, 30 bp, Artificial Sequence
  Synthetic oligonucleotide
ccatcgggcatgcatatgcttacttccacg

SEQ ID NO: 34903 - DNA, 30 bp, Artificial Sequence
  Synthetic oligonucleotide
tacatgctactaggccgatcagcgagcacg

SEQ ID NO: 34904 - DNA, 30 bp, Artificial Sequence
  Synthetic oligonucleotide
cataaatatggacacactaaaactggcacg

SEQ ID NO: 34905 - DNA, 30 bp, Artificial Sequence
  Synthetic oligonucleotide
acaacgagatttaaggcaaagaagatcacg

SEQ ID NO: 34906 - DNA, 30 bp, Artificial Sequence
  Synthetic oligonucleotide
ggtccttcaggaagccaatggcagatcacg

SEQ ID NO: 34907 - DNA, 30 bp, Artificial Sequence
  Synthetic oligonucleotide
gcaacgaaagcctgtaaaatctacctcacg

SEQ ID NO: 34908 - DNA, 30 bp, Artificial Sequence
  Synthetic oligonucleotide
tcacgtatacagggcaaactgcttttcacg

SEQ ID NO: 34909 - DNA, 30 bp, Artificial Sequence
  Synthetic oligonucleotide
ctctgcgatttcaattgaagataccagacg

SEQ ID NO: 34910 - DNA, 30 bp, Artificial Sequence
  Synthetic oligonucleotide
aggctacgaatattacgaggatcgtagacg

SEQ ID NO: 34911 - DNA, 30 bp, Artificial Sequence
  Synthetic oligonucleotide
tcactctccgagaggaagggaatgtagacg

SEQ ID NO: 34912 - DNA, 30 bp, Artificial Sequence
  Synthetic oligonucleotide
cgcgaagttaaacctaacaaatggacgacg

SEQ ID NO: 34913 - DNA, 30 bp, Artificial Sequence
  Synthetic oligonucleotide
ggtacaaaaagagaggtatgatgctcgacg

SEQ ID NO: 34914 - DNA, 29 bp, Artificial Sequence
  Synthetic oligonucleotide
tcgcaagcattaagtgaaacggcaggacg

SEQ ID NO: 34915 - DNA, 30 bp, Artificial Sequence
  Synthetic oligonucleotide
tctaatcgaaatcatggatacggcctgacg

SEQ ID NO: 34916 - DNA, 30 bp, Artificial Sequence
  Synthetic oligonucleotide
gcgaaccagcgcattcgtaacaaggtgacg

SEQ ID NO: 34917 - DNA, 30 bp, Artificial Sequence
  Synthetic oligonucleotide
cggcacggcagtcgacacctggcccatacg

SEQ ID NO: 34918 - DNA, 30 bp, Artificial Sequence
  Synthetic oligonucleotide
tggggccggggtcatcgaaattcgtatacg

SEQ ID NO: 34919 - DNA, 30 bp, Artificial Sequence
  Synthetic oligonucleotide
tctgggctaagtaccaggcgggcaactacg

SEQ ID NO: 34920 - DNA, 30 bp, Artificial Sequence
  Synthetic oligonucleotide
agtcgaaggtgtctgccatactcgagtacg

SEQ ID NO: 34921 - DNA, 30 bp, Artificial Sequence
  Synthetic oligonucleotide
tgagggatgctatctaatcgtcaatgtacg

SEQ ID NO: 34922 - DNA, 30 bp, Artificial Sequence
  Synthetic oligonucleotide
gggcggagggacgaccgaggactgtgtacg

SEQ ID NO: 34923 - DNA, 30 bp, Artificial Sequence
  Synthetic oligonucleotide
gcaaacatggagggcctgaaagtcgttacg

SEQ ID NO: 34924 - DNA, 30 bp, Artificial Sequence
  Synthetic oligonucleotide
cacatatggataacaggggaatatgaaccg

SEQ ID NO: 34925 - DNA, 30 bp, Artificial Sequence
  Synthetic oligonucleotide
caggtcagcccaaactcatagcctgcaccg

SEQ ID NO: 34926 - DNA, 30 bp, Artificial Sequence
  Synthetic oligonucleotide
tccgaagtgactaggcggaagatttcaccg

SEQ ID NO: 34927 - DNA, 30 bp, Artificial Sequence
  Synthetic oligonucleotide
aggcgggcagtgttatacgtcttcagaccg

SEQ ID NO: 34928 - DNA, 30 bp, Artificial Sequence
  Synthetic oligonucleotide
accatgagtgaggtaggtaactaaggaccg

SEQ ID NO: 34929 - DNA, 30 bp, Artificial Sequence
  Synthetic oligonucleotide
gaagctaggataaaacttaacaggctaccg

SEQ ID NO: 34930 - DNA, 30 bp, Artificial Sequence
  Synthetic oligonucleotide
caaaagtgacgacgaatcagggacgtaccg

SEQ ID NO: 34931 - DNA, 30 bp, Artificial Sequence
  Synthetic oligonucleotide
cactgtaataaaaaatgggctcaccacccg

SEQ ID NO: 34932 - DNA, 30 bp, Artificial Sequence
  Synthetic oligonucleotide
tcgtttatagagctcagggatggctgcccg

SEQ ID NO: 34933 - DNA, 30 bp, Artificial Sequence
  Synthetic oligonucleotide
aaggctacgggctgaatagtatcgatcccg

SEQ ID NO: 34934 - DNA, 30 bp, Artificial Sequence
  Synthetic oligonucleotide
tgtaattcacaaccaaggatagcactcccg

SEQ ID NO: 34935 - DNA, 30 bp, Artificial Sequence
  Synthetic oligonucleotide
taaaggtccggagagaccaggcaggtcccg

SEQ ID NO: 34936 - DNA, 30 bp, Artificial Sequence
  Synthetic oligonucleotide
ggtacgctggaaaacaatggtctggtcccg

SEQ ID NO: 34937 - DNA, 30 bp, Artificial Sequence
  Synthetic oligonucleotide
cagatatacaagcgcaaataaccgttcccg

SEQ ID NO: 34938 - DNA, 30 bp, Artificial Sequence
  Synthetic oligonucleotide
agccgggaaacgtatcccaataataagccg

SEQ ID NO: 34939 - DNA, 30 bp, Artificial Sequence
  Synthetic oligonucleotide
ctctatccacaaccataagaacctcagccg

SEQ ID NO: 34940 - DNA, 30 bp, Artificial Sequence
  Synthetic oligonucleotide
gaggtcggatgaactcacgtaccagagccg

SEQ ID NO: 34941 - DNA, 30 bp, Artificial Sequence
  Synthetic oligonucleotide
cgattgagggactgcggattcctgtagccg

SEQ ID NO: 34942 - DNA, 30 bp, Artificial Sequence
  Synthetic oligonucleotide
aggtaatagacaagtacgaaaacttagccg

SEQ ID NO: 34943 - DNA, 30 bp, Artificial Sequence
  Synthetic oligonucleotide
cgtggtccccagataaagactgatacgccg

SEQ ID NO: 34944 - DNA, 30 bp, Artificial Sequence
  Synthetic oligonucleotide
gttctgagtagtaagaacaaagggaggccg

SEQ ID NO: 34945 - DNA, 30 bp, Artificial Sequence
  Synthetic oligonucleotide
cgactctcaaaacatgtgacttgccggccg

SEQ ID NO: 34946 - DNA, 30 bp, Artificial Sequence
  Synthetic oligonucleotide
agatctatcgtaattagcagtcaagggccg

SEQ ID NO: 34947 - DNA, 30 bp, Artificial Sequence
  Synthetic oligonucleotide
tgagaacggaaaccattgatatgttggccg

SEQ ID NO: 34948 - DNA, 30 bp, Artificial Sequence
  Synthetic oligonucleotide
agcatcggtaagcattccgtagtactgccg

SEQ ID NO: 34949 - DNA, 30 bp, Artificial Sequence
  Synthetic oligonucleotide
caggaagaccagctaatcctcttagtgccg

SEQ ID NO: 34950 - DNA, 30 bp, Artificial Sequence
  Synthetic oligonucleotide
aggggcctgagaaccagagagaagaatccg

SEQ ID NO: 34951 - DNA, 30 bp, Artificial Sequence
  Synthetic oligonucleotide
ccttagagcaagagttgtgaggctaatccg

SEQ ID NO: 34952 - DNA, 30 bp, Artificial Sequence
  Synthetic oligonucleotide
aatgacagcgtcactcacatctcagctccg

SEQ ID NO: 34953 - DNA, 30 bp, Artificial Sequence
  Synthetic oligonucleotide
aacgtcttataaacttcgtcaagcagtccg

SEQ ID NO: 34954 - DNA, 30 bp, Artificial Sequence
  Synthetic oligonucleotide
ccagagacgccagtagaaaaccgcgaagcg

SEQ ID NO: 34955 - DNA, 30 bp, Artificial Sequence
  Synthetic oligonucleotide
ccgccacaaacgaagggacgactctaagcg

SEQ ID NO: 34956 - DNA, 30 bp, Artificial Sequence
  Synthetic oligonucleotide
ggcaagcgacggactataggtaggacagcg

SEQ ID NO: 34957 - DNA, 30 bp, Artificial Sequence
  Synthetic oligonucleotide
gtccatacgggattaaacctacatacagcg

SEQ ID NO: 34958 - DNA, 30 bp, Artificial Sequence
  Synthetic oligonucleotide
gataataacactctcagagtcgaaccagcg

SEQ ID NO: 34959 - DNA, 30 bp, Artificial Sequence
  Synthetic oligonucleotide
cgtcccgaaatgggggatgcttgcccagcg

SEQ ID NO: 34960 - DNA, 30 bp, Artificial Sequence
  Synthetic oligonucleotide
caacatccaatacaatccttaacaagagcg

SEQ ID NO: 34961 - DNA, 30 bp, Artificial Sequence
  Synthetic oligonucleotide
gacgacaaggtgtacaattctattagagcg

SEQ ID NO: 34962 - DNA, 30 bp, Artificial Sequence
  Synthetic oligonucleotide
aacacactgaacaggtctcactaccgagcg

SEQ ID NO: 34963 - DNA, 30 bp, Artificial Sequence
  Synthetic oligonucleotide
cgaaatcgtgtgtccgtttgagcgatagcg

SEQ ID NO: 34964 - DNA, 30 bp, Artificial Sequence
  Synthetic oligonucleotide
aacataacatagattactaaggaactagcg

SEQ ID NO: 34965 - DNA, 30 bp, Artificial Sequence
  Synthetic oligonucleotide
gcgagtaatcaatgaacagatacactagcg

SEQ ID NO: 34966 - DNA, 30 bp, Artificial Sequence
  Synthetic oligonucleotide
tgaaataagtagcagggtaaagctttagcg

SEQ ID NO: 34967 - DNA, 30 bp, Artificial Sequence
  Synthetic oligonucleotide
aggatcatagaactcacgagagtaaacgcg

SEQ ID NO: 34968 - DNA, 30 bp, Artificial Sequence
  Synthetic oligonucleotide
cacgtagagctcggcgcccattatcccgcg

SEQ ID NO: 34969 - DNA, 30 bp, Artificial Sequence
  Synthetic oligonucleotide
caaacgatgggaaggcgagggtaagccgcg

SEQ ID NO: 34970 - DNA, 30 bp, Artificial Sequence
  Synthetic oligonucleotide
ttggagacaagtgagtaagcgaagtccgcg

SEQ ID NO: 34971 - DNA, 30 bp, Artificial Sequence
  Synthetic oligonucleotide
gcatcatcaacaccttcttgcgcgagcgcg

SEQ ID NO: 34972 - DNA, 30 bp, Artificial Sequence
  Synthetic oligonucleotide
acgggaaaatagaataactattcgagcgcg

SEQ ID NO: 34973 - DNA, 30 bp, Artificial Sequence
  Synthetic oligonucleotide
aggagcaactgataatgggtgctgcgcgcg

SEQ ID NO: 34974 - DNA, 30 bp, Artificial Sequence
  Synthetic oligonucleotide
catgcaaactaaataagtacaacggtcgcg

SEQ ID NO: 34975 - DNA, 30 bp, Artificial Sequence
  Synthetic oligonucleotide
atgtcgcgtaatcatcagataacaaaggcg

SEQ ID NO: 34976 - DNA, 30 bp, Artificial Sequence
  Synthetic oligonucleotide
cgcacaatagttctgtaagggcaagaggcg

SEQ ID NO: 34977 - DNA, 30 bp, Artificial Sequence
  Synthetic oligonucleotide
gtagcgtacgtgacggccttaaacgaggcg

SEQ ID NO: 34978 - DNA, 30 bp, Artificial Sequence
  Synthetic oligonucleotide
tagactcggtaaaaacaaggagggtaggcg

SEQ ID NO: 34979 - DNA, 30 bp, Artificial Sequence
  Synthetic oligonucleotide
acaggtaacagggccggcacacgatcggcg

SEQ ID NO: 34980 - DNA, 30 bp, Artificial Sequence
  Synthetic oligonucleotide
tcggggagttgggccaagtagagctcggcg

SEQ ID NO: 34981 - DNA, 30 bp, Artificial Sequence
  Synthetic oligonucleotide
ttgaacggatgaagaaccaaacgctcggcg

SEQ ID NO: 34982 - DNA, 30 bp, Artificial Sequence
  Synthetic oligonucleotide
cttgacaaggcgagtcgtcaaggaagggcg

SEQ ID NO: 34983 - DNA, 30 bp, Artificial Sequence
  Synthetic oligonucleotide
cgtctacgagctcactgaccatggagggcg

SEQ ID NO: 34984 - DNA, 30 bp, Artificial Sequence
  Synthetic oligonucleotide
tagtgtccgatggaagatatcgaatgggcg

SEQ ID NO: 34985 - DNA, 30 bp, Artificial Sequence
  Synthetic oligonucleotide
agtgagacataccagaatgtgtcatgggcg

SEQ ID NO: 34986 - DNA, 30 bp, Artificial Sequence
  Synthetic oligonucleotide
agcaatcatgtgcggaatataggctgggcg

SEQ ID NO: 34987 - DNA, 30 bp, Artificial Sequence
  Synthetic oligonucleotide
cacctaatcaagaaggaaccgtagatggcg

SEQ ID NO: 34988 - DNA, 30 bp, Artificial Sequence
  Synthetic oligonucleotide
tgggttgggcacgaaccgccgcacctggcg

SEQ ID NO: 34989 - DNA, 30 bp, Artificial Sequence
  Synthetic oligonucleotide
cacgacggaattccattaagtgtgttggcg

SEQ ID NO: 34990 - DNA, 30 bp, Artificial Sequence
  Synthetic oligonucleotide
acgaagcaggcgtggaataagcgcaatgcg

SEQ ID NO: 34991 - DNA, 30 bp, Artificial Sequence
  Synthetic oligonucleotide
cggaacggtaagatcggtcgccgggatgcg

SEQ ID NO: 34992 - DNA, 30 bp, Artificial Sequence
  Synthetic oligonucleotide
ccagagtcgcaagtccagaattctgctgcg

SEQ ID NO: 34993 - DNA, 30 bp, Artificial Sequence
  Synthetic oligonucleotide
gtcaacatagtcacataaccatgccgtgcg

SEQ ID NO: 34994 - DNA, 30 bp, Artificial Sequence
  Synthetic oligonucleotide
agagtgaagggcatccaatctacaattgcg

SEQ ID NO: 34995 - DNA, 31 bp, Artificial Sequence
  Synthetic oligonucleotide
cggcaacggatattgcggggatatgaaatcg

SEQ ID NO: 34996 - DNA, 30 bp, Artificial Sequence
  Synthetic oligonucleotide
ggacgttaccataaccccgaattgcaatcg

SEQ ID NO: 34997 - DNA, 30 bp, Artificial Sequence
  Synthetic oligonucleotide
cgacttaccggagtactaaggagtcaatcg

SEQ ID NO: 34998 - DNA, 30 bp, Artificial Sequence
  Synthetic oligonucleotide
acaatcctcgtccggtccgaaggggaatcg

SEQ ID NO: 34999 - DNA, 30 bp, Artificial Sequence
  Synthetic oligonucleotide
cggcgagtaatcttattgaccgtatcatcg

SEQ ID NO: 35000 - DNA, 30 bp, Artificial Sequence
  Synthetic oligonucleotide
tctagaatcagttgtcgaaaaccttcatcg

SEQ ID NO: 35001 - DNA, 30 bp, Artificial Sequence
  Synthetic oligonucleotide
gggtaaaggcctcgccaccctcctagatcg

SEQ ID NO: 35002 - DNA, 30 bp, Artificial Sequence
  Synthetic oligonucleotide
cgatcgataggcatagattagcggtgatcg

SEQ ID NO: 35003 - DNA, 30 bp, Artificial Sequence
  Synthetic oligonucleotide
cgtggcaaaatctccgaggctggtctatcg

SEQ ID NO: 35004 - DNA, 30 bp, Artificial Sequence
  Synthetic oligonucleotide
ccgtagaaacgaaattatgttatgaactcg

SEQ ID NO: 35005 - DNA, 30 bp, Artificial Sequence
  Synthetic oligonucleotide
acgttcccttagcaagcggaaatacactcg

SEQ ID NO: 35006 - DNA, 30 bp, Artificial Sequence
  Synthetic oligonucleotide
tgtcaatgacaaagagacgtcctggactcg

SEQ ID NO: 35007 - DNA, 30 bp, Artificial Sequence
  Synthetic oligonucleotide
ctgttaagtggcgttacgggcgactactcg

SEQ ID NO: 35008 - DNA, 30 bp, Artificial Sequence
  Synthetic oligonucleotide
ggagtgagggatgttggagttcacgcctcg

SEQ ID NO: 35009 - DNA, 30 bp, Artificial Sequence
  Synthetic oligonucleotide
tagtcgagggtcagcccgctaagaagctcg

SEQ ID NO: 35010 - DNA, 30 bp, Artificial Sequence
  Synthetic oligonucleotide
catgggcgggatcagatcaaattccgctcg

SEQ ID NO: 35011 - DNA, 30 bp, Artificial Sequence
  Synthetic oligonucleotide
aggggacccctccactacaaattatgctcg

SEQ ID NO: 35012 - DNA, 30 bp, Artificial Sequence
  Synthetic oligonucleotide
acattcgactacggcactgcctacatctcg

SEQ ID NO: 35013 - DNA, 30 bp, Artificial Sequence
  Synthetic oligonucleotide
atacgaacggtccgtcaccgaatcctctcg

SEQ ID NO: 35014 - DNA, 30 bp, Artificial Sequence
  Synthetic oligonucleotide
tcgtattgggggtgggcatcccacgtctcg

SEQ ID NO: 35015 - DNA, 30 bp, Artificial Sequence
  Synthetic oligonucleotide
acactgtgcggaacagatactcacttctcg

SEQ ID NO: 35016 - DNA, 30 bp, Artificial Sequence
  Synthetic oligonucleotide
agtgatagtctactatctcgccgtaagtcg

SEQ ID NO: 35017 - DNA, 30 bp, Artificial Sequence
  Synthetic oligonucleotide
agtagatggcgtggtactaatggtaagtcg

SEQ ID NO: 35018 - DNA, 30 bp, Artificial Sequence
  Synthetic oligonucleotide
cggtaataacatcatcagcctcttaagtcg

SEQ ID NO: 35019 - DNA, 30 bp, Artificial Sequence
  Synthetic oligonucleotide
tacgctagcgggtcaccattctcagagtcg

SEQ ID NO: 35020 - DNA, 30 bp, Artificial Sequence
  Synthetic oligonucleotide
tttgctggacagctgaaccagtgcgagtcg

SEQ ID NO: 35021 - DNA, 30 bp, Artificial Sequence
  Synthetic oligonucleotide
tcgagggatgcttctccaaattgcccgtcg

SEQ ID NO: 35022 - DNA, 30 bp, Artificial Sequence
  Synthetic oligonucleotide
tcaggtggtatttgtgcttagcgtccgtcg

SEQ ID NO: 35023 - DNA, 30 bp, Artificial Sequence
  Synthetic oligonucleotide
ggtcatacgggcacactagtaacatggtcg

SEQ ID NO: 35024 - DNA, 30 bp, Artificial Sequence
  Synthetic oligonucleotide
accagagaactatgactcgatggatggtcg

SEQ ID NO: 35025 - DNA, 30 bp, Artificial Sequence
  Synthetic oligonucleotide
gggataacagcctcccaaaaacccatgtcg

SEQ ID NO: 35026 - DNA, 30 bp, Artificial Sequence
  Synthetic oligonucleotide
agctctgcgtccttgcgaacatcggtgtcg

SEQ ID NO: 35027 - DNA, 30 bp, Artificial Sequence
  Synthetic oligonucleotide
ccgaagtaagatattaagaggagtgtgtcg

SEQ ID NO: 35028 - DNA, 30 bp, Artificial Sequence
  Synthetic oligonucleotide
cggtgtaatagaaagttacccatagattcg

SEQ ID NO: 35029 - DNA, 30 bp, Artificial Sequence
  Synthetic oligonucleotide
aagggcgacacaacaggctgaaggggttcg

SEQ ID NO: 35030 - DNA, 30 bp, Artificial Sequence
  Synthetic oligonucleotide
ctaatcaaacagtgaagcaaccgcatttcg

SEQ ID NO: 35031 - DNA, 30 bp, Artificial Sequence
  Synthetic oligonucleotide
ccagccgtacgtggagacagaatcatttcg

SEQ ID NO: 35032 - DNA, 30 bp, Artificial Sequence
  Synthetic oligonucleotide
tgtgaggaacgggtatgcgaacagatttcg

SEQ ID NO: 35033 - DNA, 30 bp, Artificial Sequence
  Synthetic oligonucleotide
atcactggatcggggcgataacaacaaagg

SEQ ID NO: 35034 - DNA, 31 bp, Artificial Sequence
  Synthetic oligonucleotide
agtatggcagtttcgaatgtgagatcaaagg

SEQ ID NO: 35035 - DNA, 30 bp, Artificial Sequence
  Synthetic oligonucleotide
attgcgtaaccgtaagatgatacagaaagg

SEQ ID NO: 35036 - DNA, 30 bp, Artificial Sequence
  Synthetic oligonucleotide
tctaaaatccaaggcaggtagagcgaaagg

SEQ ID NO: 35037 - DNA, 30 bp, Artificial Sequence
  Synthetic oligonucleotide
gaacggggcccataaaagaaaacaacaagg

SEQ ID NO: 35038 - DNA, 30 bp, Artificial Sequence
  Synthetic oligonucleotide
ttgggctttatagacaaaagacatacaagg

SEQ ID NO: 35039 - DNA, 30 bp, Artificial Sequence
  Synthetic oligonucleotide
tcacataggtgccaaagtactttaccaagg

SEQ ID NO: 35040 - DNA, 30 bp, Artificial Sequence
  Synthetic oligonucleotide
tctaaattcgctagggagaagcgtccaagg

SEQ ID NO: 35041 - DNA, 30 bp, Artificial Sequence
  Synthetic oligonucleotide
cagagcgggaagttgaaagcgggagcaagg

SEQ ID NO: 35042 - DNA, 30 bp, Artificial Sequence
  Synthetic oligonucleotide
cgagaaatgggagaccggctgcgatcaagg

SEQ ID NO: 35043 - DNA, 30 bp, Artificial Sequence
  Synthetic oligonucleotide
agatcggcggccaatagcagcgtaagaagg

SEQ ID NO: 35044 - DNA, 30 bp, Artificial Sequence
  Synthetic oligonucleotide
cttggaaaaataagtatacacgcgagaagg

SEQ ID NO: 35045 - DNA, 30 bp, Artificial Sequence
  Synthetic oligonucleotide
aatcaaacggatgacagtggtgcgagaagg

SEQ ID NO: 35046 - DNA, 30 bp, Artificial Sequence
  Synthetic oligonucleotide
gtgaacgtaataagcagacagatgagaagg

SEQ ID NO: 35047 - DNA, 30 bp, Artificial Sequence
  Synthetic oligonucleotide
tgtacagatcggggaccgaccagacgaagg

SEQ ID NO: 35048 - DNA, 30 bp, Artificial Sequence
  Synthetic oligonucleotide
tcaggaatcgccggttaccagtggcgaagg

SEQ ID NO: 35049 - DNA, 30 bp, Artificial Sequence
  Synthetic oligonucleotide
tccatgcaaccacaatccagcgaaataagg

SEQ ID NO: 35050 - DNA, 30 bp, Artificial Sequence
  Synthetic oligonucleotide
aatcgtggctacgttattcgttcgataagg

SEQ ID NO: 35051 - DNA, 30 bp, Artificial Sequence
  Synthetic oligonucleotide
aggtgcgacataacagcattaacagtaagg

SEQ ID NO: 35052 - DNA, 30 bp, Artificial Sequence
  Synthetic oligonucleotide
agcgtaataaaacggcatagccctgtaagg

SEQ ID NO: 35053 - DNA, 30 bp, Artificial Sequence
  Synthetic oligonucleotide
acggtcttaacacaaacagactgtttaagg

SEQ ID NO: 35054 - DNA, 30 bp, Artificial Sequence
  Synthetic oligonucleotide
cgtgtccaaagcggcaatagggaaaacagg

SEQ ID NO: 35055 - DNA, 30 bp, Artificial Sequence
  Synthetic oligonucleotide
actaacagcatatctcaatctgcaaacagg

SEQ ID NO: 35056 - DNA, 30 bp, Artificial Sequence
  Synthetic oligonucleotide
gcgagggaacagatattctttgcccacagg

SEQ ID NO: 35057 - DNA, 30 bp, Artificial Sequence
  Synthetic oligonucleotide
tgagacgttcttaagcgtggaagccacagg

SEQ ID NO: 35058 - DNA, 30 bp, Artificial Sequence
  Synthetic oligonucleotide
cattgagccaggatgaattaaacagacagg

SEQ ID NO: 35059 - DNA, 30 bp, Artificial Sequence
  Synthetic oligonucleotide
acggcgggggaactcctcaggtcagacagg

SEQ ID NO: 35060 - DNA, 30 bp, Artificial Sequence
  Synthetic oligonucleotide
agattccaagtcagtcaggcgggcgacagg

SEQ ID NO: 35061 - DNA, 30 bp, Artificial Sequence
  Synthetic oligonucleotide
gtaccgaagtacgatctaaatggggacagg

SEQ ID NO: 35062 - DNA, 30 bp, Artificial Sequence
  Synthetic oligonucleotide
tgctacgtaaacgtagtgttttcgaccagg

SEQ ID NO: 35063 - DNA, 30 bp, Artificial Sequence
  Synthetic oligonucleotide
caccatcaagacaggatcaaattccccagg

SEQ ID NO: 35064 - DNA, 30 bp, Artificial Sequence
  Synthetic oligonucleotide
agtaggatcaattctaagttcaaggccagg

SEQ ID NO: 35065 - DNA, 30 bp, Artificial Sequence
  Synthetic oligonucleotide
acggaatgttggctcggatctattgccagg

SEQ ID NO: 35066 - DNA, 30 bp, Artificial Sequence
  Synthetic oligonucleotide
acgcaatattacagggtaagaggatccagg

SEQ ID NO: 35067 - DNA, 30 bp, Artificial Sequence
  Synthetic oligonucleotide
gtagaatcggtactgccgtactgatccagg

SEQ ID NO: 35068 - DNA, 30 bp, Artificial Sequence
  Synthetic oligonucleotide
gggaccgttaatccgttcagagagtccagg

SEQ ID NO: 35069 - DNA, 30 bp, Artificial Sequence
  Synthetic oligonucleotide
tagtgaaactcgtaggaaggggcttccagg

SEQ ID NO: 35070 - DNA, 30 bp, Artificial Sequence
  Synthetic oligonucleotide
agcactacaaagtaagttcgcgctagcagg

SEQ ID NO: 35071 - DNA, 30 bp, Artificial Sequence
  Synthetic oligonucleotide
ggccagggagatcaaaaccaggtgcgcagg

SEQ ID NO: 35072 - DNA, 30 bp, Artificial Sequence
  Synthetic oligonucleotide
aaggtccagtgcccaagagaagatcgcagg

SEQ ID NO: 35073 - DNA, 30 bp, Artificial Sequence
  Synthetic oligonucleotide
acgccaattgattgatgtcataagctcagg

SEQ ID NO: 35074 - DNA, 30 bp, Artificial Sequence
  Synthetic oligonucleotide
caatgaatactaccaaggggataagtcagg

SEQ ID NO: 35075 - DNA, 30 bp, Artificial Sequence
  Synthetic oligonucleotide
ggcgagactaaagcccgccgaatcgtcagg

SEQ ID NO: 35076 - DNA, 30 bp, Artificial Sequence
  Synthetic oligonucleotide
tcagatcagtccggtcgagaaactttcagg

SEQ ID NO: 35077 - DNA, 30 bp, Artificial Sequence
  Synthetic oligonucleotide
tacggtaatgtccgaagttataccaagagg

SEQ ID NO: 35078 - DNA, 30 bp, Artificial Sequence
  Synthetic oligonucleotide
ccacgagacgtccggtccttcggtaagagg

SEQ ID NO: 35079 - DNA, 30 bp, Artificial Sequence
  Synthetic oligonucleotide
gtgtggaatcagacaactcgcctacagagg

SEQ ID NO: 35080 - DNA, 30 bp, Artificial Sequence
  Synthetic oligonucleotide
gtgcggaagttatctgaatgcaaccagagg

SEQ ID NO: 35081 - DNA, 30 bp, Artificial Sequence
  Synthetic oligonucleotide
ggtgaactagggaccataaacccctagagg

SEQ ID NO: 35082 - DNA, 30 bp, Artificial Sequence
  Synthetic oligonucleotide
gagcacggacttaatttctccgagtagagg

SEQ ID NO: 35083 - DNA, 30 bp, Artificial Sequence
  Synthetic oligonucleotide
agaacgactggctcataaagagagccgagg

SEQ ID NO: 35084 - DNA, 30 bp, Artificial Sequence
  Synthetic oligonucleotide
gcattatcgactacaaataaaatccggagg

SEQ ID NO: 35085 - DNA, 30 bp, Artificial Sequence
  Synthetic oligonucleotide
ggaatccggataaaacgagaaggaatgagg

SEQ ID NO: 35086 - DNA, 30 bp, Artificial Sequence
  Synthetic oligonucleotide
tggcaagaattaagagttatacgcctgagg

SEQ ID NO: 35087 - DNA, 30 bp, Artificial Sequence
  Synthetic oligonucleotide
tgcgcaaaactatcacttgatcacttgagg

SEQ ID NO: 35088 - DNA, 30 bp, Artificial Sequence
  Synthetic oligonucleotide
agagaaggcaagaccacaacccctaatagg

SEQ ID NO: 35089 - DNA, 30 bp, Artificial Sequence
  Synthetic oligonucleotide
gtgtgcgtggaatgagtaacactaactagg

SEQ ID NO: 35090 - DNA, 30 bp, Artificial Sequence
  Synthetic oligonucleotide
atgagagcaaggttgaagggtctcactagg

SEQ ID NO: 35091 - DNA, 30 bp, Artificial Sequence
  Synthetic oligonucleotide
acgcccatcgctatgatgacttagactagg

SEQ ID NO: 35092 - DNA, 30 bp, Artificial Sequence
  Synthetic oligonucleotide
acgaaccatcgtgaacggaacgtacctagg

SEQ ID NO: 35093 - DNA, 30 bp, Artificial Sequence
  Synthetic oligonucleotide
cgacggctaaatcctgcaagtaatcctagg

SEQ ID NO: 35094 - DNA, 30 bp, Artificial Sequence
  Synthetic oligonucleotide
ccgttgattaggtgccagggaagcgctagg

SEQ ID NO: 35095 - DNA, 30 bp, Artificial Sequence
  Synthetic oligonucleotide
cgatatgaggcaaagtcgcgtatcgctagg

SEQ ID NO: 35096 - DNA, 30 bp, Artificial Sequence
  Synthetic oligonucleotide
acggagaactccatgtgcgtcgtaagtagg

SEQ ID NO: 35097 - DNA, 30 bp, Artificial Sequence
  Synthetic oligonucleotide
tgcgcgagagaaatggcaatgcattgtagg

SEQ ID NO: 35098 - DNA, 30 bp, Artificial Sequence
  Synthetic oligonucleotide
ggaggcttaacgtaaatcagttgacttagg

SEQ ID NO: 35099 - DNA, 30 bp, Artificial Sequence
  Synthetic oligonucleotide
acaccatgaagagagagctacagtgttagg

SEQ ID NO: 35100 - DNA, 30 bp, Artificial Sequence
  Synthetic oligonucleotide
atcgcagaatgtcacgaaatgggttaacgg

SEQ ID NO: 35101 - DNA, 30 bp, Artificial Sequence
  Synthetic oligonucleotide
aggtggccaacggtctcgcacaatacacgg

SEQ ID NO: 35102 - DNA, 30 bp, Artificial Sequence
  Synthetic oligonucleotide
taagactggtcagtctggaggcgaagacgg

SEQ ID NO: 35103 - DNA, 30 bp, Artificial Sequence
  Synthetic oligonucleotide
gaagtggaccaaacattagagctaatacgg

SEQ ID NO: 35104 - DNA, 30 bp, Artificial Sequence
  Synthetic oligonucleotide
acggtaggatacgtgcttcgtctgatacgg

SEQ ID NO: 35105 - DNA, 30 bp, Artificial Sequence
  Synthetic oligonucleotide
ctaaggcaaaagagataccattttatacgg

SEQ ID NO: 35106 - DNA, 30 bp, Artificial Sequence
  Synthetic oligonucleotide
taccagcattcaaaggctagcacgctacgg

SEQ ID NO: 35107 - DNA, 30 bp, Artificial Sequence
  Synthetic oligonucleotide
atgaatagggaagcagaatagggtaaccgg

SEQ ID NO: 35108 - DNA, 30 bp, Artificial Sequence
  Synthetic oligonucleotide
cttcgcaacacgaaataatggaacgaccgg

SEQ ID NO: 35109 - DNA, 30 bp, Artificial Sequence
  Synthetic oligonucleotide
aacttccccaggatccacgagaaaagccgg

SEQ ID NO: 35110 - DNA, 30 bp, Artificial Sequence
  Synthetic oligonucleotide
gcggtaaccagtatcgcacggattagccgg

SEQ ID NO: 35111 - DNA, 30 bp, Artificial Sequence
  Synthetic oligonucleotide
cgacgatgggtgtctgtccgtttatgccgg

SEQ ID NO: 35112 - DNA, 30 bp, Artificial Sequence
  Synthetic oligonucleotide
ataagatttctaacggaaggacagctccgg

SEQ ID NO: 35113 - DNA, 30 bp, Artificial Sequence
  Synthetic oligonucleotide
gcggtgcgaatatggagataagacgtccgg

SEQ ID NO: 35114 - DNA, 30 bp, Artificial Sequence
  Synthetic oligonucleotide
tacagaaaacttaaagaaaccgactagcgg

SEQ ID NO: 35115 - DNA, 30 bp, Artificial Sequence
  Synthetic oligonucleotide
agggcataacaccaggaggcaacggcgcgg

SEQ ID NO: 35116 - DNA, 30 bp, Artificial Sequence
  Synthetic oligonucleotide
acgacgttgaaagtttgaaacagtgcgcgg

SEQ ID NO: 35117 - DNA, 30 bp, Artificial Sequence
  Synthetic oligonucleotide
cttgataaccgtcagatgtgcgagaggcgg

SEQ ID NO: 35118 - DNA, 30 bp, Artificial Sequence
  Synthetic oligonucleotide
ggtgagttgcaaaggggatcgtataggcgg

SEQ ID NO: 35119 - DNA, 30 bp, Artificial Sequence
  Synthetic oligonucleotide
gtagagagtagtcggcagttagatgggcgg

SEQ ID NO: 35120 - DNA, 30 bp, Artificial Sequence
  Synthetic oligonucleotide
cggtccaacgttataaatgcgagcatgcgg

SEQ ID NO: 35121 - DNA, 30 bp, Artificial Sequence
  Synthetic oligonucleotide
gcgcgtgaaagaacaaggtccaaggtgcgg

SEQ ID NO: 35122 - DNA, 30 bp, Artificial Sequence
  Synthetic oligonucleotide
gtaacggtcacatcgagggcactgaatcgg

SEQ ID NO: 35123 - DNA, 30 bp, Artificial Sequence
  Synthetic oligonucleotide
tacaatggataggggaaagcgttacatcgg

SEQ ID NO: 35124 - DNA, 30 bp, Artificial Sequence
  Synthetic oligonucleotide
acatagtgactgagtcggggacggcatcgg

SEQ ID NO: 35125 - DNA, 30 bp, Artificial Sequence
  Synthetic oligonucleotide
agtacaattagacattggagcgtgcatcgg

SEQ ID NO: 35126 - DNA, 30 bp, Artificial Sequence
  Synthetic oligonucleotide
gctagtagacttaggatcaaacgagatcgg

SEQ ID NO: 35127 - DNA, 30 bp, Artificial Sequence
  Synthetic oligonucleotide
gcttagaactactgccaaattaatactcgg

SEQ ID NO: 35128 - DNA, 30 bp, Artificial Sequence
  Synthetic oligonucleotide
taactaaggcatcatagtaccgcccgtcgg

SEQ ID NO: 35129 - DNA, 30 bp, Artificial Sequence
  Synthetic oligonucleotide
cgagcattccggggaacgagcggaggtcgg

SEQ ID NO: 35130 - DNA, 30 bp, Artificial Sequence
  Synthetic oligonucleotide
cctggatagttaggcaagtgagagattcgg

SEQ ID NO: 35131 - DNA, 30 bp, Artificial Sequence
  Synthetic oligonucleotide
ccggcttgtattaggtcagcaaagcaaggg

SEQ ID NO: 35132 - DNA, 30 bp, Artificial Sequence
  Synthetic oligonucleotide
cacattcaacgtcaattaggtggcgaaggg

SEQ ID NO: 35133 - DNA, 30 bp, Artificial Sequence
  Synthetic oligonucleotide
ccgtcagtaacgtcacgatagcgtgaaggg

SEQ ID NO: 35134 - DNA, 30 bp, Artificial Sequence
  Synthetic oligonucleotide
ccccaaaggaggacttaaacctggtaaggg

SEQ ID NO: 35135 - DNA, 30 bp, Artificial Sequence
  Synthetic oligonucleotide
cagaatgttgccaataattaaatgacaggg

SEQ ID NO: 35136 - DNA, 30 bp, Artificial Sequence
  Synthetic oligonucleotide
tagaatgaccagatacaggtcatgccaggg

SEQ ID NO: 35137 - DNA, 30 bp, Artificial Sequence
  Synthetic oligonucleotide
atggcgttcaaaaggtaaattcgggcaggg

SEQ ID NO: 35138 - DNA, 30 bp, Artificial Sequence
  Synthetic oligonucleotide
gaagcaccagacataatagcaaatgcaggg

SEQ ID NO: 35139 - DNA, 30 bp, Artificial Sequence
  Synthetic oligonucleotide
ccgatcgaaatccggactgccgcccgaggg

SEQ ID NO: 35140 - DNA, 30 bp, Artificial Sequence
  Synthetic oligonucleotide
tgaatccgatattgttagatacggcgaggg

SEQ ID NO: 35141 - DNA, 30 bp, Artificial Sequence
  Synthetic oligonucleotide
atccatgggaacggttcaactatgcgaggg

SEQ ID NO: 35142 - DNA, 30 bp, Artificial Sequence
  Synthetic oligonucleotide
ggaacacgggcaatagacgtgccaataggg

SEQ ID NO: 35143 - DNA, 30 bp, Artificial Sequence
  Synthetic oligonucleotide
tcgtcaacggtcgtcttcagtagaaacggg

SEQ ID NO: 35144 - DNA, 30 bp, Artificial Sequence
  Synthetic oligonucleotide
cgccccgagggagtggcacatatcaacggg

SEQ ID NO: 35145 - DNA, 30 bp, Artificial Sequence
  Synthetic oligonucleotide
aaggacctcggtagtaaggagatagacggg

SEQ ID NO: 35146 - DNA, 30 bp, Artificial Sequence
  Synthetic oligonucleotide
gctgtggtgagaccactctataataccggg

SEQ ID NO: 35147 - DNA, 30 bp, Artificial Sequence
  Synthetic oligonucleotide
cgagaataagctgtgatccggatagccggg

SEQ ID NO: 35148 - DNA, 30 bp, Artificial Sequence
  Synthetic oligonucleotide
atgcttcaccaaccaagcaacattgccggg

SEQ ID NO: 35149 - DNA, 30 bp, Artificial Sequence
  Synthetic oligonucleotide
cacagaagggaaaagatggcgccatgcggg

SEQ ID NO: 35150 - DNA, 30 bp, Artificial Sequence
  Synthetic oligonucleotide
acacgaggaccgcttgtcccagacatcggg

SEQ ID NO: 35151 - DNA, 30 bp, Artificial Sequence
  Synthetic oligonucleotide
cgatcgatcgggggacttattatcgtcggg

SEQ ID NO: 35152 - DNA, 30 bp, Artificial Sequence
  Synthetic oligonucleotide
cgccaaaacaaaaatgttgagcagttcggg

SEQ ID NO: 35153 - DNA, 30 bp, Artificial Sequence
  Synthetic oligonucleotide
gggatcagagcccgcagaccgtaaaagggg

SEQ ID NO: 35154 - DNA, 30 bp, Artificial Sequence
  Synthetic oligonucleotide
ccatcggctaggcggtaaaatcagaagggg

SEQ ID NO: 35155 - DNA, 30 bp, Artificial Sequence
  Synthetic oligonucleotide
tgactagcctttaaaccgcagatgaagggg

SEQ ID NO: 35156 - DNA, 30 bp, Artificial Sequence
  Synthetic oligonucleotide
aacgtggcgattatctatataggtcagggg

SEQ ID NO: 35157 - DNA, 30 bp, Artificial Sequence
  Synthetic oligonucleotide
gcgctctggaaacaataactaagttagggg

SEQ ID NO: 35158 - DNA, 30 bp, Artificial Sequence
  Synthetic oligonucleotide
ccatctcgatgaggtaaaacattagcgggg

SEQ ID NO: 35159 - DNA, 30 bp, Artificial Sequence
  Synthetic oligonucleotide
acaatgaagtactcgattccgagcgcgggg

SEQ ID NO: 35160 - DNA, 30 bp, Artificial Sequence
  Synthetic oligonucleotide
acagaacagaaacttagagtgggaaggggg

SEQ ID NO: 35161 - DNA, 30 bp, Artificial Sequence
  Synthetic oligonucleotide
taaggtccagtcctattccagggtaggggg

SEQ ID NO: 35162 - DNA, 30 bp, Artificial Sequence
  Synthetic oligonucleotide
cagaggatgcgagcgtaagtttagtggggg

SEQ ID NO: 35163 - DNA, 30 bp, Artificial Sequence
  Synthetic oligonucleotide
accgagaggataatctttgggcgttggggg

SEQ ID NO: 35164 - DNA, 30 bp, Artificial Sequence
  Synthetic oligonucleotide
tctaacctagaaactgctccgcgaatgggg

SEQ ID NO: 35165 - DNA, 30 bp, Artificial Sequence
  Synthetic oligonucleotide
cagtcgatggaaggcgaatacaatatgggg

SEQ ID NO: 35166 - DNA, 30 bp, Artificial Sequence
  Synthetic oligonucleotide
gacggcctaacacctgagtagcgcgtgggg

SEQ ID NO: 35167 - DNA, 30 bp, Artificial Sequence
  Synthetic oligonucleotide
tctgcgaaaaatttgtaactacgggtgggg

SEQ ID NO: 35168 - DNA, 30 bp, Artificial Sequence
  Synthetic oligonucleotide
cgagggtgagtaccctacaaaaccttgggg

SEQ ID NO: 35169 - DNA, 30 bp, Artificial Sequence
  Synthetic oligonucleotide
attactaagaatcgaggaatagcgaatggg

SEQ ID NO: 35170 - DNA, 30 bp, Artificial Sequence
  Synthetic oligonucleotide
cgttgagttggccaggtacacgctaatggg

SEQ ID NO: 35171 - DNA, 30 bp, Artificial Sequence
  Synthetic oligonucleotide
acgtgcgtatgatacacttgctaacatggg

SEQ ID NO: 35172 - DNA, 31 bp, Artificial Sequence
  Synthetic oligonucleotide
agatcaactctcaacgatactcccccatggg

SEQ ID NO: 35173 - DNA, 30 bp, Artificial Sequence
  Synthetic oligonucleotide
ccggtaagatctcatagagaaccggatggg

SEQ ID NO: 35174 - DNA, 30 bp, Artificial Sequence
  Synthetic oligonucleotide
gcgatgcacgtacgaactattgagtatggg

SEQ ID NO: 35175 - DNA, 30 bp, Artificial Sequence
  Synthetic oligonucleotide
gaggaacctaatgggaaatcgagttatggg

SEQ ID NO: 35176 - DNA, 30 bp, Artificial Sequence
  Synthetic oligonucleotide
gctgagagcacgtcaatggaagcaactggg

SEQ ID NO: 35177 - DNA, 30 bp, Artificial Sequence
  Synthetic oligonucleotide
aaacaacgtatccgagatgcacggactggg

SEQ ID NO: 35178 - DNA, 30 bp, Artificial Sequence
  Synthetic oligonucleotide
cggccagcgaagataggtgggactactggg

SEQ ID NO: 35179 - DNA, 30 bp, Artificial Sequence
  Synthetic oligonucleotide
cacaggaccattaagaagacccgtactggg

SEQ ID NO: 35180 - DNA, 30 bp, Artificial Sequence
  Synthetic oligonucleotide
acgcaagacgtagtaaaggcagactgtggg

SEQ ID NO: 35181 - DNA, 30 bp, Artificial Sequence
  Synthetic oligonucleotide
gtgaatatctgtgagtaacaacgtgttggg

SEQ ID NO: 35182 - DNA, 30 bp, Artificial Sequence
  Synthetic oligonucleotide
cacggcctacgaccgatagtagtgtttggg

SEQ ID NO: 35183 - DNA, 30 bp, Artificial Sequence
  Synthetic oligonucleotide
ctgggaggagcatgtatcggttgcaaatgg

SEQ ID NO: 35184 - DNA, 30 bp, Artificial Sequence
  Synthetic oligonucleotide
taaggagaatctgccaatagaatccaatgg

SEQ ID NO: 35185 - DNA, 30 bp, Artificial Sequence
  Synthetic oligonucleotide
ggtcatgaacaaccacccagcaacgaatgg

SEQ ID NO: 35186 - DNA, 30 bp, Artificial Sequence
  Synthetic oligonucleotide
acagaatgttgctccggataaatcgaatgg

SEQ ID NO: 35187 - DNA, 31 bp, Artificial Sequence
  Synthetic oligonucleotide
atcgtgctcgaaccaatgactcttcgaatgg

SEQ ID NO: 35188 - DNA, 30 bp, Artificial Sequence
  Synthetic oligonucleotide
aaaggtcgtaaggctgagactgaggaatgg

SEQ ID NO: 35189 - DNA, 30 bp, Artificial Sequence
  Synthetic oligonucleotide
gcaacaaatacccagattcgaattgaatgg

SEQ ID NO: 35190 - DNA, 30 bp, Artificial Sequence
  Synthetic oligonucleotide
caaagggatcgcgggtgtaattaataatgg

SEQ ID NO: 35191 - DNA, 30 bp, Artificial Sequence
  Synthetic oligonucleotide
gaaaggcagaacgtacggggagagtaatgg

SEQ ID NO: 35192 - DNA, 30 bp, Artificial Sequence
  Synthetic oligonucleotide
cagcggaactagcacaccagcgggtaatgg

SEQ ID NO: 35193 - DNA, 30 bp, Artificial Sequence
  Synthetic oligonucleotide
tagagttaaacaaaggaaaaaccaacatgg

SEQ ID NO: 35194 - DNA, 30 bp, Artificial Sequence
  Synthetic oligonucleotide
cgtcaacgacataatcagttaagggcatgg

SEQ ID NO: 35195 - DNA, 30 bp, Artificial Sequence
  Synthetic oligonucleotide
gtcacggtgagaaggcctgtcactcgatgg

SEQ ID NO: 35196 - DNA, 30 bp, Artificial Sequence
  Synthetic oligonucleotide
cctgaaaaaaaggacagtacgtagggatgg

SEQ ID NO: 35197 - DNA, 30 bp, Artificial Sequence
  Synthetic oligonucleotide
ggaagagcgctcagagccctaactggatgg

SEQ ID NO: 35198 - DNA, 30 bp, Artificial Sequence
  Synthetic oligonucleotide
gacgctgccgggaaagccgtggtatgatgg

SEQ ID NO: 35199 - DNA, 30 bp, Artificial Sequence
  Synthetic oligonucleotide
cgatggtccgaccctagtgtgtacatatgg

SEQ ID NO: 35200 - DNA, 30 bp, Artificial Sequence
  Synthetic oligonucleotide
catggcaatttgccgaaaacaatcctatgg

SEQ ID NO: 35201 - DNA, 31 bp, Artificial Sequence
  Synthetic oligonucleotide
acgcataaacgattaggtggccactctatgg

SEQ ID NO: 35202 - DNA, 30 bp, Artificial Sequence
  Synthetic oligonucleotide
tgggcagagatatggagtcttaggcactgg

SEQ ID NO: 35203 - DNA, 30 bp, Artificial Sequence
  Synthetic oligonucleotide
aaaggagcccctacactaagcgatagctgg

SEQ ID NO: 35204 - DNA, 30 bp, Artificial Sequence
  Synthetic oligonucleotide
tataaacggctagggcacccagaaatctgg

SEQ ID NO: 35205 - DNA, 30 bp, Artificial Sequence
  Synthetic oligonucleotide
taaggtgcttaagggcgtaccccaaagtgg

SEQ ID NO: 35206 - DNA, 30 bp, Artificial Sequence
  Synthetic oligonucleotide
cggtaccgagcagcgtggtgatggaagtgg

SEQ ID NO: 35207 - DNA, 30 bp, Artificial Sequence
  Synthetic oligonucleotide
agggccagacgtgctgtaagtgatcagtgg

SEQ ID NO: 35208 - DNA, 30 bp, Artificial Sequence
  Synthetic oligonucleotide
tcggatccaggtcgatccacaacagagtgg

SEQ ID NO: 35209 - DNA, 30 bp, Artificial Sequence
  Synthetic oligonucleotide
cgtggaaaatactatatagtggtggcgtgg

SEQ ID NO: 35210 - DNA, 30 bp, Artificial Sequence
  Synthetic oligonucleotide
caagagatgggggtgaagtataactcgtgg

SEQ ID NO: 35211 - DNA, 30 bp, Artificial Sequence
  Synthetic oligonucleotide
acgtgagcctgattctctgtagctctgtgg

SEQ ID NO: 35212 - DNA, 30 bp, Artificial Sequence
  Synthetic oligonucleotide
cggggtgagcacgaagtatgtatggtgtgg

SEQ ID NO: 35213 - DNA, 30 bp, Artificial Sequence
  Synthetic oligonucleotide
gggcgtgtggatggattatgaacgttgtgg

SEQ ID NO: 35214 - DNA, 30 bp, Artificial Sequence
  Synthetic oligonucleotide
agacggacatgatcacgctcgaggttgtgg

SEQ ID NO: 35215 - DNA, 30 bp, Artificial Sequence
  Synthetic oligonucleotide
atgtcaacaacgtccgggactataaattgg

SEQ ID NO: 35216 - DNA, 30 bp, Artificial Sequence
  Synthetic oligonucleotide
agtcaaagatacagaaaatgtgaagcttgg

SEQ ID NO: 35217 - DNA, 30 bp, Artificial Sequence
  Synthetic oligonucleotide
gcgaacgtggtggtaaaactaaactcttgg

SEQ ID NO: 35218 - DNA, 30 bp, Artificial Sequence
  Synthetic oligonucleotide
aaaggcgatcccaaggttcagtacagttgg

SEQ ID NO: 35219 - DNA, 31 bp, Artificial Sequence
  Synthetic oligonucleotide
agcggaacaactcgttggtggggatagttgg

SEQ ID NO: 35220 - DNA, 30 bp, Artificial Sequence
  Synthetic oligonucleotide
cgctctgtataggacaaacggaagatttgg

SEQ ID NO: 35221 - DNA, 30 bp, Artificial Sequence
  Synthetic oligonucleotide
cacgactgagtcacggttgggaagttttgg

SEQ ID NO: 35222 - DNA, 30 bp, Artificial Sequence
  Synthetic oligonucleotide
gcggggaggccacgcctgagaataaaaatg

SEQ ID NO: 35223 - DNA, 30 bp, Artificial Sequence
  Synthetic oligonucleotide
cgtaatgggtatatgtagaagtctaaaatg

SEQ ID NO: 35224 - DNA, 30 bp, Artificial Sequence
  Synthetic oligonucleotide
caatcagagcgggtgaccgagcggcaaatg

SEQ ID NO: 35225 - DNA, 30 bp, Artificial Sequence
  Synthetic oligonucleotide
ctaatagaaggttgggaagtgggggaaatg

SEQ ID NO: 35226 - DNA, 30 bp, Artificial Sequence
  Synthetic oligonucleotide
atagagatgagtaacaggccttgtgaaatg

SEQ ID NO: 35227 - DNA, 30 bp, Artificial Sequence
  Synthetic oligonucleotide
cgtggtgtgaaatgacaccgccagtaaatg

SEQ ID NO: 35228 - DNA, 30 bp, Artificial Sequence
  Synthetic oligonucleotide
agagtctctgagccgggccgggcaacaatg

SEQ ID NO: 35229 - DNA, 30 bp, Artificial Sequence
  Synthetic oligonucleotide
taacgcggtgggtacattgcggcgacaatg

SEQ ID NO: 35230 - DNA, 30 bp, Artificial Sequence
  Synthetic oligonucleotide
gcgtgattccaggaatgttggagaagaatg

SEQ ID NO: 35231 - DNA, 30 bp, Artificial Sequence
  Synthetic oligonucleotide
gtagagcgcactagggtccggcggcgaatg

SEQ ID NO: 35232 - DNA, 30 bp, Artificial Sequence
  Synthetic oligonucleotide
catagatgaggggggtcagcccatcgaatg

SEQ ID NO: 35233 - DNA, 30 bp, Artificial Sequence
  Synthetic oligonucleotide
tcagatcggtgggcgactaaattaggaatg

SEQ ID NO: 35234 - DNA, 30 bp, Artificial Sequence
  Synthetic oligonucleotide
aaaaagccgaaaacgtagacagagtgaatg

SEQ ID NO: 35235 - DNA, 30 bp, Artificial Sequence
  Synthetic oligonucleotide
gaccgggaatgtatatgggatacaataatg

SEQ ID NO: 35236 - DNA, 30 bp, Artificial Sequence
  Synthetic oligonucleotide
ggcgggtaatgagagtaggcttgtataatg

SEQ ID NO: 35237 - DNA, 30 bp, Artificial Sequence
  Synthetic oligonucleotide
acattgcgccggtgagaactgatattaatg

SEQ ID NO: 35238 - DNA, 30 bp, Artificial Sequence
  Synthetic oligonucleotide
agaatcgcgaaggcattacactcacacatg

SEQ ID NO: 35239 - DNA, 30 bp, Artificial Sequence
  Synthetic oligonucleotide
cagaagaacaatgtttgggaacggtccatg

SEQ ID NO: 35240 - DNA, 30 bp, Artificial Sequence
  Synthetic oligonucleotide
ctcggtaccaatagcgggaaagccatcatg

SEQ ID NO: 35241 - DNA, 30 bp, Artificial Sequence
  Synthetic oligonucleotide
acggtcacgataaggagaagccgcatcatg

SEQ ID NO: 35242 - DNA, 30 bp, Artificial Sequence
  Synthetic oligonucleotide
actgaagggtatgcttcctctgtcatcatg

SEQ ID NO: 35243 - DNA, 30 bp, Artificial Sequence
  Synthetic oligonucleotide
caggccggggaatccagtagaatgctcatg

SEQ ID NO: 35244 - DNA, 30 bp, Artificial Sequence
  Synthetic oligonucleotide
aagggctgggtcaagtctgttagccagatg

SEQ ID NO: 35245 - DNA, 30 bp, Artificial Sequence
  Synthetic oligonucleotide
tgtcctagagtcgtcaccgatgtggagatg

SEQ ID NO: 35246 - DNA, 30 bp, Artificial Sequence
  Synthetic oligonucleotide
tgtacagaaagtgggccgtgcaactagatg

SEQ ID NO: 35247 - DNA, 30 bp, Artificial Sequence
  Synthetic oligonucleotide
cggaacgctgtcggaccatgtacttagatg

SEQ ID NO: 35248 - DNA, 30 bp, Artificial Sequence
  Synthetic oligonucleotide
agttattaaacggcacgaggtgcgacgatg

SEQ ID NO: 35249 - DNA, 30 bp, Artificial Sequence
  Synthetic oligonucleotide
cagatgtgtagcagctactgatacccgatg

SEQ ID NO: 35250 - DNA, 30 bp, Artificial Sequence
  Synthetic oligonucleotide
taggtgggtggtgcctcgtgcgcaaggatg

SEQ ID NO: 35251 - DNA, 30 bp, Artificial Sequence
  Synthetic oligonucleotide
accaaagacgtggaactgagtaacaggatg

SEQ ID NO: 35252 - DNA, 30 bp, Artificial Sequence
  Synthetic oligonucleotide
atcacatcaacacaggaaaggtacaggatg

SEQ ID NO: 35253 - DNA, 30 bp, Artificial Sequence
  Synthetic oligonucleotide
cgctacgcggggagagtagggtacgggatg

SEQ ID NO: 35254 - DNA, 30 bp, Artificial Sequence
  Synthetic oligonucleotide
gaccggcgacgagcaatgaggcccgggatg

SEQ ID NO: 35255 - DNA, 30 bp, Artificial Sequence
  Synthetic oligonucleotide
cggtatgagattgctaactacctggggatg

SEQ ID NO: 35256 - DNA, 30 bp, Artificial Sequence
  Synthetic oligonucleotide
gatccggcggaactacataagagtgggatg

SEQ ID NO: 35257 - DNA, 30 bp, Artificial Sequence
  Synthetic oligonucleotide
ccgtccaccgcattttccaaacgaatgatg

SEQ ID NO: 35258 - DNA, 30 bp, Artificial Sequence
  Synthetic oligonucleotide
acgtatataggatggttcaagggcatgatg

SEQ ID NO: 35259 - DNA, 30 bp, Artificial Sequence
  Synthetic oligonucleotide
tagaggctctacaaaagggtatcaaatatg

SEQ ID NO: 35260 - DNA, 30 bp, Artificial Sequence
  Synthetic oligonucleotide
ggtcaactaaataattacgataacaatatg

SEQ ID NO: 35261 - DNA, 30 bp, Artificial Sequence
  Synthetic oligonucleotide
agagtagcacgggtgatgaattagaatatg

SEQ ID NO: 35262 - DNA, 30 bp, Artificial Sequence
  Synthetic oligonucleotide
atagcgaggaatctcaagtgctggaatatg

SEQ ID NO: 35263 - DNA, 30 bp, Artificial Sequence
  Synthetic oligonucleotide
gctaaatgtgacgaaagctcagaggatatg

SEQ ID NO: 35264 - DNA, 30 bp, Artificial Sequence
  Synthetic oligonucleotide
catgaaggggataagggtattagtgatatg

SEQ ID NO: 35265 - DNA, 30 bp, Artificial Sequence
  Synthetic oligonucleotide
ggaacggtccacagatctaggcttactatg

SEQ ID NO: 35266 - DNA, 30 bp, Artificial Sequence
  Synthetic oligonucleotide
gatgaggatcgtgtgggatctcgtcctatg

SEQ ID NO: 35267 - DNA, 30 bp, Artificial Sequence
  Synthetic oligonucleotide
aggtcagatgtagttaattttagtagtatg

SEQ ID NO: 35268 - DNA, 30 bp, Artificial Sequence
  Synthetic oligonucleotide
cgtaaagcgatattgctgttaatccgtatg

SEQ ID NO: 35269 - DNA, 30 bp, Artificial Sequence
  Synthetic oligonucleotide
acagaagggtgtggtgaaagctcgcgtatg

SEQ ID NO: 35270 - DNA, 30 bp, Artificial Sequence
  Synthetic oligonucleotide
gtacacgggtaggctagtaagagtggtatg

SEQ ID NO: 35271 - DNA, 30 bp, Artificial Sequence
  Synthetic oligonucleotide
cgactaatacagaaaacaagggtagttatg

SEQ ID NO: 35272 - DNA, 30 bp, Artificial Sequence
  Synthetic oligonucleotide
gtcaggaacttgggacaatagggtgttatg

SEQ ID NO: 35273 - DNA, 30 bp, Artificial Sequence
  Synthetic oligonucleotide
gcggacgaaagtgatggctcgtcacaactg

SEQ ID NO: 35274 - DNA, 30 bp, Artificial Sequence
  Synthetic oligonucleotide
cggatacgcgtagatctcggaggacaactg

SEQ ID NO: 35275 - DNA, 30 bp, Artificial Sequence
  Synthetic oligonucleotide
tgggcttagattcagtaggtaggcttactg

SEQ ID NO: 35276 - DNA, 30 bp, Artificial Sequence
  Synthetic oligonucleotide
ggtcatggagccaaacacgattcaaacctg

SEQ ID NO: 35277 - DNA, 30 bp, Artificial Sequence
  Synthetic oligonucleotide
ggcataaggaatttaagcaaaacgaccctg

SEQ ID NO: 35278 - DNA, 30 bp, Artificial Sequence
  Synthetic oligonucleotide
gcaacacaaccgtatactacaagcgccctg

SEQ ID NO: 35279 - DNA, 30 bp, Artificial Sequence
  Synthetic oligonucleotide
aaacgtgtaagcaaggataagttggccctg

SEQ ID NO: 35280 - DNA, 30 bp, Artificial Sequence
  Synthetic oligonucleotide
ggggcgctggattaccagagtcgcatcctg

SEQ ID NO: 35281 - DNA, 30 bp, Artificial Sequence
  Synthetic oligonucleotide
cagggggtcagcatcagattgggcgtcctg

SEQ ID NO: 35282 - DNA, 30 bp, Artificial Sequence
  Synthetic oligonucleotide
ttaagggcaaaggtaatgtaaacctcgctg

SEQ ID NO: 35283 - DNA, 30 bp, Artificial Sequence
  Synthetic oligonucleotide
acgggtagccgaaccacgctcggttcgctg

SEQ ID NO: 35284 - DNA, 30 bp, Artificial Sequence
  Synthetic oligonucleotide
gaacacaatcctagccgagattaatggctg

SEQ ID NO: 35285 - DNA, 30 bp, Artificial Sequence
  Synthetic oligonucleotide
tactaggtccgagaagactaacttttgctg

SEQ ID NO: 35286 - DNA, 30 bp, Artificial Sequence
  Synthetic oligonucleotide
tcctcatccaaaaaagaactgatcaatctg

SEQ ID NO: 35287 - DNA, 30 bp, Artificial Sequence
  Synthetic oligonucleotide
tcaagttaggattacatgacagatcatctg

SEQ ID NO: 35288 - DNA, 30 bp, Artificial Sequence
  Synthetic oligonucleotide
cgatcaagggagatcgtgtcgtgttctctg

SEQ ID NO: 35289 - DNA, 30 bp, Artificial Sequence
  Synthetic oligonucleotide
acgggagaccctctccgacccgagagtctg

SEQ ID NO: 35290 - DNA, 30 bp, Artificial Sequence
  Synthetic oligonucleotide
atgtatgggcttaggcaaaagcgtagtctg

SEQ ID NO: 35291 - DNA, 30 bp, Artificial Sequence
  Synthetic oligonucleotide
cggacacgttacgaggaatgcacttgtctg

SEQ ID NO: 35292 - DNA, 30 bp, Artificial Sequence
  Synthetic oligonucleotide
gagcgagaaacacgttagatatcttgtctg

SEQ ID NO: 35293 - DNA, 30 bp, Artificial Sequence
  Synthetic oligonucleotide
tcgatgaaggagataatctcgagttgtctg

SEQ ID NO: 35294 - DNA, 30 bp, Artificial Sequence
  Synthetic oligonucleotide
cgagccgactaataataggtatgggttctg

SEQ ID NO: 35295 - DNA, 30 bp, Artificial Sequence
  Synthetic oligonucleotide
ggcgtagaacgaatggtgaagtaatttctg

SEQ ID NO: 35296 - DNA, 30 bp, Artificial Sequence
  Synthetic oligonucleotide
agctcagtggagagtttaaacgtaaaagtg

SEQ ID NO: 35297 - DNA, 30 bp, Artificial Sequence
  Synthetic oligonucleotide
tctctacaacgagtaactagtgagaaagtg

SEQ ID NO: 35298 - DNA, 30 bp, Artificial Sequence
  Synthetic oligonucleotide
cgggcgcaattgatgccccatatgaaagtg

SEQ ID NO: 35299 - DNA, 30 bp, Artificial Sequence
  Synthetic oligonucleotide
agtacatactaagcgtatgtcgaacaagtg

SEQ ID NO: 35300 - DNA, 30 bp, Artificial Sequence
  Synthetic oligonucleotide
cacgtacctcggcggggtgggtaaccagtg

SEQ ID NO: 35301 - DNA, 30 bp, Artificial Sequence
  Synthetic oligonucleotide
agttgatctagatccaaattcagaccagtg

SEQ ID NO: 35302 - DNA, 30 bp, Artificial Sequence
  Synthetic oligonucleotide
cctagcgtgtgcgcgggagtctatccagtg

SEQ ID NO: 35303 - DNA, 30 bp, Artificial Sequence
  Synthetic oligonucleotide
ccgcgccgcgtcctgcagaggagcgcagtg

SEQ ID NO: 35304 - DNA, 30 bp, Artificial Sequence
  Synthetic oligonucleotide
tgaagacattgaatatatggtgcatcagtg

SEQ ID NO: 35305 - DNA, 30 bp, Artificial Sequence
  Synthetic oligonucleotide
agatgttacatgaagttcttacccagagtg

SEQ ID NO: 35306 - DNA, 30 bp, Artificial Sequence
  Synthetic oligonucleotide
aacaccatatgagcaggcggacagatagtg

SEQ ID NO: 35307 - DNA, 30 bp, Artificial Sequence
  Synthetic oligonucleotide
gtcgtaagacggcgtcctaatgctatagtg

SEQ ID NO: 35308 - DNA, 30 bp, Artificial Sequence
  Synthetic oligonucleotide
gatacgagcctatccgtgcgattactagtg

SEQ ID NO: 35309 - DNA, 30 bp, Artificial Sequence
  Synthetic oligonucleotide
gtaaaaaagaggtcaaatactgctctagtg

SEQ ID NO: 35310 - DNA, 30 bp, Artificial Sequence
  Synthetic oligonucleotide
atcgagatcctcctgatatgggaagtagtg

SEQ ID NO: 35311 - DNA, 30 bp, Artificial Sequence
  Synthetic oligonucleotide
aggcaaggcaattcgtagatcgctgtagtg

SEQ ID NO: 35312 - DNA, 30 bp, Artificial Sequence
  Synthetic oligonucleotide
agggctggcgaataactcattaagttagtg

SEQ ID NO: 35313 - DNA, 30 bp, Artificial Sequence
  Synthetic oligonucleotide
gggttaagggctaacgaacggataaacgtg

SEQ ID NO: 35314 - DNA, 30 bp, Artificial Sequence
  Synthetic oligonucleotide
agcatcaccaagggcacgggttgtaacgtg

SEQ ID NO: 35315 - DNA, 30 bp, Artificial Sequence
  Synthetic oligonucleotide
tgtacagggattcataaccagaaccacgtg

SEQ ID NO: 35316 - DNA, 30 bp, Artificial Sequence
  Synthetic oligonucleotide
tcattgagcgtaaggggggttaagtacgtg

SEQ ID NO: 35317 - DNA, 30 bp, Artificial Sequence
  Synthetic oligonucleotide
ccacattccagtggggaataccgatccgtg

SEQ ID NO: 35318 - DNA, 30 bp, Artificial Sequence
  Synthetic oligonucleotide
tcacgttacaagatcagagatgcccgcgtg

SEQ ID NO: 35319 - DNA, 30 bp, Artificial Sequence
  Synthetic oligonucleotide
ggcgcatagtgggacgatcaaataggcgtg

SEQ ID NO: 35320 - DNA, 30 bp, Artificial Sequence
  Synthetic oligonucleotide
agtgtgactgaggtgtgacaattgggcgtg

SEQ ID NO: 35321 - DNA, 30 bp, Artificial Sequence
  Synthetic oligonucleotide
gtgacaaacaagaggggacccatttgcgtg

SEQ ID NO: 35322 - DNA, 30 bp, Artificial Sequence
  Synthetic oligonucleotide
cgactaggccatatgagcaaacccaaggtg

SEQ ID NO: 35323 - DNA, 30 bp, Artificial Sequence
  Synthetic oligonucleotide
ctcaggggagaagaatcataaacgaaggtg

SEQ ID NO: 35324 - DNA, 30 bp, Artificial Sequence
  Synthetic oligonucleotide
agagggtcgttcactgtaagaggtcaggtg

SEQ ID NO: 35325 - DNA, 30 bp, Artificial Sequence
  Synthetic oligonucleotide
tatcacataaggaatagatcatccgaggtg

SEQ ID NO: 35326 - DNA, 30 bp, Artificial Sequence
  Synthetic oligonucleotide
gggaatgctactgacacagtgatggaggtg

SEQ ID NO: 35327 - DNA, 30 bp, Artificial Sequence
  Synthetic oligonucleotide
ttgtccaagatgcaacgaggggactaggtg

SEQ ID NO: 35328 - DNA, 30 bp, Artificial Sequence
  Synthetic oligonucleotide
tgaagttcgaacggtaatcccttagcggtg

SEQ ID NO: 35329 - DNA, 30 bp, Artificial Sequence
  Synthetic oligonucleotide
tgcaggataatggtaagggctaacagggtg

SEQ ID NO: 35330 - DNA, 30 bp, Artificial Sequence
  Synthetic oligonucleotide
gctccgggaagttagagaagagaatgggtg

SEQ ID NO: 35331 - DNA, 30 bp, Artificial Sequence
  Synthetic oligonucleotide
catcccccggaaacggtaaagcaacatgtg

SEQ ID NO: 35332 - DNA, 30 bp, Artificial Sequence
  Synthetic oligonucleotide
tcaaaaatagactaaactgaatgggatgtg

SEQ ID NO: 35333 - DNA, 30 bp, Artificial Sequence
  Synthetic oligonucleotide
gattcaaggttaaggaatgggcgacctgtg

SEQ ID NO: 35334 - DNA, 30 bp, Artificial Sequence
  Synthetic oligonucleotide
cgggtgaataacggaacgcctgggtctgtg

SEQ ID NO: 35335 - DNA, 30 bp, Artificial Sequence
  Synthetic oligonucleotide
tacgcggtaaacccagtaaagagaagtgtg

SEQ ID NO: 35336 - DNA, 30 bp, Artificial Sequence
  Synthetic oligonucleotide
gcggctgtaaggtcagggttcccgcgtgtg

SEQ ID NO: 35337 - DNA, 30 bp, Artificial Sequence
  Synthetic oligonucleotide
ggggcagctagatgaaataacaggcgtgtg

SEQ ID NO: 35338 - DNA, 30 bp, Artificial Sequence
  Synthetic oligonucleotide
gcgatagctgtgcggaaattttgcggtgtg

SEQ ID NO: 35339 - DNA, 30 bp, Artificial Sequence
  Synthetic oligonucleotide
ccgtaacacctacgggtcatggaatgtgtg

SEQ ID NO: 35340 - DNA, 30 bp, Artificial Sequence
  Synthetic oligonucleotide
gatgcgcacgagaagcaacaggaacttgtg

SEQ ID NO: 35341 - DNA, 30 bp, Artificial Sequence
  Synthetic oligonucleotide
cgaaccaaatgatgaagggtcgcgcttgtg

SEQ ID NO: 35342 - DNA, 30 bp, Artificial Sequence
  Synthetic oligonucleotide
tcaaaaacgcgtcctatcataagggaattg

SEQ ID NO: 35343 - DNA, 30 bp, Artificial Sequence
  Synthetic oligonucleotide
ctacgcgcgcgtgggggcaagcattaattg

SEQ ID NO: 35344 - DNA, 30 bp, Artificial Sequence
  Synthetic oligonucleotide
caagctgcaggaaggaatagagttccattg

SEQ ID NO: 35345 - DNA, 30 bp, Artificial Sequence
  Synthetic oligonucleotide
ttcggggagacaggggatagacagagattg

SEQ ID NO: 35346 - DNA, 30 bp, Artificial Sequence
  Synthetic oligonucleotide
aaacgggctttacccgagcgaaggaacttg

SEQ ID NO: 35347 - DNA, 30 bp, Artificial Sequence
  Synthetic oligonucleotide
ctaggaccatgacttaacatgcataacttg

SEQ ID NO: 35348 - DNA, 30 bp, Artificial Sequence
  Synthetic oligonucleotide
agaaactacacattcgtcgtcgataacttg

SEQ ID NO: 35349 - DNA, 30 bp, Artificial Sequence
  Synthetic oligonucleotide
ccgtaggggatggggttcctgtaatacttg

SEQ ID NO: 35350 - DNA, 30 bp, Artificial Sequence
  Synthetic oligonucleotide
tcgtaggtgaccgttataacgacttgcttg

SEQ ID NO: 35351 - DNA, 30 bp, Artificial Sequence
  Synthetic oligonucleotide
taacactagcaaggaatcaactccaagttg

SEQ ID NO: 35352 - DNA, 30 bp, Artificial Sequence
  Synthetic oligonucleotide
ggcaagctttagccatcgaagtcgaagttg

SEQ ID NO: 35353 - DNA, 30 bp, Artificial Sequence
  Synthetic oligonucleotide
gcgggccccagtagatttggttaacagttg

SEQ ID NO: 35354 - DNA, 30 bp, Artificial Sequence
  Synthetic oligonucleotide
tcgggaacggagaacatgctcgtacagttg

SEQ ID NO: 35355 - DNA, 30 bp, Artificial Sequence
  Synthetic oligonucleotide
tgtgcagaccatatcaagtcaatcgagttg

SEQ ID NO: 35356 - DNA, 30 bp, Artificial Sequence
  Synthetic oligonucleotide
cattggtaagcatagcaagaaggagcgttg

SEQ ID NO: 35357 - DNA, 30 bp, Artificial Sequence
  Synthetic oligonucleotide
gcacgggtgaggccgatcggtaattcgttg

SEQ ID NO: 35358 - DNA, 30 bp, Artificial Sequence
  Synthetic oligonucleotide
gacgatggtaactgtcagagagttaggttg

SEQ ID NO: 35359 - DNA, 30 bp, Artificial Sequence
  Synthetic oligonucleotide
gcctagggcatcgggtacatctgcgggttg

SEQ ID NO: 35360 - DNA, 30 bp, Artificial Sequence
  Synthetic oligonucleotide
cgttatccagattaatccaaaactgatttg

SEQ ID NO: 35361 - DNA, 30 bp, Artificial Sequence
  Synthetic oligonucleotide
cgggctcccgaaggagaaagatacactttg

SEQ ID NO: 35362 - DNA, 30 bp, Artificial Sequence
  Synthetic oligonucleotide
acatcaagatcgaaacagagtcacgctttg

SEQ ID NO: 35363 - DNA, 30 bp, Artificial Sequence
  Synthetic oligonucleotide
cggctgaacattcagcgcgaaggggctttg

SEQ ID NO: 35364 - DNA, 30 bp, Artificial Sequence
  Synthetic oligonucleotide
tcggaaaagcgtcgcccgaataattctttg

SEQ ID NO: 35365 - DNA, 30 bp, Artificial Sequence
  Synthetic oligonucleotide
atgatggcgggggttcgagaaggagaaaat

SEQ ID NO: 35366 - DNA, 30 bp, Artificial Sequence
  Synthetic oligonucleotide
gtgcgaggcggtgaccaaccttgataaaat

SEQ ID NO: 35367 - DNA, 30 bp, Artificial Sequence
  Synthetic oligonucleotide
aggtgggccggtaaaagccgagattaaaat

SEQ ID NO: 35368 - DNA, 30 bp, Artificial Sequence
  Synthetic oligonucleotide
cgataaaacttgaaaagaaaaggaccaaat

SEQ ID NO: 35369 - DNA, 30 bp, Artificial Sequence
  Synthetic oligonucleotide
cgatactcccaacggaatgtgttgagaaat

SEQ ID NO: 35370 - DNA, 30 bp, Artificial Sequence
  Synthetic oligonucleotide
atcggacgcgtcctaataccagctggaaat

SEQ ID NO: 35371 - DNA, 30 bp, Artificial Sequence
  Synthetic oligonucleotide
acaaggctcctgaggatgtagcacaacaat

SEQ ID NO: 35372 - DNA, 30 bp, Artificial Sequence
  Synthetic oligonucleotide
tggcaagggattaggaatcaagaggacaat

SEQ ID NO: 35373 - DNA, 30 bp, Artificial Sequence
  Synthetic oligonucleotide
taaacgttcgggccgtgtggtgaggacaat

SEQ ID NO: 35374 - DNA, 30 bp, Artificial Sequence
  Synthetic oligonucleotide
gcgtgcagagtgtcacgaagaacaggcaat

SEQ ID NO: 35375 - DNA, 30 bp, Artificial Sequence
  Synthetic oligonucleotide
cgtgctagccgcggactggccgatgtcaat

SEQ ID NO: 35376 - DNA, 30 bp, Artificial Sequence
  Synthetic oligonucleotide
gtcgaaatataagggagaaggcggcagaat

SEQ ID NO: 35377 - DNA, 30 bp, Artificial Sequence
  Synthetic oligonucleotide
tacagacccaagcgagctgagtgtcagaat

SEQ ID NO: 35378 - DNA, 30 bp, Artificial Sequence
  Synthetic oligonucleotide
gagctaacaaaacctaaataggcaacgaat

SEQ ID NO: 35379 - DNA, 30 bp, Artificial Sequence
  Synthetic oligonucleotide
gctcccagacacaatcgtagaaaggcgaat

SEQ ID NO: 35380 - DNA, 30 bp, Artificial Sequence
  Synthetic oligonucleotide
tgagtggcacaaggctggtcagctgcgaat

SEQ ID NO: 35381 - DNA, 30 bp, Artificial Sequence
  Synthetic oligonucleotide
tgctaaggtacgtcacacgggtgcatgaat

SEQ ID NO: 35382 - DNA, 30 bp, Artificial Sequence
  Synthetic oligonucleotide
ctgaagaaggaggcggcggactaagtgaat

SEQ ID NO: 35383 - DNA, 30 bp, Artificial Sequence
  Synthetic oligonucleotide
cacgggagtacgatgcactgattcaataat

SEQ ID NO: 35384 - DNA, 30 bp, Artificial Sequence
  Synthetic oligonucleotide
tccgacaggagagcggccaggctggataat

SEQ ID NO: 35385 - DNA, 30 bp, Artificial Sequence
  Synthetic oligonucleotide
ggaaactgacaagcacacatacaaactaat

SEQ ID NO: 35386 - DNA, 30 bp, Artificial Sequence
  Synthetic oligonucleotide
ctaaaacaggcaagatagtagactagtaat

SEQ ID NO: 35387 - DNA, 30 bp, Artificial Sequence
  Synthetic oligonucleotide
agctagggtaaagcatgaaacgataaacat

SEQ ID NO: 35388 - DNA, 30 bp, Artificial Sequence
  Synthetic oligonucleotide
ggggtgactggagtacacagaattaaacat

SEQ ID NO: 35389 - DNA, 30 bp, Artificial Sequence
  Synthetic oligonucleotide
tcgatatgctggtggcacgaaacctaacat

SEQ ID NO: 35390 - DNA, 31 bp, Artificial Sequence
  Synthetic oligonucleotide
cggaagtcacacgaaagaacaacagtaacat

SEQ ID NO: 35391 - DNA, 30 bp, Artificial Sequence
  Synthetic oligonucleotide
agcccaactctaacatcatgagcccgacat

SEQ ID NO: 35392 - DNA, 30 bp, Artificial Sequence
  Synthetic oligonucleotide
gatggtcgcctgggcacacaggagtgacat

SEQ ID NO: 35393 - DNA, 30 bp, Artificial Sequence
  Synthetic oligonucleotide
caacaagaacgtcgcctcgcctcggtacat

SEQ ID NO: 35394 - DNA, 30 bp, Artificial Sequence
  Synthetic oligonucleotide
ggaactgacgaatcgacagagtgcaaccat

SEQ ID NO: 35395 - DNA, 30 bp, Artificial Sequence
  Synthetic oligonucleotide
cggttcgtaaagcggaacaccccgcaccat

SEQ ID NO: 35396 - DNA, 30 bp, Artificial Sequence
  Synthetic oligonucleotide
aacgagtaaggggcgcagactctcgaccat

SEQ ID NO: 35397 - DNA, 30 bp, Artificial Sequence
  Synthetic oligonucleotide
ccgaaggcgatgaagtcgcacccaggccat

SEQ ID NO: 35398 - DNA, 31 bp, Artificial Sequence
  Synthetic oligonucleotide
aaacgtcgaaaggtagagtaaatgagtccat

SEQ ID NO: 35399 - DNA, 30 bp, Artificial Sequence
  Synthetic oligonucleotide
gaagacatcgaaacggggtcgccaaagcat

SEQ ID NO: 35400 - DNA, 30 bp, Artificial Sequence
  Synthetic oligonucleotide
ggacttcgccgaaccggaagaaccacgcat

SEQ ID NO: 35401 - DNA, 30 bp, Artificial Sequence
  Synthetic oligonucleotide
gatggaatagcaagagctagccccacgcat

SEQ ID NO: 35402 - DNA, 30 bp, Artificial Sequence
  Synthetic oligonucleotide
gtccagaaggaagctaagtgaagtccgcat

SEQ ID NO: 35403 - DNA, 30 bp, Artificial Sequence
  Synthetic oligonucleotide
ggtatacaacaaaagaaccaatggaggcat

SEQ ID NO: 35404 - DNA, 30 bp, Artificial Sequence
  Synthetic oligonucleotide
cacgactgggagtgtaggattattcggcat

SEQ ID NO: 35405 - DNA, 30 bp, Artificial Sequence
  Synthetic oligonucleotide
aggtatctggagagtatcggcgaattgcat

SEQ ID NO: 35406 - DNA, 30 bp, Artificial Sequence
  Synthetic oligonucleotide
aggcgttggacacacaatgatacgttgcat

SEQ ID NO: 35407 - DNA, 30 bp, Artificial Sequence
  Synthetic oligonucleotide
caagtaggtcttaagtgaaggctgcatcat

SEQ ID NO: 35408 - DNA, 30 bp, Artificial Sequence
  Synthetic oligonucleotide
atggaagggtcgcattacgaatcgtatcat

SEQ ID NO: 35409 - DNA, 30 bp, Artificial Sequence
  Synthetic oligonucleotide
gcgggtgctgagagtacgaaaatgtatcat

SEQ ID NO: 35410 - DNA, 30 bp, Artificial Sequence
  Synthetic oligonucleotide
gtgggcgtgatgagacataacagacgtcat

SEQ ID NO: 35411 - DNA, 30 bp, Artificial Sequence
  Synthetic oligonucleotide
gccgtcagttaaggccggggggtgattcat

SEQ ID NO: 35412 - DNA, 30 bp, Artificial Sequence
  Synthetic oligonucleotide
cggagggaggtttgcggaagacaggttcat

SEQ ID NO: 35413 - DNA, 30 bp, Artificial Sequence
  Synthetic oligonucleotide
aggaaaaggctaaaaaggcgaagaaaagat

SEQ ID NO: 35414 - DNA, 30 bp, Artificial Sequence
  Synthetic oligonucleotide
acgaaaagagtacgccagaggatgaaagat

SEQ ID NO: 35415 - DNA, 30 bp, Artificial Sequence
  Synthetic oligonucleotide
ccaccttgtaactcaaaagcgcggtaagat

SEQ ID NO: 35416 - DNA, 30 bp, Artificial Sequence
  Synthetic oligonucleotide
aaggtacatcgaggtaaaaatcacacagat

SEQ ID NO: 35417 - DNA, 30 bp, Artificial Sequence
  Synthetic oligonucleotide
acggtaatgtaggtccgtgcatccacagat

SEQ ID NO: 35418 - DNA, 30 bp, Artificial Sequence
  Synthetic oligonucleotide
atcggactaagagtcgccgacgggacagat

SEQ ID NO: 35419 - DNA, 30 bp, Artificial Sequence
  Synthetic oligonucleotide
tgagtttgaaggaccctcgatacgccagat

SEQ ID NO: 35420 - DNA, 30 bp, Artificial Sequence
  Synthetic oligonucleotide
ccttaacgtgcgatccagcgtagagcagat

SEQ ID NO: 35421 - DNA, 30 bp, Artificial Sequence
  Synthetic oligonucleotide
ggttactcaaactccacgaaacgggcagat

SEQ ID NO: 35422 - DNA, 30 bp, Artificial Sequence
  Synthetic oligonucleotide
gcgtggagtcaggggtcaccgatatcagat

SEQ ID NO: 35423 - DNA, 30 bp, Artificial Sequence
  Synthetic oligonucleotide
ggagtctagaaacactcgcgaatgtcagat

SEQ ID NO: 35424 - DNA, 30 bp, Artificial Sequence
  Synthetic oligonucleotide
gccaagtgcacgagattacgggccagagat

SEQ ID NO: 35425 - DNA, 30 bp, Artificial Sequence
  Synthetic oligonucleotide
actgagggggaaacggttaagtctggagat

SEQ ID NO: 35426 - DNA, 30 bp, Artificial Sequence
  Synthetic oligonucleotide
cgagaatggtgttacctttggccaatagat

SEQ ID NO: 35427 - DNA, 30 bp, Artificial Sequence
  Synthetic oligonucleotide
caatgcggtggtgagtctagtggaatagat

SEQ ID NO: 35428 - DNA, 30 bp, Artificial Sequence
  Synthetic oligonucleotide
gcggtgcgagtgtgggaacaaccgttagat

SEQ ID NO: 35429 - DNA, 30 bp, Artificial Sequence
  Synthetic oligonucleotide
acaacggctggaacgcgtgggatcaacgat

SEQ ID NO: 35430 - DNA, 30 bp, Artificial Sequence
  Synthetic oligonucleotide
aggcaccttgatcaaagcgtgagcgacgat

SEQ ID NO: 35431 - DNA, 30 bp, Artificial Sequence
  Synthetic oligonucleotide
acagagtctcccgtacaaaaggcttccgat

SEQ ID NO: 35432 - DNA, 30 bp, Artificial Sequence
  Synthetic oligonucleotide
ggacaaaaggcgcagaggtgcccaatcgat

SEQ ID NO: 35433 - DNA, 30 bp, Artificial Sequence
  Synthetic oligonucleotide
tcatcgtgtacactgataaactgaatcgat

SEQ ID NO: 35434 - DNA, 30 bp, Artificial Sequence
  Synthetic oligonucleotide
actgctaaaccgggacagtgcgcgatcgat

SEQ ID NO: 35435 - DNA, 30 bp, Artificial Sequence
  Synthetic oligonucleotide
cgaaggggctaatagccacaaactctcgat

SEQ ID NO: 35436 - DNA, 30 bp, Artificial Sequence
  Synthetic oligonucleotide
ttaggccgaatgaaagattgcataaaggat

SEQ ID NO: 35437 - DNA, 30 bp, Artificial Sequence
  Synthetic oligonucleotide
tgcctcactaaaaaaacgttaggcaaggat

SEQ ID NO: 35438 - DNA, 31 bp, Artificial Sequence
  Synthetic oligonucleotide
gtagggcgcactaacatctaaggagcaggat

SEQ ID NO: 35439 - DNA, 30 bp, Artificial Sequence
  Synthetic oligonucleotide
gtcgtaacggtaaagttcgaatcataggat

SEQ ID NO: 35440 - DNA, 30 bp, Artificial Sequence
  Synthetic oligonucleotide
atgaagaggtcacgggaagtcgactaggat

SEQ ID NO: 35441 - DNA, 30 bp, Artificial Sequence
  Synthetic oligonucleotide
aggaaaacgacgacgttctggcggtaggat

SEQ ID NO: 35442 - DNA, 30 bp, Artificial Sequence
  Synthetic oligonucleotide
cactagcggctcagaacctatggagcggat

SEQ ID NO: 35443 - DNA, 30 bp, Artificial Sequence
  Synthetic oligonucleotide
cgagaatggaaactggtggataccggggat

SEQ ID NO: 35444 - DNA, 30 bp, Artificial Sequence
  Synthetic oligonucleotide
cgcttttaaacacagagtagactttgggat

SEQ ID NO: 35445 - DNA, 30 bp, Artificial Sequence
  Synthetic oligonucleotide
ttggcccaagagacaagagcgtatcctgat

SEQ ID NO: 35446 - DNA, 30 bp, Artificial Sequence
  Synthetic oligonucleotide
agtgatgagttaataaagcatgcaagtgat

SEQ ID NO: 35447 - DNA, 30 bp, Artificial Sequence
  Synthetic oligonucleotide
cgataggtaaccgatacgactcacagtgat

SEQ ID NO: 35448 - DNA, 30 bp, Artificial Sequence
  Synthetic oligonucleotide
agcgaaaaagaacctggataacggattgat

SEQ ID NO: 35449 - DNA, 30 bp, Artificial Sequence
  Synthetic oligonucleotide
cgtaaggggggaaccgtcaagcggattgat

SEQ ID NO: 35450 - DNA, 30 bp, Artificial Sequence
  Synthetic oligonucleotide
cgaaaccttgtaaaaagcttacgacaatat

SEQ ID NO: 35451 - DNA, 30 bp, Artificial Sequence
  Synthetic oligonucleotide
aagagggatggagcttcgaattgggaatat

SEQ ID NO: 35452 - DNA, 30 bp, Artificial Sequence
  Synthetic oligonucleotide
cacgatcaacggttataccaaatcagatat

SEQ ID NO: 35453 - DNA, 30 bp, Artificial Sequence
  Synthetic oligonucleotide
agacttatggacgaattcaccgatagatat

SEQ ID NO: 35454 - DNA, 30 bp, Artificial Sequence
  Synthetic oligonucleotide
tctaggggcgtgcgacacgttatgtgatat

SEQ ID NO: 35455 - DNA, 30 bp, Artificial Sequence
  Synthetic oligonucleotide
gccgagctagggaacaattgagcacactat

SEQ ID NO: 35456 - DNA, 30 bp, Artificial Sequence
  Synthetic oligonucleotide
gggcacaggttcaagatactgtttcactat

SEQ ID NO: 35457 - DNA, 30 bp, Artificial Sequence
  Synthetic oligonucleotide
cgacaaagcttggcgagcaagtatgcctat

SEQ ID NO: 35458 - DNA, 30 bp, Artificial Sequence
  Synthetic oligonucleotide
gaggcacgaaggccttaacgtagatcctat

SEQ ID NO: 35459 - DNA, 30 bp, Artificial Sequence
  Synthetic oligonucleotide
ggtcatcaaccacccatcactagcagctat

SEQ ID NO: 35460 - DNA, 30 bp, Artificial Sequence
  Synthetic oligonucleotide
ccatgaaagagtggatgaggccagaagtat

SEQ ID NO: 35461 - DNA, 30 bp, Artificial Sequence
  Synthetic oligonucleotide
taactagacggggcttgatagagggagtat

SEQ ID NO: 35462 - DNA, 30 bp, Artificial Sequence
  Synthetic oligonucleotide
acacagaacacggtgtaaagagcgtagtat

SEQ ID NO: 35463 - DNA, 30 bp, Artificial Sequence
  Synthetic oligonucleotide
aaggcgacccacgggacaggatcgtagtat

SEQ ID NO: 35464 - DNA, 30 bp, Artificial Sequence
  Synthetic oligonucleotide
tagagcgcaaacgagggctacctaaggtat

SEQ ID NO: 35465 - DNA, 30 bp, Artificial Sequence
  Synthetic oligonucleotide
gggaagggtcgtagtggtaatacgatgtat

SEQ ID NO: 35466 - DNA, 30 bp, Artificial Sequence
  Synthetic oligonucleotide
catgaatcagaaaagaactagggcttgtat

SEQ ID NO: 35467 - DNA, 30 bp, Artificial Sequence
  Synthetic oligonucleotide
tgctaaggtataagggagtcatcgaattat

SEQ ID NO: 35468 - DNA, 30 bp, Artificial Sequence
  Synthetic oligonucleotide
agcgacggatcggctaactcgtcatcttat

SEQ ID NO: 35469 - DNA, 30 bp, Artificial Sequence
  Synthetic oligonucleotide
ccataaaagtgggctaaagcaactcgttat

SEQ ID NO: 35470 - DNA, 30 bp, Artificial Sequence
  Synthetic oligonucleotide
aaagcgggaaatgaaactgaggacgaaact

SEQ ID NO: 35471 - DNA, 30 bp, Artificial Sequence
  Synthetic oligonucleotide
gcgtactaaagaatatgtatgtcaacaact

SEQ ID NO: 35472 - DNA, 30 bp, Artificial Sequence
  Synthetic oligonucleotide
tgtggacttagccaggcaccatcggcaact

SEQ ID NO: 35473 - DNA, 30 bp, Artificial Sequence
  Synthetic oligonucleotide
tgatagctggatgaaaagatagagtcaact

SEQ ID NO: 35474 - DNA, 30 bp, Artificial Sequence
  Synthetic oligonucleotide
tggcgaagggactcatagtgtgattcaact

SEQ ID NO: 35475 - DNA, 30 bp, Artificial Sequence
  Synthetic oligonucleotide
tggtagtagaaacagtgtggaaaacgaact

SEQ ID NO: 35476 - DNA, 30 bp, Artificial Sequence
  Synthetic oligonucleotide
ccgatcgcatactcgccgaacccaggaact

SEQ ID NO: 35477 - DNA, 30 bp, Artificial Sequence
  Synthetic oligonucleotide
aaggggcgaagacggaagacagaggtaact

SEQ ID NO: 35478 - DNA, 30 bp, Artificial Sequence
  Synthetic oligonucleotide
ctgggacagaaaattagtagacatgacact

SEQ ID NO: 35479 - DNA, 30 bp, Artificial Sequence
  Synthetic oligonucleotide
cacgaggaaacacattcattggcttacact

SEQ ID NO: 35480 - DNA, 30 bp, Artificial Sequence
  Synthetic oligonucleotide
aggcgaacaagcgggactcggccacccact

SEQ ID NO: 35481 - DNA, 30 bp, Artificial Sequence
  Synthetic oligonucleotide
agagggacgcccggattaacgtctgccact

SEQ ID NO: 35482 - DNA, 30 bp, Artificial Sequence
  Synthetic oligonucleotide
ggacgctgaaggggagtaagaagtagcact

SEQ ID NO: 35483 - DNA, 30 bp, Artificial Sequence
  Synthetic oligonucleotide
aggtggaagacatcctactaaggcctcact

SEQ ID NO: 35484 - DNA, 30 bp, Artificial Sequence
  Synthetic oligonucleotide
gcaggtgagtaagatgactatcgcgagact

SEQ ID NO: 35485 - DNA, 30 bp, Artificial Sequence
  Synthetic oligonucleotide
cgttaataagacttgttggaggattagact

SEQ ID NO: 35486 - DNA, 30 bp, Artificial Sequence
  Synthetic oligonucleotide
cacaagggcggcacaacgtagtaaccgact

SEQ ID NO: 35487 - DNA, 30 bp, Artificial Sequence
  Synthetic oligonucleotide
gcgtggacgatgaatagcgaaaacgcgact

SEQ ID NO: 35488 - DNA, 30 bp, Artificial Sequence
  Synthetic oligonucleotide
gcaggtaggagaactcatatgttgaggact

SEQ ID NO: 35489 - DNA, 30 bp, Artificial Sequence
  Synthetic oligonucleotide
atgccacagcttgcacagaaacaggggact

SEQ ID NO: 35490 - DNA, 30 bp, Artificial Sequence
  Synthetic oligonucleotide
aacagatcacctcagcagcacacatggact

SEQ ID NO: 35491 - DNA, 30 bp, Artificial Sequence
  Synthetic oligonucleotide
cggggaaggaggaatgcgtgagcgtggact

SEQ ID NO: 35492 - DNA, 30 bp, Artificial Sequence
  Synthetic oligonucleotide
tatcagggcaggggacaactaagactgact

SEQ ID NO: 35493 - DNA, 30 bp, Artificial Sequence
  Synthetic oligonucleotide
aaggccttcgtgtgttagagaagtgtgact

SEQ ID NO: 35494 - DNA, 30 bp, Artificial Sequence
  Synthetic oligonucleotide
actgcgggaaacaagttccatggtgtgact

SEQ ID NO: 35495 - DNA, 30 bp, Artificial Sequence
  Synthetic oligonucleotide
gagcatccgataaagagatcaggagatact

SEQ ID NO: 35496 - DNA, 30 bp, Artificial Sequence
  Synthetic oligonucleotide
cctgtgagaggttcaacgagggtggatact

SEQ ID NO: 35497 - DNA, 30 bp, Artificial Sequence
  Synthetic oligonucleotide
agaatgggaggaaggcgtaaatgggctact

SEQ ID NO: 35498 - DNA, 30 bp, Artificial Sequence
  Synthetic oligonucleotide
cgtaagtgcgtaagcaccaagcatagtact

SEQ ID NO: 35499 - DNA, 30 bp, Artificial Sequence
  Synthetic oligonucleotide
acgtgcggatctcgactccagaaagttact

SEQ ID NO: 35500 - DNA, 30 bp, Artificial Sequence
  Synthetic oligonucleotide
caacgatcgactcgtagaaatggataacct

SEQ ID NO: 35501 - DNA, 30 bp, Artificial Sequence
  Synthetic oligonucleotide
tcgtagcaacagtgaccagaccttacccct

SEQ ID NO: 35502 - DNA, 30 bp, Artificial Sequence
  Synthetic oligonucleotide
gaccggacgtccgaaaaaacactaaagcct

SEQ ID NO: 35503 - DNA, 30 bp, Artificial Sequence
  Synthetic oligonucleotide
gcgagactgtagaccaaaaagcttaagcct

SEQ ID NO: 35504 - DNA, 30 bp, Artificial Sequence
  Synthetic oligonucleotide
gggggaacactcaagagtgaattccagcct

SEQ ID NO: 35505 - DNA, 30 bp, Artificial Sequence
  Synthetic oligonucleotide
caggaactatgaaaaattcgaggtccgcct

SEQ ID NO: 35506 - DNA, 30 bp, Artificial Sequence
  Synthetic oligonucleotide
ggcgaacatccggaagtcacagcgttgcct

SEQ ID NO: 35507 - DNA, 30 bp, Artificial Sequence
  Synthetic oligonucleotide
agcacagctgatcaacttgagtggcatcct

SEQ ID NO: 35508 - DNA, 30 bp, Artificial Sequence
  Synthetic oligonucleotide
tcgagggactagtatgcacttccaagtcct

SEQ ID NO: 35509 - DNA, 30 bp, Artificial Sequence
  Synthetic oligonucleotide
gttgtgagcgaacgagacaaagacattcct

SEQ ID NO: 35510 - DNA, 30 bp, Artificial Sequence
  Synthetic oligonucleotide
tcgagcgccaaccaagatgaggtctcagct

SEQ ID NO: 35511 - DNA, 30 bp, Artificial Sequence
  Synthetic oligonucleotide
tgaggagttcaggacataggttagtcagct

SEQ ID NO: 35512 - DNA, 30 bp, Artificial Sequence
  Synthetic oligonucleotide
caggtagtacaggttgctcaaagtagagct

SEQ ID NO: 35513 - DNA, 30 bp, Artificial Sequence
  Synthetic oligonucleotide
agagcattgactgccaaaggtaaccgagct

SEQ ID NO: 35514 - DNA, 30 bp, Artificial Sequence
  Synthetic oligonucleotide
gacagtccgtagcgtatcggaaagtgagct

SEQ ID NO: 35515 - DNA, 30 bp, Artificial Sequence
  Synthetic oligonucleotide
ggtggacaaagggagcaaaagttcctagct

SEQ ID NO: 35516 - DNA, 37 bp, Artificial Sequence
  Synthetic oligonucleotide
tcgctgatcgagtaactcgtctattgcccatgtagct

SEQ ID NO: 35517 - DNA, 30 bp, Artificial Sequence
  Synthetic oligonucleotide
agatggctgccagggaaatgcaaatacgct

SEQ ID NO: 35518 - DNA, 30 bp, Artificial Sequence
  Synthetic oligonucleotide
cgagacaattgtattcatatgtgatccgct

SEQ ID NO: 35519 - DNA, 30 bp, Artificial Sequence
  Synthetic oligonucleotide
agcgatccaagggtaagcaagagcatcgct

SEQ ID NO: 35520 - DNA, 30 bp, Artificial Sequence
  Synthetic oligonucleotide
tagaactgacgagaataaacacagtaggct

SEQ ID NO: 35521 - DNA, 30 bp, Artificial Sequence
  Synthetic oligonucleotide
ataaggaaaacgagtatgacaatacgggct

SEQ ID NO: 35522 - DNA, 30 bp, Artificial Sequence
  Synthetic oligonucleotide
aaaagagagcgcacttcaccgaccatggct

SEQ ID NO: 35523 - DNA, 30 bp, Artificial Sequence
  Synthetic oligonucleotide
cgtgctacgtatagatcactaacgctggct

SEQ ID NO: 35524 - DNA, 30 bp, Artificial Sequence
  Synthetic oligonucleotide
cacaaaataggattggcgacattcgtggct

SEQ ID NO: 35525 - DNA, 30 bp, Artificial Sequence
  Synthetic oligonucleotide
ggatggatgatgtccgataggagtcgtgct

SEQ ID NO: 35526 - DNA, 30 bp, Artificial Sequence
  Synthetic oligonucleotide
gcggaagcataaaacagagcgtaagttgct

SEQ ID NO: 35527 - DNA, 30 bp, Artificial Sequence
  Synthetic oligonucleotide
agtggtgagctactaaacgcaatgcaatct

SEQ ID NO: 35528 - DNA, 30 bp, Artificial Sequence
  Synthetic oligonucleotide
cgtacaggataaacagaagtaaaagcatct

SEQ ID NO: 35529 - DNA, 30 bp, Artificial Sequence
  Synthetic oligonucleotide
tctatggcgaaaaactacgcaagcgcatct

SEQ ID NO: 35530 - DNA, 30 bp, Artificial Sequence
  Synthetic oligonucleotide
atgctaagggtggatgatcgagcacgatct

SEQ ID NO: 35531 - DNA, 30 bp, Artificial Sequence
  Synthetic oligonucleotide
ggcgacatagtgggcagatgagttctatct

SEQ ID NO: 35532 - DNA, 30 bp, Artificial Sequence
  Synthetic oligonucleotide
gtaggataatgtccagacagcactaactct

SEQ ID NO: 35533 - DNA, 30 bp, Artificial Sequence
  Synthetic oligonucleotide
agagacccccaagcccagatggatcactct

SEQ ID NO: 35534 - DNA, 30 bp, Artificial Sequence
  Synthetic oligonucleotide
aggcaatgaaaatcgttgctgctcgactct

SEQ ID NO: 35535 - DNA, 30 bp, Artificial Sequence
  Synthetic oligonucleotide
tgcaaccgggaaggacgtcggatagcctct

SEQ ID NO: 35536 - DNA, 30 bp, Artificial Sequence
  Synthetic oligonucleotide
aagcgaatggacgaaacacacggatcctct

SEQ ID NO: 35537 - DNA, 30 bp, Artificial Sequence
  Synthetic oligonucleotide
acgtcattaatgaaggaaaagcaaagctct

SEQ ID NO: 35538 - DNA, 30 bp, Artificial Sequence
  Synthetic oligonucleotide
gcgaaagcgtataaagcgtcgaaggagtct

SEQ ID NO: 35539 - DNA, 30 bp, Artificial Sequence
  Synthetic oligonucleotide
aagaacggatcaatttcaacactggagtct

SEQ ID NO: 35540 - DNA, 30 bp, Artificial Sequence
  Synthetic oligonucleotide
agggtgatgaattgtggggaagatgagtct

SEQ ID NO: 35541 - DNA, 30 bp, Artificial Sequence
  Synthetic oligonucleotide
aaggaatcgaggaagtgctcggaaaattct

SEQ ID NO: 35542 - DNA, 30 bp, Artificial Sequence
  Synthetic oligonucleotide
cgctagggtcaaggggggagtacgtgttct

SEQ ID NO: 35543 - DNA, 30 bp, Artificial Sequence
  Synthetic oligonucleotide
cgaacggtcatacccggaggacgactttct

SEQ ID NO: 35544 - DNA, 30 bp, Artificial Sequence
  Synthetic oligonucleotide
ctgactgggattagaaccatcgtccaaagt

SEQ ID NO: 35545 - DNA, 30 bp, Artificial Sequence
  Synthetic oligonucleotide
acgtggggattagagacgctgtaggaaagt

SEQ ID NO: 35546 - DNA, 30 bp, Artificial Sequence
  Synthetic oligonucleotide
cgatgggcaaacgtatcatccaatgcaagt

SEQ ID NO: 35547 - DNA, 30 bp, Artificial Sequence
  Synthetic oligonucleotide
gcctcacgcgacagccacaagcaatgaagt

SEQ ID NO: 35548 - DNA, 30 bp, Artificial Sequence
  Synthetic oligonucleotide
tcggggcagagagttggatgtcggataagt

SEQ ID NO: 35549 - DNA, 30 bp, Artificial Sequence
  Synthetic oligonucleotide
gaaggaccactagctggagtataccacagt

SEQ ID NO: 35550 - DNA, 30 bp, Artificial Sequence
  Synthetic oligonucleotide
cgcgtaagccgtgaaccgttcgaatccagt

SEQ ID NO: 35551 - DNA, 30 bp, Artificial Sequence
  Synthetic oligonucleotide
caaggtatagcgcataataagctggtcagt

SEQ ID NO: 35552 - DNA, 30 bp, Artificial Sequence
  Synthetic oligonucleotide
atgtgcatagccacacccggtcggcagagt

SEQ ID NO: 35553 - DNA, 30 bp, Artificial Sequence
  Synthetic oligonucleotide
cggacgggtatcactgtgttttatcagagt

SEQ ID NO: 35554 - DNA, 30 bp, Artificial Sequence
  Synthetic oligonucleotide
ccattcaggttgaagttgcccttcgagagt

SEQ ID NO: 35555 - DNA, 30 bp, Artificial Sequence
  Synthetic oligonucleotide
agaaagaggacataaggtgcatttgagagt

SEQ ID NO: 35556 - DNA, 30 bp, Artificial Sequence
  Synthetic oligonucleotide
taggactaacgactatcggttatcacgagt

SEQ ID NO: 35557 - DNA, 30 bp, Artificial Sequence
  Synthetic oligonucleotide
cctcgggacgtcggacgggaggtttcgagt

SEQ ID NO: 35558 - DNA, 30 bp, Artificial Sequence
  Synthetic oligonucleotide
agaggatcgcacgtgccacagcgaaggagt

SEQ ID NO: 35559 - DNA, 30 bp, Artificial Sequence
  Synthetic oligonucleotide
agccaacttcaagtgacaactaaacggagt

SEQ ID NO: 35560 - DNA, 30 bp, Artificial Sequence
  Synthetic oligonucleotide
aacaaggcgtcttagcgaataaggtggagt

SEQ ID NO: 35561 - DNA, 30 bp, Artificial Sequence
  Synthetic oligonucleotide
gcgggacggttggctaatgtgaccgtgagt

SEQ ID NO: 35562 - DNA, 30 bp, Artificial Sequence
  Synthetic oligonucleotide
gatagggtggtcataaacatggtggtgagt

SEQ ID NO: 35563 - DNA, 30 bp, Artificial Sequence
  Synthetic oligonucleotide
gcgttgagaatgtataggaactatgtgagt

SEQ ID NO: 35564 - DNA, 30 bp, Artificial Sequence
  Synthetic oligonucleotide
ctaggaccatcaaccctggaacccactagt

SEQ ID NO: 35565 - DNA, 30 bp, Artificial Sequence
  Synthetic oligonucleotide
gcgtgaatagtagaatggagttaccctagt

SEQ ID NO: 35566 - DNA, 30 bp, Artificial Sequence
  Synthetic oligonucleotide
tgggaaacccttcgacagaggggacgtagt

SEQ ID NO: 35567 - DNA, 30 bp, Artificial Sequence
  Synthetic oligonucleotide
taaaggaatacagcacggttgggccgtagt

SEQ ID NO: 35568 - DNA, 30 bp, Artificial Sequence
  Synthetic oligonucleotide
aagggcataaacgaggtaaagacatgtagt

SEQ ID NO: 35569 - DNA, 30 bp, Artificial Sequence
  Synthetic oligonucleotide
gtaacaagcgggacccgagcgacgacacgt

SEQ ID NO: 35570 - DNA, 30 bp, Artificial Sequence
  Synthetic oligonucleotide
tagaacaagaaacaaattcgggcgaaccgt

SEQ ID NO: 35571 - DNA, 30 bp, Artificial Sequence
  Synthetic oligonucleotide
tggagttgggcatcagaagacatacaccgt

SEQ ID NO: 35572 - DNA, 30 bp, Artificial Sequence
  Synthetic oligonucleotide
agaggcattacagggcatgtgacccaccgt

SEQ ID NO: 35573 - DNA, 30 bp, Artificial Sequence
  Synthetic oligonucleotide
ggcccgtaagtagggaaagaagcaacccgt

SEQ ID NO: 35574 - DNA, 30 bp, Artificial Sequence
  Synthetic oligonucleotide
acgatgggaggcgtgactacaaactcccgt

SEQ ID NO: 35575 - DNA, 30 bp, Artificial Sequence
  Synthetic oligonucleotide
tagtaacagcatcacgaacaaggcggccgt

SEQ ID NO: 35576 - DNA, 30 bp, Artificial Sequence
  Synthetic oligonucleotide
gccggaaggtgaagaagccaacgatgccgt

SEQ ID NO: 35577 - DNA, 30 bp, Artificial Sequence
  Synthetic oligonucleotide
ggcgaaagaggtccgacgagcccgtgccgt

SEQ ID NO: 35578 - DNA, 30 bp, Artificial Sequence
  Synthetic oligonucleotide
gggcgtattgcggctcgaaagcggaagcgt

SEQ ID NO: 35579 - DNA, 30 bp, Artificial Sequence
  Synthetic oligonucleotide
cattgctaatgtgacctaagtgaagagcgt

SEQ ID NO: 35580 - DNA, 30 bp, Artificial Sequence
  Synthetic oligonucleotide
ttaccggggaaagtgcaccaggtagagcgt

SEQ ID NO: 35581 - DNA, 30 bp, Artificial Sequence
  Synthetic oligonucleotide
aatgcattggagaacgggtaagatgagcgt

SEQ ID NO: 35582 - DNA, 30 bp, Artificial Sequence
  Synthetic oligonucleotide
acgtgatgatatctataggggaccacgcgt

SEQ ID NO: 35583 - DNA, 30 bp, Artificial Sequence
  Synthetic oligonucleotide
gcttggtttactgatacgaaaagagcgcgt

SEQ ID NO: 35584 - DNA, 30 bp, Artificial Sequence
  Synthetic oligonucleotide
agacatacttggtaaaccggaagtgggcgt

SEQ ID NO: 35585 - DNA, 30 bp, Artificial Sequence
  Synthetic oligonucleotide
tctcggtagtctctcggtccatcgtggcgt

SEQ ID NO: 35586 - DNA, 30 bp, Artificial Sequence
  Synthetic oligonucleotide
agaagggaacggaatatattcacaatgcgt

SEQ ID NO: 35587 - DNA, 30 bp, Artificial Sequence
  Synthetic oligonucleotide
acagtcggctggctgcgaggaacattgcgt

SEQ ID NO: 35588 - DNA, 30 bp, Artificial Sequence
  Synthetic oligonucleotide
gggtgcctgagtgcaatcggacagcctcgt

SEQ ID NO: 35589 - DNA, 30 bp, Artificial Sequence
  Synthetic oligonucleotide
cgctgtcgaaagtaggcaatgtatcctcgt

SEQ ID NO: 35590 - DNA, 30 bp, Artificial Sequence
  Synthetic oligonucleotide
gtatatagcgccaaaataggcgagggtcgt

SEQ ID NO: 35591 - DNA, 30 bp, Artificial Sequence
  Synthetic oligonucleotide
tgcaatgagtaggtgttcaagtactgtcgt

SEQ ID NO: 35592 - DNA, 30 bp, Artificial Sequence
  Synthetic oligonucleotide
ggacccgacattcccgtacaaatcaaaggt

SEQ ID NO: 35593 - DNA, 30 bp, Artificial Sequence
  Synthetic oligonucleotide
gtcgcacgtcaggggataatgggagaaggt

SEQ ID NO: 35594 - DNA, 30 bp, Artificial Sequence
  Synthetic oligonucleotide
gctaagaaaacggtctatcatactgaaggt

SEQ ID NO: 35595 - DNA, 30 bp, Artificial Sequence
  Synthetic oligonucleotide
ggccgattagcgtggaaaattatgtaaggt

SEQ ID NO: 35596 - DNA, 30 bp, Artificial Sequence
  Synthetic oligonucleotide
atagaaagccataacgtccgcgggtcaggt

SEQ ID NO: 35597 - DNA, 30 bp, Artificial Sequence
  Synthetic oligonucleotide
tctgagccaggccagttcgaaagcataggt

SEQ ID NO: 35598 - DNA, 30 bp, Artificial Sequence
  Synthetic oligonucleotide
acggcagataacacaatcctgtgcctaggt

SEQ ID NO: 35599 - DNA, 30 bp, Artificial Sequence
  Synthetic oligonucleotide
ggctggactgtggtaagacgcgaagtaggt

SEQ ID NO: 35600 - DNA, 30 bp, Artificial Sequence
  Synthetic oligonucleotide
cgtcgataacgaggatcagtcctattaggt

SEQ ID NO: 35601 - DNA, 30 bp, Artificial Sequence
  Synthetic oligonucleotide
gatcaatgccaacagaaaacgaagtccggt

SEQ ID NO: 35602 - DNA, 30 bp, Artificial Sequence
  Synthetic oligonucleotide
agaaaacatgcgattcgcgtgtaaagcggt

SEQ ID NO: 35603 - DNA, 30 bp, Artificial Sequence
  Synthetic oligonucleotide
cacgttagcggtagaatgtgaagattcggt

SEQ ID NO: 35604 - DNA, 30 bp, Artificial Sequence
  Synthetic oligonucleotide
acggagcgcggtcatgtgtcgatgtagggt

SEQ ID NO: 35605 - DNA, 30 bp, Artificial Sequence
  Synthetic oligonucleotide
acgtcggaatacgtatcaattggttagggt

SEQ ID NO: 35606 - DNA, 30 bp, Artificial Sequence
  Synthetic oligonucleotide
aacaagtagaagcaaactgttcgaccgggt

SEQ ID NO: 35607 - DNA, 30 bp, Artificial Sequence
  Synthetic oligonucleotide
aacgtgagatgcgaacgtcaagtgaggggt

SEQ ID NO: 35608 - DNA, 30 bp, Artificial Sequence
  Synthetic oligonucleotide
gggggaacggttcaataccaacatcggggt

SEQ ID NO: 35609 - DNA, 30 bp, Artificial Sequence
  Synthetic oligonucleotide
acaggtgcaaactattcgagaatactgggt

SEQ ID NO: 35610 - DNA, 30 bp, Artificial Sequence
  Synthetic oligonucleotide
taggacagtaccatcatttcccatcctggt

SEQ ID NO: 35611 - DNA, 30 bp, Artificial Sequence
  Synthetic oligonucleotide
agtgcgaggaagacctgattatgccgtggt

SEQ ID NO: 35612 - DNA, 30 bp, Artificial Sequence
  Synthetic oligonucleotide
acggagtgcgcttgagtcgagtgaattggt

SEQ ID NO: 35613 - DNA, 30 bp, Artificial Sequence
  Synthetic oligonucleotide
agagcaaaagggaaacgacgcgtagttggt

SEQ ID NO: 35614 - DNA, 30 bp, Artificial Sequence
  Synthetic oligonucleotide
gggagtatgtgaagatgatgatgaaaatgt

SEQ ID NO: 35615 - DNA, 30 bp, Artificial Sequence
  Synthetic oligonucleotide
ctacacgggagcgagccggcgaacaaatgt

SEQ ID NO: 35616 - DNA, 30 bp, Artificial Sequence
  Synthetic oligonucleotide
tgacatcgcctacaaaggaagttacaatgt

SEQ ID NO: 35617 - DNA, 30 bp, Artificial Sequence
  Synthetic oligonucleotide
acgcacaagctagacatctcccatacatgt

SEQ ID NO: 35618 - DNA, 30 bp, Artificial Sequence
  Synthetic oligonucleotide
acagcgactggtgatacgagaatagcatgt

SEQ ID NO: 35619 - DNA, 30 bp, Artificial Sequence
  Synthetic oligonucleotide
ccggacggagggcgacctgtaatcagatgt

SEQ ID NO: 35620 - DNA, 30 bp, Artificial Sequence
  Synthetic oligonucleotide
ggagccaatcggacgagagtagctcgatgt

SEQ ID NO: 35621 - DNA, 30 bp, Artificial Sequence
  Synthetic oligonucleotide
ggggagctgagactcggaaaagagggatgt

SEQ ID NO: 35622 - DNA, 30 bp, Artificial Sequence
  Synthetic oligonucleotide
gaacgagccagtcggaataatgcgcactgt

SEQ ID NO: 35623 - DNA, 30 bp, Artificial Sequence
  Synthetic oligonucleotide
gcaagtggaagagatggcgcaccagactgt

SEQ ID NO: 35624 - DNA, 30 bp, Artificial Sequence
  Synthetic oligonucleotide
gcgagaggtcagactttgggtagcgcctgt

SEQ ID NO: 35625 - DNA, 30 bp, Artificial Sequence
  Synthetic oligonucleotide
acaaggagtagtccgggaataacgtcctgt

SEQ ID NO: 35626 - DNA, 30 bp, Artificial Sequence
  Synthetic oligonucleotide
agaaacgggatgaacctgaaacaacgctgt

SEQ ID NO: 35627 - DNA, 30 bp, Artificial Sequence
  Synthetic oligonucleotide
tgcaatcatggcaaaagataccggtgctgt

SEQ ID NO: 35628 - DNA, 30 bp, Artificial Sequence
  Synthetic oligonucleotide
acggaggcatgaaccaccagcgacctctgt

SEQ ID NO: 35629 - DNA, 30 bp, Artificial Sequence
  Synthetic oligonucleotide
agggtatcatagctatggccaaaccagtgt

SEQ ID NO: 35630 - DNA, 30 bp, Artificial Sequence
  Synthetic oligonucleotide
tgaacaaccagaacgggagtatgagagtgt

SEQ ID NO: 35631 - DNA, 30 bp, Artificial Sequence
  Synthetic oligonucleotide
ggggagtgaccgagagcaaaggacacgtgt

SEQ ID NO: 35632 - DNA, 30 bp, Artificial Sequence
  Synthetic oligonucleotide
tggactcgaaggaggaactaatgaaggtgt

SEQ ID NO: 35633 - DNA, 30 bp, Artificial Sequence
  Synthetic oligonucleotide
gggcccacatggcacttaaagatcaggtgt

SEQ ID NO: 35634 - DNA, 30 bp, Artificial Sequence
  Synthetic oligonucleotide
gcaacggatgaaagaacgggacagcggtgt

SEQ ID NO: 35635 - DNA, 30 bp, Artificial Sequence
  Synthetic oligonucleotide
aacgtatcgacaaactaagctgccgggtgt

SEQ ID NO: 35636 - DNA, 30 bp, Artificial Sequence
  Synthetic oligonucleotide
cgaatccggtacaaaaggtcaactgtgtgt

SEQ ID NO: 35637 - DNA, 30 bp, Artificial Sequence
  Synthetic oligonucleotide
acggtaaacataggcccacgagcacattgt

SEQ ID NO: 35638 - DNA, 30 bp, Artificial Sequence
  Synthetic oligonucleotide
cgcaaaattgggtagcggatcgagtattgt

SEQ ID NO: 35639 - DNA, 30 bp, Artificial Sequence
  Synthetic oligonucleotide
accagaataggagcagcgcaatattgttgt

SEQ ID NO: 35640 - DNA, 31 bp, Artificial Sequence
  Synthetic oligonucleotide
aacccgcgggaggcgacgtatacgcccaatt

SEQ ID NO: 35641 - DNA, 30 bp, Artificial Sequence
  Synthetic oligonucleotide
cgttgcgttgtgagcttgcagtttggaatt

SEQ ID NO: 35642 - DNA, 30 bp, Artificial Sequence
  Synthetic oligonucleotide
gagggtggagagtagaactttacgataatt

SEQ ID NO: 35643 - DNA, 30 bp, Artificial Sequence
  Synthetic oligonucleotide
acgaagtgtgccttgataaagagcgtaatt

SEQ ID NO: 35644 - DNA, 30 bp, Artificial Sequence
  Synthetic oligonucleotide
ctggaagcgacaacgttgaaacccgacatt

SEQ ID NO: 35645 - DNA, 30 bp, Artificial Sequence
  Synthetic oligonucleotide
agatgggcgattaacgacaaatagagcatt

SEQ ID NO: 35646 - DNA, 30 bp, Artificial Sequence
  Synthetic oligonucleotide
aagaccattgagagtacctaaggctgcatt

SEQ ID NO: 35647 - DNA, 30 bp, Artificial Sequence
  Synthetic oligonucleotide
ggtagtatcctggcaatagatgccgtcatt

SEQ ID NO: 35648 - DNA, 30 bp, Artificial Sequence
  Synthetic oligonucleotide
cgggggaatcggcctcaattaactaagatt

SEQ ID NO: 35649 - DNA, 30 bp, Artificial Sequence
  Synthetic oligonucleotide
agctggcggcaccgacaaatatggtagatt

SEQ ID NO: 35650 - DNA, 30 bp, Artificial Sequence
  Synthetic oligonucleotide
atagaggcgaacctagatagacagtcgatt

SEQ ID NO: 35651 - DNA, 30 bp, Artificial Sequence
  Synthetic oligonucleotide
aagtaaaattggcttaaagggcaaaggatt

SEQ ID NO: 35652 - DNA, 30 bp, Artificial Sequence
  Synthetic oligonucleotide
agtgaaaagcggcacctatgtagaaggatt

SEQ ID NO: 35653 - DNA, 30 bp, Artificial Sequence
  Synthetic oligonucleotide
tcaagatgggcactgttaggtctacggatt

SEQ ID NO: 35654 - DNA, 30 bp, Artificial Sequence
  Synthetic oligonucleotide
acgtccccgacaggagagagcaaagggatt

SEQ ID NO: 35655 - DNA, 31 bp, Artificial Sequence
  Synthetic oligonucleotide
cgccaggacgtgactgcctgctccttggatt

SEQ ID NO: 35656 - DNA, 30 bp, Artificial Sequence
  Synthetic oligonucleotide
ataggggacggaaaagacagtatgatgatt

SEQ ID NO: 35657 - DNA, 30 bp, Artificial Sequence
  Synthetic oligonucleotide
acaggcgcacgggtagagttaaacttgatt

SEQ ID NO: 35658 - DNA, 30 bp, Artificial Sequence
  Synthetic oligonucleotide
tacaagggaagcagatctcgaacagttatt

SEQ ID NO: 35659 - DNA, 30 bp, Artificial Sequence
  Synthetic oligonucleotide
aggtggattgtgtaagataaatttagactt

SEQ ID NO: 35660 - DNA, 30 bp, Artificial Sequence
  Synthetic oligonucleotide
atcttgattcccagagcgccgcgagtactt

SEQ ID NO: 35661 - DNA, 30 bp, Artificial Sequence
  Synthetic oligonucleotide
cgagcgtgctgactaaacgtcacattactt

SEQ ID NO: 35662 - DNA, 30 bp, Artificial Sequence
  Synthetic oligonucleotide
ccgatcgacgaaaagactaaaggaaagctt

SEQ ID NO: 35663 - DNA, 30 bp, Artificial Sequence
  Synthetic oligonucleotide
acatgggagatgtaagacagaccgaggctt

SEQ ID NO: 35664 - DNA, 30 bp, Artificial Sequence
  Synthetic oligonucleotide
agcaatgaacaaactgacgagtggaggctt

SEQ ID NO: 35665 - DNA, 30 bp, Artificial Sequence
  Synthetic oligonucleotide
ccagggggccgcggataggtgcccaaagtt

SEQ ID NO: 35666 - DNA, 30 bp, Artificial Sequence
  Synthetic oligonucleotide
cggatgctaacccgtaggtcacatgcagtt

SEQ ID NO: 35667 - DNA, 30 bp, Artificial Sequence
  Synthetic oligonucleotide
acaacggttaagcttacctagtagtcagtt

SEQ ID NO: 35668 - DNA, 30 bp, Artificial Sequence
  Synthetic oligonucleotide
tgaggaccagtaacatgagatataagagtt

SEQ ID NO: 35669 - DNA, 30 bp, Artificial Sequence
  Synthetic oligonucleotide
ccattcgaccaggaatggagtggtagagtt

SEQ ID NO: 35670 - DNA, 29 bp, Artificial Sequence
  Synthetic oligonucleotide
agtaaccaagtaagtgacatgtgcacgtt

SEQ ID NO: 35671 - DNA, 30 bp, Artificial Sequence
  Synthetic oligonucleotide
tgtagaagttaaaccaaacacgactgcgtt

SEQ ID NO: 35672 - DNA, 30 bp, Artificial Sequence
  Synthetic oligonucleotide
gggaaaaacttgacgtggagagatgaggtt

SEQ ID NO: 35673 - DNA, 30 bp, Artificial Sequence
  Synthetic oligonucleotide
agaaacagtaaaaatggatcgagaccggtt

SEQ ID NO: 35674 - DNA, 30 bp, Artificial Sequence
  Synthetic oligonucleotide
acatgggaagattaaaaatggtgatcggtt

SEQ ID NO: 35675 - DNA, 30 bp, Artificial Sequence
  Synthetic oligonucleotide
cagaagagatcatgcgatggcctaagggtt

SEQ ID NO: 35676 - DNA, 30 bp, Artificial Sequence
  Synthetic oligonucleotide
agggtggcagtgatgagtcccgccatggtt

SEQ ID NO: 35677 - DNA, 30 bp, Artificial Sequence
  Synthetic oligonucleotide
tcgagatcaacgtctcatgagtggatggtt

SEQ ID NO: 35678 - DNA, 30 bp, Artificial Sequence
  Synthetic oligonucleotide
tgatgtgcggttaagcaagatactgatgtt

SEQ ID NO: 35679 - DNA, 30 bp, Artificial Sequence
  Synthetic oligonucleotide
acggtaagcggggggcgtctgctgcctgtt

SEQ ID NO: 35680 - DNA, 30 bp, Artificial Sequence
  Synthetic oligonucleotide
gggagggcgtgtaggtctaaatgcagtgtt

SEQ ID NO: 35681 - DNA, 30 bp, Artificial Sequence
  Synthetic oligonucleotide
acggcgtgtcaaaaacaatgagctcgtgtt

SEQ ID NO: 35682 - DNA, 30 bp, Artificial Sequence
  Synthetic oligonucleotide
agagcaataaggtaagtaggggtcgaattt

SEQ ID NO: 35683 - DNA, 30 bp, Artificial Sequence
  Synthetic oligonucleotide
taagggtggctgggggtttaaacacgattt

SEQ ID NO: 35684 - DNA, 30 bp, Artificial Sequence
  Synthetic oligonucleotide
gggcctatatagtagatcgatcgtcgattt

SEQ ID NO: 35685 - DNA, 30 bp, Artificial Sequence
  Synthetic oligonucleotide
actacgtgaaccacagtagcagacatattt

SEQ ID NO: 35686 - DNA, 30 bp, Artificial Sequence
  Synthetic oligonucleotide
taaggccgagtgggaagtcgagtgaccttt

SEQ ID NO: 35687 - DNA, 30 bp, Artificial Sequence
  Synthetic oligonucleotide
gacgagaaaaaggcaagatgtgaacgcttt

SEQ ID NO: 35688 - DNA, 30 bp, Artificial Sequence
  Synthetic oligonucleotide
ggacgaaatggatagccagtgagaggcttt

SEQ ID NO: 35689 - DNA, 30 bp, Artificial Sequence
  Synthetic oligonucleotide
cggatctaaattgtctcggaaaaagtcttt

SEQ ID NO: 35690 - DNA, 30 bp, Artificial Sequence
  Synthetic oligonucleotide
cctcaggcagagtcgatagaaaactagttt

SEQ ID NO: 35691 - DNA, 30 bp, Artificial Sequence
  Synthetic oligonucleotide
ggggggcaagtaacaatcaacgacgggttt

SEQ ID NO: 35692 - DNA, 30 bp, Artificial Sequence
  Synthetic oligonucleotide
cgtggcagcccgatcgggtgtgggactttt

SEQ ID NO: 35693 - DNA, 30 bp, Artificial Sequence
  Synthetic oligonucleotide
agggcaagtatcgagagagtactacctttt

SEQ ID NO: 35694 - DNA, 30 bp, Artificial Sequence
  Synthetic oligonucleotide
gaccagagacggggccgataatgtaaaaaa

SEQ ID NO: 35695 - DNA, 30 bp, Artificial Sequence
  Synthetic oligonucleotide
tcgaggtaagtaatgttctgaattgaaaaa

SEQ ID NO: 35696 - DNA, 30 bp, Artificial Sequence
  Synthetic oligonucleotide
gggagtaagagtcagtaagatacataaaaa

SEQ ID NO: 35697 - DNA, 30 bp, Artificial Sequence
  Synthetic oligonucleotide
aggcaaacggaagacgatcggcattaaaaa

SEQ ID NO: 35698 - DNA, 30 bp, Artificial Sequence
  Synthetic oligonucleotide
gcgaagctgaagggtgattagaccacaaaa

SEQ ID NO: 35699 - DNA, 30 bp, Artificial Sequence
  Synthetic oligonucleotide
gacagggtgatattaccaaggctgacaaaa

SEQ ID NO: 35700 - DNA, 30 bp, Artificial Sequence
  Synthetic oligonucleotide
ggcacttatcatcagagaggtaagcgaaaa

SEQ ID NO: 35701 - DNA, 30 bp, Artificial Sequence
  Synthetic oligonucleotide
tcgactgtctcgtgctaaaatgcgggaaaa

SEQ ID NO: 35702 - DNA, 30 bp, Artificial Sequence
  Synthetic oligonucleotide
cgaggaacacacatactacgtcctggaaaa

SEQ ID NO: 35703 - DNA, 30 bp, Artificial Sequence
  Synthetic oligonucleotide
gcacactgctgcaaagtaacccgtggaaaa

SEQ ID NO: 35704 - DNA, 30 bp, Artificial Sequence
  Synthetic oligonucleotide
acggaatgtgggcgtgcaacacaatgaaaa

SEQ ID NO: 35705 - DNA, 30 bp, Artificial Sequence
  Synthetic oligonucleotide
tcatggcgcctactagatgggcaaaacaaa

SEQ ID NO: 35706 - DNA, 30 bp, Artificial Sequence
  Synthetic oligonucleotide
aggggagaacctacgcgtgataataacaaa

SEQ ID NO: 35707 - DNA, 30 bp, Artificial Sequence
  Synthetic oligonucleotide
gacgtggagtgcacaacaaataattacaaa

SEQ ID NO: 35708 - DNA, 30 bp, Artificial Sequence
  Synthetic oligonucleotide
cgggtaagctgaagggggtgtaattacaaa

SEQ ID NO: 35709 - DNA, 30 bp, Artificial Sequence
  Synthetic oligonucleotide
actggaacggggttgcaagcctcttacaaa

SEQ ID NO: 35710 - DNA, 30 bp, Artificial Sequence
  Synthetic oligonucleotide
cgtgcaagaagaaaaatatacggttacaaa

SEQ ID NO: 35711 - DNA, 30 bp, Artificial Sequence
  Synthetic oligonucleotide
aagaagataagggtgcaagggacggccaaa

SEQ ID NO: 35712 - DNA, 30 bp, Artificial Sequence
  Synthetic oligonucleotide
tgaaccgtaagcccaaggtggtttgccaaa

SEQ ID NO: 35713 - DNA, 30 bp, Artificial Sequence
  Synthetic oligonucleotide
cgaatcgttcaggtaggtaacgtctccaaa

SEQ ID NO: 35714 - DNA, 30 bp, Artificial Sequence
  Synthetic oligonucleotide
agtccatcagtgcaaggagctcgtggcaaa

SEQ ID NO: 35715 - DNA, 30 bp, Artificial Sequence
  Synthetic oligonucleotide
gcgaaacacaaaccgcaatgtggaatcaaa

SEQ ID NO: 35716 - DNA, 30 bp, Artificial Sequence
  Synthetic oligonucleotide
tctggagagggtgactcgtaacgtatcaaa

SEQ ID NO: 35717 - DNA, 30 bp, Artificial Sequence
  Synthetic oligonucleotide
agatgggtcgtcgtattcaaggaggtcaaa

SEQ ID NO: 35718 - DNA, 30 bp, Artificial Sequence
  Synthetic oligonucleotide
agacctagctaggggttgggcaacaagaaa

SEQ ID NO: 35719 - DNA, 30 bp, Artificial Sequence
  Synthetic oligonucleotide
ccgtacggtgggagagtttactaacagaaa

SEQ ID NO: 35720 - DNA, 30 bp, Artificial Sequence
  Synthetic oligonucleotide
gtgagaggaccggggcgtcacagccagaaa

SEQ ID NO: 35721 - DNA, 30 bp, Artificial Sequence
  Synthetic oligonucleotide
cgcgatcagaggacctctgtttgccagaaa

SEQ ID NO: 35722 - DNA, 30 bp, Artificial Sequence
  Synthetic oligonucleotide
aggcaagcgacgattaggccaccagagaaa

SEQ ID NO: 35723 - DNA, 30 bp, Artificial Sequence
  Synthetic oligonucleotide
tagctggtagcagcgcaagtatgggcgaaa

SEQ ID NO: 35724 - DNA, 30 bp, Artificial Sequence
  Synthetic oligonucleotide
agctccaattgggtatggggatgtgcgaaa

SEQ ID NO: 35725 - DNA, 30 bp, Artificial Sequence
  Synthetic oligonucleotide
cctagtatgggaggtgactctaaaaggaaa

SEQ ID NO: 35726 - DNA, 30 bp, Artificial Sequence
  Synthetic oligonucleotide
ggacatactcgttgttgaatagctgggaaa

SEQ ID NO: 35727 - DNA, 30 bp, Artificial Sequence
  Synthetic oligonucleotide
ggcggatggacgcatagagtaccgatgaaa

SEQ ID NO: 35728 - DNA, 30 bp, Artificial Sequence
  Synthetic oligonucleotide
aggataaagagctaaagagattagctgaaa

SEQ ID NO: 35729 - DNA, 30 bp, Artificial Sequence
  Synthetic oligonucleotide
gtcaacaaacacgcgcataaaaggctgaaa

SEQ ID NO: 35730 - DNA, 30 bp, Artificial Sequence
  Synthetic oligonucleotide
agcagatttggggacataggcaggctgaaa

SEQ ID NO: 35731 - DNA, 30 bp, Artificial Sequence
  Synthetic oligonucleotide
gatggacagatcagtgcgcgtggtaataaa

SEQ ID NO: 35732 - DNA, 30 bp, Artificial Sequence
  Synthetic oligonucleotide
aagggtacttcgcgaacagagttacataaa

SEQ ID NO: 35733 - DNA, 30 bp, Artificial Sequence
  Synthetic oligonucleotide
acaaaggatctggccaccatacacgataaa

SEQ ID NO: 35734 - DNA, 30 bp, Artificial Sequence
  Synthetic oligonucleotide
aatgaggccccgcaagccaatgtcgataaa

SEQ ID NO: 35735 - DNA, 30 bp, Artificial Sequence
  Synthetic oligonucleotide
agacggaggaatcgtaactgtaactataaa

SEQ ID NO: 35736 - DNA, 30 bp, Artificial Sequence
  Synthetic oligonucleotide
cctggaatacataagcaatcccgtactaaa

SEQ ID NO: 35737 - DNA, 30 bp, Artificial Sequence
  Synthetic oligonucleotide
cgagtcgatcaaaaggaatcacaaagtaaa

SEQ ID NO: 35738 - DNA, 30 bp, Artificial Sequence
  Synthetic oligonucleotide
acaagggtgccgcgggatggtctccgtaaa

SEQ ID NO: 35739 - DNA, 30 bp, Artificial Sequence
  Synthetic oligonucleotide
tacagggcatcaacatgcaggggaggtaaa

SEQ ID NO: 35740 - DNA, 30 bp, Artificial Sequence
  Synthetic oligonucleotide
ggacaacggtatctagcgaacccgggtaaa

SEQ ID NO: 35741 - DNA, 30 bp, Artificial Sequence
  Synthetic oligonucleotide
gacgagggtacacaatacactaacgttaaa

SEQ ID NO: 35742 - DNA, 30 bp, Artificial Sequence
  Synthetic oligonucleotide
gcctgcgggtagccaccagaagacaaacaa

SEQ ID NO: 35743 - DNA, 30 bp, Artificial Sequence
  Synthetic oligonucleotide
cataactaagcagggttcttcgaaacacaa

SEQ ID NO: 35744 - DNA, 30 bp, Artificial Sequence
  Synthetic oligonucleotide
atgagtagggagtggaaaacattgacacaa

SEQ ID NO: 35745 - DNA, 30 bp, Artificial Sequence
  Synthetic oligonucleotide
gccttgggggaaaagctgagtctagcacaa

SEQ ID NO: 35746 - DNA, 30 bp, Artificial Sequence
  Synthetic oligonucleotide
tagaccagcccatcagagccctagagacaa

SEQ ID NO: 35747 - DNA, 30 bp, Artificial Sequence
  Synthetic oligonucleotide
tgatgcacggaactggggacatgaggacaa

SEQ ID NO: 35748 - DNA, 30 bp, Artificial Sequence
  Synthetic oligonucleotide
tgaaatctcagagaagagcaggcgggacaa

SEQ ID NO: 35749 - DNA, 30 bp, Artificial Sequence
  Synthetic oligonucleotide
cgatagatccacgtgtttctggcgatacaa

SEQ ID NO: 35750 - DNA, 30 bp, Artificial Sequence
  Synthetic oligonucleotide
ggcattagaagagctgcaaaaagaaaccaa

SEQ ID NO: 35751 - DNA, 30 bp, Artificial Sequence
  Synthetic oligonucleotide
gagctcacgaggactgtagccgagacccaa

SEQ ID NO: 35752 - DNA, 30 bp, Artificial Sequence
  Synthetic oligonucleotide
tcgaggttagctagcgagggatcgccccaa

SEQ ID NO: 35753 - DNA, 30 bp, Artificial Sequence
  Synthetic oligonucleotide
ggttgaaaaaatactcgcttcgagagccaa

SEQ ID NO: 35754 - DNA, 30 bp, Artificial Sequence
  Synthetic oligonucleotide
gtagcggcaacacaagaggtaagacgccaa

SEQ ID NO: 35755 - DNA, 30 bp, Artificial Sequence
  Synthetic oligonucleotide
gtcaacactccaaaaagcggcctgcgccaa

SEQ ID NO: 35756 - DNA, 30 bp, Artificial Sequence
  Synthetic oligonucleotide
ccggagactgatagtgcacccccaatccaa

SEQ ID NO: 35757 - DNA, 30 bp, Artificial Sequence
  Synthetic oligonucleotide
acgccgacgtcatgtctctcgatcgtccaa

SEQ ID NO: 35758 - DNA, 30 bp, Artificial Sequence
  Synthetic oligonucleotide
actcaagaaatatggttctaacaaaagcaa

SEQ ID NO: 35759 - DNA, 30 bp, Artificial Sequence
  Synthetic oligonucleotide
acacccaaaatcgcgttacagatacagcaa

SEQ ID NO: 35760 - DNA, 30 bp, Artificial Sequence
  Synthetic oligonucleotide
cgtaaggtggaacgtaagacgcgccagcaa

SEQ ID NO: 35761 - DNA, 30 bp, Artificial Sequence
  Synthetic oligonucleotide
gggaccaataatggacagcagaagcagcaa

SEQ ID NO: 35762 - DNA, 30 bp, Artificial Sequence
  Synthetic oligonucleotide
ctgtcaccggagggagaacggcggcagcaa

SEQ ID NO: 35763 - DNA, 30 bp, Artificial Sequence
  Synthetic oligonucleotide
agagaaccgagcggtagatagagtcagcaa

SEQ ID NO: 35764 - DNA, 30 bp, Artificial Sequence
  Synthetic oligonucleotide
cggtttgttgaaaaggaagtgttatagcaa

SEQ ID NO: 35765 - DNA, 30 bp, Artificial Sequence
  Synthetic oligonucleotide
aaacggaaggccaagatagaagttccgcaa

SEQ ID NO: 35766 - DNA, 30 bp, Artificial Sequence
  Synthetic oligonucleotide
tgacatcccaacattcggggaagagcgcaa

SEQ ID NO: 35767 - DNA, 30 bp, Artificial Sequence
  Synthetic oligonucleotide
aatagtgaacaggaggatggcggatcgcaa

SEQ ID NO: 35768 - DNA, 30 bp, Artificial Sequence
  Synthetic oligonucleotide
tcaagaaccgttaactgtattgcaaggcaa

SEQ ID NO: 35769 - DNA, 30 bp, Artificial Sequence
  Synthetic oligonucleotide
ccacgacggacttgcaaaaaggtaaggcaa

SEQ ID NO: 35770 - DNA, 30 bp, Artificial Sequence
  Synthetic oligonucleotide
gtcaaacaacggctggatcgtaaatggcaa

SEQ ID NO: 35771 - DNA, 30 bp, Artificial Sequence
  Synthetic oligonucleotide
ttaacgacggaatcctcaacaggatggcaa

SEQ ID NO: 35772 - DNA, 30 bp, Artificial Sequence
  Synthetic oligonucleotide
gacttgaggtgggcgagatcagacatgcaa

SEQ ID NO: 35773 - DNA, 30 bp, Artificial Sequence
  Synthetic oligonucleotide
gggatcgattatagacaatagcccatgcaa

SEQ ID NO: 35774 - DNA, 30 bp, Artificial Sequence
  Synthetic oligonucleotide
agcccagttagacctagagaaggtatgcaa

SEQ ID NO: 35775 - DNA, 30 bp, Artificial Sequence
  Synthetic oligonucleotide
gatcgctatacagtggggcgagccgtgcaa

SEQ ID NO: 35776 - DNA, 30 bp, Artificial Sequence
  Synthetic oligonucleotide
cgggatacgggtaaaactgataagttgcaa

SEQ ID NO: 35777 - DNA, 30 bp, Artificial Sequence
  Synthetic oligonucleotide
tccaaggtggaaggtaagtgacggaatcaa

SEQ ID NO: 35778 - DNA, 30 bp, Artificial Sequence
  Synthetic oligonucleotide
atcgaaaaactggattcaaatccgcatcaa

SEQ ID NO: 35779 - DNA, 29 bp, Artificial Sequence
  Synthetic oligonucleotide
gggtagggacgtgtatcctgtggcatcaa

SEQ ID NO: 35780 - DNA, 30 bp, Artificial Sequence
  Synthetic oligonucleotide
cgaagtgggataacgaattggtactatcaa

SEQ ID NO: 35781 - DNA, 30 bp, Artificial Sequence
  Synthetic oligonucleotide
tgctgctggcaccccacagaagtgactcaa

SEQ ID NO: 35782 - DNA, 30 bp, Artificial Sequence
  Synthetic oligonucleotide
tgagccaagcaatcccggccagcgcctcaa

SEQ ID NO: 35783 - DNA, 30 bp, Artificial Sequence
  Synthetic oligonucleotide
cgacttcctgcgtgaaaaaagggggctcaa

SEQ ID NO: 35784 - DNA, 30 bp, Artificial Sequence
  Synthetic oligonucleotide
cggtcttaagggagccaagcagctgctcaa

SEQ ID NO: 35785 - DNA, 30 bp, Artificial Sequence
  Synthetic oligonucleotide
gcttccgtactggcaaaacgcgaatctcaa

SEQ ID NO: 35786 - DNA, 30 bp, Artificial Sequence
  Synthetic oligonucleotide
acgcccaagatttataatacaccatctcaa

SEQ ID NO: 35787 - DNA, 30 bp, Artificial Sequence
  Synthetic oligonucleotide
ccgccgcgattaaatgaaaaccgtagtcaa

SEQ ID NO: 35788 - DNA, 30 bp, Artificial Sequence
  Synthetic oligonucleotide
acgtatctggatcagataagcaatggtcaa

SEQ ID NO: 35789 - DNA, 30 bp, Artificial Sequence
  Synthetic oligonucleotide
acaggtgcatgcgatacgttatgatgtcaa

SEQ ID NO: 35790 - DNA, 30 bp, Artificial Sequence
  Synthetic oligonucleotide
aggtgcagagccctgtcgatacgtcttcaa

SEQ ID NO: 35791 - DNA, 30 bp, Artificial Sequence
  Synthetic oligonucleotide
acgctcaaaacatgaaaattcgcatttcaa

SEQ ID NO: 35792 - DNA, 30 bp, Artificial Sequence
  Synthetic oligonucleotide
ggtcatgagagacatatgtaggtccaagaa

SEQ ID NO: 35793 - DNA, 30 bp, Artificial Sequence
  Synthetic oligonucleotide
cgggaaacccgaacatgggaggtgcaagaa

SEQ ID NO: 35794 - DNA, 30 bp, Artificial Sequence
  Synthetic oligonucleotide
gggagtactaacaggacccgttctcaagaa

SEQ ID NO: 35795 - DNA, 30 bp, Artificial Sequence
  Synthetic oligonucleotide
cttcgcgccgatgggacgactcgagaagaa

SEQ ID NO: 35796 - DNA, 30 bp, Artificial Sequence
  Synthetic oligonucleotide
gatctcgtgaaataaggggcaaaataagaa

SEQ ID NO: 35797 - DNA, 30 bp, Artificial Sequence
  Synthetic oligonucleotide
atactcttgtatcaacgaggagccacagaa

SEQ ID NO: 35798 - DNA, 30 bp, Artificial Sequence
  Synthetic oligonucleotide
ttaagagataaaggtgaaattcgcacagaa

SEQ ID NO: 35799 - DNA, 30 bp, Artificial Sequence
  Synthetic oligonucleotide
ctgaagacaaaaacgaggtatagaccagaa

SEQ ID NO: 35800 - DNA, 30 bp, Artificial Sequence
  Synthetic oligonucleotide
tattgggtaaggtgacgaacactaccagaa

SEQ ID NO: 35801 - DNA, 30 bp, Artificial Sequence
  Synthetic oligonucleotide
ctcggaggtgaagagcaggttgacccagaa

SEQ ID NO: 35802 - DNA, 30 bp, Artificial Sequence
  Synthetic oligonucleotide
ttctacatatcgtcaacacaacatccagaa

SEQ ID NO: 35803 - DNA, 30 bp, Artificial Sequence
  Synthetic oligonucleotide
cggtaaaagccaagttgatttaaggcagaa

SEQ ID NO: 35804 - DNA, 30 bp, Artificial Sequence
  Synthetic oligonucleotide
cccaagtaacaaacttccagagaggcagaa

SEQ ID NO: 35805 - DNA, 30 bp, Artificial Sequence
  Synthetic oligonucleotide
ttacgacagaagttttacgttaaatgagaa

SEQ ID NO: 35806 - DNA, 30 bp, Artificial Sequence
  Synthetic oligonucleotide
agcccagagatcacacgaagatgatgagaa

SEQ ID NO: 35807 - DNA, 30 bp, Artificial Sequence
  Synthetic oligonucleotide
ttgtcaaggagtctagagttcgggatagaa

SEQ ID NO: 35808 - DNA, 30 bp, Artificial Sequence
  Synthetic oligonucleotide
aaagaagagtttgtggtggcaagactagaa

SEQ ID NO: 35809 - DNA, 30 bp, Artificial Sequence
  Synthetic oligonucleotide
ggacagttattattagacaggtgactagaa

SEQ ID NO: 35810 - DNA, 30 bp, Artificial Sequence
  Synthetic oligonucleotide
cacgactgattagatggtgggctgctagaa

SEQ ID NO: 35811 - DNA, 30 bp, Artificial Sequence
  Synthetic oligonucleotide
cctcgcgggtctaaaatatcggcgcacgaa

SEQ ID NO: 35812 - DNA, 30 bp, Artificial Sequence
  Synthetic oligonucleotide
acgcgggtgcgggtacaacgtgttcacgaa

SEQ ID NO: 35813 - DNA, 30 bp, Artificial Sequence
  Synthetic oligonucleotide
atagacttggtccggtgtaagcaagacgaa

SEQ ID NO: 35814 - DNA, 30 bp, Artificial Sequence
  Synthetic oligonucleotide
accatgaagatatcagcataaacaaccgaa

SEQ ID NO: 35815 - DNA, 30 bp, Artificial Sequence
  Synthetic oligonucleotide
ggaacggatggagttaccaccaggaccgaa

SEQ ID NO: 35816 - DNA, 30 bp, Artificial Sequence
  Synthetic oligonucleotide
ccacttacgagtgttataaggtcagccgaa

SEQ ID NO: 35817 - DNA, 30 bp, Artificial Sequence
  Synthetic oligonucleotide
gtaaaacactgagtaatctgctaggccgaa

SEQ ID NO: 35818 - DNA, 30 bp, Artificial Sequence
  Synthetic oligonucleotide
aacaatcaaactatcgtgagcggggccgaa

SEQ ID NO: 35819 - DNA, 30 bp, Artificial Sequence
  Synthetic oligonucleotide
acaaaagcacggtagagcacgtgctccgaa

SEQ ID NO: 35820 - DNA, 30 bp, Artificial Sequence
  Synthetic oligonucleotide
aagataatggacactaatggagggcgcgaa

SEQ ID NO: 35821 - DNA, 30 bp, Artificial Sequence
  Synthetic oligonucleotide
acggcgcgcttgggtgactccataatcgaa

SEQ ID NO: 35822 - DNA, 30 bp, Artificial Sequence
  Synthetic oligonucleotide
acctcagcaaatggtgtgcgacacaaggaa

SEQ ID NO: 35823 - DNA, 31 bp, Artificial Sequence
  Synthetic oligonucleotide
caaccaactggctaatccagtcaaagaggaa

SEQ ID NO: 35824 - DNA, 30 bp, Artificial Sequence
  Synthetic oligonucleotide
gataagacagcgatggtgttacgagaggaa

SEQ ID NO: 35825 - DNA, 30 bp, Artificial Sequence
  Synthetic oligonucleotide
tagcgggttggatacagttagtcataggaa

SEQ ID NO: 35826 - DNA, 30 bp, Artificial Sequence
  Synthetic oligonucleotide
accggagtgcggtacgaaggagcatcggaa

SEQ ID NO: 35827 - DNA, 30 bp, Artificial Sequence
  Synthetic oligonucleotide
acaaggggcgctcgatcaattcggagggaa

SEQ ID NO: 35828 - DNA, 30 bp, Artificial Sequence
  Synthetic oligonucleotide
acctgagaaaacagttggaaccaaggggaa

SEQ ID NO: 35829 - DNA, 30 bp, Artificial Sequence
  Synthetic oligonucleotide
ccgtgtggcacattgtagagaaatatggaa

SEQ ID NO: 35830 - DNA, 30 bp, Artificial Sequence
  Synthetic oligonucleotide
agggctgtcaggagtagggtcgacaatgaa

SEQ ID NO: 35831 - DNA, 30 bp, Artificial Sequence
  Synthetic oligonucleotide
catcaagaagatgagcgctggaagaatgaa

SEQ ID NO: 35832 - DNA, 30 bp, Artificial Sequence
  Synthetic oligonucleotide
tacagtcatgggggaatggcacgacatgaa

SEQ ID NO: 35833 - DNA, 30 bp, Artificial Sequence
  Synthetic oligonucleotide
ggtgtcgaggcaattctgatcacagatgaa

SEQ ID NO: 35834 - DNA, 30 bp, Artificial Sequence
  Synthetic oligonucleotide
ccaccataggccagaaacaaggagcctgaa

SEQ ID NO: 35835 - DNA, 30 bp, Artificial Sequence
  Synthetic oligonucleotide
gacggggagaaacctagctaacgcgctgaa

SEQ ID NO: 35836 - DNA, 30 bp, Artificial Sequence
  Synthetic oligonucleotide
gcaaacaatagagcgggcaatgatggtgaa

SEQ ID NO: 35837 - DNA, 30 bp, Artificial Sequence
  Synthetic oligonucleotide
cttctacgagaacactacaagcctattgaa

SEQ ID NO: 35838 - DNA, 30 bp, Artificial Sequence
  Synthetic oligonucleotide
cgggcagctatcggggggcctactcaataa

SEQ ID NO: 35839 - DNA, 30 bp, Artificial Sequence
  Synthetic oligonucleotide
cttggcatacactgaaaaaaacgggaataa

SEQ ID NO: 35840 - DNA, 30 bp, Artificial Sequence
  Synthetic oligonucleotide
aacgtggcaattaagctagatggtacataa

SEQ ID NO: 35841 - DNA, 31 bp, Artificial Sequence
  Synthetic oligonucleotide
tacaaacgaatgaggaccattgagaccataa

SEQ ID NO: 35842 - DNA, 30 bp, Artificial Sequence
  Synthetic oligonucleotide
catgaggcgtcgcggagatacaggtcataa

SEQ ID NO: 35843 - DNA, 30 bp, Artificial Sequence
  Synthetic oligonucleotide
agggctaaacgcgggggctataacagataa

SEQ ID NO: 35844 - DNA, 30 bp, Artificial Sequence
  Synthetic oligonucleotide
gcgtctaccatcccgtgtgaatagagataa

SEQ ID NO: 35845 - DNA, 30 bp, Artificial Sequence
  Synthetic oligonucleotide
cgattccgataggaggatttcgcgagataa

SEQ ID NO: 35846 - DNA, 31 bp, Artificial Sequence
  Synthetic oligonucleotide
acggttcagtgaatctagcccatcaggataa

SEQ ID NO: 35847 - DNA, 30 bp, Artificial Sequence
  Synthetic oligonucleotide
acggtctgcacatgagagtactccggataa

SEQ ID NO: 35848 - DNA, 30 bp, Artificial Sequence
  Synthetic oligonucleotide
aggttgtgtagcccagaaagctagggataa

SEQ ID NO: 35849 - DNA, 30 bp, Artificial Sequence
  Synthetic oligonucleotide
cgaaacgcccaccgagaaagttgactataa

SEQ ID NO: 35850 - DNA, 30 bp, Artificial Sequence
  Synthetic oligonucleotide
tacatcagacctcaccggaaacacctataa

SEQ ID NO: 35851 - DNA, 30 bp, Artificial Sequence
  Synthetic oligonucleotide
cgactaacaagtaaaattgcagcggtataa

SEQ ID NO: 35852 - DNA, 30 bp, Artificial Sequence
  Synthetic oligonucleotide
ccgacaccttgagaaagggaagtattataa

SEQ ID NO: 35853 - DNA, 30 bp, Artificial Sequence
  Synthetic oligonucleotide
caccgatgccaatctacccaccgcaactaa

SEQ ID NO: 35854 - DNA, 30 bp, Artificial Sequence
  Synthetic oligonucleotide
gtggtgggcataatcagttaaaaagactaa

SEQ ID NO: 35855 - DNA, 30 bp, Artificial Sequence
  Synthetic oligonucleotide
tgggggggacaagatcgagcaagagactaa

SEQ ID NO: 35856 - DNA, 30 bp, Artificial Sequence
  Synthetic oligonucleotide
tcttgcggggcatcagggtgatccgactaa

SEQ ID NO: 35857 - DNA, 30 bp, Artificial Sequence
  Synthetic oligonucleotide
agaatgaactataaggacttacaaccctaa

SEQ ID NO: 35858 - DNA, 30 bp, Artificial Sequence
  Synthetic oligonucleotide
taacggtgagcatccgttagtgaggcctaa

SEQ ID NO: 35859 - DNA, 30 bp, Artificial Sequence
  Synthetic oligonucleotide
aaacgaacgagtatccgccatccgagctaa

SEQ ID NO: 35860 - DNA, 30 bp, Artificial Sequence
  Synthetic oligonucleotide
tagtgctagcaaaattaaagatcctgctaa

SEQ ID NO: 35861 - DNA, 30 bp, Artificial Sequence
  Synthetic oligonucleotide
acgggattcgcgccagccgacggctgctaa

SEQ ID NO: 35862 - DNA, 30 bp, Artificial Sequence
  Synthetic oligonucleotide
ccggcgactaagggccaacggtaaaagtaa

SEQ ID NO: 35863 - DNA, 30 bp, Artificial Sequence
  Synthetic oligonucleotide
gtaccgtgctgagtcgaaaatgtcccgtaa

SEQ ID NO: 35864 - DNA, 30 bp, Artificial Sequence
  Synthetic oligonucleotide
gcacgcacacagtcgaaaggctagtcgtaa

SEQ ID NO: 35865 - DNA, 30 bp, Artificial Sequence
  Synthetic oligonucleotide
cgcgagtgaatgttgcacatatacaggtaa

SEQ ID NO: 35866 - DNA, 30 bp, Artificial Sequence
  Synthetic oligonucleotide
gccggagtcaaagtatcacataggaggtaa

SEQ ID NO: 35867 - DNA, 30 bp, Artificial Sequence
  Synthetic oligonucleotide
tggtagatagaagaagtaaacgactggtaa

SEQ ID NO: 35868 - DNA, 30 bp, Artificial Sequence
  Synthetic oligonucleotide
cgaactaggaccgggcaggcacttatgtaa

SEQ ID NO: 35869 - DNA, 30 bp, Artificial Sequence
  Synthetic oligonucleotide
tgacataataacggaacttgagacctgtaa

SEQ ID NO: 35870 - DNA, 30 bp, Artificial Sequence
  Synthetic oligonucleotide
atgctgagcgacgagggggtaggggtgtaa

SEQ ID NO: 35871 - DNA, 30 bp, Artificial Sequence
  Synthetic oligonucleotide
tcgtggcacagtctgcgtacagttgtgtaa

SEQ ID NO: 35872 - DNA, 30 bp, Artificial Sequence
  Synthetic oligonucleotide
atcgcgcacgactgagggtaatgcttgtaa

SEQ ID NO: 35873 - DNA, 30 bp, Artificial Sequence
  Synthetic oligonucleotide
cacacctcacaagggctaagtcggcattaa

SEQ ID NO: 35874 - DNA, 30 bp, Artificial Sequence
  Synthetic oligonucleotide
gggcgaagagccagccacaactttgattaa

SEQ ID NO: 35875 - DNA, 31 bp, Artificial Sequence
  Synthetic oligonucleotide
tcggaggaccccacagatacgatattcttaa

SEQ ID NO: 35876 - DNA, 30 bp, Artificial Sequence
  Synthetic oligonucleotide
ggctacagtgcgacctaactcgattgttaa

SEQ ID NO: 35877 - DNA, 30 bp, Artificial Sequence
  Synthetic oligonucleotide
ccacgaactattacgaataggatggtttaa

SEQ ID NO: 35878 - DNA, 30 bp, Artificial Sequence
  Synthetic oligonucleotide
cacacctcgcgctaaaggcaaacaaaaaca

SEQ ID NO: 35879 - DNA, 30 bp, Artificial Sequence
  Synthetic oligonucleotide
ccaagaataaggtctgtgtgcaataaaaca

SEQ ID NO: 35880 - DNA, 30 bp, Artificial Sequence
  Synthetic oligonucleotide
cgaggcctcgacgacatagacgggcaaaca

SEQ ID NO: 35881 - DNA, 30 bp, Artificial Sequence
  Synthetic oligonucleotide
tacgggaagaattccactctaactcaaaca

SEQ ID NO: 35882 - DNA, 30 bp, Artificial Sequence
  Synthetic oligonucleotide
cgttgcagagcgtcctgagaggatacaaca

SEQ ID NO: 35883 - DNA, 30 bp, Artificial Sequence
  Synthetic oligonucleotide
gtatacccggaacagagtgaattgccaaca

SEQ ID NO: 35884 - DNA, 30 bp, Artificial Sequence
  Synthetic oligonucleotide
ctcagacctgagtcagcagcgtcatcaaca

SEQ ID NO: 35885 - DNA, 30 bp, Artificial Sequence
  Synthetic oligonucleotide
aggatccctaaacagttgggtcacagaaca

SEQ ID NO: 35886 - DNA, 31 bp, Artificial Sequence
  Synthetic oligonucleotide
atgacgtggtgaggcggagcgattatgaaca

SEQ ID NO: 35887 - DNA, 30 bp, Artificial Sequence
  Synthetic oligonucleotide
aattcaggtaacggaaagggaatgataaca

SEQ ID NO: 35888 - DNA, 30 bp, Artificial Sequence
  Synthetic oligonucleotide
cgacacaagcaggttaacgtgggcctaaca

SEQ ID NO: 35889 - DNA, 30 bp, Artificial Sequence
  Synthetic oligonucleotide
aagcctgggcaaggagccacccatgtaaca

SEQ ID NO: 35890 - DNA, 30 bp, Artificial Sequence
  Synthetic oligonucleotide
actcgatcctcgtaaacataaaccttaaca

SEQ ID NO: 35891 - DNA, 30 bp, Artificial Sequence
  Synthetic oligonucleotide
ccaacataatgttagtagaaggtccacaca

SEQ ID NO: 35892 - DNA, 30 bp, Artificial Sequence
  Synthetic oligonucleotide
tcaagagagggacatgagtgattctacaca

SEQ ID NO: 35893 - DNA, 30 bp, Artificial Sequence
  Synthetic oligonucleotide
ccgtcaaaggccacaaaaggtgggtacaca

SEQ ID NO: 35894 - DNA, 30 bp, Artificial Sequence
  Synthetic oligonucleotide
gggaaagaaacgaaggcgttattcaccaca

SEQ ID NO: 35895 - DNA, 30 bp, Artificial Sequence
  Synthetic oligonucleotide
cagcgtcactggataatcagcgcatccaca

SEQ ID NO: 35896 - DNA, 30 bp, Artificial Sequence
  Synthetic oligonucleotide
tcgcgacctccatcgcgacttgcaggcaca

SEQ ID NO: 35897 - DNA, 30 bp, Artificial Sequence
  Synthetic oligonucleotide
ttcaccgaggggaatacgtagggaggcaca

SEQ ID NO: 35898 - DNA, 30 bp, Artificial Sequence
  Synthetic oligonucleotide
cgaaaggactaggtcacacaagcctgcaca

SEQ ID NO: 35899 - DNA, 30 bp, Artificial Sequence
  Synthetic oligonucleotide
ggcaacagttcactatagtagacactcaca

SEQ ID NO: 35900 - DNA, 30 bp, Artificial Sequence
  Synthetic oligonucleotide
atcgccgcttagtaaggctataacaagaca

SEQ ID NO: 35901 - DNA, 30 bp, Artificial Sequence
  Synthetic oligonucleotide
taaacacggccagatatttgaaaacagaca

SEQ ID NO: 35902 - DNA, 30 bp, Artificial Sequence
  Synthetic oligonucleotide
ctaaattagccagaggtatcggctgagaca

SEQ ID NO: 35903 - DNA, 30 bp, Artificial Sequence
  Synthetic oligonucleotide
tgggaatctaacagtgtccacatctagaca

SEQ ID NO: 35904 - DNA, 30 bp, Artificial Sequence
  Synthetic oligonucleotide
aggctcactcaataactaggggattagaca

SEQ ID NO: 35905 - DNA, 30 bp, Artificial Sequence
  Synthetic oligonucleotide
gggacggccgaatcctacactaccacgaca

SEQ ID NO: 35906 - DNA, 30 bp, Artificial Sequence
  Synthetic oligonucleotide
agttaaaggtaaaggtcccgggcaccgaca

SEQ ID NO: 35907 - DNA, 31 bp, Artificial Sequence
  Synthetic oligonucleotide
ctctaatgaaggggacagtaacgcacggaca

SEQ ID NO: 35908 - DNA, 30 bp, Artificial Sequence
  Synthetic oligonucleotide
aaacactagcaaacattcatggagatgaca

SEQ ID NO: 35909 - DNA, 30 bp, Artificial Sequence
  Synthetic oligonucleotide
acgagacaagcctgtgtatatcgtgtgaca

SEQ ID NO: 35910 - DNA, 30 bp, Artificial Sequence
  Synthetic oligonucleotide
aggggcacaacgatccgtggggagaataca

SEQ ID NO: 35911 - DNA, 30 bp, Artificial Sequence
  Synthetic oligonucleotide
cagagggtcaagcccaactaagtgaataca

SEQ ID NO: 35912 - DNA, 30 bp, Artificial Sequence
  Synthetic oligonucleotide
caactagtagagagaacccccaataataca

SEQ ID NO: 35913 - DNA, 30 bp, Artificial Sequence
  Synthetic oligonucleotide
tagaagaccgccagagaagcgaaagataca

SEQ ID NO: 35914 - DNA, 30 bp, Artificial Sequence
  Synthetic oligonucleotide
ggcatagccgtcggaatgttggtcgataca

SEQ ID NO: 35915 - DNA, 30 bp, Artificial Sequence
  Synthetic oligonucleotide
cggtacctgccaggccactacaactctaca

SEQ ID NO: 35916 - DNA, 30 bp, Artificial Sequence
  Synthetic oligonucleotide
gcctaaattaaccaggatcctaacagtaca

SEQ ID NO: 35917 - DNA, 30 bp, Artificial Sequence
  Synthetic oligonucleotide
catcagcgggaatggacatcaccgagtaca

SEQ ID NO: 35918 - DNA, 30 bp, Artificial Sequence
  Synthetic oligonucleotide
acgcagtggggggtagacaactaatgtaca

SEQ ID NO: 35919 - DNA, 30 bp, Artificial Sequence
  Synthetic oligonucleotide
cgataaagttaagacaggatgaagtgtaca

SEQ ID NO: 35920 - DNA, 30 bp, Artificial Sequence
  Synthetic oligonucleotide
aggcggcgatcagtctggtccataattaca

SEQ ID NO: 35921 - DNA, 30 bp, Artificial Sequence
  Synthetic oligonucleotide
cgtgtcggatggtctcgcgaattacttaca

SEQ ID NO: 35922 - DNA, 30 bp, Artificial Sequence
  Synthetic oligonucleotide
tagtgggggctgtgtgcaacggcaacacca

SEQ ID NO: 35923 - DNA, 30 bp, Artificial Sequence
  Synthetic oligonucleotide
atgaacagtcttctaggaaaggtagcacca

SEQ ID NO: 35924 - DNA, 28 bp, Artificial Sequence
  Synthetic oligonucleotide
ccaggaagagtcttgtgcaaggcgacca

SEQ ID NO: 35925 - DNA, 30 bp, Artificial Sequence
  Synthetic oligonucleotide
atgatttggaactaaagaagtggtggacca

SEQ ID NO: 35926 - DNA, 30 bp, Artificial Sequence
  Synthetic oligonucleotide
acaggggcaattcagtgcggaggcttacca

SEQ ID NO: 35927 - DNA, 30 bp, Artificial Sequence
  Synthetic oligonucleotide
cgagtacaggatacaaagtgggtcaaccca

SEQ ID NO: 35928 - DNA, 30 bp, Artificial Sequence
  Synthetic oligonucleotide
ggagcgataactaaccgttacccgaaccca

SEQ ID NO: 35929 - DNA, 30 bp, Artificial Sequence
  Synthetic oligonucleotide
tcacagagcggaatcgccgtggtgcaccca

SEQ ID NO: 35930 - DNA, 30 bp, Artificial Sequence
  Synthetic oligonucleotide
tcttaagtcctaaggtgtcgaaacgaccca

SEQ ID NO: 35931 - DNA, 30 bp, Artificial Sequence
  Synthetic oligonucleotide
cctaacatggcactgaagggaacataccca

SEQ ID NO: 35932 - DNA, 30 bp, Artificial Sequence
  Synthetic oligonucleotide
gatgacaacgtaaccgaagggggttcccca

SEQ ID NO: 35933 - DNA, 30 bp, Artificial Sequence
  Synthetic oligonucleotide
cacgatactgtagaaagtctatatcagcca

SEQ ID NO: 35934 - DNA, 30 bp, Artificial Sequence
  Synthetic oligonucleotide
aggacctacgtggtggtagggagaacgcca

SEQ ID NO: 35935 - DNA, 30 bp, Artificial Sequence
  Synthetic oligonucleotide
ggcagggtagagtaggtggcagttacgcca

SEQ ID NO: 35936 - DNA, 30 bp, Artificial Sequence
  Synthetic oligonucleotide
cctcaagtctaagaaggtaacatagggcca

SEQ ID NO: 35937 - DNA, 30 bp, Artificial Sequence
  Synthetic oligonucleotide
cgcgttgagaccagctttagtacaatgcca

SEQ ID NO: 35938 - DNA, 30 bp, Artificial Sequence
  Synthetic oligonucleotide
gcggaagcctagcactaaatacgtatgcca

SEQ ID NO: 35939 - DNA, 30 bp, Artificial Sequence
  Synthetic oligonucleotide
gcacggttgaaggacgagtttagagtgcca

SEQ ID NO: 35940 - DNA, 30 bp, Artificial Sequence
  Synthetic oligonucleotide
cgtgccaggagtaaagatcataacgtgcca

SEQ ID NO: 35941 - DNA, 30 bp, Artificial Sequence
  Synthetic oligonucleotide
caagacctaagattgcgatgtgggaatcca

SEQ ID NO: 35942 - DNA, 30 bp, Artificial Sequence
  Synthetic oligonucleotide
ctcatagctggctagggatggccttatcca

SEQ ID NO: 35943 - DNA, 30 bp, Artificial Sequence
  Synthetic oligonucleotide
atcagataaatgccaactgaatgcactcca

SEQ ID NO: 35944 - DNA, 30 bp, Artificial Sequence
  Synthetic oligonucleotide
ggtaccgtaaagtcgaacaagtaagctcca

SEQ ID NO: 35945 - DNA, 30 bp, Artificial Sequence
  Synthetic oligonucleotide
ctgagggctaggaggagatgtggggttcca

SEQ ID NO: 35946 - DNA, 30 bp, Artificial Sequence
  Synthetic oligonucleotide
acagctaagagcagtatctagtccaaagca

SEQ ID NO: 35947 - DNA, 30 bp, Artificial Sequence
  Synthetic oligonucleotide
ctggatgtatcgaccacggaagagcaagca

SEQ ID NO: 35948 - DNA, 30 bp, Artificial Sequence
  Synthetic oligonucleotide
cggcggaagcctacgagagaccccgaagca

SEQ ID NO: 35949 - DNA, 30 bp, Artificial Sequence
  Synthetic oligonucleotide
cagttgaggtggagggtgggttaggaagca

SEQ ID NO: 35950 - DNA, 30 bp, Artificial Sequence
  Synthetic oligonucleotide
tagggcgaccttggagtgggaggttaagca

SEQ ID NO: 35951 - DNA, 36 bp, Artificial Sequence
  Synthetic oligonucleotide
tgataacgccgaagatccaaagccataacaacagca

SEQ ID NO: 35952 - DNA, 30 bp, Artificial Sequence
  Synthetic oligonucleotide
tgggatcgcccccacccacctgcagcagca

SEQ ID NO: 35953 - DNA, 30 bp, Artificial Sequence
  Synthetic oligonucleotide
gtacggaaagtaggggcgagcaatgcagca

SEQ ID NO: 35954 - DNA, 30 bp, Artificial Sequence
  Synthetic oligonucleotide
tcgggaagttggcactccaaaaactcagca

SEQ ID NO: 35955 - DNA, 30 bp, Artificial Sequence
  Synthetic oligonucleotide
gttcgaattgcgcgcaaaaaggtcagagca

SEQ ID NO: 35956 - DNA, 30 bp, Artificial Sequence
  Synthetic oligonucleotide
tgaggaaaacaaagtaatgcgctaatagca

SEQ ID NO: 35957 - DNA, 31 bp, Artificial Sequence
  Synthetic oligonucleotide
tcaaagactcggtccgcggaaaggcatagca

SEQ ID NO: 35958 - DNA, 30 bp, Artificial Sequence
  Synthetic oligonucleotide
ccaaaattagtcacattgatcaggatagca

SEQ ID NO: 35959 - DNA, 30 bp, Artificial Sequence
  Synthetic oligonucleotide
aggggctcagatccagattgttgagtagca

SEQ ID NO: 35960 - DNA, 30 bp, Artificial Sequence
  Synthetic oligonucleotide
gatgtgaaggcgacaatcctgaccgtagca

SEQ ID NO: 35961 - DNA, 30 bp, Artificial Sequence
  Synthetic oligonucleotide
aaggggtgaacaaggagtatcgaattagca

SEQ ID NO: 35962 - DNA, 30 bp, Artificial Sequence
  Synthetic oligonucleotide
agatgataacgagctaaaaatagattagca

SEQ ID NO: 35963 - DNA, 30 bp, Artificial Sequence
  Synthetic oligonucleotide
gcctagtatgtgtgaaactcgtggttagca

SEQ ID NO: 35964 - DNA, 30 bp, Artificial Sequence
  Synthetic oligonucleotide
ggctgtaagagggacacgtgcaagcccgca

SEQ ID NO: 35965 - DNA, 30 bp, Artificial Sequence
  Synthetic oligonucleotide
agaggtggaaagggaataagccccgccgca

SEQ ID NO: 35966 - DNA, 30 bp, Artificial Sequence
  Synthetic oligonucleotide
agaatgagtatgtcagagattagtagcgca

SEQ ID NO: 35967 - DNA, 30 bp, Artificial Sequence
  Synthetic oligonucleotide
attaggcgagcccatgagggaatcggcgca

SEQ ID NO: 35968 - DNA, 30 bp, Artificial Sequence
  Synthetic oligonucleotide
cggcacgatagaacataccataactgcgca

SEQ ID NO: 35969 - DNA, 30 bp, Artificial Sequence
  Synthetic oligonucleotide
gtcacaactgtgaggatcgcaacgtgcgca

SEQ ID NO: 35970 - DNA, 30 bp, Artificial Sequence
  Synthetic oligonucleotide
tcgataagagcattgatacgggtaatcgca

SEQ ID NO: 35971 - DNA, 30 bp, Artificial Sequence
  Synthetic oligonucleotide
aggttgctaaggtcatgaacctcgatcgca

SEQ ID NO: 35972 - DNA, 30 bp, Artificial Sequence
  Synthetic oligonucleotide
tcacaactgtacgacaaaggaatacaggca

SEQ ID NO: 35973 - DNA, 30 bp, Artificial Sequence
  Synthetic oligonucleotide
aaggcaaggactcacgcgacaagtcaggca

SEQ ID NO: 35974 - DNA, 30 bp, Artificial Sequence
  Synthetic oligonucleotide
ctaggacatgccggggcaaccatgacggca

SEQ ID NO: 35975 - DNA, 30 bp, Artificial Sequence
  Synthetic oligonucleotide
gctaaaaaggtacagatcagaaacagggca

SEQ ID NO: 35976 - DNA, 30 bp, Artificial Sequence
  Synthetic oligonucleotide
gcgcaagttggctctcggaagcatagggca

SEQ ID NO: 35977 - DNA, 30 bp, Artificial Sequence
  Synthetic oligonucleotide
aagcaatgagatcattcagtaccaatggca

SEQ ID NO: 35978 - DNA, 30 bp, Artificial Sequence
  Synthetic oligonucleotide
caggctaaggcaactggaacctatatggca

SEQ ID NO: 35979 - DNA, 30 bp, Artificial Sequence
  Synthetic oligonucleotide
atgacaagtacggagtggttaaccaatgca

SEQ ID NO: 35980 - DNA, 30 bp, Artificial Sequence
  Synthetic oligonucleotide
atagaataactagacactacaatcaatgca

SEQ ID NO: 35981 - DNA, 30 bp, Artificial Sequence
  Synthetic oligonucleotide
gcgatatgaccttagacagttactaatgca

SEQ ID NO: 35982 - DNA, 30 bp, Artificial Sequence
  Synthetic oligonucleotide
cggtatcgaaatgaacaccaagccactgca

SEQ ID NO: 35983 - DNA, 30 bp, Artificial Sequence
  Synthetic oligonucleotide
cgataaatgacgacccagcgcaagagtgca

SEQ ID NO: 35984 - DNA, 30 bp, Artificial Sequence
  Synthetic oligonucleotide
tcatggcttatccaaggtaatcagagtgca

SEQ ID NO: 35985 - DNA, 30 bp, Artificial Sequence
  Synthetic oligonucleotide
tcgtgtagctggaacctcataaagggtgca

SEQ ID NO: 35986 - DNA, 30 bp, Artificial Sequence
  Synthetic oligonucleotide
acacgggttgggacgtatccttaatgtgca

SEQ ID NO: 35987 - DNA, 30 bp, Artificial Sequence
  Synthetic oligonucleotide
aaacgaaactgtgtaaatcaacatcttgca

SEQ ID NO: 35988 - DNA, 30 bp, Artificial Sequence
  Synthetic oligonucleotide
ccttcacaaagaatagcaccgggacaatca

SEQ ID NO: 35989 - DNA, 30 bp, Artificial Sequence
  Synthetic oligonucleotide
tagcacacctaaaaatctaagttgcaatca

SEQ ID NO: 35990 - DNA, 31 bp, Artificial Sequence
  Synthetic oligonucleotide
cacattagggggagtctaacggaccgaatca

SEQ ID NO: 35991 - DNA, 30 bp, Artificial Sequence
  Synthetic oligonucleotide
cctgacaggggcggaagcagggaaccatca

SEQ ID NO: 35992 - DNA, 31 bp, Artificial Sequence
  Synthetic oligonucleotide
tggcacaggttgatgggtatagtcacgatca

SEQ ID NO: 35993 - DNA, 30 bp, Artificial Sequence
  Synthetic oligonucleotide
tctaacaagacagcatgagagaaaggatca

SEQ ID NO: 35994 - DNA, 30 bp, Artificial Sequence
  Synthetic oligonucleotide
acgaccggacacgtaataaagtcaggatca

SEQ ID NO: 35995 - DNA, 30 bp, Artificial Sequence
  Synthetic oligonucleotide
ccgtgtaatcagaagagtgtcacgtgatca

SEQ ID NO: 35996 - DNA, 30 bp, Artificial Sequence
  Synthetic oligonucleotide
aaagcggaccagctatcggcccatatatca

SEQ ID NO: 35997 - DNA, 30 bp, Artificial Sequence
  Synthetic oligonucleotide
cgtatgtccaacaggaagtcggctatatca

SEQ ID NO: 35998 - DNA, 30 bp, Artificial Sequence
  Synthetic oligonucleotide
gtgtggacgactgacactagaggaaactca

SEQ ID NO: 35999 - DNA, 30 bp, Artificial Sequence
  Synthetic oligonucleotide
aacgcaactggaccgacaactgggcactca

SEQ ID NO: 36000 - DNA, 30 bp, Artificial Sequence
  Synthetic oligonucleotide
cagcacaaacaggcatacttgggtgactca

SEQ ID NO: 36001 - DNA, 30 bp, Artificial Sequence
  Synthetic oligonucleotide
agggacaaggcataatttggcccttactca

SEQ ID NO: 36002 - DNA, 30 bp, Artificial Sequence
  Synthetic oligonucleotide
aacgggcagtcggtggtggttccgtcctca

SEQ ID NO: 36003 - DNA, 30 bp, Artificial Sequence
  Synthetic oligonucleotide
gttcagtagaaacgtaacgatacaagctca

SEQ ID NO: 36004 - DNA, 30 bp, Artificial Sequence
  Synthetic oligonucleotide
tcaaagggagcccacccgacaacgagctca

SEQ ID NO: 36005 - DNA, 30 bp, Artificial Sequence
  Synthetic oligonucleotide
cgcacggtaaagcgtacacttacaggctca

SEQ ID NO: 36006 - DNA, 30 bp, Artificial Sequence
  Synthetic oligonucleotide
gtaaacgatagatcggttcggccagtctca

SEQ ID NO: 36007 - DNA, 30 bp, Artificial Sequence
  Synthetic oligonucleotide
agacagggaaatcaataggctgaccagtca

SEQ ID NO: 36008 - DNA, 30 bp, Artificial Sequence
  Synthetic oligonucleotide
gggacagtagggcagaggatcggagagtca

SEQ ID NO: 36009 - DNA, 30 bp, Artificial Sequence
  Synthetic oligonucleotide
gaacaaaatccccatgtcgaaggggcgtca

SEQ ID NO: 36010 - DNA, 30 bp, Artificial Sequence
  Synthetic oligonucleotide
ggtaagtacagtgggatggtggcaaggtca

SEQ ID NO: 36011 - DNA, 30 bp, Artificial Sequence
  Synthetic oligonucleotide
cgattcgcgtagggtgcgcgactagggtca

SEQ ID NO: 36012 - DNA, 30 bp, Artificial Sequence
  Synthetic oligonucleotide
gatggttggtagttgtgagtgtgcgtgtca

SEQ ID NO: 36013 - DNA, 30 bp, Artificial Sequence
  Synthetic oligonucleotide
tcaacggagctcggagagacatcacattca

SEQ ID NO: 36014 - DNA, 30 bp, Artificial Sequence
  Synthetic oligonucleotide
gcgcatatggaacacaagatgggcagttca

SEQ ID NO: 36015 - DNA, 30 bp, Artificial Sequence
  Synthetic oligonucleotide
gtgagcttcaacactaaagtaaagcgttca

SEQ ID NO: 36016 - DNA, 30 bp, Artificial Sequence
  Synthetic oligonucleotide
ggcgaagtaaagggtcgaatgcatttttca

SEQ ID NO: 36017 - DNA, 30 bp, Artificial Sequence
  Synthetic oligonucleotide
tagatgagaggagtagcctacagaaaaaga

SEQ ID NO: 36018 - DNA, 30 bp, Artificial Sequence
  Synthetic oligonucleotide
tggggaggacaaaaacgggtatgtaaaaga

SEQ ID NO: 36019 - DNA, 30 bp, Artificial Sequence
  Synthetic oligonucleotide
gtgttgggtagtgacatctgcgaggaaaga

SEQ ID NO: 36020 - DNA, 30 bp, Artificial Sequence
  Synthetic oligonucleotide
gcggacctaggatattgattgtatgaaaga

SEQ ID NO: 36021 - DNA, 30 bp, Artificial Sequence
  Synthetic oligonucleotide
cgtaggagccagattgcgaggactgaaaga

SEQ ID NO: 36022 - DNA, 30 bp, Artificial Sequence
  Synthetic oligonucleotide
ggccgccactaggtgataagatagtaaaga

SEQ ID NO: 36023 - DNA, 30 bp, Artificial Sequence
  Synthetic oligonucleotide
ggaaacccgatagttgttacacattaaaga

SEQ ID NO: 36024 - DNA, 30 bp, Artificial Sequence
  Synthetic oligonucleotide
gcgtcaggacaatcattcgcatgaacaaga

SEQ ID NO: 36025 - DNA, 30 bp, Artificial Sequence
  Synthetic oligonucleotide
agcgaagaacacgcgatacagccgccaaga

SEQ ID NO: 36026 - DNA, 30 bp, Artificial Sequence
  Synthetic oligonucleotide
ttaccattaaatgccaacaggcggccaaga

SEQ ID NO: 36027 - DNA, 30 bp, Artificial Sequence
  Synthetic oligonucleotide
gctacacagacgtaaggcacgtgcgcaaga

SEQ ID NO: 36028 - DNA, 30 bp, Artificial Sequence
  Synthetic oligonucleotide
tacacggccgaacgtagcaatgcggcaaga

SEQ ID NO: 36029 - DNA, 30 bp, Artificial Sequence
  Synthetic oligonucleotide
acgcctgagtgatatgttcttcggtcaaga

SEQ ID NO: 36030 - DNA, 30 bp, Artificial Sequence
  Synthetic oligonucleotide
ccgatactagaggaagttacgtacagaaga

SEQ ID NO: 36031 - DNA, 30 bp, Artificial Sequence
  Synthetic oligonucleotide
tttaccagggttacgctacatgcgcgaaga

SEQ ID NO: 36032 - DNA, 30 bp, Artificial Sequence
  Synthetic oligonucleotide
cagatgaagatatgggataatatgggaaga

SEQ ID NO: 36033 - DNA, 30 bp, Artificial Sequence
  Synthetic oligonucleotide
ggcacataaaccccccagttatctggaaga

SEQ ID NO: 36034 - DNA, 30 bp, Artificial Sequence
  Synthetic oligonucleotide
ggggaccagtatgtcgatgggtattgaaga

SEQ ID NO: 36035 - DNA, 30 bp, Artificial Sequence
  Synthetic oligonucleotide
gggcgttcagggtgaggctcagagctaaga

SEQ ID NO: 36036 - DNA, 30 bp, Artificial Sequence
  Synthetic oligonucleotide
catggaggcggcaaacaatacagcgtaaga

SEQ ID NO: 36037 - DNA, 30 bp, Artificial Sequence
  Synthetic oligonucleotide
gcgccctacgtttggaattgaaggaacaga

SEQ ID NO: 36038 - DNA, 30 bp, Artificial Sequence
  Synthetic oligonucleotide
ggaggagaataaactgcgctctaagacaga

SEQ ID NO: 36039 - DNA, 30 bp, Artificial Sequence
  Synthetic oligonucleotide
agggtggcgacttgaaggatggcagacaga

SEQ ID NO: 36040 - DNA, 30 bp, Artificial Sequence
  Synthetic oligonucleotide
taccggtatcacgaagacggaacggacaga

SEQ ID NO: 36041 - DNA, 30 bp, Artificial Sequence
  Synthetic oligonucleotide
aacggggtaaagtttcaaccggtttacaga

SEQ ID NO: 36042 - DNA, 30 bp, Artificial Sequence
  Synthetic oligonucleotide
cgcatgcttagcacccaatcggtcaccaga

SEQ ID NO: 36043 - DNA, 30 bp, Artificial Sequence
  Synthetic oligonucleotide
cacacatacttataagggcaggggaccaga

SEQ ID NO: 36044 - DNA, 30 bp, Artificial Sequence
  Synthetic oligonucleotide
actagtcaagaacgtactatttctaccaga

SEQ ID NO: 36045 - DNA, 30 bp, Artificial Sequence
  Synthetic oligonucleotide
tgtacgtacaatggatacggttaggccaga

SEQ ID NO: 36046 - DNA, 30 bp, Artificial Sequence
  Synthetic oligonucleotide
gtcccgggacagttgcaaccccactccaga

SEQ ID NO: 36047 - DNA, 30 bp, Artificial Sequence
  Synthetic oligonucleotide
gaggaaacggaaagattgcgatcaagcaga

SEQ ID NO: 36048 - DNA, 30 bp, Artificial Sequence
  Synthetic oligonucleotide
ggggcaaccataaacctacctttgagcaga

SEQ ID NO: 36049 - DNA, 30 bp, Artificial Sequence
  Synthetic oligonucleotide
caacgaaagtcaggtaagtaggtgtgcaga

SEQ ID NO: 36050 - DNA, 30 bp, Artificial Sequence
  Synthetic oligonucleotide
cgataaaattccaacaagttcacggtcaga

SEQ ID NO: 36051 - DNA, 30 bp, Artificial Sequence
  Synthetic oligonucleotide
aagcgccgagtataaaatacaggattcaga

SEQ ID NO: 36052 - DNA, 28 bp, Artificial Sequence
  Synthetic oligonucleotide
ccgttagtgcaaagaataagcgttcaga

SEQ ID NO: 36053 - DNA, 30 bp, Artificial Sequence
  Synthetic oligonucleotide
cccaggatgtgactcgaaggcctcaagaga

SEQ ID NO: 36054 - DNA, 30 bp, Artificial Sequence
  Synthetic oligonucleotide
gaggtcggccgaatggtattccataagaga

SEQ ID NO: 36055 - DNA, 30 bp, Artificial Sequence
  Synthetic oligonucleotide
tacgactggaacaaaattcacgttgagaga

SEQ ID NO: 36056 - DNA, 30 bp, Artificial Sequence
  Synthetic oligonucleotide
cgggaaaagtcgattaagataatcacgaga

SEQ ID NO: 36057 - DNA, 30 bp, Artificial Sequence
  Synthetic oligonucleotide
ttgaagtcaaaggtaaggcacaagacgaga

SEQ ID NO: 36058 - DNA, 30 bp, Artificial Sequence
  Synthetic oligonucleotide
atgggattgtgaccagtaatggaaccgaga

SEQ ID NO: 36059 - DNA, 30 bp, Artificial Sequence
  Synthetic oligonucleotide
cgacataactgtcgactccgcgtggcgaga

SEQ ID NO: 36060 - DNA, 30 bp, Artificial Sequence
  Synthetic oligonucleotide
aggagcatcaaagcgtcagctcgcaggaga

SEQ ID NO: 36061 - DNA, 30 bp, Artificial Sequence
  Synthetic oligonucleotide
agcataatggactgttatcaatcgaggaga

SEQ ID NO: 36062 - DNA, 30 bp, Artificial Sequence
  Synthetic oligonucleotide
agcgttggcggtctttacgagaaacggaga

SEQ ID NO: 36063 - DNA, 30 bp, Artificial Sequence
  Synthetic oligonucleotide
taaggaccagagtattactgtacatggaga

SEQ ID NO: 36064 - DNA, 30 bp, Artificial Sequence
  Synthetic oligonucleotide
gaaccagaggcagcagcagaaagttggaga

SEQ ID NO: 36065 - DNA, 30 bp, Artificial Sequence
  Synthetic oligonucleotide
gtgcaaattgcgtgtggtaaggagaataga

SEQ ID NO: 36066 - DNA, 30 bp, Artificial Sequence
  Synthetic oligonucleotide
acaaggacactattagcatacgggcataga

SEQ ID NO: 36067 - DNA, 30 bp, Artificial Sequence
  Synthetic oligonucleotide
gaatactgcacgggaaggattggacgtaga

SEQ ID NO: 36068 - DNA, 30 bp, Artificial Sequence
  Synthetic oligonucleotide
gcggtattgcggactaagccgtaaggtaga

SEQ ID NO: 36069 - DNA, 30 bp, Artificial Sequence
  Synthetic oligonucleotide
cgactttatcgcgtgaaagccaatggtaga

SEQ ID NO: 36070 - DNA, 30 bp, Artificial Sequence
  Synthetic oligonucleotide
cattcccagcagcagtagacggattgtaga

SEQ ID NO: 36071 - DNA, 31 bp, Artificial Sequence
  Synthetic oligonucleotide
cgggaaccacgagcaatacaaataacttaga

SEQ ID NO: 36072 - DNA, 30 bp, Artificial Sequence
  Synthetic oligonucleotide
ttgtaagtaaatgagacacataataaacga

SEQ ID NO: 36073 - DNA, 30 bp, Artificial Sequence
  Synthetic oligonucleotide
gaatcgatcgacaagaggagcacacaacga

SEQ ID NO: 36074 - DNA, 30 bp, Artificial Sequence
  Synthetic oligonucleotide
cgtagagccgtgaaccaacaaagccaacga

SEQ ID NO: 36075 - DNA, 30 bp, Artificial Sequence
  Synthetic oligonucleotide
cggggtcagatcaagcggctatcagaacga

SEQ ID NO: 36076 - DNA, 30 bp, Artificial Sequence
  Synthetic oligonucleotide
atgtgagtatggcgttaagctatggaacga

SEQ ID NO: 36077 - DNA, 30 bp, Artificial Sequence
  Synthetic oligonucleotide
gtgcataaacgggatacatttgtctaacga

SEQ ID NO: 36078 - DNA, 30 bp, Artificial Sequence
  Synthetic oligonucleotide
cgaagcctaaagttggttggcaggtaacga

SEQ ID NO: 36079 - DNA, 30 bp, Artificial Sequence
  Synthetic oligonucleotide
actatacagaagagggccaacatgtaacga

SEQ ID NO: 36080 - DNA, 30 bp, Artificial Sequence
  Synthetic oligonucleotide
aaggtggaaagaacaggggttagttaacga

SEQ ID NO: 36081 - DNA, 30 bp, Artificial Sequence
  Synthetic oligonucleotide
tcaccagcccggcactatgaattaacacga

SEQ ID NO: 36082 - DNA, 30 bp, Artificial Sequence
  Synthetic oligonucleotide
acgctgctataacaaacaagtaccacacga

SEQ ID NO: 36083 - DNA, 30 bp, Artificial Sequence
  Synthetic oligonucleotide
ggagtgcgaaagggtatccggctgacacga

SEQ ID NO: 36084 - DNA, 30 bp, Artificial Sequence
  Synthetic oligonucleotide
caagagctgttggatagagggtagccacga

SEQ ID NO: 36085 - DNA, 30 bp, Artificial Sequence
  Synthetic oligonucleotide
acaccggcaatggaactgtaaaaatcacga

SEQ ID NO: 36086 - DNA, 30 bp, Artificial Sequence
  Synthetic oligonucleotide
tgcttgggcgtaaatccgaagcagcgacga

SEQ ID NO: 36087 - DNA, 30 bp, Artificial Sequence
  Synthetic oligonucleotide
caatcggtggggcgagaaaggtcgcgacga

SEQ ID NO: 36088 - DNA, 30 bp, Artificial Sequence
  Synthetic oligonucleotide
agtgtgcaccactgggtcggaatatgacga

SEQ ID NO: 36089 - DNA, 30 bp, Artificial Sequence
  Synthetic oligonucleotide
aggggcggtaaacgttacgatactgtacga

SEQ ID NO: 36090 - DNA, 30 bp, Artificial Sequence
  Synthetic oligonucleotide
aaaggaggattctcatggcaaactacccga

SEQ ID NO: 36091 - DNA, 30 bp, Artificial Sequence
  Synthetic oligonucleotide
taacaacaaaatctgcctcccgaggcccga

SEQ ID NO: 36092 - DNA, 30 bp, Artificial Sequence
  Synthetic oligonucleotide
tcataatacccgagtgcgctatctgcccga

SEQ ID NO: 36093 - DNA, 30 bp, Artificial Sequence
  Synthetic oligonucleotide
atcaaggcaaaaatgggtagaacaagccga

SEQ ID NO: 36094 - DNA, 30 bp, Artificial Sequence
  Synthetic oligonucleotide
tccgagtagagggagcgagagacgatccga

SEQ ID NO: 36095 - DNA, 30 bp, Artificial Sequence
  Synthetic oligonucleotide
gaccacaagtttcagacaaccaggatccga

SEQ ID NO: 36096 - DNA, 30 bp, Artificial Sequence
  Synthetic oligonucleotide
cgatgcacaattagggcgcataatttccga

SEQ ID NO: 36097 - DNA, 30 bp, Artificial Sequence
  Synthetic oligonucleotide
tgaacgcgcccgagtccaaaaacaaagcga

SEQ ID NO: 36098 - DNA, 30 bp, Artificial Sequence
  Synthetic oligonucleotide
tgaattgaggagagtcaaagtagctagcga

SEQ ID NO: 36099 - DNA, 30 bp, Artificial Sequence
  Synthetic oligonucleotide
agtggtcagaacaagtaatatgatccgcga

SEQ ID NO: 36100 - DNA, 30 bp, Artificial Sequence
  Synthetic oligonucleotide
gtgtacaagagacgaaagaagatcgcgcga

SEQ ID NO: 36101 - DNA, 30 bp, Artificial Sequence
  Synthetic oligonucleotide
gcgaagtcggggtgggagctggaagggcga

SEQ ID NO: 36102 - DNA, 30 bp, Artificial Sequence
  Synthetic oligonucleotide
cgttaagaaggctcgtcacgcttatggcga

SEQ ID NO: 36103 - DNA, 30 bp, Artificial Sequence
  Synthetic oligonucleotide
cggcacacgatatgaagacccaaactgcga

SEQ ID NO: 36104 - DNA, 30 bp, Artificial Sequence
  Synthetic oligonucleotide
cgtataccgtgaaagttgcctcccctgcga

SEQ ID NO: 36105 - DNA, 30 bp, Artificial Sequence
  Synthetic oligonucleotide
gggatggagcacaggcaccccactaatcga

SEQ ID NO: 36106 - DNA, 30 bp, Artificial Sequence
  Synthetic oligonucleotide
ggccgacatactaaagtcattcgtcatcga

SEQ ID NO: 36107 - DNA, 30 bp, Artificial Sequence
  Synthetic oligonucleotide
attagagcgggagtgaacaaaacgtatcga

SEQ ID NO: 36108 - DNA, 30 bp, Artificial Sequence
  Synthetic oligonucleotide
atgcgcctgtccggcaacaacacttatcga

SEQ ID NO: 36109 - DNA, 30 bp, Artificial Sequence
  Synthetic oligonucleotide
cctatatacgagaactctgaacgaactcga

SEQ ID NO: 36110 - DNA, 30 bp, Artificial Sequence
  Synthetic oligonucleotide
ggtcggatctaaaatgtaagtagagctcga

SEQ ID NO: 36111 - DNA, 30 bp, Artificial Sequence
  Synthetic oligonucleotide
cggagaaacaagtcttggatgaaggctcga

SEQ ID NO: 36112 - DNA, 30 bp, Artificial Sequence
  Synthetic oligonucleotide
ggtggcgtataggtcaagtcgtaggctcga

SEQ ID NO: 36113 - DNA, 30 bp, Artificial Sequence
  Synthetic oligonucleotide
gatggtgaggccggtctacttgagagtcga

SEQ ID NO: 36114 - DNA, 30 bp, Artificial Sequence
  Synthetic oligonucleotide
acaggtggcacttgctagggaaatcgtcga

SEQ ID NO: 36115 - DNA, 30 bp, Artificial Sequence
  Synthetic oligonucleotide
atgagagacactatggaaggggttcgtcga

SEQ ID NO: 36116 - DNA, 30 bp, Artificial Sequence
  Synthetic oligonucleotide
atagagccgaggaatattagggcctgtcga

SEQ ID NO: 36117 - DNA, 30 bp, Artificial Sequence
  Synthetic oligonucleotide
taaaagtgccaacacaacttttgcattcga

SEQ ID NO: 36118 - DNA, 30 bp, Artificial Sequence
  Synthetic oligonucleotide
ggatggaggctatacggggcaaaagttcga

SEQ ID NO: 36119 - DNA, 30 bp, Artificial Sequence
  Synthetic oligonucleotide
aaaccgatgctctccgacatggaaaaagga

SEQ ID NO: 36120 - DNA, 30 bp, Artificial Sequence
  Synthetic oligonucleotide
ataaaaacgggctagcgtcaggataaagga

SEQ ID NO: 36121 - DNA, 30 bp, Artificial Sequence
  Synthetic oligonucleotide
tcgaaaaggggtacatagtattcacaagga

SEQ ID NO: 36122 - DNA, 30 bp, Artificial Sequence
  Synthetic oligonucleotide
tcgaaagtaagacatatgactgcgcaagga

SEQ ID NO: 36123 - DNA, 30 bp, Artificial Sequence
  Synthetic oligonucleotide
acaagccactagccggacaagatataagga

SEQ ID NO: 36124 - DNA, 30 bp, Artificial Sequence
  Synthetic oligonucleotide
gtaaaggggattgacgagcgacacacagga

SEQ ID NO: 36125 - DNA, 30 bp, Artificial Sequence
  Synthetic oligonucleotide
tgctactgtagaaacgctaataggccagga

SEQ ID NO: 36126 - DNA, 30 bp, Artificial Sequence
  Synthetic oligonucleotide
tacaataagaacaacgcctggccatcagga

SEQ ID NO: 36127 - DNA, 30 bp, Artificial Sequence
  Synthetic oligonucleotide
ctgagaaagtggtgtataaaggcctcagga

SEQ ID NO: 36128 - DNA, 30 bp, Artificial Sequence
  Synthetic oligonucleotide
cgagtaacaggagaaattaataccagagga

SEQ ID NO: 36129 - DNA, 30 bp, Artificial Sequence
  Synthetic oligonucleotide
tcgtacatgtggacccctctgagtagagga

SEQ ID NO: 36130 - DNA, 30 bp, Artificial Sequence
  Synthetic oligonucleotide
tctcgagtgaaataacgaaatcaaggagga

SEQ ID NO: 36131 - DNA, 30 bp, Artificial Sequence
  Synthetic oligonucleotide
gtggagagtttcccacataaatgaggagga

SEQ ID NO: 36132 - DNA, 30 bp, Artificial Sequence
  Synthetic oligonucleotide
tatgggtaacagtgacgaacgtcgggagga

SEQ ID NO: 36133 - DNA, 30 bp, Artificial Sequence
  Synthetic oligonucleotide
ctcggggcaaagaccttcgtagcaatagga

SEQ ID NO: 36134 - DNA, 30 bp, Artificial Sequence
  Synthetic oligonucleotide
caaccatcgaaattacatgcaagagtagga

SEQ ID NO: 36135 - DNA, 30 bp, Artificial Sequence
  Synthetic oligonucleotide
gcgtggccgacagagagctatcgatacgga

SEQ ID NO: 36136 - DNA, 30 bp, Artificial Sequence
  Synthetic oligonucleotide
aggtgatacattttcaggataaacgccgga

SEQ ID NO: 36137 - DNA, 31 bp, Artificial Sequence
  Synthetic oligonucleotide
gatgaaggcgtcaagcaaatctaatgccgga

SEQ ID NO: 36138 - DNA, 30 bp, Artificial Sequence
  Synthetic oligonucleotide
acgagtctgagctgacttagcgctgccgga

SEQ ID NO: 36139 - DNA, 30 bp, Artificial Sequence
  Synthetic oligonucleotide
gcgaggatcaaatagtatcgatttgccgga

SEQ ID NO: 36140 - DNA, 30 bp, Artificial Sequence
  Synthetic oligonucleotide
attgcatgaaggtcaacaactaagcgcgga

SEQ ID NO: 36141 - DNA, 30 bp, Artificial Sequence
  Synthetic oligonucleotide
caagtcgcgtataaggctggaaacggcgga

SEQ ID NO: 36142 - DNA, 30 bp, Artificial Sequence
  Synthetic oligonucleotide
aggctgtaggatcaacctaccgtatgcgga

SEQ ID NO: 36143 - DNA, 31 bp, Artificial Sequence
  Synthetic oligonucleotide
gccgtcgcagaaacgcgatcaaaacaaggga

SEQ ID NO: 36144 - DNA, 30 bp, Artificial Sequence
  Synthetic oligonucleotide
gtccagctcgattagaaaaggaagaaggga

SEQ ID NO: 36145 - DNA, 30 bp, Artificial Sequence
  Synthetic oligonucleotide
ggacgtcgctattgagccacaaaaacggga

SEQ ID NO: 36146 - DNA, 30 bp, Artificial Sequence
  Synthetic oligonucleotide
aagttaaatcaaagcatcacagaaacggga

SEQ ID NO: 36147 - DNA, 30 bp, Artificial Sequence
  Synthetic oligonucleotide
cgactaacatggtgacctttcggcggggga

SEQ ID NO: 36148 - DNA, 30 bp, Artificial Sequence
  Synthetic oligonucleotide
taccaacgtaggtataaaggaaggggggga

SEQ ID NO: 36149 - DNA, 30 bp, Artificial Sequence
  Synthetic oligonucleotide
cgtatcagggcctaggacatgaattgggga

SEQ ID NO: 36150 - DNA, 30 bp, Artificial Sequence
  Synthetic oligonucleotide
tcggaacctgagtgcgacagaattatggga

SEQ ID NO: 36151 - DNA, 30 bp, Artificial Sequence
  Synthetic oligonucleotide
tgctacgaggaaaaagtatacgccgtggga

SEQ ID NO: 36152 - DNA, 30 bp, Artificial Sequence
  Synthetic oligonucleotide
agagatctgtaaaataatggatccaatgga

SEQ ID NO: 36153 - DNA, 30 bp, Artificial Sequence
  Synthetic oligonucleotide
ccatgaatggtgtgaagggattagaatgga

SEQ ID NO: 36154 - DNA, 30 bp, Artificial Sequence
  Synthetic oligonucleotide
gcaataacgacgtgtataaggaatgatgga

SEQ ID NO: 36155 - DNA, 30 bp, Artificial Sequence
  Synthetic oligonucleotide
gtgaagcatagtaccgtaaagacatatgga

SEQ ID NO: 36156 - DNA, 30 bp, Artificial Sequence
  Synthetic oligonucleotide
ggttaccaaaatctgagcacccagtatgga

SEQ ID NO: 36157 - DNA, 31 bp, Artificial Sequence
  Synthetic oligonucleotide
atgtgtgaccaacgctatcgaggccactgga

SEQ ID NO: 36158 - DNA, 30 bp, Artificial Sequence
  Synthetic oligonucleotide
caagggatgctcacaatatgcacaagtgga

SEQ ID NO: 36159 - DNA, 30 bp, Artificial Sequence
  Synthetic oligonucleotide
acgggatgggtgcggatacgtgcacgtgga

SEQ ID NO: 36160 - DNA, 30 bp, Artificial Sequence
  Synthetic oligonucleotide
aggaggcatgccaagtacttacatcgtgga

SEQ ID NO: 36161 - DNA, 30 bp, Artificial Sequence
  Synthetic oligonucleotide
cgggcgacaagaacggcgcctgattgtgga

SEQ ID NO: 36162 - DNA, 30 bp, Artificial Sequence
  Synthetic oligonucleotide
tctaaaataaacacagaacatataattgga

SEQ ID NO: 36163 - DNA, 30 bp, Artificial Sequence
  Synthetic oligonucleotide
tatgggccacataacctccagctcattgga

SEQ ID NO: 36164 - DNA, 30 bp, Artificial Sequence
  Synthetic oligonucleotide
cgtcgaaatacgaccctcgctgaccttgga

SEQ ID NO: 36165 - DNA, 30 bp, Artificial Sequence
  Synthetic oligonucleotide
gacgtccgagagtcggtatgaggaaaatga

SEQ ID NO: 36166 - DNA, 30 bp, Artificial Sequence
  Synthetic oligonucleotide
ctaagctggacagcggactccataaaatga

SEQ ID NO: 36167 - DNA, 30 bp, Artificial Sequence
  Synthetic oligonucleotide
ctacgcgggaataagctccggacataatga

SEQ ID NO: 36168 - DNA, 30 bp, Artificial Sequence
  Synthetic oligonucleotide
gtgcccaaacggtagttgcctgattaatga

SEQ ID NO: 36169 - DNA, 30 bp, Artificial Sequence
  Synthetic oligonucleotide
gggcgacccacgtaaaactattccacatga

SEQ ID NO: 36170 - DNA, 30 bp, Artificial Sequence
  Synthetic oligonucleotide
atcgggcaaagcctgtggacgatcacatga

SEQ ID NO: 36171 - DNA, 30 bp, Artificial Sequence
  Synthetic oligonucleotide
aggcagggtaggacctgaacttctacatga

SEQ ID NO: 36172 - DNA, 30 bp, Artificial Sequence
  Synthetic oligonucleotide
ggagaaggtggcaagtttgctgttgcatga

SEQ ID NO: 36173 - DNA, 30 bp, Artificial Sequence
  Synthetic oligonucleotide
aagccctgaatcgagggaaacgaatcatga

SEQ ID NO: 36174 - DNA, 30 bp, Artificial Sequence
  Synthetic oligonucleotide
ggtcacgttcaaaatatcgctgatcgatga

SEQ ID NO: 36175 - DNA, 30 bp, Artificial Sequence
  Synthetic oligonucleotide
aggaacggtgatgccgccgacccatgatga

SEQ ID NO: 36176 - DNA, 30 bp, Artificial Sequence
  Synthetic oligonucleotide
aaaagaggaacacagttggcgacgatatga

SEQ ID NO: 36177 - DNA, 30 bp, Artificial Sequence
  Synthetic oligonucleotide
gcgccaggtaaatggcggagacaaaactga

SEQ ID NO: 36178 - DNA, 30 bp, Artificial Sequence
  Synthetic oligonucleotide
cgaccaactcgggacatgtcatgccactga

SEQ ID NO: 36179 - DNA, 30 bp, Artificial Sequence
  Synthetic oligonucleotide
cgagaaagcatgtcagtgagccgtgcctga

SEQ ID NO: 36180 - DNA, 30 bp, Artificial Sequence
  Synthetic oligonucleotide
gagtcgttagggaaagtgagggcgagctga

SEQ ID NO: 36181 - DNA, 30 bp, Artificial Sequence
  Synthetic oligonucleotide
tgtagtaaggggagatagtagattagctga

SEQ ID NO: 36182 - DNA, 30 bp, Artificial Sequence
  Synthetic oligonucleotide
ggaccgtatacaaagaaacggaaattctga

SEQ ID NO: 36183 - DNA, 30 bp, Artificial Sequence
  Synthetic oligonucleotide
agtacagtgcgtgcctcaacatagcagtga

SEQ ID NO: 36184 - DNA, 30 bp, Artificial Sequence
  Synthetic oligonucleotide
cgccatgcaaccagacgaagggttgagtga

SEQ ID NO: 36185 - DNA, 30 bp, Artificial Sequence
  Synthetic oligonucleotide
cggagcagtgaccaacagattgtcccgtga

SEQ ID NO: 36186 - DNA, 30 bp, Artificial Sequence
  Synthetic oligonucleotide
actgtcggagagatggattgagttccgtga

SEQ ID NO: 36187 - DNA, 30 bp, Artificial Sequence
  Synthetic oligonucleotide
aaggggacgtgatttttggagagcgcgtga

SEQ ID NO: 36188 - DNA, 30 bp, Artificial Sequence
  Synthetic oligonucleotide
aggagaatgccagagctcagtgattcgtga

SEQ ID NO: 36189 - DNA, 30 bp, Artificial Sequence
  Synthetic oligonucleotide
ggaacataaggacattcgtattcgaggtga

SEQ ID NO: 36190 - DNA, 30 bp, Artificial Sequence
  Synthetic oligonucleotide
acagaagcggaagcgttagctgggaggtga

SEQ ID NO: 36191 - DNA, 30 bp, Artificial Sequence
  Synthetic oligonucleotide
gggcaactctgcaggtagatccgtcggtga

SEQ ID NO: 36192 - DNA, 30 bp, Artificial Sequence
  Synthetic oligonucleotide
aagaggtcaccatctacacagatagggtga

SEQ ID NO: 36193 - DNA, 30 bp, Artificial Sequence
  Synthetic oligonucleotide
acccaatcgcgaaaggaagagatgtggtga

SEQ ID NO: 36194 - DNA, 30 bp, Artificial Sequence
  Synthetic oligonucleotide
acggctaaggcctaggactatatatattga

SEQ ID NO: 36195 - DNA, 30 bp, Artificial Sequence
  Synthetic oligonucleotide
agaccgtgggagaatgacatgttttattga

SEQ ID NO: 36196 - DNA, 30 bp, Artificial Sequence
  Synthetic oligonucleotide
gcgtaggcgtacgtaactaccagggcttga

SEQ ID NO: 36197 - DNA, 30 bp, Artificial Sequence
  Synthetic oligonucleotide
ggctagagagtgtccaggaataattcttga

SEQ ID NO: 36198 - DNA, 30 bp, Artificial Sequence
  Synthetic oligonucleotide
gtggacaatgaaggatggccgacgcgttga

SEQ ID NO: 36199 - DNA, 30 bp, Artificial Sequence
  Synthetic oligonucleotide
acgattaatggcagtagcaatgtatgttga

SEQ ID NO: 36200 - DNA, 30 bp, Artificial Sequence
  Synthetic oligonucleotide
acgtagctaaggtatacgaggccaaaaata

SEQ ID NO: 36201 - DNA, 30 bp, Artificial Sequence
  Synthetic oligonucleotide
taggcaagaattaagtgatctcggaaaata

SEQ ID NO: 36202 - DNA, 30 bp, Artificial Sequence
  Synthetic oligonucleotide
tccacaggcggacgagaaggtggataaata

SEQ ID NO: 36203 - DNA, 30 bp, Artificial Sequence
  Synthetic oligonucleotide
tgtcctccgaaaactcattactgagcaata

SEQ ID NO: 36204 - DNA, 30 bp, Artificial Sequence
  Synthetic oligonucleotide
ggggaggggcagtagccgcactgcgcaata

SEQ ID NO: 36205 - DNA, 30 bp, Artificial Sequence
  Synthetic oligonucleotide
cgagccactcatcgtgtagcccaaagaata

SEQ ID NO: 36206 - DNA, 30 bp, Artificial Sequence
  Synthetic oligonucleotide
cgcaaaaactgcagtgaactgagaagaata

SEQ ID NO: 36207 - DNA, 30 bp, Artificial Sequence
  Synthetic oligonucleotide
gctcacaggggaactagcacaccgagaata

SEQ ID NO: 36208 - DNA, 30 bp, Artificial Sequence
  Synthetic oligonucleotide
tgatcactcgcaaagcgtgtgcgtcgaata

SEQ ID NO: 36209 - DNA, 30 bp, Artificial Sequence
  Synthetic oligonucleotide
cattccgcgaaatacaaacagaaaggaata

SEQ ID NO: 36210 - DNA, 30 bp, Artificial Sequence
  Synthetic oligonucleotide
ggaggctatcagcacaactatgcgggaata

SEQ ID NO: 36211 - DNA, 30 bp, Artificial Sequence
  Synthetic oligonucleotide
cccgcaggtcaggaccgagaattgataata

SEQ ID NO: 36212 - DNA, 30 bp, Artificial Sequence
  Synthetic oligonucleotide
aaagcagaacacatgaacacgagtttaata

SEQ ID NO: 36213 - DNA, 30 bp, Artificial Sequence
  Synthetic oligonucleotide
acggtccctcagaaaggacgtacacacata

SEQ ID NO: 36214 - DNA, 31 bp, Artificial Sequence
  Synthetic oligonucleotide
gcgtgtaacccgaagttgataaggacccata

SEQ ID NO: 36215 - DNA, 30 bp, Artificial Sequence
  Synthetic oligonucleotide
acgcgggtcccgaacaaaccttaagccata

SEQ ID NO: 36216 - DNA, 30 bp, Artificial Sequence
  Synthetic oligonucleotide
cgatcggatcacaaaacatcataatccata

SEQ ID NO: 36217 - DNA, 30 bp, Artificial Sequence
  Synthetic oligonucleotide
cacttgacaactcgggattcaaatagcata

SEQ ID NO: 36218 - DNA, 30 bp, Artificial Sequence
  Synthetic oligonucleotide
taagggacagagcacaaatttcacttcata

SEQ ID NO: 36219 - DNA, 30 bp, Artificial Sequence
  Synthetic oligonucleotide
ggtgggatcaatcagagaatgagaaagata

SEQ ID NO: 36220 - DNA, 30 bp, Artificial Sequence
  Synthetic oligonucleotide
ctggacacagaatgcccagtacttaagata

SEQ ID NO: 36221 - DNA, 30 bp, Artificial Sequence
  Synthetic oligonucleotide
acactggaagcatcccacgttacacagata

SEQ ID NO: 36222 - DNA, 30 bp, Artificial Sequence
  Synthetic oligonucleotide
gggtcgaatagaagacacttgggggagata

SEQ ID NO: 36223 - DNA, 30 bp, Artificial Sequence
  Synthetic oligonucleotide
gctaaggaagcgtacgtgtgcaaatagata

SEQ ID NO: 36224 - DNA, 30 bp, Artificial Sequence
  Synthetic oligonucleotide
acggccttatgataaaaccgtaaatagata

SEQ ID NO: 36225 - DNA, 30 bp, Artificial Sequence
  Synthetic oligonucleotide
cacgagggtctaccaagtattgcaacgata

SEQ ID NO: 36226 - DNA, 30 bp, Artificial Sequence
  Synthetic oligonucleotide
cgacgtgcgtcgatccaatcaattacgata

SEQ ID NO: 36227 - DNA, 30 bp, Artificial Sequence
  Synthetic oligonucleotide
gagacaaggcgtattagacttaacccgata

SEQ ID NO: 36228 - DNA, 30 bp, Artificial Sequence
  Synthetic oligonucleotide
cggattaagagccgtttgaaattatcgata

SEQ ID NO: 36229 - DNA, 30 bp, Artificial Sequence
  Synthetic oligonucleotide
caccttagtgggaaattacgggaggggata

SEQ ID NO: 36230 - DNA, 30 bp, Artificial Sequence
  Synthetic oligonucleotide
aagacacgaggacctggatgtagctggata

SEQ ID NO: 36231 - DNA, 30 bp, Artificial Sequence
  Synthetic oligonucleotide
cgccgacaccacacagcagaagtcatgata

SEQ ID NO: 36232 - DNA, 30 bp, Artificial Sequence
  Synthetic oligonucleotide
gacaatgaactaccggcaagacaactgata

SEQ ID NO: 36233 - DNA, 30 bp, Artificial Sequence
  Synthetic oligonucleotide
gtgcatgacagggaacagggggagctgata

SEQ ID NO: 36234 - DNA, 30 bp, Artificial Sequence
  Synthetic oligonucleotide
ttgcacgaaggaggatgagtacagttgata

SEQ ID NO: 36235 - DNA, 30 bp, Artificial Sequence
  Synthetic oligonucleotide
caaggcgtgggtaccacacgaatacatata

SEQ ID NO: 36236 - DNA, 30 bp, Artificial Sequence
  Synthetic oligonucleotide
cacacaagtccgtgtcccaaatagagtata

SEQ ID NO: 36237 - DNA, 30 bp, Artificial Sequence
  Synthetic oligonucleotide
acgagagtacgtataagtcaacgtattata

SEQ ID NO: 36238 - DNA, 30 bp, Artificial Sequence
  Synthetic oligonucleotide
cctaatgcgattcagacacccgggaaacta

SEQ ID NO: 36239 - DNA, 30 bp, Artificial Sequence
  Synthetic oligonucleotide
tggtcatcaacgacagactgccctaaacta

SEQ ID NO: 36240 - DNA, 30 bp, Artificial Sequence
  Synthetic oligonucleotide
ggacggctgtccgacatcatgtactaacta

SEQ ID NO: 36241 - DNA, 31 bp, Artificial Sequence
  Synthetic oligonucleotide
aaggtaagattaacccagatatcgcccacta

SEQ ID NO: 36242 - DNA, 30 bp, Artificial Sequence
  Synthetic oligonucleotide
aggacaataaatcgagcttaacaagcacta

SEQ ID NO: 36243 - DNA, 30 bp, Artificial Sequence
  Synthetic oligonucleotide
gatgaagggataacaaaagacaaatcacta

SEQ ID NO: 36244 - DNA, 30 bp, Artificial Sequence
  Synthetic oligonucleotide
cgctaggagcaaggttactcggtatgacta

SEQ ID NO: 36245 - DNA, 30 bp, Artificial Sequence
  Synthetic oligonucleotide
ggcctcgggacaaccaagtgacacttacta

SEQ ID NO: 36246 - DNA, 30 bp, Artificial Sequence
  Synthetic oligonucleotide
acgacgataaggcgatcaggttccgaccta

SEQ ID NO: 36247 - DNA, 30 bp, Artificial Sequence
  Synthetic oligonucleotide
acttgacgtgggagggaggacgtctgccta

SEQ ID NO: 36248 - DNA, 30 bp, Artificial Sequence
  Synthetic oligonucleotide
ctgcagggtaggcacgtttccaaccagcta

SEQ ID NO: 36249 - DNA, 30 bp, Artificial Sequence
  Synthetic oligonucleotide
ggtatcagaagggatgctattaatgagcta

SEQ ID NO: 36250 - DNA, 30 bp, Artificial Sequence
  Synthetic oligonucleotide
acctaaaaacagactacacccgcagcgcta

SEQ ID NO: 36251 - DNA, 30 bp, Artificial Sequence
  Synthetic oligonucleotide
tccacggcatttaagaaccgagttgcgcta

SEQ ID NO: 36252 - DNA, 30 bp, Artificial Sequence
  Synthetic oligonucleotide
tgatgccgaatggtggggagcaaagggcta

SEQ ID NO: 36253 - DNA, 30 bp, Artificial Sequence
  Synthetic oligonucleotide
cgtagtgcccttccggaacgaatctggcta

SEQ ID NO: 36254 - DNA, 30 bp, Artificial Sequence
  Synthetic oligonucleotide
tgtcgacaatggggaggaggcccgtatcta

SEQ ID NO: 36255 - DNA, 30 bp, Artificial Sequence
  Synthetic oligonucleotide
gctaagacgaaaatgtaaaggccaactcta

SEQ ID NO: 36256 - DNA, 30 bp, Artificial Sequence
  Synthetic oligonucleotide
accaagagtcgcagtatcaaattcgctcta

SEQ ID NO: 36257 - DNA, 30 bp, Artificial Sequence
  Synthetic oligonucleotide
gggcgcgacgagaaaggggccattgctcta

SEQ ID NO: 36258 - DNA, 30 bp, Artificial Sequence
  Synthetic oligonucleotide
acgaatcatatggacacaccttcacgtcta

SEQ ID NO: 36259 - DNA, 30 bp, Artificial Sequence
  Synthetic oligonucleotide
gacaccagggcggggcttggcactcgtcta

SEQ ID NO: 36260 - DNA, 30 bp, Artificial Sequence
  Synthetic oligonucleotide
actcgcaaaggtcgtgtagcgttgtgtcta

SEQ ID NO: 36261 - DNA, 30 bp, Artificial Sequence
  Synthetic oligonucleotide
gctgagtggaggaattgttccagcattcta

SEQ ID NO: 36262 - DNA, 30 bp, Artificial Sequence
  Synthetic oligonucleotide
atgcggaccttataacatggatggaaagta

SEQ ID NO: 36263 - DNA, 30 bp, Artificial Sequence
  Synthetic oligonucleotide
acagagacctgggggaaccgccgtaaagta

SEQ ID NO: 36264 - DNA, 30 bp, Artificial Sequence
  Synthetic oligonucleotide
ccactgttctagtaaggggcggaacaagta

SEQ ID NO: 36265 - DNA, 30 bp, Artificial Sequence
  Synthetic oligonucleotide
ggatatcaacgagaaactgccgtccaagta

SEQ ID NO: 36266 - DNA, 30 bp, Artificial Sequence
  Synthetic oligonucleotide
tgtgtgcagcaccagggagaactagcagta

SEQ ID NO: 36267 - DNA, 30 bp, Artificial Sequence
  Synthetic oligonucleotide
cgctatatagacaggaggacgacggcagta

SEQ ID NO: 36268 - DNA, 30 bp, Artificial Sequence
  Synthetic oligonucleotide
ggttgagctggacgacgccaggtaagagta

SEQ ID NO: 36269 - DNA, 30 bp, Artificial Sequence
  Synthetic oligonucleotide
gtgtggaggtagcggaaatgcgacagagta

SEQ ID NO: 36270 - DNA, 30 bp, Artificial Sequence
  Synthetic oligonucleotide
acgtaagtgtcgcagagagatacacgagta

SEQ ID NO: 36271 - DNA, 30 bp, Artificial Sequence
  Synthetic oligonucleotide
aaggtggttagccgagtctaatgcggagta

SEQ ID NO: 36272 - DNA, 30 bp, Artificial Sequence
  Synthetic oligonucleotide
tgccaaaaagctaaaacggtaaacatagta

SEQ ID NO: 36273 - DNA, 30 bp, Artificial Sequence
  Synthetic oligonucleotide
acgcatgagtgggcaagaagcgatatagta

SEQ ID NO: 36274 - DNA, 30 bp, Artificial Sequence
  Synthetic oligonucleotide
tcgtcggatgacatggggcaggatatagta

SEQ ID NO: 36275 - DNA, 30 bp, Artificial Sequence
  Synthetic oligonucleotide
tacggcggtgcttataggcgtaatctagta

SEQ ID NO: 36276 - DNA, 30 bp, Artificial Sequence
  Synthetic oligonucleotide
tgagcgcgacgattaggtaggcacaacgta

SEQ ID NO: 36277 - DNA, 30 bp, Artificial Sequence
  Synthetic oligonucleotide
ccagtgtgagtaggtgagcctgacaacgta

SEQ ID NO: 36278 - DNA, 30 bp, Artificial Sequence
  Synthetic oligonucleotide
gtgaatattgatatacgaaacagtgacgta

SEQ ID NO: 36279 - DNA, 30 bp, Artificial Sequence
  Synthetic oligonucleotide
ttatggtacataggataggaggagtacgta

SEQ ID NO: 36280 - DNA, 30 bp, Artificial Sequence
  Synthetic oligonucleotide
ggaatgcgtgaaaaggaggtgggagccgta

SEQ ID NO: 36281 - DNA, 30 bp, Artificial Sequence
  Synthetic oligonucleotide
caagagcattaagtgcgagcagctagcgta

SEQ ID NO: 36282 - DNA, 30 bp, Artificial Sequence
  Synthetic oligonucleotide
ggagccaggataaacaaaagaaggggcgta

SEQ ID NO: 36283 - DNA, 30 bp, Artificial Sequence
  Synthetic oligonucleotide
catgaggacaatgcccgtatagaatgcgta

SEQ ID NO: 36284 - DNA, 30 bp, Artificial Sequence
  Synthetic oligonucleotide
gaggcaatcggagtcgggcaagtctgcgta

SEQ ID NO: 36285 - DNA, 30 bp, Artificial Sequence
  Synthetic oligonucleotide
tcgagtagagagtacaataggaggtgcgta

SEQ ID NO: 36286 - DNA, 30 bp, Artificial Sequence
  Synthetic oligonucleotide
tctaagaacacggaaggtcctaggatcgta

SEQ ID NO: 36287 - DNA, 30 bp, Artificial Sequence
  Synthetic oligonucleotide
gcaccaaccaagagacctgtggacgtcgta

SEQ ID NO: 36288 - DNA, 30 bp, Artificial Sequence
  Synthetic oligonucleotide
cactgggtgggtcgtgagacgatgttcgta

SEQ ID NO: 36289 - DNA, 30 bp, Artificial Sequence
  Synthetic oligonucleotide
gagatcacaaccttaaacagtgagaaggta

SEQ ID NO: 36290 - DNA, 30 bp, Artificial Sequence
  Synthetic oligonucleotide
cgggaaatgagccggacaggagataaggta

SEQ ID NO: 36291 - DNA, 30 bp, Artificial Sequence
  Synthetic oligonucleotide
cacaactgggatgtgaccggtactcaggta

SEQ ID NO: 36292 - DNA, 30 bp, Artificial Sequence
  Synthetic oligonucleotide
tcaagatacacacgacgttgcgcaccggta

SEQ ID NO: 36293 - DNA, 30 bp, Artificial Sequence
  Synthetic oligonucleotide
acggattcgaatcgaccgaaagtatcggta

SEQ ID NO: 36294 - DNA, 30 bp, Artificial Sequence
  Synthetic oligonucleotide
gagcacaggtcaggaggcatgaagtcggta

SEQ ID NO: 36295 - DNA, 30 bp, Artificial Sequence
  Synthetic oligonucleotide
gaacgaaagaccttgattcacccttcggta

SEQ ID NO: 36296 - DNA, 30 bp, Artificial Sequence
  Synthetic oligonucleotide
gacagatgacgctccacggatgctagggta

SEQ ID NO: 36297 - DNA, 30 bp, Artificial Sequence
  Synthetic oligonucleotide
ggacaaggattaggatgcgatcggggggta

SEQ ID NO: 36298 - DNA, 30 bp, Artificial Sequence
  Synthetic oligonucleotide
aacacgagatgagtaaagcacatgggggta

SEQ ID NO: 36299 - DNA, 30 bp, Artificial Sequence
  Synthetic oligonucleotide
tgtaattcgagcaagtggggacatggggta

SEQ ID NO: 36300 - DNA, 30 bp, Artificial Sequence
  Synthetic oligonucleotide
acaaatgaaagacatgcgcgtacttgggta

SEQ ID NO: 36301 - DNA, 30 bp, Artificial Sequence
  Synthetic oligonucleotide
cagagccgtcggtcaacttttagcatggta

SEQ ID NO: 36302 - DNA, 30 bp, Artificial Sequence
  Synthetic oligonucleotide
cacggcagtgtggggcgccaccacttggta

SEQ ID NO: 36303 - DNA, 30 bp, Artificial Sequence
  Synthetic oligonucleotide
gccgagtgtcagcgaaatttccagaatgta

SEQ ID NO: 36304 - DNA, 30 bp, Artificial Sequence
  Synthetic oligonucleotide
cttgttctgagaaacattcagagagatgta

SEQ ID NO: 36305 - DNA, 30 bp, Artificial Sequence
  Synthetic oligonucleotide
cgtcttgtgcaagatctcaagaaggatgta

SEQ ID NO: 36306 - DNA, 30 bp, Artificial Sequence
  Synthetic oligonucleotide
cggtaacagagatgtttcagacaagctgta

SEQ ID NO: 36307 - DNA, 30 bp, Artificial Sequence
  Synthetic oligonucleotide
cgctgaacggtaaacctagcaacctgtgta

SEQ ID NO: 36308 - DNA, 30 bp, Artificial Sequence
  Synthetic oligonucleotide
gagaaaagtgcgtctacaacaggacaatta

SEQ ID NO: 36309 - DNA, 30 bp, Artificial Sequence
  Synthetic oligonucleotide
agatggagaatagccgagagcctgatatta

SEQ ID NO: 36310 - DNA, 30 bp, Artificial Sequence
  Synthetic oligonucleotide
ggcacagcgaaataacgcaaaagtccctta

SEQ ID NO: 36311 - DNA, 30 bp, Artificial Sequence
  Synthetic oligonucleotide
cggatactgccctacccatgagccgagtta

SEQ ID NO: 36312 - DNA, 30 bp, Artificial Sequence
  Synthetic oligonucleotide
acacggggatatacccaaggcgcggagtta

SEQ ID NO: 36313 - DNA, 30 bp, Artificial Sequence
  Synthetic oligonucleotide
cgtgggaacgaagaataccattaatcgtta

SEQ ID NO: 36314 - DNA, 30 bp, Artificial Sequence
  Synthetic oligonucleotide
ggctagggggtaagcacggaactgtcgtta

SEQ ID NO: 36315 - DNA, 30 bp, Artificial Sequence
  Synthetic oligonucleotide
ccaggggcgtagtgatgttctgaaaggtta

SEQ ID NO: 36316 - DNA, 30 bp, Artificial Sequence
  Synthetic oligonucleotide
tcagggcagagtaggccaggataagtgtta

SEQ ID NO: 36317 - DNA, 30 bp, Artificial Sequence
  Synthetic oligonucleotide
gcgcaaagcgttaaccactcgatgaattta

SEQ ID NO: 36318 - DNA, 30 bp, Artificial Sequence
  Synthetic oligonucleotide
cgattcatacgctagtgagtgaacgattta

SEQ ID NO: 36319 - DNA, 30 bp, Artificial Sequence
  Synthetic oligonucleotide
aggttcaacataagcaaaggtgcatattta

SEQ ID NO: 36320 - DNA, 30 bp, Artificial Sequence
  Synthetic oligonucleotide
cacaggccgaaaagcaacttgataggttta

SEQ ID NO: 36321 - DNA, 30 bp, Artificial Sequence
  Synthetic oligonucleotide
ggaagctcggaggaggcgggactgcaaaac

SEQ ID NO: 36322 - DNA, 30 bp, Artificial Sequence
  Synthetic oligonucleotide
ctgtcgggtatcaagatttagagcgcaaac

SEQ ID NO: 36323 - DNA, 30 bp, Artificial Sequence
  Synthetic oligonucleotide
atgagatcacgtcgtattatgaatgcaaac

SEQ ID NO: 36324 - DNA, 30 bp, Artificial Sequence
  Synthetic oligonucleotide
gagccagggacatggggtgccgcactaaac

SEQ ID NO: 36325 - DNA, 30 bp, Artificial Sequence
  Synthetic oligonucleotide
agctgcacttaaggacaaatctggctaaac

SEQ ID NO: 36326 - DNA, 31 bp, Artificial Sequence
  Synthetic oligonucleotide
cgttcagaagtctgctgtgacctcattaaac

SEQ ID NO: 36327 - DNA, 30 bp, Artificial Sequence
  Synthetic oligonucleotide
ataacgaccggactggccagagaggacaac

SEQ ID NO: 36328 - DNA, 30 bp, Artificial Sequence
  Synthetic oligonucleotide
acttggcaaagacgatttacagagaccaac

SEQ ID NO: 36329 - DNA, 30 bp, Artificial Sequence
  Synthetic oligonucleotide
atcgccgaagtgtactgacatacacccaac

SEQ ID NO: 36330 - DNA, 30 bp, Artificial Sequence
  Synthetic oligonucleotide
atcgacaaatgcaggagactgtgcgccaac

SEQ ID NO: 36331 - DNA, 30 bp, Artificial Sequence
  Synthetic oligonucleotide
cgggagggcgcatgcgtgactgtcatcaac

SEQ ID NO: 36332 - DNA, 30 bp, Artificial Sequence
  Synthetic oligonucleotide
acagcgatctaacaaagaatgagcgtcaac

SEQ ID NO: 36333 - DNA, 30 bp, Artificial Sequence
  Synthetic oligonucleotide
tcagcacccaaccagtctaagagtaagaac

SEQ ID NO: 36334 - DNA, 30 bp, Artificial Sequence
  Synthetic oligonucleotide
gaccgagagacgcgtaatgtgatcacgaac

SEQ ID NO: 36335 - DNA, 30 bp, Artificial Sequence
  Synthetic oligonucleotide
ccagatacatagcgagtacccactccgaac

SEQ ID NO: 36336 - DNA, 30 bp, Artificial Sequence
  Synthetic oligonucleotide
ataggaacccgtgtatgctccagagcgaac

SEQ ID NO: 36337 - DNA, 30 bp, Artificial Sequence
  Synthetic oligonucleotide
tggtccaaccaacatcgctatacagggaac

SEQ ID NO: 36338 - DNA, 30 bp, Artificial Sequence
  Synthetic oligonucleotide
aggaatgtaatggctgggggctatatgaac

SEQ ID NO: 36339 - DNA, 30 bp, Artificial Sequence
  Synthetic oligonucleotide
cgtgacgacacgtaggaggccgttatgaac

SEQ ID NO: 36340 - DNA, 30 bp, Artificial Sequence
  Synthetic oligonucleotide
aaacgctaaggaacaagcaactagttgaac

SEQ ID NO: 36341 - DNA, 30 bp, Artificial Sequence
  Synthetic oligonucleotide
cctggggtgataccactaatagaagctaac

SEQ ID NO: 36342 - DNA, 30 bp, Artificial Sequence
  Synthetic oligonucleotide
tcaggacctaatgagagctagggccgtaac

SEQ ID NO: 36343 - DNA, 30 bp, Artificial Sequence
  Synthetic oligonucleotide
atagagacaactatccacgagagatgtaac

SEQ ID NO: 36344 - DNA, 30 bp, Artificial Sequence
  Synthetic oligonucleotide
cgtgttcgggggataaggaagaaggttaac

SEQ ID NO: 36345 - DNA, 30 bp, Artificial Sequence
  Synthetic oligonucleotide
gcggccgacctaggataagacaaaaaacac

SEQ ID NO: 36346 - DNA, 30 bp, Artificial Sequence
  Synthetic oligonucleotide
atcaaaatggtgggcggaaccgaaaaacac

SEQ ID NO: 36347 - DNA, 30 bp, Artificial Sequence
  Synthetic oligonucleotide
ggctaattacccgccaagctgccagaacac

SEQ ID NO: 36348 - DNA, 30 bp, Artificial Sequence
  Synthetic oligonucleotide
tgagatacgggactaggttgctacgaacac

SEQ ID NO: 36349 - DNA, 30 bp, Artificial Sequence
  Synthetic oligonucleotide
caacagggatttcaaaaataagggtaacac

SEQ ID NO: 36350 - DNA, 30 bp, Artificial Sequence
  Synthetic oligonucleotide
tctacaatggatacggctcccggtacacac

SEQ ID NO: 36351 - DNA, 30 bp, Artificial Sequence
  Synthetic oligonucleotide
gtgggtatcatcgaatcgttacaagcacac

SEQ ID NO: 36352 - DNA, 30 bp, Artificial Sequence
  Synthetic oligonucleotide
ggaaacctacctggccgaacaataagacac

SEQ ID NO: 36353 - DNA, 30 bp, Artificial Sequence
  Synthetic oligonucleotide
ccgcgatcggcatgagattaaggcgtacac

SEQ ID NO: 36354 - DNA, 30 bp, Artificial Sequence
  Synthetic oligonucleotide
atgtaaataagggcgcgaattctcgaccac

SEQ ID NO: 36355 - DNA, 30 bp, Artificial Sequence
  Synthetic oligonucleotide
gcgggcgcggagccacatcaataaacccac

SEQ ID NO: 36356 - DNA, 30 bp, Artificial Sequence
  Synthetic oligonucleotide
caaggacgcgagtaagggcagtgtccccac

SEQ ID NO: 36357 - DNA, 30 bp, Artificial Sequence
  Synthetic oligonucleotide
cagcagaaagtggaataggagggaagccac

SEQ ID NO: 36358 - DNA, 30 bp, Artificial Sequence
  Synthetic oligonucleotide
gtaaacatactcaatgctatcacaatccac

SEQ ID NO: 36359 - DNA, 30 bp, Artificial Sequence
  Synthetic oligonucleotide
ggaaggagtttagctaacatctccaagcac

SEQ ID NO: 36360 - DNA, 30 bp, Artificial Sequence
  Synthetic oligonucleotide
tgcattcggggccaaagaaaaagctagcac

SEQ ID NO: 36361 - DNA, 30 bp, Artificial Sequence
  Synthetic oligonucleotide
actggtacggggagagaaagcgacatgcac

SEQ ID NO: 36362 - DNA, 30 bp, Artificial Sequence
  Synthetic oligonucleotide
ataacaggagcaagggtatagtacatgcac

SEQ ID NO: 36363 - DNA, 30 bp, Artificial Sequence
  Synthetic oligonucleotide
gaacattgcaaaggaaaacgtctgcttcac

SEQ ID NO: 36364 - DNA, 30 bp, Artificial Sequence
  Synthetic oligonucleotide
acgtcgtgaggtaagtatggcgttgttcac

SEQ ID NO: 36365 - DNA, 30 bp, Artificial Sequence
  Synthetic oligonucleotide
aacagcacaaatagccaaaatggcaaagac

SEQ ID NO: 36366 - DNA, 30 bp, Artificial Sequence
  Synthetic oligonucleotide
ccgacaaggcccacgctcgtaccggaagac

SEQ ID NO: 36367 - DNA, 30 bp, Artificial Sequence
  Synthetic oligonucleotide
cacagcatcgcattactggaccggtaagac

SEQ ID NO: 36368 - DNA, 30 bp, Artificial Sequence
  Synthetic oligonucleotide
cagtaccgagttaagtattagtcaccagac

SEQ ID NO: 36369 - DNA, 30 bp, Artificial Sequence
  Synthetic oligonucleotide
ctactaaagccggacaatcaatttccagac

SEQ ID NO: 36370 - DNA, 30 bp, Artificial Sequence
  Synthetic oligonucleotide
gcgatcttaaaaacagcagaacggtcagac

SEQ ID NO: 36371 - DNA, 30 bp, Artificial Sequence
  Synthetic oligonucleotide
aacacattcattgctgggctggggagagac

SEQ ID NO: 36372 - DNA, 30 bp, Artificial Sequence
  Synthetic oligonucleotide
cgacgacgttcgcaattctcggagtgagac

SEQ ID NO: 36373 - DNA, 30 bp, Artificial Sequence
  Synthetic oligonucleotide
agctcggatgcggacgacactcctttagac

SEQ ID NO: 36374 - DNA, 30 bp, Artificial Sequence
  Synthetic oligonucleotide
gtcgttcttgaaggtcgaggaggtcacgac

SEQ ID NO: 36375 - DNA, 30 bp, Artificial Sequence
  Synthetic oligonucleotide
tgaggaggttattaaccggggagagacgac

SEQ ID NO: 36376 - DNA, 30 bp, Artificial Sequence
  Synthetic oligonucleotide
caaggcatgacttcagcaccataaagcgac

SEQ ID NO: 36377 - DNA, 30 bp, Artificial Sequence
  Synthetic oligonucleotide
cagctacacccagacagataaagatgcgac

SEQ ID NO: 36378 - DNA, 30 bp, Artificial Sequence
  Synthetic oligonucleotide
gctagagatctattgggacaatcgctcgac

SEQ ID NO: 36379 - DNA, 30 bp, Artificial Sequence
  Synthetic oligonucleotide
aggggataaagtccaatggggaagttcgac

SEQ ID NO: 36380 - DNA, 30 bp, Artificial Sequence
  Synthetic oligonucleotide
caacggcggatcaagtaggctctggaggac

SEQ ID NO: 36381 - DNA, 30 bp, Artificial Sequence
  Synthetic oligonucleotide
tagtgcgatgaagtaaccaaatcgtaggac

SEQ ID NO: 36382 - DNA, 30 bp, Artificial Sequence
  Synthetic oligonucleotide
tagaagctcagggaggtgtaaaatacggac

SEQ ID NO: 36383 - DNA, 30 bp, Artificial Sequence
  Synthetic oligonucleotide
cggcccatggacacaagagcgctatcggac

SEQ ID NO: 36384 - DNA, 30 bp, Artificial Sequence
  Synthetic oligonucleotide
tcgtaattcggacagcttactagaagggac

SEQ ID NO: 36385 - DNA, 30 bp, Artificial Sequence
  Synthetic oligonucleotide
gaccaccagcaggaatggaagacgagggac

SEQ ID NO: 36386 - DNA, 30 bp, Artificial Sequence
  Synthetic oligonucleotide
acgggcaagtagtcgaggtcacgtagggac

SEQ ID NO: 36387 - DNA, 30 bp, Artificial Sequence
  Synthetic oligonucleotide
acgttgatacaatcgcagaaggacatggac

SEQ ID NO: 36388 - DNA, 30 bp, Artificial Sequence
  Synthetic oligonucleotide
acacgagacagtggtcgttcaggcttggac

SEQ ID NO: 36389 - DNA, 30 bp, Artificial Sequence
  Synthetic oligonucleotide
gacacacgggaaacgatcgtcgggttggac

SEQ ID NO: 36390 - DNA, 30 bp, Artificial Sequence
  Synthetic oligonucleotide
gaggaatagaaccgtgaatgcagtttggac

SEQ ID NO: 36391 - DNA, 30 bp, Artificial Sequence
  Synthetic oligonucleotide
cggcaacagacccgacactacgcgaatgac

SEQ ID NO: 36392 - DNA, 30 bp, Artificial Sequence
  Synthetic oligonucleotide
agacgaaacaaggaagagatatgtaatgac

SEQ ID NO: 36393 - DNA, 30 bp, Artificial Sequence
  Synthetic oligonucleotide
gggtaagtggtgatcaataggagccatgac

SEQ ID NO: 36394 - DNA, 30 bp, Artificial Sequence
  Synthetic oligonucleotide
gcgagaggatactaatgatgacgagatgac

SEQ ID NO: 36395 - DNA, 30 bp, Artificial Sequence
  Synthetic oligonucleotide
tcggcccgccatgaatagtgggaatatgac

SEQ ID NO: 36396 - DNA, 30 bp, Artificial Sequence
  Synthetic oligonucleotide
ggtcaattgatggatggaattagtagtgac

SEQ ID NO: 36397 - DNA, 30 bp, Artificial Sequence
  Synthetic oligonucleotide
ctcaccagaaggtgcaatacgaagggtgac

SEQ ID NO: 36398 - DNA, 30 bp, Artificial Sequence
  Synthetic oligonucleotide
ccatagcgacaaacacaagggttcgaatac

SEQ ID NO: 36399 - DNA, 30 bp, Artificial Sequence
  Synthetic oligonucleotide
accaaagctctgagtcgtaaccatgaatac

SEQ ID NO: 36400 - DNA, 30 bp, Artificial Sequence
  Synthetic oligonucleotide
tggtacggcaaaagcaggaaggtgtaatac

SEQ ID NO: 36401 - DNA, 30 bp, Artificial Sequence
  Synthetic oligonucleotide
gacgacgaaggagaaagagcggctagatac

SEQ ID NO: 36402 - DNA, 30 bp, Artificial Sequence
  Synthetic oligonucleotide
aaccgtgtgcaaaagatagagagccgatac

SEQ ID NO: 36403 - DNA, 30 bp, Artificial Sequence
  Synthetic oligonucleotide
cgtacactaacccgatcgaccttgcgatac

SEQ ID NO: 36404 - DNA, 30 bp, Artificial Sequence
  Synthetic oligonucleotide
tacagagcgcgcgtgaacgaattgggatac

SEQ ID NO: 36405 - DNA, 30 bp, Artificial Sequence
  Synthetic oligonucleotide
gggcccaccgcattacaccactactgatac

SEQ ID NO: 36406 - DNA, 30 bp, Artificial Sequence
  Synthetic oligonucleotide
aagcgaaaatcaagcaggtggtaagtatac

SEQ ID NO: 36407 - DNA, 30 bp, Artificial Sequence
  Synthetic oligonucleotide
atcacaaacggccgaatgtaggacacctac

SEQ ID NO: 36408 - DNA, 30 bp, Artificial Sequence
  Synthetic oligonucleotide
tgcacagtcacaagttactcctaagcctac

SEQ ID NO: 36409 - DNA, 30 bp, Artificial Sequence
  Synthetic oligonucleotide
agcataatggcacgattcaagggcgcctac

SEQ ID NO: 36410 - DNA, 30 bp, Artificial Sequence
  Synthetic oligonucleotide
acggtggggttactagacgacgaatcctac

SEQ ID NO: 36411 - DNA, 30 bp, Artificial Sequence
  Synthetic oligonucleotide
gtagcaagctacctagggagacaggagtac

SEQ ID NO: 36412 - DNA, 30 bp, Artificial Sequence
  Synthetic oligonucleotide
atcttaatagcgaagtccgtccatgagtac

SEQ ID NO: 36413 - DNA, 30 bp, Artificial Sequence
  Synthetic oligonucleotide
gacatgatcgaaacaagaccgattgagtac

SEQ ID NO: 36414 - DNA, 30 bp, Artificial Sequence
  Synthetic oligonucleotide
caggcagagataagagtgcaacgatagtac

SEQ ID NO: 36415 - DNA, 30 bp, Artificial Sequence
  Synthetic oligonucleotide
aggccctacagccatgtataatgtgcgtac

SEQ ID NO: 36416 - DNA, 30 bp, Artificial Sequence
  Synthetic oligonucleotide
catcaacaatttatcaaccatccatcgtac

SEQ ID NO: 36417 - DNA, 30 bp, Artificial Sequence
  Synthetic oligonucleotide
aacgtgccgtagaggagtctagctaggtac

SEQ ID NO: 36418 - DNA, 30 bp, Artificial Sequence
  Synthetic oligonucleotide
tgacaaggaagcaaccagaaggatgggtac

SEQ ID NO: 36419 - DNA, 30 bp, Artificial Sequence
  Synthetic oligonucleotide
gacacaatactcacggatagagtgctgtac

SEQ ID NO: 36420 - DNA, 30 bp, Artificial Sequence
  Synthetic oligonucleotide
ggccgtggatcagccaaatcccagtcttac

SEQ ID NO: 36421 - DNA, 30 bp, Artificial Sequence
  Synthetic oligonucleotide
cggggagaccctcgcattatacatcaaacc

SEQ ID NO: 36422 - DNA, 31 bp, Artificial Sequence
  Synthetic oligonucleotide
gtagaacctgtaggagctagagaagtaaacc

SEQ ID NO: 36423 - DNA, 30 bp, Artificial Sequence
  Synthetic oligonucleotide
gaccgagtcccgaatgataatacgtaaacc

SEQ ID NO: 36424 - DNA, 30 bp, Artificial Sequence
  Synthetic oligonucleotide
agggagacctcacattcgaagtagacaacc

SEQ ID NO: 36425 - DNA, 30 bp, Artificial Sequence
  Synthetic oligonucleotide
gcttatagtggagggaatcgaaagccaacc

SEQ ID NO: 36426 - DNA, 30 bp, Artificial Sequence
  Synthetic oligonucleotide
cacgaccaggcctgcagtctaacctcaacc

SEQ ID NO: 36427 - DNA, 30 bp, Artificial Sequence
  Synthetic oligonucleotide
gaagtgcgtaccctagaaaacatgtgaacc

SEQ ID NO: 36428 - DNA, 30 bp, Artificial Sequence
  Synthetic oligonucleotide
cggggataaaagagtatagatacgttaacc

SEQ ID NO: 36429 - DNA, 30 bp, Artificial Sequence
  Synthetic oligonucleotide
gcctagtgtggccagaaacgcaacaacacc

SEQ ID NO: 36430 - DNA, 30 bp, Artificial Sequence
  Synthetic oligonucleotide
tcgagctatagaaaaacatctaggaacacc

SEQ ID NO: 36431 - DNA, 30 bp, Artificial Sequence
  Synthetic oligonucleotide
acgatatcaaggatccacagggaacacacc

SEQ ID NO: 36432 - DNA, 30 bp, Artificial Sequence
  Synthetic oligonucleotide
gaccaaagcatcggcccagaccagaccacc

SEQ ID NO: 36433 - DNA, 30 bp, Artificial Sequence
  Synthetic oligonucleotide
aaaggggtacgacgagtgtgagtccccacc

SEQ ID NO: 36434 - DNA, 30 bp, Artificial Sequence
  Synthetic oligonucleotide
gcctacaaccagaagttagtgacatgcacc

SEQ ID NO: 36435 - DNA, 30 bp, Artificial Sequence
  Synthetic oligonucleotide
gtgcggtaagtggtaagccagcagtgcacc

SEQ ID NO: 36436 - DNA, 30 bp, Artificial Sequence
  Synthetic oligonucleotide
gctcgcgtgggcgacgggtagttcaagacc

SEQ ID NO: 36437 - DNA, 30 bp, Artificial Sequence
  Synthetic oligonucleotide
caagctgacatgtaaagaactacctagacc

SEQ ID NO: 36438 - DNA, 30 bp, Artificial Sequence
  Synthetic oligonucleotide
gcctgaaaagtagacagtggtataacgacc

SEQ ID NO: 36439 - DNA, 30 bp, Artificial Sequence
  Synthetic oligonucleotide
ggctgacatgaaccagagagacggacgacc

SEQ ID NO: 36440 - DNA, 30 bp, Artificial Sequence
  Synthetic oligonucleotide
ggtggagacgaggtgatgaatctcgcgacc

SEQ ID NO: 36441 - DNA, 30 bp, Artificial Sequence
  Synthetic oligonucleotide
gagaagctgagagagagggaccacaggacc

SEQ ID NO: 36442 - DNA, 30 bp, Artificial Sequence
  Synthetic oligonucleotide
aagtcgatttaatgagcaagaggacggacc

SEQ ID NO: 36443 - DNA, 30 bp, Artificial Sequence
  Synthetic oligonucleotide
gaactgcggaatacagaagagagtatgacc

SEQ ID NO: 36444 - DNA, 30 bp, Artificial Sequence
  Synthetic oligonucleotide
cacccttgcgaaaccacgaaaaatgatacc

SEQ ID NO: 36445 - DNA, 30 bp, Artificial Sequence
  Synthetic oligonucleotide
aaggtccgcgaaaagatcgtcattgatacc

SEQ ID NO: 36446 - DNA, 30 bp, Artificial Sequence
  Synthetic oligonucleotide
agggtctctgcagagaaagcgacgggtacc

SEQ ID NO: 36447 - DNA, 30 bp, Artificial Sequence
  Synthetic oligonucleotide
tcacaaagcaaaaaagcgggggcgggtacc

SEQ ID NO: 36448 - DNA, 30 bp, Artificial Sequence
  Synthetic oligonucleotide
acgaaaccaatcgactctggagtagcaccc

SEQ ID NO: 36449 - DNA, 30 bp, Artificial Sequence
  Synthetic oligonucleotide
acagctaggtggaggggtggacttcgaccc

SEQ ID NO: 36450 - DNA, 30 bp, Artificial Sequence
  Synthetic oligonucleotide
gtgagatcgataatgaacactcgagtaccc

SEQ ID NO: 36451 - DNA, 30 bp, Artificial Sequence
  Synthetic oligonucleotide
atcgaaatgccattagaaacaaggttaccc

SEQ ID NO: 36452 - DNA, 30 bp, Artificial Sequence
  Synthetic oligonucleotide
ggtaatcaaaccgaaaaaactgcgaagccc

SEQ ID NO: 36453 - DNA, 30 bp, Artificial Sequence
  Synthetic oligonucleotide
aggaacaaggacacgacgtgaatgaagccc

SEQ ID NO: 36454 - DNA, 30 bp, Artificial Sequence
  Synthetic oligonucleotide
tatcacaagcgaatacatacgtactagccc

SEQ ID NO: 36455 - DNA, 30 bp, Artificial Sequence
  Synthetic oligonucleotide
aggcacgagttaggcatcgagtttccgccc

SEQ ID NO: 36456 - DNA, 30 bp, Artificial Sequence
  Synthetic oligonucleotide
cgtgtgggtctataatcaaacaaagcgccc

SEQ ID NO: 36457 - DNA, 30 bp, Artificial Sequence
  Synthetic oligonucleotide
tgagcacgagttttgacacaacaatcgccc

SEQ ID NO: 36458 - DNA, 30 bp, Artificial Sequence
  Synthetic oligonucleotide
aaaatgtcgaacattgatgggtcggggccc

SEQ ID NO: 36459 - DNA, 30 bp, Artificial Sequence
  Synthetic oligonucleotide
agcatgggcttggcatacaagaacactccc

SEQ ID NO: 36460 - DNA, 30 bp, Artificial Sequence
  Synthetic oligonucleotide
acgccccggaagggtatgagaaaacctccc

SEQ ID NO: 36461 - DNA, 30 bp, Artificial Sequence
  Synthetic oligonucleotide
tcagcgagatcgtaagaaagaacgagtccc

SEQ ID NO: 36462 - DNA, 30 bp, Artificial Sequence
  Synthetic oligonucleotide
tacagtgatgtaggtcggagatagcaagcc

SEQ ID NO: 36463 - DNA, 30 bp, Artificial Sequence
  Synthetic oligonucleotide
ccaattccgcaataatgggaaccggaagcc

SEQ ID NO: 36464 - DNA, 30 bp, Artificial Sequence
  Synthetic oligonucleotide
gggaacaagacgacgataaaaatatcagcc

SEQ ID NO: 36465 - DNA, 30 bp, Artificial Sequence
  Synthetic oligonucleotide
tcgtgcagaggatacatcggtgtctcagcc

SEQ ID NO: 36466 - DNA, 30 bp, Artificial Sequence
  Synthetic oligonucleotide
gtttcaaaatcgagaaaacagcatagagcc

SEQ ID NO: 36467 - DNA, 30 bp, Artificial Sequence
  Synthetic oligonucleotide
gcaaggcgagagactactaaactaggagcc

SEQ ID NO: 36468 - DNA, 30 bp, Artificial Sequence
  Synthetic oligonucleotide
aggatattgaaaccagctgcagagatagcc

SEQ ID NO: 36469 - DNA, 30 bp, Artificial Sequence
  Synthetic oligonucleotide
ccaagcaaaactacaatggatgtggtagcc

SEQ ID NO: 36470 - DNA, 30 bp, Artificial Sequence
  Synthetic oligonucleotide
agccacatcacgtaaagtgtagggttagcc

SEQ ID NO: 36471 - DNA, 30 bp, Artificial Sequence
  Synthetic oligonucleotide
aatgataggactgaaaactcagcactcgcc

SEQ ID NO: 36472 - DNA, 30 bp, Artificial Sequence
  Synthetic oligonucleotide
cggcagaaataatacacaaggtgaaaggcc

SEQ ID NO: 36473 - DNA, 30 bp, Artificial Sequence
  Synthetic oligonucleotide
gagcaagccgatcgaggacatatcatggcc

SEQ ID NO: 36474 - DNA, 30 bp, Artificial Sequence
  Synthetic oligonucleotide
cagaaaataacggtattaagaaatgtggcc

SEQ ID NO: 36475 - DNA, 30 bp, Artificial Sequence
  Synthetic oligonucleotide
gaacaaaggtggatccacaggaaagatgcc

SEQ ID NO: 36476 - DNA, 30 bp, Artificial Sequence
  Synthetic oligonucleotide
aggtgggttaaccctgtaggcgaaactgcc

SEQ ID NO: 36477 - DNA, 30 bp, Artificial Sequence
  Synthetic oligonucleotide
agggaccgcataaggatgtgtagtgttgcc

SEQ ID NO: 36478 - DNA, 30 bp, Artificial Sequence
  Synthetic oligonucleotide
cgacactaggcgattggcatcttgaaatcc

SEQ ID NO: 36479 - DNA, 30 bp, Artificial Sequence
  Synthetic oligonucleotide
aagaaacctggaccagcacaacatcgatcc

SEQ ID NO: 36480 - DNA, 30 bp, Artificial Sequence
  Synthetic oligonucleotide
aaaccgagtaaagcgggtgagtatcgatcc

SEQ ID NO: 36481 - DNA, 30 bp, Artificial Sequence
  Synthetic oligonucleotide
cgatacagcttagtgccactaaaactatcc

SEQ ID NO: 36482 - DNA, 30 bp, Artificial Sequence
  Synthetic oligonucleotide
cgcccgaagtaaaatagaagcgtcgcctcc

SEQ ID NO: 36483 - DNA, 30 bp, Artificial Sequence
  Synthetic oligonucleotide
tcaaccaactaacagagagtgtctggctcc

SEQ ID NO: 36484 - DNA, 30 bp, Artificial Sequence
  Synthetic oligonucleotide
aggagggatcctagacgtcaaacagtctcc

SEQ ID NO: 36485 - DNA, 30 bp, Artificial Sequence
  Synthetic oligonucleotide
cgtagtgtgctaacgtgttgacgattctcc

SEQ ID NO: 36486 - DNA, 30 bp, Artificial Sequence
  Synthetic oligonucleotide
ggagaccagaatatgagccaaaaccagtcc

SEQ ID NO: 36487 - DNA, 30 bp, Artificial Sequence
  Synthetic oligonucleotide
tctggaggaaggatactgagcgcgcagtcc

SEQ ID NO: 36488 - DNA, 30 bp, Artificial Sequence
  Synthetic oligonucleotide
gtataccgagacaccggcgaacatgagtcc

SEQ ID NO: 36489 - DNA, 30 bp, Artificial Sequence
  Synthetic oligonucleotide
caggcgtgagcataaggtgacgggaggtcc

SEQ ID NO: 36490 - DNA, 30 bp, Artificial Sequence
  Synthetic oligonucleotide
cgagaaacaagtaccaggtgtcgcaattcc

SEQ ID NO: 36491 - DNA, 30 bp, Artificial Sequence
  Synthetic oligonucleotide
cggcgtacactctgaaaatgaagaacttcc

SEQ ID NO: 36492 - DNA, 30 bp, Artificial Sequence
  Synthetic oligonucleotide
tacgcgcgagtaaactgcgaccgatcttcc

SEQ ID NO: 36493 - DNA, 30 bp, Artificial Sequence
  Synthetic oligonucleotide
caagcacatagagtcgcctacggtaaaagc

SEQ ID NO: 36494 - DNA, 30 bp, Artificial Sequence
  Synthetic oligonucleotide
aacgccaggttcaatcatgataaagaaagc

SEQ ID NO: 36495 - DNA, 30 bp, Artificial Sequence
  Synthetic oligonucleotide
ccgatcagagggattaaggatccgtaaagc

SEQ ID NO: 36496 - DNA, 30 bp, Artificial Sequence
  Synthetic oligonucleotide
agttcgggggtaatctagcccagcacaagc

SEQ ID NO: 36497 - DNA, 30 bp, Artificial Sequence
  Synthetic oligonucleotide
aggtcccgtctaaggagaggtaggtcaagc

SEQ ID NO: 36498 - DNA, 30 bp, Artificial Sequence
  Synthetic oligonucleotide
gtgagatgtaaccaacattggaagctaagc

SEQ ID NO: 36499 - DNA, 30 bp, Artificial Sequence
  Synthetic oligonucleotide
cacatagaccaattcacaagattgaccagc

SEQ ID NO: 36500 - DNA, 30 bp, Artificial Sequence
  Synthetic oligonucleotide
caaccggacgggttccacatcagatccagc

SEQ ID NO: 36501 - DNA, 30 bp, Artificial Sequence
  Synthetic oligonucleotide
acgcgccctagtgcccaggtctgcagcagc

SEQ ID NO: 36502 - DNA, 30 bp, Artificial Sequence
  Synthetic oligonucleotide
gtgaacgagtccgtcgacgtaaacggcagc

SEQ ID NO: 36503 - DNA, 30 bp, Artificial Sequence
  Synthetic oligonucleotide
ggccggtcaattaagatcatcgctggcagc

SEQ ID NO: 36504 - DNA, 30 bp, Artificial Sequence
  Synthetic oligonucleotide
cgcgaccgccagttaaaggtagatatcagc

SEQ ID NO: 36505 - DNA, 30 bp, Artificial Sequence
  Synthetic oligonucleotide
catgaaaccatacgggctgtagacctcagc

SEQ ID NO: 36506 - DNA, 30 bp, Artificial Sequence
  Synthetic oligonucleotide
tgaacgggtcgatggtcacatgttctcagc

SEQ ID NO: 36507 - DNA, 30 bp, Artificial Sequence
  Synthetic oligonucleotide
gtggactccgactgcatagatcaattcagc

SEQ ID NO: 36508 - DNA, 30 bp, Artificial Sequence
  Synthetic oligonucleotide
agacgaaccaagcctgctagctcaaagagc

SEQ ID NO: 36509 - DNA, 30 bp, Artificial Sequence
  Synthetic oligonucleotide
gcacagaatcgtgggcgtgataccaagagc

SEQ ID NO: 36510 - DNA, 30 bp, Artificial Sequence
  Synthetic oligonucleotide
ggctttgtaaggacataaatcctgaagagc

SEQ ID NO: 36511 - DNA, 30 bp, Artificial Sequence
  Synthetic oligonucleotide
gggataaggatcattcaagggaagcagagc

SEQ ID NO: 36512 - DNA, 30 bp, Artificial Sequence
  Synthetic oligonucleotide
cttacgggaagtgggcaaatgccagcgagc

SEQ ID NO: 36513 - DNA, 30 bp, Artificial Sequence
  Synthetic oligonucleotide
agttaacccgatagatcaccgcataggagc

SEQ ID NO: 36514 - DNA, 30 bp, Artificial Sequence
  Synthetic oligonucleotide
ggtaatcgtaaaatcagtcagtcgcggagc

SEQ ID NO: 36515 - DNA, 30 bp, Artificial Sequence
  Synthetic oligonucleotide
caggagtgcttaacccgctgaataatgagc

SEQ ID NO: 36516 - DNA, 30 bp, Artificial Sequence
  Synthetic oligonucleotide
tcgaactgctacactaggccaacacatagc

SEQ ID NO: 36517 - DNA, 30 bp, Artificial Sequence
  Synthetic oligonucleotide
cgaagggttcccactagctcagtcgatagc

SEQ ID NO: 36518 - DNA, 30 bp, Artificial Sequence
  Synthetic oligonucleotide
agggcaggtcaaggtggagaaaagtatagc

SEQ ID NO: 36519 - DNA, 30 bp, Artificial Sequence
  Synthetic oligonucleotide
tgataacgcgtagcgttggtgacgtatagc

SEQ ID NO: 36520 - DNA, 30 bp, Artificial Sequence
  Synthetic oligonucleotide
cggcaccagagtagagaacgcgattatagc

SEQ ID NO: 36521 - DNA, 30 bp, Artificial Sequence
  Synthetic oligonucleotide
acgatgagtctacatttaccttctgctagc

SEQ ID NO: 36522 - DNA, 30 bp, Artificial Sequence
  Synthetic oligonucleotide
tcggactcagcagagtggaaaacgagtagc

SEQ ID NO: 36523 - DNA, 30 bp, Artificial Sequence
  Synthetic oligonucleotide
catacgatacgattcatgaagactagtagc

SEQ ID NO: 36524 - DNA, 30 bp, Artificial Sequence
  Synthetic oligonucleotide
ggaagaaaggtaccatcaaagctccgtagc

SEQ ID NO: 36525 - DNA, 30 bp, Artificial Sequence
  Synthetic oligonucleotide
ggtaggaagaggagccttgacgtcattagc

SEQ ID NO: 36526 - DNA, 30 bp, Artificial Sequence
  Synthetic oligonucleotide
gaatggcgaatagagaattcagcatttagc

SEQ ID NO: 36527 - DNA, 30 bp, Artificial Sequence
  Synthetic oligonucleotide
acgagggccagggcacggtccatctcacgc

SEQ ID NO: 36528 - DNA, 30 bp, Artificial Sequence
  Synthetic oligonucleotide
aggatgacccttgtggggagcgatctacgc

SEQ ID NO: 36529 - DNA, 30 bp, Artificial Sequence
  Synthetic oligonucleotide
tcagaaaacgttgccagaaggacattacgc

SEQ ID NO: 36530 - DNA, 30 bp, Artificial Sequence
  Synthetic oligonucleotide
ctggagtcgccgaaacatattaaaaaccgc

SEQ ID NO: 36531 - DNA, 30 bp, Artificial Sequence
  Synthetic oligonucleotide
gatccgcatacaaaattaaacccataccgc

SEQ ID NO: 36532 - DNA, 30 bp, Artificial Sequence
  Synthetic oligonucleotide
agttggaccacaacgccgagcaggtgccgc

SEQ ID NO: 36533 - DNA, 30 bp, Artificial Sequence
  Synthetic oligonucleotide
tgcaaactccgtacatagaaattgatccgc

SEQ ID NO: 36534 - DNA, 30 bp, Artificial Sequence
  Synthetic oligonucleotide
agccatagcaacatcctacgcctcgtccgc

SEQ ID NO: 36535 - DNA, 30 bp, Artificial Sequence
  Synthetic oligonucleotide
atgccccgatagggagaagaaacattccgc

SEQ ID NO: 36536 - DNA, 30 bp, Artificial Sequence
  Synthetic oligonucleotide
aggcgaatacaactatgcgagaatcagcgc

SEQ ID NO: 36537 - DNA, 30 bp, Artificial Sequence
  Synthetic oligonucleotide
acgaacttaaaggtaccgtgtaacgagcgc

SEQ ID NO: 36538 - DNA, 30 bp, Artificial Sequence
  Synthetic oligonucleotide
tcgtcggttgaaacaatagagatcgagcgc

SEQ ID NO: 36539 - DNA, 30 bp, Artificial Sequence
  Synthetic oligonucleotide
cggaatcgacaaaagggtcaccgaaggcgc

SEQ ID NO: 36540 - DNA, 30 bp, Artificial Sequence
  Synthetic oligonucleotide
aggaaagagcgcggtctcggctatctgcgc

SEQ ID NO: 36541 - DNA, 30 bp, Artificial Sequence
  Synthetic oligonucleotide
acgccgtatatagtaagtaagagtttgcgc

SEQ ID NO: 36542 - DNA, 30 bp, Artificial Sequence
  Synthetic oligonucleotide
acgcatcgtacacattccagacgatatcgc

SEQ ID NO: 36543 - DNA, 30 bp, Artificial Sequence
  Synthetic oligonucleotide
acggatcaaagcgcccaagacctctctcgc

SEQ ID NO: 36544 - DNA, 30 bp, Artificial Sequence
  Synthetic oligonucleotide
gtgcagagtgcacccggatagccaagtcgc

SEQ ID NO: 36545 - DNA, 30 bp, Artificial Sequence
  Synthetic oligonucleotide
cgttggtgacccaaagtgccagtgcgtcgc

SEQ ID NO: 36546 - DNA, 30 bp, Artificial Sequence
  Synthetic oligonucleotide
cagaggcagatcaaagaaggggtgaaaggc

SEQ ID NO: 36547 - DNA, 30 bp, Artificial Sequence
  Synthetic oligonucleotide
gaggacaagggtcgatatacccagcaaggc

SEQ ID NO: 36548 - DNA, 30 bp, Artificial Sequence
  Synthetic oligonucleotide
aatgggataccgataaccgtctctacaggc

SEQ ID NO: 36549 - DNA, 30 bp, Artificial Sequence
  Synthetic oligonucleotide
agcaaactgacagagctatcagcgcgaggc

SEQ ID NO: 36550 - DNA, 30 bp, Artificial Sequence
  Synthetic oligonucleotide
acggaattggggggtctgatctacataggc

SEQ ID NO: 36551 - DNA, 30 bp, Artificial Sequence
  Synthetic oligonucleotide
cgacggaaagtatggcgagtcgcactaggc

SEQ ID NO: 36552 - DNA, 30 bp, Artificial Sequence
  Synthetic oligonucleotide
aaagcaagttgctgcaaaataacgttaggc

SEQ ID NO: 36553 - DNA, 30 bp, Artificial Sequence
  Synthetic oligonucleotide
gtgggcttaagtggataacaagctcacggc

SEQ ID NO: 36554 - DNA, 30 bp, Artificial Sequence
  Synthetic oligonucleotide
gcgacagtttaggatcaattgtgccccggc

SEQ ID NO: 36555 - DNA, 30 bp, Artificial Sequence
  Synthetic oligonucleotide
ccaagtaagtgcgtaccagtggtaggcggc

SEQ ID NO: 36556 - DNA, 30 bp, Artificial Sequence
  Synthetic oligonucleotide
tcaatcccagggacacttgactacatcggc

SEQ ID NO: 36557 - DNA, 30 bp, Artificial Sequence
  Synthetic oligonucleotide
ggcgcaagtcctatcaataacattctcggc

SEQ ID NO: 36558 - DNA, 30 bp, Artificial Sequence
  Synthetic oligonucleotide
gcttaagttggaatgagtacgcgaaagggc

SEQ ID NO: 36559 - DNA, 30 bp, Artificial Sequence
  Synthetic oligonucleotide
caaagaatcataggtacgaatcgaaagggc

SEQ ID NO: 36560 - DNA, 30 bp, Artificial Sequence
  Synthetic oligonucleotide
cagtgggtagctaaagcatgtaagaagggc

SEQ ID NO: 36561 - DNA, 30 bp, Artificial Sequence
  Synthetic oligonucleotide
acagatgataggatgggtcgatagcagggc

SEQ ID NO: 36562 - DNA, 30 bp, Artificial Sequence
  Synthetic oligonucleotide
cgtggtgtaacaacgagtacttatcagggc

SEQ ID NO: 36563 - DNA, 30 bp, Artificial Sequence
  Synthetic oligonucleotide
atgtggcgggtttatacgatcaaagagggc

SEQ ID NO: 36564 - DNA, 30 bp, Artificial Sequence
  Synthetic oligonucleotide
aggacgacatcgcgcgcaatgtaagagggc

SEQ ID NO: 36565 - DNA, 30 bp, Artificial Sequence
  Synthetic oligonucleotide
acgaacgctagacctcacacagagtcgggc

SEQ ID NO: 36566 - DNA, 30 bp, Artificial Sequence
  Synthetic oligonucleotide
ccgtcactaaggaaatagggccagaggggc

SEQ ID NO: 36567 - DNA, 30 bp, Artificial Sequence
  Synthetic oligonucleotide
cgagctgaagggtgcggaaagcgtgggggc

SEQ ID NO: 36568 - DNA, 30 bp, Artificial Sequence
  Synthetic oligonucleotide
caagggaccgattcaaatcacccgtggggc

SEQ ID NO: 36569 - DNA, 30 bp, Artificial Sequence
  Synthetic oligonucleotide
cgtacggaggcactgtgagatcgtgtgggc

SEQ ID NO: 36570 - DNA, 30 bp, Artificial Sequence
  Synthetic oligonucleotide
agcaaaacaagctctgcaacagtcaatggc

SEQ ID NO: 36571 - DNA, 30 bp, Artificial Sequence
  Synthetic oligonucleotide
tgtacatcaaaaagactcgtgggacatggc

SEQ ID NO: 36572 - DNA, 30 bp, Artificial Sequence
  Synthetic oligonucleotide
ggaacgtgttgatatcgagcaatacatggc

SEQ ID NO: 36573 - DNA, 30 bp, Artificial Sequence
  Synthetic oligonucleotide
acagtacgattgagacacttactttctggc

SEQ ID NO: 36574 - DNA, 30 bp, Artificial Sequence
  Synthetic oligonucleotide
gtgaatgacagagtaatgttttcgggtggc

SEQ ID NO: 36575 - DNA, 30 bp, Artificial Sequence
  Synthetic oligonucleotide
ggaccaagggttcagtatcaggaggaatgc

SEQ ID NO: 36576 - DNA, 30 bp, Artificial Sequence
  Synthetic oligonucleotide
cggaagaacgaggacgctttaaggtaatgc

SEQ ID NO: 36577 - DNA, 30 bp, Artificial Sequence
  Synthetic oligonucleotide
accgtaacacgatcaatactgtacacatgc

SEQ ID NO: 36578 - DNA, 30 bp, Artificial Sequence
  Synthetic oligonucleotide
cagggaagcaaaacgacctaaattacatgc

SEQ ID NO: 36579 - DNA, 30 bp, Artificial Sequence
  Synthetic oligonucleotide
ccagaaaggaagcttaatagagggtcatgc

SEQ ID NO: 36580 - DNA, 30 bp, Artificial Sequence
  Synthetic oligonucleotide
acgcgtgtgagcatgcgagagtaatgatgc

SEQ ID NO: 36581 - DNA, 30 bp, Artificial Sequence
  Synthetic oligonucleotide
tgacggaacgggtccttgaatagcatatgc

SEQ ID NO: 36582 - DNA, 30 bp, Artificial Sequence
  Synthetic oligonucleotide
aggagtacgtggacggtaagatagttatgc

SEQ ID NO: 36583 - DNA, 30 bp, Artificial Sequence
  Synthetic oligonucleotide
caaaggggagagaaactggtggacaactgc

SEQ ID NO: 36584 - DNA, 30 bp, Artificial Sequence
  Synthetic oligonucleotide
ctcgatcacccgggtgggagcaggaactgc

SEQ ID NO: 36585 - DNA, 30 bp, Artificial Sequence
  Synthetic oligonucleotide
ggggtcaagcgaggatatcatcaacactgc

SEQ ID NO: 36586 - DNA, 30 bp, Artificial Sequence
  Synthetic oligonucleotide
cggtaatgagccctaatgcgggagtactgc

SEQ ID NO: 36587 - DNA, 30 bp, Artificial Sequence
  Synthetic oligonucleotide
taagtccatggcaatctcgtgacaacctgc

SEQ ID NO: 36588 - DNA, 30 bp, Artificial Sequence
  Synthetic oligonucleotide
aggtggggcactaagcttctgagcacctgc

SEQ ID NO: 36589 - DNA, 30 bp, Artificial Sequence
  Synthetic oligonucleotide
ccagagtggagtgataaaagtaacgcctgc

SEQ ID NO: 36590 - DNA, 30 bp, Artificial Sequence
  Synthetic oligonucleotide
ttgtgcgcgtgagtagacggctagatctgc

SEQ ID NO: 36591 - DNA, 30 bp, Artificial Sequence
  Synthetic oligonucleotide
agcaaagtccaaacaaaatgcaacaagtgc

SEQ ID NO: 36592 - DNA, 30 bp, Artificial Sequence
  Synthetic oligonucleotide
ctcgatcaaaatcaatcgcactaagagtgc

SEQ ID NO: 36593 - DNA, 30 bp, Artificial Sequence
  Synthetic oligonucleotide
ggactactaggtgaacacgtttgagagtgc

SEQ ID NO: 36594 - DNA, 30 bp, Artificial Sequence
  Synthetic oligonucleotide
cacgtagagggcgatagtaataaggagtgc

SEQ ID NO: 36595 - DNA, 30 bp, Artificial Sequence
  Synthetic oligonucleotide
cgaggggtcacaccttagaattacccgtgc

SEQ ID NO: 36596 - DNA, 30 bp, Artificial Sequence
  Synthetic oligonucleotide
ataagaagagggacggaacagtaagcgtgc

SEQ ID NO: 36597 - DNA, 30 bp, Artificial Sequence
  Synthetic oligonucleotide
gggtgcgattcaaggaagcgtcattcgtgc

SEQ ID NO: 36598 - DNA, 30 bp, Artificial Sequence
  Synthetic oligonucleotide
cagtcaaccagctacagagagtccatgtgc

SEQ ID NO: 36599 - DNA, 30 bp, Artificial Sequence
  Synthetic oligonucleotide
gagcgagtccctggaagagcacatcattgc

SEQ ID NO: 36600 - DNA, 30 bp, Artificial Sequence
  Synthetic oligonucleotide
gggtatatcgtgacaaattctagtgattgc

SEQ ID NO: 36601 - DNA, 30 bp, Artificial Sequence
  Synthetic oligonucleotide
cgagaacgaatgtcatcgcacaccccttgc

SEQ ID NO: 36602 - DNA, 30 bp, Artificial Sequence
  Synthetic oligonucleotide
tggaagtcaccataggagaagaggtcttgc

SEQ ID NO: 36603 - DNA, 30 bp, Artificial Sequence
  Synthetic oligonucleotide
acacagatagagaattagaccgaatgttgc

SEQ ID NO: 36604 - DNA, 30 bp, Artificial Sequence
  Synthetic oligonucleotide
tcgagcaacaactggatcattactaaaatc

SEQ ID NO: 36605 - DNA, 30 bp, Artificial Sequence
  Synthetic oligonucleotide
tgtgtaacgagggaagccgtatcaagaatc

SEQ ID NO: 36606 - DNA, 30 bp, Artificial Sequence
  Synthetic oligonucleotide
aaagacgtataccatacagcacagagaatc

SEQ ID NO: 36607 - DNA, 30 bp, Artificial Sequence
  Synthetic oligonucleotide
ctggaccgaagtacacaccttgtcctaatc

SEQ ID NO: 36608 - DNA, 30 bp, Artificial Sequence
  Synthetic oligonucleotide
aggggtcaggccataagaaactaagtaatc

SEQ ID NO: 36609 - DNA, 30 bp, Artificial Sequence
  Synthetic oligonucleotide
gcgccaaagctgcgtacaaatccggtaatc

SEQ ID NO: 36610 - DNA, 30 bp, Artificial Sequence
  Synthetic oligonucleotide
aaggggtgaggggcaccatcgttcaacatc

SEQ ID NO: 36611 - DNA, 30 bp, Artificial Sequence
  Synthetic oligonucleotide
gcgactaacagtaaatgcgcggctaacatc

SEQ ID NO: 36612 - DNA, 30 bp, Artificial Sequence
  Synthetic oligonucleotide
tacgcgggtgaataaaacacttcaggcatc

SEQ ID NO: 36613 - DNA, 30 bp, Artificial Sequence
  Synthetic oligonucleotide
aggagcaggggggattaggaccgtatcatc

SEQ ID NO: 36614 - DNA, 30 bp, Artificial Sequence
  Synthetic oligonucleotide
tcaagatagcaggcggaacacacggtcatc

SEQ ID NO: 36615 - DNA, 30 bp, Artificial Sequence
  Synthetic oligonucleotide
cggcaatccgtgttagggccaagctagatc

SEQ ID NO: 36616 - DNA, 30 bp, Artificial Sequence
  Synthetic oligonucleotide
ggtgcgagtccataatccgaaatctcgatc

SEQ ID NO: 36617 - DNA, 30 bp, Artificial Sequence
  Synthetic oligonucleotide
agaaggcttggcgagtactatgagcggatc

SEQ ID NO: 36618 - DNA, 30 bp, Artificial Sequence
  Synthetic oligonucleotide
acgacagggaggtacgagggactaaatatc

SEQ ID NO: 36619 - DNA, 30 bp, Artificial Sequence
  Synthetic oligonucleotide
tgggacaccgccattgatgatacacatatc

SEQ ID NO: 36620 - DNA, 30 bp, Artificial Sequence
  Synthetic oligonucleotide
cggcataagactgctaggtataatgatatc

SEQ ID NO: 36621 - DNA, 30 bp, Artificial Sequence
  Synthetic oligonucleotide
gacaaagggctgataaaacgctaagctatc

SEQ ID NO: 36622 - DNA, 30 bp, Artificial Sequence
  Synthetic oligonucleotide
cgtaactagaatgccgagagacgtgctatc

SEQ ID NO: 36623 - DNA, 30 bp, Artificial Sequence
  Synthetic oligonucleotide
taggacatgtgcccaatcctttgccgtatc

SEQ ID NO: 36624 - DNA, 31 bp, Artificial Sequence
  Synthetic oligonucleotide
cgagagcatggaggggttattattccgtatc

SEQ ID NO: 36625 - DNA, 30 bp, Artificial Sequence
  Synthetic oligonucleotide
cgaagtgggacgatgggtatagtaattatc

SEQ ID NO: 36626 - DNA, 30 bp, Artificial Sequence
  Synthetic oligonucleotide
gacggcttgaaccaaggaaggctaccactc

SEQ ID NO: 36627 - DNA, 30 bp, Artificial Sequence
  Synthetic oligonucleotide
ggaatggcacagccaggtgacgaaatactc

SEQ ID NO: 36628 - DNA, 30 bp, Artificial Sequence
  Synthetic oligonucleotide
gcctaaaaactgtgacaaattcaatgcctc

SEQ ID NO: 36629 - DNA, 30 bp, Artificial Sequence
  Synthetic oligonucleotide
gatggaagctgagaacgcccactccagctc

SEQ ID NO: 36630 - DNA, 30 bp, Artificial Sequence
  Synthetic oligonucleotide
aggtcagggagcgacaacaactgcccgctc

SEQ ID NO: 36631 - DNA, 30 bp, Artificial Sequence
  Synthetic oligonucleotide
aacgaccgagtcgagtcgtccagggtgctc

SEQ ID NO: 36632 - DNA, 30 bp, Artificial Sequence
  Synthetic oligonucleotide
cgaactgtgtagaattcgatccatttgctc

SEQ ID NO: 36633 - DNA, 30 bp, Artificial Sequence
  Synthetic oligonucleotide
taacacgagagacccgggacgtctcatctc

SEQ ID NO: 36634 - DNA, 30 bp, Artificial Sequence
  Synthetic oligonucleotide
cgaacttacataggaaccccgagaggtctc

SEQ ID NO: 36635 - DNA, 30 bp, Artificial Sequence
  Synthetic oligonucleotide
cgaataaggctactgagtggcaagtttctc

SEQ ID NO: 36636 - DNA, 30 bp, Artificial Sequence
  Synthetic oligonucleotide
catgtggcgaaactcgggggacttcaagtc

SEQ ID NO: 36637 - DNA, 30 bp, Artificial Sequence
  Synthetic oligonucleotide
caagggagaatcaagtggagccagtcagtc

SEQ ID NO: 36638 - DNA, 30 bp, Artificial Sequence
  Synthetic oligonucleotide
tctaagtacggtcggcacatcaggagagtc

SEQ ID NO: 36639 - DNA, 30 bp, Artificial Sequence
  Synthetic oligonucleotide
gcgcacctggatccggacacacccctagtc

SEQ ID NO: 36640 - DNA, 30 bp, Artificial Sequence
  Synthetic oligonucleotide
cggtaatactggcttgtatgagtccacgtc

SEQ ID NO: 36641 - DNA, 30 bp, Artificial Sequence
  Synthetic oligonucleotide
ggggcgctctaaatacgccggaaatacgtc

SEQ ID NO: 36642 - DNA, 30 bp, Artificial Sequence
  Synthetic oligonucleotide
catacacatttttcaagtcatccatacgtc

SEQ ID NO: 36643 - DNA, 30 bp, Artificial Sequence
  Synthetic oligonucleotide
aacgcgaggaagtataggggcgcctacgtc

SEQ ID NO: 36644 - DNA, 30 bp, Artificial Sequence
  Synthetic oligonucleotide
taacgtattcggaatggtactcgctacgtc

SEQ ID NO: 36645 - DNA, 30 bp, Artificial Sequence
  Synthetic oligonucleotide
aataaatagagtagccaagagaagagcgtc

SEQ ID NO: 36646 - DNA, 30 bp, Artificial Sequence
  Synthetic oligonucleotide
cgagtgtgccagcgtagtaggcggatcgtc

SEQ ID NO: 36647 - DNA, 30 bp, Artificial Sequence
  Synthetic oligonucleotide
gtgctgtggcacaatcggaagggggtcgtc

SEQ ID NO: 36648 - DNA, 30 bp, Artificial Sequence
  Synthetic oligonucleotide
gcacgaccggaagaaaggctacatcaggtc

SEQ ID NO: 36649 - DNA, 30 bp, Artificial Sequence
  Synthetic oligonucleotide
caccatggccaggtaatatgccacgaggtc

SEQ ID NO: 36650 - DNA, 30 bp, Artificial Sequence
  Synthetic oligonucleotide
tcacatgagtagccgtatttccaataggtc

SEQ ID NO: 36651 - DNA, 30 bp, Artificial Sequence
  Synthetic oligonucleotide
ggatgaggacttagtcaaggaagataggtc

SEQ ID NO: 36652 - DNA, 30 bp, Artificial Sequence
  Synthetic oligonucleotide
tctcagggcaacaaaataggatattcggtc

SEQ ID NO: 36653 - DNA, 30 bp, Artificial Sequence
  Synthetic oligonucleotide
gcgtgcaaccaattggggatgacagatgtc

SEQ ID NO: 36654 - DNA, 30 bp, Artificial Sequence
  Synthetic oligonucleotide
aggaacgaagcccatgggaacgcatctgtc

SEQ ID NO: 36655 - DNA, 30 bp, Artificial Sequence
  Synthetic oligonucleotide
acgggctgtaaagagatactggcgagtgtc

SEQ ID NO: 36656 - DNA, 30 bp, Artificial Sequence
  Synthetic oligonucleotide
cgactatcaaatggggttgcggggagtgtc

SEQ ID NO: 36657 - DNA, 30 bp, Artificial Sequence
  Synthetic oligonucleotide
gggataggggagtgaaagattgggcgtgtc

SEQ ID NO: 36658 - DNA, 30 bp, Artificial Sequence
  Synthetic oligonucleotide
cggagatcaaaatcttattcaaaaattgtc

SEQ ID NO: 36659 - DNA, 30 bp, Artificial Sequence
  Synthetic oligonucleotide
ggacaaggcgagaacagacctcaacttgtc

SEQ ID NO: 36660 - DNA, 30 bp, Artificial Sequence
  Synthetic oligonucleotide
acagagatccgcgtacatcctacacaattc

SEQ ID NO: 36661 - DNA, 30 bp, Artificial Sequence
  Synthetic oligonucleotide
cgacacgagcgggtgggcatggaaacattc

SEQ ID NO: 36662 - DNA, 30 bp, Artificial Sequence
  Synthetic oligonucleotide
tccacaagtaatccactccaaccgtacttc

SEQ ID NO: 36663 - DNA, 30 bp, Artificial Sequence
  Synthetic oligonucleotide
gcgtgttggctaagatcccagaaagccttc

SEQ ID NO: 36664 - DNA, 30 bp, Artificial Sequence
  Synthetic oligonucleotide
accggatgtctcagagatgaatcgcgcttc

SEQ ID NO: 36665 - DNA, 30 bp, Artificial Sequence
  Synthetic oligonucleotide
tgacgcgtagcggtcacaatggaactcttc

SEQ ID NO: 36666 - DNA, 30 bp, Artificial Sequence
  Synthetic oligonucleotide
gtgagggtaggatagcaccacgcaaagttc

SEQ ID NO: 36667 - DNA, 30 bp, Artificial Sequence
  Synthetic oligonucleotide
tacgcggatgctacaaaacgaatcgagttc

SEQ ID NO: 36668 - DNA, 30 bp, Artificial Sequence
  Synthetic oligonucleotide
tgatggataccgacaataaatccggagttc

SEQ ID NO: 36669 - DNA, 30 bp, Artificial Sequence
  Synthetic oligonucleotide
acgtgtcaagggggcacattaaacccgttc

SEQ ID NO: 36670 - DNA, 30 bp, Artificial Sequence
  Synthetic oligonucleotide
ctgaacgggatcagagtaaaaccagcgttc

SEQ ID NO: 36671 - DNA, 30 bp, Artificial Sequence
  Synthetic oligonucleotide
tctgactaacatcgccaggcaaaagggttc

SEQ ID NO: 36672 - DNA, 30 bp, Artificial Sequence
  Synthetic oligonucleotide
cgacgcctaaggaaagtcgcgcccatgttc

SEQ ID NO: 36673 - DNA, 30 bp, Artificial Sequence
  Synthetic oligonucleotide
ggggcgggagctcaaaatacgcgcactttc

SEQ ID NO: 36674 - DNA, 30 bp, Artificial Sequence
  Synthetic oligonucleotide
ggagcatgtacagttatgaggtttcaaaag

SEQ ID NO: 36675 - DNA, 30 bp, Artificial Sequence
  Synthetic oligonucleotide
tggtgctaccgacacgaggattgtacaaag

SEQ ID NO: 36676 - DNA, 30 bp, Artificial Sequence
  Synthetic oligonucleotide
cgaaaagatgtactttgtggcgaagcaaag

SEQ ID NO: 36677 - DNA, 30 bp, Artificial Sequence
  Synthetic oligonucleotide
cggggaactggaagatgtttataatcaaag

SEQ ID NO: 36678 - DNA, 30 bp, Artificial Sequence
  Synthetic oligonucleotide
acaggatcggcatcacattccgtgtcaaag

SEQ ID NO: 36679 - DNA, 30 bp, Artificial Sequence
  Synthetic oligonucleotide
ccataaaaattaatgcaacgggtaagaaag

SEQ ID NO: 36680 - DNA, 30 bp, Artificial Sequence
  Synthetic oligonucleotide
ggaggaatagggcgaatagcaatgcgaaag

SEQ ID NO: 36681 - DNA, 30 bp, Artificial Sequence
  Synthetic oligonucleotide
cgaatgaattatgaattcagttcgggaaag

SEQ ID NO: 36682 - DNA, 30 bp, Artificial Sequence
  Synthetic oligonucleotide
tagacgaccttgtctaaggtgatgtgaaag

SEQ ID NO: 36683 - DNA, 30 bp, Artificial Sequence
  Synthetic oligonucleotide
acaacctgcgtcagttttaaacgaataaag

SEQ ID NO: 36684 - DNA, 30 bp, Artificial Sequence
  Synthetic oligonucleotide
acgggccccaggatagtcggtacgataaag

SEQ ID NO: 36685 - DNA, 30 bp, Artificial Sequence
  Synthetic oligonucleotide
ttaggagctcaaaaacgactgcaggtaaag

SEQ ID NO: 36686 - DNA, 30 bp, Artificial Sequence
  Synthetic oligonucleotide
caggcgacaccgggatcgagggaggtaaag

SEQ ID NO: 36687 - DNA, 30 bp, Artificial Sequence
  Synthetic oligonucleotide
tgagggtaagggtaactgtcttctttaaag

SEQ ID NO: 36688 - DNA, 30 bp, Artificial Sequence
  Synthetic oligonucleotide
gttcgctaaccgaaggctcaaggccacaag

SEQ ID NO: 36689 - DNA, 30 bp, Artificial Sequence
  Synthetic oligonucleotide
ggatcttccacaaaattcagagggcacaag

SEQ ID NO: 36690 - DNA, 30 bp, Artificial Sequence
  Synthetic oligonucleotide
cggaaaaggcttgacggtcataataccaag

SEQ ID NO: 36691 - DNA, 30 bp, Artificial Sequence
  Synthetic oligonucleotide
acgtccataagcttaacggatcacgccaag

SEQ ID NO: 36692 - DNA, 30 bp, Artificial Sequence
  Synthetic oligonucleotide
gccgaaaaacgtgcgttgcgaggggccaag

SEQ ID NO: 36693 - DNA, 30 bp, Artificial Sequence
  Synthetic oligonucleotide
acaagagaacccaagcttgtgcgtgccaag

SEQ ID NO: 36694 - DNA, 30 bp, Artificial Sequence
  Synthetic oligonucleotide
acgtcagggctactgatacgcctgtccaag

SEQ ID NO: 36695 - DNA, 30 bp, Artificial Sequence
  Synthetic oligonucleotide
taggaggcttgcggctgttgctaaagcaag

SEQ ID NO: 36696 - DNA, 30 bp, Artificial Sequence
  Synthetic oligonucleotide
agtcacaatgtaaggtacggtttgggcaag

SEQ ID NO: 36697 - DNA, 30 bp, Artificial Sequence
  Synthetic oligonucleotide
tacatcgtagtggaacgaatctttggcaag

SEQ ID NO: 36698 - DNA, 30 bp, Artificial Sequence
  Synthetic oligonucleotide
agggtttgtttcaggggaagaggtttcaag

SEQ ID NO: 36699 - DNA, 30 bp, Artificial Sequence
  Synthetic oligonucleotide
ccaatgggtgcagttatcctcacaaagaag

SEQ ID NO: 36700 - DNA, 30 bp, Artificial Sequence
  Synthetic oligonucleotide
acggtaccctggccccatcgagaacagaag

SEQ ID NO: 36701 - DNA, 30 bp, Artificial Sequence
  Synthetic oligonucleotide
tcctagttcgatgtcgattaactacagaag

SEQ ID NO: 36702 - DNA, 30 bp, Artificial Sequence
  Synthetic oligonucleotide
tgatcaatcctgataacgtccatgcagaag

SEQ ID NO: 36703 - DNA, 30 bp, Artificial Sequence
  Synthetic oligonucleotide
ggaacgagcagcaacatagcatcctagaag

SEQ ID NO: 36704 - DNA, 30 bp, Artificial Sequence
  Synthetic oligonucleotide
ccaatgtagtaaaaacgtaggggaacgaag

SEQ ID NO: 36705 - DNA, 30 bp, Artificial Sequence
  Synthetic oligonucleotide
cctcacccaatgtggcaacgatagacgaag

SEQ ID NO: 36706 - DNA, 30 bp, Artificial Sequence
  Synthetic oligonucleotide
tgggcgggtgtctcggctaaaagtgcgaag

SEQ ID NO: 36707 - DNA, 30 bp, Artificial Sequence
  Synthetic oligonucleotide
agatgaaaaaggtaggaaatagaatcgaag

SEQ ID NO: 36708 - DNA, 30 bp, Artificial Sequence
  Synthetic oligonucleotide
agagaatggaatctccccagggtaaggaag

SEQ ID NO: 36709 - DNA, 30 bp, Artificial Sequence
  Synthetic oligonucleotide
atgaatgcctcgatcagcccgatgaggaag

SEQ ID NO: 36710 - DNA, 30 bp, Artificial Sequence
  Synthetic oligonucleotide
cgcacaaagacggtggtggactcacggaag

SEQ ID NO: 36711 - DNA, 30 bp, Artificial Sequence
  Synthetic oligonucleotide
tgtgatcgagaatgatgtctccggcggaag

SEQ ID NO: 36712 - DNA, 30 bp, Artificial Sequence
  Synthetic oligonucleotide
acgtgccacgaaggtcacaggcctgggaag

SEQ ID NO: 36713 - DNA, 30 bp, Artificial Sequence
  Synthetic oligonucleotide
cagaggaaaatgagcccccgaacgatgaag

SEQ ID NO: 36714 - DNA, 30 bp, Artificial Sequence
  Synthetic oligonucleotide
taaggagcacatagcccgtgcgtgatgaag

SEQ ID NO: 36715 - DNA, 30 bp, Artificial Sequence
  Synthetic oligonucleotide
catggtggtggcctgtgttagattgtgaag

SEQ ID NO: 36716 - DNA, 30 bp, Artificial Sequence
  Synthetic oligonucleotide
acacctaagtcatatgaacacaacaataag

SEQ ID NO: 36717 - DNA, 30 bp, Artificial Sequence
  Synthetic oligonucleotide
tatttgcgagaagaaaataaggtgcataag

SEQ ID NO: 36718 - DNA, 30 bp, Artificial Sequence
  Synthetic oligonucleotide
ccagttgtaggtctccaacagagagataag

SEQ ID NO: 36719 - DNA, 30 bp, Artificial Sequence
  Synthetic oligonucleotide
cataacgcaaggctatatgatcaggataag

SEQ ID NO: 36720 - DNA, 30 bp, Artificial Sequence
  Synthetic oligonucleotide
gttgaggaatcgcgtacgggactgtataag

SEQ ID NO: 36721 - DNA, 30 bp, Artificial Sequence
  Synthetic oligonucleotide
cctggccgggacctactgtgtcgatctaag

SEQ ID NO: 36722 - DNA, 30 bp, Artificial Sequence
  Synthetic oligonucleotide
gatgagacatggtcaagctggtgctctaag

SEQ ID NO: 36723 - DNA, 30 bp, Artificial Sequence
  Synthetic oligonucleotide
taaatgagccgccgtcattcgcaaagtaag

SEQ ID NO: 36724 - DNA, 30 bp, Artificial Sequence
  Synthetic oligonucleotide
cgacgtgagatagattggctagaaagtaag

SEQ ID NO: 36725 - DNA, 30 bp, Artificial Sequence
  Synthetic oligonucleotide
ggtggactaatcgctaagcgagcaagtaag

SEQ ID NO: 36726 - DNA, 30 bp, Artificial Sequence
  Synthetic oligonucleotide
aggggggctgatgtgagagattatagtaag

SEQ ID NO: 36727 - DNA, 30 bp, Artificial Sequence
  Synthetic oligonucleotide
gagatacagtgcggatagcaaggcggtaag

SEQ ID NO: 36728 - DNA, 30 bp, Artificial Sequence
  Synthetic oligonucleotide
agcgaaggttaactgcctcaatgatgtaag

SEQ ID NO: 36729 - DNA, 30 bp, Artificial Sequence
  Synthetic oligonucleotide
gcgtgaagcaaggatgcagaaggttgtaag

SEQ ID NO: 36730 - DNA, 30 bp, Artificial Sequence
  Synthetic oligonucleotide
tcccgtggaagcaagcgaatagggcttaag

SEQ ID NO: 36731 - DNA, 30 bp, Artificial Sequence
  Synthetic oligonucleotide
tcatgagacacaagaaacgcccctcttaag

SEQ ID NO: 36732 - DNA, 30 bp, Artificial Sequence
  Synthetic oligonucleotide
gtaaacagaatgtttagaacgtacgttaag

SEQ ID NO: 36733 - DNA, 30 bp, Artificial Sequence
  Synthetic oligonucleotide
ggcacgcaaagaagggaacctttggttaag

SEQ ID NO: 36734 - DNA, 30 bp, Artificial Sequence
  Synthetic oligonucleotide
acagtcatgttaacaatataggcgaaacag

SEQ ID NO: 36735 - DNA, 30 bp, Artificial Sequence
  Synthetic oligonucleotide
gccatgctccgaggcatcaaaaaagaacag

SEQ ID NO: 36736 - DNA, 30 bp, Artificial Sequence
  Synthetic oligonucleotide
cgtttaaggatggggttcgcgcgaacacag

SEQ ID NO: 36737 - DNA, 30 bp, Artificial Sequence
  Synthetic oligonucleotide
gctcactcggcacacggaactagcgcacag

SEQ ID NO: 36738 - DNA, 30 bp, Artificial Sequence
  Synthetic oligonucleotide
tagggctaaatgcaaggctattcgcgacag

SEQ ID NO: 36739 - DNA, 30 bp, Artificial Sequence
  Synthetic oligonucleotide
tacaaacaaacaataagttgggctcgacag

SEQ ID NO: 36740 - DNA, 30 bp, Artificial Sequence
  Synthetic oligonucleotide
ggatgagtgccgcttcgcgtatagggacag

SEQ ID NO: 36741 - DNA, 30 bp, Artificial Sequence
  Synthetic oligonucleotide
tcgtgcagaaactgctagcgcacctgacag

SEQ ID NO: 36742 - DNA, 30 bp, Artificial Sequence
  Synthetic oligonucleotide
atgaggcaaggggatcgtacagtaatacag

SEQ ID NO: 36743 - DNA, 30 bp, Artificial Sequence
  Synthetic oligonucleotide
caaggttggtacatgccgagtcgcatacag

SEQ ID NO: 36744 - DNA, 30 bp, Artificial Sequence
  Synthetic oligonucleotide
acgggccagaccgcgtgaatcaccctacag

SEQ ID NO: 36745 - DNA, 30 bp, Artificial Sequence
  Synthetic oligonucleotide
tgacacacgtctagtgtagaatagctacag

SEQ ID NO: 36746 - DNA, 30 bp, Artificial Sequence
  Synthetic oligonucleotide
ccaacggatctgtcataacgcgatctacag

SEQ ID NO: 36747 - DNA, 30 bp, Artificial Sequence
  Synthetic oligonucleotide
gcgacatgcaccctgataggttatgtacag

SEQ ID NO: 36748 - DNA, 30 bp, Artificial Sequence
  Synthetic oligonucleotide
cggtgaagcagatatcctgtcgacttacag

SEQ ID NO: 36749 - DNA, 30 bp, Artificial Sequence
  Synthetic oligonucleotide
catcaccgaatttcttcagcatgccaccag

SEQ ID NO: 36750 - DNA, 30 bp, Artificial Sequence
  Synthetic oligonucleotide
atggggccatgcccacgctcatatcaccag

SEQ ID NO: 36751 - DNA, 30 bp, Artificial Sequence
  Synthetic oligonucleotide
tctcaaggcgtgagcaaaagaatgtaccag

SEQ ID NO: 36752 - DNA, 30 bp, Artificial Sequence
  Synthetic oligonucleotide
aagccacccgtagaaagcaccccgacccag

SEQ ID NO: 36753 - DNA, 30 bp, Artificial Sequence
  Synthetic oligonucleotide
acgactaagacttagctgtgccctccccag

SEQ ID NO: 36754 - DNA, 30 bp, Artificial Sequence
  Synthetic oligonucleotide
agtgatcggcgacacctcagaccctcccag

SEQ ID NO: 36755 - DNA, 30 bp, Artificial Sequence
  Synthetic oligonucleotide
gtgcgatgaagaggctaagcgatctcccag

SEQ ID NO: 36756 - DNA, 30 bp, Artificial Sequence
  Synthetic oligonucleotide
cgccgataccatatactagggaggagccag

SEQ ID NO: 36757 - DNA, 30 bp, Artificial Sequence
  Synthetic oligonucleotide
ctaaatggggataccactccgtaaggccag

SEQ ID NO: 36758 - DNA, 30 bp, Artificial Sequence
  Synthetic oligonucleotide
acggcatctcatttggcagacataggccag

SEQ ID NO: 36759 - DNA, 30 bp, Artificial Sequence
  Synthetic oligonucleotide
gggaatacgttcaaaatgctgagtggccag

SEQ ID NO: 36760 - DNA, 30 bp, Artificial Sequence
  Synthetic oligonucleotide
cgtatgcgcgtaatcatcacaatatgccag

SEQ ID NO: 36761 - DNA, 30 bp, Artificial Sequence
  Synthetic oligonucleotide
ttacgtccagagccgagttcgcggtgccag

SEQ ID NO: 36762 - DNA, 30 bp, Artificial Sequence
  Synthetic oligonucleotide
aagattacgtctgagggaaccggaatccag

SEQ ID NO: 36763 - DNA, 30 bp, Artificial Sequence
  Synthetic oligonucleotide
taagcgcggcagaaccgataatacatccag

SEQ ID NO: 36764 - DNA, 30 bp, Artificial Sequence
  Synthetic oligonucleotide
ctaacaggcctagactgttggactctccag

SEQ ID NO: 36765 - DNA, 30 bp, Artificial Sequence
  Synthetic oligonucleotide
aacacgaagcctcggataggagaggtccag

SEQ ID NO: 36766 - DNA, 30 bp, Artificial Sequence
  Synthetic oligonucleotide
aggatagttcgggattgctggcagaagcag

SEQ ID NO: 36767 - DNA, 30 bp, Artificial Sequence
  Synthetic oligonucleotide
acggccgaaatgtaagagtcttgagagcag

SEQ ID NO: 36768 - DNA, 30 bp, Artificial Sequence
  Synthetic oligonucleotide
ggcggagtaaaactataggccctagagcag

SEQ ID NO: 36769 - DNA, 30 bp, Artificial Sequence
  Synthetic oligonucleotide
ggagaaattggaacaggtggtctggagcag

SEQ ID NO: 36770 - DNA, 30 bp, Artificial Sequence
  Synthetic oligonucleotide
cagatgagcattagggtgcccctgtagcag

SEQ ID NO: 36771 - DNA, 30 bp, Artificial Sequence
  Synthetic oligonucleotide
tgagtacggcacagaggggagcgtgcgcag

SEQ ID NO: 36772 - DNA, 30 bp, Artificial Sequence
  Synthetic oligonucleotide
tgcactaagcattagaactgaaaatcgcag

SEQ ID NO: 36773 - DNA, 30 bp, Artificial Sequence
  Synthetic oligonucleotide
gagcgacaggctaccacaggagacaggcag

SEQ ID NO: 36774 - DNA, 30 bp, Artificial Sequence
  Synthetic oligonucleotide
ggtaaaggagttaggggcaaaatacggcag

SEQ ID NO: 36775 - DNA, 30 bp, Artificial Sequence
  Synthetic oligonucleotide
tgatccgagtgtgagacatcgtattggcag

SEQ ID NO: 36776 - DNA, 30 bp, Artificial Sequence
  Synthetic oligonucleotide
aggtgttggggtaccattgggcccatgcag

SEQ ID NO: 36777 - DNA, 30 bp, Artificial Sequence
  Synthetic oligonucleotide
cttattgcaggccaatcaattcgagtgcag

SEQ ID NO: 36778 - DNA, 30 bp, Artificial Sequence
  Synthetic oligonucleotide
tatatcgaccgaagtgaatcccaggtgcag

SEQ ID NO: 36779 - DNA, 30 bp, Artificial Sequence
  Synthetic oligonucleotide
ggtggccaaacatctgtaaggggggtgcag

SEQ ID NO: 36780 - DNA, 30 bp, Artificial Sequence
  Synthetic oligonucleotide
gaccgattagacagcggtaggagtgtgcag

SEQ ID NO: 36781 - DNA, 30 bp, Artificial Sequence
  Synthetic oligonucleotide
tggcacgggttcgatatatcatcacatcag

SEQ ID NO: 36782 - DNA, 30 bp, Artificial Sequence
  Synthetic oligonucleotide
cgcaatttgttaaatccaaggtcacatcag

SEQ ID NO: 36783 - DNA, 30 bp, Artificial Sequence
  Synthetic oligonucleotide
aacgacaaggttggagcacccgagcatcag

SEQ ID NO: 36784 - DNA, 30 bp, Artificial Sequence
  Synthetic oligonucleotide
atgcttacggcagggaaaagtcgagatcag

SEQ ID NO: 36785 - DNA, 30 bp, Artificial Sequence
  Synthetic oligonucleotide
ctacggcaaccgctcaaactaggtactcag

SEQ ID NO: 36786 - DNA, 30 bp, Artificial Sequence
  Synthetic oligonucleotide
ggcagtgaatcagacttattaccctctcag

SEQ ID NO: 36787 - DNA, 30 bp, Artificial Sequence
  Synthetic oligonucleotide
tgtgactaatgtcccagatggacctgtcag

SEQ ID NO: 36788 - DNA, 30 bp, Artificial Sequence
  Synthetic oligonucleotide
acgctaatgataaatggcagattaattcag

SEQ ID NO: 36789 - DNA, 30 bp, Artificial Sequence
  Synthetic oligonucleotide
gccgtaaacaccacgcgatgggaatttcag

SEQ ID NO: 36790 - DNA, 30 bp, Artificial Sequence
  Synthetic oligonucleotide
aaggcaatcgcaaagcgagctgtatttcag

SEQ ID NO: 36791 - DNA, 30 bp, Artificial Sequence
  Synthetic oligonucleotide
atggggattaccatagcaccacggaaagag

SEQ ID NO: 36792 - DNA, 30 bp, Artificial Sequence
  Synthetic oligonucleotide
gtggcagtatggaaactacctatgaaagag

SEQ ID NO: 36793 - DNA, 30 bp, Artificial Sequence
  Synthetic oligonucleotide
acttcgaaggtgcacgcaattatgaaagag

SEQ ID NO: 36794 - DNA, 30 bp, Artificial Sequence
  Synthetic oligonucleotide
tgggaactcattcagacggaagtggaagag

SEQ ID NO: 36795 - DNA, 30 bp, Artificial Sequence
  Synthetic oligonucleotide
ctacgatcaacaatgaaaccgtgctaagag

SEQ ID NO: 36796 - DNA, 30 bp, Artificial Sequence
  Synthetic oligonucleotide
atgagcggtagatgggggggataagcagag

SEQ ID NO: 36797 - DNA, 30 bp, Artificial Sequence
  Synthetic oligonucleotide
taagcgcaagtacacccgagagtagcagag

SEQ ID NO: 36798 - DNA, 30 bp, Artificial Sequence
  Synthetic oligonucleotide
agagaaggaggtagcgaaaattacagagag

SEQ ID NO: 36799 - DNA, 30 bp, Artificial Sequence
  Synthetic oligonucleotide
ctaaattgaaacacaggccacaatagagag

SEQ ID NO: 36800 - DNA, 30 bp, Artificial Sequence
  Synthetic oligonucleotide
cgctgtcgtaaaggggacactgcgcgagag

SEQ ID NO: 36801 - DNA, 30 bp, Artificial Sequence
  Synthetic oligonucleotide
agtgaaaccgtacggcatgacactcgagag

SEQ ID NO: 36802 - DNA, 30 bp, Artificial Sequence
  Synthetic oligonucleotide
tacagaagagacgggctgcgacgaggagag

SEQ ID NO: 36803 - DNA, 30 bp, Artificial Sequence
  Synthetic oligonucleotide
ctagataaacgaaaatcgacaaccggagag

SEQ ID NO: 36804 - DNA, 30 bp, Artificial Sequence
  Synthetic oligonucleotide
ataagggtagaaatccaataatggggagag

SEQ ID NO: 36805 - DNA, 30 bp, Artificial Sequence
  Synthetic oligonucleotide
gccagaagatactatggttatagtggagag

SEQ ID NO: 36806 - DNA, 30 bp, Artificial Sequence
  Synthetic oligonucleotide
agtaccaacggaaatgacgtgtgtggagag

SEQ ID NO: 36807 - DNA, 30 bp, Artificial Sequence
  Synthetic oligonucleotide
ccacacgggtgcaacgttacccgatgagag

SEQ ID NO: 36808 - DNA, 30 bp, Artificial Sequence
  Synthetic oligonucleotide
gttgctgatgccgacgatccacagtgagag

SEQ ID NO: 36809 - DNA, 30 bp, Artificial Sequence
  Synthetic oligonucleotide
cgacgctgaacatcaatacatgggtgagag

SEQ ID NO: 36810 - DNA, 30 bp, Artificial Sequence
  Synthetic oligonucleotide
cagcagtcagccgccgatgatttactagag

SEQ ID NO: 36811 - DNA, 30 bp, Artificial Sequence
  Synthetic oligonucleotide
gtagaagtcgccgaacattaaaacctagag

SEQ ID NO: 36812 - DNA, 30 bp, Artificial Sequence
  Synthetic oligonucleotide
cccgaagaggatagcacggatggattagag

SEQ ID NO: 36813 - DNA, 30 bp, Artificial Sequence
  Synthetic oligonucleotide
ggggctgaacaacccgcagagaccttagag

SEQ ID NO: 36814 - DNA, 30 bp, Artificial Sequence
  Synthetic oligonucleotide
cagcgcagcgagtaatgtcaggtgttagag

SEQ ID NO: 36815 - DNA, 30 bp, Artificial Sequence
  Synthetic oligonucleotide
gaattaacgacatggcagggtcaaaacgag

SEQ ID NO: 36816 - DNA, 30 bp, Artificial Sequence
  Synthetic oligonucleotide
cctgaggtcataacagttcttatcaacgag

SEQ ID NO: 36817 - DNA, 30 bp, Artificial Sequence
  Synthetic oligonucleotide
tcgctaaattgggcggatgaacgtaacgag

SEQ ID NO: 36818 - DNA, 30 bp, Artificial Sequence
  Synthetic oligonucleotide
cgacggtcccgaagtggtaaacttaacgag

SEQ ID NO: 36819 - DNA, 30 bp, Artificial Sequence
  Synthetic oligonucleotide
caggctaactgggcgatgttagatgacgag

SEQ ID NO: 36820 - DNA, 30 bp, Artificial Sequence
  Synthetic oligonucleotide
tgaacacgtagcaggtagagttcgaccgag

SEQ ID NO: 36821 - DNA, 30 bp, Artificial Sequence
  Synthetic oligonucleotide
agacgcataggttgcaatgggcactccgag

SEQ ID NO: 36822 - DNA, 30 bp, Artificial Sequence
  Synthetic oligonucleotide
gccgtcttatgcccgagcctcccctccgag

SEQ ID NO: 36823 - DNA, 30 bp, Artificial Sequence
  Synthetic oligonucleotide
ggccgattggtggttttggtgtaaagcgag

SEQ ID NO: 36824 - DNA, 30 bp, Artificial Sequence
  Synthetic oligonucleotide
agagataagaacttaagggggggaagcgag

SEQ ID NO: 36825 - DNA, 30 bp, Artificial Sequence
  Synthetic oligonucleotide
actgagggacatcaaaatgaccccagcgag

SEQ ID NO: 36826 - DNA, 30 bp, Artificial Sequence
  Synthetic oligonucleotide
acggtacctggttcacttctccgtagcgag

SEQ ID NO: 36827 - DNA, 30 bp, Artificial Sequence
  Synthetic oligonucleotide
acccaaggaaaattactgatccggggcgag

SEQ ID NO: 36828 - DNA, 30 bp, Artificial Sequence
  Synthetic oligonucleotide
atctgcgaggggatttcaccagcctgcgag

SEQ ID NO: 36829 - DNA, 30 bp, Artificial Sequence
  Synthetic oligonucleotide
ccttatcaatattagctaaagcgcatcgag

SEQ ID NO: 36830 - DNA, 30 bp, Artificial Sequence
  Synthetic oligonucleotide
gtgatcaagcgacctgcaacgcagatcgag

SEQ ID NO: 36831 - DNA, 30 bp, Artificial Sequence
  Synthetic oligonucleotide
acggagtatcacgtgtggaaggggctcgag

SEQ ID NO: 36832 - DNA, 30 bp, Artificial Sequence
  Synthetic oligonucleotide
cctagatgcgatcttgcgtgcaaggtcgag

SEQ ID NO: 36833 - DNA, 30 bp, Artificial Sequence
  Synthetic oligonucleotide
tacagcgtagaataacaatgtttattcgag

SEQ ID NO: 36834 - DNA, 30 bp, Artificial Sequence
  Synthetic oligonucleotide
ctacgagaatgtccacgtctattgttcgag

SEQ ID NO: 36835 - DNA, 30 bp, Artificial Sequence
  Synthetic oligonucleotide
tttaccgcgtaacatagggggaaaaaggag

SEQ ID NO: 36836 - DNA, 30 bp, Artificial Sequence
  Synthetic oligonucleotide
tcgctgtatacgccgcgactaaacgaggag

SEQ ID NO: 36837 - DNA, 30 bp, Artificial Sequence
  Synthetic oligonucleotide
ggtgtgctgccgaagcgcatcagcgaggag

SEQ ID NO: 36838 - DNA, 30 bp, Artificial Sequence
  Synthetic oligonucleotide
ggcgaacgacggcgtatgaagggggaggag

SEQ ID NO: 36839 - DNA, 30 bp, Artificial Sequence
  Synthetic oligonucleotide
cgcgaagtaacgggattctcattcacggag

SEQ ID NO: 36840 - DNA, 30 bp, Artificial Sequence
  Synthetic oligonucleotide
catccacatatcaacaaatagtcagcggag

SEQ ID NO: 36841 - DNA, 30 bp, Artificial Sequence
  Synthetic oligonucleotide
ggtcaccataggatacgccattccgcggag

SEQ ID NO: 36842 - DNA, 30 bp, Artificial Sequence
  Synthetic oligonucleotide
acgggatacatgcggccggtaaggagggag

SEQ ID NO: 36843 - DNA, 30 bp, Artificial Sequence
  Synthetic oligonucleotide
gtccatccagttcacaaaaccggacgggag

SEQ ID NO: 36844 - DNA, 30 bp, Artificial Sequence
  Synthetic oligonucleotide
agataaaagcatattggcacgggacgggag

SEQ ID NO: 36845 - DNA, 30 bp, Artificial Sequence
  Synthetic oligonucleotide
tcgtcgtgcaaagtcagcaatgaaggggag

SEQ ID NO: 36846 - DNA, 30 bp, Artificial Sequence
  Synthetic oligonucleotide
taatcaacgaagttgccgtcgtcaggggag

SEQ ID NO: 36847 - DNA, 30 bp, Artificial Sequence
  Synthetic oligonucleotide
agttcacaacgtgaagaacccagaggggag

SEQ ID NO: 36848 - DNA, 30 bp, Artificial Sequence
  Synthetic oligonucleotide
agccctgtggagggaacagagacgggggag

SEQ ID NO: 36849 - DNA, 30 bp, Artificial Sequence
  Synthetic oligonucleotide
aaagaagaggaaaccccgggaaaatgggag

SEQ ID NO: 36850 - DNA, 30 bp, Artificial Sequence
  Synthetic oligonucleotide
tagatgaacatggcggacaacagatgggag

SEQ ID NO: 36851 - DNA, 30 bp, Artificial Sequence
  Synthetic oligonucleotide
gccttggaaataatcgatgtgagctgggag

SEQ ID NO: 36852 - DNA, 30 bp, Artificial Sequence
  Synthetic oligonucleotide
caagccccgacatcatgttgcggctgggag

SEQ ID NO: 36853 - DNA, 30 bp, Artificial Sequence
  Synthetic oligonucleotide
tcccgcaaatctggaaagtggataatggag

SEQ ID NO: 36854 - DNA, 30 bp, Artificial Sequence
  Synthetic oligonucleotide
gaacctagaagataacattataccatggag

SEQ ID NO: 36855 - DNA, 30 bp, Artificial Sequence
  Synthetic oligonucleotide
gtcaccacatgccaacaaaaaaggatggag

SEQ ID NO: 36856 - DNA, 30 bp, Artificial Sequence
  Synthetic oligonucleotide
tcgagtctgagtgggatgcaagagttggag

SEQ ID NO: 36857 - DNA, 30 bp, Artificial Sequence
  Synthetic oligonucleotide
ggggcgacttatccacatccgaggaatgag

SEQ ID NO: 36858 - DNA, 30 bp, Artificial Sequence
  Synthetic oligonucleotide
aagggaacgaacaaggagatactctatgag

SEQ ID NO: 36859 - DNA, 30 bp, Artificial Sequence
  Synthetic oligonucleotide
agtttccggaaaatatgacgaaagactgag

SEQ ID NO: 36860 - DNA, 30 bp, Artificial Sequence
  Synthetic oligonucleotide
ctagagcgaaacgcacgtcatttcgctgag

SEQ ID NO: 36861 - DNA, 30 bp, Artificial Sequence
  Synthetic oligonucleotide
tcttgtaagtgagatgtgaaataatctgag

SEQ ID NO: 36862 - DNA, 30 bp, Artificial Sequence
  Synthetic oligonucleotide
tagtatgcaaagtgtacatcaagatctgag

SEQ ID NO: 36863 - DNA, 30 bp, Artificial Sequence
  Synthetic oligonucleotide
gagctaagggtacaaccacaaggctctgag

SEQ ID NO: 36864 - DNA, 30 bp, Artificial Sequence
  Synthetic oligonucleotide
agatcagatatagtcgaggctattcgtgag

SEQ ID NO: 36865 - DNA, 30 bp, Artificial Sequence
  Synthetic oligonucleotide
atgataggccaatgaggggatcagggtgag

SEQ ID NO: 36866 - DNA, 30 bp, Artificial Sequence
  Synthetic oligonucleotide
gacaaatcggctgccctgagagatggtgag

SEQ ID NO: 36867 - DNA, 30 bp, Artificial Sequence
  Synthetic oligonucleotide
aatgagagggttgacaaaaagtattgtgag

SEQ ID NO: 36868 - DNA, 30 bp, Artificial Sequence
  Synthetic oligonucleotide
tcagaacctagggaagaggacaaaattgag

SEQ ID NO: 36869 - DNA, 30 bp, Artificial Sequence
  Synthetic oligonucleotide
cgcgttatttaaagcatgacggcaattgag

SEQ ID NO: 36870 - DNA, 30 bp, Artificial Sequence
  Synthetic oligonucleotide
tcgaagttaccagtccggtaacagattgag

SEQ ID NO: 36871 - DNA, 30 bp, Artificial Sequence
  Synthetic oligonucleotide
actttcgacggaattgggagaaggcttgag

SEQ ID NO: 36872 - DNA, 30 bp, Artificial Sequence
  Synthetic oligonucleotide
agtgtaggctggcgcgaagttctgcttgag

SEQ ID NO: 36873 - DNA, 30 bp, Artificial Sequence
  Synthetic oligonucleotide
acgatacatataattctccaatatcttgag

SEQ ID NO: 36874 - DNA, 30 bp, Artificial Sequence
  Synthetic oligonucleotide
caaaaccgtagagttggcccagaggttgag

SEQ ID NO: 36875 - DNA, 30 bp, Artificial Sequence
  Synthetic oligonucleotide
cagaagtaagacttgcgaactatggttgag

SEQ ID NO: 36876 - DNA, 30 bp, Artificial Sequence
  Synthetic oligonucleotide
tcagggatacctgaacaaaaagttgttgag

SEQ ID NO: 36877 - DNA, 30 bp, Artificial Sequence
  Synthetic oligonucleotide
gcagcgcgcgccagaaagtgttagaaatag

SEQ ID NO: 36878 - DNA, 30 bp, Artificial Sequence
  Synthetic oligonucleotide
gcatgcgaggggcaggcggcgagcacatag

SEQ ID NO: 36879 - DNA, 30 bp, Artificial Sequence
  Synthetic oligonucleotide
gcagcggactctagaaatgaccgaccatag

SEQ ID NO: 36880 - DNA, 30 bp, Artificial Sequence
  Synthetic oligonucleotide
gaaagcgacgatgtaaccacaagagcatag

SEQ ID NO: 36881 - DNA, 30 bp, Artificial Sequence
  Synthetic oligonucleotide
agtgatggagtatagcgtgaccgagcatag

SEQ ID NO: 36882 - DNA, 30 bp, Artificial Sequence
  Synthetic oligonucleotide
catcgtgtgcgtaggacaaaacttgcatag

SEQ ID NO: 36883 - DNA, 30 bp, Artificial Sequence
  Synthetic oligonucleotide
ggcagcagacaggatcggaacccatcatag

SEQ ID NO: 36884 - DNA, 30 bp, Artificial Sequence
  Synthetic oligonucleotide
cgaacagtagatgtaaattcactaagatag

SEQ ID NO: 36885 - DNA, 30 bp, Artificial Sequence
  Synthetic oligonucleotide
cgaatatctatgatagctgtaaagagatag

SEQ ID NO: 36886 - DNA, 30 bp, Artificial Sequence
  Synthetic oligonucleotide
gggcgagatctatgattctataggagatag

SEQ ID NO: 36887 - DNA, 30 bp, Artificial Sequence
  Synthetic oligonucleotide
gggatgaaaacgccacagtaagttggatag

SEQ ID NO: 36888 - DNA, 30 bp, Artificial Sequence
  Synthetic oligonucleotide
gaacggcgccatcaaggtgaccatttatag

SEQ ID NO: 36889 - DNA, 30 bp, Artificial Sequence
  Synthetic oligonucleotide
aggtgaagacttgtcatcggatggaactag

SEQ ID NO: 36890 - DNA, 30 bp, Artificial Sequence
  Synthetic oligonucleotide
gggagcggtgaaagctactgatcgcactag

SEQ ID NO: 36891 - DNA, 30 bp, Artificial Sequence
  Synthetic oligonucleotide
ggattctcggaggagagtcccgtagactag

SEQ ID NO: 36892 - DNA, 30 bp, Artificial Sequence
  Synthetic oligonucleotide
tctccgttagccaagatagggtatgactag

SEQ ID NO: 36893 - DNA, 30 bp, Artificial Sequence
  Synthetic oligonucleotide
cgtaatcggttaatgctcggcggtgcctag

SEQ ID NO: 36894 - DNA, 30 bp, Artificial Sequence
  Synthetic oligonucleotide
cgtcagtcatggagaaaagcctctagctag

SEQ ID NO: 36895 - DNA, 30 bp, Artificial Sequence
  Synthetic oligonucleotide
tgcgcgcaagaaaatatcagactgcgctag

SEQ ID NO: 36896 - DNA, 30 bp, Artificial Sequence
  Synthetic oligonucleotide
tgtcagtgacgtagaaacgttacaggctag

SEQ ID NO: 36897 - DNA, 30 bp, Artificial Sequence
  Synthetic oligonucleotide
cacaaacttcagtctactgcgctcggctag

SEQ ID NO: 36898 - DNA, 30 bp, Artificial Sequence
  Synthetic oligonucleotide
atggcacgttaagaagtcaggctactctag

SEQ ID NO: 36899 - DNA, 30 bp, Artificial Sequence
  Synthetic oligonucleotide
tcgggatgtttcgacaaccgaccgctctag

SEQ ID NO: 36900 - DNA, 30 bp, Artificial Sequence
  Synthetic oligonucleotide
taggcagagtgcggtaaagatatgctctag

SEQ ID NO: 36901 - DNA, 30 bp, Artificial Sequence
  Synthetic oligonucleotide
tacgggcagaggaatataattaacgagtag

SEQ ID NO: 36902 - DNA, 30 bp, Artificial Sequence
  Synthetic oligonucleotide
aggtaaccgtgagggtcttgtgtttagtag

SEQ ID NO: 36903 - DNA, 30 bp, Artificial Sequence
  Synthetic oligonucleotide
tcagtgagatggtatggcttacatacgtag

SEQ ID NO: 36904 - DNA, 30 bp, Artificial Sequence
  Synthetic oligonucleotide
cctcacatggaacagtaaaccttcccgtag

SEQ ID NO: 36905 - DNA, 30 bp, Artificial Sequence
  Synthetic oligonucleotide
cgagtcgaaacatggcgtttgaattcgtag

SEQ ID NO: 36906 - DNA, 30 bp, Artificial Sequence
  Synthetic oligonucleotide
ctcgaccaagatacgatttagggaaggtag

SEQ ID NO: 36907 - DNA, 30 bp, Artificial Sequence
  Synthetic oligonucleotide
tacacgcaaatcgccaagcggaacaggtag

SEQ ID NO: 36908 - DNA, 30 bp, Artificial Sequence
  Synthetic oligonucleotide
agacgcaccgaggacaggaccaagaggtag

SEQ ID NO: 36909 - DNA, 30 bp, Artificial Sequence
  Synthetic oligonucleotide
cgtcccatcacactaaaggcgttcgggtag

SEQ ID NO: 36910 - DNA, 30 bp, Artificial Sequence
  Synthetic oligonucleotide
aggggcgacagccagcaacgaaatgggtag

SEQ ID NO: 36911 - DNA, 30 bp, Artificial Sequence
  Synthetic oligonucleotide
aggcccattgaaagcccgtggatcatgtag

SEQ ID NO: 36912 - DNA, 30 bp, Artificial Sequence
  Synthetic oligonucleotide
agaggatgcggtagaatgtgttggatgtag

SEQ ID NO: 36913 - DNA, 30 bp, Artificial Sequence
  Synthetic oligonucleotide
gacaatcaaatgggcagtgagactatgtag

SEQ ID NO: 36914 - DNA, 30 bp, Artificial Sequence
  Synthetic oligonucleotide
agcgtccaacgcgttcgggacttgctgtag

SEQ ID NO: 36915 - DNA, 30 bp, Artificial Sequence
  Synthetic oligonucleotide
atctccgcttagaaggggtggaagttgtag

SEQ ID NO: 36916 - DNA, 30 bp, Artificial Sequence
  Synthetic oligonucleotide
ccacggcgaaatttgaagaatcgggattag

SEQ ID NO: 36917 - DNA, 30 bp, Artificial Sequence
  Synthetic oligonucleotide
cgtaaaaatccaaaataccgcaactattag

SEQ ID NO: 36918 - DNA, 30 bp, Artificial Sequence
  Synthetic oligonucleotide
gacatcacgtcgatgtgtaagggctattag

SEQ ID NO: 36919 - DNA, 30 bp, Artificial Sequence
  Synthetic oligonucleotide
aacctcgcgatcgaggggaattacacttag

SEQ ID NO: 36920 - DNA, 30 bp, Artificial Sequence
  Synthetic oligonucleotide
acgcacaaaagataataatcttggacttag

SEQ ID NO: 36921 - DNA, 30 bp, Artificial Sequence
  Synthetic oligonucleotide
acaagtgacaggcagtagaggctgacttag

SEQ ID NO: 36922 - DNA, 30 bp, Artificial Sequence
  Synthetic oligonucleotide
cggaatcagcttgtgtttgagcgtacttag

SEQ ID NO: 36923 - DNA, 30 bp, Artificial Sequence
  Synthetic oligonucleotide
ctcaggcgtaacgtcaacaacaaaccttag

SEQ ID NO: 36924 - DNA, 30 bp, Artificial Sequence
  Synthetic oligonucleotide
gacgagcgaatagtacgtaatcaggcttag

SEQ ID NO: 36925 - DNA, 30 bp, Artificial Sequence
  Synthetic oligonucleotide
tggagataggcacttgacacttcctcttag

SEQ ID NO: 36926 - DNA, 30 bp, Artificial Sequence
  Synthetic oligonucleotide
acgtccggaggcgtatatcaaagaagttag

SEQ ID NO: 36927 - DNA, 31 bp, Artificial Sequence
  Synthetic oligonucleotide
gctcgcggaaattgtggggtccaacggttag

SEQ ID NO: 36928 - DNA, 30 bp, Artificial Sequence
  Synthetic oligonucleotide
gcgtcaatggccaaaggatgcaacggttag

SEQ ID NO: 36929 - DNA, 30 bp, Artificial Sequence
  Synthetic oligonucleotide
gcaaaagattagtaccatccgagaatttag

SEQ ID NO: 36930 - DNA, 30 bp, Artificial Sequence
  Synthetic oligonucleotide
agtaaaggaaaaaaaagatataagcaaacg

SEQ ID NO: 36931 - DNA, 30 bp, Artificial Sequence
  Synthetic oligonucleotide
aggcaagcgtatcatagggattgtcaaacg

SEQ ID NO: 36932 - DNA, 30 bp, Artificial Sequence
  Synthetic oligonucleotide
tcgtgtcacacttgagctccattatcaacg

SEQ ID NO: 36933 - DNA, 30 bp, Artificial Sequence
  Synthetic oligonucleotide
gtgaagcgtctatctggtgcaaagagaacg

SEQ ID NO: 36934 - DNA, 30 bp, Artificial Sequence
  Synthetic oligonucleotide
aagatgacggtgcttctgggggctagaacg

SEQ ID NO: 36935 - DNA, 30 bp, Artificial Sequence
  Synthetic oligonucleotide
tcgtggcttcacgctcaagatagtagaacg

SEQ ID NO: 36936 - DNA, 30 bp, Artificial Sequence
  Synthetic oligonucleotide
gggcaatccgtataattctagaagcgaacg

SEQ ID NO: 36937 - DNA, 30 bp, Artificial Sequence
  Synthetic oligonucleotide
cgacgaggttttagaaacaggaaaggaacg

SEQ ID NO: 36938 - DNA, 30 bp, Artificial Sequence
  Synthetic oligonucleotide
atgcaggacacataaccgtggccatgaacg

SEQ ID NO: 36939 - DNA, 30 bp, Artificial Sequence
  Synthetic oligonucleotide
ggttgacccaagagtatcgcagggaacacg

SEQ ID NO: 36940 - DNA, 30 bp, Artificial Sequence
  Synthetic oligonucleotide
cggtaaccttgggactgggatgttaacacg

SEQ ID NO: 36941 - DNA, 30 bp, Artificial Sequence
  Synthetic oligonucleotide
gacaaaagtaaaaaacgcggatcttacacg

SEQ ID NO: 36942 - DNA, 30 bp, Artificial Sequence
  Synthetic oligonucleotide
caaggctgacaaagtatcatttgttacacg

SEQ ID NO: 36943 - DNA, 30 bp, Artificial Sequence
  Synthetic oligonucleotide
agataaaagctaacgatctccgacaccacg

SEQ ID NO: 36944 - DNA, 30 bp, Artificial Sequence
  Synthetic oligonucleotide
acctagcgaccggggagagtagctgccacg

SEQ ID NO: 36945 - DNA, 30 bp, Artificial Sequence
  Synthetic oligonucleotide
acgggatacgaaatagagagtatactcacg

SEQ ID NO: 36946 - DNA, 30 bp, Artificial Sequence
  Synthetic oligonucleotide
atgcacaggttccccagaatagatctcacg

SEQ ID NO: 36947 - DNA, 30 bp, Artificial Sequence
  Synthetic oligonucleotide
gatcgtacggcagaaaccaatgttgtcacg

SEQ ID NO: 36948 - DNA, 30 bp, Artificial Sequence
  Synthetic oligonucleotide
acctgtggacacacactagcccagttcacg

SEQ ID NO: 36949 - DNA, 30 bp, Artificial Sequence
  Synthetic oligonucleotide
cgagcggtttggctaggtaagctgaagacg

SEQ ID NO: 36950 - DNA, 30 bp, Artificial Sequence
  Synthetic oligonucleotide
agagggggatcagtggggccatccacgacg

SEQ ID NO: 36951 - DNA, 30 bp, Artificial Sequence
  Synthetic oligonucleotide
ccgtgccggaaaattcggctagaagcgacg

SEQ ID NO: 36952 - DNA, 30 bp, Artificial Sequence
  Synthetic oligonucleotide
cagagaatcagcaagatcaaacgccggacg

SEQ ID NO: 36953 - DNA, 30 bp, Artificial Sequence
  Synthetic oligonucleotide
gatgcgaaggaatacgtggcgaacgtgacg

SEQ ID NO: 36954 - DNA, 30 bp, Artificial Sequence
  Synthetic oligonucleotide
cctaccagtgtggatgagggtacatatacg

SEQ ID NO: 36955 - DNA, 30 bp, Artificial Sequence
  Synthetic oligonucleotide
gataacatcacataccacatcaatcctacg

SEQ ID NO: 36956 - DNA, 30 bp, Artificial Sequence
  Synthetic oligonucleotide
tggtcatgggtatgagagtcgaaagctacg

SEQ ID NO: 36957 - DNA, 30 bp, Artificial Sequence
  Synthetic oligonucleotide
ggggcaataaatcactggggtcactctacg

SEQ ID NO: 36958 - DNA, 30 bp, Artificial Sequence
  Synthetic oligonucleotide
cggcgacgtggatcagcgagtttctctacg

SEQ ID NO: 36959 - DNA, 30 bp, Artificial Sequence
  Synthetic oligonucleotide
tataggtccaggagagatttacaacgtacg

SEQ ID NO: 36960 - DNA, 30 bp, Artificial Sequence
  Synthetic oligonucleotide
taacacaggactctataagcgtgacgtacg

SEQ ID NO: 36961 - DNA, 30 bp, Artificial Sequence
  Synthetic oligonucleotide
atacgggagaggagtttacacctaggtacg

SEQ ID NO: 36962 - DNA, 30 bp, Artificial Sequence
  Synthetic oligonucleotide
aagaaaggatcgtaccacactactattacg

SEQ ID NO: 36963 - DNA, 30 bp, Artificial Sequence
  Synthetic oligonucleotide
gggttcgtgaaggaggctacagacgttacg

SEQ ID NO: 36964 - DNA, 30 bp, Artificial Sequence
  Synthetic oligonucleotide
ggtaaagtgtctgcatttgatgaaaaaccg

SEQ ID NO: 36965 - DNA, 30 bp, Artificial Sequence
  Synthetic oligonucleotide
gaactacgggatgcgtaaacaataaaaccg

SEQ ID NO: 36966 - DNA, 30 bp, Artificial Sequence
  Synthetic oligonucleotide
ttgtcatgtcacccgaaaatcaataaaccg

SEQ ID NO: 36967 - DNA, 30 bp, Artificial Sequence
  Synthetic oligonucleotide
ccgcgctagtacataagggatccgacaccg

SEQ ID NO: 36968 - DNA, 30 bp, Artificial Sequence
  Synthetic oligonucleotide
tgagagttaacaggacattgggagagaccg

SEQ ID NO: 36969 - DNA, 30 bp, Artificial Sequence
  Synthetic oligonucleotide
agttacaccataaggatgcccaaccgaccg

SEQ ID NO: 36970 - DNA, 30 bp, Artificial Sequence
  Synthetic oligonucleotide
agctcgaacgaaacatgtttaactggaccg

SEQ ID NO: 36971 - DNA, 30 bp, Artificial Sequence
  Synthetic oligonucleotide
aaggagtatggcaatcagggctcgtgaccg

SEQ ID NO: 36972 - DNA, 30 bp, Artificial Sequence
  Synthetic oligonucleotide
acgccacgtaggccataaccacttataccg

SEQ ID NO: 36973 - DNA, 30 bp, Artificial Sequence
  Synthetic oligonucleotide
agccagagagtcaaggaagtggacgtaccg

SEQ ID NO: 36974 - DNA, 30 bp, Artificial Sequence
  Synthetic oligonucleotide
ggaatggagatctatccagagggaaacccg

SEQ ID NO: 36975 - DNA, 30 bp, Artificial Sequence
  Synthetic oligonucleotide
cacctgcgcgacatgtagggaggtgacccg

SEQ ID NO: 36976 - DNA, 30 bp, Artificial Sequence
  Synthetic oligonucleotide
ggccgacttgaacatctcagcagtggcccg

SEQ ID NO: 36977 - DNA, 30 bp, Artificial Sequence
  Synthetic oligonucleotide
gtggacttaacagtagattggcactgcccg

SEQ ID NO: 36978 - DNA, 30 bp, Artificial Sequence
  Synthetic oligonucleotide
tatgttccggggccaagaaaactcaagccg

SEQ ID NO: 36979 - DNA, 30 bp, Artificial Sequence
  Synthetic oligonucleotide
ggggattaaggggaagtcccccgtaagccg

SEQ ID NO: 36980 - DNA, 30 bp, Artificial Sequence
  Synthetic oligonucleotide
accaaccccgttaagaagtaatacgagccg

SEQ ID NO: 36981 - DNA, 30 bp, Artificial Sequence
  Synthetic oligonucleotide
cgctaactccagaggcgggcattcgagccg

SEQ ID NO: 36982 - DNA, 30 bp, Artificial Sequence
  Synthetic oligonucleotide
agggcaagcatgaaagaatctgcatagccg

SEQ ID NO: 36983 - DNA, 30 bp, Artificial Sequence
  Synthetic oligonucleotide
ccaaaacggtaacgtcaacgcacaacgccg

SEQ ID NO: 36984 - DNA, 30 bp, Artificial Sequence
  Synthetic oligonucleotide
tgggcgtaatgcaacagcagaaagtcgccg

SEQ ID NO: 36985 - DNA, 30 bp, Artificial Sequence
  Synthetic oligonucleotide
atcagctgttatgaacggtaaatcgggccg

SEQ ID NO: 36986 - DNA, 30 bp, Artificial Sequence
  Synthetic oligonucleotide
gagctaggaagtcgatcgttaaagatgccg

SEQ ID NO: 36987 - DNA, 30 bp, Artificial Sequence
  Synthetic oligonucleotide
gacggacacagattgaatgagaccgtgccg

SEQ ID NO: 36988 - DNA, 30 bp, Artificial Sequence
  Synthetic oligonucleotide
ataacgaacaaaatcagactttaggtgccg

SEQ ID NO: 36989 - DNA, 30 bp, Artificial Sequence
  Synthetic oligonucleotide
gcctggagaatcgagcggcaaaatgatccg

SEQ ID NO: 36990 - DNA, 30 bp, Artificial Sequence
  Synthetic oligonucleotide
gatgtaaggcatcgcgctgacatacctccg

SEQ ID NO: 36991 - DNA, 30 bp, Artificial Sequence
  Synthetic oligonucleotide
tcagttcgggacatgaacccgaagtctccg

SEQ ID NO: 36992 - DNA, 30 bp, Artificial Sequence
  Synthetic oligonucleotide
cgtgcatcggaaggaaaaaaacattctccg

SEQ ID NO: 36993 - DNA, 30 bp, Artificial Sequence
  Synthetic oligonucleotide
gtgtaagtggagaaaccttaacaatgtccg

SEQ ID NO: 36994 - DNA, 30 bp, Artificial Sequence
  Synthetic oligonucleotide
ggaaaaggttcagttgtagagagaaaagcg

SEQ ID NO: 36995 - DNA, 30 bp, Artificial Sequence
  Synthetic oligonucleotide
catcaatattcatccaggtcgggcaaagcg

SEQ ID NO: 36996 - DNA, 30 bp, Artificial Sequence
  Synthetic oligonucleotide
aaggtatagaaagcccctgaatttcaagcg

SEQ ID NO: 36997 - DNA, 30 bp, Artificial Sequence
  Synthetic oligonucleotide
tcggcatataaccgctgatcaaaagaagcg

SEQ ID NO: 36998 - DNA, 30 bp, Artificial Sequence
  Synthetic oligonucleotide
aatcaggggggcgatgcaatcgaagaagcg

SEQ ID NO: 36999 - DNA, 30 bp, Artificial Sequence
  Synthetic oligonucleotide
tccagggcccgaatacgccgatactaagcg

SEQ ID NO: 37000 - DNA, 30 bp, Artificial Sequence
  Synthetic oligonucleotide
tggtggatgtcataccgccaatgttaagcg

SEQ ID NO: 37001 - DNA, 30 bp, Artificial Sequence
  Synthetic oligonucleotide
tcgtcccggctccccaattcacagacagcg

SEQ ID NO: 37002 - DNA, 30 bp, Artificial Sequence
  Synthetic oligonucleotide
ccataccgtcgtcgttcaggggctacagcg

SEQ ID NO: 37003 - DNA, 30 bp, Artificial Sequence
  Synthetic oligonucleotide
ggcacgtaaataccgtcaggttatccagcg

SEQ ID NO: 37004 - DNA, 30 bp, Artificial Sequence
  Synthetic oligonucleotide
ttcgcagggtactacgaatatggcagagcg

SEQ ID NO: 37005 - DNA, 30 bp, Artificial Sequence
  Synthetic oligonucleotide
gcaccaagatgaaactgtggatctagagcg

SEQ ID NO: 37006 - DNA, 30 bp, Artificial Sequence
  Synthetic oligonucleotide
cgttcgcgggtgcgaccttgaaattgagcg

SEQ ID NO: 37007 - DNA, 30 bp, Artificial Sequence
  Synthetic oligonucleotide
agaagctctggggaacctttagaaatagcg

SEQ ID NO: 37008 - DNA, 30 bp, Artificial Sequence
  Synthetic oligonucleotide
attaacatcgggtaagtcgcccgaatagcg

SEQ ID NO: 37009 - DNA, 30 bp, Artificial Sequence
  Synthetic oligonucleotide
catccttcatttaccgagaacaagctagcg

SEQ ID NO: 37010 - DNA, 30 bp, Artificial Sequence
  Synthetic oligonucleotide
tgtagcagtactccaagtagaacagtagcg

SEQ ID NO: 37011 - DNA, 30 bp, Artificial Sequence
  Synthetic oligonucleotide
agtcacggattctctaggagggtcgtagcg

SEQ ID NO: 37012 - DNA, 30 bp, Artificial Sequence
  Synthetic oligonucleotide
gtggatgcaatacaaaatggacgggtagcg

SEQ ID NO: 37013 - DNA, 30 bp, Artificial Sequence
  Synthetic oligonucleotide
agatgtagaaatacagaaacttagaacgcg

SEQ ID NO: 37014 - DNA, 30 bp, Artificial Sequence
  Synthetic oligonucleotide
ggtcaggcctctaaagagctaaaccacgcg

SEQ ID NO: 37015 - DNA, 30 bp, Artificial Sequence
  Synthetic oligonucleotide
ccaactgcgatcgagaaaccggcaaccgcg

SEQ ID NO: 37016 - DNA, 30 bp, Artificial Sequence
  Synthetic oligonucleotide
gcaaggacatgggctagggaggtaaccgcg

SEQ ID NO: 37017 - DNA, 30 bp, Artificial Sequence
  Synthetic oligonucleotide
ggctcaggatatttaaaaatgcatcccgcg

SEQ ID NO: 37018 - DNA, 30 bp, Artificial Sequence
  Synthetic oligonucleotide
atcggtaagagggagcgatgtccagccgcg

SEQ ID NO: 37019 - DNA, 30 bp, Artificial Sequence
  Synthetic oligonucleotide
ccgtattccccgagacatacgagttccgcg

SEQ ID NO: 37020 - DNA, 30 bp, Artificial Sequence
  Synthetic oligonucleotide
gacgggtgatggatagaacgacactgcgcg

SEQ ID NO: 37021 - DNA, 30 bp, Artificial Sequence
  Synthetic oligonucleotide
gtaagtgtaggactgctaacgaggtgcgcg

SEQ ID NO: 37022 - DNA, 30 bp, Artificial Sequence
  Synthetic oligonucleotide
cgtccagcagtgcttaggtcagaattcgcg

SEQ ID NO: 37023 - DNA, 30 bp, Artificial Sequence
  Synthetic oligonucleotide
aacggcttatcgtcgtaagaacaaaaggcg

SEQ ID NO: 37024 - DNA, 30 bp, Artificial Sequence
  Synthetic oligonucleotide
ggactacgaggttatgattgacagaaggcg

SEQ ID NO: 37025 - DNA, 30 bp, Artificial Sequence
  Synthetic oligonucleotide
cataccgaggcattcgaatggccgacggcg

SEQ ID NO: 37026 - DNA, 30 bp, Artificial Sequence
  Synthetic oligonucleotide
cacgttcaaggggtgagcgcaaacccggcg

SEQ ID NO: 37027 - DNA, 30 bp, Artificial Sequence
  Synthetic oligonucleotide
tcactccttcggtacaaagtaggctcggcg

SEQ ID NO: 37028 - DNA, 30 bp, Artificial Sequence
  Synthetic oligonucleotide
tggtcagctgaaagagtagaaaaaggggcg

SEQ ID NO: 37029 - DNA, 30 bp, Artificial Sequence
  Synthetic oligonucleotide
tctatgaacgggtgaaggtaacgatgggcg

SEQ ID NO: 37030 - DNA, 30 bp, Artificial Sequence
  Synthetic oligonucleotide
ctcaagagcgagacatttaatcacatggcg

SEQ ID NO: 37031 - DNA, 30 bp, Artificial Sequence
  Synthetic oligonucleotide
agatatctacgaatgatagaggttatggcg

SEQ ID NO: 37032 - DNA, 30 bp, Artificial Sequence
  Synthetic oligonucleotide
gcatgaaggattcgactccgagaagtggcg

SEQ ID NO: 37033 - DNA, 30 bp, Artificial Sequence
  Synthetic oligonucleotide
gtcgtcagaatatcacgggtataaaatgcg

SEQ ID NO: 37034 - DNA, 30 bp, Artificial Sequence
  Synthetic oligonucleotide
cacggacagatttcctgcggcaacaatgcg

SEQ ID NO: 37035 - DNA, 30 bp, Artificial Sequence
  Synthetic oligonucleotide
gtcgaaggggcacgagccctaagtaatgcg

SEQ ID NO: 37036 - DNA, 30 bp, Artificial Sequence
  Synthetic oligonucleotide
ccgtaaaacagagtggggtatttacatgcg

SEQ ID NO: 37037 - DNA, 30 bp, Artificial Sequence
  Synthetic oligonucleotide
tgcgaactgtgcacgatgtgtgcggatgcg

SEQ ID NO: 37038 - DNA, 30 bp, Artificial Sequence
  Synthetic oligonucleotide
cgatacaacatctgtaaagcgcaacctgcg

SEQ ID NO: 37039 - DNA, 30 bp, Artificial Sequence
  Synthetic oligonucleotide
cgagttaatgcgaatagaaaattgcgtgcg

SEQ ID NO: 37040 - DNA, 30 bp, Artificial Sequence
  Synthetic oligonucleotide
cactcaggggttagaaggacttacggtgcg

SEQ ID NO: 37041 - DNA, 30 bp, Artificial Sequence
  Synthetic oligonucleotide
cgagtcttcgattcggcgatagggggtgcg

SEQ ID NO: 37042 - DNA, 30 bp, Artificial Sequence
  Synthetic oligonucleotide
atgaacgaaggtatatcctcacccattgcg

SEQ ID NO: 37043 - DNA, 30 bp, Artificial Sequence
  Synthetic oligonucleotide
tagaggccgggtcaactggaacaacttgcg

SEQ ID NO: 37044 - DNA, 30 bp, Artificial Sequence
  Synthetic oligonucleotide
tgtaaggacgagaattaagacggttttgcg

SEQ ID NO: 37045 - DNA, 30 bp, Artificial Sequence
  Synthetic oligonucleotide
taggttaacggttgcgggatacagaaatcg

SEQ ID NO: 37046 - DNA, 30 bp, Artificial Sequence
  Synthetic oligonucleotide
tgaagccatttgactatgccaagcgaatcg

SEQ ID NO: 37047 - DNA, 30 bp, Artificial Sequence
  Synthetic oligonucleotide
aggcgtgggtgcgatgtgacaaactaatcg

SEQ ID NO: 37048 - DNA, 30 bp, Artificial Sequence
  Synthetic oligonucleotide
ggggagtcagattgcaaggggtcctaatcg

SEQ ID NO: 37049 - DNA, 30 bp, Artificial Sequence
  Synthetic oligonucleotide
tcgtgacgtcgcataacaaaagcgtcatcg

SEQ ID NO: 37050 - DNA, 30 bp, Artificial Sequence
  Synthetic oligonucleotide
cgcggggatcggagccacaaagggtcatcg

SEQ ID NO: 37051 - DNA, 30 bp, Artificial Sequence
  Synthetic oligonucleotide
tgagcttaaggcatccctgggaagagatcg

SEQ ID NO: 37052 - DNA, 30 bp, Artificial Sequence
  Synthetic oligonucleotide
cacgaaggtgaaagggaacacgcgcgatcg

SEQ ID NO: 37053 - DNA, 30 bp, Artificial Sequence
  Synthetic oligonucleotide
ggtggtaggcgcgcggaatatgatcgatcg

SEQ ID NO: 37054 - DNA, 30 bp, Artificial Sequence
  Synthetic oligonucleotide
agcgacaaaggtgtaggtgcgtaactatcg

SEQ ID NO: 37055 - DNA, 30 bp, Artificial Sequence
  Synthetic oligonucleotide
caaacgaacgtagaaatctatcgtctatcg

SEQ ID NO: 37056 - DNA, 30 bp, Artificial Sequence
  Synthetic oligonucleotide
gtgacctacccgaaaattaaaggcacctcg

SEQ ID NO: 37057 - DNA, 30 bp, Artificial Sequence
  Synthetic oligonucleotide
tcagatcctgtaggaatacgattcgcctcg

SEQ ID NO: 37058 - DNA, 30 bp, Artificial Sequence
  Synthetic oligonucleotide
gcgaaggcgtaccctttccgtaagagctcg

SEQ ID NO: 37059 - DNA, 30 bp, Artificial Sequence
  Synthetic oligonucleotide
acgttaatgattgggggagtagctcgctcg

SEQ ID NO: 37060 - DNA, 30 bp, Artificial Sequence
  Synthetic oligonucleotide
ggggtgaaacaaaacgtggacatatgctcg

SEQ ID NO: 37061 - DNA, 30 bp, Artificial Sequence
  Synthetic oligonucleotide
cacacgaccgactgtgtgcaaatcgtctcg

SEQ ID NO: 37062 - DNA, 30 bp, Artificial Sequence
  Synthetic oligonucleotide
tccaggcgtatccctatgcgcaaggtctcg

SEQ ID NO: 37063 - DNA, 30 bp, Artificial Sequence
  Synthetic oligonucleotide
taggtaaactcaaatatgggtacggtctcg

SEQ ID NO: 37064 - DNA, 30 bp, Artificial Sequence
  Synthetic oligonucleotide
aacagtcacattcgacacttccagaagtcg

SEQ ID NO: 37065 - DNA, 30 bp, Artificial Sequence
  Synthetic oligonucleotide
ggacgaacactaccagtgtcaaataagtcg

SEQ ID NO: 37066 - DNA, 30 bp, Artificial Sequence
  Synthetic oligonucleotide
cgacggcaataagtagcactggggcagtcg

SEQ ID NO: 37067 - DNA, 30 bp, Artificial Sequence
  Synthetic oligonucleotide
aggatttcatgcgaagacaaaatgtagtcg

SEQ ID NO: 37068 - DNA, 30 bp, Artificial Sequence
  Synthetic oligonucleotide
acacgcgacatagtcgaagccgagacgtcg

SEQ ID NO: 37069 - DNA, 30 bp, Artificial Sequence
  Synthetic oligonucleotide
agaaccactctgaaggttacgtccccgtcg

SEQ ID NO: 37070 - DNA, 30 bp, Artificial Sequence
  Synthetic oligonucleotide
tctggagggaactcgagtcaattagcgtcg

SEQ ID NO: 37071 - DNA, 30 bp, Artificial Sequence
  Synthetic oligonucleotide
ggatggcgttgttccagaatcgaagggtcg

SEQ ID NO: 37072 - DNA, 30 bp, Artificial Sequence
  Synthetic oligonucleotide
gaccacgaagacggtatgggtgccgggtcg

SEQ ID NO: 37073 - DNA, 30 bp, Artificial Sequence
  Synthetic oligonucleotide
acgcgcgtacaagcgtgttgtggcgggtcg

SEQ ID NO: 37074 - DNA, 30 bp, Artificial Sequence
  Synthetic oligonucleotide
tgagaaggtaatactcatggaggttggtcg

SEQ ID NO: 37075 - DNA, 30 bp, Artificial Sequence
  Synthetic oligonucleotide
ttggctggcggacgttgtgtgcagatgtcg

SEQ ID NO: 37076 - DNA, 29 bp, Artificial Sequence
  Synthetic oligonucleotide
taaagagagacaattgaaccaaactgtcg

SEQ ID NO: 37077 - DNA, 30 bp, Artificial Sequence
  Synthetic oligonucleotide
tggtccgtaagagacacccagtaagtgtcg

SEQ ID NO: 37078 - DNA, 30 bp, Artificial Sequence
  Synthetic oligonucleotide
cgaacgcagaggtgtggaaatacagtgtcg

SEQ ID NO: 37079 - DNA, 30 bp, Artificial Sequence
  Synthetic oligonucleotide
accgtaaactaggatacgcgtgccgtgtcg

SEQ ID NO: 37080 - DNA, 30 bp, Artificial Sequence
  Synthetic oligonucleotide
gtcagcggtgggttacacatcaccttgtcg

SEQ ID NO: 37081 - DNA, 30 bp, Artificial Sequence
  Synthetic oligonucleotide
ttgaggtaaaaaaacgtagggaaaaattcg

SEQ ID NO: 37082 - DNA, 30 bp, Artificial Sequence
  Synthetic oligonucleotide
aagtgatgtgagtgacttagcatcaattcg

SEQ ID NO: 37083 - DNA, 30 bp, Artificial Sequence
  Synthetic oligonucleotide
ccgctagatcaggatacggacaccgattcg

SEQ ID NO: 37084 - DNA, 30 bp, Artificial Sequence
  Synthetic oligonucleotide
tccgaaccaaacgtgcgcatgcttacttcg

SEQ ID NO: 37085 - DNA, 30 bp, Artificial Sequence
  Synthetic oligonucleotide
agctacattaaagttattggaatcagttcg

SEQ ID NO: 37086 - DNA, 30 bp, Artificial Sequence
  Synthetic oligonucleotide
atacatcgagatgatagatcgagacgttcg

SEQ ID NO: 37087 - DNA, 30 bp, Artificial Sequence
  Synthetic oligonucleotide
ggcccaatgcgagtatgagagcgctgttcg

SEQ ID NO: 37088 - DNA, 30 bp, Artificial Sequence
  Synthetic oligonucleotide
aggcctcacattaccgcgtcccagtgttcg

SEQ ID NO: 37089 - DNA, 30 bp, Artificial Sequence
  Synthetic oligonucleotide
taaggtcagaagagaaatctgaggtgttcg

SEQ ID NO: 37090 - DNA, 30 bp, Artificial Sequence
  Synthetic oligonucleotide
gcagagcgtggtgaccgatttagcatttcg

SEQ ID NO: 37091 - DNA, 30 bp, Artificial Sequence
  Synthetic oligonucleotide
gacggtccccaattttgagagcatgtttcg

SEQ ID NO: 37092 - DNA, 30 bp, Artificial Sequence
  Synthetic oligonucleotide
ataagctacagactatcgtccccgcaaagg

SEQ ID NO: 37093 - DNA, 30 bp, Artificial Sequence
  Synthetic oligonucleotide
cggaaccacgtcagcgggcttggcgaaagg

SEQ ID NO: 37094 - DNA, 30 bp, Artificial Sequence
  Synthetic oligonucleotide
atacccgggaaggggtgactccatgaaagg

SEQ ID NO: 37095 - DNA, 30 bp, Artificial Sequence
  Synthetic oligonucleotide
aacggagatggctcataatggatgtaaagg

SEQ ID NO: 37096 - DNA, 30 bp, Artificial Sequence
  Synthetic oligonucleotide
gaagggacggtccccgtattgttaacaagg

SEQ ID NO: 37097 - DNA, 30 bp, Artificial Sequence
  Synthetic oligonucleotide
tgaagggtgataataaggcaaaggacaagg

SEQ ID NO: 37098 - DNA, 30 bp, Artificial Sequence
  Synthetic oligonucleotide
cgtcagactatgcatgcccaaccaccaagg

SEQ ID NO: 37099 - DNA, 30 bp, Artificial Sequence
  Synthetic oligonucleotide
ctgagaaggacgtgcgattcgggtccaagg

SEQ ID NO: 37100 - DNA, 30 bp, Artificial Sequence
  Synthetic oligonucleotide
cttcccgaatataaccaatctccgagaagg

SEQ ID NO: 37101 - DNA, 30 bp, Artificial Sequence
  Synthetic oligonucleotide
gggcaatacgttagcatatcatgtcgaagg

SEQ ID NO: 37102 - DNA, 30 bp, Artificial Sequence
  Synthetic oligonucleotide
ggcacggacgagaatgttcacgcttgaagg

SEQ ID NO: 37103 - DNA, 30 bp, Artificial Sequence
  Synthetic oligonucleotide
gagagagagaacatcttcgaccccataagg

SEQ ID NO: 37104 - DNA, 30 bp, Artificial Sequence
  Synthetic oligonucleotide
accatcacctcagacaggccacgattaagg

SEQ ID NO: 37105 - DNA, 30 bp, Artificial Sequence
  Synthetic oligonucleotide
acagaggtcagggaatattgagtgttaagg

SEQ ID NO: 37106 - DNA, 30 bp, Artificial Sequence
  Synthetic oligonucleotide
ccacataataagtggtagacagaaaacagg

SEQ ID NO: 37107 - DNA, 30 bp, Artificial Sequence
  Synthetic oligonucleotide
tcaggtgcataaggtgcaaaagtgcacagg

SEQ ID NO: 37108 - DNA, 30 bp, Artificial Sequence
  Synthetic oligonucleotide
cggaggcactggactgtatttggagacagg

SEQ ID NO: 37109 - DNA, 30 bp, Artificial Sequence
  Synthetic oligonucleotide
catgcgtttcgcgattaatgcaactacagg

SEQ ID NO: 37110 - DNA, 30 bp, Artificial Sequence
  Synthetic oligonucleotide
atgggcatggcataggcaaaacatcccagg

SEQ ID NO: 37111 - DNA, 30 bp, Artificial Sequence
  Synthetic oligonucleotide
cagtttcgaacaattacagcggatgccagg

SEQ ID NO: 37112 - DNA, 30 bp, Artificial Sequence
  Synthetic oligonucleotide
tcgtgggtagagactacggtttcgtccagg

SEQ ID NO: 37113 - DNA, 30 bp, Artificial Sequence
  Synthetic oligonucleotide
cgacgttcgttagactgtgataacagcagg

SEQ ID NO: 37114 - DNA, 30 bp, Artificial Sequence
  Synthetic oligonucleotide
gcgggggcaaacgctcctacaattcgcagg

SEQ ID NO: 37115 - DNA, 30 bp, Artificial Sequence
  Synthetic oligonucleotide
ctggtatcagtcaataacaacacaggcagg

SEQ ID NO: 37116 - DNA, 30 bp, Artificial Sequence
  Synthetic oligonucleotide
tcacaatcatccagatgtacgtatggcagg

SEQ ID NO: 37117 - DNA, 30 bp, Artificial Sequence
  Synthetic oligonucleotide
ggctacgctactcgataacaacgcatcagg

SEQ ID NO: 37118 - DNA, 30 bp, Artificial Sequence
  Synthetic oligonucleotide
cacagaccgtgtaaagtagtgtgtgtcagg

SEQ ID NO: 37119 - DNA, 30 bp, Artificial Sequence
  Synthetic oligonucleotide
tgtagtcgagcgcgagaggggtatcagagg

SEQ ID NO: 37120 - DNA, 30 bp, Artificial Sequence
  Synthetic oligonucleotide
acctaaccgcacacagaagcgtgggagagg

SEQ ID NO: 37121 - DNA, 30 bp, Artificial Sequence
  Synthetic oligonucleotide
gcgggtaaccaccaaaagtagaatgagagg

SEQ ID NO: 37122 - DNA, 30 bp, Artificial Sequence
  Synthetic oligonucleotide
cgatttgcatgttccgaagactactagagg

SEQ ID NO: 37123 - DNA, 30 bp, Artificial Sequence
  Synthetic oligonucleotide
gagaggacttcacccacccgaacctagagg

SEQ ID NO: 37124 - DNA, 30 bp, Artificial Sequence
  Synthetic oligonucleotide
ggagtgcggagcgtaaggcagtcctagagg

SEQ ID NO: 37125 - DNA, 30 bp, Artificial Sequence
  Synthetic oligonucleotide
aggcatgaaagtggttgatggtcaacgagg

SEQ ID NO: 37126 - DNA, 30 bp, Artificial Sequence
  Synthetic oligonucleotide
acgtgattgggagaccccggtggaacgagg

SEQ ID NO: 37127 - DNA, 30 bp, Artificial Sequence
  Synthetic oligonucleotide
ggctgggatgttagtccatcaataacgagg

SEQ ID NO: 37128 - DNA, 30 bp, Artificial Sequence
  Synthetic oligonucleotide
tcgcaggggcataaagcacatatcacgagg

SEQ ID NO: 37129 - DNA, 30 bp, Artificial Sequence
  Synthetic oligonucleotide
aggccggatagactgaataaatcggcgagg

SEQ ID NO: 37130 - DNA, 30 bp, Artificial Sequence
  Synthetic oligonucleotide
tcggtcctatcggtccgaaaacaatcgagg

SEQ ID NO: 37131 - DNA, 30 bp, Artificial Sequence
  Synthetic oligonucleotide
gagagctctgtcagaactagccattcgagg

SEQ ID NO: 37132 - DNA, 30 bp, Artificial Sequence
  Synthetic oligonucleotide
ccaacactggattcgaaagatcgtaggagg

SEQ ID NO: 37133 - DNA, 30 bp, Artificial Sequence
  Synthetic oligonucleotide
aagatcggattcactggattacaccggagg

SEQ ID NO: 37134 - DNA, 30 bp, Artificial Sequence
  Synthetic oligonucleotide
gcggactaggcgcaagtatcatgccggagg

SEQ ID NO: 37135 - DNA, 30 bp, Artificial Sequence
  Synthetic oligonucleotide
cacagagccgaggatcgttacacagggagg

SEQ ID NO: 37136 - DNA, 30 bp, Artificial Sequence
  Synthetic oligonucleotide
agaagcatttagagtatcgggcgctggagg

SEQ ID NO: 37137 - DNA, 30 bp, Artificial Sequence
  Synthetic oligonucleotide
caaggcactcacatacgcgataacttgagg

SEQ ID NO: 37138 - DNA, 30 bp, Artificial Sequence
  Synthetic oligonucleotide
gcagagcatgcctcattccctgatgatagg

SEQ ID NO: 37139 - DNA, 30 bp, Artificial Sequence
  Synthetic oligonucleotide
cgtcaggcgacagtaaacgtgcgaactagg

SEQ ID NO: 37140 - DNA, 30 bp, Artificial Sequence
  Synthetic oligonucleotide
acaggtatattgcctgaacaggcgactagg

SEQ ID NO: 37141 - DNA, 30 bp, Artificial Sequence
  Synthetic oligonucleotide
actggtgctggccgaaagacaatagctagg

SEQ ID NO: 37142 - DNA, 30 bp, Artificial Sequence
  Synthetic oligonucleotide
agtgcgagcagtatttcaacgttggctagg

SEQ ID NO: 37143 - DNA, 30 bp, Artificial Sequence
  Synthetic oligonucleotide
tgggataaagtacgctcggcaatcgttagg

SEQ ID NO: 37144 - DNA, 30 bp, Artificial Sequence
  Synthetic oligonucleotide
gccgaaggatggttgaaaaaaagggttagg

SEQ ID NO: 37145 - DNA, 30 bp, Artificial Sequence
  Synthetic oligonucleotide
ggtagtcgccaggggaacaggtgatttagg

SEQ ID NO: 37146 - DNA, 30 bp, Artificial Sequence
  Synthetic oligonucleotide
tacgccgacccacgttaagaggtatttagg

SEQ ID NO: 37147 - DNA, 30 bp, Artificial Sequence
  Synthetic oligonucleotide
atacgaatgatcagaataggcctcaaacgg

SEQ ID NO: 37148 - DNA, 30 bp, Artificial Sequence
  Synthetic oligonucleotide
cggggtgctaggagattcttacgcgaacgg

SEQ ID NO: 37149 - DNA, 30 bp, Artificial Sequence
  Synthetic oligonucleotide
acggaacggggccaaaaggtcaatgaacgg

SEQ ID NO: 37150 - DNA, 30 bp, Artificial Sequence
  Synthetic oligonucleotide
ttaactcgatgccgggaagtcagataacgg

SEQ ID NO: 37151 - DNA, 30 bp, Artificial Sequence
  Synthetic oligonucleotide
ctgcgctcaaagactaggagaaagagacgg

SEQ ID NO: 37152 - DNA, 30 bp, Artificial Sequence
  Synthetic oligonucleotide
cagataaagtgcagaacactgaggatacgg

SEQ ID NO: 37153 - DNA, 30 bp, Artificial Sequence
  Synthetic oligonucleotide
ccccaaagctaagcaaggtaaccacaccgg

SEQ ID NO: 37154 - DNA, 30 bp, Artificial Sequence
  Synthetic oligonucleotide
acgttcgaacgctggctacacaaaacccgg

SEQ ID NO: 37155 - DNA, 30 bp, Artificial Sequence
  Synthetic oligonucleotide
ttcgaggcgaaggactccatcacaacccgg

SEQ ID NO: 37156 - DNA, 30 bp, Artificial Sequence
  Synthetic oligonucleotide
cagcatgccgttaaaaagatacatgcccgg

SEQ ID NO: 37157 - DNA, 30 bp, Artificial Sequence
  Synthetic oligonucleotide
gctagagcgatataaggataataaggccgg

SEQ ID NO: 37158 - DNA, 30 bp, Artificial Sequence
  Synthetic oligonucleotide
caaagaggacgggatacgctcagcggccgg

SEQ ID NO: 37159 - DNA, 30 bp, Artificial Sequence
  Synthetic oligonucleotide
aggggttctacatgcaagtaggtatgccgg

SEQ ID NO: 37160 - DNA, 30 bp, Artificial Sequence
  Synthetic oligonucleotide
aacgtaatcctgaaatgaaagatgctccgg

SEQ ID NO: 37161 - DNA, 30 bp, Artificial Sequence
  Synthetic oligonucleotide
ggcatggcgtgtagacagatggttgtccgg

SEQ ID NO: 37162 - DNA, 30 bp, Artificial Sequence
  Synthetic oligonucleotide
cagcaaggtgaactatctagggtcaagcgg

SEQ ID NO: 37163 - DNA, 30 bp, Artificial Sequence
  Synthetic oligonucleotide
ggtgcgacaaatcgccgaaatcaacagcgg

SEQ ID NO: 37164 - DNA, 30 bp, Artificial Sequence
  Synthetic oligonucleotide
aatcgaagtgccacttggtaaaatgagcgg

SEQ ID NO: 37165 - DNA, 30 bp, Artificial Sequence
  Synthetic oligonucleotide
cctgcaaaattaagcgctatgactgagcgg

SEQ ID NO: 37166 - DNA, 30 bp, Artificial Sequence
  Synthetic oligonucleotide
tgcgtaaaccacagcatgacacccccgcgg

SEQ ID NO: 37167 - DNA, 30 bp, Artificial Sequence
  Synthetic oligonucleotide
caacataggcacgaagatagatgcccgcgg

SEQ ID NO: 37168 - DNA, 30 bp, Artificial Sequence
  Synthetic oligonucleotide
tgtgtaaggaataaggtgcgaaacgcgcgg

SEQ ID NO: 37169 - DNA, 30 bp, Artificial Sequence
  Synthetic oligonucleotide
ttccagccacgaacgagaggacaggcgcgg

SEQ ID NO: 37170 - DNA, 30 bp, Artificial Sequence
  Synthetic oligonucleotide
acagggtaacaggattcgatgcgctcgcgg

SEQ ID NO: 37171 - DNA, 30 bp, Artificial Sequence
  Synthetic oligonucleotide
tgcacggatgccaacacgatcccacggcgg

SEQ ID NO: 37172 - DNA, 30 bp, Artificial Sequence
  Synthetic oligonucleotide
gccgaagaaggttcgagaggacgtgggcgg

SEQ ID NO: 37173 - DNA, 30 bp, Artificial Sequence
  Synthetic oligonucleotide
tataaggtcgcgagaagtgtgcgaatgcgg

SEQ ID NO: 37174 - DNA, 30 bp, Artificial Sequence
  Synthetic oligonucleotide
tctaatctcataaggaaattaaagatgcgg

SEQ ID NO: 37175 - DNA, 30 bp, Artificial Sequence
  Synthetic oligonucleotide
tatcgacctggcataaacaataccgtgcgg

SEQ ID NO: 37176 - DNA, 30 bp, Artificial Sequence
  Synthetic oligonucleotide
gtggggatgtgaactcagtaagtcaatcgg

SEQ ID NO: 37177 - DNA, 30 bp, Artificial Sequence
  Synthetic oligonucleotide
cgggtaactaaattagtatcggtgaatcgg

SEQ ID NO: 37178 - DNA, 30 bp, Artificial Sequence
  Synthetic oligonucleotide
aaggggcaaccgacagcggccatacatcgg

SEQ ID NO: 37179 - DNA, 30 bp, Artificial Sequence
  Synthetic oligonucleotide
ggaacagcgcacacgtaaggaggcactcgg

SEQ ID NO: 37180 - DNA, 30 bp, Artificial Sequence
  Synthetic oligonucleotide
tgccatgatgtcacgagaaagctcactcgg

SEQ ID NO: 37181 - DNA, 30 bp, Artificial Sequence
  Synthetic oligonucleotide
accattgcttacaaagtgctagatagtcgg

SEQ ID NO: 37182 - DNA, 30 bp, Artificial Sequence
  Synthetic oligonucleotide
acacgttgttgcaatggtctcgttcgtcgg

SEQ ID NO: 37183 - DNA, 30 bp, Artificial Sequence
  Synthetic oligonucleotide
agaagtggaagatgacggcaaatatgtcgg

SEQ ID NO: 37184 - DNA, 30 bp, Artificial Sequence
  Synthetic oligonucleotide
agccgatgaaatgatctcggtagctgtcgg

SEQ ID NO: 37185 - DNA, 30 bp, Artificial Sequence
  Synthetic oligonucleotide
acgttaagaactatgtaaggtgtgcttcgg

SEQ ID NO: 37186 - DNA, 30 bp, Artificial Sequence
  Synthetic oligonucleotide
gtcagcgaagtagaaaggagcagcgttcgg

SEQ ID NO: 37187 - DNA, 30 bp, Artificial Sequence
  Synthetic oligonucleotide
caggcaagctcatattacatccggtttcgg

SEQ ID NO: 37188 - DNA, 30 bp, Artificial Sequence
  Synthetic oligonucleotide
acttcactaaaataaggtcgtcttaaaggg

SEQ ID NO: 37189 - DNA, 30 bp, Artificial Sequence
  Synthetic oligonucleotide
aatagccgcacgttgcgtagggaggaaggg

SEQ ID NO: 37190 - DNA, 30 bp, Artificial Sequence
  Synthetic oligonucleotide
atggcttggattggactaagctacacaggg

SEQ ID NO: 37191 - DNA, 30 bp, Artificial Sequence
  Synthetic oligonucleotide
caaataagcctcaaaaacagccgaccaggg

SEQ ID NO: 37192 - DNA, 30 bp, Artificial Sequence
  Synthetic oligonucleotide
cgtcgagcgatcagggatacatttgcaggg

SEQ ID NO: 37193 - DNA, 30 bp, Artificial Sequence
  Synthetic oligonucleotide
cagccgggcattgacaacaagtcgtcaggg

SEQ ID NO: 37194 - DNA, 30 bp, Artificial Sequence
  Synthetic oligonucleotide
tagggtacgtggcgacagaatgcttcaggg

SEQ ID NO: 37195 - DNA, 30 bp, Artificial Sequence
  Synthetic oligonucleotide
acactcagtggaaatccggatcgtagaggg

SEQ ID NO: 37196 - DNA, 30 bp, Artificial Sequence
  Synthetic oligonucleotide
tcggttattcgacagcggaaattacgaggg

SEQ ID NO: 37197 - DNA, 30 bp, Artificial Sequence
  Synthetic oligonucleotide
ttagagtaatggcaaaattacattcgaggg

SEQ ID NO: 37198 - DNA, 30 bp, Artificial Sequence
  Synthetic oligonucleotide
tcatacgtgctcagcagtaaaaaaggaggg

SEQ ID NO: 37199 - DNA, 30 bp, Artificial Sequence
  Synthetic oligonucleotide
tcgcgaatgaagggccatgaaataataggg

SEQ ID NO: 37200 - DNA, 30 bp, Artificial Sequence
  Synthetic oligonucleotide
ggcatgcacagaatagagtcgctaataggg

SEQ ID NO: 37201 - DNA, 30 bp, Artificial Sequence
  Synthetic oligonucleotide
aggaattatccctatagaaatgtcaacggg

SEQ ID NO: 37202 - DNA, 30 bp, Artificial Sequence
  Synthetic oligonucleotide
cactaacaatcgaaagaaggcactaacggg

SEQ ID NO: 37203 - DNA, 30 bp, Artificial Sequence
  Synthetic oligonucleotide
ggcaaaaacacggcggaattatgagacggg

SEQ ID NO: 37204 - DNA, 30 bp, Artificial Sequence
  Synthetic oligonucleotide
gcgtaactaggtagcatgaataaggacggg

SEQ ID NO: 37205 - DNA, 30 bp, Artificial Sequence
  Synthetic oligonucleotide
ccaggcaaagccatcaactggcgctacggg

SEQ ID NO: 37206 - DNA, 30 bp, Artificial Sequence
  Synthetic oligonucleotide
cggggacatataaacaggacttctaccggg

SEQ ID NO: 37207 - DNA, 30 bp, Artificial Sequence
  Synthetic oligonucleotide
cacgcaactgataaagcattccagtccggg

SEQ ID NO: 37208 - DNA, 30 bp, Artificial Sequence
  Synthetic oligonucleotide
ttagcgggtgcgaagaggattcatagcggg

SEQ ID NO: 37209 - DNA, 30 bp, Artificial Sequence
  Synthetic oligonucleotide
acgcatgcgtcgggaccataagctagcggg

SEQ ID NO: 37210 - DNA, 30 bp, Artificial Sequence
  Synthetic oligonucleotide
gcgaacaaggacagccacgcattacgcggg

SEQ ID NO: 37211 - DNA, 30 bp, Artificial Sequence
  Synthetic oligonucleotide
cagtgcccgaaagccaaggggaagtgcggg

SEQ ID NO: 37212 - DNA, 30 bp, Artificial Sequence
  Synthetic oligonucleotide
taagcggttgtagctatgccagagatcggg

SEQ ID NO: 37213 - DNA, 30 bp, Artificial Sequence
  Synthetic oligonucleotide
cggatgccgaggggacaaaacaataagggg

SEQ ID NO: 37214 - DNA, 30 bp, Artificial Sequence
  Synthetic oligonucleotide
tgggtgtcaaacataatcgtccataagggg

SEQ ID NO: 37215 - DNA, 30 bp, Artificial Sequence
  Synthetic oligonucleotide
tagcatataggcgttgtatagcatcagggg

SEQ ID NO: 37216 - DNA, 30 bp, Artificial Sequence
  Synthetic oligonucleotide
ctgaagaccaagtgtagaaaagactagggg

SEQ ID NO: 37217 - DNA, 30 bp, Artificial Sequence
  Synthetic oligonucleotide
ccggggaatgacctatgaaaaagcaggggg

SEQ ID NO: 37218 - DNA, 31 bp, Artificial Sequence
  Synthetic oligonucleotide
ggcagagctgcgtgaccgtaccgtcaggggg

SEQ ID NO: 37219 - DNA, 30 bp, Artificial Sequence
  Synthetic oligonucleotide
ctagccgtactggctgagacagttaggggg

SEQ ID NO: 37220 - DNA, 30 bp, Artificial Sequence
  Synthetic oligonucleotide
tagggcgaacgtacctcattgcgacggggg

SEQ ID NO: 37221 - DNA, 30 bp, Artificial Sequence
  Synthetic oligonucleotide
acgttcgcgaatgaaatagctagggtgggg

SEQ ID NO: 37222 - DNA, 30 bp, Artificial Sequence
  Synthetic oligonucleotide
accgcgaagacataggtgactgacttgggg

SEQ ID NO: 37223 - DNA, 30 bp, Artificial Sequence
  Synthetic oligonucleotide
taacgagcaaaaagctccctgcctaatggg

SEQ ID NO: 37224 - DNA, 30 bp, Artificial Sequence
  Synthetic oligonucleotide
caacacatcaaataaatgattagcgatggg

SEQ ID NO: 37225 - DNA, 30 bp, Artificial Sequence
  Synthetic oligonucleotide
gctaatacggcaaccgaagtaggacgtggg

SEQ ID NO: 37226 - DNA, 31 bp, Artificial Sequence
  Synthetic oligonucleotide
gctagaggacccatgggattataagcgtggg

SEQ ID NO: 37227 - DNA, 30 bp, Artificial Sequence
  Synthetic oligonucleotide
ggacttctcactcataatgccaggcgtggg

SEQ ID NO: 37228 - DNA, 30 bp, Artificial Sequence
  Synthetic oligonucleotide
ggcgaagcctagaggtagaagaagtgtggg

SEQ ID NO: 37229 - DNA, 30 bp, Artificial Sequence
  Synthetic oligonucleotide
tcaatgacataacatgcctattcttgtggg

SEQ ID NO: 37230 - DNA, 30 bp, Artificial Sequence
  Synthetic oligonucleotide
ccgtaaccaccgtggagcagtagaattggg

SEQ ID NO: 37231 - DNA, 30 bp, Artificial Sequence
  Synthetic oligonucleotide
atcaagggcatcgcttaagaatcgcttggg

SEQ ID NO: 37232 - DNA, 30 bp, Artificial Sequence
  Synthetic oligonucleotide
tcaataccctatggggaagaactgcttggg

SEQ ID NO: 37233 - DNA, 30 bp, Artificial Sequence
  Synthetic oligonucleotide
ccgttccgaacgaagaattaacaggttggg

SEQ ID NO: 37234 - DNA, 30 bp, Artificial Sequence
  Synthetic oligonucleotide
acgagttagatggaccactcctcgtttggg

SEQ ID NO: 37235 - DNA, 30 bp, Artificial Sequence
  Synthetic oligonucleotide
atgttagggcggcaaaactctcgacaatgg

SEQ ID NO: 37236 - DNA, 30 bp, Artificial Sequence
  Synthetic oligonucleotide
aagaattacaggaatctgatacatcaatgg

SEQ ID NO: 37237 - DNA, 30 bp, Artificial Sequence
  Synthetic oligonucleotide
cgaagacacctggccccgtctactcaatgg

SEQ ID NO: 37238 - DNA, 30 bp, Artificial Sequence
  Synthetic oligonucleotide
acgaaagaacctcaaaagaaaaggacatgg

SEQ ID NO: 37239 - DNA, 30 bp, Artificial Sequence
  Synthetic oligonucleotide
ttgagccatagaggagagcttcagccatgg

SEQ ID NO: 37240 - DNA, 30 bp, Artificial Sequence
  Synthetic oligonucleotide
accgaggtccgccaaatccaggatccatgg

SEQ ID NO: 37241 - DNA, 30 bp, Artificial Sequence
  Synthetic oligonucleotide
atggagaccggtagtgcgacataatcatgg

SEQ ID NO: 37242 - DNA, 31 bp, Artificial Sequence
  Synthetic oligonucleotide
agtgctatataactaagcgcaatactcatgg

SEQ ID NO: 37243 - DNA, 30 bp, Artificial Sequence
  Synthetic oligonucleotide
acgaggctacatggactgtcgatctcatgg

SEQ ID NO: 37244 - DNA, 30 bp, Artificial Sequence
  Synthetic oligonucleotide
ccaggcggtcgctgccaggcaatcagatgg

SEQ ID NO: 37245 - DNA, 30 bp, Artificial Sequence
  Synthetic oligonucleotide
agcgattgtaaggacgctgacgacggatgg

SEQ ID NO: 37246 - DNA, 30 bp, Artificial Sequence
  Synthetic oligonucleotide
tgggttactggttctacagacgagggatgg

SEQ ID NO: 37247 - DNA, 30 bp, Artificial Sequence
  Synthetic oligonucleotide
agggagtaatactgccggcgagttggatgg

SEQ ID NO: 37248 - DNA, 30 bp, Artificial Sequence
  Synthetic oligonucleotide
ggttgggccaaaaacacactgatatgatgg

SEQ ID NO: 37249 - DNA, 30 bp, Artificial Sequence
  Synthetic oligonucleotide
cgagatgtgcataacggtacgagagtatgg

SEQ ID NO: 37250 - DNA, 30 bp, Artificial Sequence
  Synthetic oligonucleotide
agatactagaaagggctactatgagtatgg

SEQ ID NO: 37251 - DNA, 30 bp, Artificial Sequence
  Synthetic oligonucleotide
agtacgaggtagtctgcgtgacacgtatgg

SEQ ID NO: 37252 - DNA, 30 bp, Artificial Sequence
  Synthetic oligonucleotide
gagaaagttaactattccggggcaaactgg

SEQ ID NO: 37253 - DNA, 30 bp, Artificial Sequence
  Synthetic oligonucleotide
caggcaaggttcgcattttccatgaactgg

SEQ ID NO: 37254 - DNA, 30 bp, Artificial Sequence
  Synthetic oligonucleotide
cataccagagagcgaaatcgacgagcctgg

SEQ ID NO: 37255 - DNA, 30 bp, Artificial Sequence
  Synthetic oligonucleotide
cggactcgagtgagtttggaagatacgtgg

SEQ ID NO: 37256 - DNA, 30 bp, Artificial Sequence
  Synthetic oligonucleotide
tctgcaaggcgaaatgggtctgatcggtgg

SEQ ID NO: 37257 - DNA, 30 bp, Artificial Sequence
  Synthetic oligonucleotide
tcatttcaagtacaagccaacggagggtgg

SEQ ID NO: 37258 - DNA, 34 bp, Artificial Sequence
  Synthetic oligonucleotide
aactacctaagtaacagcagtaggcgggtggtgg

SEQ ID NO: 37259 - DNA, 30 bp, Artificial Sequence
  Synthetic oligonucleotide
tgaacatctgcaagccaaggtggttggtgg

SEQ ID NO: 37260 - DNA, 30 bp, Artificial Sequence
  Synthetic oligonucleotide
aacggacggaccagattactgtaaatgtgg

SEQ ID NO: 37261 - DNA, 30 bp, Artificial Sequence
  Synthetic oligonucleotide
cgttccaatcgtaactagtggaggatgtgg

SEQ ID NO: 37262 - DNA, 30 bp, Artificial Sequence
  Synthetic oligonucleotide
catgggcgagcaggatgactgctcctgtgg

SEQ ID NO: 37263 - DNA, 30 bp, Artificial Sequence
  Synthetic oligonucleotide
ggtaagcaatgagcaacataccttctgtgg

SEQ ID NO: 37264 - DNA, 30 bp, Artificial Sequence
  Synthetic oligonucleotide
cttggaacactataaaaggaaatgaattgg

SEQ ID NO: 37265 - DNA, 30 bp, Artificial Sequence
  Synthetic oligonucleotide
catcaggctatagttaaagaactgcattgg

SEQ ID NO: 37266 - DNA, 30 bp, Artificial Sequence
  Synthetic oligonucleotide
cataaagtgcagagaataagtcaagattgg

SEQ ID NO: 37267 - DNA, 30 bp, Artificial Sequence
  Synthetic oligonucleotide
tcggtaaaacggctatgagcgaacccttgg

SEQ ID NO: 37268 - DNA, 30 bp, Artificial Sequence
  Synthetic oligonucleotide
gatcatcggtgaactccgagacaagcttgg

SEQ ID NO: 37269 - DNA, 30 bp, Artificial Sequence
  Synthetic oligonucleotide
tcaaggtcgcccgataagcaagagagttgg

SEQ ID NO: 37270 - DNA, 30 bp, Artificial Sequence
  Synthetic oligonucleotide
acgagtatgaatatacgttccaaaggttgg

SEQ ID NO: 37271 - DNA, 30 bp, Artificial Sequence
  Synthetic oligonucleotide
ggggggagatcgtgtcagaatcttatttgg

SEQ ID NO: 37272 - DNA, 30 bp, Artificial Sequence
  Synthetic oligonucleotide
cgcgtggtagatcggatgctatcattttgg

SEQ ID NO: 37273 - DNA, 30 bp, Artificial Sequence
  Synthetic oligonucleotide
gatactgggagagcaggtaacgtcaaaatg

SEQ ID NO: 37274 - DNA, 30 bp, Artificial Sequence
  Synthetic oligonucleotide
gtcaatgggccgacgatagttgcagaaatg

SEQ ID NO: 37275 - DNA, 30 bp, Artificial Sequence
  Synthetic oligonucleotide
aggacgttgggattaatcggatgagaaatg

SEQ ID NO: 37276 - DNA, 30 bp, Artificial Sequence
  Synthetic oligonucleotide
gcggggtaggaccttcagaattcggaaatg

SEQ ID NO: 37277 - DNA, 30 bp, Artificial Sequence
  Synthetic oligonucleotide
tcacattccaataacccgaccctagcaatg

SEQ ID NO: 37278 - DNA, 30 bp, Artificial Sequence
  Synthetic oligonucleotide
tagatgataccgagctaagtccgctcaatg

SEQ ID NO: 37279 - DNA, 30 bp, Artificial Sequence
  Synthetic oligonucleotide
acaagcagtagcaacacgtggagaagaatg

SEQ ID NO: 37280 - DNA, 30 bp, Artificial Sequence
  Synthetic oligonucleotide
agggacagaggactaggacatctaagaatg

SEQ ID NO: 37281 - DNA, 30 bp, Artificial Sequence
  Synthetic oligonucleotide
tctatatggcgtaaggtaagggaacgaatg

SEQ ID NO: 37282 - DNA, 29 bp, Artificial Sequence
  Synthetic oligonucleotide
acactgaaagcaccaagggcggcataatg

SEQ ID NO: 37283 - DNA, 30 bp, Artificial Sequence
  Synthetic oligonucleotide
ttaaggcttcagcgatccctaaagctaatg

SEQ ID NO: 37284 - DNA, 30 bp, Artificial Sequence
  Synthetic oligonucleotide
tgcactgaagaacgggcagaaaggctaatg

SEQ ID NO: 37285 - DNA, 30 bp, Artificial Sequence
  Synthetic oligonucleotide
gccaagtcaggccttgggaggaggttaatg

SEQ ID NO: 37286 - DNA, 30 bp, Artificial Sequence
  Synthetic oligonucleotide
cgcaccataaaaggcagaactgtgaacatg

SEQ ID NO: 37287 - DNA, 30 bp, Artificial Sequence
  Synthetic oligonucleotide
cggatggatttaagggatacacaacacatg

SEQ ID NO: 37288 - DNA, 30 bp, Artificial Sequence
  Synthetic oligonucleotide
aagggaggtgccaccgtggacagacacatg

SEQ ID NO: 37289 - DNA, 30 bp, Artificial Sequence
  Synthetic oligonucleotide
tgtggaaagcgcctatacgaataggacatg

SEQ ID NO: 37290 - DNA, 30 bp, Artificial Sequence
  Synthetic oligonucleotide
accaacgaaactgctcgccatacggacatg

SEQ ID NO: 37291 - DNA, 30 bp, Artificial Sequence
  Synthetic oligonucleotide
ccgtaagagagaggtaaatccctatacatg

SEQ ID NO: 37292 - DNA, 30 bp, Artificial Sequence
  Synthetic oligonucleotide
gcctgtagataagagagagttcaggccatg

SEQ ID NO: 37293 - DNA, 30 bp, Artificial Sequence
  Synthetic oligonucleotide
tgcgccaagtcgcgatacgccgagtccatg

SEQ ID NO: 37294 - DNA, 30 bp, Artificial Sequence
  Synthetic oligonucleotide
aagggatgggcctaaaggctaagttgcatg

SEQ ID NO: 37295 - DNA, 30 bp, Artificial Sequence
  Synthetic oligonucleotide
acatggggggtccaatactcgttaatcatg

SEQ ID NO: 37296 - DNA, 30 bp, Artificial Sequence
  Synthetic oligonucleotide
aggtgggttggtgtgccctcggggatcatg

SEQ ID NO: 37297 - DNA, 30 bp, Artificial Sequence
  Synthetic oligonucleotide
cgctcagttcgaccttacagtgatctcatg

SEQ ID NO: 37298 - DNA, 30 bp, Artificial Sequence
  Synthetic oligonucleotide
tatggagagaacaaccctagagtagtcatg

SEQ ID NO: 37299 - DNA, 30 bp, Artificial Sequence
  Synthetic oligonucleotide
gctcgtctaaaatccaaggctatcttcatg

SEQ ID NO: 37300 - DNA, 30 bp, Artificial Sequence
  Synthetic oligonucleotide
atgagtgtgagctgagtcgtacggaagatg

SEQ ID NO: 37301 - DNA, 30 bp, Artificial Sequence
  Synthetic oligonucleotide
caagaccagcgttcgccaccaaccgagatg

SEQ ID NO: 37302 - DNA, 30 bp, Artificial Sequence
  Synthetic oligonucleotide
tgcgggtgagtgccgttaagtgcatagatg

SEQ ID NO: 37303 - DNA, 30 bp, Artificial Sequence
  Synthetic oligonucleotide
aaagtggagcgatggctaccagggacgatg

SEQ ID NO: 37304 - DNA, 30 bp, Artificial Sequence
  Synthetic oligonucleotide
gtacggcacgatagggcaagaatatcgatg

SEQ ID NO: 37305 - DNA, 30 bp, Artificial Sequence
  Synthetic oligonucleotide
tcatggggacacgtaatggatttatcgatg

SEQ ID NO: 37306 - DNA, 30 bp, Artificial Sequence
  Synthetic oligonucleotide
atgtgacatgcaatgaaagtagatcggatg

SEQ ID NO: 37307 - DNA, 30 bp, Artificial Sequence
  Synthetic oligonucleotide
agcccctcgaatggcctcctgtattggatg

SEQ ID NO: 37308 - DNA, 30 bp, Artificial Sequence
  Synthetic oligonucleotide
cgcaagaagctcgtctatgaacctctgatg

SEQ ID NO: 37309 - DNA, 30 bp, Artificial Sequence
  Synthetic oligonucleotide
ctgagaattgggggagatgtggctgtgatg

SEQ ID NO: 37310 - DNA, 30 bp, Artificial Sequence
  Synthetic oligonucleotide
gcgtaatcttgggaatgaggatcaaatatg

SEQ ID NO: 37311 - DNA, 30 bp, Artificial Sequence
  Synthetic oligonucleotide
cgtggctagagcgttgtcctcgggaatatg

SEQ ID NO: 37312 - DNA, 30 bp, Artificial Sequence
  Synthetic oligonucleotide
atccaagagggggcatacctttgacatatg

SEQ ID NO: 37313 - DNA, 30 bp, Artificial Sequence
  Synthetic oligonucleotide
agtcttgaacaagcggaattcagcgatatg

SEQ ID NO: 37314 - DNA, 30 bp, Artificial Sequence
  Synthetic oligonucleotide
tctgagcaccaagcggacttcattactatg

SEQ ID NO: 37315 - DNA, 30 bp, Artificial Sequence
  Synthetic oligonucleotide
cagggggctgctgggaactaacgacctatg

SEQ ID NO: 37316 - DNA, 30 bp, Artificial Sequence
  Synthetic oligonucleotide
aactacaaggttagaggagaaaggtctatg

SEQ ID NO: 37317 - DNA, 30 bp, Artificial Sequence
  Synthetic oligonucleotide
aagacatacgcacgtagagggaagagtatg

SEQ ID NO: 37318 - DNA, 30 bp, Artificial Sequence
  Synthetic oligonucleotide
ctcgaaaaagtcggattgcccagaggtatg

SEQ ID NO: 37319 - DNA, 30 bp, Artificial Sequence
  Synthetic oligonucleotide
gtcggaaggtccggttaaaatgccaaactg

SEQ ID NO: 37320 - DNA, 30 bp, Artificial Sequence
  Synthetic oligonucleotide
caatggttgtgcgaaagatgaatcgaactg

SEQ ID NO: 37321 - DNA, 30 bp, Artificial Sequence
  Synthetic oligonucleotide
gttgagaagcaacgcacgaataactaactg

SEQ ID NO: 37322 - DNA, 30 bp, Artificial Sequence
  Synthetic oligonucleotide
ggcgtaaggcgatggtacgctaattcactg

SEQ ID NO: 37323 - DNA, 30 bp, Artificial Sequence
  Synthetic oligonucleotide
gacgatcggaaaataacctggggacgactg

SEQ ID NO: 37324 - DNA, 30 bp, Artificial Sequence
  Synthetic oligonucleotide
gcgagtgagcttgacgtaagcttcggactg

SEQ ID NO: 37325 - DNA, 30 bp, Artificial Sequence
  Synthetic oligonucleotide
ttggaggtcggcgagcgagctatgggactg

SEQ ID NO: 37326 - DNA, 30 bp, Artificial Sequence
  Synthetic oligonucleotide
cgctatcaaagtacctgtgcgagaatactg

SEQ ID NO: 37327 - DNA, 30 bp, Artificial Sequence
  Synthetic oligonucleotide
cgcaatcggactcaaccgatcagtaacctg

SEQ ID NO: 37328 - DNA, 30 bp, Artificial Sequence
  Synthetic oligonucleotide
aggtggccaggcctgcataagccgaccctg

SEQ ID NO: 37329 - DNA, 30 bp, Artificial Sequence
  Synthetic oligonucleotide
cgtaaacatgatcccggcactcatcccctg

SEQ ID NO: 37330 - DNA, 30 bp, Artificial Sequence
  Synthetic oligonucleotide
tgtcagagtacagacagataggagtccctg

SEQ ID NO: 37331 - DNA, 30 bp, Artificial Sequence
  Synthetic oligonucleotide
aagatagcgagacatgatctatggatcctg

SEQ ID NO: 37332 - DNA, 30 bp, Artificial Sequence
  Synthetic oligonucleotide
cgtcagagcatgagtggcgattatgtcctg

SEQ ID NO: 37333 - DNA, 30 bp, Artificial Sequence
  Synthetic oligonucleotide
acgaccccaccacgagaggaaaaaaagctg

SEQ ID NO: 37334 - DNA, 30 bp, Artificial Sequence
  Synthetic oligonucleotide
gcagtagagattacatcagggaagaagctg

SEQ ID NO: 37335 - DNA, 30 bp, Artificial Sequence
  Synthetic oligonucleotide
agatggtggcgattgtcggtacgagagctg

SEQ ID NO: 37336 - DNA, 30 bp, Artificial Sequence
  Synthetic oligonucleotide
gtcatcgagcaaggatcaagattagagctg

SEQ ID NO: 37337 - DNA, 30 bp, Artificial Sequence
  Synthetic oligonucleotide
ccaagtcggttacgaaggtggaaagcgctg

SEQ ID NO: 37338 - DNA, 30 bp, Artificial Sequence
  Synthetic oligonucleotide
tgaagttgaataccgctcgagcagtggctg

SEQ ID NO: 37339 - DNA, 30 bp, Artificial Sequence
  Synthetic oligonucleotide
cccttcgataaaggctaatacggcatgctg

SEQ ID NO: 37340 - DNA, 30 bp, Artificial Sequence
  Synthetic oligonucleotide
aacggcatcaacttggcattagtcgtgctg

SEQ ID NO: 37341 - DNA, 30 bp, Artificial Sequence
  Synthetic oligonucleotide
aagatccggcagagtgttggttcggtgctg

SEQ ID NO: 37342 - DNA, 30 bp, Artificial Sequence
  Synthetic oligonucleotide
ccacgcgtcagagggcactagaaagatctg

SEQ ID NO: 37343 - DNA, 30 bp, Artificial Sequence
  Synthetic oligonucleotide
acaccgttcgggcagaacggcataactctg

SEQ ID NO: 37344 - DNA, 30 bp, Artificial Sequence
  Synthetic oligonucleotide
ctgaagtgcgaaggggcgtcgtgtcctctg

SEQ ID NO: 37345 - DNA, 30 bp, Artificial Sequence
  Synthetic oligonucleotide
tcacgttagcaagaacatgacatggctctg

SEQ ID NO: 37346 - DNA, 30 bp, Artificial Sequence
  Synthetic oligonucleotide
gaagggtacttcatgaacaaatcaagtctg

SEQ ID NO: 37347 - DNA, 30 bp, Artificial Sequence
  Synthetic oligonucleotide
cgacgcgagagagccgttaagtccagtctg

SEQ ID NO: 37348 - DNA, 30 bp, Artificial Sequence
  Synthetic oligonucleotide
cgtggacagcctaatcttcccggtggtctg

SEQ ID NO: 37349 - DNA, 30 bp, Artificial Sequence
  Synthetic oligonucleotide
caacgacgagtggtgccactttcccttctg

SEQ ID NO: 37350 - DNA, 30 bp, Artificial Sequence
  Synthetic oligonucleotide
tggaaatgtatcaggtcgtgaaaggttctg

SEQ ID NO: 37351 - DNA, 30 bp, Artificial Sequence
  Synthetic oligonucleotide
ggtgaagtcaacggctaaaggcggaaagtg

SEQ ID NO: 37352 - DNA, 30 bp, Artificial Sequence
  Synthetic oligonucleotide
ggataagtgcgccgacttgataataaagtg

SEQ ID NO: 37353 - DNA, 30 bp, Artificial Sequence
  Synthetic oligonucleotide
acggtgggactggaaacgcatcatgaagtg

SEQ ID NO: 37354 - DNA, 30 bp, Artificial Sequence
  Synthetic oligonucleotide
aattgcaagcttcccaggcgacgaccagtg

SEQ ID NO: 37355 - DNA, 30 bp, Artificial Sequence
  Synthetic oligonucleotide
agcaactacccgtaaaaatagccgccagtg

SEQ ID NO: 37356 - DNA, 30 bp, Artificial Sequence
  Synthetic oligonucleotide
gttccgtatcgaactgaataccatccagtg

SEQ ID NO: 37357 - DNA, 30 bp, Artificial Sequence
  Synthetic oligonucleotide
gcgatgatagaccggaggcaaggttcagtg

SEQ ID NO: 37358 - DNA, 30 bp, Artificial Sequence
  Synthetic oligonucleotide
tgcaatcatctgatcgcgtgtccgagagtg

SEQ ID NO: 37359 - DNA, 30 bp, Artificial Sequence
  Synthetic oligonucleotide
gtgcattcaacgattgcgtagggtagagtg

SEQ ID NO: 37360 - DNA, 30 bp, Artificial Sequence
  Synthetic oligonucleotide
cgtcatcgtgtgagctaactcaaacgagtg

SEQ ID NO: 37361 - DNA, 30 bp, Artificial Sequence
  Synthetic oligonucleotide
cccaagagagggagtacggaaaggcgagtg

SEQ ID NO: 37362 - DNA, 30 bp, Artificial Sequence
  Synthetic oligonucleotide
cggcaggaagggatcgaacacggtggagtg

SEQ ID NO: 37363 - DNA, 30 bp, Artificial Sequence
  Synthetic oligonucleotide
ggtgagggcaatatgatttgacgatgagtg

SEQ ID NO: 37364 - DNA, 30 bp, Artificial Sequence
  Synthetic oligonucleotide
gctatcatgcagagtgtgttcggatgagtg

SEQ ID NO: 37365 - DNA, 30 bp, Artificial Sequence
  Synthetic oligonucleotide
aacggtgcaagctatgacctcggctgagtg

SEQ ID NO: 37366 - DNA, 30 bp, Artificial Sequence
  Synthetic oligonucleotide
cgtaataagaattatctacaagcaatagtg

SEQ ID NO: 37367 - DNA, 30 bp, Artificial Sequence
  Synthetic oligonucleotide
catcggacgacgtgccgaacttagctagtg

SEQ ID NO: 37368 - DNA, 30 bp, Artificial Sequence
  Synthetic oligonucleotide
tagagtccagggtgaagtacagtggtagtg

SEQ ID NO: 37369 - DNA, 30 bp, Artificial Sequence
  Synthetic oligonucleotide
ggtcaagaacaacttgtgaggcctgtagtg

SEQ ID NO: 37370 - DNA, 31 bp, Artificial Sequence
  Synthetic oligonucleotide
cgacgatgtaaatatggaatgctaagccgtg

SEQ ID NO: 37371 - DNA, 30 bp, Artificial Sequence
  Synthetic oligonucleotide
tgcgagaggagggcagggggcaccgccgtg

SEQ ID NO: 37372 - DNA, 30 bp, Artificial Sequence
  Synthetic oligonucleotide
gacatgaggatctaacagagacagagcgtg

SEQ ID NO: 37373 - DNA, 30 bp, Artificial Sequence
  Synthetic oligonucleotide
cagcaagcgggtcggatatgatttggcgtg

SEQ ID NO: 37374 - DNA, 30 bp, Artificial Sequence
  Synthetic oligonucleotide
ccgtccggggtaccaggtagtagctgcgtg

SEQ ID NO: 37375 - DNA, 30 bp, Artificial Sequence
  Synthetic oligonucleotide
gctgaaggctagcgttgttgaatcctcgtg

SEQ ID NO: 37376 - DNA, 30 bp, Artificial Sequence
  Synthetic oligonucleotide
atatacacaaattgaggacggactgtcgtg

SEQ ID NO: 37377 - DNA, 30 bp, Artificial Sequence
  Synthetic oligonucleotide
atgggtccaaagcattcagcctgcaaggtg

SEQ ID NO: 37378 - DNA, 30 bp, Artificial Sequence
  Synthetic oligonucleotide
atcagaaagcagctttaaatcgagaaggtg

SEQ ID NO: 37379 - DNA, 29 bp, Artificial Sequence
  Synthetic oligonucleotide
tggtacggatggattgaattcgcgaggtg

SEQ ID NO: 37380 - DNA, 30 bp, Artificial Sequence
  Synthetic oligonucleotide
gtacagataaatccacgcggtggcgaggtg

SEQ ID NO: 37381 - DNA, 30 bp, Artificial Sequence
  Synthetic oligonucleotide
tacgagctaatgtaaaataaatgaccggtg

SEQ ID NO: 37382 - DNA, 30 bp, Artificial Sequence
  Synthetic oligonucleotide
gcagggtgagaactacagataatcccggtg

SEQ ID NO: 37383 - DNA, 30 bp, Artificial Sequence
  Synthetic oligonucleotide
atatcgacgaaatggtgggcgtaaagggtg

SEQ ID NO: 37384 - DNA, 30 bp, Artificial Sequence
  Synthetic oligonucleotide
taagggggaaaagcctgcagtgtgagggtg

SEQ ID NO: 37385 - DNA, 30 bp, Artificial Sequence
  Synthetic oligonucleotide
ggggccgaaagatgattatggtctagggtg

SEQ ID NO: 37386 - DNA, 30 bp, Artificial Sequence
  Synthetic oligonucleotide
aataacatccgagttcacaaccaacgggtg

SEQ ID NO: 37387 - DNA, 30 bp, Artificial Sequence
  Synthetic oligonucleotide
gtagtgcaagaggtgatggcgataggggtg

SEQ ID NO: 37388 - DNA, 30 bp, Artificial Sequence
  Synthetic oligonucleotide
aaccgaacacagactggagtattatgggtg

SEQ ID NO: 37389 - DNA, 30 bp, Artificial Sequence
  Synthetic oligonucleotide
gcgaaacatgctcaattgtacagtaatgtg

SEQ ID NO: 37390 - DNA, 30 bp, Artificial Sequence
  Synthetic oligonucleotide
cccaggtgaagcgcatccggtgtagatgtg

SEQ ID NO: 37391 - DNA, 30 bp, Artificial Sequence
  Synthetic oligonucleotide
cctagccgggaccagtatgatgaatatgtg

SEQ ID NO: 37392 - DNA, 30 bp, Artificial Sequence
  Synthetic oligonucleotide
agcgtcaaacaactcacgtgagtatatgtg

SEQ ID NO: 37393 - DNA, 30 bp, Artificial Sequence
  Synthetic oligonucleotide
ccgattcatgcatgccaaaataggtatgtg

SEQ ID NO: 37394 - DNA, 30 bp, Artificial Sequence
  Synthetic oligonucleotide
tcggtccagggctatattacaccaactgtg

SEQ ID NO: 37395 - DNA, 30 bp, Artificial Sequence
  Synthetic oligonucleotide
atgacgaatactcccatctgagggactgtg

SEQ ID NO: 37396 - DNA, 30 bp, Artificial Sequence
  Synthetic oligonucleotide
agggcgttccgaatgcggtgtcggcctgtg

SEQ ID NO: 37397 - DNA, 30 bp, Artificial Sequence
  Synthetic oligonucleotide
gggatgagactactggggcccacagctgtg

SEQ ID NO: 37398 - DNA, 30 bp, Artificial Sequence
  Synthetic oligonucleotide
cccgtcatgccggaactaaataacagtgtg

SEQ ID NO: 37399 - DNA, 30 bp, Artificial Sequence
  Synthetic oligonucleotide
ggacatagggccatgagctaagaacgtgtg

SEQ ID NO: 37400 - DNA, 30 bp, Artificial Sequence
  Synthetic oligonucleotide
acggcaggcacgacagatggttgcggtgtg

SEQ ID NO: 37401 - DNA, 30 bp, Artificial Sequence
  Synthetic oligonucleotide
tacacgagtagcgggatcagcgtgattgtg

SEQ ID NO: 37402 - DNA, 30 bp, Artificial Sequence
  Synthetic oligonucleotide
tcagctaagagtgactccaatgaaaaattg

SEQ ID NO: 37403 - DNA, 30 bp, Artificial Sequence
  Synthetic oligonucleotide
caggagagtgcctcacgcttatggtaattg

SEQ ID NO: 37404 - DNA, 30 bp, Artificial Sequence
  Synthetic oligonucleotide
gtagaaccgggtcaaaggattcgaacattg

SEQ ID NO: 37405 - DNA, 30 bp, Artificial Sequence
  Synthetic oligonucleotide
tcaaacaagtcggaacttcatcgagcattg

SEQ ID NO: 37406 - DNA, 30 bp, Artificial Sequence
  Synthetic oligonucleotide
agctgcaaagagtgtgggaagcagagattg

SEQ ID NO: 37407 - DNA, 30 bp, Artificial Sequence
  Synthetic oligonucleotide
cggactaagtagaacacaagggagcgattg

SEQ ID NO: 37408 - DNA, 30 bp, Artificial Sequence
  Synthetic oligonucleotide
acggggcccacgacggcaaaggaatgattg

SEQ ID NO: 37409 - DNA, 30 bp, Artificial Sequence
  Synthetic oligonucleotide
tacacggaaagcaatcaagcctactgattg

SEQ ID NO: 37410 - DNA, 30 bp, Artificial Sequence
  Synthetic oligonucleotide
agaggtgtggggaggaaatcaagctgattg

SEQ ID NO: 37411 - DNA, 30 bp, Artificial Sequence
  Synthetic oligonucleotide
acgtcaaacttttggcaggggaagtgattg

SEQ ID NO: 37412 - DNA, 30 bp, Artificial Sequence
  Synthetic oligonucleotide
tctacgagcgggcagctggctggactattg

SEQ ID NO: 37413 - DNA, 30 bp, Artificial Sequence
  Synthetic oligonucleotide
agaccggaggtgaccgagcatggattattg

SEQ ID NO: 37414 - DNA, 30 bp, Artificial Sequence
  Synthetic oligonucleotide
ccgagaagaggttgacgaactggcttattg

SEQ ID NO: 37415 - DNA, 30 bp, Artificial Sequence
  Synthetic oligonucleotide
gacggacagtgtgatgaagatgagttattg

SEQ ID NO: 37416 - DNA, 30 bp, Artificial Sequence
  Synthetic oligonucleotide
acgacaaagtttagggtcctccatcacttg

SEQ ID NO: 37417 - DNA, 30 bp, Artificial Sequence
  Synthetic oligonucleotide
atcgtcaagtagctggatcatcaggacttg

SEQ ID NO: 37418 - DNA, 30 bp, Artificial Sequence
  Synthetic oligonucleotide
aacgaggttacatcgacgaatctgaccttg

SEQ ID NO: 37419 - DNA, 30 bp, Artificial Sequence
  Synthetic oligonucleotide
cgtaggagtcggccaacataacatcgcttg

SEQ ID NO: 37420 - DNA, 30 bp, Artificial Sequence
  Synthetic oligonucleotide
acattcccaggagcgccgactacgtgcttg

SEQ ID NO: 37421 - DNA, 30 bp, Artificial Sequence
  Synthetic oligonucleotide
gacgctgggcggaggagaatcgcaatcttg

SEQ ID NO: 37422 - DNA, 30 bp, Artificial Sequence
  Synthetic oligonucleotide
aactagacaagcgtatcgaaacggatcttg

SEQ ID NO: 37423 - DNA, 31 bp, Artificial Sequence
  Synthetic oligonucleotide
aaggaacgacgtataatcacgaatgaagttg

SEQ ID NO: 37424 - DNA, 30 bp, Artificial Sequence
  Synthetic oligonucleotide
aagggaatcgaaatttgcggttcacagttg

SEQ ID NO: 37425 - DNA, 30 bp, Artificial Sequence
  Synthetic oligonucleotide
tgatcaacggaatgacgcggggaagagttg

SEQ ID NO: 37426 - DNA, 30 bp, Artificial Sequence
  Synthetic oligonucleotide
ccaatggctggatagtacgaacacccgttg

SEQ ID NO: 37427 - DNA, 30 bp, Artificial Sequence
  Synthetic oligonucleotide
cgggcgggttaacacaatagacttaggttg

SEQ ID NO: 37428 - DNA, 30 bp, Artificial Sequence
  Synthetic oligonucleotide
tcacagtgcaatcacgggactaggatgttg

SEQ ID NO: 37429 - DNA, 30 bp, Artificial Sequence
  Synthetic oligonucleotide
tatggtggacagtcgcataagagggtgttg

SEQ ID NO: 37430 - DNA, 30 bp, Artificial Sequence
  Synthetic oligonucleotide
gcaggaattggctcgacgagggctgtgttg

SEQ ID NO: 37431 - DNA, 30 bp, Artificial Sequence
  Synthetic oligonucleotide
acacatcaagagtggggtgtacaggatttg

SEQ ID NO: 37432 - DNA, 30 bp, Artificial Sequence
  Synthetic oligonucleotide
cgcgtagggaggatgcgcatacgctatttg

SEQ ID NO: 37433 - DNA, 30 bp, Artificial Sequence
  Synthetic oligonucleotide
ggacactgagctcccatcgtgtaaactttg

SEQ ID NO: 37434 - DNA, 30 bp, Artificial Sequence
  Synthetic oligonucleotide
cgtctgcagggttccaatgacacgactttg

SEQ ID NO: 37435 - DNA, 30 bp, Artificial Sequence
  Synthetic oligonucleotide
tccgactggaacgagtcagaaaggagtttg

SEQ ID NO: 37436 - DNA, 30 bp, Artificial Sequence
  Synthetic oligonucleotide
ggatggcaggatcagagccttatgcgtttg

SEQ ID NO: 37437 - DNA, 30 bp, Artificial Sequence
  Synthetic oligonucleotide
caaggcggtgaggacaagaatggaattttg

SEQ ID NO: 37438 - DNA, 30 bp, Artificial Sequence
  Synthetic oligonucleotide
acaaagcgtgcttggccgaatccccaaaat

SEQ ID NO: 37439 - DNA, 30 bp, Artificial Sequence
  Synthetic oligonucleotide
cttggagaacacatcctagagcctcgaaat

SEQ ID NO: 37440 - DNA, 30 bp, Artificial Sequence
  Synthetic oligonucleotide
ccgacgggggtaggcaacaatcaaggaaat

SEQ ID NO: 37441 - DNA, 30 bp, Artificial Sequence
  Synthetic oligonucleotide
cgtatcgagtgcgaacgtacctgcggaaat

SEQ ID NO: 37442 - DNA, 30 bp, Artificial Sequence
  Synthetic oligonucleotide
gggtagtgtcagtgagaacacaggggaaat

SEQ ID NO: 37443 - DNA, 30 bp, Artificial Sequence
  Synthetic oligonucleotide
acggaaactagaaataatacaagctgaaat

SEQ ID NO: 37444 - DNA, 30 bp, Artificial Sequence
  Synthetic oligonucleotide
cgaacccggagacctgaaggattctgaaat

SEQ ID NO: 37445 - DNA, 30 bp, Artificial Sequence
  Synthetic oligonucleotide
cggtgagtgcggacatactaggtattaaat

SEQ ID NO: 37446 - DNA, 30 bp, Artificial Sequence
  Synthetic oligonucleotide
acgtacgacgggtggaacagcttaaacaat

SEQ ID NO: 37447 - DNA, 30 bp, Artificial Sequence
  Synthetic oligonucleotide
gtcggggtcggcactacaaatgggaacaat

SEQ ID NO: 37448 - DNA, 30 bp, Artificial Sequence
  Synthetic oligonucleotide
ggtaagagcaagtaagaccggagagacaat

SEQ ID NO: 37449 - DNA, 30 bp, Artificial Sequence
  Synthetic oligonucleotide
gcatggcatctatgagtgaaagacgacaat

SEQ ID NO: 37450 - DNA, 30 bp, Artificial Sequence
  Synthetic oligonucleotide
cgcgagtggtgggaagccagttactccaat

SEQ ID NO: 37451 - DNA, 30 bp, Artificial Sequence
  Synthetic oligonucleotide
acacggattcaaaaaggcattcattccaat

SEQ ID NO: 37452 - DNA, 30 bp, Artificial Sequence
  Synthetic oligonucleotide
aacagggtggcagagctacatcttagcaat

SEQ ID NO: 37453 - DNA, 30 bp, Artificial Sequence
  Synthetic oligonucleotide
acgcaaggtacatcgaagacagactgcaat

SEQ ID NO: 37454 - DNA, 30 bp, Artificial Sequence
  Synthetic oligonucleotide
gaggcgttgatctagacatgggaagtcaat

SEQ ID NO: 37455 - DNA, 30 bp, Artificial Sequence
  Synthetic oligonucleotide
cgcaccagtagtagtaggacactcttcaat

SEQ ID NO: 37456 - DNA, 30 bp, Artificial Sequence
  Synthetic oligonucleotide
ctgggacgactgtacagaaataataagaat

SEQ ID NO: 37457 - DNA, 30 bp, Artificial Sequence
  Synthetic oligonucleotide
catggtaggagggatacgatcccggagaat

SEQ ID NO: 37458 - DNA, 30 bp, Artificial Sequence
  Synthetic oligonucleotide
tgctttggaggacgatgagtagtagcgaat

SEQ ID NO: 37459 - DNA, 30 bp, Artificial Sequence
  Synthetic oligonucleotide
gacaatcaagggccaaacgagtacgggaat

SEQ ID NO: 37460 - DNA, 30 bp, Artificial Sequence
  Synthetic oligonucleotide
tcgcgtatcggagggtagatcggagtgaat

SEQ ID NO: 37461 - DNA, 30 bp, Artificial Sequence
  Synthetic oligonucleotide
gtcaaggaaagctagtcgtcccggaataat

SEQ ID NO: 37462 - DNA, 30 bp, Artificial Sequence
  Synthetic oligonucleotide
cagtgatgaatattcagaggtcagcataat

SEQ ID NO: 37463 - DNA, 30 bp, Artificial Sequence
  Synthetic oligonucleotide
ttaggtgtcgaacgagtaaagtaatgtaat

SEQ ID NO: 37464 - DNA, 30 bp, Artificial Sequence
  Synthetic oligonucleotide
gcaacaaatagccactatacctcatgtaat

SEQ ID NO: 37465 - DNA, 30 bp, Artificial Sequence
  Synthetic oligonucleotide
cacgggcgaccaacacattgcatatgtaat

SEQ ID NO: 37466 - DNA, 30 bp, Artificial Sequence
  Synthetic oligonucleotide
tgatccgaagaagggattctgagccaacat

SEQ ID NO: 37467 - DNA, 30 bp, Artificial Sequence
  Synthetic oligonucleotide
aagagtagggcagctcaccgatccacacat

SEQ ID NO: 37468 - DNA, 30 bp, Artificial Sequence
  Synthetic oligonucleotide
accggacaacggaaaaaccctccgccacat

SEQ ID NO: 37469 - DNA, 30 bp, Artificial Sequence
  Synthetic oligonucleotide
aacgaaacagtcggattggtgagttcacat

SEQ ID NO: 37470 - DNA, 30 bp, Artificial Sequence
  Synthetic oligonucleotide
tgtagagtagcgtgcaaggattggagacat

SEQ ID NO: 37471 - DNA, 30 bp, Artificial Sequence
  Synthetic oligonucleotide
gaatcacgaggaaattgctgagggggacat

SEQ ID NO: 37472 - DNA, 30 bp, Artificial Sequence
  Synthetic oligonucleotide
cccgtacatgaggaaagaggattaatacat

SEQ ID NO: 37473 - DNA, 30 bp, Artificial Sequence
  Synthetic oligonucleotide
ccgtagaacagcggcagaacagcaaaccat

SEQ ID NO: 37474 - DNA, 29 bp, Artificial Sequence
  Synthetic oligonucleotide
attgtatatccctgttggcattacgccat

SEQ ID NO: 37475 - DNA, 30 bp, Artificial Sequence
  Synthetic oligonucleotide
cggagtaattcagaaggtggtgaggtccat

SEQ ID NO: 37476 - DNA, 30 bp, Artificial Sequence
  Synthetic oligonucleotide
gtgctagatcagagtgagtaatgtgtccat

SEQ ID NO: 37477 - DNA, 30 bp, Artificial Sequence
  Synthetic oligonucleotide
tagtgcgtcatgcaaagcgaaattgtccat

SEQ ID NO: 37478 - DNA, 30 bp, Artificial Sequence
  Synthetic oligonucleotide
cagataagcaggtagtctcagggtacgcat

SEQ ID NO: 37479 - DNA, 30 bp, Artificial Sequence
  Synthetic oligonucleotide
gggtgagtagagtgtagtgcgcagaggcat

SEQ ID NO: 37480 - DNA, 30 bp, Artificial Sequence
  Synthetic oligonucleotide
ctagtcagtttaaagtgatgacaagggcat

SEQ ID NO: 37481 - DNA, 30 bp, Artificial Sequence
  Synthetic oligonucleotide
tgacggggatcaatcggctagagatggcat

SEQ ID NO: 37482 - DNA, 30 bp, Artificial Sequence
  Synthetic oligonucleotide
gatgggggtaagcacaatcttgcgtggcat

SEQ ID NO: 37483 - DNA, 30 bp, Artificial Sequence
  Synthetic oligonucleotide
caataagtcctctaaaagcatgaacatcat

SEQ ID NO: 37484 - DNA, 30 bp, Artificial Sequence
  Synthetic oligonucleotide
aaacacgtgagccacgagggatcccatcat

SEQ ID NO: 37485 - DNA, 30 bp, Artificial Sequence
  Synthetic oligonucleotide
cagataccgcgcgagcagtcgaacactcat

SEQ ID NO: 37486 - DNA, 30 bp, Artificial Sequence
  Synthetic oligonucleotide
cgtggtatcggatcgaccaaaacgagtcat

SEQ ID NO: 37487 - DNA, 30 bp, Artificial Sequence
  Synthetic oligonucleotide
cgaggaccttcaacaagaaatgtgcttcat

SEQ ID NO: 37488 - DNA, 30 bp, Artificial Sequence
  Synthetic oligonucleotide
cacgtcaaccgctacaccgcctacaaagat

SEQ ID NO: 37489 - DNA, 30 bp, Artificial Sequence
  Synthetic oligonucleotide
tacatcccgcaagagagctcggtcaaagat

SEQ ID NO: 37490 - DNA, 30 bp, Artificial Sequence
  Synthetic oligonucleotide
gggcataattaaggcatacttaaccaagat

SEQ ID NO: 37491 - DNA, 31 bp, Artificial Sequence
  Synthetic oligonucleotide
aatgatctgcgtaaatggaacgagggaagat

SEQ ID NO: 37492 - DNA, 30 bp, Artificial Sequence
  Synthetic oligonucleotide
caaggagcgcatcagtcaggcctggaagat

SEQ ID NO: 37493 - DNA, 30 bp, Artificial Sequence
  Synthetic oligonucleotide
cgtgtctcacatgaggagtggaatgaagat

SEQ ID NO: 37494 - DNA, 30 bp, Artificial Sequence
  Synthetic oligonucleotide
agctgttcaaaatgaaaggcgcgggcagat

SEQ ID NO: 37495 - DNA, 30 bp, Artificial Sequence
  Synthetic oligonucleotide
tgttagctggaggcacggttcgactcagat

SEQ ID NO: 37496 - DNA, 30 bp, Artificial Sequence
  Synthetic oligonucleotide
ggacagtttgcctagagtgtcagacgagat

SEQ ID NO: 37497 - DNA, 30 bp, Artificial Sequence
  Synthetic oligonucleotide
tgtcgggtgaactggtgccacgaatacgat

SEQ ID NO: 37498 - DNA, 30 bp, Artificial Sequence
  Synthetic oligonucleotide
ggatacatatcaacggaattcgatcccgat

SEQ ID NO: 37499 - DNA, 30 bp, Artificial Sequence
  Synthetic oligonucleotide
aggagaagcgatgcacttaggttcgccgat

SEQ ID NO: 37500 - DNA, 30 bp, Artificial Sequence
  Synthetic oligonucleotide
gagagatgaggattgagatgggacggcgat

SEQ ID NO: 37501 - DNA, 30 bp, Artificial Sequence
  Synthetic oligonucleotide
caaagaaggggcgcattacctcgtatcgat

SEQ ID NO: 37502 - DNA, 30 bp, Artificial Sequence
  Synthetic oligonucleotide
agagtgaaagtggagaacaggaaggtcgat

SEQ ID NO: 37503 - DNA, 30 bp, Artificial Sequence
  Synthetic oligonucleotide
tcactggcacagagggataacgcattcgat

SEQ ID NO: 37504 - DNA, 30 bp, Artificial Sequence
  Synthetic oligonucleotide
tacaaaagtgccgagctagagtgtaaggat

SEQ ID NO: 37505 - DNA, 30 bp, Artificial Sequence
  Synthetic oligonucleotide
ggggaatgtagagcgttgatcaatcaggat

SEQ ID NO: 37506 - DNA, 30 bp, Artificial Sequence
  Synthetic oligonucleotide
accgtggtttcgattgacaggaaagaggat

SEQ ID NO: 37507 - DNA, 30 bp, Artificial Sequence
  Synthetic oligonucleotide
atgagaactgaccagtcataaatgtaggat

SEQ ID NO: 37508 - DNA, 30 bp, Artificial Sequence
  Synthetic oligonucleotide
aggagcgcgtcagaataggcaataccggat

SEQ ID NO: 37509 - DNA, 30 bp, Artificial Sequence
  Synthetic oligonucleotide
cgaatgagcggatacgtaccggtaggggat

SEQ ID NO: 37510 - DNA, 30 bp, Artificial Sequence
  Synthetic oligonucleotide
aggatcggaagatccatccaatacaatgat

SEQ ID NO: 37511 - DNA, 30 bp, Artificial Sequence
  Synthetic oligonucleotide
gcaagtggtaccacacaaacgaaggatgat

SEQ ID NO: 37512 - DNA, 30 bp, Artificial Sequence
  Synthetic oligonucleotide
tcgatcgcccatagatagtgagtttgtgat

SEQ ID NO: 37513 - DNA, 30 bp, Artificial Sequence
  Synthetic oligonucleotide
atgggagaagggccgcaatctgtgattgat

SEQ ID NO: 37514 - DNA, 30 bp, Artificial Sequence
  Synthetic oligonucleotide
taggagaggtgtcgtcccataggtcaatat

SEQ ID NO: 37515 - DNA, 30 bp, Artificial Sequence
  Synthetic oligonucleotide
ccggcaaaccggctagccgacaagagatat

SEQ ID NO: 37516 - DNA, 30 bp, Artificial Sequence
  Synthetic oligonucleotide
tcagaggatgaataagtaggggaaaactat

SEQ ID NO: 37517 - DNA, 30 bp, Artificial Sequence
  Synthetic oligonucleotide
caagtcatgaaaggtgggggtgaggactat

SEQ ID NO: 37518 - DNA, 30 bp, Artificial Sequence
  Synthetic oligonucleotide
agatctcaaacgggacagcgcggttactat

SEQ ID NO: 37519 - DNA, 29 bp, Artificial Sequence
  Synthetic oligonucleotide
acacgcatacgcgggggctgaggaagtat

SEQ ID NO: 37520 - DNA, 30 bp, Artificial Sequence
  Synthetic oligonucleotide
aacctgaaacgggagaccctactgcagtat

SEQ ID NO: 37521 - DNA, 30 bp, Artificial Sequence
  Synthetic oligonucleotide
atggtcacgagggggtatcgtgtaccgtat

SEQ ID NO: 37522 - DNA, 30 bp, Artificial Sequence
  Synthetic oligonucleotide
gggccttaacacgcaagatcagtagcgtat

SEQ ID NO: 37523 - DNA, 30 bp, Artificial Sequence
  Synthetic oligonucleotide
cgaaccccgtgtaaaggcataacggcgtat

SEQ ID NO: 37524 - DNA, 30 bp, Artificial Sequence
  Synthetic oligonucleotide
gacggcaaaaggtgattccctaggtcgtat

SEQ ID NO: 37525 - DNA, 30 bp, Artificial Sequence
  Synthetic oligonucleotide
aagcgaagtggagcgccagtattgaggtat

SEQ ID NO: 37526 - DNA, 30 bp, Artificial Sequence
  Synthetic oligonucleotide
gtggcaagatcagacaaagcagtgcggtat

SEQ ID NO: 37527 - DNA, 30 bp, Artificial Sequence
  Synthetic oligonucleotide
tagcttggatcacaaaagtgagggctgtat

SEQ ID NO: 37528 - DNA, 30 bp, Artificial Sequence
  Synthetic oligonucleotide
gtgagtaatgtcggaatcgagggcgtgtat

SEQ ID NO: 37529 - DNA, 30 bp, Artificial Sequence
  Synthetic oligonucleotide
aactgaatcgtcaagagtggctgggtgtat

SEQ ID NO: 37530 - DNA, 29 bp, Artificial Sequence
  Synthetic oligonucleotide
cggtccgaactgtccaaactgaattgtat

SEQ ID NO: 37531 - DNA, 30 bp, Artificial Sequence
  Synthetic oligonucleotide
tcttatctgttgtgttttcctcttttgtat

SEQ ID NO: 37532 - DNA, 30 bp, Artificial Sequence
  Synthetic oligonucleotide
caatggataagtcgagaatgaaagcattat

SEQ ID NO: 37533 - DNA, 30 bp, Artificial Sequence
  Synthetic oligonucleotide
cgttgattgtacgagtaagtgcgaggttat

SEQ ID NO: 37534 - DNA, 30 bp, Artificial Sequence
  Synthetic oligonucleotide
cgtgaggaccatgcaaatcagagcggttat

SEQ ID NO: 37535 - DNA, 30 bp, Artificial Sequence
  Synthetic oligonucleotide
aggatccaacacggggcatacaacagaact

SEQ ID NO: 37536 - DNA, 30 bp, Artificial Sequence
  Synthetic oligonucleotide
tgcccgcgacaacattcagtggcgagaact

SEQ ID NO: 37537 - DNA, 30 bp, Artificial Sequence
  Synthetic oligonucleotide
ggcacaagggaaaataatcacggtataact

SEQ ID NO: 37538 - DNA, 30 bp, Artificial Sequence
  Synthetic oligonucleotide
aggagggcaatacatccagatccattaact

SEQ ID NO: 37539 - DNA, 30 bp, Artificial Sequence
  Synthetic oligonucleotide
catgggaattcacacatagaagcgcacact

SEQ ID NO: 37540 - DNA, 30 bp, Artificial Sequence
  Synthetic oligonucleotide
aggcacagtcgaaagtagtgttggtccact

SEQ ID NO: 37541 - DNA, 30 bp, Artificial Sequence
  Synthetic oligonucleotide
gctggacaacagagaaagtgacggatcact

SEQ ID NO: 37542 - DNA, 30 bp, Artificial Sequence
  Synthetic oligonucleotide
acgcggggcggataatccataattgtcact

SEQ ID NO: 37543 - DNA, 30 bp, Artificial Sequence
  Synthetic oligonucleotide
aaaggaattacacatagtccctcgaagact

SEQ ID NO: 37544 - DNA, 30 bp, Artificial Sequence
  Synthetic oligonucleotide
gaacggtcaactaaccgaaaaatctagact

SEQ ID NO: 37545 - DNA, 30 bp, Artificial Sequence
  Synthetic oligonucleotide
aaggcaaaggtgcaaagatggagaacgact

SEQ ID NO: 37546 - DNA, 30 bp, Artificial Sequence
  Synthetic oligonucleotide
aggcaaggaatataaatgctattagcgact

SEQ ID NO: 37547 - DNA, 30 bp, Artificial Sequence
  Synthetic oligonucleotide
ccgggagaacgccattaaacatcatcgact

SEQ ID NO: 37548 - DNA, 30 bp, Artificial Sequence
  Synthetic oligonucleotide
tgggggtttagtttggaaaaaaaaaggact

SEQ ID NO: 37549 - DNA, 30 bp, Artificial Sequence
  Synthetic oligonucleotide
ggggaggtgtaggctgtgtactccatgact

SEQ ID NO: 37550 - DNA, 30 bp, Artificial Sequence
  Synthetic oligonucleotide
tgcaagttagcaaaaggggaaaatatgact

SEQ ID NO: 37551 - DNA, 30 bp, Artificial Sequence
  Synthetic oligonucleotide
ggacacaaaaaggctattaagcgacatact

SEQ ID NO: 37552 - DNA, 30 bp, Artificial Sequence
  Synthetic oligonucleotide
ccgaagagcaaagggcgagagaaacgtact

SEQ ID NO: 37553 - DNA, 30 bp, Artificial Sequence
  Synthetic oligonucleotide
cacgtataggaccgtacagaagagtaacct

SEQ ID NO: 37554 - DNA, 30 bp, Artificial Sequence
  Synthetic oligonucleotide
cgtcactaattgtaagaaaaacgtacacct

SEQ ID NO: 37555 - DNA, 30 bp, Artificial Sequence
  Synthetic oligonucleotide
acactagcacgggatagcgccaccagacct

SEQ ID NO: 37556 - DNA, 30 bp, Artificial Sequence
  Synthetic oligonucleotide
atcgcacaaacacggggaaagaggagacct

SEQ ID NO: 37557 - DNA, 30 bp, Artificial Sequence
  Synthetic oligonucleotide
tagggaaactagagttatggtgagcgacct

SEQ ID NO: 37558 - DNA, 30 bp, Artificial Sequence
  Synthetic oligonucleotide
acgtcgaggttgaagagtggatgatcccct

SEQ ID NO: 37559 - DNA, 30 bp, Artificial Sequence
  Synthetic oligonucleotide
cgggtcatagagtacacaggtgcgtgccct

SEQ ID NO: 37560 - DNA, 30 bp, Artificial Sequence
  Synthetic oligonucleotide
gtaaacacaaggaccacaaaagtgcagcct

SEQ ID NO: 37561 - DNA, 30 bp, Artificial Sequence
  Synthetic oligonucleotide
gtagcgtgacaacagaggatattgcagcct

SEQ ID NO: 37562 - DNA, 30 bp, Artificial Sequence
  Synthetic oligonucleotide
taccatgggagaagaacgcgatgatagcct

SEQ ID NO: 37563 - DNA, 30 bp, Artificial Sequence
  Synthetic oligonucleotide
gacacataaggaggaggcggcagaacgcct

SEQ ID NO: 37564 - DNA, 30 bp, Artificial Sequence
  Synthetic oligonucleotide
cagatagaggatgggcacgggactacgcct

SEQ ID NO: 37565 - DNA, 30 bp, Artificial Sequence
  Synthetic oligonucleotide
cataaacagtcggaaaaatgacataggcct

SEQ ID NO: 37566 - DNA, 30 bp, Artificial Sequence
  Synthetic oligonucleotide
acgagaatttgcggagacacatatcatcct

SEQ ID NO: 37567 - DNA, 30 bp, Artificial Sequence
  Synthetic oligonucleotide
agtaaggcttagtacggtaacaatacagct

SEQ ID NO: 37568 - DNA, 30 bp, Artificial Sequence
  Synthetic oligonucleotide
tcagcccgatagtaaggctgccatccagct

SEQ ID NO: 37569 - DNA, 30 bp, Artificial Sequence
  Synthetic oligonucleotide
atgaacgcatatattcgagtggtaggagct

SEQ ID NO: 37570 - DNA, 30 bp, Artificial Sequence
  Synthetic oligonucleotide
attgcgagcaaacaagaattgggggtagct

SEQ ID NO: 37571 - DNA, 30 bp, Artificial Sequence
  Synthetic oligonucleotide
gcgtggattataggagaatgcgatgtagct

SEQ ID NO: 37572 - DNA, 30 bp, Artificial Sequence
  Synthetic oligonucleotide
gtacaaaaacaacgtcacccacttcacgct

SEQ ID NO: 37573 - DNA, 30 bp, Artificial Sequence
  Synthetic oligonucleotide
accatgtaaaggcacatgaatcagttcgct

SEQ ID NO: 37574 - DNA, 30 bp, Artificial Sequence
  Synthetic oligonucleotide
ctggccccaaacgtcgcgagagaacaggct

SEQ ID NO: 37575 - DNA, 30 bp, Artificial Sequence
  Synthetic oligonucleotide
tcgaaaaatagactccgtgactgggaggct

SEQ ID NO: 37576 - DNA, 30 bp, Artificial Sequence
  Synthetic oligonucleotide
ggagacgtcgtatacggagggcatgaggct

SEQ ID NO: 37577 - DNA, 30 bp, Artificial Sequence
  Synthetic oligonucleotide
gaggagaatacgtgtagcacgggacgggct

SEQ ID NO: 37578 - DNA, 30 bp, Artificial Sequence
  Synthetic oligonucleotide
tgtccggcgaggtgacagcgctacttggct

SEQ ID NO: 37579 - DNA, 30 bp, Artificial Sequence
  Synthetic oligonucleotide
agacaaggggagatgttgatactgtctgct

SEQ ID NO: 37580 - DNA, 30 bp, Artificial Sequence
  Synthetic oligonucleotide
atactagacgcgaccaagagggaacgtgct

SEQ ID NO: 37581 - DNA, 30 bp, Artificial Sequence
  Synthetic oligonucleotide
aggcatgaaagaacgcggtggaaggttgct

SEQ ID NO: 37582 - DNA, 30 bp, Artificial Sequence
  Synthetic oligonucleotide
gcgcgctggcggaaagatcgcaatgttgct

SEQ ID NO: 37583 - DNA, 30 bp, Artificial Sequence
  Synthetic oligonucleotide
gcttagcgaagagtaattacgacctaatct

SEQ ID NO: 37584 - DNA, 29 bp, Artificial Sequence
  Synthetic oligonucleotide
gcacaacacaccagccgaaatcaacatct

SEQ ID NO: 37585 - DNA, 31 bp, Artificial Sequence
  Synthetic oligonucleotide
cgaactgaacttatcataattcaacttatct

SEQ ID NO: 37586 - DNA, 30 bp, Artificial Sequence
  Synthetic oligonucleotide
taggtcaggtgagcagacgaaggtggctct

SEQ ID NO: 37587 - DNA, 30 bp, Artificial Sequence
  Synthetic oligonucleotide
agggaggcaattgtatcggtcccatgctct

SEQ ID NO: 37588 - DNA, 30 bp, Artificial Sequence
  Synthetic oligonucleotide
cagtgcacaggctaaaggtatgagcggtct

SEQ ID NO: 37589 - DNA, 30 bp, Artificial Sequence
  Synthetic oligonucleotide
gcatgttgatggacattcgagttagtgtct

SEQ ID NO: 37590 - DNA, 30 bp, Artificial Sequence
  Synthetic oligonucleotide
gggagtgaagcttacccagcgggcaaaagt

SEQ ID NO: 37591 - DNA, 30 bp, Artificial Sequence
  Synthetic oligonucleotide
cggcggagcggtatggctaaaatacaaagt

SEQ ID NO: 37592 - DNA, 30 bp, Artificial Sequence
  Synthetic oligonucleotide
gctacacgatactgttgatgaagagaaagt

SEQ ID NO: 37593 - DNA, 30 bp, Artificial Sequence
  Synthetic oligonucleotide
aggacattgttgtaccctgcgaaggaaagt

SEQ ID NO: 37594 - DNA, 30 bp, Artificial Sequence
  Synthetic oligonucleotide
ggaaagaagttaggtaaaatattcacaagt

SEQ ID NO: 37595 - DNA, 30 bp, Artificial Sequence
  Synthetic oligonucleotide
ccagagcgctcaggcctatcatagacaagt

SEQ ID NO: 37596 - DNA, 30 bp, Artificial Sequence
  Synthetic oligonucleotide
gggtagacggccgtcgaagctgtggcaagt

SEQ ID NO: 37597 - DNA, 30 bp, Artificial Sequence
  Synthetic oligonucleotide
aacaagactatacatagccagacacgaagt

SEQ ID NO: 37598 - DNA, 30 bp, Artificial Sequence
  Synthetic oligonucleotide
aggacgtcgttgaaggtgtgggctcgaagt

SEQ ID NO: 37599 - DNA, 30 bp, Artificial Sequence
  Synthetic oligonucleotide
cggccgatgaatccaggccaaggcggaagt

SEQ ID NO: 37600 - DNA, 30 bp, Artificial Sequence
  Synthetic oligonucleotide
acataagattgcagcttcgagagcgtaagt

SEQ ID NO: 37601 - DNA, 30 bp, Artificial Sequence
  Synthetic oligonucleotide
ccaaacgttgagaagaccgggagtgtaagt

SEQ ID NO: 37602 - DNA, 30 bp, Artificial Sequence
  Synthetic oligonucleotide
ggaggcggcacaatcatctggcaaaacagt

SEQ ID NO: 37603 - DNA, 30 bp, Artificial Sequence
  Synthetic oligonucleotide
ggatccgaatccggactaaaagaacacagt

SEQ ID NO: 37604 - DNA, 30 bp, Artificial Sequence
  Synthetic oligonucleotide
aaccacaagctgaagtgaggcatcagcagt

SEQ ID NO: 37605 - DNA, 30 bp, Artificial Sequence
  Synthetic oligonucleotide
tgagaatgttcgagtaaacttgcagtcagt

SEQ ID NO: 37606 - DNA, 30 bp, Artificial Sequence
  Synthetic oligonucleotide
cgtcaggcttgcgcaaatgaggatgtcagt

SEQ ID NO: 37607 - DNA, 30 bp, Artificial Sequence
  Synthetic oligonucleotide
ggggacgaaatagacactaatactgtcagt

SEQ ID NO: 37608 - DNA, 30 bp, Artificial Sequence
  Synthetic oligonucleotide
agacagtacggggaaatagtaaaaaagagt

SEQ ID NO: 37609 - DNA, 30 bp, Artificial Sequence
  Synthetic oligonucleotide
acttgcatatcttaggactggccaaagagt

SEQ ID NO: 37610 - DNA, 30 bp, Artificial Sequence
  Synthetic oligonucleotide
attacaccaaagatctacgaggacaagagt

SEQ ID NO: 37611 - DNA, 30 bp, Artificial Sequence
  Synthetic oligonucleotide
gtctgagctgcaatgagttaagcgaagagt

SEQ ID NO: 37612 - DNA, 30 bp, Artificial Sequence
  Synthetic oligonucleotide
tgggagcttagcagttagaggccagagagt

SEQ ID NO: 37613 - DNA, 30 bp, Artificial Sequence
  Synthetic oligonucleotide
agttagtattgagatcagcatagcgagagt

SEQ ID NO: 37614 - DNA, 30 bp, Artificial Sequence
  Synthetic oligonucleotide
taccggtaacaatcggtgaaaaaggcgagt

SEQ ID NO: 37615 - DNA, 30 bp, Artificial Sequence
  Synthetic oligonucleotide
agctgcagagccatgtggggttcatcgagt

SEQ ID NO: 37616 - DNA, 30 bp, Artificial Sequence
  Synthetic oligonucleotide
aggtctaacgtacgagtgatcaagcggagt

SEQ ID NO: 37617 - DNA, 30 bp, Artificial Sequence
  Synthetic oligonucleotide
ggcgacactatgaaggcgataaggcggagt

SEQ ID NO: 37618 - DNA, 30 bp, Artificial Sequence
  Synthetic oligonucleotide
actgggagactagcccttgggcctgggagt

SEQ ID NO: 37619 - DNA, 30 bp, Artificial Sequence
  Synthetic oligonucleotide
agcagggcatgaccatcagatcgtgggagt

SEQ ID NO: 37620 - DNA, 30 bp, Artificial Sequence
  Synthetic oligonucleotide
acatgaaacaacgatccatatataaatagt

SEQ ID NO: 37621 - DNA, 30 bp, Artificial Sequence
  Synthetic oligonucleotide
agaggagtattaatttgtagagtgattagt

SEQ ID NO: 37622 - DNA, 30 bp, Artificial Sequence
  Synthetic oligonucleotide
gcggaatagtacgcgaccaggaataaacgt

SEQ ID NO: 37623 - DNA, 30 bp, Artificial Sequence
  Synthetic oligonucleotide
tcggtgctgttcaaaagcagcggaagacgt

SEQ ID NO: 37624 - DNA, 31 bp, Artificial Sequence
  Synthetic oligonucleotide
gcggccagggttgaggctacatccatgacgt

SEQ ID NO: 37625 - DNA, 30 bp, Artificial Sequence
  Synthetic oligonucleotide
gtgggagatgagggcgacacatcggcccgt

SEQ ID NO: 37626 - DNA, 30 bp, Artificial Sequence
  Synthetic oligonucleotide
cagtgcccaaaaaacgaacaattgcgccgt

SEQ ID NO: 37627 - DNA, 30 bp, Artificial Sequence
  Synthetic oligonucleotide
caagaagatatccaactaacgaagggccgt

SEQ ID NO: 37628 - DNA, 30 bp, Artificial Sequence
  Synthetic oligonucleotide
gggagacattcgttacgaagtgggctccgt

SEQ ID NO: 37629 - DNA, 30 bp, Artificial Sequence
  Synthetic oligonucleotide
ggcgacgagcacaaggtggctagggagcgt

SEQ ID NO: 37630 - DNA, 30 bp, Artificial Sequence
  Synthetic oligonucleotide
aacggagaaagaagtctgtgagtatcgcgt

SEQ ID NO: 37631 - DNA, 30 bp, Artificial Sequence
  Synthetic oligonucleotide
ttgaacacccgacacgagagagggtcgcgt

SEQ ID NO: 37632 - DNA, 30 bp, Artificial Sequence
  Synthetic oligonucleotide
gccgacgagtagtggatatatgggtcgcgt

SEQ ID NO: 37633 - DNA, 30 bp, Artificial Sequence
  Synthetic oligonucleotide
ggcctaggcaatcacaacgagtgaaggcgt

SEQ ID NO: 37634 - DNA, 30 bp, Artificial Sequence
  Synthetic oligonucleotide
cgactccacgacaccccagaatcagggcgt

SEQ ID NO: 37635 - DNA, 30 bp, Artificial Sequence
  Synthetic oligonucleotide
cgaaaaacgttgtgtcaacatggcttgcgt

SEQ ID NO: 37636 - DNA, 30 bp, Artificial Sequence
  Synthetic oligonucleotide
gaagagaggggaaaggaatgttacactcgt

SEQ ID NO: 37637 - DNA, 30 bp, Artificial Sequence
  Synthetic oligonucleotide
caagatgggcacataaacaaatggactcgt

SEQ ID NO: 37638 - DNA, 30 bp, Artificial Sequence
  Synthetic oligonucleotide
caggtgactgtatttgcgccgtaaagtcgt

SEQ ID NO: 37639 - DNA, 30 bp, Artificial Sequence
  Synthetic oligonucleotide
cattacatggctaaaaatgggcggcgtcgt

SEQ ID NO: 37640 - DNA, 30 bp, Artificial Sequence
  Synthetic oligonucleotide
aagtacgaaaaaagtactatgctgaaaggt

SEQ ID NO: 37641 - DNA, 30 bp, Artificial Sequence
  Synthetic oligonucleotide
cgaaagattacagaggaacttgggcaaggt

SEQ ID NO: 37642 - DNA, 30 bp, Artificial Sequence
  Synthetic oligonucleotide
acgagggtttgggagtatcgatgtcaaggt

SEQ ID NO: 37643 - DNA, 30 bp, Artificial Sequence
  Synthetic oligonucleotide
tcgatgcggttatagagaagattctaaggt

SEQ ID NO: 37644 - DNA, 30 bp, Artificial Sequence
  Synthetic oligonucleotide
ttagtagacacaggggagagcagaacaggt

SEQ ID NO: 37645 - DNA, 30 bp, Artificial Sequence
  Synthetic oligonucleotide
ccaagtgctaagtgtacacaccgaacaggt

SEQ ID NO: 37646 - DNA, 30 bp, Artificial Sequence
  Synthetic oligonucleotide
gcgtacgtcatcgcctaggagtggacaggt

SEQ ID NO: 37647 - DNA, 30 bp, Artificial Sequence
  Synthetic oligonucleotide
taaaacataccgaaaacagcggaaccaggt

SEQ ID NO: 37648 - DNA, 30 bp, Artificial Sequence
  Synthetic oligonucleotide
gagacgagatgctacgcgaaatttcgaggt

SEQ ID NO: 37649 - DNA, 30 bp, Artificial Sequence
  Synthetic oligonucleotide
tagatcgctcagtaagggtaatcgggaggt

SEQ ID NO: 37650 - DNA, 30 bp, Artificial Sequence
  Synthetic oligonucleotide
tgacaagtgggaaggggtgtcgtattaggt

SEQ ID NO: 37651 - DNA, 30 bp, Artificial Sequence
  Synthetic oligonucleotide
agatgctagaaataggcattgggcttaggt

SEQ ID NO: 37652 - DNA, 30 bp, Artificial Sequence
  Synthetic oligonucleotide
acggcataagaatcttccacgcactacggt

SEQ ID NO: 37653 - DNA, 30 bp, Artificial Sequence
  Synthetic oligonucleotide
acgtgtagaagacaccgtgagatacgcggt

SEQ ID NO: 37654 - DNA, 30 bp, Artificial Sequence
  Synthetic oligonucleotide
gttggataggtaaaaaagtcgtgagtcggt

SEQ ID NO: 37655 - DNA, 30 bp, Artificial Sequence
  Synthetic oligonucleotide
agataagcctgaaaactcgaaaaccagggt

SEQ ID NO: 37656 - DNA, 30 bp, Artificial Sequence
  Synthetic oligonucleotide
cgctggatctaagacaagagctggtagggt

SEQ ID NO: 37657 - DNA, 30 bp, Artificial Sequence
  Synthetic oligonucleotide
cggcaggaggcccatgtacatcacgcgggt

SEQ ID NO: 37658 - DNA, 30 bp, Artificial Sequence
  Synthetic oligonucleotide
caaacaagacgatgaatccgaagctcgggt

SEQ ID NO: 37659 - DNA, 30 bp, Artificial Sequence
  Synthetic oligonucleotide
tcgaactgaacatctacaaacattaggggt

SEQ ID NO: 37660 - DNA, 30 bp, Artificial Sequence
  Synthetic oligonucleotide
gcgcggagcgcagttggattacgaaatggt

SEQ ID NO: 37661 - DNA, 30 bp, Artificial Sequence
  Synthetic oligonucleotide
gacataggatcgagtgcactagtagatggt

SEQ ID NO: 37662 - DNA, 30 bp, Artificial Sequence
  Synthetic oligonucleotide
ggataatattggagtacagagtcgactggt

SEQ ID NO: 37663 - DNA, 30 bp, Artificial Sequence
  Synthetic oligonucleotide
acaatcaatagccaaccgagtaccagtggt

SEQ ID NO: 37664 - DNA, 30 bp, Artificial Sequence
  Synthetic oligonucleotide
agcgacagaggagggtcgtcggattgtggt

SEQ ID NO: 37665 - DNA, 30 bp, Artificial Sequence
  Synthetic oligonucleotide
ggggccacgaatgaaggtggcatcaaatgt

SEQ ID NO: 37666 - DNA, 30 bp, Artificial Sequence
  Synthetic oligonucleotide
cttgagcataggtgggtcgggatctcatgt

SEQ ID NO: 37667 - DNA, 30 bp, Artificial Sequence
  Synthetic oligonucleotide
tcggtgatcaatagaacagctcgaatatgt

SEQ ID NO: 37668 - DNA, 30 bp, Artificial Sequence
  Synthetic oligonucleotide
cgagattgtgcgggtcggggtaagcactgt

SEQ ID NO: 37669 - DNA, 30 bp, Artificial Sequence
  Synthetic oligonucleotide
acagagtcgaggcaatctatagagcactgt

SEQ ID NO: 37670 - DNA, 30 bp, Artificial Sequence
  Synthetic oligonucleotide
ggagagtcgggctgccgtgactttcgctgt

SEQ ID NO: 37671 - DNA, 30 bp, Artificial Sequence
  Synthetic oligonucleotide
aaagcggacaggacgcaagagtgacagtgt

SEQ ID NO: 37672 - DNA, 30 bp, Artificial Sequence
  Synthetic oligonucleotide
gccggtacacaccagattatagtagcgtgt

SEQ ID NO: 37673 - DNA, 30 bp, Artificial Sequence
  Synthetic oligonucleotide
acggcatgcctgcgttaccaaaaggcgtgt

SEQ ID NO: 37674 - DNA, 30 bp, Artificial Sequence
  Synthetic oligonucleotide
ggtaaaagcgacacgtacactaggttgtgt

SEQ ID NO: 37675 - DNA, 30 bp, Artificial Sequence
  Synthetic oligonucleotide
ttcgacaacgaccaaagggataatacttgt

SEQ ID NO: 37676 - DNA, 30 bp, Artificial Sequence
  Synthetic oligonucleotide
gccgatgaacacaaccggagagtacgttgt

SEQ ID NO: 37677 - DNA, 30 bp, Artificial Sequence
  Synthetic oligonucleotide
cgggtggggcaaacaagacttcgaggttgt

SEQ ID NO: 37678 - DNA, 30 bp, Artificial Sequence
  Synthetic oligonucleotide
caggtactcggggtgcgaggtagaacaatt

SEQ ID NO: 37679 - DNA, 30 bp, Artificial Sequence
  Synthetic oligonucleotide
gcggagccctcatatcggcggatgtcaatt

SEQ ID NO: 37680 - DNA, 31 bp, Artificial Sequence
  Synthetic oligonucleotide
tccagcctaaggagaatgtatgagtagaatt

SEQ ID NO: 37681 - DNA, 30 bp, Artificial Sequence
  Synthetic oligonucleotide
ggtgccagggcatctgcgcgaaaaaccatt

SEQ ID NO: 37682 - DNA, 30 bp, Artificial Sequence
  Synthetic oligonucleotide
acgctagagcagtgcttcaatcgtaccatt

SEQ ID NO: 37683 - DNA, 30 bp, Artificial Sequence
  Synthetic oligonucleotide
ggacgggacccgagagtagaacgaatcatt

SEQ ID NO: 37684 - DNA, 30 bp, Artificial Sequence
  Synthetic oligonucleotide
ggcaggaggactaccaccgcgcacatcatt

SEQ ID NO: 37685 - DNA, 30 bp, Artificial Sequence
  Synthetic oligonucleotide
agctacgcaaaagggataggaattgagatt

SEQ ID NO: 37686 - DNA, 30 bp, Artificial Sequence
  Synthetic oligonucleotide
ggactaataaaactcggaggggggacgatt

SEQ ID NO: 37687 - DNA, 30 bp, Artificial Sequence
  Synthetic oligonucleotide
gacacaggaagagctacttggagcaggatt

SEQ ID NO: 37688 - DNA, 30 bp, Artificial Sequence
  Synthetic oligonucleotide
aggcaggcgagaccttatggccgtaggatt

SEQ ID NO: 37689 - DNA, 30 bp, Artificial Sequence
  Synthetic oligonucleotide
aagcagggttacagaagagtcaccgggatt

SEQ ID NO: 37690 - DNA, 30 bp, Artificial Sequence
  Synthetic oligonucleotide
aggctggggttaagcgtcagatactggatt

SEQ ID NO: 37691 - DNA, 30 bp, Artificial Sequence
  Synthetic oligonucleotide
cgcggtagggcagaggtggacatgttgatt

SEQ ID NO: 37692 - DNA, 30 bp, Artificial Sequence
  Synthetic oligonucleotide
acatactcggggcgaataatagcggatatt

SEQ ID NO: 37693 - DNA, 30 bp, Artificial Sequence
  Synthetic oligonucleotide
cgaaaggtatgcattaaaagaactagtatt

SEQ ID NO: 37694 - DNA, 30 bp, Artificial Sequence
  Synthetic oligonucleotide
gaaggccacaaaatcaaagcgataattatt

SEQ ID NO: 37695 - DNA, 30 bp, Artificial Sequence
  Synthetic oligonucleotide
ggagcatgcggcgtaaaaatagaccaactt

SEQ ID NO: 37696 - DNA, 30 bp, Artificial Sequence
  Synthetic oligonucleotide
gtgcgacaacaaaactttgcggcatcactt

SEQ ID NO: 37697 - DNA, 30 bp, Artificial Sequence
  Synthetic oligonucleotide
gtacacgtcagaggggtaaaatcaagactt

SEQ ID NO: 37698 - DNA, 30 bp, Artificial Sequence
  Synthetic oligonucleotide
tggagccgatagcaggtgatatgaagactt

SEQ ID NO: 37699 - DNA, 30 bp, Artificial Sequence
  Synthetic oligonucleotide
aacgaacaaggagggatgaggcactgactt

SEQ ID NO: 37700 - DNA, 30 bp, Artificial Sequence
  Synthetic oligonucleotide
gcatgaagtaacgagatagctttacagctt

SEQ ID NO: 37701 - DNA, 30 bp, Artificial Sequence
  Synthetic oligonucleotide
ccgatagggatatcgtagaaaaattcgctt

SEQ ID NO: 37702 - DNA, 30 bp, Artificial Sequence
  Synthetic oligonucleotide
ccggaaaaaggatgcgagttatggcggctt

SEQ ID NO: 37703 - DNA, 30 bp, Artificial Sequence
  Synthetic oligonucleotide
tcagagcagaagtaatcgaagccgaatctt

SEQ ID NO: 37704 - DNA, 30 bp, Artificial Sequence
  Synthetic oligonucleotide
ctgggcacgctcaagaaaggagcagaagtt

SEQ ID NO: 37705 - DNA, 30 bp, Artificial Sequence
  Synthetic oligonucleotide
taagcacgggtgctcgcaagtggtgaagtt

SEQ ID NO: 37706 - DNA, 30 bp, Artificial Sequence
  Synthetic oligonucleotide
cggtataggggcaagggtgtatcgtaagtt

SEQ ID NO: 37707 - DNA, 30 bp, Artificial Sequence
  Synthetic oligonucleotide
cgtggagtgcctcacgccgaattgtaagtt

SEQ ID NO: 37708 - DNA, 30 bp, Artificial Sequence
  Synthetic oligonucleotide
acaacgttacggtaggctagtcaaacagtt

SEQ ID NO: 37709 - DNA, 30 bp, Artificial Sequence
  Synthetic oligonucleotide
agaatggacactacgccgtagaagacagtt

SEQ ID NO: 37710 - DNA, 30 bp, Artificial Sequence
  Synthetic oligonucleotide
tcaatcggactcttcataagtgtattagtt

SEQ ID NO: 37711 - DNA, 30 bp, Artificial Sequence
  Synthetic oligonucleotide
atgttaaaagaacacggactgtggaacgtt

SEQ ID NO: 37712 - DNA, 30 bp, Artificial Sequence
  Synthetic oligonucleotide
acaaggaaagagcagggacaccagcacgtt

SEQ ID NO: 37713 - DNA, 31 bp, Artificial Sequence
  Synthetic oligonucleotide
gggggctcgactcacgagaaaaagtcccgtt

SEQ ID NO: 37714 - DNA, 30 bp, Artificial Sequence
  Synthetic oligonucleotide
agcgagatcgtgtgctttacccctgccgtt

SEQ ID NO: 37715 - DNA, 30 bp, Artificial Sequence
  Synthetic oligonucleotide
atccgcaacacgataagagcgtgcagcgtt

SEQ ID NO: 37716 - DNA, 30 bp, Artificial Sequence
  Synthetic oligonucleotide
tgtagaagcacagggaggctgaggaaggtt

SEQ ID NO: 37717 - DNA, 30 bp, Artificial Sequence
  Synthetic oligonucleotide
ttgagccggcagaaggtgacaaaataggtt

SEQ ID NO: 37718 - DNA, 30 bp, Artificial Sequence
  Synthetic oligonucleotide
cgaaaggcgcaatgagatcataattaggtt

SEQ ID NO: 37719 - DNA, 30 bp, Artificial Sequence
  Synthetic oligonucleotide
cggacgtggtgacgtacaagtgcttaggtt

SEQ ID NO: 37720 - DNA, 30 bp, Artificial Sequence
  Synthetic oligonucleotide
catgaacctcgcgtgcaggagtagacggtt

SEQ ID NO: 37721 - DNA, 30 bp, Artificial Sequence
  Synthetic oligonucleotide
tgggcgaagcgcgtcatgaatcgatgggtt

SEQ ID NO: 37722 - DNA, 30 bp, Artificial Sequence
  Synthetic oligonucleotide
tctgagtcgcagtggatagacaagatggtt

SEQ ID NO: 37723 - DNA, 30 bp, Artificial Sequence
  Synthetic oligonucleotide
tcagggacacaaccagtgcgtaggcctgtt

SEQ ID NO: 37724 - DNA, 30 bp, Artificial Sequence
  Synthetic oligonucleotide
catgggctgtggaagtggttacgaattgtt

SEQ ID NO: 37725 - DNA, 30 bp, Artificial Sequence
  Synthetic oligonucleotide
cgagagggtcgcggattcatggtgattgtt

SEQ ID NO: 37726 - DNA, 30 bp, Artificial Sequence
  Synthetic oligonucleotide
gatatgagtgccgataacgaacaggttgtt

SEQ ID NO: 37727 - DNA, 30 bp, Artificial Sequence
  Synthetic oligonucleotide
acgtctacaggagagaaggagagtgttgtt

SEQ ID NO: 37728 - DNA, 30 bp, Artificial Sequence
  Synthetic oligonucleotide
catgaaagggagcgttgataaggtgttgtt

SEQ ID NO: 37729 - DNA, 30 bp, Artificial Sequence
  Synthetic oligonucleotide
gcgggcacaggctcaagcttgcagagattt

SEQ ID NO: 37730 - DNA, 30 bp, Artificial Sequence
  Synthetic oligonucleotide
tggcacagaggcatgagcaagccgtacttt

SEQ ID NO: 37731 - DNA, 31 bp, Artificial Sequence
  Synthetic oligonucleotide
gtggaactcagggaggataagaacttacttt

SEQ ID NO: 37732 - DNA, 30 bp, Artificial Sequence
  Synthetic oligonucleotide
catcaggagggcgggctacgtaaaaatttt

SEQ ID NO: 37733 - DNA, 30 bp, Artificial Sequence
  Synthetic oligonucleotide
acagaagggagcgtgcaaagttagcaaaaa

SEQ ID NO: 37734 - DNA, 30 bp, Artificial Sequence
  Synthetic oligonucleotide
atctgtaggagggctaagccggtgcaaaaa

SEQ ID NO: 37735 - DNA, 30 bp, Artificial Sequence
  Synthetic oligonucleotide
gcattggcaaactacgaaaggcccgaaaaa

SEQ ID NO: 37736 - DNA, 30 bp, Artificial Sequence
  Synthetic oligonucleotide
acgacatcctactcacacagccaggaaaaa

SEQ ID NO: 37737 - DNA, 30 bp, Artificial Sequence
  Synthetic oligonucleotide
acgtgagagaatttgagtgacttataaaaa

SEQ ID NO: 37738 - DNA, 30 bp, Artificial Sequence
  Synthetic oligonucleotide
cgcggtccaaggcgtcaatccttaacaaaa

SEQ ID NO: 37739 - DNA, 30 bp, Artificial Sequence
  Synthetic oligonucleotide
acgaatggtcggtcatcgcactcgacaaaa

SEQ ID NO: 37740 - DNA, 30 bp, Artificial Sequence
  Synthetic oligonucleotide
cgattccgagaatcgattgcccaagcaaaa

SEQ ID NO: 37741 - DNA, 30 bp, Artificial Sequence
  Synthetic oligonucleotide
ggtagcatcagatcacaggggtcagcaaaa

SEQ ID NO: 37742 - DNA, 30 bp, Artificial Sequence
  Synthetic oligonucleotide
tacggtcagagtctggcagcacagtcaaaa

SEQ ID NO: 37743 - DNA, 30 bp, Artificial Sequence
  Synthetic oligonucleotide
tgggcgatggagggcgagacttcttcaaaa

SEQ ID NO: 37744 - DNA, 30 bp, Artificial Sequence
  Synthetic oligonucleotide
caagctgctcacggcgggagagcaagaaaa

SEQ ID NO: 37745 - DNA, 30 bp, Artificial Sequence
  Synthetic oligonucleotide
ggatgcgggtgttacgcaaagtggagaaaa

SEQ ID NO: 37746 - DNA, 30 bp, Artificial Sequence
  Synthetic oligonucleotide
ttgtagaatggaggtacataaggacgaaaa

SEQ ID NO: 37747 - DNA, 30 bp, Artificial Sequence
  Synthetic oligonucleotide
cttgagaatatgggggtagacattcgaaaa

SEQ ID NO: 37748 - DNA, 30 bp, Artificial Sequence
  Synthetic oligonucleotide
gagggtcacaagggctacaattactgaaaa

SEQ ID NO: 37749 - DNA, 30 bp, Artificial Sequence
  Synthetic oligonucleotide
tacaaggtgtggactcgtcaagaagtaaaa

SEQ ID NO: 37750 - DNA, 30 bp, Artificial Sequence
  Synthetic oligonucleotide
acgggtacatgtctaaagtttctcgtaaaa

SEQ ID NO: 37751 - DNA, 30 bp, Artificial Sequence
  Synthetic oligonucleotide
tgaccagaaagtaggataaccctacacaaa

SEQ ID NO: 37752 - DNA, 30 bp, Artificial Sequence
  Synthetic oligonucleotide
gcgaccaggcttgaaattcgcccgtacaaa

SEQ ID NO: 37753 - DNA, 30 bp, Artificial Sequence
  Synthetic oligonucleotide
tcaaaacatatactaacctgcagttacaaa

SEQ ID NO: 37754 - DNA, 30 bp, Artificial Sequence
  Synthetic oligonucleotide
acattggacgggacaatcgcagccaccaaa

SEQ ID NO: 37755 - DNA, 30 bp, Artificial Sequence
  Synthetic oligonucleotide
gcgaccgatatatggatgagaacaagcaaa

SEQ ID NO: 37756 - DNA, 30 bp, Artificial Sequence
  Synthetic oligonucleotide
ggcctccaatgcgaatcagtgcccagcaaa

SEQ ID NO: 37757 - DNA, 30 bp, Artificial Sequence
  Synthetic oligonucleotide
ctttgcaggagaggacacacgagcagcaaa

SEQ ID NO: 37758 - DNA, 30 bp, Artificial Sequence
  Synthetic oligonucleotide
taagacgatctggggatcggaaagggcaaa

SEQ ID NO: 37759 - DNA, 31 bp, Artificial Sequence
  Synthetic oligonucleotide
cgcgcgtgggacttcaaataacatgtgcaaa

SEQ ID NO: 37760 - DNA, 30 bp, Artificial Sequence
  Synthetic oligonucleotide
agagtcaagggggaaacacaggaaatcaaa

SEQ ID NO: 37761 - DNA, 30 bp, Artificial Sequence
  Synthetic oligonucleotide
gggtgtgctaacctaatacgccaactcaaa

SEQ ID NO: 37762 - DNA, 30 bp, Artificial Sequence
  Synthetic oligonucleotide
ccggaagtcaacagtgaaacgaggctcaaa

SEQ ID NO: 37763 - DNA, 30 bp, Artificial Sequence
  Synthetic oligonucleotide
aagcaaaggacaacagagttaggacagaaa

SEQ ID NO: 37764 - DNA, 30 bp, Artificial Sequence
  Synthetic oligonucleotide
taagggttcgggagggaactgagctagaaa

SEQ ID NO: 37765 - DNA, 30 bp, Artificial Sequence
  Synthetic oligonucleotide
aggagatatcagtgaaaccagtccccgaaa

SEQ ID NO: 37766 - DNA, 30 bp, Artificial Sequence
  Synthetic oligonucleotide
gaccatacacgctcaaggtgatgcccgaaa

SEQ ID NO: 37767 - DNA, 30 bp, Artificial Sequence
  Synthetic oligonucleotide
agggaacgtacccatacgtgccaagcgaaa

SEQ ID NO: 37768 - DNA, 30 bp, Artificial Sequence
  Synthetic oligonucleotide
aaggtgggaggtatgaggaagggcaggaaa

SEQ ID NO: 37769 - DNA, 30 bp, Artificial Sequence
  Synthetic oligonucleotide
taaagtaaaagtccgttcggtaggaggaaa

SEQ ID NO: 37770 - DNA, 30 bp, Artificial Sequence
  Synthetic oligonucleotide
actatgggacgagaacaaatacttaggaaa

SEQ ID NO: 37771 - DNA, 30 bp, Artificial Sequence
  Synthetic oligonucleotide
agcacatctcgtaaaataagcccgcggaaa

SEQ ID NO: 37772 - DNA, 30 bp, Artificial Sequence
  Synthetic oligonucleotide
cttcggagttaaggactagtgcctcggaaa

SEQ ID NO: 37773 - DNA, 30 bp, Artificial Sequence
  Synthetic oligonucleotide
tagccatcgaagacaggtacaactgggaaa

SEQ ID NO: 37774 - DNA, 30 bp, Artificial Sequence
  Synthetic oligonucleotide
agcgaaggtcggcggaaaatgagaatgaaa

SEQ ID NO: 37775 - DNA, 30 bp, Artificial Sequence
  Synthetic oligonucleotide
cggagtcacgtaagggatgcttgaatgaaa

SEQ ID NO: 37776 - DNA, 30 bp, Artificial Sequence
  Synthetic oligonucleotide
ctatgcgggagataagtcgaggtaatgaaa

SEQ ID NO: 37777 - DNA, 30 bp, Artificial Sequence
  Synthetic oligonucleotide
cgtctagaggagcttagcaaatccatgaaa

SEQ ID NO: 37778 - DNA, 30 bp, Artificial Sequence
  Synthetic oligonucleotide
ccatatctataagaatcaagcccgctgaaa

SEQ ID NO: 37779 - DNA, 30 bp, Artificial Sequence
  Synthetic oligonucleotide
aacgggttactggacgaaaagcggttgaaa

SEQ ID NO: 37780 - DNA, 30 bp, Artificial Sequence
  Synthetic oligonucleotide
gcgcaagacagcagcgaagtctaccataaa

SEQ ID NO: 37781 - DNA, 30 bp, Artificial Sequence
  Synthetic oligonucleotide
aggaaaggtgaaagcgcgcaatgagataaa

SEQ ID NO: 37782 - DNA, 30 bp, Artificial Sequence
  Synthetic oligonucleotide
cgaacctgagaggacaccggctcgactaaa

SEQ ID NO: 37783 - DNA, 30 bp, Artificial Sequence
  Synthetic oligonucleotide
gcgtaccgagagggcgcgcgcaaacctaaa

SEQ ID NO: 37784 - DNA, 30 bp, Artificial Sequence
  Synthetic oligonucleotide
gacccgaacatcacggggtgcgccgctaaa

SEQ ID NO: 37785 - DNA, 30 bp, Artificial Sequence
  Synthetic oligonucleotide
ccgtcggagcaaaatcaccggtctgctaaa

SEQ ID NO: 37786 - DNA, 30 bp, Artificial Sequence
  Synthetic oligonucleotide
agggaaccctgaccctcgcaaccttctaaa

SEQ ID NO: 37787 - DNA, 30 bp, Artificial Sequence
  Synthetic oligonucleotide
ccgtaagactgccagcgctaatcaagtaaa

SEQ ID NO: 37788 - DNA, 30 bp, Artificial Sequence
  Synthetic oligonucleotide
accgaagaacgataagtgcaaatccgtaaa

SEQ ID NO: 37789 - DNA, 30 bp, Artificial Sequence
  Synthetic oligonucleotide
gattggacggggggtcccaagagtcgtaaa

SEQ ID NO: 37790 - DNA, 30 bp, Artificial Sequence
  Synthetic oligonucleotide
ttgacacgttacccactagcgcttcgtaaa

SEQ ID NO: 37791 - DNA, 30 bp, Artificial Sequence
  Synthetic oligonucleotide
gattaacggcagggaggtatgctaggtaaa

SEQ ID NO: 37792 - DNA, 30 bp, Artificial Sequence
  Synthetic oligonucleotide
gcacaagcactaacataatacagtggtaaa

SEQ ID NO: 37793 - DNA, 30 bp, Artificial Sequence
  Synthetic oligonucleotide
tacggtctgcagaaggaatgtggttgtaaa

SEQ ID NO: 37794 - DNA, 30 bp, Artificial Sequence
  Synthetic oligonucleotide
aagcgagcaaaatcggcgcgtgtcgttaaa

SEQ ID NO: 37795 - DNA, 30 bp, Artificial Sequence
  Synthetic oligonucleotide
ttccgaataagtcaaatgtgcggcaaacaa

SEQ ID NO: 37796 - DNA, 30 bp, Artificial Sequence
  Synthetic oligonucleotide
ctacaagaaaggatgagggtatgtaaacaa

SEQ ID NO: 37797 - DNA, 36 bp, Artificial Sequence
  Synthetic oligonucleotide
agtggccttgcctgctgacaactaattttcgaacaa

SEQ ID NO: 37798 - DNA, 30 bp, Artificial Sequence
  Synthetic oligonucleotide
actaaggaatgagcgagagaagtttaacaa

SEQ ID NO: 37799 - DNA, 30 bp, Artificial Sequence
  Synthetic oligonucleotide
tcgatcacgatacgccccgtcctcacacaa

SEQ ID NO: 37800 - DNA, 30 bp, Artificial Sequence
  Synthetic oligonucleotide
tcgacagaggaggggtgtagttagacacaa

SEQ ID NO: 37801 - DNA, 30 bp, Artificial Sequence
  Synthetic oligonucleotide
ggaagtccttctatcatcaacagaccacaa

SEQ ID NO: 37802 - DNA, 30 bp, Artificial Sequence
  Synthetic oligonucleotide
taaactgccacgttgagtaataagccacaa

SEQ ID NO: 37803 - DNA, 30 bp, Artificial Sequence
  Synthetic oligonucleotide
agggcgccccgcgaagtgttaggtccacaa

SEQ ID NO: 37804 - DNA, 30 bp, Artificial Sequence
  Synthetic oligonucleotide
gatggtagaggcccagccgcaatagcacaa

SEQ ID NO: 37805 - DNA, 30 bp, Artificial Sequence
  Synthetic oligonucleotide
gggcatcgtcactggaacagccattcacaa

SEQ ID NO: 37806 - DNA, 30 bp, Artificial Sequence
  Synthetic oligonucleotide
acacaaagcaggacacctgttatttcacaa

SEQ ID NO: 37807 - DNA, 30 bp, Artificial Sequence
  Synthetic oligonucleotide
cactatggacgggtgatgagactgagacaa

SEQ ID NO: 37808 - DNA, 30 bp, Artificial Sequence
  Synthetic oligonucleotide
gcgcgtacggaaactaatgcaaaacgacaa

SEQ ID NO: 37809 - DNA, 30 bp, Artificial Sequence
  Synthetic oligonucleotide
caccggcgtgagacttggggggagggacaa

SEQ ID NO: 37810 - DNA, 30 bp, Artificial Sequence
  Synthetic oligonucleotide
ggtacctacaacttcctagagaggggacaa

SEQ ID NO: 37811 - DNA, 30 bp, Artificial Sequence
  Synthetic oligonucleotide
aagtagtaagtacaagtcccacagtgacaa

SEQ ID NO: 37812 - DNA, 30 bp, Artificial Sequence
  Synthetic oligonucleotide
actagacatacaatcataaatgagaaccaa

SEQ ID NO: 37813 - DNA, 30 bp, Artificial Sequence
  Synthetic oligonucleotide
tcggcagccctatcaacgaaattgtaccaa

SEQ ID NO: 37814 - DNA, 30 bp, Artificial Sequence
  Synthetic oligonucleotide
gcgcgttagtaggtaaagatgcgcacccaa

SEQ ID NO: 37815 - DNA, 30 bp, Artificial Sequence
  Synthetic oligonucleotide
tgcgcccgcaaacacaggtggacaggccaa

SEQ ID NO: 37816 - DNA, 30 bp, Artificial Sequence
  Synthetic oligonucleotide
cggcgagcggagcaaaaatgtacaatccaa

SEQ ID NO: 37817 - DNA, 30 bp, Artificial Sequence
  Synthetic oligonucleotide
gaatgtgcgaaccaccttggacagatccaa

SEQ ID NO: 37818 - DNA, 30 bp, Artificial Sequence
  Synthetic oligonucleotide
gggaccctcggtcacgtgagaactctccaa

SEQ ID NO: 37819 - DNA, 30 bp, Artificial Sequence
  Synthetic oligonucleotide
agggtagggataagaaaaaaaggattccaa

SEQ ID NO: 37820 - DNA, 30 bp, Artificial Sequence
  Synthetic oligonucleotide
gtcagaacctgaaaagtttatacaaagcaa

SEQ ID NO: 37821 - DNA, 30 bp, Artificial Sequence
  Synthetic oligonucleotide
gctccgacacctaaaagaggtacacagcaa

SEQ ID NO: 37822 - DNA, 30 bp, Artificial Sequence
  Synthetic oligonucleotide
aaccggtccagtagttgagcggcagagcaa

SEQ ID NO: 37823 - DNA, 30 bp, Artificial Sequence
  Synthetic oligonucleotide
agccgaggcggacattagacggaggagcaa

SEQ ID NO: 37824 - DNA, 30 bp, Artificial Sequence
  Synthetic oligonucleotide
aagctcggtggatggaggtagcgctagcaa

SEQ ID NO: 37825 - DNA, 30 bp, Artificial Sequence
  Synthetic oligonucleotide
tacgaaggtggcgtaagacaggcttagcaa

SEQ ID NO: 37826 - DNA, 30 bp, Artificial Sequence
  Synthetic oligonucleotide
gctgacatgaaactggtgttaagttagcaa

SEQ ID NO: 37827 - DNA, 30 bp, Artificial Sequence
  Synthetic oligonucleotide
ctggctacgttacataatgcgagcccgcaa

SEQ ID NO: 37828 - DNA, 30 bp, Artificial Sequence
  Synthetic oligonucleotide
cctgcacggaacccggtcgacaaggcgcaa

SEQ ID NO: 37829 - DNA, 30 bp, Artificial Sequence
  Synthetic oligonucleotide
gaagacacactatgacctaataaggcgcaa

SEQ ID NO: 37830 - DNA, 30 bp, Artificial Sequence
  Synthetic oligonucleotide
tgagtctggggcgacagacgagtatcgcaa

SEQ ID NO: 37831 - DNA, 30 bp, Artificial Sequence
  Synthetic oligonucleotide
accggaaggatcaaataaggaggttcgcaa

SEQ ID NO: 37832 - DNA, 30 bp, Artificial Sequence
  Synthetic oligonucleotide
cctaggggcgtcagcgacgcgaaaaggcaa

SEQ ID NO: 37833 - DNA, 30 bp, Artificial Sequence
  Synthetic oligonucleotide
cggcaggttactcgataacaggctgggcaa

SEQ ID NO: 37834 - DNA, 30 bp, Artificial Sequence
  Synthetic oligonucleotide
cgttggttaaggagtgtctcatacatgcaa

SEQ ID NO: 37835 - DNA, 30 bp, Artificial Sequence
  Synthetic oligonucleotide
ggtaagcatcgtaggcgagtggaactgcaa

SEQ ID NO: 37836 - DNA, 30 bp, Artificial Sequence
  Synthetic oligonucleotide
cagggaaatcggacggaacatcgagtgcaa

SEQ ID NO: 37837 - DNA, 30 bp, Artificial Sequence
  Synthetic oligonucleotide
ggccatcagggagggatgtgctcattgcaa

SEQ ID NO: 37838 - DNA, 30 bp, Artificial Sequence
  Synthetic oligonucleotide
cgtaccggaagtatatttaaagaaaatcaa

SEQ ID NO: 37839 - DNA, 30 bp, Artificial Sequence
  Synthetic oligonucleotide
gacacttaaacgagcggattgccacatcaa

SEQ ID NO: 37840 - DNA, 30 bp, Artificial Sequence
  Synthetic oligonucleotide
gtgtagtggactaattagtgtgcggatcaa

SEQ ID NO: 37841 - DNA, 30 bp, Artificial Sequence
  Synthetic oligonucleotide
cgaaaatcccagtcgtgctcgagttatcaa

SEQ ID NO: 37842 - DNA, 30 bp, Artificial Sequence
  Synthetic oligonucleotide
cttgataaaaagatagtggcaaccactcaa

SEQ ID NO: 37843 - DNA, 30 bp, Artificial Sequence
  Synthetic oligonucleotide
ggagcgcttaaaagatggttagccactcaa

SEQ ID NO: 37844 - DNA, 30 bp, Artificial Sequence
  Synthetic oligonucleotide
ccataggggtacttataaagcgaaagtcaa

SEQ ID NO: 37845 - DNA, 30 bp, Artificial Sequence
  Synthetic oligonucleotide
gcgtgtaatgtggcaaagagatgccgtcaa

SEQ ID NO: 37846 - DNA, 30 bp, Artificial Sequence
  Synthetic oligonucleotide
cctctccggcatggagacctccggcgtcaa

SEQ ID NO: 37847 - DNA, 30 bp, Artificial Sequence
  Synthetic oligonucleotide
acatgaagagagatgaattgggtaggtcaa

SEQ ID NO: 37848 - DNA, 30 bp, Artificial Sequence
  Synthetic oligonucleotide
cgcaattagaagcggaaagacaagggtcaa

SEQ ID NO: 37849 - DNA, 30 bp, Artificial Sequence
  Synthetic oligonucleotide
ctgcgcaagtaacgtaagtatcgtgttcaa

SEQ ID NO: 37850 - DNA, 30 bp, Artificial Sequence
  Synthetic oligonucleotide
cgaagcggcgctgaacccaacttaaaagaa

SEQ ID NO: 37851 - DNA, 30 bp, Artificial Sequence
  Synthetic oligonucleotide
taaacaaggatgatttataagggtaaagaa

SEQ ID NO: 37852 - DNA, 30 bp, Artificial Sequence
  Synthetic oligonucleotide
acatatactgcacaccgaccaccagaagaa

SEQ ID NO: 37853 - DNA, 30 bp, Artificial Sequence
  Synthetic oligonucleotide
cacgggagcaggccgactcactgtgaagaa

SEQ ID NO: 37854 - DNA, 30 bp, Artificial Sequence
  Synthetic oligonucleotide
tcagcaccccattactacataagcacagaa

SEQ ID NO: 37855 - DNA, 30 bp, Artificial Sequence
  Synthetic oligonucleotide
aggaatgggtgcacaatttaacatacagaa

SEQ ID NO: 37856 - DNA, 30 bp, Artificial Sequence
  Synthetic oligonucleotide
tgggctacgcagtacatacaacaggcagaa

SEQ ID NO: 37857 - DNA, 30 bp, Artificial Sequence
  Synthetic oligonucleotide
ggccacggaatactgttctagcatgcagaa

SEQ ID NO: 37858 - DNA, 30 bp, Artificial Sequence
  Synthetic oligonucleotide
aggctcaacaattatttgacactatcagaa

SEQ ID NO: 37859 - DNA, 30 bp, Artificial Sequence
  Synthetic oligonucleotide
atggtgggttctcgttagaagaggagagaa

SEQ ID NO: 37860 - DNA, 30 bp, Artificial Sequence
  Synthetic oligonucleotide
tgtgagagtggtgaacatagtagaggagaa

SEQ ID NO: 37861 - DNA, 30 bp, Artificial Sequence
  Synthetic oligonucleotide
ttgacaggcggtagccattagagcggagaa

SEQ ID NO: 37862 - DNA, 30 bp, Artificial Sequence
  Synthetic oligonucleotide
tgggagtcaattacccgacagctctgagaa

SEQ ID NO: 37863 - DNA, 30 bp, Artificial Sequence
  Synthetic oligonucleotide
acacgagatgtggaatgggacgaagtagaa

SEQ ID NO: 37864 - DNA, 30 bp, Artificial Sequence
  Synthetic oligonucleotide
gtggaggatgagtcattgctgcgaaacgaa

SEQ ID NO: 37865 - DNA, 30 bp, Artificial Sequence
  Synthetic oligonucleotide
acgaacacacgaaggttgtcacgtaacgaa

SEQ ID NO: 37866 - DNA, 30 bp, Artificial Sequence
  Synthetic oligonucleotide
acaggtatgatcgggatggccaagaccgaa

SEQ ID NO: 37867 - DNA, 30 bp, Artificial Sequence
  Synthetic oligonucleotide
aggtagagtcccaagcggaggtataccgaa

SEQ ID NO: 37868 - DNA, 30 bp, Artificial Sequence
  Synthetic oligonucleotide
gcaaatgaggcatatggtaaatgacccgaa

SEQ ID NO: 37869 - DNA, 30 bp, Artificial Sequence
  Synthetic oligonucleotide
gaacatggaaaacgaagtcatgtccccgaa

SEQ ID NO: 37870 - DNA, 30 bp, Artificial Sequence
  Synthetic oligonucleotide
tcacccggagtacgtgaaggtcgatccgaa

SEQ ID NO: 37871 - DNA, 30 bp, Artificial Sequence
  Synthetic oligonucleotide
ataaaaaacaggatcggcggggggtccgaa

SEQ ID NO: 37872 - DNA, 30 bp, Artificial Sequence
  Synthetic oligonucleotide
gggacaagccgccaaaaagatagttccgaa

SEQ ID NO: 37873 - DNA, 30 bp, Artificial Sequence
  Synthetic oligonucleotide
agcattcaaaagcaagatatcataagcgaa

SEQ ID NO: 37874 - DNA, 30 bp, Artificial Sequence
  Synthetic oligonucleotide
cggacaaccatctttatgacccagagcgaa

SEQ ID NO: 37875 - DNA, 31 bp, Artificial Sequence
  Synthetic oligonucleotide
ctcgacagtatcttagggagggccgagcgaa

SEQ ID NO: 37876 - DNA, 30 bp, Artificial Sequence
  Synthetic oligonucleotide
acaagaacggggacagaaaaccgttgcgaa

SEQ ID NO: 37877 - DNA, 30 bp, Artificial Sequence
  Synthetic oligonucleotide
tatgggattagacggaattggtaaaaggaa

SEQ ID NO: 37878 - DNA, 30 bp, Artificial Sequence
  Synthetic oligonucleotide
gggtcaatggaggacattgagccaaaggaa

SEQ ID NO: 37879 - DNA, 30 bp, Artificial Sequence
  Synthetic oligonucleotide
atgggaatgcttagaggtaagttagaggaa

SEQ ID NO: 37880 - DNA, 30 bp, Artificial Sequence
  Synthetic oligonucleotide
cgccagcgggaggagtgtggcttggaggaa

SEQ ID NO: 37881 - DNA, 30 bp, Artificial Sequence
  Synthetic oligonucleotide
ccggctagaggcgacgagtggttgtaggaa

SEQ ID NO: 37882 - DNA, 30 bp, Artificial Sequence
  Synthetic oligonucleotide
agtaacgatctcgcgatggatagatcggaa

SEQ ID NO: 37883 - DNA, 30 bp, Artificial Sequence
  Synthetic oligonucleotide
ccagtacagcgtacgagtcgtcgaagggaa

SEQ ID NO: 37884 - DNA, 30 bp, Artificial Sequence
  Synthetic oligonucleotide
caaccatataggagaacaagttggagggaa

SEQ ID NO: 37885 - DNA, 30 bp, Artificial Sequence
  Synthetic oligonucleotide
agttcacactcgaatcaatagccaggggaa

SEQ ID NO: 37886 - DNA, 30 bp, Artificial Sequence
  Synthetic oligonucleotide
ggtcaattcattagcaagtctagaggggaa

SEQ ID NO: 37887 - DNA, 31 bp, Artificial Sequence
  Synthetic oligonucleotide
caagttagtgtgtggactagcgtcaatggaa

SEQ ID NO: 37888 - DNA, 30 bp, Artificial Sequence
  Synthetic oligonucleotide
acaacgcgacaggtatacagtatcaatgaa

SEQ ID NO: 37889 - DNA, 30 bp, Artificial Sequence
  Synthetic oligonucleotide
aacgggggcgcgctgcgtccgctgaatgaa

SEQ ID NO: 37890 - DNA, 30 bp, Artificial Sequence
  Synthetic oligonucleotide
tagagaacacagggcctaattaataatgaa

SEQ ID NO: 37891 - DNA, 30 bp, Artificial Sequence
  Synthetic oligonucleotide
caactgccatgaaagccacggaatcatgaa

SEQ ID NO: 37892 - DNA, 30 bp, Artificial Sequence
  Synthetic oligonucleotide
ccaaagggtgtgattgggactagatatgaa

SEQ ID NO: 37893 - DNA, 30 bp, Artificial Sequence
  Synthetic oligonucleotide
ggatgcgctaatgatgaggctaactatgaa

SEQ ID NO: 37894 - DNA, 30 bp, Artificial Sequence
  Synthetic oligonucleotide
cgcacgtgctcgcgcaggccgaaaactgaa

SEQ ID NO: 37895 - DNA, 30 bp, Artificial Sequence
  Synthetic oligonucleotide
tggggctactcaagggggcaagtaactgaa

SEQ ID NO: 37896 - DNA, 30 bp, Artificial Sequence
  Synthetic oligonucleotide
ccaacctccctgcacagaacgatccctgaa

SEQ ID NO: 37897 - DNA, 30 bp, Artificial Sequence
  Synthetic oligonucleotide
aaatgcagcggtaacccgaaagaagctgaa

SEQ ID NO: 37898 - DNA, 30 bp, Artificial Sequence
  Synthetic oligonucleotide
cgggactgttaataaagaggggtttctgaa

SEQ ID NO: 37899 - DNA, 30 bp, Artificial Sequence
  Synthetic oligonucleotide
aagaacaggagttcggaaatattaagtgaa

SEQ ID NO: 37900 - DNA, 30 bp, Artificial Sequence
  Synthetic oligonucleotide
ttaacgtaggtcaatgaccgactgagtgaa

SEQ ID NO: 37901 - DNA, 30 bp, Artificial Sequence
  Synthetic oligonucleotide
cttacaggactggcaaagactagaggtgaa

SEQ ID NO: 37902 - DNA, 30 bp, Artificial Sequence
  Synthetic oligonucleotide
tcgattaacagagggataatgtctggtgaa

SEQ ID NO: 37903 - DNA, 30 bp, Artificial Sequence
  Synthetic oligonucleotide
atctatgctcaaaggaggaggcgaaaataa

SEQ ID NO: 37904 - DNA, 30 bp, Artificial Sequence
  Synthetic oligonucleotide
actagggcttaagtcggatgacgacaataa

SEQ ID NO: 37905 - DNA, 30 bp, Artificial Sequence
  Synthetic oligonucleotide
gagacggctgccagagaagatatccaataa

SEQ ID NO: 37906 - DNA, 30 bp, Artificial Sequence
  Synthetic oligonucleotide
aagacgggtccagaacgcgctcgggaataa

SEQ ID NO: 37907 - DNA, 30 bp, Artificial Sequence
  Synthetic oligonucleotide
tcatacgacacgtgccgggagcggtaataa

SEQ ID NO: 37908 - DNA, 30 bp, Artificial Sequence
  Synthetic oligonucleotide
cccgtccagcgaaggacaacctgcacataa

SEQ ID NO: 37909 - DNA, 30 bp, Artificial Sequence
  Synthetic oligonucleotide
cggatgtacttcacagaatactatgcataa

SEQ ID NO: 37910 - DNA, 30 bp, Artificial Sequence
  Synthetic oligonucleotide
cgcgcaaaggggcctaaaagacactcataa

SEQ ID NO: 37911 - DNA, 30 bp, Artificial Sequence
  Synthetic oligonucleotide
agagagacaacacattcagtgtcttcataa

SEQ ID NO: 37912 - DNA, 30 bp, Artificial Sequence
  Synthetic oligonucleotide
gctggaaaaacagggtcatactctagataa

SEQ ID NO: 37913 - DNA, 30 bp, Artificial Sequence
  Synthetic oligonucleotide
gcactaaggtaggcttgtaacaacggataa

SEQ ID NO: 37914 - DNA, 30 bp, Artificial Sequence
  Synthetic oligonucleotide
cgatatggccaacaaataagaccgggataa

SEQ ID NO: 37915 - DNA, 30 bp, Artificial Sequence
  Synthetic oligonucleotide
gtggagagttcccagcggtgcaactgataa

SEQ ID NO: 37916 - DNA, 30 bp, Artificial Sequence
  Synthetic oligonucleotide
tagccaggaaaacaatcaggagagtgataa

SEQ ID NO: 37917 - DNA, 30 bp, Artificial Sequence
  Synthetic oligonucleotide
tgtcgaggtggcggtctgctcatgatataa

SEQ ID NO: 37918 - DNA, 30 bp, Artificial Sequence
  Synthetic oligonucleotide
cggctcataacccaacggcaacaggtataa

SEQ ID NO: 37919 - DNA, 30 bp, Artificial Sequence
  Synthetic oligonucleotide
ggaagacaccactgcacatggtatgtataa

SEQ ID NO: 37920 - DNA, 30 bp, Artificial Sequence
  Synthetic oligonucleotide
ttcgcgaatggccctgaatgttccgactaa

SEQ ID NO: 37921 - DNA, 30 bp, Artificial Sequence
  Synthetic oligonucleotide
tgacactaaagagtcaacattttcgactaa

SEQ ID NO: 37922 - DNA, 30 bp, Artificial Sequence
  Synthetic oligonucleotide
caataaattcgctaaactggacaatactaa

SEQ ID NO: 37923 - DNA, 30 bp, Artificial Sequence
  Synthetic oligonucleotide
tggccatggtaaacagcaatggcatcctaa

SEQ ID NO: 37924 - DNA, 30 bp, Artificial Sequence
  Synthetic oligonucleotide
gacgagtgtccaactattaatgtaagctaa

SEQ ID NO: 37925 - DNA, 30 bp, Artificial Sequence
  Synthetic oligonucleotide
gaaacgaacatcccgatgtgtgtgagctaa

SEQ ID NO: 37926 - DNA, 30 bp, Artificial Sequence
  Synthetic oligonucleotide
gtttagagaacaggtggtgaagttagctaa

SEQ ID NO: 37927 - DNA, 30 bp, Artificial Sequence
  Synthetic oligonucleotide
gttcgagagaaaacttcgcaaaggcagtaa

SEQ ID NO: 37928 - DNA, 30 bp, Artificial Sequence
  Synthetic oligonucleotide
ggaatgaagcaagctgaacttccagagtaa

SEQ ID NO: 37929 - DNA, 30 bp, Artificial Sequence
  Synthetic oligonucleotide
catacagacggaaaaaagatcgactagtaa

SEQ ID NO: 37930 - DNA, 30 bp, Artificial Sequence
  Synthetic oligonucleotide
gacgggatgccaccgaaaacttggtagtaa

SEQ ID NO: 37931 - DNA, 30 bp, Artificial Sequence
  Synthetic oligonucleotide
cggcaaaggtagtaaagtgcatattagtaa

SEQ ID NO: 37932 - DNA, 30 bp, Artificial Sequence
  Synthetic oligonucleotide
ctacaagtgcgggagactgaatgagcgtaa

SEQ ID NO: 37933 - DNA, 30 bp, Artificial Sequence
  Synthetic oligonucleotide
cgtaaggatatccgcggtgttaaaaggtaa

SEQ ID NO: 37934 - DNA, 30 bp, Artificial Sequence
  Synthetic oligonucleotide
acgatcggcagacgcggaagctataggtaa

SEQ ID NO: 37935 - DNA, 30 bp, Artificial Sequence
  Synthetic oligonucleotide
acgacagacataagcacaacgggacggtaa

SEQ ID NO: 37936 - DNA, 30 bp, Artificial Sequence
  Synthetic oligonucleotide
aggagggcgagaacgaagtaatccgggtaa

SEQ ID NO: 37937 - DNA, 30 bp, Artificial Sequence
  Synthetic oligonucleotide
acacaccgaaaagcacaactatccatgtaa

SEQ ID NO: 37938 - DNA, 30 bp, Artificial Sequence
  Synthetic oligonucleotide
aggagtcccgagcagtgtcaatggctgtaa

SEQ ID NO: 37939 - DNA, 30 bp, Artificial Sequence
  Synthetic oligonucleotide
gtcttggaacagggagtgcgaagggtgtaa

SEQ ID NO: 37940 - DNA, 30 bp, Artificial Sequence
  Synthetic oligonucleotide
ggatagaacggatacagagcgtccaattaa

SEQ ID NO: 37941 - DNA, 30 bp, Artificial Sequence
  Synthetic oligonucleotide
aggtggcattacaacctgtatcaccattaa

SEQ ID NO: 37942 - DNA, 30 bp, Artificial Sequence
  Synthetic oligonucleotide
gcgtactcgaataatacaacgcgcgattaa

SEQ ID NO: 37943 - DNA, 30 bp, Artificial Sequence
  Synthetic oligonucleotide
acagtagaagagaacctagtgtgcacttaa

SEQ ID NO: 37944 - DNA, 30 bp, Artificial Sequence
  Synthetic oligonucleotide
tatgaacattacgagggacatgggctttaa

SEQ ID NO: 37945 - DNA, 30 bp, Artificial Sequence
  Synthetic oligonucleotide
atcggaacgaaacatgaaagtgaagtttaa

SEQ ID NO: 37946 - DNA, 30 bp, Artificial Sequence
  Synthetic oligonucleotide
gagatacggatgtatcgtaaagtcaaaaca

SEQ ID NO: 37947 - DNA, 30 bp, Artificial Sequence
  Synthetic oligonucleotide
acattgtaggctagcgttagagtccaaaca

SEQ ID NO: 37948 - DNA, 30 bp, Artificial Sequence
  Synthetic oligonucleotide
tacacggggggtacagaacttcggcaaaca

SEQ ID NO: 37949 - DNA, 30 bp, Artificial Sequence
  Synthetic oligonucleotide
agaagcaagataaggatccaaacataaaca

SEQ ID NO: 37950 - DNA, 30 bp, Artificial Sequence
  Synthetic oligonucleotide
acagagtagtcgtgaagtgtcacctaaaca

SEQ ID NO: 37951 - DNA, 30 bp, Artificial Sequence
  Synthetic oligonucleotide
taagattcggcacagtgacaggaatcaaca

SEQ ID NO: 37952 - DNA, 30 bp, Artificial Sequence
  Synthetic oligonucleotide
taggtcgctggcgttaatcagaggggaaca

SEQ ID NO: 37953 - DNA, 30 bp, Artificial Sequence
  Synthetic oligonucleotide
aagtcgtggaaagaagaaaactctggaaca

SEQ ID NO: 37954 - DNA, 30 bp, Artificial Sequence
  Synthetic oligonucleotide
tatctagactaaaagagaaaatgtggaaca

SEQ ID NO: 37955 - DNA, 30 bp, Artificial Sequence
  Synthetic oligonucleotide
cgtgcagcacggggtatctgtccctgaaca

SEQ ID NO: 37956 - DNA, 30 bp, Artificial Sequence
  Synthetic oligonucleotide
cttagctggactatatagacctgaataaca

SEQ ID NO: 37957 - DNA, 30 bp, Artificial Sequence
  Synthetic oligonucleotide
cgatcgctggtagacaagagcagactaaca

SEQ ID NO: 37958 - DNA, 30 bp, Artificial Sequence
  Synthetic oligonucleotide
cagcaaggtcacgtactaagatgcctaaca

SEQ ID NO: 37959 - DNA, 30 bp, Artificial Sequence
  Synthetic oligonucleotide
cctgtgtataaaataaggtacgatgtaaca

SEQ ID NO: 37960 - DNA, 30 bp, Artificial Sequence
  Synthetic oligonucleotide
acgtaaggtggaggcttggatcctgtaaca

SEQ ID NO: 37961 - DNA, 30 bp, Artificial Sequence
  Synthetic oligonucleotide
taacaaaactggcccgatatccacttaaca

SEQ ID NO: 37962 - DNA, 30 bp, Artificial Sequence
  Synthetic oligonucleotide
cgaggctaaagtcggaagaagcgtcacaca

SEQ ID NO: 37963 - DNA, 30 bp, Artificial Sequence
  Synthetic oligonucleotide
cagagtgcgctaacacaagttttgtccaca

SEQ ID NO: 37964 - DNA, 30 bp, Artificial Sequence
  Synthetic oligonucleotide
agcatcgtcacacgcaagtgggggagcaca

SEQ ID NO: 37965 - DNA, 30 bp, Artificial Sequence
  Synthetic oligonucleotide
ttgagagcgccgaaacaagccctaggcaca

SEQ ID NO: 37966 - DNA, 30 bp, Artificial Sequence
  Synthetic oligonucleotide
ccaaatcgtcacgcagagtccgcatgcaca

SEQ ID NO: 37967 - DNA, 30 bp, Artificial Sequence
  Synthetic oligonucleotide
attcacacagataacattagcatgctcaca

SEQ ID NO: 37968 - DNA, 30 bp, Artificial Sequence
  Synthetic oligonucleotide
acgccaagagatcatatgagtcagaagaca

SEQ ID NO: 37969 - DNA, 30 bp, Artificial Sequence
  Synthetic oligonucleotide
cgtgagtcagacatgaaaagaccccagaca

SEQ ID NO: 37970 - DNA, 30 bp, Artificial Sequence
  Synthetic oligonucleotide
agagggctcaagcgatatgatgggcagaca

SEQ ID NO: 37971 - DNA, 30 bp, Artificial Sequence
  Synthetic oligonucleotide
ttgcagtgatgatactgtgacagagagaca

SEQ ID NO: 37972 - DNA, 30 bp, Artificial Sequence
  Synthetic oligonucleotide
acgattacgatggccgagttttcggagaca

SEQ ID NO: 37973 - DNA, 30 bp, Artificial Sequence
  Synthetic oligonucleotide
ggagagagcgtagagatatagcgatagaca

SEQ ID NO: 37974 - DNA, 30 bp, Artificial Sequence
  Synthetic oligonucleotide
gacgacttgggacgccaggggcagtagaca

SEQ ID NO: 37975 - DNA, 30 bp, Artificial Sequence
  Synthetic oligonucleotide
cgatcaccttcgttaagtacaaacacgaca

SEQ ID NO: 37976 - DNA, 30 bp, Artificial Sequence
  Synthetic oligonucleotide
acgatcgaggcgtaggtcaggtgccggaca

SEQ ID NO: 37977 - DNA, 30 bp, Artificial Sequence
  Synthetic oligonucleotide
tgggatggatgacactcgctacagatgaca

SEQ ID NO: 37978 - DNA, 30 bp, Artificial Sequence
  Synthetic oligonucleotide
acaaaggtgcaagttggacatcggatgaca

SEQ ID NO: 37979 - DNA, 30 bp, Artificial Sequence
  Synthetic oligonucleotide
gccatacgactgagtagggagacagtgaca

SEQ ID NO: 37980 - DNA, 30 bp, Artificial Sequence
  Synthetic oligonucleotide
acgcggcgtattcaacagggaggagtgaca

SEQ ID NO: 37981 - DNA, 30 bp, Artificial Sequence
  Synthetic oligonucleotide
atgtacggcacgccaccgggacagttgaca

SEQ ID NO: 37982 - DNA, 30 bp, Artificial Sequence
  Synthetic oligonucleotide
ctggggaggatttgaggtatgacagataca

SEQ ID NO: 37983 - DNA, 30 bp, Artificial Sequence
  Synthetic oligonucleotide
tcatgagcgcggttggcaaagtgcgataca

SEQ ID NO: 37984 - DNA, 30 bp, Artificial Sequence
  Synthetic oligonucleotide
taggacagactggacgattaactggataca

SEQ ID NO: 37985 - DNA, 30 bp, Artificial Sequence
  Synthetic oligonucleotide
ccagttgggaccgcattacaaccgtataca

SEQ ID NO: 37986 - DNA, 30 bp, Artificial Sequence
  Synthetic oligonucleotide
catagattgcggacaggcaactcaactaca

SEQ ID NO: 37987 - DNA, 30 bp, Artificial Sequence
  Synthetic oligonucleotide
cgataggggtgagaactgctgaagcctaca

SEQ ID NO: 37988 - DNA, 30 bp, Artificial Sequence
  Synthetic oligonucleotide
aacggcgacgacatgaacctgtgccttaca

SEQ ID NO: 37989 - DNA, 30 bp, Artificial Sequence
  Synthetic oligonucleotide
acgcgtggcgcctcatcatggttgaaacca

SEQ ID NO: 37990 - DNA, 30 bp, Artificial Sequence
  Synthetic oligonucleotide
cgagatccccttaccaagaggggtaaacca

SEQ ID NO: 37991 - DNA, 30 bp, Artificial Sequence
  Synthetic oligonucleotide
gggactattaggcaggaaacaggccaacca

SEQ ID NO: 37992 - DNA, 30 bp, Artificial Sequence
  Synthetic oligonucleotide
aaccgcggaagggaagtacgtgcctaacca

SEQ ID NO: 37993 - DNA, 30 bp, Artificial Sequence
  Synthetic oligonucleotide
gcgaaagcactccggcgctagaggacacca

SEQ ID NO: 37994 - DNA, 30 bp, Artificial Sequence
  Synthetic oligonucleotide
gtgtaggtacgggtatcaggccatacacca

SEQ ID NO: 37995 - DNA, 30 bp, Artificial Sequence
  Synthetic oligonucleotide
tccgtaaatccctaaataatagtgccacca

SEQ ID NO: 37996 - DNA, 30 bp, Artificial Sequence
  Synthetic oligonucleotide
gtcattccaaagagagtaggaggagcacca

SEQ ID NO: 37997 - DNA, 30 bp, Artificial Sequence
  Synthetic oligonucleotide
ttgcccctatacattcgagtgctaagacca

SEQ ID NO: 37998 - DNA, 30 bp, Artificial Sequence
  Synthetic oligonucleotide
cgtagggaagacacatcggctgcgtgacca

SEQ ID NO: 37999 - DNA, 30 bp, Artificial Sequence
  Synthetic oligonucleotide
gagtcagtgtagctaggtgccaggtgacca

SEQ ID NO: 38000 - DNA, 30 bp, Artificial Sequence
  Synthetic oligonucleotide
caggacgagccaaagcggggtcaccaccca

SEQ ID NO: 38001 - DNA, 30 bp, Artificial Sequence
  Synthetic oligonucleotide
ctgagatatcgttacaaaaaacatcaccca

SEQ ID NO: 38002 - DNA, 30 bp, Artificial Sequence
  Synthetic oligonucleotide
agaaatactaacagaccgatgcgaacccca

SEQ ID NO: 38003 - DNA, 30 bp, Artificial Sequence
  Synthetic oligonucleotide
aagctgatcctccagaaagccagtccccca

SEQ ID NO: 38004 - DNA, 30 bp, Artificial Sequence
  Synthetic oligonucleotide
ggacagagggctttaaaaccgtgtgcccca

SEQ ID NO: 38005 - DNA, 30 bp, Artificial Sequence
  Synthetic oligonucleotide
cgccccagtaaatcctgcaaatgcatccca

SEQ ID NO: 38006 - DNA, 30 bp, Artificial Sequence
  Synthetic oligonucleotide
cagtaagacgtaaagataacaggccagcca

SEQ ID NO: 38007 - DNA, 30 bp, Artificial Sequence
  Synthetic oligonucleotide
cgtactcgccgccggcctgaactaacgcca

SEQ ID NO: 38008 - DNA, 30 bp, Artificial Sequence
  Synthetic oligonucleotide
atcgatggcggaattaagagaaatacgcca

SEQ ID NO: 38009 - DNA, 30 bp, Artificial Sequence
  Synthetic oligonucleotide
cgcacccacgtacaaaaatctacgccgcca

SEQ ID NO: 38010 - DNA, 30 bp, Artificial Sequence
  Synthetic oligonucleotide
ccgagatgagctgttcctaatacctcgcca

SEQ ID NO: 38011 - DNA, 30 bp, Artificial Sequence
  Synthetic oligonucleotide
agtcaagagtctacggccgaagcgaggcca

SEQ ID NO: 38012 - DNA, 30 bp, Artificial Sequence
  Synthetic oligonucleotide
cggtatgaggactaatcggatgtgaggcca

SEQ ID NO: 38013 - DNA, 30 bp, Artificial Sequence
  Synthetic oligonucleotide
gagacacagttagtcgaataggcccggcca

SEQ ID NO: 38014 - DNA, 30 bp, Artificial Sequence
  Synthetic oligonucleotide
caaagtgatcagcgaacttaaattcggcca

SEQ ID NO: 38015 - DNA, 30 bp, Artificial Sequence
  Synthetic oligonucleotide
ggagagacgattcagagtttcacatggcca

SEQ ID NO: 38016 - DNA, 30 bp, Artificial Sequence
  Synthetic oligonucleotide
gaaccgtcgaagccagacaggatggtgcca

SEQ ID NO: 38017 - DNA, 30 bp, Artificial Sequence
  Synthetic oligonucleotide
aagctagagtcacgaaatgaactattgcca

SEQ ID NO: 38018 - DNA, 30 bp, Artificial Sequence
  Synthetic oligonucleotide
aagtgctgataccgattagcgaaacatcca

SEQ ID NO: 38019 - DNA, 30 bp, Artificial Sequence
  Synthetic oligonucleotide
aagataaactggtgacattggttgcatcca

SEQ ID NO: 38020 - DNA, 30 bp, Artificial Sequence
  Synthetic oligonucleotide
gacgattattaactagccggagtcgctcca

SEQ ID NO: 38021 - DNA, 30 bp, Artificial Sequence
  Synthetic oligonucleotide
cgaggggaggccgttagttggaaagaagca

SEQ ID NO: 38022 - DNA, 30 bp, Artificial Sequence
  Synthetic oligonucleotide
cagtgacccacagcgtagatggcagaagca

SEQ ID NO: 38023 - DNA, 30 bp, Artificial Sequence
  Synthetic oligonucleotide
ggaaatatctagtcaactcccgagtaagca

SEQ ID NO: 38024 - DNA, 30 bp, Artificial Sequence
  Synthetic oligonucleotide
tccggtacatagcctaaacagtgcccagca

SEQ ID NO: 38025 - DNA, 30 bp, Artificial Sequence
  Synthetic oligonucleotide
ggagcgatagccgtgcaatgtgggtcagca

SEQ ID NO: 38026 - DNA, 30 bp, Artificial Sequence
  Synthetic oligonucleotide
gacataagaagagtccacatgctacgagca

SEQ ID NO: 38027 - DNA, 30 bp, Artificial Sequence
  Synthetic oligonucleotide
tcccagcgtcaatagagtccaccgcgagca

SEQ ID NO: 38028 - DNA, 30 bp, Artificial Sequence
  Synthetic oligonucleotide
ctgtaacggtgcgctagagactggcgagca

SEQ ID NO: 38029 - DNA, 30 bp, Artificial Sequence
  Synthetic oligonucleotide
cagccgtcttctttgaaccccagaggagca

SEQ ID NO: 38030 - DNA, 30 bp, Artificial Sequence
  Synthetic oligonucleotide
tgtcactaagctaaaagggaatgaggagca

SEQ ID NO: 38031 - DNA, 30 bp, Artificial Sequence
  Synthetic oligonucleotide
agcgaaggtgatggcttatgctcgtgagca

SEQ ID NO: 38032 - DNA, 30 bp, Artificial Sequence
  Synthetic oligonucleotide
tcagggagccttagggggtcacatatagca

SEQ ID NO: 38033 - DNA, 30 bp, Artificial Sequence
  Synthetic oligonucleotide
aaacacagcggatcggaaatcattatagca

SEQ ID NO: 38034 - DNA, 30 bp, Artificial Sequence
  Synthetic oligonucleotide
tatgaaactgaaagctcaacgcctttagca

SEQ ID NO: 38035 - DNA, 30 bp, Artificial Sequence
  Synthetic oligonucleotide
taacgcagggccagtgtagagtttaacgca

SEQ ID NO: 38036 - DNA, 30 bp, Artificial Sequence
  Synthetic oligonucleotide
aagccaacccagatgtgaaagctaaccgca

SEQ ID NO: 38037 - DNA, 30 bp, Artificial Sequence
  Synthetic oligonucleotide
ccttcaaatgaagctaacgggtgcgccgca

SEQ ID NO: 38038 - DNA, 30 bp, Artificial Sequence
  Synthetic oligonucleotide
cgctagtacggcaacacgagaaggtccgca

SEQ ID NO: 38039 - DNA, 30 bp, Artificial Sequence
  Synthetic oligonucleotide
tcacgttaagagcagatgaccgtacgcgca

SEQ ID NO: 38040 - DNA, 30 bp, Artificial Sequence
  Synthetic oligonucleotide
caaggggacgaaaaaaccagcgctatcgca

SEQ ID NO: 38041 - DNA, 30 bp, Artificial Sequence
  Synthetic oligonucleotide
ctggggatcagctgtatgcgggcaaaggca

SEQ ID NO: 38042 - DNA, 30 bp, Artificial Sequence
  Synthetic oligonucleotide
cacggatgtataacccaatcgtgtgaggca

SEQ ID NO: 38043 - DNA, 30 bp, Artificial Sequence
  Synthetic oligonucleotide
tacaaaataacctcacaaaagagaacggca

SEQ ID NO: 38044 - DNA, 30 bp, Artificial Sequence
  Synthetic oligonucleotide
aaatcggtaatcctagccaaaacagcggca

SEQ ID NO: 38045 - DNA, 30 bp, Artificial Sequence
  Synthetic oligonucleotide
gcttgtgaagacaggacagtatctagggca

SEQ ID NO: 38046 - DNA, 30 bp, Artificial Sequence
  Synthetic oligonucleotide
aggaccgaagataccgaggtaaagggggca

SEQ ID NO: 38047 - DNA, 30 bp, Artificial Sequence
  Synthetic oligonucleotide
tgagataggatgtatataaactgctgggca

SEQ ID NO: 38048 - DNA, 30 bp, Artificial Sequence
  Synthetic oligonucleotide
ggggcgtactggattccagtgtccatggca

SEQ ID NO: 38049 - DNA, 30 bp, Artificial Sequence
  Synthetic oligonucleotide
aggcaaaataacatggacaaccttgtggca

SEQ ID NO: 38050 - DNA, 30 bp, Artificial Sequence
  Synthetic oligonucleotide
aaggggaggccaagaccctgattattggca

SEQ ID NO: 38051 - DNA, 30 bp, Artificial Sequence
  Synthetic oligonucleotide
acatacgtaagcggggtctgggtggatgca

SEQ ID NO: 38052 - DNA, 30 bp, Artificial Sequence
  Synthetic oligonucleotide
taggacgtgacaaccactagaccagctgca

SEQ ID NO: 38053 - DNA, 30 bp, Artificial Sequence
  Synthetic oligonucleotide
cgtcttaagcgaaatctagcaaggtctgca

SEQ ID NO: 38054 - DNA, 30 bp, Artificial Sequence
  Synthetic oligonucleotide
agctaggtgggaatcaccatgtggagtgca

SEQ ID NO: 38055 - DNA, 30 bp, Artificial Sequence
  Synthetic oligonucleotide
cggaggcgtggtaatccaatcacacgtgca

SEQ ID NO: 38056 - DNA, 30 bp, Artificial Sequence
  Synthetic oligonucleotide
cgatctgatccgtacagaagatcctgtgca

SEQ ID NO: 38057 - DNA, 30 bp, Artificial Sequence
  Synthetic oligonucleotide
gcacctgcaaggaggcccaaagtgtgtgca

SEQ ID NO: 38058 - DNA, 30 bp, Artificial Sequence
  Synthetic oligonucleotide
aacaaatgacaggaaagggaaaaaattgca

SEQ ID NO: 38059 - DNA, 30 bp, Artificial Sequence
  Synthetic oligonucleotide
aatcgagggtcaggcagaacctagaaatca

SEQ ID NO: 38060 - DNA, 30 bp, Artificial Sequence
  Synthetic oligonucleotide
gtaaagggcaggaagttggcggctaaatca

SEQ ID NO: 38061 - DNA, 30 bp, Artificial Sequence
  Synthetic oligonucleotide
acaggccgctaccaaaaaacctggcaatca

SEQ ID NO: 38062 - DNA, 30 bp, Artificial Sequence
  Synthetic oligonucleotide
aggtcctgacagagggtaccgccggaatca

SEQ ID NO: 38063 - DNA, 30 bp, Artificial Sequence
  Synthetic oligonucleotide
acggccccacgcacagggcagggttaatca

SEQ ID NO: 38064 - DNA, 31 bp, Artificial Sequence
  Synthetic oligonucleotide
caagatgacagttagtagaccatacacatca

SEQ ID NO: 38065 - DNA, 30 bp, Artificial Sequence
  Synthetic oligonucleotide
gtctcacggtgatagagggaataaccatca

SEQ ID NO: 38066 - DNA, 30 bp, Artificial Sequence
  Synthetic oligonucleotide
atcgattagatcaagaacaagccgtcatca

SEQ ID NO: 38067 - DNA, 30 bp, Artificial Sequence
  Synthetic oligonucleotide
tcacaaccattggaagagtagggaggatca

SEQ ID NO: 38068 - DNA, 30 bp, Artificial Sequence
  Synthetic oligonucleotide
cacgcataaacactggacggttagggatca

SEQ ID NO: 38069 - DNA, 30 bp, Artificial Sequence
  Synthetic oligonucleotide
caaaccgaaagtagttaactgagcatatca

SEQ ID NO: 38070 - DNA, 30 bp, Artificial Sequence
  Synthetic oligonucleotide
tcacaccagaggaagaacacaggcttatca

SEQ ID NO: 38071 - DNA, 30 bp, Artificial Sequence
  Synthetic oligonucleotide
ccgaatatatgtaggccggagtgaaactca

SEQ ID NO: 38072 - DNA, 30 bp, Artificial Sequence
  Synthetic oligonucleotide
ccgtaaaagcagctacgaaaacccaactca

SEQ ID NO: 38073 - DNA, 30 bp, Artificial Sequence
  Synthetic oligonucleotide
cgactaatgggcgtagtcacagcacactca

SEQ ID NO: 38074 - DNA, 30 bp, Artificial Sequence
  Synthetic oligonucleotide
tgcggataggcgacaggcactacgtcctca

SEQ ID NO: 38075 - DNA, 30 bp, Artificial Sequence
  Synthetic oligonucleotide
agggcaagggaccctccgctactgcgctca

SEQ ID NO: 38076 - DNA, 30 bp, Artificial Sequence
  Synthetic oligonucleotide
caatggaccgaacgaatcagcgatcgctca

SEQ ID NO: 38077 - DNA, 30 bp, Artificial Sequence
  Synthetic oligonucleotide
acatactcagcttcgggaccacggggctca

SEQ ID NO: 38078 - DNA, 30 bp, Artificial Sequence
  Synthetic oligonucleotide
acacggagaaagggagctaggagtatctca

SEQ ID NO: 38079 - DNA, 30 bp, Artificial Sequence
  Synthetic oligonucleotide
ccgactggataaacacagtgtggcaagtca

SEQ ID NO: 38080 - DNA, 30 bp, Artificial Sequence
  Synthetic oligonucleotide
gatcgaataacagagtgtaagaacgagtca

SEQ ID NO: 38081 - DNA, 30 bp, Artificial Sequence
  Synthetic oligonucleotide
tctagtagtaggttaaagtgtcgctagtca

SEQ ID NO: 38082 - DNA, 30 bp, Artificial Sequence
  Synthetic oligonucleotide
cggagacacgatcattgactagtaccgtca

SEQ ID NO: 38083 - DNA, 30 bp, Artificial Sequence
  Synthetic oligonucleotide
cggttaggggagattatctcgatggcgtca

SEQ ID NO: 38084 - DNA, 30 bp, Artificial Sequence
  Synthetic oligonucleotide
taagagtcgcgattcgagagataaaggtca

SEQ ID NO: 38085 - DNA, 30 bp, Artificial Sequence
  Synthetic oligonucleotide
tcaggtaactgaagaactagatttgggtca

SEQ ID NO: 38086 - DNA, 30 bp, Artificial Sequence
  Synthetic oligonucleotide
cagagaaaaccacggcaacgttaactgtca

SEQ ID NO: 38087 - DNA, 30 bp, Artificial Sequence
  Synthetic oligonucleotide
acaggaaagtgaaattaacagtgtttgtca

SEQ ID NO: 38088 - DNA, 30 bp, Artificial Sequence
  Synthetic oligonucleotide
tgggggggcgcacgtcaaaggcacagttca

SEQ ID NO: 38089 - DNA, 30 bp, Artificial Sequence
  Synthetic oligonucleotide
aagtgctatacgggggatggaatcggttca

SEQ ID NO: 38090 - DNA, 30 bp, Artificial Sequence
  Synthetic oligonucleotide
gcaggcatgcgtaactttagggcaaaaaga

SEQ ID NO: 38091 - DNA, 30 bp, Artificial Sequence
  Synthetic oligonucleotide
gctaggaaaggaagccatagacctcaaaga

SEQ ID NO: 38092 - DNA, 30 bp, Artificial Sequence
  Synthetic oligonucleotide
gccgaaacatccaccagagcgctagaaaga

SEQ ID NO: 38093 - DNA, 30 bp, Artificial Sequence
  Synthetic oligonucleotide
ttagtaccgaagaaaaacttgctagaaaga

SEQ ID NO: 38094 - DNA, 30 bp, Artificial Sequence
  Synthetic oligonucleotide
ttatggggggaatagaaagggagtgaaaga

SEQ ID NO: 38095 - DNA, 30 bp, Artificial Sequence
  Synthetic oligonucleotide
gcgagcgcgcgcggattatttacaacaaga

SEQ ID NO: 38096 - DNA, 30 bp, Artificial Sequence
  Synthetic oligonucleotide
cggcgcaggtctaaagagggatttacaaga

SEQ ID NO: 38097 - DNA, 30 bp, Artificial Sequence
  Synthetic oligonucleotide
aagcgggtatcgtttagagttctgccaaga

SEQ ID NO: 38098 - DNA, 30 bp, Artificial Sequence
  Synthetic oligonucleotide
gaacgaagggcgcaaagacatactccaaga

SEQ ID NO: 38099 - DNA, 30 bp, Artificial Sequence
  Synthetic oligonucleotide
catggtgatataaaagtaatgaaggcaaga

SEQ ID NO: 38100 - DNA, 30 bp, Artificial Sequence
  Synthetic oligonucleotide
gtactgacggtacgagtgtctgaggcaaga

SEQ ID NO: 38101 - DNA, 30 bp, Artificial Sequence
  Synthetic oligonucleotide
actatgcgcaagagcatggcggtaagaaga

SEQ ID NO: 38102 - DNA, 30 bp, Artificial Sequence
  Synthetic oligonucleotide
cgaacaaggccggcacgctcccagagaaga

SEQ ID NO: 38103 - DNA, 30 bp, Artificial Sequence
  Synthetic oligonucleotide
taaggacctccctaaagtagccagagaaga

SEQ ID NO: 38104 - DNA, 30 bp, Artificial Sequence
  Synthetic oligonucleotide
gcatacgtgcgcgcatgccccgagagaaga

SEQ ID NO: 38105 - DNA, 30 bp, Artificial Sequence
  Synthetic oligonucleotide
ggataagaaggggtccgagcatcacgaaga

SEQ ID NO: 38106 - DNA, 30 bp, Artificial Sequence
  Synthetic oligonucleotide
tagcaggtcaataccaagaagatacgaaga

SEQ ID NO: 38107 - DNA, 30 bp, Artificial Sequence
  Synthetic oligonucleotide
cgatacgtttctgtcaggatacggcgaaga

SEQ ID NO: 38108 - DNA, 30 bp, Artificial Sequence
  Synthetic oligonucleotide
tcaagcgctgttaaggcatgtcgtcgaaga

SEQ ID NO: 38109 - DNA, 30 bp, Artificial Sequence
  Synthetic oligonucleotide
gtattgctaagggatgaggcctgaggaaga

SEQ ID NO: 38110 - DNA, 30 bp, Artificial Sequence
  Synthetic oligonucleotide
tgagctatagggacttgggattgaggaaga

SEQ ID NO: 38111 - DNA, 30 bp, Artificial Sequence
  Synthetic oligonucleotide
tgtcgggagcgctgggagagactgggaaga

SEQ ID NO: 38112 - DNA, 30 bp, Artificial Sequence
  Synthetic oligonucleotide
cgacggccgacgtgacggtaacgatgaaga

SEQ ID NO: 38113 - DNA, 30 bp, Artificial Sequence
  Synthetic oligonucleotide
cgagactaccaattttgacataagataaga

SEQ ID NO: 38114 - DNA, 30 bp, Artificial Sequence
  Synthetic oligonucleotide
ttgccgacaggtatagggtaatccgtaaga

SEQ ID NO: 38115 - DNA, 30 bp, Artificial Sequence
  Synthetic oligonucleotide
ggacacggccttgtggagacccgaaacaga

SEQ ID NO: 38116 - DNA, 30 bp, Artificial Sequence
  Synthetic oligonucleotide
ctgtatttagagcagggataccgcaacaga

SEQ ID NO: 38117 - DNA, 30 bp, Artificial Sequence
  Synthetic oligonucleotide
tctgattagatcatgatgagtcaccacaga

SEQ ID NO: 38118 - DNA, 30 bp, Artificial Sequence
  Synthetic oligonucleotide
catgcaggtcatccaataggcggccacaga

SEQ ID NO: 38119 - DNA, 30 bp, Artificial Sequence
  Synthetic oligonucleotide
actaatggctaaaatgcctatctctacaga

SEQ ID NO: 38120 - DNA, 30 bp, Artificial Sequence
  Synthetic oligonucleotide
agcgtgtctttcaaaaagaaagctaccaga

SEQ ID NO: 38121 - DNA, 30 bp, Artificial Sequence
  Synthetic oligonucleotide
ttcgagcgtacaatcacactcagagccaga

SEQ ID NO: 38122 - DNA, 30 bp, Artificial Sequence
  Synthetic oligonucleotide
tgggagtagtcaatattgagagacgccaga

SEQ ID NO: 38123 - DNA, 30 bp, Artificial Sequence
  Synthetic oligonucleotide
ggttcgagggtgaagaattgcagcgccaga

SEQ ID NO: 38124 - DNA, 30 bp, Artificial Sequence
  Synthetic oligonucleotide
cgctgtaaaccaacggtcgataagtccaga

SEQ ID NO: 38125 - DNA, 30 bp, Artificial Sequence
  Synthetic oligonucleotide
acaaagcctcagacgttcacggtgtccaga

SEQ ID NO: 38126 - DNA, 30 bp, Artificial Sequence
  Synthetic oligonucleotide
tggccaaatcgagcaatgatatagagcaga

SEQ ID NO: 38127 - DNA, 30 bp, Artificial Sequence
  Synthetic oligonucleotide
aacgaacgtaagccgttagggacaatcaga

SEQ ID NO: 38128 - DNA, 30 bp, Artificial Sequence
  Synthetic oligonucleotide
acgtaccaacgatgtggtccttcaatcaga

SEQ ID NO: 38129 - DNA, 30 bp, Artificial Sequence
  Synthetic oligonucleotide
aacaacgccccaagtagggtatcactcaga

SEQ ID NO: 38130 - DNA, 30 bp, Artificial Sequence
  Synthetic oligonucleotide
caccatccatgttagggcctaaaagtcaga

SEQ ID NO: 38131 - DNA, 30 bp, Artificial Sequence
  Synthetic oligonucleotide
gtgtaggggaaatgcaacgtggtcgtcaga

SEQ ID NO: 38132 - DNA, 30 bp, Artificial Sequence
  Synthetic oligonucleotide
gtcgtccgcgaagccgaacctacattcaga

SEQ ID NO: 38133 - DNA, 30 bp, Artificial Sequence
  Synthetic oligonucleotide
acatgatttagcgaaagctgccagaagaga

SEQ ID NO: 38134 - DNA, 30 bp, Artificial Sequence
  Synthetic oligonucleotide
cgcttaggagggtatattgatttacagaga

SEQ ID NO: 38135 - DNA, 30 bp, Artificial Sequence
  Synthetic oligonucleotide
taccgtaagatatcctataggtctcagaga

SEQ ID NO: 38136 - DNA, 30 bp, Artificial Sequence
  Synthetic oligonucleotide
cgctccaggtgaggggcgaagctagagaga

SEQ ID NO: 38137 - DNA, 30 bp, Artificial Sequence
  Synthetic oligonucleotide
taaatacgtggaaccaacagcaaggagaga

SEQ ID NO: 38138 - DNA, 30 bp, Artificial Sequence
  Synthetic oligonucleotide
cagcaatccgaacatgggggtcgggagaga

SEQ ID NO: 38139 - DNA, 30 bp, Artificial Sequence
  Synthetic oligonucleotide
cagtcacagatccgagcgtagggggagaga

SEQ ID NO: 38140 - DNA, 30 bp, Artificial Sequence
  Synthetic oligonucleotide
agaaaggaaatgactccgtcctcttagaga

SEQ ID NO: 38141 - DNA, 30 bp, Artificial Sequence
  Synthetic oligonucleotide
tgccttacttacagaggacagatttagaga

SEQ ID NO: 38142 - DNA, 30 bp, Artificial Sequence
  Synthetic oligonucleotide
ggtacaaacgcattgtaggatgaaacgaga

SEQ ID NO: 38143 - DNA, 30 bp, Artificial Sequence
  Synthetic oligonucleotide
atatcggtgtctaaaaggattcaaccgaga

SEQ ID NO: 38144 - DNA, 30 bp, Artificial Sequence
  Synthetic oligonucleotide
ctgaagaacgtgctgtgcttcggaccgaga

SEQ ID NO: 38145 - DNA, 30 bp, Artificial Sequence
  Synthetic oligonucleotide
gattgaaggcacactaaggctaactcgaga

SEQ ID NO: 38146 - DNA, 30 bp, Artificial Sequence
  Synthetic oligonucleotide
ggaggtgggcgagaagcgcattggtcgaga

SEQ ID NO: 38147 - DNA, 30 bp, Artificial Sequence
  Synthetic oligonucleotide
gacagtgtgacagacagggcggtaaggaga

SEQ ID NO: 38148 - DNA, 30 bp, Artificial Sequence
  Synthetic oligonucleotide
aggggttatcttaagggcgtaaagatgaga

SEQ ID NO: 38149 - DNA, 30 bp, Artificial Sequence
  Synthetic oligonucleotide
atgacgggataggaagactatccagtgaga

SEQ ID NO: 38150 - DNA, 30 bp, Artificial Sequence
  Synthetic oligonucleotide
gtggacaatcaaactaagaggggattgaga

SEQ ID NO: 38151 - DNA, 30 bp, Artificial Sequence
  Synthetic oligonucleotide
cccaagtagttcataccgaacccgcataga

SEQ ID NO: 38152 - DNA, 25 bp, Artificial Sequence
  Synthetic oligonucleotide
aaagggataacggggaaaagataga

SEQ ID NO: 38153 - DNA, 30 bp, Artificial Sequence
  Synthetic oligonucleotide
acgttttggacaccgaagggcacatataga

SEQ ID NO: 38154 - DNA, 30 bp, Artificial Sequence
  Synthetic oligonucleotide
actagagaaggggcaacggggccagctaga

SEQ ID NO: 38155 - DNA, 30 bp, Artificial Sequence
  Synthetic oligonucleotide
cgtctaaggccatttgaagttatgtctaga

SEQ ID NO: 38156 - DNA, 30 bp, Artificial Sequence
  Synthetic oligonucleotide
tgtccatagagaagttaaaaccaccttaga

SEQ ID NO: 38157 - DNA, 30 bp, Artificial Sequence
  Synthetic oligonucleotide
agggaattacacgtagatacgtaagttaga

SEQ ID NO: 38158 - DNA, 30 bp, Artificial Sequence
  Synthetic oligonucleotide
cgattttggatgtcggctaaaagaaaacga

SEQ ID NO: 38159 - DNA, 30 bp, Artificial Sequence
  Synthetic oligonucleotide
cgacctcgggcctagaacggggacaaacga

SEQ ID NO: 38160 - DNA, 30 bp, Artificial Sequence
  Synthetic oligonucleotide
ggaaccagggggtctgtataccgacaacga

SEQ ID NO: 38161 - DNA, 30 bp, Artificial Sequence
  Synthetic oligonucleotide
cgtaaagttgccaacaccgtgcgggaacga

SEQ ID NO: 38162 - DNA, 30 bp, Artificial Sequence
  Synthetic oligonucleotide
aggataaatcccttgcgctacgttccacga

SEQ ID NO: 38163 - DNA, 30 bp, Artificial Sequence
  Synthetic oligonucleotide
taagcactcaaacgctcaatatgagcacga

SEQ ID NO: 38164 - DNA, 30 bp, Artificial Sequence
  Synthetic oligonucleotide
ccaccatcctatacaggagacatacgacga

SEQ ID NO: 38165 - DNA, 30 bp, Artificial Sequence
  Synthetic oligonucleotide
tagaatgtgtaaaactgtgacggtcgacga

SEQ ID NO: 38166 - DNA, 30 bp, Artificial Sequence
  Synthetic oligonucleotide
cgtcagcggatataaggtaaccagtgacga

SEQ ID NO: 38167 - DNA, 30 bp, Artificial Sequence
  Synthetic oligonucleotide
cacgacaagagtcgacgataatagtgacga

SEQ ID NO: 38168 - DNA, 30 bp, Artificial Sequence
  Synthetic oligonucleotide
ctaaaaattgctcaacccatgctgatacga

SEQ ID NO: 38169 - DNA, 30 bp, Artificial Sequence
  Synthetic oligonucleotide
cgacgtggccaagcggttcctcgactacga

SEQ ID NO: 38170 - DNA, 30 bp, Artificial Sequence
  Synthetic oligonucleotide
ccacgtggagacagtagtcgggaaccccga

SEQ ID NO: 38171 - DNA, 30 bp, Artificial Sequence
  Synthetic oligonucleotide
cgacatgtgcctcgacaccgagtcccccga

SEQ ID NO: 38172 - DNA, 30 bp, Artificial Sequence
  Synthetic oligonucleotide
agcggcataacagcgcgtctgcacagccga

SEQ ID NO: 38173 - DNA, 30 bp, Artificial Sequence
  Synthetic oligonucleotide
tcactggcgcggtggagtcaaattcgccga

SEQ ID NO: 38174 - DNA, 30 bp, Artificial Sequence
  Synthetic oligonucleotide
gccgtgggccgtgaagaaagggtatgccga

SEQ ID NO: 38175 - DNA, 30 bp, Artificial Sequence
  Synthetic oligonucleotide
cacagaattactgtgtattgcgtctgccga

SEQ ID NO: 38176 - DNA, 30 bp, Artificial Sequence
  Synthetic oligonucleotide
cctcgagtacgagtaatttcccggtgccga

SEQ ID NO: 38177 - DNA, 30 bp, Artificial Sequence
  Synthetic oligonucleotide
tagtgtataagcgaacacgagaccatccga

SEQ ID NO: 38178 - DNA, 30 bp, Artificial Sequence
  Synthetic oligonucleotide
aataagcagtggtcgtcagcgccattccga

SEQ ID NO: 38179 - DNA, 30 bp, Artificial Sequence
  Synthetic oligonucleotide
acccgggcgtaaatgcgaacactcaagcga

SEQ ID NO: 38180 - DNA, 30 bp, Artificial Sequence
  Synthetic oligonucleotide
agaggcttattgtatcgaagtgaagagcga

SEQ ID NO: 38181 - DNA, 30 bp, Artificial Sequence
  Synthetic oligonucleotide
tgagatgacattattgaacatgcccggcga

SEQ ID NO: 38182 - DNA, 29 bp, Artificial Sequence
  Synthetic oligonucleotide
tcaaaaggattggtctgagcaaagggcga

SEQ ID NO: 38183 - DNA, 30 bp, Artificial Sequence
  Synthetic oligonucleotide
ggatgaaagtatatcgtacagtttgggcga

SEQ ID NO: 38184 - DNA, 30 bp, Artificial Sequence
  Synthetic oligonucleotide
agattgaaataaaaccgaattcgaatgcga

SEQ ID NO: 38185 - DNA, 30 bp, Artificial Sequence
  Synthetic oligonucleotide
gctggcaaaaaaatcatttacaacatgcga

SEQ ID NO: 38186 - DNA, 30 bp, Artificial Sequence
  Synthetic oligonucleotide
cgaccggagggactagggtttggcatgcga

SEQ ID NO: 38187 - DNA, 30 bp, Artificial Sequence
  Synthetic oligonucleotide
ggatcaacgagtggcagctccattatgcga

SEQ ID NO: 38188 - DNA, 30 bp, Artificial Sequence
  Synthetic oligonucleotide
gttacggagtaacttatacagtgcgtgcga

SEQ ID NO: 38189 - DNA, 30 bp, Artificial Sequence
  Synthetic oligonucleotide
agcggtagactgaatcctaggtatgtgcga

SEQ ID NO: 38190 - DNA, 30 bp, Artificial Sequence
  Synthetic oligonucleotide
gtgatggcaccaccgggactggcattgcga

SEQ ID NO: 38191 - DNA, 30 bp, Artificial Sequence
  Synthetic oligonucleotide
cgggtgttgggataggaagattgcttgcga

SEQ ID NO: 38192 - DNA, 30 bp, Artificial Sequence
  Synthetic oligonucleotide
caatcgggaacgggattgtcgaagactcga

SEQ ID NO: 38193 - DNA, 30 bp, Artificial Sequence
  Synthetic oligonucleotide
aaggagggtgcaggggagctgacagctcga

SEQ ID NO: 38194 - DNA, 30 bp, Artificial Sequence
  Synthetic oligonucleotide
cgacgtggtacatgaatcactgcagctcga

SEQ ID NO: 38195 - DNA, 30 bp, Artificial Sequence
  Synthetic oligonucleotide
cctacggtaaggcctagaatgctggctcga

SEQ ID NO: 38196 - DNA, 30 bp, Artificial Sequence
  Synthetic oligonucleotide
tacacaggacactggtcatacaatgctcga

SEQ ID NO: 38197 - DNA, 30 bp, Artificial Sequence
  Synthetic oligonucleotide
gaacgacaaaagcgaaaaatgggctctcga

SEQ ID NO: 38198 - DNA, 30 bp, Artificial Sequence
  Synthetic oligonucleotide
caacgttcccaatggatggaattctctcga

SEQ ID NO: 38199 - DNA, 30 bp, Artificial Sequence
  Synthetic oligonucleotide
gtcatataccgaaacagccacaccggtcga

SEQ ID NO: 38200 - DNA, 30 bp, Artificial Sequence
  Synthetic oligonucleotide
tccagtggggcctaagagatagtgggtcga

SEQ ID NO: 38201 - DNA, 30 bp, Artificial Sequence
  Synthetic oligonucleotide
ggaatagcttctagggcaaaacagaaagga

SEQ ID NO: 38202 - DNA, 30 bp, Artificial Sequence
  Synthetic oligonucleotide
gtgttagagtgttgcggagccaaacaagga

SEQ ID NO: 38203 - DNA, 30 bp, Artificial Sequence
  Synthetic oligonucleotide
atgggtcatacggacgaaggttagcaagga

SEQ ID NO: 38204 - DNA, 30 bp, Artificial Sequence
  Synthetic oligonucleotide
cagcaaggtagtataccatccgcgtaagga

SEQ ID NO: 38205 - DNA, 30 bp, Artificial Sequence
  Synthetic oligonucleotide
agtcaggggttttcagaaaggataacagga

SEQ ID NO: 38206 - DNA, 30 bp, Artificial Sequence
  Synthetic oligonucleotide
aatacggagaagtcatcattcagtacagga

SEQ ID NO: 38207 - DNA, 30 bp, Artificial Sequence
  Synthetic oligonucleotide
agagggatggaagcactcccaccaagagga

SEQ ID NO: 38208 - DNA, 30 bp, Artificial Sequence
  Synthetic oligonucleotide
gtgagcataccggctaaacacgcgagagga

SEQ ID NO: 38209 - DNA, 30 bp, Artificial Sequence
  Synthetic oligonucleotide
ggcaccgatcggaggatacaggatagagga

SEQ ID NO: 38210 - DNA, 30 bp, Artificial Sequence
  Synthetic oligonucleotide
gactgcaaaccagatgaagctcgccgagga

SEQ ID NO: 38211 - DNA, 30 bp, Artificial Sequence
  Synthetic oligonucleotide
agctacatgctgttgggaatccggcgagga

SEQ ID NO: 38212 - DNA, 30 bp, Artificial Sequence
  Synthetic oligonucleotide
ggctcaaaaacaagatatcggagatgagga

SEQ ID NO: 38213 - DNA, 30 bp, Artificial Sequence
  Synthetic oligonucleotide
tgggacggttcactgagcaatgcagtagga

SEQ ID NO: 38214 - DNA, 30 bp, Artificial Sequence
  Synthetic oligonucleotide
tcgtagtgcgaacctcatcggatcaacgga

SEQ ID NO: 38215 - DNA, 30 bp, Artificial Sequence
  Synthetic oligonucleotide
cacgacagtctgagattgtggcgccacgga

SEQ ID NO: 38216 - DNA, 30 bp, Artificial Sequence
  Synthetic oligonucleotide
agcggatggtaacaaggcccttcgcacgga

SEQ ID NO: 38217 - DNA, 30 bp, Artificial Sequence
  Synthetic oligonucleotide
cactacgtattaaccaaagggaggcacgga

SEQ ID NO: 38218 - DNA, 30 bp, Artificial Sequence
  Synthetic oligonucleotide
acaaactcatttgggcgtaaccccaccgga

SEQ ID NO: 38219 - DNA, 30 bp, Artificial Sequence
  Synthetic oligonucleotide
gtgctaacagtgcgggggcagggtcccgga

SEQ ID NO: 38220 - DNA, 30 bp, Artificial Sequence
  Synthetic oligonucleotide
cggaaaaaatgctaggtattggtatccgga

SEQ ID NO: 38221 - DNA, 30 bp, Artificial Sequence
  Synthetic oligonucleotide
taggtcgattagagatatgccaaccgcgga

SEQ ID NO: 38222 - DNA, 30 bp, Artificial Sequence
  Synthetic oligonucleotide
tggggaggtgtgtgactatccgtatgcgga

SEQ ID NO: 38223 - DNA, 30 bp, Artificial Sequence
  Synthetic oligonucleotide
ccaccgccatcaagggatagtgcgatcgga

SEQ ID NO: 38224 - DNA, 30 bp, Artificial Sequence
  Synthetic oligonucleotide
agcgaattcagtaagaagttagtggtcgga

SEQ ID NO: 38225 - DNA, 30 bp, Artificial Sequence
  Synthetic oligonucleotide
aggggcaagaagtggcaagactttgtcgga

SEQ ID NO: 38226 - DNA, 30 bp, Artificial Sequence
  Synthetic oligonucleotide
gaacgcccagcagctggtgtactaaaggga

SEQ ID NO: 38227 - DNA, 30 bp, Artificial Sequence
  Synthetic oligonucleotide
taacccaactgttgctcaatttggaaggga

SEQ ID NO: 38228 - DNA, 30 bp, Artificial Sequence
  Synthetic oligonucleotide
agtctagagaggtcagtcgaagctcaggga

SEQ ID NO: 38229 - DNA, 30 bp, Artificial Sequence
  Synthetic oligonucleotide
tggtaaaccgagcgcagccggtaagaggga

SEQ ID NO: 38230 - DNA, 30 bp, Artificial Sequence
  Synthetic oligonucleotide
ctcgaggcctagtgccgattctgggaggga

SEQ ID NO: 38231 - DNA, 30 bp, Artificial Sequence
  Synthetic oligonucleotide
gataagaaaatgcagtaaggctgtacggga

SEQ ID NO: 38232 - DNA, 30 bp, Artificial Sequence
  Synthetic oligonucleotide
cgttaataggcataggcagaccaatcggga

SEQ ID NO: 38233 - DNA, 30 bp, Artificial Sequence
  Synthetic oligonucleotide
tgcaggtctagtggaaaacacgagtcggga

SEQ ID NO: 38234 - DNA, 38 bp, Artificial Sequence
  Synthetic oligonucleotide
aagataatacattcatgatggtcggggatcggggggga

SEQ ID NO: 38235 - DNA, 40 bp, Artificial Sequence
  Synthetic oligonucleotide
aagttaatacattcatggtatggtcggggatcggggggga

SEQ ID NO: 38236 - DNA, 30 bp, Artificial Sequence
  Synthetic oligonucleotide
catcgaaagaatagcgggtactcttgggga

SEQ ID NO: 38237 - DNA, 30 bp, Artificial Sequence
  Synthetic oligonucleotide
ccggagttaaatcttgagcaaatgatggga

SEQ ID NO: 38238 - DNA, 30 bp, Artificial Sequence
  Synthetic oligonucleotide
aggtgaaacatcaggatagggtatatggga

SEQ ID NO: 38239 - DNA, 30 bp, Artificial Sequence
  Synthetic oligonucleotide
aaagagggctatagagtggtcctagtggga

SEQ ID NO: 38240 - DNA, 30 bp, Artificial Sequence
  Synthetic oligonucleotide
gagggtagagaaggttgagcgcccaatgga

SEQ ID NO: 38241 - DNA, 30 bp, Artificial Sequence
  Synthetic oligonucleotide
agaaagcgtgagcgtggaagcatcaatgga

SEQ ID NO: 38242 - DNA, 30 bp, Artificial Sequence
  Synthetic oligonucleotide
tttggaagccaaaagagcactaccgatgga

SEQ ID NO: 38243 - DNA, 30 bp, Artificial Sequence
  Synthetic oligonucleotide
ggacttgacaagcgttagtaaagctatgga

SEQ ID NO: 38244 - DNA, 30 bp, Artificial Sequence
  Synthetic oligonucleotide
aacggatacatggcggaaagaaccgctgga

SEQ ID NO: 38245 - DNA, 30 bp, Artificial Sequence
  Synthetic oligonucleotide
gtagcaggctggtaagaggccgacagtgga

SEQ ID NO: 38246 - DNA, 30 bp, Artificial Sequence
  Synthetic oligonucleotide
aaagagggacagtcgtcctacttaggtgga

SEQ ID NO: 38247 - DNA, 30 bp, Artificial Sequence
  Synthetic oligonucleotide
ggttagcgaatatcactcgcgcaggttgga

SEQ ID NO: 38248 - DNA, 30 bp, Artificial Sequence
  Synthetic oligonucleotide
taacaagaactagtcggccaggtcaaatga

SEQ ID NO: 38249 - DNA, 30 bp, Artificial Sequence
  Synthetic oligonucleotide
tgtggtaagcatatgatcggtctgaaatga

SEQ ID NO: 38250 - DNA, 30 bp, Artificial Sequence
  Synthetic oligonucleotide
ccgcgaagcgtgtgatgaatcgatgaatga

SEQ ID NO: 38251 - DNA, 30 bp, Artificial Sequence
  Synthetic oligonucleotide
taaccatgattaaggagctaggaataatga

SEQ ID NO: 38252 - DNA, 30 bp, Artificial Sequence
  Synthetic oligonucleotide
taccagaaagagtcaaatagcgaggcatga

SEQ ID NO: 38253 - DNA, 30 bp, Artificial Sequence
  Synthetic oligonucleotide
agactaggtcacctggaattcggatcatga

SEQ ID NO: 38254 - DNA, 30 bp, Artificial Sequence
  Synthetic oligonucleotide
tcacatctgcgaggaagagtttttcgatga

SEQ ID NO: 38255 - DNA, 30 bp, Artificial Sequence
  Synthetic oligonucleotide
cggacgcaaaccagaaaagggccggtatga

SEQ ID NO: 38256 - DNA, 30 bp, Artificial Sequence
  Synthetic oligonucleotide
aaccaatgaatgggcaaacgaataacctga

SEQ ID NO: 38257 - DNA, 30 bp, Artificial Sequence
  Synthetic oligonucleotide
cgcgcaaaatgatcgggttcgggaagctga

SEQ ID NO: 38258 - DNA, 30 bp, Artificial Sequence
  Synthetic oligonucleotide
agtgaagggcttgagtgggtaacgtgctga

SEQ ID NO: 38259 - DNA, 30 bp, Artificial Sequence
  Synthetic oligonucleotide
aaggttgaaggatgttaaattgaaatctga

SEQ ID NO: 38260 - DNA, 30 bp, Artificial Sequence
  Synthetic oligonucleotide
ctaaaacagcctcgtagaataagaatctga

SEQ ID NO: 38261 - DNA, 30 bp, Artificial Sequence
  Synthetic oligonucleotide
acggaagcgtcgacgttcatggggatctga

SEQ ID NO: 38262 - DNA, 30 bp, Artificial Sequence
  Synthetic oligonucleotide
ggtgttcgatactaaaatctagcagtctga

SEQ ID NO: 38263 - DNA, 30 bp, Artificial Sequence
  Synthetic oligonucleotide
accgggacagaagcgagctacacccagtga

SEQ ID NO: 38264 - DNA, 30 bp, Artificial Sequence
  Synthetic oligonucleotide
acgtagaaatataatgccccgacagagtga

SEQ ID NO: 38265 - DNA, 30 bp, Artificial Sequence
  Synthetic oligonucleotide
aaaggcaccaggtgttaatccttagagtga

SEQ ID NO: 38266 - DNA, 30 bp, Artificial Sequence
  Synthetic oligonucleotide
cgtcaacgcgctcagatttgtaatgagtga

SEQ ID NO: 38267 - DNA, 30 bp, Artificial Sequence
  Synthetic oligonucleotide
ttgctaaaacatcacggggatcgatagtga

SEQ ID NO: 38268 - DNA, 30 bp, Artificial Sequence
  Synthetic oligonucleotide
ctaaagaaaacaaggatgtaactttagtga

SEQ ID NO: 38269 - DNA, 30 bp, Artificial Sequence
  Synthetic oligonucleotide
agagggtgccagggaaaggggacaacgtga

SEQ ID NO: 38270 - DNA, 30 bp, Artificial Sequence
  Synthetic oligonucleotide
gcgggttagagtaaagtttccacaccgtga

SEQ ID NO: 38271 - DNA, 30 bp, Artificial Sequence
  Synthetic oligonucleotide
agagtagtcgggaatgaccacaatccgtga

SEQ ID NO: 38272 - DNA, 30 bp, Artificial Sequence
  Synthetic oligonucleotide
ctgactgcaaaactacccagctcggcgtga

SEQ ID NO: 38273 - DNA, 30 bp, Artificial Sequence
  Synthetic oligonucleotide
gcggggccaatggatgttgccatctcgtga

SEQ ID NO: 38274 - DNA, 30 bp, Artificial Sequence
  Synthetic oligonucleotide
cggcgcaatgttcttccatatccagggtga

SEQ ID NO: 38275 - DNA, 30 bp, Artificial Sequence
  Synthetic oligonucleotide
ggcaagcgtagacacaacagtctagggtga

SEQ ID NO: 38276 - DNA, 30 bp, Artificial Sequence
  Synthetic oligonucleotide
tgagcaccaagcggttcgagagagaattga

SEQ ID NO: 38277 - DNA, 30 bp, Artificial Sequence
  Synthetic oligonucleotide
ttacgagcaaggtttcggatcaagcattga

SEQ ID NO: 38278 - DNA, 30 bp, Artificial Sequence
  Synthetic oligonucleotide
aaccagacaaagtgacagccaatagcttga

SEQ ID NO: 38279 - DNA, 30 bp, Artificial Sequence
  Synthetic oligonucleotide
aacatcagggatagagagagaatagcttga

SEQ ID NO: 38280 - DNA, 30 bp, Artificial Sequence
  Synthetic oligonucleotide
aggctaagaaaactgtgagatgtgtcttga

SEQ ID NO: 38281 - DNA, 30 bp, Artificial Sequence
  Synthetic oligonucleotide
gaacgcggagtaagacattccaacagttga

SEQ ID NO: 38282 - DNA, 30 bp, Artificial Sequence
  Synthetic oligonucleotide
caggtaaaaagacgacacttctgccgttga

SEQ ID NO: 38283 - DNA, 30 bp, Artificial Sequence
  Synthetic oligonucleotide
aagagcgataacactaccggacacatttga

SEQ ID NO: 38284 - DNA, 30 bp, Artificial Sequence
  Synthetic oligonucleotide
aagatgatatacgagggaagataagtttga

SEQ ID NO: 38285 - DNA, 30 bp, Artificial Sequence
  Synthetic oligonucleotide
agggggaaatagggttgaagtctcgtttga

SEQ ID NO: 38286 - DNA, 30 bp, Artificial Sequence
  Synthetic oligonucleotide
cgaataaacagtcgttgattgaccaaaata

SEQ ID NO: 38287 - DNA, 30 bp, Artificial Sequence
  Synthetic oligonucleotide
cccatcaagtggaacattgcgcgataaata

SEQ ID NO: 38288 - DNA, 30 bp, Artificial Sequence
  Synthetic oligonucleotide
cgaaactcaggccgtaaaaacggtacaata

SEQ ID NO: 38289 - DNA, 30 bp, Artificial Sequence
  Synthetic oligonucleotide
gctaaagacgatgattatacaatcggaata

SEQ ID NO: 38290 - DNA, 30 bp, Artificial Sequence
  Synthetic oligonucleotide
tgagcgaacgtaaaatgagagtcatgaata

SEQ ID NO: 38291 - DNA, 30 bp, Artificial Sequence
  Synthetic oligonucleotide
cgtggagattcatgtgctaatagactaata

SEQ ID NO: 38292 - DNA, 30 bp, Artificial Sequence
  Synthetic oligonucleotide
aaacgatagaaagacatggctggtgtaata

SEQ ID NO: 38293 - DNA, 30 bp, Artificial Sequence
  Synthetic oligonucleotide
acaaggtagggtgccgggagtccaaacata

SEQ ID NO: 38294 - DNA, 30 bp, Artificial Sequence
  Synthetic oligonucleotide
cgcaaatccaacccaatgtggagccacata

SEQ ID NO: 38295 - DNA, 30 bp, Artificial Sequence
  Synthetic oligonucleotide
gtgcacgggagggttcgcgaaggctacata

SEQ ID NO: 38296 - DNA, 30 bp, Artificial Sequence
  Synthetic oligonucleotide
tggttctagacacagggaggaagcggcata

SEQ ID NO: 38297 - DNA, 30 bp, Artificial Sequence
  Synthetic oligonucleotide
tggcatgggtggataacgaatgacgtcata

SEQ ID NO: 38298 - DNA, 31 bp, Artificial Sequence
  Synthetic oligonucleotide
atgatcaccaactacacgactgagattcata

SEQ ID NO: 38299 - DNA, 30 bp, Artificial Sequence
  Synthetic oligonucleotide
cagggatgagcctagtaagatcctcagata

SEQ ID NO: 38300 - DNA, 30 bp, Artificial Sequence
  Synthetic oligonucleotide
tgagcaactaggggtacgatatacacgata

SEQ ID NO: 38301 - DNA, 30 bp, Artificial Sequence
  Synthetic oligonucleotide
cataggaaagatttcgaaccacttccgata

SEQ ID NO: 38302 - DNA, 30 bp, Artificial Sequence
  Synthetic oligonucleotide
tcatccggtggtacttctgaggtcgcgata

SEQ ID NO: 38303 - DNA, 30 bp, Artificial Sequence
  Synthetic oligonucleotide
cctcggacagcacgacagagctgatcgata

SEQ ID NO: 38304 - DNA, 30 bp, Artificial Sequence
  Synthetic oligonucleotide
ccagtggtagaaccgttaaatccgtcgata

SEQ ID NO: 38305 - DNA, 29 bp, Artificial Sequence
  Synthetic oligonucleotide
cacatctataaccacacgaagattcgata

SEQ ID NO: 38306 - DNA, 30 bp, Artificial Sequence
  Synthetic oligonucleotide
ctaggatctaggcgagtaactccagggata

SEQ ID NO: 38307 - DNA, 30 bp, Artificial Sequence
  Synthetic oligonucleotide
tgacatgggcactcagaaggctagtggata

SEQ ID NO: 38308 - DNA, 31 bp, Artificial Sequence
  Synthetic oligonucleotide
cgtagtacaggcaggggacttaggactgata

SEQ ID NO: 38309 - DNA, 30 bp, Artificial Sequence
  Synthetic oligonucleotide
gtggcgcaccgaataacaggaaagagtata

SEQ ID NO: 38310 - DNA, 30 bp, Artificial Sequence
  Synthetic oligonucleotide
tgggagggtggcactattgaaggtagtata

SEQ ID NO: 38311 - DNA, 30 bp, Artificial Sequence
  Synthetic oligonucleotide
agtgagcaaagcacgctaccgccccgtata

SEQ ID NO: 38312 - DNA, 30 bp, Artificial Sequence
  Synthetic oligonucleotide
tgaacgtggcggcacatcttgattcgtata

SEQ ID NO: 38313 - DNA, 30 bp, Artificial Sequence
  Synthetic oligonucleotide
acggtacgtctggaaagtgaagggtgtata

SEQ ID NO: 38314 - DNA, 30 bp, Artificial Sequence
  Synthetic oligonucleotide
taaggcaagtggttcatcgatcattgtata

SEQ ID NO: 38315 - DNA, 30 bp, Artificial Sequence
  Synthetic oligonucleotide
ggccagtatggtgcgtagaaaggacttata

SEQ ID NO: 38316 - DNA, 30 bp, Artificial Sequence
  Synthetic oligonucleotide
agcgcaagtggattggttgaaggtcttata

SEQ ID NO: 38317 - DNA, 30 bp, Artificial Sequence
  Synthetic oligonucleotide
acgggttcaaaggaatgaggaaaccaacta

SEQ ID NO: 38318 - DNA, 30 bp, Artificial Sequence
  Synthetic oligonucleotide
ggcaagcataccagacacttcgagcaacta

SEQ ID NO: 38319 - DNA, 30 bp, Artificial Sequence
  Synthetic oligonucleotide
gcgaggagtgcgcaagcgcatagagaacta

SEQ ID NO: 38320 - DNA, 30 bp, Artificial Sequence
  Synthetic oligonucleotide
catgatagtaagggggacaaggtgtaacta

SEQ ID NO: 38321 - DNA, 30 bp, Artificial Sequence
  Synthetic oligonucleotide
aggtactcaacgtatatagaactgccacta

SEQ ID NO: 38322 - DNA, 30 bp, Artificial Sequence
  Synthetic oligonucleotide
agagatgtgatgcaccacggggcgagacta

SEQ ID NO: 38323 - DNA, 30 bp, Artificial Sequence
  Synthetic oligonucleotide
gtaggaggttggacacttaattatcgacta

SEQ ID NO: 38324 - DNA, 30 bp, Artificial Sequence
  Synthetic oligonucleotide
agtgcactagtggaggggagtgctcgacta

SEQ ID NO: 38325 - DNA, 30 bp, Artificial Sequence
  Synthetic oligonucleotide
tccgaggaacgatggtaagccacgggacta

SEQ ID NO: 38326 - DNA, 30 bp, Artificial Sequence
  Synthetic oligonucleotide
atgagtacggagggtatatatacgtgacta

SEQ ID NO: 38327 - DNA, 30 bp, Artificial Sequence
  Synthetic oligonucleotide
acaagatagattagggagccacaagtacta

SEQ ID NO: 38328 - DNA, 30 bp, Artificial Sequence
  Synthetic oligonucleotide
gtgtgaagtcgaggtattggccaagtacta

SEQ ID NO: 38329 - DNA, 30 bp, Artificial Sequence
  Synthetic oligonucleotide
ccgaagatgcgtggaggaaattatgaccta

SEQ ID NO: 38330 - DNA, 30 bp, Artificial Sequence
  Synthetic oligonucleotide
cgtacgcggggcaatgtgtttagttcccta

SEQ ID NO: 38331 - DNA, 30 bp, Artificial Sequence
  Synthetic oligonucleotide
gtgggagcggggtcgaaatttagcggccta

SEQ ID NO: 38332 - DNA, 30 bp, Artificial Sequence
  Synthetic oligonucleotide
catgcctaatgcaagggtcataagtgccta

SEQ ID NO: 38333 - DNA, 30 bp, Artificial Sequence
  Synthetic oligonucleotide
cggaaacaatcttcactggtaactatccta

SEQ ID NO: 38334 - DNA, 30 bp, Artificial Sequence
  Synthetic oligonucleotide
tcccggtacacaaaatcggagtcccagcta

SEQ ID NO: 38335 - DNA, 30 bp, Artificial Sequence
  Synthetic oligonucleotide
aagctcaggttaggtaggggatcaacgcta

SEQ ID NO: 38336 - DNA, 30 bp, Artificial Sequence
  Synthetic oligonucleotide
atctacgatatccagtcgtaacgaacgcta

SEQ ID NO: 38337 - DNA, 30 bp, Artificial Sequence
  Synthetic oligonucleotide
acgacattgtagtgtgagttacaagcgcta

SEQ ID NO: 38338 - DNA, 30 bp, Artificial Sequence
  Synthetic oligonucleotide
tgaaggtggtcagatggataaggcgcgcta

SEQ ID NO: 38339 - DNA, 30 bp, Artificial Sequence
  Synthetic oligonucleotide
ggatgggcgagttaaaaggagtaggcgcta

SEQ ID NO: 38340 - DNA, 30 bp, Artificial Sequence
  Synthetic oligonucleotide
ggactaggggtactgcaaaacgagcggcta

SEQ ID NO: 38341 - DNA, 30 bp, Artificial Sequence
  Synthetic oligonucleotide
ccgactaaacgtaatcgtctggaagggcta

SEQ ID NO: 38342 - DNA, 30 bp, Artificial Sequence
  Synthetic oligonucleotide
agtgcccaggtgactaacgatcaacatcta

SEQ ID NO: 38343 - DNA, 30 bp, Artificial Sequence
  Synthetic oligonucleotide
cataagaaccaggtagaacaaaagagtcta

SEQ ID NO: 38344 - DNA, 30 bp, Artificial Sequence
  Synthetic oligonucleotide
cgaaacgtcccggtagtagtgacaggtcta

SEQ ID NO: 38345 - DNA, 30 bp, Artificial Sequence
  Synthetic oligonucleotide
ggaaggaaaccggaagcgtagtgatgtcta

SEQ ID NO: 38346 - DNA, 30 bp, Artificial Sequence
  Synthetic oligonucleotide
agagataacgttgaactcgagttagttcta

SEQ ID NO: 38347 - DNA, 30 bp, Artificial Sequence
  Synthetic oligonucleotide
ctagcactgcggtgatacatggtagaagta

SEQ ID NO: 38348 - DNA, 30 bp, Artificial Sequence
  Synthetic oligonucleotide
acgtgcaggtcagtgggactatgggaagta

SEQ ID NO: 38349 - DNA, 31 bp, Artificial Sequence
  Synthetic oligonucleotide
cgaaattaaagtcgacgagaatgggtaagta

SEQ ID NO: 38350 - DNA, 30 bp, Artificial Sequence
  Synthetic oligonucleotide
cgggaagccaggtccgtatgcaatccagta

SEQ ID NO: 38351 - DNA, 30 bp, Artificial Sequence
  Synthetic oligonucleotide
ctacaccgtgacaagggcactaccagagta

SEQ ID NO: 38352 - DNA, 30 bp, Artificial Sequence
  Synthetic oligonucleotide
cgtataaaagactctctgaagggcagagta

SEQ ID NO: 38353 - DNA, 30 bp, Artificial Sequence
  Synthetic oligonucleotide
ctctaaagtgacagtgaaagtattagagta

SEQ ID NO: 38354 - DNA, 30 bp, Artificial Sequence
  Synthetic oligonucleotide
ccagccggacaggggttattcagccgagta

SEQ ID NO: 38355 - DNA, 30 bp, Artificial Sequence
  Synthetic oligonucleotide
cggcacgtaggtagttatgctaatcgagta

SEQ ID NO: 38356 - DNA, 30 bp, Artificial Sequence
  Synthetic oligonucleotide
caatcctgcacaatttagggtactcgagta

SEQ ID NO: 38357 - DNA, 30 bp, Artificial Sequence
  Synthetic oligonucleotide
gatctacaagaggtaaatcgagtatgagta

SEQ ID NO: 38358 - DNA, 30 bp, Artificial Sequence
  Synthetic oligonucleotide
gggcactcaacatgccacatcaacatagta

SEQ ID NO: 38359 - DNA, 30 bp, Artificial Sequence
  Synthetic oligonucleotide
atggggcaccggccatgcaacgctatagta

SEQ ID NO: 38360 - DNA, 30 bp, Artificial Sequence
  Synthetic oligonucleotide
ggagcggcacactaaatccgtaaaaacgta

SEQ ID NO: 38361 - DNA, 30 bp, Artificial Sequence
  Synthetic oligonucleotide
gggatactgaaagcgcgaaccttcaacgta

SEQ ID NO: 38362 - DNA, 30 bp, Artificial Sequence
  Synthetic oligonucleotide
gggagtaagggttgcatgtgttaccacgta

SEQ ID NO: 38363 - DNA, 30 bp, Artificial Sequence
  Synthetic oligonucleotide
agttaaagtaaaatcgcggccgggcacgta

SEQ ID NO: 38364 - DNA, 30 bp, Artificial Sequence
  Synthetic oligonucleotide
cagaagaggccggaaaaatgacgtcacgta

SEQ ID NO: 38365 - DNA, 30 bp, Artificial Sequence
  Synthetic oligonucleotide
acacgacgaggattgtaagccgactacgta

SEQ ID NO: 38366 - DNA, 30 bp, Artificial Sequence
  Synthetic oligonucleotide
gaagagaagactgaagtgcaaaggtacgta

SEQ ID NO: 38367 - DNA, 30 bp, Artificial Sequence
  Synthetic oligonucleotide
catcgaggtctacgacgatcacggtacgta

SEQ ID NO: 38368 - DNA, 30 bp, Artificial Sequence
  Synthetic oligonucleotide
ctgatgcgatcggaagtgacacgacccgta

SEQ ID NO: 38369 - DNA, 29 bp, Artificial Sequence
  Synthetic oligonucleotide
atacgtgcgtgggagagatttaacgcgta

SEQ ID NO: 38370 - DNA, 30 bp, Artificial Sequence
  Synthetic oligonucleotide
aatgcggtaacttgtcaagaaaagggcgta

SEQ ID NO: 38371 - DNA, 30 bp, Artificial Sequence
  Synthetic oligonucleotide
tgtccaatgcaatcagggacagagggcgta

SEQ ID NO: 38372 - DNA, 30 bp, Artificial Sequence
  Synthetic oligonucleotide
tggacgaggtatgtacttccagcgctcgta

SEQ ID NO: 38373 - DNA, 30 bp, Artificial Sequence
  Synthetic oligonucleotide
gtgctaaagaacggagttagaagcaaggta

SEQ ID NO: 38374 - DNA, 30 bp, Artificial Sequence
  Synthetic oligonucleotide
agatgtaaaggagatacgggtagtaaggta

SEQ ID NO: 38375 - DNA, 30 bp, Artificial Sequence
  Synthetic oligonucleotide
gcctacacgcgggatgtcggtgatcaggta

SEQ ID NO: 38376 - DNA, 30 bp, Artificial Sequence
  Synthetic oligonucleotide
cagagactcaatcagccacccccagaggta

SEQ ID NO: 38377 - DNA, 30 bp, Artificial Sequence
  Synthetic oligonucleotide
tgatagcggtagaccggacattatgaggta

SEQ ID NO: 38378 - DNA, 30 bp, Artificial Sequence
  Synthetic oligonucleotide
cgcctgacaacggttgttatgaaataggta

SEQ ID NO: 38379 - DNA, 30 bp, Artificial Sequence
  Synthetic oligonucleotide
cgtaagatccaatggttggccgtataggta

SEQ ID NO: 38380 - DNA, 30 bp, Artificial Sequence
  Synthetic oligonucleotide
atggagatggggtaccaaaatgtgtaggta

SEQ ID NO: 38381 - DNA, 30 bp, Artificial Sequence
  Synthetic oligonucleotide
cgaccacgtgcatcaaggcacatcagggta

SEQ ID NO: 38382 - DNA, 30 bp, Artificial Sequence
  Synthetic oligonucleotide
atataggggcgccacgaggggactagggta

SEQ ID NO: 38383 - DNA, 30 bp, Artificial Sequence
  Synthetic oligonucleotide
ggcttaacacgtaaatagagacttggggta

SEQ ID NO: 38384 - DNA, 30 bp, Artificial Sequence
  Synthetic oligonucleotide
aggtggagaataaactttacgagtatggta

SEQ ID NO: 38385 - DNA, 30 bp, Artificial Sequence
  Synthetic oligonucleotide
aagggagtgtggagctccgctcgcgtggta

SEQ ID NO: 38386 - DNA, 30 bp, Artificial Sequence
  Synthetic oligonucleotide
ggaagtggactaccttcgagacaattggta

SEQ ID NO: 38387 - DNA, 30 bp, Artificial Sequence
  Synthetic oligonucleotide
aggcgacaccatgacgtccgttcacatgta

SEQ ID NO: 38388 - DNA, 30 bp, Artificial Sequence
  Synthetic oligonucleotide
cggcaacgaggaatgctatagcagtctgta

SEQ ID NO: 38389 - DNA, 30 bp, Artificial Sequence
  Synthetic oligonucleotide
agcgtgcctagtagtaatgggccgagtgta

SEQ ID NO: 38390 - DNA, 30 bp, Artificial Sequence
  Synthetic oligonucleotide
acgagacctgtctggaagggggttagtgta

SEQ ID NO: 38391 - DNA, 30 bp, Artificial Sequence
  Synthetic oligonucleotide
agccacccacgggcgagccagaaaggtgta

SEQ ID NO: 38392 - DNA, 30 bp, Artificial Sequence
  Synthetic oligonucleotide
gttaaagatcagataatagggccatgtgta

SEQ ID NO: 38393 - DNA, 30 bp, Artificial Sequence
  Synthetic oligonucleotide
cgatgtgagctcaacctcggtacctgtgta

SEQ ID NO: 38394 - DNA, 30 bp, Artificial Sequence
  Synthetic oligonucleotide
cgaggagatacactaaggagctgcaaatta

SEQ ID NO: 38395 - DNA, 30 bp, Artificial Sequence
  Synthetic oligonucleotide
cgacctgcataccgagccgagtggaaatta

SEQ ID NO: 38396 - DNA, 30 bp, Artificial Sequence
  Synthetic oligonucleotide
ggtagcgagcgaagatgaatccgccaatta

SEQ ID NO: 38397 - DNA, 30 bp, Artificial Sequence
  Synthetic oligonucleotide
ccgtaagaagcctctccccgaatgcaatta

SEQ ID NO: 38398 - DNA, 30 bp, Artificial Sequence
  Synthetic oligonucleotide
agaagggagagttgtcatcaacttcaatta

SEQ ID NO: 38399 - DNA, 30 bp, Artificial Sequence
  Synthetic oligonucleotide
tcggatgccatttgaggtctgaaggaatta

SEQ ID NO: 38400 - DNA, 30 bp, Artificial Sequence
  Synthetic oligonucleotide
ccatcaattgcaaaaggcagtaagacatta

SEQ ID NO: 38401 - DNA, 30 bp, Artificial Sequence
  Synthetic oligonucleotide
aggggggcagatacatcatagtcgccatta

SEQ ID NO: 38402 - DNA, 30 bp, Artificial Sequence
  Synthetic oligonucleotide
ctcggaagcccaataattcaaagatgatta

SEQ ID NO: 38403 - DNA, 30 bp, Artificial Sequence
  Synthetic oligonucleotide
tactgggggaaatggagaagagcggtatta

SEQ ID NO: 38404 - DNA, 30 bp, Artificial Sequence
  Synthetic oligonucleotide
ggccactagtaatgggcaaacctaggctta

SEQ ID NO: 38405 - DNA, 30 bp, Artificial Sequence
  Synthetic oligonucleotide
tctcaagctaatgagtacgtgaatgtctta

SEQ ID NO: 38406 - DNA, 30 bp, Artificial Sequence
  Synthetic oligonucleotide
gtgcgtgggttgggactgtagttcgagtta

SEQ ID NO: 38407 - DNA, 30 bp, Artificial Sequence
  Synthetic oligonucleotide
aatgagggtgagaagctcgactgcacgtta

SEQ ID NO: 38408 - DNA, 30 bp, Artificial Sequence
  Synthetic oligonucleotide
ataatcatgcacacagagggctgcacgtta

SEQ ID NO: 38409 - DNA, 30 bp, Artificial Sequence
  Synthetic oligonucleotide
acatcaaacgtacaaaggacaagaaggtta

SEQ ID NO: 38410 - DNA, 30 bp, Artificial Sequence
  Synthetic oligonucleotide
agtcggtgctagcggaaaattgtggggtta

SEQ ID NO: 38411 - DNA, 30 bp, Artificial Sequence
  Synthetic oligonucleotide
agacgatgaccctagtcatacaccatgtta

SEQ ID NO: 38412 - DNA, 30 bp, Artificial Sequence
  Synthetic oligonucleotide
acgctaatcacccaatgcgctacacaaaac

SEQ ID NO: 38413 - DNA, 30 bp, Artificial Sequence
  Synthetic oligonucleotide
cgaagtaaggccagtcctggatactaaaac

SEQ ID NO: 38414 - DNA, 30 bp, Artificial Sequence
  Synthetic oligonucleotide
tcgttcgtaaaacatggccggcctacaaac

SEQ ID NO: 38415 - DNA, 30 bp, Artificial Sequence
  Synthetic oligonucleotide
gagcgagtatgggtcaggcaaatctcaaac

SEQ ID NO: 38416 - DNA, 30 bp, Artificial Sequence
  Synthetic oligonucleotide
aaccgaagagagtcatcactgcagagaaac

SEQ ID NO: 38417 - DNA, 30 bp, Artificial Sequence
  Synthetic oligonucleotide
catgtggaaaaagacataagaaaacgaaac

SEQ ID NO: 38418 - DNA, 30 bp, Artificial Sequence
  Synthetic oligonucleotide
tgggcgcggagagctatcattagaaacaac

SEQ ID NO: 38419 - DNA, 30 bp, Artificial Sequence
  Synthetic oligonucleotide
gcctgacggacgacaacaccctgacacaac

SEQ ID NO: 38420 - DNA, 30 bp, Artificial Sequence
  Synthetic oligonucleotide
aagagtagcacaacaccgggggaggacaac

SEQ ID NO: 38421 - DNA, 30 bp, Artificial Sequence
  Synthetic oligonucleotide
aggtccacgtccagactctgaccctacaac

SEQ ID NO: 38422 - DNA, 30 bp, Artificial Sequence
  Synthetic oligonucleotide
caggaacaatctgcggaaaggcttcccaac

SEQ ID NO: 38423 - DNA, 30 bp, Artificial Sequence
  Synthetic oligonucleotide
cggtcaaaaaattagatttcgtttatcaac

SEQ ID NO: 38424 - DNA, 30 bp, Artificial Sequence
  Synthetic oligonucleotide
cagaggcgtcatgcaaggcatcgaaagaac

SEQ ID NO: 38425 - DNA, 30 bp, Artificial Sequence
  Synthetic oligonucleotide
acaacgggttcggcagatatagtcacgaac

SEQ ID NO: 38426 - DNA, 30 bp, Artificial Sequence
  Synthetic oligonucleotide
aagttcgcctgaagatgaaaccgcccgaac

SEQ ID NO: 38427 - DNA, 30 bp, Artificial Sequence
  Synthetic oligonucleotide
tcagtagcaggctaaaacctggtgccgaac

SEQ ID NO: 38428 - DNA, 30 bp, Artificial Sequence
  Synthetic oligonucleotide
cggaatagttgagactcataccgagcgaac

SEQ ID NO: 38429 - DNA, 30 bp, Artificial Sequence
  Synthetic oligonucleotide
cggtacgaagcttgagaactgatgtcgaac

SEQ ID NO: 38430 - DNA, 30 bp, Artificial Sequence
  Synthetic oligonucleotide
ctagagcaggagagcgtaactttcaggaac

SEQ ID NO: 38431 - DNA, 30 bp, Artificial Sequence
  Synthetic oligonucleotide
acagtcctagagtacgaaaaaggtaggaac

SEQ ID NO: 38432 - DNA, 30 bp, Artificial Sequence
  Synthetic oligonucleotide
acgccaatctacaacacaagttatgggaac

SEQ ID NO: 38433 - DNA, 30 bp, Artificial Sequence
  Synthetic oligonucleotide
tggactaggtgagggccaaagaacgtgaac

SEQ ID NO: 38434 - DNA, 30 bp, Artificial Sequence
  Synthetic oligonucleotide
ccaccaacagcagcattgattccattgaac

SEQ ID NO: 38435 - DNA, 30 bp, Artificial Sequence
  Synthetic oligonucleotide
tcggaaagtccgacacccacgaggcataac

SEQ ID NO: 38436 - DNA, 30 bp, Artificial Sequence
  Synthetic oligonucleotide
ggctggaagcaatgcaggcatccagataac

SEQ ID NO: 38437 - DNA, 30 bp, Artificial Sequence
  Synthetic oligonucleotide
aagggcctgttagagagaagaatcagtaac

SEQ ID NO: 38438 - DNA, 30 bp, Artificial Sequence
  Synthetic oligonucleotide
cagtggctcagaacaggcaatcagagtaac

SEQ ID NO: 38439 - DNA, 30 bp, Artificial Sequence
  Synthetic oligonucleotide
gcttgctgacaatccaacgtattgagtaac

SEQ ID NO: 38440 - DNA, 30 bp, Artificial Sequence
  Synthetic oligonucleotide
aacgtgtcgcggtcaggagcaaaacgtaac

SEQ ID NO: 38441 - DNA, 30 bp, Artificial Sequence
  Synthetic oligonucleotide
cggatgggtaaccatgagatccctggtaac

SEQ ID NO: 38442 - DNA, 30 bp, Artificial Sequence
  Synthetic oligonucleotide
atgtgaaggaagcattcaaggacaattaac

SEQ ID NO: 38443 - DNA, 30 bp, Artificial Sequence
  Synthetic oligonucleotide
ggttaacgggatacgaaaatggtagttaac

SEQ ID NO: 38444 - DNA, 30 bp, Artificial Sequence
  Synthetic oligonucleotide
cataacttgggggaagatacgtgtgttaac

SEQ ID NO: 38445 - DNA, 30 bp, Artificial Sequence
  Synthetic oligonucleotide
aacgaatgggtggaactttcactcaaacac

SEQ ID NO: 38446 - DNA, 30 bp, Artificial Sequence
  Synthetic oligonucleotide
tggctggaggaaatagcgatccccgaacac

SEQ ID NO: 38447 - DNA, 30 bp, Artificial Sequence
  Synthetic oligonucleotide
cgagcaccctgtcacatgattcaaacacac

SEQ ID NO: 38448 - DNA, 31 bp, Artificial Sequence
  Synthetic oligonucleotide
tcataaagcataagaggagggctacccacac

SEQ ID NO: 38449 - DNA, 30 bp, Artificial Sequence
  Synthetic oligonucleotide
caggcatcgaaataatagtcggaatcacac

SEQ ID NO: 38450 - DNA, 30 bp, Artificial Sequence
  Synthetic oligonucleotide
cacaataggccgactcattgtaaaagacac

SEQ ID NO: 38451 - DNA, 30 bp, Artificial Sequence
  Synthetic oligonucleotide
catctcgggaggaaggcgtatgatcgacac

SEQ ID NO: 38452 - DNA, 30 bp, Artificial Sequence
  Synthetic oligonucleotide
cgaggtcacaatagcggtgactaaggacac

SEQ ID NO: 38453 - DNA, 30 bp, Artificial Sequence
  Synthetic oligonucleotide
cggtaagctccgcgaaactacagggtacac

SEQ ID NO: 38454 - DNA, 30 bp, Artificial Sequence
  Synthetic oligonucleotide
cggggggcatagtggactcacccgaaccac

SEQ ID NO: 38455 - DNA, 30 bp, Artificial Sequence
  Synthetic oligonucleotide
tagaccggaaccacttatatactgcaccac

SEQ ID NO: 38456 - DNA, 30 bp, Artificial Sequence
  Synthetic oligonucleotide
tcctacgccaaagaggacccaataccccac

SEQ ID NO: 38457 - DNA, 30 bp, Artificial Sequence
  Synthetic oligonucleotide
aaatgcccacgtaccagatcgtcgagccac

SEQ ID NO: 38458 - DNA, 30 bp, Artificial Sequence
  Synthetic oligonucleotide
caacgagtctcgaggatcgttatatgccac

SEQ ID NO: 38459 - DNA, 30 bp, Artificial Sequence
  Synthetic oligonucleotide
acactgggcaacctctgagtactagtccac

SEQ ID NO: 38460 - DNA, 30 bp, Artificial Sequence
  Synthetic oligonucleotide
atgcgagatatgattagaatgtccgtccac

SEQ ID NO: 38461 - DNA, 30 bp, Artificial Sequence
  Synthetic oligonucleotide
tcgtaccgccggaaatccaagcagttccac

SEQ ID NO: 38462 - DNA, 30 bp, Artificial Sequence
  Synthetic oligonucleotide
ctcaatttgcgccaccaacacccaaagcac

SEQ ID NO: 38463 - DNA, 30 bp, Artificial Sequence
  Synthetic oligonucleotide
acctgggaagaacaacgagaaggaaagcac

SEQ ID NO: 38464 - DNA, 30 bp, Artificial Sequence
  Synthetic oligonucleotide
tcgaggaggcctcattatttctaccagcac

SEQ ID NO: 38465 - DNA, 30 bp, Artificial Sequence
  Synthetic oligonucleotide
ccactaaacataagaagtccatgggagcac

SEQ ID NO: 38466 - DNA, 30 bp, Artificial Sequence
  Synthetic oligonucleotide
taacggtacaggtcctaattacaagcgcac

SEQ ID NO: 38467 - DNA, 30 bp, Artificial Sequence
  Synthetic oligonucleotide
agctagaaacacccggctacgtataggcac

SEQ ID NO: 38468 - DNA, 30 bp, Artificial Sequence
  Synthetic oligonucleotide
acgagacacagggtccaatgtagccggcac

SEQ ID NO: 38469 - DNA, 30 bp, Artificial Sequence
  Synthetic oligonucleotide
agggaaccgggactaaaggcgcatcggcac

SEQ ID NO: 38470 - DNA, 30 bp, Artificial Sequence
  Synthetic oligonucleotide
tcggaggtgtctattagagctggggggcac

SEQ ID NO: 38471 - DNA, 30 bp, Artificial Sequence
  Synthetic oligonucleotide
agaagtatatagcggatgacagaatggcac

SEQ ID NO: 38472 - DNA, 30 bp, Artificial Sequence
  Synthetic oligonucleotide
acacgagtgaaaggaattcccagtctgcac

SEQ ID NO: 38473 - DNA, 30 bp, Artificial Sequence
  Synthetic oligonucleotide
aacgtgtaggtcgactcatcataacatcac

SEQ ID NO: 38474 - DNA, 30 bp, Artificial Sequence
  Synthetic oligonucleotide
aaacaccacatttcgtgagtgcgccatcac

SEQ ID NO: 38475 - DNA, 30 bp, Artificial Sequence
  Synthetic oligonucleotide
gtataggaaccgcggccaggcacgcatcac

SEQ ID NO: 38476 - DNA, 30 bp, Artificial Sequence
  Synthetic oligonucleotide
cgtgtaggactgagagacattgatgatcac

SEQ ID NO: 38477 - DNA, 30 bp, Artificial Sequence
  Synthetic oligonucleotide
agagtacgtataacggtgaccaacactcac

SEQ ID NO: 38478 - DNA, 30 bp, Artificial Sequence
  Synthetic oligonucleotide
ggcacacacaacccctcatcatccactcac

SEQ ID NO: 38479 - DNA, 30 bp, Artificial Sequence
  Synthetic oligonucleotide
agaagacagagcgcagcgaacataagtcac

SEQ ID NO: 38480 - DNA, 30 bp, Artificial Sequence
  Synthetic oligonucleotide
gtcgcgatgaaagattgggtgaggagtcac

SEQ ID NO: 38481 - DNA, 30 bp, Artificial Sequence
  Synthetic oligonucleotide
gtcatgctaataaaaaggatcaagggtcac

SEQ ID NO: 38482 - DNA, 30 bp, Artificial Sequence
  Synthetic oligonucleotide
cgacaacaaataggacccattcactttcac

SEQ ID NO: 38483 - DNA, 34 bp, Artificial Sequence
  Synthetic oligonucleotide
gatactagaccaccacgtgtccatgaaaaaagac

SEQ ID NO: 38484 - DNA, 33 bp, Artificial Sequence
  Synthetic oligonucleotide
gatactaaccaccacgtttccatcagaaaagac

SEQ ID NO: 38485 - DNA, 30 bp, Artificial Sequence
  Synthetic oligonucleotide
aagagggtcccggattaagttgtgcaagac

SEQ ID NO: 38486 - DNA, 30 bp, Artificial Sequence
  Synthetic oligonucleotide
ggggtggtgcccgtctgaaaagtggaagac

SEQ ID NO: 38487 - DNA, 30 bp, Artificial Sequence
  Synthetic oligonucleotide
ggaagaaggcgaatgcgaagtgaataagac

SEQ ID NO: 38488 - DNA, 30 bp, Artificial Sequence
  Synthetic oligonucleotide
acgagactcatagtaggctatggcccagac

SEQ ID NO: 38489 - DNA, 30 bp, Artificial Sequence
  Synthetic oligonucleotide
agatcataaaaacgtgttattccgccagac

SEQ ID NO: 38490 - DNA, 30 bp, Artificial Sequence
  Synthetic oligonucleotide
aggaaaggtgtctagaatcgcaagatagac

SEQ ID NO: 38491 - DNA, 30 bp, Artificial Sequence
  Synthetic oligonucleotide
ttggagggaacccagataccaacactagac

SEQ ID NO: 38492 - DNA, 30 bp, Artificial Sequence
  Synthetic oligonucleotide
gtgaaccgcaaatgatcaccacggaacgac

SEQ ID NO: 38493 - DNA, 30 bp, Artificial Sequence
  Synthetic oligonucleotide
agcactagacgattcaggcggactaacgac

SEQ ID NO: 38494 - DNA, 30 bp, Artificial Sequence
  Synthetic oligonucleotide
aagttaggactggaacaatggtagcccgac

SEQ ID NO: 38495 - DNA, 30 bp, Artificial Sequence
  Synthetic oligonucleotide
ctcggcggatgagaggaccatgccagcgac

SEQ ID NO: 38496 - DNA, 30 bp, Artificial Sequence
  Synthetic oligonucleotide
accatctatcagcaactgccctccggcgac

SEQ ID NO: 38497 - DNA, 31 bp, Artificial Sequence
  Synthetic oligonucleotide
caaggactggttcataatggcagtcatcgac

SEQ ID NO: 38498 - DNA, 30 bp, Artificial Sequence
  Synthetic oligonucleotide
aggccaagggcgcggtgtatatagctcgac

SEQ ID NO: 38499 - DNA, 30 bp, Artificial Sequence
  Synthetic oligonucleotide
actccagtaggacgggtacgccatctcgac

SEQ ID NO: 38500 - DNA, 30 bp, Artificial Sequence
  Synthetic oligonucleotide
agtagaaacagaatgaagattcgggaggac

SEQ ID NO: 38501 - DNA, 30 bp, Artificial Sequence
  Synthetic oligonucleotide
agggatctagtgcctagcatctacggggac

SEQ ID NO: 38502 - DNA, 30 bp, Artificial Sequence
  Synthetic oligonucleotide
agcgcttatctaagagtattgaggggggac

SEQ ID NO: 38503 - DNA, 30 bp, Artificial Sequence
  Synthetic oligonucleotide
tagactgcgggccgagatagaactggggac

SEQ ID NO: 38504 - DNA, 30 bp, Artificial Sequence
  Synthetic oligonucleotide
acgcaataaataaggaggaatcgtggggac

SEQ ID NO: 38505 - DNA, 30 bp, Artificial Sequence
  Synthetic oligonucleotide
acactgcgggcacggaacgaacgttgggac

SEQ ID NO: 38506 - DNA, 30 bp, Artificial Sequence
  Synthetic oligonucleotide
cacaagacccgatacaggccgtgcgatgac

SEQ ID NO: 38507 - DNA, 30 bp, Artificial Sequence
  Synthetic oligonucleotide
tggaggtgtagtagatggggaacgtatgac

SEQ ID NO: 38508 - DNA, 30 bp, Artificial Sequence
  Synthetic oligonucleotide
ctgaattaaacatacctcaagaagagtgac

SEQ ID NO: 38509 - DNA, 30 bp, Artificial Sequence
  Synthetic oligonucleotide
gcgcggaaacacgatttccaatggagtgac

SEQ ID NO: 38510 - DNA, 30 bp, Artificial Sequence
  Synthetic oligonucleotide
aagccaagactcaataatattcgtagtgac

SEQ ID NO: 38511 - DNA, 30 bp, Artificial Sequence
  Synthetic oligonucleotide
cccatagcgtcaatggagcaataaggtgac

SEQ ID NO: 38512 - DNA, 30 bp, Artificial Sequence
  Synthetic oligonucleotide
tgcgtagtgcggtaaagtgacgtgggtgac

SEQ ID NO: 38513 - DNA, 30 bp, Artificial Sequence
  Synthetic oligonucleotide
aagggctagaaccgaaagtgatcgtgtgac

SEQ ID NO: 38514 - DNA, 30 bp, Artificial Sequence
  Synthetic oligonucleotide
gggggaatgcagggaacatctgcagaatac

SEQ ID NO: 38515 - DNA, 30 bp, Artificial Sequence
  Synthetic oligonucleotide
agagcgtagttgctagaataaatggaatac

SEQ ID NO: 38516 - DNA, 30 bp, Artificial Sequence
  Synthetic oligonucleotide
agttgggcgccaacacgggcaaaaacatac

SEQ ID NO: 38517 - DNA, 30 bp, Artificial Sequence
  Synthetic oligonucleotide
ggggagctccaacctactgagaaggcatac

SEQ ID NO: 38518 - DNA, 30 bp, Artificial Sequence
  Synthetic oligonucleotide
agccatcaaacaatgtgaatcctcagatac

SEQ ID NO: 38519 - DNA, 30 bp, Artificial Sequence
  Synthetic oligonucleotide
ttaaggggtaggcaaaacaaaaatggatac

SEQ ID NO: 38520 - DNA, 30 bp, Artificial Sequence
  Synthetic oligonucleotide
ggcacaagacagacgacctatagattatac

SEQ ID NO: 38521 - DNA, 30 bp, Artificial Sequence
  Synthetic oligonucleotide
cggacgatatgtcgatataacacttactac

SEQ ID NO: 38522 - DNA, 30 bp, Artificial Sequence
  Synthetic oligonucleotide
ggcacttaaaatggagaagagaggtcctac

SEQ ID NO: 38523 - DNA, 30 bp, Artificial Sequence
  Synthetic oligonucleotide
ggatgaactctgtaggcagtatcgatctac

SEQ ID NO: 38524 - DNA, 30 bp, Artificial Sequence
  Synthetic oligonucleotide
gatccgaaaagagcataaaggtgaacgtac

SEQ ID NO: 38525 - DNA, 30 bp, Artificial Sequence
  Synthetic oligonucleotide
cgtgactaatgaataacatcttgagcgtac

SEQ ID NO: 38526 - DNA, 30 bp, Artificial Sequence
  Synthetic oligonucleotide
cacgagtaaggtgcgtactaagtggcgtac

SEQ ID NO: 38527 - DNA, 30 bp, Artificial Sequence
  Synthetic oligonucleotide
tctgaaccgtgacaacaccagccgaggtac

SEQ ID NO: 38528 - DNA, 30 bp, Artificial Sequence
  Synthetic oligonucleotide
taatgcatgttgaagtgaggtgataggtac

SEQ ID NO: 38529 - DNA, 30 bp, Artificial Sequence
  Synthetic oligonucleotide
gcgtataattcaacaaataagcacctgtac

SEQ ID NO: 38530 - DNA, 30 bp, Artificial Sequence
  Synthetic oligonucleotide
agaaagcacatcaagggcgggccaaattac

SEQ ID NO: 38531 - DNA, 30 bp, Artificial Sequence
  Synthetic oligonucleotide
gacacaatggagctggattagtggtattac

SEQ ID NO: 38532 - DNA, 30 bp, Artificial Sequence
  Synthetic oligonucleotide
acgcaaaacaccattatagcaggtccttac

SEQ ID NO: 38533 - DNA, 30 bp, Artificial Sequence
  Synthetic oligonucleotide
caaaaaaaaggttgcgtcgatacaagttac

SEQ ID NO: 38534 - DNA, 30 bp, Artificial Sequence
  Synthetic oligonucleotide
gggagtcgaggagtacgcgcatagggttac

SEQ ID NO: 38535 - DNA, 30 bp, Artificial Sequence
  Synthetic oligonucleotide
ctaccgattacgatacaaaacgggggttac

SEQ ID NO: 38536 - DNA, 30 bp, Artificial Sequence
  Synthetic oligonucleotide
ttgcaaagagggcaacctagtatacaaacc

SEQ ID NO: 38537 - DNA, 30 bp, Artificial Sequence
  Synthetic oligonucleotide
caacgggcacgaagcagatcagcctaaacc

SEQ ID NO: 38538 - DNA, 30 bp, Artificial Sequence
  Synthetic oligonucleotide
gggacaacgtaacctccactcgagggaacc

SEQ ID NO: 38539 - DNA, 30 bp, Artificial Sequence
  Synthetic oligonucleotide
tacgcaccatccggaaaaattgacataacc

SEQ ID NO: 38540 - DNA, 30 bp, Artificial Sequence
  Synthetic oligonucleotide
cgatgcctactgaaagcggagagcttaacc

SEQ ID NO: 38541 - DNA, 30 bp, Artificial Sequence
  Synthetic oligonucleotide
tggcaacggtgcaacctcggtaaccacacc

SEQ ID NO: 38542 - DNA, 30 bp, Artificial Sequence
  Synthetic oligonucleotide
acgtgccggaaagctagcaaggtagacacc

SEQ ID NO: 38543 - DNA, 30 bp, Artificial Sequence
  Synthetic oligonucleotide
gaccctcagaaaaaggtatgccagggcacc

SEQ ID NO: 38544 - DNA, 30 bp, Artificial Sequence
  Synthetic oligonucleotide
agatggataatggggatcaagctagtcacc

SEQ ID NO: 38545 - DNA, 30 bp, Artificial Sequence
  Synthetic oligonucleotide
caaacacgtcttaacgtccatagagagacc

SEQ ID NO: 38546 - DNA, 30 bp, Artificial Sequence
  Synthetic oligonucleotide
ttaggacgggtgtaccagtactccgagacc

SEQ ID NO: 38547 - DNA, 30 bp, Artificial Sequence
  Synthetic oligonucleotide
ggaagcctaggacagaaagttgggccgacc

SEQ ID NO: 38548 - DNA, 30 bp, Artificial Sequence
  Synthetic oligonucleotide
atggaagggaacttcacgggtctgccgacc

SEQ ID NO: 38549 - DNA, 30 bp, Artificial Sequence
  Synthetic oligonucleotide
atgccggaacatcaacgggcgcacactacc

SEQ ID NO: 38550 - DNA, 30 bp, Artificial Sequence
  Synthetic oligonucleotide
acggcgttagcgagcaaaccctcatgtacc

SEQ ID NO: 38551 - DNA, 30 bp, Artificial Sequence
  Synthetic oligonucleotide
caaatggcaaggacgagaacgagctgtacc

SEQ ID NO: 38552 - DNA, 30 bp, Artificial Sequence
  Synthetic oligonucleotide
tggtgtggtgaagaccatgagtgctgtacc

SEQ ID NO: 38553 - DNA, 30 bp, Artificial Sequence
  Synthetic oligonucleotide
tgcggcgggggcccgaaaactgcttgtacc

SEQ ID NO: 38554 - DNA, 31 bp, Artificial Sequence
  Synthetic oligonucleotide
ggcaagaacgcatgtcaaaagctgcaaaccc

SEQ ID NO: 38555 - DNA, 30 bp, Artificial Sequence
  Synthetic oligonucleotide
gcggacaggtaagacgtaggactctaaccc

SEQ ID NO: 38556 - DNA, 30 bp, Artificial Sequence
  Synthetic oligonucleotide
gacatcgaggaggattgtaacaattgaccc

SEQ ID NO: 38557 - DNA, 30 bp, Artificial Sequence
  Synthetic oligonucleotide
cgaacctcaaggggctcggccgatgagccc

SEQ ID NO: 38558 - DNA, 30 bp, Artificial Sequence
  Synthetic oligonucleotide
atatatcacgaaaaaagtgtcggcacgccc

SEQ ID NO: 38559 - DNA, 30 bp, Artificial Sequence
  Synthetic oligonucleotide
gggggggccataagagtaggaactcatccc

SEQ ID NO: 38560 - DNA, 30 bp, Artificial Sequence
  Synthetic oligonucleotide
ccagaagagcaccaagatgtacagcttccc

SEQ ID NO: 38561 - DNA, 30 bp, Artificial Sequence
  Synthetic oligonucleotide
agatggggtcaaaagatgcaggctgttccc

SEQ ID NO: 38562 - DNA, 30 bp, Artificial Sequence
  Synthetic oligonucleotide
gttgatagtgggagtattgagggcaaagcc

SEQ ID NO: 38563 - DNA, 30 bp, Artificial Sequence
  Synthetic oligonucleotide
acggatggtagctgaatcccatctcaagcc

SEQ ID NO: 38564 - DNA, 30 bp, Artificial Sequence
  Synthetic oligonucleotide
gggctcaagactcgcaaactatgggcagcc

SEQ ID NO: 38565 - DNA, 30 bp, Artificial Sequence
  Synthetic oligonucleotide
cgttgccgcagaaaaacgggagggtgagcc

SEQ ID NO: 38566 - DNA, 30 bp, Artificial Sequence
  Synthetic oligonucleotide
aagaaaaacaagtggagtactatgtgagcc

SEQ ID NO: 38567 - DNA, 30 bp, Artificial Sequence
  Synthetic oligonucleotide
cggtatacgaagattaaggttcgagccgcc

SEQ ID NO: 38568 - DNA, 30 bp, Artificial Sequence
  Synthetic oligonucleotide
acgtatcagggatattgacaattccgcgcc

SEQ ID NO: 38569 - DNA, 30 bp, Artificial Sequence
  Synthetic oligonucleotide
gatttgaggagcgaaaaaagggtgctcgcc

SEQ ID NO: 38570 - DNA, 30 bp, Artificial Sequence
  Synthetic oligonucleotide
gggaatcatccgacggtataatctctcgcc

SEQ ID NO: 38571 - DNA, 30 bp, Artificial Sequence
  Synthetic oligonucleotide
acgggattcgtgggttcgcgtgatgtcgcc

SEQ ID NO: 38572 - DNA, 30 bp, Artificial Sequence
  Synthetic oligonucleotide
gtgagagccagcgaaatatggaacaaggcc

SEQ ID NO: 38573 - DNA, 30 bp, Artificial Sequence
  Synthetic oligonucleotide
gagatgcgaaggatgtaggtgtgggaggcc

SEQ ID NO: 38574 - DNA, 30 bp, Artificial Sequence
  Synthetic oligonucleotide
acacaggctgaataaagtccccactaggcc

SEQ ID NO: 38575 - DNA, 30 bp, Artificial Sequence
  Synthetic oligonucleotide
tgaaattaagaaggaaaggctcagtaggcc

SEQ ID NO: 38576 - DNA, 30 bp, Artificial Sequence
  Synthetic oligonucleotide
tacgtaccacaagtcatggaaacatcggcc

SEQ ID NO: 38577 - DNA, 30 bp, Artificial Sequence
  Synthetic oligonucleotide
agaggaaagttaggttttgtaagctcggcc

SEQ ID NO: 38578 - DNA, 30 bp, Artificial Sequence
  Synthetic oligonucleotide
tgaggacagagggtaaagccgagttcggcc

SEQ ID NO: 38579 - DNA, 30 bp, Artificial Sequence
  Synthetic oligonucleotide
aagaaggaagaatgtggccaagcccgggcc

SEQ ID NO: 38580 - DNA, 29 bp, Artificial Sequence
  Synthetic oligonucleotide
cggggatgaggatagtacgtatttgggcc

SEQ ID NO: 38581 - DNA, 30 bp, Artificial Sequence
  Synthetic oligonucleotide
tagtaccgccctgcgaagaccctgagtgcc

SEQ ID NO: 38582 - DNA, 30 bp, Artificial Sequence
  Synthetic oligonucleotide
gcggctagagacgaccatagccgatgtgcc

SEQ ID NO: 38583 - DNA, 30 bp, Artificial Sequence
  Synthetic oligonucleotide
tgagtatggggtcttgatgattagcttgcc

SEQ ID NO: 38584 - DNA, 30 bp, Artificial Sequence
  Synthetic oligonucleotide
ggaggcatcgatggaaaatgaggatttgcc

SEQ ID NO: 38585 - DNA, 30 bp, Artificial Sequence
  Synthetic oligonucleotide
tggtccgtagataaagacatttggaaatcc

SEQ ID NO: 38586 - DNA, 30 bp, Artificial Sequence
  Synthetic oligonucleotide
ccggggacatcggatgagcaggaccaatcc

SEQ ID NO: 38587 - DNA, 30 bp, Artificial Sequence
  Synthetic oligonucleotide
ttacgaagagtgtccaaccgaagccaatcc

SEQ ID NO: 38588 - DNA, 30 bp, Artificial Sequence
  Synthetic oligonucleotide
gagacaatcgggacatgttgcaatgcatcc

SEQ ID NO: 38589 - DNA, 30 bp, Artificial Sequence
  Synthetic oligonucleotide
tggtgacagattgcgaagacagcacgatcc

SEQ ID NO: 38590 - DNA, 30 bp, Artificial Sequence
  Synthetic oligonucleotide
agtggcgacattgaattagcatctctatcc

SEQ ID NO: 38591 - DNA, 30 bp, Artificial Sequence
  Synthetic oligonucleotide
tgtaggcagtcaagggtgaaaacgcactcc

SEQ ID NO: 38592 - DNA, 30 bp, Artificial Sequence
  Synthetic oligonucleotide
aggaggaagtgtaagcctgtaaagtactcc

SEQ ID NO: 38593 - DNA, 30 bp, Artificial Sequence
  Synthetic oligonucleotide
gaaggcaggtggacgagcagacagacctcc

SEQ ID NO: 38594 - DNA, 30 bp, Artificial Sequence
  Synthetic oligonucleotide
ggaggcgtccaatgtggcggcggtacctcc

SEQ ID NO: 38595 - DNA, 30 bp, Artificial Sequence
  Synthetic oligonucleotide
gccacagcatgtggggaatagagctagtcc

SEQ ID NO: 38596 - DNA, 30 bp, Artificial Sequence
  Synthetic oligonucleotide
agtgtggcaaattgaagtatcaagtagtcc

SEQ ID NO: 38597 - DNA, 30 bp, Artificial Sequence
  Synthetic oligonucleotide
agacctcggaacagttacaacgcctcgtcc

SEQ ID NO: 38598 - DNA, 30 bp, Artificial Sequence
  Synthetic oligonucleotide
ggtacattcaagcaagaggacttgcggtcc

SEQ ID NO: 38599 - DNA, 30 bp, Artificial Sequence
  Synthetic oligonucleotide
gaggcactgatcacaagaccgcgtatgtcc

SEQ ID NO: 38600 - DNA, 30 bp, Artificial Sequence
  Synthetic oligonucleotide
ctaaggaaggagaagcccgagccactgtcc

SEQ ID NO: 38601 - DNA, 30 bp, Artificial Sequence
  Synthetic oligonucleotide
cgagctagaacctcagtaatctggctgtcc

SEQ ID NO: 38602 - DNA, 30 bp, Artificial Sequence
  Synthetic oligonucleotide
gcctggaaaaggtaactaggctaagtgtcc

SEQ ID NO: 38603 - DNA, 30 bp, Artificial Sequence
  Synthetic oligonucleotide
ccagtggtgaagactaggatggcggtgtcc

SEQ ID NO: 38604 - DNA, 30 bp, Artificial Sequence
  Synthetic oligonucleotide
aaggtcaaccgctctgaatgacccaaaagc

SEQ ID NO: 38605 - DNA, 30 bp, Artificial Sequence
  Synthetic oligonucleotide
tcactatagccagtgtcacctgagcaaagc

SEQ ID NO: 38606 - DNA, 31 bp, Artificial Sequence
  Synthetic oligonucleotide
gatcgatgagtggaaaaacgatcatgaaagc

SEQ ID NO: 38607 - DNA, 30 bp, Artificial Sequence
  Synthetic oligonucleotide
ctcatataagctagtacaagacaataaagc

SEQ ID NO: 38608 - DNA, 30 bp, Artificial Sequence
  Synthetic oligonucleotide
tcgagaccggaaaacgacagattgccaagc

SEQ ID NO: 38609 - DNA, 30 bp, Artificial Sequence
  Synthetic oligonucleotide
aatcgaagagtgaagtcaaacaaatcaagc

SEQ ID NO: 38610 - DNA, 30 bp, Artificial Sequence
  Synthetic oligonucleotide
ttgcttagataaacacatggcacctcaagc

SEQ ID NO: 38611 - DNA, 30 bp, Artificial Sequence
  Synthetic oligonucleotide
cggcaaataaacatatgggtataacgaagc

SEQ ID NO: 38612 - DNA, 30 bp, Artificial Sequence
  Synthetic oligonucleotide
cttaaagaccaaaactgcaggcatggaagc

SEQ ID NO: 38613 - DNA, 30 bp, Artificial Sequence
  Synthetic oligonucleotide
cggtaaagaactttatctataagcataagc

SEQ ID NO: 38614 - DNA, 30 bp, Artificial Sequence
  Synthetic oligonucleotide
gtcggggaattgcgtgtactgaggataagc

SEQ ID NO: 38615 - DNA, 30 bp, Artificial Sequence
  Synthetic oligonucleotide
aatgcggatacaagcagaaatagtttaagc

SEQ ID NO: 38616 - DNA, 30 bp, Artificial Sequence
  Synthetic oligonucleotide
taggacaagatgtgcaagcgcccgcacagc

SEQ ID NO: 38617 - DNA, 30 bp, Artificial Sequence
  Synthetic oligonucleotide
tggggaaaggacaggtatcgtactcacagc

SEQ ID NO: 38618 - DNA, 30 bp, Artificial Sequence
  Synthetic oligonucleotide
agtgctaaaaggtgccggcgataatacagc

SEQ ID NO: 38619 - DNA, 30 bp, Artificial Sequence
  Synthetic oligonucleotide
gcaatcggttaaaagactagggaaaccagc

SEQ ID NO: 38620 - DNA, 30 bp, Artificial Sequence
  Synthetic oligonucleotide
aaataggagcccagaggcactttaaccagc

SEQ ID NO: 38621 - DNA, 30 bp, Artificial Sequence
  Synthetic oligonucleotide
aacgtgcgccgcacgggtcgattagccagc

SEQ ID NO: 38622 - DNA, 30 bp, Artificial Sequence
  Synthetic oligonucleotide
atctgcgggcaaacgttaccctgtggcagc

SEQ ID NO: 38623 - DNA, 30 bp, Artificial Sequence
  Synthetic oligonucleotide
tgcaaaacagcgtggcaggggcccaagagc

SEQ ID NO: 38624 - DNA, 30 bp, Artificial Sequence
  Synthetic oligonucleotide
gccaaggtcgcgagactggttggtaagagc

SEQ ID NO: 38625 - DNA, 30 bp, Artificial Sequence
  Synthetic oligonucleotide
aagcctcggatgcgtgaaccgattcagagc

SEQ ID NO: 38626 - DNA, 30 bp, Artificial Sequence
  Synthetic oligonucleotide
ggaagtgtcggaacccgcgcaattccgagc

SEQ ID NO: 38627 - DNA, 30 bp, Artificial Sequence
  Synthetic oligonucleotide
ctactgcatatcgagatgaaagtggcgagc

SEQ ID NO: 38628 - DNA, 30 bp, Artificial Sequence
  Synthetic oligonucleotide
cgagcgaaaaggggggggttaggatcgagc

SEQ ID NO: 38629 - DNA, 30 bp, Artificial Sequence
  Synthetic oligonucleotide
acgggcctgtttcaaagacagatctcgagc

SEQ ID NO: 38630 - DNA, 30 bp, Artificial Sequence
  Synthetic oligonucleotide
agcggttatagggccacacccagaaggagc

SEQ ID NO: 38631 - DNA, 30 bp, Artificial Sequence
  Synthetic oligonucleotide
gacgggcttagacagccaacttggaggagc

SEQ ID NO: 38632 - DNA, 30 bp, Artificial Sequence
  Synthetic oligonucleotide
gtgactaggcttagacgatgggataggagc

SEQ ID NO: 38633 - DNA, 30 bp, Artificial Sequence
  Synthetic oligonucleotide
ccacagaagtaacacgctagtttgatgagc

SEQ ID NO: 38634 - DNA, 30 bp, Artificial Sequence
  Synthetic oligonucleotide
tcgcgtcaattctgcagtccggtcgtgagc

SEQ ID NO: 38635 - DNA, 30 bp, Artificial Sequence
  Synthetic oligonucleotide
cagtgttcacaataaggccagagcttgagc

SEQ ID NO: 38636 - DNA, 30 bp, Artificial Sequence
  Synthetic oligonucleotide
cagaaaggtggggacactattgttttgagc

SEQ ID NO: 38637 - DNA, 30 bp, Artificial Sequence
  Synthetic oligonucleotide
aagatgccacagggacggtcgagggctagc

SEQ ID NO: 38638 - DNA, 30 bp, Artificial Sequence
  Synthetic oligonucleotide
taccccaaggctgcgcaaatccgatctagc

SEQ ID NO: 38639 - DNA, 30 bp, Artificial Sequence
  Synthetic oligonucleotide
ttcgtcagagggggtagaagtaagtctagc

SEQ ID NO: 38640 - DNA, 30 bp, Artificial Sequence
  Synthetic oligonucleotide
cagttacaagcaaggaaggcgtattctagc

SEQ ID NO: 38641 - DNA, 30 bp, Artificial Sequence
  Synthetic oligonucleotide
tacagagggagaactcgccggaagtgtagc

SEQ ID NO: 38642 - DNA, 30 bp, Artificial Sequence
  Synthetic oligonucleotide
gcggcgggacccagtatccagagatttagc

SEQ ID NO: 38643 - DNA, 30 bp, Artificial Sequence
  Synthetic oligonucleotide
acgttcagtggcgcccgggaggagtttagc

SEQ ID NO: 38644 - DNA, 30 bp, Artificial Sequence
  Synthetic oligonucleotide
ggccgtgaagcgaggggtcgacattttagc

SEQ ID NO: 38645 - DNA, 30 bp, Artificial Sequence
  Synthetic oligonucleotide
acgcgaagtgacgacggcttgacacaacgc

SEQ ID NO: 38646 - DNA, 30 bp, Artificial Sequence
  Synthetic oligonucleotide
tcgtcattactgtggcaagcccacacacgc

SEQ ID NO: 38647 - DNA, 30 bp, Artificial Sequence
  Synthetic oligonucleotide
agctaccaacgtagagtcctgaaatcacgc

SEQ ID NO: 38648 - DNA, 30 bp, Artificial Sequence
  Synthetic oligonucleotide
agctcggagctacacgcaagctcatcacgc

SEQ ID NO: 38649 - DNA, 30 bp, Artificial Sequence
  Synthetic oligonucleotide
gatattacggcagtaaacaaggcaatacgc

SEQ ID NO: 38650 - DNA, 30 bp, Artificial Sequence
  Synthetic oligonucleotide
cgggtatgatagatgagctagacacaccgc

SEQ ID NO: 38651 - DNA, 30 bp, Artificial Sequence
  Synthetic oligonucleotide
tggtgaggggtaagctactggtggcaccgc

SEQ ID NO: 38652 - DNA, 30 bp, Artificial Sequence
  Synthetic oligonucleotide
tgcaaacatggtacccatggagctcaccgc

SEQ ID NO: 38653 - DNA, 30 bp, Artificial Sequence
  Synthetic oligonucleotide
gtgcatcggacaaaagatgataaataccgc

SEQ ID NO: 38654 - DNA, 30 bp, Artificial Sequence
  Synthetic oligonucleotide
acaatgttgggtgaagaactccgtgtccgc

SEQ ID NO: 38655 - DNA, 30 bp, Artificial Sequence
  Synthetic oligonucleotide
gtgtagtaattgaaaatgaaggacaagcgc

SEQ ID NO: 38656 - DNA, 30 bp, Artificial Sequence
  Synthetic oligonucleotide
agcaagctaagactagagggggtcaagcgc

SEQ ID NO: 38657 - DNA, 30 bp, Artificial Sequence
  Synthetic oligonucleotide
cgagtaggaaagtactcaagaggccagcgc

SEQ ID NO: 38658 - DNA, 30 bp, Artificial Sequence
  Synthetic oligonucleotide
agcgaccgtgaacggctcgtcaagcagcgc

SEQ ID NO: 38659 - DNA, 31 bp, Artificial Sequence
  Synthetic oligonucleotide
agctgactagacttacgtcagattggagcgc

SEQ ID NO: 38660 - DNA, 30 bp, Artificial Sequence
  Synthetic oligonucleotide
ctacagagaatttacacaatccgatagcgc

SEQ ID NO: 38661 - DNA, 30 bp, Artificial Sequence
  Synthetic oligonucleotide
acaagtcaggtagagctcgacaaaaggcgc

SEQ ID NO: 38662 - DNA, 30 bp, Artificial Sequence
  Synthetic oligonucleotide
gtctgaatacgaataacaactttagtgcgc

SEQ ID NO: 38663 - DNA, 30 bp, Artificial Sequence
  Synthetic oligonucleotide
cgcctctgatcttgaaacatagagcatcgc

SEQ ID NO: 38664 - DNA, 30 bp, Artificial Sequence
  Synthetic oligonucleotide
ggatgatcgcgggtaaagataagtgatcgc

SEQ ID NO: 38665 - DNA, 30 bp, Artificial Sequence
  Synthetic oligonucleotide
tgatacgaaggtttagtcgaatggcctcgc

SEQ ID NO: 38666 - DNA, 30 bp, Artificial Sequence
  Synthetic oligonucleotide
cacgatccttaactaagcaatacagctcgc

SEQ ID NO: 38667 - DNA, 30 bp, Artificial Sequence
  Synthetic oligonucleotide
tgtcgtgagcggcaaataacttcagctcgc

SEQ ID NO: 38668 - DNA, 30 bp, Artificial Sequence
  Synthetic oligonucleotide
tctcaacgcgaccacaaagttagatctcgc

SEQ ID NO: 38669 - DNA, 30 bp, Artificial Sequence
  Synthetic oligonucleotide
agcgtattcgcaaataacttgttctctcgc

SEQ ID NO: 38670 - DNA, 30 bp, Artificial Sequence
  Synthetic oligonucleotide
ccatggtgatcaatctcgaatttaagtcgc

SEQ ID NO: 38671 - DNA, 30 bp, Artificial Sequence
  Synthetic oligonucleotide
cgtagattcattgtaagggaatatagtcgc

SEQ ID NO: 38672 - DNA, 30 bp, Artificial Sequence
  Synthetic oligonucleotide
tctcacactacgttccgtcgtatgcgtcgc

SEQ ID NO: 38673 - DNA, 30 bp, Artificial Sequence
  Synthetic oligonucleotide
tgggtgcgtgtagcctatcatttctgtcgc

SEQ ID NO: 38674 - DNA, 30 bp, Artificial Sequence
  Synthetic oligonucleotide
ttcgagggcaaaataggagctcaccttcgc

SEQ ID NO: 38675 - DNA, 29 bp, Artificial Sequence
  Synthetic oligonucleotide
cgagaattatgtaaaagatggatcttcgc

SEQ ID NO: 38676 - DNA, 30 bp, Artificial Sequence
  Synthetic oligonucleotide
gtgcataggacaaaacgtgggggtgttcgc

SEQ ID NO: 38677 - DNA, 30 bp, Artificial Sequence
  Synthetic oligonucleotide
tcttaaaggttaacgaccctgatgaaaggc

SEQ ID NO: 38678 - DNA, 30 bp, Artificial Sequence
  Synthetic oligonucleotide
caaaaagttaggcatcgacagaatgaaggc

SEQ ID NO: 38679 - DNA, 30 bp, Artificial Sequence
  Synthetic oligonucleotide
ccaactgggacaattatgcatgaaacaggc

SEQ ID NO: 38680 - DNA, 30 bp, Artificial Sequence
  Synthetic oligonucleotide
atatggaaagagatagtacagctaccaggc

SEQ ID NO: 38681 - DNA, 30 bp, Artificial Sequence
  Synthetic oligonucleotide
acgaccgatcgttggcgagggggacgaggc

SEQ ID NO: 38682 - DNA, 30 bp, Artificial Sequence
  Synthetic oligonucleotide
tggtgtctctactcagccaaagagggaggc

SEQ ID NO: 38683 - DNA, 30 bp, Artificial Sequence
  Synthetic oligonucleotide
ccagttaggaaggcacagagaaggctaggc

SEQ ID NO: 38684 - DNA, 30 bp, Artificial Sequence
  Synthetic oligonucleotide
tcgtccgagtggatgcggattatgttaggc

SEQ ID NO: 38685 - DNA, 30 bp, Artificial Sequence
  Synthetic oligonucleotide
tccgaaacagaaataccctggcaaaacggc

SEQ ID NO: 38686 - DNA, 30 bp, Artificial Sequence
  Synthetic oligonucleotide
cggggattgagctctacctaacgacccggc

SEQ ID NO: 38687 - DNA, 30 bp, Artificial Sequence
  Synthetic oligonucleotide
acggagtcccgtatgttccagattagcggc

SEQ ID NO: 38688 - DNA, 30 bp, Artificial Sequence
  Synthetic oligonucleotide
ggtcgattcgaataaccctacttctgcggc

SEQ ID NO: 38689 - DNA, 30 bp, Artificial Sequence
  Synthetic oligonucleotide
agtacgtaaaagaatttctcacaggcgggc

SEQ ID NO: 38690 - DNA, 30 bp, Artificial Sequence
  Synthetic oligonucleotide
ttcacgaaagtataaatttgcgggatgggc

SEQ ID NO: 38691 - DNA, 30 bp, Artificial Sequence
  Synthetic oligonucleotide
gatagtgaaacctaaacacaagggttgggc

SEQ ID NO: 38692 - DNA, 30 bp, Artificial Sequence
  Synthetic oligonucleotide
aatgagctaaaagggtgaattccgaatggc

SEQ ID NO: 38693 - DNA, 30 bp, Artificial Sequence
  Synthetic oligonucleotide
tgaatgataacgaacggtttgcggaatggc

SEQ ID NO: 38694 - DNA, 30 bp, Artificial Sequence
  Synthetic oligonucleotide
tgcccaagccaagaagagcatgggaatggc

SEQ ID NO: 38695 - DNA, 30 bp, Artificial Sequence
  Synthetic oligonucleotide
aggggagataactgacgtgaattacatggc

SEQ ID NO: 38696 - DNA, 30 bp, Artificial Sequence
  Synthetic oligonucleotide
caatgacgtcgtgagagggtcatcgctggc

SEQ ID NO: 38697 - DNA, 30 bp, Artificial Sequence
  Synthetic oligonucleotide
acaagggaacggaggtcgcttgaacgtggc

SEQ ID NO: 38698 - DNA, 30 bp, Artificial Sequence
  Synthetic oligonucleotide
ccgtgcaatgtactatgtcataagattggc

SEQ ID NO: 38699 - DNA, 30 bp, Artificial Sequence
  Synthetic oligonucleotide
tcacccgggagggaagaacacgttacatgc

SEQ ID NO: 38700 - DNA, 30 bp, Artificial Sequence
  Synthetic oligonucleotide
tagaatcaagagtcatagctgagggcatgc

SEQ ID NO: 38701 - DNA, 30 bp, Artificial Sequence
  Synthetic oligonucleotide
gactaaccctaagggaatcgtcgtggatgc

SEQ ID NO: 38702 - DNA, 30 bp, Artificial Sequence
  Synthetic oligonucleotide
taacgtgaagggttatgaatacggtgatgc

SEQ ID NO: 38703 - DNA, 30 bp, Artificial Sequence
  Synthetic oligonucleotide
gacaagcctacaacaagatccgagcactgc

SEQ ID NO: 38704 - DNA, 30 bp, Artificial Sequence
  Synthetic oligonucleotide
agaaggaacatatggcgagtcatgctctgc

SEQ ID NO: 38705 - DNA, 30 bp, Artificial Sequence
  Synthetic oligonucleotide
tgaaaaagtgaaccccacgcacgtacgtgc

SEQ ID NO: 38706 - DNA, 30 bp, Artificial Sequence
  Synthetic oligonucleotide
gcgaaatgacaaattaaggtaggggcgtgc

SEQ ID NO: 38707 - DNA, 30 bp, Artificial Sequence
  Synthetic oligonucleotide
cgagacgaattgccattacttggtgcgtgc

SEQ ID NO: 38708 - DNA, 30 bp, Artificial Sequence
  Synthetic oligonucleotide
tccaaaggcagcgaaaaatccaggcggtgc

SEQ ID NO: 38709 - DNA, 30 bp, Artificial Sequence
  Synthetic oligonucleotide
cagagagcagaattttgacaaagtgggtgc

SEQ ID NO: 38710 - DNA, 30 bp, Artificial Sequence
  Synthetic oligonucleotide
gttaagcttgaacgaacggggggatggtgc

SEQ ID NO: 38711 - DNA, 30 bp, Artificial Sequence
  Synthetic oligonucleotide
catacgagtatcttaaagggctaaatgtgc

SEQ ID NO: 38712 - DNA, 30 bp, Artificial Sequence
  Synthetic oligonucleotide
tcacggggcgtggcgtttagaaggaattgc

SEQ ID NO: 38713 - DNA, 30 bp, Artificial Sequence
  Synthetic oligonucleotide
cgtgtgcactattacaaaaactagggttgc

SEQ ID NO: 38714 - DNA, 30 bp, Artificial Sequence
  Synthetic oligonucleotide
atcgggaataagagggatcggacccaaatc

SEQ ID NO: 38715 - DNA, 30 bp, Artificial Sequence
  Synthetic oligonucleotide
tatagaaggcttgaacaaataaagtaaatc

SEQ ID NO: 38716 - DNA, 30 bp, Artificial Sequence
  Synthetic oligonucleotide
agcgccagagacgctcactcacatagaatc

SEQ ID NO: 38717 - DNA, 30 bp, Artificial Sequence
  Synthetic oligonucleotide
cggcctaagacccccaaggacagtagaatc

SEQ ID NO: 38718 - DNA, 30 bp, Artificial Sequence
  Synthetic oligonucleotide
taacgtccagcttgcaaactcacctgaatc

SEQ ID NO: 38719 - DNA, 30 bp, Artificial Sequence
  Synthetic oligonucleotide
aaacgagagtcgcacctagtcaatgacatc

SEQ ID NO: 38720 - DNA, 30 bp, Artificial Sequence
  Synthetic oligonucleotide
ctggtacgtagtgagcaggctaaatacatc

SEQ ID NO: 38721 - DNA, 30 bp, Artificial Sequence
  Synthetic oligonucleotide
gcgacaaggtcctgccagacgtaaagcatc

SEQ ID NO: 38722 - DNA, 30 bp, Artificial Sequence
  Synthetic oligonucleotide
caaccgtacatgtgcgcaagtcaaggcatc

SEQ ID NO: 38723 - DNA, 30 bp, Artificial Sequence
  Synthetic oligonucleotide
cgctcagtggcgagatgtgctccactcatc

SEQ ID NO: 38724 - DNA, 30 bp, Artificial Sequence
  Synthetic oligonucleotide
cctcgttagacacattctgacgcctagatc

SEQ ID NO: 38725 - DNA, 30 bp, Artificial Sequence
  Synthetic oligonucleotide
actaggacaagaagctcttagggcacgatc

SEQ ID NO: 38726 - DNA, 30 bp, Artificial Sequence
  Synthetic oligonucleotide
gtgtagggcacagggaaagtactcacgatc

SEQ ID NO: 38727 - DNA, 30 bp, Artificial Sequence
  Synthetic oligonucleotide
agcccatacgccctacgaaacaatacgatc

SEQ ID NO: 38728 - DNA, 30 bp, Artificial Sequence
  Synthetic oligonucleotide
atcgcctataagttcgaccatcaaccgatc

SEQ ID NO: 38729 - DNA, 30 bp, Artificial Sequence
  Synthetic oligonucleotide
tgtccgactctacaaaaaagtcttccgatc

SEQ ID NO: 38730 - DNA, 30 bp, Artificial Sequence
  Synthetic oligonucleotide
gaagagacctgatacacgtaagaaaggatc

SEQ ID NO: 38731 - DNA, 30 bp, Artificial Sequence
  Synthetic oligonucleotide
cagaatcggagaacccacctacatgtgatc

SEQ ID NO: 38732 - DNA, 30 bp, Artificial Sequence
  Synthetic oligonucleotide
cctgattagaaaacacgtgatgttgctatc

SEQ ID NO: 38733 - DNA, 30 bp, Artificial Sequence
  Synthetic oligonucleotide
caagggacgatctagctatgaccaagtatc

SEQ ID NO: 38734 - DNA, 30 bp, Artificial Sequence
  Synthetic oligonucleotide
tggcccatgaaaacggagaaagtaggactc

SEQ ID NO: 38735 - DNA, 30 bp, Artificial Sequence
  Synthetic oligonucleotide
aggcttagcaagtagaagtcgataaacctc

SEQ ID NO: 38736 - DNA, 30 bp, Artificial Sequence
  Synthetic oligonucleotide
aagggtgcgaaaaatttagatccaagcctc

SEQ ID NO: 38737 - DNA, 30 bp, Artificial Sequence
  Synthetic oligonucleotide
ctgggattaaacataacacggacttgcctc

SEQ ID NO: 38738 - DNA, 30 bp, Artificial Sequence
  Synthetic oligonucleotide
agaggcagacgcgccgaccccgatcagctc

SEQ ID NO: 38739 - DNA, 30 bp, Artificial Sequence
  Synthetic oligonucleotide
aaacgtcatctcgaaattgaaggaacgctc

SEQ ID NO: 38740 - DNA, 30 bp, Artificial Sequence
  Synthetic oligonucleotide
caaaaaaacagtaactgtgtaagggggctc

SEQ ID NO: 38741 - DNA, 30 bp, Artificial Sequence
  Synthetic oligonucleotide
ggtagtaaatcgacatacacgaattggctc

SEQ ID NO: 38742 - DNA, 30 bp, Artificial Sequence
  Synthetic oligonucleotide
cgatccaaggtaacaaatttagaggatctc

SEQ ID NO: 38743 - DNA, 30 bp, Artificial Sequence
  Synthetic oligonucleotide
tcacgaaggtggacccctgcggatgatctc

SEQ ID NO: 38744 - DNA, 30 bp, Artificial Sequence
  Synthetic oligonucleotide
cggcatgaggaactaggttagcaaactctc

SEQ ID NO: 38745 - DNA, 30 bp, Artificial Sequence
  Synthetic oligonucleotide
cggaaacttcgagtctagctgataggtctc

SEQ ID NO: 38746 - DNA, 30 bp, Artificial Sequence
  Synthetic oligonucleotide
tgagggagaattgggattatactcgaagtc

SEQ ID NO: 38747 - DNA, 30 bp, Artificial Sequence
  Synthetic oligonucleotide
acggaaagagtagagttcagttcctaagtc

SEQ ID NO: 38748 - DNA, 30 bp, Artificial Sequence
  Synthetic oligonucleotide
cctcgcgatctcgagtcacagtaaacagtc

SEQ ID NO: 38749 - DNA, 30 bp, Artificial Sequence
  Synthetic oligonucleotide
cccactacgaacctaagccaaagggcagtc

SEQ ID NO: 38750 - DNA, 30 bp, Artificial Sequence
  Synthetic oligonucleotide
acggcgatgcggcatggagaaagggcagtc

SEQ ID NO: 38751 - DNA, 30 bp, Artificial Sequence
  Synthetic oligonucleotide
cgatacttgtctaacggatcttcttgagtc

SEQ ID NO: 38752 - DNA, 30 bp, Artificial Sequence
  Synthetic oligonucleotide
tgtcaggtctacaaataatgctagctagtc

SEQ ID NO: 38753 - DNA, 30 bp, Artificial Sequence
  Synthetic oligonucleotide
tagagggggacaaaagtgttctaattagtc

SEQ ID NO: 38754 - DNA, 30 bp, Artificial Sequence
  Synthetic oligonucleotide
cggacgagtggccggtaatgcattcccgtc

SEQ ID NO: 38755 - DNA, 30 bp, Artificial Sequence
  Synthetic oligonucleotide
gtacgcgtagtcaatctatcaactgccgtc

SEQ ID NO: 38756 - DNA, 30 bp, Artificial Sequence
  Synthetic oligonucleotide
cggtcccgggtgtcaaaagctagtgccgtc

SEQ ID NO: 38757 - DNA, 30 bp, Artificial Sequence
  Synthetic oligonucleotide
ggcatatccatatgcgataatggtgccgtc

SEQ ID NO: 38758 - DNA, 30 bp, Artificial Sequence
  Synthetic oligonucleotide
tctgcgtggctcgttacagatcgatccgtc

SEQ ID NO: 38759 - DNA, 30 bp, Artificial Sequence
  Synthetic oligonucleotide
gagctcaagaatagaaaacaccactccgtc

SEQ ID NO: 38760 - DNA, 30 bp, Artificial Sequence
  Synthetic oligonucleotide
acgttccatactatgtaattactctccgtc

SEQ ID NO: 38761 - DNA, 31 bp, Artificial Sequence
  Synthetic oligonucleotide
agaggatatgctatgggaccatagatgcgtc

SEQ ID NO: 38762 - DNA, 30 bp, Artificial Sequence
  Synthetic oligonucleotide
ggtaagtcgggcccgattgtaaggatcgtc

SEQ ID NO: 38763 - DNA, 30 bp, Artificial Sequence
  Synthetic oligonucleotide
gtacatggcgacgaaagttaaaggtaggtc

SEQ ID NO: 38764 - DNA, 30 bp, Artificial Sequence
  Synthetic oligonucleotide
aggctgtcaaccagcgctgcccgagcggtc

SEQ ID NO: 38765 - DNA, 30 bp, Artificial Sequence
  Synthetic oligonucleotide
gcgagcgtaaatcgtcagtgtggcatggtc

SEQ ID NO: 38766 - DNA, 30 bp, Artificial Sequence
  Synthetic oligonucleotide
ttgtgaggacaacacaataaggaactggtc

SEQ ID NO: 38767 - DNA, 30 bp, Artificial Sequence
  Synthetic oligonucleotide
aggactgggcacaacaagttctgcgatgtc

SEQ ID NO: 38768 - DNA, 30 bp, Artificial Sequence
  Synthetic oligonucleotide
tagtcaaggggatcggagacgggaagtgtc

SEQ ID NO: 38769 - DNA, 30 bp, Artificial Sequence
  Synthetic oligonucleotide
ggagggggtcaatccttcatagacagtgtc

SEQ ID NO: 38770 - DNA, 30 bp, Artificial Sequence
  Synthetic oligonucleotide
tcgacttatcgttgagaaagcgtaggtgtc

SEQ ID NO: 38771 - DNA, 30 bp, Artificial Sequence
  Synthetic oligonucleotide
agaggaacttaggtgaagtgtgacggtgtc

SEQ ID NO: 38772 - DNA, 30 bp, Artificial Sequence
  Synthetic oligonucleotide
gtaaaaaggtagcatgctcgtgaaattgtc

SEQ ID NO: 38773 - DNA, 30 bp, Artificial Sequence
  Synthetic oligonucleotide
cacgaattccacaactatgatagaattgtc

SEQ ID NO: 38774 - DNA, 30 bp, Artificial Sequence
  Synthetic oligonucleotide
tatgagaaacttgtggatggggtcggattc

SEQ ID NO: 38775 - DNA, 30 bp, Artificial Sequence
  Synthetic oligonucleotide
gttgggtgcctggtaataaaggtcgacttc

SEQ ID NO: 38776 - DNA, 30 bp, Artificial Sequence
  Synthetic oligonucleotide
catggcagggctcaatacggaagtgacttc

SEQ ID NO: 38777 - DNA, 30 bp, Artificial Sequence
  Synthetic oligonucleotide
cggattcggtgtgctccatgctctgccttc

SEQ ID NO: 38778 - DNA, 30 bp, Artificial Sequence
  Synthetic oligonucleotide
cgaaacgcgtttgcaaccaacttcgtcttc

SEQ ID NO: 38779 - DNA, 30 bp, Artificial Sequence
  Synthetic oligonucleotide
aggaagccattttacccactgccattcttc

SEQ ID NO: 38780 - DNA, 30 bp, Artificial Sequence
  Synthetic oligonucleotide
tatcgggatagggaatcgcgtgtcaagttc

SEQ ID NO: 38781 - DNA, 30 bp, Artificial Sequence
  Synthetic oligonucleotide
agaggttatctacgtataaaggggaagttc

SEQ ID NO: 38782 - DNA, 30 bp, Artificial Sequence
  Synthetic oligonucleotide
gcgcaatacgcgccgatagtaccagagttc

SEQ ID NO: 38783 - DNA, 30 bp, Artificial Sequence
  Synthetic oligonucleotide
aagggtgaacgtgagggtcatagaccgttc

SEQ ID NO: 38784 - DNA, 30 bp, Artificial Sequence
  Synthetic oligonucleotide
acgaggtcacgccatcgacagggagcgttc

SEQ ID NO: 38785 - DNA, 30 bp, Artificial Sequence
  Synthetic oligonucleotide
aagtggtgcaagggtctagtgtcgtggttc

SEQ ID NO: 38786 - DNA, 30 bp, Artificial Sequence
  Synthetic oligonucleotide
caaggtgaagaatcgtttaagcggtggttc

SEQ ID NO: 38787 - DNA, 30 bp, Artificial Sequence
  Synthetic oligonucleotide
cggacttaagaaacggaattgtaaatgttc

SEQ ID NO: 38788 - DNA, 30 bp, Artificial Sequence
  Synthetic oligonucleotide
cgaacgtatctcgcgataagaaatgtgttc

SEQ ID NO: 38789 - DNA, 30 bp, Artificial Sequence
  Synthetic oligonucleotide
tgcaaggtgtggacagtcttgattggtttc

SEQ ID NO: 38790 - DNA, 30 bp, Artificial Sequence
  Synthetic oligonucleotide
aaagcacggaccccgaggcgatctaaaaag

SEQ ID NO: 38791 - DNA, 30 bp, Artificial Sequence
  Synthetic oligonucleotide
gaataaaatgacacatacgaggccgaaaag

SEQ ID NO: 38792 - DNA, 30 bp, Artificial Sequence
  Synthetic oligonucleotide
aaatgccacttcataacgacgatggaaaag

SEQ ID NO: 38793 - DNA, 30 bp, Artificial Sequence
  Synthetic oligonucleotide
ggaatgagaagcccgacgccatgtgaaaag

SEQ ID NO: 38794 - DNA, 30 bp, Artificial Sequence
  Synthetic oligonucleotide
cgtcatggaagagaatgttgcctttaaaag

SEQ ID NO: 38795 - DNA, 30 bp, Artificial Sequence
  Synthetic oligonucleotide
ctgcggtcaaaaataagaaactcaacaaag

SEQ ID NO: 38796 - DNA, 30 bp, Artificial Sequence
  Synthetic oligonucleotide
gtgaggagatccctcacgacccaaccaaag

SEQ ID NO: 38797 - DNA, 30 bp, Artificial Sequence
  Synthetic oligonucleotide
tgaaaggttctgggtatcgaagggtcaaag

SEQ ID NO: 38798 - DNA, 30 bp, Artificial Sequence
  Synthetic oligonucleotide
tgaacaaggggagtctggtactgcagaaag

SEQ ID NO: 38799 - DNA, 30 bp, Artificial Sequence
  Synthetic oligonucleotide
acatggtcacgcacggcaggcagtagaaag

SEQ ID NO: 38800 - DNA, 30 bp, Artificial Sequence
  Synthetic oligonucleotide
ggctcaagtgactgttaatgccaccgaaag

SEQ ID NO: 38801 - DNA, 30 bp, Artificial Sequence
  Synthetic oligonucleotide
acgacggcaagcccacagtagcccggaaag

SEQ ID NO: 38802 - DNA, 30 bp, Artificial Sequence
  Synthetic oligonucleotide
tgggggctaaagaccacgtcatccggaaag

SEQ ID NO: 38803 - DNA, 30 bp, Artificial Sequence
  Synthetic oligonucleotide
gtggtaatgcgcagtgtgtgtcatggaaag

SEQ ID NO: 38804 - DNA, 30 bp, Artificial Sequence
  Synthetic oligonucleotide
tagtgcagatagagcgttgacaaatgaaag

SEQ ID NO: 38805 - DNA, 30 bp, Artificial Sequence
  Synthetic oligonucleotide
aaatgcgaggacgccatgacaataataaag

SEQ ID NO: 38806 - DNA, 30 bp, Artificial Sequence
  Synthetic oligonucleotide
gaccacatattacgcgcgacccacataaag

SEQ ID NO: 38807 - DNA, 30 bp, Artificial Sequence
  Synthetic oligonucleotide
agacttagagacagaacagtttgcataaag

SEQ ID NO: 38808 - DNA, 30 bp, Artificial Sequence
  Synthetic oligonucleotide
cattctggtagcagagcggacgtgataaag

SEQ ID NO: 38809 - DNA, 30 bp, Artificial Sequence
  Synthetic oligonucleotide
acactcctgggaacagaggtagtgctaaag

SEQ ID NO: 38810 - DNA, 30 bp, Artificial Sequence
  Synthetic oligonucleotide
taagaaaatacatatggtggcaacgtaaag

SEQ ID NO: 38811 - DNA, 30 bp, Artificial Sequence
  Synthetic oligonucleotide
caacccagtccgaactcactgctcgtaaag

SEQ ID NO: 38812 - DNA, 30 bp, Artificial Sequence
  Synthetic oligonucleotide
tgcattcatagcaggggaccaaccttaaag

SEQ ID NO: 38813 - DNA, 30 bp, Artificial Sequence
  Synthetic oligonucleotide
atacgacgcaatgacctcagggataacaag

SEQ ID NO: 38814 - DNA, 30 bp, Artificial Sequence
  Synthetic oligonucleotide
catggtcccaaacatctcgagatgcacaag

SEQ ID NO: 38815 - DNA, 30 bp, Artificial Sequence
  Synthetic oligonucleotide
aagaccgtactatgtaggtgtgtagacaag

SEQ ID NO: 38816 - DNA, 30 bp, Artificial Sequence
  Synthetic oligonucleotide
cagctggatcaccattaggtcacggacaag

SEQ ID NO: 38817 - DNA, 30 bp, Artificial Sequence
  Synthetic oligonucleotide
gagcatcacacatcatccgcattcgccaag

SEQ ID NO: 38818 - DNA, 30 bp, Artificial Sequence
  Synthetic oligonucleotide
gggtaaactggtcgagaaagcacgagcaag

SEQ ID NO: 38819 - DNA, 30 bp, Artificial Sequence
  Synthetic oligonucleotide
tgacattcaattccctgccaacatggcaag

SEQ ID NO: 38820 - DNA, 30 bp, Artificial Sequence
  Synthetic oligonucleotide
gtccgcgcccgtagcgcaaagacatgcaag

SEQ ID NO: 38821 - DNA, 30 bp, Artificial Sequence
  Synthetic oligonucleotide
gcgcaaggctcagcggaaacagcaatcaag

SEQ ID NO: 38822 - DNA, 30 bp, Artificial Sequence
  Synthetic oligonucleotide
caataaatcgaggccgatcaaataatcaag

SEQ ID NO: 38823 - DNA, 30 bp, Artificial Sequence
  Synthetic oligonucleotide
gctgggcagagcggtgtaacattcatcaag

SEQ ID NO: 38824 - DNA, 30 bp, Artificial Sequence
  Synthetic oligonucleotide
tggaaagaagggctgggcaatcccctcaag

SEQ ID NO: 38825 - DNA, 30 bp, Artificial Sequence
  Synthetic oligonucleotide
acggcaaatcaagttctgttccatctcaag

SEQ ID NO: 38826 - DNA, 30 bp, Artificial Sequence
  Synthetic oligonucleotide
gtcagcaggtacatgggaacatgggtcaag

SEQ ID NO: 38827 - DNA, 30 bp, Artificial Sequence
  Synthetic oligonucleotide
catgggaaggaaaggctggcatacaagaag

SEQ ID NO: 38828 - DNA, 30 bp, Artificial Sequence
  Synthetic oligonucleotide
cacaacggttcagaagttccaacgaagaag

SEQ ID NO: 38829 - DNA, 30 bp, Artificial Sequence
  Synthetic oligonucleotide
agatggatgggcatgtcatatctgaagaag

SEQ ID NO: 38830 - DNA, 30 bp, Artificial Sequence
  Synthetic oligonucleotide
agggtcaagagctcgtagacttaacagaag

SEQ ID NO: 38831 - DNA, 30 bp, Artificial Sequence
  Synthetic oligonucleotide
ccgtatagaaggtgagacatctgacagaag

SEQ ID NO: 38832 - DNA, 30 bp, Artificial Sequence
  Synthetic oligonucleotide
aacatccttggaacatgccccttccagaag

SEQ ID NO: 38833 - DNA, 30 bp, Artificial Sequence
  Synthetic oligonucleotide
gtgtgaggaaccccgcgcaccctgcagaag

SEQ ID NO: 38834 - DNA, 30 bp, Artificial Sequence
  Synthetic oligonucleotide
gtgatagcgaaagtatcagtgtctgagaag

SEQ ID NO: 38835 - DNA, 30 bp, Artificial Sequence
  Synthetic oligonucleotide
gaaaatggggcgaggcaagttgtgacgaag

SEQ ID NO: 38836 - DNA, 30 bp, Artificial Sequence
  Synthetic oligonucleotide
ttacggggccggggcaaggtttgtacgaag

SEQ ID NO: 38837 - DNA, 30 bp, Artificial Sequence
  Synthetic oligonucleotide
ccggatcaaatgacagcttagattccgaag

SEQ ID NO: 38838 - DNA, 30 bp, Artificial Sequence
  Synthetic oligonucleotide
aggtgagacaccgggtgctgtgtcaggaag

SEQ ID NO: 38839 - DNA, 30 bp, Artificial Sequence
  Synthetic oligonucleotide
agctcgatgatcacttgacaatagaggaag

SEQ ID NO: 38840 - DNA, 30 bp, Artificial Sequence
  Synthetic oligonucleotide
accgaacgatataggtcaacgtggcggaag

SEQ ID NO: 38841 - DNA, 30 bp, Artificial Sequence
  Synthetic oligonucleotide
gcgatggactggttagtcgaagcagggaag

SEQ ID NO: 38842 - DNA, 30 bp, Artificial Sequence
  Synthetic oligonucleotide
cgacggagaggatatttcaccagggggaag

SEQ ID NO: 38843 - DNA, 30 bp, Artificial Sequence
  Synthetic oligonucleotide
gaatgcagatggaaacccctgaggtggaag

SEQ ID NO: 38844 - DNA, 30 bp, Artificial Sequence
  Synthetic oligonucleotide
ttaggctgtagcagagcgacgacttggaag

SEQ ID NO: 38845 - DNA, 30 bp, Artificial Sequence
  Synthetic oligonucleotide
gataagactgctagaaatcaccacttgaag

SEQ ID NO: 38846 - DNA, 30 bp, Artificial Sequence
  Synthetic oligonucleotide
acgactccggacaggggtttatacttgaag

SEQ ID NO: 38847 - DNA, 30 bp, Artificial Sequence
  Synthetic oligonucleotide
cataagtcaccttatgtatatagcttgaag

SEQ ID NO: 38848 - DNA, 30 bp, Artificial Sequence
  Synthetic oligonucleotide
aggtgagtgcggagagtgcaagatttgaag

SEQ ID NO: 38849 - DNA, 30 bp, Artificial Sequence
  Synthetic oligonucleotide
attaggatgggagcaggccgaaacaataag

SEQ ID NO: 38850 - DNA, 30 bp, Artificial Sequence
  Synthetic oligonucleotide
cgtgttaaatggaatcacacacttaataag

SEQ ID NO: 38851 - DNA, 30 bp, Artificial Sequence
  Synthetic oligonucleotide
acgcgctggaatcgtccaatacaacataag

SEQ ID NO: 38852 - DNA, 30 bp, Artificial Sequence
  Synthetic oligonucleotide
caaggtgctgggtcgccgtgcctgcataag

SEQ ID NO: 38853 - DNA, 30 bp, Artificial Sequence
  Synthetic oligonucleotide
aaaagaggccaaccggatgagcgaactaag

SEQ ID NO: 38854 - DNA, 30 bp, Artificial Sequence
  Synthetic oligonucleotide
tcactaatggcgataaagtgacacactaag

SEQ ID NO: 38855 - DNA, 30 bp, Artificial Sequence
  Synthetic oligonucleotide
gacagaatcccagaaaattgtaaagctaag

SEQ ID NO: 38856 - DNA, 30 bp, Artificial Sequence
  Synthetic oligonucleotide
agcagacaatggtacaatttcaccgctaag

SEQ ID NO: 38857 - DNA, 30 bp, Artificial Sequence
  Synthetic oligonucleotide
cagatcagtggtatacgtaaaattgctaag

SEQ ID NO: 38858 - DNA, 30 bp, Artificial Sequence
  Synthetic oligonucleotide
tgaccgaactcggcgaagttccagagtaag

SEQ ID NO: 38859 - DNA, 30 bp, Artificial Sequence
  Synthetic oligonucleotide
ggcaataatgccggggttgcagatagtaag

SEQ ID NO: 38860 - DNA, 30 bp, Artificial Sequence
  Synthetic oligonucleotide
cgaagagtgtaggcgcgcttagatcgtaag

SEQ ID NO: 38861 - DNA, 30 bp, Artificial Sequence
  Synthetic oligonucleotide
tcgcatcagtccaaagtacttggtcgtaag

SEQ ID NO: 38862 - DNA, 30 bp, Artificial Sequence
  Synthetic oligonucleotide
gatgagggtcgaaatggcaccgccggtaag

SEQ ID NO: 38863 - DNA, 30 bp, Artificial Sequence
  Synthetic oligonucleotide
acaaaggactacctgagatagctctgtaag

SEQ ID NO: 38864 - DNA, 30 bp, Artificial Sequence
  Synthetic oligonucleotide
tgaccggtcacgtaggtcaggtcgtgtaag

SEQ ID NO: 38865 - DNA, 30 bp, Artificial Sequence
  Synthetic oligonucleotide
aaggggcagcctatctaaactaaacttaag

SEQ ID NO: 38866 - DNA, 30 bp, Artificial Sequence
  Synthetic oligonucleotide
ctatgtgcgtaatggagaagcagaaaacag

SEQ ID NO: 38867 - DNA, 30 bp, Artificial Sequence
  Synthetic oligonucleotide
tgatccccaagcagtatagggattaaacag

SEQ ID NO: 38868 - DNA, 30 bp, Artificial Sequence
  Synthetic oligonucleotide
tagcgccgtgtgtcagatgccctataacag

SEQ ID NO: 38869 - DNA, 30 bp, Artificial Sequence
  Synthetic oligonucleotide
accagggagtggtttgatcatcgttaacag

SEQ ID NO: 38870 - DNA, 30 bp, Artificial Sequence
  Synthetic oligonucleotide
gggaggtacccctgaattgaactttaacag

SEQ ID NO: 38871 - DNA, 30 bp, Artificial Sequence
  Synthetic oligonucleotide
tcatctatctggaaatttgacaccccacag

SEQ ID NO: 38872 - DNA, 30 bp, Artificial Sequence
  Synthetic oligonucleotide
cagtggaagttagtgggacagtcgccacag

SEQ ID NO: 38873 - DNA, 30 bp, Artificial Sequence
  Synthetic oligonucleotide
gttcgtagaacaagaagctagtacgcacag

SEQ ID NO: 38874 - DNA, 30 bp, Artificial Sequence
  Synthetic oligonucleotide
atgtaggtcaaaagcgtggatgtatcacag

SEQ ID NO: 38875 - DNA, 30 bp, Artificial Sequence
  Synthetic oligonucleotide
caggatccgtcccatggacaagatggacag

SEQ ID NO: 38876 - DNA, 30 bp, Artificial Sequence
  Synthetic oligonucleotide
caggagtaagaacattgaaatcaatgacag

SEQ ID NO: 38877 - DNA, 30 bp, Artificial Sequence
  Synthetic oligonucleotide
tcgctaggcaggtgggggcacagatgacag

SEQ ID NO: 38878 - DNA, 30 bp, Artificial Sequence
  Synthetic oligonucleotide
gagggtgctagaggagattacatatgacag

SEQ ID NO: 38879 - DNA, 30 bp, Artificial Sequence
  Synthetic oligonucleotide
tgggaagcatagaagcataaatggtgacag

SEQ ID NO: 38880 - DNA, 30 bp, Artificial Sequence
  Synthetic oligonucleotide
aagatacagaacaaaagacgcttcatacag

SEQ ID NO: 38881 - DNA, 30 bp, Artificial Sequence
  Synthetic oligonucleotide
aggttcagacacaggctataagggatacag

SEQ ID NO: 38882 - DNA, 30 bp, Artificial Sequence
  Synthetic oligonucleotide
gtcgatcaggtcacgttcacgggagtacag

SEQ ID NO: 38883 - DNA, 30 bp, Artificial Sequence
  Synthetic oligonucleotide
tgggtttggggtaaggctagaaatgtacag

SEQ ID NO: 38884 - DNA, 30 bp, Artificial Sequence
  Synthetic oligonucleotide
atatgactggagttggaatgtgtcaaccag

SEQ ID NO: 38885 - DNA, 30 bp, Artificial Sequence
  Synthetic oligonucleotide
gctgaccgtatcgctacctaagtgcaccag

SEQ ID NO: 38886 - DNA, 30 bp, Artificial Sequence
  Synthetic oligonucleotide
ggtatcaggtaagagtggtgattagaccag

SEQ ID NO: 38887 - DNA, 30 bp, Artificial Sequence
  Synthetic oligonucleotide
gggataaggtagatctagatatgggaccag

SEQ ID NO: 38888 - DNA, 30 bp, Artificial Sequence
  Synthetic oligonucleotide
tcgagtcggattttgggaaggtgaacccag

SEQ ID NO: 38889 - DNA, 30 bp, Artificial Sequence
  Synthetic oligonucleotide
acccaatggtaggacagtacgactccccag

SEQ ID NO: 38890 - DNA, 30 bp, Artificial Sequence
  Synthetic oligonucleotide
cggggaaacccaaatttgcccagcagccag

SEQ ID NO: 38891 - DNA, 30 bp, Artificial Sequence
  Synthetic oligonucleotide
atgccaaaggcgttatgcaactaaggccag

SEQ ID NO: 38892 - DNA, 30 bp, Artificial Sequence
  Synthetic oligonucleotide
gtagcgttaacgccggatgagatgtgccag

SEQ ID NO: 38893 - DNA, 30 bp, Artificial Sequence
  Synthetic oligonucleotide
cgggagtagcatacgctatgatctctccag

SEQ ID NO: 38894 - DNA, 30 bp, Artificial Sequence
  Synthetic oligonucleotide
ccggccccggggaccgattaacagaagcag

SEQ ID NO: 38895 - DNA, 30 bp, Artificial Sequence
  Synthetic oligonucleotide
tagtatagtattgacaaaggatagaagcag

SEQ ID NO: 38896 - DNA, 30 bp, Artificial Sequence
  Synthetic oligonucleotide
gccgaggcgccccagtacagaaaccagcag

SEQ ID NO: 38897 - DNA, 30 bp, Artificial Sequence
  Synthetic oligonucleotide
ggtagccataccagatcatggactgagcag

SEQ ID NO: 38898 - DNA, 30 bp, Artificial Sequence
  Synthetic oligonucleotide
atcagaccacctacgacaagtcaatagcag

SEQ ID NO: 38899 - DNA, 30 bp, Artificial Sequence
  Synthetic oligonucleotide
ctacataaggggcctgtgtcacgttagcag

SEQ ID NO: 38900 - DNA, 30 bp, Artificial Sequence
  Synthetic oligonucleotide
gcgtgctggtgtagggccaagacggcgcag

SEQ ID NO: 38901 - DNA, 30 bp, Artificial Sequence
  Synthetic oligonucleotide
cgactcatgggaggagttcggggtgcgcag

SEQ ID NO: 38902 - DNA, 30 bp, Artificial Sequence
  Synthetic oligonucleotide
gtgaccaatactgagagatctgactcgcag

SEQ ID NO: 38903 - DNA, 30 bp, Artificial Sequence
  Synthetic oligonucleotide
tgggtttgcgcatcagttaagaaaaggcag

SEQ ID NO: 38904 - DNA, 30 bp, Artificial Sequence
  Synthetic oligonucleotide
ataggcgaagaacgggctgatgccaggcag

SEQ ID NO: 38905 - DNA, 30 bp, Artificial Sequence
  Synthetic oligonucleotide
agggtcgggggcaaacagcgcggcgggcag

SEQ ID NO: 38906 - DNA, 30 bp, Artificial Sequence
  Synthetic oligonucleotide
ggaaggtaatacacgaagaaatgggggcag

SEQ ID NO: 38907 - DNA, 30 bp, Artificial Sequence
  Synthetic oligonucleotide
ccacgtaagtgcattgagaaggtggtgcag

SEQ ID NO: 38908 - DNA, 30 bp, Artificial Sequence
  Synthetic oligonucleotide
cgccacccaaagagatgcaagtcacatcag

SEQ ID NO: 38909 - DNA, 30 bp, Artificial Sequence
  Synthetic oligonucleotide
agatcagtacttctgataacggatcctcag

SEQ ID NO: 38910 - DNA, 30 bp, Artificial Sequence
  Synthetic oligonucleotide
ctgcatccgaagtggtttcttgtaagtcag

SEQ ID NO: 38911 - DNA, 30 bp, Artificial Sequence
  Synthetic oligonucleotide
ttgaccatcatggaatgccaagggagtcag

SEQ ID NO: 38912 - DNA, 40 bp, Artificial Sequence
  Synthetic oligonucleotide
gcctttgttgaccgtatcgaacagatcaccacgatgtcag

SEQ ID NO: 38913 - DNA, 30 bp, Artificial Sequence
  Synthetic oligonucleotide
ccatgcgtggagtttaccgttatcattcag

SEQ ID NO: 38914 - DNA, 30 bp, Artificial Sequence
  Synthetic oligonucleotide
tagacagggtgtaaccgaagcaatattcag

SEQ ID NO: 38915 - DNA, 30 bp, Artificial Sequence
  Synthetic oligonucleotide
acaacgaaacattgcacacaacggtttcag

SEQ ID NO: 38916 - DNA, 30 bp, Artificial Sequence
  Synthetic oligonucleotide
cgatagaggacgtagtctccttggtttcag

SEQ ID NO: 38917 - DNA, 30 bp, Artificial Sequence
  Synthetic oligonucleotide
agcatcgtagtatagatatggtagaaagag

SEQ ID NO: 38918 - DNA, 30 bp, Artificial Sequence
  Synthetic oligonucleotide
gttggttgacaagtgtgaaaatctaaagag

SEQ ID NO: 38919 - DNA, 30 bp, Artificial Sequence
  Synthetic oligonucleotide
gcctggccagcaaggctctgaagacaagag

SEQ ID NO: 38920 - DNA, 30 bp, Artificial Sequence
  Synthetic oligonucleotide
gtaagcctctccatgcagaatcgcgaagag

SEQ ID NO: 38921 - DNA, 30 bp, Artificial Sequence
  Synthetic oligonucleotide
tcagtctcagagctgtattgaaggtaagag

SEQ ID NO: 38922 - DNA, 30 bp, Artificial Sequence
  Synthetic oligonucleotide
gcgagtgaacgaatgtaatcggtttaagag

SEQ ID NO: 38923 - DNA, 30 bp, Artificial Sequence
  Synthetic oligonucleotide
atggtaacggtccatgacaataaaagagag

SEQ ID NO: 38924 - DNA, 30 bp, Artificial Sequence
  Synthetic oligonucleotide
tcactgacgtgtaacagccgttacagagag

SEQ ID NO: 38925 - DNA, 30 bp, Artificial Sequence
  Synthetic oligonucleotide
tcgcttaaaggaatgaagtgtccgagagag

SEQ ID NO: 38926 - DNA, 30 bp, Artificial Sequence
  Synthetic oligonucleotide
ccggaattccacttgttgtaggaaggagag

SEQ ID NO: 38927 - DNA, 30 bp, Artificial Sequence
  Synthetic oligonucleotide
gaccacttatatagcgacgaattaggagag

SEQ ID NO: 38928 - DNA, 30 bp, Artificial Sequence
  Synthetic oligonucleotide
ctccgtggaaatagcgaacgacggtgagag

SEQ ID NO: 38929 - DNA, 30 bp, Artificial Sequence
  Synthetic oligonucleotide
ggacaggtcgtttgctcaagacaaatagag

SEQ ID NO: 38930 - DNA, 30 bp, Artificial Sequence
  Synthetic oligonucleotide
cgacatccatccaggtcgcgcgtactagag

SEQ ID NO: 38931 - DNA, 30 bp, Artificial Sequence
  Synthetic oligonucleotide
ctacgggccaggtaacaggctaaagtagag

SEQ ID NO: 38932 - DNA, 30 bp, Artificial Sequence
  Synthetic oligonucleotide
tccgattcctcataacgcagttgagtagag

SEQ ID NO: 38933 - DNA, 30 bp, Artificial Sequence
  Synthetic oligonucleotide
tagcttcagagtgtggtgtcggaggtagag

SEQ ID NO: 38934 - DNA, 30 bp, Artificial Sequence
  Synthetic oligonucleotide
tgtcaggtaaatgattccggatcggtagag

SEQ ID NO: 38935 - DNA, 30 bp, Artificial Sequence
  Synthetic oligonucleotide
gttgtcgacgcgtgaaatcagaacttagag

SEQ ID NO: 38936 - DNA, 30 bp, Artificial Sequence
  Synthetic oligonucleotide
ggtatcagccggaaacaaggattgttagag

SEQ ID NO: 38937 - DNA, 30 bp, Artificial Sequence
  Synthetic oligonucleotide
ctgtatgtcttacgctcggtaaagaacgag

SEQ ID NO: 38938 - DNA, 30 bp, Artificial Sequence
  Synthetic oligonucleotide
ggttcaacgggccgctaatgcaataacgag

SEQ ID NO: 38939 - DNA, 30 bp, Artificial Sequence
  Synthetic oligonucleotide
ccacgtcaccaggagtggtgtcataacgag

SEQ ID NO: 38940 - DNA, 30 bp, Artificial Sequence
  Synthetic oligonucleotide
tcaatcctacagaactgtacgctccacgag

SEQ ID NO: 38941 - DNA, 30 bp, Artificial Sequence
  Synthetic oligonucleotide
atccaggacggtcagcaaaccactcacgag

SEQ ID NO: 38942 - DNA, 30 bp, Artificial Sequence
  Synthetic oligonucleotide
tacgggtcgttaagaaactgtcaggacgag

SEQ ID NO: 38943 - DNA, 30 bp, Artificial Sequence
  Synthetic oligonucleotide
ccgaccgggttaaacttgacccgatacgag

SEQ ID NO: 38944 - DNA, 30 bp, Artificial Sequence
  Synthetic oligonucleotide
cgaacgatattcgttttaagagcaaccgag

SEQ ID NO: 38945 - DNA, 30 bp, Artificial Sequence
  Synthetic oligonucleotide
atgtaatacgttacggtagcgatgaccgag

SEQ ID NO: 38946 - DNA, 30 bp, Artificial Sequence
  Synthetic oligonucleotide
ccaatccgggtaatagaggatcaacccgag

SEQ ID NO: 38947 - DNA, 30 bp, Artificial Sequence
  Synthetic oligonucleotide
atggtacgagttagctagggttgacccgag

SEQ ID NO: 38948 - DNA, 30 bp, Artificial Sequence
  Synthetic oligonucleotide
accgttgaggaattacgtgcgactgccgag

SEQ ID NO: 38949 - DNA, 30 bp, Artificial Sequence
  Synthetic oligonucleotide
acagatatcaattataattgcttatccgag

SEQ ID NO: 38950 - DNA, 30 bp, Artificial Sequence
  Synthetic oligonucleotide
tgtaagctcagggtaactattgtaagcgag

SEQ ID NO: 38951 - DNA, 30 bp, Artificial Sequence
  Synthetic oligonucleotide
taagagttagtagacagcgggagtagcgag

SEQ ID NO: 38952 - DNA, 30 bp, Artificial Sequence
  Synthetic oligonucleotide
cccgtgatccgtcatacggtgcgtagcgag

SEQ ID NO: 38953 - DNA, 30 bp, Artificial Sequence
  Synthetic oligonucleotide
aacaaccccacataggtgcgcgttagcgag

SEQ ID NO: 38954 - DNA, 30 bp, Artificial Sequence
  Synthetic oligonucleotide
gattaatagaggatactgcgtggtcgcgag

SEQ ID NO: 38955 - DNA, 30 bp, Artificial Sequence
  Synthetic oligonucleotide
cggcatgagctattctcgtttgctggcgag

SEQ ID NO: 38956 - DNA, 30 bp, Artificial Sequence
  Synthetic oligonucleotide
gggggtaaaacagcggctcactgatgcgag

SEQ ID NO: 38957 - DNA, 30 bp, Artificial Sequence
  Synthetic oligonucleotide
taaggtcggtgtcgacactcagtcctcgag

SEQ ID NO: 38958 - DNA, 30 bp, Artificial Sequence
  Synthetic oligonucleotide
ggctacagagcaccaagcatacaagtcgag

SEQ ID NO: 38959 - DNA, 30 bp, Artificial Sequence
  Synthetic oligonucleotide
cgcaacgtgcataaccagtgctcgttcgag

SEQ ID NO: 38960 - DNA, 30 bp, Artificial Sequence
  Synthetic oligonucleotide
aagcatgagagacaacgtgggatcaaggag

SEQ ID NO: 38961 - DNA, 30 bp, Artificial Sequence
  Synthetic oligonucleotide
gttacgtcgggagggacgtggatgcaggag

SEQ ID NO: 38962 - DNA, 30 bp, Artificial Sequence
  Synthetic oligonucleotide
aaaaggccaccggaattgccaaaagaggag

SEQ ID NO: 38963 - DNA, 30 bp, Artificial Sequence
  Synthetic oligonucleotide
tgtgaggcgaggacgatacgccaggaggag

SEQ ID NO: 38964 - DNA, 30 bp, Artificial Sequence
  Synthetic oligonucleotide
taaataagacctagccatggggagtaggag

SEQ ID NO: 38965 - DNA, 30 bp, Artificial Sequence
  Synthetic oligonucleotide
cctctaccggaagacaactgtggttaggag

SEQ ID NO: 38966 - DNA, 30 bp, Artificial Sequence
  Synthetic oligonucleotide
acgggacccaactttttcaacatcacggag

SEQ ID NO: 38967 - DNA, 30 bp, Artificial Sequence
  Synthetic oligonucleotide
gacagggcgtacactcaataagagacggag

SEQ ID NO: 38968 - DNA, 30 bp, Artificial Sequence
  Synthetic oligonucleotide
cgaaaagtcccaaaggtcacgaatgcggag

SEQ ID NO: 38969 - DNA, 30 bp, Artificial Sequence
  Synthetic oligonucleotide
cttccgaagcttatggaaggtatctcggag

SEQ ID NO: 38970 - DNA, 30 bp, Artificial Sequence
  Synthetic oligonucleotide
tacgacgaactagctatgaaacgtagggag

SEQ ID NO: 38971 - DNA, 30 bp, Artificial Sequence
  Synthetic oligonucleotide
gaagcccaaagccaaggatttcgtagggag

SEQ ID NO: 38972 - DNA, 30 bp, Artificial Sequence
  Synthetic oligonucleotide
agccagttagtacgaaagcaaaaccgggag

SEQ ID NO: 38973 - DNA, 30 bp, Artificial Sequence
  Synthetic oligonucleotide
agttgggataatcccgacccgagtggggag

SEQ ID NO: 38974 - DNA, 30 bp, Artificial Sequence
  Synthetic oligonucleotide
acattacataagtgtcaacaataatgggag

SEQ ID NO: 38975 - DNA, 30 bp, Artificial Sequence
  Synthetic oligonucleotide
atggcattttaagagtaacgccaaatggag

SEQ ID NO: 38976 - DNA, 30 bp, Artificial Sequence
  Synthetic oligonucleotide
agtgccgattgaaagaaagtaataatggag

SEQ ID NO: 38977 - DNA, 30 bp, Artificial Sequence
  Synthetic oligonucleotide
accactagcaaaccgtcagcgttaatggag

SEQ ID NO: 38978 - DNA, 30 bp, Artificial Sequence
  Synthetic oligonucleotide
atactgggactccaatgcaacaagatggag

SEQ ID NO: 38979 - DNA, 30 bp, Artificial Sequence
  Synthetic oligonucleotide
agacctcagtctgaaaggtaagatatggag

SEQ ID NO: 38980 - DNA, 30 bp, Artificial Sequence
  Synthetic oligonucleotide
cacattatggttctcagacaacgtatggag

SEQ ID NO: 38981 - DNA, 30 bp, Artificial Sequence
  Synthetic oligonucleotide
cccgagttcgaatggagaggagccttggag

SEQ ID NO: 38982 - DNA, 30 bp, Artificial Sequence
  Synthetic oligonucleotide
cgtcgtgcggggcggcttacaaccaatgag

SEQ ID NO: 38983 - DNA, 30 bp, Artificial Sequence
  Synthetic oligonucleotide
tgctaaactacgaggtgcctcgtcaatgag

SEQ ID NO: 38984 - DNA, 30 bp, Artificial Sequence
  Synthetic oligonucleotide
agggaacagagcagggtctaaaaacatgag

SEQ ID NO: 38985 - DNA, 30 bp, Artificial Sequence
  Synthetic oligonucleotide
tctaattagggatacgagcctaaccatgag

SEQ ID NO: 38986 - DNA, 30 bp, Artificial Sequence
  Synthetic oligonucleotide
cagacacagaggactcaacaatgtgatgag

SEQ ID NO: 38987 - DNA, 30 bp, Artificial Sequence
  Synthetic oligonucleotide
ggcaagcgagtcggtccttgagtatatgag

SEQ ID NO: 38988 - DNA, 30 bp, Artificial Sequence
  Synthetic oligonucleotide
cgcacgtacttgatgacgtgagggtatgag

SEQ ID NO: 38989 - DNA, 30 bp, Artificial Sequence
  Synthetic oligonucleotide
agaataggtgcaaaagggaaataaactgag

SEQ ID NO: 38990 - DNA, 30 bp, Artificial Sequence
  Synthetic oligonucleotide
gggaagagcaatgtgctgatgatcgctgag

SEQ ID NO: 38991 - DNA, 30 bp, Artificial Sequence
  Synthetic oligonucleotide
cgatactcatcagcgctgcgataggctgag

SEQ ID NO: 38992 - DNA, 29 bp, Artificial Sequence
  Synthetic oligonucleotide
tgccaaccgtcaatatcgcatcggctgag

SEQ ID NO: 38993 - DNA, 30 bp, Artificial Sequence
  Synthetic oligonucleotide
ttagcgtcccgctactaagtaacatctgag

SEQ ID NO: 38994 - DNA, 30 bp, Artificial Sequence
  Synthetic oligonucleotide
agcacagactgtaagttgcaagcgcgtgag

SEQ ID NO: 38995 - DNA, 30 bp, Artificial Sequence
  Synthetic oligonucleotide
catttaaaataaacgataaacgttcgtgag

SEQ ID NO: 38996 - DNA, 30 bp, Artificial Sequence
  Synthetic oligonucleotide
ttacgggctggatgaggcccaaaaggtgag

SEQ ID NO: 38997 - DNA, 30 bp, Artificial Sequence
  Synthetic oligonucleotide
agcaatggaaacacttgttaaggaggtgag

SEQ ID NO: 38998 - DNA, 30 bp, Artificial Sequence
  Synthetic oligonucleotide
atgcgttaaccagaccacgggctaggtgag

SEQ ID NO: 38999 - DNA, 30 bp, Artificial Sequence
  Synthetic oligonucleotide
cggccatgctaaagtgtgcgagtgggtgag

SEQ ID NO: 39000 - DNA, 30 bp, Artificial Sequence
  Synthetic oligonucleotide
tggggcagacgcgctgtcggccttggtgag

SEQ ID NO: 39001 - DNA, 30 bp, Artificial Sequence
  Synthetic oligonucleotide
ccttccgggcgacaatacaaaatttgtgag

SEQ ID NO: 39002 - DNA, 30 bp, Artificial Sequence
  Synthetic oligonucleotide
gtggacaggatcgagaacaaagaccttgag

SEQ ID NO: 39003 - DNA, 30 bp, Artificial Sequence
  Synthetic oligonucleotide
cggccgagatgggataccgttcctcttgag

SEQ ID NO: 39004 - DNA, 30 bp, Artificial Sequence
  Synthetic oligonucleotide
atccgtacacaggcacgttgacgagttgag

SEQ ID NO: 39005 - DNA, 30 bp, Artificial Sequence
  Synthetic oligonucleotide
catacgatgatagaataaccctgagttgag

SEQ ID NO: 39006 - DNA, 30 bp, Artificial Sequence
  Synthetic oligonucleotide
ggagaataatcgggccgtgtcatagttgag

SEQ ID NO: 39007 - DNA, 30 bp, Artificial Sequence
  Synthetic oligonucleotide
ttgttgtcgaagcaaatggataacgttgag

SEQ ID NO: 39008 - DNA, 30 bp, Artificial Sequence
  Synthetic oligonucleotide
gactaagtagagtcataaagcgtatttgag

SEQ ID NO: 39009 - DNA, 30 bp, Artificial Sequence
  Synthetic oligonucleotide
aaaccagtagtctaagaagtagccaaatag

SEQ ID NO: 39010 - DNA, 30 bp, Artificial Sequence
  Synthetic oligonucleotide
catgggatggcaatcatcacctgagaatag

SEQ ID NO: 39011 - DNA, 30 bp, Artificial Sequence
  Synthetic oligonucleotide
actcggatcccggtaacagataacgaatag

SEQ ID NO: 39012 - DNA, 30 bp, Artificial Sequence
  Synthetic oligonucleotide
tctaaatatcgtacgagcttcgacgaatag

SEQ ID NO: 39013 - DNA, 30 bp, Artificial Sequence
  Synthetic oligonucleotide
aatactagcgcggtccggcgtatcgaatag

SEQ ID NO: 39014 - DNA, 30 bp, Artificial Sequence
  Synthetic oligonucleotide
tcatactgtggggtgcctctagaggaatag

SEQ ID NO: 39015 - DNA, 30 bp, Artificial Sequence
  Synthetic oligonucleotide
cgacccattaaaatgggcgcctgggaatag

SEQ ID NO: 39016 - DNA, 30 bp, Artificial Sequence
  Synthetic oligonucleotide
tcttcacaattagggtacaacctggaatag

SEQ ID NO: 39017 - DNA, 30 bp, Artificial Sequence
  Synthetic oligonucleotide
aggaccgttcgaacgaaggaccgctaatag

SEQ ID NO: 39018 - DNA, 30 bp, Artificial Sequence
  Synthetic oligonucleotide
caaaaaaacagggaagctttgtacacatag

SEQ ID NO: 39019 - DNA, 30 bp, Artificial Sequence
  Synthetic oligonucleotide
tgacggtgtgggcacgtgaacaccacatag

SEQ ID NO: 39020 - DNA, 30 bp, Artificial Sequence
  Synthetic oligonucleotide
ccggccgagattgtcgtgcaagttacatag

SEQ ID NO: 39021 - DNA, 31 bp, Artificial Sequence
  Synthetic oligonucleotide
gggttgtttggacccgaaggccagatcatag

SEQ ID NO: 39022 - DNA, 30 bp, Artificial Sequence
  Synthetic oligonucleotide
cgagattaacgggctttagagcggtcatag

SEQ ID NO: 39023 - DNA, 30 bp, Artificial Sequence
  Synthetic oligonucleotide
agcacgtgtgcgcggcttgaagccagatag

SEQ ID NO: 39024 - DNA, 30 bp, Artificial Sequence
  Synthetic oligonucleotide
tctgatccacacaaagaaaaaaatagatag

SEQ ID NO: 39025 - DNA, 30 bp, Artificial Sequence
  Synthetic oligonucleotide
tggatttgtgacatagatgaaaagcgatag

SEQ ID NO: 39026 - DNA, 30 bp, Artificial Sequence
  Synthetic oligonucleotide
tgtcgtgtggtccgaacttaaaagggatag

SEQ ID NO: 39027 - DNA, 30 bp, Artificial Sequence
  Synthetic oligonucleotide
gccaagggatcagggaaatcggcctgatag

SEQ ID NO: 39028 - DNA, 30 bp, Artificial Sequence
  Synthetic oligonucleotide
ggaggcatgtgtgcgacggagaagtgatag

SEQ ID NO: 39029 - DNA, 30 bp, Artificial Sequence
  Synthetic oligonucleotide
tgagtcatacgggtaccaacgttgatatag

SEQ ID NO: 39030 - DNA, 30 bp, Artificial Sequence
  Synthetic oligonucleotide
cacaaactcggcaggtacacttctctatag

SEQ ID NO: 39031 - DNA, 30 bp, Artificial Sequence
  Synthetic oligonucleotide
gacgacaagcaaatccgttggactgtatag

SEQ ID NO: 39032 - DNA, 30 bp, Artificial Sequence
  Synthetic oligonucleotide
ccagacccggaagtacccagtaatcactag

SEQ ID NO: 39033 - DNA, 30 bp, Artificial Sequence
  Synthetic oligonucleotide
tcgccatgctcaggcaatatgaccgactag

SEQ ID NO: 39034 - DNA, 30 bp, Artificial Sequence
  Synthetic oligonucleotide
agttagaagccacagtaaaggcctgactag

SEQ ID NO: 39035 - DNA, 30 bp, Artificial Sequence
  Synthetic oligonucleotide
acatagagacgaccatctggtcagtactag

SEQ ID NO: 39036 - DNA, 30 bp, Artificial Sequence
  Synthetic oligonucleotide
cacgagaaacggaagattacactgtactag

SEQ ID NO: 39037 - DNA, 30 bp, Artificial Sequence
  Synthetic oligonucleotide
tgcggtcccgcggaaataaagtcaacctag

SEQ ID NO: 39038 - DNA, 30 bp, Artificial Sequence
  Synthetic oligonucleotide
aggagcagcagaagatagcccatcccctag

SEQ ID NO: 39039 - DNA, 30 bp, Artificial Sequence
  Synthetic oligonucleotide
ctcacaaccttagatcgacagatcgcctag

SEQ ID NO: 39040 - DNA, 30 bp, Artificial Sequence
  Synthetic oligonucleotide
atgacaggaattttttagagaccatcctag

SEQ ID NO: 39041 - DNA, 30 bp, Artificial Sequence
  Synthetic oligonucleotide
aggcaagtgtagggtttcccataacgctag

SEQ ID NO: 39042 - DNA, 30 bp, Artificial Sequence
  Synthetic oligonucleotide
ccagaatgaatagttacgttgtaaggctag

SEQ ID NO: 39043 - DNA, 30 bp, Artificial Sequence
  Synthetic oligonucleotide
aggacatggactccccaatcgctaggctag

SEQ ID NO: 39044 - DNA, 30 bp, Artificial Sequence
  Synthetic oligonucleotide
caaggagagcacttttaggccaagatctag

SEQ ID NO: 39045 - DNA, 30 bp, Artificial Sequence
  Synthetic oligonucleotide
caaaacctactgatgaaccgtgacttctag

SEQ ID NO: 39046 - DNA, 30 bp, Artificial Sequence
  Synthetic oligonucleotide
tcgggacaaaaattgttgaaaaccaagtag

SEQ ID NO: 39047 - DNA, 30 bp, Artificial Sequence
  Synthetic oligonucleotide
agtggttgaacacccgcggagacgaagtag

SEQ ID NO: 39048 - DNA, 30 bp, Artificial Sequence
  Synthetic oligonucleotide
gggcgcgcgattagatttaggaatgagtag

SEQ ID NO: 39049 - DNA, 30 bp, Artificial Sequence
  Synthetic oligonucleotide
gataaaatgtgaacgagccacaaatagtag

SEQ ID NO: 39050 - DNA, 30 bp, Artificial Sequence
  Synthetic oligonucleotide
tatcgtgtaggagactgtgtgcgaacgtag

SEQ ID NO: 39051 - DNA, 30 bp, Artificial Sequence
  Synthetic oligonucleotide
cgatgtcaagatgcctttacaaacccgtag

SEQ ID NO: 39052 - DNA, 30 bp, Artificial Sequence
  Synthetic oligonucleotide
aaaggtagcacaagagcaccagcggcgtag

SEQ ID NO: 39053 - DNA, 30 bp, Artificial Sequence
  Synthetic oligonucleotide
atcgtagataggggcatcattagatcgtag

SEQ ID NO: 39054 - DNA, 30 bp, Artificial Sequence
  Synthetic oligonucleotide
tagctgtgcaagagacggtggaccaggtag

SEQ ID NO: 39055 - DNA, 30 bp, Artificial Sequence
  Synthetic oligonucleotide
aaggaaaaaacctgagtgcgtgtcaggtag

SEQ ID NO: 39056 - DNA, 30 bp, Artificial Sequence
  Synthetic oligonucleotide
gtaggtagaggcgagtcttgtgagaggtag

SEQ ID NO: 39057 - DNA, 30 bp, Artificial Sequence
  Synthetic oligonucleotide
cacaaatttgccaaaaaggaccgtaggtag

SEQ ID NO: 39058 - DNA, 30 bp, Artificial Sequence
  Synthetic oligonucleotide
tcagccttaagtacacctcgcgaacggtag

SEQ ID NO: 39059 - DNA, 30 bp, Artificial Sequence
  Synthetic oligonucleotide
agcggcataaaacggtcgttcccacggtag

SEQ ID NO: 39060 - DNA, 30 bp, Artificial Sequence
  Synthetic oligonucleotide
tacgggatggtattacccatatgtcggtag

SEQ ID NO: 39061 - DNA, 30 bp, Artificial Sequence
  Synthetic oligonucleotide
actgcccatgactagctaatgccgtggtag

SEQ ID NO: 39062 - DNA, 30 bp, Artificial Sequence
  Synthetic oligonucleotide
tacataagagagggggaatccagaatgtag

SEQ ID NO: 39063 - DNA, 30 bp, Artificial Sequence
  Synthetic oligonucleotide
tggaccacgaaacgagaaaaagatatgtag

SEQ ID NO: 39064 - DNA, 30 bp, Artificial Sequence
  Synthetic oligonucleotide
aggcgcgtgggcttctcgaattggctgtag

SEQ ID NO: 39065 - DNA, 30 bp, Artificial Sequence
  Synthetic oligonucleotide
ccacgagtcctgcacatatctgaccattag

SEQ ID NO: 39066 - DNA, 30 bp, Artificial Sequence
  Synthetic oligonucleotide
tcggtaaaaggttcaaaggcatggacttag

SEQ ID NO: 39067 - DNA, 30 bp, Artificial Sequence
  Synthetic oligonucleotide
tgtgcaaatatcaggatcacgtatacttag

SEQ ID NO: 39068 - DNA, 30 bp, Artificial Sequence
  Synthetic oligonucleotide
caagactgaaggtaagcgctgaatccttag

SEQ ID NO: 39069 - DNA, 30 bp, Artificial Sequence
  Synthetic oligonucleotide
cagaacggactggtataaggggtcgcttag

SEQ ID NO: 39070 - DNA, 30 bp, Artificial Sequence
  Synthetic oligonucleotide
ctaggagatcacacctacccgtcaagttag

SEQ ID NO: 39071 - DNA, 30 bp, Artificial Sequence
  Synthetic oligonucleotide
taaggggcgatatagatcagtaaacgttag

SEQ ID NO: 39072 - DNA, 30 bp, Artificial Sequence
  Synthetic oligonucleotide
ctaacgccccggggacaccgacatggttag

SEQ ID NO: 39073 - DNA, 30 bp, Artificial Sequence
  Synthetic oligonucleotide
agccgaagaacattgggctttcggtgttag

SEQ ID NO: 39074 - DNA, 30 bp, Artificial Sequence
  Synthetic oligonucleotide
tcggcggggaaatgttcatcaaagctttag

SEQ ID NO: 39075 - DNA, 30 bp, Artificial Sequence
  Synthetic oligonucleotide
catacgagagaacgtgccgtctgattttag

SEQ ID NO: 39076 - DNA, 30 bp, Artificial Sequence
  Synthetic oligonucleotide
attaagatcttaacgtcaagcagaaaaacg

SEQ ID NO: 39077 - DNA, 29 bp, Artificial Sequence
  Synthetic oligonucleotide
accatacggtccgaagtaggaagcaaacg

SEQ ID NO: 39078 - DNA, 30 bp, Artificial Sequence
  Synthetic oligonucleotide
aaaacgcctggactcatgggtgcgcaaacg

SEQ ID NO: 39079 - DNA, 30 bp, Artificial Sequence
  Synthetic oligonucleotide
cttacgggtcatgaccagtccccagaaacg

SEQ ID NO: 39080 - DNA, 30 bp, Artificial Sequence
  Synthetic oligonucleotide
agcggcattagtaagtaagagcgcgaaacg

SEQ ID NO: 39081 - DNA, 30 bp, Artificial Sequence
  Synthetic oligonucleotide
ctgtatggtgaaacacaaggcgagacaacg

SEQ ID NO: 39082 - DNA, 30 bp, Artificial Sequence
  Synthetic oligonucleotide
tacgacaggggggatcgatttgttccaacg

SEQ ID NO: 39083 - DNA, 30 bp, Artificial Sequence
  Synthetic oligonucleotide
tgccaccaagagtgcccaggcgatgcaacg

SEQ ID NO: 39084 - DNA, 30 bp, Artificial Sequence
  Synthetic oligonucleotide
tgtcaatggctagggacttggaactcaacg

SEQ ID NO: 39085 - DNA, 30 bp, Artificial Sequence
  Synthetic oligonucleotide
agggatcagtctcgactagctccaagaacg

SEQ ID NO: 39086 - DNA, 30 bp, Artificial Sequence
  Synthetic oligonucleotide
aagaggtggcatcgcgaagattcacgaacg

SEQ ID NO: 39087 - DNA, 30 bp, Artificial Sequence
  Synthetic oligonucleotide
ccagggaattcagagcccgagcgtcgaacg

SEQ ID NO: 39088 - DNA, 30 bp, Artificial Sequence
  Synthetic oligonucleotide
tcataatggaccgactcgcaagttggaacg

SEQ ID NO: 39089 - DNA, 30 bp, Artificial Sequence
  Synthetic oligonucleotide
tgatcaattgccaagatgaactcactaacg

SEQ ID NO: 39090 - DNA, 30 bp, Artificial Sequence
  Synthetic oligonucleotide
gatgaacaatgctacaaatgtaacctaacg

SEQ ID NO: 39091 - DNA, 30 bp, Artificial Sequence
  Synthetic oligonucleotide
ggaaggttgtggggcctgcctagtttaacg

SEQ ID NO: 39092 - DNA, 30 bp, Artificial Sequence
  Synthetic oligonucleotide
tggagatcccgtaaatcagactgtttaacg

SEQ ID NO: 39093 - DNA, 30 bp, Artificial Sequence
  Synthetic oligonucleotide
actataacggatgaactaatgggatacacg

SEQ ID NO: 39094 - DNA, 30 bp, Artificial Sequence
  Synthetic oligonucleotide
acgttcgttcggccaaacccaacctacacg

SEQ ID NO: 39095 - DNA, 30 bp, Artificial Sequence
  Synthetic oligonucleotide
tggtatgcaaccggagaggattgttacacg

SEQ ID NO: 39096 - DNA, 30 bp, Artificial Sequence
  Synthetic oligonucleotide
tttgagtagagcaccaacggaaagcccacg

SEQ ID NO: 39097 - DNA, 30 bp, Artificial Sequence
  Synthetic oligonucleotide
taatgctaggaaacagtgagttgagccacg

SEQ ID NO: 39098 - DNA, 30 bp, Artificial Sequence
  Synthetic oligonucleotide
agaattgaatctgtgcaaacaatgatcacg

SEQ ID NO: 39099 - DNA, 30 bp, Artificial Sequence
  Synthetic oligonucleotide
catagaacctccggggaagtagcggtcacg

SEQ ID NO: 39100 - DNA, 30 bp, Artificial Sequence
  Synthetic oligonucleotide
taaaactgagaataggtcaagaccaagacg

SEQ ID NO: 39101 - DNA, 30 bp, Artificial Sequence
  Synthetic oligonucleotide
tggcacccgtattatgacataaagaagacg

SEQ ID NO: 39102 - DNA, 30 bp, Artificial Sequence
  Synthetic oligonucleotide
tacataggtttacgccgataagcccagacg

SEQ ID NO: 39103 - DNA, 30 bp, Artificial Sequence
  Synthetic oligonucleotide
cagataagactctacttgaattatcagacg

SEQ ID NO: 39104 - DNA, 30 bp, Artificial Sequence
  Synthetic oligonucleotide
atcgagtaagccgactgggcctcagagacg

SEQ ID NO: 39105 - DNA, 30 bp, Artificial Sequence
  Synthetic oligonucleotide
tgattccgagaagccgaggtcagatagacg

SEQ ID NO: 39106 - DNA, 30 bp, Artificial Sequence
  Synthetic oligonucleotide
acattgctggaacataaggtgtgaccgacg

SEQ ID NO: 39107 - DNA, 40 bp, Artificial Sequence
  Synthetic oligonucleotide
gggacgggctgaaccctttctaagcaatgcataagggacg

SEQ ID NO: 39108 - DNA, 30 bp, Artificial Sequence
  Synthetic oligonucleotide
catgctcagtaaaggggtacagctaatacg

SEQ ID NO: 39109 - DNA, 30 bp, Artificial Sequence
  Synthetic oligonucleotide
aaacggagcgggtgggttctccatcatacg

SEQ ID NO: 39110 - DNA, 30 bp, Artificial Sequence
  Synthetic oligonucleotide
cccaagccgctaggctgaagaactgatacg

SEQ ID NO: 39111 - DNA, 30 bp, Artificial Sequence
  Synthetic oligonucleotide
actccgcagatggcaagagcaggcactacg

SEQ ID NO: 39112 - DNA, 30 bp, Artificial Sequence
  Synthetic oligonucleotide
tgggtaggggtagtacacgcctagcctacg

SEQ ID NO: 39113 - DNA, 30 bp, Artificial Sequence
  Synthetic oligonucleotide
agcgggagtaaacagcggaatattcctacg

SEQ ID NO: 39114 - DNA, 30 bp, Artificial Sequence
  Synthetic oligonucleotide
cggaggtatttggccgtattcaccagtacg

SEQ ID NO: 39115 - DNA, 31 bp, Artificial Sequence
  Synthetic oligonucleotide
atgaggaaaattcgattaaaccttaggtacg

SEQ ID NO: 39116 - DNA, 30 bp, Artificial Sequence
  Synthetic oligonucleotide
cataccctgtgaagtaaactgatcggtacg

SEQ ID NO: 39117 - DNA, 30 bp, Artificial Sequence
  Synthetic oligonucleotide
cgaatagaagaaccatcgcgctggtgtacg

SEQ ID NO: 39118 - DNA, 30 bp, Artificial Sequence
  Synthetic oligonucleotide
catcgcgtatacgtggaccaagcttgtacg

SEQ ID NO: 39119 - DNA, 30 bp, Artificial Sequence
  Synthetic oligonucleotide
aggataaccattatcagttcggcaattacg

SEQ ID NO: 39120 - DNA, 30 bp, Artificial Sequence
  Synthetic oligonucleotide
taggtggtattagcgtcgaaaccaaaaccg

SEQ ID NO: 39121 - DNA, 30 bp, Artificial Sequence
  Synthetic oligonucleotide
tgagaagtgctagaagtgtcctagaaaccg

SEQ ID NO: 39122 - DNA, 30 bp, Artificial Sequence
  Synthetic oligonucleotide
ttcaggaatagcgcgtctcaaccgaaaccg

SEQ ID NO: 39123 - DNA, 30 bp, Artificial Sequence
  Synthetic oligonucleotide
tggaggtgaccggtagaaagagatcaaccg

SEQ ID NO: 39124 - DNA, 30 bp, Artificial Sequence
  Synthetic oligonucleotide
ggcgacataactattaacttttcgtaaccg

SEQ ID NO: 39125 - DNA, 30 bp, Artificial Sequence
  Synthetic oligonucleotide
cacgggaatagccaggggtagcgaacaccg

SEQ ID NO: 39126 - DNA, 30 bp, Artificial Sequence
  Synthetic oligonucleotide
acgagacgaggccgatgactgctaacaccg

SEQ ID NO: 39127 - DNA, 30 bp, Artificial Sequence
  Synthetic oligonucleotide
gtgtgtgccgaaacaactaacgccacaccg

SEQ ID NO: 39128 - DNA, 30 bp, Artificial Sequence
  Synthetic oligonucleotide
gcatagtggggactcaaagatgttgcaccg

SEQ ID NO: 39129 - DNA, 30 bp, Artificial Sequence
  Synthetic oligonucleotide
gcagacagctagtaggctcatcgaggaccg

SEQ ID NO: 39130 - DNA, 30 bp, Artificial Sequence
  Synthetic oligonucleotide
tacgtgaggtgggtagtacataactgaccg

SEQ ID NO: 39131 - DNA, 30 bp, Artificial Sequence
  Synthetic oligonucleotide
aagctgggacgatactagccaggcataccg

SEQ ID NO: 39132 - DNA, 30 bp, Artificial Sequence
  Synthetic oligonucleotide
gaaagactgagttaccgagaaccgttaccg

SEQ ID NO: 39133 - DNA, 30 bp, Artificial Sequence
  Synthetic oligonucleotide
ggctaagcgaagcgaaatcaagcaaacccg

SEQ ID NO: 39134 - DNA, 30 bp, Artificial Sequence
  Synthetic oligonucleotide
ctagaccagtgaattccaagagttaccccg

SEQ ID NO: 39135 - DNA, 30 bp, Artificial Sequence
  Synthetic oligonucleotide
tggaccgctcaagatgaaacaaatagcccg

SEQ ID NO: 39136 - DNA, 30 bp, Artificial Sequence
  Synthetic oligonucleotide
tgagagttaaaggaactttcgtagcgcccg

SEQ ID NO: 39137 - DNA, 30 bp, Artificial Sequence
  Synthetic oligonucleotide
gacaaggcattaaatggcagcagggtcccg

SEQ ID NO: 39138 - DNA, 30 bp, Artificial Sequence
  Synthetic oligonucleotide
aggtccgattcgcgccatctacacaagccg

SEQ ID NO: 39139 - DNA, 30 bp, Artificial Sequence
  Synthetic oligonucleotide
aagaggggaacacagtcggcgcgcaagccg

SEQ ID NO: 39140 - DNA, 30 bp, Artificial Sequence
  Synthetic oligonucleotide
ctgtcagatattccaaggagcaatcagccg

SEQ ID NO: 39141 - DNA, 30 bp, Artificial Sequence
  Synthetic oligonucleotide
acgtggcaacgtgaatgctttaagtagccg

SEQ ID NO: 39142 - DNA, 30 bp, Artificial Sequence
  Synthetic oligonucleotide
catcgtaagatgaggccaacgattacgccg

SEQ ID NO: 39143 - DNA, 30 bp, Artificial Sequence
  Synthetic oligonucleotide
gaacggggatcaatatgggaggttccgccg

SEQ ID NO: 39144 - DNA, 30 bp, Artificial Sequence
  Synthetic oligonucleotide
cacccaagcaggtgctaggtataggcgccg

SEQ ID NO: 39145 - DNA, 30 bp, Artificial Sequence
  Synthetic oligonucleotide
agaagctaggcgttaagaagaggccggccg

SEQ ID NO: 39146 - DNA, 30 bp, Artificial Sequence
  Synthetic oligonucleotide
atacgtgggtcaaggacaaatgctcggccg

SEQ ID NO: 39147 - DNA, 30 bp, Artificial Sequence
  Synthetic oligonucleotide
cggctagaagcattgtaaaatcggtggccg

SEQ ID NO: 39148 - DNA, 30 bp, Artificial Sequence
  Synthetic oligonucleotide
cgtgggaaggtaccacgagggcattggccg

SEQ ID NO: 39149 - DNA, 30 bp, Artificial Sequence
  Synthetic oligonucleotide
gcgtcaaaccaccagcaatgtccgatgccg

SEQ ID NO: 39150 - DNA, 30 bp, Artificial Sequence
  Synthetic oligonucleotide
ttacgaaagtcgctcgaagagtaactgccg

SEQ ID NO: 39151 - DNA, 30 bp, Artificial Sequence
  Synthetic oligonucleotide
aggggggacatgggataagataatgtgccg

SEQ ID NO: 39152 - DNA, 30 bp, Artificial Sequence
  Synthetic oligonucleotide
tggcgtacgaccaacgtacgagacttgccg

SEQ ID NO: 39153 - DNA, 30 bp, Artificial Sequence
  Synthetic oligonucleotide
tccgaacgcatgtggcatctaactaatccg

SEQ ID NO: 39154 - DNA, 30 bp, Artificial Sequence
  Synthetic oligonucleotide
agttaacagaacatcagcagtgccgatccg

SEQ ID NO: 39155 - DNA, 30 bp, Artificial Sequence
  Synthetic oligonucleotide
aaggtaaagtctccaacgttgcaaactccg

SEQ ID NO: 39156 - DNA, 30 bp, Artificial Sequence
  Synthetic oligonucleotide
tcagcagcgggtcaatagagtgggcctccg

SEQ ID NO: 39157 - DNA, 30 bp, Artificial Sequence
  Synthetic oligonucleotide
ttagcggcccaagaacgataatgagctccg

SEQ ID NO: 39158 - DNA, 30 bp, Artificial Sequence
  Synthetic oligonucleotide
acttgatttgcgaggaccaacggggctccg

SEQ ID NO: 39159 - DNA, 30 bp, Artificial Sequence
  Synthetic oligonucleotide
agttatagttaggctaagacacattctccg

SEQ ID NO: 39160 - DNA, 30 bp, Artificial Sequence
  Synthetic oligonucleotide
atgtgtggacaagtaaggagtctaggtccg

SEQ ID NO: 39161 - DNA, 30 bp, Artificial Sequence
  Synthetic oligonucleotide
cataccgtaaatctgccgagattgcttccg

SEQ ID NO: 39162 - DNA, 30 bp, Artificial Sequence
  Synthetic oligonucleotide
ggctgacaatgagcctcatatcgttttccg

SEQ ID NO: 39163 - DNA, 30 bp, Artificial Sequence
  Synthetic oligonucleotide
tcgaaggaaggaatccgtcgatggaaagcg

SEQ ID NO: 39164 - DNA, 30 bp, Artificial Sequence
  Synthetic oligonucleotide
tatgcgatctgaagcgaggtaattaaagcg

SEQ ID NO: 39165 - DNA, 30 bp, Artificial Sequence
  Synthetic oligonucleotide
tgccacgtggtcgaaattccagatccagcg

SEQ ID NO: 39166 - DNA, 30 bp, Artificial Sequence
  Synthetic oligonucleotide
accatcgggtgtaagaatgctaaagcagcg

SEQ ID NO: 39167 - DNA, 30 bp, Artificial Sequence
  Synthetic oligonucleotide
cggccaaggcgaggaactgccagttcagcg

SEQ ID NO: 39168 - DNA, 30 bp, Artificial Sequence
  Synthetic oligonucleotide
ggtgacggtaaaagttagttaagaagagcg

SEQ ID NO: 39169 - DNA, 30 bp, Artificial Sequence
  Synthetic oligonucleotide
acctgactgtgcaaggtaagcccaggagcg

SEQ ID NO: 39170 - DNA, 30 bp, Artificial Sequence
  Synthetic oligonucleotide
cttgtcagccaaagggaggggcatggagcg

SEQ ID NO: 39171 - DNA, 30 bp, Artificial Sequence
  Synthetic oligonucleotide
actgcgggaaagcccactaaggacatagcg

SEQ ID NO: 39172 - DNA, 30 bp, Artificial Sequence
  Synthetic oligonucleotide
acggctcacaatcggtaccacgttagcgcg

SEQ ID NO: 39173 - DNA, 30 bp, Artificial Sequence
  Synthetic oligonucleotide
ccgtatcccaagttaagatacacacgcgcg

SEQ ID NO: 39174 - DNA, 30 bp, Artificial Sequence
  Synthetic oligonucleotide
cgagtggaaggggggcgaccagtcatcgcg

SEQ ID NO: 39175 - DNA, 30 bp, Artificial Sequence
  Synthetic oligonucleotide
gactgtgtgacaaacgtaaaacaaaaggcg

SEQ ID NO: 39176 - DNA, 30 bp, Artificial Sequence
  Synthetic oligonucleotide
ttaagggaaaacctcgtagattggaaggcg

SEQ ID NO: 39177 - DNA, 30 bp, Artificial Sequence
  Synthetic oligonucleotide
cctaacacccggaccataatccaacaggcg

SEQ ID NO: 39178 - DNA, 30 bp, Artificial Sequence
  Synthetic oligonucleotide
cgtaaaagtccaatatttcggatagaggcg

SEQ ID NO: 39179 - DNA, 30 bp, Artificial Sequence
  Synthetic oligonucleotide
gacggatagttgtatactaagaactaggcg

SEQ ID NO: 39180 - DNA, 30 bp, Artificial Sequence
  Synthetic oligonucleotide
atggaaaaaggatttagatggtagccggcg

SEQ ID NO: 39181 - DNA, 30 bp, Artificial Sequence
  Synthetic oligonucleotide
agagagaaatattaccatctcaagtgggcg

SEQ ID NO: 39182 - DNA, 30 bp, Artificial Sequence
  Synthetic oligonucleotide
tataaacccgagaccaaatggagaatggcg

SEQ ID NO: 39183 - DNA, 30 bp, Artificial Sequence
  Synthetic oligonucleotide
tagtatggaagaaatacaaagaccgtggcg

SEQ ID NO: 39184 - DNA, 30 bp, Artificial Sequence
  Synthetic oligonucleotide
ctgactacctcagatacgaaagtgttggcg

SEQ ID NO: 39185 - DNA, 28 bp, Artificial Sequence
  Synthetic oligonucleotide
ccaagcaacggggtgtgccaaggatgcg

SEQ ID NO: 39186 - DNA, 30 bp, Artificial Sequence
  Synthetic oligonucleotide
cgcctggaggtagggttggtattctatgcg

SEQ ID NO: 39187 - DNA, 30 bp, Artificial Sequence
  Synthetic oligonucleotide
tagggacgtctggggggctaaaagtatgcg

SEQ ID NO: 39188 - DNA, 30 bp, Artificial Sequence
  Synthetic oligonucleotide
caaccggaaggacatgtcaaatattctgcg

SEQ ID NO: 39189 - DNA, 30 bp, Artificial Sequence
  Synthetic oligonucleotide
ttggaaaatgccggcgtcatacacattgcg

SEQ ID NO: 39190 - DNA, 30 bp, Artificial Sequence
  Synthetic oligonucleotide
agggccagaatcggaattgaaattattgcg

SEQ ID NO: 39191 - DNA, 30 bp, Artificial Sequence
  Synthetic oligonucleotide
aactcgcacattataaacaaggtcaaatcg

SEQ ID NO: 39192 - DNA, 30 bp, Artificial Sequence
  Synthetic oligonucleotide
tcgtcacaaaaatagggatcatggaaatcg

SEQ ID NO: 39193 - DNA, 30 bp, Artificial Sequence
  Synthetic oligonucleotide
tcagcaaggtgcatatacttacataaatcg

SEQ ID NO: 39194 - DNA, 30 bp, Artificial Sequence
  Synthetic oligonucleotide
agagatagacatgtggagaatcgtcaatcg

SEQ ID NO: 39195 - DNA, 30 bp, Artificial Sequence
  Synthetic oligonucleotide
gcttcatacaaatatcattggctcgaatcg

SEQ ID NO: 39196 - DNA, 30 bp, Artificial Sequence
  Synthetic oligonucleotide
gggttcaaagcatctgcccccttctaatcg

SEQ ID NO: 39197 - DNA, 30 bp, Artificial Sequence
  Synthetic oligonucleotide
ctccaatcccaggcgggatcagggccatcg

SEQ ID NO: 39198 - DNA, 30 bp, Artificial Sequence
  Synthetic oligonucleotide
tcaccgtattaaacgtccatgcaatcatcg

SEQ ID NO: 39199 - DNA, 30 bp, Artificial Sequence
  Synthetic oligonucleotide
ggtgtacgccagagaaggcgagggtcatcg

SEQ ID NO: 39200 - DNA, 30 bp, Artificial Sequence
  Synthetic oligonucleotide
cgtcctcgcctaaaaatcggcagtagatcg

SEQ ID NO: 39201 - DNA, 30 bp, Artificial Sequence
  Synthetic oligonucleotide
gtagatcagtaaacagcgtaatgtagatcg

SEQ ID NO: 39202 - DNA, 30 bp, Artificial Sequence
  Synthetic oligonucleotide
gaatcggcaagggatgactggagacgatcg

SEQ ID NO: 39203 - DNA, 30 bp, Artificial Sequence
  Synthetic oligonucleotide
ggatgtacaggcatctcaccaatgcgatcg

SEQ ID NO: 39204 - DNA, 30 bp, Artificial Sequence
  Synthetic oligonucleotide
caagcgcataggatagttgtaaagtgatcg

SEQ ID NO: 39205 - DNA, 30 bp, Artificial Sequence
  Synthetic oligonucleotide
ttcacatccgccaaacccaccgccatatcg

SEQ ID NO: 39206 - DNA, 30 bp, Artificial Sequence
  Synthetic oligonucleotide
tcaacgagcggcaaagttctgatgatatcg

SEQ ID NO: 39207 - DNA, 30 bp, Artificial Sequence
  Synthetic oligonucleotide
tcgtggtagggagacttcatccctttatcg

SEQ ID NO: 39208 - DNA, 30 bp, Artificial Sequence
  Synthetic oligonucleotide
tgtcgggcatggttagcgccaatatactcg

SEQ ID NO: 39209 - DNA, 30 bp, Artificial Sequence
  Synthetic oligonucleotide
acggaaaacgggggaacgtaagagtactcg

SEQ ID NO: 39210 - DNA, 30 bp, Artificial Sequence
  Synthetic oligonucleotide
ctaaggctgcatcctcgaatccgcacctcg

SEQ ID NO: 39211 - DNA, 30 bp, Artificial Sequence
  Synthetic oligonucleotide
gtaatccaagcaccagatgtgactacctcg

SEQ ID NO: 39212 - DNA, 30 bp, Artificial Sequence
  Synthetic oligonucleotide
gcgaacacgcacccgaacaaaaagccctcg

SEQ ID NO: 39213 - DNA, 30 bp, Artificial Sequence
  Synthetic oligonucleotide
catggggttttagttaaaaagatcagctcg

SEQ ID NO: 39214 - DNA, 30 bp, Artificial Sequence
  Synthetic oligonucleotide
cagggacactaaagcaagctacgtagctcg

SEQ ID NO: 39215 - DNA, 30 bp, Artificial Sequence
  Synthetic oligonucleotide
actgatagtggttggtagcgaaaaatctcg

SEQ ID NO: 39216 - DNA, 30 bp, Artificial Sequence
  Synthetic oligonucleotide
accagcggttcgggcgagatcgaactctcg

SEQ ID NO: 39217 - DNA, 30 bp, Artificial Sequence
  Synthetic oligonucleotide
agaggatagagtgaccttaatgaactctcg

SEQ ID NO: 39218 - DNA, 30 bp, Artificial Sequence
  Synthetic oligonucleotide
atggttaggtggaagacattcggcctctcg

SEQ ID NO: 39219 - DNA, 30 bp, Artificial Sequence
  Synthetic oligonucleotide
ccggcagaaaacaaacaactgatagtctcg

SEQ ID NO: 39220 - DNA, 30 bp, Artificial Sequence
  Synthetic oligonucleotide
tcgggtctgcctcaatagggactgttctcg

SEQ ID NO: 39221 - DNA, 30 bp, Artificial Sequence
  Synthetic oligonucleotide
ccaaacacctggcaaagtattggacagtcg

SEQ ID NO: 39222 - DNA, 30 bp, Artificial Sequence
  Synthetic oligonucleotide
acgcttaatgtcaatggagcaatggagtcg

SEQ ID NO: 39223 - DNA, 30 bp, Artificial Sequence
  Synthetic oligonucleotide
tactggcggtgtcaaccagaatcgtagtcg

SEQ ID NO: 39224 - DNA, 30 bp, Artificial Sequence
  Synthetic oligonucleotide
agcgtaagtcctgaccgggtacgaacgtcg

SEQ ID NO: 39225 - DNA, 30 bp, Artificial Sequence
  Synthetic oligonucleotide
attgaaagcgagagcgtcatattcacgtcg

SEQ ID NO: 39226 - DNA, 30 bp, Artificial Sequence
  Synthetic oligonucleotide
ccgagaagtctcggcttacgggccgcgtcg

SEQ ID NO: 39227 - DNA, 30 bp, Artificial Sequence
  Synthetic oligonucleotide
tgggcaaggtcaatcggttaatggcggtcg

SEQ ID NO: 39228 - DNA, 30 bp, Artificial Sequence
  Synthetic oligonucleotide
caatcggcctaaaaccgcttacgagggtcg

SEQ ID NO: 39229 - DNA, 30 bp, Artificial Sequence
  Synthetic oligonucleotide
cagaggaaaagatttcagtctcaatggtcg

SEQ ID NO: 39230 - DNA, 30 bp, Artificial Sequence
  Synthetic oligonucleotide
tgaaaaaagtacaggcgtgtgacttggtcg

SEQ ID NO: 39231 - DNA, 30 bp, Artificial Sequence
  Synthetic oligonucleotide
taagaacgaaacgtcgcttactgttggtcg

SEQ ID NO: 39232 - DNA, 30 bp, Artificial Sequence
  Synthetic oligonucleotide
catcgctgtattgatcgtgtcgcaatgtcg

SEQ ID NO: 39233 - DNA, 30 bp, Artificial Sequence
  Synthetic oligonucleotide
atgtgtgttatctactagtccgagatgtcg

SEQ ID NO: 39234 - DNA, 30 bp, Artificial Sequence
  Synthetic oligonucleotide
cggcccaacagcgagacagcctctatgtcg

SEQ ID NO: 39235 - DNA, 30 bp, Artificial Sequence
  Synthetic oligonucleotide
ttccttacgtctaagagggagggactgtcg

SEQ ID NO: 39236 - DNA, 30 bp, Artificial Sequence
  Synthetic oligonucleotide
ggctagagcttagaggcaacgtatctgtcg

SEQ ID NO: 39237 - DNA, 30 bp, Artificial Sequence
  Synthetic oligonucleotide
agggaacgcggtttcaaaaaaagagtgtcg

SEQ ID NO: 39238 - DNA, 30 bp, Artificial Sequence
  Synthetic oligonucleotide
acgcacattgtaacgagaaaccaacattcg

SEQ ID NO: 39239 - DNA, 31 bp, Artificial Sequence
  Synthetic oligonucleotide
actatagacagagagagtacccagccattcg

SEQ ID NO: 39240 - DNA, 30 bp, Artificial Sequence
  Synthetic oligonucleotide
tacaacgaacttgtcccatccagcgattcg

SEQ ID NO: 39241 - DNA, 31 bp, Artificial Sequence
  Synthetic oligonucleotide
cgagtttaatgcatttgtgaataaggattcg

SEQ ID NO: 39242 - DNA, 30 bp, Artificial Sequence
  Synthetic oligonucleotide
acgcggaccctacgtataaggagctattcg

SEQ ID NO: 39243 - DNA, 30 bp, Artificial Sequence
  Synthetic oligonucleotide
gggtggtcttaggtgatggacagtccttcg

SEQ ID NO: 39244 - DNA, 30 bp, Artificial Sequence
  Synthetic oligonucleotide
ggcccggacagtcaaaaggtcatagcttcg

SEQ ID NO: 39245 - DNA, 30 bp, Artificial Sequence
  Synthetic oligonucleotide
cttagtaatcagaggtagccaagtgcttcg

SEQ ID NO: 39246 - DNA, 30 bp, Artificial Sequence
  Synthetic oligonucleotide
gccgatcacggtatggttgaactgagttcg

SEQ ID NO: 39247 - DNA, 30 bp, Artificial Sequence
  Synthetic oligonucleotide
aggagatgggccagcaataagaacctttcg

SEQ ID NO: 39248 - DNA, 30 bp, Artificial Sequence
  Synthetic oligonucleotide
aggtgagtaagctctcgagtcttcgtttcg

SEQ ID NO: 39249 - DNA, 30 bp, Artificial Sequence
  Synthetic oligonucleotide
accataaaaaccaatgaagacagcaaaagg

SEQ ID NO: 39250 - DNA, 30 bp, Artificial Sequence
  Synthetic oligonucleotide
ggcggtttatatagggttgacccgaaaagg

SEQ ID NO: 39251 - DNA, 31 bp, Artificial Sequence
  Synthetic oligonucleotide
tgtcaatggatgagccaattagatacaaagg

SEQ ID NO: 39252 - DNA, 30 bp, Artificial Sequence
  Synthetic oligonucleotide
tccataaaacggagaatcagaggtcaaagg

SEQ ID NO: 39253 - DNA, 30 bp, Artificial Sequence
  Synthetic oligonucleotide
aagtcccgaaaatcaatgaggagtgaaagg

SEQ ID NO: 39254 - DNA, 30 bp, Artificial Sequence
  Synthetic oligonucleotide
ctgacaataaaatcctactctggcccaagg

SEQ ID NO: 39255 - DNA, 30 bp, Artificial Sequence
  Synthetic oligonucleotide
ctaaattgcagaacgacaataaagccaagg

SEQ ID NO: 39256 - DNA, 30 bp, Artificial Sequence
  Synthetic oligonucleotide
gctcaaggtcatcaaaacgtttatccaagg

SEQ ID NO: 39257 - DNA, 30 bp, Artificial Sequence
  Synthetic oligonucleotide
gttcatcttaataaacccccgagggcaagg

SEQ ID NO: 39258 - DNA, 30 bp, Artificial Sequence
  Synthetic oligonucleotide
acaatttcgtcaaaccctaattccagaagg

SEQ ID NO: 39259 - DNA, 30 bp, Artificial Sequence
  Synthetic oligonucleotide
cagggttagacctatagatcggaacgaagg

SEQ ID NO: 39260 - DNA, 30 bp, Artificial Sequence
  Synthetic oligonucleotide
agcttgccagtaaggggtatgcgatgaagg

SEQ ID NO: 39261 - DNA, 30 bp, Artificial Sequence
  Synthetic oligonucleotide
atagagccaaacgtacataatcaaataagg

SEQ ID NO: 39262 - DNA, 30 bp, Artificial Sequence
  Synthetic oligonucleotide
gaccttcagacagcggggactagggtaagg

SEQ ID NO: 39263 - DNA, 30 bp, Artificial Sequence
  Synthetic oligonucleotide
aacagcaaactcccacgtacggtggtaagg

SEQ ID NO: 39264 - DNA, 31 bp, Artificial Sequence
  Synthetic oligonucleotide
cgagggctattctgtgagacgttaattaagg

SEQ ID NO: 39265 - DNA, 30 bp, Artificial Sequence
  Synthetic oligonucleotide
ttcgtacacgagatcccagtagtattaagg

SEQ ID NO: 39266 - DNA, 30 bp, Artificial Sequence
  Synthetic oligonucleotide
agcacgtggaaagctgtaacattgttaagg

SEQ ID NO: 39267 - DNA, 30 bp, Artificial Sequence
  Synthetic oligonucleotide
aagtcacgatagcgaacgaccgaaaacagg

SEQ ID NO: 39268 - DNA, 30 bp, Artificial Sequence
  Synthetic oligonucleotide
ccacgtatttcggggaagtcggtcaacagg

SEQ ID NO: 39269 - DNA, 29 bp, Artificial Sequence
  Synthetic oligonucleotide
cgcgaagtcgatagctcacatagaacagg

SEQ ID NO: 39270 - DNA, 30 bp, Artificial Sequence
  Synthetic oligonucleotide
gggagcgtcggatagcacaagtagaacagg

SEQ ID NO: 39271 - DNA, 30 bp, Artificial Sequence
  Synthetic oligonucleotide
ggaacgtctggcacttgccgaccgaacagg

SEQ ID NO: 39272 - DNA, 30 bp, Artificial Sequence
  Synthetic oligonucleotide
aaaggcagggagctggcatccggtaacagg

SEQ ID NO: 39273 - DNA, 30 bp, Artificial Sequence
  Synthetic oligonucleotide
agagctgctcggctcggctaggttaacagg

SEQ ID NO: 39274 - DNA, 30 bp, Artificial Sequence
  Synthetic oligonucleotide
gagtcagattattaaaggaggcacgacagg

SEQ ID NO: 39275 - DNA, 30 bp, Artificial Sequence
  Synthetic oligonucleotide
ggaggggaggctcggtatcaccactacagg

SEQ ID NO: 39276 - DNA, 30 bp, Artificial Sequence
  Synthetic oligonucleotide
gttaggttaaaacgagaggtcgttcccagg

SEQ ID NO: 39277 - DNA, 30 bp, Artificial Sequence
  Synthetic oligonucleotide
agcggataacgatgccgtaagtgttccagg

SEQ ID NO: 39278 - DNA, 30 bp, Artificial Sequence
  Synthetic oligonucleotide
ggaatagcggagttaacttgaaggagcagg

SEQ ID NO: 39279 - DNA, 30 bp, Artificial Sequence
  Synthetic oligonucleotide
tcgttcatgcgaagaatgcggagaggcagg

SEQ ID NO: 39280 - DNA, 30 bp, Artificial Sequence
  Synthetic oligonucleotide
ggcctaacatagatccacaatgtgggcagg

SEQ ID NO: 39281 - DNA, 30 bp, Artificial Sequence
  Synthetic oligonucleotide
cagttggggtataagacatcatattgcagg

SEQ ID NO: 39282 - DNA, 30 bp, Artificial Sequence
  Synthetic oligonucleotide
cgctccatataaagcctcgatccagtcagg

SEQ ID NO: 39283 - DNA, 30 bp, Artificial Sequence
  Synthetic oligonucleotide
tcatcaatgggttatagctcggcagtcagg

SEQ ID NO: 39284 - DNA, 30 bp, Artificial Sequence
  Synthetic oligonucleotide
cccaaggttcggatcgacgagaataagagg

SEQ ID NO: 39285 - DNA, 30 bp, Artificial Sequence
  Synthetic oligonucleotide
agtgagggtactgtaaatcgcgaggagagg

SEQ ID NO: 39286 - DNA, 30 bp, Artificial Sequence
  Synthetic oligonucleotide
atgaatcacgatgtgtttaggatctagagg

SEQ ID NO: 39287 - DNA, 30 bp, Artificial Sequence
  Synthetic oligonucleotide
taagctgccagagcccgcgggccgacgagg

SEQ ID NO: 39288 - DNA, 30 bp, Artificial Sequence
  Synthetic oligonucleotide
caagagtactctgacgaatacatgacgagg

SEQ ID NO: 39289 - DNA, 30 bp, Artificial Sequence
  Synthetic oligonucleotide
tagtaaagacgaatctcaacatctacgagg

SEQ ID NO: 39290 - DNA, 30 bp, Artificial Sequence
  Synthetic oligonucleotide
ccgggcttagcaccgaaaagaatcccgagg

SEQ ID NO: 39291 - DNA, 30 bp, Artificial Sequence
  Synthetic oligonucleotide
cgccgtacagaggtctcaaggaaggcgagg

SEQ ID NO: 39292 - DNA, 30 bp, Artificial Sequence
  Synthetic oligonucleotide
gatgatcttcgtcagacggtctaaaggagg

SEQ ID NO: 39293 - DNA, 30 bp, Artificial Sequence
  Synthetic oligonucleotide
aacgtgggggacggctactacttttggagg

SEQ ID NO: 39294 - DNA, 30 bp, Artificial Sequence
  Synthetic oligonucleotide
ctgatcatggtaaacgagccagtcttgagg

SEQ ID NO: 39295 - DNA, 30 bp, Artificial Sequence
  Synthetic oligonucleotide
aatgtaagaagattgagggctgagaatagg

SEQ ID NO: 39296 - DNA, 30 bp, Artificial Sequence
  Synthetic oligonucleotide
gacgaagctggatcataagatactcctagg

SEQ ID NO: 39297 - DNA, 30 bp, Artificial Sequence
  Synthetic oligonucleotide
tgacaacgggctgacctgatcgagcgtagg

SEQ ID NO: 39298 - DNA, 30 bp, Artificial Sequence
  Synthetic oligonucleotide
ctgagaaactctgagtagaacttaggtagg

SEQ ID NO: 39299 - DNA, 30 bp, Artificial Sequence
  Synthetic oligonucleotide
caaagtgcgcatcaaatgtttggacttagg

SEQ ID NO: 39300 - DNA, 30 bp, Artificial Sequence
  Synthetic oligonucleotide
ataaacgaacgtagaagaacccggcttagg

SEQ ID NO: 39301 - DNA, 30 bp, Artificial Sequence
  Synthetic oligonucleotide
catgagtattccgaaaatacacgggttagg

SEQ ID NO: 39302 - DNA, 30 bp, Artificial Sequence
  Synthetic oligonucleotide
cgcgaaaggcgtaacagttttacttttagg

SEQ ID NO: 39303 - DNA, 30 bp, Artificial Sequence
  Synthetic oligonucleotide
caacagactcctcactatcatgtcaaacgg

SEQ ID NO: 39304 - DNA, 30 bp, Artificial Sequence
  Synthetic oligonucleotide
ggtgttagtctatgatcagagagagaacgg

SEQ ID NO: 39305 - DNA, 30 bp, Artificial Sequence
  Synthetic oligonucleotide
tggcccgaaggatttgtcattaccgaacgg

SEQ ID NO: 39306 - DNA, 30 bp, Artificial Sequence
  Synthetic oligonucleotide
caggaaggttaaggattatgcgcataacgg

SEQ ID NO: 39307 - DNA, 30 bp, Artificial Sequence
  Synthetic oligonucleotide
gatagagaacctgatcaaaagaattaacgg

SEQ ID NO: 39308 - DNA, 30 bp, Artificial Sequence
  Synthetic oligonucleotide
cgaaggttataaaacaaggcaatgccacgg

SEQ ID NO: 39309 - DNA, 31 bp, Artificial Sequence
  Synthetic oligonucleotide
gtcgtaatcaaaggtggcacttctttcacgg

SEQ ID NO: 39310 - DNA, 30 bp, Artificial Sequence
  Synthetic oligonucleotide
aagaggatcacgaggtagaagtaaatacgg

SEQ ID NO: 39311 - DNA, 30 bp, Artificial Sequence
  Synthetic oligonucleotide
taggataaattaatgagtcatgaggtacgg

SEQ ID NO: 39312 - DNA, 30 bp, Artificial Sequence
  Synthetic oligonucleotide
actaaaggaaaaaattcgtacgccttacgg

SEQ ID NO: 39313 - DNA, 30 bp, Artificial Sequence
  Synthetic oligonucleotide
aaacgacgtcccagcttaagataataccgg

SEQ ID NO: 39314 - DNA, 30 bp, Artificial Sequence
  Synthetic oligonucleotide
ctcggccctgaacgagaaggagtctaccgg

SEQ ID NO: 39315 - DNA, 30 bp, Artificial Sequence
  Synthetic oligonucleotide
aaagtgaggatcatacaagagtgtgcccgg

SEQ ID NO: 39316 - DNA, 30 bp, Artificial Sequence
  Synthetic oligonucleotide
ggagcagatcgtccgtagtatccatcccgg

SEQ ID NO: 39317 - DNA, 30 bp, Artificial Sequence
  Synthetic oligonucleotide
caaaaacggaagaggggcttcgagtcccgg

SEQ ID NO: 39318 - DNA, 30 bp, Artificial Sequence
  Synthetic oligonucleotide
atggtgcaacagtcggtaatcgcgagccgg

SEQ ID NO: 39319 - DNA, 30 bp, Artificial Sequence
  Synthetic oligonucleotide
agggggtacgtgaagagtagtatacgccgg

SEQ ID NO: 39320 - DNA, 30 bp, Artificial Sequence
  Synthetic oligonucleotide
gcgttacgaggcatattggcagcaatccgg

SEQ ID NO: 39321 - DNA, 30 bp, Artificial Sequence
  Synthetic oligonucleotide
gtagcgttgctgaaagggcaaggcatccgg

SEQ ID NO: 39322 - DNA, 30 bp, Artificial Sequence
  Synthetic oligonucleotide
ctgtgcttgggggatcaggaatacttccgg

SEQ ID NO: 39323 - DNA, 30 bp, Artificial Sequence
  Synthetic oligonucleotide
tcacggactcagaacaactagcttgagcgg

SEQ ID NO: 39324 - DNA, 30 bp, Artificial Sequence
  Synthetic oligonucleotide
gatgcagggcattcagacgagcgagcgcgg

SEQ ID NO: 39325 - DNA, 30 bp, Artificial Sequence
  Synthetic oligonucleotide
gaacaagtcaaacataagtcgacctcgcgg

SEQ ID NO: 39326 - DNA, 30 bp, Artificial Sequence
  Synthetic oligonucleotide
cggagagtaaaattgcattgagattcgcgg

SEQ ID NO: 39327 - DNA, 30 bp, Artificial Sequence
  Synthetic oligonucleotide
cggcgaatggtaccccatgctagaaggcgg

SEQ ID NO: 39328 - DNA, 30 bp, Artificial Sequence
  Synthetic oligonucleotide
tagtccagggactacagcagtgaacggcgg

SEQ ID NO: 39329 - DNA, 30 bp, Artificial Sequence
  Synthetic oligonucleotide
tcacgagacgatacaggtggtctatggcgg

SEQ ID NO: 39330 - DNA, 30 bp, Artificial Sequence
  Synthetic oligonucleotide
tttcgcagaggacatagttggcagtatcgg

SEQ ID NO: 39331 - DNA, 30 bp, Artificial Sequence
  Synthetic oligonucleotide
aggattttatcaacaaatgtactcgctcgg

SEQ ID NO: 39332 - DNA, 30 bp, Artificial Sequence
  Synthetic oligonucleotide
aggtgaggctcacatcacattaccagtcgg

SEQ ID NO: 39333 - DNA, 30 bp, Artificial Sequence
  Synthetic oligonucleotide
agtggggaaggctagaaggacttgattcgg

SEQ ID NO: 39334 - DNA, 30 bp, Artificial Sequence
  Synthetic oligonucleotide
tcctaagtaacaatcgacgtaagagttcgg

SEQ ID NO: 39335 - DNA, 30 bp, Artificial Sequence
  Synthetic oligonucleotide
ccaacgtgaccgcgaggcgtgaagaaaggg

SEQ ID NO: 39336 - DNA, 30 bp, Artificial Sequence
  Synthetic oligonucleotide
gggcgcaaacacactaaggtgaaacaaggg

SEQ ID NO: 39337 - DNA, 30 bp, Artificial Sequence
  Synthetic oligonucleotide
gcgtacaccgctgatacgtagtcccaaggg

SEQ ID NO: 39338 - DNA, 30 bp, Artificial Sequence
  Synthetic oligonucleotide
ctgagacagtcaaaccacggactagaaggg

SEQ ID NO: 39339 - DNA, 30 bp, Artificial Sequence
  Synthetic oligonucleotide
tacgtgagcggagtgaagctcaattaaggg

SEQ ID NO: 39340 - DNA, 30 bp, Artificial Sequence
  Synthetic oligonucleotide
ggaccacggaagaaccacatgacttaaggg

SEQ ID NO: 39341 - DNA, 30 bp, Artificial Sequence
  Synthetic oligonucleotide
acagacgagacctagcgtcttccagcaggg

SEQ ID NO: 39342 - DNA, 30 bp, Artificial Sequence
  Synthetic oligonucleotide
cggaacaggcaggctctaggcagagcaggg

SEQ ID NO: 39343 - DNA, 30 bp, Artificial Sequence
  Synthetic oligonucleotide
tgggataaaacggaggtcaggttagcaggg

SEQ ID NO: 39344 - DNA, 30 bp, Artificial Sequence
  Synthetic oligonucleotide
gctcacaaccgaagtttgaacttggcaggg

SEQ ID NO: 39345 - DNA, 30 bp, Artificial Sequence
  Synthetic oligonucleotide
catcgatatacatcctctttaggtgcaggg

SEQ ID NO: 39346 - DNA, 30 bp, Artificial Sequence
  Synthetic oligonucleotide
ggaggcggtcctacatgtttcggaagaggg

SEQ ID NO: 39347 - DNA, 30 bp, Artificial Sequence
  Synthetic oligonucleotide
tagggattgaaacattaggccgtgcgaggg

SEQ ID NO: 39348 - DNA, 30 bp, Artificial Sequence
  Synthetic oligonucleotide
agcaagacaataatgggcatgaaaggaggg

SEQ ID NO: 39349 - DNA, 30 bp, Artificial Sequence
  Synthetic oligonucleotide
ctgggtaaagacatagatttggccataggg

SEQ ID NO: 39350 - DNA, 30 bp, Artificial Sequence
  Synthetic oligonucleotide
acggcgtctgagccaccggcaggtataggg

SEQ ID NO: 39351 - DNA, 30 bp, Artificial Sequence
  Synthetic oligonucleotide
ctgacatatagacttgaggtccaactaggg

SEQ ID NO: 39352 - DNA, 30 bp, Artificial Sequence
  Synthetic oligonucleotide
ccacaaatcaagcagcagaggtaagtaggg

SEQ ID NO: 39353 - DNA, 30 bp, Artificial Sequence
  Synthetic oligonucleotide
tcatgagtagaataagccgaacccgtaggg

SEQ ID NO: 39354 - DNA, 30 bp, Artificial Sequence
  Synthetic oligonucleotide
caaagcggtcgaactaccgggaaggtaggg

SEQ ID NO: 39355 - DNA, 30 bp, Artificial Sequence
  Synthetic oligonucleotide
caacaatacctcatctccacagaattaggg

SEQ ID NO: 39356 - DNA, 30 bp, Artificial Sequence
  Synthetic oligonucleotide
accgttcgactgaattcaaagagccacggg

SEQ ID NO: 39357 - DNA, 30 bp, Artificial Sequence
  Synthetic oligonucleotide
acgcactaagatagtagtcaaaattacggg

SEQ ID NO: 39358 - DNA, 31 bp, Artificial Sequence
  Synthetic oligonucleotide
acgtgggcacgcgctcaataaggcttacggg

SEQ ID NO: 39359 - DNA, 30 bp, Artificial Sequence
  Synthetic oligonucleotide
acacagtgagttgccggcaatccacccggg

SEQ ID NO: 39360 - DNA, 30 bp, Artificial Sequence
  Synthetic oligonucleotide
cgctgggaaggtaatattttgcaccccggg

SEQ ID NO: 39361 - DNA, 30 bp, Artificial Sequence
  Synthetic oligonucleotide
taagggaaacagatacgtacagcagccggg

SEQ ID NO: 39362 - DNA, 30 bp, Artificial Sequence
  Synthetic oligonucleotide
acgatgtcttaagaccattcatgatccggg

SEQ ID NO: 39363 - DNA, 30 bp, Artificial Sequence
  Synthetic oligonucleotide
tctggcattagcatataagggtcaaagggg

SEQ ID NO: 39364 - DNA, 30 bp, Artificial Sequence
  Synthetic oligonucleotide
tccgcgaatcgcgtcaaaagagagaagggg

SEQ ID NO: 39365 - DNA, 30 bp, Artificial Sequence
  Synthetic oligonucleotide
cacggataacaacgtcggacccaccagggg

SEQ ID NO: 39366 - DNA, 30 bp, Artificial Sequence
  Synthetic oligonucleotide
gagctctaagtcggaattggaacagagggg

SEQ ID NO: 39367 - DNA, 30 bp, Artificial Sequence
  Synthetic oligonucleotide
tgtatatgcatattcagaggccacgagggg

SEQ ID NO: 39368 - DNA, 30 bp, Artificial Sequence
  Synthetic oligonucleotide
atctcagcgacgaagggtcaggaggagggg

SEQ ID NO: 39369 - DNA, 30 bp, Artificial Sequence
  Synthetic oligonucleotide
gacctcagatctagaaaaccatgcacgggg

SEQ ID NO: 39370 - DNA, 30 bp, Artificial Sequence
  Synthetic oligonucleotide
tactccgaacaagcgtggagggacaggggg

SEQ ID NO: 39371 - DNA, 30 bp, Artificial Sequence
  Synthetic oligonucleotide
cgagtagatagcccgtgtctaatacggggg

SEQ ID NO: 39372 - DNA, 30 bp, Artificial Sequence
  Synthetic oligonucleotide
tgagacggttgagcggagatcgcagggggg

SEQ ID NO: 39373 - DNA, 30 bp, Artificial Sequence
  Synthetic oligonucleotide
gaaagcctgtggcatgaaggaacatggggg

SEQ ID NO: 39374 - DNA, 30 bp, Artificial Sequence
  Synthetic oligonucleotide
tggatcaagtctatatgaagaaagatgggg

SEQ ID NO: 39375 - DNA, 30 bp, Artificial Sequence
  Synthetic oligonucleotide
acgctatagagctaaaagtggttgctgggg

SEQ ID NO: 39376 - DNA, 30 bp, Artificial Sequence
  Synthetic oligonucleotide
aggataaaaatagcctaaaatcctctgggg

SEQ ID NO: 39377 - DNA, 30 bp, Artificial Sequence
  Synthetic oligonucleotide
tagtcatagcaaaaatacctaagtctgggg

SEQ ID NO: 39378 - DNA, 30 bp, Artificial Sequence
  Synthetic oligonucleotide
agcgatgcgtaacagatttaggccttgggg

SEQ ID NO: 39379 - DNA, 30 bp, Artificial Sequence
  Synthetic oligonucleotide
atgctgacaccaggaagttaggtacatggg

SEQ ID NO: 39380 - DNA, 30 bp, Artificial Sequence
  Synthetic oligonucleotide
gatcgcaagataagactatcccagcatggg

SEQ ID NO: 39381 - DNA, 30 bp, Artificial Sequence
  Synthetic oligonucleotide
gtttcaaatcgagtcagcgggatagatggg

SEQ ID NO: 39382 - DNA, 30 bp, Artificial Sequence
  Synthetic oligonucleotide
aaagcgcgtcttgttgaacataaggatggg

SEQ ID NO: 39383 - DNA, 30 bp, Artificial Sequence
  Synthetic oligonucleotide
gtctcacagtagccagacattgaggatggg

SEQ ID NO: 39384 - DNA, 30 bp, Artificial Sequence
  Synthetic oligonucleotide
ggaacaacgcgaatagcgtaacagcctggg

SEQ ID NO: 39385 - DNA, 30 bp, Artificial Sequence
  Synthetic oligonucleotide
ccctggctggaaccaaaaggaatatctggg

SEQ ID NO: 39386 - DNA, 30 bp, Artificial Sequence
  Synthetic oligonucleotide
aacatatgacgagagtgatggacgtctggg

SEQ ID NO: 39387 - DNA, 30 bp, Artificial Sequence
  Synthetic oligonucleotide
acgcgcataatgggcagtaagtattctggg

SEQ ID NO: 39388 - DNA, 30 bp, Artificial Sequence
  Synthetic oligonucleotide
ctaaggcatgttcaaggcgaacgtagtggg

SEQ ID NO: 39389 - DNA, 30 bp, Artificial Sequence
  Synthetic oligonucleotide
agataatttgcttgcaggagaagtggtggg

SEQ ID NO: 39390 - DNA, 30 bp, Artificial Sequence
  Synthetic oligonucleotide
cgaaagtgaagggttgagggccaaattggg

SEQ ID NO: 39391 - DNA, 30 bp, Artificial Sequence
  Synthetic oligonucleotide
cgattccacgacctacggattcgacttggg

SEQ ID NO: 39392 - DNA, 30 bp, Artificial Sequence
  Synthetic oligonucleotide
tacggctccaggcacatactgctccttggg

SEQ ID NO: 39393 - DNA, 30 bp, Artificial Sequence
  Synthetic oligonucleotide
aagggaatgtgctcgtatgctaaggttggg

SEQ ID NO: 39394 - DNA, 30 bp, Artificial Sequence
  Synthetic oligonucleotide
gtgccgggacccacgagagctaacaaatgg

SEQ ID NO: 39395 - DNA, 30 bp, Artificial Sequence
  Synthetic oligonucleotide
tgcacacccccctacaaagcaaggcaatgg

SEQ ID NO: 39396 - DNA, 30 bp, Artificial Sequence
  Synthetic oligonucleotide
agcgacaagcaactcaacagcgtcgaatgg

SEQ ID NO: 39397 - DNA, 30 bp, Artificial Sequence
  Synthetic oligonucleotide
ctaaagaatgcacaaaatcacggttcatgg

SEQ ID NO: 39398 - DNA, 30 bp, Artificial Sequence
  Synthetic oligonucleotide
tatcgcagacctgcatggaccgcgagatgg

SEQ ID NO: 39399 - DNA, 30 bp, Artificial Sequence
  Synthetic oligonucleotide
tcataggataatagtggctgtggcatatgg

SEQ ID NO: 39400 - DNA, 30 bp, Artificial Sequence
  Synthetic oligonucleotide
agatcggattgaacaagagtgtggctatgg

SEQ ID NO: 39401 - DNA, 30 bp, Artificial Sequence
  Synthetic oligonucleotide
atgaccgggtaaatgggagtcatgctatgg

SEQ ID NO: 39402 - DNA, 30 bp, Artificial Sequence
  Synthetic oligonucleotide
tgatcacggaatcacgagaccgagttatgg

SEQ ID NO: 39403 - DNA, 29 bp, Artificial Sequence
  Synthetic oligonucleotide
cgtcctccgaggatatcaaggggttatgg

SEQ ID NO: 39404 - DNA, 30 bp, Artificial Sequence
  Synthetic oligonucleotide
ccgaatcaccagtggcatacatgtttatgg

SEQ ID NO: 39405 - DNA, 30 bp, Artificial Sequence
  Synthetic oligonucleotide
tcgagtaagggtcagtatttggcaaactgg

SEQ ID NO: 39406 - DNA, 30 bp, Artificial Sequence
  Synthetic oligonucleotide
gtggagggaatcaaaaggcagccatactgg

SEQ ID NO: 39407 - DNA, 30 bp, Artificial Sequence
  Synthetic oligonucleotide
acggatgggttgcctactaaggactcctgg

SEQ ID NO: 39408 - DNA, 30 bp, Artificial Sequence
  Synthetic oligonucleotide
tagacagagagaacgtagagttatcgctgg

SEQ ID NO: 39409 - DNA, 30 bp, Artificial Sequence
  Synthetic oligonucleotide
tgaaacaatcaaggttgtgctaatggctgg

SEQ ID NO: 39410 - DNA, 30 bp, Artificial Sequence
  Synthetic oligonucleotide
gtgagtagcgtatgatgtcagggatgctgg

SEQ ID NO: 39411 - DNA, 30 bp, Artificial Sequence
  Synthetic oligonucleotide
acgtgcccgacttaacttttgattatctgg

SEQ ID NO: 39412 - DNA, 30 bp, Artificial Sequence
  Synthetic oligonucleotide
gcggggaagtccaaagtatgatagctctgg

SEQ ID NO: 39413 - DNA, 30 bp, Artificial Sequence
  Synthetic oligonucleotide
agcaagaaatgatactagacgcgagtctgg

SEQ ID NO: 39414 - DNA, 30 bp, Artificial Sequence
  Synthetic oligonucleotide
ataacaatcccagatgctgggcgagtctgg

SEQ ID NO: 39415 - DNA, 30 bp, Artificial Sequence
  Synthetic oligonucleotide
gtgaccacatcaaaggctcaattcgtctgg

SEQ ID NO: 39416 - DNA, 30 bp, Artificial Sequence
  Synthetic oligonucleotide
taaagcagggaatcgctgatcaggcagtgg

SEQ ID NO: 39417 - DNA, 30 bp, Artificial Sequence
  Synthetic oligonucleotide
tggtcattgataatgagtggggttcagtgg

SEQ ID NO: 39418 - DNA, 30 bp, Artificial Sequence
  Synthetic oligonucleotide
cgtattctggcaagaggaaaacatgagtgg

SEQ ID NO: 39419 - DNA, 30 bp, Artificial Sequence
  Synthetic oligonucleotide
gcctctgaaaaagttgggagctgatagtgg

SEQ ID NO: 39420 - DNA, 30 bp, Artificial Sequence
  Synthetic oligonucleotide
agatagatggaacgctaagacagttagtgg

SEQ ID NO: 39421 - DNA, 30 bp, Artificial Sequence
  Synthetic oligonucleotide
ggaaatataggttgttaggtgcttacgtgg

SEQ ID NO: 39422 - DNA, 30 bp, Artificial Sequence
  Synthetic oligonucleotide
gttcggaacgtatcggcagaaagatcgtgg

SEQ ID NO: 39423 - DNA, 30 bp, Artificial Sequence
  Synthetic oligonucleotide
tcaatgggcatacgatagcagtgtaggtgg

SEQ ID NO: 39424 - DNA, 30 bp, Artificial Sequence
  Synthetic oligonucleotide
ggccgtcacaaaacagattaaaaacggtgg

SEQ ID NO: 39425 - DNA, 31 bp, Artificial Sequence
  Synthetic oligonucleotide
caatcaggcgttcgagcagtaacattggtgg

SEQ ID NO: 39426 - DNA, 30 bp, Artificial Sequence
  Synthetic oligonucleotide
cctatgacggatagtcgttggtcaatgtgg

SEQ ID NO: 39427 - DNA, 30 bp, Artificial Sequence
  Synthetic oligonucleotide
gagaacagaccgttacgtcccggtatgtgg

SEQ ID NO: 39428 - DNA, 30 bp, Artificial Sequence
  Synthetic oligonucleotide
atgcattcggaagcatgtttgatcgtgtgg

SEQ ID NO: 39429 - DNA, 30 bp, Artificial Sequence
  Synthetic oligonucleotide
cgatgctgtcgatgcggaatattattgtgg

SEQ ID NO: 39430 - DNA, 30 bp, Artificial Sequence
  Synthetic oligonucleotide
tcaggccgttacgtcaacgaaggcaattgg

SEQ ID NO: 39431 - DNA, 30 bp, Artificial Sequence
  Synthetic oligonucleotide
ggcaacgagaactcgtgtcctagtgattgg

SEQ ID NO: 39432 - DNA, 30 bp, Artificial Sequence
  Synthetic oligonucleotide
tggataggacaaccacaaaaacgatattgg

SEQ ID NO: 39433 - DNA, 30 bp, Artificial Sequence
  Synthetic oligonucleotide
gacataaggctcaggaactagcgatattgg

SEQ ID NO: 39434 - DNA, 30 bp, Artificial Sequence
  Synthetic oligonucleotide
gaaggcatgggaaatatagtgacgacttgg

SEQ ID NO: 39435 - DNA, 30 bp, Artificial Sequence
  Synthetic oligonucleotide
tcgaggatcactagccagcaatgcccttgg

SEQ ID NO: 39436 - DNA, 30 bp, Artificial Sequence
  Synthetic oligonucleotide
agacaggctataaaagcagtgcagggttgg

SEQ ID NO: 39437 - DNA, 30 bp, Artificial Sequence
  Synthetic oligonucleotide
agcgagattcggcctaggtgtccagtttgg

SEQ ID NO: 39438 - DNA, 30 bp, Artificial Sequence
  Synthetic oligonucleotide
tggaaacagccgtacatcgacacaaaaatg

SEQ ID NO: 39439 - DNA, 30 bp, Artificial Sequence
  Synthetic oligonucleotide
aagtgagaatctgaacagctgcgaaaaatg

SEQ ID NO: 39440 - DNA, 30 bp, Artificial Sequence
  Synthetic oligonucleotide
gacggtccgaggcaccgaactatagaaatg

SEQ ID NO: 39441 - DNA, 30 bp, Artificial Sequence
  Synthetic oligonucleotide
gagcggaatatgtaacacgttaacgaaatg

SEQ ID NO: 39442 - DNA, 30 bp, Artificial Sequence
  Synthetic oligonucleotide
acgaaagtcggattgaaatactccgaaatg

SEQ ID NO: 39443 - DNA, 30 bp, Artificial Sequence
  Synthetic oligonucleotide
gatgaagtgaggtcaagagggagcgaaatg

SEQ ID NO: 39444 - DNA, 30 bp, Artificial Sequence
  Synthetic oligonucleotide
cgcgtaggttaagtggagagatcggaaatg

SEQ ID NO: 39445 - DNA, 30 bp, Artificial Sequence
  Synthetic oligonucleotide
aaaccgggagatagcaatgcgtgggaaatg

SEQ ID NO: 39446 - DNA, 30 bp, Artificial Sequence
  Synthetic oligonucleotide
cgaggcgacaagttgatttgggtggaaatg

SEQ ID NO: 39447 - DNA, 30 bp, Artificial Sequence
  Synthetic oligonucleotide
taagggacgcgctttgcaacggttgaaatg

SEQ ID NO: 39448 - DNA, 30 bp, Artificial Sequence
  Synthetic oligonucleotide
gggaaagcgcccagacgccgtctatcaatg

SEQ ID NO: 39449 - DNA, 30 bp, Artificial Sequence
  Synthetic oligonucleotide
cgcagcaggagagggggcgtatacagaatg

SEQ ID NO: 39450 - DNA, 30 bp, Artificial Sequence
  Synthetic oligonucleotide
acttccggaggacttaatgagctgcgaatg

SEQ ID NO: 39451 - DNA, 30 bp, Artificial Sequence
  Synthetic oligonucleotide
ggtactgaaccgacagatgtccttggaatg

SEQ ID NO: 39452 - DNA, 30 bp, Artificial Sequence
  Synthetic oligonucleotide
gacggctcaaagtcattaggagaatgaatg

SEQ ID NO: 39453 - DNA, 30 bp, Artificial Sequence
  Synthetic oligonucleotide
acagcaaacgggtaaaatcgaacttgaatg

SEQ ID NO: 39454 - DNA, 30 bp, Artificial Sequence
  Synthetic oligonucleotide
ggatctggccaagtaatgggataaataatg

SEQ ID NO: 39455 - DNA, 30 bp, Artificial Sequence
  Synthetic oligonucleotide
gcgacagtggtggagggaagtgtgataatg

SEQ ID NO: 39456 - DNA, 30 bp, Artificial Sequence
  Synthetic oligonucleotide
ctgtggatcgtcgaaggcgtgttgataatg

SEQ ID NO: 39457 - DNA, 30 bp, Artificial Sequence
  Synthetic oligonucleotide
atgggggtgacttcgactcccgaaaacatg

SEQ ID NO: 39458 - DNA, 30 bp, Artificial Sequence
  Synthetic oligonucleotide
cggagtagcaagccttgcacatccaacatg

SEQ ID NO: 39459 - DNA, 30 bp, Artificial Sequence
  Synthetic oligonucleotide
cgcattaaaacgaagccgtcggtacacatg

SEQ ID NO: 39460 - DNA, 30 bp, Artificial Sequence
  Synthetic oligonucleotide
tcctaaaacacgagttatatctgtaccatg

SEQ ID NO: 39461 - DNA, 30 bp, Artificial Sequence
  Synthetic oligonucleotide
caagtgcaactgaatgcttccttagccatg

SEQ ID NO: 39462 - DNA, 30 bp, Artificial Sequence
  Synthetic oligonucleotide
aacaacgtcgagggcatgaaaccatccatg

SEQ ID NO: 39463 - DNA, 30 bp, Artificial Sequence
  Synthetic oligonucleotide
tcatagcggaagcaacatacaaatagcatg

SEQ ID NO: 39464 - DNA, 30 bp, Artificial Sequence
  Synthetic oligonucleotide
taacttcgtgaaaagaataagagaggcatg

SEQ ID NO: 39465 - DNA, 30 bp, Artificial Sequence
  Synthetic oligonucleotide
aatggtccaggtgcaccagtacattgcatg

SEQ ID NO: 39466 - DNA, 30 bp, Artificial Sequence
  Synthetic oligonucleotide
ttggttgaccgagtgtgaaaacaaatcatg

SEQ ID NO: 39467 - DNA, 30 bp, Artificial Sequence
  Synthetic oligonucleotide
agtgggttacctcggaaggaaaggatcatg

SEQ ID NO: 39468 - DNA, 30 bp, Artificial Sequence
  Synthetic oligonucleotide
gctgactggcataccggactacaactcatg

SEQ ID NO: 39469 - DNA, 30 bp, Artificial Sequence
  Synthetic oligonucleotide
aggtcacttctcacatagtggctgctcatg

SEQ ID NO: 39470 - DNA, 30 bp, Artificial Sequence
  Synthetic oligonucleotide
cgtccagcggaggtgggtagtgctctcatg

SEQ ID NO: 39471 - DNA, 30 bp, Artificial Sequence
  Synthetic oligonucleotide
gtagccaagtgagaatttatagtaaagatg

SEQ ID NO: 39472 - DNA, 30 bp, Artificial Sequence
  Synthetic oligonucleotide
tctaggaccaggcaatggtacctcaagatg

SEQ ID NO: 39473 - DNA, 30 bp, Artificial Sequence
  Synthetic oligonucleotide
acattactcggttgctaaacgtataagatg

SEQ ID NO: 39474 - DNA, 30 bp, Artificial Sequence
  Synthetic oligonucleotide
acggacgcgttcctgacttgcccccagatg

SEQ ID NO: 39475 - DNA, 30 bp, Artificial Sequence
  Synthetic oligonucleotide
aggccaacataattccggtcacgagagatg

SEQ ID NO: 39476 - DNA, 30 bp, Artificial Sequence
  Synthetic oligonucleotide
gagatttacgcgagtcgggatcgagagatg

SEQ ID NO: 39477 - DNA, 30 bp, Artificial Sequence
  Synthetic oligonucleotide
ccgtgtcgtagaagaggacaggaggagatg

SEQ ID NO: 39478 - DNA, 30 bp, Artificial Sequence
  Synthetic oligonucleotide
gtaggctaaggagcaagatttggggagatg

SEQ ID NO: 39479 - DNA, 30 bp, Artificial Sequence
  Synthetic oligonucleotide
tcatggcttgggggataagatagatagatg

SEQ ID NO: 39480 - DNA, 30 bp, Artificial Sequence
  Synthetic oligonucleotide
tgtaacctagccgataacgacaggtagatg

SEQ ID NO: 39481 - DNA, 30 bp, Artificial Sequence
  Synthetic oligonucleotide
cgcgaaacttttagaaaatcgcggtagatg

SEQ ID NO: 39482 - DNA, 30 bp, Artificial Sequence
  Synthetic oligonucleotide
ggtagtgaacattcagaccagttgacgatg

SEQ ID NO: 39483 - DNA, 30 bp, Artificial Sequence
  Synthetic oligonucleotide
aagatcgggttggacggaaaacctccgatg

SEQ ID NO: 39484 - DNA, 30 bp, Artificial Sequence
  Synthetic oligonucleotide
cggtaacaatgagatttgattttagcgatg

SEQ ID NO: 39485 - DNA, 30 bp, Artificial Sequence
  Synthetic oligonucleotide
acatgaggcgtaaaatatacggcatcgatg

SEQ ID NO: 39486 - DNA, 30 bp, Artificial Sequence
  Synthetic oligonucleotide
cgtggcatggacattagcgcgatgtcgatg

SEQ ID NO: 39487 - DNA, 30 bp, Artificial Sequence
  Synthetic oligonucleotide
tcgcagagggtcccaccttgcgctaggatg

SEQ ID NO: 39488 - DNA, 31 bp, Artificial Sequence
  Synthetic oligonucleotide
ccggcaagcgaatttgcgtgcgttgcggatg

SEQ ID NO: 39489 - DNA, 30 bp, Artificial Sequence
  Synthetic oligonucleotide
caaacgttggaagcgaaggggttgcggatg

SEQ ID NO: 39490 - DNA, 30 bp, Artificial Sequence
  Synthetic oligonucleotide
tttgcgaagccaaaggtacatcgagggatg

SEQ ID NO: 39491 - DNA, 30 bp, Artificial Sequence
  Synthetic oligonucleotide
tgtcgcctcgacaaacatgtatacgggatg

SEQ ID NO: 39492 - DNA, 30 bp, Artificial Sequence
  Synthetic oligonucleotide
gggatgaggaagacatactcgcgtgggatg

SEQ ID NO: 39493 - DNA, 30 bp, Artificial Sequence
  Synthetic oligonucleotide
cacggcactaatagcatatacatgtggatg

SEQ ID NO: 39494 - DNA, 30 bp, Artificial Sequence
  Synthetic oligonucleotide
cgacgcggtctaacccctatgaattggatg

SEQ ID NO: 39495 - DNA, 30 bp, Artificial Sequence
  Synthetic oligonucleotide
acgtaatccttcaaggacaaagaaatgatg

SEQ ID NO: 39496 - DNA, 30 bp, Artificial Sequence
  Synthetic oligonucleotide
tactggacggaccacccgcgcggaatgatg

SEQ ID NO: 39497 - DNA, 30 bp, Artificial Sequence
  Synthetic oligonucleotide
ggggggcgacagtggttgcgtaaggtgatg

SEQ ID NO: 39498 - DNA, 30 bp, Artificial Sequence
  Synthetic oligonucleotide
ggagggacatggaacttggacggtaatatg

SEQ ID NO: 39499 - DNA, 30 bp, Artificial Sequence
  Synthetic oligonucleotide
agtctaagtgctcacgttccagttaatatg

SEQ ID NO: 39500 - DNA, 30 bp, Artificial Sequence
  Synthetic oligonucleotide
tagcgccctgaatctaaacagctagatatg

SEQ ID NO: 39501 - DNA, 30 bp, Artificial Sequence
  Synthetic oligonucleotide
cggaaagagcttcggacaccctacgatatg

SEQ ID NO: 39502 - DNA, 30 bp, Artificial Sequence
  Synthetic oligonucleotide
tacagtgaaaagtacagatagcgccctatg

SEQ ID NO: 39503 - DNA, 30 bp, Artificial Sequence
  Synthetic oligonucleotide
tgataaattacaggagtgtaacaatctatg

SEQ ID NO: 39504 - DNA, 30 bp, Artificial Sequence
  Synthetic oligonucleotide
tcagatggtgcattatgcatcccaagtatg

SEQ ID NO: 39505 - DNA, 30 bp, Artificial Sequence
  Synthetic oligonucleotide
cgagagtcgcaggcttaaacgagaagtatg

SEQ ID NO: 39506 - DNA, 30 bp, Artificial Sequence
  Synthetic oligonucleotide
cgtatgcattgagagtcagtaataagtatg

SEQ ID NO: 39507 - DNA, 30 bp, Artificial Sequence
  Synthetic oligonucleotide
cgcatcggacaaggaataagtgtaggtatg

SEQ ID NO: 39508 - DNA, 30 bp, Artificial Sequence
  Synthetic oligonucleotide
ttcggaaagaggatggtataacgagttatg

SEQ ID NO: 39509 - DNA, 30 bp, Artificial Sequence
  Synthetic oligonucleotide
gacggcctagaccgaagattcgcttttatg

SEQ ID NO: 39510 - DNA, 30 bp, Artificial Sequence
  Synthetic oligonucleotide
ggaacgtcagtagctatctctaacaaactg

SEQ ID NO: 39511 - DNA, 30 bp, Artificial Sequence
  Synthetic oligonucleotide
ctacgtgggaacgcgtgaatgcttaaactg

SEQ ID NO: 39512 - DNA, 30 bp, Artificial Sequence
  Synthetic oligonucleotide
tgtaggggtcccgcgaaggtggcacaactg

SEQ ID NO: 39513 - DNA, 30 bp, Artificial Sequence
  Synthetic oligonucleotide
tgctggcatcacacacctcgaactgaactg

SEQ ID NO: 39514 - DNA, 30 bp, Artificial Sequence
  Synthetic oligonucleotide
tcgtataatagcatccaaactgacacactg

SEQ ID NO: 39515 - DNA, 30 bp, Artificial Sequence
  Synthetic oligonucleotide
taaacggggacatctttgagatagagactg

SEQ ID NO: 39516 - DNA, 30 bp, Artificial Sequence
  Synthetic oligonucleotide
tcgaacagagtagtgcagacaaggagactg

SEQ ID NO: 39517 - DNA, 30 bp, Artificial Sequence
  Synthetic oligonucleotide
acagagttccttagctaacacaatagactg

SEQ ID NO: 39518 - DNA, 30 bp, Artificial Sequence
  Synthetic oligonucleotide
acatgctgggagcggagggctacctgactg

SEQ ID NO: 39519 - DNA, 30 bp, Artificial Sequence
  Synthetic oligonucleotide
atggctggaagttagctcgagtacatactg

SEQ ID NO: 39520 - DNA, 30 bp, Artificial Sequence
  Synthetic oligonucleotide
agtgggctagtcaatcagggactagtactg

SEQ ID NO: 39521 - DNA, 30 bp, Artificial Sequence
  Synthetic oligonucleotide
ctattgcagtacgggggcaactctaacctg

SEQ ID NO: 39522 - DNA, 30 bp, Artificial Sequence
  Synthetic oligonucleotide
gaaggctcgacattcccaccgggtaacctg

SEQ ID NO: 39523 - DNA, 30 bp, Artificial Sequence
  Synthetic oligonucleotide
acacataagtataagataagccgatacctg

SEQ ID NO: 39524 - DNA, 30 bp, Artificial Sequence
  Synthetic oligonucleotide
cgatgtctgggaaaaataccatgatacctg

SEQ ID NO: 39525 - DNA, 30 bp, Artificial Sequence
  Synthetic oligonucleotide
gatcggggatagcgatggaaagtacccctg

SEQ ID NO: 39526 - DNA, 30 bp, Artificial Sequence
  Synthetic oligonucleotide
caaacaacgtatgcgggggatatctccctg

SEQ ID NO: 39527 - DNA, 30 bp, Artificial Sequence
  Synthetic oligonucleotide
aaggtaaccttgaactaataaaacagcctg

SEQ ID NO: 39528 - DNA, 30 bp, Artificial Sequence
  Synthetic oligonucleotide
cgtatcatcgctatgcaagtggggcgcctg

SEQ ID NO: 39529 - DNA, 30 bp, Artificial Sequence
  Synthetic oligonucleotide
ggggtggagggtttgctgcgaagatgcctg

SEQ ID NO: 39530 - DNA, 30 bp, Artificial Sequence
  Synthetic oligonucleotide
cgacgaacgcaataactccaatggcagctg

SEQ ID NO: 39531 - DNA, 30 bp, Artificial Sequence
  Synthetic oligonucleotide
gccgtaataggaataactcgcaagtagctg

SEQ ID NO: 39532 - DNA, 30 bp, Artificial Sequence
  Synthetic oligonucleotide
tccagggggagaacgggcatagtaacgctg

SEQ ID NO: 39533 - DNA, 30 bp, Artificial Sequence
  Synthetic oligonucleotide
caggtagtcgaaagtcgaggtccatcgctg

SEQ ID NO: 39534 - DNA, 30 bp, Artificial Sequence
  Synthetic oligonucleotide
gtggtaaaagcaatttaggaaattaggctg

SEQ ID NO: 39535 - DNA, 30 bp, Artificial Sequence
  Synthetic oligonucleotide
tagaaacagtgatcgtacgaaattgggctg

SEQ ID NO: 39536 - DNA, 30 bp, Artificial Sequence
  Synthetic oligonucleotide
agattagcagctgtccgggaaggatggctg

SEQ ID NO: 39537 - DNA, 30 bp, Artificial Sequence
  Synthetic oligonucleotide
tgcccgctaacaaaccaacggccaatgctg

SEQ ID NO: 39538 - DNA, 30 bp, Artificial Sequence
  Synthetic oligonucleotide
ggacaacagggcgttgcatggggaatgctg

SEQ ID NO: 39539 - DNA, 30 bp, Artificial Sequence
  Synthetic oligonucleotide
tggtcacgtcggaccgatgggcgtgtgctg

SEQ ID NO: 39540 - DNA, 30 bp, Artificial Sequence
  Synthetic oligonucleotide
ggatgaggtcgcaaaggtgtcgatttgctg

SEQ ID NO: 39541 - DNA, 30 bp, Artificial Sequence
  Synthetic oligonucleotide
atgctgacgtaaataaaacacaatgatctg

SEQ ID NO: 39542 - DNA, 30 bp, Artificial Sequence
  Synthetic oligonucleotide
agcaagggagcaaagctataggaaactctg

SEQ ID NO: 39543 - DNA, 30 bp, Artificial Sequence
  Synthetic oligonucleotide
cgagtcgatgatgtagtagttggtactctg

SEQ ID NO: 39544 - DNA, 30 bp, Artificial Sequence
  Synthetic oligonucleotide
tcgcccgggcaatccatggtatgaagtctg

SEQ ID NO: 39545 - DNA, 30 bp, Artificial Sequence
  Synthetic oligonucleotide
atgtcacacatgcactaatgcaaaggtctg

SEQ ID NO: 39546 - DNA, 30 bp, Artificial Sequence
  Synthetic oligonucleotide
aggaggtaatacgctgactagcgagttctg

SEQ ID NO: 39547 - DNA, 30 bp, Artificial Sequence
  Synthetic oligonucleotide
ggtcttcgcaaaggagagacaacaaaagtg

SEQ ID NO: 39548 - DNA, 30 bp, Artificial Sequence
  Synthetic oligonucleotide
gattccggaatacaatgaagataacaagtg

SEQ ID NO: 39549 - DNA, 30 bp, Artificial Sequence
  Synthetic oligonucleotide
tggtatcttgcaatcgaggtgtaacaagtg

SEQ ID NO: 39550 - DNA, 30 bp, Artificial Sequence
  Synthetic oligonucleotide
accgggccgcaagaccgatcccccgaagtg

SEQ ID NO: 39551 - DNA, 30 bp, Artificial Sequence
  Synthetic oligonucleotide
atgcgggcgcagactcaaggcgcataagtg

SEQ ID NO: 39552 - DNA, 30 bp, Artificial Sequence
  Synthetic oligonucleotide
cgctactccggcggtgcgaacatcacagtg

SEQ ID NO: 39553 - DNA, 30 bp, Artificial Sequence
  Synthetic oligonucleotide
gtgagagcttggcagcaattcgctacagtg

SEQ ID NO: 39554 - DNA, 30 bp, Artificial Sequence
  Synthetic oligonucleotide
ttggtgcaaaataatcccaggcacccagtg

SEQ ID NO: 39555 - DNA, 30 bp, Artificial Sequence
  Synthetic oligonucleotide
tccgtatggcgtttgagcgaagccccagtg

SEQ ID NO: 39556 - DNA, 30 bp, Artificial Sequence
  Synthetic oligonucleotide
acaaggaatctccgccgggcagctgcagtg

SEQ ID NO: 39557 - DNA, 30 bp, Artificial Sequence
  Synthetic oligonucleotide
agatatccgcgaaacagctgtcgatcagtg

SEQ ID NO: 39558 - DNA, 30 bp, Artificial Sequence
  Synthetic oligonucleotide
gtcatgtccaaatatgatctacgtagagtg

SEQ ID NO: 39559 - DNA, 30 bp, Artificial Sequence
  Synthetic oligonucleotide
cacctagggctaaattcagcatcacgagtg

SEQ ID NO: 39560 - DNA, 30 bp, Artificial Sequence
  Synthetic oligonucleotide
gaagggttccgaaggataggtatctgagtg

SEQ ID NO: 39561 - DNA, 30 bp, Artificial Sequence
  Synthetic oligonucleotide
gtaacaacagagtcgtatgtgcacatagtg

SEQ ID NO: 39562 - DNA, 30 bp, Artificial Sequence
  Synthetic oligonucleotide
atgattatgatcattgactaaaggatagtg

SEQ ID NO: 39563 - DNA, 30 bp, Artificial Sequence
  Synthetic oligonucleotide
tggtggaccaggagccgaaagcgggtagtg

SEQ ID NO: 39564 - DNA, 30 bp, Artificial Sequence
  Synthetic oligonucleotide
ggaacggggtaccagtaatttacaaacgtg

SEQ ID NO: 39565 - DNA, 30 bp, Artificial Sequence
  Synthetic oligonucleotide
tcagggaattaaagaaaaattagtcacgtg

SEQ ID NO: 39566 - DNA, 30 bp, Artificial Sequence
  Synthetic oligonucleotide
ggggagaaatgcgttcggacaaaagacgtg

SEQ ID NO: 39567 - DNA, 30 bp, Artificial Sequence
  Synthetic oligonucleotide
ttacgacagtcgtcatcggccgaccccgtg

SEQ ID NO: 39568 - DNA, 30 bp, Artificial Sequence
  Synthetic oligonucleotide
atcaatggtggcgatgtggattaggccgtg

SEQ ID NO: 39569 - DNA, 30 bp, Artificial Sequence
  Synthetic oligonucleotide
ccatgactcattgtctcgtctattgccgtg

SEQ ID NO: 39570 - DNA, 30 bp, Artificial Sequence
  Synthetic oligonucleotide
tggcagaaagacggacgaattgtcagcgtg

SEQ ID NO: 39571 - DNA, 30 bp, Artificial Sequence
  Synthetic oligonucleotide
ggtgcgaggtggattggaaaggtacgcgtg

SEQ ID NO: 39572 - DNA, 30 bp, Artificial Sequence
  Synthetic oligonucleotide
tccgtggtcaagaagaatagcacgcgcgtg

SEQ ID NO: 39573 - DNA, 30 bp, Artificial Sequence
  Synthetic oligonucleotide
agacaagattaccccggacatgcaatcgtg

SEQ ID NO: 39574 - DNA, 30 bp, Artificial Sequence
  Synthetic oligonucleotide
tgcaggagggggtcggtttcatagatcgtg

SEQ ID NO: 39575 - DNA, 30 bp, Artificial Sequence
  Synthetic oligonucleotide
agaaagatttccaaggaggatgggatcgtg

SEQ ID NO: 39576 - DNA, 30 bp, Artificial Sequence
  Synthetic oligonucleotide
aggtatatcaaaaatggcagctagctcgtg

SEQ ID NO: 39577 - DNA, 30 bp, Artificial Sequence
  Synthetic oligonucleotide
tggaatgagctaaggcccttagtgaaggtg

SEQ ID NO: 39578 - DNA, 30 bp, Artificial Sequence
  Synthetic oligonucleotide
taaagccaacaccgtcgatgtgaacaggtg

SEQ ID NO: 39579 - DNA, 30 bp, Artificial Sequence
  Synthetic oligonucleotide
acaatgggcaagggggcgtcccaccaggtg

SEQ ID NO: 39580 - DNA, 30 bp, Artificial Sequence
  Synthetic oligonucleotide
gccttacgacatccctttcccatccaggtg

SEQ ID NO: 39581 - DNA, 30 bp, Artificial Sequence
  Synthetic oligonucleotide
gaaaacgggacaaacaaacagtatcaggtg

SEQ ID NO: 39582 - DNA, 30 bp, Artificial Sequence
  Synthetic oligonucleotide
acaaagggtagggtaggagctgctcaggtg

SEQ ID NO: 39583 - DNA, 30 bp, Artificial Sequence
  Synthetic oligonucleotide
acatgaactgagttacaagtaggtcaggtg

SEQ ID NO: 39584 - DNA, 30 bp, Artificial Sequence
  Synthetic oligonucleotide
cgattgtctcctcaatcacgagcgggggtg

SEQ ID NO: 39585 - DNA, 30 bp, Artificial Sequence
  Synthetic oligonucleotide
tgttggggcgacaacgaaattacatgggtg

SEQ ID NO: 39586 - DNA, 30 bp, Artificial Sequence
  Synthetic oligonucleotide
atcaacagtgcactgtcaacagagtgggtg

SEQ ID NO: 39587 - DNA, 30 bp, Artificial Sequence
  Synthetic oligonucleotide
ggttacctgtgctcagagatggggtgggtg

SEQ ID NO: 39588 - DNA, 30 bp, Artificial Sequence
  Synthetic oligonucleotide
aggcgtccgagaacccaaatggtgctggtg

SEQ ID NO: 39589 - DNA, 30 bp, Artificial Sequence
  Synthetic oligonucleotide
atgtcccagtcggcagacggctgtgtggtg

SEQ ID NO: 39590 - DNA, 30 bp, Artificial Sequence
  Synthetic oligonucleotide
taacgtgacagctacccgaactgaaatgtg

SEQ ID NO: 39591 - DNA, 30 bp, Artificial Sequence
  Synthetic oligonucleotide
tggcgacaaagttggtgaaagtaccatgtg

SEQ ID NO: 39592 - DNA, 30 bp, Artificial Sequence
  Synthetic oligonucleotide
ccagggagtgggattgtcaccaatgatgtg

SEQ ID NO: 39593 - DNA, 30 bp, Artificial Sequence
  Synthetic oligonucleotide
ggaatgacagggcggcggggcatacgtgtg

SEQ ID NO: 39594 - DNA, 30 bp, Artificial Sequence
  Synthetic oligonucleotide
taagcatcggagaccccaatgagaggtgtg

SEQ ID NO: 39595 - DNA, 30 bp, Artificial Sequence
  Synthetic oligonucleotide
gcgacgatcgccaggattcaattgtgtgtg

SEQ ID NO: 39596 - DNA, 30 bp, Artificial Sequence
  Synthetic oligonucleotide
tctgcccgagaagagtggtaccgaattgtg

SEQ ID NO: 39597 - DNA, 30 bp, Artificial Sequence
  Synthetic oligonucleotide
gcgccgtcgataaggtggcgaagcattgtg

SEQ ID NO: 39598 - DNA, 30 bp, Artificial Sequence
  Synthetic oligonucleotide
catagagtatggctaaaggcaggagttgtg

SEQ ID NO: 39599 - DNA, 30 bp, Artificial Sequence
  Synthetic oligonucleotide
acatggcgggacattgggataacatttgtg

SEQ ID NO: 39600 - DNA, 30 bp, Artificial Sequence
  Synthetic oligonucleotide
caagttgcgtgagtgcctcgaaaacaattg

SEQ ID NO: 39601 - DNA, 30 bp, Artificial Sequence
  Synthetic oligonucleotide
ccatgcacttacgaaggatgagagcaattg

SEQ ID NO: 39602 - DNA, 30 bp, Artificial Sequence
  Synthetic oligonucleotide
taggataaactgtagcgaacgatagaattg

SEQ ID NO: 39603 - DNA, 30 bp, Artificial Sequence
  Synthetic oligonucleotide
tcgctaaacgaatgccacaataacgaattg

SEQ ID NO: 39604 - DNA, 30 bp, Artificial Sequence
  Synthetic oligonucleotide
aacaacccgcaggaagggaactggtaattg

SEQ ID NO: 39605 - DNA, 30 bp, Artificial Sequence
  Synthetic oligonucleotide
tggaaatagatgcggtatgctaacacattg

SEQ ID NO: 39606 - DNA, 30 bp, Artificial Sequence
  Synthetic oligonucleotide
aggacatgagatcatgttaatgtgacattg

SEQ ID NO: 39607 - DNA, 30 bp, Artificial Sequence
  Synthetic oligonucleotide
acctattgagcaggcaaggataaacgattg

SEQ ID NO: 39608 - DNA, 30 bp, Artificial Sequence
  Synthetic oligonucleotide
cctggcctgcgcgaaaacgagggtcgattg

SEQ ID NO: 39609 - DNA, 30 bp, Artificial Sequence
  Synthetic oligonucleotide
gtaacagttcgagcagaatggcacggattg

SEQ ID NO: 39610 - DNA, 30 bp, Artificial Sequence
  Synthetic oligonucleotide
ggatcgagaggaaagtttgacgagatattg

SEQ ID NO: 39611 - DNA, 30 bp, Artificial Sequence
  Synthetic oligonucleotide
cgatggaacagcgctagtaatctagtattg

SEQ ID NO: 39612 - DNA, 30 bp, Artificial Sequence
  Synthetic oligonucleotide
gtgcaaagtaaaggcacaaagcctgtattg

SEQ ID NO: 39613 - DNA, 30 bp, Artificial Sequence
  Synthetic oligonucleotide
tgctctaacttggagggggtaagacacttg

SEQ ID NO: 39614 - DNA, 30 bp, Artificial Sequence
  Synthetic oligonucleotide
ctaggctaagacacgcatgaagcctacttg

SEQ ID NO: 39615 - DNA, 30 bp, Artificial Sequence
  Synthetic oligonucleotide
acctaatggtccacagaagaacaagccttg

SEQ ID NO: 39616 - DNA, 30 bp, Artificial Sequence
  Synthetic oligonucleotide
gcgggagcctcgagtacggtcttctccttg

SEQ ID NO: 39617 - DNA, 30 bp, Artificial Sequence
  Synthetic oligonucleotide
agaggaatagtcgaacaatagacaagcttg

SEQ ID NO: 39618 - DNA, 30 bp, Artificial Sequence
  Synthetic oligonucleotide
cgatagtgaccatatcgataaaatagcttg

SEQ ID NO: 39619 - DNA, 30 bp, Artificial Sequence
  Synthetic oligonucleotide
atagctgccggaatgggagtggaggtcttg

SEQ ID NO: 39620 - DNA, 30 bp, Artificial Sequence
  Synthetic oligonucleotide
acgtctcggcttcactatcagatggtcttg

SEQ ID NO: 39621 - DNA, 30 bp, Artificial Sequence
  Synthetic oligonucleotide
gccaggggcattaacacctccatacagttg

SEQ ID NO: 39622 - DNA, 30 bp, Artificial Sequence
  Synthetic oligonucleotide
agggctcctcccgacttaccactcgagttg

SEQ ID NO: 39623 - DNA, 30 bp, Artificial Sequence
  Synthetic oligonucleotide
tacactctagacagaggagtgaatgagttg

SEQ ID NO: 39624 - DNA, 30 bp, Artificial Sequence
  Synthetic oligonucleotide
tttgccaaagaccgaagagacgaatagttg

SEQ ID NO: 39625 - DNA, 30 bp, Artificial Sequence
  Synthetic oligonucleotide
cagtaagtcatttggcatcgaatatagttg

SEQ ID NO: 39626 - DNA, 30 bp, Artificial Sequence
  Synthetic oligonucleotide
cgctaaatgtccgtcgcaatagactagttg

SEQ ID NO: 39627 - DNA, 30 bp, Artificial Sequence
  Synthetic oligonucleotide
ttaacggaaacggccatagcaaacacgttg

SEQ ID NO: 39628 - DNA, 30 bp, Artificial Sequence
  Synthetic oligonucleotide
atgctatctacatatcgagaggctacgttg

SEQ ID NO: 39629 - DNA, 30 bp, Artificial Sequence
  Synthetic oligonucleotide
ggaaagtggcacgcgaagtataaatcgttg

SEQ ID NO: 39630 - DNA, 30 bp, Artificial Sequence
  Synthetic oligonucleotide
ataagcagaaagagcgtatatcaatcgttg

SEQ ID NO: 39631 - DNA, 30 bp, Artificial Sequence
  Synthetic oligonucleotide
gcgatataaaactcaacttcatgttcgttg

SEQ ID NO: 39632 - DNA, 30 bp, Artificial Sequence
  Synthetic oligonucleotide
atcggtgggagggcttgtactgcaaggttg

SEQ ID NO: 39633 - DNA, 30 bp, Artificial Sequence
  Synthetic oligonucleotide
tggggacgaaaacttgggagtcccgggttg

SEQ ID NO: 39634 - DNA, 30 bp, Artificial Sequence
  Synthetic oligonucleotide
gagagtatgccgacgaagttagagatgttg

SEQ ID NO: 39635 - DNA, 30 bp, Artificial Sequence
  Synthetic oligonucleotide
ggtaaacagtagggaaacgatggtaatttg

SEQ ID NO: 39636 - DNA, 30 bp, Artificial Sequence
  Synthetic oligonucleotide
gctgggctaaatcgtgaacatgaatgtttg

SEQ ID NO: 39637 - DNA, 30 bp, Artificial Sequence
  Synthetic oligonucleotide
tacacagcgagcaaattaccgcgcaaaaat

SEQ ID NO: 39638 - DNA, 30 bp, Artificial Sequence
  Synthetic oligonucleotide
agtaggcaccgccgagctactagctaaaat

SEQ ID NO: 39639 - DNA, 30 bp, Artificial Sequence
  Synthetic oligonucleotide
cgggggacgttcaatctaatcgggtaaaat

SEQ ID NO: 39640 - DNA, 30 bp, Artificial Sequence
  Synthetic oligonucleotide
gtgacatgacaacattttaccagcgcaaat

SEQ ID NO: 39641 - DNA, 30 bp, Artificial Sequence
  Synthetic oligonucleotide
cattggcatcggaattacaaaggcagaaat

SEQ ID NO: 39642 - DNA, 30 bp, Artificial Sequence
  Synthetic oligonucleotide
taccaggtaaaatcaggaaaaccacgaaat

SEQ ID NO: 39643 - DNA, 30 bp, Artificial Sequence
  Synthetic oligonucleotide
cgttagaggactggaatcgatgtcggaaat

SEQ ID NO: 39644 - DNA, 30 bp, Artificial Sequence
  Synthetic oligonucleotide
ggaaatccaccaacgtgagggcctaacaat

SEQ ID NO: 39645 - DNA, 30 bp, Artificial Sequence
  Synthetic oligonucleotide
aagtcggggttaggtggcaccggtaacaat

SEQ ID NO: 39646 - DNA, 30 bp, Artificial Sequence
  Synthetic oligonucleotide
atgagaacgggctcaggtcagccatacaat

SEQ ID NO: 39647 - DNA, 30 bp, Artificial Sequence
  Synthetic oligonucleotide
tgaagaaaaccccggataccgtcccccaat

SEQ ID NO: 39648 - DNA, 30 bp, Artificial Sequence
  Synthetic oligonucleotide
aggcgtacggctacgtcgtgcccgtccaat

SEQ ID NO: 39649 - DNA, 30 bp, Artificial Sequence
  Synthetic oligonucleotide
tacactagtaggcatcatcctctaagcaat

SEQ ID NO: 39650 - DNA, 30 bp, Artificial Sequence
  Synthetic oligonucleotide
gagaaatgcaataaaggaccattgcgcaat

SEQ ID NO: 39651 - DNA, 30 bp, Artificial Sequence
  Synthetic oligonucleotide
cgtgtaataacgaacgatccgccgatcaat

SEQ ID NO: 39652 - DNA, 30 bp, Artificial Sequence
  Synthetic oligonucleotide
acgcgacccgagcgataaccgacaaagaat

SEQ ID NO: 39653 - DNA, 30 bp, Artificial Sequence
  Synthetic oligonucleotide
ctaagccgataacggaaaggtcgcgagaat

SEQ ID NO: 39654 - DNA, 30 bp, Artificial Sequence
  Synthetic oligonucleotide
ggtcggttagaactcgctgcgggggagaat

SEQ ID NO: 39655 - DNA, 30 bp, Artificial Sequence
  Synthetic oligonucleotide
gcgaagagggccttggacctgcactagaat

SEQ ID NO: 39656 - DNA, 30 bp, Artificial Sequence
  Synthetic oligonucleotide
ggtgtatcacgagaggtgcctagaccgaat

SEQ ID NO: 39657 - DNA, 30 bp, Artificial Sequence
  Synthetic oligonucleotide
agatacacaaggtcctgagtccaaaggaat

SEQ ID NO: 39658 - DNA, 30 bp, Artificial Sequence
  Synthetic oligonucleotide
aggcatacctagaaaccttaattagtgaat

SEQ ID NO: 39659 - DNA, 30 bp, Artificial Sequence
  Synthetic oligonucleotide
cagtgtcacatgcgtgaaaggaggactaat

SEQ ID NO: 39660 - DNA, 30 bp, Artificial Sequence
  Synthetic oligonucleotide
acccatacagaggcgacaagaaagagtaat

SEQ ID NO: 39661 - DNA, 30 bp, Artificial Sequence
  Synthetic oligonucleotide
taaaagtagagaaaagagagtgaaattaat

SEQ ID NO: 39662 - DNA, 30 bp, Artificial Sequence
  Synthetic oligonucleotide
gtgacatggaatacgaagtccccaattaat

SEQ ID NO: 39663 - DNA, 30 bp, Artificial Sequence
  Synthetic oligonucleotide
ggacgaggggggggaccgctccctattaat

SEQ ID NO: 39664 - DNA, 30 bp, Artificial Sequence
  Synthetic oligonucleotide
gaggaggaggaagttcttaagcgtaaacat

SEQ ID NO: 39665 - DNA, 30 bp, Artificial Sequence
  Synthetic oligonucleotide
cgtggtatgcccggggaggactgacaacat

SEQ ID NO: 39666 - DNA, 30 bp, Artificial Sequence
  Synthetic oligonucleotide
aggactgatattatagtggttgagcaacat

SEQ ID NO: 39667 - DNA, 30 bp, Artificial Sequence
  Synthetic oligonucleotide
cgcgggcaggcccaatatagatgcgaacat

SEQ ID NO: 39668 - DNA, 30 bp, Artificial Sequence
  Synthetic oligonucleotide
gggggccggggttcaaaatcgagggaacat

SEQ ID NO: 39669 - DNA, 30 bp, Artificial Sequence
  Synthetic oligonucleotide
tgggcttggcgtcaactatgcaactaacat

SEQ ID NO: 39670 - DNA, 30 bp, Artificial Sequence
  Synthetic oligonucleotide
tcgacatgtaatctcggaagtgaggcacat

SEQ ID NO: 39671 - DNA, 30 bp, Artificial Sequence
  Synthetic oligonucleotide
atgtacagagtgggttggctggttgcacat

SEQ ID NO: 39672 - DNA, 30 bp, Artificial Sequence
  Synthetic oligonucleotide
gcgacgatacaggaatgtccgacatcacat

SEQ ID NO: 39673 - DNA, 30 bp, Artificial Sequence
  Synthetic oligonucleotide
aagggtgacagagtactgcatttctcacat

SEQ ID NO: 39674 - DNA, 30 bp, Artificial Sequence
  Synthetic oligonucleotide
cataagattagcaatgaatggctcggacat

SEQ ID NO: 39675 - DNA, 30 bp, Artificial Sequence
  Synthetic oligonucleotide
gacagtactcacacacagccgaaaatacat

SEQ ID NO: 39676 - DNA, 30 bp, Artificial Sequence
  Synthetic oligonucleotide
cggggcggcgaacaaaattatccggcccat

SEQ ID NO: 39677 - DNA, 30 bp, Artificial Sequence
  Synthetic oligonucleotide
aaccacacaagtgtcgagtaccagagccat

SEQ ID NO: 39678 - DNA, 30 bp, Artificial Sequence
  Synthetic oligonucleotide
tgtgaatggttgtagataagccgagtccat

SEQ ID NO: 39679 - DNA, 30 bp, Artificial Sequence
  Synthetic oligonucleotide
gtccgaaaagagcgaaaaaggctaccgcat

SEQ ID NO: 39680 - DNA, 30 bp, Artificial Sequence
  Synthetic oligonucleotide
cgaactcctgggcgcgaatctctagcgcat

SEQ ID NO: 39681 - DNA, 30 bp, Artificial Sequence
  Synthetic oligonucleotide
ccgaaggataccgtcggcattaagtcgcat

SEQ ID NO: 39682 - DNA, 30 bp, Artificial Sequence
  Synthetic oligonucleotide
agctgtcacagaacatgaaggtgttcgcat

SEQ ID NO: 39683 - DNA, 30 bp, Artificial Sequence
  Synthetic oligonucleotide
cattgcgaagaaaattatatgggaaggcat

SEQ ID NO: 39684 - DNA, 29 bp, Artificial Sequence
  Synthetic oligonucleotide
gtctcgtgatgagattggaagacctgcat

SEQ ID NO: 39685 - DNA, 30 bp, Artificial Sequence
  Synthetic oligonucleotide
accacaaggtgctaatgagaatagctgcat

SEQ ID NO: 39686 - DNA, 30 bp, Artificial Sequence
  Synthetic oligonucleotide
cgttcgggggcgtatcgcagagtgctgcat

SEQ ID NO: 39687 - DNA, 30 bp, Artificial Sequence
  Synthetic oligonucleotide
acgggattggctgctactatgtgattgcat

SEQ ID NO: 39688 - DNA, 30 bp, Artificial Sequence
  Synthetic oligonucleotide
aaggaaggggggacaggtgcagataatcat

SEQ ID NO: 39689 - DNA, 30 bp, Artificial Sequence
  Synthetic oligonucleotide
aaggcccgtcgcgaactaggaaatcatcat

SEQ ID NO: 39690 - DNA, 30 bp, Artificial Sequence
  Synthetic oligonucleotide
tccagagagtgggctgcgtatcctgatcat

SEQ ID NO: 39691 - DNA, 30 bp, Artificial Sequence
  Synthetic oligonucleotide
gtggcacgtaatcctggtgcgtaaactcat

SEQ ID NO: 39692 - DNA, 30 bp, Artificial Sequence
  Synthetic oligonucleotide
cgcgctggtaacaataagcggaagagtcat

SEQ ID NO: 39693 - DNA, 30 bp, Artificial Sequence
  Synthetic oligonucleotide
acttccgggggagaaggagtcaagcgtcat

SEQ ID NO: 39694 - DNA, 30 bp, Artificial Sequence
  Synthetic oligonucleotide
agatccagcttgattcgacgtgacggtcat

SEQ ID NO: 39695 - DNA, 30 bp, Artificial Sequence
  Synthetic oligonucleotide
gcagggcctcgtcaggctaacgatcaagat

SEQ ID NO: 39696 - DNA, 30 bp, Artificial Sequence
  Synthetic oligonucleotide
tgggcacagtgaagggatgccgatcaagat

SEQ ID NO: 39697 - DNA, 30 bp, Artificial Sequence
  Synthetic oligonucleotide
tagactcgtcaagatacacagggtcaagat

SEQ ID NO: 39698 - DNA, 29 bp, Artificial Sequence
  Synthetic oligonucleotide
tgggtcaccatctcggatagggttaagat

SEQ ID NO: 39699 - DNA, 30 bp, Artificial Sequence
  Synthetic oligonucleotide
tgatgagttagtagatttcgccgtacagat

SEQ ID NO: 39700 - DNA, 30 bp, Artificial Sequence
  Synthetic oligonucleotide
aggaggcactgtcgttaaggtgtatgagat

SEQ ID NO: 39701 - DNA, 30 bp, Artificial Sequence
  Synthetic oligonucleotide
ggtgaagggctcgtgtacgtagtgctagat

SEQ ID NO: 39702 - DNA, 30 bp, Artificial Sequence
  Synthetic oligonucleotide
cgtgagtaagcactaagttatgtattagat

SEQ ID NO: 39703 - DNA, 30 bp, Artificial Sequence
  Synthetic oligonucleotide
cagcgatgtgcgagtagtcgagtgttagat

SEQ ID NO: 39704 - DNA, 30 bp, Artificial Sequence
  Synthetic oligonucleotide
ggctagccgataacggttgactgggacgat

SEQ ID NO: 39705 - DNA, 30 bp, Artificial Sequence
  Synthetic oligonucleotide
agacggatgaagaacaccgaaaacaccgat

SEQ ID NO: 39706 - DNA, 30 bp, Artificial Sequence
  Synthetic oligonucleotide
aagggagcgctaccataaagttagaccgat

SEQ ID NO: 39707 - DNA, 30 bp, Artificial Sequence
  Synthetic oligonucleotide
ttgggcggcgtgagcgttatacagatcgat

SEQ ID NO: 39708 - DNA, 30 bp, Artificial Sequence
  Synthetic oligonucleotide
tctaacaagaaacaagggggagggatcgat

SEQ ID NO: 39709 - DNA, 31 bp, Artificial Sequence
  Synthetic oligonucleotide
agagggaataagactaaggattgaactcgat

SEQ ID NO: 39710 - DNA, 30 bp, Artificial Sequence
  Synthetic oligonucleotide
aaagtgatagcgatcggtaaacaagtcgat

SEQ ID NO: 39711 - DNA, 30 bp, Artificial Sequence
  Synthetic oligonucleotide
ctcgagcgtagtcacattagagtggtcgat

SEQ ID NO: 39712 - DNA, 30 bp, Artificial Sequence
  Synthetic oligonucleotide
acagaggcaagccagcatagtaatttcgat

SEQ ID NO: 39713 - DNA, 30 bp, Artificial Sequence
  Synthetic oligonucleotide
agcagggctggctatcacttaacagaggat

SEQ ID NO: 39714 - DNA, 30 bp, Artificial Sequence
  Synthetic oligonucleotide
aaacggggtgacaagagaagagccgaggat

SEQ ID NO: 39715 - DNA, 30 bp, Artificial Sequence
  Synthetic oligonucleotide
ggcagatgttcgagtagaatctgcgaggat

SEQ ID NO: 39716 - DNA, 30 bp, Artificial Sequence
  Synthetic oligonucleotide
gtagacaggcaaggtacttgcatggaggat

SEQ ID NO: 39717 - DNA, 30 bp, Artificial Sequence
  Synthetic oligonucleotide
tagggaggtaattagaggtgcaagtcggat

SEQ ID NO: 39718 - DNA, 30 bp, Artificial Sequence
  Synthetic oligonucleotide
ggggaacgacgccactaagtagtttcggat

SEQ ID NO: 39719 - DNA, 30 bp, Artificial Sequence
  Synthetic oligonucleotide
ggcatacaaaggtgagacttagagggggat

SEQ ID NO: 39720 - DNA, 30 bp, Artificial Sequence
  Synthetic oligonucleotide
aaacgtgcgggacgaacgggcgaatgggat

SEQ ID NO: 39721 - DNA, 30 bp, Artificial Sequence
  Synthetic oligonucleotide
atcggtgcctaggcctacacaccaatggat

SEQ ID NO: 39722 - DNA, 30 bp, Artificial Sequence
  Synthetic oligonucleotide
atggtgcttaagattcgggattcgatggat

SEQ ID NO: 39723 - DNA, 30 bp, Artificial Sequence
  Synthetic oligonucleotide
atgaaaacgcaggggatagaaaagtatgat

SEQ ID NO: 39724 - DNA, 30 bp, Artificial Sequence
  Synthetic oligonucleotide
ggtaaccagtaccagtagggatgtggtgat

SEQ ID NO: 39725 - DNA, 30 bp, Artificial Sequence
  Synthetic oligonucleotide
gctcgaggagagaagagcgtagaggaatat

SEQ ID NO: 39726 - DNA, 30 bp, Artificial Sequence
  Synthetic oligonucleotide
ggagggggtgagtatagaattataccatat

SEQ ID NO: 39727 - DNA, 30 bp, Artificial Sequence
  Synthetic oligonucleotide
cacatgcatgcatgagtgggcgggccatat

SEQ ID NO: 39728 - DNA, 31 bp, Artificial Sequence
  Synthetic oligonucleotide
gcgctaacgttccgaatgggaaatggcatat

SEQ ID NO: 39729 - DNA, 30 bp, Artificial Sequence
  Synthetic oligonucleotide
atgggaggaaagagttggccagacagatat

SEQ ID NO: 39730 - DNA, 30 bp, Artificial Sequence
  Synthetic oligonucleotide
cttagagctcggtgtgaaatgtgacgatat

SEQ ID NO: 39731 - DNA, 30 bp, Artificial Sequence
  Synthetic oligonucleotide
cgagaaccgttatgtgtgggaacccactat

SEQ ID NO: 39732 - DNA, 30 bp, Artificial Sequence
  Synthetic oligonucleotide
aggcgtggaagaggggaagcatgagcctat

SEQ ID NO: 39733 - DNA, 30 bp, Artificial Sequence
  Synthetic oligonucleotide
ggagacctgatccgcctcggaaagcgctat

SEQ ID NO: 39734 - DNA, 30 bp, Artificial Sequence
  Synthetic oligonucleotide
gatagggatcgagaatctaaacagctctat

SEQ ID NO: 39735 - DNA, 30 bp, Artificial Sequence
  Synthetic oligonucleotide
cctgataaaggggtatacggcgaattctat

SEQ ID NO: 39736 - DNA, 30 bp, Artificial Sequence
  Synthetic oligonucleotide
ccgttctaaggcgaggtgaagtcccagtat

SEQ ID NO: 39737 - DNA, 30 bp, Artificial Sequence
  Synthetic oligonucleotide
caaggacacatcaagaacgctgcaacgtat

SEQ ID NO: 39738 - DNA, 30 bp, Artificial Sequence
  Synthetic oligonucleotide
tcagcgaacattcccatggataagccgtat

SEQ ID NO: 39739 - DNA, 30 bp, Artificial Sequence
  Synthetic oligonucleotide
cgtcatcactcggggaccattgtatcgtat

SEQ ID NO: 39740 - DNA, 30 bp, Artificial Sequence
  Synthetic oligonucleotide
cacacactagacattcacaatcacaattat

SEQ ID NO: 39741 - DNA, 30 bp, Artificial Sequence
  Synthetic oligonucleotide
aaggcgctagcaccacaacggctgcattat

SEQ ID NO: 39742 - DNA, 30 bp, Artificial Sequence
  Synthetic oligonucleotide
cagagggcaacgtgtgtaggccaaacttat

SEQ ID NO: 39743 - DNA, 30 bp, Artificial Sequence
  Synthetic oligonucleotide
tggctccattggtaacgtgaccactcttat

SEQ ID NO: 39744 - DNA, 30 bp, Artificial Sequence
  Synthetic oligonucleotide
atacggacggagacaaggggaagcagttat

SEQ ID NO: 39745 - DNA, 30 bp, Artificial Sequence
  Synthetic oligonucleotide
cgactaatcaatcgcgtgaaggtcgaaact

SEQ ID NO: 39746 - DNA, 30 bp, Artificial Sequence
  Synthetic oligonucleotide
gaagggcgatggcactcgtgacctgaaact

SEQ ID NO: 39747 - DNA, 30 bp, Artificial Sequence
  Synthetic oligonucleotide
aaggaaaagcggtattacgccagttaaact

SEQ ID NO: 39748 - DNA, 30 bp, Artificial Sequence
  Synthetic oligonucleotide
taaggccaatactgaatactcggcagaact

SEQ ID NO: 39749 - DNA, 30 bp, Artificial Sequence
  Synthetic oligonucleotide
gacggaatccgatatgtgcgctaatgaact

SEQ ID NO: 39750 - DNA, 30 bp, Artificial Sequence
  Synthetic oligonucleotide
aaggtgctatattaccatgtagggtgaact

SEQ ID NO: 39751 - DNA, 30 bp, Artificial Sequence
  Synthetic oligonucleotide
atgatgggagagggccattatcgtataact

SEQ ID NO: 39752 - DNA, 30 bp, Artificial Sequence
  Synthetic oligonucleotide
atataaaaagcggtacaacaacgggtaact

SEQ ID NO: 39753 - DNA, 30 bp, Artificial Sequence
  Synthetic oligonucleotide
accaggggtataaagagtcagcgacacact

SEQ ID NO: 39754 - DNA, 30 bp, Artificial Sequence
  Synthetic oligonucleotide
cacgtcaccgatgagagtctaaaccacact

SEQ ID NO: 39755 - DNA, 30 bp, Artificial Sequence
  Synthetic oligonucleotide
tccgggcagccacgagaaaaccgaaccact

SEQ ID NO: 39756 - DNA, 30 bp, Artificial Sequence
  Synthetic oligonucleotide
tgaggcccaacccatctccgaggtaccact

SEQ ID NO: 39757 - DNA, 30 bp, Artificial Sequence
  Synthetic oligonucleotide
agagcgaggtgaatggtcccactcggcact

SEQ ID NO: 39758 - DNA, 30 bp, Artificial Sequence
  Synthetic oligonucleotide
ttaggaggaccatgctggacttagggcact

SEQ ID NO: 39759 - DNA, 30 bp, Artificial Sequence
  Synthetic oligonucleotide
gggctgtaccgggtgatacaagagtgcact

SEQ ID NO: 39760 - DNA, 30 bp, Artificial Sequence
  Synthetic oligonucleotide
agttcgcacctatgggaaacgagtgtcact

SEQ ID NO: 39761 - DNA, 30 bp, Artificial Sequence
  Synthetic oligonucleotide
ggaactagggagactagtgatagcaggact

SEQ ID NO: 39762 - DNA, 30 bp, Artificial Sequence
  Synthetic oligonucleotide
ggagaggacataagacgtactagacggact

SEQ ID NO: 39763 - DNA, 30 bp, Artificial Sequence
  Synthetic oligonucleotide
ggaccatcgtcggaccagacagtgatgact

SEQ ID NO: 39764 - DNA, 30 bp, Artificial Sequence
  Synthetic oligonucleotide
aggtacacaaggctcggcgttgctctgact

SEQ ID NO: 39765 - DNA, 30 bp, Artificial Sequence
  Synthetic oligonucleotide
gcagggcgttaacgcacggtagaagtgact

SEQ ID NO: 39766 - DNA, 30 bp, Artificial Sequence
  Synthetic oligonucleotide
tcgtcgcatgatatgtactggagtgatact

SEQ ID NO: 39767 - DNA, 30 bp, Artificial Sequence
  Synthetic oligonucleotide
caatcgaaaatagttaggatatcaagtact

SEQ ID NO: 39768 - DNA, 30 bp, Artificial Sequence
  Synthetic oligonucleotide
catcatcattgagtgtccggacagagtact

SEQ ID NO: 39769 - DNA, 30 bp, Artificial Sequence
  Synthetic oligonucleotide
acggggagcgtggacagatagggacgtact

SEQ ID NO: 39770 - DNA, 30 bp, Artificial Sequence
  Synthetic oligonucleotide
acacgacagccagagctctgacacggtact

SEQ ID NO: 39771 - DNA, 30 bp, Artificial Sequence
  Synthetic oligonucleotide
acgaagatacagggatacagttaagttact

SEQ ID NO: 39772 - DNA, 30 bp, Artificial Sequence
  Synthetic oligonucleotide
tcataggctaaagggcggaatctcgaacct

SEQ ID NO: 39773 - DNA, 30 bp, Artificial Sequence
  Synthetic oligonucleotide
catggtagcagactaattgagcgataacct

SEQ ID NO: 39774 - DNA, 30 bp, Artificial Sequence
  Synthetic oligonucleotide
agacgatgatgtaacgtcgtaggataacct

SEQ ID NO: 39775 - DNA, 30 bp, Artificial Sequence
  Synthetic oligonucleotide
taacgccgtgaaaagacaatcataccacct

SEQ ID NO: 39776 - DNA, 30 bp, Artificial Sequence
  Synthetic oligonucleotide
agctgaagaccaatcgttagccctccacct

SEQ ID NO: 39777 - DNA, 30 bp, Artificial Sequence
  Synthetic oligonucleotide
agggctagtaatagctaaattcgggcacct

SEQ ID NO: 39778 - DNA, 30 bp, Artificial Sequence
  Synthetic oligonucleotide
ccatcaatgctaacgtagtgctggggacct

SEQ ID NO: 39779 - DNA, 30 bp, Artificial Sequence
  Synthetic oligonucleotide
gcgaacgggttagatgtgggaacagaccct

SEQ ID NO: 39780 - DNA, 30 bp, Artificial Sequence
  Synthetic oligonucleotide
cgaaacggcgtgtgacgttgctacgaccct

SEQ ID NO: 39781 - DNA, 30 bp, Artificial Sequence
  Synthetic oligonucleotide
tcgccatgtgcaacaaaagagtaagcccct

SEQ ID NO: 39782 - DNA, 30 bp, Artificial Sequence
  Synthetic oligonucleotide
cattgtgaaagtctcaaaaagacaacgcct

SEQ ID NO: 39783 - DNA, 30 bp, Artificial Sequence
  Synthetic oligonucleotide
taccaggatggcatccagtgatctctgcct

SEQ ID NO: 39784 - DNA, 30 bp, Artificial Sequence
  Synthetic oligonucleotide
cacacagtggtccagatgatgattgtgcct

SEQ ID NO: 39785 - DNA, 30 bp, Artificial Sequence
  Synthetic oligonucleotide
caacgcgtgatcgtgtacgggggaactcct

SEQ ID NO: 39786 - DNA, 30 bp, Artificial Sequence
  Synthetic oligonucleotide
cagtgctgagtcgggaggccagcgagtcct

SEQ ID NO: 39787 - DNA, 30 bp, Artificial Sequence
  Synthetic oligonucleotide
aggtaagaacccagggcgagcttaaaagct

SEQ ID NO: 39788 - DNA, 30 bp, Artificial Sequence
  Synthetic oligonucleotide
tgcaggccaaaacagctgaatcacaaagct

SEQ ID NO: 39789 - DNA, 30 bp, Artificial Sequence
  Synthetic oligonucleotide
tcagtatcaataactggtgacaacgaagct

SEQ ID NO: 39790 - DNA, 30 bp, Artificial Sequence
  Synthetic oligonucleotide
ggagtcgacatgaaacggaaatcctaagct

SEQ ID NO: 39791 - DNA, 30 bp, Artificial Sequence
  Synthetic oligonucleotide
gcggtggaaagtgacgagactatgtaagct

SEQ ID NO: 39792 - DNA, 30 bp, Artificial Sequence
  Synthetic oligonucleotide
atgaggaatttgggagtggcccacagagct

SEQ ID NO: 39793 - DNA, 30 bp, Artificial Sequence
  Synthetic oligonucleotide
ggaataagactagctaaacgggacagagct

SEQ ID NO: 39794 - DNA, 30 bp, Artificial Sequence
  Synthetic oligonucleotide
gggaaaccagcctccaatatcagaggagct

SEQ ID NO: 39795 - DNA, 30 bp, Artificial Sequence
  Synthetic oligonucleotide
caaaagtatattgaagtaaaatcccacgct

SEQ ID NO: 39796 - DNA, 30 bp, Artificial Sequence
  Synthetic oligonucleotide
cgagtacatgtaaggtaggatcaattcgct

SEQ ID NO: 39797 - DNA, 30 bp, Artificial Sequence
  Synthetic oligonucleotide
agaattggcatggattagtaaatcaaggct

SEQ ID NO: 39798 - DNA, 30 bp, Artificial Sequence
  Synthetic oligonucleotide
ggggcatatgtgagtgcagtgagtccggct

SEQ ID NO: 39799 - DNA, 30 bp, Artificial Sequence
  Synthetic oligonucleotide
ggggacacaacaatcgtcggcaaagcggct

SEQ ID NO: 39800 - DNA, 30 bp, Artificial Sequence
  Synthetic oligonucleotide
caatgtgataaagcacgtgaagagcgggct

SEQ ID NO: 39801 - DNA, 30 bp, Artificial Sequence
  Synthetic oligonucleotide
cacgggtgtgtgtgaaaatccaagaatgct

SEQ ID NO: 39802 - DNA, 30 bp, Artificial Sequence
  Synthetic oligonucleotide
tgacatgaaatggaccattcggctaatgct

SEQ ID NO: 39803 - DNA, 30 bp, Artificial Sequence
  Synthetic oligonucleotide
ctaggtacctggacccaagtgtgcgttgct

SEQ ID NO: 39804 - DNA, 30 bp, Artificial Sequence
  Synthetic oligonucleotide
aggagtgccatggatgggtgaacccaatct

SEQ ID NO: 39805 - DNA, 30 bp, Artificial Sequence
  Synthetic oligonucleotide
cgagtcacccctggtacagatcggcaatct

SEQ ID NO: 39806 - DNA, 30 bp, Artificial Sequence
  Synthetic oligonucleotide
agggcgggaaagctgttacacaacgaatct

SEQ ID NO: 39807 - DNA, 30 bp, Artificial Sequence
  Synthetic oligonucleotide
gcatatcagatgtggtgggcaattgaatct

SEQ ID NO: 39808 - DNA, 30 bp, Artificial Sequence
  Synthetic oligonucleotide
cggaacacctcgacattggctgcataatct

SEQ ID NO: 39809 - DNA, 30 bp, Artificial Sequence
  Synthetic oligonucleotide
ccgggcatgaaatccgtgcagtacacatct

SEQ ID NO: 39810 - DNA, 30 bp, Artificial Sequence
  Synthetic oligonucleotide
atgacaactcacggtacggatccagcatct

SEQ ID NO: 39811 - DNA, 30 bp, Artificial Sequence
  Synthetic oligonucleotide
cggaaagtcaggggattcgctcgctcctct

SEQ ID NO: 39812 - DNA, 30 bp, Artificial Sequence
  Synthetic oligonucleotide
atggaaattggcacgctaagatcaagctct

SEQ ID NO: 39813 - DNA, 30 bp, Artificial Sequence
  Synthetic oligonucleotide
accacatgcatggcctacactacgatctct

SEQ ID NO: 39814 - DNA, 30 bp, Artificial Sequence
  Synthetic oligonucleotide
agtgcggaggtcatgttcagggtggcgtct

SEQ ID NO: 39815 - DNA, 30 bp, Artificial Sequence
  Synthetic oligonucleotide
aacaatgcagtccgaacatcaacgcggtct

SEQ ID NO: 39816 - DNA, 30 bp, Artificial Sequence
  Synthetic oligonucleotide
tacaggcgacgaatcaactgggacgggtct

SEQ ID NO: 39817 - DNA, 30 bp, Artificial Sequence
  Synthetic oligonucleotide
atgttgggcggaatagtaaagctaatgtct

SEQ ID NO: 39818 - DNA, 30 bp, Artificial Sequence
  Synthetic oligonucleotide
tcacggcagagaaggtaactgaagttgtct

SEQ ID NO: 39819 - DNA, 30 bp, Artificial Sequence
  Synthetic oligonucleotide
gacgcggtgagtcgccaacatgatatttct

SEQ ID NO: 39820 - DNA, 30 bp, Artificial Sequence
  Synthetic oligonucleotide
acaccaatagaaaagatggacttaaaaagt

SEQ ID NO: 39821 - DNA, 30 bp, Artificial Sequence
  Synthetic oligonucleotide
aggaatcgcaccactaacaaaatgaaaagt

SEQ ID NO: 39822 - DNA, 30 bp, Artificial Sequence
  Synthetic oligonucleotide
cgtcgaagttcggtgccattgagtgaaagt

SEQ ID NO: 39823 - DNA, 30 bp, Artificial Sequence
  Synthetic oligonucleotide
ctaaaagcaggcaaagcgcaaccctaaagt

SEQ ID NO: 39824 - DNA, 30 bp, Artificial Sequence
  Synthetic oligonucleotide
tgcgttaaggaaattggaagcggtcgaagt

SEQ ID NO: 39825 - DNA, 30 bp, Artificial Sequence
  Synthetic oligonucleotide
tgaaatatattgcatgtaaggagcggaagt

SEQ ID NO: 39826 - DNA, 30 bp, Artificial Sequence
  Synthetic oligonucleotide
gacatacgctcagtcctagatacgggaagt

SEQ ID NO: 39827 - DNA, 30 bp, Artificial Sequence
  Synthetic oligonucleotide
tgaggtaattaaagcacacataagaacagt

SEQ ID NO: 39828 - DNA, 31 bp, Artificial Sequence
  Synthetic oligonucleotide
ccttggaataggaccacctcacaggaacagt

SEQ ID NO: 39829 - DNA, 30 bp, Artificial Sequence
  Synthetic oligonucleotide
taagtatcccgcaaatagaaaccacacagt

SEQ ID NO: 39830 - DNA, 30 bp, Artificial Sequence
  Synthetic oligonucleotide
aggtaccactcaacaaataactgcaccagt

SEQ ID NO: 39831 - DNA, 30 bp, Artificial Sequence
  Synthetic oligonucleotide
gggagcaaactccaataattatatagcagt

SEQ ID NO: 39832 - DNA, 30 bp, Artificial Sequence
  Synthetic oligonucleotide
gggaactcgttcgccctaacccgtagcagt

SEQ ID NO: 39833 - DNA, 30 bp, Artificial Sequence
  Synthetic oligonucleotide
agcgaagctggatcgcggcggtcccagagt

SEQ ID NO: 39834 - DNA, 30 bp, Artificial Sequence
  Synthetic oligonucleotide
catttgaaagttggaataatagagcagagt

SEQ ID NO: 39835 - DNA, 30 bp, Artificial Sequence
  Synthetic oligonucleotide
ccaacagtggggcgagggttcactcagagt

SEQ ID NO: 39836 - DNA, 30 bp, Artificial Sequence
  Synthetic oligonucleotide
gcgcgcaggatttcggccatcattcagagt

SEQ ID NO: 39837 - DNA, 30 bp, Artificial Sequence
  Synthetic oligonucleotide
acactctgtgcaaaaagttaataagagagt

SEQ ID NO: 39838 - DNA, 30 bp, Artificial Sequence
  Synthetic oligonucleotide
agggagactactaaacaatcgggttagagt

SEQ ID NO: 39839 - DNA, 30 bp, Artificial Sequence
  Synthetic oligonucleotide
tgccaccatctacacgggttcgggacgagt

SEQ ID NO: 39840 - DNA, 30 bp, Artificial Sequence
  Synthetic oligonucleotide
ttagcacaaagttagcgtgtgcgcccgagt

SEQ ID NO: 39841 - DNA, 30 bp, Artificial Sequence
  Synthetic oligonucleotide
catagagttcagactgggaaatcgtcgagt

SEQ ID NO: 39842 - DNA, 30 bp, Artificial Sequence
  Synthetic oligonucleotide
aacatgtacaacgaattaagggttcggagt

SEQ ID NO: 39843 - DNA, 30 bp, Artificial Sequence
  Synthetic oligonucleotide
gcacaagcaatcaaaacctgtttagggagt

SEQ ID NO: 39844 - DNA, 30 bp, Artificial Sequence
  Synthetic oligonucleotide
caagatcgttccccgaagtgggaggggagt

SEQ ID NO: 39845 - DNA, 30 bp, Artificial Sequence
  Synthetic oligonucleotide
tcatgttgatagcgtattgaggacatgagt

SEQ ID NO: 39846 - DNA, 30 bp, Artificial Sequence
  Synthetic oligonucleotide
tccacggctttaagaagccaagccatgagt

SEQ ID NO: 39847 - DNA, 30 bp, Artificial Sequence
  Synthetic oligonucleotide
aaggccacttacgtcgcccaagccctgagt

SEQ ID NO: 39848 - DNA, 30 bp, Artificial Sequence
  Synthetic oligonucleotide
atcgcggcggaggagtcttcggtcgtgagt

SEQ ID NO: 39849 - DNA, 30 bp, Artificial Sequence
  Synthetic oligonucleotide
cgctcacagggtgtagaatcttataatagt

SEQ ID NO: 39850 - DNA, 30 bp, Artificial Sequence
  Synthetic oligonucleotide
tcacagcaaaatacaggtctggaagatagt

SEQ ID NO: 39851 - DNA, 30 bp, Artificial Sequence
  Synthetic oligonucleotide
aggtaaatgaaagaggacgttaaatatagt

SEQ ID NO: 39852 - DNA, 30 bp, Artificial Sequence
  Synthetic oligonucleotide
gaaaggaagcatgttacagttccaactagt

SEQ ID NO: 39853 - DNA, 30 bp, Artificial Sequence
  Synthetic oligonucleotide
aaacataatggattcggaaaaatagctagt

SEQ ID NO: 39854 - DNA, 30 bp, Artificial Sequence
  Synthetic oligonucleotide
acccataaaagggaatgaatgcccagtagt

SEQ ID NO: 39855 - DNA, 30 bp, Artificial Sequence
  Synthetic oligonucleotide
gaggaacgtctatctaaccaaaaacgtagt

SEQ ID NO: 39856 - DNA, 30 bp, Artificial Sequence
  Synthetic oligonucleotide
gaagtccggccgtggtaatgagaaaaacgt

SEQ ID NO: 39857 - DNA, 30 bp, Artificial Sequence
  Synthetic oligonucleotide
tcacatgaagtcatctgcggcgaccaacgt

SEQ ID NO: 39858 - DNA, 30 bp, Artificial Sequence
  Synthetic oligonucleotide
caacggtcataataggtaagcatccaacgt

SEQ ID NO: 39859 - DNA, 30 bp, Artificial Sequence
  Synthetic oligonucleotide
gagggctggtgaggcacctaaagtccacgt

SEQ ID NO: 39860 - DNA, 30 bp, Artificial Sequence
  Synthetic oligonucleotide
aaagccgggacacgcgacagaacagcacgt

SEQ ID NO: 39861 - DNA, 30 bp, Artificial Sequence
  Synthetic oligonucleotide
atacggccagagtaagttaagttcgcacgt

SEQ ID NO: 39862 - DNA, 30 bp, Artificial Sequence
  Synthetic oligonucleotide
tgtgaggctaaggttgcgacgatacgacgt

SEQ ID NO: 39863 - DNA, 30 bp, Artificial Sequence
  Synthetic oligonucleotide
cgtcgccgagaagagcgtggctgtggacgt

SEQ ID NO: 39864 - DNA, 30 bp, Artificial Sequence
  Synthetic oligonucleotide
caagtgacgtgagaccagagcaatatacgt

SEQ ID NO: 39865 - DNA, 30 bp, Artificial Sequence
  Synthetic oligonucleotide
acattgcatgtgctaaaactaagggggcgt

SEQ ID NO: 39866 - DNA, 30 bp, Artificial Sequence
  Synthetic oligonucleotide
acggactgagcagagtgccgccggctgcgt

SEQ ID NO: 39867 - DNA, 30 bp, Artificial Sequence
  Synthetic oligonucleotide
catgagtgtacctcagacgttgaaaatcgt

SEQ ID NO: 39868 - DNA, 30 bp, Artificial Sequence
  Synthetic oligonucleotide
acgattgccccaaaggagaatgctgctcgt

SEQ ID NO: 39869 - DNA, 30 bp, Artificial Sequence
  Synthetic oligonucleotide
gtgcctgagtgatggggtgaacagagtcgt

SEQ ID NO: 39870 - DNA, 30 bp, Artificial Sequence
  Synthetic oligonucleotide
aggcggaacaagatgttccaaagcggtcgt

SEQ ID NO: 39871 - DNA, 30 bp, Artificial Sequence
  Synthetic oligonucleotide
cgcgctgggggtcacgagataccttgtcgt

SEQ ID NO: 39872 - DNA, 30 bp, Artificial Sequence
  Synthetic oligonucleotide
gcggacaccgatccgtattagccatttcgt

SEQ ID NO: 39873 - DNA, 30 bp, Artificial Sequence
  Synthetic oligonucleotide
cgggaaatatgggctccatcgcgatttcgt

SEQ ID NO: 39874 - DNA, 30 bp, Artificial Sequence
  Synthetic oligonucleotide
tctatgtcgcccaggcaaaagtgcaaaggt

SEQ ID NO: 39875 - DNA, 30 bp, Artificial Sequence
  Synthetic oligonucleotide
ccataaaagagcttgaataaggatgaaggt

SEQ ID NO: 39876 - DNA, 30 bp, Artificial Sequence
  Synthetic oligonucleotide
ctggatccacgtccgcgcttgaaaacaggt

SEQ ID NO: 39877 - DNA, 30 bp, Artificial Sequence
  Synthetic oligonucleotide
acggcccattcagccatgtgaaagacaggt

SEQ ID NO: 39878 - DNA, 30 bp, Artificial Sequence
  Synthetic oligonucleotide
tagaataatcaggtaagagcaggtcgaggt

SEQ ID NO: 39879 - DNA, 30 bp, Artificial Sequence
  Synthetic oligonucleotide
cacccacgacatcggaagaagcctggaggt

SEQ ID NO: 39880 - DNA, 30 bp, Artificial Sequence
  Synthetic oligonucleotide
cgcatagatggagataggaaccgtggaggt

SEQ ID NO: 39881 - DNA, 30 bp, Artificial Sequence
  Synthetic oligonucleotide
agagtaagaccgagaagaccgatttgaggt

SEQ ID NO: 39882 - DNA, 30 bp, Artificial Sequence
  Synthetic oligonucleotide
cctacaactcgatggcaacggaaactaggt

SEQ ID NO: 39883 - DNA, 30 bp, Artificial Sequence
  Synthetic oligonucleotide
aagggccctgacctcatcaagcaaagcggt

SEQ ID NO: 39884 - DNA, 30 bp, Artificial Sequence
  Synthetic oligonucleotide
cgtagaaaatgggcgcatcggtgctgcggt

SEQ ID NO: 39885 - DNA, 31 bp, Artificial Sequence
  Synthetic oligonucleotide
agaaccggggggaaggccagtaaatttcggt

SEQ ID NO: 39886 - DNA, 30 bp, Artificial Sequence
  Synthetic oligonucleotide
ctgaagggagactatacaagaagaaagggt

SEQ ID NO: 39887 - DNA, 30 bp, Artificial Sequence
  Synthetic oligonucleotide
cggtgaaggatactctaaaaggaacagggt

SEQ ID NO: 39888 - DNA, 30 bp, Artificial Sequence
  Synthetic oligonucleotide
gactaaggcaaacgaactgctgaaacgggt

SEQ ID NO: 39889 - DNA, 30 bp, Artificial Sequence
  Synthetic oligonucleotide
acggaacgatgagaaattttgtaggcgggt

SEQ ID NO: 39890 - DNA, 30 bp, Artificial Sequence
  Synthetic oligonucleotide
tgggaaaggctaatagtacaagaacggggt

SEQ ID NO: 39891 - DNA, 30 bp, Artificial Sequence
  Synthetic oligonucleotide
tgcaggcggatgattatatacggattgggt

SEQ ID NO: 39892 - DNA, 30 bp, Artificial Sequence
  Synthetic oligonucleotide
tcgtttgctacgaacgtacaggatgatggt

SEQ ID NO: 39893 - DNA, 30 bp, Artificial Sequence
  Synthetic oligonucleotide
tcacgagcagcacaagccatggatactggt

SEQ ID NO: 39894 - DNA, 30 bp, Artificial Sequence
  Synthetic oligonucleotide
cacgtattgccgatctatgttgtcagtggt

SEQ ID NO: 39895 - DNA, 30 bp, Artificial Sequence
  Synthetic oligonucleotide
ggctggtcatggctaattaagcggaaatgt

SEQ ID NO: 39896 - DNA, 30 bp, Artificial Sequence
  Synthetic oligonucleotide
gggctcgacggaaccatgaagatacaatgt

SEQ ID NO: 39897 - DNA, 30 bp, Artificial Sequence
  Synthetic oligonucleotide
aaccggaccggctaggcaacacacgaatgt

SEQ ID NO: 39898 - DNA, 30 bp, Artificial Sequence
  Synthetic oligonucleotide
tcgttaatccaatgtatttcgagtgcatgt

SEQ ID NO: 39899 - DNA, 30 bp, Artificial Sequence
  Synthetic oligonucleotide
tagcgaggaaggaacaaggggtccagatgt

SEQ ID NO: 39900 - DNA, 30 bp, Artificial Sequence
  Synthetic oligonucleotide
cgtgatatagaaaggtgccaggcgcgatgt

SEQ ID NO: 39901 - DNA, 30 bp, Artificial Sequence
  Synthetic oligonucleotide
agacaaatgtatccattaggttgcggatgt

SEQ ID NO: 39902 - DNA, 30 bp, Artificial Sequence
  Synthetic oligonucleotide
aaatcggggagtgaggatgggaatctatgt

SEQ ID NO: 39903 - DNA, 30 bp, Artificial Sequence
  Synthetic oligonucleotide
aacggatcagggcgtaaataagttctatgt

SEQ ID NO: 39904 - DNA, 30 bp, Artificial Sequence
  Synthetic oligonucleotide
tggaggcaatgaagaagacatcaatactgt

SEQ ID NO: 39905 - DNA, 30 bp, Artificial Sequence
  Synthetic oligonucleotide
gcgtagatgctcccagaagacgggtactgt

SEQ ID NO: 39906 - DNA, 30 bp, Artificial Sequence
  Synthetic oligonucleotide
caatgggtcaaagtctaacagcgatcctgt

SEQ ID NO: 39907 - DNA, 30 bp, Artificial Sequence
  Synthetic oligonucleotide
actagataggtgtgacaggctaagctctgt

SEQ ID NO: 39908 - DNA, 30 bp, Artificial Sequence
  Synthetic oligonucleotide
aagggtcggcacaacgcacaggtcaagtgt

SEQ ID NO: 39909 - DNA, 30 bp, Artificial Sequence
  Synthetic oligonucleotide
tgggctaattgtacgggaagtagggagtgt

SEQ ID NO: 39910 - DNA, 30 bp, Artificial Sequence
  Synthetic oligonucleotide
agggacgttaatcgcgtagcccacaggtgt

SEQ ID NO: 39911 - DNA, 30 bp, Artificial Sequence
  Synthetic oligonucleotide
tgaacaaacagggttagtcgtccggggtgt

SEQ ID NO: 39912 - DNA, 30 bp, Artificial Sequence
  Synthetic oligonucleotide
tcctgcgaccatcatagaacgatctggtgt

SEQ ID NO: 39913 - DNA, 30 bp, Artificial Sequence
  Synthetic oligonucleotide
aatgatcgtacgatggtaaagcggaattgt

SEQ ID NO: 39914 - DNA, 30 bp, Artificial Sequence
  Synthetic oligonucleotide
gggaagtgcgcgtaaaataggatgcattgt

SEQ ID NO: 39915 - DNA, 30 bp, Artificial Sequence
  Synthetic oligonucleotide
cacagtgaaaggacgaacaaggaaacttgt

SEQ ID NO: 39916 - DNA, 30 bp, Artificial Sequence
  Synthetic oligonucleotide
ggagtatcaactagtgtacagctcgaaatt

SEQ ID NO: 39917 - DNA, 30 bp, Artificial Sequence
  Synthetic oligonucleotide
ggatgcgacacgttggaaaacggatgaatt

SEQ ID NO: 39918 - DNA, 30 bp, Artificial Sequence
  Synthetic oligonucleotide
tgaggatgcatggacgcgagccaagtaatt

SEQ ID NO: 39919 - DNA, 30 bp, Artificial Sequence
  Synthetic oligonucleotide
cgatgattacggcgaatcaagaaaaacatt

SEQ ID NO: 39920 - DNA, 30 bp, Artificial Sequence
  Synthetic oligonucleotide
cgccgtacgaagtcggggcataacaacatt

SEQ ID NO: 39921 - DNA, 30 bp, Artificial Sequence
  Synthetic oligonucleotide
gcgggtcaacctgaaaggaagtgacacatt

SEQ ID NO: 39922 - DNA, 30 bp, Artificial Sequence
  Synthetic oligonucleotide
caagaaccggtgtaaagatgaagtcacatt

SEQ ID NO: 39923 - DNA, 30 bp, Artificial Sequence
  Synthetic oligonucleotide
caaggcgtagggaaagtggatgctgacatt

SEQ ID NO: 39924 - DNA, 30 bp, Artificial Sequence
  Synthetic oligonucleotide
ctgtgaaggcacccggaatacaggtacatt

SEQ ID NO: 39925 - DNA, 40 bp, Artificial Sequence
  Synthetic oligonucleotide
cagacttacacaaggatgtagggtcgtaatttcagccatt

SEQ ID NO: 39926 - DNA, 30 bp, Artificial Sequence
  Synthetic oligonucleotide
caacgccggttgaaagtggcatggtccatt

SEQ ID NO: 39927 - DNA, 30 bp, Artificial Sequence
  Synthetic oligonucleotide
ggtgatcaaggaggacattccgaccgcatt

SEQ ID NO: 39928 - DNA, 30 bp, Artificial Sequence
  Synthetic oligonucleotide
ggcacgatgtccaaactgtgtaaagtcatt

SEQ ID NO: 39929 - DNA, 30 bp, Artificial Sequence
  Synthetic oligonucleotide
tgtgtccgagctcaaacatagcgcaagatt

SEQ ID NO: 39930 - DNA, 30 bp, Artificial Sequence
  Synthetic oligonucleotide
acatactctaatggaaatggactatagatt

SEQ ID NO: 39931 - DNA, 30 bp, Artificial Sequence
  Synthetic oligonucleotide
cgaaaattacgaaaagcgtcggggccgatt

SEQ ID NO: 39932 - DNA, 30 bp, Artificial Sequence
  Synthetic oligonucleotide
caatggattaacaggggcatgcactcgatt

SEQ ID NO: 39933 - DNA, 30 bp, Artificial Sequence
  Synthetic oligonucleotide
ggagcttgcatcaatgggaaggagaggatt

SEQ ID NO: 39934 - DNA, 30 bp, Artificial Sequence
  Synthetic oligonucleotide
acagtggcgagaaatacgtgatgtaggatt

SEQ ID NO: 39935 - DNA, 30 bp, Artificial Sequence
  Synthetic oligonucleotide
tggtgtgcatgagaaaaacaatagcatatt

SEQ ID NO: 39936 - DNA, 30 bp, Artificial Sequence
  Synthetic oligonucleotide
agggtcctcagacaagcagggccggatatt

SEQ ID NO: 39937 - DNA, 30 bp, Artificial Sequence
  Synthetic oligonucleotide
cggtgcgaaaaggtgactgctcggtatatt

SEQ ID NO: 39938 - DNA, 30 bp, Artificial Sequence
  Synthetic oligonucleotide
acggaaagggcataacatgggcccgttatt

SEQ ID NO: 39939 - DNA, 30 bp, Artificial Sequence
  Synthetic oligonucleotide
aggacagctaagggcaacacatgtgttatt

SEQ ID NO: 39940 - DNA, 30 bp, Artificial Sequence
  Synthetic oligonucleotide
ggctaggatcgaaacaacgttatgacactt

SEQ ID NO: 39941 - DNA, 30 bp, Artificial Sequence
  Synthetic oligonucleotide
tgggaagccaattgccccaagactaacctt

SEQ ID NO: 39942 - DNA, 30 bp, Artificial Sequence
  Synthetic oligonucleotide
tcgaacggaaagaggatgtgtggcggcctt

SEQ ID NO: 39943 - DNA, 30 bp, Artificial Sequence
  Synthetic oligonucleotide
gtgcgaaggcgtaaagtagaaaaaatcctt

SEQ ID NO: 39944 - DNA, 30 bp, Artificial Sequence
  Synthetic oligonucleotide
ttgtgccactgaatcccggagtacgtgctt

SEQ ID NO: 39945 - DNA, 30 bp, Artificial Sequence
  Synthetic oligonucleotide
caccttcgaacacctaactgaatcaatctt

SEQ ID NO: 39946 - DNA, 30 bp, Artificial Sequence
  Synthetic oligonucleotide
gacgtacgagctggcgcaaattgatgtctt

SEQ ID NO: 39947 - DNA, 30 bp, Artificial Sequence
  Synthetic oligonucleotide
acagggcagagctagagaacagatattctt

SEQ ID NO: 39948 - DNA, 30 bp, Artificial Sequence
  Synthetic oligonucleotide
catgcctaaaacgagcacgttccaaaagtt

SEQ ID NO: 39949 - DNA, 30 bp, Artificial Sequence
  Synthetic oligonucleotide
aagtacagagaggcccgactaatgaaagtt

SEQ ID NO: 39950 - DNA, 30 bp, Artificial Sequence
  Synthetic oligonucleotide
gcggatcagaggcgcggaacaaaagcagtt

SEQ ID NO: 39951 - DNA, 30 bp, Artificial Sequence
  Synthetic oligonucleotide
ccaaagaaggacatgtagccagaaagagtt

SEQ ID NO: 39952 - DNA, 30 bp, Artificial Sequence
  Synthetic oligonucleotide
gcctgaagacatcaaacagatcggcgagtt

SEQ ID NO: 39953 - DNA, 30 bp, Artificial Sequence
  Synthetic oligonucleotide
gggtacgtacacattggtaaatggcgagtt

SEQ ID NO: 39954 - DNA, 30 bp, Artificial Sequence
  Synthetic oligonucleotide
cgaccacacagcatacagaaacgattagtt

SEQ ID NO: 39955 - DNA, 30 bp, Artificial Sequence
  Synthetic oligonucleotide
cgaaaacgcaacaggacagcgcgtgacgtt

SEQ ID NO: 39956 - DNA, 30 bp, Artificial Sequence
  Synthetic oligonucleotide
ccacaggccgggagtagagatgttgacgtt

SEQ ID NO: 39957 - DNA, 30 bp, Artificial Sequence
  Synthetic oligonucleotide
cgccacacatcatatctgaaatgccccgtt

SEQ ID NO: 39958 - DNA, 30 bp, Artificial Sequence
  Synthetic oligonucleotide
cgtaaccagagtgagagtggagaatgcgtt

SEQ ID NO: 39959 - DNA, 30 bp, Artificial Sequence
  Synthetic oligonucleotide
acgatagcaccgggagccggcgtcgaggtt

SEQ ID NO: 39960 - DNA, 30 bp, Artificial Sequence
  Synthetic oligonucleotide
ccacagtaagaacacacactaccataggtt

SEQ ID NO: 39961 - DNA, 30 bp, Artificial Sequence
  Synthetic oligonucleotide
cggaatcgcagattgacacatgaaccggtt

SEQ ID NO: 39962 - DNA, 30 bp, Artificial Sequence
  Synthetic oligonucleotide
atccgtaagcgcgaacagtcaggaagggtt

SEQ ID NO: 39963 - DNA, 30 bp, Artificial Sequence
  Synthetic oligonucleotide
ggcaacatacttgttaagagtgcgtgggtt

SEQ ID NO: 39964 - DNA, 30 bp, Artificial Sequence
  Synthetic oligonucleotide
agtaacgtaacaggaggaacgagcctggtt

SEQ ID NO: 39965 - DNA, 30 bp, Artificial Sequence
  Synthetic oligonucleotide
gaacaggcatagaatgcgcatagcaatgtt

SEQ ID NO: 39966 - DNA, 30 bp, Artificial Sequence
  Synthetic oligonucleotide
acgacagaacaacccattgaggaaaaattt

SEQ ID NO: 39967 - DNA, 30 bp, Artificial Sequence
  Synthetic oligonucleotide
gaagggctggataaaactgagcttaaattt

SEQ ID NO: 39968 - DNA, 30 bp, Artificial Sequence
  Synthetic oligonucleotide
ggtgcgctaaccatgtcatgagaaacattt

SEQ ID NO: 39969 - DNA, 30 bp, Artificial Sequence
  Synthetic oligonucleotide
gaaggtgtcccggatatagtaatcacattt

SEQ ID NO: 39970 - DNA, 30 bp, Artificial Sequence
  Synthetic oligonucleotide
tgtgccaaatacagtaacacattcccattt

SEQ ID NO: 39971 - DNA, 30 bp, Artificial Sequence
  Synthetic oligonucleotide
agggtggtcaacagagctaaagtttgattt

SEQ ID NO: 39972 - DNA, 30 bp, Artificial Sequence
  Synthetic oligonucleotide
gggtgcggaggtaagtcagactcgatcttt

SEQ ID NO: 39973 - DNA, 30 bp, Artificial Sequence
  Synthetic oligonucleotide
cgcgctggtgacgacataaagtgaacgttt

SEQ ID NO: 39974 - DNA, 30 bp, Artificial Sequence
  Synthetic oligonucleotide
atggtgcatcatacatagggagtacggttt

SEQ ID NO: 39975 - DNA, 30 bp, Artificial Sequence
  Synthetic oligonucleotide
tgcaggccccaaaaaggagacattgtgttt

SEQ ID NO: 39976 - DNA, 30 bp, Artificial Sequence
  Synthetic oligonucleotide
caggacaagggataaatttaggacgatttt

SEQ ID NO: 39977 - DNA, 30 bp, Artificial Sequence
  Synthetic oligonucleotide
ctagcgtcgtagctaccaaagaaagaaaaa

SEQ ID NO: 39978 - DNA, 30 bp, Artificial Sequence
  Synthetic oligonucleotide
caccgtgtgcccatcaagacttaggaaaaa

SEQ ID NO: 39979 - DNA, 30 bp, Artificial Sequence
  Synthetic oligonucleotide
ggtgtgcctcgagttagaactagctaaaaa

SEQ ID NO: 39980 - DNA, 30 bp, Artificial Sequence
  Synthetic oligonucleotide
acctccgggagaggggcgagcccgtaaaaa

SEQ ID NO: 39981 - DNA, 30 bp, Artificial Sequence
  Synthetic oligonucleotide
gaagtagtgaaactgattcatctctcaaaa

SEQ ID NO: 39982 - DNA, 30 bp, Artificial Sequence
  Synthetic oligonucleotide
aagttgaggtctgggagttacgaaagaaaa

SEQ ID NO: 39983 - DNA, 30 bp, Artificial Sequence
  Synthetic oligonucleotide
gtaggtatacagaccagtcaggccagaaaa

SEQ ID NO: 39984 - DNA, 30 bp, Artificial Sequence
  Synthetic oligonucleotide
tacgaccggctaaggaataggactagaaaa

SEQ ID NO: 39985 - DNA, 30 bp, Artificial Sequence
  Synthetic oligonucleotide
ggataacggtaacggagtgcaggtagaaaa

SEQ ID NO: 39986 - DNA, 30 bp, Artificial Sequence
  Synthetic oligonucleotide
gctgcaggtaagaaggttgtgcggggaaaa

SEQ ID NO: 39987 - DNA, 30 bp, Artificial Sequence
  Synthetic oligonucleotide
tcgaggtagacgatatctgccgttctaaaa

SEQ ID NO: 39988 - DNA, 30 bp, Artificial Sequence
  Synthetic oligonucleotide
gatacgaggctgtggcgcactgacgtaaaa

SEQ ID NO: 39989 - DNA, 31 bp, Artificial Sequence
  Synthetic oligonucleotide
gacaaaggtgcaaatagggagaagggtaaaa

SEQ ID NO: 39990 - DNA, 30 bp, Artificial Sequence
  Synthetic oligonucleotide
cgtttatacgaagacctcctaacaaacaaa

SEQ ID NO: 39991 - DNA, 30 bp, Artificial Sequence
  Synthetic oligonucleotide
ctggaaaatatcgggttgaagtacaacaaa

SEQ ID NO: 39992 - DNA, 30 bp, Artificial Sequence
  Synthetic oligonucleotide
aagccgacgattgcggacaagagcaccaaa

SEQ ID NO: 39993 - DNA, 30 bp, Artificial Sequence
  Synthetic oligonucleotide
ctctcaggatagctataaagcagtgccaaa

SEQ ID NO: 39994 - DNA, 30 bp, Artificial Sequence
  Synthetic oligonucleotide
aacgagtggcatgcaggtcgaagctccaaa

SEQ ID NO: 39995 - DNA, 30 bp, Artificial Sequence
  Synthetic oligonucleotide
gtaccgaacaggtacccccgtcgaagcaaa

SEQ ID NO: 39996 - DNA, 30 bp, Artificial Sequence
  Synthetic oligonucleotide
gagagaacgaacctctagggaacatgcaaa

SEQ ID NO: 39997 - DNA, 30 bp, Artificial Sequence
  Synthetic oligonucleotide
cataagtgcctagagggctgaattctcaaa

SEQ ID NO: 39998 - DNA, 30 bp, Artificial Sequence
  Synthetic oligonucleotide
gactaagtggaagggggaagggaagtcaaa

SEQ ID NO: 39999 - DNA, 30 bp, Artificial Sequence
  Synthetic oligonucleotide
taagaggactgtaagcgtgatactttcaaa

SEQ ID NO: 40000 - DNA, 30 bp, Artificial Sequence
  Synthetic oligonucleotide
cgggaggggcggggcgagggtaccaagaaa

SEQ ID NO: 40001 - DNA, 30 bp, Artificial Sequence
  Synthetic oligonucleotide
tcagctaggcttagctgtgatgcgaagaaa

SEQ ID NO: 40002 - DNA, 30 bp, Artificial Sequence
  Synthetic oligonucleotide
gggggggcactcgagccagaatgacagaaa

SEQ ID NO: 40003 - DNA, 30 bp, Artificial Sequence
  Synthetic oligonucleotide
gaaggggaaaaactctggcctctctagaaa

SEQ ID NO: 40004 - DNA, 30 bp, Artificial Sequence
  Synthetic oligonucleotide
cgaaggacgaggttgaggcccacgtagaaa

SEQ ID NO: 40005 - DNA, 30 bp, Artificial Sequence
  Synthetic oligonucleotide
accacgtgagcaaggatattaatgtagaaa

SEQ ID NO: 40006 - DNA, 30 bp, Artificial Sequence
  Synthetic oligonucleotide
tagcattgcggactaggagaccacacgaaa

SEQ ID NO: 40007 - DNA, 30 bp, Artificial Sequence
  Synthetic oligonucleotide
aacaaagtggaaatatcagggagtacgaaa

SEQ ID NO: 40008 - DNA, 30 bp, Artificial Sequence
  Synthetic oligonucleotide
tagggtctctatgaataagggcactcgaaa

SEQ ID NO: 40009 - DNA, 30 bp, Artificial Sequence
  Synthetic oligonucleotide
agtacatcacatatactagggtagcggaaa

SEQ ID NO: 40010 - DNA, 30 bp, Artificial Sequence
  Synthetic oligonucleotide
gtgacagtgggtgaattgcacgttcggaaa

SEQ ID NO: 40011 - DNA, 30 bp, Artificial Sequence
  Synthetic oligonucleotide
atgagctggtgggttcatgtacaggggaaa

SEQ ID NO: 40012 - DNA, 30 bp, Artificial Sequence
  Synthetic oligonucleotide
agcaagccctgcaagtacaaaggtgggaaa

SEQ ID NO: 40013 - DNA, 30 bp, Artificial Sequence
  Synthetic oligonucleotide
attagcccattgcgcgaatcgagttggaaa

SEQ ID NO: 40014 - DNA, 30 bp, Artificial Sequence
  Synthetic oligonucleotide
tggactaggggccgaacaagtctagtgaaa

SEQ ID NO: 40015 - DNA, 30 bp, Artificial Sequence
  Synthetic oligonucleotide
ccgccgtcgatccgtaatcagttgttgaaa

SEQ ID NO: 40016 - DNA, 30 bp, Artificial Sequence
  Synthetic oligonucleotide
gacgctcagaaccgatagagccgtaataaa

SEQ ID NO: 40017 - DNA, 30 bp, Artificial Sequence
  Synthetic oligonucleotide
tcgtcatatgaatagagacatcatcataaa

SEQ ID NO: 40018 - DNA, 30 bp, Artificial Sequence
  Synthetic oligonucleotide
agactaggcacaggcatcgcactagataaa

SEQ ID NO: 40019 - DNA, 30 bp, Artificial Sequence
  Synthetic oligonucleotide
atatgtcaggtcataacagcgtgggataaa

SEQ ID NO: 40020 - DNA, 30 bp, Artificial Sequence
  Synthetic oligonucleotide
acgtcatctagtggaatgatcggttataaa

SEQ ID NO: 40021 - DNA, 30 bp, Artificial Sequence
  Synthetic oligonucleotide
aaggatgacgccaaagaagcatcacctaaa

SEQ ID NO: 40022 - DNA, 30 bp, Artificial Sequence
  Synthetic oligonucleotide
aagcgggaacagagtcctaaagacagtaaa

SEQ ID NO: 40023 - DNA, 30 bp, Artificial Sequence
  Synthetic oligonucleotide
gagcactctggtgctagaaataagcgtaaa

SEQ ID NO: 40024 - DNA, 30 bp, Artificial Sequence
  Synthetic oligonucleotide
cggagaagacgaccagataaagggcgtaaa

SEQ ID NO: 40025 - DNA, 30 bp, Artificial Sequence
  Synthetic oligonucleotide
tggccgggaaacgtggaggtcacagttaaa

SEQ ID NO: 40026 - DNA, 30 bp, Artificial Sequence
  Synthetic oligonucleotide
tagggtccgtacgacatgcgaggcaaacaa

SEQ ID NO: 40027 - DNA, 30 bp, Artificial Sequence
  Synthetic oligonucleotide
tggggagtgtgcgttaaggacgcgaaacaa

SEQ ID NO: 40028 - DNA, 30 bp, Artificial Sequence
  Synthetic oligonucleotide
aggtagcataccgtcaacgatcgcgaacaa

SEQ ID NO: 40029 - DNA, 30 bp, Artificial Sequence
  Synthetic oligonucleotide
tggtgaagccctgaagtggacgttacacaa

SEQ ID NO: 40030 - DNA, 30 bp, Artificial Sequence
  Synthetic oligonucleotide
acaaaaactcgggaaagcatcgaatcacaa

SEQ ID NO: 40031 - DNA, 30 bp, Artificial Sequence
  Synthetic oligonucleotide
cccgacgcctaagaaaatgagcagtcacaa

SEQ ID NO: 40032 - DNA, 30 bp, Artificial Sequence
  Synthetic oligonucleotide
tagcgttggatacaggcgcgagcaagacaa

SEQ ID NO: 40033 - DNA, 30 bp, Artificial Sequence
  Synthetic oligonucleotide
aagcaagaggactaccgtgcatgcagacaa

SEQ ID NO: 40034 - DNA, 30 bp, Artificial Sequence
  Synthetic oligonucleotide
ctgagacaatgaaagactccgccccgacaa

SEQ ID NO: 40035 - DNA, 30 bp, Artificial Sequence
  Synthetic oligonucleotide
aacgaacgccagaatcgcacctaaggacaa

SEQ ID NO: 40036 - DNA, 30 bp, Artificial Sequence
  Synthetic oligonucleotide
aggtaggatcgcggagatcacgaaatacaa

SEQ ID NO: 40037 - DNA, 30 bp, Artificial Sequence
  Synthetic oligonucleotide
aaggctggggagggacatcgcttagtacaa

SEQ ID NO: 40038 - DNA, 30 bp, Artificial Sequence
  Synthetic oligonucleotide
cgatggaagtatccagtacaccgcgtacaa

SEQ ID NO: 40039 - DNA, 30 bp, Artificial Sequence
  Synthetic oligonucleotide
acactggacccagaggatgttgccttacaa

SEQ ID NO: 40040 - DNA, 30 bp, Artificial Sequence
  Synthetic oligonucleotide
agggatgctaggtaacagattactttacaa

SEQ ID NO: 40041 - DNA, 30 bp, Artificial Sequence
  Synthetic oligonucleotide
tagcgcaccagcgcatctggaagtttacaa

SEQ ID NO: 40042 - DNA, 30 bp, Artificial Sequence
  Synthetic oligonucleotide
ccatcgacgtgtgtgaagctgaagaaccaa

SEQ ID NO: 40043 - DNA, 30 bp, Artificial Sequence
  Synthetic oligonucleotide
aggtataacgcgacatacgacccgaaccaa

SEQ ID NO: 40044 - DNA, 30 bp, Artificial Sequence
  Synthetic oligonucleotide
gacgataaccttcactttattgcgaaccaa

SEQ ID NO: 40045 - DNA, 30 bp, Artificial Sequence
  Synthetic oligonucleotide
tctagaaccaccaggcgggatagctaccaa

SEQ ID NO: 40046 - DNA, 30 bp, Artificial Sequence
  Synthetic oligonucleotide
ctacgataaaaggaatattctcccgcccaa

SEQ ID NO: 40047 - DNA, 30 bp, Artificial Sequence
  Synthetic oligonucleotide
accagtagcactcaggacaaccgggcccaa

SEQ ID NO: 40048 - DNA, 30 bp, Artificial Sequence
  Synthetic oligonucleotide
aggtgcacagataccggtgtagattcccaa

SEQ ID NO: 40049 - DNA, 30 bp, Artificial Sequence
  Synthetic oligonucleotide
ttacaaccggtaaaatgcaaaactagccaa

SEQ ID NO: 40050 - DNA, 30 bp, Artificial Sequence
  Synthetic oligonucleotide
tggtacgaactatcgacatgcgcactccaa

SEQ ID NO: 40051 - DNA, 30 bp, Artificial Sequence
  Synthetic oligonucleotide
tgatacaaacaagtcgaatgagttctccaa

SEQ ID NO: 40052 - DNA, 30 bp, Artificial Sequence
  Synthetic oligonucleotide
agcaggaagcgtaatagaaggggaaagcaa

SEQ ID NO: 40053 - DNA, 30 bp, Artificial Sequence
  Synthetic oligonucleotide
gtaagaggtgggggccagctagaacagcaa

SEQ ID NO: 40054 - DNA, 30 bp, Artificial Sequence
  Synthetic oligonucleotide
agccaagttcggatatgctcagtggagcaa

SEQ ID NO: 40055 - DNA, 30 bp, Artificial Sequence
  Synthetic oligonucleotide
aggagcctaagcgcccaaagctgctagcaa

SEQ ID NO: 40056 - DNA, 30 bp, Artificial Sequence
  Synthetic oligonucleotide
atatcaactaatacctggaacactgcgcaa

SEQ ID NO: 40057 - DNA, 30 bp, Artificial Sequence
  Synthetic oligonucleotide
aacagtttaagcgaagttggggggaggcaa

SEQ ID NO: 40058 - DNA, 30 bp, Artificial Sequence
  Synthetic oligonucleotide
aagaaaaagaggtgaagcttcctgcggcaa

SEQ ID NO: 40059 - DNA, 30 bp, Artificial Sequence
  Synthetic oligonucleotide
tggatagcaaagaaacacgtttgcgggcaa

SEQ ID NO: 40060 - DNA, 30 bp, Artificial Sequence
  Synthetic oligonucleotide
acactcctattgtcaaagaagatcgggcaa

SEQ ID NO: 40061 - DNA, 30 bp, Artificial Sequence
  Synthetic oligonucleotide
tcactgtattagcacgaagacccatggcaa

SEQ ID NO: 40062 - DNA, 30 bp, Artificial Sequence
  Synthetic oligonucleotide
agtcccactaattagcacttacagctgcaa

SEQ ID NO: 40063 - DNA, 30 bp, Artificial Sequence
  Synthetic oligonucleotide
cgaggttgcaggctgagtcctcgtttgcaa

SEQ ID NO: 40064 - DNA, 30 bp, Artificial Sequence
  Synthetic oligonucleotide
tatgcgcaagcaggccgggggttacatcaa

SEQ ID NO: 40065 - DNA, 30 bp, Artificial Sequence
  Synthetic oligonucleotide
acagacgaagacgagtgtatagtcgatcaa

SEQ ID NO: 40066 - DNA, 30 bp, Artificial Sequence
  Synthetic oligonucleotide
ataacggagagccgaatgctaccatatcaa

SEQ ID NO: 40067 - DNA, 30 bp, Artificial Sequence
  Synthetic oligonucleotide
ccgaaaaccaagaagattaatccatatcaa

SEQ ID NO: 40068 - DNA, 30 bp, Artificial Sequence
  Synthetic oligonucleotide
taaagaaaaaagtgaccgggagtatatcaa

SEQ ID NO: 40069 - DNA, 30 bp, Artificial Sequence
  Synthetic oligonucleotide
ataccgctaccgagacacattaactatcaa

SEQ ID NO: 40070 - DNA, 30 bp, Artificial Sequence
  Synthetic oligonucleotide
gtaaagtaaagctgtgcgggtacgactcaa

SEQ ID NO: 40071 - DNA, 30 bp, Artificial Sequence
  Synthetic oligonucleotide
ccaggacgccgtcatgcaagggtatctcaa

SEQ ID NO: 40072 - DNA, 30 bp, Artificial Sequence
  Synthetic oligonucleotide
gcgacatgatatgtcgtgagtgtcggtcaa

SEQ ID NO: 40073 - DNA, 30 bp, Artificial Sequence
  Synthetic oligonucleotide
caggataataaaggatgagatgtatgtcaa

SEQ ID NO: 40074 - DNA, 30 bp, Artificial Sequence
  Synthetic oligonucleotide
tggcacgtctaaagggcgagcaacattcaa

SEQ ID NO: 40075 - DNA, 30 bp, Artificial Sequence
  Synthetic oligonucleotide
cgtcgaaaggaatgcatcttaacaaaagaa

SEQ ID NO: 40076 - DNA, 30 bp, Artificial Sequence
  Synthetic oligonucleotide
acgcatggggtcggctatgcaaccaaagaa

SEQ ID NO: 40077 - DNA, 30 bp, Artificial Sequence
  Synthetic oligonucleotide
agcgatacaagaccgcctaaaggacaagaa

SEQ ID NO: 40078 - DNA, 30 bp, Artificial Sequence
  Synthetic oligonucleotide
taggcggcgtgcacaccacggctcgaagaa

SEQ ID NO: 40079 - DNA, 30 bp, Artificial Sequence
  Synthetic oligonucleotide
gcgcgtcgaacggtaaggaaaaaataagaa

SEQ ID NO: 40080 - DNA, 30 bp, Artificial Sequence
  Synthetic oligonucleotide
taggtcaggacggcggtgaaaacctaagaa

SEQ ID NO: 40081 - DNA, 30 bp, Artificial Sequence
  Synthetic oligonucleotide
tcgacttaatcattggggacttcgtaagaa

SEQ ID NO: 40082 - DNA, 30 bp, Artificial Sequence
  Synthetic oligonucleotide
taaacgatcaaagaactggcgaggtaagaa

SEQ ID NO: 40083 - DNA, 30 bp, Artificial Sequence
  Synthetic oligonucleotide
aagaacatacggaccgcaacctacacagaa

SEQ ID NO: 40084 - DNA, 30 bp, Artificial Sequence
  Synthetic oligonucleotide
agcgaattttgactttgagtagagacagaa

SEQ ID NO: 40085 - DNA, 30 bp, Artificial Sequence
  Synthetic oligonucleotide
atgacaagagggattcatttatctacagaa

SEQ ID NO: 40086 - DNA, 30 bp, Artificial Sequence
  Synthetic oligonucleotide
tacggacagttactatgatttggtacagaa

SEQ ID NO: 40087 - DNA, 30 bp, Artificial Sequence
  Synthetic oligonucleotide
ccacaatctgggaagtacgtcataccagaa

SEQ ID NO: 40088 - DNA, 30 bp, Artificial Sequence
  Synthetic oligonucleotide
ttagaaggacatagtcggtggagaagagaa

SEQ ID NO: 40089 - DNA, 30 bp, Artificial Sequence
  Synthetic oligonucleotide
cgactaaagacatcgaaggggtatagagaa

SEQ ID NO: 40090 - DNA, 30 bp, Artificial Sequence
  Synthetic oligonucleotide
ggaataagcgatgagtgatacgcaggagaa

SEQ ID NO: 40091 - DNA, 30 bp, Artificial Sequence
  Synthetic oligonucleotide
taaaatcgggaccagctccatgcgtgagaa

SEQ ID NO: 40092 - DNA, 30 bp, Artificial Sequence
  Synthetic oligonucleotide
cacgccgcgaacttccccagataactagaa

SEQ ID NO: 40093 - DNA, 30 bp, Artificial Sequence
  Synthetic oligonucleotide
gggggagctttaggaaacaggtacctagaa

SEQ ID NO: 40094 - DNA, 30 bp, Artificial Sequence
  Synthetic oligonucleotide
ggtctggactcgtaagaacttgtgctagaa

SEQ ID NO: 40095 - DNA, 30 bp, Artificial Sequence
  Synthetic oligonucleotide
aggtcatcccgtagtgtaatgagtctagaa

SEQ ID NO: 40096 - DNA, 30 bp, Artificial Sequence
  Synthetic oligonucleotide
aagacgcaccccggaaaatgatgggtagaa

SEQ ID NO: 40097 - DNA, 30 bp, Artificial Sequence
  Synthetic oligonucleotide
gaaaccggtatgtgcgaaaacgcgaacgaa

SEQ ID NO: 40098 - DNA, 30 bp, Artificial Sequence
  Synthetic oligonucleotide
cgctagttaatggataagcaaacccacgaa

SEQ ID NO: 40099 - DNA, 30 bp, Artificial Sequence
  Synthetic oligonucleotide
ttggtacaggcaaggcaactgattgacgaa

SEQ ID NO: 40100 - DNA, 30 bp, Artificial Sequence
  Synthetic oligonucleotide
tgaaacgggaggggaaaccgacgatacgaa

SEQ ID NO: 40101 - DNA, 30 bp, Artificial Sequence
  Synthetic oligonucleotide
gcgtgaaactaactttaggctccgtacgaa

SEQ ID NO: 40102 - DNA, 30 bp, Artificial Sequence
  Synthetic oligonucleotide
tagcacaagagtggcgtatgtatgaccgaa

SEQ ID NO: 40103 - DNA, 30 bp, Artificial Sequence
  Synthetic oligonucleotide
acgcttcgacacccgtgagctgcacccgaa

SEQ ID NO: 40104 - DNA, 30 bp, Artificial Sequence
  Synthetic oligonucleotide
ccagtgtaggcctgaaatactcgtcccgaa

SEQ ID NO: 40105 - DNA, 30 bp, Artificial Sequence
  Synthetic oligonucleotide
tcaacacattgattgaggacatcagccgaa

SEQ ID NO: 40106 - DNA, 30 bp, Artificial Sequence
  Synthetic oligonucleotide
cctggatcctatccggaaaaattagccgaa

SEQ ID NO: 40107 - DNA, 30 bp, Artificial Sequence
  Synthetic oligonucleotide
aatgaacaggactaaagctcagtgcgcgaa

SEQ ID NO: 40108 - DNA, 30 bp, Artificial Sequence
  Synthetic oligonucleotide
acttgagaacaaatacaagagggtcgcgaa

SEQ ID NO: 40109 - DNA, 30 bp, Artificial Sequence
  Synthetic oligonucleotide
taaggaggaacgggagcttctcaaggcgaa

SEQ ID NO: 40110 - DNA, 30 bp, Artificial Sequence
  Synthetic oligonucleotide
aattagttgttggttgaagaaaagggcgaa

SEQ ID NO: 40111 - DNA, 30 bp, Artificial Sequence
  Synthetic oligonucleotide
tcacatgaagatggcgtaccggagtgcgaa

SEQ ID NO: 40112 - DNA, 30 bp, Artificial Sequence
  Synthetic oligonucleotide
gaagcaaaccctccgaaggtaaacatcgaa

SEQ ID NO: 40113 - DNA, 30 bp, Artificial Sequence
  Synthetic oligonucleotide
atcggtgcaacgggtggcagaccattcgaa

SEQ ID NO: 40114 - DNA, 30 bp, Artificial Sequence
  Synthetic oligonucleotide
tgtgaagacccaagggtgtaaccaaaggaa

SEQ ID NO: 40115 - DNA, 30 bp, Artificial Sequence
  Synthetic oligonucleotide
ggcataagctatctaggggccaacaaggaa

SEQ ID NO: 40116 - DNA, 30 bp, Artificial Sequence
  Synthetic oligonucleotide
aatgtaaatctcagaaagtttaagtaggaa

SEQ ID NO: 40117 - DNA, 30 bp, Artificial Sequence
  Synthetic oligonucleotide
caagacatgaagattaatgacgtaccggaa

SEQ ID NO: 40118 - DNA, 30 bp, Artificial Sequence
  Synthetic oligonucleotide
gataagagatataagatgtagaacagggaa

SEQ ID NO: 40119 - DNA, 30 bp, Artificial Sequence
  Synthetic oligonucleotide
ctaggacagggcatccgagttagtagggaa

SEQ ID NO: 40120 - DNA, 30 bp, Artificial Sequence
  Synthetic oligonucleotide
ccatctttaaacagaggagatctacgggaa

SEQ ID NO: 40121 - DNA, 30 bp, Artificial Sequence
  Synthetic oligonucleotide
gccagtaggtgaccgctcaacataggggaa

SEQ ID NO: 40122 - DNA, 30 bp, Artificial Sequence
  Synthetic oligonucleotide
caagagggtatagcttggatccagggggaa

SEQ ID NO: 40123 - DNA, 30 bp, Artificial Sequence
  Synthetic oligonucleotide
ctgaggagtatgaattgcacttgaatggaa

SEQ ID NO: 40124 - DNA, 30 bp, Artificial Sequence
  Synthetic oligonucleotide
tcaacagctgggataagagtccctatggaa

SEQ ID NO: 40125 - DNA, 30 bp, Artificial Sequence
  Synthetic oligonucleotide
aagggggtcactcctacgagctaactggaa

SEQ ID NO: 40126 - DNA, 30 bp, Artificial Sequence
  Synthetic oligonucleotide
gccatgcgaggtggtcgccgtagactggaa

SEQ ID NO: 40127 - DNA, 30 bp, Artificial Sequence
  Synthetic oligonucleotide
acgtgctaacaggggcacgatatcgtggaa

SEQ ID NO: 40128 - DNA, 30 bp, Artificial Sequence
  Synthetic oligonucleotide
cagattcaggagataggtggcgtccatgaa

SEQ ID NO: 40129 - DNA, 30 bp, Artificial Sequence
  Synthetic oligonucleotide
tcttaacagagggccatattcgcttatgaa

SEQ ID NO: 40130 - DNA, 30 bp, Artificial Sequence
  Synthetic oligonucleotide
agagtagtgggcgacaggatggccactgaa

SEQ ID NO: 40131 - DNA, 30 bp, Artificial Sequence
  Synthetic oligonucleotide
gaacccgaaagcaacattgcgcaggctgaa

SEQ ID NO: 40132 - DNA, 30 bp, Artificial Sequence
  Synthetic oligonucleotide
ccgcgccctaatcaaggaagtgatgctgaa

SEQ ID NO: 40133 - DNA, 30 bp, Artificial Sequence
  Synthetic oligonucleotide
agcggataaagtacaaggtggaggtctgaa

SEQ ID NO: 40134 - DNA, 30 bp, Artificial Sequence
  Synthetic oligonucleotide
acggaccacgtccgatgaatcagttctgaa

SEQ ID NO: 40135 - DNA, 30 bp, Artificial Sequence
  Synthetic oligonucleotide
ttcgtgaagaggagactggtcaacagtgaa

SEQ ID NO: 40136 - DNA, 30 bp, Artificial Sequence
  Synthetic oligonucleotide
aaggtcggccggcgtaatggtcccagtgaa

SEQ ID NO: 40137 - DNA, 30 bp, Artificial Sequence
  Synthetic oligonucleotide
cctggaaagtgcatgactgcattcattgaa

SEQ ID NO: 40138 - DNA, 30 bp, Artificial Sequence
  Synthetic oligonucleotide
tgcaggatgaagctaatgaaactccttgaa

SEQ ID NO: 40139 - DNA, 30 bp, Artificial Sequence
  Synthetic oligonucleotide
aagttactgtcgagaagaacccgagttgaa

SEQ ID NO: 40140 - DNA, 30 bp, Artificial Sequence
  Synthetic oligonucleotide
cagtcgggggccgaaatgcaggatgttgaa

SEQ ID NO: 40141 - DNA, 30 bp, Artificial Sequence
  Synthetic oligonucleotide
agaagcgaaagcacgataacagctgttgaa

SEQ ID NO: 40142 - DNA, 30 bp, Artificial Sequence
  Synthetic oligonucleotide
gagcgaagtgccactggtctcgataaataa

SEQ ID NO: 40143 - DNA, 30 bp, Artificial Sequence
  Synthetic oligonucleotide
acaggggggaggagtttatcgtcccaataa

SEQ ID NO: 40144 - DNA, 30 bp, Artificial Sequence
  Synthetic oligonucleotide
taactatgggagaacatcctgtcggaataa

SEQ ID NO: 40145 - DNA, 30 bp, Artificial Sequence
  Synthetic oligonucleotide
agtgagatgtcagtcacaggggtggaataa

SEQ ID NO: 40146 - DNA, 30 bp, Artificial Sequence
  Synthetic oligonucleotide
acgtaggggcagtcggggttggtggaataa

SEQ ID NO: 40147 - DNA, 30 bp, Artificial Sequence
  Synthetic oligonucleotide
acgtagcgatctaaaaaagagaattaataa

SEQ ID NO: 40148 - DNA, 30 bp, Artificial Sequence
  Synthetic oligonucleotide
tgagccgtacagaaagcatcatccacataa

SEQ ID NO: 40149 - DNA, 30 bp, Artificial Sequence
  Synthetic oligonucleotide
agtgcacgcggaagcccagggaggccataa

SEQ ID NO: 40150 - DNA, 30 bp, Artificial Sequence
  Synthetic oligonucleotide
ctaagggtggcgcggaatcggagggcataa

SEQ ID NO: 40151 - DNA, 30 bp, Artificial Sequence
  Synthetic oligonucleotide
aaccacgagatgtacgggggtccatcataa

SEQ ID NO: 40152 - DNA, 30 bp, Artificial Sequence
  Synthetic oligonucleotide
gacacgtcgtcctaggtgaatctttcataa

SEQ ID NO: 40153 - DNA, 30 bp, Artificial Sequence
  Synthetic oligonucleotide
tgcaatccagtgcatggctcggaaagataa

SEQ ID NO: 40154 - DNA, 30 bp, Artificial Sequence
  Synthetic oligonucleotide
gttaaagtgggaaggataccgaggagataa

SEQ ID NO: 40155 - DNA, 30 bp, Artificial Sequence
  Synthetic oligonucleotide
agccacgtaactgccttgtcgagtcgataa

SEQ ID NO: 40156 - DNA, 30 bp, Artificial Sequence
  Synthetic oligonucleotide
gggagggaaggaacagtcattttaggataa

SEQ ID NO: 40157 - DNA, 30 bp, Artificial Sequence
  Synthetic oligonucleotide
ttaacggcaaatagatatcgtgctggataa

SEQ ID NO: 40158 - DNA, 30 bp, Artificial Sequence
  Synthetic oligonucleotide
ggatcgcggaaaaggtttgcttaagactaa

SEQ ID NO: 40159 - DNA, 30 bp, Artificial Sequence
  Synthetic oligonucleotide
ccgcgttttcagcgggagaacaaggactaa

SEQ ID NO: 40160 - DNA, 30 bp, Artificial Sequence
  Synthetic oligonucleotide
cgtgagctagcgacgtttcttgatgactaa

SEQ ID NO: 40161 - DNA, 30 bp, Artificial Sequence
  Synthetic oligonucleotide
agtcgaaagggacctgcatgtgagacctaa

SEQ ID NO: 40162 - DNA, 30 bp, Artificial Sequence
  Synthetic oligonucleotide
cggcaagataatagatttgcctctagctaa

SEQ ID NO: 40163 - DNA, 30 bp, Artificial Sequence
  Synthetic oligonucleotide
gatatggaatgagagaggtagcgtcgctaa

SEQ ID NO: 40164 - DNA, 30 bp, Artificial Sequence
  Synthetic oligonucleotide
tcgcgaccagaagatggggttgggggctaa

SEQ ID NO: 40165 - DNA, 30 bp, Artificial Sequence
  Synthetic oligonucleotide
aagaaaaatagtaaaaaatacaagtgctaa

SEQ ID NO: 40166 - DNA, 30 bp, Artificial Sequence
  Synthetic oligonucleotide
ggtgtgctatcgaaataggccagttgctaa

SEQ ID NO: 40167 - DNA, 30 bp, Artificial Sequence
  Synthetic oligonucleotide
cagaacgatcaatgcgggtcactgaagtaa

SEQ ID NO: 40168 - DNA, 30 bp, Artificial Sequence
  Synthetic oligonucleotide
acggtctactgctgtaagaaaaaagagtaa

SEQ ID NO: 40169 - DNA, 30 bp, Artificial Sequence
  Synthetic oligonucleotide
catgtggatgtagtgtagtgtagagagtaa

SEQ ID NO: 40170 - DNA, 30 bp, Artificial Sequence
  Synthetic oligonucleotide
ggccaagtgttctccccataagcaacgtaa

SEQ ID NO: 40171 - DNA, 30 bp, Artificial Sequence
  Synthetic oligonucleotide
tccaccgaaacattctagcggccttcgtaa

SEQ ID NO: 40172 - DNA, 30 bp, Artificial Sequence
  Synthetic oligonucleotide
tatgtggccagactgataaggtgaaggtaa

SEQ ID NO: 40173 - DNA, 30 bp, Artificial Sequence
  Synthetic oligonucleotide
caatgaaaacttaagtacgtaagccggtaa

SEQ ID NO: 40174 - DNA, 30 bp, Artificial Sequence
  Synthetic oligonucleotide
cgtatacgcggattggtgttattcgggtaa

SEQ ID NO: 40175 - DNA, 30 bp, Artificial Sequence
  Synthetic oligonucleotide
acgacaagaatccaatgtgtgttatggtaa

SEQ ID NO: 40176 - DNA, 30 bp, Artificial Sequence
  Synthetic oligonucleotide
gcaaaaggtaaacaatttcacggcatgtaa

SEQ ID NO: 40177 - DNA, 30 bp, Artificial Sequence
  Synthetic oligonucleotide
atgccatcccagcgagattcattcatgtaa

SEQ ID NO: 40178 - DNA, 30 bp, Artificial Sequence
  Synthetic oligonucleotide
gtggatcgcacaagaacgtggtaccattaa

SEQ ID NO: 40179 - DNA, 30 bp, Artificial Sequence
  Synthetic oligonucleotide
caagaaggtaagtgagttcatagccattaa

SEQ ID NO: 40180 - DNA, 30 bp, Artificial Sequence
  Synthetic oligonucleotide
agctaaatcgtagaaatattcactcattaa

SEQ ID NO: 40181 - DNA, 30 bp, Artificial Sequence
  Synthetic oligonucleotide
acagtaagagggacttggtctaagtattaa

SEQ ID NO: 40182 - DNA, 30 bp, Artificial Sequence
  Synthetic oligonucleotide
agggcgtaagcaatggctgtacccgcttaa

SEQ ID NO: 40183 - DNA, 30 bp, Artificial Sequence
  Synthetic oligonucleotide
agcgacaccacgaatcttccactcgcttaa

SEQ ID NO: 40184 - DNA, 30 bp, Artificial Sequence
  Synthetic oligonucleotide
gggcatgctagcaaagtgaacgagctttaa

SEQ ID NO: 40185 - DNA, 30 bp, Artificial Sequence
  Synthetic oligonucleotide
ggcggtacgagggctcgtagacagttttaa

SEQ ID NO: 40186 - DNA, 30 bp, Artificial Sequence
  Synthetic oligonucleotide
tgtaatgaagatgggtacacatagaaaaca

SEQ ID NO: 40187 - DNA, 30 bp, Artificial Sequence
  Synthetic oligonucleotide
agaggctatatggaggggcgaaaataaaca

SEQ ID NO: 40188 - DNA, 30 bp, Artificial Sequence
  Synthetic oligonucleotide
agcattggcaattatccaacaaagtaaaca

SEQ ID NO: 40189 - DNA, 30 bp, Artificial Sequence
  Synthetic oligonucleotide
tcgccagaaacctcgagcaacttgtaaaca

SEQ ID NO: 40190 - DNA, 30 bp, Artificial Sequence
  Synthetic oligonucleotide
acgtattggcaccatactaaaacttaaaca

SEQ ID NO: 40191 - DNA, 30 bp, Artificial Sequence
  Synthetic oligonucleotide
tgcaggcgtgagagcgataccttgacaaca

SEQ ID NO: 40192 - DNA, 30 bp, Artificial Sequence
  Synthetic oligonucleotide
tcgaatccaggcagactactctttacaaca

SEQ ID NO: 40193 - DNA, 30 bp, Artificial Sequence
  Synthetic oligonucleotide
tgtcaaatatcccggaaaagtctaccaaca

SEQ ID NO: 40194 - DNA, 30 bp, Artificial Sequence
  Synthetic oligonucleotide
tccaaatgagaatgatgtaaaaacgcaaca

SEQ ID NO: 40195 - DNA, 30 bp, Artificial Sequence
  Synthetic oligonucleotide
cacggcaaataatcggatgtataaagaaca

SEQ ID NO: 40196 - DNA, 30 bp, Artificial Sequence
  Synthetic oligonucleotide
ttgcacggaacatttacgaacttcagaaca

SEQ ID NO: 40197 - DNA, 30 bp, Artificial Sequence
  Synthetic oligonucleotide
cgcctacagacgggactacgtatccgaaca

SEQ ID NO: 40198 - DNA, 30 bp, Artificial Sequence
  Synthetic oligonucleotide
aatggagggtagccggatgtataaggaaca

SEQ ID NO: 40199 - DNA, 30 bp, Artificial Sequence
  Synthetic oligonucleotide
taacatcaaaaaccgaacttcataggaaca

SEQ ID NO: 40200 - DNA, 30 bp, Artificial Sequence
  Synthetic oligonucleotide
ataaatggcaggcggtacattacactaaca

SEQ ID NO: 40201 - DNA, 30 bp, Artificial Sequence
  Synthetic oligonucleotide
aggttagccaaactgaggtcgcacgtaaca

SEQ ID NO: 40202 - DNA, 30 bp, Artificial Sequence
  Synthetic oligonucleotide
aaaagtaagtagagcagagaacgggacaca

SEQ ID NO: 40203 - DNA, 30 bp, Artificial Sequence
  Synthetic oligonucleotide
tgaacgtgaggctagttcgcactgtacaca

SEQ ID NO: 40204 - DNA, 30 bp, Artificial Sequence
  Synthetic oligonucleotide
cgtggaggtagcggccaatgtatgaccaca

SEQ ID NO: 40205 - DNA, 30 bp, Artificial Sequence
  Synthetic oligonucleotide
gaaggtagacgatctcaactacccgccaca

SEQ ID NO: 40206 - DNA, 30 bp, Artificial Sequence
  Synthetic oligonucleotide
ctgcaaagacggggctagggtaggcgcaca

SEQ ID NO: 40207 - DNA, 30 bp, Artificial Sequence
  Synthetic oligonucleotide
ctcagtaagagatgacgtagaagaggcaca

SEQ ID NO: 40208 - DNA, 30 bp, Artificial Sequence
  Synthetic oligonucleotide
ccacgtatgtacggtacgaagctcggcaca

SEQ ID NO: 40209 - DNA, 30 bp, Artificial Sequence
  Synthetic oligonucleotide
agagaatgtcaaggttggtaaagttgcaca

SEQ ID NO: 40210 - DNA, 30 bp, Artificial Sequence
  Synthetic oligonucleotide
tgctacagcatcaagtacaccctcgtcaca

SEQ ID NO: 40211 - DNA, 30 bp, Artificial Sequence
  Synthetic oligonucleotide
cgaactgcgtgactcgcgcatcccaagaca

SEQ ID NO: 40212 - DNA, 30 bp, Artificial Sequence
  Synthetic oligonucleotide
gagtacgtggacgtacgggaagcgaagaca

SEQ ID NO: 40213 - DNA, 30 bp, Artificial Sequence
  Synthetic oligonucleotide
agtggtcagaggagccagttgcgggagaca

SEQ ID NO: 40214 - DNA, 30 bp, Artificial Sequence
  Synthetic oligonucleotide
agaatgtagggatcatggggcattacgaca

SEQ ID NO: 40215 - DNA, 30 bp, Artificial Sequence
  Synthetic oligonucleotide
ctagcaccaataggaacatagctttcgaca

SEQ ID NO: 40216 - DNA, 30 bp, Artificial Sequence
  Synthetic oligonucleotide
ggagcagataactaattgaagttctggaca

SEQ ID NO: 40217 - DNA, 30 bp, Artificial Sequence
  Synthetic oligonucleotide
ggacatcgcccaaattcaccaaagcataca

SEQ ID NO: 40218 - DNA, 30 bp, Artificial Sequence
  Synthetic oligonucleotide
aggccgagtacaagagtcttaaagcataca

SEQ ID NO: 40219 - DNA, 30 bp, Artificial Sequence
  Synthetic oligonucleotide
aagaaacgtgggcactctggacagcctaca

SEQ ID NO: 40220 - DNA, 30 bp, Artificial Sequence
  Synthetic oligonucleotide
cggaatgtatcagaggaggcattggctaca

SEQ ID NO: 40221 - DNA, 30 bp, Artificial Sequence
  Synthetic oligonucleotide
tagtgacccgaagggcggagggatgctaca

SEQ ID NO: 40222 - DNA, 30 bp, Artificial Sequence
  Synthetic oligonucleotide
tgtcgaggatagtgacaggtacatagtaca

SEQ ID NO: 40223 - DNA, 30 bp, Artificial Sequence
  Synthetic oligonucleotide
acgaggttttgggtccgaaatcatggtaca

SEQ ID NO: 40224 - DNA, 30 bp, Artificial Sequence
  Synthetic oligonucleotide
ggaggctacggccagagcacgcgttgtaca

SEQ ID NO: 40225 - DNA, 30 bp, Artificial Sequence
  Synthetic oligonucleotide
gcaaatggaaggtgtccaggatgatttaca

SEQ ID NO: 40226 - DNA, 30 bp, Artificial Sequence
  Synthetic oligonucleotide
taacagatctcaaccgattacaactaacca

SEQ ID NO: 40227 - DNA, 30 bp, Artificial Sequence
  Synthetic oligonucleotide
aggggtcttccatattgtgcgccaccacca

SEQ ID NO: 40228 - DNA, 30 bp, Artificial Sequence
  Synthetic oligonucleotide
agagggattcaaggatcaacgagcgcacca

SEQ ID NO: 40229 - DNA, 30 bp, Artificial Sequence
  Synthetic oligonucleotide
agaagcaaatggaagataatcgatgcacca

SEQ ID NO: 40230 - DNA, 30 bp, Artificial Sequence
  Synthetic oligonucleotide
ctagtatcgaaaaaaggtaaagcttcacca

SEQ ID NO: 40231 - DNA, 30 bp, Artificial Sequence
  Synthetic oligonucleotide
gggtggtacatgagctacacacggatacca

SEQ ID NO: 40232 - DNA, 30 bp, Artificial Sequence
  Synthetic oligonucleotide
caaaataacaagtcatgcgctgatcaccca

SEQ ID NO: 40233 - DNA, 30 bp, Artificial Sequence
  Synthetic oligonucleotide
cgggcaaggacgagattggtcttcacccca

SEQ ID NO: 40234 - DNA, 30 bp, Artificial Sequence
  Synthetic oligonucleotide
taccctaatagcagatagatgtgagtccca

SEQ ID NO: 40235 - DNA, 30 bp, Artificial Sequence
  Synthetic oligonucleotide
catcatgacgtccacactcaatacttccca

SEQ ID NO: 40236 - DNA, 30 bp, Artificial Sequence
  Synthetic oligonucleotide
agcgctcaaggaggaacgattgcaccgcca

SEQ ID NO: 40237 - DNA, 30 bp, Artificial Sequence
  Synthetic oligonucleotide
gaggggaccaaaacaccaccattttcgcca

SEQ ID NO: 40238 - DNA, 30 bp, Artificial Sequence
  Synthetic oligonucleotide
ctaaaggaaacctaggaatcaaaaaggcca

SEQ ID NO: 40239 - DNA, 30 bp, Artificial Sequence
  Synthetic oligonucleotide
cttacggggcaaattatgacagctaggcca

SEQ ID NO: 40240 - DNA, 30 bp, Artificial Sequence
  Synthetic oligonucleotide
cgctgaaacctaccagtagtaaaccggcca

SEQ ID NO: 40241 - DNA, 30 bp, Artificial Sequence
  Synthetic oligonucleotide
taacggccagtaataatcggtaaggggcca

SEQ ID NO: 40242 - DNA, 29 bp, Artificial Sequence
  Synthetic oligonucleotide
atgtgcaaagaacagaagggctcctgcca

SEQ ID NO: 40243 - DNA, 30 bp, Artificial Sequence
  Synthetic oligonucleotide
tccgaaagtaacgggtaggggcgcaatcca

SEQ ID NO: 40244 - DNA, 30 bp, Artificial Sequence
  Synthetic oligonucleotide
tagcgagggaacaacgtacgtgagaatcca

SEQ ID NO: 40245 - DNA, 30 bp, Artificial Sequence
  Synthetic oligonucleotide
gcactaagtgcataagaatacagtaatcca

SEQ ID NO: 40246 - DNA, 30 bp, Artificial Sequence
  Synthetic oligonucleotide
tcgttaacgattgagcgaacccacgatcca

SEQ ID NO: 40247 - DNA, 30 bp, Artificial Sequence
  Synthetic oligonucleotide
gggttgccgaaaagaccaggatactatcca

SEQ ID NO: 40248 - DNA, 30 bp, Artificial Sequence
  Synthetic oligonucleotide
agaaggcagacacttaaaaagctcactcca

SEQ ID NO: 40249 - DNA, 30 bp, Artificial Sequence
  Synthetic oligonucleotide
gcggggagaaagtattgggaccatgctcca

SEQ ID NO: 40250 - DNA, 30 bp, Artificial Sequence
  Synthetic oligonucleotide
acgtggtatgtggctgacgggttgggtcca

SEQ ID NO: 40251 - DNA, 30 bp, Artificial Sequence
  Synthetic oligonucleotide
ttcctaagggcgggctacagtaacaaagca

SEQ ID NO: 40252 - DNA, 30 bp, Artificial Sequence
  Synthetic oligonucleotide
cagggttatataccggccagccccaaagca

SEQ ID NO: 40253 - DNA, 30 bp, Artificial Sequence
  Synthetic oligonucleotide
gtgcacgcacgcgttacgtcaaaacaagca

SEQ ID NO: 40254 - DNA, 30 bp, Artificial Sequence
  Synthetic oligonucleotide
tgaagactgcgagcgtgacggattgaagca

SEQ ID NO: 40255 - DNA, 30 bp, Artificial Sequence
  Synthetic oligonucleotide
agaggtagataagtaaaacatctgtaagca

SEQ ID NO: 40256 - DNA, 30 bp, Artificial Sequence
  Synthetic oligonucleotide
ttgaaaaggcggacataaccgataccagca

SEQ ID NO: 40257 - DNA, 30 bp, Artificial Sequence
  Synthetic oligonucleotide
aaataaaagtactcctataagaaagcagca

SEQ ID NO: 40258 - DNA, 30 bp, Artificial Sequence
  Synthetic oligonucleotide
tatcaaagctagcctgaaagtgcagcagca

SEQ ID NO: 40259 - DNA, 30 bp, Artificial Sequence
  Synthetic oligonucleotide
aagcgtaagtgcttctaagccttgagagca

SEQ ID NO: 40260 - DNA, 30 bp, Artificial Sequence
  Synthetic oligonucleotide
tacgtagtctattagagggggctaggagca

SEQ ID NO: 40261 - DNA, 30 bp, Artificial Sequence
  Synthetic oligonucleotide
agggagcaataatgcaacgccaacggagca

SEQ ID NO: 40262 - DNA, 30 bp, Artificial Sequence
  Synthetic oligonucleotide
ccagcaaaagcgacttcaaaacatggagca

SEQ ID NO: 40263 - DNA, 30 bp, Artificial Sequence
  Synthetic oligonucleotide
tacggtcaaaccatacaggagacctgagca

SEQ ID NO: 40264 - DNA, 30 bp, Artificial Sequence
  Synthetic oligonucleotide
gggcatgaacgcatggtaaggtgactagca

SEQ ID NO: 40265 - DNA, 30 bp, Artificial Sequence
  Synthetic oligonucleotide
cccagcccggcaaagggtaaactactagca

SEQ ID NO: 40266 - DNA, 30 bp, Artificial Sequence
  Synthetic oligonucleotide
ccaggatcgccgggcaattatgagttagca

SEQ ID NO: 40267 - DNA, 30 bp, Artificial Sequence
  Synthetic oligonucleotide
gtgggtaaaccaaacaaccaggtcggcgca

SEQ ID NO: 40268 - DNA, 30 bp, Artificial Sequence
  Synthetic oligonucleotide
tgattacgctaacgcgaaactagctgcgca

SEQ ID NO: 40269 - DNA, 30 bp, Artificial Sequence
  Synthetic oligonucleotide
agcaacattatacaaaaatgctccttcgca

SEQ ID NO: 40270 - DNA, 30 bp, Artificial Sequence
  Synthetic oligonucleotide
aagatgattagaaggttccgcgaaaaggca

SEQ ID NO: 40271 - DNA, 30 bp, Artificial Sequence
  Synthetic oligonucleotide
ggaacgataggtgattcgcgtttcaaggca

SEQ ID NO: 40272 - DNA, 30 bp, Artificial Sequence
  Synthetic oligonucleotide
aggtcgaagtgtcgagttttaaataaggca

SEQ ID NO: 40273 - DNA, 30 bp, Artificial Sequence
  Synthetic oligonucleotide
aaggctggattacgagattgtacccaggca

SEQ ID NO: 40274 - DNA, 30 bp, Artificial Sequence
  Synthetic oligonucleotide
atgattctgacagttaaagaatagtcggca

SEQ ID NO: 40275 - DNA, 30 bp, Artificial Sequence
  Synthetic oligonucleotide
gtccgaaaactgggagtaccagattgggca

SEQ ID NO: 40276 - DNA, 30 bp, Artificial Sequence
  Synthetic oligonucleotide
acgtatgcagaccgaattgaagaaatggca

SEQ ID NO: 40277 - DNA, 30 bp, Artificial Sequence
  Synthetic oligonucleotide
tgacatggtagtacatccagatgcgtggca

SEQ ID NO: 40278 - DNA, 30 bp, Artificial Sequence
  Synthetic oligonucleotide
atggcactaaggtgaaagggttttttggca

SEQ ID NO: 40279 - DNA, 30 bp, Artificial Sequence
  Synthetic oligonucleotide
atgggaaggcctccgaagcttactactgca

SEQ ID NO: 40280 - DNA, 30 bp, Artificial Sequence
  Synthetic oligonucleotide
accatacttgccaccgaaaagaaccctgca

SEQ ID NO: 40281 - DNA, 30 bp, Artificial Sequence
  Synthetic oligonucleotide
cagacggcgcgcaaaagagtgtcgcctgca

SEQ ID NO: 40282 - DNA, 30 bp, Artificial Sequence
  Synthetic oligonucleotide
gccgtcggacgggctagaggataatctgca

SEQ ID NO: 40283 - DNA, 30 bp, Artificial Sequence
  Synthetic oligonucleotide
agagggttgatcagtccagagggtagtgca

SEQ ID NO: 40284 - DNA, 30 bp, Artificial Sequence
  Synthetic oligonucleotide
acatgtcggaaagggcataaagggcgtgca

SEQ ID NO: 40285 - DNA, 30 bp, Artificial Sequence
  Synthetic oligonucleotide
cggtatgtgtcaacaagcgacataggtgca

SEQ ID NO: 40286 - DNA, 30 bp, Artificial Sequence
  Synthetic oligonucleotide
gtggcgaatctcaacaagcgagtgggtgca

SEQ ID NO: 40287 - DNA, 30 bp, Artificial Sequence
  Synthetic oligonucleotide
acgtgaaagccaacacgcctgagatgtgca

SEQ ID NO: 40288 - DNA, 30 bp, Artificial Sequence
  Synthetic oligonucleotide
gtgtgggcgtgcaaataagaatggtgtgca

SEQ ID NO: 40289 - DNA, 30 bp, Artificial Sequence
  Synthetic oligonucleotide
gcaaggtgtgggcgtgtagatcaaattgca

SEQ ID NO: 40290 - DNA, 30 bp, Artificial Sequence
  Synthetic oligonucleotide
cccgcaaaaggtgagttcgaagagcttgca

SEQ ID NO: 40291 - DNA, 30 bp, Artificial Sequence
  Synthetic oligonucleotide
ctccaaaccgcacaaaacgagatgcttgca

SEQ ID NO: 40292 - DNA, 30 bp, Artificial Sequence
  Synthetic oligonucleotide
gcctccgtcgagcgagcccgctaaaaatca

SEQ ID NO: 40293 - DNA, 30 bp, Artificial Sequence
  Synthetic oligonucleotide
aaaaatactcaacataaaacgagaaaatca

SEQ ID NO: 40294 - DNA, 30 bp, Artificial Sequence
  Synthetic oligonucleotide
gggctaatgcgctatggtctccctaaatca

SEQ ID NO: 40295 - DNA, 30 bp, Artificial Sequence
  Synthetic oligonucleotide
ataaccgattcgagagacagtactcaatca

SEQ ID NO: 40296 - DNA, 30 bp, Artificial Sequence
  Synthetic oligonucleotide
tgtgaagttgtaagagtaagggaataatca

SEQ ID NO: 40297 - DNA, 30 bp, Artificial Sequence
  Synthetic oligonucleotide
ggcgctagacagaaaaggcctacataatca

SEQ ID NO: 40298 - DNA, 30 bp, Artificial Sequence
  Synthetic oligonucleotide
cggcaggacttaggtaaaaacggtacatca

SEQ ID NO: 40299 - DNA, 30 bp, Artificial Sequence
  Synthetic oligonucleotide
cgcgtaaaagaattagcgcattatgcatca

SEQ ID NO: 40300 - DNA, 30 bp, Artificial Sequence
  Synthetic oligonucleotide
ggccgcggtggaaagattgtagctcgatca

SEQ ID NO: 40301 - DNA, 30 bp, Artificial Sequence
  Synthetic oligonucleotide
acgaaccacgagttgtgtaacataggatca

SEQ ID NO: 40302 - DNA, 30 bp, Artificial Sequence
  Synthetic oligonucleotide
aaacagcggaatcagcccaaagatggatca

SEQ ID NO: 40303 - DNA, 30 bp, Artificial Sequence
  Synthetic oligonucleotide
gcgtcggccgatagcgcatgtaccatatca

SEQ ID NO: 40304 - DNA, 30 bp, Artificial Sequence
  Synthetic oligonucleotide
ggcccacaaagggttatccaacgcatatca

SEQ ID NO: 40305 - DNA, 30 bp, Artificial Sequence
  Synthetic oligonucleotide
tcctaagaactcgaatagagacagctatca

SEQ ID NO: 40306 - DNA, 30 bp, Artificial Sequence
  Synthetic oligonucleotide
aggtgtagagagtctggacccaatctatca

SEQ ID NO: 40307 - DNA, 31 bp, Artificial Sequence
  Synthetic oligonucleotide
acaacggtgaggggcagaagacggcgtatca

SEQ ID NO: 40308 - DNA, 30 bp, Artificial Sequence
  Synthetic oligonucleotide
cctggtcaaagaaccacgaacgatgtatca

SEQ ID NO: 40309 - DNA, 30 bp, Artificial Sequence
  Synthetic oligonucleotide
gatcaaacgagtttgagcactatgcactca

SEQ ID NO: 40310 - DNA, 30 bp, Artificial Sequence
  Synthetic oligonucleotide
cgggcttgtaactcaggggttggagactca

SEQ ID NO: 40311 - DNA, 30 bp, Artificial Sequence
  Synthetic oligonucleotide
cggttgaagtcacggaattaaaacgcctca

SEQ ID NO: 40312 - DNA, 30 bp, Artificial Sequence
  Synthetic oligonucleotide
cgataagacaagatatgtaatttggcctca

SEQ ID NO: 40313 - DNA, 30 bp, Artificial Sequence
  Synthetic oligonucleotide
agcggcatataatctacgtaagctgcctca

SEQ ID NO: 40314 - DNA, 30 bp, Artificial Sequence
  Synthetic oligonucleotide
caaagacagacccagtgggcagtaagctca

SEQ ID NO: 40315 - DNA, 30 bp, Artificial Sequence
  Synthetic oligonucleotide
tacactatccgctcaccagaacctagctca

SEQ ID NO: 40316 - DNA, 30 bp, Artificial Sequence
  Synthetic oligonucleotide
atgtaacgggatcaagcgtattcaatctca

SEQ ID NO: 40317 - DNA, 30 bp, Artificial Sequence
  Synthetic oligonucleotide
gggagctaattaccggtaacaatactctca

SEQ ID NO: 40318 - DNA, 30 bp, Artificial Sequence
  Synthetic oligonucleotide
aggagagcacgtcctgtcgtggcgctctca

SEQ ID NO: 40319 - DNA, 30 bp, Artificial Sequence
  Synthetic oligonucleotide
gtatcgcacggggggcggggtagcgtctca

SEQ ID NO: 40320 - DNA, 30 bp, Artificial Sequence
  Synthetic oligonucleotide
tggtcacatgcgttcaagataattgagtca

SEQ ID NO: 40321 - DNA, 30 bp, Artificial Sequence
  Synthetic oligonucleotide
atcgtacggtaaacacagaccagaacgtca

SEQ ID NO: 40322 - DNA, 30 bp, Artificial Sequence
  Synthetic oligonucleotide
ccgacaaccagcaggaggtctgggacgtca

SEQ ID NO: 40323 - DNA, 30 bp, Artificial Sequence
  Synthetic oligonucleotide
ggcgtgcactaggccagatggaaaccgtca

SEQ ID NO: 40324 - DNA, 30 bp, Artificial Sequence
  Synthetic oligonucleotide
ggacgggcacggaaaccaacgatctcgtca

SEQ ID NO: 40325 - DNA, 30 bp, Artificial Sequence
  Synthetic oligonucleotide
gaaccagcggggcgagcaactccagggtca

SEQ ID NO: 40326 - DNA, 30 bp, Artificial Sequence
  Synthetic oligonucleotide
cgacgatacatgcattcattggcactgtca

SEQ ID NO: 40327 - DNA, 30 bp, Artificial Sequence
  Synthetic oligonucleotide
aacagacctcgaactcgcgaccccaattca

SEQ ID NO: 40328 - DNA, 30 bp, Artificial Sequence
  Synthetic oligonucleotide
taattccacggaaggagacggactacttca

SEQ ID NO: 40329 - DNA, 30 bp, Artificial Sequence
  Synthetic oligonucleotide
tgctcatccgagaaagtcaaaacatcttca

SEQ ID NO: 40330 - DNA, 30 bp, Artificial Sequence
  Synthetic oligonucleotide
aggaccgcgagacggaaatagacttcttca

SEQ ID NO: 40331 - DNA, 30 bp, Artificial Sequence
  Synthetic oligonucleotide
gcggtgtgggggcgttcaaccagtatttca

SEQ ID NO: 40332 - DNA, 30 bp, Artificial Sequence
  Synthetic oligonucleotide
caagagtggcggtacgtaggccagaaaaga

SEQ ID NO: 40333 - DNA, 30 bp, Artificial Sequence
  Synthetic oligonucleotide
gaagctggggtcactaacaacgggaaaaga

SEQ ID NO: 40334 - DNA, 30 bp, Artificial Sequence
  Synthetic oligonucleotide
tgaggaatcagtgggaatgccaaacaaaga

SEQ ID NO: 40335 - DNA, 30 bp, Artificial Sequence
  Synthetic oligonucleotide
gtgaatcagtcgtacacatatgctcaaaga

SEQ ID NO: 40336 - DNA, 30 bp, Artificial Sequence
  Synthetic oligonucleotide
tatcaggacaactcgtatttgcaagaaaga

SEQ ID NO: 40337 - DNA, 30 bp, Artificial Sequence
  Synthetic oligonucleotide
tcctggattggtgtggtgtattgagaaaga

SEQ ID NO: 40338 - DNA, 30 bp, Artificial Sequence
  Synthetic oligonucleotide
tgaagcggcaaactcaacaaacaggaaaga

SEQ ID NO: 40339 - DNA, 30 bp, Artificial Sequence
  Synthetic oligonucleotide
gggaaatccgccagggcaacactataaaga

SEQ ID NO: 40340 - DNA, 30 bp, Artificial Sequence
  Synthetic oligonucleotide
tatgctggaaggaccgggaagaactaaaga

SEQ ID NO: 40341 - DNA, 30 bp, Artificial Sequence
  Synthetic oligonucleotide
agcaggggagatgttgagcgaagctaaaga

SEQ ID NO: 40342 - DNA, 30 bp, Artificial Sequence
  Synthetic oligonucleotide
aaatagcggagaaggagtgtcaatacaaga

SEQ ID NO: 40343 - DNA, 30 bp, Artificial Sequence
  Synthetic oligonucleotide
ctaaggacattagttaggggaggaccaaga

SEQ ID NO: 40344 - DNA, 30 bp, Artificial Sequence
  Synthetic oligonucleotide
gcagaatgttaaaagtaggtgtaggcaaga

SEQ ID NO: 40345 - DNA, 30 bp, Artificial Sequence
  Synthetic oligonucleotide
ttgcatggaagtaagtataggacacgaaga

SEQ ID NO: 40346 - DNA, 30 bp, Artificial Sequence
  Synthetic oligonucleotide
ggagggagccaatctcttggccagcgaaga

SEQ ID NO: 40347 - DNA, 30 bp, Artificial Sequence
  Synthetic oligonucleotide
tggatacctcacagaacacgtgggcgaaga

SEQ ID NO: 40348 - DNA, 30 bp, Artificial Sequence
  Synthetic oligonucleotide
agacagcatcgagctacattacgtcgaaga

SEQ ID NO: 40349 - DNA, 30 bp, Artificial Sequence
  Synthetic oligonucleotide
ctggctcacaaagatgcatacgttggaaga

SEQ ID NO: 40350 - DNA, 31 bp, Artificial Sequence
  Synthetic oligonucleotide
tgcccaaacagcaaaagtgcacatatgaaga

SEQ ID NO: 40351 - DNA, 30 bp, Artificial Sequence
  Synthetic oligonucleotide
tgcgctcctccgaaaccaagtctatgaaga

SEQ ID NO: 40352 - DNA, 30 bp, Artificial Sequence
  Synthetic oligonucleotide
gtgtgaacaagagttttagacatctgaaga

SEQ ID NO: 40353 - DNA, 30 bp, Artificial Sequence
  Synthetic oligonucleotide
acagaagagcggttcagtcaatcgtgaaga

SEQ ID NO: 40354 - DNA, 30 bp, Artificial Sequence
  Synthetic oligonucleotide
cggaatgggtagatgggtggtcccctaaga

SEQ ID NO: 40355 - DNA, 30 bp, Artificial Sequence
  Synthetic oligonucleotide
cggccgtatgtccaagcgcgtgtagtaaga

SEQ ID NO: 40356 - DNA, 30 bp, Artificial Sequence
  Synthetic oligonucleotide
acgggcaacaaatcacttttaaatgtaaga

SEQ ID NO: 40357 - DNA, 30 bp, Artificial Sequence
  Synthetic oligonucleotide
gtcaagaagtgaatcattacgaataacaga

SEQ ID NO: 40358 - DNA, 30 bp, Artificial Sequence
  Synthetic oligonucleotide
cttgtgcgcgacagaaacaaggaagacaga

SEQ ID NO: 40359 - DNA, 30 bp, Artificial Sequence
  Synthetic oligonucleotide
ttgcagacaaggccggactctgaagacaga

SEQ ID NO: 40360 - DNA, 30 bp, Artificial Sequence
  Synthetic oligonucleotide
tcaacctgcattagcggtactagggacaga

SEQ ID NO: 40361 - DNA, 30 bp, Artificial Sequence
  Synthetic oligonucleotide
ggttgagctgtggtaacatgcagtgacaga

SEQ ID NO: 40362 - DNA, 30 bp, Artificial Sequence
  Synthetic oligonucleotide
agtgctaattccgatcaagagttcaccaga

SEQ ID NO: 40363 - DNA, 30 bp, Artificial Sequence
  Synthetic oligonucleotide
ctgtaagcagactacatgagctaagccaga

SEQ ID NO: 40364 - DNA, 30 bp, Artificial Sequence
  Synthetic oligonucleotide
tcaacatactgaacgagttgaccagccaga

SEQ ID NO: 40365 - DNA, 30 bp, Artificial Sequence
  Synthetic oligonucleotide
tcgtagaccattggtgaataagcctccaga

SEQ ID NO: 40366 - DNA, 30 bp, Artificial Sequence
  Synthetic oligonucleotide
tagataatgccataacactttagcagcaga

SEQ ID NO: 40367 - DNA, 30 bp, Artificial Sequence
  Synthetic oligonucleotide
agttatgggttcacaacttggttcggcaga

SEQ ID NO: 40368 - DNA, 30 bp, Artificial Sequence
  Synthetic oligonucleotide
cgtaattcgtctacgggggtggacatcaga

SEQ ID NO: 40369 - DNA, 30 bp, Artificial Sequence
  Synthetic oligonucleotide
gggtgtatccgggaactccagatcgtcaga

SEQ ID NO: 40370 - DNA, 30 bp, Artificial Sequence
  Synthetic oligonucleotide
ggaagaccggtgaacaaatagctgttcaga

SEQ ID NO: 40371 - DNA, 30 bp, Artificial Sequence
  Synthetic oligonucleotide
ttagaataaatacgaattgttggcaagaga

SEQ ID NO: 40372 - DNA, 30 bp, Artificial Sequence
  Synthetic oligonucleotide
tatgcgcgggaacgctctttgatacagaga

SEQ ID NO: 40373 - DNA, 30 bp, Artificial Sequence
  Synthetic oligonucleotide
agtggttataactcccctctagaccagaga

SEQ ID NO: 40374 - DNA, 30 bp, Artificial Sequence
  Synthetic oligonucleotide
gtgtgattaccggccgtaccgttagagaga

SEQ ID NO: 40375 - DNA, 30 bp, Artificial Sequence
  Synthetic oligonucleotide
gcgcatcgagagcgtactatgctggagaga

SEQ ID NO: 40376 - DNA, 30 bp, Artificial Sequence
  Synthetic oligonucleotide
ataccagcagaaccgtaatgtctggagaga

SEQ ID NO: 40377 - DNA, 30 bp, Artificial Sequence
  Synthetic oligonucleotide
gtatcgttagagtggacctgtgggtagaga

SEQ ID NO: 40378 - DNA, 30 bp, Artificial Sequence
  Synthetic oligonucleotide
acctagggtcgtgaggcccctgcaacgaga

SEQ ID NO: 40379 - DNA, 30 bp, Artificial Sequence
  Synthetic oligonucleotide
gggggacagtttagtatactggtagcgaga

SEQ ID NO: 40380 - DNA, 30 bp, Artificial Sequence
  Synthetic oligonucleotide
tgaccatatcaggaagtgtctcgcgcgaga

SEQ ID NO: 40381 - DNA, 30 bp, Artificial Sequence
  Synthetic oligonucleotide
tcgtcaaggtctggcagtagtaataggaga

SEQ ID NO: 40382 - DNA, 30 bp, Artificial Sequence
  Synthetic oligonucleotide
tacgtatctcagaatggaacggttaggaga

SEQ ID NO: 40383 - DNA, 30 bp, Artificial Sequence
  Synthetic oligonucleotide
tcggaaagcaagcggctcgtcatacggaga

SEQ ID NO: 40384 - DNA, 30 bp, Artificial Sequence
  Synthetic oligonucleotide
ggcgcataaaaggatgggcgtgaagggaga

SEQ ID NO: 40385 - DNA, 30 bp, Artificial Sequence
  Synthetic oligonucleotide
ggcaacacgtgcccaatgactgtcatgaga

SEQ ID NO: 40386 - DNA, 30 bp, Artificial Sequence
  Synthetic oligonucleotide
cgtgaggtcggtacagctggagctctgaga

SEQ ID NO: 40387 - DNA, 30 bp, Artificial Sequence
  Synthetic oligonucleotide
cggccatcattgcgccgagcgtaagtgaga

SEQ ID NO: 40388 - DNA, 30 bp, Artificial Sequence
  Synthetic oligonucleotide
gcgtcgttccagttagggccgatcgtgaga

SEQ ID NO: 40389 - DNA, 30 bp, Artificial Sequence
  Synthetic oligonucleotide
gcgtaaaggtataggctggaagtcttgaga

SEQ ID NO: 40390 - DNA, 30 bp, Artificial Sequence
  Synthetic oligonucleotide
tgaggtcacatgtcaactagctatcataga

SEQ ID NO: 40391 - DNA, 31 bp, Artificial Sequence
  Synthetic oligonucleotide
aagataaagaggggtatgacggtcgtataga

SEQ ID NO: 40392 - DNA, 30 bp, Artificial Sequence
  Synthetic oligonucleotide
cgaaacgcattgtaggccccggacggtaga

SEQ ID NO: 40393 - DNA, 30 bp, Artificial Sequence
  Synthetic oligonucleotide
acagaagcatagcgtgactagtgtggtaga

SEQ ID NO: 40394 - DNA, 30 bp, Artificial Sequence
  Synthetic oligonucleotide
cgagatcgtggcaccgggcagacttgtaga

SEQ ID NO: 40395 - DNA, 30 bp, Artificial Sequence
  Synthetic oligonucleotide
gcactggaagcgaagtgattaccaattaga

SEQ ID NO: 40396 - DNA, 30 bp, Artificial Sequence
  Synthetic oligonucleotide
acacaacatataaacccgccaatagttaga

SEQ ID NO: 40397 - DNA, 30 bp, Artificial Sequence
  Synthetic oligonucleotide
tgtcggcctggaacgggagcgaattttaga

SEQ ID NO: 40398 - DNA, 30 bp, Artificial Sequence
  Synthetic oligonucleotide
tacgcttggccgaaaatgtaatctgaacga

SEQ ID NO: 40399 - DNA, 30 bp, Artificial Sequence
  Synthetic oligonucleotide
gcaaaaacttgatccgtaggtgtaacacga

SEQ ID NO: 40400 - DNA, 30 bp, Artificial Sequence
  Synthetic oligonucleotide
aactccagtcaacaagttgcgaactcacga

SEQ ID NO: 40401 - DNA, 30 bp, Artificial Sequence
  Synthetic oligonucleotide
gaaggaactaccgcgaaaagggtaagacga

SEQ ID NO: 40402 - DNA, 30 bp, Artificial Sequence
  Synthetic oligonucleotide
cgaccggcggttcggcagaacgacagacga

SEQ ID NO: 40403 - DNA, 30 bp, Artificial Sequence
  Synthetic oligonucleotide
agcaggaatggggaccatcactgcagacga

SEQ ID NO: 40404 - DNA, 30 bp, Artificial Sequence
  Synthetic oligonucleotide
ggatcggttttgagcaaaagagaatgacga

SEQ ID NO: 40405 - DNA, 30 bp, Artificial Sequence
  Synthetic oligonucleotide
cgttaaaaaaaagggcgtatgatatgacga

SEQ ID NO: 40406 - DNA, 30 bp, Artificial Sequence
  Synthetic oligonucleotide
agaaggaactaataactgtagcgctgacga

SEQ ID NO: 40407 - DNA, 31 bp, Artificial Sequence
  Synthetic oligonucleotide
tagtggcaatctaattctcacgtcactacga

SEQ ID NO: 40408 - DNA, 30 bp, Artificial Sequence
  Synthetic oligonucleotide
tacggggtcacatgaaaacaaatcctacga

SEQ ID NO: 40409 - DNA, 30 bp, Artificial Sequence
  Synthetic oligonucleotide
gtctcaagtatgaaggcaatctagctacga

SEQ ID NO: 40410 - DNA, 30 bp, Artificial Sequence
  Synthetic oligonucleotide
cgctagctaataacaacaaggcggctacga

SEQ ID NO: 40411 - DNA, 30 bp, Artificial Sequence
  Synthetic oligonucleotide
cgctagtggcgtaagagcacgaggttacga

SEQ ID NO: 40412 - DNA, 30 bp, Artificial Sequence
  Synthetic oligonucleotide
cagccgttgcaaccagagacggcgaaccga

SEQ ID NO: 40413 - DNA, 30 bp, Artificial Sequence
  Synthetic oligonucleotide
ggttgtgggcgtcaaatggaagtagaccga

SEQ ID NO: 40414 - DNA, 30 bp, Artificial Sequence
  Synthetic oligonucleotide
tatgcaagcagccgaggcaagatcgaccga

SEQ ID NO: 40415 - DNA, 30 bp, Artificial Sequence
  Synthetic oligonucleotide
actataggaaacggaccacccacgtaccga

SEQ ID NO: 40416 - DNA, 30 bp, Artificial Sequence
  Synthetic oligonucleotide
ccctctaggtgggaagaagagcatccccga

SEQ ID NO: 40417 - DNA, 30 bp, Artificial Sequence
  Synthetic oligonucleotide
gaaccaacgctcaaaactggctgcatccga

SEQ ID NO: 40418 - DNA, 30 bp, Artificial Sequence
  Synthetic oligonucleotide
agcgttcattgtggaaggactaaactccga

SEQ ID NO: 40419 - DNA, 30 bp, Artificial Sequence
  Synthetic oligonucleotide
gcgaaacaccaccatgtactttatctccga

SEQ ID NO: 40420 - DNA, 30 bp, Artificial Sequence
  Synthetic oligonucleotide
gtggtgataggagtattatggcgcgtccga

SEQ ID NO: 40421 - DNA, 30 bp, Artificial Sequence
  Synthetic oligonucleotide
gactaattaaactcactaccagtgaagcga

SEQ ID NO: 40422 - DNA, 30 bp, Artificial Sequence
  Synthetic oligonucleotide
aggccaacatggacatgtatgttcgagcga

SEQ ID NO: 40423 - DNA, 30 bp, Artificial Sequence
  Synthetic oligonucleotide
ggaggaggtcatgcgggaaatgtggagcga

SEQ ID NO: 40424 - DNA, 30 bp, Artificial Sequence
  Synthetic oligonucleotide
acgctcgtttaccgaacacactgcgcgcga

SEQ ID NO: 40425 - DNA, 30 bp, Artificial Sequence
  Synthetic oligonucleotide
acgtaggacatggtacggaacaaaaggcga

SEQ ID NO: 40426 - DNA, 30 bp, Artificial Sequence
  Synthetic oligonucleotide
ataagaatgatacgaaatgtacaaaggcga

SEQ ID NO: 40427 - DNA, 30 bp, Artificial Sequence
  Synthetic oligonucleotide
ctaaacttagataactaaaccgggaggcga

SEQ ID NO: 40428 - DNA, 30 bp, Artificial Sequence
  Synthetic oligonucleotide
ggttgaccagattttgtgcaagtgaggcga

SEQ ID NO: 40429 - DNA, 30 bp, Artificial Sequence
  Synthetic oligonucleotide
ggtaccgccaggtaacgacgcttggggcga

SEQ ID NO: 40430 - DNA, 30 bp, Artificial Sequence
  Synthetic oligonucleotide
cacgcgactctcgtatgcttataaatgcga

SEQ ID NO: 40431 - DNA, 30 bp, Artificial Sequence
  Synthetic oligonucleotide
cggagatataaaaaagtacatatcatgcga

SEQ ID NO: 40432 - DNA, 30 bp, Artificial Sequence
  Synthetic oligonucleotide
atggtaggatggtgttgttgatctgtgcga

SEQ ID NO: 40433 - DNA, 30 bp, Artificial Sequence
  Synthetic oligonucleotide
aatccaggtgcagagaacagacgtttgcga

SEQ ID NO: 40434 - DNA, 30 bp, Artificial Sequence
  Synthetic oligonucleotide
tgcggggacgcgaagggagaagacaatcga

SEQ ID NO: 40435 - DNA, 30 bp, Artificial Sequence
  Synthetic oligonucleotide
tcaagccaactcaattagtcgtcgtatcga

SEQ ID NO: 40436 - DNA, 30 bp, Artificial Sequence
  Synthetic oligonucleotide
atacgcatactccgagggcgaatgtatcga

SEQ ID NO: 40437 - DNA, 30 bp, Artificial Sequence
  Synthetic oligonucleotide
tgagggtaacagaagtaatggtcaactcga

SEQ ID NO: 40438 - DNA, 30 bp, Artificial Sequence
  Synthetic oligonucleotide
tgccagtcaacacatgtgtcaaccactcga

SEQ ID NO: 40439 - DNA, 30 bp, Artificial Sequence
  Synthetic oligonucleotide
aagataagaaagggctcatctcggcctcga

SEQ ID NO: 40440 - DNA, 30 bp, Artificial Sequence
  Synthetic oligonucleotide
acaatgtataaagaaaggctactagctcga

SEQ ID NO: 40441 - DNA, 30 bp, Artificial Sequence
  Synthetic oligonucleotide
gaggaagagtttttacatcaggaccgtcga

SEQ ID NO: 40442 - DNA, 30 bp, Artificial Sequence
  Synthetic oligonucleotide
cggcaggcttgaggagtaaaaatgtgtcga

SEQ ID NO: 40443 - DNA, 30 bp, Artificial Sequence
  Synthetic oligonucleotide
atcgccacctagggtaacgggtgggttcga

SEQ ID NO: 40444 - DNA, 30 bp, Artificial Sequence
  Synthetic oligonucleotide
agggatataattaactgcaacaagtttcga

SEQ ID NO: 40445 - DNA, 30 bp, Artificial Sequence
  Synthetic oligonucleotide
aaatgctggcactggcgaaacgacaaagga

SEQ ID NO: 40446 - DNA, 30 bp, Artificial Sequence
  Synthetic oligonucleotide
tcatagtaacttaagtaattagccaaagga

SEQ ID NO: 40447 - DNA, 30 bp, Artificial Sequence
  Synthetic oligonucleotide
gctcgaaataggactatctaagttaaagga

SEQ ID NO: 40448 - DNA, 30 bp, Artificial Sequence
  Synthetic oligonucleotide
accatgcgagagtgtattcggattcaagga

SEQ ID NO: 40449 - DNA, 30 bp, Artificial Sequence
  Synthetic oligonucleotide
aggtccagagtgcacataaagttagaagga

SEQ ID NO: 40450 - DNA, 30 bp, Artificial Sequence
  Synthetic oligonucleotide
cgggttgacaaggagatcccggcggaagga

SEQ ID NO: 40451 - DNA, 30 bp, Artificial Sequence
  Synthetic oligonucleotide
tggggaactattcacaaagctttggaagga

SEQ ID NO: 40452 - DNA, 30 bp, Artificial Sequence
  Synthetic oligonucleotide
tagacagagtgaaacagagtttatgaagga

SEQ ID NO: 40453 - DNA, 30 bp, Artificial Sequence
  Synthetic oligonucleotide
cactgtaaatgtagcgtgggaaacacagga

SEQ ID NO: 40454 - DNA, 30 bp, Artificial Sequence
  Synthetic oligonucleotide
tgtacaatcgaataactgtacgtgccagga

SEQ ID NO: 40455 - DNA, 30 bp, Artificial Sequence
  Synthetic oligonucleotide
tcggcaagcgggtcgaaccacacagcagga

SEQ ID NO: 40456 - DNA, 30 bp, Artificial Sequence
  Synthetic oligonucleotide
acgccaatgctgtcgaaacaagctgcagga

SEQ ID NO: 40457 - DNA, 30 bp, Artificial Sequence
  Synthetic oligonucleotide
cgtccaagcacatcgtggggatgatcagga

SEQ ID NO: 40458 - DNA, 30 bp, Artificial Sequence
  Synthetic oligonucleotide
gatggaccgggaattttattaacgagagga

SEQ ID NO: 40459 - DNA, 30 bp, Artificial Sequence
  Synthetic oligonucleotide
ggagacattcgcctagatatgggacgagga

SEQ ID NO: 40460 - DNA, 30 bp, Artificial Sequence
  Synthetic oligonucleotide
gtgcacaggaaagggtacgtcaggtgagga

SEQ ID NO: 40461 - DNA, 30 bp, Artificial Sequence
  Synthetic oligonucleotide
tcgagtggcgtcagtgccgcaaacctagga

SEQ ID NO: 40462 - DNA, 30 bp, Artificial Sequence
  Synthetic oligonucleotide
gacataagctggttcacacaaaaagtagga

SEQ ID NO: 40463 - DNA, 30 bp, Artificial Sequence
  Synthetic oligonucleotide
gtaaggcaagaacggtacgttcgagtagga

SEQ ID NO: 40464 - DNA, 30 bp, Artificial Sequence
  Synthetic oligonucleotide
caggcagcgggattcttcagctctgtagga

SEQ ID NO: 40465 - DNA, 30 bp, Artificial Sequence
  Synthetic oligonucleotide
aacttagcagcgtatgaacggagattagga

SEQ ID NO: 40466 - DNA, 30 bp, Artificial Sequence
  Synthetic oligonucleotide
ccgactgaggattgagggtactgtttagga

SEQ ID NO: 40467 - DNA, 30 bp, Artificial Sequence
  Synthetic oligonucleotide
ccaggacggaggtttacaaggtaatacgga

SEQ ID NO: 40468 - DNA, 30 bp, Artificial Sequence
  Synthetic oligonucleotide
ggcttggctaacttaataagtacatacgga

SEQ ID NO: 40469 - DNA, 30 bp, Artificial Sequence
  Synthetic oligonucleotide
cgtacgtctttatgttgaaataccaccgga

SEQ ID NO: 40470 - DNA, 30 bp, Artificial Sequence
  Synthetic oligonucleotide
ccagccgaaacgtgaagcagagggaccgga

SEQ ID NO: 40471 - DNA, 30 bp, Artificial Sequence
  Synthetic oligonucleotide
gtcaactcgaaaaggatcacgttacccgga

SEQ ID NO: 40472 - DNA, 30 bp, Artificial Sequence
  Synthetic oligonucleotide
catgcacaccctagataagtactaagcgga

SEQ ID NO: 40473 - DNA, 30 bp, Artificial Sequence
  Synthetic oligonucleotide
gttcataagtccaaagtggcagccggcgga

SEQ ID NO: 40474 - DNA, 30 bp, Artificial Sequence
  Synthetic oligonucleotide
aggcataaagtgctgatgaatggggtcgga

SEQ ID NO: 40475 - DNA, 30 bp, Artificial Sequence
  Synthetic oligonucleotide
acgcatgacggacatcaatcgtcgaaggga

SEQ ID NO: 40476 - DNA, 30 bp, Artificial Sequence
  Synthetic oligonucleotide
aggcaacaaccgccaagatcgaggaaggga

SEQ ID NO: 40477 - DNA, 30 bp, Artificial Sequence
  Synthetic oligonucleotide
ggtccatacggaaaatagcaaacccaggga

SEQ ID NO: 40478 - DNA, 30 bp, Artificial Sequence
  Synthetic oligonucleotide
atagcggcgtgttaatgggagcttcaggga

SEQ ID NO: 40479 - DNA, 30 bp, Artificial Sequence
  Synthetic oligonucleotide
taaagccatggacatggcaataccgaggga

SEQ ID NO: 40480 - DNA, 30 bp, Artificial Sequence
  Synthetic oligonucleotide
tgaacatagagcatcgaaaagcgataggga

SEQ ID NO: 40481 - DNA, 30 bp, Artificial Sequence
  Synthetic oligonucleotide
ttagaccatcataccggaccagtataggga

SEQ ID NO: 40482 - DNA, 30 bp, Artificial Sequence
  Synthetic oligonucleotide
aggaccaagtcgagctcaacttggtcggga

SEQ ID NO: 40483 - DNA, 30 bp, Artificial Sequence
  Synthetic oligonucleotide
gcctaactaggatgcccagatagttcggga

SEQ ID NO: 40484 - DNA, 30 bp, Artificial Sequence
  Synthetic oligonucleotide
acatatgagtacggataatgtctcagggga

SEQ ID NO: 40485 - DNA, 30 bp, Artificial Sequence
  Synthetic oligonucleotide
cgatcatataattgcactaggtacggggga

SEQ ID NO: 40486 - DNA, 30 bp, Artificial Sequence
  Synthetic oligonucleotide
atgggtaagaattctctatcaattggggga

SEQ ID NO: 40487 - DNA, 30 bp, Artificial Sequence
  Synthetic oligonucleotide
ctgggcataacgacgagaccggaaatggga

SEQ ID NO: 40488 - DNA, 30 bp, Artificial Sequence
  Synthetic oligonucleotide
aggaacttgacatttggattctgactggga

SEQ ID NO: 40489 - DNA, 30 bp, Artificial Sequence
  Synthetic oligonucleotide
gacaaaaacatgacatgggatgatgtggga

SEQ ID NO: 40490 - DNA, 30 bp, Artificial Sequence
  Synthetic oligonucleotide
gcatagaaggaacgcaataatgagttggga

SEQ ID NO: 40491 - DNA, 30 bp, Artificial Sequence
  Synthetic oligonucleotide
aaggatacagggcaatgcaattctttggga

SEQ ID NO: 40492 - DNA, 30 bp, Artificial Sequence
  Synthetic oligonucleotide
tcaggaagaaagcaatactatcgaaatgga

SEQ ID NO: 40493 - DNA, 30 bp, Artificial Sequence
  Synthetic oligonucleotide
ccagaggtgatcaaacgggaacgacatgga

SEQ ID NO: 40494 - DNA, 30 bp, Artificial Sequence
  Synthetic oligonucleotide
ttgctaaggtttgagaatatcggccatgga

SEQ ID NO: 40495 - DNA, 30 bp, Artificial Sequence
  Synthetic oligonucleotide
atcggtcacaccagtataagtcatcatgga

SEQ ID NO: 40496 - DNA, 30 bp, Artificial Sequence
  Synthetic oligonucleotide
cagggagggaagtacagggccatgtatgga

SEQ ID NO: 40497 - DNA, 30 bp, Artificial Sequence
  Synthetic oligonucleotide
acaggagccaaaatcagaaccaagactgga

SEQ ID NO: 40498 - DNA, 30 bp, Artificial Sequence
  Synthetic oligonucleotide
aaaatgagaggaatgagcctaagagctgga

SEQ ID NO: 40499 - DNA, 29 bp, Artificial Sequence
  Synthetic oligonucleotide
cgaaggaaggataacaagattcgggtgga

SEQ ID NO: 40500 - DNA, 30 bp, Artificial Sequence
  Synthetic oligonucleotide
acttgaacttatcagcgacacaatggtgga

SEQ ID NO: 40501 - DNA, 30 bp, Artificial Sequence
  Synthetic oligonucleotide
taatatgggcgcgaggcgacacagcttgga

SEQ ID NO: 40502 - DNA, 30 bp, Artificial Sequence
  Synthetic oligonucleotide
aggagcctcggtaccgaaatagtatttgga

SEQ ID NO: 40503 - DNA, 30 bp, Artificial Sequence
  Synthetic oligonucleotide
gtgttaacacctatgggggcgatcaaatga

SEQ ID NO: 40504 - DNA, 30 bp, Artificial Sequence
  Synthetic oligonucleotide
ggaccaatttctgggaagaaaactaaatga

SEQ ID NO: 40505 - DNA, 30 bp, Artificial Sequence
  Synthetic oligonucleotide
tgctcaaacggtactgcgataatacaatga

SEQ ID NO: 40506 - DNA, 30 bp, Artificial Sequence
  Synthetic oligonucleotide
atcgaataaactcaccagcaccaccaatga

SEQ ID NO: 40507 - DNA, 30 bp, Artificial Sequence
  Synthetic oligonucleotide
tgctgagtatacccactcttagcgcaatga

SEQ ID NO: 40508 - DNA, 30 bp, Artificial Sequence
  Synthetic oligonucleotide
accgtagataaaaaatttccacgataatga

SEQ ID NO: 40509 - DNA, 30 bp, Artificial Sequence
  Synthetic oligonucleotide
ggctaggctcgcttgggatagaactaatga

SEQ ID NO: 40510 - DNA, 30 bp, Artificial Sequence
  Synthetic oligonucleotide
tggtaaataaagtacacggttccgacatga

SEQ ID NO: 40511 - DNA, 30 bp, Artificial Sequence
  Synthetic oligonucleotide
gccaaactgacatcaggacaagggtcatga

SEQ ID NO: 40512 - DNA, 30 bp, Artificial Sequence
  Synthetic oligonucleotide
agttaagagtattagagtgggattggatga

SEQ ID NO: 40513 - DNA, 30 bp, Artificial Sequence
  Synthetic oligonucleotide
cgtacgggaaggtctgctggcactgtatga

SEQ ID NO: 40514 - DNA, 30 bp, Artificial Sequence
  Synthetic oligonucleotide
aggtctggtaatgtccttacccaaaactga

SEQ ID NO: 40515 - DNA, 30 bp, Artificial Sequence
  Synthetic oligonucleotide
tcgaaccaggtgttacaaaatgcgaactga

SEQ ID NO: 40516 - DNA, 30 bp, Artificial Sequence
  Synthetic oligonucleotide
acacggagggtatgtgagacgatgaactga

SEQ ID NO: 40517 - DNA, 30 bp, Artificial Sequence
  Synthetic oligonucleotide
ccatcacaccaaaagcaaagacgcgactga

SEQ ID NO: 40518 - DNA, 30 bp, Artificial Sequence
  Synthetic oligonucleotide
atgcgggtccaatgagaggtacgggactga

SEQ ID NO: 40519 - DNA, 30 bp, Artificial Sequence
  Synthetic oligonucleotide
agagatagtgcgaggtttgcgccatactga

SEQ ID NO: 40520 - DNA, 30 bp, Artificial Sequence
  Synthetic oligonucleotide
tctacggaaatccaccagtctaatacctga

SEQ ID NO: 40521 - DNA, 30 bp, Artificial Sequence
  Synthetic oligonucleotide
gtaacgtggccgagatgtaaagatgcctga

SEQ ID NO: 40522 - DNA, 30 bp, Artificial Sequence
  Synthetic oligonucleotide
cacgagagtctatgtgcctcaaactcctga

SEQ ID NO: 40523 - DNA, 30 bp, Artificial Sequence
  Synthetic oligonucleotide
atacagacgaagtcgtgagtagatcgctga

SEQ ID NO: 40524 - DNA, 30 bp, Artificial Sequence
  Synthetic oligonucleotide
tgggcgagctgagtgttccaatcttgctga

SEQ ID NO: 40525 - DNA, 30 bp, Artificial Sequence
  Synthetic oligonucleotide
ccagcccgcgttatagaagggatactctga

SEQ ID NO: 40526 - DNA, 30 bp, Artificial Sequence
  Synthetic oligonucleotide
acacaaaaccaggaaccccgacccgtctga

SEQ ID NO: 40527 - DNA, 30 bp, Artificial Sequence
  Synthetic oligonucleotide
tggactatggagggtcatagtaagccgtga

SEQ ID NO: 40528 - DNA, 30 bp, Artificial Sequence
  Synthetic oligonucleotide
cgagaaggacgcaaaccggtcgtgccgtga

SEQ ID NO: 40529 - DNA, 30 bp, Artificial Sequence
  Synthetic oligonucleotide
ggaaatgtaaggctcaaatgcgttgcgtga

SEQ ID NO: 40530 - DNA, 30 bp, Artificial Sequence
  Synthetic oligonucleotide
taggatgtctcctggcatagagaaaggtga

SEQ ID NO: 40531 - DNA, 30 bp, Artificial Sequence
  Synthetic oligonucleotide
tgatggatgaccgattaaaatgccaggtga

SEQ ID NO: 40532 - DNA, 31 bp, Artificial Sequence
  Synthetic oligonucleotide
gaaacgggtcgtcacgtacagggagcggtga

SEQ ID NO: 40533 - DNA, 30 bp, Artificial Sequence
  Synthetic oligonucleotide
taggcggaattcgacaacacggaggggtga

SEQ ID NO: 40534 - DNA, 30 bp, Artificial Sequence
  Synthetic oligonucleotide
ggtcaccgagatgtcaaagaggcattgtga

SEQ ID NO: 40535 - DNA, 30 bp, Artificial Sequence
  Synthetic oligonucleotide
aggtaaggtgcaataggcgatataaattga

SEQ ID NO: 40536 - DNA, 30 bp, Artificial Sequence
  Synthetic oligonucleotide
cgagactgtcaaaaagtacacgcatattga

SEQ ID NO: 40537 - DNA, 31 bp, Artificial Sequence
  Synthetic oligonucleotide
aaggcggcggtccagtaaagcataaacttga

SEQ ID NO: 40538 - DNA, 30 bp, Artificial Sequence
  Synthetic oligonucleotide
gggcaccgctgacgatcgaaccaactttga

SEQ ID NO: 40539 - DNA, 30 bp, Artificial Sequence
  Synthetic oligonucleotide
catgaacttcgtcgtattcaccggaaaata

SEQ ID NO: 40540 - DNA, 30 bp, Artificial Sequence
  Synthetic oligonucleotide
agcgacgacggcgtggagtttcatcaaata

SEQ ID NO: 40541 - DNA, 30 bp, Artificial Sequence
  Synthetic oligonucleotide
gcgaggaggtacgcacggtgagcggaaata

SEQ ID NO: 40542 - DNA, 31 bp, Artificial Sequence
  Synthetic oligonucleotide
ctcgaaccaagtcactacacactaataaata

SEQ ID NO: 40543 - DNA, 30 bp, Artificial Sequence
  Synthetic oligonucleotide
gaggcaatgaattaaccgtcatcgacaata

SEQ ID NO: 40544 - DNA, 30 bp, Artificial Sequence
  Synthetic oligonucleotide
acggaggcagaaatctatttgactggaata

SEQ ID NO: 40545 - DNA, 30 bp, Artificial Sequence
  Synthetic oligonucleotide
acatccctgaaacgaatgatctagttaata

SEQ ID NO: 40546 - DNA, 30 bp, Artificial Sequence
  Synthetic oligonucleotide
ttggccgtggtgtgtcgagcgtgacacata

SEQ ID NO: 40547 - DNA, 30 bp, Artificial Sequence
  Synthetic oligonucleotide
gtagaacctcggatggaggggctacacata

SEQ ID NO: 40548 - DNA, 30 bp, Artificial Sequence
  Synthetic oligonucleotide
acaacgggaagctgatagaatttacacata

SEQ ID NO: 40549 - DNA, 30 bp, Artificial Sequence
  Synthetic oligonucleotide
caacaaggctaaataaatggcgtgcacata

SEQ ID NO: 40550 - DNA, 30 bp, Artificial Sequence
  Synthetic oligonucleotide
caaagtagagcacgtgaacaaagagacata

SEQ ID NO: 40551 - DNA, 30 bp, Artificial Sequence
  Synthetic oligonucleotide
gagagatgtaggttgcaacaggtggacata

SEQ ID NO: 40552 - DNA, 30 bp, Artificial Sequence
  Synthetic oligonucleotide
tcggcgttccgaaaactcaaccaaagcata

SEQ ID NO: 40553 - DNA, 30 bp, Artificial Sequence
  Synthetic oligonucleotide
atcatatccgaactccaggcttgcagcata

SEQ ID NO: 40554 - DNA, 30 bp, Artificial Sequence
  Synthetic oligonucleotide
tgataacgagggtatcgctcggcgcgcata

SEQ ID NO: 40555 - DNA, 30 bp, Artificial Sequence
  Synthetic oligonucleotide
tgcgccactgcatgtcaaagtagtcgcata

SEQ ID NO: 40556 - DNA, 30 bp, Artificial Sequence
  Synthetic oligonucleotide
acacgtagcacagattcagccccaggcata

SEQ ID NO: 40557 - DNA, 30 bp, Artificial Sequence
  Synthetic oligonucleotide
aaggggggagtaaccgacacaaagtgcata

SEQ ID NO: 40558 - DNA, 30 bp, Artificial Sequence
  Synthetic oligonucleotide
atgatcagtcggggtgggtcaatcctcata

SEQ ID NO: 40559 - DNA, 30 bp, Artificial Sequence
  Synthetic oligonucleotide
acttagtgtcgaaacacccactcgctcata

SEQ ID NO: 40560 - DNA, 30 bp, Artificial Sequence
  Synthetic oligonucleotide
acagtcacgagtgctattgcaaatttcata

SEQ ID NO: 40561 - DNA, 31 bp, Artificial Sequence
  Synthetic oligonucleotide
gttgaagaactgataacttagatcaaagata

SEQ ID NO: 40562 - DNA, 30 bp, Artificial Sequence
  Synthetic oligonucleotide
aaaaacgaagtttccggcaacggaaagata

SEQ ID NO: 40563 - DNA, 30 bp, Artificial Sequence
  Synthetic oligonucleotide
agaccggcgaaagagggcgtcaagaagata

SEQ ID NO: 40564 - DNA, 30 bp, Artificial Sequence
  Synthetic oligonucleotide
ggactgttcaatgagggggcgtgcgagata

SEQ ID NO: 40565 - DNA, 30 bp, Artificial Sequence
  Synthetic oligonucleotide
tttggaagatgtagcaggaggtcggagata

SEQ ID NO: 40566 - DNA, 30 bp, Artificial Sequence
  Synthetic oligonucleotide
atcacacataagtaaatagggggtgcgata

SEQ ID NO: 40567 - DNA, 30 bp, Artificial Sequence
  Synthetic oligonucleotide
cggaaattgcagaggtagactgagcggata

SEQ ID NO: 40568 - DNA, 30 bp, Artificial Sequence
  Synthetic oligonucleotide
agaggacgatgagcgaagaatagagggata

SEQ ID NO: 40569 - DNA, 30 bp, Artificial Sequence
  Synthetic oligonucleotide
gtcactaacgattcgatgataccggggata

SEQ ID NO: 40570 - DNA, 30 bp, Artificial Sequence
  Synthetic oligonucleotide
gtggagaacgccgaacgagtgcccatgata

SEQ ID NO: 40571 - DNA, 30 bp, Artificial Sequence
  Synthetic oligonucleotide
atggggcgcgtatgtagaagtggactgata

SEQ ID NO: 40572 - DNA, 30 bp, Artificial Sequence
  Synthetic oligonucleotide
atcgtatcaaagaagggaaaatggcatata

SEQ ID NO: 40573 - DNA, 30 bp, Artificial Sequence
  Synthetic oligonucleotide
gtggggataaactctagatcgcctgatata

SEQ ID NO: 40574 - DNA, 30 bp, Artificial Sequence
  Synthetic oligonucleotide
aggaaacttatggtgtggaattgaactata

SEQ ID NO: 40575 - DNA, 30 bp, Artificial Sequence
  Synthetic oligonucleotide
cgatgacggtagtaaagtctaagacgtata

SEQ ID NO: 40576 - DNA, 30 bp, Artificial Sequence
  Synthetic oligonucleotide
tctcgccaaacgacaaccgttccaattata

SEQ ID NO: 40577 - DNA, 30 bp, Artificial Sequence
  Synthetic oligonucleotide
cgagtagtaccggaccaggacactcttata

SEQ ID NO: 40578 - DNA, 30 bp, Artificial Sequence
  Synthetic oligonucleotide
aacagtcatcagggatcacggacacaacta

SEQ ID NO: 40579 - DNA, 30 bp, Artificial Sequence
  Synthetic oligonucleotide
ggttactgggaaaacgtgtgaacctaacta

SEQ ID NO: 40580 - DNA, 30 bp, Artificial Sequence
  Synthetic oligonucleotide
acctagcgagtgaaggaacaaggtagacta

SEQ ID NO: 40581 - DNA, 30 bp, Artificial Sequence
  Synthetic oligonucleotide
gtcatcaaggagcacgggaatcgtgaccta

SEQ ID NO: 40582 - DNA, 30 bp, Artificial Sequence
  Synthetic oligonucleotide
agacggcttaggaatcgtgtggccacccta

SEQ ID NO: 40583 - DNA, 30 bp, Artificial Sequence
  Synthetic oligonucleotide
taactgtgaggccagaaattggagagccta

SEQ ID NO: 40584 - DNA, 30 bp, Artificial Sequence
  Synthetic oligonucleotide
agacggggaggacagctttacatgagccta

SEQ ID NO: 40585 - DNA, 30 bp, Artificial Sequence
  Synthetic oligonucleotide
acatgtaggaggaaacgattaggctgccta

SEQ ID NO: 40586 - DNA, 30 bp, Artificial Sequence
  Synthetic oligonucleotide
cacgagacatatgccgactggtattgccta

SEQ ID NO: 40587 - DNA, 30 bp, Artificial Sequence
  Synthetic oligonucleotide
ggtgaatcttgatcaagagtgggagtccta

SEQ ID NO: 40588 - DNA, 30 bp, Artificial Sequence
  Synthetic oligonucleotide
tgaagagccgggtgcaaagcaaacgtccta

SEQ ID NO: 40589 - DNA, 30 bp, Artificial Sequence
  Synthetic oligonucleotide
cattacagaggataaagacacggaaagcta

SEQ ID NO: 40590 - DNA, 30 bp, Artificial Sequence
  Synthetic oligonucleotide
tcgccaatagtctggcatcagagtaagcta

SEQ ID NO: 40591 - DNA, 30 bp, Artificial Sequence
  Synthetic oligonucleotide
gaacataaaatctatctgccccctgagcta

SEQ ID NO: 40592 - DNA, 30 bp, Artificial Sequence
  Synthetic oligonucleotide
tggaagcgtactaactatgtccactagcta

SEQ ID NO: 40593 - DNA, 30 bp, Artificial Sequence
  Synthetic oligonucleotide
ggacaagttgattcccgaggttcagcgcta

SEQ ID NO: 40594 - DNA, 30 bp, Artificial Sequence
  Synthetic oligonucleotide
gtcaggcaaatcacgatttaatgtgcgcta

SEQ ID NO: 40595 - DNA, 30 bp, Artificial Sequence
  Synthetic oligonucleotide
actgcctgggacagggctattccatcgcta

SEQ ID NO: 40596 - DNA, 30 bp, Artificial Sequence
  Synthetic oligonucleotide
ccccctagaagaagagggttgcgatcgcta

SEQ ID NO: 40597 - DNA, 30 bp, Artificial Sequence
  Synthetic oligonucleotide
ggtcggctgtcatccctaggaagctcgcta

SEQ ID NO: 40598 - DNA, 30 bp, Artificial Sequence
  Synthetic oligonucleotide
tggctacgatatgacgggacattaaggcta

SEQ ID NO: 40599 - DNA, 30 bp, Artificial Sequence
  Synthetic oligonucleotide
gttctgtgaggagaggagggggatatgcta

SEQ ID NO: 40600 - DNA, 30 bp, Artificial Sequence
  Synthetic oligonucleotide
gacgaggattagcgacaccaaaccattcta

SEQ ID NO: 40601 - DNA, 30 bp, Artificial Sequence
  Synthetic oligonucleotide
atggaaagggcggtcggccaattgcttcta

SEQ ID NO: 40602 - DNA, 30 bp, Artificial Sequence
  Synthetic oligonucleotide
cgtccagagtcacagacgatgtaaaaagta

SEQ ID NO: 40603 - DNA, 30 bp, Artificial Sequence
  Synthetic oligonucleotide
actgactcacgggagaaaagcttcaaagta

SEQ ID NO: 40604 - DNA, 30 bp, Artificial Sequence
  Synthetic oligonucleotide
attgggcacagggctaataggcgccaagta

SEQ ID NO: 40605 - DNA, 30 bp, Artificial Sequence
  Synthetic oligonucleotide
cacggcaattgtaggggtggtaagacagta

SEQ ID NO: 40606 - DNA, 30 bp, Artificial Sequence
  Synthetic oligonucleotide
agagggggatgtagagcgcgaaagtcagta

SEQ ID NO: 40607 - DNA, 30 bp, Artificial Sequence
  Synthetic oligonucleotide
ggcaaatcgtaggacataatctagtcagta

SEQ ID NO: 40608 - DNA, 30 bp, Artificial Sequence
  Synthetic oligonucleotide
tgacacctggcattcagaaaacccagagta

SEQ ID NO: 40609 - DNA, 30 bp, Artificial Sequence
  Synthetic oligonucleotide
tgcacgtgattatgtctaagttccagagta

SEQ ID NO: 40610 - DNA, 31 bp, Artificial Sequence
  Synthetic oligonucleotide
tatgcgagactcaacgatatattacggagta

SEQ ID NO: 40611 - DNA, 30 bp, Artificial Sequence
  Synthetic oligonucleotide
tcagctctagggaagggataagctggagta

SEQ ID NO: 40612 - DNA, 30 bp, Artificial Sequence
  Synthetic oligonucleotide
tgggtggggaaagggaaacgaatgatagta

SEQ ID NO: 40613 - DNA, 30 bp, Artificial Sequence
  Synthetic oligonucleotide
gcgtagagcaaagaatgggaatacgtagta

SEQ ID NO: 40614 - DNA, 30 bp, Artificial Sequence
  Synthetic oligonucleotide
agatggtgctgggtgggtttaattgtagta

SEQ ID NO: 40615 - DNA, 30 bp, Artificial Sequence
  Synthetic oligonucleotide
ttgtcagagagggggttggcctagaacgta

SEQ ID NO: 40616 - DNA, 30 bp, Artificial Sequence
  Synthetic oligonucleotide
atggcaatggatagcataagttgtaacgta

SEQ ID NO: 40617 - DNA, 30 bp, Artificial Sequence
  Synthetic oligonucleotide
taaatcagagctgaacactagaaatacgta

SEQ ID NO: 40618 - DNA, 30 bp, Artificial Sequence
  Synthetic oligonucleotide
agatccgtgatatggtaaagcgtatacgta

SEQ ID NO: 40619 - DNA, 31 bp, Artificial Sequence
  Synthetic oligonucleotide
acggggttcccgttctgagggccagtacgta

SEQ ID NO: 40620 - DNA, 30 bp, Artificial Sequence
  Synthetic oligonucleotide
gctctgaaacacgggaaagcgcaaaccgta

SEQ ID NO: 40621 - DNA, 30 bp, Artificial Sequence
  Synthetic oligonucleotide
ctgaggtcgtaagggtcatcggcgcccgta

SEQ ID NO: 40622 - DNA, 30 bp, Artificial Sequence
  Synthetic oligonucleotide
actcaagcgtgttctgagggtgtcgccgta

SEQ ID NO: 40623 - DNA, 30 bp, Artificial Sequence
  Synthetic oligonucleotide
ccacactccatgagaaataggcaggccgta

SEQ ID NO: 40624 - DNA, 30 bp, Artificial Sequence
  Synthetic oligonucleotide
gccaccgaaccattaaggttaaacagcgta

SEQ ID NO: 40625 - DNA, 30 bp, Artificial Sequence
  Synthetic oligonucleotide
acggaagacgtatcctttttttatagcgta

SEQ ID NO: 40626 - DNA, 30 bp, Artificial Sequence
  Synthetic oligonucleotide
gctagctagcagactacatagtgaggcgta

SEQ ID NO: 40627 - DNA, 30 bp, Artificial Sequence
  Synthetic oligonucleotide
acacaacagctcagcggatttaaatgcgta

SEQ ID NO: 40628 - DNA, 30 bp, Artificial Sequence
  Synthetic oligonucleotide
cgtcacggggactgaacgcacacactcgta

SEQ ID NO: 40629 - DNA, 30 bp, Artificial Sequence
  Synthetic oligonucleotide
gacaaagatcggtgacgtacatggaaggta

SEQ ID NO: 40630 - DNA, 30 bp, Artificial Sequence
  Synthetic oligonucleotide
agttcagagcggcacgcgctaaataaggta

SEQ ID NO: 40631 - DNA, 30 bp, Artificial Sequence
  Synthetic oligonucleotide
aacgcgtcagtgttcacaactagacaggta

SEQ ID NO: 40632 - DNA, 30 bp, Artificial Sequence
  Synthetic oligonucleotide
gcgacgatgggtggaagaaacattcaggta

SEQ ID NO: 40633 - DNA, 30 bp, Artificial Sequence
  Synthetic oligonucleotide
ccgaggccgtctgtacgtggggtggcggta

SEQ ID NO: 40634 - DNA, 30 bp, Artificial Sequence
  Synthetic oligonucleotide
gcagcaggtgaaacggcacactaatgggta

SEQ ID NO: 40635 - DNA, 30 bp, Artificial Sequence
  Synthetic oligonucleotide
aaggaaataaaccgttactctacaatggta

SEQ ID NO: 40636 - DNA, 30 bp, Artificial Sequence
  Synthetic oligonucleotide
tactgaaagaagatcaggaacgggatggta

SEQ ID NO: 40637 - DNA, 30 bp, Artificial Sequence
  Synthetic oligonucleotide
agcgatgggtcaggctaaatctaccatgta

SEQ ID NO: 40638 - DNA, 30 bp, Artificial Sequence
  Synthetic oligonucleotide
cggctgtcggcacgaagggcatagcatgta

SEQ ID NO: 40639 - DNA, 30 bp, Artificial Sequence
  Synthetic oligonucleotide
ttcgactggatcgggaaaggagttgctgta

SEQ ID NO: 40640 - DNA, 30 bp, Artificial Sequence
  Synthetic oligonucleotide
tctggatgggttggagaataggcgagtgta

SEQ ID NO: 40641 - DNA, 30 bp, Artificial Sequence
  Synthetic oligonucleotide
actaacggaataagagcggatctaggtgta

SEQ ID NO: 40642 - DNA, 30 bp, Artificial Sequence
  Synthetic oligonucleotide
atcgaggcctcgaaaaaggctagacttgta

SEQ ID NO: 40643 - DNA, 30 bp, Artificial Sequence
  Synthetic oligonucleotide
cctggagacggggaatttaggaaggttgta

SEQ ID NO: 40644 - DNA, 30 bp, Artificial Sequence
  Synthetic oligonucleotide
cccacgatcagatggaaaagagggaaatta

SEQ ID NO: 40645 - DNA, 30 bp, Artificial Sequence
  Synthetic oligonucleotide
ccaagcgggacagcgtccaccgaccaatta

SEQ ID NO: 40646 - DNA, 30 bp, Artificial Sequence
  Synthetic oligonucleotide
aaggcacgttacgaaacaaagaaaacatta

SEQ ID NO: 40647 - DNA, 30 bp, Artificial Sequence
  Synthetic oligonucleotide
cgcggcaaaaaacagatgagtgaaacatta

SEQ ID NO: 40648 - DNA, 30 bp, Artificial Sequence
  Synthetic oligonucleotide
atcggcattgagggggccagcaggacatta

SEQ ID NO: 40649 - DNA, 30 bp, Artificial Sequence
  Synthetic oligonucleotide
atgagaactcatagaaaagaggacgcatta

SEQ ID NO: 40650 - DNA, 30 bp, Artificial Sequence
  Synthetic oligonucleotide
cgagagttaacagtaaacctccagggatta

SEQ ID NO: 40651 - DNA, 30 bp, Artificial Sequence
  Synthetic oligonucleotide
cgcggtcagcagacaaagtaatcgatatta

SEQ ID NO: 40652 - DNA, 30 bp, Artificial Sequence
  Synthetic oligonucleotide
acgcgtggggaactgggtgatatcgactta

SEQ ID NO: 40653 - DNA, 30 bp, Artificial Sequence
  Synthetic oligonucleotide
agcacaagtagagtataatcggatgactta

SEQ ID NO: 40654 - DNA, 30 bp, Artificial Sequence
  Synthetic oligonucleotide
cagtgtggaggtgacgaggaagtgacctta

SEQ ID NO: 40655 - DNA, 30 bp, Artificial Sequence
  Synthetic oligonucleotide
aatagcggactaacacctaggaaaagctta

SEQ ID NO: 40656 - DNA, 30 bp, Artificial Sequence
  Synthetic oligonucleotide
caaggcagggccatgatctgtttgtgctta

SEQ ID NO: 40657 - DNA, 30 bp, Artificial Sequence
  Synthetic oligonucleotide
tccgacacatcatctgaagcgaaaaagtta

SEQ ID NO: 40658 - DNA, 30 bp, Artificial Sequence
  Synthetic oligonucleotide
aggcatgggattcacagattgatccagtta

SEQ ID NO: 40659 - DNA, 30 bp, Artificial Sequence
  Synthetic oligonucleotide
acgcagtgagcggaaaggtagctagcgtta

SEQ ID NO: 40660 - DNA, 30 bp, Artificial Sequence
  Synthetic oligonucleotide
catcgtgcagagtaatctggagggcggtta

SEQ ID NO: 40661 - DNA, 30 bp, Artificial Sequence
  Synthetic oligonucleotide
ttgagcccgaaagtactcgtgtgcctgtta

SEQ ID NO: 40662 - DNA, 30 bp, Artificial Sequence
  Synthetic oligonucleotide
agagcgatcaggcaaatacctcgagattta

SEQ ID NO: 40663 - DNA, 30 bp, Artificial Sequence
  Synthetic oligonucleotide
acgacccaccagtgagggaagccaatttta

SEQ ID NO: 40664 - DNA, 30 bp, Artificial Sequence
  Synthetic oligonucleotide
ataagctagcacggagatcgcgtgaaaaac

SEQ ID NO: 40665 - DNA, 30 bp, Artificial Sequence
  Synthetic oligonucleotide
ggggtaatgaaccccacatgtgtgacaaac

SEQ ID NO: 40666 - DNA, 30 bp, Artificial Sequence
  Synthetic oligonucleotide
aagaaaagcgatcatggggacgtaccaaac

SEQ ID NO: 40667 - DNA, 30 bp, Artificial Sequence
  Synthetic oligonucleotide
agtcaagtggaaggaaattgtgatccaaac

SEQ ID NO: 40668 - DNA, 30 bp, Artificial Sequence
  Synthetic oligonucleotide
tctcaaacccgacattaatagacctcaaac

SEQ ID NO: 40669 - DNA, 30 bp, Artificial Sequence
  Synthetic oligonucleotide
ctaaggactgaacgcgggtgatggggaaac

SEQ ID NO: 40670 - DNA, 30 bp, Artificial Sequence
  Synthetic oligonucleotide
gccttacggacacgagacctcagatgaaac

SEQ ID NO: 40671 - DNA, 30 bp, Artificial Sequence
  Synthetic oligonucleotide
gcgcaaaaagccacgggatccctacacaac

SEQ ID NO: 40672 - DNA, 30 bp, Artificial Sequence
  Synthetic oligonucleotide
tcaacaacagcctcgacacaggtacacaac

SEQ ID NO: 40673 - DNA, 30 bp, Artificial Sequence
  Synthetic oligonucleotide
cggggcagggctgatcctgatgaatacaac

SEQ ID NO: 40674 - DNA, 30 bp, Artificial Sequence
  Synthetic oligonucleotide
gggatggtaccaagatgaactattaccaac

SEQ ID NO: 40675 - DNA, 30 bp, Artificial Sequence
  Synthetic oligonucleotide
aatacaacatggggagtatcagcgcgcaac

SEQ ID NO: 40676 - DNA, 30 bp, Artificial Sequence
  Synthetic oligonucleotide
agatagtatactagtaacggcataggcaac

SEQ ID NO: 40677 - DNA, 30 bp, Artificial Sequence
  Synthetic oligonucleotide
tgaaggggaaacaagatacatcaatgcaac

SEQ ID NO: 40678 - DNA, 30 bp, Artificial Sequence
  Synthetic oligonucleotide
agcggtgagagagttgttgcagggatcaac

SEQ ID NO: 40679 - DNA, 30 bp, Artificial Sequence
  Synthetic oligonucleotide
accggcccgggagccaaaaagcctgagaac

SEQ ID NO: 40680 - DNA, 30 bp, Artificial Sequence
  Synthetic oligonucleotide
cgttaaacctactgcggctatgagccgaac

SEQ ID NO: 40681 - DNA, 30 bp, Artificial Sequence
  Synthetic oligonucleotide
agagtgtgcgccagagctgagacagcgaac

SEQ ID NO: 40682 - DNA, 30 bp, Artificial Sequence
  Synthetic oligonucleotide
gctaagtgaaacaccagcgcgtagtggaac

SEQ ID NO: 40683 - DNA, 30 bp, Artificial Sequence
  Synthetic oligonucleotide
cgacaggggattctttagttgaccgtgaac

SEQ ID NO: 40684 - DNA, 30 bp, Artificial Sequence
  Synthetic oligonucleotide
caacatgagtctgacaaggcgagtaataac

SEQ ID NO: 40685 - DNA, 30 bp, Artificial Sequence
  Synthetic oligonucleotide
cgggaatttaatggaaatggaatgcataac

SEQ ID NO: 40686 - DNA, 30 bp, Artificial Sequence
  Synthetic oligonucleotide
ggtagaccaaatggtactaatatggataac

SEQ ID NO: 40687 - DNA, 30 bp, Artificial Sequence
  Synthetic oligonucleotide
ttgcgctccatcgaaacaacaccatataac

SEQ ID NO: 40688 - DNA, 30 bp, Artificial Sequence
  Synthetic oligonucleotide
gatgcacgaatgaggaaggacctatataac

SEQ ID NO: 40689 - DNA, 30 bp, Artificial Sequence
  Synthetic oligonucleotide
aacagggaacatcgcttcaagatctataac

SEQ ID NO: 40690 - DNA, 30 bp, Artificial Sequence
  Synthetic oligonucleotide
agcgtcgaccacacggataatttaggtaac

SEQ ID NO: 40691 - DNA, 30 bp, Artificial Sequence
  Synthetic oligonucleotide
acgactggggcgccgcaaacaatgattaac

SEQ ID NO: 40692 - DNA, 30 bp, Artificial Sequence
  Synthetic oligonucleotide
gcgagaagaaacaacgtaatattacaacac

SEQ ID NO: 40693 - DNA, 30 bp, Artificial Sequence
  Synthetic oligonucleotide
acgcgcgcgacggggcccgaggtataacac

SEQ ID NO: 40694 - DNA, 30 bp, Artificial Sequence
  Synthetic oligonucleotide
atggacggcttaggggatacacagtaacac

SEQ ID NO: 40695 - DNA, 30 bp, Artificial Sequence
  Synthetic oligonucleotide
aagtcgcgattcacgggcacagaagcacac

SEQ ID NO: 40696 - DNA, 30 bp, Artificial Sequence
  Synthetic oligonucleotide
tacatagcctgaaaactgtaattcgcacac

SEQ ID NO: 40697 - DNA, 30 bp, Artificial Sequence
  Synthetic oligonucleotide
atagctgaggacaaaggcggaacccgacac

SEQ ID NO: 40698 - DNA, 30 bp, Artificial Sequence
  Synthetic oligonucleotide
tagggcacaacgtcctgggcgacaatacac

SEQ ID NO: 40699 - DNA, 30 bp, Artificial Sequence
  Synthetic oligonucleotide
gatgataacggacgactctaaatgatacac

SEQ ID NO: 40700 - DNA, 30 bp, Artificial Sequence
  Synthetic oligonucleotide
agtagtgtacgtcaaagaattaagcaccac

SEQ ID NO: 40701 - DNA, 30 bp, Artificial Sequence
  Synthetic oligonucleotide
ggtcgagaataacaactcgaatcgcaccac

SEQ ID NO: 40702 - DNA, 30 bp, Artificial Sequence
  Synthetic oligonucleotide
agcggtgataggccatacatatcagaccac

SEQ ID NO: 40703 - DNA, 30 bp, Artificial Sequence
  Synthetic oligonucleotide
ccttagtggcagggatagcttgaatcccac

SEQ ID NO: 40704 - DNA, 30 bp, Artificial Sequence
  Synthetic oligonucleotide
tcagatgggctttcagagagtctgcgccac

SEQ ID NO: 40705 - DNA, 30 bp, Artificial Sequence
  Synthetic oligonucleotide
agatgatggaaaaccgttctgcgtcgccac

SEQ ID NO: 40706 - DNA, 30 bp, Artificial Sequence
  Synthetic oligonucleotide
gccggctgcacatcaccacatactaagcac

SEQ ID NO: 40707 - DNA, 30 bp, Artificial Sequence
  Synthetic oligonucleotide
gcgtgtgttcaaaacgagcaatttaagcac

SEQ ID NO: 40708 - DNA, 30 bp, Artificial Sequence
  Synthetic oligonucleotide
agggtacgacagtacggtagccaggagcac

SEQ ID NO: 40709 - DNA, 30 bp, Artificial Sequence
  Synthetic oligonucleotide
tagaggtgagttcgtgagatacaacggcac

SEQ ID NO: 40710 - DNA, 30 bp, Artificial Sequence
  Synthetic oligonucleotide
tagtcacgaagagaacgtcgcgccgggcac

SEQ ID NO: 40711 - DNA, 30 bp, Artificial Sequence
  Synthetic oligonucleotide
agttagaaaggtgtggctagagaatggcac

SEQ ID NO: 40712 - DNA, 30 bp, Artificial Sequence
  Synthetic oligonucleotide
gacaggataggatagcgcgtataactgcac

SEQ ID NO: 40713 - DNA, 30 bp, Artificial Sequence
  Synthetic oligonucleotide
tcgatagccagggacctgggcgacaatcac

SEQ ID NO: 40714 - DNA, 30 bp, Artificial Sequence
  Synthetic oligonucleotide
gcagaatggagatgcgactaaaataatcac

SEQ ID NO: 40715 - DNA, 30 bp, Artificial Sequence
  Synthetic oligonucleotide
ggaggagtcgtgcgaaagtcaccctatcac

SEQ ID NO: 40716 - DNA, 30 bp, Artificial Sequence
  Synthetic oligonucleotide
ctcgaccgaaggctatatcataatgctcac

SEQ ID NO: 40717 - DNA, 30 bp, Artificial Sequence
  Synthetic oligonucleotide
cgtgtaaagcgccgcccgaaatcaagtcac

SEQ ID NO: 40718 - DNA, 30 bp, Artificial Sequence
  Synthetic oligonucleotide
tatcggcacggggggatgttgaaacgtcac

SEQ ID NO: 40719 - DNA, 30 bp, Artificial Sequence
  Synthetic oligonucleotide
atacatggaagatcgggaaacgaacgtcac

SEQ ID NO: 40720 - DNA, 30 bp, Artificial Sequence
  Synthetic oligonucleotide
agtggattgagtagacgcggaacaaaagac

SEQ ID NO: 40721 - DNA, 34 bp, Artificial Sequence
  Synthetic oligonucleotide
gatactacaccaccacgtgtccatcacaaaagac

SEQ ID NO: 40722 - DNA, 30 bp, Artificial Sequence
  Synthetic oligonucleotide
gatcaacgataaaagacatttcgccaagac

SEQ ID NO: 40723 - DNA, 30 bp, Artificial Sequence
  Synthetic oligonucleotide
tagggcgggggctgtcgacacctcgaagac

SEQ ID NO: 40724 - DNA, 30 bp, Artificial Sequence
  Synthetic oligonucleotide
ggccgacgatggggtcgacccgtataagac

SEQ ID NO: 40725 - DNA, 30 bp, Artificial Sequence
  Synthetic oligonucleotide
caggcgtagggttttgaggccataccagac

SEQ ID NO: 40726 - DNA, 30 bp, Artificial Sequence
  Synthetic oligonucleotide
ggtatagccagttggaacatagtagcagac

SEQ ID NO: 40727 - DNA, 30 bp, Artificial Sequence
  Synthetic oligonucleotide
aaacccatctcggcgacacaagagtcagac

SEQ ID NO: 40728 - DNA, 30 bp, Artificial Sequence
  Synthetic oligonucleotide
tgggtaaattagtttgcaggaaaacgagac

SEQ ID NO: 40729 - DNA, 30 bp, Artificial Sequence
  Synthetic oligonucleotide
aaaagcacaggcctgaattgccaccgagac

SEQ ID NO: 40730 - DNA, 30 bp, Artificial Sequence
  Synthetic oligonucleotide
ccatagtaacgagggcgttgcgccggagac

SEQ ID NO: 40731 - DNA, 30 bp, Artificial Sequence
  Synthetic oligonucleotide
acggcgagtcggtcagtcttccagtgagac

SEQ ID NO: 40732 - DNA, 30 bp, Artificial Sequence
  Synthetic oligonucleotide
aagagcgccctccctaacgatgtcgacgac

SEQ ID NO: 40733 - DNA, 30 bp, Artificial Sequence
  Synthetic oligonucleotide
atgctggttgccctgctggatccgtgcgac

SEQ ID NO: 40734 - DNA, 30 bp, Artificial Sequence
  Synthetic oligonucleotide
gggcggaacatcaaacatgctatttgcgac

SEQ ID NO: 40735 - DNA, 30 bp, Artificial Sequence
  Synthetic oligonucleotide
cctaatccgtattccccagagcaaaaggac

SEQ ID NO: 40736 - DNA, 30 bp, Artificial Sequence
  Synthetic oligonucleotide
aaaggaggaaatacggtgcgtgtacaggac

SEQ ID NO: 40737 - DNA, 30 bp, Artificial Sequence
  Synthetic oligonucleotide
ggacggcaacgacaaagagccttgcaggac

SEQ ID NO: 40738 - DNA, 30 bp, Artificial Sequence
  Synthetic oligonucleotide
cggcgtgaagtgtagtgttaatgggaggac

SEQ ID NO: 40739 - DNA, 30 bp, Artificial Sequence
  Synthetic oligonucleotide
atgatcgtgacaacgtagagtgtgccggac

SEQ ID NO: 40740 - DNA, 30 bp, Artificial Sequence
  Synthetic oligonucleotide
gcgagattatgtgcaatatacaagagggac

SEQ ID NO: 40741 - DNA, 30 bp, Artificial Sequence
  Synthetic oligonucleotide
ggggtggcccagaaaatgacgaaaggggac

SEQ ID NO: 40742 - DNA, 30 bp, Artificial Sequence
  Synthetic oligonucleotide
aggcagggaaagacgacaggcaggatggac

SEQ ID NO: 40743 - DNA, 31 bp, Artificial Sequence
  Synthetic oligonucleotide
cgatcatgtggggctcgtacgacttctggac

SEQ ID NO: 40744 - DNA, 30 bp, Artificial Sequence
  Synthetic oligonucleotide
gccaagagtcgcgccggcatgagaaatgac

SEQ ID NO: 40745 - DNA, 30 bp, Artificial Sequence
  Synthetic oligonucleotide
aagggggatgtagactaggtacaatatgac

SEQ ID NO: 40746 - DNA, 30 bp, Artificial Sequence
  Synthetic oligonucleotide
agtacacgcggatcgagcatcagtgctgac

SEQ ID NO: 40747 - DNA, 30 bp, Artificial Sequence
  Synthetic oligonucleotide
tcaacggatacagcttagtcccaaagtgac

SEQ ID NO: 40748 - DNA, 30 bp, Artificial Sequence
  Synthetic oligonucleotide
ttgaggagtttacggcacttacatcgtgac

SEQ ID NO: 40749 - DNA, 30 bp, Artificial Sequence
  Synthetic oligonucleotide
cggtcgagccaaagcagacatactattgac

SEQ ID NO: 40750 - DNA, 30 bp, Artificial Sequence
  Synthetic oligonucleotide
cgcggtcctcaggtgaacgatctccaatac

SEQ ID NO: 40751 - DNA, 30 bp, Artificial Sequence
  Synthetic oligonucleotide
acgaggagtgtacggacggtaaggtaatac

SEQ ID NO: 40752 - DNA, 30 bp, Artificial Sequence
  Synthetic oligonucleotide
atgagggggtgaatatctcgagaatcatac

SEQ ID NO: 40753 - DNA, 30 bp, Artificial Sequence
  Synthetic oligonucleotide
gtttggcactgagagtgcaagaagagatac

SEQ ID NO: 40754 - DNA, 30 bp, Artificial Sequence
  Synthetic oligonucleotide
ggaaaaagcgtcagatctgcgcggcgatac

SEQ ID NO: 40755 - DNA, 30 bp, Artificial Sequence
  Synthetic oligonucleotide
gttacggggagcaaatgaataaacaactac

SEQ ID NO: 40756 - DNA, 30 bp, Artificial Sequence
  Synthetic oligonucleotide
accagagttccagaggccaatcgcgcctac

SEQ ID NO: 40757 - DNA, 30 bp, Artificial Sequence
  Synthetic oligonucleotide
gcgtacgaggtccctggaaggttgagctac

SEQ ID NO: 40758 - DNA, 30 bp, Artificial Sequence
  Synthetic oligonucleotide
cgtatgaatacagatacaacaggttgctac

SEQ ID NO: 40759 - DNA, 30 bp, Artificial Sequence
  Synthetic oligonucleotide
gacctaactgaggactagaggacgctctac

SEQ ID NO: 40760 - DNA, 30 bp, Artificial Sequence
  Synthetic oligonucleotide
tggcgattcaaactgaagttacgcgtctac

SEQ ID NO: 40761 - DNA, 30 bp, Artificial Sequence
  Synthetic oligonucleotide
gacggacgtgctcaaagtaggagagcgtac

SEQ ID NO: 40762 - DNA, 30 bp, Artificial Sequence
  Synthetic oligonucleotide
caaggtagataacagccacctagggcgtac

SEQ ID NO: 40763 - DNA, 30 bp, Artificial Sequence
  Synthetic oligonucleotide
ttaaaagaatcggggtgtccagcatcgtac

SEQ ID NO: 40764 - DNA, 30 bp, Artificial Sequence
  Synthetic oligonucleotide
caggcgaacaagttttgtaggctaatgtac

SEQ ID NO: 40765 - DNA, 30 bp, Artificial Sequence
  Synthetic oligonucleotide
aaggggcggtgcgcccaaggcaacatgtac

SEQ ID NO: 40766 - DNA, 30 bp, Artificial Sequence
  Synthetic oligonucleotide
cgctgtctggccggggctcgaatcatgtac

SEQ ID NO: 40767 - DNA, 30 bp, Artificial Sequence
  Synthetic oligonucleotide
tggtgacccgactggtgacgaggtgtgtac

SEQ ID NO: 40768 - DNA, 30 bp, Artificial Sequence
  Synthetic oligonucleotide
gacgaggtacgaacacggagtcgaaattac

SEQ ID NO: 40769 - DNA, 30 bp, Artificial Sequence
  Synthetic oligonucleotide
ggaaggcatctcatatctcgggcgacttac

SEQ ID NO: 40770 - DNA, 30 bp, Artificial Sequence
  Synthetic oligonucleotide
ccagaccataacacatgaattgtgacttac

SEQ ID NO: 40771 - DNA, 30 bp, Artificial Sequence
  Synthetic oligonucleotide
tcgggacagcgagctccactgtcagaaacc

SEQ ID NO: 40772 - DNA, 30 bp, Artificial Sequence
  Synthetic oligonucleotide
cctgccgaacagagagatggttgagaaacc

SEQ ID NO: 40773 - DNA, 30 bp, Artificial Sequence
  Synthetic oligonucleotide
gggcgagaagggagcctcattccaacaacc

SEQ ID NO: 40774 - DNA, 30 bp, Artificial Sequence
  Synthetic oligonucleotide
ggaaatgctcgcaataaagcgacgtcaacc

SEQ ID NO: 40775 - DNA, 30 bp, Artificial Sequence
  Synthetic oligonucleotide
cagggagataagtcaaggcatctttcaacc

SEQ ID NO: 40776 - DNA, 30 bp, Artificial Sequence
  Synthetic oligonucleotide
aagggcaatggttccgattgcagagacacc

SEQ ID NO: 40777 - DNA, 30 bp, Artificial Sequence
  Synthetic oligonucleotide
cccatacaattacagaaactagaagccacc

SEQ ID NO: 40778 - DNA, 30 bp, Artificial Sequence
  Synthetic oligonucleotide
aggggaaggtaacgtcctggcagagccacc

SEQ ID NO: 40779 - DNA, 30 bp, Artificial Sequence
  Synthetic oligonucleotide
aagcccttaaacaaaggaattgaaagcacc

SEQ ID NO: 40780 - DNA, 30 bp, Artificial Sequence
  Synthetic oligonucleotide
acgggagtgtggcaaacacgtgtgcgcacc

SEQ ID NO: 40781 - DNA, 30 bp, Artificial Sequence
  Synthetic oligonucleotide
cgacgccaccgtgaggacatgaattgcacc

SEQ ID NO: 40782 - DNA, 30 bp, Artificial Sequence
  Synthetic oligonucleotide
accaggtaagtagcattagatcggctcacc

SEQ ID NO: 40783 - DNA, 30 bp, Artificial Sequence
  Synthetic oligonucleotide
aggtgagctaaagctcagaagtaggtcacc

SEQ ID NO: 40784 - DNA, 30 bp, Artificial Sequence
  Synthetic oligonucleotide
cgaaggaccttgaaactaggaactaagacc

SEQ ID NO: 40785 - DNA, 30 bp, Artificial Sequence
  Synthetic oligonucleotide
agcttgatcagaaagtgcacctgtcagacc

SEQ ID NO: 40786 - DNA, 30 bp, Artificial Sequence
  Synthetic oligonucleotide
acgcaacgcaatattagaccagcgccgacc

SEQ ID NO: 40787 - DNA, 30 bp, Artificial Sequence
  Synthetic oligonucleotide
ggattggggtgcgcacagtagcgagggacc

SEQ ID NO: 40788 - DNA, 30 bp, Artificial Sequence
  Synthetic oligonucleotide
ggcaacagtgaattaggaaggcgagggacc

SEQ ID NO: 40789 - DNA, 30 bp, Artificial Sequence
  Synthetic oligonucleotide
acgtgaatcggcaagaaacgtccggggacc

SEQ ID NO: 40790 - DNA, 30 bp, Artificial Sequence
  Synthetic oligonucleotide
gtggtcatgtgacacgtgtacaattggacc

SEQ ID NO: 40791 - DNA, 30 bp, Artificial Sequence
  Synthetic oligonucleotide
accacggccatcgatcaaggagctctgacc

SEQ ID NO: 40792 - DNA, 30 bp, Artificial Sequence
  Synthetic oligonucleotide
ggggtgcacgacgtacctataaaagtgacc

SEQ ID NO: 40793 - DNA, 30 bp, Artificial Sequence
  Synthetic oligonucleotide
agtcggactacagggacaaatgtagtgacc

SEQ ID NO: 40794 - DNA, 30 bp, Artificial Sequence
  Synthetic oligonucleotide
agcagaagcatagaaaccagtaacaatacc

SEQ ID NO: 40795 - DNA, 30 bp, Artificial Sequence
  Synthetic oligonucleotide
gcgatatggcctaagtgggcgccagatacc

SEQ ID NO: 40796 - DNA, 30 bp, Artificial Sequence
  Synthetic oligonucleotide
gtgggacggggaactatgcgagtacgtacc

SEQ ID NO: 40797 - DNA, 30 bp, Artificial Sequence
  Synthetic oligonucleotide
aaaccccaaacaacacgttggaaaagcccc

SEQ ID NO: 40798 - DNA, 30 bp, Artificial Sequence
  Synthetic oligonucleotide
ggccgcaaccatgtacccagaagaggcccc

SEQ ID NO: 40799 - DNA, 30 bp, Artificial Sequence
  Synthetic oligonucleotide
agttaaggctctgaatgcccagaaaagccc

SEQ ID NO: 40800 - DNA, 30 bp, Artificial Sequence
  Synthetic oligonucleotide
tgaaaaagaaagtagggcggtaaggagccc

SEQ ID NO: 40801 - DNA, 30 bp, Artificial Sequence
  Synthetic oligonucleotide
caagaacttatacatagcattgaaaggccc

SEQ ID NO: 40802 - DNA, 30 bp, Artificial Sequence
  Synthetic oligonucleotide
gggagcgcgagaaacatcacgggtaggccc

SEQ ID NO: 40803 - DNA, 30 bp, Artificial Sequence
  Synthetic oligonucleotide
gtgggcaaaagaggactatatatgttgccc

SEQ ID NO: 40804 - DNA, 30 bp, Artificial Sequence
  Synthetic oligonucleotide
acaggtcaaacccatcaaaggcaagatccc

SEQ ID NO: 40805 - DNA, 30 bp, Artificial Sequence
  Synthetic oligonucleotide
agagccgagtatgaatggagaaaacctccc

SEQ ID NO: 40806 - DNA, 30 bp, Artificial Sequence
  Synthetic oligonucleotide
gtcgtaacacccaaagtgaagccaggtccc

SEQ ID NO: 40807 - DNA, 30 bp, Artificial Sequence
  Synthetic oligonucleotide
caagacggtgacgacaagatatcagttccc

SEQ ID NO: 40808 - DNA, 30 bp, Artificial Sequence
  Synthetic oligonucleotide
ccgaggcggaaagtactactgatccaagcc

SEQ ID NO: 40809 - DNA, 30 bp, Artificial Sequence
  Synthetic oligonucleotide
cacgtttatatagggcgaacacatcaagcc

SEQ ID NO: 40810 - DNA, 30 bp, Artificial Sequence
  Synthetic oligonucleotide
aggcaaacatgccgatcccaaaacgaagcc

SEQ ID NO: 40811 - DNA, 30 bp, Artificial Sequence
  Synthetic oligonucleotide
tcgaaggatcgttagatcgacttaacagcc

SEQ ID NO: 40812 - DNA, 30 bp, Artificial Sequence
  Synthetic oligonucleotide
tgattataagggtgcacggactgagcagcc

SEQ ID NO: 40813 - DNA, 30 bp, Artificial Sequence
  Synthetic oligonucleotide
gggccacgcaatgtaatcaaaggacgagcc

SEQ ID NO: 40814 - DNA, 30 bp, Artificial Sequence
  Synthetic oligonucleotide
ccatactgtttagttattacggagtgagcc

SEQ ID NO: 40815 - DNA, 30 bp, Artificial Sequence
  Synthetic oligonucleotide
actgtgaaacgagtatgtgtacgtatagcc

SEQ ID NO: 40816 - DNA, 30 bp, Artificial Sequence
  Synthetic oligonucleotide
gggataaaccagattagtgggtcggtagcc

SEQ ID NO: 40817 - DNA, 30 bp, Artificial Sequence
  Synthetic oligonucleotide
cgaaggccaaaacgtgtacttgtgttagcc

SEQ ID NO: 40818 - DNA, 30 bp, Artificial Sequence
  Synthetic oligonucleotide
cctaatacagcaaaggcaaggggccacgcc

SEQ ID NO: 40819 - DNA, 30 bp, Artificial Sequence
  Synthetic oligonucleotide
tggaaagcgttggacttgaaggtgcacgcc

SEQ ID NO: 40820 - DNA, 30 bp, Artificial Sequence
  Synthetic oligonucleotide
aggtaaacgaagtttcaggatcggtacgcc

SEQ ID NO: 40821 - DNA, 30 bp, Artificial Sequence
  Synthetic oligonucleotide
gtgagaaccatcgttggaacgagttccgcc

SEQ ID NO: 40822 - DNA, 30 bp, Artificial Sequence
  Synthetic oligonucleotide
aaggcgaggcaccggaatcatgtgagcgcc

SEQ ID NO: 40823 - DNA, 40 bp, Artificial Sequence
  Synthetic oligonucleotide
cctcacgcagtttatttaccggaattaccctccccgcgcc

SEQ ID NO: 40824 - DNA, 30 bp, Artificial Sequence
  Synthetic oligonucleotide
acgaaatattcctgggcaagggtaggcgcc

SEQ ID NO: 40825 - DNA, 30 bp, Artificial Sequence
  Synthetic oligonucleotide
ggtgccgtccttaaccctccgcgtgtcgcc

SEQ ID NO: 40826 - DNA, 30 bp, Artificial Sequence
  Synthetic oligonucleotide
tctcagggagaaagctgctagcggaaggcc

SEQ ID NO: 40827 - DNA, 30 bp, Artificial Sequence
  Synthetic oligonucleotide
tgagatgacccgagagtcagagcacaggcc

SEQ ID NO: 40828 - DNA, 30 bp, Artificial Sequence
  Synthetic oligonucleotide
taagggggcgccctgactatcatcacggcc

SEQ ID NO: 40829 - DNA, 30 bp, Artificial Sequence
  Synthetic oligonucleotide
cgctaagggagaagcccgtacaaaccggcc

SEQ ID NO: 40830 - DNA, 30 bp, Artificial Sequence
  Synthetic oligonucleotide
gatcaactaacgagtgagagggggagggcc

SEQ ID NO: 40831 - DNA, 30 bp, Artificial Sequence
  Synthetic oligonucleotide
gatgataactggcaacaactatggagggcc

SEQ ID NO: 40832 - DNA, 30 bp, Artificial Sequence
  Synthetic oligonucleotide
gcggtgcaaaagctaaccaaggattgggcc

SEQ ID NO: 40833 - DNA, 30 bp, Artificial Sequence
  Synthetic oligonucleotide
aagtggcctaagtgaacattgtatgtggcc

SEQ ID NO: 40834 - DNA, 30 bp, Artificial Sequence
  Synthetic oligonucleotide
cgaacatacgagcgagggcatagattggcc

SEQ ID NO: 40835 - DNA, 30 bp, Artificial Sequence
  Synthetic oligonucleotide
gattgaaaaatgtaaactccaggtgatgcc

SEQ ID NO: 40836 - DNA, 30 bp, Artificial Sequence
  Synthetic oligonucleotide
gagcccgagtacaaaacacataaaactgcc

SEQ ID NO: 40837 - DNA, 30 bp, Artificial Sequence
  Synthetic oligonucleotide
ctacgtcgaaaacgtcgatcatagaaatcc

SEQ ID NO: 40838 - DNA, 30 bp, Artificial Sequence
  Synthetic oligonucleotide
aggataagaacaatctccaccaataaatcc

SEQ ID NO: 40839 - DNA, 30 bp, Artificial Sequence
  Synthetic oligonucleotide
agccaagggaaatgtagtggagaataatcc

SEQ ID NO: 40840 - DNA, 30 bp, Artificial Sequence
  Synthetic oligonucleotide
atgagggccgggttcgagcagccgtcatcc

SEQ ID NO: 40841 - DNA, 30 bp, Artificial Sequence
  Synthetic oligonucleotide
acgtcgtatgccattttggaggagcgatcc

SEQ ID NO: 40842 - DNA, 30 bp, Artificial Sequence
  Synthetic oligonucleotide
cgaaaaaaaccatggcccatggatcactcc

SEQ ID NO: 40843 - DNA, 30 bp, Artificial Sequence
  Synthetic oligonucleotide
caggaagttgaactcgctagtcgtgactcc

SEQ ID NO: 40844 - DNA, 30 bp, Artificial Sequence
  Synthetic oligonucleotide
cgagaactcatgattacgttggttgcctcc

SEQ ID NO: 40845 - DNA, 30 bp, Artificial Sequence
  Synthetic oligonucleotide
gggctcgcctggaggacggaaaatatctcc

SEQ ID NO: 40846 - DNA, 30 bp, Artificial Sequence
  Synthetic oligonucleotide
aatgagaacagatggaattgcactaagtcc

SEQ ID NO: 40847 - DNA, 30 bp, Artificial Sequence
  Synthetic oligonucleotide
gtggggcacaacctctcacattactagtcc

SEQ ID NO: 40848 - DNA, 30 bp, Artificial Sequence
  Synthetic oligonucleotide
tagggggggaagccactggatataccgtcc

SEQ ID NO: 40849 - DNA, 27 bp, Artificial Sequence
  Synthetic oligonucleotide
ccaaggatagagacatcgagtccgtcc

SEQ ID NO: 40850 - DNA, 30 bp, Artificial Sequence
  Synthetic oligonucleotide
ctcggacaggcggaatagtgatgttcgtcc

SEQ ID NO: 40851 - DNA, 30 bp, Artificial Sequence
  Synthetic oligonucleotide
gggaggaactcagactgtaagacgttgtcc

SEQ ID NO: 40852 - DNA, 29 bp, Artificial Sequence
  Synthetic oligonucleotide
aggaggtgggggcttatgcaacaaattcc

SEQ ID NO: 40853 - DNA, 30 bp, Artificial Sequence
  Synthetic oligonucleotide
cgacaacagggggtccacataatccgttcc

SEQ ID NO: 40854 - DNA, 30 bp, Artificial Sequence
  Synthetic oligonucleotide
caggaccctagggatacagatcacatttcc

SEQ ID NO: 40855 - DNA, 30 bp, Artificial Sequence
  Synthetic oligonucleotide
taaaaaagagatcaccaacttccgaaaagc

SEQ ID NO: 40856 - DNA, 30 bp, Artificial Sequence
  Synthetic oligonucleotide
atgaattgtcaagaactgcgagcgaaaagc

SEQ ID NO: 40857 - DNA, 30 bp, Artificial Sequence
  Synthetic oligonucleotide
actagcaggcgtcccgaagtctgtaaaagc

SEQ ID NO: 40858 - DNA, 30 bp, Artificial Sequence
  Synthetic oligonucleotide
atggggagttgaccggcgccgtcccaaagc

SEQ ID NO: 40859 - DNA, 30 bp, Artificial Sequence
  Synthetic oligonucleotide
ctgagaccagaggaaatgtacatgcaaagc

SEQ ID NO: 40860 - DNA, 30 bp, Artificial Sequence
  Synthetic oligonucleotide
ctacaagatatgagggatcaggaagaaagc

SEQ ID NO: 40861 - DNA, 30 bp, Artificial Sequence
  Synthetic oligonucleotide
gtgataccgtgcaacaattaaccaccaagc

SEQ ID NO: 40862 - DNA, 30 bp, Artificial Sequence
  Synthetic oligonucleotide
cggggtgaacggtcaggtcgtcttccaagc

SEQ ID NO: 40863 - DNA, 30 bp, Artificial Sequence
  Synthetic oligonucleotide
aagggaaagtttaggatccgaacaggaagc

SEQ ID NO: 40864 - DNA, 30 bp, Artificial Sequence
  Synthetic oligonucleotide
ggagctaatgagtgaccgaagaatggaagc

SEQ ID NO: 40865 - DNA, 30 bp, Artificial Sequence
  Synthetic oligonucleotide
tcacgtgggatgggagggctcccatgaagc

SEQ ID NO: 40866 - DNA, 30 bp, Artificial Sequence
  Synthetic oligonucleotide
cgtacataaactaaacaggtcgaaataagc

SEQ ID NO: 40867 - DNA, 30 bp, Artificial Sequence
  Synthetic oligonucleotide
ttgcggtgaacttgtagtaagccagtaagc

SEQ ID NO: 40868 - DNA, 30 bp, Artificial Sequence
  Synthetic oligonucleotide
cacggccagcgataaggccaacatgtaagc

SEQ ID NO: 40869 - DNA, 30 bp, Artificial Sequence
  Synthetic oligonucleotide
gagagggaactgctattttgtgagttaagc

SEQ ID NO: 40870 - DNA, 30 bp, Artificial Sequence
  Synthetic oligonucleotide
ccaaacagcacgaagtggttagtaaacagc

SEQ ID NO: 40871 - DNA, 30 bp, Artificial Sequence
  Synthetic oligonucleotide
aaagagcgattattgtctcccaatcacagc

SEQ ID NO: 40872 - DNA, 31 bp, Artificial Sequence
  Synthetic oligonucleotide
acctaggacataagtacgcgaatcggacagc

SEQ ID NO: 40873 - DNA, 30 bp, Artificial Sequence
  Synthetic oligonucleotide
gtaaacggatgaatcagtccgaactacagc

SEQ ID NO: 40874 - DNA, 30 bp, Artificial Sequence
  Synthetic oligonucleotide
agatcctaatgaataccttgaaagtccagc

SEQ ID NO: 40875 - DNA, 30 bp, Artificial Sequence
  Synthetic oligonucleotide
caaagacaaatcaggatcacgagtcgcagc

SEQ ID NO: 40876 - DNA, 30 bp, Artificial Sequence
  Synthetic oligonucleotide
ggacaagagcataaattacgggtaatcagc

SEQ ID NO: 40877 - DNA, 30 bp, Artificial Sequence
  Synthetic oligonucleotide
tcagggtactagtgacaaattcatatcagc

SEQ ID NO: 40878 - DNA, 30 bp, Artificial Sequence
  Synthetic oligonucleotide
tataaggtaaggggacaaggtgaagtcagc

SEQ ID NO: 40879 - DNA, 30 bp, Artificial Sequence
  Synthetic oligonucleotide
caatatatgaatgggtcagcgggcaagagc

SEQ ID NO: 40880 - DNA, 30 bp, Artificial Sequence
  Synthetic oligonucleotide
tcataagggtggtgttagggcaagcagagc

SEQ ID NO: 40881 - DNA, 30 bp, Artificial Sequence
  Synthetic oligonucleotide
cggaaataccagggcctacccgtaacgagc

SEQ ID NO: 40882 - DNA, 30 bp, Artificial Sequence
  Synthetic oligonucleotide
atgaccgttccagacccgttaagcacgagc

SEQ ID NO: 40883 - DNA, 30 bp, Artificial Sequence
  Synthetic oligonucleotide
atcgagtacacgccccaacgcaaaccgagc

SEQ ID NO: 40884 - DNA, 30 bp, Artificial Sequence
  Synthetic oligonucleotide
tcgagagcgtgtttcccgttaatcaggagc

SEQ ID NO: 40885 - DNA, 30 bp, Artificial Sequence
  Synthetic oligonucleotide
actaccaggcaagtaacgttcagaatgagc

SEQ ID NO: 40886 - DNA, 30 bp, Artificial Sequence
  Synthetic oligonucleotide
ttctgcggcccaccgaatcaaccactgagc

SEQ ID NO: 40887 - DNA, 30 bp, Artificial Sequence
  Synthetic oligonucleotide
cagatcaggggcgtataatgcgtagtgagc

SEQ ID NO: 40888 - DNA, 30 bp, Artificial Sequence
  Synthetic oligonucleotide
tgctcgagtaggagggaataactggtgagc

SEQ ID NO: 40889 - DNA, 30 bp, Artificial Sequence
  Synthetic oligonucleotide
gtctcgacaagagtggataaatagaatagc

SEQ ID NO: 40890 - DNA, 30 bp, Artificial Sequence
  Synthetic oligonucleotide
gcatcgcaattcaaatagggcagtaatagc

SEQ ID NO: 40891 - DNA, 30 bp, Artificial Sequence
  Synthetic oligonucleotide
gcttcctggaggtggtcaaggaaacatagc

SEQ ID NO: 40892 - DNA, 30 bp, Artificial Sequence
  Synthetic oligonucleotide
gaagtcatgttcgcggtccggtacgatagc

SEQ ID NO: 40893 - DNA, 30 bp, Artificial Sequence
  Synthetic oligonucleotide
acggtacacgccaacgacagaattgctagc

SEQ ID NO: 40894 - DNA, 30 bp, Artificial Sequence
  Synthetic oligonucleotide
acaataggacaaaccaatcacgcgggtagc

SEQ ID NO: 40895 - DNA, 30 bp, Artificial Sequence
  Synthetic oligonucleotide
cgacaaatctacgggcctacgggcattagc

SEQ ID NO: 40896 - DNA, 30 bp, Artificial Sequence
  Synthetic oligonucleotide
ggataggagtttggggaagtcgatattagc

SEQ ID NO: 40897 - DNA, 30 bp, Artificial Sequence
  Synthetic oligonucleotide
acgactagtaggacggcctgcaaccttagc

SEQ ID NO: 40898 - DNA, 30 bp, Artificial Sequence
  Synthetic oligonucleotide
tgaggaacccagcgggacagggtacaacgc

SEQ ID NO: 40899 - DNA, 30 bp, Artificial Sequence
  Synthetic oligonucleotide
tctcatgcatagccccaaaaagactaacgc

SEQ ID NO: 40900 - DNA, 30 bp, Artificial Sequence
  Synthetic oligonucleotide
aggggacaaagtgttagtttgacctcacgc

SEQ ID NO: 40901 - DNA, 30 bp, Artificial Sequence
  Synthetic oligonucleotide
actcgatggcacaaaatatcgttctcacgc

SEQ ID NO: 40902 - DNA, 30 bp, Artificial Sequence
  Synthetic oligonucleotide
gcgtcgtagataccaatgatcggagtacgc

SEQ ID NO: 40903 - DNA, 31 bp, Artificial Sequence
  Synthetic oligonucleotide
aaccgttactaatgaggtcgaggaccaccgc

SEQ ID NO: 40904 - DNA, 30 bp, Artificial Sequence
  Synthetic oligonucleotide
cgagagtggagaaaaagtaaaaatccccgc

SEQ ID NO: 40905 - DNA, 30 bp, Artificial Sequence
  Synthetic oligonucleotide
tgtcgagtgtgccgacagatacaccgccgc

SEQ ID NO: 40906 - DNA, 30 bp, Artificial Sequence
  Synthetic oligonucleotide
agacgaaggcttcagggtgatcagggccgc

SEQ ID NO: 40907 - DNA, 30 bp, Artificial Sequence
  Synthetic oligonucleotide
aacgagggggtgaattgcacacgacagcgc

SEQ ID NO: 40908 - DNA, 30 bp, Artificial Sequence
  Synthetic oligonucleotide
taatgggagtcagagttcattaatcagcgc

SEQ ID NO: 40909 - DNA, 30 bp, Artificial Sequence
  Synthetic oligonucleotide
cgtaaataaactcgggatctacacgagcgc

SEQ ID NO: 40910 - DNA, 30 bp, Artificial Sequence
  Synthetic oligonucleotide
tcaagagggcactgacagggcgtagcgcgc

SEQ ID NO: 40911 - DNA, 30 bp, Artificial Sequence
  Synthetic oligonucleotide
gcgggacgggggtctcattaggctgcgcgc

SEQ ID NO: 40912 - DNA, 30 bp, Artificial Sequence
  Synthetic oligonucleotide
agtagttggagccgcaagagaaccaggcgc

SEQ ID NO: 40913 - DNA, 30 bp, Artificial Sequence
  Synthetic oligonucleotide
agggctttaggctgaaagcgaagtcggcgc

SEQ ID NO: 40914 - DNA, 30 bp, Artificial Sequence
  Synthetic oligonucleotide
tgatacgcgtcacacttagggagtatgcgc

SEQ ID NO: 40915 - DNA, 30 bp, Artificial Sequence
  Synthetic oligonucleotide
cgagcatgtgcgagatacaggacaaatcgc

SEQ ID NO: 40916 - DNA, 30 bp, Artificial Sequence
  Synthetic oligonucleotide
ccgtcgagatctagcccaactccggctcgc

SEQ ID NO: 40917 - DNA, 30 bp, Artificial Sequence
  Synthetic oligonucleotide
tcatgcgccgtgggaagaaggttggctcgc

SEQ ID NO: 40918 - DNA, 30 bp, Artificial Sequence
  Synthetic oligonucleotide
ataccgcaatacgtaagctccatctctcgc

SEQ ID NO: 40919 - DNA, 30 bp, Artificial Sequence
  Synthetic oligonucleotide
tgatcagaatgtggtgtaatccgccgtcgc

SEQ ID NO: 40920 - DNA, 30 bp, Artificial Sequence
  Synthetic oligonucleotide
gaggtgtaccgtgcatccaaggtgggtcgc

SEQ ID NO: 40921 - DNA, 30 bp, Artificial Sequence
  Synthetic oligonucleotide
ttgcaggccgaaaccagaaactcgtgtcgc

SEQ ID NO: 40922 - DNA, 30 bp, Artificial Sequence
  Synthetic oligonucleotide
atgcaaatctacaagccgaccacgcttcgc

SEQ ID NO: 40923 - DNA, 30 bp, Artificial Sequence
  Synthetic oligonucleotide
aaaaggagcaacaaaaccatttatcttcgc

SEQ ID NO: 40924 - DNA, 30 bp, Artificial Sequence
  Synthetic oligonucleotide
aaggcaatggcatcatgggtagtgacaggc

SEQ ID NO: 40925 - DNA, 30 bp, Artificial Sequence
  Synthetic oligonucleotide
cggggtcgtacgtgagtcggtcgcccaggc

SEQ ID NO: 40926 - DNA, 30 bp, Artificial Sequence
  Synthetic oligonucleotide
cctatgtagtgaagtacgagtctcataggc

SEQ ID NO: 40927 - DNA, 30 bp, Artificial Sequence
  Synthetic oligonucleotide
cgtaaagtggctttaaataggattgtaggc

SEQ ID NO: 40928 - DNA, 30 bp, Artificial Sequence
  Synthetic oligonucleotide
ggacataaatcaggaagacaatttggcggc

SEQ ID NO: 40929 - DNA, 30 bp, Artificial Sequence
  Synthetic oligonucleotide
agtgcacatgtattctgaaggaccatcggc

SEQ ID NO: 40930 - DNA, 30 bp, Artificial Sequence
  Synthetic oligonucleotide
gacgcgggggaattcacggatatgctcggc

SEQ ID NO: 40931 - DNA, 30 bp, Artificial Sequence
  Synthetic oligonucleotide
aggctgaggagacgcgacccctatttcggc

SEQ ID NO: 40932 - DNA, 30 bp, Artificial Sequence
  Synthetic oligonucleotide
acgaacagtcggtagtctaaggtcaagggc

SEQ ID NO: 40933 - DNA, 30 bp, Artificial Sequence
  Synthetic oligonucleotide
tgcggaataaagctactaagtgcagagggc

SEQ ID NO: 40934 - DNA, 30 bp, Artificial Sequence
  Synthetic oligonucleotide
ccgactagattgtagatagatcatgagggc

SEQ ID NO: 40935 - DNA, 30 bp, Artificial Sequence
  Synthetic oligonucleotide
ttgagaggacaacatagaagttatccgggc

SEQ ID NO: 40936 - DNA, 30 bp, Artificial Sequence
  Synthetic oligonucleotide
gaaacaacgcacaacatgtaccggtggggc

SEQ ID NO: 40937 - DNA, 30 bp, Artificial Sequence
  Synthetic oligonucleotide
gcgactgcaaccggggctaagacttggggc

SEQ ID NO: 40938 - DNA, 30 bp, Artificial Sequence
  Synthetic oligonucleotide
gtctaagcgggacaactaccgagacatggc

SEQ ID NO: 40939 - DNA, 30 bp, Artificial Sequence
  Synthetic oligonucleotide
gacacataagatactcaaagaaaaactggc

SEQ ID NO: 40940 - DNA, 30 bp, Artificial Sequence
  Synthetic oligonucleotide
tgccgaggatccctgttcgagaatgctggc

SEQ ID NO: 40941 - DNA, 30 bp, Artificial Sequence
  Synthetic oligonucleotide
ttctgcacctcccgagaatcgcaatctggc

SEQ ID NO: 40942 - DNA, 30 bp, Artificial Sequence
  Synthetic oligonucleotide
tgtgacgaaatgttgacctagggaagtggc

SEQ ID NO: 40943 - DNA, 30 bp, Artificial Sequence
  Synthetic oligonucleotide
cgcgaggcccccagattataatagagtggc

SEQ ID NO: 40944 - DNA, 30 bp, Artificial Sequence
  Synthetic oligonucleotide
agggttgcatgacgaccgataggctgtggc

SEQ ID NO: 40945 - DNA, 30 bp, Artificial Sequence
  Synthetic oligonucleotide
agctcaatgagcaggagtgcgtctgaatgc

SEQ ID NO: 40946 - DNA, 30 bp, Artificial Sequence
  Synthetic oligonucleotide
tcactcacacaaccggtacagagcccatgc

SEQ ID NO: 40947 - DNA, 30 bp, Artificial Sequence
  Synthetic oligonucleotide
gtcccaagcacaaagcgaagacaccgatgc

SEQ ID NO: 40948 - DNA, 30 bp, Artificial Sequence
  Synthetic oligonucleotide
aaaggattagacaccaagaaaggcatatgc

SEQ ID NO: 40949 - DNA, 30 bp, Artificial Sequence
  Synthetic oligonucleotide
caaagcggctggcgcggagaagatatatgc

SEQ ID NO: 40950 - DNA, 30 bp, Artificial Sequence
  Synthetic oligonucleotide
acgggtgaaggggttctgcaccgtaactgc

SEQ ID NO: 40951 - DNA, 30 bp, Artificial Sequence
  Synthetic oligonucleotide
ggacgaggaattagcaattcccaagcctgc

SEQ ID NO: 40952 - DNA, 30 bp, Artificial Sequence
  Synthetic oligonucleotide
gactcgcaatgtatatgaggagagagctgc

SEQ ID NO: 40953 - DNA, 30 bp, Artificial Sequence
  Synthetic oligonucleotide
acagtaatcagggcagtgcgagtgtgctgc

SEQ ID NO: 40954 - DNA, 30 bp, Artificial Sequence
  Synthetic oligonucleotide
aaggggcgaccccgggtacaatgaatctgc

SEQ ID NO: 40955 - DNA, 30 bp, Artificial Sequence
  Synthetic oligonucleotide
cggatgtagcgttgtgttaactctaagtgc

SEQ ID NO: 40956 - DNA, 30 bp, Artificial Sequence
  Synthetic oligonucleotide
gctggagcgcagaacaaggggggaacgtgc

SEQ ID NO: 40957 - DNA, 30 bp, Artificial Sequence
  Synthetic oligonucleotide
gctaaagcgcaacggtgatcgacgacgtgc

SEQ ID NO: 40958 - DNA, 30 bp, Artificial Sequence
  Synthetic oligonucleotide
agatgtgcaaacagaggttaccggaggtgc

SEQ ID NO: 40959 - DNA, 30 bp, Artificial Sequence
  Synthetic oligonucleotide
tcatgaaccgagaaacgtaataggcggtgc

SEQ ID NO: 40960 - DNA, 30 bp, Artificial Sequence
  Synthetic oligonucleotide
cggcgatagtgtcatgcgggctagatgtgc

SEQ ID NO: 40961 - DNA, 30 bp, Artificial Sequence
  Synthetic oligonucleotide
ccgggcgtaatgaacactgtcaaggtgtgc

SEQ ID NO: 40962 - DNA, 30 bp, Artificial Sequence
  Synthetic oligonucleotide
cggcattacacggatactcaattggtgtgc

SEQ ID NO: 40963 - DNA, 30 bp, Artificial Sequence
  Synthetic oligonucleotide
ataagtgaaaacggtgtaacgagtaattgc

SEQ ID NO: 40964 - DNA, 30 bp, Artificial Sequence
  Synthetic oligonucleotide
tgagtcgagtgaaacgaggactgagattgc

SEQ ID NO: 40965 - DNA, 30 bp, Artificial Sequence
  Synthetic oligonucleotide
gcagatggctcaccaggcaccaatgattgc

SEQ ID NO: 40966 - DNA, 30 bp, Artificial Sequence
  Synthetic oligonucleotide
aggtcggaccaaaatgatgtaacgtattgc

SEQ ID NO: 40967 - DNA, 30 bp, Artificial Sequence
  Synthetic oligonucleotide
cgagtgcgggactaggtagcactgtcttgc

SEQ ID NO: 40968 - DNA, 30 bp, Artificial Sequence
  Synthetic oligonucleotide
actcgaatgttagcaaagatcgaaagttgc

SEQ ID NO: 40969 - DNA, 30 bp, Artificial Sequence
  Synthetic oligonucleotide
gtaggtttgaccgaagaggatgagtgttgc

SEQ ID NO: 40970 - DNA, 30 bp, Artificial Sequence
  Synthetic oligonucleotide
ggtaggacggtacaacgtgtgcaaaaaatc

SEQ ID NO: 40971 - DNA, 30 bp, Artificial Sequence
  Synthetic oligonucleotide
ggtgaacctaaacctcaggcacgaaaaatc

SEQ ID NO: 40972 - DNA, 30 bp, Artificial Sequence
  Synthetic oligonucleotide
gacatgaggtgccacgcaagctaggaaatc

SEQ ID NO: 40973 - DNA, 30 bp, Artificial Sequence
  Synthetic oligonucleotide
tgggtacgcgggaccccgtcaactgaaatc

SEQ ID NO: 40974 - DNA, 30 bp, Artificial Sequence
  Synthetic oligonucleotide
cccagaaaggcaatgtcaccgagagcaatc

SEQ ID NO: 40975 - DNA, 30 bp, Artificial Sequence
  Synthetic oligonucleotide
cgaggctcatgctgagttggtgggtcaatc

SEQ ID NO: 40976 - DNA, 30 bp, Artificial Sequence
  Synthetic oligonucleotide
tatgaccctcgagcaagatgccaccgaatc

SEQ ID NO: 40977 - DNA, 30 bp, Artificial Sequence
  Synthetic oligonucleotide
cagatcacatttatgaagtaggaccgaatc

SEQ ID NO: 40978 - DNA, 30 bp, Artificial Sequence
  Synthetic oligonucleotide
atggtggatttcaacgccgtgccccgaatc

SEQ ID NO: 40979 - DNA, 30 bp, Artificial Sequence
  Synthetic oligonucleotide
ctggaaacgtggttatcgtctggtggaatc

SEQ ID NO: 40980 - DNA, 30 bp, Artificial Sequence
  Synthetic oligonucleotide
tgacagaataccatcgcagattagataatc

SEQ ID NO: 40981 - DNA, 30 bp, Artificial Sequence
  Synthetic oligonucleotide
aacggtaaatgcggagacgtggcgctaatc

SEQ ID NO: 40982 - DNA, 30 bp, Artificial Sequence
  Synthetic oligonucleotide
gcatgaggacagaccggtcataaagtaatc

SEQ ID NO: 40983 - DNA, 30 bp, Artificial Sequence
  Synthetic oligonucleotide
atcacgtgaacccaataggataccaacatc

SEQ ID NO: 40984 - DNA, 30 bp, Artificial Sequence
  Synthetic oligonucleotide
ggtgaggggagcgtgtagttatacatcatc

SEQ ID NO: 40985 - DNA, 30 bp, Artificial Sequence
  Synthetic oligonucleotide
ccattcggttaacactacactggtctcatc

SEQ ID NO: 40986 - DNA, 30 bp, Artificial Sequence
  Synthetic oligonucleotide
cgcgaacccgcaaaatctcaaatggtcatc

SEQ ID NO: 40987 - DNA, 30 bp, Artificial Sequence
  Synthetic oligonucleotide
ggcataaaggtgcctgcctgcgagttcatc

SEQ ID NO: 40988 - DNA, 30 bp, Artificial Sequence
  Synthetic oligonucleotide
ggtggtgaacgtaacacatttcaggagatc

SEQ ID NO: 40989 - DNA, 30 bp, Artificial Sequence
  Synthetic oligonucleotide
agaaaaataggatggccacacccctagatc

SEQ ID NO: 40990 - DNA, 30 bp, Artificial Sequence
  Synthetic oligonucleotide
agtgaggacatataatatcgtctctagatc

SEQ ID NO: 40991 - DNA, 30 bp, Artificial Sequence
  Synthetic oligonucleotide
tggccaccgccagctccgcaagcaacgatc

SEQ ID NO: 40992 - DNA, 30 bp, Artificial Sequence
  Synthetic oligonucleotide
agcccaaatcgggccacatctcggtcgatc

SEQ ID NO: 40993 - DNA, 30 bp, Artificial Sequence
  Synthetic oligonucleotide
ctacgtttgaacatgaagagtgggtcgatc

SEQ ID NO: 40994 - DNA, 30 bp, Artificial Sequence
  Synthetic oligonucleotide
ctaactagacgagtgatatatcagctgatc

SEQ ID NO: 40995 - DNA, 30 bp, Artificial Sequence
  Synthetic oligonucleotide
acgttaaatagttgtcccgagtagctgatc

SEQ ID NO: 40996 - DNA, 30 bp, Artificial Sequence
  Synthetic oligonucleotide
tgggcgggccgtcgcaactagtgagtgatc

SEQ ID NO: 40997 - DNA, 30 bp, Artificial Sequence
  Synthetic oligonucleotide
ccataaagcgtactgtcccgccaaactatc

SEQ ID NO: 40998 - DNA, 30 bp, Artificial Sequence
  Synthetic oligonucleotide
acgcgagaacgtggtaagagtagtggtatc

SEQ ID NO: 40999 - DNA, 30 bp, Artificial Sequence
  Synthetic oligonucleotide
ccactgaaaggtattagtagtagagaactc

SEQ ID NO: 41000 - DNA, 30 bp, Artificial Sequence
  Synthetic oligonucleotide
ggaacggcaaatttcactcacataagactc

SEQ ID NO: 41001 - DNA, 30 bp, Artificial Sequence
  Synthetic oligonucleotide
cactgacctaacgtgacggtggagggactc

SEQ ID NO: 41002 - DNA, 30 bp, Artificial Sequence
  Synthetic oligonucleotide
acgtaggcgaccttcttaatgctaaacctc

SEQ ID NO: 41003 - DNA, 30 bp, Artificial Sequence
  Synthetic oligonucleotide
tgcacgtagtgaccgaatgcaatagacctc

SEQ ID NO: 41004 - DNA, 30 bp, Artificial Sequence
  Synthetic oligonucleotide
taagaccatgggaactcggcacccacgctc

SEQ ID NO: 41005 - DNA, 30 bp, Artificial Sequence
  Synthetic oligonucleotide
gccacttaacgggcaagaaaaagcacgctc

SEQ ID NO: 41006 - DNA, 30 bp, Artificial Sequence
  Synthetic oligonucleotide
actattcacagaggaggaattagcacgctc

SEQ ID NO: 41007 - DNA, 30 bp, Artificial Sequence
  Synthetic oligonucleotide
ggtaggtgcctgaggacaaagccaaggctc

SEQ ID NO: 41008 - DNA, 30 bp, Artificial Sequence
  Synthetic oligonucleotide
ggcgaggtcgataactactgacaagggctc

SEQ ID NO: 41009 - DNA, 30 bp, Artificial Sequence
  Synthetic oligonucleotide
acgacagtaggagatgggttgcataatctc

SEQ ID NO: 41010 - DNA, 30 bp, Artificial Sequence
  Synthetic oligonucleotide
tggaaaaaagaaatgaaaaggagcgatctc

SEQ ID NO: 41011 - DNA, 31 bp, Artificial Sequence
  Synthetic oligonucleotide
cacggacaacgggtcgattacgtggggtctc

SEQ ID NO: 41012 - DNA, 30 bp, Artificial Sequence
  Synthetic oligonucleotide
tggtggcgtagcggaaatataacggaagtc

SEQ ID NO: 41013 - DNA, 30 bp, Artificial Sequence
  Synthetic oligonucleotide
gggtaggagaccgaggctgagtgcagagtc

SEQ ID NO: 41014 - DNA, 30 bp, Artificial Sequence
  Synthetic oligonucleotide
gcttacgaactgagctgctacttccgagtc

SEQ ID NO: 41015 - DNA, 30 bp, Artificial Sequence
  Synthetic oligonucleotide
acagcattataagctgcagggaacaacgtc

SEQ ID NO: 41016 - DNA, 30 bp, Artificial Sequence
  Synthetic oligonucleotide
atcgagggacacatgcactagcctcacgtc

SEQ ID NO: 41017 - DNA, 30 bp, Artificial Sequence
  Synthetic oligonucleotide
tcgtcagctaatagtccacagcgcaccgtc

SEQ ID NO: 41018 - DNA, 30 bp, Artificial Sequence
  Synthetic oligonucleotide
agggtaaataatgcgttgggtcgtcccgtc

SEQ ID NO: 41019 - DNA, 30 bp, Artificial Sequence
  Synthetic oligonucleotide
tggaacttgactacgccaacaaccgccgtc

SEQ ID NO: 41020 - DNA, 30 bp, Artificial Sequence
  Synthetic oligonucleotide
taccaccgactgcccgacacgagctccgtc

SEQ ID NO: 41021 - DNA, 30 bp, Artificial Sequence
  Synthetic oligonucleotide
gtgaggagggaacataaccggtccagcgtc

SEQ ID NO: 41022 - DNA, 30 bp, Artificial Sequence
  Synthetic oligonucleotide
agagccggaaagtagggatttaataaggtc

SEQ ID NO: 41023 - DNA, 30 bp, Artificial Sequence
  Synthetic oligonucleotide
gcaaccaaataacaagtttagtataaggtc

SEQ ID NO: 41024 - DNA, 30 bp, Artificial Sequence
  Synthetic oligonucleotide
ggcccatcttaagagagagatcaagaggtc

SEQ ID NO: 41025 - DNA, 30 bp, Artificial Sequence
  Synthetic oligonucleotide
taagagcatcaagatcagaatcccgaggtc

SEQ ID NO: 41026 - DNA, 30 bp, Artificial Sequence
  Synthetic oligonucleotide
agaaggaaagggggagttacatggagggtc

SEQ ID NO: 41027 - DNA, 30 bp, Artificial Sequence
  Synthetic oligonucleotide
caaggactgtgcttattatctcggaatgtc

SEQ ID NO: 41028 - DNA, 30 bp, Artificial Sequence
  Synthetic oligonucleotide
gaggcattactaacgttcgcccagactgtc

SEQ ID NO: 41029 - DNA, 30 bp, Artificial Sequence
  Synthetic oligonucleotide
tggttaggcttacatgacgaatcgcctgtc

SEQ ID NO: 41030 - DNA, 30 bp, Artificial Sequence
  Synthetic oligonucleotide
cgcttaccaaaaaaagacatacgtggtgtc

SEQ ID NO: 41031 - DNA, 30 bp, Artificial Sequence
  Synthetic oligonucleotide
gtccgtatgccgtacttgcgagaaattgtc

SEQ ID NO: 41032 - DNA, 30 bp, Artificial Sequence
  Synthetic oligonucleotide
cggtactgaaaggatccgagatgtattgtc

SEQ ID NO: 41033 - DNA, 30 bp, Artificial Sequence
  Synthetic oligonucleotide
cagaccgtgatagaagttgggtatagattc

SEQ ID NO: 41034 - DNA, 30 bp, Artificial Sequence
  Synthetic oligonucleotide
gcgtcaaagaagagcgtctaaaaccgattc

SEQ ID NO: 41035 - DNA, 30 bp, Artificial Sequence
  Synthetic oligonucleotide
cgttgcgagaggacaggtgcagcgcgattc

SEQ ID NO: 41036 - DNA, 30 bp, Artificial Sequence
  Synthetic oligonucleotide
gctcatgcggcaagggcggaagagtgattc

SEQ ID NO: 41037 - DNA, 30 bp, Artificial Sequence
  Synthetic oligonucleotide
caagatccgagacactgaccacaaatattc

SEQ ID NO: 41038 - DNA, 30 bp, Artificial Sequence
  Synthetic oligonucleotide
ccgagggtagttgctttggagctctgcttc

SEQ ID NO: 41039 - DNA, 30 bp, Artificial Sequence
  Synthetic oligonucleotide
aggggagtttacgacatgtaggaagtcttc

SEQ ID NO: 41040 - DNA, 30 bp, Artificial Sequence
  Synthetic oligonucleotide
ggtaagcctgagaggccagaagcagtcttc

SEQ ID NO: 41041 - DNA, 30 bp, Artificial Sequence
  Synthetic oligonucleotide
caacagccatatgaactgcgagctgtcttc

SEQ ID NO: 41042 - DNA, 30 bp, Artificial Sequence
  Synthetic oligonucleotide
tgattatcgtcaatgccatcaaggttcttc

SEQ ID NO: 41043 - DNA, 30 bp, Artificial Sequence
  Synthetic oligonucleotide
ccgtcaggggtacaatttgcagtagagttc

SEQ ID NO: 41044 - DNA, 30 bp, Artificial Sequence
  Synthetic oligonucleotide
cgacaccaagtagtcaaatctggatagttc

SEQ ID NO: 41045 - DNA, 30 bp, Artificial Sequence
  Synthetic oligonucleotide
acacatagcgcctaggagcgggtaacgttc

SEQ ID NO: 41046 - DNA, 30 bp, Artificial Sequence
  Synthetic oligonucleotide
tcaacggaggtacctcttcaatatgcgttc

SEQ ID NO: 41047 - DNA, 31 bp, Artificial Sequence
  Synthetic oligonucleotide
actctgaacaggaggaaatagcgggtcgttc

SEQ ID NO: 41048 - DNA, 30 bp, Artificial Sequence
  Synthetic oligonucleotide
tagcaaaggcaagggttagcacttaggttc

SEQ ID NO: 41049 - DNA, 30 bp, Artificial Sequence
  Synthetic oligonucleotide
acacagtaagcgaggggatataggctgttc

SEQ ID NO: 41050 - DNA, 30 bp, Artificial Sequence
  Synthetic oligonucleotide
ggataacaagatcaaccaacgcatgtgttc

SEQ ID NO: 41051 - DNA, 30 bp, Artificial Sequence
  Synthetic oligonucleotide
cgatacaggcaagctgtactctggcgtttc

SEQ ID NO: 41052 - DNA, 30 bp, Artificial Sequence
  Synthetic oligonucleotide
tcatcgtcctacgggagacaggcgtgtttc

SEQ ID NO: 41053 - DNA, 30 bp, Artificial Sequence
  Synthetic oligonucleotide
gacgcggttcagatcaccattgcaaaaaag

SEQ ID NO: 41054 - DNA, 30 bp, Artificial Sequence
  Synthetic oligonucleotide
actcgagattggcgtaaggatctgaaaaag

SEQ ID NO: 41055 - DNA, 30 bp, Artificial Sequence
  Synthetic oligonucleotide
tctacgatgaggtgatgcgccacgcaaaag

SEQ ID NO: 41056 - DNA, 30 bp, Artificial Sequence
  Synthetic oligonucleotide
caaaggtagcaaatcaccaatagtgaaaag

SEQ ID NO: 41057 - DNA, 30 bp, Artificial Sequence
  Synthetic oligonucleotide
tgaagaatcgactaaccgtatcactaaaag

SEQ ID NO: 41058 - DNA, 30 bp, Artificial Sequence
  Synthetic oligonucleotide
gttggtgagttgctccgaaattgaacaaag

SEQ ID NO: 41059 - DNA, 30 bp, Artificial Sequence
  Synthetic oligonucleotide
agataggtatcaggcggtgcatcgacaaag

SEQ ID NO: 41060 - DNA, 30 bp, Artificial Sequence
  Synthetic oligonucleotide
tacacagcgacagaagaaagggatacaaag

SEQ ID NO: 41061 - DNA, 30 bp, Artificial Sequence
  Synthetic oligonucleotide
gaacagaaggatgctgaagattaaccaaag

SEQ ID NO: 41062 - DNA, 30 bp, Artificial Sequence
  Synthetic oligonucleotide
tcgagatcttgaaagttcgctggaccaaag

SEQ ID NO: 41063 - DNA, 30 bp, Artificial Sequence
  Synthetic oligonucleotide
gtcacaatgatgaccctagcaggcagaaag

SEQ ID NO: 41064 - DNA, 30 bp, Artificial Sequence
  Synthetic oligonucleotide
tgctatacagtccatccggtagggcgaaag

SEQ ID NO: 41065 - DNA, 30 bp, Artificial Sequence
  Synthetic oligonucleotide
cgggcaaattacgactgaactaaaggaaag

SEQ ID NO: 41066 - DNA, 30 bp, Artificial Sequence
  Synthetic oligonucleotide
aaagacagcacccttagaatctgcggaaag

SEQ ID NO: 41067 - DNA, 31 bp, Artificial Sequence
  Synthetic oligonucleotide
gcaaccacccaagtaccagagtacgggaaag

SEQ ID NO: 41068 - DNA, 30 bp, Artificial Sequence
  Synthetic oligonucleotide
agtacgaaggcgccataggtaaagtgaaag

SEQ ID NO: 41069 - DNA, 30 bp, Artificial Sequence
  Synthetic oligonucleotide
agacgtcatggtatatacattcaaataaag

SEQ ID NO: 41070 - DNA, 30 bp, Artificial Sequence
  Synthetic oligonucleotide
gcggacatgcgggttaccgcgaacataaag

SEQ ID NO: 41071 - DNA, 30 bp, Artificial Sequence
  Synthetic oligonucleotide
tcggacactatgtcgaaggaccggataaag

SEQ ID NO: 41072 - DNA, 30 bp, Artificial Sequence
  Synthetic oligonucleotide
atgaatattaggcacggagacatactaaag

SEQ ID NO: 41073 - DNA, 30 bp, Artificial Sequence
  Synthetic oligonucleotide
accacagggaggattcctggctgtctaaag

SEQ ID NO: 41074 - DNA, 30 bp, Artificial Sequence
  Synthetic oligonucleotide
taatcagcgtgtgcgacaggcagggtaaag

SEQ ID NO: 41075 - DNA, 30 bp, Artificial Sequence
  Synthetic oligonucleotide
gcgactgccggagctatgaggaatcacaag

SEQ ID NO: 41076 - DNA, 30 bp, Artificial Sequence
  Synthetic oligonucleotide
tcatctcagctgtggcacgggaatgacaag

SEQ ID NO: 41077 - DNA, 30 bp, Artificial Sequence
  Synthetic oligonucleotide
gcttggtgacggtcggacggaagtgacaag

SEQ ID NO: 41078 - DNA, 30 bp, Artificial Sequence
  Synthetic oligonucleotide
accgaatggacccgctcggaatgtgacaag

SEQ ID NO: 41079 - DNA, 30 bp, Artificial Sequence
  Synthetic oligonucleotide
ttgtgtgagagacgtggaaagaggaccaag

SEQ ID NO: 41080 - DNA, 30 bp, Artificial Sequence
  Synthetic oligonucleotide
cgactccagagaaccggcgaggtacccaag

SEQ ID NO: 41081 - DNA, 30 bp, Artificial Sequence
  Synthetic oligonucleotide
ttgtaaaagtattggtacggtaggcccaag

SEQ ID NO: 41082 - DNA, 30 bp, Artificial Sequence
  Synthetic oligonucleotide
tccaaaaactaaccgaaaacggtgtccaag

SEQ ID NO: 41083 - DNA, 30 bp, Artificial Sequence
  Synthetic oligonucleotide
ggtaaatcggctgcgattatcaaaagcaag

SEQ ID NO: 41084 - DNA, 30 bp, Artificial Sequence
  Synthetic oligonucleotide
gcaaggtgaactaaccaagatggaagcaag

SEQ ID NO: 41085 - DNA, 30 bp, Artificial Sequence
  Synthetic oligonucleotide
gcataacgtttcagaacctcatcgagcaag

SEQ ID NO: 41086 - DNA, 30 bp, Artificial Sequence
  Synthetic oligonucleotide
aacaaagtcatcggctcatcagtccgcaag

SEQ ID NO: 41087 - DNA, 30 bp, Artificial Sequence
  Synthetic oligonucleotide
caagggacagggggatatttgggaggcaag

SEQ ID NO: 41088 - DNA, 30 bp, Artificial Sequence
  Synthetic oligonucleotide
tgacatactatatagcggagtataggcaag

SEQ ID NO: 41089 - DNA, 30 bp, Artificial Sequence
  Synthetic oligonucleotide
agtaaagccagaaagtgtgagggatgcaag

SEQ ID NO: 41090 - DNA, 30 bp, Artificial Sequence
  Synthetic oligonucleotide
cttgtaaacatgaaaacaccactatgcaag

SEQ ID NO: 41091 - DNA, 30 bp, Artificial Sequence
  Synthetic oligonucleotide
gaagggttgagtgctttctggatgatcaag

SEQ ID NO: 41092 - DNA, 30 bp, Artificial Sequence
  Synthetic oligonucleotide
aaatggtcccaaggggcaactttgctcaag

SEQ ID NO: 41093 - DNA, 30 bp, Artificial Sequence
  Synthetic oligonucleotide
agccgtatacgtagttccaggttggtcaag

SEQ ID NO: 41094 - DNA, 30 bp, Artificial Sequence
  Synthetic oligonucleotide
gcgaaataactgcctaaaactgagttcaag

SEQ ID NO: 41095 - DNA, 26 bp, Artificial Sequence
  Synthetic oligonucleotide
tacgcccgtagtagcaagtaaagaag

SEQ ID NO: 41096 - DNA, 30 bp, Artificial Sequence
  Synthetic oligonucleotide
tctaagtcatcaagcgggggtcataagaag

SEQ ID NO: 41097 - DNA, 30 bp, Artificial Sequence
  Synthetic oligonucleotide
acattaaatcctagcttgccggctaagaag

SEQ ID NO: 41098 - DNA, 30 bp, Artificial Sequence
  Synthetic oligonucleotide
actagcgtgcttacgagctcactccagaag

SEQ ID NO: 41099 - DNA, 30 bp, Artificial Sequence
  Synthetic oligonucleotide
ttctggaggtaatcacttagcggtcagaag

SEQ ID NO: 41100 - DNA, 30 bp, Artificial Sequence
  Synthetic oligonucleotide
ctgtacgtgcagccgaaacggtaggagaag

SEQ ID NO: 41101 - DNA, 30 bp, Artificial Sequence
  Synthetic oligonucleotide
ggtactgcacgaagaggcacaagggagaag

SEQ ID NO: 41102 - DNA, 30 bp, Artificial Sequence
  Synthetic oligonucleotide
ggcatgtaaaagcactaaaggcttgagaag

SEQ ID NO: 41103 - DNA, 30 bp, Artificial Sequence
  Synthetic oligonucleotide
tgtggcaaactgaggattgtcagctagaag

SEQ ID NO: 41104 - DNA, 30 bp, Artificial Sequence
  Synthetic oligonucleotide
aacaacattttagaagtcgaagggtagaag

SEQ ID NO: 41105 - DNA, 30 bp, Artificial Sequence
  Synthetic oligonucleotide
tcgggccgtatgcagacagtcaatacgaag

SEQ ID NO: 41106 - DNA, 30 bp, Artificial Sequence
  Synthetic oligonucleotide
aggaatggctgggccctgacgtcgccgaag

SEQ ID NO: 41107 - DNA, 31 bp, Artificial Sequence
  Synthetic oligonucleotide
tagctgacggcgtaccaccggagtaaggaag

SEQ ID NO: 41108 - DNA, 30 bp, Artificial Sequence
  Synthetic oligonucleotide
tattgtggctttaagcctgcaacgaggaag

SEQ ID NO: 41109 - DNA, 30 bp, Artificial Sequence
  Synthetic oligonucleotide
taatgaatatcactaggggctaacgggaag

SEQ ID NO: 41110 - DNA, 30 bp, Artificial Sequence
  Synthetic oligonucleotide
agcgacatctcacgtgaatggggtgggaag

SEQ ID NO: 41111 - DNA, 30 bp, Artificial Sequence
  Synthetic oligonucleotide
tccacacgggaagcaatattgaaatggaag

SEQ ID NO: 41112 - DNA, 29 bp, Artificial Sequence
  Synthetic oligonucleotide
aaagccgaggggcgacgtcgtaatggaag

SEQ ID NO: 41113 - DNA, 30 bp, Artificial Sequence
  Synthetic oligonucleotide
tagggtacctagagtcgacactactggaag

SEQ ID NO: 41114 - DNA, 30 bp, Artificial Sequence
  Synthetic oligonucleotide
cggcaccgggaggtttgtcaatgaatgaag

SEQ ID NO: 41115 - DNA, 30 bp, Artificial Sequence
  Synthetic oligonucleotide
tttgggctgatccgatagaatacgatgaag

SEQ ID NO: 41116 - DNA, 30 bp, Artificial Sequence
  Synthetic oligonucleotide
tgagcgtctgagactcgtgaattgttgaag

SEQ ID NO: 41117 - DNA, 30 bp, Artificial Sequence
  Synthetic oligonucleotide
caggcaggtgcaatggagtaagctttgaag

SEQ ID NO: 41118 - DNA, 30 bp, Artificial Sequence
  Synthetic oligonucleotide
gccatgtcgagctaccgatccgtgaataag

SEQ ID NO: 41119 - DNA, 30 bp, Artificial Sequence
  Synthetic oligonucleotide
cacgacctgattcacgaacaactccataag

SEQ ID NO: 41120 - DNA, 30 bp, Artificial Sequence
  Synthetic oligonucleotide
gcaaggtagcaaattagatggtggcataag

SEQ ID NO: 41121 - DNA, 30 bp, Artificial Sequence
  Synthetic oligonucleotide
gtcggacgccttaataaggaaagcgataag

SEQ ID NO: 41122 - DNA, 30 bp, Artificial Sequence
  Synthetic oligonucleotide
gagatcagaccagcagaaaatcctgataag

SEQ ID NO: 41123 - DNA, 30 bp, Artificial Sequence
  Synthetic oligonucleotide
accgctagctggatacacgtctacactaag

SEQ ID NO: 41124 - DNA, 30 bp, Artificial Sequence
  Synthetic oligonucleotide
ccgtcgagatccacgaggagagatcctaag

SEQ ID NO: 41125 - DNA, 30 bp, Artificial Sequence
  Synthetic oligonucleotide
atacctgtcaggcagggcatgagtagtaag

SEQ ID NO: 41126 - DNA, 30 bp, Artificial Sequence
  Synthetic oligonucleotide
aggctcatcgtctgtagaggacatcgtaag

SEQ ID NO: 41127 - DNA, 30 bp, Artificial Sequence
  Synthetic oligonucleotide
cgcgaggtcctggattgaagctagggtaag

SEQ ID NO: 41128 - DNA, 30 bp, Artificial Sequence
  Synthetic oligonucleotide
cattggagcgccgttgagcctatgggtaag

SEQ ID NO: 41129 - DNA, 30 bp, Artificial Sequence
  Synthetic oligonucleotide
cgattcaaaggcaccgttctcacatgtaag

SEQ ID NO: 41130 - DNA, 30 bp, Artificial Sequence
  Synthetic oligonucleotide
acagccacagtttgcagggagcgatgtaag

SEQ ID NO: 41131 - DNA, 30 bp, Artificial Sequence
  Synthetic oligonucleotide
agagcggtgtcccagacagggtactgtaag

SEQ ID NO: 41132 - DNA, 30 bp, Artificial Sequence
  Synthetic oligonucleotide
ggcgcgcaagttagctaaggcgaaattaag

SEQ ID NO: 41133 - DNA, 30 bp, Artificial Sequence
  Synthetic oligonucleotide
ctggcatgagaggacgttcaaagcattaag

SEQ ID NO: 41134 - DNA, 30 bp, Artificial Sequence
  Synthetic oligonucleotide
taacagaaaaataactgtacttgcgttaag

SEQ ID NO: 41135 - DNA, 30 bp, Artificial Sequence
  Synthetic oligonucleotide
caggaggcagatactccggaagttcaacag

SEQ ID NO: 41136 - DNA, 30 bp, Artificial Sequence
  Synthetic oligonucleotide
tagctgctataggtggggaaacatgaacag

SEQ ID NO: 41137 - DNA, 30 bp, Artificial Sequence
  Synthetic oligonucleotide
tggcgttgacaaagagggggcctctaacag

SEQ ID NO: 41138 - DNA, 30 bp, Artificial Sequence
  Synthetic oligonucleotide
atcgtaacccgactaaggacactgacacag

SEQ ID NO: 41139 - DNA, 30 bp, Artificial Sequence
  Synthetic oligonucleotide
acggcgctcatactaaccgaaagatcacag

SEQ ID NO: 41140 - DNA, 30 bp, Artificial Sequence
  Synthetic oligonucleotide
gtcacagtacggtagaggtggagctcacag

SEQ ID NO: 41141 - DNA, 30 bp, Artificial Sequence
  Synthetic oligonucleotide
atcgccaatgatacgattgataatagacag

SEQ ID NO: 41142 - DNA, 30 bp, Artificial Sequence
  Synthetic oligonucleotide
gtctgggcatctggcaaactccaacgacag

SEQ ID NO: 41143 - DNA, 30 bp, Artificial Sequence
  Synthetic oligonucleotide
ggttcaccggaattattacgtgtgcgacag

SEQ ID NO: 41144 - DNA, 30 bp, Artificial Sequence
  Synthetic oligonucleotide
ccagaaccgtaccctctagtgacaatacag

SEQ ID NO: 41145 - DNA, 30 bp, Artificial Sequence
  Synthetic oligonucleotide
gcagattaaaccaacaggaggcgcatacag

SEQ ID NO: 41146 - DNA, 30 bp, Artificial Sequence
  Synthetic oligonucleotide
tcacggcaccaggctaacaatgtcatacag

SEQ ID NO: 41147 - DNA, 30 bp, Artificial Sequence
  Synthetic oligonucleotide
aactaacggagcataacaccccaactacag

SEQ ID NO: 41148 - DNA, 30 bp, Artificial Sequence
  Synthetic oligonucleotide
gagaaaaagactgatccgacgactctacag

SEQ ID NO: 41149 - DNA, 30 bp, Artificial Sequence
  Synthetic oligonucleotide
gtacagggtagacgcctctccgaggtacag

SEQ ID NO: 41150 - DNA, 30 bp, Artificial Sequence
  Synthetic oligonucleotide
gaccgaacgataccacgatccctgttacag

SEQ ID NO: 41151 - DNA, 30 bp, Artificial Sequence
  Synthetic oligonucleotide
acgtgttttaggcgtcattactgccaccag

SEQ ID NO: 41152 - DNA, 30 bp, Artificial Sequence
  Synthetic oligonucleotide
tgaggttgtaccacatcgaaaaaataccag

SEQ ID NO: 41153 - DNA, 30 bp, Artificial Sequence
  Synthetic oligonucleotide
ataatcgaatccggcctaagcaacgcccag

SEQ ID NO: 41154 - DNA, 30 bp, Artificial Sequence
  Synthetic oligonucleotide
cactattgtatcaactagacaccctcccag

SEQ ID NO: 41155 - DNA, 30 bp, Artificial Sequence
  Synthetic oligonucleotide
acagccggaccggctcaagcgttctcccag

SEQ ID NO: 41156 - DNA, 30 bp, Artificial Sequence
  Synthetic oligonucleotide
aagatgacccatgggggatgttaaagccag

SEQ ID NO: 41157 - DNA, 30 bp, Artificial Sequence
  Synthetic oligonucleotide
catcgcacagaacatacaatcatcagccag

SEQ ID NO: 41158 - DNA, 31 bp, Artificial Sequence
  Synthetic oligonucleotide
taaacatgatgattacattttctgcatccag

SEQ ID NO: 41159 - DNA, 30 bp, Artificial Sequence
  Synthetic oligonucleotide
gacttaaggatatacggcacagagatccag

SEQ ID NO: 41160 - DNA, 30 bp, Artificial Sequence
  Synthetic oligonucleotide
aggactgtagaggaaaatcaagaagtccag

SEQ ID NO: 41161 - DNA, 30 bp, Artificial Sequence
  Synthetic oligonucleotide
cctttgagaacgaaagggggcgctgtccag

SEQ ID NO: 41162 - DNA, 29 bp, Artificial Sequence
  Synthetic oligonucleotide
cgaaaccaacgtatcttctccggttccag

SEQ ID NO: 41163 - DNA, 30 bp, Artificial Sequence
  Synthetic oligonucleotide
atgtcaacggtgggaaaggacaaacagcag

SEQ ID NO: 41164 - DNA, 30 bp, Artificial Sequence
  Synthetic oligonucleotide
tgctttcgacgtctatacattccacagcag

SEQ ID NO: 41165 - DNA, 30 bp, Artificial Sequence
  Synthetic oligonucleotide
gcaactcaaaagtaccgacagcgagcgcag

SEQ ID NO: 41166 - DNA, 30 bp, Artificial Sequence
  Synthetic oligonucleotide
cgcctaaaggaccgggaactacacgcgcag

SEQ ID NO: 41167 - DNA, 30 bp, Artificial Sequence
  Synthetic oligonucleotide
actcgcgccaagtggaaacgtcataggcag

SEQ ID NO: 41168 - DNA, 30 bp, Artificial Sequence
  Synthetic oligonucleotide
gtagaaaagctgatacagagtgcccggcag

SEQ ID NO: 41169 - DNA, 30 bp, Artificial Sequence
  Synthetic oligonucleotide
ctaagtgaaataggtctgtgacttcggcag

SEQ ID NO: 41170 - DNA, 30 bp, Artificial Sequence
  Synthetic oligonucleotide
cgcacaagaagattaccaatatatgggcag

SEQ ID NO: 41171 - DNA, 30 bp, Artificial Sequence
  Synthetic oligonucleotide
atacagaagcggcgagtacgggtagtgcag

SEQ ID NO: 41172 - DNA, 30 bp, Artificial Sequence
  Synthetic oligonucleotide
tgaaatcagtcataagtattaaatgtgcag

SEQ ID NO: 41173 - DNA, 30 bp, Artificial Sequence
  Synthetic oligonucleotide
tctgaggggactgggagggaacctgtgcag

SEQ ID NO: 41174 - DNA, 30 bp, Artificial Sequence
  Synthetic oligonucleotide
taccacgagccagtaacaacatggttgcag

SEQ ID NO: 41175 - DNA, 30 bp, Artificial Sequence
  Synthetic oligonucleotide
ccacagggaattctcaggtgatacaatcag

SEQ ID NO: 41176 - DNA, 30 bp, Artificial Sequence
  Synthetic oligonucleotide
gaatcagcttcgaaagcgcgacataatcag

SEQ ID NO: 41177 - DNA, 30 bp, Artificial Sequence
  Synthetic oligonucleotide
gtgtagaatcacacgactatgccacatcag

SEQ ID NO: 41178 - DNA, 30 bp, Artificial Sequence
  Synthetic oligonucleotide
cggatagagtcaaactagcaatatactcag

SEQ ID NO: 41179 - DNA, 30 bp, Artificial Sequence
  Synthetic oligonucleotide
attacgagccactcagaagggatcgctcag

SEQ ID NO: 41180 - DNA, 30 bp, Artificial Sequence
  Synthetic oligonucleotide
cacacttgagattgttgcgaaggtgctcag

SEQ ID NO: 41181 - DNA, 30 bp, Artificial Sequence
  Synthetic oligonucleotide
aaacgtggcgtacatcactctaaatctcag

SEQ ID NO: 41182 - DNA, 30 bp, Artificial Sequence
  Synthetic oligonucleotide
tctgcacgggaaccaacttggaagagtcag

SEQ ID NO: 41183 - DNA, 30 bp, Artificial Sequence
  Synthetic oligonucleotide
cgaaaggagcgagtagaccgtgggagtcag

SEQ ID NO: 41184 - DNA, 30 bp, Artificial Sequence
  Synthetic oligonucleotide
aagtggaaagggcgcgaaaacaggcgtcag

SEQ ID NO: 41185 - DNA, 30 bp, Artificial Sequence
  Synthetic oligonucleotide
atgtcccggagatgagtaattcacattcag

SEQ ID NO: 41186 - DNA, 30 bp, Artificial Sequence
  Synthetic oligonucleotide
aagcacgtcaatatggacaggagggttcag

SEQ ID NO: 41187 - DNA, 30 bp, Artificial Sequence
  Synthetic oligonucleotide
acagttattcgatcggcgtgtcaaaaagag

SEQ ID NO: 41188 - DNA, 30 bp, Artificial Sequence
  Synthetic oligonucleotide
ggacaatctatgagatatccttgcaaagag

SEQ ID NO: 41189 - DNA, 30 bp, Artificial Sequence
  Synthetic oligonucleotide
tctgggacattggcagagaccatcaaagag

SEQ ID NO: 41190 - DNA, 30 bp, Artificial Sequence
  Synthetic oligonucleotide
cgtggtggtaggtcattcccgaccgaagag

SEQ ID NO: 41191 - DNA, 30 bp, Artificial Sequence
  Synthetic oligonucleotide
atacaggaatacgttgcgatgcaggaagag

SEQ ID NO: 41192 - DNA, 30 bp, Artificial Sequence
  Synthetic oligonucleotide
aacggtatgaggctaaatgcccaataagag

SEQ ID NO: 41193 - DNA, 30 bp, Artificial Sequence
  Synthetic oligonucleotide
gtccaatacactggcaccaagacctaagag

SEQ ID NO: 41194 - DNA, 30 bp, Artificial Sequence
  Synthetic oligonucleotide
cgcgcacaatctcacttcttaaattaagag

SEQ ID NO: 41195 - DNA, 30 bp, Artificial Sequence
  Synthetic oligonucleotide
ctggtgcgactcagccactaaggttaagag

SEQ ID NO: 41196 - DNA, 30 bp, Artificial Sequence
  Synthetic oligonucleotide
cccagcaacgccgccagttaaacgagagag

SEQ ID NO: 41197 - DNA, 30 bp, Artificial Sequence
  Synthetic oligonucleotide
caatgtgaacgaccggtcgactggagagag

SEQ ID NO: 41198 - DNA, 30 bp, Artificial Sequence
  Synthetic oligonucleotide
ccgagaacgctgcgtacttcatagggagag

SEQ ID NO: 41199 - DNA, 30 bp, Artificial Sequence
  Synthetic oligonucleotide
taaggattcaaattaaagttgaatggagag

SEQ ID NO: 41200 - DNA, 31 bp, Artificial Sequence
  Synthetic oligonucleotide
atacggggggtcagtgggatgtgcctgagag

SEQ ID NO: 41201 - DNA, 30 bp, Artificial Sequence
  Synthetic oligonucleotide
tccgcgcaagtcagccgttggacgtgagag

SEQ ID NO: 41202 - DNA, 30 bp, Artificial Sequence
  Synthetic oligonucleotide
ggttgagaaaaggactttaatgtttgagag

SEQ ID NO: 41203 - DNA, 30 bp, Artificial Sequence
  Synthetic oligonucleotide
agcaaccgtggaccacttaaggcgctagag

SEQ ID NO: 41204 - DNA, 30 bp, Artificial Sequence
  Synthetic oligonucleotide
gagaactcaccaaatccttactgcgtagag

SEQ ID NO: 41205 - DNA, 30 bp, Artificial Sequence
  Synthetic oligonucleotide
cttgaaagcatcagacgggatacggtagag

SEQ ID NO: 41206 - DNA, 30 bp, Artificial Sequence
  Synthetic oligonucleotide
tagcgggtttgacgaggtaaccatgtagag

SEQ ID NO: 41207 - DNA, 30 bp, Artificial Sequence
  Synthetic oligonucleotide
gttagtaacctactaaagcgataaaacgag

SEQ ID NO: 41208 - DNA, 30 bp, Artificial Sequence
  Synthetic oligonucleotide
aaacagcagtcagcaatgcgcattaacgag

SEQ ID NO: 41209 - DNA, 30 bp, Artificial Sequence
  Synthetic oligonucleotide
atcgggtcggggattctatgacgagacgag

SEQ ID NO: 41210 - DNA, 30 bp, Artificial Sequence
  Synthetic oligonucleotide
catttgaagatgatgatctgaaaggacgag

SEQ ID NO: 41211 - DNA, 30 bp, Artificial Sequence
  Synthetic oligonucleotide
tgaatgattgctttggacaataaggacgag

SEQ ID NO: 41212 - DNA, 30 bp, Artificial Sequence
  Synthetic oligonucleotide
agcaagaatactctagcaacataggacgag

SEQ ID NO: 41213 - DNA, 30 bp, Artificial Sequence
  Synthetic oligonucleotide
ctagcatgggaaacctgctctttggacgag

SEQ ID NO: 41214 - DNA, 30 bp, Artificial Sequence
  Synthetic oligonucleotide
tactatcgccggccataataatctgacgag

SEQ ID NO: 41215 - DNA, 30 bp, Artificial Sequence
  Synthetic oligonucleotide
aatcatcaacaaatatagactgcatacgag

SEQ ID NO: 41216 - DNA, 30 bp, Artificial Sequence
  Synthetic oligonucleotide
gcagaagagaactagactaataactacgag

SEQ ID NO: 41217 - DNA, 30 bp, Artificial Sequence
  Synthetic oligonucleotide
cgaggttcccgacgacgtggtccgtacgag

SEQ ID NO: 41218 - DNA, 30 bp, Artificial Sequence
  Synthetic oligonucleotide
gattgagggaggaatcacagggtttacgag

SEQ ID NO: 41219 - DNA, 30 bp, Artificial Sequence
  Synthetic oligonucleotide
cccacgcgagcgcgtgacatagataccgag

SEQ ID NO: 41220 - DNA, 30 bp, Artificial Sequence
  Synthetic oligonucleotide
ggcaaacccccaacaaccaaggtacccgag

SEQ ID NO: 41221 - DNA, 30 bp, Artificial Sequence
  Synthetic oligonucleotide
agctaagtcacggcaggtgcgttatccgag

SEQ ID NO: 41222 - DNA, 30 bp, Artificial Sequence
  Synthetic oligonucleotide
ttaaaccgagggagttcactctactccgag

SEQ ID NO: 41223 - DNA, 30 bp, Artificial Sequence
  Synthetic oligonucleotide
cgaaacgactaagataacgggtcccgcgag

SEQ ID NO: 41224 - DNA, 30 bp, Artificial Sequence
  Synthetic oligonucleotide
accaaacggaatcatttctcatagcgcgag

SEQ ID NO: 41225 - DNA, 30 bp, Artificial Sequence
  Synthetic oligonucleotide
ttaacaacactgctgccggtcataggcgag

SEQ ID NO: 41226 - DNA, 30 bp, Artificial Sequence
  Synthetic oligonucleotide
ggtaatcagagtgtttcgactatcggcgag

SEQ ID NO: 41227 - DNA, 30 bp, Artificial Sequence
  Synthetic oligonucleotide
agctaccagggataactgcatctagtcgag

SEQ ID NO: 41228 - DNA, 30 bp, Artificial Sequence
  Synthetic oligonucleotide
ggtagtcaccgcgcgatactgttggtcgag

SEQ ID NO: 41229 - DNA, 31 bp, Artificial Sequence
  Synthetic oligonucleotide
tataaagtaataactcaaaatactcttcgag

SEQ ID NO: 41230 - DNA, 30 bp, Artificial Sequence
  Synthetic oligonucleotide
atataaaagaccgtaaagcatgagttcgag

SEQ ID NO: 41231 - DNA, 30 bp, Artificial Sequence
  Synthetic oligonucleotide
aagtctatctgagaattgaacgcgaaggag

SEQ ID NO: 41232 - DNA, 30 bp, Artificial Sequence
  Synthetic oligonucleotide
gtcacgtaagatatcttcggggtccaggag

SEQ ID NO: 41233 - DNA, 30 bp, Artificial Sequence
  Synthetic oligonucleotide
gcgatcgaaatatcaacattccaggaggag

SEQ ID NO: 41234 - DNA, 30 bp, Artificial Sequence
  Synthetic oligonucleotide
gctaagatgcggtgttgccgtccataggag

SEQ ID NO: 41235 - DNA, 30 bp, Artificial Sequence
  Synthetic oligonucleotide
ctgggattctatgaaaaatcatagtaggag

SEQ ID NO: 41236 - DNA, 30 bp, Artificial Sequence
  Synthetic oligonucleotide
gggttctatctacgactgcgtggaacggag

SEQ ID NO: 41237 - DNA, 30 bp, Artificial Sequence
  Synthetic oligonucleotide
tcagagcaacgcgtaccttagttaacggag

SEQ ID NO: 41238 - DNA, 30 bp, Artificial Sequence
  Synthetic oligonucleotide
caagacataaaatacaattcgatcacggag

SEQ ID NO: 41239 - DNA, 30 bp, Artificial Sequence
  Synthetic oligonucleotide
gcgtcgagctgctaggatcatcctccggag

SEQ ID NO: 41240 - DNA, 30 bp, Artificial Sequence
  Synthetic oligonucleotide
ggagtttggacatacagggacattccggag

SEQ ID NO: 41241 - DNA, 30 bp, Artificial Sequence
  Synthetic oligonucleotide
atggtcgcaaccgaaaggatacttccggag

SEQ ID NO: 41242 - DNA, 30 bp, Artificial Sequence
  Synthetic oligonucleotide
ttgcgagcgcgtgtacctaaaagtgcggag

SEQ ID NO: 41243 - DNA, 30 bp, Artificial Sequence
  Synthetic oligonucleotide
tagtactcgggccgagtggttaaatcggag

SEQ ID NO: 41244 - DNA, 30 bp, Artificial Sequence
  Synthetic oligonucleotide
cagttaatgttagattattatcgaagggag

SEQ ID NO: 41245 - DNA, 30 bp, Artificial Sequence
  Synthetic oligonucleotide
ggccacgaatggtatacaaacgtgagggag

SEQ ID NO: 41246 - DNA, 30 bp, Artificial Sequence
  Synthetic oligonucleotide
tgattggaaggtaatcagggcgtacgggag

SEQ ID NO: 41247 - DNA, 30 bp, Artificial Sequence
  Synthetic oligonucleotide
ggaaaggaaccacaatcaggaggaggggag

SEQ ID NO: 41248 - DNA, 30 bp, Artificial Sequence
  Synthetic oligonucleotide
cgattaaaaggatgtgtataaggctgggag

SEQ ID NO: 41249 - DNA, 30 bp, Artificial Sequence
  Synthetic oligonucleotide
acactttacgcgataaacggaggaatggag

SEQ ID NO: 41250 - DNA, 30 bp, Artificial Sequence
  Synthetic oligonucleotide
gtgcgcgaattaaaggccggtataatggag

SEQ ID NO: 41251 - DNA, 30 bp, Artificial Sequence
  Synthetic oligonucleotide
acggaaaggtctttaaatcaaagtatggag

SEQ ID NO: 41252 - DNA, 30 bp, Artificial Sequence
  Synthetic oligonucleotide
tggagaggcaataggtcatcacaactggag

SEQ ID NO: 41253 - DNA, 30 bp, Artificial Sequence
  Synthetic oligonucleotide
ggtaagtgcattgacgagaagttagtggag

SEQ ID NO: 41254 - DNA, 30 bp, Artificial Sequence
  Synthetic oligonucleotide
aaaggtgggaaaaaattgacaccgttggag

SEQ ID NO: 41255 - DNA, 30 bp, Artificial Sequence
  Synthetic oligonucleotide
caaagggaatgtctgatgtagttaaatgag

SEQ ID NO: 41256 - DNA, 30 bp, Artificial Sequence
  Synthetic oligonucleotide
ttgacaaacctcttatactaagcacatgag

SEQ ID NO: 41257 - DNA, 30 bp, Artificial Sequence
  Synthetic oligonucleotide
ccttgacaagggctgtctgggtgtcatgag

SEQ ID NO: 41258 - DNA, 30 bp, Artificial Sequence
  Synthetic oligonucleotide
aagtatacgcccccagttaaggtagatgag

SEQ ID NO: 41259 - DNA, 30 bp, Artificial Sequence
  Synthetic oligonucleotide
tgtacggcctgagctgtcaagacaactgag

SEQ ID NO: 41260 - DNA, 30 bp, Artificial Sequence
  Synthetic oligonucleotide
tggctacgttttcctgaagaggcaactgag

SEQ ID NO: 41261 - DNA, 30 bp, Artificial Sequence
  Synthetic oligonucleotide
gaccaaagtgcgatccatgctaggactgag

SEQ ID NO: 41262 - DNA, 30 bp, Artificial Sequence
  Synthetic oligonucleotide
aaacgacaggttaccactagggggactgag

SEQ ID NO: 41263 - DNA, 30 bp, Artificial Sequence
  Synthetic oligonucleotide
tcggtctgtcgacattcggaaattactgag

SEQ ID NO: 41264 - DNA, 30 bp, Artificial Sequence
  Synthetic oligonucleotide
catcgatgcaacacagaggtgagtgctgag

SEQ ID NO: 41265 - DNA, 30 bp, Artificial Sequence
  Synthetic oligonucleotide
gtaagtttaggccagggcaacctaagtgag

SEQ ID NO: 41266 - DNA, 30 bp, Artificial Sequence
  Synthetic oligonucleotide
atcacggtacgggccaaattttcgagtgag

SEQ ID NO: 41267 - DNA, 30 bp, Artificial Sequence
  Synthetic oligonucleotide
ccaaccggacaggaatgtctattgagtgag

SEQ ID NO: 41268 - DNA, 30 bp, Artificial Sequence
  Synthetic oligonucleotide
cgtgcaaacagtgcgtccgcagatagtgag

SEQ ID NO: 41269 - DNA, 30 bp, Artificial Sequence
  Synthetic oligonucleotide
gggtgagttcatacctcctcatagcgtgag

SEQ ID NO: 41270 - DNA, 31 bp, Artificial Sequence
  Synthetic oligonucleotide
attgctggctaggacctcaagcgagtgtgag

SEQ ID NO: 41271 - DNA, 30 bp, Artificial Sequence
  Synthetic oligonucleotide
tgacggattctggtccccccggtgattgag

SEQ ID NO: 41272 - DNA, 30 bp, Artificial Sequence
  Synthetic oligonucleotide
tgggaagtcaaggtgcctgccgctattgag

SEQ ID NO: 41273 - DNA, 30 bp, Artificial Sequence
  Synthetic oligonucleotide
tgtaagcgataccgagcattagcagttgag

SEQ ID NO: 41274 - DNA, 30 bp, Artificial Sequence
  Synthetic oligonucleotide
cggaaagaagctgtcacattttcagttgag

SEQ ID NO: 41275 - DNA, 30 bp, Artificial Sequence
  Synthetic oligonucleotide
tagctagtcactggaacagggaacgttgag

SEQ ID NO: 41276 - DNA, 30 bp, Artificial Sequence
  Synthetic oligonucleotide
cgaacatcctacgctcaagccgtggttgag

SEQ ID NO: 41277 - DNA, 30 bp, Artificial Sequence
  Synthetic oligonucleotide
caacaacgtgaagaggctcccgctgttgag

SEQ ID NO: 41278 - DNA, 30 bp, Artificial Sequence
  Synthetic oligonucleotide
taggagttcgtggtccgtgttgggtttgag

SEQ ID NO: 41279 - DNA, 30 bp, Artificial Sequence
  Synthetic oligonucleotide
gctcatagcgactcgagtaatgtaaaatag

SEQ ID NO: 41280 - DNA, 30 bp, Artificial Sequence
  Synthetic oligonucleotide
gttaaggcggagacgtacaaagggaaatag

SEQ ID NO: 41281 - DNA, 30 bp, Artificial Sequence
  Synthetic oligonucleotide
acgaatctacgaaagttgaacgctaaatag

SEQ ID NO: 41282 - DNA, 30 bp, Artificial Sequence
  Synthetic oligonucleotide
ggtaacggatgagctaaaacgcaagaatag

SEQ ID NO: 41283 - DNA, 30 bp, Artificial Sequence
  Synthetic oligonucleotide
acctcagcgctaaatatgtgaaaggaatag

SEQ ID NO: 41284 - DNA, 30 bp, Artificial Sequence
  Synthetic oligonucleotide
ctaatataaacaatacggaagtaggaatag

SEQ ID NO: 41285 - DNA, 30 bp, Artificial Sequence
  Synthetic oligonucleotide
taccgatccgctgaagtcggaagggaatag

SEQ ID NO: 41286 - DNA, 30 bp, Artificial Sequence
  Synthetic oligonucleotide
ggagaaataaattcttatctcgctgaatag

SEQ ID NO: 41287 - DNA, 30 bp, Artificial Sequence
  Synthetic oligonucleotide
gacgtgagcttagggggacgagactaatag

SEQ ID NO: 41288 - DNA, 30 bp, Artificial Sequence
  Synthetic oligonucleotide
gcaacaggtaccggtgcgtgtccttaatag

SEQ ID NO: 41289 - DNA, 30 bp, Artificial Sequence
  Synthetic oligonucleotide
caggcacagacgtcgcatgcgggttaatag

SEQ ID NO: 41290 - DNA, 30 bp, Artificial Sequence
  Synthetic oligonucleotide
agaacattgaacctgtttaacgagccatag

SEQ ID NO: 41291 - DNA, 30 bp, Artificial Sequence
  Synthetic oligonucleotide
cgccttgacaagcaaaggttgcctccatag

SEQ ID NO: 41292 - DNA, 30 bp, Artificial Sequence
  Synthetic oligonucleotide
taccgtaccgaatgaaaaaggggtccatag

SEQ ID NO: 41293 - DNA, 30 bp, Artificial Sequence
  Synthetic oligonucleotide
aagggcatgaggcttcggaatgaatcatag

SEQ ID NO: 41294 - DNA, 30 bp, Artificial Sequence
  Synthetic oligonucleotide
acggaagacggatcagcaggacagtcatag

SEQ ID NO: 41295 - DNA, 30 bp, Artificial Sequence
  Synthetic oligonucleotide
agtatgcgaggctcgttggtgaggggatag

SEQ ID NO: 41296 - DNA, 30 bp, Artificial Sequence
  Synthetic oligonucleotide
aggggaggcggaggggtcaaccacgtatag

SEQ ID NO: 41297 - DNA, 30 bp, Artificial Sequence
  Synthetic oligonucleotide
gaccggcccgagacaactgataatgtatag

SEQ ID NO: 41298 - DNA, 30 bp, Artificial Sequence
  Synthetic oligonucleotide
cggggagcttgcatcgccttgagtaactag

SEQ ID NO: 41299 - DNA, 30 bp, Artificial Sequence
  Synthetic oligonucleotide
atttcgtaggggatcggaacatcgcactag

SEQ ID NO: 41300 - DNA, 30 bp, Artificial Sequence
  Synthetic oligonucleotide
taagatgaaaaactcgaactaacagactag

SEQ ID NO: 41301 - DNA, 30 bp, Artificial Sequence
  Synthetic oligonucleotide
acgcgtgagcatgttctaattccagactag

SEQ ID NO: 41302 - DNA, 30 bp, Artificial Sequence
  Synthetic oligonucleotide
agccagggcagatcttgggacctagactag

SEQ ID NO: 41303 - DNA, 30 bp, Artificial Sequence
  Synthetic oligonucleotide
tccagccgcaaaaggacgttctaggactag

SEQ ID NO: 41304 - DNA, 30 bp, Artificial Sequence
  Synthetic oligonucleotide
gaacggtagctaagtcgataagcgtactag

SEQ ID NO: 41305 - DNA, 30 bp, Artificial Sequence
  Synthetic oligonucleotide
ggtataagacaatacctttaggcgtactag

SEQ ID NO: 41306 - DNA, 30 bp, Artificial Sequence
  Synthetic oligonucleotide
agatatctatcaaccacgaagaccacctag

SEQ ID NO: 41307 - DNA, 30 bp, Artificial Sequence
  Synthetic oligonucleotide
atgacagtgtcaatgacgatggcgacctag

SEQ ID NO: 41308 - DNA, 30 bp, Artificial Sequence
  Synthetic oligonucleotide
tctattcgcagaagaactctccgcccctag

SEQ ID NO: 41309 - DNA, 30 bp, Artificial Sequence
  Synthetic oligonucleotide
tgctggcaaagcaaaactaaaatcccctag

SEQ ID NO: 41310 - DNA, 30 bp, Artificial Sequence
  Synthetic oligonucleotide
tgcgtgaccacccggaaataacacgcctag

SEQ ID NO: 41311 - DNA, 30 bp, Artificial Sequence
  Synthetic oligonucleotide
ctcgtcacgtagtagagcatcgtttcctag

SEQ ID NO: 41312 - DNA, 30 bp, Artificial Sequence
  Synthetic oligonucleotide
aggcacaaggcagacagttggaaaagctag

SEQ ID NO: 41313 - DNA, 30 bp, Artificial Sequence
  Synthetic oligonucleotide
ttacacaatggaatgccgtcgattagctag

SEQ ID NO: 41314 - DNA, 30 bp, Artificial Sequence
  Synthetic oligonucleotide
caggactggtcggtccccaaatagcgctag

SEQ ID NO: 41315 - DNA, 30 bp, Artificial Sequence
  Synthetic oligonucleotide
tgccatcaaagaactccgcactcgtgctag

SEQ ID NO: 41316 - DNA, 30 bp, Artificial Sequence
  Synthetic oligonucleotide
ggtctgtgatcgaggtagatgtattgctag

SEQ ID NO: 41317 - DNA, 30 bp, Artificial Sequence
  Synthetic oligonucleotide
cgaacgaaacgcgcttgatgttcttgctag

SEQ ID NO: 41318 - DNA, 30 bp, Artificial Sequence
  Synthetic oligonucleotide
caacggcgcaacgagtatgtgagttgctag

SEQ ID NO: 41319 - DNA, 30 bp, Artificial Sequence
  Synthetic oligonucleotide
ctgggaagagatgcgacaatgctaatctag

SEQ ID NO: 41320 - DNA, 30 bp, Artificial Sequence
  Synthetic oligonucleotide
tgcgtaacctcaaggggggggttactctag

SEQ ID NO: 41321 - DNA, 30 bp, Artificial Sequence
  Synthetic oligonucleotide
taaggggagaagtcgtacgactgcctctag

SEQ ID NO: 41322 - DNA, 30 bp, Artificial Sequence
  Synthetic oligonucleotide
gggcactaccaccatcggcgtgagctctag

SEQ ID NO: 41323 - DNA, 30 bp, Artificial Sequence
  Synthetic oligonucleotide
cgatatgaggcattgtcagcgggcgtctag

SEQ ID NO: 41324 - DNA, 30 bp, Artificial Sequence
  Synthetic oligonucleotide
ttcgagaactaaagcaaggtacaaaagtag

SEQ ID NO: 41325 - DNA, 30 bp, Artificial Sequence
  Synthetic oligonucleotide
ctagaagtgaacccctatcgttgcaagtag

SEQ ID NO: 41326 - DNA, 30 bp, Artificial Sequence
  Synthetic oligonucleotide
aagacgacggttaaagatccagataagtag

SEQ ID NO: 41327 - DNA, 30 bp, Artificial Sequence
  Synthetic oligonucleotide
tggcaagccgggatttattggggtgagtag

SEQ ID NO: 41328 - DNA, 30 bp, Artificial Sequence
  Synthetic oligonucleotide
catacgctgtagagcgatgactattagtag

SEQ ID NO: 41329 - DNA, 30 bp, Artificial Sequence
  Synthetic oligonucleotide
acatgctaggtcattaagaattaaacgtag

SEQ ID NO: 41330 - DNA, 30 bp, Artificial Sequence
  Synthetic oligonucleotide
tgtagacaacgaggatatctgtgcacgtag

SEQ ID NO: 41331 - DNA, 30 bp, Artificial Sequence
  Synthetic oligonucleotide
ccgtcaacctggcaattaaactcgccgtag

SEQ ID NO: 41332 - DNA, 30 bp, Artificial Sequence
  Synthetic oligonucleotide
gcttcatgccaaaaattgtactctccgtag

SEQ ID NO: 41333 - DNA, 30 bp, Artificial Sequence
  Synthetic oligonucleotide
cgcggataagacgatcatgcgggtccgtag

SEQ ID NO: 41334 - DNA, 30 bp, Artificial Sequence
  Synthetic oligonucleotide
ccgataagtctgaccagaactgcggcgtag

SEQ ID NO: 41335 - DNA, 30 bp, Artificial Sequence
  Synthetic oligonucleotide
gcgacgctcacaagggcggcgagggcgtag

SEQ ID NO: 41336 - DNA, 30 bp, Artificial Sequence
  Synthetic oligonucleotide
atcaggtaggattgtgtcaccataaggtag

SEQ ID NO: 41337 - DNA, 30 bp, Artificial Sequence
  Synthetic oligonucleotide
acataatattgtcaaattgtgtagaggtag

SEQ ID NO: 41338 - DNA, 30 bp, Artificial Sequence
  Synthetic oligonucleotide
acggctgagtataacgctattccccggtag

SEQ ID NO: 41339 - DNA, 30 bp, Artificial Sequence
  Synthetic oligonucleotide
agcagcttaggcataagtgcgtaagggtag

SEQ ID NO: 41340 - DNA, 30 bp, Artificial Sequence
  Synthetic oligonucleotide
gctggcaacaggaagtcatacagtgggtag

SEQ ID NO: 41341 - DNA, 30 bp, Artificial Sequence
  Synthetic oligonucleotide
cctgccggacccaggcgatatgcatggtag

SEQ ID NO: 41342 - DNA, 30 bp, Artificial Sequence
  Synthetic oligonucleotide
ccggaggatggaaatatgaatccgtggtag

SEQ ID NO: 41343 - DNA, 30 bp, Artificial Sequence
  Synthetic oligonucleotide
ggtccgtacgaggaattaaacaagctgtag

SEQ ID NO: 41344 - DNA, 30 bp, Artificial Sequence
  Synthetic oligonucleotide
tgggtcgggtgaacctgctatgaagtgtag

SEQ ID NO: 41345 - DNA, 30 bp, Artificial Sequence
  Synthetic oligonucleotide
atcccacccaacctaacgaaacgagtgtag

SEQ ID NO: 41346 - DNA, 30 bp, Artificial Sequence
  Synthetic oligonucleotide
gccatcagggtaggcaattcgcgcaattag

SEQ ID NO: 41347 - DNA, 30 bp, Artificial Sequence
  Synthetic oligonucleotide
acgtagggtgatcactgccgtcgatattag

SEQ ID NO: 41348 - DNA, 30 bp, Artificial Sequence
  Synthetic oligonucleotide
ccggacagcataaactgaaattcgacttag

SEQ ID NO: 41349 - DNA, 30 bp, Artificial Sequence
  Synthetic oligonucleotide
aggcgtgagcggtctgctacgaagtcttag

SEQ ID NO: 41350 - DNA, 30 bp, Artificial Sequence
  Synthetic oligonucleotide
agtgggtgtttccgcgaatgaaagagttag

SEQ ID NO: 41351 - DNA, 30 bp, Artificial Sequence
  Synthetic oligonucleotide
cgtaccatctaggatcacatccttcgttag

SEQ ID NO: 41352 - DNA, 31 bp, Artificial Sequence
  Synthetic oligonucleotide
gccataggaatagctgaccgtcacgggttag

SEQ ID NO: 41353 - DNA, 30 bp, Artificial Sequence
  Synthetic oligonucleotide
ggatgctcggtatatgcaagaggatgttag

SEQ ID NO: 41354 - DNA, 30 bp, Artificial Sequence
  Synthetic oligonucleotide
ggcatgagatgaagtaaaattaagctttag

SEQ ID NO: 41355 - DNA, 30 bp, Artificial Sequence
  Synthetic oligonucleotide
aacggggtgaagtcaatgcaggatctttag

SEQ ID NO: 41356 - DNA, 30 bp, Artificial Sequence
  Synthetic oligonucleotide
agcgacgtcttagaatgaaagcagaaaacg

SEQ ID NO: 41357 - DNA, 30 bp, Artificial Sequence
  Synthetic oligonucleotide
accggcggcctcactatgaaatcgaaaacg

SEQ ID NO: 41358 - DNA, 30 bp, Artificial Sequence
  Synthetic oligonucleotide
gtcgcatgtcatctatacgagggccaaacg

SEQ ID NO: 41359 - DNA, 30 bp, Artificial Sequence
  Synthetic oligonucleotide
ctgaagacgtgggaagggcgatgtgaaacg

SEQ ID NO: 41360 - DNA, 30 bp, Artificial Sequence
  Synthetic oligonucleotide
ctgggtacggggatcaccaccgattaaacg

SEQ ID NO: 41361 - DNA, 30 bp, Artificial Sequence
  Synthetic oligonucleotide
tcatgtcgtaaaacaactagttaaacaacg

SEQ ID NO: 41362 - DNA, 30 bp, Artificial Sequence
  Synthetic oligonucleotide
aactgcgccacaactatttagcatccaacg

SEQ ID NO: 41363 - DNA, 30 bp, Artificial Sequence
  Synthetic oligonucleotide
acataataagtgtcaagaggctatccaacg

SEQ ID NO: 41364 - DNA, 30 bp, Artificial Sequence
  Synthetic oligonucleotide
tgaaccgtgaacatggggtggtacagaacg

SEQ ID NO: 41365 - DNA, 30 bp, Artificial Sequence
  Synthetic oligonucleotide
gatgccccaagtaaagcccgaggacgaacg

SEQ ID NO: 41366 - DNA, 30 bp, Artificial Sequence
  Synthetic oligonucleotide
tagggactaggctttaaactacgatgaacg

SEQ ID NO: 41367 - DNA, 30 bp, Artificial Sequence
  Synthetic oligonucleotide
aggcgaataggggtgtagtacggtataacg

SEQ ID NO: 41368 - DNA, 30 bp, Artificial Sequence
  Synthetic oligonucleotide
agggataggtgaaacataagatgtaacacg

SEQ ID NO: 41369 - DNA, 30 bp, Artificial Sequence
  Synthetic oligonucleotide
agaacgaccgtgccagtacctaagcacacg

SEQ ID NO: 41370 - DNA, 30 bp, Artificial Sequence
  Synthetic oligonucleotide
atacgtaagagttggaaaattacctccacg

SEQ ID NO: 41371 - DNA, 30 bp, Artificial Sequence
  Synthetic oligonucleotide
ggctcagtcccgcttcatgataattccacg

SEQ ID NO: 41372 - DNA, 30 bp, Artificial Sequence
  Synthetic oligonucleotide
ggtaatctgaagaaatctcaggccagcacg

SEQ ID NO: 41373 - DNA, 30 bp, Artificial Sequence
  Synthetic oligonucleotide
ctacagaaccgggggcaagagagaggcacg

SEQ ID NO: 41374 - DNA, 30 bp, Artificial Sequence
  Synthetic oligonucleotide
acggaagcaaagaatcgcaacgattgcacg

SEQ ID NO: 41375 - DNA, 30 bp, Artificial Sequence
  Synthetic oligonucleotide
tcctagaacatttgacataagcaaaagacg

SEQ ID NO: 41376 - DNA, 30 bp, Artificial Sequence
  Synthetic oligonucleotide
cggtagtaaggaatgaggcgtgggaagacg

SEQ ID NO: 41377 - DNA, 30 bp, Artificial Sequence
  Synthetic oligonucleotide
gtcatgtagtagaaacctaaatggcagacg

SEQ ID NO: 41378 - DNA, 30 bp, Artificial Sequence
  Synthetic oligonucleotide
aatgcagggggttgagtcatgcatcagacg

SEQ ID NO: 41379 - DNA, 30 bp, Artificial Sequence
  Synthetic oligonucleotide
aagtagcgtcagagcgccataaaagagacg

SEQ ID NO: 41380 - DNA, 30 bp, Artificial Sequence
  Synthetic oligonucleotide
tacagagcgtaagaacaacgtgatgagacg

SEQ ID NO: 41381 - DNA, 30 bp, Artificial Sequence
  Synthetic oligonucleotide
gaggaaaacgtcctctagcaacctgagacg

SEQ ID NO: 41382 - DNA, 30 bp, Artificial Sequence
  Synthetic oligonucleotide
tcgcggcgcgcaggcgaacaaggaacgacg

SEQ ID NO: 41383 - DNA, 30 bp, Artificial Sequence
  Synthetic oligonucleotide
tctaggatgcacgaactagggagcacgacg

SEQ ID NO: 41384 - DNA, 30 bp, Artificial Sequence
  Synthetic oligonucleotide
ccaacagggttaagacatgagtgcacgacg

SEQ ID NO: 41385 - DNA, 30 bp, Artificial Sequence
  Synthetic oligonucleotide
ccatacacagccgatgtaatcgggacgacg

SEQ ID NO: 41386 - DNA, 30 bp, Artificial Sequence
  Synthetic oligonucleotide
tcgcgccaagcagaccccgactaaccgacg

SEQ ID NO: 41387 - DNA, 30 bp, Artificial Sequence
  Synthetic oligonucleotide
ggaggcaaccggttcaaggtaaacgcgacg

SEQ ID NO: 41388 - DNA, 30 bp, Artificial Sequence
  Synthetic oligonucleotide
cgtatactcgagtagggtatgcccgcgacg

SEQ ID NO: 41389 - DNA, 30 bp, Artificial Sequence
  Synthetic oligonucleotide
agatgttaacatcaggcgcacggacggacg

SEQ ID NO: 41390 - DNA, 30 bp, Artificial Sequence
  Synthetic oligonucleotide
atagccaggtgcaaaatgtgtggagggacg

SEQ ID NO: 41391 - DNA, 30 bp, Artificial Sequence
  Synthetic oligonucleotide
aggaaacagattttgcctaagtccaatacg

SEQ ID NO: 41392 - DNA, 30 bp, Artificial Sequence
  Synthetic oligonucleotide
tgagggctcgaatatggtaaacggaatacg

SEQ ID NO: 41393 - DNA, 30 bp, Artificial Sequence
  Synthetic oligonucleotide
ggtcacaagagagtaatgattattaatacg

SEQ ID NO: 41394 - DNA, 30 bp, Artificial Sequence
  Synthetic oligonucleotide
ggacgccttgggcatagcgggagccatacg

SEQ ID NO: 41395 - DNA, 30 bp, Artificial Sequence
  Synthetic oligonucleotide
aacgagatttctaggggagaaaggcatacg

SEQ ID NO: 41396 - DNA, 30 bp, Artificial Sequence
  Synthetic oligonucleotide
agtagtactgaacaacgaaaccgaactacg

SEQ ID NO: 41397 - DNA, 30 bp, Artificial Sequence
  Synthetic oligonucleotide
cgaaggtatagcggaaatgcaatccctacg

SEQ ID NO: 41398 - DNA, 30 bp, Artificial Sequence
  Synthetic oligonucleotide
acacatggtaaatagtgagatatccctacg

SEQ ID NO: 41399 - DNA, 30 bp, Artificial Sequence
  Synthetic oligonucleotide
aagacagccgactacagagttggcgctacg

SEQ ID NO: 41400 - DNA, 30 bp, Artificial Sequence
  Synthetic oligonucleotide
gctacctcggaaagcagatatccaagtacg

SEQ ID NO: 41401 - DNA, 30 bp, Artificial Sequence
  Synthetic oligonucleotide
aatcggaagtaaagctggcagttacgtacg

SEQ ID NO: 41402 - DNA, 30 bp, Artificial Sequence
  Synthetic oligonucleotide
caggtgaggcgcgccataaattaaggtacg

SEQ ID NO: 41403 - DNA, 30 bp, Artificial Sequence
  Synthetic oligonucleotide
tcattaaaatagtaagtccaacactgtacg

SEQ ID NO: 41404 - DNA, 30 bp, Artificial Sequence
  Synthetic oligonucleotide
acgcaatatgaatacgaaaccgattgtacg

SEQ ID NO: 41405 - DNA, 30 bp, Artificial Sequence
  Synthetic oligonucleotide
taggagcgagtgcaggatgagacgcttacg

SEQ ID NO: 41406 - DNA, 30 bp, Artificial Sequence
  Synthetic oligonucleotide
acgggcacagacaagaccctagttgttacg

SEQ ID NO: 41407 - DNA, 30 bp, Artificial Sequence
  Synthetic oligonucleotide
aacggatagaagaagtccctacggtttacg

SEQ ID NO: 41408 - DNA, 30 bp, Artificial Sequence
  Synthetic oligonucleotide
tcactgaatgagaagttcgcaaaaaaaccg

SEQ ID NO: 41409 - DNA, 30 bp, Artificial Sequence
  Synthetic oligonucleotide
tggagaacagagtagtggcttacagaaccg

SEQ ID NO: 41410 - DNA, 30 bp, Artificial Sequence
  Synthetic oligonucleotide
ccggacagtgcataatgttcaccggaaccg

SEQ ID NO: 41411 - DNA, 30 bp, Artificial Sequence
  Synthetic oligonucleotide
gagcgctattacccgtggatgtctgaaccg

SEQ ID NO: 41412 - DNA, 30 bp, Artificial Sequence
  Synthetic oligonucleotide
cgctagtcaggggaaacaagcgtataaccg

SEQ ID NO: 41413 - DNA, 30 bp, Artificial Sequence
  Synthetic oligonucleotide
tgagaaatgcagcctagatgtggggcaccg

SEQ ID NO: 41414 - DNA, 30 bp, Artificial Sequence
  Synthetic oligonucleotide
gttcgaaagaagtgtgcggtatctgcaccg

SEQ ID NO: 41415 - DNA, 30 bp, Artificial Sequence
  Synthetic oligonucleotide
cagcatgagtttacaaacaggtgtgcaccg

SEQ ID NO: 41416 - DNA, 30 bp, Artificial Sequence
  Synthetic oligonucleotide
cgcgatggaccgggacagcaggaaagaccg

SEQ ID NO: 41417 - DNA, 30 bp, Artificial Sequence
  Synthetic oligonucleotide
cttagacacggatattaaggacgaagaccg

SEQ ID NO: 41418 - DNA, 30 bp, Artificial Sequence
  Synthetic oligonucleotide
ccttatgtgcactaataaactaacagaccg

SEQ ID NO: 41419 - DNA, 30 bp, Artificial Sequence
  Synthetic oligonucleotide
gggcggactaagaattgcatcaatagaccg

SEQ ID NO: 41420 - DNA, 30 bp, Artificial Sequence
  Synthetic oligonucleotide
aacatagacatataaggtgggccgggaccg

SEQ ID NO: 41421 - DNA, 30 bp, Artificial Sequence
  Synthetic oligonucleotide
ttacgccttgaaatctgggagggcataccg

SEQ ID NO: 41422 - DNA, 30 bp, Artificial Sequence
  Synthetic oligonucleotide
gcggtaagacttacgactacgaatataccg

SEQ ID NO: 41423 - DNA, 30 bp, Artificial Sequence
  Synthetic oligonucleotide
caccgagtaataatcagccatccactaccg

SEQ ID NO: 41424 - DNA, 30 bp, Artificial Sequence
  Synthetic oligonucleotide
catatcaaggtcggcctgtaagcactaccg

SEQ ID NO: 41425 - DNA, 30 bp, Artificial Sequence
  Synthetic oligonucleotide
catggtgacttacgagtgtcgtgactaccg

SEQ ID NO: 41426 - DNA, 30 bp, Artificial Sequence
  Synthetic oligonucleotide
ccgaaccgaacacgggaactggccttaccg

SEQ ID NO: 41427 - DNA, 30 bp, Artificial Sequence
  Synthetic oligonucleotide
cataaacgtcggaatggaagcattaacccg

SEQ ID NO: 41428 - DNA, 30 bp, Artificial Sequence
  Synthetic oligonucleotide
gaacaggtatgggcaacctacactcacccg

SEQ ID NO: 41429 - DNA, 30 bp, Artificial Sequence
  Synthetic oligonucleotide
attcgacggccatgactgtgactagacccg

SEQ ID NO: 41430 - DNA, 30 bp, Artificial Sequence
  Synthetic oligonucleotide
gagcacaactggtcatctcgaggctacccg

SEQ ID NO: 41431 - DNA, 30 bp, Artificial Sequence
  Synthetic oligonucleotide
tctacataagggcaattgaacacaaccccg

SEQ ID NO: 41432 - DNA, 30 bp, Artificial Sequence
  Synthetic oligonucleotide
cgaacataaataagcaacaactcgaccccg

SEQ ID NO: 41433 - DNA, 30 bp, Artificial Sequence
  Synthetic oligonucleotide
ccattcacgggttagccaaacaagtccccg

SEQ ID NO: 41434 - DNA, 30 bp, Artificial Sequence
  Synthetic oligonucleotide
atgctatgtcttccaacgagttcgcgcccg

SEQ ID NO: 41435 - DNA, 30 bp, Artificial Sequence
  Synthetic oligonucleotide
caacggagggagatcagcacgcacctcccg

SEQ ID NO: 41436 - DNA, 30 bp, Artificial Sequence
  Synthetic oligonucleotide
tcgctgaaaatcaaaggcaacgcgctcccg

SEQ ID NO: 41437 - DNA, 30 bp, Artificial Sequence
  Synthetic oligonucleotide
gaggctgaatcgtacaggaagtattagccg

SEQ ID NO: 41438 - DNA, 30 bp, Artificial Sequence
  Synthetic oligonucleotide
tccgtcagtaatgaattagaagcaacgccg

SEQ ID NO: 41439 - DNA, 30 bp, Artificial Sequence
  Synthetic oligonucleotide
gggggtgtgtagggtgttgtgcaaccgccg

SEQ ID NO: 41440 - DNA, 30 bp, Artificial Sequence
  Synthetic oligonucleotide
acacaagcgttataagagtcccacccgccg

SEQ ID NO: 41441 - DNA, 30 bp, Artificial Sequence
  Synthetic oligonucleotide
tgaaggtgcatcgcccggagttcgccgccg

SEQ ID NO: 41442 - DNA, 30 bp, Artificial Sequence
  Synthetic oligonucleotide
acaaatatcacgtattccttgttatcgccg

SEQ ID NO: 41443 - DNA, 30 bp, Artificial Sequence
  Synthetic oligonucleotide
tgagcactagggtctaaaacgaataggccg

SEQ ID NO: 41444 - DNA, 30 bp, Artificial Sequence
  Synthetic oligonucleotide
gctcccacttcatttgagaaagagcggccg

SEQ ID NO: 41445 - DNA, 30 bp, Artificial Sequence
  Synthetic oligonucleotide
acgagcgagtagcatggacatgaggggccg

SEQ ID NO: 41446 - DNA, 30 bp, Artificial Sequence
  Synthetic oligonucleotide
acgagcgactaaagtaacgtcgtatggccg

SEQ ID NO: 41447 - DNA, 30 bp, Artificial Sequence
  Synthetic oligonucleotide
ggtcacgagctgatagataagatcctgccg

SEQ ID NO: 41448 - DNA, 30 bp, Artificial Sequence
  Synthetic oligonucleotide
gatccaacccaggagatttaaagtctgccg

SEQ ID NO: 41449 - DNA, 31 bp, Artificial Sequence
  Synthetic oligonucleotide
tgcagagctaatagatcgtcacagtaatccg

SEQ ID NO: 41450 - DNA, 30 bp, Artificial Sequence
  Synthetic oligonucleotide
ctgcgtagaagaagatgctcagtgagtccg

SEQ ID NO: 41451 - DNA, 30 bp, Artificial Sequence
  Synthetic oligonucleotide
agcgaagcgacacagcgagaccatagtccg

SEQ ID NO: 41452 - DNA, 31 bp, Artificial Sequence
  Synthetic oligonucleotide
gatgggccatgaccgttgatccagacgtccg

SEQ ID NO: 41453 - DNA, 30 bp, Artificial Sequence
  Synthetic oligonucleotide
cataagtgcgttgccgttaaggggattccg

SEQ ID NO: 41454 - DNA, 30 bp, Artificial Sequence
  Synthetic oligonucleotide
agctgacctggatacataagaagtattccg

SEQ ID NO: 41455 - DNA, 30 bp, Artificial Sequence
  Synthetic oligonucleotide
aaagagataacactcgaatacgtgaaagcg

SEQ ID NO: 41456 - DNA, 30 bp, Artificial Sequence
  Synthetic oligonucleotide
attagaccgagatatgcaaaatccacagcg

SEQ ID NO: 41457 - DNA, 30 bp, Artificial Sequence
  Synthetic oligonucleotide
tattagtcccatagaccacagaagacagcg

SEQ ID NO: 41458 - DNA, 30 bp, Artificial Sequence
  Synthetic oligonucleotide
ccgtcgcaatcaatacgacagtacccagcg

SEQ ID NO: 41459 - DNA, 30 bp, Artificial Sequence
  Synthetic oligonucleotide
cggccaagggtaaacgcgtacacgccagcg

SEQ ID NO: 41460 - DNA, 30 bp, Artificial Sequence
  Synthetic oligonucleotide
gcggaattcggccgcaaagatttgccagcg

SEQ ID NO: 41461 - DNA, 30 bp, Artificial Sequence
  Synthetic oligonucleotide
tcgtgctgacccatcgaacactcatcagcg

SEQ ID NO: 41462 - DNA, 30 bp, Artificial Sequence
  Synthetic oligonucleotide
ctgcccctcgtaacaagtcacagaagagcg

SEQ ID NO: 41463 - DNA, 30 bp, Artificial Sequence
  Synthetic oligonucleotide
cgcggtgacatcgtgcactgactaagagcg

SEQ ID NO: 41464 - DNA, 30 bp, Artificial Sequence
  Synthetic oligonucleotide
aggatcgggccattatgtggaaaaggagcg

SEQ ID NO: 41465 - DNA, 30 bp, Artificial Sequence
  Synthetic oligonucleotide
cgaaggatcccaaaggaaagggggggagcg

SEQ ID NO: 41466 - DNA, 30 bp, Artificial Sequence
  Synthetic oligonucleotide
cggtcagatagtcgggcgctagtgggagcg

SEQ ID NO: 41467 - DNA, 30 bp, Artificial Sequence
  Synthetic oligonucleotide
acattgagattctgggcgaataattgagcg

SEQ ID NO: 41468 - DNA, 30 bp, Artificial Sequence
  Synthetic oligonucleotide
tacagtgaccgatacgcctgccgaatagcg

SEQ ID NO: 41469 - DNA, 30 bp, Artificial Sequence
  Synthetic oligonucleotide
cggaggccaccgaaattggctgtactagcg

SEQ ID NO: 41470 - DNA, 30 bp, Artificial Sequence
  Synthetic oligonucleotide
caatggccgatacggcatgggacagtagcg

SEQ ID NO: 41471 - DNA, 30 bp, Artificial Sequence
  Synthetic oligonucleotide
gtgggcgtaggcactggggatcgagtagcg

SEQ ID NO: 41472 - DNA, 30 bp, Artificial Sequence
  Synthetic oligonucleotide
ccgtaggttggaggaggtctgaacttagcg

SEQ ID NO: 41473 - DNA, 30 bp, Artificial Sequence
  Synthetic oligonucleotide
agagaatcggggttaaaggggccgttagcg

SEQ ID NO: 41474 - DNA, 30 bp, Artificial Sequence
  Synthetic oligonucleotide
tagacagttcgctaaaacatctaaaacgcg

SEQ ID NO: 41475 - DNA, 30 bp, Artificial Sequence
  Synthetic oligonucleotide
ctgggaacagtttatgatcacatcaacgcg

SEQ ID NO: 41476 - DNA, 30 bp, Artificial Sequence
  Synthetic oligonucleotide
gcgaacgtacgaagtatgacaagtcacgcg

SEQ ID NO: 41477 - DNA, 30 bp, Artificial Sequence
  Synthetic oligonucleotide
cgatgcgctgtgtattaccgcgaaagcgcg

SEQ ID NO: 41478 - DNA, 30 bp, Artificial Sequence
  Synthetic oligonucleotide
tgtggagttatcctggataagccaagcgcg

SEQ ID NO: 41479 - DNA, 30 bp, Artificial Sequence
  Synthetic oligonucleotide
caacacattagcaacagccaccctagcgcg

SEQ ID NO: 41480 - DNA, 30 bp, Artificial Sequence
  Synthetic oligonucleotide
ttggcaaggatggcgggcctgctgcgcgcg

SEQ ID NO: 41481 - DNA, 30 bp, Artificial Sequence
  Synthetic oligonucleotide
tctggtcaaagagagcgtcatctcggcgcg

SEQ ID NO: 41482 - DNA, 30 bp, Artificial Sequence
  Synthetic oligonucleotide
ttcaagcgaatgtaacagttgcagtgcgcg

SEQ ID NO: 41483 - DNA, 30 bp, Artificial Sequence
  Synthetic oligonucleotide
tagctaatggtgcacagatacaggtgcgcg

SEQ ID NO: 41484 - DNA, 30 bp, Artificial Sequence
  Synthetic oligonucleotide
cggatcataggggagtagaggttgatcgcg

SEQ ID NO: 41485 - DNA, 30 bp, Artificial Sequence
  Synthetic oligonucleotide
cgtgacatagttacaaggggttctaaggcg

SEQ ID NO: 41486 - DNA, 30 bp, Artificial Sequence
  Synthetic oligonucleotide
ggtaaatgtggttgtgttcgagcccaggcg

SEQ ID NO: 41487 - DNA, 30 bp, Artificial Sequence
  Synthetic oligonucleotide
taacaagaaatagagacgaaggtccaggcg

SEQ ID NO: 41488 - DNA, 30 bp, Artificial Sequence
  Synthetic oligonucleotide
agcgtagcatatttggaaataggagaggcg

SEQ ID NO: 41489 - DNA, 30 bp, Artificial Sequence
  Synthetic oligonucleotide
gatgaataggcggacgcaaataggtaggcg

SEQ ID NO: 41490 - DNA, 30 bp, Artificial Sequence
  Synthetic oligonucleotide
gattccaggagcaaaacaacgaatacggcg

SEQ ID NO: 41491 - DNA, 30 bp, Artificial Sequence
  Synthetic oligonucleotide
acgaaatccttgcaatggaactctgcggcg

SEQ ID NO: 41492 - DNA, 30 bp, Artificial Sequence
  Synthetic oligonucleotide
ttgatatgtaaaacgaattagtagtcggcg

SEQ ID NO: 41493 - DNA, 30 bp, Artificial Sequence
  Synthetic oligonucleotide
cacattaactggaatgcgtaatgtagggcg

SEQ ID NO: 41494 - DNA, 30 bp, Artificial Sequence
  Synthetic oligonucleotide
cgtgtttaaacattgacgtcggtccgggcg

SEQ ID NO: 41495 - DNA, 30 bp, Artificial Sequence
  Synthetic oligonucleotide
gatggttcaagcgggacatagcaaggggcg

SEQ ID NO: 41496 - DNA, 30 bp, Artificial Sequence
  Synthetic oligonucleotide
gagaaggaggctaacaggcgatgtctggcg

SEQ ID NO: 41497 - DNA, 30 bp, Artificial Sequence
  Synthetic oligonucleotide
agaggtactggaagattcggtctgttggcg

SEQ ID NO: 41498 - DNA, 30 bp, Artificial Sequence
  Synthetic oligonucleotide
ctgggtacctgacgactagtggaaaatgcg

SEQ ID NO: 41499 - DNA, 30 bp, Artificial Sequence
  Synthetic oligonucleotide
caatagcggggtgggcagagatatcatgcg

SEQ ID NO: 41500 - DNA, 30 bp, Artificial Sequence
  Synthetic oligonucleotide
ttaagatcagtggcgagacaaattgatgcg

SEQ ID NO: 41501 - DNA, 30 bp, Artificial Sequence
  Synthetic oligonucleotide
agctaagataacccaacgaaggattatgcg

SEQ ID NO: 41502 - DNA, 30 bp, Artificial Sequence
  Synthetic oligonucleotide
ccgagatagatggagatcgccgaggctgcg

SEQ ID NO: 41503 - DNA, 30 bp, Artificial Sequence
  Synthetic oligonucleotide
gggcgtcaggaacaagctttaaagtctgcg

SEQ ID NO: 41504 - DNA, 30 bp, Artificial Sequence
  Synthetic oligonucleotide
gacgtgtaagctacaaatcagtgttctgcg

SEQ ID NO: 41505 - DNA, 30 bp, Artificial Sequence
  Synthetic oligonucleotide
gataacgaacttagaatggtctggagtgcg

SEQ ID NO: 41506 - DNA, 30 bp, Artificial Sequence
  Synthetic oligonucleotide
cgcggagtccaagagctcaaccatggtgcg

SEQ ID NO: 41507 - DNA, 30 bp, Artificial Sequence
  Synthetic oligonucleotide
gggggcacatgtcatccgggatcgcttgcg

SEQ ID NO: 41508 - DNA, 30 bp, Artificial Sequence
  Synthetic oligonucleotide
ggccggcgaatatgttcctacatccaatcg

SEQ ID NO: 41509 - DNA, 30 bp, Artificial Sequence
  Synthetic oligonucleotide
aggaggaggcgatacagggggctagaatcg

SEQ ID NO: 41510 - DNA, 30 bp, Artificial Sequence
  Synthetic oligonucleotide
tgcactcaggaagtagcaccacaggaatcg

SEQ ID NO: 41511 - DNA, 30 bp, Artificial Sequence
  Synthetic oligonucleotide
ccgcccagcaacaaaagcgtgatataatcg

SEQ ID NO: 41512 - DNA, 30 bp, Artificial Sequence
  Synthetic oligonucleotide
cggtttcatgtaaacgatcactaaccatcg

SEQ ID NO: 41513 - DNA, 30 bp, Artificial Sequence
  Synthetic oligonucleotide
tcggctgccaaaactactccgcggccatcg

SEQ ID NO: 41514 - DNA, 30 bp, Artificial Sequence
  Synthetic oligonucleotide
ctacgtcacaagatcacatcagccgcatcg

SEQ ID NO: 41515 - DNA, 30 bp, Artificial Sequence
  Synthetic oligonucleotide
tcagttcgtcggtgtaagagctcatcatcg

SEQ ID NO: 41516 - DNA, 30 bp, Artificial Sequence
  Synthetic oligonucleotide
gcgcagggggtagccagcatgattagatcg

SEQ ID NO: 41517 - DNA, 30 bp, Artificial Sequence
  Synthetic oligonucleotide
aggatcaatctcaaaaatttcctacgatcg

SEQ ID NO: 41518 - DNA, 30 bp, Artificial Sequence
  Synthetic oligonucleotide
atgggaggggatcgtagactagattgatcg

SEQ ID NO: 41519 - DNA, 30 bp, Artificial Sequence
  Synthetic oligonucleotide
acggagcctggggacgtaagataaatatcg

SEQ ID NO: 41520 - DNA, 30 bp, Artificial Sequence
  Synthetic oligonucleotide
cgacttacatcaattatgctctgagtatcg

SEQ ID NO: 41521 - DNA, 30 bp, Artificial Sequence
  Synthetic oligonucleotide
aagccaaagtactatatcggacacgtatcg

SEQ ID NO: 41522 - DNA, 31 bp, Artificial Sequence
  Synthetic oligonucleotide
gtaggtggtaagtatcacttgaccggtatcg

SEQ ID NO: 41523 - DNA, 30 bp, Artificial Sequence
  Synthetic oligonucleotide
aggtccactccggtaggagagatattatcg

SEQ ID NO: 41524 - DNA, 30 bp, Artificial Sequence
  Synthetic oligonucleotide
aaccgcctctcggggaaactagggaactcg

SEQ ID NO: 41525 - DNA, 30 bp, Artificial Sequence
  Synthetic oligonucleotide
aggtcataggtcccgcccatgaacgactcg

SEQ ID NO: 41526 - DNA, 30 bp, Artificial Sequence
  Synthetic oligonucleotide
gggtgggtctaaaccaagagtcatacctcg

SEQ ID NO: 41527 - DNA, 30 bp, Artificial Sequence
  Synthetic oligonucleotide
atgcggattacagaataaccaatggcctcg

SEQ ID NO: 41528 - DNA, 30 bp, Artificial Sequence
  Synthetic oligonucleotide
attgcatatcgaacggtgtcgtcgagctcg

SEQ ID NO: 41529 - DNA, 30 bp, Artificial Sequence
  Synthetic oligonucleotide
aaagtggggggtggacaagggaaacgctcg

SEQ ID NO: 41530 - DNA, 30 bp, Artificial Sequence
  Synthetic oligonucleotide
agatgaatttcctgttcagccggtcgctcg

SEQ ID NO: 41531 - DNA, 30 bp, Artificial Sequence
  Synthetic oligonucleotide
ccaaagaataagatatctgtaaacggctcg

SEQ ID NO: 41532 - DNA, 30 bp, Artificial Sequence
  Synthetic oligonucleotide
aagacaaaagggagggcagcaatatgctcg

SEQ ID NO: 41533 - DNA, 30 bp, Artificial Sequence
  Synthetic oligonucleotide
agaggggactgtggtcctgtaaccatctcg

SEQ ID NO: 41534 - DNA, 30 bp, Artificial Sequence
  Synthetic oligonucleotide
cttaaaacagggtggagtcgatccatctcg

SEQ ID NO: 41535 - DNA, 30 bp, Artificial Sequence
  Synthetic oligonucleotide
cgcatgttagtcatccggaactatatctcg

SEQ ID NO: 41536 - DNA, 30 bp, Artificial Sequence
  Synthetic oligonucleotide
ggtcacccgtgctgtgaaggatcgctctcg

SEQ ID NO: 41537 - DNA, 30 bp, Artificial Sequence
  Synthetic oligonucleotide
gggtgctgagggaccgtatagaagttctcg

SEQ ID NO: 41538 - DNA, 30 bp, Artificial Sequence
  Synthetic oligonucleotide
tgcgagagggtgagaattaaaactttctcg

SEQ ID NO: 41539 - DNA, 30 bp, Artificial Sequence
  Synthetic oligonucleotide
cgaatccgcatagtctgctaaccaaagtcg

SEQ ID NO: 41540 - DNA, 30 bp, Artificial Sequence
  Synthetic oligonucleotide
ccttcggcgggatacacgaaatgtaagtcg

SEQ ID NO: 41541 - DNA, 30 bp, Artificial Sequence
  Synthetic oligonucleotide
gaccggccaatactagactaataacagtcg

SEQ ID NO: 41542 - DNA, 30 bp, Artificial Sequence
  Synthetic oligonucleotide
cgaggcgtgacttggtaaccttaacagtcg

SEQ ID NO: 41543 - DNA, 30 bp, Artificial Sequence
  Synthetic oligonucleotide
acgggcacgccagggggtacaggacagtcg

SEQ ID NO: 41544 - DNA, 30 bp, Artificial Sequence
  Synthetic oligonucleotide
cgtcttgcggattaccttgggatcgagtcg

SEQ ID NO: 41545 - DNA, 30 bp, Artificial Sequence
  Synthetic oligonucleotide
gctacaatgggctaattacaaataacgtcg

SEQ ID NO: 41546 - DNA, 30 bp, Artificial Sequence
  Synthetic oligonucleotide
ccatataagttcacccaagtgtgttcgtcg

SEQ ID NO: 41547 - DNA, 30 bp, Artificial Sequence
  Synthetic oligonucleotide
aggcgatctcaatgttatagtagccggtcg

SEQ ID NO: 41548 - DNA, 30 bp, Artificial Sequence
  Synthetic oligonucleotide
gctgattgcctgccaacaagacagtggtcg

SEQ ID NO: 41549 - DNA, 27 bp, Artificial Sequence
  Synthetic oligonucleotide
acaggatcgaaagataaaaacatgtcg

SEQ ID NO: 41550 - DNA, 30 bp, Artificial Sequence
  Synthetic oligonucleotide
agcgacagtgccagggggacaatgatgtcg

SEQ ID NO: 41551 - DNA, 30 bp, Artificial Sequence
  Synthetic oligonucleotide
cacagagctaagaggtcggagtttatgtcg

SEQ ID NO: 41552 - DNA, 30 bp, Artificial Sequence
  Synthetic oligonucleotide
caaatgaacttaggcctccaagacgtgtcg

SEQ ID NO: 41553 - DNA, 29 bp, Artificial Sequence
  Synthetic oligonucleotide
ctgaggatgatttggcggttacattgtcg

SEQ ID NO: 41554 - DNA, 30 bp, Artificial Sequence
  Synthetic oligonucleotide
aggagggtcaagccagtgtccttattgtcg

SEQ ID NO: 41555 - DNA, 30 bp, Artificial Sequence
  Synthetic oligonucleotide
actaagtgtagaaggttactagctttgtcg

SEQ ID NO: 41556 - DNA, 30 bp, Artificial Sequence
  Synthetic oligonucleotide
ccgataggcccatggtacgtcctaaattcg

SEQ ID NO: 41557 - DNA, 30 bp, Artificial Sequence
  Synthetic oligonucleotide
caatgcatcgcaaggacagggtctcattcg

SEQ ID NO: 41558 - DNA, 30 bp, Artificial Sequence
  Synthetic oligonucleotide
cagacaaccgagttcctcccacttgattcg

SEQ ID NO: 41559 - DNA, 30 bp, Artificial Sequence
  Synthetic oligonucleotide
tgcggaccgagacagagtcgtccttattcg

SEQ ID NO: 41560 - DNA, 30 bp, Artificial Sequence
  Synthetic oligonucleotide
gcgatagcgggtgcgagggcgcatccttcg

SEQ ID NO: 41561 - DNA, 30 bp, Artificial Sequence
  Synthetic oligonucleotide
acacttgcgaggggcgagaggactccttcg

SEQ ID NO: 41562 - DNA, 30 bp, Artificial Sequence
  Synthetic oligonucleotide
ggtcactgggaactatctaataaaatttcg

SEQ ID NO: 41563 - DNA, 30 bp, Artificial Sequence
  Synthetic oligonucleotide
tgccaacaatcttacattcgaacaatttcg

SEQ ID NO: 41564 - DNA, 30 bp, Artificial Sequence
  Synthetic oligonucleotide
tgaacggtaataggcaaaggatccatttcg

SEQ ID NO: 41565 - DNA, 30 bp, Artificial Sequence
  Synthetic oligonucleotide
gggtcgaggtaagaaccagataagctttcg

SEQ ID NO: 41566 - DNA, 30 bp, Artificial Sequence
  Synthetic oligonucleotide
cccgatgttaagaaggtaatgaatgtttcg

SEQ ID NO: 41567 - DNA, 30 bp, Artificial Sequence
  Synthetic oligonucleotide
cagaagaactacgatgacttccaccaaagg

SEQ ID NO: 41568 - DNA, 30 bp, Artificial Sequence
  Synthetic oligonucleotide
acaaggggatctccatgatagtagcaaagg

SEQ ID NO: 41569 - DNA, 30 bp, Artificial Sequence
  Synthetic oligonucleotide
aacgggtgggaaggaatgtgtccgcaaagg

SEQ ID NO: 41570 - DNA, 30 bp, Artificial Sequence
  Synthetic oligonucleotide
cgcagagtgggtaagggaacgaccgaaagg

SEQ ID NO: 41571 - DNA, 30 bp, Artificial Sequence
  Synthetic oligonucleotide
ctaagaaggacattgaatgaaagctaaagg

SEQ ID NO: 41572 - DNA, 30 bp, Artificial Sequence
  Synthetic oligonucleotide
gtcgatggaaacaggatcgattggtaaagg

SEQ ID NO: 41573 - DNA, 30 bp, Artificial Sequence
  Synthetic oligonucleotide
taatcgactagtatggactgcgattaaagg

SEQ ID NO: 41574 - DNA, 30 bp, Artificial Sequence
  Synthetic oligonucleotide
tctaaaccggcaagggcagtacgaacaagg

SEQ ID NO: 41575 - DNA, 30 bp, Artificial Sequence
  Synthetic oligonucleotide
agtaaataccgcggacataacttcccaagg

SEQ ID NO: 41576 - DNA, 30 bp, Artificial Sequence
  Synthetic oligonucleotide
tgttcgaacctcaaggaatatagggcaagg

SEQ ID NO: 41577 - DNA, 30 bp, Artificial Sequence
  Synthetic oligonucleotide
aagagacggcgtaggcaatcgtattcaagg

SEQ ID NO: 41578 - DNA, 30 bp, Artificial Sequence
  Synthetic oligonucleotide
ggctgaagtctgtggtgatttaggagaagg

SEQ ID NO: 41579 - DNA, 30 bp, Artificial Sequence
  Synthetic oligonucleotide
gtggttggcggaccaaaaaaatgtagaagg

SEQ ID NO: 41580 - DNA, 30 bp, Artificial Sequence
  Synthetic oligonucleotide
tttacacgagcgtccccaatctaacgaagg

SEQ ID NO: 41581 - DNA, 30 bp, Artificial Sequence
  Synthetic oligonucleotide
gggacgggagtaaacgggcttatgcgaagg

SEQ ID NO: 41582 - DNA, 30 bp, Artificial Sequence
  Synthetic oligonucleotide
acgtcgagcgacagtgtctggcatggaagg

SEQ ID NO: 41583 - DNA, 30 bp, Artificial Sequence
  Synthetic oligonucleotide
acgttagcacaggatagcacgtaatgaagg

SEQ ID NO: 41584 - DNA, 30 bp, Artificial Sequence
  Synthetic oligonucleotide
tgtaagaacctcacccagaaacacctaagg

SEQ ID NO: 41585 - DNA, 30 bp, Artificial Sequence
  Synthetic oligonucleotide
ccgtggatttgacctcagagtggagtaagg

SEQ ID NO: 41586 - DNA, 30 bp, Artificial Sequence
  Synthetic oligonucleotide
agcttaaagtgtgcgttggggagattaagg

SEQ ID NO: 41587 - DNA, 30 bp, Artificial Sequence
  Synthetic oligonucleotide
agccaaggaaacgcgggtttacatttaagg

SEQ ID NO: 41588 - DNA, 30 bp, Artificial Sequence
  Synthetic oligonucleotide
agggtttgtactgttaaacaagccaacagg

SEQ ID NO: 41589 - DNA, 30 bp, Artificial Sequence
  Synthetic oligonucleotide
tagctagaatctgacgtaacgaggaacagg

SEQ ID NO: 41590 - DNA, 30 bp, Artificial Sequence
  Synthetic oligonucleotide
cacgagcagaattgaattaccgcagacagg

SEQ ID NO: 41591 - DNA, 30 bp, Artificial Sequence
  Synthetic oligonucleotide
ttgacactgggactgaaaacacgcaccagg

SEQ ID NO: 41592 - DNA, 30 bp, Artificial Sequence
  Synthetic oligonucleotide
taatatccgaagcgtcttcgcaaagccagg

SEQ ID NO: 41593 - DNA, 30 bp, Artificial Sequence
  Synthetic oligonucleotide
gtaccgagagaggtggagcagacagccagg

SEQ ID NO: 41594 - DNA, 30 bp, Artificial Sequence
  Synthetic oligonucleotide
ctacggagcagtttagttatgagctccagg

SEQ ID NO: 41595 - DNA, 30 bp, Artificial Sequence
  Synthetic oligonucleotide
tgcaaatagtacggaacgcgagctagcagg

SEQ ID NO: 41596 - DNA, 30 bp, Artificial Sequence
  Synthetic oligonucleotide
acgacagttttcctgccatcgtgcatcagg

SEQ ID NO: 41597 - DNA, 30 bp, Artificial Sequence
  Synthetic oligonucleotide
attgttggagggtaggtaatctagatcagg

SEQ ID NO: 41598 - DNA, 30 bp, Artificial Sequence
  Synthetic oligonucleotide
tgtagaacctaggtgtgccagaatatcagg

SEQ ID NO: 41599 - DNA, 30 bp, Artificial Sequence
  Synthetic oligonucleotide
gtcggttaatggtaacaatagcgagtcagg

SEQ ID NO: 41600 - DNA, 30 bp, Artificial Sequence
  Synthetic oligonucleotide
tcgctgctaggacgatggtgaccattcagg

SEQ ID NO: 41601 - DNA, 30 bp, Artificial Sequence
  Synthetic oligonucleotide
aggaatgcagtaacggatacgtctttcagg

SEQ ID NO: 41602 - DNA, 29 bp, Artificial Sequence
  Synthetic oligonucleotide
gcagcagacggtcagtttgtgccaagagg

SEQ ID NO: 41603 - DNA, 30 bp, Artificial Sequence
  Synthetic oligonucleotide
gcagtttaaggccggtggatctagaagagg

SEQ ID NO: 41604 - DNA, 30 bp, Artificial Sequence
  Synthetic oligonucleotide
gaggaggataatcgcttcagaacgaagagg

SEQ ID NO: 41605 - DNA, 30 bp, Artificial Sequence
  Synthetic oligonucleotide
aaacaaataggacatatatacgaagagagg

SEQ ID NO: 41606 - DNA, 30 bp, Artificial Sequence
  Synthetic oligonucleotide
cgactgtgagaccatggcatcgcctagagg

SEQ ID NO: 41607 - DNA, 30 bp, Artificial Sequence
  Synthetic oligonucleotide
ctgcgcgagtgtagaaagcgtgggccgagg

SEQ ID NO: 41608 - DNA, 30 bp, Artificial Sequence
  Synthetic oligonucleotide
aagcagaacagaacatatagtatcgcgagg

SEQ ID NO: 41609 - DNA, 30 bp, Artificial Sequence
  Synthetic oligonucleotide
cgccttcagcgagagacggataaggcgagg

SEQ ID NO: 41610 - DNA, 30 bp, Artificial Sequence
  Synthetic oligonucleotide
tctgacaaacccagtgttgttacaaggagg

SEQ ID NO: 41611 - DNA, 30 bp, Artificial Sequence
  Synthetic oligonucleotide
agcggctactgatcatagcgcgggaggagg

SEQ ID NO: 41612 - DNA, 30 bp, Artificial Sequence
  Synthetic oligonucleotide
gttaacagagtgatcccaacggaatggagg

SEQ ID NO: 41613 - DNA, 30 bp, Artificial Sequence
  Synthetic oligonucleotide
gatcgctcgagcatgtctccggaaatgagg

SEQ ID NO: 41614 - DNA, 30 bp, Artificial Sequence
  Synthetic oligonucleotide
gacagagaggggcggacgaaaccaatgagg

SEQ ID NO: 41615 - DNA, 30 bp, Artificial Sequence
  Synthetic oligonucleotide
ctggtgaaggctgtaaaactagtgatgagg

SEQ ID NO: 41616 - DNA, 30 bp, Artificial Sequence
  Synthetic oligonucleotide
tagcttggagtaaaaggcgtgtacaatagg

SEQ ID NO: 41617 - DNA, 30 bp, Artificial Sequence
  Synthetic oligonucleotide
gagtacacgtaatagtgaagaggcaatagg

SEQ ID NO: 41618 - DNA, 30 bp, Artificial Sequence
  Synthetic oligonucleotide
ggcgagacggtgggtcgaatggtgaatagg

SEQ ID NO: 41619 - DNA, 30 bp, Artificial Sequence
  Synthetic oligonucleotide
cacacataggatatacggtgtattaatagg

SEQ ID NO: 41620 - DNA, 30 bp, Artificial Sequence
  Synthetic oligonucleotide
cgagtccggaatgttaatacagcccatagg

SEQ ID NO: 41621 - DNA, 30 bp, Artificial Sequence
  Synthetic oligonucleotide
aaaggacacaagcagtcgggaccggatagg

SEQ ID NO: 41622 - DNA, 30 bp, Artificial Sequence
  Synthetic oligonucleotide
cgctacacagatagctaattccgggatagg

SEQ ID NO: 41623 - DNA, 30 bp, Artificial Sequence
  Synthetic oligonucleotide
gtatcggtacatagaataggtgtggatagg

SEQ ID NO: 41624 - DNA, 30 bp, Artificial Sequence
  Synthetic oligonucleotide
caacgtggagccaagctgattgagcctagg

SEQ ID NO: 41625 - DNA, 30 bp, Artificial Sequence
  Synthetic oligonucleotide
tgggatcaccagaatgggctagatcctagg

SEQ ID NO: 41626 - DNA, 30 bp, Artificial Sequence
  Synthetic oligonucleotide
gtgagattgcttcaaaacttacagtctagg

SEQ ID NO: 41627 - DNA, 30 bp, Artificial Sequence
  Synthetic oligonucleotide
acacacggtactacacttcccgctagtagg

SEQ ID NO: 41628 - DNA, 30 bp, Artificial Sequence
  Synthetic oligonucleotide
ggactggtaattgaatagtctcgccgtagg

SEQ ID NO: 41629 - DNA, 30 bp, Artificial Sequence
  Synthetic oligonucleotide
cctagtggaccgcgataccgactgcgtagg

SEQ ID NO: 41630 - DNA, 30 bp, Artificial Sequence
  Synthetic oligonucleotide
ggagggcaaatttccgcttactcgtgtagg

SEQ ID NO: 41631 - DNA, 30 bp, Artificial Sequence
  Synthetic oligonucleotide
aacgtggtgtcaaccgacctaatgattagg

SEQ ID NO: 41632 - DNA, 30 bp, Artificial Sequence
  Synthetic oligonucleotide
caaaagggcccgccaatatcaagccttagg

SEQ ID NO: 41633 - DNA, 30 bp, Artificial Sequence
  Synthetic oligonucleotide
agctgtaatcggagaataaggtcaaaacgg

SEQ ID NO: 41634 - DNA, 30 bp, Artificial Sequence
  Synthetic oligonucleotide
ggtatgtgtacggatgatacagagaaacgg

SEQ ID NO: 41635 - DNA, 30 bp, Artificial Sequence
  Synthetic oligonucleotide
cgtctggcgatcggtatgtaggctaaacgg

SEQ ID NO: 41636 - DNA, 30 bp, Artificial Sequence
  Synthetic oligonucleotide
ccatcctatggacgagggaaagagtaacgg

SEQ ID NO: 41637 - DNA, 30 bp, Artificial Sequence
  Synthetic oligonucleotide
gcaacacgaaatgaacatagtgatccacgg

SEQ ID NO: 41638 - DNA, 30 bp, Artificial Sequence
  Synthetic oligonucleotide
acactcaagactaatcgagagatactacgg

SEQ ID NO: 41639 - DNA, 30 bp, Artificial Sequence
  Synthetic oligonucleotide
acacagggtgagcgcgacattgataaccgg

SEQ ID NO: 41640 - DNA, 30 bp, Artificial Sequence
  Synthetic oligonucleotide
cgtcaagtataaaatcgcggatacgaccgg

SEQ ID NO: 41641 - DNA, 30 bp, Artificial Sequence
  Synthetic oligonucleotide
gtcattgaattcagagtggagagagcccgg

SEQ ID NO: 41642 - DNA, 30 bp, Artificial Sequence
  Synthetic oligonucleotide
agttggaccatgtcataagcgaaacgccgg

SEQ ID NO: 41643 - DNA, 30 bp, Artificial Sequence
  Synthetic oligonucleotide
cgttataccaagttaaagcaactcggccgg

SEQ ID NO: 41644 - DNA, 30 bp, Artificial Sequence
  Synthetic oligonucleotide
agggagatagctcaatttaaatggatccgg

SEQ ID NO: 41645 - DNA, 30 bp, Artificial Sequence
  Synthetic oligonucleotide
tgacgcccaagtgctaaacaagttctccgg

SEQ ID NO: 41646 - DNA, 30 bp, Artificial Sequence
  Synthetic oligonucleotide
ttaagagtagctgggtcacgacaggtccgg

SEQ ID NO: 41647 - DNA, 30 bp, Artificial Sequence
  Synthetic oligonucleotide
agttgaatgtcagaagtgacaacgaagcgg

SEQ ID NO: 41648 - DNA, 30 bp, Artificial Sequence
  Synthetic oligonucleotide
tacggggaagggcatatacacagaccgcgg

SEQ ID NO: 41649 - DNA, 30 bp, Artificial Sequence
  Synthetic oligonucleotide
agcggggtcatatggagctaaagagcgcgg

SEQ ID NO: 41650 - DNA, 30 bp, Artificial Sequence
  Synthetic oligonucleotide
aggggcagaaacacgctgtgtcccgcgcgg

SEQ ID NO: 41651 - DNA, 30 bp, Artificial Sequence
  Synthetic oligonucleotide
gaggcagagcttaacctcatatccaggcgg

SEQ ID NO: 41652 - DNA, 30 bp, Artificial Sequence
  Synthetic oligonucleotide
actcgggccggcattcagcaagcgaggcgg

SEQ ID NO: 41653 - DNA, 30 bp, Artificial Sequence
  Synthetic oligonucleotide
ccgaagcgggcgggaaacacataactgcgg

SEQ ID NO: 41654 - DNA, 30 bp, Artificial Sequence
  Synthetic oligonucleotide
cgcgcgagaacattaaactgtcgagtgcgg

SEQ ID NO: 41655 - DNA, 30 bp, Artificial Sequence
  Synthetic oligonucleotide
gtaactgaaggtgatattgcacacgtgcgg

SEQ ID NO: 41656 - DNA, 30 bp, Artificial Sequence
  Synthetic oligonucleotide
cgtagagatcgtctgtgaatcgtcgtgcgg

SEQ ID NO: 41657 - DNA, 30 bp, Artificial Sequence
  Synthetic oligonucleotide
aggcaactacaagtctggtacgtgcctcgg

SEQ ID NO: 41658 - DNA, 30 bp, Artificial Sequence
  Synthetic oligonucleotide
aatctaacacatcgacatacaatagctcgg

SEQ ID NO: 41659 - DNA, 30 bp, Artificial Sequence
  Synthetic oligonucleotide
gacgacccgaagaggatagaacgtgctcgg

SEQ ID NO: 41660 - DNA, 30 bp, Artificial Sequence
  Synthetic oligonucleotide
acgcaaggacggttcaaattactttctcgg

SEQ ID NO: 41661 - DNA, 30 bp, Artificial Sequence
  Synthetic oligonucleotide
gacaggggaaggttataagagattcgtcgg

SEQ ID NO: 41662 - DNA, 30 bp, Artificial Sequence
  Synthetic oligonucleotide
gagcaatcatgacaaccgcaaatatgtcgg

SEQ ID NO: 41663 - DNA, 30 bp, Artificial Sequence
  Synthetic oligonucleotide
ctcgccagaagagatcatggcaagcttcgg

SEQ ID NO: 41664 - DNA, 30 bp, Artificial Sequence
  Synthetic oligonucleotide
gtgtcaggctcaagtaatagaatagttcgg

SEQ ID NO: 41665 - DNA, 30 bp, Artificial Sequence
  Synthetic oligonucleotide
aggagggtccgccggttcgtgtccaaaggg

SEQ ID NO: 41666 - DNA, 30 bp, Artificial Sequence
  Synthetic oligonucleotide
gccagattacgttaggtcattcataaaggg

SEQ ID NO: 41667 - DNA, 30 bp, Artificial Sequence
  Synthetic oligonucleotide
ctaaggctaattccgaaaccttaataaggg

SEQ ID NO: 41668 - DNA, 30 bp, Artificial Sequence
  Synthetic oligonucleotide
gttggtaaacggaaaataagagtgtaaggg

SEQ ID NO: 41669 - DNA, 30 bp, Artificial Sequence
  Synthetic oligonucleotide
ctaggccatggaaccatacgttcttaaggg

SEQ ID NO: 41670 - DNA, 30 bp, Artificial Sequence
  Synthetic oligonucleotide
ggtcgtgaaacattagaacggttcacaggg

SEQ ID NO: 41671 - DNA, 30 bp, Artificial Sequence
  Synthetic oligonucleotide
agcccagaaaaaacactaaggcggacaggg

SEQ ID NO: 41672 - DNA, 30 bp, Artificial Sequence
  Synthetic oligonucleotide
gaagtcttggccgcctactacgaaccaggg

SEQ ID NO: 41673 - DNA, 30 bp, Artificial Sequence
  Synthetic oligonucleotide
tgatccgagaaagacgttcttacgccaggg

SEQ ID NO: 41674 - DNA, 30 bp, Artificial Sequence
  Synthetic oligonucleotide
gggtgcaagtgccacggatctaaagcaggg

SEQ ID NO: 41675 - DNA, 30 bp, Artificial Sequence
  Synthetic oligonucleotide
cagatattgcgaaccggggacaagtcaggg

SEQ ID NO: 41676 - DNA, 30 bp, Artificial Sequence
  Synthetic oligonucleotide
gggattaggattcttaccttacgaagaggg

SEQ ID NO: 41677 - DNA, 30 bp, Artificial Sequence
  Synthetic oligonucleotide
tgctaagctaatcaagaggcatctagaggg

SEQ ID NO: 41678 - DNA, 30 bp, Artificial Sequence
  Synthetic oligonucleotide
gatgggccggattggacaagtcgatgaggg

SEQ ID NO: 41679 - DNA, 30 bp, Artificial Sequence
  Synthetic oligonucleotide
gatcgaaggcctggcgaagtcgaactaggg

SEQ ID NO: 41680 - DNA, 30 bp, Artificial Sequence
  Synthetic oligonucleotide
aacgccctcgtggacaccgatgaactaggg

SEQ ID NO: 41681 - DNA, 30 bp, Artificial Sequence
  Synthetic oligonucleotide
gccacatattgcagggagtgaatggtaggg

SEQ ID NO: 41682 - DNA, 30 bp, Artificial Sequence
  Synthetic oligonucleotide
atggggtaagtaagtttagtcgcattaggg

SEQ ID NO: 41683 - DNA, 30 bp, Artificial Sequence
  Synthetic oligonucleotide
cgtcatgcgcgaaagggagatctattaggg

SEQ ID NO: 41684 - DNA, 30 bp, Artificial Sequence
  Synthetic oligonucleotide
gcccaaataccgagcaaggatgatttaggg

SEQ ID NO: 41685 - DNA, 30 bp, Artificial Sequence
  Synthetic oligonucleotide
tactcggcaagagagtaatccatcaacggg

SEQ ID NO: 41686 - DNA, 30 bp, Artificial Sequence
  Synthetic oligonucleotide
tgagttgtattgggagatcgacaacacggg

SEQ ID NO: 41687 - DNA, 30 bp, Artificial Sequence
  Synthetic oligonucleotide
caaaatggagctctctagaagatatccggg

SEQ ID NO: 41688 - DNA, 30 bp, Artificial Sequence
  Synthetic oligonucleotide
gtaaagcatgccaaataagggagttccggg

SEQ ID NO: 41689 - DNA, 30 bp, Artificial Sequence
  Synthetic oligonucleotide
tagcgccatacgaattcagggcgaagcggg

SEQ ID NO: 41690 - DNA, 30 bp, Artificial Sequence
  Synthetic oligonucleotide
cattccgaacaggagctgggctaacgcggg

SEQ ID NO: 41691 - DNA, 30 bp, Artificial Sequence
  Synthetic oligonucleotide
cgcacagggtcggcacaaacctcacgcggg

SEQ ID NO: 41692 - DNA, 30 bp, Artificial Sequence
  Synthetic oligonucleotide
agcctacacgtaataactgctcttctcggg

SEQ ID NO: 41693 - DNA, 30 bp, Artificial Sequence
  Synthetic oligonucleotide
actgcgttcaaaaggggaggctaattcggg

SEQ ID NO: 41694 - DNA, 30 bp, Artificial Sequence
  Synthetic oligonucleotide
ctgactgaacggcaagtagtaagaaagggg

SEQ ID NO: 41695 - DNA, 30 bp, Artificial Sequence
  Synthetic oligonucleotide
cactacggggtatcgaatatctagcagggg

SEQ ID NO: 41696 - DNA, 30 bp, Artificial Sequence
  Synthetic oligonucleotide
tggaccagctgcgcaatgtgacaagagggg

SEQ ID NO: 41697 - DNA, 30 bp, Artificial Sequence
  Synthetic oligonucleotide
tgatagctcattatgctacagtaggagggg

SEQ ID NO: 41698 - DNA, 30 bp, Artificial Sequence
  Synthetic oligonucleotide
aataagctgtcacaaagagatagtgagggg

SEQ ID NO: 41699 - DNA, 30 bp, Artificial Sequence
  Synthetic oligonucleotide
agtgcggaagacacataacagaattagggg

SEQ ID NO: 41700 - DNA, 30 bp, Artificial Sequence
  Synthetic oligonucleotide
tcaaaccggccgcctgacacgataacgggg

SEQ ID NO: 41701 - DNA, 30 bp, Artificial Sequence
  Synthetic oligonucleotide
ctgagggagtaaggtaggaatggtccgggg

SEQ ID NO: 41702 - DNA, 30 bp, Artificial Sequence
  Synthetic oligonucleotide
ctcggggaaatcaggcgtcagtaaaggggg

SEQ ID NO: 41703 - DNA, 30 bp, Artificial Sequence
  Synthetic oligonucleotide
ccaaacgcacgggagactagggcacggggg

SEQ ID NO: 41704 - DNA, 30 bp, Artificial Sequence
  Synthetic oligonucleotide
tgcagaatgcaatgaaaagaactagggggg

SEQ ID NO: 41705 - DNA, 30 bp, Artificial Sequence
  Synthetic oligonucleotide
tagaggatgagctaggagtaataggggggg

SEQ ID NO: 41706 - DNA, 30 bp, Artificial Sequence
  Synthetic oligonucleotide
cctcgacggatgaagacgagaactgggggg

SEQ ID NO: 41707 - DNA, 30 bp, Artificial Sequence
  Synthetic oligonucleotide
catcacggaatagcatctcaagcctggggg

SEQ ID NO: 41708 - DNA, 30 bp, Artificial Sequence
  Synthetic oligonucleotide
gcacacgaagtcacgataatcgaaatgggg

SEQ ID NO: 41709 - DNA, 30 bp, Artificial Sequence
  Synthetic oligonucleotide
caggtccatggacaaatgatacgaatgggg

SEQ ID NO: 41710 - DNA, 30 bp, Artificial Sequence
  Synthetic oligonucleotide
aagactgcgtagatacctacagcactgggg

SEQ ID NO: 41711 - DNA, 30 bp, Artificial Sequence
  Synthetic oligonucleotide
ataacactattagaccttgggcatgtgggg

SEQ ID NO: 41712 - DNA, 30 bp, Artificial Sequence
  Synthetic oligonucleotide
cggaagtatgaacctgcctctgttgtgggg

SEQ ID NO: 41713 - DNA, 30 bp, Artificial Sequence
  Synthetic oligonucleotide
cggttcatagcacactgtgatacattgggg

SEQ ID NO: 41714 - DNA, 30 bp, Artificial Sequence
  Synthetic oligonucleotide
gaagaggaccagtagggagcacgcaatggg

SEQ ID NO: 41715 - DNA, 30 bp, Artificial Sequence
  Synthetic oligonucleotide
aaggacggctcatacccagccattaatggg

SEQ ID NO: 41716 - DNA, 30 bp, Artificial Sequence
  Synthetic oligonucleotide
ggtgttacattcaataggactatccatggg

SEQ ID NO: 41717 - DNA, 30 bp, Artificial Sequence
  Synthetic oligonucleotide
ggcattagaacagagtaagaaaacgatggg

SEQ ID NO: 41718 - DNA, 30 bp, Artificial Sequence
  Synthetic oligonucleotide
gcaggaaacttgagagattcatgcgatggg

SEQ ID NO: 41719 - DNA, 30 bp, Artificial Sequence
  Synthetic oligonucleotide
ctacagtatagggagttgtgcggtactggg

SEQ ID NO: 41720 - DNA, 30 bp, Artificial Sequence
  Synthetic oligonucleotide
tccagaaatggtaatgggagaacaagtggg

SEQ ID NO: 41721 - DNA, 30 bp, Artificial Sequence
  Synthetic oligonucleotide
ccgtacatctgcagttgtaataggagtggg

SEQ ID NO: 41722 - DNA, 30 bp, Artificial Sequence
  Synthetic oligonucleotide
agaacatcacaagtataatttatggttggg

SEQ ID NO: 41723 - DNA, 30 bp, Artificial Sequence
  Synthetic oligonucleotide
ctcaacaagaagagagatggtgaatttggg

SEQ ID NO: 41724 - DNA, 30 bp, Artificial Sequence
  Synthetic oligonucleotide
aacgaaggaaacatatgcctccgatttggg

SEQ ID NO: 41725 - DNA, 30 bp, Artificial Sequence
  Synthetic oligonucleotide
acaagggcctacgagcgagttctaaaatgg

SEQ ID NO: 41726 - DNA, 30 bp, Artificial Sequence
  Synthetic oligonucleotide
ctaagtaagactaagtatgcgctcgaatgg

SEQ ID NO: 41727 - DNA, 30 bp, Artificial Sequence
  Synthetic oligonucleotide
cgtgaccagctaatcgggccgatggaatgg

SEQ ID NO: 41728 - DNA, 30 bp, Artificial Sequence
  Synthetic oligonucleotide
gggtgcgatcacggatcgtctcgtgaatgg

SEQ ID NO: 41729 - DNA, 30 bp, Artificial Sequence
  Synthetic oligonucleotide
gccgatccggacaattagacatgtgaatgg

SEQ ID NO: 41730 - DNA, 30 bp, Artificial Sequence
  Synthetic oligonucleotide
gtaaagtcgggatctctcccacgaacatgg

SEQ ID NO: 41731 - DNA, 30 bp, Artificial Sequence
  Synthetic oligonucleotide
ccacgccgaagatagtatcctaggccatgg

SEQ ID NO: 41732 - DNA, 30 bp, Artificial Sequence
  Synthetic oligonucleotide
aaagaagttccgatcaagcaaagagcatgg

SEQ ID NO: 41733 - DNA, 30 bp, Artificial Sequence
  Synthetic oligonucleotide
gctgggagatgctaagtattacattcatgg

SEQ ID NO: 41734 - DNA, 30 bp, Artificial Sequence
  Synthetic oligonucleotide
gcatgaattccgaaaaccatacaaagatgg

SEQ ID NO: 41735 - DNA, 30 bp, Artificial Sequence
  Synthetic oligonucleotide
agagtggggtcgtcctgatcagaaagatgg

SEQ ID NO: 41736 - DNA, 30 bp, Artificial Sequence
  Synthetic oligonucleotide
cgttcgataaattcatgaatatggagatgg

SEQ ID NO: 41737 - DNA, 30 bp, Artificial Sequence
  Synthetic oligonucleotide
cgccaggagtgcccgctgaacttgcgatgg

SEQ ID NO: 41738 - DNA, 30 bp, Artificial Sequence
  Synthetic oligonucleotide
ggagcttgatagtaagaatatcattgatgg

SEQ ID NO: 41739 - DNA, 30 bp, Artificial Sequence
  Synthetic oligonucleotide
taggctgtgaataagtgccattgcgtatgg

SEQ ID NO: 41740 - DNA, 30 bp, Artificial Sequence
  Synthetic oligonucleotide
tggtggacgaacactccccctgcagactgg

SEQ ID NO: 41741 - DNA, 30 bp, Artificial Sequence
  Synthetic oligonucleotide
agaaactaacgtcgattacgtgcggactgg

SEQ ID NO: 41742 - DNA, 30 bp, Artificial Sequence
  Synthetic oligonucleotide
agtgggtaaccgagactgaagccaacctgg

SEQ ID NO: 41743 - DNA, 30 bp, Artificial Sequence
  Synthetic oligonucleotide
gggacatactaactgtctggctccccctgg

SEQ ID NO: 41744 - DNA, 30 bp, Artificial Sequence
  Synthetic oligonucleotide
tgacctacaaaatcgatgcggaggtcctgg

SEQ ID NO: 41745 - DNA, 30 bp, Artificial Sequence
  Synthetic oligonucleotide
cacaggactgctactaggcttgcgatctgg

SEQ ID NO: 41746 - DNA, 30 bp, Artificial Sequence
  Synthetic oligonucleotide
gatcgctaatgaaaaagagggcgtgtctgg

SEQ ID NO: 41747 - DNA, 30 bp, Artificial Sequence
  Synthetic oligonucleotide
cttctgtgctggagagggtaacaacagtgg

SEQ ID NO: 41748 - DNA, 30 bp, Artificial Sequence
  Synthetic oligonucleotide
acacgaccgtagtgagtaaatatccagtgg

SEQ ID NO: 41749 - DNA, 30 bp, Artificial Sequence
  Synthetic oligonucleotide
ctacatgcatatgcacaaatagcagagtgg

SEQ ID NO: 41750 - DNA, 30 bp, Artificial Sequence
  Synthetic oligonucleotide
ggatcacctgaaaatctatactgggagtgg

SEQ ID NO: 41751 - DNA, 30 bp, Artificial Sequence
  Synthetic oligonucleotide
tagcataacggtaatccgagagaatagtgg

SEQ ID NO: 41752 - DNA, 30 bp, Artificial Sequence
  Synthetic oligonucleotide
cgactcaggactattggactattgtagtgg

SEQ ID NO: 41753 - DNA, 30 bp, Artificial Sequence
  Synthetic oligonucleotide
gttacgccgaagtcaggacggtagatgtgg

SEQ ID NO: 41754 - DNA, 30 bp, Artificial Sequence
  Synthetic oligonucleotide
agatagatccatcataataacaggatgtgg

SEQ ID NO: 41755 - DNA, 30 bp, Artificial Sequence
  Synthetic oligonucleotide
gatcagcggacgaggtaagataaggtgtgg

SEQ ID NO: 41756 - DNA, 30 bp, Artificial Sequence
  Synthetic oligonucleotide
tgatctatgaagcgtagtcgaaaccattgg

SEQ ID NO: 41757 - DNA, 30 bp, Artificial Sequence
  Synthetic oligonucleotide
cagcagccaggatacgtggggacagattgg

SEQ ID NO: 41758 - DNA, 30 bp, Artificial Sequence
  Synthetic oligonucleotide
atcacggatctaaagtcaagcactgattgg

SEQ ID NO: 41759 - DNA, 30 bp, Artificial Sequence
  Synthetic oligonucleotide
ggtcggagtatcacgtgactggaaacttgg

SEQ ID NO: 41760 - DNA, 30 bp, Artificial Sequence
  Synthetic oligonucleotide
tgatgtattaaatggatttgagcaccttgg

SEQ ID NO: 41761 - DNA, 30 bp, Artificial Sequence
  Synthetic oligonucleotide
cgaggctatgtgtcgattactgagccttgg

SEQ ID NO: 41762 - DNA, 30 bp, Artificial Sequence
  Synthetic oligonucleotide
cactaataacaatatatatcggaagcttgg

SEQ ID NO: 41763 - DNA, 30 bp, Artificial Sequence
  Synthetic oligonucleotide
ggaggtacatcacggtgaggatagtcttgg

SEQ ID NO: 41764 - DNA, 30 bp, Artificial Sequence
  Synthetic oligonucleotide
agagctcgcttcatcagggtccggtcttgg

SEQ ID NO: 41765 - DNA, 30 bp, Artificial Sequence
  Synthetic oligonucleotide
cagccgataatcaaaatggtcgaaagttgg

SEQ ID NO: 41766 - DNA, 30 bp, Artificial Sequence
  Synthetic oligonucleotide
aacgacaagcgcggtcatcaagggagttgg

SEQ ID NO: 41767 - DNA, 30 bp, Artificial Sequence
  Synthetic oligonucleotide
acgagtgaatggatgcggaagaaaggttgg

SEQ ID NO: 41768 - DNA, 30 bp, Artificial Sequence
  Synthetic oligonucleotide
aggaaaatacgcggagaagttgcgggttgg

SEQ ID NO: 41769 - DNA, 30 bp, Artificial Sequence
  Synthetic oligonucleotide
ggggagagccgcttagctgagatagtttgg

SEQ ID NO: 41770 - DNA, 30 bp, Artificial Sequence
  Synthetic oligonucleotide
ggggacgcgtaccaaacgctaaggcaaatg

SEQ ID NO: 41771 - DNA, 30 bp, Artificial Sequence
  Synthetic oligonucleotide
aatacacgagctggggaacttggtgaaatg

SEQ ID NO: 41772 - DNA, 30 bp, Artificial Sequence
  Synthetic oligonucleotide
aggtagcggggacgtaagaaataataaatg

SEQ ID NO: 41773 - DNA, 30 bp, Artificial Sequence
  Synthetic oligonucleotide
gactttcaagcgtaaagtaggcactaaatg

SEQ ID NO: 41774 - DNA, 30 bp, Artificial Sequence
  Synthetic oligonucleotide
aggacattacaggcatcccagatgtaaatg

SEQ ID NO: 41775 - DNA, 30 bp, Artificial Sequence
  Synthetic oligonucleotide
tggcgcccatggaatcgaaagtcgacaatg

SEQ ID NO: 41776 - DNA, 30 bp, Artificial Sequence
  Synthetic oligonucleotide
ctgaaaaggccctcgggcagtaagagaatg

SEQ ID NO: 41777 - DNA, 30 bp, Artificial Sequence
  Synthetic oligonucleotide
atcggtgagagtggggagatagttagaatg

SEQ ID NO: 41778 - DNA, 30 bp, Artificial Sequence
  Synthetic oligonucleotide
aaacgaggagggtcagcgatagcaggaatg

SEQ ID NO: 41779 - DNA, 30 bp, Artificial Sequence
  Synthetic oligonucleotide
acgatgaaccatatccattctgtgggaatg

SEQ ID NO: 41780 - DNA, 30 bp, Artificial Sequence
  Synthetic oligonucleotide
gcttccaaacgtgtcaaatgagtgtgaatg

SEQ ID NO: 41781 - DNA, 30 bp, Artificial Sequence
  Synthetic oligonucleotide
cgggcgaagatgcccagaacgcaaataatg

SEQ ID NO: 41782 - DNA, 30 bp, Artificial Sequence
  Synthetic oligonucleotide
aagcgacggaaggaaattgcacgtctaatg

SEQ ID NO: 41783 - DNA, 30 bp, Artificial Sequence
  Synthetic oligonucleotide
cggtttgtgtaaaggataagtatggtaatg

SEQ ID NO: 41784 - DNA, 30 bp, Artificial Sequence
  Synthetic oligonucleotide
ggaaatacagacgaatgcccggctaccatg

SEQ ID NO: 41785 - DNA, 30 bp, Artificial Sequence
  Synthetic oligonucleotide
ggaactatgcacgaagattgctaggccatg

SEQ ID NO: 41786 - DNA, 30 bp, Artificial Sequence
  Synthetic oligonucleotide
gagacgacgataattcgagagtagggcatg

SEQ ID NO: 41787 - DNA, 30 bp, Artificial Sequence
  Synthetic oligonucleotide
ctcgctaggacaaaccacacgtaatgcatg

SEQ ID NO: 41788 - DNA, 30 bp, Artificial Sequence
  Synthetic oligonucleotide
cagtgatggataagatggctcctgtgcatg

SEQ ID NO: 41789 - DNA, 30 bp, Artificial Sequence
  Synthetic oligonucleotide
ttgctggaatcatgacctgagttgtgcatg

SEQ ID NO: 41790 - DNA, 30 bp, Artificial Sequence
  Synthetic oligonucleotide
gcaacactgcgaacagagtgaatttgcatg

SEQ ID NO: 41791 - DNA, 30 bp, Artificial Sequence
  Synthetic oligonucleotide
cgatcgggactacaggtaggagtttgcatg

SEQ ID NO: 41792 - DNA, 30 bp, Artificial Sequence
  Synthetic oligonucleotide
cggcgcgaacccgctaatattcggatcatg

SEQ ID NO: 41793 - DNA, 30 bp, Artificial Sequence
  Synthetic oligonucleotide
aggcaattgtatgactgagatacactcatg

SEQ ID NO: 41794 - DNA, 30 bp, Artificial Sequence
  Synthetic oligonucleotide
gtgataagcatacgtacgggatagctcatg

SEQ ID NO: 41795 - DNA, 30 bp, Artificial Sequence
  Synthetic oligonucleotide
ggtgcaaagtaacttgggaatggcgtcatg

SEQ ID NO: 41796 - DNA, 30 bp, Artificial Sequence
  Synthetic oligonucleotide
agtaggcgtacttggatgcgggtgaagatg

SEQ ID NO: 41797 - DNA, 30 bp, Artificial Sequence
  Synthetic oligonucleotide
cgatcggcctaccattgttaccataagatg

SEQ ID NO: 41798 - DNA, 30 bp, Artificial Sequence
  Synthetic oligonucleotide
cctgccctcagaccgtatcgcgctaagatg

SEQ ID NO: 41799 - DNA, 30 bp, Artificial Sequence
  Synthetic oligonucleotide
ctaagcatcattagtcacgggcgtaagatg

SEQ ID NO: 41800 - DNA, 30 bp, Artificial Sequence
  Synthetic oligonucleotide
tgcggagtgtctaatccttaagttcagatg

SEQ ID NO: 41801 - DNA, 30 bp, Artificial Sequence
  Synthetic oligonucleotide
agtgctatggtgactaccagcgggacgatg

SEQ ID NO: 41802 - DNA, 30 bp, Artificial Sequence
  Synthetic oligonucleotide
gggaagaactcactggtgtcctcggcgatg

SEQ ID NO: 41803 - DNA, 30 bp, Artificial Sequence
  Synthetic oligonucleotide
tcacggaatgatagaccttgaacatcgatg

SEQ ID NO: 41804 - DNA, 30 bp, Artificial Sequence
  Synthetic oligonucleotide
tcacaatccccacaaccccaacgaaggatg

SEQ ID NO: 41805 - DNA, 30 bp, Artificial Sequence
  Synthetic oligonucleotide
tccgagaggtcagtgctaagtggaaggatg

SEQ ID NO: 41806 - DNA, 30 bp, Artificial Sequence
  Synthetic oligonucleotide
tccgataggagtcctgtgggaataaggatg

SEQ ID NO: 41807 - DNA, 30 bp, Artificial Sequence
  Synthetic oligonucleotide
gaggcgtagcattgaataacatacaggatg

SEQ ID NO: 41808 - DNA, 30 bp, Artificial Sequence
  Synthetic oligonucleotide
cccagcgcgataagttcaggtacatggatg

SEQ ID NO: 41809 - DNA, 30 bp, Artificial Sequence
  Synthetic oligonucleotide
aggtgtgaccttagagtgccgcattggatg

SEQ ID NO: 41810 - DNA, 30 bp, Artificial Sequence
  Synthetic oligonucleotide
ccaattgctcccgtagcgtcgagcgtgatg

SEQ ID NO: 41811 - DNA, 30 bp, Artificial Sequence
  Synthetic oligonucleotide
tgtgaggtggtaaggtacggaagaaatatg

SEQ ID NO: 41812 - DNA, 30 bp, Artificial Sequence
  Synthetic oligonucleotide
gcgtgaaggcgtctgcgagattaacatatg

SEQ ID NO: 41813 - DNA, 30 bp, Artificial Sequence
  Synthetic oligonucleotide
atcgttaggaagtgaagggcgtgccatatg

SEQ ID NO: 41814 - DNA, 30 bp, Artificial Sequence
  Synthetic oligonucleotide
ggctaagaaaaatattgagtgaaatatatg

SEQ ID NO: 41815 - DNA, 30 bp, Artificial Sequence
  Synthetic oligonucleotide
gaatagcgaatgggtatggggatgtatatg

SEQ ID NO: 41816 - DNA, 30 bp, Artificial Sequence
  Synthetic oligonucleotide
agttatcgactgtaaagagtccgaactatg

SEQ ID NO: 41817 - DNA, 30 bp, Artificial Sequence
  Synthetic oligonucleotide
agtcaatgcgcggaataaatttcttctatg

SEQ ID NO: 41818 - DNA, 30 bp, Artificial Sequence
  Synthetic oligonucleotide
tgttaaagggcctgggcgataggaagtatg

SEQ ID NO: 41819 - DNA, 30 bp, Artificial Sequence
  Synthetic oligonucleotide
agcagatttaacacctaataagtgcgtatg

SEQ ID NO: 41820 - DNA, 30 bp, Artificial Sequence
  Synthetic oligonucleotide
gtgcggaaacaacgtgctgcctggggtatg

SEQ ID NO: 41821 - DNA, 30 bp, Artificial Sequence
  Synthetic oligonucleotide
gagcgagccataaccacgaaacccattatg

SEQ ID NO: 41822 - DNA, 30 bp, Artificial Sequence
  Synthetic oligonucleotide
ggacgaccgtattacagagctaatattatg

SEQ ID NO: 41823 - DNA, 30 bp, Artificial Sequence
  Synthetic oligonucleotide
cagtgcgggagcgttccggtaagctttatg

SEQ ID NO: 41824 - DNA, 30 bp, Artificial Sequence
  Synthetic oligonucleotide
ctgtcatacaggcccagagaaagaaaactg

SEQ ID NO: 41825 - DNA, 30 bp, Artificial Sequence
  Synthetic oligonucleotide
ggcagactgacctataatgcaatccaactg

SEQ ID NO: 41826 - DNA, 30 bp, Artificial Sequence
  Synthetic oligonucleotide
tggaccccgaaggagcgatctgcgcaactg

SEQ ID NO: 41827 - DNA, 30 bp, Artificial Sequence
  Synthetic oligonucleotide
gaaaatcgggcagggcagtgtaacgaactg

SEQ ID NO: 41828 - DNA, 30 bp, Artificial Sequence
  Synthetic oligonucleotide
agagtctccagcatcaaacaagtggaactg

SEQ ID NO: 41829 - DNA, 30 bp, Artificial Sequence
  Synthetic oligonucleotide
gcgtagctcaagatagcacagggataactg

SEQ ID NO: 41830 - DNA, 30 bp, Artificial Sequence
  Synthetic oligonucleotide
atgaacggtatgcgctggatcatctaactg

SEQ ID NO: 41831 - DNA, 30 bp, Artificial Sequence
  Synthetic oligonucleotide
cgggaagacgctcctaggcgtatgtaactg

SEQ ID NO: 41832 - DNA, 30 bp, Artificial Sequence
  Synthetic oligonucleotide
aggaatcatcgttggtgcgcgtgtgcactg

SEQ ID NO: 41833 - DNA, 30 bp, Artificial Sequence
  Synthetic oligonucleotide
accgagaatagcccgaaagatgttgcactg

SEQ ID NO: 41834 - DNA, 30 bp, Artificial Sequence
  Synthetic oligonucleotide
cgattcgcgtgtaggacgttagacagactg

SEQ ID NO: 41835 - DNA, 30 bp, Artificial Sequence
  Synthetic oligonucleotide
actggagcgactatctctgcgacgggactg

SEQ ID NO: 41836 - DNA, 30 bp, Artificial Sequence
  Synthetic oligonucleotide
gcacaacgagggagtgttaggcggggactg

SEQ ID NO: 41837 - DNA, 30 bp, Artificial Sequence
  Synthetic oligonucleotide
aaacagggggggtactcaaaacatggactg

SEQ ID NO: 41838 - DNA, 30 bp, Artificial Sequence
  Synthetic oligonucleotide
acaggagcttgtgtgatcgccaaattactg

SEQ ID NO: 41839 - DNA, 30 bp, Artificial Sequence
  Synthetic oligonucleotide
aggtaagtccataggaccaaggagcacctg

SEQ ID NO: 41840 - DNA, 30 bp, Artificial Sequence
  Synthetic oligonucleotide
cgaatcaagaggcgaaataataatcacctg

SEQ ID NO: 41841 - DNA, 30 bp, Artificial Sequence
  Synthetic oligonucleotide
gaaacataaactggtgaacaagatcacctg

SEQ ID NO: 41842 - DNA, 30 bp, Artificial Sequence
  Synthetic oligonucleotide
tgtgtgaaagccgggccgggccaagacctg

SEQ ID NO: 41843 - DNA, 30 bp, Artificial Sequence
  Synthetic oligonucleotide
tcactcatataacagacaagtcacgacctg

SEQ ID NO: 41844 - DNA, 30 bp, Artificial Sequence
  Synthetic oligonucleotide
ccgtcggcctgctaaaggataatcgacctg

SEQ ID NO: 41845 - DNA, 30 bp, Artificial Sequence
  Synthetic oligonucleotide
gaacgagatcaagcagctcggaggtccctg

SEQ ID NO: 41846 - DNA, 30 bp, Artificial Sequence
  Synthetic oligonucleotide
cggagtaatcggtgaaatctgtctggcctg

SEQ ID NO: 41847 - DNA, 30 bp, Artificial Sequence
  Synthetic oligonucleotide
gactggctatctcagagtccaggctgcctg

SEQ ID NO: 41848 - DNA, 30 bp, Artificial Sequence
  Synthetic oligonucleotide
acgggttcggcgatgttcggtacttgcctg

SEQ ID NO: 41849 - DNA, 30 bp, Artificial Sequence
  Synthetic oligonucleotide
gatcgagggtagcataattcggtttgcctg

SEQ ID NO: 41850 - DNA, 30 bp, Artificial Sequence
  Synthetic oligonucleotide
cgatacctagacggatacttgaccaagctg

SEQ ID NO: 41851 - DNA, 30 bp, Artificial Sequence
  Synthetic oligonucleotide
aactaatttccaggagatagaagtgagctg

SEQ ID NO: 41852 - DNA, 30 bp, Artificial Sequence
  Synthetic oligonucleotide
gcgtgttacacttacagggggaagtagctg

SEQ ID NO: 41853 - DNA, 30 bp, Artificial Sequence
  Synthetic oligonucleotide
atgtgtctcgtggaaacgatagcgtagctg

SEQ ID NO: 41854 - DNA, 30 bp, Artificial Sequence
  Synthetic oligonucleotide
tcgttgcgtcgtggccccattacaccgctg

SEQ ID NO: 41855 - DNA, 30 bp, Artificial Sequence
  Synthetic oligonucleotide
cgtacggcgagagtaatagtcgcgtcgctg

SEQ ID NO: 41856 - DNA, 30 bp, Artificial Sequence
  Synthetic oligonucleotide
tgcatccaacggacgtacacgagggggctg

SEQ ID NO: 41857 - DNA, 30 bp, Artificial Sequence
  Synthetic oligonucleotide
tcatcttggcccacgaggacattggggctg

SEQ ID NO: 41858 - DNA, 30 bp, Artificial Sequence
  Synthetic oligonucleotide
ggtcgaagtggcggataaaagtgtttgctg

SEQ ID NO: 41859 - DNA, 30 bp, Artificial Sequence
  Synthetic oligonucleotide
cgacagtccaacgcgggccgaaaatatctg

SEQ ID NO: 41860 - DNA, 30 bp, Artificial Sequence
  Synthetic oligonucleotide
taagcgcgagcatgcgtatagatctatctg

SEQ ID NO: 41861 - DNA, 31 bp, Artificial Sequence
  Synthetic oligonucleotide
agggcgaggatttagtgaaaggatagctctg

SEQ ID NO: 41862 - DNA, 30 bp, Artificial Sequence
  Synthetic oligonucleotide
acaatgtgaaggcagattgtcaacggtctg

SEQ ID NO: 41863 - DNA, 30 bp, Artificial Sequence
  Synthetic oligonucleotide
tgtcggggtacgcgtgatggtttggttctg

SEQ ID NO: 41864 - DNA, 30 bp, Artificial Sequence
  Synthetic oligonucleotide
gcgatacggcattgcgtagcggctcaagtg

SEQ ID NO: 41865 - DNA, 30 bp, Artificial Sequence
  Synthetic oligonucleotide
tgaagtcgaatacgataaccatcagaagtg

SEQ ID NO: 41866 - DNA, 30 bp, Artificial Sequence
  Synthetic oligonucleotide
gtgagtgcgatagtgatccaattagaagtg

SEQ ID NO: 41867 - DNA, 30 bp, Artificial Sequence
  Synthetic oligonucleotide
agggacgttatacaggataatggtgaagtg

SEQ ID NO: 41868 - DNA, 31 bp, Artificial Sequence
  Synthetic oligonucleotide
tgcaggccgtggtcaacgagctagctaagtg

SEQ ID NO: 41869 - DNA, 30 bp, Artificial Sequence
  Synthetic oligonucleotide
gaaggatactccggtttcaaaatctaagtg

SEQ ID NO: 41870 - DNA, 30 bp, Artificial Sequence
  Synthetic oligonucleotide
ggagaaaccctcattcggccgaaaacagtg

SEQ ID NO: 41871 - DNA, 30 bp, Artificial Sequence
  Synthetic oligonucleotide
tggaaggcatatgtcggtggggccacagtg

SEQ ID NO: 41872 - DNA, 30 bp, Artificial Sequence
  Synthetic oligonucleotide
taataacgggatgagcgaccatgcacagtg

SEQ ID NO: 41873 - DNA, 30 bp, Artificial Sequence
  Synthetic oligonucleotide
cagtgcgatctagccgtagtgctcacagtg

SEQ ID NO: 41874 - DNA, 30 bp, Artificial Sequence
  Synthetic oligonucleotide
ctagaatcatattagaacagttgagcagtg

SEQ ID NO: 41875 - DNA, 30 bp, Artificial Sequence
  Synthetic oligonucleotide
cgggctcaccaaaataaagactcgtcagtg

SEQ ID NO: 41876 - DNA, 30 bp, Artificial Sequence
  Synthetic oligonucleotide
atgggatgaggtctgtctggtagttcagtg

SEQ ID NO: 41877 - DNA, 30 bp, Artificial Sequence
  Synthetic oligonucleotide
ctcacgtgagatcggaaagcgggtagagtg

SEQ ID NO: 41878 - DNA, 30 bp, Artificial Sequence
  Synthetic oligonucleotide
acatcgcatggaatgccccttccgcgagtg

SEQ ID NO: 41879 - DNA, 30 bp, Artificial Sequence
  Synthetic oligonucleotide
cacgcaccggttggacagcttaattgagtg

SEQ ID NO: 41880 - DNA, 30 bp, Artificial Sequence
  Synthetic oligonucleotide
gggggttaaaccgtataggttcacctagtg

SEQ ID NO: 41881 - DNA, 30 bp, Artificial Sequence
  Synthetic oligonucleotide
tggtagatgcggatgtgcttccccctagtg

SEQ ID NO: 41882 - DNA, 30 bp, Artificial Sequence
  Synthetic oligonucleotide
tgagagagaacaattccgttaagcctagtg

SEQ ID NO: 41883 - DNA, 30 bp, Artificial Sequence
  Synthetic oligonucleotide
gaaacatatacaaggacgactaagaacgtg

SEQ ID NO: 41884 - DNA, 30 bp, Artificial Sequence
  Synthetic oligonucleotide
gtaaaggtaggggaacacatgcgatacgtg

SEQ ID NO: 41885 - DNA, 30 bp, Artificial Sequence
  Synthetic oligonucleotide
tgtgaagctggagaagagctgtgatacgtg

SEQ ID NO: 41886 - DNA, 30 bp, Artificial Sequence
  Synthetic oligonucleotide
caattacagccaaataaggccgactacgtg

SEQ ID NO: 41887 - DNA, 30 bp, Artificial Sequence
  Synthetic oligonucleotide
aaggagctcagcgacacttggtactacgtg

SEQ ID NO: 41888 - DNA, 30 bp, Artificial Sequence
  Synthetic oligonucleotide
atgggggaggacttatacccaatcaccgtg

SEQ ID NO: 41889 - DNA, 30 bp, Artificial Sequence
  Synthetic oligonucleotide
atatcgacaacgcctcgctctgataccgtg

SEQ ID NO: 41890 - DNA, 30 bp, Artificial Sequence
  Synthetic oligonucleotide
gggcactgttaactattgagactccccgtg

SEQ ID NO: 41891 - DNA, 30 bp, Artificial Sequence
  Synthetic oligonucleotide
tccaaaccggtgaagtataaaatgcccgtg

SEQ ID NO: 41892 - DNA, 30 bp, Artificial Sequence
  Synthetic oligonucleotide
tggtaagggagatccagtaatgggagcgtg

SEQ ID NO: 41893 - DNA, 30 bp, Artificial Sequence
  Synthetic oligonucleotide
cgtatgggcatactgtctaaacatctcgtg

SEQ ID NO: 41894 - DNA, 30 bp, Artificial Sequence
  Synthetic oligonucleotide
cgaatacatataatggaaagcttagtcgtg

SEQ ID NO: 41895 - DNA, 30 bp, Artificial Sequence
  Synthetic oligonucleotide
acacgaagcaaagattggctagatttcgtg

SEQ ID NO: 41896 - DNA, 30 bp, Artificial Sequence
  Synthetic oligonucleotide
tgtccggaggtatactgtaagcaaaaggtg

SEQ ID NO: 41897 - DNA, 30 bp, Artificial Sequence
  Synthetic oligonucleotide
aacgatgttaagccctaaaaaagaaaggtg

SEQ ID NO: 41898 - DNA, 30 bp, Artificial Sequence
  Synthetic oligonucleotide
ggaaactcgggggtcaacgatataaaggtg

SEQ ID NO: 41899 - DNA, 30 bp, Artificial Sequence
  Synthetic oligonucleotide
tgagctgacagcattggttcaaaacaggtg

SEQ ID NO: 41900 - DNA, 30 bp, Artificial Sequence
  Synthetic oligonucleotide
gctagagggtgtaatggatattgtcaggtg

SEQ ID NO: 41901 - DNA, 30 bp, Artificial Sequence
  Synthetic oligonucleotide
caggggtcgaatgtaaacagttttcaggtg

SEQ ID NO: 41902 - DNA, 30 bp, Artificial Sequence
  Synthetic oligonucleotide
ggtgcccctccggaaacccatgaagaggtg

SEQ ID NO: 41903 - DNA, 30 bp, Artificial Sequence
  Synthetic oligonucleotide
acagtgcatcagcagtagtcgtcggaggtg

SEQ ID NO: 41904 - DNA, 30 bp, Artificial Sequence
  Synthetic oligonucleotide
tagcggaagagattagctatataataggtg

SEQ ID NO: 41905 - DNA, 30 bp, Artificial Sequence
  Synthetic oligonucleotide
cacgcggtagctggaggaatttatagggtg

SEQ ID NO: 41906 - DNA, 30 bp, Artificial Sequence
  Synthetic oligonucleotide
aggatgtgaaggcgttcggattctagggtg

SEQ ID NO: 41907 - DNA, 30 bp, Artificial Sequence
  Synthetic oligonucleotide
accagtgaagttatgtcatataagtgggtg

SEQ ID NO: 41908 - DNA, 30 bp, Artificial Sequence
  Synthetic oligonucleotide
ggaaaggagctgtcaaaggtagaattggtg

SEQ ID NO: 41909 - DNA, 30 bp, Artificial Sequence
  Synthetic oligonucleotide
gtcgcttacgaaccatctcaggcattggtg

SEQ ID NO: 41910 - DNA, 30 bp, Artificial Sequence
  Synthetic oligonucleotide
gagatcgagggaagtcggtgcggcttggtg

SEQ ID NO: 41911 - DNA, 30 bp, Artificial Sequence
  Synthetic oligonucleotide
caatgaagtgcatcctacgtagggaatgtg

SEQ ID NO: 41912 - DNA, 30 bp, Artificial Sequence
  Synthetic oligonucleotide
tggagactggtcgtagtcgtctaacatgtg

SEQ ID NO: 41913 - DNA, 30 bp, Artificial Sequence
  Synthetic oligonucleotide
tggagtcaaaatctacataggtaagctgtg

SEQ ID NO: 41914 - DNA, 30 bp, Artificial Sequence
  Synthetic oligonucleotide
aaagcaagtgtggtcaaccgaggagctgtg

SEQ ID NO: 41915 - DNA, 30 bp, Artificial Sequence
  Synthetic oligonucleotide
gttcgaagctaccgtaggggagaggctgtg

SEQ ID NO: 41916 - DNA, 30 bp, Artificial Sequence
  Synthetic oligonucleotide
accgttgggagccgaaaaaggaatgctgtg

SEQ ID NO: 41917 - DNA, 30 bp, Artificial Sequence
  Synthetic oligonucleotide
acgagtacttggtgggttagaaattctgtg

SEQ ID NO: 41918 - DNA, 30 bp, Artificial Sequence
  Synthetic oligonucleotide
aagttcagaagagcaacttagaaaagtgtg

SEQ ID NO: 41919 - DNA, 30 bp, Artificial Sequence
  Synthetic oligonucleotide
tgctaagcccgtgtaggaatgggaagtgtg

SEQ ID NO: 41920 - DNA, 30 bp, Artificial Sequence
  Synthetic oligonucleotide
tgatatggacgcatacgagcgaggagtgtg

SEQ ID NO: 41921 - DNA, 30 bp, Artificial Sequence
  Synthetic oligonucleotide
caagtgcaggactgcgcctgataacgtgtg

SEQ ID NO: 41922 - DNA, 30 bp, Artificial Sequence
  Synthetic oligonucleotide
ggaactgggcgtattaccaggcgacgtgtg

SEQ ID NO: 41923 - DNA, 30 bp, Artificial Sequence
  Synthetic oligonucleotide
gagggggaagtaagggaattggacattgtg

SEQ ID NO: 41924 - DNA, 30 bp, Artificial Sequence
  Synthetic oligonucleotide
aatggcgagcaacggaagtaaaatgttgtg

SEQ ID NO: 41925 - DNA, 30 bp, Artificial Sequence
  Synthetic oligonucleotide
tggaggccaagagaaactatcagtgttgtg

SEQ ID NO: 41926 - DNA, 30 bp, Artificial Sequence
  Synthetic oligonucleotide
gggggagtcgtcacacgcgaatggtttgtg

SEQ ID NO: 41927 - DNA, 30 bp, Artificial Sequence
  Synthetic oligonucleotide
agggaagttagcttttcttgatcacaattg

SEQ ID NO: 41928 - DNA, 30 bp, Artificial Sequence
  Synthetic oligonucleotide
tcaccaacgtgataaggcaccaagcaattg

SEQ ID NO: 41929 - DNA, 30 bp, Artificial Sequence
  Synthetic oligonucleotide
tagcggaaccacattccggacggtcaattg

SEQ ID NO: 41930 - DNA, 30 bp, Artificial Sequence
  Synthetic oligonucleotide
tcgacagaaaaacgggttgcgaaggaattg

SEQ ID NO: 41931 - DNA, 30 bp, Artificial Sequence
  Synthetic oligonucleotide
taacttgaaagccatcgataagaggaattg

SEQ ID NO: 41932 - DNA, 30 bp, Artificial Sequence
  Synthetic oligonucleotide
cggaagtggttaaggacctcttgtgaattg

SEQ ID NO: 41933 - DNA, 30 bp, Artificial Sequence
  Synthetic oligonucleotide
aatgtgcacatgcaggaaacattgtaattg

SEQ ID NO: 41934 - DNA, 30 bp, Artificial Sequence
  Synthetic oligonucleotide
ggtcacccggtgaataggaggataacattg

SEQ ID NO: 41935 - DNA, 30 bp, Artificial Sequence
  Synthetic oligonucleotide
agttgttaaggtaaaagaaggcatacattg

SEQ ID NO: 41936 - DNA, 30 bp, Artificial Sequence
  Synthetic oligonucleotide
gtaaaagataggcgacccttaacgagattg

SEQ ID NO: 41937 - DNA, 30 bp, Artificial Sequence
  Synthetic oligonucleotide
tgtccggaggtccgtaaacagtgtggattg

SEQ ID NO: 41938 - DNA, 30 bp, Artificial Sequence
  Synthetic oligonucleotide
atagtcgtgggccggccgtgagagtgattg

SEQ ID NO: 41939 - DNA, 30 bp, Artificial Sequence
  Synthetic oligonucleotide
gagaggaaagcccgacaatgagtgctattg

SEQ ID NO: 41940 - DNA, 30 bp, Artificial Sequence
  Synthetic oligonucleotide
aagggtaacgttcttcaagcccgattattg

SEQ ID NO: 41941 - DNA, 30 bp, Artificial Sequence
  Synthetic oligonucleotide
tgaaatggggtgggtgataaggtattattg

SEQ ID NO: 41942 - DNA, 30 bp, Artificial Sequence
  Synthetic oligonucleotide
cggggagggggttgagtgtccgtcttattg

SEQ ID NO: 41943 - DNA, 30 bp, Artificial Sequence
  Synthetic oligonucleotide
tgggtcgctgtgcagagaagatcagacttg

SEQ ID NO: 41944 - DNA, 30 bp, Artificial Sequence
  Synthetic oligonucleotide
catccttgggaggattcgatataaggcttg

SEQ ID NO: 41945 - DNA, 31 bp, Artificial Sequence
  Synthetic oligonucleotide
tacacgaatttagggcgaaaaaggaggcttg

SEQ ID NO: 41946 - DNA, 30 bp, Artificial Sequence
  Synthetic oligonucleotide
ttagaacaacagagggcatcgaccggcttg

SEQ ID NO: 41947 - DNA, 30 bp, Artificial Sequence
  Synthetic oligonucleotide
gcgggggaatatcgaagatgaaaggtcttg

SEQ ID NO: 41948 - DNA, 30 bp, Artificial Sequence
  Synthetic oligonucleotide
ggcatggtactaaacattaatctcgagttg

SEQ ID NO: 41949 - DNA, 30 bp, Artificial Sequence
  Synthetic oligonucleotide
agtcggtaacacgtgagaaacgtcgagttg

SEQ ID NO: 41950 - DNA, 30 bp, Artificial Sequence
  Synthetic oligonucleotide
ccaatacaggcaaggtgctctgaggagttg

SEQ ID NO: 41951 - DNA, 30 bp, Artificial Sequence
  Synthetic oligonucleotide
cgagacttctggataggtgggatatcgttg

SEQ ID NO: 41952 - DNA, 30 bp, Artificial Sequence
  Synthetic oligonucleotide
cgggggtgcggacgccagtgtgaatggttg

SEQ ID NO: 41953 - DNA, 30 bp, Artificial Sequence
  Synthetic oligonucleotide
cgaagacggtgaaggttttttaccctgttg

SEQ ID NO: 41954 - DNA, 30 bp, Artificial Sequence
  Synthetic oligonucleotide
tcacatccatgtagcgcgaaagagctgttg

SEQ ID NO: 41955 - DNA, 30 bp, Artificial Sequence
  Synthetic oligonucleotide
gaacggtcactcaaaatacaacgcttgttg

SEQ ID NO: 41956 - DNA, 30 bp, Artificial Sequence
  Synthetic oligonucleotide
tggacagggatgctttataaacatcatttg

SEQ ID NO: 41957 - DNA, 30 bp, Artificial Sequence
  Synthetic oligonucleotide
cgaaggcacgacacatataactgagatttg

SEQ ID NO: 41958 - DNA, 30 bp, Artificial Sequence
  Synthetic oligonucleotide
acggcgttagcacccaaaacttaagctttg

SEQ ID NO: 41959 - DNA, 30 bp, Artificial Sequence
  Synthetic oligonucleotide
aggacaagagttgttcgttgccaatctttg

SEQ ID NO: 41960 - DNA, 30 bp, Artificial Sequence
  Synthetic oligonucleotide
tcgagagcagatggttcttacgaccgtttg

SEQ ID NO: 41961 - DNA, 30 bp, Artificial Sequence
  Synthetic oligonucleotide
tgctagcgagcggggattaattgggttttg

SEQ ID NO: 41962 - DNA, 30 bp, Artificial Sequence
  Synthetic oligonucleotide
tgacagcatgctcactacgaaggccaaaat

SEQ ID NO: 41963 - DNA, 30 bp, Artificial Sequence
  Synthetic oligonucleotide
ggtggaagagtacgtagtccggcagcaaat

SEQ ID NO: 41964 - DNA, 30 bp, Artificial Sequence
  Synthetic oligonucleotide
gactggaaaagcgcctagcagtgctcaaat

SEQ ID NO: 41965 - DNA, 30 bp, Artificial Sequence
  Synthetic oligonucleotide
ctacacagaatcgtccccggagaacgaaat

SEQ ID NO: 41966 - DNA, 30 bp, Artificial Sequence
  Synthetic oligonucleotide
aaacccggaacagccagggtgcacctaaat

SEQ ID NO: 41967 - DNA, 30 bp, Artificial Sequence
  Synthetic oligonucleotide
aggcgttaaggcagactacgaactctaaat

SEQ ID NO: 41968 - DNA, 30 bp, Artificial Sequence
  Synthetic oligonucleotide
tatcatggaagaatcgatagtgacgtaaat

SEQ ID NO: 41969 - DNA, 30 bp, Artificial Sequence
  Synthetic oligonucleotide
aggttgcgtcgaactaagtgatcattaaat

SEQ ID NO: 41970 - DNA, 30 bp, Artificial Sequence
  Synthetic oligonucleotide
aacgcaacggcaggtggtccggggttaaat

SEQ ID NO: 41971 - DNA, 30 bp, Artificial Sequence
  Synthetic oligonucleotide
cgcacagataatattagggttagcaacaat

SEQ ID NO: 41972 - DNA, 30 bp, Artificial Sequence
  Synthetic oligonucleotide
ggccaatcagaacgatgttataacgacaat

SEQ ID NO: 41973 - DNA, 30 bp, Artificial Sequence
  Synthetic oligonucleotide
gcgtggcctgaactgtagctgcaatacaat

SEQ ID NO: 41974 - DNA, 30 bp, Artificial Sequence
  Synthetic oligonucleotide
gacgcctatgcgactacaagaaatgccaat

SEQ ID NO: 41975 - DNA, 30 bp, Artificial Sequence
  Synthetic oligonucleotide
agcgggattgattcgctacagctgggcaat

SEQ ID NO: 41976 - DNA, 30 bp, Artificial Sequence
  Synthetic oligonucleotide
agatagggattcccagtgtgacggatcaat

SEQ ID NO: 41977 - DNA, 30 bp, Artificial Sequence
  Synthetic oligonucleotide
cctgaggggaaaacacgttgcgggatcaat

SEQ ID NO: 41978 - DNA, 30 bp, Artificial Sequence
  Synthetic oligonucleotide
gtgtggtctgaacgggaggcacgtatcaat

SEQ ID NO: 41979 - DNA, 30 bp, Artificial Sequence
  Synthetic oligonucleotide
gggcctaaaagagtatgtacatgtatcaat

SEQ ID NO: 41980 - DNA, 30 bp, Artificial Sequence
  Synthetic oligonucleotide
acgtgctggtgggtcgatgaacatgtcaat

SEQ ID NO: 41981 - DNA, 30 bp, Artificial Sequence
  Synthetic oligonucleotide
gtagagagtgccggacctcgccgggagaat

SEQ ID NO: 41982 - DNA, 30 bp, Artificial Sequence
  Synthetic oligonucleotide
cacagtccacaaaggtacgatggggagaat

SEQ ID NO: 41983 - DNA, 30 bp, Artificial Sequence
  Synthetic oligonucleotide
tccgggccatgaatacgatatacttagaat

SEQ ID NO: 41984 - DNA, 30 bp, Artificial Sequence
  Synthetic oligonucleotide
catactgtgccgacaggggtgaacacgaat

SEQ ID NO: 41985 - DNA, 30 bp, Artificial Sequence
  Synthetic oligonucleotide
aatagagtgaccacagagaactgcgcgaat

SEQ ID NO: 41986 - DNA, 30 bp, Artificial Sequence
  Synthetic oligonucleotide
cacgatcattcagggttaggaacatcgaat

SEQ ID NO: 41987 - DNA, 30 bp, Artificial Sequence
  Synthetic oligonucleotide
tagaggctgtaccgagagccgtgccggaat

SEQ ID NO: 41988 - DNA, 30 bp, Artificial Sequence
  Synthetic oligonucleotide
tatcagtaggatcgcgatctaggtcggaat

SEQ ID NO: 41989 - DNA, 30 bp, Artificial Sequence
  Synthetic oligonucleotide
atgtcacggggtcccaataggtgcatgaat

SEQ ID NO: 41990 - DNA, 30 bp, Artificial Sequence
  Synthetic oligonucleotide
gcaggtagaaggtgttcgaaatgcgtgaat

SEQ ID NO: 41991 - DNA, 30 bp, Artificial Sequence
  Synthetic oligonucleotide
cggcgaaagtgtgttaatgttggtgtgaat

SEQ ID NO: 41992 - DNA, 30 bp, Artificial Sequence
  Synthetic oligonucleotide
ccaaactcgctgaacagaagtcacaataat

SEQ ID NO: 41993 - DNA, 30 bp, Artificial Sequence
  Synthetic oligonucleotide
tatgatgaggcgagggtgacttaccataat

SEQ ID NO: 41994 - DNA, 30 bp, Artificial Sequence
  Synthetic oligonucleotide
cgactgtcccactccaacgaccgtgataat

SEQ ID NO: 41995 - DNA, 30 bp, Artificial Sequence
  Synthetic oligonucleotide
actaaacggaacatcccggcagaagctaat

SEQ ID NO: 41996 - DNA, 30 bp, Artificial Sequence
  Synthetic oligonucleotide
cgactccgaatatactgaccttcgtctaat

SEQ ID NO: 41997 - DNA, 30 bp, Artificial Sequence
  Synthetic oligonucleotide
ccgcatccgtagtatagagtgaggtctaat

SEQ ID NO: 41998 - DNA, 30 bp, Artificial Sequence
  Synthetic oligonucleotide
atgggggaatagtataaaacctgaattaat

SEQ ID NO: 41999 - DNA, 30 bp, Artificial Sequence
  Synthetic oligonucleotide
tcgggcaaattaggtaattagcgagttaat

SEQ ID NO: 42000 - DNA, 30 bp, Artificial Sequence
  Synthetic oligonucleotide
gccagatggaccgaaacgaactggcaacat

SEQ ID NO: 42001 - DNA, 30 bp, Artificial Sequence
  Synthetic oligonucleotide
gggtcaccaatcgacatagacatggaacat

SEQ ID NO: 42002 - DNA, 30 bp, Artificial Sequence
  Synthetic oligonucleotide
ctagcggcgaaggggttacgtgatccacat

SEQ ID NO: 42003 - DNA, 30 bp, Artificial Sequence
  Synthetic oligonucleotide
aaatagaaagaatgaccattaacagcacat

SEQ ID NO: 42004 - DNA, 30 bp, Artificial Sequence
  Synthetic oligonucleotide
cggggagtcaagactgtagggacgtcacat

SEQ ID NO: 42005 - DNA, 30 bp, Artificial Sequence
  Synthetic oligonucleotide
ggaggcgcctgtaattcccgtaacagacat

SEQ ID NO: 42006 - DNA, 30 bp, Artificial Sequence
  Synthetic oligonucleotide
aagacagacaccaggagtgaggtactacat

SEQ ID NO: 42007 - DNA, 30 bp, Artificial Sequence
  Synthetic oligonucleotide
cagcgagaaggatcagctggcatagtacat

SEQ ID NO: 42008 - DNA, 30 bp, Artificial Sequence
  Synthetic oligonucleotide
cgacatcggacctgttagggaggcttacat

SEQ ID NO: 42009 - DNA, 30 bp, Artificial Sequence
  Synthetic oligonucleotide
aggaagtgagagcgtgacaccataccccat

SEQ ID NO: 42010 - DNA, 30 bp, Artificial Sequence
  Synthetic oligonucleotide
agacggtatctcgtccgacatagaagccat

SEQ ID NO: 42011 - DNA, 30 bp, Artificial Sequence
  Synthetic oligonucleotide
agaaggggcacgttcaacgagtcacgccat

SEQ ID NO: 42012 - DNA, 30 bp, Artificial Sequence
  Synthetic oligonucleotide
aactaaatacaagaggacgatcgcttccat

SEQ ID NO: 42013 - DNA, 30 bp, Artificial Sequence
  Synthetic oligonucleotide
ccgacggttacgacatcggagtcacagcat

SEQ ID NO: 42014 - DNA, 30 bp, Artificial Sequence
  Synthetic oligonucleotide
acagcatgggcaagttagggcctatagcat

SEQ ID NO: 42015 - DNA, 30 bp, Artificial Sequence
  Synthetic oligonucleotide
ggggtggataatgactctgaaagttagcat

SEQ ID NO: 42016 - DNA, 30 bp, Artificial Sequence
  Synthetic oligonucleotide
tcaatgagaagtacagggggcggttagcat

SEQ ID NO: 42017 - DNA, 30 bp, Artificial Sequence
  Synthetic oligonucleotide
ggtaatctaaagagacaaggagattcgcat

SEQ ID NO: 42018 - DNA, 30 bp, Artificial Sequence
  Synthetic oligonucleotide
cgaagggttaattacaggtgcctaaggcat

SEQ ID NO: 42019 - DNA, 30 bp, Artificial Sequence
  Synthetic oligonucleotide
agtggtaggatatccagtgaagccgggcat

SEQ ID NO: 42020 - DNA, 30 bp, Artificial Sequence
  Synthetic oligonucleotide
ccactacagtagaaaaagatcgtttggcat

SEQ ID NO: 42021 - DNA, 30 bp, Artificial Sequence
  Synthetic oligonucleotide
taagagtagagtgcatggtcgatcttgcat

SEQ ID NO: 42022 - DNA, 30 bp, Artificial Sequence
  Synthetic oligonucleotide
cgttcgagctacaccaaaatcccagatcat

SEQ ID NO: 42023 - DNA, 30 bp, Artificial Sequence
  Synthetic oligonucleotide
gggtacgggaatacacgattgccccctcat

SEQ ID NO: 42024 - DNA, 30 bp, Artificial Sequence
  Synthetic oligonucleotide
gcgggataagcttatcagtgtgaatctcat

SEQ ID NO: 42025 - DNA, 30 bp, Artificial Sequence
  Synthetic oligonucleotide
cattagggaaaggtaagctacccttgtcat

SEQ ID NO: 42026 - DNA, 30 bp, Artificial Sequence
  Synthetic oligonucleotide
ccggggcagagtcgacagaggtacattcat

SEQ ID NO: 42027 - DNA, 30 bp, Artificial Sequence
  Synthetic oligonucleotide
acgactccgtgggagcaagcttgtattcat

SEQ ID NO: 42028 - DNA, 30 bp, Artificial Sequence
  Synthetic oligonucleotide
ggacagctgtcaacggtagccattaaagat

SEQ ID NO: 42029 - DNA, 30 bp, Artificial Sequence
  Synthetic oligonucleotide
gggttgtagcactgggtaaggagccaagat

SEQ ID NO: 42030 - DNA, 30 bp, Artificial Sequence
  Synthetic oligonucleotide
caacaagatgtgtgcaccaatgtcgaagat

SEQ ID NO: 42031 - DNA, 30 bp, Artificial Sequence
  Synthetic oligonucleotide
cgcaaagcaaagaagtcggggcgtgaagat

SEQ ID NO: 42032 - DNA, 30 bp, Artificial Sequence
  Synthetic oligonucleotide
ctcgaggacataggatgatggaagtaagat

SEQ ID NO: 42033 - DNA, 30 bp, Artificial Sequence
  Synthetic oligonucleotide
gagaggtggagcgccggtgattagacagat

SEQ ID NO: 42034 - DNA, 30 bp, Artificial Sequence
  Synthetic oligonucleotide
agtaaaacccacaaaggtactgatacagat

SEQ ID NO: 42035 - DNA, 30 bp, Artificial Sequence
  Synthetic oligonucleotide
gtaaatacaagcgcggaaagtacggcagat

SEQ ID NO: 42036 - DNA, 30 bp, Artificial Sequence
  Synthetic oligonucleotide
ttggaccagataaaacctagcgagagagat

SEQ ID NO: 42037 - DNA, 30 bp, Artificial Sequence
  Synthetic oligonucleotide
aagcgccgtcaacgttattaagatcgagat

SEQ ID NO: 42038 - DNA, 30 bp, Artificial Sequence
  Synthetic oligonucleotide
tcggatgcctcaatgaacggagaaggagat

SEQ ID NO: 42039 - DNA, 30 bp, Artificial Sequence
  Synthetic oligonucleotide
ggataacaccgggaacattagtaaggagat

SEQ ID NO: 42040 - DNA, 30 bp, Artificial Sequence
  Synthetic oligonucleotide
aagggactggatagtccaccgggtggagat

SEQ ID NO: 42041 - DNA, 30 bp, Artificial Sequence
  Synthetic oligonucleotide
acgctttaactacgatagaggggttgagat

SEQ ID NO: 42042 - DNA, 30 bp, Artificial Sequence
  Synthetic oligonucleotide
tagccgcattccaatacccagtgcgtagat

SEQ ID NO: 42043 - DNA, 30 bp, Artificial Sequence
  Synthetic oligonucleotide
aaggccaaacgaactattagggatttagat

SEQ ID NO: 42044 - DNA, 30 bp, Artificial Sequence
  Synthetic oligonucleotide
gatctagattagagatgcaaggtgaacgat

SEQ ID NO: 42045 - DNA, 30 bp, Artificial Sequence
  Synthetic oligonucleotide
tggggtaaatccgcaagcacattccacgat

SEQ ID NO: 42046 - DNA, 30 bp, Artificial Sequence
  Synthetic oligonucleotide
aaacaaagggaacaagagaacttttacgat

SEQ ID NO: 42047 - DNA, 30 bp, Artificial Sequence
  Synthetic oligonucleotide
gtgcgcacgtataattgaatagctgccgat

SEQ ID NO: 42048 - DNA, 30 bp, Artificial Sequence
  Synthetic oligonucleotide
gggagtgacaacattatggagatcggcgat

SEQ ID NO: 42049 - DNA, 30 bp, Artificial Sequence
  Synthetic oligonucleotide
ccgctaacaaagtccagggaccgtatcgat

SEQ ID NO: 42050 - DNA, 30 bp, Artificial Sequence
  Synthetic oligonucleotide
cactgtgggtagcgggctagcgcactcgat

SEQ ID NO: 42051 - DNA, 30 bp, Artificial Sequence
  Synthetic oligonucleotide
aagcacggatcacgagggaccagtctcgat

SEQ ID NO: 42052 - DNA, 30 bp, Artificial Sequence
  Synthetic oligonucleotide
tagaaaaccacggagagacaggtgaaggat

SEQ ID NO: 42053 - DNA, 30 bp, Artificial Sequence
  Synthetic oligonucleotide
atggtatacagaccgtgaaggtaagaggat

SEQ ID NO: 42054 - DNA, 30 bp, Artificial Sequence
  Synthetic oligonucleotide
gggacggtggggtcgtacattggctaggat

SEQ ID NO: 42055 - DNA, 30 bp, Artificial Sequence
  Synthetic oligonucleotide
aggtaatcgagctagatcagagcgacggat

SEQ ID NO: 42056 - DNA, 30 bp, Artificial Sequence
  Synthetic oligonucleotide
ttacgagaattatccagtcaatctacggat

SEQ ID NO: 42057 - DNA, 30 bp, Artificial Sequence
  Synthetic oligonucleotide
agtgcgaataacatttacctggtggcggat

SEQ ID NO: 42058 - DNA, 30 bp, Artificial Sequence
  Synthetic oligonucleotide
cgggggaccggctcatacgtttaatcggat

SEQ ID NO: 42059 - DNA, 30 bp, Artificial Sequence
  Synthetic oligonucleotide
cacacagaggaggaccggcgactatcggat

SEQ ID NO: 42060 - DNA, 30 bp, Artificial Sequence
  Synthetic oligonucleotide
agcggtgtgaacagtggtcaagcgggggat

SEQ ID NO: 42061 - DNA, 30 bp, Artificial Sequence
  Synthetic oligonucleotide
tagcactggtgtcaggaggatgcttgggat

SEQ ID NO: 42062 - DNA, 30 bp, Artificial Sequence
  Synthetic oligonucleotide
gtgcagtggcacagttgtgaatccgtggat

SEQ ID NO: 42063 - DNA, 30 bp, Artificial Sequence
  Synthetic oligonucleotide
tcaaaggggaccttcagggcaagcgtggat

SEQ ID NO: 42064 - DNA, 30 bp, Artificial Sequence
  Synthetic oligonucleotide
aggcaggtacccgcgagcaaagggaatgat

SEQ ID NO: 42065 - DNA, 30 bp, Artificial Sequence
  Synthetic oligonucleotide
aggtaaaacggctagttgacagggcatgat

SEQ ID NO: 42066 - DNA, 30 bp, Artificial Sequence
  Synthetic oligonucleotide
caacgatgataaagtcttggcaaaactgat

SEQ ID NO: 42067 - DNA, 30 bp, Artificial Sequence
  Synthetic oligonucleotide
acgaaatacattacggactccacaactgat

SEQ ID NO: 42068 - DNA, 30 bp, Artificial Sequence
  Synthetic oligonucleotide
gggaaggatccgaaccaagggctgactgat

SEQ ID NO: 42069 - DNA, 30 bp, Artificial Sequence
  Synthetic oligonucleotide
cgaaccggaaaaaactagttggactctgat

SEQ ID NO: 42070 - DNA, 30 bp, Artificial Sequence
  Synthetic oligonucleotide
actcgatgaaagataaattatccaagtgat

SEQ ID NO: 42071 - DNA, 30 bp, Artificial Sequence
  Synthetic oligonucleotide
ccgatcctaaaggtgtgtagtgtaagtgat

SEQ ID NO: 42072 - DNA, 30 bp, Artificial Sequence
  Synthetic oligonucleotide
cgtggtgagaaaaccagccggaactgtgat

SEQ ID NO: 42073 - DNA, 30 bp, Artificial Sequence
  Synthetic oligonucleotide
gcgagccggggagtttcagccttgtgtgat

SEQ ID NO: 42074 - DNA, 30 bp, Artificial Sequence
  Synthetic oligonucleotide
acgtcacactccttcccatgaaaccgatat

SEQ ID NO: 42075 - DNA, 30 bp, Artificial Sequence
  Synthetic oligonucleotide
aacggtcagacaggaccaggtacgggatat

SEQ ID NO: 42076 - DNA, 30 bp, Artificial Sequence
  Synthetic oligonucleotide
tctgaagacagggcctacagtagatgatat

SEQ ID NO: 42077 - DNA, 30 bp, Artificial Sequence
  Synthetic oligonucleotide
cagaaaacgggcgcgaccacaggctgatat

SEQ ID NO: 42078 - DNA, 30 bp, Artificial Sequence
  Synthetic oligonucleotide
tcggcaagatcaccgtccaggcgaatatat

SEQ ID NO: 42079 - DNA, 30 bp, Artificial Sequence
  Synthetic oligonucleotide
aggcgtgcggtagtaatacaaagcatatat

SEQ ID NO: 42080 - DNA, 30 bp, Artificial Sequence
  Synthetic oligonucleotide
taacaggggagtggcggggaagaccactat

SEQ ID NO: 42081 - DNA, 30 bp, Artificial Sequence
  Synthetic oligonucleotide
ccgatcacacaaagtgtcagcctgcactat

SEQ ID NO: 42082 - DNA, 30 bp, Artificial Sequence
  Synthetic oligonucleotide
actcatctgagtcaagggcacaaagactat

SEQ ID NO: 42083 - DNA, 30 bp, Artificial Sequence
  Synthetic oligonucleotide
ggctacgaccgaaggatggtccagtactat

SEQ ID NO: 42084 - DNA, 30 bp, Artificial Sequence
  Synthetic oligonucleotide
gggcgcgggatgattgttggatagtactat

SEQ ID NO: 42085 - DNA, 30 bp, Artificial Sequence
  Synthetic oligonucleotide
acagtgagagtacattacaggcaagcctat

SEQ ID NO: 42086 - DNA, 30 bp, Artificial Sequence
  Synthetic oligonucleotide
aatggcaaacacgatgaataagatgcctat

SEQ ID NO: 42087 - DNA, 30 bp, Artificial Sequence
  Synthetic oligonucleotide
catccggacaaaaaaaagtgattactctat

SEQ ID NO: 42088 - DNA, 30 bp, Artificial Sequence
  Synthetic oligonucleotide
gtacaggaatggacagtaggcgtaaagtat

SEQ ID NO: 42089 - DNA, 30 bp, Artificial Sequence
  Synthetic oligonucleotide
ttccgtggcggtaagggcaaactcaagtat

SEQ ID NO: 42090 - DNA, 30 bp, Artificial Sequence
  Synthetic oligonucleotide
tagtccagggaccgaataaagcaagcgtat

SEQ ID NO: 42091 - DNA, 30 bp, Artificial Sequence
  Synthetic oligonucleotide
gaggggttgatcaaaaaatgagaaaggtat

SEQ ID NO: 42092 - DNA, 30 bp, Artificial Sequence
  Synthetic oligonucleotide
aggacggagggcggactaaacttatggtat

SEQ ID NO: 42093 - DNA, 30 bp, Artificial Sequence
  Synthetic oligonucleotide
gtggcccaaaactcatcgtcccacctgtat

SEQ ID NO: 42094 - DNA, 30 bp, Artificial Sequence
  Synthetic oligonucleotide
cgctaggaaaatggaacactggtgctgtat

SEQ ID NO: 42095 - DNA, 30 bp, Artificial Sequence
  Synthetic oligonucleotide
cgtaactatggggtgggtgtgtgagcttat

SEQ ID NO: 42096 - DNA, 30 bp, Artificial Sequence
  Synthetic oligonucleotide
ggtacaactaggagcgggcaagcccgttat

SEQ ID NO: 42097 - DNA, 30 bp, Artificial Sequence
  Synthetic oligonucleotide
gaaggctaattaggcggtaccgaagaaact

SEQ ID NO: 42098 - DNA, 30 bp, Artificial Sequence
  Synthetic oligonucleotide
accaatatggtggcggacgtccgagaaact

SEQ ID NO: 42099 - DNA, 30 bp, Artificial Sequence
  Synthetic oligonucleotide
acgcacacactgagaaccgcggtgacaact

SEQ ID NO: 42100 - DNA, 30 bp, Artificial Sequence
  Synthetic oligonucleotide
gccctcaccgaaacatgcgaagttacaact

SEQ ID NO: 42101 - DNA, 30 bp, Artificial Sequence
  Synthetic oligonucleotide
accaaggttaagccagctcacatgccaact

SEQ ID NO: 42102 - DNA, 31 bp, Artificial Sequence
  Synthetic oligonucleotide
accgatcgaagctcactgaaatggagcaact

SEQ ID NO: 42103 - DNA, 30 bp, Artificial Sequence
  Synthetic oligonucleotide
atggggactgaggcccgcgtgaaatcaact

SEQ ID NO: 42104 - DNA, 30 bp, Artificial Sequence
  Synthetic oligonucleotide
agagccaagtgtcgacttaacagatcaact

SEQ ID NO: 42105 - DNA, 30 bp, Artificial Sequence
  Synthetic oligonucleotide
atatgaacgggagacggatactagagaact

SEQ ID NO: 42106 - DNA, 30 bp, Artificial Sequence
  Synthetic oligonucleotide
atgaatgtgtattcatcgagtgcgcgaact

SEQ ID NO: 42107 - DNA, 30 bp, Artificial Sequence
  Synthetic oligonucleotide
acgaacacttaggacccgatctcgcgaact

SEQ ID NO: 42108 - DNA, 30 bp, Artificial Sequence
  Synthetic oligonucleotide
cggcacacttccctgagcagagccataact

SEQ ID NO: 42109 - DNA, 30 bp, Artificial Sequence
  Synthetic oligonucleotide
ctcgtcgaaagagtgtcacagacgataact

SEQ ID NO: 42110 - DNA, 30 bp, Artificial Sequence
  Synthetic oligonucleotide
gctcagtagggagcggggggccacttaact

SEQ ID NO: 42111 - DNA, 30 bp, Artificial Sequence
  Synthetic oligonucleotide
ggaaaagaaacaataccacagtgcttaact

SEQ ID NO: 42112 - DNA, 30 bp, Artificial Sequence
  Synthetic oligonucleotide
gaggcactttagagcatcatcgcgaacact

SEQ ID NO: 42113 - DNA, 30 bp, Artificial Sequence
  Synthetic oligonucleotide
taggccgaattcagccaatcagctcacact

SEQ ID NO: 42114 - DNA, 30 bp, Artificial Sequence
  Synthetic oligonucleotide
gaacgaaacaagaaaagaaccgtccgcact

SEQ ID NO: 42115 - DNA, 30 bp, Artificial Sequence
  Synthetic oligonucleotide
cgctgtaggaccgaagtattcaaaggcact

SEQ ID NO: 42116 - DNA, 30 bp, Artificial Sequence
  Synthetic oligonucleotide
gtccgagtgacagcttcaaacgagtgcact

SEQ ID NO: 42117 - DNA, 30 bp, Artificial Sequence
  Synthetic oligonucleotide
agatagtacatctagacactgtcaacgact

SEQ ID NO: 42118 - DNA, 30 bp, Artificial Sequence
  Synthetic oligonucleotide
accccagaactggagaaatagctcacgact

SEQ ID NO: 42119 - DNA, 30 bp, Artificial Sequence
  Synthetic oligonucleotide
agatataagggcgcatactggtagacgact

SEQ ID NO: 42120 - DNA, 30 bp, Artificial Sequence
  Synthetic oligonucleotide
cgtaagactcatgcccattggagtacgact

SEQ ID NO: 42121 - DNA, 30 bp, Artificial Sequence
  Synthetic oligonucleotide
ttgcctagggtggaagcagcgtaacggact

SEQ ID NO: 42122 - DNA, 30 bp, Artificial Sequence
  Synthetic oligonucleotide
gtgacaaagaagtacaacaattctcggact

SEQ ID NO: 42123 - DNA, 30 bp, Artificial Sequence
  Synthetic oligonucleotide
acgtgcaactcagggcctaggtgagatact

SEQ ID NO: 42124 - DNA, 30 bp, Artificial Sequence
  Synthetic oligonucleotide
ggctacagatccgagggagaacgctatact

SEQ ID NO: 42125 - DNA, 30 bp, Artificial Sequence
  Synthetic oligonucleotide
ggacgtggattcagaagtgtaatgcgtact

SEQ ID NO: 42126 - DNA, 30 bp, Artificial Sequence
  Synthetic oligonucleotide
cgggaagctaaatggaagtgaaaaacacct

SEQ ID NO: 42127 - DNA, 30 bp, Artificial Sequence
  Synthetic oligonucleotide
attgaccgatagggagacgattgagcacct

SEQ ID NO: 42128 - DNA, 30 bp, Artificial Sequence
  Synthetic oligonucleotide
gcgacgtcttgggcagagattgaaagacct

SEQ ID NO: 42129 - DNA, 30 bp, Artificial Sequence
  Synthetic oligonucleotide
tcatagggagcgagacgaaaaggagcccct

SEQ ID NO: 42130 - DNA, 30 bp, Artificial Sequence
  Synthetic oligonucleotide
gcggaataaccatgtagcacgagcagccct

SEQ ID NO: 42131 - DNA, 30 bp, Artificial Sequence
  Synthetic oligonucleotide
cagaaaaacggctatgcgatgcaagtccct

SEQ ID NO: 42132 - DNA, 30 bp, Artificial Sequence
  Synthetic oligonucleotide
ggccagtaatgcatataagatagtcagcct

SEQ ID NO: 42133 - DNA, 30 bp, Artificial Sequence
  Synthetic oligonucleotide
gaacgagcacgtccaccacgaactaggcct

SEQ ID NO: 42134 - DNA, 30 bp, Artificial Sequence
  Synthetic oligonucleotide
atagtgtgagaacaacaaagggaggatcct

SEQ ID NO: 42135 - DNA, 30 bp, Artificial Sequence
  Synthetic oligonucleotide
tagtagggttgcaataacgaaacgagtcct

SEQ ID NO: 42136 - DNA, 30 bp, Artificial Sequence
  Synthetic oligonucleotide
ggagcgttgattaatgagggacgacaagct

SEQ ID NO: 42137 - DNA, 30 bp, Artificial Sequence
  Synthetic oligonucleotide
ccacaggggaccgatctcaacacttcagct

SEQ ID NO: 42138 - DNA, 30 bp, Artificial Sequence
  Synthetic oligonucleotide
tgtgtaacgttaaaggtaggcgactgagct

SEQ ID NO: 42139 - DNA, 30 bp, Artificial Sequence
  Synthetic oligonucleotide
cgagtgatatctgatagaggacaagtagct

SEQ ID NO: 42140 - DNA, 30 bp, Artificial Sequence
  Synthetic oligonucleotide
acaaaggatggtggaaaagattcattagct

SEQ ID NO: 42141 - DNA, 30 bp, Artificial Sequence
  Synthetic oligonucleotide
tggtagtacgaatggatcccgagtttagct

SEQ ID NO: 42142 - DNA, 30 bp, Artificial Sequence
  Synthetic oligonucleotide
tcgattgcgggaggtggaggggtagtcgct

SEQ ID NO: 42143 - DNA, 30 bp, Artificial Sequence
  Synthetic oligonucleotide
gaaaggattacggcaacgaagagtgtcgct

SEQ ID NO: 42144 - DNA, 30 bp, Artificial Sequence
  Synthetic oligonucleotide
tgctcgagagggaaaattgttttgaaggct

SEQ ID NO: 42145 - DNA, 30 bp, Artificial Sequence
  Synthetic oligonucleotide
cgaaatgtcgtgtacaagacttatgaggct

SEQ ID NO: 42146 - DNA, 30 bp, Artificial Sequence
  Synthetic oligonucleotide
gggggagcattgagacaagtaggatcggct

SEQ ID NO: 42147 - DNA, 30 bp, Artificial Sequence
  Synthetic oligonucleotide
ctatcatactgaaacgaagagaattcggct

SEQ ID NO: 42148 - DNA, 30 bp, Artificial Sequence
  Synthetic oligonucleotide
agacccacctttgaagatcacacgagggct

SEQ ID NO: 42149 - DNA, 30 bp, Artificial Sequence
  Synthetic oligonucleotide
tagcgaactgaacataccgggctcatggct

SEQ ID NO: 42150 - DNA, 30 bp, Artificial Sequence
  Synthetic oligonucleotide
agagtcaatgctacgaatacagtgctggct

SEQ ID NO: 42151 - DNA, 30 bp, Artificial Sequence
  Synthetic oligonucleotide
tcgggagtcaggaaacgagggaggcctgct

SEQ ID NO: 42152 - DNA, 30 bp, Artificial Sequence
  Synthetic oligonucleotide
cgcaacgaactctagacgggaagagctgct

SEQ ID NO: 42153 - DNA, 30 bp, Artificial Sequence
  Synthetic oligonucleotide
aggatcggtgagacaaggccatcgagtgct

SEQ ID NO: 42154 - DNA, 30 bp, Artificial Sequence
  Synthetic oligonucleotide
aggtctcgagtgctagcggctgcgcgtgct

SEQ ID NO: 42155 - DNA, 30 bp, Artificial Sequence
  Synthetic oligonucleotide
cgctaaagggtggacggcactatttaatct

SEQ ID NO: 42156 - DNA, 30 bp, Artificial Sequence
  Synthetic oligonucleotide
aggcctcgaacgagtacgggggttcgatct

SEQ ID NO: 42157 - DNA, 30 bp, Artificial Sequence
  Synthetic oligonucleotide
ccgaataaatatgaaataacataactatct

SEQ ID NO: 42158 - DNA, 30 bp, Artificial Sequence
  Synthetic oligonucleotide
ccaggggagaatatccaaagacagttatct

SEQ ID NO: 42159 - DNA, 30 bp, Artificial Sequence
  Synthetic oligonucleotide
aaggatgtaaggcacaggatgtgacactct

SEQ ID NO: 42160 - DNA, 30 bp, Artificial Sequence
  Synthetic oligonucleotide
ttacgaggtgaaaaaacactgttggactct

SEQ ID NO: 42161 - DNA, 30 bp, Artificial Sequence
  Synthetic oligonucleotide
acaggataacgttaacggtcagggaagtct

SEQ ID NO: 42162 - DNA, 30 bp, Artificial Sequence
  Synthetic oligonucleotide
gacccgattcgtgcgtcgtactgtgcgtct

SEQ ID NO: 42163 - DNA, 30 bp, Artificial Sequence
  Synthetic oligonucleotide
gtgcaggtcggctaaaatacagcctggtct

SEQ ID NO: 42164 - DNA, 30 bp, Artificial Sequence
  Synthetic oligonucleotide
gacgatcagagtgacactaaatgttggtct

SEQ ID NO: 42165 - DNA, 31 bp, Artificial Sequence
  Synthetic oligonucleotide
ccgaggacaggaatggagtgactaaaattct

SEQ ID NO: 42166 - DNA, 30 bp, Artificial Sequence
  Synthetic oligonucleotide
atggacagcccctaaaattgctacgattct

SEQ ID NO: 42167 - DNA, 30 bp, Artificial Sequence
  Synthetic oligonucleotide
gcgggcgactaaggaattgcagcaacttct

SEQ ID NO: 42168 - DNA, 30 bp, Artificial Sequence
  Synthetic oligonucleotide
cctcaagctccgcgagtagtagtaaaaagt

SEQ ID NO: 42169 - DNA, 30 bp, Artificial Sequence
  Synthetic oligonucleotide
gagaatgtgcgaatcgcacgtagaccaagt

SEQ ID NO: 42170 - DNA, 30 bp, Artificial Sequence
  Synthetic oligonucleotide
atagacacacgagacgacatacatgcaagt

SEQ ID NO: 42171 - DNA, 30 bp, Artificial Sequence
  Synthetic oligonucleotide
gggagataacaggataaccactctgcaagt

SEQ ID NO: 42172 - DNA, 30 bp, Artificial Sequence
  Synthetic oligonucleotide
ccggacgctacaaaaaggggcatctcaagt

SEQ ID NO: 42173 - DNA, 30 bp, Artificial Sequence
  Synthetic oligonucleotide
caggactcttacgcaaggaatgcaagaagt

SEQ ID NO: 42174 - DNA, 30 bp, Artificial Sequence
  Synthetic oligonucleotide
aatcccgagtcgccaaatagggcacgaagt

SEQ ID NO: 42175 - DNA, 30 bp, Artificial Sequence
  Synthetic oligonucleotide
cactgaagcaatggcaatgcatggcgaagt

SEQ ID NO: 42176 - DNA, 30 bp, Artificial Sequence
  Synthetic oligonucleotide
agagggtcgcatatcggtcccgaaggaagt

SEQ ID NO: 42177 - DNA, 30 bp, Artificial Sequence
  Synthetic oligonucleotide
gctgcggttcggatgaagaagggaggaagt

SEQ ID NO: 42178 - DNA, 30 bp, Artificial Sequence
  Synthetic oligonucleotide
acgtaagtgtggtcggcacaaaccggaagt

SEQ ID NO: 42179 - DNA, 30 bp, Artificial Sequence
  Synthetic oligonucleotide
tcagataggaccttccagcagtggtgaagt

SEQ ID NO: 42180 - DNA, 30 bp, Artificial Sequence
  Synthetic oligonucleotide
actagattcgaacacccgagtaccataagt

SEQ ID NO: 42181 - DNA, 30 bp, Artificial Sequence
  Synthetic oligonucleotide
catcctaaacaattgagaaagagtataagt

SEQ ID NO: 42182 - DNA, 30 bp, Artificial Sequence
  Synthetic oligonucleotide
cgaggtatgcacacaaactgttgagtaagt

SEQ ID NO: 42183 - DNA, 30 bp, Artificial Sequence
  Synthetic oligonucleotide
acaattgacatccaggacatcgtaaccagt

SEQ ID NO: 42184 - DNA, 30 bp, Artificial Sequence
  Synthetic oligonucleotide
aggacgccgggaaatacaagcaaagccagt

SEQ ID NO: 42185 - DNA, 30 bp, Artificial Sequence
  Synthetic oligonucleotide
agcttgccacgggacggggtgaaatccagt

SEQ ID NO: 42186 - DNA, 30 bp, Artificial Sequence
  Synthetic oligonucleotide
tcgcgagtcatccgtcggttatcatccagt

SEQ ID NO: 42187 - DNA, 30 bp, Artificial Sequence
  Synthetic oligonucleotide
gggggtgagcgaagataatgagcgtccagt

SEQ ID NO: 42188 - DNA, 30 bp, Artificial Sequence
  Synthetic oligonucleotide
ccttaagaataggtaacaagtcatagcagt

SEQ ID NO: 42189 - DNA, 30 bp, Artificial Sequence
  Synthetic oligonucleotide
atgatacatatggcgctcgcggagggcagt

SEQ ID NO: 42190 - DNA, 30 bp, Artificial Sequence
  Synthetic oligonucleotide
gcaaggcgattcacgagccggatgggcagt

SEQ ID NO: 42191 - DNA, 30 bp, Artificial Sequence
  Synthetic oligonucleotide
agggacatcgggtgtatgtggacatgcagt

SEQ ID NO: 42192 - DNA, 30 bp, Artificial Sequence
  Synthetic oligonucleotide
ggaccggttcatagccaagagcacctcagt

SEQ ID NO: 42193 - DNA, 30 bp, Artificial Sequence
  Synthetic oligonucleotide
cgccaatgtcatccattgatagtcaagagt

SEQ ID NO: 42194 - DNA, 30 bp, Artificial Sequence
  Synthetic oligonucleotide
acggtcgtaatgtagtatctaacacagagt

SEQ ID NO: 42195 - DNA, 30 bp, Artificial Sequence
  Synthetic oligonucleotide
cgggcaaggccaagggtcatgctacagagt

SEQ ID NO: 42196 - DNA, 30 bp, Artificial Sequence
  Synthetic oligonucleotide
gcatatcgaattgctttggccacccagagt

SEQ ID NO: 42197 - DNA, 30 bp, Artificial Sequence
  Synthetic oligonucleotide
tgttgcgaggggtgaggaaaatccgcgagt

SEQ ID NO: 42198 - DNA, 30 bp, Artificial Sequence
  Synthetic oligonucleotide
ctcggggagactgaggcaaggttcgcgagt

SEQ ID NO: 42199 - DNA, 30 bp, Artificial Sequence
  Synthetic oligonucleotide
taataacgaacagctggtcacgattcgagt

SEQ ID NO: 42200 - DNA, 30 bp, Artificial Sequence
  Synthetic oligonucleotide
ctaggtcggacatgagtattgctttcgagt

SEQ ID NO: 42201 - DNA, 30 bp, Artificial Sequence
  Synthetic oligonucleotide
cccaagagttgagtacagggagaaaggagt

SEQ ID NO: 42202 - DNA, 30 bp, Artificial Sequence
  Synthetic oligonucleotide
cccacaggtgaattatggcgatagcggagt

SEQ ID NO: 42203 - DNA, 30 bp, Artificial Sequence
  Synthetic oligonucleotide
gtagaaccgaggtttctaaatcgatggagt

SEQ ID NO: 42204 - DNA, 30 bp, Artificial Sequence
  Synthetic oligonucleotide
aaaggcctaggccgtagggaagcttggagt

SEQ ID NO: 42205 - DNA, 30 bp, Artificial Sequence
  Synthetic oligonucleotide
ggtattcgagaataatatgaaggaatgagt

SEQ ID NO: 42206 - DNA, 30 bp, Artificial Sequence
  Synthetic oligonucleotide
tgggcaagtggtttgaataccggtctgagt

SEQ ID NO: 42207 - DNA, 30 bp, Artificial Sequence
  Synthetic oligonucleotide
cggtcgaagctagctggagccgcggtgagt

SEQ ID NO: 42208 - DNA, 30 bp, Artificial Sequence
  Synthetic oligonucleotide
atacgggcgcattaggggtgcggtaatagt

SEQ ID NO: 42209 - DNA, 30 bp, Artificial Sequence
  Synthetic oligonucleotide
tgagagcaacacgtcgatcctcatgatagt

SEQ ID NO: 42210 - DNA, 30 bp, Artificial Sequence
  Synthetic oligonucleotide
acgtctgtccgatctaaattgagccctagt

SEQ ID NO: 42211 - DNA, 30 bp, Artificial Sequence
  Synthetic oligonucleotide
ggatgggcacaagatgtacagtccgctagt

SEQ ID NO: 42212 - DNA, 30 bp, Artificial Sequence
  Synthetic oligonucleotide
cccgaacgacgtgccgagggagtcagtagt

SEQ ID NO: 42213 - DNA, 30 bp, Artificial Sequence
  Synthetic oligonucleotide
tcagaacgatggtcggccacccagggtagt

SEQ ID NO: 42214 - DNA, 30 bp, Artificial Sequence
  Synthetic oligonucleotide
catggtcgaaaatgccacctgatacaacgt

SEQ ID NO: 42215 - DNA, 30 bp, Artificial Sequence
  Synthetic oligonucleotide
tggtacctgggatagcatgtggctgaacgt

SEQ ID NO: 42216 - DNA, 30 bp, Artificial Sequence
  Synthetic oligonucleotide
gggtgagacttacggcacaatgagtaacgt

SEQ ID NO: 42217 - DNA, 30 bp, Artificial Sequence
  Synthetic oligonucleotide
aagacacggcaagggcgatgacagtcacgt

SEQ ID NO: 42218 - DNA, 30 bp, Artificial Sequence
  Synthetic oligonucleotide
acggggcgacggtaggcattgacaagacgt

SEQ ID NO: 42219 - DNA, 30 bp, Artificial Sequence
  Synthetic oligonucleotide
tagaaggtccttagagtcagcaatagacgt

SEQ ID NO: 42220 - DNA, 30 bp, Artificial Sequence
  Synthetic oligonucleotide
acaccctagcatcgatagacaagttgacgt

SEQ ID NO: 42221 - DNA, 31 bp, Artificial Sequence
  Synthetic oligonucleotide
aagattccgataggagaaagaaaagctacgt

SEQ ID NO: 42222 - DNA, 31 bp, Artificial Sequence
  Synthetic oligonucleotide
gcacgtggacgagatgaacaagatgctacgt

SEQ ID NO: 42223 - DNA, 30 bp, Artificial Sequence
  Synthetic oligonucleotide
acgagtggtgttattcgtgggacagtacgt

SEQ ID NO: 42224 - DNA, 30 bp, Artificial Sequence
  Synthetic oligonucleotide
cgacgggagaacatttgagagacaaaccgt

SEQ ID NO: 42225 - DNA, 30 bp, Artificial Sequence
  Synthetic oligonucleotide
gtacttcaatcacacaagtcagagaaccgt

SEQ ID NO: 42226 - DNA, 30 bp, Artificial Sequence
  Synthetic oligonucleotide
aggtaaaaacatcggccccggctaacccgt

SEQ ID NO: 42227 - DNA, 30 bp, Artificial Sequence
  Synthetic oligonucleotide
tcggacgtggtggaactaggtgcaccccgt

SEQ ID NO: 42228 - DNA, 30 bp, Artificial Sequence
  Synthetic oligonucleotide
gtgaagaggattagaactctcatttgccgt

SEQ ID NO: 42229 - DNA, 30 bp, Artificial Sequence
  Synthetic oligonucleotide
atagtgcaggaaaaatgagtccgtttccgt

SEQ ID NO: 42230 - DNA, 30 bp, Artificial Sequence
  Synthetic oligonucleotide
cttgtctacggattcacgagaacagagcgt

SEQ ID NO: 42231 - DNA, 30 bp, Artificial Sequence
  Synthetic oligonucleotide
aaggagtagagggggagcacctgttagcgt

SEQ ID NO: 42232 - DNA, 30 bp, Artificial Sequence
  Synthetic oligonucleotide
cggaagttagttagtgcgccatgctcgcgt

SEQ ID NO: 42233 - DNA, 30 bp, Artificial Sequence
  Synthetic oligonucleotide
gacgaggacagaggactaagatccgggcgt

SEQ ID NO: 42234 - DNA, 30 bp, Artificial Sequence
  Synthetic oligonucleotide
ccaatcgagaaattatggcaaagggggcgt

SEQ ID NO: 42235 - DNA, 30 bp, Artificial Sequence
  Synthetic oligonucleotide
cgtatcatattacaaaccatgtgagtgcgt

SEQ ID NO: 42236 - DNA, 30 bp, Artificial Sequence
  Synthetic oligonucleotide
aagagcaatcaaaagcgtcgcatggtgcgt

SEQ ID NO: 42237 - DNA, 30 bp, Artificial Sequence
  Synthetic oligonucleotide
gtgtccgagagcggagtaaaaatgttgcgt

SEQ ID NO: 42238 - DNA, 30 bp, Artificial Sequence
  Synthetic oligonucleotide
cgcgcagaagggagagtgcccgcgaatcgt

SEQ ID NO: 42239 - DNA, 30 bp, Artificial Sequence
  Synthetic oligonucleotide
tgattaaggggtatgtgacaaactgatcgt

SEQ ID NO: 42240 - DNA, 30 bp, Artificial Sequence
  Synthetic oligonucleotide
agatctaccgacctccgaatcacccctcgt

SEQ ID NO: 42241 - DNA, 30 bp, Artificial Sequence
  Synthetic oligonucleotide
cgggataagataggaaagccagttgctcgt

SEQ ID NO: 42242 - DNA, 30 bp, Artificial Sequence
  Synthetic oligonucleotide
ctgcacgggaggttgaaaacacggagtcgt

SEQ ID NO: 42243 - DNA, 30 bp, Artificial Sequence
  Synthetic oligonucleotide
tcgtcaccaaacaagatactgcagattcgt

SEQ ID NO: 42244 - DNA, 30 bp, Artificial Sequence
  Synthetic oligonucleotide
tgaagtccggatatgcgagcgccggaaggt

SEQ ID NO: 42245 - DNA, 30 bp, Artificial Sequence
  Synthetic oligonucleotide
gttcggggggcgacgacaaaattggaaggt

SEQ ID NO: 42246 - DNA, 30 bp, Artificial Sequence
  Synthetic oligonucleotide
atggatgaccaccaaggtttgagataaggt

SEQ ID NO: 42247 - DNA, 30 bp, Artificial Sequence
  Synthetic oligonucleotide
cagcggactccattataacccaacacaggt

SEQ ID NO: 42248 - DNA, 30 bp, Artificial Sequence
  Synthetic oligonucleotide
gagaggccaatcgagtaatagggcacaggt

SEQ ID NO: 42249 - DNA, 30 bp, Artificial Sequence
  Synthetic oligonucleotide
cagcagaggcgcaggctcgagctgacaggt

SEQ ID NO: 42250 - DNA, 30 bp, Artificial Sequence
  Synthetic oligonucleotide
aagtgtcaaaccggcatccagaatacaggt

SEQ ID NO: 42251 - DNA, 30 bp, Artificial Sequence
  Synthetic oligonucleotide
cactatggggagaggtcacccaatgcaggt

SEQ ID NO: 42252 - DNA, 30 bp, Artificial Sequence
  Synthetic oligonucleotide
gcctgagggtggcgtaccgaacggagaggt

SEQ ID NO: 42253 - DNA, 30 bp, Artificial Sequence
  Synthetic oligonucleotide
tgagagatgaatgggatgattcgtagaggt

SEQ ID NO: 42254 - DNA, 30 bp, Artificial Sequence
  Synthetic oligonucleotide
acgagcgtcatccacgcctacggtgtaggt

SEQ ID NO: 42255 - DNA, 30 bp, Artificial Sequence
  Synthetic oligonucleotide
ctcacgtaaggtgggtaagcgaggttaggt

SEQ ID NO: 42256 - DNA, 30 bp, Artificial Sequence
  Synthetic oligonucleotide
cacgcaggagcacgcatacgcggagacggt

SEQ ID NO: 42257 - DNA, 30 bp, Artificial Sequence
  Synthetic oligonucleotide
tgcgggcggaggtgcatgccaatgagcggt

SEQ ID NO: 42258 - DNA, 30 bp, Artificial Sequence
  Synthetic oligonucleotide
gcgggagggggctaagaccatagctgcggt

SEQ ID NO: 42259 - DNA, 30 bp, Artificial Sequence
  Synthetic oligonucleotide
ctggaacataagaacgtattaaagccgggt

SEQ ID NO: 42260 - DNA, 30 bp, Artificial Sequence
  Synthetic oligonucleotide
cagcgacagattagccactaggacaggggt

SEQ ID NO: 42261 - DNA, 30 bp, Artificial Sequence
  Synthetic oligonucleotide
ggcgaatagaggatatggaccaggttgggt

SEQ ID NO: 42262 - DNA, 30 bp, Artificial Sequence
  Synthetic oligonucleotide
ctggttgtaacccagaagaggacaaatggt

SEQ ID NO: 42263 - DNA, 30 bp, Artificial Sequence
  Synthetic oligonucleotide
gggaagggagagaacggaacttagaatggt

SEQ ID NO: 42264 - DNA, 30 bp, Artificial Sequence
  Synthetic oligonucleotide
acaagacaagttaaattgagaacgcatggt

SEQ ID NO: 42265 - DNA, 30 bp, Artificial Sequence
  Synthetic oligonucleotide
gacagaagtgcgggagggaatacgtatggt

SEQ ID NO: 42266 - DNA, 30 bp, Artificial Sequence
  Synthetic oligonucleotide
tctggagtgaatgcgaaaggtgtggctggt

SEQ ID NO: 42267 - DNA, 30 bp, Artificial Sequence
  Synthetic oligonucleotide
gaggcgtagaagcgtaatcgtgatgctggt

SEQ ID NO: 42268 - DNA, 40 bp, Artificial Sequence
  Synthetic oligonucleotide
cgatgaaagttccctgagcgggtgggtaattactagtggt

SEQ ID NO: 42269 - DNA, 30 bp, Artificial Sequence
  Synthetic oligonucleotide
cgtctgacgagattgaactcagagtttggt

SEQ ID NO: 42270 - DNA, 31 bp, Artificial Sequence
  Synthetic oligonucleotide
tacttaggagctgtatgagtcgaggcaatgt

SEQ ID NO: 42271 - DNA, 30 bp, Artificial Sequence
  Synthetic oligonucleotide
cagtggacaactacagtcgaacaaagatgt

SEQ ID NO: 42272 - DNA, 30 bp, Artificial Sequence
  Synthetic oligonucleotide
gcgaaattcgtacgggcagaattgagatgt

SEQ ID NO: 42273 - DNA, 30 bp, Artificial Sequence
  Synthetic oligonucleotide
cggcaggtgatccgaacagattggcgatgt

SEQ ID NO: 42274 - DNA, 30 bp, Artificial Sequence
  Synthetic oligonucleotide
gcacgccaacagtgctacggatatcgatgt

SEQ ID NO: 42275 - DNA, 30 bp, Artificial Sequence
  Synthetic oligonucleotide
ggcaactaaaagtaagtatagacgatctgt

SEQ ID NO: 42276 - DNA, 30 bp, Artificial Sequence
  Synthetic oligonucleotide
agtggccttgggctgtaaatcaccgtctgt

SEQ ID NO: 42277 - DNA, 30 bp, Artificial Sequence
  Synthetic oligonucleotide
agggcgggaacagtccgggttaatccgtgt

SEQ ID NO: 42278 - DNA, 30 bp, Artificial Sequence
  Synthetic oligonucleotide
taggaatcgggcaggcctcagaacgcgtgt

SEQ ID NO: 42279 - DNA, 30 bp, Artificial Sequence
  Synthetic oligonucleotide
agcactgacagtgcgtcatcagttgcgtgt

SEQ ID NO: 42280 - DNA, 30 bp, Artificial Sequence
  Synthetic oligonucleotide
cgtgatggcttggccagtgaagcccggtgt

SEQ ID NO: 42281 - DNA, 30 bp, Artificial Sequence
  Synthetic oligonucleotide
gcgcggtactgacgatggacaagggggtgt

SEQ ID NO: 42282 - DNA, 30 bp, Artificial Sequence
  Synthetic oligonucleotide
tgacatcaagccaagacttggtcactgtgt

SEQ ID NO: 42283 - DNA, 30 bp, Artificial Sequence
  Synthetic oligonucleotide
tggtccggaaggcgaagcacagtgctgtgt

SEQ ID NO: 42284 - DNA, 30 bp, Artificial Sequence
  Synthetic oligonucleotide
tccacagcaggtatacaggaacaggtgtgt

SEQ ID NO: 42285 - DNA, 30 bp, Artificial Sequence
  Synthetic oligonucleotide
acgtatatcgcggcagagagtaacttgtgt

SEQ ID NO: 42286 - DNA, 30 bp, Artificial Sequence
  Synthetic oligonucleotide
tgtacaggatcttagaaaagagcacgttgt

SEQ ID NO: 42287 - DNA, 30 bp, Artificial Sequence
  Synthetic oligonucleotide
tctaaaagtcgaaaggatcatatgcgttgt

SEQ ID NO: 42288 - DNA, 30 bp, Artificial Sequence
  Synthetic oligonucleotide
cgtattacgaaatcagtcgagctacaaatt

SEQ ID NO: 42289 - DNA, 30 bp, Artificial Sequence
  Synthetic oligonucleotide
ctgaaacggggtcgtaactgaagagaaatt

SEQ ID NO: 42290 - DNA, 30 bp, Artificial Sequence
  Synthetic oligonucleotide
caacgtgggacgtgtgggagtctgtaaatt

SEQ ID NO: 42291 - DNA, 30 bp, Artificial Sequence
  Synthetic oligonucleotide
cgcactcgtgggcatactaaacctgcaatt

SEQ ID NO: 42292 - DNA, 30 bp, Artificial Sequence
  Synthetic oligonucleotide
tcatgccaccacgaagattaaaacagaatt

SEQ ID NO: 42293 - DNA, 30 bp, Artificial Sequence
  Synthetic oligonucleotide
ggacggcctaatccatatcacagtcgaatt

SEQ ID NO: 42294 - DNA, 30 bp, Artificial Sequence
  Synthetic oligonucleotide
cggtaacgttacgcaaaggacctcggaatt

SEQ ID NO: 42295 - DNA, 30 bp, Artificial Sequence
  Synthetic oligonucleotide
aaagaaaagaaacagcgtacatagggaatt

SEQ ID NO: 42296 - DNA, 30 bp, Artificial Sequence
  Synthetic oligonucleotide
acgggctgactggcaaatcagactggaatt

SEQ ID NO: 42297 - DNA, 30 bp, Artificial Sequence
  Synthetic oligonucleotide
aggttaggagcaagcaaagcaatatgaatt

SEQ ID NO: 42298 - DNA, 30 bp, Artificial Sequence
  Synthetic oligonucleotide
tgcactgcaagctacagagacgacgtaatt

SEQ ID NO: 42299 - DNA, 30 bp, Artificial Sequence
  Synthetic oligonucleotide
aggcgagattcagagtgtatgggtgtaatt

SEQ ID NO: 42300 - DNA, 31 bp, Artificial Sequence
  Synthetic oligonucleotide
agagcacagataccggcaactatggtacatt

SEQ ID NO: 42301 - DNA, 30 bp, Artificial Sequence
  Synthetic oligonucleotide
gggcgtgtacagagggccgatatcgccatt

SEQ ID NO: 42302 - DNA, 30 bp, Artificial Sequence
  Synthetic oligonucleotide
agaggagcggtccagattgaattccgcatt

SEQ ID NO: 42303 - DNA, 30 bp, Artificial Sequence
  Synthetic oligonucleotide
tcaaggacaaacgaggaacatccgggcatt

SEQ ID NO: 42304 - DNA, 30 bp, Artificial Sequence
  Synthetic oligonucleotide
cagacgagggtgttccataacggaatcatt

SEQ ID NO: 42305 - DNA, 30 bp, Artificial Sequence
  Synthetic oligonucleotide
ataaaggtaggacaaagggacgtcctcatt

SEQ ID NO: 42306 - DNA, 30 bp, Artificial Sequence
  Synthetic oligonucleotide
ggtgtagccatgaagaggtgtcaggtcatt

SEQ ID NO: 42307 - DNA, 30 bp, Artificial Sequence
  Synthetic oligonucleotide
cagcacaggtgtagatacaatgatgagatt

SEQ ID NO: 42308 - DNA, 30 bp, Artificial Sequence
  Synthetic oligonucleotide
ccgtctggattcactaaaccgaacccgatt

SEQ ID NO: 42309 - DNA, 30 bp, Artificial Sequence
  Synthetic oligonucleotide
tgagagaatggtactaattggagggcgatt

SEQ ID NO: 42310 - DNA, 30 bp, Artificial Sequence
  Synthetic oligonucleotide
cgtgcgccccctataagagtatgtgcgatt

SEQ ID NO: 42311 - DNA, 30 bp, Artificial Sequence
  Synthetic oligonucleotide
ggtcgcgacggagtggccacattgtcgatt

SEQ ID NO: 42312 - DNA, 30 bp, Artificial Sequence
  Synthetic oligonucleotide
ccacatcttgtcaggaacatccaaaggatt

SEQ ID NO: 42313 - DNA, 30 bp, Artificial Sequence
  Synthetic oligonucleotide
agagaagttactcgggcaacactacggatt

SEQ ID NO: 42314 - DNA, 30 bp, Artificial Sequence
  Synthetic oligonucleotide
aaacggtgagagacgagcgatgatgggatt

SEQ ID NO: 42315 - DNA, 30 bp, Artificial Sequence
  Synthetic oligonucleotide
gaaccaggagggatacttatggcaatgatt

SEQ ID NO: 42316 - DNA, 30 bp, Artificial Sequence
  Synthetic oligonucleotide
agcacgagataggtctagagggcgatgatt

SEQ ID NO: 42317 - DNA, 30 bp, Artificial Sequence
  Synthetic oligonucleotide
ggggcgatagcagtcactgtcaaactgatt

SEQ ID NO: 42318 - DNA, 30 bp, Artificial Sequence
  Synthetic oligonucleotide
aagagcaacgagaaataacgggtgctgatt

SEQ ID NO: 42319 - DNA, 30 bp, Artificial Sequence
  Synthetic oligonucleotide
tcacgggagacgcacggaagactacatatt

SEQ ID NO: 42320 - DNA, 30 bp, Artificial Sequence
  Synthetic oligonucleotide
cgagaattaggtgcatcgcattggcatatt

SEQ ID NO: 42321 - DNA, 30 bp, Artificial Sequence
  Synthetic oligonucleotide
gccgggctgaggattagacattgggatatt

SEQ ID NO: 42322 - DNA, 30 bp, Artificial Sequence
  Synthetic oligonucleotide
acataacaaagtgtatcaaacgactatatt

SEQ ID NO: 42323 - DNA, 30 bp, Artificial Sequence
  Synthetic oligonucleotide
ggtggcacgagcgacttgtagacaggtatt

SEQ ID NO: 42324 - DNA, 30 bp, Artificial Sequence
  Synthetic oligonucleotide
agccgtgagtaaacgaagcatagcaaactt

SEQ ID NO: 42325 - DNA, 30 bp, Artificial Sequence
  Synthetic oligonucleotide
agacgtgtggacctacgacgttgtaaactt

SEQ ID NO: 42326 - DNA, 30 bp, Artificial Sequence
  Synthetic oligonucleotide
ccttatcggtacggggaaccatagcaactt

SEQ ID NO: 42327 - DNA, 30 bp, Artificial Sequence
  Synthetic oligonucleotide
tacgttggagggttacgggcattgcgactt

SEQ ID NO: 42328 - DNA, 30 bp, Artificial Sequence
  Synthetic oligonucleotide
agaatcacgtagatagaccagtgggacctt

SEQ ID NO: 42329 - DNA, 30 bp, Artificial Sequence
  Synthetic oligonucleotide
ccataggatgagacggagggtaacgccctt

SEQ ID NO: 42330 - DNA, 30 bp, Artificial Sequence
  Synthetic oligonucleotide
gacggactcctcatagatctgaaaccgctt

SEQ ID NO: 42331 - DNA, 30 bp, Artificial Sequence
  Synthetic oligonucleotide
acgaggcttgggaatggaagtagcaggctt

SEQ ID NO: 42332 - DNA, 30 bp, Artificial Sequence
  Synthetic oligonucleotide
ttcaacgtaatgaggagagatgttatgctt

SEQ ID NO: 42333 - DNA, 30 bp, Artificial Sequence
  Synthetic oligonucleotide
atcggagtggctcccatcatgtaagtgctt

SEQ ID NO: 42334 - DNA, 30 bp, Artificial Sequence
  Synthetic oligonucleotide
agtagtggccgtaattaagagtaccgtctt

SEQ ID NO: 42335 - DNA, 30 bp, Artificial Sequence
  Synthetic oligonucleotide
cgtgcccgtacagtcgtatgactatgtctt

SEQ ID NO: 42336 - DNA, 30 bp, Artificial Sequence
  Synthetic oligonucleotide
acgtggaagagggcttagccaatttgtctt

SEQ ID NO: 42337 - DNA, 30 bp, Artificial Sequence
  Synthetic oligonucleotide
cgagcaccacaagtgagtccgtttacagtt

SEQ ID NO: 42338 - DNA, 30 bp, Artificial Sequence
  Synthetic oligonucleotide
aaggggtggaaagggaacgcgtagccagtt

SEQ ID NO: 42339 - DNA, 30 bp, Artificial Sequence
  Synthetic oligonucleotide
agtgcacacgtgggtagactggacctagtt

SEQ ID NO: 42340 - DNA, 30 bp, Artificial Sequence
  Synthetic oligonucleotide
tattgggacgactgttcagaagagaacgtt

SEQ ID NO: 42341 - DNA, 30 bp, Artificial Sequence
  Synthetic oligonucleotide
actgctacgaaggcaattcaagcgcacgtt

SEQ ID NO: 42342 - DNA, 30 bp, Artificial Sequence
  Synthetic oligonucleotide
ggattatgtgtctgtacgtgagtgtacgtt

SEQ ID NO: 42343 - DNA, 30 bp, Artificial Sequence
  Synthetic oligonucleotide
gaggtacatgcatcacgaaagggtaaggtt

SEQ ID NO: 42344 - DNA, 30 bp, Artificial Sequence
  Synthetic oligonucleotide
ctaggcgaagggaacaaaagagaacaggtt

SEQ ID NO: 42345 - DNA, 30 bp, Artificial Sequence
  Synthetic oligonucleotide
ctgggggatcagggatgtccgaaggaggtt

SEQ ID NO: 42346 - DNA, 30 bp, Artificial Sequence
  Synthetic oligonucleotide
gcgacgaacaccaagagtccagaaggggtt

SEQ ID NO: 42347 - DNA, 30 bp, Artificial Sequence
  Synthetic oligonucleotide
acggtaacataatccaacgtaatcgtggtt

SEQ ID NO: 42348 - DNA, 30 bp, Artificial Sequence
  Synthetic oligonucleotide
agactacgtaccggtaggctggaacatgtt

SEQ ID NO: 42349 - DNA, 30 bp, Artificial Sequence
  Synthetic oligonucleotide
agacaatctcgtaagagtatcagcgatgtt

SEQ ID NO: 42350 - DNA, 30 bp, Artificial Sequence
  Synthetic oligonucleotide
ggaccaaaatagcgccaatgtggatatgtt

SEQ ID NO: 42351 - DNA, 30 bp, Artificial Sequence
  Synthetic oligonucleotide
ggcggaagagaacagatggctggtggtgtt

SEQ ID NO: 42352 - DNA, 30 bp, Artificial Sequence
  Synthetic oligonucleotide
cgtccgtggcataataaaagggtgcaattt

SEQ ID NO: 42353 - DNA, 30 bp, Artificial Sequence
  Synthetic oligonucleotide
tcgctaaaggagccgagggtacgtacattt

SEQ ID NO: 42354 - DNA, 30 bp, Artificial Sequence
  Synthetic oligonucleotide
cacactacactaaccacaaaagaaggattt

SEQ ID NO: 42355 - DNA, 30 bp, Artificial Sequence
  Synthetic oligonucleotide
gggcataccgaggccagcagtacaggattt

SEQ ID NO: 42356 - DNA, 30 bp, Artificial Sequence
  Synthetic oligonucleotide
acgtcaggcggcatgagaagagaggtattt

SEQ ID NO: 42357 - DNA, 30 bp, Artificial Sequence
  Synthetic oligonucleotide
tcgaagctccagaaataagtggagcacttt

SEQ ID NO: 42358 - DNA, 30 bp, Artificial Sequence
  Synthetic oligonucleotide
ggcacgtaacccacaggggcggagtacttt

SEQ ID NO: 42359 - DNA, 30 bp, Artificial Sequence
  Synthetic oligonucleotide
tcggaccagtgtaacacaagattgtacttt

SEQ ID NO: 42360 - DNA, 30 bp, Artificial Sequence
  Synthetic oligonucleotide
acatcgacacgaaccttgaaactttacttt

SEQ ID NO: 42361 - DNA, 30 bp, Artificial Sequence
  Synthetic oligonucleotide
cgagacgtgcatggcgacattactaagttt

SEQ ID NO: 42362 - DNA, 30 bp, Artificial Sequence
  Synthetic oligonucleotide
cgagaccgtgagaacaatgtgagacagttt

SEQ ID NO: 42363 - DNA, 30 bp, Artificial Sequence
  Synthetic oligonucleotide
caagacttaaaagatgaaacttgacagttt

SEQ ID NO: 42364 - DNA, 30 bp, Artificial Sequence
  Synthetic oligonucleotide
ctagcggaaacgggtaggcgatgccagttt

SEQ ID NO: 42365 - DNA, 30 bp, Artificial Sequence
  Synthetic oligonucleotide
gcgcctgcataaaataaggagtgctcgttt

SEQ ID NO: 42366 - DNA, 30 bp, Artificial Sequence
  Synthetic oligonucleotide
gtacctcaggagcgcaaggaggagtggttt

SEQ ID NO: 42367 - DNA, 30 bp, Artificial Sequence
  Synthetic oligonucleotide
ccgggtaggtggtcaagccaatacgatttt

SEQ ID NO: 42368 - DNA, 30 bp, Artificial Sequence
  Synthetic oligonucleotide
cacgcgccaagagtatgtgcttgtaaaaaa

SEQ ID NO: 42369 - DNA, 30 bp, Artificial Sequence
  Synthetic oligonucleotide
acgaaattacggtatctgctctatgaaaaa

SEQ ID NO: 42370 - DNA, 30 bp, Artificial Sequence
  Synthetic oligonucleotide
tccggaaatacggagagcagcgattaaaaa

SEQ ID NO: 42371 - DNA, 30 bp, Artificial Sequence
  Synthetic oligonucleotide
accaatttaggaggtgtcgctcgcacaaaa

SEQ ID NO: 42372 - DNA, 30 bp, Artificial Sequence
  Synthetic oligonucleotide
cgtgaatggcataaagggcgagcaagaaaa

SEQ ID NO: 42373 - DNA, 30 bp, Artificial Sequence
  Synthetic oligonucleotide
agagttaatcagaaggtgcacaacagaaaa

SEQ ID NO: 42374 - DNA, 30 bp, Artificial Sequence
  Synthetic oligonucleotide
ataagactgaaaccgccatggcttagaaaa

SEQ ID NO: 42375 - DNA, 30 bp, Artificial Sequence
  Synthetic oligonucleotide
ggaggcaacaatgttcataagagcggaaaa

SEQ ID NO: 42376 - DNA, 30 bp, Artificial Sequence
  Synthetic oligonucleotide
atgcgacttcagtgccaaccacagggaaaa

SEQ ID NO: 42377 - DNA, 30 bp, Artificial Sequence
  Synthetic oligonucleotide
gtaccgtctttggggtgggatggaaacaaa

SEQ ID NO: 42378 - DNA, 30 bp, Artificial Sequence
  Synthetic oligonucleotide
catgggggttaaaggtcattgaggaacaaa

SEQ ID NO: 42379 - DNA, 30 bp, Artificial Sequence
  Synthetic oligonucleotide
ggtcgagtactaacatgagtttggaacaaa

SEQ ID NO: 42380 - DNA, 30 bp, Artificial Sequence
  Synthetic oligonucleotide
agaacgtacttaatggagctcgataacaaa

SEQ ID NO: 42381 - DNA, 30 bp, Artificial Sequence
  Synthetic oligonucleotide
acaccgcggcctactccgaaattacacaaa

SEQ ID NO: 42382 - DNA, 30 bp, Artificial Sequence
  Synthetic oligonucleotide
cgacatatggcgaatccgtggcctgacaaa

SEQ ID NO: 42383 - DNA, 30 bp, Artificial Sequence
  Synthetic oligonucleotide
ttgaatccaacagagcacgctattaccaaa

SEQ ID NO: 42384 - DNA, 30 bp, Artificial Sequence
  Synthetic oligonucleotide
ccaaggaggtactgtacgtacacacccaaa

SEQ ID NO: 42385 - DNA, 30 bp, Artificial Sequence
  Synthetic oligonucleotide
tggatgcatagcttataaagcagagccaaa

SEQ ID NO: 42386 - DNA, 30 bp, Artificial Sequence
  Synthetic oligonucleotide
agatggcctagagaccaactatgagccaaa

SEQ ID NO: 42387 - DNA, 30 bp, Artificial Sequence
  Synthetic oligonucleotide
tcgggacggtcacgcgacgtcacctccaaa

SEQ ID NO: 42388 - DNA, 30 bp, Artificial Sequence
  Synthetic oligonucleotide
gtaacctctggtgcacaccgaacgagcaaa

SEQ ID NO: 42389 - DNA, 30 bp, Artificial Sequence
  Synthetic oligonucleotide
ggcgtatgatcttggaaagaagtgagcaaa

SEQ ID NO: 42390 - DNA, 30 bp, Artificial Sequence
  Synthetic oligonucleotide
acagtggtccaggctcacatgtggggcaaa

SEQ ID NO: 42391 - DNA, 30 bp, Artificial Sequence
  Synthetic oligonucleotide
aacgcgcgaagtcgccccggctcatgcaaa

SEQ ID NO: 42392 - DNA, 30 bp, Artificial Sequence
  Synthetic oligonucleotide
caatactcagtcaacactccgaagtgcaaa

SEQ ID NO: 42393 - DNA, 30 bp, Artificial Sequence
  Synthetic oligonucleotide
gcgaggggaaggcaatttgttcgaatcaaa

SEQ ID NO: 42394 - DNA, 30 bp, Artificial Sequence
  Synthetic oligonucleotide
actgcaagagagccctaaggggacatcaaa

SEQ ID NO: 42395 - DNA, 30 bp, Artificial Sequence
  Synthetic oligonucleotide
tgacaacggagcgcggataccaagctcaaa

SEQ ID NO: 42396 - DNA, 30 bp, Artificial Sequence
  Synthetic oligonucleotide
gtccggccgaaaaactaaagtgcagtcaaa

SEQ ID NO: 42397 - DNA, 30 bp, Artificial Sequence
  Synthetic oligonucleotide
gccgaggtgttaacgtactcatacaagaaa

SEQ ID NO: 42398 - DNA, 30 bp, Artificial Sequence
  Synthetic oligonucleotide
tccccgtcagaaagagaaagaggcaagaaa

SEQ ID NO: 42399 - DNA, 30 bp, Artificial Sequence
  Synthetic oligonucleotide
ggcacgttaacacggaagtcggtacagaaa

SEQ ID NO: 42400 - DNA, 30 bp, Artificial Sequence
  Synthetic oligonucleotide
gcccatgagagatagagtacaaaatagaaa

SEQ ID NO: 42401 - DNA, 30 bp, Artificial Sequence
  Synthetic oligonucleotide
aattgcggcgccgaaggggaatgagcgaaa

SEQ ID NO: 42402 - DNA, 30 bp, Artificial Sequence
  Synthetic oligonucleotide
agttcaagtgctggcaagggaagggcgaaa

SEQ ID NO: 42403 - DNA, 30 bp, Artificial Sequence
  Synthetic oligonucleotide
ataatgtggcaacgtaatattgggtcgaaa

SEQ ID NO: 42404 - DNA, 30 bp, Artificial Sequence
  Synthetic oligonucleotide
gccaacggtcagggttgtctgaaaaggaaa

SEQ ID NO: 42405 - DNA, 30 bp, Artificial Sequence
  Synthetic oligonucleotide
atacgtgcaggacattacatagggaggaaa

SEQ ID NO: 42406 - DNA, 30 bp, Artificial Sequence
  Synthetic oligonucleotide
tagcccagaacgaaacgtaacctgaggaaa

SEQ ID NO: 42407 - DNA, 30 bp, Artificial Sequence
  Synthetic oligonucleotide
aactatgtcaaccgaaggcggaaacggaaa

SEQ ID NO: 42408 - DNA, 30 bp, Artificial Sequence
  Synthetic oligonucleotide
tgacgtctgctgacaatgagaacacggaaa

SEQ ID NO: 42409 - DNA, 30 bp, Artificial Sequence
  Synthetic oligonucleotide
gcagtgtagggaaacatacagccccggaaa

SEQ ID NO: 42410 - DNA, 30 bp, Artificial Sequence
  Synthetic oligonucleotide
gagctggcccaatacaacgcaagtcggaaa

SEQ ID NO: 42411 - DNA, 30 bp, Artificial Sequence
  Synthetic oligonucleotide
atggggtatctactcggagtcgcgtggaaa

SEQ ID NO: 42412 - DNA, 30 bp, Artificial Sequence
  Synthetic oligonucleotide
gcatgaaaggtaggtctggtgctactgaaa

SEQ ID NO: 42413 - DNA, 30 bp, Artificial Sequence
  Synthetic oligonucleotide
aagcttgaaaggaagccgtaaaaagtgaaa

SEQ ID NO: 42414 - DNA, 30 bp, Artificial Sequence
  Synthetic oligonucleotide
gaggagagtagatagtttaccgaggtgaaa

SEQ ID NO: 42415 - DNA, 30 bp, Artificial Sequence
  Synthetic oligonucleotide
tcgagaggatgtatcgatccacgattgaaa

SEQ ID NO: 42416 - DNA, 31 bp, Artificial Sequence
  Synthetic oligonucleotide
tagggaaaatacgggtggagggtccaataaa

SEQ ID NO: 42417 - DNA, 30 bp, Artificial Sequence
  Synthetic oligonucleotide
ggcataataggagagcgggaatctaataaa

SEQ ID NO: 42418 - DNA, 30 bp, Artificial Sequence
  Synthetic oligonucleotide
aaatagaggaaagcgatgctcgtgcataaa

SEQ ID NO: 42419 - DNA, 30 bp, Artificial Sequence
  Synthetic oligonucleotide
gacatgggctccggcgggcacaatcataaa

SEQ ID NO: 42420 - DNA, 30 bp, Artificial Sequence
  Synthetic oligonucleotide
taaaaaaggattaaggatactggtcataaa

SEQ ID NO: 42421 - DNA, 30 bp, Artificial Sequence
  Synthetic oligonucleotide
ttgaagagtggacattgatctattcataaa

SEQ ID NO: 42422 - DNA, 30 bp, Artificial Sequence
  Synthetic oligonucleotide
accatgacaattccgtagggtcaagataaa

SEQ ID NO: 42423 - DNA, 30 bp, Artificial Sequence
  Synthetic oligonucleotide
cgtgaagggattctgccagcgtcggataaa

SEQ ID NO: 42424 - DNA, 30 bp, Artificial Sequence
  Synthetic oligonucleotide
tcgaacaccaataagcaggatgtatataaa

SEQ ID NO: 42425 - DNA, 30 bp, Artificial Sequence
  Synthetic oligonucleotide
gtcggtgaatctaaaggtgtgtgacctaaa

SEQ ID NO: 42426 - DNA, 30 bp, Artificial Sequence
  Synthetic oligonucleotide
ctggtcgaaggaatatgtggcggatctaaa

SEQ ID NO: 42427 - DNA, 30 bp, Artificial Sequence
  Synthetic oligonucleotide
aggcggggtgaatgggactctgcttctaaa

SEQ ID NO: 42428 - DNA, 30 bp, Artificial Sequence
  Synthetic oligonucleotide
acgtaaatgggcgccgaccctaagagtaaa

SEQ ID NO: 42429 - DNA, 30 bp, Artificial Sequence
  Synthetic oligonucleotide
gacgcactagaataacaccgacctagtaaa

SEQ ID NO: 42430 - DNA, 30 bp, Artificial Sequence
  Synthetic oligonucleotide
acgtcacacgttcttctcaagtaaggtaaa

SEQ ID NO: 42431 - DNA, 30 bp, Artificial Sequence
  Synthetic oligonucleotide
cgcgtggaaagctgagcaccacccggtaaa

SEQ ID NO: 42432 - DNA, 30 bp, Artificial Sequence
  Synthetic oligonucleotide
cgtgcgcgagggtcaatggcagtatgtaaa

SEQ ID NO: 42433 - DNA, 30 bp, Artificial Sequence
  Synthetic oligonucleotide
ggggggtggacgaccagggtatgccttaaa

SEQ ID NO: 42434 - DNA, 30 bp, Artificial Sequence
  Synthetic oligonucleotide
cacgatgggtgtgccaggctgtccgttaaa

SEQ ID NO: 42435 - DNA, 30 bp, Artificial Sequence
  Synthetic oligonucleotide
cttcgggccgagaaaacaaatacataacaa

SEQ ID NO: 42436 - DNA, 30 bp, Artificial Sequence
  Synthetic oligonucleotide
tgaaggtggttaagtggcgggcactaacaa

SEQ ID NO: 42437 - DNA, 30 bp, Artificial Sequence
  Synthetic oligonucleotide
gcgatctccgaatgtgtatcggcaacacaa

SEQ ID NO: 42438 - DNA, 30 bp, Artificial Sequence
  Synthetic oligonucleotide
ttaatgaaggccaaataaaaaaacacacaa

SEQ ID NO: 42439 - DNA, 30 bp, Artificial Sequence
  Synthetic oligonucleotide
acatcacaatcaaggcggcttcagacacaa

SEQ ID NO: 42440 - DNA, 30 bp, Artificial Sequence
  Synthetic oligonucleotide
ccaaatgccgaaccgacttggacaccacaa

SEQ ID NO: 42441 - DNA, 30 bp, Artificial Sequence
  Synthetic oligonucleotide
gggcacgttacgggcaagacttagccacaa

SEQ ID NO: 42442 - DNA, 30 bp, Artificial Sequence
  Synthetic oligonucleotide
ggaccacttcatccggacagagaagcacaa

SEQ ID NO: 42443 - DNA, 30 bp, Artificial Sequence
  Synthetic oligonucleotide
atagttcaaaaaaagtaatggtagtcacaa

SEQ ID NO: 42444 - DNA, 30 bp, Artificial Sequence
  Synthetic oligonucleotide
catttaacggcaatcataggggtgcgacaa

SEQ ID NO: 42445 - DNA, 30 bp, Artificial Sequence
  Synthetic oligonucleotide
ggacagatacaacatctctacgtgggacaa

SEQ ID NO: 42446 - DNA, 30 bp, Artificial Sequence
  Synthetic oligonucleotide
taggaagatcgagatcatgcaaggtgacaa

SEQ ID NO: 42447 - DNA, 30 bp, Artificial Sequence
  Synthetic oligonucleotide
gggataccgatgaatgaattactaatacaa

SEQ ID NO: 42448 - DNA, 30 bp, Artificial Sequence
  Synthetic oligonucleotide
tcgagggtgcgatgctataggaacatacaa

SEQ ID NO: 42449 - DNA, 30 bp, Artificial Sequence
  Synthetic oligonucleotide
gcgcacatcaaacttttcggcaacttacaa

SEQ ID NO: 42450 - DNA, 30 bp, Artificial Sequence
  Synthetic oligonucleotide
aaagctagaagatcgtgtgggcagaaccaa

SEQ ID NO: 42451 - DNA, 30 bp, Artificial Sequence
  Synthetic oligonucleotide
ggacgggaaacgtgcccatcaggacaccaa

SEQ ID NO: 42452 - DNA, 30 bp, Artificial Sequence
  Synthetic oligonucleotide
tggattccaaactaagtggtacaagaccaa

SEQ ID NO: 42453 - DNA, 30 bp, Artificial Sequence
  Synthetic oligonucleotide
gtcgatccagcgataacatacactgaccaa

SEQ ID NO: 42454 - DNA, 30 bp, Artificial Sequence
  Synthetic oligonucleotide
gaacggtacgtttgattatgagctgcccaa

SEQ ID NO: 42455 - DNA, 30 bp, Artificial Sequence
  Synthetic oligonucleotide
tataacggaatcgcgccgatgggtgcccaa

SEQ ID NO: 42456 - DNA, 30 bp, Artificial Sequence
  Synthetic oligonucleotide
gtggatagggcagataagtgcagtagccaa

SEQ ID NO: 42457 - DNA, 30 bp, Artificial Sequence
  Synthetic oligonucleotide
acaggaaccgggaaggatcttgttagccaa

SEQ ID NO: 42458 - DNA, 30 bp, Artificial Sequence
  Synthetic oligonucleotide
tggacgatagtagtcgaatcgccaggccaa

SEQ ID NO: 42459 - DNA, 30 bp, Artificial Sequence
  Synthetic oligonucleotide
ccgagctgtgactatcggacgagttgccaa

SEQ ID NO: 42460 - DNA, 30 bp, Artificial Sequence
  Synthetic oligonucleotide
gggggggcacatacaaaagagtctgtccaa

SEQ ID NO: 42461 - DNA, 30 bp, Artificial Sequence
  Synthetic oligonucleotide
aaggcagggtcatatggcatacaaaagcaa

SEQ ID NO: 42462 - DNA, 30 bp, Artificial Sequence
  Synthetic oligonucleotide
cggacgttgtcgtcgacaaacccgaagcaa

SEQ ID NO: 42463 - DNA, 30 bp, Artificial Sequence
  Synthetic oligonucleotide
gggtacggagggacaaagcgaaggaagcaa

SEQ ID NO: 42464 - DNA, 30 bp, Artificial Sequence
  Synthetic oligonucleotide
gcaccgggcgcccaaacataatgtaagcaa

SEQ ID NO: 42465 - DNA, 30 bp, Artificial Sequence
  Synthetic oligonucleotide
tcggtttggaacgaagtgagtttagagcaa

SEQ ID NO: 42466 - DNA, 30 bp, Artificial Sequence
  Synthetic oligonucleotide
ggactgaaggcaaaccagttagaggagcaa

SEQ ID NO: 42467 - DNA, 30 bp, Artificial Sequence
  Synthetic oligonucleotide
taacgggcgactaaccgagttgattagcaa

SEQ ID NO: 42468 - DNA, 30 bp, Artificial Sequence
  Synthetic oligonucleotide
tgaaggaaaacggaatctttgcaaccgcaa

SEQ ID NO: 42469 - DNA, 30 bp, Artificial Sequence
  Synthetic oligonucleotide
cgagcaaaccctgcatcgaaatttgcgcaa

SEQ ID NO: 42470 - DNA, 30 bp, Artificial Sequence
  Synthetic oligonucleotide
tgggtacaaaggagatgtgccgtgtcgcaa

SEQ ID NO: 42471 - DNA, 30 bp, Artificial Sequence
  Synthetic oligonucleotide
tgtaacttacgcttccgagtcaaaaggcaa

SEQ ID NO: 42472 - DNA, 30 bp, Artificial Sequence
  Synthetic oligonucleotide
gctcgctccgagtactatcgggtaaggcaa

SEQ ID NO: 42473 - DNA, 30 bp, Artificial Sequence
  Synthetic oligonucleotide
agatcatgatcggcctcgtaaaaacggcaa

SEQ ID NO: 42474 - DNA, 30 bp, Artificial Sequence
  Synthetic oligonucleotide
cgaaatacaagaattacgttagtagtgcaa

SEQ ID NO: 42475 - DNA, 30 bp, Artificial Sequence
  Synthetic oligonucleotide
gagccgataagctatagggaaagtgtgcaa

SEQ ID NO: 42476 - DNA, 30 bp, Artificial Sequence
  Synthetic oligonucleotide
ggctcccccaacagctcaaacctaaatcaa

SEQ ID NO: 42477 - DNA, 30 bp, Artificial Sequence
  Synthetic oligonucleotide
gtacgggctgaggggaggatctggaatcaa

SEQ ID NO: 42478 - DNA, 30 bp, Artificial Sequence
  Synthetic oligonucleotide
gtcgcgtggcggtaggcggattgaactcaa

SEQ ID NO: 42479 - DNA, 30 bp, Artificial Sequence
  Synthetic oligonucleotide
gcgaccggcggggataagacgaaacctcaa

SEQ ID NO: 42480 - DNA, 30 bp, Artificial Sequence
  Synthetic oligonucleotide
cggacgccgaagatcatgttcccggctcaa

SEQ ID NO: 42481 - DNA, 30 bp, Artificial Sequence
  Synthetic oligonucleotide
caccacagtccataccaccgtgctgctcaa

SEQ ID NO: 42482 - DNA, 30 bp, Artificial Sequence
  Synthetic oligonucleotide
tacgtagttaatgggtgaacgtaatctcaa

SEQ ID NO: 42483 - DNA, 30 bp, Artificial Sequence
  Synthetic oligonucleotide
gagcgataagttgggctaaagaggagtcaa

SEQ ID NO: 42484 - DNA, 30 bp, Artificial Sequence
  Synthetic oligonucleotide
caagagcgtgactcgtaggcgactcgtcaa

SEQ ID NO: 42485 - DNA, 30 bp, Artificial Sequence
  Synthetic oligonucleotide
ctgagtaggtatcgcaactggaccaaagaa

SEQ ID NO: 42486 - DNA, 30 bp, Artificial Sequence
  Synthetic oligonucleotide
aggatcatacccgaagcctacttcaaagaa

SEQ ID NO: 42487 - DNA, 30 bp, Artificial Sequence
  Synthetic oligonucleotide
catcgtgtccactaggcttgagcgaaagaa

SEQ ID NO: 42488 - DNA, 30 bp, Artificial Sequence
  Synthetic oligonucleotide
agagatgcagaaaggaagattgcgaaagaa

SEQ ID NO: 42489 - DNA, 30 bp, Artificial Sequence
  Synthetic oligonucleotide
gggaggacgtgatgccatacctcgaaagaa

SEQ ID NO: 42490 - DNA, 30 bp, Artificial Sequence
  Synthetic oligonucleotide
ggcgtgtgtcggtccatgagcggtaaagaa

SEQ ID NO: 42491 - DNA, 30 bp, Artificial Sequence
  Synthetic oligonucleotide
gatgtcagaaaactgaagtatggtaaagaa

SEQ ID NO: 42492 - DNA, 30 bp, Artificial Sequence
  Synthetic oligonucleotide
aaaataggggtcataggcagggaccaagaa

SEQ ID NO: 42493 - DNA, 30 bp, Artificial Sequence
  Synthetic oligonucleotide
cgaccgactaggattgtggtagatcaagaa

SEQ ID NO: 42494 - DNA, 30 bp, Artificial Sequence
  Synthetic oligonucleotide
ggcgggagcaaacagagcagatcgacagaa

SEQ ID NO: 42495 - DNA, 30 bp, Artificial Sequence
  Synthetic oligonucleotide
aagggtccaggttgcttccaatacccagaa

SEQ ID NO: 42496 - DNA, 30 bp, Artificial Sequence
  Synthetic oligonucleotide
tgccagggagtcagcctaggtaccccagaa

SEQ ID NO: 42497 - DNA, 30 bp, Artificial Sequence
  Synthetic oligonucleotide
aaaacgacgagcgagagaaaaggggcagaa

SEQ ID NO: 42498 - DNA, 30 bp, Artificial Sequence
  Synthetic oligonucleotide
gaatgggacgtcgctagaccgtatgcagaa

SEQ ID NO: 42499 - DNA, 30 bp, Artificial Sequence
  Synthetic oligonucleotide
ggcaatacggaccagggacccgaatcagaa

SEQ ID NO: 42500 - DNA, 30 bp, Artificial Sequence
  Synthetic oligonucleotide
cgatgcaacgggaggattggtccatcagaa

SEQ ID NO: 42501 - DNA, 30 bp, Artificial Sequence
  Synthetic oligonucleotide
agacccaggtttcgcggttgagaaagagaa

SEQ ID NO: 42502 - DNA, 30 bp, Artificial Sequence
  Synthetic oligonucleotide
ccatgctttacaactagattgttcagagaa

SEQ ID NO: 42503 - DNA, 30 bp, Artificial Sequence
  Synthetic oligonucleotide
gtacggactgggcggtcacataagcgagaa

SEQ ID NO: 42504 - DNA, 30 bp, Artificial Sequence
  Synthetic oligonucleotide
aacgcaaggtaagggatagcactgcgagaa

SEQ ID NO: 42505 - DNA, 30 bp, Artificial Sequence
  Synthetic oligonucleotide
gatgttgaaccatgaggggtgaagggagaa

SEQ ID NO: 42506 - DNA, 30 bp, Artificial Sequence
  Synthetic oligonucleotide
ctgaagagatcgggaagctccagcatagaa

SEQ ID NO: 42507 - DNA, 30 bp, Artificial Sequence
  Synthetic oligonucleotide
agcatgcgccgaatacgagtatcgatagaa

SEQ ID NO: 42508 - DNA, 31 bp, Artificial Sequence
  Synthetic oligonucleotide
cggggccccggctggaaagtcaagtctagaa

SEQ ID NO: 42509 - DNA, 30 bp, Artificial Sequence
  Synthetic oligonucleotide
ggtaagcatcaccgtcaagatagtgtagaa

SEQ ID NO: 42510 - DNA, 30 bp, Artificial Sequence
  Synthetic oligonucleotide
tcgttaagtacggcaggtgggcaattagaa

SEQ ID NO: 42511 - DNA, 30 bp, Artificial Sequence
  Synthetic oligonucleotide
ctgacaagcccataaacgaaagccttagaa

SEQ ID NO: 42512 - DNA, 30 bp, Artificial Sequence
  Synthetic oligonucleotide
tgcatgaagacaaagtgaaacgagttagaa

SEQ ID NO: 42513 - DNA, 30 bp, Artificial Sequence
  Synthetic oligonucleotide
tgatgcacatagagggtagcgtagttagaa

SEQ ID NO: 42514 - DNA, 31 bp, Artificial Sequence
  Synthetic oligonucleotide
agaggtgtatgaggcaaactcaactttagaa

SEQ ID NO: 42515 - DNA, 30 bp, Artificial Sequence
  Synthetic oligonucleotide
ggaacaccgatcctactacgcgaacacgaa

SEQ ID NO: 42516 - DNA, 30 bp, Artificial Sequence
  Synthetic oligonucleotide
attggcgagggcccaatagcataacacgaa

SEQ ID NO: 42517 - DNA, 30 bp, Artificial Sequence
  Synthetic oligonucleotide
ccttccacgtgcgtgagtgagaagcacgaa

SEQ ID NO: 42518 - DNA, 30 bp, Artificial Sequence
  Synthetic oligonucleotide
gcataaagcacatataatgtgtagcacgaa

SEQ ID NO: 42519 - DNA, 30 bp, Artificial Sequence
  Synthetic oligonucleotide
aatgaaacaggtgcccgctcaagagacgaa

SEQ ID NO: 42520 - DNA, 30 bp, Artificial Sequence
  Synthetic oligonucleotide
acgaggataggtcgtttaaggtccgacgaa

SEQ ID NO: 42521 - DNA, 30 bp, Artificial Sequence
  Synthetic oligonucleotide
cgtaacccggtaaactctcatcaggacgaa

SEQ ID NO: 42522 - DNA, 30 bp, Artificial Sequence
  Synthetic oligonucleotide
tggtggaagggaacaccaccggtatacgaa

SEQ ID NO: 42523 - DNA, 30 bp, Artificial Sequence
  Synthetic oligonucleotide
tacgggaagcagttacacagccgctacgaa

SEQ ID NO: 42524 - DNA, 31 bp, Artificial Sequence
  Synthetic oligonucleotide
ggagagcagtctcgacactcacataaccgaa

SEQ ID NO: 42525 - DNA, 30 bp, Artificial Sequence
  Synthetic oligonucleotide
tcgacttgatattgtgtgaaggtacccgaa

SEQ ID NO: 42526 - DNA, 30 bp, Artificial Sequence
  Synthetic oligonucleotide
ggatgtctcagcacaggttcaagcgccgaa

SEQ ID NO: 42527 - DNA, 30 bp, Artificial Sequence
  Synthetic oligonucleotide
caagcgaggtaccgtacgatgatcgccgaa

SEQ ID NO: 42528 - DNA, 30 bp, Artificial Sequence
  Synthetic oligonucleotide
gcgaatgtctcctccgatcgtactgccgaa

SEQ ID NO: 42529 - DNA, 30 bp, Artificial Sequence
  Synthetic oligonucleotide
gcctagtagctttagcgagggactagcgaa

SEQ ID NO: 42530 - DNA, 30 bp, Artificial Sequence
  Synthetic oligonucleotide
aagatgctctgtgcgaaagttagccgcgaa

SEQ ID NO: 42531 - DNA, 30 bp, Artificial Sequence
  Synthetic oligonucleotide
taaagcaacggatgaccgaatatgggcgaa

SEQ ID NO: 42532 - DNA, 30 bp, Artificial Sequence
  Synthetic oligonucleotide
tcggtctgaaaaaccggggctgaaatcgaa

SEQ ID NO: 42533 - DNA, 30 bp, Artificial Sequence
  Synthetic oligonucleotide
taatcgagaacagcaccaagatacatcgaa

SEQ ID NO: 42534 - DNA, 30 bp, Artificial Sequence
  Synthetic oligonucleotide
cacattaggatacgttgagacaatatcgaa

SEQ ID NO: 42535 - DNA, 30 bp, Artificial Sequence
  Synthetic oligonucleotide
cgctcggttgcgccaaagacatgtctcgaa

SEQ ID NO: 42536 - DNA, 30 bp, Artificial Sequence
  Synthetic oligonucleotide
gtgaagtcctgtgttgggtctgccgtcgaa

SEQ ID NO: 42537 - DNA, 30 bp, Artificial Sequence
  Synthetic oligonucleotide
ggagagtattcatgtccaaggcatgtcgaa

SEQ ID NO: 42538 - DNA, 30 bp, Artificial Sequence
  Synthetic oligonucleotide
acgtagatatacatgtcagccacattcgaa

SEQ ID NO: 42539 - DNA, 30 bp, Artificial Sequence
  Synthetic oligonucleotide
aggtgtagcattgaggatggtcacaaggaa

SEQ ID NO: 42540 - DNA, 30 bp, Artificial Sequence
  Synthetic oligonucleotide
gctagcaacggttacagaattcctcaggaa

SEQ ID NO: 42541 - DNA, 30 bp, Artificial Sequence
  Synthetic oligonucleotide
attgaacccgctgtcaggcatagtgaggaa

SEQ ID NO: 42542 - DNA, 30 bp, Artificial Sequence
  Synthetic oligonucleotide
agcgtgtgtacccatgaccctcagtaggaa

SEQ ID NO: 42543 - DNA, 30 bp, Artificial Sequence
  Synthetic oligonucleotide
tctaataaattacggaatgatgtgtaggaa

SEQ ID NO: 42544 - DNA, 30 bp, Artificial Sequence
  Synthetic oligonucleotide
tcgttccgcagggaaaacagtacttaggaa

SEQ ID NO: 42545 - DNA, 30 bp, Artificial Sequence
  Synthetic oligonucleotide
agggacgagggaggacagggtcggacggaa

SEQ ID NO: 42546 - DNA, 30 bp, Artificial Sequence
  Synthetic oligonucleotide
taagcctgcgctatataacaaaattcggaa

SEQ ID NO: 42547 - DNA, 30 bp, Artificial Sequence
  Synthetic oligonucleotide
ttattccagaacagaatttcacagagggaa

SEQ ID NO: 42548 - DNA, 40 bp, Artificial Sequence
  Synthetic oligonucleotide
aagataatacattcatggtatggtcggggatcggggggaa

SEQ ID NO: 42549 - DNA, 30 bp, Artificial Sequence
  Synthetic oligonucleotide
aggatcaccctcaaagactaagtgggggaa

SEQ ID NO: 42550 - DNA, 30 bp, Artificial Sequence
  Synthetic oligonucleotide
ccagaggttccgtccaaaagggatctggaa

SEQ ID NO: 42551 - DNA, 30 bp, Artificial Sequence
  Synthetic oligonucleotide
cagtgcaataaattgacgtacagggtggaa

SEQ ID NO: 42552 - DNA, 30 bp, Artificial Sequence
  Synthetic oligonucleotide
cagactgtaggcgacccgtacgccaatgaa

SEQ ID NO: 42553 - DNA, 30 bp, Artificial Sequence
  Synthetic oligonucleotide
cagacgaaaacgcgtcagccgccgaatgaa

SEQ ID NO: 42554 - DNA, 30 bp, Artificial Sequence
  Synthetic oligonucleotide
tgaaaaaaataagtggtggtaagtaatgaa

SEQ ID NO: 42555 - DNA, 30 bp, Artificial Sequence
  Synthetic oligonucleotide
atgttcgtaaaataagagtaagatcatgaa

SEQ ID NO: 42556 - DNA, 30 bp, Artificial Sequence
  Synthetic oligonucleotide
gctagcaagctaacagtaggctaagatgaa

SEQ ID NO: 42557 - DNA, 30 bp, Artificial Sequence
  Synthetic oligonucleotide
aaagtcgtaggcgtaattcgaacagatgaa

SEQ ID NO: 42558 - DNA, 30 bp, Artificial Sequence
  Synthetic oligonucleotide
aggtaaaacatcagctaaattacatatgaa

SEQ ID NO: 42559 - DNA, 30 bp, Artificial Sequence
  Synthetic oligonucleotide
cgggcagcgaggttgcgttagttagctgaa

SEQ ID NO: 42560 - DNA, 30 bp, Artificial Sequence
  Synthetic oligonucleotide
agataatgtaggtgagtccagggggctgaa

SEQ ID NO: 42561 - DNA, 30 bp, Artificial Sequence
  Synthetic oligonucleotide
agcaggtgcgaccgaagtatgcatgctgaa

SEQ ID NO: 42562 - DNA, 30 bp, Artificial Sequence
  Synthetic oligonucleotide
cgggaccaggattgacaaaaaggatctgaa

SEQ ID NO: 42563 - DNA, 30 bp, Artificial Sequence
  Synthetic oligonucleotide
cagcaaaggcagacggtcctatatcgtgaa

SEQ ID NO: 42564 - DNA, 30 bp, Artificial Sequence
  Synthetic oligonucleotide
caggacaatgggatggagaccggaggtgaa

SEQ ID NO: 42565 - DNA, 30 bp, Artificial Sequence
  Synthetic oligonucleotide
cacaagtgatacagcacaagtcactgtgaa

SEQ ID NO: 42566 - DNA, 30 bp, Artificial Sequence
  Synthetic oligonucleotide
ggttaatgacggtgagagctggcctgtgaa

SEQ ID NO: 42567 - DNA, 30 bp, Artificial Sequence
  Synthetic oligonucleotide
gtcggtgttgaagcgtgtgcgaggtgtgaa

SEQ ID NO: 42568 - DNA, 30 bp, Artificial Sequence
  Synthetic oligonucleotide
gcaggtgctgggagaattaaaagaattgaa

SEQ ID NO: 42569 - DNA, 30 bp, Artificial Sequence
  Synthetic oligonucleotide
tgtgcacgactggcaagaacgacgattgaa

SEQ ID NO: 42570 - DNA, 30 bp, Artificial Sequence
  Synthetic oligonucleotide
tgtgaaggcggggaagtacgtcgtattgaa

SEQ ID NO: 42571 - DNA, 30 bp, Artificial Sequence
  Synthetic oligonucleotide
tcatagagaacgcgtgggattcaggttgaa

SEQ ID NO: 42572 - DNA, 30 bp, Artificial Sequence
  Synthetic oligonucleotide
aacagccaggcggagaccgacataaaataa

SEQ ID NO: 42573 - DNA, 30 bp, Artificial Sequence
  Synthetic oligonucleotide
ctgggaagagcgttaactattgtgaaataa

SEQ ID NO: 42574 - DNA, 30 bp, Artificial Sequence
  Synthetic oligonucleotide
agaggcaagcggtatggaagccataaataa

SEQ ID NO: 42575 - DNA, 30 bp, Artificial Sequence
  Synthetic oligonucleotide
gtcacgtcacccacggatcgattacaataa

SEQ ID NO: 42576 - DNA, 30 bp, Artificial Sequence
  Synthetic oligonucleotide
atgcggagcttgaggcacaggggccaataa

SEQ ID NO: 42577 - DNA, 30 bp, Artificial Sequence
  Synthetic oligonucleotide
cggaaacctgtgcgaatcgagtggcaataa

SEQ ID NO: 42578 - DNA, 30 bp, Artificial Sequence
  Synthetic oligonucleotide
taaaggcaaaccgcacaggcatccgaataa

SEQ ID NO: 42579 - DNA, 30 bp, Artificial Sequence
  Synthetic oligonucleotide
agaatcgcaacgcgaggaaaaacggaataa

SEQ ID NO: 42580 - DNA, 30 bp, Artificial Sequence
  Synthetic oligonucleotide
tgggcgagtcggagaagcttgtctgaataa

SEQ ID NO: 42581 - DNA, 30 bp, Artificial Sequence
  Synthetic oligonucleotide
ctagaggttcggtagtacgaccacacataa

SEQ ID NO: 42582 - DNA, 30 bp, Artificial Sequence
  Synthetic oligonucleotide
gtcgccgaacttaataatctcacagcataa

SEQ ID NO: 42583 - DNA, 30 bp, Artificial Sequence
  Synthetic oligonucleotide
gtgtaagaagcggagtcgcctcagagataa

SEQ ID NO: 42584 - DNA, 30 bp, Artificial Sequence
  Synthetic oligonucleotide
ggaagagcctcacctggtacatacctataa

SEQ ID NO: 42585 - DNA, 30 bp, Artificial Sequence
  Synthetic oligonucleotide
aggcacagtatacacacggtcacaaactaa

SEQ ID NO: 42586 - DNA, 30 bp, Artificial Sequence
  Synthetic oligonucleotide
gccaaatgaagataagcacgggcgaactaa

SEQ ID NO: 42587 - DNA, 30 bp, Artificial Sequence
  Synthetic oligonucleotide
cgagggtccgataagtctcacggtaactaa

SEQ ID NO: 42588 - DNA, 30 bp, Artificial Sequence
  Synthetic oligonucleotide
cggtaaagtgtggtaagcggttccgactaa

SEQ ID NO: 42589 - DNA, 30 bp, Artificial Sequence
  Synthetic oligonucleotide
atgcgatcggattccacagggagcgactaa

SEQ ID NO: 42590 - DNA, 30 bp, Artificial Sequence
  Synthetic oligonucleotide
cgaccaaaaataaactaaaaagactactaa

SEQ ID NO: 42591 - DNA, 30 bp, Artificial Sequence
  Synthetic oligonucleotide
ggttgccggaggaagttttcagctgcctaa

SEQ ID NO: 42592 - DNA, 30 bp, Artificial Sequence
  Synthetic oligonucleotide
tgtacaacgtacacatgggctagccgctaa

SEQ ID NO: 42593 - DNA, 30 bp, Artificial Sequence
  Synthetic oligonucleotide
gctgacatcgctcagataaggtagtgctaa

SEQ ID NO: 42594 - DNA, 30 bp, Artificial Sequence
  Synthetic oligonucleotide
ggggatcaggctcaaggaaatgtgtgctaa

SEQ ID NO: 42595 - DNA, 30 bp, Artificial Sequence
  Synthetic oligonucleotide
gcttgtacgagaaggcccgagctactctaa

SEQ ID NO: 42596 - DNA, 30 bp, Artificial Sequence
  Synthetic oligonucleotide
gaagagaccggccaggaacatcatctctaa

SEQ ID NO: 42597 - DNA, 30 bp, Artificial Sequence
  Synthetic oligonucleotide
gtaggctcaatggcgtgttcggaaaagtaa

SEQ ID NO: 42598 - DNA, 30 bp, Artificial Sequence
  Synthetic oligonucleotide
agtaacgtaggagtgcctgccagaaagtaa

SEQ ID NO: 42599 - DNA, 30 bp, Artificial Sequence
  Synthetic oligonucleotide
acagcttccacgatcttacagggcaagtaa

SEQ ID NO: 42600 - DNA, 30 bp, Artificial Sequence
  Synthetic oligonucleotide
agcaaagagcgagtaccggagccacagtaa

SEQ ID NO: 42601 - DNA, 30 bp, Artificial Sequence
  Synthetic oligonucleotide
cgctcaagtagcacgacctgtagtcagtaa

SEQ ID NO: 42602 - DNA, 30 bp, Artificial Sequence
  Synthetic oligonucleotide
ctaaacgagaatagcgatcttgaagagtaa

SEQ ID NO: 42603 - DNA, 30 bp, Artificial Sequence
  Synthetic oligonucleotide
cacaaaatctttatgcaagatagggagtaa

SEQ ID NO: 42604 - DNA, 30 bp, Artificial Sequence
  Synthetic oligonucleotide
tagccaaggataaggtcggtacctgagtaa

SEQ ID NO: 42605 - DNA, 30 bp, Artificial Sequence
  Synthetic oligonucleotide
gatccggatgaggcgtgactaaagtagtaa

SEQ ID NO: 42606 - DNA, 30 bp, Artificial Sequence
  Synthetic oligonucleotide
ggcgaaggaaagatgctagaatatccgtaa

SEQ ID NO: 42607 - DNA, 30 bp, Artificial Sequence
  Synthetic oligonucleotide
cagcgggggactggagaatagaccgcgtaa

SEQ ID NO: 42608 - DNA, 30 bp, Artificial Sequence
  Synthetic oligonucleotide
caacaggtgggaggacagtcgttaaggtaa

SEQ ID NO: 42609 - DNA, 30 bp, Artificial Sequence
  Synthetic oligonucleotide
gggtacagaccgtcaaagtgatggaggtaa

SEQ ID NO: 42610 - DNA, 30 bp, Artificial Sequence
  Synthetic oligonucleotide
agacgccgaaggtagaaacatcaccggtaa

SEQ ID NO: 42611 - DNA, 30 bp, Artificial Sequence
  Synthetic oligonucleotide
caccctccaacagcttcgtgaccggggtaa

SEQ ID NO: 42612 - DNA, 30 bp, Artificial Sequence
  Synthetic oligonucleotide
tagcgaggcaccggattcaaaggaatgtaa

SEQ ID NO: 42613 - DNA, 30 bp, Artificial Sequence
  Synthetic oligonucleotide
agaaagttatgagcggagtggggggtgtaa

SEQ ID NO: 42614 - DNA, 30 bp, Artificial Sequence
  Synthetic oligonucleotide
tcgaaatgagagtctgaatcccaacattaa

SEQ ID NO: 42615 - DNA, 30 bp, Artificial Sequence
  Synthetic oligonucleotide
ggtcgtgcccagtcgtggaaatcgcattaa

SEQ ID NO: 42616 - DNA, 31 bp, Artificial Sequence
  Synthetic oligonucleotide
gaggcgtattggacacaacgcatgagattaa

SEQ ID NO: 42617 - DNA, 30 bp, Artificial Sequence
  Synthetic oligonucleotide
cgtatcaacctcaagcagggatacgattaa

SEQ ID NO: 42618 - DNA, 30 bp, Artificial Sequence
  Synthetic oligonucleotide
gctgaaccaatggtacaactagaatattaa

SEQ ID NO: 42619 - DNA, 30 bp, Artificial Sequence
  Synthetic oligonucleotide
gatgcgaggtgataaatgggcaattattaa

SEQ ID NO: 42620 - DNA, 30 bp, Artificial Sequence
  Synthetic oligonucleotide
gggtaaaagtagtttaattgtcatccttaa

SEQ ID NO: 42621 - DNA, 30 bp, Artificial Sequence
  Synthetic oligonucleotide
agccaggttgtagctgaggaaagggcttaa

SEQ ID NO: 42622 - DNA, 30 bp, Artificial Sequence
  Synthetic oligonucleotide
cgacatgtgggcgatacggttaatgcttaa

SEQ ID NO: 42623 - DNA, 30 bp, Artificial Sequence
  Synthetic oligonucleotide
agtacaaacaacacgctacgtacgcgttaa

SEQ ID NO: 42624 - DNA, 30 bp, Artificial Sequence
  Synthetic oligonucleotide
ggtatgcacataaggtctgagcggtgttaa

SEQ ID NO: 42625 - DNA, 30 bp, Artificial Sequence
  Synthetic oligonucleotide
tagaaggaaatatttaggagccaagtttaa

SEQ ID NO: 42626 - DNA, 30 bp, Artificial Sequence
  Synthetic oligonucleotide
gtaccggaaggcgctagaaagaatgtttaa

SEQ ID NO: 42627 - DNA, 30 bp, Artificial Sequence
  Synthetic oligonucleotide
agacctaggataggcggattgggacaaaca

SEQ ID NO: 42628 - DNA, 30 bp, Artificial Sequence
  Synthetic oligonucleotide
ggaagaaacgtggaggagtgttagcaaaca

SEQ ID NO: 42629 - DNA, 30 bp, Artificial Sequence
  Synthetic oligonucleotide
gcggtatggtctccgagaaacccttaaaca

SEQ ID NO: 42630 - DNA, 30 bp, Artificial Sequence
  Synthetic oligonucleotide
cgaccgtactgcctgtatttaggaacaaca

SEQ ID NO: 42631 - DNA, 30 bp, Artificial Sequence
  Synthetic oligonucleotide
atacatacaaagtcggcgagtaccacaaca

SEQ ID NO: 42632 - DNA, 30 bp, Artificial Sequence
  Synthetic oligonucleotide
caggaagggatcgcccgctctctagcaaca

SEQ ID NO: 42633 - DNA, 30 bp, Artificial Sequence
  Synthetic oligonucleotide
ccctatcattgcgacaacggaggacgaaca

SEQ ID NO: 42634 - DNA, 30 bp, Artificial Sequence
  Synthetic oligonucleotide
aatacgtcggatggctagcttacgggaaca

SEQ ID NO: 42635 - DNA, 30 bp, Artificial Sequence
  Synthetic oligonucleotide
agataggagtgcctgaccgagcactgaaca

SEQ ID NO: 42636 - DNA, 30 bp, Artificial Sequence
  Synthetic oligonucleotide
gatggggaccggaaacgggtacaggtaaca

SEQ ID NO: 42637 - DNA, 30 bp, Artificial Sequence
  Synthetic oligonucleotide
tcgtgacgccaacataggatgaagttaaca

SEQ ID NO: 42638 - DNA, 30 bp, Artificial Sequence
  Synthetic oligonucleotide
gttcgcagggaagaagctaccataaacaca

SEQ ID NO: 42639 - DNA, 30 bp, Artificial Sequence
  Synthetic oligonucleotide
caaaccagttaatcactcgccgataacaca

SEQ ID NO: 42640 - DNA, 30 bp, Artificial Sequence
  Synthetic oligonucleotide
cgttacggtagcagctaacggcttaacaca

SEQ ID NO: 42641 - DNA, 30 bp, Artificial Sequence
  Synthetic oligonucleotide
ttggtcgggctagagataaaggagcacaca

SEQ ID NO: 42642 - DNA, 30 bp, Artificial Sequence
  Synthetic oligonucleotide
ccttaatcccgaccggaaggaggagacaca

SEQ ID NO: 42643 - DNA, 30 bp, Artificial Sequence
  Synthetic oligonucleotide
atagacgttagagtttagcaagcatacaca

SEQ ID NO: 42644 - DNA, 30 bp, Artificial Sequence
  Synthetic oligonucleotide
ggtggttgatggcaatcaatgcgctacaca

SEQ ID NO: 42645 - DNA, 30 bp, Artificial Sequence
  Synthetic oligonucleotide
gcgtaccggttcatcctatgcatgtacaca

SEQ ID NO: 42646 - DNA, 30 bp, Artificial Sequence
  Synthetic oligonucleotide
ataagcaaagagaacgggtagtgaaccaca

SEQ ID NO: 42647 - DNA, 30 bp, Artificial Sequence
  Synthetic oligonucleotide
gaaaatcgggtggcggaggcgagccccaca

SEQ ID NO: 42648 - DNA, 30 bp, Artificial Sequence
  Synthetic oligonucleotide
cctttctgaattcaacatagatcgagcaca

SEQ ID NO: 42649 - DNA, 30 bp, Artificial Sequence
  Synthetic oligonucleotide
ttaatgggtgagagactacctaagggcaca

SEQ ID NO: 42650 - DNA, 30 bp, Artificial Sequence
  Synthetic oligonucleotide
gagaaaagggacaactgatagtagggcaca

SEQ ID NO: 42651 - DNA, 30 bp, Artificial Sequence
  Synthetic oligonucleotide
atccctggcgagaaaataaaaaacatcaca

SEQ ID NO: 42652 - DNA, 30 bp, Artificial Sequence
  Synthetic oligonucleotide
gggggtacgctaagccagactatgatcaca

SEQ ID NO: 42653 - DNA, 30 bp, Artificial Sequence
  Synthetic oligonucleotide
acagggcagatcaaacttgttacagtcaca

SEQ ID NO: 42654 - DNA, 30 bp, Artificial Sequence
  Synthetic oligonucleotide
ggctggaaccatgtaaagatgtgtgtcaca

SEQ ID NO: 42655 - DNA, 30 bp, Artificial Sequence
  Synthetic oligonucleotide
gggcggttatccgataatttaaataagaca

SEQ ID NO: 42656 - DNA, 30 bp, Artificial Sequence
  Synthetic oligonucleotide
gctcagaaagtgacgtcgggtaagtagaca

SEQ ID NO: 42657 - DNA, 30 bp, Artificial Sequence
  Synthetic oligonucleotide
ggtaaaaaacaaacgagaaaatcgtagaca

SEQ ID NO: 42658 - DNA, 30 bp, Artificial Sequence
  Synthetic oligonucleotide
acaaggaaggtactagccgcttcaacgaca

SEQ ID NO: 42659 - DNA, 30 bp, Artificial Sequence
  Synthetic oligonucleotide
aaaagagcagcagcaacgaagtgaacgaca

SEQ ID NO: 42660 - DNA, 30 bp, Artificial Sequence
  Synthetic oligonucleotide
gtaaaccccgcacatacaaggtgcacgaca

SEQ ID NO: 42661 - DNA, 30 bp, Artificial Sequence
  Synthetic oligonucleotide
ccagccaacccagaaaataaagtacggaca

SEQ ID NO: 42662 - DNA, 30 bp, Artificial Sequence
  Synthetic oligonucleotide
tgaggaaacgcatgggtgagcgaccggaca

SEQ ID NO: 42663 - DNA, 30 bp, Artificial Sequence
  Synthetic oligonucleotide
agaagatggatctagacaacgtgccggaca

SEQ ID NO: 42664 - DNA, 30 bp, Artificial Sequence
  Synthetic oligonucleotide
aaactagctgcgcgaagagcaaagcggaca

SEQ ID NO: 42665 - DNA, 30 bp, Artificial Sequence
  Synthetic oligonucleotide
gtcgtctcggccagttagccatgagggaca

SEQ ID NO: 42666 - DNA, 30 bp, Artificial Sequence
  Synthetic oligonucleotide
tgtaagatcgtgttcagcgggcaggggaca

SEQ ID NO: 42667 - DNA, 30 bp, Artificial Sequence
  Synthetic oligonucleotide
gacattgctggaagtatataagactggaca

SEQ ID NO: 42668 - DNA, 30 bp, Artificial Sequence
  Synthetic oligonucleotide
cgtaaattgcgaatcaaatcaacctggaca

SEQ ID NO: 42669 - DNA, 30 bp, Artificial Sequence
  Synthetic oligonucleotide
gcggggctccacgaagatcctggcgataca

SEQ ID NO: 42670 - DNA, 30 bp, Artificial Sequence
  Synthetic oligonucleotide
tctgaaaggatatggacgaggcaagctaca

SEQ ID NO: 42671 - DNA, 30 bp, Artificial Sequence
  Synthetic oligonucleotide
gccgaaaaaactgcagggtgtggctctaca

SEQ ID NO: 42672 - DNA, 30 bp, Artificial Sequence
  Synthetic oligonucleotide
gagagagcgcactctcacaaataacgtaca

SEQ ID NO: 42673 - DNA, 30 bp, Artificial Sequence
  Synthetic oligonucleotide
gcacacgcgaagtccgtccatcgtattaca

SEQ ID NO: 42674 - DNA, 30 bp, Artificial Sequence
  Synthetic oligonucleotide
ctcaaggacgccaaaaagatgaatgttaca

SEQ ID NO: 42675 - DNA, 30 bp, Artificial Sequence
  Synthetic oligonucleotide
ggctgaacacgggttatctgatggcaacca

SEQ ID NO: 42676 - DNA, 30 bp, Artificial Sequence
  Synthetic oligonucleotide
acacacacgaacgccacgcgtgacccacca

SEQ ID NO: 42677 - DNA, 30 bp, Artificial Sequence
  Synthetic oligonucleotide
acatggctgtactgcgagatcaccccacca

SEQ ID NO: 42678 - DNA, 30 bp, Artificial Sequence
  Synthetic oligonucleotide
tggtacaggtaaagggttgagaagccacca

SEQ ID NO: 42679 - DNA, 30 bp, Artificial Sequence
  Synthetic oligonucleotide
gtcaggtataagcagtctaaaaaagcacca

SEQ ID NO: 42680 - DNA, 30 bp, Artificial Sequence
  Synthetic oligonucleotide
gctagtgtaaatgactaaatctaaagacca

SEQ ID NO: 42681 - DNA, 30 bp, Artificial Sequence
  Synthetic oligonucleotide
tcgccaaaggcggaacagagcgagggacca

SEQ ID NO: 42682 - DNA, 30 bp, Artificial Sequence
  Synthetic oligonucleotide
ctaggcatacggtttgtagttagtggacca

SEQ ID NO: 42683 - DNA, 30 bp, Artificial Sequence
  Synthetic oligonucleotide
ggtcgtagggaccaggtgattcgtggacca

SEQ ID NO: 42684 - DNA, 30 bp, Artificial Sequence
  Synthetic oligonucleotide
aacgattcgtgcaggctgcgaatgtgacca

SEQ ID NO: 42685 - DNA, 30 bp, Artificial Sequence
  Synthetic oligonucleotide
atgccaggactgagaggggatacggtacca

SEQ ID NO: 42686 - DNA, 30 bp, Artificial Sequence
  Synthetic oligonucleotide
cgaagaaggaaagaataggcgcgtttacca

SEQ ID NO: 42687 - DNA, 30 bp, Artificial Sequence
  Synthetic oligonucleotide
gaagcacaaagaacgtcgacaggaaaccca

SEQ ID NO: 42688 - DNA, 30 bp, Artificial Sequence
  Synthetic oligonucleotide
tgcacataacattacccgaagaagaaccca

SEQ ID NO: 42689 - DNA, 30 bp, Artificial Sequence
  Synthetic oligonucleotide
taacagacagagatcacttaaggccaccca

SEQ ID NO: 42690 - DNA, 30 bp, Artificial Sequence
  Synthetic oligonucleotide
aaaaccttcaacgggaaggcgcacgaccca

SEQ ID NO: 42691 - DNA, 30 bp, Artificial Sequence
  Synthetic oligonucleotide
aacaattccaaggacacttccaagtaccca

SEQ ID NO: 42692 - DNA, 30 bp, Artificial Sequence
  Synthetic oligonucleotide
tgacaacgaccgcgacaagaggttgcccca

SEQ ID NO: 42693 - DNA, 30 bp, Artificial Sequence
  Synthetic oligonucleotide
tggacacttgcagtaggcacaaatagccca

SEQ ID NO: 42694 - DNA, 30 bp, Artificial Sequence
  Synthetic oligonucleotide
ccgaggccaagcgtatagtaaaatggccca

SEQ ID NO: 42695 - DNA, 30 bp, Artificial Sequence
  Synthetic oligonucleotide
acgtatttaccggtgcgacagccgtgccca

SEQ ID NO: 42696 - DNA, 30 bp, Artificial Sequence
  Synthetic oligonucleotide
cggatcgtgagtgaattcagtgcgatccca

SEQ ID NO: 42697 - DNA, 30 bp, Artificial Sequence
  Synthetic oligonucleotide
tttggaagaagacaaacctcaaacgagcca

SEQ ID NO: 42698 - DNA, 30 bp, Artificial Sequence
  Synthetic oligonucleotide
gggaatgcgaatctatcattcacgccgcca

SEQ ID NO: 42699 - DNA, 30 bp, Artificial Sequence
  Synthetic oligonucleotide
ctaagcagtgcggcagataagacggcgcca

SEQ ID NO: 42700 - DNA, 30 bp, Artificial Sequence
  Synthetic oligonucleotide
ccttaagaccaaacgatacgctcgtcgcca

SEQ ID NO: 42701 - DNA, 30 bp, Artificial Sequence
  Synthetic oligonucleotide
cggcctcgttcgaaattcccgtcttcgcca

SEQ ID NO: 42702 - DNA, 30 bp, Artificial Sequence
  Synthetic oligonucleotide
ctttccacaagacattagtgcgactggcca

SEQ ID NO: 42703 - DNA, 30 bp, Artificial Sequence
  Synthetic oligonucleotide
aggtgacggtggtgttcgaatcccatgcca

SEQ ID NO: 42704 - DNA, 30 bp, Artificial Sequence
  Synthetic oligonucleotide
ttgcgagcggaaggtaagtttgctatgcca

SEQ ID NO: 42705 - DNA, 30 bp, Artificial Sequence
  Synthetic oligonucleotide
cgtgggtaacctaacgcaaaacacgtgcca

SEQ ID NO: 42706 - DNA, 30 bp, Artificial Sequence
  Synthetic oligonucleotide
cgacctgtctaagagcgtatgatcgtgcca

SEQ ID NO: 42707 - DNA, 30 bp, Artificial Sequence
  Synthetic oligonucleotide
cgctatcgagtgtaaggtccaaatgtgcca

SEQ ID NO: 42708 - DNA, 30 bp, Artificial Sequence
  Synthetic oligonucleotide
acgtaagagcacgacgtagaaacggatcca

SEQ ID NO: 42709 - DNA, 30 bp, Artificial Sequence
  Synthetic oligonucleotide
gagaagcaaacaagttccagcatttatcca

SEQ ID NO: 42710 - DNA, 30 bp, Artificial Sequence
  Synthetic oligonucleotide
cacaggggcagtgtcttggggacatctcca

SEQ ID NO: 42711 - DNA, 30 bp, Artificial Sequence
  Synthetic oligonucleotide
cggacacagaacgaccatcttttttctcca

SEQ ID NO: 42712 - DNA, 30 bp, Artificial Sequence
  Synthetic oligonucleotide
aagatcaggcagggatgagtctcgagtcca

SEQ ID NO: 42713 - DNA, 30 bp, Artificial Sequence
  Synthetic oligonucleotide
acgttatacagtgcaagttacggtagtcca

SEQ ID NO: 42714 - DNA, 30 bp, Artificial Sequence
  Synthetic oligonucleotide
cggggtggctggtcgtagctgtcgcgtcca

SEQ ID NO: 42715 - DNA, 30 bp, Artificial Sequence
  Synthetic oligonucleotide
gcgttataggaagtaagagttgggcgtcca

SEQ ID NO: 42716 - DNA, 30 bp, Artificial Sequence
  Synthetic oligonucleotide
acgaagttgtcgattactgtgcggggtcca

SEQ ID NO: 42717 - DNA, 30 bp, Artificial Sequence
  Synthetic oligonucleotide
cgtgtcatgtgcaaggggagaagagttcca

SEQ ID NO: 42718 - DNA, 30 bp, Artificial Sequence
  Synthetic oligonucleotide
agaaaatttggccaatcacagtaagaagca

SEQ ID NO: 42719 - DNA, 30 bp, Artificial Sequence
  Synthetic oligonucleotide
atgggaaggcaagtggttactgcggaagca

SEQ ID NO: 42720 - DNA, 30 bp, Artificial Sequence
  Synthetic oligonucleotide
gcggagataagagggcgtgaggtggaagca

SEQ ID NO: 42721 - DNA, 30 bp, Artificial Sequence
  Synthetic oligonucleotide
cggaccccaacgcgcgcacctaggtaagca

SEQ ID NO: 42722 - DNA, 30 bp, Artificial Sequence
  Synthetic oligonucleotide
cgcaaacagaaatgtagagatgtttaagca

SEQ ID NO: 42723 - DNA, 30 bp, Artificial Sequence
  Synthetic oligonucleotide
gcactatggcgacacccggggagaacagca

SEQ ID NO: 42724 - DNA, 30 bp, Artificial Sequence
  Synthetic oligonucleotide
acaagggcaacgctagttatacgaacagca

SEQ ID NO: 42725 - DNA, 30 bp, Artificial Sequence
  Synthetic oligonucleotide
tacgtcacggatcttgaccgagccccagca

SEQ ID NO: 42726 - DNA, 30 bp, Artificial Sequence
  Synthetic oligonucleotide
agcttcagaaccacacgggatccatcagca

SEQ ID NO: 42727 - DNA, 30 bp, Artificial Sequence
  Synthetic oligonucleotide
tccagaggaataacttatacgtgtcgagca

SEQ ID NO: 42728 - DNA, 30 bp, Artificial Sequence
  Synthetic oligonucleotide
acgatgattagtaaatacgtgaatatagca

SEQ ID NO: 42729 - DNA, 30 bp, Artificial Sequence
  Synthetic oligonucleotide
aacatgaccatcgagtggcaatatatagca

SEQ ID NO: 42730 - DNA, 30 bp, Artificial Sequence
  Synthetic oligonucleotide
ataggagcatcgttaaggagtaggctagca

SEQ ID NO: 42731 - DNA, 30 bp, Artificial Sequence
  Synthetic oligonucleotide
ccgatatcgcttaaaggtgaggggctagca

SEQ ID NO: 42732 - DNA, 30 bp, Artificial Sequence
  Synthetic oligonucleotide
ggtcacaacggaagggacagcatgctagca

SEQ ID NO: 42733 - DNA, 30 bp, Artificial Sequence
  Synthetic oligonucleotide
agtcacggagagctatgagtacgggtagca

SEQ ID NO: 42734 - DNA, 30 bp, Artificial Sequence
  Synthetic oligonucleotide
agtctacgttaaaaatctacagaatacgca

SEQ ID NO: 42735 - DNA, 30 bp, Artificial Sequence
  Synthetic oligonucleotide
tctaactgtcccagaaccgagtgagccgca

SEQ ID NO: 42736 - DNA, 30 bp, Artificial Sequence
  Synthetic oligonucleotide
aggacctaactaccgtaaaagacctccgca

SEQ ID NO: 42737 - DNA, 30 bp, Artificial Sequence
  Synthetic oligonucleotide
acggtgaacttgcacttatctttcagcgca

SEQ ID NO: 42738 - DNA, 30 bp, Artificial Sequence
  Synthetic oligonucleotide
gacggcgccgtataagaggctcagagcgca

SEQ ID NO: 42739 - DNA, 30 bp, Artificial Sequence
  Synthetic oligonucleotide
gcgaaggagaaggcacacgtgaggagcgca

SEQ ID NO: 42740 - DNA, 30 bp, Artificial Sequence
  Synthetic oligonucleotide
cgatcgtgtgtgaagcggcaattgcgcgca

SEQ ID NO: 42741 - DNA, 30 bp, Artificial Sequence
  Synthetic oligonucleotide
acggaggggaagaagcgggcaaggatcgca

SEQ ID NO: 42742 - DNA, 30 bp, Artificial Sequence
  Synthetic oligonucleotide
cacggtacgtaggcactcggaatgatcgca

SEQ ID NO: 42743 - DNA, 30 bp, Artificial Sequence
  Synthetic oligonucleotide
atggagaattccagttatcaatcactcgca

SEQ ID NO: 42744 - DNA, 30 bp, Artificial Sequence
  Synthetic oligonucleotide
ttaggtgccagaaatcggtgccacctcgca

SEQ ID NO: 42745 - DNA, 30 bp, Artificial Sequence
  Synthetic oligonucleotide
ccacccacatatggccaagagtgcgtcgca

SEQ ID NO: 42746 - DNA, 30 bp, Artificial Sequence
  Synthetic oligonucleotide
gccaaatcaatagcaaggtagcaattcgca

SEQ ID NO: 42747 - DNA, 30 bp, Artificial Sequence
  Synthetic oligonucleotide
gtacaagatagagaatagagaataaaggca

SEQ ID NO: 42748 - DNA, 30 bp, Artificial Sequence
  Synthetic oligonucleotide
agcgataaagctctcatggtaacgaaggca

SEQ ID NO: 42749 - DNA, 30 bp, Artificial Sequence
  Synthetic oligonucleotide
atgtcattcaaactgaaattagtgaaggca

SEQ ID NO: 42750 - DNA, 30 bp, Artificial Sequence
  Synthetic oligonucleotide
tacggtgttagggagaaataaatacaggca

SEQ ID NO: 42751 - DNA, 30 bp, Artificial Sequence
  Synthetic oligonucleotide
ggagcgataggcgacgtttcgtaccaggca

SEQ ID NO: 42752 - DNA, 30 bp, Artificial Sequence
  Synthetic oligonucleotide
gggcatctggatccacaaaacagggaggca

SEQ ID NO: 42753 - DNA, 30 bp, Artificial Sequence
  Synthetic oligonucleotide
gcccaaccagagggatatgggcaaacggca

SEQ ID NO: 42754 - DNA, 30 bp, Artificial Sequence
  Synthetic oligonucleotide
gccaagcgcgaggtctgaagttaaacggca

SEQ ID NO: 42755 - DNA, 30 bp, Artificial Sequence
  Synthetic oligonucleotide
cagcacgcgaaattggttcgtgtgacggca

SEQ ID NO: 42756 - DNA, 30 bp, Artificial Sequence
  Synthetic oligonucleotide
accaggaaagggatcgtaacacaaccggca

SEQ ID NO: 42757 - DNA, 30 bp, Artificial Sequence
  Synthetic oligonucleotide
cgggaaaccccgtaaaatgccaagccggca

SEQ ID NO: 42758 - DNA, 30 bp, Artificial Sequence
  Synthetic oligonucleotide
agggaatagtcaagaatatgcctgccggca

SEQ ID NO: 42759 - DNA, 30 bp, Artificial Sequence
  Synthetic oligonucleotide
agtcagggaacgactggatttaatgcggca

SEQ ID NO: 42760 - DNA, 30 bp, Artificial Sequence
  Synthetic oligonucleotide
ggcaagggtttcaattagctaatctcggca

SEQ ID NO: 42761 - DNA, 30 bp, Artificial Sequence
  Synthetic oligonucleotide
tcgatccgaaggttacctgggtgaagggca

SEQ ID NO: 42762 - DNA, 30 bp, Artificial Sequence
  Synthetic oligonucleotide
ggtcagcaaaagttcatatcattcagggca

SEQ ID NO: 42763 - DNA, 30 bp, Artificial Sequence
  Synthetic oligonucleotide
ggcggaatgacgattggtgaaagccgggca

SEQ ID NO: 42764 - DNA, 30 bp, Artificial Sequence
  Synthetic oligonucleotide
gacggcgaatgggcgagcgtgcggcgggca

SEQ ID NO: 42765 - DNA, 30 bp, Artificial Sequence
  Synthetic oligonucleotide
tggcaatagtgttacagcgtgagcggggca

SEQ ID NO: 42766 - DNA, 30 bp, Artificial Sequence
  Synthetic oligonucleotide
tgacagacaggccgtaagtgccaatgggca

SEQ ID NO: 42767 - DNA, 30 bp, Artificial Sequence
  Synthetic oligonucleotide
ctcgcacaacaaggatctgagttatgggca

SEQ ID NO: 42768 - DNA, 30 bp, Artificial Sequence
  Synthetic oligonucleotide
tcgtgatgtcacgcataaaaccaaatggca

SEQ ID NO: 42769 - DNA, 30 bp, Artificial Sequence
  Synthetic oligonucleotide
acttgagaacatctggccaatatagtggca

SEQ ID NO: 42770 - DNA, 30 bp, Artificial Sequence
  Synthetic oligonucleotide
agtcgttgatctaagggcaagggattggca

SEQ ID NO: 42771 - DNA, 30 bp, Artificial Sequence
  Synthetic oligonucleotide
acggggctaaaacctacttcgtgcaatgca

SEQ ID NO: 42772 - DNA, 30 bp, Artificial Sequence
  Synthetic oligonucleotide
gcggtgtgtccgcgatacgatctcaatgca

SEQ ID NO: 42773 - DNA, 30 bp, Artificial Sequence
  Synthetic oligonucleotide
cgtaattgtacgtcatctaccaggaatgca

SEQ ID NO: 42774 - DNA, 30 bp, Artificial Sequence
  Synthetic oligonucleotide
ctcgggaagcgtgaatggggcgaatatgca

SEQ ID NO: 42775 - DNA, 30 bp, Artificial Sequence
  Synthetic oligonucleotide
tggttaccagggaaagcagtgctctatgca

SEQ ID NO: 42776 - DNA, 30 bp, Artificial Sequence
  Synthetic oligonucleotide
acaggtgaccgcagggggtcaaggtatgca

SEQ ID NO: 42777 - DNA, 30 bp, Artificial Sequence
  Synthetic oligonucleotide
ggggctgtagtacggagtagaggggctgca

SEQ ID NO: 42778 - DNA, 30 bp, Artificial Sequence
  Synthetic oligonucleotide
tcacaggaagtgtgtcaaatgctggctgca

SEQ ID NO: 42779 - DNA, 30 bp, Artificial Sequence
  Synthetic oligonucleotide
ccactgacatgatgagggcagagttctgca

SEQ ID NO: 42780 - DNA, 30 bp, Artificial Sequence
  Synthetic oligonucleotide
ccggccgcggttgtgcgaccttagagtgca

SEQ ID NO: 42781 - DNA, 30 bp, Artificial Sequence
  Synthetic oligonucleotide
aaggtgattaagcgtgatttaaggagtgca

SEQ ID NO: 42782 - DNA, 30 bp, Artificial Sequence
  Synthetic oligonucleotide
agtgagaaatatactaggccgagccgtgca

SEQ ID NO: 42783 - DNA, 30 bp, Artificial Sequence
  Synthetic oligonucleotide
tcagggtagaactcactgattggtcgtgca

SEQ ID NO: 42784 - DNA, 30 bp, Artificial Sequence
  Synthetic oligonucleotide
ttagaacccgtgagagctcaaagagttgca

SEQ ID NO: 42785 - DNA, 30 bp, Artificial Sequence
  Synthetic oligonucleotide
gcgtcctccggatctgggggaacatttgca

SEQ ID NO: 42786 - DNA, 30 bp, Artificial Sequence
  Synthetic oligonucleotide
tcgtcacccatgtattccaaccaccaatca

SEQ ID NO: 42787 - DNA, 30 bp, Artificial Sequence
  Synthetic oligonucleotide
tcctaacgcgaggaagggtacacgccatca

SEQ ID NO: 42788 - DNA, 30 bp, Artificial Sequence
  Synthetic oligonucleotide
ctcgcggtccaagcataaagtagtgcatca

SEQ ID NO: 42789 - DNA, 30 bp, Artificial Sequence
  Synthetic oligonucleotide
ctagacattagaaccgttaccgtaagatca

SEQ ID NO: 42790 - DNA, 30 bp, Artificial Sequence
  Synthetic oligonucleotide
ggaccaactgtgctaaagcattaccgatca

SEQ ID NO: 42791 - DNA, 30 bp, Artificial Sequence
  Synthetic oligonucleotide
cagaagggggaagtcggcttttaaggatca

SEQ ID NO: 42792 - DNA, 30 bp, Artificial Sequence
  Synthetic oligonucleotide
cactaggcccaaaggtcgttcgccggatca

SEQ ID NO: 42793 - DNA, 30 bp, Artificial Sequence
  Synthetic oligonucleotide
acatgtagggcgttaaaatctagtggatca

SEQ ID NO: 42794 - DNA, 30 bp, Artificial Sequence
  Synthetic oligonucleotide
gcaggagggaggcccccagcagagatatca

SEQ ID NO: 42795 - DNA, 30 bp, Artificial Sequence
  Synthetic oligonucleotide
ttgagacagtgacacttatacagcctatca

SEQ ID NO: 42796 - DNA, 30 bp, Artificial Sequence
  Synthetic oligonucleotide
cgactatgcgcaggctggaggggtctatca

SEQ ID NO: 42797 - DNA, 30 bp, Artificial Sequence
  Synthetic oligonucleotide
agaggagcgaagggcccatcagcggtatca

SEQ ID NO: 42798 - DNA, 30 bp, Artificial Sequence
  Synthetic oligonucleotide
tgagtgtagtagggacagacacctgtatca

SEQ ID NO: 42799 - DNA, 30 bp, Artificial Sequence
  Synthetic oligonucleotide
ggcatgattgggaatagcgtggaggactca

SEQ ID NO: 42800 - DNA, 30 bp, Artificial Sequence
  Synthetic oligonucleotide
tcgtgagagaactgaccaacacttgcctca

SEQ ID NO: 42801 - DNA, 30 bp, Artificial Sequence
  Synthetic oligonucleotide
gatcggtgggtcagtgaacgtggaagctca

SEQ ID NO: 42802 - DNA, 30 bp, Artificial Sequence
  Synthetic oligonucleotide
gacgcgattagtcgccttaagatgagctca

SEQ ID NO: 42803 - DNA, 30 bp, Artificial Sequence
  Synthetic oligonucleotide
gacggggacaagaactacactcctggctca

SEQ ID NO: 42804 - DNA, 30 bp, Artificial Sequence
  Synthetic oligonucleotide
gccgataagttaacaactcaccaaatctca

SEQ ID NO: 42805 - DNA, 30 bp, Artificial Sequence
  Synthetic oligonucleotide
ctgcggtgtcgtctccaaagcaaacagtca

SEQ ID NO: 42806 - DNA, 30 bp, Artificial Sequence
  Synthetic oligonucleotide
tctggccaaatacaagcgtgtctacagtca

SEQ ID NO: 42807 - DNA, 30 bp, Artificial Sequence
  Synthetic oligonucleotide
acgtctaggaccgtggggcgcatccagtca

SEQ ID NO: 42808 - DNA, 30 bp, Artificial Sequence
  Synthetic oligonucleotide
atctcggagaaatcactccagggcgagtca

SEQ ID NO: 42809 - DNA, 30 bp, Artificial Sequence
  Synthetic oligonucleotide
cctagagacggggatagggacatagcgtca

SEQ ID NO: 42810 - DNA, 30 bp, Artificial Sequence
  Synthetic oligonucleotide
atcatgagaacgcgagagatacaatcgtca

SEQ ID NO: 42811 - DNA, 30 bp, Artificial Sequence
  Synthetic oligonucleotide
gatgttaacggaaacatacagaactcgtca

SEQ ID NO: 42812 - DNA, 30 bp, Artificial Sequence
  Synthetic oligonucleotide
aagacggggacttggttatgacggtcgtca

SEQ ID NO: 42813 - DNA, 30 bp, Artificial Sequence
  Synthetic oligonucleotide
atggggggaaaaagcctcattcaccggtca

SEQ ID NO: 42814 - DNA, 30 bp, Artificial Sequence
  Synthetic oligonucleotide
catcaagcaaccatgtcctaaaagcggtca

SEQ ID NO: 42815 - DNA, 30 bp, Artificial Sequence
  Synthetic oligonucleotide
ccgattcagcagagggataaagtctggtca

SEQ ID NO: 42816 - DNA, 30 bp, Artificial Sequence
  Synthetic oligonucleotide
cccaaatggcctagaaccgtgacaatgtca

SEQ ID NO: 42817 - DNA, 30 bp, Artificial Sequence
  Synthetic oligonucleotide
gggtaagatgcgaatcgtcgggacctgtca

SEQ ID NO: 42818 - DNA, 30 bp, Artificial Sequence
  Synthetic oligonucleotide
cggccagaagacctaagtcaccgacattca

SEQ ID NO: 42819 - DNA, 30 bp, Artificial Sequence
  Synthetic oligonucleotide
atgggaacaaatacgagtaggaacgattca

SEQ ID NO: 42820 - DNA, 30 bp, Artificial Sequence
  Synthetic oligonucleotide
gcaggggaaacatacaaaggctatacttca

SEQ ID NO: 42821 - DNA, 30 bp, Artificial Sequence
  Synthetic oligonucleotide
aacgtaacgcgaatcgtgatgtgatcttca

SEQ ID NO: 42822 - DNA, 30 bp, Artificial Sequence
  Synthetic oligonucleotide
gttgccagacccctctacttgcgaaaaaga

SEQ ID NO: 42823 - DNA, 30 bp, Artificial Sequence
  Synthetic oligonucleotide
ggttaaagtagaacgaaaaagtgccaaaga

SEQ ID NO: 42824 - DNA, 30 bp, Artificial Sequence
  Synthetic oligonucleotide
atgggggtcgtataggaacattagcaaaga

SEQ ID NO: 42825 - DNA, 30 bp, Artificial Sequence
  Synthetic oligonucleotide
ttgctaccagatgtgtgcgcaaggcaaaga

SEQ ID NO: 42826 - DNA, 30 bp, Artificial Sequence
  Synthetic oligonucleotide
aggtcacgagaagcgagtgctcgtcaaaga

SEQ ID NO: 42827 - DNA, 30 bp, Artificial Sequence
  Synthetic oligonucleotide
gaatacaatgaaactgcaggagaagaaaga

SEQ ID NO: 42828 - DNA, 30 bp, Artificial Sequence
  Synthetic oligonucleotide
atgcaggcccacaaaccattccgtgaaaga

SEQ ID NO: 42829 - DNA, 30 bp, Artificial Sequence
  Synthetic oligonucleotide
ttcatcaagcaatcgaaaacgaagtaaaga

SEQ ID NO: 42830 - DNA, 30 bp, Artificial Sequence
  Synthetic oligonucleotide
atgccggggggttagtaattatggacaaga

SEQ ID NO: 42831 - DNA, 30 bp, Artificial Sequence
  Synthetic oligonucleotide
caggtcagcttaatcaaacacacaccaaga

SEQ ID NO: 42832 - DNA, 30 bp, Artificial Sequence
  Synthetic oligonucleotide
cgtctagtggcgtgtgacctttaagcaaga

SEQ ID NO: 42833 - DNA, 30 bp, Artificial Sequence
  Synthetic oligonucleotide
tatacggactggcacaagcttgtagcaaga

SEQ ID NO: 42834 - DNA, 30 bp, Artificial Sequence
  Synthetic oligonucleotide
cctagggattgaaccagacctacccgaaga

SEQ ID NO: 42835 - DNA, 30 bp, Artificial Sequence
  Synthetic oligonucleotide
gctgactctagatcgggctgcgagcgaaga

SEQ ID NO: 42836 - DNA, 30 bp, Artificial Sequence
  Synthetic oligonucleotide
agcaacacaagagcaaccgagctcggaaga

SEQ ID NO: 42837 - DNA, 30 bp, Artificial Sequence
  Synthetic oligonucleotide
caccgcacgttaggaatataaccctgaaga

SEQ ID NO: 42838 - DNA, 30 bp, Artificial Sequence
  Synthetic oligonucleotide
cagcgtgggaaattgggacttgcgtgaaga

SEQ ID NO: 42839 - DNA, 30 bp, Artificial Sequence
  Synthetic oligonucleotide
acgatagtgacatccgacaacgcaataaga

SEQ ID NO: 42840 - DNA, 30 bp, Artificial Sequence
  Synthetic oligonucleotide
aagctcggagacgcgaaagtaaacataaga

SEQ ID NO: 42841 - DNA, 30 bp, Artificial Sequence
  Synthetic oligonucleotide
gcgccgggctacggtcagttaaacataaga

SEQ ID NO: 42842 - DNA, 30 bp, Artificial Sequence
  Synthetic oligonucleotide
cacttcgaaaacagaaatcattatataaga

SEQ ID NO: 42843 - DNA, 30 bp, Artificial Sequence
  Synthetic oligonucleotide
aacgggcttgaaatatgcggtattataaga

SEQ ID NO: 42844 - DNA, 30 bp, Artificial Sequence
  Synthetic oligonucleotide
tgcaccgatccgtatcaaccacaagtaaga

SEQ ID NO: 42845 - DNA, 30 bp, Artificial Sequence
  Synthetic oligonucleotide
aagcagcaacggtaacggaaggaagtaaga

SEQ ID NO: 42846 - DNA, 30 bp, Artificial Sequence
  Synthetic oligonucleotide
cggttatgatatcgctgaaaggagttaaga

SEQ ID NO: 42847 - DNA, 30 bp, Artificial Sequence
  Synthetic oligonucleotide
acgaatattgagaaactaacgttaaacaga

SEQ ID NO: 42848 - DNA, 30 bp, Artificial Sequence
  Synthetic oligonucleotide
aggggtaggtcccctaaaattagtcacaga

SEQ ID NO: 42849 - DNA, 30 bp, Artificial Sequence
  Synthetic oligonucleotide
cgtcattatcacgagtgctattaagacaga

SEQ ID NO: 42850 - DNA, 30 bp, Artificial Sequence
  Synthetic oligonucleotide
tcctgaaataggagaggaatgaaggacaga

SEQ ID NO: 42851 - DNA, 30 bp, Artificial Sequence
  Synthetic oligonucleotide
ggtcatcgaacagtgcgcatttacaccaga

SEQ ID NO: 42852 - DNA, 30 bp, Artificial Sequence
  Synthetic oligonucleotide
ccgtccgtggcctacaatggcagcaccaga

SEQ ID NO: 42853 - DNA, 30 bp, Artificial Sequence
  Synthetic oligonucleotide
tagcacacttgttgttaaacaccgaccaga

SEQ ID NO: 42854 - DNA, 31 bp, Artificial Sequence
  Synthetic oligonucleotide
atcattggagaaaggggccacactatccaga

SEQ ID NO: 42855 - DNA, 30 bp, Artificial Sequence
  Synthetic oligonucleotide
gaacattccttaggggtacacgactccaga

SEQ ID NO: 42856 - DNA, 30 bp, Artificial Sequence
  Synthetic oligonucleotide
cgaacgctgtgcggctgggttaaaagcaga

SEQ ID NO: 42857 - DNA, 30 bp, Artificial Sequence
  Synthetic oligonucleotide
ccaacacactagactttgtaaatcagcaga

SEQ ID NO: 42858 - DNA, 30 bp, Artificial Sequence
  Synthetic oligonucleotide
ttaccggtacgggtcagaacgaagcgcaga

SEQ ID NO: 42859 - DNA, 30 bp, Artificial Sequence
  Synthetic oligonucleotide
aggacgatcgggctgtaaactaagtgcaga

SEQ ID NO: 42860 - DNA, 30 bp, Artificial Sequence
  Synthetic oligonucleotide
cgatgtcatagataagtactcgtgatcaga

SEQ ID NO: 42861 - DNA, 30 bp, Artificial Sequence
  Synthetic oligonucleotide
ggactacctactccccccgggttactcaga

SEQ ID NO: 42862 - DNA, 30 bp, Artificial Sequence
  Synthetic oligonucleotide
tcgcacgtaggtggcctataacgtaagaga

SEQ ID NO: 42863 - DNA, 30 bp, Artificial Sequence
  Synthetic oligonucleotide
ccctcctcagtagggttaccaccacagaga

SEQ ID NO: 42864 - DNA, 30 bp, Artificial Sequence
  Synthetic oligonucleotide
ctggtcaaatagacagaagctatccagaga

SEQ ID NO: 42865 - DNA, 30 bp, Artificial Sequence
  Synthetic oligonucleotide
ccagacattgtgaatacagctggagagaga

SEQ ID NO: 42866 - DNA, 30 bp, Artificial Sequence
  Synthetic oligonucleotide
gctggtcgtagagaggtcatccctgagaga

SEQ ID NO: 42867 - DNA, 30 bp, Artificial Sequence
  Synthetic oligonucleotide
ggaagccggctcacctagggtaagtagaga

SEQ ID NO: 42868 - DNA, 30 bp, Artificial Sequence
  Synthetic oligonucleotide
agatgctatgggtccgtcagaagttagaga

SEQ ID NO: 42869 - DNA, 31 bp, Artificial Sequence
  Synthetic oligonucleotide
gtcggggtaagcgccacaagggttaacgaga

SEQ ID NO: 42870 - DNA, 30 bp, Artificial Sequence
  Synthetic oligonucleotide
tcggaatgaccgacccgccttggtacgaga

SEQ ID NO: 42871 - DNA, 30 bp, Artificial Sequence
  Synthetic oligonucleotide
cactgggagtctatggaagtataaccgaga

SEQ ID NO: 42872 - DNA, 30 bp, Artificial Sequence
  Synthetic oligonucleotide
atcggaaaataacgagtgctgggggcgaga

SEQ ID NO: 42873 - DNA, 30 bp, Artificial Sequence
  Synthetic oligonucleotide
caggagaaacaccattggatggcctcgaga

SEQ ID NO: 42874 - DNA, 30 bp, Artificial Sequence
  Synthetic oligonucleotide
tcaggaaggtagacacactgcgtctcgaga

SEQ ID NO: 42875 - DNA, 30 bp, Artificial Sequence
  Synthetic oligonucleotide
ttcgcaagggaatacgttcctctcaggaga

SEQ ID NO: 42876 - DNA, 30 bp, Artificial Sequence
  Synthetic oligonucleotide
catgagcatgtgggaaaacggtcgaggaga

SEQ ID NO: 42877 - DNA, 31 bp, Artificial Sequence
  Synthetic oligonucleotide
acatgggtttcgttataccacggatcggaga

SEQ ID NO: 42878 - DNA, 30 bp, Artificial Sequence
  Synthetic oligonucleotide
cgaccgctacactagcagtacaaggggaga

SEQ ID NO: 42879 - DNA, 30 bp, Artificial Sequence
  Synthetic oligonucleotide
ggccgtattgcgataagacaggcatggaga

SEQ ID NO: 42880 - DNA, 30 bp, Artificial Sequence
  Synthetic oligonucleotide
gtcgtacgttgagcgtgtagtgattggaga

SEQ ID NO: 42881 - DNA, 30 bp, Artificial Sequence
  Synthetic oligonucleotide
gggtgcaccatactatcccggcacatgaga

SEQ ID NO: 42882 - DNA, 30 bp, Artificial Sequence
  Synthetic oligonucleotide
taaaggagtcaggggtataatttcatgaga

SEQ ID NO: 42883 - DNA, 30 bp, Artificial Sequence
  Synthetic oligonucleotide
gacaatgcaagttcggacatggatctgaga

SEQ ID NO: 42884 - DNA, 30 bp, Artificial Sequence
  Synthetic oligonucleotide
gcgcacaccgtgcgttacagtctacataga

SEQ ID NO: 42885 - DNA, 31 bp, Artificial Sequence
  Synthetic oligonucleotide
ggacgcgtgagacagatatgtgtcccataga

SEQ ID NO: 42886 - DNA, 30 bp, Artificial Sequence
  Synthetic oligonucleotide
ggcaaacgacatagataggatgtgcataga

SEQ ID NO: 42887 - DNA, 30 bp, Artificial Sequence
  Synthetic oligonucleotide
gcaccacggcgagtaatcaccacgactaga

SEQ ID NO: 42888 - DNA, 30 bp, Artificial Sequence
  Synthetic oligonucleotide
cgggatatatgtgggcggataaggactaga

SEQ ID NO: 42889 - DNA, 30 bp, Artificial Sequence
  Synthetic oligonucleotide
acatagctcaaactggagggccggtctaga

SEQ ID NO: 42890 - DNA, 30 bp, Artificial Sequence
  Synthetic oligonucleotide
cctgcaaaaagacaaaatgctccaagtaga

SEQ ID NO: 42891 - DNA, 30 bp, Artificial Sequence
  Synthetic oligonucleotide
tcttattacaaacctccagagcaacgtaga

SEQ ID NO: 42892 - DNA, 30 bp, Artificial Sequence
  Synthetic oligonucleotide
tacggtgaaggtgcgggtaccagatgtaga

SEQ ID NO: 42893 - DNA, 30 bp, Artificial Sequence
  Synthetic oligonucleotide
gcagggtctaagggacagggatcaaaacga

SEQ ID NO: 42894 - DNA, 30 bp, Artificial Sequence
  Synthetic oligonucleotide
atgggtctccaaattctacagcccaaacga

SEQ ID NO: 42895 - DNA, 30 bp, Artificial Sequence
  Synthetic oligonucleotide
tcgtatagtccccacgttaagagtgaacga

SEQ ID NO: 42896 - DNA, 30 bp, Artificial Sequence
  Synthetic oligonucleotide
atgtgagggcacgacttggccaaaacacga

SEQ ID NO: 42897 - DNA, 30 bp, Artificial Sequence
  Synthetic oligonucleotide
attagctattttatcagagggctagcacga

SEQ ID NO: 42898 - DNA, 30 bp, Artificial Sequence
  Synthetic oligonucleotide
agcgcactgtgaaacggggttcgggcacga

SEQ ID NO: 42899 - DNA, 30 bp, Artificial Sequence
  Synthetic oligonucleotide
gtatcggtggtgcgaaagccagttgcacga

SEQ ID NO: 42900 - DNA, 30 bp, Artificial Sequence
  Synthetic oligonucleotide
agtagatatgtaagatggctgatccgacga

SEQ ID NO: 42901 - DNA, 30 bp, Artificial Sequence
  Synthetic oligonucleotide
tgagaaagtggggagatctaaagatgacga

SEQ ID NO: 42902 - DNA, 30 bp, Artificial Sequence
  Synthetic oligonucleotide
gcaagcctagtgtaggtcaaagattgacga

SEQ ID NO: 42903 - DNA, 30 bp, Artificial Sequence
  Synthetic oligonucleotide
tcggtcggtgaatgcgcatagagcatacga

SEQ ID NO: 42904 - DNA, 30 bp, Artificial Sequence
  Synthetic oligonucleotide
ctgaaagcaagcactccctgactcctacga

SEQ ID NO: 42905 - DNA, 30 bp, Artificial Sequence
  Synthetic oligonucleotide
acttccgtcggaacaccattcagcgtacga

SEQ ID NO: 42906 - DNA, 30 bp, Artificial Sequence
  Synthetic oligonucleotide
caacaatgcgacgcattgaaaggcgtacga

SEQ ID NO: 42907 - DNA, 30 bp, Artificial Sequence
  Synthetic oligonucleotide
accgcgtcaagtccgatgtatgaaaaccga

SEQ ID NO: 42908 - DNA, 30 bp, Artificial Sequence
  Synthetic oligonucleotide
cttgtgtcgcaaggtatgcaataagaccga

SEQ ID NO: 42909 - DNA, 30 bp, Artificial Sequence
  Synthetic oligonucleotide
caaacttatactcaaaagaggtgagcccga

SEQ ID NO: 42910 - DNA, 30 bp, Artificial Sequence
  Synthetic oligonucleotide
gaactaacaagtgaattacaagaggcccga

SEQ ID NO: 42911 - DNA, 30 bp, Artificial Sequence
  Synthetic oligonucleotide
cggcatgttaagtatccgggaatggcccga

SEQ ID NO: 42912 - DNA, 30 bp, Artificial Sequence
  Synthetic oligonucleotide
tcaaggctagctcgttggaaccaaagccga

SEQ ID NO: 42913 - DNA, 30 bp, Artificial Sequence
  Synthetic oligonucleotide
agtcggtacatctgtagaaaggagcgccga

SEQ ID NO: 42914 - DNA, 30 bp, Artificial Sequence
  Synthetic oligonucleotide
gcaaagcagtagaacaagggggggggccga

SEQ ID NO: 42915 - DNA, 30 bp, Artificial Sequence
  Synthetic oligonucleotide
cgtagagtgccagagaactcgatgtgccga

SEQ ID NO: 42916 - DNA, 30 bp, Artificial Sequence
  Synthetic oligonucleotide
agggcttaaacgggcaattttacaatccga

SEQ ID NO: 42917 - DNA, 30 bp, Artificial Sequence
  Synthetic oligonucleotide
cgtgagtcctgcgagggtgacgggatccga

SEQ ID NO: 42918 - DNA, 30 bp, Artificial Sequence
  Synthetic oligonucleotide
ctgtagggtatgccaatgaagatcctccga

SEQ ID NO: 42919 - DNA, 30 bp, Artificial Sequence
  Synthetic oligonucleotide
cgccgggggctgagaaagagcgttctccga

SEQ ID NO: 42920 - DNA, 30 bp, Artificial Sequence
  Synthetic oligonucleotide
agggttacccaaaaaaatccagtggtccga

SEQ ID NO: 42921 - DNA, 30 bp, Artificial Sequence
  Synthetic oligonucleotide
tcacgggatcagtctcttctgcaaaagcga

SEQ ID NO: 42922 - DNA, 30 bp, Artificial Sequence
  Synthetic oligonucleotide
tagatcccttggggaacaggtgttcagcga

SEQ ID NO: 42923 - DNA, 30 bp, Artificial Sequence
  Synthetic oligonucleotide
acgatttacgtacggtctaacaaggagcga

SEQ ID NO: 42924 - DNA, 30 bp, Artificial Sequence
  Synthetic oligonucleotide
ataacggtaacaaactcagcccatgagcga

SEQ ID NO: 42925 - DNA, 30 bp, Artificial Sequence
  Synthetic oligonucleotide
caaggtaagtgaacgaggacggttgagcga

SEQ ID NO: 42926 - DNA, 30 bp, Artificial Sequence
  Synthetic oligonucleotide
gtgaccgggagggtgtcgcggacgtcgcga

SEQ ID NO: 42927 - DNA, 31 bp, Artificial Sequence
  Synthetic oligonucleotide
gtgactagggggttaagcgatgtacaggcga

SEQ ID NO: 42928 - DNA, 30 bp, Artificial Sequence
  Synthetic oligonucleotide
ctagttggggtgcgactcatgagacggcga

SEQ ID NO: 42929 - DNA, 30 bp, Artificial Sequence
  Synthetic oligonucleotide
aacgagacgtgaggaagatctagacggcga

SEQ ID NO: 42930 - DNA, 30 bp, Artificial Sequence
  Synthetic oligonucleotide
ccatttgcaaaacgcaagtttcagcggcga

SEQ ID NO: 42931 - DNA, 30 bp, Artificial Sequence
  Synthetic oligonucleotide
acacagcggtactataaaattctagggcga

SEQ ID NO: 42932 - DNA, 30 bp, Artificial Sequence
  Synthetic oligonucleotide
acatgaaggtcggcgaaacaggcgtggcga

SEQ ID NO: 42933 - DNA, 30 bp, Artificial Sequence
  Synthetic oligonucleotide
taatgctggcttagaaaatgggtgtggcga

SEQ ID NO: 42934 - DNA, 30 bp, Artificial Sequence
  Synthetic oligonucleotide
aagatcaaaagccaatgatccgcaatgcga

SEQ ID NO: 42935 - DNA, 30 bp, Artificial Sequence
  Synthetic oligonucleotide
tgtcggtcggaaagaaggattgccatgcga

SEQ ID NO: 42936 - DNA, 30 bp, Artificial Sequence
  Synthetic oligonucleotide
tcagaaagtgcaagtaagagcagtctgcga

SEQ ID NO: 42937 - DNA, 30 bp, Artificial Sequence
  Synthetic oligonucleotide
tagcagtccgaagggcatgtcaaggtgcga

SEQ ID NO: 42938 - DNA, 30 bp, Artificial Sequence
  Synthetic oligonucleotide
ctaatgtaaaggagaaatgtgtaccatcga

SEQ ID NO: 42939 - DNA, 30 bp, Artificial Sequence
  Synthetic oligonucleotide
agaatgccaacaatacaatttccccatcga

SEQ ID NO: 42940 - DNA, 30 bp, Artificial Sequence
  Synthetic oligonucleotide
cgaggggattgagaccgacattgagatcga

SEQ ID NO: 42941 - DNA, 30 bp, Artificial Sequence
  Synthetic oligonucleotide
tacgctacgggaacaggtctggatgatcga

SEQ ID NO: 42942 - DNA, 30 bp, Artificial Sequence
  Synthetic oligonucleotide
actggagtcggctgtaaggggactactcga

SEQ ID NO: 42943 - DNA, 30 bp, Artificial Sequence
  Synthetic oligonucleotide
ggacggttactagcgctcgtctgacctcga

SEQ ID NO: 42944 - DNA, 30 bp, Artificial Sequence
  Synthetic oligonucleotide
gaaggcttagtgatacggtcaacaagtcga

SEQ ID NO: 42945 - DNA, 30 bp, Artificial Sequence
  Synthetic oligonucleotide
aaaacaggtgtccggagcgaatttagtcga

SEQ ID NO: 42946 - DNA, 30 bp, Artificial Sequence
  Synthetic oligonucleotide
cattggcattaaaacagatgaaggggtcga

SEQ ID NO: 42947 - DNA, 30 bp, Artificial Sequence
  Synthetic oligonucleotide
agagaaacatgtcaaacgctcaggggtcga

SEQ ID NO: 42948 - DNA, 30 bp, Artificial Sequence
  Synthetic oligonucleotide
atacgatcattgggtcgtggtaaatgtcga

SEQ ID NO: 42949 - DNA, 30 bp, Artificial Sequence
  Synthetic oligonucleotide
ataccatgaagtccaatgaaccatcttcga

SEQ ID NO: 42950 - DNA, 30 bp, Artificial Sequence
  Synthetic oligonucleotide
caggggcattcacgtgttccggggaaagga

SEQ ID NO: 42951 - DNA, 30 bp, Artificial Sequence
  Synthetic oligonucleotide
acccgccggaatatcaccatggcagaagga

SEQ ID NO: 42952 - DNA, 30 bp, Artificial Sequence
  Synthetic oligonucleotide
tgatgcctgaaaagtcatagggaataagga

SEQ ID NO: 42953 - DNA, 30 bp, Artificial Sequence
  Synthetic oligonucleotide
caagatgggacgacctgtacaaggtaagga

SEQ ID NO: 42954 - DNA, 30 bp, Artificial Sequence
  Synthetic oligonucleotide
tcagaaaatgtagtcaagcttccaacagga

SEQ ID NO: 42955 - DNA, 30 bp, Artificial Sequence
  Synthetic oligonucleotide
tcgtcggaactaggaaatatctcaacagga

SEQ ID NO: 42956 - DNA, 30 bp, Artificial Sequence
  Synthetic oligonucleotide
agcaacggtagtctggaagtttgaccagga

SEQ ID NO: 42957 - DNA, 30 bp, Artificial Sequence
  Synthetic oligonucleotide
catacatgagggtcgctcaagtcatcagga

SEQ ID NO: 42958 - DNA, 30 bp, Artificial Sequence
  Synthetic oligonucleotide
gatactacgtcgaatcgagaggaaagagga

SEQ ID NO: 42959 - DNA, 30 bp, Artificial Sequence
  Synthetic oligonucleotide
taagaatgtcgtaaagaatgggttagagga

SEQ ID NO: 42960 - DNA, 30 bp, Artificial Sequence
  Synthetic oligonucleotide
cgaagattattgtgaagctaaaaacgagga

SEQ ID NO: 42961 - DNA, 30 bp, Artificial Sequence
  Synthetic oligonucleotide
tacgcggggggcttatccacgagtggagga

SEQ ID NO: 42962 - DNA, 30 bp, Artificial Sequence
  Synthetic oligonucleotide
taagtagaccgtccggtagcggggtgagga

SEQ ID NO: 42963 - DNA, 30 bp, Artificial Sequence
  Synthetic oligonucleotide
tggatcctgaagaatcaactccggctagga

SEQ ID NO: 42964 - DNA, 30 bp, Artificial Sequence
  Synthetic oligonucleotide
agggtgcattcactaagggagcgagtagga

SEQ ID NO: 42965 - DNA, 30 bp, Artificial Sequence
  Synthetic oligonucleotide
ccctccgcaggaattaaaaagaatgtagga

SEQ ID NO: 42966 - DNA, 30 bp, Artificial Sequence
  Synthetic oligonucleotide
acgcgtacattgacggccgtgaataacgga

SEQ ID NO: 42967 - DNA, 30 bp, Artificial Sequence
  Synthetic oligonucleotide
gccaaacgatgggcggtcggtaagtacgga

SEQ ID NO: 42968 - DNA, 30 bp, Artificial Sequence
  Synthetic oligonucleotide
ttatggtaaagggagtcacatacaaccgga

SEQ ID NO: 42969 - DNA, 30 bp, Artificial Sequence
  Synthetic oligonucleotide
tgaaatgcgtaagcctgacttagaagcgga

SEQ ID NO: 42970 - DNA, 30 bp, Artificial Sequence
  Synthetic oligonucleotide
gcagatgcggaagagtcggaaaagggcgga

SEQ ID NO: 42971 - DNA, 30 bp, Artificial Sequence
  Synthetic oligonucleotide
gaaagaccccagacagggctaaagtgcgga

SEQ ID NO: 42972 - DNA, 30 bp, Artificial Sequence
  Synthetic oligonucleotide
acccaagagcgggtatggagtaaagtcgga

SEQ ID NO: 42973 - DNA, 30 bp, Artificial Sequence
  Synthetic oligonucleotide
aggagctggccaaacgtaattcggttcgga

SEQ ID NO: 42974 - DNA, 30 bp, Artificial Sequence
  Synthetic oligonucleotide
cgggtgttatctgcggagaagaaaaaggga

SEQ ID NO: 42975 - DNA, 30 bp, Artificial Sequence
  Synthetic oligonucleotide
ccttagcaagtaatgtggtcgtacaaggga

SEQ ID NO: 42976 - DNA, 30 bp, Artificial Sequence
  Synthetic oligonucleotide
ggctgtgcaaaaagcgcgtttgcgaaggga

SEQ ID NO: 42977 - DNA, 30 bp, Artificial Sequence
  Synthetic oligonucleotide
cgaccagttaggggacaataaacccaggga

SEQ ID NO: 42978 - DNA, 30 bp, Artificial Sequence
  Synthetic oligonucleotide
cgtacctattcaaggaaatgggcccaggga

SEQ ID NO: 42979 - DNA, 30 bp, Artificial Sequence
  Synthetic oligonucleotide
agcaatgacttagcaaagacagtgcaggga

SEQ ID NO: 42980 - DNA, 30 bp, Artificial Sequence
  Synthetic oligonucleotide
gcagcgtataagtagaagccgcatcaggga

SEQ ID NO: 42981 - DNA, 30 bp, Artificial Sequence
  Synthetic oligonucleotide
ttaccggatgtcatcggtttcgaggaggga

SEQ ID NO: 42982 - DNA, 30 bp, Artificial Sequence
  Synthetic oligonucleotide
tcatactcactcgccaatacaatggaggga

SEQ ID NO: 42983 - DNA, 30 bp, Artificial Sequence
  Synthetic oligonucleotide
catggcgggacactaagaaatactgaggga

SEQ ID NO: 42984 - DNA, 30 bp, Artificial Sequence
  Synthetic oligonucleotide
acggagaaagttacagaaaccttcacggga

SEQ ID NO: 42985 - DNA, 30 bp, Artificial Sequence
  Synthetic oligonucleotide
ccgagcaaggtcggacagagaagaccggga

SEQ ID NO: 42986 - DNA, 30 bp, Artificial Sequence
  Synthetic oligonucleotide
caggcgcaactactcattaggggtgcggga

SEQ ID NO: 42987 - DNA, 30 bp, Artificial Sequence
  Synthetic oligonucleotide
aagggcaaagtggcgacgtgcggttcggga

SEQ ID NO: 42988 - DNA, 30 bp, Artificial Sequence
  Synthetic oligonucleotide
ctaggacagcttcagcttcaatctagggga

SEQ ID NO: 42989 - DNA, 30 bp, Artificial Sequence
  Synthetic oligonucleotide
ttaacagggaaaattatgaccgtacgggga

SEQ ID NO: 42990 - DNA, 30 bp, Artificial Sequence
  Synthetic oligonucleotide
tgcgaccaagtgacccaggtctgccgggga

SEQ ID NO: 42991 - DNA, 30 bp, Artificial Sequence
  Synthetic oligonucleotide
tggtacgaatcgtacacggaagggcgggga

SEQ ID NO: 42992 - DNA, 30 bp, Artificial Sequence
  Synthetic oligonucleotide
ccgcgtgttccgggtcaaaaagcaggggga

SEQ ID NO: 42993 - DNA, 30 bp, Artificial Sequence
  Synthetic oligonucleotide
agtcttagatagaccgaaaagctaggggga

SEQ ID NO: 42994 - DNA, 30 bp, Artificial Sequence
  Synthetic oligonucleotide
aactgaccgccagaatatggagggggggga

SEQ ID NO: 42995 - DNA, 30 bp, Artificial Sequence
  Synthetic oligonucleotide
actgacaacaggcttacggctcacatggga

SEQ ID NO: 42996 - DNA, 30 bp, Artificial Sequence
  Synthetic oligonucleotide
agaaacaaggattgaaacgtccggatggga

SEQ ID NO: 42997 - DNA, 30 bp, Artificial Sequence
  Synthetic oligonucleotide
cgtgagaatggtgaggaacggctgatggga

SEQ ID NO: 42998 - DNA, 30 bp, Artificial Sequence
  Synthetic oligonucleotide
ggatgaagttgaagtggtacacgattggga

SEQ ID NO: 42999 - DNA, 30 bp, Artificial Sequence
  Synthetic oligonucleotide
gcgtgcttaacggatcgactacagttggga

SEQ ID NO: 43000 - DNA, 30 bp, Artificial Sequence
  Synthetic oligonucleotide
tagccaggaagaaaaggacgtgttttggga

SEQ ID NO: 43001 - DNA, 30 bp, Artificial Sequence
  Synthetic oligonucleotide
cggagggttgccggtagtcttaaccatgga

SEQ ID NO: 43002 - DNA, 30 bp, Artificial Sequence
  Synthetic oligonucleotide
catcgatcagagttagaagaatgagatgga

SEQ ID NO: 43003 - DNA, 30 bp, Artificial Sequence
  Synthetic oligonucleotide
agccaactaagcacattgagtacgtatgga

SEQ ID NO: 43004 - DNA, 30 bp, Artificial Sequence
  Synthetic oligonucleotide
aaaaaagtagtcgcatcaaataacactgga

SEQ ID NO: 43005 - DNA, 30 bp, Artificial Sequence
  Synthetic oligonucleotide
tctggaagcggataaagccaatcctctgga

SEQ ID NO: 43006 - DNA, 30 bp, Artificial Sequence
  Synthetic oligonucleotide
tcaacaatggatccggcacatataagtgga

SEQ ID NO: 43007 - DNA, 30 bp, Artificial Sequence
  Synthetic oligonucleotide
tgaagcgaactagactgggatccttgtgga

SEQ ID NO: 43008 - DNA, 30 bp, Artificial Sequence
  Synthetic oligonucleotide
atgggagtatataggcaaaatgtcattgga

SEQ ID NO: 43009 - DNA, 30 bp, Artificial Sequence
  Synthetic oligonucleotide
taggcggggacaatgtagttataggttgga

SEQ ID NO: 43010 - DNA, 30 bp, Artificial Sequence
  Synthetic oligonucleotide
cacgcgaccgaccattcgttctcctaatga

SEQ ID NO: 43011 - DNA, 31 bp, Artificial Sequence
  Synthetic oligonucleotide
atcaagcatctgaggtaatgaactgacatga

SEQ ID NO: 43012 - DNA, 30 bp, Artificial Sequence
  Synthetic oligonucleotide
gataggtggcgtcgggtatggctcgcatga

SEQ ID NO: 43013 - DNA, 30 bp, Artificial Sequence
  Synthetic oligonucleotide
cctaatctccaaaacatgctcgagcgatga

SEQ ID NO: 43014 - DNA, 30 bp, Artificial Sequence
  Synthetic oligonucleotide
ctgaaatcggtcacaggaagcgtgcgatga

SEQ ID NO: 43015 - DNA, 30 bp, Artificial Sequence
  Synthetic oligonucleotide
ggagcaaatttagcttgcgggaaaggatga

SEQ ID NO: 43016 - DNA, 30 bp, Artificial Sequence
  Synthetic oligonucleotide
cacgcataggatgatactgaagctggatga

SEQ ID NO: 43017 - DNA, 30 bp, Artificial Sequence
  Synthetic oligonucleotide
cgaggcctaaaggaaggtcttaaatgatga

SEQ ID NO: 43018 - DNA, 30 bp, Artificial Sequence
  Synthetic oligonucleotide
cgatgcccaagctcaccttgaccgtgatga

SEQ ID NO: 43019 - DNA, 30 bp, Artificial Sequence
  Synthetic oligonucleotide
tacacacaagaccacatactaaggtgatga

SEQ ID NO: 43020 - DNA, 30 bp, Artificial Sequence
  Synthetic oligonucleotide
cgaaaaggatagcaagatgtagtcctatga

SEQ ID NO: 43021 - DNA, 30 bp, Artificial Sequence
  Synthetic oligonucleotide
gtgatactggaaacaggacttcagctatga

SEQ ID NO: 43022 - DNA, 30 bp, Artificial Sequence
  Synthetic oligonucleotide
ccgggaaatcatcagacagcgcggctatga

SEQ ID NO: 43023 - DNA, 30 bp, Artificial Sequence
  Synthetic oligonucleotide
aggaactaaggactcgacgtataggtatga

SEQ ID NO: 43024 - DNA, 30 bp, Artificial Sequence
  Synthetic oligonucleotide
tcgataccaaatgttccataactattatga

SEQ ID NO: 43025 - DNA, 30 bp, Artificial Sequence
  Synthetic oligonucleotide
actataaaattgagaagaacgaatttatga

SEQ ID NO: 43026 - DNA, 30 bp, Artificial Sequence
  Synthetic oligonucleotide
ggcagctaaggacaacacaggaacgactga

SEQ ID NO: 43027 - DNA, 30 bp, Artificial Sequence
  Synthetic oligonucleotide
ggaccgacttacagacgattaattgcctga

SEQ ID NO: 43028 - DNA, 30 bp, Artificial Sequence
  Synthetic oligonucleotide
gtaaggtcaaatccgagtcttggaagctga

SEQ ID NO: 43029 - DNA, 30 bp, Artificial Sequence
  Synthetic oligonucleotide
tagcgcgtggacaagaaaaagcacagctga

SEQ ID NO: 43030 - DNA, 30 bp, Artificial Sequence
  Synthetic oligonucleotide
gacctgagaacgacgtaatggactagctga

SEQ ID NO: 43031 - DNA, 30 bp, Artificial Sequence
  Synthetic oligonucleotide
caagcgaatgcatataacggtgctggctga

SEQ ID NO: 43032 - DNA, 30 bp, Artificial Sequence
  Synthetic oligonucleotide
ttacataaatccgaactgatcccatgctga

SEQ ID NO: 43033 - DNA, 30 bp, Artificial Sequence
  Synthetic oligonucleotide
cacgtgtagcgtggtgagacagtcctctga

SEQ ID NO: 43034 - DNA, 30 bp, Artificial Sequence
  Synthetic oligonucleotide
ggcaaggccagagatatataacctttctga

SEQ ID NO: 43035 - DNA, 30 bp, Artificial Sequence
  Synthetic oligonucleotide
gcgcgagatagtcccctgagtgtcaagtga

SEQ ID NO: 43036 - DNA, 30 bp, Artificial Sequence
  Synthetic oligonucleotide
accatggagacccactcgcggagacagtga

SEQ ID NO: 43037 - DNA, 30 bp, Artificial Sequence
  Synthetic oligonucleotide
cgagaggaggtcactcgatttgcgcagtga

SEQ ID NO: 43038 - DNA, 30 bp, Artificial Sequence
  Synthetic oligonucleotide
cttataggagggcgcgtggtcagtcagtga

SEQ ID NO: 43039 - DNA, 30 bp, Artificial Sequence
  Synthetic oligonucleotide
gggcacggccatttcaaactgttaacgtga

SEQ ID NO: 43040 - DNA, 30 bp, Artificial Sequence
  Synthetic oligonucleotide
agtaaagactacgtttgctaggggacgtga

SEQ ID NO: 43041 - DNA, 30 bp, Artificial Sequence
  Synthetic oligonucleotide
ccggacaacgggaaaaccgctcctacgtga

SEQ ID NO: 43042 - DNA, 30 bp, Artificial Sequence
  Synthetic oligonucleotide
tcgggaataaaggcactccgagccccgtga

SEQ ID NO: 43043 - DNA, 30 bp, Artificial Sequence
  Synthetic oligonucleotide
tcttggctctgaaggatatcaacgccgtga

SEQ ID NO: 43044 - DNA, 30 bp, Artificial Sequence
  Synthetic oligonucleotide
ggagcgagtagttactagcctcagtcgtga

SEQ ID NO: 43045 - DNA, 30 bp, Artificial Sequence
  Synthetic oligonucleotide
gtgaaaaatgtatggcgacccgattcgtga

SEQ ID NO: 43046 - DNA, 30 bp, Artificial Sequence
  Synthetic oligonucleotide
ccttggcacagagggaacaccaataggtga

SEQ ID NO: 43047 - DNA, 30 bp, Artificial Sequence
  Synthetic oligonucleotide
ggagatggaccatcataaccacaacggtga

SEQ ID NO: 43048 - DNA, 30 bp, Artificial Sequence
  Synthetic oligonucleotide
taagcggtagtagaaacacggtttcggtga

SEQ ID NO: 43049 - DNA, 30 bp, Artificial Sequence
  Synthetic oligonucleotide
aagaccgagttacgaaccgacaaagggtga

SEQ ID NO: 43050 - DNA, 30 bp, Artificial Sequence
  Synthetic oligonucleotide
taacgataagttccaagagagtgtgggtga

SEQ ID NO: 43051 - DNA, 30 bp, Artificial Sequence
  Synthetic oligonucleotide
agggatggtaagcgagctgattttatgtga

SEQ ID NO: 43052 - DNA, 30 bp, Artificial Sequence
  Synthetic oligonucleotide
tcgaatgtaaaaagggacataagcctgtga

SEQ ID NO: 43053 - DNA, 30 bp, Artificial Sequence
  Synthetic oligonucleotide
agatagcccataaattacgaatttgtgtga

SEQ ID NO: 43054 - DNA, 30 bp, Artificial Sequence
  Synthetic oligonucleotide
agtcgggagagctgtggaatgcgccattga

SEQ ID NO: 43055 - DNA, 30 bp, Artificial Sequence
  Synthetic oligonucleotide
acgcgttttagaactataaggaaggcttga

SEQ ID NO: 43056 - DNA, 30 bp, Artificial Sequence
  Synthetic oligonucleotide
acgggtcaaaaaagggcgattccggcttga

SEQ ID NO: 43057 - DNA, 30 bp, Artificial Sequence
  Synthetic oligonucleotide
taggaaaccggacgcgtgattcgaagttga

SEQ ID NO: 43058 - DNA, 30 bp, Artificial Sequence
  Synthetic oligonucleotide
aagtcagggaagtgagagagcaccggttga

SEQ ID NO: 43059 - DNA, 30 bp, Artificial Sequence
  Synthetic oligonucleotide
ataaggcacgacaagcgagacgcatgttga

SEQ ID NO: 43060 - DNA, 30 bp, Artificial Sequence
  Synthetic oligonucleotide
ggagcgggtggccatgtagtgcacatttga

SEQ ID NO: 43061 - DNA, 30 bp, Artificial Sequence
  Synthetic oligonucleotide
actggaaaaagtcaaacacgatgtatttga

SEQ ID NO: 43062 - DNA, 30 bp, Artificial Sequence
  Synthetic oligonucleotide
ccagaaggggaggcgataaaacttgtttga

SEQ ID NO: 43063 - DNA, 30 bp, Artificial Sequence
  Synthetic oligonucleotide
tcgcaacgccgtcatcccaccgcccaaata

SEQ ID NO: 43064 - DNA, 30 bp, Artificial Sequence
  Synthetic oligonucleotide
ctgcggaagtagggcaacagagtgcaaata

SEQ ID NO: 43065 - DNA, 30 bp, Artificial Sequence
  Synthetic oligonucleotide
cggataggtggttgtctccagaccgaaata

SEQ ID NO: 43066 - DNA, 30 bp, Artificial Sequence
  Synthetic oligonucleotide
tcgcatcgagaataagacgatggggaaata

SEQ ID NO: 43067 - DNA, 30 bp, Artificial Sequence
  Synthetic oligonucleotide
gaggcatcacgtgcgttgcgatagacaata

SEQ ID NO: 43068 - DNA, 30 bp, Artificial Sequence
  Synthetic oligonucleotide
gtaggagggaggaataatacgacagcaata

SEQ ID NO: 43069 - DNA, 29 bp, Artificial Sequence
  Synthetic oligonucleotide
catgacttcaggagacacacagcgcaata

SEQ ID NO: 43070 - DNA, 30 bp, Artificial Sequence
  Synthetic oligonucleotide
gcagcgacgtggctgtaaaaatcggcaata

SEQ ID NO: 43071 - DNA, 30 bp, Artificial Sequence
  Synthetic oligonucleotide
aggcgttgaggtgtgtgttagtactcaata

SEQ ID NO: 43072 - DNA, 30 bp, Artificial Sequence
  Synthetic oligonucleotide
caatcggtgtgtgtcaattcgaggagaata

SEQ ID NO: 43073 - DNA, 30 bp, Artificial Sequence
  Synthetic oligonucleotide
gccatggatgggggcagacaagtgagaata

SEQ ID NO: 43074 - DNA, 30 bp, Artificial Sequence
  Synthetic oligonucleotide
gggtaggaggccgactttagcattagaata

SEQ ID NO: 43075 - DNA, 30 bp, Artificial Sequence
  Synthetic oligonucleotide
ccggcagtagtaaaaccagatcttagaata

SEQ ID NO: 43076 - DNA, 30 bp, Artificial Sequence
  Synthetic oligonucleotide
gcgaccttcagcggtagggataaatgaata

SEQ ID NO: 43077 - DNA, 30 bp, Artificial Sequence
  Synthetic oligonucleotide
ctgtgaggggtaccgttgaatcaaataata

SEQ ID NO: 43078 - DNA, 30 bp, Artificial Sequence
  Synthetic oligonucleotide
aagcgaagggtgagcgccttagccataata

SEQ ID NO: 43079 - DNA, 30 bp, Artificial Sequence
  Synthetic oligonucleotide
ctaaacgcagaagagagacccattttaata

SEQ ID NO: 43080 - DNA, 30 bp, Artificial Sequence
  Synthetic oligonucleotide
ggtcgggatctctaaatcagcgaaaacata

SEQ ID NO: 43081 - DNA, 30 bp, Artificial Sequence
  Synthetic oligonucleotide
gggccagttacgagatcgaaataacacata

SEQ ID NO: 43082 - DNA, 30 bp, Artificial Sequence
  Synthetic oligonucleotide
tcgggagctagccgttatttggaagacata

SEQ ID NO: 43083 - DNA, 30 bp, Artificial Sequence
  Synthetic oligonucleotide
cacaaaatccgtaaagcgaggctcaccata

SEQ ID NO: 43084 - DNA, 30 bp, Artificial Sequence
  Synthetic oligonucleotide
acaacgtagagtgctcatagtaggaccata

SEQ ID NO: 43085 - DNA, 30 bp, Artificial Sequence
  Synthetic oligonucleotide
acctcccgagcctaaatataaggcagcata

SEQ ID NO: 43086 - DNA, 30 bp, Artificial Sequence
  Synthetic oligonucleotide
taacacccatccacttaaagagcaggcata

SEQ ID NO: 43087 - DNA, 30 bp, Artificial Sequence
  Synthetic oligonucleotide
gtgttaagcagaatggaatcgaccatcata

SEQ ID NO: 43088 - DNA, 30 bp, Artificial Sequence
  Synthetic oligonucleotide
acgcaatgagttgaaacgcgccacgtcata

SEQ ID NO: 43089 - DNA, 30 bp, Artificial Sequence
  Synthetic oligonucleotide
gcgagaacaatagccgtaagccgtttcata

SEQ ID NO: 43090 - DNA, 30 bp, Artificial Sequence
  Synthetic oligonucleotide
aacgtcgaaggataatgacgaccacagata

SEQ ID NO: 43091 - DNA, 30 bp, Artificial Sequence
  Synthetic oligonucleotide
aggtgggatagtgcactggaacggcagata

SEQ ID NO: 43092 - DNA, 30 bp, Artificial Sequence
  Synthetic oligonucleotide
cggagctgcacagagttgtgccggcagata

SEQ ID NO: 43093 - DNA, 30 bp, Artificial Sequence
  Synthetic oligonucleotide
tgagacgttcacagagtgttttgggagata

SEQ ID NO: 43094 - DNA, 30 bp, Artificial Sequence
  Synthetic oligonucleotide
gtacgagggcattgggtggataaatagata

SEQ ID NO: 43095 - DNA, 30 bp, Artificial Sequence
  Synthetic oligonucleotide
cacgggatgttattatccataaacacgata

SEQ ID NO: 43096 - DNA, 30 bp, Artificial Sequence
  Synthetic oligonucleotide
aagagaaatgggggagaatcgcgcacgata

SEQ ID NO: 43097 - DNA, 30 bp, Artificial Sequence
  Synthetic oligonucleotide
cgtcgtccgtgcgagggtcccggcgcgata

SEQ ID NO: 43098 - DNA, 30 bp, Artificial Sequence
  Synthetic oligonucleotide
cggcttcagtctaaaattatacaatcgata

SEQ ID NO: 43099 - DNA, 30 bp, Artificial Sequence
  Synthetic oligonucleotide
tatagcggcacggcccaatccgaatcgata

SEQ ID NO: 43100 - DNA, 30 bp, Artificial Sequence
  Synthetic oligonucleotide
caggcctgcaggtgacgacgtttgaggata

SEQ ID NO: 43101 - DNA, 30 bp, Artificial Sequence
  Synthetic oligonucleotide
tctgcgctggctgaccaaggacaagtgata

SEQ ID NO: 43102 - DNA, 30 bp, Artificial Sequence
  Synthetic oligonucleotide
ccagagggtcatggtaatagtgtgttgata

SEQ ID NO: 43103 - DNA, 30 bp, Artificial Sequence
  Synthetic oligonucleotide
cacatcaagcgcgaggggtcgggaaatata

SEQ ID NO: 43104 - DNA, 30 bp, Artificial Sequence
  Synthetic oligonucleotide
ggaaaccaaggtctccaagaataagctata

SEQ ID NO: 43105 - DNA, 30 bp, Artificial Sequence
  Synthetic oligonucleotide
aggggaagcagctgttagtatctaggtata

SEQ ID NO: 43106 - DNA, 30 bp, Artificial Sequence
  Synthetic oligonucleotide
tcgagccgaagctaaacgtatgctattata

SEQ ID NO: 43107 - DNA, 30 bp, Artificial Sequence
  Synthetic oligonucleotide
gagaatacttaacgacatgagtgacttata

SEQ ID NO: 43108 - DNA, 30 bp, Artificial Sequence
  Synthetic oligonucleotide
tcgggcactgagtgaaagagtctagttata

SEQ ID NO: 43109 - DNA, 30 bp, Artificial Sequence
  Synthetic oligonucleotide
cgcgtgcacaggggactcggagtggttata

SEQ ID NO: 43110 - DNA, 30 bp, Artificial Sequence
  Synthetic oligonucleotide
taggcaggtcggcaatgcggcaggaaacta

SEQ ID NO: 43111 - DNA, 30 bp, Artificial Sequence
  Synthetic oligonucleotide
gcgacaatattatggcggctacctaaacta

SEQ ID NO: 43112 - DNA, 30 bp, Artificial Sequence
  Synthetic oligonucleotide
atcgagagtcgaatctgccctcatcaacta

SEQ ID NO: 43113 - DNA, 30 bp, Artificial Sequence
  Synthetic oligonucleotide
atagagggggtggggccaataaagacacta

SEQ ID NO: 43114 - DNA, 30 bp, Artificial Sequence
  Synthetic oligonucleotide
tgacggcctaaaaaacgcggtagtccacta

SEQ ID NO: 43115 - DNA, 30 bp, Artificial Sequence
  Synthetic oligonucleotide
acacttacgtgataagaaggggtagcacta

SEQ ID NO: 43116 - DNA, 30 bp, Artificial Sequence
  Synthetic oligonucleotide
agggacgacttaccaggtcacatatcacta

SEQ ID NO: 43117 - DNA, 30 bp, Artificial Sequence
  Synthetic oligonucleotide
agcgtaaatcatgtgacatcggcctcacta

SEQ ID NO: 43118 - DNA, 30 bp, Artificial Sequence
  Synthetic oligonucleotide
acggcaggatgggtgaaggcacagcgacta

SEQ ID NO: 43119 - DNA, 30 bp, Artificial Sequence
  Synthetic oligonucleotide
cggcagacttccggtcaggcatgtcgacta

SEQ ID NO: 43120 - DNA, 30 bp, Artificial Sequence
  Synthetic oligonucleotide
aaacgggtcgcgggcccgataaagctacta

SEQ ID NO: 43121 - DNA, 30 bp, Artificial Sequence
  Synthetic oligonucleotide
atgttatgaagagtgggggacaatctacta

SEQ ID NO: 43122 - DNA, 30 bp, Artificial Sequence
  Synthetic oligonucleotide
cgtgtgtgggaaagggtaaagtcgcaccta

SEQ ID NO: 43123 - DNA, 30 bp, Artificial Sequence
  Synthetic oligonucleotide
tcggaataagctgtcgactactcttaccta

SEQ ID NO: 43124 - DNA, 30 bp, Artificial Sequence
  Synthetic oligonucleotide
tacgtcgtcgggcaaacctggggagtccta

SEQ ID NO: 43125 - DNA, 30 bp, Artificial Sequence
  Synthetic oligonucleotide
ccagagccgtcatcaaatgaatagaagcta

SEQ ID NO: 43126 - DNA, 30 bp, Artificial Sequence
  Synthetic oligonucleotide
gggatgaggaaatagatcacgggctagcta

SEQ ID NO: 43127 - DNA, 30 bp, Artificial Sequence
  Synthetic oligonucleotide
ggaagtgctgttaaagcaaagacaacgcta

SEQ ID NO: 43128 - DNA, 30 bp, Artificial Sequence
  Synthetic oligonucleotide
aacacgggataacacgtgcgaagatcgcta

SEQ ID NO: 43129 - DNA, 30 bp, Artificial Sequence
  Synthetic oligonucleotide
cgtcgtggagggatcattgtataatggcta

SEQ ID NO: 43130 - DNA, 30 bp, Artificial Sequence
  Synthetic oligonucleotide
aggactaaccccgagttactcatcatgcta

SEQ ID NO: 43131 - DNA, 30 bp, Artificial Sequence
  Synthetic oligonucleotide
gcagaggggagattataaacagcgatgcta

SEQ ID NO: 43132 - DNA, 30 bp, Artificial Sequence
  Synthetic oligonucleotide
gcgataggcaaaggtataggtgaactgcta

SEQ ID NO: 43133 - DNA, 30 bp, Artificial Sequence
  Synthetic oligonucleotide
catggcatggaacaagggctagtactgcta

SEQ ID NO: 43134 - DNA, 30 bp, Artificial Sequence
  Synthetic oligonucleotide
gcacccatgtaaattaaaaatccgctgcta

SEQ ID NO: 43135 - DNA, 30 bp, Artificial Sequence
  Synthetic oligonucleotide
cgaaagatcaaagctcagagcggcttgcta

SEQ ID NO: 43136 - DNA, 30 bp, Artificial Sequence
  Synthetic oligonucleotide
aacgcgccgtcaaaaatgtatggaaatcta

SEQ ID NO: 43137 - DNA, 30 bp, Artificial Sequence
  Synthetic oligonucleotide
gtgccggtgaaagcgaatgtaaaccatcta

SEQ ID NO: 43138 - DNA, 30 bp, Artificial Sequence
  Synthetic oligonucleotide
aggctgtaaagtactgagaaccaagatcta

SEQ ID NO: 43139 - DNA, 30 bp, Artificial Sequence
  Synthetic oligonucleotide
ttagaagaaggccatgagttcatagatcta

SEQ ID NO: 43140 - DNA, 30 bp, Artificial Sequence
  Synthetic oligonucleotide
agaggagggatgccgcaccggttagatcta

SEQ ID NO: 43141 - DNA, 30 bp, Artificial Sequence
  Synthetic oligonucleotide
gcatgtcggactgaaggaatcaaatatcta

SEQ ID NO: 43142 - DNA, 30 bp, Artificial Sequence
  Synthetic oligonucleotide
aacggggaaatataaacccaaaaaactcta

SEQ ID NO: 43143 - DNA, 30 bp, Artificial Sequence
  Synthetic oligonucleotide
agacacacaaccgcggatcatgcatctcta

SEQ ID NO: 43144 - DNA, 30 bp, Artificial Sequence
  Synthetic oligonucleotide
ttgggcgtggaattggtgcaacgttgtcta

SEQ ID NO: 43145 - DNA, 30 bp, Artificial Sequence
  Synthetic oligonucleotide
atgtaacgagggtgcgcagagacgattcta

SEQ ID NO: 43146 - DNA, 30 bp, Artificial Sequence
  Synthetic oligonucleotide
cgcgtgtcgtagagggaccaagacaaagta

SEQ ID NO: 43147 - DNA, 30 bp, Artificial Sequence
  Synthetic oligonucleotide
gggattggaaatgtgatctggagcaaagta

SEQ ID NO: 43148 - DNA, 30 bp, Artificial Sequence
  Synthetic oligonucleotide
gtggcacttaatgccttatcggggaaagta

SEQ ID NO: 43149 - DNA, 30 bp, Artificial Sequence
  Synthetic oligonucleotide
agtaagtcccaaagggaggaaactgaagta

SEQ ID NO: 43150 - DNA, 30 bp, Artificial Sequence
  Synthetic oligonucleotide
acccattaggacacctaagaagcaacagta

SEQ ID NO: 43151 - DNA, 30 bp, Artificial Sequence
  Synthetic oligonucleotide
ccttgattccaactcgtgaaaaggacagta

SEQ ID NO: 43152 - DNA, 30 bp, Artificial Sequence
  Synthetic oligonucleotide
aggatagcaggattgtgaaccggtacagta

SEQ ID NO: 43153 - DNA, 30 bp, Artificial Sequence
  Synthetic oligonucleotide
accgtttggccatcgaagacatgagcagta

SEQ ID NO: 43154 - DNA, 30 bp, Artificial Sequence
  Synthetic oligonucleotide
cggattgcgacttaaaggatttatgcagta

SEQ ID NO: 43155 - DNA, 30 bp, Artificial Sequence
  Synthetic oligonucleotide
cataaggtgggcttaagggcgggatcagta

SEQ ID NO: 43156 - DNA, 30 bp, Artificial Sequence
  Synthetic oligonucleotide
cagtcatggaagatgccgtttcgaagagta

SEQ ID NO: 43157 - DNA, 30 bp, Artificial Sequence
  Synthetic oligonucleotide
cagttgggagctggtattaggggaagagta

SEQ ID NO: 43158 - DNA, 30 bp, Artificial Sequence
  Synthetic oligonucleotide
tgtctgcacaccaataagtatagccgagta

SEQ ID NO: 43159 - DNA, 30 bp, Artificial Sequence
  Synthetic oligonucleotide
gcatgtcccagagacatgacacgccgagta

SEQ ID NO: 43160 - DNA, 30 bp, Artificial Sequence
  Synthetic oligonucleotide
aggcgttacggaagtgagtaaaagcgagta

SEQ ID NO: 43161 - DNA, 30 bp, Artificial Sequence
  Synthetic oligonucleotide
caatcaaaagaatcacgcagtaagcgagta

SEQ ID NO: 43162 - DNA, 30 bp, Artificial Sequence
  Synthetic oligonucleotide
gggtgtatgaagagttgtcacgtgcgagta

SEQ ID NO: 43163 - DNA, 30 bp, Artificial Sequence
  Synthetic oligonucleotide
atgactaacactgagggtaagtgtcgagta

SEQ ID NO: 43164 - DNA, 30 bp, Artificial Sequence
  Synthetic oligonucleotide
tcggcgtgtctggagtatgcgtggggagta

SEQ ID NO: 43165 - DNA, 30 bp, Artificial Sequence
  Synthetic oligonucleotide
catcgacatagctgataaaacattggagta

SEQ ID NO: 43166 - DNA, 30 bp, Artificial Sequence
  Synthetic oligonucleotide
tgaacccctgctatagcacagaaatgagta

SEQ ID NO: 43167 - DNA, 30 bp, Artificial Sequence
  Synthetic oligonucleotide
tggacgtgaagaacggagtaagcctgagta

SEQ ID NO: 43168 - DNA, 30 bp, Artificial Sequence
  Synthetic oligonucleotide
actgatggggtcacaaccaagacttgagta

SEQ ID NO: 43169 - DNA, 30 bp, Artificial Sequence
  Synthetic oligonucleotide
tacaaagggacctggagccgattgctagta

SEQ ID NO: 43170 - DNA, 38 bp, Artificial Sequence
  Synthetic oligonucleotide
tcaatgcccctagaagcatagcgaatcacttgctagta

SEQ ID NO: 43171 - DNA, 30 bp, Artificial Sequence
  Synthetic oligonucleotide
aggatgcgcgtggttacgtctccagtagta

SEQ ID NO: 43172 - DNA, 30 bp, Artificial Sequence
  Synthetic oligonucleotide
cggcgagttataagaacgtacaaggtagta

SEQ ID NO: 43173 - DNA, 30 bp, Artificial Sequence
  Synthetic oligonucleotide
cagcgcgtggaacacaaacagcgggacgta

SEQ ID NO: 43174 - DNA, 30 bp, Artificial Sequence
  Synthetic oligonucleotide
cgaggcagttgaacagttttcatggacgta

SEQ ID NO: 43175 - DNA, 30 bp, Artificial Sequence
  Synthetic oligonucleotide
gcggggcaacacactttggtactctacgta

SEQ ID NO: 43176 - DNA, 30 bp, Artificial Sequence
  Synthetic oligonucleotide
ggagcgtgcaacgtgctcgtgaacgccgta

SEQ ID NO: 43177 - DNA, 30 bp, Artificial Sequence
  Synthetic oligonucleotide
ttaacgagtgataaacatatctaaagcgta

SEQ ID NO: 43178 - DNA, 30 bp, Artificial Sequence
  Synthetic oligonucleotide
ggcaagtcctttccatcgttatctcgcgta

SEQ ID NO: 43179 - DNA, 30 bp, Artificial Sequence
  Synthetic oligonucleotide
aggattcgtgagtagccataaaacggcgta

SEQ ID NO: 43180 - DNA, 30 bp, Artificial Sequence
  Synthetic oligonucleotide
aactggttaaaggcattagggagctgcgta

SEQ ID NO: 43181 - DNA, 30 bp, Artificial Sequence
  Synthetic oligonucleotide
cgggtcgtaggacgaatatgtgctatcgta

SEQ ID NO: 43182 - DNA, 30 bp, Artificial Sequence
  Synthetic oligonucleotide
cagcgaaattaagttgtcacagaggtcgta

SEQ ID NO: 43183 - DNA, 30 bp, Artificial Sequence
  Synthetic oligonucleotide
ctcaaagtcagggatgccgacacaaaggta

SEQ ID NO: 43184 - DNA, 30 bp, Artificial Sequence
  Synthetic oligonucleotide
cccgtaaggctaaggagtcagagtaaggta

SEQ ID NO: 43185 - DNA, 30 bp, Artificial Sequence
  Synthetic oligonucleotide
tagcgctactgaaagcatgggcgcgaggta

SEQ ID NO: 43186 - DNA, 30 bp, Artificial Sequence
  Synthetic oligonucleotide
agggcttggtattactctaagcaggaggta

SEQ ID NO: 43187 - DNA, 30 bp, Artificial Sequence
  Synthetic oligonucleotide
accaggtcgacattagtaagaatgtaggta

SEQ ID NO: 43188 - DNA, 30 bp, Artificial Sequence
  Synthetic oligonucleotide
caacaggggctgctcaggaaaaattgggta

SEQ ID NO: 43189 - DNA, 30 bp, Artificial Sequence
  Synthetic oligonucleotide
atgcaggaaagctgcacggaagctgtggta

SEQ ID NO: 43190 - DNA, 30 bp, Artificial Sequence
  Synthetic oligonucleotide
cggaatgacatctcccgggggcgtgtggta

SEQ ID NO: 43191 - DNA, 30 bp, Artificial Sequence
  Synthetic oligonucleotide
gagatcacgaggtccgccgactgcttggta

SEQ ID NO: 43192 - DNA, 30 bp, Artificial Sequence
  Synthetic oligonucleotide
gagagaatggaacgaagcgaggtaaatgta

SEQ ID NO: 43193 - DNA, 30 bp, Artificial Sequence
  Synthetic oligonucleotide
agacgctgtccgagacgcgaaaagaatgta

SEQ ID NO: 43194 - DNA, 30 bp, Artificial Sequence
  Synthetic oligonucleotide
cgactgactagtagatatgccatccatgta

SEQ ID NO: 43195 - DNA, 30 bp, Artificial Sequence
  Synthetic oligonucleotide
caaagccgaagaaaggtacacagcgatgta

SEQ ID NO: 43196 - DNA, 30 bp, Artificial Sequence
  Synthetic oligonucleotide
cgaggatggcagctacccgagtctgatgta

SEQ ID NO: 43197 - DNA, 30 bp, Artificial Sequence
  Synthetic oligonucleotide
gcggaggtcagaaggggaaaatcctctgta

SEQ ID NO: 43198 - DNA, 30 bp, Artificial Sequence
  Synthetic oligonucleotide
acgttgagttgctcaggaatggatagtgta

SEQ ID NO: 43199 - DNA, 30 bp, Artificial Sequence
  Synthetic oligonucleotide
agggaaaccattaacacatggtgccgtgta

SEQ ID NO: 43200 - DNA, 30 bp, Artificial Sequence
  Synthetic oligonucleotide
tgacacctgtgaataccagtagtgcgtgta

SEQ ID NO: 43201 - DNA, 30 bp, Artificial Sequence
  Synthetic oligonucleotide
ccatcggtagaggatgagagtgatggtgta

SEQ ID NO: 43202 - DNA, 30 bp, Artificial Sequence
  Synthetic oligonucleotide
cgtcagtcatctaaagtgacaaagtgtgta

SEQ ID NO: 43203 - DNA, 30 bp, Artificial Sequence
  Synthetic oligonucleotide
gctgaacgcaacagggtcgtggcgaaatta

SEQ ID NO: 43204 - DNA, 30 bp, Artificial Sequence
  Synthetic oligonucleotide
gcgccaaaacacaggcttagcacaacatta

SEQ ID NO: 43205 - DNA, 30 bp, Artificial Sequence
  Synthetic oligonucleotide
agccaattggaagtgtaacacagagcatta

SEQ ID NO: 43206 - DNA, 30 bp, Artificial Sequence
  Synthetic oligonucleotide
ttggggaaggtacgaaaggcttcaagatta

SEQ ID NO: 43207 - DNA, 30 bp, Artificial Sequence
  Synthetic oligonucleotide
cgggggtaagggcctgcctggttgatatta

SEQ ID NO: 43208 - DNA, 30 bp, Artificial Sequence
  Synthetic oligonucleotide
catcggcgagccgcggggtaaaacaactta

SEQ ID NO: 43209 - DNA, 30 bp, Artificial Sequence
  Synthetic oligonucleotide
ggaggaatccaaccgtgcgcggtccactta

SEQ ID NO: 43210 - DNA, 30 bp, Artificial Sequence
  Synthetic oligonucleotide
tcctagagtcgagcgggatcagtttactta

SEQ ID NO: 43211 - DNA, 30 bp, Artificial Sequence
  Synthetic oligonucleotide
cgtgaacgttcttggagggtaaggacctta

SEQ ID NO: 43212 - DNA, 30 bp, Artificial Sequence
  Synthetic oligonucleotide
cgtcagtgtgccaaaaccgagggcagctta

SEQ ID NO: 43213 - DNA, 30 bp, Artificial Sequence
  Synthetic oligonucleotide
gacgaagatgtcatcgaaaatgcgagctta

SEQ ID NO: 43214 - DNA, 30 bp, Artificial Sequence
  Synthetic oligonucleotide
tgacagtagcggtggaagtgggcatgctta

SEQ ID NO: 43215 - DNA, 30 bp, Artificial Sequence
  Synthetic oligonucleotide
gtgacccaacgtgattagtgaatgatctta

SEQ ID NO: 43216 - DNA, 30 bp, Artificial Sequence
  Synthetic oligonucleotide
caagctccaagggtgaactcagtactctta

SEQ ID NO: 43217 - DNA, 30 bp, Artificial Sequence
  Synthetic oligonucleotide
cggcatcccgcggaacaatcaggagagtta

SEQ ID NO: 43218 - DNA, 30 bp, Artificial Sequence
  Synthetic oligonucleotide
tgaaaggggcctaagcatcagatggagtta

SEQ ID NO: 43219 - DNA, 30 bp, Artificial Sequence
  Synthetic oligonucleotide
ctcacggagggaatggcgtcgagttagtta

SEQ ID NO: 43220 - DNA, 30 bp, Artificial Sequence
  Synthetic oligonucleotide
cggggacgatactccatgattggtccgtta

SEQ ID NO: 43221 - DNA, 30 bp, Artificial Sequence
  Synthetic oligonucleotide
tactaaatggcaccgaaaaaaactaggtta

SEQ ID NO: 43222 - DNA, 30 bp, Artificial Sequence
  Synthetic oligonucleotide
agcagatgtggaataggtatgcttaggtta

SEQ ID NO: 43223 - DNA, 30 bp, Artificial Sequence
  Synthetic oligonucleotide
gtgaaaagagttaatggagaaaggatgtta

SEQ ID NO: 43224 - DNA, 30 bp, Artificial Sequence
  Synthetic oligonucleotide
cgcgccgtggattatcgaactgcactgtta

SEQ ID NO: 43225 - DNA, 30 bp, Artificial Sequence
  Synthetic oligonucleotide
caaggaaacacacaattggtttgacattta

SEQ ID NO: 43226 - DNA, 30 bp, Artificial Sequence
  Synthetic oligonucleotide
ggggctgaatcgagcggtagttgaggttta

SEQ ID NO: 43227 - DNA, 30 bp, Artificial Sequence
  Synthetic oligonucleotide
aacaaaccaaacagctcgtaaaacaaaaac

SEQ ID NO: 43228 - DNA, 30 bp, Artificial Sequence
  Synthetic oligonucleotide
atagggtgggtaccagaagaggggcaaaac

SEQ ID NO: 43229 - DNA, 30 bp, Artificial Sequence
  Synthetic oligonucleotide
gtcacaaaccagcgtcagaaccctcaaaac

SEQ ID NO: 43230 - DNA, 30 bp, Artificial Sequence
  Synthetic oligonucleotide
acatcggtccagcttcaaagcctgacaaac

SEQ ID NO: 43231 - DNA, 30 bp, Artificial Sequence
  Synthetic oligonucleotide
cgacattttggaaagatcagacatacaaac

SEQ ID NO: 43232 - DNA, 30 bp, Artificial Sequence
  Synthetic oligonucleotide
agcagagagatactcatttcagtacgaaac

SEQ ID NO: 43233 - DNA, 30 bp, Artificial Sequence
  Synthetic oligonucleotide
ccttgtcggctaccaagttaggggcgaaac

SEQ ID NO: 43234 - DNA, 30 bp, Artificial Sequence
  Synthetic oligonucleotide
gggcatcgtgggccgtgagaagctcgaaac

SEQ ID NO: 43235 - DNA, 30 bp, Artificial Sequence
  Synthetic oligonucleotide
catggacctgacaacatgggggagctaaac

SEQ ID NO: 43236 - DNA, 30 bp, Artificial Sequence
  Synthetic oligonucleotide
gagcgaggaactatttccgtctaagtaaac

SEQ ID NO: 43237 - DNA, 30 bp, Artificial Sequence
  Synthetic oligonucleotide
ccatctcaagtaaatgatgaccgtgtaaac

SEQ ID NO: 43238 - DNA, 30 bp, Artificial Sequence
  Synthetic oligonucleotide
ccggggactcaaatttagcagcaattaaac

SEQ ID NO: 43239 - DNA, 30 bp, Artificial Sequence
  Synthetic oligonucleotide
caactctagattgaacataagtaacacaac

SEQ ID NO: 43240 - DNA, 30 bp, Artificial Sequence
  Synthetic oligonucleotide
agagccattgccactcaggataggtacaac

SEQ ID NO: 43241 - DNA, 30 bp, Artificial Sequence
  Synthetic oligonucleotide
acacaggggacacgcacgccccattccaac

SEQ ID NO: 43242 - DNA, 30 bp, Artificial Sequence
  Synthetic oligonucleotide
gagagcatgccgaagtaactgggaagcaac

SEQ ID NO: 43243 - DNA, 30 bp, Artificial Sequence
  Synthetic oligonucleotide
agtaatgttcacccccatacacagcgcaac

SEQ ID NO: 43244 - DNA, 30 bp, Artificial Sequence
  Synthetic oligonucleotide
aaacgggcggagccaacacaatgagtcaac

SEQ ID NO: 43245 - DNA, 30 bp, Artificial Sequence
  Synthetic oligonucleotide
gggagaattggtcatgaaactcccgtcaac

SEQ ID NO: 43246 - DNA, 31 bp, Artificial Sequence
  Synthetic oligonucleotide
gtagatacgacgtaaatcgaacatcttcaac

SEQ ID NO: 43247 - DNA, 30 bp, Artificial Sequence
  Synthetic oligonucleotide
gggacgatgggtggttcaattcaggagaac

SEQ ID NO: 43248 - DNA, 30 bp, Artificial Sequence
  Synthetic oligonucleotide
aagacataactagagtctggttcctagaac

SEQ ID NO: 43249 - DNA, 30 bp, Artificial Sequence
  Synthetic oligonucleotide
atacggggccacgtgaagtaacttacgaac

SEQ ID NO: 43250 - DNA, 30 bp, Artificial Sequence
  Synthetic oligonucleotide
ccaccaacaaaggggaataagaaagcgaac

SEQ ID NO: 43251 - DNA, 30 bp, Artificial Sequence
  Synthetic oligonucleotide
attgtgtagttggactgaccggaagggaac

SEQ ID NO: 43252 - DNA, 30 bp, Artificial Sequence
  Synthetic oligonucleotide
cgtgtagatgatgagcaaacgcgggggaac

SEQ ID NO: 43253 - DNA, 30 bp, Artificial Sequence
  Synthetic oligonucleotide
acggaggaactttaccgaaggcagtggaac

SEQ ID NO: 43254 - DNA, 31 bp, Artificial Sequence
  Synthetic oligonucleotide
cgagattgaggcatattaagcggagatgaac

SEQ ID NO: 43255 - DNA, 30 bp, Artificial Sequence
  Synthetic oligonucleotide
agggtccgagaacgagtcagagggatgaac

SEQ ID NO: 43256 - DNA, 30 bp, Artificial Sequence
  Synthetic oligonucleotide
caaaccatgaatagtaatatagatatgaac

SEQ ID NO: 43257 - DNA, 30 bp, Artificial Sequence
  Synthetic oligonucleotide
cagagcatcaatagaacgattgacaataac

SEQ ID NO: 43258 - DNA, 30 bp, Artificial Sequence
  Synthetic oligonucleotide
taagacagggactggagtactcacgctaac

SEQ ID NO: 43259 - DNA, 30 bp, Artificial Sequence
  Synthetic oligonucleotide
tctgtgagcgaaagaacacagttacgtaac

SEQ ID NO: 43260 - DNA, 30 bp, Artificial Sequence
  Synthetic oligonucleotide
agcgcattccatgaactgactatgattaac

SEQ ID NO: 43261 - DNA, 30 bp, Artificial Sequence
  Synthetic oligonucleotide
agcggtctggagccaaaaaccgccaaacac

SEQ ID NO: 43262 - DNA, 30 bp, Artificial Sequence
  Synthetic oligonucleotide
ctggaaacgtaacaaggcaaactagaacac

SEQ ID NO: 43263 - DNA, 30 bp, Artificial Sequence
  Synthetic oligonucleotide
aggggcgttcgagcgtataagctataacac

SEQ ID NO: 43264 - DNA, 30 bp, Artificial Sequence
  Synthetic oligonucleotide
gtaccctcaggaatgggccaaaattaacac

SEQ ID NO: 43265 - DNA, 30 bp, Artificial Sequence
  Synthetic oligonucleotide
ctgaaataatagaaaagtcactacacacac

SEQ ID NO: 43266 - DNA, 30 bp, Artificial Sequence
  Synthetic oligonucleotide
atggatcataactaacctgtcttatcacac

SEQ ID NO: 43267 - DNA, 30 bp, Artificial Sequence
  Synthetic oligonucleotide
cgcacttcagacgatatcgctaccatacac

SEQ ID NO: 43268 - DNA, 30 bp, Artificial Sequence
  Synthetic oligonucleotide
agatatgaaatccaacttagccagctacac

SEQ ID NO: 43269 - DNA, 30 bp, Artificial Sequence
  Synthetic oligonucleotide
gacgctccaaaacgaagcctagcagtacac

SEQ ID NO: 43270 - DNA, 30 bp, Artificial Sequence
  Synthetic oligonucleotide
cctgagcatgaaatattacgcgtggtacac

SEQ ID NO: 43271 - DNA, 30 bp, Artificial Sequence
  Synthetic oligonucleotide
ctagagaataaacaggaggtccgccaccac

SEQ ID NO: 43272 - DNA, 30 bp, Artificial Sequence
  Synthetic oligonucleotide
caagcgcatcgcaaagcccgattggaccac

SEQ ID NO: 43273 - DNA, 30 bp, Artificial Sequence
  Synthetic oligonucleotide
ggatgggcatcaacgagtcactatgaccac

SEQ ID NO: 43274 - DNA, 30 bp, Artificial Sequence
  Synthetic oligonucleotide
cggatcaacacccttacctctgaaagccac

SEQ ID NO: 43275 - DNA, 30 bp, Artificial Sequence
  Synthetic oligonucleotide
ggcacatgaaaatgttcaccattaagccac

SEQ ID NO: 43276 - DNA, 30 bp, Artificial Sequence
  Synthetic oligonucleotide
acactagatacatcgggaccagcgagccac

SEQ ID NO: 43277 - DNA, 30 bp, Artificial Sequence
  Synthetic oligonucleotide
tcgtgaaggggatgatagacggcacgccac

SEQ ID NO: 43278 - DNA, 30 bp, Artificial Sequence
  Synthetic oligonucleotide
agaagatgtataaatttccagggcggccac

SEQ ID NO: 43279 - DNA, 30 bp, Artificial Sequence
  Synthetic oligonucleotide
gaacctacaacaaaagaagtctgctgccac

SEQ ID NO: 43280 - DNA, 30 bp, Artificial Sequence
  Synthetic oligonucleotide
ggtccggccagacggaattaagaacagcac

SEQ ID NO: 43281 - DNA, 30 bp, Artificial Sequence
  Synthetic oligonucleotide
ggatcttaccaaagagcaaaacgagagcac

SEQ ID NO: 43282 - DNA, 30 bp, Artificial Sequence
  Synthetic oligonucleotide
atcacggaacatagcgttaccaagccgcac

SEQ ID NO: 43283 - DNA, 30 bp, Artificial Sequence
  Synthetic oligonucleotide
aaaggctagcggggcataaaattcgcgcac

SEQ ID NO: 43284 - DNA, 30 bp, Artificial Sequence
  Synthetic oligonucleotide
ataaatactaccgaattaaaccgaaggcac

SEQ ID NO: 43285 - DNA, 30 bp, Artificial Sequence
  Synthetic oligonucleotide
agcagggtaaaattgttcacatgagggcac

SEQ ID NO: 43286 - DNA, 30 bp, Artificial Sequence
  Synthetic oligonucleotide
tagggcaatgtcgaatcatcaaatgggcac

SEQ ID NO: 43287 - DNA, 30 bp, Artificial Sequence
  Synthetic oligonucleotide
aatcgtccaatcaattaaaaccgatggcac

SEQ ID NO: 43288 - DNA, 30 bp, Artificial Sequence
  Synthetic oligonucleotide
gactgcaacgctagagcgaggaaaatgcac

SEQ ID NO: 43289 - DNA, 30 bp, Artificial Sequence
  Synthetic oligonucleotide
atcggaccaataagagacaagcaattgcac

SEQ ID NO: 43290 - DNA, 30 bp, Artificial Sequence
  Synthetic oligonucleotide
aggggcaggccggcacagagcatgaatcac

SEQ ID NO: 43291 - DNA, 30 bp, Artificial Sequence
  Synthetic oligonucleotide
tacgcgtatatttcgaacagtaagcatcac

SEQ ID NO: 43292 - DNA, 30 bp, Artificial Sequence
  Synthetic oligonucleotide
gtggaatcaggctcacaagtgaggcatcac

SEQ ID NO: 43293 - DNA, 30 bp, Artificial Sequence
  Synthetic oligonucleotide
cgactacaaataataagtgggccacctcac

SEQ ID NO: 43294 - DNA, 29 bp, Artificial Sequence
  Synthetic oligonucleotide
tggactccaagaacatatctgatcgtcac

SEQ ID NO: 43295 - DNA, 34 bp, Artificial Sequence
  Synthetic oligonucleotide
gatactacaccaccacgtgtccatgagaaaagac

SEQ ID NO: 43296 - DNA, 30 bp, Artificial Sequence
  Synthetic oligonucleotide
acaaaaatccggacctgtccgtgaaaagac

SEQ ID NO: 43297 - DNA, 30 bp, Artificial Sequence
  Synthetic oligonucleotide
atgaggggattttgccgacacctgaaagac

SEQ ID NO: 43298 - DNA, 30 bp, Artificial Sequence
  Synthetic oligonucleotide
ctgctcgcgaaaagacggcagggacaagac

SEQ ID NO: 43299 - DNA, 30 bp, Artificial Sequence
  Synthetic oligonucleotide
acgaggctcggtcatttggctgagtaagac

SEQ ID NO: 43300 - DNA, 30 bp, Artificial Sequence
  Synthetic oligonucleotide
atagcctccgcaaattggtgaaaaacagac

SEQ ID NO: 43301 - DNA, 30 bp, Artificial Sequence
  Synthetic oligonucleotide
caataactactagcgtacactaaggcagac

SEQ ID NO: 43302 - DNA, 30 bp, Artificial Sequence
  Synthetic oligonucleotide
gggagtgtatcagcgcgtgtaatgtcagac

SEQ ID NO: 43303 - DNA, 30 bp, Artificial Sequence
  Synthetic oligonucleotide
ttcacgactagtaataaccttccgagagac

SEQ ID NO: 43304 - DNA, 30 bp, Artificial Sequence
  Synthetic oligonucleotide
gctcataagacagtcaggtaggatagagac

SEQ ID NO: 43305 - DNA, 30 bp, Artificial Sequence
  Synthetic oligonucleotide
ctaggaacagattatcggccagtacgagac

SEQ ID NO: 43306 - DNA, 30 bp, Artificial Sequence
  Synthetic oligonucleotide
cctagctgcgacagtatattaaagcgagac

SEQ ID NO: 43307 - DNA, 30 bp, Artificial Sequence
  Synthetic oligonucleotide
ggcggttaggaaaactgaggtgagtgagac

SEQ ID NO: 43308 - DNA, 30 bp, Artificial Sequence
  Synthetic oligonucleotide
aggtcagtacaacccatgcaagatcacgac

SEQ ID NO: 43309 - DNA, 30 bp, Artificial Sequence
  Synthetic oligonucleotide
agtacgtacttgagtgcgaacactgacgac

SEQ ID NO: 43310 - DNA, 31 bp, Artificial Sequence
  Synthetic oligonucleotide
ggcccagactgtagctcaagcgcagtacgac

SEQ ID NO: 43311 - DNA, 30 bp, Artificial Sequence
  Synthetic oligonucleotide
agcagagctggactagcgtcactaaccgac

SEQ ID NO: 43312 - DNA, 30 bp, Artificial Sequence
  Synthetic oligonucleotide
aggagtccctacctaggcttacacgccgac

SEQ ID NO: 43313 - DNA, 30 bp, Artificial Sequence
  Synthetic oligonucleotide
cgtcacctgttaagtaatcggcctgccgac

SEQ ID NO: 43314 - DNA, 30 bp, Artificial Sequence
  Synthetic oligonucleotide
catgagcgaatctaggtagctgtctccgac

SEQ ID NO: 43315 - DNA, 30 bp, Artificial Sequence
  Synthetic oligonucleotide
ttgagagttaagccccaatgcaaggtcgac

SEQ ID NO: 43316 - DNA, 30 bp, Artificial Sequence
  Synthetic oligonucleotide
tggaaatcggtatataacgtctatgtcgac

SEQ ID NO: 43317 - DNA, 30 bp, Artificial Sequence
  Synthetic oligonucleotide
gccccataagcaaagggtcaagtattcgac

SEQ ID NO: 43318 - DNA, 30 bp, Artificial Sequence
  Synthetic oligonucleotide
tctggccggatgagagcctataccaaggac

SEQ ID NO: 43319 - DNA, 30 bp, Artificial Sequence
  Synthetic oligonucleotide
cgtcgtgcgggcgagggggtgagagaggac

SEQ ID NO: 43320 - DNA, 30 bp, Artificial Sequence
  Synthetic oligonucleotide
aataagaaatggggagcaagggggccggac

SEQ ID NO: 43321 - DNA, 30 bp, Artificial Sequence
  Synthetic oligonucleotide
caatcggcggttaacgctagaaaggcggac

SEQ ID NO: 43322 - DNA, 30 bp, Artificial Sequence
  Synthetic oligonucleotide
tgcaaaacgccgtcacagcacgattcggac

SEQ ID NO: 43323 - DNA, 30 bp, Artificial Sequence
  Synthetic oligonucleotide
tcgcggagccactggaaataatggggggac

SEQ ID NO: 43324 - DNA, 30 bp, Artificial Sequence
  Synthetic oligonucleotide
ccggaccgggggaagaggcaaaggatggac

SEQ ID NO: 43325 - DNA, 30 bp, Artificial Sequence
  Synthetic oligonucleotide
ctgagaagaagcctcgcaacttaagtggac

SEQ ID NO: 43326 - DNA, 30 bp, Artificial Sequence
  Synthetic oligonucleotide
tatgtaacaggacccagaatcccggatgac

SEQ ID NO: 43327 - DNA, 30 bp, Artificial Sequence
  Synthetic oligonucleotide
gcggaaatcgctacaatgagcggggatgac

SEQ ID NO: 43328 - DNA, 30 bp, Artificial Sequence
  Synthetic oligonucleotide
gaggagttacggctgagtaatgattatgac

SEQ ID NO: 43329 - DNA, 30 bp, Artificial Sequence
  Synthetic oligonucleotide
ggaccaacggccatggatacccgctctgac

SEQ ID NO: 43330 - DNA, 30 bp, Artificial Sequence
  Synthetic oligonucleotide
ggacacaacaagctactcaccagttctgac

SEQ ID NO: 43331 - DNA, 30 bp, Artificial Sequence
  Synthetic oligonucleotide
gtcgcataacgggtgtaaggcattagtgac

SEQ ID NO: 43332 - DNA, 30 bp, Artificial Sequence
  Synthetic oligonucleotide
aaatacgctcagacccagagtaggcgtgac

SEQ ID NO: 43333 - DNA, 30 bp, Artificial Sequence
  Synthetic oligonucleotide
ggtccctgaggctatggacgacatcgtgac

SEQ ID NO: 43334 - DNA, 30 bp, Artificial Sequence
  Synthetic oligonucleotide
ggcatactagcagggagaattcaaggtgac

SEQ ID NO: 43335 - DNA, 30 bp, Artificial Sequence
  Synthetic oligonucleotide
gcgcgccaaagacgtcaggaaacaggtgac

SEQ ID NO: 43336 - DNA, 30 bp, Artificial Sequence
  Synthetic oligonucleotide
agggagagggtacggtccctacagattgac

SEQ ID NO: 43337 - DNA, 30 bp, Artificial Sequence
  Synthetic oligonucleotide
taagaagtatcgtacgtccacagagttgac

SEQ ID NO: 43338 - DNA, 30 bp, Artificial Sequence
  Synthetic oligonucleotide
cgcgacggccagagctgcacgatggttgac

SEQ ID NO: 43339 - DNA, 30 bp, Artificial Sequence
  Synthetic oligonucleotide
gtgaaataggggtggtatggctagaaatac

SEQ ID NO: 43340 - DNA, 30 bp, Artificial Sequence
  Synthetic oligonucleotide
tgccgagttagtacaggtggtaaagaatac

SEQ ID NO: 43341 - DNA, 30 bp, Artificial Sequence
  Synthetic oligonucleotide
aggcccgtaccagcgtgagtcggggaatac

SEQ ID NO: 43342 - DNA, 30 bp, Artificial Sequence
  Synthetic oligonucleotide
ggctgcctggacgtaacaccgaatgaatac

SEQ ID NO: 43343 - DNA, 30 bp, Artificial Sequence
  Synthetic oligonucleotide
caagacggaaaaatataggtgcaagcatac

SEQ ID NO: 43344 - DNA, 30 bp, Artificial Sequence
  Synthetic oligonucleotide
cgaagctacgatagaaaaagaggcggatac

SEQ ID NO: 43345 - DNA, 30 bp, Artificial Sequence
  Synthetic oligonucleotide
tgtcgcggaaagagactaagcgacatatac

SEQ ID NO: 43346 - DNA, 30 bp, Artificial Sequence
  Synthetic oligonucleotide
tggtcgggggaacctcgcaaatgtaactac

SEQ ID NO: 43347 - DNA, 30 bp, Artificial Sequence
  Synthetic oligonucleotide
ctaagaagagtacaaataacaccttactac

SEQ ID NO: 43348 - DNA, 30 bp, Artificial Sequence
  Synthetic oligonucleotide
gggcgggtgaaacgaaaacgaggagcctac

SEQ ID NO: 43349 - DNA, 30 bp, Artificial Sequence
  Synthetic oligonucleotide
acaggcacggagtggaatgaaccacgctac

SEQ ID NO: 43350 - DNA, 30 bp, Artificial Sequence
  Synthetic oligonucleotide
aggaattagtcaggagtaatagtaggctac

SEQ ID NO: 43351 - DNA, 30 bp, Artificial Sequence
  Synthetic oligonucleotide
taacggccaactgcaagaacgcggggctac

SEQ ID NO: 43352 - DNA, 30 bp, Artificial Sequence
  Synthetic oligonucleotide
tgttacaggactggaaccgcatggtgctac

SEQ ID NO: 43353 - DNA, 30 bp, Artificial Sequence
  Synthetic oligonucleotide
agtcacgaataacttcgccaggacatctac

SEQ ID NO: 43354 - DNA, 30 bp, Artificial Sequence
  Synthetic oligonucleotide
gggatacaaacgtcgtagtaagatctctac

SEQ ID NO: 43355 - DNA, 30 bp, Artificial Sequence
  Synthetic oligonucleotide
aggaaggggcgtcgattaatatgtgtctac

SEQ ID NO: 43356 - DNA, 30 bp, Artificial Sequence
  Synthetic oligonucleotide
gaggagagtatacatccgatagaccagtac

SEQ ID NO: 43357 - DNA, 30 bp, Artificial Sequence
  Synthetic oligonucleotide
cgcccggtcggagatacataccaagagtac

SEQ ID NO: 43358 - DNA, 30 bp, Artificial Sequence
  Synthetic oligonucleotide
agcagagtgccgcaattgactgcagagtac

SEQ ID NO: 43359 - DNA, 30 bp, Artificial Sequence
  Synthetic oligonucleotide
tcatacttatcccgccgataagtcgagtac

SEQ ID NO: 43360 - DNA, 30 bp, Artificial Sequence
  Synthetic oligonucleotide
aaggaacgatatctgtcgttaagggagtac

SEQ ID NO: 43361 - DNA, 30 bp, Artificial Sequence
  Synthetic oligonucleotide
ctctggatatatcgaagggaactggcgtac

SEQ ID NO: 43362 - DNA, 30 bp, Artificial Sequence
  Synthetic oligonucleotide
ctgcaaaagcggcacggagacttggcgtac

SEQ ID NO: 43363 - DNA, 30 bp, Artificial Sequence
  Synthetic oligonucleotide
gcccaatagaatgacctgccggcaaggtac

SEQ ID NO: 43364 - DNA, 30 bp, Artificial Sequence
  Synthetic oligonucleotide
cgatagtggggacagagatgtcacaggtac

SEQ ID NO: 43365 - DNA, 30 bp, Artificial Sequence
  Synthetic oligonucleotide
cagaggaagatgcaagaacggggacggtac

SEQ ID NO: 43366 - DNA, 30 bp, Artificial Sequence
  Synthetic oligonucleotide
cgaaactgtgcacaacagttactagggtac

SEQ ID NO: 43367 - DNA, 30 bp, Artificial Sequence
  Synthetic oligonucleotide
ccgggcacaaaaccaacttacaacgggtac

SEQ ID NO: 43368 - DNA, 30 bp, Artificial Sequence
  Synthetic oligonucleotide
gctagcgagatggagataaaaagggggtac

SEQ ID NO: 43369 - DNA, 30 bp, Artificial Sequence
  Synthetic oligonucleotide
tgaatcggcgagatagagggcgaatggtac

SEQ ID NO: 43370 - DNA, 30 bp, Artificial Sequence
  Synthetic oligonucleotide
acgggccgcgccactcttacagacctgtac

SEQ ID NO: 43371 - DNA, 30 bp, Artificial Sequence
  Synthetic oligonucleotide
gtgccattacgccatccgtaaagagtgtac

SEQ ID NO: 43372 - DNA, 30 bp, Artificial Sequence
  Synthetic oligonucleotide
acgagaggttcatgcgaactgaacgattac

SEQ ID NO: 43373 - DNA, 30 bp, Artificial Sequence
  Synthetic oligonucleotide
tgcccaataggctaagatgtgtcggcttac

SEQ ID NO: 43374 - DNA, 30 bp, Artificial Sequence
  Synthetic oligonucleotide
gacgagacgtcgggtcaaagcactagttac

SEQ ID NO: 43375 - DNA, 30 bp, Artificial Sequence
  Synthetic oligonucleotide
tcgggatctgaggcgtgtacaggtcgttac

SEQ ID NO: 43376 - DNA, 30 bp, Artificial Sequence
  Synthetic oligonucleotide
caaagcgcacagagaacgcgctcaaaaacc

SEQ ID NO: 43377 - DNA, 30 bp, Artificial Sequence
  Synthetic oligonucleotide
agagcacgctcggggaatgggatagaaacc

SEQ ID NO: 43378 - DNA, 30 bp, Artificial Sequence
  Synthetic oligonucleotide
cggtcagtcgtataaggaaatatataaacc

SEQ ID NO: 43379 - DNA, 30 bp, Artificial Sequence
  Synthetic oligonucleotide
cgtttaggtcaccaagtggcgagcacaacc

SEQ ID NO: 43380 - DNA, 30 bp, Artificial Sequence
  Synthetic oligonucleotide
aagagctcaatagtaagagcaggggcaacc

SEQ ID NO: 43381 - DNA, 30 bp, Artificial Sequence
  Synthetic oligonucleotide
agccaagaaaatgagtcacctcagtcaacc

SEQ ID NO: 43382 - DNA, 30 bp, Artificial Sequence
  Synthetic oligonucleotide
atattcgtgcgagagtgtgaggaacgaacc

SEQ ID NO: 43383 - DNA, 30 bp, Artificial Sequence
  Synthetic oligonucleotide
aggtggtgataagcataaataatcataacc

SEQ ID NO: 43384 - DNA, 30 bp, Artificial Sequence
  Synthetic oligonucleotide
gggtcgagcagaaaaaaggtgggactaacc

SEQ ID NO: 43385 - DNA, 30 bp, Artificial Sequence
  Synthetic oligonucleotide
actaggattatgtccagtactaagctaacc

SEQ ID NO: 43386 - DNA, 31 bp, Artificial Sequence
  Synthetic oligonucleotide
ggtggactcagaagagatcattgtgctaacc

SEQ ID NO: 43387 - DNA, 30 bp, Artificial Sequence
  Synthetic oligonucleotide
ttccaaggcaacacaaccgtggccgacacc

SEQ ID NO: 43388 - DNA, 30 bp, Artificial Sequence
  Synthetic oligonucleotide
gagaggacgaataaactgacaaaggacacc

SEQ ID NO: 43389 - DNA, 30 bp, Artificial Sequence
  Synthetic oligonucleotide
aacacgtacatggcatgataagtgtccacc

SEQ ID NO: 43390 - DNA, 30 bp, Artificial Sequence
  Synthetic oligonucleotide
agcgcaatacgagggaaggtagggcgcacc

SEQ ID NO: 43391 - DNA, 30 bp, Artificial Sequence
  Synthetic oligonucleotide
tgagctaaacattaaggtcaggcactcacc

SEQ ID NO: 43392 - DNA, 30 bp, Artificial Sequence
  Synthetic oligonucleotide
gaggctagaatttattgaggtagggagacc

SEQ ID NO: 43393 - DNA, 30 bp, Artificial Sequence
  Synthetic oligonucleotide
cgtggtataatgcttgcgtaagcgacgacc

SEQ ID NO: 43394 - DNA, 30 bp, Artificial Sequence
  Synthetic oligonucleotide
cggatctcagagcgttttgcaccggcgacc

SEQ ID NO: 43395 - DNA, 30 bp, Artificial Sequence
  Synthetic oligonucleotide
agatgagcctcttggaaaactgcatcgacc

SEQ ID NO: 43396 - DNA, 30 bp, Artificial Sequence
  Synthetic oligonucleotide
gcgcaaacaaggtctggtaagtcctcgacc

SEQ ID NO: 43397 - DNA, 30 bp, Artificial Sequence
  Synthetic oligonucleotide
gtcccggtagaaacgaggagcaacaggacc

SEQ ID NO: 43398 - DNA, 30 bp, Artificial Sequence
  Synthetic oligonucleotide
ctgagtcgtagcaccgggatcggtaggacc

SEQ ID NO: 43399 - DNA, 30 bp, Artificial Sequence
  Synthetic oligonucleotide
acggacctagaacatatggctatgcggacc

SEQ ID NO: 43400 - DNA, 30 bp, Artificial Sequence
  Synthetic oligonucleotide
gacagataggggcaaggggcgaactggacc

SEQ ID NO: 43401 - DNA, 30 bp, Artificial Sequence
  Synthetic oligonucleotide
cggagagaatatcagcataatacgtggacc

SEQ ID NO: 43402 - DNA, 31 bp, Artificial Sequence
  Synthetic oligonucleotide
atcgggctcaaagaaaatccaggggtggacc

SEQ ID NO: 43403 - DNA, 30 bp, Artificial Sequence
  Synthetic oligonucleotide
gaggcggaccacaggaagggtagaatgacc

SEQ ID NO: 43404 - DNA, 30 bp, Artificial Sequence
  Synthetic oligonucleotide
gaggcgtcaaacctggagagaaagatgacc

SEQ ID NO: 43405 - DNA, 30 bp, Artificial Sequence
  Synthetic oligonucleotide
gggggttaaggtacagtttgtgaggtgacc

SEQ ID NO: 43406 - DNA, 30 bp, Artificial Sequence
  Synthetic oligonucleotide
atggagaagtgattcagctgcgaagatacc

SEQ ID NO: 43407 - DNA, 30 bp, Artificial Sequence
  Synthetic oligonucleotide
agcgctacaaaccgaatgcgtgaacctacc

SEQ ID NO: 43408 - DNA, 30 bp, Artificial Sequence
  Synthetic oligonucleotide
agggcgtgacctagtatgtatgtcagtacc

SEQ ID NO: 43409 - DNA, 30 bp, Artificial Sequence
  Synthetic oligonucleotide
cgttaactcataaagggctggccaggtacc

SEQ ID NO: 43410 - DNA, 30 bp, Artificial Sequence
  Synthetic oligonucleotide
gacagtacgtgatcacaaaataagcttacc

SEQ ID NO: 43411 - DNA, 30 bp, Artificial Sequence
  Synthetic oligonucleotide
acaaaattgcaccatagatgacggcttacc

SEQ ID NO: 43412 - DNA, 30 bp, Artificial Sequence
  Synthetic oligonucleotide
tcgcaaagagtggttcgaaaaggatttacc

SEQ ID NO: 43413 - DNA, 30 bp, Artificial Sequence
  Synthetic oligonucleotide
tactgtggggcacaggaatgggctaaaccc

SEQ ID NO: 43414 - DNA, 30 bp, Artificial Sequence
  Synthetic oligonucleotide
agggagacgcggatcttacatcgtgaaccc

SEQ ID NO: 43415 - DNA, 30 bp, Artificial Sequence
  Synthetic oligonucleotide
cgatcgaaaaattccgaggccgtataaccc

SEQ ID NO: 43416 - DNA, 30 bp, Artificial Sequence
  Synthetic oligonucleotide
agtgcaactcaacgatagacgcgttcaccc

SEQ ID NO: 43417 - DNA, 30 bp, Artificial Sequence
  Synthetic oligonucleotide
tcgaaatgcccgtaaagcgtagaacgaccc

SEQ ID NO: 43418 - DNA, 30 bp, Artificial Sequence
  Synthetic oligonucleotide
aggcacattgtataacacaccagcataccc

SEQ ID NO: 43419 - DNA, 30 bp, Artificial Sequence
  Synthetic oligonucleotide
gctcagatgcaaagcaaaatcaaggacccc

SEQ ID NO: 43420 - DNA, 30 bp, Artificial Sequence
  Synthetic oligonucleotide
acgggctgtctatcctggtctccgggcccc

SEQ ID NO: 43421 - DNA, 30 bp, Artificial Sequence
  Synthetic oligonucleotide
ttgaagatgcgagtggatcgcgatggcccc

SEQ ID NO: 43422 - DNA, 30 bp, Artificial Sequence
  Synthetic oligonucleotide
gaagggggtgtggacggaatgtacatgccc

SEQ ID NO: 43423 - DNA, 30 bp, Artificial Sequence
  Synthetic oligonucleotide
tccaagcgcaagactacccaatgcatgccc

SEQ ID NO: 43424 - DNA, 30 bp, Artificial Sequence
  Synthetic oligonucleotide
catgcaaaacggcatgcataagtagctccc

SEQ ID NO: 43425 - DNA, 30 bp, Artificial Sequence
  Synthetic oligonucleotide
gtcgcggtgcgcggaagataccagcgtccc

SEQ ID NO: 43426 - DNA, 30 bp, Artificial Sequence
  Synthetic oligonucleotide
acccgaaagaattgtgcacgtgcccaagcc

SEQ ID NO: 43427 - DNA, 30 bp, Artificial Sequence
  Synthetic oligonucleotide
gatacaggaaatcaaatgcgatgtgaagcc

SEQ ID NO: 43428 - DNA, 31 bp, Artificial Sequence
  Synthetic oligonucleotide
gcgaggtcacccgagctcagggcagtaagcc

SEQ ID NO: 43429 - DNA, 30 bp, Artificial Sequence
  Synthetic oligonucleotide
tcgaggggatatatgagtgaagcaccagcc

SEQ ID NO: 43430 - DNA, 30 bp, Artificial Sequence
  Synthetic oligonucleotide
cagacatgtcaacgtgttggaagaagagcc

SEQ ID NO: 43431 - DNA, 30 bp, Artificial Sequence
  Synthetic oligonucleotide
acgcgcttctagcagagagacgagagagcc

SEQ ID NO: 43432 - DNA, 30 bp, Artificial Sequence
  Synthetic oligonucleotide
tgttaggggaccgtcgaggctggcctagcc

SEQ ID NO: 43433 - DNA, 30 bp, Artificial Sequence
  Synthetic oligonucleotide
tgccttagttggaaagagtgcctacacgcc

SEQ ID NO: 43434 - DNA, 30 bp, Artificial Sequence
  Synthetic oligonucleotide
ggacaaagtcgttctctgggtgacaccgcc

SEQ ID NO: 43435 - DNA, 30 bp, Artificial Sequence
  Synthetic oligonucleotide
cgccacaccgaaaatccgtacagtaccgcc

SEQ ID NO: 43436 - DNA, 30 bp, Artificial Sequence
  Synthetic oligonucleotide
gatcgtgaaggtggtgtaaagacgcccgcc

SEQ ID NO: 43437 - DNA, 30 bp, Artificial Sequence
  Synthetic oligonucleotide
gtggtaatcaaagatacaggcatatccgcc

SEQ ID NO: 43438 - DNA, 30 bp, Artificial Sequence
  Synthetic oligonucleotide
cagtagaccgtaggcaacgattcgcgcgcc

SEQ ID NO: 43439 - DNA, 30 bp, Artificial Sequence
  Synthetic oligonucleotide
ttgcgagcgtgcgtaaatgagtgggtcgcc

SEQ ID NO: 43440 - DNA, 30 bp, Artificial Sequence
  Synthetic oligonucleotide
acagctgatagcaataggactacaaaggcc

SEQ ID NO: 43441 - DNA, 30 bp, Artificial Sequence
  Synthetic oligonucleotide
gaaggttaagcctgctgaaacgtcgaggcc

SEQ ID NO: 43442 - DNA, 30 bp, Artificial Sequence
  Synthetic oligonucleotide
gcgtgcgatggtataggatggcggtcggcc

SEQ ID NO: 43443 - DNA, 30 bp, Artificial Sequence
  Synthetic oligonucleotide
actcgaatgcacggtgcgacaaaaaatgcc

SEQ ID NO: 43444 - DNA, 30 bp, Artificial Sequence
  Synthetic oligonucleotide
agtccagtagttggttctgagagatgtgcc

SEQ ID NO: 43445 - DNA, 30 bp, Artificial Sequence
  Synthetic oligonucleotide
gggatcgaagtttgttaaggggtatgtgcc

SEQ ID NO: 43446 - DNA, 30 bp, Artificial Sequence
  Synthetic oligonucleotide
acatcaagaatcatccatgtggcctgtgcc

SEQ ID NO: 43447 - DNA, 30 bp, Artificial Sequence
  Synthetic oligonucleotide
aaagtgtctcggcgaaaacgaatctttgcc

SEQ ID NO: 43448 - DNA, 30 bp, Artificial Sequence
  Synthetic oligonucleotide
ctgactcggccgtgagaagcgtggaaatcc

SEQ ID NO: 43449 - DNA, 30 bp, Artificial Sequence
  Synthetic oligonucleotide
gagacaagaactccagaatagcgcgaatcc

SEQ ID NO: 43450 - DNA, 30 bp, Artificial Sequence
  Synthetic oligonucleotide
tccgtgaacagaaaacgacagctataatcc

SEQ ID NO: 43451 - DNA, 30 bp, Artificial Sequence
  Synthetic oligonucleotide
cgagccccgggcgtggaaaaactaccatcc

SEQ ID NO: 43452 - DNA, 30 bp, Artificial Sequence
  Synthetic oligonucleotide
ggaacgcgacacttaagctgcaccgcatcc

SEQ ID NO: 43453 - DNA, 30 bp, Artificial Sequence
  Synthetic oligonucleotide
tagacagtgaacattattagggatgcatcc

SEQ ID NO: 43454 - DNA, 30 bp, Artificial Sequence
  Synthetic oligonucleotide
ggtagaaatggccagcgtgacgtcaactcc

SEQ ID NO: 43455 - DNA, 30 bp, Artificial Sequence
  Synthetic oligonucleotide
acatcagggcatttgagaggggatggctcc

SEQ ID NO: 43456 - DNA, 30 bp, Artificial Sequence
  Synthetic oligonucleotide
gacatgggtggaaggatgacaagttgctcc

SEQ ID NO: 43457 - DNA, 30 bp, Artificial Sequence
  Synthetic oligonucleotide
aggtgtactcatgtatatccgacagcgtcc

SEQ ID NO: 43458 - DNA, 28 bp, Artificial Sequence
  Synthetic oligonucleotide
gaaaaccgccaacaaaggaaaatcgtcc

SEQ ID NO: 43459 - DNA, 30 bp, Artificial Sequence
  Synthetic oligonucleotide
aaagacaattaactaggcactctaaggtcc

SEQ ID NO: 43460 - DNA, 30 bp, Artificial Sequence
  Synthetic oligonucleotide
aaggttgtcaagaagccgaataaagattcc

SEQ ID NO: 43461 - DNA, 30 bp, Artificial Sequence
  Synthetic oligonucleotide
cgggggagtgcaatctaaacaggaacttcc

SEQ ID NO: 43462 - DNA, 30 bp, Artificial Sequence
  Synthetic oligonucleotide
acggtcacgaggactatgcactggagttcc

SEQ ID NO: 43463 - DNA, 30 bp, Artificial Sequence
  Synthetic oligonucleotide
agggacgtcgactaggatgcattgaaaagc

SEQ ID NO: 43464 - DNA, 30 bp, Artificial Sequence
  Synthetic oligonucleotide
tactgtcaaggtgcttagttaggccaaagc

SEQ ID NO: 43465 - DNA, 30 bp, Artificial Sequence
  Synthetic oligonucleotide
cgtgatactgatcgatcttcgcctcaaagc

SEQ ID NO: 43466 - DNA, 30 bp, Artificial Sequence
  Synthetic oligonucleotide
tggttcaccgtattcagaagagtataaagc

SEQ ID NO: 43467 - DNA, 30 bp, Artificial Sequence
  Synthetic oligonucleotide
cagtgctggcggcatagtggagagacaagc

SEQ ID NO: 43468 - DNA, 30 bp, Artificial Sequence
  Synthetic oligonucleotide
actagaatcgtaataaacccatggacaagc

SEQ ID NO: 43469 - DNA, 30 bp, Artificial Sequence
  Synthetic oligonucleotide
ttggttcggaataggagtacaatcgcaagc

SEQ ID NO: 43470 - DNA, 30 bp, Artificial Sequence
  Synthetic oligonucleotide
cgaccttgagatacagacgtgattagaagc

SEQ ID NO: 43471 - DNA, 30 bp, Artificial Sequence
  Synthetic oligonucleotide
catgagatacccatgggtggaggccgaagc

SEQ ID NO: 43472 - DNA, 30 bp, Artificial Sequence
  Synthetic oligonucleotide
agttgcgcccgacgccaatagacatgaagc

SEQ ID NO: 43473 - DNA, 30 bp, Artificial Sequence
  Synthetic oligonucleotide
acgactgacttggcggtttgcgacataagc

SEQ ID NO: 43474 - DNA, 30 bp, Artificial Sequence
  Synthetic oligonucleotide
ggtccatccggggtgccaagaatcataagc

SEQ ID NO: 43475 - DNA, 30 bp, Artificial Sequence
  Synthetic oligonucleotide
atcatctgcgaaaacatataggggataagc

SEQ ID NO: 43476 - DNA, 30 bp, Artificial Sequence
  Synthetic oligonucleotide
cctggaagtgcacagcaagtccatataagc

SEQ ID NO: 43477 - DNA, 30 bp, Artificial Sequence
  Synthetic oligonucleotide
ctgcatgggagccaagagagtgatataagc

SEQ ID NO: 43478 - DNA, 30 bp, Artificial Sequence
  Synthetic oligonucleotide
tagtcaggaaacttgagtgcgccagtaagc

SEQ ID NO: 43479 - DNA, 30 bp, Artificial Sequence
  Synthetic oligonucleotide
cacaattgagctcaagtgaagagaaacagc

SEQ ID NO: 43480 - DNA, 30 bp, Artificial Sequence
  Synthetic oligonucleotide
tcgacgatggaaaccttggcatcacacagc

SEQ ID NO: 43481 - DNA, 30 bp, Artificial Sequence
  Synthetic oligonucleotide
aaaaaggtactcggtgcaatgccagacagc

SEQ ID NO: 43482 - DNA, 30 bp, Artificial Sequence
  Synthetic oligonucleotide
ctctagagagaatctcggaggggagacagc

SEQ ID NO: 43483 - DNA, 30 bp, Artificial Sequence
  Synthetic oligonucleotide
ggggtaggggcaccagttagcagtgacagc

SEQ ID NO: 43484 - DNA, 30 bp, Artificial Sequence
  Synthetic oligonucleotide
ggacataagattatgttcagaggtgacagc

SEQ ID NO: 43485 - DNA, 30 bp, Artificial Sequence
  Synthetic oligonucleotide
tggacacgctaacgacgaagacttgacagc

SEQ ID NO: 43486 - DNA, 30 bp, Artificial Sequence
  Synthetic oligonucleotide
cgagcattaaaccgccgggtagcctccagc

SEQ ID NO: 43487 - DNA, 30 bp, Artificial Sequence
  Synthetic oligonucleotide
gataggagctccacagatgatcaccgcagc

SEQ ID NO: 43488 - DNA, 30 bp, Artificial Sequence
  Synthetic oligonucleotide
ttaaaaccacagcaaggagtaatgcgcagc

SEQ ID NO: 43489 - DNA, 30 bp, Artificial Sequence
  Synthetic oligonucleotide
acaattagggacgacatggtgagaatcagc

SEQ ID NO: 43490 - DNA, 30 bp, Artificial Sequence
  Synthetic oligonucleotide
gagacggaggcatacaaacatccgatcagc

SEQ ID NO: 43491 - DNA, 30 bp, Artificial Sequence
  Synthetic oligonucleotide
gggacaaaataaccagcgagataactcagc

SEQ ID NO: 43492 - DNA, 30 bp, Artificial Sequence
  Synthetic oligonucleotide
atgagcaggtatttccgcctcccagtcagc

SEQ ID NO: 43493 - DNA, 30 bp, Artificial Sequence
  Synthetic oligonucleotide
gtatggccattaatgggaccggcacagagc

SEQ ID NO: 43494 - DNA, 30 bp, Artificial Sequence
  Synthetic oligonucleotide
attggaacaacattaccgacatggcagagc

SEQ ID NO: 43495 - DNA, 30 bp, Artificial Sequence
  Synthetic oligonucleotide
caacaggtagagcacaacccttaagagagc

SEQ ID NO: 43496 - DNA, 30 bp, Artificial Sequence
  Synthetic oligonucleotide
caaccaataggtagtgaaagcaaaaggagc

SEQ ID NO: 43497 - DNA, 30 bp, Artificial Sequence
  Synthetic oligonucleotide
gtcaaccaagcattggttgcatggaggagc

SEQ ID NO: 43498 - DNA, 30 bp, Artificial Sequence
  Synthetic oligonucleotide
cagcgcaccacaacacggcatgaagggagc

SEQ ID NO: 43499 - DNA, 30 bp, Artificial Sequence
  Synthetic oligonucleotide
agccttagtggaagggtcggaaaaatgagc

SEQ ID NO: 43500 - DNA, 30 bp, Artificial Sequence
  Synthetic oligonucleotide
aacgtaagaaccaagccttttgaggtgagc

SEQ ID NO: 43501 - DNA, 30 bp, Artificial Sequence
  Synthetic oligonucleotide
ggcggaacataaaccagcaagagtgtgagc

SEQ ID NO: 43502 - DNA, 30 bp, Artificial Sequence
  Synthetic oligonucleotide
ggcgacatgaatttgcattaacagttgagc

SEQ ID NO: 43503 - DNA, 30 bp, Artificial Sequence
  Synthetic oligonucleotide
accagggtcgtagtgtcattgaagaatagc

SEQ ID NO: 43504 - DNA, 30 bp, Artificial Sequence
  Synthetic oligonucleotide
ccgtcggtaaaagaaggaaattataatagc

SEQ ID NO: 43505 - DNA, 30 bp, Artificial Sequence
  Synthetic oligonucleotide
ctcgcgagattcattacgagagttaatagc

SEQ ID NO: 43506 - DNA, 30 bp, Artificial Sequence
  Synthetic oligonucleotide
ccaacagtactccgaccaggctcgcatagc

SEQ ID NO: 43507 - DNA, 30 bp, Artificial Sequence
  Synthetic oligonucleotide
aggaacggcttaagtagtcggcttcatagc

SEQ ID NO: 43508 - DNA, 30 bp, Artificial Sequence
  Synthetic oligonucleotide
agacgagtaccataccctgacgatgatagc

SEQ ID NO: 43509 - DNA, 30 bp, Artificial Sequence
  Synthetic oligonucleotide
atgagtgggactactgaacgaacatatagc

SEQ ID NO: 43510 - DNA, 30 bp, Artificial Sequence
  Synthetic oligonucleotide
tggaatacgagtttccagcctgtcactagc

SEQ ID NO: 43511 - DNA, 30 bp, Artificial Sequence
  Synthetic oligonucleotide
tcatactggacagggccataggtccctagc

SEQ ID NO: 43512 - DNA, 30 bp, Artificial Sequence
  Synthetic oligonucleotide
tgggtcacacatgattagaagggcgctagc

SEQ ID NO: 43513 - DNA, 30 bp, Artificial Sequence
  Synthetic oligonucleotide
tgcgaagcggatcgaacgttgagtgctagc

SEQ ID NO: 43514 - DNA, 30 bp, Artificial Sequence
  Synthetic oligonucleotide
tgacgcacaggaggagagtggccaagtagc

SEQ ID NO: 43515 - DNA, 30 bp, Artificial Sequence
  Synthetic oligonucleotide
gcgggagtcactaagaaatcatcaagtagc

SEQ ID NO: 43516 - DNA, 30 bp, Artificial Sequence
  Synthetic oligonucleotide
gttgggctaacatcagcaagatcaggtagc

SEQ ID NO: 43517 - DNA, 30 bp, Artificial Sequence
  Synthetic oligonucleotide
cggggccgtcatgtacgaaggtctggtagc

SEQ ID NO: 43518 - DNA, 30 bp, Artificial Sequence
  Synthetic oligonucleotide
cggtgaagaaggggagacttatactgtagc

SEQ ID NO: 43519 - DNA, 30 bp, Artificial Sequence
  Synthetic oligonucleotide
taacaggacgcggtttccttgacagttagc

SEQ ID NO: 43520 - DNA, 30 bp, Artificial Sequence
  Synthetic oligonucleotide
ctacgtgggagcctaggaataggagttagc

SEQ ID NO: 43521 - DNA, 30 bp, Artificial Sequence
  Synthetic oligonucleotide
agagggcattgtaatgtgacgacatttagc

SEQ ID NO: 43522 - DNA, 30 bp, Artificial Sequence
  Synthetic oligonucleotide
ggaacgtcagggcgatcattaaagtttagc

SEQ ID NO: 43523 - DNA, 30 bp, Artificial Sequence
  Synthetic oligonucleotide
agaagagggcacgcggactcgagaaaacgc

SEQ ID NO: 43524 - DNA, 30 bp, Artificial Sequence
  Synthetic oligonucleotide
taagcgaagacgagcaagatagggcaacgc

SEQ ID NO: 43525 - DNA, 30 bp, Artificial Sequence
  Synthetic oligonucleotide
caatgcttacacgcgagaggggctacacgc

SEQ ID NO: 43526 - DNA, 30 bp, Artificial Sequence
  Synthetic oligonucleotide
gcgggcgagaggttaacagggcaagcacgc

SEQ ID NO: 43527 - DNA, 30 bp, Artificial Sequence
  Synthetic oligonucleotide
caacagttagtggggatgggaggtgcacgc

SEQ ID NO: 43528 - DNA, 30 bp, Artificial Sequence
  Synthetic oligonucleotide
agttcggaacagacagtaaggcaaaaccgc

SEQ ID NO: 43529 - DNA, 30 bp, Artificial Sequence
  Synthetic oligonucleotide
gatgggaagctaggcggagaaccaaaccgc

SEQ ID NO: 43530 - DNA, 30 bp, Artificial Sequence
  Synthetic oligonucleotide
gtgaggactgcaataacagtggggacccgc

SEQ ID NO: 43531 - DNA, 30 bp, Artificial Sequence
  Synthetic oligonucleotide
ttacggagataaagaacgacttgaccccgc

SEQ ID NO: 43532 - DNA, 31 bp, Artificial Sequence
  Synthetic oligonucleotide
tgcacagagaactgtcgatgatcaatcccgc

SEQ ID NO: 43533 - DNA, 30 bp, Artificial Sequence
  Synthetic oligonucleotide
ggacgtaataaaaaaaatagaattggccgc

SEQ ID NO: 43534 - DNA, 30 bp, Artificial Sequence
  Synthetic oligonucleotide
atcggctacggctacagtatgaggatccgc

SEQ ID NO: 43535 - DNA, 30 bp, Artificial Sequence
  Synthetic oligonucleotide
ggatcccattgaagacatggtgaaaagcgc

SEQ ID NO: 43536 - DNA, 30 bp, Artificial Sequence
  Synthetic oligonucleotide
tgtaattcgtcccagaagacaacacagcgc

SEQ ID NO: 43537 - DNA, 30 bp, Artificial Sequence
  Synthetic oligonucleotide
aaggaatgacagtgtggcattatggagcgc

SEQ ID NO: 43538 - DNA, 30 bp, Artificial Sequence
  Synthetic oligonucleotide
gtgagtaaacagcgcggaaaccaaaatcgc

SEQ ID NO: 43539 - DNA, 30 bp, Artificial Sequence
  Synthetic oligonucleotide
ggtggagttcagaatggccgtggcaatcgc

SEQ ID NO: 43540 - DNA, 30 bp, Artificial Sequence
  Synthetic oligonucleotide
tccagactcgaactatccgtacgacatcgc

SEQ ID NO: 43541 - DNA, 30 bp, Artificial Sequence
  Synthetic oligonucleotide
cgatgaaagtctgaaaattagggccatcgc

SEQ ID NO: 43542 - DNA, 30 bp, Artificial Sequence
  Synthetic oligonucleotide
atagtccccagcaagaaatccgtaactcgc

SEQ ID NO: 43543 - DNA, 30 bp, Artificial Sequence
  Synthetic oligonucleotide
accgtgaagaacaatcgagttgtgactcgc

SEQ ID NO: 43544 - DNA, 30 bp, Artificial Sequence
  Synthetic oligonucleotide
ggcataacggtgcacaagtacagctctcgc

SEQ ID NO: 43545 - DNA, 30 bp, Artificial Sequence
  Synthetic oligonucleotide
gaaggccagaacaacagttcagcgagtcgc

SEQ ID NO: 43546 - DNA, 30 bp, Artificial Sequence
  Synthetic oligonucleotide
ggatgccggaagtacacgatatgccgtcgc

SEQ ID NO: 43547 - DNA, 30 bp, Artificial Sequence
  Synthetic oligonucleotide
ctgtacatggttcacgaatgggctcgtcgc

SEQ ID NO: 43548 - DNA, 30 bp, Artificial Sequence
  Synthetic oligonucleotide
tgacgagctcactaagccgcaacaaaaggc

SEQ ID NO: 43549 - DNA, 30 bp, Artificial Sequence
  Synthetic oligonucleotide
gggaaaggggagttgtacaagacgaaaggc

SEQ ID NO: 43550 - DNA, 30 bp, Artificial Sequence
  Synthetic oligonucleotide
acttaggggtaagcccataggcaacaaggc

SEQ ID NO: 43551 - DNA, 30 bp, Artificial Sequence
  Synthetic oligonucleotide
aaaccaagctgtgaaggtagcaaggaaggc

SEQ ID NO: 43552 - DNA, 30 bp, Artificial Sequence
  Synthetic oligonucleotide
tacgaccaccgagcatgaacttttgaaggc

SEQ ID NO: 43553 - DNA, 30 bp, Artificial Sequence
  Synthetic oligonucleotide
atctgcgtacacccagaaccaatctaaggc

SEQ ID NO: 43554 - DNA, 30 bp, Artificial Sequence
  Synthetic oligonucleotide
cggccatggacgagtcccttcaaaacaggc

SEQ ID NO: 43555 - DNA, 30 bp, Artificial Sequence
  Synthetic oligonucleotide
gggctacgtgtatgttgaaggaacccaggc

SEQ ID NO: 43556 - DNA, 30 bp, Artificial Sequence
  Synthetic oligonucleotide
taagccagcaaaatcgagcgacgaggaggc

SEQ ID NO: 43557 - DNA, 30 bp, Artificial Sequence
  Synthetic oligonucleotide
tggagggcatcagagacgcaaatgataggc

SEQ ID NO: 43558 - DNA, 30 bp, Artificial Sequence
  Synthetic oligonucleotide
agtcgaagccaatgaaagcgtccggtaggc

SEQ ID NO: 43559 - DNA, 30 bp, Artificial Sequence
  Synthetic oligonucleotide
tggaaagggtgggaagagcgctacttaggc

SEQ ID NO: 43560 - DNA, 30 bp, Artificial Sequence
  Synthetic oligonucleotide
ccgcgtagaaatgactgactagtgaacggc

SEQ ID NO: 43561 - DNA, 30 bp, Artificial Sequence
  Synthetic oligonucleotide
gggactaacaaccgaaaatagctagacggc

SEQ ID NO: 43562 - DNA, 30 bp, Artificial Sequence
  Synthetic oligonucleotide
ttcgaggataaggtgttatgatccgacggc

SEQ ID NO: 43563 - DNA, 30 bp, Artificial Sequence
  Synthetic oligonucleotide
aatcgagtccaaggagtttcgggcaccggc

SEQ ID NO: 43564 - DNA, 30 bp, Artificial Sequence
  Synthetic oligonucleotide
atcgaaagcagataagctcgtaaccccggc

SEQ ID NO: 43565 - DNA, 30 bp, Artificial Sequence
  Synthetic oligonucleotide
caactaatcaaaggagcctagaaaagcggc

SEQ ID NO: 43566 - DNA, 30 bp, Artificial Sequence
  Synthetic oligonucleotide
cataaactttatcaaagaaacggtcgcggc

SEQ ID NO: 43567 - DNA, 30 bp, Artificial Sequence
  Synthetic oligonucleotide
atgggcggaatcggtcccgtgatcctcggc

SEQ ID NO: 43568 - DNA, 30 bp, Artificial Sequence
  Synthetic oligonucleotide
taggcaaatcattctggaaaactgctcggc

SEQ ID NO: 43569 - DNA, 30 bp, Artificial Sequence
  Synthetic oligonucleotide
tggcgcgaacgcgggtgtttgagtgtcggc

SEQ ID NO: 43570 - DNA, 30 bp, Artificial Sequence
  Synthetic oligonucleotide
aggagtgcttgcaattgcaggcgtaagggc

SEQ ID NO: 43571 - DNA, 30 bp, Artificial Sequence
  Synthetic oligonucleotide
agcctggttgtaagcagtaatcaggagggc

SEQ ID NO: 43572 - DNA, 30 bp, Artificial Sequence
  Synthetic oligonucleotide
gtgaggattcaaaaaaggggttgctagggc

SEQ ID NO: 43573 - DNA, 30 bp, Artificial Sequence
  Synthetic oligonucleotide
acacatgggctcgctaaagcgggaacgggc

SEQ ID NO: 43574 - DNA, 30 bp, Artificial Sequence
  Synthetic oligonucleotide
tgcatcggcttgcggatcttattaacgggc

SEQ ID NO: 43575 - DNA, 30 bp, Artificial Sequence
  Synthetic oligonucleotide
tatgtgtatgtaacgtaaccagaagcgggc

SEQ ID NO: 43576 - DNA, 30 bp, Artificial Sequence
  Synthetic oligonucleotide
tcatcaacgacatatccgagatctgcgggc

SEQ ID NO: 43577 - DNA, 30 bp, Artificial Sequence
  Synthetic oligonucleotide
aacttgcaaaaggggaataacacttcgggc

SEQ ID NO: 43578 - DNA, 30 bp, Artificial Sequence
  Synthetic oligonucleotide
ggtcaactcggtagcgaataatctcggggc

SEQ ID NO: 43579 - DNA, 31 bp, Artificial Sequence
  Synthetic oligonucleotide
tgctcaacattaccgaagactcaggtggggc

SEQ ID NO: 43580 - DNA, 30 bp, Artificial Sequence
  Synthetic oligonucleotide
taaccagcgataggaaagtcgtgtgtgggc

SEQ ID NO: 43581 - DNA, 30 bp, Artificial Sequence
  Synthetic oligonucleotide
tgtgagtgtgcggttgcgacaaagaatggc

SEQ ID NO: 43582 - DNA, 30 bp, Artificial Sequence
  Synthetic oligonucleotide
ggagacaaaactgccgggtgtaataatggc

SEQ ID NO: 43583 - DNA, 30 bp, Artificial Sequence
  Synthetic oligonucleotide
tgactgggcaccaggttcgtccgagatggc

SEQ ID NO: 43584 - DNA, 30 bp, Artificial Sequence
  Synthetic oligonucleotide
aggagaaatgcgacaaggctttcaactggc

SEQ ID NO: 43585 - DNA, 30 bp, Artificial Sequence
  Synthetic oligonucleotide
agaaagtagttcagaggtgatcaccgtggc

SEQ ID NO: 43586 - DNA, 30 bp, Artificial Sequence
  Synthetic oligonucleotide
cgagtgctaggtccacaggtgcagggtggc

SEQ ID NO: 43587 - DNA, 30 bp, Artificial Sequence
  Synthetic oligonucleotide
cacacggagtggggagatcagtgacttggc

SEQ ID NO: 43588 - DNA, 30 bp, Artificial Sequence
  Synthetic oligonucleotide
cggcgagttaagttttgcggaaaagttggc

SEQ ID NO: 43589 - DNA, 40 bp, Artificial Sequence
  Synthetic oligonucleotide
gagtgagagtgaaggaaaataaggtagaaagcacgttggc

SEQ ID NO: 43590 - DNA, 30 bp, Artificial Sequence
  Synthetic oligonucleotide
tagaccgcaaatgatcgacaaacggttggc

SEQ ID NO: 43591 - DNA, 30 bp, Artificial Sequence
  Synthetic oligonucleotide
tcgcgataataaggtaaggcatcaaaatgc

SEQ ID NO: 43592 - DNA, 30 bp, Artificial Sequence
  Synthetic oligonucleotide
atgacatgtgaaacccccaatctcaaatgc

SEQ ID NO: 43593 - DNA, 30 bp, Artificial Sequence
  Synthetic oligonucleotide
cggaacaggaccataagtccggaacaatgc

SEQ ID NO: 43594 - DNA, 30 bp, Artificial Sequence
  Synthetic oligonucleotide
ggtggcggaacggagaccgtactaacatgc

SEQ ID NO: 43595 - DNA, 30 bp, Artificial Sequence
  Synthetic oligonucleotide
aaaggggatctacacagcgtaagttcatgc

SEQ ID NO: 43596 - DNA, 30 bp, Artificial Sequence
  Synthetic oligonucleotide
tatatcggaatgccagggtagacgggatgc

SEQ ID NO: 43597 - DNA, 30 bp, Artificial Sequence
  Synthetic oligonucleotide
tgcagacgtccacaaaagagcgtatgatgc

SEQ ID NO: 43598 - DNA, 30 bp, Artificial Sequence
  Synthetic oligonucleotide
agtctgactgaggacttctagagttgatgc

SEQ ID NO: 43599 - DNA, 30 bp, Artificial Sequence
  Synthetic oligonucleotide
cggggtacttaccgaaatcacaagatatgc

SEQ ID NO: 43600 - DNA, 30 bp, Artificial Sequence
  Synthetic oligonucleotide
tggaggtgcgctctctaaccccagatatgc

SEQ ID NO: 43601 - DNA, 30 bp, Artificial Sequence
  Synthetic oligonucleotide
tgagggataaaagtaggactctatctatgc

SEQ ID NO: 43602 - DNA, 30 bp, Artificial Sequence
  Synthetic oligonucleotide
ccatgctgaggtataatcaagagcgtatgc

SEQ ID NO: 43603 - DNA, 30 bp, Artificial Sequence
  Synthetic oligonucleotide
acaaaggggcacccactatctacggtatgc

SEQ ID NO: 43604 - DNA, 30 bp, Artificial Sequence
  Synthetic oligonucleotide
acggtgctggaggtcccaagcgcgaactgc

SEQ ID NO: 43605 - DNA, 30 bp, Artificial Sequence
  Synthetic oligonucleotide
tccaggtggcaatgacgactgataggctgc

SEQ ID NO: 43606 - DNA, 30 bp, Artificial Sequence
  Synthetic oligonucleotide
acaccacgagaaataagtggaccactctgc

SEQ ID NO: 43607 - DNA, 30 bp, Artificial Sequence
  Synthetic oligonucleotide
tggatagacatgtaatgagcctacgtctgc

SEQ ID NO: 43608 - DNA, 30 bp, Artificial Sequence
  Synthetic oligonucleotide
agacgttaaaactggcaaaaaccattctgc

SEQ ID NO: 43609 - DNA, 30 bp, Artificial Sequence
  Synthetic oligonucleotide
ctagaagtcggacagctaataccacagtgc

SEQ ID NO: 43610 - DNA, 30 bp, Artificial Sequence
  Synthetic oligonucleotide
aagcacacaacacgcgtaacaactgagtgc

SEQ ID NO: 43611 - DNA, 30 bp, Artificial Sequence
  Synthetic oligonucleotide
cgtaaactattgcgcctagggcacacgtgc

SEQ ID NO: 43612 - DNA, 30 bp, Artificial Sequence
  Synthetic oligonucleotide
tgtggaagtcgtcgaacgggttcgcggtgc

SEQ ID NO: 43613 - DNA, 30 bp, Artificial Sequence
  Synthetic oligonucleotide
actcgataaagtaaagccgaattgcggtgc

SEQ ID NO: 43614 - DNA, 30 bp, Artificial Sequence
  Synthetic oligonucleotide
tcaggatacacgtcacccgaacaggggtgc

SEQ ID NO: 43615 - DNA, 30 bp, Artificial Sequence
  Synthetic oligonucleotide
gggtaaacaaacggatgcgtaaaatggtgc

SEQ ID NO: 43616 - DNA, 30 bp, Artificial Sequence
  Synthetic oligonucleotide
cacgggtcatagggacaactaatctggtgc

SEQ ID NO: 43617 - DNA, 30 bp, Artificial Sequence
  Synthetic oligonucleotide
tcacgagtaggaacggatcatccaatgtgc

SEQ ID NO: 43618 - DNA, 30 bp, Artificial Sequence
  Synthetic oligonucleotide
gggccgatacggtaactaatatcactgtgc

SEQ ID NO: 43619 - DNA, 30 bp, Artificial Sequence
  Synthetic oligonucleotide
accgatatcccagcaaaaacactggtgtgc

SEQ ID NO: 43620 - DNA, 30 bp, Artificial Sequence
  Synthetic oligonucleotide
acggtcggatattggataatggcagattgc

SEQ ID NO: 43621 - DNA, 30 bp, Artificial Sequence
  Synthetic oligonucleotide
tacggttaggcggaaatgcggtgctattgc

SEQ ID NO: 43622 - DNA, 30 bp, Artificial Sequence
  Synthetic oligonucleotide
cagggaataaacatagacttaaaaccttgc

SEQ ID NO: 43623 - DNA, 30 bp, Artificial Sequence
  Synthetic oligonucleotide
ttcagccgtgtaatggggccagatgcttgc

SEQ ID NO: 43624 - DNA, 30 bp, Artificial Sequence
  Synthetic oligonucleotide
ttatgcgaacaggtgacgaccgatgcttgc

SEQ ID NO: 43625 - DNA, 30 bp, Artificial Sequence
  Synthetic oligonucleotide
tgtgcacactcgtaactcgcggagtcttgc

SEQ ID NO: 43626 - DNA, 30 bp, Artificial Sequence
  Synthetic oligonucleotide
cgaacagtggcacaatataggttactttgc

SEQ ID NO: 43627 - DNA, 30 bp, Artificial Sequence
  Synthetic oligonucleotide
cacgaaatgaaatgatcagttccgctttgc

SEQ ID NO: 43628 - DNA, 30 bp, Artificial Sequence
  Synthetic oligonucleotide
acaagtagacctgaatgtgttaggcaaatc

SEQ ID NO: 43629 - DNA, 30 bp, Artificial Sequence
  Synthetic oligonucleotide
ctcgaggctgggaaaccaaaccttcaaatc

SEQ ID NO: 43630 - DNA, 30 bp, Artificial Sequence
  Synthetic oligonucleotide
atacagaacaatcatgtatgaacaacaatc

SEQ ID NO: 43631 - DNA, 30 bp, Artificial Sequence
  Synthetic oligonucleotide
aaagtggctagcccccatagctcgtcaatc

SEQ ID NO: 43632 - DNA, 30 bp, Artificial Sequence
  Synthetic oligonucleotide
ttggtacagagtccgacggaccaaagaatc

SEQ ID NO: 43633 - DNA, 30 bp, Artificial Sequence
  Synthetic oligonucleotide
ctcggggcgagtacgactgtacagcgaatc

SEQ ID NO: 43634 - DNA, 30 bp, Artificial Sequence
  Synthetic oligonucleotide
cttcagggcgagaataaaaggcgtcgaatc

SEQ ID NO: 43635 - DNA, 30 bp, Artificial Sequence
  Synthetic oligonucleotide
tgatcgcgataatggggtagctggggaatc

SEQ ID NO: 43636 - DNA, 30 bp, Artificial Sequence
  Synthetic oligonucleotide
agtcgacacacttacggcactccgataatc

SEQ ID NO: 43637 - DNA, 30 bp, Artificial Sequence
  Synthetic oligonucleotide
ggagagagggaacgcggattcgactacatc

SEQ ID NO: 43638 - DNA, 30 bp, Artificial Sequence
  Synthetic oligonucleotide
caaggagaggatagattgggccttgccatc

SEQ ID NO: 43639 - DNA, 30 bp, Artificial Sequence
  Synthetic oligonucleotide
gcgtcagcggtcggtcaagagtagtccatc

SEQ ID NO: 43640 - DNA, 30 bp, Artificial Sequence
  Synthetic oligonucleotide
ggacgtgatgtgagacacactatgcgcatc

SEQ ID NO: 43641 - DNA, 30 bp, Artificial Sequence
  Synthetic oligonucleotide
accaaaagaggccttggcaaaaaaggcatc

SEQ ID NO: 43642 - DNA, 30 bp, Artificial Sequence
  Synthetic oligonucleotide
tgtggaacacccgaatgtgcgctcaagatc

SEQ ID NO: 43643 - DNA, 30 bp, Artificial Sequence
  Synthetic oligonucleotide
agtaaaatggagggagtgagcgtgaagatc

SEQ ID NO: 43644 - DNA, 30 bp, Artificial Sequence
  Synthetic oligonucleotide
tcggacttaatagcgatgaactgtaagatc

SEQ ID NO: 43645 - DNA, 30 bp, Artificial Sequence
  Synthetic oligonucleotide
aacggcatggtagagaaagagggaccgatc

SEQ ID NO: 43646 - DNA, 30 bp, Artificial Sequence
  Synthetic oligonucleotide
ggtgggaaactctccagaatacgagcgatc

SEQ ID NO: 43647 - DNA, 30 bp, Artificial Sequence
  Synthetic oligonucleotide
catccatatactacgtaacttcagaggatc

SEQ ID NO: 43648 - DNA, 32 bp, Artificial Sequence
  Synthetic oligonucleotide
gaagatcgacttcaatgggccacttggggatc

SEQ ID NO: 43649 - DNA, 30 bp, Artificial Sequence
  Synthetic oligonucleotide
cgggcctgctcgcaagttgggggaaatatc

SEQ ID NO: 43650 - DNA, 31 bp, Artificial Sequence
  Synthetic oligonucleotide
tcactgcgttgtgttcggtgcgggcactatc

SEQ ID NO: 43651 - DNA, 30 bp, Artificial Sequence
  Synthetic oligonucleotide
gccggcaacgcataaaagagggtaagtatc

SEQ ID NO: 43652 - DNA, 30 bp, Artificial Sequence
  Synthetic oligonucleotide
agaggagatcttacccctactcaccgtatc

SEQ ID NO: 43653 - DNA, 30 bp, Artificial Sequence
  Synthetic oligonucleotide
atggacaaagatgaccaaccttggcgtatc

SEQ ID NO: 43654 - DNA, 30 bp, Artificial Sequence
  Synthetic oligonucleotide
ataaaagactccagaatgataacggaactc

SEQ ID NO: 43655 - DNA, 30 bp, Artificial Sequence
  Synthetic oligonucleotide
aaggtgccagataatacaataacgtaactc

SEQ ID NO: 43656 - DNA, 30 bp, Artificial Sequence
  Synthetic oligonucleotide
agcgcgtctcaacagcttagaaagacactc

SEQ ID NO: 43657 - DNA, 30 bp, Artificial Sequence
  Synthetic oligonucleotide
gctaagggaaatatagttggcagtgcactc

SEQ ID NO: 43658 - DNA, 30 bp, Artificial Sequence
  Synthetic oligonucleotide
tctgaaagaaacgtcgactgaaaaagactc

SEQ ID NO: 43659 - DNA, 30 bp, Artificial Sequence
  Synthetic oligonucleotide
ccgtggattcacagacgaggaacaatactc

SEQ ID NO: 43660 - DNA, 30 bp, Artificial Sequence
  Synthetic oligonucleotide
agggaccatctactgactgaagtgaccctc

SEQ ID NO: 43661 - DNA, 30 bp, Artificial Sequence
  Synthetic oligonucleotide
ggataagggaaagggcttaacctcagcctc

SEQ ID NO: 43662 - DNA, 30 bp, Artificial Sequence
  Synthetic oligonucleotide
gcacgttgtgacccgatcattgtcaagctc

SEQ ID NO: 43663 - DNA, 30 bp, Artificial Sequence
  Synthetic oligonucleotide
acggggtgcgaaaacacaggcccgtcgctc

SEQ ID NO: 43664 - DNA, 30 bp, Artificial Sequence
  Synthetic oligonucleotide
acgggactcactgagtgcagggtgcggctc

SEQ ID NO: 43665 - DNA, 30 bp, Artificial Sequence
  Synthetic oligonucleotide
cgggtgaagagtgctgcaaagcaagtgctc

SEQ ID NO: 43666 - DNA, 30 bp, Artificial Sequence
  Synthetic oligonucleotide
tcgtcagggggcagtttccgacataatctc

SEQ ID NO: 43667 - DNA, 30 bp, Artificial Sequence
  Synthetic oligonucleotide
aaaaggggcgggctaacgtcgagacatctc

SEQ ID NO: 43668 - DNA, 30 bp, Artificial Sequence
  Synthetic oligonucleotide
ggcgatgtcataagtttgcagagtgctctc

SEQ ID NO: 43669 - DNA, 30 bp, Artificial Sequence
  Synthetic oligonucleotide
gggtgaaagaaggtaactgctgctcgtctc

SEQ ID NO: 43670 - DNA, 30 bp, Artificial Sequence
  Synthetic oligonucleotide
ccacgcgtgaggcactccaggtagaaagtc

SEQ ID NO: 43671 - DNA, 30 bp, Artificial Sequence
  Synthetic oligonucleotide
tgaggcgtaaagtggcgtaggtatcaagtc

SEQ ID NO: 43672 - DNA, 30 bp, Artificial Sequence
  Synthetic oligonucleotide
tatcgaggaccagggttatcgggataagtc

SEQ ID NO: 43673 - DNA, 31 bp, Artificial Sequence
  Synthetic oligonucleotide
tcgcgtgccaagcatcgtcgggctataagtc

SEQ ID NO: 43674 - DNA, 30 bp, Artificial Sequence
  Synthetic oligonucleotide
gaggtttgaaccaaggaggtgtgaacagtc

SEQ ID NO: 43675 - DNA, 30 bp, Artificial Sequence
  Synthetic oligonucleotide
gggagtttatgacaacatccacagccagtc

SEQ ID NO: 43676 - DNA, 30 bp, Artificial Sequence
  Synthetic oligonucleotide
gtgctaaagtgtgaagcggtgaggccagtc

SEQ ID NO: 43677 - DNA, 30 bp, Artificial Sequence
  Synthetic oligonucleotide
ccgtataatgggtagtgagtggggagagtc

SEQ ID NO: 43678 - DNA, 30 bp, Artificial Sequence
  Synthetic oligonucleotide
gaaggaaacggcgtagtcttaggacgagtc

SEQ ID NO: 43679 - DNA, 30 bp, Artificial Sequence
  Synthetic oligonucleotide
gacaggtaaaaaggttacgagaaccgagtc

SEQ ID NO: 43680 - DNA, 30 bp, Artificial Sequence
  Synthetic oligonucleotide
gcgatttggatactaaggtgcactcgagtc

SEQ ID NO: 43681 - DNA, 30 bp, Artificial Sequence
  Synthetic oligonucleotide
caacggacattacaggtgcgacagggagtc

SEQ ID NO: 43682 - DNA, 30 bp, Artificial Sequence
  Synthetic oligonucleotide
gtcgaactatggaacagtaatcggggagtc

SEQ ID NO: 43683 - DNA, 30 bp, Artificial Sequence
  Synthetic oligonucleotide
acgacggctgtgtgaacggtaatgggagtc

SEQ ID NO: 43684 - DNA, 30 bp, Artificial Sequence
  Synthetic oligonucleotide
aaagtccgggagggaatggagctatgagtc

SEQ ID NO: 43685 - DNA, 30 bp, Artificial Sequence
  Synthetic oligonucleotide
cagctggaagcaagacattgtgggatagtc

SEQ ID NO: 43686 - DNA, 30 bp, Artificial Sequence
  Synthetic oligonucleotide
ggctcgtaacaatctccaaactacctagtc

SEQ ID NO: 43687 - DNA, 30 bp, Artificial Sequence
  Synthetic oligonucleotide
ttaaggatcggcttaaaaagggtgttagtc

SEQ ID NO: 43688 - DNA, 30 bp, Artificial Sequence
  Synthetic oligonucleotide
cactatctaagtgctcagcgcacgaacgtc

SEQ ID NO: 43689 - DNA, 30 bp, Artificial Sequence
  Synthetic oligonucleotide
aatcgtcacaaaaacagactccaccccgtc

SEQ ID NO: 43690 - DNA, 30 bp, Artificial Sequence
  Synthetic oligonucleotide
cgtcaaagaagaagcgcaagtttcgccgtc

SEQ ID NO: 43691 - DNA, 30 bp, Artificial Sequence
  Synthetic oligonucleotide
agagcgtatttcgaggggtgggactccgtc

SEQ ID NO: 43692 - DNA, 30 bp, Artificial Sequence
  Synthetic oligonucleotide
gataaatctgcgccatgatagaagtccgtc

SEQ ID NO: 43693 - DNA, 30 bp, Artificial Sequence
  Synthetic oligonucleotide
caaaagccaaggcactgggtcacgtccgtc

SEQ ID NO: 43694 - DNA, 30 bp, Artificial Sequence
  Synthetic oligonucleotide
gtaggaaaagacttgaaaaggatcggcgtc

SEQ ID NO: 43695 - DNA, 30 bp, Artificial Sequence
  Synthetic oligonucleotide
gtataggatcggatacgtaaccgtggcgtc

SEQ ID NO: 43696 - DNA, 30 bp, Artificial Sequence
  Synthetic oligonucleotide
ccgaggcttctcggacccaaaagctgcgtc

SEQ ID NO: 43697 - DNA, 30 bp, Artificial Sequence
  Synthetic oligonucleotide
agtgaaacgtcaaccgtctttctgctcgtc

SEQ ID NO: 43698 - DNA, 30 bp, Artificial Sequence
  Synthetic oligonucleotide
ttgagctagaagttatcaaagcaaaaggtc

SEQ ID NO: 43699 - DNA, 30 bp, Artificial Sequence
  Synthetic oligonucleotide
catcggcatagaagccacagttgacaggtc

SEQ ID NO: 43700 - DNA, 30 bp, Artificial Sequence
  Synthetic oligonucleotide
catcggtgaatgcggggattatttcaggtc

SEQ ID NO: 43701 - DNA, 30 bp, Artificial Sequence
  Synthetic oligonucleotide
cgggcagttgaccgtagggtgtgcgaggtc

SEQ ID NO: 43702 - DNA, 30 bp, Artificial Sequence
  Synthetic oligonucleotide
acacagcttagcattcgtgcgagataggtc

SEQ ID NO: 43703 - DNA, 30 bp, Artificial Sequence
  Synthetic oligonucleotide
cgtgtagaggtacggcacaactagagggtc

SEQ ID NO: 43704 - DNA, 30 bp, Artificial Sequence
  Synthetic oligonucleotide
gatggcgagatctcgaacttaggccgggtc

SEQ ID NO: 43705 - DNA, 30 bp, Artificial Sequence
  Synthetic oligonucleotide
cgaatgaagaacatgaacatagatcgggtc

SEQ ID NO: 43706 - DNA, 30 bp, Artificial Sequence
  Synthetic oligonucleotide
aggagggcgattaggactacaccaggggtc

SEQ ID NO: 43707 - DNA, 31 bp, Artificial Sequence
  Synthetic oligonucleotide
agagactcgaatggatcgggtggaaatggtc

SEQ ID NO: 43708 - DNA, 30 bp, Artificial Sequence
  Synthetic oligonucleotide
aaagcaagctgagctaggcgaatagtggtc

SEQ ID NO: 43709 - DNA, 30 bp, Artificial Sequence
  Synthetic oligonucleotide
ctggattacgtcgaggtttgggaacatgtc

SEQ ID NO: 43710 - DNA, 30 bp, Artificial Sequence
  Synthetic oligonucleotide
cgaggtttcggtaaattcacgtttgatgtc

SEQ ID NO: 43711 - DNA, 30 bp, Artificial Sequence
  Synthetic oligonucleotide
ccacaagacggcacgtatacgaaatatgtc

SEQ ID NO: 43712 - DNA, 30 bp, Artificial Sequence
  Synthetic oligonucleotide
atgagcggatgtcaacgaccgaccactgtc

SEQ ID NO: 43713 - DNA, 30 bp, Artificial Sequence
  Synthetic oligonucleotide
tcttgatggcacaaaaaggtgagcactgtc

SEQ ID NO: 43714 - DNA, 31 bp, Artificial Sequence
  Synthetic oligonucleotide
ggtaaaacggatctggcaaactacccctgtc

SEQ ID NO: 43715 - DNA, 30 bp, Artificial Sequence
  Synthetic oligonucleotide
cctccacaatcaaactgatgaaactctgtc

SEQ ID NO: 43716 - DNA, 30 bp, Artificial Sequence
  Synthetic oligonucleotide
gacgaggtcccgaatcgagtgtgttgtgtc

SEQ ID NO: 43717 - DNA, 30 bp, Artificial Sequence
  Synthetic oligonucleotide
actaggacaggagatcttaccggacttgtc

SEQ ID NO: 43718 - DNA, 30 bp, Artificial Sequence
  Synthetic oligonucleotide
agataaaatgcccctaaaaaccgcaaattc

SEQ ID NO: 43719 - DNA, 30 bp, Artificial Sequence
  Synthetic oligonucleotide
tacacctgagcgaaaatcggaggtaaattc

SEQ ID NO: 43720 - DNA, 30 bp, Artificial Sequence
  Synthetic oligonucleotide
gtgctgtttcagcacagcgtaaacgaattc

SEQ ID NO: 43721 - DNA, 29 bp, Artificial Sequence
  Synthetic oligonucleotide
ggctaggacaacagcatttgtagcgattc

SEQ ID NO: 43722 - DNA, 30 bp, Artificial Sequence
  Synthetic oligonucleotide
agatacataatcgtgtgcctcatgcgcttc

SEQ ID NO: 43723 - DNA, 30 bp, Artificial Sequence
  Synthetic oligonucleotide
tccacgtaagacgaaacggtcaggggcttc

SEQ ID NO: 43724 - DNA, 30 bp, Artificial Sequence
  Synthetic oligonucleotide
gagcctgatacgacgatcaacaaactcttc

SEQ ID NO: 43725 - DNA, 30 bp, Artificial Sequence
  Synthetic oligonucleotide
ataatcgcattcatctctcgacccgtcttc

SEQ ID NO: 43726 - DNA, 30 bp, Artificial Sequence
  Synthetic oligonucleotide
cgcaaatggtggcgctttacggtcgtcttc

SEQ ID NO: 43727 - DNA, 30 bp, Artificial Sequence
  Synthetic oligonucleotide
catcagggacttagacaagggagatagttc

SEQ ID NO: 43728 - DNA, 30 bp, Artificial Sequence
  Synthetic oligonucleotide
atcgagcctcgtcatgtgcgaagaccgttc

SEQ ID NO: 43729 - DNA, 30 bp, Artificial Sequence
  Synthetic oligonucleotide
tcaaaacagctcaaagagtagatagatttc

SEQ ID NO: 43730 - DNA, 30 bp, Artificial Sequence
  Synthetic oligonucleotide
cgtgagataaaggtgagccctagaagtttc

SEQ ID NO: 43731 - DNA, 30 bp, Artificial Sequence
  Synthetic oligonucleotide
ccaggccggatatgtgcaaaacgaattttc

SEQ ID NO: 43732 - DNA, 30 bp, Artificial Sequence
  Synthetic oligonucleotide
gcgaaggcatttacgaaacctcgaaaaaag

SEQ ID NO: 43733 - DNA, 30 bp, Artificial Sequence
  Synthetic oligonucleotide
gtacactgtgtccaccgagaaaaagaaaag

SEQ ID NO: 43734 - DNA, 30 bp, Artificial Sequence
  Synthetic oligonucleotide
tcgtgctggcttaagccccacacagaaaag

SEQ ID NO: 43735 - DNA, 30 bp, Artificial Sequence
  Synthetic oligonucleotide
gggacggcgtcaggtaacagcgacgaaaag

SEQ ID NO: 43736 - DNA, 30 bp, Artificial Sequence
  Synthetic oligonucleotide
ccgataaggccctggttgtataccgaaaag

SEQ ID NO: 43737 - DNA, 30 bp, Artificial Sequence
  Synthetic oligonucleotide
ataggcgtagctgagcggagagaataaaag

SEQ ID NO: 43738 - DNA, 30 bp, Artificial Sequence
  Synthetic oligonucleotide
tgttaatgcggcccgcttatcacaacaaag

SEQ ID NO: 43739 - DNA, 30 bp, Artificial Sequence
  Synthetic oligonucleotide
gcctcagtattaacgaggaagcagacaaag

SEQ ID NO: 43740 - DNA, 30 bp, Artificial Sequence
  Synthetic oligonucleotide
cgacacagccagggtttccaagacccaaag

SEQ ID NO: 43741 - DNA, 30 bp, Artificial Sequence
  Synthetic oligonucleotide
cgattaccgattagaacaaaacatagaaag

SEQ ID NO: 43742 - DNA, 30 bp, Artificial Sequence
  Synthetic oligonucleotide
ggacggctatccactcatctcgcacgaaag

SEQ ID NO: 43743 - DNA, 30 bp, Artificial Sequence
  Synthetic oligonucleotide
agctcaaccgggccacatacagcgcgaaag

SEQ ID NO: 43744 - DNA, 30 bp, Artificial Sequence
  Synthetic oligonucleotide
tacgcaatcacctaacagtctgctcgaaag

SEQ ID NO: 43745 - DNA, 30 bp, Artificial Sequence
  Synthetic oligonucleotide
ccaaaacctgcccatcatgggcctggaaag

SEQ ID NO: 43746 - DNA, 30 bp, Artificial Sequence
  Synthetic oligonucleotide
actgaaaatcaagtcatgtgaaagtgaaag

SEQ ID NO: 43747 - DNA, 30 bp, Artificial Sequence
  Synthetic oligonucleotide
ataggggagggagccgctctcaaaataaag

SEQ ID NO: 43748 - DNA, 30 bp, Artificial Sequence
  Synthetic oligonucleotide
cggtctgagcgtcccgtacgggtgataaag

SEQ ID NO: 43749 - DNA, 30 bp, Artificial Sequence
  Synthetic oligonucleotide
gataatgcagaaagcgggagagatataaag

SEQ ID NO: 43750 - DNA, 30 bp, Artificial Sequence
  Synthetic oligonucleotide
gaacccgaaccataaatcacctcggtaaag

SEQ ID NO: 43751 - DNA, 30 bp, Artificial Sequence
  Synthetic oligonucleotide
tgcgaaactgcaatggactacctattaaag

SEQ ID NO: 43752 - DNA, 30 bp, Artificial Sequence
  Synthetic oligonucleotide
acgggtccgtgtagtgctacacccttaaag

SEQ ID NO: 43753 - DNA, 30 bp, Artificial Sequence
  Synthetic oligonucleotide
cgagtatactagcgaggcgaccggttaaag

SEQ ID NO: 43754 - DNA, 30 bp, Artificial Sequence
  Synthetic oligonucleotide
aggaggaagtattagcctgtcaaaaacaag

SEQ ID NO: 43755 - DNA, 30 bp, Artificial Sequence
  Synthetic oligonucleotide
ctacaccaccatatcaattctaaaaacaag

SEQ ID NO: 43756 - DNA, 30 bp, Artificial Sequence
  Synthetic oligonucleotide
tcgggaagagtttttcggtgtcgaaacaag

SEQ ID NO: 43757 - DNA, 30 bp, Artificial Sequence
  Synthetic oligonucleotide
cgcctagcgtgtagtggtttcacgaacaag

SEQ ID NO: 43758 - DNA, 30 bp, Artificial Sequence
  Synthetic oligonucleotide
atgttcctccagcgagcacccgaccacaag

SEQ ID NO: 43759 - DNA, 30 bp, Artificial Sequence
  Synthetic oligonucleotide
atgtagaacaaagatacagccgaccacaag

SEQ ID NO: 43760 - DNA, 30 bp, Artificial Sequence
  Synthetic oligonucleotide
gaagcccacaatgacatgccgagtcacaag

SEQ ID NO: 43761 - DNA, 31 bp, Artificial Sequence
  Synthetic oligonucleotide
cgcgtcagtctactctctctccgaagacaag

SEQ ID NO: 43762 - DNA, 30 bp, Artificial Sequence
  Synthetic oligonucleotide
acggtacgtcagacgtaacaattcgacaag

SEQ ID NO: 43763 - DNA, 30 bp, Artificial Sequence
  Synthetic oligonucleotide
tgggaatccattaacggaaacgcggacaag

SEQ ID NO: 43764 - DNA, 30 bp, Artificial Sequence
  Synthetic oligonucleotide
catcaaagcgcagaggagtcagctgacaag

SEQ ID NO: 43765 - DNA, 30 bp, Artificial Sequence
  Synthetic oligonucleotide
tgcgtatgggacatgcctgaagaaaccaag

SEQ ID NO: 43766 - DNA, 30 bp, Artificial Sequence
  Synthetic oligonucleotide
atgttggattccagtatgggatgaaccaag

SEQ ID NO: 43767 - DNA, 30 bp, Artificial Sequence
  Synthetic oligonucleotide
aggagtggtgccgctacgttgccagccaag

SEQ ID NO: 43768 - DNA, 30 bp, Artificial Sequence
  Synthetic oligonucleotide
gcatcatataagaaactgtactgagccaag

SEQ ID NO: 43769 - DNA, 30 bp, Artificial Sequence
  Synthetic oligonucleotide
atggggggaagtatatgtgagcttgccaag

SEQ ID NO: 43770 - DNA, 30 bp, Artificial Sequence
  Synthetic oligonucleotide
cttaccaggaccgtataacaagttgccaag

SEQ ID NO: 43771 - DNA, 30 bp, Artificial Sequence
  Synthetic oligonucleotide
aagtgagggagatttactacgcactccaag

SEQ ID NO: 43772 - DNA, 30 bp, Artificial Sequence
  Synthetic oligonucleotide
tgataaggtaaagaccgacactgaagcaag

SEQ ID NO: 43773 - DNA, 30 bp, Artificial Sequence
  Synthetic oligonucleotide
taagctatacaacgtgcgcaaaaatgcaag

SEQ ID NO: 43774 - DNA, 30 bp, Artificial Sequence
  Synthetic oligonucleotide
gatagggagctccaaaacgcaagttgcaag

SEQ ID NO: 43775 - DNA, 30 bp, Artificial Sequence
  Synthetic oligonucleotide
ccgacatgacagtcaaattcggtgatcaag

SEQ ID NO: 43776 - DNA, 30 bp, Artificial Sequence
  Synthetic oligonucleotide
agcgcatcacaagagacgtgaactatcaag

SEQ ID NO: 43777 - DNA, 30 bp, Artificial Sequence
  Synthetic oligonucleotide
catcaaacatggtgtatttacgcgttcaag

SEQ ID NO: 43778 - DNA, 30 bp, Artificial Sequence
  Synthetic oligonucleotide
ggcatcaaggagccgggacgagtcaagaag

SEQ ID NO: 43779 - DNA, 30 bp, Artificial Sequence
  Synthetic oligonucleotide
gaagcatcttgggaagtacaacataagaag

SEQ ID NO: 43780 - DNA, 30 bp, Artificial Sequence
  Synthetic oligonucleotide
gcggtcacgtcacactagggcgatcagaag

SEQ ID NO: 43781 - DNA, 30 bp, Artificial Sequence
  Synthetic oligonucleotide
gcgcaatgcttggttgaactttgtgagaag

SEQ ID NO: 43782 - DNA, 30 bp, Artificial Sequence
  Synthetic oligonucleotide
ctcaaagtacaaactatagctatctagaag

SEQ ID NO: 43783 - DNA, 30 bp, Artificial Sequence
  Synthetic oligonucleotide
aatgccgacagatactgtaacaagtagaag

SEQ ID NO: 43784 - DNA, 30 bp, Artificial Sequence
  Synthetic oligonucleotide
cgataagacaggtgttgtgaatcgtagaag

SEQ ID NO: 43785 - DNA, 30 bp, Artificial Sequence
  Synthetic oligonucleotide
aaggaaggtcaattcctaagaggcacgaag

SEQ ID NO: 43786 - DNA, 30 bp, Artificial Sequence
  Synthetic oligonucleotide
gtcaggctacagcgagtgatttctacgaag

SEQ ID NO: 43787 - DNA, 30 bp, Artificial Sequence
  Synthetic oligonucleotide
caggatacgggtatgcacggattaccgaag

SEQ ID NO: 43788 - DNA, 30 bp, Artificial Sequence
  Synthetic oligonucleotide
gatacgggagcatcagattcggccccgaag

SEQ ID NO: 43789 - DNA, 30 bp, Artificial Sequence
  Synthetic oligonucleotide
cggtttacgcgtatgaaaaagggtccgaag

SEQ ID NO: 43790 - DNA, 30 bp, Artificial Sequence
  Synthetic oligonucleotide
atagaatagggccttgtttaccatgcgaag

SEQ ID NO: 43791 - DNA, 30 bp, Artificial Sequence
  Synthetic oligonucleotide
attcgagagccttaggtcacatatgcgaag

SEQ ID NO: 43792 - DNA, 30 bp, Artificial Sequence
  Synthetic oligonucleotide
tgattctgtaacctccgcaaagtatcgaag

SEQ ID NO: 43793 - DNA, 30 bp, Artificial Sequence
  Synthetic oligonucleotide
ctgaaacgggcgcctgcagaaacgtcgaag

SEQ ID NO: 43794 - DNA, 30 bp, Artificial Sequence
  Synthetic oligonucleotide
taagtcagctagcattcgaaaggtaggaag

SEQ ID NO: 43795 - DNA, 30 bp, Artificial Sequence
  Synthetic oligonucleotide
agctgatgccctgtctactacgtacggaag

SEQ ID NO: 43796 - DNA, 30 bp, Artificial Sequence
  Synthetic oligonucleotide
acgtaaaagacctgtcttttcgtacggaag

SEQ ID NO: 43797 - DNA, 30 bp, Artificial Sequence
  Synthetic oligonucleotide
ggtaggaaattaatcgaccaaaagcggaag

SEQ ID NO: 43798 - DNA, 30 bp, Artificial Sequence
  Synthetic oligonucleotide
caaaggtttaaagaagcgcatagagggaag

SEQ ID NO: 43799 - DNA, 30 bp, Artificial Sequence
  Synthetic oligonucleotide
gacagataagttgggaagggtaatatgaag

SEQ ID NO: 43800 - DNA, 30 bp, Artificial Sequence
  Synthetic oligonucleotide
aggctaggtagataatagcactgagtgaag

SEQ ID NO: 43801 - DNA, 30 bp, Artificial Sequence
  Synthetic oligonucleotide
aggacttatacttaagtcaaacgtttgaag

SEQ ID NO: 43802 - DNA, 30 bp, Artificial Sequence
  Synthetic oligonucleotide
tccaacaacatagacacaaaaagcaataag

SEQ ID NO: 43803 - DNA, 30 bp, Artificial Sequence
  Synthetic oligonucleotide
aatgcggtggggatctcattttcgaataag

SEQ ID NO: 43804 - DNA, 30 bp, Artificial Sequence
  Synthetic oligonucleotide
agcaccgggatacagaactcaaacgataag

SEQ ID NO: 43805 - DNA, 30 bp, Artificial Sequence
  Synthetic oligonucleotide
tgtccatgaccggaggcaacctgcgataag

SEQ ID NO: 43806 - DNA, 30 bp, Artificial Sequence
  Synthetic oligonucleotide
acgggaagagggcatcaccgccggtataag

SEQ ID NO: 43807 - DNA, 30 bp, Artificial Sequence
  Synthetic oligonucleotide
agacacgaccacagtaaggcacgttataag

SEQ ID NO: 43808 - DNA, 30 bp, Artificial Sequence
  Synthetic oligonucleotide
atgaagtacagcacgattcaggacactaag

SEQ ID NO: 43809 - DNA, 30 bp, Artificial Sequence
  Synthetic oligonucleotide
aaggatgagcggaaactacagggcactaag

SEQ ID NO: 43810 - DNA, 30 bp, Artificial Sequence
  Synthetic oligonucleotide
agaaagagtcaaagaaggacgacccctaag

SEQ ID NO: 43811 - DNA, 30 bp, Artificial Sequence
  Synthetic oligonucleotide
acagacgccaaatatcggctgtaagctaag

SEQ ID NO: 43812 - DNA, 30 bp, Artificial Sequence
  Synthetic oligonucleotide
ccgagattgtacatatgatgtctggctaag

SEQ ID NO: 43813 - DNA, 30 bp, Artificial Sequence
  Synthetic oligonucleotide
cggatttgactcaagacacaatcttctaag

SEQ ID NO: 43814 - DNA, 30 bp, Artificial Sequence
  Synthetic oligonucleotide
ctatgcggcagaattcccataagaagtaag

SEQ ID NO: 43815 - DNA, 30 bp, Artificial Sequence
  Synthetic oligonucleotide
tttggtacttgggaaaaaagtcgaagtaag

SEQ ID NO: 43816 - DNA, 30 bp, Artificial Sequence
  Synthetic oligonucleotide
cccagataaagcgcagcgatgataagtaag

SEQ ID NO: 43817 - DNA, 30 bp, Artificial Sequence
  Synthetic oligonucleotide
atcgcggggttggaaactctactaagtaag

SEQ ID NO: 43818 - DNA, 30 bp, Artificial Sequence
  Synthetic oligonucleotide
ggtctgcaagagtacatgtgtattagtaag

SEQ ID NO: 43819 - DNA, 30 bp, Artificial Sequence
  Synthetic oligonucleotide
ggtagccaagccaatgcctgaaaaggtaag

SEQ ID NO: 43820 - DNA, 30 bp, Artificial Sequence
  Synthetic oligonucleotide
ggccagtaatactaagtgagccatggtaag

SEQ ID NO: 43821 - DNA, 30 bp, Artificial Sequence
  Synthetic oligonucleotide
acgcgggccaagaactcttgtttatgtaag

SEQ ID NO: 43822 - DNA, 30 bp, Artificial Sequence
  Synthetic oligonucleotide
gcgttaggcaggtccggtagattcgttaag

SEQ ID NO: 43823 - DNA, 30 bp, Artificial Sequence
  Synthetic oligonucleotide
ctggcatactagcacagtgcgcgatttaag

SEQ ID NO: 43824 - DNA, 30 bp, Artificial Sequence
  Synthetic oligonucleotide
ggatgggcgagccggtctctcctgcaacag

SEQ ID NO: 43825 - DNA, 30 bp, Artificial Sequence
  Synthetic oligonucleotide
caccacggatattgccagtataatcaacag

SEQ ID NO: 43826 - DNA, 30 bp, Artificial Sequence
  Synthetic oligonucleotide
ccaggaagtttactgaagatccaagaacag

SEQ ID NO: 43827 - DNA, 30 bp, Artificial Sequence
  Synthetic oligonucleotide
acactacgcactaatttgtgaatcgaacag

SEQ ID NO: 43828 - DNA, 30 bp, Artificial Sequence
  Synthetic oligonucleotide
cacggtcgtgaagaggagtacttataacag

SEQ ID NO: 43829 - DNA, 30 bp, Artificial Sequence
  Synthetic oligonucleotide
ggggccggcgttgctgcctacgagtaacag

SEQ ID NO: 43830 - DNA, 30 bp, Artificial Sequence
  Synthetic oligonucleotide
cgatgttcgggattgccacatggtacacag

SEQ ID NO: 43831 - DNA, 30 bp, Artificial Sequence
  Synthetic oligonucleotide
acaagcgataccctaatagctccaccacag

SEQ ID NO: 43832 - DNA, 30 bp, Artificial Sequence
  Synthetic oligonucleotide
cgctggtgttagaggccgagtaaggcacag

SEQ ID NO: 43833 - DNA, 30 bp, Artificial Sequence
  Synthetic oligonucleotide
aggaccgcggtccgtccagcaagttcacag

SEQ ID NO: 43834 - DNA, 30 bp, Artificial Sequence
  Synthetic oligonucleotide
gttactgcaaagtaggtgtaatacagacag

SEQ ID NO: 43835 - DNA, 30 bp, Artificial Sequence
  Synthetic oligonucleotide
tggagggttgattcaggactcaagagacag

SEQ ID NO: 43836 - DNA, 30 bp, Artificial Sequence
  Synthetic oligonucleotide
cgatgggagaccggtgacattggacgacag

SEQ ID NO: 43837 - DNA, 30 bp, Artificial Sequence
  Synthetic oligonucleotide
cgtctgcatccaagtcagaaaaaccgacag

SEQ ID NO: 43838 - DNA, 30 bp, Artificial Sequence
  Synthetic oligonucleotide
tccgcaactaccatatacttgtaaggacag

SEQ ID NO: 43839 - DNA, 30 bp, Artificial Sequence
  Synthetic oligonucleotide
gagtatcataacacgaattatcgaatacag

SEQ ID NO: 43840 - DNA, 31 bp, Artificial Sequence
  Synthetic oligonucleotide
gcaggtagccaaaaagtgtaagctcatacag

SEQ ID NO: 43841 - DNA, 30 bp, Artificial Sequence
  Synthetic oligonucleotide
cgcatgagtcaattatctgtcgctatacag

SEQ ID NO: 43842 - DNA, 30 bp, Artificial Sequence
  Synthetic oligonucleotide
ggaaatcggcttctggaggaacaggtacag

SEQ ID NO: 43843 - DNA, 30 bp, Artificial Sequence
  Synthetic oligonucleotide
cgtaggaacaccttattagagatcttacag

SEQ ID NO: 43844 - DNA, 30 bp, Artificial Sequence
  Synthetic oligonucleotide
ttccagatcagtaaattagtgtagaaccag

SEQ ID NO: 43845 - DNA, 30 bp, Artificial Sequence
  Synthetic oligonucleotide
agcggaaagtacgatgacggtgaccaccag

SEQ ID NO: 43846 - DNA, 30 bp, Artificial Sequence
  Synthetic oligonucleotide
tgccaagaattcatgaaccggggtcaccag

SEQ ID NO: 43847 - DNA, 30 bp, Artificial Sequence
  Synthetic oligonucleotide
tgcgaagactgcgggaggaggtacgaccag

SEQ ID NO: 43848 - DNA, 30 bp, Artificial Sequence
  Synthetic oligonucleotide
cggatgttaactaaaccacccgactaccag

SEQ ID NO: 43849 - DNA, 30 bp, Artificial Sequence
  Synthetic oligonucleotide
tggtacgaacctcgggttgtaagagcccag

SEQ ID NO: 43850 - DNA, 30 bp, Artificial Sequence
  Synthetic oligonucleotide
ctgaatgtgaagaggctaggtataagccag

SEQ ID NO: 43851 - DNA, 30 bp, Artificial Sequence
  Synthetic oligonucleotide
ccggtagttggctaacgtctccggcgccag

SEQ ID NO: 43852 - DNA, 30 bp, Artificial Sequence
  Synthetic oligonucleotide
tcacggaaagtaggaagtgggatcggccag

SEQ ID NO: 43853 - DNA, 30 bp, Artificial Sequence
  Synthetic oligonucleotide
cgtcacctggatcacatatgctcgggccag

SEQ ID NO: 43854 - DNA, 30 bp, Artificial Sequence
  Synthetic oligonucleotide
ccatgtttaattaagagagaacctggccag

SEQ ID NO: 43855 - DNA, 30 bp, Artificial Sequence
  Synthetic oligonucleotide
gcaaagtcataaaggcagaagacatgccag

SEQ ID NO: 43856 - DNA, 30 bp, Artificial Sequence
  Synthetic oligonucleotide
acgtatggtgaaacctactcgttttgccag

SEQ ID NO: 43857 - DNA, 30 bp, Artificial Sequence
  Synthetic oligonucleotide
caaggtggtagagataattacggaatccag

SEQ ID NO: 43858 - DNA, 30 bp, Artificial Sequence
  Synthetic oligonucleotide
aggggaggtcgcccgataggtacgatccag

SEQ ID NO: 43859 - DNA, 30 bp, Artificial Sequence
  Synthetic oligonucleotide
aaagaggttaaagagaaaggccaagtccag

SEQ ID NO: 43860 - DNA, 30 bp, Artificial Sequence
  Synthetic oligonucleotide
ccgctcatgaacccaaggcacaataagcag

SEQ ID NO: 43861 - DNA, 30 bp, Artificial Sequence
  Synthetic oligonucleotide
aatgataaaacaatctaatgcgaccagcag

SEQ ID NO: 43862 - DNA, 30 bp, Artificial Sequence
  Synthetic oligonucleotide
ttgaggactgaaaatctgcgctaaacgcag

SEQ ID NO: 43863 - DNA, 30 bp, Artificial Sequence
  Synthetic oligonucleotide
tggctgggtcggatacgtacgaaaccgcag

SEQ ID NO: 43864 - DNA, 30 bp, Artificial Sequence
  Synthetic oligonucleotide
tgagggcgtaaatgactggcgtccccgcag

SEQ ID NO: 43865 - DNA, 30 bp, Artificial Sequence
  Synthetic oligonucleotide
gtggatgagccgtcaggcatcgattcgcag

SEQ ID NO: 43866 - DNA, 30 bp, Artificial Sequence
  Synthetic oligonucleotide
aagtaggcataagcgttatactggcggcag

SEQ ID NO: 43867 - DNA, 30 bp, Artificial Sequence
  Synthetic oligonucleotide
gtgagatagtgcaacaaagcatacatgcag

SEQ ID NO: 43868 - DNA, 30 bp, Artificial Sequence
  Synthetic oligonucleotide
atgctccgaccccgaacgaaggaactgcag

SEQ ID NO: 43869 - DNA, 30 bp, Artificial Sequence
  Synthetic oligonucleotide
tcacagatacaggacgtgtgagtggtgcag

SEQ ID NO: 43870 - DNA, 30 bp, Artificial Sequence
  Synthetic oligonucleotide
ggcttgaagaataattcggtagtggtgcag

SEQ ID NO: 43871 - DNA, 30 bp, Artificial Sequence
  Synthetic oligonucleotide
gctgcatccaaagaaagaagcattttgcag

SEQ ID NO: 43872 - DNA, 30 bp, Artificial Sequence
  Synthetic oligonucleotide
cgagacaaccggtcatatggttgaaatcag

SEQ ID NO: 43873 - DNA, 30 bp, Artificial Sequence
  Synthetic oligonucleotide
tcggaatatgtgaggcagatatgcaatcag

SEQ ID NO: 43874 - DNA, 30 bp, Artificial Sequence
  Synthetic oligonucleotide
ccaatgcgtcgccatacctcgactaatcag

SEQ ID NO: 43875 - DNA, 30 bp, Artificial Sequence
  Synthetic oligonucleotide
tcagccgccttaccccatctgacacatcag

SEQ ID NO: 43876 - DNA, 30 bp, Artificial Sequence
  Synthetic oligonucleotide
gtaagtacaccggctcgaaacttacatcag

SEQ ID NO: 43877 - DNA, 30 bp, Artificial Sequence
  Synthetic oligonucleotide
tgaaagagggatcactctcccgagcatcag

SEQ ID NO: 43878 - DNA, 30 bp, Artificial Sequence
  Synthetic oligonucleotide
tcaagcatatatcaagttatgggggatcag

SEQ ID NO: 43879 - DNA, 30 bp, Artificial Sequence
  Synthetic oligonucleotide
ccatccatggcagctaaggaatggtatcag

SEQ ID NO: 43880 - DNA, 30 bp, Artificial Sequence
  Synthetic oligonucleotide
ctaaagccgggcactgcggctaattatcag

SEQ ID NO: 43881 - DNA, 30 bp, Artificial Sequence
  Synthetic oligonucleotide
accaacaaactgaaggatgggcattatcag

SEQ ID NO: 43882 - DNA, 30 bp, Artificial Sequence
  Synthetic oligonucleotide
gtgggggggttcgcgaaccagataactcag

SEQ ID NO: 43883 - DNA, 30 bp, Artificial Sequence
  Synthetic oligonucleotide
cgcctacttattacgaaacaagaagctcag

SEQ ID NO: 43884 - DNA, 30 bp, Artificial Sequence
  Synthetic oligonucleotide
tgcgccgagaactaatagcgttaatctcag

SEQ ID NO: 43885 - DNA, 30 bp, Artificial Sequence
  Synthetic oligonucleotide
cctcaggaagaggctgggctcaattctcag

SEQ ID NO: 43886 - DNA, 30 bp, Artificial Sequence
  Synthetic oligonucleotide
gcaaccagcgagagtggtttaagaagtcag

SEQ ID NO: 43887 - DNA, 30 bp, Artificial Sequence
  Synthetic oligonucleotide
agaccgatgccggacgaaagtagtagtcag

SEQ ID NO: 43888 - DNA, 30 bp, Artificial Sequence
  Synthetic oligonucleotide
taagggtatacgatgtcaaataggcgtcag

SEQ ID NO: 43889 - DNA, 30 bp, Artificial Sequence
  Synthetic oligonucleotide
agtattacgtacgcggaaagcccaggtcag

SEQ ID NO: 43890 - DNA, 30 bp, Artificial Sequence
  Synthetic oligonucleotide
tgaaaagaatgctttcttatcagaggtcag

SEQ ID NO: 43891 - DNA, 30 bp, Artificial Sequence
  Synthetic oligonucleotide
cgccaatggtaatggtagactggatgtcag

SEQ ID NO: 43892 - DNA, 30 bp, Artificial Sequence
  Synthetic oligonucleotide
tatcaagaactaataaagagcatgattcag

SEQ ID NO: 43893 - DNA, 30 bp, Artificial Sequence
  Synthetic oligonucleotide
cgtgaaagcagctccgcgtatgtacttcag

SEQ ID NO: 43894 - DNA, 30 bp, Artificial Sequence
  Synthetic oligonucleotide
tactgcctactgcccatcccgtacaaagag

SEQ ID NO: 43895 - DNA, 30 bp, Artificial Sequence
  Synthetic oligonucleotide
agagagaggtgcccgtcggcgaggaaagag

SEQ ID NO: 43896 - DNA, 30 bp, Artificial Sequence
  Synthetic oligonucleotide
agaccggctcaacaacctgataggaaagag

SEQ ID NO: 43897 - DNA, 30 bp, Artificial Sequence
  Synthetic oligonucleotide
taagcaaaaagatcgtcgcatcctaaagag

SEQ ID NO: 43898 - DNA, 30 bp, Artificial Sequence
  Synthetic oligonucleotide
cgacaagagcgattaaacatatctaaagag

SEQ ID NO: 43899 - DNA, 30 bp, Artificial Sequence
  Synthetic oligonucleotide
aataaccacgtaccatcgcgggtacaagag

SEQ ID NO: 43900 - DNA, 30 bp, Artificial Sequence
  Synthetic oligonucleotide
tacttgcccaaggaaacgccgagccaagag

SEQ ID NO: 43901 - DNA, 30 bp, Artificial Sequence
  Synthetic oligonucleotide
actgtacggaggcagatgcagggccaagag

SEQ ID NO: 43902 - DNA, 30 bp, Artificial Sequence
  Synthetic oligonucleotide
taggtagtgaggataaaggatgcgcaagag

SEQ ID NO: 43903 - DNA, 30 bp, Artificial Sequence
  Synthetic oligonucleotide
ctgggagatgtacccacccttcgtcaagag

SEQ ID NO: 43904 - DNA, 30 bp, Artificial Sequence
  Synthetic oligonucleotide
taaacgatgcgcggggcaattcaagaagag

SEQ ID NO: 43905 - DNA, 30 bp, Artificial Sequence
  Synthetic oligonucleotide
ggatcgcgacatgtaaataggattgaagag

SEQ ID NO: 43906 - DNA, 30 bp, Artificial Sequence
  Synthetic oligonucleotide
cggcgctaagcggaaccggccgtataagag

SEQ ID NO: 43907 - DNA, 30 bp, Artificial Sequence
  Synthetic oligonucleotide
tggacgtaagtaacattccgggccacagag

SEQ ID NO: 43908 - DNA, 30 bp, Artificial Sequence
  Synthetic oligonucleotide
ctgcttacacaaagaaaggtaagcacagag

SEQ ID NO: 43909 - DNA, 30 bp, Artificial Sequence
  Synthetic oligonucleotide
aagcagactgcgttacttcgaaggacagag

SEQ ID NO: 43910 - DNA, 30 bp, Artificial Sequence
  Synthetic oligonucleotide
acctgtgggaacgtcactcatgccagagag

SEQ ID NO: 43911 - DNA, 30 bp, Artificial Sequence
  Synthetic oligonucleotide
ttagagactacaacacccgctagacgagag

SEQ ID NO: 43912 - DNA, 30 bp, Artificial Sequence
  Synthetic oligonucleotide
aacgaatttatgcacagacacgagcgagag

SEQ ID NO: 43913 - DNA, 30 bp, Artificial Sequence
  Synthetic oligonucleotide
ttgattggacgggaccatatttcgcgagag

SEQ ID NO: 43914 - DNA, 30 bp, Artificial Sequence
  Synthetic oligonucleotide
aggctcggtaggacagggatagatcgagag

SEQ ID NO: 43915 - DNA, 30 bp, Artificial Sequence
  Synthetic oligonucleotide
aagcgtatgtggatccaaaggcgtcgagag

SEQ ID NO: 43916 - DNA, 30 bp, Artificial Sequence
  Synthetic oligonucleotide
aggcgtacactttcgtgtcaacaaggagag

SEQ ID NO: 43917 - DNA, 30 bp, Artificial Sequence
  Synthetic oligonucleotide
gtgacacaatatagaatcttacgctgagag

SEQ ID NO: 43918 - DNA, 30 bp, Artificial Sequence
  Synthetic oligonucleotide
ccatgctatgcgcaggtatgaggctgagag

SEQ ID NO: 43919 - DNA, 30 bp, Artificial Sequence
  Synthetic oligonucleotide
gtcgcatcagggcaaggtattacttgagag

SEQ ID NO: 43920 - DNA, 30 bp, Artificial Sequence
  Synthetic oligonucleotide
taccccgagatcagtaaccgcatcatagag

SEQ ID NO: 43921 - DNA, 30 bp, Artificial Sequence
  Synthetic oligonucleotide
ggcgaaagcgggctcacgtcaccgatagag

SEQ ID NO: 43922 - DNA, 30 bp, Artificial Sequence
  Synthetic oligonucleotide
acggaaggcttgagctaccacaccctagag

SEQ ID NO: 43923 - DNA, 30 bp, Artificial Sequence
  Synthetic oligonucleotide
aggcagtgtgtttaacaaaaaggtctagag

SEQ ID NO: 43924 - DNA, 30 bp, Artificial Sequence
  Synthetic oligonucleotide
tgggaggggacgaacgcatgcggagtagag

SEQ ID NO: 43925 - DNA, 30 bp, Artificial Sequence
  Synthetic oligonucleotide
caggcccggatgaggtgggacaacgtagag

SEQ ID NO: 43926 - DNA, 30 bp, Artificial Sequence
  Synthetic oligonucleotide
cggtccggaataggatgctttctaaacgag

SEQ ID NO: 43927 - DNA, 30 bp, Artificial Sequence
  Synthetic oligonucleotide
tgattcacaaccaggcccggacataacgag

SEQ ID NO: 43928 - DNA, 30 bp, Artificial Sequence
  Synthetic oligonucleotide
aatcgttaggagtgtgtcacagaccacgag

SEQ ID NO: 43929 - DNA, 30 bp, Artificial Sequence
  Synthetic oligonucleotide
tacgaatgtgcatcaatagaaattgacgag

SEQ ID NO: 43930 - DNA, 30 bp, Artificial Sequence
  Synthetic oligonucleotide
tcacgggtggatacaagtatcacgtacgag

SEQ ID NO: 43931 - DNA, 30 bp, Artificial Sequence
  Synthetic oligonucleotide
aggacggtgaagattgtggatgtaaccgag

SEQ ID NO: 43932 - DNA, 30 bp, Artificial Sequence
  Synthetic oligonucleotide
agatatatcactccacggactaacaccgag

SEQ ID NO: 43933 - DNA, 30 bp, Artificial Sequence
  Synthetic oligonucleotide
accgcaccgaaggactcgtggactaccgag

SEQ ID NO: 43934 - DNA, 30 bp, Artificial Sequence
  Synthetic oligonucleotide
ataaagtcagaagtaggggtatgagccgag

SEQ ID NO: 43935 - DNA, 30 bp, Artificial Sequence
  Synthetic oligonucleotide
aggtggtcctacacgctccgaaacgccgag

SEQ ID NO: 43936 - DNA, 30 bp, Artificial Sequence
  Synthetic oligonucleotide
gactgggtagtgaaatgttgcgactccgag

SEQ ID NO: 43937 - DNA, 30 bp, Artificial Sequence
  Synthetic oligonucleotide
gctaccgacctgcaagtgagacggtccgag

SEQ ID NO: 43938 - DNA, 30 bp, Artificial Sequence
  Synthetic oligonucleotide
atcatggaagcactgatgccttcttccgag

SEQ ID NO: 43939 - DNA, 30 bp, Artificial Sequence
  Synthetic oligonucleotide
ctgatacctacgtatcggggtcatagcgag

SEQ ID NO: 43940 - DNA, 30 bp, Artificial Sequence
  Synthetic oligonucleotide
gactctgaccggacttggaagcaacgcgag

SEQ ID NO: 43941 - DNA, 30 bp, Artificial Sequence
  Synthetic oligonucleotide
acagccgccaagtaaggctcggaacgcgag

SEQ ID NO: 43942 - DNA, 30 bp, Artificial Sequence
  Synthetic oligonucleotide
tacagccgcatatactccttaccacgcgag

SEQ ID NO: 43943 - DNA, 30 bp, Artificial Sequence
  Synthetic oligonucleotide
ggaatagcgtgtgaggtgttgttacgcgag

SEQ ID NO: 43944 - DNA, 30 bp, Artificial Sequence
  Synthetic oligonucleotide
tagcgcgcaaaaatagttcctggccgcgag

SEQ ID NO: 43945 - DNA, 30 bp, Artificial Sequence
  Synthetic oligonucleotide
ttacaagttccaagatcgtcgagtcgcgag

SEQ ID NO: 43946 - DNA, 30 bp, Artificial Sequence
  Synthetic oligonucleotide
ttgtagataactacggtagtcggaggcgag

SEQ ID NO: 43947 - DNA, 30 bp, Artificial Sequence
  Synthetic oligonucleotide
ggataccgcgtcggaaactcggtgggcgag

SEQ ID NO: 43948 - DNA, 30 bp, Artificial Sequence
  Synthetic oligonucleotide
aggcaggacttgaaatttacagtatgcgag

SEQ ID NO: 43949 - DNA, 30 bp, Artificial Sequence
  Synthetic oligonucleotide
tgcacaacgttagaccgttccgtaatcgag

SEQ ID NO: 43950 - DNA, 30 bp, Artificial Sequence
  Synthetic oligonucleotide
tcacagactagatccgcacgactactcgag

SEQ ID NO: 43951 - DNA, 30 bp, Artificial Sequence
  Synthetic oligonucleotide
ggatagtaaatggcgactagggacctcgag

SEQ ID NO: 43952 - DNA, 30 bp, Artificial Sequence
  Synthetic oligonucleotide
tagaaaggcacaaagcaagcacggttcgag

SEQ ID NO: 43953 - DNA, 30 bp, Artificial Sequence
  Synthetic oligonucleotide
ggcggaacggattcatggttatgtttcgag

SEQ ID NO: 43954 - DNA, 30 bp, Artificial Sequence
  Synthetic oligonucleotide
agtacgctaaaatatgcataggataaggag

SEQ ID NO: 43955 - DNA, 30 bp, Artificial Sequence
  Synthetic oligonucleotide
aggttggatattaactgccatatgcaggag

SEQ ID NO: 43956 - DNA, 30 bp, Artificial Sequence
  Synthetic oligonucleotide
tttaggatgtacgctactaccagcgaggag

SEQ ID NO: 43957 - DNA, 30 bp, Artificial Sequence
  Synthetic oligonucleotide
cccacgacagctcccattctagaggaggag

SEQ ID NO: 43958 - DNA, 30 bp, Artificial Sequence
  Synthetic oligonucleotide
cgaggagacaggtctgtgcggcaaacggag

SEQ ID NO: 43959 - DNA, 30 bp, Artificial Sequence
  Synthetic oligonucleotide
taacgtccaaagctactgtggaacgcggag

SEQ ID NO: 43960 - DNA, 30 bp, Artificial Sequence
  Synthetic oligonucleotide
cctgtagccacgaaccagttaggggcggag

SEQ ID NO: 43961 - DNA, 30 bp, Artificial Sequence
  Synthetic oligonucleotide
aacgagcggagaagtgttggactatcggag

SEQ ID NO: 43962 - DNA, 30 bp, Artificial Sequence
  Synthetic oligonucleotide
aacaagataggcagggaacaagtctcggag

SEQ ID NO: 43963 - DNA, 30 bp, Artificial Sequence
  Synthetic oligonucleotide
gacattgtggcgaatatcaattagtcggag

SEQ ID NO: 43964 - DNA, 30 bp, Artificial Sequence
  Synthetic oligonucleotide
ttcgaggcaggagcgtggtaattgtcggag

SEQ ID NO: 43965 - DNA, 30 bp, Artificial Sequence
  Synthetic oligonucleotide
cggatatcgcgaacgaaaacattaagggag

SEQ ID NO: 43966 - DNA, 30 bp, Artificial Sequence
  Synthetic oligonucleotide
tgggttcgtaaccacagttggtacagggag

SEQ ID NO: 43967 - DNA, 30 bp, Artificial Sequence
  Synthetic oligonucleotide
tcgataaataatgcggttaacaggagggag

SEQ ID NO: 43968 - DNA, 30 bp, Artificial Sequence
  Synthetic oligonucleotide
tggaccatgggatctgcagtcatacgggag

SEQ ID NO: 43969 - DNA, 30 bp, Artificial Sequence
  Synthetic oligonucleotide
cgtgggctgtgtcaattctgagcaggggag

SEQ ID NO: 43970 - DNA, 31 bp, Artificial Sequence
  Synthetic oligonucleotide
attcgaaacaaggtactacatcctaatggag

SEQ ID NO: 43971 - DNA, 30 bp, Artificial Sequence
  Synthetic oligonucleotide
cggttggggacgcgaaatttgaccctggag

SEQ ID NO: 43972 - DNA, 30 bp, Artificial Sequence
  Synthetic oligonucleotide
cgctgatgacgatttatacagcgcctggag

SEQ ID NO: 43973 - DNA, 30 bp, Artificial Sequence
  Synthetic oligonucleotide
aagaggacagtgcctgggccaaacgtggag

SEQ ID NO: 43974 - DNA, 30 bp, Artificial Sequence
  Synthetic oligonucleotide
agatcacttcgtaaataggacatcgtggag

SEQ ID NO: 43975 - DNA, 30 bp, Artificial Sequence
  Synthetic oligonucleotide
gacaactaaaagtgaggtatgaaggtggag

SEQ ID NO: 43976 - DNA, 30 bp, Artificial Sequence
  Synthetic oligonucleotide
taacggcagatagacgtaagctcattggag

SEQ ID NO: 43977 - DNA, 30 bp, Artificial Sequence
  Synthetic oligonucleotide
gctagcagtttcgaaccaagtagcttggag

SEQ ID NO: 43978 - DNA, 30 bp, Artificial Sequence
  Synthetic oligonucleotide
tgctgcaaccgatgagtacaatgtttggag

SEQ ID NO: 43979 - DNA, 30 bp, Artificial Sequence
  Synthetic oligonucleotide
agtcgctcggcgggttccgagtcaaatgag

SEQ ID NO: 43980 - DNA, 30 bp, Artificial Sequence
  Synthetic oligonucleotide
tggacagaactccttaagataattaatgag

SEQ ID NO: 43981 - DNA, 30 bp, Artificial Sequence
  Synthetic oligonucleotide
aacttagggagcgcgcgagtggtagatgag

SEQ ID NO: 43982 - DNA, 30 bp, Artificial Sequence
  Synthetic oligonucleotide
cacaacccagcagttagaaatgactatgag

SEQ ID NO: 43983 - DNA, 30 bp, Artificial Sequence
  Synthetic oligonucleotide
ttacgtgagaattacgagacaacgtatgag

SEQ ID NO: 43984 - DNA, 30 bp, Artificial Sequence
  Synthetic oligonucleotide
tagaatggcaggactaggagatacactgag

SEQ ID NO: 43985 - DNA, 30 bp, Artificial Sequence
  Synthetic oligonucleotide
acttcccacgaggagcccagcgccactgag

SEQ ID NO: 43986 - DNA, 30 bp, Artificial Sequence
  Synthetic oligonucleotide
aggccacgaaggtgggtaagtaagactgag

SEQ ID NO: 43987 - DNA, 30 bp, Artificial Sequence
  Synthetic oligonucleotide
actatgccaacggcgctagcggctactgag

SEQ ID NO: 43988 - DNA, 30 bp, Artificial Sequence
  Synthetic oligonucleotide
gttgtaataaacataaacagtactcctgag

SEQ ID NO: 43989 - DNA, 30 bp, Artificial Sequence
  Synthetic oligonucleotide
cgctcgagaatagaggaagcagaggctgag

SEQ ID NO: 43990 - DNA, 30 bp, Artificial Sequence
  Synthetic oligonucleotide
tcgcaagactcgggtcgggcgtgatctgag

SEQ ID NO: 43991 - DNA, 30 bp, Artificial Sequence
  Synthetic oligonucleotide
agaagacaattagtgtagagctggtctgag

SEQ ID NO: 43992 - DNA, 30 bp, Artificial Sequence
  Synthetic oligonucleotide
tacgttggggagacagtaaaggattctgag

SEQ ID NO: 43993 - DNA, 30 bp, Artificial Sequence
  Synthetic oligonucleotide
aacaagataagggagcatggcccgagtgag

SEQ ID NO: 43994 - DNA, 30 bp, Artificial Sequence
  Synthetic oligonucleotide
tggatggacaatttacacgtcgggagtgag

SEQ ID NO: 43995 - DNA, 30 bp, Artificial Sequence
  Synthetic oligonucleotide
ctgttatggaacgagcgtattgatagtgag

SEQ ID NO: 43996 - DNA, 31 bp, Artificial Sequence
  Synthetic oligonucleotide
tgggatccagtctggcaaatcgggtagtgag

SEQ ID NO: 43997 - DNA, 30 bp, Artificial Sequence
  Synthetic oligonucleotide
gttagtgtaataccttcggggagacgtgag

SEQ ID NO: 43998 - DNA, 30 bp, Artificial Sequence
  Synthetic oligonucleotide
tgttggatgagaataattcgatcgcgtgag

SEQ ID NO: 43999 - DNA, 30 bp, Artificial Sequence
  Synthetic oligonucleotide
cagggtgagttcgaactaatcctgcgtgag

SEQ ID NO: 44000 - DNA, 30 bp, Artificial Sequence
  Synthetic oligonucleotide
cagatctgcgaatccatcacaaaaggtgag

SEQ ID NO: 44001 - DNA, 30 bp, Artificial Sequence
  Synthetic oligonucleotide
tcgtcaatgctgagagtcgcgaagtgtgag

SEQ ID NO: 44002 - DNA, 30 bp, Artificial Sequence
  Synthetic oligonucleotide
gcgaccatcagcatgtgactttacattgag

SEQ ID NO: 44003 - DNA, 30 bp, Artificial Sequence
  Synthetic oligonucleotide
atgggggtgaagcggagagggtagattgag

SEQ ID NO: 44004 - DNA, 30 bp, Artificial Sequence
  Synthetic oligonucleotide
catgtggagaactccgtgcatcgtcttgag

SEQ ID NO: 44005 - DNA, 30 bp, Artificial Sequence
  Synthetic oligonucleotide
tgctcatgtacggagaggcgacgggttgag

SEQ ID NO: 44006 - DNA, 30 bp, Artificial Sequence
  Synthetic oligonucleotide
cttacaagcgtatctccatgcactgttgag

SEQ ID NO: 44007 - DNA, 30 bp, Artificial Sequence
  Synthetic oligonucleotide
cagactaacgagaaggtattatcatttgag

SEQ ID NO: 44008 - DNA, 30 bp, Artificial Sequence
  Synthetic oligonucleotide
acagccggcatgatagaatgctcctttgag

SEQ ID NO: 44009 - DNA, 30 bp, Artificial Sequence
  Synthetic oligonucleotide
ctagacggatagacggcggattacaaatag

SEQ ID NO: 44010 - DNA, 30 bp, Artificial Sequence
  Synthetic oligonucleotide
atctgcgacgatgcgtcccagtggaaatag

SEQ ID NO: 44011 - DNA, 30 bp, Artificial Sequence
  Synthetic oligonucleotide
ggggcttcagtcagtctgaacgggcaatag

SEQ ID NO: 44012 - DNA, 30 bp, Artificial Sequence
  Synthetic oligonucleotide
gtagcgtctcactgagcaaggatagaatag

SEQ ID NO: 44013 - DNA, 30 bp, Artificial Sequence
  Synthetic oligonucleotide
acgcttgcaattagtaagcaccgaacatag

SEQ ID NO: 44014 - DNA, 30 bp, Artificial Sequence
  Synthetic oligonucleotide
gtcagaggtttgggactaacaagaccatag

SEQ ID NO: 44015 - DNA, 30 bp, Artificial Sequence
  Synthetic oligonucleotide
ttggcagtgggagcatgtgcgcacgcatag

SEQ ID NO: 44016 - DNA, 30 bp, Artificial Sequence
  Synthetic oligonucleotide
caggagagttcttctccagtcagctcatag

SEQ ID NO: 44017 - DNA, 30 bp, Artificial Sequence
  Synthetic oligonucleotide
agacggcacttagttggtgtctgctcatag

SEQ ID NO: 44018 - DNA, 30 bp, Artificial Sequence
  Synthetic oligonucleotide
ggtatcagcgaaggaagcgatggcagatag

SEQ ID NO: 44019 - DNA, 30 bp, Artificial Sequence
  Synthetic oligonucleotide
tgacaacaatctcggaaataaaagcgatag

SEQ ID NO: 44020 - DNA, 30 bp, Artificial Sequence
  Synthetic oligonucleotide
tggggcgtcgtcctgttcccgaatcgatag

SEQ ID NO: 44021 - DNA, 28 bp, Artificial Sequence
  Synthetic oligonucleotide
aggtatccgcatgactgaccgaggatag

SEQ ID NO: 44022 - DNA, 30 bp, Artificial Sequence
  Synthetic oligonucleotide
gcaggggatatccagcaatggataggatag

SEQ ID NO: 44023 - DNA, 30 bp, Artificial Sequence
  Synthetic oligonucleotide
tcaccaacgatggtgatcaaggcatgatag

SEQ ID NO: 44024 - DNA, 30 bp, Artificial Sequence
  Synthetic oligonucleotide
ctcgcaatacgtccaccacacgctatatag

SEQ ID NO: 44025 - DNA, 30 bp, Artificial Sequence
  Synthetic oligonucleotide
aggggccggggcgaaagtatgcagctatag

SEQ ID NO: 44026 - DNA, 30 bp, Artificial Sequence
  Synthetic oligonucleotide
gtggcgcatctatatcatcaaccgctatag

SEQ ID NO: 44027 - DNA, 30 bp, Artificial Sequence
  Synthetic oligonucleotide
ccaagcatccaatccgccgtgtccgtatag

SEQ ID NO: 44028 - DNA, 30 bp, Artificial Sequence
  Synthetic oligonucleotide
cactagtccagactggtcaaacgtgtatag

SEQ ID NO: 44029 - DNA, 30 bp, Artificial Sequence
  Synthetic oligonucleotide
cgaggtattactacagaaaaagcgttatag

SEQ ID NO: 44030 - DNA, 30 bp, Artificial Sequence
  Synthetic oligonucleotide
acgccggcaggagtggcatgcacaaactag

SEQ ID NO: 44031 - DNA, 30 bp, Artificial Sequence
  Synthetic oligonucleotide
ggtgagtaccccctaaatacgctagactag

SEQ ID NO: 44032 - DNA, 30 bp, Artificial Sequence
  Synthetic oligonucleotide
acagtttaaggatgtggataggcgtactag

SEQ ID NO: 44033 - DNA, 30 bp, Artificial Sequence
  Synthetic oligonucleotide
gaaacgccattatgaaaaataacttactag

SEQ ID NO: 44034 - DNA, 30 bp, Artificial Sequence
  Synthetic oligonucleotide
tggatacatcacgtgcattcgccaagctag

SEQ ID NO: 44035 - DNA, 30 bp, Artificial Sequence
  Synthetic oligonucleotide
aggggaagtggagctaattccgcgggctag

SEQ ID NO: 44036 - DNA, 30 bp, Artificial Sequence
  Synthetic oligonucleotide
acggggggctagggtatttaaccggtctag

SEQ ID NO: 44037 - DNA, 30 bp, Artificial Sequence
  Synthetic oligonucleotide
tccgagacagaaaagtcgcccacacagtag

SEQ ID NO: 44038 - DNA, 30 bp, Artificial Sequence
  Synthetic oligonucleotide
ataaggggacagaagagttgcctctagtag

SEQ ID NO: 44039 - DNA, 30 bp, Artificial Sequence
  Synthetic oligonucleotide
agtagggactggtaagcatcgaaaacgtag

SEQ ID NO: 44040 - DNA, 30 bp, Artificial Sequence
  Synthetic oligonucleotide
caataactcgagtgaagcacgtgaacgtag

SEQ ID NO: 44041 - DNA, 30 bp, Artificial Sequence
  Synthetic oligonucleotide
ctgatacgctgattcagtatcgaaccgtag

SEQ ID NO: 44042 - DNA, 30 bp, Artificial Sequence
  Synthetic oligonucleotide
cgatttttcaagagtgaacttcggccgtag

SEQ ID NO: 44043 - DNA, 31 bp, Artificial Sequence
  Synthetic oligonucleotide
caaggcgagatacggtcggaagacggcgtag

SEQ ID NO: 44044 - DNA, 30 bp, Artificial Sequence
  Synthetic oligonucleotide
caagaagcgtactcgacgtcccgatcgtag

SEQ ID NO: 44045 - DNA, 30 bp, Artificial Sequence
  Synthetic oligonucleotide
cacacgacatcgcacttaatcgcaaggtag

SEQ ID NO: 44046 - DNA, 30 bp, Artificial Sequence
  Synthetic oligonucleotide
aacaaaaactctggaaaagtcggcaggtag

SEQ ID NO: 44047 - DNA, 30 bp, Artificial Sequence
  Synthetic oligonucleotide
ttcgaagcgaatccgatatctggcaggtag

SEQ ID NO: 44048 - DNA, 30 bp, Artificial Sequence
  Synthetic oligonucleotide
taaggaagtcttacagtggctgaccggtag

SEQ ID NO: 44049 - DNA, 30 bp, Artificial Sequence
  Synthetic oligonucleotide
ggagttcgagttcacgtggaccgtgggtag

SEQ ID NO: 44050 - DNA, 30 bp, Artificial Sequence
  Synthetic oligonucleotide
atcggaggtatggatacgcaacgttggtag

SEQ ID NO: 44051 - DNA, 30 bp, Artificial Sequence
  Synthetic oligonucleotide
tctgagagactcgactcgatctagatgtag

SEQ ID NO: 44052 - DNA, 30 bp, Artificial Sequence
  Synthetic oligonucleotide
tggtaagttagattcgtaataaacgtgtag

SEQ ID NO: 44053 - DNA, 30 bp, Artificial Sequence
  Synthetic oligonucleotide
caatccgcgaatagtggatgttgggtgtag

SEQ ID NO: 44054 - DNA, 30 bp, Artificial Sequence
  Synthetic oligonucleotide
acgcaaattcagttaaatgcgtaaaattag

SEQ ID NO: 44055 - DNA, 31 bp, Artificial Sequence
  Synthetic oligonucleotide
caaacggagggataggagtccctgcaattag

SEQ ID NO: 44056 - DNA, 30 bp, Artificial Sequence
  Synthetic oligonucleotide
aaatgcgcaagctccaagacctaacattag

SEQ ID NO: 44057 - DNA, 30 bp, Artificial Sequence
  Synthetic oligonucleotide
gtgcgtgaccagttgcaataggcagattag

SEQ ID NO: 44058 - DNA, 30 bp, Artificial Sequence
  Synthetic oligonucleotide
taggggaggtgtcttgtgaggtgatattag

SEQ ID NO: 44059 - DNA, 30 bp, Artificial Sequence
  Synthetic oligonucleotide
gataacaaatcacccggaatgatgtattag

SEQ ID NO: 44060 - DNA, 30 bp, Artificial Sequence
  Synthetic oligonucleotide
ccacctccgaaatcaggagtcggaccttag

SEQ ID NO: 44061 - DNA, 30 bp, Artificial Sequence
  Synthetic oligonucleotide
caagactgggaatacatatacgatccttag

SEQ ID NO: 44062 - DNA, 30 bp, Artificial Sequence
  Synthetic oligonucleotide
ccagccgataaatattacgtcgacagttag

SEQ ID NO: 44063 - DNA, 30 bp, Artificial Sequence
  Synthetic oligonucleotide
cagccaggtctaaggggttatgggagttag

SEQ ID NO: 44064 - DNA, 30 bp, Artificial Sequence
  Synthetic oligonucleotide
acgtcgctgactgagcccaagttgcgttag

SEQ ID NO: 44065 - DNA, 30 bp, Artificial Sequence
  Synthetic oligonucleotide
cggaattgactcgcgcctgcgcagggttag

SEQ ID NO: 44066 - DNA, 30 bp, Artificial Sequence
  Synthetic oligonucleotide
cgaacatactggagtaatggctgttgttag

SEQ ID NO: 44067 - DNA, 30 bp, Artificial Sequence
  Synthetic oligonucleotide
tgacacactagtccggtaagaagtatttag

SEQ ID NO: 44068 - DNA, 30 bp, Artificial Sequence
  Synthetic oligonucleotide
tggcaccaccccatctaggcctacgtttag

SEQ ID NO: 44069 - DNA, 30 bp, Artificial Sequence
  Synthetic oligonucleotide
accgtagggcatgctaatgaaggacaaacg

SEQ ID NO: 44070 - DNA, 30 bp, Artificial Sequence
  Synthetic oligonucleotide
gaaccggctgtagagcgaaacctacaaacg

SEQ ID NO: 44071 - DNA, 30 bp, Artificial Sequence
  Synthetic oligonucleotide
ggtactgtattgaacgacaaatcgcaaacg

SEQ ID NO: 44072 - DNA, 30 bp, Artificial Sequence
  Synthetic oligonucleotide
tgtacagggagtcgggaagtctcgcaaacg

SEQ ID NO: 44073 - DNA, 30 bp, Artificial Sequence
  Synthetic oligonucleotide
cgatactcgcacagtaacagggggcaaacg

SEQ ID NO: 44074 - DNA, 30 bp, Artificial Sequence
  Synthetic oligonucleotide
aacaaattaactgaagggtcccgagaaacg

SEQ ID NO: 44075 - DNA, 30 bp, Artificial Sequence
  Synthetic oligonucleotide
ggtacaaagcgtactagagctttcgaaacg

SEQ ID NO: 44076 - DNA, 30 bp, Artificial Sequence
  Synthetic oligonucleotide
catgtcgttgggagacagtgaagataaacg

SEQ ID NO: 44077 - DNA, 30 bp, Artificial Sequence
  Synthetic oligonucleotide
gagcaagggatcccaccattcatgacaacg

SEQ ID NO: 44078 - DNA, 30 bp, Artificial Sequence
  Synthetic oligonucleotide
tagtgtgcatgccaaaggagtgctgcaacg

SEQ ID NO: 44079 - DNA, 30 bp, Artificial Sequence
  Synthetic oligonucleotide
ggaaggaaaacaatagttatgttgtcaacg

SEQ ID NO: 44080 - DNA, 31 bp, Artificial Sequence
  Synthetic oligonucleotide
ccttaagaacgccgatatcgcgctaagaacg

SEQ ID NO: 44081 - DNA, 30 bp, Artificial Sequence
  Synthetic oligonucleotide
agggtaacctggggtacgggcatcagaacg

SEQ ID NO: 44082 - DNA, 30 bp, Artificial Sequence
  Synthetic oligonucleotide
tcgactgagacactcttatctgggagaacg

SEQ ID NO: 44083 - DNA, 30 bp, Artificial Sequence
  Synthetic oligonucleotide
gtcaagggatcgtcgagctaattacgaacg

SEQ ID NO: 44084 - DNA, 30 bp, Artificial Sequence
  Synthetic oligonucleotide
cattatcacccaaattggtaagcaggaacg

SEQ ID NO: 44085 - DNA, 30 bp, Artificial Sequence
  Synthetic oligonucleotide
ggaggagcatccaaaacgtatgtctgaacg

SEQ ID NO: 44086 - DNA, 30 bp, Artificial Sequence
  Synthetic oligonucleotide
atgggaaggcagtaagacttcgcaataacg

SEQ ID NO: 44087 - DNA, 30 bp, Artificial Sequence
  Synthetic oligonucleotide
ccggatgcataacacactacacatctaacg

SEQ ID NO: 44088 - DNA, 30 bp, Artificial Sequence
  Synthetic oligonucleotide
gagcattataaacgtatgaaaacagtaacg

SEQ ID NO: 44089 - DNA, 30 bp, Artificial Sequence
  Synthetic oligonucleotide
gacactgatgcgggcaggacaacaaacacg

SEQ ID NO: 44090 - DNA, 30 bp, Artificial Sequence
  Synthetic oligonucleotide
cgagtaggcataggctcgatttggaacacg

SEQ ID NO: 44091 - DNA, 30 bp, Artificial Sequence
  Synthetic oligonucleotide
gttcaaaaacaatggaaaaaaacacacacg

SEQ ID NO: 44092 - DNA, 30 bp, Artificial Sequence
  Synthetic oligonucleotide
atgcgtcggactatcagtgaatagcacacg

SEQ ID NO: 44093 - DNA, 30 bp, Artificial Sequence
  Synthetic oligonucleotide
ggctagtagagacaagacacgagggacacg

SEQ ID NO: 44094 - DNA, 30 bp, Artificial Sequence
  Synthetic oligonucleotide
cgtgctcgagaccacattgctgcctacacg

SEQ ID NO: 44095 - DNA, 30 bp, Artificial Sequence
  Synthetic oligonucleotide
caatctcggtggaggaaaagtgcgaccacg

SEQ ID NO: 44096 - DNA, 30 bp, Artificial Sequence
  Synthetic oligonucleotide
cactgagtaacatcagaattgtataccacg

SEQ ID NO: 44097 - DNA, 30 bp, Artificial Sequence
  Synthetic oligonucleotide
tcgtgaatagtatatcgttttgcacccacg

SEQ ID NO: 44098 - DNA, 30 bp, Artificial Sequence
  Synthetic oligonucleotide
gaacggatactcacgggaatgagccccacg

SEQ ID NO: 44099 - DNA, 30 bp, Artificial Sequence
  Synthetic oligonucleotide
ggaatagcgaaacctgttcatagccccacg

SEQ ID NO: 44100 - DNA, 30 bp, Artificial Sequence
  Synthetic oligonucleotide
tatagctaccaaacacaaggggggcccacg

SEQ ID NO: 44101 - DNA, 30 bp, Artificial Sequence
  Synthetic oligonucleotide
cacacgttgtagggggtagaataaagcacg

SEQ ID NO: 44102 - DNA, 30 bp, Artificial Sequence
  Synthetic oligonucleotide
cgtaggggcccacgagggagagtaggcacg

SEQ ID NO: 44103 - DNA, 30 bp, Artificial Sequence
  Synthetic oligonucleotide
acccaacagcaccgaaatttaggactcacg

SEQ ID NO: 44104 - DNA, 30 bp, Artificial Sequence
  Synthetic oligonucleotide
gggcatatcatgaagtcggcaagtttcacg

SEQ ID NO: 44105 - DNA, 30 bp, Artificial Sequence
  Synthetic oligonucleotide
agtgggagaacctaatgtaggatgaagacg

SEQ ID NO: 44106 - DNA, 30 bp, Artificial Sequence
  Synthetic oligonucleotide
ccgggggggtcaaagatgaacaagtagacg

SEQ ID NO: 44107 - DNA, 30 bp, Artificial Sequence
  Synthetic oligonucleotide
taaatagggtatgtgggagaggtgacgacg

SEQ ID NO: 44108 - DNA, 30 bp, Artificial Sequence
  Synthetic oligonucleotide
gcaaagatgggagggtgacatgagaggacg

SEQ ID NO: 44109 - DNA, 30 bp, Artificial Sequence
  Synthetic oligonucleotide
cgggccaattcccactaatcactgaggacg

SEQ ID NO: 44110 - DNA, 30 bp, Artificial Sequence
  Synthetic oligonucleotide
cagaagaatatacgtctagcaagcgggacg

SEQ ID NO: 44111 - DNA, 30 bp, Artificial Sequence
  Synthetic oligonucleotide
aagtgcaaaccatgatatgtcaaggggacg

SEQ ID NO: 44112 - DNA, 30 bp, Artificial Sequence
  Synthetic oligonucleotide
aactaatgaaagaactgactagatgggacg

SEQ ID NO: 44113 - DNA, 30 bp, Artificial Sequence
  Synthetic oligonucleotide
aggctgagcaaactatcgtgttgctggacg

SEQ ID NO: 44114 - DNA, 30 bp, Artificial Sequence
  Synthetic oligonucleotide
taggatgctatttaaggagagacaatgacg

SEQ ID NO: 44115 - DNA, 30 bp, Artificial Sequence
  Synthetic oligonucleotide
agaccaagcgaagaatctgcagacatgacg

SEQ ID NO: 44116 - DNA, 30 bp, Artificial Sequence
  Synthetic oligonucleotide
actgttagccagggtgcctaagccaatacg

SEQ ID NO: 44117 - DNA, 30 bp, Artificial Sequence
  Synthetic oligonucleotide
gacggcaacgatctgtcttgacaccatacg

SEQ ID NO: 44118 - DNA, 30 bp, Artificial Sequence
  Synthetic oligonucleotide
acagaaagtaatgtgctcaatgtagatacg

SEQ ID NO: 44119 - DNA, 30 bp, Artificial Sequence
  Synthetic oligonucleotide
gtaagccggctaggcaaccactgcgatacg

SEQ ID NO: 44120 - DNA, 30 bp, Artificial Sequence
  Synthetic oligonucleotide
agatgatctaacatcgtgaagtgcgatacg

SEQ ID NO: 44121 - DNA, 30 bp, Artificial Sequence
  Synthetic oligonucleotide
aagttaggaccactcagcgcactggatacg

SEQ ID NO: 44122 - DNA, 30 bp, Artificial Sequence
  Synthetic oligonucleotide
aagggtggagacagcaaccccccgactacg

SEQ ID NO: 44123 - DNA, 30 bp, Artificial Sequence
  Synthetic oligonucleotide
atggggagtctaaagtcggcaagacctacg

SEQ ID NO: 44124 - DNA, 30 bp, Artificial Sequence
  Synthetic oligonucleotide
tcgtctatgggtttgggggcaacagctacg

SEQ ID NO: 44125 - DNA, 30 bp, Artificial Sequence
  Synthetic oligonucleotide
gcgtggtggaccggtctgactactagtacg

SEQ ID NO: 44126 - DNA, 30 bp, Artificial Sequence
  Synthetic oligonucleotide
ccaacgggcaagcagctaacaatcggtacg

SEQ ID NO: 44127 - DNA, 30 bp, Artificial Sequence
  Synthetic oligonucleotide
acatagactactccgcttggacagggtacg

SEQ ID NO: 44128 - DNA, 30 bp, Artificial Sequence
  Synthetic oligonucleotide
ctgagggtaatactagctggaggcaaaccg

SEQ ID NO: 44129 - DNA, 30 bp, Artificial Sequence
  Synthetic oligonucleotide
cagaattgtgcttcgatcaccggcaaaccg

SEQ ID NO: 44130 - DNA, 30 bp, Artificial Sequence
  Synthetic oligonucleotide
ctgttcaaagatcaaactctgttcgaaccg

SEQ ID NO: 44131 - DNA, 30 bp, Artificial Sequence
  Synthetic oligonucleotide
aggcatatcccactaaagctcaacccaccg

SEQ ID NO: 44132 - DNA, 30 bp, Artificial Sequence
  Synthetic oligonucleotide
ggttatggctgcgtaagtcacatcccaccg

SEQ ID NO: 44133 - DNA, 30 bp, Artificial Sequence
  Synthetic oligonucleotide
gtcattcaattcaagcggcatgtggcaccg

SEQ ID NO: 44134 - DNA, 30 bp, Artificial Sequence
  Synthetic oligonucleotide
gtggggagacccatgaagataacgtcaccg

SEQ ID NO: 44135 - DNA, 30 bp, Artificial Sequence
  Synthetic oligonucleotide
ttgtaccgctgtggagatcacacccgaccg

SEQ ID NO: 44136 - DNA, 30 bp, Artificial Sequence
  Synthetic oligonucleotide
ccattcaaatcagaaaaaggcaagcgaccg

SEQ ID NO: 44137 - DNA, 30 bp, Artificial Sequence
  Synthetic oligonucleotide
gagctaaggggcgacaaatgtgctcgaccg

SEQ ID NO: 44138 - DNA, 30 bp, Artificial Sequence
  Synthetic oligonucleotide
accgaacggatggtgtaggaagtcctaccg

SEQ ID NO: 44139 - DNA, 30 bp, Artificial Sequence
  Synthetic oligonucleotide
catgtaactgaaagataaataaggctaccg

SEQ ID NO: 44140 - DNA, 30 bp, Artificial Sequence
  Synthetic oligonucleotide
cgctgaacaaaattaactatattcgtaccg

SEQ ID NO: 44141 - DNA, 30 bp, Artificial Sequence
  Synthetic oligonucleotide
caatacggcgttcgataggcaaagttaccg

SEQ ID NO: 44142 - DNA, 30 bp, Artificial Sequence
  Synthetic oligonucleotide
agtcgccgtcgggagatctcaccgttaccg

SEQ ID NO: 44143 - DNA, 30 bp, Artificial Sequence
  Synthetic oligonucleotide
cgacttgtacggtgtgggattgggttaccg

SEQ ID NO: 44144 - DNA, 30 bp, Artificial Sequence
  Synthetic oligonucleotide
taggctcgggcgcgattacataatcacccg

SEQ ID NO: 44145 - DNA, 30 bp, Artificial Sequence
  Synthetic oligonucleotide
ggtggcatatcatacccagcccaggccccg

SEQ ID NO: 44146 - DNA, 30 bp, Artificial Sequence
  Synthetic oligonucleotide
accatgcgaatccggacctggttccgcccg

SEQ ID NO: 44147 - DNA, 30 bp, Artificial Sequence
  Synthetic oligonucleotide
taagataagggaaccaacggaattcgcccg

SEQ ID NO: 44148 - DNA, 30 bp, Artificial Sequence
  Synthetic oligonucleotide
agtggatggtgattaaataagggcggcccg

SEQ ID NO: 44149 - DNA, 30 bp, Artificial Sequence
  Synthetic oligonucleotide
ggctgtgctgagaatgcacgaaaagtcccg

SEQ ID NO: 44150 - DNA, 30 bp, Artificial Sequence
  Synthetic oligonucleotide
ccatagatacggccaagggacagaaagccg

SEQ ID NO: 44151 - DNA, 30 bp, Artificial Sequence
  Synthetic oligonucleotide
aagaccggattcgtgtgtagttaagagccg

SEQ ID NO: 44152 - DNA, 30 bp, Artificial Sequence
  Synthetic oligonucleotide
gatccttaaaaggggagcaaaaatgagccg

SEQ ID NO: 44153 - DNA, 30 bp, Artificial Sequence
  Synthetic oligonucleotide
tggtgggacccgatcatacgctgtacgccg

SEQ ID NO: 44154 - DNA, 30 bp, Artificial Sequence
  Synthetic oligonucleotide
tgcagcttaataatacatacgaagccgccg

SEQ ID NO: 44155 - DNA, 30 bp, Artificial Sequence
  Synthetic oligonucleotide
gaccaatgcgaatcactgaaccacgcgccg

SEQ ID NO: 44156 - DNA, 30 bp, Artificial Sequence
  Synthetic oligonucleotide
tgataaacaccactaatatgagtcgcgccg

SEQ ID NO: 44157 - DNA, 30 bp, Artificial Sequence
  Synthetic oligonucleotide
actcacgaggtattggaaggcttatcgccg

SEQ ID NO: 44158 - DNA, 30 bp, Artificial Sequence
  Synthetic oligonucleotide
cgtaagagtcattgttgatggaagaggccg

SEQ ID NO: 44159 - DNA, 30 bp, Artificial Sequence
  Synthetic oligonucleotide
aagagggaccagagtaataagagctggccg

SEQ ID NO: 44160 - DNA, 30 bp, Artificial Sequence
  Synthetic oligonucleotide
cgttaatgagtatgcccggcgacactgccg

SEQ ID NO: 44161 - DNA, 30 bp, Artificial Sequence
  Synthetic oligonucleotide
cgattctaactacgatcgatatcattgccg

SEQ ID NO: 44162 - DNA, 30 bp, Artificial Sequence
  Synthetic oligonucleotide
gggggcctaatgaccggcgcatgaaatccg

SEQ ID NO: 44163 - DNA, 30 bp, Artificial Sequence
  Synthetic oligonucleotide
atagtcaaagccaatggtcctgcgaatccg

SEQ ID NO: 44164 - DNA, 30 bp, Artificial Sequence
  Synthetic oligonucleotide
tcgtcgagtgcatagcacattgctaatccg

SEQ ID NO: 44165 - DNA, 30 bp, Artificial Sequence
  Synthetic oligonucleotide
gccatgtgcaacaaccctaaaggacctccg

SEQ ID NO: 44166 - DNA, 30 bp, Artificial Sequence
  Synthetic oligonucleotide
cgactagaaactcaagcaatggagtctccg

SEQ ID NO: 44167 - DNA, 30 bp, Artificial Sequence
  Synthetic oligonucleotide
acggataacgggggacatggcgaacgtccg

SEQ ID NO: 44168 - DNA, 30 bp, Artificial Sequence
  Synthetic oligonucleotide
tgcttctgttggatagcgagttggcgtccg

SEQ ID NO: 44169 - DNA, 30 bp, Artificial Sequence
  Synthetic oligonucleotide
tacccactgtaaaaacgtggagaaggtccg

SEQ ID NO: 44170 - DNA, 30 bp, Artificial Sequence
  Synthetic oligonucleotide
taaagagagtcacagatggcacgccttccg

SEQ ID NO: 44171 - DNA, 30 bp, Artificial Sequence
  Synthetic oligonucleotide
taactcgagctaaagagggccaactttccg

SEQ ID NO: 44172 - DNA, 30 bp, Artificial Sequence
  Synthetic oligonucleotide
gcggtttggagcgaaatgtcatacaaagcg

SEQ ID NO: 44173 - DNA, 30 bp, Artificial Sequence
  Synthetic oligonucleotide
gataagagtcttccagaagtaaacgaagcg

SEQ ID NO: 44174 - DNA, 30 bp, Artificial Sequence
  Synthetic oligonucleotide
gtttcggtaaaggatacacaactcgaagcg

SEQ ID NO: 44175 - DNA, 30 bp, Artificial Sequence
  Synthetic oligonucleotide
aaaagtgccctaagtcgtaaaaactaagcg

SEQ ID NO: 44176 - DNA, 30 bp, Artificial Sequence
  Synthetic oligonucleotide
cataggagggagattggaaggtccacagcg

SEQ ID NO: 44177 - DNA, 30 bp, Artificial Sequence
  Synthetic oligonucleotide
gatgtaacctagtaaataagatacccagcg

SEQ ID NO: 44178 - DNA, 30 bp, Artificial Sequence
  Synthetic oligonucleotide
ttatgcaagggtcggcgctcaaatccagcg

SEQ ID NO: 44179 - DNA, 30 bp, Artificial Sequence
  Synthetic oligonucleotide
cgcttctgtgatagagaaccttggtcagcg

SEQ ID NO: 44180 - DNA, 30 bp, Artificial Sequence
  Synthetic oligonucleotide
tgctgtaaaaaatgcgaatagtcttcagcg

SEQ ID NO: 44181 - DNA, 30 bp, Artificial Sequence
  Synthetic oligonucleotide
taaggggtggattcgttaagggcgatagcg

SEQ ID NO: 44182 - DNA, 30 bp, Artificial Sequence
  Synthetic oligonucleotide
agtaagcgagccgccatgtattcggtagcg

SEQ ID NO: 44183 - DNA, 29 bp, Artificial Sequence
  Synthetic oligonucleotide
aagcgaggatagacgactggttaaacgcg

SEQ ID NO: 44184 - DNA, 30 bp, Artificial Sequence
  Synthetic oligonucleotide
tggtggaaagctcgcatactccagaccgcg

SEQ ID NO: 44185 - DNA, 30 bp, Artificial Sequence
  Synthetic oligonucleotide
gttgagtgtaatcgacgagacattaccgcg

SEQ ID NO: 44186 - DNA, 30 bp, Artificial Sequence
  Synthetic oligonucleotide
aagaaggaatgagagcgaggagaggccgcg

SEQ ID NO: 44187 - DNA, 30 bp, Artificial Sequence
  Synthetic oligonucleotide
ggagtggaagtacgaaaacgtcaatgcgcg

SEQ ID NO: 44188 - DNA, 30 bp, Artificial Sequence
  Synthetic oligonucleotide
gaggcgacataatgcggtaatgggctcgcg

SEQ ID NO: 44189 - DNA, 30 bp, Artificial Sequence
  Synthetic oligonucleotide
cataactatgtctatagaacatgattcgcg

SEQ ID NO: 44190 - DNA, 30 bp, Artificial Sequence
  Synthetic oligonucleotide
gaatcgactaaaggacactcgaaccaggcg

SEQ ID NO: 44191 - DNA, 30 bp, Artificial Sequence
  Synthetic oligonucleotide
tgcacgctaagtgatgcatagggtcaggcg

SEQ ID NO: 44192 - DNA, 30 bp, Artificial Sequence
  Synthetic oligonucleotide
atgacgccaatcgaggccaacagcgaggcg

SEQ ID NO: 44193 - DNA, 30 bp, Artificial Sequence
  Synthetic oligonucleotide
tcacagccgcaagtgtggcagtcgtaggcg

SEQ ID NO: 44194 - DNA, 30 bp, Artificial Sequence
  Synthetic oligonucleotide
tcttactgcaatcagatcctcagaccggcg

SEQ ID NO: 44195 - DNA, 30 bp, Artificial Sequence
  Synthetic oligonucleotide
caacaggaattacaacctgatagttcggcg

SEQ ID NO: 44196 - DNA, 30 bp, Artificial Sequence
  Synthetic oligonucleotide
acaatagctaacacagtaagatacggggcg

SEQ ID NO: 44197 - DNA, 30 bp, Artificial Sequence
  Synthetic oligonucleotide
tcgcagaggtagataaaagaaattatggcg

SEQ ID NO: 44198 - DNA, 30 bp, Artificial Sequence
  Synthetic oligonucleotide
aaggaaacacaaacaacctcagttatggcg

SEQ ID NO: 44199 - DNA, 30 bp, Artificial Sequence
  Synthetic oligonucleotide
taagaaggatgggaagtcgcgcgcctggcg

SEQ ID NO: 44200 - DNA, 30 bp, Artificial Sequence
  Synthetic oligonucleotide
gtttcgagcgagtttccgaccgaggtggcg

SEQ ID NO: 44201 - DNA, 30 bp, Artificial Sequence
  Synthetic oligonucleotide
cgtccggacatcatacacaccatggtggcg

SEQ ID NO: 44202 - DNA, 30 bp, Artificial Sequence
  Synthetic oligonucleotide
ccggatccagacctacagcggaagttggcg

SEQ ID NO: 44203 - DNA, 30 bp, Artificial Sequence
  Synthetic oligonucleotide
gtagagctggctcggttaggatgacctgcg

SEQ ID NO: 44204 - DNA, 30 bp, Artificial Sequence
  Synthetic oligonucleotide
cagcgtggacttcaagggatatagcctgcg

SEQ ID NO: 44205 - DNA, 30 bp, Artificial Sequence
  Synthetic oligonucleotide
gtcagaaagagattttgaagagggtctgcg

SEQ ID NO: 44206 - DNA, 30 bp, Artificial Sequence
  Synthetic oligonucleotide
acggcaggtatcgcggcggtatctcgtgcg

SEQ ID NO: 44207 - DNA, 30 bp, Artificial Sequence
  Synthetic oligonucleotide
tgggctagttcggcgactaggagtcgtgcg

SEQ ID NO: 44208 - DNA, 30 bp, Artificial Sequence
  Synthetic oligonucleotide
ccaaatgagaggatcattacagctggtgcg

SEQ ID NO: 44209 - DNA, 30 bp, Artificial Sequence
  Synthetic oligonucleotide
tcgtaagggtaacgggtgggctaggttgcg

SEQ ID NO: 44210 - DNA, 30 bp, Artificial Sequence
  Synthetic oligonucleotide
agagctttaaacctatcgtgaagaaaatcg

SEQ ID NO: 44211 - DNA, 30 bp, Artificial Sequence
  Synthetic oligonucleotide
atgagcagcgataaatctaggagacaatcg

SEQ ID NO: 44212 - DNA, 30 bp, Artificial Sequence
  Synthetic oligonucleotide
agtgtagactcacgggcgaactcagaatcg

SEQ ID NO: 44213 - DNA, 30 bp, Artificial Sequence
  Synthetic oligonucleotide
caatcagtaatagcatttcatatagaatcg

SEQ ID NO: 44214 - DNA, 30 bp, Artificial Sequence
  Synthetic oligonucleotide
tcaggggtggagcgttgctgaacctaatcg

SEQ ID NO: 44215 - DNA, 30 bp, Artificial Sequence
  Synthetic oligonucleotide
ctcggtagcggagggaacttagcctaatcg

SEQ ID NO: 44216 - DNA, 30 bp, Artificial Sequence
  Synthetic oligonucleotide
tgcttaggaagccccgaaagtgggtaatcg

SEQ ID NO: 44217 - DNA, 30 bp, Artificial Sequence
  Synthetic oligonucleotide
agtcttctgcgcgtgctgttcggcccatcg

SEQ ID NO: 44218 - DNA, 30 bp, Artificial Sequence
  Synthetic oligonucleotide
gaataataggggagaacacacgggccatcg

SEQ ID NO: 44219 - DNA, 30 bp, Artificial Sequence
  Synthetic oligonucleotide
acactcggactatcatcatgaaattcatcg

SEQ ID NO: 44220 - DNA, 30 bp, Artificial Sequence
  Synthetic oligonucleotide
tcaaataaaatgctacaagtccagagatcg

SEQ ID NO: 44221 - DNA, 30 bp, Artificial Sequence
  Synthetic oligonucleotide
aacaatggtcaacattacagaaggagatcg

SEQ ID NO: 44222 - DNA, 30 bp, Artificial Sequence
  Synthetic oligonucleotide
tcagataccgagtattctgtaatacgatcg

SEQ ID NO: 44223 - DNA, 30 bp, Artificial Sequence
  Synthetic oligonucleotide
tacacatcggaccactggcgtacaggatcg

SEQ ID NO: 44224 - DNA, 30 bp, Artificial Sequence
  Synthetic oligonucleotide
cgggaagcttgcttggaagccaggggatcg

SEQ ID NO: 44225 - DNA, 30 bp, Artificial Sequence
  Synthetic oligonucleotide
cgaagagtgatgatgtttaaagcttgatcg

SEQ ID NO: 44226 - DNA, 30 bp, Artificial Sequence
  Synthetic oligonucleotide
aggttcaattcgggtcttacatgcatatcg

SEQ ID NO: 44227 - DNA, 30 bp, Artificial Sequence
  Synthetic oligonucleotide
tcaaacggctaacaggatacagagatatcg

SEQ ID NO: 44228 - DNA, 30 bp, Artificial Sequence
  Synthetic oligonucleotide
cgataaggcaaaccttattaaactatatcg

SEQ ID NO: 44229 - DNA, 30 bp, Artificial Sequence
  Synthetic oligonucleotide
cactcctatccgtcacacttgagtctatcg

SEQ ID NO: 44230 - DNA, 30 bp, Artificial Sequence
  Synthetic oligonucleotide
ggcgatcgccgctgaccatccagtttatcg

SEQ ID NO: 44231 - DNA, 30 bp, Artificial Sequence
  Synthetic oligonucleotide
tgataatttccatagcagaacacaaactcg

SEQ ID NO: 44232 - DNA, 31 bp, Artificial Sequence
  Synthetic oligonucleotide
agtgagatatgtctaaggcgagatcaactcg

SEQ ID NO: 44233 - DNA, 30 bp, Artificial Sequence
  Synthetic oligonucleotide
atcgtgacagctggcgactgactgaactcg

SEQ ID NO: 44234 - DNA, 30 bp, Artificial Sequence
  Synthetic oligonucleotide
cacagtgacatgattttgtcgaaagactcg

SEQ ID NO: 44235 - DNA, 30 bp, Artificial Sequence
  Synthetic oligonucleotide
agccagaggatcaagctcagcgtggactcg

SEQ ID NO: 44236 - DNA, 30 bp, Artificial Sequence
  Synthetic oligonucleotide
atgaaatgccccggatctacggcgacctcg

SEQ ID NO: 44237 - DNA, 30 bp, Artificial Sequence
  Synthetic oligonucleotide
cggataacgtaacacctatacagttcctcg

SEQ ID NO: 44238 - DNA, 30 bp, Artificial Sequence
  Synthetic oligonucleotide
cgaggtgagcttattaccctctccagctcg

SEQ ID NO: 44239 - DNA, 30 bp, Artificial Sequence
  Synthetic oligonucleotide
aggtcgaaaatagtcgatttttgcagctcg

SEQ ID NO: 44240 - DNA, 30 bp, Artificial Sequence
  Synthetic oligonucleotide
gaagcaacccatggatgacaacagagctcg

SEQ ID NO: 44241 - DNA, 30 bp, Artificial Sequence
  Synthetic oligonucleotide
gcaaggctagccgtgcagttaccgcgctcg

SEQ ID NO: 44242 - DNA, 30 bp, Artificial Sequence
  Synthetic oligonucleotide
acgcgggcccaacagcctaccgatcgctcg

SEQ ID NO: 44243 - DNA, 30 bp, Artificial Sequence
  Synthetic oligonucleotide
atgacatttagcgttcgggaggatcgctcg

SEQ ID NO: 44244 - DNA, 30 bp, Artificial Sequence
  Synthetic oligonucleotide
catagatatcatgtgaactgcgaatgctcg

SEQ ID NO: 44245 - DNA, 30 bp, Artificial Sequence
  Synthetic oligonucleotide
tgtattcaatgtttcaatgcgatctgctcg

SEQ ID NO: 44246 - DNA, 30 bp, Artificial Sequence
  Synthetic oligonucleotide
ggacaagtgtgaaagtaagcctaaatctcg

SEQ ID NO: 44247 - DNA, 30 bp, Artificial Sequence
  Synthetic oligonucleotide
aatgagcaatatacggcaccatggatctcg

SEQ ID NO: 44248 - DNA, 30 bp, Artificial Sequence
  Synthetic oligonucleotide
gcggagtgcagacggtatggcgcgttctcg

SEQ ID NO: 44249 - DNA, 30 bp, Artificial Sequence
  Synthetic oligonucleotide
tggtttagtcgaaattctgccgcgaagtcg

SEQ ID NO: 44250 - DNA, 31 bp, Artificial Sequence
  Synthetic oligonucleotide
ctagaacagcagttctgtcaaatctaagtcg

SEQ ID NO: 44251 - DNA, 30 bp, Artificial Sequence
  Synthetic oligonucleotide
gtaccccagttagatcagttcagcgagtcg

SEQ ID NO: 44252 - DNA, 30 bp, Artificial Sequence
  Synthetic oligonucleotide
aggaactaagggagaaaagatgattagtcg

SEQ ID NO: 44253 - DNA, 30 bp, Artificial Sequence
  Synthetic oligonucleotide
gtggcactaagccaccctcaatcgtcgtcg

SEQ ID NO: 44254 - DNA, 31 bp, Artificial Sequence
  Synthetic oligonucleotide
tgggatgaacaaaatgagtactcgcaggtcg

SEQ ID NO: 44255 - DNA, 30 bp, Artificial Sequence
  Synthetic oligonucleotide
tgcttaaagctgcgaaaatgttggaggtcg

SEQ ID NO: 44256 - DNA, 30 bp, Artificial Sequence
  Synthetic oligonucleotide
cgtggggcatattattccgtccaccggtcg

SEQ ID NO: 44257 - DNA, 30 bp, Artificial Sequence
  Synthetic oligonucleotide
atgtgtcatctgagatattaatcgcggtcg

SEQ ID NO: 44258 - DNA, 30 bp, Artificial Sequence
  Synthetic oligonucleotide
tgtcacagcggtaaaattcgtggcgggtcg

SEQ ID NO: 44259 - DNA, 30 bp, Artificial Sequence
  Synthetic oligonucleotide
gtgaaggtgctgactgtcacatgaatgtcg

SEQ ID NO: 44260 - DNA, 30 bp, Artificial Sequence
  Synthetic oligonucleotide
tcagaagtcctgctaagatttcagatgtcg

SEQ ID NO: 44261 - DNA, 30 bp, Artificial Sequence
  Synthetic oligonucleotide
ctgaaatgtggtcagggtctatggatgtcg

SEQ ID NO: 44262 - DNA, 30 bp, Artificial Sequence
  Synthetic oligonucleotide
agcgttcaataaggcataactacattgtcg

SEQ ID NO: 44263 - DNA, 30 bp, Artificial Sequence
  Synthetic oligonucleotide
ggacagaaagggactgttcacttaaattcg

SEQ ID NO: 44264 - DNA, 30 bp, Artificial Sequence
  Synthetic oligonucleotide
ggggaaccatcatcggcggagagacattcg

SEQ ID NO: 44265 - DNA, 30 bp, Artificial Sequence
  Synthetic oligonucleotide
gcgatatgtgtagcagttggggcctattcg

SEQ ID NO: 44266 - DNA, 30 bp, Artificial Sequence
  Synthetic oligonucleotide
ggccataacatgcgaatataaggaacttcg

SEQ ID NO: 44267 - DNA, 30 bp, Artificial Sequence
  Synthetic oligonucleotide
gtatcgaaggcaagatcgtaccggacttcg

SEQ ID NO: 44268 - DNA, 30 bp, Artificial Sequence
  Synthetic oligonucleotide
cgacaaataggtatgtcgtgcatgacttcg

SEQ ID NO: 44269 - DNA, 30 bp, Artificial Sequence
  Synthetic oligonucleotide
acacacaactaaagacctcagtcaccttcg

SEQ ID NO: 44270 - DNA, 30 bp, Artificial Sequence
  Synthetic oligonucleotide
cggaaaacacgaagggacggataaagttcg

SEQ ID NO: 44271 - DNA, 30 bp, Artificial Sequence
  Synthetic oligonucleotide
ccagaggagtgagtaatgttgaccggttcg

SEQ ID NO: 44272 - DNA, 30 bp, Artificial Sequence
  Synthetic oligonucleotide
cagatagggcgattagtagcataatgttcg

SEQ ID NO: 44273 - DNA, 30 bp, Artificial Sequence
  Synthetic oligonucleotide
tctgcaataggaataaaagtgggagtttcg

SEQ ID NO: 44274 - DNA, 30 bp, Artificial Sequence
  Synthetic oligonucleotide
cgcggaaggaggttcacaacaagaaaaagg

SEQ ID NO: 44275 - DNA, 30 bp, Artificial Sequence
  Synthetic oligonucleotide
gcgcgagtgcgacgattacccgtaaaaagg

SEQ ID NO: 44276 - DNA, 30 bp, Artificial Sequence
  Synthetic oligonucleotide
ggtgcccaacccgtctgggcgatacaaagg

SEQ ID NO: 44277 - DNA, 30 bp, Artificial Sequence
  Synthetic oligonucleotide
ttacgtggatgacccgagtacgaagaaagg

SEQ ID NO: 44278 - DNA, 30 bp, Artificial Sequence
  Synthetic oligonucleotide
catggccaactgggccaatgagccgaaagg

SEQ ID NO: 44279 - DNA, 30 bp, Artificial Sequence
  Synthetic oligonucleotide
cggctaaacagccatccagaaatcgaaagg

SEQ ID NO: 44280 - DNA, 30 bp, Artificial Sequence
  Synthetic oligonucleotide
ttggttaaatgtaggaacatcttgacaagg

SEQ ID NO: 44281 - DNA, 30 bp, Artificial Sequence
  Synthetic oligonucleotide
ggctaagtagtattatgcttagggccaagg

SEQ ID NO: 44282 - DNA, 30 bp, Artificial Sequence
  Synthetic oligonucleotide
atggaatggggacaagggctgtcgtcaagg

SEQ ID NO: 44283 - DNA, 30 bp, Artificial Sequence
  Synthetic oligonucleotide
aagggacgttcctattagtaacacagaagg

SEQ ID NO: 44284 - DNA, 30 bp, Artificial Sequence
  Synthetic oligonucleotide
tctgacaacgcgtaagccattactggaagg

SEQ ID NO: 44285 - DNA, 30 bp, Artificial Sequence
  Synthetic oligonucleotide
aggcatgagatgtggcattagcagtgaagg

SEQ ID NO: 44286 - DNA, 30 bp, Artificial Sequence
  Synthetic oligonucleotide
gataaaaccggcagatgtacttagtgaagg

SEQ ID NO: 44287 - DNA, 30 bp, Artificial Sequence
  Synthetic oligonucleotide
ctcacctaagggcgcggaggtggaataagg

SEQ ID NO: 44288 - DNA, 30 bp, Artificial Sequence
  Synthetic oligonucleotide
acgccacgaatggctgaataggtcataagg

SEQ ID NO: 44289 - DNA, 30 bp, Artificial Sequence
  Synthetic oligonucleotide
agctaaacgatgcataaccatgggctaagg

SEQ ID NO: 44290 - DNA, 30 bp, Artificial Sequence
  Synthetic oligonucleotide
cgcgtcagtgccgtgtaatatcaagtaagg

SEQ ID NO: 44291 - DNA, 30 bp, Artificial Sequence
  Synthetic oligonucleotide
cgggaattgcagtgatcgtgaccagtaagg

SEQ ID NO: 44292 - DNA, 30 bp, Artificial Sequence
  Synthetic oligonucleotide
gcgctagactcgaaacaccgccaggtaagg

SEQ ID NO: 44293 - DNA, 30 bp, Artificial Sequence
  Synthetic oligonucleotide
tcggtaaggcaattagcgcctagccacagg

SEQ ID NO: 44294 - DNA, 30 bp, Artificial Sequence
  Synthetic oligonucleotide
cgatcctggatgttatgacatcaagacagg

SEQ ID NO: 44295 - DNA, 30 bp, Artificial Sequence
  Synthetic oligonucleotide
tcttgtgtaaagtgccgtagaggagacagg

SEQ ID NO: 44296 - DNA, 30 bp, Artificial Sequence
  Synthetic oligonucleotide
ggaggtttacccacaaagatacccgacagg

SEQ ID NO: 44297 - DNA, 30 bp, Artificial Sequence
  Synthetic oligonucleotide
caataatgtgtgaggataggtggatacagg

SEQ ID NO: 44298 - DNA, 30 bp, Artificial Sequence
  Synthetic oligonucleotide
gggggacatatcgcttccagtcactacagg

SEQ ID NO: 44299 - DNA, 30 bp, Artificial Sequence
  Synthetic oligonucleotide
gacgggaggccttttgctagatataccagg

SEQ ID NO: 44300 - DNA, 30 bp, Artificial Sequence
  Synthetic oligonucleotide
ttacggatcacctagatgtcgggacccagg

SEQ ID NO: 44301 - DNA, 30 bp, Artificial Sequence
  Synthetic oligonucleotide
ggggtagttaggactgcccacaaatccagg

SEQ ID NO: 44302 - DNA, 30 bp, Artificial Sequence
  Synthetic oligonucleotide
acgccaccagttgggccacatctatccagg

SEQ ID NO: 44303 - DNA, 30 bp, Artificial Sequence
  Synthetic oligonucleotide
acgactcagctttattcatagatgggcagg

SEQ ID NO: 44304 - DNA, 30 bp, Artificial Sequence
  Synthetic oligonucleotide
gataaggctagccccgaatgcaatggcagg

SEQ ID NO: 44305 - DNA, 30 bp, Artificial Sequence
  Synthetic oligonucleotide
acacactccggatagcaacacgaatgcagg

SEQ ID NO: 44306 - DNA, 30 bp, Artificial Sequence
  Synthetic oligonucleotide
cagggaatcaaattgctgatgacctgcagg

SEQ ID NO: 44307 - DNA, 30 bp, Artificial Sequence
  Synthetic oligonucleotide
ataagtaggacactcatggagccaatcagg

SEQ ID NO: 44308 - DNA, 30 bp, Artificial Sequence
  Synthetic oligonucleotide
tcacagtgaagtgcgttgtaggacatcagg

SEQ ID NO: 44309 - DNA, 30 bp, Artificial Sequence
  Synthetic oligonucleotide
gggggttaacgtcacgggggaaccatcagg

SEQ ID NO: 44310 - DNA, 30 bp, Artificial Sequence
  Synthetic oligonucleotide
tcatcaaaattctgtgaggatgcgatcagg

SEQ ID NO: 44311 - DNA, 30 bp, Artificial Sequence
  Synthetic oligonucleotide
gttgcacgaatttctcgacaatacgtcagg

SEQ ID NO: 44312 - DNA, 30 bp, Artificial Sequence
  Synthetic oligonucleotide
gaatgtagtacgaagaactagatcgtcagg

SEQ ID NO: 44313 - DNA, 30 bp, Artificial Sequence
  Synthetic oligonucleotide
ctatgcatcgagtaaactactgccaagagg

SEQ ID NO: 44314 - DNA, 30 bp, Artificial Sequence
  Synthetic oligonucleotide
ggaccataccaagtacgaggcccgaagagg

SEQ ID NO: 44315 - DNA, 30 bp, Artificial Sequence
  Synthetic oligonucleotide
gaggattcttccagagcttgcgcccagagg

SEQ ID NO: 44316 - DNA, 30 bp, Artificial Sequence
  Synthetic oligonucleotide
taatactcacgccagaagaaagcggagagg

SEQ ID NO: 44317 - DNA, 30 bp, Artificial Sequence
  Synthetic oligonucleotide
agatcgacaaggggccggctcgcatagagg

SEQ ID NO: 44318 - DNA, 30 bp, Artificial Sequence
  Synthetic oligonucleotide
tctgaaccaaaaggggagccgcgatagagg

SEQ ID NO: 44319 - DNA, 30 bp, Artificial Sequence
  Synthetic oligonucleotide
tgagtaatcacgatgcccaaaccagcgagg

SEQ ID NO: 44320 - DNA, 30 bp, Artificial Sequence
  Synthetic oligonucleotide
ggacatgttccgtcaaggcgatgagcgagg

SEQ ID NO: 44321 - DNA, 30 bp, Artificial Sequence
  Synthetic oligonucleotide
actgaatacttggtcacagtaattgcgagg

SEQ ID NO: 44322 - DNA, 30 bp, Artificial Sequence
  Synthetic oligonucleotide
tacatcaaaaacatagactcggactcgagg

SEQ ID NO: 44323 - DNA, 30 bp, Artificial Sequence
  Synthetic oligonucleotide
tcgaagtgaaaagccctgttcgcaaggagg

SEQ ID NO: 44324 - DNA, 30 bp, Artificial Sequence
  Synthetic oligonucleotide
atgcatgacgaatgcaattcgacagggagg

SEQ ID NO: 44325 - DNA, 30 bp, Artificial Sequence
  Synthetic oligonucleotide
gtctagtgagtttacatgtagtgggggagg

SEQ ID NO: 44326 - DNA, 30 bp, Artificial Sequence
  Synthetic oligonucleotide
ccgtcggtgctgagtagttaggactggagg

SEQ ID NO: 44327 - DNA, 30 bp, Artificial Sequence
  Synthetic oligonucleotide
cgtggccgaaccaaacgacagaatatgagg

SEQ ID NO: 44328 - DNA, 30 bp, Artificial Sequence
  Synthetic oligonucleotide
atcgtgaaacttaccggactagcaaatagg

SEQ ID NO: 44329 - DNA, 30 bp, Artificial Sequence
  Synthetic oligonucleotide
cgaccagtacgcgtgacacgccccgatagg

SEQ ID NO: 44330 - DNA, 30 bp, Artificial Sequence
  Synthetic oligonucleotide
caacttcatggacgtcaaggtatagctagg

SEQ ID NO: 44331 - DNA, 30 bp, Artificial Sequence
  Synthetic oligonucleotide
gcgaaacacgtgtacaaggattattctagg

SEQ ID NO: 44332 - DNA, 30 bp, Artificial Sequence
  Synthetic oligonucleotide
gcggattaaaacgtctggttggatggtagg

SEQ ID NO: 44333 - DNA, 30 bp, Artificial Sequence
  Synthetic oligonucleotide
aacagaacagaacgtaagagtagtggtagg

SEQ ID NO: 44334 - DNA, 30 bp, Artificial Sequence
  Synthetic oligonucleotide
tctcggagttagaacggagggagaattagg

SEQ ID NO: 44335 - DNA, 30 bp, Artificial Sequence
  Synthetic oligonucleotide
tcagtggctggaaagtaaatgcgcattagg

SEQ ID NO: 44336 - DNA, 30 bp, Artificial Sequence
  Synthetic oligonucleotide
atgccaagcgagcataaggaggaggttagg

SEQ ID NO: 44337 - DNA, 30 bp, Artificial Sequence
  Synthetic oligonucleotide
acaacatacactagtactgaactgtttagg

SEQ ID NO: 44338 - DNA, 30 bp, Artificial Sequence
  Synthetic oligonucleotide
agggacgatgggcgcatgctgtgaaaacgg

SEQ ID NO: 44339 - DNA, 30 bp, Artificial Sequence
  Synthetic oligonucleotide
acggatttcagtggaccgagatgcaaacgg

SEQ ID NO: 44340 - DNA, 30 bp, Artificial Sequence
  Synthetic oligonucleotide
tagggcatgtacaaatgatgcaaacaacgg

SEQ ID NO: 44341 - DNA, 30 bp, Artificial Sequence
  Synthetic oligonucleotide
tgaaaaaatgatgtggcaatgaagcaacgg

SEQ ID NO: 44342 - DNA, 30 bp, Artificial Sequence
  Synthetic oligonucleotide
attaagagaatcaacacaagtgcgcaacgg

SEQ ID NO: 44343 - DNA, 30 bp, Artificial Sequence
  Synthetic oligonucleotide
aaatgtaaacgtaatggagaatgcgaacgg

SEQ ID NO: 44344 - DNA, 30 bp, Artificial Sequence
  Synthetic oligonucleotide
cacggctagaaaggtatacaaggtcgacgg

SEQ ID NO: 44345 - DNA, 30 bp, Artificial Sequence
  Synthetic oligonucleotide
agagactgattttgagatacgagtatacgg

SEQ ID NO: 44346 - DNA, 30 bp, Artificial Sequence
  Synthetic oligonucleotide
tcatattatgcagaggaacagagggtacgg

SEQ ID NO: 44347 - DNA, 30 bp, Artificial Sequence
  Synthetic oligonucleotide
gcgcgccaaggagtatcgagggggaaccgg

SEQ ID NO: 44348 - DNA, 30 bp, Artificial Sequence
  Synthetic oligonucleotide
ccctacagaaaacaccattcacaaagccgg

SEQ ID NO: 44349 - DNA, 30 bp, Artificial Sequence
  Synthetic oligonucleotide
gtgatgggagcgaagttagcgcagtgccgg

SEQ ID NO: 44350 - DNA, 30 bp, Artificial Sequence
  Synthetic oligonucleotide
aaacggaaacaactcccaactttgtgccgg

SEQ ID NO: 44351 - DNA, 30 bp, Artificial Sequence
  Synthetic oligonucleotide
aggaatgagtccctcaattcgtacgtccgg

SEQ ID NO: 44352 - DNA, 30 bp, Artificial Sequence
  Synthetic oligonucleotide
gggtcctaagcaaactcagcttcaccgcgg

SEQ ID NO: 44353 - DNA, 30 bp, Artificial Sequence
  Synthetic oligonucleotide
tgaggcataggttagtatgtgatcccgcgg

SEQ ID NO: 44354 - DNA, 30 bp, Artificial Sequence
  Synthetic oligonucleotide
agaaacccatcagagcggacacgcaggcgg

SEQ ID NO: 44355 - DNA, 30 bp, Artificial Sequence
  Synthetic oligonucleotide
tcggtacagaaccgtcatttggtacggcgg

SEQ ID NO: 44356 - DNA, 30 bp, Artificial Sequence
  Synthetic oligonucleotide
ggatggcacaagaccgaacaaggcatgcgg

SEQ ID NO: 44357 - DNA, 30 bp, Artificial Sequence
  Synthetic oligonucleotide
aacagatggtcgttaaagttacaactgcgg

SEQ ID NO: 44358 - DNA, 30 bp, Artificial Sequence
  Synthetic oligonucleotide
cgaatgtatagtcatcaggtgaataatcgg

SEQ ID NO: 44359 - DNA, 30 bp, Artificial Sequence
  Synthetic oligonucleotide
ataacggatggatcggtcgatgatgatcgg

SEQ ID NO: 44360 - DNA, 30 bp, Artificial Sequence
  Synthetic oligonucleotide
cgcgggtagacgggggaaggcgaatatcgg

SEQ ID NO: 44361 - DNA, 30 bp, Artificial Sequence
  Synthetic oligonucleotide
actcgaaaaaatactacggcggagactcgg

SEQ ID NO: 44362 - DNA, 30 bp, Artificial Sequence
  Synthetic oligonucleotide
tcggcaaaatagtgtcgcattagggctcgg

SEQ ID NO: 44363 - DNA, 30 bp, Artificial Sequence
  Synthetic oligonucleotide
gcactacagaaggaacagaacggggctcgg

SEQ ID NO: 44364 - DNA, 30 bp, Artificial Sequence
  Synthetic oligonucleotide
acagtgaactaaagagcgtgatcttctcgg

SEQ ID NO: 44365 - DNA, 30 bp, Artificial Sequence
  Synthetic oligonucleotide
agaacaagccgtctcagtcttgtgcgtcgg

SEQ ID NO: 44366 - DNA, 30 bp, Artificial Sequence
  Synthetic oligonucleotide
tgtcatccagataacggcgagctaggtcgg

SEQ ID NO: 44367 - DNA, 30 bp, Artificial Sequence
  Synthetic oligonucleotide
caaggccagtatcaattccgcttcaaaggg

SEQ ID NO: 44368 - DNA, 30 bp, Artificial Sequence
  Synthetic oligonucleotide
tcagattccaaggctatgtcgtgtaaaggg

SEQ ID NO: 44369 - DNA, 30 bp, Artificial Sequence
  Synthetic oligonucleotide
acactccacataccctcgttaacgcaaggg

SEQ ID NO: 44370 - DNA, 30 bp, Artificial Sequence
  Synthetic oligonucleotide
agatgcatgctacgaggggactaagaaggg

SEQ ID NO: 44371 - DNA, 30 bp, Artificial Sequence
  Synthetic oligonucleotide
aacgatgggcccttccgaaaatgataaggg

SEQ ID NO: 44372 - DNA, 30 bp, Artificial Sequence
  Synthetic oligonucleotide
tgacctcgattccgtattctttaaacaggg

SEQ ID NO: 44373 - DNA, 30 bp, Artificial Sequence
  Synthetic oligonucleotide
taacagaaagtatgtaattatagaacaggg

SEQ ID NO: 44374 - DNA, 30 bp, Artificial Sequence
  Synthetic oligonucleotide
tacgagtctgtcgggtaagaccgaacaggg

SEQ ID NO: 44375 - DNA, 30 bp, Artificial Sequence
  Synthetic oligonucleotide
aatgcaggtggagcaatatcagagacaggg

SEQ ID NO: 44376 - DNA, 30 bp, Artificial Sequence
  Synthetic oligonucleotide
agcatgccaaaacgctgcgcgatgacaggg

SEQ ID NO: 44377 - DNA, 31 bp, Artificial Sequence
  Synthetic oligonucleotide
ctccatcagaaggctgtcaggaataccaggg

SEQ ID NO: 44378 - DNA, 30 bp, Artificial Sequence
  Synthetic oligonucleotide
atatagagggggtttacccacataccaggg

SEQ ID NO: 44379 - DNA, 30 bp, Artificial Sequence
  Synthetic oligonucleotide
gatcaaatgcagacatagagcaacccaggg

SEQ ID NO: 44380 - DNA, 30 bp, Artificial Sequence
  Synthetic oligonucleotide
tgccgatgctcgtgttacgtacctccaggg

SEQ ID NO: 44381 - DNA, 31 bp, Artificial Sequence
  Synthetic oligonucleotide
gcaggaatgtatgcgagggacacgcagaggg

SEQ ID NO: 44382 - DNA, 30 bp, Artificial Sequence
  Synthetic oligonucleotide
cgctaggagatccacaagtggtctagaggg

SEQ ID NO: 44383 - DNA, 31 bp, Artificial Sequence
  Synthetic oligonucleotide
ggtttcacaaatggcagctgaacaacgaggg

SEQ ID NO: 44384 - DNA, 30 bp, Artificial Sequence
  Synthetic oligonucleotide
acgaacgacaccggaatctaacacggaggg

SEQ ID NO: 44385 - DNA, 30 bp, Artificial Sequence
  Synthetic oligonucleotide
aggaaagaagggatatatattcacggaggg

SEQ ID NO: 44386 - DNA, 30 bp, Artificial Sequence
  Synthetic oligonucleotide
gaaaaagtgctggcaaaaatcaagggaggg

SEQ ID NO: 44387 - DNA, 30 bp, Artificial Sequence
  Synthetic oligonucleotide
catactgttgatcgaaagagagaatgaggg

SEQ ID NO: 44388 - DNA, 30 bp, Artificial Sequence
  Synthetic oligonucleotide
agggtggcagtgaatataatggcaataggg

SEQ ID NO: 44389 - DNA, 30 bp, Artificial Sequence
  Synthetic oligonucleotide
cgatatctgccactcgcaatttccataggg

SEQ ID NO: 44390 - DNA, 30 bp, Artificial Sequence
  Synthetic oligonucleotide
atgggtgactgggttaagataaaagtaggg

SEQ ID NO: 44391 - DNA, 30 bp, Artificial Sequence
  Synthetic oligonucleotide
atagagatagttgaacctcaaagggtaggg

SEQ ID NO: 44392 - DNA, 30 bp, Artificial Sequence
  Synthetic oligonucleotide
aaggtggagtcagctacgcctagggtaggg

SEQ ID NO: 44393 - DNA, 30 bp, Artificial Sequence
  Synthetic oligonucleotide
tgggccaatctagtgacttgcccgttaggg

SEQ ID NO: 44394 - DNA, 29 bp, Artificial Sequence
  Synthetic oligonucleotide
gacaggattacatatatctctaaaacggg

SEQ ID NO: 44395 - DNA, 30 bp, Artificial Sequence
  Synthetic oligonucleotide
ccatataacagcagtgtcaagttaaacggg

SEQ ID NO: 44396 - DNA, 30 bp, Artificial Sequence
  Synthetic oligonucleotide
agatcggtatgctgatttcaatacgacggg

SEQ ID NO: 44397 - DNA, 30 bp, Artificial Sequence
  Synthetic oligonucleotide
agaaggagagaggttacgttgcaaaccggg

SEQ ID NO: 44398 - DNA, 30 bp, Artificial Sequence
  Synthetic oligonucleotide
cggtcgaccccgaccccattctgttgcggg

SEQ ID NO: 44399 - DNA, 30 bp, Artificial Sequence
  Synthetic oligonucleotide
ccgtcaacaaaggggcaggcttgactcggg

SEQ ID NO: 44400 - DNA, 30 bp, Artificial Sequence
  Synthetic oligonucleotide
acggattgtaacatcacgggacagctcggg

SEQ ID NO: 44401 - DNA, 30 bp, Artificial Sequence
  Synthetic oligonucleotide
tcgatccgttaaacatttcttggaaagggg

SEQ ID NO: 44402 - DNA, 30 bp, Artificial Sequence
  Synthetic oligonucleotide
atgccatgacctctcaagctatataagggg

SEQ ID NO: 44403 - DNA, 30 bp, Artificial Sequence
  Synthetic oligonucleotide
accatgccattgaaggtcacatcccagggg

SEQ ID NO: 44404 - DNA, 30 bp, Artificial Sequence
  Synthetic oligonucleotide
gagagcatccaactgaagagacaggcgggg

SEQ ID NO: 44405 - DNA, 30 bp, Artificial Sequence
  Synthetic oligonucleotide
ccatgtaccaaagaccacgagtataggggg

SEQ ID NO: 44406 - DNA, 30 bp, Artificial Sequence
  Synthetic oligonucleotide
gaacgataccgaattatgatatagtggggg

SEQ ID NO: 44407 - DNA, 30 bp, Artificial Sequence
  Synthetic oligonucleotide
gctagtagacatcggagtggagaaatgggg

SEQ ID NO: 44408 - DNA, 30 bp, Artificial Sequence
  Synthetic oligonucleotide
gttacgttccacggaagtcagatgatgggg

SEQ ID NO: 44409 - DNA, 30 bp, Artificial Sequence
  Synthetic oligonucleotide
tcaccataggtggcatcatcagctgtgggg

SEQ ID NO: 44410 - DNA, 30 bp, Artificial Sequence
  Synthetic oligonucleotide
gcctaacagatttaaaaggataaggatggg

SEQ ID NO: 44411 - DNA, 30 bp, Artificial Sequence
  Synthetic oligonucleotide
gtaagaaccctgggcaaggctcaatatggg

SEQ ID NO: 44412 - DNA, 30 bp, Artificial Sequence
  Synthetic oligonucleotide
ggacgtggggaaacatgattgccctatggg

SEQ ID NO: 44413 - DNA, 30 bp, Artificial Sequence
  Synthetic oligonucleotide
cattgagtgtggcaaaagatctgcactggg

SEQ ID NO: 44414 - DNA, 30 bp, Artificial Sequence
  Synthetic oligonucleotide
tctaagaaccgattgttccctcgccctggg

SEQ ID NO: 44415 - DNA, 30 bp, Artificial Sequence
  Synthetic oligonucleotide
gtcacaggcacagggtgagccatcgctggg

SEQ ID NO: 44416 - DNA, 30 bp, Artificial Sequence
  Synthetic oligonucleotide
cgaatatgtgctaacccgagggccagtggg

SEQ ID NO: 44417 - DNA, 30 bp, Artificial Sequence
  Synthetic oligonucleotide
tggggtacagctgcaagacgaagtagtggg

SEQ ID NO: 44418 - DNA, 30 bp, Artificial Sequence
  Synthetic oligonucleotide
aggattcgccgtgttggagatgcttgtggg

SEQ ID NO: 44419 - DNA, 30 bp, Artificial Sequence
  Synthetic oligonucleotide
tggagactttaatagccgaaatgcattggg

SEQ ID NO: 44420 - DNA, 31 bp, Artificial Sequence
  Synthetic oligonucleotide
acagaacggggggaacagctgcgcgattggg

SEQ ID NO: 44421 - DNA, 30 bp, Artificial Sequence
  Synthetic oligonucleotide
tgtgcgagctaagcactaataggtgttggg

SEQ ID NO: 44422 - DNA, 30 bp, Artificial Sequence
  Synthetic oligonucleotide
gatgaaggtaactggtagatctccaaatgg

SEQ ID NO: 44423 - DNA, 30 bp, Artificial Sequence
  Synthetic oligonucleotide
tgaggtaattgggagcgagaaggtaaatgg

SEQ ID NO: 44424 - DNA, 30 bp, Artificial Sequence
  Synthetic oligonucleotide
acaatcgtcaaataagggcctgattaatgg

SEQ ID NO: 44425 - DNA, 29 bp, Artificial Sequence
  Synthetic oligonucleotide
gtggtaggacgaaggctatgagcccatgg

SEQ ID NO: 44426 - DNA, 30 bp, Artificial Sequence
  Synthetic oligonucleotide
accgagtccgaaggcagaatgcgatcatgg

SEQ ID NO: 44427 - DNA, 30 bp, Artificial Sequence
  Synthetic oligonucleotide
cagactgctggagacaggatatgcagatgg

SEQ ID NO: 44428 - DNA, 30 bp, Artificial Sequence
  Synthetic oligonucleotide
caataaagtctcagaacttgcaggcgatgg

SEQ ID NO: 44429 - DNA, 30 bp, Artificial Sequence
  Synthetic oligonucleotide
cacagtgggcataatagaaggtcagtatgg

SEQ ID NO: 44430 - DNA, 30 bp, Artificial Sequence
  Synthetic oligonucleotide
aaacgtacggaagagccaagtcgcgtatgg

SEQ ID NO: 44431 - DNA, 30 bp, Artificial Sequence
  Synthetic oligonucleotide
ggtacaaagccacagcgacggttacactgg

SEQ ID NO: 44432 - DNA, 30 bp, Artificial Sequence
  Synthetic oligonucleotide
cgtgattgggagcggaacgtcttctactgg

SEQ ID NO: 44433 - DNA, 30 bp, Artificial Sequence
  Synthetic oligonucleotide
cggataaggcgactcaggcgacaaccctgg

SEQ ID NO: 44434 - DNA, 30 bp, Artificial Sequence
  Synthetic oligonucleotide
agcctgccagttaacacgagcaaagcctgg

SEQ ID NO: 44435 - DNA, 30 bp, Artificial Sequence
  Synthetic oligonucleotide
acaacgatagccacgtgtataagagcctgg

SEQ ID NO: 44436 - DNA, 30 bp, Artificial Sequence
  Synthetic oligonucleotide
cggcgacgtagggggcaggataacagctgg

SEQ ID NO: 44437 - DNA, 30 bp, Artificial Sequence
  Synthetic oligonucleotide
cttaagtacgaggaagaaagctatggctgg

SEQ ID NO: 44438 - DNA, 30 bp, Artificial Sequence
  Synthetic oligonucleotide
tgtcacatcaagatcatcgctgaatgctgg

SEQ ID NO: 44439 - DNA, 30 bp, Artificial Sequence
  Synthetic oligonucleotide
gggcacaaagccatttcacctgtgtgctgg

SEQ ID NO: 44440 - DNA, 30 bp, Artificial Sequence
  Synthetic oligonucleotide
tagtgaatccggacaagggtgcgactctgg

SEQ ID NO: 44441 - DNA, 30 bp, Artificial Sequence
  Synthetic oligonucleotide
tatgtaagaggggcgtatggagcgctctgg

SEQ ID NO: 44442 - DNA, 30 bp, Artificial Sequence
  Synthetic oligonucleotide
ccacagctcggataaatcgcaaaggtctgg

SEQ ID NO: 44443 - DNA, 31 bp, Artificial Sequence
  Synthetic oligonucleotide
tcaggtattcgtgcgaggtaaacttcagtgg

SEQ ID NO: 44444 - DNA, 30 bp, Artificial Sequence
  Synthetic oligonucleotide
cggtaccttaacaaaaaatgggtcgagtgg

SEQ ID NO: 44445 - DNA, 30 bp, Artificial Sequence
  Synthetic oligonucleotide
ccaaaagcagtgcaagaataaatgacgtgg

SEQ ID NO: 44446 - DNA, 30 bp, Artificial Sequence
  Synthetic oligonucleotide
aaagacaaactcccttgcaaatctccgtgg

SEQ ID NO: 44447 - DNA, 30 bp, Artificial Sequence
  Synthetic oligonucleotide
ggaagaaggaagtggcctaacgaagcgtgg

SEQ ID NO: 44448 - DNA, 30 bp, Artificial Sequence
  Synthetic oligonucleotide
cgaatcagtgtggaacaacaaagagcgtgg

SEQ ID NO: 44449 - DNA, 30 bp, Artificial Sequence
  Synthetic oligonucleotide
caagcaaaaagcacgtagcctcaaaggtgg

SEQ ID NO: 44450 - DNA, 30 bp, Artificial Sequence
  Synthetic oligonucleotide
agtcacaatgggcactgggaagttcggtgg

SEQ ID NO: 44451 - DNA, 30 bp, Artificial Sequence
  Synthetic oligonucleotide
tcaaggcggtggcgtaagtaacttgggtgg

SEQ ID NO: 44452 - DNA, 30 bp, Artificial Sequence
  Synthetic oligonucleotide
cgtagtgtccgatgataagcaggaatgtgg

SEQ ID NO: 44453 - DNA, 30 bp, Artificial Sequence
  Synthetic oligonucleotide
tgtgtggagagtacattggggcagatgtgg

SEQ ID NO: 44454 - DNA, 30 bp, Artificial Sequence
  Synthetic oligonucleotide
gaacaccagtattgggaaggtaatgtgtgg

SEQ ID NO: 44455 - DNA, 30 bp, Artificial Sequence
  Synthetic oligonucleotide
ggtaagtaattagctgaccatgtagattgg

SEQ ID NO: 44456 - DNA, 30 bp, Artificial Sequence
  Synthetic oligonucleotide
gcgatttaaacgaaagatatgcctgattgg

SEQ ID NO: 44457 - DNA, 30 bp, Artificial Sequence
  Synthetic oligonucleotide
aagcgtaagtaggtacctacatcgtattgg

SEQ ID NO: 44458 - DNA, 30 bp, Artificial Sequence
  Synthetic oligonucleotide
tccctcccgaggagagcgtacaaaacttgg

SEQ ID NO: 44459 - DNA, 30 bp, Artificial Sequence
  Synthetic oligonucleotide
ctagcgcaagacggaaaggaacgccgttgg

SEQ ID NO: 44460 - DNA, 30 bp, Artificial Sequence
  Synthetic oligonucleotide
actaaactaaagtgcgtaggtacaatttgg

SEQ ID NO: 44461 - DNA, 30 bp, Artificial Sequence
  Synthetic oligonucleotide
tggtaaggcatgatgtgtcgcactatttgg

SEQ ID NO: 44462 - DNA, 30 bp, Artificial Sequence
  Synthetic oligonucleotide
gtggtacattatagataagagaagctttgg

SEQ ID NO: 44463 - DNA, 30 bp, Artificial Sequence
  Synthetic oligonucleotide
ttacgtccttggacatgatctgacttttgg

SEQ ID NO: 44464 - DNA, 30 bp, Artificial Sequence
  Synthetic oligonucleotide
gtatatgagagtcggtaacacaaaaaaatg

SEQ ID NO: 44465 - DNA, 30 bp, Artificial Sequence
  Synthetic oligonucleotide
cgaggtaccgtcatccgctattgaaaaatg

SEQ ID NO: 44466 - DNA, 30 bp, Artificial Sequence
  Synthetic oligonucleotide
agctagaattagagatccgaaatgaaaatg

SEQ ID NO: 44467 - DNA, 30 bp, Artificial Sequence
  Synthetic oligonucleotide
ggcagaaatcgtaggcagattttacaaatg

SEQ ID NO: 44468 - DNA, 30 bp, Artificial Sequence
  Synthetic oligonucleotide
atgggtgggacgaacgggcagtggcaaatg

SEQ ID NO: 44469 - DNA, 30 bp, Artificial Sequence
  Synthetic oligonucleotide
cacaaacgagtgaattacggcgctcaaatg

SEQ ID NO: 44470 - DNA, 30 bp, Artificial Sequence
  Synthetic oligonucleotide
tgtgcttaggaacatcggccacgagaaatg

SEQ ID NO: 44471 - DNA, 30 bp, Artificial Sequence
  Synthetic oligonucleotide
ccgcgagatagctataacgaacacgaaatg

SEQ ID NO: 44472 - DNA, 30 bp, Artificial Sequence
  Synthetic oligonucleotide
gaaaggttggaggccacatgccccgaaatg

SEQ ID NO: 44473 - DNA, 30 bp, Artificial Sequence
  Synthetic oligonucleotide
ggcgcggaagttttgtatgtaacggaaatg

SEQ ID NO: 44474 - DNA, 30 bp, Artificial Sequence
  Synthetic oligonucleotide
tagcggtaaatttccgaaacttaataaatg

SEQ ID NO: 44475 - DNA, 30 bp, Artificial Sequence
  Synthetic oligonucleotide
ggacgcatctcgaaagatagcacttaaatg

SEQ ID NO: 44476 - DNA, 30 bp, Artificial Sequence
  Synthetic oligonucleotide
ggtgcactagtagatcagaaagttgcaatg

SEQ ID NO: 44477 - DNA, 30 bp, Artificial Sequence
  Synthetic oligonucleotide
aaacgattaaagccggccaccctaagaatg

SEQ ID NO: 44478 - DNA, 30 bp, Artificial Sequence
  Synthetic oligonucleotide
gtgtcactcgcggatggaaagcgtagaatg

SEQ ID NO: 44479 - DNA, 30 bp, Artificial Sequence
  Synthetic oligonucleotide
atgcaagagtaagaattgtatccacgaatg

SEQ ID NO: 44480 - DNA, 30 bp, Artificial Sequence
  Synthetic oligonucleotide
agacttgaataaagggtgacaggacgaatg

SEQ ID NO: 44481 - DNA, 30 bp, Artificial Sequence
  Synthetic oligonucleotide
gtggggatggatggtctaaaagtgcgaatg

SEQ ID NO: 44482 - DNA, 31 bp, Artificial Sequence
  Synthetic oligonucleotide
aaatcggttaacatagttgcagggaggaatg

SEQ ID NO: 44483 - DNA, 30 bp, Artificial Sequence
  Synthetic oligonucleotide
cagtgcacaacgagccgtagtcccggaatg

SEQ ID NO: 44484 - DNA, 30 bp, Artificial Sequence
  Synthetic oligonucleotide
tggtctctcatagggggaaaaggcggaatg

SEQ ID NO: 44485 - DNA, 30 bp, Artificial Sequence
  Synthetic oligonucleotide
cggatcgtgtgaacccccagtgtcataatg

SEQ ID NO: 44486 - DNA, 30 bp, Artificial Sequence
  Synthetic oligonucleotide
tgggaaacaccatcaatgaaacctataatg

SEQ ID NO: 44487 - DNA, 30 bp, Artificial Sequence
  Synthetic oligonucleotide
atgagtgtatcgatcaacaagattgtaatg

SEQ ID NO: 44488 - DNA, 30 bp, Artificial Sequence
  Synthetic oligonucleotide
ccatgctatcggattgcggaataattaatg

SEQ ID NO: 44489 - DNA, 30 bp, Artificial Sequence
  Synthetic oligonucleotide
gacccgggagctacactagagaagaacatg

SEQ ID NO: 44490 - DNA, 30 bp, Artificial Sequence
  Synthetic oligonucleotide
aatggggcagggccgcgtctttatcacatg

SEQ ID NO: 44491 - DNA, 30 bp, Artificial Sequence
  Synthetic oligonucleotide
cgggtaaaaatcaaaacatgatgtcacatg

SEQ ID NO: 44492 - DNA, 30 bp, Artificial Sequence
  Synthetic oligonucleotide
ccctgcaactggggggtgagaaccgacatg

SEQ ID NO: 44493 - DNA, 30 bp, Artificial Sequence
  Synthetic oligonucleotide
attggacagaacactaagctcatctacatg

SEQ ID NO: 44494 - DNA, 30 bp, Artificial Sequence
  Synthetic oligonucleotide
agggaaccggatccaattatctggtacatg

SEQ ID NO: 44495 - DNA, 30 bp, Artificial Sequence
  Synthetic oligonucleotide
aacagtctaatgatcagagtacctaccatg

SEQ ID NO: 44496 - DNA, 30 bp, Artificial Sequence
  Synthetic oligonucleotide
taccgattggtaggtgagacgggagccatg

SEQ ID NO: 44497 - DNA, 30 bp, Artificial Sequence
  Synthetic oligonucleotide
aactggggagaaggagtattttgggccatg

SEQ ID NO: 44498 - DNA, 30 bp, Artificial Sequence
  Synthetic oligonucleotide
tagctgccgacatccgtttaagaatccatg

SEQ ID NO: 44499 - DNA, 30 bp, Artificial Sequence
  Synthetic oligonucleotide
ttatgtgacaaaggaagtacttaaagcatg

SEQ ID NO: 44500 - DNA, 30 bp, Artificial Sequence
  Synthetic oligonucleotide
cgttctctagtcacattgggcccaggcatg

SEQ ID NO: 44501 - DNA, 30 bp, Artificial Sequence
  Synthetic oligonucleotide
tacacatccgcgtgaattagtgtaatcatg

SEQ ID NO: 44502 - DNA, 30 bp, Artificial Sequence
  Synthetic oligonucleotide
cgacgatgcggtcggctgtttaggatcatg

SEQ ID NO: 44503 - DNA, 30 bp, Artificial Sequence
  Synthetic oligonucleotide
ggaaaatcatgcgatctcccccagctcatg

SEQ ID NO: 44504 - DNA, 30 bp, Artificial Sequence
  Synthetic oligonucleotide
ttagaaacacagtcaacggcatttaagatg

SEQ ID NO: 44505 - DNA, 30 bp, Artificial Sequence
  Synthetic oligonucleotide
cgtatgaactctcttccgatagcacagatg

SEQ ID NO: 44506 - DNA, 30 bp, Artificial Sequence
  Synthetic oligonucleotide
catcaggagcggggtcatgaatacgagatg

SEQ ID NO: 44507 - DNA, 30 bp, Artificial Sequence
  Synthetic oligonucleotide
gctaaataccccaacggcgggctcgagatg

SEQ ID NO: 44508 - DNA, 30 bp, Artificial Sequence
  Synthetic oligonucleotide
atacagaatgggacttgaaatagggagatg

SEQ ID NO: 44509 - DNA, 30 bp, Artificial Sequence
  Synthetic oligonucleotide
ttaggggaagtgccaatgtatcattagatg

SEQ ID NO: 44510 - DNA, 30 bp, Artificial Sequence
  Synthetic oligonucleotide
ggcgtcaacatcctgagtaagtattagatg

SEQ ID NO: 44511 - DNA, 30 bp, Artificial Sequence
  Synthetic oligonucleotide
cgagaatcatcctcccctgtgggcacgatg

SEQ ID NO: 44512 - DNA, 30 bp, Artificial Sequence
  Synthetic oligonucleotide
tgcataggttccccacccgaaaccatgatg

SEQ ID NO: 44513 - DNA, 30 bp, Artificial Sequence
  Synthetic oligonucleotide
cgagttgcaagagcagggtgcctcatgatg

SEQ ID NO: 44514 - DNA, 30 bp, Artificial Sequence
  Synthetic oligonucleotide
cacttcgctgaagtgaggagggggatgatg

SEQ ID NO: 44515 - DNA, 30 bp, Artificial Sequence
  Synthetic oligonucleotide
acgctagaatagtcgcgtagaacagtgatg

SEQ ID NO: 44516 - DNA, 30 bp, Artificial Sequence
  Synthetic oligonucleotide
acacgccaggttatgattggttgggtgatg

SEQ ID NO: 44517 - DNA, 30 bp, Artificial Sequence
  Synthetic oligonucleotide
taccaaggcggctgagggagaactgtgatg

SEQ ID NO: 44518 - DNA, 30 bp, Artificial Sequence
  Synthetic oligonucleotide
cggagcccgagcacggaagtccacaatatg

SEQ ID NO: 44519 - DNA, 30 bp, Artificial Sequence
  Synthetic oligonucleotide
tcttgctaagggtcgtgaaatcgcaatatg

SEQ ID NO: 44520 - DNA, 30 bp, Artificial Sequence
  Synthetic oligonucleotide
ccgtgggtgcataactctgccacacatatg

SEQ ID NO: 44521 - DNA, 30 bp, Artificial Sequence
  Synthetic oligonucleotide
cacataccagggcaagccgaaatacatatg

SEQ ID NO: 44522 - DNA, 30 bp, Artificial Sequence
  Synthetic oligonucleotide
ctggtaccacgggaaatactttctcatatg

SEQ ID NO: 44523 - DNA, 30 bp, Artificial Sequence
  Synthetic oligonucleotide
ataaaaccttgaatgatcgctacggatatg

SEQ ID NO: 44524 - DNA, 30 bp, Artificial Sequence
  Synthetic oligonucleotide
cttcggctatgaaaagaaagcttggatatg

SEQ ID NO: 44525 - DNA, 30 bp, Artificial Sequence
  Synthetic oligonucleotide
cccaagagagcgggctaacgtatccctatg

SEQ ID NO: 44526 - DNA, 30 bp, Artificial Sequence
  Synthetic oligonucleotide
gcacgccgggactggcggtttaaacgtatg

SEQ ID NO: 44527 - DNA, 30 bp, Artificial Sequence
  Synthetic oligonucleotide
catggacgaagtaaggttcggtcccgtatg

SEQ ID NO: 44528 - DNA, 30 bp, Artificial Sequence
  Synthetic oligonucleotide
cctttggagggatttcgcgagaagggtatg

SEQ ID NO: 44529 - DNA, 30 bp, Artificial Sequence
  Synthetic oligonucleotide
acacatttacaggatagagtaggtggtatg

SEQ ID NO: 44530 - DNA, 30 bp, Artificial Sequence
  Synthetic oligonucleotide
agctcagctacttttcaaaccgacattatg

SEQ ID NO: 44531 - DNA, 30 bp, Artificial Sequence
  Synthetic oligonucleotide
ggggagagtaggagtaagagttttgttatg

SEQ ID NO: 44532 - DNA, 30 bp, Artificial Sequence
  Synthetic oligonucleotide
gaaaggctaacctctatactcaaaaaactg

SEQ ID NO: 44533 - DNA, 30 bp, Artificial Sequence
  Synthetic oligonucleotide
ttgtgcgatcgacaggaacgggacaaactg

SEQ ID NO: 44534 - DNA, 29 bp, Artificial Sequence
  Synthetic oligonucleotide
gaggtggcgttgagcgattgtcagaactg

SEQ ID NO: 44535 - DNA, 30 bp, Artificial Sequence
  Synthetic oligonucleotide
aggtgcaacttcttggatcagtgcgaactg

SEQ ID NO: 44536 - DNA, 30 bp, Artificial Sequence
  Synthetic oligonucleotide
acactggggagtaacccaaaataggaactg

SEQ ID NO: 44537 - DNA, 30 bp, Artificial Sequence
  Synthetic oligonucleotide
tacacgatgcgatggaactaccgcacactg

SEQ ID NO: 44538 - DNA, 30 bp, Artificial Sequence
  Synthetic oligonucleotide
gggagatggatctacctagatatagcactg

SEQ ID NO: 44539 - DNA, 30 bp, Artificial Sequence
  Synthetic oligonucleotide
cgatagtgtgtgcgaacatacactgcactg

SEQ ID NO: 44540 - DNA, 30 bp, Artificial Sequence
  Synthetic oligonucleotide
cgaccgtaaggccacaatagtggctcactg

SEQ ID NO: 44541 - DNA, 30 bp, Artificial Sequence
  Synthetic oligonucleotide
ggtaagagggtgaaaatgaaaagttcactg

SEQ ID NO: 44542 - DNA, 30 bp, Artificial Sequence
  Synthetic oligonucleotide
tcactatagaccgccaaagcgccgagactg

SEQ ID NO: 44543 - DNA, 30 bp, Artificial Sequence
  Synthetic oligonucleotide
tgcaggagccgtgggagagaatcgcgactg

SEQ ID NO: 44544 - DNA, 30 bp, Artificial Sequence
  Synthetic oligonucleotide
aacaacagggctgccgaggcagttcgactg

SEQ ID NO: 44545 - DNA, 30 bp, Artificial Sequence
  Synthetic oligonucleotide
tttgaacaataaccggaaaagtgctgactg

SEQ ID NO: 44546 - DNA, 30 bp, Artificial Sequence
  Synthetic oligonucleotide
cctagatcctcgataggtcagatcatactg

SEQ ID NO: 44547 - DNA, 30 bp, Artificial Sequence
  Synthetic oligonucleotide
caggacgagatggccatataataactactg

SEQ ID NO: 44548 - DNA, 30 bp, Artificial Sequence
  Synthetic oligonucleotide
gcttgccggtaagtaaacaggctgctactg

SEQ ID NO: 44549 - DNA, 30 bp, Artificial Sequence
  Synthetic oligonucleotide
cactagatgtagtatacaagctaagacctg

SEQ ID NO: 44550 - DNA, 30 bp, Artificial Sequence
  Synthetic oligonucleotide
cgctaaaggatgcccgattctcctgacctg

SEQ ID NO: 44551 - DNA, 30 bp, Artificial Sequence
  Synthetic oligonucleotide
acgaaacgacctaggtcaaaaggggccctg

SEQ ID NO: 44552 - DNA, 30 bp, Artificial Sequence
  Synthetic oligonucleotide
atgaaggtccgaggacctgcgacttccctg

SEQ ID NO: 44553 - DNA, 30 bp, Artificial Sequence
  Synthetic oligonucleotide
ttcgtggacagattagttgccgttcgcctg

SEQ ID NO: 44554 - DNA, 30 bp, Artificial Sequence
  Synthetic oligonucleotide
tggtcaaccttcagcgggagagacggcctg

SEQ ID NO: 44555 - DNA, 30 bp, Artificial Sequence
  Synthetic oligonucleotide
aacgagaaggctacggggcgatcatgcctg

SEQ ID NO: 44556 - DNA, 30 bp, Artificial Sequence
  Synthetic oligonucleotide
tagatacggcagaaatgcgatagactcctg

SEQ ID NO: 44557 - DNA, 30 bp, Artificial Sequence
  Synthetic oligonucleotide
aagggcagacggtgacgtacagggctcctg

SEQ ID NO: 44558 - DNA, 30 bp, Artificial Sequence
  Synthetic oligonucleotide
cagtaagaggggacgtcctacacagagctg

SEQ ID NO: 44559 - DNA, 30 bp, Artificial Sequence
  Synthetic oligonucleotide
atggtaagcttagctaggagattcccgctg

SEQ ID NO: 44560 - DNA, 30 bp, Artificial Sequence
  Synthetic oligonucleotide
tagcgtatctgatagaggacaccgaggctg

SEQ ID NO: 44561 - DNA, 30 bp, Artificial Sequence
  Synthetic oligonucleotide
cacaccctgtagtcacttgagtcgaggctg

SEQ ID NO: 44562 - DNA, 30 bp, Artificial Sequence
  Synthetic oligonucleotide
gatgagaccgcgtgaatgatctctgggctg

SEQ ID NO: 44563 - DNA, 30 bp, Artificial Sequence
  Synthetic oligonucleotide
accgggttaatagaaagtgtaccgaatctg

SEQ ID NO: 44564 - DNA, 30 bp, Artificial Sequence
  Synthetic oligonucleotide
acgtaatactttcgttaacacgggaatctg

SEQ ID NO: 44565 - DNA, 30 bp, Artificial Sequence
  Synthetic oligonucleotide
gggcatggaatcgtttgatcggtgaatctg

SEQ ID NO: 44566 - DNA, 30 bp, Artificial Sequence
  Synthetic oligonucleotide
cattggaagagctaaatggacttatatctg

SEQ ID NO: 44567 - DNA, 30 bp, Artificial Sequence
  Synthetic oligonucleotide
aggatagacatagaatccgcataacctctg

SEQ ID NO: 44568 - DNA, 30 bp, Artificial Sequence
  Synthetic oligonucleotide
gcgaaggatctatgggcacagccaagtctg

SEQ ID NO: 44569 - DNA, 30 bp, Artificial Sequence
  Synthetic oligonucleotide
ccagataatgtcacgtgactacacagtctg

SEQ ID NO: 44570 - DNA, 30 bp, Artificial Sequence
  Synthetic oligonucleotide
atggtgcaggtcttgatcaaatgaggtctg

SEQ ID NO: 44571 - DNA, 30 bp, Artificial Sequence
  Synthetic oligonucleotide
caatgaccggctagcgttgggcgatgtctg

SEQ ID NO: 44572 - DNA, 30 bp, Artificial Sequence
  Synthetic oligonucleotide
gtgacaagtccagtacgctcaatatgtctg

SEQ ID NO: 44573 - DNA, 30 bp, Artificial Sequence
  Synthetic oligonucleotide
cagtcgtgctcgctggaggaaaaacttctg

SEQ ID NO: 44574 - DNA, 30 bp, Artificial Sequence
  Synthetic oligonucleotide
tttagacatatagaatcatgaatgaaagtg

SEQ ID NO: 44575 - DNA, 30 bp, Artificial Sequence
  Synthetic oligonucleotide
ccgtgtcaggatttagatcgaggacaagtg

SEQ ID NO: 44576 - DNA, 30 bp, Artificial Sequence
  Synthetic oligonucleotide
acgagcgtcgtagatattttttagcaagtg

SEQ ID NO: 44577 - DNA, 30 bp, Artificial Sequence
  Synthetic oligonucleotide
attgtgggcgatatgcgctagaggcaagtg

SEQ ID NO: 44578 - DNA, 30 bp, Artificial Sequence
  Synthetic oligonucleotide
gcatacgtcgtcaggggaggtgagacagtg

SEQ ID NO: 44579 - DNA, 30 bp, Artificial Sequence
  Synthetic oligonucleotide
ccggaaccatcatccaggaacgtgacagtg

SEQ ID NO: 44580 - DNA, 30 bp, Artificial Sequence
  Synthetic oligonucleotide
cgggttaccagtatgtcaatggtgacagtg

SEQ ID NO: 44581 - DNA, 30 bp, Artificial Sequence
  Synthetic oligonucleotide
ccaacaaaaccgttgtgtcagcttccagtg

SEQ ID NO: 44582 - DNA, 30 bp, Artificial Sequence
  Synthetic oligonucleotide
tcgtacacgccgagagtagatccatcagtg

SEQ ID NO: 44583 - DNA, 30 bp, Artificial Sequence
  Synthetic oligonucleotide
tctcggaggacgtaagccgtgttgagagtg

SEQ ID NO: 44584 - DNA, 30 bp, Artificial Sequence
  Synthetic oligonucleotide
gaggagcatgcatagaccaatcgacgagtg

SEQ ID NO: 44585 - DNA, 30 bp, Artificial Sequence
  Synthetic oligonucleotide
cccatggcactattagaacaagcaggagtg

SEQ ID NO: 44586 - DNA, 30 bp, Artificial Sequence
  Synthetic oligonucleotide
atgaccgtaagggtgaggggaaagggagtg

SEQ ID NO: 44587 - DNA, 30 bp, Artificial Sequence
  Synthetic oligonucleotide
gcccttgtgaggctcgagagagagggagtg

SEQ ID NO: 44588 - DNA, 30 bp, Artificial Sequence
  Synthetic oligonucleotide
ggggacggcaattacctgatgcttggagtg

SEQ ID NO: 44589 - DNA, 30 bp, Artificial Sequence
  Synthetic oligonucleotide
cctgctaaacgatgacaaggagtttgagtg

SEQ ID NO: 44590 - DNA, 30 bp, Artificial Sequence
  Synthetic oligonucleotide
gggtcggcaggtcccatatgtcaaatagtg

SEQ ID NO: 44591 - DNA, 30 bp, Artificial Sequence
  Synthetic oligonucleotide
atgatttggccaaacggatcggggatagtg

SEQ ID NO: 44592 - DNA, 30 bp, Artificial Sequence
  Synthetic oligonucleotide
gaaacgcatcctgataactgatatatagtg

SEQ ID NO: 44593 - DNA, 30 bp, Artificial Sequence
  Synthetic oligonucleotide
tcagtcttagtgatcacagatgagctagtg

SEQ ID NO: 44594 - DNA, 30 bp, Artificial Sequence
  Synthetic oligonucleotide
ctgatcgatatcacgtggttgagtctagtg

SEQ ID NO: 44595 - DNA, 30 bp, Artificial Sequence
  Synthetic oligonucleotide
gtcgttgtcaacaagcgagaagtggtagtg

SEQ ID NO: 44596 - DNA, 30 bp, Artificial Sequence
  Synthetic oligonucleotide
agacaagggacaacgtaagaagatgtagtg

SEQ ID NO: 44597 - DNA, 30 bp, Artificial Sequence
  Synthetic oligonucleotide
tgggagttaggtctcaaggaggtcttagtg

SEQ ID NO: 44598 - DNA, 30 bp, Artificial Sequence
  Synthetic oligonucleotide
taccaacaaaaacgaccagacacgttagtg

SEQ ID NO: 44599 - DNA, 30 bp, Artificial Sequence
  Synthetic oligonucleotide
aaatgtatcgaagaggtagatcagaacgtg

SEQ ID NO: 44600 - DNA, 30 bp, Artificial Sequence
  Synthetic oligonucleotide
ccacagagtacgcactttcgaccaagcgtg

SEQ ID NO: 44601 - DNA, 30 bp, Artificial Sequence
  Synthetic oligonucleotide
atgagcctacatcctcgtcggaaccgcgtg

SEQ ID NO: 44602 - DNA, 30 bp, Artificial Sequence
  Synthetic oligonucleotide
gcttggcgaaagatggttaatcacggcgtg

SEQ ID NO: 44603 - DNA, 31 bp, Artificial Sequence
  Synthetic oligonucleotide
ccgtgccaaaatatgtacttttaagatcgtg

SEQ ID NO: 44604 - DNA, 30 bp, Artificial Sequence
  Synthetic oligonucleotide
cgaagctgcaaatatacattagatatcgtg

SEQ ID NO: 44605 - DNA, 30 bp, Artificial Sequence
  Synthetic oligonucleotide
ctgcagttcggataatatgggaaactcgtg

SEQ ID NO: 44606 - DNA, 30 bp, Artificial Sequence
  Synthetic oligonucleotide
acgaatcggcgagggccattagggctcgtg

SEQ ID NO: 44607 - DNA, 30 bp, Artificial Sequence
  Synthetic oligonucleotide
ggatgaaattgaattgggaatggcgtcgtg

SEQ ID NO: 44608 - DNA, 30 bp, Artificial Sequence
  Synthetic oligonucleotide
gtggtagtcgtggagctgaacaggttcgtg

SEQ ID NO: 44609 - DNA, 30 bp, Artificial Sequence
  Synthetic oligonucleotide
gaagagtcgcctgtcccaaaaagtaaggtg

SEQ ID NO: 44610 - DNA, 30 bp, Artificial Sequence
  Synthetic oligonucleotide
cgtttgctagacaactcaaaggcccaggtg

SEQ ID NO: 44611 - DNA, 30 bp, Artificial Sequence
  Synthetic oligonucleotide
gtacaaagaaaataatacgcagatcaggtg

SEQ ID NO: 44612 - DNA, 30 bp, Artificial Sequence
  Synthetic oligonucleotide
acgtgaacggcatgacggaatcgagaggtg

SEQ ID NO: 44613 - DNA, 30 bp, Artificial Sequence
  Synthetic oligonucleotide
atccacatgcaaacggtattaaggtaggtg

SEQ ID NO: 44614 - DNA, 30 bp, Artificial Sequence
  Synthetic oligonucleotide
aacgcaactacaggcgaagggttgtaggtg

SEQ ID NO: 44615 - DNA, 30 bp, Artificial Sequence
  Synthetic oligonucleotide
ccgataacgggaccacagaaattaacggtg

SEQ ID NO: 44616 - DNA, 30 bp, Artificial Sequence
  Synthetic oligonucleotide
ttacggtccaactaacgggtaaggagggtg

SEQ ID NO: 44617 - DNA, 30 bp, Artificial Sequence
  Synthetic oligonucleotide
acgggcatagcattctcacacctgcgggtg

SEQ ID NO: 44618 - DNA, 30 bp, Artificial Sequence
  Synthetic oligonucleotide
agtcggcgaaggcatctaatacctcgggtg

SEQ ID NO: 44619 - DNA, 30 bp, Artificial Sequence
  Synthetic oligonucleotide
gaatgcactaggagcagtcgatctcgggtg

SEQ ID NO: 44620 - DNA, 30 bp, Artificial Sequence
  Synthetic oligonucleotide
aggacctttcgtgcgagaatgcgaggggtg

SEQ ID NO: 44621 - DNA, 30 bp, Artificial Sequence
  Synthetic oligonucleotide
caagcttgctaaaggagacaagtgggggtg

SEQ ID NO: 44622 - DNA, 30 bp, Artificial Sequence
  Synthetic oligonucleotide
aggatgagtgctacgagttatcatatggtg

SEQ ID NO: 44623 - DNA, 29 bp, Artificial Sequence
  Synthetic oligonucleotide
cgaagaatggaatttgacagggcctggtg

SEQ ID NO: 44624 - DNA, 30 bp, Artificial Sequence
  Synthetic oligonucleotide
tggggatttgtgaaacatggtctgctggtg

SEQ ID NO: 44625 - DNA, 30 bp, Artificial Sequence
  Synthetic oligonucleotide
tcaaattccaggtcatcatatcgtctggtg

SEQ ID NO: 44626 - DNA, 30 bp, Artificial Sequence
  Synthetic oligonucleotide
tcctagctgggcaggaataagcgccatgtg

SEQ ID NO: 44627 - DNA, 30 bp, Artificial Sequence
  Synthetic oligonucleotide
ggtcgtggtggacaaaaatctcgccatgtg

SEQ ID NO: 44628 - DNA, 30 bp, Artificial Sequence
  Synthetic oligonucleotide
ggggtagatgggagctagagtatgcatgtg

SEQ ID NO: 44629 - DNA, 30 bp, Artificial Sequence
  Synthetic oligonucleotide
ctcggagggtccaaccgacaacgtcatgtg

SEQ ID NO: 44630 - DNA, 30 bp, Artificial Sequence
  Synthetic oligonucleotide
gtcaccgagttgcaaacgaattcgtatgtg

SEQ ID NO: 44631 - DNA, 30 bp, Artificial Sequence
  Synthetic oligonucleotide
aacattagaacctaaaagagatgcactgtg

SEQ ID NO: 44632 - DNA, 30 bp, Artificial Sequence
  Synthetic oligonucleotide
tcgctgcaatcgtacgaaattaagactgtg

SEQ ID NO: 44633 - DNA, 30 bp, Artificial Sequence
  Synthetic oligonucleotide
tcggtgaaacgaagtaacgggggtactgtg

SEQ ID NO: 44634 - DNA, 30 bp, Artificial Sequence
  Synthetic oligonucleotide
aggattagggtgaaggactaacacgctgtg

SEQ ID NO: 44635 - DNA, 30 bp, Artificial Sequence
  Synthetic oligonucleotide
tgtagataccccagtgtgacaaatagtgtg

SEQ ID NO: 44636 - DNA, 30 bp, Artificial Sequence
  Synthetic oligonucleotide
aggtgatatagtcgggaggaagcgggtgtg

SEQ ID NO: 44637 - DNA, 30 bp, Artificial Sequence
  Synthetic oligonucleotide
cagaagtgaaaagtgtaaaccgtatgtgtg

SEQ ID NO: 44638 - DNA, 30 bp, Artificial Sequence
  Synthetic oligonucleotide
agtctagccgtgacccgcaattactgtgtg

SEQ ID NO: 44639 - DNA, 30 bp, Artificial Sequence
  Synthetic oligonucleotide
gtggatagtgatgtgatccgtagccttgtg

SEQ ID NO: 44640 - DNA, 30 bp, Artificial Sequence
  Synthetic oligonucleotide
gtggaggatcgcattattcgatgagttgtg

SEQ ID NO: 44641 - DNA, 30 bp, Artificial Sequence
  Synthetic oligonucleotide
tcagatcgatgaggcgaattcatggttgtg

SEQ ID NO: 44642 - DNA, 30 bp, Artificial Sequence
  Synthetic oligonucleotide
gtgtcgaagcgcttgaaaaaagggtttgtg

SEQ ID NO: 44643 - DNA, 30 bp, Artificial Sequence
  Synthetic oligonucleotide
gtgcatgaactacacacgtgtcgcaaattg

SEQ ID NO: 44644 - DNA, 30 bp, Artificial Sequence
  Synthetic oligonucleotide
cgtaatgacatcggccagtgagcgaaattg

SEQ ID NO: 44645 - DNA, 30 bp, Artificial Sequence
  Synthetic oligonucleotide
ccgggcaaaggcaaagaggtggcgaaattg

SEQ ID NO: 44646 - DNA, 30 bp, Artificial Sequence
  Synthetic oligonucleotide
gcttgcgttacaataatgggccggaaattg

SEQ ID NO: 44647 - DNA, 30 bp, Artificial Sequence
  Synthetic oligonucleotide
cggctacgaccagtcccatagaatgaattg

SEQ ID NO: 44648 - DNA, 30 bp, Artificial Sequence
  Synthetic oligonucleotide
gccatgcagttaatcagataccaaacattg

SEQ ID NO: 44649 - DNA, 30 bp, Artificial Sequence
  Synthetic oligonucleotide
ttgcacaggagatacgcaagtgtgacattg

SEQ ID NO: 44650 - DNA, 30 bp, Artificial Sequence
  Synthetic oligonucleotide
agtaccagagggcgcatagactatgcattg

SEQ ID NO: 44651 - DNA, 30 bp, Artificial Sequence
  Synthetic oligonucleotide
acctagtgttgtggaaaggagtgtgcattg

SEQ ID NO: 44652 - DNA, 40 bp, Artificial Sequence
  Synthetic oligonucleotide
ttcttgttgaataaatctcgaataaactcggcttgcattg

SEQ ID NO: 44653 - DNA, 30 bp, Artificial Sequence
  Synthetic oligonucleotide
cattgcggtaaacgatggcaatccagattg

SEQ ID NO: 44654 - DNA, 30 bp, Artificial Sequence
  Synthetic oligonucleotide
acgattacatataatcagcgtacgtgattg

SEQ ID NO: 44655 - DNA, 30 bp, Artificial Sequence
  Synthetic oligonucleotide
gaagcgactggactccccaaagccgtattg

SEQ ID NO: 44656 - DNA, 30 bp, Artificial Sequence
  Synthetic oligonucleotide
agtcgaccagtggagatgtttggggtattg

SEQ ID NO: 44657 - DNA, 30 bp, Artificial Sequence
  Synthetic oligonucleotide
aggattaaccggtgactcgaccgtaacttg

SEQ ID NO: 44658 - DNA, 30 bp, Artificial Sequence
  Synthetic oligonucleotide
aaatgggtgagcgaggcgaatcggaccttg

SEQ ID NO: 44659 - DNA, 30 bp, Artificial Sequence
  Synthetic oligonucleotide
tgatagaatggtaggggtgttggcgccttg

SEQ ID NO: 44660 - DNA, 30 bp, Artificial Sequence
  Synthetic oligonucleotide
caactgcgatgggcacggagtgaggccttg

SEQ ID NO: 44661 - DNA, 30 bp, Artificial Sequence
  Synthetic oligonucleotide
cactccgaggccaattaagggtgttccttg

SEQ ID NO: 44662 - DNA, 30 bp, Artificial Sequence
  Synthetic oligonucleotide
gggcgtgggtctgttatgcgaataagcttg

SEQ ID NO: 44663 - DNA, 30 bp, Artificial Sequence
  Synthetic oligonucleotide
ggctggaagtctaaaaggtggcatagcttg

SEQ ID NO: 44664 - DNA, 30 bp, Artificial Sequence
  Synthetic oligonucleotide
aatgaataatggaaaacgagatcgcgcttg

SEQ ID NO: 44665 - DNA, 30 bp, Artificial Sequence
  Synthetic oligonucleotide
aggtcactatcgacagcataaccgtgcttg

SEQ ID NO: 44666 - DNA, 30 bp, Artificial Sequence
  Synthetic oligonucleotide
tactgccgatcgcatgataggtcgtgcttg

SEQ ID NO: 44667 - DNA, 30 bp, Artificial Sequence
  Synthetic oligonucleotide
acgtaggactgtgatcaaggttgggtcttg

SEQ ID NO: 44668 - DNA, 30 bp, Artificial Sequence
  Synthetic oligonucleotide
ggcgtcgagaacagagctgggacgttcttg

SEQ ID NO: 44669 - DNA, 30 bp, Artificial Sequence
  Synthetic oligonucleotide
agtaggaccacgagtcagaggcgtttcttg

SEQ ID NO: 44670 - DNA, 30 bp, Artificial Sequence
  Synthetic oligonucleotide
ttgggatagggacgtacttgcagacagttg

SEQ ID NO: 44671 - DNA, 30 bp, Artificial Sequence
  Synthetic oligonucleotide
cacaggcaagttgttgtcgtgatcgagttg

SEQ ID NO: 44672 - DNA, 30 bp, Artificial Sequence
  Synthetic oligonucleotide
aggatgatcgggtctaaggagttgtagttg

SEQ ID NO: 44673 - DNA, 30 bp, Artificial Sequence
  Synthetic oligonucleotide
tgtagtgtcgactaggaaaaacaaccgttg

SEQ ID NO: 44674 - DNA, 30 bp, Artificial Sequence
  Synthetic oligonucleotide
cggtaatcctgaaagaaagcatccgcgttg

SEQ ID NO: 44675 - DNA, 30 bp, Artificial Sequence
  Synthetic oligonucleotide
ccgtagcgaatagggataggcaatgcgttg

SEQ ID NO: 44676 - DNA, 30 bp, Artificial Sequence
  Synthetic oligonucleotide
aggctggagtaacagacataagatgcgttg

SEQ ID NO: 44677 - DNA, 30 bp, Artificial Sequence
  Synthetic oligonucleotide
actcccggaggtgacagcaaccggaggttg

SEQ ID NO: 44678 - DNA, 30 bp, Artificial Sequence
  Synthetic oligonucleotide
acataacaacgcaaaaatcggactaggttg

SEQ ID NO: 44679 - DNA, 30 bp, Artificial Sequence
  Synthetic oligonucleotide
gtataagtcacgaggatgtggttagggttg

SEQ ID NO: 44680 - DNA, 30 bp, Artificial Sequence
  Synthetic oligonucleotide
atagataaaagtaacgtacatcgactgttg

SEQ ID NO: 44681 - DNA, 30 bp, Artificial Sequence
  Synthetic oligonucleotide
acggcgaacactacaaagcccacggtgttg

SEQ ID NO: 44682 - DNA, 30 bp, Artificial Sequence
  Synthetic oligonucleotide
gctacacgagcagtcatcggaagggtgttg

SEQ ID NO: 44683 - DNA, 30 bp, Artificial Sequence
  Synthetic oligonucleotide
acaggaataagcggatactcgtggttgttg

SEQ ID NO: 44684 - DNA, 30 bp, Artificial Sequence
  Synthetic oligonucleotide
cacaatcgaaaaaaagcgatgcacaatttg

SEQ ID NO: 44685 - DNA, 30 bp, Artificial Sequence
  Synthetic oligonucleotide
caactgaacagcaatggtcacggtaatttg

SEQ ID NO: 44686 - DNA, 30 bp, Artificial Sequence
  Synthetic oligonucleotide
cgcataactagaagagacaagatggatttg

SEQ ID NO: 44687 - DNA, 30 bp, Artificial Sequence
  Synthetic oligonucleotide
atgcaaagagcgactccatcaaagagtttg

SEQ ID NO: 44688 - DNA, 30 bp, Artificial Sequence
  Synthetic oligonucleotide
accggctgaaacaagcgcaaaggcggtttg

SEQ ID NO: 44689 - DNA, 30 bp, Artificial Sequence
  Synthetic oligonucleotide
tcatacagaacggtcagggaagaccttttg

SEQ ID NO: 44690 - DNA, 30 bp, Artificial Sequence
  Synthetic oligonucleotide
taggttccaagcagagcgagctcagttttg

SEQ ID NO: 44691 - DNA, 30 bp, Artificial Sequence
  Synthetic oligonucleotide
gagcaaaagtgggtgcgggacaaccaaaat

SEQ ID NO: 44692 - DNA, 30 bp, Artificial Sequence
  Synthetic oligonucleotide
atcgacgagagtccttgatacttcgaaaat

SEQ ID NO: 44693 - DNA, 30 bp, Artificial Sequence
  Synthetic oligonucleotide
tcacttggtggctatgaaagcgatgaaaat

SEQ ID NO: 44694 - DNA, 30 bp, Artificial Sequence
  Synthetic oligonucleotide
accgaataaaaaatgctagcccatacaaat

SEQ ID NO: 44695 - DNA, 30 bp, Artificial Sequence
  Synthetic oligonucleotide
tcgatcgggtgtatagataagttaccaaat

SEQ ID NO: 44696 - DNA, 30 bp, Artificial Sequence
  Synthetic oligonucleotide
gcatggactacgaaggtggtaatcgcaaat

SEQ ID NO: 44697 - DNA, 30 bp, Artificial Sequence
  Synthetic oligonucleotide
cggattgcagagcatgcctaaaggagaaat

SEQ ID NO: 44698 - DNA, 30 bp, Artificial Sequence
  Synthetic oligonucleotide
ggtgaaaccgtgccaacacatatgcgaaat

SEQ ID NO: 44699 - DNA, 30 bp, Artificial Sequence
  Synthetic oligonucleotide
ccggtgcacaaaataccatagtaaggaaat

SEQ ID NO: 44700 - DNA, 30 bp, Artificial Sequence
  Synthetic oligonucleotide
ggtgaacatgggagcgatacggcactaaat

SEQ ID NO: 44701 - DNA, 30 bp, Artificial Sequence
  Synthetic oligonucleotide
cggaaaggtgtaaatgggaaacgactaaat

SEQ ID NO: 44702 - DNA, 30 bp, Artificial Sequence
  Synthetic oligonucleotide
tctaagcaccgaagcatccgaagcctaaat

SEQ ID NO: 44703 - DNA, 30 bp, Artificial Sequence
  Synthetic oligonucleotide
gaagcgtcacggaaatctatagctgtaaat

SEQ ID NO: 44704 - DNA, 30 bp, Artificial Sequence
  Synthetic oligonucleotide
gcgaagtagagcgtgacagagccaaacaat

SEQ ID NO: 44705 - DNA, 30 bp, Artificial Sequence
  Synthetic oligonucleotide
ccctaagagggacattcttaactcaacaat

SEQ ID NO: 44706 - DNA, 30 bp, Artificial Sequence
  Synthetic oligonucleotide
tgggcacacctagacgatttattcaacaat

SEQ ID NO: 44707 - DNA, 30 bp, Artificial Sequence
  Synthetic oligonucleotide
ggcccatcaggacagaacacgtttgacaat

SEQ ID NO: 44708 - DNA, 30 bp, Artificial Sequence
  Synthetic oligonucleotide
ggcgacggagttacgcatggctccagcaat

SEQ ID NO: 44709 - DNA, 30 bp, Artificial Sequence
  Synthetic oligonucleotide
cgaccgatatagaggctggtagatcgcaat

SEQ ID NO: 44710 - DNA, 30 bp, Artificial Sequence
  Synthetic oligonucleotide
ggtcggaaatctgtacaaataacatgcaat

SEQ ID NO: 44711 - DNA, 30 bp, Artificial Sequence
  Synthetic oligonucleotide
tgggcatggagcggtcgaattactaagaat

SEQ ID NO: 44712 - DNA, 30 bp, Artificial Sequence
  Synthetic oligonucleotide
cggtttaacttaaaactgacttaccagaat

SEQ ID NO: 44713 - DNA, 30 bp, Artificial Sequence
  Synthetic oligonucleotide
gctaaacacgagggacgctgatccgagaat

SEQ ID NO: 44714 - DNA, 30 bp, Artificial Sequence
  Synthetic oligonucleotide
gcgccgaaggacgaggtaatcgcatagaat

SEQ ID NO: 44715 - DNA, 30 bp, Artificial Sequence
  Synthetic oligonucleotide
agcaggcgggagatgtagggcggctagaat

SEQ ID NO: 44716 - DNA, 29 bp, Artificial Sequence
  Synthetic oligonucleotide
cgaaacaagaacgattgtacgctccgaat

SEQ ID NO: 44717 - DNA, 30 bp, Artificial Sequence
  Synthetic oligonucleotide
cactggtggcacgatagagaacgggcgaat

SEQ ID NO: 44718 - DNA, 30 bp, Artificial Sequence
  Synthetic oligonucleotide
agctgaaatgctagaaccgacatagggaat

SEQ ID NO: 44719 - DNA, 30 bp, Artificial Sequence
  Synthetic oligonucleotide
accgaccaacgtcaaggttagaacgggaat

SEQ ID NO: 44720 - DNA, 30 bp, Artificial Sequence
  Synthetic oligonucleotide
cggcatatgaatatagaatacgagtggaat

SEQ ID NO: 44721 - DNA, 30 bp, Artificial Sequence
  Synthetic oligonucleotide
cggaatactcagagctcaggtaattggaat

SEQ ID NO: 44722 - DNA, 30 bp, Artificial Sequence
  Synthetic oligonucleotide
ggtcatacgaaggaggacatccatgtgaat

SEQ ID NO: 44723 - DNA, 30 bp, Artificial Sequence
  Synthetic oligonucleotide
acgaaaccatacccgaatgaagtaaataat

SEQ ID NO: 44724 - DNA, 30 bp, Artificial Sequence
  Synthetic oligonucleotide
ccgtcggccccagaattaaatgctaataat

SEQ ID NO: 44725 - DNA, 30 bp, Artificial Sequence
  Synthetic oligonucleotide
gaagacccaaggaatccagtcgccagtaat

SEQ ID NO: 44726 - DNA, 30 bp, Artificial Sequence
  Synthetic oligonucleotide
tcaaggcgtagttggcgtaaggacggtaat

SEQ ID NO: 44727 - DNA, 30 bp, Artificial Sequence
  Synthetic oligonucleotide
cgggggtggaaaacaggctagtcctgtaat

SEQ ID NO: 44728 - DNA, 30 bp, Artificial Sequence
  Synthetic oligonucleotide
agcaccaatcggggtgggtacacggttaat

SEQ ID NO: 44729 - DNA, 30 bp, Artificial Sequence
  Synthetic oligonucleotide
tcagtggctctgagcatcaaaacaaaacat

SEQ ID NO: 44730 - DNA, 30 bp, Artificial Sequence
  Synthetic oligonucleotide
acgtctcataagaccactgtgaaggaacat

SEQ ID NO: 44731 - DNA, 30 bp, Artificial Sequence
  Synthetic oligonucleotide
tagtagcgacacaaatataagggagcacat

SEQ ID NO: 44732 - DNA, 30 bp, Artificial Sequence
  Synthetic oligonucleotide
ccgcatagcggggaggagcaatatgcacat

SEQ ID NO: 44733 - DNA, 30 bp, Artificial Sequence
  Synthetic oligonucleotide
gagtactgagaacggagtaggagctcacat

SEQ ID NO: 44734 - DNA, 30 bp, Artificial Sequence
  Synthetic oligonucleotide
gtaggaatgggaggaccctgagcccgacat

SEQ ID NO: 44735 - DNA, 30 bp, Artificial Sequence
  Synthetic oligonucleotide
cgacgtaggagtaaaacagttttgctacat

SEQ ID NO: 44736 - DNA, 30 bp, Artificial Sequence
  Synthetic oligonucleotide
agacaagggacagtgcaagggggtcaccat

SEQ ID NO: 44737 - DNA, 30 bp, Artificial Sequence
  Synthetic oligonucleotide
accaaatagagatagtacaggcacgaccat

SEQ ID NO: 44738 - DNA, 30 bp, Artificial Sequence
  Synthetic oligonucleotide
cgaacttgagacacgtcaattttgtgccat

SEQ ID NO: 44739 - DNA, 30 bp, Artificial Sequence
  Synthetic oligonucleotide
gtgcaaaatagagtcacatccgagatccat

SEQ ID NO: 44740 - DNA, 30 bp, Artificial Sequence
  Synthetic oligonucleotide
agacaacatctacagtgcagtgtgctccat

SEQ ID NO: 44741 - DNA, 30 bp, Artificial Sequence
  Synthetic oligonucleotide
actgccgaaatttaacccatgtctgagcat

SEQ ID NO: 44742 - DNA, 30 bp, Artificial Sequence
  Synthetic oligonucleotide
ccatcccgaaggggcactggttcagcgcat

SEQ ID NO: 44743 - DNA, 30 bp, Artificial Sequence
  Synthetic oligonucleotide
accggctaaaaaatgccgaaccgggcgcat

SEQ ID NO: 44744 - DNA, 30 bp, Artificial Sequence
  Synthetic oligonucleotide
cgggatgcgtcacacgtgctcaataggcat

SEQ ID NO: 44745 - DNA, 30 bp, Artificial Sequence
  Synthetic oligonucleotide
tcgtgttcgtatctgtaaaccagagggcat

SEQ ID NO: 44746 - DNA, 30 bp, Artificial Sequence
  Synthetic oligonucleotide
gcttacgaacagaaaattacggggatgcat

SEQ ID NO: 44747 - DNA, 30 bp, Artificial Sequence
  Synthetic oligonucleotide
aacaaggaataaaaacagccatacgatcat

SEQ ID NO: 44748 - DNA, 30 bp, Artificial Sequence
  Synthetic oligonucleotide
agaggcgactgttaagcgtaacctagtcat

SEQ ID NO: 44749 - DNA, 30 bp, Artificial Sequence
  Synthetic oligonucleotide
ggagcgagtgaaggctcgtacataattcat

SEQ ID NO: 44750 - DNA, 30 bp, Artificial Sequence
  Synthetic oligonucleotide
aggatgtgtcagagagctgtagccattcat

SEQ ID NO: 44751 - DNA, 30 bp, Artificial Sequence
  Synthetic oligonucleotide
gagagtaggtgtgaggagaagcacgttcat

SEQ ID NO: 44752 - DNA, 30 bp, Artificial Sequence
  Synthetic oligonucleotide
acgcacgttgacttgaggggtgataaagat

SEQ ID NO: 44753 - DNA, 30 bp, Artificial Sequence
  Synthetic oligonucleotide
cgttacggggagtatacagtccaacaagat

SEQ ID NO: 44754 - DNA, 30 bp, Artificial Sequence
  Synthetic oligonucleotide
ggggccggtcaccccattcgtcgggaagat

SEQ ID NO: 44755 - DNA, 30 bp, Artificial Sequence
  Synthetic oligonucleotide
ccgccgagtacgccccggcattatgaagat

SEQ ID NO: 44756 - DNA, 30 bp, Artificial Sequence
  Synthetic oligonucleotide
atctcagaggcatatcaggaggaaacagat

SEQ ID NO: 44757 - DNA, 30 bp, Artificial Sequence
  Synthetic oligonucleotide
gcgagacgaatctgcctttgatcaacagat

SEQ ID NO: 44758 - DNA, 30 bp, Artificial Sequence
  Synthetic oligonucleotide
atctaatgtagccagaagcagaacacagat

SEQ ID NO: 44759 - DNA, 30 bp, Artificial Sequence
  Synthetic oligonucleotide
tcgcgcggcggaaagattccaattacagat

SEQ ID NO: 44760 - DNA, 30 bp, Artificial Sequence
  Synthetic oligonucleotide
gatcagggtcaggtctggctgtttacagat

SEQ ID NO: 44761 - DNA, 30 bp, Artificial Sequence
  Synthetic oligonucleotide
gcgcatgaatcggagaagcctaggccagat

SEQ ID NO: 44762 - DNA, 30 bp, Artificial Sequence
  Synthetic oligonucleotide
caaggggaggttaagtcgcacctggcagat

SEQ ID NO: 44763 - DNA, 30 bp, Artificial Sequence
  Synthetic oligonucleotide
ccagtagaacacgaagttgggtgatcagat

SEQ ID NO: 44764 - DNA, 30 bp, Artificial Sequence
  Synthetic oligonucleotide
ggcgggttcacgatgcgggtaatgtcagat

SEQ ID NO: 44765 - DNA, 30 bp, Artificial Sequence
  Synthetic oligonucleotide
tgaggagtcctagtgcaggaccaccgagat

SEQ ID NO: 44766 - DNA, 30 bp, Artificial Sequence
  Synthetic oligonucleotide
cctaccctaggcccaagcgagtgtggagat

SEQ ID NO: 44767 - DNA, 30 bp, Artificial Sequence
  Synthetic oligonucleotide
agcccgtcaataaaagggaaacaagtagat

SEQ ID NO: 44768 - DNA, 30 bp, Artificial Sequence
  Synthetic oligonucleotide
ttaagagctgcgtacaagatcggaaacgat

SEQ ID NO: 44769 - DNA, 30 bp, Artificial Sequence
  Synthetic oligonucleotide
aatcaggacgtaaagaggccgggaaacgat

SEQ ID NO: 44770 - DNA, 30 bp, Artificial Sequence
  Synthetic oligonucleotide
ttgacggcatggtggaatagatgtgacgat

SEQ ID NO: 44771 - DNA, 30 bp, Artificial Sequence
  Synthetic oligonucleotide
cgtgttggatcgataccagggtgagccgat

SEQ ID NO: 44772 - DNA, 30 bp, Artificial Sequence
  Synthetic oligonucleotide
gacgacttatgccggtgaaaatcgctcgat

SEQ ID NO: 44773 - DNA, 30 bp, Artificial Sequence
  Synthetic oligonucleotide
cgaaggctatatgaacaagcccttaaggat

SEQ ID NO: 44774 - DNA, 30 bp, Artificial Sequence
  Synthetic oligonucleotide
cgataatcatcttagagtagcggagaggat

SEQ ID NO: 44775 - DNA, 30 bp, Artificial Sequence
  Synthetic oligonucleotide
agggggtgggcggccctgaagatttaggat

SEQ ID NO: 44776 - DNA, 30 bp, Artificial Sequence
  Synthetic oligonucleotide
tgcatatgagcctagaatgtacagccggat

SEQ ID NO: 44777 - DNA, 30 bp, Artificial Sequence
  Synthetic oligonucleotide
agggcacagccgaaccaaaaataatcggat

SEQ ID NO: 44778 - DNA, 30 bp, Artificial Sequence
  Synthetic oligonucleotide
accggcagtggcacagcgtctcgatcggat

SEQ ID NO: 44779 - DNA, 30 bp, Artificial Sequence
  Synthetic oligonucleotide
gtaacgacgaacggcgccaaatggagggat

SEQ ID NO: 44780 - DNA, 30 bp, Artificial Sequence
  Synthetic oligonucleotide
accgagacagaggtaccggctgacatggat

SEQ ID NO: 44781 - DNA, 30 bp, Artificial Sequence
  Synthetic oligonucleotide
tggtggctgacctagaacggagaactggat

SEQ ID NO: 44782 - DNA, 30 bp, Artificial Sequence
  Synthetic oligonucleotide
tcgtacaaggggcgatttactgaactggat

SEQ ID NO: 44783 - DNA, 30 bp, Artificial Sequence
  Synthetic oligonucleotide
gagaccagagattatcaaccgagagtggat

SEQ ID NO: 44784 - DNA, 30 bp, Artificial Sequence
  Synthetic oligonucleotide
aggagagacactcgccaaactaccgtggat

SEQ ID NO: 44785 - DNA, 30 bp, Artificial Sequence
  Synthetic oligonucleotide
ggctcgaataagtactgaacccaggtggat

SEQ ID NO: 44786 - DNA, 30 bp, Artificial Sequence
  Synthetic oligonucleotide
cggagaccccactaggtgacaacgttggat

SEQ ID NO: 44787 - DNA, 30 bp, Artificial Sequence
  Synthetic oligonucleotide
taatacagccaacgaatgaagggaaatgat

SEQ ID NO: 44788 - DNA, 30 bp, Artificial Sequence
  Synthetic oligonucleotide
ctgcgaaaaccctaaagccggggcgatgat

SEQ ID NO: 44789 - DNA, 30 bp, Artificial Sequence
  Synthetic oligonucleotide
ctataaatgccaatcatgaagagtgatgat

SEQ ID NO: 44790 - DNA, 30 bp, Artificial Sequence
  Synthetic oligonucleotide
ccgggtatcgatctacctaggaggactgat

SEQ ID NO: 44791 - DNA, 30 bp, Artificial Sequence
  Synthetic oligonucleotide
ggacacgtgtcatcacaggaacaagctgat

SEQ ID NO: 44792 - DNA, 30 bp, Artificial Sequence
  Synthetic oligonucleotide
acgagtacacacctagctcaaggagctgat

SEQ ID NO: 44793 - DNA, 30 bp, Artificial Sequence
  Synthetic oligonucleotide
tcgcgaaggagccggtaaattagcagtgat

SEQ ID NO: 44794 - DNA, 30 bp, Artificial Sequence
  Synthetic oligonucleotide
ttgcaggcggaccgatacacgagaggtgat

SEQ ID NO: 44795 - DNA, 30 bp, Artificial Sequence
  Synthetic oligonucleotide
cgaagacagtaaggatccagaaggggtgat

SEQ ID NO: 44796 - DNA, 30 bp, Artificial Sequence
  Synthetic oligonucleotide
tagaggagagggcgggtacaatcgtgtgat

SEQ ID NO: 44797 - DNA, 30 bp, Artificial Sequence
  Synthetic oligonucleotide
ccaacgcccccaatacgattagtgtgtgat

SEQ ID NO: 44798 - DNA, 30 bp, Artificial Sequence
  Synthetic oligonucleotide
ctgaccacgaggatataacactgaattgat

SEQ ID NO: 44799 - DNA, 30 bp, Artificial Sequence
  Synthetic oligonucleotide
ggcaaaggttccgtatctactaaagaatat

SEQ ID NO: 44800 - DNA, 30 bp, Artificial Sequence
  Synthetic oligonucleotide
cggtcgaaaagagacctgaatcgagaatat

SEQ ID NO: 44801 - DNA, 30 bp, Artificial Sequence
  Synthetic oligonucleotide
acgtaataggtatcgttataaggtgaatat

SEQ ID NO: 44802 - DNA, 30 bp, Artificial Sequence
  Synthetic oligonucleotide
ccgcaaaaagcatcgcctagtgactaatat

SEQ ID NO: 44803 - DNA, 30 bp, Artificial Sequence
  Synthetic oligonucleotide
cagcgagcgtaaacagtcgctaaggcatat

SEQ ID NO: 44804 - DNA, 30 bp, Artificial Sequence
  Synthetic oligonucleotide
gtgcacaaccatagcaagtgcaagtcatat

SEQ ID NO: 44805 - DNA, 30 bp, Artificial Sequence
  Synthetic oligonucleotide
aaacaaggagacatgccgagatcgtcatat

SEQ ID NO: 44806 - DNA, 30 bp, Artificial Sequence
  Synthetic oligonucleotide
gaggtaacggggatctgagctattagatat

SEQ ID NO: 44807 - DNA, 30 bp, Artificial Sequence
  Synthetic oligonucleotide
agggcctacctaagtataacacaaggatat

SEQ ID NO: 44808 - DNA, 30 bp, Artificial Sequence
  Synthetic oligonucleotide
cgaacattgcctatgagctccacaggatat

SEQ ID NO: 44809 - DNA, 30 bp, Artificial Sequence
  Synthetic oligonucleotide
ccctcaagaacgacattccttaaatactat

SEQ ID NO: 44810 - DNA, 30 bp, Artificial Sequence
  Synthetic oligonucleotide
aacgaggatcattagcgtgcgtcaacctat

SEQ ID NO: 44811 - DNA, 30 bp, Artificial Sequence
  Synthetic oligonucleotide
cggaagaaattcactgcggatataacctat

SEQ ID NO: 44812 - DNA, 30 bp, Artificial Sequence
  Synthetic oligonucleotide
gggcaggctgatgacgatgctgatgcctat

SEQ ID NO: 44813 - DNA, 30 bp, Artificial Sequence
  Synthetic oligonucleotide
ggcgagcatcgtatgtctaactccaagtat

SEQ ID NO: 44814 - DNA, 30 bp, Artificial Sequence
  Synthetic oligonucleotide
aacctcgtcagacaaataaaaccatcgtat

SEQ ID NO: 44815 - DNA, 30 bp, Artificial Sequence
  Synthetic oligonucleotide
acttcggagactacacaaaaaacgcggtat

SEQ ID NO: 44816 - DNA, 30 bp, Artificial Sequence
  Synthetic oligonucleotide
tcgagggtaacctcaacgcacttgcggtat

SEQ ID NO: 44817 - DNA, 30 bp, Artificial Sequence
  Synthetic oligonucleotide
cgtaattagacaaaaaagttcgatcggtat

SEQ ID NO: 44818 - DNA, 30 bp, Artificial Sequence
  Synthetic oligonucleotide
tggagcgatgaaaaagggctaaaggggtat

SEQ ID NO: 44819 - DNA, 30 bp, Artificial Sequence
  Synthetic oligonucleotide
aatagggcaaggtgcgcaacgaagctgtat

SEQ ID NO: 44820 - DNA, 30 bp, Artificial Sequence
  Synthetic oligonucleotide
tcttatctgttgtgttttcctcgtgtgtat

SEQ ID NO: 44821 - DNA, 30 bp, Artificial Sequence
  Synthetic oligonucleotide
agcagggatggatcaccacaccaagcttat

SEQ ID NO: 44822 - DNA, 30 bp, Artificial Sequence
  Synthetic oligonucleotide
tcggaccacttatcaggaagaatcagttat

SEQ ID NO: 44823 - DNA, 30 bp, Artificial Sequence
  Synthetic oligonucleotide
agtggacagccaggacagccggagggttat

SEQ ID NO: 44824 - DNA, 30 bp, Artificial Sequence
  Synthetic oligonucleotide
cactagaaaatcaatgaatgcgactgttat

SEQ ID NO: 44825 - DNA, 30 bp, Artificial Sequence
  Synthetic oligonucleotide
gcgtgtgaaataaaggttaccaacatttat

SEQ ID NO: 44826 - DNA, 30 bp, Artificial Sequence
  Synthetic oligonucleotide
atgtgtgggcgggacaaacagcgtatttat

SEQ ID NO: 44827 - DNA, 30 bp, Artificial Sequence
  Synthetic oligonucleotide
gcttcgagcccgaggagaccttgtgaaact

SEQ ID NO: 44828 - DNA, 30 bp, Artificial Sequence
  Synthetic oligonucleotide
cgaaactgataggttaatgcacactaaact

SEQ ID NO: 44829 - DNA, 30 bp, Artificial Sequence
  Synthetic oligonucleotide
gggagaggtgagaggacgagctcgtaaact

SEQ ID NO: 44830 - DNA, 30 bp, Artificial Sequence
  Synthetic oligonucleotide
cgagagccaatgggattataggccacaact

SEQ ID NO: 44831 - DNA, 30 bp, Artificial Sequence
  Synthetic oligonucleotide
agggaaacgtaacgaagtgtaccgccaact

SEQ ID NO: 44832 - DNA, 30 bp, Artificial Sequence
  Synthetic oligonucleotide
caaatagacggatggcaggcttaagcaact

SEQ ID NO: 44833 - DNA, 30 bp, Artificial Sequence
  Synthetic oligonucleotide
gatgtagtcagatactgtggcgggagaact

SEQ ID NO: 44834 - DNA, 30 bp, Artificial Sequence
  Synthetic oligonucleotide
agcacggaatatccgcggaggcatggaact

SEQ ID NO: 44835 - DNA, 30 bp, Artificial Sequence
  Synthetic oligonucleotide
tcccagaaagaatatcgagtatacataact

SEQ ID NO: 44836 - DNA, 30 bp, Artificial Sequence
  Synthetic oligonucleotide
gcgagagcccggcgggatacgattctaact

SEQ ID NO: 44837 - DNA, 30 bp, Artificial Sequence
  Synthetic oligonucleotide
cgaagtcagatatagttagtgatcgtaact

SEQ ID NO: 44838 - DNA, 30 bp, Artificial Sequence
  Synthetic oligonucleotide
agatctagataagaactgtcaatgcacact

SEQ ID NO: 44839 - DNA, 30 bp, Artificial Sequence
  Synthetic oligonucleotide
tgagatcgtcaaacaggaataaaaaccact

SEQ ID NO: 44840 - DNA, 30 bp, Artificial Sequence
  Synthetic oligonucleotide
gacggtaacgtgaacaggcgactaaccact

SEQ ID NO: 44841 - DNA, 30 bp, Artificial Sequence
  Synthetic oligonucleotide
gtgcagagaagacgtatccccttgcccact

SEQ ID NO: 44842 - DNA, 30 bp, Artificial Sequence
  Synthetic oligonucleotide
acgaatgagtaccgaagacacggctccact

SEQ ID NO: 44843 - DNA, 30 bp, Artificial Sequence
  Synthetic oligonucleotide
agagtggggctgggcgagcttgatagcact

SEQ ID NO: 44844 - DNA, 30 bp, Artificial Sequence
  Synthetic oligonucleotide
atgcaccctacgagggagcggtaagtcact

SEQ ID NO: 44845 - DNA, 30 bp, Artificial Sequence
  Synthetic oligonucleotide
tcgagaggccgcccatgagatataaagact

SEQ ID NO: 44846 - DNA, 30 bp, Artificial Sequence
  Synthetic oligonucleotide
caataaatagctgcataacgaactcagact

SEQ ID NO: 44847 - DNA, 30 bp, Artificial Sequence
  Synthetic oligonucleotide
gtagaacatgtggaaatccacccagagact

SEQ ID NO: 44848 - DNA, 30 bp, Artificial Sequence
  Synthetic oligonucleotide
cctgccaatcctgtgaacggtcgaacgact

SEQ ID NO: 44849 - DNA, 30 bp, Artificial Sequence
  Synthetic oligonucleotide
agacacgtgtacgtgcggcggaggacgact

SEQ ID NO: 44850 - DNA, 30 bp, Artificial Sequence
  Synthetic oligonucleotide
acggcagactgtaattgtagcgaagcgact

SEQ ID NO: 44851 - DNA, 30 bp, Artificial Sequence
  Synthetic oligonucleotide
catgactcgcggggcgtgaaagataggact

SEQ ID NO: 44852 - DNA, 30 bp, Artificial Sequence
  Synthetic oligonucleotide
gtagttgacagaataacaaggcaagggact

SEQ ID NO: 44853 - DNA, 30 bp, Artificial Sequence
  Synthetic oligonucleotide
tggtatgagcgggttgctcggactaatact

SEQ ID NO: 44854 - DNA, 30 bp, Artificial Sequence
  Synthetic oligonucleotide
agtcgtcagtgcgagccgagatgagatact

SEQ ID NO: 44855 - DNA, 30 bp, Artificial Sequence
  Synthetic oligonucleotide
cgcacgattttagagagcgaatcgactact

SEQ ID NO: 44856 - DNA, 30 bp, Artificial Sequence
  Synthetic oligonucleotide
aaggagtaactgcatagagacttgtctact

SEQ ID NO: 44857 - DNA, 30 bp, Artificial Sequence
  Synthetic oligonucleotide
ttaggagataaccagggtggggatattact

SEQ ID NO: 44858 - DNA, 30 bp, Artificial Sequence
  Synthetic oligonucleotide
gtcgtgtggcaccaacaagacagtcaacct

SEQ ID NO: 44859 - DNA, 30 bp, Artificial Sequence
  Synthetic oligonucleotide
tagtgctgagaaagactcaaacacacacct

SEQ ID NO: 44860 - DNA, 30 bp, Artificial Sequence
  Synthetic oligonucleotide
gtgctgaaaggccaaagcactcacccacct

SEQ ID NO: 44861 - DNA, 30 bp, Artificial Sequence
  Synthetic oligonucleotide
aggaggaatccgtgaggatacggagtacct

SEQ ID NO: 44862 - DNA, 30 bp, Artificial Sequence
  Synthetic oligonucleotide
ggagcattgcgatgagtactcgtattacct

SEQ ID NO: 44863 - DNA, 30 bp, Artificial Sequence
  Synthetic oligonucleotide
tggtcaaaagggaattcggggagcttacct

SEQ ID NO: 44864 - DNA, 30 bp, Artificial Sequence
  Synthetic oligonucleotide
gaacaagtcacctaaaacatctgcaaccct

SEQ ID NO: 44865 - DNA, 30 bp, Artificial Sequence
  Synthetic oligonucleotide
gggtggaaagaaatgtgccttcatcaccct

SEQ ID NO: 44866 - DNA, 30 bp, Artificial Sequence
  Synthetic oligonucleotide
ggaaggcggtcaagatgaaggagagcccct

SEQ ID NO: 44867 - DNA, 30 bp, Artificial Sequence
  Synthetic oligonucleotide
actgctctgaatacgtatccaaagtgccct

SEQ ID NO: 44868 - DNA, 30 bp, Artificial Sequence
  Synthetic oligonucleotide
acgacaccccttacagtgacaaccaagcct

SEQ ID NO: 44869 - DNA, 30 bp, Artificial Sequence
  Synthetic oligonucleotide
cgcaatggtggggtgccacggtaacagcct

SEQ ID NO: 44870 - DNA, 30 bp, Artificial Sequence
  Synthetic oligonucleotide
cgagtataagtcatcgatagcagtccgcct

SEQ ID NO: 44871 - DNA, 30 bp, Artificial Sequence
  Synthetic oligonucleotide
caggccgaactgtggaactcgcgatcgcct

SEQ ID NO: 44872 - DNA, 30 bp, Artificial Sequence
  Synthetic oligonucleotide
gcgtaggatattaagtgactaggcaggcct

SEQ ID NO: 44873 - DNA, 30 bp, Artificial Sequence
  Synthetic oligonucleotide
aggactgtttcgaagttatcaagtaggcct

SEQ ID NO: 44874 - DNA, 30 bp, Artificial Sequence
  Synthetic oligonucleotide
acgcgcagcgtgcaggaatagatacggcct

SEQ ID NO: 44875 - DNA, 30 bp, Artificial Sequence
  Synthetic oligonucleotide
taacgtgtgggagattggccacgaatgcct

SEQ ID NO: 44876 - DNA, 30 bp, Artificial Sequence
  Synthetic oligonucleotide
gcctggggcttgaggcgtagacaacatcct

SEQ ID NO: 44877 - DNA, 30 bp, Artificial Sequence
  Synthetic oligonucleotide
acgcgaagtaatccgaaaatcacatatcct

SEQ ID NO: 44878 - DNA, 30 bp, Artificial Sequence
  Synthetic oligonucleotide
taacggtaacgggaaaggtccaaccctcct

SEQ ID NO: 44879 - DNA, 30 bp, Artificial Sequence
  Synthetic oligonucleotide
aggctgggtcccatcatctccaatcctcct

SEQ ID NO: 44880 - DNA, 30 bp, Artificial Sequence
  Synthetic oligonucleotide
gctggaacgtcaacgagcatggctagtcct

SEQ ID NO: 44881 - DNA, 30 bp, Artificial Sequence
  Synthetic oligonucleotide
cgactgactgtgccggaacaatacaaagct

SEQ ID NO: 44882 - DNA, 30 bp, Artificial Sequence
  Synthetic oligonucleotide
gagcgcacgacgttgtgaagagtagaagct

SEQ ID NO: 44883 - DNA, 30 bp, Artificial Sequence
  Synthetic oligonucleotide
cgacaatcagggctaatgagtgtataagct

SEQ ID NO: 44884 - DNA, 30 bp, Artificial Sequence
  Synthetic oligonucleotide
tagggtaaaaagcatttaggaaactaagct

SEQ ID NO: 44885 - DNA, 30 bp, Artificial Sequence
  Synthetic oligonucleotide
ccgtagtgtatcagacctagagtctaagct

SEQ ID NO: 44886 - DNA, 30 bp, Artificial Sequence
  Synthetic oligonucleotide
gaaacaacaggaagggtaggtacgtaagct

SEQ ID NO: 44887 - DNA, 30 bp, Artificial Sequence
  Synthetic oligonucleotide
cttgcttaggaatagggagagatgtaagct

SEQ ID NO: 44888 - DNA, 30 bp, Artificial Sequence
  Synthetic oligonucleotide
agagaaaaggacaatacaaagtacagagct

SEQ ID NO: 44889 - DNA, 30 bp, Artificial Sequence
  Synthetic oligonucleotide
acactagccggggggttaaggcaactagct

SEQ ID NO: 44890 - DNA, 30 bp, Artificial Sequence
  Synthetic oligonucleotide
gggaaagtgcaagttcatcaagacaacgct

SEQ ID NO: 44891 - DNA, 30 bp, Artificial Sequence
  Synthetic oligonucleotide
gggtgtataaagagtggagatccacacgct

SEQ ID NO: 44892 - DNA, 30 bp, Artificial Sequence
  Synthetic oligonucleotide
cgtggcgagtgagggcgacacgtcagcgct

SEQ ID NO: 44893 - DNA, 30 bp, Artificial Sequence
  Synthetic oligonucleotide
ttccccaaagcgtaggacctacagtgcgct

SEQ ID NO: 44894 - DNA, 30 bp, Artificial Sequence
  Synthetic oligonucleotide
tgacatgcggtgccgggcagatgaatcgct

SEQ ID NO: 44895 - DNA, 30 bp, Artificial Sequence
  Synthetic oligonucleotide
cgcagtgaaatagttaaggggcctaaggct

SEQ ID NO: 44896 - DNA, 30 bp, Artificial Sequence
  Synthetic oligonucleotide
gataagcaacatgaagtgcggagatcggct

SEQ ID NO: 44897 - DNA, 30 bp, Artificial Sequence
  Synthetic oligonucleotide
acacacggatacaagtacctgaaacgggct

SEQ ID NO: 44898 - DNA, 30 bp, Artificial Sequence
  Synthetic oligonucleotide
ctcaaaagtaagtaactgcctgcaggggct

SEQ ID NO: 44899 - DNA, 30 bp, Artificial Sequence
  Synthetic oligonucleotide
ggctgggagagaaaagtattctagctggct

SEQ ID NO: 44900 - DNA, 30 bp, Artificial Sequence
  Synthetic oligonucleotide
cagcaaaattgctaggcgtgaagagtggct

SEQ ID NO: 44901 - DNA, 30 bp, Artificial Sequence
  Synthetic oligonucleotide
gcaaggccgcgaaagtaaagaaatgtggct

SEQ ID NO: 44902 - DNA, 30 bp, Artificial Sequence
  Synthetic oligonucleotide
gttcaacagcttacagataagacattggct

SEQ ID NO: 44903 - DNA, 30 bp, Artificial Sequence
  Synthetic oligonucleotide
tccccaaggaagagccccaaagacaatgct

SEQ ID NO: 44904 - DNA, 30 bp, Artificial Sequence
  Synthetic oligonucleotide
ggaaaagccaagatggaactacacggtgct

SEQ ID NO: 44905 - DNA, 30 bp, Artificial Sequence
  Synthetic oligonucleotide
cggaactgccaatcgggcgaacattgtgct

SEQ ID NO: 44906 - DNA, 30 bp, Artificial Sequence
  Synthetic oligonucleotide
cgtgaggtaatatggaagttgtcatttgct

SEQ ID NO: 44907 - DNA, 30 bp, Artificial Sequence
  Synthetic oligonucleotide
gatacgagaagactaagtgtgacataatct

SEQ ID NO: 44908 - DNA, 30 bp, Artificial Sequence
  Synthetic oligonucleotide
cggttgaaacacaaatactggaaaccatct

SEQ ID NO: 44909 - DNA, 30 bp, Artificial Sequence
  Synthetic oligonucleotide
aactagccaagctattgagtagtgccatct

SEQ ID NO: 44910 - DNA, 30 bp, Artificial Sequence
  Synthetic oligonucleotide
gcaaaaggctaaaaccaaatctcccgatct

SEQ ID NO: 44911 - DNA, 30 bp, Artificial Sequence
  Synthetic oligonucleotide
tgtcggggggctgtgaccagtcagcgatct

SEQ ID NO: 44912 - DNA, 30 bp, Artificial Sequence
  Synthetic oligonucleotide
cgatagcacaaacatgccttccctcgatct

SEQ ID NO: 44913 - DNA, 30 bp, Artificial Sequence
  Synthetic oligonucleotide
actcagtgggatagatacggtcgagagtct

SEQ ID NO: 44914 - DNA, 30 bp, Artificial Sequence
  Synthetic oligonucleotide
agactgcagtggcgaagatcagcgacgtct

SEQ ID NO: 44915 - DNA, 30 bp, Artificial Sequence
  Synthetic oligonucleotide
ggaacaccaaatgcgaatactcaggcgtct

SEQ ID NO: 44916 - DNA, 30 bp, Artificial Sequence
  Synthetic oligonucleotide
aatgagaatcagaaaatcgagacatcgtct

SEQ ID NO: 44917 - DNA, 30 bp, Artificial Sequence
  Synthetic oligonucleotide
atccatgccctcgtagcatcaaagcggtct

SEQ ID NO: 44918 - DNA, 30 bp, Artificial Sequence
  Synthetic oligonucleotide
ggctaactataagaatagtagagtgtgtct

SEQ ID NO: 44919 - DNA, 30 bp, Artificial Sequence
  Synthetic oligonucleotide
agggcccaggtgtgtaaaagaggtaattct

SEQ ID NO: 44920 - DNA, 30 bp, Artificial Sequence
  Synthetic oligonucleotide
tgggaccagagcggaggcagtttatattct

SEQ ID NO: 44921 - DNA, 30 bp, Artificial Sequence
  Synthetic oligonucleotide
catgggaattatagggagattgtggcttct

SEQ ID NO: 44922 - DNA, 30 bp, Artificial Sequence
  Synthetic oligonucleotide
atcgaaaactaataatacgtcaccagttct

SEQ ID NO: 44923 - DNA, 30 bp, Artificial Sequence
  Synthetic oligonucleotide
atgcacgatcttgtgagatagcaacgttct

SEQ ID NO: 44924 - DNA, 30 bp, Artificial Sequence
  Synthetic oligonucleotide
ggggaagagaacgtttttcaaacaaaaagt

SEQ ID NO: 44925 - DNA, 30 bp, Artificial Sequence
  Synthetic oligonucleotide
ccgactggagctccgtgtaatcaacaaagt

SEQ ID NO: 44926 - DNA, 30 bp, Artificial Sequence
  Synthetic oligonucleotide
cggctacggactggaaagcgaaccgaaagt

SEQ ID NO: 44927 - DNA, 30 bp, Artificial Sequence
  Synthetic oligonucleotide
caccctaagagtatgaacctctgcgaaagt

SEQ ID NO: 44928 - DNA, 30 bp, Artificial Sequence
  Synthetic oligonucleotide
ggagtagcgatagaattagcaaaggaaagt

SEQ ID NO: 44929 - DNA, 30 bp, Artificial Sequence
  Synthetic oligonucleotide
atcggacgatggatgaaaaaatgataaagt

SEQ ID NO: 44930 - DNA, 30 bp, Artificial Sequence
  Synthetic oligonucleotide
aacgaagtaaagccaactatttaagcaagt

SEQ ID NO: 44931 - DNA, 30 bp, Artificial Sequence
  Synthetic oligonucleotide
caagagcgatcgggtgtgtgcggggcaagt

SEQ ID NO: 44932 - DNA, 30 bp, Artificial Sequence
  Synthetic oligonucleotide
ccgtaggatggatgcggtgatcgacgaagt

SEQ ID NO: 44933 - DNA, 30 bp, Artificial Sequence
  Synthetic oligonucleotide
tgtccgtaaagtaaacgtataaagcgaagt

SEQ ID NO: 44934 - DNA, 30 bp, Artificial Sequence
  Synthetic oligonucleotide
agagaaaagacgtggtcacataggcgaagt

SEQ ID NO: 44935 - DNA, 30 bp, Artificial Sequence
  Synthetic oligonucleotide
agccaccccgtcagagaataaagtcgaagt

SEQ ID NO: 44936 - DNA, 30 bp, Artificial Sequence
  Synthetic oligonucleotide
caggtcggatcgacacgtgcgcttcgaagt

SEQ ID NO: 44937 - DNA, 30 bp, Artificial Sequence
  Synthetic oligonucleotide
ggcatattccgatagagcagataaataagt

SEQ ID NO: 44938 - DNA, 30 bp, Artificial Sequence
  Synthetic oligonucleotide
tgaaggaatagcctacatgcggagttaagt

SEQ ID NO: 44939 - DNA, 30 bp, Artificial Sequence
  Synthetic oligonucleotide
cacgaaactaaaccaggccttggccacagt

SEQ ID NO: 44940 - DNA, 30 bp, Artificial Sequence
  Synthetic oligonucleotide
tgaacgacgagacaacagggggccgacagt

SEQ ID NO: 44941 - DNA, 30 bp, Artificial Sequence
  Synthetic oligonucleotide
gtgcaagtaagtatgtgtaatcagtgcagt

SEQ ID NO: 44942 - DNA, 30 bp, Artificial Sequence
  Synthetic oligonucleotide
taactaatccacaggggcaaacgagtcagt

SEQ ID NO: 44943 - DNA, 30 bp, Artificial Sequence
  Synthetic oligonucleotide
acaacccacgatcatcgcgcgaccaagagt

SEQ ID NO: 44944 - DNA, 30 bp, Artificial Sequence
  Synthetic oligonucleotide
aggtctctcagagctacaaaacagcagagt

SEQ ID NO: 44945 - DNA, 30 bp, Artificial Sequence
  Synthetic oligonucleotide
gatggcaaggccgatggcaagtagtagagt

SEQ ID NO: 44946 - DNA, 30 bp, Artificial Sequence
  Synthetic oligonucleotide
tcggaattatgcaaagttggccgttagagt

SEQ ID NO: 44947 - DNA, 30 bp, Artificial Sequence
  Synthetic oligonucleotide
cattcacgaacccgggagtgtggaacgagt

SEQ ID NO: 44948 - DNA, 30 bp, Artificial Sequence
  Synthetic oligonucleotide
acagtgatcaaaaccgatctaataacgagt

SEQ ID NO: 44949 - DNA, 30 bp, Artificial Sequence
  Synthetic oligonucleotide
tctgaaagggtaatgacttctcgggcgagt

SEQ ID NO: 44950 - DNA, 30 bp, Artificial Sequence
  Synthetic oligonucleotide
agaccacgcgtttaggcgtgcaagaggagt

SEQ ID NO: 44951 - DNA, 30 bp, Artificial Sequence
  Synthetic oligonucleotide
agacagtgatacgtacgtcgtgggcggagt

SEQ ID NO: 44952 - DNA, 30 bp, Artificial Sequence
  Synthetic oligonucleotide
gggatgtcaacgatgggatgactatggagt

SEQ ID NO: 44953 - DNA, 30 bp, Artificial Sequence
  Synthetic oligonucleotide
caagagagaacaggagcttgggagtggagt

SEQ ID NO: 44954 - DNA, 30 bp, Artificial Sequence
  Synthetic oligonucleotide
cgaccggaaaggcgccttcagtttatgagt

SEQ ID NO: 44955 - DNA, 30 bp, Artificial Sequence
  Synthetic oligonucleotide
catctgctaacaaaacttggacaactgagt

SEQ ID NO: 44956 - DNA, 30 bp, Artificial Sequence
  Synthetic oligonucleotide
gtagcaggagacggtcttcatgaagatagt

SEQ ID NO: 44957 - DNA, 30 bp, Artificial Sequence
  Synthetic oligonucleotide
cgatcgaacttcctgtgaccttaagatagt

SEQ ID NO: 44958 - DNA, 30 bp, Artificial Sequence
  Synthetic oligonucleotide
gaaccgggaagtagccaactgcaaactagt

SEQ ID NO: 44959 - DNA, 30 bp, Artificial Sequence
  Synthetic oligonucleotide
cgaactttactagccaatcccgaacgtagt

SEQ ID NO: 44960 - DNA, 30 bp, Artificial Sequence
  Synthetic oligonucleotide
ggaggaggtcaggacaccttgatcaaacgt

SEQ ID NO: 44961 - DNA, 30 bp, Artificial Sequence
  Synthetic oligonucleotide
agcgcaccgatattagcgatcaaaacacgt

SEQ ID NO: 44962 - DNA, 30 bp, Artificial Sequence
  Synthetic oligonucleotide
acaatgtgtaacaggataaaacgattacgt

SEQ ID NO: 44963 - DNA, 30 bp, Artificial Sequence
  Synthetic oligonucleotide
agtgaagtcgataacaaaggagtaagccgt

SEQ ID NO: 44964 - DNA, 30 bp, Artificial Sequence
  Synthetic oligonucleotide
tagcacgaggagcggagcaagcccagccgt

SEQ ID NO: 44965 - DNA, 30 bp, Artificial Sequence
  Synthetic oligonucleotide
aggtcaggtgtgtagtcggaatagagccgt

SEQ ID NO: 44966 - DNA, 30 bp, Artificial Sequence
  Synthetic oligonucleotide
aacatcgttaacctagagttactccgccgt

SEQ ID NO: 44967 - DNA, 30 bp, Artificial Sequence
  Synthetic oligonucleotide
gtgcaaacaagcgccctaaagatcggccgt

SEQ ID NO: 44968 - DNA, 30 bp, Artificial Sequence
  Synthetic oligonucleotide
gtggcacaaccagctggatactgtatccgt

SEQ ID NO: 44969 - DNA, 30 bp, Artificial Sequence
  Synthetic oligonucleotide
gcgtgcggtcgacatataactgcaaagcgt

SEQ ID NO: 44970 - DNA, 30 bp, Artificial Sequence
  Synthetic oligonucleotide
tcatggcatcatgtctaggaccaacagcgt

SEQ ID NO: 44971 - DNA, 30 bp, Artificial Sequence
  Synthetic oligonucleotide
gccggcgagtcgagatgcatgcgatagcgt

SEQ ID NO: 44972 - DNA, 30 bp, Artificial Sequence
  Synthetic oligonucleotide
cgaaaccgcgcaagcaaaacaaagtcgcgt

SEQ ID NO: 44973 - DNA, 30 bp, Artificial Sequence
  Synthetic oligonucleotide
ctgtacgaaggcccatcgatggcgtcgcgt

SEQ ID NO: 44974 - DNA, 30 bp, Artificial Sequence
  Synthetic oligonucleotide
ctcgaacaggggggggaaatcattaggcgt

SEQ ID NO: 44975 - DNA, 30 bp, Artificial Sequence
  Synthetic oligonucleotide
catacaaccatgtacaccaaaatagggcgt

SEQ ID NO: 44976 - DNA, 31 bp, Artificial Sequence
  Synthetic oligonucleotide
cgagtcgaaaggcgttcgtgcctattggcgt

SEQ ID NO: 44977 - DNA, 30 bp, Artificial Sequence
  Synthetic oligonucleotide
agccgagtggatataacattggaggtgcgt

SEQ ID NO: 44978 - DNA, 30 bp, Artificial Sequence
  Synthetic oligonucleotide
taggttcgagggtgagctagagacaatcgt

SEQ ID NO: 44979 - DNA, 30 bp, Artificial Sequence
  Synthetic oligonucleotide
ttgacagcatcaaatggaaagcgtaatcgt

SEQ ID NO: 44980 - DNA, 30 bp, Artificial Sequence
  Synthetic oligonucleotide
gtcaagcatcacggaaacgccatcgctcgt

SEQ ID NO: 44981 - DNA, 30 bp, Artificial Sequence
  Synthetic oligonucleotide
cactcctgtctataatgaagtaaaagtcgt

SEQ ID NO: 44982 - DNA, 30 bp, Artificial Sequence
  Synthetic oligonucleotide
tacgtcagacgatgtgcgcgccgaggtcgt

SEQ ID NO: 44983 - DNA, 30 bp, Artificial Sequence
  Synthetic oligonucleotide
aacgacggataggagtggtcattaggtcgt

SEQ ID NO: 44984 - DNA, 30 bp, Artificial Sequence
  Synthetic oligonucleotide
gaagaacacagagataatgagatctgtcgt

SEQ ID NO: 44985 - DNA, 30 bp, Artificial Sequence
  Synthetic oligonucleotide
aacgacggtccggcgcgacccaaaaaaggt

SEQ ID NO: 44986 - DNA, 30 bp, Artificial Sequence
  Synthetic oligonucleotide
cgtgcagccagcacctgaacaaaggaaggt

SEQ ID NO: 44987 - DNA, 30 bp, Artificial Sequence
  Synthetic oligonucleotide
ccaatcacgtgggggaaagttgtgtaaggt

SEQ ID NO: 44988 - DNA, 30 bp, Artificial Sequence
  Synthetic oligonucleotide
caatagagcagacaggggcagccaccaggt

SEQ ID NO: 44989 - DNA, 30 bp, Artificial Sequence
  Synthetic oligonucleotide
ggtccagtggcagctagaagattaccaggt

SEQ ID NO: 44990 - DNA, 30 bp, Artificial Sequence
  Synthetic oligonucleotide
aggcaggatacgtattgctatactccaggt

SEQ ID NO: 44991 - DNA, 30 bp, Artificial Sequence
  Synthetic oligonucleotide
cgctcaaatttgcatacgaaatcagcaggt

SEQ ID NO: 44992 - DNA, 30 bp, Artificial Sequence
  Synthetic oligonucleotide
ggtgagcggagggaaagtaggtgatcaggt

SEQ ID NO: 44993 - DNA, 30 bp, Artificial Sequence
  Synthetic oligonucleotide
gcttaatgaactcgcgatcaagttagaggt

SEQ ID NO: 44994 - DNA, 30 bp, Artificial Sequence
  Synthetic oligonucleotide
ttgagtcgaagtgaagggtgaacaggaggt

SEQ ID NO: 44995 - DNA, 30 bp, Artificial Sequence
  Synthetic oligonucleotide
gtagagctccacctatatcatcaatgaggt

SEQ ID NO: 44996 - DNA, 30 bp, Artificial Sequence
  Synthetic oligonucleotide
tcaagtgtgactacaacgcgttgatgaggt

SEQ ID NO: 44997 - DNA, 30 bp, Artificial Sequence
  Synthetic oligonucleotide
aggcacaagtgtgccaaacgcataataggt

SEQ ID NO: 44998 - DNA, 30 bp, Artificial Sequence
  Synthetic oligonucleotide
gacaacaataacaagagggccgtgataggt

SEQ ID NO: 44999 - DNA, 30 bp, Artificial Sequence
  Synthetic oligonucleotide
tccgccatgagagagctgcaatgagtaggt

SEQ ID NO: 45000 - DNA, 30 bp, Artificial Sequence
  Synthetic oligonucleotide
gacgtaaatggtttcagcgacaggaacggt

SEQ ID NO: 45001 - DNA, 30 bp, Artificial Sequence
  Synthetic oligonucleotide
tggaaacgttagagcccagtgagggacggt

SEQ ID NO: 45002 - DNA, 30 bp, Artificial Sequence
  Synthetic oligonucleotide
acggtgcgtgataagacacagtgtgccggt

SEQ ID NO: 45003 - DNA, 30 bp, Artificial Sequence
  Synthetic oligonucleotide
ttgagacgaaaacaaggtggaaagagcggt

SEQ ID NO: 45004 - DNA, 30 bp, Artificial Sequence
  Synthetic oligonucleotide
ttcgcgaaggaaatattcaagagagtcggt

SEQ ID NO: 45005 - DNA, 30 bp, Artificial Sequence
  Synthetic oligonucleotide
tcaaggcttacgaagagtacgatgcagggt

SEQ ID NO: 45006 - DNA, 30 bp, Artificial Sequence
  Synthetic oligonucleotide
gcgttaagcgatcggcggaaattcgagggt

SEQ ID NO: 45007 - DNA, 30 bp, Artificial Sequence
  Synthetic oligonucleotide
tgagccggacgagcgacttggtgggagggt

SEQ ID NO: 45008 - DNA, 30 bp, Artificial Sequence
  Synthetic oligonucleotide
cgagggggggcgagcgaggcggagacgggt

SEQ ID NO: 45009 - DNA, 30 bp, Artificial Sequence
  Synthetic oligonucleotide
cgatcatggtttcgacacatatataggggt

SEQ ID NO: 45010 - DNA, 30 bp, Artificial Sequence
  Synthetic oligonucleotide
ggagaacgacgttagttgtcaacagtgggt

SEQ ID NO: 45011 - DNA, 30 bp, Artificial Sequence
  Synthetic oligonucleotide
gggtagcaaatcgtacacggacgcgtgggt

SEQ ID NO: 45012 - DNA, 30 bp, Artificial Sequence
  Synthetic oligonucleotide
acagcaagtcacgttagatggtccaatggt

SEQ ID NO: 45013 - DNA, 30 bp, Artificial Sequence
  Synthetic oligonucleotide
acacgccggggaagacgacgttcagatggt

SEQ ID NO: 45014 - DNA, 30 bp, Artificial Sequence
  Synthetic oligonucleotide
gggcacaaagtataaggaattgaaactggt

SEQ ID NO: 45015 - DNA, 30 bp, Artificial Sequence
  Synthetic oligonucleotide
aagaagcgccctagcgagactggagctggt

SEQ ID NO: 45016 - DNA, 30 bp, Artificial Sequence
  Synthetic oligonucleotide
ccatctaaaacaaccaaaactggaagtggt

SEQ ID NO: 45017 - DNA, 30 bp, Artificial Sequence
  Synthetic oligonucleotide
acgatcggcctccagtacacagaaggtggt

SEQ ID NO: 45018 - DNA, 31 bp, Artificial Sequence
  Synthetic oligonucleotide
ggaagtaaatcgaataattacgtgaggtggt

SEQ ID NO: 45019 - DNA, 30 bp, Artificial Sequence
  Synthetic oligonucleotide
tggcgaataagtagcacgaaacgcgttggt

SEQ ID NO: 45020 - DNA, 30 bp, Artificial Sequence
  Synthetic oligonucleotide
ccgagcggaaaaaccggaattgactttggt

SEQ ID NO: 45021 - DNA, 30 bp, Artificial Sequence
  Synthetic oligonucleotide
tggaagcgtttcaaattacagagcaaatgt

SEQ ID NO: 45022 - DNA, 30 bp, Artificial Sequence
  Synthetic oligonucleotide
aggggccacgatatgcaatggaaagaatgt

SEQ ID NO: 45023 - DNA, 30 bp, Artificial Sequence
  Synthetic oligonucleotide
acttaaagcgacgaaacgtggtaggaatgt

SEQ ID NO: 45024 - DNA, 30 bp, Artificial Sequence
  Synthetic oligonucleotide
cagtatgaacaataattaagtcagccatgt

SEQ ID NO: 45025 - DNA, 30 bp, Artificial Sequence
  Synthetic oligonucleotide
atgataacacgataggtgacgagtgcatgt

SEQ ID NO: 45026 - DNA, 30 bp, Artificial Sequence
  Synthetic oligonucleotide
cggcttaggttgacagaaaaaggaagatgt

SEQ ID NO: 45027 - DNA, 30 bp, Artificial Sequence
  Synthetic oligonucleotide
ggggggatgaactacaaataactaagatgt

SEQ ID NO: 45028 - DNA, 30 bp, Artificial Sequence
  Synthetic oligonucleotide
acggtctatctcacaagctaaactagatgt

SEQ ID NO: 45029 - DNA, 30 bp, Artificial Sequence
  Synthetic oligonucleotide
acgaccagtggcagtaatgtgccagactgt

SEQ ID NO: 45030 - DNA, 31 bp, Artificial Sequence
  Synthetic oligonucleotide
tggcggtcggctgaagtcagatagtacctgt

SEQ ID NO: 45031 - DNA, 30 bp, Artificial Sequence
  Synthetic oligonucleotide
ggcaagagagagatcggattcatagcctgt

SEQ ID NO: 45032 - DNA, 30 bp, Artificial Sequence
  Synthetic oligonucleotide
cccatacataatgagcgtaaacggcagtgt

SEQ ID NO: 45033 - DNA, 30 bp, Artificial Sequence
  Synthetic oligonucleotide
taaggcatttgaatgagggcggatcagtgt

SEQ ID NO: 45034 - DNA, 30 bp, Artificial Sequence
  Synthetic oligonucleotide
cgtccttaatctcagggcttaggggagtgt

SEQ ID NO: 45035 - DNA, 30 bp, Artificial Sequence
  Synthetic oligonucleotide
gcacaagtccaaagggcagatcatacgtgt

SEQ ID NO: 45036 - DNA, 30 bp, Artificial Sequence
  Synthetic oligonucleotide
ctaagcttagatgtcgaatggaagaggtgt

SEQ ID NO: 45037 - DNA, 30 bp, Artificial Sequence
  Synthetic oligonucleotide
cgccaacgatctggaaaagagctacattgt

SEQ ID NO: 45038 - DNA, 30 bp, Artificial Sequence
  Synthetic oligonucleotide
cgggaaaatgagcaatcagttcttaaaatt

SEQ ID NO: 45039 - DNA, 30 bp, Artificial Sequence
  Synthetic oligonucleotide
tatgaggtgaaatctacaagaggacaaatt

SEQ ID NO: 45040 - DNA, 30 bp, Artificial Sequence
  Synthetic oligonucleotide
tcctgggcgggagtgcaagttcagcaaatt

SEQ ID NO: 45041 - DNA, 30 bp, Artificial Sequence
  Synthetic oligonucleotide
cattacagattgaaaatggactacgaaatt

SEQ ID NO: 45042 - DNA, 30 bp, Artificial Sequence
  Synthetic oligonucleotide
caggacactgtgataagatggttcgaaatt

SEQ ID NO: 45043 - DNA, 30 bp, Artificial Sequence
  Synthetic oligonucleotide
ggaccaggctgaggatctagtcagtaaatt

SEQ ID NO: 45044 - DNA, 30 bp, Artificial Sequence
  Synthetic oligonucleotide
aaggccggtgtgtggaaactttgagcaatt

SEQ ID NO: 45045 - DNA, 30 bp, Artificial Sequence
  Synthetic oligonucleotide
aaacgacagagactgttccggtcaagaatt

SEQ ID NO: 45046 - DNA, 30 bp, Artificial Sequence
  Synthetic oligonucleotide
aaggtacaaccatcttataccacaggaatt

SEQ ID NO: 45047 - DNA, 30 bp, Artificial Sequence
  Synthetic oligonucleotide
ggaggggcggtcgtgcactccggctgaatt

SEQ ID NO: 45048 - DNA, 30 bp, Artificial Sequence
  Synthetic oligonucleotide
acacttaagggacagaggcggacgaacatt

SEQ ID NO: 45049 - DNA, 30 bp, Artificial Sequence
  Synthetic oligonucleotide
acgaagaactagaactggagggtgaacatt

SEQ ID NO: 45050 - DNA, 30 bp, Artificial Sequence
  Synthetic oligonucleotide
atgtgctcggacaggtcgacaacccacatt

SEQ ID NO: 45051 - DNA, 30 bp, Artificial Sequence
  Synthetic oligonucleotide
tcggggcagattcatcagagaaattacatt

SEQ ID NO: 45052 - DNA, 30 bp, Artificial Sequence
  Synthetic oligonucleotide
ctgaccacagaacggcataatcattacatt

SEQ ID NO: 45053 - DNA, 30 bp, Artificial Sequence
  Synthetic oligonucleotide
ggtgaggtaatcgccgaacggggtcccatt

SEQ ID NO: 45054 - DNA, 30 bp, Artificial Sequence
  Synthetic oligonucleotide
gggccacacgagtcaccgaaacattccatt

SEQ ID NO: 45055 - DNA, 30 bp, Artificial Sequence
  Synthetic oligonucleotide
agacgtgtgtgatcccgccaaaacagcatt

SEQ ID NO: 45056 - DNA, 30 bp, Artificial Sequence
  Synthetic oligonucleotide
cggatgcatgggagttacatcaagagcatt

SEQ ID NO: 45057 - DNA, 30 bp, Artificial Sequence
  Synthetic oligonucleotide
tcacacctgacacagtcgaaactacgcatt

SEQ ID NO: 45058 - DNA, 30 bp, Artificial Sequence
  Synthetic oligonucleotide
aagtaaactggtccctaggtgcgccgcatt

SEQ ID NO: 45059 - DNA, 30 bp, Artificial Sequence
  Synthetic oligonucleotide
atcgaacccgctaaggcataattcggcatt

SEQ ID NO: 45060 - DNA, 30 bp, Artificial Sequence
  Synthetic oligonucleotide
ggaagctagtagaggacgagaatgtgcatt

SEQ ID NO: 45061 - DNA, 30 bp, Artificial Sequence
  Synthetic oligonucleotide
aggagtcagactgataggtgaattacgatt

SEQ ID NO: 45062 - DNA, 30 bp, Artificial Sequence
  Synthetic oligonucleotide
agggaaggtgatgagtcgtctgcgccgatt

SEQ ID NO: 45063 - DNA, 30 bp, Artificial Sequence
  Synthetic oligonucleotide
cacgtggaacaccacgtacttaaagcgatt

SEQ ID NO: 45064 - DNA, 30 bp, Artificial Sequence
  Synthetic oligonucleotide
tcagaggaaggttgcaaagtttctaggatt

SEQ ID NO: 45065 - DNA, 30 bp, Artificial Sequence
  Synthetic oligonucleotide
cgtcgaacaagacagtctgaccaacggatt

SEQ ID NO: 45066 - DNA, 30 bp, Artificial Sequence
  Synthetic oligonucleotide
gtaaatgggaagggactcccgaaggtgatt

SEQ ID NO: 45067 - DNA, 30 bp, Artificial Sequence
  Synthetic oligonucleotide
acggagcctgaaggtgtatagtttgctatt

SEQ ID NO: 45068 - DNA, 30 bp, Artificial Sequence
  Synthetic oligonucleotide
tgtagtcggaaaggagttagaacatctatt

SEQ ID NO: 45069 - DNA, 30 bp, Artificial Sequence
  Synthetic oligonucleotide
aagagaaaacggactaacaaatatagtatt

SEQ ID NO: 45070 - DNA, 30 bp, Artificial Sequence
  Synthetic oligonucleotide
cggggactaggtgtcagagcggaaattatt

SEQ ID NO: 45071 - DNA, 30 bp, Artificial Sequence
  Synthetic oligonucleotide
tgcgaatggaggaggaaaattccgtaactt

SEQ ID NO: 45072 - DNA, 30 bp, Artificial Sequence
  Synthetic oligonucleotide
cagttagacgaaaaatgaggaagcagactt

SEQ ID NO: 45073 - DNA, 30 bp, Artificial Sequence
  Synthetic oligonucleotide
aggcgtagaaatcatcaaggatcacgactt

SEQ ID NO: 45074 - DNA, 30 bp, Artificial Sequence
  Synthetic oligonucleotide
ggccaaaacgaattattcgtctagtgactt

SEQ ID NO: 45075 - DNA, 30 bp, Artificial Sequence
  Synthetic oligonucleotide
cggagccagtcagcgccacatggaatactt

SEQ ID NO: 45076 - DNA, 30 bp, Artificial Sequence
  Synthetic oligonucleotide
cctggtcgccacaagcgagtccacatactt

SEQ ID NO: 45077 - DNA, 30 bp, Artificial Sequence
  Synthetic oligonucleotide
cacaactaggacgaggtaccgtacagcctt

SEQ ID NO: 45078 - DNA, 30 bp, Artificial Sequence
  Synthetic oligonucleotide
caaggattaacacgagatgaaatgagcctt

SEQ ID NO: 45079 - DNA, 30 bp, Artificial Sequence
  Synthetic oligonucleotide
gggcgctggagactggagagaccacgcctt

SEQ ID NO: 45080 - DNA, 30 bp, Artificial Sequence
  Synthetic oligonucleotide
agagagaccgaaaaggaatgtattcgcctt

SEQ ID NO: 45081 - DNA, 30 bp, Artificial Sequence
  Synthetic oligonucleotide
gagggggatgatagataggtagatgtcctt

SEQ ID NO: 45082 - DNA, 30 bp, Artificial Sequence
  Synthetic oligonucleotide
gtggacaaacaggacgtgccgaataagctt

SEQ ID NO: 45083 - DNA, 30 bp, Artificial Sequence
  Synthetic oligonucleotide
ggaaagcggaagtaaaggacagttaagctt

SEQ ID NO: 45084 - DNA, 30 bp, Artificial Sequence
  Synthetic oligonucleotide
cagtacttcacgacataacaggatgagctt

SEQ ID NO: 45085 - DNA, 30 bp, Artificial Sequence
  Synthetic oligonucleotide
ccggtgaaggcatggttcgagtaatagctt

SEQ ID NO: 45086 - DNA, 30 bp, Artificial Sequence
  Synthetic oligonucleotide
tccgtgggagaaggcgtaataccaacgctt

SEQ ID NO: 45087 - DNA, 30 bp, Artificial Sequence
  Synthetic oligonucleotide
aagtaagtatgcggaaagaaaggtacgctt

SEQ ID NO: 45088 - DNA, 30 bp, Artificial Sequence
  Synthetic oligonucleotide
catgtggtgggctggctcgtaatctcgctt

SEQ ID NO: 45089 - DNA, 30 bp, Artificial Sequence
  Synthetic oligonucleotide
aggcacgggacgaagtcgctgacttggctt

SEQ ID NO: 45090 - DNA, 30 bp, Artificial Sequence
  Synthetic oligonucleotide
tgaacgagcattggacatatctcactgctt

SEQ ID NO: 45091 - DNA, 30 bp, Artificial Sequence
  Synthetic oligonucleotide
gtactgacagatggactaggggcggatctt

SEQ ID NO: 45092 - DNA, 30 bp, Artificial Sequence
  Synthetic oligonucleotide
caggagtgggagtccttaattgcgcgtctt

SEQ ID NO: 45093 - DNA, 30 bp, Artificial Sequence
  Synthetic oligonucleotide
tgagaaaatgcgctcaatacagagggtctt

SEQ ID NO: 45094 - DNA, 30 bp, Artificial Sequence
  Synthetic oligonucleotide
gcggaggtcgggggatataaaaccattctt

SEQ ID NO: 45095 - DNA, 30 bp, Artificial Sequence
  Synthetic oligonucleotide
caagcaaggaccacccctgtgcttcaagtt

SEQ ID NO: 45096 - DNA, 30 bp, Artificial Sequence
  Synthetic oligonucleotide
atgtacatcgcagagagaaccgaaccagtt

SEQ ID NO: 45097 - DNA, 30 bp, Artificial Sequence
  Synthetic oligonucleotide
gtgcgtagcggatgatagcatggagcagtt

SEQ ID NO: 45098 - DNA, 30 bp, Artificial Sequence
  Synthetic oligonucleotide
agcaggtacactgcttcgaaaataggagtt

SEQ ID NO: 45099 - DNA, 30 bp, Artificial Sequence
  Synthetic oligonucleotide
cagtgcgggcagggcgatacagtaatagtt

SEQ ID NO: 45100 - DNA, 30 bp, Artificial Sequence
  Synthetic oligonucleotide
cttcgacggggctagtgaaaacagctagtt

SEQ ID NO: 45101 - DNA, 30 bp, Artificial Sequence
  Synthetic oligonucleotide
cggggtttgtaagaagtagtagaagtagtt

SEQ ID NO: 45102 - DNA, 30 bp, Artificial Sequence
  Synthetic oligonucleotide
agaaggaggagaccggattgtagtttagtt

SEQ ID NO: 45103 - DNA, 30 bp, Artificial Sequence
  Synthetic oligonucleotide
cactgcaaagcataaggtgggagtaacgtt

SEQ ID NO: 45104 - DNA, 30 bp, Artificial Sequence
  Synthetic oligonucleotide
tcgcgcggcgggctagtctgtcgatccgtt

SEQ ID NO: 45105 - DNA, 29 bp, Artificial Sequence
  Synthetic oligonucleotide
gtggaccaaccgggaggggagcatgcgtt

SEQ ID NO: 45106 - DNA, 30 bp, Artificial Sequence
  Synthetic oligonucleotide
gacaagtactcgccacgaaagacctgcgtt

SEQ ID NO: 45107 - DNA, 30 bp, Artificial Sequence
  Synthetic oligonucleotide
agtgaccacaaggcgtcggtagagtgcgtt

SEQ ID NO: 45108 - DNA, 30 bp, Artificial Sequence
  Synthetic oligonucleotide
cacgccggacgcaatggagtggtaatcgtt

SEQ ID NO: 45109 - DNA, 30 bp, Artificial Sequence
  Synthetic oligonucleotide
cgactacaaagggaatgagttcctaaggtt

SEQ ID NO: 45110 - DNA, 30 bp, Artificial Sequence
  Synthetic oligonucleotide
caggcacaggggggaaggcagagtaaggtt

SEQ ID NO: 45111 - DNA, 30 bp, Artificial Sequence
  Synthetic oligonucleotide
aggcgccctattgaaagccaagtccaggtt

SEQ ID NO: 45112 - DNA, 30 bp, Artificial Sequence
  Synthetic oligonucleotide
agttaggaccatacttattcagagcaggtt

SEQ ID NO: 45113 - DNA, 30 bp, Artificial Sequence
  Synthetic oligonucleotide
gaggagcgagggcgcgaagtcgtttaggtt

SEQ ID NO: 45114 - DNA, 30 bp, Artificial Sequence
  Synthetic oligonucleotide
cgcggcgagggattagcgaagtttacggtt

SEQ ID NO: 45115 - DNA, 30 bp, Artificial Sequence
  Synthetic oligonucleotide
ggcgacctatgcggtgacacaatatgggtt

SEQ ID NO: 45116 - DNA, 31 bp, Artificial Sequence
  Synthetic oligonucleotide
gcatcgagtaacgtgaattaataaaatggtt

SEQ ID NO: 45117 - DNA, 30 bp, Artificial Sequence
  Synthetic oligonucleotide
ctgcgaatattactacagaaaaggaatgtt

SEQ ID NO: 45118 - DNA, 30 bp, Artificial Sequence
  Synthetic oligonucleotide
cgaccaacaaggaacgggcatcataatgtt

SEQ ID NO: 45119 - DNA, 30 bp, Artificial Sequence
  Synthetic oligonucleotide
ggagacggtctgaacaagtccaaggatgtt

SEQ ID NO: 45120 - DNA, 30 bp, Artificial Sequence
  Synthetic oligonucleotide
ggaaatgaggaaatgtcacaaacccctgtt

SEQ ID NO: 45121 - DNA, 30 bp, Artificial Sequence
  Synthetic oligonucleotide
caatgaccggtagaaggtccaacagctgtt

SEQ ID NO: 45122 - DNA, 30 bp, Artificial Sequence
  Synthetic oligonucleotide
cggttggtgactgggtgcaacattccattt

SEQ ID NO: 45123 - DNA, 30 bp, Artificial Sequence
  Synthetic oligonucleotide
cgagtgcaacgactgcgattaggacgattt

SEQ ID NO: 45124 - DNA, 30 bp, Artificial Sequence
  Synthetic oligonucleotide
cgtgcagagaacttcagcgggcactgattt

SEQ ID NO: 45125 - DNA, 30 bp, Artificial Sequence
  Synthetic oligonucleotide
actacgaaggaaggtccgggactttgattt

SEQ ID NO: 45126 - DNA, 30 bp, Artificial Sequence
  Synthetic oligonucleotide
tcgaaggattaaacagccacatgagacttt

SEQ ID NO: 45127 - DNA, 30 bp, Artificial Sequence
  Synthetic oligonucleotide
gtcgacagggggcaaaggcagggaggcttt

SEQ ID NO: 45128 - DNA, 30 bp, Artificial Sequence
  Synthetic oligonucleotide
gcgaacgcaatggttatcagtaagtagttt

SEQ ID NO: 45129 - DNA, 30 bp, Artificial Sequence
  Synthetic oligonucleotide
gacaatccaagaaccaatgcgcaatcgttt

SEQ ID NO: 45130 - DNA, 30 bp, Artificial Sequence
  Synthetic oligonucleotide
aggaggagcaagtaccacaaggcgaggttt

SEQ ID NO: 45131 - DNA, 30 bp, Artificial Sequence
  Synthetic oligonucleotide
cgaagatgagagaggtgattacaaactttt

SEQ ID NO: 45132 - DNA, 30 bp, Artificial Sequence
  Synthetic oligonucleotide
cgaatgaaaagcgaagtagtcttacctttt

SEQ ID NO: 45133 - DNA, 30 bp, Artificial Sequence
  Synthetic oligonucleotide
acagactggacacatacccaaggccgtttt

SEQ ID NO: 45134 - DNA, 30 bp, Artificial Sequence
  Synthetic oligonucleotide
gctaaaccggcgaaaaggtaaagatttttt

SEQ ID NO: 45135 - DNA, 30 bp, Artificial Sequence
  Synthetic oligonucleotide
tgtgcgcgagactggtcccatgccaaaaaa

SEQ ID NO: 45136 - DNA, 30 bp, Artificial Sequence
  Synthetic oligonucleotide
acgcaaaagacgtcattcagcacacaaaaa

SEQ ID NO: 45137 - DNA, 30 bp, Artificial Sequence
  Synthetic oligonucleotide
caggaaagccagcgctgagagtgacaaaaa

SEQ ID NO: 45138 - DNA, 30 bp, Artificial Sequence
  Synthetic oligonucleotide
catctccacgaacacataacgttagaaaaa

SEQ ID NO: 45139 - DNA, 30 bp, Artificial Sequence
  Synthetic oligonucleotide
tggctcgtaagcgaattcccagtcgaaaaa

SEQ ID NO: 45140 - DNA, 30 bp, Artificial Sequence
  Synthetic oligonucleotide
tgcacaacagaccagagcaccaaggaaaaa

SEQ ID NO: 45141 - DNA, 30 bp, Artificial Sequence
  Synthetic oligonucleotide
acctagtaagaggatcgtgacggaacaaaa

SEQ ID NO: 45142 - DNA, 30 bp, Artificial Sequence
  Synthetic oligonucleotide
cgaggcaaacgtcaatccaccttcacaaaa

SEQ ID NO: 45143 - DNA, 30 bp, Artificial Sequence
  Synthetic oligonucleotide
ccgagttccgttgagacagtcacgacaaaa

SEQ ID NO: 45144 - DNA, 30 bp, Artificial Sequence
  Synthetic oligonucleotide
tcgtttcgatggatactcggcacgccaaaa

SEQ ID NO: 45145 - DNA, 30 bp, Artificial Sequence
  Synthetic oligonucleotide
gaacgtgagtccgagagtcagtaagcaaaa

SEQ ID NO: 45146 - DNA, 30 bp, Artificial Sequence
  Synthetic oligonucleotide
acagcccgcgcgactcccatcctggcaaaa

SEQ ID NO: 45147 - DNA, 30 bp, Artificial Sequence
  Synthetic oligonucleotide
cataagggaggtaaatggtgttttgcaaaa

SEQ ID NO: 45148 - DNA, 30 bp, Artificial Sequence
  Synthetic oligonucleotide
tcagccagaaaaattaccaagccaggaaaa

SEQ ID NO: 45149 - DNA, 30 bp, Artificial Sequence
  Synthetic oligonucleotide
cacttgcgcccgataaagatcctgggaaaa

SEQ ID NO: 45150 - DNA, 30 bp, Artificial Sequence
  Synthetic oligonucleotide
tgttgcgttaaggaacggccaagtggaaaa

SEQ ID NO: 45151 - DNA, 30 bp, Artificial Sequence
  Synthetic oligonucleotide
tacgagcaaaattcaggcaaacaatgaaaa

SEQ ID NO: 45152 - DNA, 30 bp, Artificial Sequence
  Synthetic oligonucleotide
gtcagaggccacgagatgataggctgaaaa

SEQ ID NO: 45153 - DNA, 30 bp, Artificial Sequence
  Synthetic oligonucleotide
ccggcagaattgcgaaggtcgcgtataaaa

SEQ ID NO: 45154 - DNA, 30 bp, Artificial Sequence
  Synthetic oligonucleotide
ataccggaagaacggaagggtagattaaaa

SEQ ID NO: 45155 - DNA, 30 bp, Artificial Sequence
  Synthetic oligonucleotide
cacatgctcgactactaagggcccgacaaa

SEQ ID NO: 45156 - DNA, 30 bp, Artificial Sequence
  Synthetic oligonucleotide
gtcgaacgcgaggatgagtaatcgtacaaa

SEQ ID NO: 45157 - DNA, 30 bp, Artificial Sequence
  Synthetic oligonucleotide
gacgataggaactcgggagactgcaccaaa

SEQ ID NO: 45158 - DNA, 30 bp, Artificial Sequence
  Synthetic oligonucleotide
gctcggaatcacacgttaggcttcaccaaa

SEQ ID NO: 45159 - DNA, 30 bp, Artificial Sequence
  Synthetic oligonucleotide
tccatagctgatctcaacatcatccccaaa

SEQ ID NO: 45160 - DNA, 30 bp, Artificial Sequence
  Synthetic oligonucleotide
ggagcagaaggtggaattgcggacgccaaa

SEQ ID NO: 45161 - DNA, 30 bp, Artificial Sequence
  Synthetic oligonucleotide
ctaacgtaaggaagtccgatgtgcgccaaa

SEQ ID NO: 45162 - DNA, 30 bp, Artificial Sequence
  Synthetic oligonucleotide
ctcaagaagacaagccgctagcgtagcaaa

SEQ ID NO: 45163 - DNA, 30 bp, Artificial Sequence
  Synthetic oligonucleotide
gtgagtacacaggcaaagattctaggcaaa

SEQ ID NO: 45164 - DNA, 30 bp, Artificial Sequence
  Synthetic oligonucleotide
ttggacgtggcacgaaccacttgctgcaaa

SEQ ID NO: 45165 - DNA, 30 bp, Artificial Sequence
  Synthetic oligonucleotide
gactcgcacaataacttcagcgcgatcaaa

SEQ ID NO: 45166 - DNA, 30 bp, Artificial Sequence
  Synthetic oligonucleotide
gcgtctggctgcttgaaatctcgaaagaaa

SEQ ID NO: 45167 - DNA, 30 bp, Artificial Sequence
  Synthetic oligonucleotide
ggagtagggggaagtcaactaagacagaaa

SEQ ID NO: 45168 - DNA, 30 bp, Artificial Sequence
  Synthetic oligonucleotide
gacagagtttagcaatagtagggacagaaa

SEQ ID NO: 45169 - DNA, 30 bp, Artificial Sequence
  Synthetic oligonucleotide
aaatcacgacgtttgggcggaaacgagaaa

SEQ ID NO: 45170 - DNA, 30 bp, Artificial Sequence
  Synthetic oligonucleotide
caacctacagacgaaaccgaattggagaaa

SEQ ID NO: 45171 - DNA, 30 bp, Artificial Sequence
  Synthetic oligonucleotide
cgtttaagaaaccgtagtagaaagacgaaa

SEQ ID NO: 45172 - DNA, 30 bp, Artificial Sequence
  Synthetic oligonucleotide
ccatcgggtgatgcaacacacattgcgaaa

SEQ ID NO: 45173 - DNA, 30 bp, Artificial Sequence
  Synthetic oligonucleotide
tttgagacgtggtctgggcgatattcgaaa

SEQ ID NO: 45174 - DNA, 30 bp, Artificial Sequence
  Synthetic oligonucleotide
tccgtctagaaacaattttgtccaaggaaa

SEQ ID NO: 45175 - DNA, 30 bp, Artificial Sequence
  Synthetic oligonucleotide
cgttacattcagaacgtggaatgaaggaaa

SEQ ID NO: 45176 - DNA, 30 bp, Artificial Sequence
  Synthetic oligonucleotide
gaccaagatctagtcgtcccccagcggaaa

SEQ ID NO: 45177 - DNA, 30 bp, Artificial Sequence
  Synthetic oligonucleotide
actcgtgtaggagtaagtcaaggtcggaaa

SEQ ID NO: 45178 - DNA, 30 bp, Artificial Sequence
  Synthetic oligonucleotide
gttaggtataaatgaggagtcaacgggaaa

SEQ ID NO: 45179 - DNA, 30 bp, Artificial Sequence
  Synthetic oligonucleotide
cgttctgggaaggcgtcggggtgcgtgaaa

SEQ ID NO: 45180 - DNA, 30 bp, Artificial Sequence
  Synthetic oligonucleotide
ggagagcaccaatggatttattttgtgaaa

SEQ ID NO: 45181 - DNA, 29 bp, Artificial Sequence
  Synthetic oligonucleotide
aagcgtgtggtcatagcgataggcataaa

SEQ ID NO: 45182 - DNA, 30 bp, Artificial Sequence
  Synthetic oligonucleotide
aaggggaggcgccattcgtctacagataaa

SEQ ID NO: 45183 - DNA, 30 bp, Artificial Sequence
  Synthetic oligonucleotide
aggaaaggagatcacaaacggaaggataaa

SEQ ID NO: 45184 - DNA, 30 bp, Artificial Sequence
  Synthetic oligonucleotide
agggccatctcgagggggcgaagggataaa

SEQ ID NO: 45185 - DNA, 29 bp, Artificial Sequence
  Synthetic oligonucleotide
tttgttgtgtaggtttactcccatataaa

SEQ ID NO: 45186 - DNA, 30 bp, Artificial Sequence
  Synthetic oligonucleotide
cggtgaggtgacttgaataatgtgtataaa

SEQ ID NO: 45187 - DNA, 30 bp, Artificial Sequence
  Synthetic oligonucleotide
ctcgtgtggagggctcgcaagttgtataaa

SEQ ID NO: 45188 - DNA, 30 bp, Artificial Sequence
  Synthetic oligonucleotide
gcgcgcgggagacgtaacaaactttataaa

SEQ ID NO: 45189 - DNA, 30 bp, Artificial Sequence
  Synthetic oligonucleotide
tgctgtggaggcacgactagtcgatctaaa

SEQ ID NO: 45190 - DNA, 30 bp, Artificial Sequence
  Synthetic oligonucleotide
cgggggttcggacgtcatccatcgcgtaaa

SEQ ID NO: 45191 - DNA, 30 bp, Artificial Sequence
  Synthetic oligonucleotide
tggcacatctgatcgagaagtggaggtaaa

SEQ ID NO: 45192 - DNA, 30 bp, Artificial Sequence
  Synthetic oligonucleotide
cagaaaagtcctcgagtgcggttgggtaaa

SEQ ID NO: 45193 - DNA, 30 bp, Artificial Sequence
  Synthetic oligonucleotide
acgtgcacagtcccgtataaaacccttaaa

SEQ ID NO: 45194 - DNA, 30 bp, Artificial Sequence
  Synthetic oligonucleotide
agggtgcacacccacagtctagccgttaaa

SEQ ID NO: 45195 - DNA, 30 bp, Artificial Sequence
  Synthetic oligonucleotide
cggaagtgacgtgaacttacaagctttaaa

SEQ ID NO: 45196 - DNA, 30 bp, Artificial Sequence
  Synthetic oligonucleotide
aggtggtaattgagggaaagcgtaaaacaa

SEQ ID NO: 45197 - DNA, 30 bp, Artificial Sequence
  Synthetic oligonucleotide
tcaatcattcacggctatcccgtcaaacaa

SEQ ID NO: 45198 - DNA, 30 bp, Artificial Sequence
  Synthetic oligonucleotide
tgtaaatctggagctgacgtacgtaaacaa

SEQ ID NO: 45199 - DNA, 30 bp, Artificial Sequence
  Synthetic oligonucleotide
ttcagtcgtcaggggtacatcggtaaacaa

SEQ ID NO: 45200 - DNA, 30 bp, Artificial Sequence
  Synthetic oligonucleotide
tacggtagcggaagcggctcccaggaacaa

SEQ ID NO: 45201 - DNA, 30 bp, Artificial Sequence
  Synthetic oligonucleotide
tcggtatatgaggaacatgcgtattaacaa

SEQ ID NO: 45202 - DNA, 30 bp, Artificial Sequence
  Synthetic oligonucleotide
agacatataggataagggacggccacacaa

SEQ ID NO: 45203 - DNA, 30 bp, Artificial Sequence
  Synthetic oligonucleotide
cggttgaaaagttcggtcctacatgcacaa

SEQ ID NO: 45204 - DNA, 30 bp, Artificial Sequence
  Synthetic oligonucleotide
aaagaccggagagggatagcaatgtcacaa

SEQ ID NO: 45205 - DNA, 30 bp, Artificial Sequence
  Synthetic oligonucleotide
gaaaaatggggggaccaaagtataagacaa

SEQ ID NO: 45206 - DNA, 30 bp, Artificial Sequence
  Synthetic oligonucleotide
ttgagaggcatctgcggctaagggagacaa

SEQ ID NO: 45207 - DNA, 30 bp, Artificial Sequence
  Synthetic oligonucleotide
acataaagacgatgccggagaatgagacaa

SEQ ID NO: 45208 - DNA, 30 bp, Artificial Sequence
  Synthetic oligonucleotide
gtcaagcacgattgagatgtacagcgacaa

SEQ ID NO: 45209 - DNA, 30 bp, Artificial Sequence
  Synthetic oligonucleotide
cgaaacatagtacgtaaacggcgcggacaa

SEQ ID NO: 45210 - DNA, 30 bp, Artificial Sequence
  Synthetic oligonucleotide
aatgcaccggagaaaaacgataatatacaa

SEQ ID NO: 45211 - DNA, 30 bp, Artificial Sequence
  Synthetic oligonucleotide
tgactgatcgtaattaagagggaagtacaa

SEQ ID NO: 45212 - DNA, 30 bp, Artificial Sequence
  Synthetic oligonucleotide
ctaaggtcaggtcaatacaaccagaaccaa

SEQ ID NO: 45213 - DNA, 30 bp, Artificial Sequence
  Synthetic oligonucleotide
accgtaacttctatagacaacatccaccaa

SEQ ID NO: 45214 - DNA, 30 bp, Artificial Sequence
  Synthetic oligonucleotide
aagaggaagagaggaaagtcgaacgaccaa

SEQ ID NO: 45215 - DNA, 30 bp, Artificial Sequence
  Synthetic oligonucleotide
accatcaatgttaatggcaacgaaacccaa

SEQ ID NO: 45216 - DNA, 30 bp, Artificial Sequence
  Synthetic oligonucleotide
ggatcgagtagagactcgggagatccccaa

SEQ ID NO: 45217 - DNA, 30 bp, Artificial Sequence
  Synthetic oligonucleotide
aataaataaaagatgagtgatgacagccaa

SEQ ID NO: 45218 - DNA, 30 bp, Artificial Sequence
  Synthetic oligonucleotide
ggagagcgagactctctaatcggtgtccaa

SEQ ID NO: 45219 - DNA, 30 bp, Artificial Sequence
  Synthetic oligonucleotide
gttcgcgcggtctgacagaaggcgaagcaa

SEQ ID NO: 45220 - DNA, 30 bp, Artificial Sequence
  Synthetic oligonucleotide
taaccccggtcggtgcaaagggatcagcaa

SEQ ID NO: 45221 - DNA, 30 bp, Artificial Sequence
  Synthetic oligonucleotide
cggatgatgataaagacgaaggttcagcaa

SEQ ID NO: 45222 - DNA, 30 bp, Artificial Sequence
  Synthetic oligonucleotide
gttccgtaaaaggacatataaagggagcaa

SEQ ID NO: 45223 - DNA, 30 bp, Artificial Sequence
  Synthetic oligonucleotide
agaatagcgtagacactcggaatgtagcaa

SEQ ID NO: 45224 - DNA, 30 bp, Artificial Sequence
  Synthetic oligonucleotide
cgctatgcgggtatggcgagcatgtagcaa

SEQ ID NO: 45225 - DNA, 30 bp, Artificial Sequence
  Synthetic oligonucleotide
tctgaacgtttcgagcccgccaacacgcaa

SEQ ID NO: 45226 - DNA, 30 bp, Artificial Sequence
  Synthetic oligonucleotide
ctaagggagttggatccgtgaagcacgcaa

SEQ ID NO: 45227 - DNA, 30 bp, Artificial Sequence
  Synthetic oligonucleotide
ggtaaggagaatgaagcacttcctgcgcaa

SEQ ID NO: 45228 - DNA, 30 bp, Artificial Sequence
  Synthetic oligonucleotide
gaaaagatcgtgtcggcacagtgcgggcaa

SEQ ID NO: 45229 - DNA, 30 bp, Artificial Sequence
  Synthetic oligonucleotide
tcttgcatacaacactcacaacaggggcaa

SEQ ID NO: 45230 - DNA, 30 bp, Artificial Sequence
  Synthetic oligonucleotide
ggaactagaggtccgaggagagccctgcaa

SEQ ID NO: 45231 - DNA, 30 bp, Artificial Sequence
  Synthetic oligonucleotide
tcgatttagcccaaaccagcgtgtctgcaa

SEQ ID NO: 45232 - DNA, 30 bp, Artificial Sequence
  Synthetic oligonucleotide
ggtgacaaggacaagtatggtaaagtgcaa

SEQ ID NO: 45233 - DNA, 30 bp, Artificial Sequence
  Synthetic oligonucleotide
tctcgtatcgattagaatccgtccttgcaa

SEQ ID NO: 45234 - DNA, 30 bp, Artificial Sequence
  Synthetic oligonucleotide
tgtacatggccagggataaagagcactcaa

SEQ ID NO: 45235 - DNA, 30 bp, Artificial Sequence
  Synthetic oligonucleotide
gtggtaccattcagcatcggccagactcaa

SEQ ID NO: 45236 - DNA, 30 bp, Artificial Sequence
  Synthetic oligonucleotide
ccatgaaatgtaaattaatcgacctctcaa

SEQ ID NO: 45237 - DNA, 30 bp, Artificial Sequence
  Synthetic oligonucleotide
catacgcgtatctagtagcaaggaggtcaa

SEQ ID NO: 45238 - DNA, 30 bp, Artificial Sequence
  Synthetic oligonucleotide
gtggatcgctgatgtgaagtacgatgtcaa

SEQ ID NO: 45239 - DNA, 30 bp, Artificial Sequence
  Synthetic oligonucleotide
gaacacaatggcaagatcagcacacttcaa

SEQ ID NO: 45240 - DNA, 30 bp, Artificial Sequence
  Synthetic oligonucleotide
gagggctgacctatggatgagaaagttcaa

SEQ ID NO: 45241 - DNA, 30 bp, Artificial Sequence
  Synthetic oligonucleotide
taggttggaccacttgggaaggataaagaa

SEQ ID NO: 45242 - DNA, 30 bp, Artificial Sequence
  Synthetic oligonucleotide
agcaaaagcggtaggcattcataacaagaa

SEQ ID NO: 45243 - DNA, 30 bp, Artificial Sequence
  Synthetic oligonucleotide
ggctcagccattgatccgatccgacaagaa

SEQ ID NO: 45244 - DNA, 30 bp, Artificial Sequence
  Synthetic oligonucleotide
ctcgagacccgacgagtactgctacaagaa

SEQ ID NO: 45245 - DNA, 30 bp, Artificial Sequence
  Synthetic oligonucleotide
atgcgggatcggtggagggaaaaccaagaa

SEQ ID NO: 45246 - DNA, 30 bp, Artificial Sequence
  Synthetic oligonucleotide
aggtacgtaaccaagaatcgctctgaagaa

SEQ ID NO: 45247 - DNA, 30 bp, Artificial Sequence
  Synthetic oligonucleotide
aagatagggctacgacggggggagtaagaa

SEQ ID NO: 45248 - DNA, 30 bp, Artificial Sequence
  Synthetic oligonucleotide
ccttagagcaacgattgaccaagaacagaa

SEQ ID NO: 45249 - DNA, 30 bp, Artificial Sequence
  Synthetic oligonucleotide
tggtggctggcgtcctaccggtaaccagaa

SEQ ID NO: 45250 - DNA, 30 bp, Artificial Sequence
  Synthetic oligonucleotide
caaaaccggtacgttaatcgggacccagaa

SEQ ID NO: 45251 - DNA, 30 bp, Artificial Sequence
  Synthetic oligonucleotide
cgctagtctatgtggactataagcccagaa

SEQ ID NO: 45252 - DNA, 30 bp, Artificial Sequence
  Synthetic oligonucleotide
aaactagaaggtcgctacgatggatcagaa

SEQ ID NO: 45253 - DNA, 30 bp, Artificial Sequence
  Synthetic oligonucleotide
agggctaagtagtaccaccacgtttcagaa

SEQ ID NO: 45254 - DNA, 30 bp, Artificial Sequence
  Synthetic oligonucleotide
caacgacaaaaactacgaaacgtacgagaa

SEQ ID NO: 45255 - DNA, 30 bp, Artificial Sequence
  Synthetic oligonucleotide
tagcccatagatggaacgggctcccgagaa

SEQ ID NO: 45256 - DNA, 30 bp, Artificial Sequence
  Synthetic oligonucleotide
gcgcgtagagacagttatgtgctccgagaa

SEQ ID NO: 45257 - DNA, 30 bp, Artificial Sequence
  Synthetic oligonucleotide
ccgtgccccagtggggaccggaacggagaa

SEQ ID NO: 45258 - DNA, 30 bp, Artificial Sequence
  Synthetic oligonucleotide
atcataagggtgcctgcaagatagggagaa

SEQ ID NO: 45259 - DNA, 30 bp, Artificial Sequence
  Synthetic oligonucleotide
acgttcgggctagtacccatctactgagaa

SEQ ID NO: 45260 - DNA, 30 bp, Artificial Sequence
  Synthetic oligonucleotide
aggctcggtttgataaggcggaagatagaa

SEQ ID NO: 45261 - DNA, 30 bp, Artificial Sequence
  Synthetic oligonucleotide
ataggcgcaaacgaagctcgtgcactagaa

SEQ ID NO: 45262 - DNA, 30 bp, Artificial Sequence
  Synthetic oligonucleotide
ccacaggaaattaggcgaaccgggctagaa

SEQ ID NO: 45263 - DNA, 30 bp, Artificial Sequence
  Synthetic oligonucleotide
atggaatcacagggtaagtagtacgtagaa

SEQ ID NO: 45264 - DNA, 30 bp, Artificial Sequence
  Synthetic oligonucleotide
agagcataatggcgggtggggagggtagaa

SEQ ID NO: 45265 - DNA, 30 bp, Artificial Sequence
  Synthetic oligonucleotide
aagctggcgctaagacctcagagcaacgaa

SEQ ID NO: 45266 - DNA, 30 bp, Artificial Sequence
  Synthetic oligonucleotide
cattggcaggatcgagattcacctaacgaa

SEQ ID NO: 45267 - DNA, 30 bp, Artificial Sequence
  Synthetic oligonucleotide
acattagtataagaaaactcgagtaacgaa

SEQ ID NO: 45268 - DNA, 30 bp, Artificial Sequence
  Synthetic oligonucleotide
gaaggcaacatgcataatgaagtgcacgaa

SEQ ID NO: 45269 - DNA, 30 bp, Artificial Sequence
  Synthetic oligonucleotide
acggcggttgggattgcgacaaaagacgaa

SEQ ID NO: 45270 - DNA, 30 bp, Artificial Sequence
  Synthetic oligonucleotide
atgctaaatcatgactaatctgcggacgaa

SEQ ID NO: 45271 - DNA, 30 bp, Artificial Sequence
  Synthetic oligonucleotide
aacctatggcccaacgaggaggtatacgaa

SEQ ID NO: 45272 - DNA, 30 bp, Artificial Sequence
  Synthetic oligonucleotide
ccgaaccacaactatagtgaatccaccgaa

SEQ ID NO: 45273 - DNA, 30 bp, Artificial Sequence
  Synthetic oligonucleotide
agaaaccacgactgtatgataggagccgaa

SEQ ID NO: 45274 - DNA, 30 bp, Artificial Sequence
  Synthetic oligonucleotide
aacaacggccggacaccaacgggcgccgaa

SEQ ID NO: 45275 - DNA, 30 bp, Artificial Sequence
  Synthetic oligonucleotide
agttcaaggcgaatgataagagcgagcgaa

SEQ ID NO: 45276 - DNA, 30 bp, Artificial Sequence
  Synthetic oligonucleotide
cacattagtgatacaagagcccggcgcgaa

SEQ ID NO: 45277 - DNA, 30 bp, Artificial Sequence
  Synthetic oligonucleotide
gacccacaaacaattaagtgttcagtcgaa

SEQ ID NO: 45278 - DNA, 31 bp, Artificial Sequence
  Synthetic oligonucleotide
cagtacaggagcaatagtcagaaggttcgaa

SEQ ID NO: 45279 - DNA, 30 bp, Artificial Sequence
  Synthetic oligonucleotide
cgcgcccgtcggagtgatgacattttcgaa

SEQ ID NO: 45280 - DNA, 30 bp, Artificial Sequence
  Synthetic oligonucleotide
gggcacgaatcaagggcgtcgcaaaaggaa

SEQ ID NO: 45281 - DNA, 30 bp, Artificial Sequence
  Synthetic oligonucleotide
aatgggaggactaatgtcacacgtcaggaa

SEQ ID NO: 45282 - DNA, 30 bp, Artificial Sequence
  Synthetic oligonucleotide
gtcccagctcatggagatagaggcgaggaa

SEQ ID NO: 45283 - DNA, 30 bp, Artificial Sequence
  Synthetic oligonucleotide
catgtcataacatacgaggcgccctaggaa

SEQ ID NO: 45284 - DNA, 30 bp, Artificial Sequence
  Synthetic oligonucleotide
gatgttcgaaaaggtatctacaggtaggaa

SEQ ID NO: 45285 - DNA, 30 bp, Artificial Sequence
  Synthetic oligonucleotide
aggatgggcggataaagtctctattaggaa

SEQ ID NO: 45286 - DNA, 30 bp, Artificial Sequence
  Synthetic oligonucleotide
catgaagccttgggggcgattgatacggaa

SEQ ID NO: 45287 - DNA, 30 bp, Artificial Sequence
  Synthetic oligonucleotide
caacggaagggttgggcatagttcccggaa

SEQ ID NO: 45288 - DNA, 29 bp, Artificial Sequence
  Synthetic oligonucleotide
agttgaagactcagaaacaaagcgcggaa

SEQ ID NO: 45289 - DNA, 30 bp, Artificial Sequence
  Synthetic oligonucleotide
atagagtatggcacaaagataagcgcggaa

SEQ ID NO: 45290 - DNA, 30 bp, Artificial Sequence
  Synthetic oligonucleotide
gaaaaggggatgcgtacaacgcagagggaa

SEQ ID NO: 45291 - DNA, 30 bp, Artificial Sequence
  Synthetic oligonucleotide
taaccaagactcatcggcaagcggagggaa

SEQ ID NO: 45292 - DNA, 30 bp, Artificial Sequence
  Synthetic oligonucleotide
aggtgcataatatacacccgtgagcgggaa

SEQ ID NO: 45293 - DNA, 30 bp, Artificial Sequence
  Synthetic oligonucleotide
catctaacccgcacaggagaggaaggggaa

SEQ ID NO: 45294 - DNA, 30 bp, Artificial Sequence
  Synthetic oligonucleotide
aggaggggtcatcggatgagtttgggggaa

SEQ ID NO: 45295 - DNA, 30 bp, Artificial Sequence
  Synthetic oligonucleotide
gagagggtcagctgcacgatgtgtctggaa

SEQ ID NO: 45296 - DNA, 30 bp, Artificial Sequence
  Synthetic oligonucleotide
ggttggaagacaatcgaagaccgagtggaa

SEQ ID NO: 45297 - DNA, 30 bp, Artificial Sequence
  Synthetic oligonucleotide
cgaaatatcgttattgccggcaaggtggaa

SEQ ID NO: 45298 - DNA, 30 bp, Artificial Sequence
  Synthetic oligonucleotide
acgagtttgccgttcagatttatattggaa

SEQ ID NO: 45299 - DNA, 30 bp, Artificial Sequence
  Synthetic oligonucleotide
agcctagccgggccacattagaggttggaa

SEQ ID NO: 45300 - DNA, 30 bp, Artificial Sequence
  Synthetic oligonucleotide
cgaggaatatattgctcgtcctaaaatgaa

SEQ ID NO: 45301 - DNA, 30 bp, Artificial Sequence
  Synthetic oligonucleotide
actaaatggacgtagtgccgtagaaatgaa

SEQ ID NO: 45302 - DNA, 30 bp, Artificial Sequence
  Synthetic oligonucleotide
gtggaagttgaagggagagatttagatgaa

SEQ ID NO: 45303 - DNA, 30 bp, Artificial Sequence
  Synthetic oligonucleotide
acgaaacgaagcttgattgatagcgatgaa

SEQ ID NO: 45304 - DNA, 30 bp, Artificial Sequence
  Synthetic oligonucleotide
tcctcaaaatgaactagagtgatttatgaa

SEQ ID NO: 45305 - DNA, 30 bp, Artificial Sequence
  Synthetic oligonucleotide
ttgcaaacacgcgacgatccggcgactgaa

SEQ ID NO: 45306 - DNA, 30 bp, Artificial Sequence
  Synthetic oligonucleotide
tcggaaaattaacacacatgcccccctgaa

SEQ ID NO: 45307 - DNA, 30 bp, Artificial Sequence
  Synthetic oligonucleotide
caagctagaggcaaatcggataagtctgaa

SEQ ID NO: 45308 - DNA, 30 bp, Artificial Sequence
  Synthetic oligonucleotide
ggcgaaattattatgatccctcgttctgaa

SEQ ID NO: 45309 - DNA, 30 bp, Artificial Sequence
  Synthetic oligonucleotide
cacggcgcaagctcacggccagagagtgaa

SEQ ID NO: 45310 - DNA, 30 bp, Artificial Sequence
  Synthetic oligonucleotide
cggcagaacttgtgctggttaacgagtgaa

SEQ ID NO: 45311 - DNA, 30 bp, Artificial Sequence
  Synthetic oligonucleotide
ggatactggtatggagtgatcataggtgaa

SEQ ID NO: 45312 - DNA, 30 bp, Artificial Sequence
  Synthetic oligonucleotide
ttaatcccgtggagaagataggagggtgaa

SEQ ID NO: 45313 - DNA, 30 bp, Artificial Sequence
  Synthetic oligonucleotide
ggaaaaaaatgaagcaattatacctgtgaa

SEQ ID NO: 45314 - DNA, 30 bp, Artificial Sequence
  Synthetic oligonucleotide
ccagtacgaggcatgacgaaagagtgtgaa

SEQ ID NO: 45315 - DNA, 30 bp, Artificial Sequence
  Synthetic oligonucleotide
gggagcgctaggtattaatagaattgtgaa

SEQ ID NO: 45316 - DNA, 30 bp, Artificial Sequence
  Synthetic oligonucleotide
aagaggaccacgcgctccatgatcattgaa

SEQ ID NO: 45317 - DNA, 30 bp, Artificial Sequence
  Synthetic oligonucleotide
aggctaataaataatccactggtgattgaa

SEQ ID NO: 45318 - DNA, 30 bp, Artificial Sequence
  Synthetic oligonucleotide
gccgagcaatacgtagtgataagtgttgaa

SEQ ID NO: 45319 - DNA, 30 bp, Artificial Sequence
  Synthetic oligonucleotide
acgggaaaaaataaatcggaatggcaataa

SEQ ID NO: 45320 - DNA, 30 bp, Artificial Sequence
  Synthetic oligonucleotide
cactgtcctgagcatgaggaacttcaataa

SEQ ID NO: 45321 - DNA, 30 bp, Artificial Sequence
  Synthetic oligonucleotide
ataaggatacttatagaggtacatgaataa

SEQ ID NO: 45322 - DNA, 30 bp, Artificial Sequence
  Synthetic oligonucleotide
ctaaaaaggtactaacgagagcatacataa

SEQ ID NO: 45323 - DNA, 30 bp, Artificial Sequence
  Synthetic oligonucleotide
aaacgcggatactacagagtgctaccataa

SEQ ID NO: 45324 - DNA, 30 bp, Artificial Sequence
  Synthetic oligonucleotide
tcgaagtgggtgctatcctaatcatcataa

SEQ ID NO: 45325 - DNA, 30 bp, Artificial Sequence
  Synthetic oligonucleotide
aacgaatggtggcgcagtgccctaagataa

SEQ ID NO: 45326 - DNA, 30 bp, Artificial Sequence
  Synthetic oligonucleotide
gccggaggataacggcgagaggtaagataa

SEQ ID NO: 45327 - DNA, 30 bp, Artificial Sequence
  Synthetic oligonucleotide
cgacgtcgcggactgcgtactatgcgataa

SEQ ID NO: 45328 - DNA, 30 bp, Artificial Sequence
  Synthetic oligonucleotide
gcggcaatgagtgagggagggccaggataa

SEQ ID NO: 45329 - DNA, 30 bp, Artificial Sequence
  Synthetic oligonucleotide
gagcgaaactaccgtattcgcatcggataa

SEQ ID NO: 45330 - DNA, 30 bp, Artificial Sequence
  Synthetic oligonucleotide
ctcacttacgagaagcaagttccgggataa

SEQ ID NO: 45331 - DNA, 30 bp, Artificial Sequence
  Synthetic oligonucleotide
agcgcccagattgaccgagggggactataa

SEQ ID NO: 45332 - DNA, 30 bp, Artificial Sequence
  Synthetic oligonucleotide
acggagagatagattctgtttagtgtataa

SEQ ID NO: 45333 - DNA, 30 bp, Artificial Sequence
  Synthetic oligonucleotide
tccggaaattaggagagagatggtgtataa

SEQ ID NO: 45334 - DNA, 30 bp, Artificial Sequence
  Synthetic oligonucleotide
tcatagggacatagtacgacctcgttataa

SEQ ID NO: 45335 - DNA, 30 bp, Artificial Sequence
  Synthetic oligonucleotide
agcaagggaaccgaccgttagccaaactaa

SEQ ID NO: 45336 - DNA, 30 bp, Artificial Sequence
  Synthetic oligonucleotide
ggaagcttactgggcagccccgacaactaa

SEQ ID NO: 45337 - DNA, 30 bp, Artificial Sequence
  Synthetic oligonucleotide
acgagtatagtatcctctatgcaagactaa

SEQ ID NO: 45338 - DNA, 30 bp, Artificial Sequence
  Synthetic oligonucleotide
taaaaaaagcaacgtaaatggcgagactaa

SEQ ID NO: 45339 - DNA, 30 bp, Artificial Sequence
  Synthetic oligonucleotide
actgaggagtcaatttgtatgatcgactaa

SEQ ID NO: 45340 - DNA, 30 bp, Artificial Sequence
  Synthetic oligonucleotide
tacgctaagtaattgaaaatcctggactaa

SEQ ID NO: 45341 - DNA, 30 bp, Artificial Sequence
  Synthetic oligonucleotide
cgaacttaagtatccgcttattgtgactaa

SEQ ID NO: 45342 - DNA, 30 bp, Artificial Sequence
  Synthetic oligonucleotide
gactaggggctggcccaaagatcgtactaa

SEQ ID NO: 45343 - DNA, 30 bp, Artificial Sequence
  Synthetic oligonucleotide
ccgttatgggagagagtccaatgtccctaa

SEQ ID NO: 45344 - DNA, 30 bp, Artificial Sequence
  Synthetic oligonucleotide
tcgattaccgaggatagataggctagctaa

SEQ ID NO: 45345 - DNA, 30 bp, Artificial Sequence
  Synthetic oligonucleotide
aggccttagaggaggaatgtttctagctaa

SEQ ID NO: 45346 - DNA, 30 bp, Artificial Sequence
  Synthetic oligonucleotide
aggccatcacatgagcatcgaacgcgctaa

SEQ ID NO: 45347 - DNA, 30 bp, Artificial Sequence
  Synthetic oligonucleotide
gcactccatcaagtacaggcgatcggctaa

SEQ ID NO: 45348 - DNA, 30 bp, Artificial Sequence
  Synthetic oligonucleotide
tgaaggtccgtcagtggatagcctatctaa

SEQ ID NO: 45349 - DNA, 30 bp, Artificial Sequence
  Synthetic oligonucleotide
gcctcgtaatgaaagatgaaacggctctaa

SEQ ID NO: 45350 - DNA, 30 bp, Artificial Sequence
  Synthetic oligonucleotide
cgcagtcgggagtgaaaaatctacaagtaa

SEQ ID NO: 45351 - DNA, 30 bp, Artificial Sequence
  Synthetic oligonucleotide
gcgtacctgggacccgagtttcgcaagtaa

SEQ ID NO: 45352 - DNA, 30 bp, Artificial Sequence
  Synthetic oligonucleotide
acaacagctagatatttcgccaagaagtaa

SEQ ID NO: 45353 - DNA, 30 bp, Artificial Sequence
  Synthetic oligonucleotide
ctacccgcgatccgaggatactggcagtaa

SEQ ID NO: 45354 - DNA, 30 bp, Artificial Sequence
  Synthetic oligonucleotide
atactacccactgcacagctacgtcagtaa

SEQ ID NO: 45355 - DNA, 30 bp, Artificial Sequence
  Synthetic oligonucleotide
cacggcatttgcgttaaagtggccgagtaa

SEQ ID NO: 45356 - DNA, 30 bp, Artificial Sequence
  Synthetic oligonucleotide
agaaaaaggagcggtataaggggaccgtaa

SEQ ID NO: 45357 - DNA, 30 bp, Artificial Sequence
  Synthetic oligonucleotide
gggcagggggggggagcgaaccagccgtaa

SEQ ID NO: 45358 - DNA, 30 bp, Artificial Sequence
  Synthetic oligonucleotide
tatgctcgagttaacgtaaaaacgccgtaa

SEQ ID NO: 45359 - DNA, 30 bp, Artificial Sequence
  Synthetic oligonucleotide
ccactctcctgatggctgagtaggccgtaa

SEQ ID NO: 45360 - DNA, 30 bp, Artificial Sequence
  Synthetic oligonucleotide
tagaccaggtaaaacacgattgccgcgtaa

SEQ ID NO: 45361 - DNA, 30 bp, Artificial Sequence
  Synthetic oligonucleotide
atagaaggaagatgtcccacgggcaggtaa

SEQ ID NO: 45362 - DNA, 30 bp, Artificial Sequence
  Synthetic oligonucleotide
ttagccggctagggacactgaaatcggtaa

SEQ ID NO: 45363 - DNA, 30 bp, Artificial Sequence
  Synthetic oligonucleotide
tgctcctagtcgagataaataagagggtaa

SEQ ID NO: 45364 - DNA, 30 bp, Artificial Sequence
  Synthetic oligonucleotide
taagagatcgacaagagccaaagggggtaa

SEQ ID NO: 45365 - DNA, 30 bp, Artificial Sequence
  Synthetic oligonucleotide
gtcagatcgtgaagaacaagagtggggtaa

SEQ ID NO: 45366 - DNA, 30 bp, Artificial Sequence
  Synthetic oligonucleotide
gggtgattgaatagaaatatagtctggtaa

SEQ ID NO: 45367 - DNA, 30 bp, Artificial Sequence
  Synthetic oligonucleotide
ggggctaagacctggctcacaagaatgtaa

SEQ ID NO: 45368 - DNA, 30 bp, Artificial Sequence
  Synthetic oligonucleotide
gcggaaggcacacaacagacggagatgtaa

SEQ ID NO: 45369 - DNA, 30 bp, Artificial Sequence
  Synthetic oligonucleotide
acatgaagtggcgcattagtgtttatgtaa

SEQ ID NO: 45370 - DNA, 30 bp, Artificial Sequence
  Synthetic oligonucleotide
ggtatggcacgactgggcgacgacctgtaa

SEQ ID NO: 45371 - DNA, 30 bp, Artificial Sequence
  Synthetic oligonucleotide
tggagtgcatggattatcgttgagctgtaa

SEQ ID NO: 45372 - DNA, 30 bp, Artificial Sequence
  Synthetic oligonucleotide
ggagcgtcagaactcggaagacggctgtaa

SEQ ID NO: 45373 - DNA, 30 bp, Artificial Sequence
  Synthetic oligonucleotide
gcgtaaggagatttcgctagccctgtgtaa

SEQ ID NO: 45374 - DNA, 30 bp, Artificial Sequence
  Synthetic oligonucleotide
ggtcaccaagacacatgagagtgaaattaa

SEQ ID NO: 45375 - DNA, 30 bp, Artificial Sequence
  Synthetic oligonucleotide
acatatataagtacgtaaaaccagcattaa

SEQ ID NO: 45376 - DNA, 30 bp, Artificial Sequence
  Synthetic oligonucleotide
acgtgagggccgtcgaaaggatcgccttaa

SEQ ID NO: 45377 - DNA, 30 bp, Artificial Sequence
  Synthetic oligonucleotide
tcaacaatgtacctcaaccaataagcttaa

SEQ ID NO: 45378 - DNA, 30 bp, Artificial Sequence
  Synthetic oligonucleotide
ggatgtgtaaacaagaatactaatggttaa

SEQ ID NO: 45379 - DNA, 30 bp, Artificial Sequence
  Synthetic oligonucleotide
cactaaagcagaatcaggcgtctatgttaa

SEQ ID NO: 45380 - DNA, 30 bp, Artificial Sequence
  Synthetic oligonucleotide
ctagatcgagacaaatttgagtagtgttaa

SEQ ID NO: 45381 - DNA, 30 bp, Artificial Sequence
  Synthetic oligonucleotide
gcgaggggcagttagcctgaatattgttaa

SEQ ID NO: 45382 - DNA, 30 bp, Artificial Sequence
  Synthetic oligonucleotide
ccttgcttgaaggcaaactcactcgtttaa

SEQ ID NO: 45383 - DNA, 30 bp, Artificial Sequence
  Synthetic oligonucleotide
gtgggaatagaacggacaaacggccaaaca

SEQ ID NO: 45384 - DNA, 30 bp, Artificial Sequence
  Synthetic oligonucleotide
gcgggactcccgactactaccggagaaaca

SEQ ID NO: 45385 - DNA, 30 bp, Artificial Sequence
  Synthetic oligonucleotide
ccatatccagatgaggcgacctcataaaca

SEQ ID NO: 45386 - DNA, 30 bp, Artificial Sequence
  Synthetic oligonucleotide
aagatgggtttcagagaacgacgataaaca

SEQ ID NO: 45387 - DNA, 30 bp, Artificial Sequence
  Synthetic oligonucleotide
gataagagagtaaactgttccgaaacaaca

SEQ ID NO: 45388 - DNA, 30 bp, Artificial Sequence
  Synthetic oligonucleotide
agttggctcggggagagtggtggaccaaca

SEQ ID NO: 45389 - DNA, 30 bp, Artificial Sequence
  Synthetic oligonucleotide
taatgcaggtcaaccgaggtcgtgtcaaca

SEQ ID NO: 45390 - DNA, 30 bp, Artificial Sequence
  Synthetic oligonucleotide
gatcgagagaccatgaaattaccgtgaaca

SEQ ID NO: 45391 - DNA, 30 bp, Artificial Sequence
  Synthetic oligonucleotide
ccagagatggaagttacgtacacactaaca

SEQ ID NO: 45392 - DNA, 30 bp, Artificial Sequence
  Synthetic oligonucleotide
gcagacgagtagcgagggggaaccctaaca

SEQ ID NO: 45393 - DNA, 30 bp, Artificial Sequence
  Synthetic oligonucleotide
cgctccagtggaacgggggtaatcctaaca

SEQ ID NO: 45394 - DNA, 30 bp, Artificial Sequence
  Synthetic oligonucleotide
tgtgaacacatgggacccgatctgctaaca

SEQ ID NO: 45395 - DNA, 30 bp, Artificial Sequence
  Synthetic oligonucleotide
taaagctggaaaggcgaataaaacgtaaca

SEQ ID NO: 45396 - DNA, 30 bp, Artificial Sequence
  Synthetic oligonucleotide
cgaccaaaccgcatgttcatggttaacaca

SEQ ID NO: 45397 - DNA, 30 bp, Artificial Sequence
  Synthetic oligonucleotide
gtcatatcagatcactaactcgaatacaca

SEQ ID NO: 45398 - DNA, 30 bp, Artificial Sequence
  Synthetic oligonucleotide
aagagtgcaagtcaatattaagcatacaca

SEQ ID NO: 45399 - DNA, 30 bp, Artificial Sequence
  Synthetic oligonucleotide
ggaccggaatcacctgcctgaccgaccaca

SEQ ID NO: 45400 - DNA, 30 bp, Artificial Sequence
  Synthetic oligonucleotide
tacacagtggaagtaaggacgcggtccaca

SEQ ID NO: 45401 - DNA, 30 bp, Artificial Sequence
  Synthetic oligonucleotide
gtacctatagagctggtgaggacaagcaca

SEQ ID NO: 45402 - DNA, 30 bp, Artificial Sequence
  Synthetic oligonucleotide
gacatctagcactggagtaggatcggcaca

SEQ ID NO: 45403 - DNA, 30 bp, Artificial Sequence
  Synthetic oligonucleotide
cgcttctaactatacaaacgcctaatcaca

SEQ ID NO: 45404 - DNA, 30 bp, Artificial Sequence
  Synthetic oligonucleotide
ataacttaaaaaaaagacagtaatatcaca

SEQ ID NO: 45405 - DNA, 30 bp, Artificial Sequence
  Synthetic oligonucleotide
tgtcaaataggggatgaagacggcctcaca

SEQ ID NO: 45406 - DNA, 39 bp, Artificial Sequence
  Synthetic oligonucleotide
tgatgtgtaggtttactcccgtataaatgctgcgtcaca

SEQ ID NO: 45407 - DNA, 30 bp, Artificial Sequence
  Synthetic oligonucleotide
ccggacttatctccaacacctggcaagaca

SEQ ID NO: 45408 - DNA, 30 bp, Artificial Sequence
  Synthetic oligonucleotide
ggacaagacgtcaagtcactgggtaagaca

SEQ ID NO: 45409 - DNA, 30 bp, Artificial Sequence
  Synthetic oligonucleotide
ctggtaactccagaggagtgcaaacagaca

SEQ ID NO: 45410 - DNA, 30 bp, Artificial Sequence
  Synthetic oligonucleotide
acaaatcgctgaaatcgataatcgtagaca

SEQ ID NO: 45411 - DNA, 30 bp, Artificial Sequence
  Synthetic oligonucleotide
tcggcgaagaatccgcaagtcctcacgaca

SEQ ID NO: 45412 - DNA, 30 bp, Artificial Sequence
  Synthetic oligonucleotide
atgttcgggcataataagaaaggtacgaca

SEQ ID NO: 45413 - DNA, 30 bp, Artificial Sequence
  Synthetic oligonucleotide
taacaaaagaatttcgttccccacccgaca

SEQ ID NO: 45414 - DNA, 30 bp, Artificial Sequence
  Synthetic oligonucleotide
caacagcaaaggggttcaaatttcgcgaca

SEQ ID NO: 45415 - DNA, 30 bp, Artificial Sequence
  Synthetic oligonucleotide
cgggcactatgggctcgactagactcgaca

SEQ ID NO: 45416 - DNA, 30 bp, Artificial Sequence
  Synthetic oligonucleotide
aaagcgatatctcattttggacaaaggaca

SEQ ID NO: 45417 - DNA, 30 bp, Artificial Sequence
  Synthetic oligonucleotide
tgcggattaaatagtcagaatcagaggaca

SEQ ID NO: 45418 - DNA, 30 bp, Artificial Sequence
  Synthetic oligonucleotide
atgtcagaaattggacctagcatacggaca

SEQ ID NO: 45419 - DNA, 30 bp, Artificial Sequence
  Synthetic oligonucleotide
acgtaatggggctagaagataaaagggaca

SEQ ID NO: 45420 - DNA, 30 bp, Artificial Sequence
  Synthetic oligonucleotide
tgaactgaatagccaacagagatcgggaca

SEQ ID NO: 45421 - DNA, 30 bp, Artificial Sequence
  Synthetic oligonucleotide
tcccgagggaactcggaattatccgtgaca

SEQ ID NO: 45422 - DNA, 30 bp, Artificial Sequence
  Synthetic oligonucleotide
tactaccatcgagtgcgaaggctggtgaca

SEQ ID NO: 45423 - DNA, 30 bp, Artificial Sequence
  Synthetic oligonucleotide
aagacgaaagagccacgtgacgttttgaca

SEQ ID NO: 45424 - DNA, 30 bp, Artificial Sequence
  Synthetic oligonucleotide
cgcatctgtctaagaaagcgctacaataca

SEQ ID NO: 45425 - DNA, 30 bp, Artificial Sequence
  Synthetic oligonucleotide
cgggccgaggcccctccggctaagaataca

SEQ ID NO: 45426 - DNA, 30 bp, Artificial Sequence
  Synthetic oligonucleotide
cgaggtatagggtcctacaaatagaataca

SEQ ID NO: 45427 - DNA, 30 bp, Artificial Sequence
  Synthetic oligonucleotide
gtgatccagtgatacacaaaaggtaataca

SEQ ID NO: 45428 - DNA, 30 bp, Artificial Sequence
  Synthetic oligonucleotide
gcgagtgggcctttgaatgtgactgataca

SEQ ID NO: 45429 - DNA, 30 bp, Artificial Sequence
  Synthetic oligonucleotide
aatggaataacgggaaaaataatgactaca

SEQ ID NO: 45430 - DNA, 30 bp, Artificial Sequence
  Synthetic oligonucleotide
aaaccggacaattctgcgaaaaatactaca

SEQ ID NO: 45431 - DNA, 30 bp, Artificial Sequence
  Synthetic oligonucleotide
cacgtgtttgattagtcagtgaaagctaca

SEQ ID NO: 45432 - DNA, 30 bp, Artificial Sequence
  Synthetic oligonucleotide
gcgaaacacatttagaggacgaacgctaca

SEQ ID NO: 45433 - DNA, 30 bp, Artificial Sequence
  Synthetic oligonucleotide
ctcggaggaaggccccgaacgaacagtaca

SEQ ID NO: 45434 - DNA, 30 bp, Artificial Sequence
  Synthetic oligonucleotide
ccctccagaagatcgcgtaagcaaggtaca

SEQ ID NO: 45435 - DNA, 30 bp, Artificial Sequence
  Synthetic oligonucleotide
agattacagaacgaagtcgaactaattaca

SEQ ID NO: 45436 - DNA, 30 bp, Artificial Sequence
  Synthetic oligonucleotide
gatggcagaacaccggtgtaataaaaacca

SEQ ID NO: 45437 - DNA, 30 bp, Artificial Sequence
  Synthetic oligonucleotide
cacaataaatagggatgcgtgtaaaaacca

SEQ ID NO: 45438 - DNA, 30 bp, Artificial Sequence
  Synthetic oligonucleotide
cggagattgtcgtcaaagtagctaaaacca

SEQ ID NO: 45439 - DNA, 30 bp, Artificial Sequence
  Synthetic oligonucleotide
aggccactactacccatcctcccacaacca

SEQ ID NO: 45440 - DNA, 30 bp, Artificial Sequence
  Synthetic oligonucleotide
agggacaagatacaatgccgggatgaacca

SEQ ID NO: 45441 - DNA, 30 bp, Artificial Sequence
  Synthetic oligonucleotide
ctggcaaggtggccggtgagagagtaacca

SEQ ID NO: 45442 - DNA, 30 bp, Artificial Sequence
  Synthetic oligonucleotide
ggggaaaccctcgtaatggcaccgacacca

SEQ ID NO: 45443 - DNA, 30 bp, Artificial Sequence
  Synthetic oligonucleotide
cgggggcccaagtaccaatacgatacacca

SEQ ID NO: 45444 - DNA, 30 bp, Artificial Sequence
  Synthetic oligonucleotide
aggtccagctacctccgagtagtcccacca

SEQ ID NO: 45445 - DNA, 30 bp, Artificial Sequence
  Synthetic oligonucleotide
cggaacgtacttctttatctccacagacca

SEQ ID NO: 45446 - DNA, 30 bp, Artificial Sequence
  Synthetic oligonucleotide
gaacactgcgactcgaacttaaaacgacca

SEQ ID NO: 45447 - DNA, 30 bp, Artificial Sequence
  Synthetic oligonucleotide
taaggcgtagttagtgcaacagcgatacca

SEQ ID NO: 45448 - DNA, 30 bp, Artificial Sequence
  Synthetic oligonucleotide
aggagaacacaaggatcgctttgtcaccca

SEQ ID NO: 45449 - DNA, 30 bp, Artificial Sequence
  Synthetic oligonucleotide
ctggacgcaacggtacagcgagcgccccca

SEQ ID NO: 45450 - DNA, 30 bp, Artificial Sequence
  Synthetic oligonucleotide
cctcaagtgaccgatcggcaggtaagccca

SEQ ID NO: 45451 - DNA, 30 bp, Artificial Sequence
  Synthetic oligonucleotide
aggataatgggtcacctccgagggcgccca

SEQ ID NO: 45452 - DNA, 30 bp, Artificial Sequence
  Synthetic oligonucleotide
cgtgatggataattgctactaccgatccca

SEQ ID NO: 45453 - DNA, 30 bp, Artificial Sequence
  Synthetic oligonucleotide
accatcgcgcaagcccagccatatctccca

SEQ ID NO: 45454 - DNA, 30 bp, Artificial Sequence
  Synthetic oligonucleotide
agaggatggagaatcatcgatactttccca

SEQ ID NO: 45455 - DNA, 29 bp, Artificial Sequence
  Synthetic oligonucleotide
caacataatccccggcagtgttcaagcca

SEQ ID NO: 45456 - DNA, 30 bp, Artificial Sequence
  Synthetic oligonucleotide
ggagagccaacggactctccgtagaagcca

SEQ ID NO: 45457 - DNA, 30 bp, Artificial Sequence
  Synthetic oligonucleotide
gggaaggaacgaataatggaggagtagcca

SEQ ID NO: 45458 - DNA, 30 bp, Artificial Sequence
  Synthetic oligonucleotide
cacggaatgtcacttataagagggtagcca

SEQ ID NO: 45459 - DNA, 30 bp, Artificial Sequence
  Synthetic oligonucleotide
acaggggcccaaattagaggagaaacgcca

SEQ ID NO: 45460 - DNA, 30 bp, Artificial Sequence
  Synthetic oligonucleotide
caagcagtccgatctagttactcaccgcca

SEQ ID NO: 45461 - DNA, 30 bp, Artificial Sequence
  Synthetic oligonucleotide
agtccggggctgaagaggcgaccgtcgcca

SEQ ID NO: 45462 - DNA, 30 bp, Artificial Sequence
  Synthetic oligonucleotide
tgcaggggtaaaattagtcgcaaaaggcca

SEQ ID NO: 45463 - DNA, 31 bp, Artificial Sequence
  Synthetic oligonucleotide
tgtgtatctgacgtcccgagtgtagaggcca

SEQ ID NO: 45464 - DNA, 30 bp, Artificial Sequence
  Synthetic oligonucleotide
tacggaggtataaactgtaatcataggcca

SEQ ID NO: 45465 - DNA, 30 bp, Artificial Sequence
  Synthetic oligonucleotide
ccgaggagatctatacagcttcaagggcca

SEQ ID NO: 45466 - DNA, 30 bp, Artificial Sequence
  Synthetic oligonucleotide
cagtgagatacgaaatgaaccggcatgcca

SEQ ID NO: 45467 - DNA, 30 bp, Artificial Sequence
  Synthetic oligonucleotide
tcgtataccggatagaacccgtttatgcca

SEQ ID NO: 45468 - DNA, 30 bp, Artificial Sequence
  Synthetic oligonucleotide
ccatagacgttatgtggagactgtgtgcca

SEQ ID NO: 45469 - DNA, 30 bp, Artificial Sequence
  Synthetic oligonucleotide
ggtatcggcggagaaaagttcatcaatcca

SEQ ID NO: 45470 - DNA, 30 bp, Artificial Sequence
  Synthetic oligonucleotide
accggggagagggattccatagcacatcca

SEQ ID NO: 45471 - DNA, 30 bp, Artificial Sequence
  Synthetic oligonucleotide
agagcagagagcgcgggattgtgccatcca

SEQ ID NO: 45472 - DNA, 30 bp, Artificial Sequence
  Synthetic oligonucleotide
tagtagtaggcaacggcggaaactcatcca

SEQ ID NO: 45473 - DNA, 30 bp, Artificial Sequence
  Synthetic oligonucleotide
agtgggtctacacagtcaggaagagatcca

SEQ ID NO: 45474 - DNA, 30 bp, Artificial Sequence
  Synthetic oligonucleotide
tcgaatgaatgggctcgccatctcgatcca

SEQ ID NO: 45475 - DNA, 30 bp, Artificial Sequence
  Synthetic oligonucleotide
aatcggcggaaagcacctttaccggctcca

SEQ ID NO: 45476 - DNA, 30 bp, Artificial Sequence
  Synthetic oligonucleotide
gtgtccgatatggggagtagctaaggtcca

SEQ ID NO: 45477 - DNA, 30 bp, Artificial Sequence
  Synthetic oligonucleotide
gaggaaactgtcgaacctcaaattggtcca

SEQ ID NO: 45478 - DNA, 30 bp, Artificial Sequence
  Synthetic oligonucleotide
taagaaaagacaaaaggcatgcagcttcca

SEQ ID NO: 45479 - DNA, 30 bp, Artificial Sequence
  Synthetic oligonucleotide
acggagtacatccagacaacactgcttcca

SEQ ID NO: 45480 - DNA, 30 bp, Artificial Sequence
  Synthetic oligonucleotide
gcggatgaagtaactggtaaagcggttcca

SEQ ID NO: 45481 - DNA, 30 bp, Artificial Sequence
  Synthetic oligonucleotide
atactatgagcatgtcgagtaggcaaagca

SEQ ID NO: 45482 - DNA, 30 bp, Artificial Sequence
  Synthetic oligonucleotide
cggtgaggcatgattgtatattataaagca

SEQ ID NO: 45483 - DNA, 30 bp, Artificial Sequence
  Synthetic oligonucleotide
agaggggggataggtagaatcggtaaagca

SEQ ID NO: 45484 - DNA, 31 bp, Artificial Sequence
  Synthetic oligonucleotide
tctgcactgcgctgacaacggactacaagca

SEQ ID NO: 45485 - DNA, 30 bp, Artificial Sequence
  Synthetic oligonucleotide
ttggcgacctggcgacaatacgactaagca

SEQ ID NO: 45486 - DNA, 30 bp, Artificial Sequence
  Synthetic oligonucleotide
cgcataataagattctcctgatactaagca

SEQ ID NO: 45487 - DNA, 30 bp, Artificial Sequence
  Synthetic oligonucleotide
gaatagaagcgtcgtacggcatagtaagca

SEQ ID NO: 45488 - DNA, 30 bp, Artificial Sequence
  Synthetic oligonucleotide
tatggcgggaagacaatcaattcgtaagca

SEQ ID NO: 45489 - DNA, 30 bp, Artificial Sequence
  Synthetic oligonucleotide
agggtcataaacggcgagtgctgtgcagca

SEQ ID NO: 45490 - DNA, 30 bp, Artificial Sequence
  Synthetic oligonucleotide
gggggccaaccagtcttccaggcatcagca

SEQ ID NO: 45491 - DNA, 30 bp, Artificial Sequence
  Synthetic oligonucleotide
cagggaaagttgccagcgggagcaagagca

SEQ ID NO: 45492 - DNA, 30 bp, Artificial Sequence
  Synthetic oligonucleotide
atacttgtgaactttgcggtacagagagca

SEQ ID NO: 45493 - DNA, 30 bp, Artificial Sequence
  Synthetic oligonucleotide
acgttaggaccggattgagagattagagca

SEQ ID NO: 45494 - DNA, 30 bp, Artificial Sequence
  Synthetic oligonucleotide
ttactagacaaggaggtgtgcaggcgagca

SEQ ID NO: 45495 - DNA, 30 bp, Artificial Sequence
  Synthetic oligonucleotide
taatgaacgactcttgccacaatcatagca

SEQ ID NO: 45496 - DNA, 30 bp, Artificial Sequence
  Synthetic oligonucleotide
tccaaaagatgtattagcggtgagatagca

SEQ ID NO: 45497 - DNA, 30 bp, Artificial Sequence
  Synthetic oligonucleotide
agttaaagccctatgagtgtgcatatagca

SEQ ID NO: 45498 - DNA, 30 bp, Artificial Sequence
  Synthetic oligonucleotide
cttgcgagataaaccgccgaatccgtagca

SEQ ID NO: 45499 - DNA, 30 bp, Artificial Sequence
  Synthetic oligonucleotide
tcatacatggaccaggctttgtgcgtagca

SEQ ID NO: 45500 - DNA, 30 bp, Artificial Sequence
  Synthetic oligonucleotide
ctaagggcgaaagtgtggcccgaaaacgca

SEQ ID NO: 45501 - DNA, 30 bp, Artificial Sequence
  Synthetic oligonucleotide
tcagaggctaagtgagcgatagtatacgca

SEQ ID NO: 45502 - DNA, 30 bp, Artificial Sequence
  Synthetic oligonucleotide
ccacatcgactttcaacaatcttatccgca

SEQ ID NO: 45503 - DNA, 30 bp, Artificial Sequence
  Synthetic oligonucleotide
aaaccgggggatagatagctcagcggcgca

SEQ ID NO: 45504 - DNA, 30 bp, Artificial Sequence
  Synthetic oligonucleotide
ctagaagaagtccggattaagaagtgcgca

SEQ ID NO: 45505 - DNA, 30 bp, Artificial Sequence
  Synthetic oligonucleotide
aggtttatcgggacattggactatctcgca

SEQ ID NO: 45506 - DNA, 30 bp, Artificial Sequence
  Synthetic oligonucleotide
tagagcccacaattagcaaaaggtctcgca

SEQ ID NO: 45507 - DNA, 30 bp, Artificial Sequence
  Synthetic oligonucleotide
aggagaagttcaatcggtaatctcaaggca

SEQ ID NO: 45508 - DNA, 30 bp, Artificial Sequence
  Synthetic oligonucleotide
catgtaagtctgatctgcccttggaaggca

SEQ ID NO: 45509 - DNA, 30 bp, Artificial Sequence
  Synthetic oligonucleotide
cgcatcagataagcgcagtggcataaggca

SEQ ID NO: 45510 - DNA, 30 bp, Artificial Sequence
  Synthetic oligonucleotide
cattggaactcaaataagggtgttaaggca

SEQ ID NO: 45511 - DNA, 30 bp, Artificial Sequence
  Synthetic oligonucleotide
atcggaactcggctctgaagtgaacaggca

SEQ ID NO: 45512 - DNA, 30 bp, Artificial Sequence
  Synthetic oligonucleotide
ggaagcctttcggaaaacaatagccaggca

SEQ ID NO: 45513 - DNA, 30 bp, Artificial Sequence
  Synthetic oligonucleotide
tcccgataagtcaagcaataagcgtaggca

SEQ ID NO: 45514 - DNA, 30 bp, Artificial Sequence
  Synthetic oligonucleotide
cgtgaatctgcgtgattgatccgttaggca

SEQ ID NO: 45515 - DNA, 31 bp, Artificial Sequence
  Synthetic oligonucleotide
taaaggtaacctacgagttctggaagcggca

SEQ ID NO: 45516 - DNA, 30 bp, Artificial Sequence
  Synthetic oligonucleotide
caggtccgggtataaacgggcagagcggca

SEQ ID NO: 45517 - DNA, 29 bp, Artificial Sequence
  Synthetic oligonucleotide
cacagaccaggggaaaagacagaagggca

SEQ ID NO: 45518 - DNA, 30 bp, Artificial Sequence
  Synthetic oligonucleotide
caccacgtgaaattgaagtcctggcgggca

SEQ ID NO: 45519 - DNA, 30 bp, Artificial Sequence
  Synthetic oligonucleotide
agcgaaggaggcctccagattcagggggca

SEQ ID NO: 45520 - DNA, 30 bp, Artificial Sequence
  Synthetic oligonucleotide
tacgatgtcgaacatgatcgagagggggca

SEQ ID NO: 45521 - DNA, 30 bp, Artificial Sequence
  Synthetic oligonucleotide
gcacacctctaaataagagcaagactggca

SEQ ID NO: 45522 - DNA, 30 bp, Artificial Sequence
  Synthetic oligonucleotide
agaccaagtaaatcaagaatccgaaatgca

SEQ ID NO: 45523 - DNA, 30 bp, Artificial Sequence
  Synthetic oligonucleotide
cataaaatgctcccggtaagtagacatgca

SEQ ID NO: 45524 - DNA, 30 bp, Artificial Sequence
  Synthetic oligonucleotide
ctgggaacgctgagaaggcgtagagatgca

SEQ ID NO: 45525 - DNA, 30 bp, Artificial Sequence
  Synthetic oligonucleotide
ggcagaagtcccccggtcagagacgatgca

SEQ ID NO: 45526 - DNA, 30 bp, Artificial Sequence
  Synthetic oligonucleotide
gggaacggagaggtactgacatttactgca

SEQ ID NO: 45527 - DNA, 30 bp, Artificial Sequence
  Synthetic oligonucleotide
agagacctcatcatggcacactgatctgca

SEQ ID NO: 45528 - DNA, 30 bp, Artificial Sequence
  Synthetic oligonucleotide
gaggaaccatgctagtccaaagccggtgca

SEQ ID NO: 45529 - DNA, 30 bp, Artificial Sequence
  Synthetic oligonucleotide
gtggtcagctacgggttgacaagatgtgca

SEQ ID NO: 45530 - DNA, 30 bp, Artificial Sequence
  Synthetic oligonucleotide
gagaagggagaggtcgagtaccgaattgca

SEQ ID NO: 45531 - DNA, 30 bp, Artificial Sequence
  Synthetic oligonucleotide
ggtcgcgatcattcactaggacacattgca

SEQ ID NO: 45532 - DNA, 30 bp, Artificial Sequence
  Synthetic oligonucleotide
cgtatgcgagacggcaccgtatagtttgca

SEQ ID NO: 45533 - DNA, 31 bp, Artificial Sequence
  Synthetic oligonucleotide
ctagttgggcgtgcgagactaagggcaatca

SEQ ID NO: 45534 - DNA, 30 bp, Artificial Sequence
  Synthetic oligonucleotide
gagggtatgcctagggaagaacgagaatca

SEQ ID NO: 45535 - DNA, 30 bp, Artificial Sequence
  Synthetic oligonucleotide
gggagaactcacatctttaacgccgaatca

SEQ ID NO: 45536 - DNA, 30 bp, Artificial Sequence
  Synthetic oligonucleotide
cgaacaatttactcgatctggggcgaatca

SEQ ID NO: 45537 - DNA, 30 bp, Artificial Sequence
  Synthetic oligonucleotide
aacaggaacgtaacgatcggggaggaatca

SEQ ID NO: 45538 - DNA, 30 bp, Artificial Sequence
  Synthetic oligonucleotide
tcgccattcaaccgtaacatccactaatca

SEQ ID NO: 45539 - DNA, 30 bp, Artificial Sequence
  Synthetic oligonucleotide
ggcgcgttccagtcacaaaacctgtaatca

SEQ ID NO: 45540 - DNA, 30 bp, Artificial Sequence
  Synthetic oligonucleotide
gtccaacacgaatattgtgagggcgcatca

SEQ ID NO: 45541 - DNA, 30 bp, Artificial Sequence
  Synthetic oligonucleotide
actcaccgaccatcacaaccgacggcatca

SEQ ID NO: 45542 - DNA, 30 bp, Artificial Sequence
  Synthetic oligonucleotide
tggcggccgataacaacggctagtgcatca

SEQ ID NO: 45543 - DNA, 30 bp, Artificial Sequence
  Synthetic oligonucleotide
gtaactgctgggcaccaggaagggagatca

SEQ ID NO: 45544 - DNA, 30 bp, Artificial Sequence
  Synthetic oligonucleotide
atcacgcccaagcgtgaatgccgacgatca

SEQ ID NO: 45545 - DNA, 30 bp, Artificial Sequence
  Synthetic oligonucleotide
gggaatgtgcttccgggtaagcgaggatca

SEQ ID NO: 45546 - DNA, 30 bp, Artificial Sequence
  Synthetic oligonucleotide
atgcactcataggaactgagcgatggatca

SEQ ID NO: 45547 - DNA, 31 bp, Artificial Sequence
  Synthetic oligonucleotide
tgcgggatacgggactgtttgttaatgatca

SEQ ID NO: 45548 - DNA, 30 bp, Artificial Sequence
  Synthetic oligonucleotide
cgcaatgtggtgcaggatacccgctgatca

SEQ ID NO: 45549 - DNA, 30 bp, Artificial Sequence
  Synthetic oligonucleotide
aggcctggggagaacggtggcagcatatca

SEQ ID NO: 45550 - DNA, 30 bp, Artificial Sequence
  Synthetic oligonucleotide
ggggccgagtaaaaattgcggtaagtatca

SEQ ID NO: 45551 - DNA, 30 bp, Artificial Sequence
  Synthetic oligonucleotide
ggtgagactgtactgatcgtataggtatca

SEQ ID NO: 45552 - DNA, 30 bp, Artificial Sequence
  Synthetic oligonucleotide
agaagagttagcacttatcccggggtatca

SEQ ID NO: 45553 - DNA, 30 bp, Artificial Sequence
  Synthetic oligonucleotide
cggtagtcggtgcaaagctccagtttatca

SEQ ID NO: 45554 - DNA, 30 bp, Artificial Sequence
  Synthetic oligonucleotide
aacgggctacacaagcgtcgattcaactca

SEQ ID NO: 45555 - DNA, 30 bp, Artificial Sequence
  Synthetic oligonucleotide
actaggaaccgggcaccgatctgaccctca

SEQ ID NO: 45556 - DNA, 30 bp, Artificial Sequence
  Synthetic oligonucleotide
ggaaaatagggtggaaacactttggcctca

SEQ ID NO: 45557 - DNA, 30 bp, Artificial Sequence
  Synthetic oligonucleotide
ggcggaaatgccaataaagagggtgcctca

SEQ ID NO: 45558 - DNA, 30 bp, Artificial Sequence
  Synthetic oligonucleotide
agcactagaccgtaagtttagccaagctca

SEQ ID NO: 45559 - DNA, 30 bp, Artificial Sequence
  Synthetic oligonucleotide
gtatcggtgcacatgggagagaacagctca

SEQ ID NO: 45560 - DNA, 30 bp, Artificial Sequence
  Synthetic oligonucleotide
acccgcgtacaaatgatggagggcggctca

SEQ ID NO: 45561 - DNA, 30 bp, Artificial Sequence
  Synthetic oligonucleotide
ccaaaaaaacattcaaaatttgtatgctca

SEQ ID NO: 45562 - DNA, 30 bp, Artificial Sequence
  Synthetic oligonucleotide
cgaaaccgtctccattctccgtacatctca

SEQ ID NO: 45563 - DNA, 30 bp, Artificial Sequence
  Synthetic oligonucleotide
cgtggggacgggaacgaggttcgcaagtca

SEQ ID NO: 45564 - DNA, 30 bp, Artificial Sequence
  Synthetic oligonucleotide
accgggggcctgcaccaaacttgtcagtca

SEQ ID NO: 45565 - DNA, 30 bp, Artificial Sequence
  Synthetic oligonucleotide
cattaacaggtgcgcaatgcgatggagtca

SEQ ID NO: 45566 - DNA, 30 bp, Artificial Sequence
  Synthetic oligonucleotide
ggatatggaagatgcttacgcgtgacgtca

SEQ ID NO: 45567 - DNA, 30 bp, Artificial Sequence
  Synthetic oligonucleotide
tcgattggcacagaggtttctgcggcgtca

SEQ ID NO: 45568 - DNA, 30 bp, Artificial Sequence
  Synthetic oligonucleotide
aacaggcgttaagctcaactaggtgcgtca

SEQ ID NO: 45569 - DNA, 30 bp, Artificial Sequence
  Synthetic oligonucleotide
caggttgcagttggagtgatcggtgcgtca

SEQ ID NO: 45570 - DNA, 30 bp, Artificial Sequence
  Synthetic oligonucleotide
ggtgcaccgtgcgcgagtctgagttcgtca

SEQ ID NO: 45571 - DNA, 30 bp, Artificial Sequence
  Synthetic oligonucleotide
tcacggaacagatgtatacgcggttcgtca

SEQ ID NO: 45572 - DNA, 30 bp, Artificial Sequence
  Synthetic oligonucleotide
acttgagatggctggtgggaagagaggtca

SEQ ID NO: 45573 - DNA, 30 bp, Artificial Sequence
  Synthetic oligonucleotide
cctggaacaacggtagaagcaaatcggtca

SEQ ID NO: 45574 - DNA, 30 bp, Artificial Sequence
  Synthetic oligonucleotide
gaggcgtagtgaatgaagcagtatgggtca

SEQ ID NO: 45575 - DNA, 30 bp, Artificial Sequence
  Synthetic oligonucleotide
ctggcgatatttcaaagaccaacatggtca

SEQ ID NO: 45576 - DNA, 30 bp, Artificial Sequence
  Synthetic oligonucleotide
agaacggtatgttccgggagataaatgtca

SEQ ID NO: 45577 - DNA, 30 bp, Artificial Sequence
  Synthetic oligonucleotide
atgattcgatgcgataaacagcaccattca

SEQ ID NO: 45578 - DNA, 30 bp, Artificial Sequence
  Synthetic oligonucleotide
gacacccgagtgacaagtaccaacgattca

SEQ ID NO: 45579 - DNA, 30 bp, Artificial Sequence
  Synthetic oligonucleotide
tcgcaaaaggacaagatatgtgcaccttca

SEQ ID NO: 45580 - DNA, 30 bp, Artificial Sequence
  Synthetic oligonucleotide
cgacatcgcgcgtacgaatggactgcttca

SEQ ID NO: 45581 - DNA, 30 bp, Artificial Sequence
  Synthetic oligonucleotide
gcgtagccgacgtgtatgccgagatcttca

SEQ ID NO: 45582 - DNA, 30 bp, Artificial Sequence
  Synthetic oligonucleotide
ctggtctagtaagagagatcggagtcttca

SEQ ID NO: 45583 - DNA, 30 bp, Artificial Sequence
  Synthetic oligonucleotide
gcaacagtgtcacgtgacaagtcgggttca

SEQ ID NO: 45584 - DNA, 30 bp, Artificial Sequence
  Synthetic oligonucleotide
acggaaataaggagttactaaatttgttca

SEQ ID NO: 45585 - DNA, 30 bp, Artificial Sequence
  Synthetic oligonucleotide
cggatgtctcagggtaaaatgcgaatttca

SEQ ID NO: 45586 - DNA, 30 bp, Artificial Sequence
  Synthetic oligonucleotide
gcgcgcaaagggtgggagcgaatgttttca

SEQ ID NO: 45587 - DNA, 30 bp, Artificial Sequence
  Synthetic oligonucleotide
caagttggagaatagcctgcgaagaaaaga

SEQ ID NO: 45588 - DNA, 30 bp, Artificial Sequence
  Synthetic oligonucleotide
tgatgcgaagcgagtgacagggtacaaaga

SEQ ID NO: 45589 - DNA, 30 bp, Artificial Sequence
  Synthetic oligonucleotide
atgctgatggtgtcaaacgacctcgaaaga

SEQ ID NO: 45590 - DNA, 30 bp, Artificial Sequence
  Synthetic oligonucleotide
agaatgccgatagcacaagcaaaggaaaga

SEQ ID NO: 45591 - DNA, 30 bp, Artificial Sequence
  Synthetic oligonucleotide
tcagcacatttaaagtagcgcggggaaaga

SEQ ID NO: 45592 - DNA, 30 bp, Artificial Sequence
  Synthetic oligonucleotide
tgagaaggaaacactcttcgagctgcaaga

SEQ ID NO: 45593 - DNA, 30 bp, Artificial Sequence
  Synthetic oligonucleotide
ggtcaaacctagcggaaaccacttgcaaga

SEQ ID NO: 45594 - DNA, 30 bp, Artificial Sequence
  Synthetic oligonucleotide
caaacgctagttgtgatactcgtgtcaaga

SEQ ID NO: 45595 - DNA, 30 bp, Artificial Sequence
  Synthetic oligonucleotide
cggaactgtgtcaagataagtgatagaaga

SEQ ID NO: 45596 - DNA, 30 bp, Artificial Sequence
  Synthetic oligonucleotide
tggggttggggtgaaacaggcttccgaaga

SEQ ID NO: 45597 - DNA, 30 bp, Artificial Sequence
  Synthetic oligonucleotide
gtaaatcgggtgcacaaaaccggtggaaga

SEQ ID NO: 45598 - DNA, 30 bp, Artificial Sequence
  Synthetic oligonucleotide
ctggaagtgaagttacatctttcgtgaaga

SEQ ID NO: 45599 - DNA, 30 bp, Artificial Sequence
  Synthetic oligonucleotide
ataggaccttacagggtaaagcgaataaga

SEQ ID NO: 45600 - DNA, 30 bp, Artificial Sequence
  Synthetic oligonucleotide
aagtaggggttagaatactgactaataaga

SEQ ID NO: 45601 - DNA, 30 bp, Artificial Sequence
  Synthetic oligonucleotide
cacaggaccaggacaataactcagataaga

SEQ ID NO: 45602 - DNA, 30 bp, Artificial Sequence
  Synthetic oligonucleotide
acgacactagagcgatgaggcatgataaga

SEQ ID NO: 45603 - DNA, 30 bp, Artificial Sequence
  Synthetic oligonucleotide
cccaacggtaagcaaaagcatgcactaaga

SEQ ID NO: 45604 - DNA, 30 bp, Artificial Sequence
  Synthetic oligonucleotide
cttagatggaatgtggctctaaggctaaga

SEQ ID NO: 45605 - DNA, 30 bp, Artificial Sequence
  Synthetic oligonucleotide
ttagatccgatactgaaggacccggtaaga

SEQ ID NO: 45606 - DNA, 30 bp, Artificial Sequence
  Synthetic oligonucleotide
cagcagatgtgatgcaattagggtgtaaga

SEQ ID NO: 45607 - DNA, 30 bp, Artificial Sequence
  Synthetic oligonucleotide
acgtggtgtcgggtatagtggtgattaaga

SEQ ID NO: 45608 - DNA, 30 bp, Artificial Sequence
  Synthetic oligonucleotide
gacgcctagagaagatgttgcgagttaaga

SEQ ID NO: 45609 - DNA, 30 bp, Artificial Sequence
  Synthetic oligonucleotide
gagagagcgcacagggtggtatgtaacaga

SEQ ID NO: 45610 - DNA, 30 bp, Artificial Sequence
  Synthetic oligonucleotide
gttaaagacaaaaggacctagcggtacaga

SEQ ID NO: 45611 - DNA, 30 bp, Artificial Sequence
  Synthetic oligonucleotide
gtccgatttagacgtccagagaaaaccaga

SEQ ID NO: 45612 - DNA, 30 bp, Artificial Sequence
  Synthetic oligonucleotide
tccgcgccacttaatgctgctgagcccaga

SEQ ID NO: 45613 - DNA, 30 bp, Artificial Sequence
  Synthetic oligonucleotide
acatgcccaatacaaatgtgaaatgccaga

SEQ ID NO: 45614 - DNA, 30 bp, Artificial Sequence
  Synthetic oligonucleotide
ccgccattttcgaccacaaaattgtccaga

SEQ ID NO: 45615 - DNA, 30 bp, Artificial Sequence
  Synthetic oligonucleotide
ggatgggtatacagactgttaccttccaga

SEQ ID NO: 45616 - DNA, 30 bp, Artificial Sequence
  Synthetic oligonucleotide
tggaaaaagaggcaccggtcatcttccaga

SEQ ID NO: 45617 - DNA, 30 bp, Artificial Sequence
  Synthetic oligonucleotide
atggtacaaaaatcctaatatattagcaga

SEQ ID NO: 45618 - DNA, 30 bp, Artificial Sequence
  Synthetic oligonucleotide
agaacgggccagattactatttctcgcaga

SEQ ID NO: 45619 - DNA, 30 bp, Artificial Sequence
  Synthetic oligonucleotide
catcacgacatgcagaactttataggcaga

SEQ ID NO: 45620 - DNA, 30 bp, Artificial Sequence
  Synthetic oligonucleotide
ggctaccaataaataggtggagccggcaga

SEQ ID NO: 45621 - DNA, 30 bp, Artificial Sequence
  Synthetic oligonucleotide
ccgtgggtcaacaggtgagcaaagggcaga

SEQ ID NO: 45622 - DNA, 31 bp, Artificial Sequence
  Synthetic oligonucleotide
gcgtgcgattctcctggttgaaggtggcaga

SEQ ID NO: 45623 - DNA, 30 bp, Artificial Sequence
  Synthetic oligonucleotide
gcaaatctcgaccagcaaagaccatgcaga

SEQ ID NO: 45624 - DNA, 30 bp, Artificial Sequence
  Synthetic oligonucleotide
caaaaggctggaacgtatgtaacaatcaga

SEQ ID NO: 45625 - DNA, 30 bp, Artificial Sequence
  Synthetic oligonucleotide
atagacaacgcgtgcattgcaaacatcaga

SEQ ID NO: 45626 - DNA, 30 bp, Artificial Sequence
  Synthetic oligonucleotide
ctagacgcggttgttactgggcagatcaga

SEQ ID NO: 45627 - DNA, 30 bp, Artificial Sequence
  Synthetic oligonucleotide
gaggataaactacacacgatgttgctcaga

SEQ ID NO: 45628 - DNA, 30 bp, Artificial Sequence
  Synthetic oligonucleotide
aaagagtggtgcttcggaacggaggtcaga

SEQ ID NO: 45629 - DNA, 30 bp, Artificial Sequence
  Synthetic oligonucleotide
accgtagacttacgtccaggagttgtcaga

SEQ ID NO: 45630 - DNA, 30 bp, Artificial Sequence
  Synthetic oligonucleotide
tctccgaatcagcaaaccccgaacttcaga

SEQ ID NO: 45631 - DNA, 30 bp, Artificial Sequence
  Synthetic oligonucleotide
ttccgaggtataatacaacgtaggttcaga

SEQ ID NO: 45632 - DNA, 30 bp, Artificial Sequence
  Synthetic oligonucleotide
gccgaagataatgtgacagcaatgttcaga

SEQ ID NO: 45633 - DNA, 30 bp, Artificial Sequence
  Synthetic oligonucleotide
taggactggacaccaccattcagtaagaga

SEQ ID NO: 45634 - DNA, 30 bp, Artificial Sequence
  Synthetic oligonucleotide
gtaaaacaacgactgcccggatccgagaga

SEQ ID NO: 45635 - DNA, 30 bp, Artificial Sequence
  Synthetic oligonucleotide
tacgtgcaagcggtcatgaacccttagaga

SEQ ID NO: 45636 - DNA, 30 bp, Artificial Sequence
  Synthetic oligonucleotide
cgagctcgtttttaagacatctcaacgaga

SEQ ID NO: 45637 - DNA, 30 bp, Artificial Sequence
  Synthetic oligonucleotide
agcatgaacaggaagtgagtatcgacgaga

SEQ ID NO: 45638 - DNA, 30 bp, Artificial Sequence
  Synthetic oligonucleotide
taggagagttggacggtggtaagcgggaga

SEQ ID NO: 45639 - DNA, 30 bp, Artificial Sequence
  Synthetic oligonucleotide
atgtgcgtcagagaacggttagtgtggaga

SEQ ID NO: 45640 - DNA, 30 bp, Artificial Sequence
  Synthetic oligonucleotide
acgactgatgaacaggaataggacgtgaga

SEQ ID NO: 45641 - DNA, 30 bp, Artificial Sequence
  Synthetic oligonucleotide
ggggagtgtacgtccagtataggtaataga

SEQ ID NO: 45642 - DNA, 30 bp, Artificial Sequence
  Synthetic oligonucleotide
ccgtgaggaccaggttgtcatgtacataga

SEQ ID NO: 45643 - DNA, 30 bp, Artificial Sequence
  Synthetic oligonucleotide
cgaccggccggaccttagtctcgagataga

SEQ ID NO: 45644 - DNA, 30 bp, Artificial Sequence
  Synthetic oligonucleotide
cgctagtatcgagtaaagtagagtgataga

SEQ ID NO: 45645 - DNA, 30 bp, Artificial Sequence
  Synthetic oligonucleotide
tgaaacgtccgttcttccaaaagcactaga

SEQ ID NO: 45646 - DNA, 30 bp, Artificial Sequence
  Synthetic oligonucleotide
agcacaaaatagcgcgagaaacattctaga

SEQ ID NO: 45647 - DNA, 30 bp, Artificial Sequence
  Synthetic oligonucleotide
gaatggatcggcaggtaaacctgtagtaga

SEQ ID NO: 45648 - DNA, 30 bp, Artificial Sequence
  Synthetic oligonucleotide
gccagcgcaggtcagaaccccaaacgtaga

SEQ ID NO: 45649 - DNA, 30 bp, Artificial Sequence
  Synthetic oligonucleotide
gcaggtacggaggcatggggtccacgtaga

SEQ ID NO: 45650 - DNA, 30 bp, Artificial Sequence
  Synthetic oligonucleotide
ggcaacttgtgaaatgtggtagtccttaga

SEQ ID NO: 45651 - DNA, 31 bp, Artificial Sequence
  Synthetic oligonucleotide
aaggcgatatcggttacagggcaatgttaga

SEQ ID NO: 45652 - DNA, 30 bp, Artificial Sequence
  Synthetic oligonucleotide
cgaaacgtttatctctcctaaacaaaacga

SEQ ID NO: 45653 - DNA, 30 bp, Artificial Sequence
  Synthetic oligonucleotide
ttgcggcgaaaaaattgtaaatagcaacga

SEQ ID NO: 45654 - DNA, 30 bp, Artificial Sequence
  Synthetic oligonucleotide
cactaagtagtcgtcataaaactcgaacga

SEQ ID NO: 45655 - DNA, 30 bp, Artificial Sequence
  Synthetic oligonucleotide
atggcagccgaagacacggcgagtgaacga

SEQ ID NO: 45656 - DNA, 30 bp, Artificial Sequence
  Synthetic oligonucleotide
gagttcgagtggagggacagagcataacga

SEQ ID NO: 45657 - DNA, 30 bp, Artificial Sequence
  Synthetic oligonucleotide
caggcggtggaccgaccgaaagacccacga

SEQ ID NO: 45658 - DNA, 30 bp, Artificial Sequence
  Synthetic oligonucleotide
cagacagtatactcgcgcaatggatcacga

SEQ ID NO: 45659 - DNA, 30 bp, Artificial Sequence
  Synthetic oligonucleotide
ggcactatacatactcatcgttggcgacga

SEQ ID NO: 45660 - DNA, 30 bp, Artificial Sequence
  Synthetic oligonucleotide
cactattcgagacgagactatgacggacga

SEQ ID NO: 45661 - DNA, 29 bp, Artificial Sequence
  Synthetic oligonucleotide
ataagcaagaaacccagggctcaatacga

SEQ ID NO: 45662 - DNA, 30 bp, Artificial Sequence
  Synthetic oligonucleotide
ggaatacggagtacgaccagcgccgtacga

SEQ ID NO: 45663 - DNA, 30 bp, Artificial Sequence
  Synthetic oligonucleotide
tatggtgataatagagataatgaggtacga

SEQ ID NO: 45664 - DNA, 30 bp, Artificial Sequence
  Synthetic oligonucleotide
ccgagttggggtatcaaggtggctgtacga

SEQ ID NO: 45665 - DNA, 30 bp, Artificial Sequence
  Synthetic oligonucleotide
acaccagaccgtaaccaacgctgcttacga

SEQ ID NO: 45666 - DNA, 30 bp, Artificial Sequence
  Synthetic oligonucleotide
cactcatcaggagagccatataccgaccga

SEQ ID NO: 45667 - DNA, 30 bp, Artificial Sequence
  Synthetic oligonucleotide
tacaccagtagagacacatccctggaccga

SEQ ID NO: 45668 - DNA, 30 bp, Artificial Sequence
  Synthetic oligonucleotide
agaaggacatggaaggttatgcacacccga

SEQ ID NO: 45669 - DNA, 30 bp, Artificial Sequence
  Synthetic oligonucleotide
atgggcaaggtagatccaactggcccccga

SEQ ID NO: 45670 - DNA, 30 bp, Artificial Sequence
  Synthetic oligonucleotide
aggtatactccccacagggtgcatgcccga

SEQ ID NO: 45671 - DNA, 30 bp, Artificial Sequence
  Synthetic oligonucleotide
atgtaattgtggcaaacatgtcaaagccga

SEQ ID NO: 45672 - DNA, 30 bp, Artificial Sequence
  Synthetic oligonucleotide
cgcataagcagaacgcctagggacagccga

SEQ ID NO: 45673 - DNA, 30 bp, Artificial Sequence
  Synthetic oligonucleotide
cggtcacgaactcaaatcgggattagccga

SEQ ID NO: 45674 - DNA, 30 bp, Artificial Sequence
  Synthetic oligonucleotide
gctcgttacgacaggggcggaaaaggccga

SEQ ID NO: 45675 - DNA, 30 bp, Artificial Sequence
  Synthetic oligonucleotide
gtgattaacctgacatggagttcgggccga

SEQ ID NO: 45676 - DNA, 30 bp, Artificial Sequence
  Synthetic oligonucleotide
gggtctcggaagacacaaaaccactgccga

SEQ ID NO: 45677 - DNA, 30 bp, Artificial Sequence
  Synthetic oligonucleotide
atactaagttcagttagcacccaaatccga

SEQ ID NO: 45678 - DNA, 30 bp, Artificial Sequence
  Synthetic oligonucleotide
aaggcagcgtgcacagtactaacaatccga

SEQ ID NO: 45679 - DNA, 30 bp, Artificial Sequence
  Synthetic oligonucleotide
ctggcggagtctgtgcgttgtacaatccga

SEQ ID NO: 45680 - DNA, 30 bp, Artificial Sequence
  Synthetic oligonucleotide
ctaatagggactgaagaccaatcgatccga

SEQ ID NO: 45681 - DNA, 30 bp, Artificial Sequence
  Synthetic oligonucleotide
cggtatacgtgttattcactcgccgtccga

SEQ ID NO: 45682 - DNA, 29 bp, Artificial Sequence
  Synthetic oligonucleotide
ccgaagagactgaaccggcatgattccga

SEQ ID NO: 45683 - DNA, 30 bp, Artificial Sequence
  Synthetic oligonucleotide
aggaacgatctggtttcgatggaacagcga

SEQ ID NO: 45684 - DNA, 30 bp, Artificial Sequence
  Synthetic oligonucleotide
gtgggtaaattcacgaaagcggaccagcga

SEQ ID NO: 45685 - DNA, 30 bp, Artificial Sequence
  Synthetic oligonucleotide
gctacgtgaggtgaggactcaagatagcga

SEQ ID NO: 45686 - DNA, 30 bp, Artificial Sequence
  Synthetic oligonucleotide
caaaagtgtacaaagggtagaacgtagcga

SEQ ID NO: 45687 - DNA, 30 bp, Artificial Sequence
  Synthetic oligonucleotide
actgggacttaaccttgcgcacccacgcga

SEQ ID NO: 45688 - DNA, 30 bp, Artificial Sequence
  Synthetic oligonucleotide
cagcaggttccaactattcccatcgcgcga

SEQ ID NO: 45689 - DNA, 30 bp, Artificial Sequence
  Synthetic oligonucleotide
aagagacaaacgtgcggtagccgaaggcga

SEQ ID NO: 45690 - DNA, 30 bp, Artificial Sequence
  Synthetic oligonucleotide
aggcgtgtccacaaatacagtcgtcggcga

SEQ ID NO: 45691 - DNA, 30 bp, Artificial Sequence
  Synthetic oligonucleotide
ggtggtaaggattacttgacccaaatgcga

SEQ ID NO: 45692 - DNA, 30 bp, Artificial Sequence
  Synthetic oligonucleotide
agataagtacaaagagtttatatagtgcga

SEQ ID NO: 45693 - DNA, 30 bp, Artificial Sequence
  Synthetic oligonucleotide
caaaatcgaagaaaaaaaaacgctgatcga

SEQ ID NO: 45694 - DNA, 30 bp, Artificial Sequence
  Synthetic oligonucleotide
cgacaagaaaagctaatggagtttgatcga

SEQ ID NO: 45695 - DNA, 30 bp, Artificial Sequence
  Synthetic oligonucleotide
gacgaggtgatgccgaaccaactgactcga

SEQ ID NO: 45696 - DNA, 30 bp, Artificial Sequence
  Synthetic oligonucleotide
cttgaaacgacccacgaatgcactactcga

SEQ ID NO: 45697 - DNA, 30 bp, Artificial Sequence
  Synthetic oligonucleotide
cgatacggtacggtagtgctctgtggtcga

SEQ ID NO: 45698 - DNA, 30 bp, Artificial Sequence
  Synthetic oligonucleotide
ttggaagccgggtgatgtcatccatgtcga

SEQ ID NO: 45699 - DNA, 30 bp, Artificial Sequence
  Synthetic oligonucleotide
gcaggtgagtttagccaatcggcatgtcga

SEQ ID NO: 45700 - DNA, 30 bp, Artificial Sequence
  Synthetic oligonucleotide
cgtaacctggtaggatataagtttattcga

SEQ ID NO: 45701 - DNA, 30 bp, Artificial Sequence
  Synthetic oligonucleotide
tctaattggcaagataaaacttcgcttcga

SEQ ID NO: 45702 - DNA, 30 bp, Artificial Sequence
  Synthetic oligonucleotide
agcgtctgagtcaaggggtcaaatcttcga

SEQ ID NO: 45703 - DNA, 30 bp, Artificial Sequence
  Synthetic oligonucleotide
agaggcgtgcggcactgcaggcatcttcga

SEQ ID NO: 45704 - DNA, 25 bp, Artificial Sequence
  Synthetic oligonucleotide
acggtgaattggcgtgtgaaaagga

SEQ ID NO: 45705 - DNA, 30 bp, Artificial Sequence
  Synthetic oligonucleotide
cgtcggttgagctagggcccctgcaaagga

SEQ ID NO: 45706 - DNA, 30 bp, Artificial Sequence
  Synthetic oligonucleotide
cttgtaaagagcaaggcagtcatcaaagga

SEQ ID NO: 45707 - DNA, 30 bp, Artificial Sequence
  Synthetic oligonucleotide
gataacatatcccgatgggtagaagaagga

SEQ ID NO: 45708 - DNA, 30 bp, Artificial Sequence
  Synthetic oligonucleotide
cttctgccgataataacaaacggagaagga

SEQ ID NO: 45709 - DNA, 30 bp, Artificial Sequence
  Synthetic oligonucleotide
gacataatagaatctctgtccctcgaagga

SEQ ID NO: 45710 - DNA, 30 bp, Artificial Sequence
  Synthetic oligonucleotide
cggatagggtgaattctaatcagataagga

SEQ ID NO: 45711 - DNA, 30 bp, Artificial Sequence
  Synthetic oligonucleotide
tagtagcgtgaattgaaaatatattaagga

SEQ ID NO: 45712 - DNA, 30 bp, Artificial Sequence
  Synthetic oligonucleotide
gtgatgactatcgaaagccagatttaagga

SEQ ID NO: 45713 - DNA, 30 bp, Artificial Sequence
  Synthetic oligonucleotide
aggtacacatgcgtttgaatgtcaacagga

SEQ ID NO: 45714 - DNA, 30 bp, Artificial Sequence
  Synthetic oligonucleotide
aaacgaatggggtgtcttacctcgacagga

SEQ ID NO: 45715 - DNA, 30 bp, Artificial Sequence
  Synthetic oligonucleotide
gagccgagaaaccagtaagtcgctacagga

SEQ ID NO: 45716 - DNA, 30 bp, Artificial Sequence
  Synthetic oligonucleotide
tcgccggacgagatagacaatagtccagga

SEQ ID NO: 45717 - DNA, 30 bp, Artificial Sequence
  Synthetic oligonucleotide
tgttgagggctagctcaactaaaatcagga

SEQ ID NO: 45718 - DNA, 30 bp, Artificial Sequence
  Synthetic oligonucleotide
atatggaacgggtgaagggctagttcagga

SEQ ID NO: 45719 - DNA, 30 bp, Artificial Sequence
  Synthetic oligonucleotide
gttaaggtccagatttcagtagaaagagga

SEQ ID NO: 45720 - DNA, 30 bp, Artificial Sequence
  Synthetic oligonucleotide
aatggaaaacagtgaactgctgctagagga

SEQ ID NO: 45721 - DNA, 30 bp, Artificial Sequence
  Synthetic oligonucleotide
acgaggaacaggcgtccgtaggttagagga

SEQ ID NO: 45722 - DNA, 30 bp, Artificial Sequence
  Synthetic oligonucleotide
ggtcacgaatgggggaaagcatttagagga

SEQ ID NO: 45723 - DNA, 30 bp, Artificial Sequence
  Synthetic oligonucleotide
gctggacggggggcgtggtatgctcgagga

SEQ ID NO: 45724 - DNA, 30 bp, Artificial Sequence
  Synthetic oligonucleotide
gcgacgagtggtcctgctagtcaaggagga

SEQ ID NO: 45725 - DNA, 30 bp, Artificial Sequence
  Synthetic oligonucleotide
agcagccaggtgagcgtcacttacggagga

SEQ ID NO: 45726 - DNA, 30 bp, Artificial Sequence
  Synthetic oligonucleotide
gatacttatacacgactgggaaaatgagga

SEQ ID NO: 45727 - DNA, 30 bp, Artificial Sequence
  Synthetic oligonucleotide
gcagcggtcgaatctaatccacactgagga

SEQ ID NO: 45728 - DNA, 30 bp, Artificial Sequence
  Synthetic oligonucleotide
gggtaggtcatcacgatagtagtaatagga

SEQ ID NO: 45729 - DNA, 30 bp, Artificial Sequence
  Synthetic oligonucleotide
gtgagacgtggtaatagccgtgcgctagga

SEQ ID NO: 45730 - DNA, 30 bp, Artificial Sequence
  Synthetic oligonucleotide
tggtccgtgcgaagcaaaatgaatctagga

SEQ ID NO: 45731 - DNA, 30 bp, Artificial Sequence
  Synthetic oligonucleotide
ctggcaaagggaccgagaattttagtagga

SEQ ID NO: 45732 - DNA, 30 bp, Artificial Sequence
  Synthetic oligonucleotide
ctagaaggcaggagtaaagttgccgtagga

SEQ ID NO: 45733 - DNA, 30 bp, Artificial Sequence
  Synthetic oligonucleotide
gagaccgcgactgaaagcaggatggtagga

SEQ ID NO: 45734 - DNA, 30 bp, Artificial Sequence
  Synthetic oligonucleotide
taaaggcgtattgcccataggcgtgtagga

SEQ ID NO: 45735 - DNA, 30 bp, Artificial Sequence
  Synthetic oligonucleotide
ctgcactcgtggaaacgcactagattagga

SEQ ID NO: 45736 - DNA, 30 bp, Artificial Sequence
  Synthetic oligonucleotide
ctcagaactttaaggggatacgtgttagga

SEQ ID NO: 45737 - DNA, 30 bp, Artificial Sequence
  Synthetic oligonucleotide
gggaccgacatgaggcgaatgacccacgga

SEQ ID NO: 45738 - DNA, 30 bp, Artificial Sequence
  Synthetic oligonucleotide
agggaaagtggtcgttcacgaatggacgga

SEQ ID NO: 45739 - DNA, 30 bp, Artificial Sequence
  Synthetic oligonucleotide
tcttaaaccatacactgctgactatacgga

SEQ ID NO: 45740 - DNA, 30 bp, Artificial Sequence
  Synthetic oligonucleotide
taaaggggaggaaggtcgcaagaacccgga

SEQ ID NO: 45741 - DNA, 30 bp, Artificial Sequence
  Synthetic oligonucleotide
aactgaagtaatgttggaagtaatcccgga

SEQ ID NO: 45742 - DNA, 30 bp, Artificial Sequence
  Synthetic oligonucleotide
acttcgtaaacgtgccacctacacgccgga

SEQ ID NO: 45743 - DNA, 30 bp, Artificial Sequence
  Synthetic oligonucleotide
ctgactactgcaagaattagcgagtccgga

SEQ ID NO: 45744 - DNA, 30 bp, Artificial Sequence
  Synthetic oligonucleotide
ggggagaaagactaccccatcgagcgcgga

SEQ ID NO: 45745 - DNA, 30 bp, Artificial Sequence
  Synthetic oligonucleotide
ccgaacgtttcggattacaagaaaggcgga

SEQ ID NO: 45746 - DNA, 30 bp, Artificial Sequence
  Synthetic oligonucleotide
ggagaggcctgagtaaatataactggcgga

SEQ ID NO: 45747 - DNA, 30 bp, Artificial Sequence
  Synthetic oligonucleotide
aatagggagatacgatagtaagggtgcgga

SEQ ID NO: 45748 - DNA, 30 bp, Artificial Sequence
  Synthetic oligonucleotide
caggtgagtgagatgtttgtttattgcgga

SEQ ID NO: 45749 - DNA, 30 bp, Artificial Sequence
  Synthetic oligonucleotide
aggggaagggcactgagggctcagctcgga

SEQ ID NO: 45750 - DNA, 30 bp, Artificial Sequence
  Synthetic oligonucleotide
aaaactagtggtactaatacgggagtcgga

SEQ ID NO: 45751 - DNA, 30 bp, Artificial Sequence
  Synthetic oligonucleotide
gcacgaagaacagtatacggaatagtcgga

SEQ ID NO: 45752 - DNA, 30 bp, Artificial Sequence
  Synthetic oligonucleotide
cgaaggaccccatgcggagatggtttcgga

SEQ ID NO: 45753 - DNA, 30 bp, Artificial Sequence
  Synthetic oligonucleotide
caatcgcaaaatgatgaaacgataaaggga

SEQ ID NO: 45754 - DNA, 30 bp, Artificial Sequence
  Synthetic oligonucleotide
acagacagaagcacccgaaggtccaaggga

SEQ ID NO: 45755 - DNA, 30 bp, Artificial Sequence
  Synthetic oligonucleotide
gtgcaattcaaagctacccggtccaaggga

SEQ ID NO: 45756 - DNA, 30 bp, Artificial Sequence
  Synthetic oligonucleotide
aggcgtcctcagatgaatcattaacaggga

SEQ ID NO: 45757 - DNA, 30 bp, Artificial Sequence
  Synthetic oligonucleotide
gcgaatggtcggacaactccacgccaggga

SEQ ID NO: 45758 - DNA, 30 bp, Artificial Sequence
  Synthetic oligonucleotide
gacgccggacaggagtgttattggcaggga

SEQ ID NO: 45759 - DNA, 30 bp, Artificial Sequence
  Synthetic oligonucleotide
tgcgtaatgctaaggctgtggttagaggga

SEQ ID NO: 45760 - DNA, 30 bp, Artificial Sequence
  Synthetic oligonucleotide
agtgaagcgtaatgagtgagtatttaggga

SEQ ID NO: 45761 - DNA, 30 bp, Artificial Sequence
  Synthetic oligonucleotide
aaatgcatgtagattaaagtgcgcgcggga

SEQ ID NO: 45762 - DNA, 30 bp, Artificial Sequence
  Synthetic oligonucleotide
cacgagctaagctaatagctcaatgcggga

SEQ ID NO: 45763 - DNA, 30 bp, Artificial Sequence
  Synthetic oligonucleotide
acaacacgtaacgtatggcctggctcggga

SEQ ID NO: 45764 - DNA, 30 bp, Artificial Sequence
  Synthetic oligonucleotide
caataatggaactcgctcagctcaagggga

SEQ ID NO: 45765 - DNA, 37 bp, Artificial Sequence
  Synthetic oligonucleotide
aagataatacattaatggtatggtcggggatcgggga

SEQ ID NO: 45766 - DNA, 40 bp, Artificial Sequence
  Synthetic oligonucleotide
aagctaatacattcatggtatggtcggggatcggggggga

SEQ ID NO: 45767 - DNA, 30 bp, Artificial Sequence
  Synthetic oligonucleotide
taaaaggttagtaaggtggaccttggggga

SEQ ID NO: 45768 - DNA, 30 bp, Artificial Sequence
  Synthetic oligonucleotide
acagcggaaagtatagtgcgatttggggga

SEQ ID NO: 45769 - DNA, 30 bp, Artificial Sequence
  Synthetic oligonucleotide
taatggggaacaacggtttcacaatgggga

SEQ ID NO: 45770 - DNA, 30 bp, Artificial Sequence
  Synthetic oligonucleotide
ccacaatatgataagtatgttacctgggga

SEQ ID NO: 45771 - DNA, 30 bp, Artificial Sequence
  Synthetic oligonucleotide
gatcgtcggggatcaaccagagtttgggga

SEQ ID NO: 45772 - DNA, 30 bp, Artificial Sequence
  Synthetic oligonucleotide
ccaccgatcaagtgattaccgataatggga

SEQ ID NO: 45773 - DNA, 30 bp, Artificial Sequence
  Synthetic oligonucleotide
cggctgagaaaatatcaatcgtcgctggga

SEQ ID NO: 45774 - DNA, 30 bp, Artificial Sequence
  Synthetic oligonucleotide
ggtcggtgttcaaaactgagagtcgtggga

SEQ ID NO: 45775 - DNA, 30 bp, Artificial Sequence
  Synthetic oligonucleotide
ccacagttgggctagataagtgtggtggga

SEQ ID NO: 45776 - DNA, 30 bp, Artificial Sequence
  Synthetic oligonucleotide
aacggaagtactaccaccatgctcttggga

SEQ ID NO: 45777 - DNA, 30 bp, Artificial Sequence
  Synthetic oligonucleotide
tgcataacgcgaccgaaagggttgaatgga

SEQ ID NO: 45778 - DNA, 30 bp, Artificial Sequence
  Synthetic oligonucleotide
cgtgaaggaccgagtacatgggatcatgga

SEQ ID NO: 45779 - DNA, 30 bp, Artificial Sequence
  Synthetic oligonucleotide
acaaggctcgctcgaacatctgatcatgga

SEQ ID NO: 45780 - DNA, 30 bp, Artificial Sequence
  Synthetic oligonucleotide
ccggagaaattgcagttacgtctagatgga

SEQ ID NO: 45781 - DNA, 30 bp, Artificial Sequence
  Synthetic oligonucleotide
taacgacgactcaactggataagtactgga

SEQ ID NO: 45782 - DNA, 30 bp, Artificial Sequence
  Synthetic oligonucleotide
agacgtgtattgagtagccggccccctgga

SEQ ID NO: 45783 - DNA, 30 bp, Artificial Sequence
  Synthetic oligonucleotide
acagcgacactgccacgcgtaattgctgga

SEQ ID NO: 45784 - DNA, 30 bp, Artificial Sequence
  Synthetic oligonucleotide
gatgactgtgggaacgaaaaaagttctgga

SEQ ID NO: 45785 - DNA, 30 bp, Artificial Sequence
  Synthetic oligonucleotide
gcctaagttgcgtttagagagataagtgga

SEQ ID NO: 45786 - DNA, 30 bp, Artificial Sequence
  Synthetic oligonucleotide
tggattagtggagcgcaagaggcgagtgga

SEQ ID NO: 45787 - DNA, 30 bp, Artificial Sequence
  Synthetic oligonucleotide
cgtcaaaaagtcaaccgaggcgaccgtgga

SEQ ID NO: 45788 - DNA, 30 bp, Artificial Sequence
  Synthetic oligonucleotide
gggggttcagcgaccttagttagacttgga

SEQ ID NO: 45789 - DNA, 30 bp, Artificial Sequence
  Synthetic oligonucleotide
tacgaggacagcttgggaaattgggttgga

SEQ ID NO: 45790 - DNA, 30 bp, Artificial Sequence
  Synthetic oligonucleotide
gactggtgtggagtgcgatggcgcgaatga

SEQ ID NO: 45791 - DNA, 30 bp, Artificial Sequence
  Synthetic oligonucleotide
gacacgggattatgatggggtaaaacatga

SEQ ID NO: 45792 - DNA, 30 bp, Artificial Sequence
  Synthetic oligonucleotide
aaagggagcttgccgaccggctacacatga

SEQ ID NO: 45793 - DNA, 30 bp, Artificial Sequence
  Synthetic oligonucleotide
cggggtcaccccgtatgactagcaagatga

SEQ ID NO: 45794 - DNA, 30 bp, Artificial Sequence
  Synthetic oligonucleotide
ggtatatagcgcgcagccggaaacagatga

SEQ ID NO: 45795 - DNA, 30 bp, Artificial Sequence
  Synthetic oligonucleotide
atataacttacataataaaaacaacgatga

SEQ ID NO: 45796 - DNA, 30 bp, Artificial Sequence
  Synthetic oligonucleotide
ggcgtctcggacgagtagtttaggggatga

SEQ ID NO: 45797 - DNA, 30 bp, Artificial Sequence
  Synthetic oligonucleotide
ccgtatgagggttggggagacatatgatga

SEQ ID NO: 45798 - DNA, 30 bp, Artificial Sequence
  Synthetic oligonucleotide
aagaggaaaacacaattcggggaactatga

SEQ ID NO: 45799 - DNA, 30 bp, Artificial Sequence
  Synthetic oligonucleotide
acacacaatcgtgtggggtggaaagtatga

SEQ ID NO: 45800 - DNA, 30 bp, Artificial Sequence
  Synthetic oligonucleotide
tccaggcgaataaagtaggcacagaactga

SEQ ID NO: 45801 - DNA, 30 bp, Artificial Sequence
  Synthetic oligonucleotide
aggccaggccacgtagtgagtccacactga

SEQ ID NO: 45802 - DNA, 30 bp, Artificial Sequence
  Synthetic oligonucleotide
cgagtctggccccgaggttgcaatgactga

SEQ ID NO: 45803 - DNA, 30 bp, Artificial Sequence
  Synthetic oligonucleotide
caacgataaatggaaagagaccgctactga

SEQ ID NO: 45804 - DNA, 30 bp, Artificial Sequence
  Synthetic oligonucleotide
gtagtagaactgaaatgcaaatggtactga

SEQ ID NO: 45805 - DNA, 30 bp, Artificial Sequence
  Synthetic oligonucleotide
acacatccttacaaataaccagtgacctga

SEQ ID NO: 45806 - DNA, 30 bp, Artificial Sequence
  Synthetic oligonucleotide
cacgccctaggaagtcagcttgcggcctga

SEQ ID NO: 45807 - DNA, 30 bp, Artificial Sequence
  Synthetic oligonucleotide
gtatcattgacaggactaggtaagggctga

SEQ ID NO: 45808 - DNA, 30 bp, Artificial Sequence
  Synthetic oligonucleotide
cggcaagaataggtctgcccgattggctga

SEQ ID NO: 45809 - DNA, 30 bp, Artificial Sequence
  Synthetic oligonucleotide
gaaggcacagggccgaaccgtaggtgctga

SEQ ID NO: 45810 - DNA, 30 bp, Artificial Sequence
  Synthetic oligonucleotide
agtgtcgcatggtcgagtgagtgggtctga

SEQ ID NO: 45811 - DNA, 30 bp, Artificial Sequence
  Synthetic oligonucleotide
cgatgagaaatgaccaggctattcaagtga

SEQ ID NO: 45812 - DNA, 30 bp, Artificial Sequence
  Synthetic oligonucleotide
aaagggtgcggtgtgtagaactgacagtga

SEQ ID NO: 45813 - DNA, 30 bp, Artificial Sequence
  Synthetic oligonucleotide
tacaacaagcgtctcgtatagctgcagtga

SEQ ID NO: 45814 - DNA, 30 bp, Artificial Sequence
  Synthetic oligonucleotide
gcatcgttaaaggctgcaaatttcgagtga

SEQ ID NO: 45815 - DNA, 30 bp, Artificial Sequence
  Synthetic oligonucleotide
acaatatataaggagtagggtccggagtga

SEQ ID NO: 45816 - DNA, 30 bp, Artificial Sequence
  Synthetic oligonucleotide
ggggcatggaaattccccgacgtgtagtga

SEQ ID NO: 45817 - DNA, 30 bp, Artificial Sequence
  Synthetic oligonucleotide
caacactaagcctcgaaacaagaatcgtga

SEQ ID NO: 45818 - DNA, 31 bp, Artificial Sequence
  Synthetic oligonucleotide
tgtcaacaaggatcggagcaaagcgaggtga

SEQ ID NO: 45819 - DNA, 30 bp, Artificial Sequence
  Synthetic oligonucleotide
caacagggcggggtatgcattctacggtga

SEQ ID NO: 45820 - DNA, 30 bp, Artificial Sequence
  Synthetic oligonucleotide
tggtacagtcacagctgggggattcggtga

SEQ ID NO: 45821 - DNA, 30 bp, Artificial Sequence
  Synthetic oligonucleotide
cgaacgccgtgcgtcggacaacatgggtga

SEQ ID NO: 45822 - DNA, 30 bp, Artificial Sequence
  Synthetic oligonucleotide
cgtgggacgtgtgtggtacaaaaacattga

SEQ ID NO: 45823 - DNA, 30 bp, Artificial Sequence
  Synthetic oligonucleotide
cgtgaaaattaaaatattattgtcgattga

SEQ ID NO: 45824 - DNA, 30 bp, Artificial Sequence
  Synthetic oligonucleotide
ccgcaatgccctagacaaaaccaggattga

SEQ ID NO: 45825 - DNA, 30 bp, Artificial Sequence
  Synthetic oligonucleotide
tgacatacaagtatatggccacactattga

SEQ ID NO: 45826 - DNA, 30 bp, Artificial Sequence
  Synthetic oligonucleotide
cggggggtaagattgttagcagtgtattga

SEQ ID NO: 45827 - DNA, 30 bp, Artificial Sequence
  Synthetic oligonucleotide
cggcggtcaataagctgaaataacacttga

SEQ ID NO: 45828 - DNA, 30 bp, Artificial Sequence
  Synthetic oligonucleotide
atcacaggaattaccattaaggcggcttga

SEQ ID NO: 45829 - DNA, 30 bp, Artificial Sequence
  Synthetic oligonucleotide
cactaggagggaatccctgaatgatcttga

SEQ ID NO: 45830 - DNA, 30 bp, Artificial Sequence
  Synthetic oligonucleotide
ctggatagcggtaaataatcacattcttga

SEQ ID NO: 45831 - DNA, 30 bp, Artificial Sequence
  Synthetic oligonucleotide
aaacgtcgcattacacggagtgagagttga

SEQ ID NO: 45832 - DNA, 30 bp, Artificial Sequence
  Synthetic oligonucleotide
ttggaccactcagatatgcaaccgagttga

SEQ ID NO: 45833 - DNA, 30 bp, Artificial Sequence
  Synthetic oligonucleotide
cgacggtatgaggaacgcccaggtagttga

SEQ ID NO: 45834 - DNA, 30 bp, Artificial Sequence
  Synthetic oligonucleotide
ggcaacgaaacgcatcggaagcaacgttga

SEQ ID NO: 45835 - DNA, 30 bp, Artificial Sequence
  Synthetic oligonucleotide
aaggagtcactgaccacctagacccgttga

SEQ ID NO: 45836 - DNA, 30 bp, Artificial Sequence
  Synthetic oligonucleotide
cgccgaacaaaggtaggaaggtaaatttga

SEQ ID NO: 45837 - DNA, 30 bp, Artificial Sequence
  Synthetic oligonucleotide
ggtggatacagtccaaagcacattatttga

SEQ ID NO: 45838 - DNA, 30 bp, Artificial Sequence
  Synthetic oligonucleotide
ggctcagggtaaacaagcgcgaatctttga

SEQ ID NO: 45839 - DNA, 30 bp, Artificial Sequence
  Synthetic oligonucleotide
gataccaaagcgaaggggttaaacgtttga

SEQ ID NO: 45840 - DNA, 30 bp, Artificial Sequence
  Synthetic oligonucleotide
cgagctaagtgttcacatctgaagaaaata

SEQ ID NO: 45841 - DNA, 30 bp, Artificial Sequence
  Synthetic oligonucleotide
caggcaagaagtggggaacggctacaaata

SEQ ID NO: 45842 - DNA, 30 bp, Artificial Sequence
  Synthetic oligonucleotide
ggacggaaaccgtatgcctaagagcaaata

SEQ ID NO: 45843 - DNA, 30 bp, Artificial Sequence
  Synthetic oligonucleotide
catcggatttgcgcgacaatggtagaaata

SEQ ID NO: 45844 - DNA, 30 bp, Artificial Sequence
  Synthetic oligonucleotide
agctgagggcaaatcaggcactttgaaata

SEQ ID NO: 45845 - DNA, 30 bp, Artificial Sequence
  Synthetic oligonucleotide
ccatgttaggacaaatggaccgtctaaata

SEQ ID NO: 45846 - DNA, 30 bp, Artificial Sequence
  Synthetic oligonucleotide
acatcacgtaaactccttcgagccgcaata

SEQ ID NO: 45847 - DNA, 30 bp, Artificial Sequence
  Synthetic oligonucleotide
gcgaattggtaggtggggtcatttgcaata

SEQ ID NO: 45848 - DNA, 30 bp, Artificial Sequence
  Synthetic oligonucleotide
gtaggcaccgaagagataagcgctagaata

SEQ ID NO: 45849 - DNA, 30 bp, Artificial Sequence
  Synthetic oligonucleotide
cgctagcgagtgccacatgattgtagaata

SEQ ID NO: 45850 - DNA, 30 bp, Artificial Sequence
  Synthetic oligonucleotide
tccatggcaatggtggcggttaaaggaata

SEQ ID NO: 45851 - DNA, 30 bp, Artificial Sequence
  Synthetic oligonucleotide
ctcaacggcgagccacccgtattcggaata

SEQ ID NO: 45852 - DNA, 30 bp, Artificial Sequence
  Synthetic oligonucleotide
acggtctctgtgaatgaacaggggggaata

SEQ ID NO: 45853 - DNA, 30 bp, Artificial Sequence
  Synthetic oligonucleotide
acggccatacaactctcggcaaagtgaata

SEQ ID NO: 45854 - DNA, 30 bp, Artificial Sequence
  Synthetic oligonucleotide
ctgaccgacatgcctcaaagctagctaata

SEQ ID NO: 45855 - DNA, 30 bp, Artificial Sequence
  Synthetic oligonucleotide
cacgaggtgagctgcgtagaacctgtaata

SEQ ID NO: 45856 - DNA, 30 bp, Artificial Sequence
  Synthetic oligonucleotide
cgcctccgatggctcgcgaacggttacata

SEQ ID NO: 45857 - DNA, 30 bp, Artificial Sequence
  Synthetic oligonucleotide
agtggaagcaaaggccgtatatcaaccata

SEQ ID NO: 45858 - DNA, 30 bp, Artificial Sequence
  Synthetic oligonucleotide
tgacgaattacatttgaaaacgcgcccata

SEQ ID NO: 45859 - DNA, 30 bp, Artificial Sequence
  Synthetic oligonucleotide
ggacgcacaggggggcctcaaccttccata

SEQ ID NO: 45860 - DNA, 30 bp, Artificial Sequence
  Synthetic oligonucleotide
tcttggccaacaggtcaatcggctagcata

SEQ ID NO: 45861 - DNA, 30 bp, Artificial Sequence
  Synthetic oligonucleotide
agacgaggacgccctcggaaaatttgcata

SEQ ID NO: 45862 - DNA, 30 bp, Artificial Sequence
  Synthetic oligonucleotide
agtcaatttgacttgtgattccccctcata

SEQ ID NO: 45863 - DNA, 30 bp, Artificial Sequence
  Synthetic oligonucleotide
actgagcgtcaagcaggggtcggcctcata

SEQ ID NO: 45864 - DNA, 30 bp, Artificial Sequence
  Synthetic oligonucleotide
ccagaattatagtggcgaacgaccaagata

SEQ ID NO: 45865 - DNA, 31 bp, Artificial Sequence
  Synthetic oligonucleotide
gcgtgccaaggtctcgaagctctcccagata

SEQ ID NO: 45866 - DNA, 30 bp, Artificial Sequence
  Synthetic oligonucleotide
cgagagccgacggcatttgtgccggagata

SEQ ID NO: 45867 - DNA, 30 bp, Artificial Sequence
  Synthetic oligonucleotide
acgtaaaagcgatcgttgctcgactagata

SEQ ID NO: 45868 - DNA, 30 bp, Artificial Sequence
  Synthetic oligonucleotide
atgcagagcctggaaagagaacaaccgata

SEQ ID NO: 45869 - DNA, 30 bp, Artificial Sequence
  Synthetic oligonucleotide
aacgtggcttaagttgaatatcccgcgata

SEQ ID NO: 45870 - DNA, 30 bp, Artificial Sequence
  Synthetic oligonucleotide
ccataattaaagtgctattcatcttcgata

SEQ ID NO: 45871 - DNA, 30 bp, Artificial Sequence
  Synthetic oligonucleotide
gcgatgggcgttagtaggggtggcaggata

SEQ ID NO: 45872 - DNA, 30 bp, Artificial Sequence
  Synthetic oligonucleotide
ccgttgcaggccacaaatgataaccggata

SEQ ID NO: 45873 - DNA, 30 bp, Artificial Sequence
  Synthetic oligonucleotide
cactacgggtaaaaataagagtgccggata

SEQ ID NO: 45874 - DNA, 30 bp, Artificial Sequence
  Synthetic oligonucleotide
ggctgaaggagtcattaaattggatggata

SEQ ID NO: 45875 - DNA, 30 bp, Artificial Sequence
  Synthetic oligonucleotide
cactggcacgacgggcgaactgtggtgata

SEQ ID NO: 45876 - DNA, 31 bp, Artificial Sequence
  Synthetic oligonucleotide
atgagctagcggcggccaaaccgaattgata

SEQ ID NO: 45877 - DNA, 30 bp, Artificial Sequence
  Synthetic oligonucleotide
aggaagatactggcgtggtaagcattgata

SEQ ID NO: 45878 - DNA, 30 bp, Artificial Sequence
  Synthetic oligonucleotide
cgtggtagcttcaaggtgaaaatgttgata

SEQ ID NO: 45879 - DNA, 30 bp, Artificial Sequence
  Synthetic oligonucleotide
ggaaagacggaagataaccctaatttgata

SEQ ID NO: 45880 - DNA, 30 bp, Artificial Sequence
  Synthetic oligonucleotide
tggtggtcagccaaacctatcgagcatata

SEQ ID NO: 45881 - DNA, 30 bp, Artificial Sequence
  Synthetic oligonucleotide
agcggatactcgagcaggggtatgtatata

SEQ ID NO: 45882 - DNA, 30 bp, Artificial Sequence
  Synthetic oligonucleotide
aaacgaagaaggggttgaccttaaactata

SEQ ID NO: 45883 - DNA, 30 bp, Artificial Sequence
  Synthetic oligonucleotide
agcgagaacctgtttaagtaaacaactata

SEQ ID NO: 45884 - DNA, 30 bp, Artificial Sequence
  Synthetic oligonucleotide
ggtcaaagaaattagcgacctctgcctata

SEQ ID NO: 45885 - DNA, 30 bp, Artificial Sequence
  Synthetic oligonucleotide
aacgataggttgactgtatctaagagtata

SEQ ID NO: 45886 - DNA, 30 bp, Artificial Sequence
  Synthetic oligonucleotide
tgagaagtaatagtagataatatccgtata

SEQ ID NO: 45887 - DNA, 30 bp, Artificial Sequence
  Synthetic oligonucleotide
cgaaataggcaccaacacttggagcgtata

SEQ ID NO: 45888 - DNA, 30 bp, Artificial Sequence
  Synthetic oligonucleotide
ggctcaaggggtatatgacagtgatgtata

SEQ ID NO: 45889 - DNA, 30 bp, Artificial Sequence
  Synthetic oligonucleotide
agagcgaagtaaaacggtttatgtattata

SEQ ID NO: 45890 - DNA, 30 bp, Artificial Sequence
  Synthetic oligonucleotide
caattcggaagcggtgcgagttaacttata

SEQ ID NO: 45891 - DNA, 30 bp, Artificial Sequence
  Synthetic oligonucleotide
cccgatctgcgaaggggggatacacaacta

SEQ ID NO: 45892 - DNA, 30 bp, Artificial Sequence
  Synthetic oligonucleotide
tgagcttggctgaatgaaacgtcacaacta

SEQ ID NO: 45893 - DNA, 30 bp, Artificial Sequence
  Synthetic oligonucleotide
ctgaggggactttgcgatatcagtcaacta

SEQ ID NO: 45894 - DNA, 30 bp, Artificial Sequence
  Synthetic oligonucleotide
agggcaaacgtcgtcccgggatgcgaacta

SEQ ID NO: 45895 - DNA, 30 bp, Artificial Sequence
  Synthetic oligonucleotide
agtccgagggatctagaggagccgacacta

SEQ ID NO: 45896 - DNA, 30 bp, Artificial Sequence
  Synthetic oligonucleotide
agtcatagagcggacacgaggaaaccacta

SEQ ID NO: 45897 - DNA, 30 bp, Artificial Sequence
  Synthetic oligonucleotide
gcgagcacatgacaaaggctatttagacta

SEQ ID NO: 45898 - DNA, 30 bp, Artificial Sequence
  Synthetic oligonucleotide
gcatggggtggttgggatccgaatcgacta

SEQ ID NO: 45899 - DNA, 30 bp, Artificial Sequence
  Synthetic oligonucleotide
acgtatgcgcagaggcacgctgtcgtacta

SEQ ID NO: 45900 - DNA, 30 bp, Artificial Sequence
  Synthetic oligonucleotide
actggtaagttggatcaaggcaccagccta

SEQ ID NO: 45901 - DNA, 30 bp, Artificial Sequence
  Synthetic oligonucleotide
tcatgccgtcgtctaccagatactaagcta

SEQ ID NO: 45902 - DNA, 30 bp, Artificial Sequence
  Synthetic oligonucleotide
tggacctactataaacgttgaaagtagcta

SEQ ID NO: 45903 - DNA, 30 bp, Artificial Sequence
  Synthetic oligonucleotide
aacaagggatgaatgcctgcagggtagcta

SEQ ID NO: 45904 - DNA, 30 bp, Artificial Sequence
  Synthetic oligonucleotide
acacgcgagttcggagatgtgcaaccgcta

SEQ ID NO: 45905 - DNA, 30 bp, Artificial Sequence
  Synthetic oligonucleotide
caatgaagaagaggctggttacccccgcta

SEQ ID NO: 45906 - DNA, 30 bp, Artificial Sequence
  Synthetic oligonucleotide
ggtgccgtgcgaatatgttaaactgcgcta

SEQ ID NO: 45907 - DNA, 30 bp, Artificial Sequence
  Synthetic oligonucleotide
acaagaccacaaggtcggtcagatcggcta

SEQ ID NO: 45908 - DNA, 30 bp, Artificial Sequence
  Synthetic oligonucleotide
actcaggcggataactaaaagattgggcta

SEQ ID NO: 45909 - DNA, 30 bp, Artificial Sequence
  Synthetic oligonucleotide
acggtctacactaactgaactaacaatcta

SEQ ID NO: 45910 - DNA, 30 bp, Artificial Sequence
  Synthetic oligonucleotide
gccgcgcaaagtagtggggacgataatcta

SEQ ID NO: 45911 - DNA, 30 bp, Artificial Sequence
  Synthetic oligonucleotide
taacacaagtgacacggacagcgagatcta

SEQ ID NO: 45912 - DNA, 30 bp, Artificial Sequence
  Synthetic oligonucleotide
atgattaaggcgacagccacacagtatcta

SEQ ID NO: 45913 - DNA, 30 bp, Artificial Sequence
  Synthetic oligonucleotide
cactcgaaacgagaggtaaaccagtatcta

SEQ ID NO: 45914 - DNA, 30 bp, Artificial Sequence
  Synthetic oligonucleotide
ccaggaccgaaaggtgggcgaatttctcta

SEQ ID NO: 45915 - DNA, 30 bp, Artificial Sequence
  Synthetic oligonucleotide
aggtagggacagataaatccatgtcgtcta

SEQ ID NO: 45916 - DNA, 30 bp, Artificial Sequence
  Synthetic oligonucleotide
atcgactaaacaacggtaagatagggtcta

SEQ ID NO: 45917 - DNA, 30 bp, Artificial Sequence
  Synthetic oligonucleotide
agactagcggagtggccagtagacattcta

SEQ ID NO: 45918 - DNA, 30 bp, Artificial Sequence
  Synthetic oligonucleotide
gcgggaaatcacagatgatatgccattcta

SEQ ID NO: 45919 - DNA, 30 bp, Artificial Sequence
  Synthetic oligonucleotide
cttcaattaccgagtaaaaaaccaaaagta

SEQ ID NO: 45920 - DNA, 30 bp, Artificial Sequence
  Synthetic oligonucleotide
cctgaataaactgtcagcaattcgaaagta

SEQ ID NO: 45921 - DNA, 30 bp, Artificial Sequence
  Synthetic oligonucleotide
ccgaggaaatgaacaagtcgggtgaaagta

SEQ ID NO: 45922 - DNA, 30 bp, Artificial Sequence
  Synthetic oligonucleotide
gcgatgtattattccagacagcataaagta

SEQ ID NO: 45923 - DNA, 30 bp, Artificial Sequence
  Synthetic oligonucleotide
atgtaacaaccgctgagcaagggacaagta

SEQ ID NO: 45924 - DNA, 30 bp, Artificial Sequence
  Synthetic oligonucleotide
ttacgactcaacctgtaaagcaatgaagta

SEQ ID NO: 45925 - DNA, 30 bp, Artificial Sequence
  Synthetic oligonucleotide
ataagtggatggaggatgaggactgaagta

SEQ ID NO: 45926 - DNA, 30 bp, Artificial Sequence
  Synthetic oligonucleotide
ggcaacgtgaagaaagaagaaatataagta

SEQ ID NO: 45927 - DNA, 30 bp, Artificial Sequence
  Synthetic oligonucleotide
attcgggaaggtggatcgcgcggctaagta

SEQ ID NO: 45928 - DNA, 30 bp, Artificial Sequence
  Synthetic oligonucleotide
gatcgcgtcgaggattgataaaacacagta

SEQ ID NO: 45929 - DNA, 30 bp, Artificial Sequence
  Synthetic oligonucleotide
atacgacggtcagctaatggcggcggagta

SEQ ID NO: 45930 - DNA, 30 bp, Artificial Sequence
  Synthetic oligonucleotide
catgtggttaagctcgaactcttgtgagta

SEQ ID NO: 45931 - DNA, 30 bp, Artificial Sequence
  Synthetic oligonucleotide
agcgcgtggtggcagctctcgggcatagta

SEQ ID NO: 45932 - DNA, 30 bp, Artificial Sequence
  Synthetic oligonucleotide
gacggtgtagatcaaagccattaactagta

SEQ ID NO: 45933 - DNA, 30 bp, Artificial Sequence
  Synthetic oligonucleotide
gatacgtgcaaaagaacgatatcggtagta

SEQ ID NO: 45934 - DNA, 30 bp, Artificial Sequence
  Synthetic oligonucleotide
agtgcggttgcgtttaggtgtggggtagta

SEQ ID NO: 45935 - DNA, 30 bp, Artificial Sequence
  Synthetic oligonucleotide
cacgtgtcgtaagaccatcctcatgtagta

SEQ ID NO: 45936 - DNA, 30 bp, Artificial Sequence
  Synthetic oligonucleotide
gaaccttaacaaagcaaccggagaaacgta

SEQ ID NO: 45937 - DNA, 30 bp, Artificial Sequence
  Synthetic oligonucleotide
gactaaaagttctacaggaagggaaacgta

SEQ ID NO: 45938 - DNA, 30 bp, Artificial Sequence
  Synthetic oligonucleotide
acaggataacgatatggatatcatcacgta

SEQ ID NO: 45939 - DNA, 30 bp, Artificial Sequence
  Synthetic oligonucleotide
acacgaaacagagggatcccacaagacgta

SEQ ID NO: 45940 - DNA, 30 bp, Artificial Sequence
  Synthetic oligonucleotide
atcagccgactacgagagaacatcgacgta

SEQ ID NO: 45941 - DNA, 30 bp, Artificial Sequence
  Synthetic oligonucleotide
gtcgggcgagaccacgatacggcttacgta

SEQ ID NO: 45942 - DNA, 30 bp, Artificial Sequence
  Synthetic oligonucleotide
cgaggctgtctaggattcgaataatccgta

SEQ ID NO: 45943 - DNA, 30 bp, Artificial Sequence
  Synthetic oligonucleotide
aagccacttgaccaagatgggactagcgta

SEQ ID NO: 45944 - DNA, 30 bp, Artificial Sequence
  Synthetic oligonucleotide
ttaggtgacaaaatttcttccaggtgcgta

SEQ ID NO: 45945 - DNA, 30 bp, Artificial Sequence
  Synthetic oligonucleotide
acaatcgagcaaaaggacgaaatactcgta

SEQ ID NO: 45946 - DNA, 30 bp, Artificial Sequence
  Synthetic oligonucleotide
agctcatcgcattctcaatgactactcgta

SEQ ID NO: 45947 - DNA, 30 bp, Artificial Sequence
  Synthetic oligonucleotide
attaggcgataggttgagatagacgtcgta

SEQ ID NO: 45948 - DNA, 30 bp, Artificial Sequence
  Synthetic oligonucleotide
aggacacttgtgtaccttaaagtcttcgta

SEQ ID NO: 45949 - DNA, 30 bp, Artificial Sequence
  Synthetic oligonucleotide
gattggaccggtacagagaattcgttcgta

SEQ ID NO: 45950 - DNA, 30 bp, Artificial Sequence
  Synthetic oligonucleotide
acgagtatcgggtctgtagtgcccaaggta

SEQ ID NO: 45951 - DNA, 30 bp, Artificial Sequence
  Synthetic oligonucleotide
gcttagccagagaaaatacaatccaaggta

SEQ ID NO: 45952 - DNA, 30 bp, Artificial Sequence
  Synthetic oligonucleotide
ccaccggggttaaatagggtcatcgaggta

SEQ ID NO: 45953 - DNA, 30 bp, Artificial Sequence
  Synthetic oligonucleotide
cagggagcggattcgttatattagtaggta

SEQ ID NO: 45954 - DNA, 30 bp, Artificial Sequence
  Synthetic oligonucleotide
ggtcagctgaggacgtcgctacggtaggta

SEQ ID NO: 45955 - DNA, 30 bp, Artificial Sequence
  Synthetic oligonucleotide
cacggcactagccgaaagtcggaaacggta

SEQ ID NO: 45956 - DNA, 30 bp, Artificial Sequence
  Synthetic oligonucleotide
caacctaagagagaaccgcctaagacggta

SEQ ID NO: 45957 - DNA, 30 bp, Artificial Sequence
  Synthetic oligonucleotide
gggcacgtaacgacttagatttatacggta

SEQ ID NO: 45958 - DNA, 30 bp, Artificial Sequence
  Synthetic oligonucleotide
cctggttttgcggttaaaaaggaaagggta

SEQ ID NO: 45959 - DNA, 30 bp, Artificial Sequence
  Synthetic oligonucleotide
acgagcgaacgtcgctagactgggagggta

SEQ ID NO: 45960 - DNA, 30 bp, Artificial Sequence
  Synthetic oligonucleotide
aagcgccattagcaaaaaggagatctggta

SEQ ID NO: 45961 - DNA, 30 bp, Artificial Sequence
  Synthetic oligonucleotide
aagccaaacaggacattgaacattctggta

SEQ ID NO: 45962 - DNA, 30 bp, Artificial Sequence
  Synthetic oligonucleotide
acaaactggaccccccgacacaaacatgta

SEQ ID NO: 45963 - DNA, 30 bp, Artificial Sequence
  Synthetic oligonucleotide
caaggagcgaaccacggcgatccaactgta

SEQ ID NO: 45964 - DNA, 30 bp, Artificial Sequence
  Synthetic oligonucleotide
acctcgcgtcaatgaggacgatatgctgta

SEQ ID NO: 45965 - DNA, 30 bp, Artificial Sequence
  Synthetic oligonucleotide
aggtaggtaaaacagccagtggcgagtgta

SEQ ID NO: 45966 - DNA, 30 bp, Artificial Sequence
  Synthetic oligonucleotide
agtaggggctgaatgtgaggtctgagtgta

SEQ ID NO: 45967 - DNA, 30 bp, Artificial Sequence
  Synthetic oligonucleotide
cgagttggcgtcatgtatatgtgcattgta

SEQ ID NO: 45968 - DNA, 30 bp, Artificial Sequence
  Synthetic oligonucleotide
gaggaggttctacgaacgacatgacttgta

SEQ ID NO: 45969 - DNA, 30 bp, Artificial Sequence
  Synthetic oligonucleotide
agagaaaccagcaatatcctatcaaaatta

SEQ ID NO: 45970 - DNA, 30 bp, Artificial Sequence
  Synthetic oligonucleotide
gatggcgcgaaaacgaccgatggccaatta

SEQ ID NO: 45971 - DNA, 31 bp, Artificial Sequence
  Synthetic oligonucleotide
agacaatcgtaagtggcggagcttgcgatta

SEQ ID NO: 45972 - DNA, 30 bp, Artificial Sequence
  Synthetic oligonucleotide
tcactacgaataccactcgacaaaggatta

SEQ ID NO: 45973 - DNA, 31 bp, Artificial Sequence
  Synthetic oligonucleotide
gccgtcacaaccttcctgaaaaccgtgatta

SEQ ID NO: 45974 - DNA, 30 bp, Artificial Sequence
  Synthetic oligonucleotide
agccgtggacccgagatgattacactatta

SEQ ID NO: 45975 - DNA, 30 bp, Artificial Sequence
  Synthetic oligonucleotide
atgagaagtgcaacggaggaaaagcactta

SEQ ID NO: 45976 - DNA, 30 bp, Artificial Sequence
  Synthetic oligonucleotide
ttacgtcaggtctcgtgtacaagcatctta

SEQ ID NO: 45977 - DNA, 30 bp, Artificial Sequence
  Synthetic oligonucleotide
agcagacccgtgagggaacacatgctctta

SEQ ID NO: 45978 - DNA, 29 bp, Artificial Sequence
  Synthetic oligonucleotide
cggcaccacatacaaaataagcgaagtta

SEQ ID NO: 45979 - DNA, 30 bp, Artificial Sequence
  Synthetic oligonucleotide
gcgtgggaaacgtgtaaaattgtggagtta

SEQ ID NO: 45980 - DNA, 30 bp, Artificial Sequence
  Synthetic oligonucleotide
gactaagtcgggatgcgtgaaccaaggtta

SEQ ID NO: 45981 - DNA, 30 bp, Artificial Sequence
  Synthetic oligonucleotide
taaggactacaactggtcgatgtcgggtta

SEQ ID NO: 45982 - DNA, 30 bp, Artificial Sequence
  Synthetic oligonucleotide
ccatggatcacatcgtaaaaagggatgtta

SEQ ID NO: 45983 - DNA, 30 bp, Artificial Sequence
  Synthetic oligonucleotide
aggtgcgcgttgtcagcgagaaaggtgtta

SEQ ID NO: 45984 - DNA, 30 bp, Artificial Sequence
  Synthetic oligonucleotide
agcgacataggcttagtagacggcttgtta

SEQ ID NO: 45985 - DNA, 30 bp, Artificial Sequence
  Synthetic oligonucleotide
gacggcaattagctaatagtccaacattta

SEQ ID NO: 45986 - DNA, 30 bp, Artificial Sequence
  Synthetic oligonucleotide
gaaggccacgcgaattacctcacgatttta

SEQ ID NO: 45987 - DNA, 30 bp, Artificial Sequence
  Synthetic oligonucleotide
tcgggacggcacatcccaggcgcgtaaaac

SEQ ID NO: 45988 - DNA, 30 bp, Artificial Sequence
  Synthetic oligonucleotide
ggactaactgaatagcactgtgcaacaaac

SEQ ID NO: 45989 - DNA, 30 bp, Artificial Sequence
  Synthetic oligonucleotide
cggacgctctcgcactaggcaaatacaaac

SEQ ID NO: 45990 - DNA, 30 bp, Artificial Sequence
  Synthetic oligonucleotide
ctgaacggactggggacgcctactccaaac

SEQ ID NO: 45991 - DNA, 30 bp, Artificial Sequence
  Synthetic oligonucleotide
aaagaacctcggtgtataaggcgtccaaac

SEQ ID NO: 45992 - DNA, 30 bp, Artificial Sequence
  Synthetic oligonucleotide
tccttgatgagtacgtgggggtcgagaaac

SEQ ID NO: 45993 - DNA, 30 bp, Artificial Sequence
  Synthetic oligonucleotide
aaccgaagttttaagcagtatgcccgaaac

SEQ ID NO: 45994 - DNA, 30 bp, Artificial Sequence
  Synthetic oligonucleotide
aagaaaccgatggggaataaatagcgaaac

SEQ ID NO: 45995 - DNA, 30 bp, Artificial Sequence
  Synthetic oligonucleotide
cgtgcctaagatttggtaggttacggaaac

SEQ ID NO: 45996 - DNA, 30 bp, Artificial Sequence
  Synthetic oligonucleotide
acgggagacaccataccggccacatgaaac

SEQ ID NO: 45997 - DNA, 30 bp, Artificial Sequence
  Synthetic oligonucleotide
tccagccgaggtcgccctacagcactaaac

SEQ ID NO: 45998 - DNA, 30 bp, Artificial Sequence
  Synthetic oligonucleotide
tccagggaaaaattaacgtagagcgtaaac

SEQ ID NO: 45999 - DNA, 30 bp, Artificial Sequence
  Synthetic oligonucleotide
cgcgataggctaatcggctcaatcgtaaac

SEQ ID NO: 46000 - DNA, 30 bp, Artificial Sequence
  Synthetic oligonucleotide
acggtcactcggagggggcaccgagacaac

SEQ ID NO: 46001 - DNA, 30 bp, Artificial Sequence
  Synthetic oligonucleotide
gcgcgaagtgtcctaagcacgttctacaac

SEQ ID NO: 46002 - DNA, 30 bp, Artificial Sequence
  Synthetic oligonucleotide
atacaataacatgccggcaacaaacccaac

SEQ ID NO: 46003 - DNA, 30 bp, Artificial Sequence
  Synthetic oligonucleotide
gaggaacttcctcgcgcacatcaagccaac

SEQ ID NO: 46004 - DNA, 30 bp, Artificial Sequence
  Synthetic oligonucleotide
gcgaagggctggtggccatggtttagcaac

SEQ ID NO: 46005 - DNA, 30 bp, Artificial Sequence
  Synthetic oligonucleotide
agagctttcgagtagagcaactcgcgcaac

SEQ ID NO: 46006 - DNA, 30 bp, Artificial Sequence
  Synthetic oligonucleotide
aagttggggataaatgcgagagttggcaac

SEQ ID NO: 46007 - DNA, 30 bp, Artificial Sequence
  Synthetic oligonucleotide
ggggcgacatattagcaacgtctttgcaac

SEQ ID NO: 46008 - DNA, 30 bp, Artificial Sequence
  Synthetic oligonucleotide
tagtaaaagttacagagcaacgaactcaac

SEQ ID NO: 46009 - DNA, 30 bp, Artificial Sequence
  Synthetic oligonucleotide
cgcgaaaaaccctataccgcatacctcaac

SEQ ID NO: 46010 - DNA, 30 bp, Artificial Sequence
  Synthetic oligonucleotide
tgaactatggcgcgagggtgactagtcaac

SEQ ID NO: 46011 - DNA, 30 bp, Artificial Sequence
  Synthetic oligonucleotide
cggtaacaagattgaaacagctcattcaac

SEQ ID NO: 46012 - DNA, 30 bp, Artificial Sequence
  Synthetic oligonucleotide
cgagcgtctagtggaacacctatattcaac

SEQ ID NO: 46013 - DNA, 30 bp, Artificial Sequence
  Synthetic oligonucleotide
cgaagagtacttaagcttgataacttcaac

SEQ ID NO: 46014 - DNA, 30 bp, Artificial Sequence
  Synthetic oligonucleotide
acggggacgccctaacagtccgtaacgaac

SEQ ID NO: 46015 - DNA, 30 bp, Artificial Sequence
  Synthetic oligonucleotide
cgaggctaaccgacaggcttgcaacggaac

SEQ ID NO: 46016 - DNA, 30 bp, Artificial Sequence
  Synthetic oligonucleotide
aagagagccgagggtaacatgaaccggaac

SEQ ID NO: 46017 - DNA, 30 bp, Artificial Sequence
  Synthetic oligonucleotide
tacacgctaaatctgcgggctgagtggaac

SEQ ID NO: 46018 - DNA, 30 bp, Artificial Sequence
  Synthetic oligonucleotide
gcgagttagcgggaaagaagccccgtgaac

SEQ ID NO: 46019 - DNA, 30 bp, Artificial Sequence
  Synthetic oligonucleotide
acgtcacactgctagacggcctgattgaac

SEQ ID NO: 46020 - DNA, 30 bp, Artificial Sequence
  Synthetic oligonucleotide
tacgggcccaaaacccacacaaagaataac

SEQ ID NO: 46021 - DNA, 30 bp, Artificial Sequence
  Synthetic oligonucleotide
ctagccaggtagccaactaactaacataac

SEQ ID NO: 46022 - DNA, 30 bp, Artificial Sequence
  Synthetic oligonucleotide
catcctcagaataatagaactccagataac

SEQ ID NO: 46023 - DNA, 30 bp, Artificial Sequence
  Synthetic oligonucleotide
gatcataacacacgtgtgagtcccgataac

SEQ ID NO: 46024 - DNA, 30 bp, Artificial Sequence
  Synthetic oligonucleotide
gcataaataatggcccaaatacgggataac

SEQ ID NO: 46025 - DNA, 30 bp, Artificial Sequence
  Synthetic oligonucleotide
gtacccgtgggaggagcaagggatgataac

SEQ ID NO: 46026 - DNA, 30 bp, Artificial Sequence
  Synthetic oligonucleotide
actggaaatacttacagcgggggacgtaac

SEQ ID NO: 46027 - DNA, 30 bp, Artificial Sequence
  Synthetic oligonucleotide
ttcgttggcgaagcatcgcagtggggtaac

SEQ ID NO: 46028 - DNA, 30 bp, Artificial Sequence
  Synthetic oligonucleotide
gctgcgaaaaagtgctgtctggcatgtaac

SEQ ID NO: 46029 - DNA, 30 bp, Artificial Sequence
  Synthetic oligonucleotide
gcgcgaggacccaggaagcaatattgtaac

SEQ ID NO: 46030 - DNA, 30 bp, Artificial Sequence
  Synthetic oligonucleotide
ctgtgagtgaagacttcggtctcggttaac

SEQ ID NO: 46031 - DNA, 30 bp, Artificial Sequence
  Synthetic oligonucleotide
tcgggggcgatttagaattcgagaaaacac

SEQ ID NO: 46032 - DNA, 30 bp, Artificial Sequence
  Synthetic oligonucleotide
agaacgcttcgacgacgacacgtaacacac

SEQ ID NO: 46033 - DNA, 30 bp, Artificial Sequence
  Synthetic oligonucleotide
cgagagctggaactagtaattcacagacac

SEQ ID NO: 46034 - DNA, 30 bp, Artificial Sequence
  Synthetic oligonucleotide
caaggaacaaggtacgatctttctggacac

SEQ ID NO: 46035 - DNA, 30 bp, Artificial Sequence
  Synthetic oligonucleotide
gagcagacagttcctgacaaaaagtgacac

SEQ ID NO: 46036 - DNA, 30 bp, Artificial Sequence
  Synthetic oligonucleotide
cgatttcacagtttgccagtcaggtgacac

SEQ ID NO: 46037 - DNA, 30 bp, Artificial Sequence
  Synthetic oligonucleotide
tgcgagtaaatattctacagtgcaatacac

SEQ ID NO: 46038 - DNA, 30 bp, Artificial Sequence
  Synthetic oligonucleotide
ttgcatgcgcgaataatagagggtgtacac

SEQ ID NO: 46039 - DNA, 30 bp, Artificial Sequence
  Synthetic oligonucleotide
agaacgattcaactaccacaggaaaaccac

SEQ ID NO: 46040 - DNA, 30 bp, Artificial Sequence
  Synthetic oligonucleotide
ttgattaaggcgactaggaatcggacccac

SEQ ID NO: 46041 - DNA, 30 bp, Artificial Sequence
  Synthetic oligonucleotide
tgttaccaaacaaggtccctacgtgcccac

SEQ ID NO: 46042 - DNA, 30 bp, Artificial Sequence
  Synthetic oligonucleotide
actgctataaacaaaaatcactaagtccac

SEQ ID NO: 46043 - DNA, 30 bp, Artificial Sequence
  Synthetic oligonucleotide
cacccaaagttgcgtgacgtgagagtccac

SEQ ID NO: 46044 - DNA, 30 bp, Artificial Sequence
  Synthetic oligonucleotide
cagtgtgcaggtggcatgagcaacgtccac

SEQ ID NO: 46045 - DNA, 30 bp, Artificial Sequence
  Synthetic oligonucleotide
gaggatagagagcaccatcggcagaagcac

SEQ ID NO: 46046 - DNA, 30 bp, Artificial Sequence
  Synthetic oligonucleotide
ttgcaaaggaagcccaaggcccagcagcac

SEQ ID NO: 46047 - DNA, 30 bp, Artificial Sequence
  Synthetic oligonucleotide
ttggtacaggcagttaatatcgttcagcac

SEQ ID NO: 46048 - DNA, 30 bp, Artificial Sequence
  Synthetic oligonucleotide
ggttcgggtccgtaggtgttaagagagcac

SEQ ID NO: 46049 - DNA, 30 bp, Artificial Sequence
  Synthetic oligonucleotide
agaatgtaaaggctaatgtgacgatagcac

SEQ ID NO: 46050 - DNA, 30 bp, Artificial Sequence
  Synthetic oligonucleotide
taatttcgcccgcgcgaacaaggctagcac

SEQ ID NO: 46051 - DNA, 30 bp, Artificial Sequence
  Synthetic oligonucleotide
gtcgtaagtaaataaaccatctacgggcac

SEQ ID NO: 46052 - DNA, 30 bp, Artificial Sequence
  Synthetic oligonucleotide
acgtgtacaaacacaaaagaacttgggcac

SEQ ID NO: 46053 - DNA, 30 bp, Artificial Sequence
  Synthetic oligonucleotide
ggttgtcaaacagataaacggattgtgcac

SEQ ID NO: 46054 - DNA, 30 bp, Artificial Sequence
  Synthetic oligonucleotide
tcacgataatggcacatatatcgatatcac

SEQ ID NO: 46055 - DNA, 30 bp, Artificial Sequence
  Synthetic oligonucleotide
tcaaaacgtgctgtcactagaatcactcac

SEQ ID NO: 46056 - DNA, 30 bp, Artificial Sequence
  Synthetic oligonucleotide
catggaacagacccgacaaatctttctcac

SEQ ID NO: 46057 - DNA, 30 bp, Artificial Sequence
  Synthetic oligonucleotide
cctgagaaggaaccctccagagcaagtcac

SEQ ID NO: 46058 - DNA, 30 bp, Artificial Sequence
  Synthetic oligonucleotide
gggagtggagacagatccgcatatagtcac

SEQ ID NO: 46059 - DNA, 30 bp, Artificial Sequence
  Synthetic oligonucleotide
atcgacgtgaaaggtggagaaggtagtcac

SEQ ID NO: 46060 - DNA, 30 bp, Artificial Sequence
  Synthetic oligonucleotide
tgatcaaatacaaaagtcagaatacgtcac

SEQ ID NO: 46061 - DNA, 30 bp, Artificial Sequence
  Synthetic oligonucleotide
atgacacgagtggtggtgggtagaattcac

SEQ ID NO: 46062 - DNA, 34 bp, Artificial Sequence
  Synthetic oligonucleotide
gatactagacaaccacgtgtccatcagaaaagac

SEQ ID NO: 46063 - DNA, 30 bp, Artificial Sequence
  Synthetic oligonucleotide
gcaagcggtcggagatcggagatgaaagac

SEQ ID NO: 46064 - DNA, 30 bp, Artificial Sequence
  Synthetic oligonucleotide
ggaaagtgtcggccttaggagagagaagac

SEQ ID NO: 46065 - DNA, 30 bp, Artificial Sequence
  Synthetic oligonucleotide
caaaaatgtttcccttaagaaaaggaagac

SEQ ID NO: 46066 - DNA, 30 bp, Artificial Sequence
  Synthetic oligonucleotide
cggtctacgaggccaaatggtaaataagac

SEQ ID NO: 46067 - DNA, 30 bp, Artificial Sequence
  Synthetic oligonucleotide
aaggatcaactgcaaggggccgattaagac

SEQ ID NO: 46068 - DNA, 30 bp, Artificial Sequence
  Synthetic oligonucleotide
gatatcgaaggggacgccgaaataccagac

SEQ ID NO: 46069 - DNA, 30 bp, Artificial Sequence
  Synthetic oligonucleotide
ggtatgtaggtctagtagggatacccagac

SEQ ID NO: 46070 - DNA, 30 bp, Artificial Sequence
  Synthetic oligonucleotide
cgtttgcgcgaccggctagggaccccagac

SEQ ID NO: 46071 - DNA, 30 bp, Artificial Sequence
  Synthetic oligonucleotide
gcgcaaatagataggacgtcattgccagac

SEQ ID NO: 46072 - DNA, 30 bp, Artificial Sequence
  Synthetic oligonucleotide
atggtaatcaccccatatacctatccagac

SEQ ID NO: 46073 - DNA, 30 bp, Artificial Sequence
  Synthetic oligonucleotide
ccattagggtatacaccgatgagtccagac

SEQ ID NO: 46074 - DNA, 30 bp, Artificial Sequence
  Synthetic oligonucleotide
gttgagtcacgggagggtgcaacgagagac

SEQ ID NO: 46075 - DNA, 30 bp, Artificial Sequence
  Synthetic oligonucleotide
tgttcgtggccagatggctatgcccgagac

SEQ ID NO: 46076 - DNA, 30 bp, Artificial Sequence
  Synthetic oligonucleotide
gggttgagggcctgaaaacaagggtgagac

SEQ ID NO: 46077 - DNA, 30 bp, Artificial Sequence
  Synthetic oligonucleotide
cttgggcgacaacaatctgtggaggtagac

SEQ ID NO: 46078 - DNA, 30 bp, Artificial Sequence
  Synthetic oligonucleotide
ataaatgtcacagtacaagaggggttagac

SEQ ID NO: 46079 - DNA, 30 bp, Artificial Sequence
  Synthetic oligonucleotide
gggtgaagcctaaaacagatgtaccacgac

SEQ ID NO: 46080 - DNA, 30 bp, Artificial Sequence
  Synthetic oligonucleotide
gcggggtcgtaaacacgaagcatcgacgac

SEQ ID NO: 46081 - DNA, 30 bp, Artificial Sequence
  Synthetic oligonucleotide
gcgtgatgtcacagtggaaaaactgacgac

SEQ ID NO: 46082 - DNA, 30 bp, Artificial Sequence
  Synthetic oligonucleotide
gtctcacatgctcaacgactgtaaaccgac

SEQ ID NO: 46083 - DNA, 30 bp, Artificial Sequence
  Synthetic oligonucleotide
cggggaggctttcgaagacatgttaccgac

SEQ ID NO: 46084 - DNA, 30 bp, Artificial Sequence
  Synthetic oligonucleotide
ctagatgcatgtctcccaccgagatccgac

SEQ ID NO: 46085 - DNA, 30 bp, Artificial Sequence
  Synthetic oligonucleotide
atgaaatcaacgaatatggccaatagcgac

SEQ ID NO: 46086 - DNA, 30 bp, Artificial Sequence
  Synthetic oligonucleotide
aaccacaccgataaggacagctaacgcgac

SEQ ID NO: 46087 - DNA, 30 bp, Artificial Sequence
  Synthetic oligonucleotide
agagcgaaggtatagggcgaagtacgcgac

SEQ ID NO: 46088 - DNA, 30 bp, Artificial Sequence
  Synthetic oligonucleotide
cgggtattgataaatacgagaatcggcgac

SEQ ID NO: 46089 - DNA, 30 bp, Artificial Sequence
  Synthetic oligonucleotide
cgaagacgtggaatcatcgcagaatgcgac

SEQ ID NO: 46090 - DNA, 30 bp, Artificial Sequence
  Synthetic oligonucleotide
tacgaacgggggctaaaccaagtttgcgac

SEQ ID NO: 46091 - DNA, 31 bp, Artificial Sequence
  Synthetic oligonucleotide
aggaattcgtatcgaggcacctaaactcgac

SEQ ID NO: 46092 - DNA, 30 bp, Artificial Sequence
  Synthetic oligonucleotide
tcgtcgccaggagaggagataccattcgac

SEQ ID NO: 46093 - DNA, 30 bp, Artificial Sequence
  Synthetic oligonucleotide
tagcgatcaagacgtctcaagtggaaggac

SEQ ID NO: 46094 - DNA, 30 bp, Artificial Sequence
  Synthetic oligonucleotide
agaggactagaggttctacgaaagtaggac

SEQ ID NO: 46095 - DNA, 30 bp, Artificial Sequence
  Synthetic oligonucleotide
agggccatatgcccttaacgtaggtaggac

SEQ ID NO: 46096 - DNA, 30 bp, Artificial Sequence
  Synthetic oligonucleotide
aggaaataggaaagtacgtccggttaggac

SEQ ID NO: 46097 - DNA, 30 bp, Artificial Sequence
  Synthetic oligonucleotide
aacacaccccggaagaatgattcggcggac

SEQ ID NO: 46098 - DNA, 30 bp, Artificial Sequence
  Synthetic oligonucleotide
agccagaacgtcacccctagaaccagggac

SEQ ID NO: 46099 - DNA, 30 bp, Artificial Sequence
  Synthetic oligonucleotide
agcgaaccgtccaatagccgtgcgcgggac

SEQ ID NO: 46100 - DNA, 30 bp, Artificial Sequence
  Synthetic oligonucleotide
gaacagtacgctaacggatcaccctgggac

SEQ ID NO: 46101 - DNA, 30 bp, Artificial Sequence
  Synthetic oligonucleotide
taggagggtcaaaggtgcatgacagtggac

SEQ ID NO: 46102 - DNA, 30 bp, Artificial Sequence
  Synthetic oligonucleotide
gagaatatcgggtgtacggataaggtggac

SEQ ID NO: 46103 - DNA, 30 bp, Artificial Sequence
  Synthetic oligonucleotide
cgatgtccacgtttagttgtacatttggac

SEQ ID NO: 46104 - DNA, 30 bp, Artificial Sequence
  Synthetic oligonucleotide
ctggacatatgaagtaggcgatgcaatgac

SEQ ID NO: 46105 - DNA, 30 bp, Artificial Sequence
  Synthetic oligonucleotide
attccagacaaaggtagcgagtctaatgac

SEQ ID NO: 46106 - DNA, 30 bp, Artificial Sequence
  Synthetic oligonucleotide
tactaagcaaacaaatcgcaccttaatgac

SEQ ID NO: 46107 - DNA, 30 bp, Artificial Sequence
  Synthetic oligonucleotide
gggtatgcaaaataggatcaaaacgatgac

SEQ ID NO: 46108 - DNA, 30 bp, Artificial Sequence
  Synthetic oligonucleotide
tcctgacatcgggagatgtgaagcactgac

SEQ ID NO: 46109 - DNA, 30 bp, Artificial Sequence
  Synthetic oligonucleotide
agaatcccaacggaacactcctaaggtgac

SEQ ID NO: 46110 - DNA, 30 bp, Artificial Sequence
  Synthetic oligonucleotide
cttcgaaggaagccaattcacacaggtgac

SEQ ID NO: 46111 - DNA, 30 bp, Artificial Sequence
  Synthetic oligonucleotide
cggctcgaagaagaagaatatggtggtgac

SEQ ID NO: 46112 - DNA, 30 bp, Artificial Sequence
  Synthetic oligonucleotide
gaggcaatcgattgaggggacgtcaaatac

SEQ ID NO: 46113 - DNA, 30 bp, Artificial Sequence
  Synthetic oligonucleotide
taaaggcaagatcgcgctggcggacaatac

SEQ ID NO: 46114 - DNA, 30 bp, Artificial Sequence
  Synthetic oligonucleotide
tcgggccgaagttgcggtgctcgggaatac

SEQ ID NO: 46115 - DNA, 30 bp, Artificial Sequence
  Synthetic oligonucleotide
gcggcgttgaagtaaagggagcatgaatac

SEQ ID NO: 46116 - DNA, 30 bp, Artificial Sequence
  Synthetic oligonucleotide
cgaaggtgtcgacacgaatgctagacatac

SEQ ID NO: 46117 - DNA, 30 bp, Artificial Sequence
  Synthetic oligonucleotide
ttaacgaattcaaccgctatccgaagatac

SEQ ID NO: 46118 - DNA, 30 bp, Artificial Sequence
  Synthetic oligonucleotide
atcatggcggccggatgatcaaggggatac

SEQ ID NO: 46119 - DNA, 30 bp, Artificial Sequence
  Synthetic oligonucleotide
taaaaaggaacgcgaagtgcgaagtgatac

SEQ ID NO: 46120 - DNA, 30 bp, Artificial Sequence
  Synthetic oligonucleotide
tctagaacagccaaccctccccaagtatac

SEQ ID NO: 46121 - DNA, 30 bp, Artificial Sequence
  Synthetic oligonucleotide
acgacaattcaagaaatcaaaactttatac

SEQ ID NO: 46122 - DNA, 30 bp, Artificial Sequence
  Synthetic oligonucleotide
attacggtgcgtagcatgtggatagactac

SEQ ID NO: 46123 - DNA, 30 bp, Artificial Sequence
  Synthetic oligonucleotide
cgagatggctcgacaatcgaatgcgactac

SEQ ID NO: 46124 - DNA, 30 bp, Artificial Sequence
  Synthetic oligonucleotide
caatcaaagccgtcggaagaatgggactac

SEQ ID NO: 46125 - DNA, 30 bp, Artificial Sequence
  Synthetic oligonucleotide
cgaagccggacacacctaagcagcgcctac

SEQ ID NO: 46126 - DNA, 30 bp, Artificial Sequence
  Synthetic oligonucleotide
agcgtcatcgccctaaggattcacagctac

SEQ ID NO: 46127 - DNA, 30 bp, Artificial Sequence
  Synthetic oligonucleotide
aggcgtgatacatcggtcgagaattgctac

SEQ ID NO: 46128 - DNA, 30 bp, Artificial Sequence
  Synthetic oligonucleotide
ccacgcgggacccgaattcgtagagtctac

SEQ ID NO: 46129 - DNA, 30 bp, Artificial Sequence
  Synthetic oligonucleotide
aagggcatggcaatcatcgcctctgtctac

SEQ ID NO: 46130 - DNA, 30 bp, Artificial Sequence
  Synthetic oligonucleotide
tggaagagaggcgcgacgatgaagttctac

SEQ ID NO: 46131 - DNA, 30 bp, Artificial Sequence
  Synthetic oligonucleotide
ggacaaacttatatggtctgagtaaagtac

SEQ ID NO: 46132 - DNA, 30 bp, Artificial Sequence
  Synthetic oligonucleotide
tctagatcaatatgaaacatctattagtac

SEQ ID NO: 46133 - DNA, 30 bp, Artificial Sequence
  Synthetic oligonucleotide
gtcatcaggccggtgtgctagcaaacgtac

SEQ ID NO: 46134 - DNA, 30 bp, Artificial Sequence
  Synthetic oligonucleotide
ggtaaatggcatccacgcgaatacacgtac

SEQ ID NO: 46135 - DNA, 30 bp, Artificial Sequence
  Synthetic oligonucleotide
cagcctcatgaaaattccgacaatacgtac

SEQ ID NO: 46136 - DNA, 30 bp, Artificial Sequence
  Synthetic oligonucleotide
gatgcccaaagggcttacaagcaaccgtac

SEQ ID NO: 46137 - DNA, 30 bp, Artificial Sequence
  Synthetic oligonucleotide
gatggggtggctctaatgaaaataccgtac

SEQ ID NO: 46138 - DNA, 30 bp, Artificial Sequence
  Synthetic oligonucleotide
tgcccaaaaatcgctcggagggcagggtac

SEQ ID NO: 46139 - DNA, 30 bp, Artificial Sequence
  Synthetic oligonucleotide
aagtggttcaccaggaagcaatgctggtac

SEQ ID NO: 46140 - DNA, 30 bp, Artificial Sequence
  Synthetic oligonucleotide
ttatggtagaataatgcaagaggaatgtac

SEQ ID NO: 46141 - DNA, 30 bp, Artificial Sequence
  Synthetic oligonucleotide
actagtcagcggggtgattaaaggatgtac

SEQ ID NO: 46142 - DNA, 30 bp, Artificial Sequence
  Synthetic oligonucleotide
cgtaggtaatgacatcatgaagtactgtac

SEQ ID NO: 46143 - DNA, 30 bp, Artificial Sequence
  Synthetic oligonucleotide
tcttactggccaaaaggagtatgcgtgtac

SEQ ID NO: 46144 - DNA, 30 bp, Artificial Sequence
  Synthetic oligonucleotide
ttggcagcctggacgagaagagtgttgtac

SEQ ID NO: 46145 - DNA, 30 bp, Artificial Sequence
  Synthetic oligonucleotide
cgtcacgatcgacccttgagctgcaattac

SEQ ID NO: 46146 - DNA, 30 bp, Artificial Sequence
  Synthetic oligonucleotide
gggcaatgagcccggcaatgctaaacttac

SEQ ID NO: 46147 - DNA, 30 bp, Artificial Sequence
  Synthetic oligonucleotide
cctggcctgcaccggaaaaacgctacttac

SEQ ID NO: 46148 - DNA, 30 bp, Artificial Sequence
  Synthetic oligonucleotide
ctcagagacaaggattatagaacaccttac

SEQ ID NO: 46149 - DNA, 30 bp, Artificial Sequence
  Synthetic oligonucleotide
aggcccaacgccatctgtaaagcatcttac

SEQ ID NO: 46150 - DNA, 30 bp, Artificial Sequence
  Synthetic oligonucleotide
cggtcgattaccacaaggcacttcaaaacc

SEQ ID NO: 46151 - DNA, 30 bp, Artificial Sequence
  Synthetic oligonucleotide
gcgtcaaggttaaaagtgagtaccgcaacc

SEQ ID NO: 46152 - DNA, 30 bp, Artificial Sequence
  Synthetic oligonucleotide
caaggactggctgcaaacagcatgtcaacc

SEQ ID NO: 46153 - DNA, 30 bp, Artificial Sequence
  Synthetic oligonucleotide
cgaaaatagcgcaccggaagacgaagaacc

SEQ ID NO: 46154 - DNA, 30 bp, Artificial Sequence
  Synthetic oligonucleotide
gggaggggcgaacaaagtcgctcgagaacc

SEQ ID NO: 46155 - DNA, 30 bp, Artificial Sequence
  Synthetic oligonucleotide
aggcgcatagtgagcatagtaattagaacc

SEQ ID NO: 46156 - DNA, 30 bp, Artificial Sequence
  Synthetic oligonucleotide
cttgtaacaagaagatcctcgttccgaacc

SEQ ID NO: 46157 - DNA, 30 bp, Artificial Sequence
  Synthetic oligonucleotide
gtagcaaggggtggaatgcatgggggaacc

SEQ ID NO: 46158 - DNA, 30 bp, Artificial Sequence
  Synthetic oligonucleotide
cgaaggcacacgggtcaggtgtagtgaacc

SEQ ID NO: 46159 - DNA, 30 bp, Artificial Sequence
  Synthetic oligonucleotide
agatggacgatttcgcgccggaccataacc

SEQ ID NO: 46160 - DNA, 30 bp, Artificial Sequence
  Synthetic oligonucleotide
gagacacaggacaccctaaccctaaacacc

SEQ ID NO: 46161 - DNA, 30 bp, Artificial Sequence
  Synthetic oligonucleotide
aactcgtcacggaggggcgtaaaaaccacc

SEQ ID NO: 46162 - DNA, 30 bp, Artificial Sequence
  Synthetic oligonucleotide
ggggcatcacgaccagtgaagaggaccacc

SEQ ID NO: 46163 - DNA, 30 bp, Artificial Sequence
  Synthetic oligonucleotide
acgaaccgatgcataatatatggtaccacc

SEQ ID NO: 46164 - DNA, 30 bp, Artificial Sequence
  Synthetic oligonucleotide
tgggaaaggagaaaaaaccgcggcgccacc

SEQ ID NO: 46165 - DNA, 30 bp, Artificial Sequence
  Synthetic oligonucleotide
ccgcactgtagaaactgagggggtggcacc

SEQ ID NO: 46166 - DNA, 30 bp, Artificial Sequence
  Synthetic oligonucleotide
ggggaataaggctagataaaacatatcacc

SEQ ID NO: 46167 - DNA, 30 bp, Artificial Sequence
  Synthetic oligonucleotide
cacggtctagatttaagttgaaagctcacc

SEQ ID NO: 46168 - DNA, 30 bp, Artificial Sequence
  Synthetic oligonucleotide
caatgtcggtagagacatcacgggctcacc

SEQ ID NO: 46169 - DNA, 30 bp, Artificial Sequence
  Synthetic oligonucleotide
agagctgagttaatggaaaattgtgtcacc

SEQ ID NO: 46170 - DNA, 30 bp, Artificial Sequence
  Synthetic oligonucleotide
ccggcaataaccacaaggacgaaaaagacc

SEQ ID NO: 46171 - DNA, 30 bp, Artificial Sequence
  Synthetic oligonucleotide
cgtggagcgtggactatgcgggacaagacc

SEQ ID NO: 46172 - DNA, 30 bp, Artificial Sequence
  Synthetic oligonucleotide
gagaaccagattgcataatccagagagacc

SEQ ID NO: 46173 - DNA, 30 bp, Artificial Sequence
  Synthetic oligonucleotide
agcatcgcatttcggctgggcggagagacc

SEQ ID NO: 46174 - DNA, 30 bp, Artificial Sequence
  Synthetic oligonucleotide
acatgtccgtgaaggacaatcggcgagacc

SEQ ID NO: 46175 - DNA, 30 bp, Artificial Sequence
  Synthetic oligonucleotide
cgtgcgtggtggaagggcatcgaggagacc

SEQ ID NO: 46176 - DNA, 30 bp, Artificial Sequence
  Synthetic oligonucleotide
cgtcgaattaaggtcgttcacgagtagacc

SEQ ID NO: 46177 - DNA, 30 bp, Artificial Sequence
  Synthetic oligonucleotide
gaccacagaagaagaagcagccgtaggacc

SEQ ID NO: 46178 - DNA, 30 bp, Artificial Sequence
  Synthetic oligonucleotide
tgaaccgtcggaaatggatctcaacggacc

SEQ ID NO: 46179 - DNA, 30 bp, Artificial Sequence
  Synthetic oligonucleotide
agagggcgggcaaggctagttccgtggacc

SEQ ID NO: 46180 - DNA, 30 bp, Artificial Sequence
  Synthetic oligonucleotide
gcagtgagcagagcaaagtaacaggtgacc

SEQ ID NO: 46181 - DNA, 30 bp, Artificial Sequence
  Synthetic oligonucleotide
cggggggaagtgaagtctatcggggtgacc

SEQ ID NO: 46182 - DNA, 30 bp, Artificial Sequence
  Synthetic oligonucleotide
cgatacactcacactcacctctcacatacc

SEQ ID NO: 46183 - DNA, 30 bp, Artificial Sequence
  Synthetic oligonucleotide
atgagacaatggaggctccgaaaggatacc

SEQ ID NO: 46184 - DNA, 30 bp, Artificial Sequence
  Synthetic oligonucleotide
gtggtagagttatagaagtgaagtgatacc

SEQ ID NO: 46185 - DNA, 30 bp, Artificial Sequence
  Synthetic oligonucleotide
tggctagtatcacaccaaatagcgagtacc

SEQ ID NO: 46186 - DNA, 30 bp, Artificial Sequence
  Synthetic oligonucleotide
acgagagctcagagccagtgtgacggtacc

SEQ ID NO: 46187 - DNA, 30 bp, Artificial Sequence
  Synthetic oligonucleotide
actagaggaagacctgggtcaacgtgtacc

SEQ ID NO: 46188 - DNA, 30 bp, Artificial Sequence
  Synthetic oligonucleotide
ggagggtcaaggaacagaatattgcaaccc

SEQ ID NO: 46189 - DNA, 30 bp, Artificial Sequence
  Synthetic oligonucleotide
tgtaaacgaccagttctgactgagtaaccc

SEQ ID NO: 46190 - DNA, 30 bp, Artificial Sequence
  Synthetic oligonucleotide
gatccggggggaaacattcgatagggaccc

SEQ ID NO: 46191 - DNA, 30 bp, Artificial Sequence
  Synthetic oligonucleotide
tagcctcaaatgaaacctctcacgataccc

SEQ ID NO: 46192 - DNA, 30 bp, Artificial Sequence
  Synthetic oligonucleotide
ccgaatgggaacggtctctcgtcaagcccc

SEQ ID NO: 46193 - DNA, 30 bp, Artificial Sequence
  Synthetic oligonucleotide
gatagagaatagagggtgtgtgccagcccc

SEQ ID NO: 46194 - DNA, 30 bp, Artificial Sequence
  Synthetic oligonucleotide
gtggcaggacatcactcgacctctaagccc

SEQ ID NO: 46195 - DNA, 30 bp, Artificial Sequence
  Synthetic oligonucleotide
tcgccatcagatcgtcggtaaagtcagccc

SEQ ID NO: 46196 - DNA, 30 bp, Artificial Sequence
  Synthetic oligonucleotide
gcgtagggtcactaaccagaggctgagccc

SEQ ID NO: 46197 - DNA, 30 bp, Artificial Sequence
  Synthetic oligonucleotide
caaatacagaaacgaagagggaactagccc

SEQ ID NO: 46198 - DNA, 30 bp, Artificial Sequence
  Synthetic oligonucleotide
cggatacatctgagactaaatcactcgccc

SEQ ID NO: 46199 - DNA, 30 bp, Artificial Sequence
  Synthetic oligonucleotide
aggggccatcgtaacgcggttgcttcgccc

SEQ ID NO: 46200 - DNA, 30 bp, Artificial Sequence
  Synthetic oligonucleotide
ttacccggtagaggagggaagcccatgccc

SEQ ID NO: 46201 - DNA, 30 bp, Artificial Sequence
  Synthetic oligonucleotide
tcactcttgtgaaagggagggccgcatccc

SEQ ID NO: 46202 - DNA, 30 bp, Artificial Sequence
  Synthetic oligonucleotide
cgaaggtcgcagaaagaaccacgtcatccc

SEQ ID NO: 46203 - DNA, 30 bp, Artificial Sequence
  Synthetic oligonucleotide
agacgttaagggcggacgtggcaagatccc

SEQ ID NO: 46204 - DNA, 30 bp, Artificial Sequence
  Synthetic oligonucleotide
caggaggcaacgtggcatgaaagctatccc

SEQ ID NO: 46205 - DNA, 30 bp, Artificial Sequence
  Synthetic oligonucleotide
acagaaaacagcgacaaggacggaactccc

SEQ ID NO: 46206 - DNA, 30 bp, Artificial Sequence
  Synthetic oligonucleotide
acacgatattgcatgtcacactcgtctccc

SEQ ID NO: 46207 - DNA, 30 bp, Artificial Sequence
  Synthetic oligonucleotide
ggggccctacgatgagatcacatgagtccc

SEQ ID NO: 46208 - DNA, 30 bp, Artificial Sequence
  Synthetic oligonucleotide
ttgggagggaaggtcacacgagtgcgtccc

SEQ ID NO: 46209 - DNA, 30 bp, Artificial Sequence
  Synthetic oligonucleotide
ccagtgggcgatacaatcggatgtcgtccc

SEQ ID NO: 46210 - DNA, 30 bp, Artificial Sequence
  Synthetic oligonucleotide
aaacgcgatcactagtaaagtaccgaagcc

SEQ ID NO: 46211 - DNA, 30 bp, Artificial Sequence
  Synthetic oligonucleotide
cgttctgctaagtagggtaacggaccagcc

SEQ ID NO: 46212 - DNA, 30 bp, Artificial Sequence
  Synthetic oligonucleotide
caggactcgagaattatcatcgaccgagcc

SEQ ID NO: 46213 - DNA, 30 bp, Artificial Sequence
  Synthetic oligonucleotide
ggggagtaaaccttcaatgtctcccgagcc

SEQ ID NO: 46214 - DNA, 30 bp, Artificial Sequence
  Synthetic oligonucleotide
tggtacgagttgaacaatctcaagcgagcc

SEQ ID NO: 46215 - DNA, 30 bp, Artificial Sequence
  Synthetic oligonucleotide
ccctcagtgggagtccagatgagaaacgcc

SEQ ID NO: 46216 - DNA, 30 bp, Artificial Sequence
  Synthetic oligonucleotide
agctcatgggacaacacccgcaatcacgcc

SEQ ID NO: 46217 - DNA, 30 bp, Artificial Sequence
  Synthetic oligonucleotide
ctgtggtcaagcgcgatataacgagccgcc

SEQ ID NO: 46218 - DNA, 30 bp, Artificial Sequence
  Synthetic oligonucleotide
tcgacgaatcggttatccatatgcatcgcc

SEQ ID NO: 46219 - DNA, 30 bp, Artificial Sequence
  Synthetic oligonucleotide
ggtgatgtgtagtgaatcgcagagctcgcc

SEQ ID NO: 46220 - DNA, 30 bp, Artificial Sequence
  Synthetic oligonucleotide
gcggagccttgacgagggagaagaccggcc

SEQ ID NO: 46221 - DNA, 30 bp, Artificial Sequence
  Synthetic oligonucleotide
agaacgagaaagatcgacggtctgtcggcc

SEQ ID NO: 46222 - DNA, 30 bp, Artificial Sequence
  Synthetic oligonucleotide
tctcggaaatctgtaaacgaattgctggcc

SEQ ID NO: 46223 - DNA, 30 bp, Artificial Sequence
  Synthetic oligonucleotide
gggcaagcttgaagtccgtgtggggtggcc

SEQ ID NO: 46224 - DNA, 30 bp, Artificial Sequence
  Synthetic oligonucleotide
ttgataagccacaaaatagtatgcttggcc

SEQ ID NO: 46225 - DNA, 30 bp, Artificial Sequence
  Synthetic oligonucleotide
ctcatagctcgagatcgcgaaatgaatgcc

SEQ ID NO: 46226 - DNA, 30 bp, Artificial Sequence
  Synthetic oligonucleotide
accgcgcgaggtgggcaagccagtcatgcc

SEQ ID NO: 46227 - DNA, 30 bp, Artificial Sequence
  Synthetic oligonucleotide
aacacgtaaaaagaggcaagaggcgatgcc

SEQ ID NO: 46228 - DNA, 30 bp, Artificial Sequence
  Synthetic oligonucleotide
ggggggtcggtagaaagtacagactatgcc

SEQ ID NO: 46229 - DNA, 30 bp, Artificial Sequence
  Synthetic oligonucleotide
tcaatcaagtcgccgataatttcctatgcc

SEQ ID NO: 46230 - DNA, 30 bp, Artificial Sequence
  Synthetic oligonucleotide
cgtacaagcgtggccaaataagtcagtgcc

SEQ ID NO: 46231 - DNA, 30 bp, Artificial Sequence
  Synthetic oligonucleotide
tgagggcgtcggtatgtggagtagcgtgcc

SEQ ID NO: 46232 - DNA, 30 bp, Artificial Sequence
  Synthetic oligonucleotide
tagccaagaaagagtcaatcacctcgtgcc

SEQ ID NO: 46233 - DNA, 30 bp, Artificial Sequence
  Synthetic oligonucleotide
tgcaaactcctcgaacagggatcatgtgcc

SEQ ID NO: 46234 - DNA, 30 bp, Artificial Sequence
  Synthetic oligonucleotide
ctagagcaagtcgggctgtgaacgaaatcc

SEQ ID NO: 46235 - DNA, 30 bp, Artificial Sequence
  Synthetic oligonucleotide
cgggatatcaccgcgcatagagtggcatcc

SEQ ID NO: 46236 - DNA, 30 bp, Artificial Sequence
  Synthetic oligonucleotide
ggggctccctacaagaacattacatcatcc

SEQ ID NO: 46237 - DNA, 30 bp, Artificial Sequence
  Synthetic oligonucleotide
gatcaagagaatgaaattgcttagtcctcc

SEQ ID NO: 46238 - DNA, 30 bp, Artificial Sequence
  Synthetic oligonucleotide
gtaaatcaggcaaaacaaggtaggagctcc

SEQ ID NO: 46239 - DNA, 30 bp, Artificial Sequence
  Synthetic oligonucleotide
actgcgaataaggtcaaaccaaagcgctcc

SEQ ID NO: 46240 - DNA, 30 bp, Artificial Sequence
  Synthetic oligonucleotide
agcgtcataactcctgcgaacgaactctcc

SEQ ID NO: 46241 - DNA, 30 bp, Artificial Sequence
  Synthetic oligonucleotide
aaggcggaaataggctgttatgaaaagtcc

SEQ ID NO: 46242 - DNA, 30 bp, Artificial Sequence
  Synthetic oligonucleotide
ccaagtagggctgaaagcactaaaacgtcc

SEQ ID NO: 46243 - DNA, 30 bp, Artificial Sequence
  Synthetic oligonucleotide
acgtgctgaactatttatgaccctacgtcc

SEQ ID NO: 46244 - DNA, 30 bp, Artificial Sequence
  Synthetic oligonucleotide
cgtttaatctgcctcgcgtcctgctcgtcc

SEQ ID NO: 46245 - DNA, 30 bp, Artificial Sequence
  Synthetic oligonucleotide
cccaagatgagagggcgatacatcaggtcc

SEQ ID NO: 46246 - DNA, 30 bp, Artificial Sequence
  Synthetic oligonucleotide
taggggtgaagtcactagtactaggtgtcc

SEQ ID NO: 46247 - DNA, 30 bp, Artificial Sequence
  Synthetic oligonucleotide
ggggatgcgataaatgcacggcgcttgtcc

SEQ ID NO: 46248 - DNA, 30 bp, Artificial Sequence
  Synthetic oligonucleotide
tggcactcgaaaatataagctaggcattcc

SEQ ID NO: 46249 - DNA, 30 bp, Artificial Sequence
  Synthetic oligonucleotide
gaagggatgagggttcccagcaacgcttcc

SEQ ID NO: 46250 - DNA, 30 bp, Artificial Sequence
  Synthetic oligonucleotide
cggattatgagcaacgcgagcgcaaaaagc

SEQ ID NO: 46251 - DNA, 30 bp, Artificial Sequence
  Synthetic oligonucleotide
caccatgccaaaccgtgcgaaagcaaaagc

SEQ ID NO: 46252 - DNA, 30 bp, Artificial Sequence
  Synthetic oligonucleotide
gcaggagttgggatgttaggtttgcaaagc

SEQ ID NO: 46253 - DNA, 30 bp, Artificial Sequence
  Synthetic oligonucleotide
gcgcaagtagggcacccgaaacttcaaagc

SEQ ID NO: 46254 - DNA, 30 bp, Artificial Sequence
  Synthetic oligonucleotide
aaccgaactgagtacggcatgttcgaaagc

SEQ ID NO: 46255 - DNA, 30 bp, Artificial Sequence
  Synthetic oligonucleotide
atgaagtaggtgaaatagactcgttaaagc

SEQ ID NO: 46256 - DNA, 30 bp, Artificial Sequence
  Synthetic oligonucleotide
gaacaactgagaccggactgtgaaacaagc

SEQ ID NO: 46257 - DNA, 31 bp, Artificial Sequence
  Synthetic oligonucleotide
gcgtcggaagcattggaataggtcaacaagc

SEQ ID NO: 46258 - DNA, 30 bp, Artificial Sequence
  Synthetic oligonucleotide
accaattggtgggactggccatgaacaagc

SEQ ID NO: 46259 - DNA, 30 bp, Artificial Sequence
  Synthetic oligonucleotide
cggcgccgtgcggccggaaaactcacaagc

SEQ ID NO: 46260 - DNA, 30 bp, Artificial Sequence
  Synthetic oligonucleotide
agcgctcagatagtcacaacctcgagaagc

SEQ ID NO: 46261 - DNA, 30 bp, Artificial Sequence
  Synthetic oligonucleotide
agctaaactaaacaaggacggcacggaagc

SEQ ID NO: 46262 - DNA, 30 bp, Artificial Sequence
  Synthetic oligonucleotide
ggccgagggatgctctctggccagataagc

SEQ ID NO: 46263 - DNA, 30 bp, Artificial Sequence
  Synthetic oligonucleotide
tagggctgagagcaagggtcaccgctaagc

SEQ ID NO: 46264 - DNA, 30 bp, Artificial Sequence
  Synthetic oligonucleotide
tcaatctaaaatacattaagagtagtaagc

SEQ ID NO: 46265 - DNA, 30 bp, Artificial Sequence
  Synthetic oligonucleotide
ggaatacgcatgaacctcggtccaaacagc

SEQ ID NO: 46266 - DNA, 30 bp, Artificial Sequence
  Synthetic oligonucleotide
actgataatagatcagacttcccagacagc

SEQ ID NO: 46267 - DNA, 30 bp, Artificial Sequence
  Synthetic oligonucleotide
aataaaaagcgcacgaggatgcccaccagc

SEQ ID NO: 46268 - DNA, 30 bp, Artificial Sequence
  Synthetic oligonucleotide
agtcaaatcgatctcacaattggtcccagc

SEQ ID NO: 46269 - DNA, 30 bp, Artificial Sequence
  Synthetic oligonucleotide
agcagccaagtgaagccaaacctagccagc

SEQ ID NO: 46270 - DNA, 30 bp, Artificial Sequence
  Synthetic oligonucleotide
gtgagagcgcaaatacaaggccgatccagc

SEQ ID NO: 46271 - DNA, 30 bp, Artificial Sequence
  Synthetic oligonucleotide
aatggaacaagacgatgtgcgggtagcagc

SEQ ID NO: 46272 - DNA, 30 bp, Artificial Sequence
  Synthetic oligonucleotide
cggttagacagatgtgttgactgtggcagc

SEQ ID NO: 46273 - DNA, 30 bp, Artificial Sequence
  Synthetic oligonucleotide
aaggcctaacaatggtatagtgcaatcagc

SEQ ID NO: 46274 - DNA, 30 bp, Artificial Sequence
  Synthetic oligonucleotide
gcaaaacacagcaccgaagatacattcagc

SEQ ID NO: 46275 - DNA, 30 bp, Artificial Sequence
  Synthetic oligonucleotide
cgtcctaagatcttccagtccgaaaagagc

SEQ ID NO: 46276 - DNA, 30 bp, Artificial Sequence
  Synthetic oligonucleotide
gcccatatgcgaacgaaatattaacagagc

SEQ ID NO: 46277 - DNA, 30 bp, Artificial Sequence
  Synthetic oligonucleotide
cggggtagtgatacagacggccatcagagc

SEQ ID NO: 46278 - DNA, 30 bp, Artificial Sequence
  Synthetic oligonucleotide
acgatctaggttggaaggcaggtgaggagc

SEQ ID NO: 46279 - DNA, 30 bp, Artificial Sequence
  Synthetic oligonucleotide
aggacgtaggcgggaatggagccagggagc

SEQ ID NO: 46280 - DNA, 30 bp, Artificial Sequence
  Synthetic oligonucleotide
cctggcatttcaagcgagagaagcgggagc

SEQ ID NO: 46281 - DNA, 30 bp, Artificial Sequence
  Synthetic oligonucleotide
tggatggcaaggattatgaaagtcctgagc

SEQ ID NO: 46282 - DNA, 30 bp, Artificial Sequence
  Synthetic oligonucleotide
actatgtaagtgtcagaggtcgcagtgagc

SEQ ID NO: 46283 - DNA, 30 bp, Artificial Sequence
  Synthetic oligonucleotide
ctggaaaaatgtcaaggcgcaaggttgagc

SEQ ID NO: 46284 - DNA, 30 bp, Artificial Sequence
  Synthetic oligonucleotide
gcgcaaaagcgtaccagtggtatgaatagc

SEQ ID NO: 46285 - DNA, 30 bp, Artificial Sequence
  Synthetic oligonucleotide
cctcagattagagcactaacggttaatagc

SEQ ID NO: 46286 - DNA, 30 bp, Artificial Sequence
  Synthetic oligonucleotide
gggtacgttacagtctcagaataacatagc

SEQ ID NO: 46287 - DNA, 30 bp, Artificial Sequence
  Synthetic oligonucleotide
acctacagagcttctgggcaaaagtatagc

SEQ ID NO: 46288 - DNA, 30 bp, Artificial Sequence
  Synthetic oligonucleotide
ggaagacacgacaaattttggattagtagc

SEQ ID NO: 46289 - DNA, 30 bp, Artificial Sequence
  Synthetic oligonucleotide
acatacacgagtgcaagggacactggtagc

SEQ ID NO: 46290 - DNA, 30 bp, Artificial Sequence
  Synthetic oligonucleotide
ccggttagcctgagagtgtagtgtggtagc

SEQ ID NO: 46291 - DNA, 30 bp, Artificial Sequence
  Synthetic oligonucleotide
cgggaatcgcgtataaaaggaacaaaacgc

SEQ ID NO: 46292 - DNA, 30 bp, Artificial Sequence
  Synthetic oligonucleotide
taactgaggtatgggctggcataagaacgc

SEQ ID NO: 46293 - DNA, 31 bp, Artificial Sequence
  Synthetic oligonucleotide
acaatggcaaagtgcgcctgtgaaaccacgc

SEQ ID NO: 46294 - DNA, 30 bp, Artificial Sequence
  Synthetic oligonucleotide
atggcacatggattggacttaagaccacgc

SEQ ID NO: 46295 - DNA, 30 bp, Artificial Sequence
  Synthetic oligonucleotide
gagagtaggcacgtacgcgaaaactcacgc

SEQ ID NO: 46296 - DNA, 30 bp, Artificial Sequence
  Synthetic oligonucleotide
aagactgacctggggggctggaagatacgc

SEQ ID NO: 46297 - DNA, 30 bp, Artificial Sequence
  Synthetic oligonucleotide
acgagaataaccaagttaccaagaaaccgc

SEQ ID NO: 46298 - DNA, 30 bp, Artificial Sequence
  Synthetic oligonucleotide
cgacccaatgacaaggcaagctgaaaccgc

SEQ ID NO: 46299 - DNA, 30 bp, Artificial Sequence
  Synthetic oligonucleotide
ggtaccaccccacgatcacggttgcaccgc

SEQ ID NO: 46300 - DNA, 30 bp, Artificial Sequence
  Synthetic oligonucleotide
gatcaactagagtcatagatacactaccgc

SEQ ID NO: 46301 - DNA, 30 bp, Artificial Sequence
  Synthetic oligonucleotide
ccctacacagagtgaattgctatgtaccgc

SEQ ID NO: 46302 - DNA, 30 bp, Artificial Sequence
  Synthetic oligonucleotide
acaaggacggggaacaaaacgttgcgccgc

SEQ ID NO: 46303 - DNA, 30 bp, Artificial Sequence
  Synthetic oligonucleotide
gataagctacgagcgagaccaaggatccgc

SEQ ID NO: 46304 - DNA, 30 bp, Artificial Sequence
  Synthetic oligonucleotide
cgacgcaattaatacggctgccagctccgc

SEQ ID NO: 46305 - DNA, 30 bp, Artificial Sequence
  Synthetic oligonucleotide
agtaaagcctcgcggaactatgatcagcgc

SEQ ID NO: 46306 - DNA, 30 bp, Artificial Sequence
  Synthetic oligonucleotide
gccctgaccacatgtcacagtagatagcgc

SEQ ID NO: 46307 - DNA, 30 bp, Artificial Sequence
  Synthetic oligonucleotide
agcctacaacctacgagtgaagatacgcgc

SEQ ID NO: 46308 - DNA, 30 bp, Artificial Sequence
  Synthetic oligonucleotide
cctcgcatcgttacaacgagattcccgcgc

SEQ ID NO: 46309 - DNA, 30 bp, Artificial Sequence
  Synthetic oligonucleotide
tgcaaccccgaagagaccataccatcgcgc

SEQ ID NO: 46310 - DNA, 30 bp, Artificial Sequence
  Synthetic oligonucleotide
cttaaccgacacggacgaaagtcatcgcgc

SEQ ID NO: 46311 - DNA, 30 bp, Artificial Sequence
  Synthetic oligonucleotide
agatgagagcactatacggtgcgatggcgc

SEQ ID NO: 46312 - DNA, 30 bp, Artificial Sequence
  Synthetic oligonucleotide
atgatagaactattgaaatgtgtaatgcgc

SEQ ID NO: 46313 - DNA, 30 bp, Artificial Sequence
  Synthetic oligonucleotide
acgccgataaggcgtttatctggcatgcgc

SEQ ID NO: 46314 - DNA, 30 bp, Artificial Sequence
  Synthetic oligonucleotide
caatatgcacatacggaactcaacgtgcgc

SEQ ID NO: 46315 - DNA, 30 bp, Artificial Sequence
  Synthetic oligonucleotide
gttgagagggtgcgcactgtggcgaatcgc

SEQ ID NO: 46316 - DNA, 30 bp, Artificial Sequence
  Synthetic oligonucleotide
aggcgacaaagattaaaggtgtataatcgc

SEQ ID NO: 46317 - DNA, 30 bp, Artificial Sequence
  Synthetic oligonucleotide
cctcgagccgacttcgaggataaggatcgc

SEQ ID NO: 46318 - DNA, 30 bp, Artificial Sequence
  Synthetic oligonucleotide
agggaaccattatatgagtaatgctatcgc

SEQ ID NO: 46319 - DNA, 30 bp, Artificial Sequence
  Synthetic oligonucleotide
cggggcagagtgatattttacatacctcgc

SEQ ID NO: 46320 - DNA, 30 bp, Artificial Sequence
  Synthetic oligonucleotide
ggaggtacttataataaccccagatctcgc

SEQ ID NO: 46321 - DNA, 30 bp, Artificial Sequence
  Synthetic oligonucleotide
cggacacttgaaagagatagtccgtctcgc

SEQ ID NO: 46322 - DNA, 30 bp, Artificial Sequence
  Synthetic oligonucleotide
gaggcgtaatgatggttcgcgagcagtcgc

SEQ ID NO: 46323 - DNA, 30 bp, Artificial Sequence
  Synthetic oligonucleotide
acgggaactccgtttgcgcgggcccgtcgc

SEQ ID NO: 46324 - DNA, 30 bp, Artificial Sequence
  Synthetic oligonucleotide
acgaacttaaccatcaaaatggtctttcgc

SEQ ID NO: 46325 - DNA, 30 bp, Artificial Sequence
  Synthetic oligonucleotide
gtgtgatgtaagtgctgggcagagaaaggc

SEQ ID NO: 46326 - DNA, 30 bp, Artificial Sequence
  Synthetic oligonucleotide
atgtgaattcggatgatgggtgaacaaggc

SEQ ID NO: 46327 - DNA, 30 bp, Artificial Sequence
  Synthetic oligonucleotide
gatcatagaacattcatgccagcgcaaggc

SEQ ID NO: 46328 - DNA, 30 bp, Artificial Sequence
  Synthetic oligonucleotide
ccgaagggtccgcaatgtataggagaaggc

SEQ ID NO: 46329 - DNA, 30 bp, Artificial Sequence
  Synthetic oligonucleotide
gcggacagcaccaggggggacaactaaggc

SEQ ID NO: 46330 - DNA, 30 bp, Artificial Sequence
  Synthetic oligonucleotide
cgtgggaatccatctaagggtcgtacaggc

SEQ ID NO: 46331 - DNA, 30 bp, Artificial Sequence
  Synthetic oligonucleotide
tcatcgacacttgtgattcagggtgcaggc

SEQ ID NO: 46332 - DNA, 30 bp, Artificial Sequence
  Synthetic oligonucleotide
acaataggaaaagcgtttataaagtgaggc

SEQ ID NO: 46333 - DNA, 30 bp, Artificial Sequence
  Synthetic oligonucleotide
taaccgtcgagaaaggtacgctgaataggc

SEQ ID NO: 46334 - DNA, 30 bp, Artificial Sequence
  Synthetic oligonucleotide
acgatgttctatccattacagcaggtaggc

SEQ ID NO: 46335 - DNA, 30 bp, Artificial Sequence
  Synthetic oligonucleotide
aaggctcgaaagctgatgttacactacggc

SEQ ID NO: 46336 - DNA, 30 bp, Artificial Sequence
  Synthetic oligonucleotide
tgtcgtggggagtcaactaaatcgtacggc

SEQ ID NO: 46337 - DNA, 31 bp, Artificial Sequence
  Synthetic oligonucleotide
atatggatcgacaaaatagagaggagccggc

SEQ ID NO: 46338 - DNA, 30 bp, Artificial Sequence
  Synthetic oligonucleotide
ccagcgggtcacaagcagaatagtcgcggc

SEQ ID NO: 46339 - DNA, 30 bp, Artificial Sequence
  Synthetic oligonucleotide
gcacaacagggcaactgcttatgaatcggc

SEQ ID NO: 46340 - DNA, 30 bp, Artificial Sequence
  Synthetic oligonucleotide
tgacaccaagtatcctctgaccaactcggc

SEQ ID NO: 46341 - DNA, 30 bp, Artificial Sequence
  Synthetic oligonucleotide
ggattgatcacgtaacccaaaacattcggc

SEQ ID NO: 46342 - DNA, 30 bp, Artificial Sequence
  Synthetic oligonucleotide
atacgacggtgagatggacaccacttcggc

SEQ ID NO: 46343 - DNA, 30 bp, Artificial Sequence
  Synthetic oligonucleotide
cgagctgacatgaataccacgacgttcggc

SEQ ID NO: 46344 - DNA, 30 bp, Artificial Sequence
  Synthetic oligonucleotide
acgtaacacttaagctccccacgccagggc

SEQ ID NO: 46345 - DNA, 30 bp, Artificial Sequence
  Synthetic oligonucleotide
aaaggcggaataaatctaacggtagtgggc

SEQ ID NO: 46346 - DNA, 30 bp, Artificial Sequence
  Synthetic oligonucleotide
gacaacatatagatgaaaggggtcgtgggc

SEQ ID NO: 46347 - DNA, 30 bp, Artificial Sequence
  Synthetic oligonucleotide
gttgctagcgaagagaaaattcaggtgggc

SEQ ID NO: 46348 - DNA, 30 bp, Artificial Sequence
  Synthetic oligonucleotide
tcaagccatgtgtaccaagtagaggtgggc

SEQ ID NO: 46349 - DNA, 30 bp, Artificial Sequence
  Synthetic oligonucleotide
aagaagggcttacacgcctagaccttgggc

SEQ ID NO: 46350 - DNA, 30 bp, Artificial Sequence
  Synthetic oligonucleotide
tgcgccatatgagagggaagaagaaatggc

SEQ ID NO: 46351 - DNA, 30 bp, Artificial Sequence
  Synthetic oligonucleotide
acatacagacccataatactctaccatggc

SEQ ID NO: 46352 - DNA, 30 bp, Artificial Sequence
  Synthetic oligonucleotide
cgctacacggacagaggataagccgatggc

SEQ ID NO: 46353 - DNA, 30 bp, Artificial Sequence
  Synthetic oligonucleotide
tggcgatgactccggggctaacgagctggc

SEQ ID NO: 46354 - DNA, 30 bp, Artificial Sequence
  Synthetic oligonucleotide
gtagggcggatataggacacactaggtggc

SEQ ID NO: 46355 - DNA, 30 bp, Artificial Sequence
  Synthetic oligonucleotide
acgtggaaatgcaaaataaaggttattggc

SEQ ID NO: 46356 - DNA, 30 bp, Artificial Sequence
  Synthetic oligonucleotide
gcgagatgctttctgctcaaccagcttggc

SEQ ID NO: 46357 - DNA, 30 bp, Artificial Sequence
  Synthetic oligonucleotide
aaaccaagaaacgggtggcgtgccaaatgc

SEQ ID NO: 46358 - DNA, 30 bp, Artificial Sequence
  Synthetic oligonucleotide
caggcaggtaaagaacgaaaaagtaaatgc

SEQ ID NO: 46359 - DNA, 30 bp, Artificial Sequence
  Synthetic oligonucleotide
ctaggtgaactcctcacttaaaacacatgc

SEQ ID NO: 46360 - DNA, 30 bp, Artificial Sequence
  Synthetic oligonucleotide
acagggggtcgtatgactagaattccatgc

SEQ ID NO: 46361 - DNA, 30 bp, Artificial Sequence
  Synthetic oligonucleotide
agtgatatacaaaacgggaataaaggatgc

SEQ ID NO: 46362 - DNA, 30 bp, Artificial Sequence
  Synthetic oligonucleotide
gccgaacgagtgtggaagcattagctatgc

SEQ ID NO: 46363 - DNA, 31 bp, Artificial Sequence
  Synthetic oligonucleotide
caacggtgtatggatatcaacagaggtatgc

SEQ ID NO: 46364 - DNA, 30 bp, Artificial Sequence
  Synthetic oligonucleotide
gggccgagatgcaaactggggtctaactgc

SEQ ID NO: 46365 - DNA, 30 bp, Artificial Sequence
  Synthetic oligonucleotide
tgaccgccccaacaacaaatctggcactgc

SEQ ID NO: 46366 - DNA, 30 bp, Artificial Sequence
  Synthetic oligonucleotide
aagcgaatacatacaaagtggaatcactgc

SEQ ID NO: 46367 - DNA, 30 bp, Artificial Sequence
  Synthetic oligonucleotide
cgatccccaccacgatgatactatcactgc

SEQ ID NO: 46368 - DNA, 30 bp, Artificial Sequence
  Synthetic oligonucleotide
cgggaaaacgcctaacgaaacggtcactgc

SEQ ID NO: 46369 - DNA, 30 bp, Artificial Sequence
  Synthetic oligonucleotide
gctaacacatctaccataggctcggactgc

SEQ ID NO: 46370 - DNA, 30 bp, Artificial Sequence
  Synthetic oligonucleotide
aagaaaagagaggggtgaagtaggacctgc

SEQ ID NO: 46371 - DNA, 30 bp, Artificial Sequence
  Synthetic oligonucleotide
gcgaggtaggatgttcactgcgaggcctgc

SEQ ID NO: 46372 - DNA, 30 bp, Artificial Sequence
  Synthetic oligonucleotide
acgaggtctagcatgcgtggtcattcctgc

SEQ ID NO: 46373 - DNA, 30 bp, Artificial Sequence
  Synthetic oligonucleotide
gagaccaaactgcggatggagggtcgctgc

SEQ ID NO: 46374 - DNA, 30 bp, Artificial Sequence
  Synthetic oligonucleotide
acggcccgtgtgtgaatgctctagtgctgc

SEQ ID NO: 46375 - DNA, 30 bp, Artificial Sequence
  Synthetic oligonucleotide
aacgatatagcgaatgctttagttctctgc

SEQ ID NO: 46376 - DNA, 30 bp, Artificial Sequence
  Synthetic oligonucleotide
cctcgaccgaaccaaagctggataaagtgc

SEQ ID NO: 46377 - DNA, 30 bp, Artificial Sequence
  Synthetic oligonucleotide
cagggactattatgagggtgaccagagtgc

SEQ ID NO: 46378 - DNA, 30 bp, Artificial Sequence
  Synthetic oligonucleotide
aggcctgagtgcccgtgccattatgagtgc

SEQ ID NO: 46379 - DNA, 30 bp, Artificial Sequence
  Synthetic oligonucleotide
gttggataagaaactaagaacctcgcgtgc

SEQ ID NO: 46380 - DNA, 30 bp, Artificial Sequence
  Synthetic oligonucleotide
cgaaacaaatatcgcattaacatctcgtgc

SEQ ID NO: 46381 - DNA, 30 bp, Artificial Sequence
  Synthetic oligonucleotide
atacacaacgggaaacttacccagtcgtgc

SEQ ID NO: 46382 - DNA, 30 bp, Artificial Sequence
  Synthetic oligonucleotide
catgaatgagagtcaactcaggagcggtgc

SEQ ID NO: 46383 - DNA, 30 bp, Artificial Sequence
  Synthetic oligonucleotide
aaggcgatactagcgtcaaccggatggtgc

SEQ ID NO: 46384 - DNA, 30 bp, Artificial Sequence
  Synthetic oligonucleotide
tggaccttggttcaaacgtaaacggtgtgc

SEQ ID NO: 46385 - DNA, 30 bp, Artificial Sequence
  Synthetic oligonucleotide
tgccgcgtcgggcggtcgatccaattgtgc

SEQ ID NO: 46386 - DNA, 30 bp, Artificial Sequence
  Synthetic oligonucleotide
tggatcgcggggcgtataaccaaaacttgc

SEQ ID NO: 46387 - DNA, 30 bp, Artificial Sequence
  Synthetic oligonucleotide
ttacaaaaagcagtgagctcacgaatttgc

SEQ ID NO: 46388 - DNA, 30 bp, Artificial Sequence
  Synthetic oligonucleotide
aaggggcatgacctcgtgaaatggctttgc

SEQ ID NO: 46389 - DNA, 30 bp, Artificial Sequence
  Synthetic oligonucleotide
tggaataaatcgagaacagcagaacaaatc

SEQ ID NO: 46390 - DNA, 30 bp, Artificial Sequence
  Synthetic oligonucleotide
aacgaagatgtgctatcaattaatcaaatc

SEQ ID NO: 46391 - DNA, 30 bp, Artificial Sequence
  Synthetic oligonucleotide
ggcaaaataaaattcggacgtagggaaatc

SEQ ID NO: 46392 - DNA, 30 bp, Artificial Sequence
  Synthetic oligonucleotide
cacaaaagaatctacagtgaatcaccaatc

SEQ ID NO: 46393 - DNA, 30 bp, Artificial Sequence
  Synthetic oligonucleotide
ggtcggctgtgttaaaggctcgatccaatc

SEQ ID NO: 46394 - DNA, 30 bp, Artificial Sequence
  Synthetic oligonucleotide
ggtgacatgcggctgactaagactccaatc

SEQ ID NO: 46395 - DNA, 30 bp, Artificial Sequence
  Synthetic oligonucleotide
gctaagaactgcatgattccgcgacgaatc

SEQ ID NO: 46396 - DNA, 30 bp, Artificial Sequence
  Synthetic oligonucleotide
cgcgattagagagacacagttatacgaatc

SEQ ID NO: 46397 - DNA, 30 bp, Artificial Sequence
  Synthetic oligonucleotide
gtacgtcgactgcgcgtaggtgccggaatc

SEQ ID NO: 46398 - DNA, 30 bp, Artificial Sequence
  Synthetic oligonucleotide
aaagaacctccagagagggtgccgggaatc

SEQ ID NO: 46399 - DNA, 30 bp, Artificial Sequence
  Synthetic oligonucleotide
cggtagccaaccgggtgaagagtgggaatc

SEQ ID NO: 46400 - DNA, 30 bp, Artificial Sequence
  Synthetic oligonucleotide
ccgtagcacaggttcgtacacacttgaatc

SEQ ID NO: 46401 - DNA, 30 bp, Artificial Sequence
  Synthetic oligonucleotide
tcgagtgttaaggatgggggtagtctaatc

SEQ ID NO: 46402 - DNA, 30 bp, Artificial Sequence
  Synthetic oligonucleotide
gtacttcctgagaacaacacaccgcacatc

SEQ ID NO: 46403 - DNA, 30 bp, Artificial Sequence
  Synthetic oligonucleotide
agaggggcggacgttatgactgatcacatc

SEQ ID NO: 46404 - DNA, 30 bp, Artificial Sequence
  Synthetic oligonucleotide
tagaggtgacgtggatttagaaaagacatc

SEQ ID NO: 46405 - DNA, 30 bp, Artificial Sequence
  Synthetic oligonucleotide
gagcgaaaccaacctgaaggaattgacatc

SEQ ID NO: 46406 - DNA, 30 bp, Artificial Sequence
  Synthetic oligonucleotide
taggacaggattttcgtcagaaggtacatc

SEQ ID NO: 46407 - DNA, 30 bp, Artificial Sequence
  Synthetic oligonucleotide
actagagaagacccaaccgatcaacccatc

SEQ ID NO: 46408 - DNA, 30 bp, Artificial Sequence
  Synthetic oligonucleotide
gaggaattaaaaccgttgtaaatagccatc

SEQ ID NO: 46409 - DNA, 30 bp, Artificial Sequence
  Synthetic oligonucleotide
ggggaaccatttcaacagattcaatccatc

SEQ ID NO: 46410 - DNA, 30 bp, Artificial Sequence
  Synthetic oligonucleotide
attcaggcacacctaagaaacgggagcatc

SEQ ID NO: 46411 - DNA, 30 bp, Artificial Sequence
  Synthetic oligonucleotide
agcagggaacggataggtaataaaggcatc

SEQ ID NO: 46412 - DNA, 30 bp, Artificial Sequence
  Synthetic oligonucleotide
acatcatactcaaaccagtataaatgcatc

SEQ ID NO: 46413 - DNA, 30 bp, Artificial Sequence
  Synthetic oligonucleotide
acgaagagggtctacccaatgtagatcatc

SEQ ID NO: 46414 - DNA, 30 bp, Artificial Sequence
  Synthetic oligonucleotide
ctcaaaacccaccaagctaataacaagatc

SEQ ID NO: 46415 - DNA, 30 bp, Artificial Sequence
  Synthetic oligonucleotide
atgggcgcacccgggccaattgacaagatc

SEQ ID NO: 46416 - DNA, 30 bp, Artificial Sequence
  Synthetic oligonucleotide
acagcacagcacagagtgcgattccagatc

SEQ ID NO: 46417 - DNA, 30 bp, Artificial Sequence
  Synthetic oligonucleotide
ggaggctggcgcacaaagaatgaagagatc

SEQ ID NO: 46418 - DNA, 30 bp, Artificial Sequence
  Synthetic oligonucleotide
ggcaattgtacgaaacgtgtgactgagatc

SEQ ID NO: 46419 - DNA, 30 bp, Artificial Sequence
  Synthetic oligonucleotide
cccaaccatgagaagctaataaatccgatc

SEQ ID NO: 46420 - DNA, 30 bp, Artificial Sequence
  Synthetic oligonucleotide
caaggtccaacgaatacagtatgcaggatc

SEQ ID NO: 46421 - DNA, 30 bp, Artificial Sequence
  Synthetic oligonucleotide
atgaagcgtcaaaggagtagaacagggatc

SEQ ID NO: 46422 - DNA, 30 bp, Artificial Sequence
  Synthetic oligonucleotide
accaaggggtgtcgccttaatgtagtgatc

SEQ ID NO: 46423 - DNA, 30 bp, Artificial Sequence
  Synthetic oligonucleotide
ggggaggtgaggtgaaatcagcccgtgatc

SEQ ID NO: 46424 - DNA, 30 bp, Artificial Sequence
  Synthetic oligonucleotide
cgtgagaaacggcatacggcccagttgatc

SEQ ID NO: 46425 - DNA, 30 bp, Artificial Sequence
  Synthetic oligonucleotide
tcaggagtaaaggctcataggtacaatatc

SEQ ID NO: 46426 - DNA, 30 bp, Artificial Sequence
  Synthetic oligonucleotide
taagggacacgcgtgaaaggaactcctatc

SEQ ID NO: 46427 - DNA, 30 bp, Artificial Sequence
  Synthetic oligonucleotide
aaccaagggattaaaaggcgaatagctatc

SEQ ID NO: 46428 - DNA, 30 bp, Artificial Sequence
  Synthetic oligonucleotide
tcggatcgaagcataagtccgagaagtatc

SEQ ID NO: 46429 - DNA, 30 bp, Artificial Sequence
  Synthetic oligonucleotide
gggagctgaggagagtcagagatatgtatc

SEQ ID NO: 46430 - DNA, 30 bp, Artificial Sequence
  Synthetic oligonucleotide
tgagactgtatgctatacggaagggttatc

SEQ ID NO: 46431 - DNA, 30 bp, Artificial Sequence
  Synthetic oligonucleotide
gtagatcgaggtattaagggggcgtcactc

SEQ ID NO: 46432 - DNA, 30 bp, Artificial Sequence
  Synthetic oligonucleotide
cgtatgcattaaaaactatacggcagactc

SEQ ID NO: 46433 - DNA, 30 bp, Artificial Sequence
  Synthetic oligonucleotide
caacaaaacacctcgtgctgaaacggactc

SEQ ID NO: 46434 - DNA, 30 bp, Artificial Sequence
  Synthetic oligonucleotide
ggactacgactatcggcgaactattgactc

SEQ ID NO: 46435 - DNA, 30 bp, Artificial Sequence
  Synthetic oligonucleotide
acaagcgcaggtaggcacgacgaattactc

SEQ ID NO: 46436 - DNA, 30 bp, Artificial Sequence
  Synthetic oligonucleotide
agaaaaccaaaaaaggaagtcgccaccctc

SEQ ID NO: 46437 - DNA, 30 bp, Artificial Sequence
  Synthetic oligonucleotide
gctgcgaagtgtgtcaggaccgaatccctc

SEQ ID NO: 46438 - DNA, 31 bp, Artificial Sequence
  Synthetic oligonucleotide
aacgtcagatcattctacatgagtgtgcctc

SEQ ID NO: 46439 - DNA, 30 bp, Artificial Sequence
  Synthetic oligonucleotide
ccgttagccttgccgtccaaagcccagctc

SEQ ID NO: 46440 - DNA, 30 bp, Artificial Sequence
  Synthetic oligonucleotide
agcgcacgatgagacacataaaatcggctc

SEQ ID NO: 46441 - DNA, 30 bp, Artificial Sequence
  Synthetic oligonucleotide
acctacaccataaatagtaaacttcggctc

SEQ ID NO: 46442 - DNA, 30 bp, Artificial Sequence
  Synthetic oligonucleotide
cgttcgacaatgaagttctcgatatggctc

SEQ ID NO: 46443 - DNA, 31 bp, Artificial Sequence
  Synthetic oligonucleotide
cgacatgtctccaatcgagttggcatatctc

SEQ ID NO: 46444 - DNA, 30 bp, Artificial Sequence
  Synthetic oligonucleotide
agataaaggtcaaaaagccggacagctctc

SEQ ID NO: 46445 - DNA, 30 bp, Artificial Sequence
  Synthetic oligonucleotide
cgactccacaacttgtaaattcggcgtctc

SEQ ID NO: 46446 - DNA, 30 bp, Artificial Sequence
  Synthetic oligonucleotide
acaagcacccattgtaaggtctgtcaagtc

SEQ ID NO: 46447 - DNA, 30 bp, Artificial Sequence
  Synthetic oligonucleotide
caacattgggagtcgttactaattgaagtc

SEQ ID NO: 46448 - DNA, 30 bp, Artificial Sequence
  Synthetic oligonucleotide
ggcatggctcggtcttaaatcgttgaagtc

SEQ ID NO: 46449 - DNA, 30 bp, Artificial Sequence
  Synthetic oligonucleotide
agggaaggtgctcccagaatgttgcgagtc

SEQ ID NO: 46450 - DNA, 30 bp, Artificial Sequence
  Synthetic oligonucleotide
agggccgagccctagtagaaattcggagtc

SEQ ID NO: 46451 - DNA, 30 bp, Artificial Sequence
  Synthetic oligonucleotide
gacggcgaaagcattgatgacagtggagtc

SEQ ID NO: 46452 - DNA, 30 bp, Artificial Sequence
  Synthetic oligonucleotide
cacggagagttcacagattctgaagtagtc

SEQ ID NO: 46453 - DNA, 30 bp, Artificial Sequence
  Synthetic oligonucleotide
aaaggcatacatttagtcaaaatcgtagtc

SEQ ID NO: 46454 - DNA, 30 bp, Artificial Sequence
  Synthetic oligonucleotide
ggtacggatcgttaaagcatggtggtagtc

SEQ ID NO: 46455 - DNA, 30 bp, Artificial Sequence
  Synthetic oligonucleotide
tgcaaggggccgaaactctggtgtgtagtc

SEQ ID NO: 46456 - DNA, 30 bp, Artificial Sequence
  Synthetic oligonucleotide
acgcgagcaactgccgaattagaacacgtc

SEQ ID NO: 46457 - DNA, 30 bp, Artificial Sequence
  Synthetic oligonucleotide
aggaacactgggggtagtaccgtacacgtc

SEQ ID NO: 46458 - DNA, 30 bp, Artificial Sequence
  Synthetic oligonucleotide
ttccaaaggacgggtgtaaataaagccgtc

SEQ ID NO: 46459 - DNA, 30 bp, Artificial Sequence
  Synthetic oligonucleotide
ctagcgaaacggtagaccaaaccgagcgtc

SEQ ID NO: 46460 - DNA, 30 bp, Artificial Sequence
  Synthetic oligonucleotide
atgatccggccgcagggcaaaaagtgcgtc

SEQ ID NO: 46461 - DNA, 30 bp, Artificial Sequence
  Synthetic oligonucleotide
cacagccagcggtaaggccgtatgctcgtc

SEQ ID NO: 46462 - DNA, 30 bp, Artificial Sequence
  Synthetic oligonucleotide
cactaagaagttgggtcaacgaatctcgtc

SEQ ID NO: 46463 - DNA, 30 bp, Artificial Sequence
  Synthetic oligonucleotide
cgagttgcacctgacttactaagattcgtc

SEQ ID NO: 46464 - DNA, 30 bp, Artificial Sequence
  Synthetic oligonucleotide
aggtcaggcgatctaaatgctcaagaggtc

SEQ ID NO: 46465 - DNA, 30 bp, Artificial Sequence
  Synthetic oligonucleotide
tcatagcttcaagggtaggcccgagaggtc

SEQ ID NO: 46466 - DNA, 30 bp, Artificial Sequence
  Synthetic oligonucleotide
cagtgcaagtccccgggaagaatcgaggtc

SEQ ID NO: 46467 - DNA, 30 bp, Artificial Sequence
  Synthetic oligonucleotide
ctgcgagttagtgctggatcgttaggggtc

SEQ ID NO: 46468 - DNA, 30 bp, Artificial Sequence
  Synthetic oligonucleotide
caatacattcaggtgcaacgagatggggtc

SEQ ID NO: 46469 - DNA, 30 bp, Artificial Sequence
  Synthetic oligonucleotide
ggagaaggcatatagcaacgagtttgggtc

SEQ ID NO: 46470 - DNA, 30 bp, Artificial Sequence
  Synthetic oligonucleotide
agtttcgaacggtgagcaacgagaatggtc

SEQ ID NO: 46471 - DNA, 30 bp, Artificial Sequence
  Synthetic oligonucleotide
agtagcataatccaccgagataagtatgtc

SEQ ID NO: 46472 - DNA, 30 bp, Artificial Sequence
  Synthetic oligonucleotide
cgtcacataagcaatatctcgaagagtgtc

SEQ ID NO: 46473 - DNA, 30 bp, Artificial Sequence
  Synthetic oligonucleotide
acatcccaaggtttcaaaggcgtcggtgtc

SEQ ID NO: 46474 - DNA, 30 bp, Artificial Sequence
  Synthetic oligonucleotide
cgacaaagtgtaaaaggtcagagtattgtc

SEQ ID NO: 46475 - DNA, 30 bp, Artificial Sequence
  Synthetic oligonucleotide
gacgtctggtaggtgatgtagatacttgtc

SEQ ID NO: 46476 - DNA, 30 bp, Artificial Sequence
  Synthetic oligonucleotide
attatcggcgtcgggaaaggaacacaattc

SEQ ID NO: 46477 - DNA, 30 bp, Artificial Sequence
  Synthetic oligonucleotide
cgggatggggtactccctaaagagcaattc

SEQ ID NO: 46478 - DNA, 30 bp, Artificial Sequence
  Synthetic oligonucleotide
cgctagaaaacagaagtccctaaagcattc

SEQ ID NO: 46479 - DNA, 30 bp, Artificial Sequence
  Synthetic oligonucleotide
tatcacgggaacgatacaggtccagcattc

SEQ ID NO: 46480 - DNA, 30 bp, Artificial Sequence
  Synthetic oligonucleotide
gggcttcacgaggtaatcaagagagcattc

SEQ ID NO: 46481 - DNA, 30 bp, Artificial Sequence
  Synthetic oligonucleotide
aggaaatctggacggtatcatgtcaacttc

SEQ ID NO: 46482 - DNA, 30 bp, Artificial Sequence
  Synthetic oligonucleotide
tacgtgatcgtgcccgagggtggccagttc

SEQ ID NO: 46483 - DNA, 30 bp, Artificial Sequence
  Synthetic oligonucleotide
agcggtcgtggcatctaacgcaaatagttc

SEQ ID NO: 46484 - DNA, 30 bp, Artificial Sequence
  Synthetic oligonucleotide
aacgcacaagacgagggggagtaacggttc

SEQ ID NO: 46485 - DNA, 30 bp, Artificial Sequence
  Synthetic oligonucleotide
aacgggcacacaccaccagtgaagactttc

SEQ ID NO: 46486 - DNA, 30 bp, Artificial Sequence
  Synthetic oligonucleotide
gcgggaaatgcgcatgtaatcagacctttc

SEQ ID NO: 46487 - DNA, 30 bp, Artificial Sequence
  Synthetic oligonucleotide
gcagggagaacccaaaatgaggtgtgtttc

SEQ ID NO: 46488 - DNA, 30 bp, Artificial Sequence
  Synthetic oligonucleotide
ggcctgaaaagtagcagtaggggcaaaaag

SEQ ID NO: 46489 - DNA, 35 bp, Artificial Sequence
  Synthetic oligonucleotide
tgtataagcctggtgccaagactggggcgaaaaag

SEQ ID NO: 46490 - DNA, 30 bp, Artificial Sequence
  Synthetic oligonucleotide
atagaggcacgaaccggctagcctaaaaag

SEQ ID NO: 46491 - DNA, 30 bp, Artificial Sequence
  Synthetic oligonucleotide
acagtgatgtgccgacaggacggacaaaag

SEQ ID NO: 46492 - DNA, 30 bp, Artificial Sequence
  Synthetic oligonucleotide
ggaaatctacgcatcggaagtctgcaaaag

SEQ ID NO: 46493 - DNA, 30 bp, Artificial Sequence
  Synthetic oligonucleotide
aaagacgaagctgtcttcaccacggaaaag

SEQ ID NO: 46494 - DNA, 30 bp, Artificial Sequence
  Synthetic oligonucleotide
gaggaatagtttaatagaaatccggaaaag

SEQ ID NO: 46495 - DNA, 30 bp, Artificial Sequence
  Synthetic oligonucleotide
tgccaatgcagagtttgttgtcgggaaaag

SEQ ID NO: 46496 - DNA, 30 bp, Artificial Sequence
  Synthetic oligonucleotide
acgctacgtttggatcttgcgcaataaaag

SEQ ID NO: 46497 - DNA, 30 bp, Artificial Sequence
  Synthetic oligonucleotide
gacgtccgggtctatacggtaggttaaaag

SEQ ID NO: 46498 - DNA, 30 bp, Artificial Sequence
  Synthetic oligonucleotide
ccgcgggaaaatgtaccgtggcgcacaaag

SEQ ID NO: 46499 - DNA, 30 bp, Artificial Sequence
  Synthetic oligonucleotide
atgaaaatgagcaccttaaaattaccaaag

SEQ ID NO: 46500 - DNA, 30 bp, Artificial Sequence
  Synthetic oligonucleotide
cggggtccgcctgcggttggcatgccaaag

SEQ ID NO: 46501 - DNA, 30 bp, Artificial Sequence
  Synthetic oligonucleotide
tgccgggactgacattataatctcgcaaag

SEQ ID NO: 46502 - DNA, 30 bp, Artificial Sequence
  Synthetic oligonucleotide
gctgaacggcgggcgataaggaagtcaaag

SEQ ID NO: 46503 - DNA, 30 bp, Artificial Sequence
  Synthetic oligonucleotide
cgtcaattggtgactatacaatattcaaag

SEQ ID NO: 46504 - DNA, 30 bp, Artificial Sequence
  Synthetic oligonucleotide
taatgttgggcggtccacagccatagaaag

SEQ ID NO: 46505 - DNA, 30 bp, Artificial Sequence
  Synthetic oligonucleotide
cgtaaacgccccagacagatagctagaaag

SEQ ID NO: 46506 - DNA, 30 bp, Artificial Sequence
  Synthetic oligonucleotide
ctaggcgtgcgtacaaagcagaagggaaag

SEQ ID NO: 46507 - DNA, 30 bp, Artificial Sequence
  Synthetic oligonucleotide
atgagtagagcgaggagttcccgtggaaag

SEQ ID NO: 46508 - DNA, 30 bp, Artificial Sequence
  Synthetic oligonucleotide
tgacaggatgtacatacttggtagataaag

SEQ ID NO: 46509 - DNA, 30 bp, Artificial Sequence
  Synthetic oligonucleotide
atcgatccattgggctgagccgggataaag

SEQ ID NO: 46510 - DNA, 30 bp, Artificial Sequence
  Synthetic oligonucleotide
caataaagccatagtaaagtagcgctaaag

SEQ ID NO: 46511 - DNA, 30 bp, Artificial Sequence
  Synthetic oligonucleotide
cacgagatgcgatactcctgcacagtaaag

SEQ ID NO: 46512 - DNA, 30 bp, Artificial Sequence
  Synthetic oligonucleotide
atctgcagacagtacagggaacgggtaaag

SEQ ID NO: 46513 - DNA, 38 bp, Artificial Sequence
  Synthetic oligonucleotide
atgtctaggctccaatctataaggtgcgactaaacaag

SEQ ID NO: 46514 - DNA, 30 bp, Artificial Sequence
  Synthetic oligonucleotide
tcactggcgattagatctactaagaacaag

SEQ ID NO: 46515 - DNA, 30 bp, Artificial Sequence
  Synthetic oligonucleotide
gtatcacaatccaggcatagggctaacaag

SEQ ID NO: 46516 - DNA, 30 bp, Artificial Sequence
  Synthetic oligonucleotide
gttctaccgcatgtaaacgaataggacaag

SEQ ID NO: 46517 - DNA, 30 bp, Artificial Sequence
  Synthetic oligonucleotide
gccataaactaacgcgtaagcaatgacaag

SEQ ID NO: 46518 - DNA, 30 bp, Artificial Sequence
  Synthetic oligonucleotide
cgaaacgagaaaccgttaaagtcatacaag

SEQ ID NO: 46519 - DNA, 30 bp, Artificial Sequence
  Synthetic oligonucleotide
ggcgagtgtcgacacttagcgacaaccaag

SEQ ID NO: 46520 - DNA, 30 bp, Artificial Sequence
  Synthetic oligonucleotide
aaaggtaacgcctggtgctctcatcccaag

SEQ ID NO: 46521 - DNA, 30 bp, Artificial Sequence
  Synthetic oligonucleotide
ctggtgaaaaggggtgaggcacgtcccaag

SEQ ID NO: 46522 - DNA, 30 bp, Artificial Sequence
  Synthetic oligonucleotide
aaccccgaatcataagtaaggttggccaag

SEQ ID NO: 46523 - DNA, 30 bp, Artificial Sequence
  Synthetic oligonucleotide
gaccagtcaaacgcggaattaaagtccaag

SEQ ID NO: 46524 - DNA, 30 bp, Artificial Sequence
  Synthetic oligonucleotide
ggtaatcgacattctaaatacgaaggcaag

SEQ ID NO: 46525 - DNA, 30 bp, Artificial Sequence
  Synthetic oligonucleotide
actagattgaaaaactaaaagacgggcaag

SEQ ID NO: 46526 - DNA, 30 bp, Artificial Sequence
  Synthetic oligonucleotide
aggagccaatgtttaatgggcaattgcaag

SEQ ID NO: 46527 - DNA, 30 bp, Artificial Sequence
  Synthetic oligonucleotide
cgactcactaacgagccgcacgttctcaag

SEQ ID NO: 46528 - DNA, 30 bp, Artificial Sequence
  Synthetic oligonucleotide
gtgttccatttgggtcggggaaggaagaag

SEQ ID NO: 46529 - DNA, 30 bp, Artificial Sequence
  Synthetic oligonucleotide
gtccgctgttggatacgtacgtcccagaag

SEQ ID NO: 46530 - DNA, 30 bp, Artificial Sequence
  Synthetic oligonucleotide
gtttggggtggtcgtgcacaaagccagaag

SEQ ID NO: 46531 - DNA, 30 bp, Artificial Sequence
  Synthetic oligonucleotide
ggcacaaagtgctgccaaacgtcgcagaag

SEQ ID NO: 46532 - DNA, 30 bp, Artificial Sequence
  Synthetic oligonucleotide
tcacgccctacccgagcgtgggacgagaag

SEQ ID NO: 46533 - DNA, 30 bp, Artificial Sequence
  Synthetic oligonucleotide
cacagtcgaaggttaattgacccggagaag

SEQ ID NO: 46534 - DNA, 30 bp, Artificial Sequence
  Synthetic oligonucleotide
aagtgaaggaaggggaggatgtcggagaag

SEQ ID NO: 46535 - DNA, 30 bp, Artificial Sequence
  Synthetic oligonucleotide
accgaaacgtgaattagtgcttgggagaag

SEQ ID NO: 46536 - DNA, 30 bp, Artificial Sequence
  Synthetic oligonucleotide
acgtaacagcaaccgaatgagctctagaag

SEQ ID NO: 46537 - DNA, 30 bp, Artificial Sequence
  Synthetic oligonucleotide
atgataggcataggtttggtattctagaag

SEQ ID NO: 46538 - DNA, 30 bp, Artificial Sequence
  Synthetic oligonucleotide
aaggcgtgcaggaaaaaacccggtacgaag

SEQ ID NO: 46539 - DNA, 30 bp, Artificial Sequence
  Synthetic oligonucleotide
tccataagttacatcggcagggacccgaag

SEQ ID NO: 46540 - DNA, 30 bp, Artificial Sequence
  Synthetic oligonucleotide
agattaagaaagtacatagctcgagcgaag

SEQ ID NO: 46541 - DNA, 30 bp, Artificial Sequence
  Synthetic oligonucleotide
ttaatagtaaaaaagaataagtgagcgaag

SEQ ID NO: 46542 - DNA, 30 bp, Artificial Sequence
  Synthetic oligonucleotide
aacggatgggtgtgagagctaagcgcgaag

SEQ ID NO: 46543 - DNA, 30 bp, Artificial Sequence
  Synthetic oligonucleotide
gtcattcgaacgtggggccatattgcgaag

SEQ ID NO: 46544 - DNA, 30 bp, Artificial Sequence
  Synthetic oligonucleotide
ggagcggaggggcactgcagccggtcgaag

SEQ ID NO: 46545 - DNA, 30 bp, Artificial Sequence
  Synthetic oligonucleotide
agactgttacgggcctctcgtgcgaggaag

SEQ ID NO: 46546 - DNA, 30 bp, Artificial Sequence
  Synthetic oligonucleotide
cgcgaatcgacctcctacctcgaacggaag

SEQ ID NO: 46547 - DNA, 30 bp, Artificial Sequence
  Synthetic oligonucleotide
gcgggattagacggtggacaacaccggaag

SEQ ID NO: 46548 - DNA, 30 bp, Artificial Sequence
  Synthetic oligonucleotide
aacaaaagtacatacggaggtgaccggaag

SEQ ID NO: 46549 - DNA, 30 bp, Artificial Sequence
  Synthetic oligonucleotide
gcgaaaggcggtgttctttgcagatggaag

SEQ ID NO: 46550 - DNA, 30 bp, Artificial Sequence
  Synthetic oligonucleotide
atcacgcgtggtgcaaatcgcgtatggaag

SEQ ID NO: 46551 - DNA, 30 bp, Artificial Sequence
  Synthetic oligonucleotide
ccggttgaacatagatggggctggtggaag

SEQ ID NO: 46552 - DNA, 30 bp, Artificial Sequence
  Synthetic oligonucleotide
cacgcaccatgacaatgtggctcgatgaag

SEQ ID NO: 46553 - DNA, 30 bp, Artificial Sequence
  Synthetic oligonucleotide
aggggtgtagtcgtgaatagaatgatgaag

SEQ ID NO: 46554 - DNA, 30 bp, Artificial Sequence
  Synthetic oligonucleotide
accgtacgggcaggagtattactactgaag

SEQ ID NO: 46555 - DNA, 30 bp, Artificial Sequence
  Synthetic oligonucleotide
atcaggctacgtaggtgatgttaagtgaag

SEQ ID NO: 46556 - DNA, 30 bp, Artificial Sequence
  Synthetic oligonucleotide
gtacaatccgaggaatagtatgctgtgaag

SEQ ID NO: 46557 - DNA, 30 bp, Artificial Sequence
  Synthetic oligonucleotide
cactaagcgtgggctcctaaacggaataag

SEQ ID NO: 46558 - DNA, 30 bp, Artificial Sequence
  Synthetic oligonucleotide
ttacgtatgggcccacactcattgaataag

SEQ ID NO: 46559 - DNA, 30 bp, Artificial Sequence
  Synthetic oligonucleotide
gtgagtagttcaatatcatacactaataag

SEQ ID NO: 46560 - DNA, 30 bp, Artificial Sequence
  Synthetic oligonucleotide
caactcagtgttggcaccctaggagataag

SEQ ID NO: 46561 - DNA, 30 bp, Artificial Sequence
  Synthetic oligonucleotide
tctgtacgacgatagggttatcaggataag

SEQ ID NO: 46562 - DNA, 30 bp, Artificial Sequence
  Synthetic oligonucleotide
gtaatagtagatagcatctccgctgataag

SEQ ID NO: 46563 - DNA, 30 bp, Artificial Sequence
  Synthetic oligonucleotide
cgatctctgaaatttggggtcttgactaag

SEQ ID NO: 46564 - DNA, 30 bp, Artificial Sequence
  Synthetic oligonucleotide
tggaggagttaatatgctggtgaccctaag

SEQ ID NO: 46565 - DNA, 31 bp, Artificial Sequence
  Synthetic oligonucleotide
aaaaaccaggaagatcagctcctctcctaag

SEQ ID NO: 46566 - DNA, 30 bp, Artificial Sequence
  Synthetic oligonucleotide
acgaaggggggcggcttagcgcactctaag

SEQ ID NO: 46567 - DNA, 30 bp, Artificial Sequence
  Synthetic oligonucleotide
gcatggcataaaactcgtgcatagagtaag

SEQ ID NO: 46568 - DNA, 30 bp, Artificial Sequence
  Synthetic oligonucleotide
gaagattaataagcccatattgatcgtaag

SEQ ID NO: 46569 - DNA, 30 bp, Artificial Sequence
  Synthetic oligonucleotide
cgacgcggtgagtaacatgatagtcgtaag

SEQ ID NO: 46570 - DNA, 31 bp, Artificial Sequence
  Synthetic oligonucleotide
agggcggagctagattaggaacaaacttaag

SEQ ID NO: 46571 - DNA, 30 bp, Artificial Sequence
  Synthetic oligonucleotide
aagtggtgaaagtaaaagcacaccgttaag

SEQ ID NO: 46572 - DNA, 30 bp, Artificial Sequence
  Synthetic oligonucleotide
tctggggaccatgcaggaaagctggttaag

SEQ ID NO: 46573 - DNA, 30 bp, Artificial Sequence
  Synthetic oligonucleotide
atcgagcagtcatatcgagtaagtcaacag

SEQ ID NO: 46574 - DNA, 30 bp, Artificial Sequence
  Synthetic oligonucleotide
aggtctctgtcataacaaatggaagaacag

SEQ ID NO: 46575 - DNA, 30 bp, Artificial Sequence
  Synthetic oligonucleotide
ccagattcgcaacaagacatttgcgaacag

SEQ ID NO: 46576 - DNA, 30 bp, Artificial Sequence
  Synthetic oligonucleotide
cgttccccggcaaggcatcgttcggaacag

SEQ ID NO: 46577 - DNA, 30 bp, Artificial Sequence
  Synthetic oligonucleotide
ttagcgcaaatatttttaggggattaacag

SEQ ID NO: 46578 - DNA, 30 bp, Artificial Sequence
  Synthetic oligonucleotide
caaactccggaaagtgatctagcaacacag

SEQ ID NO: 46579 - DNA, 30 bp, Artificial Sequence
  Synthetic oligonucleotide
gggagcgaatagcgatgctctagcccacag

SEQ ID NO: 46580 - DNA, 30 bp, Artificial Sequence
  Synthetic oligonucleotide
aatacggcgacaaaggcacaaccagcacag

SEQ ID NO: 46581 - DNA, 30 bp, Artificial Sequence
  Synthetic oligonucleotide
caatggcctctggtgaagcgtcaggcacag

SEQ ID NO: 46582 - DNA, 30 bp, Artificial Sequence
  Synthetic oligonucleotide
cgccagtgcacatagtgtcgtcaatcacag

SEQ ID NO: 46583 - DNA, 30 bp, Artificial Sequence
  Synthetic oligonucleotide
gacagacttcctctgtaaacggccagacag

SEQ ID NO: 46584 - DNA, 30 bp, Artificial Sequence
  Synthetic oligonucleotide
atgcccgggggcaggaaacctgctagacag

SEQ ID NO: 46585 - DNA, 30 bp, Artificial Sequence
  Synthetic oligonucleotide
agtgggaggatcggcccggacttacgacag

SEQ ID NO: 46586 - DNA, 30 bp, Artificial Sequence
  Synthetic oligonucleotide
agtgaactagtgaaaggacgaactcgacag

SEQ ID NO: 46587 - DNA, 30 bp, Artificial Sequence
  Synthetic oligonucleotide
acgtaggagccgcgggggtatagtggacag

SEQ ID NO: 46588 - DNA, 30 bp, Artificial Sequence
  Synthetic oligonucleotide
acaggagaagtaaagtttagtccctgacag

SEQ ID NO: 46589 - DNA, 30 bp, Artificial Sequence
  Synthetic oligonucleotide
gcggcaagtacggatcatggatgttgacag

SEQ ID NO: 46590 - DNA, 30 bp, Artificial Sequence
  Synthetic oligonucleotide
ccaaagacagtgttgactctacgaatacag

SEQ ID NO: 46591 - DNA, 30 bp, Artificial Sequence
  Synthetic oligonucleotide
ccaggcagaaagagtgattattggatacag

SEQ ID NO: 46592 - DNA, 30 bp, Artificial Sequence
  Synthetic oligonucleotide
gggtgagtgtctcctcaatggtctatacag

SEQ ID NO: 46593 - DNA, 30 bp, Artificial Sequence
  Synthetic oligonucleotide
tcggataaaagcagattagaccgcgtacag

SEQ ID NO: 46594 - DNA, 30 bp, Artificial Sequence
  Synthetic oligonucleotide
aagctgacccctaggatgccaccattacag

SEQ ID NO: 46595 - DNA, 30 bp, Artificial Sequence
  Synthetic oligonucleotide
ttacagatcgcgagggtattaaccttacag

SEQ ID NO: 46596 - DNA, 29 bp, Artificial Sequence
  Synthetic oligonucleotide
tgctggcagagtatagaacattcaaccag

SEQ ID NO: 46597 - DNA, 30 bp, Artificial Sequence
  Synthetic oligonucleotide
tccagcataccgtatcatccccgtaaccag

SEQ ID NO: 46598 - DNA, 30 bp, Artificial Sequence
  Synthetic oligonucleotide
ggccacagggccaaatttggtacacaccag

SEQ ID NO: 46599 - DNA, 30 bp, Artificial Sequence
  Synthetic oligonucleotide
tcggtcggacagtccctaggtatacaccag

SEQ ID NO: 46600 - DNA, 30 bp, Artificial Sequence
  Synthetic oligonucleotide
ccgaacggcggccggaaggctagtcaccag

SEQ ID NO: 46601 - DNA, 30 bp, Artificial Sequence
  Synthetic oligonucleotide
acgggcctggcgggcaaagattcttaccag

SEQ ID NO: 46602 - DNA, 30 bp, Artificial Sequence
  Synthetic oligonucleotide
ccagtggggagccaggggtagtcaacccag

SEQ ID NO: 46603 - DNA, 30 bp, Artificial Sequence
  Synthetic oligonucleotide
ccaggcgtcgagtttctatcaataacccag

SEQ ID NO: 46604 - DNA, 30 bp, Artificial Sequence
  Synthetic oligonucleotide
cgtagtagacgcggtaattataatacccag

SEQ ID NO: 46605 - DNA, 30 bp, Artificial Sequence
  Synthetic oligonucleotide
gcgcctcatcaaaagttaagaggtacccag

SEQ ID NO: 46606 - DNA, 30 bp, Artificial Sequence
  Synthetic oligonucleotide
acacactcgtgatcctctagtaacccccag

SEQ ID NO: 46607 - DNA, 30 bp, Artificial Sequence
  Synthetic oligonucleotide
gcggaagcatctcgtggaggttattcccag

SEQ ID NO: 46608 - DNA, 30 bp, Artificial Sequence
  Synthetic oligonucleotide
ggtcatgtagtagaccatcctgcgcgccag

SEQ ID NO: 46609 - DNA, 30 bp, Artificial Sequence
  Synthetic oligonucleotide
ggcaataggcaatgtggggagcttcgccag

SEQ ID NO: 46610 - DNA, 30 bp, Artificial Sequence
  Synthetic oligonucleotide
cgacagagacacccaggttttgaatgccag

SEQ ID NO: 46611 - DNA, 30 bp, Artificial Sequence
  Synthetic oligonucleotide
ataggcagtgtgttatcttgatcgtgccag

SEQ ID NO: 46612 - DNA, 30 bp, Artificial Sequence
  Synthetic oligonucleotide
tcagtataacgaagacctctcgatatccag

SEQ ID NO: 46613 - DNA, 30 bp, Artificial Sequence
  Synthetic oligonucleotide
taccaagcgaaggtgtgagccggtaagcag

SEQ ID NO: 46614 - DNA, 30 bp, Artificial Sequence
  Synthetic oligonucleotide
gagaccaccctgagggcgacatgtaagcag

SEQ ID NO: 46615 - DNA, 30 bp, Artificial Sequence
  Synthetic oligonucleotide
actgccaaatgttaggataggcaacagcag

SEQ ID NO: 46616 - DNA, 30 bp, Artificial Sequence
  Synthetic oligonucleotide
tgatgaagggcttaagtccaactacagcag

SEQ ID NO: 46617 - DNA, 30 bp, Artificial Sequence
  Synthetic oligonucleotide
agtgatgtgtacaagggagctttacagcag

SEQ ID NO: 46618 - DNA, 30 bp, Artificial Sequence
  Synthetic oligonucleotide
attgaacatgaacgggacttaccagagcag

SEQ ID NO: 46619 - DNA, 30 bp, Artificial Sequence
  Synthetic oligonucleotide
agagtgcgttcggacaggctggcatagcag

SEQ ID NO: 46620 - DNA, 30 bp, Artificial Sequence
  Synthetic oligonucleotide
acaaggagtaccgacaagtagactacgcag

SEQ ID NO: 46621 - DNA, 30 bp, Artificial Sequence
  Synthetic oligonucleotide
cgggcgaactctcgagggctaccgccgcag

SEQ ID NO: 46622 - DNA, 30 bp, Artificial Sequence
  Synthetic oligonucleotide
cgctacaaggaacgtacggtccggtcgcag

SEQ ID NO: 46623 - DNA, 30 bp, Artificial Sequence
  Synthetic oligonucleotide
gtgaccgtccccctcgtcatggaaaggcag

SEQ ID NO: 46624 - DNA, 30 bp, Artificial Sequence
  Synthetic oligonucleotide
gtgtcactggaaaaccacatagccgtgcag

SEQ ID NO: 46625 - DNA, 30 bp, Artificial Sequence
  Synthetic oligonucleotide
ctttaagggatgacaccgagataggtgcag

SEQ ID NO: 46626 - DNA, 30 bp, Artificial Sequence
  Synthetic oligonucleotide
cttggacaatcacgggtcggcgagcatcag

SEQ ID NO: 46627 - DNA, 30 bp, Artificial Sequence
  Synthetic oligonucleotide
agtgctatggagatcgagaactagcatcag

SEQ ID NO: 46628 - DNA, 30 bp, Artificial Sequence
  Synthetic oligonucleotide
acgaggtagaactagggagtgcatcatcag

SEQ ID NO: 46629 - DNA, 30 bp, Artificial Sequence
  Synthetic oligonucleotide
gcagtcgcacagggggaggaaggagatcag

SEQ ID NO: 46630 - DNA, 30 bp, Artificial Sequence
  Synthetic oligonucleotide
cagacagaataagaaggagagggggatcag

SEQ ID NO: 46631 - DNA, 30 bp, Artificial Sequence
  Synthetic oligonucleotide
agctagtcaacaggcgatatcgtgtatcag

SEQ ID NO: 46632 - DNA, 30 bp, Artificial Sequence
  Synthetic oligonucleotide
cgtccataagggaatggttaacattatcag

SEQ ID NO: 46633 - DNA, 30 bp, Artificial Sequence
  Synthetic oligonucleotide
cgaaggattaaggaccgtagttccactcag

SEQ ID NO: 46634 - DNA, 30 bp, Artificial Sequence
  Synthetic oligonucleotide
acgtcttgggccagtatccggatacctcag

SEQ ID NO: 46635 - DNA, 30 bp, Artificial Sequence
  Synthetic oligonucleotide
caatatgtcgcgccatctcaagaggctcag

SEQ ID NO: 46636 - DNA, 30 bp, Artificial Sequence
  Synthetic oligonucleotide
tcttgcaaatattaggatcaaggggctcag

SEQ ID NO: 46637 - DNA, 30 bp, Artificial Sequence
  Synthetic oligonucleotide
gtaaaatccggacgttcgtcgtgggctcag

SEQ ID NO: 46638 - DNA, 30 bp, Artificial Sequence
  Synthetic oligonucleotide
aagtgtagtcagtagagcaaaggttctcag

SEQ ID NO: 46639 - DNA, 30 bp, Artificial Sequence
  Synthetic oligonucleotide
agtaggcctgtctcgcaaaccacaagtcag

SEQ ID NO: 46640 - DNA, 30 bp, Artificial Sequence
  Synthetic oligonucleotide
tgctatcggagctgagaaaattctagtcag

SEQ ID NO: 46641 - DNA, 29 bp, Artificial Sequence
  Synthetic oligonucleotide
caggagaaacttctctgtaagagcgtcag

SEQ ID NO: 46642 - DNA, 30 bp, Artificial Sequence
  Synthetic oligonucleotide
aacgggacccacgcgatcgcctctcgtcag

SEQ ID NO: 46643 - DNA, 30 bp, Artificial Sequence
  Synthetic oligonucleotide
atatgatagtggtagatacaaagaggtcag

SEQ ID NO: 46644 - DNA, 30 bp, Artificial Sequence
  Synthetic oligonucleotide
cgtcgcccgcgtgaagtatgactaggtcag

SEQ ID NO: 46645 - DNA, 30 bp, Artificial Sequence
  Synthetic oligonucleotide
tctagtgataaagggtggaatacatgtcag

SEQ ID NO: 46646 - DNA, 30 bp, Artificial Sequence
  Synthetic oligonucleotide
cttaccagcaggccgaaaagactgattcag

SEQ ID NO: 46647 - DNA, 30 bp, Artificial Sequence
  Synthetic oligonucleotide
tgaaggcgctcagtagggggatgtcttcag

SEQ ID NO: 46648 - DNA, 30 bp, Artificial Sequence
  Synthetic oligonucleotide
gacgtcgaggaattacgaaggcggtttcag

SEQ ID NO: 46649 - DNA, 30 bp, Artificial Sequence
  Synthetic oligonucleotide
ggcacgcccgccatttataagtaaaaagag

SEQ ID NO: 46650 - DNA, 30 bp, Artificial Sequence
  Synthetic oligonucleotide
caggtgctcgcgggaggtcataacaaagag

SEQ ID NO: 46651 - DNA, 30 bp, Artificial Sequence
  Synthetic oligonucleotide
aaactggagagccgtttcggagagaaagag

SEQ ID NO: 46652 - DNA, 30 bp, Artificial Sequence
  Synthetic oligonucleotide
tgcctaaagaatatacctgcatggaaagag

SEQ ID NO: 46653 - DNA, 30 bp, Artificial Sequence
  Synthetic oligonucleotide
atgtgaggtgacttctgtctcacacaagag

SEQ ID NO: 46654 - DNA, 30 bp, Artificial Sequence
  Synthetic oligonucleotide
cctccggacgcatgggggtgtggtcaagag

SEQ ID NO: 46655 - DNA, 30 bp, Artificial Sequence
  Synthetic oligonucleotide
ggtcatgagggggctagtctgcaagaagag

SEQ ID NO: 46656 - DNA, 30 bp, Artificial Sequence
  Synthetic oligonucleotide
gaaaggggatagcaactcagatcagaagag

SEQ ID NO: 46657 - DNA, 30 bp, Artificial Sequence
  Synthetic oligonucleotide
tccatcgccgacctatttatgactgaagag

SEQ ID NO: 46658 - DNA, 30 bp, Artificial Sequence
  Synthetic oligonucleotide
tagaaggccaccccgttacgtagtgaagag

SEQ ID NO: 46659 - DNA, 30 bp, Artificial Sequence
  Synthetic oligonucleotide
gacgaaggggccatctgaagctttgaagag

SEQ ID NO: 46660 - DNA, 30 bp, Artificial Sequence
  Synthetic oligonucleotide
cagctgacgatacgtagagacagataagag

SEQ ID NO: 46661 - DNA, 30 bp, Artificial Sequence
  Synthetic oligonucleotide
aggacatgtaaggaaacgtccttataagag

SEQ ID NO: 46662 - DNA, 31 bp, Artificial Sequence
  Synthetic oligonucleotide
caggtgccacagaggtagtgactgctaagag

SEQ ID NO: 46663 - DNA, 30 bp, Artificial Sequence
  Synthetic oligonucleotide
ggtacacgacgacgagaaatgtcttaagag

SEQ ID NO: 46664 - DNA, 30 bp, Artificial Sequence
  Synthetic oligonucleotide
tacgagggctagagcgcgcgtgttacagag

SEQ ID NO: 46665 - DNA, 30 bp, Artificial Sequence
  Synthetic oligonucleotide
gtcactcaggtcacacggcctgaagcagag

SEQ ID NO: 46666 - DNA, 30 bp, Artificial Sequence
  Synthetic oligonucleotide
gctgcgtccatcagtacataattttcagag

SEQ ID NO: 46667 - DNA, 30 bp, Artificial Sequence
  Synthetic oligonucleotide
ctagagctctggagaccgaaaaccagagag

SEQ ID NO: 46668 - DNA, 30 bp, Artificial Sequence
  Synthetic oligonucleotide
gtgtggaaagacggttacacaagcagagag

SEQ ID NO: 46669 - DNA, 30 bp, Artificial Sequence
  Synthetic oligonucleotide
aagtgtactcatatgatgagacagagagag

SEQ ID NO: 46670 - DNA, 30 bp, Artificial Sequence
  Synthetic oligonucleotide
cgatattcccgacgatgacggcttagagag

SEQ ID NO: 46671 - DNA, 30 bp, Artificial Sequence
  Synthetic oligonucleotide
tactacagagtttcaataaggccgcgagag

SEQ ID NO: 46672 - DNA, 30 bp, Artificial Sequence
  Synthetic oligonucleotide
gatggctcacatataactactaggcgagag

SEQ ID NO: 46673 - DNA, 30 bp, Artificial Sequence
  Synthetic oligonucleotide
tcttcccacatcaatatcacctgcggagag

SEQ ID NO: 46674 - DNA, 30 bp, Artificial Sequence
  Synthetic oligonucleotide
gacggaaatttttactactacgtatgagag

SEQ ID NO: 46675 - DNA, 30 bp, Artificial Sequence
  Synthetic oligonucleotide
ctaaggaggtgaatcattttggattgagag

SEQ ID NO: 46676 - DNA, 30 bp, Artificial Sequence
  Synthetic oligonucleotide
acaacaacggatggactcctcagaatagag

SEQ ID NO: 46677 - DNA, 30 bp, Artificial Sequence
  Synthetic oligonucleotide
gggttacctataaggagttgcgtcatagag

SEQ ID NO: 46678 - DNA, 30 bp, Artificial Sequence
  Synthetic oligonucleotide
tctgaaactgtaccctagcttgcactagag

SEQ ID NO: 46679 - DNA, 30 bp, Artificial Sequence
  Synthetic oligonucleotide
tgacgtccctgttccttgacatacgtagag

SEQ ID NO: 46680 - DNA, 30 bp, Artificial Sequence
  Synthetic oligonucleotide
gaatgaacttggagaggcctaaccgtagag

SEQ ID NO: 46681 - DNA, 30 bp, Artificial Sequence
  Synthetic oligonucleotide
cgctttgcaggtcagaaccaccacttagag

SEQ ID NO: 46682 - DNA, 30 bp, Artificial Sequence
  Synthetic oligonucleotide
tatctacgtacaaaaaggtcaaagttagag

SEQ ID NO: 46683 - DNA, 31 bp, Artificial Sequence
  Synthetic oligonucleotide
ttgatacatagcgctgctacgtaagttagag

SEQ ID NO: 46684 - DNA, 30 bp, Artificial Sequence
  Synthetic oligonucleotide
ggtggctagaaaacgcgaatagcgaacgag

SEQ ID NO: 46685 - DNA, 30 bp, Artificial Sequence
  Synthetic oligonucleotide
ttgcccgtcttatcgtttagcttgaacgag

SEQ ID NO: 46686 - DNA, 30 bp, Artificial Sequence
  Synthetic oligonucleotide
acacgcgataacaaaactatctgatacgag

SEQ ID NO: 46687 - DNA, 30 bp, Artificial Sequence
  Synthetic oligonucleotide
tacggtcatcaattctctgaaccctacgag

SEQ ID NO: 46688 - DNA, 30 bp, Artificial Sequence
  Synthetic oligonucleotide
tgtgggtcgacgtaggttgatgcacccgag

SEQ ID NO: 46689 - DNA, 30 bp, Artificial Sequence
  Synthetic oligonucleotide
ggttcacacagtggtgatgaactcgccgag

SEQ ID NO: 46690 - DNA, 30 bp, Artificial Sequence
  Synthetic oligonucleotide
gatacacatgttcaatttgaagtcgccgag

SEQ ID NO: 46691 - DNA, 30 bp, Artificial Sequence
  Synthetic oligonucleotide
tggacgcaatgtgcccgtcatggctccgag

SEQ ID NO: 46692 - DNA, 30 bp, Artificial Sequence
  Synthetic oligonucleotide
agattaggagctgactgattattgtccgag

SEQ ID NO: 46693 - DNA, 30 bp, Artificial Sequence
  Synthetic oligonucleotide
taagtctgacagatcggctaccgtagcgag

SEQ ID NO: 46694 - DNA, 30 bp, Artificial Sequence
  Synthetic oligonucleotide
gggactggtcccgcgccgacctaccgcgag

SEQ ID NO: 46695 - DNA, 30 bp, Artificial Sequence
  Synthetic oligonucleotide
gttggggcatcacagaaacgagtccgcgag

SEQ ID NO: 46696 - DNA, 30 bp, Artificial Sequence
  Synthetic oligonucleotide
ttggggttcataaccgattaggtccgcgag

SEQ ID NO: 46697 - DNA, 30 bp, Artificial Sequence
  Synthetic oligonucleotide
taggccctaatgacatggccgtatcgcgag

SEQ ID NO: 46698 - DNA, 30 bp, Artificial Sequence
  Synthetic oligonucleotide
gggaacagattctgaaaactaattcgcgag

SEQ ID NO: 46699 - DNA, 30 bp, Artificial Sequence
  Synthetic oligonucleotide
gatagaatatttgccacgtacagaggcgag

SEQ ID NO: 46700 - DNA, 30 bp, Artificial Sequence
  Synthetic oligonucleotide
tcatgcccacataattttgggttaggcgag

SEQ ID NO: 46701 - DNA, 30 bp, Artificial Sequence
  Synthetic oligonucleotide
acaactaagagtgagttagcgaacggcgag

SEQ ID NO: 46702 - DNA, 30 bp, Artificial Sequence
  Synthetic oligonucleotide
ttcgaggactctggtagtctatacggcgag

SEQ ID NO: 46703 - DNA, 30 bp, Artificial Sequence
  Synthetic oligonucleotide
cggatcgcaccgagttcgaggtagggcgag

SEQ ID NO: 46704 - DNA, 30 bp, Artificial Sequence
  Synthetic oligonucleotide
attgacaactagcgacgagtcacgggcgag

SEQ ID NO: 46705 - DNA, 30 bp, Artificial Sequence
  Synthetic oligonucleotide
tctcagtgacaaatcaacaagaatggcgag

SEQ ID NO: 46706 - DNA, 30 bp, Artificial Sequence
  Synthetic oligonucleotide
aggggtcggaatcggtcctgccgatgcgag

SEQ ID NO: 46707 - DNA, 30 bp, Artificial Sequence
  Synthetic oligonucleotide
taggacccccaggactaaaccgcggtcgag

SEQ ID NO: 46708 - DNA, 30 bp, Artificial Sequence
  Synthetic oligonucleotide
aacaatcgcggatatcatttctgaaaggag

SEQ ID NO: 46709 - DNA, 30 bp, Artificial Sequence
  Synthetic oligonucleotide
aaagctcgcgtggctacagcgaacaaggag

SEQ ID NO: 46710 - DNA, 30 bp, Artificial Sequence
  Synthetic oligonucleotide
atccgagattcccattggcaatacaaggag

SEQ ID NO: 46711 - DNA, 30 bp, Artificial Sequence
  Synthetic oligonucleotide
agatcctcggcgcccgcgacgtttaaggag

SEQ ID NO: 46712 - DNA, 30 bp, Artificial Sequence
  Synthetic oligonucleotide
ccggacttaaactaatttatataacaggag

SEQ ID NO: 46713 - DNA, 30 bp, Artificial Sequence
  Synthetic oligonucleotide
gacgtagggttaattgccttatgacaggag

SEQ ID NO: 46714 - DNA, 30 bp, Artificial Sequence
  Synthetic oligonucleotide
ccaacattagcgggcacgtaaaggcaggag

SEQ ID NO: 46715 - DNA, 30 bp, Artificial Sequence
  Synthetic oligonucleotide
cgggattagaaggcagggaatgggcaggag

SEQ ID NO: 46716 - DNA, 30 bp, Artificial Sequence
  Synthetic oligonucleotide
gagtatcctgtggctaatacgaaagaggag

SEQ ID NO: 46717 - DNA, 30 bp, Artificial Sequence
  Synthetic oligonucleotide
agtgtggaacccaaagtcgtctccgaggag

SEQ ID NO: 46718 - DNA, 30 bp, Artificial Sequence
  Synthetic oligonucleotide
ggtgggcgtaaacgttgacagtaggaggag

SEQ ID NO: 46719 - DNA, 30 bp, Artificial Sequence
  Synthetic oligonucleotide
tgcgaaggcgccgcattcaatagaacggag

SEQ ID NO: 46720 - DNA, 30 bp, Artificial Sequence
  Synthetic oligonucleotide
gtggaacgcctgccagacataatcacggag

SEQ ID NO: 46721 - DNA, 30 bp, Artificial Sequence
  Synthetic oligonucleotide
acatcaaaaaaatgattgatactgacggag

SEQ ID NO: 46722 - DNA, 31 bp, Artificial Sequence
  Synthetic oligonucleotide
gtacggagcaaaggctacctagccagcggag

SEQ ID NO: 46723 - DNA, 30 bp, Artificial Sequence
  Synthetic oligonucleotide
acttacgaaaacagatgcacgggggcggag

SEQ ID NO: 46724 - DNA, 30 bp, Artificial Sequence
  Synthetic oligonucleotide
cccagacgagcttcaaacctcactgcggag

SEQ ID NO: 46725 - DNA, 30 bp, Artificial Sequence
  Synthetic oligonucleotide
tatcaggccccaaaaagacggactgcggag

SEQ ID NO: 46726 - DNA, 30 bp, Artificial Sequence
  Synthetic oligonucleotide
gtgtatgcgtgggctatcaagtactcggag

SEQ ID NO: 46727 - DNA, 30 bp, Artificial Sequence
  Synthetic oligonucleotide
caggaatcggttggcaggcttagctcggag

SEQ ID NO: 46728 - DNA, 30 bp, Artificial Sequence
  Synthetic oligonucleotide
atgagaggagtactggaggtgatttcggag

SEQ ID NO: 46729 - DNA, 30 bp, Artificial Sequence
  Synthetic oligonucleotide
ggagggagtacccatgcacgtggtagggag

SEQ ID NO: 46730 - DNA, 30 bp, Artificial Sequence
  Synthetic oligonucleotide
ccattgcaagttacataggttgcgcgggag

SEQ ID NO: 46731 - DNA, 30 bp, Artificial Sequence
  Synthetic oligonucleotide
cgttgtcccgcgcgtgtcgtgggaggggag

SEQ ID NO: 46732 - DNA, 30 bp, Artificial Sequence
  Synthetic oligonucleotide
atgcaaccattaccgcccctagcctgggag

SEQ ID NO: 46733 - DNA, 30 bp, Artificial Sequence
  Synthetic oligonucleotide
tccgacgtagttcaacatcagacgtgggag

SEQ ID NO: 46734 - DNA, 30 bp, Artificial Sequence
  Synthetic oligonucleotide
actcccataataagatctcatccaatggag

SEQ ID NO: 46735 - DNA, 30 bp, Artificial Sequence
  Synthetic oligonucleotide
ggtgtattattacgtagacatggaatggag

SEQ ID NO: 46736 - DNA, 30 bp, Artificial Sequence
  Synthetic oligonucleotide
actaacctgatacatagaatcacgctggag

SEQ ID NO: 46737 - DNA, 30 bp, Artificial Sequence
  Synthetic oligonucleotide
aagctaactaatatggggatagctctggag

SEQ ID NO: 46738 - DNA, 30 bp, Artificial Sequence
  Synthetic oligonucleotide
taagaggacaccgatagagacagcgtggag

SEQ ID NO: 46739 - DNA, 30 bp, Artificial Sequence
  Synthetic oligonucleotide
tggatgagttggaaggggaaggtattggag

SEQ ID NO: 46740 - DNA, 30 bp, Artificial Sequence
  Synthetic oligonucleotide
aggatccctctggactgaccaggcttggag

SEQ ID NO: 46741 - DNA, 30 bp, Artificial Sequence
  Synthetic oligonucleotide
agcggcataaaaacggtcggaaggaatgag

SEQ ID NO: 46742 - DNA, 30 bp, Artificial Sequence
  Synthetic oligonucleotide
cgcaccggattacgctcagttaggaatgag

SEQ ID NO: 46743 - DNA, 30 bp, Artificial Sequence
  Synthetic oligonucleotide
aaggaaccatatgtctgcgatattcatgag

SEQ ID NO: 46744 - DNA, 30 bp, Artificial Sequence
  Synthetic oligonucleotide
gtcgtatagatctggggaaggtgagatgag

SEQ ID NO: 46745 - DNA, 30 bp, Artificial Sequence
  Synthetic oligonucleotide
taagagatgggagtggtatcaaacgatgag

SEQ ID NO: 46746 - DNA, 30 bp, Artificial Sequence
  Synthetic oligonucleotide
ccccagaacaagttctagatgcccgatgag

SEQ ID NO: 46747 - DNA, 30 bp, Artificial Sequence
  Synthetic oligonucleotide
aagcgagctccaacatggataccggatgag

SEQ ID NO: 46748 - DNA, 30 bp, Artificial Sequence
  Synthetic oligonucleotide
aaggatctacttgcgagcgtacagtatgag

SEQ ID NO: 46749 - DNA, 30 bp, Artificial Sequence
  Synthetic oligonucleotide
gataaacgcgtctggcgtgaagccactgag

SEQ ID NO: 46750 - DNA, 30 bp, Artificial Sequence
  Synthetic oligonucleotide
ggttatggtgagcgagggtaaccacctgag

SEQ ID NO: 46751 - DNA, 30 bp, Artificial Sequence
  Synthetic oligonucleotide
agctacggtgaactcataacatgtcctgag

SEQ ID NO: 46752 - DNA, 30 bp, Artificial Sequence
  Synthetic oligonucleotide
tcgacgcgaaccggcgtcttgcggtctgag

SEQ ID NO: 46753 - DNA, 30 bp, Artificial Sequence
  Synthetic oligonucleotide
aaagaacaggtcgcaaactatacttctgag

SEQ ID NO: 46754 - DNA, 30 bp, Artificial Sequence
  Synthetic oligonucleotide
cgagcaataatcatctcagcgtatcgtgag

SEQ ID NO: 46755 - DNA, 30 bp, Artificial Sequence
  Synthetic oligonucleotide
gactaagaacctatgataggatacggtgag

SEQ ID NO: 46756 - DNA, 30 bp, Artificial Sequence
  Synthetic oligonucleotide
tgcggaaactaatggatccaacagggtgag

SEQ ID NO: 46757 - DNA, 30 bp, Artificial Sequence
  Synthetic oligonucleotide
ggctcgatgaaacgggacgcctggtgtgag

SEQ ID NO: 46758 - DNA, 30 bp, Artificial Sequence
  Synthetic oligonucleotide
tcattatttcacaagaggacacatattgag

SEQ ID NO: 46759 - DNA, 30 bp, Artificial Sequence
  Synthetic oligonucleotide
ctcaggaaatgccctgctaatggtcttgag

SEQ ID NO: 46760 - DNA, 30 bp, Artificial Sequence
  Synthetic oligonucleotide
cctaactacaactacatgagataggttgag

SEQ ID NO: 46761 - DNA, 30 bp, Artificial Sequence
  Synthetic oligonucleotide
ttggcccacagtcgaactgcatgggttgag

SEQ ID NO: 46762 - DNA, 30 bp, Artificial Sequence
  Synthetic oligonucleotide
gtccggatctcggtaagcgcgaagtttgag

SEQ ID NO: 46763 - DNA, 30 bp, Artificial Sequence
  Synthetic oligonucleotide
gatggggtgcgtggtattgagagcaaatag

SEQ ID NO: 46764 - DNA, 30 bp, Artificial Sequence
  Synthetic oligonucleotide
cgaaagcaggccggtgctactgggaaatag

SEQ ID NO: 46765 - DNA, 30 bp, Artificial Sequence
  Synthetic oligonucleotide
tgaggatccttactaaggcgtaaagaatag

SEQ ID NO: 46766 - DNA, 30 bp, Artificial Sequence
  Synthetic oligonucleotide
gcgtataggagcatctcgggtgtgacatag

SEQ ID NO: 46767 - DNA, 30 bp, Artificial Sequence
  Synthetic oligonucleotide
ccacgctaagggcgtcgcattttgacatag

SEQ ID NO: 46768 - DNA, 30 bp, Artificial Sequence
  Synthetic oligonucleotide
atcgtacagcttaaggactgggggccatag

SEQ ID NO: 46769 - DNA, 30 bp, Artificial Sequence
  Synthetic oligonucleotide
ggttaagttcccatgcgttagcatccatag

SEQ ID NO: 46770 - DNA, 30 bp, Artificial Sequence
  Synthetic oligonucleotide
gtacgtaagccagccgagtgtgctccatag

SEQ ID NO: 46771 - DNA, 30 bp, Artificial Sequence
  Synthetic oligonucleotide
catgtggatcttagctctcgtcgttcatag

SEQ ID NO: 46772 - DNA, 30 bp, Artificial Sequence
  Synthetic oligonucleotide
acaatcggaagtaggaaatggtgcagatag

SEQ ID NO: 46773 - DNA, 30 bp, Artificial Sequence
  Synthetic oligonucleotide
atggttgcgcgaatttccgcttatagatag

SEQ ID NO: 46774 - DNA, 30 bp, Artificial Sequence
  Synthetic oligonucleotide
tggatccaaagcaccggaggaacacgatag

SEQ ID NO: 46775 - DNA, 30 bp, Artificial Sequence
  Synthetic oligonucleotide
acgcgtacctacccatagagaaaccgatag

SEQ ID NO: 46776 - DNA, 30 bp, Artificial Sequence
  Synthetic oligonucleotide
cgggataagcctcgtgacatagatcgatag

SEQ ID NO: 46777 - DNA, 30 bp, Artificial Sequence
  Synthetic oligonucleotide
gtagctgaagtgcgtacggaagttcgatag

SEQ ID NO: 46778 - DNA, 30 bp, Artificial Sequence
  Synthetic oligonucleotide
gtatgtgctcagacaagtgtacggggatag

SEQ ID NO: 46779 - DNA, 30 bp, Artificial Sequence
  Synthetic oligonucleotide
tggatgcttgggccactcacatttggatag

SEQ ID NO: 46780 - DNA, 30 bp, Artificial Sequence
  Synthetic oligonucleotide
acgtgaagagcaaccgacgagcgatgatag

SEQ ID NO: 46781 - DNA, 28 bp, Artificial Sequence
  Synthetic oligonucleotide
caacaccagccagaagcttgagatatag

SEQ ID NO: 46782 - DNA, 30 bp, Artificial Sequence
  Synthetic oligonucleotide
cgaggggttaaaaatggcaaggtgatatag

SEQ ID NO: 46783 - DNA, 30 bp, Artificial Sequence
  Synthetic oligonucleotide
acgacagactgcttgcagtgcttgatatag

SEQ ID NO: 46784 - DNA, 30 bp, Artificial Sequence
  Synthetic oligonucleotide
ggtgacaaggcgcgtcaaattaaagtatag

SEQ ID NO: 46785 - DNA, 30 bp, Artificial Sequence
  Synthetic oligonucleotide
gggcgtacttgacttccgtcgcgggtatag

SEQ ID NO: 46786 - DNA, 30 bp, Artificial Sequence
  Synthetic oligonucleotide
tccatcggattccccatctaagcgaactag

SEQ ID NO: 46787 - DNA, 30 bp, Artificial Sequence
  Synthetic oligonucleotide
acacaccgcaatcgcgtacattctaactag

SEQ ID NO: 46788 - DNA, 30 bp, Artificial Sequence
  Synthetic oligonucleotide
gagactcgacaaagcaaaaccgttaactag

SEQ ID NO: 46789 - DNA, 30 bp, Artificial Sequence
  Synthetic oligonucleotide
taaggcacgacaagatatttatagtactag

SEQ ID NO: 46790 - DNA, 30 bp, Artificial Sequence
  Synthetic oligonucleotide
ataggtcaaccgactaaggacgcgacctag

SEQ ID NO: 46791 - DNA, 30 bp, Artificial Sequence
  Synthetic oligonucleotide
ggtgtgccttgcgtgggtcgggtcgcctag

SEQ ID NO: 46792 - DNA, 30 bp, Artificial Sequence
  Synthetic oligonucleotide
cggtcggaagatcagagcaccgatgcctag

SEQ ID NO: 46793 - DNA, 30 bp, Artificial Sequence
  Synthetic oligonucleotide
tcaaagacagcgtacacaaaagtatcctag

SEQ ID NO: 46794 - DNA, 30 bp, Artificial Sequence
  Synthetic oligonucleotide
cagtaagtgggtcgaatttgggaacgctag

SEQ ID NO: 46795 - DNA, 30 bp, Artificial Sequence
  Synthetic oligonucleotide
ggtacaacaggaaattccgagaatcgctag

SEQ ID NO: 46796 - DNA, 30 bp, Artificial Sequence
  Synthetic oligonucleotide
gcacaaccgaaggattgatatatttgctag

SEQ ID NO: 46797 - DNA, 30 bp, Artificial Sequence
  Synthetic oligonucleotide
gacatgagacagacatgcgcttgactctag

SEQ ID NO: 46798 - DNA, 30 bp, Artificial Sequence
  Synthetic oligonucleotide
acgtacaacctcgtactcggtacagtctag

SEQ ID NO: 46799 - DNA, 30 bp, Artificial Sequence
  Synthetic oligonucleotide
cgtggcgtacagtagatctatctagtctag

SEQ ID NO: 46800 - DNA, 30 bp, Artificial Sequence
  Synthetic oligonucleotide
tagggcgtacggcatcacggttctgtctag

SEQ ID NO: 46801 - DNA, 30 bp, Artificial Sequence
  Synthetic oligonucleotide
acttcgcatgaataggtatttgtaaagtag

SEQ ID NO: 46802 - DNA, 30 bp, Artificial Sequence
  Synthetic oligonucleotide
atgcgtattttccctaatgtgcccaagtag

SEQ ID NO: 46803 - DNA, 30 bp, Artificial Sequence
  Synthetic oligonucleotide
ggggagttcatataggcgatcatcaagtag

SEQ ID NO: 46804 - DNA, 30 bp, Artificial Sequence
  Synthetic oligonucleotide
cgtagggggcgcacgattttattgaagtag

SEQ ID NO: 46805 - DNA, 30 bp, Artificial Sequence
  Synthetic oligonucleotide
gatgacttgaaccaatgcccaaataagtag

SEQ ID NO: 46806 - DNA, 30 bp, Artificial Sequence
  Synthetic oligonucleotide
cgagtatagactgtaccacaggataagtag

SEQ ID NO: 46807 - DNA, 30 bp, Artificial Sequence
  Synthetic oligonucleotide
gcaggtggccaaaccgccgaaaactagtag

SEQ ID NO: 46808 - DNA, 30 bp, Artificial Sequence
  Synthetic oligonucleotide
atgagccatcctgcatagtcctagtagtag

SEQ ID NO: 46809 - DNA, 30 bp, Artificial Sequence
  Synthetic oligonucleotide
ctagcctcagctgaaaacgggccgtagtag

SEQ ID NO: 46810 - DNA, 30 bp, Artificial Sequence
  Synthetic oligonucleotide
gtcaacgagtactgacataagcgtacgtag

SEQ ID NO: 46811 - DNA, 30 bp, Artificial Sequence
  Synthetic oligonucleotide
cgtgggcaaactcctaatgtgcgtacgtag

SEQ ID NO: 46812 - DNA, 30 bp, Artificial Sequence
  Synthetic oligonucleotide
ttggaggggtgtgtggtgcgtggaccgtag

SEQ ID NO: 46813 - DNA, 30 bp, Artificial Sequence
  Synthetic oligonucleotide
atatgtccctaccccgaagcgagatcgtag

SEQ ID NO: 46814 - DNA, 30 bp, Artificial Sequence
  Synthetic oligonucleotide
acgtagataaccgagcgtgtggtatcgtag

SEQ ID NO: 46815 - DNA, 30 bp, Artificial Sequence
  Synthetic oligonucleotide
aacatcaccaggtcatggttagtctcgtag

SEQ ID NO: 46816 - DNA, 30 bp, Artificial Sequence
  Synthetic oligonucleotide
cgcagacgcggttaagaaataacaaggtag

SEQ ID NO: 46817 - DNA, 30 bp, Artificial Sequence
  Synthetic oligonucleotide
acgagccttccttgcgagatataagggtag

SEQ ID NO: 46818 - DNA, 30 bp, Artificial Sequence
  Synthetic oligonucleotide
accatccgaagaccttctcgcctagggtag

SEQ ID NO: 46819 - DNA, 30 bp, Artificial Sequence
  Synthetic oligonucleotide
caagtattaccatagtgcactagggggtag

SEQ ID NO: 46820 - DNA, 30 bp, Artificial Sequence
  Synthetic oligonucleotide
agggatgcctaagtaattaggttggggtag

SEQ ID NO: 46821 - DNA, 30 bp, Artificial Sequence
  Synthetic oligonucleotide
tcgagacgggctggctcgtgcgcatggtag

SEQ ID NO: 46822 - DNA, 30 bp, Artificial Sequence
  Synthetic oligonucleotide
cgctttggaaggatactggacaggatgtag

SEQ ID NO: 46823 - DNA, 30 bp, Artificial Sequence
  Synthetic oligonucleotide
ggtcgtttgtaagaaaaatacagtttgtag

SEQ ID NO: 46824 - DNA, 30 bp, Artificial Sequence
  Synthetic oligonucleotide
aggcaacgttcccattttacgtgtaattag

SEQ ID NO: 46825 - DNA, 30 bp, Artificial Sequence
  Synthetic oligonucleotide
aatctgggtgtagggaagagtgtgcattag

SEQ ID NO: 46826 - DNA, 30 bp, Artificial Sequence
  Synthetic oligonucleotide
tcgtgtggtacgtctagaggaagcgattag

SEQ ID NO: 46827 - DNA, 30 bp, Artificial Sequence
  Synthetic oligonucleotide
gatagggcgttggagggatactcggattag

SEQ ID NO: 46828 - DNA, 30 bp, Artificial Sequence
  Synthetic oligonucleotide
cagccagaggaagcttaactggtatattag

SEQ ID NO: 46829 - DNA, 30 bp, Artificial Sequence
  Synthetic oligonucleotide
gcgcagaatatacgctggatcctaccttag

SEQ ID NO: 46830 - DNA, 30 bp, Artificial Sequence
  Synthetic oligonucleotide
gcgaggtagacaacgccccagtcagcttag

SEQ ID NO: 46831 - DNA, 30 bp, Artificial Sequence
  Synthetic oligonucleotide
caccaaacgacgatgacaacaagagcttag

SEQ ID NO: 46832 - DNA, 30 bp, Artificial Sequence
  Synthetic oligonucleotide
cgtggttataaaagcgaatagagcgcttag

SEQ ID NO: 46833 - DNA, 30 bp, Artificial Sequence
  Synthetic oligonucleotide
gatacgtgccaccagaattctagatcttag

SEQ ID NO: 46834 - DNA, 30 bp, Artificial Sequence
  Synthetic oligonucleotide
ggaacctagaacacaagttttcagcgttag

SEQ ID NO: 46835 - DNA, 30 bp, Artificial Sequence
  Synthetic oligonucleotide
cgcgctaagcaatgtgagctgcgtcgttag

SEQ ID NO: 46836 - DNA, 30 bp, Artificial Sequence
  Synthetic oligonucleotide
acgagctgtcgctcaggaaaattaggttag

SEQ ID NO: 46837 - DNA, 30 bp, Artificial Sequence
  Synthetic oligonucleotide
tgacgtatccggatcatgcttcgtggttag

SEQ ID NO: 46838 - DNA, 30 bp, Artificial Sequence
  Synthetic oligonucleotide
caaggtccagatccgctgtgtacggtttag

SEQ ID NO: 46839 - DNA, 30 bp, Artificial Sequence
  Synthetic oligonucleotide
ctaagagaaaccgagcttgcaaaattttag

SEQ ID NO: 46840 - DNA, 30 bp, Artificial Sequence
  Synthetic oligonucleotide
ttgacgatataaggttccaggggcaaaacg

SEQ ID NO: 46841 - DNA, 30 bp, Artificial Sequence
  Synthetic oligonucleotide
cagtatccgaaggggcgttagaggcaaacg

SEQ ID NO: 46842 - DNA, 30 bp, Artificial Sequence
  Synthetic oligonucleotide
tagcgaggccctcgtcattgacatcaaacg

SEQ ID NO: 46843 - DNA, 30 bp, Artificial Sequence
  Synthetic oligonucleotide
catcgatatccctcccagataatagaaacg

SEQ ID NO: 46844 - DNA, 30 bp, Artificial Sequence
  Synthetic oligonucleotide
ttacacatcagtccacttaaagtagaaacg

SEQ ID NO: 46845 - DNA, 30 bp, Artificial Sequence
  Synthetic oligonucleotide
caaagcccggtctttactcaaatcgaaacg

SEQ ID NO: 46846 - DNA, 30 bp, Artificial Sequence
  Synthetic oligonucleotide
aaaggtagacttcgaactgggccggaaacg

SEQ ID NO: 46847 - DNA, 30 bp, Artificial Sequence
  Synthetic oligonucleotide
ggtgcgagtctcgagaggaaatgtgaaacg

SEQ ID NO: 46848 - DNA, 30 bp, Artificial Sequence
  Synthetic oligonucleotide
tccgggcatgtcctaatgaagcgataaacg

SEQ ID NO: 46849 - DNA, 30 bp, Artificial Sequence
  Synthetic oligonucleotide
tcgaggtactagacttgttcagcgtaaacg

SEQ ID NO: 46850 - DNA, 30 bp, Artificial Sequence
  Synthetic oligonucleotide
aagtgcgcggccgagcaaggttcaacaacg

SEQ ID NO: 46851 - DNA, 30 bp, Artificial Sequence
  Synthetic oligonucleotide
caagcgtaagaaaagtgcttacggacaacg

SEQ ID NO: 46852 - DNA, 30 bp, Artificial Sequence
  Synthetic oligonucleotide
cgatcacaggtagtgaagtgaatgacaacg

SEQ ID NO: 46853 - DNA, 30 bp, Artificial Sequence
  Synthetic oligonucleotide
gttaggttaccgtacgagctgacaccaacg

SEQ ID NO: 46854 - DNA, 30 bp, Artificial Sequence
  Synthetic oligonucleotide
aggtacttccaatcattgagagacccaacg

SEQ ID NO: 46855 - DNA, 30 bp, Artificial Sequence
  Synthetic oligonucleotide
cacgagggaatatattgccttgggccaacg

SEQ ID NO: 46856 - DNA, 30 bp, Artificial Sequence
  Synthetic oligonucleotide
ttgatcacgggggagctaatagtgccaacg

SEQ ID NO: 46857 - DNA, 30 bp, Artificial Sequence
  Synthetic oligonucleotide
taggatacacttgacccggagtgcgcaacg

SEQ ID NO: 46858 - DNA, 30 bp, Artificial Sequence
  Synthetic oligonucleotide
gcatgggaaaggtatgtcatcatttcaacg

SEQ ID NO: 46859 - DNA, 30 bp, Artificial Sequence
  Synthetic oligonucleotide
cgaaacctaatgctgatatgctagagaacg

SEQ ID NO: 46860 - DNA, 30 bp, Artificial Sequence
  Synthetic oligonucleotide
ttggaagctcgaatacaatgcactagaacg

SEQ ID NO: 46861 - DNA, 30 bp, Artificial Sequence
  Synthetic oligonucleotide
taggaggggagggtggttaacagctgaacg

SEQ ID NO: 46862 - DNA, 30 bp, Artificial Sequence
  Synthetic oligonucleotide
cgccaagagggatcaagacgtggcataacg

SEQ ID NO: 46863 - DNA, 30 bp, Artificial Sequence
  Synthetic oligonucleotide
aaagcggttcaaacaagcgggagactaacg

SEQ ID NO: 46864 - DNA, 30 bp, Artificial Sequence
  Synthetic oligonucleotide
gcacatctttaataaggaaaatgactaacg

SEQ ID NO: 46865 - DNA, 30 bp, Artificial Sequence
  Synthetic oligonucleotide
aggttcagtgcccaagggaccggattaacg

SEQ ID NO: 46866 - DNA, 30 bp, Artificial Sequence
  Synthetic oligonucleotide
cagcagagcgaaatctctctaagtcacacg

SEQ ID NO: 46867 - DNA, 30 bp, Artificial Sequence
  Synthetic oligonucleotide
aacaaagaccacaggataagacggcccacg

SEQ ID NO: 46868 - DNA, 30 bp, Artificial Sequence
  Synthetic oligonucleotide
taggcaggtacaaagcaccagagttccacg

SEQ ID NO: 46869 - DNA, 30 bp, Artificial Sequence
  Synthetic oligonucleotide
gtgggaagtaacatggggcccgcaagcacg

SEQ ID NO: 46870 - DNA, 30 bp, Artificial Sequence
  Synthetic oligonucleotide
acactcgccagggaggctggactaagcacg

SEQ ID NO: 46871 - DNA, 31 bp, Artificial Sequence
  Synthetic oligonucleotide
caaccacggaaagccagtgtggaaacgcacg

SEQ ID NO: 46872 - DNA, 30 bp, Artificial Sequence
  Synthetic oligonucleotide
cctgaggtccagagccactcaaagcgcacg

SEQ ID NO: 46873 - DNA, 30 bp, Artificial Sequence
  Synthetic oligonucleotide
ggcatcagaaggagttgagatagtcgcacg

SEQ ID NO: 46874 - DNA, 30 bp, Artificial Sequence
  Synthetic oligonucleotide
atgaaggtaagtcctaaataggagggcacg

SEQ ID NO: 46875 - DNA, 30 bp, Artificial Sequence
  Synthetic oligonucleotide
ggtgtgatacgcaataatgaaacgggcacg

SEQ ID NO: 46876 - DNA, 30 bp, Artificial Sequence
  Synthetic oligonucleotide
acagaaagtgcgtagagcatttacgtcacg

SEQ ID NO: 46877 - DNA, 30 bp, Artificial Sequence
  Synthetic oligonucleotide
tcaacaggtaggagactgcaggtaaagacg

SEQ ID NO: 46878 - DNA, 30 bp, Artificial Sequence
  Synthetic oligonucleotide
ccaagtgataagtggttggggatgaagacg

SEQ ID NO: 46879 - DNA, 30 bp, Artificial Sequence
  Synthetic oligonucleotide
ccttgttagcactcgagtcaagataagacg

SEQ ID NO: 46880 - DNA, 30 bp, Artificial Sequence
  Synthetic oligonucleotide
aagcaacgtagggtaacccggctaacgacg

SEQ ID NO: 46881 - DNA, 30 bp, Artificial Sequence
  Synthetic oligonucleotide
aagaagctataagactgagaaaagacgacg

SEQ ID NO: 46882 - DNA, 30 bp, Artificial Sequence
  Synthetic oligonucleotide
gtatgggggtggggatgtgctatctcgacg

SEQ ID NO: 46883 - DNA, 30 bp, Artificial Sequence
  Synthetic oligonucleotide
tgagcaaaaaagtttgatgccacgtcgacg

SEQ ID NO: 46884 - DNA, 30 bp, Artificial Sequence
  Synthetic oligonucleotide
tgaagcgaggacatctgtgagccaaggacg

SEQ ID NO: 46885 - DNA, 30 bp, Artificial Sequence
  Synthetic oligonucleotide
tggcgatcatggaaaagatacgtaaggacg

SEQ ID NO: 46886 - DNA, 30 bp, Artificial Sequence
  Synthetic oligonucleotide
actggatcctggtgtcaccaaaggaggacg

SEQ ID NO: 46887 - DNA, 30 bp, Artificial Sequence
  Synthetic oligonucleotide
acattaaacttgacgattcaagggaggacg

SEQ ID NO: 46888 - DNA, 30 bp, Artificial Sequence
  Synthetic oligonucleotide
tcaggaaggaagcaaaacatcttagggacg

SEQ ID NO: 46889 - DNA, 30 bp, Artificial Sequence
  Synthetic oligonucleotide
ccgcattccttgtagactgaaaccgggacg

SEQ ID NO: 46890 - DNA, 30 bp, Artificial Sequence
  Synthetic oligonucleotide
caggacgttgaccaacctgagcatctgacg

SEQ ID NO: 46891 - DNA, 30 bp, Artificial Sequence
  Synthetic oligonucleotide
ctggaaagcgagacatatcattcggtgacg

SEQ ID NO: 46892 - DNA, 30 bp, Artificial Sequence
  Synthetic oligonucleotide
tggtccggagaacgtaccatcagattgacg

SEQ ID NO: 46893 - DNA, 30 bp, Artificial Sequence
  Synthetic oligonucleotide
gactacccgaatatcgagcaaccacatacg

SEQ ID NO: 46894 - DNA, 30 bp, Artificial Sequence
  Synthetic oligonucleotide
cgagatgacaccgatcgcattcaagatacg

SEQ ID NO: 46895 - DNA, 30 bp, Artificial Sequence
  Synthetic oligonucleotide
acgaccgacatcatgtacaaaacggatacg

SEQ ID NO: 46896 - DNA, 30 bp, Artificial Sequence
  Synthetic oligonucleotide
cggtgtaatagccaccgacgaagggatacg

SEQ ID NO: 46897 - DNA, 30 bp, Artificial Sequence
  Synthetic oligonucleotide
cagctccgcaaacattaccgtaatactacg

SEQ ID NO: 46898 - DNA, 30 bp, Artificial Sequence
  Synthetic oligonucleotide
agggctaggctataggtcaatttggctacg

SEQ ID NO: 46899 - DNA, 30 bp, Artificial Sequence
  Synthetic oligonucleotide
atgagagtaagcgatcgagaatcacgtacg

SEQ ID NO: 46900 - DNA, 30 bp, Artificial Sequence
  Synthetic oligonucleotide
agctgcaaggggactcagactccaggtacg

SEQ ID NO: 46901 - DNA, 30 bp, Artificial Sequence
  Synthetic oligonucleotide
atgaaagttacaggttcacaggagattacg

SEQ ID NO: 46902 - DNA, 30 bp, Artificial Sequence
  Synthetic oligonucleotide
aggcatccgaagagctgagttatgcttacg

SEQ ID NO: 46903 - DNA, 30 bp, Artificial Sequence
  Synthetic oligonucleotide
atagcaaagggcggacaaactcctgttacg

SEQ ID NO: 46904 - DNA, 30 bp, Artificial Sequence
  Synthetic oligonucleotide
caattgaaaatgcggtgtacaaccaaaccg

SEQ ID NO: 46905 - DNA, 30 bp, Artificial Sequence
  Synthetic oligonucleotide
tctccgacgataaaaaacagccaccaaccg

SEQ ID NO: 46906 - DNA, 30 bp, Artificial Sequence
  Synthetic oligonucleotide
taccggataacacccctagcgcatgaaccg

SEQ ID NO: 46907 - DNA, 30 bp, Artificial Sequence
  Synthetic oligonucleotide
gagcggacgtggataagcgtgattgaaccg

SEQ ID NO: 46908 - DNA, 30 bp, Artificial Sequence
  Synthetic oligonucleotide
tgggtgggcatgtttcgccttaaaacaccg

SEQ ID NO: 46909 - DNA, 30 bp, Artificial Sequence
  Synthetic oligonucleotide
cggcgcgcaaggagagcccgccatacaccg

SEQ ID NO: 46910 - DNA, 30 bp, Artificial Sequence
  Synthetic oligonucleotide
tgatagggtggcgtagcatgacgtacaccg

SEQ ID NO: 46911 - DNA, 30 bp, Artificial Sequence
  Synthetic oligonucleotide
atagagataaagtcaatctactaaccaccg

SEQ ID NO: 46912 - DNA, 30 bp, Artificial Sequence
  Synthetic oligonucleotide
cactttcgggcatacaaaaaatagtcaccg

SEQ ID NO: 46913 - DNA, 30 bp, Artificial Sequence
  Synthetic oligonucleotide
aaggttatggggtgtaggaaagaaagaccg

SEQ ID NO: 46914 - DNA, 30 bp, Artificial Sequence
  Synthetic oligonucleotide
ggatgtatggcggattgggagaccagaccg

SEQ ID NO: 46915 - DNA, 30 bp, Artificial Sequence
  Synthetic oligonucleotide
aaagacggcctcccaagccaaacccgaccg

SEQ ID NO: 46916 - DNA, 30 bp, Artificial Sequence
  Synthetic oligonucleotide
acaaggtggttaaagtagagcttatgaccg

SEQ ID NO: 46917 - DNA, 31 bp, Artificial Sequence
  Synthetic oligonucleotide
ggtaaagtgagctactggcaaaactataccg

SEQ ID NO: 46918 - DNA, 30 bp, Artificial Sequence
  Synthetic oligonucleotide
cggtatccatccggggacgggaatgtaccg

SEQ ID NO: 46919 - DNA, 30 bp, Artificial Sequence
  Synthetic oligonucleotide
caacaggggcacatgattgctagattaccg

SEQ ID NO: 46920 - DNA, 30 bp, Artificial Sequence
  Synthetic oligonucleotide
taccacaaagagggtttggtttagcacccg

SEQ ID NO: 46921 - DNA, 30 bp, Artificial Sequence
  Synthetic oligonucleotide
tggcgtaaatgcacctccagggaaaccccg

SEQ ID NO: 46922 - DNA, 30 bp, Artificial Sequence
  Synthetic oligonucleotide
atggcgaagaggactgttgctgcaaccccg

SEQ ID NO: 46923 - DNA, 30 bp, Artificial Sequence
  Synthetic oligonucleotide
gtgagaagcagtgcaaggtactgcaccccg

SEQ ID NO: 46924 - DNA, 30 bp, Artificial Sequence
  Synthetic oligonucleotide
cccgagaggggaaactggctactgaccccg

SEQ ID NO: 46925 - DNA, 30 bp, Artificial Sequence
  Synthetic oligonucleotide
gtaggcattagaacgatgttatcacccccg

SEQ ID NO: 46926 - DNA, 30 bp, Artificial Sequence
  Synthetic oligonucleotide
aggtgattcacgactgttcggcactccccg

SEQ ID NO: 46927 - DNA, 30 bp, Artificial Sequence
  Synthetic oligonucleotide
acacgtgtgccaaagtccacccgtagcccg

SEQ ID NO: 46928 - DNA, 30 bp, Artificial Sequence
  Synthetic oligonucleotide
cgaccaaagatctcatccagcgttcgcccg

SEQ ID NO: 46929 - DNA, 30 bp, Artificial Sequence
  Synthetic oligonucleotide
tggccgaggtggcaggtaggacaaggcccg

SEQ ID NO: 46930 - DNA, 30 bp, Artificial Sequence
  Synthetic oligonucleotide
cccgtgggaagaagagctactctaggcccg

SEQ ID NO: 46931 - DNA, 30 bp, Artificial Sequence
  Synthetic oligonucleotide
tggcggacttacggacggacatgtgtcccg

SEQ ID NO: 46932 - DNA, 30 bp, Artificial Sequence
  Synthetic oligonucleotide
aatgcagctgaatgtaatgaagcgttcccg

SEQ ID NO: 46933 - DNA, 30 bp, Artificial Sequence
  Synthetic oligonucleotide
caaaagtaccggcaaaagaatgcgcagccg

SEQ ID NO: 46934 - DNA, 30 bp, Artificial Sequence
  Synthetic oligonucleotide
gttacctccaaacgctgattcagagagccg

SEQ ID NO: 46935 - DNA, 30 bp, Artificial Sequence
  Synthetic oligonucleotide
ggcgtactccgccaacactaacacacgccg

SEQ ID NO: 46936 - DNA, 30 bp, Artificial Sequence
  Synthetic oligonucleotide
atggttggcaaaatcactggaaccacgccg

SEQ ID NO: 46937 - DNA, 30 bp, Artificial Sequence
  Synthetic oligonucleotide
cgtatacacgctctctcagacttgtcgccg

SEQ ID NO: 46938 - DNA, 30 bp, Artificial Sequence
  Synthetic oligonucleotide
cagcgagagagagatttgagcggaaggccg

SEQ ID NO: 46939 - DNA, 30 bp, Artificial Sequence
  Synthetic oligonucleotide
ggggatacctgaaggaaagaatttgggccg

SEQ ID NO: 46940 - DNA, 30 bp, Artificial Sequence
  Synthetic oligonucleotide
tactggcgagcgaaggtcattacgatgccg

SEQ ID NO: 46941 - DNA, 30 bp, Artificial Sequence
  Synthetic oligonucleotide
aggacaccgcgccgtaaagtatagctgccg

SEQ ID NO: 46942 - DNA, 30 bp, Artificial Sequence
  Synthetic oligonucleotide
ccgtattcgacttatcagaattgagtgccg

SEQ ID NO: 46943 - DNA, 30 bp, Artificial Sequence
  Synthetic oligonucleotide
atcgagtgtccgtgttacaattccgtgccg

SEQ ID NO: 46944 - DNA, 30 bp, Artificial Sequence
  Synthetic oligonucleotide
gcgcgaagaaagcgatgacactagaatccg

SEQ ID NO: 46945 - DNA, 30 bp, Artificial Sequence
  Synthetic oligonucleotide
cctaaactcaagaggcactcccgtaatccg

SEQ ID NO: 46946 - DNA, 30 bp, Artificial Sequence
  Synthetic oligonucleotide
aagattaaacgccggtccagtgcacatccg

SEQ ID NO: 46947 - DNA, 30 bp, Artificial Sequence
  Synthetic oligonucleotide
atgcccaactaagtgacatccaatcatccg

SEQ ID NO: 46948 - DNA, 30 bp, Artificial Sequence
  Synthetic oligonucleotide
agaaggtacatcgtacaaaagtactatccg

SEQ ID NO: 46949 - DNA, 30 bp, Artificial Sequence
  Synthetic oligonucleotide
gcgtgagagagggatggtcccgacgctccg

SEQ ID NO: 46950 - DNA, 30 bp, Artificial Sequence
  Synthetic oligonucleotide
tcagtaaaatcggaagaacagagatctccg

SEQ ID NO: 46951 - DNA, 30 bp, Artificial Sequence
  Synthetic oligonucleotide
cgctctaagtaaggcacgtagagcagtccg

SEQ ID NO: 46952 - DNA, 30 bp, Artificial Sequence
  Synthetic oligonucleotide
caaacaaggaggctaactcaccagagtccg

SEQ ID NO: 46953 - DNA, 30 bp, Artificial Sequence
  Synthetic oligonucleotide
gtgtcgactcacattcaataaaatcgtccg

SEQ ID NO: 46954 - DNA, 30 bp, Artificial Sequence
  Synthetic oligonucleotide
ccaagaacccgtgaatagagcaaatgtccg

SEQ ID NO: 46955 - DNA, 30 bp, Artificial Sequence
  Synthetic oligonucleotide
tcattaagaccaagctggtccgattaagcg

SEQ ID NO: 46956 - DNA, 30 bp, Artificial Sequence
  Synthetic oligonucleotide
cgggacaaacagagcaacatctattaagcg

SEQ ID NO: 46957 - DNA, 30 bp, Artificial Sequence
  Synthetic oligonucleotide
cgggctttggaggaatagatgttaacagcg

SEQ ID NO: 46958 - DNA, 30 bp, Artificial Sequence
  Synthetic oligonucleotide
gctgggcaagcggaatgggacctcacagcg

SEQ ID NO: 46959 - DNA, 30 bp, Artificial Sequence
  Synthetic oligonucleotide
aaggtcaaagccgtatggccctttacagcg

SEQ ID NO: 46960 - DNA, 30 bp, Artificial Sequence
  Synthetic oligonucleotide
cgcttgatttacgaactcaaacagtcagcg

SEQ ID NO: 46961 - DNA, 29 bp, Artificial Sequence
  Synthetic oligonucleotide
tacatgataactgtcagttccagagagcg

SEQ ID NO: 46962 - DNA, 30 bp, Artificial Sequence
  Synthetic oligonucleotide
gcacccccatacggaacgagagtacgagcg

SEQ ID NO: 46963 - DNA, 30 bp, Artificial Sequence
  Synthetic oligonucleotide
ccttaaataatgatttgaggcacgggagcg

SEQ ID NO: 46964 - DNA, 30 bp, Artificial Sequence
  Synthetic oligonucleotide
gaccgaccagggggccatgcaaggatagcg

SEQ ID NO: 46965 - DNA, 30 bp, Artificial Sequence
  Synthetic oligonucleotide
cctgcgcattagataaagcttcagttagcg

SEQ ID NO: 46966 - DNA, 30 bp, Artificial Sequence
  Synthetic oligonucleotide
atagattgatacgtcgaatacgaaaacgcg

SEQ ID NO: 46967 - DNA, 30 bp, Artificial Sequence
  Synthetic oligonucleotide
acatcctccaatgcagtctaaggcaacgcg

SEQ ID NO: 46968 - DNA, 30 bp, Artificial Sequence
  Synthetic oligonucleotide
cgtcagtgatccaaattagggacgtacgcg

SEQ ID NO: 46969 - DNA, 30 bp, Artificial Sequence
  Synthetic oligonucleotide
cggcgccgaattcgttcaacgtacaccgcg

SEQ ID NO: 46970 - DNA, 30 bp, Artificial Sequence
  Synthetic oligonucleotide
ttacacagatagccgtcgctaacatccgcg

SEQ ID NO: 46971 - DNA, 30 bp, Artificial Sequence
  Synthetic oligonucleotide
ggcagggaggttcgatgtacatcaaaggcg

SEQ ID NO: 46972 - DNA, 30 bp, Artificial Sequence
  Synthetic oligonucleotide
acaggtcatgaaatgaactaacagaaggcg

SEQ ID NO: 46973 - DNA, 30 bp, Artificial Sequence
  Synthetic oligonucleotide
ccagctcagttatggatagcgatgaaggcg

SEQ ID NO: 46974 - DNA, 30 bp, Artificial Sequence
  Synthetic oligonucleotide
ggaatggttgactgtgaacaaaataaggcg

SEQ ID NO: 46975 - DNA, 30 bp, Artificial Sequence
  Synthetic oligonucleotide
gggttgcaagggcaagaaaactgtcaggcg

SEQ ID NO: 46976 - DNA, 30 bp, Artificial Sequence
  Synthetic oligonucleotide
atccgcggggttaggagagagtccgaggcg

SEQ ID NO: 46977 - DNA, 30 bp, Artificial Sequence
  Synthetic oligonucleotide
gtgtgaagaggtaaaggtcaatcataggcg

SEQ ID NO: 46978 - DNA, 30 bp, Artificial Sequence
  Synthetic oligonucleotide
atgaaaatacaatcttttgcatgataggcg

SEQ ID NO: 46979 - DNA, 30 bp, Artificial Sequence
  Synthetic oligonucleotide
ggatcgtcaccgtacgcgagttggtaggcg

SEQ ID NO: 46980 - DNA, 30 bp, Artificial Sequence
  Synthetic oligonucleotide
tggactgaacagcgcagtatccaaacggcg

SEQ ID NO: 46981 - DNA, 30 bp, Artificial Sequence
  Synthetic oligonucleotide
atggacgtgcatcacctggactaagcggcg

SEQ ID NO: 46982 - DNA, 30 bp, Artificial Sequence
  Synthetic oligonucleotide
tgacactaatcggtatcaaaggattcggcg

SEQ ID NO: 46983 - DNA, 30 bp, Artificial Sequence
  Synthetic oligonucleotide
caaagagggtgaacacccaatactagggcg

SEQ ID NO: 46984 - DNA, 30 bp, Artificial Sequence
  Synthetic oligonucleotide
cgaagggctaaaaaaccttaggactgggcg

SEQ ID NO: 46985 - DNA, 30 bp, Artificial Sequence
  Synthetic oligonucleotide
caggcagggtggacgatgggaaattgggcg

SEQ ID NO: 46986 - DNA, 30 bp, Artificial Sequence
  Synthetic oligonucleotide
gacccacaggattgggcacaattaatggcg

SEQ ID NO: 46987 - DNA, 30 bp, Artificial Sequence
  Synthetic oligonucleotide
tgccgtgtatactggagggaggacatggcg

SEQ ID NO: 46988 - DNA, 30 bp, Artificial Sequence
  Synthetic oligonucleotide
aggtattgcaatcggacggggaatatggcg

SEQ ID NO: 46989 - DNA, 30 bp, Artificial Sequence
  Synthetic oligonucleotide
taggggacttgccttaaacagaaagtggcg

SEQ ID NO: 46990 - DNA, 30 bp, Artificial Sequence
  Synthetic oligonucleotide
aagttgccagtggaaagcgtagctgtggcg

SEQ ID NO: 46991 - DNA, 30 bp, Artificial Sequence
  Synthetic oligonucleotide
gtggcgtcgaagtgtccgattcgacatgcg

SEQ ID NO: 46992 - DNA, 30 bp, Artificial Sequence
  Synthetic oligonucleotide
tcaccaagtggatagtgaacaagccatgcg

SEQ ID NO: 46993 - DNA, 30 bp, Artificial Sequence
  Synthetic oligonucleotide
aacgatcaataaatagaaaacgacgatgcg

SEQ ID NO: 46994 - DNA, 30 bp, Artificial Sequence
  Synthetic oligonucleotide
aacgtggtaccgaagaccgccagcgatgcg

SEQ ID NO: 46995 - DNA, 30 bp, Artificial Sequence
  Synthetic oligonucleotide
gcgaaaagtagaccctatggtgttactgcg

SEQ ID NO: 46996 - DNA, 30 bp, Artificial Sequence
  Synthetic oligonucleotide
ttactgagcgccatagcgacaccacctgcg

SEQ ID NO: 46997 - DNA, 31 bp, Artificial Sequence
  Synthetic oligonucleotide
tatcgtcgggtaacaccctgcaccacctgcg

SEQ ID NO: 46998 - DNA, 30 bp, Artificial Sequence
  Synthetic oligonucleotide
tccaatagcgagggacttaacagatctgcg

SEQ ID NO: 46999 - DNA, 30 bp, Artificial Sequence
  Synthetic oligonucleotide
ctccaaaaagcatagtgacaataaagtgcg

SEQ ID NO: 47000 - DNA, 30 bp, Artificial Sequence
  Synthetic oligonucleotide
agttggcgagtaagtccttgtgacagtgcg

SEQ ID NO: 47001 - DNA, 30 bp, Artificial Sequence
  Synthetic oligonucleotide
ggtccccgaatcatggccaatcctagtgcg

SEQ ID NO: 47002 - DNA, 30 bp, Artificial Sequence
  Synthetic oligonucleotide
atcattggcgacatgaaacgggcacgtgcg

SEQ ID NO: 47003 - DNA, 30 bp, Artificial Sequence
  Synthetic oligonucleotide
ttatgaaagtcgaacttcaatagaggtgcg

SEQ ID NO: 47004 - DNA, 30 bp, Artificial Sequence
  Synthetic oligonucleotide
cctcgacgggatagttggaaaaggggtgcg

SEQ ID NO: 47005 - DNA, 27 bp, Artificial Sequence
  Synthetic oligonucleotide
gacaagtccggcacccagagctgtgcg

SEQ ID NO: 47006 - DNA, 30 bp, Artificial Sequence
  Synthetic oligonucleotide
atccaagaatgagagatgggatcagttgcg

SEQ ID NO: 47007 - DNA, 30 bp, Artificial Sequence
  Synthetic oligonucleotide
catgagtctcgtcggtctgcgatcaaatcg

SEQ ID NO: 47008 - DNA, 30 bp, Artificial Sequence
  Synthetic oligonucleotide
aaacaaatagaccagagggctaaacaatcg

SEQ ID NO: 47009 - DNA, 30 bp, Artificial Sequence
  Synthetic oligonucleotide
cgcaagctgggggataggtgcgggcaatcg

SEQ ID NO: 47010 - DNA, 30 bp, Artificial Sequence
  Synthetic oligonucleotide
gtatacgagggaatcaggccctatcaatcg

SEQ ID NO: 47011 - DNA, 30 bp, Artificial Sequence
  Synthetic oligonucleotide
gtcgagaagccaccagtccgcatcgaatcg

SEQ ID NO: 47012 - DNA, 30 bp, Artificial Sequence
  Synthetic oligonucleotide
agtaagtgtccgaacgaaccggcggaatcg

SEQ ID NO: 47013 - DNA, 30 bp, Artificial Sequence
  Synthetic oligonucleotide
atccccccgcaacttaccaacactgaatcg

SEQ ID NO: 47014 - DNA, 30 bp, Artificial Sequence
  Synthetic oligonucleotide
ggtgccatagttggtggtgtctactaatcg

SEQ ID NO: 47015 - DNA, 30 bp, Artificial Sequence
  Synthetic oligonucleotide
actgcagagtctgcctcgaagagctaatcg

SEQ ID NO: 47016 - DNA, 30 bp, Artificial Sequence
  Synthetic oligonucleotide
caacttactaaaatgtacaaacggacatcg

SEQ ID NO: 47017 - DNA, 30 bp, Artificial Sequence
  Synthetic oligonucleotide
gttgtctacggggagatacaagaaccatcg

SEQ ID NO: 47018 - DNA, 30 bp, Artificial Sequence
  Synthetic oligonucleotide
tgaccttttcagagtgagtatggtccatcg

SEQ ID NO: 47019 - DNA, 30 bp, Artificial Sequence
  Synthetic oligonucleotide
atctgaactaaaaatcttaaagtgtcatcg

SEQ ID NO: 47020 - DNA, 30 bp, Artificial Sequence
  Synthetic oligonucleotide
cgtaaacgcgttgaaaacaggatgcgatcg

SEQ ID NO: 47021 - DNA, 30 bp, Artificial Sequence
  Synthetic oligonucleotide
ccaaggacttcaggccgaagcgagtgatcg

SEQ ID NO: 47022 - DNA, 30 bp, Artificial Sequence
  Synthetic oligonucleotide
agcaaagataaaaggtatgtaataatatcg

SEQ ID NO: 47023 - DNA, 30 bp, Artificial Sequence
  Synthetic oligonucleotide
gcagttgcgaccacaacggagagcctatcg

SEQ ID NO: 47024 - DNA, 30 bp, Artificial Sequence
  Synthetic oligonucleotide
gacgatgctagccagttaatattcgtatcg

SEQ ID NO: 47025 - DNA, 30 bp, Artificial Sequence
  Synthetic oligonucleotide
cagagaagcggccgggtaggtcagaactcg

SEQ ID NO: 47026 - DNA, 30 bp, Artificial Sequence
  Synthetic oligonucleotide
tggacgtggaacctcagtagcgggcactcg

SEQ ID NO: 47027 - DNA, 30 bp, Artificial Sequence
  Synthetic oligonucleotide
acggggctcggtaggtcattacttcactcg

SEQ ID NO: 47028 - DNA, 30 bp, Artificial Sequence
  Synthetic oligonucleotide
ttggtcctggctaatctctagcacgactcg

SEQ ID NO: 47029 - DNA, 30 bp, Artificial Sequence
  Synthetic oligonucleotide
atctacggcaagaacgtaaagacaccctcg

SEQ ID NO: 47030 - DNA, 30 bp, Artificial Sequence
  Synthetic oligonucleotide
ttacgggggagaatatcaaacgacgcctcg

SEQ ID NO: 47031 - DNA, 30 bp, Artificial Sequence
  Synthetic oligonucleotide
cacgacatacgctacccaagtgatgcctcg

SEQ ID NO: 47032 - DNA, 30 bp, Artificial Sequence
  Synthetic oligonucleotide
ccatggaactgcgagactgaacgtgcctcg

SEQ ID NO: 47033 - DNA, 30 bp, Artificial Sequence
  Synthetic oligonucleotide
agctccacgaactctgttgggtgtgcctcg

SEQ ID NO: 47034 - DNA, 30 bp, Artificial Sequence
  Synthetic oligonucleotide
aggtaattgtacgaatttgttcacagctcg

SEQ ID NO: 47035 - DNA, 30 bp, Artificial Sequence
  Synthetic oligonucleotide
agaacatccgagaagcaatttcgtggctcg

SEQ ID NO: 47036 - DNA, 30 bp, Artificial Sequence
  Synthetic oligonucleotide
cgttgtttacaagggtgtacgacatgctcg

SEQ ID NO: 47037 - DNA, 30 bp, Artificial Sequence
  Synthetic oligonucleotide
tggagaggaacaagccaatagccatgctcg

SEQ ID NO: 47038 - DNA, 30 bp, Artificial Sequence
  Synthetic oligonucleotide
gaggatatcagggttaggccacattgctcg

SEQ ID NO: 47039 - DNA, 30 bp, Artificial Sequence
  Synthetic oligonucleotide
gtatgcatactgatcattaaaatttgctcg

SEQ ID NO: 47040 - DNA, 30 bp, Artificial Sequence
  Synthetic oligonucleotide
ttgttagtgggaggggttgacatactctcg

SEQ ID NO: 47041 - DNA, 30 bp, Artificial Sequence
  Synthetic oligonucleotide
aaagggaggttccccgactcgattaagtcg

SEQ ID NO: 47042 - DNA, 30 bp, Artificial Sequence
  Synthetic oligonucleotide
tgttaagatatgaactgggcacaacagtcg

SEQ ID NO: 47043 - DNA, 30 bp, Artificial Sequence
  Synthetic oligonucleotide
gggggcgttggagctgcttctggagagtcg

SEQ ID NO: 47044 - DNA, 30 bp, Artificial Sequence
  Synthetic oligonucleotide
cgtgccaccaacagcatgggatgtgagtcg

SEQ ID NO: 47045 - DNA, 30 bp, Artificial Sequence
  Synthetic oligonucleotide
tctggcttagatccatcgtgtcgcccgtcg

SEQ ID NO: 47046 - DNA, 30 bp, Artificial Sequence
  Synthetic oligonucleotide
tcattgcttattggggtcgtctctccgtcg

SEQ ID NO: 47047 - DNA, 30 bp, Artificial Sequence
  Synthetic oligonucleotide
gctcgcatgagaactctgtcctaagcgtcg

SEQ ID NO: 47048 - DNA, 30 bp, Artificial Sequence
  Synthetic oligonucleotide
acactgtatgttccaacaatcaacaggtcg

SEQ ID NO: 47049 - DNA, 30 bp, Artificial Sequence
  Synthetic oligonucleotide
agtcagctcaggatgccgatcgtacggtcg

SEQ ID NO: 47050 - DNA, 30 bp, Artificial Sequence
  Synthetic oligonucleotide
tggtcaccgagagatggaacacgtgggtcg

SEQ ID NO: 47051 - DNA, 30 bp, Artificial Sequence
  Synthetic oligonucleotide
acagtcaggtgacatagtacattttggtcg

SEQ ID NO: 47052 - DNA, 30 bp, Artificial Sequence
  Synthetic oligonucleotide
cgagtggagggacgtaatgggtggttgtcg

SEQ ID NO: 47053 - DNA, 30 bp, Artificial Sequence
  Synthetic oligonucleotide
agaacaaaggtatgaggcgtctaccattcg

SEQ ID NO: 47054 - DNA, 30 bp, Artificial Sequence
  Synthetic oligonucleotide
aacgagtcgagcatgaactgaacgcattcg

SEQ ID NO: 47055 - DNA, 30 bp, Artificial Sequence
  Synthetic oligonucleotide
gtaaatcaagtaagagagattgcctattcg

SEQ ID NO: 47056 - DNA, 30 bp, Artificial Sequence
  Synthetic oligonucleotide
gtcatgcagtgtaaatcggacagctcttcg

SEQ ID NO: 47057 - DNA, 30 bp, Artificial Sequence
  Synthetic oligonucleotide
ctcataggagtcggcaaatacgagagttcg

SEQ ID NO: 47058 - DNA, 30 bp, Artificial Sequence
  Synthetic oligonucleotide
ataaaggacccaacgtaccgctaacgttcg

SEQ ID NO: 47059 - DNA, 30 bp, Artificial Sequence
  Synthetic oligonucleotide
aggccagaatagaattgcggatgttgttcg

SEQ ID NO: 47060 - DNA, 30 bp, Artificial Sequence
  Synthetic oligonucleotide
aagatatgcaacttggtgaagacaaaaagg

SEQ ID NO: 47061 - DNA, 30 bp, Artificial Sequence
  Synthetic oligonucleotide
acgactgtatgatatggcactcgaaaaagg

SEQ ID NO: 47062 - DNA, 30 bp, Artificial Sequence
  Synthetic oligonucleotide
tccatccgcattagcgatgaggggaaaagg

SEQ ID NO: 47063 - DNA, 30 bp, Artificial Sequence
  Synthetic oligonucleotide
agagccatcggcgtagaacgaaaccaaagg

SEQ ID NO: 47064 - DNA, 30 bp, Artificial Sequence
  Synthetic oligonucleotide
gttgtgtccctacaaacgggcagtcaaagg

SEQ ID NO: 47065 - DNA, 30 bp, Artificial Sequence
  Synthetic oligonucleotide
ggggatcgcgtacgcgcttgtaacgaaagg

SEQ ID NO: 47066 - DNA, 30 bp, Artificial Sequence
  Synthetic oligonucleotide
atattgccaacgacataggccggcgaaagg

SEQ ID NO: 47067 - DNA, 30 bp, Artificial Sequence
  Synthetic oligonucleotide
cggtcagtagagacatgtgtgtcggaaagg

SEQ ID NO: 47068 - DNA, 30 bp, Artificial Sequence
  Synthetic oligonucleotide
ccaagaagaggtatatacttagtctaaagg

SEQ ID NO: 47069 - DNA, 30 bp, Artificial Sequence
  Synthetic oligonucleotide
acgagtgtgcccggattagatgccacaagg

SEQ ID NO: 47070 - DNA, 30 bp, Artificial Sequence
  Synthetic oligonucleotide
caatgccacaggccacctctaatcacaagg

SEQ ID NO: 47071 - DNA, 30 bp, Artificial Sequence
  Synthetic oligonucleotide
cacgcgatggcacgacggccactcacaagg

SEQ ID NO: 47072 - DNA, 30 bp, Artificial Sequence
  Synthetic oligonucleotide
gcgattcagcacgcagaaaaaggggcaagg

SEQ ID NO: 47073 - DNA, 30 bp, Artificial Sequence
  Synthetic oligonucleotide
gggtctccaatatgtagggaagaatcaagg

SEQ ID NO: 47074 - DNA, 30 bp, Artificial Sequence
  Synthetic oligonucleotide
ggtcaacgatttggcaatgtagactcaagg

SEQ ID NO: 47075 - DNA, 30 bp, Artificial Sequence
  Synthetic oligonucleotide
cacaagtatggcggggtaagcaagtcaagg

SEQ ID NO: 47076 - DNA, 30 bp, Artificial Sequence
  Synthetic oligonucleotide
cggagggaacattcacagataaggtcaagg

SEQ ID NO: 47077 - DNA, 30 bp, Artificial Sequence
  Synthetic oligonucleotide
agtggtaaatcccatcgacacgtttcaagg

SEQ ID NO: 47078 - DNA, 30 bp, Artificial Sequence
  Synthetic oligonucleotide
aaccgttggcgtaacacttgcataagaagg

SEQ ID NO: 47079 - DNA, 30 bp, Artificial Sequence
  Synthetic oligonucleotide
tcacactgacaggatggccatctacgaagg

SEQ ID NO: 47080 - DNA, 30 bp, Artificial Sequence
  Synthetic oligonucleotide
ggatgggcagaccctataatacgtcgaagg

SEQ ID NO: 47081 - DNA, 30 bp, Artificial Sequence
  Synthetic oligonucleotide
cgtgatacatcatcaggtgcactcggaagg

SEQ ID NO: 47082 - DNA, 30 bp, Artificial Sequence
  Synthetic oligonucleotide
actggcggagcggagattgatgtatgaagg

SEQ ID NO: 47083 - DNA, 30 bp, Artificial Sequence
  Synthetic oligonucleotide
aacttatagggcagtaaacaatcgataagg

SEQ ID NO: 47084 - DNA, 30 bp, Artificial Sequence
  Synthetic oligonucleotide
gttccgagagatccagtcgcattgataagg

SEQ ID NO: 47085 - DNA, 30 bp, Artificial Sequence
  Synthetic oligonucleotide
ttcacagcaaacaaactgaccttgataagg

SEQ ID NO: 47086 - DNA, 30 bp, Artificial Sequence
  Synthetic oligonucleotide
tcagtttcactcgacataccggatataagg

SEQ ID NO: 47087 - DNA, 30 bp, Artificial Sequence
  Synthetic oligonucleotide
atgaaagtcttacaagaaaatgcactaagg

SEQ ID NO: 47088 - DNA, 30 bp, Artificial Sequence
  Synthetic oligonucleotide
ctacatacaggagaggtgctcatagtaagg

SEQ ID NO: 47089 - DNA, 30 bp, Artificial Sequence
  Synthetic oligonucleotide
acgagtctcgttcaacccgttctaaacagg

SEQ ID NO: 47090 - DNA, 30 bp, Artificial Sequence
  Synthetic oligonucleotide
tcatcagcctgtgctgaaaacttaaacagg

SEQ ID NO: 47091 - DNA, 30 bp, Artificial Sequence
  Synthetic oligonucleotide
tacgggaagtggatgaagggcaacaacagg

SEQ ID NO: 47092 - DNA, 30 bp, Artificial Sequence
  Synthetic oligonucleotide
cagcttcaccaaacttaattctgcaacagg

SEQ ID NO: 47093 - DNA, 30 bp, Artificial Sequence
  Synthetic oligonucleotide
tcatacaagtcaggccagggccagaacagg

SEQ ID NO: 47094 - DNA, 30 bp, Artificial Sequence
  Synthetic oligonucleotide
aggaaagtacttctaaccttcccgaacagg

SEQ ID NO: 47095 - DNA, 30 bp, Artificial Sequence
  Synthetic oligonucleotide
atggatgaataagataacacgaggaacagg

SEQ ID NO: 47096 - DNA, 30 bp, Artificial Sequence
  Synthetic oligonucleotide
ccccacaggaataagtaaacccgtaacagg

SEQ ID NO: 47097 - DNA, 30 bp, Artificial Sequence
  Synthetic oligonucleotide
cagtgggtaaggatagtcaaccaagacagg

SEQ ID NO: 47098 - DNA, 30 bp, Artificial Sequence
  Synthetic oligonucleotide
tatcaggggggtgaggacacaagtgacagg

SEQ ID NO: 47099 - DNA, 30 bp, Artificial Sequence
  Synthetic oligonucleotide
ttacgcaacatgtccaaatcaacctacagg

SEQ ID NO: 47100 - DNA, 30 bp, Artificial Sequence
  Synthetic oligonucleotide
aattgcattgattataaccatggaaccagg

SEQ ID NO: 47101 - DNA, 30 bp, Artificial Sequence
  Synthetic oligonucleotide
cataggcgtagaattagcttatgaaccagg

SEQ ID NO: 47102 - DNA, 30 bp, Artificial Sequence
  Synthetic oligonucleotide
aattgaatattagacggtatcataaccagg

SEQ ID NO: 47103 - DNA, 30 bp, Artificial Sequence
  Synthetic oligonucleotide
tatcaagaggacatggaagtttgcaccagg

SEQ ID NO: 47104 - DNA, 30 bp, Artificial Sequence
  Synthetic oligonucleotide
caaggctggggtaaattcttccaacccagg

SEQ ID NO: 47105 - DNA, 30 bp, Artificial Sequence
  Synthetic oligonucleotide
tcacgcctagctcagtctttacaagccagg

SEQ ID NO: 47106 - DNA, 30 bp, Artificial Sequence
  Synthetic oligonucleotide
tgcgtaatacaggttatctcagccgccagg

SEQ ID NO: 47107 - DNA, 30 bp, Artificial Sequence
  Synthetic oligonucleotide
acctatgtagcacgcaactagtgatccagg

SEQ ID NO: 47108 - DNA, 30 bp, Artificial Sequence
  Synthetic oligonucleotide
ccctaccgtaaggtgggcctaagttccagg

SEQ ID NO: 47109 - DNA, 30 bp, Artificial Sequence
  Synthetic oligonucleotide
agcgggaacaaggctgtccagtaaagcagg

SEQ ID NO: 47110 - DNA, 30 bp, Artificial Sequence
  Synthetic oligonucleotide
gaggagggaagaaattcaaatcaatgcagg

SEQ ID NO: 47111 - DNA, 30 bp, Artificial Sequence
  Synthetic oligonucleotide
gtagtagagacggtacacagcgaaatcagg

SEQ ID NO: 47112 - DNA, 30 bp, Artificial Sequence
  Synthetic oligonucleotide
ttgcacaaaaccgactgatggatcatcagg

SEQ ID NO: 47113 - DNA, 30 bp, Artificial Sequence
  Synthetic oligonucleotide
cgaaactcgtggactagtgagggtatcagg

SEQ ID NO: 47114 - DNA, 30 bp, Artificial Sequence
  Synthetic oligonucleotide
cctcccaaacagcgtgcttcgatactcagg

SEQ ID NO: 47115 - DNA, 30 bp, Artificial Sequence
  Synthetic oligonucleotide
atgtacaagatcgtaccaaggcacgtcagg

SEQ ID NO: 47116 - DNA, 30 bp, Artificial Sequence
  Synthetic oligonucleotide
ataacaggataacatgaagcaagggtcagg

SEQ ID NO: 47117 - DNA, 30 bp, Artificial Sequence
  Synthetic oligonucleotide
cgcaaagctcaactaagcccgaccttcagg

SEQ ID NO: 47118 - DNA, 30 bp, Artificial Sequence
  Synthetic oligonucleotide
agttaagtttgaattgtccgaatgaagagg

SEQ ID NO: 47119 - DNA, 30 bp, Artificial Sequence
  Synthetic oligonucleotide
ggggttgcatttggatctgaagtgaagagg

SEQ ID NO: 47120 - DNA, 30 bp, Artificial Sequence
  Synthetic oligonucleotide
cgattggtatgttacgtgtagaaagagagg

SEQ ID NO: 47121 - DNA, 30 bp, Artificial Sequence
  Synthetic oligonucleotide
aggaagttacctgtgccacaggttacgagg

SEQ ID NO: 47122 - DNA, 30 bp, Artificial Sequence
  Synthetic oligonucleotide
agccacgcaacagatgtattaagagcgagg

SEQ ID NO: 47123 - DNA, 30 bp, Artificial Sequence
  Synthetic oligonucleotide
agatgagacctctggcgacagggttcgagg

SEQ ID NO: 47124 - DNA, 30 bp, Artificial Sequence
  Synthetic oligonucleotide
aggtccggacctacgtgagactacaggagg

SEQ ID NO: 47125 - DNA, 30 bp, Artificial Sequence
  Synthetic oligonucleotide
agttgactaattagctagcatggccggagg

SEQ ID NO: 47126 - DNA, 30 bp, Artificial Sequence
  Synthetic oligonucleotide
gcaggcatttcgcaacatataaaagggagg

SEQ ID NO: 47127 - DNA, 30 bp, Artificial Sequence
  Synthetic oligonucleotide
ccgtggatactgggacagaagtcctggagg

SEQ ID NO: 47128 - DNA, 30 bp, Artificial Sequence
  Synthetic oligonucleotide
cgaagggcagaaggagctcatagttggagg

SEQ ID NO: 47129 - DNA, 30 bp, Artificial Sequence
  Synthetic oligonucleotide
agtagagcaccaattggagttcagctgagg

SEQ ID NO: 47130 - DNA, 30 bp, Artificial Sequence
  Synthetic oligonucleotide
ggaggaggaggtctcctggttagattgagg

SEQ ID NO: 47131 - DNA, 30 bp, Artificial Sequence
  Synthetic oligonucleotide
accaagggcgcaaaaaacgtccgaaatagg

SEQ ID NO: 47132 - DNA, 30 bp, Artificial Sequence
  Synthetic oligonucleotide
ctgttcacgctcgcgggagggtagaatagg

SEQ ID NO: 47133 - DNA, 30 bp, Artificial Sequence
  Synthetic oligonucleotide
ggcaccacagcagattgtaatggtcatagg

SEQ ID NO: 47134 - DNA, 30 bp, Artificial Sequence
  Synthetic oligonucleotide
gaacattgctaccaccaatggcttgatagg

SEQ ID NO: 47135 - DNA, 30 bp, Artificial Sequence
  Synthetic oligonucleotide
cttgcgaggtagacaggagtgggttatagg

SEQ ID NO: 47136 - DNA, 30 bp, Artificial Sequence
  Synthetic oligonucleotide
gaactcaaccccgcgcaaattgtaactagg

SEQ ID NO: 47137 - DNA, 30 bp, Artificial Sequence
  Synthetic oligonucleotide
tacaacaatgctcagtgcgtgatcactagg

SEQ ID NO: 47138 - DNA, 30 bp, Artificial Sequence
  Synthetic oligonucleotide
tcatgctaggtgggttaccaatagactagg

SEQ ID NO: 47139 - DNA, 30 bp, Artificial Sequence
  Synthetic oligonucleotide
caagggctgaagccacgggtacctgctagg

SEQ ID NO: 47140 - DNA, 30 bp, Artificial Sequence
  Synthetic oligonucleotide
tggaacttgaatttcgattggtcaagtagg

SEQ ID NO: 47141 - DNA, 30 bp, Artificial Sequence
  Synthetic oligonucleotide
ctacatgcacccggaaataactgaagtagg

SEQ ID NO: 47142 - DNA, 30 bp, Artificial Sequence
  Synthetic oligonucleotide
ggtaataggtgctcataataaactagtagg

SEQ ID NO: 47143 - DNA, 30 bp, Artificial Sequence
  Synthetic oligonucleotide
cgcccagtacgtacaaaaaactctagtagg

SEQ ID NO: 47144 - DNA, 31 bp, Artificial Sequence
  Synthetic oligonucleotide
gacctaaaatgtgattgttcagggaggtagg

SEQ ID NO: 47145 - DNA, 30 bp, Artificial Sequence
  Synthetic oligonucleotide
cccaacaggacggaacatggtctgtgtagg

SEQ ID NO: 47146 - DNA, 30 bp, Artificial Sequence
  Synthetic oligonucleotide
aaggctgtgtacagaacgatggtgattagg

SEQ ID NO: 47147 - DNA, 30 bp, Artificial Sequence
  Synthetic oligonucleotide
gcggccataaggatgtggtactgtattagg

SEQ ID NO: 47148 - DNA, 30 bp, Artificial Sequence
  Synthetic oligonucleotide
agatagaacggtttaactctgaagtttagg

SEQ ID NO: 47149 - DNA, 31 bp, Artificial Sequence
  Synthetic oligonucleotide
gaatgaatagatagctacctacccacaacgg

SEQ ID NO: 47150 - DNA, 30 bp, Artificial Sequence
  Synthetic oligonucleotide
caccattaggagccacgacaaaccgaacgg

SEQ ID NO: 47151 - DNA, 30 bp, Artificial Sequence
  Synthetic oligonucleotide
cgccaagctagggcgagtaagggcgaacgg

SEQ ID NO: 47152 - DNA, 30 bp, Artificial Sequence
  Synthetic oligonucleotide
tgggtacaatgagcgagttgttgataacgg

SEQ ID NO: 47153 - DNA, 30 bp, Artificial Sequence
  Synthetic oligonucleotide
aacgagcaggaaggtaggggacccacacgg

SEQ ID NO: 47154 - DNA, 30 bp, Artificial Sequence
  Synthetic oligonucleotide
ctaaagagtggcataacctccgtaccacgg

SEQ ID NO: 47155 - DNA, 30 bp, Artificial Sequence
  Synthetic oligonucleotide
tgggggcgatggagtctaaacgagtcacgg

SEQ ID NO: 47156 - DNA, 30 bp, Artificial Sequence
  Synthetic oligonucleotide
tggagatactaaaaggtgaattcagtacgg

SEQ ID NO: 47157 - DNA, 30 bp, Artificial Sequence
  Synthetic oligonucleotide
gcttatgtacaataaatgcaagagttacgg

SEQ ID NO: 47158 - DNA, 30 bp, Artificial Sequence
  Synthetic oligonucleotide
tagcgacaatctgggtaaaggccataccgg

SEQ ID NO: 47159 - DNA, 30 bp, Artificial Sequence
  Synthetic oligonucleotide
atgatgcggtgactttcgacagatacccgg

SEQ ID NO: 47160 - DNA, 30 bp, Artificial Sequence
  Synthetic oligonucleotide
aaggactacgcattccagaccggggcccgg

SEQ ID NO: 47161 - DNA, 30 bp, Artificial Sequence
  Synthetic oligonucleotide
tcgaaagagttcgggacgttagttatccgg

SEQ ID NO: 47162 - DNA, 30 bp, Artificial Sequence
  Synthetic oligonucleotide
cagtcaacgtgaagatgggtggacctccgg

SEQ ID NO: 47163 - DNA, 30 bp, Artificial Sequence
  Synthetic oligonucleotide
cggagtttgagtacaatagacccgaagcgg

SEQ ID NO: 47164 - DNA, 30 bp, Artificial Sequence
  Synthetic oligonucleotide
acagggctgatgtgtgaacgtaattagcgg

SEQ ID NO: 47165 - DNA, 30 bp, Artificial Sequence
  Synthetic oligonucleotide
accgggatcaaaaaggcaccaggaacgcgg

SEQ ID NO: 47166 - DNA, 30 bp, Artificial Sequence
  Synthetic oligonucleotide
gacggtaagtacaccctcagcatagcgcgg

SEQ ID NO: 47167 - DNA, 30 bp, Artificial Sequence
  Synthetic oligonucleotide
acatcataaggtgatcgaagcaaggcgcgg

SEQ ID NO: 47168 - DNA, 30 bp, Artificial Sequence
  Synthetic oligonucleotide
tgcgcgcatggtgtagtagcaggttcgcgg

SEQ ID NO: 47169 - DNA, 30 bp, Artificial Sequence
  Synthetic oligonucleotide
cgggaatctcacgccagcaataggaggcgg

SEQ ID NO: 47170 - DNA, 30 bp, Artificial Sequence
  Synthetic oligonucleotide
aacggtgtacataacgcgccactggggcgg

SEQ ID NO: 47171 - DNA, 30 bp, Artificial Sequence
  Synthetic oligonucleotide
atagacataagctcggaaggggggatgcgg

SEQ ID NO: 47172 - DNA, 30 bp, Artificial Sequence
  Synthetic oligonucleotide
tggaaccatacatattccgccgtcctgcgg

SEQ ID NO: 47173 - DNA, 30 bp, Artificial Sequence
  Synthetic oligonucleotide
ggtaatagtcgaccagaaagtgggctgcgg

SEQ ID NO: 47174 - DNA, 30 bp, Artificial Sequence
  Synthetic oligonucleotide
agatagcgcgttagttactgctgtctgcgg

SEQ ID NO: 47175 - DNA, 30 bp, Artificial Sequence
  Synthetic oligonucleotide
tgttaaacgagtgcgagcaagcagttgcgg

SEQ ID NO: 47176 - DNA, 30 bp, Artificial Sequence
  Synthetic oligonucleotide
cgacaaatcagcatcagtacattgcatcgg

SEQ ID NO: 47177 - DNA, 30 bp, Artificial Sequence
  Synthetic oligonucleotide
gctcgaagtgacacgacgtactatactcgg

SEQ ID NO: 47178 - DNA, 30 bp, Artificial Sequence
  Synthetic oligonucleotide
acattccacccaacgttacgtagtagtcgg

SEQ ID NO: 47179 - DNA, 30 bp, Artificial Sequence
  Synthetic oligonucleotide
tcgagacatagtgctctcaaacgccgtcgg

SEQ ID NO: 47180 - DNA, 30 bp, Artificial Sequence
  Synthetic oligonucleotide
agggtatccgggtgatgagtggatcgtcgg

SEQ ID NO: 47181 - DNA, 30 bp, Artificial Sequence
  Synthetic oligonucleotide
accaggaatgcaattaaactcgttattcgg

SEQ ID NO: 47182 - DNA, 30 bp, Artificial Sequence
  Synthetic oligonucleotide
gagtcaaaaaagggggtatacggtgttcgg

SEQ ID NO: 47183 - DNA, 30 bp, Artificial Sequence
  Synthetic oligonucleotide
gggcaaaagcagcgagggggtgtaaaaggg

SEQ ID NO: 47184 - DNA, 30 bp, Artificial Sequence
  Synthetic oligonucleotide
accgattgggtaacgaaggccagtaaaggg

SEQ ID NO: 47185 - DNA, 30 bp, Artificial Sequence
  Synthetic oligonucleotide
acggggatccaccaccccgacctacaaggg

SEQ ID NO: 47186 - DNA, 30 bp, Artificial Sequence
  Synthetic oligonucleotide
acgtagctccaaaccatactgtcccaaggg

SEQ ID NO: 47187 - DNA, 30 bp, Artificial Sequence
  Synthetic oligonucleotide
tatcactacgggaggtccaacgtaacaggg

SEQ ID NO: 47188 - DNA, 30 bp, Artificial Sequence
  Synthetic oligonucleotide
gaatccagtcgaaccgagcgatctacaggg

SEQ ID NO: 47189 - DNA, 30 bp, Artificial Sequence
  Synthetic oligonucleotide
acattgtagctgaggatggtgatcccaggg

SEQ ID NO: 47190 - DNA, 30 bp, Artificial Sequence
  Synthetic oligonucleotide
agtacgaattatttagcagaccaggcaggg

SEQ ID NO: 47191 - DNA, 30 bp, Artificial Sequence
  Synthetic oligonucleotide
cgctgtacctgcacgaatcatggatcaggg

SEQ ID NO: 47192 - DNA, 30 bp, Artificial Sequence
  Synthetic oligonucleotide
tcaataactccggaaaagcctcactcaggg

SEQ ID NO: 47193 - DNA, 30 bp, Artificial Sequence
  Synthetic oligonucleotide
gcctaaactaacatatgtacatagtcaggg

SEQ ID NO: 47194 - DNA, 30 bp, Artificial Sequence
  Synthetic oligonucleotide
gtaagcgggtccagtcgcacctccagaggg

SEQ ID NO: 47195 - DNA, 30 bp, Artificial Sequence
  Synthetic oligonucleotide
gagcggcaacaacgtatcaggagcagaggg

SEQ ID NO: 47196 - DNA, 30 bp, Artificial Sequence
  Synthetic oligonucleotide
cggcaactccttatgtgcaatttcagaggg

SEQ ID NO: 47197 - DNA, 30 bp, Artificial Sequence
  Synthetic oligonucleotide
agaggtgctctttttacgagatcgagaggg

SEQ ID NO: 47198 - DNA, 30 bp, Artificial Sequence
  Synthetic oligonucleotide
agcgtttcgctcgatcacaacaggagaggg

SEQ ID NO: 47199 - DNA, 40 bp, Artificial Sequence
  Synthetic oligonucleotide
ctcataaatccgagatccgcgagctttttatgggagaggg

SEQ ID NO: 47200 - DNA, 30 bp, Artificial Sequence
  Synthetic oligonucleotide
ctcagacgaccttatgctcgcgatagaggg

SEQ ID NO: 47201 - DNA, 30 bp, Artificial Sequence
  Synthetic oligonucleotide
acgacgttcgtaaaacaataacctagaggg

SEQ ID NO: 47202 - DNA, 30 bp, Artificial Sequence
  Synthetic oligonucleotide
ttggagattaaccggaaacgagagggaggg

SEQ ID NO: 47203 - DNA, 30 bp, Artificial Sequence
  Synthetic oligonucleotide
aggataacaggcgagtgtgcgttaataggg

SEQ ID NO: 47204 - DNA, 30 bp, Artificial Sequence
  Synthetic oligonucleotide
taggttggatatacttctttaaccctaggg

SEQ ID NO: 47205 - DNA, 30 bp, Artificial Sequence
  Synthetic oligonucleotide
cgtgagcggtttaacgtaacgaggctaggg

SEQ ID NO: 47206 - DNA, 30 bp, Artificial Sequence
  Synthetic oligonucleotide
accatggtgggaggactccactggctaggg

SEQ ID NO: 47207 - DNA, 30 bp, Artificial Sequence
  Synthetic oligonucleotide
ggaattgatatgcacattcagcaagtaggg

SEQ ID NO: 47208 - DNA, 30 bp, Artificial Sequence
  Synthetic oligonucleotide
agagcgatttagtttcgagggtgattaggg

SEQ ID NO: 47209 - DNA, 30 bp, Artificial Sequence
  Synthetic oligonucleotide
tggcggacccacatggttacccacttaggg

SEQ ID NO: 47210 - DNA, 30 bp, Artificial Sequence
  Synthetic oligonucleotide
agtacacttagaacggaagaataaaacggg

SEQ ID NO: 47211 - DNA, 30 bp, Artificial Sequence
  Synthetic oligonucleotide
gtcgtgctagaatagttgaaagtaaacggg

SEQ ID NO: 47212 - DNA, 30 bp, Artificial Sequence
  Synthetic oligonucleotide
ataggctgtaacatcaggattgcccacggg

SEQ ID NO: 47213 - DNA, 30 bp, Artificial Sequence
  Synthetic oligonucleotide
aggcgtagcaggtcctttctgaatcacggg

SEQ ID NO: 47214 - DNA, 30 bp, Artificial Sequence
  Synthetic oligonucleotide
tagcaaaaaaatgtggctccgggatacggg

SEQ ID NO: 47215 - DNA, 30 bp, Artificial Sequence
  Synthetic oligonucleotide
cagatatatgctaaggtatccaggcccggg

SEQ ID NO: 47216 - DNA, 30 bp, Artificial Sequence
  Synthetic oligonucleotide
tgcgaataaatcgataccctaagggccggg

SEQ ID NO: 47217 - DNA, 30 bp, Artificial Sequence
  Synthetic oligonucleotide
tgtgacaattgaattgagaaaaaaagcggg

SEQ ID NO: 47218 - DNA, 30 bp, Artificial Sequence
  Synthetic oligonucleotide
acagatgtctaaatattaggagaacgcggg

SEQ ID NO: 47219 - DNA, 30 bp, Artificial Sequence
  Synthetic oligonucleotide
ctgaaccgagtgcatagcgtgtgtcgcggg

SEQ ID NO: 47220 - DNA, 30 bp, Artificial Sequence
  Synthetic oligonucleotide
aggcggaacagataacttgttaacggcggg

SEQ ID NO: 47221 - DNA, 30 bp, Artificial Sequence
  Synthetic oligonucleotide
aatactgtaaacgtgttcgaacctggcggg

SEQ ID NO: 47222 - DNA, 30 bp, Artificial Sequence
  Synthetic oligonucleotide
aggttaaacaaactagcgttagggatcggg

SEQ ID NO: 47223 - DNA, 30 bp, Artificial Sequence
  Synthetic oligonucleotide
cgcaccgggacagctgcgtattcattcggg

SEQ ID NO: 47224 - DNA, 30 bp, Artificial Sequence
  Synthetic oligonucleotide
gaagggcagcattagtcaagccagttcggg

SEQ ID NO: 47225 - DNA, 30 bp, Artificial Sequence
  Synthetic oligonucleotide
gcggtatgtaggtgtcggatagtcaagggg

SEQ ID NO: 47226 - DNA, 35 bp, Artificial Sequence
  Synthetic oligonucleotide
gtgtatgatgtatagcgggtgtcgaccggaagggg

SEQ ID NO: 47227 - DNA, 30 bp, Artificial Sequence
  Synthetic oligonucleotide
tcaccgcattcaaagtaaaccgataagggg

SEQ ID NO: 47228 - DNA, 30 bp, Artificial Sequence
  Synthetic oligonucleotide
gtaaggggaaccgaaaaaaatgataagggg

SEQ ID NO: 47229 - DNA, 30 bp, Artificial Sequence
  Synthetic oligonucleotide
aggggtctgccagacagaccgcgacagggg

SEQ ID NO: 47230 - DNA, 30 bp, Artificial Sequence
  Synthetic oligonucleotide
cgggcagggttccatacggatgtccagggg

SEQ ID NO: 47231 - DNA, 30 bp, Artificial Sequence
  Synthetic oligonucleotide
gtgttcaagatcgaaggcacatgggagggg

SEQ ID NO: 47232 - DNA, 30 bp, Artificial Sequence
  Synthetic oligonucleotide
ccgtttaagacgtggtcaggtcatgagggg

SEQ ID NO: 47233 - DNA, 30 bp, Artificial Sequence
  Synthetic oligonucleotide
agacagtcgaatgggattgattgtgagggg

SEQ ID NO: 47234 - DNA, 30 bp, Artificial Sequence
  Synthetic oligonucleotide
acagaagtaccagagcgcagataaacgggg

SEQ ID NO: 47235 - DNA, 30 bp, Artificial Sequence
  Synthetic oligonucleotide
tcgttaggggttcaattgtgcacaacgggg

SEQ ID NO: 47236 - DNA, 29 bp, Artificial Sequence
  Synthetic oligonucleotide
ccaaggtgggagcaatattagtaccgggg

SEQ ID NO: 47237 - DNA, 30 bp, Artificial Sequence
  Synthetic oligonucleotide
cactccgacgtcaagtaacatgagccgggg

SEQ ID NO: 47238 - DNA, 30 bp, Artificial Sequence
  Synthetic oligonucleotide
cgagctatgagtgcacaaagtttggcgggg

SEQ ID NO: 47239 - DNA, 30 bp, Artificial Sequence
  Synthetic oligonucleotide
acatgtatgcgagatcggcacacaaggggg

SEQ ID NO: 47240 - DNA, 30 bp, Artificial Sequence
  Synthetic oligonucleotide
gacggcgactgaaggaggaatccagggggg

SEQ ID NO: 47241 - DNA, 30 bp, Artificial Sequence
  Synthetic oligonucleotide
tcatttgggtatatccttgagcgagggggg

SEQ ID NO: 47242 - DNA, 31 bp, Artificial Sequence
  Synthetic oligonucleotide
aaaccgtgtggtaggcacgacagctgggggg

SEQ ID NO: 47243 - DNA, 30 bp, Artificial Sequence
  Synthetic oligonucleotide
tactcaacgtatctctcagcggcttggggg

SEQ ID NO: 47244 - DNA, 30 bp, Artificial Sequence
  Synthetic oligonucleotide
ggcggaacaaggccaccggtagtaatgggg

SEQ ID NO: 47245 - DNA, 30 bp, Artificial Sequence
  Synthetic oligonucleotide
gaagtagaaaggcgaataaaatgcaatggg

SEQ ID NO: 47246 - DNA, 30 bp, Artificial Sequence
  Synthetic oligonucleotide
cgggaaagcttttcagcgtcatatcatggg

SEQ ID NO: 47247 - DNA, 30 bp, Artificial Sequence
  Synthetic oligonucleotide
cggcgtcatagtgtagcagatgaggatggg

SEQ ID NO: 47248 - DNA, 30 bp, Artificial Sequence
  Synthetic oligonucleotide
taagggggtcatacgtaacgcttctatggg

SEQ ID NO: 47249 - DNA, 30 bp, Artificial Sequence
  Synthetic oligonucleotide
agcggaagctcgacaatgcaactagctggg

SEQ ID NO: 47250 - DNA, 30 bp, Artificial Sequence
  Synthetic oligonucleotide
gctgtgaggaataaaactgacttgagtggg

SEQ ID NO: 47251 - DNA, 30 bp, Artificial Sequence
  Synthetic oligonucleotide
cgtcggttgcgcaattaagcatttagtggg

SEQ ID NO: 47252 - DNA, 30 bp, Artificial Sequence
  Synthetic oligonucleotide
ccgtgttcaatgaccttcgcggggcgtggg

SEQ ID NO: 47253 - DNA, 30 bp, Artificial Sequence
  Synthetic oligonucleotide
cggcctagtccgtcaaggcgataaggtggg

SEQ ID NO: 47254 - DNA, 30 bp, Artificial Sequence
  Synthetic oligonucleotide
acagagagataaatgggtatcgttgttggg

SEQ ID NO: 47255 - DNA, 30 bp, Artificial Sequence
  Synthetic oligonucleotide
caccgctctcggaaatggggaacatttggg

SEQ ID NO: 47256 - DNA, 30 bp, Artificial Sequence
  Synthetic oligonucleotide
gtgagagtatccgcccgatcgcacaaatgg

SEQ ID NO: 47257 - DNA, 30 bp, Artificial Sequence
  Synthetic oligonucleotide
agttggtccagcctcaggaatggtcaatgg

SEQ ID NO: 47258 - DNA, 30 bp, Artificial Sequence
  Synthetic oligonucleotide
aatcgaagacttagagacaatagagaatgg

SEQ ID NO: 47259 - DNA, 30 bp, Artificial Sequence
  Synthetic oligonucleotide
agagtgggtgccggtatggcagtaacatgg

SEQ ID NO: 47260 - DNA, 30 bp, Artificial Sequence
  Synthetic oligonucleotide
ggtgagcagtacagctgcaactcaccatgg

SEQ ID NO: 47261 - DNA, 30 bp, Artificial Sequence
  Synthetic oligonucleotide
gtcaggattagaaccagcgctcggccatgg

SEQ ID NO: 47262 - DNA, 30 bp, Artificial Sequence
  Synthetic oligonucleotide
atgcaatacccgatatataaaacagcatgg

SEQ ID NO: 47263 - DNA, 30 bp, Artificial Sequence
  Synthetic oligonucleotide
ggaaacaggccacatgtcgtgatgcgatgg

SEQ ID NO: 47264 - DNA, 30 bp, Artificial Sequence
  Synthetic oligonucleotide
acgtgactgtaacgcggcgggaagtgatgg

SEQ ID NO: 47265 - DNA, 30 bp, Artificial Sequence
  Synthetic oligonucleotide
gcgacaattgtgtttgggatgaagtgatgg

SEQ ID NO: 47266 - DNA, 30 bp, Artificial Sequence
  Synthetic oligonucleotide
acacagtgcacgcccagtagaatcatatgg

SEQ ID NO: 47267 - DNA, 30 bp, Artificial Sequence
  Synthetic oligonucleotide
cgtaaatcattgcgtgttatgcaactatgg

SEQ ID NO: 47268 - DNA, 30 bp, Artificial Sequence
  Synthetic oligonucleotide
cgacccgtacttgtggacggaacaaactgg

SEQ ID NO: 47269 - DNA, 31 bp, Artificial Sequence
  Synthetic oligonucleotide
ggcggagtaatgtcgtagtaggatacactgg

SEQ ID NO: 47270 - DNA, 30 bp, Artificial Sequence
  Synthetic oligonucleotide
accagaagatacagagattcgtcatactgg

SEQ ID NO: 47271 - DNA, 30 bp, Artificial Sequence
  Synthetic oligonucleotide
acggatgaggagttacaggtcggatactgg

SEQ ID NO: 47272 - DNA, 30 bp, Artificial Sequence
  Synthetic oligonucleotide
acaatgggggtcgggcaggaagtcccctgg

SEQ ID NO: 47273 - DNA, 30 bp, Artificial Sequence
  Synthetic oligonucleotide
cgtccaagtccatcgcgtagtgagccctgg

SEQ ID NO: 47274 - DNA, 30 bp, Artificial Sequence
  Synthetic oligonucleotide
tcgtcttacatccgtaataagctatcctgg

SEQ ID NO: 47275 - DNA, 30 bp, Artificial Sequence
  Synthetic oligonucleotide
agggttttatcaaagcgtaagtggagctgg

SEQ ID NO: 47276 - DNA, 30 bp, Artificial Sequence
  Synthetic oligonucleotide
taacggtatgggctgatctagaaatgctgg

SEQ ID NO: 47277 - DNA, 30 bp, Artificial Sequence
  Synthetic oligonucleotide
aacgatggtctcgacaactatcattgctgg

SEQ ID NO: 47278 - DNA, 30 bp, Artificial Sequence
  Synthetic oligonucleotide
tgagacatcagtcgaagaggttgactctgg

SEQ ID NO: 47279 - DNA, 30 bp, Artificial Sequence
  Synthetic oligonucleotide
tagctaaaattcacaagaagcgcagtctgg

SEQ ID NO: 47280 - DNA, 30 bp, Artificial Sequence
  Synthetic oligonucleotide
gggtggagtaggggacagatgattaagtgg

SEQ ID NO: 47281 - DNA, 30 bp, Artificial Sequence
  Synthetic oligonucleotide
acgatagatccggatccacaaacggagtgg

SEQ ID NO: 47282 - DNA, 30 bp, Artificial Sequence
  Synthetic oligonucleotide
catgattcccattatgtgacatatacgtgg

SEQ ID NO: 47283 - DNA, 30 bp, Artificial Sequence
  Synthetic oligonucleotide
cctgagacggaatagccttgtcaatggtgg

SEQ ID NO: 47284 - DNA, 30 bp, Artificial Sequence
  Synthetic oligonucleotide
tgtggtgtcggttggaacactagctggtgg

SEQ ID NO: 47285 - DNA, 30 bp, Artificial Sequence
  Synthetic oligonucleotide
tcgtggtctagcgttgtagaaggaatgtgg

SEQ ID NO: 47286 - DNA, 30 bp, Artificial Sequence
  Synthetic oligonucleotide
ccgttgctagtgtctgctagatcattgtgg

SEQ ID NO: 47287 - DNA, 30 bp, Artificial Sequence
  Synthetic oligonucleotide
ttgaggggactgatgggagtgcacttgtgg

SEQ ID NO: 47288 - DNA, 30 bp, Artificial Sequence
  Synthetic oligonucleotide
ttctaggggaagcaaaaaaccgccaattgg

SEQ ID NO: 47289 - DNA, 30 bp, Artificial Sequence
  Synthetic oligonucleotide
atgtacaaacgatcttagtcagtgaattgg

SEQ ID NO: 47290 - DNA, 30 bp, Artificial Sequence
  Synthetic oligonucleotide
gatggcacaggctaagagaaatgtaattgg

SEQ ID NO: 47291 - DNA, 30 bp, Artificial Sequence
  Synthetic oligonucleotide
cctggagtaccagagtgggctcatcattgg

SEQ ID NO: 47292 - DNA, 30 bp, Artificial Sequence
  Synthetic oligonucleotide
gaggggatcatgtcactgcttcgatattgg

SEQ ID NO: 47293 - DNA, 30 bp, Artificial Sequence
  Synthetic oligonucleotide
gtggcaggttagtaaggagaggtcacttgg

SEQ ID NO: 47294 - DNA, 30 bp, Artificial Sequence
  Synthetic oligonucleotide
atcggtgcaaggctacctgaaaagagttgg

SEQ ID NO: 47295 - DNA, 30 bp, Artificial Sequence
  Synthetic oligonucleotide
aaggttgcgtaaaagcagttggtacgttgg

SEQ ID NO: 47296 - DNA, 30 bp, Artificial Sequence
  Synthetic oligonucleotide
agagtgagtttggacgagaatatctgttgg

SEQ ID NO: 47297 - DNA, 30 bp, Artificial Sequence
  Synthetic oligonucleotide
gggtctgttaagggaacactcgtgatttgg

SEQ ID NO: 47298 - DNA, 30 bp, Artificial Sequence
  Synthetic oligonucleotide
cctagtccgtaagaggaggggtatatttgg

SEQ ID NO: 47299 - DNA, 30 bp, Artificial Sequence
  Synthetic oligonucleotide
ttgcgcaaatgcgattgtatcgggcaaatg

SEQ ID NO: 47300 - DNA, 30 bp, Artificial Sequence
  Synthetic oligonucleotide
aaaatggactgtcaaaggtaggtgcaaatg

SEQ ID NO: 47301 - DNA, 30 bp, Artificial Sequence
  Synthetic oligonucleotide
ccgaaactctgttagtgggttggggaaatg

SEQ ID NO: 47302 - DNA, 30 bp, Artificial Sequence
  Synthetic oligonucleotide
atcgaagctggtcggagacatcctgaaatg

SEQ ID NO: 47303 - DNA, 30 bp, Artificial Sequence
  Synthetic oligonucleotide
cctgtgccattacacgccatctgataaatg

SEQ ID NO: 47304 - DNA, 30 bp, Artificial Sequence
  Synthetic oligonucleotide
aacacaaaataaaatagagattgcacaatg

SEQ ID NO: 47305 - DNA, 31 bp, Artificial Sequence
  Synthetic oligonucleotide
aatgagtacacgttgcatagaacatccaatg

SEQ ID NO: 47306 - DNA, 30 bp, Artificial Sequence
  Synthetic oligonucleotide
ggtaagaaaaaagtttactgagttgcaatg

SEQ ID NO: 47307 - DNA, 30 bp, Artificial Sequence
  Synthetic oligonucleotide
cacttttaaggaacacttcaacgaagaatg

SEQ ID NO: 47308 - DNA, 30 bp, Artificial Sequence
  Synthetic oligonucleotide
caactaaggtatttcatcaccgagagaatg

SEQ ID NO: 47309 - DNA, 30 bp, Artificial Sequence
  Synthetic oligonucleotide
gcaccctccgaaaggcaagaacttagaatg

SEQ ID NO: 47310 - DNA, 30 bp, Artificial Sequence
  Synthetic oligonucleotide
cgcaggccataagaaaaaaagcgacgaatg

SEQ ID NO: 47311 - DNA, 30 bp, Artificial Sequence
  Synthetic oligonucleotide
ccgacgtacgatagagggcctccgcgaatg

SEQ ID NO: 47312 - DNA, 30 bp, Artificial Sequence
  Synthetic oligonucleotide
agtcacgcccaaatggcctggtgaggaatg

SEQ ID NO: 47313 - DNA, 30 bp, Artificial Sequence
  Synthetic oligonucleotide
ggtctcagtagaagcgatctagagctaatg

SEQ ID NO: 47314 - DNA, 30 bp, Artificial Sequence
  Synthetic oligonucleotide
caacgtgtcagagaaagattaacgctaatg

SEQ ID NO: 47315 - DNA, 30 bp, Artificial Sequence
  Synthetic oligonucleotide
cgggaagatgccgattttggctccttaatg

SEQ ID NO: 47316 - DNA, 30 bp, Artificial Sequence
  Synthetic oligonucleotide
gcgggactgtgatactgtcgccgtaacatg

SEQ ID NO: 47317 - DNA, 30 bp, Artificial Sequence
  Synthetic oligonucleotide
ctacttataccgggcaaaatcgtacacatg

SEQ ID NO: 47318 - DNA, 30 bp, Artificial Sequence
  Synthetic oligonucleotide
aacctagcccgggagcttggatcagacatg

SEQ ID NO: 47319 - DNA, 30 bp, Artificial Sequence
  Synthetic oligonucleotide
taccaggagaataccgagacatcctacatg

SEQ ID NO: 47320 - DNA, 30 bp, Artificial Sequence
  Synthetic oligonucleotide
aagcagtttaaaacagggatggcttacatg

SEQ ID NO: 47321 - DNA, 30 bp, Artificial Sequence
  Synthetic oligonucleotide
cacactgcgaagcgtctcgcactcaccatg

SEQ ID NO: 47322 - DNA, 31 bp, Artificial Sequence
  Synthetic oligonucleotide
cgaccgaacaggagttagatatcaccccatg

SEQ ID NO: 47323 - DNA, 30 bp, Artificial Sequence
  Synthetic oligonucleotide
agctgggcgggaacacagtgatgctccatg

SEQ ID NO: 47324 - DNA, 30 bp, Artificial Sequence
  Synthetic oligonucleotide
ggcggaggctagtgcatttagtattccatg

SEQ ID NO: 47325 - DNA, 30 bp, Artificial Sequence
  Synthetic oligonucleotide
cgtctgcctcaatcaagctgcgcttccatg

SEQ ID NO: 47326 - DNA, 30 bp, Artificial Sequence
  Synthetic oligonucleotide
atctagggcaatcggaccaagtggagcatg

SEQ ID NO: 47327 - DNA, 30 bp, Artificial Sequence
  Synthetic oligonucleotide
catagcgcagggagagttgaactgagcatg

SEQ ID NO: 47328 - DNA, 30 bp, Artificial Sequence
  Synthetic oligonucleotide
atagagggtgcgtagggttacgatagcatg

SEQ ID NO: 47329 - DNA, 30 bp, Artificial Sequence
  Synthetic oligonucleotide
tgggcaatgtgtcagcgttggaatggcatg

SEQ ID NO: 47330 - DNA, 30 bp, Artificial Sequence
  Synthetic oligonucleotide
aggatgtttcagtattaaagaggcatcatg

SEQ ID NO: 47331 - DNA, 30 bp, Artificial Sequence
  Synthetic oligonucleotide
cctaggaacagtaggctttatatgatcatg

SEQ ID NO: 47332 - DNA, 30 bp, Artificial Sequence
  Synthetic oligonucleotide
gacccaaaatagcgtttatggaagctcatg

SEQ ID NO: 47333 - DNA, 30 bp, Artificial Sequence
  Synthetic oligonucleotide
gtaagagggggattcactggatagaagatg

SEQ ID NO: 47334 - DNA, 30 bp, Artificial Sequence
  Synthetic oligonucleotide
tggctagaggccgaggtcattattaagatg

SEQ ID NO: 47335 - DNA, 30 bp, Artificial Sequence
  Synthetic oligonucleotide
gggggtgaaggtaacttagattcacagatg

SEQ ID NO: 47336 - DNA, 30 bp, Artificial Sequence
  Synthetic oligonucleotide
ggtaatagagggcccgaacgtgatcagatg

SEQ ID NO: 47337 - DNA, 30 bp, Artificial Sequence
  Synthetic oligonucleotide
ttgggaacaagaagcggagacacagagatg

SEQ ID NO: 47338 - DNA, 30 bp, Artificial Sequence
  Synthetic oligonucleotide
ccatgcgttttggggtactgggtggagatg

SEQ ID NO: 47339 - DNA, 30 bp, Artificial Sequence
  Synthetic oligonucleotide
acgagttaaaacattgtctactgatagatg

SEQ ID NO: 47340 - DNA, 30 bp, Artificial Sequence
  Synthetic oligonucleotide
aggaagtgatgaaggtggaaccagtagatg

SEQ ID NO: 47341 - DNA, 31 bp, Artificial Sequence
  Synthetic oligonucleotide
accactgccaactcatataacactcccgatg

SEQ ID NO: 47342 - DNA, 30 bp, Artificial Sequence
  Synthetic oligonucleotide
agtggataggagatggtagtaaggtcgatg

SEQ ID NO: 47343 - DNA, 30 bp, Artificial Sequence
  Synthetic oligonucleotide
gccgacctactaggatgtcagacaaggatg

SEQ ID NO: 47344 - DNA, 30 bp, Artificial Sequence
  Synthetic oligonucleotide
tcggtacgggcctatagataaatacggatg

SEQ ID NO: 47345 - DNA, 30 bp, Artificial Sequence
  Synthetic oligonucleotide
gtgactaggcttacagacaataatcggatg

SEQ ID NO: 47346 - DNA, 30 bp, Artificial Sequence
  Synthetic oligonucleotide
ggttgggatctgtgtgtctgaagagggatg

SEQ ID NO: 47347 - DNA, 30 bp, Artificial Sequence
  Synthetic oligonucleotide
actaaatacttatatttagccagagggatg

SEQ ID NO: 47348 - DNA, 30 bp, Artificial Sequence
  Synthetic oligonucleotide
aagcgagattcgagcgccgactcggggatg

SEQ ID NO: 47349 - DNA, 30 bp, Artificial Sequence
  Synthetic oligonucleotide
atgggtcctatcataacttgcgctgggatg

SEQ ID NO: 47350 - DNA, 30 bp, Artificial Sequence
  Synthetic oligonucleotide
taagaaagaagccgccttctgaaatggatg

SEQ ID NO: 47351 - DNA, 30 bp, Artificial Sequence
  Synthetic oligonucleotide
aggttaaccaatcgggagaggtaaatgatg

SEQ ID NO: 47352 - DNA, 30 bp, Artificial Sequence
  Synthetic oligonucleotide
aacgcgggaacggttctaggaccaatgatg

SEQ ID NO: 47353 - DNA, 30 bp, Artificial Sequence
  Synthetic oligonucleotide
cctaaagagaactcaggcgttcaactgatg

SEQ ID NO: 47354 - DNA, 30 bp, Artificial Sequence
  Synthetic oligonucleotide
acagaaaagaagctgagcaagtctctgatg

SEQ ID NO: 47355 - DNA, 30 bp, Artificial Sequence
  Synthetic oligonucleotide
actcgggatctcaacttaaaaaagaatatg

SEQ ID NO: 47356 - DNA, 30 bp, Artificial Sequence
  Synthetic oligonucleotide
aaggactgcctcttttagaaagtgaatatg

SEQ ID NO: 47357 - DNA, 30 bp, Artificial Sequence
  Synthetic oligonucleotide
cgttcggacctacggatggggagacatatg

SEQ ID NO: 47358 - DNA, 30 bp, Artificial Sequence
  Synthetic oligonucleotide
cgcatccgaacgtagggtcaaggtcatatg

SEQ ID NO: 47359 - DNA, 30 bp, Artificial Sequence
  Synthetic oligonucleotide
atagagtaagcacctaatagcatcgatatg

SEQ ID NO: 47360 - DNA, 30 bp, Artificial Sequence
  Synthetic oligonucleotide
cgtgagagtgagggtaggtaccaggatatg

SEQ ID NO: 47361 - DNA, 30 bp, Artificial Sequence
  Synthetic oligonucleotide
cgagtgtttccagacaattggaatgatatg

SEQ ID NO: 47362 - DNA, 30 bp, Artificial Sequence
  Synthetic oligonucleotide
tggcgattcgatgtaagcgtaatgactatg

SEQ ID NO: 47363 - DNA, 30 bp, Artificial Sequence
  Synthetic oligonucleotide
aacgacggagcgatgctaagcatgactatg

SEQ ID NO: 47364 - DNA, 30 bp, Artificial Sequence
  Synthetic oligonucleotide
atgggcgggggagcgtacctcaaccctatg

SEQ ID NO: 47365 - DNA, 30 bp, Artificial Sequence
  Synthetic oligonucleotide
tatcgtaaaaatatactgcacatgtctatg

SEQ ID NO: 47366 - DNA, 30 bp, Artificial Sequence
  Synthetic oligonucleotide
caggagatggctcggaggataacgtgtatg

SEQ ID NO: 47367 - DNA, 30 bp, Artificial Sequence
  Synthetic oligonucleotide
aacgcggggactaaaagaatgacgcttatg

SEQ ID NO: 47368 - DNA, 30 bp, Artificial Sequence
  Synthetic oligonucleotide
acgagagtgtgggtacctacgcagtttatg

SEQ ID NO: 47369 - DNA, 30 bp, Artificial Sequence
  Synthetic oligonucleotide
aggttaaaaaacagtgtcagtatcaaactg

SEQ ID NO: 47370 - DNA, 30 bp, Artificial Sequence
  Synthetic oligonucleotide
gagactgggtcagcggtatcaagacaactg

SEQ ID NO: 47371 - DNA, 30 bp, Artificial Sequence
  Synthetic oligonucleotide
tcagtcggtataatccagaggcggcaactg

SEQ ID NO: 47372 - DNA, 30 bp, Artificial Sequence
  Synthetic oligonucleotide
ctttacgcggaaatgcatctaaaggaactg

SEQ ID NO: 47373 - DNA, 30 bp, Artificial Sequence
  Synthetic oligonucleotide
ggaggaggtacaggaggggaattcagactg

SEQ ID NO: 47374 - DNA, 30 bp, Artificial Sequence
  Synthetic oligonucleotide
atccatatgccattaggcgagtccggactg

SEQ ID NO: 47375 - DNA, 30 bp, Artificial Sequence
  Synthetic oligonucleotide
gggacgaccccgtatgatccctagtgactg

SEQ ID NO: 47376 - DNA, 30 bp, Artificial Sequence
  Synthetic oligonucleotide
agggtcgtttcgctagaaagatccatactg

SEQ ID NO: 47377 - DNA, 30 bp, Artificial Sequence
  Synthetic oligonucleotide
ttgttagatgaaagataagctgagatactg

SEQ ID NO: 47378 - DNA, 30 bp, Artificial Sequence
  Synthetic oligonucleotide
ctcgagaacaatggggcgagagcactactg

SEQ ID NO: 47379 - DNA, 30 bp, Artificial Sequence
  Synthetic oligonucleotide
tgacaaaggagctctcccgatctaaacctg

SEQ ID NO: 47380 - DNA, 30 bp, Artificial Sequence
  Synthetic oligonucleotide
acagcataccatcgatcactgtggaacctg

SEQ ID NO: 47381 - DNA, 30 bp, Artificial Sequence
  Synthetic oligonucleotide
cgtaagcctaatagaacctcaatgcacctg

SEQ ID NO: 47382 - DNA, 30 bp, Artificial Sequence
  Synthetic oligonucleotide
caaaaaaaatggtatgcgaacatggacctg

SEQ ID NO: 47383 - DNA, 30 bp, Artificial Sequence
  Synthetic oligonucleotide
atccgcgagaataaggaaatgtctgacctg

SEQ ID NO: 47384 - DNA, 30 bp, Artificial Sequence
  Synthetic oligonucleotide
aaggagctcaacaggatgccgtaatacctg

SEQ ID NO: 47385 - DNA, 30 bp, Artificial Sequence
  Synthetic oligonucleotide
cacggcccaattatagcatcgcgatacctg

SEQ ID NO: 47386 - DNA, 30 bp, Artificial Sequence
  Synthetic oligonucleotide
tcaaggtagcgcaaaaatgaagcgtccctg

SEQ ID NO: 47387 - DNA, 30 bp, Artificial Sequence
  Synthetic oligonucleotide
atactgatgtccgaggagtggtgtagcctg

SEQ ID NO: 47388 - DNA, 30 bp, Artificial Sequence
  Synthetic oligonucleotide
gaatggagcaatgaccaaaaagcatgcctg

SEQ ID NO: 47389 - DNA, 30 bp, Artificial Sequence
  Synthetic oligonucleotide
tgagctacatcaggagccgagtacatcctg

SEQ ID NO: 47390 - DNA, 29 bp, Artificial Sequence
  Synthetic oligonucleotide
attggggataaacagtatggagagtcctg

SEQ ID NO: 47391 - DNA, 30 bp, Artificial Sequence
  Synthetic oligonucleotide
cgtagtaatacgtgatagatcgtattcctg

SEQ ID NO: 47392 - DNA, 29 bp, Artificial Sequence
  Synthetic oligonucleotide
cacgcaagatgcctacaaattcctagctg

SEQ ID NO: 47393 - DNA, 30 bp, Artificial Sequence
  Synthetic oligonucleotide
cgccaggcacgtggatgtagaatgccgctg

SEQ ID NO: 47394 - DNA, 30 bp, Artificial Sequence
  Synthetic oligonucleotide
acagggagatacccaattacccaggcgctg

SEQ ID NO: 47395 - DNA, 30 bp, Artificial Sequence
  Synthetic oligonucleotide
cccgggactcaaaccggagtgaaaaggctg

SEQ ID NO: 47396 - DNA, 30 bp, Artificial Sequence
  Synthetic oligonucleotide
cttgcgaacaggagattaaccttagggctg

SEQ ID NO: 47397 - DNA, 30 bp, Artificial Sequence
  Synthetic oligonucleotide
tcacacgtggtcgacgaaattcccgggctg

SEQ ID NO: 47398 - DNA, 30 bp, Artificial Sequence
  Synthetic oligonucleotide
acacgcatccagcggagacactgatggctg

SEQ ID NO: 47399 - DNA, 30 bp, Artificial Sequence
  Synthetic oligonucleotide
ctgcgtgggatgtcatgcgtagtctggctg

SEQ ID NO: 47400 - DNA, 30 bp, Artificial Sequence
  Synthetic oligonucleotide
acatggtggtgtagggtctgcgccttgctg

SEQ ID NO: 47401 - DNA, 30 bp, Artificial Sequence
  Synthetic oligonucleotide
taagtatgggtgcgtcaacgaaaaaatctg

SEQ ID NO: 47402 - DNA, 31 bp, Artificial Sequence
  Synthetic oligonucleotide
gtaaaataggccattccgtacccacaatctg

SEQ ID NO: 47403 - DNA, 30 bp, Artificial Sequence
  Synthetic oligonucleotide
cccatgaggggatcgtggttcgatcatctg

SEQ ID NO: 47404 - DNA, 30 bp, Artificial Sequence
  Synthetic oligonucleotide
gatagatgtaaggcatggtttgctgatctg

SEQ ID NO: 47405 - DNA, 30 bp, Artificial Sequence
  Synthetic oligonucleotide
tcgcactgattgtgtcgggtatggtatctg

SEQ ID NO: 47406 - DNA, 30 bp, Artificial Sequence
  Synthetic oligonucleotide
ggtaggtgacacaaacgaatagagactctg

SEQ ID NO: 47407 - DNA, 30 bp, Artificial Sequence
  Synthetic oligonucleotide
tgtgcacgtacgtgggctgcctcgactctg

SEQ ID NO: 47408 - DNA, 30 bp, Artificial Sequence
  Synthetic oligonucleotide
caatggacagtaggggcatacacggctctg

SEQ ID NO: 47409 - DNA, 30 bp, Artificial Sequence
  Synthetic oligonucleotide
cacctgtgcgagacccaggcggatcgtctg

SEQ ID NO: 47410 - DNA, 30 bp, Artificial Sequence
  Synthetic oligonucleotide
ggaagcccgaagacatcctaaaagattctg

SEQ ID NO: 47411 - DNA, 30 bp, Artificial Sequence
  Synthetic oligonucleotide
tcacgtgattaggttcaccacttcaaagtg

SEQ ID NO: 47412 - DNA, 30 bp, Artificial Sequence
  Synthetic oligonucleotide
ggggcatcgatgttgacggctcggaaagtg

SEQ ID NO: 47413 - DNA, 30 bp, Artificial Sequence
  Synthetic oligonucleotide
acgctcgagaacagaggcctataacaagtg

SEQ ID NO: 47414 - DNA, 30 bp, Artificial Sequence
  Synthetic oligonucleotide
aaacgttaatatacaaaccggccagaagtg

SEQ ID NO: 47415 - DNA, 30 bp, Artificial Sequence
  Synthetic oligonucleotide
ggaaggctcgagtcaaattgttgtgaagtg

SEQ ID NO: 47416 - DNA, 30 bp, Artificial Sequence
  Synthetic oligonucleotide
ggtgagcatgtatcaggtactagaacagtg

SEQ ID NO: 47417 - DNA, 30 bp, Artificial Sequence
  Synthetic oligonucleotide
tcggacccaacatactagggtttcacagtg

SEQ ID NO: 47418 - DNA, 30 bp, Artificial Sequence
  Synthetic oligonucleotide
agtgtcttagcatccgatcgtccaccagtg

SEQ ID NO: 47419 - DNA, 30 bp, Artificial Sequence
  Synthetic oligonucleotide
aggctttgtagaaagtacactgggccagtg

SEQ ID NO: 47420 - DNA, 30 bp, Artificial Sequence
  Synthetic oligonucleotide
atcattcgggaatgcaaaaatctggcagtg

SEQ ID NO: 47421 - DNA, 30 bp, Artificial Sequence
  Synthetic oligonucleotide
atgtgccaagcagtcttcccgccatcagtg

SEQ ID NO: 47422 - DNA, 30 bp, Artificial Sequence
  Synthetic oligonucleotide
gggacgagcaaggtactcatttggtcagtg

SEQ ID NO: 47423 - DNA, 30 bp, Artificial Sequence
  Synthetic oligonucleotide
ggcacccttgcaatggcgatcaccagagtg

SEQ ID NO: 47424 - DNA, 30 bp, Artificial Sequence
  Synthetic oligonucleotide
tgacacaatttggttatccaaggcagagtg

SEQ ID NO: 47425 - DNA, 30 bp, Artificial Sequence
  Synthetic oligonucleotide
tcaaggcgagatgcacctttgttcagagtg

SEQ ID NO: 47426 - DNA, 30 bp, Artificial Sequence
  Synthetic oligonucleotide
aagagtatgcagcggaacgatctgagagtg

SEQ ID NO: 47427 - DNA, 30 bp, Artificial Sequence
  Synthetic oligonucleotide
gagaagcgtcaaacacgaaatcgccgagtg

SEQ ID NO: 47428 - DNA, 30 bp, Artificial Sequence
  Synthetic oligonucleotide
caagcgctcggggatcaatgcagatgagtg

SEQ ID NO: 47429 - DNA, 30 bp, Artificial Sequence
  Synthetic oligonucleotide
acaaggcatagtgggtttctacattgagtg

SEQ ID NO: 47430 - DNA, 30 bp, Artificial Sequence
  Synthetic oligonucleotide
aggggaaagcaaactccagcctgaatagtg

SEQ ID NO: 47431 - DNA, 30 bp, Artificial Sequence
  Synthetic oligonucleotide
gtatcgaattcgaacaccttgaagatagtg

SEQ ID NO: 47432 - DNA, 30 bp, Artificial Sequence
  Synthetic oligonucleotide
aacccaatcttgggccaaacctcgatagtg

SEQ ID NO: 47433 - DNA, 30 bp, Artificial Sequence
  Synthetic oligonucleotide
aaaggggagaaacagaacatgatcctagtg

SEQ ID NO: 47434 - DNA, 30 bp, Artificial Sequence
  Synthetic oligonucleotide
tcgtgaaaactaaggcacatgagagtagtg

SEQ ID NO: 47435 - DNA, 30 bp, Artificial Sequence
  Synthetic oligonucleotide
ggaacccgagctaactgacagcccgtagtg

SEQ ID NO: 47436 - DNA, 30 bp, Artificial Sequence
  Synthetic oligonucleotide
aacacagcgtccaagatatgctgtgtagtg

SEQ ID NO: 47437 - DNA, 30 bp, Artificial Sequence
  Synthetic oligonucleotide
acgaaacggtaatattaggggcacttagtg

SEQ ID NO: 47438 - DNA, 30 bp, Artificial Sequence
  Synthetic oligonucleotide
agcggtgtagcgttcaattgagacgacgtg

SEQ ID NO: 47439 - DNA, 30 bp, Artificial Sequence
  Synthetic oligonucleotide
gacaatacgtcaaaacattaagggtacgtg

SEQ ID NO: 47440 - DNA, 30 bp, Artificial Sequence
  Synthetic oligonucleotide
tcgtcccaccgtcggatagggacatccgtg

SEQ ID NO: 47441 - DNA, 30 bp, Artificial Sequence
  Synthetic oligonucleotide
ataggggtgcccaagtgacagtcttccgtg

SEQ ID NO: 47442 - DNA, 30 bp, Artificial Sequence
  Synthetic oligonucleotide
tgagaactgtcgtttcgtacagtaagcgtg

SEQ ID NO: 47443 - DNA, 30 bp, Artificial Sequence
  Synthetic oligonucleotide
cacaacgtgatggctatgcaccggtgcgtg

SEQ ID NO: 47444 - DNA, 30 bp, Artificial Sequence
  Synthetic oligonucleotide
aaaggggcaatatccgtggttgggatcgtg

SEQ ID NO: 47445 - DNA, 30 bp, Artificial Sequence
  Synthetic oligonucleotide
gtaaagtgagatacgttcaagtctatcgtg

SEQ ID NO: 47446 - DNA, 30 bp, Artificial Sequence
  Synthetic oligonucleotide
acgttaatgagggcactagtgtttctcgtg

SEQ ID NO: 47447 - DNA, 30 bp, Artificial Sequence
  Synthetic oligonucleotide
actacgtcgtggagggtataatctgtcgtg

SEQ ID NO: 47448 - DNA, 30 bp, Artificial Sequence
  Synthetic oligonucleotide
caggatgagggtccttgctactgtgtcgtg

SEQ ID NO: 47449 - DNA, 31 bp, Artificial Sequence
  Synthetic oligonucleotide
aagtcatcttggtcacaataaccgattcgtg

SEQ ID NO: 47450 - DNA, 30 bp, Artificial Sequence
  Synthetic oligonucleotide
tcgtcagcagggttatctagcgtgttcgtg

SEQ ID NO: 47451 - DNA, 30 bp, Artificial Sequence
  Synthetic oligonucleotide
taccatgtatcgggagaaggactaaaggtg

SEQ ID NO: 47452 - DNA, 30 bp, Artificial Sequence
  Synthetic oligonucleotide
gacgaccatcaggatctgtgaatgaaggtg

SEQ ID NO: 47453 - DNA, 30 bp, Artificial Sequence
  Synthetic oligonucleotide
taagactgtacgaaagtccggtagcaggtg

SEQ ID NO: 47454 - DNA, 30 bp, Artificial Sequence
  Synthetic oligonucleotide
ggggcaggagaatgcgcgactctgcaggtg

SEQ ID NO: 47455 - DNA, 30 bp, Artificial Sequence
  Synthetic oligonucleotide
cacttgaagtctaacaccctaggtgaggtg

SEQ ID NO: 47456 - DNA, 30 bp, Artificial Sequence
  Synthetic oligonucleotide
cacgtgctgttatcggcctcatcaccggtg

SEQ ID NO: 47457 - DNA, 30 bp, Artificial Sequence
  Synthetic oligonucleotide
gtgtaaaccattcgacatagaattccggtg

SEQ ID NO: 47458 - DNA, 30 bp, Artificial Sequence
  Synthetic oligonucleotide
cgagactaattatgaccatagagtgcggtg

SEQ ID NO: 47459 - DNA, 30 bp, Artificial Sequence
  Synthetic oligonucleotide
aacggtcagccacgggatgtgccttcggtg

SEQ ID NO: 47460 - DNA, 30 bp, Artificial Sequence
  Synthetic oligonucleotide
gggtacgacgtgagactctacgacagggtg

SEQ ID NO: 47461 - DNA, 30 bp, Artificial Sequence
  Synthetic oligonucleotide
gtgcaggtttgggttgcaatgtcaggggtg

SEQ ID NO: 47462 - DNA, 30 bp, Artificial Sequence
  Synthetic oligonucleotide
ggtagctgataactctgagtcggaggggtg

SEQ ID NO: 47463 - DNA, 30 bp, Artificial Sequence
  Synthetic oligonucleotide
ttagagactgtgatgtcctgagggggggtg

SEQ ID NO: 47464 - DNA, 30 bp, Artificial Sequence
  Synthetic oligonucleotide
caactcggaaagagaatacgttttggggtg

SEQ ID NO: 47465 - DNA, 30 bp, Artificial Sequence
  Synthetic oligonucleotide
aggtaaggaatcgctatgggtaagtgggtg

SEQ ID NO: 47466 - DNA, 30 bp, Artificial Sequence
  Synthetic oligonucleotide
gaaggtaacttgaggaggtatgcactggtg

SEQ ID NO: 47467 - DNA, 31 bp, Artificial Sequence
  Synthetic oligonucleotide
gcatactcggtgttcagggagataagtggtg

SEQ ID NO: 47468 - DNA, 30 bp, Artificial Sequence
  Synthetic oligonucleotide
cgatgtcagggtaaacattagatcgtggtg

SEQ ID NO: 47469 - DNA, 30 bp, Artificial Sequence
  Synthetic oligonucleotide
agtgcagcgcgaatttcaagccaaaatgtg

SEQ ID NO: 47470 - DNA, 30 bp, Artificial Sequence
  Synthetic oligonucleotide
ccgattgcgcaagacctaggctaaaatgtg

SEQ ID NO: 47471 - DNA, 30 bp, Artificial Sequence
  Synthetic oligonucleotide
gtcttaggaaataaccagggaaacaatgtg

SEQ ID NO: 47472 - DNA, 30 bp, Artificial Sequence
  Synthetic oligonucleotide
cgacctaagacagcttctagctcggatgtg

SEQ ID NO: 47473 - DNA, 30 bp, Artificial Sequence
  Synthetic oligonucleotide
actagattcatctggaaaaagaagcctgtg

SEQ ID NO: 47474 - DNA, 30 bp, Artificial Sequence
  Synthetic oligonucleotide
cgtcagttgaaaaaaattcgagtgcctgtg

SEQ ID NO: 47475 - DNA, 30 bp, Artificial Sequence
  Synthetic oligonucleotide
tgggatccagtaaagctaatgaatcctgtg

SEQ ID NO: 47476 - DNA, 30 bp, Artificial Sequence
  Synthetic oligonucleotide
cacacaaactgcgtaagaccctgatctgtg

SEQ ID NO: 47477 - DNA, 30 bp, Artificial Sequence
  Synthetic oligonucleotide
atcgaaacacaggttcggcattcctctgtg

SEQ ID NO: 47478 - DNA, 30 bp, Artificial Sequence
  Synthetic oligonucleotide
cacctccatcagtcaatgctaaacagtgtg

SEQ ID NO: 47479 - DNA, 30 bp, Artificial Sequence
  Synthetic oligonucleotide
tgtgccagtttctgatagaaagagagtgtg

SEQ ID NO: 47480 - DNA, 30 bp, Artificial Sequence
  Synthetic oligonucleotide
tgcgctggtgcgtcgctgaagagtcgtgtg

SEQ ID NO: 47481 - DNA, 30 bp, Artificial Sequence
  Synthetic oligonucleotide
cctaggggaatccagaccgataccggtgtg

SEQ ID NO: 47482 - DNA, 30 bp, Artificial Sequence
  Synthetic oligonucleotide
tggtgtatgtaaatcgggacataaattgtg

SEQ ID NO: 47483 - DNA, 30 bp, Artificial Sequence
  Synthetic oligonucleotide
ccagtatccggttagggcccgagcgaattg

SEQ ID NO: 47484 - DNA, 30 bp, Artificial Sequence
  Synthetic oligonucleotide
tggaggagcccgcttagatagagtgaattg

SEQ ID NO: 47485 - DNA, 30 bp, Artificial Sequence
  Synthetic oligonucleotide
agccggagcggcatggatagtccctaattg

SEQ ID NO: 47486 - DNA, 30 bp, Artificial Sequence
  Synthetic oligonucleotide
caaaggagacagtggaaaaatccaccattg

SEQ ID NO: 47487 - DNA, 30 bp, Artificial Sequence
  Synthetic oligonucleotide
aggtcgaacagcctggttctaatagcattg

SEQ ID NO: 47488 - DNA, 30 bp, Artificial Sequence
  Synthetic oligonucleotide
ggagatgaaggtagcagcctggagcgattg

SEQ ID NO: 47489 - DNA, 30 bp, Artificial Sequence
  Synthetic oligonucleotide
tcgcccaacataatgcccgggcatcgattg

SEQ ID NO: 47490 - DNA, 30 bp, Artificial Sequence
  Synthetic oligonucleotide
aacggcagatgcggcggtttgaacggattg

SEQ ID NO: 47491 - DNA, 30 bp, Artificial Sequence
  Synthetic oligonucleotide
atcgccactcatcaccagagaccagtattg

SEQ ID NO: 47492 - DNA, 30 bp, Artificial Sequence
  Synthetic oligonucleotide
gtacaccgtatgccgaggatcgatttattg

SEQ ID NO: 47493 - DNA, 30 bp, Artificial Sequence
  Synthetic oligonucleotide
ggctagcagtgggtagcaaggtgtaacttg

SEQ ID NO: 47494 - DNA, 30 bp, Artificial Sequence
  Synthetic oligonucleotide
acggactaaaggatcgcagtagaagacttg

SEQ ID NO: 47495 - DNA, 30 bp, Artificial Sequence
  Synthetic oligonucleotide
cgaataagcgggaagctctgtagatacttg

SEQ ID NO: 47496 - DNA, 30 bp, Artificial Sequence
  Synthetic oligonucleotide
gcgaagggtgtacctaagatgtcttacttg

SEQ ID NO: 47497 - DNA, 30 bp, Artificial Sequence
  Synthetic oligonucleotide
tcgacaaggagtgtcaatcgcaataccttg

SEQ ID NO: 47498 - DNA, 30 bp, Artificial Sequence
  Synthetic oligonucleotide
atcagctcatcacgacctaaggctaccttg

SEQ ID NO: 47499 - DNA, 30 bp, Artificial Sequence
  Synthetic oligonucleotide
tggatatacgcctcgtacgagacccccttg

SEQ ID NO: 47500 - DNA, 30 bp, Artificial Sequence
  Synthetic oligonucleotide
accgcgagactagatcggatgaaatccttg

SEQ ID NO: 47501 - DNA, 30 bp, Artificial Sequence
  Synthetic oligonucleotide
cctgggacctgagtaacaagaaagcgcttg

SEQ ID NO: 47502 - DNA, 30 bp, Artificial Sequence
  Synthetic oligonucleotide
tcaaaggtaacaagccaggctccgcgcttg

SEQ ID NO: 47503 - DNA, 30 bp, Artificial Sequence
  Synthetic oligonucleotide
aagtgcaactgggaaatgacttaatgcttg

SEQ ID NO: 47504 - DNA, 30 bp, Artificial Sequence
  Synthetic oligonucleotide
acttgtgatgaggagggaaaaaggttcttg

SEQ ID NO: 47505 - DNA, 30 bp, Artificial Sequence
  Synthetic oligonucleotide
gtcgccccagttagaagggcaaaaaagttg

SEQ ID NO: 47506 - DNA, 30 bp, Artificial Sequence
  Synthetic oligonucleotide
tgctcctcacaacgaggccgtaaaaagttg

SEQ ID NO: 47507 - DNA, 30 bp, Artificial Sequence
  Synthetic oligonucleotide
cataagttggtaagagggtccccgaagttg

SEQ ID NO: 47508 - DNA, 30 bp, Artificial Sequence
  Synthetic oligonucleotide
caatgaactggtgcttggaatactaagttg

SEQ ID NO: 47509 - DNA, 30 bp, Artificial Sequence
  Synthetic oligonucleotide
caggtatccgagaccgaaacagtccagttg

SEQ ID NO: 47510 - DNA, 29 bp, Artificial Sequence
  Synthetic oligonucleotide
ggggaccactaaatatcaagatagagttg

SEQ ID NO: 47511 - DNA, 30 bp, Artificial Sequence
  Synthetic oligonucleotide
gtcggcgttaagtcggctcaatccgagttg

SEQ ID NO: 47512 - DNA, 30 bp, Artificial Sequence
  Synthetic oligonucleotide
catgatgtatgatcctttgttagcgagttg

SEQ ID NO: 47513 - DNA, 30 bp, Artificial Sequence
  Synthetic oligonucleotide
catgcgtgtagtcggggtgccagatagttg

SEQ ID NO: 47514 - DNA, 30 bp, Artificial Sequence
  Synthetic oligonucleotide
accttcaggcaaccgcggaaatactagttg

SEQ ID NO: 47515 - DNA, 30 bp, Artificial Sequence
  Synthetic oligonucleotide
agaaaagatgcggagccgaggataacgttg

SEQ ID NO: 47516 - DNA, 30 bp, Artificial Sequence
  Synthetic oligonucleotide
aggctgtgtgggctcagtgaatgaccgttg

SEQ ID NO: 47517 - DNA, 30 bp, Artificial Sequence
  Synthetic oligonucleotide
acgtgttcggcgcggatgggaaccgcgttg

SEQ ID NO: 47518 - DNA, 30 bp, Artificial Sequence
  Synthetic oligonucleotide
tgggatgtgtgactaagtatcacatcgttg

SEQ ID NO: 47519 - DNA, 30 bp, Artificial Sequence
  Synthetic oligonucleotide
cgttaacaaaattgcaagatagcctcgttg

SEQ ID NO: 47520 - DNA, 31 bp, Artificial Sequence
  Synthetic oligonucleotide
gcaaatgagccgaatggtgatgcaaaggttg

SEQ ID NO: 47521 - DNA, 30 bp, Artificial Sequence
  Synthetic oligonucleotide
agcatgctagttgagcgacagacgaggttg

SEQ ID NO: 47522 - DNA, 30 bp, Artificial Sequence
  Synthetic oligonucleotide
cgggtgagcgtatcgcgtacggtaatgttg

SEQ ID NO: 47523 - DNA, 30 bp, Artificial Sequence
  Synthetic oligonucleotide
tgccaaaccggcaggaaagcagtgatgttg

SEQ ID NO: 47524 - DNA, 30 bp, Artificial Sequence
  Synthetic oligonucleotide
ttcgaccgatacttgggcgttcaacatttg

SEQ ID NO: 47525 - DNA, 30 bp, Artificial Sequence
  Synthetic oligonucleotide
ggagtctaaaggagaagttacctgcatttg

SEQ ID NO: 47526 - DNA, 30 bp, Artificial Sequence
  Synthetic oligonucleotide
gtaggagactaagctataagtttggatttg

SEQ ID NO: 47527 - DNA, 30 bp, Artificial Sequence
  Synthetic oligonucleotide
agtgagggtcttatgtgagggaatgatttg

SEQ ID NO: 47528 - DNA, 30 bp, Artificial Sequence
  Synthetic oligonucleotide
cactcgcggagcgatagtcaggagactttg

SEQ ID NO: 47529 - DNA, 30 bp, Artificial Sequence
  Synthetic oligonucleotide
tacgactcataattagcctagcaccctttg

SEQ ID NO: 47530 - DNA, 30 bp, Artificial Sequence
  Synthetic oligonucleotide
ctcgttagagaggaccaacgattccctttg

SEQ ID NO: 47531 - DNA, 30 bp, Artificial Sequence
  Synthetic oligonucleotide
gcatgaaggtgacggcaaggtactgctttg

SEQ ID NO: 47532 - DNA, 30 bp, Artificial Sequence
  Synthetic oligonucleotide
tagcgaaaggactactaattccagagtttg

SEQ ID NO: 47533 - DNA, 30 bp, Artificial Sequence
  Synthetic oligonucleotide
ggaagctactgtgagcgtagttagagtttg

SEQ ID NO: 47534 - DNA, 30 bp, Artificial Sequence
  Synthetic oligonucleotide
gggaccggtcgagtaggtgaagatcgtttg

SEQ ID NO: 47535 - DNA, 30 bp, Artificial Sequence
  Synthetic oligonucleotide
tcggggagttatacgcaacggggtcgtttg

SEQ ID NO: 47536 - DNA, 30 bp, Artificial Sequence
  Synthetic oligonucleotide
taaggaactcgtaacaacgttcatggtttg

SEQ ID NO: 47537 - DNA, 30 bp, Artificial Sequence
  Synthetic oligonucleotide
agtagatgaacttacggaagagtcattttg

SEQ ID NO: 47538 - DNA, 30 bp, Artificial Sequence
  Synthetic oligonucleotide
acgctgtaacgagcaactagatgacttttg

SEQ ID NO: 47539 - DNA, 30 bp, Artificial Sequence
  Synthetic oligonucleotide
atggatgagtattacgaccagatgaaaaat

SEQ ID NO: 47540 - DNA, 30 bp, Artificial Sequence
  Synthetic oligonucleotide
caggcgacaaaagataatacctggcaaaat

SEQ ID NO: 47541 - DNA, 30 bp, Artificial Sequence
  Synthetic oligonucleotide
tcactgtaggcaagtggcatagtgcaaaat

SEQ ID NO: 47542 - DNA, 30 bp, Artificial Sequence
  Synthetic oligonucleotide
gagggccctgaagcgcaatcgactcaaaat

SEQ ID NO: 47543 - DNA, 30 bp, Artificial Sequence
  Synthetic oligonucleotide
aggttaatgccgtaagattgatctgaaaat

SEQ ID NO: 47544 - DNA, 30 bp, Artificial Sequence
  Synthetic oligonucleotide
tgggcaagtaaccgatgggggatgtaaaat

SEQ ID NO: 47545 - DNA, 30 bp, Artificial Sequence
  Synthetic oligonucleotide
cgtggcggtagaggccgggaacttccaaat

SEQ ID NO: 47546 - DNA, 30 bp, Artificial Sequence
  Synthetic oligonucleotide
acacatgtggtattgagttgcaccagaaat

SEQ ID NO: 47547 - DNA, 33 bp, Artificial Sequence
  Synthetic oligonucleotide
ataggaacctatcattcggcaatgcaccgaaat

SEQ ID NO: 47548 - DNA, 30 bp, Artificial Sequence
  Synthetic oligonucleotide
tgtgtggacaaatgcggtaaccccggaaat

SEQ ID NO: 47549 - DNA, 30 bp, Artificial Sequence
  Synthetic oligonucleotide
cgcaaacagcgccaggacactcggggaaat

SEQ ID NO: 47550 - DNA, 31 bp, Artificial Sequence
  Synthetic oligonucleotide
agtggctaccacccgcgagtaccggataaat

SEQ ID NO: 47551 - DNA, 30 bp, Artificial Sequence
  Synthetic oligonucleotide
acgaagtaggacaggggtttctcagtaaat

SEQ ID NO: 47552 - DNA, 31 bp, Artificial Sequence
  Synthetic oligonucleotide
agagcatgttggcgaacgtggtaatgtaaat

SEQ ID NO: 47553 - DNA, 30 bp, Artificial Sequence
  Synthetic oligonucleotide
agggaccactaattgcaacgtttaaacaat

SEQ ID NO: 47554 - DNA, 30 bp, Artificial Sequence
  Synthetic oligonucleotide
tctgcagggactctgttgagggaccacaat

SEQ ID NO: 47555 - DNA, 30 bp, Artificial Sequence
  Synthetic oligonucleotide
cgccggtaggaacaccgccgcaagcccaat

SEQ ID NO: 47556 - DNA, 30 bp, Artificial Sequence
  Synthetic oligonucleotide
gaaccaacaggatagcccgaaatgtgcaat

SEQ ID NO: 47557 - DNA, 30 bp, Artificial Sequence
  Synthetic oligonucleotide
ggactcgcagaggagccgagagtgtgcaat

SEQ ID NO: 47558 - DNA, 30 bp, Artificial Sequence
  Synthetic oligonucleotide
tacgcgcgtgacagtatccatcgtttcaat

SEQ ID NO: 47559 - DNA, 30 bp, Artificial Sequence
  Synthetic oligonucleotide
gatgaaaagtggtggggcaccaggaagaat

SEQ ID NO: 47560 - DNA, 30 bp, Artificial Sequence
  Synthetic oligonucleotide
gctcggtggggccgagttgagctacagaat

SEQ ID NO: 47561 - DNA, 30 bp, Artificial Sequence
  Synthetic oligonucleotide
tcgagtacgtacccatatcggcggcagaat

SEQ ID NO: 47562 - DNA, 30 bp, Artificial Sequence
  Synthetic oligonucleotide
aacaaaaatctacgaaacagagttgagaat

SEQ ID NO: 47563 - DNA, 30 bp, Artificial Sequence
  Synthetic oligonucleotide
gacaaacacaaatactaacccaagtggaat

SEQ ID NO: 47564 - DNA, 30 bp, Artificial Sequence
  Synthetic oligonucleotide
cgttaagcgcagtattggattagaatgaat

SEQ ID NO: 47565 - DNA, 30 bp, Artificial Sequence
  Synthetic oligonucleotide
gcggggcagtcctgctaaagagtcatgaat

SEQ ID NO: 47566 - DNA, 30 bp, Artificial Sequence
  Synthetic oligonucleotide
tgagtaacactgcctaacataaagatgaat

SEQ ID NO: 47567 - DNA, 30 bp, Artificial Sequence
  Synthetic oligonucleotide
ctagacatcgagggtgaagtgcggatgaat

SEQ ID NO: 47568 - DNA, 30 bp, Artificial Sequence
  Synthetic oligonucleotide
agagtgcgtaacgacggcctaagaaataat

SEQ ID NO: 47569 - DNA, 30 bp, Artificial Sequence
  Synthetic oligonucleotide
atcgacagagacctcaaatgctcgaataat

SEQ ID NO: 47570 - DNA, 30 bp, Artificial Sequence
  Synthetic oligonucleotide
aaagggcacttccctttggggaacgataat

SEQ ID NO: 47571 - DNA, 30 bp, Artificial Sequence
  Synthetic oligonucleotide
agtgcatgcaaggtagtaacgtgggataat

SEQ ID NO: 47572 - DNA, 30 bp, Artificial Sequence
  Synthetic oligonucleotide
ctgtaacatgaaacccacaaatcgcctaat

SEQ ID NO: 47573 - DNA, 30 bp, Artificial Sequence
  Synthetic oligonucleotide
gacaaagcacgccgtgaaagtagaagtaat

SEQ ID NO: 47574 - DNA, 30 bp, Artificial Sequence
  Synthetic oligonucleotide
gctggggaaccaaagacaggtagtagtaat

SEQ ID NO: 47575 - DNA, 30 bp, Artificial Sequence
  Synthetic oligonucleotide
tagatgcgagggccggttacaacggttaat

SEQ ID NO: 47576 - DNA, 30 bp, Artificial Sequence
  Synthetic oligonucleotide
ctgcggtaggcatttccgtgcgctgttaat

SEQ ID NO: 47577 - DNA, 30 bp, Artificial Sequence
  Synthetic oligonucleotide
gcggaaatactagaaagataactgtttaat

SEQ ID NO: 47578 - DNA, 30 bp, Artificial Sequence
  Synthetic oligonucleotide
ttagggcggatatgctatagcgagaaacat

SEQ ID NO: 47579 - DNA, 30 bp, Artificial Sequence
  Synthetic oligonucleotide
ggactaaagtcagggtattccgaacaacat

SEQ ID NO: 47580 - DNA, 30 bp, Artificial Sequence
  Synthetic oligonucleotide
actaaaaataagggcgcttgtggcgaacat

SEQ ID NO: 47581 - DNA, 30 bp, Artificial Sequence
  Synthetic oligonucleotide
ggacggaataatggtaggcaagactaacat

SEQ ID NO: 47582 - DNA, 30 bp, Artificial Sequence
  Synthetic oligonucleotide
gcggccgactaatactgggacggctaacat

SEQ ID NO: 47583 - DNA, 30 bp, Artificial Sequence
  Synthetic oligonucleotide
agcgcactcataccactcgaaaatacacat

SEQ ID NO: 47584 - DNA, 30 bp, Artificial Sequence
  Synthetic oligonucleotide
cggagactgaaagctggattgacgccacat

SEQ ID NO: 47585 - DNA, 30 bp, Artificial Sequence
  Synthetic oligonucleotide
ggcgcaagggtgcaaacaaggcggccacat

SEQ ID NO: 47586 - DNA, 30 bp, Artificial Sequence
  Synthetic oligonucleotide
tcggggaccagcgggatgtcggcatcacat

SEQ ID NO: 47587 - DNA, 30 bp, Artificial Sequence
  Synthetic oligonucleotide
acaggatgaagaaagtaaaggcagtgacat

SEQ ID NO: 47588 - DNA, 31 bp, Artificial Sequence
  Synthetic oligonucleotide
gataacgatagaagtgatttttcggtgacat

SEQ ID NO: 47589 - DNA, 30 bp, Artificial Sequence
  Synthetic oligonucleotide
acgtccggtcaggctggctggaacatacat

SEQ ID NO: 47590 - DNA, 30 bp, Artificial Sequence
  Synthetic oligonucleotide
aggaatcatgcagtaaaccacattctacat

SEQ ID NO: 47591 - DNA, 30 bp, Artificial Sequence
  Synthetic oligonucleotide
gagacggtatactaataatcaacagtacat

SEQ ID NO: 47592 - DNA, 30 bp, Artificial Sequence
  Synthetic oligonucleotide
tggacttatacaaatctaggaggtaaccat

SEQ ID NO: 47593 - DNA, 30 bp, Artificial Sequence
  Synthetic oligonucleotide
gctgagctcctaaattcgactcaagaccat

SEQ ID NO: 47594 - DNA, 30 bp, Artificial Sequence
  Synthetic oligonucleotide
tgcttgaaatagccgcaccagaggtaccat

SEQ ID NO: 47595 - DNA, 30 bp, Artificial Sequence
  Synthetic oligonucleotide
tgaccattgcgtggagacagatggacccat

SEQ ID NO: 47596 - DNA, 30 bp, Artificial Sequence
  Synthetic oligonucleotide
ctagcacgaagatctatgccgtcctcccat

SEQ ID NO: 47597 - DNA, 30 bp, Artificial Sequence
  Synthetic oligonucleotide
aacagcatgaaccacgatatagccgtccat

SEQ ID NO: 47598 - DNA, 30 bp, Artificial Sequence
  Synthetic oligonucleotide
tctagtgaccagagaaaaatgagcttccat

SEQ ID NO: 47599 - DNA, 30 bp, Artificial Sequence
  Synthetic oligonucleotide
tcctttacctgcataacagggtgaaagcat

SEQ ID NO: 47600 - DNA, 30 bp, Artificial Sequence
  Synthetic oligonucleotide
cgcacacccaggccagtgggagcagagcat

SEQ ID NO: 47601 - DNA, 30 bp, Artificial Sequence
  Synthetic oligonucleotide
atgaatgaagaacttgtattagcctagcat

SEQ ID NO: 47602 - DNA, 30 bp, Artificial Sequence
  Synthetic oligonucleotide
aattagagggataccaggtgaaccacgcat

SEQ ID NO: 47603 - DNA, 31 bp, Artificial Sequence
  Synthetic oligonucleotide
acgtggggaaacgtcacgctatggaccgcat

SEQ ID NO: 47604 - DNA, 30 bp, Artificial Sequence
  Synthetic oligonucleotide
cgagatctgacaataagacagagcgcgcat

SEQ ID NO: 47605 - DNA, 30 bp, Artificial Sequence
  Synthetic oligonucleotide
ggagttctactccgtactaaaaagaggcat

SEQ ID NO: 47606 - DNA, 30 bp, Artificial Sequence
  Synthetic oligonucleotide
gcgggttgcgaagacatggccaataggcat

SEQ ID NO: 47607 - DNA, 30 bp, Artificial Sequence
  Synthetic oligonucleotide
ctcccgaatcgcacgacacaagataggcat

SEQ ID NO: 47608 - DNA, 30 bp, Artificial Sequence
  Synthetic oligonucleotide
ctgcgggtcatcccataaaacaactggcat

SEQ ID NO: 47609 - DNA, 30 bp, Artificial Sequence
  Synthetic oligonucleotide
accaggggcgatgttgaggtggtctggcat

SEQ ID NO: 47610 - DNA, 30 bp, Artificial Sequence
  Synthetic oligonucleotide
ctaacattggcgggtgcgcggaggatgcat

SEQ ID NO: 47611 - DNA, 30 bp, Artificial Sequence
  Synthetic oligonucleotide
agagtggctagtcaaaccacagcgttgcat

SEQ ID NO: 47612 - DNA, 30 bp, Artificial Sequence
  Synthetic oligonucleotide
gggggaatacaaagagtgtcccatcatcat

SEQ ID NO: 47613 - DNA, 30 bp, Artificial Sequence
  Synthetic oligonucleotide
ctaggtgcaatcatcatggacgaaactcat

SEQ ID NO: 47614 - DNA, 30 bp, Artificial Sequence
  Synthetic oligonucleotide
cgcatggcaaagcagatgagagggcctcat

SEQ ID NO: 47615 - DNA, 30 bp, Artificial Sequence
  Synthetic oligonucleotide
gggcaagaaatcgtaagccgctagtctcat

SEQ ID NO: 47616 - DNA, 30 bp, Artificial Sequence
  Synthetic oligonucleotide
gttcggaccacaaaggaagggaatcttcat

SEQ ID NO: 47617 - DNA, 30 bp, Artificial Sequence
  Synthetic oligonucleotide
aaggataaagctcaatgttatctgaaagat

SEQ ID NO: 47618 - DNA, 30 bp, Artificial Sequence
  Synthetic oligonucleotide
aagattcatgacaactcctcagccgaagat

SEQ ID NO: 47619 - DNA, 30 bp, Artificial Sequence
  Synthetic oligonucleotide
gaggagggaatatgggataggatcgaagat

SEQ ID NO: 47620 - DNA, 30 bp, Artificial Sequence
  Synthetic oligonucleotide
gaggctacgaatagtaatactatggaagat

SEQ ID NO: 47621 - DNA, 30 bp, Artificial Sequence
  Synthetic oligonucleotide
caaggaggtgatgtgaattcgagctaagat

SEQ ID NO: 47622 - DNA, 30 bp, Artificial Sequence
  Synthetic oligonucleotide
gaggttgatgttaattacgaatagtaagat

SEQ ID NO: 47623 - DNA, 30 bp, Artificial Sequence
  Synthetic oligonucleotide
ggacatggggtgtcgagttattccacagat

SEQ ID NO: 47624 - DNA, 30 bp, Artificial Sequence
  Synthetic oligonucleotide
aggggtgtggtcacatgcgcccagacagat

SEQ ID NO: 47625 - DNA, 30 bp, Artificial Sequence
  Synthetic oligonucleotide
ggcgaacatagtgtgaaacacgtggcagat

SEQ ID NO: 47626 - DNA, 30 bp, Artificial Sequence
  Synthetic oligonucleotide
tgaaaacaagctggattcaagaccggagat

SEQ ID NO: 47627 - DNA, 30 bp, Artificial Sequence
  Synthetic oligonucleotide
cgcatacagtgtgtatacagcatcggagat

SEQ ID NO: 47628 - DNA, 29 bp, Artificial Sequence
  Synthetic oligonucleotide
gggtagagacttgtttagaagctggagat

SEQ ID NO: 47629 - DNA, 30 bp, Artificial Sequence
  Synthetic oligonucleotide
atggagagtggcaagcggtataactgagat

SEQ ID NO: 47630 - DNA, 30 bp, Artificial Sequence
  Synthetic oligonucleotide
cggcctcgggtagaattacaatgttgagat

SEQ ID NO: 47631 - DNA, 30 bp, Artificial Sequence
  Synthetic oligonucleotide
tgacaagataaaccgatatgccatatagat

SEQ ID NO: 47632 - DNA, 30 bp, Artificial Sequence
  Synthetic oligonucleotide
ggacaagtaaggaaacgctccatagtagat

SEQ ID NO: 47633 - DNA, 30 bp, Artificial Sequence
  Synthetic oligonucleotide
tggagaaatgagcccgacgtcatagtagat

SEQ ID NO: 47634 - DNA, 30 bp, Artificial Sequence
  Synthetic oligonucleotide
cttcgggcagagtagattaagcgcaacgat

SEQ ID NO: 47635 - DNA, 30 bp, Artificial Sequence
  Synthetic oligonucleotide
ccgactcgtgaaatcagagaatcccacgat

SEQ ID NO: 47636 - DNA, 30 bp, Artificial Sequence
  Synthetic oligonucleotide
gctgggaatacagggtactaagatcacgat

SEQ ID NO: 47637 - DNA, 31 bp, Artificial Sequence
  Synthetic oligonucleotide
aggcggtcatcctgcatcaagccacgacgat

SEQ ID NO: 47638 - DNA, 30 bp, Artificial Sequence
  Synthetic oligonucleotide
cgatgcaaccataaccaagtttcggccgat

SEQ ID NO: 47639 - DNA, 30 bp, Artificial Sequence
  Synthetic oligonucleotide
cgagaataataatgtaaaacttgtgccgat

SEQ ID NO: 47640 - DNA, 30 bp, Artificial Sequence
  Synthetic oligonucleotide
acggagcgtgattcacggaatagcagcgat

SEQ ID NO: 47641 - DNA, 30 bp, Artificial Sequence
  Synthetic oligonucleotide
gctcgggctgacaaaacgatggcgagcgat

SEQ ID NO: 47642 - DNA, 30 bp, Artificial Sequence
  Synthetic oligonucleotide
gggagattgggatctctatcaacctgcgat

SEQ ID NO: 47643 - DNA, 30 bp, Artificial Sequence
  Synthetic oligonucleotide
gccacgggaatgcgttcaaaggtgtgcgat

SEQ ID NO: 47644 - DNA, 30 bp, Artificial Sequence
  Synthetic oligonucleotide
agaatacgggaggtcgggagtggcatcgat

SEQ ID NO: 47645 - DNA, 30 bp, Artificial Sequence
  Synthetic oligonucleotide
tcgatcgaaagtcggaaacaacgtttcgat

SEQ ID NO: 47646 - DNA, 30 bp, Artificial Sequence
  Synthetic oligonucleotide
gagctcggcaacaataacgaggaacaggat

SEQ ID NO: 47647 - DNA, 30 bp, Artificial Sequence
  Synthetic oligonucleotide
tctgaactgagccacattgagctacaggat

SEQ ID NO: 47648 - DNA, 30 bp, Artificial Sequence
  Synthetic oligonucleotide
tcgcggacttggtaaccgcttagcgaggat

SEQ ID NO: 47649 - DNA, 30 bp, Artificial Sequence
  Synthetic oligonucleotide
caagttggctagggaagagggtcggaggat

SEQ ID NO: 47650 - DNA, 30 bp, Artificial Sequence
  Synthetic oligonucleotide
acagacggctattgggggcaaaaataggat

SEQ ID NO: 47651 - DNA, 30 bp, Artificial Sequence
  Synthetic oligonucleotide
gacaagctgatcacgtaagactggtaggat

SEQ ID NO: 47652 - DNA, 30 bp, Artificial Sequence
  Synthetic oligonucleotide
agcttgagggaaaactacgggggcgcggat

SEQ ID NO: 47653 - DNA, 30 bp, Artificial Sequence
  Synthetic oligonucleotide
atgaagagagactcctagtgaacgcgggat

SEQ ID NO: 47654 - DNA, 30 bp, Artificial Sequence
  Synthetic oligonucleotide
cgagatagtcgtaggtcacggataggggat

SEQ ID NO: 47655 - DNA, 30 bp, Artificial Sequence
  Synthetic oligonucleotide
ccagaagagccgtgatgtacacatggggat

SEQ ID NO: 47656 - DNA, 30 bp, Artificial Sequence
  Synthetic oligonucleotide
ataggcacacttagggaaaaagttggggat

SEQ ID NO: 47657 - DNA, 30 bp, Artificial Sequence
  Synthetic oligonucleotide
cgcctaccggaggaagaagactactgggat

SEQ ID NO: 47658 - DNA, 30 bp, Artificial Sequence
  Synthetic oligonucleotide
gaaggtgagcaacgttgatgaaacctggat

SEQ ID NO: 47659 - DNA, 30 bp, Artificial Sequence
  Synthetic oligonucleotide
cggttcaggacgagacgtgatcccgtggat

SEQ ID NO: 47660 - DNA, 30 bp, Artificial Sequence
  Synthetic oligonucleotide
acgggacaactgtcagaaatcagcgtggat

SEQ ID NO: 47661 - DNA, 30 bp, Artificial Sequence
  Synthetic oligonucleotide
caagcacaataaaacggctctgggcatgat

SEQ ID NO: 47662 - DNA, 30 bp, Artificial Sequence
  Synthetic oligonucleotide
atggaccgactgtcctcaattggggatgat

SEQ ID NO: 47663 - DNA, 30 bp, Artificial Sequence
  Synthetic oligonucleotide
acggtaaaggcgcaaccagtgtcgactgat

SEQ ID NO: 47664 - DNA, 30 bp, Artificial Sequence
  Synthetic oligonucleotide
tccgtaacagaaaattatgtataagctgat

SEQ ID NO: 47665 - DNA, 30 bp, Artificial Sequence
  Synthetic oligonucleotide
catccataatgacttagaaaaaactctgat

SEQ ID NO: 47666 - DNA, 30 bp, Artificial Sequence
  Synthetic oligonucleotide
aaggacaagctcgtactattggagtctgat

SEQ ID NO: 47667 - DNA, 30 bp, Artificial Sequence
  Synthetic oligonucleotide
cgtcggtccttttcgaaggtctggagtgat

SEQ ID NO: 47668 - DNA, 30 bp, Artificial Sequence
  Synthetic oligonucleotide
tcactgtgtaatacctctctccagcgtgat

SEQ ID NO: 47669 - DNA, 30 bp, Artificial Sequence
  Synthetic oligonucleotide
ggagaaagagaaacgggtcagctgcgtgat

SEQ ID NO: 47670 - DNA, 30 bp, Artificial Sequence
  Synthetic oligonucleotide
taaagttacgataccgaaatactgtgtgat

SEQ ID NO: 47671 - DNA, 30 bp, Artificial Sequence
  Synthetic oligonucleotide
caccaatgagcataagcggcatacgttgat

SEQ ID NO: 47672 - DNA, 30 bp, Artificial Sequence
  Synthetic oligonucleotide
tcagtgagagcaactctcgagaaatttgat

SEQ ID NO: 47673 - DNA, 30 bp, Artificial Sequence
  Synthetic oligonucleotide
gaactatcggcacaccgggaagcaaaatat

SEQ ID NO: 47674 - DNA, 30 bp, Artificial Sequence
  Synthetic oligonucleotide
cacggaaaaactaaagacggagcgcaatat

SEQ ID NO: 47675 - DNA, 30 bp, Artificial Sequence
  Synthetic oligonucleotide
agaatcagctatagaacggtgatgcaatat

SEQ ID NO: 47676 - DNA, 30 bp, Artificial Sequence
  Synthetic oligonucleotide
caacgcgaatttagtacagaactgcaatat

SEQ ID NO: 47677 - DNA, 30 bp, Artificial Sequence
  Synthetic oligonucleotide
aaagccaactgagtcgtgaagatagaatat

SEQ ID NO: 47678 - DNA, 30 bp, Artificial Sequence
  Synthetic oligonucleotide
aggtcgcaacgtaaacaagatagcgaatat

SEQ ID NO: 47679 - DNA, 30 bp, Artificial Sequence
  Synthetic oligonucleotide
aggaccacgatggaacctgccacaccatat

SEQ ID NO: 47680 - DNA, 30 bp, Artificial Sequence
  Synthetic oligonucleotide
gtggagacctagcgagcatttagcccatat

SEQ ID NO: 47681 - DNA, 30 bp, Artificial Sequence
  Synthetic oligonucleotide
cgtgaaagcaagtcacttcattgcccatat

SEQ ID NO: 47682 - DNA, 30 bp, Artificial Sequence
  Synthetic oligonucleotide
atgccaatggactcagactagaacgcatat

SEQ ID NO: 47683 - DNA, 30 bp, Artificial Sequence
  Synthetic oligonucleotide
aagtccaatggagagtaaatctgcagatat

SEQ ID NO: 47684 - DNA, 30 bp, Artificial Sequence
  Synthetic oligonucleotide
agcatccggacgcgtatggggaagatatat

SEQ ID NO: 47685 - DNA, 30 bp, Artificial Sequence
  Synthetic oligonucleotide
cgtgaaaagattagtccgttgagtttatat

SEQ ID NO: 47686 - DNA, 30 bp, Artificial Sequence
  Synthetic oligonucleotide
actgggtgagcttcggagtccaaccactat

SEQ ID NO: 47687 - DNA, 30 bp, Artificial Sequence
  Synthetic oligonucleotide
caaaaatcatcaaggactaggacatactat

SEQ ID NO: 47688 - DNA, 30 bp, Artificial Sequence
  Synthetic oligonucleotide
tgcgacgacgagccggaaaaaaaaccctat

SEQ ID NO: 47689 - DNA, 30 bp, Artificial Sequence
  Synthetic oligonucleotide
gcaatgacggtaacggaacgagtacgctat

SEQ ID NO: 47690 - DNA, 30 bp, Artificial Sequence
  Synthetic oligonucleotide
ccgacatattaatggcttgcgtaaggctat

SEQ ID NO: 47691 - DNA, 30 bp, Artificial Sequence
  Synthetic oligonucleotide
aggaaagaaatgggctccaataaatgctat

SEQ ID NO: 47692 - DNA, 30 bp, Artificial Sequence
  Synthetic oligonucleotide
cgccctaaaaatgatcgaaaatgtatctat

SEQ ID NO: 47693 - DNA, 30 bp, Artificial Sequence
  Synthetic oligonucleotide
tgcaagagtcacactacgaacaaatagtat

SEQ ID NO: 47694 - DNA, 30 bp, Artificial Sequence
  Synthetic oligonucleotide
gggaaatgcacaccgttggagagtacgtat

SEQ ID NO: 47695 - DNA, 30 bp, Artificial Sequence
  Synthetic oligonucleotide
tgtggacaaatggtggacgtgctaccgtat

SEQ ID NO: 47696 - DNA, 30 bp, Artificial Sequence
  Synthetic oligonucleotide
caaaacggaatggcaggcggagtgtcgtat

SEQ ID NO: 47697 - DNA, 30 bp, Artificial Sequence
  Synthetic oligonucleotide
caagttaagaaactcaaacgaaaaaggtat

SEQ ID NO: 47698 - DNA, 30 bp, Artificial Sequence
  Synthetic oligonucleotide
cagcagggtggctcgcgtgagaaaatgtat

SEQ ID NO: 47699 - DNA, 30 bp, Artificial Sequence
  Synthetic oligonucleotide
gtacgggcacccatagtataagtcctgtat

SEQ ID NO: 47700 - DNA, 30 bp, Artificial Sequence
  Synthetic oligonucleotide
tcagtcgcggaaaggaagaggacagtgtat

SEQ ID NO: 47701 - DNA, 30 bp, Artificial Sequence
  Synthetic oligonucleotide
cttgcggcgtgatccaagcagaacgtgtat

SEQ ID NO: 47702 - DNA, 30 bp, Artificial Sequence
  Synthetic oligonucleotide
ccacgtctaacaaggttaaggggtaattat

SEQ ID NO: 47703 - DNA, 30 bp, Artificial Sequence
  Synthetic oligonucleotide
gaggctatgtggtagagtagactagcttat

SEQ ID NO: 47704 - DNA, 30 bp, Artificial Sequence
  Synthetic oligonucleotide
taggtattagtaggggcgaaagtacgttat

SEQ ID NO: 47705 - DNA, 30 bp, Artificial Sequence
  Synthetic oligonucleotide
tcaaggtgagtggaagaaatcttgatttat

SEQ ID NO: 47706 - DNA, 30 bp, Artificial Sequence
  Synthetic oligonucleotide
tcatccactaaatatgctaacttgaaaact

SEQ ID NO: 47707 - DNA, 30 bp, Artificial Sequence
  Synthetic oligonucleotide
gctgagagtggcacgagatagattgaaact

SEQ ID NO: 47708 - DNA, 30 bp, Artificial Sequence
  Synthetic oligonucleotide
tgagacaaaacatacttcccgggctaaact

SEQ ID NO: 47709 - DNA, 30 bp, Artificial Sequence
  Synthetic oligonucleotide
taaggtcgagccgtaggtgttcagtaaact

SEQ ID NO: 47710 - DNA, 30 bp, Artificial Sequence
  Synthetic oligonucleotide
gcaagtaaaaagaaatgggccaaaacaact

SEQ ID NO: 47711 - DNA, 30 bp, Artificial Sequence
  Synthetic oligonucleotide
cgcgagcgcgtcaatgtcccttcggcaact

SEQ ID NO: 47712 - DNA, 30 bp, Artificial Sequence
  Synthetic oligonucleotide
agagggcggcccccagcgcagactgcaact

SEQ ID NO: 47713 - DNA, 30 bp, Artificial Sequence
  Synthetic oligonucleotide
taggaatgaaaaaaatagaggcgacgaact

SEQ ID NO: 47714 - DNA, 30 bp, Artificial Sequence
  Synthetic oligonucleotide
cagccattatgatagaagccgaggcgaact

SEQ ID NO: 47715 - DNA, 30 bp, Artificial Sequence
  Synthetic oligonucleotide
cgctggaaaagggagagggactcctgaact

SEQ ID NO: 47716 - DNA, 30 bp, Artificial Sequence
  Synthetic oligonucleotide
ctatcaaagcataactaagatgacctaact

SEQ ID NO: 47717 - DNA, 30 bp, Artificial Sequence
  Synthetic oligonucleotide
agcttatacaccactcgacaattagtaact

SEQ ID NO: 47718 - DNA, 30 bp, Artificial Sequence
  Synthetic oligonucleotide
taaaaagatacaacgacaaaagcggtaact

SEQ ID NO: 47719 - DNA, 30 bp, Artificial Sequence
  Synthetic oligonucleotide
gccacaagggacatgggacttgctgtaact

SEQ ID NO: 47720 - DNA, 30 bp, Artificial Sequence
  Synthetic oligonucleotide
catcacgtcatccgaaaattaattgtaact

SEQ ID NO: 47721 - DNA, 30 bp, Artificial Sequence
  Synthetic oligonucleotide
aaagaggaactgtggaagaaaaagttaact

SEQ ID NO: 47722 - DNA, 30 bp, Artificial Sequence
  Synthetic oligonucleotide
aacgggagaacggcttagaggcgttacact

SEQ ID NO: 47723 - DNA, 30 bp, Artificial Sequence
  Synthetic oligonucleotide
tggtaaaccgcgacggtatgatactccact

SEQ ID NO: 47724 - DNA, 30 bp, Artificial Sequence
  Synthetic oligonucleotide
ccgaaggggttgtccggaccattaagcact

SEQ ID NO: 47725 - DNA, 30 bp, Artificial Sequence
  Synthetic oligonucleotide
taaggtgcccaagcgatttgacctaagact

SEQ ID NO: 47726 - DNA, 30 bp, Artificial Sequence
  Synthetic oligonucleotide
gtttcgtggacagctgccgacgctaagact

SEQ ID NO: 47727 - DNA, 30 bp, Artificial Sequence
  Synthetic oligonucleotide
gctgaaggtggctaaacttagggatcgact

SEQ ID NO: 47728 - DNA, 30 bp, Artificial Sequence
  Synthetic oligonucleotide
atagacggcccggtgatatcgaacaggact

SEQ ID NO: 47729 - DNA, 30 bp, Artificial Sequence
  Synthetic oligonucleotide
ggacgtgagtaattcgggggtttagtgact

SEQ ID NO: 47730 - DNA, 30 bp, Artificial Sequence
  Synthetic oligonucleotide
ccgaggttgtggccgacttggtttgtgact

SEQ ID NO: 47731 - DNA, 30 bp, Artificial Sequence
  Synthetic oligonucleotide
agaactgcatagccagaatagctaaatact

SEQ ID NO: 47732 - DNA, 30 bp, Artificial Sequence
  Synthetic oligonucleotide
tcagagtagcgtcaatcataagccaatact

SEQ ID NO: 47733 - DNA, 30 bp, Artificial Sequence
  Synthetic oligonucleotide
tgggtgtggaaggatagacccgataatact

SEQ ID NO: 47734 - DNA, 30 bp, Artificial Sequence
  Synthetic oligonucleotide
ggaagacatcttgtcagaactgtgagtact

SEQ ID NO: 47735 - DNA, 30 bp, Artificial Sequence
  Synthetic oligonucleotide
tcacctgaccattgtcaatcaactcgtact

SEQ ID NO: 47736 - DNA, 30 bp, Artificial Sequence
  Synthetic oligonucleotide
ttacttattactgagaataagtcgtttact

SEQ ID NO: 47737 - DNA, 30 bp, Artificial Sequence
  Synthetic oligonucleotide
ccttaacggaacgtgtatgggctaaaacct

SEQ ID NO: 47738 - DNA, 30 bp, Artificial Sequence
  Synthetic oligonucleotide
tagacaatagggggtgctcagagtaaacct

SEQ ID NO: 47739 - DNA, 30 bp, Artificial Sequence
  Synthetic oligonucleotide
tgagttttcactaagagggtaagcgaacct

SEQ ID NO: 47740 - DNA, 30 bp, Artificial Sequence
  Synthetic oligonucleotide
actggaagaagatactgccggatctaacct

SEQ ID NO: 47741 - DNA, 30 bp, Artificial Sequence
  Synthetic oligonucleotide
aagcgaggttcaaacgtgactgcggcacct

SEQ ID NO: 47742 - DNA, 30 bp, Artificial Sequence
  Synthetic oligonucleotide
ccgtagtttacgtgtatagggggactacct

SEQ ID NO: 47743 - DNA, 30 bp, Artificial Sequence
  Synthetic oligonucleotide
agggccgtgtgagactagagtatcccccct

SEQ ID NO: 47744 - DNA, 30 bp, Artificial Sequence
  Synthetic oligonucleotide
agacgaggagtccaagcgaaagcacagcct

SEQ ID NO: 47745 - DNA, 30 bp, Artificial Sequence
  Synthetic oligonucleotide
cctgagagacactgaggccacgtggcgcct

SEQ ID NO: 47746 - DNA, 30 bp, Artificial Sequence
  Synthetic oligonucleotide
atgattcagggatccgagtcgacatggcct

SEQ ID NO: 47747 - DNA, 30 bp, Artificial Sequence
  Synthetic oligonucleotide
tacggggcccgagtgttccataataatcct

SEQ ID NO: 47748 - DNA, 30 bp, Artificial Sequence
  Synthetic oligonucleotide
gtgtagtccagaagacaattgcgagatcct

SEQ ID NO: 47749 - DNA, 30 bp, Artificial Sequence
  Synthetic oligonucleotide
cattggccctccagaaaagcgaacgatcct

SEQ ID NO: 47750 - DNA, 30 bp, Artificial Sequence
  Synthetic oligonucleotide
cgggtagacgagaggtccctccctgatcct

SEQ ID NO: 47751 - DNA, 30 bp, Artificial Sequence
  Synthetic oligonucleotide
cacttacgatgcctatgctaatgaagtcct

SEQ ID NO: 47752 - DNA, 30 bp, Artificial Sequence
  Synthetic oligonucleotide
agagaccagtagtttcgcagagctcgtcct

SEQ ID NO: 47753 - DNA, 30 bp, Artificial Sequence
  Synthetic oligonucleotide
tcgaaattagtctaactaagggacggtcct

SEQ ID NO: 47754 - DNA, 30 bp, Artificial Sequence
  Synthetic oligonucleotide
tcggatgaactcagaacagccagataagct

SEQ ID NO: 47755 - DNA, 30 bp, Artificial Sequence
  Synthetic oligonucleotide
cagatgtacactcgggaagaggatccagct

SEQ ID NO: 47756 - DNA, 30 bp, Artificial Sequence
  Synthetic oligonucleotide
gacagtacatgtgtgaccaaaaaaagagct

SEQ ID NO: 47757 - DNA, 30 bp, Artificial Sequence
  Synthetic oligonucleotide
tctagacagggtagtctagctagaggagct

SEQ ID NO: 47758 - DNA, 30 bp, Artificial Sequence
  Synthetic oligonucleotide
agcaggtaaaggtaacacgcaataggagct

SEQ ID NO: 47759 - DNA, 30 bp, Artificial Sequence
  Synthetic oligonucleotide
acagggcaaatttcttaggcgaattgagct

SEQ ID NO: 47760 - DNA, 30 bp, Artificial Sequence
  Synthetic oligonucleotide
ggtgcaatggtataataagaacactacgct

SEQ ID NO: 47761 - DNA, 30 bp, Artificial Sequence
  Synthetic oligonucleotide
aaaaggggactctagagcatccagagcgct

SEQ ID NO: 47762 - DNA, 30 bp, Artificial Sequence
  Synthetic oligonucleotide
tcgattacgggaagagtatagaggtgcgct

SEQ ID NO: 47763 - DNA, 29 bp, Artificial Sequence
  Synthetic oligonucleotide
atgtaccgggccgaatcagcgggtgcgct

SEQ ID NO: 47764 - DNA, 30 bp, Artificial Sequence
  Synthetic oligonucleotide
aagggtcgcaagggaatgcaggatttcgct

SEQ ID NO: 47765 - DNA, 30 bp, Artificial Sequence
  Synthetic oligonucleotide
atgcgtgattgagagtgatccagtgaggct

SEQ ID NO: 47766 - DNA, 30 bp, Artificial Sequence
  Synthetic oligonucleotide
gtcgccggggacaaggatcgggtgccggct

SEQ ID NO: 47767 - DNA, 30 bp, Artificial Sequence
  Synthetic oligonucleotide
ctgcagaaaataacacttaaaagcagggct

SEQ ID NO: 47768 - DNA, 30 bp, Artificial Sequence
  Synthetic oligonucleotide
gtcgatcaaaaccgcgccataacgagggct

SEQ ID NO: 47769 - DNA, 30 bp, Artificial Sequence
  Synthetic oligonucleotide
gtagtgagaccaagcgagtccactatggct

SEQ ID NO: 47770 - DNA, 30 bp, Artificial Sequence
  Synthetic oligonucleotide
gggagaataggagaagcggattgaaatgct

SEQ ID NO: 47771 - DNA, 30 bp, Artificial Sequence
  Synthetic oligonucleotide
ggtttcataagtggtaacacgagggatgct

SEQ ID NO: 47772 - DNA, 30 bp, Artificial Sequence
  Synthetic oligonucleotide
ttgcggaaagcggacaacgtggagactgct

SEQ ID NO: 47773 - DNA, 30 bp, Artificial Sequence
  Synthetic oligonucleotide
actgggtgacggggtttcccgacttctgct

SEQ ID NO: 47774 - DNA, 30 bp, Artificial Sequence
  Synthetic oligonucleotide
acgcagagttggcagttgataagacgtgct

SEQ ID NO: 47775 - DNA, 30 bp, Artificial Sequence
  Synthetic oligonucleotide
gttcacttatcggaaggaacatagcttgct

SEQ ID NO: 47776 - DNA, 30 bp, Artificial Sequence
  Synthetic oligonucleotide
tcggatgttgcgaatggggcaggtgttgct

SEQ ID NO: 47777 - DNA, 30 bp, Artificial Sequence
  Synthetic oligonucleotide
atagcctaaccaacggtatgcctctttgct

SEQ ID NO: 47778 - DNA, 30 bp, Artificial Sequence
  Synthetic oligonucleotide
gtgcacagaaggtccagctgaaacaaatct

SEQ ID NO: 47779 - DNA, 30 bp, Artificial Sequence
  Synthetic oligonucleotide
tacgcgggtacggggaagacagcggaatct

SEQ ID NO: 47780 - DNA, 30 bp, Artificial Sequence
  Synthetic oligonucleotide
tagggcttgcggtgcgggacaactgaatct

SEQ ID NO: 47781 - DNA, 30 bp, Artificial Sequence
  Synthetic oligonucleotide
tgataactagcttaaaccgagaaacgatct

SEQ ID NO: 47782 - DNA, 30 bp, Artificial Sequence
  Synthetic oligonucleotide
acgggtgcaccggtaagaacgtcacgatct

SEQ ID NO: 47783 - DNA, 30 bp, Artificial Sequence
  Synthetic oligonucleotide
acaacgcgaagggtgttcctgtcctgatct

SEQ ID NO: 47784 - DNA, 30 bp, Artificial Sequence
  Synthetic oligonucleotide
atgcggataggggtgtcgctacgcgtatct

SEQ ID NO: 47785 - DNA, 30 bp, Artificial Sequence
  Synthetic oligonucleotide
tgaggtgaccgaagtccggaatataactct

SEQ ID NO: 47786 - DNA, 30 bp, Artificial Sequence
  Synthetic oligonucleotide
catgacgatatagaaggggaagttaactct

SEQ ID NO: 47787 - DNA, 30 bp, Artificial Sequence
  Synthetic oligonucleotide
tccaacgaagggaggacactgatacactct

SEQ ID NO: 47788 - DNA, 30 bp, Artificial Sequence
  Synthetic oligonucleotide
gaagcgaccagcacctcaatcataaagtct

SEQ ID NO: 47789 - DNA, 30 bp, Artificial Sequence
  Synthetic oligonucleotide
ctgaggggggacgatggttgagcccagtct

SEQ ID NO: 47790 - DNA, 30 bp, Artificial Sequence
  Synthetic oligonucleotide
tgcttacggaaaggaaaaacgctaacgtct

SEQ ID NO: 47791 - DNA, 30 bp, Artificial Sequence
  Synthetic oligonucleotide
gggaagtgccatgtaatctacactccgtct

SEQ ID NO: 47792 - DNA, 30 bp, Artificial Sequence
  Synthetic oligonucleotide
gatggcataatggtcggaacttaagcgtct

SEQ ID NO: 47793 - DNA, 30 bp, Artificial Sequence
  Synthetic oligonucleotide
gggggtgttgagaaaggatctgagtcgtct

SEQ ID NO: 47794 - DNA, 30 bp, Artificial Sequence
  Synthetic oligonucleotide
gcgagaacaatcgtctggtgaaaacggtct

SEQ ID NO: 47795 - DNA, 30 bp, Artificial Sequence
  Synthetic oligonucleotide
taaagtaaacgctcaactagaagagggtct

SEQ ID NO: 47796 - DNA, 30 bp, Artificial Sequence
  Synthetic oligonucleotide
agaatgacaaccgtagtgcgtaaaatgtct

SEQ ID NO: 47797 - DNA, 31 bp, Artificial Sequence
  Synthetic oligonucleotide
agtaacaagaaatcattagtaaagcaattct

SEQ ID NO: 47798 - DNA, 30 bp, Artificial Sequence
  Synthetic oligonucleotide
aggtgatcgaaagtacggaatatgaattct

SEQ ID NO: 47799 - DNA, 30 bp, Artificial Sequence
  Synthetic oligonucleotide
catggcaaacacgagtacgtccgctcttct

SEQ ID NO: 47800 - DNA, 30 bp, Artificial Sequence
  Synthetic oligonucleotide
atgggacgcgcgcggagccattgtaaaagt

SEQ ID NO: 47801 - DNA, 30 bp, Artificial Sequence
  Synthetic oligonucleotide
ggccgaacgggatgtagtcgcaaccaaagt

SEQ ID NO: 47802 - DNA, 30 bp, Artificial Sequence
  Synthetic oligonucleotide
gtcgacttacgacacaagtgcccataaagt

SEQ ID NO: 47803 - DNA, 30 bp, Artificial Sequence
  Synthetic oligonucleotide
ggggcgattttgcacagttagccgtaaagt

SEQ ID NO: 47804 - DNA, 30 bp, Artificial Sequence
  Synthetic oligonucleotide
cgtcaaacgagtagctacctgaaatcaagt

SEQ ID NO: 47805 - DNA, 30 bp, Artificial Sequence
  Synthetic oligonucleotide
gcgtgtgcaatatcattttgggggagaagt

SEQ ID NO: 47806 - DNA, 30 bp, Artificial Sequence
  Synthetic oligonucleotide
gggtgtactatcgttacggcgaaccgaagt

SEQ ID NO: 47807 - DNA, 30 bp, Artificial Sequence
  Synthetic oligonucleotide
acctgcgagtgaaggaaacggttaggaagt

SEQ ID NO: 47808 - DNA, 30 bp, Artificial Sequence
  Synthetic oligonucleotide
catacgggggccaacgtgacctgcggaagt

SEQ ID NO: 47809 - DNA, 30 bp, Artificial Sequence
  Synthetic oligonucleotide
tgtcaacaacggaactgtcggagatgaagt

SEQ ID NO: 47810 - DNA, 30 bp, Artificial Sequence
  Synthetic oligonucleotide
cagttgaacagggtcatctaacacgtaagt

SEQ ID NO: 47811 - DNA, 30 bp, Artificial Sequence
  Synthetic oligonucleotide
cgcgtttggaaagtgaggttagtgttaagt

SEQ ID NO: 47812 - DNA, 30 bp, Artificial Sequence
  Synthetic oligonucleotide
gcgatgcatcaggataaaaagaagaacagt

SEQ ID NO: 47813 - DNA, 30 bp, Artificial Sequence
  Synthetic oligonucleotide
tacctgaaccgaagaagtggaaaggccagt

SEQ ID NO: 47814 - DNA, 30 bp, Artificial Sequence
  Synthetic oligonucleotide
tgttgatgggaagaagtaagatctgccagt

SEQ ID NO: 47815 - DNA, 30 bp, Artificial Sequence
  Synthetic oligonucleotide
cccgtggagaaggggctcaaggactccagt

SEQ ID NO: 47816 - DNA, 30 bp, Artificial Sequence
  Synthetic oligonucleotide
cagcgggcccactcactaaagtcgagcagt

SEQ ID NO: 47817 - DNA, 30 bp, Artificial Sequence
  Synthetic oligonucleotide
caatataagaccggtctggaacatagcagt

SEQ ID NO: 47818 - DNA, 30 bp, Artificial Sequence
  Synthetic oligonucleotide
accgtgaagaggcaagtgacatctggcagt

SEQ ID NO: 47819 - DNA, 30 bp, Artificial Sequence
  Synthetic oligonucleotide
agaaggaaacattgtagagaatatatcagt

SEQ ID NO: 47820 - DNA, 30 bp, Artificial Sequence
  Synthetic oligonucleotide
tggataatgcaatcaaggaacaaagtcagt

SEQ ID NO: 47821 - DNA, 30 bp, Artificial Sequence
  Synthetic oligonucleotide
cctccacataccaaagatatcccgaagagt

SEQ ID NO: 47822 - DNA, 30 bp, Artificial Sequence
  Synthetic oligonucleotide
ccgtacgtgcgtaaaacatgcctccagagt

SEQ ID NO: 47823 - DNA, 30 bp, Artificial Sequence
  Synthetic oligonucleotide
ctggtcccaggcgagtgtaaggtttagagt

SEQ ID NO: 47824 - DNA, 29 bp, Artificial Sequence
  Synthetic oligonucleotide
tcgccgcggcgtgaaatgtaccaacgagt

SEQ ID NO: 47825 - DNA, 30 bp, Artificial Sequence
  Synthetic oligonucleotide
gacggcgggatcccaagatgactaacgagt

SEQ ID NO: 47826 - DNA, 30 bp, Artificial Sequence
  Synthetic oligonucleotide
cccataatcagggggacagaccacccgagt

SEQ ID NO: 47827 - DNA, 30 bp, Artificial Sequence
  Synthetic oligonucleotide
tctagaaaatgcaacaagtgctgggcgagt

SEQ ID NO: 47828 - DNA, 30 bp, Artificial Sequence
  Synthetic oligonucleotide
atgtaatatcgagtggcagtcgaaaggagt

SEQ ID NO: 47829 - DNA, 30 bp, Artificial Sequence
  Synthetic oligonucleotide
ccagtggatgatacatgtcggaccaggagt

SEQ ID NO: 47830 - DNA, 30 bp, Artificial Sequence
  Synthetic oligonucleotide
catgaggacgcagtgtgaatcgcgaggagt

SEQ ID NO: 47831 - DNA, 30 bp, Artificial Sequence
  Synthetic oligonucleotide
aagggtagagaaaaaccacgtcatcggagt

SEQ ID NO: 47832 - DNA, 30 bp, Artificial Sequence
  Synthetic oligonucleotide
agagacctcacgaaacgagcccgcctgagt

SEQ ID NO: 47833 - DNA, 31 bp, Artificial Sequence
  Synthetic oligonucleotide
tgcgcaatggatgagtgtagcggggctgagt

SEQ ID NO: 47834 - DNA, 30 bp, Artificial Sequence
  Synthetic oligonucleotide
acatgcaccgaatgcgtgaggggtgtgagt

SEQ ID NO: 47835 - DNA, 30 bp, Artificial Sequence
  Synthetic oligonucleotide
atgagtggaagctttgcagggcggaatagt

SEQ ID NO: 47836 - DNA, 30 bp, Artificial Sequence
  Synthetic oligonucleotide
gcacgatctggtacagaaaatgcttgtagt

SEQ ID NO: 47837 - DNA, 30 bp, Artificial Sequence
  Synthetic oligonucleotide
gcaggagtcctagtggccagcgtcattagt

SEQ ID NO: 47838 - DNA, 30 bp, Artificial Sequence
  Synthetic oligonucleotide
cgtcattgcataagcgtgtgcaggattagt

SEQ ID NO: 47839 - DNA, 30 bp, Artificial Sequence
  Synthetic oligonucleotide
cgaactacagttgtgtaatgagatattagt

SEQ ID NO: 47840 - DNA, 29 bp, Artificial Sequence
  Synthetic oligonucleotide
aagccagattatagaaaccagggtaacgt

SEQ ID NO: 47841 - DNA, 30 bp, Artificial Sequence
  Synthetic oligonucleotide
ggtgaaaatttggtgaggcagagcacacgt

SEQ ID NO: 47842 - DNA, 30 bp, Artificial Sequence
  Synthetic oligonucleotide
aggcaggaagaggacatcgaaaggccacgt

SEQ ID NO: 47843 - DNA, 30 bp, Artificial Sequence
  Synthetic oligonucleotide
taggtaatggtaaggccgttcgatccacgt

SEQ ID NO: 47844 - DNA, 31 bp, Artificial Sequence
  Synthetic oligonucleotide
cggcacataagaacgaagcctcccaagacgt

SEQ ID NO: 47845 - DNA, 30 bp, Artificial Sequence
  Synthetic oligonucleotide
tgccggaggaggctgccggatgcaagacgt

SEQ ID NO: 47846 - DNA, 30 bp, Artificial Sequence
  Synthetic oligonucleotide
tagtacgtggccatggataccgtaagacgt

SEQ ID NO: 47847 - DNA, 30 bp, Artificial Sequence
  Synthetic oligonucleotide
agatagggaagcgtcgagagtgcgagacgt

SEQ ID NO: 47848 - DNA, 30 bp, Artificial Sequence
  Synthetic oligonucleotide
ggctaagtagaacgggtcggaaagcgacgt

SEQ ID NO: 47849 - DNA, 30 bp, Artificial Sequence
  Synthetic oligonucleotide
gcggtccagtgcagtggcccaacactacgt

SEQ ID NO: 47850 - DNA, 30 bp, Artificial Sequence
  Synthetic oligonucleotide
cgaggggggcagaattcatttatgaaccgt

SEQ ID NO: 47851 - DNA, 30 bp, Artificial Sequence
  Synthetic oligonucleotide
acgagactgaggaaagtaaggcgcggccgt

SEQ ID NO: 47852 - DNA, 30 bp, Artificial Sequence
  Synthetic oligonucleotide
agggcgtaagccggggcgtgcaatttccgt

SEQ ID NO: 47853 - DNA, 30 bp, Artificial Sequence
  Synthetic oligonucleotide
gaacggtagtgaccaatagtccaatagcgt

SEQ ID NO: 47854 - DNA, 30 bp, Artificial Sequence
  Synthetic oligonucleotide
cagcaggaataatagcgtagctcgtcgcgt

SEQ ID NO: 47855 - DNA, 30 bp, Artificial Sequence
  Synthetic oligonucleotide
cgcttttgttcggtcacagggttacggcgt

SEQ ID NO: 47856 - DNA, 30 bp, Artificial Sequence
  Synthetic oligonucleotide
tcatctgccagatgaactagtatactgcgt

SEQ ID NO: 47857 - DNA, 30 bp, Artificial Sequence
  Synthetic oligonucleotide
taaattacataagcgaataatgctgtgcgt

SEQ ID NO: 47858 - DNA, 30 bp, Artificial Sequence
  Synthetic oligonucleotide
gaggtgtagtggactgcgaaccaattgcgt

SEQ ID NO: 47859 - DNA, 30 bp, Artificial Sequence
  Synthetic oligonucleotide
acagatacgttagccccccaggtacatcgt

SEQ ID NO: 47860 - DNA, 30 bp, Artificial Sequence
  Synthetic oligonucleotide
tggtatgaagacaagacccacatgtatcgt

SEQ ID NO: 47861 - DNA, 30 bp, Artificial Sequence
  Synthetic oligonucleotide
tgaacggttgtacgccttcaagaaactcgt

SEQ ID NO: 47862 - DNA, 30 bp, Artificial Sequence
  Synthetic oligonucleotide
tggagcgtattcagacagtcggcatctcgt

SEQ ID NO: 47863 - DNA, 30 bp, Artificial Sequence
  Synthetic oligonucleotide
attaaaaaaaatggtgtaatagaacgtcgt

SEQ ID NO: 47864 - DNA, 30 bp, Artificial Sequence
  Synthetic oligonucleotide
ggtgtatatgagagcgatgggccagttcgt

SEQ ID NO: 47865 - DNA, 30 bp, Artificial Sequence
  Synthetic oligonucleotide
aacgtaaatgtcaacactcaagctcaaggt

SEQ ID NO: 47866 - DNA, 30 bp, Artificial Sequence
  Synthetic oligonucleotide
acagtggttgagcagagaacatgttaaggt

SEQ ID NO: 47867 - DNA, 30 bp, Artificial Sequence
  Synthetic oligonucleotide
tgcacgggcgaatcgattgagaacacaggt

SEQ ID NO: 47868 - DNA, 30 bp, Artificial Sequence
  Synthetic oligonucleotide
acgggacggtaaacatatgagttcccaggt

SEQ ID NO: 47869 - DNA, 30 bp, Artificial Sequence
  Synthetic oligonucleotide
tggtaggaaagaccagatgaatgggcaggt

SEQ ID NO: 47870 - DNA, 30 bp, Artificial Sequence
  Synthetic oligonucleotide
gtcgggggccgggaggagtaacaatcaggt

SEQ ID NO: 47871 - DNA, 30 bp, Artificial Sequence
  Synthetic oligonucleotide
tggcgaacggccattcatctcgtcagaggt

SEQ ID NO: 47872 - DNA, 30 bp, Artificial Sequence
  Synthetic oligonucleotide
gactgaacggcaaggcggtatacgagaggt

SEQ ID NO: 47873 - DNA, 30 bp, Artificial Sequence
  Synthetic oligonucleotide
gggaaagagaaagatgtggcccggagaggt

SEQ ID NO: 47874 - DNA, 30 bp, Artificial Sequence
  Synthetic oligonucleotide
ggtgataaagcgcatgtcagccggcgaggt

SEQ ID NO: 47875 - DNA, 30 bp, Artificial Sequence
  Synthetic oligonucleotide
gccaaaaagaagtctatagcagagctaggt

SEQ ID NO: 47876 - DNA, 30 bp, Artificial Sequence
  Synthetic oligonucleotide
tgataccgcgatgagggacggtgattaggt

SEQ ID NO: 47877 - DNA, 30 bp, Artificial Sequence
  Synthetic oligonucleotide
ggcccgcaaagggaccatggcaatgccggt

SEQ ID NO: 47878 - DNA, 30 bp, Artificial Sequence
  Synthetic oligonucleotide
agggtatctccagaggactgacactgcggt

SEQ ID NO: 47879 - DNA, 30 bp, Artificial Sequence
  Synthetic oligonucleotide
cgtgtcaaggcaaagaataaacggtgcggt

SEQ ID NO: 47880 - DNA, 30 bp, Artificial Sequence
  Synthetic oligonucleotide
acaaaggaggagacctgcggtacgatcggt

SEQ ID NO: 47881 - DNA, 30 bp, Artificial Sequence
  Synthetic oligonucleotide
gcgaacaaaagggagcagatgcgagtcggt

SEQ ID NO: 47882 - DNA, 30 bp, Artificial Sequence
  Synthetic oligonucleotide
gtcactaggtgtgcggggcgaagtaagggt

SEQ ID NO: 47883 - DNA, 30 bp, Artificial Sequence
  Synthetic oligonucleotide
ccgaaggggactgctatctatccacagggt

SEQ ID NO: 47884 - DNA, 30 bp, Artificial Sequence
  Synthetic oligonucleotide
atgagtcggaaccaggtgcacccgcagggt

SEQ ID NO: 47885 - DNA, 30 bp, Artificial Sequence
  Synthetic oligonucleotide
cgtaaaagatctagtagttatcttcagggt

SEQ ID NO: 47886 - DNA, 30 bp, Artificial Sequence
  Synthetic oligonucleotide
gaagccgtagcgaatcgtctcatgtcgggt

SEQ ID NO: 47887 - DNA, 30 bp, Artificial Sequence
  Synthetic oligonucleotide
gcgaaagacggagtaagggtaagacggggt

SEQ ID NO: 47888 - DNA, 30 bp, Artificial Sequence
  Synthetic oligonucleotide
aggcgagtacaaggcacgaaaggacggggt

SEQ ID NO: 47889 - DNA, 30 bp, Artificial Sequence
  Synthetic oligonucleotide
tgtgaagggcagggagtacgctaactgggt

SEQ ID NO: 47890 - DNA, 30 bp, Artificial Sequence
  Synthetic oligonucleotide
caaagtcagtctaaccaaccgaacttgggt

SEQ ID NO: 47891 - DNA, 30 bp, Artificial Sequence
  Synthetic oligonucleotide
cgaataatgcacgtaccacgggacttgggt

SEQ ID NO: 47892 - DNA, 30 bp, Artificial Sequence
  Synthetic oligonucleotide
cgctcgttagcaaggtaatcgtggttgggt

SEQ ID NO: 47893 - DNA, 30 bp, Artificial Sequence
  Synthetic oligonucleotide
aaacgacccgacctagggacgtcgaatggt

SEQ ID NO: 47894 - DNA, 30 bp, Artificial Sequence
  Synthetic oligonucleotide
acggaacaaggctcaatctctccatatggt

SEQ ID NO: 47895 - DNA, 30 bp, Artificial Sequence
  Synthetic oligonucleotide
tagggatggcggaccgaggaacgacctggt

SEQ ID NO: 47896 - DNA, 30 bp, Artificial Sequence
  Synthetic oligonucleotide
ttgcctacaaatatagatcgaatgagtggt

SEQ ID NO: 47897 - DNA, 30 bp, Artificial Sequence
  Synthetic oligonucleotide
aagagtgggaaaacaacttcgggcggtggt

SEQ ID NO: 47898 - DNA, 31 bp, Artificial Sequence
  Synthetic oligonucleotide
ctaagcacgacgagatatatccctgattggt

SEQ ID NO: 47899 - DNA, 30 bp, Artificial Sequence
  Synthetic oligonucleotide
aagttacagcggtacaccgatggcaaatgt

SEQ ID NO: 47900 - DNA, 30 bp, Artificial Sequence
  Synthetic oligonucleotide
gaggatacatcgcgaagtgctaactaatgt

SEQ ID NO: 47901 - DNA, 30 bp, Artificial Sequence
  Synthetic oligonucleotide
cgacacgagaagtgcccaataaaagcatgt

SEQ ID NO: 47902 - DNA, 30 bp, Artificial Sequence
  Synthetic oligonucleotide
aacagagcgaggcccagttttgcaagatgt

SEQ ID NO: 47903 - DNA, 30 bp, Artificial Sequence
  Synthetic oligonucleotide
aacgatgtgggggttagggactgaggatgt

SEQ ID NO: 47904 - DNA, 30 bp, Artificial Sequence
  Synthetic oligonucleotide
gtacgagatagtcgtctaggaatatgatgt

SEQ ID NO: 47905 - DNA, 30 bp, Artificial Sequence
  Synthetic oligonucleotide
gaccggactagtctccatcaaaacaactgt

SEQ ID NO: 47906 - DNA, 30 bp, Artificial Sequence
  Synthetic oligonucleotide
cattgagatcaagcctaaagggggagctgt

SEQ ID NO: 47907 - DNA, 30 bp, Artificial Sequence
  Synthetic oligonucleotide
tagtggctaagtagccgggaagcctgctgt

SEQ ID NO: 47908 - DNA, 30 bp, Artificial Sequence
  Synthetic oligonucleotide
agacgggagagcacaatacagtggatctgt

SEQ ID NO: 47909 - DNA, 30 bp, Artificial Sequence
  Synthetic oligonucleotide
acccagctaatctggcaacttacagagtgt

SEQ ID NO: 47910 - DNA, 30 bp, Artificial Sequence
  Synthetic oligonucleotide
ttgaccggggtgtggacgagggcggagtgt

SEQ ID NO: 47911 - DNA, 30 bp, Artificial Sequence
  Synthetic oligonucleotide
gtggacaccaattagggtaacagatagtgt

SEQ ID NO: 47912 - DNA, 30 bp, Artificial Sequence
  Synthetic oligonucleotide
accacagcatacagggttggcatgtagtgt

SEQ ID NO: 47913 - DNA, 30 bp, Artificial Sequence
  Synthetic oligonucleotide
ctctgcttgggataaaatgagcgttagtgt

SEQ ID NO: 47914 - DNA, 30 bp, Artificial Sequence
  Synthetic oligonucleotide
tcaggacatcaagaacatgcaatcacgtgt

SEQ ID NO: 47915 - DNA, 30 bp, Artificial Sequence
  Synthetic oligonucleotide
tcgccctcgaaaggggtagtagaaccgtgt

SEQ ID NO: 47916 - DNA, 30 bp, Artificial Sequence
  Synthetic oligonucleotide
tcaaggaaggccaatactatggctgcgtgt

SEQ ID NO: 47917 - DNA, 30 bp, Artificial Sequence
  Synthetic oligonucleotide
aagcgatgtaacgccaggagctagtggtgt

SEQ ID NO: 47918 - DNA, 30 bp, Artificial Sequence
  Synthetic oligonucleotide
aggcgttagggcccaagaagatccatgtgt

SEQ ID NO: 47919 - DNA, 30 bp, Artificial Sequence
  Synthetic oligonucleotide
atgctaaatcaagagtacagtatgatgtgt

SEQ ID NO: 47920 - DNA, 30 bp, Artificial Sequence
  Synthetic oligonucleotide
tcggacacacatttgagggcatgtatgtgt

SEQ ID NO: 47921 - DNA, 30 bp, Artificial Sequence
  Synthetic oligonucleotide
atcggctggccgaccccgcgtaacgtgtgt

SEQ ID NO: 47922 - DNA, 30 bp, Artificial Sequence
  Synthetic oligonucleotide
tatgcccacagagaagtggcaaaacattgt

SEQ ID NO: 47923 - DNA, 30 bp, Artificial Sequence
  Synthetic oligonucleotide
cgatgtcagtgggggccgaagtagacttgt

SEQ ID NO: 47924 - DNA, 30 bp, Artificial Sequence
  Synthetic oligonucleotide
cacttcggaacgcagatgtgctgcagttgt

SEQ ID NO: 47925 - DNA, 30 bp, Artificial Sequence
  Synthetic oligonucleotide
atcggagcgttgccgaagaagaggatttgt

SEQ ID NO: 47926 - DNA, 30 bp, Artificial Sequence
  Synthetic oligonucleotide
aagtgaggtcccagggttgacaggttttgt

SEQ ID NO: 47927 - DNA, 30 bp, Artificial Sequence
  Synthetic oligonucleotide
acgagcaacctgacatctggggacaaaatt

SEQ ID NO: 47928 - DNA, 30 bp, Artificial Sequence
  Synthetic oligonucleotide
ctgagtgaacacacagccagaaagacaatt

SEQ ID NO: 47929 - DNA, 30 bp, Artificial Sequence
  Synthetic oligonucleotide
gctaatacaaggtggatgtcatgcgcaatt

SEQ ID NO: 47930 - DNA, 30 bp, Artificial Sequence
  Synthetic oligonucleotide
ctgatagatacaaggtgactgagggcaatt

SEQ ID NO: 47931 - DNA, 30 bp, Artificial Sequence
  Synthetic oligonucleotide
tccagtagcgcaagagggcaaacgtcaatt

SEQ ID NO: 47932 - DNA, 30 bp, Artificial Sequence
  Synthetic oligonucleotide
tggacacactctaagagcagtctgggaatt

SEQ ID NO: 47933 - DNA, 30 bp, Artificial Sequence
  Synthetic oligonucleotide
tagacacatgcgtcgccgacgggaataatt

SEQ ID NO: 47934 - DNA, 30 bp, Artificial Sequence
  Synthetic oligonucleotide
atcgctacggacagagggtgcaccataatt

SEQ ID NO: 47935 - DNA, 30 bp, Artificial Sequence
  Synthetic oligonucleotide
cgtagagagggaactaagtagagactaatt

SEQ ID NO: 47936 - DNA, 30 bp, Artificial Sequence
  Synthetic oligonucleotide
cacaggcgatcatgctctaggagtgtaatt

SEQ ID NO: 47937 - DNA, 30 bp, Artificial Sequence
  Synthetic oligonucleotide
cggatgagcaacatgaagtataccaacatt

SEQ ID NO: 47938 - DNA, 30 bp, Artificial Sequence
  Synthetic oligonucleotide
ggatggcgacgatgacacaacagaggcatt

SEQ ID NO: 47939 - DNA, 30 bp, Artificial Sequence
  Synthetic oligonucleotide
agtcgtagaccaaggtgatggaattgcatt

SEQ ID NO: 47940 - DNA, 30 bp, Artificial Sequence
  Synthetic oligonucleotide
tacgaaggcatgggtgaataggtcatcatt

SEQ ID NO: 47941 - DNA, 30 bp, Artificial Sequence
  Synthetic oligonucleotide
caaggaataggatctgaaatggttatcatt

SEQ ID NO: 47942 - DNA, 30 bp, Artificial Sequence
  Synthetic oligonucleotide
gcgtgtggacagacaaggtgacggctcatt

SEQ ID NO: 47943 - DNA, 30 bp, Artificial Sequence
  Synthetic oligonucleotide
ccatcacaagcacagggcaacaccttcatt

SEQ ID NO: 47944 - DNA, 30 bp, Artificial Sequence
  Synthetic oligonucleotide
gtctgggcgagcgtgggaagcgagaagatt

SEQ ID NO: 47945 - DNA, 30 bp, Artificial Sequence
  Synthetic oligonucleotide
gagacggtgggaagcccctgaattaagatt

SEQ ID NO: 47946 - DNA, 30 bp, Artificial Sequence
  Synthetic oligonucleotide
ggcacatggggaagtgaacggctacagatt

SEQ ID NO: 47947 - DNA, 30 bp, Artificial Sequence
  Synthetic oligonucleotide
accgccggtgaaacgagctataaccagatt

SEQ ID NO: 47948 - DNA, 30 bp, Artificial Sequence
  Synthetic oligonucleotide
tcggatccaaagtagtcatcatacgagatt

SEQ ID NO: 47949 - DNA, 30 bp, Artificial Sequence
  Synthetic oligonucleotide
acgaaaatatgagatgaaatgaagtagatt

SEQ ID NO: 47950 - DNA, 30 bp, Artificial Sequence
  Synthetic oligonucleotide
tatacgccgatgagaacacggagggcgatt

SEQ ID NO: 47951 - DNA, 30 bp, Artificial Sequence
  Synthetic oligonucleotide
agggaatgggtgccaaaattaggtgcgatt

SEQ ID NO: 47952 - DNA, 30 bp, Artificial Sequence
  Synthetic oligonucleotide
aggctaattggaggacggaatactaggatt

SEQ ID NO: 47953 - DNA, 30 bp, Artificial Sequence
  Synthetic oligonucleotide
cggtccattacagtatccgacaatctgatt

SEQ ID NO: 47954 - DNA, 30 bp, Artificial Sequence
  Synthetic oligonucleotide
cggagatgatttggacagaaatcggtgatt

SEQ ID NO: 47955 - DNA, 30 bp, Artificial Sequence
  Synthetic oligonucleotide
gtgaagctgaacaagcactagagtgtgatt

SEQ ID NO: 47956 - DNA, 30 bp, Artificial Sequence
  Synthetic oligonucleotide
cacatacaggtatcgactaagtgatatatt

SEQ ID NO: 47957 - DNA, 30 bp, Artificial Sequence
  Synthetic oligonucleotide
acgagagggtcggagagtgagtaacgtatt

SEQ ID NO: 47958 - DNA, 30 bp, Artificial Sequence
  Synthetic oligonucleotide
caaggatgcgtcgttagggtaggaggtatt

SEQ ID NO: 47959 - DNA, 30 bp, Artificial Sequence
  Synthetic oligonucleotide
ggggagcgccgaacccgtcttgtaacactt

SEQ ID NO: 47960 - DNA, 30 bp, Artificial Sequence
  Synthetic oligonucleotide
acggtgagcataaaaactacaggcacactt

SEQ ID NO: 47961 - DNA, 30 bp, Artificial Sequence
  Synthetic oligonucleotide
aatacctagctggtgaggacagcgagactt

SEQ ID NO: 47962 - DNA, 30 bp, Artificial Sequence
  Synthetic oligonucleotide
gcgtacatagagagatcgagtgcaatactt

SEQ ID NO: 47963 - DNA, 30 bp, Artificial Sequence
  Synthetic oligonucleotide
tgcggatgactgagaataaacaatctactt

SEQ ID NO: 47964 - DNA, 30 bp, Artificial Sequence
  Synthetic oligonucleotide
cttgggcaacaaccgaacgatgagtgcctt

SEQ ID NO: 47965 - DNA, 30 bp, Artificial Sequence
  Synthetic oligonucleotide
ctacaccagcgtcagatagaaagtatcctt

SEQ ID NO: 47966 - DNA, 30 bp, Artificial Sequence
  Synthetic oligonucleotide
gtgcacagaatcaatgtatgtaaacagctt

SEQ ID NO: 47967 - DNA, 30 bp, Artificial Sequence
  Synthetic oligonucleotide
gtagaccggaaaatatacaaccagcagctt

SEQ ID NO: 47968 - DNA, 30 bp, Artificial Sequence
  Synthetic oligonucleotide
agataccaggagtttagtcagagtgagctt

SEQ ID NO: 47969 - DNA, 30 bp, Artificial Sequence
  Synthetic oligonucleotide
ggatgtgaggtggttgagtagagcacgctt

SEQ ID NO: 47970 - DNA, 30 bp, Artificial Sequence
  Synthetic oligonucleotide
gtgcgtcaaggtacggtgaatcgtcggctt

SEQ ID NO: 47971 - DNA, 30 bp, Artificial Sequence
  Synthetic oligonucleotide
tgtttaaacagagtgagtactgtttggctt

SEQ ID NO: 47972 - DNA, 30 bp, Artificial Sequence
  Synthetic oligonucleotide
gagagggaatccgagacacgcgacatgctt

SEQ ID NO: 47973 - DNA, 30 bp, Artificial Sequence
  Synthetic oligonucleotide
agtgtggtgtaagtagtagcatttatgctt

SEQ ID NO: 47974 - DNA, 30 bp, Artificial Sequence
  Synthetic oligonucleotide
aaaccagcagagcggaatgaggccttgctt

SEQ ID NO: 47975 - DNA, 30 bp, Artificial Sequence
  Synthetic oligonucleotide
acgtgcgcgagtcttatatgtgagaatctt

SEQ ID NO: 47976 - DNA, 30 bp, Artificial Sequence
  Synthetic oligonucleotide
gtaaaacgatggaggacattcacacaagtt

SEQ ID NO: 47977 - DNA, 30 bp, Artificial Sequence
  Synthetic oligonucleotide
aagggtgtattaggacgggacatccaagtt

SEQ ID NO: 47978 - DNA, 30 bp, Artificial Sequence
  Synthetic oligonucleotide
tgttaaaacagactaatggtccggcaagtt

SEQ ID NO: 47979 - DNA, 30 bp, Artificial Sequence
  Synthetic oligonucleotide
tgatccgaaggaaatacaccaactgaagtt

SEQ ID NO: 47980 - DNA, 30 bp, Artificial Sequence
  Synthetic oligonucleotide
cctcacaggatggctcagacaggataagtt

SEQ ID NO: 47981 - DNA, 30 bp, Artificial Sequence
  Synthetic oligonucleotide
agctcgacttgtggggaagcggagggagtt

SEQ ID NO: 47982 - DNA, 30 bp, Artificial Sequence
  Synthetic oligonucleotide
tcggaggatggatcccaacatgatggagtt

SEQ ID NO: 47983 - DNA, 30 bp, Artificial Sequence
  Synthetic oligonucleotide
agagcatgaaaggttaaccgcgatatcgtt

SEQ ID NO: 47984 - DNA, 30 bp, Artificial Sequence
  Synthetic oligonucleotide
ggagaaatgaatgttgagtggtccaaggtt

SEQ ID NO: 47985 - DNA, 30 bp, Artificial Sequence
  Synthetic oligonucleotide
atgcctcagcctgataatgaaagcaaggtt

SEQ ID NO: 47986 - DNA, 30 bp, Artificial Sequence
  Synthetic oligonucleotide
ataaaaccatcaccgccagaagaggaggtt

SEQ ID NO: 47987 - DNA, 30 bp, Artificial Sequence
  Synthetic oligonucleotide
ggcagagggtagcgtcttgaaaaactggtt

SEQ ID NO: 47988 - DNA, 30 bp, Artificial Sequence
  Synthetic oligonucleotide
atgggacatagagagcaatgagtattggtt

SEQ ID NO: 47989 - DNA, 30 bp, Artificial Sequence
  Synthetic oligonucleotide
tgagtaaaatctaagaatccaattcatgtt

SEQ ID NO: 47990 - DNA, 30 bp, Artificial Sequence
  Synthetic oligonucleotide
cttaatatcagtaagtgaaatcaagcattt

SEQ ID NO: 47991 - DNA, 30 bp, Artificial Sequence
  Synthetic oligonucleotide
gacgaggggccatgggatcttattggattt

SEQ ID NO: 47992 - DNA, 30 bp, Artificial Sequence
  Synthetic oligonucleotide
cgagtgtatggaattgggaggttagtattt

SEQ ID NO: 47993 - DNA, 30 bp, Artificial Sequence
  Synthetic oligonucleotide
agtaatagcccttccagtgtgactcacttt

SEQ ID NO: 47994 - DNA, 30 bp, Artificial Sequence
  Synthetic oligonucleotide
caagggcgaaaacgagccttactgtccttt

SEQ ID NO: 47995 - DNA, 30 bp, Artificial Sequence
  Synthetic oligonucleotide
atcgaggtcccattgcgagtagcatgcttt

SEQ ID NO: 47996 - DNA, 30 bp, Artificial Sequence
  Synthetic oligonucleotide
acgagagactaacggtccacaagcgagttt

SEQ ID NO: 47997 - DNA, 30 bp, Artificial Sequence
  Synthetic oligonucleotide
tcgagactggtaggatataagggcgagttt

SEQ ID NO: 47998 - DNA, 30 bp, Artificial Sequence
  Synthetic oligonucleotide
cgcaagacgactcggagaatagttgcgttt

SEQ ID NO: 47999 - DNA, 30 bp, Artificial Sequence
  Synthetic oligonucleotide
cgcagatgcgacaatggacggcgaaggttt

SEQ ID NO: 48000 - DNA, 30 bp, Artificial Sequence
  Synthetic oligonucleotide
agattgggggctgtgcttagtaagcggttt

SEQ ID NO: 48001 - DNA, 30 bp, Artificial Sequence
  Synthetic oligonucleotide
ggggaactcccccacaatcaaactgggttt

SEQ ID NO: 48002 - DNA, 30 bp, Artificial Sequence
  Synthetic oligonucleotide
agtccagggatcaagtgactaaagctgttt

SEQ ID NO: 48003 - DNA, 30 bp, Artificial Sequence
  Synthetic oligonucleotide
ggcacgcttcgagaggatcaccgtctgttt

SEQ ID NO: 48004 - DNA, 30 bp, Artificial Sequence
  Synthetic oligonucleotide
gcagggctggcgaaagtcaaactgtttttt

SEQ ID NO: 48005 - DNA, 30 bp, Artificial Sequence
  Synthetic oligonucleotide
gcaaaagtccggcaggtccaccagaaaaaa

SEQ ID NO: 48006 - DNA, 31 bp, Artificial Sequence
  Synthetic oligonucleotide
tctccgcggataggaaaacgctgcgaaaaaa

SEQ ID NO: 48007 - DNA, 30 bp, Artificial Sequence
  Synthetic oligonucleotide
gaccatagctcggctgtaccgacataaaaa

SEQ ID NO: 48008 - DNA, 30 bp, Artificial Sequence
  Synthetic oligonucleotide
gcacagccaaagtgaggcgacagaccaaaa

SEQ ID NO: 48009 - DNA, 30 bp, Artificial Sequence
  Synthetic oligonucleotide
accataaggccaacatctcatcggccaaaa

SEQ ID NO: 48010 - DNA, 30 bp, Artificial Sequence
  Synthetic oligonucleotide
atgtagcacgacaggcgagggagctcaaaa

SEQ ID NO: 48011 - DNA, 30 bp, Artificial Sequence
  Synthetic oligonucleotide
aaccggtaccagccgaaccgagaacgaaaa

SEQ ID NO: 48012 - DNA, 30 bp, Artificial Sequence
  Synthetic oligonucleotide
ctagagccatgagtatcctaactacgaaaa

SEQ ID NO: 48013 - DNA, 30 bp, Artificial Sequence
  Synthetic oligonucleotide
accatcaagttgccgagttggcaccgaaaa

SEQ ID NO: 48014 - DNA, 30 bp, Artificial Sequence
  Synthetic oligonucleotide
ttggatacttaaaacccaccagtccgaaaa

SEQ ID NO: 48015 - DNA, 30 bp, Artificial Sequence
  Synthetic oligonucleotide
ctaattggtgggctgcgatgcgcgcgaaaa

SEQ ID NO: 48016 - DNA, 30 bp, Artificial Sequence
  Synthetic oligonucleotide
ctacgccggagcgacgaaacagacggaaaa

SEQ ID NO: 48017 - DNA, 30 bp, Artificial Sequence
  Synthetic oligonucleotide
ggcaacgatcggacaggactattcggaaaa

SEQ ID NO: 48018 - DNA, 30 bp, Artificial Sequence
  Synthetic oligonucleotide
tcggtagtgcactgatggctataggtaaaa

SEQ ID NO: 48019 - DNA, 30 bp, Artificial Sequence
  Synthetic oligonucleotide
caacgggctgggggcagctcctacaacaaa

SEQ ID NO: 48020 - DNA, 30 bp, Artificial Sequence
  Synthetic oligonucleotide
atgggtacgttggcaacgagtgaacacaaa

SEQ ID NO: 48021 - DNA, 30 bp, Artificial Sequence
  Synthetic oligonucleotide
tgacattccgtaaggccaagaaaccacaaa

SEQ ID NO: 48022 - DNA, 30 bp, Artificial Sequence
  Synthetic oligonucleotide
ggggatccgttacataagagcagtcacaaa

SEQ ID NO: 48023 - DNA, 30 bp, Artificial Sequence
  Synthetic oligonucleotide
tcggacgcggtaatttaaccaacagacaaa

SEQ ID NO: 48024 - DNA, 30 bp, Artificial Sequence
  Synthetic oligonucleotide
ataactcgcatggaaacgagattgtacaaa

SEQ ID NO: 48025 - DNA, 30 bp, Artificial Sequence
  Synthetic oligonucleotide
tagcaacaccgatgactaagtataaccaaa

SEQ ID NO: 48026 - DNA, 30 bp, Artificial Sequence
  Synthetic oligonucleotide
acgcggaatgagctctttcttcacaccaaa

SEQ ID NO: 48027 - DNA, 30 bp, Artificial Sequence
  Synthetic oligonucleotide
ggtgataagataagaaatgtggttaccaaa

SEQ ID NO: 48028 - DNA, 30 bp, Artificial Sequence
  Synthetic oligonucleotide
gagattcaagtaggcgggaaccaagccaaa

SEQ ID NO: 48029 - DNA, 30 bp, Artificial Sequence
  Synthetic oligonucleotide
catgccagcgctggcatacacatctccaaa

SEQ ID NO: 48030 - DNA, 30 bp, Artificial Sequence
  Synthetic oligonucleotide
ccgtaggtactcggtataacgaggcgcaaa

SEQ ID NO: 48031 - DNA, 30 bp, Artificial Sequence
  Synthetic oligonucleotide
gaaagaaaggatggagtgaccttaggcaaa

SEQ ID NO: 48032 - DNA, 30 bp, Artificial Sequence
  Synthetic oligonucleotide
agaggaggcaagtagctgtgctatatcaaa

SEQ ID NO: 48033 - DNA, 30 bp, Artificial Sequence
  Synthetic oligonucleotide
atggccacaagaagacatgtccgactcaaa

SEQ ID NO: 48034 - DNA, 30 bp, Artificial Sequence
  Synthetic oligonucleotide
tgccgaatcgcggcagcggagtgacagaaa

SEQ ID NO: 48035 - DNA, 30 bp, Artificial Sequence
  Synthetic oligonucleotide
tggcggagtcatcgatcatggagcgagaaa

SEQ ID NO: 48036 - DNA, 30 bp, Artificial Sequence
  Synthetic oligonucleotide
ccagaacggatagaggactctaaggagaaa

SEQ ID NO: 48037 - DNA, 30 bp, Artificial Sequence
  Synthetic oligonucleotide
caggtacaggcgcgatccatataggagaaa

SEQ ID NO: 48038 - DNA, 30 bp, Artificial Sequence
  Synthetic oligonucleotide
agtggagacatacatgcttggtgctagaaa

SEQ ID NO: 48039 - DNA, 30 bp, Artificial Sequence
  Synthetic oligonucleotide
tcgaataggtatcgaaacgtttgcacgaaa

SEQ ID NO: 48040 - DNA, 30 bp, Artificial Sequence
  Synthetic oligonucleotide
ccgaacaacgattgactaaccaggccgaaa

SEQ ID NO: 48041 - DNA, 30 bp, Artificial Sequence
  Synthetic oligonucleotide
ggagaggggggtacctttgtgaacgcgaaa

SEQ ID NO: 48042 - DNA, 30 bp, Artificial Sequence
  Synthetic oligonucleotide
aataagactcaaggaagtcctaacgcgaaa

SEQ ID NO: 48043 - DNA, 30 bp, Artificial Sequence
  Synthetic oligonucleotide
aaactgggagtgaaagcaattacttcgaaa

SEQ ID NO: 48044 - DNA, 30 bp, Artificial Sequence
  Synthetic oligonucleotide
ttagaactgtgaataggaaataagaggaaa

SEQ ID NO: 48045 - DNA, 30 bp, Artificial Sequence
  Synthetic oligonucleotide
aatcgggtagacgtaggaaagagacggaaa

SEQ ID NO: 48046 - DNA, 30 bp, Artificial Sequence
  Synthetic oligonucleotide
atcggccgtgtaggtaagtctaggatgaaa

SEQ ID NO: 48047 - DNA, 30 bp, Artificial Sequence
  Synthetic oligonucleotide
gttaagaaacagaactagtatcacctgaaa

SEQ ID NO: 48048 - DNA, 30 bp, Artificial Sequence
  Synthetic oligonucleotide
cggagtagaaagggaatcgtgactgtgaaa

SEQ ID NO: 48049 - DNA, 30 bp, Artificial Sequence
  Synthetic oligonucleotide
cacgtcatagatgtcttccatgcgaataaa

SEQ ID NO: 48050 - DNA, 30 bp, Artificial Sequence
  Synthetic oligonucleotide
cataaggcggaagagatccttgcgcataaa

SEQ ID NO: 48051 - DNA, 30 bp, Artificial Sequence
  Synthetic oligonucleotide
acgacccccacgcggctaaaagcagataaa

SEQ ID NO: 48052 - DNA, 30 bp, Artificial Sequence
  Synthetic oligonucleotide
accggtaaagagacatttttatgcgataaa

SEQ ID NO: 48053 - DNA, 30 bp, Artificial Sequence
  Synthetic oligonucleotide
acctagtcataagggtttaagcgcactaaa

SEQ ID NO: 48054 - DNA, 30 bp, Artificial Sequence
  Synthetic oligonucleotide
acgatgacttattgcacaagatggactaaa

SEQ ID NO: 48055 - DNA, 30 bp, Artificial Sequence
  Synthetic oligonucleotide
acaggggcctcggactgtgttcccgctaaa

SEQ ID NO: 48056 - DNA, 30 bp, Artificial Sequence
  Synthetic oligonucleotide
ccatcacttgaggggactcatagcgctaaa

SEQ ID NO: 48057 - DNA, 30 bp, Artificial Sequence
  Synthetic oligonucleotide
tggtaacagactccgttctaaatctctaaa

SEQ ID NO: 48058 - DNA, 30 bp, Artificial Sequence
  Synthetic oligonucleotide
tatgaagacagagcccagggataaagtaaa

SEQ ID NO: 48059 - DNA, 30 bp, Artificial Sequence
  Synthetic oligonucleotide
tcccgatgggaacgggtatggcggtgtaaa

SEQ ID NO: 48060 - DNA, 30 bp, Artificial Sequence
  Synthetic oligonucleotide
tcaatgtcagagctcagagaccaaattaaa

SEQ ID NO: 48061 - DNA, 30 bp, Artificial Sequence
  Synthetic oligonucleotide
agtaaagtgaatcccaccgagatccttaaa

SEQ ID NO: 48062 - DNA, 30 bp, Artificial Sequence
  Synthetic oligonucleotide
atgagtgaacaatcgagtgccgacgttaaa

SEQ ID NO: 48063 - DNA, 30 bp, Artificial Sequence
  Synthetic oligonucleotide
acggatacgaaaagttactgttgatttaaa

SEQ ID NO: 48064 - DNA, 30 bp, Artificial Sequence
  Synthetic oligonucleotide
atacacagaatgtgactcgatggcaaacaa

SEQ ID NO: 48065 - DNA, 30 bp, Artificial Sequence
  Synthetic oligonucleotide
gtactcgaccaaggtaacggtgaggaacaa

SEQ ID NO: 48066 - DNA, 30 bp, Artificial Sequence
  Synthetic oligonucleotide
tgccccatcgagcctggtccaactgaacaa

SEQ ID NO: 48067 - DNA, 30 bp, Artificial Sequence
  Synthetic oligonucleotide
taagggaacatttaaatgcgagagtaacaa

SEQ ID NO: 48068 - DNA, 30 bp, Artificial Sequence
  Synthetic oligonucleotide
gcatggtgctcattattgaaagattaacaa

SEQ ID NO: 48069 - DNA, 30 bp, Artificial Sequence
  Synthetic oligonucleotide
gacaacccaaatacctcgtcgcgaacacaa

SEQ ID NO: 48070 - DNA, 30 bp, Artificial Sequence
  Synthetic oligonucleotide
catctggtaccaccaactactagcacacaa

SEQ ID NO: 48071 - DNA, 30 bp, Artificial Sequence
  Synthetic oligonucleotide
ggcatgagcttccgcgcagagactacacaa

SEQ ID NO: 48072 - DNA, 30 bp, Artificial Sequence
  Synthetic oligonucleotide
ctaacaccgcgagggcagcggggtacacaa

SEQ ID NO: 48073 - DNA, 30 bp, Artificial Sequence
  Synthetic oligonucleotide
gcgaaaggtggtatagtggtacaaccacaa

SEQ ID NO: 48074 - DNA, 30 bp, Artificial Sequence
  Synthetic oligonucleotide
ggaggtggaagtaatccatggtggccacaa

SEQ ID NO: 48075 - DNA, 30 bp, Artificial Sequence
  Synthetic oligonucleotide
ggcacgagatggcaattggtgagagcacaa

SEQ ID NO: 48076 - DNA, 30 bp, Artificial Sequence
  Synthetic oligonucleotide
cctggacgctatttacggagtgcatcacaa

SEQ ID NO: 48077 - DNA, 30 bp, Artificial Sequence
  Synthetic oligonucleotide
ctgggcgcgccaaacgcgcgtaggagacaa

SEQ ID NO: 48078 - DNA, 30 bp, Artificial Sequence
  Synthetic oligonucleotide
atgagcattctgtccagcagagggcgacaa

SEQ ID NO: 48079 - DNA, 30 bp, Artificial Sequence
  Synthetic oligonucleotide
agggacgagagtgacatagctgctcgacaa

SEQ ID NO: 48080 - DNA, 30 bp, Artificial Sequence
  Synthetic oligonucleotide
cgcgtgactagtaacctttcaaaaggacaa

SEQ ID NO: 48081 - DNA, 30 bp, Artificial Sequence
  Synthetic oligonucleotide
gagaggaaacagtaatcatagtgaggacaa

SEQ ID NO: 48082 - DNA, 30 bp, Artificial Sequence
  Synthetic oligonucleotide
acagaccattcaacagtgctgcactgacaa

SEQ ID NO: 48083 - DNA, 30 bp, Artificial Sequence
  Synthetic oligonucleotide
tcgccgacagaagggagcccggagatacaa

SEQ ID NO: 48084 - DNA, 30 bp, Artificial Sequence
  Synthetic oligonucleotide
cgtgatgaagacatagaggaacgtatacaa

SEQ ID NO: 48085 - DNA, 30 bp, Artificial Sequence
  Synthetic oligonucleotide
tatcgatgcggacgaccaagatgactacaa

SEQ ID NO: 48086 - DNA, 30 bp, Artificial Sequence
  Synthetic oligonucleotide
gggaagaagctacatggatggcgggtacaa

SEQ ID NO: 48087 - DNA, 30 bp, Artificial Sequence
  Synthetic oligonucleotide
agtatgtggctggctactcacgtattacaa

SEQ ID NO: 48088 - DNA, 30 bp, Artificial Sequence
  Synthetic oligonucleotide
tgcggccggaggaataacagtatccaccaa

SEQ ID NO: 48089 - DNA, 30 bp, Artificial Sequence
  Synthetic oligonucleotide
tcggaacagtgccgtgtctggcttcaccaa

SEQ ID NO: 48090 - DNA, 30 bp, Artificial Sequence
  Synthetic oligonucleotide
cctcacttccgagaacgaaatccagaccaa

SEQ ID NO: 48091 - DNA, 30 bp, Artificial Sequence
  Synthetic oligonucleotide
gcggttgcagagaaaccttcccaggaccaa

SEQ ID NO: 48092 - DNA, 30 bp, Artificial Sequence
  Synthetic oligonucleotide
gcgagatctcgccatcagtcagcgacccaa

SEQ ID NO: 48093 - DNA, 30 bp, Artificial Sequence
  Synthetic oligonucleotide
acgttccggcactacaagtgttcgtcccaa

SEQ ID NO: 48094 - DNA, 30 bp, Artificial Sequence
  Synthetic oligonucleotide
ctttagaaacagataaaggaatcgcgccaa

SEQ ID NO: 48095 - DNA, 30 bp, Artificial Sequence
  Synthetic oligonucleotide
tgacggccgccaatatccacatcctgccaa

SEQ ID NO: 48096 - DNA, 30 bp, Artificial Sequence
  Synthetic oligonucleotide
tcgtgagaggtctagaaaatttcaatccaa

SEQ ID NO: 48097 - DNA, 30 bp, Artificial Sequence
  Synthetic oligonucleotide
cctgctaggataatgcgaagcacgctccaa

SEQ ID NO: 48098 - DNA, 30 bp, Artificial Sequence
  Synthetic oligonucleotide
agatgatcctcgcgtataataggagtccaa

SEQ ID NO: 48099 - DNA, 30 bp, Artificial Sequence
  Synthetic oligonucleotide
tcgggttcaaattacactatgccgttccaa

SEQ ID NO: 48100 - DNA, 30 bp, Artificial Sequence
  Synthetic oligonucleotide
cagaaggtatcaagactatcaaagaagcaa

SEQ ID NO: 48101 - DNA, 30 bp, Artificial Sequence
  Synthetic oligonucleotide
agtagagctcgggaggtcacatcgaagcaa

SEQ ID NO: 48102 - DNA, 30 bp, Artificial Sequence
  Synthetic oligonucleotide
gcgcgcacgaggaaagccacccgtaagcaa

SEQ ID NO: 48103 - DNA, 30 bp, Artificial Sequence
  Synthetic oligonucleotide
acctagtgacaaatgcccacacagcagcaa

SEQ ID NO: 48104 - DNA, 30 bp, Artificial Sequence
  Synthetic oligonucleotide
ggagatatgtggatacttcgtgcagagcaa

SEQ ID NO: 48105 - DNA, 30 bp, Artificial Sequence
  Synthetic oligonucleotide
tacaatagaccgggcctgagaatagagcaa

SEQ ID NO: 48106 - DNA, 30 bp, Artificial Sequence
  Synthetic oligonucleotide
gaagggaatgttgaacagattataacgcaa

SEQ ID NO: 48107 - DNA, 30 bp, Artificial Sequence
  Synthetic oligonucleotide
caccggcgaggtataatatcggccacgcaa

SEQ ID NO: 48108 - DNA, 30 bp, Artificial Sequence
  Synthetic oligonucleotide
cttatccactcagggcatagagggccgcaa

SEQ ID NO: 48109 - DNA, 30 bp, Artificial Sequence
  Synthetic oligonucleotide
ataggagactggttgtagtgtgaagcgcaa

SEQ ID NO: 48110 - DNA, 30 bp, Artificial Sequence
  Synthetic oligonucleotide
agcgagacaccgtaagaaacgggtgcgcaa

SEQ ID NO: 48111 - DNA, 30 bp, Artificial Sequence
  Synthetic oligonucleotide
tagaaatacaccaatgtcatgtaatcgcaa

SEQ ID NO: 48112 - DNA, 30 bp, Artificial Sequence
  Synthetic oligonucleotide
accgttgataacaagtacttataaaggcaa

SEQ ID NO: 48113 - DNA, 30 bp, Artificial Sequence
  Synthetic oligonucleotide
cctcgccacttaacataattgggaaggcaa

SEQ ID NO: 48114 - DNA, 30 bp, Artificial Sequence
  Synthetic oligonucleotide
tacaagccaagacgggagagctaacggcaa

SEQ ID NO: 48115 - DNA, 30 bp, Artificial Sequence
  Synthetic oligonucleotide
taaacaaggaatgaaccaagtgatcggcaa

SEQ ID NO: 48116 - DNA, 30 bp, Artificial Sequence
  Synthetic oligonucleotide
aggagtagcaccaccatgacgattcggcaa

SEQ ID NO: 48117 - DNA, 30 bp, Artificial Sequence
  Synthetic oligonucleotide
ggctcgtgaccagttaatgataccgggcaa

SEQ ID NO: 48118 - DNA, 30 bp, Artificial Sequence
  Synthetic oligonucleotide
gaaggctcacggaacccgtactcactgcaa

SEQ ID NO: 48119 - DNA, 30 bp, Artificial Sequence
  Synthetic oligonucleotide
cgctcacgaggaattaacgtgaccctgcaa

SEQ ID NO: 48120 - DNA, 30 bp, Artificial Sequence
  Synthetic oligonucleotide
cacttgtgtggatattggaacatcgtgcaa

SEQ ID NO: 48121 - DNA, 30 bp, Artificial Sequence
  Synthetic oligonucleotide
cgaagttggaattgatagcacggggtgcaa

SEQ ID NO: 48122 - DNA, 30 bp, Artificial Sequence
  Synthetic oligonucleotide
agtatgtccgagtattctgagagtgtgcaa

SEQ ID NO: 48123 - DNA, 30 bp, Artificial Sequence
  Synthetic oligonucleotide
agaccccaagcacggccataagagaatcaa

SEQ ID NO: 48124 - DNA, 30 bp, Artificial Sequence
  Synthetic oligonucleotide
tcgggggataacagcgggtccatgaatcaa

SEQ ID NO: 48125 - DNA, 30 bp, Artificial Sequence
  Synthetic oligonucleotide
ccataaggcccaggggactgcaaagatcaa

SEQ ID NO: 48126 - DNA, 30 bp, Artificial Sequence
  Synthetic oligonucleotide
tcaccgaaagggtctcagcgtcgagatcaa

SEQ ID NO: 48127 - DNA, 30 bp, Artificial Sequence
  Synthetic oligonucleotide
ggctgaggtgtagtcacgcgaccaactcaa

SEQ ID NO: 48128 - DNA, 30 bp, Artificial Sequence
  Synthetic oligonucleotide
gctgccagtaacgacagtgacagacctcaa

SEQ ID NO: 48129 - DNA, 30 bp, Artificial Sequence
  Synthetic oligonucleotide
tactacccaaaacaacaaccggagcctcaa

SEQ ID NO: 48130 - DNA, 30 bp, Artificial Sequence
  Synthetic oligonucleotide
cgggagaacttaacacaaagtaggcctcaa

SEQ ID NO: 48131 - DNA, 30 bp, Artificial Sequence
  Synthetic oligonucleotide
aaacggattgcgtaaatgaaattgcctcaa

SEQ ID NO: 48132 - DNA, 30 bp, Artificial Sequence
  Synthetic oligonucleotide
ggtaaatggacggaaaatgcggaagctcaa

SEQ ID NO: 48133 - DNA, 30 bp, Artificial Sequence
  Synthetic oligonucleotide
taagggagcggtacaaagagtgtcgctcaa

SEQ ID NO: 48134 - DNA, 30 bp, Artificial Sequence
  Synthetic oligonucleotide
ggccataacgaggtcgcataggaggctcaa

SEQ ID NO: 48135 - DNA, 30 bp, Artificial Sequence
  Synthetic oligonucleotide
acctgcaatccagggagatattaggctcaa

SEQ ID NO: 48136 - DNA, 30 bp, Artificial Sequence
  Synthetic oligonucleotide
gatcgatcgggaatctcaaaggtcagtcaa

SEQ ID NO: 48137 - DNA, 30 bp, Artificial Sequence
  Synthetic oligonucleotide
tggagccgaggagtcgaaagtacccgtcaa

SEQ ID NO: 48138 - DNA, 30 bp, Artificial Sequence
  Synthetic oligonucleotide
ggagaccaggaaggggtcacgttgggtcaa

SEQ ID NO: 48139 - DNA, 30 bp, Artificial Sequence
  Synthetic oligonucleotide
cgaaacttcaaacccgtacgaaatggtcaa

SEQ ID NO: 48140 - DNA, 30 bp, Artificial Sequence
  Synthetic oligonucleotide
gaaccaacacgcgaagagaccactcttcaa

SEQ ID NO: 48141 - DNA, 30 bp, Artificial Sequence
  Synthetic oligonucleotide
gataaccccgtgtcaaactaggcagttcaa

SEQ ID NO: 48142 - DNA, 30 bp, Artificial Sequence
  Synthetic oligonucleotide
ggagcgaaagcgtgtgcgcaaccatttcaa

SEQ ID NO: 48143 - DNA, 30 bp, Artificial Sequence
  Synthetic oligonucleotide
agggtaggattctctcggatagcccaagaa

SEQ ID NO: 48144 - DNA, 30 bp, Artificial Sequence
  Synthetic oligonucleotide
gtgaaaagcaaaactctccgtgagcaagaa

SEQ ID NO: 48145 - DNA, 30 bp, Artificial Sequence
  Synthetic oligonucleotide
ggtcatgttcagtaatgataagtgcaagaa

SEQ ID NO: 48146 - DNA, 30 bp, Artificial Sequence
  Synthetic oligonucleotide
cggacttcgtagtgacagcacccggaagaa

SEQ ID NO: 48147 - DNA, 30 bp, Artificial Sequence
  Synthetic oligonucleotide
gaccgcgaaagctttgtccaacgtgaagaa

SEQ ID NO: 48148 - DNA, 30 bp, Artificial Sequence
  Synthetic oligonucleotide
aaggacaatatctaagattccccgtaagaa

SEQ ID NO: 48149 - DNA, 30 bp, Artificial Sequence
  Synthetic oligonucleotide
ccacgcgtaattgtgcgaattaggtaagaa

SEQ ID NO: 48150 - DNA, 30 bp, Artificial Sequence
  Synthetic oligonucleotide
atggacgtatttatgataatcaccacagaa

SEQ ID NO: 48151 - DNA, 30 bp, Artificial Sequence
  Synthetic oligonucleotide
acaccaaccgttctcatggaatgcacagaa

SEQ ID NO: 48152 - DNA, 30 bp, Artificial Sequence
  Synthetic oligonucleotide
acttgatgtgaggaaggtcaccacccagaa

SEQ ID NO: 48153 - DNA, 30 bp, Artificial Sequence
  Synthetic oligonucleotide
cacaagttgtcgtcgggccggagcccagaa

SEQ ID NO: 48154 - DNA, 30 bp, Artificial Sequence
  Synthetic oligonucleotide
cgtgatatcttgacgggagggtggccagaa

SEQ ID NO: 48155 - DNA, 30 bp, Artificial Sequence
  Synthetic oligonucleotide
agatgcgagggtattggtaaaatgccagaa

SEQ ID NO: 48156 - DNA, 30 bp, Artificial Sequence
  Synthetic oligonucleotide
aaaggtatcaaattgctccaagccgcagaa

SEQ ID NO: 48157 - DNA, 30 bp, Artificial Sequence
  Synthetic oligonucleotide
taacatttccggaaacggtaaatggcagaa

SEQ ID NO: 48158 - DNA, 30 bp, Artificial Sequence
  Synthetic oligonucleotide
cgaggagcgaacatgctatccggtgcagaa

SEQ ID NO: 48159 - DNA, 30 bp, Artificial Sequence
  Synthetic oligonucleotide
tgaggacttagtgcatgtaggaaatcagaa

SEQ ID NO: 48160 - DNA, 30 bp, Artificial Sequence
  Synthetic oligonucleotide
gaggtggaactgaagtagagctaatcagaa

SEQ ID NO: 48161 - DNA, 30 bp, Artificial Sequence
  Synthetic oligonucleotide
agtggggaactgcaattaaaggcaagagaa

SEQ ID NO: 48162 - DNA, 31 bp, Artificial Sequence
  Synthetic oligonucleotide
acggatgagtggggcatttgcggttagagaa

SEQ ID NO: 48163 - DNA, 30 bp, Artificial Sequence
  Synthetic oligonucleotide
ccacgggttggattgagccatggtcgagaa

SEQ ID NO: 48164 - DNA, 30 bp, Artificial Sequence
  Synthetic oligonucleotide
ttggacgtgtgtaccactagtgaaggagaa

SEQ ID NO: 48165 - DNA, 30 bp, Artificial Sequence
  Synthetic oligonucleotide
agtacccagaaggactatgtgatcggagaa

SEQ ID NO: 48166 - DNA, 30 bp, Artificial Sequence
  Synthetic oligonucleotide
cgtggaagaaggcttcgttgcccatgagaa

SEQ ID NO: 48167 - DNA, 30 bp, Artificial Sequence
  Synthetic oligonucleotide
ggcagacctaggagtctgtagcactgagaa

SEQ ID NO: 48168 - DNA, 30 bp, Artificial Sequence
  Synthetic oligonucleotide
tgaaataggtgtaacttcacgtccctagaa

SEQ ID NO: 48169 - DNA, 30 bp, Artificial Sequence
  Synthetic oligonucleotide
ccgcaaactcgtaattgagagcaggtagaa

SEQ ID NO: 48170 - DNA, 30 bp, Artificial Sequence
  Synthetic oligonucleotide
gtggacatgcgacctaagagaaccttagaa

SEQ ID NO: 48171 - DNA, 30 bp, Artificial Sequence
  Synthetic oligonucleotide
gaaccgggaccgtggatttctacgttagaa

SEQ ID NO: 48172 - DNA, 30 bp, Artificial Sequence
  Synthetic oligonucleotide
cgtaagatagccctggcacttggaaacgaa

SEQ ID NO: 48173 - DNA, 30 bp, Artificial Sequence
  Synthetic oligonucleotide
cggatacttgaacgctaagacgggaacgaa

SEQ ID NO: 48174 - DNA, 30 bp, Artificial Sequence
  Synthetic oligonucleotide
cgttagcttgtttgcgtgggccgagacgaa

SEQ ID NO: 48175 - DNA, 30 bp, Artificial Sequence
  Synthetic oligonucleotide
aggcgtaagatgacttgatacaagaccgaa

SEQ ID NO: 48176 - DNA, 30 bp, Artificial Sequence
  Synthetic oligonucleotide
tacaagcagcgaggtcggtcgagtcccgaa

SEQ ID NO: 48177 - DNA, 30 bp, Artificial Sequence
  Synthetic oligonucleotide
acgtcgagatattttagcggtaaggccgaa

SEQ ID NO: 48178 - DNA, 30 bp, Artificial Sequence
  Synthetic oligonucleotide
ttacgcacgcgacaagtggacataagcgaa

SEQ ID NO: 48179 - DNA, 30 bp, Artificial Sequence
  Synthetic oligonucleotide
cagcgggcaggtaggtaccactcgagcgaa

SEQ ID NO: 48180 - DNA, 30 bp, Artificial Sequence
  Synthetic oligonucleotide
agtcctatcctgaaaagcccatttagcgaa

SEQ ID NO: 48181 - DNA, 30 bp, Artificial Sequence
  Synthetic oligonucleotide
taagcacgagagtatgacttggaaggcgaa

SEQ ID NO: 48182 - DNA, 30 bp, Artificial Sequence
  Synthetic oligonucleotide
tggaaagagtagaagctctgagcaggcgaa

SEQ ID NO: 48183 - DNA, 30 bp, Artificial Sequence
  Synthetic oligonucleotide
cttattagacaggctaaagttgagatcgaa

SEQ ID NO: 48184 - DNA, 30 bp, Artificial Sequence
  Synthetic oligonucleotide
gtgctaagatacatctatgtaaagctcgaa

SEQ ID NO: 48185 - DNA, 30 bp, Artificial Sequence
  Synthetic oligonucleotide
aagtaaggtaagcacccagaggtcttcgaa

SEQ ID NO: 48186 - DNA, 30 bp, Artificial Sequence
  Synthetic oligonucleotide
agtctactgctgaagttggatacgttcgaa

SEQ ID NO: 48187 - DNA, 30 bp, Artificial Sequence
  Synthetic oligonucleotide
ggacgtttgcgtagaaattccataaaggaa

SEQ ID NO: 48188 - DNA, 30 bp, Artificial Sequence
  Synthetic oligonucleotide
cgggtgaggcaagatacatgccatgaggaa

SEQ ID NO: 48189 - DNA, 30 bp, Artificial Sequence
  Synthetic oligonucleotide
ggctaggtatgaaaaataggaattgaggaa

SEQ ID NO: 48190 - DNA, 30 bp, Artificial Sequence
  Synthetic oligonucleotide
cgcgcaggttgaggactttaaaagtaggaa

SEQ ID NO: 48191 - DNA, 30 bp, Artificial Sequence
  Synthetic oligonucleotide
tcttaaacgggtgtccactatgtagcggaa

SEQ ID NO: 48192 - DNA, 30 bp, Artificial Sequence
  Synthetic oligonucleotide
ctagggcgaagtctatataagaccgcggaa

SEQ ID NO: 48193 - DNA, 30 bp, Artificial Sequence
  Synthetic oligonucleotide
tcagcatgtacttaggggtgtaaatcggaa

SEQ ID NO: 48194 - DNA, 30 bp, Artificial Sequence
  Synthetic oligonucleotide
cgccagtgaatggacccccccccaagggaa

SEQ ID NO: 48195 - DNA, 30 bp, Artificial Sequence
  Synthetic oligonucleotide
cgattaggtttaaaaatagctacacgggaa

SEQ ID NO: 48196 - DNA, 30 bp, Artificial Sequence
  Synthetic oligonucleotide
gcgactttctacggaaagtgggatcgggaa

SEQ ID NO: 48197 - DNA, 30 bp, Artificial Sequence
  Synthetic oligonucleotide
ccaattcaccataaccaacatcaaatggaa

SEQ ID NO: 48198 - DNA, 30 bp, Artificial Sequence
  Synthetic oligonucleotide
gacgaatcatagaggtttcaaggtgtggaa

SEQ ID NO: 48199 - DNA, 30 bp, Artificial Sequence
  Synthetic oligonucleotide
aacgtgaggccgctccctctaatgaatgaa

SEQ ID NO: 48200 - DNA, 30 bp, Artificial Sequence
  Synthetic oligonucleotide
ccgcctcaagcatggagacagttgaatgaa

SEQ ID NO: 48201 - DNA, 30 bp, Artificial Sequence
  Synthetic oligonucleotide
cggcaagtcgaacaccatgggtttaatgaa

SEQ ID NO: 48202 - DNA, 30 bp, Artificial Sequence
  Synthetic oligonucleotide
cacagggagagtatccagcgcgcgcatgaa

SEQ ID NO: 48203 - DNA, 30 bp, Artificial Sequence
  Synthetic oligonucleotide
aagctgcccccatgatactctcagcctgaa

SEQ ID NO: 48204 - DNA, 30 bp, Artificial Sequence
  Synthetic oligonucleotide
cggtacctagggaggacaaggttcgctgaa

SEQ ID NO: 48205 - DNA, 30 bp, Artificial Sequence
  Synthetic oligonucleotide
agccaaaaaggccagttggtgagtgctgaa

SEQ ID NO: 48206 - DNA, 30 bp, Artificial Sequence
  Synthetic oligonucleotide
gggcgtccataaaacttttcgaaaagtgaa

SEQ ID NO: 48207 - DNA, 30 bp, Artificial Sequence
  Synthetic oligonucleotide
cctcctaggagagtaaagaatttaagtgaa

SEQ ID NO: 48208 - DNA, 30 bp, Artificial Sequence
  Synthetic oligonucleotide
aatgctcgaacagaaaatcaggccagtgaa

SEQ ID NO: 48209 - DNA, 30 bp, Artificial Sequence
  Synthetic oligonucleotide
agaatgagaagcaactagtacgaccgtgaa

SEQ ID NO: 48210 - DNA, 30 bp, Artificial Sequence
  Synthetic oligonucleotide
gaatggcgcgattcccagtgccagcgtgaa

SEQ ID NO: 48211 - DNA, 30 bp, Artificial Sequence
  Synthetic oligonucleotide
acgccatgataggtacgtaaccccggtgaa

SEQ ID NO: 48212 - DNA, 30 bp, Artificial Sequence
  Synthetic oligonucleotide
agcgcggcaaagatcttcatgcggtgtgaa

SEQ ID NO: 48213 - DNA, 30 bp, Artificial Sequence
  Synthetic oligonucleotide
gtcgcgaaatattttgtcaaaccacttgaa

SEQ ID NO: 48214 - DNA, 30 bp, Artificial Sequence
  Synthetic oligonucleotide
tgacgcgtgagaacggactgcctacttgaa

SEQ ID NO: 48215 - DNA, 30 bp, Artificial Sequence
  Synthetic oligonucleotide
gggcacctctccgcgataaggtaccttgaa

SEQ ID NO: 48216 - DNA, 30 bp, Artificial Sequence
  Synthetic oligonucleotide
aggatgccacttacaacttaccaccaataa

SEQ ID NO: 48217 - DNA, 30 bp, Artificial Sequence
  Synthetic oligonucleotide
tgcagaggaggaggctgaagaaagcaataa

SEQ ID NO: 48218 - DNA, 30 bp, Artificial Sequence
  Synthetic oligonucleotide
accgagattctgggcgaccatctgcaataa

SEQ ID NO: 48219 - DNA, 30 bp, Artificial Sequence
  Synthetic oligonucleotide
gaccaacattgatcagagataacgtaataa

SEQ ID NO: 48220 - DNA, 30 bp, Artificial Sequence
  Synthetic oligonucleotide
ccgtgacgggaaagaggacaccgaacataa

SEQ ID NO: 48221 - DNA, 30 bp, Artificial Sequence
  Synthetic oligonucleotide
aacacgagaccagccaactgagacgcataa

SEQ ID NO: 48222 - DNA, 30 bp, Artificial Sequence
  Synthetic oligonucleotide
gcgtctgccgggaatcgcttccagagataa

SEQ ID NO: 48223 - DNA, 30 bp, Artificial Sequence
  Synthetic oligonucleotide
accgcatacgagtaaatacactggggataa

SEQ ID NO: 48224 - DNA, 30 bp, Artificial Sequence
  Synthetic oligonucleotide
aaggaaacaataggctcagggctttgataa

SEQ ID NO: 48225 - DNA, 30 bp, Artificial Sequence
  Synthetic oligonucleotide
acactagtatcagggacggctcacgtataa

SEQ ID NO: 48226 - DNA, 30 bp, Artificial Sequence
  Synthetic oligonucleotide
gcttgaaagcaaaccagtgcatatttataa

SEQ ID NO: 48227 - DNA, 30 bp, Artificial Sequence
  Synthetic oligonucleotide
ggcgggggcgactgtatcacgaaagactaa

SEQ ID NO: 48228 - DNA, 30 bp, Artificial Sequence
  Synthetic oligonucleotide
taccaccaaggtttggaagcaggagactaa

SEQ ID NO: 48229 - DNA, 30 bp, Artificial Sequence
  Synthetic oligonucleotide
agcttggaatgatcattcaaaaacgactaa

SEQ ID NO: 48230 - DNA, 30 bp, Artificial Sequence
  Synthetic oligonucleotide
ggggggaggaccaacataacatttccctaa

SEQ ID NO: 48231 - DNA, 30 bp, Artificial Sequence
  Synthetic oligonucleotide
gaggatccagcgtaaaaaggataagcctaa

SEQ ID NO: 48232 - DNA, 30 bp, Artificial Sequence
  Synthetic oligonucleotide
tagggcgtctaagaagtgcagagctcctaa

SEQ ID NO: 48233 - DNA, 30 bp, Artificial Sequence
  Synthetic oligonucleotide
ggtatcaacgggagtagaatgtacagctaa

SEQ ID NO: 48234 - DNA, 30 bp, Artificial Sequence
  Synthetic oligonucleotide
cgtcaccaaatgagatggccgcctcgctaa

SEQ ID NO: 48235 - DNA, 30 bp, Artificial Sequence
  Synthetic oligonucleotide
agggaggacgttacattgtggggcatctaa

SEQ ID NO: 48236 - DNA, 30 bp, Artificial Sequence
  Synthetic oligonucleotide
cggctgatcggaacccaacactgtctctaa

SEQ ID NO: 48237 - DNA, 30 bp, Artificial Sequence
  Synthetic oligonucleotide
gaagctgaaatcttagtcaaaacgttctaa

SEQ ID NO: 48238 - DNA, 30 bp, Artificial Sequence
  Synthetic oligonucleotide
aaatgaaaatgtagtcaaacaataaagtaa

SEQ ID NO: 48239 - DNA, 30 bp, Artificial Sequence
  Synthetic oligonucleotide
gaaagcagagtcatttgcatttcgaagtaa

SEQ ID NO: 48240 - DNA, 30 bp, Artificial Sequence
  Synthetic oligonucleotide
catcggccaaacttggtgttcagtcagtaa

SEQ ID NO: 48241 - DNA, 30 bp, Artificial Sequence
  Synthetic oligonucleotide
ccaaaatgaaaagagatttagacgtagtaa

SEQ ID NO: 48242 - DNA, 30 bp, Artificial Sequence
  Synthetic oligonucleotide
acgtatcggttgaaagccggatcaacgtaa

SEQ ID NO: 48243 - DNA, 30 bp, Artificial Sequence
  Synthetic oligonucleotide
cgagtgtgcctcaagacatagcgtgcgtaa

SEQ ID NO: 48244 - DNA, 30 bp, Artificial Sequence
  Synthetic oligonucleotide
gcatcatacaaggctgagcgacttgcgtaa

SEQ ID NO: 48245 - DNA, 30 bp, Artificial Sequence
  Synthetic oligonucleotide
aaaggccataaacttcccgggtaacggtaa

SEQ ID NO: 48246 - DNA, 30 bp, Artificial Sequence
  Synthetic oligonucleotide
cacatggggaagttcaagatccacgggtaa

SEQ ID NO: 48247 - DNA, 30 bp, Artificial Sequence
  Synthetic oligonucleotide
aagggcgggggttaataacttttgtggtaa

SEQ ID NO: 48248 - DNA, 30 bp, Artificial Sequence
  Synthetic oligonucleotide
tctggatttcaaagattaggaagaatgtaa

SEQ ID NO: 48249 - DNA, 30 bp, Artificial Sequence
  Synthetic oligonucleotide
gtgttcacgtaaggtgcgcccctcatgtaa

SEQ ID NO: 48250 - DNA, 30 bp, Artificial Sequence
  Synthetic oligonucleotide
gtgagtgagttgagctgtagcggtatgtaa

SEQ ID NO: 48251 - DNA, 30 bp, Artificial Sequence
  Synthetic oligonucleotide
ctagacttgtacgagttgtgggcattgtaa

SEQ ID NO: 48252 - DNA, 30 bp, Artificial Sequence
  Synthetic oligonucleotide
cgacgaatttgttgtgcccggctaaattaa

SEQ ID NO: 48253 - DNA, 30 bp, Artificial Sequence
  Synthetic oligonucleotide
agagcataagactgccaatcatagcattaa

SEQ ID NO: 48254 - DNA, 30 bp, Artificial Sequence
  Synthetic oligonucleotide
gtcaaaagaacatcctaggtatccgattaa

SEQ ID NO: 48255 - DNA, 30 bp, Artificial Sequence
  Synthetic oligonucleotide
ggccgtagcaaacccttgagtgtgccttaa

SEQ ID NO: 48256 - DNA, 30 bp, Artificial Sequence
  Synthetic oligonucleotide
tgatgtcagttcgagaggggtcaaagttaa

SEQ ID NO: 48257 - DNA, 30 bp, Artificial Sequence
  Synthetic oligonucleotide
gcggagcccatgatgattgtttcaagttaa

SEQ ID NO: 48258 - DNA, 30 bp, Artificial Sequence
  Synthetic oligonucleotide
acacgaatgcgttagatgcgatccagttaa

SEQ ID NO: 48259 - DNA, 30 bp, Artificial Sequence
  Synthetic oligonucleotide
acgtaggctacgggtgggtgttctctttaa

SEQ ID NO: 48260 - DNA, 30 bp, Artificial Sequence
  Synthetic oligonucleotide
tggatagtccaggacatggaaacagtttaa

SEQ ID NO: 48261 - DNA, 30 bp, Artificial Sequence
  Synthetic oligonucleotide
gaagaacgtccgaatagcactaccttttaa

SEQ ID NO: 48262 - DNA, 30 bp, Artificial Sequence
  Synthetic oligonucleotide
cgcgattccaggccttaataccatttttaa

SEQ ID NO: 48263 - DNA, 30 bp, Artificial Sequence
  Synthetic oligonucleotide
tacggcaaaagcgacagatgcaaaaaaaca

SEQ ID NO: 48264 - DNA, 30 bp, Artificial Sequence
  Synthetic oligonucleotide
ccaggcagagaaatggccttaaagaaaaca

SEQ ID NO: 48265 - DNA, 30 bp, Artificial Sequence
  Synthetic oligonucleotide
ctggctggcaaggggtgtcagccgaaaaca

SEQ ID NO: 48266 - DNA, 30 bp, Artificial Sequence
  Synthetic oligonucleotide
taaggacggggagctggtggcaggcaaaca

SEQ ID NO: 48267 - DNA, 30 bp, Artificial Sequence
  Synthetic oligonucleotide
ggagctcacgcggtcccaaactgggaaaca

SEQ ID NO: 48268 - DNA, 30 bp, Artificial Sequence
  Synthetic oligonucleotide
ggtcccatcaaacagccgtcgaatgaaaca

SEQ ID NO: 48269 - DNA, 30 bp, Artificial Sequence
  Synthetic oligonucleotide
ggatcgaaagtgtaataattatgaacaaca

SEQ ID NO: 48270 - DNA, 30 bp, Artificial Sequence
  Synthetic oligonucleotide
accggactagggtaaggatagaccccaaca

SEQ ID NO: 48271 - DNA, 30 bp, Artificial Sequence
  Synthetic oligonucleotide
gcaagaacaacgcacgattacctcccaaca

SEQ ID NO: 48272 - DNA, 30 bp, Artificial Sequence
  Synthetic oligonucleotide
tagtggttaaaaggacatggaaacgcaaca

SEQ ID NO: 48273 - DNA, 30 bp, Artificial Sequence
  Synthetic oligonucleotide
tacgctggcaatttgagggtgagtgcaaca

SEQ ID NO: 48274 - DNA, 30 bp, Artificial Sequence
  Synthetic oligonucleotide
accgtgtactcggactaacaacttgcaaca

SEQ ID NO: 48275 - DNA, 28 bp, Artificial Sequence
  Synthetic oligonucleotide
ggtcgatagactacaaaagtggagaaca

SEQ ID NO: 48276 - DNA, 30 bp, Artificial Sequence
  Synthetic oligonucleotide
gccatggcgatatgggaatttgctcgaaca

SEQ ID NO: 48277 - DNA, 30 bp, Artificial Sequence
  Synthetic oligonucleotide
ggcacaattatacgatcaagggcaggaaca

SEQ ID NO: 48278 - DNA, 30 bp, Artificial Sequence
  Synthetic oligonucleotide
tacagaattagatacagcacagacataaca

SEQ ID NO: 48279 - DNA, 30 bp, Artificial Sequence
  Synthetic oligonucleotide
tactagcaaacaaacttgtattcgataaca

SEQ ID NO: 48280 - DNA, 30 bp, Artificial Sequence
  Synthetic oligonucleotide
ctaacctcccaacacagaacataggtaaca

SEQ ID NO: 48281 - DNA, 30 bp, Artificial Sequence
  Synthetic oligonucleotide
tgcgcggagatcgtccgaaccacgttaaca

SEQ ID NO: 48282 - DNA, 30 bp, Artificial Sequence
  Synthetic oligonucleotide
tcgcgaagatagatatcaagcgggaacaca

SEQ ID NO: 48283 - DNA, 30 bp, Artificial Sequence
  Synthetic oligonucleotide
ggaagtgaaggattactgtgccctaacaca

SEQ ID NO: 48284 - DNA, 30 bp, Artificial Sequence
  Synthetic oligonucleotide
tgggcccggtcttacataccaaaccacaca

SEQ ID NO: 48285 - DNA, 30 bp, Artificial Sequence
  Synthetic oligonucleotide
aagggtaacggttattcatgatagcacaca

SEQ ID NO: 48286 - DNA, 30 bp, Artificial Sequence
  Synthetic oligonucleotide
atgagtatccaggaagtaggtcgtgccaca

SEQ ID NO: 48287 - DNA, 30 bp, Artificial Sequence
  Synthetic oligonucleotide
tcacagaatgagtggccacattcgtccaca

SEQ ID NO: 48288 - DNA, 30 bp, Artificial Sequence
  Synthetic oligonucleotide
tcggagggcacttccgatctgtggtccaca

SEQ ID NO: 48289 - DNA, 30 bp, Artificial Sequence
  Synthetic oligonucleotide
caaacagcacggagtagaaattattccaca

SEQ ID NO: 48290 - DNA, 30 bp, Artificial Sequence
  Synthetic oligonucleotide
ttatcagggtgtgcgtatccgaggagcaca

SEQ ID NO: 48291 - DNA, 30 bp, Artificial Sequence
  Synthetic oligonucleotide
tcatcttcgaatgcataagcaatgcgcaca

SEQ ID NO: 48292 - DNA, 30 bp, Artificial Sequence
  Synthetic oligonucleotide
ccgtagataggcggtcaccaatatcgcaca

SEQ ID NO: 48293 - DNA, 30 bp, Artificial Sequence
  Synthetic oligonucleotide
agtcccgctctcgagaggaagatgggcaca

SEQ ID NO: 48294 - DNA, 30 bp, Artificial Sequence
  Synthetic oligonucleotide
gtacagtgaatgctagagggacctggcaca

SEQ ID NO: 48295 - DNA, 30 bp, Artificial Sequence
  Synthetic oligonucleotide
actcggggtaaatagacatgaccatgcaca

SEQ ID NO: 48296 - DNA, 30 bp, Artificial Sequence
  Synthetic oligonucleotide
gcggacacctaaatggacaggtgctgcaca

SEQ ID NO: 48297 - DNA, 30 bp, Artificial Sequence
  Synthetic oligonucleotide
catagtcagagcatcaaattagtgtgcaca

SEQ ID NO: 48298 - DNA, 30 bp, Artificial Sequence
  Synthetic oligonucleotide
gatagagcacaatcacagttcgcaatcaca

SEQ ID NO: 48299 - DNA, 25 bp, Artificial Sequence
  Synthetic oligonucleotide
cctatcgaaaacccccctaatcaca

SEQ ID NO: 48300 - DNA, 30 bp, Artificial Sequence
  Synthetic oligonucleotide
atcagggactagcgttacgagcacatcaca

SEQ ID NO: 48301 - DNA, 30 bp, Artificial Sequence
  Synthetic oligonucleotide
atcacggctcggcaccatgcatcagtcaca

SEQ ID NO: 48302 - DNA, 30 bp, Artificial Sequence
  Synthetic oligonucleotide
aggatctaaacggtaatagcagggttcaca

SEQ ID NO: 48303 - DNA, 30 bp, Artificial Sequence
  Synthetic oligonucleotide
taagtgaataaagcaggcattagtaagaca

SEQ ID NO: 48304 - DNA, 30 bp, Artificial Sequence
  Synthetic oligonucleotide
agagaacagtatttacgggtatccgagaca

SEQ ID NO: 48305 - DNA, 30 bp, Artificial Sequence
  Synthetic oligonucleotide
gggtcacgattaattaaagtgagcgagaca

SEQ ID NO: 48306 - DNA, 30 bp, Artificial Sequence
  Synthetic oligonucleotide
gaagtagacggggcctataaccaggagaca

SEQ ID NO: 48307 - DNA, 30 bp, Artificial Sequence
  Synthetic oligonucleotide
tgctgccggagaaagatcgatatgacgaca

SEQ ID NO: 48308 - DNA, 30 bp, Artificial Sequence
  Synthetic oligonucleotide
atgatgccatagggacactttgctacgaca

SEQ ID NO: 48309 - DNA, 30 bp, Artificial Sequence
  Synthetic oligonucleotide
gcaccaataaaccgatacgcgaaaccgaca

SEQ ID NO: 48310 - DNA, 30 bp, Artificial Sequence
  Synthetic oligonucleotide
atattcgaagtaagtagatcacgaccgaca

SEQ ID NO: 48311 - DNA, 30 bp, Artificial Sequence
  Synthetic oligonucleotide
agtgaatccgaaatcaagtattgcccgaca

SEQ ID NO: 48312 - DNA, 30 bp, Artificial Sequence
  Synthetic oligonucleotide
acgcaatcacgtgctcgaccgggtgcgaca

SEQ ID NO: 48313 - DNA, 30 bp, Artificial Sequence
  Synthetic oligonucleotide
cgttcctggaagtaaatggataataggaca

SEQ ID NO: 48314 - DNA, 30 bp, Artificial Sequence
  Synthetic oligonucleotide
ggtcgactatcaatcaaagcacataggaca

SEQ ID NO: 48315 - DNA, 30 bp, Artificial Sequence
  Synthetic oligonucleotide
aaggtgtgcattctaatatagggacggaca

SEQ ID NO: 48316 - DNA, 30 bp, Artificial Sequence
  Synthetic oligonucleotide
tcgcgtctggaagcgtcataaaaatggaca

SEQ ID NO: 48317 - DNA, 30 bp, Artificial Sequence
  Synthetic oligonucleotide
atctcgaggtagggggaagctgacatgaca

SEQ ID NO: 48318 - DNA, 30 bp, Artificial Sequence
  Synthetic oligonucleotide
taacggcattcagggagatataaagtgaca

SEQ ID NO: 48319 - DNA, 30 bp, Artificial Sequence
  Synthetic oligonucleotide
tcagggtgcgttagcagggctatagtgaca

SEQ ID NO: 48320 - DNA, 30 bp, Artificial Sequence
  Synthetic oligonucleotide
tcaactggccaaaccggcaagtatgtgaca

SEQ ID NO: 48321 - DNA, 30 bp, Artificial Sequence
  Synthetic oligonucleotide
cacaaggagcaactcggcaggggtaataca

SEQ ID NO: 48322 - DNA, 30 bp, Artificial Sequence
  Synthetic oligonucleotide
cttgaagatagcaaaccttgcaaacataca

SEQ ID NO: 48323 - DNA, 30 bp, Artificial Sequence
  Synthetic oligonucleotide
tcctacccacacatagatcatagtcataca

SEQ ID NO: 48324 - DNA, 30 bp, Artificial Sequence
  Synthetic oligonucleotide
ccgaccaaagagcacagtccgatcgataca

SEQ ID NO: 48325 - DNA, 30 bp, Artificial Sequence
  Synthetic oligonucleotide
aagcgagtactggaccagaaaatgtataca

SEQ ID NO: 48326 - DNA, 30 bp, Artificial Sequence
  Synthetic oligonucleotide
aggggtaatggtgatcggtggtgcactaca

SEQ ID NO: 48327 - DNA, 30 bp, Artificial Sequence
  Synthetic oligonucleotide
agcatacacatgcacaatgggaaaagtaca

SEQ ID NO: 48328 - DNA, 30 bp, Artificial Sequence
  Synthetic oligonucleotide
gagaaaagagtcgactaggcggcaagtaca

SEQ ID NO: 48329 - DNA, 30 bp, Artificial Sequence
  Synthetic oligonucleotide
agctaaaggtgctaatcggaacagagtaca

SEQ ID NO: 48330 - DNA, 30 bp, Artificial Sequence
  Synthetic oligonucleotide
aacgtagaaagaacacgatgaatgagtaca

SEQ ID NO: 48331 - DNA, 30 bp, Artificial Sequence
  Synthetic oligonucleotide
ggccgatagtaacagaagaagccacgtaca

SEQ ID NO: 48332 - DNA, 30 bp, Artificial Sequence
  Synthetic oligonucleotide
tacggaacctgattcactgctgctggtaca

SEQ ID NO: 48333 - DNA, 30 bp, Artificial Sequence
  Synthetic oligonucleotide
ggacgaatggaggatggtgtatactttaca

SEQ ID NO: 48334 - DNA, 30 bp, Artificial Sequence
  Synthetic oligonucleotide
gcgcaactgaacacgctatacggcacacca

SEQ ID NO: 48335 - DNA, 30 bp, Artificial Sequence
  Synthetic oligonucleotide
ggcataagttaggggacatcattcacacca

SEQ ID NO: 48336 - DNA, 30 bp, Artificial Sequence
  Synthetic oligonucleotide
ggaccgagccggccatcgcactgagcacca

SEQ ID NO: 48337 - DNA, 30 bp, Artificial Sequence
  Synthetic oligonucleotide
tgtcagctacggaaagagggcggggcacca

SEQ ID NO: 48338 - DNA, 30 bp, Artificial Sequence
  Synthetic oligonucleotide
atcgagataataacttccaacagaagacca

SEQ ID NO: 48339 - DNA, 30 bp, Artificial Sequence
  Synthetic oligonucleotide
gtcgatgggtaggctcaccgactcggacca

SEQ ID NO: 48340 - DNA, 30 bp, Artificial Sequence
  Synthetic oligonucleotide
atacaccggggatccggggcggcgtgacca

SEQ ID NO: 48341 - DNA, 30 bp, Artificial Sequence
  Synthetic oligonucleotide
tgaagccatgggatatgtgtaggcgtacca

SEQ ID NO: 48342 - DNA, 30 bp, Artificial Sequence
  Synthetic oligonucleotide
catcaatgtaggacatgcactggcgtacca

SEQ ID NO: 48343 - DNA, 30 bp, Artificial Sequence
  Synthetic oligonucleotide
atgtaaaggggccagcattaagagaaccca

SEQ ID NO: 48344 - DNA, 30 bp, Artificial Sequence
  Synthetic oligonucleotide
acaacaacatctcgcgaacatacacaccca

SEQ ID NO: 48345 - DNA, 30 bp, Artificial Sequence
  Synthetic oligonucleotide
tccaagaagccatccggtaaacccgaccca

SEQ ID NO: 48346 - DNA, 30 bp, Artificial Sequence
  Synthetic oligonucleotide
aggtgagagatattctgaggtgcctaccca

SEQ ID NO: 48347 - DNA, 30 bp, Artificial Sequence
  Synthetic oligonucleotide
accgaagcgaacctgtgcgggacttaccca

SEQ ID NO: 48348 - DNA, 30 bp, Artificial Sequence
  Synthetic oligonucleotide
taagggactacaacacgatatagaacccca

SEQ ID NO: 48349 - DNA, 30 bp, Artificial Sequence
  Synthetic oligonucleotide
tacgacgttcgcgacagctcgtacacccca

SEQ ID NO: 48350 - DNA, 30 bp, Artificial Sequence
  Synthetic oligonucleotide
caagcaaacacttcgatccaccttccccca

SEQ ID NO: 48351 - DNA, 30 bp, Artificial Sequence
  Synthetic oligonucleotide
taaggtacgtgctgtgacggaatcgcccca

SEQ ID NO: 48352 - DNA, 30 bp, Artificial Sequence
  Synthetic oligonucleotide
caggctaaaggaagtatggatgaaggccca

SEQ ID NO: 48353 - DNA, 30 bp, Artificial Sequence
  Synthetic oligonucleotide
agcaacggggtcagtgtcacacgaggccca

SEQ ID NO: 48354 - DNA, 30 bp, Artificial Sequence
  Synthetic oligonucleotide
gtagtagccatgaactgagtgagctgccca

SEQ ID NO: 48355 - DNA, 30 bp, Artificial Sequence
  Synthetic oligonucleotide
cttagaaggcacgggcgatcagatatccca

SEQ ID NO: 48356 - DNA, 30 bp, Artificial Sequence
  Synthetic oligonucleotide
agaccggtttggtacggcaaaatcctccca

SEQ ID NO: 48357 - DNA, 30 bp, Artificial Sequence
  Synthetic oligonucleotide
ttcggctagaatcaagtagtgaaggtccca

SEQ ID NO: 48358 - DNA, 30 bp, Artificial Sequence
  Synthetic oligonucleotide
tgaataacgaactagggccggtcggtccca

SEQ ID NO: 48359 - DNA, 30 bp, Artificial Sequence
  Synthetic oligonucleotide
aatggcattgatcatagctagagtgtccca

SEQ ID NO: 48360 - DNA, 30 bp, Artificial Sequence
  Synthetic oligonucleotide
tccggctcaggacgagtttcaagtaagcca

SEQ ID NO: 48361 - DNA, 30 bp, Artificial Sequence
  Synthetic oligonucleotide
ctgcaccgccatacacctatgtaacagcca

SEQ ID NO: 48362 - DNA, 30 bp, Artificial Sequence
  Synthetic oligonucleotide
gcgcgaaacatttcttctaaagtccagcca

SEQ ID NO: 48363 - DNA, 30 bp, Artificial Sequence
  Synthetic oligonucleotide
ggacaggtaaaggcaagtttctagcagcca

SEQ ID NO: 48364 - DNA, 30 bp, Artificial Sequence
  Synthetic oligonucleotide
gatcaaccacgtcagaagaggaatcagcca

SEQ ID NO: 48365 - DNA, 30 bp, Artificial Sequence
  Synthetic oligonucleotide
ggtaggagaccgtggactatgtacgagcca

SEQ ID NO: 48366 - DNA, 30 bp, Artificial Sequence
  Synthetic oligonucleotide
ctgatggatggtataagactatgtgcgcca

SEQ ID NO: 48367 - DNA, 30 bp, Artificial Sequence
  Synthetic oligonucleotide
cccgagctgttaaagggaagctaatggcca

SEQ ID NO: 48368 - DNA, 30 bp, Artificial Sequence
  Synthetic oligonucleotide
cgagggtaacgggatggatatgcttggcca

SEQ ID NO: 48369 - DNA, 30 bp, Artificial Sequence
  Synthetic oligonucleotide
ggatgcgtaagtcaagactgcagactgcca

SEQ ID NO: 48370 - DNA, 30 bp, Artificial Sequence
  Synthetic oligonucleotide
atgagagtaacatacttgggcgagctgcca

SEQ ID NO: 48371 - DNA, 30 bp, Artificial Sequence
  Synthetic oligonucleotide
gcaagctaaagaatgtcaggattagtgcca

SEQ ID NO: 48372 - DNA, 30 bp, Artificial Sequence
  Synthetic oligonucleotide
catgagagtaaggtaatatctaccgtgcca

SEQ ID NO: 48373 - DNA, 30 bp, Artificial Sequence
  Synthetic oligonucleotide
gtggtagtctgaccaccaaaagtgactcca

SEQ ID NO: 48374 - DNA, 30 bp, Artificial Sequence
  Synthetic oligonucleotide
acagtgcagagttccagtgggacccctcca

SEQ ID NO: 48375 - DNA, 30 bp, Artificial Sequence
  Synthetic oligonucleotide
acacacgaccgataactaacgtcaagtcca

SEQ ID NO: 48376 - DNA, 30 bp, Artificial Sequence
  Synthetic oligonucleotide
ggtaatagatcagccaaatgttaaggtcca

SEQ ID NO: 48377 - DNA, 30 bp, Artificial Sequence
  Synthetic oligonucleotide
cgatcgaacggtacgaaacacgtgggtcca

SEQ ID NO: 48378 - DNA, 30 bp, Artificial Sequence
  Synthetic oligonucleotide
aggggaatcaaaaaaatgaggtactttcca

SEQ ID NO: 48379 - DNA, 30 bp, Artificial Sequence
  Synthetic oligonucleotide
acgtgatggccgaagggacttgtctttcca

SEQ ID NO: 48380 - DNA, 30 bp, Artificial Sequence
  Synthetic oligonucleotide
tacgttgtattgacacgtaactgaaaagca

SEQ ID NO: 48381 - DNA, 30 bp, Artificial Sequence
  Synthetic oligonucleotide
atactgctggcagcgaacccgcaagaagca

SEQ ID NO: 48382 - DNA, 30 bp, Artificial Sequence
  Synthetic oligonucleotide
ttggagacggctcgaacataggtagaagca

SEQ ID NO: 48383 - DNA, 30 bp, Artificial Sequence
  Synthetic oligonucleotide
aacattgggaatagattacaaatggaagca

SEQ ID NO: 48384 - DNA, 30 bp, Artificial Sequence
  Synthetic oligonucleotide
ccttgccttgggagtggaataagctaagca

SEQ ID NO: 48385 - DNA, 30 bp, Artificial Sequence
  Synthetic oligonucleotide
tcgcttcgatgagcgtcccctgagtaagca

SEQ ID NO: 48386 - DNA, 30 bp, Artificial Sequence
  Synthetic oligonucleotide
aagagaggggagatcgggacgcgaacagca

SEQ ID NO: 48387 - DNA, 30 bp, Artificial Sequence
  Synthetic oligonucleotide
tcgggtaaactaactgaactaataacagca

SEQ ID NO: 48388 - DNA, 30 bp, Artificial Sequence
  Synthetic oligonucleotide
ttgcacggttacgaaagcaccctcacagca

SEQ ID NO: 48389 - DNA, 30 bp, Artificial Sequence
  Synthetic oligonucleotide
caatcaattggatgtcgggagtagccagca

SEQ ID NO: 48390 - DNA, 30 bp, Artificial Sequence
  Synthetic oligonucleotide
tcatcaatggcggtaaggtctccagcagca

SEQ ID NO: 48391 - DNA, 30 bp, Artificial Sequence
  Synthetic oligonucleotide
tactagtcgccggttaacaaagcgagagca

SEQ ID NO: 48392 - DNA, 30 bp, Artificial Sequence
  Synthetic oligonucleotide
ctagtatctggtccgcaagaagaacgagca

SEQ ID NO: 48393 - DNA, 30 bp, Artificial Sequence
  Synthetic oligonucleotide
ggcgccgcaaggacaggtggtacccgagca

SEQ ID NO: 48394 - DNA, 30 bp, Artificial Sequence
  Synthetic oligonucleotide
cctcaatcagtaggctcggtgtagggagca

SEQ ID NO: 48395 - DNA, 30 bp, Artificial Sequence
  Synthetic oligonucleotide
taaccggagcgtcagctaagttagtgagca

SEQ ID NO: 48396 - DNA, 30 bp, Artificial Sequence
  Synthetic oligonucleotide
tctacggtacgttccggacaaatgtgagca

SEQ ID NO: 48397 - DNA, 30 bp, Artificial Sequence
  Synthetic oligonucleotide
tctggaacaaatcgtatgcacctttgagca

SEQ ID NO: 48398 - DNA, 30 bp, Artificial Sequence
  Synthetic oligonucleotide
taagtgagagcgaaatctaatggcatagca

SEQ ID NO: 48399 - DNA, 30 bp, Artificial Sequence
  Synthetic oligonucleotide
acctggtcataggcagggtccccgctagca

SEQ ID NO: 48400 - DNA, 30 bp, Artificial Sequence
  Synthetic oligonucleotide
ggtcatcgaggtagggaaggtccgctagca

SEQ ID NO: 48401 - DNA, 30 bp, Artificial Sequence
  Synthetic oligonucleotide
ttgtcgggtgtgtccaaaattaaggtagca

SEQ ID NO: 48402 - DNA, 30 bp, Artificial Sequence
  Synthetic oligonucleotide
gcgtgagggatttatgtaatactcttagca

SEQ ID NO: 48403 - DNA, 30 bp, Artificial Sequence
  Synthetic oligonucleotide
cccgtcagcacatggaagacgaccaacgca

SEQ ID NO: 48404 - DNA, 30 bp, Artificial Sequence
  Synthetic oligonucleotide
tggaaaagtaaggagtgccagggcaacgca

SEQ ID NO: 48405 - DNA, 30 bp, Artificial Sequence
  Synthetic oligonucleotide
gacaacaacggattgggcatgcataacgca

SEQ ID NO: 48406 - DNA, 30 bp, Artificial Sequence
  Synthetic oligonucleotide
ccgagagtctacggacaacacgattacgca

SEQ ID NO: 48407 - DNA, 30 bp, Artificial Sequence
  Synthetic oligonucleotide
gttggatggggttacaaggcagtaagcgca

SEQ ID NO: 48408 - DNA, 30 bp, Artificial Sequence
  Synthetic oligonucleotide
aggaagagtgaggagtctcgacacagcgca

SEQ ID NO: 48409 - DNA, 30 bp, Artificial Sequence
  Synthetic oligonucleotide
acgtcaagcttgggatcctcaacacgcgca

SEQ ID NO: 48410 - DNA, 30 bp, Artificial Sequence
  Synthetic oligonucleotide
gcagataataagggatagtatgagggcgca

SEQ ID NO: 48411 - DNA, 30 bp, Artificial Sequence
  Synthetic oligonucleotide
tgagcgttcggagtacaagatgtgtgcgca

SEQ ID NO: 48412 - DNA, 30 bp, Artificial Sequence
  Synthetic oligonucleotide
acaattccaagatcaacgattgtgtgcgca

SEQ ID NO: 48413 - DNA, 30 bp, Artificial Sequence
  Synthetic oligonucleotide
taaaagcaccagttgaaacgtttgtgcgca

SEQ ID NO: 48414 - DNA, 30 bp, Artificial Sequence
  Synthetic oligonucleotide
tgcgagagagagtctcggcgttaaatcgca

SEQ ID NO: 48415 - DNA, 30 bp, Artificial Sequence
  Synthetic oligonucleotide
tctaaagcagaccatccactcagggtcgca

SEQ ID NO: 48416 - DNA, 30 bp, Artificial Sequence
  Synthetic oligonucleotide
caccagaaagagtggtttatccagttcgca

SEQ ID NO: 48417 - DNA, 30 bp, Artificial Sequence
  Synthetic oligonucleotide
gatcacggaagccatcgcaagggcaaggca

SEQ ID NO: 48418 - DNA, 30 bp, Artificial Sequence
  Synthetic oligonucleotide
tctgcgagaaacatgcatgaaatacaggca

SEQ ID NO: 48419 - DNA, 30 bp, Artificial Sequence
  Synthetic oligonucleotide
gtgttacggataacataccgagcagaggca

SEQ ID NO: 48420 - DNA, 30 bp, Artificial Sequence
  Synthetic oligonucleotide
caagtcacagggagcttataaagagaggca

SEQ ID NO: 48421 - DNA, 30 bp, Artificial Sequence
  Synthetic oligonucleotide
ccatgtcagtcaaattaaaatagagaggca

SEQ ID NO: 48422 - DNA, 30 bp, Artificial Sequence
  Synthetic oligonucleotide
agtggggatctacgtgagtgattagaggca

SEQ ID NO: 48423 - DNA, 30 bp, Artificial Sequence
  Synthetic oligonucleotide
cgatgtatacaatgttgtagcatcgaggca

SEQ ID NO: 48424 - DNA, 30 bp, Artificial Sequence
  Synthetic oligonucleotide
gcgacctttcacgagggaaaagtataggca

SEQ ID NO: 48425 - DNA, 30 bp, Artificial Sequence
  Synthetic oligonucleotide
aacgccctaacacctacacgagttacggca

SEQ ID NO: 48426 - DNA, 30 bp, Artificial Sequence
  Synthetic oligonucleotide
tacgtgtaaaggacaacagttggtccggca

SEQ ID NO: 48427 - DNA, 30 bp, Artificial Sequence
  Synthetic oligonucleotide
tcgagactaattttttgggttgaatcggca

SEQ ID NO: 48428 - DNA, 30 bp, Artificial Sequence
  Synthetic oligonucleotide
aactaaggcagaacggggccacatagggca

SEQ ID NO: 48429 - DNA, 30 bp, Artificial Sequence
  Synthetic oligonucleotide
tagcggatcacagtacagctagagcgggca

SEQ ID NO: 48430 - DNA, 30 bp, Artificial Sequence
  Synthetic oligonucleotide
ccgggacagtagcgttcctaatgtggggca

SEQ ID NO: 48431 - DNA, 30 bp, Artificial Sequence
  Synthetic oligonucleotide
caagcaaggaaagcatggaggtaatgggca

SEQ ID NO: 48432 - DNA, 30 bp, Artificial Sequence
  Synthetic oligonucleotide
gtcaagccattaaataaaaaggtgctggca

SEQ ID NO: 48433 - DNA, 30 bp, Artificial Sequence
  Synthetic oligonucleotide
atctggaacggaccgagttgcaatttggca

SEQ ID NO: 48434 - DNA, 30 bp, Artificial Sequence
  Synthetic oligonucleotide
gaaagaggtaatgcaagaaaggcaaatgca

SEQ ID NO: 48435 - DNA, 30 bp, Artificial Sequence
  Synthetic oligonucleotide
gtggagtcagacaatcactgctggaatgca

SEQ ID NO: 48436 - DNA, 30 bp, Artificial Sequence
  Synthetic oligonucleotide
ggtaaagagtgaaagggctggcggcatgca

SEQ ID NO: 48437 - DNA, 30 bp, Artificial Sequence
  Synthetic oligonucleotide
ctggtcacgataggtgaaaaccacgctgca

SEQ ID NO: 48438 - DNA, 30 bp, Artificial Sequence
  Synthetic oligonucleotide
agagagtgcaagagcaacagtgactctgca

SEQ ID NO: 48439 - DNA, 30 bp, Artificial Sequence
  Synthetic oligonucleotide
aatagaataaggactgctggaagtcgtgca

SEQ ID NO: 48440 - DNA, 30 bp, Artificial Sequence
  Synthetic oligonucleotide
gtttaggcccaacagatcgtcaaaggtgca

SEQ ID NO: 48441 - DNA, 30 bp, Artificial Sequence
  Synthetic oligonucleotide
tcttaaaacacaggtacttggatcggtgca

SEQ ID NO: 48442 - DNA, 30 bp, Artificial Sequence
  Synthetic oligonucleotide
ggcaagaaaatgtcatggataacgtgtgca

SEQ ID NO: 48443 - DNA, 30 bp, Artificial Sequence
  Synthetic oligonucleotide
gtgtctccaggaaccgaataaccgattgca

SEQ ID NO: 48444 - DNA, 30 bp, Artificial Sequence
  Synthetic oligonucleotide
gcagacttagagagaatcacgcgtgttgca

SEQ ID NO: 48445 - DNA, 30 bp, Artificial Sequence
  Synthetic oligonucleotide
atgcacagaggcgtaaaccagcagtttgca

SEQ ID NO: 48446 - DNA, 30 bp, Artificial Sequence
  Synthetic oligonucleotide
gagactgtagcgcgtacaattattaaatca

SEQ ID NO: 48447 - DNA, 30 bp, Artificial Sequence
  Synthetic oligonucleotide
taatggcacgtcagtgagccaaaagaatca

SEQ ID NO: 48448 - DNA, 30 bp, Artificial Sequence
  Synthetic oligonucleotide
aacaaggtggacatacaagcccgctaatca

SEQ ID NO: 48449 - DNA, 30 bp, Artificial Sequence
  Synthetic oligonucleotide
cacaagccagataagctggccaagccatca

SEQ ID NO: 48450 - DNA, 30 bp, Artificial Sequence
  Synthetic oligonucleotide
cacggtttgcccgaagtcacgaactcatca

SEQ ID NO: 48451 - DNA, 30 bp, Artificial Sequence
  Synthetic oligonucleotide
gcaaaccgtaaccctgcataagtaggatca

SEQ ID NO: 48452 - DNA, 30 bp, Artificial Sequence
  Synthetic oligonucleotide
ccttaaacacgaacgtagtgtacctgatca

SEQ ID NO: 48453 - DNA, 30 bp, Artificial Sequence
  Synthetic oligonucleotide
ggatgaatgcagcgggggattgagtgatca

SEQ ID NO: 48454 - DNA, 30 bp, Artificial Sequence
  Synthetic oligonucleotide
tgtggcaagatcgcagggttagggatatca

SEQ ID NO: 48455 - DNA, 30 bp, Artificial Sequence
  Synthetic oligonucleotide
cgcgatcggagaaggtaagctatagtatca

SEQ ID NO: 48456 - DNA, 30 bp, Artificial Sequence
  Synthetic oligonucleotide
gataacaggcgagcactctgagaggtatca

SEQ ID NO: 48457 - DNA, 30 bp, Artificial Sequence
  Synthetic oligonucleotide
acgagctgtgaggaggggtcacgattatca

SEQ ID NO: 48458 - DNA, 30 bp, Artificial Sequence
  Synthetic oligonucleotide
catcaagttcgacttaggcccaagttatca

SEQ ID NO: 48459 - DNA, 30 bp, Artificial Sequence
  Synthetic oligonucleotide
cgtacggtttgaaatctagtgtgccactca

SEQ ID NO: 48460 - DNA, 30 bp, Artificial Sequence
  Synthetic oligonucleotide
gggggaaaacggtgagtaggatacgactca

SEQ ID NO: 48461 - DNA, 30 bp, Artificial Sequence
  Synthetic oligonucleotide
gtcggacgacactcgaacaactaggactca

SEQ ID NO: 48462 - DNA, 30 bp, Artificial Sequence
  Synthetic oligonucleotide
cgctggtatagtaaagtaaagtgatactca

SEQ ID NO: 48463 - DNA, 30 bp, Artificial Sequence
  Synthetic oligonucleotide
gaccgggtggcaggttcataagatgcctca

SEQ ID NO: 48464 - DNA, 30 bp, Artificial Sequence
  Synthetic oligonucleotide
gatggtgcgcagggatactaatttgcctca

SEQ ID NO: 48465 - DNA, 30 bp, Artificial Sequence
  Synthetic oligonucleotide
atggaatgggatccctgtacatgatcctca

SEQ ID NO: 48466 - DNA, 30 bp, Artificial Sequence
  Synthetic oligonucleotide
gtgcacgcgtgaagcgaagtagtaagctca

SEQ ID NO: 48467 - DNA, 30 bp, Artificial Sequence
  Synthetic oligonucleotide
tggagtgacccaatcagcaacttgagctca

SEQ ID NO: 48468 - DNA, 30 bp, Artificial Sequence
  Synthetic oligonucleotide
aggcacgaaagcgaacgttgggccggctca

SEQ ID NO: 48469 - DNA, 30 bp, Artificial Sequence
  Synthetic oligonucleotide
aactgcgactgagaagtacgggatggctca

SEQ ID NO: 48470 - DNA, 30 bp, Artificial Sequence
  Synthetic oligonucleotide
acatacccgtacggctgggaaaattgctca

SEQ ID NO: 48471 - DNA, 30 bp, Artificial Sequence
  Synthetic oligonucleotide
cgaaggtgtgtcgaatgatttataatctca

SEQ ID NO: 48472 - DNA, 30 bp, Artificial Sequence
  Synthetic oligonucleotide
ggctaagcctactagccaggtgccctctca

SEQ ID NO: 48473 - DNA, 30 bp, Artificial Sequence
  Synthetic oligonucleotide
ggttgctacgaaagaagagcggtggtctca

SEQ ID NO: 48474 - DNA, 30 bp, Artificial Sequence
  Synthetic oligonucleotide
atcgaatcacacctgaatacttacaagtca

SEQ ID NO: 48475 - DNA, 30 bp, Artificial Sequence
  Synthetic oligonucleotide
tttgggacatcacgagctacaaagaagtca

SEQ ID NO: 48476 - DNA, 30 bp, Artificial Sequence
  Synthetic oligonucleotide
tatactgcaggggtactacagaggaagtca

SEQ ID NO: 48477 - DNA, 30 bp, Artificial Sequence
  Synthetic oligonucleotide
acacccgatcaatgtcatatctcacagtca

SEQ ID NO: 48478 - DNA, 30 bp, Artificial Sequence
  Synthetic oligonucleotide
gcttgaattataggttcgggaatcgagtca

SEQ ID NO: 48479 - DNA, 30 bp, Artificial Sequence
  Synthetic oligonucleotide
catgcgaggatcttcaggcctatatagtca

SEQ ID NO: 48480 - DNA, 30 bp, Artificial Sequence
  Synthetic oligonucleotide
cgatactgcggccagctttcgcgtacgtca

SEQ ID NO: 48481 - DNA, 30 bp, Artificial Sequence
  Synthetic oligonucleotide
agtaacagaaaggtgtcaagaataccgtca

SEQ ID NO: 48482 - DNA, 30 bp, Artificial Sequence
  Synthetic oligonucleotide
gacaacacggatcagtatagagtcgcgtca

SEQ ID NO: 48483 - DNA, 30 bp, Artificial Sequence
  Synthetic oligonucleotide
atgtattttatcggagaacgaggtgcgtca

SEQ ID NO: 48484 - DNA, 30 bp, Artificial Sequence
  Synthetic oligonucleotide
acacatacatatttggaaatccggtcgtca

SEQ ID NO: 48485 - DNA, 30 bp, Artificial Sequence
  Synthetic oligonucleotide
agccagttcgcacagcttggagaagggtca

SEQ ID NO: 48486 - DNA, 30 bp, Artificial Sequence
  Synthetic oligonucleotide
gctcgagaatcaaacgcgagcgtatggtca

SEQ ID NO: 48487 - DNA, 30 bp, Artificial Sequence
  Synthetic oligonucleotide
gtgggagtgtagcacagaaaaggtatgtca

SEQ ID NO: 48488 - DNA, 30 bp, Artificial Sequence
  Synthetic oligonucleotide
ttgagcaacgagtctatgcgaattaattca

SEQ ID NO: 48489 - DNA, 30 bp, Artificial Sequence
  Synthetic oligonucleotide
tattattaaacgagggactagagccattca

SEQ ID NO: 48490 - DNA, 30 bp, Artificial Sequence
  Synthetic oligonucleotide
cggctcataattaggggactatacgattca

SEQ ID NO: 48491 - DNA, 30 bp, Artificial Sequence
  Synthetic oligonucleotide
cgaaagacttagatgtcgagtaaccgttca

SEQ ID NO: 48492 - DNA, 30 bp, Artificial Sequence
  Synthetic oligonucleotide
gcgtaaggggagatcagtattgcactttca

SEQ ID NO: 48493 - DNA, 30 bp, Artificial Sequence
  Synthetic oligonucleotide
acgaagtcatcaaatataggatgtgtttca

SEQ ID NO: 48494 - DNA, 30 bp, Artificial Sequence
  Synthetic oligonucleotide
cggacaggtggttcatacgtgttcaaaaga

SEQ ID NO: 48495 - DNA, 33 bp, Artificial Sequence
  Synthetic oligonucleotide
gatactagaccaccacgtgtccatcagaaaaga

SEQ ID NO: 48496 - DNA, 30 bp, Artificial Sequence
  Synthetic oligonucleotide
cctcgactagttgccggcgggcgtaaaaga

SEQ ID NO: 48497 - DNA, 30 bp, Artificial Sequence
  Synthetic oligonucleotide
caccgtgtcgatcatggagggtgccaaaga

SEQ ID NO: 48498 - DNA, 30 bp, Artificial Sequence
  Synthetic oligonucleotide
ggcaaatacggaagaggatatatcgaaaga

SEQ ID NO: 48499 - DNA, 30 bp, Artificial Sequence
  Synthetic oligonucleotide
ttgcatagtccgtgcaaggatagggaaaga

SEQ ID NO: 48500 - DNA, 30 bp, Artificial Sequence
  Synthetic oligonucleotide
ctggccagcggcagaacagaacgttaaaga

SEQ ID NO: 48501 - DNA, 30 bp, Artificial Sequence
  Synthetic oligonucleotide
ctttgtgagtgaaagaaaagtccaacaaga

SEQ ID NO: 48502 - DNA, 30 bp, Artificial Sequence
  Synthetic oligonucleotide
tcacctcaaaccctgagccaacacacaaga

SEQ ID NO: 48503 - DNA, 30 bp, Artificial Sequence
  Synthetic oligonucleotide
cccctcaaggtgccaccaattcacacaaga

SEQ ID NO: 48504 - DNA, 30 bp, Artificial Sequence
  Synthetic oligonucleotide
gaagagtacttccccttgaaaggcacaaga

SEQ ID NO: 48505 - DNA, 30 bp, Artificial Sequence
  Synthetic oligonucleotide
ggctaactggggtaaatgctgaatacaaga

SEQ ID NO: 48506 - DNA, 30 bp, Artificial Sequence
  Synthetic oligonucleotide
gccccgcccgaacaatgagacagggcaaga

SEQ ID NO: 48507 - DNA, 30 bp, Artificial Sequence
  Synthetic oligonucleotide
acgttacgtcaggtgcataagcttagaaga

SEQ ID NO: 48508 - DNA, 30 bp, Artificial Sequence
  Synthetic oligonucleotide
tcgaatctgtccatgggcagactgcgaaga

SEQ ID NO: 48509 - DNA, 30 bp, Artificial Sequence
  Synthetic oligonucleotide
gtctgacagtgcgtacaagaacccggaaga

SEQ ID NO: 48510 - DNA, 30 bp, Artificial Sequence
  Synthetic oligonucleotide
aaacacagggcttatatcgggaagggaaga

SEQ ID NO: 48511 - DNA, 30 bp, Artificial Sequence
  Synthetic oligonucleotide
tacagataggagctcgagatgggaataaga

SEQ ID NO: 48512 - DNA, 30 bp, Artificial Sequence
  Synthetic oligonucleotide
ggcaacggtctgtggacccaaggtataaga

SEQ ID NO: 48513 - DNA, 30 bp, Artificial Sequence
  Synthetic oligonucleotide
ttgatcgaagtcaaatgggatcgggtaaga

SEQ ID NO: 48514 - DNA, 30 bp, Artificial Sequence
  Synthetic oligonucleotide
agctcgaggatctccgttaatttgaacaga

SEQ ID NO: 48515 - DNA, 30 bp, Artificial Sequence
  Synthetic oligonucleotide
tgagaagtattcgcaggaacaaagcacaga

SEQ ID NO: 48516 - DNA, 30 bp, Artificial Sequence
  Synthetic oligonucleotide
ggggaagtgacgaccctcaggctgcacaga

SEQ ID NO: 48517 - DNA, 30 bp, Artificial Sequence
  Synthetic oligonucleotide
tgcagttagctagacagtgtgcaagacaga

SEQ ID NO: 48518 - DNA, 30 bp, Artificial Sequence
  Synthetic oligonucleotide
gagctcactagtgaggtgaacggatacaga

SEQ ID NO: 48519 - DNA, 30 bp, Artificial Sequence
  Synthetic oligonucleotide
gataaaagattagaagctcgtagctacaga

SEQ ID NO: 48520 - DNA, 30 bp, Artificial Sequence
  Synthetic oligonucleotide
taacttaacagcctcaggacttgaaccaga

SEQ ID NO: 48521 - DNA, 30 bp, Artificial Sequence
  Synthetic oligonucleotide
ttcgatccgccctacacatacacacccaga

SEQ ID NO: 48522 - DNA, 30 bp, Artificial Sequence
  Synthetic oligonucleotide
taacgtgcaggaggtcatcaggcgcccaga

SEQ ID NO: 48523 - DNA, 30 bp, Artificial Sequence
  Synthetic oligonucleotide
tagatgtggaacacctagaaccgtgccaga

SEQ ID NO: 48524 - DNA, 30 bp, Artificial Sequence
  Synthetic oligonucleotide
aagatcgtcgacttgcttgattcatccaga

SEQ ID NO: 48525 - DNA, 30 bp, Artificial Sequence
  Synthetic oligonucleotide
cgcactcagcaagggtcaggaggatccaga

SEQ ID NO: 48526 - DNA, 30 bp, Artificial Sequence
  Synthetic oligonucleotide
gatcagagaagaatagggttcagctccaga

SEQ ID NO: 48527 - DNA, 30 bp, Artificial Sequence
  Synthetic oligonucleotide
ggaggaggaagttaaggaagttagtccaga

SEQ ID NO: 48528 - DNA, 30 bp, Artificial Sequence
  Synthetic oligonucleotide
ataggcaaatccttcaccccgacttccaga

SEQ ID NO: 48529 - DNA, 30 bp, Artificial Sequence
  Synthetic oligonucleotide
attacacagactcgatcttgtgtaagcaga

SEQ ID NO: 48530 - DNA, 30 bp, Artificial Sequence
  Synthetic oligonucleotide
atcgcagatccttagagcgaagggagcaga

SEQ ID NO: 48531 - DNA, 30 bp, Artificial Sequence
  Synthetic oligonucleotide
ctaaggtaggctgtgagaaaatacggcaga

SEQ ID NO: 48532 - DNA, 30 bp, Artificial Sequence
  Synthetic oligonucleotide
tgtgactggaaaagacaccaagccggcaga

SEQ ID NO: 48533 - DNA, 30 bp, Artificial Sequence
  Synthetic oligonucleotide
ccattcttaagttgaaaataggggggcaga

SEQ ID NO: 48534 - DNA, 30 bp, Artificial Sequence
  Synthetic oligonucleotide
ggtgtttaaataaagtcgcaaagtggcaga

SEQ ID NO: 48535 - DNA, 30 bp, Artificial Sequence
  Synthetic oligonucleotide
tacgccgtctattcggaaaagtgagtcaga

SEQ ID NO: 48536 - DNA, 30 bp, Artificial Sequence
  Synthetic oligonucleotide
cgaatacatagttctaggaacggcgtcaga

SEQ ID NO: 48537 - DNA, 30 bp, Artificial Sequence
  Synthetic oligonucleotide
ggacaatgcctattacggtcgaccttcaga

SEQ ID NO: 48538 - DNA, 30 bp, Artificial Sequence
  Synthetic oligonucleotide
gaggggaaaatatgcgttttgaagttcaga

SEQ ID NO: 48539 - DNA, 30 bp, Artificial Sequence
  Synthetic oligonucleotide
gcgaaaatattaattgtggaacttaagaga

SEQ ID NO: 48540 - DNA, 30 bp, Artificial Sequence
  Synthetic oligonucleotide
cgtttactaaaattaacccctggacagaga

SEQ ID NO: 48541 - DNA, 30 bp, Artificial Sequence
  Synthetic oligonucleotide
cacgcctcacgtatgaatttggcagagaga

SEQ ID NO: 48542 - DNA, 30 bp, Artificial Sequence
  Synthetic oligonucleotide
atagtcaagtgagtttcggatagggagaga

SEQ ID NO: 48543 - DNA, 31 bp, Artificial Sequence
  Synthetic oligonucleotide
caacagaacaatggtgcgggggaactagaga

SEQ ID NO: 48544 - DNA, 30 bp, Artificial Sequence
  Synthetic oligonucleotide
tgaatccgaataaataagagtttaacgaga

SEQ ID NO: 48545 - DNA, 30 bp, Artificial Sequence
  Synthetic oligonucleotide
ggctacaaggaacattcgccaatgtcgaga

SEQ ID NO: 48546 - DNA, 30 bp, Artificial Sequence
  Synthetic oligonucleotide
agcatgcgcgaggacgagtgtcattcgaga

SEQ ID NO: 48547 - DNA, 30 bp, Artificial Sequence
  Synthetic oligonucleotide
acatgacaacataaagtcttaggtcggaga

SEQ ID NO: 48548 - DNA, 30 bp, Artificial Sequence
  Synthetic oligonucleotide
tggaaagtaacgggtggaagcggggggaga

SEQ ID NO: 48549 - DNA, 30 bp, Artificial Sequence
  Synthetic oligonucleotide
cccgggaaaaagcaacctgccaccctgaga

SEQ ID NO: 48550 - DNA, 30 bp, Artificial Sequence
  Synthetic oligonucleotide
aatcgcactagtttacaattcgagaataga

SEQ ID NO: 48551 - DNA, 30 bp, Artificial Sequence
  Synthetic oligonucleotide
tgagcattaaacggaggcggacacgataga

SEQ ID NO: 48552 - DNA, 30 bp, Artificial Sequence
  Synthetic oligonucleotide
gattaaacttgctaacagtataaggataga

SEQ ID NO: 48553 - DNA, 30 bp, Artificial Sequence
  Synthetic oligonucleotide
agctcacaggttccaatgaagggaactaga

SEQ ID NO: 48554 - DNA, 30 bp, Artificial Sequence
  Synthetic oligonucleotide
ggagtccggagaaacgcaagacagactaga

SEQ ID NO: 48555 - DNA, 30 bp, Artificial Sequence
  Synthetic oligonucleotide
agattaactggcgaatctcaagtcgctaga

SEQ ID NO: 48556 - DNA, 30 bp, Artificial Sequence
  Synthetic oligonucleotide
aagaagactacgatatatcgctcacgtaga

SEQ ID NO: 48557 - DNA, 30 bp, Artificial Sequence
  Synthetic oligonucleotide
ccgaagtgtaattagacgttaggccgtaga

SEQ ID NO: 48558 - DNA, 30 bp, Artificial Sequence
  Synthetic oligonucleotide
agagggcccaaagatccgtggtgccgtaga

SEQ ID NO: 48559 - DNA, 30 bp, Artificial Sequence
  Synthetic oligonucleotide
agggctatgttgcaagggaaacgttgtaga

SEQ ID NO: 48560 - DNA, 30 bp, Artificial Sequence
  Synthetic oligonucleotide
tgcagatgtgtatgagccagcagaattaga

SEQ ID NO: 48561 - DNA, 30 bp, Artificial Sequence
  Synthetic oligonucleotide
caatgggagaaaaggaaccatgtcattaga

SEQ ID NO: 48562 - DNA, 30 bp, Artificial Sequence
  Synthetic oligonucleotide
aatgtgaaatatgcaggacaagctattaga

SEQ ID NO: 48563 - DNA, 30 bp, Artificial Sequence
  Synthetic oligonucleotide
ctgagtacctggtaatgtagactagttaga

SEQ ID NO: 48564 - DNA, 30 bp, Artificial Sequence
  Synthetic oligonucleotide
atgcgaggaaagcgctgcagggtagttaga

SEQ ID NO: 48565 - DNA, 30 bp, Artificial Sequence
  Synthetic oligonucleotide
gcgcagaattgggacagatggtgtgttaga

SEQ ID NO: 48566 - DNA, 30 bp, Artificial Sequence
  Synthetic oligonucleotide
cgacgagtttgcgagcggttctaaaaacga

SEQ ID NO: 48567 - DNA, 30 bp, Artificial Sequence
  Synthetic oligonucleotide
catcgggtacctcaaatattccacaaacga

SEQ ID NO: 48568 - DNA, 30 bp, Artificial Sequence
  Synthetic oligonucleotide
aatgcaacgggctccaaaaagggcaaacga

SEQ ID NO: 48569 - DNA, 30 bp, Artificial Sequence
  Synthetic oligonucleotide
acatgagacgcgtttggtgtggcgaaacga

SEQ ID NO: 48570 - DNA, 30 bp, Artificial Sequence
  Synthetic oligonucleotide
cagaagcgtgagtctcaaaatagtcaacga

SEQ ID NO: 48571 - DNA, 30 bp, Artificial Sequence
  Synthetic oligonucleotide
ggagcggcaaatcaaaggtggaaagaacga

SEQ ID NO: 48572 - DNA, 30 bp, Artificial Sequence
  Synthetic oligonucleotide
gggcagttagatagatcggcaccagaacga

SEQ ID NO: 48573 - DNA, 30 bp, Artificial Sequence
  Synthetic oligonucleotide
acctggagtcagacacgataaagagaacga

SEQ ID NO: 48574 - DNA, 30 bp, Artificial Sequence
  Synthetic oligonucleotide
actagcacgtgaagagacgtaccggaacga

SEQ ID NO: 48575 - DNA, 30 bp, Artificial Sequence
  Synthetic oligonucleotide
agccgacgaggtcttacgcgctcggaacga

SEQ ID NO: 48576 - DNA, 30 bp, Artificial Sequence
  Synthetic oligonucleotide
agtcgtgcgggcctacaagggcatgaacga

SEQ ID NO: 48577 - DNA, 30 bp, Artificial Sequence
  Synthetic oligonucleotide
atggaagagtgttgcccttctccataacga

SEQ ID NO: 48578 - DNA, 30 bp, Artificial Sequence
  Synthetic oligonucleotide
tgctagctacaaaataacatttcgccacga

SEQ ID NO: 48579 - DNA, 30 bp, Artificial Sequence
  Synthetic oligonucleotide
ggaggtagaaacgcgtgggtgtgggcacga

SEQ ID NO: 48580 - DNA, 30 bp, Artificial Sequence
  Synthetic oligonucleotide
gacgggataggtcgtggcgagggaagacga

SEQ ID NO: 48581 - DNA, 30 bp, Artificial Sequence
  Synthetic oligonucleotide
cgtaaaagaactatgtggacctccagacga

SEQ ID NO: 48582 - DNA, 30 bp, Artificial Sequence
  Synthetic oligonucleotide
gagaaatcacggagacgggggccgggacga

SEQ ID NO: 48583 - DNA, 30 bp, Artificial Sequence
  Synthetic oligonucleotide
gaagagtaggtggcggagtgtaggatacga

SEQ ID NO: 48584 - DNA, 30 bp, Artificial Sequence
  Synthetic oligonucleotide
tcagcggggcgactcgaaatgtgtctacga

SEQ ID NO: 48585 - DNA, 30 bp, Artificial Sequence
  Synthetic oligonucleotide
ccgggggcaaagttgcgcgaggaaacccga

SEQ ID NO: 48586 - DNA, 30 bp, Artificial Sequence
  Synthetic oligonucleotide
ggtgtgtcaccacttcagagcaaaccccga

SEQ ID NO: 48587 - DNA, 30 bp, Artificial Sequence
  Synthetic oligonucleotide
ccaaggcgggccaaagagagatggccccga

SEQ ID NO: 48588 - DNA, 30 bp, Artificial Sequence
  Synthetic oligonucleotide
gacgggagggtattgtgatcttagtcccga

SEQ ID NO: 48589 - DNA, 30 bp, Artificial Sequence
  Synthetic oligonucleotide
tgtcgggaggacatctaaagatcaagccga

SEQ ID NO: 48590 - DNA, 30 bp, Artificial Sequence
  Synthetic oligonucleotide
gcgattaatggaccgcctcacactagccga

SEQ ID NO: 48591 - DNA, 30 bp, Artificial Sequence
  Synthetic oligonucleotide
aggccgcaaacaggcttggactcgcgccga

SEQ ID NO: 48592 - DNA, 30 bp, Artificial Sequence
  Synthetic oligonucleotide
tccataagagttgaacggctgtgtcgccga

SEQ ID NO: 48593 - DNA, 30 bp, Artificial Sequence
  Synthetic oligonucleotide
atggcaaatcagctctaccgcgactgccga

SEQ ID NO: 48594 - DNA, 30 bp, Artificial Sequence
  Synthetic oligonucleotide
ttagaccgaccgacaagttcgcctatccga

SEQ ID NO: 48595 - DNA, 30 bp, Artificial Sequence
  Synthetic oligonucleotide
gacggaggatgcagttcagtgcccgtccga

SEQ ID NO: 48596 - DNA, 30 bp, Artificial Sequence
  Synthetic oligonucleotide
tagtacgtgattgaaatcttgcccgtccga

SEQ ID NO: 48597 - DNA, 30 bp, Artificial Sequence
  Synthetic oligonucleotide
tgaggggagtaagagggctagatgttccga

SEQ ID NO: 48598 - DNA, 30 bp, Artificial Sequence
  Synthetic oligonucleotide
caaaaaatgcgagacttcctcaacaagcga

SEQ ID NO: 48599 - DNA, 30 bp, Artificial Sequence
  Synthetic oligonucleotide
agtgcatgtgcgtagagtgagaagaagcga

SEQ ID NO: 48600 - DNA, 30 bp, Artificial Sequence
  Synthetic oligonucleotide
ctgctcgagtaacatcacacgtttcagcga

SEQ ID NO: 48601 - DNA, 30 bp, Artificial Sequence
  Synthetic oligonucleotide
cgtatgtatggcgggacataccgatagcga

SEQ ID NO: 48602 - DNA, 30 bp, Artificial Sequence
  Synthetic oligonucleotide
agggtcggccgtaaggtgttaactacgcga

SEQ ID NO: 48603 - DNA, 30 bp, Artificial Sequence
  Synthetic oligonucleotide
aacggatgctgaggggcggtactacggcga

SEQ ID NO: 48604 - DNA, 30 bp, Artificial Sequence
  Synthetic oligonucleotide
ccagaacgtaatagagcgtcctgggggcga

SEQ ID NO: 48605 - DNA, 30 bp, Artificial Sequence
  Synthetic oligonucleotide
cggtatgtatcggaatggtagatgtggcga

SEQ ID NO: 48606 - DNA, 30 bp, Artificial Sequence
  Synthetic oligonucleotide
gaacaatatctccacaggcgtactaatcga

SEQ ID NO: 48607 - DNA, 30 bp, Artificial Sequence
  Synthetic oligonucleotide
taggaaataatcgaacgtaaaagtaatcga

SEQ ID NO: 48608 - DNA, 30 bp, Artificial Sequence
  Synthetic oligonucleotide
aacggcgtcgcgctggcagaacggtatcga

SEQ ID NO: 48609 - DNA, 30 bp, Artificial Sequence
  Synthetic oligonucleotide
tagatgtttcagttagtaagcacaactcga

SEQ ID NO: 48610 - DNA, 30 bp, Artificial Sequence
  Synthetic oligonucleotide
cgaaagagcctattcaagtcggttcctcga

SEQ ID NO: 48611 - DNA, 30 bp, Artificial Sequence
  Synthetic oligonucleotide
atacgtggaccattacagcggatagctcga

SEQ ID NO: 48612 - DNA, 30 bp, Artificial Sequence
  Synthetic oligonucleotide
agagtgtgacaaacgtcagtctttgctcga

SEQ ID NO: 48613 - DNA, 30 bp, Artificial Sequence
  Synthetic oligonucleotide
cggagagtatactcggggcaatccagtcga

SEQ ID NO: 48614 - DNA, 30 bp, Artificial Sequence
  Synthetic oligonucleotide
agggtagatatgctctttcgtgtgagtcga

SEQ ID NO: 48615 - DNA, 30 bp, Artificial Sequence
  Synthetic oligonucleotide
ctagcagtgtgacatcccaagcatagtcga

SEQ ID NO: 48616 - DNA, 30 bp, Artificial Sequence
  Synthetic oligonucleotide
caggagagctgggtgctcaacttaattcga

SEQ ID NO: 48617 - DNA, 30 bp, Artificial Sequence
  Synthetic oligonucleotide
gtgacaagggcttgcataaggcacattcga

SEQ ID NO: 48618 - DNA, 30 bp, Artificial Sequence
  Synthetic oligonucleotide
atatacagaaggggtgggccacaaaaagga

SEQ ID NO: 48619 - DNA, 30 bp, Artificial Sequence
  Synthetic oligonucleotide
tatgatggcccccgtaaaacaacaaaagga

SEQ ID NO: 48620 - DNA, 30 bp, Artificial Sequence
  Synthetic oligonucleotide
cgcatatggcgaagtacccaggcacaagga

SEQ ID NO: 48621 - DNA, 30 bp, Artificial Sequence
  Synthetic oligonucleotide
gatcgggtgggggataaaatcggacaagga

SEQ ID NO: 48622 - DNA, 30 bp, Artificial Sequence
  Synthetic oligonucleotide
ctgatgaacgggaggcggtgagctcaagga

SEQ ID NO: 48623 - DNA, 30 bp, Artificial Sequence
  Synthetic oligonucleotide
taaaagcaattgagggagaagcaagaagga

SEQ ID NO: 48624 - DNA, 30 bp, Artificial Sequence
  Synthetic oligonucleotide
gcccagaaatgggtctcgagcggaacagga

SEQ ID NO: 48625 - DNA, 30 bp, Artificial Sequence
  Synthetic oligonucleotide
atgagtacctaactgacaggcttaacagga

SEQ ID NO: 48626 - DNA, 30 bp, Artificial Sequence
  Synthetic oligonucleotide
atgagcaaactctccgcgccggccacagga

SEQ ID NO: 48627 - DNA, 30 bp, Artificial Sequence
  Synthetic oligonucleotide
agtgggactatactaagagtaggcacagga

SEQ ID NO: 48628 - DNA, 30 bp, Artificial Sequence
  Synthetic oligonucleotide
gtggagattacttaggcaatgtgcgcagga

SEQ ID NO: 48629 - DNA, 30 bp, Artificial Sequence
  Synthetic oligonucleotide
cgaaacggccagcatcaacttatgtcagga

SEQ ID NO: 48630 - DNA, 30 bp, Artificial Sequence
  Synthetic oligonucleotide
gcataagcatacaaggccatcggttcagga

SEQ ID NO: 48631 - DNA, 30 bp, Artificial Sequence
  Synthetic oligonucleotide
gattcgacttcattgcgcaaacacagagga

SEQ ID NO: 48632 - DNA, 30 bp, Artificial Sequence
  Synthetic oligonucleotide
cgggctcgcgagggatcgcaggcacgagga

SEQ ID NO: 48633 - DNA, 30 bp, Artificial Sequence
  Synthetic oligonucleotide
ggctaatacacacgggcagttcgacgagga

SEQ ID NO: 48634 - DNA, 31 bp, Artificial Sequence
  Synthetic oligonucleotide
agttggcgtcataataggagttgggcgagga

SEQ ID NO: 48635 - DNA, 30 bp, Artificial Sequence
  Synthetic oligonucleotide
ggactataggaatttacgtggggaggagga

SEQ ID NO: 48636 - DNA, 30 bp, Artificial Sequence
  Synthetic oligonucleotide
cattatcgaataaggccaaaatatggagga

SEQ ID NO: 48637 - DNA, 30 bp, Artificial Sequence
  Synthetic oligonucleotide
acgggacgtgaggaggggaaaggcatagga

SEQ ID NO: 48638 - DNA, 30 bp, Artificial Sequence
  Synthetic oligonucleotide
acggtcagagaaacgttatgttgcgtagga

SEQ ID NO: 48639 - DNA, 30 bp, Artificial Sequence
  Synthetic oligonucleotide
agttgcactaaatacggtgatcaaaacgga

SEQ ID NO: 48640 - DNA, 30 bp, Artificial Sequence
  Synthetic oligonucleotide
tttaaggcataataatcaaggtcaaacgga

SEQ ID NO: 48641 - DNA, 30 bp, Artificial Sequence
  Synthetic oligonucleotide
cgcctgagcaggtggtgagagcgcaacgga

SEQ ID NO: 48642 - DNA, 31 bp, Artificial Sequence
  Synthetic oligonucleotide
accgaggatagcaatatcccctagagacgga

SEQ ID NO: 48643 - DNA, 30 bp, Artificial Sequence
  Synthetic oligonucleotide
acacactactaccaaaaaaatcacgacgga

SEQ ID NO: 48644 - DNA, 30 bp, Artificial Sequence
  Synthetic oligonucleotide
cacattgggttgaatatcgttagatacgga

SEQ ID NO: 48645 - DNA, 30 bp, Artificial Sequence
  Synthetic oligonucleotide
tcgaccgtgtggatcacctcaaagtacgga

SEQ ID NO: 48646 - DNA, 30 bp, Artificial Sequence
  Synthetic oligonucleotide
gctaaagactggctggaaatgttacccgga

SEQ ID NO: 48647 - DNA, 30 bp, Artificial Sequence
  Synthetic oligonucleotide
tacagtggggcagaggtgccgcaagccgga

SEQ ID NO: 48648 - DNA, 30 bp, Artificial Sequence
  Synthetic oligonucleotide
tactaaggatggatgagtccgagctccgga

SEQ ID NO: 48649 - DNA, 30 bp, Artificial Sequence
  Synthetic oligonucleotide
tatagccgtaaggcgttcaatcgtagcgga

SEQ ID NO: 48650 - DNA, 30 bp, Artificial Sequence
  Synthetic oligonucleotide
cgcattaatcaagaaaagtcgacgggcgga

SEQ ID NO: 48651 - DNA, 30 bp, Artificial Sequence
  Synthetic oligonucleotide
aggagaatgagatataaatagtactgcgga

SEQ ID NO: 48652 - DNA, 30 bp, Artificial Sequence
  Synthetic oligonucleotide
aaagaccgtggcccgctagcggaaatcgga

SEQ ID NO: 48653 - DNA, 30 bp, Artificial Sequence
  Synthetic oligonucleotide
acggagttgatgtatgcgtcgtttatcgga

SEQ ID NO: 48654 - DNA, 30 bp, Artificial Sequence
  Synthetic oligonucleotide
aggaggtcggaatgcaagttgtttatcgga

SEQ ID NO: 48655 - DNA, 30 bp, Artificial Sequence
  Synthetic oligonucleotide
atgagaaagagcaccagacaaaacctcgga

SEQ ID NO: 48656 - DNA, 30 bp, Artificial Sequence
  Synthetic oligonucleotide
ttgacatggatgcgcaagggcgccctcgga

SEQ ID NO: 48657 - DNA, 30 bp, Artificial Sequence
  Synthetic oligonucleotide
cgtcaaattgtggtgcctcgacctgtcgga

SEQ ID NO: 48658 - DNA, 30 bp, Artificial Sequence
  Synthetic oligonucleotide
ccataaaatcaatgcattgctttacaggga

SEQ ID NO: 48659 - DNA, 30 bp, Artificial Sequence
  Synthetic oligonucleotide
cacgcgggaaatagcacaagaacagaggga

SEQ ID NO: 48660 - DNA, 30 bp, Artificial Sequence
  Synthetic oligonucleotide
agctaccgcgcgtaaatgtgtcagtaggga

SEQ ID NO: 48661 - DNA, 30 bp, Artificial Sequence
  Synthetic oligonucleotide
acgtggccgatctttggagggggagcggga

SEQ ID NO: 48662 - DNA, 30 bp, Artificial Sequence
  Synthetic oligonucleotide
tggggcgccaaatgcttgactacgtcggga

SEQ ID NO: 48663 - DNA, 30 bp, Artificial Sequence
  Synthetic oligonucleotide
acaatgtaaggaccagaaagtgggtcggga

SEQ ID NO: 48664 - DNA, 30 bp, Artificial Sequence
  Synthetic oligonucleotide
gcgctactagcacagtgctaggccagggga

SEQ ID NO: 48665 - DNA, 30 bp, Artificial Sequence
  Synthetic oligonucleotide
tagcagggtcacggaaagccattgagggga

SEQ ID NO: 48666 - DNA, 30 bp, Artificial Sequence
  Synthetic oligonucleotide
gaatacgctcagtctaaacgacatagggga

SEQ ID NO: 48667 - DNA, 30 bp, Artificial Sequence
  Synthetic oligonucleotide
ttgttaccataatcgaagatgggccgggga

SEQ ID NO: 48668 - DNA, 30 bp, Artificial Sequence
  Synthetic oligonucleotide
atgcgagaggggagcggcgaacagcgggga

SEQ ID NO: 48669 - DNA, 30 bp, Artificial Sequence
  Synthetic oligonucleotide
gggcggatggtgcaaaggcagtaaggggga

SEQ ID NO: 48670 - DNA, 40 bp, Artificial Sequence
  Synthetic oligonucleotide
aagataacacattcatggtatggtcggggatcggggggga

SEQ ID NO: 48671 - DNA, 40 bp, Artificial Sequence
  Synthetic oligonucleotide
acgataatacattcatggtatggtcggggatcggggggga

SEQ ID NO: 48672 - DNA, 30 bp, Artificial Sequence
  Synthetic oligonucleotide
ctatggtaaaattaggtttagctgggggga

SEQ ID NO: 48673 - DNA, 30 bp, Artificial Sequence
  Synthetic oligonucleotide
agatatggaattagagaaacgatatgggga

SEQ ID NO: 48674 - DNA, 30 bp, Artificial Sequence
  Synthetic oligonucleotide
gctcaccgctaagtaagaaaatatatggga

SEQ ID NO: 48675 - DNA, 30 bp, Artificial Sequence
  Synthetic oligonucleotide
cggcagtctctggcgaaagctactatggga

SEQ ID NO: 48676 - DNA, 30 bp, Artificial Sequence
  Synthetic oligonucleotide
caccgaagtgattggttattggtactggga

SEQ ID NO: 48677 - DNA, 30 bp, Artificial Sequence
  Synthetic oligonucleotide
cacagtaccgaagtgtctgtcaagctggga

SEQ ID NO: 48678 - DNA, 30 bp, Artificial Sequence
  Synthetic oligonucleotide
cacgatatcgtgtgggggtgaagtctggga

SEQ ID NO: 48679 - DNA, 30 bp, Artificial Sequence
  Synthetic oligonucleotide
cgtacttcttgtaaccagagaatagtggga

SEQ ID NO: 48680 - DNA, 30 bp, Artificial Sequence
  Synthetic oligonucleotide
acttggaaatatcggaggcactggaatgga

SEQ ID NO: 48681 - DNA, 30 bp, Artificial Sequence
  Synthetic oligonucleotide
aggcgcctgatcggaaattgtatacatgga

SEQ ID NO: 48682 - DNA, 30 bp, Artificial Sequence
  Synthetic oligonucleotide
tagtctcaaagacatggggggaaggatgga

SEQ ID NO: 48683 - DNA, 30 bp, Artificial Sequence
  Synthetic oligonucleotide
agagactacgcgcccgcctcgagtgatgga

SEQ ID NO: 48684 - DNA, 30 bp, Artificial Sequence
  Synthetic oligonucleotide
tcgtccggatgtttaggaaattactatgga

SEQ ID NO: 48685 - DNA, 30 bp, Artificial Sequence
  Synthetic oligonucleotide
gtgatactagcacggggagaagtttatgga

SEQ ID NO: 48686 - DNA, 30 bp, Artificial Sequence
  Synthetic oligonucleotide
tgaccgaggacgtaaaaaacaagaactgga

SEQ ID NO: 48687 - DNA, 30 bp, Artificial Sequence
  Synthetic oligonucleotide
ataagggagcgggctagttgccctactgga

SEQ ID NO: 48688 - DNA, 30 bp, Artificial Sequence
  Synthetic oligonucleotide
ggcgcgacagcccaacacccgcagcctgga

SEQ ID NO: 48689 - DNA, 30 bp, Artificial Sequence
  Synthetic oligonucleotide
ctagggcgtactcgaatcgatcgttctgga

SEQ ID NO: 48690 - DNA, 30 bp, Artificial Sequence
  Synthetic oligonucleotide
ttggtgtacgtccaagacaaaacaggtgga

SEQ ID NO: 48691 - DNA, 30 bp, Artificial Sequence
  Synthetic oligonucleotide
ctgtacaaggccaaagtatgaatatgtgga

SEQ ID NO: 48692 - DNA, 30 bp, Artificial Sequence
  Synthetic oligonucleotide
aaacggatcacggctaatactgaaattgga

SEQ ID NO: 48693 - DNA, 30 bp, Artificial Sequence
  Synthetic oligonucleotide
agtgggggcataaataagatgacgattgga

SEQ ID NO: 48694 - DNA, 30 bp, Artificial Sequence
  Synthetic oligonucleotide
ataagattacggtaggatgacagccttgga

SEQ ID NO: 48695 - DNA, 30 bp, Artificial Sequence
  Synthetic oligonucleotide
acggagagaaatgttgataggtattttgga

SEQ ID NO: 48696 - DNA, 30 bp, Artificial Sequence
  Synthetic oligonucleotide
agtggcgcgaggcgtgaatcacaccaatga

SEQ ID NO: 48697 - DNA, 30 bp, Artificial Sequence
  Synthetic oligonucleotide
acacacaaagaacgcataggaggcgaatga

SEQ ID NO: 48698 - DNA, 30 bp, Artificial Sequence
  Synthetic oligonucleotide
ttacgaagcggaagtggtgcgaaataatga

SEQ ID NO: 48699 - DNA, 30 bp, Artificial Sequence
  Synthetic oligonucleotide
caacaactgtaatccgcataccaataatga

SEQ ID NO: 48700 - DNA, 30 bp, Artificial Sequence
  Synthetic oligonucleotide
aggaatcgtctgtagaatgattcataatga

SEQ ID NO: 48701 - DNA, 30 bp, Artificial Sequence
  Synthetic oligonucleotide
tggaatgcgagggatcaatcggcctaatga

SEQ ID NO: 48702 - DNA, 30 bp, Artificial Sequence
  Synthetic oligonucleotide
agtacaggaggaatgctcgatctctaatga

SEQ ID NO: 48703 - DNA, 30 bp, Artificial Sequence
  Synthetic oligonucleotide
ccagtggtgggcgtacgttggtacccatga

SEQ ID NO: 48704 - DNA, 30 bp, Artificial Sequence
  Synthetic oligonucleotide
gcgtaaaggattgcttccggaagatcatga

SEQ ID NO: 48705 - DNA, 30 bp, Artificial Sequence
  Synthetic oligonucleotide
aggtagccatgtgtctaatcacaaagatga

SEQ ID NO: 48706 - DNA, 30 bp, Artificial Sequence
  Synthetic oligonucleotide
tcataggaatacgacatgggaaacagatga

SEQ ID NO: 48707 - DNA, 30 bp, Artificial Sequence
  Synthetic oligonucleotide
acaccggctaaacaaagataaaccagatga

SEQ ID NO: 48708 - DNA, 30 bp, Artificial Sequence
  Synthetic oligonucleotide
gtcaacgtgcccaagtatgtaatgagatga

SEQ ID NO: 48709 - DNA, 30 bp, Artificial Sequence
  Synthetic oligonucleotide
aaggaaattaaggatccacggtgccgatga

SEQ ID NO: 48710 - DNA, 30 bp, Artificial Sequence
  Synthetic oligonucleotide
tgcaattaaatgtagtgaagggagcgatga

SEQ ID NO: 48711 - DNA, 30 bp, Artificial Sequence
  Synthetic oligonucleotide
atcgaccccttgtactggggaaaaggatga

SEQ ID NO: 48712 - DNA, 30 bp, Artificial Sequence
  Synthetic oligonucleotide
cctaaacagaaaggtatatgaataggatga

SEQ ID NO: 48713 - DNA, 29 bp, Artificial Sequence
  Synthetic oligonucleotide
acacaaccgaccattaatatcacggatga

SEQ ID NO: 48714 - DNA, 30 bp, Artificial Sequence
  Synthetic oligonucleotide
taagggagaaccataacacacgctggatga

SEQ ID NO: 48715 - DNA, 30 bp, Artificial Sequence
  Synthetic oligonucleotide
agttgcgaagaagtcaagccttcgtgatga

SEQ ID NO: 48716 - DNA, 30 bp, Artificial Sequence
  Synthetic oligonucleotide
tcagtgcggggaggctcaagtctagtatga

SEQ ID NO: 48717 - DNA, 30 bp, Artificial Sequence
  Synthetic oligonucleotide
tgacaaagacagtctgtcccctccgtatga

SEQ ID NO: 48718 - DNA, 30 bp, Artificial Sequence
  Synthetic oligonucleotide
cggccatttatgaaggtaatcgaggtatga

SEQ ID NO: 48719 - DNA, 30 bp, Artificial Sequence
  Synthetic oligonucleotide
gatgggtgagtgaacagaggtatgttatga

SEQ ID NO: 48720 - DNA, 30 bp, Artificial Sequence
  Synthetic oligonucleotide
catttacaagagggggcaagttcacactga

SEQ ID NO: 48721 - DNA, 30 bp, Artificial Sequence
  Synthetic oligonucleotide
cctgagcgcatccggagaaggtgggactga

SEQ ID NO: 48722 - DNA, 30 bp, Artificial Sequence
  Synthetic oligonucleotide
accctaaacccaaacatgagggacccctga

SEQ ID NO: 48723 - DNA, 29 bp, Artificial Sequence
  Synthetic oligonucleotide
gctaagaaacgcacgaaccactaagctga

SEQ ID NO: 48724 - DNA, 30 bp, Artificial Sequence
  Synthetic oligonucleotide
cggccgccaggcgcccgacatttaagctga

SEQ ID NO: 48725 - DNA, 30 bp, Artificial Sequence
  Synthetic oligonucleotide
cggtcaccgacactccgcaagtatagctga

SEQ ID NO: 48726 - DNA, 30 bp, Artificial Sequence
  Synthetic oligonucleotide
gcggtaaagaggcgggcaagttcacgctga

SEQ ID NO: 48727 - DNA, 30 bp, Artificial Sequence
  Synthetic oligonucleotide
gtgagtgaaggggtagacttgttgtgctga

SEQ ID NO: 48728 - DNA, 30 bp, Artificial Sequence
  Synthetic oligonucleotide
tctaggaggtgggccaggctgcgcatctga

SEQ ID NO: 48729 - DNA, 30 bp, Artificial Sequence
  Synthetic oligonucleotide
gggccggaagctgagtaagagagaaagtga

SEQ ID NO: 48730 - DNA, 30 bp, Artificial Sequence
  Synthetic oligonucleotide
aggtacatcatcacataggcaggcaagtga

SEQ ID NO: 48731 - DNA, 30 bp, Artificial Sequence
  Synthetic oligonucleotide
ggtcactgcacagtgcgatcagatcagtga

SEQ ID NO: 48732 - DNA, 30 bp, Artificial Sequence
  Synthetic oligonucleotide
catgctgaggatctcagggtgctggcgtga

SEQ ID NO: 48733 - DNA, 30 bp, Artificial Sequence
  Synthetic oligonucleotide
gccattgtaaagtcgaggttcactgcgtga

SEQ ID NO: 48734 - DNA, 30 bp, Artificial Sequence
  Synthetic oligonucleotide
aatggcgtaccttgtcgtgacccatcgtga

SEQ ID NO: 48735 - DNA, 30 bp, Artificial Sequence
  Synthetic oligonucleotide
tggtggggtgacggatactgcctgtcgtga

SEQ ID NO: 48736 - DNA, 30 bp, Artificial Sequence
  Synthetic oligonucleotide
cgtggtaggaacgtagccggggtgtcgtga

SEQ ID NO: 48737 - DNA, 30 bp, Artificial Sequence
  Synthetic oligonucleotide
caacgttatacggttagtccccgagggtga

SEQ ID NO: 48738 - DNA, 30 bp, Artificial Sequence
  Synthetic oligonucleotide
aggaatcgaatggtctagtggtgggggtga

SEQ ID NO: 48739 - DNA, 30 bp, Artificial Sequence
  Synthetic oligonucleotide
agaaatcaggttcgtcagaaggagtggtga

SEQ ID NO: 48740 - DNA, 30 bp, Artificial Sequence
  Synthetic oligonucleotide
aacgaaacaggatctatcttgaccatgtga

SEQ ID NO: 48741 - DNA, 30 bp, Artificial Sequence
  Synthetic oligonucleotide
acgtcaccacctacaaccagcctagtgtga

SEQ ID NO: 48742 - DNA, 30 bp, Artificial Sequence
  Synthetic oligonucleotide
cgtgaccccgagagcctcattttggtgtga

SEQ ID NO: 48743 - DNA, 30 bp, Artificial Sequence
  Synthetic oligonucleotide
cgtggtacaaagggtctcaagcatttgtga

SEQ ID NO: 48744 - DNA, 30 bp, Artificial Sequence
  Synthetic oligonucleotide
cggcctcgaacacggttgatagcaaattga

SEQ ID NO: 48745 - DNA, 30 bp, Artificial Sequence
  Synthetic oligonucleotide
gtaaaggaacagcgatctgggcgaaattga

SEQ ID NO: 48746 - DNA, 30 bp, Artificial Sequence
  Synthetic oligonucleotide
cgaagatgtttgcccatgaaatataattga

SEQ ID NO: 48747 - DNA, 30 bp, Artificial Sequence
  Synthetic oligonucleotide
acagaggagcgagcacttcataaacattga

SEQ ID NO: 48748 - DNA, 30 bp, Artificial Sequence
  Synthetic oligonucleotide
gaggtcgtggaagagatagtgggtcattga

SEQ ID NO: 48749 - DNA, 30 bp, Artificial Sequence
  Synthetic oligonucleotide
acacgagagcgcagtgtgcggtacacttga

SEQ ID NO: 48750 - DNA, 30 bp, Artificial Sequence
  Synthetic oligonucleotide
tagtccgacatatttaaagtgacgacttga

SEQ ID NO: 48751 - DNA, 30 bp, Artificial Sequence
  Synthetic oligonucleotide
ccgaaaactcatgagcggtacccgacttga

SEQ ID NO: 48752 - DNA, 30 bp, Artificial Sequence
  Synthetic oligonucleotide
gctacatcggagaaatctagacaagcttga

SEQ ID NO: 48753 - DNA, 30 bp, Artificial Sequence
  Synthetic oligonucleotide
aagggaaacgtactttgtctgaatagttga

SEQ ID NO: 48754 - DNA, 30 bp, Artificial Sequence
  Synthetic oligonucleotide
acaagggcgcggaaaaacaaggctttttga

SEQ ID NO: 48755 - DNA, 30 bp, Artificial Sequence
  Synthetic oligonucleotide
gaacgctacggaggaaatcacagcaaaata

SEQ ID NO: 48756 - DNA, 30 bp, Artificial Sequence
  Synthetic oligonucleotide
caaatgggaaataggggcaccccggcaata

SEQ ID NO: 48757 - DNA, 30 bp, Artificial Sequence
  Synthetic oligonucleotide
aagccttcaggcaccagcggacctcgaata

SEQ ID NO: 48758 - DNA, 30 bp, Artificial Sequence
  Synthetic oligonucleotide
gcaccgtgtggtagagtgtcctgtcgaata

SEQ ID NO: 48759 - DNA, 30 bp, Artificial Sequence
  Synthetic oligonucleotide
agcgtaagtgatctccgaacgaaactaata

SEQ ID NO: 48760 - DNA, 30 bp, Artificial Sequence
  Synthetic oligonucleotide
agcatgacacaaacactttgaacaaacata

SEQ ID NO: 48761 - DNA, 30 bp, Artificial Sequence
  Synthetic oligonucleotide
cgaaggaaactacattgatgttgaaacata

SEQ ID NO: 48762 - DNA, 30 bp, Artificial Sequence
  Synthetic oligonucleotide
ggacatgaggactgagcagccgacaacata

SEQ ID NO: 48763 - DNA, 30 bp, Artificial Sequence
  Synthetic oligonucleotide
cctagggtaaggctgataacatcatccata

SEQ ID NO: 48764 - DNA, 30 bp, Artificial Sequence
  Synthetic oligonucleotide
catgacggggcggtacaattcagtcgcata

SEQ ID NO: 48765 - DNA, 30 bp, Artificial Sequence
  Synthetic oligonucleotide
acatagtggtatgcgaagaagttcatcata

SEQ ID NO: 48766 - DNA, 30 bp, Artificial Sequence
  Synthetic oligonucleotide
cgactaaagggactagaaaggattctcata

SEQ ID NO: 48767 - DNA, 30 bp, Artificial Sequence
  Synthetic oligonucleotide
gagaatcgcaacggatgaaaggaaaagata

SEQ ID NO: 48768 - DNA, 30 bp, Artificial Sequence
  Synthetic oligonucleotide
gcggggggttgcggtggtccattaaagata

SEQ ID NO: 48769 - DNA, 30 bp, Artificial Sequence
  Synthetic oligonucleotide
atgctattgagtgggaggctgcgccagata

SEQ ID NO: 48770 - DNA, 30 bp, Artificial Sequence
  Synthetic oligonucleotide
tggtatgcgagacaagtcgttgtccagata

SEQ ID NO: 48771 - DNA, 30 bp, Artificial Sequence
  Synthetic oligonucleotide
gaggtggtatgttcaaagaatcggcagata

SEQ ID NO: 48772 - DNA, 30 bp, Artificial Sequence
  Synthetic oligonucleotide
acgtagcttggggcttacagtattgagata

SEQ ID NO: 48773 - DNA, 30 bp, Artificial Sequence
  Synthetic oligonucleotide
agctgtgcatgagatcaaaaacttgagata

SEQ ID NO: 48774 - DNA, 30 bp, Artificial Sequence
  Synthetic oligonucleotide
aggacaaacagggataggtcactcgcgata

SEQ ID NO: 48775 - DNA, 30 bp, Artificial Sequence
  Synthetic oligonucleotide
accgagactatattatcggtgctcaggata

SEQ ID NO: 48776 - DNA, 30 bp, Artificial Sequence
  Synthetic oligonucleotide
tgcgggaaaacacagagtcctacacggata

SEQ ID NO: 48777 - DNA, 30 bp, Artificial Sequence
  Synthetic oligonucleotide
ccgtgaggtcttcagagaggatcggggata

SEQ ID NO: 48778 - DNA, 30 bp, Artificial Sequence
  Synthetic oligonucleotide
gcggtccagatcaaagtaagagtaatgata

SEQ ID NO: 48779 - DNA, 30 bp, Artificial Sequence
  Synthetic oligonucleotide
cccatgccacagatggccgagcacatgata

SEQ ID NO: 48780 - DNA, 30 bp, Artificial Sequence
  Synthetic oligonucleotide
tacacgaaagaacacgtacacttcatgata

SEQ ID NO: 48781 - DNA, 30 bp, Artificial Sequence
  Synthetic oligonucleotide
gttaagccggatagaatagttcgagtgata

SEQ ID NO: 48782 - DNA, 30 bp, Artificial Sequence
  Synthetic oligonucleotide
ggataacagaagacaatattaggggtgata

SEQ ID NO: 48783 - DNA, 30 bp, Artificial Sequence
  Synthetic oligonucleotide
aaaaaagagactgtagagaatgatgtgata

SEQ ID NO: 48784 - DNA, 30 bp, Artificial Sequence
  Synthetic oligonucleotide
cgcgataaaaatagccatgacatcttgata

SEQ ID NO: 48785 - DNA, 30 bp, Artificial Sequence
  Synthetic oligonucleotide
gctaaccacgtcacaaaatcgatgcatata

SEQ ID NO: 48786 - DNA, 30 bp, Artificial Sequence
  Synthetic oligonucleotide
agcacggggctggcattaggtgaatatata

SEQ ID NO: 48787 - DNA, 30 bp, Artificial Sequence
  Synthetic oligonucleotide
ttgcgcaacaaaagggagagcacgcctata

SEQ ID NO: 48788 - DNA, 30 bp, Artificial Sequence
  Synthetic oligonucleotide
ttgacgtacgaggtgcaagtgaaggctata

SEQ ID NO: 48789 - DNA, 30 bp, Artificial Sequence
  Synthetic oligonucleotide
cgtcacaaacctagaaaagaaaccagtata

SEQ ID NO: 48790 - DNA, 30 bp, Artificial Sequence
  Synthetic oligonucleotide
aaaggcctgtcggtgacatgcatacgtata

SEQ ID NO: 48791 - DNA, 30 bp, Artificial Sequence
  Synthetic oligonucleotide
gaagggtcgagtcaacgttgggcaattata

SEQ ID NO: 48792 - DNA, 30 bp, Artificial Sequence
  Synthetic oligonucleotide
catacataagagaggcgagatatcgttata

SEQ ID NO: 48793 - DNA, 30 bp, Artificial Sequence
  Synthetic oligonucleotide
aacggcaactaaacagcataggaggttata

SEQ ID NO: 48794 - DNA, 30 bp, Artificial Sequence
  Synthetic oligonucleotide
acgcagtgcagggacggctcaccatttata

SEQ ID NO: 48795 - DNA, 30 bp, Artificial Sequence
  Synthetic oligonucleotide
gtactcttaataggagggcggaccaaacta

SEQ ID NO: 48796 - DNA, 30 bp, Artificial Sequence
  Synthetic oligonucleotide
tatggaacagaccgttattcttagcaacta

SEQ ID NO: 48797 - DNA, 30 bp, Artificial Sequence
  Synthetic oligonucleotide
ccagcctgactatttgagtaaaccacacta

SEQ ID NO: 48798 - DNA, 30 bp, Artificial Sequence
  Synthetic oligonucleotide
ctcaaaaggggcgctaactgacaaagacta

SEQ ID NO: 48799 - DNA, 30 bp, Artificial Sequence
  Synthetic oligonucleotide
accaagctaaaagaataaagaactcgacta

SEQ ID NO: 48800 - DNA, 30 bp, Artificial Sequence
  Synthetic oligonucleotide
ggagtacgaccatagaaacatgaaggacta

SEQ ID NO: 48801 - DNA, 30 bp, Artificial Sequence
  Synthetic oligonucleotide
cggttcgtctggagtgagtgaagatgacta

SEQ ID NO: 48802 - DNA, 30 bp, Artificial Sequence
  Synthetic oligonucleotide
tagtgagacgcgtaaataaggaactgacta

SEQ ID NO: 48803 - DNA, 30 bp, Artificial Sequence
  Synthetic oligonucleotide
gcgaatcgtccagaaaaagaagtaatacta

SEQ ID NO: 48804 - DNA, 30 bp, Artificial Sequence
  Synthetic oligonucleotide
tcaatgataaaagggctagtaacgatacta

SEQ ID NO: 48805 - DNA, 30 bp, Artificial Sequence
  Synthetic oligonucleotide
cctcagagtgtaattgttcggttcaaccta

SEQ ID NO: 48806 - DNA, 30 bp, Artificial Sequence
  Synthetic oligonucleotide
agcgcagagactcccaggcagcctgaccta

SEQ ID NO: 48807 - DNA, 30 bp, Artificial Sequence
  Synthetic oligonucleotide
aatggaggtggtgaacgtacataatcccta

SEQ ID NO: 48808 - DNA, 30 bp, Artificial Sequence
  Synthetic oligonucleotide
cgctgggaggcaagaaaagttggatcccta

SEQ ID NO: 48809 - DNA, 30 bp, Artificial Sequence
  Synthetic oligonucleotide
gggaggtttacatcctcgtgaccgggccta

SEQ ID NO: 48810 - DNA, 30 bp, Artificial Sequence
  Synthetic oligonucleotide
acgtgcaggctggtacagtcagagcagcta

SEQ ID NO: 48811 - DNA, 30 bp, Artificial Sequence
  Synthetic oligonucleotide
aagagcagggtacaaggcttacgggagcta

SEQ ID NO: 48812 - DNA, 30 bp, Artificial Sequence
  Synthetic oligonucleotide
agggcggggtttctaaagtcgagtgagcta

SEQ ID NO: 48813 - DNA, 30 bp, Artificial Sequence
  Synthetic oligonucleotide
caatggcagcggtaactaagtcgcacgcta

SEQ ID NO: 48814 - DNA, 30 bp, Artificial Sequence
  Synthetic oligonucleotide
ggggaggagcctcgactagagacaccgcta

SEQ ID NO: 48815 - DNA, 30 bp, Artificial Sequence
  Synthetic oligonucleotide
tggctcagtgtgcgcaagggggagccgcta

SEQ ID NO: 48816 - DNA, 30 bp, Artificial Sequence
  Synthetic oligonucleotide
ataacgatcacctacattaccatcgcgcta

SEQ ID NO: 48817 - DNA, 30 bp, Artificial Sequence
  Synthetic oligonucleotide
agacagagtagtatcaaggggattgcgcta

SEQ ID NO: 48818 - DNA, 31 bp, Artificial Sequence
  Synthetic oligonucleotide
agagagtaggacgatattacgcaagtcgcta

SEQ ID NO: 48819 - DNA, 30 bp, Artificial Sequence
  Synthetic oligonucleotide
tgagcgggggtggggaggcaattgtcgcta

SEQ ID NO: 48820 - DNA, 30 bp, Artificial Sequence
  Synthetic oligonucleotide
tcgttcaccaatacggaaggatcaaggcta

SEQ ID NO: 48821 - DNA, 30 bp, Artificial Sequence
  Synthetic oligonucleotide
acagtgagaacgaataattattgcaggcta

SEQ ID NO: 48822 - DNA, 30 bp, Artificial Sequence
  Synthetic oligonucleotide
cgtctcaaacttattatcactgtagggcta

SEQ ID NO: 48823 - DNA, 30 bp, Artificial Sequence
  Synthetic oligonucleotide
tgcatcagacacaaatcgatcaaatggcta

SEQ ID NO: 48824 - DNA, 30 bp, Artificial Sequence
  Synthetic oligonucleotide
gtgggagtaacctacgagacagtcatgcta

SEQ ID NO: 48825 - DNA, 30 bp, Artificial Sequence
  Synthetic oligonucleotide
gtactaacagaggaccggtacaggctgcta

SEQ ID NO: 48826 - DNA, 30 bp, Artificial Sequence
  Synthetic oligonucleotide
cacatggcagagtgcgatttatatgtgcta

SEQ ID NO: 48827 - DNA, 30 bp, Artificial Sequence
  Synthetic oligonucleotide
agcgggacttcaatatgtgtgaccttgcta

SEQ ID NO: 48828 - DNA, 30 bp, Artificial Sequence
  Synthetic oligonucleotide
tcggagactgcgaggcacaggtatttgcta

SEQ ID NO: 48829 - DNA, 30 bp, Artificial Sequence
  Synthetic oligonucleotide
ggcccatcggagaggaacgtactaaatcta

SEQ ID NO: 48830 - DNA, 30 bp, Artificial Sequence
  Synthetic oligonucleotide
aggataagactggacaaaagggataatcta

SEQ ID NO: 48831 - DNA, 30 bp, Artificial Sequence
  Synthetic oligonucleotide
acattagagtaacagtcacatagcgctcta

SEQ ID NO: 48832 - DNA, 30 bp, Artificial Sequence
  Synthetic oligonucleotide
ggtcggtagatgaaaaaacttgcgcgtcta

SEQ ID NO: 48833 - DNA, 30 bp, Artificial Sequence
  Synthetic oligonucleotide
gggtaccccaggactagttccaatcgtcta

SEQ ID NO: 48834 - DNA, 30 bp, Artificial Sequence
  Synthetic oligonucleotide
gccatgtacagtgaacagatagagggtcta

SEQ ID NO: 48835 - DNA, 30 bp, Artificial Sequence
  Synthetic oligonucleotide
cgaagaataagctcacctcgcatctgtcta

SEQ ID NO: 48836 - DNA, 30 bp, Artificial Sequence
  Synthetic oligonucleotide
aggacataactcgctagtacagcatttcta

SEQ ID NO: 48837 - DNA, 30 bp, Artificial Sequence
  Synthetic oligonucleotide
ctacagttgtaaagaaggatagtaaaagta

SEQ ID NO: 48838 - DNA, 31 bp, Artificial Sequence
  Synthetic oligonucleotide
cctgcaggaatagcacaagagcctcaaagta

SEQ ID NO: 48839 - DNA, 30 bp, Artificial Sequence
  Synthetic oligonucleotide
ggtgtagaggttattattcgaaaacaagta

SEQ ID NO: 48840 - DNA, 30 bp, Artificial Sequence
  Synthetic oligonucleotide
cgcacccacccggtaatgacatcacaagta

SEQ ID NO: 48841 - DNA, 30 bp, Artificial Sequence
  Synthetic oligonucleotide
tggtccgccatgggatacaactattaagta

SEQ ID NO: 48842 - DNA, 30 bp, Artificial Sequence
  Synthetic oligonucleotide
acagggcttcggagtcgggtcccaagagta

SEQ ID NO: 48843 - DNA, 30 bp, Artificial Sequence
  Synthetic oligonucleotide
ggtgaaggtctcatgggtggattacgagta

SEQ ID NO: 48844 - DNA, 30 bp, Artificial Sequence
  Synthetic oligonucleotide
aacgccgacgtccgtcaaacatatcgagta

SEQ ID NO: 48845 - DNA, 30 bp, Artificial Sequence
  Synthetic oligonucleotide
gtcttgaaagttgtccagggaccatgagta

SEQ ID NO: 48846 - DNA, 30 bp, Artificial Sequence
  Synthetic oligonucleotide
aaggaggggtcatacctggaacgttgagta

SEQ ID NO: 48847 - DNA, 30 bp, Artificial Sequence
  Synthetic oligonucleotide
acgagggagtcttcgatatacaagatagta

SEQ ID NO: 48848 - DNA, 30 bp, Artificial Sequence
  Synthetic oligonucleotide
ccaaaaagagggccgcgctctttgcacgta

SEQ ID NO: 48849 - DNA, 30 bp, Artificial Sequence
  Synthetic oligonucleotide
cgggctccacacagagtatcgtatcacgta

SEQ ID NO: 48850 - DNA, 30 bp, Artificial Sequence
  Synthetic oligonucleotide
aggaagaaacatacatcagtgtgtcacgta

SEQ ID NO: 48851 - DNA, 30 bp, Artificial Sequence
  Synthetic oligonucleotide
tgggtaacgccgggacagggtgacgacgta

SEQ ID NO: 48852 - DNA, 30 bp, Artificial Sequence
  Synthetic oligonucleotide
tcaacagctggagactagggagccgacgta

SEQ ID NO: 48853 - DNA, 30 bp, Artificial Sequence
  Synthetic oligonucleotide
aacatcgacaaacatcatagatctgacgta

SEQ ID NO: 48854 - DNA, 30 bp, Artificial Sequence
  Synthetic oligonucleotide
tgggtggtgacctagacatagggggccgta

SEQ ID NO: 48855 - DNA, 30 bp, Artificial Sequence
  Synthetic oligonucleotide
ggggagcctacccagtaacactgtgccgta

SEQ ID NO: 48856 - DNA, 30 bp, Artificial Sequence
  Synthetic oligonucleotide
gccggggaggaagggtgggaagaatccgta

SEQ ID NO: 48857 - DNA, 30 bp, Artificial Sequence
  Synthetic oligonucleotide
aggaatcggtgtgtggccagcgaatccgta

SEQ ID NO: 48858 - DNA, 30 bp, Artificial Sequence
  Synthetic oligonucleotide
tgggttatcggaaaacactccgcctccgta

SEQ ID NO: 48859 - DNA, 29 bp, Artificial Sequence
  Synthetic oligonucleotide
gcgggaaatgataagatacagtcagcgta

SEQ ID NO: 48860 - DNA, 30 bp, Artificial Sequence
  Synthetic oligonucleotide
tgaaggcggggctgaatacagaagcgcgta

SEQ ID NO: 48861 - DNA, 30 bp, Artificial Sequence
  Synthetic oligonucleotide
ctcatagtgacaaagagatttcggcgcgta

SEQ ID NO: 48862 - DNA, 30 bp, Artificial Sequence
  Synthetic oligonucleotide
tagggaactagtgctaaccttcagctcgta

SEQ ID NO: 48863 - DNA, 30 bp, Artificial Sequence
  Synthetic oligonucleotide
ggacaaacctgactcggaaactcgctcgta

SEQ ID NO: 48864 - DNA, 30 bp, Artificial Sequence
  Synthetic oligonucleotide
acataagtaactagaacgctataattcgta

SEQ ID NO: 48865 - DNA, 30 bp, Artificial Sequence
  Synthetic oligonucleotide
cccgatagggatagagaaaagatgttcgta

SEQ ID NO: 48866 - DNA, 30 bp, Artificial Sequence
  Synthetic oligonucleotide
tcggaaatatttcaggttaaccataaggta

SEQ ID NO: 48867 - DNA, 31 bp, Artificial Sequence
  Synthetic oligonucleotide
ctcgtaaacgccgacatcgctcggtaaggta

SEQ ID NO: 48868 - DNA, 30 bp, Artificial Sequence
  Synthetic oligonucleotide
ggacatcaaacaaggtggatatcgacggta

SEQ ID NO: 48869 - DNA, 30 bp, Artificial Sequence
  Synthetic oligonucleotide
acgggagatgtcgagggtgaggttacggta

SEQ ID NO: 48870 - DNA, 30 bp, Artificial Sequence
  Synthetic oligonucleotide
tttgcgtggtaacgtgaaagggatgcggta

SEQ ID NO: 48871 - DNA, 30 bp, Artificial Sequence
  Synthetic oligonucleotide
agcccgactgaacccgatactctcatggta

SEQ ID NO: 48872 - DNA, 30 bp, Artificial Sequence
  Synthetic oligonucleotide
cgaaagtgcttagcgcccgccaggatggta

SEQ ID NO: 48873 - DNA, 30 bp, Artificial Sequence
  Synthetic oligonucleotide
cctaagccatcacatgtatccggagtggta

SEQ ID NO: 48874 - DNA, 30 bp, Artificial Sequence
  Synthetic oligonucleotide
tgcataagcgaaaacagacttaagttggta

SEQ ID NO: 48875 - DNA, 30 bp, Artificial Sequence
  Synthetic oligonucleotide
taagaacctgagtgggcgtgcgagaatgta

SEQ ID NO: 48876 - DNA, 30 bp, Artificial Sequence
  Synthetic oligonucleotide
ggaggcggaatgcttaagatacaccatgta

SEQ ID NO: 48877 - DNA, 30 bp, Artificial Sequence
  Synthetic oligonucleotide
tgaagaacatatgataacggtcggcatgta

SEQ ID NO: 48878 - DNA, 30 bp, Artificial Sequence
  Synthetic oligonucleotide
ccgggaagataatcggcccaacacactgta

SEQ ID NO: 48879 - DNA, 30 bp, Artificial Sequence
  Synthetic oligonucleotide
tacggatggaaaatattgtggcccgctgta

SEQ ID NO: 48880 - DNA, 30 bp, Artificial Sequence
  Synthetic oligonucleotide
aggaggtggagtagttcgaattgatctgta

SEQ ID NO: 48881 - DNA, 30 bp, Artificial Sequence
  Synthetic oligonucleotide
caaacgtccgatatctacaagaagtctgta

SEQ ID NO: 48882 - DNA, 30 bp, Artificial Sequence
  Synthetic oligonucleotide
aaggtggcagtcggcattcccgcacgtgta

SEQ ID NO: 48883 - DNA, 30 bp, Artificial Sequence
  Synthetic oligonucleotide
agtggggtaccggtctgctaaggcggtgta

SEQ ID NO: 48884 - DNA, 30 bp, Artificial Sequence
  Synthetic oligonucleotide
cgctctatgaaaaacggaggcatgattgta

SEQ ID NO: 48885 - DNA, 30 bp, Artificial Sequence
  Synthetic oligonucleotide
tgcggtgaaaaaaaaaggtgagtgcttgta

SEQ ID NO: 48886 - DNA, 30 bp, Artificial Sequence
  Synthetic oligonucleotide
cgggacatgtgattgtaaacgttggaatta

SEQ ID NO: 48887 - DNA, 30 bp, Artificial Sequence
  Synthetic oligonucleotide
gcgcgaaatggcaagcagtccacataatta

SEQ ID NO: 48888 - DNA, 30 bp, Artificial Sequence
  Synthetic oligonucleotide
tcaacggtgatagggtcggctaagacatta

SEQ ID NO: 48889 - DNA, 30 bp, Artificial Sequence
  Synthetic oligonucleotide
ccatatctgcatggcgaatccggaccatta

SEQ ID NO: 48890 - DNA, 30 bp, Artificial Sequence
  Synthetic oligonucleotide
cgattgcacccacgaagagtacggccatta

SEQ ID NO: 48891 - DNA, 30 bp, Artificial Sequence
  Synthetic oligonucleotide
aggagaaagctaccttccgaatgctcatta

SEQ ID NO: 48892 - DNA, 30 bp, Artificial Sequence
  Synthetic oligonucleotide
agtaagcgttgggaagtggccaaccgatta

SEQ ID NO: 48893 - DNA, 30 bp, Artificial Sequence
  Synthetic oligonucleotide
tctcgcgagcactcaaacatggcgatatta

SEQ ID NO: 48894 - DNA, 30 bp, Artificial Sequence
  Synthetic oligonucleotide
acatgtcatgacctatgccagatggactta

SEQ ID NO: 48895 - DNA, 30 bp, Artificial Sequence
  Synthetic oligonucleotide
agcagacctcgaaatatatgatgtgactta

SEQ ID NO: 48896 - DNA, 30 bp, Artificial Sequence
  Synthetic oligonucleotide
gtgcaggggaccgcgcgagtcgcatactta

SEQ ID NO: 48897 - DNA, 30 bp, Artificial Sequence
  Synthetic oligonucleotide
tcagagttatcgcacgaaaagaggctctta

SEQ ID NO: 48898 - DNA, 30 bp, Artificial Sequence
  Synthetic oligonucleotide
ccgttggctcgagaaatcgaaactctctta

SEQ ID NO: 48899 - DNA, 30 bp, Artificial Sequence
  Synthetic oligonucleotide
gctgaacctaaagctataacatccttctta

SEQ ID NO: 48900 - DNA, 30 bp, Artificial Sequence
  Synthetic oligonucleotide
cgctgcttcacgattcaggggcgtaagtta

SEQ ID NO: 48901 - DNA, 30 bp, Artificial Sequence
  Synthetic oligonucleotide
agagttccaaccgcatactcacgagagtta

SEQ ID NO: 48902 - DNA, 30 bp, Artificial Sequence
  Synthetic oligonucleotide
gggcccaaactccagtagtgcctgtagtta

SEQ ID NO: 48903 - DNA, 30 bp, Artificial Sequence
  Synthetic oligonucleotide
tggagaagggagattagtgtattctcgtta

SEQ ID NO: 48904 - DNA, 30 bp, Artificial Sequence
  Synthetic oligonucleotide
cagccgtaatcagggcaccgtacaaggtta

SEQ ID NO: 48905 - DNA, 30 bp, Artificial Sequence
  Synthetic oligonucleotide
tcgttaaccaattaataggagttacggtta

SEQ ID NO: 48906 - DNA, 30 bp, Artificial Sequence
  Synthetic oligonucleotide
taggccaccgcaagcagatgtacgcggtta

SEQ ID NO: 48907 - DNA, 30 bp, Artificial Sequence
  Synthetic oligonucleotide
tctaggtggcggcgtaagttagaggggtta

SEQ ID NO: 48908 - DNA, 30 bp, Artificial Sequence
  Synthetic oligonucleotide
aggaatgtataggtagctgtgcaatggtta

SEQ ID NO: 48909 - DNA, 30 bp, Artificial Sequence
  Synthetic oligonucleotide
tggaaaaacaccagccagcaagcaaattta

SEQ ID NO: 48910 - DNA, 30 bp, Artificial Sequence
  Synthetic oligonucleotide
aggggaaactttcgtatccctcaacaaaac

SEQ ID NO: 48911 - DNA, 31 bp, Artificial Sequence
  Synthetic oligonucleotide
actaggcgacggtatgtttcgagcccaaaac

SEQ ID NO: 48912 - DNA, 30 bp, Artificial Sequence
  Synthetic oligonucleotide
acgacaactaattatgatatagggcaaaac

SEQ ID NO: 48913 - DNA, 30 bp, Artificial Sequence
  Synthetic oligonucleotide
tgaccgggggctatagcgaaaggcgaaaac

SEQ ID NO: 48914 - DNA, 30 bp, Artificial Sequence
  Synthetic oligonucleotide
acgctcatgggggtaatcgatcattaaaac

SEQ ID NO: 48915 - DNA, 30 bp, Artificial Sequence
  Synthetic oligonucleotide
acacaaatgagggtagcggtagaaacaaac

SEQ ID NO: 48916 - DNA, 30 bp, Artificial Sequence
  Synthetic oligonucleotide
acaaaagaggcggttaaactcaaaccaaac

SEQ ID NO: 48917 - DNA, 30 bp, Artificial Sequence
  Synthetic oligonucleotide
gcaggcgcggatacgagggcgtcgccaaac

SEQ ID NO: 48918 - DNA, 30 bp, Artificial Sequence
  Synthetic oligonucleotide
aagcgagcatcaccaaacgtcggcgcaaac

SEQ ID NO: 48919 - DNA, 30 bp, Artificial Sequence
  Synthetic oligonucleotide
acggagccctcctctgggaccttggcaaac

SEQ ID NO: 48920 - DNA, 30 bp, Artificial Sequence
  Synthetic oligonucleotide
tgtcgtacggattatcaacatgacagaaac

SEQ ID NO: 48921 - DNA, 30 bp, Artificial Sequence
  Synthetic oligonucleotide
gcaaagtgggggctcccgagcggtcgaaac

SEQ ID NO: 48922 - DNA, 30 bp, Artificial Sequence
  Synthetic oligonucleotide
aggtaacacgactaggaacatacaggaaac

SEQ ID NO: 48923 - DNA, 30 bp, Artificial Sequence
  Synthetic oligonucleotide
agagaggtcagatcgctaaacaggggaaac

SEQ ID NO: 48924 - DNA, 30 bp, Artificial Sequence
  Synthetic oligonucleotide
tggaacgagcgaggttgaaagacgataaac

SEQ ID NO: 48925 - DNA, 30 bp, Artificial Sequence
  Synthetic oligonucleotide
tgaggtgatatcgataccagcgagctaaac

SEQ ID NO: 48926 - DNA, 30 bp, Artificial Sequence
  Synthetic oligonucleotide
ctgttaaatccaaaccaacactacgtaaac

SEQ ID NO: 48927 - DNA, 30 bp, Artificial Sequence
  Synthetic oligonucleotide
gaaccaagcgccaccgaccgtgagttaaac

SEQ ID NO: 48928 - DNA, 30 bp, Artificial Sequence
  Synthetic oligonucleotide
agggtcgaagcataggccatatgtttaaac

SEQ ID NO: 48929 - DNA, 30 bp, Artificial Sequence
  Synthetic oligonucleotide
atcgcaaatatggtagggcgaattttaaac

SEQ ID NO: 48930 - DNA, 30 bp, Artificial Sequence
  Synthetic oligonucleotide
tgtaaagtagaacatgagtggccaaacaac

SEQ ID NO: 48931 - DNA, 30 bp, Artificial Sequence
  Synthetic oligonucleotide
atgcctatgaatggtagaacgaagaacaac

SEQ ID NO: 48932 - DNA, 30 bp, Artificial Sequence
  Synthetic oligonucleotide
gcatgatccgccgatctagcgacacacaac

SEQ ID NO: 48933 - DNA, 30 bp, Artificial Sequence
  Synthetic oligonucleotide
gagcaacctaaaactcatgtgatagacaac

SEQ ID NO: 48934 - DNA, 30 bp, Artificial Sequence
  Synthetic oligonucleotide
ttcgattacggaaaactgagctcaaccaac

SEQ ID NO: 48935 - DNA, 30 bp, Artificial Sequence
  Synthetic oligonucleotide
cgcggattgggtgaaaataggtgaaccaac

SEQ ID NO: 48936 - DNA, 30 bp, Artificial Sequence
  Synthetic oligonucleotide
ttatggagggatctagtgtgatgagccaac

SEQ ID NO: 48937 - DNA, 30 bp, Artificial Sequence
  Synthetic oligonucleotide
tgccctcggagtgtcgagtttcccgccaac

SEQ ID NO: 48938 - DNA, 30 bp, Artificial Sequence
  Synthetic oligonucleotide
tccaggaatcccacctacaaatgggccaac

SEQ ID NO: 48939 - DNA, 30 bp, Artificial Sequence
  Synthetic oligonucleotide
catgagggtgtccgacggttagatgccaac

SEQ ID NO: 48940 - DNA, 31 bp, Artificial Sequence
  Synthetic oligonucleotide
cgctcccagggacgaggatccaatccgcaac

SEQ ID NO: 48941 - DNA, 30 bp, Artificial Sequence
  Synthetic oligonucleotide
tgcaggaattccctcttcaaatagcgcaac

SEQ ID NO: 48942 - DNA, 30 bp, Artificial Sequence
  Synthetic oligonucleotide
cgcggcgatgattggagagaagcgggcaac

SEQ ID NO: 48943 - DNA, 31 bp, Artificial Sequence
  Synthetic oligonucleotide
tggcggggactttaagcacaaaggctgcaac

SEQ ID NO: 48944 - DNA, 30 bp, Artificial Sequence
  Synthetic oligonucleotide
ccgtaagtcccgcccaggcctgcaatcaac

SEQ ID NO: 48945 - DNA, 30 bp, Artificial Sequence
  Synthetic oligonucleotide
ggggaacaactgcaattgtattacatcaac

SEQ ID NO: 48946 - DNA, 30 bp, Artificial Sequence
  Synthetic oligonucleotide
agccacgggttaaaccaatgcgacctcaac

SEQ ID NO: 48947 - DNA, 30 bp, Artificial Sequence
  Synthetic oligonucleotide
ccgtgtagcggtgcgtcgaaatgtctcaac

SEQ ID NO: 48948 - DNA, 30 bp, Artificial Sequence
  Synthetic oligonucleotide
tgatatggaggccgtccgaactaagtcaac

SEQ ID NO: 48949 - DNA, 30 bp, Artificial Sequence
  Synthetic oligonucleotide
atacaaggccattgggagttcagggtcaac

SEQ ID NO: 48950 - DNA, 30 bp, Artificial Sequence
  Synthetic oligonucleotide
gggtttacggtggagatgtgaacaaagaac

SEQ ID NO: 48951 - DNA, 30 bp, Artificial Sequence
  Synthetic oligonucleotide
cgtatgtgtactacggatgtgactaagaac

SEQ ID NO: 48952 - DNA, 30 bp, Artificial Sequence
  Synthetic oligonucleotide
gcagcgcgggggattgtacgtgaatagaac

SEQ ID NO: 48953 - DNA, 30 bp, Artificial Sequence
  Synthetic oligonucleotide
tgccaactctaatcacgtacacgaacgaac

SEQ ID NO: 48954 - DNA, 30 bp, Artificial Sequence
  Synthetic oligonucleotide
ccaagcatttaccgaaacatgaacacgaac

SEQ ID NO: 48955 - DNA, 30 bp, Artificial Sequence
  Synthetic oligonucleotide
tgtgtcagtgtggaagtctcgggcgcgaac

SEQ ID NO: 48956 - DNA, 30 bp, Artificial Sequence
  Synthetic oligonucleotide
acagcagaggggtaaaaccatggcgcgaac

SEQ ID NO: 48957 - DNA, 30 bp, Artificial Sequence
  Synthetic oligonucleotide
gacagtataacgacactatagcgatcgaac

SEQ ID NO: 48958 - DNA, 30 bp, Artificial Sequence
  Synthetic oligonucleotide
aagtactgagacaaatcggacgcctcgaac

SEQ ID NO: 48959 - DNA, 30 bp, Artificial Sequence
  Synthetic oligonucleotide
cgacactaccatcaagaatgtgtagggaac

SEQ ID NO: 48960 - DNA, 30 bp, Artificial Sequence
  Synthetic oligonucleotide
gggtacaatcacaagacacacgaatggaac

SEQ ID NO: 48961 - DNA, 30 bp, Artificial Sequence
  Synthetic oligonucleotide
caactcttaacgacgaagacccgaatgaac

SEQ ID NO: 48962 - DNA, 30 bp, Artificial Sequence
  Synthetic oligonucleotide
aagaatgagatactacgcttagaggtgaac

SEQ ID NO: 48963 - DNA, 30 bp, Artificial Sequence
  Synthetic oligonucleotide
gtctatcctaggctagagaaaggggtgaac

SEQ ID NO: 48964 - DNA, 30 bp, Artificial Sequence
  Synthetic oligonucleotide
gacgggatcaacagatataagtggaataac

SEQ ID NO: 48965 - DNA, 30 bp, Artificial Sequence
  Synthetic oligonucleotide
ccgccccccgaggttgtaagtgactctaac

SEQ ID NO: 48966 - DNA, 30 bp, Artificial Sequence
  Synthetic oligonucleotide
ccgtgggggcagacgggagacagaggtaac

SEQ ID NO: 48967 - DNA, 30 bp, Artificial Sequence
  Synthetic oligonucleotide
gctcgcccaacagccaacggacatggtaac

SEQ ID NO: 48968 - DNA, 30 bp, Artificial Sequence
  Synthetic oligonucleotide
gtggataattaagtcgagtaagcccttaac

SEQ ID NO: 48969 - DNA, 30 bp, Artificial Sequence
  Synthetic oligonucleotide
cgattccagtgtcgcgatagtggccttaac

SEQ ID NO: 48970 - DNA, 30 bp, Artificial Sequence
  Synthetic oligonucleotide
ccgaaggtgccgatagtcttcatcaaacac

SEQ ID NO: 48971 - DNA, 30 bp, Artificial Sequence
  Synthetic oligonucleotide
cccttggatcacctaggagtagaacaacac

SEQ ID NO: 48972 - DNA, 30 bp, Artificial Sequence
  Synthetic oligonucleotide
caagaactaacgtgtcggccaacgcaacac

SEQ ID NO: 48973 - DNA, 30 bp, Artificial Sequence
  Synthetic oligonucleotide
agaaatacgacaagcaaattcatgcaacac

SEQ ID NO: 48974 - DNA, 30 bp, Artificial Sequence
  Synthetic oligonucleotide
tcaggggcgccaacgaaggggaacgaacac

SEQ ID NO: 48975 - DNA, 30 bp, Artificial Sequence
  Synthetic oligonucleotide
agaaccacaagcagtgacatcggggaacac

SEQ ID NO: 48976 - DNA, 30 bp, Artificial Sequence
  Synthetic oligonucleotide
gatatcgacaagacaggtggtagctaacac

SEQ ID NO: 48977 - DNA, 30 bp, Artificial Sequence
  Synthetic oligonucleotide
tctaaatgactgagaatagtataaccacac

SEQ ID NO: 48978 - DNA, 30 bp, Artificial Sequence
  Synthetic oligonucleotide
actaagcgggacgagaataattgtccacac

SEQ ID NO: 48979 - DNA, 30 bp, Artificial Sequence
  Synthetic oligonucleotide
caaccgaggccaccttgcattagatcacac

SEQ ID NO: 48980 - DNA, 30 bp, Artificial Sequence
  Synthetic oligonucleotide
gggcgcgtgatggcagttctcaggtcacac

SEQ ID NO: 48981 - DNA, 30 bp, Artificial Sequence
  Synthetic oligonucleotide
cgtaggcaaggggcaaaggagaggtcacac

SEQ ID NO: 48982 - DNA, 30 bp, Artificial Sequence
  Synthetic oligonucleotide
gtgtatcgccacaatgaaaccgaaagacac

SEQ ID NO: 48983 - DNA, 30 bp, Artificial Sequence
  Synthetic oligonucleotide
caactggagacaaaagttaattacggacac

SEQ ID NO: 48984 - DNA, 30 bp, Artificial Sequence
  Synthetic oligonucleotide
gtgaacaggataacgtgagtatcgggacac

SEQ ID NO: 48985 - DNA, 30 bp, Artificial Sequence
  Synthetic oligonucleotide
cgagggtgcatccctctaacatagtgacac

SEQ ID NO: 48986 - DNA, 30 bp, Artificial Sequence
  Synthetic oligonucleotide
atggcgtcatcatcaacttctgcgtgacac

SEQ ID NO: 48987 - DNA, 30 bp, Artificial Sequence
  Synthetic oligonucleotide
gtcccagggggggacacaatacctatacac

SEQ ID NO: 48988 - DNA, 30 bp, Artificial Sequence
  Synthetic oligonucleotide
ggaatgtaatcgaggggacatgtcgtacac

SEQ ID NO: 48989 - DNA, 30 bp, Artificial Sequence
  Synthetic oligonucleotide
aaaacaaagtgcaaaagtccgcctgtacac

SEQ ID NO: 48990 - DNA, 30 bp, Artificial Sequence
  Synthetic oligonucleotide
gcggccaactaaagtcaggtgcctaaccac

SEQ ID NO: 48991 - DNA, 30 bp, Artificial Sequence
  Synthetic oligonucleotide
ggaaggcatcgatgccaaacgtggtaccac

SEQ ID NO: 48992 - DNA, 30 bp, Artificial Sequence
  Synthetic oligonucleotide
taatgaacttcagagcacagcaaaggccac

SEQ ID NO: 48993 - DNA, 30 bp, Artificial Sequence
  Synthetic oligonucleotide
aatgtaaattatccgagagggcgatgccac

SEQ ID NO: 48994 - DNA, 30 bp, Artificial Sequence
  Synthetic oligonucleotide
ggaacctaggcgggaacgtatgaaatccac

SEQ ID NO: 48995 - DNA, 30 bp, Artificial Sequence
  Synthetic oligonucleotide
gggcatcggacgtgatgaaccgcaatccac

SEQ ID NO: 48996 - DNA, 30 bp, Artificial Sequence
  Synthetic oligonucleotide
cgtggcgcggatgtaatcctaactttccac

SEQ ID NO: 48997 - DNA, 30 bp, Artificial Sequence
  Synthetic oligonucleotide
agacagcgggattcccaatagctaaagcac

SEQ ID NO: 48998 - DNA, 30 bp, Artificial Sequence
  Synthetic oligonucleotide
tagtgacaactcctacgtgtgaccaagcac

SEQ ID NO: 48999 - DNA, 30 bp, Artificial Sequence
  Synthetic oligonucleotide
tggaatgtggagaagcggattaggaagcac

SEQ ID NO: 49000 - DNA, 30 bp, Artificial Sequence
  Synthetic oligonucleotide
aacaccatgcaccgtagcagctagcagcac

SEQ ID NO: 49001 - DNA, 30 bp, Artificial Sequence
  Synthetic oligonucleotide
gtcgcaaatcctgagacccgcctcgagcac

SEQ ID NO: 49002 - DNA, 30 bp, Artificial Sequence
  Synthetic oligonucleotide
cggggtgggtgtcttgtctataaggagcac

SEQ ID NO: 49003 - DNA, 30 bp, Artificial Sequence
  Synthetic oligonucleotide
gcgtaaccgagtgttcaattagggtagcac

SEQ ID NO: 49004 - DNA, 30 bp, Artificial Sequence
  Synthetic oligonucleotide
ctgataagtagaaagctcgggaattagcac

SEQ ID NO: 49005 - DNA, 30 bp, Artificial Sequence
  Synthetic oligonucleotide
tggggaacccggaaaccgccatccgcgcac

SEQ ID NO: 49006 - DNA, 30 bp, Artificial Sequence
  Synthetic oligonucleotide
cgtacgaattggagtatatctccgtcgcac

SEQ ID NO: 49007 - DNA, 30 bp, Artificial Sequence
  Synthetic oligonucleotide
accaacctactatagcacacaccaaggcac

SEQ ID NO: 49008 - DNA, 30 bp, Artificial Sequence
  Synthetic oligonucleotide
ctgaggagtactgatcgaggcggagggcac

SEQ ID NO: 49009 - DNA, 30 bp, Artificial Sequence
  Synthetic oligonucleotide
tggcatcgaaaatgtgagggcatcgggcac

SEQ ID NO: 49010 - DNA, 30 bp, Artificial Sequence
  Synthetic oligonucleotide
gggtaaaaagggcaacgcggacctatgcac

SEQ ID NO: 49011 - DNA, 30 bp, Artificial Sequence
  Synthetic oligonucleotide
gtacaatgagacgaatgggcggtccgtcac

SEQ ID NO: 49012 - DNA, 30 bp, Artificial Sequence
  Synthetic oligonucleotide
tacggctcggttgttgagtgcgtgcgtcac

SEQ ID NO: 49013 - DNA, 30 bp, Artificial Sequence
  Synthetic oligonucleotide
cgtgcccgaaaccaaggcggcaaaattcac

SEQ ID NO: 49014 - DNA, 30 bp, Artificial Sequence
  Synthetic oligonucleotide
aggtataacaatgccgtggggacgattcac

SEQ ID NO: 49015 - DNA, 34 bp, Artificial Sequence
  Synthetic oligonucleotide
gatactagaccaccacgtttccatcagaaaagac

SEQ ID NO: 49016 - DNA, 30 bp, Artificial Sequence
  Synthetic oligonucleotide
cccgacaaaaggtgcatagagaggaaagac

SEQ ID NO: 49017 - DNA, 30 bp, Artificial Sequence
  Synthetic oligonucleotide
cggttgcaataacgagaactggtccaagac

SEQ ID NO: 49018 - DNA, 30 bp, Artificial Sequence
  Synthetic oligonucleotide
agttaacaagtaatgtaatgataggaagac

SEQ ID NO: 49019 - DNA, 30 bp, Artificial Sequence
  Synthetic oligonucleotide
gacttcaatgatcaagacccaagggaagac

SEQ ID NO: 49020 - DNA, 30 bp, Artificial Sequence
  Synthetic oligonucleotide
ggataaggctgagagtgctacatttaagac

SEQ ID NO: 49021 - DNA, 30 bp, Artificial Sequence
  Synthetic oligonucleotide
cgtgaattaggttcaagcacctgaacagac

SEQ ID NO: 49022 - DNA, 30 bp, Artificial Sequence
  Synthetic oligonucleotide
agctgtgccaagtatcgtgcagacccagac

SEQ ID NO: 49023 - DNA, 30 bp, Artificial Sequence
  Synthetic oligonucleotide
gggaaggttccgactggttgaaccccagac

SEQ ID NO: 49024 - DNA, 30 bp, Artificial Sequence
  Synthetic oligonucleotide
aagatgtagtaacaaaaatcacttccagac

SEQ ID NO: 49025 - DNA, 30 bp, Artificial Sequence
  Synthetic oligonucleotide
gtgatcaagcagaagagcgcgtgagcagac

SEQ ID NO: 49026 - DNA, 30 bp, Artificial Sequence
  Synthetic oligonucleotide
agagctggcctggaagagattgcgagagac

SEQ ID NO: 49027 - DNA, 30 bp, Artificial Sequence
  Synthetic oligonucleotide
gtaagcgcaaagcggatagatgttagagac

SEQ ID NO: 49028 - DNA, 30 bp, Artificial Sequence
  Synthetic oligonucleotide
tgaggaacggttagggcctagaagggagac

SEQ ID NO: 49029 - DNA, 30 bp, Artificial Sequence
  Synthetic oligonucleotide
taaatggcaaggtgggaatagaggtgagac

SEQ ID NO: 49030 - DNA, 30 bp, Artificial Sequence
  Synthetic oligonucleotide
aaagacggggtctggtagtcactttgagac

SEQ ID NO: 49031 - DNA, 30 bp, Artificial Sequence
  Synthetic oligonucleotide
gcatcccagccgacgtgtaacaaaatagac

SEQ ID NO: 49032 - DNA, 30 bp, Artificial Sequence
  Synthetic oligonucleotide
caattcattggaggagatccagctatagac

SEQ ID NO: 49033 - DNA, 30 bp, Artificial Sequence
  Synthetic oligonucleotide
aaatgcagatgaaatgcgggtgatctagac

SEQ ID NO: 49034 - DNA, 30 bp, Artificial Sequence
  Synthetic oligonucleotide
ggggacgctggatgcgtagatagggtagac

SEQ ID NO: 49035 - DNA, 30 bp, Artificial Sequence
  Synthetic oligonucleotide
cggtagtagcgactagatggattgttagac

SEQ ID NO: 49036 - DNA, 30 bp, Artificial Sequence
  Synthetic oligonucleotide
ccgggataggctgcacagatgcaaaacgac

SEQ ID NO: 49037 - DNA, 30 bp, Artificial Sequence
  Synthetic oligonucleotide
taaggtaggcggcgcatatggaggaacgac

SEQ ID NO: 49038 - DNA, 30 bp, Artificial Sequence
  Synthetic oligonucleotide
cgggtgcgtctgtaggcgaatctggacgac

SEQ ID NO: 49039 - DNA, 30 bp, Artificial Sequence
  Synthetic oligonucleotide
tctctcctaaacgtattctgtaattacgac

SEQ ID NO: 49040 - DNA, 30 bp, Artificial Sequence
  Synthetic oligonucleotide
atgttcggtgggaggttcaaggataccgac

SEQ ID NO: 49041 - DNA, 30 bp, Artificial Sequence
  Synthetic oligonucleotide
aagggcgacagaccaaagaggctccccgac

SEQ ID NO: 49042 - DNA, 30 bp, Artificial Sequence
  Synthetic oligonucleotide
gttcgttccaagaagaaaccgatggccgac

SEQ ID NO: 49043 - DNA, 30 bp, Artificial Sequence
  Synthetic oligonucleotide
tgtataagaacaatagatagctttgccgac

SEQ ID NO: 49044 - DNA, 30 bp, Artificial Sequence
  Synthetic oligonucleotide
aagaacacgttcggacgtgaaccgggcgac

SEQ ID NO: 49045 - DNA, 30 bp, Artificial Sequence
  Synthetic oligonucleotide
tgaaaagtgaagtatatggtaggtatcgac

SEQ ID NO: 49046 - DNA, 30 bp, Artificial Sequence
  Synthetic oligonucleotide
aagagacaacaaagcaccatgaatctcgac

SEQ ID NO: 49047 - DNA, 30 bp, Artificial Sequence
  Synthetic oligonucleotide
tgaaagcttagcctgataacgttagaggac

SEQ ID NO: 49048 - DNA, 30 bp, Artificial Sequence
  Synthetic oligonucleotide
ggaaggcgggtaatgaagtcttattaggac

SEQ ID NO: 49049 - DNA, 30 bp, Artificial Sequence
  Synthetic oligonucleotide
gcgatggaaaacaggggaatagtgacggac

SEQ ID NO: 49050 - DNA, 30 bp, Artificial Sequence
  Synthetic oligonucleotide
aggggcaaaggcgttgttaatagcagggac

SEQ ID NO: 49051 - DNA, 30 bp, Artificial Sequence
  Synthetic oligonucleotide
actagaagatatacgtgctagggcatggac

SEQ ID NO: 49052 - DNA, 30 bp, Artificial Sequence
  Synthetic oligonucleotide
tacacacgatctcgcgaggggctactggac

SEQ ID NO: 49053 - DNA, 30 bp, Artificial Sequence
  Synthetic oligonucleotide
ataactgttaggtaagacaaaggagtggac

SEQ ID NO: 49054 - DNA, 30 bp, Artificial Sequence
  Synthetic oligonucleotide
ggtagtaagtgaaaaaatccgggcttggac

SEQ ID NO: 49055 - DNA, 30 bp, Artificial Sequence
  Synthetic oligonucleotide
ctatagtcccgtcagtgcacccagaatgac

SEQ ID NO: 49056 - DNA, 30 bp, Artificial Sequence
  Synthetic oligonucleotide
caaaattaacgaccaaacagtgagtatgac

SEQ ID NO: 49057 - DNA, 30 bp, Artificial Sequence
  Synthetic oligonucleotide
gtggaaaaatgttaacagtcgcgggctgac

SEQ ID NO: 49058 - DNA, 30 bp, Artificial Sequence
  Synthetic oligonucleotide
cgctcgtttaagacgtttaatgaaagtgac

SEQ ID NO: 49059 - DNA, 30 bp, Artificial Sequence
  Synthetic oligonucleotide
tgctctaagatattaagcctgaagagtgac

SEQ ID NO: 49060 - DNA, 30 bp, Artificial Sequence
  Synthetic oligonucleotide
ttgagagaaggcctggaaagctatagtgac

SEQ ID NO: 49061 - DNA, 30 bp, Artificial Sequence
  Synthetic oligonucleotide
agcagcgtaaatgctatggcccgtagtgac

SEQ ID NO: 49062 - DNA, 30 bp, Artificial Sequence
  Synthetic oligonucleotide
tgtacaggccgattagggcggtggcgtgac

SEQ ID NO: 49063 - DNA, 30 bp, Artificial Sequence
  Synthetic oligonucleotide
tactgaggtcatggttggaaagtgcgtgac

SEQ ID NO: 49064 - DNA, 30 bp, Artificial Sequence
  Synthetic oligonucleotide
gaacgtacataactggacggcctaggtgac

SEQ ID NO: 49065 - DNA, 30 bp, Artificial Sequence
  Synthetic oligonucleotide
ggcaattttgctgagcgtgaaaggggtgac

SEQ ID NO: 49066 - DNA, 30 bp, Artificial Sequence
  Synthetic oligonucleotide
aataagttgaaacgtggcttgcagtgtgac

SEQ ID NO: 49067 - DNA, 30 bp, Artificial Sequence
  Synthetic oligonucleotide
acgcgttactggtaggtagactggtgtgac

SEQ ID NO: 49068 - DNA, 30 bp, Artificial Sequence
  Synthetic oligonucleotide
ggtcggaaatgaatgttaaatgattgtgac

SEQ ID NO: 49069 - DNA, 30 bp, Artificial Sequence
  Synthetic oligonucleotide
tctgatatagtgggaacgggagtcattgac

SEQ ID NO: 49070 - DNA, 30 bp, Artificial Sequence
  Synthetic oligonucleotide
tatcggaagcatcgcatgtttagagttgac

SEQ ID NO: 49071 - DNA, 30 bp, Artificial Sequence
  Synthetic oligonucleotide
cagtgaaacgagtatggaaaccgctttgac

SEQ ID NO: 49072 - DNA, 30 bp, Artificial Sequence
  Synthetic oligonucleotide
gagacctcaagcgcattgcgacataaatac

SEQ ID NO: 49073 - DNA, 30 bp, Artificial Sequence
  Synthetic oligonucleotide
cgacgatggtactgtcactttgtcgaatac

SEQ ID NO: 49074 - DNA, 30 bp, Artificial Sequence
  Synthetic oligonucleotide
ttcgaagagtggactgctccgtcataatac

SEQ ID NO: 49075 - DNA, 30 bp, Artificial Sequence
  Synthetic oligonucleotide
ggacgtgaaaatttattccctcactaatac

SEQ ID NO: 49076 - DNA, 30 bp, Artificial Sequence
  Synthetic oligonucleotide
agtggggtaatgaaagcgggcatgtaatac

SEQ ID NO: 49077 - DNA, 30 bp, Artificial Sequence
  Synthetic oligonucleotide
gccagaaaataagcaagatagctgtaatac

SEQ ID NO: 49078 - DNA, 30 bp, Artificial Sequence
  Synthetic oligonucleotide
agagggcctggaactcgcgcatccacatac

SEQ ID NO: 49079 - DNA, 30 bp, Artificial Sequence
  Synthetic oligonucleotide
agggggaccgggcatttgcaaagtacatac

SEQ ID NO: 49080 - DNA, 30 bp, Artificial Sequence
  Synthetic oligonucleotide
ttgcaaagcagggagcaagggtaagcatac

SEQ ID NO: 49081 - DNA, 30 bp, Artificial Sequence
  Synthetic oligonucleotide
ccgatagtgatattgtgagcttctagatac

SEQ ID NO: 49082 - DNA, 30 bp, Artificial Sequence
  Synthetic oligonucleotide
ccgaagctaacggcatgcaatccacgatac

SEQ ID NO: 49083 - DNA, 30 bp, Artificial Sequence
  Synthetic oligonucleotide
atcgagttcccagatcaaaccgagcgatac

SEQ ID NO: 49084 - DNA, 30 bp, Artificial Sequence
  Synthetic oligonucleotide
agaacgtaaggcaataattaaggaaactac

SEQ ID NO: 49085 - DNA, 30 bp, Artificial Sequence
  Synthetic oligonucleotide
gccacggtaagacgccaagtaaacaactac

SEQ ID NO: 49086 - DNA, 30 bp, Artificial Sequence
  Synthetic oligonucleotide
aggcacaagtggccgcgtaaaatacactac

SEQ ID NO: 49087 - DNA, 30 bp, Artificial Sequence
  Synthetic oligonucleotide
ggatggagggtgaatgggatcagggactac

SEQ ID NO: 49088 - DNA, 30 bp, Artificial Sequence
  Synthetic oligonucleotide
cgacctcaagtcttcacatcgtgacgctac

SEQ ID NO: 49089 - DNA, 30 bp, Artificial Sequence
  Synthetic oligonucleotide
tattacgcgtggtggactggagtgcgctac

SEQ ID NO: 49090 - DNA, 30 bp, Artificial Sequence
  Synthetic oligonucleotide
agtgctcaatatggaaagtcagatcgctac

SEQ ID NO: 49091 - DNA, 30 bp, Artificial Sequence
  Synthetic oligonucleotide
cccagacgatcgcacaaacggatcaagtac

SEQ ID NO: 49092 - DNA, 30 bp, Artificial Sequence
  Synthetic oligonucleotide
tgcgaggaccgatgtctccttaacacgtac

SEQ ID NO: 49093 - DNA, 30 bp, Artificial Sequence
  Synthetic oligonucleotide
cgcatattaggcaggagcaactacgcgtac

SEQ ID NO: 49094 - DNA, 30 bp, Artificial Sequence
  Synthetic oligonucleotide
gggaacagtacattaggtgacgagaggtac

SEQ ID NO: 49095 - DNA, 30 bp, Artificial Sequence
  Synthetic oligonucleotide
aaagcgtaagggagagcattatctaggtac

SEQ ID NO: 49096 - DNA, 30 bp, Artificial Sequence
  Synthetic oligonucleotide
cggtcagtgaccgaaattttgatagggtac

SEQ ID NO: 49097 - DNA, 30 bp, Artificial Sequence
  Synthetic oligonucleotide
cgtgcgacaaaagagcttctgagctggtac

SEQ ID NO: 49098 - DNA, 30 bp, Artificial Sequence
  Synthetic oligonucleotide
cggagtaccatggaaccggttcaactgtac

SEQ ID NO: 49099 - DNA, 30 bp, Artificial Sequence
  Synthetic oligonucleotide
agcgtcaggatcgtgtacttcggagtgtac

SEQ ID NO: 49100 - DNA, 30 bp, Artificial Sequence
  Synthetic oligonucleotide
taacacgggctaaaatttgagacgacttac

SEQ ID NO: 49101 - DNA, 30 bp, Artificial Sequence
  Synthetic oligonucleotide
gcgttaagggaaaattaaaaagacggttac

SEQ ID NO: 49102 - DNA, 30 bp, Artificial Sequence
  Synthetic oligonucleotide
aggatacgctctttctcaagaaccggttac

SEQ ID NO: 49103 - DNA, 30 bp, Artificial Sequence
  Synthetic oligonucleotide
tacgttggtggacgggactaaaaatgttac

SEQ ID NO: 49104 - DNA, 30 bp, Artificial Sequence
  Synthetic oligonucleotide
ggggctagcgaaatcggcaggagagtttac

SEQ ID NO: 49105 - DNA, 30 bp, Artificial Sequence
  Synthetic oligonucleotide
ggcctaatcccagaatcataaagtaaaacc

SEQ ID NO: 49106 - DNA, 30 bp, Artificial Sequence
  Synthetic oligonucleotide
tcgccaaccccaaatcaggatacagaaacc

SEQ ID NO: 49107 - DNA, 30 bp, Artificial Sequence
  Synthetic oligonucleotide
cgagacgcgtacgaactggacggttaaacc

SEQ ID NO: 49108 - DNA, 30 bp, Artificial Sequence
  Synthetic oligonucleotide
cagaaatccaagccagttggaagaagaacc

SEQ ID NO: 49109 - DNA, 30 bp, Artificial Sequence
  Synthetic oligonucleotide
ataaacggataatacagcatggctcgaacc

SEQ ID NO: 49110 - DNA, 30 bp, Artificial Sequence
  Synthetic oligonucleotide
cgaagggacaggctgctgtcagtcctaacc

SEQ ID NO: 49111 - DNA, 30 bp, Artificial Sequence
  Synthetic oligonucleotide
acacatgtagttaacactagtgacttaacc

SEQ ID NO: 49112 - DNA, 30 bp, Artificial Sequence
  Synthetic oligonucleotide
cactaagtcaaccctaaccaccgaaacacc

SEQ ID NO: 49113 - DNA, 30 bp, Artificial Sequence
  Synthetic oligonucleotide
tggggggattacgtgaggtctccgaacacc

SEQ ID NO: 49114 - DNA, 30 bp, Artificial Sequence
  Synthetic oligonucleotide
gcaatgggatcacgtaagcaaggggacacc

SEQ ID NO: 49115 - DNA, 30 bp, Artificial Sequence
  Synthetic oligonucleotide
cagacagagggactagatgagagatacacc

SEQ ID NO: 49116 - DNA, 30 bp, Artificial Sequence
  Synthetic oligonucleotide
catgagataaggcaatcactcctaaccacc

SEQ ID NO: 49117 - DNA, 30 bp, Artificial Sequence
  Synthetic oligonucleotide
cgcacacgacgacatatcgtcaatcccacc

SEQ ID NO: 49118 - DNA, 30 bp, Artificial Sequence
  Synthetic oligonucleotide
gttaagaattacggttagaaaacgagcacc

SEQ ID NO: 49119 - DNA, 30 bp, Artificial Sequence
  Synthetic oligonucleotide
catgagcagaagcaatcctaaagtctcacc

SEQ ID NO: 49120 - DNA, 30 bp, Artificial Sequence
  Synthetic oligonucleotide
ggatggagggagcgacatgtcagagtcacc

SEQ ID NO: 49121 - DNA, 30 bp, Artificial Sequence
  Synthetic oligonucleotide
catggccaccgggagatgtggtgagtcacc

SEQ ID NO: 49122 - DNA, 30 bp, Artificial Sequence
  Synthetic oligonucleotide
gtgagttttctcgaggagtgacaaaagacc

SEQ ID NO: 49123 - DNA, 30 bp, Artificial Sequence
  Synthetic oligonucleotide
gtgcgcggatacactaaaattataaagacc

SEQ ID NO: 49124 - DNA, 30 bp, Artificial Sequence
  Synthetic oligonucleotide
gaacagcgtgcggaaagcgaaagacagacc

SEQ ID NO: 49125 - DNA, 30 bp, Artificial Sequence
  Synthetic oligonucleotide
cgtaaacaaatgtatacgattgaagagacc

SEQ ID NO: 49126 - DNA, 30 bp, Artificial Sequence
  Synthetic oligonucleotide
cggcaagcagtcaaggtatcggtatagacc

SEQ ID NO: 49127 - DNA, 30 bp, Artificial Sequence
  Synthetic oligonucleotide
actcgtaaaaaaggcgagaccacctagacc

SEQ ID NO: 49128 - DNA, 30 bp, Artificial Sequence
  Synthetic oligonucleotide
agacgtggtaattagggacgttggtagacc

SEQ ID NO: 49129 - DNA, 30 bp, Artificial Sequence
  Synthetic oligonucleotide
tagtcagaccaaaatcgaaatgtaccgacc

SEQ ID NO: 49130 - DNA, 30 bp, Artificial Sequence
  Synthetic oligonucleotide
aactaagggtacagtaaaggtagcccgacc

SEQ ID NO: 49131 - DNA, 30 bp, Artificial Sequence
  Synthetic oligonucleotide
aggcgcaagtattcatcagccgagccgacc

SEQ ID NO: 49132 - DNA, 30 bp, Artificial Sequence
  Synthetic oligonucleotide
acggcacatgaaagcaggagtaagtcgacc

SEQ ID NO: 49133 - DNA, 30 bp, Artificial Sequence
  Synthetic oligonucleotide
cgtaagctacctcataccgtaaaaatgacc

SEQ ID NO: 49134 - DNA, 30 bp, Artificial Sequence
  Synthetic oligonucleotide
gacgcgtaatatgaaaggtattgaatgacc

SEQ ID NO: 49135 - DNA, 30 bp, Artificial Sequence
  Synthetic oligonucleotide
cgatgtaggggactaaatttctctaatacc

SEQ ID NO: 49136 - DNA, 30 bp, Artificial Sequence
  Synthetic oligonucleotide
ggtcaacttgcacgaagatcctaaggtacc

SEQ ID NO: 49137 - DNA, 30 bp, Artificial Sequence
  Synthetic oligonucleotide
cgaagcatcggattaacgacctgctgtacc

SEQ ID NO: 49138 - DNA, 30 bp, Artificial Sequence
  Synthetic oligonucleotide
ttaccgagacataggaccattgagattacc

SEQ ID NO: 49139 - DNA, 30 bp, Artificial Sequence
  Synthetic oligonucleotide
agcaatataacgctggaagaaggagaaccc

SEQ ID NO: 49140 - DNA, 30 bp, Artificial Sequence
  Synthetic oligonucleotide
acgaaactccagaattaccctgcgtaaccc

SEQ ID NO: 49141 - DNA, 30 bp, Artificial Sequence
  Synthetic oligonucleotide
acggactattaggcctgtaaccgagcaccc

SEQ ID NO: 49142 - DNA, 30 bp, Artificial Sequence
  Synthetic oligonucleotide
tgcaaaaaatagtagtgggatagaagaccc

SEQ ID NO: 49143 - DNA, 30 bp, Artificial Sequence
  Synthetic oligonucleotide
ggaagaggcttcgatagcgactctagaccc

SEQ ID NO: 49144 - DNA, 30 bp, Artificial Sequence
  Synthetic oligonucleotide
gtaggagagggtaaccaagacttcggaccc

SEQ ID NO: 49145 - DNA, 30 bp, Artificial Sequence
  Synthetic oligonucleotide
taggcaggaggctaaagagagatatgaccc

SEQ ID NO: 49146 - DNA, 30 bp, Artificial Sequence
  Synthetic oligonucleotide
tccgcgaaacgcataccgcatatgtgaccc

SEQ ID NO: 49147 - DNA, 30 bp, Artificial Sequence
  Synthetic oligonucleotide
aaagagagtcgacacgtatcccacgtaccc

SEQ ID NO: 49148 - DNA, 30 bp, Artificial Sequence
  Synthetic oligonucleotide
ctaacaagtttagaacgaactaaccacccc

SEQ ID NO: 49149 - DNA, 30 bp, Artificial Sequence
  Synthetic oligonucleotide
atacgacgactaagacggaagacgcccccc

SEQ ID NO: 49150 - DNA, 30 bp, Artificial Sequence
  Synthetic oligonucleotide
acaagagctcatctcggagtctgatccccc

SEQ ID NO: 49151 - DNA, 30 bp, Artificial Sequence
  Synthetic oligonucleotide
ctgaaaagatcggcaactagggccagcccc

SEQ ID NO: 49152 - DNA, 30 bp, Artificial Sequence
  Synthetic oligonucleotide
gcagaaaagtatacagtgagtcagatcccc

SEQ ID NO: 49153 - DNA, 30 bp, Artificial Sequence
  Synthetic oligonucleotide
acaggctcatcaagacataattcaacgccc

SEQ ID NO: 49154 - DNA, 30 bp, Artificial Sequence
  Synthetic oligonucleotide
gcgctcgaagataccggaaacagaacgccc

SEQ ID NO: 49155 - DNA, 30 bp, Artificial Sequence
  Synthetic oligonucleotide
caggacagtccccggtaccggaagccgccc

SEQ ID NO: 49156 - DNA, 30 bp, Artificial Sequence
  Synthetic oligonucleotide
ccacccagtacagaactaagatctaggccc

SEQ ID NO: 49157 - DNA, 30 bp, Artificial Sequence
  Synthetic oligonucleotide
catcgaagacatatagagcctgttatgccc

SEQ ID NO: 49158 - DNA, 30 bp, Artificial Sequence
  Synthetic oligonucleotide
cgatatgtgcctgatataacatgactgccc

SEQ ID NO: 49159 - DNA, 30 bp, Artificial Sequence
  Synthetic oligonucleotide
tcgaggccatgggaccaaacgaacaatccc

SEQ ID NO: 49160 - DNA, 30 bp, Artificial Sequence
  Synthetic oligonucleotide
tacgctgaagcccgagaacaagcatatccc

SEQ ID NO: 49161 - DNA, 30 bp, Artificial Sequence
  Synthetic oligonucleotide
cgaatgagtggtgcaattgtgggatatccc

SEQ ID NO: 49162 - DNA, 30 bp, Artificial Sequence
  Synthetic oligonucleotide
cgctgatcaaccgaatctgaaatgcctccc

SEQ ID NO: 49163 - DNA, 30 bp, Artificial Sequence
  Synthetic oligonucleotide
ataggtaaaggcatgaaggaatcaaaagcc

SEQ ID NO: 49164 - DNA, 30 bp, Artificial Sequence
  Synthetic oligonucleotide
ggctgacgtgcaagaggtggtgtcaaagcc

SEQ ID NO: 49165 - DNA, 30 bp, Artificial Sequence
  Synthetic oligonucleotide
aaaagctgtcctcatagcaaagaagcagcc

SEQ ID NO: 49166 - DNA, 30 bp, Artificial Sequence
  Synthetic oligonucleotide
gtgcgacggacccccgttcttctatcagcc

SEQ ID NO: 49167 - DNA, 30 bp, Artificial Sequence
  Synthetic oligonucleotide
tgatagcgggtggcactactcgccggagcc

SEQ ID NO: 49168 - DNA, 30 bp, Artificial Sequence
  Synthetic oligonucleotide
cagaccctggaactccagcccaagatagcc

SEQ ID NO: 49169 - DNA, 30 bp, Artificial Sequence
  Synthetic oligonucleotide
tgggatggccatagctcgaatccagtagcc

SEQ ID NO: 49170 - DNA, 30 bp, Artificial Sequence
  Synthetic oligonucleotide
ctcgggggtatggaacagtcagatgtagcc

SEQ ID NO: 49171 - DNA, 30 bp, Artificial Sequence
  Synthetic oligonucleotide
cagtcactagtggccgccaaacaatacgcc

SEQ ID NO: 49172 - DNA, 30 bp, Artificial Sequence
  Synthetic oligonucleotide
gggcatacatcaccggggagagtctccgcc

SEQ ID NO: 49173 - DNA, 30 bp, Artificial Sequence
  Synthetic oligonucleotide
tgagcaagttagggttaaaggaatagcgcc

SEQ ID NO: 49174 - DNA, 30 bp, Artificial Sequence
  Synthetic oligonucleotide
tggtgctacggaagggacttaagccgcgcc

SEQ ID NO: 49175 - DNA, 30 bp, Artificial Sequence
  Synthetic oligonucleotide
caatacggatgcacatcggagtatggcgcc

SEQ ID NO: 49176 - DNA, 30 bp, Artificial Sequence
  Synthetic oligonucleotide
tacgatcagcgattacgaccctacaaggcc

SEQ ID NO: 49177 - DNA, 30 bp, Artificial Sequence
  Synthetic oligonucleotide
cacgtacgtcacgacataaggctgcaggcc

SEQ ID NO: 49178 - DNA, 30 bp, Artificial Sequence
  Synthetic oligonucleotide
tgcggtcagaaggtggactaaagtgaggcc

SEQ ID NO: 49179 - DNA, 30 bp, Artificial Sequence
  Synthetic oligonucleotide
cgatgccgaatgaacacaggtactacggcc

SEQ ID NO: 49180 - DNA, 30 bp, Artificial Sequence
  Synthetic oligonucleotide
gacggggctgacagaaccaaatgtacggcc

SEQ ID NO: 49181 - DNA, 30 bp, Artificial Sequence
  Synthetic oligonucleotide
cccttaactgaggcaatatcggatagggcc

SEQ ID NO: 49182 - DNA, 30 bp, Artificial Sequence
  Synthetic oligonucleotide
ggtggtgacaaagagccatacgtaggggcc

SEQ ID NO: 49183 - DNA, 30 bp, Artificial Sequence
  Synthetic oligonucleotide
agcacagaagactccttacgtgcgaatgcc

SEQ ID NO: 49184 - DNA, 30 bp, Artificial Sequence
  Synthetic oligonucleotide
acgggaagctggggatttgctgtgaatgcc

SEQ ID NO: 49185 - DNA, 30 bp, Artificial Sequence
  Synthetic oligonucleotide
gggatcgaacgagttttagtacacactgcc

SEQ ID NO: 49186 - DNA, 30 bp, Artificial Sequence
  Synthetic oligonucleotide
caggaacgtggtgtttgccctcgcgctgcc

SEQ ID NO: 49187 - DNA, 30 bp, Artificial Sequence
  Synthetic oligonucleotide
atacgagccgacaaaaggcgttaggctgcc

SEQ ID NO: 49188 - DNA, 30 bp, Artificial Sequence
  Synthetic oligonucleotide
cgaatgttgaaacagacactcgcggctgcc

SEQ ID NO: 49189 - DNA, 30 bp, Artificial Sequence
  Synthetic oligonucleotide
cgggaacaggagccacgatgctgtgctgcc

SEQ ID NO: 49190 - DNA, 30 bp, Artificial Sequence
  Synthetic oligonucleotide
cgaataacatgctgcaaaaatcaatctgcc

SEQ ID NO: 49191 - DNA, 30 bp, Artificial Sequence
  Synthetic oligonucleotide
caacgtccgcatgaaatataaccgtctgcc

SEQ ID NO: 49192 - DNA, 30 bp, Artificial Sequence
  Synthetic oligonucleotide
ccaataaagcacttagcatgaatgagtgcc

SEQ ID NO: 49193 - DNA, 30 bp, Artificial Sequence
  Synthetic oligonucleotide
tgagaggacgacttgatggtggctcaatcc

SEQ ID NO: 49194 - DNA, 30 bp, Artificial Sequence
  Synthetic oligonucleotide
tcacaaaaacacatacgtgaatgtgaatcc

SEQ ID NO: 49195 - DNA, 30 bp, Artificial Sequence
  Synthetic oligonucleotide
agatagagttccatgccaaacacctaatcc

SEQ ID NO: 49196 - DNA, 30 bp, Artificial Sequence
  Synthetic oligonucleotide
ccgacattattcatcgatcttagcgcatcc

SEQ ID NO: 49197 - DNA, 30 bp, Artificial Sequence
  Synthetic oligonucleotide
gctgggggtatgagaggtgtagagagatcc

SEQ ID NO: 49198 - DNA, 30 bp, Artificial Sequence
  Synthetic oligonucleotide
cggagtagagtggagaagtagatgagatcc

SEQ ID NO: 49199 - DNA, 30 bp, Artificial Sequence
  Synthetic oligonucleotide
tcgtccagtgatttcaaaggtgagctatcc

SEQ ID NO: 49200 - DNA, 30 bp, Artificial Sequence
  Synthetic oligonucleotide
aagtgtaaaggtaaaaataggcaaccctcc

SEQ ID NO: 49201 - DNA, 30 bp, Artificial Sequence
  Synthetic oligonucleotide
acgttgtgaaatgttttcaaccctccctcc

SEQ ID NO: 49202 - DNA, 30 bp, Artificial Sequence
  Synthetic oligonucleotide
cggtttacgttggaaaagagattgagctcc

SEQ ID NO: 49203 - DNA, 30 bp, Artificial Sequence
  Synthetic oligonucleotide
tggagggatcataagcgtgtgaggaagtcc

SEQ ID NO: 49204 - DNA, 30 bp, Artificial Sequence
  Synthetic oligonucleotide
tgagtgcgtggacagagtaacctgcagtcc

SEQ ID NO: 49205 - DNA, 30 bp, Artificial Sequence
  Synthetic oligonucleotide
tgagaaatgtccgaccatgccatagagtcc

SEQ ID NO: 49206 - DNA, 30 bp, Artificial Sequence
  Synthetic oligonucleotide
aacacgacacaagctacgtagggtccgtcc

SEQ ID NO: 49207 - DNA, 30 bp, Artificial Sequence
  Synthetic oligonucleotide
tcaaatcttaaccaatcccgagtttcgtcc

SEQ ID NO: 49208 - DNA, 30 bp, Artificial Sequence
  Synthetic oligonucleotide
ccgggaaagaatcacgacaggcttgggtcc

SEQ ID NO: 49209 - DNA, 30 bp, Artificial Sequence
  Synthetic oligonucleotide
tagccgagggcaggtggttatttagtgtcc

SEQ ID NO: 49210 - DNA, 30 bp, Artificial Sequence
  Synthetic oligonucleotide
cacgggcgagatccatcactagccttgtcc

SEQ ID NO: 49211 - DNA, 30 bp, Artificial Sequence
  Synthetic oligonucleotide
caggagcggggattggattgtgtatgttcc

SEQ ID NO: 49212 - DNA, 30 bp, Artificial Sequence
  Synthetic oligonucleotide
gtgtagggcatgctcgacttaacaaaaagc

SEQ ID NO: 49213 - DNA, 30 bp, Artificial Sequence
  Synthetic oligonucleotide
gtagagacatctcaaagcatgatcgaaagc

SEQ ID NO: 49214 - DNA, 30 bp, Artificial Sequence
  Synthetic oligonucleotide
ggcaaacaacaggcctctaagctctaaagc

SEQ ID NO: 49215 - DNA, 30 bp, Artificial Sequence
  Synthetic oligonucleotide
cgtggatgtatatcgaatttattgccaagc

SEQ ID NO: 49216 - DNA, 30 bp, Artificial Sequence
  Synthetic oligonucleotide
atagtccaccagacctcaaatcatccaagc

SEQ ID NO: 49217 - DNA, 30 bp, Artificial Sequence
  Synthetic oligonucleotide
ggggctcttgaaacaagtaacagtgcaagc

SEQ ID NO: 49218 - DNA, 30 bp, Artificial Sequence
  Synthetic oligonucleotide
ttaactgagcaaaaccctcgtataagaagc

SEQ ID NO: 49219 - DNA, 30 bp, Artificial Sequence
  Synthetic oligonucleotide
aaataggtgggagtgcgataaactggaagc

SEQ ID NO: 49220 - DNA, 30 bp, Artificial Sequence
  Synthetic oligonucleotide
ctcaaattacaagacagtctgactggaagc

SEQ ID NO: 49221 - DNA, 30 bp, Artificial Sequence
  Synthetic oligonucleotide
cggggtcacaattgcggaacagtatgaagc

SEQ ID NO: 49222 - DNA, 30 bp, Artificial Sequence
  Synthetic oligonucleotide
aagttaagaagtaaccagcaaaggtgaagc

SEQ ID NO: 49223 - DNA, 30 bp, Artificial Sequence
  Synthetic oligonucleotide
agtcgatgtcctggtatacagttcctaagc

SEQ ID NO: 49224 - DNA, 30 bp, Artificial Sequence
  Synthetic oligonucleotide
aagtgagaacagagtatgtcggaattaagc

SEQ ID NO: 49225 - DNA, 30 bp, Artificial Sequence
  Synthetic oligonucleotide
aaggcacacacgacaagaattagcttaagc

SEQ ID NO: 49226 - DNA, 30 bp, Artificial Sequence
  Synthetic oligonucleotide
ctagcccccgtcgaagataagatcttaagc

SEQ ID NO: 49227 - DNA, 30 bp, Artificial Sequence
  Synthetic oligonucleotide
gtaataaacggagtgcatgccagtttaagc

SEQ ID NO: 49228 - DNA, 30 bp, Artificial Sequence
  Synthetic oligonucleotide
ccatcatcaatcgaacacttgcctaacagc

SEQ ID NO: 49229 - DNA, 30 bp, Artificial Sequence
  Synthetic oligonucleotide
atggggactacggatattacatttaacagc

SEQ ID NO: 49230 - DNA, 30 bp, Artificial Sequence
  Synthetic oligonucleotide
tgccacatcgcgcaagcacgaaatcacagc

SEQ ID NO: 49231 - DNA, 30 bp, Artificial Sequence
  Synthetic oligonucleotide
catcgcgagacagtccaaatagggaccagc

SEQ ID NO: 49232 - DNA, 30 bp, Artificial Sequence
  Synthetic oligonucleotide
gtctgagcctcgagacagatccataccagc

SEQ ID NO: 49233 - DNA, 30 bp, Artificial Sequence
  Synthetic oligonucleotide
acacgtatgtcaatccctagtgtgcccagc

SEQ ID NO: 49234 - DNA, 30 bp, Artificial Sequence
  Synthetic oligonucleotide
cactaccatgcgtcttgagtaaaatccagc

SEQ ID NO: 49235 - DNA, 30 bp, Artificial Sequence
  Synthetic oligonucleotide
ccattagatcgcatgggatctcaaagcagc

SEQ ID NO: 49236 - DNA, 30 bp, Artificial Sequence
  Synthetic oligonucleotide
tcggggagctggcctacgtccttcagcagc

SEQ ID NO: 49237 - DNA, 30 bp, Artificial Sequence
  Synthetic oligonucleotide
aataactaggcgaaaccgaggtcgggcagc

SEQ ID NO: 49238 - DNA, 30 bp, Artificial Sequence
  Synthetic oligonucleotide
caacaagtaagggcaaaaccacgctgcagc

SEQ ID NO: 49239 - DNA, 30 bp, Artificial Sequence
  Synthetic oligonucleotide
cagatataggtgcctatgaaagaactcagc

SEQ ID NO: 49240 - DNA, 30 bp, Artificial Sequence
  Synthetic oligonucleotide
acaggcgggaaaagttagtaacacgtcagc

SEQ ID NO: 49241 - DNA, 30 bp, Artificial Sequence
  Synthetic oligonucleotide
gtaggttcatagtgtcggaatcagttcagc

SEQ ID NO: 49242 - DNA, 30 bp, Artificial Sequence
  Synthetic oligonucleotide
tgtttagacacgagggaaggcggaaagagc

SEQ ID NO: 49243 - DNA, 30 bp, Artificial Sequence
  Synthetic oligonucleotide
tcggcctgactgcctacgattagcaagagc

SEQ ID NO: 49244 - DNA, 30 bp, Artificial Sequence
  Synthetic oligonucleotide
taggcacgacaatggagattattggagagc

SEQ ID NO: 49245 - DNA, 30 bp, Artificial Sequence
  Synthetic oligonucleotide
cgagagaatcattcgggtctcgacacgagc

SEQ ID NO: 49246 - DNA, 30 bp, Artificial Sequence
  Synthetic oligonucleotide
gtagggcgtagacaccaggagatcgcgagc

SEQ ID NO: 49247 - DNA, 30 bp, Artificial Sequence
  Synthetic oligonucleotide
cctggacctagagaaaagcggcaggcgagc

SEQ ID NO: 49248 - DNA, 30 bp, Artificial Sequence
  Synthetic oligonucleotide
tgctaacggaagctggccctacaatcgagc

SEQ ID NO: 49249 - DNA, 30 bp, Artificial Sequence
  Synthetic oligonucleotide
agggttaggcctagtaacaaagactcgagc

SEQ ID NO: 49250 - DNA, 30 bp, Artificial Sequence
  Synthetic oligonucleotide
gtcttgagggtagatcaggcacgaaggagc

SEQ ID NO: 49251 - DNA, 30 bp, Artificial Sequence
  Synthetic oligonucleotide
gctaaaaaaacgccttagagctcggggagc

SEQ ID NO: 49252 - DNA, 30 bp, Artificial Sequence
  Synthetic oligonucleotide
agataactagagtacttaataaattggagc

SEQ ID NO: 49253 - DNA, 30 bp, Artificial Sequence
  Synthetic oligonucleotide
acttgtccgatcgacactccaacgatgagc

SEQ ID NO: 49254 - DNA, 30 bp, Artificial Sequence
  Synthetic oligonucleotide
gcatgcggaacggagtcgaacgaggtgagc

SEQ ID NO: 49255 - DNA, 30 bp, Artificial Sequence
  Synthetic oligonucleotide
gcgtctctgagagtatcacgtagggtgagc

SEQ ID NO: 49256 - DNA, 30 bp, Artificial Sequence
  Synthetic oligonucleotide
gagcaaccatcattagtgtcaaacttgagc

SEQ ID NO: 49257 - DNA, 30 bp, Artificial Sequence
  Synthetic oligonucleotide
aggcagacattctcgcctcccacaaatagc

SEQ ID NO: 49258 - DNA, 30 bp, Artificial Sequence
  Synthetic oligonucleotide
ggagtcaatgggcccaaggtggaagatagc

SEQ ID NO: 49259 - DNA, 30 bp, Artificial Sequence
  Synthetic oligonucleotide
aggggtgcgcaaggcgaaggaattgatagc

SEQ ID NO: 49260 - DNA, 30 bp, Artificial Sequence
  Synthetic oligonucleotide
cagagactggtaaagtatgagagaactagc

SEQ ID NO: 49261 - DNA, 30 bp, Artificial Sequence
  Synthetic oligonucleotide
cggaccactgcctgaaattacggcactagc

SEQ ID NO: 49262 - DNA, 30 bp, Artificial Sequence
  Synthetic oligonucleotide
gtaggagggtaatggggataagtggctagc

SEQ ID NO: 49263 - DNA, 30 bp, Artificial Sequence
  Synthetic oligonucleotide
aagcaaatgggatccatgcaatactctagc

SEQ ID NO: 49264 - DNA, 30 bp, Artificial Sequence
  Synthetic oligonucleotide
atggggcgggggtctgagattgtccgtagc

SEQ ID NO: 49265 - DNA, 30 bp, Artificial Sequence
  Synthetic oligonucleotide
caacgacgtcatgaattgataagaggtagc

SEQ ID NO: 49266 - DNA, 30 bp, Artificial Sequence
  Synthetic oligonucleotide
acgtcacattcctggtctgccaagattagc

SEQ ID NO: 49267 - DNA, 30 bp, Artificial Sequence
  Synthetic oligonucleotide
aatgtaggtaagagtatccatcgctttagc

SEQ ID NO: 49268 - DNA, 30 bp, Artificial Sequence
  Synthetic oligonucleotide
tcaaggtccattgggaaaatgcggaaacgc

SEQ ID NO: 49269 - DNA, 30 bp, Artificial Sequence
  Synthetic oligonucleotide
taagctgtcgaggacagtactcaacaacgc

SEQ ID NO: 49270 - DNA, 30 bp, Artificial Sequence
  Synthetic oligonucleotide
tacgtgagcccgtaacataattaccaacgc

SEQ ID NO: 49271 - DNA, 30 bp, Artificial Sequence
  Synthetic oligonucleotide
cacccgaaagcaagggccaaggagcaacgc

SEQ ID NO: 49272 - DNA, 30 bp, Artificial Sequence
  Synthetic oligonucleotide
aggactcgatctgtgtgttggcgataacgc

SEQ ID NO: 49273 - DNA, 30 bp, Artificial Sequence
  Synthetic oligonucleotide
gtgaaggatagattgtaacaatccacacgc

SEQ ID NO: 49274 - DNA, 30 bp, Artificial Sequence
  Synthetic oligonucleotide
acgacgtggtcggcagaaacttaaccacgc

SEQ ID NO: 49275 - DNA, 30 bp, Artificial Sequence
  Synthetic oligonucleotide
agggcagaaatctctggaagccgagtacgc

SEQ ID NO: 49276 - DNA, 30 bp, Artificial Sequence
  Synthetic oligonucleotide
cgactcagtcgcgacactacggaattacgc

SEQ ID NO: 49277 - DNA, 30 bp, Artificial Sequence
  Synthetic oligonucleotide
aggtccgagtactgtgggtataataaccgc

SEQ ID NO: 49278 - DNA, 30 bp, Artificial Sequence
  Synthetic oligonucleotide
tccaaacaatttgagcgacaacataaccgc

SEQ ID NO: 49279 - DNA, 30 bp, Artificial Sequence
  Synthetic oligonucleotide
cagaacgagtctcgatgctcttcaacccgc

SEQ ID NO: 49280 - DNA, 30 bp, Artificial Sequence
  Synthetic oligonucleotide
cgaagtataacaatagactgcagtccccgc

SEQ ID NO: 49281 - DNA, 30 bp, Artificial Sequence
  Synthetic oligonucleotide
ccgagtataagacagttcgacaactcccgc

SEQ ID NO: 49282 - DNA, 31 bp, Artificial Sequence
  Synthetic oligonucleotide
agcctaggactgagggtcataacgaggccgc

SEQ ID NO: 49283 - DNA, 30 bp, Artificial Sequence
  Synthetic oligonucleotide
cagaggaaacacccccagaattgtatccgc

SEQ ID NO: 49284 - DNA, 30 bp, Artificial Sequence
  Synthetic oligonucleotide
gaggctataaggggacgacggtaactccgc

SEQ ID NO: 49285 - DNA, 30 bp, Artificial Sequence
  Synthetic oligonucleotide
acgggccgctgagcgaacattgacctccgc

SEQ ID NO: 49286 - DNA, 30 bp, Artificial Sequence
  Synthetic oligonucleotide
ctggaagaggacgtagatggagtggtccgc

SEQ ID NO: 49287 - DNA, 30 bp, Artificial Sequence
  Synthetic oligonucleotide
tactcccggcccagggtcaaggagaagcgc

SEQ ID NO: 49288 - DNA, 30 bp, Artificial Sequence
  Synthetic oligonucleotide
tacttaagatgtgtgagagggaaccagcgc

SEQ ID NO: 49289 - DNA, 30 bp, Artificial Sequence
  Synthetic oligonucleotide
gtagagcgaaccaagatttcaaatcagcgc

SEQ ID NO: 49290 - DNA, 30 bp, Artificial Sequence
  Synthetic oligonucleotide
tggagagacatgggggtgagacgatagcgc

SEQ ID NO: 49291 - DNA, 30 bp, Artificial Sequence
  Synthetic oligonucleotide
agaacacgcaaccactgtgcgacaacgcgc

SEQ ID NO: 49292 - DNA, 30 bp, Artificial Sequence
  Synthetic oligonucleotide
gcttaggtcactggacgaggtcctccgcgc

SEQ ID NO: 49293 - DNA, 30 bp, Artificial Sequence
  Synthetic oligonucleotide
acccgcaggaggaatggtaagatacggcgc

SEQ ID NO: 49294 - DNA, 30 bp, Artificial Sequence
  Synthetic oligonucleotide
ccaattagagcgcaaccgaggaacatgcgc

SEQ ID NO: 49295 - DNA, 30 bp, Artificial Sequence
  Synthetic oligonucleotide
ggtgtgagaagagctaacactgaagtgcgc

SEQ ID NO: 49296 - DNA, 30 bp, Artificial Sequence
  Synthetic oligonucleotide
tgcctagccagaagaaggttcagtgatcgc

SEQ ID NO: 49297 - DNA, 30 bp, Artificial Sequence
  Synthetic oligonucleotide
gtgaccaagctttgaccaacggactatcgc

SEQ ID NO: 49298 - DNA, 30 bp, Artificial Sequence
  Synthetic oligonucleotide
gactagggtttagcgggaaatagaggtcgc

SEQ ID NO: 49299 - DNA, 30 bp, Artificial Sequence
  Synthetic oligonucleotide
ggcgtagtcccacgaactcgtgagggtcgc

SEQ ID NO: 49300 - DNA, 30 bp, Artificial Sequence
  Synthetic oligonucleotide
aagaaccgggattaaaagattgcgtgtcgc

SEQ ID NO: 49301 - DNA, 30 bp, Artificial Sequence
  Synthetic oligonucleotide
tcaccccggtgggtcgtcaaacacattcgc

SEQ ID NO: 49302 - DNA, 30 bp, Artificial Sequence
  Synthetic oligonucleotide
atgacgatgaaagagagttcgttggttcgc

SEQ ID NO: 49303 - DNA, 30 bp, Artificial Sequence
  Synthetic oligonucleotide
cgaggaggacgaactaggcgagctaaaggc

SEQ ID NO: 49304 - DNA, 30 bp, Artificial Sequence
  Synthetic oligonucleotide
acacgggacaagaccacttcgtttaaaggc

SEQ ID NO: 49305 - DNA, 30 bp, Artificial Sequence
  Synthetic oligonucleotide
tcgagtaatcaacgggggtcaatggaaggc

SEQ ID NO: 49306 - DNA, 30 bp, Artificial Sequence
  Synthetic oligonucleotide
tccgaagagcccacctcaagaggcacaggc

SEQ ID NO: 49307 - DNA, 30 bp, Artificial Sequence
  Synthetic oligonucleotide
gaaagggcccacactaagcataaagcaggc

SEQ ID NO: 49308 - DNA, 30 bp, Artificial Sequence
  Synthetic oligonucleotide
tcatgaaaaccctaccagcaagtacgaggc

SEQ ID NO: 49309 - DNA, 30 bp, Artificial Sequence
  Synthetic oligonucleotide
gggtaaggtactgtacataaaggaggaggc

SEQ ID NO: 49310 - DNA, 30 bp, Artificial Sequence
  Synthetic oligonucleotide
aatacaacaggtatatatctggagggaggc

SEQ ID NO: 49311 - DNA, 30 bp, Artificial Sequence
  Synthetic oligonucleotide
gcgcgatagcgcgaaagctaagattgaggc

SEQ ID NO: 49312 - DNA, 30 bp, Artificial Sequence
  Synthetic oligonucleotide
gctggaacgtaacatgaagagagagtaggc

SEQ ID NO: 49313 - DNA, 30 bp, Artificial Sequence
  Synthetic oligonucleotide
cgtagaacatgttcatgctaaaggtacggc

SEQ ID NO: 49314 - DNA, 30 bp, Artificial Sequence
  Synthetic oligonucleotide
ggagacccttcgaattgaatgcataccggc

SEQ ID NO: 49315 - DNA, 30 bp, Artificial Sequence
  Synthetic oligonucleotide
gggtcagaaggagaattggaagctcccggc

SEQ ID NO: 49316 - DNA, 30 bp, Artificial Sequence
  Synthetic oligonucleotide
aagtgaaggcccatatcctgcgctgccggc

SEQ ID NO: 49317 - DNA, 30 bp, Artificial Sequence
  Synthetic oligonucleotide
ggtgatcgtcgaaaggtatggcttgccggc

SEQ ID NO: 49318 - DNA, 30 bp, Artificial Sequence
  Synthetic oligonucleotide
cccacgagggcaaggtcgtgaaagtccggc

SEQ ID NO: 49319 - DNA, 30 bp, Artificial Sequence
  Synthetic oligonucleotide
cgaacctaccaaagatcatcaccgagcggc

SEQ ID NO: 49320 - DNA, 30 bp, Artificial Sequence
  Synthetic oligonucleotide
ttgcaaaatccgagcgacggtcaccgcggc

SEQ ID NO: 49321 - DNA, 30 bp, Artificial Sequence
  Synthetic oligonucleotide
agctccaaggactatgggcaactaggcggc

SEQ ID NO: 49322 - DNA, 30 bp, Artificial Sequence
  Synthetic oligonucleotide
taggaacggaagcgagggcgtaatggcggc

SEQ ID NO: 49323 - DNA, 30 bp, Artificial Sequence
  Synthetic oligonucleotide
cactgaggcttagaagcaaacgcctgcggc

SEQ ID NO: 49324 - DNA, 30 bp, Artificial Sequence
  Synthetic oligonucleotide
taacgcctggttagtccacaaaggtgcggc

SEQ ID NO: 49325 - DNA, 30 bp, Artificial Sequence
  Synthetic oligonucleotide
cgagtcagggttatcaataagacggtcggc

SEQ ID NO: 49326 - DNA, 30 bp, Artificial Sequence
  Synthetic oligonucleotide
tgtgaaacctcaactggctaaagcgagggc

SEQ ID NO: 49327 - DNA, 30 bp, Artificial Sequence
  Synthetic oligonucleotide
gcgtgaaacgttgcagtagacagggagggc

SEQ ID NO: 49328 - DNA, 30 bp, Artificial Sequence
  Synthetic oligonucleotide
cgtcgtccacgctcaaccgaaaaatagggc

SEQ ID NO: 49329 - DNA, 30 bp, Artificial Sequence
  Synthetic oligonucleotide
gcggaagcaaagatgcatcaataaccgggc

SEQ ID NO: 49330 - DNA, 30 bp, Artificial Sequence
  Synthetic oligonucleotide
tgtacagaatttggaactagaattgcgggc

SEQ ID NO: 49331 - DNA, 30 bp, Artificial Sequence
  Synthetic oligonucleotide
accacgagaaagctcacataaccatcgggc

SEQ ID NO: 49332 - DNA, 30 bp, Artificial Sequence
  Synthetic oligonucleotide
caaacaggatggatagtcaagccgtcgggc

SEQ ID NO: 49333 - DNA, 30 bp, Artificial Sequence
  Synthetic oligonucleotide
gacggtgggtagtttcgaaatgcaaggggc

SEQ ID NO: 49334 - DNA, 30 bp, Artificial Sequence
  Synthetic oligonucleotide
cgtgagtgaggatgcgcaaaccagcggggc

SEQ ID NO: 49335 - DNA, 30 bp, Artificial Sequence
  Synthetic oligonucleotide
ccaagggaattcccggacgatatagggggc

SEQ ID NO: 49336 - DNA, 30 bp, Artificial Sequence
  Synthetic oligonucleotide
cgcgacgtcgggatcacggatgttgggggc

SEQ ID NO: 49337 - DNA, 30 bp, Artificial Sequence
  Synthetic oligonucleotide
gacgacacgccacgagatatttacatgggc

SEQ ID NO: 49338 - DNA, 30 bp, Artificial Sequence
  Synthetic oligonucleotide
atgacttggcattaaacatgaatgaatggc

SEQ ID NO: 49339 - DNA, 30 bp, Artificial Sequence
  Synthetic oligonucleotide
aggcttagatggcagaggagtggggatggc

SEQ ID NO: 49340 - DNA, 30 bp, Artificial Sequence
  Synthetic oligonucleotide
ctgaaaatggagaagtcgtgcgtggatggc

SEQ ID NO: 49341 - DNA, 30 bp, Artificial Sequence
  Synthetic oligonucleotide
gggatgcaagattgcgaggaaccaactggc

SEQ ID NO: 49342 - DNA, 30 bp, Artificial Sequence
  Synthetic oligonucleotide
gaacgtcaggcggcgagtaggcggactggc

SEQ ID NO: 49343 - DNA, 30 bp, Artificial Sequence
  Synthetic oligonucleotide
ttgaggttgaggcgaatgagagctactggc

SEQ ID NO: 49344 - DNA, 30 bp, Artificial Sequence
  Synthetic oligonucleotide
caatggataaacacctgctagttagctggc

SEQ ID NO: 49345 - DNA, 30 bp, Artificial Sequence
  Synthetic oligonucleotide
atgaaattatgtatctaccatacgtctggc

SEQ ID NO: 49346 - DNA, 30 bp, Artificial Sequence
  Synthetic oligonucleotide
gtggggaggccgactcgtcattagagtggc

SEQ ID NO: 49347 - DNA, 30 bp, Artificial Sequence
  Synthetic oligonucleotide
ctctagatgagaaccaagcgggcgagtggc

SEQ ID NO: 49348 - DNA, 30 bp, Artificial Sequence
  Synthetic oligonucleotide
gcgggacgtacctaacgatcactatgtggc

SEQ ID NO: 49349 - DNA, 30 bp, Artificial Sequence
  Synthetic oligonucleotide
agtaaagcggtagtgccaacggcctgtggc

SEQ ID NO: 49350 - DNA, 30 bp, Artificial Sequence
  Synthetic oligonucleotide
cgcgtcaacctagggcaatatcagtgtggc

SEQ ID NO: 49351 - DNA, 30 bp, Artificial Sequence
  Synthetic oligonucleotide
gttcgagcgacagggttgtgatcgcaatgc

SEQ ID NO: 49352 - DNA, 30 bp, Artificial Sequence
  Synthetic oligonucleotide
gagcaagtgccaaagcacaggtactaatgc

SEQ ID NO: 49353 - DNA, 30 bp, Artificial Sequence
  Synthetic oligonucleotide
cctatctcacaggcaatcgaaatctaatgc

SEQ ID NO: 49354 - DNA, 30 bp, Artificial Sequence
  Synthetic oligonucleotide
gggaggctcagatcaacctagctatcatgc

SEQ ID NO: 49355 - DNA, 30 bp, Artificial Sequence
  Synthetic oligonucleotide
taactacggaggttaggaaggtcctcatgc

SEQ ID NO: 49356 - DNA, 30 bp, Artificial Sequence
  Synthetic oligonucleotide
acgtgcacataaatacgaccctcgcgatgc

SEQ ID NO: 49357 - DNA, 30 bp, Artificial Sequence
  Synthetic oligonucleotide
gggaagaatcgggtcgagcttcacggatgc

SEQ ID NO: 49358 - DNA, 30 bp, Artificial Sequence
  Synthetic oligonucleotide
acgagtaatggagtctacactgggggatgc

SEQ ID NO: 49359 - DNA, 30 bp, Artificial Sequence
  Synthetic oligonucleotide
aacgataggccttcggcgacctccgtatgc

SEQ ID NO: 49360 - DNA, 30 bp, Artificial Sequence
  Synthetic oligonucleotide
ggaggattaagtacggaagtcagacactgc

SEQ ID NO: 49361 - DNA, 30 bp, Artificial Sequence
  Synthetic oligonucleotide
tgcactagtcggacagaggagaacacctgc

SEQ ID NO: 49362 - DNA, 30 bp, Artificial Sequence
  Synthetic oligonucleotide
gcgtcaaggttttattgagggagtagctgc

SEQ ID NO: 49363 - DNA, 30 bp, Artificial Sequence
  Synthetic oligonucleotide
atcgcggagcatcgaggatggtgattctgc

SEQ ID NO: 49364 - DNA, 30 bp, Artificial Sequence
  Synthetic oligonucleotide
agacggggcccgagcaaccatgcagagtgc

SEQ ID NO: 49365 - DNA, 30 bp, Artificial Sequence
  Synthetic oligonucleotide
tcggtactcccgaatcactatgttgagtgc

SEQ ID NO: 49366 - DNA, 30 bp, Artificial Sequence
  Synthetic oligonucleotide
gaaaggtggaattaaaccataacgacgtgc

SEQ ID NO: 49367 - DNA, 30 bp, Artificial Sequence
  Synthetic oligonucleotide
ggacataggatgaccccaacttgaccgtgc

SEQ ID NO: 49368 - DNA, 30 bp, Artificial Sequence
  Synthetic oligonucleotide
atgatttaggggacacacgaaaactcgtgc

SEQ ID NO: 49369 - DNA, 30 bp, Artificial Sequence
  Synthetic oligonucleotide
actagtggtatgtgagtattaaggtcgtgc

SEQ ID NO: 49370 - DNA, 30 bp, Artificial Sequence
  Synthetic oligonucleotide
aggttacaccctcatgtcttcaaaaggtgc

SEQ ID NO: 49371 - DNA, 30 bp, Artificial Sequence
  Synthetic oligonucleotide
catggaaagaatgtcacctctccaaggtgc

SEQ ID NO: 49372 - DNA, 30 bp, Artificial Sequence
  Synthetic oligonucleotide
gtcaatgagcgaggattcgctggcaggtgc

SEQ ID NO: 49373 - DNA, 30 bp, Artificial Sequence
  Synthetic oligonucleotide
atagcaaagaagcagatatacgtgaggtgc

SEQ ID NO: 49374 - DNA, 30 bp, Artificial Sequence
  Synthetic oligonucleotide
tggcgtcgtgaagccggagatgataggtgc

SEQ ID NO: 49375 - DNA, 30 bp, Artificial Sequence
  Synthetic oligonucleotide
ctacgactctgtgagtctccaagtgggtgc

SEQ ID NO: 49376 - DNA, 30 bp, Artificial Sequence
  Synthetic oligonucleotide
aggaactacatgctcgggaaggtgatgtgc

SEQ ID NO: 49377 - DNA, 30 bp, Artificial Sequence
  Synthetic oligonucleotide
ggcacggagcccgaaccacagcctatgtgc

SEQ ID NO: 49378 - DNA, 30 bp, Artificial Sequence
  Synthetic oligonucleotide
acacccttttagaagaataaagacgtgtgc

SEQ ID NO: 49379 - DNA, 30 bp, Artificial Sequence
  Synthetic oligonucleotide
cggactcactgcataggctgcctgaattgc

SEQ ID NO: 49380 - DNA, 30 bp, Artificial Sequence
  Synthetic oligonucleotide
catgacatggacgggaaggagcttacttgc

SEQ ID NO: 49381 - DNA, 30 bp, Artificial Sequence
  Synthetic oligonucleotide
gcacgaatgacggcaaacactgggagttgc

SEQ ID NO: 49382 - DNA, 30 bp, Artificial Sequence
  Synthetic oligonucleotide
gagggaaaggagcggagatcagtacgttgc

SEQ ID NO: 49383 - DNA, 30 bp, Artificial Sequence
  Synthetic oligonucleotide
catagtgtgatccattaccagtaaggttgc

SEQ ID NO: 49384 - DNA, 30 bp, Artificial Sequence
  Synthetic oligonucleotide
ccggccaccacagggtcaggaaaatgttgc

SEQ ID NO: 49385 - DNA, 30 bp, Artificial Sequence
  Synthetic oligonucleotide
ggaataggcgaagtatagtagctgatttgc

SEQ ID NO: 49386 - DNA, 30 bp, Artificial Sequence
  Synthetic oligonucleotide
tgggacatctggtatagaaagggattttgc

SEQ ID NO: 49387 - DNA, 30 bp, Artificial Sequence
  Synthetic oligonucleotide
acgggtctaaaggatatcgggcgtaaaatc

SEQ ID NO: 49388 - DNA, 30 bp, Artificial Sequence
  Synthetic oligonucleotide
gtcaacgtctagaacgggaatcatcaaatc

SEQ ID NO: 49389 - DNA, 30 bp, Artificial Sequence
  Synthetic oligonucleotide
gcgtacaatcaggactgccaggcaacaatc

SEQ ID NO: 49390 - DNA, 30 bp, Artificial Sequence
  Synthetic oligonucleotide
ggatggcagggcctgactcacaatacaatc

SEQ ID NO: 49391 - DNA, 30 bp, Artificial Sequence
  Synthetic oligonucleotide
gtaacggcggactatcaacgggcagcaatc

SEQ ID NO: 49392 - DNA, 30 bp, Artificial Sequence
  Synthetic oligonucleotide
cgtagggtaaagaacaggatgacaagaatc

SEQ ID NO: 49393 - DNA, 30 bp, Artificial Sequence
  Synthetic oligonucleotide
gcggtgaggggtgtacacaagctccgaatc

SEQ ID NO: 49394 - DNA, 30 bp, Artificial Sequence
  Synthetic oligonucleotide
aagcgaaatgagcacccgggcaaaggaatc

SEQ ID NO: 49395 - DNA, 30 bp, Artificial Sequence
  Synthetic oligonucleotide
aggaattaccctcacaagctcctcggaatc

SEQ ID NO: 49396 - DNA, 30 bp, Artificial Sequence
  Synthetic oligonucleotide
gcgtccatgacgatgtaaagaagtggaatc

SEQ ID NO: 49397 - DNA, 30 bp, Artificial Sequence
  Synthetic oligonucleotide
agaaaggaaatggtgagtaacggatgaatc

SEQ ID NO: 49398 - DNA, 30 bp, Artificial Sequence
  Synthetic oligonucleotide
cgtaaaaagggacccgcacgcccaataatc

SEQ ID NO: 49399 - DNA, 30 bp, Artificial Sequence
  Synthetic oligonucleotide
aggaatcaccttctccaattaacgataatc

SEQ ID NO: 49400 - DNA, 30 bp, Artificial Sequence
  Synthetic oligonucleotide
cagcaatggatcgatggccagtagctaatc

SEQ ID NO: 49401 - DNA, 30 bp, Artificial Sequence
  Synthetic oligonucleotide
gtgcaaaacagtccctctaagtagaacatc

SEQ ID NO: 49402 - DNA, 30 bp, Artificial Sequence
  Synthetic oligonucleotide
agctacagcaatcgttacccgtgccacatc

SEQ ID NO: 49403 - DNA, 30 bp, Artificial Sequence
  Synthetic oligonucleotide
acatacggggtgagaagacatatatacatc

SEQ ID NO: 49404 - DNA, 30 bp, Artificial Sequence
  Synthetic oligonucleotide
cgatgggataggcaacgattagtgaccatc

SEQ ID NO: 49405 - DNA, 30 bp, Artificial Sequence
  Synthetic oligonucleotide
aggctcaatttagaaatctactaagccatc

SEQ ID NO: 49406 - DNA, 30 bp, Artificial Sequence
  Synthetic oligonucleotide
cattcctgcgaccaggggtctgcgagcatc

SEQ ID NO: 49407 - DNA, 30 bp, Artificial Sequence
  Synthetic oligonucleotide
cagagccagagggcattgcctagatgcatc

SEQ ID NO: 49408 - DNA, 30 bp, Artificial Sequence
  Synthetic oligonucleotide
atactgtcgagccgcgtcacaagcgagatc

SEQ ID NO: 49409 - DNA, 30 bp, Artificial Sequence
  Synthetic oligonucleotide
caacatagtgcaagaggtatccttgagatc

SEQ ID NO: 49410 - DNA, 30 bp, Artificial Sequence
  Synthetic oligonucleotide
aatcgaatagcttagaagcgaagtacgatc

SEQ ID NO: 49411 - DNA, 30 bp, Artificial Sequence
  Synthetic oligonucleotide
cgaacgaaaggatagtgagcgagaccgatc

SEQ ID NO: 49412 - DNA, 30 bp, Artificial Sequence
  Synthetic oligonucleotide
gccatagcatggcggagaatctaggcgatc

SEQ ID NO: 49413 - DNA, 30 bp, Artificial Sequence
  Synthetic oligonucleotide
gcattcaagagacaggcaggtaacaggatc

SEQ ID NO: 49414 - DNA, 30 bp, Artificial Sequence
  Synthetic oligonucleotide
tatatgcaggcacagaggctaagacggatc

SEQ ID NO: 49415 - DNA, 30 bp, Artificial Sequence
  Synthetic oligonucleotide
cacgtcgtccacggatatctgagccggatc

SEQ ID NO: 49416 - DNA, 30 bp, Artificial Sequence
  Synthetic oligonucleotide
caagtcgaggatccaaagatcttggggatc

SEQ ID NO: 49417 - DNA, 30 bp, Artificial Sequence
  Synthetic oligonucleotide
agcctggaaagagaaacccatgcgtggatc

SEQ ID NO: 49418 - DNA, 30 bp, Artificial Sequence
  Synthetic oligonucleotide
ggttagtaacacaagagcattgaggtgatc

SEQ ID NO: 49419 - DNA, 30 bp, Artificial Sequence
  Synthetic oligonucleotide
acaaggcacttggctgtcctagcacatatc

SEQ ID NO: 49420 - DNA, 30 bp, Artificial Sequence
  Synthetic oligonucleotide
actgtcgtgggctaggtcagggctcatatc

SEQ ID NO: 49421 - DNA, 30 bp, Artificial Sequence
  Synthetic oligonucleotide
aggggttttacagagagataacgagatatc

SEQ ID NO: 49422 - DNA, 30 bp, Artificial Sequence
  Synthetic oligonucleotide
tcagaagtgcgaactacagtgatacctatc

SEQ ID NO: 49423 - DNA, 30 bp, Artificial Sequence
  Synthetic oligonucleotide
gtcacggaacgggactgtattatgagtatc

SEQ ID NO: 49424 - DNA, 30 bp, Artificial Sequence
  Synthetic oligonucleotide
gcagacaggtgtgccgacaaaacagttatc

SEQ ID NO: 49425 - DNA, 30 bp, Artificial Sequence
  Synthetic oligonucleotide
atcacgggtctgggaattatgtaagcactc

SEQ ID NO: 49426 - DNA, 30 bp, Artificial Sequence
  Synthetic oligonucleotide
ggatcccaaaacgcataaactaaaagactc

SEQ ID NO: 49427 - DNA, 30 bp, Artificial Sequence
  Synthetic oligonucleotide
aagtgggattacggaataatgctccgactc

SEQ ID NO: 49428 - DNA, 30 bp, Artificial Sequence
  Synthetic oligonucleotide
atgtaagcacaaacagtccgaacgcgactc

SEQ ID NO: 49429 - DNA, 30 bp, Artificial Sequence
  Synthetic oligonucleotide
cggtagtggtggaaaacttgtgatggactc

SEQ ID NO: 49430 - DNA, 30 bp, Artificial Sequence
  Synthetic oligonucleotide
aacgtacacatgcgagccaacaatatactc

SEQ ID NO: 49431 - DNA, 30 bp, Artificial Sequence
  Synthetic oligonucleotide
taaggtgaataagaaggagtgtcggtactc

SEQ ID NO: 49432 - DNA, 30 bp, Artificial Sequence
  Synthetic oligonucleotide
acagcgaaatcccaggcaaaacatcacctc

SEQ ID NO: 49433 - DNA, 30 bp, Artificial Sequence
  Synthetic oligonucleotide
agggcaaacagacccaaggcgatatacctc

SEQ ID NO: 49434 - DNA, 30 bp, Artificial Sequence
  Synthetic oligonucleotide
tcaccgaataatacctctcagtctcgcctc

SEQ ID NO: 49435 - DNA, 30 bp, Artificial Sequence
  Synthetic oligonucleotide
ccgcaaaggaacatctatacgccgtgcctc

SEQ ID NO: 49436 - DNA, 30 bp, Artificial Sequence
  Synthetic oligonucleotide
gcgtaggggcacgagtgggtgctgatcctc

SEQ ID NO: 49437 - DNA, 30 bp, Artificial Sequence
  Synthetic oligonucleotide
atgtacaacttgcaaggaacgaatatcctc

SEQ ID NO: 49438 - DNA, 30 bp, Artificial Sequence
  Synthetic oligonucleotide
gatgagtgaagtggctagcctgataagctc

SEQ ID NO: 49439 - DNA, 30 bp, Artificial Sequence
  Synthetic oligonucleotide
gtaacgcgattgtaataaagtaaagagctc

SEQ ID NO: 49440 - DNA, 30 bp, Artificial Sequence
  Synthetic oligonucleotide
acaggacaggtgataaggcagcccacgctc

SEQ ID NO: 49441 - DNA, 30 bp, Artificial Sequence
  Synthetic oligonucleotide
agagcggtatacgcttcaggaccgacgctc

SEQ ID NO: 49442 - DNA, 30 bp, Artificial Sequence
  Synthetic oligonucleotide
ttggcgaatagagtacgttcacatccgctc

SEQ ID NO: 49443 - DNA, 30 bp, Artificial Sequence
  Synthetic oligonucleotide
ttcgcgggggcggaaaagttcgttgcgctc

SEQ ID NO: 49444 - DNA, 30 bp, Artificial Sequence
  Synthetic oligonucleotide
ggatccacctaaaaacagccctgatcgctc

SEQ ID NO: 49445 - DNA, 30 bp, Artificial Sequence
  Synthetic oligonucleotide
ctcgtggcaaatcaaatgggatgccggctc

SEQ ID NO: 49446 - DNA, 30 bp, Artificial Sequence
  Synthetic oligonucleotide
ggtggacaagtattggaaaagggaactctc

SEQ ID NO: 49447 - DNA, 30 bp, Artificial Sequence
  Synthetic oligonucleotide
ccgattaataggacaaacacgatctgtctc

SEQ ID NO: 49448 - DNA, 30 bp, Artificial Sequence
  Synthetic oligonucleotide
acagtagggcgacatgcaagatagaaagtc

SEQ ID NO: 49449 - DNA, 30 bp, Artificial Sequence
  Synthetic oligonucleotide
taagccactccgtaaacacttgcagaagtc

SEQ ID NO: 49450 - DNA, 30 bp, Artificial Sequence
  Synthetic oligonucleotide
caggatgagaaggatttcaaaagtgaagtc

SEQ ID NO: 49451 - DNA, 30 bp, Artificial Sequence
  Synthetic oligonucleotide
cggtagacgcgatacaagaacggaacagtc

SEQ ID NO: 49452 - DNA, 30 bp, Artificial Sequence
  Synthetic oligonucleotide
ggtgaggagacggattcgtgaggcacagtc

SEQ ID NO: 49453 - DNA, 30 bp, Artificial Sequence
  Synthetic oligonucleotide
tcgcataagggagttattcaaaggacagtc

SEQ ID NO: 49454 - DNA, 30 bp, Artificial Sequence
  Synthetic oligonucleotide
aaggggaaaaacattcacccttgcccagtc

SEQ ID NO: 49455 - DNA, 30 bp, Artificial Sequence
  Synthetic oligonucleotide
acaacgaggtaatttggaggcatatcagtc

SEQ ID NO: 49456 - DNA, 30 bp, Artificial Sequence
  Synthetic oligonucleotide
cgcggaacgcactaggaccacgccagagtc

SEQ ID NO: 49457 - DNA, 30 bp, Artificial Sequence
  Synthetic oligonucleotide
actggcccaagtagactggctaaacgagtc

SEQ ID NO: 49458 - DNA, 30 bp, Artificial Sequence
  Synthetic oligonucleotide
gatacaccacatcataggggcgtacgagtc

SEQ ID NO: 49459 - DNA, 30 bp, Artificial Sequence
  Synthetic oligonucleotide
tcggtgtcgccaggtaaacgtaatcgagtc

SEQ ID NO: 49460 - DNA, 30 bp, Artificial Sequence
  Synthetic oligonucleotide
gtcggttgcgaataggaaaatcagggagtc

SEQ ID NO: 49461 - DNA, 30 bp, Artificial Sequence
  Synthetic oligonucleotide
actcgagcggatgagtatagagaaatagtc

SEQ ID NO: 49462 - DNA, 30 bp, Artificial Sequence
  Synthetic oligonucleotide
gggcgtcaagaggttagggagactatagtc

SEQ ID NO: 49463 - DNA, 30 bp, Artificial Sequence
  Synthetic oligonucleotide
gtgagggtagtacagaaggctaggctagtc

SEQ ID NO: 49464 - DNA, 30 bp, Artificial Sequence
  Synthetic oligonucleotide
ggaaaggtacaaatcaataacctagtagtc

SEQ ID NO: 49465 - DNA, 30 bp, Artificial Sequence
  Synthetic oligonucleotide
caacacccacgcggggaatctgagttagtc

SEQ ID NO: 49466 - DNA, 30 bp, Artificial Sequence
  Synthetic oligonucleotide
gattgggggggaaaattgacgacatacgtc

SEQ ID NO: 49467 - DNA, 30 bp, Artificial Sequence
  Synthetic oligonucleotide
attaggccggactatggggactgatacgtc

SEQ ID NO: 49468 - DNA, 30 bp, Artificial Sequence
  Synthetic oligonucleotide
cgcgtcaaccgaactcgatatttagccgtc

SEQ ID NO: 49469 - DNA, 30 bp, Artificial Sequence
  Synthetic oligonucleotide
gccgaaattcggggtacgaaacaggccgtc

SEQ ID NO: 49470 - DNA, 30 bp, Artificial Sequence
  Synthetic oligonucleotide
ctaagttgtgaatggaggacactatccgtc

SEQ ID NO: 49471 - DNA, 30 bp, Artificial Sequence
  Synthetic oligonucleotide
ccaacgatagtccctaattaaataggcgtc

SEQ ID NO: 49472 - DNA, 30 bp, Artificial Sequence
  Synthetic oligonucleotide
cgcttaatgaagattggtgcagggtgcgtc

SEQ ID NO: 49473 - DNA, 30 bp, Artificial Sequence
  Synthetic oligonucleotide
catgatgcgaaggcaatcgatagactcgtc

SEQ ID NO: 49474 - DNA, 30 bp, Artificial Sequence
  Synthetic oligonucleotide
cgttaaccaccatgggaggttcccgtcgtc

SEQ ID NO: 49475 - DNA, 30 bp, Artificial Sequence
  Synthetic oligonucleotide
gcatcgaggtcgtataataacaatcaggtc

SEQ ID NO: 49476 - DNA, 30 bp, Artificial Sequence
  Synthetic oligonucleotide
gaatggatacgagtaaatcgggaggcggtc

SEQ ID NO: 49477 - DNA, 30 bp, Artificial Sequence
  Synthetic oligonucleotide
acatggaacagtctatgttattgatcggtc

SEQ ID NO: 49478 - DNA, 30 bp, Artificial Sequence
  Synthetic oligonucleotide
agtaagaagcgacgaaaggttggttcggtc

SEQ ID NO: 49479 - DNA, 30 bp, Artificial Sequence
  Synthetic oligonucleotide
cggtagtgttaaaagtattaacgggatgtc

SEQ ID NO: 49480 - DNA, 30 bp, Artificial Sequence
  Synthetic oligonucleotide
taagcgtggaactggtccacagggactgtc

SEQ ID NO: 49481 - DNA, 30 bp, Artificial Sequence
  Synthetic oligonucleotide
agacaacaagcaacgtcggactgagctgtc

SEQ ID NO: 49482 - DNA, 30 bp, Artificial Sequence
  Synthetic oligonucleotide
ttgggtaagcggtgtccgaatcactctgtc

SEQ ID NO: 49483 - DNA, 30 bp, Artificial Sequence
  Synthetic oligonucleotide
tcagggtctgaatgatacgatacaggtgtc

SEQ ID NO: 49484 - DNA, 31 bp, Artificial Sequence
  Synthetic oligonucleotide
atcgaggaacgctccgtatgaactgtgtgtc

SEQ ID NO: 49485 - DNA, 30 bp, Artificial Sequence
  Synthetic oligonucleotide
gcgtacaatgcgatttcatgaagttgtgtc

SEQ ID NO: 49486 - DNA, 30 bp, Artificial Sequence
  Synthetic oligonucleotide
gggccacgacaaaatctgcacctacaattc

SEQ ID NO: 49487 - DNA, 30 bp, Artificial Sequence
  Synthetic oligonucleotide
gaacgcgggctcagcatcggatgtacattc

SEQ ID NO: 49488 - DNA, 30 bp, Artificial Sequence
  Synthetic oligonucleotide
ctgagggggcagggtgtgatcatatgattc

SEQ ID NO: 49489 - DNA, 30 bp, Artificial Sequence
  Synthetic oligonucleotide
gcgccgtgcagagttggtcgcgtcgtattc

SEQ ID NO: 49490 - DNA, 30 bp, Artificial Sequence
  Synthetic oligonucleotide
ggaggagtttgaggatagtggggtgccttc

SEQ ID NO: 49491 - DNA, 30 bp, Artificial Sequence
  Synthetic oligonucleotide
ttagattagaaaaaagtaaaggccagcttc

SEQ ID NO: 49492 - DNA, 30 bp, Artificial Sequence
  Synthetic oligonucleotide
ccggaaaacttgagccaccgaatgcgcttc

SEQ ID NO: 49493 - DNA, 30 bp, Artificial Sequence
  Synthetic oligonucleotide
acgcggtgaactagacggatcgatgtcttc

SEQ ID NO: 49494 - DNA, 30 bp, Artificial Sequence
  Synthetic oligonucleotide
gacgacataatttagtgagttccgtagttc

SEQ ID NO: 49495 - DNA, 30 bp, Artificial Sequence
  Synthetic oligonucleotide
gctacgacagaatacattcgacctcggttc

SEQ ID NO: 49496 - DNA, 30 bp, Artificial Sequence
  Synthetic oligonucleotide
gcgccgtaaacgtaacgagacctagatttc

SEQ ID NO: 49497 - DNA, 30 bp, Artificial Sequence
  Synthetic oligonucleotide
acgcgaactctcgcttgatccgtctctttc

SEQ ID NO: 49498 - DNA, 30 bp, Artificial Sequence
  Synthetic oligonucleotide
acgtgaacctcaggtaatggaaattgtttc

SEQ ID NO: 49499 - DNA, 30 bp, Artificial Sequence
  Synthetic oligonucleotide
taggaagtccaagaaggacagttagttttc

SEQ ID NO: 49500 - DNA, 30 bp, Artificial Sequence
  Synthetic oligonucleotide
cgggagaacgtgcgaagcggccaatttttc

SEQ ID NO: 49501 - DNA, 30 bp, Artificial Sequence
  Synthetic oligonucleotide
tctaacagggtctagagcgagcgaaaaaag

SEQ ID NO: 49502 - DNA, 30 bp, Artificial Sequence
  Synthetic oligonucleotide
tcttcgaaacgattacaacgattcaaaaag

SEQ ID NO: 49503 - DNA, 30 bp, Artificial Sequence
  Synthetic oligonucleotide
tgacagaacaaggggtcacaaatgaaaaag

SEQ ID NO: 49504 - DNA, 30 bp, Artificial Sequence
  Synthetic oligonucleotide
aggtcaaacatagcgatggagctgaaaaag

SEQ ID NO: 49505 - DNA, 30 bp, Artificial Sequence
  Synthetic oligonucleotide
gttaagataggggaccgataagtacaaaag

SEQ ID NO: 49506 - DNA, 30 bp, Artificial Sequence
  Synthetic oligonucleotide
caaatgagcgttaggtaagggtaccaaaag

SEQ ID NO: 49507 - DNA, 30 bp, Artificial Sequence
  Synthetic oligonucleotide
catcggttggtttgcaagggaacgcaaaag

SEQ ID NO: 49508 - DNA, 30 bp, Artificial Sequence
  Synthetic oligonucleotide
cgactctacgggaaatgaaaacaataaaag

SEQ ID NO: 49509 - DNA, 30 bp, Artificial Sequence
  Synthetic oligonucleotide
gtatactggggagcgaggacctcataaaag

SEQ ID NO: 49510 - DNA, 30 bp, Artificial Sequence
  Synthetic oligonucleotide
agagaatagtagtagtatctcgattaaaag

SEQ ID NO: 49511 - DNA, 30 bp, Artificial Sequence
  Synthetic oligonucleotide
tgcgcgaccgaaccgttcctaaatacaaag

SEQ ID NO: 49512 - DNA, 30 bp, Artificial Sequence
  Synthetic oligonucleotide
atgcagaggcgcaatagttgccatccaaag

SEQ ID NO: 49513 - DNA, 30 bp, Artificial Sequence
  Synthetic oligonucleotide
caacgtgaggcgcgtacgggtgctccaaag

SEQ ID NO: 49514 - DNA, 30 bp, Artificial Sequence
  Synthetic oligonucleotide
gtgtagacaactgtaacacgaagcgcaaag

SEQ ID NO: 49515 - DNA, 31 bp, Artificial Sequence
  Synthetic oligonucleotide
tgggatacttcaagagggaattaaaagaaag

SEQ ID NO: 49516 - DNA, 30 bp, Artificial Sequence
  Synthetic oligonucleotide
aagacaagatattcgggtaggcgaagaaag

SEQ ID NO: 49517 - DNA, 30 bp, Artificial Sequence
  Synthetic oligonucleotide
ccaattgggtctaagctgtctcgaagaaag

SEQ ID NO: 49518 - DNA, 30 bp, Artificial Sequence
  Synthetic oligonucleotide
tgcggcgcccgtagtcactcgaagcgaaag

SEQ ID NO: 49519 - DNA, 30 bp, Artificial Sequence
  Synthetic oligonucleotide
cactgactgacagtccttaggccttgaaag

SEQ ID NO: 49520 - DNA, 30 bp, Artificial Sequence
  Synthetic oligonucleotide
aatcgtacgggcgcggaactcgtgctaaag

SEQ ID NO: 49521 - DNA, 30 bp, Artificial Sequence
  Synthetic oligonucleotide
tcgtatacactggctgtccgaaacgtaaag

SEQ ID NO: 49522 - DNA, 30 bp, Artificial Sequence
  Synthetic oligonucleotide
ggtcgggtccgttctgaatgagtggtaaag

SEQ ID NO: 49523 - DNA, 30 bp, Artificial Sequence
  Synthetic oligonucleotide
ggtagagctatatcgggaaccaaattaaag

SEQ ID NO: 49524 - DNA, 30 bp, Artificial Sequence
  Synthetic oligonucleotide
cacgttgcaggcactactcggttcaacaag

SEQ ID NO: 49525 - DNA, 30 bp, Artificial Sequence
  Synthetic oligonucleotide
atgcgacaacgccgtgatgcgtgtcacaag

SEQ ID NO: 49526 - DNA, 30 bp, Artificial Sequence
  Synthetic oligonucleotide
actcgagcaggataacaatctgttcacaag

SEQ ID NO: 49527 - DNA, 30 bp, Artificial Sequence
  Synthetic oligonucleotide
tccgcaaatgggcactctgagcattacaag

SEQ ID NO: 49528 - DNA, 30 bp, Artificial Sequence
  Synthetic oligonucleotide
cctgatctatgcgtcgttgaacccaccaag

SEQ ID NO: 49529 - DNA, 30 bp, Artificial Sequence
  Synthetic oligonucleotide
aacaagcgtacacacaatcaaaaccccaag

SEQ ID NO: 49530 - DNA, 30 bp, Artificial Sequence
  Synthetic oligonucleotide
cgcctacgatggtaatgatggattcccaag

SEQ ID NO: 49531 - DNA, 30 bp, Artificial Sequence
  Synthetic oligonucleotide
acttcggagaagcggaagggcttagccaag

SEQ ID NO: 49532 - DNA, 30 bp, Artificial Sequence
  Synthetic oligonucleotide
ctgcccagggcgatacggggacgggccaag

SEQ ID NO: 49533 - DNA, 31 bp, Artificial Sequence
  Synthetic oligonucleotide
cagaaggagtgctcattagatgctctccaag

SEQ ID NO: 49534 - DNA, 31 bp, Artificial Sequence
  Synthetic oligonucleotide
gctgccgagtcaaagaggcacaccgtccaag

SEQ ID NO: 49535 - DNA, 30 bp, Artificial Sequence
  Synthetic oligonucleotide
tcgcgtgatcggtttacattgggttccaag

SEQ ID NO: 49536 - DNA, 30 bp, Artificial Sequence
  Synthetic oligonucleotide
gcgtacgtgcaactgttattaaaaagcaag

SEQ ID NO: 49537 - DNA, 30 bp, Artificial Sequence
  Synthetic oligonucleotide
ccaagaatgagaaatgagcgggaacgcaag

SEQ ID NO: 49538 - DNA, 30 bp, Artificial Sequence
  Synthetic oligonucleotide
attgaacgtaggtagtcaaacaaaggcaag

SEQ ID NO: 49539 - DNA, 30 bp, Artificial Sequence
  Synthetic oligonucleotide
cacggacgtgggtgtagatgcacctgcaag

SEQ ID NO: 49540 - DNA, 30 bp, Artificial Sequence
  Synthetic oligonucleotide
gctgaattaaatgtccgcgtaaattgcaag

SEQ ID NO: 49541 - DNA, 30 bp, Artificial Sequence
  Synthetic oligonucleotide
gcagtgccaggactactcttaaacatcaag

SEQ ID NO: 49542 - DNA, 30 bp, Artificial Sequence
  Synthetic oligonucleotide
tgagctagtatagaggattagtggatcaag

SEQ ID NO: 49543 - DNA, 31 bp, Artificial Sequence
  Synthetic oligonucleotide
acacgcggatggaacagttcgtgtgatcaag

SEQ ID NO: 49544 - DNA, 30 bp, Artificial Sequence
  Synthetic oligonucleotide
ccggagcgtaccggtacatccatcctcaag

SEQ ID NO: 49545 - DNA, 30 bp, Artificial Sequence
  Synthetic oligonucleotide
ggttagtatgaaaacatttgcatggtcaag

SEQ ID NO: 49546 - DNA, 30 bp, Artificial Sequence
  Synthetic oligonucleotide
ctaggtcccttggaaagatcaattgtcaag

SEQ ID NO: 49547 - DNA, 30 bp, Artificial Sequence
  Synthetic oligonucleotide
tatgggcgcgggttctccaaaagattcaag

SEQ ID NO: 49548 - DNA, 30 bp, Artificial Sequence
  Synthetic oligonucleotide
agttgacatttaattgcggagagattcaag

SEQ ID NO: 49549 - DNA, 30 bp, Artificial Sequence
  Synthetic oligonucleotide
tacgtgacttgctatcaaggagggttcaag

SEQ ID NO: 49550 - DNA, 30 bp, Artificial Sequence
  Synthetic oligonucleotide
gcaggatatggttcgtgggctcggaagaag

SEQ ID NO: 49551 - DNA, 30 bp, Artificial Sequence
  Synthetic oligonucleotide
tacgcatgtcgggcaagttaacataagaag

SEQ ID NO: 49552 - DNA, 30 bp, Artificial Sequence
  Synthetic oligonucleotide
aatattgcgaaccgaggggggaatcagaag

SEQ ID NO: 49553 - DNA, 30 bp, Artificial Sequence
  Synthetic oligonucleotide
cccgtatcgtgaagaaggagggtatagaag

SEQ ID NO: 49554 - DNA, 30 bp, Artificial Sequence
  Synthetic oligonucleotide
cgggtcgccgagaaatagggcaggtagaag

SEQ ID NO: 49555 - DNA, 30 bp, Artificial Sequence
  Synthetic oligonucleotide
ggtatggcaaggatgttccattatacgaag

SEQ ID NO: 49556 - DNA, 30 bp, Artificial Sequence
  Synthetic oligonucleotide
gggaggagcatccctcattatatcccgaag

SEQ ID NO: 49557 - DNA, 30 bp, Artificial Sequence
  Synthetic oligonucleotide
ctttaagactgaactcaggctcgacggaag

SEQ ID NO: 49558 - DNA, 30 bp, Artificial Sequence
  Synthetic oligonucleotide
agaccaggatcgctccgaaggagccggaag

SEQ ID NO: 49559 - DNA, 30 bp, Artificial Sequence
  Synthetic oligonucleotide
cctgattatataatgataaaagatcggaag

SEQ ID NO: 49560 - DNA, 30 bp, Artificial Sequence
  Synthetic oligonucleotide
aggacctcatcgtggccagctcgtcggaag

SEQ ID NO: 49561 - DNA, 30 bp, Artificial Sequence
  Synthetic oligonucleotide
accagagggtcaagtacgttgaacgggaag

SEQ ID NO: 49562 - DNA, 30 bp, Artificial Sequence
  Synthetic oligonucleotide
cgatgtcgatacccttagggacacgggaag

SEQ ID NO: 49563 - DNA, 30 bp, Artificial Sequence
  Synthetic oligonucleotide
gagaacaaggcgccgtcgcggggcgggaag

SEQ ID NO: 49564 - DNA, 30 bp, Artificial Sequence
  Synthetic oligonucleotide
cgtgatagaatggcggtagagtgcgggaag

SEQ ID NO: 49565 - DNA, 30 bp, Artificial Sequence
  Synthetic oligonucleotide
gaacgttccacgcgattgaaatcctggaag

SEQ ID NO: 49566 - DNA, 30 bp, Artificial Sequence
  Synthetic oligonucleotide
cattccaaatagggcctagggaattggaag

SEQ ID NO: 49567 - DNA, 30 bp, Artificial Sequence
  Synthetic oligonucleotide
caaacccggcacgctaatgggcattggaag

SEQ ID NO: 49568 - DNA, 30 bp, Artificial Sequence
  Synthetic oligonucleotide
cataaggggataaatcagaacaggctgaag

SEQ ID NO: 49569 - DNA, 30 bp, Artificial Sequence
  Synthetic oligonucleotide
gatgctccgtcgccgtcaaatgggctgaag

SEQ ID NO: 49570 - DNA, 30 bp, Artificial Sequence
  Synthetic oligonucleotide
agagcggggtgggagaggacctttctgaag

SEQ ID NO: 49571 - DNA, 30 bp, Artificial Sequence
  Synthetic oligonucleotide
tgagaatgacattgaatccattaagtgaag

SEQ ID NO: 49572 - DNA, 30 bp, Artificial Sequence
  Synthetic oligonucleotide
aaataacataaggtacgagttctagtgaag

SEQ ID NO: 49573 - DNA, 30 bp, Artificial Sequence
  Synthetic oligonucleotide
gaaaaggagtcagtaacggtgatggtgaag

SEQ ID NO: 49574 - DNA, 30 bp, Artificial Sequence
  Synthetic oligonucleotide
cgcttggccaagttccacgttgaattgaag

SEQ ID NO: 49575 - DNA, 30 bp, Artificial Sequence
  Synthetic oligonucleotide
cgatgcatgaggaaatgtatgaagaataag

SEQ ID NO: 49576 - DNA, 30 bp, Artificial Sequence
  Synthetic oligonucleotide
aggacgtaccggtaagaagaaccacataag

SEQ ID NO: 49577 - DNA, 30 bp, Artificial Sequence
  Synthetic oligonucleotide
cggatagattagtagctgcgtgtccataag

SEQ ID NO: 49578 - DNA, 30 bp, Artificial Sequence
  Synthetic oligonucleotide
tgcgatgggtctaataagaacagggataag

SEQ ID NO: 49579 - DNA, 30 bp, Artificial Sequence
  Synthetic oligonucleotide
ccaagtgctgtctaaattggtcggtataag

SEQ ID NO: 49580 - DNA, 30 bp, Artificial Sequence
  Synthetic oligonucleotide
tcgcgggcagtgggcctgttgagaactaag

SEQ ID NO: 49581 - DNA, 30 bp, Artificial Sequence
  Synthetic oligonucleotide
gacggtacacgttataaattacgcactaag

SEQ ID NO: 49582 - DNA, 30 bp, Artificial Sequence
  Synthetic oligonucleotide
atctgacagcgaacctgcatcaggactaag

SEQ ID NO: 49583 - DNA, 30 bp, Artificial Sequence
  Synthetic oligonucleotide
caagaggatgaacacgaatatcatcctaag

SEQ ID NO: 49584 - DNA, 30 bp, Artificial Sequence
  Synthetic oligonucleotide
tttgtcggagccgtcgagagagtggctaag

SEQ ID NO: 49585 - DNA, 30 bp, Artificial Sequence
  Synthetic oligonucleotide
gctaattaaacgggacgttatcgtgctaag

SEQ ID NO: 49586 - DNA, 30 bp, Artificial Sequence
  Synthetic oligonucleotide
caggcctaacaagccggaggggcctctaag

SEQ ID NO: 49587 - DNA, 30 bp, Artificial Sequence
  Synthetic oligonucleotide
cggcatactttatatggcgaaaggtctaag

SEQ ID NO: 49588 - DNA, 30 bp, Artificial Sequence
  Synthetic oligonucleotide
attggcaaatcgtagcatggatccagtaag

SEQ ID NO: 49589 - DNA, 30 bp, Artificial Sequence
  Synthetic oligonucleotide
cgtaatgaaagcccttcgtgcattagtaag

SEQ ID NO: 49590 - DNA, 30 bp, Artificial Sequence
  Synthetic oligonucleotide
agaggtggtcgcattacataggttcgtaag

SEQ ID NO: 49591 - DNA, 30 bp, Artificial Sequence
  Synthetic oligonucleotide
aacgacgaggagcggtggcggaattgtaag

SEQ ID NO: 49592 - DNA, 30 bp, Artificial Sequence
  Synthetic oligonucleotide
ccgcaagaatcaaaaacgtatctaattaag

SEQ ID NO: 49593 - DNA, 30 bp, Artificial Sequence
  Synthetic oligonucleotide
ttcgaagagtgacctccaattgttattaag

SEQ ID NO: 49594 - DNA, 30 bp, Artificial Sequence
  Synthetic oligonucleotide
aacgctgccagctgatcaaataaacttaag

SEQ ID NO: 49595 - DNA, 30 bp, Artificial Sequence
  Synthetic oligonucleotide
tccgatccttacggaagagtaggggttaag

SEQ ID NO: 49596 - DNA, 30 bp, Artificial Sequence
  Synthetic oligonucleotide
aagggcgatgaggacatgtagagatttaag

SEQ ID NO: 49597 - DNA, 30 bp, Artificial Sequence
  Synthetic oligonucleotide
cgtggacagggcgggttgcagttatttaag

SEQ ID NO: 49598 - DNA, 30 bp, Artificial Sequence
  Synthetic oligonucleotide
gcgtccaaaaaggtgggttgaatgtttaag

SEQ ID NO: 49599 - DNA, 30 bp, Artificial Sequence
  Synthetic oligonucleotide
gcctaagatgtcagcggtagtgcttttaag

SEQ ID NO: 49600 - DNA, 30 bp, Artificial Sequence
  Synthetic oligonucleotide
acaaggtatgcttcttacatggagaaacag

SEQ ID NO: 49601 - DNA, 30 bp, Artificial Sequence
  Synthetic oligonucleotide
tcatgaaaaccgtcggtcaatgacgaacag

SEQ ID NO: 49602 - DNA, 30 bp, Artificial Sequence
  Synthetic oligonucleotide
tgcaatgactaggaaggatacgtataacag

SEQ ID NO: 49603 - DNA, 30 bp, Artificial Sequence
  Synthetic oligonucleotide
aacggatcataacgatagatatatacacag

SEQ ID NO: 49604 - DNA, 30 bp, Artificial Sequence
  Synthetic oligonucleotide
gggtaaattctacgttctacaggtacacag

SEQ ID NO: 49605 - DNA, 30 bp, Artificial Sequence
  Synthetic oligonucleotide
tattcaacctgtaggcaactagacagacag

SEQ ID NO: 49606 - DNA, 30 bp, Artificial Sequence
  Synthetic oligonucleotide
aagtaccactttgccgtatcatgccgacag

SEQ ID NO: 49607 - DNA, 30 bp, Artificial Sequence
  Synthetic oligonucleotide
taggctgaaagaattaacataccgcgacag

SEQ ID NO: 49608 - DNA, 30 bp, Artificial Sequence
  Synthetic oligonucleotide
cagcaataacttcaagagtaaagcggacag

SEQ ID NO: 49609 - DNA, 30 bp, Artificial Sequence
  Synthetic oligonucleotide
ggcagttacatatcgactgggaggggacag

SEQ ID NO: 49610 - DNA, 30 bp, Artificial Sequence
  Synthetic oligonucleotide
gggcgttgggctacgatgagaggatgacag

SEQ ID NO: 49611 - DNA, 30 bp, Artificial Sequence
  Synthetic oligonucleotide
gagccgaggctgagcaacggaatatgacag

SEQ ID NO: 49612 - DNA, 30 bp, Artificial Sequence
  Synthetic oligonucleotide
tctgccaattcaataggattccaaatacag

SEQ ID NO: 49613 - DNA, 30 bp, Artificial Sequence
  Synthetic oligonucleotide
cctaaacgtcgtgttcccgcgatgatacag

SEQ ID NO: 49614 - DNA, 30 bp, Artificial Sequence
  Synthetic oligonucleotide
tcgagagcgcttgtgcgacaatggctacag

SEQ ID NO: 49615 - DNA, 30 bp, Artificial Sequence
  Synthetic oligonucleotide
gccgagggaaaaccgaatttcggggtacag

SEQ ID NO: 49616 - DNA, 30 bp, Artificial Sequence
  Synthetic oligonucleotide
aactatcacagatcgtcgaatgaccaccag

SEQ ID NO: 49617 - DNA, 30 bp, Artificial Sequence
  Synthetic oligonucleotide
agtgaccgtacagtaacgagacatcaccag

SEQ ID NO: 49618 - DNA, 31 bp, Artificial Sequence
  Synthetic oligonucleotide
tcgtccagtgatcgtacaagacgaggaccag

SEQ ID NO: 49619 - DNA, 30 bp, Artificial Sequence
  Synthetic oligonucleotide
ggggcgcattggtaggagaagaagtaccag

SEQ ID NO: 49620 - DNA, 30 bp, Artificial Sequence
  Synthetic oligonucleotide
cgcaccctccacatttcagcaggaacccag

SEQ ID NO: 49621 - DNA, 30 bp, Artificial Sequence
  Synthetic oligonucleotide
agaacccatagggcttacgccttaccccag

SEQ ID NO: 49622 - DNA, 30 bp, Artificial Sequence
  Synthetic oligonucleotide
tccgagggtcttgctgaaacaaaaagccag

SEQ ID NO: 49623 - DNA, 30 bp, Artificial Sequence
  Synthetic oligonucleotide
ttgacggtaacaaccaggtacgaccgccag

SEQ ID NO: 49624 - DNA, 30 bp, Artificial Sequence
  Synthetic oligonucleotide
ggacattgagctcaatcacagggtcgccag

SEQ ID NO: 49625 - DNA, 30 bp, Artificial Sequence
  Synthetic oligonucleotide
gtcgtgagctaagaatctcactactgccag

SEQ ID NO: 49626 - DNA, 30 bp, Artificial Sequence
  Synthetic oligonucleotide
cacaattaaaagatggaaggcgcactccag

SEQ ID NO: 49627 - DNA, 30 bp, Artificial Sequence
  Synthetic oligonucleotide
tggtgatgtgcatatccagtgtaagtccag

SEQ ID NO: 49628 - DNA, 30 bp, Artificial Sequence
  Synthetic oligonucleotide
ctcgagtggatttacgatccaatggtccag

SEQ ID NO: 49629 - DNA, 30 bp, Artificial Sequence
  Synthetic oligonucleotide
aggttctcatcacaagatgttgaattccag

SEQ ID NO: 49630 - DNA, 30 bp, Artificial Sequence
  Synthetic oligonucleotide
cgtggacctcctaatgacatcgaaaagcag

SEQ ID NO: 49631 - DNA, 30 bp, Artificial Sequence
  Synthetic oligonucleotide
catgctgcgggaaatgagaacataaagcag

SEQ ID NO: 49632 - DNA, 30 bp, Artificial Sequence
  Synthetic oligonucleotide
aggcgttacaacgccgtccctataaagcag

SEQ ID NO: 49633 - DNA, 30 bp, Artificial Sequence
  Synthetic oligonucleotide
gaagagtagacgttatccactcataagcag

SEQ ID NO: 49634 - DNA, 30 bp, Artificial Sequence
  Synthetic oligonucleotide
taggcatcaagagtaacgaacggccagcag

SEQ ID NO: 49635 - DNA, 30 bp, Artificial Sequence
  Synthetic oligonucleotide
cggaactgtctggaaccgttaagcgagcag

SEQ ID NO: 49636 - DNA, 30 bp, Artificial Sequence
  Synthetic oligonucleotide
cggggcatctaagagcataagcttgagcag

SEQ ID NO: 49637 - DNA, 30 bp, Artificial Sequence
  Synthetic oligonucleotide
caatgtgcgatttacatgaggttatagcag

SEQ ID NO: 49638 - DNA, 30 bp, Artificial Sequence
  Synthetic oligonucleotide
caacgtctgatattcaacgtccggtagcag

SEQ ID NO: 49639 - DNA, 30 bp, Artificial Sequence
  Synthetic oligonucleotide
cgtccatcagggcgcaggtggtaaacgcag

SEQ ID NO: 49640 - DNA, 30 bp, Artificial Sequence
  Synthetic oligonucleotide
ctagaaataatactaagttccatcgcgcag

SEQ ID NO: 49641 - DNA, 30 bp, Artificial Sequence
  Synthetic oligonucleotide
aacgggtttaggtgccatagtgcaaggcag

SEQ ID NO: 49642 - DNA, 30 bp, Artificial Sequence
  Synthetic oligonucleotide
tgaggaggagagtaccaaactggacggcag

SEQ ID NO: 49643 - DNA, 30 bp, Artificial Sequence
  Synthetic oligonucleotide
acgatgtcattacgcactctaatcgggcag

SEQ ID NO: 49644 - DNA, 30 bp, Artificial Sequence
  Synthetic oligonucleotide
gaaaaagagaaacacagtgggttcgggcag

SEQ ID NO: 49645 - DNA, 30 bp, Artificial Sequence
  Synthetic oligonucleotide
cgaagcatactggcgccggggtaatggcag

SEQ ID NO: 49646 - DNA, 30 bp, Artificial Sequence
  Synthetic oligonucleotide
cagttagctgatatttcaaaaccgtggcag

SEQ ID NO: 49647 - DNA, 30 bp, Artificial Sequence
  Synthetic oligonucleotide
cagccgatagagtggaaggtgcattggcag

SEQ ID NO: 49648 - DNA, 30 bp, Artificial Sequence
  Synthetic oligonucleotide
tgcctgccaggaacaggaataggaatgcag

SEQ ID NO: 49649 - DNA, 30 bp, Artificial Sequence
  Synthetic oligonucleotide
ggaacgtaagaatcagggatgctcatgcag

SEQ ID NO: 49650 - DNA, 30 bp, Artificial Sequence
  Synthetic oligonucleotide
tcaataaacgggcctaagggaaacctgcag

SEQ ID NO: 49651 - DNA, 30 bp, Artificial Sequence
  Synthetic oligonucleotide
tgaaataggatgccggaaacgtgagtgcag

SEQ ID NO: 49652 - DNA, 30 bp, Artificial Sequence
  Synthetic oligonucleotide
tcgggcagtaagatggtaccagctgtgcag

SEQ ID NO: 49653 - DNA, 30 bp, Artificial Sequence
  Synthetic oligonucleotide
atctaagagcagcgtgtccaaaccaatcag

SEQ ID NO: 49654 - DNA, 30 bp, Artificial Sequence
  Synthetic oligonucleotide
cgacaggagtctgggggtacacgtaatcag

SEQ ID NO: 49655 - DNA, 30 bp, Artificial Sequence
  Synthetic oligonucleotide
tcttcaggctaagagaaatcgctacatcag

SEQ ID NO: 49656 - DNA, 30 bp, Artificial Sequence
  Synthetic oligonucleotide
acgaccacataacatttctataggcatcag

SEQ ID NO: 49657 - DNA, 30 bp, Artificial Sequence
  Synthetic oligonucleotide
ccattgaaagattagtgctatcggcatcag

SEQ ID NO: 49658 - DNA, 30 bp, Artificial Sequence
  Synthetic oligonucleotide
accagagctcactcctcctcacttcatcag

SEQ ID NO: 49659 - DNA, 30 bp, Artificial Sequence
  Synthetic oligonucleotide
cgatccagcagagaatagagtaattatcag

SEQ ID NO: 49660 - DNA, 30 bp, Artificial Sequence
  Synthetic oligonucleotide
agtgcgtacgctcttcgaagcaagactcag

SEQ ID NO: 49661 - DNA, 30 bp, Artificial Sequence
  Synthetic oligonucleotide
gcaagtccgtgatggattggcgttactcag

SEQ ID NO: 49662 - DNA, 30 bp, Artificial Sequence
  Synthetic oligonucleotide
ggtatgtaatatgcgtataaaaaagctcag

SEQ ID NO: 49663 - DNA, 30 bp, Artificial Sequence
  Synthetic oligonucleotide
cattagtaaaggggaagggtgcgggctcag

SEQ ID NO: 49664 - DNA, 30 bp, Artificial Sequence
  Synthetic oligonucleotide
tcgcacggtatcagcgtgtgaattgctcag

SEQ ID NO: 49665 - DNA, 30 bp, Artificial Sequence
  Synthetic oligonucleotide
aatgcactcatagagcgattcaacagtcag

SEQ ID NO: 49666 - DNA, 30 bp, Artificial Sequence
  Synthetic oligonucleotide
catatcatatcaacacgaggtgccagtcag

SEQ ID NO: 49667 - DNA, 30 bp, Artificial Sequence
  Synthetic oligonucleotide
agtcggaatcaaaggcaacctggtagtcag

SEQ ID NO: 49668 - DNA, 30 bp, Artificial Sequence
  Synthetic oligonucleotide
ctggctctggtggataagggtctacgtcag

SEQ ID NO: 49669 - DNA, 30 bp, Artificial Sequence
  Synthetic oligonucleotide
gggccgtggtgaggggaagtatggcgtcag

SEQ ID NO: 49670 - DNA, 30 bp, Artificial Sequence
  Synthetic oligonucleotide
ctcttgggtcaggtcgttctctctcgtcag

SEQ ID NO: 49671 - DNA, 30 bp, Artificial Sequence
  Synthetic oligonucleotide
ggatccgcaaggcagctcaaaccgcttcag

SEQ ID NO: 49672 - DNA, 30 bp, Artificial Sequence
  Synthetic oligonucleotide
aaatgggaaaaaggtgtgtgttactttcag

SEQ ID NO: 49673 - DNA, 30 bp, Artificial Sequence
  Synthetic oligonucleotide
cctgatcatctcaagggtggcgattttcag

SEQ ID NO: 49674 - DNA, 30 bp, Artificial Sequence
  Synthetic oligonucleotide
agtgcccacaagtgagagtacgtttttcag

SEQ ID NO: 49675 - DNA, 30 bp, Artificial Sequence
  Synthetic oligonucleotide
tgcatcagagtggagtgatgaacaaaagag

SEQ ID NO: 49676 - DNA, 30 bp, Artificial Sequence
  Synthetic oligonucleotide
agggtctgataaacgataagtaacaaagag

SEQ ID NO: 49677 - DNA, 30 bp, Artificial Sequence
  Synthetic oligonucleotide
ttgtcgggggactagcgccaatgcaaagag

SEQ ID NO: 49678 - DNA, 30 bp, Artificial Sequence
  Synthetic oligonucleotide
cgatataaaaccctctttctactcaaagag

SEQ ID NO: 49679 - DNA, 30 bp, Artificial Sequence
  Synthetic oligonucleotide
accgattagataaccctctacactaaagag

SEQ ID NO: 49680 - DNA, 30 bp, Artificial Sequence
  Synthetic oligonucleotide
tcagcattgcgatcattgtaacaggaagag

SEQ ID NO: 49681 - DNA, 30 bp, Artificial Sequence
  Synthetic oligonucleotide
gcaccactggtaagcctagcaaatgaagag

SEQ ID NO: 49682 - DNA, 30 bp, Artificial Sequence
  Synthetic oligonucleotide
gtaccaatgaccttgctggtacatgaagag

SEQ ID NO: 49683 - DNA, 30 bp, Artificial Sequence
  Synthetic oligonucleotide
gtcaaaccaaaagagtcaatggttgaagag

SEQ ID NO: 49684 - DNA, 30 bp, Artificial Sequence
  Synthetic oligonucleotide
gaagcacaacaattttagaagacctaagag

SEQ ID NO: 49685 - DNA, 30 bp, Artificial Sequence
  Synthetic oligonucleotide
agtgcacactttagaatcttacaagcagag

SEQ ID NO: 49686 - DNA, 30 bp, Artificial Sequence
  Synthetic oligonucleotide
ccagcacacgtaaggcacgctcgatcagag

SEQ ID NO: 49687 - DNA, 30 bp, Artificial Sequence
  Synthetic oligonucleotide
ggtaaggtacgagataccgcgatctcagag

SEQ ID NO: 49688 - DNA, 30 bp, Artificial Sequence
  Synthetic oligonucleotide
cgtggccgcataactaaagtgaggagagag

SEQ ID NO: 49689 - DNA, 30 bp, Artificial Sequence
  Synthetic oligonucleotide
ttgcgtgggctacgactgggtaatagagag

SEQ ID NO: 49690 - DNA, 30 bp, Artificial Sequence
  Synthetic oligonucleotide
agtacgacctcctacacctccgctcgagag

SEQ ID NO: 49691 - DNA, 30 bp, Artificial Sequence
  Synthetic oligonucleotide
tcgagatggcacaaaactgtggctcgagag

SEQ ID NO: 49692 - DNA, 30 bp, Artificial Sequence
  Synthetic oligonucleotide
tccgagctagtgggcgtgtcataaggagag

SEQ ID NO: 49693 - DNA, 30 bp, Artificial Sequence
  Synthetic oligonucleotide
gtattaataggcttaataagtcgaggagag

SEQ ID NO: 49694 - DNA, 30 bp, Artificial Sequence
  Synthetic oligonucleotide
ggcataaggataaatccgtgagctggagag

SEQ ID NO: 49695 - DNA, 30 bp, Artificial Sequence
  Synthetic oligonucleotide
tcctgcataccataagttgcctgtggagag

SEQ ID NO: 49696 - DNA, 30 bp, Artificial Sequence
  Synthetic oligonucleotide
gcgggcgatgtccatatttaccagtgagag

SEQ ID NO: 49697 - DNA, 30 bp, Artificial Sequence
  Synthetic oligonucleotide
ttgatgtcacggacgagccatgtgtgagag

SEQ ID NO: 49698 - DNA, 31 bp, Artificial Sequence
  Synthetic oligonucleotide
cgtctatacagaagcagagggcacgatagag

SEQ ID NO: 49699 - DNA, 30 bp, Artificial Sequence
  Synthetic oligonucleotide
gaggacgaccgtgtacctatcacgatagag

SEQ ID NO: 49700 - DNA, 30 bp, Artificial Sequence
  Synthetic oligonucleotide
cgatagaacgacgaataaccgctgatagag

SEQ ID NO: 49701 - DNA, 30 bp, Artificial Sequence
  Synthetic oligonucleotide
acggctgtacgcggagtagggagtatagag

SEQ ID NO: 49702 - DNA, 30 bp, Artificial Sequence
  Synthetic oligonucleotide
cctaaatgatccacccactatcaactagag

SEQ ID NO: 49703 - DNA, 30 bp, Artificial Sequence
  Synthetic oligonucleotide
acgtggaacgatagggcgttccaagtagag

SEQ ID NO: 49704 - DNA, 30 bp, Artificial Sequence
  Synthetic oligonucleotide
ctaagtctatgtatacgaagtacagtagag

SEQ ID NO: 49705 - DNA, 30 bp, Artificial Sequence
  Synthetic oligonucleotide
tctccactgaagtagcaagaaccggtagag

SEQ ID NO: 49706 - DNA, 30 bp, Artificial Sequence
  Synthetic oligonucleotide
aacacctacgaaagcattgccccggtagag

SEQ ID NO: 49707 - DNA, 30 bp, Artificial Sequence
  Synthetic oligonucleotide
cgcaatgaaatgaactggcgtttggtagag

SEQ ID NO: 49708 - DNA, 30 bp, Artificial Sequence
  Synthetic oligonucleotide
ggagctttgtgtccgaataaggatgtagag

SEQ ID NO: 49709 - DNA, 30 bp, Artificial Sequence
  Synthetic oligonucleotide
ctggcgatgttcgtgagttgaagcaacgag

SEQ ID NO: 49710 - DNA, 30 bp, Artificial Sequence
  Synthetic oligonucleotide
caaaagcaccctgaggcgatgtcccacgag

SEQ ID NO: 49711 - DNA, 30 bp, Artificial Sequence
  Synthetic oligonucleotide
cttagcaaactgtggacacatatgcacgag

SEQ ID NO: 49712 - DNA, 30 bp, Artificial Sequence
  Synthetic oligonucleotide
catgaactttgcttaaactatggtcacgag

SEQ ID NO: 49713 - DNA, 30 bp, Artificial Sequence
  Synthetic oligonucleotide
cagtggccaggacagggcatactcgacgag

SEQ ID NO: 49714 - DNA, 30 bp, Artificial Sequence
  Synthetic oligonucleotide
cattacttaagatagaagaccccggacgag

SEQ ID NO: 49715 - DNA, 30 bp, Artificial Sequence
  Synthetic oligonucleotide
taagaaatgttgctcgactgtaaatacgag

SEQ ID NO: 49716 - DNA, 30 bp, Artificial Sequence
  Synthetic oligonucleotide
atagaaagcgtggttctccgggagtacgag

SEQ ID NO: 49717 - DNA, 30 bp, Artificial Sequence
  Synthetic oligonucleotide
ggatctacgcagggtgaggtatagtacgag

SEQ ID NO: 49718 - DNA, 30 bp, Artificial Sequence
  Synthetic oligonucleotide
ttaacagggcaacagtgatgtacgtacgag

SEQ ID NO: 49719 - DNA, 30 bp, Artificial Sequence
  Synthetic oligonucleotide
gtgtaattcgtaaatcacaaggaaaccgag

SEQ ID NO: 49720 - DNA, 30 bp, Artificial Sequence
  Synthetic oligonucleotide
tgattaaagcgtgattgaggcccaaccgag

SEQ ID NO: 49721 - DNA, 30 bp, Artificial Sequence
  Synthetic oligonucleotide
gtaaaaaaaccttgagtgcgcgcccccgag

SEQ ID NO: 49722 - DNA, 30 bp, Artificial Sequence
  Synthetic oligonucleotide
aaatccacctcacaccgtgtaatccccgag

SEQ ID NO: 49723 - DNA, 30 bp, Artificial Sequence
  Synthetic oligonucleotide
aggtcgttgccccgagacgtatctcccgag

SEQ ID NO: 49724 - DNA, 30 bp, Artificial Sequence
  Synthetic oligonucleotide
tagggccttgaatacgtcttcagtcccgag

SEQ ID NO: 49725 - DNA, 30 bp, Artificial Sequence
  Synthetic oligonucleotide
cttgggcgagtagaatatagagccgccgag

SEQ ID NO: 49726 - DNA, 30 bp, Artificial Sequence
  Synthetic oligonucleotide
tatcatctgaggggcatcgtaggggccgag

SEQ ID NO: 49727 - DNA, 30 bp, Artificial Sequence
  Synthetic oligonucleotide
aagtacgatgctgaggacgatcactccgag

SEQ ID NO: 49728 - DNA, 30 bp, Artificial Sequence
  Synthetic oligonucleotide
tgtgtatatcggctaaacggccattccgag

SEQ ID NO: 49729 - DNA, 30 bp, Artificial Sequence
  Synthetic oligonucleotide
cgtattactgtactatcccgggcaagcgag

SEQ ID NO: 49730 - DNA, 30 bp, Artificial Sequence
  Synthetic oligonucleotide
tcgattccgactactgcaactctaagcgag

SEQ ID NO: 49731 - DNA, 30 bp, Artificial Sequence
  Synthetic oligonucleotide
gaaaaacgggggtgtagtgagagccgcgag

SEQ ID NO: 49732 - DNA, 30 bp, Artificial Sequence
  Synthetic oligonucleotide
gtttcgcgaagggcagaattaatccgcgag

SEQ ID NO: 49733 - DNA, 30 bp, Artificial Sequence
  Synthetic oligonucleotide
caggagcaggggtaggtgtaggcaggcgag

SEQ ID NO: 49734 - DNA, 29 bp, Artificial Sequence
  Synthetic oligonucleotide
tacgaagtggcgttatcgtcagaggcgag

SEQ ID NO: 49735 - DNA, 30 bp, Artificial Sequence
  Synthetic oligonucleotide
acatgcgaacccgtgtaaaatctgggcgag

SEQ ID NO: 49736 - DNA, 30 bp, Artificial Sequence
  Synthetic oligonucleotide
aacaaagatgaacagattacgatatgcgag

SEQ ID NO: 49737 - DNA, 30 bp, Artificial Sequence
  Synthetic oligonucleotide
tcatacccaacatgccatgaaatctgcgag

SEQ ID NO: 49738 - DNA, 30 bp, Artificial Sequence
  Synthetic oligonucleotide
atgtggccgtggaaggtcgctcggtgcgag

SEQ ID NO: 49739 - DNA, 30 bp, Artificial Sequence
  Synthetic oligonucleotide
ccccgtggataggacgttaccagaatcgag

SEQ ID NO: 49740 - DNA, 30 bp, Artificial Sequence
  Synthetic oligonucleotide
tcctaaagaggaccaggcaaagcgatcgag

SEQ ID NO: 49741 - DNA, 30 bp, Artificial Sequence
  Synthetic oligonucleotide
gtcccgtggagctcagacaaagggctcgag

SEQ ID NO: 49742 - DNA, 30 bp, Artificial Sequence
  Synthetic oligonucleotide
tggctcccgtatcaacgggcatcagtcgag

SEQ ID NO: 49743 - DNA, 30 bp, Artificial Sequence
  Synthetic oligonucleotide
actgttggaagtcaacgggtcgtcgtcgag

SEQ ID NO: 49744 - DNA, 30 bp, Artificial Sequence
  Synthetic oligonucleotide
atgatcgaaatttttagcgatgcggtcgag

SEQ ID NO: 49745 - DNA, 30 bp, Artificial Sequence
  Synthetic oligonucleotide
caatagtttacacttcagtgtgagttcgag

SEQ ID NO: 49746 - DNA, 30 bp, Artificial Sequence
  Synthetic oligonucleotide
atacgagatttcacgttgggatagttcgag

SEQ ID NO: 49747 - DNA, 30 bp, Artificial Sequence
  Synthetic oligonucleotide
ggaggtggtcgttcgaggaatccgttcgag

SEQ ID NO: 49748 - DNA, 30 bp, Artificial Sequence
  Synthetic oligonucleotide
gggacgaggtttgagtgtcgttatttcgag

SEQ ID NO: 49749 - DNA, 30 bp, Artificial Sequence
  Synthetic oligonucleotide
tcttaagtcaaaagaagatctgacaaggag

SEQ ID NO: 49750 - DNA, 30 bp, Artificial Sequence
  Synthetic oligonucleotide
agactagagacttgtaagttcaagcaggag

SEQ ID NO: 49751 - DNA, 30 bp, Artificial Sequence
  Synthetic oligonucleotide
ggaaacggcttacgtagaacttagcaggag

SEQ ID NO: 49752 - DNA, 30 bp, Artificial Sequence
  Synthetic oligonucleotide
cacggagagcatacactctaagacgaggag

SEQ ID NO: 49753 - DNA, 30 bp, Artificial Sequence
  Synthetic oligonucleotide
ccacaaccggtcgcacgtagattcgaggag

SEQ ID NO: 49754 - DNA, 30 bp, Artificial Sequence
  Synthetic oligonucleotide
gaatagggcttgaagaccacaaaggaggag

SEQ ID NO: 49755 - DNA, 30 bp, Artificial Sequence
  Synthetic oligonucleotide
caaccagcatgcgtaattgtctctgaggag

SEQ ID NO: 49756 - DNA, 30 bp, Artificial Sequence
  Synthetic oligonucleotide
ttgacgattgatgaacctcggacataggag

SEQ ID NO: 49757 - DNA, 30 bp, Artificial Sequence
  Synthetic oligonucleotide
catgaccatctttcgtttaaaggctaggag

SEQ ID NO: 49758 - DNA, 30 bp, Artificial Sequence
  Synthetic oligonucleotide
tcaatcgtagcaccagtcgtctattaggag

SEQ ID NO: 49759 - DNA, 30 bp, Artificial Sequence
  Synthetic oligonucleotide
ccaggaatcccatgtttgcctgggacggag

SEQ ID NO: 49760 - DNA, 30 bp, Artificial Sequence
  Synthetic oligonucleotide
cctcagttgatttgagaaggtaggccggag

SEQ ID NO: 49761 - DNA, 30 bp, Artificial Sequence
  Synthetic oligonucleotide
taaggtgaaggaccattttgttcctcggag

SEQ ID NO: 49762 - DNA, 30 bp, Artificial Sequence
  Synthetic oligonucleotide
gtgcgagtggaccaccacgggcaaagggag

SEQ ID NO: 49763 - DNA, 30 bp, Artificial Sequence
  Synthetic oligonucleotide
ccttcgataccaacaatgcccgaaagggag

SEQ ID NO: 49764 - DNA, 30 bp, Artificial Sequence
  Synthetic oligonucleotide
tgcggtattgcagacagccacataagggag

SEQ ID NO: 49765 - DNA, 30 bp, Artificial Sequence
  Synthetic oligonucleotide
gggtaatcgagaccctaatgctacagggag

SEQ ID NO: 49766 - DNA, 30 bp, Artificial Sequence
  Synthetic oligonucleotide
cgactgcataaggaaaaaaatgatagggag

SEQ ID NO: 49767 - DNA, 30 bp, Artificial Sequence
  Synthetic oligonucleotide
cgtgccgagctgacctctgcaaaacgggag

SEQ ID NO: 49768 - DNA, 30 bp, Artificial Sequence
  Synthetic oligonucleotide
aggtcgtacaaacgattaattaagggggag

SEQ ID NO: 49769 - DNA, 30 bp, Artificial Sequence
  Synthetic oligonucleotide
gttgcaacagaattagagcagacgtgggag

SEQ ID NO: 49770 - DNA, 30 bp, Artificial Sequence
  Synthetic oligonucleotide
ggcagtcggttacccagccagcaaatggag

SEQ ID NO: 49771 - DNA, 30 bp, Artificial Sequence
  Synthetic oligonucleotide
aggacattccggttcgacggctctatggag

SEQ ID NO: 49772 - DNA, 30 bp, Artificial Sequence
  Synthetic oligonucleotide
acatctggcccccaccaacagtggctggag

SEQ ID NO: 49773 - DNA, 30 bp, Artificial Sequence
  Synthetic oligonucleotide
tgacgaagagcatagtgtctatttctggag

SEQ ID NO: 49774 - DNA, 30 bp, Artificial Sequence
  Synthetic oligonucleotide
attgtcacaaagtatcgtgtgtaagtggag

SEQ ID NO: 49775 - DNA, 30 bp, Artificial Sequence
  Synthetic oligonucleotide
aacgaagggttttgataaagagtagtggag

SEQ ID NO: 49776 - DNA, 30 bp, Artificial Sequence
  Synthetic oligonucleotide
agtactgcagtgaattatagaggcaatgag

SEQ ID NO: 49777 - DNA, 30 bp, Artificial Sequence
  Synthetic oligonucleotide
gcattagggccaatctaattataacatgag

SEQ ID NO: 49778 - DNA, 30 bp, Artificial Sequence
  Synthetic oligonucleotide
actgaggtcttaagacatgaatgagatgag

SEQ ID NO: 49779 - DNA, 30 bp, Artificial Sequence
  Synthetic oligonucleotide
tgacgaggcgatgtacacatttactatgag

SEQ ID NO: 49780 - DNA, 30 bp, Artificial Sequence
  Synthetic oligonucleotide
gtgagcaaagcaactgctgtaagttatgag

SEQ ID NO: 49781 - DNA, 30 bp, Artificial Sequence
  Synthetic oligonucleotide
aagccgctatgtcaaccgtgttaaactgag

SEQ ID NO: 49782 - DNA, 30 bp, Artificial Sequence
  Synthetic oligonucleotide
gaggacggtagacgtcgggaggacactgag

SEQ ID NO: 49783 - DNA, 30 bp, Artificial Sequence
  Synthetic oligonucleotide
agaatccacgtgcacaaattctccactgag

SEQ ID NO: 49784 - DNA, 30 bp, Artificial Sequence
  Synthetic oligonucleotide
gcgaagctgggtactcgcgggcgcactgag

SEQ ID NO: 49785 - DNA, 30 bp, Artificial Sequence
  Synthetic oligonucleotide
ctcgggtttacggttcgtataacgactgag

SEQ ID NO: 49786 - DNA, 30 bp, Artificial Sequence
  Synthetic oligonucleotide
gtagtgtaatgaaaaatcactacacctgag

SEQ ID NO: 49787 - DNA, 30 bp, Artificial Sequence
  Synthetic oligonucleotide
acatgacaggtggataagaccttccctgag

SEQ ID NO: 49788 - DNA, 30 bp, Artificial Sequence
  Synthetic oligonucleotide
ttggggatttacggtctagataagcctgag

SEQ ID NO: 49789 - DNA, 30 bp, Artificial Sequence
  Synthetic oligonucleotide
ccatgtgattcgaaaacatgggagcctgag

SEQ ID NO: 49790 - DNA, 30 bp, Artificial Sequence
  Synthetic oligonucleotide
tgaacacaaaggtccaccgtcgaggctgag

SEQ ID NO: 49791 - DNA, 30 bp, Artificial Sequence
  Synthetic oligonucleotide
acactatcttggtatacatcacatgctgag

SEQ ID NO: 49792 - DNA, 30 bp, Artificial Sequence
  Synthetic oligonucleotide
ttctcgaagtgggtctgtaacctatctgag

SEQ ID NO: 49793 - DNA, 30 bp, Artificial Sequence
  Synthetic oligonucleotide
cagcgccaattagaatccgcaccgagtgag

SEQ ID NO: 49794 - DNA, 30 bp, Artificial Sequence
  Synthetic oligonucleotide
gtaaaagacacgatattttttgcgagtgag

SEQ ID NO: 49795 - DNA, 30 bp, Artificial Sequence
  Synthetic oligonucleotide
ccttatcgtcctcaaaggggctaacgtgag

SEQ ID NO: 49796 - DNA, 30 bp, Artificial Sequence
  Synthetic oligonucleotide
acccgcaattctctaaagtatggaggtgag

SEQ ID NO: 49797 - DNA, 30 bp, Artificial Sequence
  Synthetic oligonucleotide
gcgttatgacgggctggccaagtaggtgag

SEQ ID NO: 49798 - DNA, 30 bp, Artificial Sequence
  Synthetic oligonucleotide
ggatcccacctggtgcataagttaggtgag

SEQ ID NO: 49799 - DNA, 30 bp, Artificial Sequence
  Synthetic oligonucleotide
ctcgccaagcgggacatactcgtgggtgag

SEQ ID NO: 49800 - DNA, 30 bp, Artificial Sequence
  Synthetic oligonucleotide
cagcgtaaggagcaagcgggaaatggtgag

SEQ ID NO: 49801 - DNA, 30 bp, Artificial Sequence
  Synthetic oligonucleotide
acttgggccaaccagccgctcgttggtgag

SEQ ID NO: 49802 - DNA, 30 bp, Artificial Sequence
  Synthetic oligonucleotide
aagggtgcgaaggagccatcccactgtgag

SEQ ID NO: 49803 - DNA, 30 bp, Artificial Sequence
  Synthetic oligonucleotide
actgatagcattaaggatagtgggtgtgag

SEQ ID NO: 49804 - DNA, 30 bp, Artificial Sequence
  Synthetic oligonucleotide
gccggaagctccggtacatgaccaattgag

SEQ ID NO: 49805 - DNA, 30 bp, Artificial Sequence
  Synthetic oligonucleotide
gcgatccgaacacagataaaagtaattgag

SEQ ID NO: 49806 - DNA, 30 bp, Artificial Sequence
  Synthetic oligonucleotide
actgataccacaatcagggtgaatattgag

SEQ ID NO: 49807 - DNA, 30 bp, Artificial Sequence
  Synthetic oligonucleotide
gcgggacgccaaatacgagcatcagttgag

SEQ ID NO: 49808 - DNA, 30 bp, Artificial Sequence
  Synthetic oligonucleotide
catacgtggagcaacataccgtgagttgag

SEQ ID NO: 49809 - DNA, 30 bp, Artificial Sequence
  Synthetic oligonucleotide
atcgtcgaggttcggccgcaggcatttgag

SEQ ID NO: 49810 - DNA, 30 bp, Artificial Sequence
  Synthetic oligonucleotide
gcagaggtcactccactacgagtacaatag

SEQ ID NO: 49811 - DNA, 30 bp, Artificial Sequence
  Synthetic oligonucleotide
gagaaagaatcgatgcggcttggccaatag

SEQ ID NO: 49812 - DNA, 30 bp, Artificial Sequence
  Synthetic oligonucleotide
ggcagggtactacgagcctctatccaatag

SEQ ID NO: 49813 - DNA, 30 bp, Artificial Sequence
  Synthetic oligonucleotide
cgatttaaagaggcttgctcgagtcaatag

SEQ ID NO: 49814 - DNA, 30 bp, Artificial Sequence
  Synthetic oligonucleotide
acttcacgaggcccgggcagacgagaatag

SEQ ID NO: 49815 - DNA, 30 bp, Artificial Sequence
  Synthetic oligonucleotide
cagaactagcagtaaggatacttagaatag

SEQ ID NO: 49816 - DNA, 30 bp, Artificial Sequence
  Synthetic oligonucleotide
tcatcattgctcagcgacaaggacgaatag

SEQ ID NO: 49817 - DNA, 30 bp, Artificial Sequence
  Synthetic oligonucleotide
ggctaaagatcctacgacctaggcacatag

SEQ ID NO: 49818 - DNA, 30 bp, Artificial Sequence
  Synthetic oligonucleotide
ctagttcgagctacgcgtccgtagacatag

SEQ ID NO: 49819 - DNA, 30 bp, Artificial Sequence
  Synthetic oligonucleotide
tcgtgggcgcctgtcgaccttagtccatag

SEQ ID NO: 49820 - DNA, 30 bp, Artificial Sequence
  Synthetic oligonucleotide
acatgttgtgacttagccgaatctagatag

SEQ ID NO: 49821 - DNA, 30 bp, Artificial Sequence
  Synthetic oligonucleotide
ccctgaggtcagggataaagaagtagatag

SEQ ID NO: 49822 - DNA, 30 bp, Artificial Sequence
  Synthetic oligonucleotide
tcgacgacctgtaatatcaaccatcgatag

SEQ ID NO: 49823 - DNA, 30 bp, Artificial Sequence
  Synthetic oligonucleotide
taaaggaggagcggctcccaaacgtgatag

SEQ ID NO: 49824 - DNA, 30 bp, Artificial Sequence
  Synthetic oligonucleotide
cagatacgaggactgctacagacgtgatag

SEQ ID NO: 49825 - DNA, 30 bp, Artificial Sequence
  Synthetic oligonucleotide
tgggcggctcaccgcacaccattgtgatag

SEQ ID NO: 49826 - DNA, 30 bp, Artificial Sequence
  Synthetic oligonucleotide
cgtgttgggattattagtcaatggctatag

SEQ ID NO: 49827 - DNA, 30 bp, Artificial Sequence
  Synthetic oligonucleotide
agggacaagctggacaatcgttttttatag

SEQ ID NO: 49828 - DNA, 30 bp, Artificial Sequence
  Synthetic oligonucleotide
aaacgcaggatcgattggcttgtgaactag

SEQ ID NO: 49829 - DNA, 30 bp, Artificial Sequence
  Synthetic oligonucleotide
atcatgaggtcgattaagctggtgcactag

SEQ ID NO: 49830 - DNA, 30 bp, Artificial Sequence
  Synthetic oligonucleotide
agaatagccaattagaacgagtgtcactag

SEQ ID NO: 49831 - DNA, 30 bp, Artificial Sequence
  Synthetic oligonucleotide
tggatgccgataaataagttacgcgactag

SEQ ID NO: 49832 - DNA, 30 bp, Artificial Sequence
  Synthetic oligonucleotide
cctgtagactgggtggaagtaagtgactag

SEQ ID NO: 49833 - DNA, 30 bp, Artificial Sequence
  Synthetic oligonucleotide
attgtaaacatcaggggtagatagtactag

SEQ ID NO: 49834 - DNA, 30 bp, Artificial Sequence
  Synthetic oligonucleotide
tgtacatccccaagcactaagacaacctag

SEQ ID NO: 49835 - DNA, 30 bp, Artificial Sequence
  Synthetic oligonucleotide
gcatgaagcgattacctgatcataacctag

SEQ ID NO: 49836 - DNA, 30 bp, Artificial Sequence
  Synthetic oligonucleotide
gcgaacagaagagaagagatagagacctag

SEQ ID NO: 49837 - DNA, 30 bp, Artificial Sequence
  Synthetic oligonucleotide
ctcgtcaggagacgtataggtacaccctag

SEQ ID NO: 49838 - DNA, 30 bp, Artificial Sequence
  Synthetic oligonucleotide
tttacaagcgtatggtccgagaaggcctag

SEQ ID NO: 49839 - DNA, 30 bp, Artificial Sequence
  Synthetic oligonucleotide
cattgaaacggattaaagtgcgtatcctag

SEQ ID NO: 49840 - DNA, 30 bp, Artificial Sequence
  Synthetic oligonucleotide
cgttagagtagacatacgattgaaagctag

SEQ ID NO: 49841 - DNA, 30 bp, Artificial Sequence
  Synthetic oligonucleotide
tcggttgttggcgaccgtatgtggagctag

SEQ ID NO: 49842 - DNA, 30 bp, Artificial Sequence
  Synthetic oligonucleotide
agtgcctaacgaataaactaaatgtgctag

SEQ ID NO: 49843 - DNA, 30 bp, Artificial Sequence
  Synthetic oligonucleotide
ggagacccgttttcgtcgttatccatctag

SEQ ID NO: 49844 - DNA, 30 bp, Artificial Sequence
  Synthetic oligonucleotide
cctagtacaccaatcaccaggaagatctag

SEQ ID NO: 49845 - DNA, 30 bp, Artificial Sequence
  Synthetic oligonucleotide
ggcgattcagagtaaagaggccagatctag

SEQ ID NO: 49846 - DNA, 30 bp, Artificial Sequence
  Synthetic oligonucleotide
agcaaagctacgatcgagattgtgatctag

SEQ ID NO: 49847 - DNA, 30 bp, Artificial Sequence
  Synthetic oligonucleotide
agaggcgtctcacgcggtcaggttatctag

SEQ ID NO: 49848 - DNA, 30 bp, Artificial Sequence
  Synthetic oligonucleotide
tcgaggggcttcgtaacgccgtatttctag

SEQ ID NO: 49849 - DNA, 30 bp, Artificial Sequence
  Synthetic oligonucleotide
tgggtgtaacgacagtagttctccaagtag

SEQ ID NO: 49850 - DNA, 30 bp, Artificial Sequence
  Synthetic oligonucleotide
cttgccgatccgacccacaccggcaagtag

SEQ ID NO: 49851 - DNA, 30 bp, Artificial Sequence
  Synthetic oligonucleotide
gtctgacattcgtgcctaactgagaagtag

SEQ ID NO: 49852 - DNA, 30 bp, Artificial Sequence
  Synthetic oligonucleotide
cagcgtatcatactcacattgtcgaagtag

SEQ ID NO: 49853 - DNA, 30 bp, Artificial Sequence
  Synthetic oligonucleotide
tcgtatcgggtaccagatagagggaagtag

SEQ ID NO: 49854 - DNA, 30 bp, Artificial Sequence
  Synthetic oligonucleotide
gtaggattgtaaccgtcacgtcgacagtag

SEQ ID NO: 49855 - DNA, 30 bp, Artificial Sequence
  Synthetic oligonucleotide
atcaatatactgaatcgatacatacagtag

SEQ ID NO: 49856 - DNA, 30 bp, Artificial Sequence
  Synthetic oligonucleotide
aaaggttgcacattgaccaagttacagtag

SEQ ID NO: 49857 - DNA, 30 bp, Artificial Sequence
  Synthetic oligonucleotide
tcatatagctaagattcatttaatgagtag

SEQ ID NO: 49858 - DNA, 30 bp, Artificial Sequence
  Synthetic oligonucleotide
tccaaagcgattaaatgaggagagtagtag

SEQ ID NO: 49859 - DNA, 30 bp, Artificial Sequence
  Synthetic oligonucleotide
gcgaacgctcgccaataactattcacgtag

SEQ ID NO: 49860 - DNA, 30 bp, Artificial Sequence
  Synthetic oligonucleotide
tcctggggaaacacgggtatgactacgtag

SEQ ID NO: 49861 - DNA, 30 bp, Artificial Sequence
  Synthetic oligonucleotide
tgcatcagaacgaatatctggactccgtag

SEQ ID NO: 49862 - DNA, 30 bp, Artificial Sequence
  Synthetic oligonucleotide
gcggggcaacggcaaggccacagcgcgtag

SEQ ID NO: 49863 - DNA, 30 bp, Artificial Sequence
  Synthetic oligonucleotide
acacacacaagggacttaaggcatcggtag

SEQ ID NO: 49864 - DNA, 30 bp, Artificial Sequence
  Synthetic oligonucleotide
accacgaaagaggtagagtgttgagggtag

SEQ ID NO: 49865 - DNA, 30 bp, Artificial Sequence
  Synthetic oligonucleotide
atcctgcgtgtaaaagaagggtaatggtag

SEQ ID NO: 49866 - DNA, 30 bp, Artificial Sequence
  Synthetic oligonucleotide
cggtgcacctaatggacatatagctggtag

SEQ ID NO: 49867 - DNA, 30 bp, Artificial Sequence
  Synthetic oligonucleotide
ggccaacagacactcatgtagtcgtggtag

SEQ ID NO: 49868 - DNA, 30 bp, Artificial Sequence
  Synthetic oligonucleotide
gaacgtaaacggactcaaggacccatgtag

SEQ ID NO: 49869 - DNA, 30 bp, Artificial Sequence
  Synthetic oligonucleotide
gacagaaaaaactttatggatcgtatgtag

SEQ ID NO: 49870 - DNA, 30 bp, Artificial Sequence
  Synthetic oligonucleotide
ccgccctaagaaggagcaggatacgtgtag

SEQ ID NO: 49871 - DNA, 30 bp, Artificial Sequence
  Synthetic oligonucleotide
tcatatccatctggaagtaatgccgtgtag

SEQ ID NO: 49872 - DNA, 30 bp, Artificial Sequence
  Synthetic oligonucleotide
acgtgggatggtggtggtccgcaaaattag

SEQ ID NO: 49873 - DNA, 30 bp, Artificial Sequence
  Synthetic oligonucleotide
tgtcgagaagatggtgctattaacaattag

SEQ ID NO: 49874 - DNA, 30 bp, Artificial Sequence
  Synthetic oligonucleotide
cggaagtttgagatagtcgtcctcaattag

SEQ ID NO: 49875 - DNA, 30 bp, Artificial Sequence
  Synthetic oligonucleotide
acggtgcgtgatacgctctggagtcattag

SEQ ID NO: 49876 - DNA, 30 bp, Artificial Sequence
  Synthetic oligonucleotide
acgcgcgtggaaggaaatatgaagtattag

SEQ ID NO: 49877 - DNA, 31 bp, Artificial Sequence
  Synthetic oligonucleotide
aggtagttgctaactggtatgaattacttag

SEQ ID NO: 49878 - DNA, 30 bp, Artificial Sequence
  Synthetic oligonucleotide
ggtactagtgaagggcaaacagcaccttag

SEQ ID NO: 49879 - DNA, 30 bp, Artificial Sequence
  Synthetic oligonucleotide
gaaagcagagccaaccgaaccagcccttag

SEQ ID NO: 49880 - DNA, 30 bp, Artificial Sequence
  Synthetic oligonucleotide
tgacatagtacaatatacccgtaagcttag

SEQ ID NO: 49881 - DNA, 30 bp, Artificial Sequence
  Synthetic oligonucleotide
tagagggtgcatacatcatatgcatcttag

SEQ ID NO: 49882 - DNA, 30 bp, Artificial Sequence
  Synthetic oligonucleotide
actaggactcactgatcaactgcatcttag

SEQ ID NO: 49883 - DNA, 30 bp, Artificial Sequence
  Synthetic oligonucleotide
ggaggtacgtcttatcagagaagttcttag

SEQ ID NO: 49884 - DNA, 30 bp, Artificial Sequence
  Synthetic oligonucleotide
tagtgccaacgaatcgctgaatatagttag

SEQ ID NO: 49885 - DNA, 30 bp, Artificial Sequence
  Synthetic oligonucleotide
atagagtgtcgaggtagacaaggtagttag

SEQ ID NO: 49886 - DNA, 30 bp, Artificial Sequence
  Synthetic oligonucleotide
tgcgggagccaaaagctaaagcgtcgttag

SEQ ID NO: 49887 - DNA, 30 bp, Artificial Sequence
  Synthetic oligonucleotide
ggtgtaatataatctcggtaaaacggttag

SEQ ID NO: 49888 - DNA, 30 bp, Artificial Sequence
  Synthetic oligonucleotide
acgagcctcattcgtttgaactcctgttag

SEQ ID NO: 49889 - DNA, 30 bp, Artificial Sequence
  Synthetic oligonucleotide
tgaatggggcgctcaagcgggtcgtgttag

SEQ ID NO: 49890 - DNA, 30 bp, Artificial Sequence
  Synthetic oligonucleotide
tggccacgaagaaaggtcttgacttgttag

SEQ ID NO: 49891 - DNA, 30 bp, Artificial Sequence
  Synthetic oligonucleotide
cgcaagcagggagaacttaccgcgatttag

SEQ ID NO: 49892 - DNA, 30 bp, Artificial Sequence
  Synthetic oligonucleotide
gtggaaactaatccacagacaaggctttag

SEQ ID NO: 49893 - DNA, 30 bp, Artificial Sequence
  Synthetic oligonucleotide
gtcccacatagttattcgaagtaaaaaacg

SEQ ID NO: 49894 - DNA, 30 bp, Artificial Sequence
  Synthetic oligonucleotide
ctatggagggcatcaacccaccgcaaaacg

SEQ ID NO: 49895 - DNA, 30 bp, Artificial Sequence
  Synthetic oligonucleotide
gatagggtaaggggaccggcttgtaaaacg

SEQ ID NO: 49896 - DNA, 30 bp, Artificial Sequence
  Synthetic oligonucleotide
tgctagagcgttaagcgagcatgacaaacg

SEQ ID NO: 49897 - DNA, 30 bp, Artificial Sequence
  Synthetic oligonucleotide
acggttttcgggggacaaagagatcaaacg

SEQ ID NO: 49898 - DNA, 30 bp, Artificial Sequence
  Synthetic oligonucleotide
cgacggatcgttacatgaatcaacgaaacg

SEQ ID NO: 49899 - DNA, 30 bp, Artificial Sequence
  Synthetic oligonucleotide
aagttagctgccctaagtgtggaggaaacg

SEQ ID NO: 49900 - DNA, 30 bp, Artificial Sequence
  Synthetic oligonucleotide
agtgagggaagttacctgttaccataaacg

SEQ ID NO: 49901 - DNA, 30 bp, Artificial Sequence
  Synthetic oligonucleotide
cgtcgcaccaatgcagattgcgcataaacg

SEQ ID NO: 49902 - DNA, 30 bp, Artificial Sequence
  Synthetic oligonucleotide
ccgattagggtgttgagcattaggtaaacg

SEQ ID NO: 49903 - DNA, 31 bp, Artificial Sequence
  Synthetic oligonucleotide
cataatttaactgaaaacctggacgccaacg

SEQ ID NO: 49904 - DNA, 31 bp, Artificial Sequence
  Synthetic oligonucleotide
gccctaaaacaccgaagtaccgcctccaacg

SEQ ID NO: 49905 - DNA, 30 bp, Artificial Sequence
  Synthetic oligonucleotide
tgcccagcaatgaccccagaggaagcaacg

SEQ ID NO: 49906 - DNA, 30 bp, Artificial Sequence
  Synthetic oligonucleotide
caaagactgggtgacattcgagaggcaacg

SEQ ID NO: 49907 - DNA, 30 bp, Artificial Sequence
  Synthetic oligonucleotide
tgggtgtcgtcatacgtgaatccgagaacg

SEQ ID NO: 49908 - DNA, 30 bp, Artificial Sequence
  Synthetic oligonucleotide
taagccatcgatccaatcgacgaacgaacg

SEQ ID NO: 49909 - DNA, 30 bp, Artificial Sequence
  Synthetic oligonucleotide
tagaaagagtcaatcacggactcccgaacg

SEQ ID NO: 49910 - DNA, 30 bp, Artificial Sequence
  Synthetic oligonucleotide
cgaaaacaaagaggcactgataaaataacg

SEQ ID NO: 49911 - DNA, 30 bp, Artificial Sequence
  Synthetic oligonucleotide
tgatctcgtcgtatcattagcgacataacg

SEQ ID NO: 49912 - DNA, 30 bp, Artificial Sequence
  Synthetic oligonucleotide
caagcatgtttcgaaagaggtcatataacg

SEQ ID NO: 49913 - DNA, 30 bp, Artificial Sequence
  Synthetic oligonucleotide
atccacgtctaaagaagataaaacctaacg

SEQ ID NO: 49914 - DNA, 30 bp, Artificial Sequence
  Synthetic oligonucleotide
accaagtagaatgccaatcgagtgctaacg

SEQ ID NO: 49915 - DNA, 30 bp, Artificial Sequence
  Synthetic oligonucleotide
gaaagcggtatcccgaccgtgccagtaacg

SEQ ID NO: 49916 - DNA, 30 bp, Artificial Sequence
  Synthetic oligonucleotide
tagagtactcccacaacagggccggtaacg

SEQ ID NO: 49917 - DNA, 30 bp, Artificial Sequence
  Synthetic oligonucleotide
cagtaaaaggaaagtgcgtcgaccttaacg

SEQ ID NO: 49918 - DNA, 30 bp, Artificial Sequence
  Synthetic oligonucleotide
tcgtcccagctttaggaagttaagttaacg

SEQ ID NO: 49919 - DNA, 30 bp, Artificial Sequence
  Synthetic oligonucleotide
ccggaaactgttacgtatctgcaaaacacg

SEQ ID NO: 49920 - DNA, 30 bp, Artificial Sequence
  Synthetic oligonucleotide
gcggggacatggttcactagcagaaacacg

SEQ ID NO: 49921 - DNA, 30 bp, Artificial Sequence
  Synthetic oligonucleotide
agctaagtagtagaaagctggtggcacacg

SEQ ID NO: 49922 - DNA, 30 bp, Artificial Sequence
  Synthetic oligonucleotide
tggagcttaacgagaaatggatttcacacg

SEQ ID NO: 49923 - DNA, 30 bp, Artificial Sequence
  Synthetic oligonucleotide
tactacacacgggtacccgccaaagacacg

SEQ ID NO: 49924 - DNA, 30 bp, Artificial Sequence
  Synthetic oligonucleotide
acgttggctgagtcgtaaaacgacgacacg

SEQ ID NO: 49925 - DNA, 30 bp, Artificial Sequence
  Synthetic oligonucleotide
tatactcggagaactcacaagggtgacacg

SEQ ID NO: 49926 - DNA, 30 bp, Artificial Sequence
  Synthetic oligonucleotide
cggtcgatatcgggtcgtatacggaccacg

SEQ ID NO: 49927 - DNA, 30 bp, Artificial Sequence
  Synthetic oligonucleotide
ggtcgtaagggagaagcgcaattgaccacg

SEQ ID NO: 49928 - DNA, 30 bp, Artificial Sequence
  Synthetic oligonucleotide
cacgcgccgaattgactgagggcacccacg

SEQ ID NO: 49929 - DNA, 30 bp, Artificial Sequence
  Synthetic oligonucleotide
agcgtaatatgaccgagtcaggaaagcacg

SEQ ID NO: 49930 - DNA, 30 bp, Artificial Sequence
  Synthetic oligonucleotide
accatcgttatatctgggcggccaagcacg

SEQ ID NO: 49931 - DNA, 30 bp, Artificial Sequence
  Synthetic oligonucleotide
cacgacgggaaaccggtgtatacactcacg

SEQ ID NO: 49932 - DNA, 30 bp, Artificial Sequence
  Synthetic oligonucleotide
cggggactagtacaatatgaacgcgtcacg

SEQ ID NO: 49933 - DNA, 30 bp, Artificial Sequence
  Synthetic oligonucleotide
catcgagaaatggaacaacttgttgtcacg

SEQ ID NO: 49934 - DNA, 30 bp, Artificial Sequence
  Synthetic oligonucleotide
tcagctattgcgaccgaagtggtaaagacg

SEQ ID NO: 49935 - DNA, 30 bp, Artificial Sequence
  Synthetic oligonucleotide
acacagaacccacgcacagccaccaagacg

SEQ ID NO: 49936 - DNA, 30 bp, Artificial Sequence
  Synthetic oligonucleotide
acgaaatgaatttattaaggtcaggagacg

SEQ ID NO: 49937 - DNA, 30 bp, Artificial Sequence
  Synthetic oligonucleotide
acgagggtagaattgtttagcctgaggacg

SEQ ID NO: 49938 - DNA, 30 bp, Artificial Sequence
  Synthetic oligonucleotide
aactgtagaaaggcaggaggaggagggacg

SEQ ID NO: 49939 - DNA, 30 bp, Artificial Sequence
  Synthetic oligonucleotide
tcgatgtcggagaaggtaaacattgggacg

SEQ ID NO: 49940 - DNA, 30 bp, Artificial Sequence
  Synthetic oligonucleotide
cgcagcgatgaagtagcggcaccgtggacg

SEQ ID NO: 49941 - DNA, 30 bp, Artificial Sequence
  Synthetic oligonucleotide
aggaaaagtctggcatcgagtacaatgacg

SEQ ID NO: 49942 - DNA, 30 bp, Artificial Sequence
  Synthetic oligonucleotide
ttggctttcgagatgtcggaaccaaatacg

SEQ ID NO: 49943 - DNA, 30 bp, Artificial Sequence
  Synthetic oligonucleotide
acgtggatggcaaacaacattgggaatacg

SEQ ID NO: 49944 - DNA, 30 bp, Artificial Sequence
  Synthetic oligonucleotide
gggtaatggtcaggtcagatagagcatacg

SEQ ID NO: 49945 - DNA, 30 bp, Artificial Sequence
  Synthetic oligonucleotide
tcgggaaaaaaggagcaacgagcgcatacg

SEQ ID NO: 49946 - DNA, 30 bp, Artificial Sequence
  Synthetic oligonucleotide
taacgttagggtgggcctatatcggatacg

SEQ ID NO: 49947 - DNA, 30 bp, Artificial Sequence
  Synthetic oligonucleotide
cggtcaaaatggggtcttgcctactatacg

SEQ ID NO: 49948 - DNA, 30 bp, Artificial Sequence
  Synthetic oligonucleotide
atggtcatgttgaatgagatagcctatacg

SEQ ID NO: 49949 - DNA, 30 bp, Artificial Sequence
  Synthetic oligonucleotide
taccgtaagaggtcaggatcccagtatacg

SEQ ID NO: 49950 - DNA, 30 bp, Artificial Sequence
  Synthetic oligonucleotide
agaagttaacaaggttcaacgaaaactacg

SEQ ID NO: 49951 - DNA, 30 bp, Artificial Sequence
  Synthetic oligonucleotide
cgcgcaaattaactcacaagctaccctacg

SEQ ID NO: 49952 - DNA, 30 bp, Artificial Sequence
  Synthetic oligonucleotide
ctaaaaccagtgggttgaagcaaggctacg

SEQ ID NO: 49953 - DNA, 30 bp, Artificial Sequence
  Synthetic oligonucleotide
caagggaggcaagtcccaatagatgctacg

SEQ ID NO: 49954 - DNA, 30 bp, Artificial Sequence
  Synthetic oligonucleotide
tgtcctgagggaggtaaaccagaccttacg

SEQ ID NO: 49955 - DNA, 30 bp, Artificial Sequence
  Synthetic oligonucleotide
cgacgttccaaagcggaaggaggcaaaccg

SEQ ID NO: 49956 - DNA, 30 bp, Artificial Sequence
  Synthetic oligonucleotide
aggttaacttcagcgacagcttcccaaccg

SEQ ID NO: 49957 - DNA, 30 bp, Artificial Sequence
  Synthetic oligonucleotide
cgatagtttgaggcgaagcctgcagaaccg

SEQ ID NO: 49958 - DNA, 30 bp, Artificial Sequence
  Synthetic oligonucleotide
taggcatctgcctgccacgagggggaaccg

SEQ ID NO: 49959 - DNA, 30 bp, Artificial Sequence
  Synthetic oligonucleotide
tgatggatacttgacaagcatatggaaccg

SEQ ID NO: 49960 - DNA, 30 bp, Artificial Sequence
  Synthetic oligonucleotide
tgcgcttagcctgtggaccagaatgaaccg

SEQ ID NO: 49961 - DNA, 30 bp, Artificial Sequence
  Synthetic oligonucleotide
tatgggcagcaagcagcctataactaaccg

SEQ ID NO: 49962 - DNA, 30 bp, Artificial Sequence
  Synthetic oligonucleotide
tcgatggatcgggaggtctagtggacaccg

SEQ ID NO: 49963 - DNA, 30 bp, Artificial Sequence
  Synthetic oligonucleotide
gatgagcaacatgggagagaaacgtcaccg

SEQ ID NO: 49964 - DNA, 30 bp, Artificial Sequence
  Synthetic oligonucleotide
tccggacaagaacattggatacaaagaccg

SEQ ID NO: 49965 - DNA, 30 bp, Artificial Sequence
  Synthetic oligonucleotide
aaacgaaccatagggcgtccaaaacgaccg

SEQ ID NO: 49966 - DNA, 30 bp, Artificial Sequence
  Synthetic oligonucleotide
ctggagagtctgtagggaatgctaggaccg

SEQ ID NO: 49967 - DNA, 31 bp, Artificial Sequence
  Synthetic oligonucleotide
caatctgcggtgcgagaacgaggacggaccg

SEQ ID NO: 49968 - DNA, 30 bp, Artificial Sequence
  Synthetic oligonucleotide
ggcaagaagcggctcaatcagaccggaccg

SEQ ID NO: 49969 - DNA, 30 bp, Artificial Sequence
  Synthetic oligonucleotide
agggtagtcacacccagataccagctaccg

SEQ ID NO: 49970 - DNA, 30 bp, Artificial Sequence
  Synthetic oligonucleotide
aacacggagattaggacaaatcgcttaccg

SEQ ID NO: 49971 - DNA, 30 bp, Artificial Sequence
  Synthetic oligonucleotide
cgctgctggacaatcatcccacctaccccg

SEQ ID NO: 49972 - DNA, 30 bp, Artificial Sequence
  Synthetic oligonucleotide
tggcccgaacgaaatcacggctgaagcccg

SEQ ID NO: 49973 - DNA, 30 bp, Artificial Sequence
  Synthetic oligonucleotide
ctcagggctgacccgtccaaaatttgcccg

SEQ ID NO: 49974 - DNA, 30 bp, Artificial Sequence
  Synthetic oligonucleotide
acagccatacagaaaataactggaatcccg

SEQ ID NO: 49975 - DNA, 30 bp, Artificial Sequence
  Synthetic oligonucleotide
ctaccagcccaaaatcaacgcgagctcccg

SEQ ID NO: 49976 - DNA, 30 bp, Artificial Sequence
  Synthetic oligonucleotide
ggaggcgataggggttcaaatttgctcccg

SEQ ID NO: 49977 - DNA, 30 bp, Artificial Sequence
  Synthetic oligonucleotide
tacgtaagtatactgtgaagctcagtcccg

SEQ ID NO: 49978 - DNA, 30 bp, Artificial Sequence
  Synthetic oligonucleotide
gtgagattaagtgcatccgcgtcggtcccg

SEQ ID NO: 49979 - DNA, 30 bp, Artificial Sequence
  Synthetic oligonucleotide
atcattcgaagacctaaagtctccttcccg

SEQ ID NO: 49980 - DNA, 30 bp, Artificial Sequence
  Synthetic oligonucleotide
tggactggtcgcactggatactgtaagccg

SEQ ID NO: 49981 - DNA, 30 bp, Artificial Sequence
  Synthetic oligonucleotide
ggtgtcggtggtctaacatgtgttcagccg

SEQ ID NO: 49982 - DNA, 30 bp, Artificial Sequence
  Synthetic oligonucleotide
tgagacggggacagggttacgtcctagccg

SEQ ID NO: 49983 - DNA, 30 bp, Artificial Sequence
  Synthetic oligonucleotide
aatgatccgagtgccggcggacgttagccg

SEQ ID NO: 49984 - DNA, 30 bp, Artificial Sequence
  Synthetic oligonucleotide
gatggcctgtagtggaagagaacgccgccg

SEQ ID NO: 49985 - DNA, 30 bp, Artificial Sequence
  Synthetic oligonucleotide
ggtcgacgtgcctgtcctattcatccgccg

SEQ ID NO: 49986 - DNA, 30 bp, Artificial Sequence
  Synthetic oligonucleotide
atgcgatcagcgcagcaaaaacccgcgccg

SEQ ID NO: 49987 - DNA, 30 bp, Artificial Sequence
  Synthetic oligonucleotide
acaggctacgaatatgaaagtctggcgccg

SEQ ID NO: 49988 - DNA, 30 bp, Artificial Sequence
  Synthetic oligonucleotide
aaggtatgagcaactaacagggtcaggccg

SEQ ID NO: 49989 - DNA, 30 bp, Artificial Sequence
  Synthetic oligonucleotide
taacgtccaatacttaccggcgaagggccg

SEQ ID NO: 49990 - DNA, 30 bp, Artificial Sequence
  Synthetic oligonucleotide
aaccggcaccaaattgaccgacgagggccg

SEQ ID NO: 49991 - DNA, 30 bp, Artificial Sequence
  Synthetic oligonucleotide
acagtccagatattggggtcgcgttggccg

SEQ ID NO: 49992 - DNA, 30 bp, Artificial Sequence
  Synthetic oligonucleotide
tatcggtgcgaatgagcacgatccatgccg

SEQ ID NO: 49993 - DNA, 30 bp, Artificial Sequence
  Synthetic oligonucleotide
ctgcggttaagagcgtatatgtgactgccg

SEQ ID NO: 49994 - DNA, 30 bp, Artificial Sequence
  Synthetic oligonucleotide
cagatcgccaagaatgtgctatagctgccg

SEQ ID NO: 49995 - DNA, 30 bp, Artificial Sequence
  Synthetic oligonucleotide
tagaataacgaggtgccaagcactttgccg

SEQ ID NO: 49996 - DNA, 30 bp, Artificial Sequence
  Synthetic oligonucleotide
acggttatgataatgggtctgcgtttgccg

SEQ ID NO: 49997 - DNA, 30 bp, Artificial Sequence
  Synthetic oligonucleotide
ctccgctgaagattaagagtggtcaatccg

SEQ ID NO: 49998 - DNA, 30 bp, Artificial Sequence
  Synthetic oligonucleotide
gttaggtgggccagtgatacccagcatccg

SEQ ID NO: 49999 - DNA, 30 bp, Artificial Sequence
  Synthetic oligonucleotide
gcggactaggctaagacaagaaggcatccg

SEQ ID NO: 50000 - DNA, 30 bp, Artificial Sequence
  Synthetic oligonucleotide
atcgggcggttaatgtaagaaaacactccg

SEQ ID NO: 50001 - DNA, 30 bp, Artificial Sequence
  Synthetic oligonucleotide
tcataccgacatgctgtgcagagtcctccg

SEQ ID NO: 50002 - DNA, 30 bp, Artificial Sequence
  Synthetic oligonucleotide
gtacaaagataagttaagacgagtgctccg

SEQ ID NO: 50003 - DNA, 30 bp, Artificial Sequence
  Synthetic oligonucleotide
agctagggcaaaggtatttactgtagtccg

SEQ ID NO: 50004 - DNA, 30 bp, Artificial Sequence
  Synthetic oligonucleotide
ggctgactggaaaggttacacgactgtccg

SEQ ID NO: 50005 - DNA, 30 bp, Artificial Sequence
  Synthetic oligonucleotide
ctacacctgacgaaaaagtacatacttccg

SEQ ID NO: 50006 - DNA, 30 bp, Artificial Sequence
  Synthetic oligonucleotide
acgttctaaagaatgtattgatgtcttccg

SEQ ID NO: 50007 - DNA, 30 bp, Artificial Sequence
  Synthetic oligonucleotide
acgatgaaccgtctggtatgcggacaagcg

SEQ ID NO: 50008 - DNA, 30 bp, Artificial Sequence
  Synthetic oligonucleotide
gtagcagtatccaatccgagtaatcaagcg

SEQ ID NO: 50009 - DNA, 30 bp, Artificial Sequence
  Synthetic oligonucleotide
atcctacagcgtccagcactaaaagaagcg

SEQ ID NO: 50010 - DNA, 30 bp, Artificial Sequence
  Synthetic oligonucleotide
agtttgctgaaatcaaatggcagcgaagcg

SEQ ID NO: 50011 - DNA, 30 bp, Artificial Sequence
  Synthetic oligonucleotide
ctgaacgtgtttgggaaaccgggtgaagcg

SEQ ID NO: 50012 - DNA, 30 bp, Artificial Sequence
  Synthetic oligonucleotide
tcccagggcatccattcctaatatccagcg

SEQ ID NO: 50013 - DNA, 30 bp, Artificial Sequence
  Synthetic oligonucleotide
ggtactcggtgacgatataccttagcagcg

SEQ ID NO: 50014 - DNA, 30 bp, Artificial Sequence
  Synthetic oligonucleotide
catctgaaataagaaaagtacaacgcagcg

SEQ ID NO: 50015 - DNA, 30 bp, Artificial Sequence
  Synthetic oligonucleotide
agcagggaaaagagacgttcaatggcagcg

SEQ ID NO: 50016 - DNA, 30 bp, Artificial Sequence
  Synthetic oligonucleotide
catacagggcagacaagatcggcgggagcg

SEQ ID NO: 50017 - DNA, 30 bp, Artificial Sequence
  Synthetic oligonucleotide
ctcgaaactaatggaccgggactatgagcg

SEQ ID NO: 50018 - DNA, 30 bp, Artificial Sequence
  Synthetic oligonucleotide
caaggataaggctattacctattatgagcg

SEQ ID NO: 50019 - DNA, 30 bp, Artificial Sequence
  Synthetic oligonucleotide
tgatgaaacgacggacaacatagagtagcg

SEQ ID NO: 50020 - DNA, 30 bp, Artificial Sequence
  Synthetic oligonucleotide
tccgagaaaggcaaccgcggaaaattagcg

SEQ ID NO: 50021 - DNA, 30 bp, Artificial Sequence
  Synthetic oligonucleotide
ccttgatcggattcgtccaagatgttagcg

SEQ ID NO: 50022 - DNA, 30 bp, Artificial Sequence
  Synthetic oligonucleotide
gtagagagtcacaggttccgaagacacgcg

SEQ ID NO: 50023 - DNA, 30 bp, Artificial Sequence
  Synthetic oligonucleotide
cgtgcggatttgtctagccgaacgagcgcg

SEQ ID NO: 50024 - DNA, 30 bp, Artificial Sequence
  Synthetic oligonucleotide
tgcgggctagtacgtgtagtccgtgtcgcg

SEQ ID NO: 50025 - DNA, 30 bp, Artificial Sequence
  Synthetic oligonucleotide
gcagtccaaatggaagattaatctaaggcg

SEQ ID NO: 50026 - DNA, 30 bp, Artificial Sequence
  Synthetic oligonucleotide
atcgcaactggcaaagacggctgacaggcg

SEQ ID NO: 50027 - DNA, 30 bp, Artificial Sequence
  Synthetic oligonucleotide
aacggagtacgaaataccgggatcgaggcg

SEQ ID NO: 50028 - DNA, 30 bp, Artificial Sequence
  Synthetic oligonucleotide
ggatcattttcaaaattaggccgtgaggcg

SEQ ID NO: 50029 - DNA, 30 bp, Artificial Sequence
  Synthetic oligonucleotide
ctattaggaggcaattcaacagcaacggcg

SEQ ID NO: 50030 - DNA, 30 bp, Artificial Sequence
  Synthetic oligonucleotide
agctagctgctcggaagacgaactacggcg

SEQ ID NO: 50031 - DNA, 30 bp, Artificial Sequence
  Synthetic oligonucleotide
ggtgtcatcggtattcaatcgatgccggcg

SEQ ID NO: 50032 - DNA, 30 bp, Artificial Sequence
  Synthetic oligonucleotide
gtcagaagtcgtacacaagctaaagcggcg

SEQ ID NO: 50033 - DNA, 30 bp, Artificial Sequence
  Synthetic oligonucleotide
aacagcggatgatgtagatcacacgcggcg

SEQ ID NO: 50034 - DNA, 30 bp, Artificial Sequence
  Synthetic oligonucleotide
tgatcgtggactgatcggccggagagggcg

SEQ ID NO: 50035 - DNA, 30 bp, Artificial Sequence
  Synthetic oligonucleotide
tcactcatggtgcgtgttccaactcgggcg

SEQ ID NO: 50036 - DNA, 30 bp, Artificial Sequence
  Synthetic oligonucleotide
cagtggttggagtggtacaaggaaggggcg

SEQ ID NO: 50037 - DNA, 30 bp, Artificial Sequence
  Synthetic oligonucleotide
cataagtattcatgggaaacatagggggcg

SEQ ID NO: 50038 - DNA, 30 bp, Artificial Sequence
  Synthetic oligonucleotide
aggactatccacactaatgccggtggggcg

SEQ ID NO: 50039 - DNA, 30 bp, Artificial Sequence
  Synthetic oligonucleotide
aagacgcgatgcagatgggacgggatggcg

SEQ ID NO: 50040 - DNA, 30 bp, Artificial Sequence
  Synthetic oligonucleotide
cagacctttcgcgctgagcgagacctggcg

SEQ ID NO: 50041 - DNA, 30 bp, Artificial Sequence
  Synthetic oligonucleotide
cgatgaatggcagtctacgaaatgctggcg

SEQ ID NO: 50042 - DNA, 30 bp, Artificial Sequence
  Synthetic oligonucleotide
gacgatcgtgaggcgggagcgtctgtggcg

SEQ ID NO: 50043 - DNA, 30 bp, Artificial Sequence
  Synthetic oligonucleotide
attgggaaatccgaaagatgatgattggcg

SEQ ID NO: 50044 - DNA, 30 bp, Artificial Sequence
  Synthetic oligonucleotide
ggacaacgtgagggcgacatacgtttggcg

SEQ ID NO: 50045 - DNA, 30 bp, Artificial Sequence
  Synthetic oligonucleotide
acgcatcattagggagaaccgattttggcg

SEQ ID NO: 50046 - DNA, 30 bp, Artificial Sequence
  Synthetic oligonucleotide
cgctatcataacgagtcgaggcggaatgcg

SEQ ID NO: 50047 - DNA, 30 bp, Artificial Sequence
  Synthetic oligonucleotide
tcgtcggtaccagataatgcaatatatgcg

SEQ ID NO: 50048 - DNA, 30 bp, Artificial Sequence
  Synthetic oligonucleotide
tgcactagcggaggggtatgtaggtatgcg

SEQ ID NO: 50049 - DNA, 30 bp, Artificial Sequence
  Synthetic oligonucleotide
cgaaaaattaataggtgtgttacttatgcg

SEQ ID NO: 50050 - DNA, 30 bp, Artificial Sequence
  Synthetic oligonucleotide
ctgcgcgggctaggagacacttcaactgcg

SEQ ID NO: 50051 - DNA, 30 bp, Artificial Sequence
  Synthetic oligonucleotide
cgacgaagaatgcgcgatagatgtactgcg

SEQ ID NO: 50052 - DNA, 30 bp, Artificial Sequence
  Synthetic oligonucleotide
cagcaatccgtaacttgtggacaacctgcg

SEQ ID NO: 50053 - DNA, 30 bp, Artificial Sequence
  Synthetic oligonucleotide
agcgccaaagggcgtcaatacaacgctgcg

SEQ ID NO: 50054 - DNA, 30 bp, Artificial Sequence
  Synthetic oligonucleotide
gtagttgaataaaggtgattggtctctgcg

SEQ ID NO: 50055 - DNA, 30 bp, Artificial Sequence
  Synthetic oligonucleotide
gaccgagttcggtgtgtacattccagtgcg

SEQ ID NO: 50056 - DNA, 30 bp, Artificial Sequence
  Synthetic oligonucleotide
gaccgtatttgaatagacataaggagtgcg

SEQ ID NO: 50057 - DNA, 30 bp, Artificial Sequence
  Synthetic oligonucleotide
agaaaccagtcacgtagaaatattagtgcg

SEQ ID NO: 50058 - DNA, 30 bp, Artificial Sequence
  Synthetic oligonucleotide
gcgcacgtgaaagggataactacgggtgcg

SEQ ID NO: 50059 - DNA, 30 bp, Artificial Sequence
  Synthetic oligonucleotide
caacccgtaccagacatctgagggggtgcg

SEQ ID NO: 50060 - DNA, 30 bp, Artificial Sequence
  Synthetic oligonucleotide
cacttaatacggggatcaaactaaattgcg

SEQ ID NO: 50061 - DNA, 30 bp, Artificial Sequence
  Synthetic oligonucleotide
gaatgtgcaggagcgggagcgaatattgcg

SEQ ID NO: 50062 - DNA, 30 bp, Artificial Sequence
  Synthetic oligonucleotide
aaggaggccgaggggcgccaacaacttgcg

SEQ ID NO: 50063 - DNA, 30 bp, Artificial Sequence
  Synthetic oligonucleotide
gcactaaaagtacgagaaatacatgttgcg

SEQ ID NO: 50064 - DNA, 30 bp, Artificial Sequence
  Synthetic oligonucleotide
gtatggcccctaggatatacaagcaaatcg

SEQ ID NO: 50065 - DNA, 30 bp, Artificial Sequence
  Synthetic oligonucleotide
ggactgcacagcgagggaataaggcaatcg

SEQ ID NO: 50066 - DNA, 30 bp, Artificial Sequence
  Synthetic oligonucleotide
tatgagaaacgttaaaccaagattgaatcg

SEQ ID NO: 50067 - DNA, 30 bp, Artificial Sequence
  Synthetic oligonucleotide
ggtaaacggtcaaatcattgttacacatcg

SEQ ID NO: 50068 - DNA, 30 bp, Artificial Sequence
  Synthetic oligonucleotide
agccataacagtgcggggtgaccgacatcg

SEQ ID NO: 50069 - DNA, 30 bp, Artificial Sequence
  Synthetic oligonucleotide
aggtgccggctttattgttgtccaccatcg

SEQ ID NO: 50070 - DNA, 30 bp, Artificial Sequence
  Synthetic oligonucleotide
atcggggtatagtaactatgacaagcatcg

SEQ ID NO: 50071 - DNA, 29 bp, Artificial Sequence
  Synthetic oligonucleotide
gacataaaagactgacctactgtcgatcg

SEQ ID NO: 50072 - DNA, 30 bp, Artificial Sequence
  Synthetic oligonucleotide
ggcgagaccgttggggtcaagtgctgatcg

SEQ ID NO: 50073 - DNA, 30 bp, Artificial Sequence
  Synthetic oligonucleotide
agtcgagatccttgatttacaccgaactcg

SEQ ID NO: 50074 - DNA, 30 bp, Artificial Sequence
  Synthetic oligonucleotide
acgctatcgcctacgaaaatgcggaactcg

SEQ ID NO: 50075 - DNA, 30 bp, Artificial Sequence
  Synthetic oligonucleotide
ttgttacaggcaagtcggtgtaaggactcg

SEQ ID NO: 50076 - DNA, 30 bp, Artificial Sequence
  Synthetic oligonucleotide
aactaaaggcgcccaacgtcgatggactcg

SEQ ID NO: 50077 - DNA, 30 bp, Artificial Sequence
  Synthetic oligonucleotide
agtgtggaaggttagcgatcgtaggcctcg

SEQ ID NO: 50078 - DNA, 30 bp, Artificial Sequence
  Synthetic oligonucleotide
cgccggatggttcacaacgaccctagctcg

SEQ ID NO: 50079 - DNA, 30 bp, Artificial Sequence
  Synthetic oligonucleotide
tcacgtattaccgtctaaaatacgcgctcg

SEQ ID NO: 50080 - DNA, 30 bp, Artificial Sequence
  Synthetic oligonucleotide
cagggcagtaaccatcgtaccatcggctcg

SEQ ID NO: 50081 - DNA, 30 bp, Artificial Sequence
  Synthetic oligonucleotide
taaataccacatcgtgaaaatacgggctcg

SEQ ID NO: 50082 - DNA, 30 bp, Artificial Sequence
  Synthetic oligonucleotide
ccgaaaaagattgcgcggttaaatggctcg

SEQ ID NO: 50083 - DNA, 30 bp, Artificial Sequence
  Synthetic oligonucleotide
agaacaagcagagaatgcagtcaatgctcg

SEQ ID NO: 50084 - DNA, 30 bp, Artificial Sequence
  Synthetic oligonucleotide
ggagtaataggtagtccgaaaaagtgctcg

SEQ ID NO: 50085 - DNA, 30 bp, Artificial Sequence
  Synthetic oligonucleotide
aacacattgaattgttggatgatcatctcg

SEQ ID NO: 50086 - DNA, 30 bp, Artificial Sequence
  Synthetic oligonucleotide
tcgtaaaaaactgcaaaatcagcagtctcg

SEQ ID NO: 50087 - DNA, 30 bp, Artificial Sequence
  Synthetic oligonucleotide
cagggagagcgtcctgggcgtagtgtctcg

SEQ ID NO: 50088 - DNA, 30 bp, Artificial Sequence
  Synthetic oligonucleotide
caacgcttatcgggaaataaagaattctcg

SEQ ID NO: 50089 - DNA, 30 bp, Artificial Sequence
  Synthetic oligonucleotide
acgaatctctagttccgagtttgcaagtcg

SEQ ID NO: 50090 - DNA, 30 bp, Artificial Sequence
  Synthetic oligonucleotide
gccacgaaatgatcaataacacattagtcg

SEQ ID NO: 50091 - DNA, 30 bp, Artificial Sequence
  Synthetic oligonucleotide
ttcgaatcgaaatggatcttaaacccgtcg

SEQ ID NO: 50092 - DNA, 30 bp, Artificial Sequence
  Synthetic oligonucleotide
aacaccaataaatacagacatctttcgtcg

SEQ ID NO: 50093 - DNA, 30 bp, Artificial Sequence
  Synthetic oligonucleotide
gcgcaaagggcggccaaaaatataatgtcg

SEQ ID NO: 50094 - DNA, 30 bp, Artificial Sequence
  Synthetic oligonucleotide
cagccatccgaatgcactggcggtctgtcg

SEQ ID NO: 50095 - DNA, 30 bp, Artificial Sequence
  Synthetic oligonucleotide
ccgagggtttggcaattattgttggtgtcg

SEQ ID NO: 50096 - DNA, 30 bp, Artificial Sequence
  Synthetic oligonucleotide
gcacacatacgccactgaaagagcaattcg

SEQ ID NO: 50097 - DNA, 30 bp, Artificial Sequence
  Synthetic oligonucleotide
aaggcaggttggatcctaagggagcattcg

SEQ ID NO: 50098 - DNA, 30 bp, Artificial Sequence
  Synthetic oligonucleotide
tggttacgttgctggggagaatcggattcg

SEQ ID NO: 50099 - DNA, 30 bp, Artificial Sequence
  Synthetic oligonucleotide
acatgcgaactccagatcgatgattattcg

SEQ ID NO: 50100 - DNA, 30 bp, Artificial Sequence
  Synthetic oligonucleotide
gggcctaaccacagtgtaaagacgacttcg

SEQ ID NO: 50101 - DNA, 30 bp, Artificial Sequence
  Synthetic oligonucleotide
gtaccagtaacggacagagcggtcccttcg

SEQ ID NO: 50102 - DNA, 30 bp, Artificial Sequence
  Synthetic oligonucleotide
ggggaccactcccgtagtgcatcatcttcg

SEQ ID NO: 50103 - DNA, 30 bp, Artificial Sequence
  Synthetic oligonucleotide
tgctaatgcactacgtgtggtgtatcttcg

SEQ ID NO: 50104 - DNA, 30 bp, Artificial Sequence
  Synthetic oligonucleotide
gacgactggccagggtacatatcttcttcg

SEQ ID NO: 50105 - DNA, 30 bp, Artificial Sequence
  Synthetic oligonucleotide
cgagcgtcctcgctgttgccggaaagttcg

SEQ ID NO: 50106 - DNA, 30 bp, Artificial Sequence
  Synthetic oligonucleotide
ctggaagtttagattaacacatagagttcg

SEQ ID NO: 50107 - DNA, 30 bp, Artificial Sequence
  Synthetic oligonucleotide
gaggccagactattgtatgataagcgttcg

SEQ ID NO: 50108 - DNA, 30 bp, Artificial Sequence
  Synthetic oligonucleotide
gcaaaatgtcaaaggcaattgtgagtttcg

SEQ ID NO: 50109 - DNA, 30 bp, Artificial Sequence
  Synthetic oligonucleotide
ggacacaaggacagcgcaatgaaccaaagg

SEQ ID NO: 50110 - DNA, 30 bp, Artificial Sequence
  Synthetic oligonucleotide
actgtccgaggacaactcaatcgccaaagg

SEQ ID NO: 50111 - DNA, 30 bp, Artificial Sequence
  Synthetic oligonucleotide
agtgcgacaaggccgaggatttgccaaagg

SEQ ID NO: 50112 - DNA, 30 bp, Artificial Sequence
  Synthetic oligonucleotide
gcgtcacaaatttacttaaggttagaaagg

SEQ ID NO: 50113 - DNA, 30 bp, Artificial Sequence
  Synthetic oligonucleotide
gcagagcacggcaggtaaagtgaggaaagg

SEQ ID NO: 50114 - DNA, 30 bp, Artificial Sequence
  Synthetic oligonucleotide
taccgcgggtcgagcctctggtgataaagg

SEQ ID NO: 50115 - DNA, 30 bp, Artificial Sequence
  Synthetic oligonucleotide
taaaggaaaggagacatgcgaatttaaagg

SEQ ID NO: 50116 - DNA, 30 bp, Artificial Sequence
  Synthetic oligonucleotide
agtgagagcaaaaacattgcgtctacaagg

SEQ ID NO: 50117 - DNA, 30 bp, Artificial Sequence
  Synthetic oligonucleotide
tcgtgaacccatcgagtgagggaagcaagg

SEQ ID NO: 50118 - DNA, 30 bp, Artificial Sequence
  Synthetic oligonucleotide
agcgggttatgtacaagataactcagaagg

SEQ ID NO: 50119 - DNA, 30 bp, Artificial Sequence
  Synthetic oligonucleotide
tgggcagtcaagaccatgtctgcccgaagg

SEQ ID NO: 50120 - DNA, 30 bp, Artificial Sequence
  Synthetic oligonucleotide
agtgaaaagcggcgtacaagtgagcgaagg

SEQ ID NO: 50121 - DNA, 30 bp, Artificial Sequence
  Synthetic oligonucleotide
aaatgacatgcaataaaaaggcccataagg

SEQ ID NO: 50122 - DNA, 30 bp, Artificial Sequence
  Synthetic oligonucleotide
cggactcaagcggtggtccataaagtaagg

SEQ ID NO: 50123 - DNA, 30 bp, Artificial Sequence
  Synthetic oligonucleotide
gcatagcaatggggcgcattgggcgtaagg

SEQ ID NO: 50124 - DNA, 30 bp, Artificial Sequence
  Synthetic oligonucleotide
tggttacgttaaatgaggaccctcgtaagg

SEQ ID NO: 50125 - DNA, 30 bp, Artificial Sequence
  Synthetic oligonucleotide
ggtagcgtatacgaaataattctcgtaagg

SEQ ID NO: 50126 - DNA, 30 bp, Artificial Sequence
  Synthetic oligonucleotide
aaaggaataacagaaacgtcgggggtaagg

SEQ ID NO: 50127 - DNA, 30 bp, Artificial Sequence
  Synthetic oligonucleotide
ccaaaaaaaagtccaactgcatcgttaagg

SEQ ID NO: 50128 - DNA, 30 bp, Artificial Sequence
  Synthetic oligonucleotide
atgtacagtgagttgtactaagctaacagg
